United States Patent Application Publication US 2005/0118625 A1 - sequence listing, part 5

SEQ ID NO: 8719 - DNA, 759 bp, Homo sapiens
caatctctgccctcccagtttcaagggattctcaggtctcagtctcccaagtagctgggactacaggcacgagccaccacacccagctaatttttgatatttttagtaaggggaaatttttagtaaggggtcttcccatgttggccaggctggtcttgaactcctgacctcaggccgtctgcctggcttggcctcccaaggtgctgagattacaggcgtgagccaccgtgcccggcccatctctttgtttttgtactttatgttttaggagattacgtcagttttattttctattccttgtatttttaatttctgcaatcattttttaaaaaatttctagagtcctatttaatttcttctttttttaatgtggtgttctgttctcagttcatgaagcattctttttttcctatcgctaaagatttttattgatagtttttgggcttttttgaacatttagtttgtcctccaagttacttttttcgattttggtgtcgtctctcatgttagaagcttccttccagtgtctggtaactcttttgctttctgcttttatttataagtagggcaattaaaaagctaattggatttctctgtgcatgagtgtggagggtttatcaactgtgggctttgctgaaggatgatatagctaggttatttccttgaagaactcctggtatgattatcttttcaggtccttatacatggtgtggtcagatttgccgcccccgccccccccccccaaaaaaaaaaaaaaaa

SEQ ID NO: 8720 - DNA, 679 bp, Homo sapiens
atttagtcctggcgtgtggcacacgcctgtagtcccagctacttgggaggctaaggcacgagaatcgcttgaacccaggaggcagaggttcagtgagctgagatcgtgccactgtactccagcctgggcagcaaaagtgagactctgtctcaaaaaaggaaataccaaatgagttagcccatggatgaggaaggcattctgggagcattaggtcttcctacttaggtggttaatttcctggtcttcaaatctctttttagctcagttctagcaggtggcacgatcagcagcactagttggacaggggagccagattgttgtcctgacatataaaacatatctccaggccaggtgtggtggtgcacacctataatccaagcactgtgggaggctgaagtgagcagacagatcacttgagtccaggagtttgagaccagcccaggcaacatggtgaaaacccatctctacaaaaaaaatacaaaaatgagctgggcgtagtagtgcctacctatagtcccagccacttgggaggctgaagtgggaggattacttgagcccaggaggcagaggttgcggggacccgagatggtgacagtgcacttcagcctgagtgacaaaatgagaccctgtctccaaaaaaaaaaaaaaaaaaaaaaaaaaaaaaaaaaaaaaaaaaaaa

SEQ ID NO: 8721 - DNA, 572 bp, Homo sapiens
tctttgtgtttctggagtggcctttgggcgctttcatgcctattgttggtaaggaatatctggcgcttgcatcttgtcagtagcattccgcgagacgttgtttgagatgtgtggtactcaattgaagatgatttgaccgcccgtttggaaggacgttttggcagcctccgggttgctgggatctgtcaagtggatattgtcctaagcttggggattcgctggtaagcggtaatacatatggaagctacacatcagcgttctgagaaactgctttgtgatgttggcattcaagtcaaaggttgacactccctgttcatagagcacgtcttgaacacccccttttgtagtatctggaactggaaatttggagcgctttcagggctaaggtgaaaaaggaaatatcttcccatatataactggacagaagcattctcagaaacttgtttatgctgtatctactcaactaacaaagttgaacctttcttttgatagagcagttttgaaatgctctttttgtggaatctgcaagtggatatttggctagttttgaggatttcgttggaagcgggaat

SEQ ID NO: 8722 - DNA, 705 bp, Homo sapiens
atcctgagaccgcttggcaacatgcggagccccatcttacaaaacacaaaattagctgggcgttgtggcgcgcacctgtattcccatctactcaggaagctgagatggaagaattaattgagcccacgagttcaaggctgcagtgagtcgtgattgtgccactgcactccagccggggtgacagaagagaccttgtctcgaaaaggaatctgaaaacaatggaaccatgccttcataattctagaaagttattttcaactgataaatctatattcacccaaataatcaagggtgaaggtaaaataatacatttttagacaagcaaagactcaggggttacctccatgtgccctttttagggaagctgttggagaaaatactccagcaaaatgaaggagtacacaaaccagagaatgacatgaatccagcaaataggatccaacacaggcaatattccagctatggagctagctttaaaaaggaacagtaaaaatattaatcggttagctgggtggaatggcccatgcctgtagtcccagctactcaggaggctcagcagcaggacgacttgagcccaagagttccagaccagcctggccaccttagtgagatcccttctcttaaaaataataacttattgccagatttggggcatttggaaataagttcattgaagataaagcaaaagtaaaaaaaaaaaaaaaa

SEQ ID NO: 8723 - DNA, 767 bp, Homo sapiens
cttccgctggatgatcacaccctcgcttgctgcccaccctgccagcctccatgccacctcggtctgtctgctgcccatctggctgtctgtgcaagcaacttctggagcccggcaccactgggctgctggcctggaggagttcgggaaggaggatagaccaggaaataaagggtcaacagagctgtgtgctgcactgtgggctggtgggacgggcaggccgggtctgccctaaggataaatgatcacttactggggaagaaatgagagagcaggggcacccccctaggccagcacagcctgaggggtacagcaaaggggaccctttgctggcccctgaggctggagtctggcaccccttccccaatcccatagcccggtaatgactgggtccagagcctcgtgagaggtcaccgggatgggggaagtggcctctgtcagggccagggctcatgaatctcattctcttagctgggcgtgcaacagaccaacagataactcatcctaaacagagaaatgagaaagagtctgtgggtgggcctctgagggccacagaaaaccagacaccccacatgtctgtggattggagaggggcaggccactgccctctccaggaccaagccgggttcttggtccccaccctccctgcactccgcatctcctccccagcagccattctcccctttcccttgtgaacaaaagcctagttttgtgtgggcagcaatatagggtaaataaaaccacctgattctccaaaaaaaaaaaaaaaa

SEQ ID NO: 8724 - DNA, 773 bp, Homo sapiens
tcgggatactagggcaccatctccaatgtgagccacattcatttggtgccctctgtgtgcccagcacaatgctagtgtcagggtacatatgaaatgtacttgtatattggaggcttcaggtgcactagacctccaggaagtagccagcagggtgcccagacactgactatgccagaggaaccgcccctttgcagatgaagcaacctgcacaagagatggcagtcggctagcctttgcctgtctccagtttcacaactcaggtgcaaagacatgcatcgcaacggtgacacttactttaggccgggtgtcaacgacataaacgaagtcacttcctggattggctttcctaatggcctggagcatctgctcgtcctctaggcaccgggcactgaagccggacaggggctggctgctccggcagatggaggcctagggggagaggtcacagcaacacagcaccatcaggtaactgtacccatgagagacactctacgtgtgtctccagaacaaagagcccttggctcactgatagtccacctcggcttatgaaaacgtgatacagctttctggaaatcaagccttgtttattaaaattcaagtcaaaccactaatgggcaagcaatacaaagaacctgtctgtgcaaaatattaggaatgtgtagagatgtttagatagggtctaagttatgatattcaaaaccatttaaataatctactttccttttcactgatattgcttcattttcctgctgaaaaaaaaaaaaaaaaaaaaa

SEQ ID NO: 8725 - DNA, 549 bp, Homo sapiens
agaaagattcttcacacatctaagtcaaaatttcccaagtgaaaattgaatatgaagttcatgaaacttccaaccatcctagtatcctgccaccaggagtccaagtagtagatgacagtgccacagctatttctcaccaatgagtttaacatctccacattcagatcaaacaggccaaaagcagggtgtattatgcctgctctgaacagtgtactgtgggtctggtgaagctgagaaacattcttacaactatctggctcacatgtttcagtctgttgtctattatagctgagcaatctgtgttcctgtgttctgtaagtcacctaaaatacctacatcacaagtatgccaagtaatgaaatttccagagtatgcaaatttagcaattttaacaagcaccagcagatcctatttcttagtaacccactgcagtgttaggagacaacataaccataaaagagagaaattcagacagtgcctaaatggattaagagcagttgcagggctgagctggtctctgtccttagtcaaaaaactctcattaaaata

SEQ ID NO: 8726 - DNA, 728 bp, Homo sapiens
  misc_feature (274)..(274): n is a, c, g, or t
cccgtcaatcaaagcgactttgaactgtcccattacgtgcgacggagtttcacaagcctgatccatatgtctaaggacactttcagcagcctccatgatgtagtaaccaacacctggatttaataagaaccttttcacaatagggagagcctgtgtgcacacagacttactctcaggtcagttgagaatagccagtgttgatgtcacagaacaaggccccactcctgggtaaagtaactaaaaggcagagaaaatacaatgttgaagagcagcnaaaatgatatatactggtcattaagagcatgggcattgcaatcccagtgttaccacagaagagtttgtgtgatcttgagcaagttaacttctctaagcctcaattacctcatctgtaaaatgaggctatttctggtagctacctcatttttctatgaatgtttgatgaatagtataaaaagcacctatttagcacacatggtaccatgcttgataaatagttcctattattattattgtttttatttgctgaagcatcattgaaccaggcaacttctcatgatagcaaagtagagtttgggccaatgagtatattgtcaggtttccctcctggataatccaagctttataccagatgaagtaaatagaaaagaagaaaaataataaacaaagaatttttaaaatgtgcttctaatataaatggtctaaaagcagaaaagaaaaaaaaaaaaaaa

SEQ ID NO: 8727 - DNA, 111 bp, Homo sapiens
ctgtctccactaaaaatacaaaaattagccgggcgtagtggcggatgcctgtagtcccagctactcgggaggctgaggcaagagaatggcatgaacccaggaggtagagct

SEQ ID NO: 8728 - DNA, 692 bp, Homo sapiens
gatttgtaagaaaatagttgcttgaattattaaagttgattcttgaggatagatgtatgctcggtggcattgcttcggcatatgcaaatgatttaggtttcatttgggatcaattcccagaggccctcctttcctgtgatgctctgaatttggcaagctcaagtcagcccatctcctctccccacatccctccctttctttctttcctttttttgtacctccccccgcctttttgttgattggtataatatttttaaaagacaataaataaatatatcaacttgcttgtgagaaaccttgccatctataaggattctattgttcagttgtgatcaataaaggtgaacaaaggttttcacgttcttaaagtttagcaaaatcgaagtttagtaaaaatgtgcatgagatgtttgctaaaatatttatacagatactgggctgcggggatgctgcaaaactctgaaaatgtggtctcaggggtgcctttggggaaactgacagctgtaagatattcgtcggttcgaaggtaccaataaacttgctttagagcccagcaaatagcgtgaagttgcagtagattgtctaaagctacagtgaaagcacccaactccagagtggagaacgtgcgcccttggggcgcccagcgccagcgaggggagcagcgccccagcccctccgtaggctctgggccc

SEQ ID NO: 8729 - DNA, 662 bp, Homo sapiens
gaagaatatcctagttagaagtcaaaaagcacactgaaagaaagaaactcagaagcttcaaatatcaacctatatatagtgatggttgaatcataacataaggaagtaatgagttaaaaatatagataataaaaatttatcagaagataaactaaagattttgagaatcaggatactttgaaagaggaaataacacagcattgggaagaagaaaagaatagtgaagaacacaatttgtatggtcaacagagcatacccaaagatcagcatcagcgtcatattgatgaattcattttaataggtcttgcaatttttcaccttttcttggtatattaagcaataatttcatgcaatactatttaataaaagacagcttgctttttcaaaattgtgatccctaaagaattttcagtgaatcaagcaaaacatacaagggacaaaagacaagttgctcaactggacattttgaaaagaaaagtaaagtcaaattgttgaatagatcttagctcacttattccaaaactaaggatgcatatgttttgtttgtaagctattttcaacaagatagatatcacttaggtcacttgggtttcaaattgggtaactacattgagaaatctgaaaagtcatgaaattctactcataagaatacaagaaggtta

SEQ ID NO: 8730 - DNA, 686 bp, Homo sapiens
tagtaatggccaatgttagaatcagaattgtttcccatgaagctgattacgcagcacatacttactaactgccagagtgtcatccttgtgcttaagaaatgtactgacaagtaattggacagaccaataaacctgtagattttcttttctttctttctttttttttttttttttttttttgacacagtcttgctctgtcgcccaggatggagtgcagtggtgcgatcttggctcactgcaacctccgcctcccaggttcaagctattctctgcctcagcctcccgagtagctgggattacatgcacccaccaccacgcctagctaattttttttttttttttgtatttttagtagagacggggtttcaccatcttggccaggctggtcttgaactcctgacctcgtgatccacctgcctcagcctcccaaagtgctgggattacaggcgtgagccaccacgcccagcaaacctttagattttcatcttaaaaagataattctgctaccgtggggaagtgactaatataagaatgagacgaattatcatcagaacaatctcctagaagtgcctgtggaatttaaatgaatagtgatggagacctaagttaggaaaataacagtggaaaggtaaaggtggacatagattttttgcaggagcgattgaggagagaaaaaaaaaaaaaaa

SEQ ID NO: 8731 - DNA, 733 bp, Homo sapiens
ttgattatcttcaggccaaagacataaatgtatattcgttcccgttccagcccagtaatagtagcctctgtgacaccagggcggggccgagggaccacttctctgggagggagacccaggcttctcatacttgatgatgtagccggtaatcctggcacgtggcggctgccatgataccagcaaggaattgggtgtggtggccaggaaacgcaggttggatggtgcatcaatggcagtggaggcgtcgatgaccacaggggagctccgagcattgtcattcaaggtgtacaggtagatcttgtagtcagtgcctggttgtaaacctgtgatggtgtagcttctgacatctggcttgatggttctctggattggagtctggccattggctggaacggcatcaacttggaagccagtgatcgtctcagtcttggttctccagctaatggtgatggtggtctcagtagcatctgtcacacgagcccttcttggtgggctgacattctccagagtggtgacaacaccctgagctggtctgcttgtcaaagtgtccttaagagcatagacactcacttcatatttggtggccaccataagtcctgatacaaccacggatgagctgtcaggagcaaggttgatttctttcattggtccggtcttctccttgggggtcacccgcactcgatatccagtgagctgaacattgggtggtgtccactgggcgaaaaaaaaaaaa

SEQ ID NO: 8732 - DNA, 716 bp, Homo sapiens
ggaaaggatctttttggtccctaacagaagggaataactgctctgtaattctggacattagtgtattattcgtacagaaagtgtggttaccaaacaccacagccatttctgctcctggttccctgtgggaagccactttgctcactgaaggcagccaatacgaattcttgcctttccaggtacttttgcagtgaggaagggccatgtgacccagctctggccaatgggatgaaaggaaagtctatgatgggaatgcttggtttcctcctaagaggcagcttcttcctctcatgctccaaacttgcatgtgtctggggcagccaccttgtgaacacgaggcaacaaacatgaaatgaaaagaacccaaggatagcagagcccagagatggagccagctgaaggcctcggtgacacccctgagcagttgaacccacgcccaagcttcctgtttccaatcttcttgttaatgataaaaataaattcctctttaaccagcagttcattaggctttctgttgtttttggctaaacacacctgtctaattcacttactaactttcttgaaatgcagactttacttcttacatgtatatgtgtttctctacacacagagaagtacgtggaaagatagaaatcaagccaataattttggttatattggaagtatagggggagatcaaatgtggaagaaggagataaaaaaaaaaaaaaaaaaaa

SEQ ID NO: 8733 - DNA, 688 bp, Homo sapiens
agtaagcacctttaaatatctgaccaagaacattaactattggacaatgcctcttaaagtactgctatgaattgatgtggtaagatctacaatgctccataatttataggtgcattctggttacttgatttctatataggcagctcatagtgttaaaattataagaaatacagattattaaaacattttagattaaagtacacattttgatttaaatgagctaaacacagttaaataactgagtgacaaaatggttgtttagggcagtcttatctgagtgaacatatcttctgtatgttgctgtgtggtaatactctgacaacactgaaatcctagccctgtaagtacacacacggtgattcatgtttacagatacagatgttcaagacataagaagtgactggtgaatataaattactaaactgtaacaaaaaaaaaaaaatcaaaggcttgcaaaagacatcagtgaaaacagaatgaaggtaaatctgaaaatttaaaggaaaacataagaaagctagcttttggtatctggtatacttttcttctttttttttttctttttttttaaaaaaaaaatccagtttaaccttttcctagttttgcatttcaaaaaggtgcaccaaaacactgacattttttttctagctaaatctgtaaaacagagtatataaatcaaaaaaaaaaa

SEQ ID NO: 8734 - DNA, 604 bp, Homo sapiens
gatgagactcgattttacatgatattttgatagtagatatagaggatggtactgttttcatactttctctgttagaagaacgtttcacttgctgtaaatctactactaaaacgtccagttcttcctcccaagctcacttgtatttaatgcatatgctactaatcaagagtaggggaatctaagcacaatgcattcaaaaaactgaataacctcaccttcctctacttggaccataatgtccctggaatccgtgcctcttaatgttaccagaaagtctacgtgtaattcatcttcagttcaacaacatagcttcaattacagatgacacattctgcaaggctaatgacaccagttacatccgggaccgcattgaagagatacgtcctggagggcaatccaatcgtcctgggtaaagcatccaaacagttttatttgcttaaaaagattaccgatagggtcatacttttaacctctattggtacaacatataaatgaaagtacacctacactaatagtctgtctcaacaatgagtaaaggaacttaagtattggtttaatattaaaaaaaaaaaaaaaaaaaataaaaaaaaaaaaaaaaaaaaaa

SEQ ID NO: 8735 - DNA, 644 bp, Homo sapiens; identical to SEQ ID NO: 3500
  misc_feature (200)..(201): n is a, c, g, or t

SEQ ID NO: 8736 - DNA, 700 bp, Homo sapiens
caagggagagaacagaagacctgggaagtgcaaggatgaagcaattaagtttgagaaatgtgatgtgagtttaggaaagtggattttagccccagcagacttttagctggacacggacctaataccttgagacttcattgttcccattaaagaaaaaattatcttctgactttctaggggtttgggggtcccagatatcaaaagatttaaaccacttaggaggtaagttctaagttctctatggaactgcaattattatttttgatatttttgttatattataatgcataaacctgggactggctacatactttgcagagttcaggagaaaatgaaaaggagggattgcatgtacaaaattattaagactcacaggctggtaacagcaagacccttctgatcaggaggttctgcatgaatgcactggtcaccaggccatgaagcgagctctgcataaaccagcatcagaaaaaaaaaaaaaagaatttttttctgatgcttggtagtcaaatacagctgattgtatcagaatgcgagcaacacagggaagattgaggataagcccaacaagggcaggtatttttgttgtttgggtcactattttacaggagtacaggctgcccagttaaacatgaatttcagataaacagcaaagaggatggcgaggagtaagaaaaaaaaaaaaaaaaaaaaaaaaaaa

SEQ ID NO: 8737 - DNA, 706 bp, Homo sapiens; identical to SEQ ID NO: 3502

SEQ ID NO: 8738 - DNA, 706 bp, Homo sapiens; identical to SEQ ID NO: 3502

SEQ ID NO: 8739 - DNA, 704 bp, Homo sapiens
ctgttatctccgaacattgatggagataatttccagatgctgttctctatttcatgttattggaccatgttctgtataaacattaagatgtaaccattaatagtctgtaacaatcaacctcagtactgtcactacaatattacattctgcaaatgttattctgttgtatcagatacaaattttagtgaggtatctctaaggcacatagtagaaaacaaattggttaattactcaagttcctttcactgtgatttggaaatgatttaatctttatagaatgagaaccttttttggactagcttttttattaaaatggctcaatttgtgttgataaggattgcattaatatttaatagtgcttgcttttcctctgggcacaccattttgatcattaacccgagtacctttactcttagcaaactctagtttatgacaagtatttaaaatatttaaaacaagcttatgcagttcttaaggacgaaggtaaatgagatgtaacttaaaaatagtattgggaaaatgttgatagttaacattagtggatttagactagccaaatgacatagtaggctctgaaacatcttgtcaagtatatgtattttgtgcatgaatttttgctggaaagctgtctttctctgaaaaacacaacgttcttagaatgaaaagacaattataaaataattatcctaaaaaaaaaaaaaaaa

SEQ ID NO: 8740 - DNA, 671 bp, Homo sapiens
cattcttgtgttcactccactatattagacttattgtacctgttctttctctttatgataactatgataatgtgttcaaattaacccagttggaattaattaaattagcctacttggataaattacatatttggggtacatttctgaagacccatctcaacgttaaacgtttccttaatatattaataaaatcaggtgatggtctgtctcttctgaccatctgggttttgacactaattgctgttgatgagttctttctgttgaatttttaagttcaggtagaaacatcatttcgttctttatcattcatgcttcaattcacacttcctcactaaggagacttcaaacaaacagattaggaaaaattagctgggatataactccagggtatgttcatatactttaattagataatatgtttaggcttataagttaaatatttctagataaacttaattaaaaatagataacaccatcaagtagaagaaatagaattaggttttgccttcctggtgtaatcagtagatatgttgactaagaatcttttttgcccagatataacaggtgtgtaccgttcaatcaaccaattagcaaacatcttcttagtggttttgtgcttagccattgatattgcagttactaaggttacacaagatatataaaaaaaaaaa

SEQ ID NO: 8741 - DNA, 701 bp, Homo sapiens
acaaattcaagttgactgagtcgacagatacgtttttcttatacggattcttaccctaagttgttctggcatatttatctgtaggtatttcatgaatttggcaagtttgaatttaaaactcatgcttgtatctttttcctgttatcactatctctgagtgaggggattaggggagaagcaatagaaatctctgaaatgccataaactgtgacaagtcagtcatagtctatcagctggagaaaataatgttgctggtgagatgcagaccatgaaaccatcaagaacccacaagcaaaccactttagagaaaaaagcatgaaacaatttcttatctcagtttgagaacaacaccttttccaggaggtttgttatgtaacgtagatctgctttcactttttgggggcaggccaatactgaaaagaggagtgccagcccagtgaaaggaaggatgttcttttgatattgccagccattaccagatatgggagtgcaaaaaagccaattctcccaagatttatagttacgtctagcttgttgactcaagcagtttggaaaagcttcagaaatatagttcatccaaactaacccagactccaagtctttggaggaaaaaaacagtagaaataatatgcacatacatactattagagtcaaattctcttgattttaaatttgcaaagatccaaaagtaaaaaaaaaaa

SEQ ID NO: 8742 - DNA, 622 bp, Homo sapiens
aggagtcctcttgttgagagtgtgtctttcagtcttcggggatctgcactttgtggtggaaatgccagtgcagttcaccctcacagccagataattgtggaggtcagaacccaaggaagtggagtgagacctccactcccagtgggggacctggccacccatccttggggacctgagaaagcgtacttcaccttgggtgaaggctgggtggggccagagggaccagtgccctcctcagtgcttaggggcagagccacctgcagcaatggtatctgcatattagcccctctccaccttctttctcccgctgaatcatttccctctaagcccaagagctgtcactgcttctttctccctgggaagaatgcgtggactctgcctggtgatagactgaagccagaacagtgccacaccctcgccttaattccttgctaggtgttctcagatttatgagacttcttagtcaaatatgagggaggttggatgtggtggcttgtgcctgtaatcccagcattttgggaggccgaggtggggggatcccttgaggccaggagtttgagacaagcctgggcaacaaagcaagaccctatctctaaaaaaaaaaaaaaaaaaaaaaaaaaaa

SEQ ID NO: 8743 - DNA, 645 bp, Homo sapiens
attagtgtaccagaattctcagagacaccattaatcagtgtttagaggaggtgaatttatagcactgaatgcctacaggacaaagtgagaaagatctataattgacaccctaacatcacaattaaaagaactagagaagcaagaacaaacaaaatgctggcagaagacaagaaataactaagagccgaactgaaggagatagagacacgtaaacccttctaaaatcagtgaatctaggagctgattttttgaaaagattagcaaaatagactgctagccagacttaataaaaaagaagagagagaagaatcagatgcagtaaaaaatgataaagaagatattaccactgatcacacagaaatacaaactaccattaaagaatactataaacacctctatgcaaataaactagaaaatctaaaagaaatgaataaattcctggacacacacaccctcccaagacaaaaccaggaagaagtcaaatactgaatagaccaataacaagtgctgaaattgaggcagtaattaataggctaccaaccaaaagaagtccaggaccagatggattcatagctgaattctaccagaggtacaaagaggagctggtaccattccttctgaaactattccaaaaaaaaaaaaaaa

SEQ ID NO: 8744 - DNA, 649 bp, Homo sapiens
ttgcatctgtataatggtgaccattaagcttgagatgttctgaaagtatcaattgcttttaaatctgttgtaagtacagttggctagatctcctagctgagacttacacgttcaacttttgcctgtaagaatttgcacatgaatcgttcaatggttatactactagaacttaagatggccccaaactaaagccactacagttcatcatttggtgcttagtctttgtaagggctctctgtggtttgacttactccagctgaccgttaaatgagggcaaatcaccttaatacatgttcatttgattcataacaaggaaaattgggtctatgattttttgccatcttagcctaaagtattgctttagcttctggtcagcactgattaaatgtgaatagtgaagtggctatcctaaactggtttatctccacccacactatcatagatttcttaggtaaatacaattcttatctagtggtattctacttgtattcagaatactgtattaaaattttactatttcatttttgtattctgtgcttattttttttgctcacgcatgtatgcttagtataaatgtgtcacttctaaagttttgtctctgacttttagaaataaatttcagaaaaattgtttcaaaaaaaaaaaaaaa

SEQ ID NO: 8745 - DNA, 649 bp, Homo sapiens; identical to SEQ ID NO: 8744

SEQ ID NO: 8746 - DNA, 684 bp, Homo sapiens
atcataatcatttgaatttgattcatgacatccatttcccagtgcatacatctaagcctgaacccataaccctaatgatatgtgaattggttggttttatccatgtctctagcaatctatgtctgggaatatcatatgagtaacaagtgtctgttcatgccaaagtatacattcactgtctggtgatacctatatccatatagcatgtattatctatagcacttgatcatatgttatatacatgttgtacaagctctcaattttgttcatttattatcaaatgttttaaaatacaagtttggtatgtgatttggtaaaagatgccttctggatcttaagccagttgtcagtggaggtcctcagggctgctaatgtcaagacataaccctgttcctcaccatcatgataccagatacaggtgaatacataggaactatctgcctgtgtcctcaatctcccttcataacaagatgctgatttgtagggtacttggcaggttaaattaaaccagaagaggtgacttaataaaaaagggaatgacatttagggtataaagatctcataagaaatgtaatatgtaaattatatcttgctttatgttgtaaaatatacattgtttgcgctagaatagaaatgatttcttttcaataaaaagaaagaaggactctaaaaaaaaaaaaaaaa

SEQ ID NO: 8747 - DNA, 748 bp, Homo sapiens
cccctgtattgtctacagggctcgctatttcatctgggtggagttcatttccctctgtctgtctgttccagtgatgaagtttgtgacgtacagttcttttacccaaccccctgcataaccggtggactcttatgtgagagacccggcctaggctgactatctcctgggatacagatacttacgaaatgtaatttcactgaggccactacacatctgagaaggacaagttgatgtggggccagccatcttcatcctaaggctccggtgcaacatcctgtgtccctggaggcccaatttgacaaacccctgcccaaggtgagcatccatctagcagggggaggcaggtcttagcccatccgcatcgccctctagcctgggtccccaagagctaggttgcctgagtcactcgaggagctcagagcacataatcagactctccagagtccaggccctgcaaactatagtttggggacattcaccaggtggttctgatgcacagggaaaatccactccaattgtgcaaatagtgtatgcatggggagccttgaacccaaatcagcttaggcaaagtttacttgacatggcctgggtacttttaaaagaaaaactctggacaaattaaatttaacaggtttaactgagcaaacaatgattcaagaatcgggcaagcctcagaactctattaggtgcagagcaactccagggccgccttgtgattgcgcaacatttatagaaaaaaaaaaaaaaa

SEQ ID NO: 8748 - DNA, 732 bp, Homo sapiens
tatctctcaaatgttgtgttcagcctatcatccatcaaatcactaggaagcctatagaactataactgtcttaagaccccacctattctagaattaaagtcagattctctgacattggtgcctaagaatttgcattttaataaactcccaagggagttgcatacttccttggttgaatgcatactaaggcttagggagcattgatttgtgtctcaacttcagccaaagggccaaggattgatgtccagagtttgaaaaagagacgttctcagtcattgaacacccaggtgtgactcacatggcattgaggactgagtttcaggttagatgcctcctggggtttataaagcccaggcaatatttttgttaactttgtacaatttgaggtattgttggattcagttgagccaaagtggaatgaactcattcatgaaatcaaggatttcaaaagcacctttcctgaaaatactcagaaaatgttacacttagtgtgatccatttgtttattcattcattttttatgaacatttattgcataattttactgtgttaaaagctaagaatatgaagattaataatggagtccctgtctttaaagagttcattgtctactggggtagaaaagcttatatttttagaagtgtccacttttcagtagataccaaattaggacatttaatcttctcaagaaacctattttatattttcattttacaggttaaaaaaaaaaaa

SEQ ID NO: 8749 - DNA, 758 bp, Homo sapiens
ttgttttcaggtataaaatattttaagactttcaattagacaataatgtccttgagggccaagacgattgtttaccctcttttatctcccattccccattgctcaacatataacatggtgctgtgcatgaggagggaagcagcctttagaaaagaaaaatgtcctaggggtagtgttctcagtataactccatctgcaatatagtacaacctcagggagtttggttgatggttaccagggtcaaagaaccctcttgattgacagaaaactagataagaaccaagcttgggtttctctagacatcaaccaagtgaggaggctcagaccatggcagagaacagcaacccaatggtttttaaacagtgtcttttttcggtgaactattgaagagtaatttctatatgtctctttaaataagtgctttatctgtttagacatctgctataattaaagtataaagaaatccgccaggcgcggtggctcacgcctgtaatcccagcactttgggatgccaaggtgggcggatcacgaggtcaggagatcaagaccatcctggctaacatggtgaaaccctgtctctactaaaaatataaaaaattagctggacgtggtggcaggtgcctttagtcccagctactcgggaggctgaggcaggagaatggcgtgagcccgaaagttggaggttgcagtgagccgagctcgggccaccgcactccagcctgggagagagcaagactccatctcaaaaaaaaaaaaaa

SEQ ID NO: 8750 - DNA, 713 bp, Homo sapiens
gcttgttatggtttctgccagattctatgtcatatgtggcctggccaatgtccagttgtatgttcagtctcttggaaggaagggtattgactctgagagggccaccatcgctggaatgggggacacacagtacttcctccagctgcctacacccccctagggtcagtggcgcctgcctgtgagggtgagcccaatggctagagggctctgctccaagtcattgcttactacacccacaaacattcttcgttctttaaggcctaacttaaagcccagatcctacaggaaaccttgattagacccctctctttattaagcttcctaagatcaaaccctgcttttgtgtaaatgctgacctccttgcctacattttaaaaacctagagctgggcatgatggccccagcctgtaatcccagtgattcaggagactgaggtgggaggattgctagaagccaggagttcgagaccagcctgggtaacatagctagaccacatctcttaaaataaaatagttaatttagccaggcatgatgatatatgcctgtagtcccaactacttggaaggctgaggtgtgaggatctttgagcccgggaggtcgaggctacagtaagctatgatctcaccactgtactccagcctgggtgacagagcgagacccagactcaaaaaataaaaataaaaaccctgaatatcttcaaaaaaaaaaaaaaa

SEQ ID NO: 8751 - DNA, 634 bp, Homo sapiens
cccatcctgaccaccctcgttaaccctgactattttactctatacccccattatgtaaatccattgtcgcatccacctttattatcagtctcttccccacaacaatattcatgtgcctagaccaagaagttattatctcgaactgacactgagccacaacccatactacccagctctccctaagcttcaaactagactacttctccataatattcatccctgtagcattgttcgttacatggtccatcatagaattctcactgtgatatataaactcagacccaaacattaatcagttcttcaaatatctactcatcttcctaattaccatactaatcttagttaccgctaacaacctattccaactgttcatcggctgagagggcgtaggaattatatccttcttgctcatcagttgatgatacgcccgagcagatgccaacacagcagccattcaagcaatcctatacaaccgtatcggcgatatcggtttcatcctcgccttagcatgatttatcctacactccaactcatgagacccacaacaaatagcccttctaaacgctaatccaagcctcaccccactactaggcctcctcctagcagcagcaggcaaatcaaaaaaaaaaaaaaa

SEQ ID NO: 8752 - DNA, 725 bp, Homo sapiens
aatgagtcacttccatacatctacacaggacatgcacaccacttagttaccaatagcttcataaactgtttattttatgttctggtcaaatgcctgaaatttttttgttaaaatgggccattttctgatttgcctgaagccctgtgacaatttgggaaaagttgacgaggctaataatcaactatcagcaggaggaagaagaactcaaaatagcaaaattcctaagggaagcaggacagacagagtctagaacttccttccactctgagaatcctagcacacctcagaaaaaaaggtatattggaaacactggagaaggagatataaacaacagtaaccaacataaattcaccaggtaaggtttcagtatctactagggaaggtggttaaaagcatatgctgggagtcacattgcctggctatgctgtttactaataataccttgggcaagttacttaacctctctaagcctcaggttcctcatctataaaatgaataaaacaacagtacttacctcattaatattattgtgaggattaatcgatatgtcttcagtgcctagaacatgcttagaacatattaaatgtgcaacacaggtatctattggtagaaatttgaccccacaattctacctctaggaatttgtcctacaaaaataatcaggcaagtatgtaaagatgtatgaataatatgactcattaaagcatcatttgtaaaaaaaaaaa

SEQ ID NO: 8753 - DNA, 655 bp, Homo sapiens
acccatcccagtagttccttgatcttcctctgctatttccccacctaccgttactgtcactttgcctccttccagaatttaggatatttcctggcatttccactcctgccatcactgaagattaactttaatctctgttaacagcttagatgttaaggtgtaccttgttgaataggtcttaagtggagatcagtcattataaatgcagctgcctttaaaaataatgtggtgtataagtgaagtcaaggttgcttcttacagactgtttctgcaaaagcgaatagacccctgccattcataatgaaagttaaaatgctttgaggtgtagcattacctggtgctcctctttcacaggagataagagaagcacttcggtgtttaaatatacaatcatgtgaaagtgttgtcaccactgtagaatgtgttttgcagttaccatctcatcacatctaaaaaatggtatgtacagccaaatattcatatactcagagctactccctgttccttagttcactttcttcaattaaaaaaaaaaggaaaaaagatgtgaaaatgactaatatgttagtaccaacagtatcacataccaaaacaggtgattttaggctattgctatagaaaaagcagtaaaaaaaaaaaaaaaaaaaaaaaaaaa

SEQ ID NO: 8754 - DNA, 762 bp, Homo sapiens
acatggatcttaaacagtgggtgtacttaataaaatacatattgttcagaaaatgctaatgattcatctgaggtttcagcgagtcgtatttcttttttgctggaggcaagaccctccactggcaaaaacattatgaccctctgaagactgactcatcagtgtggtggttgctgaaggttggagtggccgtggcaatttctcgaaataagacaacagtgagggttgctgcgtccatggagactgcctttcatgaaagatttctctgtagcatgcagtgctgtttgatagcattttacccactatagaacttcttttgaaattggagtcaatcctctgatacagctttatccactaagtttgtgtaatcttctaaatcctttgttgtcatttcagcaatgtaaacagcagcttcaccaggagtacattccatctcaaactgcttctttaattcatccataagaagccattctggctgggcgcggtggctcacgcctgtaatcccagcactttgggaggccgaggcaggcagatcaccagaggtcgggaggttgagaccagcctgaccaacatggagaaaccctgtctctactgaaaatacaaaaattagccaggcgtggtggcacatgccagaggctgaggcaggagaatcgcttgaacttgggcggcggaggttgcggtgagccaagatcgcaccattgcactccagcctgggcaacaagagcgaaactccgtctcaaagaaaaaagaaaaaaaaaaaaaaaa

SEQ ID NO: 8755 - DNA, 790 bp, Homo sapiens; identical to SEQ ID NO: 3520
  misc_feature (472)..(472): n is a, c, g, or t

SEQ ID NO: 8756 - DNA, 698 bp, Homo sapiens
tcccttcctgatcaagacagatgaggaagtggaaccatgctgctcccagagaccctgaacggtggagagactctctggagttcagagagataggttgagctctaccttgccaaagttttccatctcgagggactataacctgaacgacatacttctccagctgggcattgaggaagccttcaccagcaaggctgacctgtcagggatcacaggggccaggaacctagcagtctcccaggtggtccataaggctgtgcttgatgtatttgaggagggcacagaagcatctgctgccacagcagtcaaaatcaccctcctttctgcattagtggagacaaggaccattgtgcgtttcaacaggcccttcctgatgatcattgtccctacagacacccagaacatcttcttcatgagcaaagtcaccaatcccaagcaagcctagagcttgccatcaagcagtggggctctcagtaaggaacttggaatgcaagctggatgcctgggtctctgggcacagcctggcccctgtgcaccgagtggccatggcatgtgtggccctgtctgcttatccttggaaggtgacagcgattccctgtgtagctctcacatgcacaggggcccatggactcttcagtctggagggtcctgggcctcctgacagcaataaataatttcgttggaaaaaaaaaaaaaaaaaa

SEQ ID NO: 8757 - DNA, 409 bp, Homo sapiens
attatctggttattgatatggttgatttcgtaggatttgacatcttctggttattactctgaacattgttaacacatccctaggttgtgtgcttagaagctttgtgaaatagcgaaagttcatattaagtgaatttatgaccagaatagctgtggcacattgtagagggagagtacaagcctttgagagtgagcatactatgaagtataactattactggagactcattatagaataatagtgtcactagagagtctgacaaacactctattttacaaggctgtaagaaatgttctagaatcctattgctaagcatatattccaaagaaaataaattattctacaaaaagacacatgtacccatatgtccatcacagtactattcatcacaggaaagacatgaaaccaa

SEQ ID NO: 8758 - DNA, 661 bp, Homo sapiens
attagatattcaacactaaaggatgggaagaaactaaaattattcacaaaaaggtcacaattctacctatcatcctttcaccctctggtagaaggcactgacattgataaaacgggttgggccagagtcccgtagaagggatgaaatgttagaggcacccacctacaactagaaaggaagtacacacaggaagtagcctgactctgagatcagtttagtatactcttcccaggaaactttgcttctaattcctggttgacagacagaacaactaccaaccaaaccagtttcaagaggtagaggaacaggtgactaagtatctggatagagaaaagaagagatgcttcctcagcaaaggggaatctgtttgagaaggaagtggcttatcattccccagaggaccttgcccactcctcctatatacagtgatatgtctggcagagctattgacaattcacaaacgtattcagcaaccacttagtgagcatttgctctgtgttagatcttgtgctcaataaggtggattcagataagcataagacatggtttctgcccataaccaggacacaccctagtaaaggagactgaaaaataaaatggaaattgtacttaaaaaaaaaaaaaaaaaaaaaaaaaaaaaaaaaaaaaaaaaaaaaaaaaa

SEQ ID NO: 8759 - DNA, 784 bp, Homo sapiens
  misc_feature (156)..(156): n is a, c, g, or t
ccctatgagatttaatgctgctctgatctgagagaaggcgagctcaggcgtgaatgtgagccatggggagtgcctgttaatacagatgcagcttccctcactctacaccactcacctcctgctgtgtggctccttacagctccatggctcagggtntggggacccctgctgaagtgcatcccaaaggaccattcccacaccccgtcttcatagcggtcaagtgccagccaacccacttagctccccaaggccaagtgccctctagcgtggccaagttctatccacccatcgcgaccaagtttaatccacgttagccttggagtccattggtgaagggtccaactttccctgggaaattccacccagcaaatgccggttttcccccatgggccaaggaacttccaagccactgccccctgggaataccccacctgtattccgcccaaatcgccatcctgttgtgaagttctatctccagggacccctttctttagccatattagagtccaaccaggagacataaaccactcaaaagtttaaagtggtaaatttaatacagagaattattcattataacaggggaacagcataatgagagactggctagcacaaagtaaagagaactccagagaatataggactagcccaggccaggcatggtggctcatgcctgaaattccagcaatttaagaagccaacacaggaggactgattgaggccgggagctagagattggcctggacaacacagtgagaccctgtctctatccaaaaaaaaaaaaaaa

SEQ ID NO: 8760 - DNA, 667 bp, Homo sapiens
ccagcactttaagagtagtgtgcccagatctgcacaaagtattctatatgtggacaaatcgaccttgtttttatctgttaacaccactgtatgtgtctggggtgtgtcaccagctttctttaaggtcttccagtgccaaagtcttcttctcctggcctttgcacatactttactttctgcatggaacacgctttcctctctttcacttgcctggttccctctcagttactcaggacgcaatttaaatgccatctcctcagagctgagtttcctgaccactctattttgagtaggtcacccctgatattgtctctcatagcaccacatctcccctatatggcatggaccaaaatatgtattaacctctgtagaaggctgtttaacatctaccttctccttccccaccataccataccgtgcatcaatgcagaagccatgtatatgtggttcacccatttgtccccagcacctggaacagtaactaacacatagtaaatgctcaatcaacatctactgaatgccaggaatgagtgttaatgagtccaggagaaggaggaaggtcaggggaagatgaagtaatgggggaagggaactaagataattcagtgtaaccaaaccactgatgaatgttgattaatgccatctagaacactcaaaaaaaaaaaaa

SEQ ID NO: 8761 - DNA, 641 bp, Homo sapiens
tagaagctggtggtttccaccgtcttccctgatctgtgggctgcaatttggcctaagaagggtacagctgtgttctggtacaacctcttgcggagcggggaaggtgactaccgtacaagacatgctgcctgccctgtgcttgtgggctgcaagtgggtctccaataagtggttccatgaacgaggacaggagttcttgagaccttgtggatcaacagaagttgactgacatccttttctgtccttccccttcctggtccttcagcccatgtcaacgtgacagacacctttgtatgttcctttgtatgttcctatcaggctgatttttggagaaatgaatgtttgtctggagcagagggagaccatagtagggcgactcctgtgtgactgaagtcccagcccttccattcagcctgtgccatccctggccccaaggctaggatcaaagtggctgcagcagagttagctgtctagcgcctagcaaggtgcctttgtacctcaggtgttttaggtgtgagatgtttcagtgaaccaaagttctgataccttgtttacatgtttgtttttatggcatttctatctattgtggctttaccaaaaaataaaatgtccctaccagaagccttaaaaaaaaaaaaaaaa

SEQ ID NO: 8762 - DNA, 724 bp, Homo sapiens
cagcttagcttctcctggttctgccattcaccatggcatgatgagacacagagtacatggtaagacatggccaatgataaagccaaagtagaagcagttgtcagatcatgaaagatgccttctgaaagagcttggccttaatagtgtagatggtgtaagactctcagctgtggaacaggatgatcagatttgtgttttgcaaaaatagcttcagcaacattatgaaggatggatcagaatgttcaagactgagattagtaaagcaaataaaaattctctagtcagaaaatcatgaggtcctgaacaaagactctgaaagtggcaatggaggggaaaggatatattcgaaaaataattaggagagaattcataagattgagtatggaaattgagggaaacagaaaagtataaaaatgagaacgtaggttgaccaagtagttaacggcataattgtataaaagggaagactgtaattattgtgggtcaatatactggagttcagtttagcacatgttcaaattagttgcccatgtaacatacaggtggaaatatctagtagccagggaaatacatgtttccaaaactcagaagaaagatttggaaacccaggtttgggagtgtgaaagatactgggatgtacatgctcaatacccatcccaaaccccttcttgcatgatttcctctcctgcagaggctacaatgttaaaaaaaaaaaaaaaaaaaa

SEQ ID NO: 8763 - DNA, 659 bp, Homo sapiens
cctgcttatgagggccaaacttctggcttgtgctcggaccctttctcgtactccactctgttttggcagtaaatcgtgtaggcctctgctttgagctgggtctttggatatttggttcatttagaagttcctgtattcctaataggatctgtttgattgtgatggctggcctccagtccttgtcctcctctaagatggacaggcacactgtccccgaagggtacacattcgggtgaaataatggtggttcgaatttacattttggtggcgaagatggataatcatctttgaaaagcatccgtagtttaaacaagcctccttcccacggagtccctttctttcccggaatggcgcactcccagttcatgaggttcatcgtgccatcgggattttttgttgggacagccacgaaaccaaatgggtggtctttcctccatgctttcctctcctgggcgagtctgctgagggcgatccccgacatgttcaaagtcccgatgaaggagctctgagaggcccgcactcaggttctgggtggcacgatgacttccccagtcagcagagcagaaatcgggggtggggttgggatcaaagaagccaaggcaggtccagtgtcgccagggcaccaggcttctgaagctgctagagccgcctgccctgca

SEQ ID NO: 8764 - DNA, 706 bp, Homo sapiens
tcaattgctggtgagcttgtagagcaactgaaactctcatatgttactggtagaaatgcaaaatggtacagccactttagaaaaaatttggccatctcttaaaaagttaaacatgcacttatccaatgatcccgccatcccactcctaggtatgtatcctagagagataaagctatggtccaaccaggacctataagccaaagtttaaccgctttaattggaacttggtaggaactgccaaatgaccttggaccattctttccaaccaggtccaaggaattaaccaacttgttgcttaatgcccaaccaccattgggaaccacttttcagtaataaaaaggaaaaaactacagatacttgcaacaatgtggatgaatcccaaatgtgttatgctaaattaaagaagtgaggccagacgcggcagctcacgcctgtaatccctgcactttgggaagctgaggtaggtggatcacttgaggtcacgggttcgagaccagcctggccaacatggtttgaaaccccatctctaataaaaatacaaaaattagctgggtgtggtggcacatgcccatagtaccagctactcaggaagctgaggcaggagaatcacttgaacctgggaggtggaggttgcagtgagctgagatcgtgccactgcactccagcctgagtgacagagcgagactctgtctcaaaaaaaaaaaaa

SEQ ID NO: 8765 - DNA, 727 bp, Homo sapiens; identical to SEQ ID NO: 3530

SEQ ID NO: 8766 - DNA, 727 bp, Homo sapiens; identical to SEQ ID NO: 3530

SEQ ID NO: 8767 - DNA, 638 bp, Homo sapiens
ctcttagaggacaatggcgttcagccacccgagattgagcaataacaggtctgtgatgccttagatgtccggggctgcacgcgcgctacactgactggctcagcgtgtgcctacctacgccggcaggcgcgggtaacccgttgaaccccattcgtgatggggatcggggattgcaattattccccatgaacgaggaaattcccagtaagtgcgggtcataagcttgcgttgattaagtccctgccctttgtacacaccgcccgtcgctactaccgattggatggtttagtgaggccctcggatcggccccgccggggtcggcccacggccctggcggagcgctgagaagacggtcgaaactgacatctagaggaataaatcgtaacaaggttccgtagggaacgcggaaggatcataacggagcccggagggcgaggccccggcggcccgccgccgcgcgcttccctccgcacacccacccccccaccgcgacgcggcgcgtgcgcggcggggcccgcgtgcccgttcgttcgcttcgctcgttcgttcgccgcccggcccgccgccgcgagagccggagaactcgggagggagacgggggagagagagagagagagagagagaaaaaaaaaaaaaaa

SEQ ID NO: 8768 - DNA, 741 bp, Homo sapiens
ggcagccacaatcgggagtcagagccagagtctgggacccatggtcgcatggagccctgagaatagagagctccctccagaggacccgggtcccgaggaacccctctggaggaggaaacgtccagcaccgagctggagactggcagtgtcccaatccgggttgtggaaaccagaacttcgcctggagaacagagtgcaaccagtgtaaggccccaaagcctgaaggcttcctccacgccaccctttccgcccccgggtggtgatcgtggcagaggtggccctggtggcatgcggggaggaagaggtggcctcatggatcgtggtggtcccggtggaatgttcagaggtggccgtggtggagacagaggtggcttccgtggtggccggggcatggaccgaggtggctttggtggaggaagacgaggtggcccctggggggccccctggacctttgatggaacagatgggaggaagaagaggaggacgtggaggacctggaaaaatggataaaggcgagcaccgtcaggagcgcagagatcggccctactagatgcagagaccccgcagagctgcattgactaccagatttattttttaaaccagaaaatgttttaaatttataattccatatttataatgttggccacaacattatgattattccttgtctgtactttagtatttttcaccatttgtgaagaaacattaaaacaagttaaatggtaaaaaaaaaaaaaaaaa

SEQ ID NO: 8769 - DNA, 741 bp, Homo sapiens; identical to SEQ ID NO: 8768

SEQ ID NO: 8770 - DNA, 636 bp, Homo sapiens; identical to SEQ ID NO: 3535

SEQ ID NO: 8771 - DNA, 687 bp, Homo sapiens
atgattcacccacctcggcctcccaagtgctggaatataggcctgagccaccgcgccagcccgagttctctcttaaatggcaatttagattcactgatgtccttcagacagaagtatcttcctttactttcataaagatatgaaacttcatttcaggttttttttgagacagtcttactgttctgtcacccaggctggagtgcagtgtacaatgatggctcactgcaactttcacttcctgggctcaaggaatccccctgccttggccttctgagtatctgggactaccagtgcataacaccacactcagctgattttttaaaatgttttgtagagatgggggtcttgcccaggctggtgttttgttttgtttgagacagtctcactgtgtcacccagggctggagtgcagtgagccgagatcatgccattgcactcctgcctgggtgacggagcaagactctctaaaaaataataaggtaaaaggagtacctgtggatgaaagcagcagctaacagctctgtgattcagctagacctagatattgtgcccattccttcccctcagtccattttctgtagcccctttaaaaaccaaaaaacaactttgaagtcactttgggtttaaaataaatagtggtaatttgtataatcaataaagagttcactctgcaaaaaaaaaaaaaaaa

SEQ ID NO: 8772 - DNA, 364 bp, Homo sapiens
gaatttccccgggtggccccccctttttttgttgtctttttttttttttttcttttttttttttttttttttttttttttttttttttttttttatttttagaaaaacagagcaagtttattgaaatttcaagctacatttggaaaatcaaaatccaaatcctggaaccatacatcaggataaggtgtcaaaaagtggaaagtgttcactctcacaaaacccgctacagacaagctttctgggcacacctcccaggctccattggatcaaagccatccccttgttcatccctcatccacagtaggacaccatccttctgttcacttgaaagttttccacaataattacaaaaaaaaaaaaaaaa

SEQ ID NO: 8773 - DNA, 690 bp, Homo sapiens; identical to SEQ ID NO: 3538

SEQ ID NO: 8774 - DNA, 750 bp, Homo sapiens
taggatgaggcagccaagctacatccagaattagtttgaggacctggaataggcgccaagaccccaaggagatctacacgcacttcacgtgcgccaccgacaccaagaacgtcagttcgtgttgacgccgtcaccgatgtcatcatcaagaactacctgaaggactgcggcctcttctgaggggcagcggggcctggcgggatgggccaccgccgactttgtaccccccaacccctgaggaagatgggggcaagaagatcacgctccccgcctgttcccccgccgcttttctcctctttcctctctttgttctcagctccccctgtcccctcagctccagacgtaggggaggggttgccacaggcctccctgtttgaagcctgcccttgtctgagatgctggtaatggccatggtacccccttctgggcatctgttctggtttttaaccattgtcttgttctgtgatgaggggaggggggcacatgctgagtctcccaaggctgcgtctggaggggcccctgcttctccagcctggacccccagctttgcccaacaccagcccctgccccagcccaagtccaaatgtttacagggagcctcctgcccagtcccccaaccccagccgctcggaggccccaaaggaaaaagcacaagaagcgtgagacgccaccattcctggaaaccacagtccacctgctcattctcgtagctttttaaaaaaatgaaagtaaaggaaaaaaaaaaaaaaa

SEQ ID NO: 8775 - DNA, 750 bp, Homo sapiens; identical to SEQ ID NO: 8774

SEQ ID NO: 8776 - DNA, 180 bp, Homo sapiens; identical to SEQ ID NO: 3541

SEQ ID NO: 8777 - DNA, 678 bp, Homo sapiens
agagtaatgtggttgtcagattacagactttgtaatgcctaagattttgaagaaatagaacctgtagggtgttggcaaggacgttagtgtcatgttagatttgtaattagttttgatgtgtaagaaatgatgttttatgctgtaagggctcgtctcgtccagccacaaatgaaggtgaagttgtttgggcacgtaaactaagttggtcaagttggggcctgctgctgaagtagatgttataccactggtggtgtatagcgcctataactcgctgctgttgcactaatagtgttttagataagtttacattagagcactagagctcgctcgtgtaatagagagtgttgctcttgtggaataaatcctcttcctttcctctaaggccttggccacaattctttcttctggggccaattccttaaggccttttaaggaaggaactaaggaaaaagccaagatttaagaactgtaaagaaataatactagctttgagtttttaaaaaaaatactgaaatcccatctctgtatccaaatcctactacacatttgataataaatctgccaaactgagttatggaatatgagctgccttttaaaatccttattctcctgctgaaggtgttacctcaccaaataaaaatatttgcagctgcagccaacatgaaaaaaaaaaaaaaa

SEQ ID NO: 8778 - DNA, 385 bp, Homo sapiens
gtccacggtctccttaccccagggggtcgcatccctagccgcttcactgaccccagctcttcccttgctgcagccgcacctgcagctccagggagttaactcttcttctgggggactgagaactgtagaaagccacacactactacatcccttcacaaagagtatatgctagtttcttgtagatattcacagctcattttagagctctgtacataatgttgtgggtctttgttttgttgttttgtttgctttgggatcttgttggatgcacttagatatggaaaatggaagccaaattttatctttaaagactgtattttcaaaataaaactttttcttgtttgtttcaaaaaaaaaaaaaaaaaaaaaaaaaaaaaaaaaaaaa

SEQ ID NO: 8779 - DNA, 441 bp, Homo sapiens
gcaccaagaataagccatgaagtcaactggcttgggtgctggtatctcctctaagtaaggaagatgctggagaatatgagtgccatgcatccaattcccaaggacaggcttcagcatcagcaaaaattacagtggttgatgccttacatgaaataccagtgataaaaaggtgaaggtgccgagctataaacctccagaatattattagtctgcatggttaaaagtagtcatggataactacattacctgttcttgcctaataagtttcttttaatccaatccactaacactttagttatattcactggttttacacagagaaatacaaaataaagatcacacatcaagactatctacaaaaatttattatatatttacagaagaaaagcatgcatatcattaaacaaataaaatactttttatcacaaaaaaaaaaaaaaa

SEQ ID NO: 8780 - DNA, 441 bp, Homo sapiens; identical to SEQ ID NO: 8779

SEQ ID NO: 8781 - DNA, 734 bp, Homo sapiens
gagaatggaagaataaaggagagagaaattctgctcaaatagtacggacagcggtaaagaacatcggacatgaaatagcccgtaaagagtatccctttcgatgaggctgttaaattaatccagatttgctgagagggcacggcaaggtcgcctaagggctttattcatgaagcaaatctatctgcaagaatatagagcaaagcaatccaagatgcttggcaagaaagtgacagatacctgggctgctgcactccgcattcagaaggtttggcgacgtttccatcaacgtaaggaaactgaaaaactgagagaagaggagatgatcttcctgggtatgaatccacctcctctctttaatgaagtcagtgctacagtaatccaggctgaaaaggtggaccgcctgcggaatgaggtgcagataaagcatgaagaggactacagggaagccctggttaccatcaaggatgacctaaagttgatagaaaggcgtggaatatcaagggaagaacccttcaagaccagatccggcattggttcatcgaatgcagaaatttaaccgggacatttcctgactaccctgacgttgaagaaggagggtcagctattattttttctgacaagaccatacaacaggttattgaggatatcatagcaaaccaagaggaagaagaaaaaaacaaaaagaagaagaagaaaaaggaaaaacacccaagaaagccaaaaaaaaaaaaaaa

SEQ ID NO: 8782 - DNA, 806 bp, Homo sapiens
tccccaccggcactcagttatgcagatgatcacatttatggagattattattggagcctaattgttaggtagcccttactacactcaacggtttggatcctagaaggtaacctaaatggcttataaatgtcagagcattttttaaaggtacagtatatggggattgtttcgttttttctagcagggggaaccttagttaataataaagatactacttatttgagttactgatacagattcatttaaggcttgtgtgcaaattttgtctcaatcttttttccctccatgattttcctatgtgcttcctctggcattcactgtggttttggtaaataattgccttttaaaggattaaacaaatgaatgctacaaagtgtatgttcaagaaaattaaatggtaccactcttccacagtttggaataattttataattgtaaagatagaaattatattgataagtaaatatgtaaaattgtaaatatgtaaaaaaaagaatggtgtctgctgtgcatggcattttatatgttaattttttagtttaaaatgaagtatattgaatgtttgcctttagcaccattttatttggtttgtcccactaaaatgactcgagaagtgtttagacaaactccccttaagatgtgcactccatctttaagaacgtgttagccttaactttgaggttctatatagtcagagactatgacaccactaaggttcagaataaagtttaggccacataaaattgctgtttaatgtagtcgatggaagactttaaactatgaaaaaaaacaaaaaaaaaaaaaaa

SEQ ID NO: 8783 - DNA, 660 bp, Homo sapiens
gacattaaggtgacgaacaatatagaaatgtaatgcaactgtttgaaaatgtaaattattctgtagacactttcaatgggggttggcattgtccttctagtgccgtcaatttgagataatgattgtactgccatgagtaagtatagaaatttcgacgaaatgtattttcaacaaattatgtgtgtcagtgagtttttcattgataattggtttaatttaaaatatttagaggtttgttggactttcataaattgagtacaatctttgcatcaaactacctgctacaataatgactttataaaactgcacaaaatgtagaaggttgcacccacatataaaaggagaataatggcacataacactccaatgatagttttcccgtttacatagggaataacccaggataaataccggttaaacttcttggtcccagtaaccaagagttgattcatatggacagtatgatttattgtttatttttttaaccaaatacctcctcagtaatttataatggctttgcagtaatgtgtatcagataagaagcactggaaaaccgatcgtctctaggatgatatgcatgtttcaagtggtattgaaagccgcactgatggatatgtaataataaacatatctgttattaatataaaaaaaaaaaaaaaa

SEQ ID NO: 8784 - DNA, 690 bp, Homo sapiens
gaaactacagccgagagagagtgcaatttgataagggaaaaatatatagtccgaagtattccagcaaatatccttcaaacatgaagaaggagaaataaagactttttcagacaaatgaaagttgagggatttcatcacgccagacctgtcctgcaagatcaatagagttctctcatctgaaataaaagtacattaagtgatcaataagaaatcactctgaaggtacagaattcactgttaacgtaagtatgcagaaaaatacagactattttaactctgtaattgtggtgtgtcaacttcatatcttgagtagaaagactgaaagacgaacctagtcaaaaataatacctactacaacttttcaagacattgtataataagatataaatagagaaaacaaaaccttaaaaagcagcgagatacaagttcaagcatatagtttcttactagctttctcctttgcttgtttatcagtcctgctcttatacaatcagtgttaagctgtcctcagatttaacaatatgtgggttatcaagatagtcttggcacagtctcatgttaacttgaaataaaaaaaaagaaataaaacaaataaataaaaaataaaaagcaagaaaatcaaaccatattaccaggaaaaaattaccttcactaaaaggaagactggaaggaaaacaaaaaaaaaaaaaa

SEQ ID NO: 8785 - DNA, 192 bp, Homo sapiens
ccacttcgcctcagtcccaactccttttccctatttccgttctcctcctgtctttaaagcctgcctcttccaggaagacccccctattgctgctggggctccccatttgcttactttgcatttgtgcccactctccacacctgctcacctgagctgaaataaaaatacaataaacttaaaaaaaaaaaaaaa

SEQ ID NO: 8786 - DNA, 780 bp, Homo sapiens
  misc_feature (350)..(350): n is a, c, g, or t
ctgtgggagataagtggttggccacatagtggatacatgagtatggacagggattcctgcatgacccttgcagcgtccaagccctgaaagactgagctgttggcaggagagaagcgtgtggagtccgtgtggctttccagagacagtcaggaccgagaacctgggctaggataggagaagaacagagcagctctacctgtgaatggagagccagtgctcagctctgctctgtgtgccgtgcctcactcaatacagcagagcaaggagagtatgtttagtcaggcagagctgatcgacgtgatgaaatcatatcagtattgagtctgcccgccacgccgaccaggtacatnaagtagtaggactgccacagctacagagagggaggaggaggtagtaggacgtccctgagaggagaattttgctggatttcagatactctgctgtttgggacacaggacttatctcacacatgtctaccgaggtctcagatacatgtggttctttgtggcacttgtgaaccttgaccacagggaccaagaagtggccaatgaggacacctgcaggaggggctagcctgactcccagaactttaagactttctccccactgccttctgctgcagcccaagcagggagtgtccccctcccagaagcatatcccagatgagtggtacattatataaggattttttttaagttgaaaacaactttcttttctttttgtatgatggttttttaacacagtcattaaaaatgtttataaatcaaaaaaaaaaaaaaa

SEQ ID NO: 8787 - DNA, 93 bp, Homo sapiens
ttgccaaatacatgaagcttcatgcacttaaagaagtatttttagaataagaatttgcatacttacctagtgaaacttttctagaattatttt

SEQ ID NO: 8788 - DNA, 709 bp, Homo sapiens
tggtctctgagtcatgttaatcgatgaattctcatttttgtgttaagccagtttggattcgatttcccatcactctccactaggaaatttttactgattcaggatagttagccagctaggaagagccagctctgcagcccactgtgggtgacagcgcctaggtcaggagatcttagcaagcctgcagataggggcagcagagggaagctggggcaagtggcttcattcataaaggggaagactatcaggaaggcaagcagagcccgtcagaagccagccctggaaaaagaaaaaggctctaggtcagcaagtgaatgtgatatttttcactttgaagatgggagccaggggaatgaaaggagaaaggaagaaagaaatcaaacccatgacataaaaagaatgcctatgcccttctgagtcagacacttacaggtaatccaaaaacttgagaaaaaaattgctgttatacattaccgttatgtcaacaaatcccttgtagctttgaatatactgggtaatttcctctgaggatttcttactccgaagaaattcacatctgtaattaataaatataattaaaatttaccccagtactgtgatagagctgtcctatatcacaatgaacatttataaagacgtattgaattgttgaattttattatacttcaataaaattgccaaaaaatttaccacaaaaaaaaaaaaaaaa

SEQ ID NO: 8789 - DNA, 770 bp, Homo sapiens
ggtatccgcacattatgattatgttctctgtttaaacctgtattaataggcaaatattgatatatgctcaagcagatgttttctcttgaaaagtattcaaatatgttaaagatgtagtttctagttcattcatgttctctgttttgactctgttgagtacatatactgacagctcatttatccatttttcctactgttgcaacatagattgcttgtataattcttctaattactaacaatgctggtatgaaattgttgtgtatatctctggtagatatgtgttatttcttttttgcaatgctagattataattatttgtctaaggtggagattaccagggtagactcgctctggccgtatgtaatgatgtctgtggctacataacctgccaacacttagtcttatcacacattttattttaaaatcaatatgtaaaaaatactaatttacttggtagtaatttaaatttttctgattattactgaggttgaatatgttttcatatgtttactgaatattcctgttaattttctcatgaatttcagttaatgtttctgttgattttattaatttgtagtggttttgaaacatattctagaaaccaatattttgtctgttgtatgtgttacaaatatatttattttgtatagcttcttcatatttagtacttttacaattttaacagtaaaattagtttcatgttttatagctataattattataacttttaaataaatatttcctcaattaaaataaaaaaaaaaaaaaaa

SEQ ID NO: 8790 - DNA, 711 bp, Homo sapiens
tgcagagctgcagttctcggtcccacagcccaagcagatagctcatggctagcatatgggcactttacagaatccagttgtgcagccagaatgaaatgcaccagtctggctttaaaccaactgggactcatccctggggtgaaggtggctgggaattagacaagagtgtgtgttaccaaaaggcacatgcatgctgtcagcaggagaatgaggagcactggttctgggcagcagtgtcagggctccctcaggcccctgattcccagcccacagcatctttctactcttgcagacagagttccttggagactgggcctgcattcaggcagggatgcagaggggtccctgcctgcagcacccagagctgaacctgaagctacaaagatgggctgatgaggtggcccatgaggtgtcagcaacatcccaaccccctgggtctccccagtgagtcagggcactgatttgctatagctggagctacatgcacctctcctcccctcagccaccttttaggggagaaaggagggcagatttgtaacctctggttctctgcagggatcctgggctggaagaaagttcataaatggatgaatgccttttaaaactccagcttttccaagcatcattcaccaaagcatttggttaggcttagagagaaaagctggatatgagaaaatagaatgtaaaataggagggaaaaaaaaaaaaaaa

SEQ ID NO: 8791 - DNA, 663 bp, Homo sapiens
cgatgaaagactgggcctattcacaacagctctcgtgccctcagtggtcaggcgtgcaattttggtctgcgccacataaccattctgaagctgtttaggcgttggagaggaagttgggggagtgttagaactgttcccaattaatgggagctctgttgttgagcgagaagacgtaccagcccatttggtgaaagacatgtcgtaactattgttcaagtgagcccggagtacttctccatgcttctagtcggaaaagacggaaatgtcaaatcctggtatccttccccaatgtggtccatggtgattgtgtacgatttaattgattcgatgcaacttcggagacaggaaatggcgattcagcagtcactggggatgcgctgcccagaagatgagtatgcaggctatggttaccatagttaccaccaaggataccaggatggttaccaggatgactaccgtcatcatgagagttatcaccatggatacccttactgagcagaaatatgtaaccttagactcagccagtttcctctgcagctgctaaaactacatgtggccagctccattcttccacactgcgtactacatttcctgcctttttctttcagtgtttttctaagactaaataaatagcaaactttcacctaaaaaaaaaaaaaaaaa

SEQ ID NO: 8792 - DNA, 541 bp, Homo sapiens
gtataggtcatgttccatatatgttataccttgtatgatagttattgttgttacatatgagctatgtgttgatgttgatagtttttcttctttttttttgagacggagtctcgctctgtcgcccaggctggaatgcagtgagctgtgattgcaccactgcactccagcctgggcaacagagcgagacccggtcttaaaaaaaaaaaaagaatgtacaggtatttgacttgcacctataaaattaatgtgtgtttattttcccattttagggcactaaattcaaagaactacaagacttcttcagtaccatcctattagcaactggaagacaagtagctttctagatcttaactatgagtaattcactatcaagagctaattatttgaaaaaatataagatgttatggagcagatagctcaagcagttaaaagaaattctgcaactctaattctcttccttattttaatactactacttaataaatagtatttgctaataaaaaaaaaaaaaaaaaaaaaaaaaaaaaaaaaaaaaaaaaaa

SEQ ID NO: 8793 - DNA, 773 bp, Homo sapiens
acgtagctcgcaaggaaactgtttatatgaagaagtaagtgctgggagtttacctggctttttaaatgcttatacctagttaaagaaaggaaagaatcctaacggatgaaataactgaatttggaggctggagtaatcagattactgctttaatcagaaaccctcaattgtgtttctaccggagagagaatgtatttgctgacaaccattaaagtcagaagttttactccaggttattgcaataaagtataatgtttattaaatgcttcatttgtatgtcaaagctttgactctataagcaaattgcttttttccaaaacaaaaagatgtctcaggtttgttttgtgaattttctaaaagctttcatgtcccagaacttagcctttacctgtgaagtgttactacagccttaatattttcctagtagatctatattagatcaaatagttgcatagcagtatatgttaatttgtgtgtttttagctgtgacacaactgtgtgattaaaaggtatactttagtagacatttataactcaaggataccttcttatttaatcttttcttatttttgtactttatcatgaatgcttttagtgtgtgcataatagctacagtgcatagttgtagacaaagtacattctggggaaacaacatttatatgtagcctttactgtttgatataccaaattaaaaaaaaattgtatctcattacttatactgggacaccattaccaaaataataaaaatcactttcataaaaaaaaaaaaaaaa

SEQ ID NO: 8794 - DNA, 744 bp, Homo sapiens
agcctcggggagtgtggactgctccttccattcccgtcaggacgttgatctgaaaaacactgtagaggaagatgagttgaggacagcttttttaaaggcaatgtgatggtctttgctttcttatttctctttctctgcgttgttaattttgaagatggaggagctaggggctccagaaagaatcttacacatgtgttgaagacattgatgtcatagggagcggggagctgcattcccttctgggctgttactgctaaatctcagtatgaacagaccaggcggaaagcttggtggccaagcagtctgtgtgcttccccgctgatggagaacgttgcgttgttcacaatagggcctcatgggtgtagccgcatggcagacccatggctggcgcagctgcctgttgccgtctgtcttcagtaactgctgctctgttaactgttctattctgatactacgcgtgttgttttttacaacaggtatgtttttgtttcagaaatatgtattgcttttctcatattttttgcaaattgtattgtcaacatgggtcatttaaagtcctgtatgaaccataacctgctgtggtacctttgtacatgtttgattctgtattctttattccagtgtggcatatgtgcccctctgtatcttttgagaagtgcggaataggttgcttctaccacctgttcttaatgtaacagtaaaagttttcacatttttctcagaaaaaaaaaaaaaaaaaaaaaa

SEQ ID NO: 8795 - DNA, 719 bp, Homo sapiens
ggtagataagcaaacttataagtgggctattgaaggaaaagttacaagctaagattccagaagcatttggtccaaaggatagaagcatctaaaagtttagggctcaagatcaatctttacagattgatattttcagtttgtaatcgactggactgcagatgttttttcttgttaacaaactggaattttcaaacagattatctgtatttaaatgtatagaccttgatattttgtccaatactattttttaaaaaattgtatgatttacatatgaacctcagttctgaaattcattacatatctgtctcattctgccttttatactgtctaaaaaagcaaagttttaaagtgcaattttaaaactgtaaattacatctgaaggctatatatcctttaatcacattttatattttttcttcacaattctaacctttgaaaatattataactggatatttcttcaaacagatgtcctggatgatggtccataagaataatgaagaagtagttaaaaatgtatggacagtttttccggcaaaatttgtagcttatgtcttggctaaatagtcaaggggtaatatgggcctgttgtttagtgtctccttcctaaagagcacttttgtattgtaatttattttttattatgctttaaacactatgtaaataaacctttagtaataaagaattatcagttaaaaaaaaaaaaaaaaaaaaaaaaaa

SEQ ID NO: 8796 - DNA, 754 bp, Homo sapiens
ctttagcaggtcagatgggaaacctggttggccacccacaccatgatccgaggagccaactggacttttgctgtttgacatcctcatgttcccgttgtttttccggagatagtgctaccctcacaatgccctggagcacagccttccttgaaatgccctcaccccatgcctttgccattgtgtgctctcagatttcttccactgtttgacaccctctttagagggctgctcttttttttccagagataatcctagccatcctctccactcccacggctggggacaatggccacttactacctgtgcactttgccactcgggacacctggatggtttctcttaggactttgcccacctccttctcatggcacttgctgtggaaaatgcctggctggcctcgtggggcctgtctcacttttccaggagacatgacccactaacgtggcaactttaacccaaaggcccctcagacatgttacagcaaatctggagcccacagacaggttccctccattggcagcccattgtgtttgaaattccatgtcgggtttacttggaatgaaagatacttgaattattgtgcgcctgtgagcgcccagcttctgtttcatagtcttaacaggtggccattgtcgtgaaacgagtgatgcctgaagatctcagtgatgtttgaaccttctgtgtaactttttattaagtctttgtatctctcgactgattaataaagaagagaaacacgaaaaaaaaaaaaaaa

SEQ ID NO: 8797 - DNA, 726 bp, Homo sapiens
tggcgatcagtttcgttccgggtcgatgttcgatgttgtctgtcaggagatgcagttgttgtgtagagaatgtaaattgtctggaacctttgggagatctagtgtgactaataagcactactggtaatgttgagcacagtggtaactccaccctcagtgtagactgccttggagttctttccgaccagtgagaatagtgcattagtttgcctggagaatccactcacgttcataagagaatgtttgatggcgccgtgtagaagccgctctgtatccatccacgcgtgcagagctgccagcagggagctcacagaaggggagggagcaccaggccagctgagctgcacccacagtcccgagactgggatcccccaccccaacagtgattgttggaaaaaaaaatgaaagttctgttcgtttatccattgcgatctggggagccccatctcgatatttccaatcctggctacttttcttagagaaaataagtcctttttttctggccttgctaatggcaacagaagaaagggcttctttgcgtggtcccctgctggtgggggtgggtccccagggggccccctgcggcctgggcccccctgcccacggccagcttcctgctgatgacatgctgtttgtattgttttaggaaaccaggctgttttgtgaataaaacgaatgcatgtttgtgtcacgaaaaaaaaaaaaaaaaaaaaaaaaaaaaaaaaa

SEQ ID NO: 8798 - DNA, 721 bp, Homo sapiens
agtctacattgggtatggaaattgttgtttgtgtaggtttttgtttctttttgagtttgtttcccccgtagtctcctggcattttcctttgcgttgccttctccattggccagcttgggcctcatcctcagtcatccttctagaaggcgcctgccccatcttgtctgccggcagcatgcatccaaggccagagctcaggcctgcagactgggctggtgcctcctccgcttcagggtatgggagttggtgaaggggctttcaaaaaataataagaaaaaaaaggtaaagtctttggtagcttctatccactcagatcctggaaggcagcaaggttttgtggatctagattcattaggaatgtcttcttgtcagccaggccaggacccgggcttgccaagagcagaggccctcccagcaaccaggataccaccactttgggggctttgtgtacagaggtccgggtctgagacctcataggctgcagaaatctggggcagccaccatcaagaagcccctctcaggggccagaactcctttgccagcgtggatttctcaagtcgggactgcataattaaagcagttgcagttttattttttttacagcttttttcccaaaaatgatttgtagttgtgtgtgcagcacttcgccctgatatgtgtgctctacaataaaaaccaaatctaatatattttgaaaaaaaaaaaaaaaaaaaaaaaaaaa

SEQ ID NO: 8799 - DNA, 687 bp, Homo sapiens
gccctagaggagtttgtatcaactttgtgagtaataatgtcaggtcttaccagccactttgcaaaaactgtcaggagggacccgtttctagagtgagtcccagtacatcaaacagtgacttccagtattccccagtaagtctgagtggttccttcaagctgggtgtctttccagccttgccagtctagccccagcagggcaccgtgtatgaatgcagtttggtgctgttttagagtatgcctgctccccagccccctgcctggaaccctctgagcaacttgctctgacctataatgtcttaggtgcaacacggaccccaccagagctcttggatacccccctagatccatgtggctttatgtgaggggactgaatgcagacacaccatagcccccttctactactttccctctcgccctgccacctagttccacatggaaccaacaagttgagtgcatccctgttgggtgttttgtgttgagactggctgaaatgaggagactttgaccatgtgacgtgtcaacagactcaaggagacaaccacctcaactgggtcatgtggcatgcctgtgtatgtgtgtaacagaattctgattgttagactgtaatgctattcctctatgggagaaaaaaattaatataaagaaaaacaaataaaaatatatttaaagcaaaaaaaaaaaaaaa

SEQ ID NO: 8800 - DNA, 747 bp, Homo sapiens
gcttctgagatcttgaaaaaatcaaagctattttttgcagcgatagtatactttattgtagtaactgaagtatatggtaattgttaaagacttcagagtggcttgatagcataggaaatggacgaatgcttttctgcccgttagctgctactttgaatgtctttactcttttattctgttagccttttggttgagatgtgaaactaccaatcacagataaaagttattcccatgcaggcccttatggggtatggcatcagcttagatgccaggctctgtctgcccctgcaatagggtgtgtttgttgtagtgtacttttcctctgtagtttttagcactggatgtagcatgactggatttgagatgaaatggtaatttcagttaaatgcttttagtaaaagagacttgttatttattattgtttataatagactgaaaaatagacaagggctgccgggtgctgtggctcatgcctgtaatcctagcactttgggaagctgaggcgggtggatcacttgaggtcaggagttcgagaccagcctggccaacatggtgaaactttgtctctactaaaatgtctctacaaaaagtacaaaaaattagttgggcatggtggcaggcacctgtaatcccagctacttgggaggctgaggcgggagaatcgcttgaacccagaaggtggaggttgcagtgagctgatatcgcgccactgcactccagcttgggcaaaaaaaaaaaaaaaaaaaa

SEQ ID NO: 8801 - DNA, 555 bp, Homo sapiens
aactaagtacgtatgttcatctacagtacatggaagggacgcaccatttattctggaggatatctaatgtgatgcccggaatatctggggtccaagggattggttccccaaaataattccaaaatggtggctgaggtggccttggataagggctgctcccaattccgcctggccgtcctggactggaaccagagggccatggacttgtacaaggccctaggagcccaagatctgacggaagctgagggctggcacttcttctgctttcaaggagaggcaacgagaaagttggcaggaaagtgacgccatccctaggaggatctctgtcttgagtttctccttccccatcagctgaagcactcttcagagactacgtccacagacactgatgctgaggcctccctggaggaaggagggcttaggggtgcctatcctcaagtattggaagagcagaattgagggagagacctttcttccttgttgagggtgaaaaataaataagaattacatgtcctgaaaaaaaaaaaaaaaaaaaaaaaaaaaaaaaaaaaaaaa

SEQ ID NO: 8802 - DNA, 555 bp, Homo sapiens; identical to SEQ ID NO: 8801

SEQ ID NO: 8803 - DNA, 650 bp, Homo sapiens
cctttccctttggctaggagcaagcacagtgcaagtggcagaacgatctgggcacacatcagacaccaaacggtatgccactgggtcacgagaacgagtctgcagaggctccataggacagacagcacgcacatcaaaaacaagggacagaagttgcagtcagaaagtgtgtgataccttcctgaaaatacagtcttcttgccaaaatgaaggtgactcttcaggatgccacgttgctctgggaaagggaccttgacatttctgtgtttacaaagtacgtcttcaggtccccctttcctttcacgttgattattcctcgacaggtgcacgtgtatccgagggtctgcaggacgaggctcgtctcctcggtaacctgtattttgtccaggactccggtgctgtccatcctactggccacattgacagtgttgccccagatatcatattgtggcttctgagctccaatcacaccagctatcacaggtccatggttaatacccactcgcaatttgaagtcgttgaaggagtgcttgttgatggcatccagcttccctaccagggcaaaagcaaactccaccatggtgccaatgtgcatgtactgccgctcgggctcctgggagtgctcctggctgggcacagcgctcagacct

SEQ ID NO: 8804 - DNA, 723 bp, Homo sapiens
  misc_feature (439)..(439): n is a, c, g, or t
gggacacgggaaaggtggcagagaaggaggcagtcaataagaggtccggcacgacgtcgccacggtcttggccccacgctgctccggccctccgagaaggagagcaagctcctgccaaccccagccagcctatcaccatgactgacagctggtccttggaggtcatgtcccaggtccaggtgctgctgtacttcctgcagctggaggccatccctgccccggacagcaagagacagagcatcctgttctccaccgaagtctaaaggtcccagtccatctcctggaggcagacagatggcctggaaacctctggctaatcgggccatccgtagagcgggaaccttcctgaggtgtccttgggccacccccaagtgttgggccatctgccaagagacagcgacccaaagccgaaggacaggtggcctgggcagatcccgcncaggtctgggagccccaggctggcctcagactgtggttttttatgtggccacccgagggcgccccaagccagttcatctcagagtccaggcctgaccctgggagacagggtgaagggagtgatttttatgaacttaacttagagtctaaaagatttctactggatcacttgtcaagaagcgccctctctggggagaagggaacgtgactggattccctcactgttgtatcttgaataaacgctgctgcttcatcctgaaaaaaaaaaaaaaaaaaaaaaaaaaa

SEQ ID NO: 8805 - DNA, 777 bp, Homo sapiens
cagcagaatttgggtttctgtaaagggggcccaactcactggtttcataagatggttgcattctagctggttcttcacgtagtggaagggttcgagctaagttcttgggagacccgttatgacctaatccatcccccaaaggttccacttcctaatactataccttcgggaattaaggtttcaacctgtgagttttgtggggacacaaatattcagaccatagcaactcctgtactctactaaaagcatattagagaaataagtaattgtttttcaatttttaagaattattcacttgagccaagcgtggtggctcacatcttgtaattccagcactttgggaggccgaggtgggtagatcacgaggtcaggagttcaggaccagcctggccaagatggtgaaacctcatctgtactaaaaatacaaaattagccaggcgtagtggcaggcacctgtaatcccagctactcaggaggctgaggcagagaattgcttgagcctgggaggcagaggttgcagtgagctgagatgtgccactgcactctagcctgggcgacagagtgagacagtgtctcaaataaataaataaataaataaaaataagattcacttgaactaacaacgtaagaattatttttaaaagaaactttttaatgtaaggttttttaaaaaaattattcgaataagaaattttactatatgtcttacgtgttattgttacttagaagtatattaaagaattaaaacattttttaaaagtgaaaaaaaaaaaaaaa

SEQ ID NO: 8806 - DNA, 782 bp, Homo sapiens; identical to SEQ ID NO: 3571
  misc_feature (81)..(81): n is a, c, g, or t

SEQ ID NO: 8807 - DNA, 659 bp, Homo sapiens
gcgccagctgggtctcctgggcaagaagaagaaggaaagaagaggagggggaagggaaaaagaaggcggaggtgaaggtggggcaggagcagatgaggaaaaggagcagtcgcacagacctttcctcatgctgcaggcccggcagtctgaagaccaccctcatcgccggcgtcggcggggcttggagtgtgatggcaaggtcaacatctgctgtaagaaacagttctttgtcagtttcaaggacatcggctggaatgactggatcattgctccctctggctatcatgccaactactgcgagggtgagtgcccgagccatatagcaggcacgtccgggtcctcactgtccttccactcaacagtcatcaaccactaccgcatgcggggccatagcccctttgccaacctcaaatcgtgctgtgtgcccaccaagctgagacccatgtccatgttgtactatgatgatggtcaaaacatcatcaaaaaggacattcagaacatgatcgtggaggagtgtgggtgctcatagagttgcccagcccagggggaaagggagcaagagttgtccagagaagacagtggcaaaatgaagaaatttttaaggtttctgagttaaccagaaaaatagaaattaaaaacaaaacaaaaaaaaaaaaaaa

SEQ ID NO: 8808 - DNA, 659 bp, Homo sapiens; identical to SEQ ID NO: 8807

SEQ ID NO: 8809 - DNA, 607 bp, Homo sapiens; identical to SEQ ID NO: 3574

SEQ ID NO: 8810 - DNA, 733 bp, Homo sapiens; identical to SEQ ID NO: 3575

SEQ ID NO: 8811 - DNA, 765 bp, Homo sapiens
caaccacagactcccgcaatgtagactctggcctcgcatctcgtgttatgccacaacagaagtggcacatgagaaggatgacgggatttttccacagcctcctcagatttgccaactgtggtgagctggtagcacagctgcaaccgttggatgaggtcattaagcttcaggcccacagctggtacaccattcttcagccctgcatccttccagttgcgattaggatagccatacatggagggtaggcagggcagagcctgataggttgtgcggcctcgggcgtatgtctgtaggaacagttgcttgtaggggccaaactggattacccctacttggtcatgaaggagccgcatggctgtttcgaaagagcctgccaggatgtgatcaactggaagctgagagttattacaccagatctgagttggacttgttcccttggttgggggcacaaagaaaccatcttcagccccaccagctgccccaggggatatatccagctcaggagggagctccagatcttcttctacatcccagccacctccttcttcctgtcccttgccaagagcatcatcccccaaaccttctgtagcctccacaaacccatcttcatccaactgcagctctgcatcctctccccagccctctgtaccaacagtgtcaatgtcaatgtcagcagccagtgctcctcccttccctttgctggcaatggtgccttcaaaaaatcctttggatacagtcaataaaggccaattgaaaaaaaaaaaa

SEQ ID NO: 8812 - DNA, 731 bp, Homo sapiens; identical to SEQ ID NO: 3577

SEQ ID NO: 8813 - DNA, 130 bp, Homo sapiens
agatggtgtataactctagagcttgaattttaagggattccctaatatgtatactatctttttatctgaagtaataaataaaccatgatcttgaaagtgccaaaaaaaaaacaaaaaaaaaaaaaaaaaa

SEQ ID NO: 8814 - DNA, 737 bp, Homo sapiens
tctcctggagtacttccaacagttgctgactcacattagtgccagttagtgccttcggtgtaagatcttctcatcagccctcaatttgtgatccggaattttgtgaggaaggattagaaatcagcacctgcgttttagagatcataattctcacctacttctgagcttattgggtgccatttgatattcatggatatcatgacttccaattgagaggaaaatgagatcaaatgtcatttcccaaatttcttgtaggccgttgtttcagattctttctgtcttggaatgtaaacatctgattctggaatgcagaaggaggggtctgggcatctgtggatttttggctactagaagtgtcccagaagtcactgtatttttgaaacttctaacgtcataattaagtttctcttgtcttggcatcaagaatagtcaagttttttggccgggcatggtggctcatgcctgtaatcccagcacttggggaggccaaggcaggcggatcacatgaggccaggaattcgagaccaacctggtcagcatggcaaaaccccgtctctactaaaagtacaaaaattagccaggcgtgatggcacgtgtctgtaatcccagctactctggagactgaggtgggagaatcgcttgagactgggaggcagaggttgcagtgaaccgagatcatgccaccgcacttcagcctgggtgacagagaaggactccgtctcaaaaaaaaaaaaaaa

SEQ ID NO: 8815 - DNA, 763 bp, Homo sapiens; identical to SEQ ID NO: 3580
  misc_feature (171)..(173): n is a, c, g, or t

SEQ ID NO: 8816 - DNA, 706 bp, Homo sapiens
  misc_feature (28)..(28): n is a, c, g, or t
cgtgtcccagatgtgaatcctctaaccnagttaggattatcccagcctcttagtaaatgaatcgttacctcatttttggtcaacactaggtgagaagtcagccagcaggctcttggaaaaatgtatcctcatttccagaaagtggtttgaaaacacaattcccaaattgttacaaaccataaatcccacacagattattggtgaacagctgtaaaattttactcaacccatgattcagggaaccaacagaattatataggtgcttttcaaaagcatttataaattcttgattatgtaggtagtggggggaaatgcagaaatgagatcattaatttagatacaaacctggttgatgaccagggggttttattttgcagaagaattgggtatttggtatcattttattcaattacatgtgatcctggtacatttcataagcttgggtaaaaaaattttttgttattttccatgcacaataagggaaatgttttaattggctttgtgcctcctgctttacaacagttctggcctcaagttaccaggtagcctgaactttgattttattttaccattaaattgctttaataccattgtatttggtgaagttttagtctttgtgtagcttatttcatagatataccaaaaatgaaggaagttttgtagtatattcaatgtaaaaccacatatattgaaaaaaaaaaaaaaa

SEQ ID NO: 8817 - DNA, 685 bp, Homo sapiens
aaaattcacataagcacttaagcaccaaattgaaaatcattttcgtgctttcaaattaatgatactaggcttgtaggatgtcttagaatcatgtttcaccagaagttagaatatttgcacttttgaaatttttatgcgtttggctaaggaggaacttggaaaataacattcatcagcttctacctgcactttttgtatgtggactttgtaaagtttaatgtccgtttaacacgttgcttgtttatttgtgtaaacctagctagtaaatattgatgatgttcagggccctgacttgcacagcccttggagcactattcacacagaacacattcagagtttgttaagacattaacacactttgatatctattccaaaaatacttttgttaccacaggttcattgctgtcatttagacaaaattaatgtactgtgatattttcctactcttaagatgatgttgcccagcctagtactgtcagaaattcagttctgatgtctgtgtgtgcaagatattaatgtggtccctgtaagaaataccagagttggtcatgatttactaaggagatgtaatattttctttgacctgttaggaatataacttgtgtcttgatttgttgcacatcatattttttgcaacattaatgaatttaaataaattaattggaacgttaaaaaaaaaaaaaaa

SEQ ID NO: 8818 - DNA, 692 bp, Homo sapiens
ccttttggtcgctctgagtcgaccggaagcccgtgcttctttcctaggtatttccacctcggaacatcacatctaagggattttgtttgctatgtaaccgaatttaactatccaacacagtagtagtaggctcctggaggtccaaccgtgatttaaacatagctccgaatataatgctccatatatatccagaatgtatgcataagtgtaaagaagtcctttgagcctggcttaggtccgtgctgccccatacacatatgatgcccgtattttttttttttttgacagagtctcactctgttgccccagtctggagttccgtagcaccatcaccagctctctgtccgcctgggactcctcagctcacagcgatcctcctacctcagcctcataagtaggtgggaccacacggcactgccaccacactttggctaattttggaattttttgtagagatggggatttttccttgttactcaggctggtctccaacttctggcctcacagcgatcctcaccccttggcctcctcataccccagcctccccaagtgctgagattaccggtgtaagctactgcatctggcctataatgcccgtttcatatgtaacttaaaactttctagtagcatattaaaaaaaaaaaaaaaaaaaaaaaaaaaacaaaaaaaaaaaaaaaaaaaaaaaaaaaaaa

SEQ ID NO: 8819 - DNA, 732 bp, Homo sapiens
ccccgggctggccctccctgcaggtcccgttgaccgagcggcacgtcgtactgatgggctaggtagttcaatcctctgtccgggctgcgcgctggacgacccccacctggtcttaaacatgagggagcgtgggtagcctctgccgagcccccgccagcctgagaagccaggctggctgctggtgaatgtgacgctccgggcttaagtccactccccgccctaagttctctgtgtgtgtcctgggggaccagcatgctctgtgacgaggctaaggccgtggatatcccccacatggacatcgaggcgctgaaaaaactcacaagaataaaaaactggtcaagaagctggccaagaagtatgatgcgtttttggcctcagagtctctgatcaagcagattccacgaatcctcggcccaggtttaaataaggcaggaaagttcccttccctgctcacacacacgaaaacatggtggccaagtggatgaggtgaagtccacaatcaagttccaaatgaagaaggtgttatgtctggctgtagctgttggtcacgtgaagatgacaggcgatgagcttgtgtataacattcacctggctgtcaacttcttggtgtcattgctcaagaaaaactggcagaatgtccgggccttatatatcagagcaccatgggcagccccagcgcctatattaaggcacatttgaataaattctattacccagaaacaaaaaaaaaaa

SEQ ID NO: 8820 - DNA, 732 bp, Homo sapiens; identical to SEQ ID NO: 8819

SEQ ID NO: 8821 - DNA, 655 bp, Homo sapiens
aatataggaatcagaagctatctacttgaagtgccccctaattttcaggcatttttcccccatgaaggtgacagctgctcacacaggataatacaggaaagttgtaagttcttaggatatgcccagcaccaggcggaagatattgtgtcagccaattccatagcaaggaaggagaacaggcatggctctccacctctcccagcctgaaggtcaagttgcaggaatcactgtctaagcatgacagccatacaagcttctctccatgagggggagattccaaccttagaccttcactcagattagtgcagaatctctgtgaaggtgcattgtccctggctgggcttccagagttcattctttactcaaggataacacggcgatgaacgtcttacaactcagttgttttgagtcagcaggggctgtggggccgctagccgagttccccctgccacgagctaggtcagttccaagcaaagacaccagaaactccagtgtgcaacggtagttcacccaactgcactggggaccgccctctcctaccccagccaggccgcgacgtggccgcccgccggctgctgcgcaaaggcagcgcaagccgttgggatcccctgctccccctcactcaacagtcgggccattacaactctcatactgc

SEQ ID NO: 8822 - DNA, 733 bp, Homo sapiens
  misc_feature (266)..(266): n is a, c, g, or t
ttgtgatggggcccattggatgccacacctctgttcatacccaaactgtctggcagtcactgctctggagctaaaggtggaaagaagtctgatcagtcaactgtagcctggaaccacttactacagcagctttcaacaagctacaaacaatgccacgcttatagaaatctcccacttatttggaaaaaaaaatgtcttgtgcaagcaacaaatggactccctgctccaagaacatgtgggatgggaatatctaacacgggtgaccnaatgaaaacagcaactgtgaaatgagaaaagagaaaagactgtgttacattcagccttgcgacagcaatatattaaagaccataaagattccccaaaggaaaaacactagcccaccctacatttcccacatcttcccaagctgtgaaaatttgtcttttctggatgctcacagtaactcagagattaccaacccccctttttttgggaaaattggccttggaataaagaagaattgcctgtaatcccctaataagtctaaaatgattactattcatttgattgcccaatgaggggtcatttaaatggaagatgctgtggattacatcttgtgtgtgtcagagaaactgcagagaacctggagatatattttctgagctcaagattctgtaaaaccagcaatgggggaaaagttagtcatcctgtcatataataaaaaaattagtgagtataaaaaaaaaaaaaaaaa

SEQ ID NO: 8823 - DNA, 730 bp, Homo sapiens
  misc_feature (402)..(402): n is a, c, g, or t
ccagtttgcatcagccacacgcccgctgattttttccattttgtagaaacaggttcaccatctgccactctgctctcgaagtcctaacctcaggtgatccacccgcctcagcttctcaaagtgctgggattacaggtgtgaccctggcgcccagcagggaatattcctaaatataagaaggtgtgtctgccacaacccgcccttctcaaggtggagctctggggtttgagagagggagggggttgaattttgggctaaggagcctggctgatgtcactttcttgtctttcaattatctgtattggctttttgattgtcaaagtaaaaaaatgtgaagattacacggaatcatgtcctgataatagctacctcatatcaagccctcactatgtgccaggcacnttctggggacttggctgcagttgtctgttactcttcacacaagctcaatgaggcggtcctgttattaccatttttattttaagaatgaggagaatgcagcttcaagaaggtaagcacttgccgaccgtcacacagcttagccgaggaagagccaggcttcacacacgggccttgccgcctctagactacgtgtttattttttagactgagcacttttaaaagagtggcttattttttttgttttgaatttaaaggtcacaagacacacagaaattgtttgctatctctcttccagataacctctgttgatatgaaaaaaaaaaaaaaa

SEQ ID NO: 8824 - DNA, 736 bp, Homo sapiens
gattagttgggaccatctgcccagccaaagatcggatttgtccaaaatttttccaggatcatactcagagaccataacacatgaaatatgttcaacatcttagctgtcagtaaaatgcaaatgaacaccccgatgagataccacttcacatagattaaggtgggtatattcaaaagataatcaagtgtgggagaggatgtagggaaattagaacttccatacactgctggtggaaatataaaatggtgtagcttttctggaaaacagtcttgtagttcctcaaacatcaaagttatatcaccagcaattccactcctaggtatatatgcctcaaaaattaaaccatatgttcatacaaaaacttgtgcacaaatgttcatagtaacattattcataattgctaaatgagtagaaaaattctaggactggtgtggtggctcatggttgtagtcccagcactttgggaggaacaggcaggtggatctcttgagccgaggatttcgaggccaacctggacacatggagaaaccccatctctacctgctcccagccccacagaaaataaaaaaaattagcctgatgtggtggcatgtgcctgtggtcccagctattcggggggctgatgcgggaggattgcataagcctgggaggtcgagggtgcggtgagctgaaattgcaccactgcattctagcttgggcgacagagtgagaccctgtctcagaaaaaaaaaaaaaa

SEQ ID NO: 8825 - DNA, 733 bp, Homo sapiens; identical to SEQ ID NO: 3590

SEQ ID NO: 8826 - DNA, 733 bp, Homo sapiens; identical to SEQ ID NO: 3590

SEQ ID NO: 8827 - DNA, 545 bp, Homo sapiens
ctttcaggctaattcccaccttcgaagattaccagatcatcagtttagcttcacacatgaaattgagaaatgaattgctggtcaaaatgctaaaaacacgaatgtgaaatttatatgtgttccttgttcctaaatattgaaaaaatatcaactaatcatcaagtttgccaacataaaaaaattgaaatataattcctagttaattggtttaccattcattattacttctctttgaattcagtaacttatcaatgattaaagatgtgcttcaacaagttaattctttaagttcaaataactggaaaccattttctcaatggtgcagcatttcttaatgtcagttcaagatgtttggagacatattgctgattttagaagctgatgtgtgctgatttatgaaggaattgtttagcttgtactctgggctctgatccagggagatacactctcagatacagcctggcatttaagggtacctctttcctagctgattatctgcttcctgagttcagttgtaatagcttgcgagcttctcccatcccata

SEQ ID NO: 8828 - DNA, 697 bp, Homo sapiens; identical to SEQ ID NO: 3593

SEQ ID NO: 8829 - DNA, 690 bp, Homo sapiens; identical to SEQ ID NO: 3594

SEQ ID NO: 8830 - DNA, 721 bp, Homo sapiens
atcacatgtaaatgaagctataaactggaacagactatctttacaacctaaggcgtaggtatagtttttagacattacaccaaagcacatgccgtaaaagaaaaatagataaattggtggatttcatttaaattaaaaaactttttctctctgaaaaatcctgttaagctgggcgttgtggttcatgcctgtaatcccagcactttgggaggctgagttgggaagaaattaatagcttgaggccaggagttcaagatcatcctgggcagcaaagtcatacactcttgagggaagagagagaccttctcatattgttttatattgttttatactcagtacctgttttaagaaaaaaacaaggaagtgaaatcaaagacaggcagcccggcaccaggcctgaaaccagccctgggcctgcctggcctaaacctagtagttaaaaatcaacttacgacttagaacctgatgttatccgtagattccaagcattgtataaaaaaattgtgaaactccctgttgtgttctgtaccagtgcacgaaacccctgtcacatagcccctagattgctcaatcaatcacgaccctttcatgtgaaatctttagtgttgtgagcccttaaaagggacagaaattgtgcacttgaggagctcagattttaaggctgtagcttgccgatgctcccagctgaataaagcccttccttctacaaaaaaaaaaaaaa

SEQ ID NO: 8831 - DNA, 679 bp, Homo sapiens; identical to SEQ ID NO: 3596

SEQ ID NO: 8832 - DNA, 725 bp, Homo sapiens
  misc_feature (301)..(301): n is a, c, g, or t
  misc_feature (465)..(465): n is a, c, g, or t
tggcactaagggactgagatgtattccatagacttaatcccctaaagttctgcccaggagcatttacttggccttaaatcctcagtggataaagtagtctacttattgctagatgggagaggctgattaccttcacctgcccttcttgtacattgatttgagtactctttacatttatcagtttacagttttttgactatcttaatgcatggttattggttagaaaagtgactctctaaaaatgacatctgggtctcaatcgataattttcatatcagatgtagctctgctctccaaaganattctgcttagtcttcactgtgctttttgtatcattaaccgtaaagttaggaataaacctcatctgttagctttacctttgtttactgagataggataaaatagttttcttctctttaatactattagcatctaattaaaatggatttgttagaatgttaacantgcacagaaatatgaagatggcaggtgataaggttgttgtagtatgtgttagtaaagaacatctgcttgaaaaaagatttagtaatttttctaagccggggatggtgatggatgcccgtagtcccagctacttggaaggctgaggcaggaggattgcttgaatgcaggagtttaagtctgcagtgaactatgattgtgccactgcacagtccatcctaggcacagagggagacccctttttacttaaaaaaaaaaaaaaa

SEQ ID NO: 8833 - DNA, 648 bp, Homo sapiens; identical to SEQ ID NO: 3598

SEQ ID NO: 8834 - DNA, 608 bp, Homo sapiens
cgaggggcagggggcatatacactacttggaaaccaaacctgttggttcattaaaggggacttttgcatcaagttgagatctccatgctagttgagaaactaggatcaggagacacctgtatttgggtgtggacaagcttgccctctgagagaggacagcctgctcccaattatgttaatctgcagtgtcaaaataggaccaaattgactaattcctgttagggccaagcctagtgatcagggttgagatgtcaggaaagccatttggcctgtgtcttataattccaaaagggattcaaattcagacttttgacattatcctaaatgaactgataactctagccacaaagccagactgacctgatgtaaatgtttgtcatacagcttaatttagtatatgtaaagaaattaaattatttggcaattttgatattcctaattgagtattattaaaaaaatatactgaggccaggcacaggggctcgctcatgcctgtaatctcagtactttgggaggccaaggtgggcagatcacgtgaggtcaggagtttgagaccagcttggccaatgtggtgaaaccccatctcttactaaaaaaaaaaaaaaaaa

SEQ ID NO: 8835 - DNA, 677 bp, Homo sapiens
tcctctgacatgtaacattcaattaccacaagaatttaaatgtaataagtcaagtagaatgttactgcattttatagtataaatattcataaattcttcttcttttggccaaattaataataatatgaccactttaagagatacacatctatccctcataaattggactctctgctttgtcctgaaagagaatttctctgaaagtattacattaaagttactaagtccaaattcaagccgattacattatcagccctattgtcaaatagtcagtgctacttgaggtcatcagcatggtctggcttcaatttggaagacaggaattcagagacacagttgacattgcctccccaaactaacatgctgcccctaagtgaatctcatcatatttcacattatgagaaatatacgatcaaagataagagaagtagggtaagaaaaagacagtggtcaaaggaagctcttaaaagctataattttggtggttctaacacaaaccgtttagtgaccaaagcaaatgagccatacattaaggatgagctatagtgaccatcggcttaagaatttctagtcacaaaaaaagaatcacttttatgatcattcctattcaagtaaaataaatttaattggaattcctgaggaatagtttgcaattcaaacacgtatccataattttt

SEQ ID NO: 8836 - DNA, 730 bp, Homo sapiens
tcatcggatattggctatattgataggctgagctgactgagcctgaactagtgagtgaggagattttaacacctgggtgaggactgtggaagaaggaagccatcaggagcctgagttttacccacacatattagactgaaatgtactctgtgggcaaagggcaagcaggatcttacgatgacttttaactcattatcacacattttcctaagaacattcatatctcctttggaaatgcacagaaaatcaaaagagggaaaagaaactttccacatgtcctagtgaactgcttacagcttgataggccacttgccagcacggtgagtgtttgtagataactgcgaggacactaaggcatcactgctttcttcactctcttcccggagtccctctaaaagagaagggggaaatcactgtggttgtgttgagtattgtttttctcagaagaagtgtttttcccctgaagaaccccctttcttcaataaaaatttgaagaatccagaattaaaaaattttccttaagaaatcactcccattcctaggtttttctcttttcctctccggtccatctgaattataccatcggagaagtgggcagggatagggggtggagagtgaggtctcctttctaatggtgcttactttattgaaagaacatgaaatttggaatcatacagacctgggttccattcctacctctaaggtgattcatgttgggcatgtacttacg

SEQ ID NO: 8837 - DNA, 615 bp, Homo sapiens
tgctgctcatgctggtctcgaccccgatcgtcgtgatccgccctccttatgcttcccatcctctctttaaatgtgatagtctcagaaacatttgtaaaatgccaggttttttatggtcattttgtctctgtcatttttcagaggccaaggaatttggcctgtaaaatagagtgctagagctcttacgcccctccccttcttcccacttcctacttcctagccctttttatcaactcctagaatagttaaagagagacacatctagatgggatgaaaggtgccctaagcaggagaaactgaaccaaaggctagaggcatgggccaggtaaaaattgggcctagagtgaagactgtgctgtcgttaagagctttcgaggaaggagtacttactccccactgatgatgaatggaaaaatacttttcagggagaattgaaggggttaaagtgttaaatatgttgcctagacaagggttctttaaagaaagacagcgcactttgaatgctttcttacttgttttgtgacctaatttatgtggaagattgttatttcattaggatttagtaaaatttttttttctgattctaaacttattgtgaaaaaaaaaaaaaaaaaa

SEQ ID NO: 8838 - DNA, 687 bp, Homo sapiens; identical to SEQ ID NO: 3603

SEQ ID NO: 8839 - DNA, 659 bp, Homo sapiens
  misc_feature (335)..(335): n is a, c, g, or t
  misc_feature (654)..(654): n is a, c, g, or t
cccagagtgcctggatatcagacattgaccaccacacccagcccgtaatatctttacacagaaattagtcttttatgagaaatttctcgggtgaatgcaatttacaaattaagggaaacttctataacgtctacattaatgtggagccaaatttaagcctgtttcctatagtttctgtatctgtcctttaaaacgtatgattaagttaaagctgcacctagaaggtatttcactttggcactgactgaactttgtatcatttctggctttctacacatttaggctgtatttccccttacacagcgactttttatcattcattttcgatgcctgcntaatttgaaagccacacacgtttcttgcacacgggaatgcacttgtcatatagctgggttttatttccaactccattataccatgtagccatagtaaataattaaaaatgtaatgctaactccaaactttgtaggatgccttcactgaattttggtataaagagtaaacaaacttattctgcaaaggattaggaacctttttatgcaaaaatgagtattttattttgtcagcactaaaagaaaaaaaaaaacaaaccctgtatttctacattgaggtgaaaacatgtttaaactttcttatcaatcaaatacattccanaagaa

SEQ ID NO: 8840 - DNA, 769 bp, Homo sapiens
  misc_feature (330)..(330): n is a, c, g, or t
gaacactcttcatcatgatggattttaagcctgactataaaattccagcctgggcagcatcctcattaataattcttggtgacacgaataatacacgctggctgttttttaaaatataaccataccactttttaattattaccttaaaaattgtaaatatatctatgtgccatggcctgggaagcctgcgttcttttttcataaaaattatttttactgtatgaaaagatcatggggtttagctcaaaatatctgtggtcctgataaaattggattggtaactctacctcagaaggaaaatgggaaaaaaaaatagatgagtcacattcnaatacttcaagctcagaaactgtgcagatcactgaattttagatttataaagtcagagttggcatgccttgtttttaatgatatggaagaccttaagaaaaaaacttggctcgaagtttaatcgttggtcccaccctttggaaaaggccattaatttgaaggaaggtttccccggaatttccggccaattttggaaattccattttgttctctcttcttcattattagtgcatttggtgtgtgtatacttgcacacaattctgtttgtgtacacactgcttgcttagccctagtcaagaggcatcttttataaaaggtgtaaagaaatatcaaggttctaaaattcggaagagtttagaatttattaggagtttcccacgttgggatgttagtctttaaataaacttcatgcacctattccaaaaaaaaaaaaaaaaaa

SEQ ID NO: 8841 - DNA, 792 bp, Homo sapiens
gtctgcttactattcacatcagaaaatgttgttcagtgatcctattttcgtatttgccatggatggataaaacttgatcacaaattagaaccagagaattaggagctctatgtttaaatccagaccctgatgctatttacatccctaggccaaggattattctctctgacttttattttgttatttcctaaaggaaagaattgtattagttgatttcttaagcagctctcactttctttgagctcctatttctctgattgtaatgtggaaaactgagctctatttcatacataaccacacccttcatctaacacttttataaccatatttgtttccctgagtttctccctttgcacgccccgagtataccactcttcttcctaggaattagtgagaagcttgtaagtatcaataccaaaaccccagttaattttccccactaaattccgggaggttttcccccagaattatctgccaagggttattttggcacctaacaacgttttttacttttccgtcatcagtattatcatcaacaaaaaatatttcttaagttaacaaggaaaatactgaatacagagaataaagacataatcatagaatgggtaaaagttcaggcagtctgttagagagcagtacttttctcatatcttaaccacatcaaggacctgggacagggatgatggtgattggagcggcagctttgagggtcacatactgatgtcgtcagtggaaagagaagccagcaccccccttctcatcagtccaaaccatcataaaaaaaaaaaaaaa

SEQ ID NO: 8842 - DNA, 758 bp, Homo sapiens
ccctctgggccccctggctgatcccaaagaaacaaaaagaaggaactcagtgtttgtggtacttggaggctcaacctcccaggctgcagagtggatctggaggggcacgtagaggatagtacacacaggaggcttctgtggcttctgtaagtcctccatacaccataggtttttattttggttttggtttttgagtctcgttgtcacccaggctggattgcagtggtacgaccatggttcactgcagcctcaactcctgggctcaagtgatcctccagcttcagcctcctgtgagcatctgggactacaggcgcatgccaccacgcatggataatttttgtattttttgtattgagaccaggtcttgaactcctggtctcaagcagtccccccacctcggcctcccaaagtgctgggataacaggcgtgagccactgcgcctgatccacacaccatagtttttaaaatgttattttactcacaagagggctttggaaaggaagatcctgcccagcagagcctacatgcgcagacaggacagaggacccttaaggatcaatggtcttgttgccggaaatggatgtctggcgcaacccccggagctagttttggggaggccgccttgttgactgtgcactggaaaatgcacattgctttatcgtgagctctcggtgcacagtgtggtttccaggctctgagtggccaataaagctggtgctgtcttaaactgtaaaaaaaaaaaaaaaaaaaaaaaaaaa

SEQ ID NO: 8843 - DNA, 663 bp, Homo sapiens; identical to SEQ ID NO: 3608

SEQ ID NO: 8844 - DNA, 690 bp, Homo sapiens; identical to SEQ ID NO: 3609

SEQ ID NO: 8845 - DNA, 701 bp, Homo sapiens; identical to SEQ ID NO: 3610
  misc_feature (603)..(603): n is a, c, g, or t

SEQ ID NO: 8846 - DNA, 701 bp, Homo sapiens; identical to SEQ ID NO: 3610
  misc_feature (603)..(603): n is a, c, g, or t

SEQ ID NO: 8847 - DNA, 662 bp, Homo sapiens
ttataccctgtccactcctcccagtcccagcctgggagagctcctgctcttccagggacctggaggaagattcccctttgtagccataccgtttgattgtttgacttctagtgtccgagcccccgttcatggaccattctgccctggtagatccccccccgtgacctggggagaccctctctagtactccgtggaaggatcctcatccacatcctgatgttagcccccccatatgcagacctgactgcgacaacttcccctagtgtctgctctacagatgaaagtcctgaaggatattccgtctgtcccataataaaatgggaattaccactaccccagccttttttaaccagcccactaaaggtaaccctatgtagaacccgcagccttgtgacccacctaccccctctgtctattaccaatgaagagggcatcctataaatatgggatctttacctcttgtaacccccttatataaacttgaagaggttttcgttccatgaaatttaccaaaacccatgccatgccaaactatattgtcccccttgtccatgcttcccttttaacataaccctggaagtatgtagccagaagagttaggccaaaaaaaaaaaaaaaaaaaaaaaaaaaaaaaaaaaaaaaaaaaaaaaaaaaaaaaaaaa

SEQ ID NO: 8848 - DNA, 798 bp, Homo sapiens; identical to SEQ ID NO: 3613

SEQ ID NO: 8849 - DNA, 734 bp, Homo sapiens
acagatgaccgtttgttacttgtggtgtgattttttgaatagttctttatatataattaaaattaggtttaaattttccaaatatgtagactatgctatagcacgtgcttgcttgaaaagtctcactttttaaatctcccctggcatgaggtgcccccttcccctgttcccaaagcaccctttaaacatactttgtttctactattgtggagtttttctatatttaagaaatacatatatatttcagaggattttattttgctttttgcactttcagactttgatcacgtgttaagtgcacacttgtattgctttttaatctgttaattttttaaagacccagcacgtcattttgagttatatctataaaaattataaaaggatttttgaaagtataaaccaattgtcaagtgaaataaatgagattttggaataaagtgagaatgggagaagggatatgttgtgagcatataccttcacagttcttaatacctgttttgtaatcatgatattcagtcaaggcacttatggtttttaatcttgaaacttagagaaccctttgaatatttgcttttactggtgtaccagtatgagtggaatataaactgtacacataattatcatgttgatataaatcataatttcaactagatcaagacatgttaaccttttataaatttaaagtcaataaagcacctttttaaaggaaaaaaaaaaaaaaaaaaaaaaaaaaa

SEQ ID NO: 8850 - DNA, 734 bp, Homo sapiens; identical to SEQ ID NO: 8849

SEQ ID NO: 8851 - DNA, 742 bp, Homo sapiens
acctggcctaattccatcccgtagtaagatccatgtattaatcagtaaatcagatatacctatgttaactgtaacttagacctttcctgggattcacagtaaggaatgattgccaatgtattatcctttttgaggctcctttgactaaattaaatagttaactgactttgagatcatcattgatacttcttatgttaccatgaagtttatgtaactaattatgttaaaaaatttgaacaggatccagcacgtagtatctatatagtaactattgcttctgccatttcttcaaggtttactttttaatcacgagtattttgtggttgtgaaatgcttttataaatattttaatctaattttaatattattgtgggttgttggtttattacttgggtgtcacacaagtagaagattttactggcattttccatgtcagtagagtaatttttgcacgggtcagattatttttgattaattgatttccatattggttaggataatttgtggagtggctaattagaaaactagtgttagaagttaccaaatgaggaagaggaaagctgtggcattggtcaaggtgacagatgtttttcagaaaaggaattaacttaaatttagcttgttttttgagatggcgtcttgctctgtcacccaggctggagtgcagtgggccgagatcacaccttgaactccagcgtgggcgacagaacagactccatctcacaaaaaaaaaaaaaaaaaa

SEQ ID NO: 8852 - DNA, 711 bp, Homo sapiens; identical to SEQ ID NO: 3617

SEQ ID NO: 8853 - DNA, 615 bp, Homo sapiens
gtactaaattatgttcctgccaagtaattaaaattagtatctagagctagtttctggtgaattattcatttattttgtactgttgttaggcagctctgtagttgctaatttaacccataagtcaatttgctattcatgaagaaacgattctgagaatcctgtccggaattggggaatgacaaaataccccaaataatggtctttgtccccgtagagttcatagtctatttagtgtgcatgtttttccttaatgatgtatttgatctgacttttttccttctccaaagaactcatacttgggattaccaggtacatttgatgttatatgatggataagtgaaaagtttttaaaggagattttataccttttcaccttaaaaaaggtatttatattattactttgtacgtgattgtcttaagaaaaaatatagccccaatgtatagtaaaatcagcagctcaagaagaatttctgcttctctttgtagttgatgctttgttttttcctgcagtcagaaattccttgtatttgtcaaatgtataatcagcttgtattgtttttaaattaaaaaaaaatttgaataattaaaaaaaaaaaaaaaaaaaaaaaaaaaaaa

SEQ ID NO: 8854 - DNA, 587 bp, Homo sapiens
gtgatttggatgtccacagagtaccctccctatatatgttcatttgtatattgttgttcgggggaaaattgaccttcagtaaaaaacctttgaccatttttgatgtccattggatactttcctttttatcatcgtataaaaagataactagtactaatcattgtagtggcctaagtgtgatttaactcttgaagtcacaccctccgaaagatgagtagaaaccagcaccagcacagcccagatcttctctttcctctccttttcctcatttattcctaaaggaatctgaccattttacgtctctacggccccaataaaagacaaaaataaaaattcctttttattcctgtcaactggatggaaacacaaatttcatggagctgtgtaccatcgaagaaacctggtgtctggcatgaaattactgtaaagaacttcctgtaaaacacgttctttaaccaactgaaatgaaaagccttggagcgtctgaatgaaagacgtgacctcctgctgggactctgatggtcttcagcattcaccttcgtgtgtcttcagtgtctcattgtcatccctgcttctgtttggtctta

SEQ ID NO: 8855 - DNA, 759 bp, Homo sapiens; identical to SEQ ID NO: 3620
  misc_feature (48)..(48): n is a, c, g, or t
  misc_feature (67)..(67): n is a, c, g, or t
  misc_feature (139)..(139): n is a, c, g, or t
  misc_feature (228)..(229): n is a, c, g, or t

SEQ ID NO: 8856 - DNA, 132 bp, Homo sapiens
accgtgggctgttacttgctttgagttggaatcggtttgcatttacgcctgtaaatgtattcattcttaatttatgtaaggttttttttgctacgcaattctcgattctttgaagagatgacaacaaatttt

SEQ ID NO: 8857 - DNA, 715 bp, Homo sapiens
  misc_feature (190)..(190): n is a, c, g, or t
caccttcaccagccattggaactctccagggttgaatgtgtcccttctctcatttttccacatcgtgctcgttacctgaccgatgtctttttgtagcaggacacctaaaccggtattctgctgctcatttgtaaaattgtttcatgaaacgaagccgggctctcctccgccggcagcacaggtgcatgcncactgcccagggaaaccagcagaaccaggacgccagccaccagcaggccaaggtgacggggctacaaagtgggcccttctgggtctctggcctgggtaaccggcacactctcttcttgagggtggacttcttggtgggctgggcagtggtgggaaggaaatcaaccacactcagctgagttcccttcccgaaggtcagctcggggctcccgacgatcatgcagaagtagatgccactgtcctccggcttcacgcttgtgagattgagaatgaaccggcttgcatccggaaacacagctatcttctcctgttccacctcttcaccgtggatagtcccttttgcggaatcccagagggtcaggaactcgtggtgactatcactgctcggggcctggcgctgtctcagccagtagatgcacatgttactgagggagattttagcctcgcaggacagcatcaccatcttgttggtttgcacctttatgtatgcaggggtctgctggaggactgagttgccatggagaac

SEQ ID NO: 8858 - DNA, 713 bp, Homo sapiens
gttttaggccacaccagctcacccaatgaatcctttccctctgaatgtcacttttgtttttaaaagtcacttgctaagttgatgtcagcgtatgtgtatttgctggggaaaacctaatttcggggatttctgtggtaggtaataggagaagaaagggcactgggggctgttctccttccttccctgggctgtatccatggactcctggaaggcacagagaagggagctataagatggatgtgaagtctttaaaacctgaaattgttttttaaagcacttaagcacctccatattatgacttggtgggtcaccccttagcttcctccctctcccaccaagactatgagaacttcagctgatagctgggggctccccagatgaggatgcagggatttgggagcagtggaagagggtgcccaacccttgggttggaccaacccttggctcgcagctcaactctgcttcccgcattcctgctccacgtgtcccagcttctcccctgtgacgggaaggcaggtgtgactccaggctctgcactggttcttcttggttcctcccaccaggccctttgttcctcatgtccccatgtttctctccctctgcgtcttagcacctttcttctgttcaagttttctgtaaattttctctttttttctttctttctttttttttttttataaattaatttgctttcagttcaaaaaaaaaaaaaa

SEQ ID NO: 8859 - DNA, 83 bp, Homo sapiens
cacagaaatcctgttcgtatccccattttgatttccctaagttccttgttctccctctaaaaagagaatgattgcagccctgc

SEQ ID NO: 8860 - DNA, 654 bp, Homo sapiens
agggagatgagggtagcggcccagcatcccgaccccccagccactcctcagccgtgagggcaggtcggccctgcggtgggtgggtacaggtcctcctggaacaggtccgactttcgaggcactgtcatggcaatgggctcacacctccgctcgtgcagcttgtagaacctggcgatctcacacttgttcacctccaggccacgtttgggcatgtagcccatgccccgctgggactccttggaactgaacatggagagatagtgcaggaaaggggcctcggaagtgatctcaaagtaccggattgagctgtcacccttgccacagaggtagacgatgttggtgtcagggtcaaagaagggcagcaggacaccgctgctggtgtccagctcctgcagggacagcggctcctccaggtgctttgtgtcccacagcgccacctgccgctcactcatgcggctgaagcccgtggtcaggatcttcccctccgacacgaacactgcacgcacgggccgggtcccctcgtggggacggtccttctcagctacgacagtgcctttgcggggctcgatgatgcgcacgcgcttgtcacggcaggaggtacaaatgaggcctccatctcggctccagtccacactgtagatcgtgtctgggtgc

SEQ ID NO: 8861 - DNA, 777 bp, Homo sapiens
  misc_feature (723)..(723): n is a, c, g, or t
cccatcgaggggccccaccggccatcaggtggtactacaccaagcccaggcaggcaggcaggcctgcaccggcgagcgcccccccctacatgcaggaaggttcacaccaggagcgatccatctacgtaggtggtcgagcgacaacatgcagacagccgtggtgatcaccaccaggctggactaacagtggctcgactgcagatcactgaccacctccgcctctccaggcttaccagacgtattcctcctgtcctcagccctccagtagtagcgtggtatcacaggatttcatcatgttgcccaggctcatctcgaactcgtgggctcaaggaattcgccacgccttcagcctcccaacgtgctgggattacagccggtggtcatgccatgagcagccttatggagaggaccatgtggtaaggaactcagccatagccatgtaactgagcttggaagaggatcttgctgtcctggccaacatctcactgcaattctatcagttgaattccctggatagtccaagctttgtggatccctccaccagaacactggatcccagtacctgaatcctgaatcttagactcttatacttcaaacactgatcacgggaacagccggctcagcagctcctgagttcctaatgctcagaacatggatgagatgataaatgtttgttgtgttaagctgccaacctttggcgggggggtaattcgtcacatggcnacagctggctaatacatatatacctacatgtaaaaaaaaaaaaaaaaaaaaaaa

SEQ ID NO: 8862 - DNA, 777 bp, Homo sapiens; identical to SEQ ID NO: 8861
  misc_feature (723)..(723): n is a, c, g, or t

SEQ ID NO: 8863 - DNA, 766 bp, Homo sapiens; identical to SEQ ID NO: 3628

SEQ ID NO: 8864 - DNA, 780 bp, Homo sapiens
ttcctggctagcaaagggatttgtttatctaaaataatctagaaccagtgtgagcgagtctaataatccagctactcagagctgagccaggaggatttgttaagaacaggagttcaagaacacgcctggcaacataataagacctcatctcagagaataataagtaaataagataagtcctactctagggcacctgggaaccaaccagtggtgcctttggaaatcttggtttatgcttcctctctgacagtaggaaaaagctattgtgggagtttctcctgccatgtagagtgatggaagagcagaattgtggaggagcagagttgctttgttttgtctttgttgtactcagctggaaagctgctttataggaagagaagtcatggtcgatatgaccaccctccttcttgcgaccatatggggaatagtacacccaccaacgaggggaaaagagagaagaatataaagccccagaatgtcccttgcttggcttaaaatgggaagaggacaaaggaagcagaatactttctgggcttttggcttttgctaccctcctctggcagacccctgtccaagacgctggctgtgttgtgtgccaggctagagcttgtacctactgtaaaatctgtgtgtgatgtctgttgagttttttggaaaacaaaaaacttatattttaaaatacaaggtattagataataccaagggcagataattccacccttggaaataaaaaagattttcttttcttcagcttgaaaaaaaaaaaaaaaaaaaaaaaaa

SEQ ID NO: 8865 - DNA, 742 bp, Homo sapiens
  misc_feature (50)..(50): n is a, c, g, or t
taattctacgtgtgctaacataggagaaatttggaatgcacttaataagnctggtttttacaccttgatttcgaggtggaaagaaattgatcatgaatctctaatgaaatgttaaatctcttaaaccagtaggtgcttaatattgtttgatttgattaatgcccatttaaatctcatgggttctattaaaaatatatatatatagggccccaatccattgccatcaaattgcccttggacttttccaaggtatattatggggttttatgcaaaattccaagctaccatgtaactttttttaaccatttaacaaggagggggaactgtttcctaccttctttacatgttgtgcattgttgtggtccagaaatgccgaacctttttaaagatggtgcaactttgagtccttggcttgactatacaggccttgaacttcatggcatatcaactttgccatatctgcaggagagctgttctataagaaatagctcagagttgcaaatatcacatgtgaatgatacggtaacttttaagaaatgtctgtattgtatttgaagactgtttgccataaatctgaaatttgaacctatgtatttcaatttggtatgctaaaaagttctgaattaatgtaaagttttttgttataatattgtaatctcagttcaaaagttaactgcaaatataaaacccatgatttctatatagtaaattgaactgtaaaggtaaaaaaaaaaaaaaaaaa

SEQ ID NO: 8866 - DNA, 661 bp, Homo sapiens; identical to SEQ ID NO: 3631
  misc_feature (430)..(430): n is a, c, g, or t

SEQ ID NO: 8867 - DNA, 672 bp, Homo sapiens; identical to SEQ ID NO: 3632

SEQ ID NO: 8868 - DNA, 672 bp, Homo sapiens; identical to SEQ ID NO: 3632

SEQ ID NO: 8869 - DNA, 662 bp, Homo sapiens
caacgggaaaggcatgggaatgtagcaagtcttgtacaacgaataagcacctatggacttccagctggaggaattcagccacatccacaaaccaaaacattaagaagaagaccaagaagcgtcagtgtaaagttctttttgagtacattccacaaaatgaggatgaactggagctgaaagtgggagatattattgatattaatgaagagggtagaagaaggctggtggagtggaaccctggaataacaagttggggactgtttccctcaaattttgtgaaagaattagaggtaacagatgatggtgaaactcatgaagcccaggacgattcagaaactgttttggctgggcctacttcacctaaagccttctctgggaaaatgtgagatgagaactgcactttggatcagttaacacacaagcccaaagaaaatttcggagggaatggaattggaaaaccattttaaagaagggctctgtgaacttcggacaagaacatccagtagtgaaacagaagagaaaaaaccagaaaagcccttaatcctacagtcactgggacccaaaactcagagtgtggagataacaaaaacagataccgaaggtaaaattaaagctaaagaatattgtagaacattatttgcctatgaaggtactaatgaaga

SEQ ID NO: 8870 - DNA, 711 bp, Homo sapiens
gagaggcaagaatgagagaccagggcagtatccatataggatgatgagaccatgtatgtgagtctaaaaaggaacagagtcacagtagtcttcagcacagttgttttaaggatgacgacgatgtgttcattggaaaggtgttcatgcaggagttcaaagaaggacgcagagccagccacacagccccacaggtcctctttagccacagggaacctcctctggagctgaaagacacagacgccgctgtgggtgacaacattggctacattacctttgtgctgttccctcgtcacaccaatgccagtgctcgagacaacaccatcaacctgatccacacgttccgggactacctgcactaccacatcaagtgctctaaggcctatattcacacacgtatgcgggcgaaaacgtctgacttcctcaaggtgctgaaccgcgcacgcccagatgccgagaaaaaagaaatgaaaacatcacggggaagacgttttcatcccgctaatcttgggaataagaggaggaagcggctggcaactgaaggctggaacacttgctactggataatcgtagcttttaatgttgcgcctcttcaggttcttaagggattctccgttttggttccattttgtacacgtttggaaaataatctgcagaaacgagctgtgcttgcaaagacttcatagttcccaagaattaaaaaaaaaaaaaaaa

SEQ ID NO: 8871 - DNA, 731 bp, Homo sapiens
cagttataagatctcaaacaggcccacaaattctgatactgtttaaagtgctacattgagtaaatatatgtaacatgcaataccagacattataactatagaattacatataccatatatatactagataaccagataaactatatagagctgtatagagtttaattttgttttttacagtgcattataggcggtgggttctgcagggcttggaaggcatctttctccccactctgttctctcatctgtgaacagctgctgctgttcttgccctaccataagggctgaatgccaggagctgacagctttaagtgatatgagcatatttcagtgctgtcaccgtatttctgtgcctgtatttattgtcccatttgcaataatatcaccaacctaggctgggcgtgggggctcacacctgtaatcccggcactttgagagagccgagagcgcggcacgagtcacatctgaaggttcacagaattccgaagaacccaggccttgggcccaacattggtgaaaaccccgtctctaccaaaaatacaaaaattaggcggacgtggtggcgcacgtctgtaatcccagctactcggtaggctgaggcacaagaatcgcttgaacccaggaggcagagattgcagtgagccaagattgcgccgctgcactccagcctgggtgacagaatgagactccatctcgaaaaaaaaaaaaaaaaaaaaaaaaaaaaaaaaaaa

SEQ ID NO: 8872 - DNA, 674 bp, Homo sapiens; identical to SEQ ID NO: 3637

SEQ ID NO: 8873 - DNA, 748 bp, Homo sapiens
agatctgtcctccccgtctctgcccagacaccagcatgtagacctgccgcttcaccgttccgattccgtcccctttgggtacttgggggagactctggctcccaggatctgttccctgatttcagtgccttcctaggacacaggggactccttgacgctccccaggctttctgtgcccaggcctctgtccccagcggtgaggttgcagtgagtgaaggagaggaggtgatctgttctccctccccttctgcccatctccagcatcttcttccccttaccctggccctgcagggccttctccagctccctttggttagtccctggccagtccctcctgtccgtggatcccttctccctacactgctacatgcctgcagcttccagctcctctcgtccccttcgattcctcatacgcggttccctcccgtctcagactctacacgcgatactccccacgaatgtgaagaggcctttccaagaggaaggggaaccagccccaaggcacctgtcctctgacccaccggcagcgagtgcgcaggtgtgagtgtaagttcatgtaggagagtgtatgcgtgtgcgcctgtgccctgcttgcaggcaagcagggctccctcatgtagcccggccttccccctgctgggggtccaccacatcgctgctctttctcacagtctgcctctgatgagggcgaattgctatgacattccaagctccaataaagactgtcccagaaaaaaaaaaaaaaaaa

SEQ ID NO: 8874 - DNA, 674 bp, Homo sapiens
tcaactcccaaagtcaaggtaaagaagcatcctaaaagcagtgaaacaaataacagacgatgaatctcccatgtgtctgacaacagacttttcagtggaaatcataaaggccaagagagagtggcatggcatattaaaatgcgaaaggaaaaatacttttaccctagaaaagtaaatctcatgaaaatgcccttcaaacatgtaggagaaataaagactttcccagacaaacaaaagctgaaggatttcatcaataacagactcatcctataagaagtgctaaagggagtacttcaatcagaaagacaaggatatgactgagcaataaataatcacctgaagatacacagaaaaacacagaatataacactgtaactgtggtgtgtaaactactcttatcctaagtagaaagactaaatgatgagccaatcaaaactactaactacaacaactttccaagacatagtacgataagacctaaatagtaacaacaaaaaattagaaaatgaggagatgaagttaaggcataaagtctttaataattttctttatgtctgtttgtgcaaacagggttgttatcagcttaaaataatggattataagaaagtatttgaaagcctcatggtaaactcaaactgaaaaacatgcaacagacacacaaaaaaaaaaaaaaa

SEQ ID NO: 8875 - DNA, 317 bp, Homo sapiens
taggccattgcagcatccttagatgggacgcataatcattaccttaaagcatcaccactcattttgaccatatagattttattatgttagtttaaaaggtcaatcagcctcatgactttatagttatgtcttgtatttaaaaacattttttatacatttggttatgttgataaaccaaaaacatttgattaataaaatatctatttgaataaattatgagctatcctttcaaacagctattggcaagttttaaacccaaaatatatacacatagttctgtaataaaactgtttgacttctcaaaaaaaaaaaaaaaa

SEQ ID NO: 8876 - DNA, 660 bp, Homo sapiens
aaggagttcccgttcccagtatttgtcaaatggacggattggacaggttggaaaattcaaaatgggacactggattctgagcccagttgaatatcaagaaaataaattcttccagagtggccaaatgaagtactttgtcaaataaacgaggatgggaacaactgagtcaactgcagcggcccctggaccctgtgcgactctagatagatcgttcttaacacgcatgttcacagactgctttttcattttagaaaaaaagtcaaacagaagtaacagtttctagttgccgaagtgtctgcttcatggtgctgaacgtgtcaggcccagtgcagcatgaatgtgaagtgaacccactgaaaagtgatttttaatgttctccagcaaacttcactcctgtttcatgttcactggtatttggtgcatttgcttgtaatacagttttttataactttactgttttgtaaatgctagtagtttacattaaattgccttatatttttaatgatttaatgttatgatatcatgaaagaaccaagaatctagtaatttatcagttttgtggaaaagcagttttaatttttagcctaccatgtgtacaaaatctacttcataagaagttatataaataaaataggtttgtagtaaaaaaaaaaaaaaaaa

SEQ ID NO: 8877 - DNA, 623 bp, Homo sapiens; identical to SEQ ID NO: 3642

SEQ ID NO: 8878 - DNA, 622 bp, Homo sapiens
cagtggctaatgtagaaatgttaagtggaaaaatatacagtttggtaaaataaactaggattctacagtgatttgtgggtttttttcccctcctttcttgtccacagcacttttgatatcaagcaagtggcttcctttttgagatattaaaaataaaagaaaaggaaaaaagtaaatgaagcccaactacctaaccctttcttatttgtatttgttttagtattgtgaagttgtgttaaatagtactagctagaaatacaaatttctggttatcatttctcttccctgtggcacttgacattttaattgtcttaaagtttttgaagtacatcttctggccccttgagtactgccagaggcaaaagatgtttgtttcttattcattccacttttgtctcctgggatcccttctgtagcctaaagtatggctgggaaatggacttgagaagattggcttgaattagatcataatcatgtgtgatcccatcatgaattcattggaatttgtgttgcatgtaaggcaatctttcctgttgtaaatcttccttttttaatgtacatatattttgaaaaatatgataaacatgaaattttaaaaaaaaaaaaaaaaaaaaaaaaaaaa

SEQ ID NO: 8879 - DNA, 662 bp, Homo sapiens
gcgcagaaccgctgctctgtgggcagcgtaggcgtagcatccctctcgtctcattagcctgtgactctgtgatgtatcatgatagtcacaaacgccgcatgtttaaaaagtcatagatgtcatcttctctctgcccccagggaggaaagccaccttctcttgccccttggcccctttgtcaggggccaggggtctgccgggtgggggtgccaacaggcctggccctttcctcccctgcatccagccatgggggcctctgcgattgccggaaggttgcatggctggtcccagggccagcacaggcccgaggccgggctgcctggttttatttttatgttaactttattttctgttttatgagtgtgtgtccgcccacccccacccccttcagtgttaagtggggagccctgggggagtctctcctgcctcccagcctctcccaagacctcccccctcgtcaccagccatccctctggaccaggcagagggcggaccgggtgggcaggggcctgagggtggctcgggccagcccaccagccaatggacccctcctcaggccgccagtgtcgccctgcccctttttaaaacaaaatgccctcgtttgtaaacccttagacgcttgagaataaaccccttccttttcttccaaaaaaaaaaaaaaa

SEQ ID NO: 8880 - DNA, 746 bp, Homo sapiens
ctggaatgtacacaagatgcggaaatgatctctgtagatattctgttttattctgggtcatctatagaagttatcaggaatgtgtttaataccaagaagagtacttttctaaggaatgatacatagaaaagattgtattgttaaaatgagttgtaaagcttgtgtttctttgttgctgcaagctatctgcccaagttaatgcaaatggacacattttttatgtcagagaaacacacacacacacacacacacacacacacacacacgaaaaacaaagaaaaaaatgcttgagctttttctaacttccccttgcagtctgttgtgtgagcagcctgtttatttctctaatattatgtcagtttattctctttaatggactgtaaaaaaatgtaatcacaagagtgccaaatatcttgaaatgccaaaaggcattttagtttcttttctctgtgctctgagtccacgtacaggaatgcttggagtgtcttttctgttatttatagggattctcttaaggcacaccagctgcctgttttgcatggtatttgcaaaaatgcctcttgcgtgaggaaatcttttaccattttttgtttgcaactttggacctcaagaggtttcccttcccttccccgttccctcttttcttaattcaatattctgtatgttgcaccttgaaccagcacacagggctatttctccaatgtacaataaaagaattgttcctgtgtcaaaaaaaaaaaaaaaaa

SEQ ID NO: 8881 - DNA, 702 bp, Homo sapiens
gggatttccaccatagaacttctactgtatactagccggggaaatttttttattttagaagattcagaagtttggatatttgtttatgtatcacatactgtgctacagttagcctccatgaagattctattttgactagacatcctgtgcaatagtttgtcacagtaacgttcattggttcctttgatagccattcagtgaaaatttttccccagtgaaaatttccccccaacttttgtggattttgaataaaattaggaaggaagttccttttaataattgggaaatactgtgaatggaaaattgccaaatcccttcttagtatattttaagcaccctacaacactttacctccctgcctttagtggtatttaaacatatggccaagttagtatttgggtttgattcctttggtgaagattaaggcatcaaaacatttcttaaaatgtttgagtacaaggctaagttataatgtcaactttcaaagactatgttgtgattcggtttgaatatgctgaagtgagcaattatgatttgcccaagtgcaatacaacaaatctataatgtatatttcacattttctacttgaacacattcatgtatatattttgttaaacttcatatgtatttaaaaagaatcatgaactgtatcaaaattctttcaataaaatttctatttaaaaatcaaaaaaaaaaaaaaaa

SEQ ID NO: 8882 - DNA, 693 bp, Homo sapiens
cttttcttgttgaaccccccaaacatcactgaagtccatgttcattcaaattttgtagatggtagattagctaataaaaatagccataaacatttctattataaggctaggcaccctaatctgttttatcagggaatttatttacctttttctgacataactcccagtttgttttagtttacacagtagttctgtcttacccacttgagtcaattatgactaaacttagaatcatgaaccccaccacagaatatctcattactgggttcttttattttgatttttttcttgttcttgagatgaggaaaggaagttaaaagaaaccaacattatttctctaaaacttccacaaagatcaaagttgaaactggaacatagctttcctgatttatagaccagaattctgaaaattacaccaaaggtggctaataattagaataaatcatatctgtaagaggctttaaaaaataagtattctgtttttcacattattttttcctattttatgcccattatccaagatgttgtttcaccttatctgagttagaaactagcaatcagtagcaaaaaaaaaaagaaaaaaaaatcctaaactaactttttaaaccttacaatgtatagacttgttgtactatgcaacttatatcatgttaagatattaaatgacaataataaaataaaaaaaaaaaaaaa

SEQ ID NO: 8883 - DNA, 709 bp, Homo sapiens
  misc_feature (55)..(55): n is a, c, g, or t
ggcaaaacaaggttcccccaattatgggagttgaggctaagatatgggtttggtngaggcctctgagcaacctcagcttgttcagcttggaggtccttcccagagagaaaggaaaaatgagaattaggttaatgggagctggctgccctgctgttcctggagaaaggaaactgtctctgtacagaacttcctgctcacagtttaaaatgcagcttcagttttctttttaacagaacagagctgtttataccacatgataaactcaccataagcaataacattaaaaaaaatcctttatataagtaggcccaaagccacaagattttatgactgttttaataaataaaattagataaatatacatacacttggtatgggaatgacctgcctctggtcaccctgaggaaaaagaaaaaaaaaatcattgtcaggtttgaagagaagatcatattctcaaaagaaacttcaaagccctcttgagcacagcagctgcatgatctgccattctctgtaccttggtggtgtttaatcaacaggaggaacctgaaaattttccacagttaaggcatgaggctccttctgtctctcagacacctgctctcccaacaagccaggctgggctcctgagactcacaaaccattttgtgtatttaaatagcacctcccttactcccaggaattcaatccttaattaaaaaaaaaaaaaaaa

SEQ ID NO: 8884 - DNA, 312 bp, Homo sapiens
gggcttcacaggaagggttggtgtaaataaccaaaccttcttcttggaggttaaaagggagcatcttctaacccatcgcaaagaggctaaaaacctgtggaaaaaaaaaaggttagatgaatggctaactagaataaccagtgtagagaagacctcaaatgacctgatgaagctgaaacccacagcacaagaacttcgagactcatgcacaagcttcaatagccgattcgatcaagtggaagaaaggatatcagtgattgaagatcaaattaatgaaataaagtgagaagaatacagaaaaaaaaaaaaaaa

SEQ ID NO: 8885 - DNA, 386 bp, Homo sapiens
  misc_feature (2)..(4): n is a, c, g, or t
annnactattaagtccccttattgtactttttatggcatgcccatgaaaaagcacttgtcttaagcctacagtatcagatcaatgggaaaacaacagaaaactaagaggagaattttcccgttaattttcttgcagaaaagtataagtctaattgcccattgccataaattttgtcttgtactcagagaagcaacatgcactggctcattttatgtgcaaagaaaagatttcactattaaaaaaattaacttggctaggtatggtgtctcacacctgtaatcccagcactttgggtggctaaggcagatagactgcttgaacccaggagttcaagaccagcctggacaacatggtgaaaccccatctctttaaaaaaaaaaaaaaa

SEQ ID NO: 8886 - DNA, 713 bp, Homo sapiens
aagtggatttgttagaccactctgtcaaactgtcaccaacagaaagatggagaaagaaagccggacaatcagcaaatacctggcaattaatccaaggtcaagatctctaatttgtttataaaggtggtaatgagttgggaagggaatgttttacctgaaattcagtatccacccaaatggcaagtttatactctgcttagtctcaaggtatggaaatgttttaaaactttttcatattattccttgagtctttagggattgagcctctggatggatggatggatggatggatggatggatgattatatagattatacagacagatgatagatagatagatagatagatagattagatagatagatagatagatagatagatagatagatagatagatagacagacagatatcgataggatagatagactcacatctataatccaagcactttgggggtcgaggtgggcagatcacataaggtcaggagtttgagactggcctagcaaacatggtaaaaccccatctccactaaaaatacaaacattagctgggtgtggtggtgcatgcctgtaatcccagctactcgggaggcagaggcatgagaatcacttgaacctgggaggcagaggttgcagaagctgcagtgaaccaagattgtgccactgcattccagcctgggtgacaaactaagactgtctcaaaaaaaaaaaaa

SEQ ID NO: 8887 - DNA, 690 bp, Homo sapiens
attcctgtgtagctggaactacaggtgtgtgctgccacaccggcccatgtttaacatttttttgtagagacagggatctcactttgttgcctaggctggtctcaaactacctggctcaagtgatcctccagtcttcacctcccaaatttcagggattacaggtatgaaccactgtacctggctaggtctagttttttaaaggaaaaaaaaagttgcctaggaaaataatgtagagtatttcaggtactgggaaactgacatcagaatcaaagagagaatgtgcttattattttccaactctggaaaattagtctgtggtgggaaattcaatgggagatgattagaaacgaagctgtgagaatagctgactgtcccaattaacaacgtaaaactgcaagagaaactacataagtcttcacaggaacaagtgcttaaaaacctaagtttatatcaaagactaatgaataacctggctgggctgaaactgtctctttaaaagtgagaagaaatgcagatacaagtaagactgggatcaaagcctgagtgaccatagagagatgataaatagttttccaatcatcccatcataaatactgcttttcaatgagactaatattaggggaatagatgatttatgggtattccaaagaaattgtgactatacaaagcgtcttagaaaaaaaaaaaaaa

SEQ ID NO: 8888 - DNA, 658 bp, Homo sapiens
ctgggtttgggggaatggagaggagcctctctgtgctaacatttcagacctgccaagagcaacaacctagttagtaccccagcagtacagaactcagtagtatggctttgttgatcagtaatgactagcagggatgttattacttctgaatctaagtctgcacctgcaagcagagtttgataaatccctcagtcagcaaatcccctcaaagccagggcaagatataaataaaattctatactaggaatgatagcaatttagtgaaagttcccatataccaataaccatgcccagtgctttagggaaactattttatctaatctccaaccttagggagtaattattattatcccaattttacagatcaaggaattggactcaatagttaagtaacttagccaaggatgaacactctatgcatagaacttctgggagagaaatgcttgataccacttagtgtagctccagcatggatcagcaaactttttctgtaaagaacaaaatggtaaatatttcaggttctgtgggccagatggcgtctgtagcaactacttgactgcggctgtggcatgaaagcagccatggatcatgtataaacaaatgggtgtggctgtgtaccagtaaaagtttatttaggaaaaaaaaaaaaaaaaaaaaa

SEQ ID NO: 8889 - DNA, 484 bp, Homo sapiens
cacgcatgcccaagctcttcctgcacctggaaaagaagacacctgtgcatagcagatcatcttcacctattcctctgactcctagcaaggaagggagtgctgtgtttgctggctttgaagggagaagaactaatgaaataaacgaggtcctctcctggaagcttgtgcctgacaattaccccccaggtgaccagccgcctccaccctcttacatttatggggcacaacatttgctgcgattgtttgtgaaacttccagaaatccttggaaagatgtccttttctgagaagaatctgaaggctttattgaagcactttgatctctttttgaggtttttagcagaataccacgatgacttcttcccagagtcggcttatgtcgctgcctgtgaggcacattacagcaccaagaacccccgggcaatttattaaaatgttgttggttctgtaaaaaaaaaaaaaaaaaaaaaaaaaaaaaaaaaaaa

SEQ ID NO: 8890 - DNA, 716 bp, Homo sapiens
tcacagtgtctgattttgtatgccatgaaccttgagccgagggccacagacaaagatatcactggtactctttctaatcctgaggttttcaattatggagtggaaacccacgaagcctacaagcaaaggtctctggctagcgacatcactgatgagcagaaaaaggttcgggaggctgacctagtgatatttcagttcccgctgtactggttcagcgtgccagccatcctgaagggctggatggatagggtgctgtgccagggctttgcctttgacatcccaggattctacgattccggtttgctccagggtaaactagcgctcctttccgtaaccacgggaggcacggccgagatgtacacgaagacaggagtcaatggagattctcgatacttcctgtggccactccagcatggcacattacacttctgtggatttaaagtccttgcccctcagatcagctttgctcctgaaattgcatccgaagaagaaagaaaggggatggtggctgcgtggtcccagaggctgcagaccatctggaaggaagagcccatcccctgcacagcccactggcacttcgggcaataactctgtggcacgtgggcatcacgtaagcagcacactaggaggcccaggcgcaggcaaagagaagatggtgctgtcatgaaataaaattacaacatagctaaaaaaaaaaaaaaaaaaaaaaaaaaaaa

SEQ ID NO: 8891 - DNA, 679 bp, Homo sapiens
tagctaccctgactactcaccaaaatatggtgttggtagtaataagtgcaacaggaatgataaagagtaaaaatgatgatgagacaataatggcagctttcatttactatatctttctcagtgtctgtcactattcctaaagcttaatatagattttttttttacttaaccttctctaaatcccataaggtagctactactattatccccaaaaagtaacaagcaagttgaactcagaaaacttgagttcaagtccacacttggctctaataagctggaaatagcttcatctttctagatacccaacttctccactatacaatggaaaggatgaggttgggggcactgtagattaaatgagctcccctgtactatagatttgacatccctctgaaaatacatatatgcccctcccaatccatggcaaacacacatcactaaacaatcatgccagtgaatctcattatgacttcaccatctttcacagcacaacacactaggaagttactaacaatcaacatgagctagcttttaaaatgaaacctcgttggcctcttaaggatgacacaatatcacctagctggaggctaggtatgcatctagtaagagtgtcacacaagtccaaaagctaaagtttggcaacttaaaatttgaacaccaagatgagattgagtctgtc

SEQ ID NO: 8892 - DNA, 748 bp, Homo sapiens; identical to SEQ ID NO: 3657
  misc_feature (120)..(120): n is a, c, g, or t

SEQ ID NO: 8893 - DNA, 735 bp, Homo sapiens; identical to SEQ ID NO: 3658
  misc_feature (65)..(65): n is a, c, g, or t

SEQ ID NO: 8894 - DNA, 678 bp, Homo sapiens; identical to SEQ ID NO: 3659

SEQ ID NO: 8895 - DNA, 702 bp, Homo sapiens
aatccccaggttgcataacctaagtcacctgaaataaagtctctttcccccaaactcttttcagagaactttcactcacagtagaagctatatttcagacagtttgatattaatgctatatattatttataagctactaattcacattttaataaatttaggcactttgtgagggtctttatacatcataaaaagtggcccatttttataatttctgtagtatttattgaaataatggcaactaccattaatatgaggatatgattccagtaggctctagcttattttaaagagaacatcttcacaaagaattataaaaatcaatatgaaagtttgtataataaggataatataaatcagtatttgtgtggtatattacactttctgcttcagtcccaatgtaaacctaaccataatcttaacaaacatctttcaagaaaagtagcagacataatcagaaatgaaaaacaaaaggctgacaatgtgactgtctttaacttggctttagaaaatcaatctttttgttttgagccctaagcatgtgttgatctacaccacttaattatgaattataaatgcttttcagatatgtctagaattggaagcattcataaaattgtttcttattgatagtcagcattagtggctaaaataaacatcaaaatgatacaaatctatatagcagttagaaaaaaaaaaaaa

SEQ ID NO: 8896 - DNA, 686 bp, Homo sapiens
  misc_feature (12)..(12): n is a, c, g, or t
agagcttttggntgtcattaaccgtggcacacagaagttactatgtttaagccagactttttcttcttgattctggacaacttcttgagtctattaaatctatatcatcttgggggagggaaaggcatgacccccgccgtgtggtgaccacctggaagtaacaagtagccaagtcacgtcccaaaacaggaactctgaaaataagcggcccgtgtttcaaagtcttcatgccaggcaaaagaatgtatttctggaattggttacatccctgaaaaccaatgacaccctatgttaccaaaggctagtttcttcagcttaatttaagtctgaatggtatttgtaaaaatataggtggagagaggggtgatggatcaaaattttgaggtgataaaaatgtgttcctaaggtgtgaatcttgagaacaaaattgtccctgaagggctcctgatcagtcttcctgggaagtgagccatggtgctaatgaatatacattcatcagccccactcagggaggtcccagcatcaaagctgcacctcctcctctctcgccctcccaactccccgatcttgcaagcctgcagcggtgctgcaaccccctgatctccttgtacctctggtctccagcagatgaaggtttgcactgcctgaaatgggagcagttatttatttttaaaaaaaaaaaaaaa

SEQ ID NO: 8897 - DNA, 747 bp, Homo sapiens
  misc_feature (115)..(115): n is a, c, g, or t
acgtcaggcttggctgcaaacactttattgatgtaggacctggtggtcatagatgaagatttatagaggagaatgttggtgtttgtactgtttaattttggcaaagaaaagtttngaagtcaaaaaaggtgattcgaattgcacagctcatttgcgaacggattttttatccagaaatagaagaagttcaagccttggatgacaccgaaaggggttcaggaggttttggttccactggaaagaattaaaatttatgccaagaacagaaaacaagaagtcatacctttttcgttaaaagaaaaaaaaaagtttttgcttcaagtgttttggtgttttgcacttctgtaaacttactagctttaccttctaaaagtactgcattttttacttttttttatgatcaaggaaaagatcattaaaaaaaaacacaaagaagtttttctttgtgtttggatcaaaaagaaactttgtttttccgcaattgaaggttgtatgtaaatctgctttgtggtgacctgatgtaaacagtgtcttcttaaaatcaaatgtaaatcaattacagattaaaaaaaaaaagcctgtatttaactcatatgatctcccttcagcaacttattttgctttaattgctttaaatcttaagcaatattttttattcagtaaacaaattctttcacaaggtacaaaatcttgcataagctgaactaaaataaaaatgaaaaggagagaaaaaaaaaaaaaaaaaaa

SEQ ID NO: 8898 - DNA, 747 bp, Homo sapiens; identical to SEQ ID NO: 8897
  misc_feature (115)..(115): n is a, c, g, or t

SEQ ID NO: 8899 - DNA, 649 bp, Homo sapiens
gggagccctaaggatcccacgacaccaagggaagcagctgagccatgcctcatttattcatttgtttcttcatttcctctataaacaagcattgtgttattattttaggaacattattgagcccctgacagaggaaattgggaataaaaatgaatgagactcattcctcttatactgtaattcagattaagcttctgggtaaatttggtgagtttttaacatgcatctatgactattccctcttgaaacaacactaaaatgacagaaaagggatattttgaaaatataaaccctcaaggacagggaggatgagagagatgaaaatagcaataacaatttggaagctgggaagcagacagacaagggtaaaaacactaatctggatcctaaacctgcaatggaaaggctgaagccaacttgctttccagaataccctaaaggacctggaattactgcaatggtatatctgtaagtggacgttaagggaaggaactaaaataagaacgaggaaaaagtggcatcagaagtgattggttcccaggtttctcctctcccttctggaagactagttttccctccctctggagaggataaaacaggatttcacgaatggtttggcacaggagtgccatacccaaaaaaaaaaaaa

SEQ ID NO: 8900 - DNA, 670 bp, Homo sapiens
aaccttgccttggcattcttacctcgctagatggttaaaaaaaactatatgtgaccggaccttaagttttttctaacattgtgattgtttattatcctgacttaagtgatttggtttcttttgcccattgaatatagactttgtgttcccaatcaggtgactgtgagtttccccacatagctgttattctggggagagaattgaaacttcattctttgtgatttagttagactttgagtacacattgaactagtaacataaactaagaatctcacaaatgtttgccatgacacagtaagaaccaggcataattttatgatggcagtgaaaattcacttctatgtcttactgaattcaaccccatagcatccttacctttaagaagataaacatgagtagataaaactaagtgcaatgttgatgggttataaatgacttgacggcagtgagcagcacttaggagaactgctccagatagagcttatccagataaagccaagttactaaatgtttaaataaaatttaagggagactaaagcttcaatacttggctttaggtggcttttcagagcatgcttttttaaggtatcaccaagtagttattcatacatccaaaaaaaaaaaaaaaaaaaaaaaaaaaaaaaaaaaaaaaaaaaaaaaaaaaaaaaaa

SEQ ID NO: 8901 - DNA, 682 bp, Homo sapiens; identical to SEQ ID NO: 3666

SEQ ID NO: 8902 - DNA, 682 bp, Homo sapiens; identical to SEQ ID NO: 3666

SEQ ID NO: 8903 - DNA, 751 bp, Homo sapiens
  misc_feature (55)..(55): n is a, c, g, or t
gaaattcaagccattcatttagttgagaatagtgtttttatccttattcaatttnccctgatttttatagggtatataaatcaccaagtatttacatataagtttaaaaagatatattttgcatcttaacacaatgcacttttaaggctctaatcaccaaaagcagctgaaactcaatcaggtttcaaggaagtcatataatcagagtcccaagattaaaagaaaaaaaattgtaatttctttacagttttaaaattttgaaatgacaggtagacaattacatatttacattttagcttataataacttctttagcagaatatatggtttagaaaaagaatctccaatgcctgattatctcttctactatatattttttaacaaacttttcagttacaccaaaaattaatatttgcctcaatgttcagaaataatgcttttctcaagaaaattaatttaaaaagagggtatatataactccaccaaactaaactataacaaatatctccagaaagagataaaagttttattttatctaaaacattttagtaatgtaagaattcttcattttaaagactatgaagaaaattaactcactgtgacaagctcaaaattaacattatttacacaaagaaacaaatcttctgttttaccatcaagatgataaagaaaaatgataacaaaattagaaatggtagatactgtgttaaccagagaaaaaaaaaaaaaaaaaaaaaaaaaaaaaaaaaaa

SEQ ID NO: 8904 - DNA, 745 bp, Homo sapiens
cttgatatgattttgatgcttttaatgtagaaatgataatctcttattatagtggtttataattatggttttatgtagggaagaaatgtcttttgttttgtaaagaaatatacctcaagtattttgagggtgatgagtcagccacttactgtctaatgatttaggaaaataacattctttgcattgtacttgtaatttttctgtacatttgacagtatttcaaaatttaaaaaaagtttttaaaaataacctcttttatgactcatgtcattttctcagtaagttcttctctgacaatccctttaaaactgcaacctctgcccagcactcccattcctttatcctaatttattttcctcatagtatttatcctcatgcattccacataatttactgatatatttgctctctacacccccacccccactccattccatttctagaatgtaagctccttgaaggtaggatgctttgcttttgttcattgttgtaaatcaatgtgtagaacagtggctggcatatgatatgtactcaaatagtcattaagttactgaatataattggttgttcagggacaggttctatttttgctctataaactgatagctctttgttcatcaaaagcccagaaggctattgagtttcactgtttaagtctaagtatgttaaacaaggtagagagttagggatttttagaactcaattaattccttcatcctaacttctaattaaaaaaaaaaaaaaa

SEQ ID NO: 8905 - DNA, 757 bp, Homo sapiens; identical to SEQ ID NO: 3670

SEQ ID NO: 8906 - DNA, 206 bp, Homo sapiens
gcatattccagagcctgtctgctatagctcagtgactgtgttgtgattcatagtacatttaaagagagagagagagaaagaatcccacagggcactattaatatacttctctccttccctgatctcatgacactcttcctgacagcagaatgatctgtgtgaccttgaacttcacatttcccacattggcccttggattgttcgga

SEQ ID NO: 8907 - DNA, 736 bp, Homo sapiens
ctcgacttattggagccaggctttgatggcttgtgtgtcctgaagtggggagcgcttattgcgatttcagcctcccaggtttgatcttagaatactcagttctaagtacctggcccccagtgccttttccaggcctaactgctctggggtagatgcctgaagaggagattaagggggaaaacccaaatgcctctacttccccgcccatatttgtggtccccattttgggtggtttgatttccttcatatagcacatgttcagtcattcagtctctccttcctgcaggtaccacccagtctttacagatgaacctcttggagactttcctcctcacttggcttctgctgcctcttgggttgggtgttgattatggtaggacctttttggtggccttaattgttggcatctttctttagaatatagggtactgaatgccttttttcctttcagatttgagtcttcattgtgaatcttgaagaaacttgtttcaaatgcatatataaagtttatatcagctactgaaaccactgctaagcattttaaaacattttaaatgacaatgcatttcttagccagacaactgcatagtagatacatagtaggaaaccctaagtctcaactgcataatagatacatagtaggaaaccagaagtctgtcaggatccaacaaagctttctttaaaaaaacaaaacaaaaaatacttctgctatagcaaaaacttacaaaaaaaaaaa

SEQ ID NO: 8908 - DNA, 727 bp, Homo sapiens
agaaaattgtgctgttcgtagtttgtataatcagtcattcatagcactatatcgagtacatacaggtagtttacctgtttatagtagtgtactaacaagtctccttgcagcttcagactgttatctataggcttatcgttcaaatacagcacttgaatatcccaagtagttcttctacgcatagctcacctttctaaacccagttaagcatggaagagaggtagtaggtaggtgcagtgtgtggaagctgcaaacaagtaggccttttattcattgatatcttttcccaagtactggattttaaatctgtatgtatctgtttgatttttttttctaatatttcagttgagctgctgttttcttccatgcaatattgtatactcaattgtgtatagaagaagctggtgagagtgccctcctacataaataagcaattgcagtgttttgcatgcaaaatataaaaaatttaaattgtcctgattctattttgtaaatggagaaacaatcatatctttctaagcggtaatggaggaagactagtgctttgtgcattttgatatatttgagttcattttttccacaatgtcatacttttgacgcagttgggtttctcataagtatcctagttcatgtacatccgaatgctaaataatactgtgttttaagttttgtgttgcaagaacaaatggaataaacttgaattgtgctacaaaaaaaaaaaaaaaaa

SEQ ID NO: 8909 - DNA, 702 bp, Homo sapiens
caggattttcgccactagaaacccaggtttatgtttattcagaatccaaagaaaaaaggcaactttatttaaagaggcccttcagcggcgagtgggtaattgttgctcaccacttagatttttggagctgccgccggcttccatggcaacagatgcctaagactgtgaggacccagagatgttccttaaagagtctttttattctgcatataatgctaattatagatgtgctctgctcattcggctaagtaggccacaccttgagagaaagtgtggtcagtcaagaccgtgcctcgaccaaaatgccgcggattccttggggactgagacaaagtgccattttgttgtgcaatgtagacttatttctgaatgcattttttttcctggtaaagaaagaaacagtcaaagaaatcactcgttcccatcactggactgtaggcacaagcgatttggccataagtcgtgcctggctgagcaagctctccaccactccctgttctgatgagagagcccatagtcatgtcctcgtacttgccatgatgagattaatggcaggtctggtagagtcacacagtgccttcaaatcatccaaggctgaattatgctcagtacagacttcacattaagtatgttccattatattccaattctttaaaacttggtgtaatagggttaattactggtaaaaaaaaaaaaaaaaaa

SEQ ID NO: 8910 - DNA, 755 bp, Homo sapiens
tcaatgaatagtggccccagactccccaggttccctagctctgtctgcgattcttggttcttcctaaacttgtatccaatggccctacaagtagcttcctggtgaccagctgacagagggaagtgaaaacacaggcctggggtcaacagaagagttggctcaatattgcaaccaccagacaaatctggttcaatttttatgtaacaaggttgtgagttatttttcaattcccatggaccctcaggtcatgtaacctgagtatgcccagataaaccaagcctgcaaccatagggagaacctaatgctcagacctagcagcagaaactgaattaagaagcagacactgcatgtcataacccaggatcaaatcaaattgagctctggcatcacctacatggcaggatgcaatcagataatgcctcccagcactaccttattgcaagatccaatcagatcatgcttcattgccctatgcttataaaacccaaccctgcccctagctcagggagacagatttgagcctttcctcctgtctccttgcaagtcaacttgtaattaagctttttctatttttgaaagcttgtgccaaagtattggtctccatgtgtatcaggcagcaagcccatggatttcttcgtagcagtatgttggagccaaaatcatactgctgctgtacctcagccccactcaaggatagccttaacaacggtgaagggaaatctttccagtggcaaagtcacaaaaaaaaaaaaaaa

SEQ ID NO: 8911 - DNA, 719 bp, Homo sapiens
ctcttccaagtctctgtacagctgatgaacaccttggctttgcatcctcagtcctctgccacagtgagatgagtttagaacaggggcttgtcatgaactcatggtaacatattctggggaggatttccctgctattggcatattccattgcaaatgaccactgtgagtgcaacagtgaccactgtgatctgcagtcctgcttcagctgcggcaacctggtgtatacaggtggacagcaagggctggatgctctgctggagcggatacatcaaccaccagcacatcaacaactccatctgctcagactgcacagtccccacttaggttactcttcctcatagtcatcattgactgtgatatcataattacctaacagcagttctttgctaaattaaacaaaagtgttccaatatacgaaattatccggccaggagttgtgactcacagctgtaatctcgacactttgggaggccaaggagggcgagacccaggagtttgagatcagcctaggcaaatggtaaaaccccatctcaacaaaaaataaaaataaaaattagctgggtgtggtggtggtgcatgcctgtattcccaggtactcgggaggctagatggaaggaccgtttgagctcaggaggtcaaggctgagctttgattgtgccactgcactccagcatggacaacagagtgagaccctctctcaaaagaaaaaaaaaaaaaaa

SEQ ID NO: 8912 - DNA, 626 bp, Homo sapiens
gttgctttgtacgggaggatggatttgtcacttagttcacggtctcagtagtctagacgcaacgtctgtcgacacgatttgtttgtggcgttgagtatttgtgcgcaagggaacctctgttgagagggtttgagtttccgttgtttgccgagtagtcttccactggagtgtttttaacccagtagtttggagtatcccagtgcgacgcaaccggttctttagggtattgcttgggttcggtttttgaggatccttcctctgaacgaagtaagaaggggttccgaagccggccttgggacccatgttcccgttgaaccagcggccgtcccagaaccgcctggtcagaaactcatgctttttggcacccggacaaccttgtagctggcggcccttgtacaggtcccgggctttggctgggtgggaccctggccgtgttgtcacatttcggctgctcgtaccttgtggatgtgccgggaatggggcgccccgtgtccaccaggacgcaccagcagtaccccgtggaggggtggcactgcactggcttgtagaggccgccgtgcgcacactcagggatcaccacattgtcgttcttgggctgcttggcttcctccagggcagactggtgc

SEQ ID NO: 8913 - DNA, 691 bp, Homo sapiens
gaaagagggtcttatgaacaaggtaaatgaacttgaaagtacagcaggcccctctgagaagagacaggacacacagactgtttcatcttaaccaggcatgaaaagatgtagtaccataacagtagattataagaaatcaactaaaatgatattaattcttaaaggatgagttatgtcaaacatccctttagaataactgccaccaccagacacaatgggagtttgcattcactgacaagctgtcttttataggcactcatcaagttctcaagagaaagattggggtaggacagaaaactataaaataagttactatcagtagcacactggtagaaaactctgcacacacttactaggacagttttctcataaaaagagaaaacattaagctgatgtgggagagacaggaaactcccttggtttcaatgatcaggcaaacttccactgtttctatggctgggttagatgtaaaacatatcttcctctaaggaaattattaaaaattctgtttgcttcacaacaatatctatttctacttggagaggagcaaaaccaaaaattatttttctctgggaaaggtacagaaaaattctaattgattcaggattctgtgctaatacaaagcagatacctgctaccagtgataagagtcaggaaactctcctgatcaagacccaaaaaaaaaaaaaaa

SEQ ID NO: 8914 - DNA, 733 bp, Homo sapiens
attctaattccacctcagtcattaatttaagagggtccattaaaatatccggttgcgtaccagttccacttaaatggtagctctctgatggagtttatatggctctctgttagccagcccgtaagagcatatggagagaaaggtacgattgaatgaacttctgtgagcggcataaagacatttactctgacaacattaaagaatttactggtactgttttttttccttattagtttaattccatctgtttctgtttaattgagtgaaacttaataataaatggtgtctctagtgagcacatgtacacacctctcccagttgttgggatttaaaatgaagctgtgacttttaggcccaaaattagcgtgacacttaatataacagttttctttctacttcaccaaataatgacacacacacacacacacacacacacacacacacacacacacacacacacaatctgtatgatgatttggcctggagttgtagacatcacagatcaaaagtggcctggtgctagctgtttgggtatatccttgaaaagggcaactttgtcatttcctagagtaacctagagagagatttccaagcatttccccatgaacagaagtggtaaatgctgatttattgtgccatatgtgtgtttgggaggaggggagatagcgtcttgttttgaaaaaagttctcacttcataaaataaactgcacaccactccaaaaaaaaaaaaaa

SEQ ID NO: 8915 - DNA, 712 bp, Homo sapiens
  misc_feature (85)..(85): n is a, c, g, or t
gctctttgggccctgttctctaccacgtgtgatggcccacatttccccacatgactgagtccctccatccgacagaggaccaacnaatgcatatcaactgcagtttttctttgaggcaaagtgtaactttaactaaaagtaactcaaccttaagcaataattaagtctatccaaatcatcctaactagttttcatatttttttatatttaaaaagaaaaattacaggcctgagcacaagagcagaattaaaagaacggcagcacaaggaactcgaagtctcttctcaaacaaattccacaggagcaaatctttccatcttacagagtggaaactggcaggaggcagggttataaccaattcttactcaagtacccaaatgtgacgtttccttttacaaatttgtgctttggcaaacgctgctccctattttggaatgcacttccattttttgccagacaaattatgactccttccttaaaatccagctcaaatctccccccttttggtggctttctctgacactccatcataaagctaattgtttaagtatgatccagtggcacagtttattcctacttcataacttttatctcactatgttgtaagatattaggtatgtttcttctactaccagtaattttcaaagagttaaggaagaaggatagaagacagcagtataggtgaatgtgtgcatgtgttaaaaaaaaaaaa

SEQ ID NO: 8916 - DNA, 726 bp, Homo sapiens
ttatccaaatattattgtctagcatagttcttaggtgggcaccttttaaaatatgaaactcagtacatttataggtcaacttatgatgattgaaaataaaaataagacatttaaatcaatgtgaaaatattaccaaatttatgagacttgtatattaaatttcaggaacctatgttattgcattaagcaagagtatgtctgtttatcccaagttttgttgtttactttagctacatattcttccttttaaagttaagtgatggtataggaaagggtttcttgaactttgtggtattacgtcatgtcattggtgtgataaatcagtaccgggcaatagtacttgaagtatgcttataattcacattgatcttcatacttaaatttgcaggctaccttgacacagatccaaataaaagtatttttgtaaattactgatgtatctaatccagtgaaattgagttatatggtcatgtctgaataattctcattttgataattttataatcgtaatcatgacattcagagtcatattatggtcaactttctaaattagattaaaagaaatatctatttttggttacatagaacaagtttcatttagtgctgaaaggtcaggcttaagacatttctaaatggcacttccaaaaacggcagcacttttactgccaaagggcaggtgaaaatgcatttccccatataattttgaatgttaaaaaaaaaaaaaaa

SEQ ID NO: 8917 - DNA, 792 bp, Homo sapiens
cctatagacagttgccaaaagcaggttgtccgtccggattcccggatattatctacgtcatctttgaaaaggtgtttcaacggttcttatctttaatggctatttaaatttaatataatagtaaattcttacgacagtatttgttaacactaactgcacattggaatcactagggagcttttgaaatttgatttcctgggatgcacccaaaccattaaatgaccatttatgaagggtggtgcccatcttccatgctttcttctttcttaataaaaattcagttttttgagtttgggtaaaagtgatgagcctacctctataccttcatgtaagccatcattgaatgctgcattgatgaatgactttgaggctcacgagttcctcatgtgcacttaccaatctcacttaccatagcatggcagttagaaacttagattcttgagccacacttcagtccccaacttaacctctctgtgcctcagatatgcctcatctgtaaaacgaaaatagtaaaagcacctgtctcatacaatagggtgaaacagtcagcagcatctggccaatgccaagtaaacacttggtattattattatcatctcaactgtggaatatttaagaggcccctctagcattatagtagaatctcggcccctcttgaagtgtcttccattgatctctgattgtccccaaagcagtacatcataaacaagactatctgcagaagtaatttgccttcttccttcttgtaagttcctccctgctctgactctcccttgtcctataaaaaaaaaa

SEQ ID NO: 8918 - DNA, 719 bp, Homo sapiens
caccagaatcaggacatttggctttcttgaggctactatcatacttcctgtgccacagttactattctctaatatggggttaatgatgatttaataatacgtattatgtaaaagtggttagaatagttcctggcatataataagcactagagaatattaattatcatgacttatcactatcaattttgttcagctggtaagttgcagagtaggagtccaaacccttaaattttcttcttactagccactattaaatgcagggcctacaatctttaaaatctaggccagaataaaattatatgcaccaaatatgaaaactgcaatattataattaatacatgccaggcttccatgtctgactgtgagtttgtagaatacttttctattgagaataaataggaaaactggatcaattttttaaaaaataccatttgagagaaacaccaagcagccaagacacaagggatgaatatctcaacgaaaagagagaaattttggggggtaaatttaacattctataccactccaagaaacctactaattcttaagtgacgtggatgaagaggctggtactcaatctcaactcatctcaatgcctgattggattaaggcaatctgcttctactctgcctaccagaagctaaactccctgagactccctgatggttcaataaaaaattattagacacaccaggaggcagaaccaaaaaaaaaaaaaa

SEQ ID NO: 8919 - DNA, 712 bp, Homo sapiens
ttgattcttctaattgcccaggtgatctcaaatactggcatcaagcatcttctcacctcaccccccaaagtgctgtgattacagatgtgatccaccatgttggcacaaattaactgtaatatactgagtttaagttgaacagcattagaataaaaagtttccttttagttcaccagcttttgaaagtttgtttttatgaagaccaacggttattttatcccccgtggggtatgtttagctttacaatccagactcagggcagaactttatgatatgtgcacttatatcacacacacacacaccaagatgttttaaataaagacttgaggccatagattcggccagaccccccccaccctctcccccacttcccaatagtacccaaatcctggtgaatagagaaataaccgggaaccaaagaagaaatttatggttcccatcaaaattccatgaaaaagagggtcagtggccacatcatagttcaccttatcaagttacaccatatatgtcatatcagctcggtaattttacatgtctcctataaatactttaaaatactaaagcagaaagttatcagaaatgacttcctactaatacagaaatctaatttgaagattgcacttgcactttaatgagtctaagaaaacatgaaaagtattatcagctaattttcctccaaatctgaaaaggaataaagtaggtaaaaaaaaaa

SEQ ID NO: 8920 - DNA, 756 bp, Homo sapiens
aaagcaagcaggacccaacccggggattctctagagatccagtgacagggatccagttcaggacggagatcccgggagaaaagtgaaggaagagggacagggcccacccgagggtttccttcctggtttctcagacagctcctgggcccaagactcagggaaacactgagacagagcgcttggcacaggaggagcgggtcaggcgaagtcccagggccccaggcgtggctctcagggtctcaggccccgaaggcggtgtatggattggggatgccccgccttagggattcgccacctccgcagtttctcttcttctctacaacctgcgacgggtccttcttccttgatactcacgaagcggacacagttctcattcccactaggtgtcgggtttctagagaagccaatcggtgccgccgcggtcccggttctaaagtccccacgcacccaccgggactcagattctccccagacgccgaggatggtgctcatggcgccccgaaccctcctcctgctgctctcaggggccctggccctgaccctgacccagacctgggcgcgtgagtgcagggtctgcagggaaatggtcgggaggagcgaggggcccgcccggcgggggcgcaggacccggggatccgcgcagggaggagggtcgggccggtctcagctcctcctcgctcccaggctcccactccatgaggtatttctacaccaccatgtcccggcccggccgcggggagccccgcttcatctccg

SEQ ID NO: 8921 - DNA, 814 bp, Homo sapiens
  misc_feature (197)..(197): n is a, c, g, or t
ttccccccctcggtgaagtcatttcctgccgattccctaagggttacgccatgcccttgctcaatcagttgttggagcactgaccagaacacttcgctctgcaagccagacaggaaaagattccatgttcagataaggcaactgggctggtcttacttgcatcacctctgctttcctccactgccatcattaaactncagctgtgacatgaaagacttaccggaccactgaaggtcttctgtaaaatataatgaagctgaaacctttggcctaagaagaaaatggaagtatgtgccactcgatttgtatttctgattaacagataaacaggggtatttcctaaggtgaccatggttgaactttagctcatgaaagtggaaacattggtttaattttcaagagaattaagaaagtaaaagagaaattctgttatcaataacttgcaagtaattttttgtaaaagattgaattacagtaaacccatctttccttaacgaaaatttcctatgtttacagtctgtctattggtatgcaatcttgtaactttgataatgaacagtgagagatttttaaataaagcctctaaatatgttttgtcatttaataacatacagttttgtcacttttcaagtactttctgactcacatacagtagatcactttttactctgtgttaccattttgactggtcgtcattggcatggggtggatatagggcataggattacttgtctcagaagctgtcatagaatttcttgctgcccaattaaaaaacctgtgttctttacacactacacgtaaaaaaaaaaaaaaa

SEQ ID NO: 8922 - DNA, 621 bp, Homo sapiens
atgatcgtcaactctcacctcttctttggtaaccctgcccatctggtcattggtgctgttcaacaggaaatgactcgggtgctgttgcatttctcgcagcaggagagactcggtggttctgttttgcattgtctgcatgcaaggagagactcagggttctcgcttgcattgtctgcagtaggagagactcggggttctcgttgcattgctgcaagcaggagagactcggggttctcgttgcattgctgcagcaggagagactcagggtactgctttgcattgctgcatctctcaaaagctttgttttgttgttggttagatttggcactgtgtagtcatggcccatgtggcttcaggttctcacaggacacagggacatgtgactgatgaggtttcaagagaggaggattggatgagtgggggattgcagcttccctcctcccgacacctgggaccctccactcacagagagaatgagcttctccagcgtttggaggagagaggagaagatgggctcccctgcaagtccatagaagcctccgtggctttctggattaatgcagccacacactcactccttgcacagcctctgcccagtgtccagttttacatatgctttgg

SEQ ID NO: 8923 - DNA, 707 bp, Homo sapiens; identical to SEQ ID NO: 3688

SEQ ID NO: 8924 - DNA, 691 bp, Homo sapiens
ccaaatgggattcatgaccctctcagggtacaccatcttcttgagaatgaggactgtcaggtgacgccctcgctgctcctacctggctacttaacatcgacttcgttcacttcacggatgttcagtggatatcggtcacatgccaggtccccagctacgcattcaaggatggataatatacatagcagcacatccttgaggtactcataccttggtaaagggaaagaaatccatgaatggatacctctgtgtcctaagtgtttgtaataattctgtgtgtcaggcctctgagcccaagctaagccatcatatcccctgtgacctgcatgtgcacatccagacggctggttcctaccttaactgatgatattccaccacaaaagaagtgtaaatggctggtccctgccttaactgatgacattaccttgtgaaattccttctcctggctcatcctggctcaaaagctcccccactgaacaccttgcaacccccacaccctggccaccagagaacaaccccctttgactgtaattttccattacctacccacatcttataaaatggccccatccctatctcccttcgctgactcttttcggactcagcccgcctgcacccaggtgaaataaacagccttgttgctcaaaaaaaaaaaaaaaaaaaaaaataaaaaaaaaaaaaaaaaaaaaaa

SEQ ID NO: 8925 - DNA, 582 bp, Homo sapiens
gacagtctatgacagacccttcactgtgatgctgcaccgataggttttttgctccggggcctggggaccgggtcagccgcttccagtcttctgcactcaccaccatgtgttcttggggtcctggttcggggacgcagtcggccccaccctgcactggtccaaggtcggaggagacaggggatgaggaaggcctcagtccactgcccagcggcccaggcatcctgggtttcaccagtgacgcgttctagcagacactgactgcgcacctgctctgtagcagacacggaagagtccaagggagcagccacgttaggaagagagacttgggaacagctacacagggagctagaacccctgctccccctgtccccaccccaggagagtaaggggacgagggccagctctctggcatcaggctgcttggacatgaaaccccgtctccaagctcaaggtgggagaccctggcccagtttccttatctccttgggcccagccttccccttgctagctagttcttacttcataaggttttagagagaaataaacgcagtaatgcatgaaaaaaaaaatataaaaaaaaaa

SEQ ID NO: 8926 - DNA, 695 bp, Homo sapiens
gtttaaatttaccccacaggaatggtgatagtaatagggagggagctctgtgggttaactcctgggttgctgttgggtagacaggtggggaaaaggcccgtgagtcattgtaagcacaggtccaacttggccctgactcctgcgggggtatggggaagctgtgacagaaacgatgggtgctgtggtcctctgcaggccctcaccccttaacttcctcatgcagactggcactggcagggcctctcatgtggcagccacatgtggcgttgtgaggccaccccatgtggggtctgtggtgagagtcctgtaggatccctgctcaagcagcacagaggaaggggcaagacgtggcctgtaggcactgtctcagcctgcagagaagaaagtgaggccgggagcctgagcctgggctggagccttctcccctccccagttggactaggggcagtgttaattttgaaaaggtgtgggtccctgtgtccttttccaggggtccaagggaacaggagaggtcactgggcctgttttctccctcctgaccctgcatctcccaccctgtgtatcatagggaactttcaccttaaaatctttctaagcaaagtgtgaataggatttttactccctttgtacagtattctgagaaacgcaaataaaagggcaacatgtttctgttaaaaaaaaaaaaaaaaaaaaaa

SEQ ID NO: 8927 - DNA, 679 bp, Homo sapiens
  misc_feature (20)..(20): n is a, c, g, or t
ggcacttcctcagtacgttntgccaacctatgaaatggccgtgaaaaatgcctgaaaaggaaaccaccacctccttacttacctgcctgaagaaattctgcctttgacataaatcctataccagctttttgtttgtttatgttacagaatgctgcaattcagggctcttcaaacttgtttgatataaaatatgttgtcttttgtttaagcatttattttcaaacactaaggagctttttgacatctgttaaacgtctttttgtttttttgttaagtcttttacattttaatagtttttgaagaccatctaggttaagcaagagcacaagtgccattgtttgcctttaattggggggtgggaagggaaagagggtacttgccacatagtttcctttttaactgcactttctttatataatcgtttgcattttgttacttgctaccctgagtactttcaggaagactgacttaaatattcggggtgagtaagtagttgggtataagatctgaacttttcatctgcagaggcaagaaaaatatttgacattgtgacttgactgtggaagatgatggttgcatgtttctagtttgtatatgtttccatctttgtgataagatgatttaataaatctctttaaatactaaaaaaaaaaaaaaaaaaaaaaaaaaaaaaaaaaaa

SEQ ID NO: 8928 - DNA, 747 bp, Homo sapiens
  misc_feature (52)..(53): n is a, c, g, or t
  misc_feature (56)..(56): n is a, c, g, or t
gctcggtccataaacgtataccccaagatttgacggaatctgaacatgccgnngtntcatcataagagctactctgaggacgatattcaccgttccataagtataatattggtgcagcacagagcatggtaacaagagactggatgctgctatcgttccatgaacgggaaaggccccgtttacttacttttcagtgtcaacggcagtggacacttctgtggcgtggcagaaatgaaatctgctgtggactacaacaccatgtgcaggtgtgtggtcccaggacaaatggaagggtcgttttgatgtcaggtggatttttgtgaaggacgttcccaatagccaactgcgacacattcgcctagagaacaacgagaataaaccagtgaccaactctagggacactcaggaagtgcctctggaaaaggctaagcaggtgttgaaaattatagccagctacaagcacaccacttccatttttgatgacttctcacactatgagaaacgccaagaggaagaagaaagtgttaaaaaggaacgtcaaggtcgtgggaaataaaaggcagttctacacagactgcagcaacggttgcatctgcatatcctaagaggaaaaaatgaccttcaagagaattaggacttttttcttaatttcactgacttcagagacgattgcagacttgcagtttaagtattggaatttcacaaaagacataggacttaactggaaaatgaaaaaaaaaaaaaaaa

SEQ ID NO: 8929 - DNA, 761 bp, Homo sapiens
cgggtccgaaaccagcaagaagtatgctgaaggctgtcactcggctaagcagattggtggaatggtcctgtggggggtattgaatgggaagcttttgcccggggaaccaaaagctctccatggatgaggtggtgaaagccacttctaggggctgcatcaccatcataggtggtggagacaactgccacttgctgtgccaaatggaacacggaggataaagtcagccatgtgagcactgggggtggtgccagtttggagctcctggaaggtaaagtccttcctggggtggatgctctcagcaatatttagtactttcctgccttttagttcctgtgcacagcccctaagtcaacttagcattttctgcatctccacttggcattagctaaaaccttccatgtcaagattcagctagtggccaagagatgcagtgccaggaacccttaaacagttgcacagcatctcagctcatcttcactgcagccctggatttgcatacattcttcaagatcccatttgaattttttagtgactaaaccattgtgcattctagagtgcatatatttatattttgcctgttaaaaagaaagtgagcagtgttagcttagttctcttttgatgtaggttattatgattagctttgtcactgtttcactactcagcatggaaacaagatgaaattccatttgtaggtagtgagacaaaattgatgatccattaagtaaacaataaaagtgtccattgaaaaaaaaaaaaaaaaa

SEQ ID NO: 8930 - DNA, 291 bp, Homo sapiens
atttattgtctattttatatctgttttgctgtaacattgaaggaaagaccagacttttaaaaaataagagtttatttagaaagtatcatagtgtaaacaaacaaagtgtaccactttgattttcttggaatacaagactcgtgatgcaaagctgaagttgtgtgtacaagactcttgacagttgtgcttctctaggaggttgggtttttttaaaaaaagaattatctgtgaaccatacgtgattaataaagatttcctttaaggcagaggctggtcgaaaaaaaaaaaaaa

SEQ ID NO: 8931 - DNA, 366 bp, Homo sapiens
gctatatatctctctacatatcccccgcgtctttcatcacttgtgggtttctctgttgtagacatcttgtgacactaaatcacacactatcctaatcgcccatattaatataatttcccttcccttctcacctaactgccaatctataggaatacataaatagttttgtctattatgactttggtgagtagccttgaataatgtgtatctcaagactaataaaatcatgaagactgagtaaatcgttgtgatcttttcttttaccaataaatttggcttgtttcacaaaatgtcacttgaattggtcctatttctcttcctatgctctaatcccactacccctattctaggctaaaaaaaaaaaaa

SEQ ID NO: 8932 - DNA, 670 bp, Homo sapiens
  misc_feature (632)..(632): n is a, c, g, or t
tccctgatgtgctatggaccctgtcctcaggacagctaattgccaccatgaaagaagcatgtcgctatgcactgcaagtgaaacctcagcgcctgatggcagctatgtacacatgtgacatcatggccactggtgatgttctcggtcgagtctatgctgtcttgtcaaagagagaaggtcgggtacttcaagaagaaatgaaagaagggacagacatgttcatcatcaaggctgtgctgcctgttgctgaaagctttggttttgctgatgaaatcaggaagaggacaagtggcctggccagcccacaactagtattcagccattgggagatcattcccagtgaccccttctgggtgccaactactgaggaggaatacttgcactttggggagaaggctgactctgagaaccaagcccggaagtacatgaacgcagtacgaaagcggaaggggctttatgtggaagaaaagattgtggagcatgcagaaaagcagaggacactcagcaaaaataagtagctacctactactggtggattcttttccttatagtgaatttaaaagtatcatcaagggtttaatattgggaaaatttctttttgccacattatctctgtttattcactttcatanaagttgatccatataaatattttaaaaaaaaaaaaaaa

SEQ ID NO: 8933 - DNA, 706 bp, Homo sapiens; identical to SEQ ID NO: 3698
  misc_feature (180)..(180): n is a, c, g, or t
  misc_feature (192)..(192): n is a, c, g, or t

SEQ ID NO: 8934 - DNA, 714 bp, Homo sapiens; identical to SEQ ID NO: 3699
  misc_feature (305)..(305): n is a, c, g, or t
  misc_feature (423)..(423): n is a, c, g, or t

SEQ ID NO: 8935 - DNA, 747 bp, Homo sapiens; identical to SEQ ID NO: 3700
  misc_feature (663)..(663): n is a, c, g, or t

SEQ ID NO: 8936 - DNA, 166 bp, Homo sapiens
cggatgtaaaggaaagccacttccttgaatggaggatgcagcttaagatattactattcagcagaactgacacccattggaaatgaaccatgatcccaatccaagtgaataaaccaagagctattttattgtttaaaaaaaaaaaaaaaaaaaaaaaaaaaaaaaa

SEQ ID NO: 8937 - DNA, 201 bp, Homo sapiens; identical to SEQ ID NO: 3702

SEQ ID NO: 8938 - DNA, 105 bp, Homo sapiens
ggagctcctgaggatggatctgcagatagtagagggccctgcctacagccaccaccacctggctgctattgcaggaggccacactgatgttctaaaaaaaaaaaa

SEQ ID NO: 8939 - DNA, 183 bp, Homo sapiens
tctaccatatgagtaggtagatacagatatagatagataaaatacacatatatagatataaaaataaataaaattttgttggatgtactccaggaaatagaaaattttagctgctttatcatctttacccaaataaattaaagttgcccctgtaatacataagtttataaaaaaaaaaaaaaa

SEQ ID NO: 8940 - DNA, 715 bp, Homo sapiens; identical to SEQ ID NO: 3705

SEQ ID NO: 8941 - DNA, 192 bp, Homo sapiens
ttgttttcccatgaattatttattttcactggcttctctatattcccaaattcatatttcagaaccctctatttaaaaaagaaagataggcaggtttactgtaaatgaagtaggctgccatattcagaggcagatactaaattaagcataggtggtaaataaaggaaaatgtagagaattaaaaaaaaaaaa

SEQ ID NO: 8942 - DNA, 800 bp, Homo sapiens
gaccatcccagccggagttggaccggtccagcccactggtgtctgggtatgaggctaccttccttggatgcccatggttatgtaaggcgatggagatgtactgagtctggggtttgtgggtggaaaaggaggaaggagggaaacacgttagcaagcaacaatgtttctcaacaaggggtaagcttagtctctgagtatacatatccccagatatcacagtctcactgaattccagaacatggttccaagctgaagggattcctgctcttctgcatgaaaggtgtattttgtgtgtggcacctcatcgctgttgtgtttgttgatctttgattcttttatcaattaggttatttgatatgtcctttcctactaaatgtattttcgagcaaagagagccatacgtcccatcctaattttcttgattacctcccctattcatgatgcatcatctttctcttctgtccgctcctatctatattctgcagatcaccacgtggatatatagaaatattgagatctcactactcgttctcccactcaaaaatttgttagatttggctccattgttttctgccagttaccattgccagagaaatcagagattagattactttcttctcctttgtaaatagcttattattaacttttcaacctgagtacctgaaggattcttttcttctttcaatttaaaaacgtgctcaggttgggaggttgaggcgggcagactacctgaggtcaggagttcaagaccagccgggccaacatggcgaaaccccatctctactaaaaaaaaaaaaaaa

SEQ ID NO: 8943 - DNA, 465 bp, Homo sapiens
aatgtcacacaggtaacaggctatgacccttaggcctatttaggtgaccactatagtaccagtttgtaccttttagcctggctggtaccggtccggaattcccgggatacactgggtgctggtgtctgaggtgagggcagccctgttggggactatgtcccttcgctggtggcactctgatctaactcttctgttcgttgttagaattgtggtgcggtacaccagttggtgtcagacccgagccggtgggatctgcacaccttgagtaagccctttctcgacccgcctgttggaccaaaccccactactcttcatgggagcctcccgagtttcttctcacctgtgtgaagtcccctttgtttactgtcctgagttttgttctcgctcatctccaacccctcttgtagttttttcttcctcactgtcactgtaaccataaaaatactcagtatgtcagtgatagac

SEQ ID NO: 8944 - DNA, 192 bp, Homo sapiens
gtgatatttgtaaataaaggtagaaatattagatccatttctgcagaacttactgtacagtttagttggagtgtagcactgaagaactgtcagctcagcgttgactgaggagatagtgaaaatagcctatacacagcatcttgtgaaaagtactggcgccgtggttgcagcaatatagggcaaaaaaaaaaa

SEQ ID NO: 8945 - DNA, 154 bp, Homo sapiens
ctagttatgacttccaaatagattgataatagccttgcatgttgtagttagagacactgtagctgtatctgtatacctgtaatatagcctgggaagttctgttgctgcagagttatcattaaagtcacttggaattgaaaaaaaaaaaaaaaaa

SEQ ID NO: 8946 - DNA, 676 bp, Homo sapiens; identical to SEQ ID NO: 3711

SEQ ID NO: 8947 - DNA, 685 bp, Homo sapiens; identical to SEQ ID NO: 3712

SEQ ID NO: 8948 - DNA, 248 bp, Homo sapiens
gcctgtctccctcccaggccacctgcttcagaccccacagcactagttattcatgccatagtatgggccccgggattttctctggactgtgcctgtaaggaaggcccatgaggcatgcatttaatcctctgcctgctgatggagagtgtttcacaggcaaaagtaaattccatacctccatcactgcatggagttggccctattcatgctcatatgtattgcctgttgcttttaaaaaaaaaaaaaaa

SEQ ID NO: 8949 - DNA, 674 bp, Homo sapiens; identical to SEQ ID NO: 3714

SEQ ID NO: 8950 - DNA, 428 bp, Homo sapiens
gcatgtacttaccgaagcgaacgcagcctttgagagtgggcgagtgagttgacggcctctcttccctgctaggagtgcgacaagcagttcctcgggctggctgacccagtccagctgaattcctgcctggctgctggtgacatcctacccctggtttttggcctcctttttgctgtcaccagcgtcgcgttccttgtgcagatgagaaggcagcacagaaggggaaccaaagggggtgtgagctaccgcccagcagaggtagccgagactggagcctagaggctggatcttggagaatgtgagaagccagccagaggcatctgagggggagccggtaactgtcctgtcctgctcattatgccacttccttttaactgccaagaaattttttaaaataaatatttataataaaaaaaaaaaaaaaaaaa

SEQ ID NO: 8951 - DNA, 735 bp, Homo sapiens
tttccccaggatatggaatccatggaagaatagaggttattctgtaatggaaagtgttgcctgcccaccaccgttcttgtagagctgagcattttctttttaaatagtcttcatggccatttgttcttgtagcaaatggaacaatgtggtatggctaatttcttattattaagtagtttattttaaaaatatctgagtatattatcctgtacacttatccctaccttcatgttccagtggaagaccttagtaaaatcaaagatcagtgagttcatctgtaatattttttttacttgctttcttactgacagcaaccaggaatttttttatcctgcagagcaagttttcaaaatgtaaatacttcctctgtttaacagtccttggaccattctgatccagttcaccagtaggttggacagcatataatttgcatcattttgtcccttgtaaatcaagatgttctgcagattattcctttaacggccggacttttggctgtttcctaatgaaacatgtagtggttattatttagagtttatagccgtattgctagcacccttgtagtatgtcatcattctgctcatgattccaggatcagcctggatgcctagaggactagatcaccttagtttgattctattttttagcttgcaaaagtgacttatattccaaagaaattaaaatgttgaaatccaatcctagaaataaaatgagttaacttcaaaaaaaaaaaaa

SEQ ID NO: 8952 - DNA, 742 bp, Homo sapiens
tcccatatggtatcataagtcctccgtcagaaattattactctctatgcacggtttgtgatcacaatagtgtatatgtgatacttgatatataacgatatatattgccatcacaccgtacatcacaatgaagtgttctataacctgatctctttgcccttttgctatgtgaggagtgaatgagtggccttctgatgctctgactcttctctgtatgtcaactcatccctggcacaagaaattccagtcatgtgaagcaaactgccctttgtcctcaaagaaattgttgaaaaagaaaactttttacaagagatttttctgcatattctctgccttgttcttatcagcttgaaatgttggcattttctaaccttgttttgttggctacaactaattcagtattcatgtccacattgagaagtgccctaattgaatgtgtttgaatgttatccttgcacaattctttaaattgaaacgataaaatgttttacctcactgcttggacactacattccaagcttttcaactctaggacgcaaaacgaaaatcatgtctttcctgtattgtaaattttagactatttcatatacattgtattaaaactgccatatcaattttaatgtatagattttgcaaatattatgctatatgtaatacctaactgtatctgtagtgtatcatgtaatatatttatgcccaataaatgttttaattctttctgacttaaaaaaaaaaaaaaaaaa

SEQ ID NO: 8953 - DNA, 699 bp, Homo sapiens
  misc_feature (1)..(1): n is a, c, g, or t
  misc_feature (42)..(42): n is a, c, g, or t
ntggtgatcattgggttcaggagttgagaccagcctggccancatggtgaaaccccatctctactaaaataccaaattagccaggcttggtggcacatgcctgtaatcccagttactcaggaggctgaggcaggagaatcacttgaacctgggaggcagaggttatagtgagccaagatggcgccactgcactccagcctggacaagagtgagactccctctaaaaaaaaaaaaaaaacctttgcatatgagctgcagcaataaaagtgctatgagacccaacctctctgtaaccgtattctttgaaagctgtggaataaggcccagtgcagtggctcacatctaatcccagcactttggaaggctgagacgggtggaccacttgaggccaggagttgaagaccaatctgggcagtgtagcaagacccctgcctctacaaaaaattttaaaattagctgggcatggtggtgcatgcctatagtcccagctactcaagaggctacagtgggagaattgcttgagccccaaaggtcaaagctgcagtgagccacgattgcaccactgcaaaaaaagaaaaaagaaaaagcaggccgggcgcattggctcacgtctgtaatcccagcactttgggaggctaatcacgaggtcaggagatctagaccatcctggctaacactgtgaaactaaaaaaaaaaaaa

SEQ ID NO: 8954 - DNA, 713 bp, Homo sapiens
tgcccatccgtaatatgggataagaaaagtctagggaaggagagaaagctgacatctttaaaagccttcatattcatcaactcatgaacattacacacatattccaaaaccagaaggatatgggttaaaatgagatactttataaagaactaaatgcttttaatgagaacaaatatgaaatcaagcttctgatggctgacccctttcttcaaatgtgggtactcttttaggaggagttacttgcagaccttcacggaacagttgcctttaaggatttcattctaagcaggggctacaggatgccacgtttccttgagaatatgtatatcgggaaggaatgtaaacgtgcatgtaataagactcctataaaacgaactcaagcatagaagaatcgtaggagaatgattaggcagattttattactacgtacttggctatttctctgtctccttttaaagattaaacagagtttatgatgagtgtccccctgtggatgttcaaactttgacttggccaacatctgtaaatgtaatacctgatggttataagcatttctcaatggatttctgcttcagttaatcaacttttgtatactttatcacccatgagatcaatattcacatgtaatcttctcatatttttgtggcacgtgaatattatataggtatatcaactattggtaaaataaataaggcataataaaaaaaaaaaaa

SEQ ID NO: 8955 - DNA, 706 bp, Homo sapiens
tgagccagtgatcacctgagtcagagtttgagaccgccctgccaccatggtgaaacttgtctctattaaaatacgaatgttaccaggcatggcagtgggcgcctttggtcccggctactcagaaggctgaggtaggagaatggcttgaacccagaaggcggaggttgcagtgagctgagattgtgccattgaactccagcatgggggacagagcaagactccatcccaaaaaacataaataaatgtgacattcagaatagtaaatagtggaaatggaaataattattagtaaaaaattagtagttcataataaacagacatgcaagcactttttaaatatactaatgtacaatgaaagaaggtatttcaataaacacctggcaagaatattaaaactaaatacagaaagatacttcctcatgttcatttgaaaaaaaaaatactaactcccatttgaattgatttacagtttataaaatgctttgacatttagctatctcatttaggggaggttttagagcttaattttacagggcatgaagctcagatgaggtttccttagcgaaatacagacccagcccctggacttctatttattactgatctttaagctttatcagcccatagtcaccaagagagctgctctgtatgttttttaaaaatcacagaaagtacaaataaaggtgatattaaaaaaaaaaaaaaa

SEQ ID NO: 8956 - DNA, 684 bp, Homo sapiens
  misc_feature (644)..(644): n is a, c, g, or t
gctcccatccacgccaccacagagccaggcattaaacattttgcatctctggacaaatacacaagtgatataggcttctgcacagtctgaaggagaggcctgtggcttatacttgtgtatacttgtctgttccccacaatgttttgtacgtggtaggtgttcaatacatatttgattggttaaaaggggccatagtataacacctctctttatagagaaatgttcctcctcatatctacttacacacccacaccactctttatcattttctactgctcttattttgcctgtgaaatggaaagaagtgggtggaattcaaagtcataatgctgtttaaggactaatgtgaaaacttccaggaagctaaagggagcattcttttccctcttcttccctctaagtaccaccctaaaccctagacattgtctataaaacagagatcagaagactgagaagtacagagaagaaggcagaatggataggaaccttgggactcaaggaacaacacagtcgtgagttccctgggctcttttacctcatatatcccagacctgaagctgaagaagctggcaacacaaaaatgtcaatgtacactgaccaaaaccaaagtctcaataaaggcttgctctttcttcccaaggacntaggaaaagggcagcctagtaagccagaaaatgtttagat

SEQ ID NO: 8957 - DNA, 786 bp, Homo sapiens
  misc_feature (52)..(52): n is a, c, g, or t
gaacttcatgtcggcttttgtgtgattgtgatgttgcctggtctatagtgcntccacagctttccttgctgataccagcctccaaccgcagagcctagctgtttatcctgtttcctgtttactttgtcatcagttggatgattctcacctttactcctcagtaaatcaggaatgggaaattaaaaaacccagtgaattgaaagcacatctgaaagatgcattcaccatggagctttgtctctggcccttatttgtctaattttggaggtatgtgataactgagtaaggtgaggagattaaaaagggacccatatagcactgtcaccccttatttgaggaactgatgtttgaaaggctgttcttttcttctcttaatgtcatttctttaaaaatacatgtgcatactacacacagtatataatggcctccttaaggccatgatggagtcaccgtggtccatttgggtgacaaccagtgacttgggaagcacatagatacatcttacaagttgaatagagttgataactattttcagttttgagaataccagttcaggtgcagctcttaaacacattgccttatgactattagaatatgcctctcttttcataaataaaaatacatggtctatatccattttcttttatttctctctcttaagcttaaaaaggcatgagagaggttaggagtgggttcatacacggagaatgagaaaacatgcattaacccatattcagattttgatcaggggaaattctacacttgttgcaaaaaaaaaaaaaaaaa

SEQ ID NO: 8958 - DNA, 684 bp, Homo sapiens
  misc_feature (217)..(217): n is a, c, g, or t
tcctcatctctattaaattgtaaaccaggactactgcatgtactctctttgcagtgatttggaatggaaggccaggtttctataacttgtgaacaggtactttgggaaatgactccatttctattgtggtaagctcattggcagcttagcatttttgcacaaggaattgctttgcaggaaatatttaattttccaacataatggattaatgttccanttatgcatcacttcccccagtataaatcaggaatgtttgtgagaaaccacttgggaactatactctttttatttttattttttattttttttattattttttttttggggacggagtgtccctcttgttgcccaggctggagtgcaatggcgtgatcttggctcactgcagccttcgcctcccgggttcaagtgattctcctgcctcagcctcccgagtagctgggattacaggcatgctccaccatgcccagctaattttgtatttttagtagaaacggggtttcaccatattggtcaggctggtctcgaactccagacctcaggtgatccgcccacctcggcctcccaactgctgggattacaggcgtgagccaccgcgcctggccagggactatactctttttaaaatagacatttgtggggctcacacatatatgaaatagtaccctctaaaaaaaaaaaaaa

SEQ ID NO: 8959 - DNA, 713 bp, Homo sapiens
tagttaacagggttgccactcaggctgtagaagatgttttaaatattgccaaacgacacaggaaatttgagtcttccacttgaacagagaattggtagagaaagtaacaaatgaatataatgaatcactgctctacagtccggaagaacccaaatacttttcagtattcgagaacccatagccaatagagttttctcaagccagtcgtcagcgttgtttctcctcaaaggtttgtgttcgttctcgttgttgggatgcctgtatggttgtggatggaggaacttcttttgagtttaatgatggtgccattgcttcgatgatgatcaataaagaagatgagcttcgaactgtgcttcttgaacagtgaaggatttcctcatgaccaattttgattactggcgagaatatttttacttcagaaacagactaccagtcgtaaagtgacattttttggttattgttgagactgcttgcccgtgggctcagaagtgagatttgcattattcttctgttggattctgatagaaaaaaagacattcactgtataagaaaatggatggactgaacccattagaattgataccagtgaaatttttatattgcttaccattggtaacccagagtgctgatacctttttaaatttagaggggcaggcttaaataaaggactaaatatttaggatttgaaaaaaaaaaaaaaaaaaaaaaaaaaa

SEQ ID NO: 8960 - DNA, 719 bp, Homo sapiens
tttgctgctcctctgccagctgtcatcacgcagcaccccccttgctccccgtacagctgtctaagggttaggggaactgattggagaaaggagcagggaatgttgtatctttggaggggttttggtgtgggggtgacaggaggaactgggtggaaagctgccagccttgcagctggctctgcctgtcttcctgcgcagagctgggcattcaggacttcacagtccccttgcccctttctttctattgactatgggtggagcctgaaatctctgctgtttcaagcagaagatgtgattaggacccttcatctcaaatttctagtgagaaagagggaatgtagcagggatgtgtgtgttgaggggcaggggttagaattcctgcccttcatccacatctgagtgtagtcctgtctttagggagtataagccaggaattctttccttccccagtacacagagggctcctgctgccccctctccctcaattcctcctgaagttatggcagagatgcctctgattagagcaggattgaaggtattgtgacctgctactgaatagcggacaaagctctagcctgtaaatccctatgaaacttggggaaggaacccccagaaaggaccagtgatgggcacccgctcgggtccccttctacgctgtgggagctttgtcattttgctcttcacataaagcttgctaccgctcaaaaaaaaaaaaaaaa

SEQ ID NO: 8961 - DNA, 727 bp, Homo sapiens
tctgcagtgagccaagatcgcccatggcactccagcctggcaagagaacgagactccatctcaaaataaataaataggctgggtgtggtggctcacgcctgtaatcctagcactttgggaggccgaggcaggcggatcacttgaggctcaggagttcaagaccagcctggccaacatggcaaaccccgtctctactaaaaatagaaaaattagccgggcatggtggcgggcgcctataatcccagctactcgggaggctgaggcaggagactcgcttgaacccgcggggccaaggttgcagtgagccgagattgcatcactgcactccagcctgggcagaagagtgaaactccatctccaaaaaaataaaaaatataaataaatagccttctgagaaagcttcttcccaaagccagaaactaaacaaatttttgggttttttcccggccattcacctggagtcctaatccagtccctttgtccctctctctagcaatggccaatgtacatggtggactatgccggcctgaacgtgcagctcccgggacctcttaattactagacctcagtactgaatcaggacctcactcagaaagactaaaggaaatgtaatttatgtacaaaatgtatattcggatatgtatcgatgccttttagtttttccaatgatttttacactatattcctgccaccaggcctttttaaataagtaaaaaaaaaaaaaaaa

SEQ ID NO: 8962 - DNA, 727 bp, Homo sapiens; identical to SEQ ID NO: 8961

SEQ ID NO: 8963 - DNA, 700 bp, Homo sapiens
  misc_feature (220)..(220): n is a, c, g, or t
tgattttctaatagacaagtgtaatctcaccataatacatcgtgaaaaaaagttaaaatgttagtaaatcagccaggcatggtggctcacacctgtaattcccagcactttgggagccgaggaagatagatcacttgagcccaggaggttgagaccagccccggcaacatggtgaaaccccattttctcagaaaaatacaagaattagctggggagtgtnggcgctcacctgttgtcccagctactccggtggctgaggtgggaggatcgcttgagtctgggagtttcaggctgcagtgagccgagattgtgccactgtactccagcctgggagacagagggagcccctgtctcaaaaaatattaagtagtctagatctcagttaatgcttatgctttattgcagttagaaaagtgcttaacctggcctgtaatcccagcactttgggaggccgaggtgggcagatcacttgaggtcgggattttgagaccagcctggccacatggcaaaaccgtgtctctactaaaaatacaaaaattagccaggtgtggtggctcacacctgtaatcccagctacttgggaggctgaggcacgagaattgcttgagtccaggaggcagaggtttcagtgagccaagatcatgcccctttactgcagcctgggtgacagagtgagactccatcacaaaaaaaaaaaaaa

SEQ ID NO: 8964 - DNA, 655 bp, Homo sapiens
tcctccgattacccctatggttaatccactgtcagatctggatcgttatctactgactagtagtgttccctagttactgcttgcagtaattcaactggaattatgttatactagactccattgtgccttactatatatgggaatgtctaacttaaatagctttgagatttcagctatgctagaggcttttattagaagccatatgtttttctgtaaaagttactaatatatctgtaacactattacagtattgctatttatattcattcagatataagatgttgtacatattatcatcctataaagagaacggtatgacttaattttagaaagaaaattatattctgtttattatgacaaatgaaagagaaaatatatatttttaatggaaagtttgtagcatttttctaataggtactgccatatttttctgtgtggagtatttttataattttatctgtataagctgtaatatcattttatagaaaatgcattatttagtcaattgtttaatgttggaaaacatatgaaatataaattatctgaatattagatgctctgagaaattgaatgtaccttatttaaaagattttatggttttataactatataaatgacattattaaagttttcaaattataaacaaaaaaaaaaa

SEQ ID NO: 8965 - DNA, 143 bp, Homo sapiens
acccagaccaaagctattacaaaaaaagtactgaccaacatatctcatgaatattcgtgcaaaaatcctcaacacaacattagcaaatcaaatccagtaatggacaaaaataattatgccccatgaccaagtgggatttatcc

SEQ ID NO: 8966 - DNA, 640 bp, Homo sapiens
tcctgagatacatatgataagtttagttataagctaggcacaagagattgacgagagatgtgttggtaatgggtagatttaaaatgtttcgactttttaattttaaaaattgttgaacttggtaaacaatttttttaaacatttagaaatcagtcataagagattaaccgagataactagtagtaaaatagaatatttataacagtatgccaacatcactcctcttgggctttggggtcattattaagtaaaataagaattactcaaacacaagcatcttgatactgctgcagtcaatccgataactaagatggctgttcagtgactaatgagagggtagcctgtacagcgaggataagctggttgatgggatgattcacaagtcaagtggaatggagagggacagtgtaagatttcatcatgctcctcagaatggcacacaatttaagacttatgaattgtttattactgaaactttccatttaaaattttcagaatgtggttgaccatgactaactggagccattgaaaatgaaactgggcaaggtgcagtggctcacacctgtaatcccagcacttcgggaggccaaacgggaggattacctgaggccacaagtttgagaccagcctggacaacata

SEQ ID NO: 8967 - DNA, 752 bp, Homo sapiens
taagatatggctggctcaaggccgattcacaggaggacttcttccagtgagattagtgtttatgagaggtagaggttgaaggacctgcagtcctttcttgtccaccggtttttgttggagttttcactctcttagcaaggtctcacactgtgaaccacttaggatgtgatcactttcagtggtgcaggaatgttgaatgtcttggctcagttcatttaaaaaagatatctatttgaaagttgctcagaggttgtacatatgttttcacacgtacaggatctgtacataaaagtttctttcctaaaccattcaccgagagcctatatctaggcattttcttggtagcacaaattttcttattgcttagaaattgtcctccttgttatttctgtttgtaagacttaagtgagttaggtctttaaggaaagcacgctcctctgaaatgcttgtcttttttctgttgccgaaatagctggtcctttttcgggagttagatgtatagagtgtttgtatgtaaacatttcttgtaggcatcaccatgaacagagatatattttctatttatttattatatgtgcacttcaagaagtcactgtcagagaaataaagaacttgtcttaaatgtcatgattggagatgtcctttgcattgcttggaaggggtgtacctagagccaaggaaattggctctggtttggcaaaattttgctgttattatagtaaacatacaaggatgtcaaaaaaaaaaaaaaa

SEQ ID NO: 8968 - DNA, 752 bp, Homo sapiens; identical to SEQ ID NO: 8967

SEQ ID NO: 8969 - DNA, 83 bp, Homo sapiens
ctgaatccttccatttcttctgcacatctacttgcttaaattgtgggccaaagagaaaaagaaggattgatcagagcattgtg

SEQ ID NO: 8970 - DNA, 424 bp, Homo sapiens
gatggcctgccttgtgtcctgtcgctacttgtcttgcttatggcatgagggacctctcgggatgtgggctctagagcgcctcaccccgccagcgccgtcactgcagtggaagtcggtccttgggcaccagcaaaggcaaggcccattttcacatttccgcttgggggtgtgggacacggagggacgtttggggcacatgtataaatattcctactttatccaaatggaagatatttcaagtggcaacccgtcacatcccagcaagtctccttttataacatggcctcccgggatctacaggaccgagcatggacgggctcacaccgcgcctcgatccttgagaaaaaccctcaagcaaacagcttcccagctcaggatgtaaagcacccatgcctgccaggggacagcttcccaggaaggcggt

SEQ ID NO: 8971 - DNA, 749 bp, Homo sapiens
ctttcgggccccagaaagtgaagccagctgagtctagagccccaggagccatcatgccttcattcctgtcgtctggctctggcactgggggctgttttctcttctcctcgttccgggcacacttgtgtgacaaaggatgcccagcagcactgcctgcctccctccctgtctgcctcctgccccttccttctgccaggggtgatcctgagtggtctgccggtttatcttcattctcacactgacgttctgctttcacacggcagtgtgctgggcccggatctccaggccctggggagggaggcctctggacggacagtggggtacattgtgggctttaggggctacagagtcgagggacggggtcgtagcctcggcatttgcttgagtttctccactcttggctctgactgatccctgcttgtgcaggccagtggaggctcttgggcttggagaacacgtgtgtctctgtgtatgtcgctctcgtgtgtctgcgtaccgtgtctgtcagactcgtgctgcctgtcctggtggcgtggtctatggagctggctctgaccgttgtatggtttgacctgatatactccattctcccctgcgcctcctcctctgtgttctctccatgtccccctcccaactccccatgcccagttccttacccatcatgcaccctgtacagttgccaacgttactgcctttatttaaaaatatatttgacagaaaccaaaaaaaaaaaaaaaaaaaaaaaaaaa

SEQ ID NO: 8972 - DNA, 784 bp, Homo sapiens
aagtaatataccggaccccaagcactgatttgcttaactgatgtacttgatgatactatgacctatattatgagaagcatgctccttcaaaggaatcaagtgatagcaaacactcggtcctgtttccaggttttcctcactgttcattttgcctttgttcttgcaggcggagaatgaaaggggcgagagctaaagtgtgttgtcaatgcaagtcaatcattaaccaaccataatttaccaaagaactttatatttgctgtaatcattaaatttagttactaatcccaggaaaagggttagtccttcctcctagtttgtagatttgcaaatggagatgaataattgaatcctattttaatcttttatctgcagtaatctgggcttcttattaccggatatatttgcattttacctccaggccatgttagttcttagaagattattttcctcatgaaccctgttttgttttgcttcctttctgcttcaattctaatgtcacattgcatacctggatgtaaacagcagtcagtttctcagatcaaatagagccctgtagcaacttggaagacacagaagacacacggacataaaactgtatttattatccagggaatgtcactacggattaattatgttaatgaggccatcaaaatctatggtaatctttcaggctttgttgtttgataccagatacagcaatgagataataatgtgtctaattgtgcctagccagtattggtatttaataaaactttgtcattgaatctttaaaaaaaaaaaaaaa

SEQ ID NO: 8973 - DNA, 766 bp, Homo sapiens
atccgcccattttccctggccttccctgtggccacaggaagtgtggcctgaataccccaccccggttcctctgcacccagagctggggccaccctcagaagtgtcatctctctctgagcacgcattcccctgcagcagtcgaggactgagcagattgagtgatgctgggcagagaggcctgggaggaaaggtgttcagccagtcgtttgtaaggcgctcgtcggcacctgctgagacgcccccacctgacagccccatcctcaaagactgtcttaattactcatggcaggttctagagacttaaggggaaaagctgctttcaaggccaccacatgtctgtgctccccaaccagctctatctgccttgtgttcattttgttattttgtgacgtgagactgcaaagaccaataaaaacatattttataagaacaaaaggcctgggtgcctacccgtgtgggggcactgtgggaagcctttgctagggtgtcttgtgctgtgtggtttgttttgtttgcccctttattttgctttgcttacccagtcttcccttactcttggatgcttcttaaccctcaggcaaacctgtgttccccctgtattcaggctctgctttaaagcagccatgaggctgttggagtttctgtttagggcattaaaaattcccgcaaactataaagagcatgttttcagtcttttaggattagaagaattacataaaaattaataaacattttcaatgatggaaaaaaaaaaaaaaaaaaaaaa

SEQ ID NO: 8974 - DNA, 766 bp, Homo sapiens; identical to SEQ ID NO: 8973

SEQ ID NO: 8975 - DNA, 737 bp, Homo sapiens; identical to SEQ ID NO: 3740

SEQ ID NO: 8976 - DNA, 129 bp, Homo sapiens
tttgttcacacatgtctttaggtggaaattctggatataacttgggcacctcctgaagatcattctgcagagaactggcaagacccttctctagaatttccagcctggtgcgtacattctgtagagttt

SEQ ID NO: 8977 - DNA, 702 bp, Homo sapiens
ctcaaagccacttaatcacttctatggacttatctgcgaacttatgacaccagaaggaacacagacctgtagtctacttgagagtggagagtgggaggagggagaggtgcagaaaagataagtcttgggtactgggcttaattcctcggtgatgaagtattctgtacacagatccctgtgacatgagtttactggtgtaaaaagccttcacatgtacccctgaacctaaaagtttttttttttttaaaaaaagaaaaatcactaccctcccactatcaagaaataactataattatttttaacattttagtcactcttcctccagggacatacatatgcattatacacatatatattatattaattaactattgttatttatatgtaattattactgtttacatgtacgtgtgtgtgtgtgtgtgtgtgtataatttttgagatgagattttactctgtcacccaggctgaagtgcagtggcacaatcttggcttgctgcaacctctgcctcctgagctgaagtgatcctcccacctcagcctcctctgtagtcccaactactcaggaggctgaggcaggagaattgcttgaacccaggagatggaggttgcagtgagccgagatcacaccactgcactccagcctggatgacagagtgagactctctcaaaaaacaaacaaacaaacaaaaaaaaaaaaaa

SEQ ID NO: 8978 - DNA, 726 bp, Homo sapiens
tacctgtggggtttcacttgcccatagtgtgagccttctctccgtcccgttaccaccgctctggatcatggtactagttccgtcttttgtgtggccttgggccagcttccttgataccttgaagatgggcttcttgtgagtccccagggagtaaagggacaagagcttagatttttgcatcagcccttctggcagaaggttgtggtaggggccatttgttttttttagtggacttgggatttgtggtgtaatcatatcattaatgatccagggtgtgggaaaaatggaggtccttgaagtggctgaatctcattgtatttaagacactgtcagttgccagatgtaggcttattctttggagatgtctaggagaggaaaaagctaccaatcatactcttgatatccgtctggctgtgtgaggcacccctacctcatgggggtgtcttgggattgatgaactgtggaacctgcctcctgcgctcccccaagcttattaaccccttaactgtatcggggcggggtgtgtgtgtgcatggaagatgcctgggctgtctttgctatatgtataatagagccattggatctttatttttgattaatttgttctgattttttggtttgttttttaaggaactgtaatgaacaaatgtcaggatatcctatgccaaataaagatgttgtatttatttaaaaaaaaaaaaaaaaaaaaaaaaaaaaaaaaaaaaa

SEQ ID NO: 8979 - DNA, 631 bp, Homo sapiens
gtgctggaattcaatggcgcatctcggctcactgcaaccttcgtcttgcccgtgttcaagcattctctgcctcagcctcctgagtagctgggattacaggcatgcgccgccatgcccggctaacttttgtatttttagtagagatggggtttcaccatgttgtccaggctggtctcgaactcctgacctcatgatccacctgcctcggcctcccaaagtgctgggattacaggcgtgaaccaccacacccagctgatatagaacatttgtatcacctagaaatttcccttttacccctttgtagtcaatccctcacccccacttctatcccctcgaaacccattgatctgcgttttgtcacttttcgttttgccttttctagaatttcaaataaccagtcttttgtgtccagcttctttcacttaatgtaatacttttgagatactgatattgttacatgtattagtaggtagttcctgttttatcttctattcagtagtatttgcattgtatagttataccacagtttgttaattcatttaccagttgatggacatttgagttgttttcagtttttttgctgttatgaataaagctgctatgaacatatgtatataaaaaaaaaaaaaaa

SEQ ID NO: 8980 - DNA, 714 bp, Homo sapiens
gtggtttccttcccagatgcgggtcccgctgcacccgtggacaccgggcactgtccactcctacatccccagctccacacggcctgcacacctgtgttttcccatggaaatgccaccgtgtctgctcccaggcctcccactagtcaggaccagcttcagccacttcttttctctgagtggtgggacaactgcagccagagactctctcccctcccagccccaggcagtgcttcctgagcagaccacccggactgtctttcctccacccgcccatggagaaagagcacgcccggccccgccctgtgctcacctctgcctggctcagtgaccttctcaggcattctgccctcctgggcccctctctccctgaaggggctttgtggcatctctggaagagcagggtgtgctgcactcatgggcctggtctcactccttggacttgtcaccttgtgacatttggcttaccagcatttgagaaggctctgctgggtctccatggtgggggtctctcaccttcttgaccctctctccatcattcagctgccagcccaggcttcacacccaagctggctcagcagccgagcctggcaccgagggtccctgcaggctccctgggcagggagagggccaaggacaattgggagggcagcaggcagcccgcagatggtggccatgtggcacgctgctgagacgacactaccaataaaccaaact

SEQ ID NO: 8981 - DNA, 754 bp, Homo sapiens
ttctcactaacggattaaatagtggattcagagactccccaggcctcagcgtacctcattagtaattgttttgttgtttcagtggtttgtgctaatgtctccccttctacctagctcaccctgagataacaggatgaaaatggaaggacagccagatttctcctttgctctctgctcattctctctgaagtctaggttacccatttttggggacccattataggcaataaacacagttcccaaagcatttggacagtttcttgttgtgttttagaatggttttcctgttttcttagccttttcctgcaaaaggctcactcagtcccttgcttgctcagtggactgggctccccagggcctaggctgccttcttttccatgtcccacccatgagccctccactggacagctcagtaagcctggcccttcattctgcgctgtgttcttcctctgtgaaaatccaatacctcttacctcctctgcatgcaaagattctcaaggattgtcagacttcaaacgtaacagcagaaccaccagaaggtcctataaatgcagtagtgaccttctcaagctgtcaggtctttaaataggatttgggatttaatgctatgtatttttaaaggaaagaaataagagttgctagttttaaaaatgcatgtcttttagccattcatgaatctgcccccaaacttttttaaaaagtcaagacagataaagctttggggagacggaaaaaaaaaaaaaaaaaaaaaaaa

SEQ ID NO: 8982 - DNA, 492 bp, Homo sapiens
aaaaataaaaaacaaaaaaaaatataataaacaaaaaaaatataaaaaaaaaagggcggccaatgatttaatatgtaatcatgtgtcaggacataaattttgtcgcttgggacagtagctttccagctaagataattgcgtgaactctgttaaaactgattatcactcatcaatggctttatttttaacctataaataacccctttcaatatacctggtttttacagcattgcaaaatctgtaaaaataacttttattggaaaatgtcatgaagtcatttttcattatttgtactaaacaatgttttatgtactccttttgtgttttatcttttgtttttccatctgtactcccctcatcctcctaatgttgagaaaatcaaatttcctgggtgtgtccttgttaagtgatcaaaagtaaatgttctctttgccattttagatggaaaaataaaaaaaattaaaaagtaaaaaaaaaaaaaaaaaaaaaaaa

SEQ ID NO: 8983 - DNA, 738 bp, Homo sapiens
gggtttctcaaagttatatggaatatttctgcactgaagtagcaccactaaacatagcacaacgagctaccgtttttattacagtaaattgttaacgtctatttcctattgaatcataggttaatgaattatgattaggtcgtcattgtcttacatatactttctagaaaacatttcaatttattatgacaaattacgtcagtaaattcatgtaacctttttgtctttttaagaaacttttatgacctctatttacttaacttcatatataatcaataaaacaaagaagtgaaaagagaagattgcagccaagaggaattcgttacaaacatgtatgagattttttaagttttttttgtttttaattattcctatttcacgttcacatggaaaagtcagaaagcataactactctaggccgggcgccgtggcacacgcctgtaatcccagcactctgggaggccaaggcaagtggatggcttgagtccaggagttttgataccagcctggggaatatagtgaaaccccgtctgtcctaaaaatacaaaaaattagctgggcatggttgcgtgtgcctctaatcccagctacctgggaggctgaggtggggagaatcacctgagcccagaaagtcaaggctgcagtgagctaagattgcgcgactgcactctagcctgagcaaccaaagtgagaccctgtctcaaaaggaaagcataactgcaaaaaaaaaaaaaaaaa

SEQ ID NO: 8984 - DNA, 666 bp, Homo sapiens
agacacatctacgttgctcagagccggtggtagaccttacagcagccagagggagaaggtttgtcatggacagaggaacaaagccaggggcaccatcagctttctcatcagaaacacaggagacggcaatgaagccaagtctggaaaggaaaaaaactgccgacctagaaacctttatgcagcagaaacagcttttcgaaagtgaaggaaaaaaatacttgcagacatacagaatgtgacaagaagtcattaccggatacacactacgagagatgttgagtggtttccttcagacagaaggaaaatgaagacaaggatcacgccacagaaatgaagagctctagaaatggcaactgtgtggataaatacatacattttttcatacttatttaaatctctttaaaaaataatggaattttttttaaaggttaataatgtaaatggtggactgacaagccaatcatatcaaaactcatgaccatcatcggtggctgagcacgctggggatggtggtagttgctgtttaatgggtgtagtttctgtgtaagatgatggaaatgctctgaaaatggacagggtgatggttgcacaaccttgtgaatgtactcagttgaattaaccattaaaaaacgattaaaataaaaaaaaccaaaaaaaaaaaaaaaa

SEQ ID NO: 8985 - DNA, 711 bp, Homo sapiens
cgttggattgagaccatatctcgatcctcctgcctggcctcagagtcaaccatgacgcacccattggcctggaagaaaggcaaagaagaacattccttactaagttaagagaatcatcgatctatagttgttggcataaatgtgttctgccgtcattctatgtaccctttactactctcagggacacagttattgacaagctaaagcaagtctgtgttttcaattcgccttttaagaagaggactgatttttataaatccagtaaactaccaacaatttcgtttttcatagttaaattgccatcttgaagcagtgtaattgcctgttaaaagttttcatggctgggtgtggtagctcatgtctcccaagtcccacaagggattacaggcatgggccaccacgcccagccatgaaatgtactttgagaagccaaagcaggcggatcacttgagcccaggagcttgaggccagcctgggcaacatgaggaaactccatctctaccccgaaaaatacagaaactagctgggtgtggtgatgtgccttgtggttgcagctgctcgggaggctgaggcgggaggatcgcttgggcccgggagatcaaggctgcagtgagcctagattgcaccaccgcactctagcctgggtgatagagtgggacgctgtctcaaaaaaaaaaaaaaaaaaaaaaaaaaaaaaaaaaaaaaaaaaaa

SEQ ID NO: 8986 - DNA, 741 bp, Homo sapiens
aagattgagtctatatcatagttctgagtattgatagcttgctttattctgcctttacgttaccagtgttgaagcagggtgaatactagggcatatattttttttttcttgtaagctgtttcatgaggtgtttctttggaatttccggataagttcaggaatacattctgcatgttgtatctagtctgatgtactgtatccatctcagttacgacgggacacacagactgcatttgtagctctgtaatccttgaatacggaagtaaattttcttctctcctgactttgacattgtagctatactgtttccatttttgtttttacaatcctttgggtctaattctgtgagcctacctatagcactggattaaaatgtctgcatcatttctttagttatccagttaactttaaaactgttgtaaaagtgtaaaccagcccatgacaggtttttgtacatgttaaagaacttcgttgttcagttttcatgattattgtgtaaggaagactgatgtagatgttctgtgctgtcctggaccatgttaattacacttacgacgtattttagttccacatcacaatgatttgtccccagtgacccttttatcctttctaggcacatttcttgttgttgttgttgttgcagttcccctttgcattgtattgctttgacaactgtaatttgaatcagatctgaaagaggtccagaataaaatatattttgatattaaaaaaaaaaaaaaa

SEQ ID NO: 8987 - DNA, 804 bp, Homo sapiens
gtgggtatcctgaggcacataggccttctgaatttcatataactgcccaggacgccctgttaactacactagcttaatctggtttacggatgtgactgattcactccctgtactcatccctgggcatatgtgtaccaaagggtcatgtggatcatgtgatgatcatccatcgtattgattgtattaattgcatcatgctaaacatgtagtacagggttaacataccagatttatgtcctgttcaacactcagtactctaaatgttgttatgcttttaataagaccttcccagataataatcttggagctcttttcccagctgtctaccatgcatttgcaacaggaggaagatgtaatgaatatgcagtattaagttgatttatgaacagtgctttgatatgcccaagggaaaactgtcccacttaaattagattaagtagggtggctataaaataaataaaaacactggaaattctttctctcactttctcttgatgcaatgaagggaatatgacactacagtatacagagttgttgttatatgatgcaccaaatattttgatgatttgaataaatgttaacttttaatctgcgccttaataatgactggttatctgtaaatatagaacagatacagattgtatttttctgtgggtttttgtccttttagtgatttttttccaaaaacgagagatggaattaacattgaaaatgggaaatttttctaactgaatcaattgttacatgaaaaataaatttatataaccccttaaaaaaaaaaaaaaaaaaaaaaaaaaaaaaaaa

SEQ ID NO: 8988 - DNA, 763 bp, Homo sapiens
ctccttaaccaatagtcatcaccttgttcctctgtccagaggcacattggatgagtatcttgcaatacacagttatcctttcacagtgttcccaagggacttggaaaggagagtcagtattagaggaaatgagaagggtatttgtataccaagccctgccttatagaatgtacttagtatctactcccaattgtcagccttcttacctggccaaggtgtccaagccagtaaggtttaaggttatggagtctttctcaccctaaggatcagtggtggaatgagggtggtatatagggaagggccagataggcaacttcatttggcttgtgtgcatctggcctggaactggtgttaagccaggcttttgcttgtttgttgccatccctcaccctttgccatttccctgtttcagagaacgtaaatgattttcatgttaggcccaaatatactatcttatagggtacatatgttgtcataaaaggtaaaagtgatgcatgcccaacccaactaaacccagtttggattatctgctattcgggtaatcttcacagaaatgactgagatgaagaatctgcagtttactgagggcatttcagttcctcctaccacctcaatcaggactttgtcccagacatctcctcctcttacctttgtgccttgactgtggttctttgtggcaagatactttggttggttaaaataatatggaacaaaggatccactgaaaaaaaaaaaaaaaaaaatataaaaaaaaaaaaaaaaa

SEQ ID NO: 8989 - DNA, 763 bp, Homo sapiens; identical to SEQ ID NO: 8988

SEQ ID NO: 8990 - DNA, 734 bp, Homo sapiens
ttctctctgaagaatacagcttgtgaagaattactagctcaaggtgaatatgagaagggcgtagaccatctgacaatgcattgctgtgtgtggacagccacagcagttgctgcaggtcttacagcaactcttccaccaccagtgttccagatgcttctgactaagctccccacaattagtcagagaattgtaagtgctcagagcttggctgaagatgatgtggaatgagaaaccaatgtcaacataataaaatctcagttaaaaatattttaaaaattcttggtagttgagcagctctgggggaataagggcaaatatgcttgttatgaactacactgaaatctacccaagttaatgtttactttgtgtagatccatttgtctattttatttatttttcccagtgaaaagtgtattttgatagagaacttttcattctataaatacactatgagttactaaaatatcatggattttgtttattcctgaaacatagttacatagttaaactgtacatatgacatggcttatgttaaaaatacccagtgctcagttttgaaagataggcaaaaaaaaaaaagtataggagaaactgaagaatgtacacttttttagagggcacattttgctgtaaatctggaaatttgatagacttgactgtgtttgtgaaaactgagcattaaaggttttgattgatccctttaaaaaaaaaaaaaaaaaaaaaaaaaaaaaaaa

SEQ ID NO: 8991 - DNA, 528 bp, Homo sapiens
tacagaaatggaagtagcatctacatttacttaaaggaatccattcatgagaccccatctgaaggtcaccaacactgaagacctaaggtagataaatccacgaagatagggagaaaccagcgcagaaaggctgaatagttccaaatccagaatgcctcttctcctcctataggatcacaactcctcaccagcaagggaacagaactggacagagaatgagtttgacgatattgacagagttggcttcagaaggtgtgtaatacaaacccctctgagctaaaggagtgtgttctaacccaattcaaggaagctaagaacattgaaaaaaggttagacaaatggctaactagaataaccactttagagaagaacataaatgacctcatggagctgaaaaacacagcacgagaacttcgtgaagcatacacaagtatcatagccaaatgatcaagtggaagaaaggatatcagagaatgaagatctatttaatgaaataaagtgagaggacaagattagataaaaaaaaaa

SEQ ID NO: 8992 - DNA, 682 bp, Homo sapiens
gcaatcagaagatagtttctgacatgtgcctatgcgtttgtatatgctctaaaagagaaaagtcttcctggaggtgttcattgaatttttgtgtctttagctgtcttcatattcttgcagagcaatttctgtttaagaaaccatgcctgctcagggtggctgcataatacttcctcttggctggcttcatctctggccatatacagaccgaactgtgcttaaattcctggcaaatggatggcagaaatacctttcgactctcctatatacgctgccattactcatcagaatttgaagccagcacatacattcaacatcatctgcgaaatgccacagactctggctctccttcatcttacatcttgaatgaatatagtaaactaaatagtagaatttttaattcagacatttcaaataaactggagcagattccgagagtttatgacgttgttacaccaagattgaggcgtggcgccgagcattggatttagtattgttagtacttcagacagacagtgaaataattactggacatggacacacacagataaattcacaggaattaacgggctttctatttttgtagtgttactggctaagtctttggaaaataatttttcataatatgtcatgctaataataaatatattgatagccaaaaaaaaaaaaaaaaaaaaaaaaa

SEQ ID NO: 8993 - DNA, 754 bp, Homo sapiens; identical to SEQ ID NO: 3758

SEQ ID NO: 8994 - DNA, 754 bp, Homo sapiens; identical to SEQ ID NO: 3758

SEQ ID NO: 8995 - DNA, 737 bp, Homo sapiens; identical to SEQ ID NO: 3760

SEQ ID NO: 8996 - DNA, 698 bp, Homo sapiens
tcagtgatagtcaacagggtcttcgtggcttccgggcctcagcccccttggttgcccctgtacgtggattgggctggagccaggtgggacagattagctgatgcccttgtcacctgccctctgtgcaccctgagagctcaccagtaacacctgtgtgtgtcaccagtataactgcacctcacccgccgcaacgtgtgcacttgacctcggcagagaagtagtgtccaggcacattgtgtacccctgggccagtctctttgaaccctgagggtggccaggatctggagctgcatctctaaggggccaggctttggggaccattgccaaaggtggactcaggaggaaagacacttaaagacacttttacatgtctagtaattcttgatgttcatcttcagcaccagtggaaacacatgaacttcgatgcaggtccagagaccatggacactcccacgaggctcagctctcaggcaccccctacacttcagttgagggaaaagctcaagtgccttaggcccgtggaccacagtcttggctgagatcaaagggatgagcaccagggacttctgccacagtgacaatggaattgtgttgtgccttacttcagaggtggtctcttctttcttgtaataaaagcatatttatgcggaaagcaaaaaaaaaaaaaaaaaaaaaaataaaaaaaaaaaaaaaaaaaa

SEQ ID NO: 8997 - DNA, 676 bp, Homo sapiens; identical to SEQ ID NO: 3762

SEQ ID NO: 8998 - DNA, 241 bp, Homo sapiens
aacatttcagaaattctatttaagataagctagtggacaatcagtgtagtgtttacaattgtttatacactgttctccaaaggtaccttatccttccaaagatcccctctgtagagatcatgcgaactacagtttggaacttgggacttagcccgttggtgtaaaagtataaatcaggtatttgtattaaattgattaaaatgtgtaaaaaaaaaaaaaaaaaaaaaaaaaaaaaaaaaaa

SEQ ID NO: 8999 - DNA, 102 bp, Homo sapiens
cgagtcaggacggtcggccagacccacggggtaacgggtctaatcgtgtaggaataaagctgtattccagtgcttccaaaaaaaaaaaaaaaaaaaaaaaaa

SEQ ID NO: 9000 - DNA, 759 bp, Homo sapiens
gtggtccggagcaccagggatgcaggaccacaccatcagagagggtgaagaataagtccccaagaaagctatggaaagctttctaccaaagggagatcgaggaccacagagcacatcctgaaagacaagtttggggagtcagaagaagctcattttgtttgcttggatggctgaaacatggacccaaaatgttacccacagtaaacgaactttgaaatgccagaactaccctggttactctagaggaagggattgacaagcttatggagaaagaagagttggcgtgaatttgtcatttcagatctgcgcatccacccctggaacacttttttccatatctgtgagaaataaatgtgtgaggagagccctaccaaccttgaagagttctggggtcactctctcactaggcaagaacttatagtgggagctgctgtcactgaattgggaaacctacatttgtatcccatataatatatttgacattgaaaaaaaaaaaaaaagggcggccagggaagagaggggtacatttccctgtgctgacggaagccaacttggctttcccggactgcaagcagggctctgccccagaggcctctctctccgtcgtgggagagagacgtgtacatagtgtaggtcagcgtgcttagcctcctgacctgaggctcctgtgctactttgccttttgcaaactttattttcatagattgagaagttttgtacagagaattaaaaatgaaattatttataaaaaaaaaaaaa

SEQ ID NO: 9001 - DNA, 738 bp, Homo sapiens
cgcccagacatggtcttcccgtttcttaagttgtcatttgtaggtttcagctggcggttccacctgcatgttctctgctttcggctgccttggaaggggcccaccattccccattcctcttctccttacagcgcctgcctcctttttcaagcagcggataacttgctgtttctcacgtttcagggagaggggtgagcggagggagacctgtgtccgtgccgtccggctccctgggtgggaacaggcaagggatcagatgcccctgacaccacgcctctggccacaccagatgcctctgcagtcctcgacagcctcttcagtgtccctcctgcggtgatgtccttactgtccccagccagggccggggaccggtgtttcactgaggacctgcattagaaacattttttaaattgttgtacaggaagagatgtgtctaaaacagcatcttaaagctgagtgtatttctttgcacaaggggtcatgctgatgaattcttctttcattctgatctttgttcagccaacaggagcgtccttttctaatgtcttccattcctaccccccacccaaaaacaaaagaaatatttgtagcttgctatctgtatttgaatttttagcaattttatatttagatactttgaaaaatgtaaatgactaatttggtcattaaatcttgtgacatattcgatattaaaatgatattaaaataaaagtcatataaatacaaaaaaaaaaaaaa

SEQ ID NO: 9002 - DNA, 701 bp, Homo sapiens
ccattagcctatctagggtacactatagaacaagttgtacaaaaagcaggcttgtaccggtccggattcccgggatcgcgagcgccgcctcgcggccgcccttttgttgtttttttctgacacagatccaataatctttgtctgagggcagcacacatattcagtgccatggaactggtctaccccacatgggagcagcatgccgtagctatataaggtcattccctgagtcagacatgcctctttgactaccgtgtgccagtgctggtgattctcacacacctccatccgctctttgtggaaaaactggcacttttctggaactagcaggacatcacttacaaattcacccacgagacacttgaaaggtgtaacaaagcgactcttgcattgctttttgtccctccggcaccagttgtcaatactaacccgctggtttgcctccatcacatttgtgatctgtagctctggatacatctcctgacagtactgaagaacttcttcttttgtttcaaagcagctcttggtgcctgttggatcaggttcccatttcccagtctgaatgttcacatgcatatttaacttcccacaaaacattgcgatttgaggctcagcaacagcaaatcctgttccggcattggctgcaagagcctcgatgtagccggccagcgccaaggcaggcgccgtgagccccaccagca

SEQ ID NO: 9003 - DNA, 643 bp, Homo sapiens
cgtttaactccatttaatataacaagaaatcgtaaaatacttataacctatcttagagaaatgagtgctggttttgagagttgttttttaactgaaagattatttctagatgggtagtgctttgtgctggtttctgcttccatatatttcccagtcattttaattagagaagatactctatggtagaactaaggcctttcctttcttggccaaagtctttaccctatttaaccctttgtatatttctgactgctcactgttcatattataggggaccagatttgtaatatagaattctccataacatgaatgaaattaattctgtccaagccagcatggtggcttcatattaagtagtaacagaagtctgaacaattggataaatttgacttccaagacagctaaacttttcaactgcaattttaaaaactacactacactgttatagttaatctgacaaaaatgtcctcaaagagtactttattttatttaaagcatctgtttaattcaacctttaataattttgcaaagaagggtatgtgtgtattttaatatagcctgacctgaatttatatgtttttagctttagtatttaactttttgtaacaaataaaccttttttaaaacaaaaaaaaaaaaaaaa

SEQ ID NO: 9004 - DNA, 93 bp, Homo sapiens; identical to SEQ ID NO: 3769

SEQ ID NO: 9005 - DNA, 780 bp, Homo sapiens
attgagttggccgattttcccagggaatccaaagtgatgtacactctaggtaccgttgtaagacacagcacatccgtcttttcagagaaagttgtattttatcaagtgaacgttgttattactacctgcctcccacgtctgtatctgccccggactagacctgcttcatgaatctctcacgagtttcctgtgaaacatggagcagcagcttggcttctttgtatttctgatcgtaagggctgaacacccttggtagaagttcccatgagtgattatgctgtttttgttgttgttgttggtgtggtgagccacaatagtttgtgcattgtttctgggctggcagagccagatttcagggcaggtctgctttgtcttatatttggaagtctgcagaatagagggagcctgtagggaattaaagtgaatcacccctcccaccctcgttcttctgtcacttagacgaaagttctggtggccactgggacttctcatggattttcttggcaaatgcagttgagtccccgagataacatacgcccaaataataggaaaatattgagcagggagaaacaccagacttgagttcttgtccttgttttgcaaccaactaattatgaaactgtaagtgtgtcatgtggctctctgggcctcagtttccccttctaggaaatgagtgtgcagggattgctggtggtgacattaaatcccaaagcccatgctatgtgaaaatgtggactcagggataccagttcatcctttttaaaaaaaaaaaaaaaaaaa

SEQ ID NO: 9006 - DNA, 675 bp, Homo sapiens; identical to SEQ ID NO: 3771

SEQ ID NO: 9007 - DNA, 717 bp, Homo sapiens
  misc_feature (1)..(1): n is a, c, g, or t
naaaaggcgccgctccggcgatgggcatctctcgggacactggcacaagcgccgcaaaaccgggggcaagagaaagccctaccacaagaagcggaagtatgagttggggcgcccagctgccaacaccaagattggcccccgccgcatccacacagtccgtgtgcggggaggtaacaagaaataccgtgccctgaggttggacgtggggaatttctcctggggctcagagtgttgtactcgtaaaacaaggatcatcgatgttgtctacaatgcatctaataacgagctggttcgtaccaagaccctggtgaagaattgcatcgtgctcatcgacagcacaccgtaccgacagtggtacgagtcccactatgcgctgcccctgggccgcaagaagggagccaagctgactcctgaggaagaagagattttaaacaaaaaacgatctaaaaaaattcagaagaaatatgatgaaaggaaaaagaatgccaaaatcagcagtctcctggaggagcagttccagcagggcaagcttcttgcgtgcatcgcttcaaggccgggacagtgtggccgagcagatggctatgtgctagagggcaaagagttggagttctatcttaggaaaatcaaggcccgcaaaggcaaataaatccttgttttgtcttcacccatgtaataaaggtgtttattgttttgttcccacaaaaaaaaaaaaaaaaa

SEQ ID NO: 9008 - DNA, 717 bp, Homo sapiens; identical to SEQ ID NO: 9007
  misc_feature (1)..(1): n is a, c, g, or t

SEQ ID NO: 9009 - DNA, 457 bp, Homo sapiens; identical to SEQ ID NO: 3774

SEQ ID NO: 9010 - DNA, 641 bp, Homo sapiens
ggtccctgtgtctcaacagagttttccgaagaaaagagccctctcagcaagcatgtagtaactcttcccaagagagctcaggcatttgttttcatggtggggaacaggatggggagataagattccagtctatcttctccatgccccattccttcagttacacctaccctctggcgctcagactcaaacatctacctgaagatctttcccatcttgcaaactaaggtctgctaatgaagccctgtggccttttgggaaatacacttcatttgcagcaatccttgaatttagacagaatacgcacattcacaccttgtaagaatctgaggctgggcacagtggctcaacgcctgtaatcccaacaatttgggaggccaaggcaggcagattgcctgagctcaggagatcaagaccagcctgggcaacagagtgagaccccatctctactaaaatacgaaataaattagccaggtgtggtggcacatgcctgtagtcccagctactcgggaggctgaggcaggagaactgctcgaaccccggaggtggaggttgcagtgagccgatattgtgccattgtactccagcctgggtggcagagcaagacttcatctcaaaaaaaaaaaaaaaaaaaaaaaaaaaaa

SEQ ID NO: 9011 - DNA, 730 bp, Homo sapiens
cattatactaggataacatatgaaaggcactattttgatatgctagtcaataaaatatattatttgaagtcatttacttcttctctttatatgtctaatgtggtgactagacagtgggattcccattaggctcatcatactgtgattgaacagtgctggtctgcacctcttcaggttaacaggggctgtggagtgacctggtgcaggaaatatcatctccatccataggatatcagtgtgaacccagggagaggcactggtgcaagagagatgagaacaggggtgtggagtaggggactgagccttcactttgagccgaagaagtttcctttcctatcctcaatcctgaacaagaggtatttctggacttctttttgttttcaagtttgtgccccttcagatttggggctgtctggaatcctgccaggggacaccgagaaaaaataggagtctcacactgactgttgtatttcatctgctggggccatcccaaaccactgcgtacaatttcctttcctggtgctcaaatagctgctccacgcacttgtcgtggtttcagagatgaatctgggtgggaagacaggacagtgtatgttataatatttaaatggaacccaaatccattaatatttattttaatatggaacattaaaagagttttgtaataggcaatgggaaaaggtaaaaaagataaaagctttttgagaaaaaaaaaaaaaaaaaaaaaaaa

SEQ ID NO: 9012 - DNA, 99 bp, Homo sapiens
ctaattattgcaaacctatacacaaccaagtgaaaggattaattttcattcatcaacctctcaatcccagattttcaaaaaataaaaaaaaaaaaaaaa

SEQ ID NO: 9013 - DNA, 701 bp, Homo sapiens
gatcttacacggcttctctctgtcctcagcccgcgcgccgccatcgccgtcatgctgggcgccgctctccgccgctgcgctgtggccgcaaccacccgggccgaccctcgaggcctcctgcactccgcccggacccccggccccgccgtggctatccagtcagttcgctgctattcccatgggtcacaggagacagatgaggagtttgatgctcgctgggtaacatacttcaacaagccagatatagatgcctgggaattgcgtaaagggataaacacacttgttacctatgatatggttccagagcccaaaatcattgatgctgctttgcgggcatgcagacggttaaatgattttgctagtacagttcgtatcctagaggttgttaaggacaaagcaggacctcataaggaaatctacccctatgtcatccaggaacttagaccaactttaaatgaactgggaatctccactccggaggaactgggccttgacaaagtgtaaaccgcatggatgggcttccccaaggatttattgacattgctacttgagtgtgaacagttacctggaaatactgatgataacatattaccttatttgaacaagttttcctttattgagtaccaagccatgtaatggtaacttggactttaataaaagggaaatgagtttgaactgaaaaaaaaaaaaaaaaaaaaaaa

SEQ ID NO: 9014 - DNA, 701 bp, Homo sapiens; identical to SEQ ID NO: 9013

SEQ ID NO: 9015 - DNA, 769 bp, Homo sapiens
ctgaaaataagtattttagcatccactatactcatcttataactaatgtatgcaattcccacatcaaaagaaatttgagaattccggttagtggtatgtaatttccagtttagttaatgtcaagttaggcactacttacagtaatttgctacagaatcatcatctgtcattattttaagaaaatacatttatagctaagaagaaaattagtttgggaaagatcattttgctcagttgaaatctatagactgtattgcaaggtataaagaatgtatctaattttgctttaaaaacaacttgctattagaagttaaattatcattttataattttctatgaagtgaaagaaaagtgtttttaatttagttacccctgcctaaaggatattctcatggggatgattattatagtaataatggagtgtattcttattggaatgattattatagtaaccaaaacatatcataataagccattatactctttccaggaatcttttggttctttggttttctttggaggtgctaagtgagtacaggactgacacaatattattcaacatgcagatactttttaggatcataatgttggttgtttttactaattcaggctgggtttgatggcttatgcctttaattccagcactttgggaggccaggtgggaggatcacttgagcctaggaggtcacagctgcgatgagctgtgatcgcacctctgcattctagcctgggcaacaaagtgagattctatcttaaaaaaaaaaaaaaa

SEQ ID NO: 9016 - DNA, 723 bp, Homo sapiens
ccatgagggaatgagcccagccagtaagcactacaatcatgtcaagttcccaactgagtcatcttgctgagtggataatcacgggaatatgaggtatccgtaagaccaaattcaagaacagatggggtctgtgactggatcttctatcattccaattctatatccgacttgaatattcctggacttacaaatgccaagggggtgactggaagttgtggatatcagggtataaattatatccgtgagttgggggagggaagaccagaattcccttgaattgtgtattgatgcaatataagcataaaagatcaccttgtattctctgttaccttctaaaagccattattatgatgttagaagaagaggaagaaattcaggtacagaataacatgtttaagatagcctaaatgatggtgcttggtgagtcttggttctaaaggtacctacaaggaagccaaagttttcaaatctgctgcatactttgacaaggaaaatctatatttgtcttccgatcaacatttatgacctaagtcaggtaatatacctggtttacttctttagcatttttatgcagacagtctgttatgcactgtggtttcagatgtgcaataatttgtacaatggtttattcccaagtatgccttaagcagaacaaatgtgtttttctatatagttccttgccttaataaatatgtaatataaatttataaaaaaaaaaaaaaa

SEQ ID NO: 9017 - DNA, 628 bp, Homo sapiens
tgtatgatatggtgttttttagatggaagaactgatgtcagcctgccaggttctgttatttattctatcatattattagatgtatatagtcaagtaggagcagtggaaatggttccttgcaaacttgtagtccagtatcagttacttcctatttttatccgtttaaagacccttgccaatcagtgtaagggtttttccagtaattactcacagcactttgttaaagtttgcaatttcttcagccatttaatgaatatctttctgtgaagaaactttgctgagttaaccataaatgttcagtcattgactgggtgggatgtgaatggaatgttagaaatgttgtgtgaattgaagttctgtattcattatagatgtagcccttatttaaaaaagtgaattccatactataaactaggaatgaaagtgagagatttctaaacttttgcgaaagtgggtcattttttgtttgactataatagcaggaagaattatagcaatctgtcattttacctgaaacagacaagcctatgtattatgaatactttcaagcttccctttggaatatacaagacatgcgtttggaaaaaaaaaaaaaataaaaaaaaaaaaaaaaaaaaaaaaaaaaaaa

SEQ ID NO: 9018 - DNA, 659 bp, Homo sapiens; identical to SEQ ID NO: 3783

SEQ ID NO: 9019 - DNA, 807 bp, Homo sapiens
  misc_feature (1)..(1): n is a, c, g, or t
ngagcagcttggcccagacctggatcatctcagcaggctcctccacatcagggacaatctccacctggcttgcccttgtcgctcactgtcccggatggccagggccaggtccctcgccttgttgcgttccaggatgttggactttccaccacaccaggcgaagatgttctggcccaggtccaggatgaagcagtccccagtgttgaagctgtcccagttcagtgcccgctcggtggcacggatgttcttcttccccttcaccctggctagagtttacgttgatggcagactggggctcctgtggaggtcgtatgtgaaattgctagatcgtctcacaccaccatctactggtaccgggaggccaccgcgcggaagtagacgtaagtgtcagaggatgcaaggatctacgattgccctttgccacgctacgctggtcggttcatccacgacacgcctcgtctcctacgccagtcatgttgtgattgagcgatcgacacaagccagcacaggcagcaggccccctgatcatccgcgcggggatgactgctcggcactataccacaggtgcagatgggaaacctctttgtgggccattgtgcagcacataggtaggagtcccccgagaagaagatgccctggttctcttgcgccacaggcaccggcttcagcttctccacccgccacacatgcaggcctggatcctgcactgagcctgggaatggagagccactctggggaatggctgtgtacatgctgtcttcagatctctgcttcgtaggttcgtcttccttccagcctgccccaccc

SEQ ID NO: 9020 - DNA, 747 bp, Homo sapiens
gggagccttttggagaattgtagagttcacccaatccaacttcagagaacctgagacctcaacatggccaggtcactcctagtccaatgtccttaggaccccgatgtacatctcccgctcccccagaagcagcactgcagaggcttgtggagtcagactgagccacaccagccagatgcaaaacacggctacgtctcacaaagccacaccccacaatccccgaaccacactccaagggagagctctccagagcagacacagaacatctgcagaagcaaaaagccagactagcatgtaaaatcatgaaaagaaaaaaatcaaagaggcaggtagacacatacccaactgttggcaggggagtccctctgaggagtgggactgtgggaaggaggaggctccaagaggctggaacgctttttagctgcatgcatgactttaaaagcagctaactggccaggcgtggcagctcacacctgcaatcccagcactttgggaggccgaggtgggcagatcatgagtccaggagttcgagaccagcctggccaacatggtgaaaccccgtgtgtactaaaaatacaaaaactagccaggtgtggtggcacgtgcctgtagtcccagctactcaggaggctaaggcaggagaattgcttcagcctgacaggcagaggttacagtgtgccgagatcacgccactgcactccagcctgggcaatacagcgagattgtgtctcaaaaaaaaaaaaaaaa

SEQ ID NO: 9021 - DNA, 742 bp, Homo sapiens; identical to SEQ ID NO: 3786

SEQ ID NO: 9022 - DNA, 754 bp, Homo sapiens
aaggggcccacaatgaaacctcatcagcttcttcctagtccaaccaaacactgatgaacaactgcattccgcaaacctcaacccccagcacagtttcagcagagccaaccaggaagttgatattccactctaccccttaacctatggaagtgggaggcagctctccagttccctgtgggtgactttggtaggtctgtctgggagctgaccttttattccctaccttatagaagcagacaatgctccagttcccccagcagattgagcaaggagacaagcttacatccccaatcagaggcatcaaggtggtcgaagatggtgccacactttcactgggatgttgtcagtggagcaataggagagctgaacttccagcccaccatttgcaataagaccatgtgagtcagtacttcagttttgccaagttactgtcagtggggcccagagggaaactaaacatgcctgtgaagaagaaggaagaaggaagaagaagaagaagaattattaaataggatacaaatccaaactcttataatatgctatccaaaatatccaggatacaataaaaaatcattcatccaagaaccagaaaaatcacaacacggatgagaaaagcaatcaacggctgtcaaatgatgagataaatcaagtgttcaaattatctaacaatgatattaaaatagcatcataaaatgcttcaacaatcattcaaattctcttgaaacaaaaatttaaaacccagcaaaaaaaaaaa

SEQ ID NO: 9023 - DNA, 567 bp, Homo sapiens
gtgtcatgcctggttgcttggccacagccttgtgccatgacaccttctgaacatccgtttattgtcctcatagactcattcatacttggctgcaagaccaaggaagttataggtgcccatgttgatgacatctttgatgactcttcgcagtagaacctcgtggggcaacatgtaaatgagcacataatcccctctcccaggattatgcacgattcggcaaatccctggtggaatacttgggttcctatgaagttatagaggattgaggtggaccaaggagatggcagctcagatctgtgaggtggtacagagctggcaggaggtggttcagtctgtcctagaggttggtttccctcggaggatccagaccccctcagccagtgtccgggcactttagtccctggaagctggaaaaggatgaacagccaggtagcttccagcccacagcaggcctccaacttggacctgccacagctccagagcttgactggatggagacaggactatctccgatattcattggttatcaggatataccaggagttggtaacatccactcaggtgcca

SEQ ID NO: 9024 - DNA, 787 bp, Homo sapiens
  misc_feature (114)..(114): n is a, c, g, or t
acttgggatgggaattggaggccctaaatctaagacatttataaccaaaggatcttgttcatatggagcggaatcccaggtaggaacctccagtacatgggcccaaaagtcccntaggagattgctcactgactttcctattaattcagttataaaaatgtcttttttagagacaaggagaatgacaaagtatcagactggtgggaggtgatagaggtttctttctggtatttttcataggtaccccaaactcggttccatttgtaatcagtaatgtgatctgcatttttacctatgctaggctaggtcactgtctggctgtagggctgcattataaaatatagtaacaccacttccatcctaggccaccatgcgtgttccctcctggatgcaatttcaggaggatctggacaaagaggaaaatgatcagagcagaggacacaggatgttcagtctgcagcaaagaagacttgggcctgggagcatgactcctgctctctctcaaacttctacactcagccttcaccacgatcgacaggaggaagtaggcatggctgaattagcttcattttcagctcctgctacactacaagacatacccgaagactaggcaactttaccagaaggccacaacgaggtttaatggacttacagagtccatatgcctggggaggcctcacaatcatggcagaaggcaaggagcagcatgtcacatcttacatggatagcagtaggcaaagagaaaaagcttgtgcagggaaactcctttttaaaaaaaaaaaaaaaa

SEQ ID NO: 9025 - DNA, 740 bp, Homo sapiens
gtcaggagtaaaaagggtatgaagagataaggactggagctaatgggaacactggacatgatatgtagcagtggtggccctgggaaaggaccaattataaaacacagatgaagtacaaatagattatgattatttttagtgtaggtacaatatatagtagtgattaagaataaaatgctggaaccagacttctggggctcaaactttgattttacaatactagattttggcctggggtaatttatttaacactccatatctcaatgtcttgatctataaaatctctgatataatactattggtgtatacctccaactttatagacttgtgagaattaaattaatagctatttataaaagtcgtaaaataaggcctggaacacagtgaacatgcaagaaaagttaaatataagcattctaagaaattccaatcagaaacacaatgaaatgtgactttagaaatgaggaacagagaaaaattagcttctagaaatgtagggcacatttgccagaggataactgattaccaacaaggctggggaatacaggacaatatgcaatcagttacacttattttcagctcctcatgtttttaaatggatggactaacctaatagaatcctcctggcttctgtttccatcctattgaattattcttccccatgggaaaatgaaggtcttgttgattgattatcgacagagggttggggaagacccaaatattaaaaaaaaaaaaaaaaa

SEQ ID NO: 9026 - DNA, 674 bp, Homo sapiens; identical to SEQ ID NO: 3791

SEQ ID NO: 9027 - DNA, 679 bp, Homo sapiens
tggcatgtttataatctgtaccactatctgtttctaaagtactgtcttccagctattttagtgatcatctaataaagcatcttatgttttaagattacaatgatgttctggctaggctaccccctccgacccccctataagtaaagataatagaaacatgcttttgcggacatgtttcctcattctaccattaagggcaccatctaccaactggtagcaaatacttcccatattttttgtcacttgccaacaaggcagaaaataccctgctgaatgaaatcactgggaacattccaagttcaaaataaaatgtttaacttacacataatacaagttatgtacaagattaggaggggggaaaaacctgaacaaatcctggaacacacctatgtatttacgtcatgggaaaaggggagagaacacttcaaatatcaacaagttctgcgccattaactcattaatagctaaatggccacaccaaattgcatgtgaatgttagaacctctcagataaccacaataagtccatatttttttttaaaaaaaggaaaacacagaaataactaccaacagtgtctgagaagagagactaagttaacatacattgcatgtattgcaggcaaggcagaggcatttttttaaagcttttgcacagacttcatataatcttaaaaaaaaaa

SEQ ID NO: 9028 - DNA, 632 bp, Homo sapiens
atttatgggaccattgtatgaaccttacatacttacttttttgtagtgagaacagttaagatctctcagcaatattcagcataccttacagtattactttctataatcataaagctataccttaggttaccataacttatgtcttttcactgaaaatttgtaccatttgaaccacatatcccactttccccacctctagggcctagcactcacctctatactctcttcttctaggagtccaaccttattatattctccatagaggtgagatcatacagtatttgtctttctgtttctgtgatgtttcactcggcataacatcatctaggtccacccatgttgtagaatgtcagggttttattattttttatggctgaataatattctattttgtatatataccactgttttttttgtgtgcagtcagtttccaccaacactttagattgcttttgtatcttgacacattgtgaaaaatgcttcaatgaacactggaggtgcaggtatttctttgagatagtaaatttattgtatatgcagaaatgagatagctaaattgtaccatagtactattaaaaatttttttaaagaaccttccaaaaaaaaaaaaaaaaaaaaaaaaaaaaaaaaaa

SEQ ID NO: 9029 - DNA, 736 bp, Homo sapiens
gaatttttcaaggattgcactgagtaaagactttcttactcttcgcagtcaggtaagcaggtcaaatatagaccagactttggccagtcctcttctgtgttctgcaactctggctttcataagtagtaaaaatatttttgatgttgcatgctctcagaattatgttttctaaaatatcatattggcttcattttagtttaataaacttctttggcaacttaattagacatagggtatatataaactcaattttatctgcattttttaaaaaattgaaataatctgattgcatgtatgaaggactcctgcctcattaccccattacataaataccattatctataggaaggtgaaattgttgatctattatttcaaagacttgtagactagccaagattcattctgattagaaataaggtctatagctaaagatatttttattttaaaaaattacagcccttgtaaccaaaatcatttgtaacattggatatgaagacattattagtatttaaaattattgtagtcatttgatcataaatgaagtagcttgcaaaatagacttggtctttgaccctttaaggtgtaactgactgactgttgtgtttttcaagactgattttaggcagttttatgtatcgtgtaccaatgatatgtaaaataaagcaccttttttactataaacaaaaaaaaaaaaaaaaaaaaaaaaaaaaaaaaaaaaaaaaaaaaaaaaaaaaaa

SEQ ID NO: 9030 - DNA, 97 bp, Homo sapiens
ccggtctgtgtgcccgaggcctcaccctgccctcgcctagtctggaagctccgaccgacatcacggagcagccttcaagcattccattacgccccat

SEQ ID NO: 9031 - DNA, 721 bp, Homo sapiens
gtcttcccactagaaggggaactccacactgtctcgttcactgctatctcaagggcatagttaggacccggcttcacagtgtgaatttttcaaatatttgttggaataaataaataaaccaggatgattacctttaggttggatgtatgaagaatagctagcctgtccaaaacatttactttcagccttgttatttaatctgaaaagcaatattcacaactggcatttatcgactacctgctacctgtcatgcagcatttaaatcttccacaaacctttgagctagtttatacacgagaattttgctcattttacattttcctgtctgaagtctagaaaaagaaaatggatactttctgaataaatcaacctcttctaaactgacttgccagaagacgagaaaagaatccagctggaaaaaacctaggaaatagcaatctgcacattgaccttggcaaagaatttatgacaaagtccccaaaagcaattgcaccaaaaacaaaaattggcaaagaaactatcaacagaataaacagacaacctatagaatggaaagaaatattcacaaattatgcttccaacaaaggtctaatatccagaatctataagtaactttaacaactcaacaagcaaacaactaccccattacaaaatggtcaaagacatgaacagacactttgcaaaagaacacatacgtgcggtcaacaaaaaaaaaaaaaaa

SEQ ID NO: 9032 - DNA, 646 bp, Homo sapiens
gagttgatcaagtccatcaatgaaaagtttgctgggtctgctggctgggaaggcacagaatcgctgaagaagccagaagacaaaaagcagctgggagatttctttggcatgtccaacagttatgcagagtgctacccagccacgatggatgacatggctgtggatagtgatgaggaggtggattatagcaaaatggaccagggtaacaagaaggggcccttaggccgttgggactttgatacccaggaagaatacagcgagtatatgaacaacaaagaagctttgcccaaggctgcattccagtatggtatcaaaatgtctgaagggcggaaaaccaggcgcttcaaggaaaccacatgacacaagcagagcttgatcgccagtggaagaagattagtgccatcattgagaaagaggaagaagatggaaacttggaattgggggttgaagtcaaaagaccaaaatactaatcactagttacaaccagagatgctccacaaggatatgctccccactgttttctttctacaatttccaaaggttgcaagatgtttttttgtggatgaatataaaattttattgtgtaattacttggttccattaaaattggttaacttgctaaaaaaaaaaaaaaaaaaaaaaaaaa

SEQ ID NO: 9033 - DNA, 718 bp, Homo sapiens; identical to SEQ ID NO: 3798

SEQ ID NO: 9034 - DNA, 422 bp, Homo sapiens
gcatgtcacccggcgcacagtgtgggttgcgggtgctggagctgctcaatttcccgccgccatcctccccgacgctgtccgtgtcctccaccagcctgctgacccacctaccaccagaggcctgcagcctcccacatgccttaaggggaccgtggcccccaccagggacgtcctgcgccatccgttcacgtctctgcatccattccttcatgtctttatttagttgtttatttatttagttatttatcttattgagaggtgaggagtgccacggctgcccgtttacacctttagcgtctggtcctcctgcgtgtcctcccctccactgcctgcatggggggcgcggggagtgaccaggcgggggcctcaccgccccagggccgttgcctgctcagaccttgcaggctgtggagcaagaggcc

SEQ ID NO: 9035 - DNA, 754 bp, Homo sapiens
cccccttttttttttattttttttggccgctcgcaataccaaagtcgcaagaatggctttgacagaatgccatttctaagaacagctgaaattcatgtgttcaaatctttgagagtgagctcaatggaaaccttattttgtaaaggcattttgtaaaccttcttccaagcacagaataattccacaacaggaaggttctgttgtgtgtgtgtgtgtgtgtgtgtctgtgtgtgcatgtgtgttcttccctctaaaattaatttattttctctatctattagaatgccctctaaggcctttctttaacacacactgactttttgaagaatgatctttagattgataacttgctatttatggtgactctgtggttaggcttatttaccgttaatctaaagtattcataaagcaccatttattaatcatccttttggatctttcaaaccaaacgtatacccaaaaatgtcttcaaaaatgttatggctttgtttgtaattcgggtatattaaaatgttgttttgaaatacagtttatcttaaagaaaatttgacagtaactatattaaggggtacattaagtaatatatttttaattaatggtgtaccattgagagaataagaaatggaagtctattgttttattctttaaatgtgctgtttaaatatatttccatattttaaaatatattaaacagatgctaatttctgctgttaaaaaaaaaaaaaaaaaaaaaaaaaaaaaaaaaaaaaaaaaa

SEQ ID NO: 9036 - DNA, 517 bp, Homo sapiens
gttagggagtactgatatgcagtacaggaacaaggataagtgaatagacagtcagtccgcaagatatttatggaacacctgctatgtgtcaggcagttgtgctagtttctaggaatacaaaagtgaacaatacgaagtcccttcccttggaaaccttacattctaagaaaatcgacagaattgaatgtatccaacgcaataaatatatgaagacttgtgataaatgagatgaaggaaaataacagggtctatgagagagactaaaggggtaagaaactaattgaattgtatggtcaggccaagcctctctaaatgacctttcatttgagatccgaaggatgacgaggagtcatccagaagaacagtatgggaaagaactcctgaaaaaggaagaaacagcagcttttagaagacatgtgctgggcacggtggctcacgcctgtaaccccagcactttgggaggctgaggcaggaggatcacttgaggagttagaacatcctgggcaacatagcaaga

SEQ ID NO: 9037 - DNA, 786 bp, Homo sapiens
atttagtccactcatacaggataacaccttggacaaactgtggatctgagtttttcactgcatcacagcagagcaatgtcagttttcataaccaggactctgaggtgctaagataaggtaccgttatgtcccaaacgttctgcttaagaaagtagttacagtcgtagtgacaggggcttgattagatctcagatctctggagttccaagtgcttcccataatctctcagctacctggaaaatttattactattccgttatatatcttgagtcataattttctaatttatatttttctttgcacatttttccccaggcttgtgtgtatgtgtgtgtgtgtgtgcgcccttgaattaaagccatgattttggtgtttgaatcctgggtctatcacttgttgctgggtaaatttgtgtttaagtcacttaactgttccagaatacactttcttatttatgaaaatttacacttagaaggtgtgtgactttggacaagttacttaccctgtttcttcctcattattctcatctgtgatctaagcattacaatgcccatcatggagttactttgataattcagttaaagaatgtaaagggaacctgatttctcaataaatgtttgacatctttgattataaattatcaatatggtaattaatgcaaataatatcattactgctaataaggcatcattttatttacttgtaaacttattgagggtagcagctaaatcttgatattttgtgtccaccagatgatatataaacgtaacaaaaaaaaaaaaaaaa

SEQ ID NO: 9038 - DNA, 693 bp, Homo sapiens
accggaataggtatgaaatgtctacgtgtttgtctaacgaagtcactcttaataatatctggtatcctggcacaataattttatggttatgtttttctgtgtgtcagttttcatagtatccatatgtttattactgtttagtacttccatgaattttaaaatctgagggaaatgttttgtaaacatttattttttttaaagaaaagatgaaaggcaggcctatttcatcacaaggacacacacatatacacgaatagacatcaaactcaatgctttatttgtaaatttagtgtttttttatttctactgtcaaatgatgtgcaaaaccttttactggttgcatggaaatcagccaagttttataatccttaaatcttaatgttcctcaaagcttggattaaatacatatggatgttactctcttgcaccaaattatcttgatacattcaaatttgtctggttaaaaaataggtggtagatattgaggccaagaatattgcaaaatacatgaagcttcatgcacttaaagaagtatttttagaataagaatttgcatacttacctagtgaaacttttctagaattatttttcactctaagtcatgtatgtttctctttgattatttgcatgttatgtttaataagctactagcaaaataaaacatagcaaatggcaaaaaaaaaaaaaaaaaaa

SEQ ID NO: 9039 - DNA, 693 bp, Homo sapiens; identical to SEQ ID NO: 9038

SEQ ID NO: 9040 - DNA, 688 bp, Homo sapiens
tgctggccagtggaaatattcaagtcctggagtcacgttgataccgactagatagatagatacatgatacatacatacatagaaatgatagacagcaaaatgatgctgatggctcaggatgtgtgttgagacagacagaactgggttttgtcattcaagccgttattcacacccagtgtcacctaggccaaggtttgagctgcaattacgtgtcaactgtgaaatgaggtttccttcaacagatatatattgaatgcctagaatgttccaagcactgttctaggtactgcatagacgcagctgcacagaaatacacaacaaaaaccctgtacgagaaatcgttcgcccttcttcaagtttatattctagtgatgtgtgtaggaaggaggggcaacatggaaagtcaggtactaaattggtgaaaagggaaaatatatagtatgtcagatgctgtacaagtattaaagaataaaataatgcagagaaggtgaaaggaagtatttgctgcaggaagagatgaggaggctgaagatggtgagagttagaattgtaaataggaacagtcaaaaaaacctttcaacagagaagcgaaaattctataggcaggagagggagggagtcgaggtagctatcctgagagaagactgtttcagcagatggaaacagtcttcaacagaggaaagagcta

SEQ ID NO: 9041 - DNA, 751 bp, Homo sapiens
gaagtatcagacttaaatattttcttcaatacgtgctgaatactgaaaaggcgagaagcagaattaaagacctaatgacaggttttacatggagagattatgtttcttctaaatggtaatccttatttctcaaattatgtatttccttcttcttattactgaattcttatattttttaaaaagcatatttctttaaagataagcgcagagaacttaaataaaagccaacaaacaggcaagtcctgcattaggatttcaaagtattaaatatatatctaaatgattctctaaggagcaatgggtgtacctgagagtctctaaacactgggaagttatcgtcgacatctttcactttaatattacattcacattgagttgatagtccttctccatctttgtctgcaccactcacaaccagacgatagctgctagcttgctaattttggatagcaaataaagaaaaataattaatcccaaagaattataaatggaaactacttgattcctatgggtaaggaggtagaaatattcaatttgtatgtagaagacatttgtgggactctggatggttgggtggaggtctttaaggggctagggcaggttttctgttttgtgagcttcttatggcaggagctgtactctaccgtaaccttagagcaaaaatgggcaatgagtagggtgggagtaataagctcacttatggagcttctctgttagtctattgggaaagccatttgtacaaaaaaaaaaa

SEQ ID NO: 9042 - DNA, 755 bp, Homo sapiens
gaatgtgcagatgaatgggggacagaatcatgactcagtccccgaggaatggcaccttggcaaggagaggttactggaccccattcgaagcacataacctgttaaagtgcacagtcactgtagtgacacaacctgggctctatcttcactgtgatacccagcatgtgaacatctggtatgtatattcctgagttcccacataagaaatcagcagatgttactgagctgatctgtataggggaggcaagagcatcaagtaaaaccttttgatctagggctgggttgagattggcttctagtttgcagctacttgtgtagtatataatcagtcctcccctacccaacccttagacttttattgagacaacttagatatcctcttcctctggacgattcatcttacaggcctttgttgtccttgttctgtctgcaaacctacgtcagaagcaattcagatgatagtccaggaattgctgactttaaaaagccaggatgtgatttagtatccctgaataacttatgcaaatttgtccagtcccacactagagctctacatactaaaaggagtttcagccttgccatgtcaaactaaagtcgggagggcaagcatgctcattcccaagtagaagaccctgcaaggccttcttgttgatttattgtctacaacaatttaatgtgaagctatgtcataccagttgtgaaatatattgaaagtcactctagccatctcccatataattgtatgaaaaaaaaaa

SEQ ID NO: 9043 - DNA, 716 bp, Homo sapiens; identical to SEQ ID NO: 3808
  misc_feature (112)..(112): n is a, c, g, or t

SEQ ID NO: 9044 - DNA, 705 bp, Homo sapiens
gcaggaccaggcataatgcccagattgtgtttctaagaaatatttcccactaaagagcttggatttctttagagaaatgaccgattccagctctggggcaaaaatacaccgataaacctgtctatcttatgccagaagacaagaaagctatcaaattcttatgggtttgcataaaaaggatatagaaaccaactggaagaagttctcacttgccaatatagtaaagcattttagcaactccccccaacgtcttccccccacgaaaagactgcacctaattaaaacatattgaatatgtaaatacaattcatttgtaagtgacacaagccatgaagacaaagacttccaatgaaaatgaagtagtcccagctactcaggaggctgaggcaggagaatctcttgaacctgggaagcggaggttgcagtgagccaaaatcgcaccacagcactccagctgggcgacagagcaagactccgtctcaaaaagaaaaaaagaaagaaagaaaatagccagggaattatgataatagggtatcatataatacatattaagaaattattggtattttttgttaggtatggtaatagtatgttttaggaaaatgtcatttatgttactaacactcttattattttgagattcttttaaagtagataaaaatcaaatttcatgggatctaggattacttaaaaaaaaaaaaaaaa

SEQ ID NO: 9045 - DNA, 697 bp, Homo sapiens
  misc_feature (115)..(115): n is a, c, g, or t
ttaatcccaggctactcggggagctgaggtaggagaattgcttgaacccaggagccagaggttgtagtgagccaatatcacgccattgcactccagcctgggcaacaagagcganactccatctcaaaaaataaaataataaataaaatataaaatacagttccagataaatggatcttttgtgtgtggtgtgtaagtatatccccaatgttgcgtgggctagacttatactaaaagaattctgtgttaaccagaactccagtttcactgggcatcctgtactgtgtctggaagcctccctcagagacaaagtcacttgccatgggtcacccagcaggttgttagagcctgggatggggaaactgaggtcacagggttgcaggaggtggggggtgagcgtgggaagaggtaaaccatgtctgcagcagagtctgacccctcgacttctctccctttttctctctccctctttctgtcgccactgggccactcagtcctggtatctgggatagcaaaggtcttcttccctcgccccttctccatcgtcccaggaatcccagggggcagcacagccggcccccggcccacgttttcggtggaaaattagagtgaacaagaacacccctgccgactcccagcccggccaaaaagacaaaacacatagacgcacacactcaggaggaaaaaaaaaaaaaaa

SEQ ID NO: 9046 - DNA, 715 bp, Homo sapiens; identical to SEQ ID NO: 3811
  misc_feature (154)..(154): n is a, c, g, or t

SEQ ID NO: 9047 - DNA, 725 bp, Homo sapiens
agaagggtgaactatcttggtaacacagcagcgggagcagtcggtcaagttagtctgccaactcgcgctccacgacggattgaacgtcatagcctcagctggcgatgataaaaaagtagaattcttgaagaatgacatcaaagtcgcaaagtccttcaattacaagaagaaggacaccgcggaggctttgaaggagctggctccagatggaattgacatcttctatgacaacgtcggaggaaagactcttgatgatgctctcgaagctacaagagacttcgctcgaattgtctcctgcggagctatcagccagtataacttgaagcccgaagacagatacggcgtcaagaacctagtttatctcttccagcgtcaattgacaatcagaggtttcctagtaggaagcattggacccaagtatgctgaagagttccagaagaacgtatccaagtggattgcagacggctcattcaagccttcgctagatatcacagagggaattgacaagagtggtgaagcgttgctgtccctctttgaaggcaagaacttcggtaaagccatcattcaccttggttaggtcgtccaggaataaaaggacctgcatcctaaatgggctgttagaaatttgtagcgtagacagatcacaatcaatgaacaagcgagacacaaaaagtcatcgaatgcaaagagatcacttttcatgcaaaaaaaaaaaaaaaaaaaaa

SEQ ID NO: 9048 - DNA, 738 bp, Homo sapiens
cacgtgactggactaatgtaagccagatgacgtgatccttaaagactgctatataaatcagtctcttactctataaggtttcaaatttagaataagcttttatcaaatagataattgatgcaatttaggattcacgcaagtttcagtgtcaaatggcggtcttatagtttcaattctgaaaatagcaaacttaataaacagccactttaaacttgttctggcaaaccagaccctgctgtagatatagtctaaggtagttaaccatataagccttttcaactcttaatgccctccacatgaatcagcagttaagaaggttctagaacccatgaaagcttttgtatgtattactaggttttgtttttcttatgtttgctgattttacagttctgactaaagctgacctaaatggatcagtttatgtgtaatattctagtgctttaatgactctttttttctttggagggagggtaacattatttggacagatgcagaaggaactgttagtgagtcaagacaaacacatctgaaataaaggaactgtgtattaacatgttaacaattcataactgcactttttatgacattttgaaaatctatttataggtacagaacaatgggttttgttaaactgtatcacatttatacttgcagaaatttatttcattgttattagtaggaattttattggttcaataaaattggcaaaactgaacaccaaaaaaaaaaaaaaaaaaa

SEQ ID NO: 9049 - DNA, 747 bp, Homo sapiens
tctataatcaggcacctttgctgctttgagtaagctggtttccggtttaaatgttaagcatcgccagacatgaatctattctctcctctcgattgtagcatagcctgacagctctagatacagcatttctatgatgaaaaatgagtatccatcaggaaatctagaagactagccgtgttttctcagactccacctttgtttgcactctgttgcctgtgaggagctttctggcatgtgattatttacttcaaaactagagttccaagcacctacattaattattttatattgtgtgcagaatagtatatcttttaatgtcagatatgatacactgcacatattgcttttgcactcttaaaatttttgtactaaataatagaaaatatttatattctttgagtgtgagctttgaatagatggcattatcactttattgtttttttaacaaaaactttttctcaattattctattgcaatgttattctgagcaagtcctatgccaaatatcttgtataatgtttgtatggaagattaaattttactcttgtgtggtaagactatttcagttactgattttatagttggaatttgatattccagcacaaagtccacagtgtattcagaaatccaagttggtgtcatacatttcattttgatgtgaacttttctttgctttcctttgttctaagactccattttgcaataaacgttttgacagtaaaaaaaaaaaaaaaaaaaaaaaaaaaa

SEQ ID NO: 9050 - DNA, 707 bp, Homo sapiens
gcttgtcatgttccgtgctgctttaaatgctcttcgcaatacatcatgtccgacgggatacctatttgttctgcatgacaccccaaatttgatgagagacaaaaggggttcgcacccatatgggaatgttgaaactattgtaaagtagtattatgaagtagcttttgtgtcattcatggtcgatgacatgaaaggtgaagtaaatttattctatggtaaattcacactaaaaccagtacagtaccataagtagaatacatgtaaggatcacctagtcttcactatattgagtaaatataacatgctaattttaccattaatgaaactaaacttttaaacatctccattatatctacatccttttgaaggtatttatcatagttgcccattttaattttaggattgactttctctttctgaatgacttcataaagtttggtgtgaattttgaagatcttgggttatctaatgattgtatctttgctagtcaacaacttatgaaatatactcaatgcgtctgatgtgtcattaagtgcagaaataactaagacacaaataacctttgcaaaccttcaagctgtgtaatattccaatgttgtttttttctttgtatatatacttatatcacgtaggatgtaaaaccagtatgaccttgtctagtctccaaacttaaaataaacttttgaaaagctaaaaaaaaaaaaaaa

SEQ ID NO: 9051 - DNA, 678 bp, Homo sapiens
taatatattaagatataacccagcgtatatcccatgatgaggggaatattatagccactgacacaatagagtcacattttgaatcaagatgtgttgagcacacctatattcacatagagagtgtacccaatattacacagcccaatttaaccccttatatattggaagtgccaaggatggatacggttaatctcttaacatagctggatgttctacccttttctacggggaaataaggggccacttggttggtgacttgctattctgccaaaaatctacatgcctaaatactttttaatctcaaaaaagcaaacttcctttaggtttcttaaattaaagaataaaatataaatgtgtgcctatggttttttttaaaaagtaaataatactgaactatggagagtaaaaactaaagttccctctttatgccttcgcctaccacactattttcttctaagaggtaaagtctgtttatttggtgtatatactttcaaatcgtttcttttagtgcacttacatgcatatacttgtatattatgtatattttattggcttaacaatatagctcgaagaacattccatgttagtatatcaaaatctagttcattattttcttgtttttgttaatgttggaatttacctactctatcattattccttatcaaaaaaaaaaaaaaa

SEQ ID NO: 9052 - DNA, 655 bp, Homo sapiens; identical to SEQ ID NO: 3817

SEQ ID NO: 9053 - DNA, 714 bp, Homo sapiens
ggtggaccagtggagcctttctgacaattgccaggcccaaacacagaaccagtctgcaacgcgtggcactgctcacatgaccagatgggagaaagacagcaggagcgggtcccattgcctgggcagggccgaaggatgcccacgacaggatttggagatggaggctcagtcgtgagaggagctgggctcctcctggagggacatcagacaacaccagtgcttcctccagcaggactcctcatccagtgctctctttgccacctgacctggcacccggtggatgctcagagatggcaggggagttgaatctttgaggcctggcccagcagtcaaaggcctcccacagatgtctgtttgtgctgcccccaggactggagtgacagcctggcccagctggctcaagccagggcagccctctgtggaaccccaaccccgagcctggcgtccggcctgtggcgcaccctgcaagtgggctggaacatgcagctgctacccgcgggcttggtgtcctttgtcgaagtggtcagcctatggtttgcagaggggcagcggtacagccacgcggcaggagagtgtgctcgcaacgccacctgcacccactacacgcagctcgtgtgggccacctcaagccagctgggctgtgggcggcacctgtgctctgcaggccaggcagcgatagaagcctttgtctgtgcctacaaaaaaaaaaaaaaa

SEQ ID NO: 9054 - DNA, 215 bp, Homo sapiens
agtctcctgaaatgggtctgaaaaatcccataattaaaataacttcggacttatactgatcccaagttaaaaaaaaatattattctacttcccattccaaataccatattgtcaaaatagtccaccagtgattctgtaaagagttcccattacaacattaagaaactccaaaaaaaaaaaaaaaaaaaaaaaaaaaaaaaaaaaaaaaaaaaaaa

SEQ ID NO: 9055 - DNA, 358 bp, Homo sapiens
gatccataatcccccttttccaggggaattgttgcaatggagtctggaggctgttagctaacttgcacagggagcagaaaaccaaataccgcaccttctcactgtataagtggaagctaaatgataaaaacacatggacacatagcagggaacaacagatactggggcctgccagagggtgaaggatgggaggaagcagaggatcaggaaaaataactaatgggtactaggcttaatacctgggtgctgaaataatctgtacaacaaagccccaagacacaagtttacctgtgcaacaaatctgcccttgtacccatgaacttaaaagttaaaaaaaaaaaaaatataaaaaaaaaaa

SEQ ID NO: 9056 - DNA, 750 bp, Homo sapiens
gagcatgatgtgaattacacaagtagatagatatgattcagtaagtaatgagaggttgaaagggaaatgattcttttaccctgtagtaatctgaagagacttccttgcaagcattaaaacaacctgagctatgccctatacactgggattatcaggcacagttgctcatgagagaattatatttgacagggaagggaagagtgggttagagaagaaataaaactccaaaagccaagtgactatggaaccaggcagagatcaaccccgacaggatgaagacaggtgggaggaatgggccagagtccaaagcagcacctgacgataaaaacatacatggtaataagatccagatcacattaggctccaagatcatgctgatcttttcagttaatatgcaacatgtgagtgaaaggcaagtgtaaaaatataccatgaacagatgaggcaatgtttattttccaaatggaatgagtctcggtaatgatgaagaactggtagtaaataaaataccaacagtgattatgctcagtacccctctccaggggatgagtgactgtcagcaactaagagtaaactccaaccatgcagaaaagcctaaaacagttttcagtgcctgaagggcagggtctgggaggtgagctcctggcctggctaaggaggtcgcttctcatcgtcctcaccactgctttaccacccccactcccctcaataatgcggtttgacacctcccaccaccaccaaaaaaaaaaa

SEQ ID NO: 9057 - DNA, 763 bp, Homo sapiens
cttggtccacccagctataaaaaggcaatctgtgttcaaaagctctcagagggaccctgatccataagcactgatgtcatatggatccatgcttcccacgcacaccgtcgctccattcctgagagatcccattcatgaagcagagcatctttcccattgagtctggatgaaatctcagaacccttttcaacacagtgccaaaagttcctacaaatcaatcaaagtttgcatgtctggtcaggctgtggtgctctgagatctcaatgaagcattcattcaagctacttgactttctcctagagaaaaattatggccctaccgaaataggttaggagaccccctcaagacaacaagaaagcaagttggatttctgaacttttataaccaaataacacccctaacatatgcacacccagtcactacagcatatgaaaatttcctcaactagcaacataggcacaatgtctatagtgcaggctttttccagacagctcaatctcgatgtaattgccgtcgtcaaaccttgttaaacatccaattgtggagtgtgaaagacacatgctaactacctatttatctgcttctagttattcgaatatgctaccttttataaaaaactagatcacaaaaaattgaactttgtcccccttgggctgttcctctcaccaaataaaactatcttttgaaaaaaagactttgagatggctttcagtagtacatatatgcaataagccaattaaaaaaaaaaaaaaaaaaaaaaaaa

SEQ ID NO: 9058 - DNA, 720 bp, Homo sapiens
gttttttcttaagacaccccctgtaggaatatgccaagtacagatagtgaggaaagaaaggaagaaaaatgataatgtctgcaagtgggcttatttttaacactgctgaatttcatttgtaattttactttcaagaatatactctggtagactgaggcgggaggatcacttgagcccaggagttggaggcttcagtgagctgtgatcacaccactgccctcagccaaacctgagtgataaagtgagaccctatctcttaaaaaaaaaaaatccctttgttgttgagttattttatgtcatttattggtaaatacctaacattttagacctagtcattaccagttaacatagaatttaattggatgcagtctgtatttttgaaaaaaaaaattttttttggaataacttaaattctaaaactttggccgggcgtgatggctcatgcctgtaatcccagcactttgggaggccgaggcaggcagatcacctgaggtcaggcgttcaagaccagcctgaccaacatggagaaaccccgtctctactaaaaatacaaaattagccaggcttggtggtgcatgcctgtagtaccagctgctcgggaggctggggcgggagaactgcttggacctgggaggcggaggttgcggtgggccgagatcacgccattgcactccagcctgggcaacaagagtgaaactccgtctcaaaaaaaaaaaaaaa

SEQ ID NO: 9059 - DNA, 741 bp, Homo sapiens
ttttgcgttgacccatgtggtcagaatcaggtttgtgtttcaattctaccacgtgaagtgtcaccaggagttatttaactggcaaggtgaggaaagggaaacagaattctttgttcctgaatacccagtttaagttccttgacaactggaacaaagtcatagagagcaaagggacaatgtaacaaatctacccattttcctagtagacactgaattcagctggtagtcgagggcttgttaattaaaacattttattgtttctaagaatgttcacacaatgccaagacttcgaaaatgagtctaaagccatggaaacacatttatcaccttcatgcttgttgaaggacaccagcaaaaatcaatgctaaacctatcagcttcatccattaaagcatttgcatagagaaactaacttccattttacaactctttaatgacagggagaatatccaacaaatcgcaagtaaaatagcatagaccacaaggaaagaaactaagacaagtcaaaaatacaccaagtaagaaattcaatacaactggaaaacatactcataggcaccaacattcctcctttggacacctgttccttactgccctcagatgccccaggacagggtaatggctgagcatggaaaaagtaggtaatgggtcacacaaacttggtggtcctgcaccaaactacaaagattagctcaattatagcattgtgctaacagtaaaagtagtaaaaaaaaaaaaaaa

SEQ ID NO: 9060 - DNA, 766 bp, Homo sapiens
gctttttggagcctctggaaagattgttttctcgcccttccagccttagagtctgcctgtaagcctggctccgggcccctccttccgtcgtccaagccaacaacagtcgctgggtttatcccacatcgagttgccctgacttcctgcagccttctactttaaagtgtccttgtgattacattggccccacctggacactcagaacactctccctgtcttaaagtcagctgactagcagccttaattccatttgcagcctcaattcccctttgctatgtgatgctacacactcacaggttccagggatttggatgtaggcaactgtgtggggctgttattccacctcccacacctgttatcctgcccatccatttgaggaagaggtacccacagctctcttctcatgtaaatgaagaagaggggcttatttttctaggatgtgtcttttgttcctagaagagaaggccaagagtttgctgatgagaatgcgggactcagggaaataagccacacagccccggcggttgagaccagatccaggtgacgcatggtgtctgcactctgattaccaggccactctttcccatgtggaagccctgacatctgggtcacggtgcttcatgggtcttgctgcccatccctggccaaactctcccttttgaaagcctctcgccacagatgtgttccctccttttggcccctattgctgtgacttctactgaggaaataattaaacccaaacaaaacacccacaaaaaaaaaaaaa

SEQ ID NO: 9061 - DNA, 699 bp, Homo sapiens; identical to SEQ ID NO: 3826
  misc_feature (89)..(89): n is a, c, g, or t

SEQ ID NO: 9062 - DNA, 225 bp, Homo sapiens
gcccgcccccccagcgcctcgctcccttctctcccgcccacgccccgctccccgcccccggagccccgcggacgctacgccgcgacgagtaggagggccgctgcggtgagccttgaagcctagggcgcgggcccgggtggagccgccgcaggtgcagatcttggtggtagtagcaaatattcaaacgagaactttgaaggccgaagtggagaagggttccatgtg

SEQ ID NO: 9063 - DNA, 175 bp, Homo sapiens
ccctgtaatccgccttggggagtggaggaggtctgtgggctgaactccgaggacacttttgtgggggtgggggagatagcaaccaagtcatgcatgaggtcagctttctgcctcataaccagcaagcctctcaatgccatcctcctctcctagaccccaaggtttgctcctaacc

SEQ ID NO: 9064 - DNA, 795 bp, Homo sapiens
cccagggtctgtagccacacaattgtggtaggagcacgagagccactgctgatgtagcttgttcagcaaaaagtcagcaccgggttatctttctttatgttcttaaggaccccacagagttttgcccagctttctatttcatccctaatagcacttcgcctcccaaaaggtgctcttcctaactttaattaaaaaactgagtagtctcagttccttccctcttaagcagcactatccaacaggaccttctgacatgatggaaatattctgtctgcactgtccaataaagtataacccctacccatgtgtggctgagctgaatgtggctacagcaactgatgagttgaatttttaattaatttaaatgtaagtatatacatatggctaaggctactatacttggatagcacagctcttaaagcagcagttttcaaccttggctgtctgttaagctcatctgggtgccttttaggagtccaggccgggtgcggtggttcatgcctgtaatctcagcactttgggaggctgaggcaggtggatcacctgaggtcaggagttccagaccagcctgacgaacatagaaaaaccttgtctctactaaaaatacaaaatatacaaaattagctgggtgtgggggcgcatgcctgtaatcccagctactcgggaggctgagacaggaaaatcgcttgaatccaggaggcggaggttgcagtgagccgccaatgtgccattgcactccagcctgggcaacaagagggaaaagagagaaactccatctcaaaaaaaaaaaaaaaa

SEQ ID NO: 9065 - DNA, 692 bp, Homo sapiens; identical to SEQ ID NO: 3830
  misc_feature (10)..(10): n is a, c, g, or t

SEQ ID NO: 9066 - DNA, 763 bp, Homo sapiens
cggcaccaatcgcattcagagatcatgctgctctgccatggttatctggaaatggagaaactcattcctgattggctttctcttacaattgaactgcttcagaaagcacagatggatagctcccagttgatccattgtcgggagcttgtggcacatcacctttctactctgcagtcttccctgcctctgaattccgtttatgtctaccgtcccctcaagcacaccctggtgacctgtgacaaaggagtgttcagattacatccctcctctgtcccaggcccagacttctccaaggacaacagcaagccagaagtgccagtcagaggtacagcagccttttaccatcatctcccagctgccagtgggtgcaagcagacctctactaaacgcaaagtagaggaaatggaagtggatgacttctatgatggaatcaaacggctctataatgaagataatgtctcagaaaatgtgggttctgtgtgtggcactgatttatcaagacaagagggacatgcttccccttgtccacctttgcagcctgtttctgtcatgtagtttcaacaagtgctacctttgagtgtaaactaaggtagactactttgggaatgagaacatgcaaaatcaggaaaggctgtagaaggaaatataccttaacaggctgatttggagtgagccagaaaaaaaaaataaaactctcattatttgtgtggctaattataattcagcgttatttaagcacataaagaccaaaaaaaaaaaaaaa

SEQ ID NO: 9067 - DNA, 735 bp, Homo sapiens; identical to SEQ ID NO: 3832

SEQ ID NO: 9068 - DNA, 576 bp, Homo sapiens
gcatgttgaaatttgattcacagtgttggaggtggggctaatgggaggtgttcaggtcatgggagcaaattcctcatgaattgattaatgccctttctcaagggtgagagaattctacgctgtaataggtcgcttaaagaagctggttgttaaaaagagcccagcacctcctctctcctttgcttcccctctccccacaggatcttggctcccctctgccttctgccagaaatggaagcagcctgagtccctcatcagatacagatgcccagtcttgaactttccagccaccaataattccaaagtgtaattccaaagccaaataaacctcttttctttataaattacccaacatcaggtattcctttagagcaacacaaaatgggataagacacagagggggaaaagactcttacttatagaaaaacaaagataagcataatagcttctctctcatcggagatattgcaagccagagacaatggaataacacctttaaaatgctgaaagaaaatcctgtcaacctagaagcatacatccagtgaaaatacccctcaaaatggaaaaaaaaaaaaa

SEQ ID NO: 9069 - DNA, 759 bp, Homo sapiens; identical to SEQ ID NO: 3834
  misc_feature (113)..(113): n is a, c, g, or t

SEQ ID NO: 9070 - DNA, 694 bp, Homo sapiens
tatccctgaatctctaatatgtgtgatggtcaatttatatgccaataggccaaccacggtacccagatatttggaaacttgattttcgagatattcagaactgtaagataaccaatttgtgttgtttttaaaaataatttgctacagcagcgataagaaactaatatagatttcagtatctagaagtgggatgttgctatataaataccaaagatgtggaagtgattttggaattgggcattgggcagaagaaggaagaattttgaggggcatgatagcaaaaacctagactgccttaaatagactgtaggtataaatatggatattgactactctgctattatggactcagaaggaagtaagaagcacagtagtgaaaacctatattgtcttaagagaacatcataaacagattgttggtagaaaaatgacattaaaagtgctgctggtgaggggccagaagaaaatgaggaacttgttactcaaaactagaggaaaagagaaccttattctatagtggcagaaagctgggctgaattgtgtcctatagttacatggaaagcataacttgtaagtaatgaaactggttatttaccgagatagatttccaggtaaagtggtgatgatatgaaccagtttctttttgttgcttagtaaaaaaaaaaaaaaaaaaaaaaaaaaaaaaaaaaaaaaa

SEQ ID NO: 9071 - DNA, 681 bp, Homo sapiens
gcaatgcttctgaatacgtgaagccaaattgacagaactcgatggagaaattggcaattccataatcctagttcgaattaacagccttgccacgaacagttgataaataagctaggaaggggagtccataaggaaatacaagatttggagcataattagctgactgtgacccaactgatattagctcatcactggtcaacagaatgcacatgcttttaaagggcccatggtacattccccgactcacactacatgctgggttgtgaaataactccccataaatttgcaaagactgacacttctacatcatttgttctttgacctggaaatgggattagataagaagtcagtaagaatagctagaaaccctccgcaatacttggaaattaaatagatgatggcaccagaaaggcactgcattcatcaagtgcatgcaatttttttgatgactttcactgtaaaagggagcagagagatagggtaatgagtgtagtcagaaatcatgacccttctcagccaagcgaggtggctcacacctgtaatcccagcactttgggaggccgaggcaggcggatcacgaggttaggagatcaagaccatcctggccaacatggtaaaaccccgtctctatgaaaaaaaaaaaaaaaaaaaaaaaaaaaaaaaaaaaaaaaaaaaaaaaaa

SEQ ID NO: 9072 - DNA, 738 bp, Homo sapiens
cagattagttgctgcttttgagttcacaaataggaatactcgaacggtactctttgcatctccttctgtcgtgctcagcattatgtctggggaattcatccatgatgtgcatgagactggaattgattgtttttcattgtcactggacttaatgatttctgtaatctgcctcctgcagaatatagaatagtgcatttccttctgtttaaatttcactgtgatgtaaaataaatgcatggttaaataaactggtttaaggggagaaagtttaaaaaaaaaaaaagtcatttaagagcatttgactacaaccgaagtgcagatgtagtcagctagagagctgtcacttccgagtaaatgaaatgggcagatgtttgggaaaatcagtaagattgtgtggtaatcctgtggagagtgttggcagaactagaaaacagagagataacgagctggctaaaatggtaaacaaaggaagcttgcactcctgggagggtttgcaggaagcacacagcaatcccaaaaccctctggactcctgggtttgaggcagatgcagtgcaattccagtggtctcttctgttctactgtaagcccatctcacctgtttcagatcagtttaggttccagtgggaatgaagaagaaaaacttttttacagtttcagctgtcagaaagctgctgtttgcaaattccaggcttccagacaacagcagaaagggtttgctcaggaaaaaaaaaaaaaa

SEQ ID NO: 9073 - DNA, 756 bp, Homo sapiens
acatgcaagatgatttgtatcttagacgacctgtccagatggttaccatttgccacatgcgacacatttttaatgaagtaaattaatcaagactgaaaatgtcggccagcctggtggctcatgcctgtaatcccagcactttggaggccatagagggcggatgacttgaggtcaggagtttaagaccagcctggccaacatggtgaaacccatttctactaaaaacacaaaattagctgggcatggtggtgtgttcctgtaatcccagctgcttgggaggctgaggcaggagaatcgcttgaacccaggaggcagagactggagttagaagctgggcagaggcacccacagccttatcctttgccaatctctgactcaatgccacggccactgtagtgagctgaaccacctccagcagtcccctggcagaagcacctggaaaacatgcaatgggaaccttcaccctgaggccaggcccttcccatgctacccaacagtagacaggacaccctgtgttgttggctgcaccggggtgctgggatctgtggatccctggggcctggaagccactctcagcacatacagccactgtgttccgaggtccagtcagctggccgggaaggaattcaacacagccaaggacagaggtccatatgatgacgggtggatgctcgtgtgactttgctgaccttttatgttttctatgggcaataaaggccaagagagctcaaaaaaaaaaaaaaaaaaaaaaaaaaa

SEQ ID NO: 9074 - DNA, 769 bp, Homo sapiens
aatggtggcctgtgaacgtcttctagataatgctatataaaggaatggcacccgtccttgtacgtacttcatatgtggtgtgtccaacacattatagtgttagtaatgtatttctgaacttcgggtaatggctgttctactatttagatagtgttctacttttaaaccattttactgtatatatccatcggtaactccctgttaatacagttgcttttgaagttctttttttaaggacagagtcttgctatgttgcccaggatggtctcgaactcctggactgaagctgtcccccaacctcagtctcccaaagtgctgggattacaggtgtgagccacagtgtctggcctgataatatgaaactttttctcagttagttgaaacttagttgttggttttgcgaggaaaagttgattcgtccattggtatttgtgtgcatttaaaattttaccaactcttaactgctacccttgtgagttaccattcggtggccactatttctagtcaatttctgctgacccacacgggtctaaatttggcaaggaagatttgattcctctgtcaaaagtagcccataacatttatgctctgcagtttatctttttctaatttatttttttgagatggatctcactctgtcacccaggcagtggcaaaatcataacatactgcaacctccatctcctgggctcaagccatcttcctgcctcagccgcctgagaagattcattaaaacatgtttctttcaaaaaaaaaaaaaaaaaaaaaa

SEQ ID NO: 9075 - DNA, 259 bp, Homo sapiens
cacccggaacttggcaaatgagtttcgctgttatgtgaattatgattctgggctggactgtgggatctgattacagacggtgacataacacaggaaggaaccctgtcacattgctctttttgtattttcgtagtagatttaataagttataatctcttcccctcccccccaactggagctgtccctggcctggttttcaaaataaagtgtgcgatcttcaaaaaaaaaaaaaaaaaaaaaaaaaaaaaaaaaaaaaaaa

SEQ ID NO: 9076 - DNA, 724 bp, Homo sapiens
acagtgggaataaaatgtctccaacatggttaatgtggtaaatggggtccagaggactaaaactacctctgttgaggctcactatttttagagggggacaaatacatgtaattgtagtgagaaagaagttcatagaaaaggtttaaatacattgcatatttgaatgtatgcttttattgtatatgggttccttgtgaaactagaagggcttagcagtaagcccccttgtcacaaaaagtacctgtagacaaatttagtcaaaaaattgaatttctcgttcatgttttagcaagaggcgtagtaatcaatcacatgagtaccttactgagaaaataaagcctagatttgcttttgtggggagacctctttactgattttctgtagttttgaagcatagtctgggaattcctgaatttcagaaattacattggaatgcttatttgaaacacatcttcaaattaataaaattaagatattgatttacatccctgaaaatattttcctatctgttacagatttggggagatgttaggtgtgaggaatagtgttcctcataggatggttgctttcagagggcagtgtttgtggtactcctgtggcagaaaaaaagaattcgtttctcttaccttaccattaggtaaacatagtaatttagggggaaattcttgtaagtattagttcacaaaaataaatgacctaagaaatttatctgccaataaatttt

SEQ ID NO: 9077 - DNA, 663 bp, Homo sapiens
tgacccttaccataccaattgctttctgacttgagtctcctctctacccttggatgtcaagagatccatagttatgagggttattttcatcatcccatgtccgctctgtaagaagctacagaagatggatccccatgccctctgcaccatgaaggaattaaggggtcctcttgtaaagggtatcggtaggatgatatgtcagaggcgtttgaaccagagtgactccatcttgagtgagggctaggaaatgaagctggggctttgatgggctacattcctagaaagttaggtattcctagcttctagatgtttacagctaagggcacagattgatagcatttactatacagacccagacttgggagtgtcctgatatcccaatatcttgagaacagaagcattcctaattttgttttgaagataatactatcaattcttgcaaaatatggtatcttaagaaaatccaccctttatcacaaacccttgtagacagagcatatctccccatgatcttattttatcctatatatacacaagtttcgtacttagggtgatgtgttccttctcttcagggaatgctctactctgtctatggagtatctattctttcaccacttaattttcttaataaacttgcttttgctttgcaaaaaaaaaaaaaaa

SEQ ID NO: 9078 - DNA, 319 bp, Homo sapiens
gtctgttggaagaggcaaggaaaaatggggaagagacgcccctgctaacgggatatgctgagaatgaggaataatggggagcaggaggtctgacaatgaggtagacgaagaagaggaagaaggtggggaggaagaggaggaggaagaagaaggtgatggtgaggaagaggatggagatgaagatgaggaagctgagtcagctacgggcaagcgggcagctgaagatgatgaggatgacgatgtcgataccaagaagcagaagaccgacgaggatgactagacagcaaaaaggaaaagttaaactaaaaaaaaaaaaaaa

SEQ ID NO: 9079 - DNA, 755 bp, Homo sapiens
gatacagggtgagccacacgcctgccggcttatttttatccccaggaaatcttcagcaacgtcagttggtctcgcaccagatagtatttttcgtaaatgaaatgctgacttcgcctcttcctgctgtatgctcatagccttgcactgagcacagatatgacaagcagtagccatgggggaggtgggtgacaaagataggaccccgggagggggcgcaggtacatgctagtttcaattaccacagtattctagagacgggttgcaatgacaaggggggcaaatgaaatcaatgcaagatttcttaataatgggcagacagaaaaatgtaaaaccacaccaaacggactgctgataatattttaaaatatacttatttgtcttctttttgcattgtgaaaaaaaccaaataaattttgtgtgataattttgatgatgaaaggtggaagttctacctagatttgaatgagtgtttttttaagggaatgagaatgtcatggtgctaaacctgacaaataagagatcattgaaatgctgaaaattttaacagtcttcttaaaagtattgagggggcaaaaattaccaattatggtatacaaaaataagcctataaatgtgtttcacattgctaacttgagtttcagttgattcagtttgtaataactagtaatgagcttctgtttaccaataaaaattctgtaaattgtttgctgttaaaaaaaaaaaaaaaaaaaaaaaaaaaaaaaaaaaaaaaaaaa

SEQ ID NO: 9080 - DNA, 807 bp, Homo sapiens
cgctcatttcggacggatggatccctttcgtcagttgctgaggtgttcccgctggaggtaattggctaaccagccaagatccccggaactaccaaatagctgtgggctttctggaactgctggctgggttgctgctggtcatgggcccaccgatgctgcaagagatcagtaacttgttcttgattctgctcatgatgggggctatcttcaccttggcagctctgaaagagtcactaagcacctgtatcccagccattgtctgcctggggttcctgctgctgctgaatgtcggccagctcttagcccagactaagaaggtggtcagacccactaggaagaagactctaagtacattcaaggaatcctggaagtagagcatctctgtctctttatgccatgcagctgtcacagcaggaacatggtagaacacagagtctatcatcttgttaccagtataatatccagggtcagccagtgttgaaagagacattttgtctacctggcactgctttctctttttagctttactactcttttgtgaggagtacatgttatgcatattaacattcctcatgtcatatgaaaatacaaaataagcagaaaagaaatttaaatcaaccaaaattctgatgccccaaataaccacttttaatgccttggtgtaagtatacctctgaacttttttctgtgcctttaaacagatatatattttttttaaatgaaaataaaaccatatatcctattttatttcctccttttaaaaccttataaactataacactgttaaaaaaaaaaaaaaaaaaaaaa

SEQ ID NO: 9081 - DNA, 745 bp, Homo sapiens
gtccgaccagtgcatgcatatactgtctctgtttgcatcattcacttgttagattataaagcatgtggtttttatatatgcactttgctgtttgattaagaagcactatgttaatatatgatgtggtgatcaataaggtttatcttaaagaatgtaaagactttaggtttttgaaagttattttggagaaatgggacttaatctataatagttactatgtatgttggtctacacttttgccaaataatatctttaacttgtacatttgaaaagtgttcagagtggccctcctaccatccttccttccactccagccaactcttcctgctaaactgtattccagtttccaagtttactaattgacttgggcctgttcaaatgaatacttcacagaaaccaaatgccaaacggaggaaataagtaagccctcccagtttctccaagataaagctttttttattattgctattaatattaaatataggtctcattcatacagtgtatgagtaggatcatttggacaattgtccacaaagaccaatttttaaaacattttcttgtgttatagttaaatagtctagtaatgttttgtcctttattttcaatatttgataaacatttgatgttcaaaacttagctaatagatgcttgtatatgaatgtgttgtaataaagtcgaggttttcttgatatatatttattaagatgataaaaattcattaagttttttaaaaaaaaaaaaaaaa

SEQ ID NO: 9082 - DNA, 711 bp, Homo sapiens
cctgtggttaccagtgcagacaagccattgtgagccaccgctgccagcacagagcgtcttcgcccctgtagactagtgccgtagggagttacccggtgccccaagctgaactgtggcccccttccggggaatccaatcccattcttccagggaaaccaggaccgaagaccccgggaatggaaaccgaaggttccctaaccgggattggaaagtccccccatccagttccccccagtaccttcccaagccaattaagcctttccaaccattggtcaccagaaatccagaaggaggaagaatgttttttgggagccctttggagaacgcccagtctccccaggcccccggcatctatcgagtttgcaatgtcacaacctctctgatcttgtgctcagcatgattctttaatagaagttttattttttcgtgcactctgctaatcatgtgggtgagccagtggaacagcgggagacctgtgctagttttacagattgcctccttatgacgcggctcaaaaggaaaccaagtggtcaggagttgtttctgacccactgatctctactaccaccaaggagaatagtttaggagaaaccagcttttactgtttttgaaaaattacagcttcaccctgtcaagttaacaaggaatgcctgtgcccaataaaaggtttctccaacttgaaaaaaaaaaaaaaaaaaaaaaaaaaaaaaa

SEQ ID NO: 9083 - DNA, 726 bp, Homo sapiens; identical to SEQ ID NO: 3848

SEQ ID NO: 9084 - DNA, 461 bp, Homo sapiens
cctcttgctcggccgcccctacttgggaattgaggagcccctctgcccggccaccaccccgtctgggagttgtacccaacagtctcattgagagcggtgcgatgatgacagtgtcggctttgtggagtggaggtgggggtgaatggtggggaaaagattgagaaatcggatggtttccgtgtctgtgtagaaagaagtagacatgggagacttttcattttgttctgtactaagagaaaattcttaccctaaaacttaaagtataataaaaaaataaaaacttcagttttctaaaaattatatttaaaattgtaatcaaaatgtacctagtttataaatgtttattttgtacttaatacctgtaaagtcttagttttcagacattaagtgactgtatcatgttcggtttaataaagaatttatgcagcaccaaaaaaaaaaataaaaaaaaaaaaaaaaaa

SEQ ID NO: 9085 - DNA, 737 bp, Homo sapiens
  misc_feature (172)..(172): n is a, c, g, or t
acgttctgtcccacggaatctatttacccttgcttttggtactccctcttcgtactcacctagcttaagctcccgtactgctcgccatgcggcgcctgaagcgtgaacttcgtggtcgcctctcgctgcttgggcgctccggttctgttgctttgtggtcccggggccaggnccctgagtcgagtgcacctgtggtgggtgccgccaggtgcctggcggagctcctgggagagccccacgcggacctcgccgtgagctgcaggtactgctaggcaactagaaggaagccatgcccacgccgcaacatacttccctctccagtgtctgggtttcttgagtgtgggtacttccagtccgcctcctaactccagtctcttgaaaacacgggaggttgccaaaactcagccgcttcctggcagcgaggaggagttaccattgagcaggtagttccgcacgtgtcgactttggaaagatacggacattttctgtgtttcatgttctacttgaggcagcctgcttctgcaaagtggtacgatcgaagggactatgtcttcattgaattttgtgttgaagacagtaaggatgttaatgtaaattttgaaaaatccaaacttacattcagttgtctcggaggaagtgataattttaagcatttaaatgaaattgatctttttcactgtattgatccaaatgattccaagcataaaagaacggacagatcaattttatgttgttta

SEQ ID NO: 9086 - DNA, 785 bp, Homo sapiens; identical to SEQ ID NO: 3851

SEQ ID NO: 9087 - DNA, 785 bp, Homo sapiens; identical to SEQ ID NO: 3851

SEQ ID NO: 9088 - DNA, 787 bp, Homo sapiens
aagatcttatcctagcgctgacagctcctgtttcctcactggggttccaagagagccaactttgggttcctgctcacagcaccagattttcaggggccaagggaatctttctctgcgcactctgaaagtttgctctaaaatcgactcacagaggcagattaataggagaaaacacatagaaaatgtatgattgctcagcccctcagtgaggtgcaggaggttatataccatcttgaggttacacaaaaaagtgcatcatgccaaaacaggttataggagagagaaaacttgtaagggttcagactctgttaatccttcctagatccagacaagagaaggcctgtatgaatcaatgcagattttctacagatgcaaatttttcccacaaacgaaagcattgcaggactacttattttgctggttctctggcagccatctgaaaatatttcaaataaatatattttggggttaaacatttttatttctttcaaggtggaatattaactatgtatgtctcttatagatatagttttaaataaataagggaatccactttttctaatttgttaagatatgttttgttttaagaatgacaaggggttaaatttttaaaagattttctgcatctactgatattatcacatggtttacttcctttttaatgttaatgtgttgactaatattaactgattttcaagtgctaaaccaatattgagttcatggaataaatcccactggatcatgatgtattttttaaaacataaaaaaaaaaaaaaaaaaaaaaaaa

SEQ ID NO: 9089 - DNA, 687 bp, Homo sapiens
aacatcctcttgcctcagcctcctgggtagctggactacaggcacatgccaccatgccctgctaattttttattttattattattatttatttttagagatggggtctctctgtgttgcccaggctagtcttgaactcctgggctcaagagatcctcccacactggcctcccaaagtgttgggattataggcatgaggcaccatgctcagcaaagaattcttgatcaaatccagagctcctgcctctcaagaggtggtccagcctgagccaggtccttccaaggggtccaggtggcacgcgggggttctgctaaacttcctggtgggaatgtggatcagtccttcccatcctctttcttgtcctttcctggttcaaagcacccaccgagtcagccagaaacctctgattccaccacgttctccaaaaagtgcaccaggaaggcaggaggccgtgctggaaaaggcagccacacgttacaggagaagaccagggtggagagggaaaaatacctccagcttggcgacccagctgttaagcagaacaaatcaatccacggatggagaagaggtcgtgggtcttctgagcccagctgatacacaccaagtaatccacgttaaggggtccgcagccccccacccaattccccactttccatccaaggccaaagagcagccagaccctgtcct

SEQ ID NO: 9090 - DNA, 756 bp, Homo sapiens; identical to SEQ ID NO: 3855

SEQ ID NO: 9091 - DNA, 756 bp, Homo sapiens; identical to SEQ ID NO: 3855

SEQ ID NO: 9092 - DNA, 673 bp, Homo sapiens
acctttggatggccccctccgggtatctgtggcgtgatgtccccggggctctccagtacatcatcccgcctctacttggctgctgcctagcctgtgggcaaagggcattccttgagctgtacgggaagtctcactggcatggccttccgtgtccccatctgcctacggtgtcagtgttggacctgacctgccgtctagtcatacctgccaaatatgattgacatcaagaagtgtgtgaagcaggcgtcggagggccccctcaagggcatcctgggctacactgagcaccaggtggtctcctctgacttcaacagcgacacccactcctccacctttgacgctggggctggcattgccctcaacgaccactttgtcaagctcatttcctggtatgacaacgaatttggctacagcaacagggtggtggacctcatggcccacatggcctccaaggagtaagacccctggaccaccagccccagcaagagcacaagaggaagagagagaccctcactgctggggagtccctgccacactcagtcccccaccacactgaatctcccctcctcacagttgccatgtagaccccttgaagaggggaggggcctagggagccgcaccttgtcatgtaccatcaataaagtacctgtgctcaaccaaaaaaaaaaaaaaa

SEQ ID NO: 9093 - DNA, 788 bp, Homo sapiens
tagccagaccgaacacccagcatctggcacagaggcttgacaaactagctgttggcctgctacggggcagacacccgaagagaattcagtcaggggagcaccaagctgggtagtccccacagttttctgctggagcaaaaccccccagtcatgagtcatgggtgctgcaccagctgtgcacccatgacgaacactgccctgaggatcctccaatcttgacccactgcatctacagaccatccgcagacatactccataactcactctgactatgtcaaacacagaggaccagtggatctcaggggagctgtgggtctcctgacaacctaaccattgactctggccacccaagggaggtgggagtgtagcctcccaggggcccttttggggctaaggaaatgcaggcatgatgccaatgattagagggtgctcctccaaggcctaggagcaaacttggggtcgtctctcacgcccgacatctctccctccacaaagcactgctgtgaatgccctgaaatataaaagaggcacatagctgagtgacagcctatttgctggcccttactcttaagctccatctactggaatgcagcctgaattataccaccaatcaaaaattcctttagcatacattgactatgaaacccagtacaggaatctagtcacaactcaataacccatacagagccttggccctctgaaaacactcagaaatgaagccaatcaactatacacaatacacaccacagtcaaagcctcaagagaacaaaagcatataaaaaaaaaaa

SEQ ID NO: 9094 - DNA, 725 bp, Homo sapiens
cggcctcccaagtgctgggatacaaggcgtgagccacgcgcccgggccacttccttattcctgtatggtatcaaattcaaactcttggccttgatagtcaaactctcaccaccactgaatctggttaaccaacctgtccaatacaatctctctgcactcctccaaataatgttcaagttggacctaagtgctccctagtccttctcacacctgtgtgcctggaaacaccacccaccttcgttttctctcatctgaatttactagagccccagaggcaggtctcatagtcttccctgacttgggtttttttggcactgactactgggcattcatgatgggacctgcccctggggctctagtatttggtgttacagggaggaacacagttttgattccccaaacagaacaaaggatccttgagggcaactgtctgttgtcatttcatgtctcccccaaccaggcattaaaacacgcatagaaattcctgctgacgggctcttgtgaagttacaagttacaatttggtgaaaatgcccccaagtatttcctctatttcccaaggaaaggaaaagaaagatatagaaattaaattaaagacaaacttaaatcattcccatttctgcatgcttggtctgtgtgggaaaaaaaaatcatttcatctctgtctgcaacgcagacttcgacaagttgagaaactccctaaaaacaaagcatacaaaaaaaaaa

SEQ ID NO: 9095 - DNA, 766 bp, Homo sapiens
caggaatgcaatagagaaagagttaatccacacagagccagctctaccgaagacctggggtttattatcactcagatcagtcctccgctgagaattcagggattggagtatttaaggataattttgtgggtaggggccagtgagtttgggagtgctgattgctcgggtcaaagatgaaatcacagggagacagtgctgtcctcttgtgctgagtcagttcctgggtggtggccacaagatcagatgagccaatttatccatctgggtggtgccagctgatctatcaagtgcagggtctacaaaatatcttgagcactgatcttaggttttataataatgatattatctccaggagaaatttggggagggtcaaaatcttgtagcctccagctgcatgactcctaaaccataatatctaatcttgtggctattttgttagtcccacaaaggcagtctagtccccaggcaggaagggggtttgttttgggaaagggctgttattgtttttgtttcaaagttaaactagacacttgaggctaggagttcaagaccagtgtggccagcatggcgaaaccctgtctctactaaacacacaaaaattagccaagcatgctgatgcacacctgtggtcccagctgcttgggaggctgaggcacaagaatcgcttgaacccaggatgtgaaggttgtggtgagctgagatcacaccactgcactccagcctgggtgacagagcaagactctgtctcagaaaaaaaaaaaaaaaa

SEQ ID NO: 9096 - DNA, 731 bp, Homo sapiens
cgctcccaggtttaaccattctccgctcagcctccagagtagctggaattacaggcgtgtgccaccacgcccagttaattttttgtatttttagtagagatggcgtttcactatgttggccaggctggtcttgaactcctgacctcaggtgatccgcctttgcctcccaaagtgctgggattacaggtgtgtgccactgtgcctggccaaccatttcttattcaaatctacagtagttaaaaaagagaaatagtagggtcagttaggttaaccacccagaggctcatttctgtccccattatgacttagtcccttttctactacctaaaggtaatgttactagagaaggaaccttcttgtggaagcagccaaatggctgagctagctcccctgtgagggcaatgagggaactatgggatccgaaaacacatactgcccgaaaccaagacctttagggatttcatggtttttttgcacaggagatctatggaagaaccatctctatgactagagaagctacagaactcccaattctgtttcctttctccttggggctcttctgctttgattcttgccatcatatgcctacacttctcttgggttatgttcctctgcctttaaaacccaggccctccttagaatatgagacagactggccttttctgaaagaattttactaaataagagaagaagttaatgaaaggaaaaaaaaaaaaaaaaaaaaaaaaaaa

SEQ ID NO: 9097 - DNA, 683 bp, Homo sapiens
acttttcgctgtttaaaaatagggaagtattaaatatgtcaagattcgttggtgctcatgtcttgacaacgtaatgacgtggaaacgttttaattaagatgggtctacctctcaatttgcatatccagatttatcatattttcccacagatatactatatatggattgttgtcagaattgttgaaaactcacttataatttgccttatctaggtggtccataggctcttggtgcactgtttttacagacctatcggccttatttctgaagtagatcttttaaaactctttaatgaagttctgtcactagtgaatgataatgagattttattaagaataaatggctcttttttggccttgtattttctggatatgccattctagattacaattccattgtggatacaaaggacaaaaatcatatggaaaatattgttaaaattgaactcattaaaactgagaactttggcttataaataaaaatataccatgaaatcaaaaggtaaatcaaaaacttgagagatatttataatttaatcttcaagcagtgatcaagaaatcaataaaaagggaacccaatttaaaagataacatatgtgactgccaaacatatgaaaatgtgctcaacctttgaataaccaggaaaaaaaaaaaaaaaaaaaaaaaaaaaaaaaaaaaaaaaaa

SEQ ID NO: 9098 - DNA, 735 bp, Homo sapiens
tggacactcctggcgtgctggctcctcggattgaaagtgtggagacaggcctgaagctggccctgtggggaacggtgctggaccacctggtcggggaggagaccatggctgactacctgctgtacaccctcaacaacaccagcgctttgggtacgtgcagcactacggcctgggcagtgcctgtgacaacgtagagcgcgtgctgaagagtgtggctgtgaagctggggaagacgcagaaggtgaaggtgctcacgggcacgggtaacgtgaacgttattcagcctaactatcctgcggcagcccgtgacttcctgcagactttccgccgtgggctgctgggttccgtgatgctggacctcgacgtcctgcggggccaccccccggctgagactttgccctgaacttgtccgggtagggagggccggaggcatgtggcctcccagacctcctgacctgggtggttgaggctcaagacagctcacccggtccagaagctccatgctggtcactagggtgctgtgctctctggcgccccacagcctggccagctccagggaccccagttgcagggcccaagcaggtgggagtggacaccaggcttcccagtggacgtccctgagcagctccgcatgcttggttctcccggagcttcctgctcaggcctcttgagaaatggatgctgtctcagaaggagttaaagctataacctgtaacctttaaaaaaaaaaaaaaa

SEQ ID NO: 9099 - DNA, 735 bp, Homo sapiens; identical to SEQ ID NO: 9098

SEQ ID NO: 9100 - DNA, 96 bp, Homo sapiens; identical to SEQ ID NO: 3865

SEQ ID NO: 9101 - DNA, 719 bp, Homo sapiens
agttacactgaacaggagatagcagactcagatatgatgagatgataaatatgttgaccgaggggaaaagatttcagtaataggtagaagtggcatcatttattgtgatcgaaagggaatatggaaaaggagagcttgggggaatctaatcaaagtacttttaggcatattaggttttacatgcctgctagaaattcagctgaaggccaggcatgatgactcatgcctgtgattccagcactttgggaggctgaggcaggcagattgtttgaggtcaggagttcgagaccagcctggccaacatggtgaaaccccatctctactaaacaatacaaaaattagctgagtgtgtggcacacatctgtaatcccagctcctcgggtggctgaagcaggagaattgcttgatcctgggaggtgggggttgcagtgagccaagattatgctactgctttccagcctggatgacacagctgagactctgtctcgacaaaaaagaagaagaaaagaagaatctccaactgaaaaacatcaggtaagccattagttaggcaagtcaattcttgaaagttaacagcatgtagatggcatttgaaagcctgaggttggatgagatcatttcaagagagtatctagaaagagaacagtgcgcaggacacattcctcaatggtaagactcttcaacattgactacagaagctgactagagacagcaaaata

SEQ ID NO: 9102 - DNA, 740 bp, Homo sapiens; identical to SEQ ID NO: 3867

SEQ ID NO: 9103 - DNA, 785 bp, Homo sapiens
ttattgattcagagattggccaatatttggaaaagggcagtcagtaattctttttaagtcacactactgcagctgtcttttctatcacatcatcattgagacatatgaaaggtgattcattattggggaatcacttgcacctccaactgccatcgagctgcgcccataagatcacaggtggagtctaaaaaaattaaattacataaaatggagacttgtgttatcttgaatttagttaaaaaccatatatttcaattatctatatcatctcatgaaagcattaaaacaaggacagtggaacttacattgaacatatatgactgtaaaatgaacaaagaaggtcccaaattcttgagggtcacttcctaactcttcctccccattcaatgcatatgtgaattcatgttgttgcccagtgctttattgaagttttacagtatttatgacctttcacttaatgtactatttataatcttccaaaaagtagtgttcttctctcactaccatcaaacaaaggagaaaaaagataattctaaacaactaatgcatagtaaataaaattcatagagaaaaataagactaatgatatttacgatgttttcctcaaaggcctatattaaaaatatttagtgattatcaagtttgtattgagagacacacttcagggttaatgttttctggtaattacgttgacaaatattaaaataagcactttccagtagatgtgcctaaaaaattcctgcaattttcttcaggcagctccaaggaaggtgttaaaaaaaaaa

SEQ ID NO: 9104 - DNA, 710 bp, Homo sapiens; identical to SEQ ID NO: 3869

SEQ ID NO: 9105 - DNA, 733 bp, Homo sapiens
tcaacagatgatcagacagagtggttcatcgacaagaagattgcataaatgctgcttcatggggaagaatccaactgatgagtatctaggatgccatgatgaatgaggctcaggccccatcaatttcaaccatgttcctcaccatgtttggtgagaagttaaatggcacagatcctgaagatgtcatcagaaatgcctttgcttgctttgatgaagaagcaactgggcaccattacaggaagattacttgagagagctgctgacaaccatgggggatcggtttacagatgaggaagtggatgagctgtacagagaagcacctattgataaaaaggggaatttcaattacatcgagttcacacgcatcctgaaacatggagccaaagacaaagatgactgaaataacttcaaattccagccaaacgttccttgttgccactttgggtattctgagattttctcttgcatgcccttagctttacagcttttgcatttcctgttgtatttattctcagccattttgggcatatgtatctttataatcagactggaaacgggactttctattaatatcattttcagaataaaaaataggataatttaacctaccagcccttctcccccaataactgtggtctatacagagtcaatatattttttcagagaaagttattcgctcgattttttctgaatcataattaaactttatgataaaataaaaaaaaaaaaaaaa

SEQ ID NO: 9106 - DNA, 733 bp, Homo sapiens; identical to SEQ ID NO: 9105

SEQ ID NO: 9107 - DNA, 695 bp, Homo sapiens
cagatagttatattaggcagacataggggcatatgctgtagtcccaggtactcaggcagctgaggtagagggttgcctgagtttaagaggttgaggcagcagtgagctgagatcataatggagctgaaaaattcctgttgcttaatgacattgcgacagtctgcataacattgtaacaatgcattaatcacctgtttgtggtcatgctggtataaacaaacttactgaactgccagttatataagagtatagcacatacaattaatgtgcagtatataatagttgataataataatacatgactatgttactggtttatgtatttattatagtatactattgattgttattttagagtatattcctacttatatcttttaaaagttaactgttataggccaggcacggtggctcacgcctgtaatcccagcactttgggaggccaagatcacccgaggtcaggagttccaggccagcctggccaacatggtgaaaccctgtctctactaaaaatacaaaaattaccccagcatggtggcgctcgcctgtaatcccagctacttgggaggctgagtcgggagagtcgcttgaacccgggaggctgaggttggaaggagccgagatcaagccactgcactccagcctgggcaagagaataagacttcgtctcaaaaaaaaagaaaaaaaaaaaaaaa

SEQ ID NO: 9108 - DNA, 751 bp, Homo sapiens; identical to SEQ ID NO: 3873
  misc_feature (118)..(119): n is a, c, g, or t

SEQ ID NO: 9109 - DNA, 779 bp, Homo sapiens
tcggaattaagcttaagggcagtatttcatgtatgtagttatcacagacttttctgtgccaaatcctaaacgatttattttactgaactctacagggaagcataggaaactttggaagtagatgggatttaacatggtaacattaaagttttgggcatgaagggttgaatgtattgaaaatacagggagggagactatttcaggaagccacgtgagaattcctgagagcctgagcagggtggtgtgaatggaaatgtgatagaatttgttggccagttggatgtcaaggataaaggaaaagataaatctaggataatgcccaggttcttgttctggcacaagtagaaaagctgacaaaaacatgaaagaaaagttaagagacattatatctaaaagacgtatatctaaaatgacatttatcagaatagatagaacgcaactttcagagagatgtcttggaatttggaaaaattaagggagattatgaatcttagattttagacaaactcagtaaaaatcaactcacatctagatatagtacagtgaaattgtcaagcatgagttccctaaacaaaatcttaaaagcttgtctgcaaaggaatttaagaatgaaaagactttgggcaccaacagatgccagaaagcaatgcaataggctcctcaaagggctgaaagatcctgaaattctgtactgggctgaaataaaattccattaagagtgaaattaaaaaaaaacaaaaaaaaaaaaaaaaaaaaaaaaaaaaaaaaaaaaaaaaaaa

SEQ ID NO: 9110 - DNA, 731 bp, Homo sapiens
  misc_feature (45)..(45): n is a, c, g, or t
ccagctctagatttgaagtgtccttgtagatagactgccgagttnaattcagactaccctaatttgtaaatggtttctgaaaagtgaacagagttaccttacagagttttggatctttccagggatagccaatgattttatcccccagaatccttcacctttcaaggagttatttaacaatgagcccagtgactcaatagggcccaaacctttttattttacaatatgagctccaagacacttactgatctactgtgaatataaaatgttattagccttatcaaataaataaatgagcacagctctttgttcgctctattgaactgggtgataattatttagatgtgaatgttaggtcagttctactgtaataactaatcgtaaaagttgtaaatttgtttaatggatgaaatgtacactttttgtattctgtacagctttgtcttttttaaatatgaagtacttaaatgtacttactatgataggaaatataatgtgtgccttctaggatttgtgaagtggtttcatgaactctaaggaatttgttttccctatcctaactcagtaacagagggtttactccgattatgtatagaaccttagtttgagaaaatgaattttactatgtactgaatttagaggttgagaataataggatctgtgttattcttagtacccactgataaattgtgcaataaataatctttcgccaagtgaaaaaaaaaaaaaaa

SEQ ID NO: 9111 - DNA, 712 bp, Homo sapiens
caatgacccgagttcgcaccttgcactccagcctgggtgtcaaaaaaaaaaacaaaaaggaaggaaggaagaaaatgaaatggcattaattgcctctgtctctgaggaacagggcactgaaaaccagaggctacttgtgtaagcctcgacctgtagctgtttcaaccaccaccaaccaaaacctcttcctccccctccctctgtctaattgccgagttactgtcagcatttctgccagacatttcagatctctaatgcattaatgcacttagtagcattctcgatagtgggcttggccactgggttcttgagctccattctcagggagcctacctacttcagcccagggaagggatagctcagacaagatacccagaggaggatgagcccagcaactcatggcccaggggtctttccatcatggccatttgtatattggctactaaatggcccctgttttttatttaaacacatgagttattttcctggaaaatccgcaaaaatacgtagtcggtttaattgatttagaggttcctgagccttcaaattcagtaatacataatttgccttcagaatcttcaattgtttgccttatttttaagagtacaggtaaaaaggggcctgtaggtggaggttgcagtgaaccgagagtgtgccactgcactccagcctgggcgacagattgagattccatctcaaaaaaaaaaaaaaa

SEQ ID NO: 9112 - DNA, 721 bp, Homo sapiens
gtgaacccattaattgtacatcgaatcaatgcagcagaaccacgatatgaagattccaaattatatttggaacacgtataggtgcaacctgtgaaacattttaaaaatctcagaaattgtctagatctgatatccattaaggaagagaaatctggacacagcctactttactgagattgatttcaacacaggtagaactttaggagtcaccatttcaaaaacagacttaggactatttgtttccctacactttgtcatggaacataaaccttgctgtacatgatgtgcaaagtggtaagctctaaattgacagaagtgaaattcttacattttgatcaactctttaaggataaattgaaatactttatagatttctaaagtcttggcttgggcatggtcatgtagagtacagtgtgttgcaatttaggacatttgagctaattggtgttacttgcttttaattcagcggttctcagactggtctggcacgttgggatcacactctagcattgccatctcaaaatctgatttaaatggtctagaacgtggcctggggtgttggaatttttacaaggtctacaggtgattctaatacacagacaaatttgagaatcactgctcctagttcaaagggatattgttaggtcgtggtgtgtcccactttaagcatgtatcaaatactcagtgtaaaaaaaaacaaaaaacaaaaaaaaaaaaaaaa

SEQ ID NO: 9113 - DNA, 736 bp, Homo sapiens
atccgagccctggtgcacgaacctcagctcccagaggatcacccagcgtggccatgaatcggggggcacgcagctgaagctcatcatgaccttccagaattacgggcaagcgctgttcaaacccatgaagtaagtgccgaggcctgtgggctggggcgtgaggagctggagctgcaggcgagcaggcgccgggcttctgctggggatggccgtgtctcctcccagggtgttttggggagactgtgggtgaccactctcaactctccccgtcatggcaaacgagcaacagaggtggcctcattttctctcctctcccacggcctccccacctcctccctttttataggacggaaaacctactgctggttattcttaccctgtgagaatgagcatttgtattttaaacaagtaacctggaatgtgaacaccaaagaatgcctctctggaagaggtgacgtccgcaccttcccagcaggcctccggagcccgcacacctttgctacaaagggccggacgcagctatttcaggctttgcaggtgtatggtctctccctactattcagcgggtggtcctagccccaaagcagccagacgcagtacgtggtgatgggggaggctgagttctaataagtcttcatttatgcaacaaaatgggctggatgtggtccagtggacagtgtgccctgatctggataaaatagaaactgtgtcagtcaccaaaaaaaaaaaaaaaaaa

SEQ ID NO: 9114 - DNA, 764 bp, Homo sapiens; identical to SEQ ID NO: 3879

SEQ ID NO: 9115 - DNA, 720 bp, Homo sapiens; identical to SEQ ID NO: 3880

SEQ ID NO: 9116 - DNA, 635 bp, Homo sapiens; identical to SEQ ID NO: 3881

SEQ ID NO: 9117 - DNA, 583 bp, Homo sapiens
ggagttggagttttcagtgagccaagatcacaccatgcgctccagcctgagtgacagagtaagactccgtctcgagactttctacttgaaatgtagatactatatgatagtcaattgattgtaagattttgataagactgacaaatgtaaattttatgaagctgatataaaattattaaattaagattttattaaaatttatatatgttatattaacatgttataaaatgagaatcacaaagaagaaaatggttgaatgtaaatcttgaagcaaaattataataattttgccaatattgccaagtttttataaatttgaattatagtacccacacatgcaaaataaatggcacagaagagaacatcatttttttctttcctgtaggaattgtagtcaacggtcagcttgttggtgccaagaagcccaacaatggaaaactaagcacctattttggaaaactgggattttatttccaaagtgaagacataaaaatagaaatcagcactgagaccatcaccctgagccatggttctagcacattctccttgtcctggtccgacacggctcaagtcacgaatcaga

SEQ ID NO: 9118 - DNA, 583 bp, Homo sapiens; identical to SEQ ID NO: 9117

SEQ ID NO: 9119 - DNA, 575 bp, Homo sapiens
ccttcacaaatacagcaacagccacagaagaggatgtcaagatgaaatttagcaatgaggttttccgatttgcttcagcttgtatgaattcacgtaccaatggcactattcattttggagtcaaagacaaaccccatgggaaaattgttggcatcaaagtcaccaatgataccaaggaagccctcattaaccatttcaatctgatgataaacaagtattttgaagaccatcaagtccaacaagcaaagaagtgcattcgagagccaagatttgtggaagttttactgccaaatagtactctatctgacagatttgttattgaagtggacattattccacagttctctgaatgccaatatgattatttccagattaaaatgcaaaattacaacaacaaaatatgggaacaaagtaaaaaattctcactatttgtgcgagatgggaccagctctaaggacattacgaaaaataaagttgatttcagagcatttaaagcagattttaaaacactggcagagtccagaaaagcagcagaagaaaaattcagagcaaaaacaaataaaaaaaaaaaaaaa

SEQ ID NO: 9120 - DNA, 719 bp, Homo sapiens
actgccaacggcgcgtggcggctcggccccgcagagcaggaccggactacacccaggaggccaggcgcgggcccgacgctcggacggcttcagcccggcgagcggcctcgacccggcgagcgcagcagggaggggctcagagtcgaggaaccatctgcccttcctggcgttctcccgcgaacgttcgcgcgagtccgccagctccctcaccagggccggaaagaccgacggcacgtgccggcgccggacgcccatctccatcgcagcagcccgcgcctccttgagcgagagcgttaaagcgctcagaggatgttaggacggggtgggtagaaaacctgactcttcgtgtcttctgcgttgcactgaggtggatttttacttttgtcttatttcaagcagaagttgccgccctaacttccaaatttggggactgaacatcgttcaccgaatacactttgtgatggtgaggatactttggagtccacacacattttaaaagcagtatagttttacctatccgtaaactcatcaagttcaaatgctactctgtggagtttaatttttatggttttgttaatttactttattactgcttataattatttgaactcccatcccccactgtcttttcctctaagctcccccaggcctagtattccatctacagcacagtagagttgatcattaaatagtgactaaagttaaaaaaaaaaaaaaaa

SEQ ID NO: 9121 - DNA, 711 bp, Homo sapiens
tttgacttcaagggacggaaacatcagcaccaaagaagcaatcatcaaataattctggaacaacaaattaaaagttgtttctgaatgagaaacatgagggaaattgtggagttagcctcctgtgggtaaaggaattgaagaaaatatgaacaccttacaccctgtgttcatctgtgacattaaaagttctggctaactttggaatccattagagagaaaatccttgtcaccagattcattacaattcaaatcgaagagttgtgaactgttatcccattgaaaagaccgagccttgtatgtatgttatggatacataaaatgcacgcaagccattatctctccatgggaagctaagttataaaaataggtgcttggtgtacaaaactttttatatcaaaaggctttgcacatttctatatgagtgggtttactggtaaattatgttattttttacaactaattttgtactctcagaatgtttgtcatatgcttcttgcaatgcatattttttaatctcaaacgtttcaataaaaccatttttcagatataaagagaattacttcaaattgagtaattcagaaaaactcaagatttaagttaaaaagtggtttggacttgggacaggactttatacctcttttactgtaacaagtactcattaaaggaaattgaatgaaaaaaaaaaaaaaaaaaaaaaaaaaaaaaaaaaaa

SEQ ID NO: 9122 - DNA, 155 bp, Homo sapiens
gtcaaacacggcttaattagaagaatgaactaaggtgtctaccatgattatttttttaagctggttggttaataaacagtacctgctctcaaattgaaaaaaaaaaaaaaaaaaaaaaaaaaaaaaaaaaaaaaaaaaaaaaaaaaaaaaaaaaa

SEQ ID NO: 9123 - DNA, 706 bp, Homo sapiens; identical to SEQ ID NO: 3888

SEQ ID NO: 9124 - DNA, 683 bp, Homo sapiens
aggacctaaggagaccactttagaacacacctcaggaaggggccacataccttcctgggaagaaaggaaaatagcttgtatttaaatgtagtcagaaaatgcatcccagagaaagttaatgaactttaagataagatttaatgtacacttaagatttttttcatgccaatgaagattcatgagtgaataatcttttacttgcatgtttgtacacatgtccatttatgtcctctggaataaattgttgaaggtacatgattgatttggtggtcgtgcatatttaatctttgatacaacttgattttcgtgaagattgaatcactccacagtactaccagcagtttatgagagtgaccctttcaacacatctacactagttaaacatttttgcataggtgccaccatcagcttttgtctacaggtgaataaaggctcccagaggtttagcaacaatcactagactactcagctggttaatggcagagccatactttttaccatagaaatgtttgtccccagagccagtgaccttaattgaaattctgagtattatcattccttactaccctgaatacctggatctactctttatttaaatacttcatctctttttccatgatctaccaactaggtttgggattaacagagcaaaaaaaaaaaaaaaaaaaaaaaaaaaaaaaaaa

SEQ ID NO: 9125 - DNA, 731 bp, Homo sapiens
tcagggaaccgaaagacgttttccacaggtagaactgctttttaactggagggaaaaatacttcaggaggcttagcatattgcttggattctacgtgcagcgggttctctgcctccgtgaagacaagctgggctggggaggacggtgtctaggagggatgaccccactcagctccaggcagtgttctgccgagaccccaagaactcggggtgtcagagggcaaaggaactacctgcctttcacggctgctgacttctcagggctgcaagcagcacagaatgttatccttacgtcctgagccggtttaagtctgtggaaaaggaagcacgggagaaatccacgtaacctttgctttctttttaagggaagcggttccgccgtgaacttggaaccctcagctccgggtgttctcggcagaagggcagctggaagggacacagtggggcaggctttggggttgctccctgttctgccccgaggccggggacgcagggcagcccacgcctccgtgggctccattctgtagcattgccagcgttctcttcacgtctctaacaatccttcgcttttcctcactcacgtggaaatgtgaactgtcccggctctgtcttcatttttatttttaagccatcgttcccctcctgaacggttgccccttatttaatgctgtaaagttggactgttgttcaataaaccagagcatgcattagctcctcaaaaaaaaaaaaaaa

SEQ ID NO: 9126 - DNA, 573 bp, Homo sapiens
tattaacaagggacaggcggggcacagaaggggaacagtagtggccagtggacatacggaggaggtggcctgacctcggtagtcatgggggaaatgtaagtcaagaccatgatgagatgccactgcacgcccagtcgactggcaacaatgagaacgtgggacaataccaagagctggggaagctctagctcagtggcagctccgaagctgcggccgagagggtgatctgggccacccactgcgacccagcacttccactcctgatgtgtatgcccaagagaaacccatgcagaggtacactcggccagtgcttctcaaacgtgaataagccagtgaatcccccaggggtcttgttaaaatgcagattcagttctggcggggctagggcagggccccagactctgcatttctaacaagtttccaggtgatgcccgggctgaggatgcccagactgcattttgcagagctttaggatttacgcgcaggaacagccacacagcactgtttgcaatagcagaagaccagaagacagccggactgtccatcgacgggagaataaaaaaaaaaaaaaaa

SEQ ID NO: 9127 - DNA, 704 bp, Homo sapiens
ctggcagtggccagtggaaagtgtactttttcaacaagcacgaccatggatgatggattgtggataactctgtttgcatttagatcacatgagagcaaagactaaatatgtcaaaattgtggagaagtgggcttcagatttaaggctgacaggaagactgatgttcatgggtaaaataatactgattttactacagggagacagaaacaacctcaaggtttctggcatttgaagtcaaagagtattcagcgttggatgaattacaaaaggaatttgaaactgcaggacttaagaagcttttctccgaatttgtacttgctctggtaaaatgaaatggaagacaggaatcttttagtaaaatagcagtgttttttgttgtttttgcattggatttggggagtggttaattgaaatagtcaattttaaagtttctctgaagcaaaatgataggcatcattctaacttcaggaacaaaagccagttctgttttatgaaatattaaacatgaagaaaacttgtatattctaatgtttgccaggaaaggctaggttcagtagatgagacattatttaaaagataaatttaaaaagatggtaaatgaacacttgtttttatagacaatatttgtttgaaactatgtaattttctggctaattttcttgtaattaaatgattttttaaaaaagaaaaaaaaaaaaaaaaaa

SEQ ID NO: 9128 - DNA, 704 bp, Homo sapiens; identical to SEQ ID NO: 9127

SEQ ID NO: 9129 - DNA, 689 bp, Homo sapiens
tccacacttgtgaaattcaatcagtacaaatttttagacgatcttgtaccctcatggacatcagaacatgcttccatatatgatgtacatcatgtgtcagttatagggctgtgccttgtactgtgcccctgaaatctggatggcacagaggactcaattccaggaatatggggaaagggaggcatccctcatggatataacagaatctttgggactgtgaagatcaacatctccatgggacctttcaggtttcactataacaaacccacagtgtgctctggatgcatcggagggccccacagaactttgcctggttgtggtttgtgacttgtggttttcatttcactgtttcccagaccaaagctagcaccccttacgggctgggtgcagtggttcacgcctgtaatcccagcactttgggaggctgaggcgggtggatcacctgaggtcaggagttcgtgaccagcctgacaaacatggtgaaaccctgtctctactaaaaatacaaaaaaaattagccaggcatggtggcacgcacctgtagtccaagctacttaggaggctgaggcaggagaagcacttcaacccaggaggtggaggttgcattgaccagagattatgccactgccctccagccagggcaacagagcaagactctgtctccaaaaaaaaaaaaaaaaaaaaaaaaa

SEQ ID NO: 9130 - DNA, 735 bp, Homo sapiens
  misc_feature (90)..(90): n is a, c, g, or t
  misc_feature (133)..(133): n is a, c, g, or t
gaccattcagggccactggattgccggagagtcagaagatttcagagtatgacatcactctaccatgcatcgtgtatattatgagaaganatacactgtcagagtgaagaaacagtgcttttgtttgggcaancacattgcttttatcatacacataatgtcttggttcctcccctagtccgtccaaggactgacttttcagatatgccgaccatggctgcacacctcttgttgggaagcgtgtagaccacggccatcgtgcacactgccacaaccttcgcggcccacagtaagcctgttgtgctcaatcttcaactgagctctctgctcagcccagaacttaagcagagacttttgaatcctcatgctgctgtggttccaaatccattagaagctgacgttctgcagttgaaaatgaatattccctctcgatgctgagcgaaatgcttgctatatactgggtgcttaggtggaaagatgtattatgccgaggagcgagacgaagctgtggttaaacagattgaaagtctgtgaagccggcaaagctctcaagaaataaattgcagtttcattgtgaaggtaaattttcttttcattcttgatttactctaaacacagattgtgagtcgaatggaaacagaagagagacccatctcaaaagcaacatggggacgggggtatacactccagaaagcgattaagcagctcctttgttaaaaaaaaaaaaaaaaaaaa

SEQ ID NO: 9131 - DNA, 756 bp, Homo sapiens
tggaatggtataacaaagcatgggaacataagtacaccattggaaagacacgttacttgatggcctctaagtaaggagaatgtgattcacaccacagagactatctacaactgataataataagtaaaatatttaggcaaattttctactacgctaacgtttcagcaattttgtcctttactgtagtcttttatgaccttgttaccttagaaataagtgttaaacttaagcactattcttgttaaaaggaagcatgctatagctaacttccaactatttatcatctatatgcttgtcttttcgacttctctactgactggatgcatatttgtatcgttacctagaaaatatagtatcaagattctattgctccagttaagaattgttgaacaagtctggggaaaatttgacactagagagaattttttccttttgatttatgacaatgctgaaacataagcttggttatgaatcttcatggcagttacttactgagattaaacttcacatatgaacatctgtgagcaaatccccttggacattctcaatgttgtgaaaggcaaaagttatttttcttcacataggtcttctaagagtctgtgaggctattgtgtaatcatcttaagctagatgacaaaatgacacacacacacccctaaacaaaacacagtaagacatagttatggcaccttcgaaagttaattgaacttacaggatatgagactaaaagtctattaggaaaaaaaaaaaaaaaaa

SEQ ID NO: 9132 - DNA, 763 bp, Homo sapiens
gtagtcattaatagacatcatttttggctttgttgttgggctaaaaggtaacaagggaccgccacgtgacagaaggggtaagctgacgtgctgtgccccgtgctaggactcccaacatgcagttcgtggcacaagcaggtgaacactccctattcgtataagcaatctgcacaaaggtgtctcacagttggtaggtgcctgttcattcaagtccacagtggacagatggtgctccaaggctatgccaggtcatgttctaccactgatcctgtccgcacacatttaatcttttgcatcgataccattttatagataagaagactgagacaaattgaggaggaataatttccccacattcacaaaatgaaaaaggactggagcctggtttgcactaaaacaggtcaggccgggcatggtggctcacacctgttatcccagcactttgggaggctgaggtgggcagtttgcctgagctcaggagttcaagaccagcctgggcaacgtggcaaaaccctgcctctactaaaaagtacaaaaaaaaaaaaaaaaaattttagccaggcatggtgataggcacctgtaatcccagttacttgagaggctgaggcaggagaatcacttgaaccctggaggcagaggttgcagtgagccaagatagcaccactgcactctggcctgggtgacagagagagactcagtctccaaaaaaataaataaataaaaaataaaaattaaaaaataaaaaaaaaaaaaaaaaaaaaaa

SEQ ID NO: 9133 - DNA, 755 bp, Homo sapiens
gaggtgagggaagccattatggtaaacgcccagaaacacagtaagcaaaggttcaagtttgttatgcagatctaaagttggtgctttctccactgagtctctaatgattagtcatccttctcatcctggtacagagaggaagacacttacaaatggagatttcctttacagatatacatttttcttacaaaagggtaacttttactctgttttcagagcttctcctgtgtctgcaatttctcaaaatagctcaaaataatccttatgccaaacaggcatattttcatctcctacaggtcaaagatattcacattcaagagtttgggaatgaaattcattttggataataatataaaaatcaaggtttcttttgagggcatggcgttaactaattacaatttcacacaaaaatggaactgtcattctattttctgtacatggtccatgaaatacaacatgagaatttggaatgatttgggtcagttatccaactaccagcaatctccttgtaactcatagatccccctctataataatcacaatgataataacagcaataataataaaaactgtgacacctgagtcttattgatcccttaacaggtgccagacgccgtgctaggtgttttagctataatttcttaaatttaatttccataatagcatatacagtggatgtaattatgctaatttgtgaaatagcagttcatgccttccttcctctcagcccctcttttcaataaaaaaaaaaaaaa

SEQ ID NO: 9134 - DNA, 725 bp, Homo sapiens
ttgggagttgaggcagtgcatcacctgaagtcaaggaggtttgaagtccacctgagccaacgtggcagaacccccatctctacgtgaagataccgaagttagtctgggcatgatggtacatgcctgtaatcccagctacttgggaggttgaggcaggagaattgcttgaaccaggaggcagaggttgaagtgagccaagatggcaccactgcactccagtctgagcaacaagaatgaaacgccatctcagaaaaaattaaataaaataaaaatctcccttgcaatgtgagtttactgattgtggaaacagtcttggtatgagactcttgaaggaccagttgtgttcaatttactctggtattagtagctcatccatctagggtgcgtagaagagtatacagtcccatctgttgtgaaagcactgttagaatttgtcgggcaaaaggaattgttttgctgtcactttcttataatgtggcttgtcctcaactccctgttcaaaatgcaccacataagtcaaacaataaaaatcttaatggagaccaggtgcagcgggtcacgcctataatcctagcactttgggaggccgaggcaggcggatcacctgaggtcaggagttcaagagtactcaaagtactcaaagcctggccatcatggtgaaaccccatctctaccaaaaaaaaaaaaaaaaaaaaaaaaaaaaaaaaaaaaaaaaaaaaaaaaaa

SEQ ID NO: 9135 - DNA, 668 bp, Homo sapiens
gtgactctgagtctagttcaccactgacatacggcactcccagctctcgggtagagggaacccacaagaagtggtgttagggggcacacctgtgagacagaggcctgacctgggctctgcacagaagggcctgcaagtggatctgcagtctgacggggcagcagcagaagatatagtggcaagtgagcagtctctaggccaaaaacttgtgatctggggaacagatgtaaatgtggcagcatgcaaagaaaactttcagagatttcttcagcgttttattgaccctctggctaaagaagaagaaaatgttggcatagatattactgaacctctatacatgcaacgacttggggagattaatgttattggtgagccatttttaaatgtgaactgtgaacacatcaaatcatttgacaaaaatttgtacagacaactcatctcttacccacaggaagttattccaacttttgacatggctgtcaatgaaatcttctttgaccgttaccctgactcaatcttagaacatcagattcaagtaagaccattcaacgcattgaagactaagaatatgagaaacctgaatccagaagacattgaccagctcatcaccatcagcggcatggtgatcaggacatcccagctgattcccgagatgcaggaggccttct

SEQ ID NO: 9136 - DNA, 735 bp, Homo sapiens; identical to SEQ ID NO: 3901

SEQ ID NO: 9137 - DNA, 710 bp, Homo sapiens
aaccaggtggccggtgcagttcgccgaccttccatgacacacccggccggatgctggagaagggcgtcatatctgacatcctggagtggaagaccgcacgcaccttcctgtattggcgtctgcgccgcctcctcctggaggaccaggtcaagcaggagatcctgcaggccagcggggagctgagtcacgtgcatatccagtccatgctgcgtcgctggttcgtggagacggagggggctgtcaaggcctacttgtgggacaacaaccaggtggttgtgcagtggctggaacagcactggcaggcaggggatggcccgcgctccaccatccgtgagaacatcacgtacctgaagcacgactctgtcctcaagaccatccgaggcctggttgaagaaaaccccgaggtggccgtggactgtgtgatatacctgagccagcacatcagcccagctgagcgggcgcaggtcgttcacctgctgtctaccatggacagcccggcctccacctgaccgtggcccacccagccactcccgggaccacggcaaaaggaaccacccagacccaccacccgtacaccctcagcagaccctgaagacttgcttttaaacaaagaaaatcctgggcacttctgcagggctgctggttccgagctgacacccgtcttaataaaaggcccaggagtgcctcttccaaacaaaaaaaaaaaaaaa

SEQ ID NO: 9138 - DNA, 658 bp, Homo sapiens
cttttttttaacatcaactttgctatgaaacccacagtagagatttgatgggctatcttacctagtaaccatacggtctgagctctccaacatgattacaattagctattatccgatccataaagccctacagttgggctgttatagattctgataccacaaatagttttatgatcaaatatttcagactctcatgagatctattttgcctgaatttccacctcttcttcagtccatatccaatggcctcataggggatttcataaaaaacaattgactggtaaagaaaaaaacaaccattctgataggaattggcttatggggttgtggaggctgctgtggaccaaatgtttgtgccccaacccctacatttatatcttgaaactccaaaccccagtgtaatcctatttggtggtagggcctttgaaatgtaataaaaatttgattagattctgagggtggaatcctcatgatgggattaacacccttataaaagagaagtagatgagcgctctctctctgtctctctctctccccttctccctttctctctctctttttctcctcctctccctctatctctctctctctttctctctccttctgtatcccccttccccaccccaccccctttctcagcatgcattcatcaaagaag

SEQ ID NO: 9139 - DNA, 692 bp, Homo sapiens
gcctacgtaggaaatgggggggcaaaagagagcagcagaaaagccagccttggaaaatagtcatggaaatgttgtcggaaaccaaagatgtcagaaaagatgtctggaaaagacagaggtaaaattgcagatagcaatattgttctaatggccaatagagacatagagaagagacctcataatgggcacagtgcagaaggcacagacagctgcaaatccagctttgttttgggttatccattggtataatgaaagtaaaaatctcaaaataaactcattagttttggaaaaattttctggctctgtccattgaaggggtctgaaggcagtgacattcagtggcagtgaacatacctaatgctcagatttagtgtctacataccatttctctcttagagaaaacaaggttcttttgataactggctaattacaaacatgaggcagagagattatgggagtgagcctgaaatatttcactgaaccagaaagttaaaaatcactcaaagagttttagaaggacatagaggccagcttgaaggaattcctcttggacaagtttgagacaatttgagcatcaaaaaggccataaattattataagcctgaataaataaaactctatgggtccaagtgatgctcagggaaaagggcaagagagggggaaacaggtatgctcttttctgcagaaggatg

SEQ ID NO: 9140 - DNA, 741 bp, Homo sapiens
ctgagaattaggtcaaagggtcaatacccagagacagccaccaccagcagaagatcacaaatgagcacagacgtgatgggtcattaaggtgggatagtgcaaaggtctacaaatggcaggaaacctatcaaaagacatcactgacagaaataagcactctgcagcacacatggagaagaagtagaaccggagcaggcagccagcacaggagatgctctgtgtctgggagatgagattggctgccattatgggcacgtcagaactgacacagcagatctccaggaaggagaaattggccagtaggatgtacataggtgtgtggagtttctggcttgaccacacagcacagatgatggatgtgttacctaggagggtcagaaggtagatgagagagaagaccacaaaaaggaggatctggatctcccagcggcaggggaagcccaagaggatgaactcattcacaaatccagtgatattagtagtctccaaggtcctcactggtttggcctgtagaggtgacagagatagtaagaaccacagaaattctgccgtctcccttctatctcttctggtgaatagatatatgtttattttcttcaatttggatttgggatactgctctcttccccttggaaggatgagctgttctttccttttcacctccgtcctagtttattcaataaatagtcattttgcaaattattgctctagaagataaagaacaatgaataaaaaaaaaaa

SEQ ID NO: 9141 - DNA, 796 bp, Homo sapiens
  misc_feature (124)..(124): n is a, c, g, or t
atgaagcaggcactgctcattaatcctgggagtctttgtttgcaaaccttgacgggactgggagacgacaggaatattactaaccaagctgcgaaaatggagtgaaactcaatgtagacagagngaactgtatagcagaactctggctggtagcatcacaacacctcctctgcttatcgtattttatcaacagcactctaccatcgatcctatgtggaatgtccgccaccttggttccagtgctggaaaacgatattcacctcagtttgtaaaggctgccaagttactccattggaatggacatttgaagccatggggaaggactgcttcatatactgatgtttgggaaaaatggtatattccagacccaacaggcaaattcaacctaatccgaagatataccgagatctcaaacataaagtgaaacagaatttgaactgtaagcaagcatttctcaggaagtcctggaagatagcatgcgtgggaagtaacagttgctaggcttcaatgcctatcggtagcaagccatggaaaaagatgtgtcagctaggtaaagatgacaaactgccctgtctggcagtcagcttcccagacagactatagactataaatatgtctccatctgccttaccaagtgttttcttactacaatgctgaatgactggaaagaagaactgatatggctagttcagctagctggtacagataattcaaaactgctgttggttttaattttgtaacctgtggcctgatctgtaaataaaacttacatttttcaataaaaaaaaaaaaaaaa

SEQ ID NO: 9142 - DNA, 647 bp, Homo sapiens
acctgtaatcccagcactttgggaggccaaggcaggcggatcacctgaggtcaggagttcgataccagcctgggcaacctggtgaaacccagtctttacaaaatacaaaaattagccgggcatggtggcacatgcctgtaatcccagctactccagaggctgaggccggagaattgcttgagcctgggaggcggaagttgcagtgagccgagattgcaccactgcactccagcctgggtgacggaataagactcggtctccaaaagaaaaaaaaaaaaacaaccatgcacacaaaggagagaccggagaatttgtagtttaaaaagtcctggcagaggccgggtgcagtggctcacgcctgtaatcccaacactttgggaggccgaggcaggcagatcacaagcttaggagatcaagaccatcctggccaacatggagaaaccctgtctctactaaaaatacaaaaattagctgggtgtggtggcccatgcctgtagtcccagctactcaggaggctgaggcaggagaatcgcttgaacccggtaggtggaggttgcagtgagccgagatcgcgccattgcactccaccctggtgacagagtgagactctgtctcaaaaaacaaaacaaaacaaaaaaaaaaaaaaa

SEQ ID NO: 9143 - DNA, 727 bp, Homo sapiens
gcctgtctgtagaggccactgtgtttctagcactggcctgcacggtgggccttgctggggacgggggccccagtcagcctctctcccagtctacccagagaagccccttgccccatgggaagacgaggccctcgggcccagcccccacagtgctgtctgatctgtgctttccagctcacacccccacactcactcctgagacccctggcctccggcgtcagcctccagcctctgttcccctagtaagtgccttccatgtcggcctctaaccccaggccccgaggacccagacccagtggggaggcggacgttccagccggcatggctgggaactgcagacctgtcctcctggtgggtccaggggcccctccagcttgtggagccccacactggggtgccgcctgcccgtcttctcttcccatggagccccagccccctttgggcccagggacaccagccaggctctgtgctgaccctcctgttgcacccagccctggtctcagcagcgaccacccctgcctccaccctctgagctttgcatgttccactaaccccgggcgggtggcaggtggaggtgtcaggctgctggcgcctctgcaagggcagaacactaacctgaccgtgggcggggccttgcggtatccgcccccaataaaagcaattccaaccttaaaaaaaaaaaaaaaaaaaaaaaaaaaaaaaaaaaaaaaaaaaaaaaaaaaaaaaa

SEQ ID NO: 9144 - DNA, 774 bp, Homo sapiens
aaaaatttgatagccatggggatataaatacacccggaagtcatacagtcatcaatcataagagttacataacctttaataaatggctaaagttgactatgcaatatataacaatataaatttagaggaggactcaactatatacagtatggcgtgaccagtcatgtactataatgctttacaactaatttaatggcataaccaattagaggttaacaatgcaaacagaatatttcagagccttggatttgcatttatgtaatttcttgatgtacatactcaagggtcacattaagccctctccaaaatgaaatcaaacaaaagataaataaataatatattgttattctttagttttttattcagcatttcacaatattaacatcaaattattttatcttttggcaataaagatttcattcatgtatgaagctgcttttcagtgttcagcataccagtttgtctcttattaaactggctagtttaaaatctattagacctcttccattctgaagaggaatgcacaattttcagccatagatttattcataaatattacagactgtcttggaagatagaaaacagagaaaaatgtagtagtcaaggcatagccttaacatttgaagtaaaaaaaaaaaaaaagaactagagttgcaaacagaatatcgtcttcctatttgctaagagttattctttacccacaaacattactactttatctctctcctagacttaatgattaatacagatccaagttttaaaaaaaaaaaaaaa

SEQ ID NO: 9145 - DNA, 704 bp, Homo sapiens
cctaaagggagattttagaggaacctgcatttacaggtcattagttaccttctgcattacattaccgtgttatttttagataatctcactaatctggtattcagggtaatttctgaaataatttagtccccagatgtatttggatttccaaattcagacccttaggaaagtacacagggaaatctcagatagagcaaaattgatgactcgtgccaacgaatttcccattctgaaatacaaggtagttcatctagtgtagatcttttttttttctgtttaatgcagcaaaataatttaactctttttttttttctattgaactcttaaactcttttactaattaaaaaaaataaatgccatgtgatgggctttttaaatgcaatcttggatggcttttcattttccaagtcagtctatgagaatgctgtgggaggtgtctgcctggaaggatgtacaccaagaagatggaataacaaactgtgctcctgggagaacagggggccctgttattcacaatccctgatgttgggtaacataaaatgggaattacttttcctcctgtcatggtgggattgccatcctgcggtcttgacaaagaagaatcaagaatcaggtaacattcatattagctcaaagaggtccgtagtgctcaactactcaagcaattcctttggttcttaacacaaaaaaaaaaaaaaaaaaaa

SEQ ID NO: 9146 - DNA, 720 bp, Homo sapiens
cccaaagatcccagtcttggggcaagcgcccacttagaaggacggtaccggcgtccctaccgcattttcccggcgggacgtagccaggtttgtcgccccacatcctccgcccgcatcctccccagaccagcagcccatgccttgactaccccaggccagcagcccatgccttgactaggacgattctcaccctttgcttgctcagcgctcaaggccgccggttgggtcgaggcggacgccatagggcgtctgaagctctaggttcagcggaggtaaatggaaaactcacgaataaagagccacgtcctacaaccgttcccaacgcccctgggagcggaaaggaaacagcatccggcgcagccggaagcgcccaggcgtggcccaaaccttcataccccaagcttacaactgcatcaagaccaccaaaactacccataatttttgcacagtgaaaacaatctatcattggcaacaaacatcataagaggggctttccggtaaaaagccagaaagcctactagacaaattctaaaagagctgtaacactgctgcgtatgtgtttggagagaagatgggatataaaggaactccacaattgatgagggtgagcttaggtgacttttttcttgttcctattactgtataaacaacgacgcatgtggtaactttcagtaggaaaaataatattctaaggaacttaaaaaaaaaaaaaaaaaaaaa

SEQ ID NO: 9147 - DNA, 679 bp, Homo sapiens
ttggctattccttcagatgttgctctcttgtaaagatccccatgtacatgtgaaattgataaagcctgtatgcttttctctggtcagtctgtgttgcatcaatctagttcctagacacagccaaagatctcacataagaactaaggtagtgcgatttttagcctcccctacaatggaatgcagaatttttaagctatgaggggctgtaggggcgctgcagtcaaaatccctcactttagagaagaggacactggtagcctagaggaaaaatgatatatcagaagccacatcaaaacgtttcactttctaagttaccagtggatacatttactaatcccaaatcacaggatagatgcagaaatctgggatgttggcttgctgggtatagaacacaggcactctaaaatcaggattttagaactgaaacaaatcttaaaaactattttatttagtcttcttacagaaataagaaacaaggtgtacaggttctccagttaataatgtaggcaggagttgaattcatgtctattatttccttgaagaaagttacactgaatggctactatatagcaggcattttgctggacaccaaggataaaatggtaaatcaaacaggtagggacactactttcatggagcttggagtccagctctacatattggtaaaaaaaaaaaaaaa

SEQ ID NO: 9148 - DNA, 692 bp, Homo sapiens
agactatttggtttgtatgttcatttggtgatgcttttgcttctgagatttttggtttccttgatggccaggagtggctggtttttctgtttgtaagaatttgttgttttgtacaggttcgttgttcccagtcctgttcctcagctccagccttgtttccaaaactctcagctcttggtttatctctgtccagtcaggtgtgtgttctttgtctttgtttcttgtcctagttgttccatgagtcagccaggcctcaaagattgtaaacctgttcatcagtaacagttggtgtgacaagacagaacaaggcttggagctctgggaatcacagcccaccctttgtcttccatctttggtcacctggctctatggccagcttccccttgttctcaatcccagctggagaatgacactcggcagaggcgcggggaaacctggcgtactggctgtggcttctctagcgggactcggcatgaggctggcgcggctgcttcgcggagccgccttggccggcccgggcccggggctgcgcgccgccggcttcagccgcagcttcagctcggactcgggctccagcccggcgtccgagcgcggcgttccgggccaggtggacttctacgcgcgcttctcgccgtccccgctctccatgaagcagttcctggacttcggtgagtgcggcccgggaccttggg

SEQ ID NO: 9149 - DNA, 675 bp, Homo sapiens
cttgcacctgattgtggaaggagatgtggcctgggtagaagctgggccgatgaccacaaggaccctcactacgtccagcaggcgctggccaacgtcttgctgatgacgccgtcgtgggcacactgcagtcaccaggcgccatctacgctgcctccaagttatcctactttgataagatgagtaacgataatgcccatgacgcttccggagacaaccctggaaacactgaagcataaaatcaacccctcggcgggggaggcgttcccacaagcggtggacgtgctgctctacactccagggcatcttgacccagccgaaaaagttgaagatgctcaccccaagttatggtgtgctctgagcgaaggcaaggtgaccgtgttcaatgcttcttcatggaccatccaccagcactcctttaaagtgggcactgcaaaagtgaactgcatggtgatggccgaccagaaccaggtgtgggttggctcggaagactccgtcatctacatcatcaacgtccacagcatgtcctgcaacaagcagctcacagcccactgctccagtgtcacggatttgattgtgcaggacggacaggaggcacccagcaacgtgtactcgtgcagcatggacggcatggtgctggtgtggaatgtgagcacactgcaggtgaccagccgcttc

SEQ ID NO: 9150 - DNA, 727 bp, Homo sapiens; identical to SEQ ID NO: 3915

SEQ ID NO: 9151 - DNA, 665 bp, Homo sapiens
attttgggctctctgttctgttccatatcgtctattcctttcaccagtacaacactgtctgattactgcagctttgtattaagtatgggagtttggtagtgtcagtcttcctaatttgatttggagtgagttgaatctatagaccaacttgcaaagaactgacatcctaacagtgttgagtcttcctacccatgaacatggaatacctcttcattagtttgtctttgatttccttcatcagaattttgtagttttactcatatagagcttgtacatattttgttagatttataaacaagtatttagttttgggggatgctaaagtaaatggtattacgttattaatttccaattccatttgtttgttgctggtatatagaatagctattgatgtttatatattaaccttgtattctacaagcttgctacaatcatgtatcaattccaggagtttttttctttgttaattctttcaaatatctacataaacaatcacatcatctgtgaataacacagctttatgtcttactttccaatcagtatatattttttcttgtcttattgcataagctaggatttcaaatgtttacttgtaaaattatacctgtaagtcactacaacacagctgcaaagtagcaacagcttaaaaaaaaaaaaaaaaaaaa

SEQ ID NO: 9152 - DNA, 686 bp, Homo sapiens
acttccgtcattctttttacattgtaaaattatttgaaattcttcggcagggacgatttattccttcactcccattaattaattagtaatatgtcttttaattaaaccatgtggttaacttacacttatgagattactaaagtatttggctttaaatctaccattttactagtactttctatttcagccaccgtgttccatattgtccttttctcttggattttttactttaaaaattactcaatttcttagacaatagcaaaacaaatatgacaaaatgatataaaatccttttggtgtgataagtatgttcattattttattgtgattattgtgtttatttgtgtttacaaatgtcaaaactttgtcaaatatcacagtttaaaagttgctgtctgttgtgatccagagcaatcagacaagagaaaaaaataaagggtatccaaatcagtaaagagaaaggcaaactgtcactcttcatcgatgatacgatcatatacccagaaaacccccaagactcatccaaaaagatcccagatctgataaatgaattcagcagagcttcaggacacaaaatcagtgcacacaaatcagtagcactgcacacaccaacaatgaccaagccgagaatcgaatcaagaactcaatccccttcacaacagctaaaaaaaaaaaaaaaaaaaaaa

SEQ ID NO: 9153 - DNA, 686 bp, Homo sapiens
aactgcgtatgtcctaagctggagttctgatttttaactaaacgcaatctgtagattctctcctctcccatcccagatacgacagatgatgcttttcgaaattgttttaggactttaaacataatggtatatccaaaattctttatttcagaatgcaacaatagattccattaatatagactcaagatcaaacagcatacctgctaagctaagatagatggtgttgattccactgggttttgatcaatacaataacaaacctttttcctttgacatactctgaattttgttgtttggggggagggggtgtgtgtgtgtgtgtgtgtgtgtgtgtgtatgtgtgtgtgtgtgtgtgcacgcgcagtgtccatcagtatcagtgcctgcctgagttaggaaaattacattcctggttctgtattgaggagaaggatgtataaagcaacatgaaacattagccctccttttattttaaagactaatgttaattgttcttaaaactggattttttttccttaaagcaatttttttcttttcgatttaatgaagtattgctagctgaagccagtttgacatagagagatgtcagattgatttgaaaggtgtgcagcctgatttaaaaccaaacccctgaacccttttaaagaacaataaaacatattttacacgcaaaaaaaaaaaaaaaa

SEQ ID NO: 9154 - DNA, 603 bp, Homo sapiens
tacacaatatgtctggtgtaactgaaatgataggctcatgaacatgatgtgtggcgtacactctcatattgtctattgtttattaatatgaatggggccaactgtggtggctcacaccagcaatcccagcactttgggaagcttaggcagaaggatcacttgaacctgggaggtggagaccagcctgggcaacatagggagaccctgtctctgcaaaaaattaagaagttagctgggtgttggtggttcatgcctgtagtctcagctacttacgaggctgagatgggaggatcacttgatcccaggaggctgcaatgagctgagatagagccactacactcctgccagagtgacagtgtaaggctctgtcttaaaaaaaaaaaaaaaaaattgaaccactgaattaattttgcaacccactgatgggatttcatctgcaacctaaaaaactattcatataatttactctagtccaagccatcattactaatttttccctctttactagagcatttcctgtgagcatacaaccctgctttagagaattcatcttagaaaatcctccgtccccacatacatgtccccctcaaaaaaaaaaaaaaa

SEQ ID NO: 9155 - DNA, 746 bp, Homo sapiens; identical to SEQ ID NO: 3920

SEQ ID NO: 9156 - DNA, 739 bp, Homo sapiens
tgcacgtggcactaatctggtgtcactctctaaatgaccaaagttgggagatcactgtcactggctaaagttacatggccaaggacaaactatggcctgggagtcccaggttctcctgtgtgggcactttcctggcatatgctaaatgatgggaaagtctgggtctcatgtttctgtgtggtcctcaccgtcactcgacttctgctctttcctgttcactcttgggcttctgtgctttcattaatatagttcttagttttccactggtctgtatcccattctgccttggacgccttttacttcctgctgctcactgagaagcctcatcaggaggcctgtcctggagatgagcttggcacaggtcacttgcacataggtctcggagcagtccgtcttcaaggtccagataacatgagaaatgaagcttctcacatcgttgttggggatgacggactgtagttgatgggttagcggaatttcaaactgatcacctggggatgagagcaatgggtaactgaagcttttgggctcgggggacaggtcagtgcccacgttgttgtattcccattttgtctcagtttgtttaacagttggctctaagttgaatgcagtcctagtgggaatctgcctcaggaagatgattgtagtttgtgttttcagagatggtgccttctggcatagtagtgttttccataaaaacgttttcttcaaaaaaaaaaaaaaaaaaaaaaaaaaaaaa

SEQ ID NO: 9157 - DNA, 712 bp, Homo sapiens
aacatcacatagactatataatatgaagctgaatcttagcagattctctcctagtttggctggggaagtgcttaggtgtggagctaatattactctttttccgcccgtaattttctttcttccgttctccttccgcaaggaacgtcttggggcttctcgaacatctctcagcatttactgtacgcccccctcccctcgcttttgctgataaaatggttggtgttgtgtttaaagtgtttataaagtctcctccgtgataacgcgagcgtttaagagagagaattctaggcacacctcttcctcccctccagagtgccccggcgtctttctagcctccgcctccaggcgggtgaggaggtgacacctgagaattcctccctctcacccctgaccctgccggaaagcgaaactgagaatccgggcaattggggcccttgggaaaggccgttgggaaagggaaaagaagaaagccaggtggtttttaggtcccttccagtgccacactgcggggcgttgaggggccgctcgaggcaggcccttccatgaggcctggactggaggccttctctagccgccggcgctggcctgggccgcctgccgccacgcaggggccgcgcgcctgggccccagggcccctttgccggcgggaggccggggggaccgactgctcttggcgcccggggtcgggggaggccgggaaacctcggctccc

SEQ ID NO: 9158 - DNA, 198 bp, Homo sapiens
aataatcccaacaaggtgagttaaaagaatcttttggtttctcactgcatataagagttatgttagccaggtgcagtgggtcatacctgtaatcccagcaacttaggaggcggaagcaggagaattgcttgagcccaggggtttcagaccagcctgggcaacatgggaaaatcccatctctacaaaaaaaaaaaaaaa

SEQ ID NO: 9159 - DNA, 695 bp, Homo sapiens
cttcccaaatgtgtgtgagataatatcatgaccaccatgcccagccaaggaaggctttttaagggatgtgacatctgaagctaggatttgatgagtgtgaaggagcctggggaaagtctgtttacagcatggggcaacaccaacagcaaaggccttgttggggagagaacttggttggttttcaggaggttcagggaggccagtgggagtgaggtgagcaggcaggagcatgggagggagggagatgaggcaaccggtgggacagggacacaccagcctttggggccacgggaagagctggggctgtcagtggcagaggctgccacgctggagtttaatccctcacttcggacctccatggccagcctgggctctgcccctttggtcccagtcctgactctgagctgggcttcagcaggtgtgactcccctacgtccctgccggccacagccccctccactcacagtgtgtcataggacaggcagggccactcctgtttcccagctcagagcctgtcgaggcctgcagattccccactgagcaacagaaacaaccccctcctgatgggacagtcagccctaaaggagggagcagctgtccaaaccccaaacacctccctaccagctacctgcgaggcttctgggccttctcccttcctccacccacccttctctcacacgtcagctgacctgggt

SEQ ID NO: 9160 - DNA, 741 bp, Homo sapiens
gtaattatccagaaaggtgataagcctgcatgtgtctgggacaccaaagattgagaagctgccagtggctgcaagagagcctactgtaaccctcatggccaccccctgatgagtgttacctggggaaagggctagcgaagaggtgaagcctcctggtcatatgatgctgggggtgcctaattccttaaaggccaaggtcttctgaaataataatggtgaaggacagaaaagtctttatgagaaatcacataggatatattaagataatgataaagatacctcagcaagaacatacctaatatatacacttctgtttaatctgatgacttaatgatttctgttatcaagaagtatttatgacttgagataagtcaggattaactgttatcacctctcctgtacacctccctcctttttctcctttgtacccacatgtgcagattttttcagaggtgacaatttagcatttaatgtttttttttctgcttcaagttcttaggtccctttggaggatattgatgggggtggaggtggggatagaacatctttcacactgtttggtacagagacgctcaaagcttttcccagggaaaggaactctctaaaatagtaatctgatttgatgaaagataaaattttaatatagcttcagttaaccttcaggatactttaaatgctacattgtatataaaagtaataaagtacaaatgacacgaaaaaaaaaaaaaaaaaaaaaaaaaa

SEQ ID NO: 9161 - DNA, 779 bp, Homo sapiens
caatcatcagatatgcgggtccagtgtcaacagtatcatgctaatatccattgaatcggtagtcccagttcttgccagatagtgcaatgttgtgacaccgaccgaagcctttgttctgggatctttcttcctattgaaagtggctgctggtggcttcataattttctgttttttttctcacaaagtaaatggtgggcatccatgtttacattgcaccttcccgtgctgtaattggcttgacaaagacaagcaggcttctctgttgagacttattgtgtttttagttttcatagacacttatttaatctttttaaattgtacagcaaggtgctctaagtaatattcgataaaatatatttaatagaaatttgcgtttgatattcatgaacatgaatacatgtatttttttaagaaataagtattgtgtaacactatggcattgcttctatagccaaagtataaaaatttctggaatactgacatgtaaagactacagttaattctgacactgtatcttattaaaataggatgatttgcattttgtaaaattatcctgcacatcaagctgcatgccttaaagcggaaactctaggactgtgttcatgggagagcagttcatctgttcagaacagtgaggcaaggtctgtagtgcttctttaactacctttggaaatactgtacaatgttagaataatttattttgctttacaggagtttgtcatgtattgactttaatattgtattttggtaataaattttttgttaaaaaaaaaaaaaaa

SEQ ID NO: 9162 - DNA, 736 bp, Homo sapiens; identical to SEQ ID NO: 3927
  misc_feature (210)..(210): n is a, c, g, or t

SEQ ID NO: 9163 - DNA, 661 bp, Homo sapiens
attgaaatgagggtgactcgacaacctccaagttcgttcatattcacgtttattctcttaagggatacacgagtgcctcatttgatgggtgataacactgaggcaattggattaagaaatgcctatgacaagatatccaagttgaaagcaaaaagctttcccatgtagagacagagcatactgttccaaactaccccgggcttgcaagctcagagtgattttgagtgaccaagggaattctcaggatggaaaagtgggatggtcacaggcacagaaggaagtgaatgtgaactgcttccgtgccccgtgagtgcaagatgagagcctgagcccgtatctctcggtgcctgggttcccaccctctaagtgtgatggatacatgtattgaaagaaagcaggaggcacttttatccaaaagggaactcctggattcacacactggtatctgtaaagcactcaaagataacctgatcatcataaaaaatacagtcttctcaagctcaactgtgagctcgacaggttgaaaaataaaagagaaaaaagtcagataatcaggtttttcttgcatttccatgagctgaaaatccagtttcattgatctcctttcttttcttttcttttgctattttaacagacttccacaattaaaaaaaaaaaaaaa

SEQ ID NO: 9164 - DNA, 665 bp, Homo sapiens
gcatgtctctgctgggttggctgacccagggttctcagttggtgcttcacctgcctggcctctttgccatcttgtgaaggagcgttaggagacgcgggcgacgccggtaattgtagggacgccggtatccacggcgaacagacggctggtttggaccactggtggcttgctgattttctttatcttcagcctctccaactgctggggcaggtcgtgggcgaggaggtcccctgctacggtaccttgggcggtaagttggatttcgatgaaccggtccctgaagttgtgctccctctgggactccatccttcatctctccaatctcaccagcattccggggagggccacggcgccttccatagtagccacgtctgtaacggcgccgatctgcagcgtaacgactcccttccacaggaactccatccgggccagtcacattggcagcttctgcacccttctctccttcaaccacatcaaactctacagtttctccatctcctacactgcgcagatatttccgtgggttattcttcttgatggcagtctgatgtacaaatacatcttctttggtgtcatttcgatttataaatccatatccatttctgacgttgaaccatttgacagtgccaaggactttggtggcgagaactttttttctccgcgtc

SEQ ID NO: 9165 - DNA, 755 bp, Homo sapiens
taagttccaggcaagactagaaatcaccctaggtatttcacccgaaaaaaaaatgattgggtacttaaaattttactggaattaaagaaagagtgaatgtcatgggactgccaccaggcggcaagcccatgccatgcaagtgctatccaaatagaaaactgtttagctcttcattacttttgaaacagtctgaggttaggaaatatctggaaactagcactgttaccacagctacccattccaccagagagtagcacatgcagcctggtctggcctctgaaaaactggcatctgtgagagcctgtccatcaactgttaccatcacagaaagaagagcctccatctcacgtctaccttacaaattccaggcaggcacatttctttggaaggtacttaatcctaagtggaaagactacataaaaatacagattttctattgttatttccaaattgatttatagcaaatataattcccataaaaatctactttttttctgaaactcaagaaattgattctaaagttcttttgtataagcaaacatgtgagaatatctatggggaaataaagaataatgaaaggaacttaggggctcagaaataaaaatacattataaatttttatcagcacatagtatggtgatataacatttgtgagatagatcaatggaaaagaacaataatccagaaggaaagcagtgtacataataatgtagtagagaatgataatggcctcagaaatcaaaaaaaaaaaaaaa

SEQ ID NO: 9166 - DNA, 746 bp, Homo sapiens
  misc_feature (90)..(90): n is a, c, g, or t
tcttttagagttgctcttctgggtaaagcactatgtctgggttgacctaggccaattcttggtagttctcttgggcagaaacatatgggnttaaatctcggtagagagttttcctcatcctctatccgtgaagtgtccttccatgcaaggtcccacttaggtgatagacagggaccccttttactgaacctttgaggaaaggaggaaggaagaaatgcgtttagatcttggatgcagacctttcaaagggttaaatgtaaccatatggatcaaaccacaatgcacatccttactacagaatccgtcctttcatttcaacttatagcaagctatgatttttatatataaatattatataaataatgtataaaacattaaaagttaactatgtaagatattatttctgaaacaatttagctatatccactatgattataaactgtgtctcgacctgtgttatttacattagctgcttaaaaaagcattgagttaatttttttaaatatcaactaaaatatcatagttctgtggtagacattgttttataatgaaataactgcaactagagaaaactgtataaaaacattaaattgtcagtatttttgtaaggttccattttgtaaagagaataatattcaaagacttttgtagcatacaaagtgaaaacttgtatctgcgaaactatacttgtattaaatgtgctttttaaataaaagctcgtaacacaactaaaaaaaaaaaaaaaa

SEQ ID NO: 9167 - DNA, 705 bp, Homo sapiens; identical to SEQ ID NO: 3932
  misc_feature (681)..(681): n is a, c, g, or t

SEQ ID NO: 9168 - DNA, 697 bp, Homo sapiens
tacgtaggataataatacaggtaaataaattatacctagataagttaagatctcgctgaaagccacatggattatgattggcagagaacaattccaaaccactgctactgtcatagcctgttctccaaagtataaatgagcatgaagctagctcatccctgaatatttgctgaattactactgtgtgcaagttagagacaaatagaatatcattaacctgggaagttaacttttcagagccaaaatatcagggttgaagagactgttagggtctctaacaaaacagaactcacagcctttattcttagaacacctgatacaatgcagacattcaataaacacagtagaacaaaaatggcactggggcttacttaaaggacaacatgcagccaggcacagtgtctcatgcctgtaatcacggcaatctgggaggctgaggcaagcaaataacttgaggtcgggagttcgagaccagcctggccaaaatggtgaaaccccatcactactaaaaatagaaaaaaattagccaggggtggtggcatgtgcctataatcccagctactcaagaggctgaggcaggagaatcgcttgaatccaggaggtagagattgcagtgagacaagattttgccactgttctccagcctgggtgacagagggagactccatctaaaaaaaaaaaaaaaaaaaaaaaaaaa

SEQ ID NO: 9169 - DNA, 721 bp, Homo sapiens
attactactttacgggtattaaggcatcaaatcaggagtgaaaaatgccttgaaaatagtaagaagacattatcaaggaccagatcctgaagggccaagcaacatgttgaatggcaaaaggacaagtagaagaacacttgtgagttcataggacctgacttcagtgtaatattagcacaaagtactagcaaagtgtgctaatgaatcctatctcttatcagtcattgtaaggagtaatttaaaagaaaaaaaatgaaaattcaagtgcttggaaaggagtccctcatggcagtgagaaagtaatggaatccaaggtgggtggcaagctaccctcagcagaaagttagatctggagtaaggtaagtatttgaagttgccaaaaaaaaaaaaaaagtaaactgcatgacaatgagtatatcccactgacacatcagaattatagtccatgaggttcaacaaagttgcagtttggaatagactaaggcccaaagatgcataatttatgatgtatatccaaccatgcttcattacactcaatatgaggtcactaccagcactttccttattaaaatgttcttttttttttcagaattgactttcctcatcaggttaaatacatcctttgtttgccagtgaagtccacgtgcttaaggagaaagaggtcccttagaagaaatgcagaaagaatgggtcttcccaacatatgagaaaaaataacatc

SEQ ID NO: 9170 - DNA, 727 bp, Homo sapiens
cttaagcgcgttaatcccttattttagtgacaatgatagcttgctgtgtcccacccagtctcatctgaattgtagttcccataatcctacatgttgtgagaggacccagtggaaagtgattggatcatggggcagtttcctccatgctgttctcatgatagtgagtgagttctcatgagatctgatggttttataaggggctcttccccctttgcttggcactccctacctcctgccgacttgtgaagaaggttcccgcttcaccttccaccatgactgtaagtttcctgaggcctccctagccatgcagaactgtgaatcaattaaacctcttttctttataaattacccagtcttgggcagttctttatagcagcataagaacagactaatacagtaaattggtaccaaggtagtggactgctgctatcaggatacctgaaaatgtggaagtgactttggaactgggtaacaggcagaggttttgatgtaggatttttctcagtcaatttgccagccagggacctctggctggtgacgcccctcactgggactcactcagacccgctacctgctgcaggaggcaccctgcccacttgcctgacctgggctaagtttggcttgtgcgctggctcagcctgtagctgggctgggcatgccccagcctgcctctgttatagcttgtacctgtgttcagtggttcctgagctcttgtcctgcatccaag

SEQ ID NO: 9171 - DNA, 523 bp, Homo sapiens
caccaaaatggcctggcctttcagtttgttctaaccacctgccactcatcatcagaatcccaccaatactaccgacttacctaaagtctaattcttcgcttcacaatgtctcgtgttccaaatccattgctctttctgattattctaattgttgatccaggtattaacactttccagtttcctctggtttaaaaccctagggttatctttaatcactctttctctatacctcccagttcagccccaaaacacacaccagttgcgaagtccttttgagttgatttctggaatgccttttctctgttcccccaccctatcctcaccaccattatgtcctgattagggactttaacttcctttatgtagattctagtctgctactgtggcctcactcctccctgcccagcagcccggggtattcctatagggcagttccgagtccatcaggcctctgctccaaacgtcttgaatggcgggctcctcactgacacgcaggccctcagggttctcgccgtctgcttat

SEQ ID NO: 9172 - DNA, 704 bp, Homo sapiens; identical to SEQ ID NO: 3937
  misc_feature (376)..(376): n is a, c, g, or t

SEQ ID NO: 9173 - DNA, 708 bp, Homo sapiens
  misc_feature (96)..(96): n is a, c, g, or t
atgatgtagaagagaagggaaaataagaggaggagaaagaggaagagaaagcagagaagaactaccttaatacatttgaggcacttaacatgtgcncagagattttagttaatactttatttgcattgtctcaatttccacaagaacaccatggagcaggcagtcatattatcaccctatcccacagtgaggaaaggattcctagagggatcagcacacttgtcaaggtcacacagctagcaagtgacaaagctggaccttgaacccaaattcccaagtgttgagccaatctgtgcagtctttaggacttcccatccatattatctatataataatgtaatttatgaccaatttagggagtacattgggatggtaggtcaaaattgtatttgccatttggttacagagaacttatacagtttataagttatcacataattttaacactgatttggacaatattgtgggagaatgtaacgaataatccactatgaatgctgtaacctcaaaacagagtgatgatgaatgaattcagatccccctaagagctctcccgtgcccatcattagttaataggacattggaggtccaggagatgggtcccacttgcaccgctgaaggaagacaagggtcccaggtgtagagagctcccagcccctcagaggacgggaagattcaatgggggaaaccgttaaaaaaaaaaaaaaa

SEQ ID NO: 9174 - DNA, 674 bp, Homo sapiens
ataacaatgtcacacaggaacagctatgaccattaggcctatttaggtgacatgatagacaagtttgtacatataagcagtctggtaccggtccggaattcccgggattttgggggaaaggatatgctaacttatttgggcaggatatacaaagagaaatgattgatatctcgacagcactttcaagcctggacaacattgacagtgcctctgtcacatcacccagaagctgtggtttgagggctgaggcaggagatccttttgccacaggaaaaaggatgatacgagagacattgtgaaaggttgccccagaagtcttaaggctccctgaaaccttgggttttttgaacaccattgtccaatctgttgaaggttaaataatacgttgttcaaaattgcataggtaaagcgcagaatggccaaagggtcagaactacagcaataggtaggtcccattctctgccttttcattcttcagtcttcggaaatgccacagaggccaagtggcactaggtgcagctgggaatcaagatctgtttatctgtaccttaaataggtcaaagtgaaccttttggaaatattgttttggtaaataaaaattcctggtcgtgctaactgtggctatttcgacctgtttcttagaagaaaaaaaaaaaaaaaaaaaaaaaaaaaaa

SEQ ID NO: 9175 - DNA, 658 bp, Homo sapiens
aggtctcacaaaggatcaactcggacaactccagcttgaatgtcatcgccatcaaagggaacccatttgccatttgagagctgctggatcacgatgctatactccactaggtcagtgacagtgtaggcattgggtggggctgtctcgcccacccgatgatgggacacaggccccacacggaggacaccctcctccttgaacacccagcgggagagggccacagctagttcatagttgcctgtctgggaatacctctgggagccgggcgccgccttctgcactgctgagttgaagaaggagtcgctgaagaagtcgagggagccgctgaagatgacgcgggcattgttcctggcctggagcccagcaatgaggagggtgttcttccccaccgcatgtggatactgggtgataggcttgtccgggaagaaggagtaagaggtggaagagcccgtcaggatgtccagcaccaaagggttatcaggatcggccaccatcccaacacctcgaaagaggatgggatttagagatgatttcccaacgatggttggggccttcagcaggttctcagtgtcagccacgatgagcgtatgctggccaaggtctgagatgtcatagttgtgatggtcaatgacagccgttttctcctcgtcaaactcaa

SEQ ID NO: 9176 - DNA, 745 bp, Homo sapiens
ttctgagagctgatgattctagtgccttgaatattgtagaatttgtagagttggatgactatgtgttttatttagtgaagatttaaactggtcaatcaaaagggagatacggaagaagtatagagcagataacactgtgaaagaattgacgcaaacaagcccagtgtgcggctacatgtctggaatatgttcttccgaaacaattctgtcaactccatcacaaatgagtctgtggaagaaccaatgctgaaagcatctcagtaaacaaatatggcccaataaactcaagtttctaatgggcaggcatataggggatggcgagaaggcacataatagagctcaaacgaaagcaaaaagcaaatgacagaagtctataggaacaggcatagaaagtgaaagctcagcatatgcagaagtttgtaaacaatgcaaaggaaaactaacgagaaaattatagggatgttgagaggctgaagaggcaagaagcaataggcccactgggtgaagttaagctgtaagagagagaaaacaggtctagtccaatcctatttttagctttagcaaagagaataggcaaaaaattaaaaaggatgacatatccatggctaagaagaaagtgaaatccaggatgaagtctctagtcctgtcaaagcaaccctctgagttgcagtaccattaccagtaatctcaaaagaatcactgagaaagaaaattggaagtaggaaaaaaaaaaaaaaaaaaaaaa

SEQ ID NO: 9177 - DNA, 693 bp, Homo sapiens
  misc_feature (33)..(33): n is a, c, g, or t
  misc_feature (423)..(423): n is a, c, g, or t
tgttgggtttctttgtacttgttaagccacatntgaggtttatggtaaaaatcatcttttgagtttgctctttggtttttcttcattccttttgaggattgggaaaacagaaagattctttgatttgggtaatgaagaggtaatttgggacagtgtggtggtaccaggaagaaagaggattggaaaggccagtactgttttagttgctcggcactgttggttttgttttaatgtggttgccctgtccactacatggttctatcagtagtgtaatccattttcaatgtaaagctcttttagtttttgtcatagacataaattaatattttgagaggcatccctcacctgttcatttcttctgtgttgaaatgaagtacttaaaattaccgttatacatgaactttgtggactgtaagatttgtnatatatgttcaaatgccttttagctggctttttaattaatatgcctgttttgagtgcttaatacaatgtaatgtgattgtaaatcatacctattttaaatcattccttcctgtatatttgtactcagagagccttattttattcttccagcagaattactacttgtgatagttcatttacattccccagaatgtgcctctagtgtgaattttgtattcttattaaacgtgtttgctgcagtaaaaaaaaaaaaaaaaaaaaaaaaaaaaa

SEQ ID NO: 9178 - DNA, 736 bp, Homo sapiens
gccgcttggtcaagaacatgaagatcaggtcctggaggagatctatctcttctccctgccccattaaggaatcagagatcattgatttcttcctgggggcctctctcaaggatgaggttttgaagattatgccagtgcagaagcagacccgtgccggccagcgcaccaggttcaaggcatttgttgctatcggggactacaatggccacgtcggtctgggtgttaagtgctccaaggaggtggccaccgccatccgtggggccatcatcctggccaagctctccatcgtccccgtgcgcagaggctactgggggaacaagatcggcaagccccacactgtcccttgcaaggtgacaggccgctgcggctctgtgctggtacgcctcatccctgcacccaggggcactggcatcgtctccgcacctgtgcctaagaagctgctcatgatggctggtatcgatgactgctacacctcagcccggggctgcactgccaccctgggcaacttcgccaaggccacctttgatgccatttctaagacctacagctacctgacccccgacctctggaaggagactgtattcaccaagtctccctatcaggagttcactgaccacctcgtcaagacccacaccagagtctccgtgcagcggactcaggctccagctgtggctacaacatagggtttttatacaagaaaaataaagtgaattaagcgtgaaaaaaaaaaaaaaaa

SEQ ID NO: 9179 - DNA, 736 bp, Homo sapiens; identical to SEQ ID NO: 9178

SEQ ID NO: 9180 - DNA, 691 bp, Homo sapiens
agccaagtttcctcgatttttcacccagcatcgggagaggactatgatgagcgtgtgctgccgtccatcacaactgagatcctcaagtcagtggtggctcgctttgatgctggagaactaatcacccagagagagctggtctccaggcaggtgagcgacgaccttacagagcgagccgccacctttgggctcatcctggatgacgtgtccttgacacatctgaccttcgggaaggagttcacagaagcggtggaagccaaacaggtggctcagcaggaagcagagagggccagatttgtggtggaaaaggctgagcaacagaaaaaggcggccatcatctctgctgagggcgactccaaggcagctgagctgattgccaactcactggccactgcaggggatggcctgatcgagctgcgcaagctggaagctgcagaggacatcgcgtaccagctctcacgctctcggaacatcacctacctgccagcggggcagtccgtgctcctccagctgccccagtgagggcccaccctgcctgcacctccgcgggctgactgggccacagccccgatgattcttaacacagccttccttctgctcccaccccagaaatcactgtgaaatttcatgattggcttaaagtgaaggaaataaaggtaaaatcacttcagatctctaaaaaaaaaaaaaa

SEQ ID NO: 9181 - DNA, 691 bp, Homo sapiens; identical to SEQ ID NO: 9180

SEQ ID NO: 9182 - DNA, 722 bp, Homo sapiens
cagccttgtttgctcacgtcttcaaaaggaggaatgataacccaatctgccccaagtgacacttgagaagttttggctgggttcctggtggatttcttactacctacgcccaagaagaccaactaaggactctcaaaccatacctggtgggggttcttcgctcaacctcttcttccctaggtcaaagccactatcatctgatgtgttagggatgggttctgattggcagaaattaatcagctcccaatgggagcccacggaactaagtagggtcccaagaaaaaaaacgggagctatttcacagagctgagcttctgccaaatttcattcctcaaacctttcaggaggggtggttggcgtttctaaaatgtttatgggatttgagttgcaggtgtccacttaactgactagctttgataaacaatgtcagattttaactatgaaaacgacattaccttgtgcatttttatattgattcctattttttttttaagattaaagtttaaatgttttccactagtcatttcacttctaacttggtataggaagcttagctctctacatacctatcatgtgccctgtatcacagaagattcaggaaaaatgcacttgggaatcaaagaaaatggaacttctttttgaaaagacaagcaaccatgttaactgtattgacacatcctcaataaaacctgttgtataaaaaaaaaaaaaaaaaaaaaaaa

SEQ ID NO: 9183 - DNA, 707 bp, Homo sapiens
  misc_feature (55)..(55): n is a, c, g, or t
gcctgaatctgcttatattcaatagcaggctttattcattctcatcagcttttanatttatacttaggagagagagcaaccaccaaaagtcacatctactgaagctgattggtaggctaatcacactctgtaagtcaatattccatgtttacagtatttcctgggctacaacagagtttttacctgaactggcagaaggtactgaagtgcaacaagctgaaagctggtacaattttcatattcaaccagcaacagtcaacatttcccttaatagcagttttttttccctctagtcatcacttgtgcagctgaaagtaaacactcatttctgcaaagcctggaaccaaataataactgacgcttgttatgaaagaactctttaaggaaatgtcagcattgggctgggcgtggtggctcacgcctgtaatcccggcgctttgggaggccgaggcgggcggatcgcctaaggtgaggagtttgagaccagcctgaccaacatggagaaactccgcctctactgaaaatacaaaattagccaggcatggtggtgcatgcctataatcccagctactccggaggctgaggcagaatggcttgaacccaggaggtggaggttgctgtgagctgagatcgtgccattgcactccagcctgggcaacaagagtgaaactccgtctcaaaaaaaaaaaaaaaaaaaaaaaaaaaaa

SEQ ID NO: 9184 - DNA, 88 bp, Homo sapiens
aatgaggtcgtgggtcttctgagcccagctgatacacaccaagtaatccacgttaaggggtccgcagccccccacccaattccccact

SEQ ID NO: 9185 - DNA, 784 bp, Homo sapiens
attttattttattaactggggaaacatataatacatacctattatagtagtgagaactatttctttaatcttcttaaggttcaaaatggtgaattcttatagtatgaatgctttgttgtgagataacatgcacactgttacaatggattttagaggtttgtcttttttgggtggggtgggaagctgagagggttaattcaatacatggctgaaattaccaaatgtataaatacctcattttcactaccatacaagaaaaaaacacctattttgattgatcagttcttttgtatgaatatccacctcctttaaatactctatttttatatatatttttatatgaagataaacatgaatttatatttaactgtcttaaattatatttacataaatgcaaatatcacttgatataaacaatacaaatctgcatcttacagatgataatttttttagaagaatgatacagaattaactttaaaaataaaacttttctaatatacacttaaatgcaaacatcatttttaaattttcagtgatttttttaatgacataaaacgttaccaatgtgtgcagcctctccatcatgttttaacatactgtatactctatagcagtattacagtcagtatttcatataattttctttagacctaactgttaccatctgactgaggttactctggtatttatctcttcgctgctgaaataataatggattttagaaacaattgtaataatatcattaataaatgtcttactagtaaaaaaaaaaaaaaaaaaaaaa

SEQ ID NO: 9186 - DNA, 744 bp, Homo sapiens
gcagaagatggggttttttttttttgggtgtttgttttgagagagattctgcctctgtctccctggctaagggtgttgttgtgtgatcttggctcacggcagcctgcccctgccctggctcaagcagtcttcatctcagcctccagagtagctgggactacaggcatgtgatatgatgctcggctgatttttgtttactttttagagagatggggtcttgccatatttgccaggctggtttgaactcctacaactcaagcattcctcccaccttggtctcccaaaatgttgggaccacgggtgtgagccaccgcgcccagctagctcctgtgttttgtttttgttttgtaactttggttgatgttaaggccctccattttggaaagcaggaaaacaggatttttttttttttatcttgttccctggaggatccagggatgaggatagagtggcctgagagcagtgcttggattcagcctcctgctgggtccttctgctggatacaggcaccaagaggcgggggtggagcagggagctgcgccttcctggggtgcccggtggtgtgtagagaaaagctgcttgtttactccttaagtcgaatgtattggtgactgttgatttgttgaacaattcaggaatcaagggctgtggagaaactccctcatgttgttggcaacaggtgaatgaacctagagcggtgacatgaaaataaagctcactgttactcgcaaaaaaaaaaaaaaa

SEQ ID NO: 9187 - DNA, 744 bp, Homo sapiens; identical to SEQ ID NO: 9186

SEQ ID NO: 9188 - DNA, 708 bp, Homo sapiens
tgtcctgtggcacgtgagaaaacagtaaaaggcagtaaatagggaagacacgttacagtcaaatttcacttacttagtcactttgcctaaatctagctctaaaagagagagaaacacagggaagttaatttgttgctcgttttatctatattagttcacgtcttccctcaattaggtctcgtaaagtatatgtgttcaccttctttcttaattactcttccaggtccaatagtgacttaatattgccagccaaatattataccataaaggccagacttaggccagagcccagaggagaccaggaggatagccccaaggtttaatccaaggggaaaccaggtggttgctttaaatccctttgcccagggttaattttccaccaagaagggttccaaggggccaagctggagccttcattctcacctagtatcaatgaaagggaacaaggtagcataagatggagataatttgcactatactctttttcagcagagtcagccaggcacaatgaggagttgagcttcatcccctactccaagatggaaagagaacagaatagttggtactctgattcctctggaaagaattggcacagcatttttcaagtgctgaaagaaaataacaagtaaccataaatgctatacccagcaaaaatatccttcagagatgaagggaaaatcaaggcattttcagagaaaaaaaaaaaaa

SEQ ID NO: 9189 - DNA, 705 bp, Homo sapiens
tggatagaagaacttgtgcttcatctgcgtttggcatctctgctcccatgtaatagcacagttattggtaatgctaccgtcaccagcagaacacctgtaagtataaacaaatgtcaggaaggaaaaagtatggacaacaggaagctccagagcggctccatgcgggcgctgggctcagtagaagcagacggtgtgcagaaaggtgcggccactcttctcctcgaactcctgcagcagctcgtcgatctcgttctccatgtcttccgtgtgctggatacactggcagagctcacagatgagaaacgcccccagggtggcctcctcgtggtttgtcctggatgtccacattgaccacgtgcacaggctggcaggtctcctgttctctggaattcagatcttccaccacctggtcatacactctctcttcgcaagtgaggatcagatcaaacaggtctttgcagttctggaatctttctggccggggcttgattctcttatttctgtccagcatatgtaaaatcccattctgtgtatagagttctttgtctttcctaagaagatcattgtacatctggtcatatgtggttttgaaatcataaacattgggcttgtcgggagctggtcctggaagcttcacgtgagtccctgttccaaaggatcggacgctgaatccccgtttgctgaggatgttgtgcgcctccatgc

SEQ ID NO: 9190 - DNA, 745 bp, Homo sapiens
aacgttttatccttgtgggtcagatttcagagttcaggagccaaaatattgtgtatacatatatagatatatatccatagcctgggtagatttatatgcaatgccactgcatccatgcattctgatagcatttcattaattttgatttcaaatggaagataaataatatcccaaatgaattatctgtaacagaaaagccaagactttaactttcattacatatctaatagttgatatcaccagttaccattttgaattttgtatagtactaggttagaacattgcttaatccttttaaaaaaaatgcatttacgtaaacacgaatactgaaattgttggattttttaactatatctgacataattttattcatcaattacattacacattcatttagcccagatttcaaatagtgggggaagaaagaaactgtatttcagagtaaaatctcctaaaggaaataaaaacacagagttgtaaatacacatgcttgcaaaaacattagtcgtgaaatccctagcaacaagtcactggatttttctctgtcagcacgcgtgtcagctgccaaagaatagacttaatgaagaagtgcccacatgctggcaggggccggcccactctggccagccagatactgctagattgtaatatttaaggtcgaatttcgacctgtggtacacagctgtgctgtggctcagtcagcaacctcagaactctgaaaaaacaaaacaaaaaaaaaaaaaaa

SEQ ID NO: 9191 - DNA, 356 bp, Homo sapiens
gtgtgtgtgtgttgtttttcgtgttttccacctgcagaacggagtgtccgggtgcagtggctcatgcctgtaatcccagcactttgggaggctgacgcaggcggatcacttgaggtcagaaattcgagaccagcccggccaacatagctaaaccctgtctctactaaaaatacaagagtagcggggtgtggtggcttgcacgccggtagtcccagctacttgggaagctgaggcaagagaatcgcttgaactctggaggcggaggttgcagtgagccaggatcgcaccactgcactccagcctggtgacagagccagatcctatctcaataaaaaccccccaaaaaaaaaaaaaaa

SEQ ID NO: 9192 - DNA, 671 bp, Homo sapiens
tatacctacctactgaacagtctgagcttagcctagcctaccgtaaatgtgctgaaaacacatttagcctactgggcaaaatcagctaacacgaaacctgtttactaagaaagtgttggatatctcatatactgcatattgcaagcccaggagaagatcaaaattcaaaatttgaagtacattcaaattgcaacagtttcacaccatcacaaagtcaaaaaatctaggtgaaccattgtaagttgcagaccctctgtactctttcacgttgatactttttttcatgtctctgtctgtgtgctaaataaaatagaatattttattcatcaataatatctacatgctaaatgaaatcaccttgaaatatataaaccaaaactattatatatagaagagaagtgatgagcaccattccttaggtagagacttcaaataatggcatatatatgattaactgaatttgaaagatgttttggatcccttctctagaaaaaatttaaaaagccagacatggtggtgcatgcctgtagtcttagctactcttagctacttagctgaggcaggaggattgctcgagcctaggagtttaagcctgcagtgaaccgtgaccgagtgactgcactccagcctgggcaacagattgagacccggtatccaaaaaaaaaaaaaaa

SEQ ID NO: 9193 - DNA, 692 bp, Homo sapiens
gacaatcgtgaattccttgctcatctctattctatagtcctgtaagatttcatactctatgaaaccaactgtgtaccaactctaggcccaaagtagagcagctggacctggctggaggaaaacagtacaactgtttggaattgctcttgattgttaaagtcacatttgcacatcttaagagattggaagcaacctaagtgcctatcaacagatatccattgataaagaaaatctggtacttatatacatgataaagcactattcagccatgaagaatgagattcagtcatttgcaacaacatgggtggaactggaggtcattacgttaagtgaaataagccaggcacagaacaacaaacatggtatatcctcacttatttgtgggatctaaaaatcaaaacaattgaacccatgtacatagagagaagaaggacggttatcagagagatgggaaaggtagtggaagggagctgaggatggttaatgggtataaaaagtggtttgaatgaatgaataaggcctaatatttgatagcacaacagaatgactatagtcaataatttaactgtatatttaaagataaaagattataattggatagtttgtaacacaaaggataaatgcttgaggggacgaatatccacttttccatgatggaattattacaaaaaaaaaaaaaaaaaaaaaaaaaa

SEQ ID NO: 9194 - DNA, 649 bp, Homo sapiens
taaacatattcgttaaattgctccttataagcttatagggaagagatttctgattatacagatactttaaaaaatattttgttttggttgtgtaggtggaaccagtacatttggtctaactcattaccattcgttcctttcacctttttgctgaaatagaaatttgctcctccccagacactgctttttccgcttttctcttgagccacggaggcttttgtttttccttctacatcctccatacaacttgttctttatttagtttcctttccatctccctaaaaactctcagctccaaatcttatgttccaactttcccacatagtggccaagatctgtgaacctactgtcatttctcaattacttaagctcctgacactctatcttatttctttgtgattaaaataaacccatagatcaccccttccacaccttacctcctcaattcctttttttatcttatcttaccctgcaccctttctcagctattcctccctatgttcatactatagaacttctcattacctataactacagttcttcaaaattttaattccatgcatctcaacaaccaccaaattttatctttcaaaccaactctttagcaccttgtattagtccgttttcatgctgctgataaagatatact

SEQ ID NO: 9195 - DNA, 775 bp, Homo sapiens
ggcagatccagacaaaggaggttgtgaacagatagagaatgtgatttgctacccaggttgaacaggtcgtgccccgttgtctgcaaagtgctgggttatgcctgttgtcgcagcagacagtcagggtaagcacttgttcagaatgttttcaccttcataaaccaaggtgttatttactggttaatattaaatacaccaggatgggttttgtaacctccagtttgcacttgcagcttctcccataccttgtctaccggtgtgtgagacgacttatacagtgaagggaacgttcatgttaacatgtgattaaagctgaaagatgaccaatgacaatccatttctgtttcctgtccctttccaatcgtggtgtaagcaacacctccctttcaaggacaacacgcagtatgctcaccataaaacaaagagtacttggacatgagcagctaagggcagctaactccttccggtcttgattggcagtaggaaaagtattccaggccactgcctcaccagacactagatgtgctgaccattgcactgtgacctgtgttgcagcctgagatgcacggaacagcagtcagaagggttaatggagaacacagaaagttataggttaggcatacatgaaatattcgcaggaaacagatctgctacagatcttttaaagaattgtctgaatgctctcatttcagtgtttttgtcatttattgaatcgttatactattttattttgcaatataccttttggcagtgatgagctaaaaaaaaaaaaaaa

SEQ ID NO: 9196 - DNA, 678 bp, Homo sapiens
tataaagagttgtgcacacacagtaatggaatacacaggcagagtacccctgacgttttttgtaagaagtagcattttgagttcaagccttggaaattggatagattctgacagatgatagaagaaaaggtaatttgaggcaaagggtggtacagaggcaagaaagcaaggcccttcagggaagacagcagcagacatggtttaccatagatgtcaccgagtctgtgattgtcaaatgtggtcccagaataagcagcagcagcattaccagggaatttgtcagaaatgcaaatatttaggccccatccaagacctactgaatcagagactctgtcagtggactcagtaatctgtatttagccctttaggtgattttgatccacaataacatttgagaatcactatatggactttagaaaagtgtataaaaaaccttttttcccactacacatcaaaggcaagcaattctggtttatataattcctggattatacgtgctcttgatgagcttgaaatgttacattgcttttttcctatggaggctcccttcattagaattgtaacatttccaaagctatgatctatgtttggctttggcttttatagatcatcctggtttctttattggaggtcctaaaaatgggggaggaggggtcgaaggaagaaaaaaaaaaaaaa

SEQ ID NO: 9197 - DNA, 736 bp, Homo sapiens
agttaataaatggtgtttgggaaaaactggctacccaatatggcagaagctgggattgggacccgtccgttaacacctaatagtgattatgaactgcaagatgggataaatacttaaatgtaagatctgtaccattataccctagaagaaaacctaggcaataccattcaggacataggcatgggcaaagactttatgactagtacaccaaagcaatggcaacaaaagccaaaattgacaaatgggatctgaattaaagctaaagaacttctgcacgcaaaagaaactatcatcagagtgaacaggaaacctacagaatgggagaaaatttttgcaacctatccacctgacaaagggctgatattcagaatctacaaagcacttaaacaaatttacaagaaaaaaaaaacccatcaaaaagtgggtgaaggatatgaacagacgcttctcaaaagaagacatttaactttgggaggctgatgtgggcagatcacaaggtcaggagatcaagactatcctggcaaacatggtgaaaacctgtctctactaaaaatacaaaaaattagccaggcatggtggtacgtacctgtagtcccagctactcaagaggctgaggcaggaaaatcacttgaacccaggaggcaaaggttgcagtgagccaagaccgtgccactgcactccagcctaggtgacagagtgagactttgtctcaaaaaaaaaaaaaaaaaaaaaaaaa

SEQ ID NO: 9198 - DNA, 634 bp, Homo sapiens
cttggtcttttttcccacggaacggaattcttcagctcccatatttttagacagagaaatataggtttttttaaagggtatattttttagttattatttctctcctcgataaaacggaggcaatattttaaaatatctcaacagcaccactggtgggaaaagctggctgagatgctctttaaccaaaggaggaaagagaggagaccaaggccagctggttggttgttgggcattgtttaaccactgagagcccccagctccactaggccttttaatcctatcaggtaggatattccagcagccgccagcagctggggctctagaagtcagagatcagggccaaacaaggctctgggctctgcccctctgggctctctcaaacctgggccttccctcttagcactagcctcctcctaagggggcagcccccaaagcctttcccaccaggcctgttctccatagagagttcctaaagggttactggctcatgttgtaagaaattatgaaacataactttcttgttttttcttttcattaaaaaaataaaatattcaagactatcagcttctcttttgctttgcttttcttttttatataaaatatcagcagctgcaaaaaaacaaaaaaaaaaaaa

SEQ ID NO: 9199 - DNA, 531 bp, Homo sapiens
cccgtatgttttttgttttctttgagacagtctcactctgtcacccatggctggcatgcatgttggcatgaaccagctcattgcagccttgacctcctgggctccagcctcagtcccccaatgtagctgggaccacaggtgtgagccatcacacttgaccaatttttttttttttttcatagagacaagggtctcaccatgttgcccagggtgttctcaaactcctggcctcaagcgatccttccacctcagcctcccagagagctgggatcacagatgtgagccaccacgcctggccaaaatgcttgatattaattaatgaaagagttatattagtggttctcaaaatatttcaagtggtttagttgctagaagtcatgagtcttttcatggaataccatgaaatattgatttagtaaacatgtggaaactaaatataatcttttgtgttgaataaaaaaatgatttcttgtagacaaaaaggcctatgcacaatttatagcaagagtcaaagttttaagaaaaaaaaaa

SEQ ID NO: 9200 - DNA, 761 bp, Homo sapiens
gcggctactcctcctgtcggtgattgagagatcctgctgctattttctttgtgtcaaaaatgtgtgacatggcacaccaagataccattcatcaactggccgctggagtgatttcttccgaaccctcatagcggcaatcctctacctgatcacctccattgttgtccttgttgagagaggaaaccactccaaaatcgtcgcaggggtactgggcctaatcgctacgtgcctctttggctatgatgcctatgtcaccttccccgttcggcagccaagacatacagcagcccccactgaccccgcagatggcccggtgtaggcgaacttccctcatttctctctgcaatctgcaaataactcctccattgaaataactcctccccaccccaacaacaacattcccagcagaccaactcccaccccctctttgaggtaaaagtgcctttattgggagacttttgtcttccagcctgccaatcaaccctcctgggtgtggccaccatatgtgtgtgcctaggtcctccttctgcacgatccaataggagacaccagttctgactgaaccatgcccccacctaagtcacaaaatgagggaagtggggagttagatttcagagtccaggccctaggttgggacccactccaaataatctcctcggtgtgggtggtggttctatagagggataaatgaataataaacattgttaaaatatacgataatgaataaagtaatcctttcatcaaaaaaaaaaaaaaaaaaa

SEQ ID NO: 9201 - DNA, 761 bp, Homo sapiens; identical to SEQ ID NO: 9200

SEQ ID NO: 9202 - DNA, 792 bp, Homo sapiens; identical to SEQ ID NO: 3967

SEQ ID NO: 9203 - DNA, 743 bp, Homo sapiens
tctggggcaaaagaggaaagtaagtcaagatagctatgtggagtttgaggaagtataacgtaccctaatgaatgacagacttgggttcaaaggacagttgggctgtttttaagtgttaaaggttaaccacatagaggcagagcagtggggtttcaaggaaagcgagggagcttgcacccagcacacctaaactcagtctggcctgccactgtcccacctgggttcatgggcatatcagtttcttcatctgtgacgtggagctggtcgtattacctcagaggtattgtgacagccaaatgaaataatgctgtattttatcaaatgtcagatgaggttgatgataagtcacacccttagttttgtaccattaaaaagaagaaatgctgccagttaagctaacttgaagtgtgagatgcacctgaaattcagagatgcagtggacaaactgtgtgttattttttctttttattctcccttacaatccaaatgcgtctttaaaaacaatcaataaaaaacagtgtacgtgaaagcgctttgctttcctcaggagtcaaatttaatttttattatgtgcatcgggagtgaagcacagttcttcagaaataattccagcagtctggcgcagtggctcatgcctgtaatcccagcgctttgggaggctgaagtgggtggcgcacttgagcacaggagttcaagaccagcctggacaacatagtgagactccatctcaaaaaaaaaaaaaa

SEQ ID NO: 9204 - DNA, 663 bp, Homo sapiens
  misc_feature (12)..(12): n is a, c, g, or t
  misc_feature (63)..(63): n is a, c, g, or t
cacaacaggagnctgaaggaagctatgtgaagaatggtagctccccagcctggccgctgtagncaggagacgcttgctccccatctctgctggagactggagtttcacagcctggagaaattggtcccagagatgtgttgcagggaaccaggtgctgcaaaaagacaggaactaagtacaggaacaaaaaatagggagacaaattaaaagtctgaaaacagaataagtggagagaccccctgaacacaactggctttcaaaagtgtcaacaaccccacccccaaaatcttcactatcatgtctaaaattaagcaagtaaaacattgaggtataaacctataattcagtaataaggaggtaaatcccagaatcaacagttaatgtggctgggagggactatggccagttgggactgggtggaaacttgatgcttttaataaatcttctgctacaatcaaaagttgtagaaatttaaaatcagcaagaaaaagacaaataatcccattaaacaatgggcaaatgacatgagtaggcatttctcaaaagaagatgtagaaatggccaacaaagtccaggagttgtggctcatgcctgtaatcccagcactttggaggccaaggcagggggatcgcttgcagtaaggagttcgagaccagcctggcc

SEQ ID NO: 9205 - DNA, 689 bp, Homo sapiens
acaaacatttaatcatcaagagggaccatataccatatacgatatgtggccccataagattataatggacctgaaaaattcctattgctagtgatgtggtcattgtaaagctgtagcacaacacattacccacgtttgtggtgacagtcatataaaagtatggtacatataattatgtacagtgcatacataatacttgataatatgttactggtttgtgtctttgctatgctttttatcattattttagggtatactacttaaaatgttaactgtaaaacagcttctgacaggtccttcaggaagtactccagaagaaggcattgttatcatagaaggtgacagcttcatgtgtgttattgcccctgaagaccttccagtggtacaagatgtggaggaggaagacagtgatactgaggattctgaccctgtgtaggcttaggctaatgtgtgtgtttatatcttagtttttcacaaaaaggtttttccaatgttaaaaaaaatatataaaaaagcttatagaataagaatataaagaaatattttgtacagctgtacaataagctaagcattattaccaaagagtcaaaaagttttaagaaattaaagtttataaaccaaatgttcattgtgagccaaggttaatttattgaagaaataaaacatttttaatgaaaaaaaaaaaaaaa

SEQ ID NO: 9206 - DNA, 503 bp, Homo sapiens
tcttcgtgtttcaacaattctcctgcctcagcctcccgagtagctgggattacaggcccgcatccagtgcgccaggcttattttttgtatttttagtagagatggtggtttcactatattgtgtcaggctgtcttgaactcctgacctcaggtgatggtgaaataattataaactcaccataatgtagaatcaatgggagccctgagcttgttttcctacaactagtatggtcccattttggggtgacgggagacagtgacagatcatcaagcattagattctcataaggagcacgcaacgtagatgcatcacacacacagttgacaacagggttcccgctcctattagatctaatgccacactgatctgacaggaggcagagttcaggcagtaatgtgagcaatggggagcagctgtaaatacagaggaggctttgctcactcccccgccactcacctcctgctgtgccagcccagttcttaacaggccatggactagtacc

SEQ ID NO: 9207 - DNA, 591 bp, Homo sapiens
atgcaatgggatattaatatattttggagtgaagattattgctacaagatgtatcaattttgggtctggcagctgaaagcagtgtttcatgagttacaagtgttaggttttaaagttaatagtgaaagatatcagcataataatgataatctgtacctgtgattgtagatataatgagtttaacccaataggaaagacataataatatcaaagcataaataaaatattaagcatacgttaaagaaaaaaatctgagtaagtctaaagttggcatataacttttgaagagaattaacaaacattgaataatcagatcaagaagagaaatcaaaactagcaacacatattacactacagatcctccagatctaactattataagatggtaacatataaaactttgtaggaataaatttgcgaacttaggtgaaatatatataaatatttgggaaagagaaacacacttaccaaagctcaaatgaggaaatatagaaaccaatcatttttatacattgacaaaataattgagcccacatattacaacttcagaatgaacatgataccataacgtggcagataaaaaaaaaaaaa

SEQ ID NO: 9208 - DNA, 637 bp, Homo sapiens
agtgtccatctcggctaactgcaaccttttcctcctgggttcaagtgagtctcctgcctcagcctctggaatagctggctttattggcacccacgaccacgcccagctaatttttgtatttttagtagagaggaggtttcacgttggtcaggctggtctcgaacttctgacctcaagcaatccacccaccatccatcccaaagtgctgggattacaggcataagccactgcgcccggcctattgtgacttacttatctgtatcggtcagggtccagtcagtagacaaaaaccacatactaatttgaaagggaaagtttagtataaagaattactggtcgggttccgtggctcaggcctgtaatcctagcactttgggaggccagggcgggcggatcacctgaggtcagaagtttaagatcagcctagccaacatggtgaaaccccgtctctactaaaatacaaaaattagccgggcatgatggcgggtgcctgtaatcccagctactctgtggaggctgagacgggagaatcgcttgaacctgggagacagtgtttgcagtgagccgagatcgcgccacttactccagcctgggggacagagcgagactccgtatcaaaaaaaaaaaaaaaaaaaaa

SEQ ID NO: 9209 - DNA, 636 bp, Homo sapiens; identical to SEQ ID NO: 3974
  misc_feature (128)..(128): n is a, c, g, or t

SEQ ID NO: 9210 - DNA, 745 bp, Homo sapiens
cgaccaggggcggagccggaggcagagtcgcacaagacccgcaccagcacaggacgagaggatcctgccctgggcagacggggcacggcgagagcctaagaacattcaatgccctgaaaatgtccgaagtggaatctcctccgaaatgaatgaacatactcaccctagttagcacgcatgggcgcctactgcatactggctccgcgccaagtgctttacctgcagctcagatagcctcgccaaggcccggagaggggcaggaccctgcccaaagtcacacagccagaagcggtggggacaggacacgaatgaagcctccttcagtggctctgtggtgcggccctctcctggactccctgcttagcttggcttcccctctgcctgcaggtcctgccagataagctgtaggggctcaggccaccctccctgccacgtggagacgcagaggccgaacccaaactggggccacctctgtaccctcacttcagggcacctgagccaccctcagcaggagctggggtggcccctgagctccaacggccataacagctctgactcccacgtgaggccacctttgggtgcaccccagtgggtgtgtgtgtgtgtgtgagggttggttgagttgcctagaacccctgccagggctgggggtgagaaggggagtcattactccccattacctagggcccctccaaaagagtccttttaaataaatgagctatttaggtgcaaaaaaaaaaaaaaa

SEQ ID NO: 9211 - DNA, 682 bp, Homo sapiens
aagtctcagcatcctcatgtctatagtcctgtaatacagggtaatgctagaatgatggcaccaccaacacacgcccagcctggtttagtatcttcttcagcaactcagtacggggctcatgagcagacgcatgcgatgtatgtttccacgggctcccttgctcagcagtatgcgcaccctaacgctaccctgcacccacatactccacaccctcagccttcagctacccccactggacagcagcaaagccaacatggtggaagtcatcctgcacccagtcctgttcagcaccatcagcaccaggccgcccaggctctccatctggccagtccacagcagcagtcagccatttaccacgcggggcttgcgccaactccaccctccatgacacctgcctccaacacgcagtcgccacagaatagtttcccagcagcacaacagactgtctttacgatccatccttctcacgttcagccggcgtataccaacccaccccacatggcccacgtacctcaggtaataccagctttagccaactttctgtgaaggccaagtagaatgtgaaggttatcagtaagcagctagaggctctcccagctaggaaaccctgtgtgtcatgccatttgcctgtctccctttccctctcaaatacacgtgatctggccctaaaaaaaaaaaaaaa

SEQ ID NO: 9212 - DNA, 739 bp, Homo sapiens
  misc_feature (503)..(503): n is a, c, g, or t
tccctgggcgttatctgaattggcgagccaccgtggatcagactgcttgcactcagggctggccagtgtgtcctgtaagacttcttgcagtccttctgctgcttttttgggatggggtattttgttcatttgtttttgacctgttttgattttggtcccacagagcaggggatgtagtttgtacccaccatggcgcagacttccaaataaatagtactggtcatttctctctgcactatttctgcgcgctgtcttctgagctttcttcctcaccagtgggctgtgcttgttccatttctgtacacccgttattttataccgtttttcttcaacaatggcgaaattgactgtagtgctgaagccaaaagtatccctttccctccttattcctcaccccaagaacattctagatcacatgggtgcttgtgccttccgattttcttgcatttgtttttttcctgacctgaagttgttgttaccaaaatcagtcagactttgtgggnctgaaggacacggtgcagcagagggtgtccctgtgagagttctgcagagtgctgggcatgtgcctggaactaccgagtaggagccatttctttgtacccctgcctaatccattcctctccttccaagtccattgttgcaagcaatattcttctcaatttttatatgtttactttaaatcaaagttagtctatttgtataaaatttttaaaaaatctaaaagaaaaaaaaaaaaaaa

SEQ ID NO: 9213 - DNA, 757 bp, Homo sapiens
aaacctccacacagaatcgggggactggaccacccaaactgggcagagtacacaggctgcccaccgtagccatcacatgctcctttccactgttaagccgtagcctcttctgttaataacacacagagagctctgcccagcacctgagtaggcccttgacacttgtgtgccctgggaagccttctggggcgaattacggagggttctggaaggaactttcggctataattccgccaaagtggcttcaaggccccctaaccgctgggcttcgggccgtgttggtggcctctgaagggaaccagccgggcccacccggccccagtacttggttccagccttttccaaccacctaattccccttggaccctactgcccatcttcctcacagccctcagatatcaacgggcacaaataagaccaactcaatttccacttgaatttacaaccaaaagcctgctgagttgattacagctgggccaatacagtacgaggcaataacaaattagtgtgggttgattctggaattggaaaagcttttgcttgtatggatacagcaaatccagatgtctctgaacaaagcaacaatttaaagcaacgacattttctgtcctttaagcacttaaaatcaggtgtggtgtgttttcaaaggcagaagtctgcattttgagcaaaaggtggcttcccagctctaacaaggtaactggttagcatgacattaaagcttgggcaaggcttcaaaaaaaaaaaaaaaaaaaaa

SEQ ID NO: 9214 - DNA, 750 bp, Homo sapiens
tcacagatttggtagaataacgggagtccaaagagttctctaaccatccattctgcaggctcctgcattgtcttggtttgattaggattgccaggaagtaaaatagccactatagctacttcctttttcaagtcattcaagttaagcttaatgtagaaaaacttcgtgagatttcattaaaattcttccctactctccaattggagtataataaatccaatcaagataggctctggattttgctgttagtactccaatgaaggcagaaatggggacatagcaaactacagcaaggcttattttataccagtacagagccttgcttataacagtggaggtatgtagctatttagtcttgggctatctattactctcagtctgagacccagttatacaacccagttgtataactcaatggattaatatttccaaattaaataaaactgaattgggtacagtattgtgctcctgtagtcctggctacttgggaggctaaggcaggaggattgcttgagcccaggagtttgaggctgcagtgtgctacatttgtgcttgtgaatagacactgcactctagcctgggcaacatagcaagacctagtctcaaaaaataaaaataaagtctaggcgtggtggctcacgcctgtaatcccagcactttgggaggcaggtggatcacttgagatcaggcgttcaagccagtctggccaacatagtgaaaccccatctctacttaaaaaaaaaaaaaaaa

SEQ ID NO: 9215 - DNA, 725 bp, Homo sapiens
agctcatcaggtgaagaaaatgggttttaaaaacacagggcccaccaatcgagaaagcccagggacgcttctccacaggactcacttagcacgagaaatcactcagagcaactggacgcacacagtatttgtcaaatttttctttttcatttagcagaaggtaaggtaaaggactacaactgaagttaataaatgacactctagccattttgatcatttgtcactataaatgatagacatttaagctagttccatctggggaagtgaaacagaatcatgttcatataataagccagacgaaccaaattcagtggaatacgtgcacccaaaactggaccagacttgtacttaatgcagcctgcaaatccccaagagtccacgacagaatacaagaacagtaacactggtttatctcaactcatcttagctccctcacaaacttgccaataatgacctttcaagaactgcaccgttggtcctcatctgggcaatcccgtggcttagaaaaactgaataaagtgcttcttcgaaaaataaaacaatgcggggaggggggagtagtaacaaaaaaaaaggcacactggtttttactgtactgaagcaataaattctccaactaacttcattaatgagtatcagcaaagaatgaacaccaaaataccgctcaatccaactttcatcgtgaattcttgaattcacagtaggatcattaaatgtgacggtat

SEQ ID NO: 9216 - DNA, 131 bp, Homo sapiens; identical to SEQ ID NO: 3981

SEQ ID NO: 9217 - DNA, 254 bp, Homo sapiens
ctgttttgttttgtttttgagacatcgagtctcactctgttgtccaggttggagtgcagcggcgcgatctcatgctcactgcagcctctgcttcccgggttcggacgattcccctgccccagctacttgggaggctgaagcaggagaattgcttgaacccaggaggcggaggttgcagtgagccgagatcgcgccattgcactccagcctgggcaacaagtcaaaaaaaaaaaaaaaaaaaaaaaaaaaaaaaa

SEQ ID NO: 9218 - DNA, 735 bp, Homo sapiens
ctcctaacaagcatgggtcaccaacgaccaccttcagctacagtgacctgtaagtggcagtttagaaggatgtccggacattaaaaagtagcctatcatcagattccagagctgacagctgtgtttttctgtcagattttgattgttttggccttgcttgggaaaacctgcaggagtattgtatttttggcattgtagagcatttgagtagttggttcctttaaaaaggctttgaatactgtcctaaaaactcatccctaccactcacaagaacccaagttttacctggctaatagtactaaaaaggaaaggtctgagacctctacagtagctaaaactcagattcaagtaggaagtgatggcagagtaagtgaaagagctgaataaaatagagtaagttgaacttgtaaacctttagacactgaattaaaactgagggatcaaaagtaactccatgttgaagttcccctggaagacaagaatgtacactgctctgtgaaataaacctgtaaaaaagcagacatcctgttagctgcaggttgataaacaaacgggagaagtacttaacagcaaagacagcttccatacctgttcagcaagctacactacatccacagcaaaagcatgatgaaatcaaggccttgtgctgtgtcactcaaacaaccactccagaaccctgatgcctttcttggggttactgttaatgcaaaaaaaaaaaaaaaaaaaaaaaaaaaa

SEQ ID NO: 9219 - DNA, 723 bp, Homo sapiens
  misc_feature (96)..(96): n is a, c, g, or t
ccaattcctggaaccccaaagggataattcatcaacagcaatgctgctttaaaagaaatgctaaggaaagttatttaaacagaaataagtgatacncagagagaaacttgggaacttccatgaaggaaaggaaagcaacgaaaataataaatatctggataaatataataaattgttttttctcctcttaagttcattaagatatgtataatggtagaaataaaaagttaacaatattgtctgttggggtttccaatgtgtataggtcggaaacaactaataatatgaaggagaagactttaaagagaaccaaatgtctgtaaggtttataagttacccatgaagtgataaaattttaattctagctgggtgcggtggctcacgcctgtaaacccagcattttgggaggctgaggcagggggatcacctgaggtcaggagtttgagaacagcctcaccaacatggagagacctccctctctactaaaaatacaaaattaggtagtcgtggtggcgtgtgcctgaaatcccagctactcaggagaatcggttgaacctgggaggcagaggttgcaatgagccgagatggcaccactgcactccagcctgggcaataagagcaaaactccgtctcaaaaaaaaaaaaaattaattctaagtagactttgaaaaatgaagtacatatactgaaatctctagaacaacatcaaaaaaaaaaaaaaaa

SEQ ID NO: 9220 - DNA, 807 bp, Homo sapiens
  misc_feature (277)..(277): n is a, c, g, or t
  misc_feature (342)..(342): n is a, c, g, or t
ctgggttcaacccattgtcccgcctcagcctctcgagtaagctgggactcaccagaagcccacttaaacacattttgtaactggtataaggtgacaaatccagtgatggatcaccaaatatccacgtattctataatattttggctaccacaaataaatagtttttctcttccacaactcgtgtttaatatagggaagtgcacgtgggccctcgagaaataataccctcgtgttttccgaaataagctcaaactcttataaaaaaaatagggtgttnttaagtggcgcacatagggtgtaactcgaaatattccacgagctcgtggtgggctctctcgtgancacgcacataatatcactatctctagagttcactaggaatgtaaagattggttaagtgtcctcgggaaaagggaaagccatttccttcccaaaaccactctgttacatttaccgaataataggacctatttttcctaatttttaaggtaaccaatgggttctgaagcttgtccaccagtcaaccatatgcattgggcattctacatactggctaaggtctagaaagttttcaaacttaagaatagttaaaaaaaaaaactttgaaaagtaaatttgacaatgggtgattacaaaacgaaaattgagatcaaaataacctcttttcatcttatagggaatcacaatccctagtgtataaaatgctcatcatctttgaaattcagctaagattcattttttcatcttatttgagccaaaggaatataaataaacattacataatctgttaaaaaaaaaaaaaaaaaa

SEQ ID NO: 9221 - DNA, 678 bp, Homo sapiens
  misc_feature (489)..(489): n is a, c, g, or t
agctccttcagtcacagggactggcaaatagaggatcaaatgagctgttcctgtactcgcttaacaaggagttggatgctcgcaggtgcccaggggcactcccatcatgcccaggtactgctgcagtgccatctttgccttgtcacaaaggtttgaatctggtgactgactcagtttgtgtagaatatctacgatgcccatgtctcgtaatttatcctggcgttcttgtgaaccttcctcttcattccatatgaggtttgatatacaaaacatggctgcaagctgcagtttaacatgtgaatggcccatgtaatacttgattttctgtaggatatcatcattggtcataataagatcttttgctgttgtcccatccgctatgttggctaagatgcacagtgtctgctctttgacctcaatgttatgttccccttctagaataagagtgacggcttgcataatttgctttccatgagtactcattatttnatctatatgaggacgagtggagaggagatttctaagaagtcccaatgtcttcatcagcacattcaaatctgaatctgataataaccggaatagctgttcagtactcaagcttcgtaaaatatctgcttttatttttttgttcagcctgaaatgccatattcattaaagcccaaattccattcactcgta

SEQ ID NO: 9222 - DNA, 589 bp, Homo sapiens
ctacaaataggcagataaacaagaaagcctttgcaatgaagtacaggcaatgaagactttgaagtgctcatagaagaaaatccaaactcccaagcaaagtaagcaaggctggcttaccacttccctcctcacccagtgtttactccaacccagaccatccctggcctcctgccctctcctgcctctgtgtctctgctcacctcatttcctccaccacgaaggctgtgcctctttctccctaacatccggccaaaacaaccttattccttacatctggcaaacccagtactaaagtcgctctcatgggtacaaaatagtagttagaaagaataaataagacctactatttgaaagcacaacagggtaactgtcatcaataataacttaattgaacaatttaaaataaaaagtctaattgcgttgtttgtaactcaaaggatggatgcttgagaagatggatattccattctccacgatgcagcgtatttcacactgcatgcccatatcaaaacatctaatgtgctccataaatatatacaactactatgtacctacaaaaattaaaaatacaaaaaaaaaaaaaaaaaaa

SEQ ID NO: 9223 - DNA, 586 bp, Homo sapiens; identical to SEQ ID NO: 3988

SEQ ID NO: 9224 - DNA, 591 bp, Homo sapiens
ccaatatatgattgatttcagaaaccgagatataaaacagcagatatcaatctcgcttaggtaaaattcttttcttaaaattcacacgtcaatagagataggtctccagaggatcttcagtaaaaaatattaatggtaggatttcagaaaaattatttctgaatttgaaaaaactttttcgagatagagtctcactgtgttacccaggctagactacagtggcacaaacatggctcaccgcagcctcgacctcttggactcaagctatcctcccacctcagcctctcatgtagctgggatcacaggcatgcaccaccacggccagctaatttttttactttttgtacaaatggggttttgccacgttgcccaggctagtcttgaactcctgggcctaagtgatccacctgccttggcctctcaaactgctgggattacaggcatgagccaccgcaccaggctcaaatgaacttctaaaatcactttgcctgggatatgagccggtggccgtgttagtgtttcaatgaagtgattttattttaggtcaatcttttgtacacactttatagtccataaaaaaaaaaaaaaaaa

SEQ ID NO: 9225 - DNA, 570 bp, Homo sapiens
ctgcctgtcctgtatgggcccgggtgcccgagaacagacagcaagcctcaggcgccgggtcctttgagctttcttgatttcctcagagagcgcctccttcagctctgcgtaggcctggtccaggctgtcgttaatgatgaccacatcaaacaggccgggctccttgctgctctccatgtcggcctgggcagcagccagccgcttcaccaggctctcctcggtttcagtgttgcgctgccgcagccgctgctccagcacgtgcagtgaaggcggctgcacagagatgtagatgggccgcagatcggtggccttgatgttccgcacaccctgcaggtccacgtccagcacacagatgcggttcatggcctgcacggcctgcaccgccaccttgctcgtgccatacaggttccccgagaactcggcatgctcgatgaagtcgccggctgctatgtcacgctgcatcacctccctggttacaaagtagtaatctttgccgttctcctcgccgggcctcgggttcctcgtggtatgggacacgctgaagccaaagatgccgctgtgctcctggag

SEQ ID NO: 9226 - DNA, 662 bp, Homo sapiens
  misc_feature (3)..(3): n is a, c, g, or t
ccnttgccactcaccaggggctcctcctgactgtgaattctctgatgtcgattaaggtgagagctgcgcctaaaattttttccacgatggatacatagataaggtttctctccagtatgaattctgagatgttccaaaaggcctgcattctggctaaagactttgccacactcattgcactgataaggcttctcaccaagatggattttctgatgtctgacgaggtgtgaactcctctgaaaggctttcccacactcatgacactgatgacctttctctctagagaggactttcttatgtcctgtaagactggaactctgacacacatcagactcgcagagtttctttcccgtgtgtgtactcgcatgttcaatcaggtccaagtgctggatgaatctctgctcacgttctgagcatttatactcaatcttctctttgggcttggcctgatgcctttccaagttagagccctcattatgagcctccatgggttcagatattttcccagatgactctactcttccacaagagtctgttactacaataagcttcccattctcaatccttgtctcctcacctgcaatattaaatatataccaccaattacttgtcttttgatgcttggggaaaggaatctgcaactaaaaggaaaaaaaaaaaaa

SEQ ID NO: 9227 - DNA, 722 bp, Homo sapiens
acatagctttcttctatggatctcctggtagctgtagctgagtactggttcccgatcccagtttgcgtttgctgttgtgtttgttgtgtgttgtgtcgtgtatccgaacctgttgtcttcccgtagtcacatcttgattgttgttttttgttgttgtgtggttgttgctgtgatcgcataccgtacgtcatatgctgaggaggcaagcagttgatgactgactgtatttgttcgactcgcacttgactagtaggtagattcattcttcgtaattagtccgcctttcttatatgaatcatcatattaatcatcatgttttccgaccattattcatgcccctccccttttcttaataaaaaatttattgtgtaaattacttcgtatttaaagagtatgtgaggatacacatcacatatcacttttatactagttctacatttacctgctcagatgatagggtaaaatgataatctctatatagtctatcttttggatttgagttacttagggaaacatgaatcatttataacttcatgaaactgttttagctattccttctagaaggtgataagtatgttataaagcaaacaacactataaagaaatacttattaaaaccacataccaagcactattatattaaaagttgtttcgatatttatgtttcagattacatctttaaataataacctgaaacctttcagcttatcaaaaaaaaaaaaa

SEQ ID NO: 9228 - DNA, 744 bp, Homo sapiens
  misc_feature (315)..(315): n is a, c, g, or t
tctggggccctcggaagaaggaaccacatgcacatagctcagcccagatacttacgacttccctcaccaagagcacagctttgtcgtcagggatggggtgctccgagggaccccactcacaacaacattgctgagggggctcttccggaagcaggagagctggggctcctcggggggaactgaaaggaaagcattgcaggtgtcagcaggcgggcggggatcctggggcgcactgacctcgcagacagggcagcctcccttgaggggagcacgtggctgggcccctcggccccagccctggagctagtcaggacnctggccacactcagccacacatgaatggaatcgcagctgggaaattaaaggacaccaaagtcctcctttcagtctgagacacggatccgggacaggggaagggaagaacctcaggaccaacttgtctgaaggggagagaggatgatcgaaaaaaagggctttggagtcacacagacctggctgtgcggccttgggcaagtcctagctgctcttcagtttcctcatgtataaaataaactgatgataatgtaatgatgatggaaatgatgataagcctgctttccctgacaaggctgctgaaggattacaagagatacaaggaagaaagtgccttggcatagggctcgacacacagggcactggttccaggaagtctttatctaggtatgagggagctaagaacttgctaattctaaaaaaaaaaaaaaa

SEQ ID NO: 9229 - DNA, 751 bp, Homo sapiens; identical to SEQ ID NO: 3994
  misc_feature (56)..(56): n is a, c, g, or t
  misc_feature (105)..(105): n is a, c, g, or t

SEQ ID NO: 9230 - DNA, 335 bp, Homo sapiens
ctctaccaaccccatgaattcctgttctagatctcagacatgctttctttacgtattcctttgcacctttaatcccagcctctcttcgctttcacttggactgagcctgacacccatcaagctcagcaaattacctaggctgtactgccacaaagcttcacagacagcccccattacttcaatcaagcccaaatttcttcctcatctgttacctatctcggcataattctcataaaaacacacgtgctctccctgccaatcgtgtccaactgatctctcaaaccccaacaccctcaaaaaacaaaaaaaaaaacaaaacaaaaaaaaaaaaaaaa

SEQ ID NO: 9231 - DNA, 684 bp, Homo sapiens
gcaggacctagcagaactaacagatgcctgaatgcaagcagcaggtgtttagaccacccaccccgacagaaacctcagctctcagcccctccctgcctgctcctccctgtccacctcagaataatagactccacacagtcagcaatgtccagacaagagctgagctcaagttagcctagtctaaggatgccctccaggcttgcaaagagaaagaggacatgatgtgtatttgggctccacactggcagaggagtgggacattgcaggtccgcaaaggctgatgacatcacaaagacagagagggccaaatttactaaaaacacaaaggccagtgggaacgaattcaaaagagaacctgggccgggcgcggtggctcacgcctgtgaccccagcactttgggagaccgaggagggagaatcacttgaggtccggagtttgagaccagcctggccaacatagtgaaaccttgactctactacaaatacaaaaattagctgggcatggtggtgggcacctgtatgccagctactcaggaagctgaggtaggataattgcttcaacccaggagaaagaggttgtggtgagtcgggatcccgtcattgtactccagcctgggtaacagagtgagattccgtctaaaaaaaaaaaaaaaccaaccaaccaaacaacaaaaaaaaaaaaaa

SEQ ID NO: 9232 - DNA, 500 bp, Homo sapiens
  misc_feature (121)..(121): n is a, c, g, or t
tggttttgaatcgtccttataacagcttatgaaatcaatcatatatgcacaattcagtatataagtgtgctattgaatggcttttagtaatctacatgggtaacgatgaccacaccaattntagaacatggtcattaccctgagaagaaaccttacccctctgagccgctgctctccctcgatcgctccatctccctaaccctgggaaaccacaaatctactttgtctccataagcctgtttttttttaaaaaaggaattctataaatgtttagcaaaataaattatttttaaaagtacttatagtcctagcatagtactaagttaattttcctaaattgacttcatttttaactttctatatgaaattcaatacttagtacatcttcctcttttacgtgaatgactatatggatttattcttttatataatttcctttattctggtaagataaaaggtagggtttctagaaaattattattttatttatttattatttt

SEQ ID NO: 9233 - DNA, 677 bp, Homo sapiens
caaggtgttttgtgagttaaggttgcaagctttcgttatctgtgagaatcctgtgggaccttatttgaggatgtgttcttaccaagaggcttcttcttttcttctaccaggacctcagcaatgacatctgggaatccattttcatgttaatttatctgcttggggtttacctgcccttgtagtagtgtaaatctgtatctcaaacccacatgagggcaggtctgtggttataaattctcaggggaaatttttttcccttcacccagagctcagcctgagatagaggaggttccttgttgcttacttctgtgggtggattttttttttttccagtccacctgttttcagaggatatagacctctagggtcctggttcatcataagaatctcagttttatcaccctaccttgtggccactccatgtgtcatttacacacaagaccctttgttacttagattggcagtgacatttagagttacaaaagtttgagtccttgttttccagatttctctttttgttgggactttgagggtttcacttttcattcctgagagtttatacatttaaaaaattgttggttatattttatgcagcatttccaggtgcttggcggcaggagtatttcaagatatttagtccacttttagccaaaaaaaaaaaaaaaaaaaaaaaaaaa

SEQ ID NO: 9234 - DNA, 693 bp, Homo sapiens
gtaccaggaatcggagtcaacggaagcgtttccccaagttaaatgccctatgagatgcacatatgtaacatctcagaagggtgatgtaactttgagaagaaatgtttctagatagacattttcggaagtgctgagagttcaaagaatcaatagggaactagattcttttttttttttcctttttttttgagacagagtctcactctgctgcccaggctggagtgcagtggcatgacctcagctcactgtaacctctgcctcctgggttcaagcgattctcctgcctcagcctcccaagtagctgggattacaggcatccaccaccaaacccggctaattttttgtatttttagtagagacggggtatcaccattttggccagggtggtcttgaacgcctgacctaaggtgatccacccacctttgcctcccaaagtgctaggattacagctgtgagccaccgcacccagccaggtagattctttactactggatttgctattttacttcagcatgtgtgcacactttaccgtagctaaacccagctgtggctggtaaacaactgcccatcagcccaactggatatcggagacgagtcatgagacctaaggagaaagagaaatcaatatttcaagcctagttgctaatatagaagaaagaatgaaatattctagaagacagtaccattctttaa

SEQ ID NO: 9235 - DNA, 779 bp, Homo sapiens; identical to SEQ ID NO: 4000

SEQ ID NO: 9236 - DNA, 715 bp, Homo sapiens
gtcggccttgcaatgttgtgagtcccagattgaccagtagcaagatttgatactttggtgatgcaaatttccctagatcttctattaatgacagtaacagcgcttcagagcttttctatgcattctctcatttgatgagcctgctttcaggtggagaaattgtaccattgctgaaaatagcttcgctgacagttagggcaagcttcattggtagcaagtttctatctggaaagatgtaggagaggaacactgactctggaagcagacgtgacctagttttgaaacctgggataaccacttcctatctgtatgacccgagcaagttactttccttctcagaactcctgttccacctctgtgcaatatggacagtactcctactttgcaaagttgttaaagatgggaactccagagtgcccagggaattgtctactcatcattgcaggcgtttaataacgtgtagccatttctggaatgggaggcaagaggatcgagttaccagtgaaattagtttggtattttcctagcttcctggttcccagatcctcaagaggctgccataatctctgtgaatttgtcctaaaatgacctgtataaataactgctttagacactggcttgtctttggtatgaaggaaaacattttagaatttttttggctggaggtcagtagctttcatccagaaaagaataatcaacggaaaaaaaaaaaaaa

SEQ ID NO: 9237 - DNA, 681 bp, Homo sapiens
cgcagttccagattacaaaccgggtccccaccctccggccgacacgttccactcctcattcttgagggattagggatggaggtcatgcttctgtatctacttcatgctgaccagaggcactgagtcccctaaagttagaggaatgaaactcttgggctgctgagttcaaatgagttttggggtcacccagaattgcttgaagggctggtattgttgtggtaatacaagctgaaggtggaagtgttggagccgggaggacaaacagctcaccatcaatttaaataaacaggactgaaaagtaccaggagaacagtggccacgaggggccccaacagaggaagaaaccaggtgaggtgcggtatagtggactcgactgctttctaaatctcagtggttggccaggcactgtggctcatgcctgtaatcttagcaaaagggaggccgaggcaggcgggtcacctgagctcaggagttggagaccagcctggccaacatggtgaagtcccatctctactaaaaatacaaaaattagccaggcatggtggcatgtgctgtagtcccagctaatcgggaggctgaggcaggagaattgcttgaacccgggaggcggaggttgcagtgagcctccagcctgggtgacagagcgagactctgtctctaaaaaaaaaaaaaaaaaaaaaa

SEQ ID NO: 9238 - DNA, 798 bp, Homo sapiens
tcagagaaatcttgttctgggaaaattgctgatagctcaatatcccatcagcgcatcaggtgcataaggtcattagttctagtcacccatatatgatatagatattatgatctccattttacaataaggacacttagcttattcaacattgcaaagttgtctagctagaatgtcataaatctaggccctgatccgtctcctagttcaagtccatttcccactgacaggtgaacattgactggtaagggaacatgtccttcatctttgctaccttacctgtactctactcggcagtgcaagggcaagctccgttgcctaatgttatctgacattaacaaaagatagttcactgcctaacaaacaagatagaattaattgattgatcagtcagacagcagattaacttacaaccaacctccaattgatgtgatctttatcatcactaagacaacttaaaactcaccttctacttatctattttactcgacattttagatactatgtatggtaaataatctgcttaattatagacttctgaaatctcaccttccagtctttgttttgcaggtatagaatatctttttaatctaacattctcaagggagtgtgtttccagcaaagtttgagaaagggctgattttctatccatatgaaacagaattgtttactctccaaattcagtaactatatcacttcataggcctctttgcatcagattttcacagatagacttttgttcacttaatggggaaacaggaaattagtctgtactagaaaatgggaaaaaaaaaaaaaaaa

SEQ ID NO: 9239 - DNA, 699 bp, Homo sapiens
acttgaaacccccagaacccaaagccgtggataagaaggggactactataatggcttgtcatccatgaataattaagaagcatgtgagaatcaatgtttaaaatagaaacctgtattcatacctaaatatgagacaactcgatatcccaaggtcaaactgtaaatgagatatatatgaggtgcaaatacttctaacagtaataatacatgagatttttataattgagaaatttagtttctcaggtggtaagaaaacagccagttgagaattctaaggcatgaagctaagaggtgacttgtgttgaccccaagcaactccatgacgctgggatttctaagtccttagaaattcctggctggaccttgtcagaatgtttaaaaaactattctcctaaaagcctccatctgccagcatgttcaaagattatagaatgtggtctggctgcttctcagcgctcgctctattagggggcagcctccccaccagtacaccaggacatttgagaaggctggccctccaagctgcacctgggccatatactcaactggccttccttatctcctcaaaatgagttcgcctgtggagaggttactttgataatgggaagagaagtaagatatggtacctgcttctctgaagagttggtattcaagttgaaataaattgtttcatttttctccaaaaaaaaaaaaaaaaaa

SEQ ID NO: 9240 - DNA, 676 bp, Homo sapiens
acgttatacagacaatgtcatgcaaaaacagaagcaccaacagtggataaagaaatgtgagatacatacacacacacacacacacacacacacacacacacacaccatggaatactactgagccataaaaaggaatgaaataatggcatttgtagcaacctggatggagttggagaccattattctaaatgaagtaactcggaaatggaaaaccaaaagtcacatgttttcatttataagtggaagctaagctatgaggacccaaacacctaagaataaaataatggattctggggactcagggtgaagcgtgggaggggggtaagggataaaagactacaaatagggtgcagtgtacactgctcaggtgtaccaaaatctcagaatcaccactgaagaacttttccatgcaaccaaacaccacctgttccccaaaaaaaactattgaaattaattaaataaataaataaataaatacctatagaagccctaaaaactaaaaggttacaagactactacttcccatatatacaatgttaacacataaaatcggtataaagaaattaataaaggtaatttttctcagaatgaccattttgataagttttttcatatatcaaattatttccaaaatatttttggtaccactgcttgagtacaggcttaatctgcctac

SEQ ID NO: 9241 - DNA, 315 bp, Homo sapiens
ctctcctgtgagcaccctctcgcagcaccactatattatcatctctctctatcacagagacacggtgttctccgagtaagtgaaactcagttttccaaccgagttactttaattaccgcgcattgagtagaccaagtgaggtcccgccccctaggaggagctaacaccgcggaccgaatcaggcggatggtcgttaacaaatgaacccttaatcttttcagaggaggaaacatacacaaaggcccaatcagaagccgcgatttcaggcgtccggagggggcggggctgggcaagcacctcccacttcccaacctc

SEQ ID NO: 9242 - DNA, 321 bp, Homo sapiens
gcggacaccattaaatagtgcactgtttcgccaagggttgtatttagtaagatttgtagactctggtttttcttttgaccaccagctgcaaggccaacagctgtgcaaagccacaagttatgctaagtcagcagttatgctatagattacatgacctgtgactgtatcattaactgcttttgttttgcttctgtaagtttgcctataaaaaccacactcagtctttgttcaatggtcagcttttcagatacaaatccactgagccggtgtacatctaaataaatcctcctgtttcccgtgaaaaaaaaaaaaaaaaaaaaa

SEQ ID NO: 9243 - DNA, 667 bp, Homo sapiens
tataatccgaagactgatcttaaagcttacacactcaaccattcttatatgtgctttgctactattccaagccaagtgtttcttcaagattagtattgtttacccccttacattccacattccaatcatttgcactatattttcgacctctatttaagtattctttatctcacaaagagttactttaactttatattccctgtagcaacatctcttcctcattaaactgccaagctgctaagctgatgactgttttttctacatccttttcactcaactcaggcttccatcccaccccactccagtacaaatacatgtgtagatgattcaagactctgacccctgctacctctctaagcactgactctagccaggcccagactctcctaacactaaactgcttgtagatcttcagacatgcccataccctcgttcatgatactttcctctttttcaagactcaatgtaaaggtattctacactggacagatgacaaaaatgcccacttgaggcctctgtgcccctacaaaacccttgtacctggatcatatcacctgatggatttaactctctccctagtctaagtcttgatccctaatgcctgctgaagcacctggcacataacagatcttttaaaaatgttagttgaatgactggagagctgaac

SEQ ID NO: 9244 - DNA, 711 bp, Homo sapiens
tttttgagaggttaatagatgggtaacataatctggccatacagctaggtattcccattatgttaagcaggaaatataaaagcttgtaaataggttttaagaatctctaaacagtattattatacactttactactacaatgaattagacttaagtttaatgttttaccccatacctttaattctagtcttaaaagatcactatttgaggtacaatagaagtctctaatctacaagcacatttgccccatcttctattaataataagaacatttttactctgcatagccaaccttatatgttatattctggcagttttcatccacagaagcgttaaggataggaaactgtagtaatcccaaggaagcagcctgtttaacagtaaaagaatgcaattttagtacttttaacttagaaaggatagagaatttgaaacaataagaggtataaaaggagggagagagagaactcttatttatgctgagctttaatttcaagtctacatgtacctagtcacattactgccaatgttaccttcaggccatgtggaactaggtcaccctaatcattaaagaataaaagataaagtagtcaggtagcttgtaaacatcaaggagattttcaaaataatgatacagaccagccaaagttccaaagaaaatgtctaaattctaggtgatttcctcactgacatgttgatcttaagatttcc

SEQ ID NO: 9245 - DNA, 689 bp, Homo sapiens
ggaattagggccagactccagcctgtccagagcccagagttattgatgcaggaatgtctgcagtggagcacagtcaaggagtgcctacctcccaaggctcaccatgctcttctaggagactttagccttggcgttactgttggacttgggcagagcaaggtgatcttgcctgtgagatgagggcagcctctaatctgagcacacccctctctgttggcctcttctagggtcccagcttgaccatgccaacttgcagtacagcctcagatgctgaaccagcgtgctttcctaggagccctcatcatagctccttcaccagtagaccatgcctgaccattggagagctacagcagagtggcccctgccatgcacactaacctacctgcaccctctcccaaaggcaacttctcctgcaccattttgctggtacacactcgcccatggccaatccccagtgctttcccagtgtgtgtgtgcagggggatttctcctggctcaaagaatcctcctgcttcagcctcccaaattgctgggattgcaggtgtgagccactgtgcccagcctacatatccccggtcttgaccctttaccatattttgttttgttttgttttgagatggagtctcactctgttgcactccagcctggacgacagatcgagacaccatctcaaaaaaataaaaaaaaaa

SEQ ID NO: 9246 - DNA, 673 bp, Homo sapiens
ttccgagctacaccaggaaaaaggaaaaccaccattttagtaattaacataccacactcggccggccaccaataatatgaatcccagggagccggagtcccgatgcaggacaagagtcagacttttggtttcttcgccctgcaggtaacaaatgagatcaaactgttatttaccaacagggaatagatggtaggaattttccttctatgctaagtgtactcaaggactactcagctaatcattacaaatcctgttatctcttgggaagtttaaccaaggaaacttctggaacccaatctgaaagtgctgtcttgtgtttaagggcttataaacatttctagataccatctaacactggaatgaccacctaagaatgtctggagatgtccagacatgcccaatgaacattttctatgaatgacaccttggtctgcaaatgcatctttcttttgaccggcccatcgtacgcaggctgtctagacggctactttctgtttgtttctcaaccattctcaacagcagcattcatgtcatgtcatgaaaggttcaaatagcaattctttcggaagtgtgagtgcatgcatggcccatcaatagccatctctgtttgggagacttggggaaaaatagtgcatgaaaagtgagatgcaaacacacacagaaaaaaaaaaaa

SEQ ID NO: 9247 - DNA, 687 bp, Homo sapiens
tcaagctgttctgaagcaagtctagtttcaaggtctaaataccataagtactataccatgctttcagatctggtcttttttttaataagttaatgatgtgagatgagagatatttcatctttgatacagttatttgacagtgatgaatttaattcattctatcacatgtgaatgatacatttatattcagtatgtagtttaaaatttcataaaatgattaaagtccctgtcgttttaattataatatgcggagagcagccagaaaattatttgccaagaataatgtacaagtcaataaatttggtgagtactcctgacaacatataaataatgactttagaagtataactacctgtggttgaaaactaaataacaagagtccgtgtatgggtttttatgaactagctgatttcgttttctataggagctctttgtggttataatttgctttattaaattgaaaacacaataatgcaatgagattatattactagtgaatccatttcaacctagagtctgacttgaaataaaccagttctggtcacctccctacccctagaccttggtcactgtaaagggctttggatatcctgagccctttggatatccccgggatcatttaaaccagaaattatcaacacagatcttctcgcctacatggatagtccacactcaggaccacactgt

SEQ ID NO: 9248 - DNA, 688 bp, Homo sapiens
ttagacacgtgctgtacacccagcacacacacacatcacgcatacctgtagccatgtgtgtaacaccccacatggcacccacacccacatgcctgcagtacacagaactgtatgcatccatttgtgccaggctggggcccttgagtgataggaaaggggtctgtgatgggtagatagtgtgttggagacacggatttcttcctgaacaagtccctcccctacatggtggacatgggatgagacggccttcagttacttcctcttgacccccagggctgcctgccgcctcatgtaggacaggatgtccatcttgacgttgctgaccgtggtccggtggtgccagcgcatgatgggtataccatctggccccaccaggaacttctcaaagttccagcggatgtcgtgaaccttcatgggttcccagaagaggcggtcagatgtacccaggagctccgaggtgggaggacaggagttctttaggaaagtgtagaatattctgcgtctttctctcccttgacatcccccttttctccaaagagctggaaattagggacaaagcctccacctggtcggacatacttgagggtaggaaggatctctgagttctctcctggttcctgttttccaaattggttgcagggaaagcccagaatgaccagaccgaatggtgcaagctcttcctgtagtg

SEQ ID NO: 9249 - DNA, 86 bp, Homo sapiens
gcatagtcatgcccttgtccggctgggatctatttgatacataggtcgttgactccctcctagtagtgctatctaggtttgtctgg

SEQ ID NO: 9250 - DNA, 665 bp, Homo sapiens
  misc_feature (480)..(480): n is a, c, g, or t
  misc_feature (578)..(578): n is a, c, g, or t
gtcatctgttaatacgcatattcacatagcaagacatatttttttttgagacagagtctgctcttgttgctcagcatggcacggtctcgactcactgcaacctccacctcccaggttcaagtgattctcctgcctcagcctcccaagtagctggcattacaggcacccaccaacacacctggctaatttttgtattttcagtagagatggggttttgccatgtcggccagactggtctcaaactcttgacctcgtgatccccccacctcggcatcccaaagcgctgggattacaggcatgagcctccacacctggccaaacaaaattaaattagatatccatacatcttaaattggatttttaaaaaatgaggtacttacacactgtgcaataatatgcagccacagaaaagaatgaaataatgttttttgcagcagcatgaatgcagaagaagaccattactttaggcaaattaacacnagaacaggaaaatatcaacatgttctcatttatacgtgggagctaatcattgcatgtgcatggaaacaaagaaaaaaaaaaaaaaagggcggcctccnacttggagagacagatttgggccagactcctgtgtccttgcttggctgccttgcaataaatttttctctctacaaaaaaaaaaaaaa

SEQ ID NO: 9251 - DNA, 574 bp, Homo sapiens; identical to SEQ ID NO: 4016

SEQ ID NO: 9252 - DNA, 720 bp, Homo sapiens
  misc_feature (348)..(348): n is a, c, g, or t
tcaccaatcatcgggaacagggaattgtctctgaagcagcaacattgtaacattggtttcccgagatggattggttcagctctccttgcacagatgcgacacttatgggaaagcttgcgcagactgttgtcttgccagagacccctactgtgcctgggatggaaatgcatgctctcgatatgctcctacttctaaaaggagagctagacgccaagatgtaaaatatggcgacccaatcacccagtgctgggacatcgaagacagcattagtcatgaaactgctgatgaaaaggtgatttttggcattgaatttaactcaacctttctggaatgtatacctaaatcccnacaagcaactattaaatggtatatccagaggtcaggggatgagcatcgagaggagttgaagcccgatgaaagaatcatcaaaacggcaatatgggctactgattcgaagtttgcagaagaaggattctgggatgtattatctgcacagacccacggagcacacctttcactccaccacccactatatgagaaccgagaccttggaatgttccatttggaggaatgaacagatggaaaatacccagagggcagagcatgaggaggggaaggtcaaggatctattggctgagtcacggttgagatacaaagactacatccaaatccttagcagcccaaacttcagcctcgaccagtactgcgaacagatgtggc

SEQ ID NO: 9253 - DNA, 94 bp, Homo sapiens
ctaatggccagtggtttcatcaatcatgcctatttaatggaacctccataaaaacctgaaaggacagggttctaggagctcctgggtagctgaa

SEQ ID NO: 9254 - DNA, 635 bp, Homo sapiens
aggtctgtctccaccaatgtgtaaaggaacttaagtattggtttaatattagccccggatctccttttgaaggaatttaatattgtaagcccaggatgttccaaatctgacctataataagttaaagttagactgaaagtctaccttcgaaaccaagttatatgcagatattttaccgccttaccaaatcctagtgttatactagactaccctttaaaatcaagtttttatataaatgcccccatttgagatgccttattcctattactaatgatgtaagtacgaggattaatcccagagaactttcaactctttgcccttcctggcccttactggatccccaaagcctttaaggtacatgttcccaaaactttgaaaagctaaatgtttcccctgatcgctcattcttcttttatgattcataccttattccctataaagtaagaactttgttttcctcctatccaggcagctattttattaaatttttcacttagtctgagaaatagccagatagtctcatatttagggaaactttccccaataaaataaatgttattctctgataaagagctaaaaaaaaaaaaaaaaaaaaaaaaaaaaaaaaaaaaaaaaaaaaaaaaaaaaaaaaaaaa

SEQ ID NO: 9255 - DNA, 741 bp, Homo sapiens
gagggatacccgagacgtcccatcactccgaccggtgagtcatttgcatcactcgacctgttccagccccagaatgtggtaactctctaccaggagtgtcttcagagcgagcgtcttacagcgggggcacatctcccacttggagagagagatccagaaactgagagcagaaataacagcctccagcgagcacaagtgcaggtggagtcccagctctccagtgcccgcagagatgagcaccggctgcggcagcagcagcgggccctggaagagcagcacagcctgctccacgcacacagtgagcagctgcaggccctctatgagcagaagacacgtgagctgcaggagctggcccgcaagctgcaggagctggccgatgcctcagaaaacctccttaccgagaacacgtggctcaagatcctggtggcgaccatggagaggaaactggagggcagggatggagctgaaagcctggcggcccagagagaggtccaccccaagcagcctgagccctcagccaccccccagctccctggcagctcccctccacctgccaatgtcagcgccacactggtgtctgaaaggaataaggagaacaggacagactaactttttaaatgatatgaagaaatcagaggtgaaaattgtacattgggaatatatttatgcaaattttattgaaatttattgtaaataaagattttctcagtggtctagaaaatcagaaaaaaaaaaaaaaaa

SEQ ID NO: 9256 - DNA, 741 bp, Homo sapiens; identical to SEQ ID NO: 9255

SEQ ID NO: 9257 - DNA, 759 bp, Homo sapiens
gatttgaaatgtttactgacacttacatacttggaccaaaaagtttttctaatcccagcattaaagtgaaaccaatatttagaataagattgttggaataaaagttatagatagtcacttgttgctaataaaagacattccttggcaacagccacatccagctaacttttgcaagaattttttaagggattagatttaggggttaatgtttagaattatttttaaaatataaattatattttaggctgtatttttgtgatttttaagtgaaaaaaataaaatgtagttgtcttgtttattctatagatatcttaatgaccactgaacaaatgatcatattgccacatggtctatcaactatggttactatgatagtgaaataaagaggatagttttgcttgacacctaaatgatccaaacagttgtttttacatgacttaaatcatggctgtattatttcatttttaaagaaaataaagtataaaataatacatttaaaatacctgtcaaagttttaaaatataagatagaaccttctttttttgccttcttacacatgaatgtacttaaagtattgttatgtgatcttgggatacttatttatttttgaaatttttgtatatatagcatttctgaacttagcaaataatatgtgtaaaggaattaaccaaaaatgaaagaactggcattttcatatggatacatattttgcttaaactaaataaaataacttagatttatttaaaaaaaaaaaaaaaa

SEQ ID NO: 9258 - DNA, 761 bp, Homo sapiens
agatatcactgacaccagtctgaatcaagctgcccaggtcaatatctgccacccgtgtgcatatcacacagatatcaggtagtgatagacctagctttcataaatgccacagtttataaagctctctgtcatatgctattatggttaacccctcacataccctatgaagtaagagggccaattttactgatctgcctctgttagaggaagcatctgacaacctgatatattttaatgtaccctggtccacataccgatttaagtgctaggagcaagtctgggagctagttttctaactccttttatttacctgtgctgccttattatactacatggcagttgatgccattagatacccagacattaaaaaataaattgaagaaagaaataacatcctgccatggttccagcccttggcagtgatttttaagtggaggtttgtgttatgagaatttttgctttcaaatactgcatgcacctcctgtaaaaggttgaatgaaatgattttagttttggtaagtggcccatgcacgtttattatttatttatttaggtcttttttgctccagctcctttggctaaatgaagcactgctgtatttttattgcataccccatcattaaaagaaattgaaaagacgcttgttagttttaatatcgcatggatggaaatatatctggcacatttaggaacagttacattcctaatagtgcattttaagaagtagtctggttttgttcttgattaaaaaaaaaaaaaaa

SEQ ID NO: 9259 - DNA, 687 bp, Homo sapiens; identical to SEQ ID NO: 4024

SEQ ID NO: 9260 - DNA, 428 bp, Homo sapiens
  misc_feature (105)..(105): n is a, c, g, or t
accattggctcccccggtactggccagaaccccccagctagtttctccaatgctgaggtacttgtcccattcctgtcagaggcctcactgcccctctgtgccctnccctggttgccctggggcagatggtgagctctggttgccaaggagcccgcttgtcagttctgaaatgggtgcgtcatcagcctcgctccagcggcttcccacatccttgagtaaccaccacacaaaggtgctgggcatgagaccaagggtgcggcggagatcgaattagtaatacacactcggtgaccctccccagccaggtttcactgcgtgcttatgaccaacattcatcccttccttagcatctgtggtgtctttaagggccagtaaaaaggtaaaactgcagggagtcaggagggggaaactggcctggggtacagagt

SEQ ID NO: 9261 - DNA, 83 bp, Homo sapiens
ttgggaggtggaggcccagcatcccgcgcagatgacaccggttttcctagaagcccctcacccccactggcccactggtgggc

SEQ ID NO: 9262 - DNA, 104 bp, Homo sapiens
gcccatggcaccttcctcttcatgggctggagccgctttggggaggcccggctgggctgtgccccacgattccaggagttccgccgtgcctacgaggctgcccg

SEQ ID NO: 9263 - DNA, 660 bp, Homo sapiens
taggaagccgtccttgccccgccccctcctctgctcctgcagctgccctgcacagctctggcgtcccccgcatgcagccgcatcgggtctcagtttttttgtttgcgagcttgccctgtccctgcttgtagctcctgagccctcacatgttgtcacacacccagcagtctgcccaggagctgcttgttcctgactactgtctctccatgcctagggaagtctaagccctgggccttgccttcagggagttgacagtgtccttgaagtggtgaagtgcccaccacatgaacccaggagagacgccctagcagtctgccatggactctggcctgtccaagcctctgtgcacctgcagtctctttccactggcacttccctgctttgctaccatcgtggaagaatggaagggagggggagaaggtgggtgggctcagggagaacggccagagtggccagaagatgcagagagaagccccactgggatctgagtattcccccagggcactcagcccccgggatgaactagtgtttgtttgtatccttgcagttatgtgacttaaagtgactcagagatatctatgtatgcgagtgtactccgctggcccatgaagtaaatatatccatttgtggaaaaaaaaaaaaaaaataaaaaaaaaaaaa

SEQ ID NO: 9264 - DNA, 90 bp, Homo sapiens
cttgcactggtatgtgaactacatttcaataaagttgttatttaaaaaaagaaaatagcagactggacccagatggcccatggctgccta

SEQ ID NO: 9265 - DNA, 326 bp, Homo sapiens
tgatgtcctgagctcccgggtgtgtccgcggatgtccgatcccacctgtggggtccgctcactcctgcctctccggggggtccagggatggcctttgccccccagcccggcggccccgggggtcccagacttccccgttccccaggggcacccttgggtccagggggtccatctcgtccagtcagaccatccacacccggcagtcccgcagcccagcctctcctggtttccccggctttcctggggccccctttggtcccgggggcccaggcagacctggaggaccagcttctccgtcatgccgtcctgcccgggcttcccggcgg

SEQ ID NO: 9266 - DNA, 84 bp, Homo sapiens
agcctttgggggcatgtacaacctcaatctgaaggagcagtatctgtgtggctcaccagcaggcatgcttcgctttgtagacaa

SEQ ID NO: 9267 - DNA, 741 bp, Homo sapiens; identical to SEQ ID NO: 4032

SEQ ID NO: 9268 - DNA, 630 bp, Homo sapiens
tgcagtgagatcattggacactggacacactagttcccattttaattacttaaaacaccacgatgaaaagaaatacctgtgatttgctttctcggagcaaagtgacttgagcatctgaagattttggtttctgcagagggtgggaaaggttgaaccaatcccccatggataccaagttgaagaaatggagatgagcctctgaggaaacactacattccagtaatgaagaggaagaccctttccgcggaatggaaccctatcttgtccggagactttcatgtcgcaatattcagcttccccctctcgccttcagacagttggaacaagctgacttgaaaagtgaatcagagaacattcaacgaccaaccagcctccccctgaagattctgccgctgattgctatcacttctgcagaatccagtgggtgagtgccctcagatgtcatttccccattttatattttagatggtgattgttgtctgtggtcttttgagtttttgtggctcattgcttgatttgagtgggagaacaatggggtttctagagtcaaaaaaaaaaggatgaatttctcaggtgacatttctatatctgcaggagaagacattttagtgaaattgttttacatggaag

SEQ ID NO: 9269 - DNA, 602 bp, Homo sapiens
agccgcgcatgtggcatgcacctgtagtcccagctgcttgggagtttgagcatggagaatcgcttgtaacccaggagcgaagttgcagtgaaccgagatcgcactaactgcactccagtctgggcaacagagcagactccatctcatgttaaactaaagagactatctccaatccatctcggacatccagctaacactaagtcagtgatttgctggtgctctattctccctacatggtgatgtttaaccaaccatgttcacctcttttgtatattacagtgatttagtgtaaagtaccatgtccaaagggaaccttgtggtgagtaactatcagctttctcaggaactagtctggtaatgcaccacctagaacaagcactagagaagtgtaaaagatcaataaattggacccacagaaactatgcaacatggagaataagcacagatttggagagaagctactcagtgatccctgacccttcccattctgcctggacatcagtgaacggaaatgtgatgactctcacttcctgagatttgataaaacccatgacaattcctcatgccgagtcgaggacatcaaacatagctaaatcctatca

SEQ ID NO: 9270 - DNA, 571 bp, Homo sapiens
gaccctgtccagctcccctctttatgagactctgtctcatgggcctgtgcttgtcacgagaggtacagctgcccctcctgggccgcttggtgagaggtttggtttgatacctctgcctccctcctgtccagcatggattctggtgtggacacagtccttgtggaaggtccagtaccaccagagctgcccatccactcccaccccacactgtatctaatgtatcacattttctcatcgttgaacactttagccttaattgaaaatgagcacatagctggacaattgctagttgtatataaaatttaatctcaccgaatgtacagttttccaatttcacgtgtatattaaggaactgatgcatctgagcattctgaaagaaagaaaaagaagctactttagctgccaccccattctagaaaagtctcttattttcaagctgttctaaatagcttcgtctcagtttccccaaatggggtacccaggcccctcctctgtgtgccccagctgcatcagccagcttctaggtggctccttgttttctgccacctgacgacatttttcctcgattact

SEQ ID NO: 9271 - DNA, 679 bp, Homo sapiens; identical to SEQ ID NO: 4036

SEQ ID NO: 9272 - DNA, 1400 bp, Homo sapiens
cctcaggttatccacctgcctcagcctctcaaggtgctgggattacaaacccacaaggagtcccttgcgggaagactgccaatatgtctgttaggggatactttaagaacctgtaaaatcaacacaagttatttacttaaaagcacagcatacacaaccccattttggaaaaggagaaatagacaagaagaaatgggtaacaggcctcaagcaagtctgaaacccaagagagccaatgatggacattcagactcctgaataatttcctttgatgacatgtcctgcatcttctataaacaggcatgcactcataaaaaatgctgtaatcctgcagattgtactctagttagatctgcagaatgtggcactggatcatgctgtaacaataaaacttgtacgatccacgaaagaggccatgtctgcagaaaaagtgtagatatgtgtgattttccagaatattgcaatggaacatctgagttttgtgtacctgatgtgaaagctgctgatttagaatactgcagtaataagactagctattgctttaaaggagtatgcagagaaagggatagacagtgttcacagttatttggaaaatttgctaagtctgctaatcttctgtgcacagaagaagtgaattttcaaaatgacaaatttggaaactgtggttcccgttgtgatttttttgatatcctttgtggaaagattgtttgtcactggatacattcagaactagtaccaatgacagacttagacatacaatatacttaccttagaggtcacgtatgtttgtccgcacatgcaagaaatggttcaaaacaatcggagacctatacagaagatataactgcatgtggccaacacaaggtatgtcactcccgagaatgcagaaattttagtgaactaaatataacaaaatatactacaaattgtggacagaatgggatttgcaatgaacatttccattgtcaatgtgatcctggttatgctcctccagattgtgagccagcaatgtcatcaccaggaggaagtatcaatgatggattttggcttacagtagaaaaaagtgtacccttgcttccaaaacgacgtgctgctcctaaaaacaatggtcttttgatcagtttctacattttttcacctttgctcattttaattgctattgttagtcttaaatggaataaaatgaagagattttggagcaaagtgggaacagtaagcagcagatctatctcagaagacagcagtagtaacagcagccagtcacagagttaaagtaaccaagtgataaaatcaaagccatcggatgaagaaaggatattaccaagaaactcacgattaacttaaaactttcaacttcacagaaaaaaataaatcatatgactaaaagcataaaaaaaaaa

SEQ ID NO: 9273 - DNA, 600 bp, Homo sapiens
ggagtagatcccagtgctgatcctgagctggccttggcccttcgtgtatctatggaagagcagcggcagcggcaggaggaggaggcccggcgggcagctgcagcttctgctgctgaggccgggattgctacgactgggactgaaggtgaaagaggtggaatccgaagtcctgggactgcgggatgctaaacattgaaagctgggtgtaggcactgcagggagagtgtggaggtctgacagggtaggaatatgtgggagggctgggctaggaatggccttggaggctggcctgtgtggatatggcaccaattctaccctgctcctcttttccttttcccagactcagacgatgccctgctgaagatgaccatcagccagcaagagtttggccgcactgggcttcctgacctaagcagtatgactgaggaagagcagattgcttatgccatgcagatgtccctgcagggagcagagtttggccaggcggaatcagcagacattgatgccagctcagctatggacacatctgagccagccaaggaggaggatgattacgacgtgatgcaggaccccgagttccttcagagtgtcctagagaac

SEQ ID NO: 9274 - DNA, 1400 bp, Homo sapiens
tactatgacatgaacctgtcagctcaggaccatcagacctttttcacctgtgacacagattttttacgtccttcagacacagttatgcagaaggcttggagggaaagaaatcctccagctcgaatcaaagcagcctatcaagctttagaattaaacaatgaatataagccttccaaagtcagcagcaatctgttacacagcagcactgttgaagacaaggactgtttcagaaaaattctctccagaaacagcctccagaagaggattaagcacagcagaaattaatgccgtggaagcaattcatagagctgtggaatttaatcctcatgttccaaaacttttagaatgattccatacccgttagagaaaggacatctattttacccttatcccagctgcacagagacggctgatagagagctattacctacctttcatcatgtttctgtttacccaaaaaaggagcttcctttgttcatccatttcacagcaggattttgctcttctacagcaatgatagccattctcactcaccagtttcctgaaatcatgggtatttttgctaaagctgtgctgggactctggtgcccccaaccctgggcatcctcaggctttgaggagaatacacaggatttgaagtcagaagacctaggtttgagttctggctgagccacgcactgttcatgtgaccttggacaaatcaccaaatttttctgaacagcatctgtaaagtgacagtaacccctacctcacagggttgttgtgaggattacatatatgctaaagcattttgcatatgaaaaagcttcttatgaatattgttattcctaggcaaaccccccttggaagctgtcaaaaaggacaactgtagatgaaattgtcttccttttttcttcattcagcttagcctttctgtttggccagggctacttacaggggctgttggggttgaagtcaagtcaccgcattttggctcctttggtcaaagagaaagaactctaatgtccagctgctccatcgatatactcatagaatggaagtgagcaaaggaaaattttaagccaggatagttaaccgttagggggccagtgggagaatgcttgccttgcatttgcacatccagaatgactaaaacatcttaagtaaatgaggaatagccaccgagatgctcagagataatataagccatgagtgggaagtgggaaaatgagtttgtcaacgccctctcttttctatccctttacctttgaggtcagggacagggcatattactgacaccccactggctattgccctatacctgccaatcacccaaagaaaataatagcttctgagaaagctcaattcactgtagcaactgtgatatatttaccctaataaagccaccacttggtcttttc

SEQ ID NO: 9275 - DNA, 1400 bp, Homo sapiens
gggaacgtagacagtggggttgtggttggttggtatagaatggttggaattcaaatttttctaaactcatggtaagtatattgtaaaatacatatgtactaagaattttcaaaattggtttcttcagtgtggagtatattcagtagtatttttgacatttttctttagaaaaaggaacagctaaaggaattttataagttttgttacatgaaaggttgaaatattgagtggttgaaagtgaactgctgtttgcctgattggtaaaccaacacactacaattgatatcagaaggtttctcctgtaatattttatccctggacttgtcaagtgagttctttgcatgttcaaaatggaagccatgaattagaactacattctttattccttgttttaatttgaaccccaccatatggatttttttccttaagaaaatctccttttagaagatcatggtgtcacagtttggttcttttgttttgttttttaacacttgtctcccctcaaacacaaaagtacaatatgaagccttcatttaatctctgcagttcatctcatttcaaatgtttatggaagaagcacttggttgaaagtagtgctgtaaatattctgccataggaacacttctgtctacatgccttctcattcaagaattcgtcatcacgcatcacaggccgcgtctttgacggtgggtgtcccatttttatctgctactctttatttcatagagtcgtatcaacgctgtgaacgcaaggctgtgatatggaactagaaggctgtttgaacttttgaaaccttgtgtgggattgacggtggtgctgaggcatgaaaggctagtatgagtgagaaaaggagagagcacgtgcagagacttggtggtgcataacggatattttttaacttggcgagatgtgtttctcaatcctgcggctttggtgacagtgtgcagacagcaatgatagcaaataatgtacgaatgttttttgcattcaaaggacatccacatctgttggaagactttgagtttttgttcttagataacccactttatttgaatgtgttaagtgaaatgatacttgtactccccctacccctttgtcaactgctgtgaatgctgtatggtgtgtgttctcttctgttactgatatgtaagtgtggcaatgtgaactgaagctgatgggctgagaacatggactgagcttgtggtgtgctttgcaggaggacttggaagcagagttcagcagtgaactctggtgtctcaaagaagggtagaagttctaatgtctgttagctacccataagaatgctgtttgctgcagttctgtgtcctgtgcttggatgctttttataagagttgtcattgttggaaattcttaaataaaactgatttaaaaaaaaaaaa

SEQ ID NO: 9276 - DNA, 1400 bp, Homo sapiens
gctggaagaaattcatctggaactcagagaagaaggagtttctgggcaggaccggtggcagttggtttaagatccttctattctacgtaatattttatggctgcctggctggcatcttcatcggaaccatccaagtgatgctgctcaccatcagtgaatttaagcccacatatcaggaccgagtggccccgccaggattaacacagattcctcagatccagaagactgaaatttcctttcgtcctaatgatcccaagagctatgaggcatatgtactgaacatagttaggttcctggaaaagtacaaagattcagcccagagggatgacatgatttttgaagattgtggcgatgtgcccagtgaaccgaaagaacgaggagactttaatcatgaacgaggagagcgaaaggtctgcagattcaagcttgaatggctgggaaattgctctggattaaatgatgaaacttatggctacaaagagggcaaaccgtgcattattataaagctcaaccgagttctaggcttcaaacctaagcctcccaagaatgagtccttggagacttacccagtgatgaagtataacccaaatgtccttcccgttcagtgcactggcaagcgagatgaagataaggataaagttggaaatgtggagtattttggactgggcaactcccctggttttcctctgcagtattatccgtactatggcaaactcctgcagcccaaatacctgcagcccctgctggccgtacagttcaccaatcttaccatggacactgaaattcgcatagagtgtaaggcgtacggtgagaacattgggtacagtgagaaagaccgttttcagggacgttttgatgtaaaaattaaattttaagtgacactacagaaaaacacaaaaaggtgatgggttgtgttatgcttgtattgaatgctgtcttgacatctcttgccttgtcctccggtatgttctaaagctgtgtctgagatctggatctgcccatcactttggctagtgacagggctaattaatttgctttatacattttcttttactttccttttttcctttctggaggcatcacatgctggtgctgtgtctttatgaatgttttaaccattttcatggtggaagaattttatatttatgcagttgtacaattttatttttttctgcaagaaaaagtgtaatgtatgaaataaaccaaagtcacttgtttgaaaataaatctttattttgaactttataaaaagcaatgcagtaccccatagactggtgttaaatgttgtctacagtgcaaaatccatgttctaacatatgtaataattgccaggagtacagtgctcttgttgatcttgtattcagtcaggttaaaacaacggacaataaaagaatgaacac

SEQ ID NO: 9277 - DNA, 1400 bp, Homo sapiens
ctgagtcagcccttttcatccttattctcaccatgagtgctggcttctggcaaccagggcctggtggcccaccctgccgcctctgtggagaggcctcccgaggccgggccccatcccgagatgaagggtccctcttattgggctcacgtcggccccgccgggatgctgctgagcgatgtgctgcagccctgatggccagccggcgtaagagtgaagccaagcagatgcccagagctgcacctgccactcgggtaacacgccggagcacacaggagagcctgacagcaggcggaacagaccttaagagggagctgcaccccccagccacctcccatgaggctcctggcaccaagcggtcaccttctgctccagcagccacctcctctgcctcttcttctacatcctcatacaaacgggcaccagctagctcagccccacagcctaagcccctaaagcgtttcaagcgagctgcagggaagaagggtgctcgcacccgtcaggggcctggtgcagagtctgaagacctgtatgacttcgtttttattgtggctggcgagaaggaggatggcgaagagatggagattggggaagtggcttgtggagctttggatggatcagatcccagctgcctggggcttccagcactggaagcttcacaaagattccgcagcatctccaccttggagctattcacagttccactctccacagaggcagccctgacactatgccacctgctgagctcctgggtgtcactggagagcctcacactctcctacaatggtgagcaccctggagtggcagggattgggcttagattgcctagcagcaccagctgtgtgcctaattctagggaggtgggaggggcaaattgggggtatgatcaggaggttagagaggaaggcttgtatgcctcatagcaggggagactgtcattgctagaagagaggaacataaagtctatacacttgattagttgttgaaagcaggggttcctgaggggcagtgagacaagccagctggaatctgaagaatgaatacattttagatatggaaggcagtccaagggcaggtgggagcagtatagtatatgcatgctcaggcagggctagagtttgacctcaccacctcaccagtcatattttaagtattcttgataatttgatctaacaatcctcacaaccctatgagggcaagtgacttcctcaggataacctagcaattatagagctaggattcaaaacccaggcaaccagactgcagattcatgctttcaaacaactatgctactctcctttccaccgtctctctcctatcagcattttaacaggtctccatcaaaaactgccaccaccacctccctctatgccatattaataaactgttatctcctgttcttc

SEQ ID NO: 9278 - DNA, 600 bp, Homo sapiens
tgtgattatccagacattaaacatggaggtctatatcatgagaatatgcgtagaccatactttccagtagctgtaggaaaatattactcctattactgtgatgaacattttgagactccgtcaggaagttactgggatcacattcattgcacacaagatggatggtcgccagcagtaccatgcctcagaaaatgttattttccttatttggaaaatggatataatcaaaatcatggaagaaagtttgtacagggtaaatctatagacgttgcctgccatcctggctacgctcttccaaaagcgcagaccacagttacatgtatggagaatggctggtctcctactcccagatgcatccgtgtcagctttaccctctgaacttctgatcgaaggtcatccctctccagcttgagtggatcaaagatgacaagggccaatggaaccaagtttgagtcttgccaggtcaatacttgggtcctgagtatggtgactagtatctgttttgttatgtgtgtattattccagccagaatgggaaatgctaattcagctcctccaggcagcccaatggggctggtggctttgagattattaaactctt

SEQ ID NO: 9279 - DNA, 1400 bp, Homo sapiens
agcctcaccggcaccttcgccggcgccctcgcccaccccagccccgccccagaaggagcagccccccgcggagacccctacagacgctgctgtcttgacctcacccccagcccctgctcccccggtgacccctagcaaaccaatggccggcaccacagaccgagaagaagccactcggctcttggctgagaagcggcgccaggcccgggagcagcgggagcgcgaggagcaggagcggaggcgggaggagcaggaggcacgagagaaggcgcaggccgagcaggaggagcaggagcggctgcagaagcagaaagaggaggccgaagctcggtcgcgggaagaggcggagcggcagcgtctggagcgggaaaagcacttccagcagcaggagcaagagcggcaagagcgcagaaagcgtctggaggagatcatgaagaggactcggaagtcagaagtttctgaaaccaagcagaagcaggacagcaaggaggccaacgccaacggttccagcccagagcctgtgaaagctgtggaggctcggtccccagggctgcagaaggaggctgtgcagaaagaggagcccatcccacaggagcctcagtggagtctcccaagcaaggagttgccagcgtccctggtgaatggcctgcagcctctcccagcacaccaggagaatggcttctccaccaacggaccctctggggacaagagtctgagccgaacaccagagacactcctgccctttgcagaggcagaagccttcctcaagaaagctgtggtgcagtccccgcaggtcacagaagtcctttaagagggtttgccttggatccgggcacagttgtgagggctcctctgcatcacctaccaggatgtctggaggagaaaaagacagaacaaagatggaagtggcctgggcccctgggggtgggtcctctctgttgtttttaatctgcaccttatagactgatgtctctttggccggagccagatctgcccctcagtgcattcgtgtgctcgcacgcgcagacatcccttctcccccatacacacatatacactcacagcctctctggcctcttcccttggggaggggccacctgtagtatttgccttgatttggtggggtacagtggatgtgaatactgtaaatagcttgtgctcagactcctctgcgtggagagggtgggtgcaggaggcagaccctccccccaaagccccctggggagatcttcctctctctatttaactgtaactgagggggatcccaggtctggggatgggggacaccttgggccacaggatactggttgcttcaggggtacccatgccccctgccctcgcctggaatcagtgttactgcatctgattaaatgtctccagaaataaagaataattctgcc

SEQ ID NO: 9280 - DNA, 1400 bp, Homo sapiens
cttggtggtgctctacaagtaccgctgctacaagttcatccatggctggttgatcatgtcttcactgatgctgctgttcctcttcacctatatctaccttggggaagtgctcaagacctacaatgtggccatggactaccccaccctcttgctgactgtctggaacttcggggcagtgggcatggtgtgcatccactggaagggccctctggtgctgcagcaggcctacctcatcatgatcagtgcgctcatggccctagtgttcatcaagtacctcccagagtggtccgcgtgggtcatcctgggcgccatctctgtgtatgatctcgtggctgtgctgtgtcccaaagggcctctgagaatgctggtagaaactgcccaggagagaaatgagcccatattccctgccctgatatactcatctgccatggtgtggacggttggcatggcgaagctggacccctcctctcagggtgccctccagctcccctacgacccggagatggaagaagactcctatgacagttttggggagccttcataccccgaagtctttgagcctcccttgactggctacccaggggaggagctggaggaagaggaggaaaggggcgtgaagcttggcctcggggacttcatcttctacagtgtgctggtgggcaaggcggctgccacgggcagcggggactggaataccacgctggcctgcttcgtggccatcctcattggcttgtgtctgaccctcctgctgcttgctgtgttcaagaaggcgctgcccgccctccccatctccatcacgttcgggctcatcttttacttctccacggacaacctggtgcggccgttcatggacaccctggcctcccatcagctctacatctgagggacatggtgtgccacaggctgcaagctgcagggaattttcattggatgcagttgtatagttttacactctagtgccatatatttttaagacttttctttccttaaaaaataaagtacgtgtttacttggtgaggaggaggcagaaccagctctttggtgccagctgtttcatcaccagactttggctcccgctttggggagcgcctcgcttcacggacaggaagcacagcaggtttatccagatgaactgagaaggtcagattagggtggggagaagagcatccggcatgagggctgagatgcgcaaagagtgtgctcgggagtggcccctggcacctgggtgctctggctggagaggaaaagccagttccctacgaggagtgttcccaatgctttgtccatgatgtccttgttattttattgcctttagaaactgagtcctgttcttgttacggcagtcacactgctgggaagtggcttaatagtaatatcaataaatagatgagtcctgttag

SEQ ID NO: 9281 - DNA, 1400 bp, Homo sapiens
caccatataacaacgtactttgttgcagactatgatttagacttttctgatgcgcaaaaatagtaacttcgaatgctgggtaaaaattaaggcgtgatatatctcataaaagaaagcttcataagaggtagtaagttttagttactggtgattttctagcagactggaatgttgaccattctttgggaaaggaatcagaggttttttgttgggtttttttgttttttgaaatggagtctcgctttgttgttcaggctgaagtgcagtggcgcagtcttcactcactgcaaactctgcctccccagttcaagtgattctcctgcctcagcctcccgagtagctaggactacaggcacacgccaccacacccggccaatttttgtaattttggtagagacagggtttcaccatattggtcaggctggtctcgaactcctgacctcaggtgattacaggcgtgagccactgcacccggcctgttgtggggttttgtgatttggtttggtttggtgttttctgattacagcaactttctctttattctcagttttgcacagtaataagttgactcacacagacttaaagcctgaaaacatcttatttgtgcagtctgactacacagaggcgtataatcccaaaataaaacgtgatgaacgcaccttaataaatccagatattaaagttgtagactttggtagtgcaacatatgatgacgaacatcacagtacattggtatctacaagacattatagagcacctgaagttattttagccctagggtggtcccaaccatgtgatgtctggagcataggatgcattcttattgaatactatcttgggtttaccgtatttccagacacacgatagtaaggagcatttagcaatgatggaaaggattcttggacctctaccaaaacatatgatacagaaaaccaggaaacgtaaatattttcaccacgatcgattagactgggatgaacacagttctgccggcagatatgtttcaagacgctgtaaacctctgaaggaatttatgctttctcaagatgttgaacatgagcgtctctttgacctcattcagaaaatgttggagtatgatccagccaaaagaattactctcagagaagccttaaagcatcctttctttgaccttctgaagaaaagtatatagatctgtaattggacagctctctcgaagagatcttacagactgtatcagtctaatttttaaattttaagttattttgtacagctttgtaaattcttaacatttttatattgccatgtttattttgtttgggtaatttggttcattaagtacatagctaaggtaatgaacatctttttcagtaattgtaaagtgatttattcagaataaattttttgtgcttatgaagttg

SEQ ID NO: 9282 - DNA, 1291 bp, Homo sapiens; identical to SEQ ID NO: 4047

SEQ ID NO: 9283 - DNA, 600 bp, Homo sapiens
ctggacaagtatgctccagaaaacctagatgagcagattaagaaagtgtcccagcagatccttgagaagcgagcctatatctgtgcccaccctctggacaggacatgctgaggcaggggacagtgtcccctgctaccgcccgcccctacccatggcccgttgctggatgactgttactcttttttcagaaggtgttgggattatcacaggttaagccttttgttccccgtctgcacctgaagggttgtcgcctggcctgggagagcctcttccaggttttgacctgcaggcagtgctctctaacaggaccatcacagcttctgaactgagccggagagagagaatggaattgctgacccctggaactggcgggtattctggtcattgaggagacaccatagtggaaactggggcttatgctgctgcctccagggtgtgaggtgggtggggacctgtgtcaggtgtggatagccatttctgctcaaccacacattctctaagaaacagcttgaaagctctgtctgggtcattcatttaaactagaagcagaggcacttaaaacatgtaccaggaaccatttaacaaagaatataaaatgtc

SEQ ID NO: 9284 - DNA, 1400 bp, Homo sapiens
aagaattgtcagcagcaccagacccagggtggcctgactgcttcaattccggagtcttcgtttatcagccttcagttgaaacatacaatcagctgttgcatcttgcttctgagcaaggtagttttgatggtggggaccaaggcatactgaacacattttttagcagctgggcaacaacagatatcagaaaacacctgccgtttatttataacctaagcagcatctctatatactcctacctcccggcatttaaagtgtttggtgcaagtgccaaagttgtgcatttcctgggacgagtcaaaccatggaattatacttatgatcccaaaacaaaaagtgtcaaaagtgaggcccatgatcccaacatgactcatccagagtttctcatcctgtggtggaacatctttaccaccaacgttttacctctgcttcaacaatttggccttgtcaaagacacctgctcatatgtaaatgtgctttcagacttggtctatacactggctttctcttgtggcttctgtagaaaggaagatgtctcaggagccatatcacatctgtcccttggggagatcccagctatggcacagccgtttgtatcctcggaagaacggaaggaacgatgggaacagggccaggctgattatatgggagcagattcctttgacaacatcaagaggaaacttgacacttacctccagtagaaacactgcatttttctgtgaacacatccacttcacaagccttgtttctgatacttagtatctagagctgggttgagaaaagtctgttacagttgctagaggttttcattaaaacttatcagatgagaggcttttttaggataagaggtgagaactgggcaaaagttgtgaagcagcaattctgttatatggacagtgttctgctttttaatcctatttagcttgtttcagaaattctcacttttgttgactgccaacatacaaagtaagggaaactcaagatattaagatggctgtatcagttcttaaaatctgcagagcctggttcaaaatcagtcactcccttcagaagcagacatggcatctgttccttgcttgcttgttggttgtgtacctttcacgagacctgaattttagaattgcccagtgctgccagagtgagtgagtgtaattctcctttcaggtaaagataggctatctcaacactgctgagtgattcataaacatatcaaccaatagcattaacccattttatttcctgtccttagtgtctgaagatgctcaccagttttctgtgtacagtaaggcagcatgctaaaatgcttttgttcagttctgtatatttgaaaatagcagtgtgttctctgatggttacctgcagtggcaccctgtacaaaaaataaaagacttattgctgta

SEQ ID NO: 9285 - DNA, 1400 bp, Homo sapiens
gtctagttttcattaaaagaacaaagatcttttatatggatatcttataaatatataatcattgctaagtaagaagttaagtagttgctatcgcaacaatcctggcagacaattgagtaatattttgatgatttattttgtttgtaattagttattataagaagatctagatcctagatattagaataaaatttattttctactgtatccatttcaaatgttaaaatattgtttaatatttttgaaatccctgagtatcaggccttgttataaataagctgcataatcaataaatagaacaagggactttttgttgataatccaaatactcaaagtttacgtaatgaaaattatagcgtgtgtgcaaactcttgagggttgattatgctgcaatttagcatgttggaacgtctagggagaaggttgactttttgcacttctgtatatagtcaaaagagagaaacctgtataatagtaagatcttattttgaataaaaacgtctataattacaaggagttttgttaaggctaatacaatgacagactgagcaaaattgcttgcaaaagtggcacagagttagcactccataccccttcaaacatgttgctttgctttcttgtggacagcttgtagtttgccaggattttttcagctggaaagatacgccatcctttcaaaccctcatgactgacaaaaactccatggggccaaatctgcctgaagatcattaccaaaaatagcaggtacttctaccattaaggtgaaatcatggatcagatattccttacatttttcaaaactactgcatgtttaaaacttcaacaaaaaaagagagaaagaactatactaagaacatatattattcagatcagtttctgccaatttcagtggtttattgttcacaaaaaaatcttcaaaacaagtattgactttcacaaaatttaaatcataaacaggcaaaccaaacagcacactgtagctatagttgttatgtgattgttttttaattgctgtaggatcctgttctttcagcaggtgaaaaataaaacgcagttcaaatttcatggttttaattttcaactcagaagcactcaaaaatgcaaaatgtgataatgggcacttgtttaaaagaattagtgtatccagccttcactccagctggttaaaaatgttgcacttatcagcaaccctaccactttcatctgctgaaaggacaaatgtgcttggttttactattatgtaatcacaacttactttctgcttgtagttgcttaaaattatgtattttgtcttgggctgcaatttgttttatgcttattttattattactgcagtagttgactttgctgtatggaaaaataaagtgaaattgccctaataaaacttctctttcttaagt

SEQ ID NO: 9286 - DNA, 1400 bp, Homo sapiens
tgaaggagaagggacacgagggggcagcgggcactgtgactgccaagccggctacgggggtgaggcctgtggccagtgtggccttggctactttgaggcagaacgcaacgccagccatctggtatgttcggcttgttttggcccctgtgcccgatgctcaggacctgaggaatcaaactgtttgcaatgcaagaagggctgggccctgcatcacctcaagtgtgtagacattgatgagtgtggcacagagggagccaactgtggagctgaccaattctgcgtgaacactgagggctcctatgagtgccgagactgtgccaaggcctgcctaggctgcatgggggcagggccaggtcgctgtaagaagtgtagccctggctatcagcaggtgggctccaagtgtctcgatgtggatgagtgtgagacagaggtgtgtccgggagagaacaagcagtgtgaaaacaccgagggcggttatcgctgcatctgtgccgagggctacaagcagatggaaggcatctgtgtgaaggagcagatcccaggtgcattccccatcttaactgatttaacccctgaaacaacccgacgctggaagttgggttctcatccccactctacatatgtaaaaatgaagatgcagagagatgaagctactttcccagggctatatggcaagcaagtcgcaaagctgggatcccaatccagacagtctgaccgtggaacgagactcatacacagtcagcaggcttcttctcagagatgacagaagacgagttggtggtgctgcagcagatgttctttggcatcatcatctgtgcactggccacgctggctgctaagggcgacttggtgttcaccgccatcttcattggggctgtggcggccatgactggctactggttgtcagagcgcagtgaccgtgtgctggagggcttcatcaagggcagataatcgcggccaccacctgtaggacctcctcccacccacgctgcccccagagcttgggctgccctcctgctggacactcaggacagcttggtttatttttgagagtggggtaagcacccctacctgccttacagagcagcccaggtacccaggcccgggcagacaaggcccctggggtaaaaagtagccctgaaggtggataccatgagctcttcacctggcggggactggcaggcttcacaatgtgtgaatttcaaaagtttttccttaatggtggctgctagagctttggcccctgcttaggattaggtggtcctcacaggggtggggccatcacagctccctcctgccagctgcatgctgccagttcctgttctgtgttcaccacatccccacaccccattgccacttatttattcatctcaggaaataaagaaaggtcttggaaagtt

SEQ ID NO: 9287 - DNA, 1400 bp, Homo sapiens
tgaagcaccacatattgttgttggtacacccgggagagtgtttgatatgttaaacagaagatacctttctccaaaatggatcaaaatgtttgttttggatgaagcagatgaaatgttgagccgtggttttaaggatcaaatctatgagattttccaaaaactaaacacaagtattcaggttgtgttgctttctgccacaatgccaactgatgtgttggaagtgaccaaaaaattcatgagagatccaattcgaattctggtgaaaaaggaagaattgacccttgaaggaatcaaacagttttatattaatgttgagagagaggaatggaagttggatacactttgtgacttgtacgagacactgaccattacacaggctgttatttttctcaatacgaggcgcaaggtggactggctgactgagaagatgcatgccagagacttcacagtttctgctctgcatggtgacatggaccagaaggagagagatgttatcatgagggaattccggtcagggtcaagtcgtgttctgatcactactgacttgttggctcgcgggattgatgtgcaacaagtgtctttggttataaattatgatctacctaccaatcgtgaaaactatattcacagaattggcagagggggtcgatttgggaggaaaggtgtggctataaactttgttactgaagaagacaagaggattcttcgtgacattgagactttctacaatactacagtggaggagatgcccatgaatgtggctgaccttatttaattcctgggatgagagttttggatgcagtgctcgctgttgctgaataggcgatcacaacgtgcattgtgcttctttctttgggaatatttgaatcttgtctcaatgctcataacggatcagaaatacagattttgatagcaaagcgacgttagtcgtgagctcttgtgaggaaagtcattggctttatcctctttagagttagactgttggggtgggtataaaagatggggtctgtaaaatctttctttcttagaaatttatttcctagttctgtagaaatggttgtattagatgttctctatcatttaataatatacttgtggactaaaagatataagtgctgtataaaatcagccaattatgttaaactagcatatctgcctttattgtgtttgtcattagcctgagtagaaaggcctttaaaatttttttagaaagcatttgaatgcattttgtttggtattgtatttattcaataaagtatttaattagtgctaagtgtgaactggaccctgttgctaagccccagcaagcaatcctaggtagggtttaatccccagtaaaattgccatattgcacatgtcttaatgaagtttgaatgttaaataaattgtatattcacttt

SEQ ID NO: 9288 - DNA, 1400 bp, Homo sapiens
ctgtagtttcagatcagtagggagaccatataataattgtatggtacctgtttcaaaacatattttttctgtttttataagtaagttgatattaattaaactcttggcaatatttcttctttcttaaaggaaaatacaccttaactttttttcttttacactgtgaaacatacacagtagaaattctgttactctctgttattaatacataaatgaaaatacttttttttccatattggcatgtagctacaaatattaaaggaggagaaaaggtaatataattttaggtttaccaaatatggtgtgtattcaaataatacttgaccagcttatctaaaatgtacataattttgaggtagcttatgaatttgattttaattattatgttcacaagcttggaatattagatattattttgcatctgtaactaaccgtgatcatcatctcttgtaatttcttgtacatgtatattacttgttcttaatagatttttggaaacaagactttattgagatcagtttggttttcctgttaatttacctgtttgactttataatgtgttttagttttgcagaagaacactgttgtagtttagaaggcttttcataaatcccctcataggcaaagatgagaacttcccactatttttttcccctcttaggaagacatactggaaagaaaatgtttagcatcttagtgtagtatagctattgtaaacagttcatgactagattttgattcggaaatctatactgaccaaggattaatcttaaggactgtataattcattaaagcggtggtctttccatgtggagactgatagaaaataattttgtcccaagtcttatttgctgactttttctgtcaatgagtgagattgttgaacaaactgaatatatgggctatagcaagtagctttacagtacagatcttacaattaagttttgcttttgttaaagtgtgtaccattttttctgtttggagtaagacaaaaattgttttgacataggttccctagggtacacttgctctagcatactttaaaggccactgttgcaaagtctacattttatgctgaatctgcattctgtcaggcacccgtagaaagacctcagtacatgctttgcactctcctttgctccctttttccaatttcttattgcatatcattttgttgtaatacagaaagcagcatttttaaatgtccatgttaagaattggcccactggtaccgactcacctctattttgtcagttcatagttgaagattttgttttatttcaaaaacaaagtacatttttgaaataatgtttcagaataaaataatctcacttttaaattaagtgatccattttaaaatttgtaattcaataaagttttttttgttgttaaacataaaa

SEQ ID NO: 9289 - DNA, 1400 bp, Homo sapiens
  misc_feature (424)..(424): n is a, c, g, or t
cataacttcctcagcttgagcagtttgttaaggaatgaggttacagattcaggaattgtagggcctcaacctatagactttgtcccaaatgctctccgacatgcagtagatgggagacaagaggagattcctgtggtcatcgctgcatctgaagacaggcttgggggggccattgcagctataaacagcattcagcacaacactcgctccaatgtgattttctacattgttactctcaacaatacagcagaccatctccggtcctggctcaacagtgattccctgaaaagcatcagatacaaaattgtcaattttgaccctaaacttttggaaggaaaagtaaaggaggatcctgaccagggggaatccatgaaacctttaacctttgcaaggttctacttgccaattctggttcccagcgcanagaaggccatatacatggatgatgatgtaattgtgcaaggtgatattcttgccctttacaatacagcactgaagccaggacatgcagctgcattttcagaagattgtgattcagcctctactaaagttgtcatccgtggagcaggaaaccagtacaattacattggctatcttgactataaaaaggaaagaattcgtaagctttccatgaaagccagcacttgctcatttaatcctggagtttttgttgcaaacctgacggaatggaaacgacagaatataactaaccaactggaaaaatggatgaaactcaatgtagaagagggactgtatagcagaaccctggctggtagcatcacaacacctcctctgcttatcgtattttatcaacagcactctaccatcgatcctatgtggaatgtccgccaccttggttccagtgctggaaaacgatattcacctcagtttgtaaaggctgccaagttactccattggaatggacatttgaagccatggggaaggactgcttcatatactgatgtttgggaaaaatggtatattccagacccaacaggcaaattcaacctaatccgaagatataccgagatctcaaacataaagtgaaacagaatttgaactgtaagcaagcatttctcaggaagtcctggaagatagcatgcgtgggaagtaacagttgctaggcttcaatgcctatcggtagcaagccatggaaaaagatgtgtcagctaggtaaagatgacaaactgccctgtctggcagtcagcttcccagacagactatagactataaatatgtctccatctgccttaccaagtgttttcttactacaatgctgaatgactggaaagaagaactgatatggctagttcagctagctggtacagataattcaaaactgctgttggttttaattttgtaacctgtggcctgatctgtaaataaaacttacatttttc

SEQ ID NO: 9290 - DNA, 1304 bp, Homo sapiens; identical to SEQ ID NO: 4055
  misc_feature (249)..(285): n is a, c, g, or t

SEQ ID NO: 9291 - DNA, 600 bp, Homo sapiens
agagggagacacccggaggagcaggtgggaagatgaagccggccagagcccctctgcccagcatgccctgtgatcgcctggcccagcaggagctgcttcagccgagagggactattacccaagagaggtatcctcagcccctcctgccccaggtcgggagacagcagctttggagacacaaaagagacagagcctcagccagggagagtgagtcccccagaagaggctgggtggttgcacaggccaggtgcacaggttggaaatgcactgaactctgggtgccgagagatgtaaggctttgagacatgctactgaatttggagggcaggcacgaagaacagtgagattgtcaaaaggagacaaccacagatcctacaggactgtctgtctcctgccccatgatgaccctcaggaattgcaaaggctctgctgtcacaaggagagcaggctgagtttggagcagggtccatccggcagtcctgggacggcttccctctgctggtgcccctggtggcagtccctccaggtggggctggagcctgctggcgcccaatacaaaacccatacatccaggtggaatacatctacttgtggcggccg

SEQ ID NO: 9292 - DNA, 600 bp, Homo sapiens
caaatttgatttatggtttttaacaaaggactaaagagctgaaaccaacctagttttgtttttgtgatataaactttaagtgtcgagggaccatgccagcaactaccaaaaatctcttaaatcttcaggtacagctggcattttggcagatgcatagagacatctgagaccctcagaaaggaaggataatccaagaatataggaaatctgtgttctcttcctttcattttatcccttatatttctaaagactaattataagtaatctgacattttaatgtagctactcttatttattttttctttctgaggtattaaaatatctggactgagttttgccaaatgttaaagggagaagagttactgaagactttgaacacttgctttttgtgattgcttatgtcattagtgcctcatgactgtgtttgatgtcctttattgatacaaagtgagcctgtgccttcattatcttgcccattttaatacaaatggaaacctggtgtttgaaaatctctgaactgtgtgggttttggaggaatatacctgaattttattcaataacagtttctggacaggaagaaaaatacagttacatatttat

SEQ ID NO: 9293 - DNA, 1038 bp, Homo sapiens; identical to SEQ ID NO: 4058

SEQ ID NO: 9294 - DNA, 1400 bp, Homo sapiens
tggcctgtagccccccacccctctctgcttcctgcagccccactgggggttcctcccaggtgctgagtgaaagcgaagaggaggaggagggggctgtgcggtggggtcggcaggcgctgagcaagcggacactgtgccagcgggactttggggacctggacttgaatttgattgaggaaaactaaaactgagaggctacttcctggggccacacagactgactctctcatggctactaacaagtgtcgagtccccaaggctgggggccgagcctgggaatgggggtgagtggagggctccgactcagggcagctggaaatcttctcgctccagcaagctcgaccatgccaagagactggccgggacaagataaacggagctggtggcgggagggacagccccagagcagacccttcctatggcggccctgagtgtgagtatccctgccaccaagagagcaatgggcagggaaggaaggggtctgccgaccccagctcggggaatttcactagcccctttgcttcaaagggcacttgtgtcttagaatttggccagggtggggggttgagtcagcctcctcagagaaactgcgtgagagtgtgtgcgtgcatgggagtgtacttgtggaaaggtgtgtttgcgtagccttagggaaggaaggcaattgctccttaacagcagagtatcatgatacccccaggatcttgagttttttacaggatgttgggtttgctcaaggagtcaagaggagggcaccaagttttccattactttcagtctggaaaactaagctagtcagaactgtcatcttgcttcccaatctaagaacctgtggccctggaacacttttcaagaattggttcattttgctttacacagtagatctgttccaacagttctgtgtaaaccaaatgctatttttcaatgcatttggactgctgaccatttaaaagcagcctatgattgcttctttttgtaaagcaagcaacctccctccactttagctgttttgactatttgaattttcacatattgggcttacccagagtggagcacacctccagggcatgtggctgacactgggtcaatgtctgcatctgtgctgtgtgtgtagtgtggttggccagtaggtgagtatccctgtgtgtgtgagtgaagccactccccaggctggtgctctcctcctgtgcccagtgactgcccagtggcagctcagctgcccttcactcccacctgctgccaaagtccctgtgctaatgggattacaaatacaaaaagtggaaaaaaattttcgtaaactttgttttatattaaaagaaaaatccataagtctgtgtgtgttaaacatgaggttctgcctctgtggctgtgtttgaaaaaataaagttttattagaataa

SEQ ID NO: 9295 - DNA, 1400 bp, Homo sapiens
tgcatcataattacattaccagtgttggaaaactaatgaagaaaacactgtaattgctactcagcaaatgtgaataaaaggtgtttgcgttattaggatgtctgttaagtaatcatttaatattattatattggtaatggttgtatgtgtgatgctatgcccagaatatgaagtatctgtttttgaaattcactttatttaaaagataagcagctgactgggcacggtgcctcatgcctgtaatcctagcaccttgggaggctgaggcaggtggatcacctaaggtcaggagttcaacaacaccagcctgaccaacatggtgaaaccccatctctactaaaaatacaaaaatcagccgggtctcatggcaggcacctgtaatcccatctactgaggcaggagaattgcttgacccaggaggcagaggttgcagtgagccaagatcacgccattgcactccagcctgggggacagagcaagactctatctccaaaaaacaaaaaagataagcagctttagaatatggcgcattcaaaacagtctcagtaacaaagacattaaaagaaaacaatttactttctaattaaaattttgtgtttcttaagatcaaatcatataggtaacttcatagacctaaattaaaagtgatttttggctggactggcaacaatgttcccaatgtctttactttttaaaaaaggcttttcatatttaagcacatacctattttgtagacttacattgtttaatatttattttaatcttaatatttttacattattatattgcattatttattttttctaagttccagaataatagtgtcattattatagactatatgttttgaagtttgatattataatgggatattcattttttgttcttttcttgactcctttctcaagtgtgtgataaggtctgctgataaaatatttaaccccaagaaagtgaaaactaatataaaattagaaagacctatccaaattagacagtcaattccattaaaataagaagtgagaaaaacaatgttgggcattgaggtgtaaattttgcccagatgtatacccagtgtgaaatatcttctaataaaaatatatttggctcttatccctgcacatgtagaggcataaaaattggtaaacatgtcccgctgtgtagaactttaaaaaaaaggcatttttgaaagtgttgagtggcactgataactggtgaagcctacagccatccgcccaaaagtctgttctgatggcactgagttttcattgttctggatgtataagtctgtgtgtcaggtacagctgggcccagccagcttgagtcactcttgtacaagcttgtttttttctgtcttgtgaatgcacttgataatttaaaaataaaaatatctgtttctctgc

SEQ ID NO: 9296 - DNA, 1400 bp, Homo sapiens
gaggtgcgaggggctcaccacttccctccctcgcagccctatgttgttgtctccaaccaccagagctctctcgatctgcttgggatgatggaggtactgccaggccgctgtgtgcccattgccaagcgcgagctactgtgggctggctctgccgggctggcctgctggctggcaggagtcatcttcatcgaccggaagcgcacgggggatgccatcagtgtcatgtctgaggtcgcccagaccctgctcacccaggacgtgagggtctgggtgtttcctgagggaacgagaaaccacaatggctccatgctgcccttcaaacgtggcgccttccatcttgcagtgcaggcccaggttcccattgtccccatagtcatgtcctcctaccaagacttctactgcaagaaggagcgtcgcttcacctcgggacaatgtcaggtgcgggtgctgcccccagtgcccacggaagggctgacaccagatgacgtcccagctctggctgacagagtccggcactccatgctcactgttttccgggaaatctccactgatggccggggtggtggtgactatctgaagaagcctgggggcggtgggtgaaccctggctctgagctctcctcccatctgtccccatcttcctccccacacctacccacccagtgggccctgaagcagggccaaaccctcttccttgtctcccctctccccacttattctcctatttggaatcttcaacttctgaagtgaatgtggatacagcgccactcctgccccctcttggccccatccatggactcttgcctcggtgcagtctccactcttgacccccacctcctactgtcttgtctgtgggacagttgcctccccctcatctccagtgtagcctcctgtcagtgggggctggacccttctaattcagaggtctcatgcctgcccttgcccagatgcccagggtcgtgcactctctgggataccagttcagtctccacatttctggttttctgtccccatagtacagttcttcagtggacatgaccccacccagccccctgcagccctgctgcaccatctcaccagacacaaggggaagaagcagacatcaggtgctgcactcacttctgccccctggggagttggggaaaggaacgaaccctggctggaggggataggagggcttttaatttatttctttttctgttgaggcttccccctctctgagccagttttcatttcttcctggtggcattagccactccctgcctctcactccagacctgttcccacaactggggaggtaggctgggagcaaaaggagagggtgggacccagttttgcgtggttggtttttattaattatctggataacagcaaaaaaactgaaaataaagagagagagag

SEQ ID NO: 9297 - DNA, 600 bp, Homo sapiens
gacaaaacagtcattggatgcagcggttttcatggagactgtcttacgctgacaaagattattgaagcaagactaaagatgtataagcattccaataataaggccatgactacgggggcaattgctgcaatgctgtctacaatcctgtattcaaggcgcttctttccatactatgtttacaacatcatcggtggacttgatgaagaaggaaagggggctgtatacagctttgatccagtagggtcttaccagagagactccttcaaggctggaggctcagcaagtgccatgctacagcccctgcttgacaaccaggttggttttaagaacatgcagaatgtggagcatgttccgctgtccttggacagagccatgcggctggtgaaagatgtcttcatttctgcggctgagagagatgtgtacactggggacgcactccggatctgcatagtgaccaaagagggcatcagggaggaaactgtttccttaaggaaggactgatctgtgtgctcttatcaccaatcagttcagacctggttgattttgtactttggaactgtaccttggatggttttgtttattaaaagagaaacctgaagt

SEQ ID NO: 9298 - DNA, 600 bp, Homo sapiens
aaggagagtcaggtattagaggaaagagaagggtatttgtatacaaagccctggccttaaagaatgttacttagtagctactcccaaattgtcagccttcttacctggccaaggtgtccaagccagaaaggaaaaaaggttatggagtctttctcaccctaaggacagggtggaagagggtggtatatagggaagggccagataggcaacttcatttggcttgtgtgcatctggcctggaactggtgttaagccaggcttttgcttgtttgttgccatccctcaccctttgccatttcccttttcagagaatgtaaatgattttcatgttaggccaaaataaacaacttatagggtacatatgttgtcataaaaggtaaaagtgatgcatgccaaaccaaactaaaccaatttggattatctgctattcgggtaatcttcacagaaatgactgagagaagaatctgcagtttactgagggcatttcagttcctcctaccacctcaacaggactttgtccagactctcctcctcttacctttgtgccttgactgtggttctttgtggcaagatactttggttggttaaaataatatggaac

SEQ ID NO: 9299 - DNA, 600 bp, Homo sapiens
cgcccacactagcctctgtgttcccgttagggacatcacaccctgtctcacgtcgcagtgccatggacgcagcagttacagcaccattgttttagcagtgcgtgttcatatatgggcttgctacttcctgtaatgaggacgttcaacatggtgaggggctacaagaaaacgcttttctgtacagagtcttactgtagctacgctaatggttaacctgatagaattaactcgtatttttctatggttttaacctgatgctccactgtctccgtcatggggttgttttgctgtttggggttgggccttgtttccctttcctttctccagtccacgtgtagactttgcgcttgatgaagaagcagatcggaagtaactgctccctcctcaaggttgtcttcagacgtcttggggacgttcctaaacactgagggggaagacagccaatagcacccattaaaagaaatacctaaataaaacctctctcccactcagctatgctagggcttggctgtaggtgtgcactgtctatttacatccgtccttacaaccatccttgtcctccttggtaccgtatcaagctctttcccatgacatttggtt

SEQ ID NO: 9300 - DNA, 600 bp, Homo sapiens
tttttttctgggtgtgcatctgttgaaatgctcaagacttcattatttgccttttgaaatcactgtaaatgcccccatccggttcctcttcttcccaggtgtgccaaggaattaatcttggtttcactacaattaaaattcactcctttccaatcatgtcattgaaagtgcctttaacgaaagaaatggtcactgaatgggaattctcttaagaaaccctgagattaaaaaaagactatttggataacttataggaaagcctagaacctcccagtagagtggggatttttttcttcttccctttctcttttggacaatagttaaattagcagtattagttatgagtttggttgcagtgttcttatcttgtgggctgatttccaaaaaccacatgctgctgaatttaccagggatcctcatacctcacaatgcaaaccacttactaccaggcctttttctgtgtccactggagagcttgagctcacactcaaagatcagaggacctacagagagggctctttggtttgaggaccatggcttacctttcctgcctttgacccatcacaccccatttcctcctctttccctctccccgctgcc

SEQ ID NO: 9301 - DNA, 1400 bp, Homo sapiens
tatgagatggaggaagacggcgtccgcaagtgtaagaagtgcgaagggccttgccgcaaagtgtgtaacggaataggtattggtgaatttaaagactcactctccataaatgctacgaatattaaacacttcaaaaactgcacctccatcagtggcgatctccacatcctgccggtggcatttaggggtgactccttcacacatactcctcctctggatccacaggaactggatattctgaaaaccgtaaaggaaatcacagggtttttgctgattcaggcttggcctgaaaacaggacggacctccatgcctttgagaacctagaaatcatacgcggcaggaccaagcaacatggtcagttttctcttgcagtcgtcagcctgaacataacatccttgggattacgctccctcaaggagataagtgatggagatgtgataatttcaggaaacaaaaatttgtgctatgcaaatacaataaactggaaaaaactgtttgggacctccggtcagaaaaccaaaattataagcaacagaggtgaaaacagctgcaaggccacaggccaggtctgccatgccttgtgctcccccgagggctgctggggcccggagcccagggactgcgtctcttgccggaatgtcagccgaggcagggaatgcgtggacaagtgcaaccttctggagggtgagccaagggagtttgtggagaactctgagtgcatacagtgccacccagagtgcctgcctcaggccatgaacatcacctgcacaggacggggaccagacaactgtatccagtgtgcccactacattgacggcccccactgcgtcaagacctgcccggcaggagtcatgggagaaaacaacaccctggtctggaagtacgcagacgccggccatgtgtgccacctgtgccatccaaactgcacctacggatgcactgggccaggtcttgaaggctgtccaacgaatggaagctacatagtgtctcactttccaagatcattctacaagatgtcagtgcactgaaacatgcaggggcgtgttgagtgccaaggatcttgacaagttgttttgaagatggcattttgctaagtccctgagggtcactggtcctcaaagcggcatggcggcatggcgtggctggttctgccacatgccagctgtgtgacctctgagactccacttcttcagtgctgaaaataaagaaggagttttactaaggaccaaacaagataatgaatgtgaaactgctccacgaaccccaaagaattatgcacatagatgcgatcattaagatgcgaagccatcgagttaccacctggcatgcttaaactgtaaagagtgggtcaaagtaaactgaattggaaaatccaaagttatgcagaaaaacaataaag

SEQ ID NO: 9302 - DNA, 1400 bp, Homo sapiens
tgccacagaaacatggactgagctgtgtccaatgattgaagccaggaagaatcatgggctggtatttgtaaaagacaagatatttgctgtgggtggtcagaatggtttaggtggtctggacaatgtggaatattacgatattaagttgaacgaatggaagatggtctcaccaatgccatggaagggtgtaacagtgaaatgtgcagcagttggctctatagtttatgtcttggctggttttcagggtgttggtcgattaggacacattctcgaatataataccgaaacagacaaatgggttgccaactccaaagttcgtgcttttccagtcacaagttgtttaatttgtgttgtcgatacttgtggagcaaatgaagagacccttgaaacatgaaaaatgagtggacttcagactcatcagagactctaaaatatagccaccagtgctttgttccaggagtttggtgacaaagttttggtttggtgttttggtaaagaaagtttcaagtgaaatgaggttcctataaaatagatgtttcttttatatggatttccttaattcaaagatcatattttagctggccacaaaaccaagaacatatctagcaagaaaacttgaaaaagtataagcatttgttaaaaatgtgaatttcttgaatgaatttcacatttgtaactatgattttggcagaatagaagattggctcatcagtgaagcgcagtatcttagctctagattctattttcatgcatcacagaagtgctatacggttaggtctgtttgtgctcagtcaagaactaagaaatagtatgaattgtaagtcaagatgggcaactcagatggagcagcttagtctcacagtttgcttgtctatttattttatttagtgccaaatgtattccattttaaaagtaagccagagtgagtcaaggcatatacacactttctcacaaaacttcctaaacagatttgggggtttaatatgtccaactcctcatgaaatatattcaatccacttaaatatattccatctttttaacataaaatgtaaagcttagcacccatcattaatttatgtctctgttttatccagtggttaaaaaaggattctgcctctttagtcctcactgttaaataaaacccaatcatagtaagtgattaactagcaaaaagtaaagctatttatagcaaatttctagatcattagaaaagcactggtagttgtacaatatcagtgttgactttgaacttctttaacgagatcatgaattcttttcccttagccaaaacatgaaatatttaacctagttgtctctaaaagttttgtaatcatgagttagatatatgtcatctcctattcattgcttttatgtgatcaataaatcttttacaaacccaa

SEQ ID NO: 9303 - DNA, 600 bp, Homo sapiens
tgccagcttggaagagctcctgtccaccctccaaaagcggccccaaggccttagcttccttggcctgtcaggctgcgccgtccagggtcccctgggcctgggcctgtgggacaagatagccgcgcagctccgggaactgcagctgtgcagcagacgcctctgcgctgaggacagggacgccctgcgccagctgcagcccagtcggccgggccccggcgagtgcacgctggaccacggctccaagctcttctttcggcgcctctgaccctggcgctgcctttccccaccctcaccgaagcccctaataaatgaagctgctggccgggcgcggtggctcacgcctgtaatcccaacactttgggaggcccaggcgggcggatcacgaggtcaggagatcgagaccatcctggctaacatggtgaaaccccgtctctactaaaaataccaaaaattagccgggcgtggtggtggaagcctgtagtcccagctactccggaggctgaggcaggagaatggcgtgaacccgggaggcggagcttgcagtgagccgagatcgcaccactgcactccagcctgggcgacagaccgagactccgtctc

SEQ ID NO: 9304 - DNA, 1400 bp, Homo sapiens
cagtctggggaaggttgtgtgattacacgagacagaaaggaatcattggatgtatatgaactcgatgctaagcagggtagatggtatgtggtacaaacaaattatgaccgttggaaacatcccttcttccttgatgatcgcagaacgcctgcaaagatgtgtttgaaccgcaccagccaagagaatatctcatttgaaaccatgtatgatgtcctgtcaacaaaacctgtcctcaacaagctgaccgtatacacaaccttgatagatgttaccaaaggtcaattcgaaacttacctgcgggactgccctgacccttgtataggttggtgagcacacgtctggcctacagaatgcggcctctgagacatgaagacaccatctccatgtgaccgaacactgcagctgtctgaccttccaaagactaagactcgcggcaggttctctttgagtcaaaagcttgtcttcgtccatctgttgacaaatgacagacctttttttttcccccatcagtagatttttcttatttacagataacttctttaggggaagtaaaacagtcatctagaattcattgagttttgtttcactttgacatttggggatctggtgggcagtcgaaccatggtgaactccacctccgtggaataaatggagattcagcgtgggtgttgaatccagcacgtctgtgtgagtaacgggacagtaaacactccacattcttcagtttttcacttctacctacatatttgtatgtttttctgtataacagccttttccttctggttctaactgctgttaaaattaatatatcattatctttgctgttattgacagcgatataattttattacatatgattagagggatgagacagacattcacctgtatatttcttttaatgggcacaaaatgggcccttgcctctaaatagcactttttggggttcaagaagtaatcagtatgcaaagcaatcttttatacaataattgaagtgttccctttttcataattactgtacttcctagtaaccctaagttgctaacttaaaaaaccgcatcccaggttctgttaatttagtaaataaacaagtcaaagacttgtggaaaataggaagtgaacccatattttaaattctcataagtagcattcatgtaataaacaggtttttagtttgttcttcagattgatagggagttttaaagaaattttagtagttactaaaattatgttactgtatttttcagaaatcaaactgcttatgaaaagtactaatagaacttgttaacctttctaaccttcacgattaactgtgaaatgtacgtcatttgtgcaagaccgtttgtccacttcattttgtataatcacagttgtgttcctgacactcaataaacagtcattgg

SEQ ID NO: 9305 - DNA, 1400 bp, Homo sapiens
cagggcgacagctcagtgaagtcttcattcagttaccttcaaggaaagaattaccagaatactatgaattaattaggaagccagtggatttcaaaaaaataaaggaaaggattcgtaatcataagtaccggagcctaggcgacctggagaaggatgtcatgcttctctgtcacaacgctcagacgttcaacctggagggatcccagatctatgaagactccatcgtcttacagtcagtgtttaagagtgcccggcagaaaattgccaaagaggaagagagtgaggatgaaagcaatgaagaggaggaagaggaagatgaagaagagtcagagtccgaggcaaaatcagtcaaggtgaaaattaagctcaataaaaaagatgacaaaggccgggacaaagggaaaggcaagaaaaggccaaatcgaggaaaagccaaacctgtagtgagcgattttgacagcgatgaggagcaggatgaacgtgaacagtcagaaggaagtgggacggatgatgagtgatcagtatggacctttttccttggtagaactgaattccttcctcccctgtctcatttctacccagtgagttcatttgtcatataggcactgggttgtttctatatcatcatcgtctataaactagctttaggatagtgccagacaaacatatgatatcatggtgtaaaaaacacacacatacacaaatatttgtaacatattgtgaccaaatgggcctcaaagattcagattgaaacaaacaaaaagcttttgatggaaaatatgtgggtggatagtatatttctatgggtgggtctaatttggtaacggtttgattgtgcctggttttatcacctgttcagatgagaagatttttgtcttttgtagcactgataaccaggagaagccattaaaagccactggttattttatttttcatcaggcaattttcgaggtttttatttgttcggtattgtttttttacactgtggtacatataagcaactttaataggtgataaatgtacagtagttagatttcacctgcatatacatttttccattttatgctctatgatctgaacaaaagctttttgaattgtataagatttatgtctactgtaaacattgcttaatttttttgctcttgatttaaaaaaaagttttgttgaaagcgctattgaatattgcaatctatatagtgtattggatggcttcttttgtcaccctgatctcctatgttaccaatgtgtatcgtctccttctccctaaagtgtacttaatctttgctttctttgcacaatgtctttggttgcaagtcataagcctgaggcaaataaaattccagtaatttcgaagaatgtggtgttggtgctttcctaataaagaaataatttagcttgac

SEQ ID NO: 9306 - DNA, 600 bp, Homo sapiens
agtttgtgtctacccctgagctggctgcccaatctgatttcatcgtcgtggcctgctccttaacacctgcaaccgagggactctgcaacaaggacttcttccagaagatgaaggaaacagctgtgttcatcaacatcagcaggggcgacgtcgtaaaccaggacgacctgtaccaggccttggccagtggtaagattgcagctgctggactggatgtgacgagcccagaaccactgcctacaaaccaccctctcctgaccctgaagaactgtgtgattctgccccacattggcagtgccacccacagaacccgcaacaccatgtccttgttggcagctaacaacttgctggctggcctgagaggggagccgatgcctagtgaactcaagctgtagccaaacagtagagatggagggccgggaagcaaaccgtgccctggtattgtcagacacacccaggcttgatttggatccacaggcagagccaagggaaggtgtgattctctgaggaaagagtgattctgatatatgtacttgtcacattggtgttggacacatttgcgccaaaagtatggtaattctattattaaataattctctg

SEQ ID NO: 9307 - DNA, 1400 bp, Homo sapiens
attaccttaaaccttcaaatatgaatgcgttcatggaaaatcttaagaaaaacattcatcttcggacctcttactctgaattggttggattctggagtgtagaatttggaggcagaacgaataaagtgtttcatatttggaagtatgataattttgctcatcgagctgaagttcggaaagccttagccaactgtaaggaatggcaagaacaatctatcattccaaatttggctcgcattgataaacaagagacggaaattacttacctgataccatggtccaaattagaaaagcctccaaaagaaggagtctatgaactagctgtttttcagatgaaacctggtgggccagctctgtggggtgatgcatttgaaagagcaattaatgcccatgtcaatttaggctacacaaaagtagttggtgttttccacacagaatatggagaactcaacagagttcatgttctttggtggaatgagagtgcagatagtcgtgcagctgggagacataagtcccatgaggatcccagagttgtggcggctgttcgggaaagtgtcaactacctagtttctcagcagaatatgcttctgattcctgcatcattttcaccattgaaatagttttctactgaaatacaaaacatttcattaactgctctaagatgtgtctgctaatggtgcttaaattctcccaagaggttctcgcttttatttgaaggaggtggtaagttaattagttaatttgctgtgcttcttgcatttttgaaagttacatattctccactgctttaagaaataattcagttcactttcaccttggcatttcagtatctgttacacattagaagtagttgtcactatttcatcatcttggtttttcatttgttttagaatacctcttctgtattttgataactcattgctttatagcattttcttttactcaaataaggattttacatttccttgcctgacagtatttttgaattatttatataaaatatctatcttttcatcatgtctatagttcctgagattttaaaaaaatttgcttagtaaaggttattttgtgatataaaatgggatttataaaaatattagattgtttatttctttactgtggaaaagtacaatgtcatctgtattaattattgcttttacattcattgattattagtcattctaacttggaaaataatgcaattgggtcacagtgttaaaaatctagaaaagacttgttggtttatatgctgaaattgttcatttataattaattttactaatttctacttagtttggatcactaacagagatcttgggacatttatttgttttaaagaaatatttatggttatggaaacgcttgccctaataaaaatcctgcatattcattgttttttt

SEQ ID NO: 9308 - DNA, 600 bp, Homo sapiens
catgctcatttagacatcgaggccttcaccatggaccgggaagtgcgcaaaatcaaacaaggcctgggcttgaaatttgctgagctggtgtataccggtttctggcacagccctgagtgtgaatttgtccgccactgcatcgccaagtcccaggagcgagtggaagggaaagtgcaggtgtccgtcctcaagggccaggtgtacatcctcggccgggagtccccactgtctctctacaatgaggagctggtgagcatgaacgtgcagggtgattatgagccaactgatgccaccgggttcatcaacatcaattccctcaggctgaaggaatatcatcgtctccagagcaaggtcactgccaaatagacccgtgtacaatgaggagctggggcctcctcaatttgcagatcccccaagtacaggcgctaattgttgtgataatttgtaattgtgacttgttctccccggctggcagcgtagtggggctgccaggccccagctttgttccctggtccccctgaagcctgcaaacgttgtcatcgaagggaagggtggggggcagctgcggtggggagctataaaaatgacaattaaaagaga

SEQ ID NO: 9309 - DNA, 600 bp, Homo sapiens
ttgcccaggagggtctcgaactcctggcctcaagtgatccaccggcctcggcctcccaaagtgctgggatgacaggcatgaatcactgtgctcagccaccatctggagttttaaaaggctcccatgtgagtccctgtgatggccaggccaggggacccctgccagttctctgtggaagcaaggctggggtcttgggttcctgtatggtggaagctgggtgagccaaggacagggctggctcctctgcccccgctgacgcttcccttgccgttggctttggatgtctttgctgcagtcttctctctggctcaggtgtgggtgggaggggcccacaggaagctcagccttctcctcccaaggtttgagtccctccaaagggcagtgggtggaggaccgggagctttgggtgaccagccactcaaaggaactttctggtcccttcagtatcttcaaggtttggaaactgcaaatgtccccttgatggggaatccgtgtgtgtgtgtgtgtgtgtgtgtgtgtgtgtgtgtgtgtgtgtgtgttttctcctagacccgtgacctgagatgtgtgatttttagtcattaaatggaagtgtctgcc

SEQ ID NO: 9310 - DNA, 600 bp, Homo sapiens
tggaaccagcaacagccccaagactttttctctgtgttaggaaagatgggaaatggtttctgtaaccattgtttggatttggaagtactctgcagtggacataagcattgggccatagtttgttaatctcaactaacgcctacattacattctccttgatcgttcttgttattacgctgttttgtgaacctgtagaaaacaagtgctttttatcttgaaattcaaccaacggaaagaatatgcatagaataatgcattctatgtagccatgtcactgtgaataacgatttcttgcatatttagccattttgattcctgtttgatttatacttctctgttgctacgcaaaaccgatcaaagaaaagtgaacttcagttttacaatctgtatgcctaaaagcgggtactaccgtttattttactgacttgtttaaatgattcgcttttgtaagaatcagatggcattatgcttgttgtacaatgccatattggtatatgacataacaggaaacagtattgtatgatatatttataaatgctataaagaaatattgtgtttcatgcattcagaaatgattgttaaaattctcccaactggttc

SEQ ID NO: 9311 - DNA, 1320 bp, Homo sapiens; identical to SEQ ID NO: 4076

SEQ ID NO: 9312 - DNA, 1117 bp, Homo sapiens; identical to SEQ ID NO: 4077

SEQ ID NO: 9313 - DNA, 1400 bp, Homo sapiens
gaagtggggtataatatttaacgaatcatgattcagattgtaccattacatgtttcagtgcagcatggttactaacgctatgtcagactaatattaaaatcagaaaatttaaatgctggtgctggtcagactttttttgttagattctctcatttaaaaaaaatactgtttgtttaaagcatgcataaaaatttatgtattgaaatatacttaaaaattcaagatgcttcccatttgtgtaatatttacctggaggactcgtacttaggtgtcttaacgtgaattgagtctccaaggtctccatgtgaaacaagcaaaaagagaattatctgtaatgttgtaatttgtacctaagttttttaatgagtgaaatttgcattataaactttttccattcataaatacataagtgaaccaaaggtttttgtcctttccttcactgatttgctttaaaaaaaataaaagataatgatttattgcagaattatgattctattttctcaatatgttaacttggaaaaaaattttagccttatcttaatctgtcccaacagcaatgtgacggatttttgcagattcaaaatctgcaatggttatttacaagtcaatctactgaattccttttttaaataatcttttgaaactaagaaaatgtgtcaaattgtgtgcattcattctgtaggtaaaattcttaaggattgccatgtcagtccttcagttgtacagtgaactgttgtacactggttcaatgaaaggaagttaaaagtaccttttacatattgtaaaagtggatacagttgatttgtgagtaggcactctttaatccattacctggcactagcaacattagaattttaaaataaaataattgggaaagaaggtgggtcatgtattaatcagtgaacagagatttacctaaccaacagacttggattgtcttttgacataatcaaaatgcaacacatgcactttgtgtgtctcctcttaattgaagggagggctgagggatgttttctcttcttgtcttgtgtataattctctattgcttaggatattaaagtagagcactcaagtgtgggtttctgtgttattgaggatttgtttggaattcaaattacagttatgtactggatgctacagacttataacagcatagtgaatggtaagactagtgcaaaacagttatttctgaaaattaaagaccattattgctaccaaatcaatgtgactatttcatatgcattttgcctttgttaattttaaacaaacaaagtatcattagtgatcagctagctaccttctactttccatttttcaagtggattgttctcttaatttgtatataacctgttgtctaaattttatgtacagtcttttataataaaccattctcctatatg

SEQ ID NO: 9314 - DNA, 600 bp, Homo sapiens
ctctcctttctatgaccgcttctccgaggccaggatcctcttcctgctccagttgctggccgaccacgtccctggcgttggcctggtcacaacgtcccagcgtgcggcctctccgtgcctaccggccaggccccacacacagccctggtcgccaccagcgttcctcccaggacacccttgactgcgctctcctgtgacgatgccactgcagcccgcaccttgtcactgctgggccaagaagccttcactaggagtgggatccaggctcctctcccacagaaagcggtgacttcacctcatggagcccgggaagctgctcgcctcggcagccataggagcgaacactgctgctctctcgctggcccctggtgaggacaggaagcctgaacccgggtgatggctgaacgctgcccagcgtgtcttctggctggggccctccgtctgccccttctccgcagggccctgtggctctggcagccccaggccatggcgttgccagcctccctgtgacagagcctggtgaacagtgagcctggctcccacgcaagtggcactttaagccctgcatcctcggttgagagtaaaaggcttttctccctt

SEQ ID NO: 9315 - DNA, 600 bp, Homo sapiens
tgtgaattggaggcattagtgggaaggatggaagcaaaagccaaccaaataactaaagttcgaaaataccaagcccagctggagaaacagaagttagagaagcagaagaaggaattaaaagctaccaaaaagactcttgatgaagaaggaaacagcagcagccgttctggaatcacagggaccacaaataagaaagattttatgaaactgagacctggagaaaaaaggagaaaaaatcttcagttattgaaggacatgcaaagcatacagaattcattacaaagcagtagtttgtgttgggattactgactcataaccaggtcagaaattttattcagataatctgtacctcatcaatcagatgatgacaatttacttcccaggtctcatactcacttatgttggaattaattaatagcaggtgttaaaggacccaggcttcattacacaggcttttcatgtatgcaggatgactcaatgttaaagcatttaaatggaaaccaggggagttttaaagcccgagaaaccacacataatcttttgttgagatgagtttgctgtactgacgctgcactttgtaaacagattaccagtttttta

SEQ ID NO: 9316 - DNA, 600 bp, Homo sapiens
tcatcatctttgtggtcttccttgcttgaaccctctctactctgaggcactctgttggggtttgggaccctcctgggaaggcaagtggccagtgctgccactgagcctgtgcagggtacttgggagaaaggccctgtttccctggaactgctaagaatgaccactgcccctgatcccccaccccttgcctctggccaccctgtcctccccccaccaccctcaggcctatgaaacacacagggttctagatttgaactctgctgtgaagtgactggaagggagcagaggccagctgggggccagtgggggaggttgtttccactaggagatttttataaaccctctccagcctctcccaaaggaagcgttggcagcaaagggagatgatgcccttacccaccttcctgtgagtgaagagaggaagcagccccagggaccaattttcccaattgacctctttcttcctctttcaccatgtgaggcagggagccctgagcccttcagctgcctgcacaacccctgacattggctgctggtgactcaatctgccaaatgtgctgcagctcgttttctcccaattacagcaagactgtcagcctc

SEQ ID NO: 9317 - DNA, 1400 bp, Homo sapiens
ggcgtctgggctggtcgaggagcccatgctgggcccgcctttccatcccacccccaggttcaaggctgtgtctgccaagagcaaggaagacctggtgtcccagggcttcactgaattcacaattgaggatttccacaacacgttcatggacctgattgagcaggtggagaagcagacctctgtcgccgacctgctggcctccttcaatgaccagagcacctccgactaccttgtggtctacctgcggctgctcacctcgggctacctgcagcgcgagagcaagttcttcgagcacttcatcgagggtggacggactgtcaaggagttctgccagcaggaggtggagcccatgtgcaaggagagcgaccacatccacatcattgcgctggcccaggccctcagcgtgtccatccaggtggagtacatggaccgcggcgagggcggcaccaccaatccgcacatcttccctgagggctccgagcccaaggtctaccttctctaccggcctggacactacgatatcctctacaaatagggctggctccagcccgctgctgccctgctgcccccctctgccaggcgctagacatgtacagaggtttttctgtggttgtaaatggtcctatttcacccccttcttcctgtcacatgacccccccccatgttttattaaagggggtgctggtggtgagccgtgtgtgcgtgtccctgctctgctgcccgcctggctgctctgtctgctgccccctccccccaggtgggtccccctgcttttcacctatctactcctgagcttccccaacaggagcaggtttgaggggccaggcctcttggaggcccctcctgcttcgttgggttctgcttccttcccttcttagctggctcaggggcttctatgggatcctggaagttccttagggacttgcccagggtcccagggccacccacacttcatctgctccctcataggccccacctccacgtcccggctgggccccagaccccagcttcctgccctccaccgggagtctgcatggttgggagtcctgggtggaggggcctttgtgaggctggacccggctcagggcaggtggaggagctgggcctcccacagggtgcccgggcagtgccatcctggtgggggagggcagccttcaaacgtgtggggtctacagtcctcaggtctaggcagggctgccggttctccacctccccatccgccccaggccccctgcctgtgcctgccttgcaccccctctgcttgggccacggtgtctctgcattgcctgcctttttgccttcacctcttttcttccccgccccctgcacattcggggtctcagcccccaggctgtgagctccttgggggcaggccctcaataaatgtgaactgctgctgc

SEQ ID NO: 9318 - DNA, 1400 bp, Homo sapiens
tggtgggtgactccatgtaactttcatactccatccccctgaagtggaagcggcaggaataccactgctcctcggcccatcactcccccagaggcagggacgtgaacacatagtcgtcattcttgctgcccctgcctgtgctcccttccatgaccgctagtgggagccaagggagataaggcccagcccttaggagttagggctgagaggggagcccacgctctcatacccagcaagctgcagagtgatcagacagcccattccctaggatcgcaagtcctacagctggaaacagcggctcttcatcatcaacttcatctccttcttctcggcgctggctgtctactttcggcacaacatgtattgtgaggctggagtgtacaccatctttgccatcctggagtacactgttgtcttaaccaacatggcgttccacatgacggcctggtgggacttcgggaacaaggagctgctcataacctctcagcctgaggaaaagcgattctgaacccttcagtcctgcttgggaggacgcagcccactgcccagaaacaagaaacacgataccattctggccttccccaccccacatcctctcttggccttactgaagatgggggaagggtaagaaggaagggtgtaggccaaggctcaccccagtgctgctggcttctcctctccacccctcatatgggcgtggggtcctcaaacatcacctttacctgagaggccccaagaagctgagctggcagagagctccaccatttggtgctaaaaaaaaaaacgtcctgaggttcatgaccaccatccagtttctggcctttacacagtcacctttcactgaggtcaggagcccctgagcagtggctgctccctgacaaccacagccatttctctgcacgggggtcattcataggactaatgtatttcatgatctactgtgcacatccaggcctgtggccacagtcccctgctaaagttgctcaggtgttctagtcctgacttcacctttttgatttggtgtgtgccctagggtatgtacccttccccatctgagcctcggtgtgtccatgtgtctggcgggggatgggtggactgtatgatttccaaggactctaccagtcagtggttctgatgtcatcgggtggaggtggtgttctatacctaaaggatgacctgctccagaaacagcaccagcacagcatgtattttcttctcttctgaaagttctggcttgtagacccctcccctcctttgcaaaggtatgggatagaggggtcagatgcagatctctactgtaaaatgggctccctggtatctcctgtcttccctactgctccaaaccctaaattttggttgtacattttatttgaaaggaaaataaattttttttttgggcc

SEQ ID NO: 9319 - DNA, 1400 bp, Homo sapiens
gcctgcggcgctgagcgcggcggcggcggctgctctggcggccgccctgctcctgctgcgtcgtgaggacccggggccgggggctggccccagcatggccgaaacagaagccctgtcgaagcttcgggaagacttcaggatgcagaataaatccgtctttattttgggcgccagcggagaaaccggcagagtgctcttaaaggaaatcctggagcagggcctgttttccaaagtcacgctcattggccggaggaagctcaccttcgacgaggaagcttataaaaatgtgaatcaagaagtggtggactttgaaaagttggatgactacgcctctgcctttcaaggtcatgatgttggattctgttgcctgggtaccaccagagggaaagctggggcggagggatttgttcgtgttgaccgagattatgtgctgaagtctgcagagctggcaaaagctggagggtgcaaacatttcaacttgctatcctctaaaggagctgataaatcaagcaattttttatatctacaagttaagggagaagtagaagccaaggttgaagaattaaaatttgatcgttactctgtatttaggcctggagttctgttatgtgataggcaagaatctcgcccaggtgaatggctggttagaaagttctttggctccttaccagactcttgggccagtgggcattctgtgcctgtggtgaccgtggttagagcaatgctgaacaatgtggtgagaccaagagacaagcagatggaactgctggagaacaaggccatccatgacctggggaaagcgcatggctctctcaagccatgaccacattggagaaatggtttttattgtcaaccttaacacccatcaccaaatcggtaatttcagggtctaaaaaaagtcagcatgttttaactttgttgttttactatcctcaggcatccattccaatcaagaaatgatggtgctctgcatcagtggttcagagcctggttatacatatagatcactcagggagctttggaaaaataaagatttgtcagccctatctcaaacttgaatcaaaatttctggggtgtgggcacaataatctgtaattttctttgtttatacttcccctgatgccactggttccgatgccactggctggggggcctgctttgaaatgcttgtctgcagagtcacagcagccatgaaaaccttatgaccgtgcaaatgagctctgctctaaaattgttgacattcatgtctctgagttacaaaagtgctaattcactacatgtaattgtgtaagtaaacattgtgcctttactacttctttatgtaatagaagttatatacctaagcttatataatacatggggaggattaaataaaggaataaagatgaatggacaactcc

SEQ ID NO: 9320 - DNA, 600 bp, Homo sapiens
tgacatgaaaataattgtgaaatatggaattatttctgacacatgaagcccactaaactatgctttcttataatgcatatttcttctcagtttaaatgtatgtaaatatcgaagctatatggtatgatttataaagataaatgggccaaagtgtacattgagactggcagccatctatggtaccactgaaaccctgacccagaaaagtggcttgcttggacacccagctgcctttgtttctgcattaaaccaatattgatcacacatatgacacaggctagtcctataaaagtaatgacttcatagaaatggcattataatttttaagttgatactctacaggtagctattgatataattagttttaataaaacatgctgcaaccatggtatacaacaaaaatacatttctttggtgattgaaattaaggccgtatttacaatgacttaatataagactgacttttatcctgcttcataacttgtatggagaactcaccaagaaagaattcaatactgtgaaatatgcagcaagaagattggtctttacctaggctgtgtttcctaagctctgagttttcagcaccagtagatttgtatt

SEQ ID NO: 9321 - DNA, 976 bp, Homo sapiens; identical to SEQ ID NO: 4086

SEQ ID NO: 9322 - DNA, 1400 bp, Homo sapiens
gtactcgccggccggagcccccggcttcccggggccgggggaccttagtggcacccacacacagcctactttccaagcggagccatgtttggtaacggcaatgcggctgcaacggcggtgagtgctgagccggtgaccagcacactttgggcttctggacgatccgtgcagcgattggccccaggttgccatcctcagttgtttattggaagaaaacagcccaaagatgagagtgattcgcgtgggtacccgcaagagccagcttgctcgcatacagacggacagtgtggtggcaacattgaaagcctcgtaccctggcctgcagtttgaaatcattgctatgtccaccacaggggacaagattcttgatactgcactctctaagattggagagaaaagcctgtttaccaaggagcttgaacatgccctggagaagaatgaagtggacctggttgttcactccttgaaggacctgcccactgtgcttcctcctggcttcaccatcggagccatctgcaagcgggaaaaccctcatgatgctgttgtctttcacccaaaatttgttgggaagaccctagaaaccctgccagagaagagtgtggtgggaaccagctccctgcgaagagcagcccagctgcagagaaagttcccgcatctggagttcaggacgggggaaacctcaacacccggcttcggaagctggactattatctcgagttcagtgccatcatcctggcaacagctggcctgcagcgcatgggctggcacaaccgggtggggcagatcctgcaccctgaggaatgcatgtatgctgtgggccaggaaggaagctgcagtgtgccagtagccgtgcatacagctatgaaggatgggcaactgtacctgactggaggagtctggagtctagacggctcagatagcatacaagagaccatgcaggctaccatccatgtccctgcccagcatgaagatggccctgaggatgacccacagttggtaggcatcactgctcgtaacattccacgagggccccagttggctgcccagaacttgggcatcagcctggccaacttgttgctgagcaaaggagccaaaaacatcctggatgttgcacggcagcttaacgatgcccattaactggtttgtggggcacagatgcctgggttgctgctgtccagtgcctacatcccgggcctcagtgccccattctcactgctatctggggagtgattaccccgggagactgaactgcagggttcaagccttccagggatttgcctcaccttggggccttgatgactgccttgcctcctcagtatgtgggggcttcatctctttagagaagtccaagcaacagcctttgaatgtaaccaatcctactaataaaccagttctgaagg

SEQ ID NO: 9323 - DNA, 1400 bp, Homo sapiens
tgtgtaaggtatatgttttataattcataaccatagcctcgatcatcaagaaatactttcgaaatttcattttccttcagaatatcttaagagtgctaaatttttaactgcctttttgtcgagtcaaactgtgggattctgatttgtattaaaattgtaagctcctcactggtatactatcatcctggaggggtgttgtatggctgagcaagagagagagagaatgagagagagactgtgtgtgtgtgtgtgtgtgtgtgtgtgtgtactctgtgtgtgtatgagagagagaaatgctaaccttgtagcatgtgaagaatgtctgtaccttgatacgatagttacataatcagtatatttggtttctagatcactgtgcttattttgtttcaatctctgactaaaaatacttaaatttggtttgttaattcttattttagaaattataattttagtttatattaatttcggttatagcttactgaagaaatctttccagttagaaggaggttctaatattcacatgttctaatactttgtttattgtaaaacagctaaatttggagatacgtaaagccttgttttctctgtgtggttcagctactttccatttggtattacacagtcaaatttacatttatctattaaaattgccattttattaaacattttcatgcacagtagattcaagttgtgtctgaaaatatctcttgtgcttttttgattttgctgactttaaaaggattaatctgggcagacattatgtaaaagaaaggttgcgtttaatatattttttgaactttgtaggacaaaacatagctggttaaccttgaagtgactgttgtaccatggttgtgcacatgcttcagaatcctatggaagagaatattcctacttgcagtacatcaaaggaatggatggtggaccctactattcatgttttgagacataaatgttcactttaaagcaattgcataatagataaaaacctgaactttcattggatttttgttaattttcctcattttgaattatgtgcactaccatagctacatcagtttgatacagtattgaaaaattatcagttatattttgctgtttatgatctatttgtagattaggattaaaatggatttaatccatttttaaggctgtgtgaatttttctaaacaagaaccatttgcaatatggatttcttagagattaaaccaattataacttattagcagtcgcgagcacatgttcatatagtcaatgtaaaaatacactaatgagtatttggtaaatcccagtaggcttttaccattagcataattttgtgttgtacaattaagttacaattacatctctaattttggataatattcattggttaacaataaagtgacaaaagctcatgc

SEQ ID NO: 9324 - DNA, 1364 bp, Homo sapiens; identical to SEQ ID NO: 4089

SEQ ID NO: 9325 - DNA, 1400 bp, Homo sapiens
ctgcaatgctctgcacttcttctccaggatacctcgaacctgctcaagcgctgccatgggtcccaggccagctaccttttccagcaggacaagttctacgatgtggctctggacacgggagacaaggtggtgcagtgtggccgccgtgtggactgtctgaagctgtggctcatgtggaaggcacagggcgatcaagggctggagcggcgcatcgaccaggcctttgtccttgcccggtacctggtggaggaaatgaagaagcgggaagggtttgagctagtcatggagcctgagtttgtcaatgtgtgtttctggttcgtaccccccagcctgcgagggaagcaggagagtccagattaccacgaaaggctgtcaaaggtggcccccgtgctcaaggagcgcatggtgaaggagggctccatgatgattggctaccagccccacgggacccggggcaacttcttccgtgtggttgtggccaactctgcactgacctgtgctgatatggacttcctcctcaacgagctggagcggctaggccaggacctgtgagccttctctgtcttgctgccggccttgataccacccctcacccgcagagtcactgcattccctcccagcctttgaggccgggtgcagtggctcacgcctgtaatcccagcactttgggaggccgaggcgggtggatcacttgaggtcaggagttcgagaccagcctggccaataaggtgaaaccctgtctctactaaaaatacaaaaattagccgagcatggtggcctgtgcctgtaaacccagctactcaggaggttggggcagaattgcttgaacccagggggcagaggttgcagtgagccgagattgcacccctgcactccaggctgggcaacagtacgagactctgttccaaaaaaaataaaaaagaacagcctttttaggccacagtgacctgcgcaatgtttatatgctttgacctactaactttctcctaactaaatatttgattttaggagagtgtttaaataaattacagtatgtctatatgatgaaatgttattttgccattaaaattttgtttacaaagataatttttattgacataaaaataactttaatgtaatttatgttgaaaaagctgaatacaagtctttatatagagtaatatttgagctgtgttcaaaaatacataggaaaagactgataaaatgaaatatggcaaaatgttaatagttttccctggaataggataataggcaattttaaaacagactcctttaaaaaaacaaacaaacaaaaaaaacatagacttctttatatcttttgagctccctcccttttattatgtaatgaatatgtgttgcttttgtaataggaaaataataaagttaaaatttcaactgca

SEQ ID NO: 9326 - DNA, 600 bp, Homo sapiens
ctctctatgcggaaccaccacagtgatctcacattttgcgagattatcctgatggagatggagtcccatgatgcagcctggcctttcctagagcctgtgaacccacgtttggtgagtgggtaccggcgcatcatcaaaaatcctatggatttttccaccatgcgggagcggctgctcaggggagggtacaccagctcagaggagtttgcggctgatgccctcctggtatttgacaactgccagactttcaacgaggatgactctgaagtaggcaaggctgggcacatcatgcgccgcttcttcgagagccgctgggaggagttttatcagggaaaacaggccaatctgtgaggcaagggaggtggggagtcaccttgtggcatctccccccaccttccaaacaaaaacctgccattttcacctgctgatgctgccctgggtccagactcaagtcagatacaaccctgatttttgaccttgcccttggcagtgccccacatcctcttattcctacatccctttctcccttccctcctcttgctcctcaagtaagaggtgcagagatgaggtccttctggactaaaagccaaaaaaagaaag

SEQ ID NO: 9327 - DNA, 1400 bp, Homo sapiens
catggacagtgtaattgcggaagatgtgactgcaaagcaggctggtatgggaagaagtgtgagcacccacagtcctgcacgctgtcagctgaggagagcatcaggaagtgccagggaagctcggatctgccttgctctgggaggggtaaatgtgaatgtggcaaatgcacctgctatcctccaggagatcgccgggtgtatggcaagacttgtgagtgtgatgatcgccgctgtgaagacctcgatggtgtggtctgtggaggccacggcacatgttcctgtggtcgctgtgtttgtgagagaggatggtttggaaagctctgccaacatccgcggaagtgtaacatgacggaagaacaaagcaagaatctgtgtgaatcagcagatggcatattgtgctcggggaagggttcttgtcattgtgggaagtgcatttgttctgctgaagagtggtatatttctggggagttctgtgactgtgatgacagagactgcgacaaacatgatggtctcatttgtacagggaatggaatatgtagctgtggaaactgtgaatgctgggatggatggaatggaaatgcatgtgaaatctggcttggctcagaatatccttaacaattacatgagagaggtctggattcttattttttctgggccattagaacagataaatgcgaaggaaaccatgtatattcaccactaggacaggttaaaaagaccattgtatgtttttctatttctgaattacgaatgaaatccgagtacctattagaaatgagttatgcaaatttagatgcaaataacattagaaaaaaaagattcttccataattaacataagtggttcctaacgagagcaatttttccacccaaaagtcatttggcaacatctacagacaattttgattgtcacactgggtcgggtaggaaggtatgctgcagacatttggtgggtagaggccagggatgctgctgagcatcccgcagtgtacaggacagcccccaaacaaggaattatccagccccaaatgccaatagggctcaaactgagaaacattgagttatatggctattagaaatccacattcttacacaagaaagaccatattagaatctaaggaaaacatgcatattcacattaattaatcgatcagatttttccagaattccgtatcagtcaccattttaatatggggacaatgaagacaagcacacaggaggtagaatatcagagtggggctggatcaagggcaaaaactggtcattaagtcatctgacattaaatcatttagccactaagttatttgtctactctcactttaaactcaccaaagaagattctcttaaagaaattatgaaaaatgtacaatttaacattttaaataaatagtgacagaagtt

SEQ ID NO: 9328 - DNA, 600 bp, Homo sapiens
cctgagagcaaggaagaacatgcgatatacacagcagacctagccatgggcacaagagcagcctccactgggaagtctaagagtccatgccagaccctggggggaagggctctgaaggagaacccagttgacttgcctgccacagagcaaaaggagaattgcttggattgctacatggaccccctgagactatcattattacctcctagggccaggaagccagtgtgtcctccgtctctgtgcagctccgtcattaccataggggacttggttttagactctgatgaggaagaaaatggccagggggaaggaaaggaatctctggaaaactatcagaagacaaagtttgacaccttgatacccactctctgtgaatacctacccccttctggccacggtgccatacctgtttcttcctgtgactgtagagacagttctagacctttgtgatagaactaaaatgctctctgtactctagtctcctgcctcctcagctctgcaagtagtttagtaggaatgaagtggaagtccaggcttggattgcctaactacactgctaaaaatatttgtaatccttaataattaaactttggatttgtt

SEQ ID NO: 9329 - DNA, 600 bp, Homo sapiens
ggttactattgaacatgctagggctcggtcacgaggtggaagaggtagaggacgatactctgaccgttttagtagtcgcagacctcgaaatgatagacggtatgtgaagggtggatggctgcattgaacaattattgtaggggtagcatttaagattcaggagtcattagcagtgatgattttgggtcctgccgtataatctgttcttctattcccacgttagccagttgttcttgatgaatctatatgagtcatagaacacaaatctattgacggaagtcattagaatggcttgtgatatctgatggcttgaacttgcccacagttgaacacaagtgctgtcattgcatttcttccattgtgaatacgaattttcttcctcagaaatgctccacctgtaagaacagaaaatcgtcttatagttgagaatttatcctcaagagtcagctggcaggtttgttgaaatacagttttgagttattttgatgtggctttttaaaaaagttaatgggtagctaatgttgtattgttttattaaaagtagttttaaattaatggatttaatggaattgtaattttaaacatttaattaaatgtaat

SEQ ID NO: 9330 - DNA, 600 bp, Homo sapiens
ggcaagattctgggaaagttcttccttgctccgcagaagagagtaagttcccttggaggaactgcttcctgtagggcaagaactggaaaatgcaagcgccctgaacttttttggtacttgaactaatattaattgtttaggggcttctttctttgtcactaccaatcctccaacttgatgcagaagaaacacaaacagtaaaataggtcacagacaaatagtttagagatttaagagatacgttagagatttaagagactgaaaactattaaagtcaaattggctgatctttccgttgcattcatgatgcaaaatcagtggcaaggtgccgggcgcggtggcttacgcctataatcccagcactttgggaggccgaggcgggcggatcacttgaggtcaggagttggagaccagtctggccaatatggtgaaaccccgtctctactaaaaatacaaacaaattagccgggcgtggtggcgtacgcctatagtcccagctactcgggaggctgaggcaggagaatcgcttgaacccaggaagcagtggttgagatcacgccattgcactacagcctgggtgacagagcaagactccgtctc

SEQ ID NO: 9331 - DNA, 1400 bp, Homo sapiens
gcaggacaacatcgcctgcacctcaccccatgtgctcaagggtacgccgctgagccgcctgccgccactgccatgctcggcgccctcagtgcagctcagctaccaacccagccaggatggtgccgagctgcggcctggttttgtgctggcactgcactgtgatgtggacgggcagccggcccctcagcttcactggcacatccagatacccagtggcattgtggagatcaccagccccaacgtgggcactgatgggcgtgccctgcctggcacccctgtggccagctcccagccgcgcttccaggcctttgccaatggcagcctgcttatccccgactttggcaagctggaggaaggcacctacagctgcctggccaccaatgagctgggcagtgctgagagctcagtggacgtggcactggccacgcccggtgagggtggtgaggacacactggggcgcaggttccatggcaaagcggttgagggaaagggctgctatacggttgacaacgaggtgcagccatcagggccggaggacaatgtggtcatcatctacctcagccgtgctgggaaccctgaggctgcagtcgcagaaggggtccctgggcagctgcccccaggcctgctcctgctgggccaaagcctcctcctcttcttcttcctcacctccttctagccccacccagggcttccctaactcctccccttgcccctaccaatgcccctttaagtgctgcaggggtctggggttggcaactcctgaggcctgcatgggtgacttcacattttcctacctctccttctaatctcttctagagcacctgctatccccaacttctagacctgctccaaactagtgactaggatagaatttgatcccctaactcactgtctgcggtgctcattgctgctaacagcattgcctgtgctctcctctcaggggcagcatgctaacggggcgacgtcctaatccaactgggagaagcctcagtggtggaattccaggcactgtgactgtcaagctggcaagggccaggattgggggaatggagctggggcttagctgggaggtggtctgaagcagacagggaatgggagaggaggatgggaagtagacagtggctggtatggctctgaggctccctggggcctgctcaagctcctcctgctccttgctgttttctgatgatttgggggcttgggagtccctttgtcctcatctgagactgaaatgtggggatccaggatggccttccttcctcttacccttcctccctcagcctgcaacctctatcctggaacctgtcctccctttctccccaactatgcatctgttgtctgctcctctgcaaaggccagccagcttgggagcagcagagaaataaacagcatttctgatg

SEQ ID NO: 9332 - DNA, 600 bp, Homo sapiens
tcagaggcagcaccaccacacagtcacccctccctccctctttcccaccctccacctctcacgggccctgccccagcccctaagccccgtcccctaacccccagtcctcactgtcctgttttcttaggcactgagggatctgagtaggtctgggatggacaggaaagggcaaagtagggcgtgtggtttccctgcccctgtccggaccgccgatcccaggtgcgtgtgtctctgtctctcctagcccctctctcacacatcacattcccatggtggcctcaagaaaggcccggaagcgccaggctggagataacagcctcttgcccgtcggccctgcgtcggccctggggtaccatgtggccacaactgctgtggccccctgtccccaagacacttccccttgtctccctggttgcctctcttgccccttgtcctgaagcccagcgacacagaagggggtggggcgggtctatggggagaaagggagcgaggtcagaggagggcatgggttggcagggtgggcgtttggggccctctatgctggcttttcaccccagaggacacaggcagcttccaaaatatatttatcttcttcacggg

SEQ ID NO: 9333 - DNA, 600 bp, Homo sapiens
atgggagagtcccattgctaaaattcagctactcagataaattcagaatgggtcaaggcacctgcctgtttttgttggtgcacagagattgacttgattcagagagacaattcactccatccctatggcagaggaatgggttagccctaatgtagaatgtcattgtttttaaaactgttttatatcttaagagtgccttattaaagtatagatgtatgtcttaaaatgtgggtgataggaattttaaagatttatataatgcatcaaaagccttagaataagaaaagctttttttaaattgctttatctgtatatctgaactcttgaaacttatagctaaaacactaggatttatctgcagtgttgcagggagataattctgccttaaattgtctaaaacaaaaacaaaaccagccaacctatgttacacgtgagattaaaaccaattttttccccattttttctccttttttctcttgctgcccacattgtgcctttattttatgagccccagttttctgggcttagtttaaaaaaaaaatcaagtctaaacattgcatttagaaagcttttgttcttggataaaaagtcatacacttt

SEQ ID NO: 9334 - DNA, 1400 bp, Homo sapiens
ggcctatctttggagggacagtctaccactcccccgtgtctcgacttcctccttctggcagcaagccagtcgctgcttccacctgttcagggaagaaaacaccccgtactggcaggcatggagccaacaaggagaacctggagctcaacggcagcatcctgagtggtgggtaccctggctcggcccccctccagcgcaacttcagcattaattctgttgccagcacctattctgagtttgcgcgagaactttcaaaggcttccaaatctgatgctacttctggaatcctcaattcaaccaacatccagtcctgagaagccctgatcagtcaaccagctgtggcttcctgtgcctagactggacctaattatatgggggtgactttagtttttcttcagcttaggcgtgcttgaaaccttggccaggttccatgaccatgggcctaacttaaagatgtgaatgagtgttacagttgaaagcccatcataggtttagtggtcctaggagacttggttttgacttatatacatgaaaagtttatggcaagaagtgcaaattttagcatatggggcctgacttctctaccacataattctacttgctgaagcatgatcaaagcttgttttatttcaccactgtaggaaaatgattgactatgcccatccctgggggtaattttggcatgtatacctgtaactagtaattaacatcttttttgtttaggcatgttcaattaatgctgtagctatcatagctttgctcttacctgaagccttgtccccaccacacaggacagccttcctcctgaagagaatgtctttgtgtgtccgaagttgagatggcctgccctactgccaaagaggtgacaggaaggctgggagcagctttgttaaattgtgttcagttctgttacacagtgcattgccctttgttgggggtatgcatgtatgaacacacatgcttgtcggaacgctttctcggcgtttgtcccttggctctcatctcccccattcctgtgcctactttgcctgagttcttctacccccgcagttgccagccacattgggagtctgtttgttccaatgggttgagctgtctttgtcgtggagatctggaactttgcacatgtcactactggggaggtgttcctgctctagcttccacgatgaggcgccctctttacctatcctctcaatcactactcttcttgaagcactattatttattcttccgctgtctgcctgcagcagtactactgtcaacatagtgtaaatggttctcaaaagcttaccagtgtggacttggtgttagccacgctgtttactcatacagtacgtgtcctgtttttaaaatatacaattattcttaaaaataaattaaaatctgtatacttacatttc

SEQ ID NO: 9335 - DNA, 1400 bp, Homo sapiens
cagaagattttgtcttctgggggtctttataaaacttcctttcctctatgtggtggctacagagagtccaaccacacttacgtcattgtagtattgtttgtgaccctgagaaggcaaaagaaagaaccactcattgtctttgaggaagaagatgtccgtgagaacatcattacttatgatgatgaagggggtggggaagaagacacagaagcctttgatattgccaccctccagaatcctgatggtatcaatggatttatcccccgcaaagacatcaaacctgagtatcagtacatgcctagacctgggctccggccagcgcccaacagcgtggatgtcgatgacttcatcaacacgagaatacaggaggcagacaatgaccccacggctcctccttatgactccattcaaatctacggttatgaaggcaggggctcagtggccgggtccctgagctccctagagtcggccaccacagattcagacttggactatgattatctacagaactggggacctcgttttaagaaactagcagatttgtatggttccaaagacacttttgatgacgattcttaacaataacgatacaaatttggccttaagaactgtgtctggcgttctcaagaatctagaagatgtgtaaacaggtatttttttaaatcaaggaaaggctcatttaaaacaggcaaagttttacagagaggatacatttaataaaactgcgaggacatcaaagtggtaaatactgtgaaataccttttctcacaaaaaggcaaatattgaagttgtttatcaacttcgctagaaaaaaaaaacacttggcatacaaaatatttaagtgaaggagaagtctaacgctgaactgacaatgaagggaaattgtttatgtgttatgaacatccaagtctttcttcttttttaagttgtcaaagaagcttccacaaaattagaaaggacaacagttctgagctgtaatttcgccttaaactctggacactctatatgtagtgcatttttaaacttgaaatatataatattcagccagcttaaacccatacaatgtatgtacaatacaatgtacaattatgtctcttgagcatcaatcttgttactgctgattcttgtaaatctttttgcttctactttcatcttaaactaatacgtgccagatataactgtcttgtttcagtgagagacgccctatttctatgtcatttttaatgtatctatttgtacaattttaaagttcttattttagtatacgtataaatatcagtattctgacatgtaagaaaatgttacggcatcacacttatattttatgaacattgtactgttgctttaatatgagcttcaatataagaagcaatctttgaaataaaaaaagattttttttt

SEQ ID NO: 9336 - DNA, 600 bp, Homo sapiens
gccgtaccctatgcccagcctgtccctaaaggcagagtgcttcttattcggcagggcttcgtgagaatgccgccaagttatccaaaaccaaaggatgagagaggcttccaagagagggaagactgtccaagttcaaggagaaggggtttggttccctgtctgccagggacagaaagttctttccacatgtgtctcctggtcccgagagctttcaaaaggggatgtattctgctccaagaaagaatcacctcccagtaaagtagccatgaagggctcctgtataaaatatgcacacttcccctgccctgagtttgtggagggaaaggctgtcggaagtagggactcttaggagagcccgtgtgccctgtttggttcagctgtcaggcgtgtgccacacacatcccacctcatcttctggtcccataattctccatggatgggctgcttttagctccagttttccagtagaatgcttgagttttccttttttccgtacctcctggaggatgaaactcataacctgtcatcatcagtactcactgtgttttccactttgacttgaagtcaaatgaagttaccaaagttaaacatggacttctc

SEQ ID NO: 9337 - DNA, 600 bp, Homo sapiens
ccgccatcaagaagaccatcctggacaaggaccaccttcctctagagctcgggagcccggagggtcttcacccactcctactccagtatcagctggcacgggctccttcctgagagcaaaggtcaaggaccccctctgtgaaggctcagcagaggtgggatcccacgccccctcccggcccctccctgccctccattcagggagaaacctctccttcccgtgtgagaagggccagagggtccaggcatcccaagtccagcgtgaagggccacagcccctcttggctgccaagcacgcagatcccatggacatttggggaaagggctccttgggctgctggtgaacttctgtggccaccacctcctgctcctgacctccctgggagggtgctatcagttctgtcctggccctttcagttttataagttggtttccagcccccagtgtcctgacttctgtctgccacatgaggagggaggccctgcctgtgtgggagggtggttactgtgggtggaatagtggaggccttcaactgattagacaaggcccgcccacatcttggagggcatctgccttactgattaaaatgtcaatgtaatct

SEQ ID NO: 9338 - DNA, 600 bp, Homo sapiens
gctgtgtgaggacggcacggccagcgcctgctgtgagtgggtctcccaagactaggcctcaggacgcggggggagccatccccgccgccctcacaggacccaccaggcagcggagacatgtggaattagagtattttgaggtgtcctttctttacaaaataatggggtcttgggcatttcacatcactccatttctactgagactttcagaatcacacaggccctttccgtggatttcatttggggcaaagaaacaacgtagttttgtttttgttttcagcctatggaatgatttccttttgtctgtcttgttcaagttcagacgaagctactctggcatctgcacatttccgtgttacagcagctgcctgatgaattttatccacctccatttcagcatgtggctcgcgtggacaggtggacggacgctgtggccgcatggaaccttgagaacccagggacgagccagtgccgggaaggaactgccgggactcaccgagctgcacttaactgttctctttctggctattttttgttgtttgtttctttgtgttgactttgtccctggcaaaattttccactctgagtaaaacaagtctc

SEQ ID NO: 9339 - DNA, 600 bp, Homo sapiens
acccctacccaccgccacctgggcccttcgcccgccgggaggctccttatggggcaccccgcttcgacatgccagactttgaggacgatggtggcccctatggcgaatctgaggctcctgcgccacctggcccgggcacccgctggccctatcggtcccgggacacccgccgctccttcccagagcccgaggagcctcctgaaggtggaagctatgctggttccctggctgagccctacgaggagctggaggcggaggagtgcgggatcctggacggctgcaccaacggccgctgcgtgcgcgtccccgaaggcttcacctgccgttgcttcgacggctaccgcctggacatgacccgcatggcctgcgttgacatcaacgagtgtgatgaggccgaggctgcctccccgctgtgcgtcaacgcgcgttgcctcaacacggatggctccttccgctgcatctgccgcccgggattcgcacccacgcaccagccgcaccactgtgcgcccgcacggccccgggcctgagccctggcacccgctggccgcccacccgcgcccgccactcggggcccctgccgcgcatcctgcagcccgctta

SEQ ID NO: 9340 - DNA, 685 bp, Homo sapiens; identical to SEQ ID NO: 4105

SEQ ID NO: 9341 - DNA, 1400 bp, Homo sapiens
gccacgggaagctgagcgtgctccgcctctcaccttccatgggccacccgctggaggtggggctggcgctgcggcacctgctcttcctgctggagtactgcatggtgaccggctacgactggtgggacatcctgctgcacgtgcagcccagtatggtacagagcctggtggagaagctgcacgaggagtacacgcgccagaccgctgccctgcagcaggtcctctccacccggatcctggccatgaaggcctcgctctgcaagctgtcgccctgcacggtgactcgcgtgtgcgactaccacaccaagctcttcctcatcgccatcagctccaccctgaagtcgctgctgcgcccccactttctcaacacgcctgacaagagccccggcgaccggctgaccgagatctgcaccaagatcaccgacgtcgacattgacaaggtcatgatcaacctcaagacggaggaatttgtgctggacatgaacacactgcaggcgctgcagcagctcttgcagtgggtgggcgacttcgtgctgtacctgctggccagcctacccaaccaggtcgcgatgagggcccagcgagcgagccggacgaggcgctggtggatgaatgctgcctgctgcccagccagctgcttatccccagcctggactggctgccagccagcgacggcctggtcagccgcctgcagcccaagcagccccttcgtctgcagtttggccgggcgcccacgctgcctggcagtgctgccaccctgcagctcgacggcctcgccagggccccaggccagcccaagatcgaccacctgcggaggctgcaccttggcgcttgccccacggaggaatgcaaggcctgcaccaggtgcggctgtgtcaccatgctcaagtcgcccaacagaaccacggcggtgaagcagtgggagcagcgctggatcaagaactgcctgtgcggtgggctctggtggcgggtgcccctcagctacccctgagcccagctgcccctcagctactcctcagctacccctcagctgcccctgagcccggctgctgcaagagccaccgctcgccctggactctcctcggcgcggttaacctcagcccgccctgcagggctgttgaaggccgtgggccggacgcctgcgtgaccagcagagcttctgaggaagcccctgcctttgtccagctgggcccgcagtccacacaccactctcccaggacccccagatccctggaccatctgcatccaaaggaccgtccgtgacggccgggggtccaggcggaccttgtggtgacccggctcgggcgtctcctcggtttccttgcctcacccgcggagagcgctgaacctggacaagcagcggctgggaaggacaggtccaataaacgccctctgcgccc

SEQ ID NO: 9342 - DNA, 600 bp, Homo sapiens
gccccacagagcgcgagcggctaaagaagatgttgtctgagggctccgtgggcgaggtacagtgggaggccgagtttttcgcactgcaggacagcaacaacaagctggcaggcgccctgcgagaggccaacgccgccgcagcccagtggaggcagcagctggaggctcagcgtgcagaggccgagcggctgcggcagcgggtggctgagctggaggctcaggcagcttcagaggtgacccccaccggtgagaaggaggggctgggccagggccagtcgctggaacagctggaagctctggtgcaaaccaaggaccaggagattcagaccctgaagagtcagactggggggccccgcgaggccctggaggctgccgagcgtgaggagactcagcagaaggtgcaggacctggagacccgcaatgcggagttggagcaccagctgcgggcgatggagcgcagcctggaggaggcacgggcagagcgggagcgggcgcgggctgaggtgggccgggcagcgcagctgctggacgtcagcctgtttgagctgagtgagctgcgtgagggcctggcccgcctggctgaggctgcgccctgagccg

SEQ ID NO: 9343 - DNA, 600 bp, Homo sapiens
ggacccccaccctctgggacaggccctcccccatgttcttctgtctccaggaagggcagcggccctcccatcactggaagtctgcagtgggggtcgctgggggtggagagaacactaagaggtgaacatgtatgagtgtgtgcacgcgtgtgagtgtgcatgtgtgtgtgtgcaaaggtccagccaccccgtcctccagcctgcaaggggtgtctggcgccttgcctgacacccagccccctctccccctgagccattgtgggggtcgatcatgaatgtccgaagagtggccttttcccgtagccctgcgccccctttctgtggctggatggggagacaggtcagggccccccaccctctccagcccctgcagcaaatgactactgcacctggacagcctcctcttttctagaagtctatttatattgtcattttataacactctagcccctgcccttattgggggacagatggtccctgtcctgcggggtggccctggcagaaccactgcctgaagaaccaggttcctgcccggtcagcgcagccccagcccgcccacccctgcctcgagttagttttacaattaaaacattgtcttgt

SEQ ID NO: 9344 - DNA, 600 bp, Homo sapiens
ctgtgccctcccgctgactcctgctgtgtcctgaggtgcatttcctgttgtacacacaagggccaggctccattctccctccctttccaccagtgccacagcctcgtctggaaaaaggaccaggggtcccggaggaacccatttgtgctctgcttggacagcaggcctggcactgggaggtgggggtgagcccctcacagccttgcccctccccaaggctggcaacctgcctcccattgcccaagagagagggcagggaacaggctactgtccttccctgtggaattgccgagaaatctagcaccttgcatgctggatctgggctgcggggaggctctttttctccctggcctccagtgcccaccaggaggatctgcgcacggtgcacagcccaccagagcactacagccttttattgagtggggcaagtgctgggctgtggtcgtgccctgacagcatcttccccaggcagcggctctgtggaggaggccatactcccctagttggccactggggccaccaccctgaccaccactgtgcccctcattgttactgccttgtgagataaaaactgattaaacctttgtggctgtggttggc

SEQ ID NO: 9345 - DNA, 600 bp, Homo sapiens
aaaacagagaggaatgagaagaagcagcagatgggcaaagagtaccgtgagaagatagaggcagaactgcaggacatctgcaatgatgttctggagctgttggacaaatatcttattcccaatgctacacaaccagaaagtaaggtgttctacttgaaaatgaaaggagattattttaggtatctttctgaagtggcatctggagacaacaaacaaaccactgtgtcgaactcccagcaggcttaccaggaagcatttgaaattagtaagaaagaaatgcagcctacacacccaattcgtcttggtctggcactaaatttctcagtcttttactatgagattctaaactctcctgaaaaggcctgtagcctggcaaaaacggcatttgatgaagcaattgctgaattggatacgctgaatgaagagtcttataaagacagcactctgatcatgcagttacttagggacaatctcactctgtggacatcggaaaaccagggagacgaaggagacgctggggagggagagaactaatgtttctcgtgctttgtgatctgttcagtgtcactctgtaccctcaacatatatcccttgtgcgat

SEQ ID NO: 9346 - DNA, 1400 bp, Homo sapiens
ttatacaacgaggtctataacttgacccaggagttcttccggcacgataaaccagtcaatgctgaaagtcaaaatagcgtgggggtgttcacccgagaggaggtgcgtaaccgcatcaggaatgaccctgacgacccagaggctaccaagcgcctgaagctcgccatgatccagcagtacctgaaggtggagagctgtgagagcagctcacacagcatggacgaggtgtccctgagcgccttcggggagtggaccgagatccccggcgctcaccacatcatcccctcgggcttcatgcgggttgtggagctgctggcggagggcatccctgcccacgtcatccagctagggaaacctgtccgctgcattcactgggaccaggcctcagcccgccccagaggccctgagattgagccccggggtgtgctaaagaggcagtacaccagtttcttccggccaggcctgcccacagagaaggtggctgccatccaccgcctgggcattggcaccaccgacaagatctttctggaattcgaggagcccttctggggccctgagtgcaacagcctacagtttgtgtgggaggacgaagcagagagccacaccctcacctacccacctgagctctggtaccgcaagatctgcggctttgatgtcctctacccgcctgagcgctacggccatgtgctgagcggctggatctgcggggaggaggccctcgtcatggagaagtgtgatgacgaggcagtggccgagatctgcacggagatgctgcgtcagttcacagggaaccccaacattccaaaacctcggcgaatcttgcgctcggcctggggcagcaacccttacttccgcggctcctattcatacacgcaggtgggctccagcggggcggatgtggagaagctggccaagcccctgccgtacacagagagctcaaagacagcgcccatgcaggtgctgttttccggtgaggccacccaccgcaagtactattccaccacccacggtgctctgctgtccggccagcgtgaggctgcccgcctcattgagatgtaccgagacctcttccagcaggggacctgagggctgtcctcgctgctgagaagagccactaactcgtgacctccagcctgccccttgctgccgtgtgctcctgccttcctgatcctctgtagaaaggatttttatcttctgtagagctagccgccctgactgccttcagacctggccctgtagcttttctttttctccaggctgggccgtgagcaggtgggccgttgagttacctctgtgctggatcccgtgcccccacttgcctaccctctgtcctgccttgttattgtaagtgccttcaatactttgcattttgggataataaaaaaggctccctcccctgc

SEQ ID NO: 9347 - DNA, 1400 bp, Homo sapiens
tgccgctgtcccagtggagttccaggagcaccacctgagtgaggtgcagaatatggcatctgaggagaagctggagcaggtgctgagttccatgaaggagaacaaagtggccatcattggaaagattcataccccgatggagtataagggggagctagcctcctatgatatgcggctgaggcgtaagttggacttatttgccaacgtagtccatgtgaagtcacttcctgggtatatgactcggcacaacaatctagacctggtgatcattcgagagcagacagaaggggagtacagctctctggaacatgaggtgaggccccagaaactgggggagggcaaggatgaagatgggagagaggtggagctccttgtttcccttcccagtgtcacctagctgctgctttcttcttacccagagtgcaaggggtgtgattgagtgtttgaagattgtcacacgagccaagtctcagcggattgcaaagttcgcctttgactatgccaccaagaaggggcggggcaaggtcactgctgtccacaaggccaacatcatgaaacttggggatgggttgttcctgcagtgctgtgaggaagttgctgaactgtaccccaaaatcaaatttgagacaatgatcatagacaactgctgcatgcagctggtgcagaatccttaccagtttgatgtgcttgtgatgcccaatctctatgggaacattattgacaatctggctgctggcctggttgggggagctggtgtggtccctggtgagagctatagtgcagaatacgcagtctttgagacgggtgcccggcacccatttgcccaggcagtgggcaggaatatagccaatcccacggccatgctgctgtcggcttccaacatgctgcggcatcttaatcttgagtatcactccagcatgatcgcagatgcggtgaagaaggtgatcaaagttggcaaggtgcggactcgagacatgggcggctacagcaccacaaccgacttcatcaagtctgtcatcggtcacctgcagactaaagggagctagagccctttatttcttccaaccttgcaaggaccacactccccatacccttcagtgcagtgtaccagggaagagaccttgtgcctctaagcagtggaccatggtcaccttgctgggtagagcctaggttgtccttgggccggcttccttaggggacagactgttgggtggtgatggggattgttaggatggagcccaggccacatggatgatgatgattctcccccacaggttcgaacctctgacatgggtggctatgctacttgccatgacttcactgaggctgtcattgctgccttgccccacccataggccctgtccatacccatgtaaggtgttcaataaagaacatgaacc

SEQ ID NO: 9348 - DNA, 1400 bp, Homo sapiens
ggtctaccgggccacgcaccgcctgctgctgctgggtgctggagaatctggtaaaagcaccattgtgaagcagatgaggatcctgcatgttaatgggtttaatggagacagtgagaaggcaaccaaagtgcaggacatcaaaaacaacctgaaagaggcgattgaaaccattgtggccgccatgagcaacctggtgccccccgtggagctggccaaccccgagaaccagttcagagtggactacatcctgagtgtgatgaacgtgcctgactttgacttccctcccgaattctatgagcatgccaaggctctgtgggaggatgaaggagtgcgtgcctgctacgaacgctccaacgagtaccagctgattgactgtgcccagtacttcctggacaagatcgacgtgatcaagcaggctgactatgtgccgagcgatcaggacctgcttcgctgccgtgtcctgacttctggaatctttgagaccaagttccaggtggacaaagtcaacttccacatgtttgacgtgggtggccagcgcgatgaacgccgcaagtggatccagtgcttcaacgatgtgactgccatcatcttcgtggtggccagcagcagctacaacatggtcatccgggaggacaaccagaccaaccgcctgcaggaggctctgaacctcttcaagagcatctggaacaacagatggctgcgcaccatctctgtgatcctgttcctcaacaagcaagatctgctcgctgagaaagtccttgctgggaaatcgaagattgaggactactttccagaatttgctcgctacactactcctgaggatgctactcccgagcccggagaggacccacgcgtgacccgggccaagtacttcattcgagatgagtttctgaggatcagcactgccagtggagatgggcgtcactactgctaccctcatttcacctgcgctgtggacactgagaacatccgccgtgtgttcaacgactgccgtgacatcattcagcgcatgcaccttcgtcagtacgagctgctctaagaagggaacccccaaatttaattaaagccttaagcacaattaattaaaagtgaaacgtaattgtacaagcagttaatcacccaccatagggcatgattaacaaagcaacctttcccttcccccgagtgattttgcgaaacccccttttcccttcagcttgcttagatgttccaaatttagaaagcttaaggcggcctacagaaaaaggaaaaaaggccacaaaagttccctctcactttcagtaaaaataaataaaacagcagcagcaaacaaataaaatgaaataaaagaaacaaatgaaataaatattgtgttgtgcagcattaaaaaaaatcaaaataaaaattaaatgtgagcaaag

SEQ ID NO: 9349 - DNA, 600 bp, Homo sapiens
acagaaactggtgagtgactgcacagagttcactgaaacggaatgccttccttgcggtgaaagcgaattcctagacacctggaacagagagacacactgccaccagcacaaatactgcgaccccaacctagggcttcgggtccagcagaagggcacctcagaaacagacaccatctgcacctgtgaagaaggctggcactgtacgagtgaggcctgtgagagctgtgtcctgcaccgctcatgctcgcccggctttggggtcaagcagattgctacaggggtttctgataccatctgcgagccctgcccagtcggcttcttctccaatgtgtcatctgctttcgaaaaatgtcacccttggacaaggtccccaggatcggctgagagccctggtggtgatccccatcatcttcgggatcctgtttgccatcctcttggtgctggtctttatcaaaaaggtggccaagaagccaaccaataaggccccccaccccaagcaggaaccccaggagatcaattttcccgacgatcttcctggctccaacactgctgctccagtgcaggagactttacatggatgccaaccggtcacccaggagg

SEQ ID NO: 9350 - DNA, 1400 bp, Homo sapiens
tgaattgccagataatctttctggaattccgagagaattccaaagagggtttttttttttttttttaggacatcttttgatacctttaaaagaaccactgtcaagtaatccttaaaagaatatcttggaaaaggaaacagattttttcctgtgtgtaagcaataagtgaagttacatttgccctaaccctagggatgattctttacccagttttaaagcccatcatggtattctaaggtgttgacaccctccatcctcagagcaggtcgaaaatattaaatagactggggactctatgatgggcagcctgtgctttttgacttcagtttgctatttttctgtgatcacattagtactgattcatagattctatcttttataattctggagaaaaagatttgttagttttgtaatttttttgtaagaccaaatgtatgtattttagtagctccattgcatgagaagagtgtaactcacactgacttgtgatatcagccttctctgggccttgtgtgtggagagctttctatcttaccaagtggtagggctaaaagaacaacagcctttttggtagtcacatagcagaatgatcagagttacattgcttattccaaaacattggttctttttaaaacatttttttttacccaaagaaaagaataatagaaattactaacaataaatataaattcagagtgttgatataggattcagtatccagagtttatttttaatcttaatcctcagcttcttgggagttgctgggcttcagtgtctctgtggtttcaccagcttagcttgagctctggttattttggatcttttctgctttttttaagtaactgagtcatttttaccacacagtccagtttgcatgtatagctaggaaacatgtattgctctagattgggcagtttaagtcattttaaagaaagttagttcatagttgttgccttttaactcatagtcaagcttcagtctttcaaagagaaatgtgtgattttcatttacttgctgatattttgtagtttggagatccttgtgggcattattctaactgatacgtagacacttacttggaaatttttggacattatattaaatgagtgctatctgtgaaattggttatattaggtggcttgactaatgttttttctataattgtatatggactgcatttttaaaaaaaccgcatttgcctttatgctagattgtaaaaaattatattagaatgcataagacatgtttttccttcatatgctagacttttcctagcatttcgtatttctgtgttgtcagtgtgtgatttttaaaccggaatttggtttaaaaaaaatctggtggtaatatatgtgagaaatactttggtgtttaccttatgaaaataaaggattgtaagt

SEQ ID NO: 9351 - DNA, 600 bp, Homo sapiens
tgcgagtccgggccctgtatgactatgaggggcaggagcatgatgagctgagcttcaaggctggggatgagctgaccaagatggaggacgaggatgagcagggctggtgcaagggacgcttggacaacgggcaagttggcctatacccggcaaattatgtggaggcgatccagtgatgagtcggggacaggccagcggggggacggaggcggcgggcccaggagcctcagccagccacgtgggcatccactccttttcctgcaagagatgatggttccattgctcttggcttcatggtgttcctggaaggcagatgagctggtcatttcgcctgggactcggcacctttccgagtgcagctggagggatctgagcgcaggaagacgcagaacaacagaaatagccgcccctccccgcccactgtgcctgttggcctatcatagatctctatgttcttgactttgtctctcctttccgagtcaatggtgggttacactgatcttgttccactgattactctctctgacgagtccatcacctgcaacttaaatgaacaagcttacatcccattttgagtgaagattttgaggtttttaattt

SEQ ID NO: 9352 - DNA, 1400 bp, Homo sapiens
ggagccatcactgcacgatctcacggagttctcccgatctggaagcgggaccccaaccaagagcagaagtgtctctggcgtgctgaacggaggcaaatccatgagccacaatgaatcaacgtagccagtgagggcaaaagaagggctctgtaacagaaccttacctccaggtgctgttgaattcttctagcagtccttcacccaaaagttcaaatttgtcagtgacatttaccaaacaaacaggcagagttcactattctatctgccattagaccttcttatcatccatactaaagccccattatttagattgagcttgtgcataagaatgccaagcattttagtgaactaaatctgagagaaggactgccaaattttctcatgatctcacctatactttggggatgataatccaaaagtatttcacagcactaatgctgatcaaaatttgctctcccaccaagaaaatgtaaaagaccacaattgttcttcaaaaacaaacaaaacaaaacaaaacaaaattaactgcttaaatgttttgtcggggcaaacaaaattatgtgaattgtgttgttttcttggcttgatgttttctatctacgcttgattcacatgtactcttttctttggcatagtgcaactttatgatttctgaaattcaatggttctattgactttttgcgtcacttaatccaaatcaaccaaattcagggttgaatctgaattggcttctcaggctcaaggtaacagtgttcttgtggtttgaccaattgtttttctttctttttttttttttttagatttgtggtattctggtcaagttattgtgctgtactttgtgcgtagaaattgagttgtattgtcaaccccagtcagtaaagagaacttcaaaaaattatcctcaagtgtagatttctcttaattccatttgtgtatcatgttaaactattgttgtggcttcttgtgtaaagacaggaactgtggaactgtgatgttgtcttttgtgttgttaaaataagaaatgtcttatctgtatatgtatgagtcttcctgtcattgtatttggcacatgaatattgtgtacaaggaattgttaagactggttttccctcaacaacatatattatacttgctactggaaaagtgtttaagacttagctaggtttccatttagatcttcatatctgttgcatggaagaaagttgggttcttggcatagagttgcatgatatgtaagattttgtgcattcataattgttaaaaatctgtgttccaaaagtggacatagcatgtacaggcagttttctgtcctgtgcacaaaaagtttaaaaaagttgtttaatatttgttgttgtatacccaaatacgcaccgaataaactctttatattcattcaaaga

SEQ ID NO: 9353 - DNA, 1400 bp, Homo sapiens
tctcccacagttggtttgggaacctggtcaccaacgccaactggggtgaattctggctcaatgaaggtttcaccatgtacgcccagaggaggatctccaccatcctctttggcgctgcgtacacctgcttggaggctgcaacggggcgggctctgctgcgtcagcacatggacatcactggagaggaaaacccactcaacaagctccgcgtgaagattgaaccaggcgttgacccggacgacacctataatgagaccccctacgagaaaggtttctgctttgtttcatacctggcccacttggtgggtgatcaggatcagtttgacagttttctcaagggcctatgtgcatgaattcaaattccgaagcatcttagccgatgactttctggacttctacttggaatatttccctgagcttaagaaaaagagagtggatatcattccaggttttgagtttgatcgatggctgaatacccccggctggcccccgtacctccctgatctctcccctggggactcactcatgaagcctgctgaagagctagcccaactgtgggcagccgaggagctggacatgaaggccattgaagccgtggccatctctccctggaagacctaccagctggtctacttcctggataagatcctccagaaatcccctctccctcctgggaatgtgaaaaaacttggagacacatacccaagtatctcaaatgcccggaatgcagagctccggctgcgatggggccaaatcgtccttaagaacgaccaccaggaagatttctggaaagtgaaggagttcctgcataaccaggggaagcagaagtatacacttccgctgtaccacgcaatgatgggtggcagtgaggtggcccagaccctcgccaaggagacttttgcatccaccgcctcccagctccacagcaatgttgtcaactatgtccagcagatcgtggcacccaagggcagttagaggctcgtgtgcatggcccctgcctcttcaggctctccaggctttcagaataattgtttgttcccaaattcctgttccctgatcaacttcctggagtttatatcccctcaggataatctattctctagcttaggtatctgtgactcttgggcctctgctctggtgggaacttacttctctatagcccactgagccccgagacagagaacctgcccacagctctccccgctacaggctgcaggcactgcagggcagcgggtattctcctccccacctaagtctctgggaagaagtggagaggactgatgctcttcttttttctctttctgtcctttttcttgctgattttatgcaaagggctggcattctgattgttcttttttcaggtttaatccttattttaataaagttttcaagcaaaaatt

SEQ ID NO: 9354 - DNA, 1400 bp, Homo sapiens
  misc_feature (28)..(216): n is a, c, g, or t
  misc_feature (277)..(867): n is a, c, g, or t
cggtcattttaaatgaatttggggaagnnnnnnnnnnnnnnnnnnnnnnnnnnnnnnnnnnnnnnnnnnnnnnnnnnnnnnnnnnnnnnnnnnnnnnnnnnnnnnnnnnnnnnnnnnnnnnnnnnnnnnnnnnnnnnnnnnnnnnnnnnnnnnnnnnnnnnnnnnnnnnnnnnnnnnnnnnnnnnnnnnnnnnnnnnnnnnnnnnnnnnnnnnnnngtgcagtggcttctatgttttgggttgatgctgaattagggagtgatatttaccttgatgnnnnnnnnnnnnnnnnnnnnnnnnnnnnnnnnnnnnnnnnnnnnnnnnnnnnnnnnnnnnnnnnnnnnnnnnnnnnnnnnnnnnnnnnnnnnnnnnnnnnnnnnnnnnnnnnnnnnnnnnnnnnnnnnnnnnnnnnnnnnnnnnnnnnnnnnnnnnnnnnnnnnnnnnnnnnnnnnnnnnnnnnnnnnnnnnnnnnnnnnnnnnnnnnnnnnnnnnnnnnnnnnnnnnnnnnnnnnnnnnnnnnnnnnnnnnnnnnnnnnnnnnnnnnnnnnnnnnnnnnnnnnnnnnnnnnnnnnnnnnnnnnnnnnnnnnnnnnnnnnnnnnnnnnnnnnnnnnnnnnnnnnnnnnnnnnnnnnnnnnnnnnnnnnnnnnnnnnnnnnnnnnnnnnnnnnnnnnnnnnnnnnnnnnnnnnnnnnnnnnnnnnnnnnnnnnnnnnnnnnnnnnnnnnnnnnnnnnnnnnnnnnnnnnnnnnnnnnnnnnnnnnnnnnnnnnnnnnnnnnnnnnnnnnnnnnnnnnnnnnnnnnnnnnnnnnnnnnnnnnnnnnnnnnnnnnnnnnnnnnnnnnnnnnnnnnnnnnnnnnnnnnnnnnnnngcagaaatttagataaggatatccttaaacagctgtttatagctactgtgacagaaacagaaaagcagtggacaacacgtttccaagaagatcaagtttgtacataacactagaggcatttcttatcaaaaggattggataataaaaataagtttctactgggtatatttcaagcatttatttattactttagttacgaattccaatatactttaaaatggtatttgttttacagcatacataaaatgtagcaaatcagtactgtaaaacatttaacattcatacagttatatataatatccttttttttaaagaatggtatttcacaaaaatatcttttgaaattggctttggagtttacatatactgaacatgaaagtttataataatgatgatacaactttcaacattgtcattttttcttagaacttcagctgattgcagagatataatgattacattgttattaaatttttttaacacaagtaagtgtcaccattttatgacatgaaataaaaggttatgactgttat

SEQ ID NO: 9355 - DNA, 600 bp, Homo sapiens
agctgacaggcataacgctgaagcctggaaacaaacagagccagcagaacagaagctcaacagtgtgtggattatgccacaacagtctgcggggcttgaagagtcagcccctgataccatcccccccaaagagagtggcgttgcttactatgtggacctgcatggacatgcttccaaaaggggctgcttcatgtacggaaacagctttagtgatgagagcacccaggtggaaaacatgctatatccaaagctcatctccttgaattcagcccacttcgacttccagggctgcaatttctcagagaagaatatgtatgcccgagaccgtagagatggccagtctaaagagggaagcggccgtgttgcaatctacaaagcctcagggataatccacaggttgggtggaagctgagatatagttgatgaaatagcttccctaaagaaaacaccgtagctgggtgtggtggtgcatgcttgtaatcccagctactgaggaggctgaggcaggagaatcgcttgaacctgggaggcagaggttgtggcgagccgagatcgtgccattgcactccagcctgggcaacaagagcgaaactccgtctc

SEQ ID NO: 9356 - DNA, 1400 bp, Homo sapiens
atttgatgacctagatggaacacatgctctgatgcgaaggggcagaactcaggcacctcgacactcaggtccagcgctgtgaggacatcctgcagcagctgcaggccgtggtaccccagatagacatggaaggggatcgcaacatctggatcgtgaagccaggagccaagtcccgcggacgaggcatcatgtgcatggaccacctggaggagatgctgaagctggtgaacggcaaccccgtggtgatgaaggacggcaagtgggtggtgcagaagtatattgagcggcccctcctcatctttggcaccaagtttgacctcagacagtggttcctggtaactgactggaacccacttaccgtgtggttctaccgcgacagctatatccgcttttccacgcagcccttctccctgaagaacctggacaactcagtgcacctgtgcaacaactccatccagaagcacctggagaactcatgccatcggcatccactgcttccgccagacaacatgtggtctagccagaggttccaggcccacctgcaggagatgggtgccccaaatgcttggtccaccatcatcgtgcctggcatgaaggatgctgtgatccacgcacttcagacctcccaggacaccgtgcagtgtcggaaggccagctttgagctctatggcgctgacttcgtgttcggggaggacttccagccctggctgattgagatcaacgccagccccacgatggcaccctccacagcagtcactgcccggctctgtgctggcgtgcaagctgacaccctgcgcgtggtcattgaccggatgctggaccgcaactgtgacacaggagcctttgagctcatctataagcagcccgtcaccacttccccagcctccacaccaaggcccagctgccttctccccatgtactccgacaccagggccaggtcctcagacgacagcacagcaagctggtgggcactaaggccctgtcgaccacaggcaaggccttgaggactctacccacggctaaggtcttcatttccctcccaccgaaccttgatttcaaggtggcacccagcatcctgaagccaagaaaggctcctgctctcctgtgcctccgaggcccccagctggaagtgccttgttgcctctgccctttgaagtcggaacaattcctagcacctgtcggaaggtcaaggccaaaggcaaattcaaggccagactgtgacaaacccagggctgaggcctgccccatgaagaggctgagccccctgaaacccctgccccttgttggtacattccagaggcgcaggggcctgggggatatgaagctagggaagcccctgcttcgattccccactgcccttgtcctggatccaacaccaaataaaaagaaacaagtgaagt

SEQ ID NO: 9357 - DNA, 600 bp, Homo sapiens
agagcaatgagcattccgatgtgattgatagtcaggaactttccaaagtcagccgtgaattccacagccatgaatttcacagccatgaagatatgctggttgtagaccccaaaagtaaggaagaagataaacacctgaaatttcgtatttctcatgaattagatagtgcatcttctgaggtcaattaaaaggagaaaaaatacaatttctcactttgcatttagtcaaaagaaaaaatgctttatagcaaaatgaaagagaacatgaaatgcttctttctcagtttattggttgaatgtgtatctatttgagtctggaaataactaatgtgtttgataattagtttagtttgtggcttcatggaaactccctgtaaactaaaagcttcagggttatgtctatgttcattctatagaagaaatgcaaactatcactgtattttaatatttgttattctctcatgaatagaaatttatgtagaagcaaacaaaatacttttacccacttaaaaagagaatataacattttatgtcactataatcttttgttttttaagttagtgtatattttgttgtgattatctttttgtggtgtgaataa

SEQ ID NO: 9358 - DNA, 1400 bp, Homo sapiens
aaaatagaactcaatgagaaaaagaagattatgtgcacttcgttgtcaataataagtcaactgatgctcatcgacaactataggaggcttttcattaaatgggaaaagaagctgtgcccttttaggatacgtgggggaaaagaaagtcatcttaattatgtttaattgtggatttaagtgctatatggtggtgctgtttgaaagcagatttatttcctatgtatgtgttatctggccatcccaacccaaactgttgaagtttgtagtaacttcagtgagagttggttactcacaacaaatcctgaaaagtatttttagtgtttgtaggtattctgtgggatactatacaagcagaactgaggcacttaggacataacacttttggggtatatatatccaaatgcctaaaactatgggaggaaaccttggccaccccaaaaggaaaactaacatgatttgtgtctatgaagtgctggataattagcatgggatgagctctgggcatgccatgaaggaaagccacgctcccttcagaattcagaggcagggagcaattccagtttcacctaagtctcataattttagttcccttttaaaaaccctgaaaactacatcaccatggaatgaaaaatattgttatacaatacattgatctgtcaaacttccagaaccatggtagccttcagtgagatttccatcttggctggtcactccctgactgtagctgtaggtgaatgtgtttttgtgtgtgtgtgtctggttttagtgtcagaagggaaataaaagtgtaaggaggacactttaaaccctttgggtggagtttcgtaatttcccagactattttcaagcaacctggtccacccaggattagtgaccaggttttcaggaaaggatttgcttctctctagaaaatgtctgaaaggattttattttctgatgaaaggctgtatgaaaataccctcctcaaataacttgcttaactacatatagattcaagtgtgtcaatattctattttgtatattaaatgctatataatggggacaaatctatattatactgtgtatggcattattaagaagctttttcattattttttatcacagtaattttaaaatgtgtaaaaattaaaaccagtgactcctgtttaaaaataaaagttgtagttttttattcatgctgaataataatctgtagttaaaaaaaaagtgtctttttacctacgcagtgaaatgtcagactgtaaaaccttgtgtggaaatgtttaacttttattttttcatttaaatttgctgttctggtattaccaaaccacacatttgtaccgaattggcagtaaatgttagccatttacagcaatgccaaatatggagaaacatcataataaaaaaatctgcttttt

SEQ ID NO: 9359 - DNA, 1400 bp, Homo sapiens
tggatgatatgctgcaggaaaatcatcagcgtgttagcattttctttgactatgcaagatgtagcaagaacactgcgtggccctactttctgccaatgttgaatcgccaggatcccttcactgttcatatggcagcaagaattattgccaagttagcagcttggggaaaagaactgatggaaggcagtgacttaaattactatttcaattggataaaaactcagctgagttcacagagttcgcagtatgtgcagtgcgtggccgggtgtttgcagctgatgctccgggtcaatgagtaccgctttgcttgggtggaagcagatggggtaaattgcataatgggagtgttgagtaacaagtgtggctttcagctccagtatcaaatgattttttcaatatggctcctggcattcagtcctcaaatgtgtgaacacctgcggcgctataatatcattccagttctgtctgatatccttcaggagtctgtcaaagagaaagtaacaagaatcattcttgcagcatttcgtaactttttagaaaaatcaactgaaagagaaactcgccaagaatatgccctggctatgattcagtgcaaagttctgaaacagttggagaacttggaacagcagaagtacgatgatgaagatatcagcgaagatatcaaatttcttttggaaaaacttggagagagtgtccaggaccttagttcatttgatgaatacagttcagaacttaaatctggaaggttggaatggagtcctgtgcacaaatctgagaaattttggagagagaatgctgtgaggttaaatgagaagaattatgaactcttgaaaatcttgacaaaacttttggaagtgtcagatgatccccaagtcttagctgttgctgctcacgatgttggagaatatgtgcggcattatccacgaggcaaacgggtcatcgagcagctcggtgggaagcagctggtcatgaaccacatgcatcatgaagaccagcaggtccgctataatgctctgctggccgtgcagaagctcatggtgcacaactgggaataccttggcaagcagctccagtccgagcagccccagaccgctgccgcccgaagctaagcctgcctctggccttcccctccgcctcaatgcagaaccagtagtgggagcactgtgtttagagttaagagtgaacactgtttgattttacttggaatttcctctgttatatagcttttcccaatgctaatttccaaacaacaacaacaaaataacatgtttgcctgttaagttgtataaaagtaggtgattctgtatttaaagaaaatattactgttacatatactgcttgcaatttctgtatttattgttctctggaaataaatatagttattaaaggattctcactcc

SEQ ID NO: 9360 - DNA, 600 bp, Homo sapiens
agctccacacttgtgagaagtgcagtaccagcatcgcgaaccaggctgtgcgcatccaggagggccggtaccgccaccccggctgctacacctgtgccgactgtgggctgaacctgaagatgcgcgggcacttctgggtgggtgacgagctgtactgtgagaagcatgcccgccagcgctactccgcacctgccaccctcagctctcgggcctgagcccgccatgccctcagcctgcctcactgctgggccagggtcatgcctatataagttggcatggcagggacaatggtgggcagttgctcttacatgagctaagtttggagacctgaggcccctttgtcctcgctgggtgggccaaggtctgggacctgtcttggactgtgggagactcaccctcaccttgccaggcctctcccctgcaggactggcattgcactagtctgaggtggccactgcctttgatcaacctttgtgtgcgagggtctaagtagggtcgaacacagaagtgggaaggagaggggtgggccaggggctaatggtgtcactgtgtaaagtttttgacatactagctctataaatatatgaatatggacaaaat

SEQ ID NO: 9361 - DNA, 1400 bp, Homo sapiens
ctccagagcaaacaccagttgtggttcatgtctgcgggctggagatgccacctgatgcagtagaagctggtggaggcatggaaaagaccttgccagagcctgtgggcacccaagtcagcatggaagagattcagaatgagtcggcctgtggcctagatgtgggagaatgtgaaaacagagcgagagagatgccaggggtatggggcgccgggggctccctgaaggtcaccattctgcagagcagtgacagccgggcctttagcactgtacccctgacacctgtcccccgccccagtgactccgtctcctccacccctgcggctaccagcactccctctaagcaggccctccagttcttctgctacatctgcaaggccagctgctccagccagcaggagttccaggaccacatgtcggagcctcagcaccagcagcggctaggggagatccagcacatgagccaagcctgcctcctgtccctgctgcccgtgccccgggacgtcctggagacagaggatgaggagcctccaccaaggcgctggtgcaacacctgccagctctactacatgggggacctgatccaacaccgcaggacacaggaccacaagattgccaaacaatccttgcgacccttctgcaccgtttgcaaccgctacttcaaaacccctcgcaagtttgtggagcacgtgaagtcccaggggcataaggacaaagccaaggagctgaagtcgcttgagaaagaaattgctggccaagatgaggaccacttcattacagtggacgctgtgggttgcttcgagggtgatgaagaagaggaagaggatgatgaggatgaagaagagatcgaggttgaggaggaactctgcaagcaggtgaggtccagagatatatccagagaggagtggaagggctcggagacctacagccccaatactgcatatggtgtggacttcctggtgcccgtgatgggctatatctgccgcatctgccacaagttctatcacagcaactcaggggcacagctctcccactgcaagtccctgggccactttgagaacctgcagaaatacaaggcggccaagaaccccagccccaccacccgacctgtgagccgccggtgcgcaatcaacgcccggaacgctttgacagccctgttcacctccagcggccgcccaccctcccagcccaacacccaggacaaaacacccagcaaggtgacggctcgaccctcccagcccccactacctcggcgctcaacccgcctcaaaacctgatagagggacctccctgtccctggcctgcctgggtccagatctgctaatgctttttaggagtctgcctggaaactttgacatggttcatgtttttactcaaaatccaataaaacaaggtagtttggc

SEQ ID NO: 9362 - DNA, 600 bp, Homo sapiens
aaaaaaaattaaaataaatttaaatacaaaaaaaaatagccaggtgtggggtgcatgcctggaatcccagctacttgagaggctgaggcacgagaattgcttgaacccaggaggtggaggttgcagtgagccaagatcacaggagccactgcactccagcctgggtgacagagtgagactctgtctcaaaaaaaaattaaataaattattataacctttcagaaatgctgtgtgcattttcatgttcttttttttagcattactgtcactctccctaatgaaatgtacttcagagaagcagtattttgttaaataaatacataacctcattctgaataatgtccctcattttgactataactgtgcttggtttcaaaagcaaaattaaacaaaaatctcagtcccctccgaagtgaactttgtgttaccctgcgtcagaaatgccaagttgtgtttacttttcattcagattttgtgaatatgaacatgctgttataggatctacagatgaatatttaactcaatagaaaaattattttagaacacattgtattggtattacaaccagattatattcttgacgttgacttcattaaaatt

SEQ ID NO: 9363 - DNA, 1400 bp, Homo sapiens
gttgacaatcaccacgaggtgtacctctggcaaggctggtggcccatcgagaacaagatcactggttccgcccgcatccgctgggcctccgaccggaagagtgcgatggagactgtgctccagtactgcaaaggaaaaaatctcaagaaaccagcccccaagtcttaccttatccacgctggtctggagcccctgacattcaccaatatgtttcccagctgggagcacagagaggacatcgctgagatcacagagatggacacggaagtttccaatcagatcaccctcgtggaagacgtcttagccaagctctgtaaaaccatttacccgctggccgacctcctggccaggccactcccggagggggtcgatcctctgaagcttgagatctatctcaccgacgaagacttcgagtttgcactagacatgacgagggatgaatacaacgccctgcccgcctggaagcaggtgaacctgaagaaagcaaaaggcctgttctgagtggggagacgccagaggagcctcacggtcacgtccaacaacaccactgcaccagggaaatggatatatatttttggactggtgtttttcacaaagtatttttcaatcagagttttcagaacctgacattgttaaagatactgcttgtcccggagttgtgtattttgtaaatgttcaagggaactgtttggaaacttctttccaccattcaggaggttatcagaattaataaaagtatctgttatgtgcacttaagccgcagctgctatagatagcactgccttcttgttccagctaggcaatgccttttttttttttttttgaagcagttctctttataaagtgttattttgatagtttgtggattctaaaatatatatatatttatataaacaccatataagtcaaatatgtatttaacaaagcaatatgtattcattcactttcaagatttgttttggtgtcaaaataacatgaaaaggtagatggagttgcttctgttgaattagctctgccaccaatatgtatcttcatacacgtttggaaatgtttcctgcagcattaggtatgacttgttctgagtactgcttccggtgctaaaatgaacaaagaatttgtacttaatggcatggactctggagaatctatgcgaatcaacctttctaccttaatatctccccaaaaatgtatagtgccttgtttttatgtacagtttatatacagaaaagtttgctctgcatttttgatgatggtttggaacattatctacaattttactctcaaatagtcaaaataaaaacatctcaatttctaataccggttgtaaacagtacacatgtcattttgtgatataggactcccaaataaaagtatcagaataaacacaacaattaactggt

SEQ ID NO: 9364 - DNA, 1400 bp, Homo sapiens
tgttacagtgctaaagatcgcctggctcagtcagacatggccaaacgtgtagccaacctgctgcgcgtggtgctgagtctgcatcatcctcctgatagaacctccgactcaacaccagaccctcagcgagtccctttgcgcctcttggctccccacattggccggcttcccatgcctgaggactatgccatggacgaactgcgcagccttacccagtcctatctgcgagaactggctgttgggagcctgtgagccccaggcactttgcatcacagtcacatgcccattcacaccacacagaggttccctgccttgtttggattggcactgtttgccattctctgggttggctgtggcatctaccctccctccctgctgccagaagcagcatcctccacttgttcagggcttttcttaatactgaacgtagcataagggcttctggaacccagaagaggagacagtttaccatcctcaagatcattcagtgtttttcctttaaaaaaatggtcaataaagctcctttggcagaatcccccaaagaaccagggtattctttttccatccctagccattctggatcttgtgaccctccatgccaaccagcttccctactcctaccctggcccttttatactaggactccttaggaggagtgagacaggtgataatggatccttaacagatgaactatccacagaaggaagagggatccgtctcttaagtaattggttagttaacactgaattttggaggcaaaggagggttggcctgagttaggaaacaaaatgggatctttctgacacacttagggcagaagtgaatgcctgtcacggagggattgatcttcagggctgtttttgttcctgcctttagagttccatgaacaccatacctttgctactactatgtgcaggaacccttggtcacatgtgacatgtctgtgggaagctcccagagtttggtttggtccctggttttcagtcttgctgagactctgtctggatttgcctgcagagtttggataaaaaatggcaggttgggtaaccctccctgttcatcccatgttagctccaaagcatttcccaccctccatctaccccttccagaagcaaaaacaaaccatgactgaggcaggcatggagttgggcgttaggggcaggcagagggcctttgctacactgctgacagctatagggagccccaggtaatggcatgagatagctggtgttagggctatctcaggcaatatggccacacctgggtctttatgcatgaagataatgtaaaggtttttattaaaaaatatatatatgtataaataaatgatctagatattttcctctttttctgaagctactttcttaaaaaataaataaaatgtttatagcattcctggt

SEQ ID NO: 9365 - DNA, 600 bp, Homo sapiens
tgttaatacgccattcctagaagaaaaggtagtgaaaatgaaaagtaatttggaacgattccaagttacgaagctctgtccattccaagaaaagattcggagacagtatttaagcacaaatttggtaagtcacatagaagagatgctccagacagcctacaacaagctccacacatggcagtcacggcgtctgatgaagaaaacgtgaggtggccatgatgcttacaggttttgtgagattgagagaactatgacctgcagcaactctggaaacctggcctgacagacaagcagatgacctcacaggagtgataagaaacatctgctccacgccaactcccagagctgatgctattgtacttgcacattggagactgaaaggaaagaagggactaaatgctggggaggtaaattaagacagaaccaaatgagctaagttgcaaatatatatatatacacacacacacatatatgtacatgtgtatgtacatatatattttaaaagactgtttactgcagttgctcaggaactgcttttgattcacattaagctgctttcagaaattaaaaaaacactttttaaagggtgcattgataaaa

SEQ ID NO: 9366 - DNA, 1198 bp, Homo sapiens; identical to SEQ ID NO: 4131

SEQ ID NO: 9367 - DNA, 1400 bp, Homo sapiens
cagcagaaaacatggtcaagctttacagcctttttctgaaatacgatgcaaccatgatagaaataaatccaatggtggaagattcagatggagctgtattgtgtatggatgcaaagatcaattttgactctaattcagcctatcgccaaaagaaaatctttgatctacaggactggacccaggaagatgaaagggacaaagatgctgctaaggcaaatctcaactacattggcctcgatggaaatataggctgcctagtaaatggtgctggtttggctatggccacaatggatataataaaacttcatggagggactccagccaacttccttgatgttggtggtggtgctacagtccatcaagtaacagaagcatttaagcttatcacttcagataaaaaggtactggctattctggtcaacatttttggaggaatcatgcgctgtgatgttattgcacagggtatagtcatggcagtaaaagacttggaaattaaaatacctgttgtggtacggttacaaggtacacgagtcgatgatgctaaggcactgatagcggacagtggacttaaaatacttgcttgtgatgacttggatgaagctgctagaatggttgtaaagctctctgaaatagtgaccttagcgaagcaagcacatgtggatgtgaaatttcagttgccaatatgatctgaaaacccagtggatggctgaaggtgttaaatgtgctataatcattaagaatactgtgttctgtgttattgttctttttctttttagtgtgtggagattgtaattgccatctaggcacacaaacatttaaaaggatttggactgcatttaattgtaccattcagaatggactgtttgtacgaagcatgtataatgcagttatcttctttcttttgtcgcagccagtcttttttgcttctcctacaaaacgtaacttgcaatttgccagtttattattgttggatacaaagttcttcattgataagagtcctataaataagataaatacgaagataaagctttattctttagtgttaaaatacagtatatctaataactagcctcattagtagagcagtatattaaaacaatgttttatgtaaaaagtgtttatcttcagcaccaaatacatgataaatgtatcaatcactatttataaacagagctttcaaacactcctcagaatattcttctaagtattttgatgaagtaactttgtaattatttgaacattgttttaatcattaggaaacactgattaactgcaagtcttcatgattctgtcatattaagaaacacctgtaggtttgcttcaaataaaggcatatataccaaggacttacagacaaaattaagaatgtcaatttaagttaataaaaatctcccaatatg

SEQ ID NO: 9368 - DNA, 600 bp, Homo sapiens
tgatactttcatcacaggtagattctggtttacaatctaataatcatatcaacagagtagtaagtcatcccacacttcctgttacaataactgctcatgaagatagacacatcaaattttttgacaataaaacgggtaaaatgatccattctatggtagctcacttggatgctgttacaagtctagcagtagatcctaatggaatctatttgatgtctggaagccatgactgttccatcagattatggaatttagacagcaagacatgtgtgcaagaaataacagctcacagaaagaaattggatgaatcaatttatgatgttgctttccactcgtcaaaagcatatatagctagtgcaggagctgatgctcttgccaaagtatttgtatgaatcaacaaaaacttgcatcgtaacaagatttgcttggacagaaagagggtctgcatcactgccatcagaaaggttactgatatgacactacatgtgatctgcctggtgaaggctatctggggcaggcacaaattggtggaaatcacatcttaatgtcaagctcattaagttaactgtaattactgtattttgtgggacaaagaaaaaa

SEQ ID NO: 9369 - DNA, 600 bp, Homo sapiens
ccccccggcccgtctccggcatggagagagagcggaaagtgagtatgcggctgcacccggggcccccgtcaacatctcctcgtccgacctcacaggccgacaagatacctctcgcatgtccacctcacagattcctggtcgggtggcttccagtggtcttcagtctgtcgtgcaccgatgagaactctccttattgctgtgaagggcagacaatgcatggctgatctactctgttaccaatggctttactagtgacacgtcccccggtctaggatcgaaatgttaacaccgggagctctccaggccactcacccagcgacgctcgtgggggaaacatactaaacggacagactccaagagctgccaccgctggggctgcactgcggccccccacgtgaactcggttgtaacggggctgggaagaaaagcagagagagaattgcagagaatcagactccttttccagggcctcagctccctccagtggtggccgccctgtactccctgacgattccactgtaactaccaatcttctacttggttaagacagttttgtatcattttgctaaaaattattggcttaaatctgtgtaaagaaaa

SEQ ID NO: 9370 - DNA, 600 bp, Homo sapiens
tcctctttgcctacagcatgagacagaagacacgggcatatcataggctgaaggatgatgtcccggaagaggtaaaattaaggcgtttggaggaactcatcactatcttccgagaagaagcaacaaaagccaatcagacctctgtgggctgtacccagttggtgctagtggaagggctcagtaaacgctctgccactgacctgtgtggcaggaatgatggaaaccttaaggtgatcttccctgatgcagagatggaggatgtcaataaccctgggctcagggtcagagcccagcctggggactatgtgctggtgaagatcacctcagccagttctcagacacttaggggacatgttctctgcaggaccactctgagggactcttctgcatattgctgacctgagaggatggcctcagagctgacttgggcaatcctccccaacaggaaggggagacattgcctgccactgaggaaacaggtcatgaaggtggagataagctgcaaggggcgaagcaactttatgtcagtggaaaacgtgtctctttaaagctgctatgtgaacagcttttacagtcattaaatttacctaaactaaggtt

SEQ ID NO: 9371 - DNA, 600 bp, Homo sapiens
ccagtgtggttagcgaaaggattagcagtgtgtgagaaagaacagcacagtcttttcctacggtacaagctacatatgtaggaaaattttcttctttaatttttctgttggtcttaactaatgtaaatattgctgtctgaaaaagtgtttttacatatagctttgcaaccttgtactttacaatcatgcctacattagtgagatttagggttctatatttactgtttataataggtggagactaacttattttgattgtttgatgaataaaatgtttatttttgctctccctcccttctttccttccttttttcctttcttccttcctttctctctttcttttgtgcatatggcaacgttcatgttcatctcaggtggcatttgcaggtgaccagaatgaggcacatgacagtggttatatttcaaccacacctaaattaacaaattcagtggacatttgttctgggttaacagtaaatatacactttacattcttgctctgctcatctacacatataaacacagtaagataggttctgctttctgatacatctgtcagtgagtcagaggcagaacctagtcttgttgttcatatagggg

SEQ ID NO: 9372 - DNA, 1400 bp, Homo sapiens
tagagttaacagtactgtctaggctgttgcaatatattctctttcaatgtaccttccttcacctcgtcgtatatatcctcgataagtattaaaacagtatttgagtttaaaagagtttgtatatatttaaatgaataactttttatactctttgttacatgtttgtatcagtatttagtggaaaaccatttgagttgttttgggttagaatttttctttttgtactgtttctttaaaacagagttcttagtaacaggggcagttcctgaattcaaataaaccattttgtatgtttggattttgaatgggttaactaattacaggctaaaataatgccttttttagtgtttttaatttttagaattcactacataaattgtaagtaattgtgggtctcaaaaacactaggaacttttaagtgtcttagcacttcctcgatgtgcctgccctgagggagtgagttcacatttgagacaactgcactccagtgtggacgtgcctttgtcttcaggccatgccgaagggtgtttaaagcagtcttgcaggtcgctcctttcccagccgtggataaaaactgaagctaggaatctaataaggaatgctgatttcctcagttccattttgaggaatggggaaggctattctaaagaaaaaaatgggatttgttttctcggcagatctgcaaggctggctttaagagcacaaggagggaaagtaacgaaagggctggactactataaaagttacaaatacgtagttagaccaatagatttatatagtcaggtttttgtcatgtaatttattaactaactattacagaaacacagctaagaatatcaagtatttctctggctcttgacagaaaaaaatcagttgacttaaccctttgctgtcaaaagagttggcgtttcctgttctgggtgctactgccaaacgttatggtacttagagtcgggatgcacaacttcaaccaccgacttatcaatgcagccgcctgtgtattgcaattggccgttaccttaagcactgagccacccgggtttagttcagccatttcaagaagtatatttaacgtcggtagttctgctttattaaaatgcagcagaggtactcttctgtcccttccgtttatagttctctgagagagttctattttttggttttgttttgtgttttcttttgcattttgtatcttgtatttatccctgaacatgttttgtaccttttttttttttttttttaagaaaaggaattcttttgtgtatatatagatacttgcatgatatactgtagtcaatgttcggttcctcaaaaggtcttgctgctgtcaggtgttatgcactccatccatcataactgtatgaaacacatttcatatgtaaataaacgtgggacatttg

SEQ ID NO: 9373 - DNA, 1375 bp, Homo sapiens; identical to SEQ ID NO: 4138

SEQ ID NO: 9374 - DNA, 600 bp, Homo sapiens
aaactcctttgcctgcatcctgtgtacaacatgacatttttaaccaatccaatctaaaaatgtgccagaatccacctgtggcccgaatcgtgtttggttcctctttctactccactgcagatgaccaaacctgtcccgctgccactttcctcactgatattgggaggagggcaaggcccagccgaagttccactaaaaatgccccaggagaataggcaccggctggcttgccaaagggtttgggttttattgctttctgttttttcttttcccgacagcacaaagaagtaagggcagttattggacaggtgttatttaaacattctattgtaaatgaatgtgttgtttggttctactgcattgtggagcatgcgggggaagagaactgacccaggtagtgaaatggagcccttccctggaactaaccagtccttgatgttgtgtgactaagtaaagatgataaaccccatctgctgggggtgtcacttcacactcggcatgcattgtgaaagctttccatacccttggccattccctctctcctctctctccaaccccatttatgcaggaagggactgctaacaagaacgcttccatctc

SEQ ID NO: 9375 - DNA, 1400 bp, Homo sapiens
ggtttggctcaacagatttctctttccacccatctattgcaggtgtagtggtcttgctgcttctccagggaggatctgcctacaaactggtttgctactttaccaactggtcccaggaccggcaggaaccaggaaaattcacccctgagaatattgaccccttcctatgctctcatctcatctattcattcgccagcatcgaaaacaacaaggttatcatcaaggacaagagtgaagtgatgctctaccagaccatcaacagtctcaaaaccaagaatcccaaactgaaaattctcttgtccattggagggtacctgtttggttccaaagggttccaccctatggtggattcttctacatcacgcttggaattcattaactccataatcctgtttctgaggaaccataactttgatggactggatgtaagctggatctacccagatcagaaagaaaacactcatttcactgtgctgattcatgagttagcagaagcctttcagaaggacttcacaaaatccaccaaggaaaggcttctcttgactgcgggcgtatctgcagggaggcaaatgattgataacagctatcaagttgagaaactggcaaaagatctggatttcatcaacctcctgtcctttgacttccatgggtcttgggaaaagccccttatcactggccacaacagccctctgagcaaggggtggcaggacagagggccaagctcctactacaatgtggaatatgctgtggggtactggatacataagggaatgccatcagagaaggtggtcatgggcatccccacatatgggcactccttcacactggcctctgcagaaaccaccgtgggggcccctgcctctggccctggagctgctggacccatcacagagtcttcaggcttcctggcctattatgagatctgccagttcctgaaaggagccaagatcacgcggctccaggatcaacaggttccctacgcagtcaaggggaaccagtgggtgggctatgatgatgtgaagagtatggagaccaaggttcagttcttaaagaatttaaacctgggaggagccatgatctggtctattgacatggatgacttcactggcaaatcctgcaaccagggcccttaccctcttgtccaagcagtcaagagaagccttggctccctgtgaaggattaacttacagagaagcaggcaagatgaccttgctgcctggggcctgctctctcccaggaattctcatgtgggattccccttgccaggctggcctttggatctctcttccaagcctttcctgacttcctcttagatcatagattggacctggttttgttttcctgcagctgttgacttgttgccctgaagtacaataaaaaaaattcattttgctccagta

SEQ ID NO: 9376 - DNA, 600 bp, Homo sapiens
tccagagaagtattaatgccttaatagactactgaaggttaactatttacatcattctaaaaatattttaagctgtattacagtgctataaattctccttttaaggaaaaaagtaatagattgtttccttaccgtgtttgaaaggaaaaaaaataaatccatagtaactaatggtctgccgattttttccctgaatttttaaactccaacaaagcattattttgcaaaaagtcctttagcccaaagtcagtgtctctgttttgatctctttgtaaaagaactctctgttcatccattctctttccctgggaccgtaaaataaggctgaaaaagtcttcatctggtactgtcggaccctttgtggtagcaggtggtggagcacatctttgatcatctaatctggatccctagaagtttatgagagagattaaaagacatactgtgggaaagaaagcaccaagctatgttaaatctctcagtcacaacaagaaaacgcagttgtaaacttttatttggggcttctcagaaattaatctttgtttttatattgttctctttagttcccagcctgatttctgaaagaaataatctttaaacctg

SEQ ID NO: 9377 - DNA, 600 bp, Homo sapiens
tttcttccagatgcagactctcagtaatatcccttgtttctgcctccatggctcactcctgccctccactgatctggccactctctcagctcatcccactgatgacaccacgacgctctctgagagaccatccccaagcacagacgtccagacagacccccagaccctcaagccatctggttttcatgaggatgaccccttcttctatgatgaacacaccctccggaaacgggggctgttggtcgcagctgtgctgttcatcacaggcatcatcatcctcaccagtggcaagtgcaggcagctgtcccggttatgccggaatcgttgcaggtgagtccatcagaaacaggagctgacaacctgctgggcacccgaagaccaagccccctgccagctcaccgtgcccagcctcctgcatcccctcgaagagcctggccagagagggaagacacagatgatgaagctggagccagggctgccggtccgagtctcctacctcccccaaccctgcccgcccctgaaggctacctggcgccttgggggctgtccctcaagttatctcctctgctaagacaaaaagtaaagcactgtggtctttgc

SEQ ID NO: 9378 - DNA, 600 bp, Homo sapiens
tgacagccctgaccagtgtagagattccattacctcatatctcaaaggagaagctggcaaatttgaagcaaatggaagccatacagaaatcactccagaagcaaagacaaaatcttactttccagaatcccaaaatgatgtaggaaaacagagtaccaaggaaactctgaaaccaaaaatacatggatctggtcatgttgaagaaccagcatcaccactagcagcatatcagaaatctctagaagaaaccagcaagcttataatagaagagactaaaccctgtgtgcctgtcagtatgaaaaagatgagtaggacttctccagcagatggcaagccaaggcttagcctccatgaagaagaggggtccagtgggtctgagcaaaagcagggagaaggttttaaggtgaaaacgaagaaagaaatccggcatgtggaaaagaagagccactcgtaacagcgaacggtcagtcaaggatcataagtttttactgccagtattgagaaattcgtggaagaaatgtcagcaggaagtaaaaattcaccgagaagtgtgtgtgtgttcgctgcttccacacattaatggcatgattttttttatgc

SEQ ID NO: 9379 - DNA, 1400 bp, Homo sapiens
  misc_feature (77)..(222): n is a, c, g, or t
tttggtctttcgaagatcatggatgatgatagctacaattcagtggatggcatggagctaacatcacaaggtgctgnnnnnnnnnnnnnnnnnnnnnnnnnnnnnnnnnnnnnnnnnnnnnnnnnnnnnnnnnnnnnnnnnnnnnnnnnnnnnnnnnnnnnnnnnnnnnnnnnnnnnnnnnnnnnnnnnnnnnnnnnnnnnnnnnnnnnnnnnnnnnnnnnncaagacatcctacaagagaatacgattcttaaagctactgaagtgcagttcccgccaaagccagtagtaacacctgaagcaaaggcgtttattcgacgatgcttggcctaccgaaaggaggaccgcattgatgtccagcagctggcctgtgatccctacttgttgcctcacatccgaaagtcagtctctacaagtagccctgctggagctgctattgcatcaacctctggggcgtccaataacagttcttctaattgagactgactccaaggccacaaactgttcaacacacacaaagtggacaaatggcgttcagcagcgggtttggaacatagcgaatccgaatggatctgatgaaacctgtaccaggtgcttttattttcttgcttttttcccatccatagagcatgacagcatcgattctcattgaggagaaaccttgggcagctccggccaggccttgtaggaaaaggccccgcccgaggttccagcgtcaacggccactgtgtgtggctgctctgagtgaggaaaaaattaaaaagaaaaactggttccatgtactgtgaacttgaaaacttgcagactcaggggggtccctgatgcagtgcttcagatgaagaatgtggacttgaaaatacagactgggctagtccagtgtctatatttaaacttgttcttttcttttaataaagtttaggtaacatctcctgaaaagcttgtagcacaaaggctcagctggggatggtgtttgacttcggaggaaaaaagttgctattgcccgttaaaggcactagagttagtgttttatccctaaataatttcaatttttaaaaacatgcagcttccctctccccttttttatttttgaaagaatacatttggtcataaagtgaaacccgtattagcaagtacgtggcaatgttcattccaatcagatgcagctttctcctccgtctggtctcctgtttgcaattgcttccctcatctcagtagggaaaaaattgagtgggagtactgagatgtgtgggtttttgccattggacaaagaatgaggttagaagactgcagcttggagtctctctaggttttcaactatttcttcacaatttgaacacttgacggttgtcccttttaatttatttgaagtgctatttttttaaataaaggttcatctgtcc

SEQ ID NO: 9380 - DNA, 1400 bp, Homo sapiens
cgcctctagagctgggctccgtcctcggcgttgccagccgccatggctgatgaagaggctccgctgctctcgggggtggcggttgttttcaggcagcgtctgtgaacccacagctcggttgccagcagtgcccgcgtggtgacccagaagcaggagtgtttgtcaggctcccgctctggcctttccagccacctttcatgtcttcatattttaagtgcattgaggatagatgcaggcgggtgagctgccctccgtcaggtggacccgggctgacatttccctgggagctggtgcaaggagaagcgtcattttaaatgtctgcagagcgaccaggggcctcatgaatctctccgttgccctccgcgcagcaggaggctgcctgtgtgtttcctcctgggatgcgtgcaaggcagacctggtgctgcaaaggaaagggcctgaggcctcagggagccccgtggagggatgacagttcaggccctactgctggcacgtcagagcactgggaagtttttcagtgacgtctctggggcactcagtggattgtctgtaggaaacttgcagctctgctcctcacaccaggcccggctggccacccaccctcgcccccactggccacccctccctcgccccgactgccccgccccaccctcaccccgactgccccgccctcgcccggctggccgtccctgccctcgccccggctggcaggtgcacatggggcctccaggtctgccattcgctattgagaactagaaatgaggaaggacagttacgctaactccaaaaggctgtctaggatgagctgctttatcagggagctccttgtacccattttacagaaatcatttttaggtctttgtgccaccaccacgaggggcatctgcaaagagggcaacgctagacacagaatccgtggaaggtgcagcagtgcctcaggggtcctcagggtcagggagcccccctcaccctcttggcccgttaccctttgtgactttccaccatggtgtcgtgtgaccctcagtcaggttggtgggggctgagtcctcactgagcagccactttccacatctgctagaggaacagtgacatggacacctgtgacagagagaggacagttaggagggacagacagctcttcctttcggagcctggctagtctaggacatcaccttgctgtgtcttctcaagcttttaaaattgaccctgaacgtgtgacagggtcctatggtgttactcaaagctgtgcagggtaaatgatgacatatttattctttttccatttgttctagaaacagtgcctttttcatcagttgcattttccaggctgagagctgtataaaacattttggactgtgaccatgtaccttcctttttaagaaaaataaactgctttatgg

SEQ ID NO: 9381 - DNA, 1400 bp, Homo sapiens
cttgctgctgcaaagaacagattttatatttcttcctctaatcttggcaaatgacctttaccttttggaaagatttcatattgcttcctcctccctggataggacctaatgtagcacagcgggactcaaagaggaggacattttctcttgccagtgcactgggcagtggggctgtccttcaactgctgctgccaaaattggttttctaaaattcttccagtagagactaaaagaagattcaattcctgtaacccaagactgagtcttagggctccagtctccacctgcttggtttcctatcctttgctgcctgcctggggtggcctggaagcctgttcagaaaggcacaatgtggagcctggggtgtctcccccaccccaggaccgtcaggtttaccagtgtgtgcaatcgccatgtattcagagggaagtacctttgttacctacaacttaggagctaggcctctgctacaagcacttgaaaatgatatttttatttttaacgtctcaacaatctgatatcggatgtcgtttaacctgggctcgtggtagggctccagcatttctccctccttcctggtttgcctgtaggggtagactcggaaggtgggtggggtgtgcatttcctgttaggagtgtatcagtgcttgtcttattataagcccctttcttttgtgaatttgaagtagcaccaacaagcctggattgtgaaggtattaagaatcggtctgtgggctactgagtgggtccttaggatactggcccagattttgccactgggtatggcagatcattttctaccatggcctgctgctcttgtagtggacttcctgagtccaatcccacctcctggtgtagaatttacactgctgcacctgaggtcgatgtttcaaagtaagatcaagccagtgttttgatctgggctctgagcacaagtcaggaaacaccaacatattcacactctcccagtaggttcctcagtccgatggtgaatggctattcgtaaatggctggtctggctctttggtgttggagcctttccaatagccccatgaaaagaagcatcacccaaggatattgtaaaaaggatgtaacaaggagatagggtagacattgtactcagtgggccttggggcctagcccagctctgagcagaggactgtggcattcactgtccttgagtgtttcaccttcttggataacacacgggccttctcttctggatttcatcagagattacagccagatgggggctgaagaccatcctcttgaccacagaggtgtgactgtgggaattcctcccaatttatggtttcccagaaaatcttagttccttttatttatagaatgcatgtcttttgtgttaagaaaccaaagagaaataaagagaacactcctaat

SEQ ID NO: 9382 - DNA, 600 bp, Homo sapiens
tgggactgtgttgctgtaccttagctgtgtttgcttattcaagagatcttcattaagtacccaaatgtactgggcattgtcctggtcacccagacacaaagatgggtaaaatataagggagaacttcaacggggaactgcaatttctgatccaccagagctgaagagggcaaaagaaaaccagaaaaacatcagcaatgtttattacagaggtcagctgggaagagctaccactttaagtgtaactcctgaaatggaaagagtgaagaagaatcaagaaaatattagctcggtaaaatatacccaggaccataaacagatgaaaggtagaccaagtctgattttagatacacctgctatgagacatgttaaagaagcacaaaatcatatttcaatggtaaaataccatgaagattttgaaaaaacaaaggggagaggctttactcccgtcgtggacgatcctgtgacagagagagtgaggaagaacacccaggtggtcagcgatgctgcctataaaggggtccaccctcacatcgtggagatggacaggagacctggaatcattgttgacctcaaagtttggcgcacagatcctggctcc

SEQ ID NO: 9383 - DNA, 344 bp, Homo sapiens; identical to SEQ ID NO: 4148

SEQ ID NO: 9384 - DNA, 600 bp, Homo sapiens
acaaacagcaaaggagtggaatggaaaaatctctcttgctccccacaagaagtccactcccctacggattcctcagatgccactggctggcacagcctttcccgcccttggtgtgggagcagcagaagtccagcgggggtgggagaatcatcggggtcaggtcagtgtctccctcgtctgaagtcaaccactacttttccctcaagcctaccaaagagctaaagtctgatctgtagatgtctgatggtttgaggagaagaaaagatagtcttttagagaagtggggagtatccaacttagggtcaaaatacactgagattaggccgggcacagtggctcacacctgtaatcccagtgctttgggaggccgaggcggatggatcacttgaggcctccaggagttcgagaccagcctggccaacatggcgaaaccccgtctctactaaaatacaaaaaattagctggatgtggtggtgggtgcctgtaatctcagctactcaaggaggctgaggcacaagaatagcttgaaccgggagatggaagatgcagtgagccaagatcacgcccctgcactccagcctgggcgacagagactccgtc

SEQ ID NO: 9385 - DNA, 600 bp, Homo sapiens
ccgaccagagacagagatgtagatgtcctttcagctgccttgaaagagcagcttagtcattccaggcaagtccattcatgtctagaaggcttacgagagcagcttgatggcctagaaaagacttgtagccaaatggctggggtggttcagcttgtaaagtctgcagcacacccaggcctggtggaaccagcagacggggctatgcccagcttcttgctggagcaggggagcatgatcttggcactgtcagacacggagcagagactagaagcccaagtcaacaggaacaccatctatagcaccctggtcacctgtgtgacatttgtggccacactgcctgtgctctacatgctattcaaagccagctaacccctggcccctcctccagagggtctgaggcaatagctgtgaatgtggatttaagtagagaatcgtagcaatgaagcgagcctttgggggcatgtacaacctcaatctgaaggagcagtgtctgtgtggctcaccagcaggcatgcttcgctttgtagacaaggttcatttacattaattatcaaaactttgtgctaatgtccaattaaaatatcctgagttttattattt

SEQ ID NO: 9386 - DNA, 642 bp, Homo sapiens; identical to SEQ ID NO: 4151

SEQ ID NO: 9387 - DNA, 1400 bp, Homo sapiens
ctgaaaatgatctgaaggccctacgaagtgttgggcagattgtgggtgaagtgtttaaacagttaactgaagaaaaattcattgttaaagctaccaatggaccaagatatgttgtgggttgtcgtcaacagcttgacaaaagtaagctgaagccaggaacaagagttgctttggatatgactacactaactatcatgagatatttgccaagagaggtggatccactgatttataacatgtctcatgaggaccctgagaatgtttcttattctgagattggagggctatcagaacagatccgggaattaagagaggtgatagaattacctcttacaaacccagagttatttcagcgtgtaggaataatacctccaaaaggctgtttgttatatggaccaccaggtacgggaaaaacactcttggcacgagccattgctagccagctggactgcaatttcttaaaggttgtatctagttctattgtagacaagtacattggtgaaagtgctcatttgatcagagaaatgtttaattatgctagagatcatcaaccatgcatcatttttatggatgaaatagatgctattggtggtcgtcggttttctgagggtacttcagctgacagagagattcagagaacgttaacggagttactgaatcaaatggatggatttgatactctgcatagagttaaaatgatcatggctacaaacagaccagatacactggatcctgctttgctgtgtccaggaagattagatagaaaaatacatattgatttgccaaatgaacaaacaagattagacatactgaaaatccatgcaggtcccattacaaagcatggtgaaatagattatgaagcaattgtgaagctttcagatggctttaatggagcagacctgagaaatgtttgtactgaagcaggtatgttcgcaattcgtgctgatcatgattttgtagtacaggaagacttcatgaaagcagtcagaaaagtggctgattctaagaagctggaggctaaattggactacaaacctgtgtaatttactgtaagatttttgatggctgcatgacagatgttgacttagtgtaaaaataaagttaaagaaaataatgtatgtattggcaatgatgtcattaaaagtatatgaataaaataacatcataaaaattagtagttcaacttttaagatacagaagaaatttgtatgtttgttaaagttgcatttattgcagcaagttacaaagggagagtgttgaagcttttcatatttgctgtgtgagcattttgtaaaatattgaaagtggtttgagatagtggtataagaaagcatttcttatgacttattttgtatcatttgttttcctcatctaaaaagttgaataaaatctgtttgatt

SEQ ID NO: 9388 - DNA, 600 bp, Homo sapiens
taagcctcaccatgatggcccagtggacccactttgcccggacaggggaccccaatagcaaggctctgcctccttggccccaattcaaccaggcggaacaatatctggagatcaacccagtgccacgggccggacagaagttcagggaggcctggatgcagttctggtcagagacgctccccagcaagatacaacagtggcaccagaagcagaagaacaggaaggcccaggaggacctctgaggccaggcctgaaccttcttggctggggcaaaccactcttcaagtggtggcagagtcccagcacggcagcccgcctctccccctgctgagactttaatctccaccagcccttaaagtgtcggccgctctgtgactggagttatgctcttttgaaatgtcacaaggccgcctcccacctctggggcattgtacaagttcttccctctccctgaagtgcctttcctgctttcttcgtggtaggttctagcacattcctctagcttcctggaggactcactcccccaggaagccttccctgccttctctgggctgtgcggccccgagtctgcgtccattagagcacagtccacccgaggct

SEQ ID NO: 9389 - DNA, 600 bp, Homo sapiens
ccatctccaagctggaggcccggctgaacgtgctggagaagagctcgcctggccaccgggccacggccccacagacccagcacgtatctcccatgcgccaagtggagcccccagccaagaagccagccacaccagcagaggatgacgaggatgatgacattgacctgtttggcagtgacaatgaggaggaggacaaggaggcggcacagctgcgggaggagcggctacggcagtacgcggagaagaaggccaagaagcctgcactggtggccaagtcctccatcctgctggatgtcaagccttgggatgatgagacggacatggcccagctggaggcctgtgtgcgctctatccagctggacgggctggtctggggggcttccaagctggtgcccgtgggctacggtatccggaagctacagattcagtgtgtggtggaggacgacaaggtggggacagacttgctggaggaggagatcaccaagtttgaggagcacgtgcagagtgtcgatatcgcagctttcaacaagatctgaagcctgagtgtgtgtacgtgcgcgcgtgcgtgaggccctgccacgattaaagactgagaccggc

SEQ ID NO: 9390 - DNA, 377 bp, Homo sapiens; identical to SEQ ID NO: 4155

SEQ ID NO: 9391 - DNA, 600 bp, Homo sapiens
cgggtcctcgagcagctccaagggaatgtctttctcaatggcctctcattagaggcagacatcactgccaacttagacagccccagggtgacagtggcccagctggactgggacgtagcgacggtccatcagctctctgccttccagccagatgttgtcattgcagcagacgtgctgtattgcccagaagccatcgtgtcgctggtcggggtcctgcggaggctggctgcctgccaggagcacaagcgggctcctgaggtctacgtggcctttaccgtccgcaacccagagacgtgccagctgttcaccaccgagctaggctgggccgggatcagatgggaagcagaagctcatcatgaccagaaactgtttccctacggagagcacttggagatggcaatgctgaacctcacactgtaggactcacacacgactctaacgggattgtaagaatcaagtcactctcatgggaagaatttttatatgggaaagcggctaaaactttcattggactggaatgtttggagattgttaaattccaaatcaggaaccacaaactgccctctaataagatatcagctgtctaagcgtgtgggtgcc

SEQ ID NO: 9392 - DNA, 1400 bp, Homo sapiens
caaaccactgaggtcatggtgactcagtgatcagcagatggtacttcaacagcaatcccctgtcaaacctcagaacttgaggctgaaacattgcttccacccaccatcagtgaagatgtaactagcatgttacaagagtgaataatctggacttcagagattaagtcaccaatagtgatctcacaagtactcaccggaactcctataatgtctccactttgtccatgccatttagcaatctcatctcctaaatggactgtgcctatgattcttaaggagaaagtgaatcattggtagatatcctgcacaagcagctggactttccagtaatagctttcttggggctattaggaaaattaaacaagaaatgaggctttctgggtctgcctgtatgtcttctgcataagaaaaagaagagacatcgaatcaaccaataagaagagcccaaataagcatcctcaaatcttttgggatttggcacttggggacatgagtagttgtctgggatacgtcatattctcaacagtttctttgtagtagtaggatcaccttcttataataggatcaccttcttgttgctatagctgtacccgaccttcccttctcccttgagtgcttgcatgagctccacttttccttttgcttgaacagcttctcctgagtcctccttaccgatggttgtgactttaattatatacatctctgtccctccagacagatccctctgtcctcactctctgatttcattgaggatcttgggtgagagagagggacctgcaggatgaacaaatgtctactctaagacagctagattgggaggttggctggtcactgatggttataatgactgtgggacaggattaacttcagaataaatgaacaggagacacagatatgaagaaagtttctgattgatatggtctgaagtactcctggtattgcaagtcatttgctctaattctcaattgtaggcaaactgatttgtaaatttgcttcttcagccttctttcctgtagcctagcatggagaatctgaccagaccccattttgagaaggtcagcctacactggaatgaactttttacattagggcatttgtatttccctcacaatacttgccacattacttggcataggagagatgcttagtgtaattatgagttaacaagcctttggatcagggcttgactcatgatagacaaagtatatgcctgctggatggaagaatctcttgggcgagcaccatttttctttccatcacctttccttgaaaatatatcttcagctttgggtaggaggaatcttggtgtatgaaatcattgcaaatttacttcatcttttctggagtttgaagttgtgactctcctgctaccaattaaataaagcttactttgccataac

SEQ ID NO: 9393 - DNA, 600 bp, Homo sapiens
cttgctgatgccaggatctcagcgcatagaccactctgccccagcggtcgtcacagaaaggtctctctgttcctcacactcagcttcagcataagctgtgaggccagaaaaaaggtcagctcttctagtatcgtgcagtgcttaaaaaccgggagctccagccgggcgcagtggttcatgccagtaatcccagcactttcggaggccgaggtgggaggattgcttgaggccaggagttcaagaccagcctgggcaacacagcaagatcctgtctttgtaaaaaaactaaccaaacaggtgcggtgtgcaccgagcgcgcctggcctgatgccctggcctgtgagctggggactcctgggccctgtgagcccctaggcgcaggcccaggaatggctgggtaggacagggaacacctttgccccacgtctggctgtgacctcggtgaaagccgacaggagagagatggaccctcctcctcagtagtggctgccagtccctcgttgcaggacagggtcatcataaccataaataacccttcacgtgtcacctgcagcttccactctttatttccaaagaatcagtgtcacacatgcagatcac

SEQ ID NO: 9394 - DNA, 1400 bp, Homo sapiens
ccacaatttgtttaatcaagataggcaacgctgcagttcctttatgaagaggcttttctgtcgtcccaggctagcagagatggatagcttctttgtcagcaatgtgatttcacttattttattgtcttattttaaaccctgtctccatgacttcatttgcactttgacagagcagaggcagagtatttgtcttatatttctcagattataatattaaaaaattacaatcaatttattttcattaaagaacgtgagtctttttagcattcctttctgcttatccttctttccttaccctttgtccttttgtttccattagttttctttcgtcttgtattccttgccactttattttgttagcaacttctagatgtttatcttcatggatctatgattgacctcctagtaaaattctaagtcttgcctttcttccctgctgttttagcatttctttgtaaaatgttagcttcaattaattagccattggtacttactgtagctacacatattaaaaggcaaagtgtttctgaaggcaatttctttttaatatgcccgaatgaatgaggcttcatcctttccatattcttactctttacaggagttcaaatgcaaataagctccacctccctgcacttgtagtctaaaaagtaaaaggggcgatcaggtccatctcaaaggtcacacgtaatagcctccctgggctgatcattccctctccttgtaattgcagtatcctgagtagcagtttaattttcatcaaacatcggagtagtttagttgtttgacaggaggagaataaggctgaaagcctcaagtgaaggatcttgcagcttgtaaaagcaatttccaaaaatgaaacccattcatcgtaaacaaaagcacaaacacttgtagcagtttataatgcttttggtttaatctcaattagtctttctcccctggactagaaatccagtatagtttgccattaatttattgaatctggttttggacaatgcttctgtagtgtagctgcacgtcctggtactgtatcctctgactttattttccatgtattacaaaaggaaaaaaaaattgagattacactggcataaactctagtttgcacagttcacagctactacttgtgcagtaattgctttatgcggctgtaatccataacctgtgaagacagcacatcatctaaatcccattccaaataatatttgtgtagtgttagctgtgaatttaccctgtacagctgtatctctataaatataattccatgtattaatagtcacagaaagactgtaagtgagcaactatttttatgaaacgtaccactatggataaattaacttttacagaaatcttgtttactgtatgatattctaaaacactgtcaaataaaatatatatcc

SEQ ID NO: 9395 - DNA, 600 bp, Homo sapiens
agagtttttaaagaagaaaatcaaaagggagataaaaaattaaggtgtgactctgctgaccttcggcatgacattgatcgccgtagaaaagaaagaagtaaagaacggggagattccaagggctccagggaatccagtggatcaagaaagcaggaaaaaactccaaaagattacaaggaatacaaatcttacaaagatgacagtaaacataaaagagagcaagatcattctcgatcttcatcctcttcagcatcaccttcttctcccagttctcgagaagaaaaggagagtaagaaggaaagagaagaagaatttaaaactcaccatgaaatgaaagaatactcaggctttgcaggagttagccgaccacgaggaacctttcatgacgacagagatgatggtgtggattattgggccaaaagaggaagaggtcgtggtacttttcaacgtggcagagggcgctttaacttcaaaaaatcaggtagcagtcctaaatggactcatgacaaataccaaggggatgggattgttgaagatgaagaagagaccatggaaaataatgaagaaaagaaggacagacgcaaggaagaaaaggtataa

SEQ ID NO: 9396 - DNA, 600 bp, Homo sapiens
cgagactccatctcaaaaaaaaaaacaaaacaaaaccaagttcccactggtgatgcctgtctgacacgttttggtatttagtaggaaatgaagtgtttcgaagcttcgagagaagcttcaaaattgtcacaattgctgaaaacagaatgaatcgtgaacattatctcaatattttgtataatagacaagaccacagtgttttggttccctgacctgtttttgtgtttatgttaggatctgaatcatgttctgggtaaggggacgaggagcgaacactgcactaagatttggtttgccaaatcagattctttggtcaagagtcagtttggggccaggcgtggtggctcatgcctgtaatctcagcactttgggaggctgaggtgggtggatcactggagtttgagaccaccctggccaacatggtgaaaccccatctctactaaaacaaaaattagccaggcatggtggcacctgcctgtaatcccagctacttgggaggctgaggcaggagaatcacttgagcccaggaggtggaggtttcagcgagctgagatcacaccactgcactccagccttggtgacagagtgagactctgtctc

SEQ ID NO: 9397 - DNA, 600 bp, Homo sapiens
tcctggcagctgaactcgggtagtccagtggcctagctggtaccacatctattcccatccagagacattctctggcaagtgttctcagctgaaaagtggttggggatgattcttaccttggtaattaaatgaagctacacatttgggtaatctagcaaatgaagtattttttccctcttggcaacttgtgtcagagttactctggtctgagtcaactttcgctggggaaaacctatggaacctactgcaaaaagattgtccaaaatgcctaagaaaatactcctctgatgcatttagccttcaaccctacctgtcttgctgaagggagaaaaatgttttagtacattataggcccagcagcttttattcatgtccaccagctagttgcacagagaatcatgtgtacctaactaaggatgatctaggataagtaactcctgttttatattgagtattttagggaagtctttaaaagacttgttttatatctataaatctaggttattacaaatacaagaattttgtaccttaaataagcctcatttctatttcttcttcattaattctccatctagtcttgtgaaaaaaaaaaaaaaaaaa

SEQ ID NO: 9398 - DNA, 597 bp, Homo sapiens; identical to SEQ ID NO: 4163

SEQ ID NO: 9399 - DNA, 600 bp, Homo sapiens
atcttgggctttctgtattctgaagacagcgccccagcatttgccatcttcaagtttgttcagtctatttgcgcagccgtggcatttttctacagcaactaccttctccttcactggcaactcctggtcatggtgatatttgggttttttggaacaatttctttcttcactgtggaatgggaagctgccgcctttgtagcccgcggctctgactaccgaagtatctgatctggtgtccgtgaggggacacgtatgacctcagaaacacagctggacacagagcttggtggaagaagtcgcctttgatcttcactatatattgggtgatgttcagtatggaaaatcaagggattaagactgttaaatcagccagagttggtgttcaagtttacagatatgagttatttaaagcaagtagaataagggaaagctgttctgtcaactgtaattgttcaaagatgttgtttttcatttcatctatctcaattcttataatcatgttatagaatgtaaatgttttcttctctctcctgctcttgttggaagatcctgccttgatttagaatactaggccatatgtcatataaatattttttctgg

SEQ ID NO: 9400 - DNA, 1400 bp, Homo sapiens
tgtattttctactgtaataatgtaatttaaggccttccacaatgaacagttcactttattccctgggttttctataaacagttttaaggatatgatttggttaaaaaataatttgttataaaaattctgtttgcaaattaaactggaaaagtatccagagtctcaaaaggcaatgatttgtgagataatatggcatgcccggagccctgctcatcaatgaaaaacccatatgtaataatcgaattcatttaacatgaatcttgagtacgtggaccattgcttgcatgttaactttttgttttgttttgttttgttttgttttgcatttttaactccagatatcctaaagctcaattgtttggtctctggttttcatccttagagaagccatggagaacagacttgaaaagtttaggaaatcataatgtggcagaggtggtgggaagaagaaagttgagctttttccccttgagaaacttctgcatttagtttgtatctttccaggcaaaacaaatgggtattcttttcatacaaccattttcaaatgaaccttagaaaagtcttaacatttaaggtattttatgcacagaatacacttagattgataggaaagaactcgtaatggagtttgagtaaagaaaatgactgatgtactaaacccagtaaaaattgttgaaaatgttaaaggtcagcatgttctaattgggaatctagatatagcttagatttcctattggcttagagtatttgctataacaaatgaagtgcaatgacaattatatattcctactcggtcatactggactggcttcgttctcttaacatactcagtaatgactcaagcctctggctattaacataccctagttgccattttttaattgccatgagccaaatacttcttggtatacaattgatccatttattttaatggctgccttttcattttcatcttttcttgctgctacccatctatgtatgtagtcattggggggaaaatgtagccacattttttatgggaagactttgtgttaaaagtgaacattttgaaggtttttaactggtgaaactagcctggaataatgccaccagagactgagtggaaatcgccccttttgaaggtgccattcttatgagccaaaagtttgtcatttaaaagttcattttgcgggaataacatgtaatataatttgaaataaaggtatagtaaccttaaaaagaacattataactgattgttgtgaatggggtgaatttgttaaaatgagtaactttgataaagtttttcatgcacaggcaaaatgtattcactagatttctacgtagtgatctgcttttactttgtaatttgtagttctcaaaagacttttttttaaaaaaataaagtccatacttacactt

SEQ ID NO: 9401 - DNA, 1400 bp, Homo sapiens
ggaaatctccagggtgcatggactaggaccctggaggcagaaatagttaccgaggggaagttacaggcctgagtgtgagtccctgtttggttgctgatgagctttgaggtccttggccagacactcaaccactttgaacctcagtttcctcatctgtagatgagtgtaacagtctagaacactcctctcagggatcatatccacaagtgctcgtgctgtgcgaggatctcactggttgtttattgaaaggctaagcaagtaggttgaggtccctgggaagcaggggtggatcctgtgtcaccagggctgccccttaccctaaaccttggccccgacaacccacccacctgcccagcagtgctgatctgggacgatgcccgggagggcaaggactccaaggagaagctggtgctggagttcaccttcaccaagccagtgctttctgtgcgcatgcgccatgacaagatcgtgatcgtgctgaagaaccgcatctatgtgtactccttccccgacaatccccgaaagctgtttgagtttgatacccgggacaaccccaaggggctctgtgacctctgccccagcctggagaagcaactgctagtgttcccgggacacaagtgtgggagtctgcaacttgtggacctggcgagcacaaagcctggcacctcgtctgctccattcacgatcaatgcacatcagagtgacatagcctgtgtgtctctaaaccagccaggcactgtagtggcctcagcctcccagaagggtacccttattcgcctctttgacacacaatccaaggagaaactggtggagctgcgccgaggcactgaccctgccaccctctactgcattaacttcagccacgactcctccttcctctgcgcttccagtgataagggtactgtccatatctttgctctcaaggatacccgcctcaaccgccgctccgcgctggctcgcgtgggcaaggtggggcctatgattgggcagtacgtggactctcagtggagcctggcgagcttcactgtgcctgctgagtcagcttgcatctgcgccttcggtcgcaatacttccaagaactgcagagctgagccttggcagtggggcgtgcttggaagccaccagccagcaagcattaatggggctggtgcccactttccactcagcagagctatgtctaaataaagagctcacttccccccagcacttcttgatgactgtgtgccccaagggccaggccagagacccaggaaggcagcgaccccttgggatccctaacctggaggaaattgccagggacccagagggagtgccctaatccaacctggggattttttaaaagcttcctaggaagagatgatctccgatgtgatgaatacgaataaaaggcccttaatggc

SEQ ID NO: 9402 - DNA, 540 bp, Homo sapiens; identical to SEQ ID NO: 4167

SEQ ID NO: 9403 - DNA, 600 bp, Homo sapiens
aaaacaacccacaaatctgaagctcctcgcaggagagagagagagagagagagaggagagagaggagagaggagagagggagggaagagagtgacggagaaggagagaaagagacgggagagaggagagagaaagagagagagaggagagagagaaagaacgaacgaacagggaacttgtaaaactaaggggaaaagggcagaagagaggcagcagcgtggtccctgcaagcgtccgctttcctggccaagcagcccccagcacgcctgctttgtggggcagggccatgcggccccgaggaaggatgcggtgagccagagggttccagacaaaggaggggatccccaaggctctgggccagccagtccctgttttactggcaccacggtccctcctaggcgaggacgaagagggaaggggtggagacctccaccttctctgcgtgtggctgcgtccctttacagaatgacaggcccttacttccgagggcggggactaatgtgtaaggcttaacagatccaattccagaaattatctgtgtttttttcaatcaccctcttgtgcccccccaccccccattaaatttcatcttttatcttt

SEQ ID NO: 9404 - DNA, 1400 bp, Homo sapiens
cctgaattaaaaaacaggtcattaagcttgggccctgactcttctttgtgagaaggtacagagatggaaaccttacaatccgagactaaaacgagggtccttccctcatggctgacagcccaggtggctacaaagaatgtggcaccaatgaaggcccccaagaggatgagaatggcagcagtgccagtggcagcagcaaggtgcgacagctctggtcagaagactcctgcgaatctgactccctgcgacaaggactgtgtactgcatgaatgaggctgagatagttgatgttgctctgggaatcctgattgagagccgcaaacaggaaaaggcctgcgagcagccggccctggcgggggctgataacccagagcactcccctccctgctccgtgtcgcctcacacaagttctgggagcagcagtgaggaagaggacagtgggaaacaggcactggctccaggcctcagcccttcccagaggccggggggttccagctctgcctgtagcaggagccctgaggaggaggaggaagaggatgtgctgaaatacgtccgggagatctttttcagctagggcataaactgtgcactgaactgtctgccgagagcagctggaggacagctgagcttccactggtgctgctgggccgcccgcctgtgggaatggggctctctgtgctcctacctttgtgccttcttgggcctggcagattcacctcaggccagaagcccctggacactccgggccttggggctgccgttctgagtgtgcggaaggcaggactcaaaatgagatcccatttgactccctctgtatgtactgtgccctctcctggctcttgaggctctggagtcccaattgtctgtgttagtcagtgaccaggttccagggaaaatgatgtcatgtggtggtccaacttactggaaccaaagagacagtactttgcaaagaaaaggatcactgccaggtgcactggaattgctacagtttagtccgcatgatctctcctgaaggaggaagcctgtttcaaaaatagtttccatcatgagtctatcaatgagctcccacctctccagccagcctagaaagcaaacgagctgcccacagttctctgccctgtctgggaggttgaggccacagtgtatagactggtaagccagacaggcctcctcccgcaagctgctaccttgctttcacctgtaccttggtccccgggcagctagctataaagcaagagggacaggagcccagaagagacactgaggacaagagatcacaccagagtacatgtctctgcctctgttttcagtgtggctttggacaggaatatatgaataaatcactgccatacaggttttccaatacacaagtgctagaaaatacacacaattccccaatg

SEQ ID NO: 9405 - DNA, 1400 bp, Homo sapiens
atgtgcacacctttgactacaactgcagaagtgttcctttagacaaagttgtgacccattttactctggataagggcagaaacggttcacattccattatttgtaaagttacctgctgttagctttcattatttttgctacactcattttatttgtatctaaatgttttaggcaacctaagaacaaatgtaaaagtaaagatgcaggaaaaatgaattgcttggtattcattacttcatctgtatcaagcacagcagtaaaacaaaaacccatgtatttaactttttttttttaggttttttgcttttgtgattttttttttgatacttgcctaacatgcatgtgctgtataacaatccaagcataattgttaagaacacatgtattaaattcatgtaagtggaataaaagttttatgaatggacttttcaactactttctctacagcttttcatgtaaattagtcttttggttctgaaacttctctaaaggaaattgtacattttttgaaatttattccttattccctcttggcagctaatgggcttttaccaagtttaaacacaaaatttatcataacaacaaaaatactactaatataactactgtttccatgtcccgtgatcccctctcttcctccccaccctgaaaaaaatgagttccaatttttttgggagaggggagattgattagaaaaaaatgtaatatgttccatttaaaattttggcgtatggcattttctaacttaggaagccacaatgttcttggcccgtcatgacattgggtagcattaactataagttttgtgcttccaaatcactttttggtttttaagaatttcttgatactcttatagtctgccttcaattttgatcctttattctatttgtcaggtgcacaagattaccttccttttttagccttctgtcttgtcaccaaccattcctacttggtggccatgtacttggaaaaaggccgcatgacctttctggctccactcagtgtctaaggcaccctgcttcctttgcttgcatcccacagactatttccctcatcctatttactgcagcaaatctctccttagttgatgagattgtgtttatctccctttaaaaccctgcctatcctgaatggtttgtcattgtctgcctttaaaatccttcctctttcttcctcctctgttctctaaataatgatggggctaagttatacccaaagctcactttacaaaatatttcctcagtactttgcagaaaacaccaaacaaaaatgccattttaaaagaggtatattttttcttttagaatgtaagctcctcaagagcagggacaatgttttctgtatgttctgttgtgcctagtacactgtaaatgctcaataaatattgatgatgggaggca

SEQ ID NO: 9406 - DNA, 909 bp, Homo sapiens; identical to SEQ ID NO: 4171

SEQ ID NO: 9407 - DNA, 1400 bp, Homo sapiens
cttacttttttttttttgtaacggagtctcgctcttgttgcccaggctagagtgcaatggcgtgatctcggctcaccccaacctctgcctcccgggttccagtgattctcccgcctcagcctcccgagtagctgggattacaggcatgcaccaccatgtcggactaattttttgtgtgttttttttttagtagagacaaggtttctccatgttggtcaggctggcctcgaactcctgacctcagatgatccacccacctcggcctcccaaagtgctaggattacaggtgtgagccactgcacccggcctttttttttttctttttgagatggagtcttgctgtctcccagcctggattgccacagtgcaatctcggctcactgcaacctcctgacctcaagtgatccacctcagcctcccaaagtgctgggattacagatgtgagccaccgtacccagcctaaatgctaagcttacttttgatgtggtaaatttatatattctctatcccaaatacatagggagcaagtatgttcagatgtagttaaatgtttaatcccatacaccatcttgactattataaaaagaccttacccagtgagctaaattggctaggtcaaatgtggttaaaatttggctgttctggtttcaggcaagaaggggttaaaagtggaatgtatgttgtaatagaagttaaagttgcaactcaagaaggaaaagaaataacctgtcgaagttatctgatgacaaattacgaaagtgctcccccatccccacagtataaaaagattatttgcatgggtgcaaaagaaaatggtttgccgctggagtatcaagagaagttaaaagcaatagaaccaaatgactatacaggaaaggtctcagaagaaattgaagacatcatcaaaaagggggaaacacaaactctttagaacataacagaatatatctaagggtattctatgtgctaatataaaatatttttaacacttgagaacagggatctgggggatctccacgtttgatccattttcagcagtgctctgaaggagtatcttacttgggtgattccttgtttttagactataaaaagaaactgggataggagttagacaatttaaaaggggtgtatgagggcctgaaatatgtgacaaatgaatgtgagtaccccttctgtgaacactgaaagctattctcttgaattgatcttaagtgtctccttgctctggtaaaagatagatttgtagctcacttgatgatggtgctggtgaattgctctgctctgtctgagatttttaaaaatcagcttaatgagagtaatctgcagacaattgataataacattttgaaaattggaaagatggtatactgtttttagaggaataaacgtatttgtggttt

SEQ ID NO: 9408 - DNA, 600 bp, Homo sapiens
gctgaggttgccgctggtgatggcaagaaagggattgtgggtcagtcacaacaagcataccaagaagcttttgaaatcagcaaaaaggaaatgcaaccaacacatactgtcagactgggtctggcccttaacttctcttgttctattatgagattctgaactccccagataaagtctgctctcttgcaaagatggcttttgatgaaggcattgctgaacttgatacattaaatgaagagtcatacaaagacagcacgctaataatgcaattaccgagagacaacttgacattgtggacactggatacccaaggagacaaagctgaagcaggagaaagaggggaaaattaaccggccttccaacttttgtctgcctctttctaaaatttacacagtagaccatttgtcatccatggtgtcccacaaatggttttttgtttacaatttatggcagatgtgtgttacttttatttgaatttctatatttcccatgtggtttttatgtttaatattaggggagtagagccagttaacatttagggagttatctgttttcatcttgaggtggccaatatggggatgtggaatttttatacaagtt

SEQ ID NO: 9409 - DNA, 600 bp, Homo sapiens
gatcaaattgaaaagcttaccaagcatcttccaccaagaacaattggctatccatggactcttgtttatggtactggaaaacatggcacaagcttgaaaactctttatcgaacaatgacaggtttagacaccccagtgctgatggtgattaaagacagtgatggacaggtttttggtgcgttagcatctgaaccactgaaagtgagtgatggcttttatggtactggagagacctttgtttttacattctgtccggagtttgaggtctttaagtggacaggagataatatgttttttatcaaaggagacatggattcactagctttcggtggtggaggaggagaatttgcgctttggcttgatggagatctctaccatggaagaagccattcttgtaaaacgtttgggaatcgtacactttctaagaaggaagatttctttatccaagatattgaaatctgggcttttgaataaataaaatgctctctgtcttagcaggagaatggcccaaacctgacatggacaagcattgtttggaaagttcaagaagcaatacagtgtaacatgtcacttgtgctttaaaattagtctgtatcacca

SEQ ID NO: 9410 - DNA, 1187 bp, Homo sapiens; identical to SEQ ID NO: 4175

SEQ ID NO: 9411 - DNA, 600 bp, Homo sapiens
gagcagcgtgcagatatggaccagttcactgcctcaatctcagagacccctgtggacgtccgggtgagctctgaggagagtgaggagatcccaccgttccaccccttccaccccttcccagccctacctgagaacgaagacactcagccggagttgtaccacccaatgaaaaaaggatctggagtgggagagcaggatgggggactgatcggtgccgaagagaaagtgattaacagtaagaataaagtggatgaaaacatggtcattgacgagactctggatgttaaggaaatgattttcaatgccgagagagttggaggcctcgaggaagagcgggaatccgtgggcccactgcgggaggacttcagtctgagtagcagtgctctcattggcctgctggtcatcgcagtggccattgccacggtcatcgtcatcagcctggtgatgctgaggaagaggcagtatggcaccatcagccacgggatcgtggaggttgatccaatgctcaccccagaagagcgtcacctgaacaagatgcagaaccatggctatgagaaccccacctacaaatacctggagcagatgcagatttaggtggca

SEQ ID NO: 9412 - DNA, 1400 bp, Homo sapiens
ctccagagcaaacaccagttgtggttcatgtctgcgggctggagatgccacctgatgcagtagaagctggtggaggcatggaaaagaccttgccagagcctgtgggcacccaagtcagcatggaagagattcagaatgagtcggcctgtggcctagatgtgggagaatgtgaaaacagagcgagagagatgccaggggtatggggcgccgggggctccctgaaggtcaccattctgcagagcagtgacagccgggcctttagcactgtacccctgacacctgtcccccgccccagtgactccgtctcctccacccctgcggctaccagcactccctctaagcaggccctccagttcttctgctacatctgcaaggccagctgctccagccagcaggagttccaggaccacatgtcggagcctcagcaccagcagcggctaggggagatccagcacatgagccaagcctgcctcctgtccctgctgcccgtgccccgggacgtcctggagacagaggatgaggagcctccaccaaggcgctggtgcaacacctgccagctctactacatgggggacctgatccaacaccgcaggacacaggaccacaaggttgccaaacaatccttgcgacccttctgcaccgtttgcaaccgctacttcaaaacccctcgcaagtttgtggagcacgtgaagtcccaggggcataaggacaaagccaaggagctgaagtcgcttgagaaagaaattgctggccaagatgaggaccacttcattacagtggacgctgtgggttgcttcgagggtgatgaagaagaggaagaggatgatgaggatgaagaagagatcgaggttgaggaggaactctgcaagcaggtgaggtccagagatatatccagagaggagtggaagggctcggagacctacagccccaatactgcatatggtgtggacttcctggtgcccgtgatgggctatatctgccgcatctgccacaagttctatcacagcaactcaggggcacagctctcccactgcaagtccctgggccactttgagaacctgcagaaatacaaggcggccaagaaccccagccccaccacccgacctgtgagccgccggtgcgcaatcaacgcccggaacgctttgacagccctgttcacctccagcggccgcccaccctcccagcccaacacccaggacaaaacacccagcaaggtgacggctcgaccctcccagcccccactacctcggcgctcaacccgcctcaaaacctgatagagggacctccctgtccctggcctgcctgggtccagatctgctaatgctttttaggagtctgcctggaaactttgacatggttcatgtttttactcaaaatccaataaaacaaggtagtttggc

SEQ ID NO: 9413 - DNA, 1400 bp, Homo sapiens
acagcagccgcttctgaatctccagggcaccaactcagcctccctcctcaacggctccatgctgcagagagctttgcttttacagcagttgcaaggtaacctccgaggctatggcatggcatccccaggcctcgcagcccccagcctcacacccccacaactggccactccaaatttgcaacagttctttccccaggccactcgccagtccttgctgggacctcctcctgttggggtccccatgaacccttcccagttcaacctttcaggacggaacccccagaaacaggcccggacctcctcctctaccacccccaatcgaaaggattcttcttctcagacaatgcctgtggaagacaagtcagaccccccagaggggtctgaggaagccgcagagccccggatggacacaccagaagaccaagatttaccgccctgcccagaggacatcgccaaggaaaaacgcactccagcacctgagcctgagccttgtgaggcgtccgagctgccagcaaagagattgaggagctcagaagagcccacagagaaggaacctccagggcagttacaggtgaaggcccagccgcaggcccggatgacagtaccgaaacagacacagacaccagacctgctgcctgaggccctggaagcccaagtgctgccacgattccagccacgggtcctgcaggtccaggcccaggtgcagtcacagactcagccgcggataccatccacagacacccaggtgcagccaaagctgcagaagcaggcgcaaacacagacctctccagagcacttagtgctgcaacagaagcaggtgcagccacagctgcagcaggaggcagagccacagaagcaggtgcagccacaggtacagccacaggcacattcacagggcccaaggcaggtgcagctgcagcaggaggcagagccgctgaagcaggtgcagccacaggtgcagccccaggcacattcacagccgcatctgccacaagttctatcacagcaactcaggggcacagctctcccactgcaagtccctgggccactttgagaacctgcagaaatacaaggcggccaagaaccccagccccaccacccgacctgtgagccgccggtgcgcaatcaacgcccggaacgctttgacagccctgttcacctccagcggccgcccaccctcccagcccaacacccaggacaaaacacccagcaaggtgacggctcgaccctcccagcccccactacctcggcgctcaacccgcctcaaaacctgatagagggacctccctgtccctggcctgcctgggtccagatctgctaatgctttttaggagtctgcctggaaactttgacatggttcatgtttttactcaaaatccaataaaacaaggtagtttggc

SEQ ID NO: 9414 - DNA, 600 bp, Homo sapiens
gagctgaagtcgcttgagaaagaaattgctggccaagatgaggaccacttcattacagtggacgctgtgggttgcttcgagggtgatgaagaagaggaagaggatgatgaggatgaagaagagatcgaggttgaggaggaactctgcaagcaggtgaggtccagagatatatccagagaggagtggaagggctcggagacctacagccccaatactgcatatggtgtggacttcctggtgcccgtgatgggctatatctgccgcatctgccacaagttctatcacagcaactcaggggcacagctctcccactgcaagtccctgggccactttgagaacctgcagaaatacaaggcggccaagaaccccagccccaccacccgacctgtgagccgccggtgcgcaatcaacgcccggaacgctttgacagccctgttcacctccagcggccgcccaccctcccagcccaacacccaggacaaaacacccagcaaggtgacggctcgaccctcccagcccccactacctcggcgctcaacccgcctcaaaacctgatagagggacctccctgtccctggcctgcctgggtccagatctgct

SEQ ID NO: 9415 - DNA, 600 bp, Homo sapiens
taataattttctgtgctaagggtccagtatttatttgattatttagtatgtttatgtttcatgacactaatttagtcttttgatacattttacattctgtttactgccacaagcactgtggcaataacttttgaattttaatttttataatagaaaaatgattaggaattgctagatagtgttttgaaagcatatctttttcttcagaacaatgtagacttccaaaatggttaacctaaggggtctttacaaaatgtgttataagttaaacataatttgggaagttttacttttgttttcttctatgaagaaaaaaatgcaggctgggcgcggtggctcacgcctgtaatcctagcactttgggaggccgaggcaggtggatcacctgaggtcagttcaagaccagcctggccaacatggtgaaaccccgtctctactaaaaatacaaaaattagctgggcgtggtggcatgcgcctgtaatcccagctacccaggaggctgaggcaggagaattgctgaaacccgggagtcagaggctgcagagagccgagactgggccactgcactccagcctggatgacagagtgagactccgtctc

SEQ ID NO: 9416 - DNA, 600 bp, Homo sapiens
gattctacggcgactggagagggtgagtagccactgctccagcctcctgcggagtgcctacatccagagccgcgtggaaacagtgccctatcttttctgccgcagcgaggaggtccggcctgcaggcatggtgtggtatagcatcctcaaggacaccaaaatcacgtgtgaggagaagatggtgtcaatggcccgaaacacatattatttgactctatcaaaagtctctcctttttaaaccttttcttatggatggctgtcaatcccgaggcagaagttttcaggtggagaccaagcggcctttgctcttcttccttcttcctgccacactctgctttcttcctgccatggacccctggaggagacctatggagggacagttttgacctgacccctagaggagacagttttgacctcttcagcaccaggaaggaagctctgaggatggttgcagtgaggaagcatgggtctttaaggacttctctctcttttttgctggacattattgagtttgtgggaccctgcctcttcctgctacctgtgggtctgcccagagtccctgcaggcctgtccatgcattaaaaattcctattgtctctc

SEQ ID NO: 9417 - DNA, 600 bp, Homo sapiens
tctgatcctgactctttcaattacagactgtgttaccttggacaatttggctaagtccttatgcaaaaaaagtatgatgccatttacttaatagggttgtgaggattaaatgagataattcatataaagcccatagcggaaggcctggcaggtagcaagggcccagcaaatgagagctattcacgttgccattaatgcatcatcatcgttacaattatcatctttttttttttacgttccaaagattcttccttctatctattatctcatcatatctcatctcatcatatcatatctcatcattttatccagagatacacttccttgttctttggccaaatgttcgagctataccaagtagggagataatggagaagcagcacgtctatctatacacattaatatttataaaatgctacatgtgaataatcagtacggtgatcagcaaggataaaggagagagctggcaagattaacatgctactgtttatgaagctctctaactttgatactcataacaactctgaaaggcacctagagtgtccttggagtttaattacctttttccataggagctgtttcaaggagaaaaaaaaaaaa

SEQ ID NO: 9418 - DNA, 600 bp, Homo sapiens
ctgcctgagccccgtggcctctcagctctgcggccaccccgttccctccccagcttcctgcccaaagagccccacattcaagccaacttgagggaagggggcgtctcgtcagctggtccctgctagggagctattgatgtgcaatattagaaaggagacatgaaaaaaggagaaaaggaaagacagaagtgtatatatatattatttaaacaaacaaaaagaaggtgcgttactatttttttttcacccgggaaagaggtgagaggatgggaaggagcagccaggcgtgggaagcggcgagatcctcgggctgggggtgcccacgtttgctacctcccactgtgaaatcgctggtgctcacaattgtctctcacagtgtatgtgatttttttaaggaaaaaaaaaaatccctatttaagattctgaaggtgctaccattattttgccacagactttgaagaaacttttggatgtggggcatcatccgcatctttctctctcctccaaatgacaaagtttggggaatttttgaattttcctagcatcgcccttgtgctcatcaggtaatctgctaaggaggaaaaaagaaaagaaaaaagg

SEQ ID NO: 9419 - DNA, 463 bp, Homo sapiens; identical to SEQ ID NO: 4184

SEQ ID NO: 9420 - DNA, 1400 bp, Homo sapiens
atgaagaggattgcagaaatgacagatatcaaacccatcctgaggaagctcccgcgtatcaagaaacacttgttaaatggtgataatatgaggtgttcagtgaatgcgactcctcagcagatgcctcagacagaaaaagcggtcgaagacttccttagaagcatcggtcggagtaaaaaggaacggaggcctgtgcgcccacacacggtcgagaaacctgtgcccagcagctctggtggagatgcccacgttccccatggctcccaggtcattaggaagctggtcagttttacagtgagaaattgtgtggagtgacggaactgcagtgccttgctctcgcgccccagcacctggctgcagagtgtcacggagatgggacccctgagatggctccagtcccagtgccgtgggcagtgcgtgggagcacagccgcctctgacccctgagtgggtccagtcccagtgccgtgggcggtgcatggcagcacagccgcctctgaccataccgtgtccctcaggaacccaccttcaagccctggcagatgaagactcacttcctgatgcccttcccggtgaattacgtgggtgaatgcatccgaactgtcccctacacggacccagatcatgccagtcttaaaatccttgcacgtttgatgactgccaaattcttgcatacagaaattcgagaaaaaggcggtgcttatggtggaggcgcaaaactcagccacaatgggattttcaccctttactcttacagggacccaaatacaatagagacgctccagtcttttgggaaggctgtcgactgggctaagtctggaaaattcacacagcaagacatcgacgaagccaaactttctgtcttctcaaccgtagatgctcctgtcgctccttcagacaaaggaatggaccacttcttgtacggcctctcggatgagatgaagcaggcccacagagagcagctctttgctgtcagccacgacaagctcctggccgtgagcgatagatacctcggcactgggaagagcacacacggcctggccatcctcggacccgagaacccgaaaattgccaaggacccatcctggatcatccaatgagcagccgtggcgctcgactgcacaggagcccgagacaatacacctccgagctgaatatgaaaagtcagaaatgctactgctttttccaagaatattatgtcattgagtgtcgccaaagcccttgactggcgagtcaaaaactcagatctatcttaagagtgaccaggaagaggttcattgaaataatcatgcatgaagcgccaaagatgcaccatgtagaattttcactttgtactggcaggctcgttttacctcattctagaatatttaagaatctaaaaataaagggcaactctgactt

SEQ ID NO: 9421 - DNA, 600 bp, Homo sapiens
gctgccccggaactgcggcgactctccctactcagaacttggcctacgtttcccaggactctccccatctccagaggcccccacaaaaccgggaaaggaaggaaaggacagcggcggcagcagctcaatgagtgcctacagcagaaagcctgtgatttggccaggctctatgggaggaatgaggttgttagcctgatgcaggcaaatggggctgggggagccacaaatcttcaataaacgtggggagggctcccccacgttgcctctactttatcaattaactgagtagctctcctgacttttaatgtcatttgttaaaatacagttctgtcatatgttaagcagctaaattttctgaaactgcataagtgaaaatcttacaacaggcttatgaatatatttaagcaacatctttttaacctgcaaaatctgttctaacatgtaattgcagataactttgactttcttctgaatattttatctttccttggcttttcccttgcttccccttttgccaatctcaacacccaagttgaagactttgtttttaaaatggtttgtcctgatgcttttgtctaattaaaacactttcaaaacagg

SEQ ID NO: 9422 - DNA, 600 bp, Homo sapiens; identical to SEQ ID NO: 4187

SEQ ID NO: 9423 - DNA, 1400 bp, Homo sapiens
ctggagagagagaaacccccaagctaggatttctgcagctcatgaagccttggagataaatgaaattaggtccagagttgaagttcccctaattgcttcctctaccatctgggagataaaattgttaccaaagtgtgcaactgcttatattctcttggctgaagaggaagcaacaaccattgctgaagcagaaaaattatttaagcaggccctgaaggctggagatggctgttaccgacgctctcagcagctacaacatcatggatcccagtatgaagcccaacatagacgagacaccaatgtcttggtgtacatcaaaagaaggctagcaatgtgtgccagaagactcgggaggaccagggaagcagtgaaaatgatgagagatttaatgaaggagttcccccttctgagtatgttcaatatccatgaaaaccttttagaagcccttctggaactacaagcatatgctgatgttcaggcagtcttagcaaagtatgatgatataagcttaccaaagtcagcaacaatatgctacacagctgctttgctcaaagcaagagctgtctctgacaaattctctcctgaggctgcatctcggcgggggctgagcacagcagagatgaatgcagtagaggccattcatagagctgtggaattcaatcctcatgtgccaaaatacctactagaaatgaaaagcttaatcctacccccagaacatatcctgaagagaggagacagtgaagcaatagcatatgcattctttcatcttgcacactggaagagagtggaaggggctttgaatcttttgcattgtacgtgggaaggcacttttcggatgatcccttatcccttggaaaaggggcacctattttatccttacccaatctgtacagaaacagcagaccgagagctgcttccatctttccatgaagtctcagtttacccaaagaaggagcttcccttctttattctctttactgctggattatgttccttcacagccatgctggccctcctgacacatcagttcccggaacttatgggggtcttcgcaaaagctttcctcagcactttgtttgcccccttaaactttgtcatggagaaagtggagagcatcctcccatccagtctgtggcaccagctaacacggatctgagagaagccctgtcctccactcacctcacccgccgctgccaccatctcctctgtgccaactccttgtggaccgcaagaaagcatgactttgaaaaagggaagccattccgagattttaaaatgttcatggactattccatattaaaagctgtttttgttgtacaaaattcactgatgttcagttctattttattttgccttcagaaaagaagaaagtcaaaaataaaacttttgtgtattacagc

SEQ ID NO: 9424 - DNA, 600 bp, Homo sapiens
tggccgcgagtcacgcagccctgttgcgcttccggcgcctgctggtggctggctgcagcgtggcttctttgacaagcacatctggctctccatatgggaccggccgcctcggagctgtttcactcgcatccagagggccacctgctgcgttctcctcatctgtctcttcctgggcgccaacgccgtgtggtacggggctgttggagactctgcctacagcacggggcgtgtgtccaggctgaacccgctgagcgtcgacacagtcgctgttggcctggtgtccagcgtggttgtctatcccgtctacctggccatcctctttctcttccggatgtcccggagcaaggtggctgggagcccgagccccacacctgccgggcagcaggtgctggacgtcgacagctgcctggactcatccgtgctggacagctccttcctcacgttctcaggcctccacgctgaggcctttgctggacagatgaagagtgacttgtttctggatgattctaagagtctggtgtgctggccctccagcgagggaacgcccagttggccggacctgctcagtgacccgtccattgtgggtagcaatctgcggca

SEQ ID NO: 9425 - DNA, 1400 bp, Homo sapiens
cagctttgattacagagctgcaactcagttttggcggagcaaagtcctagaggtggccaaggacttccctgagtacacctttgccattgcggacgaagaggactatgctggggaggtgaaggacctggggctcagcgagagtggggaggatgtcaatgccgccatcctggacgagagtgggaagaagttcgccatggagccagaggagtttgactctgacaccctccgcgagtttgtcactgctttcaaaaaaggaaaactgaagccagtcatcaaatcccagccagtgcccaagaacaacaagggacccgtcaaggtcgtggtgggaaagacctttgactccattgtgatggaccccaagaaggacgtcctcatcgagttctacgcgccatggtgcgggcactgcaagcagctagagcccgtgtacaacagcctggccaagaagtacaagggccaaaagggcctggtcatcgccaagatggacgccactgccaacgacgtccccagcgaccgctataaggtggagggcttccccaccatctacttcgcccccagtggggacaaaaagaacccagttaaatttgagggtggagacagagatctggagcatttgagcaagtttatagaagaacatgccacaaaactgagcaggaccaaggaagagctttgaaggcctgaggtctgcggaaggtgggaggaggcagacgccctgcgtggcccatggtcggggcgtccacgccgaggccggcaacaaacgacagtatctcggattcctttttttttttttttaattttttatactttggtgtttcacttcatgctctgaatactgaataaccatgaatgactgaatagtttagtccagatttttacagaggatacatctatttttatcattatttggggtttgaaaaatttttttttacaccttctaatttctttatttctcaaagcagataattcttctgtgtgaaaatgttttctttttttaatttaaggtttaaaattccttttccaaatcatgttgattttgctctttgctttttcgttgtctgagaaattgttggcgtagatttggcttctggtatgtgtttctgattgcttcctgttgagcacaaagtgagagctgccactgagcagccctgccaggggtgctgtttcaggctgggcatcgccaggcggcctccctgcaaaccaagggctgggggcaaaggggcatgatccagggtcccccagggtgggctcagctccagggagaggccacccacgtggcagccccacctcttgagagcccccagtgccggagcagaaaggaccctggacccagaggcagatactgcggggtggtagaaaaggtagagtaggctgtggcaatggaataaaacacgattaaaaacgtt

SEQ ID NO: 9426 - DNA, 1400 bp, Homo sapiens
gacagcagatgatttgggggtgacaggtgctttgacagttttgatgaaagatgcaataaaaccaaacctgatgcagaccctggaagggacacctgtgttcgtgcatgcgggcccttttgctaacattgctcacggcaactcttcagtgttggctgataaaattgccctgaaactggttggtgaagaaggatttgtagtgaccgaagctggctttggtgctgacatcggaatggagaaattcttcaacatcaagtgccgagcttccggcttggtgcccaacgtggttgtgttagtggcaacggtgcgagctctgaagatgcatggaggcgggccaagtgtaacggctggtgttcctcttaagaaagaatatacagaggagaacatccagctggtggcagacggctgctgtaacctccagaagcaaattcagatcactcagctctttggggttcccgttgtggtggctctgaatgtcttcaagaccgacacccgcgctgagattgacttggtgtgtgagcttgcaaagcgggctggtgcctttgatgcagtcccctgctatcactggtccgttggtggaaaaggatcggtggacttggctcgggctgtgagagaggctgcgagtaaaagaagccgattccagttcctgtatgatgttcaggttccaattgtggacaagataaggaccattgctcaggctgtctatggagccaaagatattgaactctctcctgaggcacaagccaaaatagatcgttacactcaacagggttttggaaatttgcccatctgcatggcaaagacccacctttctctatctcaccaacctgacaaaaaaggtgtgccaagggacttcatcttacctatcagtgacgtccgggccagcataggcgctgggttcatttaccctttggtcggaacgatgagcaccatgccaggactgcccacccggccctgcttttatgacatagatcttgataccgaaacagaacaagttaaaggcttgttctaagtggacaaggctctcacaggacccgatgcagactcctgaaacagactactctttgcctttttgctgcagttggagaagaaactgaatttgaaaaatgtctgttatgcaatgctggagacatggtgaaataggccaaagatttcttcttcgttcaagatgaattctgttcacagtggagtatggtgttcggcaaaaggacctccaccaagactgaaagaaactaatttatttctgtttctgtggagtttccattatttctactgcttacactttagaatgtttattttatggggactaagggattaggagtgtgaactaaaaggtaacattttccactctcaagttttctactttgtctttgaactgaaaataaacatggatctagaaaacc

SEQ ID NO: 9427 - DNA, 1400 bp, Homo sapiens
gaaaactggggtcgcgaagaaatcacagccaaggaagatttgatgcattcagattctcgtgtaacacttgttgcttggcaacagtactggttgggttgaccagtaagtagaaaaaggctaaaggctatgcgatatgaatttcagaaatggactgaaaatggagagctatgtaacagatacactacagtagaagaacttacttctgaaatgaagggaaaaaaaccaccccatcgttccctactcctccccaccacttacccgttccccctttacctaatctagtagattagccatctttcaaattcacttttatttcagtccttatatttcatatacttccgtctcgatgctgttaacaacttctgataacatggaaaattcaaggattgtttaaaggtctgatgatcacacacaaaatgtaattccggttatttaagtcatttctgtgattctatcatgtacagtttccagaattgtcactgtgcattcaaaagtaatgaatctaacagacatttgatttaatgtacactcccttttgcttatagtgtgcattttttttggaggtcattcaaattttccctcttctgtgatagctgtagtttctttcatagaaagtagctaatccagtgtaatcttttacctttttaaaaaccaagatagagtatctattagagttttacattgttgatgatagattaacaataaagtgatgttctggtggaggtagactgaaatttttttaattcatgtttttcatttgatacttttaatttacacttagtaaattaaaagttgtttaatttacttggcattttaggacatgtacatgaaacagtgaaaatgagatccaccaacatcttttattaagttcagttattagtctgtgaagtgctttactttttgcacaattttaatagcttgctattcagtaatacattatagtgaattcatgatcaaggtttccttaaatttagcatttgcatttcagtactgactgtgtaagctaaattgctgatccaaaataaaaacccagactagaatagggttcttaaaatcaagtatcaatacaaaatagaacacaattaaaatcttaattgttggctgggcacagtggctcacgcctgtaatcccagcactttgggaggccgaggcgggcggatcatgaggttaggagagcgagaccatcctggctaacacggtgaaaccccgtctttactaaaaatacaaaaaaaattagccgggcgtggtggcgggcgcctgtagtcccagctactcgggaggctgaggcaggagaatggcgtgaacccaggaggcggagcttgcagtgagccgagattgtgccactgcactccagcctgggcaacagagctagactctgtgtcaaaaataaatgactagat

SEQ ID NO: 9428 - DNA, 1400 bp, Homo sapiens
gctgaggcaggaaaatagcttgaacccgggagagaggttgcggtgagctgagattgtgccattgcactccagcctgggcaacgagtgaaactctgtctcgagaaaaaagagagagagacagggtttcactttgttgcccaggctggagtgcagtggctgttcacaggtgcggtcataacacgctacagccttggcttcttggcctcgagcagtcctccccgctcagcctcttgtggatttgggaatacaggcgcctgccaccgtgcctggctatttgccacatttcatgtgttgagcttcaggttctgagaggcacatgagagcttagactggcagaaaaggggggtcgtgtccactttcatgtctgcccttttggctcactgcagatagttccctgtgatcccagatgagggccagaatcagttctaagcctaggcctttgggaaaacttagtttgggagtctttgtccttaaaagcctatctgagttcaaacccttgtttttctgctttaaagccatgagatcttgggcaagtcacagccttgatttcttcatccgtaaaagtggtaatagttcctctgtttatcacctgatttaattttggtaaagcactttatgagctgacacagtaaatgtgtatctttgtggttaagaatttataccctccaaattatgcgtctggtgccttggttgaaagtattctcacttcatggttgctgtattacaggtacggtattctcaccaaaatcatttctctttgtaattatgatactgattttaatgccgcacatttgcatactatatgcttgttacagtgatccccacagtaactcatgaagcagccactcattgtacaaatgaacgtctccatataatagtttagctattatacagtacatggcagaaacacaattcaaactcaagtttatacgaatactttcaagtctccttacctgagagcagaaagtgacatttaaatttaaaggagttcccagcctttgttttcagtgcagtttgtttcatggtgtaggcagaagtcagggctgtgtgattgtgtggctgggctctctggatttggctctttgggttgcaggagtcatggctcatacgctacatgaggcaccagctcatgtaggcactgtcagttcctatgtgccccacaggaaagcgcccttaaccactgatgagtgttgatgtttttctgcactagaaggcactatgttgaactattaaacttaccagcactttctttttccactccatagtttcattgtactgacaacctcagctggcatcatggaccatgaagaagcaagacgaaaacacacaggagggaaaatcctgggattctttttctagggatgtaatacatatatttacaaataaaatgcctcatggac

SEQ ID NO: 9429 - DNA, 1400 bp, Homo sapiens
ccgcccccggccggaagttccggcggcggagctgggccgggcccgagcggatcgcgggctcgggctgcggggctccggctgcgggcgctgggccgcgaggcgcggagcttgggagcggagcccaggccgtgccgcgcggcgccatgaagggcaaggaggagaaggagggcggcgcacggctgggcgctggcggcggaagccccgagaagagcccgagcgcgcaggagctcaaggagcagggcaatcgtctgttcgtgggccgaaagtacccggaggcggcggcctgctacggccgcgcgatcccagagcgcagaagctgggacgggccgtgggtcagagtgggcacgctgagcctacgccctcatgcggctggcccggccttggtccctagacccggaacccgctggtggccgtgtattacaccaaccgggccttgtgctacctgaagatgcagcagcacgagcaggccctggccgactgccggcgcgccctggagctggacgggcagtctgtgaaggcgcacttcttcctggggcagtgccagctggagatggagagctatgatgaggccatcgccaatctgcagcgagcttacagcctggccaaggagcagcggctgaacttcggggacgacatccccagcgctcttcgaatcgcgaagaagaagcgctggaacagcattgaggagcggcgcatccaccaggagagcgagctgcactcctacctctccaggctcattgccgcggagcgtgagagggagctggaagagtgccagcgaaaccacgagggtgatgaggacgacagccacgtccgggcccagcaggcctgcattgaggccaagcacgacaagtacatggcggacatggacgagcttttttctcaggtggatgagaagaggaagaagcgagacatccccgactacctgtgtggcaagatcagctttgagctgatgcgggagccgtgcatcacgcccagtggcatcacctacgaccgcaaggacatcgaggagcacctgcagcgtgtgggtcattttgaccccgtgacccggagccccctgacccaggaacagctcatccccaacttggctatgaaggaggttattgacgcattcatctctgagaatggctgggtggaggactactgaggttccctgccctacctggcgtcctggtccaggggagccctgggcagaagcccccggcccctatacatagtttatgttcctggccaccccgaccgcttcccccaagttctgctgttggactctggactgtttcccctctcagcatcgcttttgctgggccgtgatcgtccccctttgtgggctggaaaagcaggtgagggtgggctgggctgaggccattgccgccactatctgtgtaataaaatccgtgagcacg

SEQ ID NO: 9430 - DNA, 1400 bp, Homo sapiens
agatcctgaaccgattagaaaagaccaaagtcgagcggttcccagacctagcagcagagaaagaatgcagagatcgtgaagagaggaatgagaaaaaagcccaaattcaggaaatgaaaaagagagaaaaagaagaaatgaagaagaagagggaaatggatgaacttaggagctattcatcactaatgaaagttgaaaatatgtcttcaaatcaggatggcaatgattcagatgaattcatgtaaaaggagaaaaggagaaaaggacctttgaaagatgtgaatgtagagacaattgcagaccttttggtttcatctgtgttctgaaatataaaatacaaccaaaattctaccttcatcctacccagaaattattgattttcaagttttaaaaaaattgtaccttttttgctgacagaaaaggatcagatatgtataaaatagttgaacttgacagcatataacttaaagtgaaaatgtttttgccagaacatgtcttggtaccttgtgaaagcaggctgcccttgttcttgagatagactttaaaatgaaccagctctgaaaagtacttctgctgctctggtctatccctgaaaacagatgtcttgaaacacttttcatattcttaaaataatcttcacttctgttaagaagaacatgttggtgggtaattatgcgaatgtttccctgtccctgatttctcgattaggcgtatgggttttgaaaaagagatttttcagaagattgtcagcttcagtattcatgttccatcgtgtcatctgggtctgttagtgtagtgaccctcagtgcagtctgtcccagcgtttacgtccttgcttcctctgagcagaggcctccatcttagtatcaacatatttaaagaaattgatggtgttcatcaagctggggcctgtggcagttgttgcctgagcaccaagtaacccaagccacctatgtgacaacttctgggcccaggagtaatttctcagcattgagggtaaaataggatggagtgctctgttgatcatttgggagatgtaggttacctgatttgtgccttaggatgcagcgtgaagcagaagtccatattgcaattatgattttagaaggaactaagcattttactcacacccacagcagcaagaatgacctcctgcagcagatattccacctgtaatagcactttggaactgtgggcaaaaccaaaaggctagtgtttccatttattccatgttggtgtatggggttgaactggaaaattccctgaggcaaaactcactggccaaattttgagagggtatagaaaatgactttagagatgagtggttttgtgtatgtgtctgatgatattcagtctgatgttccgcaattttaaaagttataataaaataccattttttt

SEQ ID NO: 9431 - DNA, 835 bp, Homo sapiens; identical to SEQ ID NO: 4196

SEQ ID NO: 9432 - DNA, 600 bp, Homo sapiens
agctcatccgtcagctgaactagacccaggtgaggcagggctgaaaactgcccttgggctgacttttgataggccatgccttgccactttacaagttctttttgcatttactagtatttaagagtaaccttgagattgggaggaatagaggaggctggtacaaatagatggagacctgctgggatcagtgaatgcctgattaggacatggggctatgcatagcctaagagttataggcttaaagatgtcgagtaactaaaaactgtattgctggccgggcgcggtggctcacgcctgtaatcccagcactttgggaggccaaggcgggcagaccatgaggtcaggagattgagaccatcctggccaacatggtgaaaccctgtctctactaaaaatacaaaaatgagctgggtgtggtggcgcgtgcctgtagtcccagctactcgagaggctaaggcaggaaaatcgcttgaacccaggaggcagagattgcagtgagccaagattgcaccagtgcactccagctgggcgacagagcgagactccatctcggaaaaaaaaaaaaaaaaactattgctgcagtcattcagatggaaatga

SEQ ID NO: 9433 - DNA, 600 bp, Homo sapiens
ccccctctagtgaagggtaggagagctcagcctcggatggccaacattcagttgttcaggttcattcgtcaaagttaagttttagaactatttgtactcagtaacaaaaatcattttctttttttttttttttttctgttgtggaaaagcgtgaatttgttattaagcatttgattttctgtgtccttaagtacttcctgaagatgaagcaaaattttaatctggcaattatgaaaaagaaatattttagctctgaaggatttagtagattctgttagattagggaggccttacagactgactttacttaaagaggacgcgtcactcgctgtcagtgtggtgtgggctttatttgcttaaataccttcatttgtatagtacgtctcacttgaaattgctttgtatacattttgtaaaaatatttataaaatgttttgtaaaaaaaaaaaaactataacaaattgcagtttattttgttatgttggataaatactgttaaaagaaaccagtcagtaactatattgttaatccatggttaggaaatgtttagttggagattacaaattgaaacaaccattgcaatacagccaaagatttggg

SEQ ID NO: 9434 - DNA, 1400 bp, Homo sapiens
gtgtggaaaagactacagattacacactcttttcattcacacttgtacatatagacagcaatgttattaggagcattaaattaaaaaactgaacagcctaatttaaatgtggcttgggcctggtagaagtttgaccaaatggaatggaggctgtgagcaatgtgaggattctatttatttatttacgtttgataaaacttactggaactagtactaccatgcgtattccctgtccaaagcatcactgctttggtatagtataagttcatgaaattctggtgggtagaaagaaatttttatttctatcagcagtactaaaatgtatcagccaaccagagaacatcagtgactttaacttctgcagagtttgccccagaattcagagttctatttagaggaagttaaaacaacaacaaaaaacaaccatttgaaaaatttttgtcaccagcaaaacttttcactaattagtgatatgaaatgtgatttttgtgttgttaaacttcagctttggaaaactcagtctctttcattatcatccattccaatttgaaggagttgggcagctaatttggttaaaggcagtcttgagggttagaagtattacttccttttcgggttccagacctagcttgtgactgaaagttttagaaaaaggaagtacatctatagccaaattgataaggttattactgtgttttgcacaaagtatattagcaaaagtatttgctggaattattggtagatggcagtcccactcctacacctgctttgtcagatacagctgggttccctggctgactctgtaccttacttacactacttacttaatagaaacacaaacttggaaattgtgccagtggtccagctggagcacaacgtttggtgaatatgctgtttcctcagttcagagaggtagcaactaggtaaactccttataaaaagcaaatacctggatttacaaaagtgaaagtagttgttcacaaaagaattcgccatggaattctttcagttaccaagctctcctggtaatgtttgtggttatatcatttacacaaaacttttcaggaacttctgtgttgtttaagcaagatgtatctgtactgatgtctcagtgaatcagtctgtttattaagcacttatcagggcttccacacacttatttattttgccctagttaatcctgttgtttgctgccattggcatgaaatggccaactgtggctgttacagttctttcattcaattataacttgtaaaccagtgactcctaatctttttcaagttaagacaccttaccattgcttatttggttttatgagacttgttcctttttttctccctaaggaaaaagaaagctttatgacatatttatttttttaataaaactaagcaaaaataaaa

SEQ ID NO: 9435 - DNA, 1400 bp, Homo sapiens
accgcgggcacgtgtggaccgaccggcacgtggaggaggctcaacaggtggtgcactgggaccggcagccgcccggggtcccgcacgaccgcgcggaccgcctgctggacctctacgcgtcgggcgagcgccgcgcctacgggcccctttttctgcgcgaccgcgtggctgtgggcgcggatgcctttgagcgcggtgacttctcactgcgtatcgagccgctggaggtcgccgacgagggcacctactcctgccacctgcaccaccattactgtggcctgcacgaacgccgcgtcttccacctgacggtcgccgaaccccacgcggagccgcccccccggggctctccgggcaacggctccagccacagcggcgccccaggcccagaccccacactggcgcgcggccacaacgtcatcaatgtcatcgtccccgagagccgagcccacttcttccagcagctgggctacgtgctggccacgctgctgctcttcatcctgctactggtcactgtcctcctggccgcccgcaggcgccgcggaggctacgaatactcggaccagaagtcgggaaagtcaaaggggaaggatgttaacttggcggagttcgctgtggctgcaggggaccagatgctttacaggagtgaggacatccagctagcctcctctcctcccacagattacaaaaacaacatcctgaaggagagggcggagctggcccacagccccctgcctgccaagtacatcgacctagacaaagacccttctgggctctgcccgctgggggcctgaagacattcctggaggacactcccatcagaacctggcagccccaaaactggggtcagcctcagggcaggagtcccactcctccagggctctgctcgtcgggggctgggagatgttcctggaggaggacactcccatcagaacttggcagccttgaagttggggtcagcctcggcaggagtcccactcctcctggggtgctgcctgccaccgagagctcccccacctgtaccaccatgtgggactccaggcaccatctgttctccccagggacctgctgacttgaatgccagcccttgctcctctgtgttgctttgggccacctggggctgcaccccttgccctttctctgccccatccctaccctagccttgctctcagccaccttgatagtcactgggctccctgtgacttctgaccctgacacccctcccttggactctgcctgggctggagtctagggctggggctacatttggcttctgtactggctgaggacaggggagggagtgaagttggtttggggtggcctgtgttgccactctcagcaccccacatttgcatctgctggtggacctgccaccatcacaataaagtccccatctgattttt

SEQ ID NO: 9436 - DNA, 600 bp, Homo sapiens
cgcagctctggctgcggaatcgcgtcaccgaccgctactttcggatccaggaggtgctgaagcacgccaggcacttccggggaaggaaaaatcgctgctacaggttggcggtcagaaccgtgattcgagcctttgtgaaatgcaccaaagcccgatacctgaagaaaaagaacatgaggaccctctggattaatcgaattacagctgctagccaggaacatggactgaagtatccagcgctcattgggaatttagttaagtgccaggtggagctcaacaggaaagtcctagcggatctggccatctacgagccaaagactttcaaatctttggctgccttggccagtaggaggcgacacgaaggatttgctgctgccttgggggatgggaaggaacctgaaggcattttttccagagtggtgcagtaccactgaggactgttgctgtattgattaggaaaagagacagagtaatttgcagtttgtttgatttatacttttgtttatctacaacccaataacagacatgagggatggccctgtctctctgggacagagcctcacagatgatgtccatgttttgtgtgaatgaaactcaaac

SEQ ID NO: 9437 - DNA, 600 bp, Homo sapiens
tggtggcagatgtgggctctcactgcaagtcagtgtaagtccccagggactgtcagcagcacgtcctgctgcccctctctctgcagaagccctggtaacctgcgtttggaaaaatctctaaggatttctgaggagctgtcaggccatgtccttgtccaccctgtgtggggcacggcttcgacatggctctgctcccgtcgtgggctgagaaggagcaggtggggctgtgccttggaaaggaggccctcccgacatgcctttgtgcgaggtccctgtccatgctgtctccatcccggagccttacggcgatgggtggccacagagcctattccaagagtctggtttagggctgggtcttcccatcttcacctctgagtcttaggcgatgcgtgaccacgcagccccttccaggagtctggtttagggctgggtcttcccatcttcacctctgagtcttaggcggtgcatgaccacgcagccccttcccggagtctggtttagggctgcgtgctcaagagtctggtttggggctgggtcttcccatcgccctggaggaggcttttgtctcatctcatgattcacattaaactctgtgccatg

SEQ ID NO: 9438 - DNA, 1400 bp, Homo sapiens
agtgatggtttaaggcaaagggaagttcttcggaacctttcttcccctggatgggaaaacatctcaaggcctgaagctgcccagcaggcattccaaggcctgggtcctggtttctccggttacacaccctatgggtggcttcagctttcctggttccagcagatatatgcacgacagtactacatgcaatatttagcagccactgctgcatcaggggcttttgttccaccaccaagtgcacaagagatacctgtggtctctgcacctgctccagcccctattcacaaccagtttccagctgaaaaccagcctgccaatcagaatgctgctcctcaagtggttgttaatcctggagccaatcaaaatttgcggatgaatgcacaaggtggccctattgtggaagaagatgatgaaataaatcgagattggttggattggacctattcagcagctacattttctgtttttctcagtatcctctacttctactcctccctgagcagattcctcatggtcatgggggccaccgttgttatgtacctgcatcacgttgggtggtttccatttagaccgaggccggttcagaacttcccaaatgatggtcctcctcctgacgttgtaaatcaggaccccaacaataacttacaggaaggcactgatcctgaaactgaagaccccaaccacctccctccagacagggatgtactagatggcgagcagaccagcccctcctttatgagcacagcatggcttgtcttcaagactttctttgcctctcttcttccagaaggccccccagccatcgcaaactgatggtgtttgtgctgtagctgttggaggctttgacaggaatggactggatcacctgactccagctagattgcctctcctggacatggcaatgatgagtttttaaaaaacagtgtggatgatgatatgcttttgtgagcaagcaaaagcagaaacgtgaagccgtgatacaaattggtgaacaaaaaatgcccaaggcttctcatgtctttattctgaagagctttaatatatactctatgtagtttaataagcactgtacgtagaaggccttaggtgttgcatgtctatgcttgaggaacttttccaaatgtgtgtgtctgcatgtgtgtttgtacatagaagtcatagatgcagaagtggttctgctggtacgatttgattcctgttggaatgtttaaattacactaagtgtactactttatataatcaatgaaattgctagacatgttttagcaggacttttctaggaaagacttatgtataattgctttttaaaatgcagtgctttactttaaactaaggggaactttgcggaggtgaaaacctttgctgggttttctgttcaataaagttttactatgaatgac

SEQ ID NO: 9439 - DNA, 600 bp, Homo sapiens
ggcaaacagagagaagccactttattccctgtggagtggaggatgctaggatgttgctgctccggcagacagaggcctttcgcttgagtcatcagccaacagactgaatgttatggttttagaaacccatacacaaagttgagtggttttttccatttctaaaatttaaaatgtatgtatttttaaaacacccacctgcatgtaatacacagcttgttcaggagttctcaaacagccccagcacccaccccatcccagaggctcaaccaaataaaaccaaaaccaggaggctgggtccttttaagcactggtaatttctacctgtaattccagccctttgggaggccgaggcaggcaggtcacctgaggtcaggagttcgagaccagcctggtcaacatggtgaaaccccgtctctactaaaaatacaaaaaaaattagccaagcttggtggtgcgtgcctgtaatctcagctactctggaggctgaggcaggagaatcacttgaacctgggaggcagaggctgcagtgagctgagattgtgccactgcactccggcctgggtgaaagagtgagactctgtctcaaaaaaaaaaaaaaaa

SEQ ID NO: 9440 - DNA, 600 bp, Homo sapiens
cgaagcccggtgtgcatggagttccagtaccaggccacgggcggccgcggggtggcgctgcaggtggtgcgggaagccagccaggagagcaagttgctgtgggtcatccgtgaggaccagggcggcgagtggaagcacgggcggatcatcctgcccagctacgacatggagtaccagattgtgttcgagggagtgatagggaaaggacgttccggagagattgccattgatgacattcggataagcactgatgtcccactggagaactgcatggaacccatctcggcttttgcagatgaatacgaggtggactggagcaattcttcttctgcaacctcagggtctggcgccccctcgaccgacaaagaaaagagctggctgtacaccctggatcccatcctcatcaccatcatcgccatgagctcactgggcgtcctcctgggggccacctgtgcaggcctcctgctctactgcacctgttcctactcgggcctgagctcccgaagctgcaccacactggagaactacaacttcgagctctacgatggccttaagcacaaggtcaagatgaaccaccaaaagtgctgctccgaggcatga

SEQ ID NO: 9441 - DNA, 1400 bp, Homo sapiens
ccggcagggggcaggcttctctctgcgctacgagatcttcaagacaggctctgaagattgctcaaaaaacttcacaagccccaacgggaccatcgaatctcctgggtttcctgagaagtatccacacaacttggactgcacctttaccatcctggccaaacccaagatggagatcatcctgcagttcctgatctttgacctggagcatgaccctttgcaggtgggagagggggactgcaagtacgattggctggacatctgggatggcattccacatgttggccccctgattggcaagtactgtgggaccaaaacaccctctgaacttcgttcatcgacggggatcctctccctgacctttcacacggacatggcggtggccaaggatggcttctctgcgcgttactacctggtccaccaagagccactagagaactttcagtgcaatgttcctctgggcatggagtctggccggattgctaatgaacagatcagtgcctcatctacctactctgatgggaggtggacccctcaacaaagccggctccatggtgatgacaatggctggacccccaacttggattccaacaaggagtatctccaggtggacctgcgctttttaaccatgctcacggccatcgcaacacagggagcgatttccagggaaacacagaatggctactatgtcaaatcctacaagctggaagtcagcactaatggagaggactggatggtgtaccggcatggcaaaaaccacaaggtatttcaagccaacaacgatgcaactgaggtggttctgaacaagctccacgctccactgctgacaaggtttgttagaatccgccctcagacctggcactcaggtatcgccctccggctggagctcttcggctgccgggtcacagatgctccctgctccaacatgctggggatgctctcaggcctcattgcagactcccagatctccgcctcttccacccaggaatacctctggagccccagtgcagcccgcctggttagcagccgctcgggctggttccctcgaatccctcaggcccagcccggtgaggagtggcttcaggtagatctgggaacacccaagacagtgaaaggtgtcatcatccagggagcccgcggaggagacagtatcactgctgtggaagccagagcatttgtgcgcaagttcaaagtctcctacagcctaaacggcaaggactgggaatacattcaggaccccaggacccagcagccaaaggtaggctgttcttggaggcctctgtaacgttaccctcaacagggaggctaagtgtggtacagggagttgagactgatgatgtcccatctaaacagtcgtcatccaactcctgaaatccaataaaacaaatatcgtttgagagatt

SEQ ID NO: 9442 - DNA, 600 bp, Homo sapiens
aacgagaaagactgcaaacatgttgcctcgattttgcacttttttctcctcgcctagtttctgtgtgaactctcagacatctctttcccggatccccaaccctgagcactcttatcaatcccaaccatcctccttgggttcattttggtttctggtttttctttttcctttttgttgattccaaaccaacaaacccaactctaatgctgcatcttggactatccgaagagatccacccccaagcactccacaactcaaggctcagctggttttgttccagagactggttcgcttgttttttccccttgccttatcccatacctcctctcagtgggcagtctgccaggagacgtgaggggaagcctggatctgtgtgtatgtacatagtagacatgtgtgtgtgtgaatagctctctgtgtgtgggtgtgtgagagagcggctggttcattgtgtgtgtgtttgggcgaggggtgagtgttcagagagggcccctttaactcttatgttacttctcctggggtacattttacaagaaaataatatactgtacaagttttgtttacttggagaagagattgaagctttttgttgccttatct

SEQ ID NO: 9443 - DNA, 1400 bp, Homo sapiens
tcttgttgttggtggtacatattcaggccaaattgtgctttgggataaccgtagcaataaaagaactccagtgcaaagaactccactgtcagcagctgcacacacacaccctgtatattgtgtaaatgttgttggaacacaaaatgctcacaatctgattagcatctctactgatggaaaaatttgttcatggagtctggacatgctttcccatccacaggatagcatggagttggttcataaacagtcaaaagcagtagctgtgacatctatgtccttccctgttggagatgtcaacaactttgttgttgggagtgaagaaggttctgtgtacacagcatgccgccatggcagcaaagctggaatcagtgagatgtttgaggggcatcaaggaccaatcactggcatccattgtcatgcagctgttggagcagtagacttctcacatctttttgtcacttcatcgtttgactggacagtaaagctttggacaactaagaataacaagcctttgtattcatttgaagataatgcagactatgtttatgatgttatgtggtcacctacccacccagccctgtttgcctgtgtggatggcatggggagattggatttgtggaatctcaataatgacacagaggtaccaactgccagcatttctgtggagggtaatcctgctcttaatcgtgtgagatggacccattctggcagagagattgctgtgggtgattctgaaggacagattgttatatacgatgtgggagagcagattgctgttccccgcaatgatgaatgggcacggtttggccgaacacttgcagaaattaatgcaaaccgagctgatgcagaggaggaagcagctacccgaatacctgcttagttcctgaaaaggggagtgtaactagtggatttgggaaaggttcttaagtagatcctgagactatttgcatgcttctgtctaaatgataattaaaaggaaatttcatggattaaaccatgggtttaatgcagcaaggaaacttacaatgtccctttatatataacatgcatcttgttttggatttgtgtcattttttaatatagctgattgacttcacagaaagcagcttttttgaattctaatacataggtgtatatttggtattagttattttgagttcttttcaacttataacactgtatacagttatttctaaagcacagatgaaataagttctgcatatttttaaataatcacagttccctgttatacagataatgttctcactacccataatatgtaggaacattgtttctccttagccgtagtatgcatacacctatccatgttcattctgacatcctttgttgtctttataattcatgtggtagttacctataaataaaaacaaatatgcgtt

SEQ ID NO: 9444 - DNA, 1400 bp, Homo sapiens
ggccgagacccagcagccacccgccgcccccgcctttccccccaccgcccccctcccgtccccccgccgcccccgccctcagcgccgccgacaccaagcccggcactacgggcagctgcgcagggagcggtggtccgggcggcctcacatcggcggcgcctgccagcgtggacaagaaggtcatcgcagtgaaggttttgggaacagtaaaatggttcaatgtaaggaacggatatggtttcatcaacaggaatgacaccaaggaagatgtatttgtacaccagactgccataaagaataaccccaggaagtaccttcgcagtgtaggagatgaagagactgtggagtttgatgttgttgaaggagaagagggtgcggaggcagcaaatgttacagatcctggtggtgttccagttcaaggcagtaaatatgcagcagatcgtaaccattatagacgctatccacgtcataggggtcctccacgcaattaccagcaaaattaccagaacagtgagagtggggaaaagaccgagggatcggagaatgctcccgaaggccaggcccaacaatgccggccctaccgcaggcaaaggttcccaccttactacatgtggagaccctgtgggtgtcgaccacagtattccagccctcctgtgcagggagaagtgatggagggtgctgacaaccagggtgcaggagaacaaggtagaccagtgaggcagaatatgtatcggggatatagaccacgattccgcaggggccctccttgccaaagacagcctagagagtacggcaatgaagaagataaaatcaaggagatgagacccagggtcagcagccacctcaacgtcggtaccgcagcaacttcaattaccaacgcagatgcccagaaaaccctaaatcacaagatggcaaagagacaaaatcagccaatccaccagctgagaattcgtctgctcccgaggctgagcagggcggggctgagtaaatgccggcttaccatctctaccatcatccggtttagtcatccaacaagaagaaatatgaaattccagcaataagaaatgaacaaaagattggagctgaagaccttaagtgcttgctttttgcccgttgaccagataaatagaactatctgcattatctatgcagcatggggtttttattatttttacctaaatatgtctctttttggtaataacaaacgtgttttttttaaaaagccttgtttttctcaatacgcctttaaaggtttttaaattgtttcatatctggtcaagatgagatttttaagcactttatttttaatttgtaataaaagtttacaacttgattttttcaaaaaagtcaacaaactgcaagcacctgttaataaaggtcttaaataataataataaaaa

SEQ ID NO: 9445 - DNA, 796 bp, Homo sapiens; identical to SEQ ID NO: 4210

SEQ ID NO: 9446 - DNA, 600 bp, Homo sapiens
ggagtgctgttcatcgacgaggtccacatgctggacatcgagagcttctccttcctcaaccgggccctggagagtgacatggcgcctgtcctgatcatggccaccaaccgtggcatcacgcgaatccggggcaccagctaccagagccctcacggcatccccatagacctgctggaccggctgcttatcgtctccaccaccccctacagcgagaaagacacgaagcagatcctccgcatccggtgcgaggaagaagatgtggagatgagtgaggacgcctacacggtgctgacccgcatcgggctggagacgtcactgcgctacgccatccagctcatcacagctgccagcttggtgtgccggaaacgcaagggtacagaagtgcaggtggatgacatcaagcgggtctactcactcttcctggacgagtcccgctccacgcagtacatgaaggagtaccaggacgccttcctcttcaacgaactcaaaggcgagaccatggacacctcctgagttggatgtcatcccccgaccccaccctgttttccaccagagttctgacactgtgactctgtataaaatggttgggaagctgcaccc

SEQ ID NO: 9447 - DNA, 600 bp, Homo sapiens
gcagttcttttcctaaatcgattcggtgctccccaccccgacgcaggcacaggtccgcaaccagatagggagatgcctgaatttcaggctacctttgacaaagctttcttcctccctccctccctttgcacgctgcatcccacgctgcctgcttaaagcgccctcatgtgtctacagatggtaaaacgtttatttctcaacagacattccagtgatagcatccaatgacctatgtaacggcacccttttttgctgtacgcgttttttgagatggagtctcgctctgtcgcccaggctggagtgcagtggcgcggtctcggctcactgcaagctccgcctcccgggttcacgccattctcctgcctcagcctcccgagtagctgggactacaggcacccgccaccacacctggctaattttttgtatttttagtagatacagggtttcaccgtgttagccaggatggttttgatctcctgacctcgtgatccacccccctcggcctcccaaagtgctgggattacaggggtgagccactgcgcccggccccagtcacttgttcttaagtttcttaagcaaactataaaatagcaaaagacc

SEQ ID NO: 9448 - DNA, 1400 bp, Homo sapiens
agaaagattatcatagtcgacgctacattgatgagtacagaaatgactacactcaaggatgtgaacctggacatcgccaaagagaccatgaaagccggtatcagaaccatagtagcaagtcttctggtagaagtggaagaagtagttataaaagcaaacacaggattcaccacagtacttcacatcgtcgttcacatggggtatgaaattgttgatactttaggtgaaggagcttttggaaaagttgtggagtgcatcgatcataaagcgggaggtagacatgtagcagtaaaaatagttaaaaatgtggatagatactgtgaagctgctcgctcagaaatacaagttctggaacatctgaatacaacagaccccaacagtactttccgctgtgtccagatgttggaatggtttgagcatcatggtcacatttgcattgtttttgaactattgggacttagtacttacgacttcattaaagaaaatggttttctaccatttcgactggatcatatcagaaagatggcatatcagatatgcaagtctgtgaattttttgcacagtaataagttgactcacacagacttaaagcctgaaaacatcttatttgtgcagtctgactacacagaggcgtataatcccaaaataaaacgtgatgaacgcaccttaataaatccagatattaaagttgtagactttggtagtgcaacatatgatgacgaacatcacagtacattggtatctacaagacattatagagcacctgaagttattttagccctagggtggtcccaaccatgtgatgtctggagcataggatgcattcttattgaatactatcttgggtttaccgtatttccagacacacgatagtaaggagcatttagcaatgatggaaaggattcttggacctctaccaaaacatatgatacagaaaaccaggaaacgtaaatattttcaccacgatcgattagactgggatgaacacagttctgccggcagatatgtttcaagacgctgtaaacctctgaaggaatttatgctttctcaagatgttgaacatgagcgtctctttgacctcattcagaaaatgttggagtatgatccagccaaaagaattactctcagagaagccttaaagcatcctttctttgaccttctgaagaaaagtatatagatctgtaattggacagctctctcgaagagatcttacagactgtatcagtctaatttttaaattttaagttattttgtacagctttgtaaattcttaacatttttatattgccatgtttattttgtttgggtaatttggttcattaagtacatagctaaggtaatgaacatctttttcagtaattgtaaagtgatttattcagaataaattttttgtgcttatg

SEQ ID NO: 9449 - DNA, 600 bp, Homo sapiens
agcctgcctacatttgcagacagacacagtggcatgtggagacaacagtgtgtcccaatgacttttctttactccccagctgtcggcagtactcagtggaagggtgatattatgacactgatactgctattttgaaacctggaggatggaaaggtgcaaaaatctatcaccagcaacagaaggtgcagaccgtgttggtggcggtaattttgtccatcaaatgaatatgtgtgaaaacattcccttcttcggccctacaggtcagaatggcggcagcggagcatcgtcattcttcaggattgccctactggccctacctcacagctgaaactttaaaaaacaggatgggccgccagccacctcctccaactcaacaacattctataactgataactccctgagcctcaagacacctcccgaatgtcttcttattccccttccaccctctcctcttccaccctccgtggatgataatctcaagactcctcccttagctactcaggaggccgaggcagaaaaatcactgaaacccaagaggcagaggttgagtaagctgagaacaggtcattgcactcaagcctgggcaataagaagaaatc

SEQ ID NO: 9450 - DNA, 1400 bp, Homo sapiens
gggaggggccgcagtgcgcagaacccaccccaccccccagtgcagacttcggggtctccaccccaggccagcagcgcccactgggctacagcaagccaacaggtcacagaagccaacgaggggactgtttctcttccactcctatcctcttttcttgatcttttttttgcattttccttcatttctttaacaaggagagcaaagctgttttagcagaggctggggctgaggtccccatggggtttgggtgcaggggcatggcaccctttcctgtcgggaagggagaggggaactacccccccagcctgccctccgccccgccccagccggcggactgtgctgtttcctccgcccccactcccgtgttttctgacctcctgcctgagtttggggtatttatagactattaattttctgactgagccaatagtggttggggaactcttgaaaaaggggagagaatggctgggtgctggggagttcccccctccgagccctccttcccggcccaacctgagggatgtggatttgggactgtctgggggcccctcctgcagcgaggatgggagggggtgctgagctgtgaatcccctgggcagggggcgacaactccgtgtagcattaacccccgtggcggggtccgctgctggtctaatttggaccccctgcctctcagtgcccctgccctaggggtgtctgtctccagaggggagggacaaatcccctactggggccatttcaatggggtagtttttggatttttttccccactcactttttattttttaatgataatggagatgtctggacccttcctcaccccacctgtcggtcttgtcctggctctgcctgtcccccaccgttgttctcgtaggtgaaccccaggtcctcaactccccccctttatgtgttgaaagttaatggtttcagatgtgaacatcacgtgttataactgtagcgctgtaaatttttttgtgggagggtgggcagggaggggtcccagagggtagagctcaaggattttgggttttgttttgttttcatttttccaaaaaaaaaagaaaaaaaaatagaaaaaaaaggagtaaaaggggcgggtttgttttttgaagaactgtcttggatacctatttaaatgtgtgttctgttttgttttttaacgatttttaaataacgtctgtgcctccactggttgagggtggaacctccaggcaggaaccggctcgccaccctctgcccggtaagggctgcccaagaaagcattacccgccctcggggggtcgggctgtgggggtcccggcacctggcgtgagtttcatgtatgaaaacataaaattgaaaaaaaaaaaaaaacctacacgagcaccgtgatttcaagtaataaacagaaaatgaaacac

SEQ ID NO: 9451 - DNA, 600 bp, Homo sapiens
gagctgggtagcaccatttctttcatgttgtgggttctgggagcccagagggcagccatagtgtgccgactccgtggaggaagtaaagaaacagacccgcttcttgccgcagccccaccagcctaaggtgttcaggaaggccggacgcgcctcctctgtcctcgccgtcacaccggaccatgtcatgtcctgcttgtcacgtccaccggacctggcgtcttggccttcggcagctggtgggcacgtccaccccagctggagacctggcctcgtctccagcccgaacgctgaggcaccgatcccggctccgtcgccgcccgcgaggcccgccttggccacgggctctggaggccagtgcctcccgctcgccgcccgctgcgctcctcacccctgcctgcaccatcctccctcctgagagctcattcactccgccccgcccgcctcgcctagtctggtctcgccccatgcccttgactcccctggatgctgtactgtctgccaagccagccccaggggctgagcggtgagggcatacagcgtcaccaagtccactgtgggccctctccgcaccagaccctgggccgcagtgcctcgtgggac

SEQ ID NO: 9452 - DNA, 1400 bp, Homo sapiens
aaacaaaacagattcttacgtctcttactatgtgtcaggcactcatctaagaactcgtagctcatttaagcctaacaacaacctgtgtggtatgtaccattatcatccccactttaaagataagcacactaagacactggtagtaaatcactctagtgaaaaatgaagcaaggtaaggtagttggcgaggggtaggatgggagtaggatgtcattttatattgcaaagtcagggaagattctttagataaggtgatatttaagcaggtaacttgaaggaagtgaagtggtgagccatatctgatggaagatcattcccagaaaaggaaacagcaggttattttaattgtaacagaatcaaagtttgtacttgtcctgtactcttagatgggtttgatcaaatttatcctaagaacggaagggtcttagtctttttctggaaagtaaataagacattgaaaaaattaattaggtttcttatgcaagtagtaccagtcataaaatattcaaacactaagagatatatacaaggtaaaattatatcccgctccagaagtaaaacgtttgttgtctactcttccacttccttttctgttcattttgcacctaaacatgtgtattttttacacttaaaaaaagcccatgtcttagagattctttccattgtgagtgcttgacattttatgaaatggaggtactataaattatttagccagttttcttttaatggatatttggtttattacttttttgctgttataattagtgttgtgatcttgtatgtttgttttctgattataagttttttatattagaggaatttctagaggtacaattgttgagtcaaagggtatggacatttaaaattttgagaggtaatatcaaagtattttgtaaaaaggcatcatgaatttatattcccacctgaagtttttataaatgtccattaccctgcactctcacccaaatttccatttagatttttgcctatctgatgtgattctaaaggaaacaggtttacttgacactatccttatattttattgagacatgttcaatggatgcatctcagttttatgcttttgagactctttttgagggcttgggtttttttttgtgtgtgtgcccttatgcatagtcaactagtaagctgtacattgattatattctcttttgatgtatgtgtttgtgtgtatctttatatatttaggtttatatcatcaaatttattaaaaccctttatattcatcttttctgtttattaaaatgtggacttttgtgacaggtatgttgaatcttatattatgattatgtaagtaattttcttctgttttgatactagttttcacattatgtattttaaagctgtgttattagaggaataaaagtttgtggcatgac

SEQ ID NO: 9453 - DNA, 1400 bp, Homo sapiens
ccattggtttcagacttggttcaattaagattggttggggatttttctcttttccttattaaccatgttctggtatcagaatggtgttccttctccatcagaggctgggaaacgtattataattagtttttctcccacataccttcaccaagagcagtgaagaataactgaaggctggaccatgcatccttaaaagtattgcatgagcatctccacctcagtatggaagagggatggacaaccccctattcatacctctgagttcctgatggcattagtcatatagtaacaaattccaaagcccttaaataaacggaaaacagaccaaattcttctaaataagaactatcccagcttacttgtgagtctgcttctgcatatactcggacgacatcttctgtaccagagggccggacaaaagctcgagaaagcttgtacttcttcaccaggtcattgattgcctcctgtaatcctgggggtgtaactgcttgtctttcagcatcggtagtgctaataactctcctgtctgcaacctaagtgcaagcatttcatatttgttactctattacacttcctttcagaagcttaacctgttaaacatacattctacgaaaagtgccagactaaatataaaattacattaaaacttctttctccaaggtcagggtaattaatttcaacatttgtgcaacttttctctttttcttcagtctataaagaattacctttggcaaaaaatatttccacaaatgcttagagttaccactaagataatggccagtaaatacgatatgactaagtcccatatcacacacaaaaacaggataagtggtagcccattatataagaagaccgataagaatttcttaaatatgccaaaaataatctgaacaatcagccatttctgtgaactgtggctttagtacctccaattgtctttcacaaattctgttggtgaatgtgtaaactggcataaacatgtacagaaatcaattagcaatttatctgaattctctccctcaggaagtactctgtgaactaaacataatgcagagtaagtactttcacttgaaatgacagggcatctgagttttgcttcaaaataatgttggggccaggtgcagtagctcacacctgtaatcctagcactttgggaggccaagggagaaggatcacctgagctcaggagttcaagaccagcctaggcaacatagtgagatctcgtctctaaataaaatatacaaaagagtattgggagggggtatgaagaatgtatagggcaataattgaaatctgttgaagctgggtacacaaaagttcattatgttgtttctctacatttatatctatttttaatttttttatatctatttttaattttccataataaaatctcttta

SEQ ID NO: 9454 - DNA, 600 bp, Homo sapiens
agcctactggattgtctctagatctgtttttcttaaacactaacagaataattctttataaataggtaagccttacacttgttaaagaaatttacctctaatttcagtctcactaatgtaaaatactgggacttaagtatacaattcagtcactaactgtacagttttatgtggggaacaattcatgcaggctactggaaaattaaatcttattaccaactccttgtgatatctttgccatcaccatcacatgagcaagatgatgttttgcagcattccccattgctgatacaaatggagagggcagagaagactttatacaaccagtttttccattgcagagtcttaagaaagattattagatgacttacctatatgactaatgccatcaggaactcagaggtatgaatagggggttgtccatccctcttccatactgaggtggagatgctcatgcaatacttttaaggatgcatggtccagccttcagttattcttcactgctcttggtgaaggtatgtgggagaaaaactaattataatacgtttcccagcctctgatggagaaggaacaccattctgataccagaacatggttaat

SEQ ID NO: 9455 - DNA, 600 bp, Homo sapiens
tgaaagttggtcctttgaaaaaaaaatcaacaaaatgacaaaccttcagaccagccaagaaaaaagagagaaggctgaaatttctgaaagcaagcatgaaagagggaaaacaagagactattatgagtaactatgtgctaatacctgaggtaacttagatgaaattgacagattgctagaaagacataaactaccacttctaatcagtgttatagttgagattctatccagggcaataagaaaagaaaaagaaaaagaaaatcagattagaaaggaagaaataggccgggcgcggtggctcacgcctgtaatcccagcactttgggaggccgaggcgggcggatcacgaggtcaggagatcgagaccatcccggctaaaacggtgaaaccccgtctctactaaaaatacaaaaaattagccgggcgtagtggcgggcgcctgtagtcccagctacttgggaggctgaggcaggagaatggcgtgaacccgggaggcggagcttgcagtgagctgagatcccgccactgcactccagcctgggcgacagagcgagactccgtctccaaaaaaaaaaaaaaaaaaaaaaaaaaaaaaaaaaa

SEQ ID NO: 9456 - DNA, 1400 bp, Homo sapiens
attccattaagtggttgaaggaagcaaataatggaattgtcaattggtcatctggctgtaaggtttgcccttgaactaaaaatgttgtttggggcaagggccagaaatgtggagacatggtttttgttacgcattcttgtattatatgtgactaaatttacaaacaagatacatgtgtaattaaagacccttatggaactggaagacgtcttgtagtgctacattgggtgaaaccgttggtccatttttgtctgtttctatgaagataaaataattgggggccatctagaaatagaaaggcagtgggaagacagattctacggcactgctttcatttaattgggctttaggcactccattcgaatgcagaacctcacctctagttgagaccaagaattggcaaatttgcatgagctcctggaaagagttgctgactttgtatctaagacctgccagggaataccaagagttgtttctacagacttttttttttttttttgtatgggagaagatactgtggcaaccaggaaggaatggaaaaaaaattcttttctctacagcaaattaatgtgaggaagctcctccaatcctctggctatttaaggttcaaaatcaagtgcctagggaaaattccaatggatgattttctgggagctatcttgtctaccttgaggttcctgaacaatgaattcccattaatgagcagtcttcagtattaaaaccactgtcttgtcacctcattttgcattactgtcttccgtggatgtttcagttacaactgtaatgttatttatagaacaacattaatccattaaagctaacctatttttcaatatttatgataatctatgtacatatattgtctgtccatatgtatttgtaaataggttgtatataatgtcaggtttgggtcttgggttcaagtgtatatattcctgtaagtttcttaactgcattttgatgaattcacattatgtaactataagaattgtcccaaaagtacctgtacagaaaattgaatattgaaaaattgacaaattgtgtacaaacactaaaaaaaacttgtttaaattgtatttgcaataaacaacatcaaattttttcatgaaatcttggtacaaattcagatctcttatttaaaatttaaataaggaatacattttcaaaatgcagtaatcaaaatgtgatctagtgtaatgaaataaaatgtgatctagtgtaatggaagacctttgagaacctgggtgtattaactttgtgtatatagtgtaaatatccccactgtactgttagaggccaacaattctagtatggcttgttggcaaagagtgctacaccgtttcaatgaaacaatgtatgtttgttttaactgaactaaaataaatacatgcttaatcctg

SEQ ID NO: 9457 - DNA, 600 bp, Homo sapiens
taactctccagatagtgcctttgattgaaaataaggtctacacctttttaagtatattatttctgacatcgtaagaaataatttagttccttattctcatttatcttttatataatgtactgtaatattcaggtttaaagtaaaataagtatatgaattatattttggtaaaactgtttcatgaccagcttgattaatgtatattaacataccagacattgacagcgaacatttcatgaaatcagttatttacttaccaaaacaatgagttttagcttgaaagttactgctgctctattattaacaaaactaagttttaaaaattaattttaattctactgaagtttaatttctggttaaaggtatagtggatgctatttatgatccaagtttttacatcacatccattgatctgcctatcccttctttttactccaaagaggagatgatagaataatacattcagtatactaccaagaagcaaagttataatgtgtttcattttgctattggaattttttattgtaacattgtatgataacctgaaatgtttacttgtgccttttctttaaacaattaaagttttccattttataagaa

SEQ ID NO: 9458 - DNA, 600 bp, Homo sapiens
cgctacttaatggaagaagatgaagatgcttacaagaaacagttctctcaatacataaagaacagcgtaactccagacatgatggaggagatgtataagaaagctcatgctgctatacgagagaatccagtctatgaaaagaagcccaagaaagaagttaaaaagaagaggtatgtcgtctttttttttgtcttttcaagaaaacaggttgggaatggttcccacgtggggcagactgttggtgtaattgtgcaaactcgatcactagctctgcgtgatgtggcagaagcgaagggaaccaggtttgcaaaagtaactgtggtgatggaaatgtgttagcctcagacactactgaggtggttctttctatcctagtacagtctaagtactggttactgcatttttttattggctgacaagttgctttttgttgatctttcatgttttgatctttaaatggaatagaaagtaatacttaatgaacatgtaagcataaagtgatgtgatggcccacaaatacaatgtatagtaattaaatcaatgtatttaacatattcacctcaaatacttaacactttgtggcaacaacatttgaaattt

SEQ ID NO: 9459 - DNA, 600 bp, Homo sapiens
ctggattctctcgtatagcagcatgagctttcttatacatctcctccatctgaaacaaaggaaagcaaacagtacttggtttcatttcatgtgccctactatattaatgcaaccataacttatcttgtccttctaagccagattctcaaaaggaactaaactaaatcaatgttggtaaacactttaacttctaaatgtaactcaccttttcctaacaaattcccaattttcaccttatgcaatgtgaattatcactacagaactccatcttactcaagaaaaaaatcaggccaggtgtggtggttcatgcctgtaatctcaagcactttgggagtctgaagtgggaggatcacttcagcccaggagtttgagaccagctaaggcaacacagtgagacctgtctccataaaaaaactaattagccaggtggcaattattaatggtggcatgcacctgtagtcccagctacaggactacacgtgagtccaggaggtcaaggctgcagtggcacaatcacagctcactggaccccagcctagatgacagaatgagacctcatctctaccaaaaattaaaaaaaaaaaaaaaaaattagcaggg

SEQ ID NO: 9460 - DNA, 664 bp, Homo sapiens; identical to SEQ ID NO: 4225

SEQ ID NO: 9461 - DNA, 600 bp, Homo sapiens
gagtctgactgcatggaagttccagatcctgacagagagaactgggaaggatccaggttcgcttccgttggtagcttgagtcccatgcctccaccctgccatctgaggaaggggtgacaagtggtcaaggagctgtggccacagacttttccagggtggtccttggcaggtgaggtgcgtctgtgccacccttgtcaggagccattgacgacgggccccccctggaccccccgggacctcagagtgggggcaggcagaagggagaaccagctcaagacattttggaggatctggccctggggttcttcagagaacaccctctaggggctttggggacatggcctgtccccacatccagcacttgcctccgccatggtcactcggcagcccttttcccaggagaagacacctctgggagcctgctcagtgcttgtcctgccatcctgtgtcctgggactgagggttactccagttgctctgtgttgcatactctcccccgcaagcctgtgtatgaagaattgtcccctggcttccagcaggccatggctggctgttttgtgactgttacattgtgcaggggtaattattagcgtggctttt

SEQ ID NO: 9462 - DNA, 600 bp, Homo sapiens
atgtacaaggtaagcgtggcgttctttctcaactcagagtccaaccacttacccctatctctaggctccagggttgtttaaagagaagtctataaatgactgcaaagtgactctgtatttgtcttagagaagaaaataatgaggcctttgaaacaggtagtgaggtttatgcctacatttattcagtaagtattgaactcccttctcttttctcagccttatagtaggaatgtgtccccattgatgaaaaagtgtatctatgtgctcaaggaacatacagaatgcagataattttatgatttaaaagtttcagtgaggcagggcacagtggatcacacctgtaatttcagcattctgggaggctaaggtgggaggattgcttgagcccaggaattcaggaccagtctgggcaatatagcaagaccccatctctacaaaaaaattttataaaagttagccaggtatcatggtgcatgcctgtagtcccagctacctgggaggctgaggtgggaggatcgctcgcaccttggaggtcgaggctgcagtgaactgtgattgcaccactgcactctaccctgggcaacagcgagattccatctc

SEQ ID NO: 9463 - DNA, 1074 bp, Homo sapiens; identical to SEQ ID NO: 4228

SEQ ID NO: 9464 - DNA, 600 bp, Homo sapiens
aggaggcggtgagggcctggccctaggggtatcaggcggggaggttgggaggaggtgaggagctggggcccctaggtagacagacttgggtggcaattcctcaaccacttgtcttggctgtagattccctgtcacctactttctcctcaaagctcagcttagatgtgttagaatgaatgaaataggctgggcgctatggctcacgcctgtaatcccagcactttgggaggccgaggcaggtggatcacctgaggtcgggagttccagaccagcctgaccaacatggagaaatcccgtctctactaaaaatgcaaaattaggctgggcgcggtggctcacgcctgtaatcccagcactttgggaggccgaggtgggcggaacacgatgtcaggagatcgagaccatcctggctaacacggtgtaaccccgtctctactaaaaatacaaaaaattagtcaggcgtggtggcgggcacctatagttccagctactcgggaggctgaggcaggagaatggcatgaacccgggaggcggagcttgcagtgagccgagattgcgccactgcactccagcctgggtgacagagcaagactctgtctc

SEQ ID NO: 9465 - DNA, 1400 bp, Homo sapiens
ccacccaggaaaggaggaccagtcaggatgaggccccgccttttcccccaccctcccatgagactgccctgcccaggtatcctgggggaagaggagatgtgatcaggccccacccctgtaatcaggcaaggaggaggagtcagatgaggccctgcaccttccccaaaggaaccgcccagtgcaggtatttcagaaggagaaggctggagaaggacatgagatcagggcctgccccctggggatcacagcctcacccctgcccctgtgggactcatccttgcccaggtgagggaaggagacaggatgaggtctcgaccctgtcccctagggactgtcctagccaggtctcctgggaaagggagatgtcaggatgttgctccatcctttgtcttggaaccaccagtctagtccgtcctggcacagaagaggagtcaagtaatggaggtcccagccctgggggtttaagctctgccccttccccatgaaccctgccctgctctgcccaggcaaggaacagaagtgaggatgagacccagccccttcccctgggaactctcctggccttctaggaatggaggagccaggccccaccccttccctataggaacagcccagcacaggtatttcaggtgtgaaagaatcagtaggaccaggccaccgctagtgcttgtggagatcacagccccacccttgtccctcagcaacatcccatctaagcattccacactgcagggaggagtggtacttaagctcccctgccttaacctgggaccaacctgacctaacctaggagggctctgagccaaccttgctcttggggaaggggacagattatgaaatttcatggatgaattttccagacctatatctggagtgagaggcccccacccttgggcagagtcctgccttcttccttgaggggcagtttgggaaggtgatgggtattagtgggggactgagttcaggttaccagaaccagtacctcagtattctttttcaacatgtagggcaagaggatgaaggaaggggctatcctgggacctccccagcccaggaaaaactggaagccttcccccagcaaggcagaagcttggaggagggttgtaaaagcatattgtaccccctcatttgtttatctgatttttttattgctccgcatactgagaatctaggccaccccaacctctgttccccacccagttcttcatttggaggaatcaccccatttcagagttatcaagagacactcccccctccattcccacccctcatacctacacccaaggttgtcagctttggattgctggggccaggccccatggagggtatactgaggggtctataggtttgtgattaaaataataaaagctaggcgtgtttgatgcgcttttaactttggc

SEQ ID NO: 9466 - DNA, 1020 bp, Homo sapiens; identical to SEQ ID NO: 4231

SEQ ID NO: 9467 - DNA, 513 bp, Homo sapiens; identical to SEQ ID NO: 4232

SEQ ID NO: 9468 - DNA, 600 bp, Homo sapiens
ctgacagggatcgagagcgtggctatgacaaggtagacagagagagagagcgagacagggaacgggatcgggaccgcgggtatgacaaggcagaccgggaagagggcaaagaacggcgccaccatcgccgggaggagctggctccctatcccaagagcaagaagggtaagctgggcagaatggggctcggtgagaccaacaaggtgcagggtgcactgcgtgaggaagccttccctcaaaaagatgcctggacctggggctagaggagggtgctgtggtacatggcagccaggggcttcatttcttcttgtggggtggggctcagtgatcaggggctcctggtgcctctattgaagactttgccctgccacttccacagcagtaagccgaaaggatgaagagttagaccccatggaccctagctcatactcagacgccccccggggcacgtggtcaacaggactccccaagcggaatgaggccaagactggcgctgacaccacagcagctgggcccctcttccagcagcggccgtatccatccccaggggctgtgctccgggccaatgcagaggcctcccgaaccaagcagcaggattga

SEQ ID NO: 9469 - DNA, 600 bp, Homo sapiens
aggagctggctccctatcccaagagcaagaagggtaagctgggcagaatggggctcggtgagaccaacaaggtgcagggtgcactgcgtgaggaagccttccctcaaaaagatgcctggacctggggctagaggagggtgctgtggtacatggcagccaggggcttcatttcttcttgtggggtggggctcagtgatcaggggctcctggtgcctctattgaagactttgccctgccacttccacagcagtaagccgaaaggatgaagagttagaccccatggaccctagctcatactcagacgccccccggtaagtgacaacccctcttgactcagtacgtggacaccatcctccggcctccttcctccattcctcattgggaccaggtgggctgtgtccgccacatcacccatccccatcccctgactctttcaccggcaggggcacgtggtcaacaggactccccaagcggaatgaggccaagactggcgctgacaccacagcagctgggcccctcttccagcagcggccgtatccatccccaggggctgtgctccgggccaatgcagaggcctcccgaaccaagcagcaggattga

SEQ ID NO: 9470 - DNA, 600 bp, Homo sapiens
aatcgggcgtcaaggcgccaaaatcaatgagatccgtcagatgtctggggcgcagatcaaaattgcgaacccagtggaaggatctactgataggcaggttaccatcactggatctgctgccagcattagcctggctcaatatctaatcaatgtcaggctttcctcggagacgggtggcatggggagcagctagaacaatgcagattcatccataatccctttctgctgttcaccaccacccatgatccatctgtgtagtttctgaacagtcagcgattccaggttttaaatagtttgtaaattttcagtttctacacactttatcatccactcgtgattttttaattaaagcgttttaattcctttctctgttcagctgttgatgctgagatccatatttagttttataagcttctccctggttttttttttttggctcatgaatttttctgtttgtcatggaaatgtaagagtggaatattaatacatttcagtttagttctgtaatgtcaggaatttttcaaaaaaattaaaagatggactggagctttttctttgtgaatagaaactggatgccacagtgattcatgtgggttttat

SEQ ID NO: 9471 - DNA, 1400 bp, Homo sapiens
cccactactgagccgtcacaagaagtctaggggcgccggggagctggcgggcacgctgactttctccaaggagctgcccaagtccctggcgggcggcctgctccccagccccctggcggtggctgcagtgatggcagcggcagcaggctcgccgctgtccctgcgcccggctccagccgcacctcttctccagggaccgccgatcactcaccctctgcttcacccggcccccggacccatccgaactgcgcacggacccatcctcttctccccgtactgacctcaaccctgaacccctcccattcaactccccacctccagccgggacccaggcgtccgggctcccagcccgcccctcctcccggcactccctaaatgatctctccttccccccccccaccccgagatacggggttccaggaaaggggaggggtagcgggggaggggggcttcagaagggggggaacaccccagatctcagggaaccccgccccctgcctttccctctcccctagaaaagggggggccgtctcacccccgagcccccttggagacaccccccctcccaaaagccatgtccatccagcccttccccccaaacctagcacaaaacggggttcacaagccatggtcggggtccgggggggacagaaatggattttcttggcaataagcggactctgggactccggctccctaccccaaactgaagcgcttccgtgaacacccccgtcctccgtagggggaggggagcaggcgggatcctgggtccctcataagcactttggttttaccgcctgcaacctcactgtgcccgccccgcaccatgccctagccccaggtctagccgggcccattgcagggggcagcacttgggggcatctccggcacttgggtgggaccaaggagatgccaccatagacctttccctcgccttcttcctccctagtccgggttccattcttttcaccagcacccatcgcccaaggggtaccgaggggggcaaggggtgtccagtccaagcccacccccgcctcgccttccgcaaaactgtgagcaaaaagcaatagaagcctcgcccccgcccttccccttcgcaggattcgccgagtctgtagcctccccgatccaagttcctagacctcatggctgtcccctcccaccagtcacctccactgcacaactcgggcgggggtgtgacacctctcccccacccccgactccgtggtttccgtatcgtcaacccttcagccgccgacccgggaggggtctggcctacactggtcttccccttcccatcaactctttctgcttgacaatgtagcaacccaggccccccacccacggtcctcccctttttcctctccctgacaataaagtctgaatttgttctgccctcc

SEQ ID NO: 9472 - DNA, 1400 bp, Homo sapiens
ccactactgagccgtcacaagaagtctaggggcgccggggagctggcgggcacgctgactttctccaaggagctgcccaagtccctggcgggcggcctgctccccagccccctggcggtggctgcagtgatggcagcggcagcaggctcgccgctgtccctgcgcccggctccagccgcacctcttctccagggaccgccgatcactcaccctctgcttcacccggcccccggacccatccgaactgcgcacggacccatcctcttctccccgtactgacctcaaccctgaacccctcccattcaactccccacctccagccgggacccaggcgtccgggctcccagcccgcccctcctcccggcactccctaaatgatctctccttccccccccccaccccgagatacggggttccaggaaaggggaggggtagcgggggaggggggcttcagaagggggggaacaccccagatctcagggaaccccgccccctgcctttccctctcccctagaaaagggggggccgtctcacccccgagcccccttggagacaccccccctcccaaaagccatgtccatccagcccttccccccaaacctagcacaaaacggggttcacaagccatggtcggggtccgggggggacagaaatggattttcttggcaataagcggactctgggactccggctccctaccccaaactgaagcgcttccgtgaacacccccgtcctccgtagggggaggggagcaggcgggatcctgggtccctcataagcactttggttttaccgcctgcaacctcactgtgcccgccccgcaccatgccctagccccaggtctagccgggcccattgcagggggcagcacttgggggcatctccggcacttgggtgggaccaaggagatgccaccatagacctttccctcgccttcttcctccctagtccgggttccattcttttcaccagcacccatcgcccaaggggtaccgaggggggcaaggggtgtccagtccaagcccacccccgcctcgccttccgcaaaactgtgagcaaaaagcaatagaagcctcgcccccgcccttccccttcgcaggattcgccgagtctgtagcctccccgatccaagttcctagacctcatggctgtcccctcccaccagtcacctccactgcacaactcgggcgggggtgtgacacctctcccccacccccgactccgtggtttccgtatcgtcaacccttcagccgccgacccgggaggggtctggcctacactggtcttccccttcccatcaactctttctgcttgacaatgtagcaacccaggccccccacccacggtcctcccctttttcctctccctgacaataaagtctgaatttgttctgccctccg

SEQ ID NO: 9473 - DNA, 1400 bp, Homo sapiens
gcctgctgggagctctactgcctggaacacggcatccagcccgatggccagatgccaagtgacaagaccattgggggaggagatgattccttcaacaccttcttcagtgaaacgggtgctggcaagcatgtgccccgggcagtgtttgtagacttggaacccacagtcattgatgaagttcgcactggcacttaccgccagctcttccaccctgagcaactcatcacaggcaaggaagatgctgccaataactatgcccgagggcactacaccattggcaaggagatcattgacctcgtgttggaccgaattcgcaagctggctgaccagtgcaccggtcttcagggcttcttggttttccacagctttggtgggggaactggttctgggttcacctcgctgctcatggaacgtctctcagttgattatggcaagaagtccaagctggagttctccatttacccggcgccccaggtttccacagctgtagttgagccctacaactccatcctcaccacccacaccaccctggagcactctgattgtgccttcatggtagacaatgaggccatctatgacatctgtcgtagaaacctcgatatcgagcgcccaacctacactaaccttaaccgccttattagccagattgtgtcctccatcactgcttccctgagatttgatggagccctgaatgttgacctgacagaattccagaccaacctggtgccctacccccgcatccacttccctctggccacatatgcccctgtcatctctgctgagaaagcctaccatgaacagcttactgtagcagagatcaccaatgcttgctttgagccagccaaccagatggtgaaatgtgaccctcgccatggtaaatacatggcttgctgcctgttataccgtggtgacgtggttcccaaagatgtcaatgctgccattgccaccatcaaaaccaagcgtaccatccagtttgtggattggtgccccactggcttcaaggttggcattaattaccagcctcccactgtggtgcctggcggagacctggccaaggtacagagagctgtgtgcatgctgagcaataccacagctgttgccgaggcctgggctcgcctggaccacaagtttgacctgatgtatgccaagcgtgcctttgttcactggtacgtgggtgaggggatggaggaaggcgagttttcagaggcccgtgaggacatggctgcccttgagaaggattatgaggaggttggagcagatagtgctgacggagaggatgagggtgaagagtattaacctgtgtgctgtacttttacactcctttgtcttggaactgtcttatttttgttctgtaaatgtctattgccgtaaattgttaataaaattgatgtttccatttt

SEQ ID NO: 9474 - DNA, 1400 bp, Homo sapiens
agtgctgggtcttcgccgccgtggcctgcacaggtgagctgcacgctgggatgtgggtcatgagccctgggagggggcacgaagagcactggagtaggaatcaggacatccctgccctggtcctgccccctgccaccaacactctcaatgcgctatgtggcctagagcctgtgaccaccctctccggtcctttatccaatagccatccctccagtggttgttaggatcaagggctatcattggagagactgcatgggctcagggctgagaacttgggcactggagcccacgttctcaaaaactcaggatttttaacttgagttaaaaaccccctccctcccaccacttgctctgtgaccttgagcaaatgacttctttctgaacctcagtttcctcgtctggaaaatggggacaacatcaagaccttcctcctagagtgggtgtgacatgaagctactcagcacagaacctagcccagtgtcactctcggcaaatattagccagtaataactggatcctaacagtaatatcagtgtcaagaaagaaagcatgttctaaaatgtagagggggaatatcgagcaatttaaaaccaaaaaagtaaaataaatctaaaacaaaaatcttcaaaatttaaggccagaaaatgtcgatgattgttgccaggctgatgatggtgcttatgagaatgggttagcatcacatgctggctaagaacgtagactcaagacatgaggattgcttgaggccgggagtttgagaccagcctgggcaatatagtgagaccttgtctctacaaaaaaataaaataaaataaaaattagcaggcatggttgtgtgtctggagtcttggctactcagaaggctgaggcaggaagatcgcttgacccctggaggttggctgcaatgagctatgattgcaccattgcactccagcctgggcaacggagcaagatcctctctcaaaaaaaaaaaaaaaaaaaaaaaaagagagagagcacaaattctgaagtcaaggcctgggttcaaatcctagctctgcttcttaccagctgtgtgtccttaggtaaatcacttaactcctctgaaccacagttccattgtatgtaaaatgggcacaacggtagtacctttatactgggatggttgtgaggattaaatgagttaatatgtgtgaggtagctgagcgtggtggtggtgcacctgtagtcttagctgtttgggaggctgaggcagggggatcacttgagcccaggaggtcgaggctgcggtgagtcatgattgcaccactgtactccagcctgggtgacagagcgagacctcatctctaaataaataaatgaatgtgggaagtgcttaaaatgattttgggtgcataatagaaaatacttatgtgatgata

SEQ ID NO: 9475 - DNA, 600 bp, Homo sapiens
ctttgcggaggtcaatgccgacgtggtagactggatccagcaggacgatgggtctgtgcacaaatccatcaaccgttccctgatcgttgggctgaagatcagcactaagagcgtgggccgagacgagcgggaggatatcacccacacctacaaatacccagaggggtcctcagaggagagggaggccttcacaagggcgaaccacctgaacaaactggccgagaaggaggagacagggatggccatgcggatccgtgtgggccagagcatgaacatgggcagtgactttgacgtctttgcccacatcaccaacaacaccgctgaggagtacgtctgccgcctcctgctctgtgcccgcaccgtcagctacaatgggatcttggggcccgagtgtggcaccaagtacctgctcaacctcaacctggagcctttctctggtaaagccctgtgttcctggagcatttgttgaccgccaactgacaacatgctaggtagtgacctaaccacttagcatgtgtgatttcaccccacagacacttacatggcgctgactctggggcaggccctgtcctaagcactttataaatatcaacccactta

SEQ ID NO: 9476 - DNA, 600 bp, Homo sapiens
gtttggagcaatgatcgagtgattcgctggatcctgtcaattggccttaaagaatatgcaaacaatcttatagagagtggtgttcacggagcacttctggccttagatgaaaccttcgacttcagtgcactggcactgctgttacagatcccgacgcagaacacacaggctcgtgctgtcttggaaagagaatttaacaaccttttggtcatggggactgatagaaggtttgatgaagatgatgataaaagctttaggagagcaccttcatggagaaaaaagtttagaccaaaggacattcgtggcttagctgctgggtcagcagagactctccctgcaaacttccgggtgacttcttctatgtcttccccctctatgcagccaaagaagatgcagatggacggtatgtgatgggtcacactaacctgtcacttgttgggagcatgagcagctttctgtctggaacattaataatgatctaaaacggcctatttaatatgttacaaggcacttgagtatggttgcatgtccaaatataaatgtttttaaattaactctaacatttgtttataaaagtttaaccataataatagaattttt

SEQ ID NO: 9477 - DNA, 600 bp, Homo sapiens
gtgaaagaacgagggcactttgctaagcagacgccacggacgactgcacagcagcacgccagataactcagaagaagcaagcacgcggctgtgcacgcttccgaaatgcactccagaagaaaatctcagtacatctataggaagtgaagaggctgagttagtcccttagaaacgtcccagtggccgggccgggtgtggtggctcacgcctgtaatcccaacacttcaggtggccgaggtgggcggatctgagtccaggagtttgagaccagcctgggcaacatagcaagaccccatctatataaaacattaaaaagggccaggcgcggtggctcacgcctgtaatcccagcactttgggaggccgaggcgggcagatcacttgaggtcaggagttcgagaccagcctggccaacacaatgaaaccccgactctactacaaatacaaaaacttagctgggcatggtggcgggcgcctgtagtcccagctactcgagaggctgaggcaggagaatggcatgaacccaggaggcggagcttgcagtgagccgagattgcgccactgcactccatcctgggcaacggagcaagactccgtctcc

SEQ ID NO: 9478 - DNA, 1400 bp, Homo sapiens
  misc_feature (682)..(781): n is a, c, g, or t
acatcttaaggatggcaaatgaaactgattccttctttatttcttgggatgatttttgggacctcatttgcaatcttataattagtgggtgcgattctacactaactgtactgggcatgagtgctgtaatttcctcagtagcccattatttggggcttggaatattggcctttattggatcaactgaggaagatgacaggcgtcttggctttgttgcacctgttttattttttattttggctcttcagactgggttaagtgggctaagaccagaagagagacttattcgcttaagtagaaacatgtgccttttattaactgcagtcctgcattttatccatggaatgacagaccctgtattaatgtctctcagtgcctctcatgtgtcatcttttcgtagacattttcctgtgctgtttgtctctgcttgcctgtttattcttcctgtcttactcagttatgttctttggcatcactatgcactaaatacatggttgtttgcagttacagcattttgtgtggaactgtgcttaaaagtaattgtttctctcactgtttatacgttattcatgattgatggctactataatgtcctctgggaaaagcttgacgattatgtctactacgttcgttcaacaggcagtattattgaatttatatttggagttgtaatgtttggaannnnnnnnnnnnnnnnnnnnnnnnnnnnnnnnnnnnnnnnnnnnnnnnnnnnnnnnnnnnnnnnnnnnnnnnnnnnnnnnnnnnnnnnnnnnnnnnnnnnatgatgtatgtgcaatctgctatcatgagtttacaacatctgctcgtattacaccgtgtaatcattatttccatgcactttgccttcggaaatggctgtacattcaagatacttgtccaatgtgccatcagaaagtatacatcgaagatgatatcaaggataattcaaatgtatctaacaacaatggatttattccacccaatgaaactccagaggaagctgtaagagaagctgctgctgaatctgacagggaattgaacgaagatgacagtacagattgtgatgatgatgttcaaagagaaagaaatggagtgattcagcacacaggcgcagcagctgaagaatttaatgatgatactgactgatgaaaatagcatttattaatgattgaggtatttgtttaaaattcagttcatccaaaatggagtaatatccttcaccttcagtgtgtaaccaagcacaaaaacagtatcaatgttgaatctgtgaatggttttccgtttactgtgatgtgctactgtaaatatacctctttaattacttctggtctctttggtgacctgtttaaatttgtgtacattattgtacatagaataaaatgttttcacatttttatgac

SEQ ID NO: 9479 - DNA, 600 bp, Homo sapiens
aaatgacctgctggtgctcttgacaaagactggtcccgggcgcggtggctcacgcctgtaatcccagcactttgggaggccgaggcgggcggatcacgaggtcaggagatcgagaccatcccggctaaaacggtgaaaccccgtctctactaaaaatacaaaaaattagccgggcgtagtggcgggcgcctgtagtcccagctacttgggaggctgaggcaggagaatggcgtgaacccgggaggcagagcttgcagtgagccgagatcccgccactgcactccagcctgggcgacagagcgagactccgtctcaaaaaaaaaaaaaaaaaaaaaaaaagactggtcttcccagcactttgggaggccgaggtgggtagatcacaaggtcaggagatcgagcccatcctggctaacatggtgaaaccctgtctgtactaaaaatacaaacaattagctgagtgtggtggcgcatgcctgtagtcctagctacttgggagcagaggcaggagaatcgcttgaacctgggaggcagaggttgcagtgagccgaaattgtgccacttcactccagtctgggcaacagagcgagactccatcac

SEQ ID NO: 9480 - DNA, 1400 bp, Homo sapiens
aacaattgatgatgaaacaatacttatcgttccttcaccacatggctttatccaggcatctgatgttatagatactgaatctgtcttgcctttgacaacactaacagatcccatactccaacatcatcaggaagaatcaaatatcattggatcatccttgggcagtcctgtttcagaagattcaaaggatgtcgaagatttggtaaactgtcattagaataattcttagaaataggcagttcaagcaaagaaggcacactgttaattacaacctcttcaaagaaataggagcaacccccaagaggcttaatttaccaatttaaatagccacagtccttaagccacacacattgttgctgctatgactttttacctcctttaaacacatcatctgaggttgagttttatgacagtatgtagttgagtggaggctgggagttttaagcataaatccctgtttagtgttacatgggaataaggaatttcattcacttcagccactaagaaaagtttagaatcacgaaagcttaactgctgtggtttaaagtacagtttctctaaagatcagacatggcactgtctcctctcaagcctggttgtagttcagatgagtcttttcaacatggtcttcaacatggtctagagcttaccagtgatcttctgatcttcaagaagactaagtttgagacttgaccagcatacaagtatagagacctaggaggtggtcttgtggtggtacatttggttaacccattgctggcagtgggagctgatttaggcagggtaaacaggaaagcattaaaagttaaaattcactacaggttttttgttacttttaaagggaatatggataagcatagtaacaaaacccaccagaatctaagcagttttcaccccctcagaaaccactgtcattagtttacaaagttagcactttgaagtaaaactaaatgaggaaggaagtaatgttacctatccttgataccatgaccatttattagatgttttgctatataaattaccgagagaatagtttgtcatccacttagtgtgttagctggtggggtacaatataacctctcatctcaggctattttaaaaaaacaatatttgcttctataacaaaaggaaacaaatctaagaatcattcctgtactacagaagggttaaggcaaaggtagccttttgggctttttaatgaatatgacccctatagaaaagtcaagaaaaaaaaacccttgtataaattattttatttattattgtaattagatcttcacaaagttgtcttttcactgtgttttgtcaacgtgaaattaaattgtagttataagcaaaagttggttgcctagggaacaattgtatattcagtttaacagaaataaaagaatatttgtctt

SEQ ID NO: 9481 - DNA, 600 bp, Homo sapiens
accctagagcaggacacagggtgtggtactgacaaccctagtgtcacctcaaatccatgtccccacactctgggcatgggtgggacttgtgaccctaccctgtcaggcggaccagtggcccaggagccatgaggacagttgtgtgccactggaagagaaactttttgaaaaaccctaaatcaggtagagaaagcaaaaaatctctggccgtaaaccgtgctctctaatttatcggcagcttctgtggatgacctctgatgagcccgggctgcgtccacgccctgggcaggtaggcgggagcttccctgcgtgggcctcatttcttgctgcagagaatcttttgcactaagtcatgctgtttcctcaaagaagctttgttttttgttaacgtattactcagagtcacccaagcctcttggctgagggtgaaggtgggacgggaggcgggagggggctggtggtgccgctcgtgcggtgtcaacgctgcagggagttgtggcaccttggtgccctctgagcacctggccgcctgctgtccccggtgcctgtgaaattcgtcatgccatgacccacctgcattaaacctatttttttaatgtg

SEQ ID NO: 9482 - DNA, 600 bp, Homo sapiens
gtttttccaaagatgttatgaagggctctaatccaaaagtaccacagcaaaacaacttcagtgactgtggtgtatatgtattgcagtatgtagagagcttttttgagaatccaattctcagttttgaactacctatgaatttggcaaactggtttcctccaccaagaatgagaacaaaaagagaagaaatccgaaacataattctgaagctacaggaagatcagagcaaagagaaaagaaagcataaggacacttactcaacagaagcacctttaggcgaaggaacagaacaatatgtcaatagtatctcagattgaccatttctgttacttgtcatttctactttcagaaactaaatgactttcaaatttgggtatagacaataaagaactgaagtgctcactactcagtgatttggaaattttgatgcttgtataaatgtcagataattaatttccaaaggcgtatgtattaagtaaaagtctgtaaatatgttaatgaggccaatttttccagcatttataattatttttttcacttgttaggaagcttttgttatgtattttctgttaatagtacctaaaattgcaacttctaaac

SEQ ID NO: 9483 - DNA, 1400 bp, Homo sapiens
attaacaaatttagaagaacaatatataattttaatttttcaaaatggccttgatcctccggcaaatatggtatttgaaagtatcattaatgaaattggtataaagaataacatctccaatttttttgcgaaaattccctttgaagaagctaatggcagacttgttgcctgtacaagaacctatgaagagagcatcaaaggaagttgtgggcaaaaggaaaacaaaattaaaactgtatcatttgaatctaaaatacaacttagaagcaaacaagaatttcagttttttgatgaagaagaagaaactggagaaaaccacaccatcttcattggcccagtagaaaagttgatagtatatccaccacctccagctaagggaggcatctctgttaccaatgaggacctgcactgtctaaatgaaggagaatttttaaatgatgttattatagacttttatttgaagtaagttaattttccactgatcttttattaaatctttaacattccgtcatatcttatgtctttgttttccagagtcaggctttttgagttttaaattccatctctgccacttactgtgtgacatttggggagttattttttctgtttctgtctttgcacattttaaaaatgagaattctatctaaaaagttgtgaaaattgggccagggagatatctggcttatgtctataatcctgacactttgggaggtcaaggtgggaggatcgcttgagcccaagagttcacgaccagcctgggaaacaaagtgagaccttgtctccacaaaaaatttaaaaattagccagtcatatacctatagtcccagccacttgggaggctcagacaggaagattacctgagcccatgagttcgaagttgcactgagccatgatggcgccactgcactccagcctggtcaacaaagcaaaactctacccccacacccacccccgaaaacaggagttgtgagaattaaatgagatcgtacatatcaagtagtaggaaaaatgcctagtacagtgttagaagtttatggtcttgtaggaagcacaaatacagaattaaagcaatgatagaagcattaacatggtacagtcctagcagatgagagaatgcttcattatctttggaggttgggagatatgagggaccaggaagctttcctggaagagcttacattatgacccaatatacattatgacccaacataacacatgtatacacctatgtgcaatgtgtttatacatttatcaatttgtatgtttttactggtttgtgatataaaatggacatgtatatgaaataaaacagaacttagcatcagtatgcatagttctctgtaatattttctagtttcttatactgtgtttcattaaacaaaacaaaacttttaaaaatt

SEQ ID NO: 9484 - DNA, 600 bp, Homo sapiens
cagctttggaaatactcaggctgtttttattctgcaggtaagtgttttgacttaagtactaatattccagaaatttttgaaagcagtaaccttaatttcctatgtatttcattccacttttgcatataggtcaaatagcaatgtgtatgcacattctctttagttaaggcaccaattgttttggttggttttcctaagacatactttaaaaagatgttctataaatttcctaattaaattatggggattttggagtatgtacatgataaattataatatgtatatggttgaagttattttattttttactaatgaattattttaatattccttattgaataaatgctgtaacttgtttgctatggaacttattcttaaagttctagttaaaaataatttttccacatgcatgaaaatatgtattaatcagaggtggcttaattacattgaaattgcttttttgttgttgtttttttactgaaataactcatgtttgtgtagaagaatgcctgtttactcagagtttatattttccttcagttatattttaaatcaaaaggtctgggtaatgtatacttttgattaatatatacttttttt

SEQ ID NO: 9485 - DNA, 1400 bp, Homo sapiens
acagccaggagaaggccaagtggctggggggtgcagtggaggattacttcatgcgcaatgctgacttggagctagatgaggtggaagacttccttggagagctgttgaccaacgagtttgatacagttgtggaagacgggagtctgccccaggtgagccagcaactgcagaccatgttccaccacttccagaggggtgatggggctgctctgagggagatggcctcctgcatcactcagagaaaatgcaaggtcacagccactgcacttaagacagctagagagactgatgaggatgaagatgatgtggacagtgtggaagagatggaggtcacagctacgaatgatggggctgctacagatggggtctgcccccagcctgaaccctctgatccagacgctcagactattaaggaagaggatatagtggaagatggctggaccattgtccggagaaaaaaatgagtggggatgattggaaatggctttgggcccttatttgctgttctaagagttgtctgtaggggttttttttttgaggattgcagacctgtggactggttaccccatctccaccctctcccctgttcctctgtctggctccctccagggcaaggaaaacctagggtccttggtcttgggggtggggggaccttttccagcatattcccctgggcctttagttaacatccgagtgacgaagccgggttccccagtacagtgtcttttgggtgcggtcattgtgaggaaggggatgagtgagtgtgggtgtggctggaggaggagctagatgccggtggacagtgggcaggtggatttggggaggagaggatcagcagcagcagcagtactcagtgatagggggctggctgggtcaggaatggtgagatgaacatgcaagtggaagagagaatagttgaaaatgtgaatgaaagtagctctggagcctctcccttaccccaccccacacacacgcaacagctctgtacccctgcccagaacttggaacctcccaggaatgctgccttccttcagcccagcctccagtcctgggttccctcaggaattcgaagaccttggctaggtggtgagcttggaagagctgggctttgttttctgtctcctctaacctctttccttactccttatcccatcccatttgagttcaggggtgaggcttaagatcttaataaataataccttactgcttaatctgtggcttgacctgtgagtagtagccttagaatcagccttctgggagctcagcttcagagtttacaagggagcagtttctgggcccaccctagcagcctggtactttggacaaccaaacagatgaacgaacggagcacagcagtgctatgaaagttactgtaagcctgaaataaactgtatttttct

SEQ ID NO: 9486 - DNA, 600 bp, Homo sapiens
aacatcaagtaaccagagatggaaaaatcttcctataccctcttcagattaccctgtacattattttgatggacgaaaacggatgatcttgagcactatttcatggatgggaggaaaaaatccatttttggggattgcttacatcgctgttggatccatctccttccttctgggagttgtactgctagtaattaatcataaatatagaaacagtagtaatacagctgacattaccatttaattttatattatgaaagcaaatcatctgcatgtgcatcaaggccagtcctattcaacctagctttcgaatgctgatatctggttagtatgtcattttgaagttggcacataacttttctaaaaaaaagcagtctttgttgtttgcttcttccctacggatgacttctaaaaatatatgacgggtataaaaaaattagctatattgatcatatcaacactgtaactgctgaaatggcattctaatgtttgctttttattcggacaggccacatgatgcatagagcctctttcatgtgacttgtgtctactgcttaaatctttatgctgtgttgatgatattatattgacatatgaagctgt

SEQ ID NO: 9487 - DNA, 1400 bp, Homo sapiens
tttttttaacaaacatgtatgttttattttgatagtttctttccgtaagataattgaaatattatactgtaaacccttttcttttctttttttgaaaagtccaagaatgtacttatacaggcatttttccccacctatttttggccattctcataccacagactaaagagtgaaatgatttgtccattgtagcttattgtttatcagtagttcttttgtcagctgcttacattttttctttcatggttttgtgaatcattttcagtatgtaatttataggaaccttgtcctctggttatagtagactgtgtgccctcctccagtgatggcattattagacatgctggtcatttaccctcagaaagactctcttattagaatggtgagtgcttcagttatagtatgtttgaatttttaaaaaattctgttttagaaatgtatcttatgctctcatgactatgcagtttctaaacatacacatagaagctgagtctctgatccaatatgtttttatttgttccatttaatttatcacatagattgggaaggcaagctaaaagccttaaaaatgccctttatattttgagtgatttcagcgttgaacactagtatactatctaaatttgctgctcactttctttaaactgtggcaattaaaggcatgtttatacatgacttaatcgtgaaatgtttgtcactcttactgcacagacttatctgcaatcataactggttagtttttttgttttgttttgttttattgtttttaatgaaactggtaccatctgtgctttcacaaaaaacttccaatgccatttttgagaactaacctaactagtcatgctaaccagaaaatccactggggaggaggttccttttgaaacaaaatgctgttcagttagtaaccaagttactttgattgcaaaagcagctgtgtttctgataagtactgaacaaatgtgtgtaattttctgtgccagacttatgactttgttttcaagcactgtaatgtgggatggatggttagaaacaataatatattagggtttctgtttaaccctttcaggactgaactgtatctccttttgttaattttcccctgtgttgtgataaatgtttgccagcattcagtactgtgttggtccagatgtaggtttatatgctcatttttagcttatttcttgtaccttgcagcatgctctacgcattcagtccttaaggggtttattttacaaactgtgcgcctgtaaggtttattagcaataagatagaaaattgagcaagtttataccataattttgtagaaaaaaagaatctgctcagttccatatttcatccgtgaaaaacttgcaatacgagcagtttcaaggaataaataaaaaggaaatgtaaaccattgt

SEQ ID NO: 9488 - DNA, 1400 bp, Homo sapiens
agcaaactgccactggtgacacctcacactcagtgccggttaaaattactgaagttagagagaattaaagactatcttctcatggaggaagaattcattagaaatcaggaacaaatgaaaccattagaagaaaagcaagaggaggaaagatcaaaagtggatgatctgagggggaccccgatgtcagtaggaaccttggaagagatcattgatgacaatcatgccatcgtgtctacatctgtgggctcagaacactacgtcagcattctttcatttgtagacaaggatctgctggaacctggctgctcggtcctgctcaaccacaaggtgcatgccgtgataggggtgctgatggatgacacggatcccctggtcacagtgatgaaggtagaaaaggccccccaggagacctatgcagatattggggggttggacaaccaaattcaggaaattaaggaatctgtggagcttcctctcacccatcctgaatattatgaagagatgggtataaagcctcctaagggggtcattctctatggtccacctggcacaggtaaaaccttgttagccaaagcagtagcaaaccaaacctcagccactttcttgagagtggttggctctgaacttattcagaagtacctaggtgatgggcccaaactcgtacgggaattgttccgagttgctgaagaacatgcaccgtccatcgtgtttattgatgaaattgacgccattgggacaaaaagataagactccaattctggtggtgagagagaaattcagcgaacaatgttggaactgctgaaccagttggatggatttgattctaggggagatgtgaaagttatcatggccacaaaccgaatagaaactttggatccagcacttatcagaccaggccgcattgacaggaagattgagttccccctgcctgatgaaaagacgaagaagcgcatctttcagattcacacaagcaggatgacgctggctgatgatgtaaccctggacgacctgatcatggctaaagatgacctctctggtgctgacatcaaggcaatctgtacagaagctggtctgatggccttaagagaacgtagaatgaaagtaacaaatgaagacttcaaaaaatctaaagaaaatgttctttataagaaacaggaaggcacccctgaggggctgtatctctaatgaaccatggctgtcatcaggaaaatggttgggagatttctcagtccctgaaagggatgaggctgggggagttgcccagaggaatccctgttcccactgatttttattagcaaaacatcctgtgtcttttggagtacgatgtgtaagtgcccattgggtggcctgttggtcactgtgcagcagtctgcttcccaataaagcgtgctctttcacaa

SEQ ID NO: 9489 - DNA, 600 bp, Homo sapiens
ttcacttgtaatcccccctgtacttacctactcacattggagagttctgaggccggagtaactgtgtccttgaaacacgtttctaattggaatgccagggttcagtagccgtccccccggaaaggggtgaccttttgctgtgcttgatgttgcatcagcagcctagggttctgtttagactaaaatcttggccagagctccttgccatctgctaagaagactggggctgagtagttaagccagccttctgagaggtggctgttggtcaggacgggaagctggtgaccttggcatgtcttggcagcagctagatcaggccctcggcagagacacaggaagcggaactgctgtgccttaacttggctgtggagctggagctggagaaggcagcatactgaccagtggctttttgattgattgtttgttatgaggtggagttttactcttgttgtctaggctggagtgccgtggtgcgatcttagctcactgcaacccccgcctcccgggttcaggagactcgcttgaacctgggaggtggaggttgcagtgagccgagaatgccactgcactacagcctgggcgacaaagtgggactgtctc

SEQ ID NO: 9490 - DNA, 600 bp, Homo sapiens
caggggatcctaactgggttcttggggtcttcaggactgaagaggagggagagtggggtcagaagattctcctggccaccaagtgccagcattgcccacaaatccttttaggaatgggacaggtaccttccacttgttgtatttattagtgtagcttctcctttgtctcccatccactctgacacctaagccccactcttttcccattagatatatgtaagtagttgtagtagagataataattgacatttctcgtagactacccagaaacttttttaatacctgtgccattctcaataagaatttatgagatgccagcggcatagcccttcacactctctgtctcatctctcctcctttctcattagccccttttaatttgtttttccttttgactcctgctcccattaggagcaggaatggcagtaataaaagtctgcactttggtcatttcttttcctcagaggaagcctgagtgctcacttaaacactatcccctcagactccctgtgtgaggcctgcagaggccctgaatgcacaaatgggaaaccaaggcacagagaggctctcctctcctctcctctcccccgatgtaccctc

SEQ ID NO: 9491 - DNA, 600 bp, Homo sapiens
cagtcagcttatgactcaaaacgtcctacagcaaaagaacttctgaaacacaaattcattgtaaaaaattcaaagaagacttcttatctgactgaactgatagatcgttttaagagatggaaggcagaaggacacagtgatgatgaatctgattccgagggctctgattcggaatctaccagcagggaaaacaatactcatcctgaatggagctttaccaccgtacgaaagaagcctgatccaaagaaagtacagaatggggcagagcaagatcttgtgcaaaccctgagttgtttgtctatgataatcacacctgcatttgctgaacttaaacagcaggacgagaataacgctagcaggaatcaggcgattgaagaactcgagaaaagtattgctgtggctgaagccgcctgtcccggcatcacagataaaatggtgaagaaactaattgaaaaatttcaaaagtgttcagcagacgaatccccctaagaaacttattattggcttctgtttcatatggacccagagagccccaccaaacctacgtcaagattaacaatgcttaacccatgagctccatgtgccttttggatctttgca

SEQ ID NO: 9492 - DNA, 1400 bp, Homo sapiens
tagtatttctattagggaacctttcttattaggtggtttgtattgtctggtttctaacatgcaggtagctgtttggcagttaaacacgtttagagtaatttgagttacaacgtgtgaaactgagcaaaaaagcagtgataagtttgggttaccataccaaatatttgttttcccactggaaaaaagtaagttttagaaaatagttaacctttgcagcatttgtttacagtttacagttccagaagtgcgtcgaaatggattacataactgctcttttattcctggtgttcacatctgtcccaggctgacacctgctcttggctggcccactttggtatgggctttaatttcactaccccaaacacgatactgtcatctgctttataataatgctcaagatgcctgataaaaatctcattttgcagccagacaagccttgaatccttttggcactaactgcaaaggaagatttttttctctagatatgcattagcagctagtgctccagttagaagcacgaactataaccttgataagtaaacagcagctggtggttaacaagtggatcgtcatgttcagtagtttatacattatgtgagaagtaacgttctgattctttttcttacacagaattggcagagggggtcgatttgggaggaaaggtgtggctataaactttgttactgaagaagacaagaggattcttcgtgacattgagactttctacaatactacagtggaggagatgcccatgaatgtggctgaccttatttaattcctgggatgagagttttggatgcagtgctcgctgttgctgaataggcgatcacaacgtgcattgtgcttctttctttgggaatatttgaatcttgtctcaatgctcataacggatcagaaatacagattttgatagcaaagcgacgttagtcgtgagctcttgtgaggaaagtcattggctttatcctctttagagttagactgttggggtgggtataaaagatggggtctgtaaaatctttctttcttagaaatttatttcctagttctgtagaaatggttgtattagatgttctctatcatttaataatatacttgtggactaaaagatataagtgctgtataaaatcagccaattatgttaaactagcatatctgcctttattgtgtttgtcattagcctgagtagaaaggcctttaaaatttttttagaaagcatttgaatgcattttgtttggtattgtatttattcaataaagtatttaattagtgctaagtgtgaactggaccctgttgctaagccccagcaagcaatcctaggtagggtttaatccccagtaaaattgccatattgcacatgtcttaatgaagtttgaatgttaaataaattgtatattcacttt

SEQ ID NO: 9493 - DNA, 1400 bp, Homo sapiens
aaaactttgtcctatagtgtaattataaactgatgactattatcttcatacattgagtcttcatgcatcaatgaaatgaaaaatataggattatttatttactttttgtaactaagtgggaaataagaaaaaaagttagaaagtacttaaggggaaaatcgttcttactaagtcatgtattttcaacttgtcttccctggtatatcataaataccgacatattacataccccatgtaaaattttgcttaaactctctagcacttggcatgtagaatatgtaccataggtatcaggttaaaacactaaagtctgccagaaacttttgacagtagcaagaaaattgttgaagaaaaaataaattatttactgagggtagttatgttaaagttttgcgaacttaaagggctgactttagttccttcatggtaatggcttgagtaacatcatctttgggattttttaaatactggtccagtctaggagaacctggaagatgaccagaggtatttcagtttccctagggagagcttcgttatccatgtggatgataagtctgcttgatttattattaaatcattatagcagtgaagtggtgccattttctctctcttaagccccatttgaaaggctagagaaggggatatatatactatgttcaaggtttgtaaggttgttaatgtacataattgcagattgcaataaaagcttagatacattttgtaaacccaacccactaaatgagcaggttacaagacaaatgtcaccagcctcaagtattttatgaactatttactgagggtagttatgttaaatagattataatgtggtaaattatttcctgaatcctttatcacaggaaaaacacagaccctcataaaagggataattaaaacggatgtgtctgaacatttagtgaagatgagacttaaaacatgaaagtgtatttgtgtattttgagggttttagaaaccggttgccttagaggttagacttttgaagaaaaaaaaaaaaagatacagatcttttcccctggccaaagggaagttgtattagtctgtgacatcttgtgatgctgtttatcttggtttgacattggagatacgctagtaactgtgataccatactataaaacagaagaattttctgctactaaaaactgcctttttacaaaatgactgtaaatatttgtaaaataaaataacactaaactttaagcccaaaaggagagatagagccatgtgttcagttgtggacctgtccgtggggcacagtgccaccccatcacagtgttgctgtcatcaggcaaaagtgaatgtttgtttatggcaaattcgtcttttgcgaatggcttaattctgacactacctttctgggaaatgttaataaatttttaatattc

SEQ ID NO: 9494 - DNA, 600 bp, Homo sapiens
tcccgagaagtcaccaaggccatctggagactcctggctttctgaactttgcgcgttaagccgggacagctgctttgctgcccggagagtagtccgcgccaggaagagagcaacgaggaaaggagagggactctggcgtcccggcaggcgagaggcgaggctgagcgaaagaaggaaggacagacggacctgtctgtcagagttcggagaacactggctctcagccctgagacacaggcctcagttaggacgctcggcgcccaaatctcatcagttttattgcctgctcgattatatagaaaaatacaaaaaatctgcattaaaaatattaatcctgcatgctggacatgtatggtaataatttctattttgtaccattttcttgtttaactttagcatgttgttgatcatggatcatactccccttgtttctttgggtgagaagggatcgcagtttggaaactccggcggctgcgtgcggggtttcagtcccagctgtaggcttgtaaatacccgccccgccaaaccgcatagagaacgtggcagcaagctgagggtctttgtttgggtttattattacggtatttttgtttgtaagtt

SEQ ID NO: 9495 - DNA, 600 bp, Homo sapiens
gtggcctgtgcctgtaaacccagctactcaggaggttggggcagaattgcttgaacccagggggcagaggttgcagtgagccgagattgcacccctgcactccaggctgggcaacagtacgagactctgttccaaaaaaaataaaaaagaacagcctttttaggccacagtgacctgcgcaatgtttatatgctttgacctactaactttctcctaactaaatatttgattttaggagagtgtttaaataaattacagtatgtctatatgatgaaatgttattttgccattaaaattttgtttacaaagataatttttattgacataaaaataactttaatgtaatttatgttgaaaaagctgaatacaagtctttatatagagtaatatttgagctgtgttcaaaaatacataggaaaagactgataaaatgaaatatggcaaaatgttaatagttttccctggaataggataataggcaattttaaaacagactcctttaaaaaaacaaacaaacaaaaaaaacatagacttctttatatcttttgagctccctcccttttattatgtaatgaatatgtgttgcttttgtaataggaa

SEQ ID NO: 9496 - DNA, 600 bp, Homo sapiens
tttattccctttgatcctcccccaaggtgagggcttaggcagctgtagaaccccaggaaagaacggaatccaggcaatctgtttagagaccccccactccaaatttatccttttcctttccttcccctaagatgtttccagggccctctggtgcccacactgtcctcttccttccacttgggggtggggaaatccttcctgcgaggtcagggcatttctctacaaagtggcctgaatgaggccaggccctgagaaggagccaccagctggaggaaaggggctccaagccttgcttttaacacccctgcaaaacccccaccctcccaagatgttcacaaaaggtgagaaattcaggtacgaaaccatcaatggacaacttgaaaatgcatgttcctcaggcctatgcagttcccagagactcttgacaccggtctctgctgaggctcccagcctcagtttcccccacagcagcacgggccccactgtgctgctcttcaggtccccacagccctgcctttggttcctggacatttggtattctgccctccactctggtactatcagagtagggcaggctctggattaaagcttttagccggt

SEQ ID NO: 9497 - DNA, 1400 bp, Homo sapiens
cagagaagaatcccagcgttgctcaaagtctaaccatcataaagacactgcctgtcttctaggaatgaccaggcacccagctcccactggactccaattttttttcctgccttatttagaattctttggcgggaagggtatgatgggttcccagagacaagaagcccaaccttctggcctgggctgtgctgatagtgctgagggagataggaatttgctgctaagatttttctttggggtggagtttcctctgtgaggggcttgcagctatccttcctgtgtatacaaatacagtattttccatggttctgcctgcacttactttgtaatgccacggttgagattgagagagatcagcgcagccaggcaagggaactttaaagaattattaggccaccttctccctttcctggaccccagagtcattcctccatttggttaaaatactcagtgcagggaactcttacatcctgtctccttcacttgcagcgtcccctgctatgcctcaggtgaaccacataattcttgggtttccgttcctacttgctagtgatttctgaacatgttcaatggagcggcacacagtctagacccacttccgcattgaaaccttcactgttcctctttggtttcttcagagctttcccaagagagctgtcagttttcagctgtcagtaacacaaatgagtttatggtaacacaaatgagttttgctatctctctgagaagctcatctgacctcctgactctcagccctacagagtagggagttgatgctgacaggatgaagatttaggaataaatatgcctgggaagagactgggaaggttctagggtgaggcacctcagtaactcatggtaccttggccaagttggaaggaagcagtttgttaatgaggcacagtaatcctggctgcagggtctaggaggtaagaccagctgggatgaccttccctgggttaatcaatttccctctagacaacacaaactgcaggcatgtgactaactttgaaagaacacccatcatgtggctgctgtcacccttgaccagccgtggtggtggttactccatctgtggttggagcgcctctttgggattcacttcaaggtcttgtgcctatttttctgcatatcttctgtgatgacaaatctctgtcccctgagtgttaatttgatttttagaaatggccaaaagtcacgtgatccaaactttttttcagtaatatggagactgagctgcatggtagttggggatcaaaaatatgtgaccttaatgagatttttatgatttctaaagtaacaataaaagcagtttttagagttgagttccagagagggcagggcaatggcagtgacatgtttgtcattttaataataaataacatctattgagtgcttaa

SEQ ID NO: 9498 - DNA, 600 bp, Homo sapiens
attctggtacaagcaccttatctatcacagaccagtagcaaacagcacaaaagcactttgagtggcactgttctaatcattcaccaggaaacacagactgtattctttatgatcaccaaaaacaagaatgaaagctcaaaacccaattttcccttctcaccattctccttcttctcccaggatgtgcccctgattagcctggccaacatcttgcacaatgccaagctctggaatgacgccgtcatagtagccaccatggcagtagagatcgcaccacactttgctgtgaaccacttcactctgggcaatgtctacgtggcaatggaagaatttgaaaaagcactggtgtggtatgaatccacattgaagcttcagcccgagtttgtcccagccaagaaccgaatccagaccatccagtgtcacttaatgctgaagaagggacggcgctctccttagtgcacttcttccttctctctttctctttactcatgctctaaaaaaaaagaataagaaaagaaaccaatcattgtcagtatctactattaatgatgtgtgtgaaaataactaagacttataacaggacttttacatatgtgggaa

SEQ ID NO: 9499 - DNA, 1400 bp, Homo sapiens
tctccagcatggcagccctctactggagggtgaaaggccaaggaaagaaggcaatcgactgcctccgccaggctctgcactatgcgccacaccagatgaaggatgtgcccctgattagcctggccaacatcttgcacaatgccaagctctggaatgacgccgtcatagtagccaccatggcagtagagatcgcaccacactttgctgtgaaccacttcactctgggcaatgtctacgtggcaatggaagaatttgaaaaagcactggtgtggtatgaatccacattgaagcttcagcccgagtttgtcccagccaagaaccgaatccagaccatccagtgtcacttaatgctgaagaagggacggcgctctccttagtgcacttcttccttctctctttctctttactcatgctctaaaaaaaaagaataagaaaagaaaccaatcattgtcagtatctactattaatgatgtgtgtgaaaataactaagacttataacaggacttttacatatgtgggaattggtttgtttttgtttttacgtttctcctttcccccaaccaacctcagaagaggcaccttcagaaacacacatttcttaaaaggaaagtgcagcttcaagatattgtgtaaatactgagccaagacatttctggagctgtgctctgtctccaaaaacctcaatgcctttagggcttttctcagtggtccagctagccttctctttggaggaggatgaagccgcattgcacattctctgcttcctgtcgtagcctctgttgtcaatggaaatgcggaagcccatctggtgcccgtcagtgagaagcaacgttctgcgctctctccgttagacctccatgctgtccccagtcttgtccattccatgctgctgtgttacaaactctcagaggtagtttgcaggggaggaaggggaatatgattttaaaaacaaaatatttacaacaacaaaaattcttaggatcacctgacctttgtaatgttatttatgttggggagggaggggggctgagaaggggaaatcagcagtgtgcaacatctttataatttgtactttaattacaaatcacaaggaaaccaataagttgaaatcctatataacaggtttatatatatagaatatgtatatttgaagccctctacagactgagtctatgttttactaattctttgttcactgtgttacccatcttggaataagttgtgaatgtcagctccctctctctgaggcctccagacttagctcctcaggagggtaatgagccaaggttgagtgtttccatacaatgcttttacctttgatcccaggagaatcagaaactccaacattttggaatcttcaagggcacatactgagaaaaaaaataaaattgtttatgagc

SEQ ID NO: 9500 - DNA, 964 bp, Homo sapiens; identical to SEQ ID NO: 4265

SEQ ID NO: 9501 - DNA, 600 bp, Homo sapiens
agctgcagttccctctccagcagggtcctgggccatttcacatgatgactgagggctccaagagggtgaaagcagaagcatctgggctaggcctcttagagcctgtgcataaaactgaaacagcactacttcatccatgctgcctttcaaagcaagtcccggggcctgctcaaaattacaggcagggaaaatatcctctacctgatggtagtgacaaagaatatgtgtcccatcgttaattcaccagttgccttcacagttgcaacaatgagactgttagcttttaaacagaaatgataaaaactagaagccggccgggcgcggtggctcacgcctgtaatcccagcactttgggaggccgaggcgggtggatcaggaggtcaggagattgagaccgtcctggctaacaaggtgaaaccccgcctctactaaaaatacaaaaaattagccgggcgcagtggcgggcgcctgtagtcccggctactcgggaggctgaggcaggagaatggcgtgaacccgggaagcggagcttgcagtgagccgagattgcgccactgcagtccgcagtccggcctgggcgacagagcgaaactccgtctc

SEQ ID NO: 9502 - DNA, 1400 bp, Homo sapiens
caagcatgagtactgtatctggacggatggactgaatgcgctactcgggaaggacatgatgagcgacctgacgcggaatgacctggacaccctgctcagcatggaaatcaagctccgcctcctggacctggaaaacatccagatccctgacgcacctccgccgattcccaaggagcccagcaactatgacttcgtctatgactgtaactgaagtggccgggcccagacatgccccttccaaaactggaacacctagctaacaggagagaggaatgaaaacacacccacgccttggaaccgtcctttggtaaagggaagctgtgggtccacattcccttcagcatcacctctagccctggcaactttcagcccctagctggcatcttgctcaccgccctgattctgttcctcggctccactgcttcaggtcacttcccatggctgcagtccactggtgggacaagagcaaagcccactgccagtaagaaggccaaagggcccttccatcctagccctctgcaggcatgcccttccttcccttgggcaggaaagccagcagccccagactgcccaaaaacttgcccaccagaccaagggcagtgccccaaggcccctgtctggaggaaatggcctagctatttgatgagaagaccaaaccccacatcctcctttcccctctctctagaatcatctcgcaccaccagttacacttgaattaagatctgcgctcaaatctcctcccacctctctccctgcttttgccttgctctgttcctctttggtcccaagagcagcagccgcagcctcctcgtgatcctccctagcataaatttcccaaacagtccacaggtcccatgcccactttgcgtctgcactgtgatcgtgacaaatcttccctcctcaccagctagtctggggtttcctctccctgccccaggccagaactgccttcttcatttccacccacgctcccagcctcttagctgaaagcacaaatggtgaaatcagtagtctcgctccatctctaatagactaaacctaaatgcctctaggacggactgttgctatccaagcgtttggtgttaccttctcctgggaggtcctgctgcaactcaagttccacaggatggtcaagctgtcagacatccaagtttacatcattgtaattattactggtatttacaatttgcaagagttttgggttagtttttttttttttttttgctttgtttttgtacaaaagagtctaacattttttgccaaacagatatatatttaatgaaaagaagagatacataaatgtgtgaatttccagtttttttttaattattttaatcccaaacatcttcctgaaaataacattcccttaaacatgctgtggaataaaatggattgtgatg

SEQ ID NO: 9503 - DNA, 1400 bp, Homo sapiens
tgttttgttttgatgtttgggaactcaatgttattaacttcttattatgcttcttctttggtaattatttggggtattctggcaatgaaaccacatttcctgaaaataaatgtatctgaacttagtttatgggttattcaaggatgtttttggttatttggaactgtcatacttaaatacttgacatctaaaatttttggtattgcagatgacgctcatattggcaacttactaacatcaaaattctttagttataaggattttgatactttattgtatacctgtgcagcggagtttgactttatggaaaaagagactccactgagatacacaaagacattattgcttccagttgttcttgtagtgtttgttgctattgttagaaagattattagtgatatgtggggtgtcttagctaaacaacagacacatgtaagaaaacaccagtttgatcatggagagctggtttaccatgcattgcaattgttagcatatacagcccttggtattttaattatgagactaaaactcttcttgacaccacacatgtgtgttatggcatcactgatctgctcaagacagctatttggatggctcttttgcaaagtacatcctggtgctattgtgtttgctatattagcagcaatgtcaatacaaggttcagcaaatctgcaaacccagtggaatattgtaggggagttcagcaatttgccccaagaagaacttatagaatggatcaaatatagtactaaaccagatgcagtgtttgcgggtgccatgcccacgatggcaagtgttaagctctctgcacttcggcccattgtgaatcatccacattatgaagacgcaggcttgagagccagaacaaaaatagtatactcaatgtatagtcggaaagcagccgaagaagtgaagcgagaactgataaagttaaaagtgaactattacattctagaagagtcatggtgtgtaagaagatccaagcctggttgcagtatgcctgaaatttgggatgtagaagatcctgccaatgctgggaaaactcccttatgtaacctcttggtgaaggattccaaacctcacttcaccactgtattccagaacagtgtttacaaagtcctagaagttgtaaaagaatgactgctacatgacctgctgcctacggagaactacatctatgactagacattcactttgcaaataattgttgtgactctatgtttgctccagacacagagcttttattgtcacccaaagatgcctatgggaaccaaaagaatcaagctgaaccaagatttctgccagaatcaatttcctcaagccagaaggctttatcattcagtctgtgcaacggatttttttttaaataaaaacagacttctttgttgatttctcccttt

SEQ ID NO: 9504 - DNA, 600 bp, Homo sapiens
aaattttgtagtttaagtattgtcatacagtgttcaaaaccccagccaatgaccagcagttggtatgaagaacctttgacattttgtaaaaggccatttcttgggagttttttggtgtgtctgtttttttaaagtattcaagatactaccagtcaacatctttttggaagaaaatgccttgggtttagaagattttcttaaaaggggagtagatggttgtagattgactaaaaagtctaccatacttcaagggactacaggtaagtctcatagtataccagctttggtacttcattttttaaaaaagtattaatcaattgcaaagaaattcgccttggccaacccttctttgtgtatcaggtagtctaacctgatacaagtagttgacagatttcaactatcaatcaccagtccaacccatttctcatttaacagatgacggagataatccctaaaagcacccacatttgtttcaatgccccaaacaggccaaggctccctagcaactccctagtggcgttttttaacttctcagaaactgttaccattatttgaaataggcttccttaacctcctttacccttaacccaacagggattt

SEQ ID NO: 9505 - DNA, 600 bp, Homo sapiens
tgcttttgaatagtgggagacgggagtttaccccgatcacagaaaccataccaactgaaagacaaatcagcatcttgctggacgacccctcacagagctcctagatccttgaagtgtgaacttcagcagctgagagagatggggtctcactatgttgcccaggctggtcttgaactcctggactcaagcaatcctctcacctcagcctcccaaagtgctgggattacagattttataaatattgttgatctttttgaaaaaccaactgttggcttcattttctttattgtgtaatactaccttagaggatagcagttcctaatacctacttttattatgagtctctgccatttataaagaactgtggacagcacagggaatgggggaagaaaactctggtgcagcttgaatcttggtagcaaaacagtgacttcatcagaaaattttgtcactctctattagataatggagtttgaccatttggaatttggaatttttcaaatgaatatgacaaaaatttaaaaaactcttgtattactatgtgataacacagatctttacaactttatgtttgttttatcaattacatattaaagatag

SEQ ID NO: 9506 - DNA, 977 bp, Homo sapiens; identical to SEQ ID NO: 4271
  misc_feature (402)..(402): n is a, c, g, or t
  misc_feature (406)..(406): n is a, c, g, or t

SEQ ID NO: 9507 - DNA, 1180 bp, Homo sapiens; identical to SEQ ID NO: 4272

SEQ ID NO: 9508 - DNA, 1018 bp, Homo sapiens; identical to SEQ ID NO: 4273

SEQ ID NO: 9509 - DNA, 1400 bp, Homo sapiens
tgagcctcctaggaaagtgggggtcatcctggactatgagactggacatatctcgttctacaatgccacggatggatctcatatctacacatttctgcacgcctcttcctctgagcctctgtatcctgtattcagaattttgaccttggagcccactgccctgaccgtttgcccaataccaaaagtagagagttcccccgatcccgacctagtgcctgatcattccctggagataccactgaccccaggcttagctaatgaaagtggggagcctcaggctgaagtaacatctctgcttctccctgcccagcctggagctaagggtctcaccctccacaacagccagtcagaaccataaagctacaggcacacactgaagcactttactgatattcattcaattattccataggacagttgtttgagtttggtgccaccttattggcccctttatacagataaggaaactggggtgtagaaaagtgtattgactttacaaagcagacaggaatagtgaacaacagagctgggatctgaacaacaatgactaacattaatggagaatttaaaacgttctgagtgctgtgttatgagctttggtgggtgtcactcctttaatcctcacaacaccctgtcaggtagtctcatttggcaagtatggaagcagaggcagggcaacattaagtagcttacataactcacacggtaatttgtgcagttgggagatgttcagcttcagtccctggccaattgcccgttcttttccagcctgatttttcctgcatgggaagagcccacatgtagccctgaggttcccttcccaggacagctccaggatcgagatcactgtgagtggttgtggagttaagacccctatggactccttcccagctgattatcagagccttagacccagcactccttggattggctctgcagagtgtcttggttgagagaataacgttgcagttcccacagggcatgtgactttgaaagagactagaggccacactcagttaataatggggcacagatgtgttcccacccaacaaatgtgataagtgatcgtgcagccagagccagccttccttcagtcaaggtttccaggcagagcaaataccctagagattctctgtaatattggtaatttggatgaaggaagctagaagaattacagggatgtttttaatcccactatggactcagtctcctggaaaaggatctgtccactcctggtcattggtggatgttaaacccatattcctttcaactgctgcctgctagggaaaactgctcctcattatcatcactattattgctcaccactgtatcccctctactgggcaagtgcttgtcaagttctagttgttcaataaatttgttaataatgctgactcttc

SEQ ID NO: 9510 - DNA, 1400 bp, Homo sapiens
gtttataatattttgtgccttgaagggaatgtcacaggaggaaaaggaagactaaagcctgcatactaaatgctctcataactataaatctcttgttgttaaaaaacatctcttgcaccaaatcctgtcttcagtcttttgtttaaccctcaatgaactaccaattgaaggcataagttggtcttaggttgtatacaggtgtcaaactccacttgacatttactgtataatctgcagcatgctatagaaagtggggaggaagggaggaaaaataattacagtcaaaatatttgcaatctatctactcattttgctttcaatcactagagtgcattatgtttttaatgcaagtttgtctgggatgtcaactgcctacagatgtttattactagcagaatagattatttattaatagattgtttcttttcatatagtccaatgtttcatcatcaggaactttcggttttaaaaaagaaacattacttttgtctgctaaagtaaaccatatatagggaaattaacacctaggaaaagaaaactggcaagagaattgatgaggtattagtggcttagaagaattagtaatataagttgggaataaaggggtagcccgacagtggtaagtaaaaatgtagtactccattgtttttgctatttaaatataatgtatcaaaaacctttattctaaaatttccacaaatgattccttttatccatcttcttgtaatcctaaaagcatcttctcactatgtgctgtagtttgaaacctaacgaatcctcctacttgagacactgtagaaaagtaaaaattgttgcttctgttttgttttaagaggaaatgagaaggccagcagaagtagattaaaactagagagctggtttattaaaataagcagataattatccaggcttaaagtaatagcttacatgttttgaaaatccttgtacttatttttgtttttattgttgcaaaaaaatgttaatgggctgttgaaatgacctccatttacttaaggtaatccaataaggtcttttttaaatatacaaattttactcaagtttaaattgtataaaactgcttagaaacctgaaattttatagtgtgtaatatcttatgtgtatatagcatcctgagctgtgtgatacagtagatttcttcttagcagaaacatgcgaggtagatttaataaacaacaaaaatcagcttatgtttctacttattgaatctgctttactttttagcaattttcttccttgtgaacatgaaccatataaagtgtctgtgacttaatgatttcatgtaagtctgtcgcatacatccttcttttgtagcttacaccatgtggatgctctgtctgtagacactgcttgataaaaggagaataaacctcttacatttt

SEQ ID NO: 9511 - DNA, 1400 bp, Homo sapiens
gccctcaaggtggtgaagaaggtgaagtccatgcagatgttccacatgcccatcacttcagccatgcaaggagaccggctgggcatctgcgtcacccagtttgaccctaagctgctggagcgcgggttggtgtgtgcccccgagtccctgcacactgtccatgcggccctcatctctgtggaaaagataccgtatttccgggggcccctgcaaaccaaggccaagttccacattacagtgggccatgaaacagtcatgggccggttgatgttcttcagtcctgctccagataactttgaccaggagcctatactggactctttcaacttctctcaagaataccttttccaggagcagtacctgtccaaggatttgacaccagcagtgacagacaatgatgaggccgacaagaaggccggccaggccacagagggccattgtcctcggcagcagtgggccctggtggagtttgagaagcccgtcacctgccctcggctgtgcctggtgattggctccaggctagatgcggacattcacaccaacacgtgccggctagccttccatggcatcctgctccacgggctagaggacaggaactacgccgacagcttcctgcccaggctgaaggtgtacaagctgaagcacaagcatggccttgtggagcgggcgatggatgactacagtgtgatcggccgctccctgttcaaaaaggaaaccaacatccagctcttcgtggggctcaaggtgcacttgtccactggggaactgggcatcatcgacagtgccttcggccagagcggcaagttcaagatccacatcccaggtggcctcagccccgagtccaagaagatcctgacacccgccctcaagaagcgggcccgggctggccgtggggaggccaccaggcaggaggagagcgccgagcggagcgagccctcacagcatgtggtgctcagcctgactttcaagcgttatgtcttcgacacccacaagcgcatggttcagtctccctgagtgtccggtgacctcccccagggcctccttgcccagcccagtccaggctgctgtgccaaatcccaaccagccacgcctcagcctctcccagtctctccctgcagtcctgcagcagcagcccccacccccaagcttggtgctgagccctggtgaggagctgagggggatgggttgctggggccaggagggtctctcctccagcccctgcacactcccacccaggacagcccccagcccaactaggaaagggccatgggcagagggctggtagccagtatcttccactgccccatctgttggccacctgcaggccagtctcaaccctcccccaggtgggcaggcacttgatggctacaaataaatgtcccgtggccccagcccactct

SEQ ID NO: 9512 - DNA, 1400 bp, Homo sapiens
caagccacacacagggctccttaaggataactaacatttcatccgatgacagtgggaagcagatctcttgtgtggcggaaaatcttgtaggagaagatcaagattctgtcaacctcactgtgcattttgcaccaactatcacatttctcgaatctccaacctcagaccaccactggtgcattccattcactgtgaaaggcaaccccaaaccagcgcttcagtggttctataacggggcaatattgaatgagtccaaatacatctgtactaaaatacatgttaccaatcacacggagtaccacggctgcctccagctggataatcccactcacatgaacaatggggactacactctaatagccaagaatgagtatgggaaggatgagaaacagatttctgctcacttcatgggctggcctggaattgacgatggtgcaaacccaaattatcctgatgtaatttatgaagattatggaactgcagcgaatgacatcggggacaccacgaacagaagtaatgaaatcccttccacagacgtcactgataaaaccggtcgggaacatctctcggtctatgctgtggtggtgattgcgtctgtggtgggattttgccttttggtaatgctgtttctgcttaagttggcaagacactccaagtttggcatgaaaggttttgttttgtttcataagatcccactggatgggtagctgaaataaaggaaaagacagagaaaggggctgtggtgcttgttggttgatgctgccatgtaagctggactcctgggactgctgttggcttatcccgggaagtgctgcttatctggggttttctggtagatgtgggcggtgtttggaggctgtactatatgaagcctgcatatactgtgagctgtgattggggaacaccaatgcagaggtaactctcaggcagctaagcagcacctcaagaaaacatgttaaattaatgcttctcttcttacagtagttcaaatacaaaactgaaatgaaatcccattggattgtacttctcttctgaaaagtgtgctttttgaccctactggacatttattgacttaattgcttctgtttattaaaattgacctgcaaagttaaaaaaaaattaaagttgagaacaggtataagtgcacactgaatagtctaatctacatgtaacacatattttagtgtgattttctatactctaatcagcactgaattcagagggtttgactttttcatctataacacagtgactaaaagagttaagggtatatataccatcactttgggacttggtagtattattaaaaggttatttccttcactgtcaataaaagtccaaatgtttagcttaggtctgagagtcaaacaatgttaaggattgtcttaaagttccttagc

SEQ ID NO: 9513 - DNA, 1400 bp, Homo sapiens
gaggactgggaagtggagtgggcgggcaccatcctgcatccctatctgcgggaaaattgagaacatcactgctccaaagacccaagggttgcgctggccgtggcaggcagccatctacaggaggaccagcggggtgcatgacggcagcctacacaagggagcgtggttcctagtctgcagcggtgccctggtgaatgagcgcactgtggtggtggctgcccactgtgttactgacctggggaaggtcaccatgatcaagacagcagacctgaaagttgttttggggaaattctaccgggatgatgaccgggatgagaagaccatccagagcctacagatttctgctatcattctgcatcccaactatgaccccatcctgcttgatgctgacatcgccatcctgaagctcctagacaaggcccgtatcagcacccgagtccagcccatctgcctcgctgccagtcgggatctcagcacttccttccaggagtcccacatcactgtggctggctggaatgtcctggcagacgtgaggagccctggcttcaagaacgacacactgcgctctggggtggtcagtgtggtggactcgctgctgtgtgaggagcagcatgaggaccatggcatcccagtgagtgtcactgataacatgttctgtgccagctgggaacccactgccccttctgatatctgcactgcagagacaggaggcatcgcggctgtgtccttcccgggacgagcatctcctgagccacgctggcatctgatgggactggtcagctggagctatgataaaacatgcagccacaggctctccactgccttcaccaaggtgctgccttttaaagactggattgaaagaaatatgaaatgaaccatgctcatgcactccttgagaagtgtttctgtatatccgtctgtacgtgtgtcattgcgtgaagcagtgtgggcctgaagtgtgatttggcctgtgaacttgggctgtgccagggcttctgacttcagggacaaaactcagtgaagggtgagtagacctccattgctggtaggctgatgccgcgtccactactaggacagccaattggaagatgccagggcttgcaagaagtaagtttcttcaaagaagaccatatacaaaacctctccactccactgacctggtggtcttccccaactttcagttatacgaatgccatcagcttgaccagggaagatctgggcttcatgaggccccttttgaggctctcaagttctagagagctgcctgtgggacagcccagggcagcagagctgggatgtggtgcatgcctttgtgtacatggccacagtacagtctggtccttttccttccccatctcttgtacacattttaataaaataagggttggcttctgaactac

SEQ ID NO: 9514 - DNA, 600 bp, Homo sapiens
ttactggaaggttatacctctcattacccacacacgaaggaaagcaggaccttcatcccagtgacctcagctaagactgggtcctttggagttactgcagttactgttggagattccaactctaatgtcaatcgttccttatcaggagaccaagacacattccaccccagtggggggtcccataccactcatggatctgaatcagatggacactcacatgggagtcaagaaggtggagcaaacacaacctctggtcctataaggacaccccaaattccagaatggctgatcatcttggcatccctcttggccttggctttgattcttgcagtttgcattgcagtcaacagtcgaagaaggtgtgggcagaagaaaaagctagtgatcaacagtggcaatggagctgtggaggacagaaagccaagtggactcaacggagaggccagcaagtctcaggaaatggtgcatttggtgaacaaggagtcgtcagaaactccagaccagtttatgacagctgatgagacaaggaacctgcagaatgtggacatgaagattggggtgtaacacctacaccattatcttggaaagaaacaaccgttg

SEQ ID NO: 9515 - DNA, 600 bp, Homo sapiens
cccaagacactttaaagatacattatttttctccaggacgtaattcataggaatattaagccttttgtaaatgtccctttagatggtttctcataaggtaaaagaaacttatttccaagcaggaccacctttattgtgtccccagatcacctcacagggcagaaaaatgcccctcagtctgggagaagacctagagagaattatggactccttactggtttttggaaagcaaccaacagctaattccaacaccatgggcagcccatacagtctctaattatctgagaaaatcaaatgatgctgttacaataattacgctggtacaagttaataaaagtgccatgttacagtcaaacagctatgttgctatctataccattgagggcatagttttaaaaagtagttatgctacctgattgtataaggaacaaaactgagagaaaaaatctaaaaggccgcctatgattgaatggaaagattttttttagttgaatttaaataatgtgacttgggggagcctttacaaagagtctttatacctcccttcagcttcctcattttcccttggattacttttgctcaattaaatatgaatttcct

SEQ ID NO: 9516 - DNA, 600 bp, Homo sapiens
actgttggagattccaactctaatgtcaatcgttccttatcaggagaccaagacacattccaccccagtggggggtcccataccactcatggatctgaatcagatggacactcacatgggagtcaagaaggtggagcaaacacaacctctggtcctataaggacaccccaaattccagaatggctgatcatcttggcatccctcttggccttggctttgattcttgcagtttgcattgcagtcaacagtcgaagaaggtgtgggcagaagaaaaagctagtgatcaacagtggcaatggagctgtggaggacagaaagccaagtggactcaacggagaggccagcaagtctcaggaaatggtgcatttggtgaacaaggagtcgtcagaaactccagaccagtttatgacagctgatgagacaaggaacctgcagaatgtggacatgaagattggggtgtaacacctacaccattatcttggaaagaaacaaccgttggaaacataaccattacagggagctgggacacttaacagatgcaatgtgctactgattgtttcattgcgaatcttttttagcataaaattttctactcttttt

SEQ ID NO: 9517 - DNA, 1400 bp, Homo sapiens
tcgatcacccattgcagaagcagttttcaggaaacttgtaaccgatcaaaacatctcagagaattggagggtagacagcgcggcaacttccgggtatgagatagggaacccccctgactaccgagggcagagctgcatgaagaggcacggcattcccatgagccacgttgcccggcagattaccaaagaagattttgccacatttgattatatactatgtatggatgaaagcaatctgagagatttgaatagaaaaagtaatcaagttaaaacctgcaaagctaaaattgaactacttgggagctatgatccacaaaaacaacttattattgaagatccctattatgggaatgactctgactttgagacggtgtaccagcagtgtgtcaggtgctgcagagcgttcttggagaaggcccactgaggcaggttcgtgccctgctgcggccagcctgactagaccccaccctgaggtcctgcatttctcagtcggtgtgtaatcacgttccagggcccaaagcccagctctttgttcagttgacttactgtttcttaccttaaaaagtaattgtagatggaaatcagttgtgtttggcaggagaatcaataaaaatctttgattcagacagcttatggggtattttaagcattcttagactagttgaacatctcactttgccccagttacaaaaatagtagaacaagcaacataaaacaatgaaggaaaacctcacttgaaggcccaggtcaacatctaagcctgttgagacttagataatcgagtctacctcttcagtaggtttgtgtggatggcctggagggcaggtgccctctgctccccagtgctacctctctcttccctagggccttttgtggattgacagtagtcccctccgtaggagctcacagtctagattagaagtgttttaatttctacacacccatagtgcacacttgtatattgaaaagatagggaagagagaaacatttatggaatcagtcgttggcaccttcaatacttcatgatttttgtcgagtttacttcatgaggaggtcagcccattggctcccatctgaaccactttgcctctgaaacttaattacatccagaaagaaggacacttgtatgctagtctatggtcagttgaggaatatgactgtttttatatgcacatgtaacccaaatgtccaatataaattggcttattttttaaaataattttaaaagttgggaaaagtgttattatttggcatgcttaaatattgaataagtattcttcatcagcatttaataaatgtataggcagatgtaaggtaatttctgtgtattttgagataatgtcaaaatcatgaatatttcaaaataaactggggagttataaaaatacaactagagatat

SEQ ID NO: 9518 - DNA, 600 bp, Homo sapiens
tagctgtgaacatgccagggttgcattcacattcctgggtacccagtgctgatggggtgtgcccacgtggggacatgtccttggcgtgcttcctcagagtggcttttcctccattaatacatatatgagtactgaaaaattaagttgcatagctgctttgcagtggtttcagaggcagatctgagaagattaaaaaaaaatctcaatgtatcagctttttttaaaggacattactagaaaattaaacagtattttttaacatgtgtgactttcatgcttctggggttggagcttaaagatccaaactgagaaagcaggccgggcatggtggctcatgcctgtaatcccaacactttgggaggccaaggagggtggatcacttaaggtcaggagtttgagaccagcctggccaacatggcaaaaccctgtctctactaaaaacataaaaattagctgggggtggtagcacatacctgtaatcccagctactcaggaggctgaggcaggagaatttgcttgatcctgggaggcagaggttgtagtgagccgagatcgcgccatcgcactccagcctgggtgacaagagcaaaactccatctc

SEQ ID NO: 9519 - DNA, 600 bp, Homo sapiens
taaaggagcacaagaacccctccctgccctccttgggcaccctgcctccaggagatggaggcacgtgataagacaaaagactgcaccaactcaccctgacacagttacatagtcactgagagtggggaagatgggacagcccacatgctgcataagatgggccttatgcagcaggcccaggtcgtcattaaggagtgacccctttcctgtaacctgcactttgggatggtagaagtttctttacctgctgacaggtttggtggcactgctggttacccctgggccctgaatggagctaaaatcacatttggtaccagcagcacctatcccaagtgtgatccttcatcccaacactccctcttggagctgttccctgggtagagctagcatgccagcagcttctgcaggctccaaacccaggccagaagccagacccaggcctgctgcctgcatctgcattccctccttccagtgttccttagaacagacatttaggtatctcaggtcctttctaagtgtccctttcctatgtatgcatttcctttttttgtctttactatgcactttagcttataaagccaattaaaaacaatgattgag

SEQ ID NO: 9520 - DNA, 1400 bp, Homo sapiens
cctggaggacctcatccagggcctgacgggcgagaagcctcgggcagatgacatgaaatgggcccagaagatcaaataacttctccgagcctgctacctggttgccaaccttccctagcccccaaaccgaagccatctgccaaattccagcctctttgagctggcccctccagatggagaggacatctcctgggctgggcccaggtaccccagcccacccctcatgacacagaatacttgagccactgatttttcatttcttttttttttttttcctcggcccctcctcagccacctgagttgctctatctgcaagcctgactctgccagcctcccctggtagagaggaggtttacccactccctgcacgcctgccgtccctgccccgctgggcagcccttcagtgtggctggcgttggggccagtgagttgcctctttccctccttgtctggccccagtggtctggggagcccccaggcacacctaagcgtcgtggagcattgttctgccacagccctgcatactgaccccgggaggctgggcaggtggacagccccagccaccaccttcagcctagcctgtcccccaaggatggtgaagctcagcaggggtctgagggtagccggccagaagaggctggaacctcctgctcaagtctagacccctacttctctgctgcccccaccctgccagagctgatgtttccaataccaagatgtcttcacagggcacagcccctgcagagcatcttggtcatttggaagaggacacggtatcccctctggccagagtatgtcagagaaggaagagtagggcttttttgttttgtttttttttaaaggtgcttgcttgtttaatgtaaataatagaaagccttaatatcttttctgtaacacggagtaatattttaatgtcatgttttggatgtacataatatatttataacaaagcagcaagagtctacttaaccttggctgcctcgtggtgtttcctggctgggtggggtggggggtatcaaggagcctgggacgtgaggccccactctcgccccattcccagctccccccaaccctggcctcaggatgagagctgtcacctgagacagtgaattaatgttgacatctgctccaaagccttttggaggggattgggtgaggacagtggtctttcctgttgatcatgatgataaagtaatgatggctgatccctatttgtgacttccttcagcaaatattcactggcacctggtgtgtgccaggctctgtcctgtacacaggtacagcggtgaaagaaccaacaaagacctatcctggtggagctgacctcctgggaaaagagtcaataaacaaataaatgcacatggaaattcaggtggtgatttgtgaagaaaatcaaacag

SEQ ID NO: 9521 - DNA, 600 bp, Homo sapiens
gttaccgtgggcaactctgtcaacgaaggcttgaaccaacctacggatgactcgtgctttgacccctacacagtttcccattatgccgttggagatgagtgggaacgaatgtctgaatcaggctttaaactgttgtgccagtgcttaggctttggaagtggtcatttcagatgtgattcatctagatggtgccatgacaatggtgtgaactacaagattggagagaagtgggaccgtcagggagaaaatggccagatgatgagctgcacatgtcttgggaacggaaaaggagaattcaagtgtgaccctcatgaggcaacgtgttatgatgatgggaagacataccacgtaggagaacagtggcagaaggaatatctcggtgccatttgctcctgcacatgctttggaggccagcggggctggcgctgtgacaactgccgcagacctgggggtgaacccagtcccgaaggcactactggccagtcctacaaccagtattctcagagataccatcagagaacaaacactaatgttaattgcccaattgagtgcttcatgcctttagatgtacaggctgacagagaagattcccgagagtaa

SEQ ID NO: 9522 - DNA, 1400 bp, Homo sapiens
tagaaagaacatggccaggtcaccccacctcctgggcggcaggcccaactccaccagtggtccactgtgtgacttccctgctccctctaagcaagtcactcctctcctctgggtctctgtttccttacctataaaatgagaacgtttcttcatgtgatctcaagtcccttttaaaatcgctaggattctttgaaaaccttttctatcatctagtgcagagaacttgttgaggaagttgggattggaatgagcctcagcagatgggcaaggtttgaataggaagagaagagacatttcaggagaaagaaacaacatagagagacagatgtaggtataagatatggtaataagccaaaatgtattaagagttataaatgcatgaaatcatcatcaaagcttgcttagtgattaactgcttatattttgccagtgcatatgatgtgacatttttctttaactcaaacactaaattacgatgtcctcaggttatcataaaccccatttgacttcatgcctctactctctcagggctggcgctgtgacaactgccgcagacctgggggtgaacccagtcccgaaggcactactggccagtcctacaaccagtattctcagagataccatcagagaacaaacactaatgttaattgcccaattgagtgcttcatgcctttagatgtacaggctgacagagaagattcccgagagtaaatcatctttccaatccagaggaacaagcatgtctctctgccaagatccatctaaactggagtgatgttagcagacccagcttagagttcttctttctttcttaagccctttgctctggaggaagttctccagcttcagctcaactcacagcttctccaagcatcaccctgggagtttcctgagggttttctcataaatgagggctgcacattgcctgttctgcttcgaagtattcaataccgctcagtattttaaatgaagtgattctaagatttggtttgggatcaataggaaagcatatgcagccaaccaagatgcaaatgttttgaaatgatatgaccaaaattttaagtaggaaagtcacccaaacacttctgctttcacttaagtgtctggcccgcaatactgtaggaacaagcatgatcttgttactgtgatattttaaatatccacagtactcactttttccaaatgatcctagtaattgcctagaaatatctttctcttacctgttatttatcaatttttcccagtatttttatacggaaaaaattgtattgaaaacacttagtatgcagttgataagaggaatttggtataattatggtgggtgattattttttatactgtatgtgccaaagctttactactgtggaaagacaactgttttaataaaagatttacattcc

SEQ ID NO: 9523 - DNA, 600 bp, Homo sapiens
ggacatgcattgcctactcgcagcttcgagatcagtgcattgttgatgacatcacttacaatgtgaacgacacattccacaagcgtcatgaagaggggcacatgctgaactgtacatgcttcggtcagggtcggggcaggtggaagtgtgatcccgtcgaccaatgccaggattcagagactgggacgttttatcaaattggagattcatgggagaagtatgtgcatggtgtcagataccagtgctactgctatggccgtggcattggggagtggcattgccaacctttacagacctatccaagctcaagtggtcctgtcgaagtatttatcactgagactccgagtcagcccaactcccaccccatccagtggaatgcaccacagccatctcacatttccaagtacattctcaggtggagacctgtgagtatcccacccagaaaccttggatactgagtctcctaatcttatcaattctgatggtttctttttttcccagcttttgagccaacaactctgattaactattcctatagcatttactatatttgtttagtgaacaaacaatatgtggtcaattaaattgacttgtagactg

SEQ ID NO: 9524 - DNA, 1400 bp, Homo sapiens
tgcctctcacctgtaagatattattttatcctatgttgaagggagggggaaagtccccgtttatgaaagtcgctttctttttattcatggacttgttttaaaatgtaaattgcaacatagtaatttatttttaatttgtagttggatgtcgtggaccaaacgccagaaagtgttcccaaaacctgacgttaaattgcctgaaactttaaattgtgctttttttctcattataaaaagggaaactgtattaatcttattctatcctcttttctttctttttgttgaacatattcattgtttgtttattaataaattaccattcagtttgaatgagacctatatgtctggatactttaatagagctttaattattacgaaaaaagatttcagagataaaacactagaagttacctattctccacctaaatctctgaaaaatggagaaaccctctgactagtccatgtcaaattttactaaaagtctttttgtttagatttattttcctgcagcatcttctgcaaaatgtactatatagtcagcttgctttgaggctagtaaaaagatatttttctaaacagattggagttggcatataaacaaatacgttttctcactaatgacagtccatgattcggaaattttaagcccatgaatcagccgcggtcttaccacggtgatgcctgtgtgccgagagatgggactgtgcggccagatatgcacagataaatatttggcttgtgtattccatataaaattgcagtgcatattatacatccctgtgagccagatgctgaatagatattttcctattatttcagtcctttataaaaggaaaaataaaccagtttttaaatgtatgtatataattctcccccatttacaatccttcatgtattacatagaaggattgcttttttaaaaatatactgcgggttggaaagggatatttaatctttgagaaactattttagaaaatatgtttgtagaacaattatttttgaaaaagatttaaagcaataacaagaaggaaggcgagaggagcagaacattttggtctagggtggtttctttttaaaccattttttcttgttaatttacagttaaacctaggggacaatccggattggccctcccccttttgtaaataacccaggaaatgtaataaattcattatcttagggtgatctgccctgccaatcagactttggggagatggcgatttgattacagacgttcgggggggtggggggcttgcagtttgttttggagataatacagtttcctgctatctgccgctcctatctagaggcaacacttaagcagtaattgctgttgcttgttgtcaaaatttgatcattgttaaaggattgctgcaaataaatacactttaatttcagtc

SEQ ID NO: 9525 - DNA, 1400 bp, Homo sapiens
ttcactactcagaatcagaaatcccaggatgtggaactctgggagggagaagtggtcaaagagctctctgtggaagaacagataaagagaaatcggtattatgatgaggatgaggatgaagagtgacaaattgcaatgatgctgggccttaaattcatgttagtgttagcgagccactgccctttgtcaaaatgtgatgcacataagcaggtatcccagcatgaaatgtaatttacttggaagtaactttggaaaagaattccttcttaaaatcaaaaacaaaacaaaaaaacacaaaaaacacattctaaatactagagataactttacttaaattcttcattttagcagtgatgatatgcgtaagtgctgtaaggcttgtaactggggaaatattccacctgataatagcccagattctactgtattcccaaaaggcaatattaaggtagatagatgattagtagtatattgttacacactattttggaattagagaacatacagaaggaatttaggggcttaaacattacgactgaatgcactttagtataaagggcacagtttgtatatttttaaatgaataccaatttaattttttagtatttacctgttaagagattatttagtctttaaattttttaggttaattttcttgctgtgatatatatgaggaatttactactttatgtcctgctctctaaactacatcctgaactcgacgtcctgaggtataatacaacagagcactttttgaggcaattgaaaaaccaacctacactcttcggtgcttagagagatctgctgtctcccaaataagcttttgtatctgccagtgaatttactgtactccaaatgattgctttcttttctggtgatatctgtgcttctcataattactgaaagctgcaatattttagtaataccttcgggatcactgtcccccatcttccgtgttagagcaaagtgaagagtttaaaggaggaagaagaaagaactgtcttacaccacttgagctcagacctctaaaccctgtatttcccttatgatgtcccctttttgagacactaatttttaaatacttactagctctgaaatatattgatttttatcacagtattctcagggtgaaattaaaccaactataggcctttttcttgggatgattttctagtcttaaggtttggggacattataaacttgagtacatttgttgtacacagttgatattccaaattgtatggatgggagggagaggtgtcttaagctgtaggcttttctttgtactgcatttatagagatttagctttaatattttttagagatgtaaaacattctgctttcttagtcttacctagtctgaaacatttttattcaataaagattttaattaaaatttg

SEQ ID NO: 9526 - DNA, 1400 bp, Homo sapiens
aagtataataaaaattaaaaaaaataaagatctgatgttttgttaaacctgataagttttgtactagtaaaattctagaattctaagcatagatttaaacattgctgaaaaatgagtttgtgtgttttatgccttccaggggacagttaagtgggcagtatttatttaatatacctgcttcagccccatttgaattgtaagcactctgaaagcatgtctcatagtcgtctgtatccctggtgtctcccacagtgccctgcttacctgcaggcctttttgtattttctgtccaagtaccctaatagggtggtgcagaatggatgtacagatctgtggatgacctcagcagcttaatccaaggcacccctcgggaagcctgaaatgtctttgaagtcttatgtattatcctaaaatccattgacattttatattctaccctacaaaataagtatgtgttactatttttctttccaaattgttgagtaaaactcattgtattcatcctgtgactttgtactgcccagcctagctcattgttttttacctgcctcatttcctgagctgggcattgctcagtttcagaaggtatcaggtgtcattgaacacctgatatgaaggatgtaaaagttctctcttttctatctaggtgtctatattttaattggaggctagatgatatttgcaacctgtctttatctaaagcattgtcagtgaactcacctacttaggaattcatatgcaccttagttaaaaaaaatgtattgtggttttaaattttttcctcaaccagtgtaatatgaagaattctttttattttttaagagattctaagaaaatgttcacattatcaaaactagaattctatcaacttttaagacatttaattattttggaataaaatgtgaatttttagacagaaaatggcaaaaactagtatgaaaatatatcatgttacatgtgaaattatgacagttgttaacctattaagttaatcatgttaaatatgtaataatttggggctaaatgaatgtatattataaattatatcagtgaagatcaaccatgtgtgtgctttaattattaattttaaagagtgagctctaagaatgaacacatcagatgtgagtattattttaaaaaatcaaaaagaattatctagttattgtatatatgtttttaatattatgactctggtcctttggaatgaatgctattattgcttatctgtatttttttccttttttctttagaaagcacaacatcaggaagtgtgtttgaaagaagtacaaaatagtcttgagaagtcggaaaatcaaaatgagagtattaagaattatttacagtttcttaaaacttcttatgtaacaatgtttgaataaattgtcaaatttattttctct

SEQ ID NO: 9527 - DNA, 1400 bp, Homo sapiens
ccaacaaaaagatcgagaagcagctgcagaaggacaagcaggtctaccgggccacgcaccgcctgctgctgctgggtgctggagaatctggtaaaagcaccattgtgaagcagatgaggatcctgcatgttaatgggtttaatggagagggcggcgaagaggacccgcaggctgcaaggagcaacagcgatggtgagaaggcaaccaaagtgcaggacatcaaaaacaacctgaaagaggcgattgaaaccattgtggccgccatgagcaacctggtgccccccgtggagctggccaaccccgagaaccagttcagagtggactacatcctgagtgtgatgaacgtgcctgactttgacttccctcccgaattctatgagcatgccaaggctctgtgggaggatgaaggagtgcgtgcctgctacgaacgctccaacgagtaccagctgattgactgtgcccagtacttcctggacaagatcgacgtgatcaagcaggctgactatgtgccgagcgatcaggacctgcttcgctgccgtgtcctgacttctggaatctttgagaccaagttccaggtggacaaagtcaacttccacatgtttgacgtgggtggccagcgcgatgaacgccgcaagtggatccagtgcttcaacgatgtgactgccatcatcttcgtggtggccagcagcagctacaacatggtcatccgggaggacaaccagaccaaccgcctgcaggaggctctgaacctcttcaagagcatctggaacaacagatggctgcgcaccatctctgtgatcctgttcctcaacaagcaagatctgctcgctgagaaagtccttgctgggaaatcgaagattgaggactactttccagaatttgctcgctacactactcctgaggatgctactcccgagcccggagaggacccacgcgtgacccgggccaagtacttcattcgagatgagtttctgaggatcagcactgccagtggagatgggcgtcactactgctaccctcatttcacctgcgctgtggacactgagaacatccgccgtgtgttcaacgactgccgtgacatcattcagcgcatgcaccttcgtcagtacgagctgctctaagaagggaacccccaaatttaattaaagccttaagcacaattaattaaaagtgaaacgtaattgtacaagcagttaatcacccaccatagggcatgattaacaaagcaacctttcccttcccccgagtgattttgcgaaacccccttttcccttcagcttgcttagatgttccaaatttagaaagcttaaggcggcctacagaaaaaggaaaaaaggccacaaaagttccctctcactttcagtaaaaataaataaaacagcagcagcaaacaaataaaa

SEQ ID NO: 9528 - DNA, 1400 bp, Homo sapiens
ctggagaatctggtaaaagcaccattgtgaagcagatgaggatcctgcatgttaatgggtttaatggagagggcggcgaagaggacccgcaggctgcaaggagcaacagcgatggtgagaaggcaaccaaagtgcaggacatcaaaaacaacctgaaagaggcgattgaaaccattgtggccgccatgagcaacctggtgccccccgtggagctggccaaccccgagaaccagttcagagtggactacatcctgagtgtgatgaacgtgcctgactttgacttccctcccgaattctatgagcatgccaaggctctgtgggaggatgaaggagtgcgtgcctgctacgaacgctccaacgagtaccagctgattgactgtgcccagtacttcctggacaagatcgacgtgatcaagcaggctgactatgtgccgagcgatcaggacctgcttcgctgccgtgtcctgacttctggaatctttgagaccaagttccaggtggacaaagtcaacttccacatgtttgacgtgggtggccagcgcgatgaacgccgcaagtggatccagtgcttcaacgatgtgactgccatcatcttcgtggtggccagcagcagctacaacatggtcatccgggaggacaaccagaccaaccgcctgcaggaggctctgaacctcttcaagagcatctggaacaacagatggctgcgcaccatctctgtgatcctgttcctcaacaagcaagatctgctcgctgagaaagtccttgctgggaaatcgaagattgaggactactttccagaatttgctcgctacactactcctgaggatgctactcccgagcccggagaggacccacgcgtgacccgggccaagtacttcattcgagatgagtttctgaggatcagcactgccagtggagatgggcgtcactactgctaccctcatttcacctgcgctgtggacactgagaacatccgccgtgtgttcaacgactgccgtgacatcattcagcgcatgcaccttcgtcagtacgagctgctctaagaagggaacccccaaatttaattaaagccttaagcacaattaattaaaagtgaaacgtaattgtacaagcagttaatcacccaccatagggcatgattaacaaagcaacctttcccttcccccgagtgattttgcgaaacccccttttcccttcagcttgcttagatgttccaaatttagaaagcttaaggcggcctacagaaaaaggaaaaaaggccacaaaagttccctctcactttcagtaaaaataaataaaacagcagcagcaaacaaataaaatgaaataaaagaaacaaatgaaataaatattgtgttgtgcagcattaaaaaaaatcaaaataaaaattaaatgtgagc

SEQ ID NO: 9529 - DNA, 1400 bp, Homo sapiens
tcgtctgatgttataatattaatattactgaatcattggttttgcctgcacctcacagaaatgttactgtgtcacttttccctcgggaggaaattgtttggtaatatagaaaggtgtatgcaagttgaatttgctgactccagcacagttaaaaggtcaatattcttttgacctgattaatcagtcagaaagtccctataggatagagctggcagctgagaaattttaaaggtaattgataattagtatttataactttttaaagggctctttgtatagcagaggatctcatttgactttgttttgatgagggtgatgctctctcttatgtggtacaataccattaaccaaaggtaggtgtccatgcagattttattggcagctgttttattgccattcaactagggaaatgaagaaatcacgcagccttttggttaaatggcagtcaaaattttcctcagtgtatttagtgtgttcagtgatgatatcactggttcccaactagatgcttgttggccacgggaagggaaatgacttgttctaattctaggttcacagaggtatgagaagcctgaactgaagaccattttcaagagggacggtatttatgaatcagggttaggctccatatttaaagatagagccagtttttttttttaaatagaacccaaattgtgtaaaaatgttaattgggttttttaaacattgttttatcaagtcactgttaagtagaagaaagccatggtaaactgatacataacctaaattataaaagcagaaacctaactcactcgtcaagggaagttaccttttgaggaaagttaaagtacttttttccctatctgtatctatagcaacaacccagaacttacaaacttctccaaagattttattgattgttatatcaaatcagaatgtaaacatgaactcttgcatatatttaaaattgtgttggaacatttgaacatgaatgctgtttgtggtacttaagaaattaattcagttggattatcattatgtgatactggcagattgcagtgcaaccttatgccaataaaatgtaatttaacagccccagatattgttgaatattcaacaataacaagaaaagcttttcatctaagttttatgctttaattttttttctttttttttctttttcttttgtttccttggtactaattttaatttttatttggaagggagcagtataaagcttatttgtatttagtagtgtatctcatagatacagacaaggcaagagatgataagctgtttaaatagtgtttaatattgattgggggtggggagaaagaaaaagtgtattacttaaagatactatatacgttttgtatatcattaaatctttaaaagaaatgaaataaatttattgtttacag

SEQ ID NO: 9530 - DNA, 600 bp, Homo sapiens
gaggagttcgctgcaggtaacagagctcgggctcaggggctggtttgggaggggagtggcacacaggtgggcatctgggtaccgaggatagtgcccccgagttcactgcggaaagcctggcagatgcctggcatatacagataggaagaaacctggcttgtgaggacgcgtccacagggccatctgttagccccggcccggctctgtccccaccgtgcacactgccagaccccgcctctcgtgtctgtccagctgttttggtggcatcttcccaggagggaagggagtccccgtctcgcgcccttgtgctacctgctggtgcaggtaccagtgtctgtgacgagctcaggagggctctgacatggccggggtggctgtcatgcgcccgagtgggccttggggtcccctgctgcagggcctgggttccagggtgacgtgaaggggcagcgctaacgatgcctcctgccctcgtggctgctcactgcctgacgccatccagctctggagcaaaacaggcctggaactttccagaaggggctgggacagagccctggggctggtgcacactcgccgtctggccttccccaggtccacgcggcc

SEQ ID NO: 9531 - DNA, 600 bp, Homo sapiens
gtttttggtacccccttttgttccagaaccgtcctgcctctcgcttggggacaggggggctttggatggcactggtgtgcacctggacccagccccggcctggcaggatccagggatgggtgcctgggatcctggggggagggaggcaggggacgcccttctggagctgggctcggagggtcctgccccatccagccctcggctctctgtgttctctgtccctagcctcaaaccctcttctggcagcgctagtgagatgccttagtctgtgggggtgggtgggggactggggccccgttttcctttgtgagtcttggttggccccagccctggcaggggcctgtctggagcaggggtaggtagggctgtgggttccagaactctataactgggcccctctccagtgtccaggggcttggagagacctgcgcccacccctccactctcccaggagtcgctgatcactgggacctggttccagccgtttgcaggggaggcggctccgagaggcgtgtgctttccgtgggtggcgcccctcccccgccctgcctggcctcatccttgtatttaattaattaaacaagcccctttttaaaccct

SEQ ID NO: 9532 - DNA, 1400 bp, Homo sapiens
tggctgtggagctgggcgtgctgctcgtccggccccggcccggaaccgggctgggtagagtgatgcggaccctcctgctggtgctgtggctggcgacgcgcggaagcgcgctctactttcacatcggagagacggagaagaagtgctttattgaggagatcccggacgagaccatggtcataggaaactaccggacgcagctgtatgacaagcagcgggaggagtaccagccggccaccccggggcttggcatgtttgtggaggtgaaggacccagaggacaaggtcatcctggcccggcagtatggctccgagggcaggttcactttcacttcccatacccctggtgagcaccagatctgtcttcactccaattccaccaagttctccctctttgctggaggcatgctgagagttcacctggacatccaggtaggtgaacatgccaatgactatgcagaaattgctgctaaagacaagttgagtgagttgcagctacgagtgcgacagctggtggaacaagtggagcagatccagaaagagcagaactaccagcggtggcgagaggagcgcttccggcagaccagtgagagcaccaaccagcgggtgctgtggtggtccattctgcagaccctcatcctcgtggccatcggtgtctggcagatgcggcacctcaagagcttctttgaagccaagaagcttgtgtagctgtcccaggcgtcacaacccatcctcccaggctgggggagaaaggacctcctggaactgacttcttctgtcaggaggactggtttccagccatacctgttctggaagggagaggggctggaggcacccacaggcacaagctgaaggcagcagcttggctaatactgagcaggtagtggggcaaattcctgccctctctctctggcctctgggccgtttggtagtaatcacccaggggctggtaaagcccctcctcttggcacctcagaatcacagtgttactgatcagggatgtgaggctgctgttgggggtggggggaggggaatgggcaggcaagccagtcttctgtcttcctttgctaacttagggttttgagcaggttggggtatggtgcctgtcatacccacctgccaccctgggaacctcactgttctctctttcagcctagacctgctgatccagggtgtgtgtgagttgagggtgggtggaggggtttgcagtgtgggaatgtggccctgcagttgacctgagctgcttcacatggttgtccattctggggcttaaagaactgggaccagaccaagtagaggccttggtgctggttggggtggggcctgcagagtcttagttactgatttcattttcaataaatgtaggtttgttacatgagtttcccaataaaaaaaaaaatg

SEQ ID NO: 9533 - DNA, 600 bp, Homo sapiens
agccactgtgagtgaaaattttgaggctcctctgcccagaagttggcatgtcctgtggaattgcacaaattctacagagaagggaaatctaaatcgtcttcagatggagcttgtgttgcgagctctggagagggggttgtctttctacactgcatctcccatccttcctaacgagtcacggagctgtcgactccgccttcttggctttagttaacaggttcttcttgtgtagtcacatcaacgtcgggtcacatgggaatgtggtaaagcctcattactgtagagttcagacatgatcacttaaaaagagctttattgggccgggcgcggtggcttactcctataatcccagcactttggggggccgaggcaggcagatcacctgaggtcaggagttcgagaccagcctggctaacatggcaaaaccctatctcttttaaaaatacaaaaataagcagggcgtggtggcgggcacctgtaatcccacctactcaggaggctgaggcacaagaattgcgtaaacctgggaggtggaggttgcagtgagctgaaattgcaccgctgcactccagcctgggcaacaaagtgagactccttctc

SEQ ID NO: 9534 - DNA, 600 bp, Homo sapiens
atctgtgtcctactacaggaaaataattgaaggcactgaagttgtccaggaaattcagaataagcagaaagtaggaccaagtgatgacacccctcgaaggggcccagagtccctgcccgtgggacatcatgacatcatcactgatgtcgccacattccagaccacacagggcttcatcgtaactgcttctagagatgggattgtgaaggtgtggaaataaaacctactgatttgtataaattttaatagttataaatataatactataactcgagaaaaggcatttctagagaacagattcatttgcttaattttcaaaattatgtctccatattactgtttcatgactgactgactaaatgacacccaaaatggttaagatgtacttgactagtttacttatgcatctctttgcaagaatcagccagccaacaatgtctgggatttttattgtatatgttatagaggtgagaaatgtaaaatatgaaaatgaatatgtttattttgtattgaaaaagatggttgaaaagatggttgtaagctattatagtataaacacatttttgctattaaaaatgctattcaaagcagttaaactgt

SEQ ID NO: 9535 - DNA, 600 bp, Homo sapiens
gtatcagcagtatgcccagcagtggaaccagtactatcagaaccagggccagtggccgccatactacgggaactacgactacgggagctactccgggaacacacagggtggcacaagtacacagtagccagtgtgacccagaggctcccggaggcccctgccggcttcctccaccagcgcctgcctcggcccctcctctgcccccgccagatcccgtggtgctggggatggggtcatcccagggctgcctccctccagcccactgcctcccctctgaggggcttccttcccctccatagggccaggcatttttttctggattcaaacaggcaacaatgaccttttattttctgtttgtccccacctccccagccttccacctcctgttcttcctaccttcttcctttttgactaaataatccccacctcccttgatcatacagtgaggctacagtgactgaggggagaatcccctcctgttcactctcccaaccctgctccagcccctcagcttcccagaccctcatgcagttggttgtaaattctcccaggagctgttttactgtctacttttcaggattaaaaaaaaaatcaaaactt

SEQ ID NO: 9536 - DNA, 600 bp, Homo sapiens
ctcagcccagctataaccagtatcagcagtatgcccagcagtggaaccagtactatcagaaccagggccagtggccgccatactacgggaactacgactacgggagctactccgggaacacacagggtggcacaagtacacagtagccagtgtgacccagaggctcccggaggcccctgccggcttcctccaccagcgcctgcctcggcccctcctctgcccccgccagatcccgtggtgctggggatggggtcatcccagggctgcctccctccagcccactgcctcccctctgaggggcttccttcccctccatagggccaggcatttttttctggattcaaacaggcaacaatgaccttttattttctgtttgtccccacctccccagccttccacctcctgttcttcctaccttcttcctttttgactaaataatccccacctcccttgatcatacagtgaggctacagtgactgaggggagaatcccctcctgttcactctcccaaccctgctccagcccctcagcttcccagaccctcatgcagttggttgtaaattctcccaggagctgttttactgtctacttttcaggatt

SEQ ID NO: 9537 - DNA, 1293 bp, Homo sapiens; identical to SEQ ID NO: 4302

SEQ ID NO: 9538 - DNA, 600 bp, Homo sapiens
actacccatcagttaattcatactggagaaaaaccgttcaaatgtaatgaatgtggcaagctcttcactcaaaattcacaccttataagtcattggagaattcacactggagagaaaccttacaagtgcaatgagtgcggcaaagcctttagtgttcgttcaagcctagcaatccatcagacaatccacactggagaaaaaccttacaaatgtaatgaatgtggcaaagtctttaggtacaattcatacctcggaaggcatcggagagttcatactggtgagaaaccttacaagtgtaatgaatgtggcaaagccttcagtatgcattcaaacctagctacccatcaggtcatccatactggaacaaaacctttcaaatgcaatgaatgcagcaaggttttcactcaaaattcacaacttgcaaatcatcgaagaattcatactggagagaaaccttacaagtgtaatgagtgtgggaaagccttcagtgttcgttcaagtctgactacccatcaggcaatccattctggagagaaaccttacaaatgtattgaatgtggcaagagcttcactcaaaaatcacaccttagaagtcatcgg

SEQ ID NO: 9539 - DNA, 600 bp, Homo sapiens
gacaaagggctaatatccagaatctacaaagaacttaaacaaatttccaagaaaaaatcaaacaatcccatcaaaaagtgggcaaaggatatgaacagacacttctcaaaagaagacattcatgcagccaacagacacatgaaaaaacacatgcacacgtacattgactgcagcactatttacgatagcaaagacttggaaccaacccaaatcaatgatagactggattaagaaaatgtggcacatatacaccatggaatactatgcagccaaaaaaaggatgagttcatgtcttttgtagggacatggatgaagctggaaaccatcattctgagaaaactatcacaaggacagaaaaccaaacactgcatgttctcactcataagtgggaactgaacaatgagaacaccaggacacagggtggggaacatcacacactggggcctgttgtggggtggggggagaggggagggatagcattaggagatatacctaatgtaaatgacgagttaacgggtgcagcacaccaacatggcacatgtatacatacgtaacaaacctgcatgttgtgcacatgtaccctagaacttaaagtataat

SEQ ID NO: 9540 - DNA, 600 bp, Homo sapiens
cacatcaggagtgactcagggggtggtcgggggagctggagccacagccctggtcttcctgtccttctgcgtcatcttcgttgtagtgaggtcctgcaggaagaaatcggcaaggccagcagcgggcgtgggagatacgggcatagaggatgcaaacgctgtcaggggttcagcctctcaggggcccctgactgaaccttgggcagaagacagtcccccagaccagcctcccccagcttctgcccgctcctcagtgggggaaggagagctccagtatgcatccctcagcttccagatggtgaagccttgggactcgcggggacaggaggccactgacaccgagtactcggagatcaagatccacagatgagaaactgcagagactcaccctgattgagggatcacagcccctccaggcaagggagaagtcagaggctgattcttgtagaattaacagccctcaacgtgatgagctatgataacactatgaattatgtgcagagtgaaaagcacacaggctttagagtcaaagtatctcaaacctgaatccacactgtgccctcccttttatttttttaactaaaagacagacaaattcct

SEQ ID NO: 9541 - DNA, 1400 bp, Homo sapiens
cagaggaaggcctgtcctgctggaactggagccaaggggaggctgcctatgaaggcagaagatgtggatgaattcaggcactgggggtgggggggttatttataaacacaaggtggttggtttaagccaaaaggagataccatcctgataagctctgtgaaagagaagatgtgcctggtgtgtgtaatgcggctggggtatgaaaacactgagaaggagatgaaggagtgtgtgtagcatgggggtgtgtacaacttaacacctggacttttactgggggagtgggaaagtgattctgtaaccaacattagaattactttggatttgtaatcagattggttctatgatttgtctttgactattcacagataattgtaaatgctggttttataagcccaagtcattttacatttgcttttccaaaatgtattaaattggaattttttaatcctttatatacaaaaaaaatacgatcactcagtgtgtgtttctcttccccttcttagtcagcacacccagtcctttattttattctattctatttattttattttaataagtacttagcctcttctgacttctcaaaggacaatcggatacatatcttcctgaaaagaagtagttaaagttcccttgggaactagctacttggtagttacaattcccaaatgcagaacttggtcttttcatgttaaaagccttaatctcatttgggtactcaaaagagaaatcagagtttattctggttaacttgagaagccaagaaagatcatttttagcaagtatgccttccatccttggcagaggcttcccagcatcctaggctcagcttaccgggtgataggccccataagacacacacatgagcagggtgagaaatgcttgctttatagctgctccaccctcatctccagagattttgtgtctatggttgtgggtctggaaacctggcaggaaccacttctagagtacctttgcctaaactcttttagaattgaggccccaactttgatggcacatttaatacccaatttcttccataatagatatttttaatagcaggacagatggcactgattagatcaagaactatttggaagtgcctcttatgtttttttcctgcattctgtacataaagttttaagtggcaggtccagatatgtaaaatcatttctctctattttccagctggttttgttaatgattctctaggacagcaggtaaatgagttaagttgttggcttggggcaagtgaagtttgtgactatgcttgatttaataagctgagagtctcttgtttgtctgtcaaggtgccttcctctgctgaagccttacctccttctcacccagtaacggttaactcttctcttgtgtatatgcaaataaacctattattcact

SEQ ID NO: 9542 - DNA, 600 bp, Homo sapiens
ttggctcttgtgcctcttttgggccaattatgtgtggcagaccgggaaaatggtcggatccagtgttttaaaactgacaccaaagaatttgtgagagagattaagcattcatcatttggaagaaatgtatttgcaatttcatatataccaggcttgctctttgcagtgaatgggaagcctcattttggggaccaagaacctgtacaaggatttgtgatgaacttttccaatggggaaattatagacatcttcaagccagtgcgcaagcactttgatatgcctcatgatattgttgcatctgaagatgggactgtgtacattggagatgctcataccaacaccgtgtggaagttcaccttgactgagaaattggaacatcgatcagttaaaaaggctggcattgaggtccaggaaatcaaaggaaagggaagtggaggcttaaaccttggtaatttctttgcaagccgtaagggctacagtcgaaaagggtttgaccggcttagcactgagggcagtgaccaagagaaagaggatgatggaagtgaatcagaagaggagtattcagcacctctgcctgcgctcgcaccttcctcctcctga

SEQ ID NO: 9543 - DNA, 1399 bp, Homo sapiens; identical to SEQ ID NO: 4308

SEQ ID NO: 9544 - DNA, 1400 bp, Homo sapiens
cgccaaagaccccgtccggaagtactagccggacatcatgagtggctgtcgggtattcatcgggagactaaatccagcggccagggagaaggacgtggaaagattcttcaagggatatggacggataagagatattgatctgaaaagaggctttggttttgtggaatttgaggatccaagggatgcagatgatgctgtgtatgagcttgatggaaaagaactctgtagtgaaagggttactattgaacatgctagggctcggtcacgaggtggaagaggtagaggacgatactctgaccgttttagtagtcgcagacctcgaaatgatagacgaaatgctccacctgtaagaacagaaaatcgtcttatagttgagaatttatcctcaagagtcagctggcaggatctcaaagatttcatgagacaagctggggaagtaacgtttgcggatgcacaccgacctaaattaaatgaaggggtggttgagtttgcctcttatggtgacttaaagaatgctattgaaaaactttctggaaaggaaataaatgggagaaaaataaaattaattgaaggcagcaaaaggcacagtaggtcaagaagcaggtctcgatcccggaccagaagttcctctaggtctcgtagccgatcccgttcccgtagtcgcaaatcttacagccggtcaagaagcaggagcaggagccggagccggagcaagtcccgttctgttagtaggtctcccgtgcctgagaagagccagaaacgtggttcttcaagtagatctaagtctccagcatctgtggatcgccagaggtcccggtcccgatcaaggtccagatcagttgacagtggcaattaaactgtaaataacttgccctgggggcctttttttaaaaaacaaaaaccacaaaaattcccaaaccatacttgctaaaaattctggtaagtatgtgcttttctgtgggggtgggatttggaaggggggttgggttgggctggatatctttgtagatgtggaccaccaaggggttgttgaaaactaattgtattaaatgtcttttgataagccttctgctcacatttttgtgaatgtctgaagtatatagtttgtgtatattgacagagctcttttataactaaagcaaatttaatttttttgtactagaaaaaaatttgaacattttagttcttggttataaaaatgttaattcagaattagtttaatgccttaattaaactaattaatagctttggacacttaaaagagctctaaatttgcttgtacataaaggcttaatttgttttccttgttagggtcaagggtgtcctccactctttaacagctgctggacagacacattagagcagctgtttgttattgataataaaatattataaaacta

SEQ ID NO: 9545 - DNA, 600 bp, Homo sapiens
attaaatgaaggggtggttgagtttgcctcttatggtgacttaaagaatgctattgaaaaactttctggaaaggaaataaatgggagaaaaataaaattaattgaaggcagcaaaaggcacagtaggtcaagaagcaggtctcgatcccggaccagaagttcctctaggtctcgtagccgatcccgttcccgtagtcgcaaatcttacagccggtcaagaagcaggagcaggagccggagccggagcaagtcccgttctgttagtaggtctcccgtgcctgagaagagccagaaacgtggttcttcaagtagatctaagtctccagcatctgtggatcgccagaggtcccggtcccgatcaaggtccagatcagttgacagtggcaattaaactgtaaataacttgccctgggggcctttttttaaaaaacaaaaaccacaaaaattcccaaaccatacttgctaaaaattctggtaagtatgtgcttttctgtgggggtgggatttggaaggggggttgggttgggctggatatctttgtagatgtggaccaccaaggggttgttgaaaactaattgtattaaatgtcttttgataagc

SEQ ID NO: 9546 - DNA, 600 bp, Homo sapiens
tattaacttttatccggtaccacacgtccaaagttagatttaaattaacatagttttcattgtaaaattagcaatggtaaatttgtcgaagcattaaacagcctcattaaatgttcataggagcaaataaccatgtcaaataccctgttcagatatggaaaaattttgctcatttaacaaatattaagcacttactatgtgcccagcattgactaatgttcagtgaaatccttttgttaagagattcttttgaaaaacaatcagactataaatattatttattggtggaaaagagtaaaacatctatatgctataaaaaggccgggtgcggtggctcacgcctgtaatcccagcactttgggaggctgaggcgggcggatcacgaggtcaggagattgagaccatcctggctaacacggtgaaaccccatctctactaaaaatacaaaaaattagcggggccaggtggcaggcacctgtagtcccagctactcgggaggctgaggcaggagaatggtgtgaacctgggaggtggagcttgcagtgagccgagatcgcgccactgcactccagcctgggtgacagagcgagactccatctc

SEQ ID NO: 9547 - DNA, 600 bp, Homo sapiens
gaaggggagagacaggggccgcccttggctcctgtccctgctgctcctctaggcctcactcaacaaccaagcgcctggaggacgggacagatggacagacagccaccctgagaacccctctgggaaaatctattcctgccaccactgggcaaacagaagaatttttctgtctttggagagtattttagaaactccaatgaaagacactgtttctcctgttggctcacagggctgaaaggggcttttgtcctcctgggtcagggagaacgcggggaccccagaaaggtcagccttcctgaggatgggcaacccccaggtctgcagctccaggtacatatcacgcgcacagcctggcagcctggccctcctggtgcccactcccgccagcccctgcctcgaggactgatactgcagtgactgccgtcagctccgactgccgctgagaagggttgatcctgcatctgggtttgtttacagcaattcctggactcgggggtattttggtcacagggtggttttggtttagggggtttgtttgttgggttgttttttgttttttggttttttttaatgacaatgaagtgacactttgacatttcc

SEQ ID NO: 9548 - DNA, 600 bp, Homo sapiens
aatgcccaagactaccagtggatcggcctgaacgacaggaccatcgaaggggacttccgctggtcagatggacaccccatgcaatttgagaactggcgccccaaccagcctgacaacttttttgccgctggagaggactgtgtggtgatgatctggcacgagaagggcgagtggaatgatgttccctgcaattaccacctccccttcacgtgtaaaaagggcacagtggcctgcggagagccccctgtggtggagcatgccaggaccttcgggcagaagaaggaccggtatgagatcaattccctggtgcggtaccagtgcacagaggggtttgtccagcgccacatgcccaccatccggtgccagcccagcgggcactgggaggagcctcagatcacctgcacagaccccaccacctacaaacgcagactacagaagcggagctcacggcaccctcggaggagccgccccagcacagcccactgagaagagcttccaggacgcacccaggacgctgagcccaggagcctgccaggctgacgtgcatcccacccagacggtgtcctcttcttgtcgctttttgtcatataaggaatccca

SEQ ID NO: 9549 - DNA, 600 bp, Homo sapiens
gaggttccagagtaggcgggccggtgctgtgaggcttcacaacctgctgtcccaagcacgcttgagttgtatgtgagtctgtgccgtgccgtgccgtatgcttcagctcctgcaaccccggctgagctcgatttttacctaaatatcagtctccacgggaccccaccttcattcatgccttcttgtccctggggcaatgtgtgtgcttcctcgtcccaatttccattccctggcagtgaggagcccatcgtgccagggggccctgccccacttgtccctgggaaggaataggagggtttgggtgtgacctcacagtccagaccagactgtcccagtcctatgtcagggacacccagatgtagaagctgactgagacctgctgcagggcgtgggtgctcccctctgcttggaggctgtccctggacagtgacccacccactgaggaccaggctgggtgtaccttgagctgggcacagcagcctgtggtgttgcctgtgggtggggagggccccaggtgtgcttctcccgtagcagtcctaggcttctctccctgtgccctgtgtcacctggatcctccagtaaagtgaaattcagcactgt

SEQ ID NO: 9550 - DNA, 600 bp, Homo sapiens
agtcttctgcttgatagaaaagcaaatgttgaacacagagctaagactggtctcacaccactaatggaagctgcctctggtggatatgcggaggtgggccgagttcttttggataaaggtgctgatgttaatgcccctccagttccctcctcaagagatacagctttaaccatagcagcagataaagggcattacaaattctgtgagcttcttattggcaggggagctcatattgatgtacgtaacaagaaggggaacactccattgtggctagcagcaaatggtgacacctcgatgtggttcagttactggtgcaagcaggtgcagatgtggatgcagcagataaccgcaagataactcctcttatggcagcatttagaaagggtcatgtgaaggtggtgcgctacttagtcaaagaagtcaatcagtttccatcagattctgaatgtatgagatacatagcaaccatcactgataaggagatgctgaagaagtgtcatctttgtatggagtcaatagtacaagccaaagatagacaggctgctgaagcaaacaaaaacgccagcattttgttagaggagttagacttggaaaaggtaa

SEQ ID NO: 9551 - DNA, 600 bp, Homo sapiens
caggtgcggagtttttcgtggatccaggcctctgagaattcccagaaaaatcttggtttctttgtatccccagtgcactcctgccaccttctcatcctccagggcctgccactccagctcgctccaggtcttggcttttctccagattagcacctggccagacttgactctcaccccagccactgagcagtctttcacactctctttttctccagaatttgaagatctagatgctgtgggttttcatcctactccacgtgggagttcactttgggcctatggattggaaaatccagcgtgacctcattttcagaattctgctgagttatttctaggtggttcttcagtccaggttctggatccctccatgcctcctaggagctgctcactatctcctggccacccctgctcttctctgcaggaattcccagagccacatcaggcagggcttggcatcccgttctttaacgtaatgtaatacatttcacacgtcttccgtctccatttggattatcaacatgacgtacataacccgttccattgaccggataacaagcagccatggcttttgtccggcccggggacgcgcgaggcggggac

SEQ ID NO: 9552 - DNA, 600 bp, Homo sapiens
tttgagcatgtcaacaaatttgtcaacagcatcaacaaacccttggcaacactagaagaaaatggggaaactgataaaaaccaggaagtgataaacactatgcttaggactccagagaaccggaccctaatcaaacgaatgctgattaaatgtgctgatgtgtccaatccctgccgacccctgcagtactgcatcgagtgggctgcacgcatttcggaagaatatttttctcagactgatgaagagaagcagcagggcttacctgtggtgatgccagtgtttgacagaaatacctgcagcatccccaaatcccaaatctctttcattgattacttcatcacagacatgtttgatgcttgggatgcctttgtagacctgcctgatttaatgcagcatcttgacaacaactttaaatactggaaaggactggacgaaatgaagctgcggaacctccgaccacctcctgaatagtgggagacaccacccagagccctgaagctttgttccttcggtcatttggaattcctgagggcagccagagctccttggtcctttcagtactaggcagaacagcccccgatctgcatagcctgtgaaagc

SEQ ID NO: 9553 - DNA, 1400 bp, Homo sapiens
gagacagggtagtgtgagtagtttggaggaaggacagtgcaactttccaccccttttcctaagaacaaggtctttctccttttaatttttccactcattttcacctcctaatgcccttgagatccaggtacactcctgggagttttgttcacctctcccaactgagaaccttcccactgggctccatcctccctcctgaggttcttcatattccagagtcacccacccttctcctcccattagtcagttctctaagtacagctgatgtcatgtggtgctgagaagaaagcagatcacacttcatcacagaaagaatgccttgtgattatcttctccacatctgaaattccttttgacacctgcattgggccgactgccattcccatgactgctgcacctgcgtttttagagaatgcctcataacccactgattctcattcacagagaatgggagaacggaatgaagaaagattccagcagcttatagaaggatagcaatattttgggacagggaaaatcctgtcatacctcatctcttcctcaggaggagttctgagctggtcctgcttttcatagttgtttcttttcttccacttaagaactcatagatttttcttactgtcctaaggaagtccttacctctgaggtatctcctcaatgaatactgttttcaaggctgaaatagttcattatgttaataaccttctttatgttctcagggaaatgcttaggtggtgtcacaaaatgtgccttttcttttctttttttttttttttttttgaggcagagtctcgctctgttgcccaggctggagtgcagtggtgcgatcttggctcactgcaagctccgcctcccgggttcacgccattctcctgcctcagcctcccaaggagctgggactacaggctcccgccaccacgcctggctaatttttttgtatttttagtaaagacgggtttcatcgtgttagccaggatggtctcgatctcctgacctcatgatccgcccgcctctgcctcccaaagtgctgggattacaggcctgagccactgtgcccagccaaaatgtgcctttgcaaagtttgcgaaatcagattttgtatcccaatagaaccaaaatatttatgaggatgctagcattttccaagcatagtaattagttcacaactgagaaatattatgtctgtagtagataaatattagttgtgcattttaatttaattctcctttttccattttgtctcatgaagtaccttattgcaaaaatcccactgagtaatagctcataaattataatctttcaaatagccatgctaccagcgtacaacagtgatacatgtaaccccaaatgtgatgtgagaggacgattactttgtaaataaaacttgttattgacatttt

SEQ ID NO: 9554 - DNA, 1400 bp, Homo sapiens
aatacttcggcttggcatacttattcagaaaagtaatagaggagcagttggaaccagcagttgaaaagagtaacatcatggcggagagattggccaatcagtttgcaatttataaacctgtcactgattttttccttcaacttgtggatgcaggcaaggtggatgatgccagagctctcctacagagatgtggtgcaattgctgaacaaaccccgattttgttgttgttcctccttaggaattctaggaaacaaggaaaggcatcaactgtgaaatctgtgttagaattgattcctgaattaaatgaaaaggaagaagcatacaattccctcatgaaaagctatgtctcagagaaagatgtcacatctgctaaagcactgtatgaacatttgactgcaaagaatacaaaattggatgatctgtttctaaagcgttacgcatctttgctgaagtatgctggagagcctgtccctttcattgaaccccctgaaagctttgaattttatgcacagcagctaagaaaattgagggaaaactcttcttgaaataaccaggcgatactttgttttgtatatatttgtgattctgtgtctacatgttattttgaagtatatctgagggaaaaataaatgaaaattttctttatgtacttatgtatgtgtgatgcatgttcaaagtcttattgaccataactctgtgcacttggttattggacatttttggagtttttttctctgggaaaaatcgatagtgttttcttcaatgctgctgctgtgtgaagccatactttttcaggattcttcccctaattggctctttggtttccctgctctgtttcatttatttcattaaaatgttattcctttatttaagattcacttattagtctgctgtttctctgaaaaattttagagctaggtatagtgaccgtgaactttctaacgcataatattctgtgatacagccattccgtacatgtgtgaagtcctgcataactttcgaactttgttaaatgttggcactaggagtcatcagatctaggcttcatcattttccagtgagaagcagagacccaaagggcctgttacttgtgcttggtcaggggactgtctgtcatgcctggaggctcttcggcacacttccccatctttcccttctgccactgtggcttcaagcacctctgttcatagagcgtctctgaaattgagtctcggtcatgacttatcccgaagtagagcaatgtgtttcctctcattgtagtttcaggactttgtcagtacaagctctgccctaggcttgttactttatactcatatcctgaaaagatgtgatttcatctatgaaggggtaaaatattggtttgtatttaattgtttgaaataaaagtgatccctatattg

SEQ ID NO: 9555 - DNA, 600 bp, Homo sapiens
gtatgctccagaaaacctagatgagcagattaagaaagtgtcccagcagatccttgagaagcgagcctatatctgtgcccaccctctggacaggacatgctgaggcaggggacagtgtcccctgctaccgcccgcccctacccatggcccgttgctggatgactgttactcttttttcagaaggtgttgggattatcacaggttaagccttttgttccccgtctgcacctgaagggttgtcgcctggcctgggagagcctcttccaggttttgacctgcaggcagtgctctctaacaggaccatcacagcttctgaactgagccggagagagagaatggaattgctgacccctggaactggcgggtattctggtcattgaggagacaccatagtggaaactggggcttatgctgctgcctccagggtgtgaggtgggtggggacctgtgtcaggtgtggatagccatttctgctcaaccacacattctctaagaaacagcttgaaagctctgtctgggtcattcatttaaactagaagcagaggcacttaaaacatgtaccaggaaccatttaacaaagaatataaaatgtcacaatctg

SEQ ID NO: 9556 - DNA, 600 bp, Homo sapiens
atgaaagtaatttggaagtaagtttatccaataaagcagtatttctacccttttagatttgataaatatttttattactaaagaatctccccagacattttcttttttttttcacacatagatttaagtatcttgattgttagtagtctaaaaatgggaagaatgaaaaagcataactagatttttctatcttctgtggtcgcccgcccccccccaaaaaaataccatttatggttctctccgcaagtataaaagcattacatgcaaaaaaaagatctcagagaaaacaaaagtaaaagaaaagcagaaaatcacctgttatctactcccagaaataatcaatttcaacattttggtatatgtttttccaggcttctttgggttgatcccacctatgagatcagaatatgtatgcagttctttctttaacccttttttctcctatgtactgtgaacatttaaaaagtacttttaaatattctttggaaacttagcttttagtaactacttggttgtatcataatttattaactaatgttttattggtaaacattggcttgcctcccatgacttgccattataattaaaactgtgactact

SEQ ID NO: 9557 - DNA, 600 bp, Homo sapiens
gctgaggtctctgggtcggtcagtgacatgtaggtaggaagcactgaaaatagtgttcccagagcactttgcaactccctgggtaagagggacgacacctctggtttttcaataccaattacatggaacttttctgtaatgggtacaatgaagaagtttctaaaaacacacacaaagcacattgggccaactatttagtaagcccggatagacttattgccaaaaacaaaaaatagctttcaaaagaaatttaagttctatgagaaattccttagtcatggtgttgcgtaaatcatattttagctgcacggcattaccccacacagggtggcagaacttgaagggttactgacgtgtaaatgctggtatttgatttcctgtgtgtgttgccctggcattaagggcattttacccttgcagttttactaaaacactgaaaaatattccaagcttcatattaaccctacctgtcaacgtaacgatttcatgaacgttattatattgtcgaattcctactgacaacattataactgtatgggagcttaactttataaggaaatgtattttgacactggtatcttattaaagtattctgatcct

SEQ ID NO: 9558 - DNA, 1400 bp, Homo sapiens
ccatcagaattcataatcaaacctaacctttttgtttggggcaccaaatctgaagacaaaattaatttgcaccagtaaacttcaagctgctttctttcttgaaaactaaacgtttaacgtataatgtctgtttggatactgttccaaattgttgattgcatgtggttaatgttgcattagagcactttgcaattgcataattcattaatgttttgtgagcttgcatttgtgagttattggatgatcagactgaattttgtcaagtatcacattgtacatcttgcctagatgtcgatgactgcaagtaataatacagtttataatgaaactatctacaattcttgttttagcacatctgttatccgtaaaacacctgtaactagcttttttaatttattatttgaattttaggatagcgaatcactaatttttagttgctgaggttggcattttagtgattattaagcacttctgtcagtctttgaaaaaagaacgtattttttgtgctttgaagatctctgaagaatttcttttataatagaatgggcatgtattgtaacagttttatgtcaaatgatctgtgctgtagaaaaacattaacccttgttcaaaaaagaaatggataaacttggcctttctaagtggtaagaatgacctgtcactataatatactgtatgtttacattttatttaaatttaatctcttatgtatagggtgataaccttccccagaaacaacagtgattgcgattgttttctagaaacttctttaaagtgccacatttggcagtacaaatgagtctgagtgtaatagcccagagatttatatatagttgaatgtctaaaatggtaaaatgtgccactgtgtcaagttacagtggcttatgtttttcatagtaattcaaatgaacttcctatttttgatagtaaatgtcatttaatagtatacttgccatttgagcctcactgcaaaattagtgcagaggagaaaacaatttttaatgtaatcttgattttacctcatatactgtacattccaaaaactctaaactttttaaagattatagatacactaccaaacatatcaccttaaaattgtataaggctgaatgaacttcatacaaatgaaaaaaatctcataaaaatacataaactatgtagcaaaagtatctgtaaaatccatggaaaataaaagttgtatcattctttttgagatacgtttattgtattcatatatattcattatttgctacctgtttaagaaagtgaaatgttatggtctcccctcttccaatgagcttaaaacatttttcccaacagtatataaatcttcaacatgagaggatgtatatttattatataaagcccagtaaagaataaaattagaagttttatcctag

SEQ ID NO: 9559 - DNA, 1400 bp, Homo sapiens
acgcctgcatcaaggaggccattctcttgcacttctccaccgacccagtggccgcctccatcatgaagatctacacgttcaacaaagaccaggaccgggtgaagctgggtgtggacaccattgccaagtacctggacaacatccacctgcaccccgaggaggagaagtaccggaagatcaagctgcagaacaaggtgtttcaggagcgcattaactgcctggaagggacccacgagttttttgaggccattgggttccagaaggtgttgcttcccgcccaggatcaggaggaccccgaggagttctacgtgctgagcgagaccaccttggcccagccccagagcctggagaggcacaaggaacagctgctggctgcggagcccgtgcgcgccaagctggacaggcagcgccgcgtcttccagccctcgcccctggcctcgcagttcgaactgcctggggacttcttcaacctcacagcagaggagatcaagcgggagcagaggctcaggtccgaggcggtggagcggctgagcgtgctgcggaccaaggccatgcgggagaaggaggagcagcgggggctgcgcaagtacaactacacgctgctgcgcgtgcgcctccccgatggctgcctcctgcagggcactttctacgctcgggagcggctgggggcggtgtacgggttcgtccgggaggccctgcagagcgactggctgccttttgagctgctggcctcgggagggcagaagctgtccgaggacgagaacctggccttgaacgagtgcgggctggtgccctctgccctcctgaccttctcgtgggacatggctgtgctggaggacatcaaggccgcgggggccgagccggactccatcctgaaacccgagctcctgtcagccatcgagaagctcttgtgaaataaaagcagggttggcctcagccctgtgggtctgtctcatgctctccctgttcctctccccgccaccccagggcctccaagccacctctggaaatacttggctctgccccatgggcacgggaggggcgccagccgtggagctgtggaattgggccccgtggcagagcccccatcccttgggggctgtggggatgcgcccaagcccccgagggagaggcctggggacaccaacaaatctaagccctccctagctgcttggtaactgtgtcatgaagctgccggacagacacacgtggcatctccctgggcaggagagcaggcctgcagcatgggtcccgttcccgtgtgccgtgggtggcagtggctgcacctggcactagggctgctctgtggatgtgggtgacaacggcaggaggggacgctggccttcctgcacatagacctgcagttagtaaatcataagcccaaataaacaggttgtttg

SEQ ID NO: 9560 - DNA, 1358 bp, Homo sapiens; identical to SEQ ID NO: 4325

SEQ ID NO: 9561 - DNA, 1400 bp, Homo sapiens
tctatggtgacaacagagtccatgagtttacaggaacagatggacctagtggttttggctttgagttgacctttcgtctgaagagagaaactggggagtctgccccaccaacatggcccgcagagttaatgcagggcttggcacgatacgtgttccagtcagagaacaccttctgcagtggggaccatgtgtcctggcacagccctttggataacagtgagtcaagaattcagcacatgctgctgacagaggacccacagatgcagcccgtgcagacaccctttggggtagttaccttcctccagatcgttggtgtctgcactgaagagctacactcagcccagcagtggaacgggcagggcatcctggagctgctgcggacagtgcctattgctggcggcccctggctgataactgacatgcggaggggagagaccatatttgagatcgatccacacctgcaagagagagttgacaaaggcatcgagacagatggctccaacctgagtggtgtcagtgccaagtgtgcctgggatgacctgagccggccccccgaggatgacgaggacagccggagcatctgcatcggcacacagccccggcgactctctggcaaagacacagagcagatccgggagaccctgaggagaggactcgagatcaacagcaaacctgtccttccaccaatcaaccctcagcggcagaatggcctcgcccacgaccgggccccgagccgcaaagacagcctggaaagtgacagctccacggccatcattccccatgagctgattcgcacgcggcagcttgagagcgtacatctgaaattcaaccaggagtccggagccctcattcctctctgcctaaggggcaggctcctgcatggacggcactttacatataaaagtatcacaggtgacatggccatcacgtttgtctccacgggagtggaaggcgcctttgccactgaggagcatccttacgcggctcatggaccctggttacaactctgaacctatcctcggagctctgccctcccgtcctggaacgtctttctgccctgaggagagggtagtcagcatctccaattttcagcagctcaagaaccttggcccccacaggacttcgcagatgtcacattgcccctcagtcccctgaatgcccttcggacccaaccccaattccccaagcccctgaccccctagctgccggggttcccactcccagtgccacaaccccctcacctccctggcagcccctcagcgagcctgaggcccagcacccgctggctccccagcacatggtcccctcccatgggctgttgcccagggaaccggggcgcggtgggaacgagctgctggcctcggcatgtttcaataaagttgctgtgctgggagctactc

SEQ ID NO: 9562 - DNA, 600 bp, Homo sapiens
ataggcctccttccagtccccaccccgtcccgggtctctaacaggtgctcaacctactccaccacactcccgagtgtcttggagggacagcatccttttttggcatttgtttgttgcgggtggggagaggattgaacccttaacctcacctcgctcgcaagtatcaagaaagggaacctgaccctaaacctaaaggtggccatacctggtttgtgaatgtattggagaggcatgcagcattacagtagaggggaagagaatgatgctaggtttgtgagtttcacccagtctggggagtctgtgaagcatatgtagtcaatacagacacactttttgtccctgcatgtctacagaatttctcctccttcaggccaggcccctcttctcccgccaccaccaaaatacaacccttaattaaaacaaacagcaaacaaaggacaccaaccacactccccagactaagccgagatagaaatggaagctagtgctttagggatattgtgttccataaattatcttgcctttttccactgttgttattatatcgtttcataacaaaattactttgaaccataaagttataaatacattttaaaagtc

SEQ ID NO: 9563 - DNA, 1400 bp, Homo sapiens
ttgtgctccaagaactatcataggaacatactgggaaaaccaaaagaattcacggatcctttgaaagaagacgcacaccactgtaaattctgtggaacaggagaaaaactgtcttggaggaaggcatccttctattctactgatcagaaagctggacaaagtcccactgccaggctacacagttggtgccatttgcggaggcccacccgcagcggtcacgtgaaggaccgagcgccgcgcgcccaggcggggcctccggcctgcacgaggagggcagagtccgttgcggctgccgccccgacgcccgcgcatccccgctcgccgcgcccgccgccgcgatgtccggggccggcctagccgcggtggtgagctgcctgcgcccgcagcccggcgaggagccgcagacccatgagaccttctgccagaaagtgggcctgctgtgcacgcttcagggtaagctgcagccccaggactggacattgttggacgaactgctgcagggcctgcaaacactgctgctcatgattttgtggcaggcttcccgtggcctcttcctgcactaccacgtggaggccctaaccctgcgtcgcatcagtagcttccgccagtacaagtatgacctggtggcagcgggcaaggctttggagggcatgttctgcaagctcaaccacctcctggaacacccgcaccagctgttcttcctctacctgctccccactctgtcccgcttcgtctccatcggcctctacatgcccgccaccagcttcttgctcctggtccttggtttcaaggctctgcaactgtggatgcagctgcatgaggccggagtgggccttgaggagctcaggggggtccctgaccctagtgtcccccctcccccagcacaggatggtaagcacacaggtcccagacaggggctggatggctctgaagctggtagccctgatctacctaatactgcagctgggctgcatcgccctcaccaacttctgactggacttcctgctggccgccactatggtgctgccgctgtgctcgccgagcctttgggccctggaccctctgtgctgtcctgctggtgttgacaagcccggcagccacgctccttggcagcccattcctgtggcgggagctgcaggaggcaccactgtcactggccaagggctggcagctcttcctggcagcactggcccagggtgcgctggagcaccacacctaaggcgccctgctcttcccactgctgtccctgggcctctgcccttgctgactacttttctggaatgtgctcttctggaagtgagatctgcctgtccggggcaccaggctgggacagagactccccaaggaccccattctgcctccttctggggaaataaacaagtgcctgtttcagctgcttt

SEQ ID NO: 9564 - DNA, 1400 bp, Homo sapiens
aaaaggtaattgttgagatcaggggaagatggcagataggaggcagtgctaatgtgtagctcccacatggatggacaaaacaccatgtggagactcacactgtgaccctgttgtgctccaagaactatcataggaacatactgggaaaaccaaaagaattcacggatcctttgaaagaagacgcacaccactgtaaattctgtggaacaggagaaaaactgtcttggaggaaggcatccttctattctactgatcagaaagctggacaaagtcccactgccaggctacacagttggtgccatttgcggaggtgacctttgacctttaacccacgcggccacccgcccgagctcttacccctgctgcccctcgcgcgtcccactccccgtccctgccggatccgcttccctgcgctgggcccagcgcgccgccagggaaggggccggagcctgggagcccgccccgccgtcgcccgtcctccgcccgcaggcccacccgcagcggtcacgtgaaggaccgagcgccgcgcgcccaggcggggcctccggcctgcacgaggagggcagagtccgttgcggctgccgccccgacgcccgcgcatccccgctcgccgcgcccgccgccgcgatgtccggggccggcctagccgcggtggtgagctgcctgcgcccgcagcccggcgaggagccgcagacccatgaggaccttctcctggcagctgcctatgttttggatgcccagtacaacagaaatgttccatttgaaactcacctcaggccatcagacgttactatttttataaccactagacaacgcaggttgccgcatacttctttatttgtgtagacctcgctcttgccctgtttgaagagcctgagttgcttcccctgcctttcttggccacctcaatagcagaagtactctgcctgactgcatactttggcagactggtacattttgcaaaagtcactcctcaaatggttttctggaaggatacaaaagacatctgcaccatggtaaccacagtggcgagtgttcattgtagtacctgtaagagtttatgaccgaaggcaggagccatgaagaaaaaagactcaatagatttgcttttgatgaaacaacaacacttccatacagtgaacgccataagcacaactgcaagcaaaccgcaaactgaagaacaaatagggcaaaatgtggcagtgcagacatttcagcatatcaagagcacttccaaattacaggaaaaaaaagatatctcaatagataattttgctgaagataagtgaaggcaactcataaggaaaaaatatgtaaaatggccgataggaaagatgtttaacgtcactaattaaaaattatagaataaaacgacaataaaataccatgtgtttgcctat

SEQ ID NO: 9565 - DNA, 600 bp, Homo sapiens
atagcctattttacaagaagaagcagagatccttggagaaatggatgattccaggtctgtttggaggcatcacccagttgtttggaggcaaacttgtgcacagtagtgatctcctcggttcactctgagtcatcaattctgcagctctcagtttgtggagaaattttctagaaattgagtgttaatttagtgttgcaggtagaacaggcaaagcagttcacgcaccaggccttattaagagcagagaccacatcaccttctataacacgaaacactgctcatggtacagctccccattactgttcacgatcgtctcagcgggcgcaaagccgcccttgcagcgctcgcaagtggcgctggccagggcgttggccatgttgaatttcgcataaaagtcacagaactccttgtagactttcacgtcactgtgcctgcgctgcagtttggaaacagccctctcgtcctcggtcccattggcctcgtggacagtgttaagggctgctcgggggatttcttcgttctctgggataatgcaggggcgcgctcggcctgagaaggccatcgtgggtgcttgagagctctgagcacagggatgagaat

SEQ ID NO: 9566 - DNA, 950 bp, Homo sapiens; identical to SEQ ID NO: 4331

SEQ ID NO: 9567 - DNA, 1374 bp, Homo sapiens; identical to SEQ ID NO: 4332

SEQ ID NO: 9568 - DNA, 1400 bp, Homo sapiens
ttgtatcatttttcaagccaatttcagtcagggatttgaattgtttgattatggatgataaatgtgtcatatcttattaatatgtctcatgtctcgttccttcttaatatgatttagctggaattcattttcttttcgtttcatgtttaatttcataaaacgtttaacaattggcatatatacttggcattcctgtccaccaaggattgtaatccaagcctgggaaaatcttaaatttctttttacttaaatctggaaatttgtctccattctgccacctttttttttttttttttttatagtggaggggaggaaaggggggtgataccttgcagtaagtaagtcgaaatagcatgcctgaaaatttgaaacagaccattctaacacccaaggcttgtttataaaatacttgagaattacattaatgtggaatcaacagatgcagaagaatataacataacttttaaaagctttcataaataccagcagcaattgtaagcaaatctacaaaggttcttgaacctttctattatatacaaaactgaaaagtcattaaggagttcaactaatcaggaattaaatggtcatttatttcatgcagtatgatttaaggtatttcttgagattctggtcaaatgtcataatcagcaaacgggattaaaaaaaaaactccaaaatcactaaataattatctaaataatggtattggagaacttgtttcctgctatttggaagagattgttgcttcattgctagtttgtatttctaacttctacagttatagactccactgtgctttgtgtctgaatttctcagtatagacattttgtttactgtatgcttgcatatttattttcaactttgtttgtctttaaaattgcttgaggaaaaatggttgtaattaatttctgctacagaaaagccacctggtacgttttgtctcatcaggattgttttaaattctaaactataagtttgttcagaggggcttttgcaatgatagcagaaaactgtacaaatgtacagttagttatagaggttcttgttgaaatgaacttaccatctgatgatatgtatgtacagctgtgtacttgagtcttttttagtttacttagaaagactagcagtttgacctgttaaacaggactagttcaagtcaagaaactaaggttgttgtatacacctggaggcatctgttattcagcttatcctttgagtgggtatttggcacaatgaggataaacttatgtgacccacttgaatggctgatctaataatgttgacattatgcattctgtacttagtgaaatgtcagatgaaaataactgatgaataatttttttgtattaaagggatgggaaaagaacacatgaatttgttaataaagcactatgatctgc

SEQ ID NO: 9569 - DNA, 1400 bp, Homo sapiens
ggtcgcctgcccttctacaaccaggaccatgagaagctttttgagctcatcctcatggaggagatccgcttcccgcgcacgcttggtcccgaggccaagtccttgctttcagggctgctcaagaaggaccccaagcagaggcttggcgggggctccgaggacgccaaggagatcatgcagcatcgcttctttgccggtatcgtgtggcagcacgtgtacgagaagaagctcagcccacccttcaagccccaggtcacgtcggagactgacaccaggtattttgatgaggagttcacggcccagatgatcaccatcacaccacctgaccaagatgacagcatggagtgtgtggacagcgagcgcaggccccacttcccccagttctcctactcggccagcggcacggcctgaggcggcggtggactgcgctggacgatagcttggagggatggagaggcggcctcgtgccatgatctgtatttaatggtttttatttctcgggtgcatttgagagaagccacgctgtcctctcgagcccagatggaaagacgtttttgtgctgtgggcagcaccctcccccgcagcggggtagggaagaaaactatcctgcgggttttaatttatttcatccagtttgttctccgggtgtggcctcagccctcagaacaatccgattcacgtagggaaatgttaaggacttctgcagctatgcgcaatgtggcattggggggccgggcaggtcctgcccatgtgtcccctcactctgtcagccagccgccctgggctgtctgtcaccagctatctgtcatctctctggggccctgggcctcagttcaacctggtggcaccagatgcaacctcactatggtatgctggccagcaccctctcctgggggtggcaggcacacagcagccccccagcactaaggccgtgtctctgaggacgtcatcggaggctgggcccctgggatgggaccagggatgggggatgggccagggtttacccagtgggacagaggagcaaggtttaaatttgttattgtgtattatgttgttcaaatgcattttgggggtttttaatctttgtgacaggaaagccctcccccttccccttctgtgtcacagttcttggtgactgtcccaccgggagcctccccctcagatgatctctccacggtagcacttgaccttttcgacgcttaacctttccgctgtcgccccaggccctccctgactccctgtgggggtggccatccctgggcccctccacgcctcctggccagacgctgccgctgccgctgcaccacggcgtttttttacaacattcaactttagtatttttactattataatataatatggaaccttccctccaaattcttcaataaaagttgcttttc

SEQ ID NO: 9570 - DNA, 1022 bp, Homo sapiens; identical to SEQ ID NO: 4335

SEQ ID NO: 9571 - DNA, 1115 bp, Homo sapiens; identical to SEQ ID NO: 4336

SEQ ID NO: 9572 - DNA, 1400 bp, Homo sapiens
tagtagtgatagtgaagaactttcagctggtgaaagtataactaagagtcagccagtcaaatcagtttccactggaatgaagtctcatagtaccaaatctcccgcaaggacgcagtctccaggaaaatgtggaaagaatggtgataaggatcctgatctcaaggaacccagtaatcgattacccaaagtttacaaatggagttttcagatgtcggacctggaaaatatgacaagtgccgaacgcatcacaattcttcaagaaaaacttcaagaaatcagaaaacattatctgtcattaaaatctgaagtagcttccattgatcggaggagaaagcgtttaaagaagaaagagagagaaagtgctgctacatcctcatcctcctcttcaccttcatccagttccataacagctgctgttatgttaactttagctgaaccgtcaatgtccagcgcatcacaaaatggaatgcttcaaccactcccagaagacgtccttcactcccaaaatgaggcttttctgaaacggcgaggaccaccaaccgacggcgacaaacctgctccctcacccagcgcctcccttcgccgccgcccggcggccgactgccggaggggagggggcgtggccagagagcggaagtgcccggaacccggaagtgcgagctggcgcgcagctgcagtctgggagtctttggagtaagaatggccttggaagggatgagcaaacggaagagaaagagaagtgtccaggagggagagaatcctgacgacggcgttcgcgggagtccgccggaagactacaggcttggacaggtcgccagtagcttatttcgcggcgaacaccattccagaggtggcaccggtcggctggcgtccctcttcagttctctggagccccagattcaacccgtgtacgtgcctgtgcctaaacaaaccatcaaaaaaacgaaacggaatgaggaggaagaaagtacatcccagattgaaagaccactttcgcaagaacctgccaaaaaagtgaaagcgaagaagaaacacactaacgcagaaaaaaagttggcagacagggaaagcgctctagcgagtgctgatttagaagaagaaattcaccagaaacaagggcagaaaaggaaaaattctcaacctggtgttaaagtagcagatagaaaaatacttgatgacacagaagacacagttgtcagtcaaagaaagaaaattcaaatcaaccaagaagaagagagattaaagaatgagagaactgtgtttgttgggaatttgcctgttacatgtaataagaagaagctgaagtcgttttttaaagagtatggacaaatagaatctgtacgatttcgttctctgattccagcagagggaacgctatccaaaaagttggcagcaataaa

SEQ ID NO: 9573 - DNA, 600 bp, Homo sapiens
cagcacctgaagcctgggggggccgtggagtggctcctgcgtcccccggtgtggccacacacgctcgtggggctgcgctgtgctgcgtgggtgcgggtcgtggtcagcgtgcgttcgcttttctcaaaactccactccgagggtccgagcgcatgggggcgcctgggggcctgcgcgcccggggcttttgggaggcgccagcgtccgagcctgcgcacctcgcgcaggaggccaaacccccgaaggccggcgcgggcccgggagtgggggccattaattactctgcgccaggcctaaagcctccaacccccagcagcagttggcgtggatgtcctgcggattttatttgcaaacaatggaaatgatttgttttctctaaaaaaggagtgggcaaggcagatattggaggagggggtgggaggaggagaaggaaggggaaagagctgaggaaaaaagtttgaaaatgccttgaactattcactgtcgagatggctaatcagtattgaggccggagggcaggcgggccgcctttcaccgccgcttccctttcatctcgggctcggcggaggcgctcaattaaaagcctatcagtttgtaagt

SEQ ID NO: 9574 - DNA, 1400 bp, Homo sapiens
gggtgcagtccaagaagctgaccgccatgcagaggcagctcaagaagcacttcaaagaaggaaagggtctgacatttcaggaggtggagaacttctttactttcctaaagaacattaatgatgtggacactgcattgagtttttaccatatggctggagcatctcttgataaaggaaagggcaccatcttcatggggagaagatgagtacttgaaatatcaagacaattgcagaaggctgtgccctgagagaatggaagaactgggaaagagaaaaggaagtcagaagcttaagtgaccatgcagcaggtggccaggacagtggctaaagtggagctctcagaccacgtgtgtgatgtggtgtttgcactctttgactgtgatggcaatggcgaactgagcaataaggaatttgtttccatcatgaagcaacggctgatgagaggcctggaaaagcccaaagacatgggtttcactcgcctcatgcaggccatgtggaaatgtgcacaggaaactgcctgggacttcgctttacccaaacagtaaccccacactgcaagaggggacccctccacccccagtaccctggaccccctccgcagagtctcggcagagccctttgtgctgctgcttctggaagtagtcccccttcctcccgggatgacctcaggactctgtcggtttcccctctttacccttccccgtccccgtgttctgctgggctctgattctgcccaatgagtatccccataggttctcaaaaacatgaacaagtctgtaaagctcagacatttgtcagcctcaacagcaccacccattcaagcatcctgtggataaagaattcagggaaccatccacacacctgccaaccctgggaagcatccagttctcaaatcgtttttgctatggatttatactaacaagaacattccttgacttccctcctgctggtgttttaaagccacaagtagggaagatatctggcaggcagaaagaagtctgtgatgataaacaatgatgaggatgacctaggcaccctacgctagtgtgagaagcctgcgccccaggaaggatctgtgttagtccctgggatggctccaaggcctgctctaggaaggcagcatgctcagtgggaacacagcaagattcagaatttaaagtagttgcttcatggctctgtgcactcccttttcttcctcgcagcctccctaagatgactccagtgtgaccctgtgcttagtgagcaatagtgattgagctcatgttccctgcaagtgccatttcctctccaggatgggcctctaaagctgaggcctggctcagagcctgtttgccctctgtcttaaacaattgtaaatatcacttaaattataaccatttgcaataaacatccccaaagtt

SEQ ID NO: 9575 - DNA, 835 bp, Homo sapiens; identical to SEQ ID NO: 4340

SEQ ID NO: 9576 - DNA, 700 bp, Homo sapiens; identical to SEQ ID NO: 4341

SEQ ID NO: 9577 - DNA, 600 bp, Homo sapiens
tatgctttgtatgatgcaagctttgaaacaaaagaatccagaagaattgatgttttcttgtgggcatcagaactagcacctttgaaaagtaaaatgatctatacaagctccaaggatgcaatcaaaaagaaatttcaaggcataaaacatgaatggcaaacaaacggaccagaagatctcaatcgggcttgtactgctgaaaagttaggtggatcctttttttttttttttgagatggagtcttgatctgtcgcccaggctggagtgcagtgacaggatctcggctcactgcaacctctgcctcccgggttcaagtgattttcctgcccagcctcctgagtagctgggattatagcgtgcgccaccacacctggctaatttttgtattcttagtagagtcagggtttcaccatattggtcaggctggtctcgaactcctgacctcgtgatttgccctccttggcctcccaaagtgctgggattacaggcgtgagccagcatgcctggccagtggatccttaattgtagcctttgaaggatgccctgtgtagatcatcattcagtgccacaaattgaaagcttccacgtttaatgttatcc

SEQ ID NO: 9578 - DNA, 600 bp, Homo sapiens
gaagttgaatatgattgtgataatttgcaacatagtaagaaggggaaaactgcgcaggggttaagccccgtggaccaaaggaaatgtgaacgtcttctgctttacctctattgccatgaattaagtattgaattccaggagcctgttcctgcttcgataccaaactactataaaattataaagaaaccaatggatttatccaccgtgaaaaagaagcttcagaaaaaacattcccaacactaccaaatcccggatgactttgtggccgatgtccgtttgatcttcaagaactgtgaaaggtttaatgaaatgatgaaagttgttcaagtttatgcagacacacaagagattaatttgaaggctgattcagaagtagctcaggcagggaaagcagttgcattgtactttgaagataaactcacagagatctactcagacaggaccttcgcacctttgccagagtttgagcaggaagaggatgatggtgaggtaactgaggactctgatgaagactttatacagccccgcagaaaacgcctaaagtcagatgagagaccagtacatataaagtaaaatgacatggatttaaatcaattgttt

SEQ ID NO: 9579 - DNA, 600 bp, Homo sapiens
ttcagtcttctccttcctctcttgtcccccaatttctttttggtgaaagtaagtcagtattcttggggtaaacccagcttttttcttgctataaattgaaaaaaaaaaaaaaaaaagatatatcttctcaaattcctgagaagcagtaactttaattgaataatagtgccctctttgaaagtgttaaccttttggattagaaaactagtagatatttaaacagtgccagaatatttttctgaagaattgtaatttcttacctaagtctttggagatagagttatttgctagagatgtaataagggccttctttttctttactcttatttagaaaagaaaagcattggcactttgatcttgaaattaagaattttcttttctttgggtagtaatatttactggaatgtcagaattttgccactgaatgccttctttcaatagcaaatgctttgaaagggttgtaaaatgttggcgtaaattagccaggtgtggtagctcacacctgtaatcccagcactttgggaggctgaggcaggcggagcacttgaggtcaggagtttgagaccagcctggccaacatggcaaaaccccatctctact

SEQ ID NO: 9580 - DNA, 600 bp, Homo sapiens
gtcatgctcctgtgccagaacgcacagaccttcaacctggagggctccctgatctatgaagactccatcgtcttgcagtcggtcttcaccagcgtgcggcagaaaatcgagaaggaggatgacagtgaaggcgaggagagtgaggaggaggaagagggcgaggaggaaggctccgaatccgaatctcggtccgtcaaagtgaagatcaagcttggccggaaggagaaggcacaggaccggctgaagggcggccggcggcggccgagccgagggtcccgagccaagccggtcgtgagtgacgatgacagtgaggaggaacaagaggaggaccgctcaggaagtggcagcgaagaagactgagccccgacattccagtctcgaccccgagcccctcgttccagagctgagatggcataggccttagcagtaacgggtagcagcagatgtagtttcagacttggagtaaaactgtataaacaaaagaatcttccatatttatacagcagagaagctgtaggactgtttgtgactggccctgtcctggcatcagtagcatctgtaacagcattaactgtcttaaagagagagagagagaattcc

SEQ ID NO: 9581 - DNA, 600 bp, Homo sapiens
tggtgtgtatgtgtatgtgcatgcacacacgtgcatatacacatttgtgtatgtggaaatgtgctgggcaagtcaaaactatagaagagttgcctcctgtctctcgaatcttccagagatatcacttaattgttaacagcttttgtgttaatccccttcagcccctagctcttttattctaccacggctggagagttgatacctgcagtcagcctgccagtgactcttagtgtctgtttctgacttatttttcctgtctctgtcttccaacccccaataatatttccaccggggatgcatcatttttactcccaatattctgtagagagggagtcaggatgctgtcttcccacgaatagtactcagtaacaaaccaattgcattttagttgggcagtgctcccacccaccctccagatcccttccagctaaaacccttcccccttccctccatgtgtttctcagtttcccgtttcgtttgttggactgttccactgcccctcctcctcaccctatcacccatggatcgtaatgtaaaattcttttaccatgtcaagaaattattaaaaatacaggtactttgacctctttctaaagccgc

SEQ ID NO: 9582 - DNA, 600 bp, Homo sapiens
ttagcggcccagctagacaaaaagcgggatgacttttgtaaacagaatcaagaagcatcatcagatcgttgctcagctttacttcaggtcattttcagtcctctagaagaagaagtgaaggcgggaatttattcgaaaccagggggctattgtctctttattcagaagctacaagacctggagaaaaagtactatgaggaaccaaggaaggggatacaggctgaagagattctgcagacatacttgaaatccaaggagtctgtgaccgatgcaattctacagacagaccagattctcacagaaaaggaaaaggagattgaagtggaatgtgtaaaagctgaatctgcacaggcttcagcaaaaatggtggaggaaatgcaaataaagtatcagcagatgatggaagagaaagagaagagttatcaagaacatgtgaaacaattgactgagaagatggagagggagagggcccagttgctggaagagcaagagaagaccctcactagtaaacttcaggaacaggcccgagtactaaaggagagatgccaaggtgaaagtacccaacttcaaaatgagatacaaaagctacagaagaccctg

SEQ ID NO: 9583 - DNA, 1400 bp, Homo sapiens
gaccagattctcacagaaaaggaaaaggagattgaagtggaatgtgtaaaagctgaatctgcacaggcttcagcaaaaatggtggaggaaatgcaaataaagtatcagcagatgatggaagagaaagagaagagttatcaagaacatgtgaaacaattgactgagaagatggagagggagagggcccagttgctggaagagcaagagaagaccctcactagtaaacttcaggaacaggcccgagtactaaaggagagatgccaaggtgaaagtacccaacttcaaaatgagatacaaaagctacagaagaccctgaaaaaaaaaaccaagagatatatgtcgcataagctaaagatctaaacaacagagcttttctgtcatcctaacccaaggcataactgaaacaattttagaatttggaacaagtgtcactatatttgataataattagatcttgcatcataacactaaaagtttacaagaacatgcagttcaatgatcaaaatcatgttttttccttaaaaagattgtaaattgtgcaacaaagatgcatttacctctgtaccaacagaggagggatcatgagttgccaccactcagaagtttattcttccagacgaccagtggatactgaggaaagtcttaggtaaaaatcttgggacatatttgggcactggtttggccaagtgtacaatgggtcccaatatcagaaacaaccatcctagcttcctagggaagacagtgtacagttctccattatatcaaggctacaaggtctatgagcaataatgtgatttctggacattgcccatggataattctcactgatggatctcaagctaaagcaaaccatcttatacagagatctagaatcttatattttccataggaaggtaaagaaatcattagcaagagtaggaattgaatcataaacaaattggctaatgaagaaatcttttctttcttgttcaattcatctagattataaccttaatgtgacacctgagacctttagacagttgaccctgaattaaatagtcacatggtaacaattatgcactgtgtaattttagtaatgtataacatgcaatgatgcactttaactgaagatagagactatgttagaaaattgaactaatttaattatttgattgttttaatcctaaagcataagttagtcttttcctgattcttaaaggtcatacttgaaatcctgccaattttccccaaagggaatatggaatttttttgactttcttttgagcaataaaataattgtcttgccattacttagtatatgtagacttcatcccaattgtcaaacatcctaggtaagtggttgacatttcttacagcaattacagattatttttgaactagaaataaactaaactagaaat

SEQ ID NO: 9584 - DNA, 1400 bp, Homo sapiens
cagcctggcaaacaccccatctctactaagcgaaaacccatctctactaaaattacaaaaattagctgggcatgattgcgcatgcctgtaatcccagctactttggaggctgaggtggggagaattgcttgaacctgggaggtggaggttgcagtgagccaaggtcgcgacactgcactccagcctgggtgacagagtgagactccatctcaacagaaggaaaaaaaaggaaaataggagaaggtggaaatgggtgaagagagaagtcccctcactagctgcatgagaaatctatcttactgtggttctccatgggcagcaggaccatttttcagaatcaagagggaggacagtgtgagaaggcgatgatccaaagaagacagagaggtcagccccacccgatccctcaaatgggctcttggaggcacccccaggggcagcccatttctcaaagtccagaaaattagggtcccagaagggggcagcagcaggctgggagttaggagggagagcagggtgccggccctgccaccaagttgagagctggaggggaggtggggagagaacatcacagagcagccagccctggttcactcctggcagtttcttctcaagctccttccctaggagcatggtggcacgtgcctgtggtctcagctacttgggaggctgaggcgggaggatcgccagagcccaggagtttgaggctgcagtgagctatgagggtgcctctgtgctccatcctaggcaacagagtgagacgctgtttaaaaaggaaaaaatccttccctagagctagtatcctaaagctgcagagctagcccagacctcattggtttccttgtccttggggtgcttttcctgaatctttgggggtgaagggagtgttgctcccagtccagaggcctgattctgttcggactgggttctcaagacacgaccaggttctcaagacacgagtccccttgttcctccccattaaagggggtttgtcagaagcaagaacagcccctctccccagtcacagcctgaagggaggccccgagagcttcctccttccccccacctgctccttaccttctctgccctgctttttagaactgcagttcattgttttaagggattgggggagggagcctggggacacaaaccttttatacaatacaaagctttgctttttttttttttttcttccttttccctttctcggttctcttctctcctctgaatggctgaagacccctctgccgagggaggttggggattgtgggacaaggtcccttggtgctgatggcctgaaggggcctgagctgtgggcagatgcagttttctgtgggcttggggaacctctcacgttgctgtgtcctggtgagcagcccgaccaataaacctgcttttct

SEQ ID NO: 9585 - DNA, 1400 bp, Homo sapiens
agtaccatgagaagcggatgctggtgtctggacaggggcccgtgatggaaaatgcccagggactgggcttccgaaatgtcgtcaccgtggatgagctgcggatggcctttcctctgcttgacatggtggacctggagcggcggctaaagaccacgcccctcccgaggaatgacttcccccgcattgaaggggtgctcctcctaggggagccggtccgctgggagaccagcctgcagctgatcatggatgtcctcctcagcaatgggagccctggggctggcctggcaacacccccctacccccacctccccgtcctagccagcaacatggatctcctgtggatggctgaagccaagatgcccaggtttggacatggcacctttctgctgtgcctggaaaccatttaccagaaagtgacgggcaaggagctgagatacgagggcctgatgggcaaacccagcatcctcacttaccagtatgccgaggacctgatcaggcgacaggcggagaggcggggctgggccgcccccatccggaagctctatgctgtgggtgataaccctatgtctgacgtatacggcgccaacctgttccaccagtacctgcagaaggcaacgcatgatggggcgccagaactaggggccgggggcacacggcagcaacagccctcagcaagccagagctgcatctccatcctggtgtgtacaggcgtctacaatcccaggaacccacagtccacggagcctgtccttggaggaggggagcctccattccacgggcaccgagacttatgcttcagtccagggctcatggaggcctcccacgtggtgaatgacgtgaatgaggctgtgcagctggtcttccgcaaggagggctgggctttggagtgagggcagtgcggtggaggtgagggggtgagcctggacctgtgggcgagtcccattggctgggctctggcctgatcactgggctcaggtcagggcttggttcccttgccacccttcttgctgccccatgagtgtggcattactggtcacttggaagaagacagtgactctttttccctgctgggtagcattttgtatggaacggttggaattttctgggcccagttcccacgtgcctttcgtggcagtctaacctcaggccattctcttcccctgtgtgcctcagtgtccttctcatttcagtagggacttctgaaatgggggaggcagtgtggaatactgtggatgtctgtgcagagcctttgccggcactgaaggcatgcagcctgtcggcagagtgtcttaacaccagatgctactttttactgtattgtagtttattgcccggagatgtggggctttttttttaaataaaataatcataataaatgttcatgatgctgactcttgtga

SEQ ID NO: 9586 - DNA, 600 bp, Homo sapiens
cgcgctaccctgagtgagtcggaaaacttcgaagcagctgttggcaagttggccaagactccccttattgctgatgtttattacattgttggtggcacgtccccccgggagggggtggtcatcacgaggaacagagatggcccagcagacatttggcctctagatcctttgaatggagcgtggttccgagttgagacaaattacgaccactggaagccagcacccaaggaagatgaccggagaacatctgccatcaaggcccttaatgctacaggacaagcaaacctcagcctggaggcacttttccagtgaaagcaggccaggtgcggtggctcacgcctgtaatcccagccctttgggaggccaaggcgggtggatcacttgaggtcaggagttcaagaccagcctggccaacatggtgaaacctcgtctctactaaaaatacaaaaatcaaccaggcatgacggtgcacgcctgttatcacagctacttgggaagcagcggctggagaattgcttgaacctgggaagtcgaggctgcaagtgagctgagatcatgccatggcagtctagcctgggcaacagagcgagactctgtttc

SEQ ID NO: 9587 - DNA, 600 bp, Homo sapiens
  misc_feature (310)..(329): n is a, c, g, or t
cgcgctaccctgagtgagtcggaaaacttcgaagcagctgttggcaagttggccaagactccccttattgctgatgtttattacattgttggtggcacgtccccccgggagggggtggtcatcacgaggaacagagatggcccagcagacatttggcctctagatcctttgaatggagcgtggttccgagttgagacaaattacgaccactggaagccagcacccaaggaagatgaccggagaacatctgccatcaaggcccttaatgctacaggacaagcaaacctcagcctggaggcacttttccagnnnnnnnnnnnnnnnnnnnntggctcacgcctgtaatcccagcactttgggaggccgaagcgggtggatcacttgaggtcaggagttcaagaccagcctggccaacatggtgaaacctcgtctctactaaaaatacaaaaatcaaccaggcatgacggtgcacgcctgttatcacagctacttgggaagcagcggctggagaattgcttgaacctgggaagtcgaggctgcaagtgagctgagatcatgccatggcagtctagcctgggcaacagagcgagactctgtttc

SEQ ID NO: 9588 - DNA, 951 bp, Homo sapiens; identical to SEQ ID NO: 4353

SEQ ID NO: 9589 - DNA, 1400 bp, Homo sapiens
ctggcaggcggcctggcgggtggcatcgagatctgcatcaccttccccaccgagtacgtgaagacgcagctgcagctggacgagcgctcgcacccgccgcggtaccggggcatcggggactgcgtgcggcagacggttcgcagccatggcgtcctgggcctgtaccgcggccttagctccctgctctacggttccatccccaaggcggccgtcaggtttggaatgttcgagttcctcagcaaccacatgcgggatgcccagggacggctggacagcacgcgtgggctgctgtgcggcctgggcgctggcgtggccgaggccgtggtggtcgtgtgccccatggagaccatcaaggtgaagttcatccacgaccagacctccccaaaccccaagtacagaggattcttccacggggttagggagattgtgcgggaacaagggctgaaggggacgtaccagggcctcacagccactgtcctgaagcagggctcgaaccaggccatccgcttcttcgtcatgacctccctgcgcaactggtaccgaggggacaaccccaacaagcccatgaaccctctgatcactggggtcttcggagctattgcaggcgcagccagtgtctttggaaacactcctctggatgtgattaagacccggatgcagggcctggaggcgcacaaataccggaacacgtgggactgcggcttgcagatcctgaagaaggaggggctcaaggcattctacaagggcactgtcccccgcctgggccgggtctgcctggatgtggccatagtgtttgtcatctatgatgaagtggtgaagctgctcaacaaagtgtggaagacggactaagcctagagaggccgcaaggggaccgccccaggcaccgccagagtgtcctgctacctttgtctcacgattccagtgcagtagtgccaaaaggccccttcccacgtccctcgagctctgtagcctggtctgtgcattgtggctgtcaaatccatgtgtcccccctgtggtctgtgtgtgacaccaccactgtgtcccagtgtctggcccagccatggctggatgtgcatctggcctatgaccctgtgcctgtgtttcatgttctgtgtcacgtgaccctgtgccccgcctcccggggtgcccgtgtggcctgggtcctcggccctgtagccctggcccggtcccagtccggtgccttccaccctgccctggcctaccacagctgcctccgggcctcggcctggcttcaccgcattccaggggctgcagccccctgcttctcccgccattggccttaactggccctcgggccctctctccgccccggacagggtggcacccaccactctcaggaccaccctgccaaggcagaataaaccggatcctgttgcagc

SEQ ID NO: 9590 - DNA, 600 bp, Homo sapiens
cagagtcccatctcttccccaaccctggataccagtagcttcccacccagtccaaacctgcaccatccatcattatgtagatgaaaaagccataggtcatagcctctttgctattctattggagtagcctccctaggcagtccctctgaagccttggagtgcaggtaaatgctcattcccaagtagcaaagagaccatggagaaggtgcgtgtaaagagatatatttttgtaagaggaatatgattaatacattccgccccttggaacctggccatgcaaagcaagggcacagggattagacctgtggcacacttccccaattccctcatctgtaggatttgggctgccccaggcccacccagggggctctgaatgtattttgtaccgtgtttctttcccccaggagaatttttagtcttctttcatgaagcagtggaggggttggcctcccttctactgggaggttgactctctctgggagactcttggtccaagacctgggtcagttctttgctggtggtcccctctgaccacaagcttctgcctgaagattcctcaggtcaacaccatcattaaatgcgagttttgttgatgattct

SEQ ID NO: 9591 - DNA, 942 bp, Homo sapiens; identical to SEQ ID NO: 4356

SEQ ID NO: 9592 - DNA, 600 bp, Homo sapiens
agctactacctgtagacaaagccttctatgaagcaggcattgctgccaaggcagttggctgggataacatggcattcatcttcctcaatcgctttttggacctgaccgatgcaatcgaggaagggactctagatggccttgaccactctgattttcaggatacagacattccctttgaggtgccactcccagctaagcagcatgtaccggaggctgagagagaagaggttcgagactgggtgcttacagtctccatggaccagcggctggagcaggttctgcctcgggatgagcgtggcgcctacgaggcctccctagtggcagcgagcactggtgttcgagccctgccctgccttattacaggataccccattctgaggaacaaaattgaatttaagcggccagggaaggctgctaacaaggacaactggaataaattccttatggccatcaagacctcccacagcccagtgtgccaggacgtgctgaaattcatcagtcagtggtgtggagggctccccagcaccagcttttcctttcagtagttggtagagctgaggaagagttagggcctctccctcattaaagttttataaataa

SEQ ID NO: 9593 - DNA, 1400 bp, Homo sapiens
gcccaatgtcaaggcccaaccagagaactgccagaatcgggcattcagttgggcactcctcgggagaaagttccagctggtcggagtaaggccgaacttcgggctgagcgtcgagccaagcaggaggccgagcgggccctgaaacaggcaagaaaaggggaacaaggaggaccacctcctaaggccagccccagcacagctggagaaaccccctcaggagtgaagcgtctccctgagtaccctcaggttgatgacctacttctgagaaggcttgttaaaaaaccagagcgtcaacaggttcctacacgaaaggattatggatccaaagtcagtctcttctctcacctaccccagtacagcagacaaaactctctgacccagcatcccatcctctgtgatccacccagccatggtgcgactcggcctgcagtactcccagggcctggtcagtggctccaatgcccggtgtattgccctgcttcgtgccttgcagcaggtgattcaggattacacaacaccgcctaatgaagaactctccagggatctagtgaataaactaaaaccctacatgagcttcctgactcagtgccgtcccctgtcagcgagcatgcacaacgccatcaagttccttaacaaggaaatcaccagtgtgggcagttccaagcgggaagaggaggccaagtcagaacttcgagcagccattgatcggtatgtgcaagagaagattgtgctagcagctcaggcaatttcacgctttgcttaccagaagatcagtaatggagatgtgatcctggtatatggatgctcatctctggtatcacgaattcttcaggaggcttggacagagggccggcggtttcgggtggtagtggtggacagccggccatggctggaaggaaggcacacactacgttctctagtccatgctggtgtcccagcctcctacctgctgattcctgcagcctcctatgtgctcccagaggtttccaaggtgctattgggagctcatgcactcttggccaacgggtctgtgatgtcacgggtagggacagcacagttagccctggtggctcgagcccataatgtaccagtgctggtttgctgtgaaacatacaagttctgtgagcgtgtgcagactgatgcctttgtctctaatgagctagatgaccctgatgatctgcaatgtaagcggggagaacatgttgcgctggctaactggcagaaccacgcatccctacggttgttgaatctagtctatgatgtgactcccccagagcttgtggatctggtgatcacggagctggggatgatcccttgcagttctgtacctgttgttctacgagtcaagagcagtgaccagtgacgggggaaacacagggttaataaatgccatactccct

SEQ ID NO: 9594 - DNA, 1400 bp, Homo sapiens
taacagaggctcagaagaataagcttcgacacctctcagttgtcaccctggctgctaaagtaaagtgtatcccatatgcagtgttgctggaggctcttgccctgcgtaatgtgcggcagctggaagaccttgtgattgaggctgtgtatgctgacgtgcttcgtggctccctggaccagcgcaaccagcggctcgaggttgactacagcatcgggcgggacatccagcgccaggacctcagtgccattgcccgaaccctgcaggaatggtgtgtgggctgtgaggtcgtgctgtcaggcattgaggagcaggtgagccgtgccaaccaacacaaggagcagcagctgggcctgaagcagcagattgagagtgaggttgccaaccttaaaaaaaccattaaagttacgacggcagcagcagccgcagccacatctcaggaccctgagcaacacctgactgagctgagggaaccagctcctggcaccaaccagcgccagcccagcaagaaagcctcaaagggcaaggggctccgagggagcgccaagatttggtccaagtcgaattgaaaggactgtcgtttcctccctggggatgtggggtcccagctgcctgcctgcctcttaggagtcctcagagagccttctgtgcccctggccagctgataatcctaggttcatgacccttcacctcccctaaccccaaacatagatcacaccttctctagggaggaggcaaatgtaggtcatgtttttgttggtactttctgttttttgtgacttcatgtgttccattgctccccgctgccatgctctctcccttgtttccttaagagctcagcatctgtccctgttcattacatgtcattgagtaggtgggtagccctgatgggggtcgctctgtctggagcataacccacaggcgttttttctgccaccccatccctgcatgcctgatccccagttcctataccctacccctgacctattgagcagcctctgaagagccatagggcccccacctttactcacaccctgagaattctgggagccagtctgccatgccaggagtcactggacatgttcatcctagaatcctgtcacactacagtcatttcttttcctctctctggcccttgggtcctgggaatgctgctgcttcaaccccagagcctaagaatggcagccgtttcttaacatgttgagagatgattctttcttggccctggccatctcgggaagcttgatggcaatcctggaagggtttaatctccttttgtgagtttggtggggaagggaagggtatatagattgtattaaaaaaaaaaaggtatatatgcatatatctatatataatatgacgcagaaataaatctatgagaaatctatctacaaactaccctg

SEQ ID NO: 9595 - DNA, 600 bp, Homo sapiens
cttctggctgccctaccacgtggtgaacctggctgaggcgggccgcgcgctggccggccaggccgccgggttagggctcgtggggaagcggctgagcctggcccgcaacgtgctcatcgcactcgccttcctgagcagcagcgtgaaccccgtgctgtacgcgtgcgccggcggcggcctgctgcgctcggcgggcgtgggcttcgtcgccaagctgctggagggcacgggctccgaggcgtccagcacgcgccgcgggggcagcctgggccagaccgctaggagcggccccgccgctctggagcccggcccttccgagagcctcactgcctccagccctctcaagttaaacgaactgaactaggcctggtggaaggaggcgcactttcctcctggcagaatgctagctctgagccagttcagtacctggaggaggagcaggggcgtggagggcgtggagggcgtgggagcgtgggaggcgggagtggagtggaagaagagggagaggtggagcaaagtgagggccgagtgagagcgtgctccagcctggctcccacaggcagctttaaccattaaaactgaagtctgaaatttggtcaa

SEQ ID NO: 9596 - DNA, 600 bp, Homo sapiens
cttcgtcatgcagtggagggggctgagcagtggcagcagaagggccgcctccattcctactaaggggctctgagcttctgcccccagaatcattccaaccgacccactgcaaagactatgacagcatcaaatttcaggacctgcagacagtacaggctagataacccacccaatttccccactgtcctctgatcccctcgtgacagaacctttcagcataacgcctcacatcccaagtctatacccttacctgaagaatgctgttctttcctagccacctttctggcctcccacttgccctgaaaggccaagatcaagatgtcccccaggcatcttgatcccagcctgactgctgctacatctaatcccctaccaatgcctcctgtccctaaactccccagcatactgatgacagccctctctgactttaccttgagatctgtcttcatacccttcccctcaaactaacaaaaacatttccaataaaaatatcaaatatttaccactaagacttctgactccaatttaaaccaggaaagggatggggtggataccccattttgccctcccccatcaacacccagtcccagatccaaagcc

SEQ ID NO: 9597 - DNA, 1400 bp, Homo sapiens
gagagctggagctctgtgcccgtttcctggaggtggatgagcggaactttcactgctgggactatcggcggtttgtggccacacaggcagccgtgccccctgcagaagagctagccttcactgacagcctcatcacccgaaacttctccaactactcttcctggcattaccgctcctgtctcttgccccagctgcacccccagccggattctggaccacaggggcgcctccctgaggatgtgctgctcaaagagctggagctggtgcagaatgccttcttcactgaccccaatgaccagagtgcctggttttatcaccgttggctcctaggccgagctgacccccaggatgcactgcgctgcctgcatgtgagccgggacgaggcctgtctgactgtctccttctctcggcccctcttagtgggctccaggatggagatcttgctgctcatggttgatgattctcccctgattgtggagtggaggaccccagatggcaggaaccggcccagccatgtctggctctgtgacctgcctgctgcctccctcaacgaccagttgccccaacatacatttcgcgtcatttggacagcaggcgatgtccagaaagaatgcgtgcttttaaaaggccgccaggagggctggtgccgggactccacgacagacgagcagctattcaggtgtgagctgtcagtggagaagtccacagtgctgcagtctgagctggaatcctgtaaggagctgcaggagctggagcctgagaataaatggtgcctgcttaccatcatcctgctgatgcgggcactggaccccctgctgtatgagaaggagaccctgcagtacttccagaccctcaaggccgtggaccccatgcgggcaacgtatctggatgacctgcgcagcaagttcttgctggagaatagcgtgctcaagatggagtatgccgaggtgcgtgtgctgcacctggctcacaaggatctgacagtgctctgccatctggaacagctgctcttggtcacccatcttgacttgtcacacaatcgcctccgaaccctgccacctgcactggctgccctgcgctgccttgaggtgctgcaggccagtgataatgccatagagtccctggacggcgtcaccaacctaccccggctgcaggagctgctactgtgcaacaaccgcctccagcagcctgcagtgctccagcctcttgcctcctgccccaggctggtcctcctcaacctgcagggtaacccgctgtgccaagcggtgggcatcttggagcaactggctgaactgctgccttcagttagcagcgtcctcacctaagaggccctgccccctacccttgccctttaacttattgggactgaataaagaatggagaggccctctcaggctacc

SEQ ID NO: 9598 - DNA, 600 bp, Homo sapiens
aggattggatcaacagcctcctctcttggggactctcaagagcctgtgttcatctagaagtagtagtttgattctggtttccctcctacagtgtgtcctccgtctctgtgcagctccgtcattaccataggggacttggttttagactctgatgaggaagaaaatggccagggggaaggaaaggtgagtgggaaggagcagaaagctgggaaaggggatgggtagaacaagactgagaaatccacatgcttcagaattcagagggttcagggaatggtttcggatagtaggctctccctgctcccttctctacaggaatctctggaaaactatcagaagacaaagtttgacaccttgatacccactctctgtgaatacctacccccttctggccacggtgccatacctgtttcttcctgtgactgtagagacagttctagacctttgtgatagaactaaaatgctctctgtactctagtctcctgcctcctcagctctgcaagtagtttagtaggaatgaagtggaagtccaggcttggattgcctaactacactgctaaaaatatttgtaatccttaataattaaactttggatttgtt

SEQ ID NO: 9599 - DNA, 1160 bp, Homo sapiens; identical to SEQ ID NO: 4364

SEQ ID NO: 9600 - DNA, 600 bp, Homo sapiens
ggaagactcgcctgcgctgtgcactcaacaagagttctgaatttaaggaggttcctgagaggggccgcatggatgttgctgagccctacaaggtgtatcagttgctgccaccaggaatcgtctctggccagccagggactcagaaagtaccatcaaagcgacagcacagttctgtgtcctctgagaggaaggaggaagaggatgccatgcagaactgcacactcagtccctctgtgctccaggactccctcaataatgaggaggagggggccagtgggggagcagtccattcagacattgggagcagcagcagcagcagcagccctgagccacaggaagttacagacacaactgaggccccctttcaaggggatcagaggtccctggagtttctgcttcctccagagccagacttggtcaggtactttcagggcctgggccccccaccgaagttccaggtaacactgaatttctgggaagagagccatggctccagccatactccacagaatcttatcacagtgaaatggagcaggcctttgcccgatacttgctggagcagactccagagcagcaggcagccattctgtccctggtgta

SEQ ID NO: 9601 - DNA, 1400 bp, Homo sapiens
ttacagacagcaggtcgctttctacggacagacgttagggcaggcgcaggcccacagccaggagcagtaggacagcgtcctcgtggccaactctcccctcaaaatcattgtcaaagaaaacctatttgtaacagaggtttttacatttgcaaaccttttgatgaagaactgttgttttgttctgtgaaacactatatttagattaacggaatttttctaaaaatcaggaaaattagttactaaaaattgctgatcatttttgtttcattatttttgttatttcaaatgtataagctctgggattctttttggagcaatacctacaaagtcaggcaccagaatgtgcctcagagctgtgacatttcaacatgatggttttggtttggtttggttttgtgtcctttttatttgcagttttttctgttgcaacagaaagtggcttggaagtcttaggtggtatgtaacaaattctttttaaaaattttaaagcagtatttaagtattcttaaatgtgtaaattcatttaatgttttacttctaatttcttgtatcttggctgtctggttttattgcatttttaaaaaaactgaactattatgtattgtaatgaatgatgtgaattctgaactgagacagataattgtattgctgtccaacaggggttgggaggggcattttgtagggtttgtataatttctagagttcgaaaggggtaatataaaaatgtgctcgtgtgtttagcctacgtttttctcatgcctccattaccagttgcaattgtgtatctaagacctccaagcttgtttttaaaacaaaacaaaaaacctttctctattatctcagaaatataaatactgttatttttaatattaagaaattcaatataacttttaacacacactgtggaacattaaaccgtataaaaatgtagttataactatttttaattccaaggtgttgtttgcttttttcttttaaatattttcttaatattttgtcagattaactagatgaataaataaatctagtattaaccgcattatgaattaaataattttgatttaatgaaagggataatatgatttccagtgtttactgtagtgtatcttgtacagataacatgtatttttaaaggaaaaaaaacggaattgaagctattttttcttgcatttctaattgacctgagggacattccgtttgaaatgtactgaagttacagtttctggttttttctccttatttttcttataatgcttgaaatgtctaactattaaaaaagacaattggaaaatgttatgcatggggtttttaagaaaacaaagtgttctttttatttgactgacaattcattttacactctatataataaaatctccacaaggcatcttgtgggcaaagtc

SEQ ID NO: 9602 - DNA, 600 bp, Homo sapiens
ctcaggcttgggctctaagctctgtgtctagtgtagaacatggggaaggagcatcttaggaactgctgaagtaacttcttactgctctcacaattctaaggaagcgggagaacggcctcctaccaacagcgcccaccccagagctgcctgggaaagggcagttttactgaaaggtgctttactgttcacctgcatctttcagcagctcccctcctgccctcacctggtcttttccctctttatcccaagcctttatgcttgagtcccttccccaggggctgcccacccgacagttccaggcattccctacctgagcttcttgtctgcttttccttctcccactgcaagcggctgcttgtggggcctgggatgagccctctctgtccccaccggccctccttgccaagccattcctgggtgagttcaggcctgcgggagccacacattcatctccacctggacacttgagccgcatggccagacccctcccacctgatgcggtggtgcgtgtgatttgtcaaaagaaagccttctggatgctgttaagatgtacccttcaggtgaacctggtatcagacccacagtacttgctgtttgaga

SEQ ID NO: 9603 - DNA, 1400 bp, Homo sapiens
cacggggtcaaatggccccagtccaatcccaaattcctttgtgctgactatgccgagcaagatgagctggattatcaccgaggcctcttggtggaccgtccctctgaaactaagacagaggagcagggaataccacggcccctgcaccccccacccccacccccggtccagccaccacagcacccccgggcagagcagcgggagcaggaacgggcagtgcgggaacagtgggcagaacgggaacgggaaatggagcggcgggagcggactcgatcagagcgtgaatgggatcgggacaaagttcgagaagggccccgttcccgatcaaggtcccgtgaccgccgccgcaaggaacgtgcgaagtctaaagaaaagaagagtgagaagaaagagaaagcccaggaggaaccacctgccaagctgctggatgaccttttccgaaagaccaaggcagctccctgcatctattggctcccactgactgacagccagatcgttcagaaagaggcagagcgggccgaacgggccaaggagcgggagaagcggcgaaaggagcaagaagaagaagagcaaaaggagcgggagaaggaagccgagcgggaacggaaccgacagctggagcgagagaaacgtcgggagcacagtcgggagagggacagggagagagagagagaaagggagcgggacaggggggaccgagatcgggatagggaaagggaccgagaacgaggcagggaaagggatcgcagggacaccaagcgccacagcagaagccggagtcggagcacacctgtgcgggaccggggtgggcgccgctagctgggaaaacactagagctgcaggtaccagccactcggccccagggggttatggccacagagggataggcacagtctccaccaccctggagccaagggtctttcacatcacctatccctacatacataccaaatggaaaagtggccatccttttccccccaaacacacccccttaacctatctcttgggacttagcccgaccctccctctcatttcccattaagtctgagaggcaagagctaggttaggcaaggaggtggttggccagagatggggaacagccaggtgccccagtcctctgatttttcctccatcctgcttaccacctccctgggtacttacagccttctcttgggaacagccggggccaggactgggtcacctatgagctgaatcagcatctcctcctgagtcccagggcccctgcagttcccagtctcttctgtcctgcagcccttgcctctttcccacaggttccactttatatccaccttttccttttgttcaatttttatttttattttttttattattaaatgatgtggtctatggaaaaaaaaataaaaatctgacttagtttt

SEQ ID NO: 9604 - DNA, 1400 bp, Homo sapiens
acctacatccagaatgagcacagtcgcaagggcaaccaccaccgcttcatcaccgagaaaagggtcttctcatcgtgggcccagctgtatggcatcaccttctcccacccctcctggacctaggccacccagcctgtgggacctcaggagggtcagaggagaagcagcctccgcccagccgctaggccagggaccatcttctggccaatcaaggcttgctggagtgtctcccagccaatcagggccttgaggaggatgtatcctccagccaatcagggcctggggaatctgttggcgaatcagggatttgggagtctatgcggttaatcaggggtgtctttcttgtgcagtcagggtctgcgcacagtcaatcagggtagagggggtatttctgagtcaatctgaggctaaggacatgtcctttcccatgaggccttggttcagagccccaggaatggaccccccaatcactccccactctcctgggataatggggtcctgtcccaaggagctgggaacttggtgttgccccctcaatttccagcaccagaaagagagattgtgtgggggtagaagctgtctggaggcccggccagagaatttgtggggttgtggaggttgtgggggcggtggggaggtcccagaggtgggaggccggcatccaggtcttggctctgccctgagaccttggacaaacccttccccctctctgggcacccttctgcccacaccagtttccagtgcggagtctgagaccctttccacctcccctacaagtgccctcgggtctgtcctccccgtctggaccctcccagccactatcccttgctggaaggctcagctctttggggggtctggggtgacctccccacctcctggaaaactttagggtatttttgcgcaaactccttcagggttgggggactctgaaggaaacgggacaaaaccttaagctgttttcttagcccctcagccagctgccattagcttggctcttaaagggccaggcctccttttctgccctctagcagggaggttttccaactgttggaggcgcctttggggctgcccctttgtctggagtcactgggggcttccgagggtctccctcgaccctctgtcgtcctgggatggctgtcgggagctgtatcacctgggttctgtcccctggctctgtatcaggcactttattaaagctgggcctcagtggggtgtgtttgtctcctgctcttctggagcctggaaggaaagggcttcaggaggaggctgtgaggctggagggaccagatggaggaggccagcagctagccattgcacactggggtgatgggtgggggcggtgactgccccagacttggttttgtaatgatttgtacaggaataaacacacctacgctccg

SEQ ID NO: 9605 - DNA, 600 bp, Homo sapiens
cctctctccttttcctgtacctttaacctttagtctgtcaaggaaaacccttaggacctctgaatcaagaggactgagtttgtgggtgaaccttgaaggtgctctttctgctacaagggccctgggagatagcatggacgtgcattgagaagccagcctcagaccttagcttgaagcagcttgaggccagacctactgtagcctcagcatcttgctaggaggcatggaagtgatctatcctgccaggaggcctcagagtgatctgtcctgccaggaggtgtgagagtgatctgtcctgtgaggcatttaggggctttcaggaatttagtaaaaggtggagtatgcctttccagtatcttccatcttcctttgtatacttgtccttcctcccatttcctccctttggcccgaggtaggaggatggagggaggctgctactctaccacttcctgtgtgcctctactgtggcctcaaccctggcaattatagctactcccatcccttacctgggcatgtgtgagcccttctcactggattttatacccttgtgtctgtgtacataaatatatatacatatatatatacataaaaactttgtac

SEQ ID NO: 9606 - DNA, 925 bp, Homo sapiens; identical to SEQ ID NO: 4371
  misc_feature (349)..(381): n is a, c, g, or t

SEQ ID NO: 9607 - DNA, 1400 bp, Homo sapiens
attgggcagcccacaagctaacaggcctcacctcttccattccggagatgatccttggacatcttttcagccaggaagagctctctggaaattctgagttgatacaaaagtacagaaatatcattacacatgcacccaacctggataacattgaattgtactggaacagctacaacaaccgccgagacctgaactttgagcgtggaggtgatatcaccctcaggtgtcctgtgatgctggtggtaggagaccaagcacctcatgaagatgcagtggtggaatgtaactcaaaactggaccccacccagacctcgttcctcaagatggctgactccggaggtcagccccagctgactcagccaggcaagctgaccgaggccttcaagtacttcctgcaaggcatgggctacatggcctcatcctgcatgactcgcctgtcccggtctcgtacagcctctctgaccagtgcagcatccgttgatggcaaccggtcccgctctcgcaccctgtcccagagcagcgagtctggaactctttcttcggggcccccggggcacaccatggaggtctcctgttgaatggcccttgttgccctagagtgggacccagccctcacctcccccagagctaacctgggaggtgctgaaggggcattgggccaccgtaagcaagggaaaaagggcagatcatgcggggagatgaccttgatctttgattgctaccctaaccttgacctttaacccgtgattccccccagctcctggaagagatgtcctaatatctcttagggacccagacccctaaattctcctcctcccccattttgatgttaaggtggagagggcatatgcatcctctgtcctgatctaggtgtctatagctgaggggtaagaggttgttgtagttgtcctggtgcctccatcagactctccctacttgtcccatatttgcaaggggaggggatttggggctggggctccattcaccaaagctgaggtggcttctcattaaccctttaggactctgaagggtatggacctacgtgaatgtgtgtcagggggagacttgctggtgggttagtggtcctcaggatgtgatagaaacatccagtgtaaaaaggaagttggaatgggagttggcgggcagtgaacgagtgtggggaaggattggtgctggggcaacaggaaggggcctggggccgtttggctgcactaactttggtagctcagtgtgcatctagagtgggactggggagggagctaagcttgggctgggctgcttggggcttggcatagggtggaaagggctaccctggggctctgaccacactgtagtatgtgtggagggtgccctcccgtctcccacaacttctgctataacaataaactgtagaggaatct

SEQ ID NO: 9608 - DNA, 600 bp, Homo sapiens
cctgttccctctgcagctgttctgggcaggtccataagaaggtgggttggggcctccgaccccccactgctccgcctgcagcgttgagaaacccagccccatctcaccacgggtccccacacctctgagggggtctcagggcccccaatggccagggacccagaaggctcacctgcagccaccccacacatccctgccactgtgggcatcagaggccctctccctccagggtgcatctcctggtcaggaggggggaggctgaggggtcccggttgccttaggcccggcctgcacaggtcgtgaggaaaagcacctggtttcggccgggcgcagtggctcacgcttgtaatcccagcactttgggaggccgaggtgggtgaatcatgcggtcaggagttcgagaccagcctggccaacatggcgaaaccctcgtccctactaaaaatacaaaaaattagttgggcgtagtggtgggtgcctctaatcccagctacctgggaggctgagacaggagaatcacttgaacccgggaggcggaagttgcagtgagccgagatcctgccactgctctccagcctggcgacggaggaatgctgtctc

SEQ ID NO: 9609 - DNA, 600 bp, Homo sapiens
acacgatttactgccaaaacagagtggagtacgagaaaagggtccgagcacaagccaagaagtttgcgccctcataagcagcgaccttgtggcatcgtcaaaaggaagggattggtttggcaagaacttgtttacaacatttttgcaaatctaaagttgctccatacaatgactagtcacctgggggggttgggcgggcgccatcttccattgccgccgcgggtgtgcggtctcgattcgctgaattgcccgtttccatacagggtctcttccttcggtcttttgtatttttgattgttatgtaaaactcgcttttattttaatattgatgtcagtatttcaactgctgtaaaattataaacttttatacttgggtaagtcccccaggggcgagttcctcgctctgggatgcaggcatgcttctcaccgtgcagagctgcacttggcctcagctggctgtatggaaatgcaccctccctcctgccgctcctctctagaaccttctagaacctgggctgtgctgcttttgagcctcagaccccaggtcagcatctcggttctgcgccacttcctttgtgtttatatggcgttttgtctgtg

SEQ ID NO: 9610 - DNA, 1400 bp, Homo sapiens
gaacatgtaaagcactgtttccgcctgactcaggaattcaggcatctctctaacactcatacaaatcatgaggataaactgcaggtgaagaacatcatttaccatgcagtgaaagatgcggttggcaccctcaaggctcatgaatccaaactggcaaggtcctaggcatggagaaactccaagctcctctgtgaagcaggtctttcactcacaacacttaacagggaacggcagggctctttgctggagcagaggcccttcacccagagccagtgtggtcagtattccaaactctccagccactctcttctacgctgcctcaacactgaaggttgacacaggaaagtcgtactgttcacacacacagtttgagactccaagccaagagtgccacatccctatcctgtggccttttggaaatccaaattgcctgaacatggcggggctttcctgcacattctcctgatttgagattcacgggcacacctttcttttcttttcctcttgtgcctagttaagtgggaatgtgtttggagataggggaaatcacataactggtacaagtatggggtaattgcttaaacatgcctggtggaagtctgatagcgtctctgcacgtgacctctgacaaagcccatcccaggagacggggtgaagctattccccacactctcctgtgaacactggagtcttgcaagacccagggagaacccactgcttttcccaggaggctccaggattaggaaatgtgtgtatttagtgaaaaataggtttgtagtgaaatagttactatttcatgaaagtagatatttttagaatttttgaaataccacagttgttttcctggattataaggaaaggcacattacatttagtcttcctttcgatataaaactctttgaagaaatatgatttttagaaatcagctacccattatagcacaaaatcagccaaagcagaatttttaaaaattggcttttttaggattctttttctccccctcccatcttagtcttaccttgagggaacagtcatatgagaaggaactttgtcacatctaagctgtggtgtgttccccatgtgtgtgtacaacactggtgactccaggaaccattttcacctattaccagtgttccctggggactcctcttaatgtttccaaatgggaaggacagttgatttccaacatgaggttttttgttttttatccagaaatattttcagcaaaactttccaactgagtggagtctgattaaggatttatttgaaaatggtgggattcattggcccataggtacattggaaaatgtatatctctccagctgtactgtagtgccctgcaggctgtttatatgttcacagttacttttttttttttttaaataaaagtcatttaatgt

SEQ ID NO: 9611 - DNA, 600 bp, Homo sapiens
ataaaactctttgaagaaatatgatttttagaaatcagctacccattatagcacaaaatcagccaaagcagaatttttaaaaattggcttttttaggattctttttctccccctcccatcttagtcttaccttgagggaacagtcatatgagaaggaactttgtcacatctaagctgtggtgtgttccccatgtgtgtgtacaacactggtgactccaggaaccattttcacctattaccagtgttccctggggactcctcttaatgtttccaaatgggaaggacagttgatttccaacatgaggttttttgttttttatccagaaatattttcagcaaaactttccaactgagtggagtctgattaaggatttatttgaaaatggtgggattcattggcccataggtacattggaaaatgtatatctctccagctgtactgtagtgccctgcaggctgtttatatgttcacagttacttttttttttttttaaataaaagtcatttaatgtagaatacttttaatttcactttctgtattttaattttgttgaagggctgattgggatttccatgttcttattaaaaatctaacaaatc

SEQ ID NO: 9612 - DNA, 600 bp, Homo sapiens
ttcccttgggggctttgaaataacaccaccagtggtcttaaggttgaagtgtggttcagggccagtgcatattagtggacagcacttagtagctgtggaggaagatgcagagtcagaagatgaagaggaggaggatgtgaaactcttaagtatatctggaaagcggtctgcccctggaggtggtagcaaggttccacagaaaaaagtaaaacttgctgctgatgaagatgatgacgatgatgatgaagaggatgatgatgaagatgatgatgatgatgattttgatgatgaggaagctgaagaaaaagcgccagtgaagaaatctatacgagatactccagccaaaaatgcacaaaagtcaaatcagaatggaaaagactcaaaaccatcatcaacaccaagatcaaaaggacaagaatccttcaagaaacaggaaaaaactcctaaaacaccaaaaggacctagttctgtagaagacattaaagcaaaaatgcaagcaagtatagaaaaagcgcattgaacagtcctgggcactacatgtaaattaagcccaaagatggggagaaaggaaaaggagagacaaatatagtccatactgag

SEQ ID NO: 9613 - DNA, 600 bp, Homo sapiens
ctgataaggagatgatgttgaacacactgcataaatttgcctggttcagtatgtatagaagcatattcagtggtcttttcaagagtaaaccagaaacacttttgggcccaacacttgcagttgccttcctgatgtaaaaactaacatgctagataatccagtgtcaggaagacaaagatgttttggttctctgaagaagcttataataatacatgtagggagcaattggtcaaaagtggctttttgtttccccaaggggaaagactggctttgtaatcataattttttccttatttattttacttaaaactggtagagtctaagtattgtatgaagtgcccatgattctgtcagtaaatttgagcatatttttattagttaatgtcagtttaagtagtccttttgtttgtttctatttttaaggtgaattttaaattatatctgaaatcagtaagataccttgagaaaaactgcaatgagaggaggtaaatatcctttttcaggaggaactgatatctctggccaaatatttgtccttttattatggtttctaaatcagttattttcttcagctttaatttcataaaattaaaaaactat

SEQ ID NO: 9614 - DNA, 600 bp, Homo sapiens
tatgcaaaccaatacatcacatcagcagaatgaaggacaaaaatcatatgatcatcttaatagacaaagaaaaagcatttgataaaattcaacatcccttcgtggtaaaaactctcaaaaaaccaagtacagaaggaacatacctcaatataataaaggccatatgtgagacccacagctgacatcatacctaatggcgaaaagcttaaagcctttcctctaagaactggaatagacaaggacggccattttcaccactcttattcaacatagtattggaagtcctagcaagagcaattaggcaagataaataagtaaaaagcatgcaaaattggaaaagaggaagtcaaatggtccctctttgcagatgacatgctttttttttagagtctttgttgcccagactggagtgcagtggcaccatctcagctcactgcagccaccactcctgggttcaagcaattcttgtgcctcagactcctgagtagctgggactacaggcatgtgccatgacacccagctaatttttgtatttttactagagatgaggatttcccatattggccaggctggtcccgaactcctggccccctgtgatct

SEQ ID NO: 9615 - DNA, 1400 bp, Homo sapiens
agagtgctgttcacagtgcaagattttagaaagagaaggggaagaaaatgaagccttacataagatgattgcaaacgagcaaaagacttctctcccaaatttgttccaggataaaaacagaccgtgtctcagtaactggccagaggatacggatgtcctctacatcgtgtctcagttctttgtagaagagtggcggaaatttgttagaaagcctacaagatgcagccctgtgtcatcagttgggaacagtgctcttttgtgtccccacgggggcctcatgtttacatttgcttccatgaccaaagaagattctaaacttatagctctcatatggcccagtgagtggcaaatgatacaaaagctctttgttgtggatcatgtaattaaaatcacgagaattgaagtgggagatgtaaacccttcagaaacacagtatatttctgagcccaaactctgtccagaatgcagagaaggcttattgtgtcagcagcagagggacctgcgtgaatacactcaagccaccatctatgtccataaagttgtggataataaaaaggtgatgaaggattcggctccggaactgaatgtgagtagttctgaaacagaggaggacaaggaagaagctaaaccagatggagaaaaagatccagattttaatcaaatcatgcatgcattttcagttgctccttttgaccagaatttgtcaattgatggaaagattttaagtgatgactgtgccaccctaggcacccttggcgtcattcctgaatctgtcattttattgaaggctgatgaaccaattgcagattatgctgcaatggatgatgtcatgcaagtttgtatgccagaagaagggtttaaaggtactggtcttcttggacattaatctttgaatacttgctgactgctaagaaatgaccagaggggaagaggagtttgacatgttagggcattaaagcaaaggtggatttaagaattaaaccattacatgccccttccaaaaggcagaaatccattcaaacgtgactgtcccaaatgccttatgtcaaataaagcagattgcactgatggacatcagacttgaaggaaatgtttccaattttatatttaaggggggtggtgggtgggagggggcaagtaaagacggaacaagtttagtagcagtaatagtaaatcatgtttacatatgagatttatagtcgtgggaggggaataaagttctgttatatttccttgctcgagtttcataccagatgcgttggtccataaaggattgtatcaagtagatgggacaacattctgctctgaacgaaaagtaattttagagacataacctgcttaccaatgcctgtctttgattcatattctactttcaataaagcatgaaagtgaagaacttg

SEQ ID NO: 9616 - DNA, 1400 bp, Homo sapiens
gattcacagaggccttcatcatagactggtatataagcgcctacataaacctcaccatatttggaagattcctactccatttgcaagtcatgcttttcaccctattgatggctttcttcagagtctaccttaccatatatacccttttatctttccattacacaaggtggtttatttaagtctgtacatcttggttaatatctggacaatttccattcatgacggtgattttcgtgtaagaatgaaaaattattcaatggagagtttacaaagactgaatagattattgcccagttattcttaagtaaggacaaagaaggaaatatcatcgtatttcttttttttaataaggaaaaaataatatccatacagtcaagatacatagtaaatggtatcatttggaaatcagcatcgtgggcactgctgaggaatgatcctagtggtaggtcagaagaagatgctgtgaacaccaggactttaatcttatgcttaaaatgccagatgttgttcgggggacaacttgtatctttctagcagcagatctgtagtttgtatagcctcaacaacaattttaaataagatggagaataaattattgaggggactaggctatatgcatttgccttcatccacccatgtttattaagaatcattgtgcttaataataccaagactaagcaccataaccaagaaatactaatgtaaagattgtttcttgtttcaggaatggttaattcttcaacgttggtatgataatgataacttgttttgacttgaataaagtactacatcagtgtggaaaaaaattctgatacattagcagctatgtaaatgacctaattgatagcaggtgtaataagactatcgtcttcctacacataggaggctcattctctggacacactatcacctattacattttactgattaacaaataaattggaatttaaaaatatcgatatcaccatgatttaatccagatctgggattatgtagctaaacattgtgatgattattatttaaaaccattatttaataagagtaaaaatatgtgaatctggatatatttaaaaaaagaaatttgatgcccagataatatattaggcactactgattttttagttaaattgatgcactacacttttgatgtttgaagttacaaacctgtaatttttttgtaaaggaaataattgccaaatacctaggcccattgctgacgattagttctaaaatcttattcctcctcttctcccctcacttttccctacttcctctgcaaaaagatttaacaaatacattcataaggaaatgtgtgttgtaacaaatatattgcaaaaacatagtttgtaaaggcattctataagctatttatgtaaaatcaataaaagttgatcataatt

SEQ ID NO: 9617 - DNA, 1400 bp, Homo sapiens
ggaagcttgggttcaagcgtcactcatctgtacatagttgtaactcccatgtggagtatcagtcgctcacaggacttggatctgaagcacagtaaacgcaagaggggatttgtgtacaaaaggcaaaaaaagtatttgatatcattgtacataagagttttcagagatttcatatatatcttttacagaggctattttaatctttagtgcatggttaacagaaaaaaattatacaattttgacaatattatttttcgtatcaggttgctgtttaattttggagggggtggggaaatagttctggtgccttaacgcatggctggaatttatagaggctacaaccacatttgttcacaggagtttttggtgcggggtgggaaggatggaaggccttggatttatattgcacttcatagacccctaggctgctgtgcggtgggactccacatgcgccggaaggagcttcaggtgagcactgctcatgtgtggatgcccctgcaacaggcttccctgtctgtagagccaggggtgcaagtgccatccacacttgcagtgaatggcttttccttttaggtttaagtcctgtctgtctgtaaggcgtagaatctgtccgtctgtaaggcgtagaatgagggttgttaatccatcacaagcaaaaggtcagaacagttaaacactgcctttcctcctcctcttattttatgataaaagcaaatgtggccttctcagtatcattcgattgctatttgagacttttaaattaaggtaaaggctgctggtgttggtacctgtggatttttctatactgatgttttcgttttgccaatataatgagtattacattggccttgggggacagaaaggaggaagttctgacttttcagggctaccttatttctactaaggacccagagcaggcctgtccatgccattccttcgcacagatgaaactgagctgggactggaaaggacagcccttgacctgggttctgggtataatttgcacttttgagactggtagctaaccatcttatgagtgccaatgtgtcatttagtaaaacttaaatagaaacaaggtccttcaaatgttcctttggccaaaagctgaagggagttactgagaaaatagttaacaattactgtcaggtgtcatcactgttcaaaaggtaagcacatttagaattttgttcttgacagttaactgactaatcttacttccacaaaatatgtgaatttgctgcttctgagaggcaatgtgaaagagggagtattacttttatgtacaaagttatttatttatagaaattttggtacagtgtacattgaaaaccatgtaaaatattgaagtgtctaacaaatggcattgaagtgtctttaataaaggttcatttataaatgtc

SEQ ID NO: 9618 - DNA, 1400 bp, Homo sapiens
aatctgagctccagagccctacccatcctagttctgctctcccaccggctaccagccccactgcccaggaatcctacagccagtaccctgttcccgacgtctctacctaccagtacgatgagacctccggctactactatgacccccagaccggcctctactatgaccccaactcccagtattactacaatgctcagagccagcagtacctgtactgggatggggagaggcggacctatgttcccgccctggagcagtcggccgacggacataaggagacaggggcaccctcgaaggagggcaaagagaagaaggagaagcacaagaccaagacagctcaacagattgccaaggacatggaacgctgggcccgcagtctcaacaaacaaaaagaaaacttcaaaaatagcttccagcctatcagctccctgcgagatgacgagaggcgggagtcagccactgcagatgctggctatgccatcctcgagaagaagggagcactagccgagagacagcacaccagcatggatctcccgaaattggccagtgacgaccgcccaagccctccgcgaggactggtggcagcctacagcggggagagtgacagtgaggaggagcaggagcgtgggggccctgagcgggaggagaagctcaccgactggcagaagctggcctgtctgctctgccgacgccagttccccagcaaagaggcgctcatccggcaccagcagctctcagggctccacaagcaaaaccttgagattcaccggcgagcccacttgtcagaaaacgagctagaagcactagagaagaatgacatggagcaaatgaagtaccgggaccgtgcagctgaacgcagagaaaagtatggcatccccgagccgccagagcccaagaggaggaagtacggcggcatatccacagcctctgtagacttcgagcagcctactcgggacgggctgggcagtgacaacattggcagtcggatgctgcaggccatgggctggaaagagggcagcggcctgggccgcaagaagcagggcattgtaacgcctatcgaggcccaaacacgggtgcggggctccggcctgggtgcacggggcagctcctacggggtcacctcaaccgagtcctacaaggagacactgcacaagacaatggtgacccgcttcaacgaggcccagtgagcagcttcaagagcaacttctccacatgttgggtgtccatcctggggcagggaaggacagagtgttggatggctgggacggggccttgctcttgtcggccagcccactccccagccagagagggcttgaccaaatcaaattgaggtggtgacttttgttggaaaattgggctgggatcacgtcctgttttgtaataaaagctgaaaagtctgc

SEQ ID NO: 9619 - DNA, 1400 bp, Homo sapiens
agggcagcgcgcttggcgcttctcccctccccccgatctgcctccagtctcggacttggttgttgcgcgctccggctccggctgagctgggagagttggaggaggtggcggcgggcagaggtgatgtctgggagcccttccttgacagcccgggccgagaagagtccctgcaggaagcatcacccaggctggcagatcatggtagcagcagcgggggtggctgggaagtgaaacggagccagcggctgaggaggggccccagcagcccccgaaggccctatcaggacatggagtatgaaagacgtggtggtcgtggtgacaggactggccgctatggagccactgaccgctcgcaggatgatggtggggagaaccgcagccgagaccacgactaccgggacatggactaccgttcatatcctcgcgagtatggcagccaggagggcaagcatgactatgacgactcatctgaggagcagagtgcggaggattcctacgaggcctccccgggctccgagactcagcgtaggcggcggcggcggcacaggcacagccccaccggcccgccaggcttcccccgagacggcgactatcgggaccaggactatcggaccgagcaaggggaggaggaggaggaggaggaggatgaggaggaggaggagaaggccagtaacatcgtcatgctgaggatgctgccacaggcagccactgaggatgacatccgtggccagctgcagtcgcacggcgtgcaagcacgggaggttcggctgatgcggaacaaatcttcagcactccctcaacatcctgggccagaaggtgtcgatgcactacagtgaccccaagcccaagatcaatgaggactggctgtgcaataagtgtggcgtccagagcccaagaggaggaagtacggcggcatatccacagcctctgtagacttcgagcagcctactcgggacgggctgggcagtgacaacattggcagtcggatgctgcaggccatgggctggaaagagggcagcggcctgggccgcaagaagcagggcattgtaacgcctatcgaggcccaaacacgggtgcggggctccggcctgggtgcacggggcagctcctacggggtcacctcaaccgagtcctacaaggagacactgcacaagacaatggtgacccgcttcaacgaggcccagtgagcagcttcaagagcaacttctccacatgttgggtgtccatcctggggcagggaaggacagagtgttggatggctgggacggggccttgctcttgtcggccagcccactccccagccagagagggcttgaccaaatcaaattgaggtggtgacttttgttggaaaattgggctgggatcacgtcctgttttgtaataaaagctgaaaagtctgc

SEQ ID NO: 9620 - DNA, 1400 bp, Homo sapiens
aaatctgagctccagagccctacccatcctagttctgctctcccaccggctaccagccccactgcccaggaatcctacagccagtaccctgttcccgacgtctctacctaccagtacgatgagacctccggctactactatgacccccagaccggcctctactatgaccccaactcccagtattactacaatgctcagagccagcagtacctgtactgggatggggagaggcggacctatgttcccgccctggagcagtcggccgacggacataaggagacaggggcaccctcgaaggagggcaaagagaagaaggagaagcacaagaccaagacagctcaacagattgccaaggacatggaacgctgggcccgcagtctcaacaaacaaaaagaaaacttcaaaaatagcttccagcctatcagctccctgcgagatgacgagaggcgggagtcagccactgcagatgctggctatgccatcctcgagaagaagggagcactagccgagagacagcacaccagcatggatctcccgaaattggccagtgacgaccgcccaagccctccgcgaggactggtggcagcctacagcggggagagtgacagtgaggaggagcaggagcgtgggggccctgagcgggaggagaagctcaccgactggcagaagctggcctgtctgctctgccgacgccagttccccagcaaagaggcgctcatccggcaccagcagctctcagggctccacaagcaaaaccttgagattcaccggcgagcccacttgtcagaaaacgagctagaagcactagagaagaatgacatggagcaaatgaagtaccgggaccgtgcagctgaacgcagagaaaagtatggcatccccgagccgccagagcccaagaggaggaagtacggcggcatatccacagcctctgtagacttcgagcagcctactcgggacgggctgggcagtgacaacattggcagtcggatgctgcaggccatgggctggaaagagggcagcggcctgggccgcaagaagcagggcattgtaacgcctatcgaggcccaaacacgggtgcggggctccggcctgggtgcacggggcagctcctacggggtcacctcaaccgagtcctacaaggagacactgcacaagacaatggtgacccgcttcaacgaggcccagtgagcagcttcaagagcaacttctccacatgttgggtgtccatcctggggcagggaaggacagagtgttggatggctgggacggggccttgctcttgtcggccagcccactccccagccagagagggcttgaccaaatcaaattgaggtggtgacttttgttggaaaattgggctgggatcacgtcctgttttgtaataaaagctgaaaagtctg

SEQ ID NO: 9621 - DNA, 1400 bp, Homo sapiens
ctgtggtttaccagcagagttcaaaagaatctgccactttgcagccatttttcacgttgcagttggatatccagtcagacaagatacgcacagtccaggatgcactggagagcttggtggcaagagaatctgtccaaggttataccacaaaaaccaaacaagaggttgagataagtcgaagagtgactctggaaaaactccctcctgtcctcgtgctgcacctgaaacgattcgtttatgagaagactggtgggtgccagaagcttatcaaaaatattgaatatcctgtggacttggaaattagtaaagaactgctttctccaggggttaaaaataagaattttaaatgccaccgaacctatcggctgtttgcagtggtctaccatcacggcaacagtgcgacgggcggccattacactacagacgtcttccagatcggtctgaatggctggctgcgcatcgatgaccagacagtcaaggtgatcaaccagtaccaggtggtgaaaccaactgctgaacgcacagcctacctcctgtattaccgccgagtggacctgctgtaaaccctgtgtgcgctgtgtgtgcgcccagtgcccgcttcgtaggacaccacctcacactcacttcccgcctctctttagtggctctttagagagaaactctttctccctttgcaaaaatgggctagaatgaaaaggagatgccttggggttcgtgcacaacacagcttctgttgactctaacttccaaatcaaaatcatttggttgaaacagactgttgcttgattttagaaaatacacaaaaacccatatttctgaaataatgctgattcctgagataagaaagtggatttgatccccagtctcattgcttagtagaataaatcctgcaccagcaacaacacttgtaaatttgtgaaaatgaattttatctttccttaaaaaagaaattttttaatccatcacacttttcttccctaccctttagtttttgataaatgataaaaatgagccagttatcaaagaagaactagttcttacttcaaaagaaaaataaacataaaaaataagttgctggttcctaacaggaaaaattttaataattgtactgagagaaactgcttacgtacacattgcagatcaaatatttggagttaaaatgttagtctacatagatgggtgattgtaactttattgccattaaaagatttcaaattgcattcatgcttctgtgtacacataatgaaaaatgggcaaataatgaagatctctccttcagtctgctctgtttaattctgctgtctgctcttctctaatgctgcgtccctaattgtacacagtttagtgatatctaggagtataaagttgtcgcccatcaataaaaatcacaaagttggttt

SEQ ID NO: 9622 - DNA, 600 bp, Homo sapiens
tagtggtttgcacaaggaagataatcgatagtcatgttttttagactctctgtattgcttggtaagctacgtagtaaaaaatgtttacttttccttaaatgttttgaatttcggggttatgaaatttgttgagtaatttttagacagtcacatcttgttgactggaggcatctagtggaaaaatgcagtatttcagcctgattgtgtttgaagtaaatgattaaaagaggaggaagttaccacattctggaagatttacttgagacagacgaaccttgaattacgggaaaaggccccgtgatttaggaaataacaaatttgggaaacatgtaatggggagagactggggaataccccagttgtgaaagtacttcctgtaaggcaacatctgacaccaggaacctttctcttcagtattttaaaaacaacttaatttcagtcctttacttgtggaatcagagccttacttatgtaatacaacccactggaaaaaagctttttattgtattgtactatattgtttataagtgattgagtacctgcagagctttcttttacttaaacatattttaaaaattattaaaaagattttcatgtttg

SEQ ID NO: 9623 - DNA, 600 bp, Homo sapiens
ccacgcggcctacgtgaacaacctgaacgtcaccgaggagaagtaccaggaggcgttggccaagggagatgttacagcccagatagctcttcagcctgcactgaagttcaatggtggtggtcatatcaatcatagcattttctggacaaacctcagccctaacggtggtggagaacccaaaggggagttgctggaagccatcaaacgtgactttggttcctttgacaagtttaaggagaagctgacggctgcatctgttggtgtccaaggctcaggttggggttggcttggtttcaataaggaacggggacacttacaaattgctgcttgtccaaatcaggatccactgcaaggaacaacaggccttattccactgctggggattgatgtgtgggagcacgcttactaccttcagtataaaaatgtcaggcctgattatctaaaagctatttggaatgtaatcaactgggagaatgtaactgaaagatacatggcttgcaaaaagtaaaccacgatcgttatgctgatcataccctaatgatcccagcaagataatgtcctgtcttctaagatgtgcatcaagcctggtacatactgaaa

SEQ ID NO: 9624 - DNA, 600 bp, Homo sapiens
gagcttgagaaagccctggggatgaagctgccagaaacgaacctctttgaaactgaagaaactcgcaaaattcttgatgatatctgtgtggcaaaagctgttgaatgccctccacctcggaccacagccaggctccttgacaagcttgttggggagttcctggaagtgacttgcatcaatcctacattcatctgtgatcacccacagataatgagccctttggctaaatggcaccgctctaaagagggtctgactgagcgctttgagctgtttgtcatgaagaaagagatatgcaatgcgtatactgagctgaatgatcccatgcggcagcggcagctttttgaagaacaggccaaggccaaggctgcaggtgatgatgaggccatgttcatagatgaaaacttctgtactgccctggaatatgggctgccccccacagctggctggggcatgggcattgatcgagtcgccatgtttctcacggactccaacaacatcaaggaagtacttctgtttcctgccatgaaacccgaagacaagaaggagaatgtagcaaccactgatacactggaaagcacaacagttggcacttctgtctag

SEQ ID NO: 9625 - DNA, 1400 bp, Homo sapiens
cacaggcattaaggcaagagttagagaggcagcgacggctgctggggtctgtacagcaggatctggagaggagcttgcaggatgccagccgcggggacccagctcatgctggcttggctgagctgggccacagattggcccagaaactgcagggcctggagaactggggccaggaccctggggtctctgccaatgcctcaaaggcctggcaccagaagtcccacttccagaattctagggagtggagtggaaaggaaaagtggtgggatgggcagagagaccggaaggctgagcactggaaacataagaaggaagaatctggccgggaaaggaagaagaactggggaggtcaggaggacagggagccagcaggaaggtggaaggagggcaggccaagggtggaggagtcggggagcaagaaggagggcaagcgacagggcccgaaggaacccccaaggaaaagtggtaccttccactcctctggagaaaagcagaagcaacctcggtggagggaagggaccaaggagctacccctctcacctgctttctttggtgaggatggcatcttccgtcatgaccgcctccgcttccgggattttgtggatgccctggaggacagcttggaggaggtggctgtgcaacagacaggtgatgatgatgaagtagatgactttgaggacttcatcttcagccacttctttggagacaaagcactgaagaagaggtcagggaagaaggacaagcactcacagagcccaagagctgcggggcccagggaggggcacagccatagccaccaccaccaccaccggggctgacaccctgccccacagggaatggccttggcctggcccagcccaagatcccagcgttatctaactcctggagggtggactctgtcctggcttgtttggtgtcctcagatatctttcacacagtagagcaaaatcaccagccctgcactgatgtcactttatgtagaaaaaggccttagctggacctgcgttgccgtctatgcaaatgcatgcaaatactccaggccctgggatgtgggcttgtgttttgtcactgtgaagggggagatgggagaggagcctgttttggggtggggtctggggaaggcaatctgattctgaagctaaagagctttcatcctcttgagtgtatgtccccatagtgggccccttgacccacatgctgaccggtgccttgggatttgactagagttgctggctcgaggcccagcacgaggacttaccctggggttttgttaggtttggaagcagctgtccctagggggtgaagtcccccccctttttttttttacccctgcttctcccacggcttcacctccctatgtgaactgtagactcagatcccaataaagtgctgttgcagct

SEQ ID NO: 9626 - DNA, 968 bp, Homo sapiens; identical to SEQ ID NO: 4391

SEQ ID NO: 9627 - DNA, 1286 bp, Homo sapiens; identical to SEQ ID NO: 4392

SEQ ID NO: 9628 - DNA, 1400 bp, Homo sapiens
ctaagaaccaataaaatatttctctaattgctagttgtaaaactgtatccaaattttcagaaaagacagcttcagcttgcaaattctatcctctaaacttatctggtgcattctccccaccccacccccattatataagggctattttagatgcttttaacctccccaacaaataatttgccaagtgtccaatgagaacttatcatgttggtgtgttaggtaaatcgggcaaatatgatagtgtcttacattgggccttgattttaagttgttatatttgtacaatcgagtattttagaaattacatgaaacatgaaacagtttttgcaattttttttaaactgggcatctggtttctaaaaatttatttgaaacaatctagaattttcttggtgcaaagtgtatcatgtggaatatcctcatatttttaccatattttaagaactttaagacgattaattgtaaataatttatttgattggtgcagttctaatccctaaatcataatcttaaaatcaggaatgtgtggagaacagagccatgtcatatcactttgctcttaccattccttttgatcagcctcaattcagcctcattgtgtagtatgttttttctttctatgaaaaacaacagaaagcatttcattttatttgcctatgttcaaatatgtttaataatgaccaaagtgcattctgagttttttcaaggaatgtaatactggagctttaagaacatacttagtttctcatgtgaaaacttaggctttgtctgatgtttttccttcctctattgtctaatgttgaggttgtttttaggaattatgttttataaactttttcaatataaggtacatgcctatacagaacttaacattttgcacagaatatatcaaatatattttgagaaaaaaagtacggcatgagttctgttaggaataaaagatgaaactattgtatctcacaaaaaatcttatttcagaatggaaatatttttgagaaaagtagctgagtatactggtttaagaaaatgcttgttttagattgaggttaacttagagttgggagttgatttattaagtacagtatacctctcaacagtttataaataatatgttgaattatgtcagtgtgggcagcagtagaatactaaaaggaaaatgtcatgttaagcaatttcagaacattaactgaactattttcaaagcagaaaaattgacattgctgcctttaagaataccatgaatgtaagaaattgaaagaaattgtaaaatatcacataatatagaaatggcagttcaaagagaattgtggcagatgttgtgtgtgaactgttgtttctttgccacatgtgttgtatttgaaagttttacagtaagtttaaaataaaacattctgtgactg

SEQ ID NO: 9629 - DNA, 600 bp, Homo sapiens
cttctgctgtgagggacggggagctgtggagactccctctgtttggtcccatttccatattgctgagcacctgctgcatgctctctgtcctgctcagagccagtacctggatggaggctgtgtgttctgggtggactgggggagaatgcattctttgcagaagagacaaccaggtgctgaggcctgaagtcataaccagacctggggcactcagacaaggactggtggccaggccagaggagcagagctcagggtgtgcacagaactcagaagtcagaccactgaacagtgacagaacctttcagcccattggcaatgaggctgcccaggcagccagaggcctggtcaaatctgaggtctgcagagatggagctgtcattctgtgtttcctttggcagtcccaacaccagcctcgttgcaccctcctcttagcttccctgggttctccagccctaagggtggtagcagcttcctgcaagtatccagctctgagattctgcaacatccacttttgctctctgagccttgcaaaacctgcacaatcagtccctaacttatatcccctctgtttgaaatacctagtgtggtttctatttcctg

SEQ ID NO: 9630 - DNA, 885 bp, Homo sapiens; identical to SEQ ID NO: 4395

SEQ ID NO: 9631 - DNA, 600 bp, Homo sapiens
gtccaaagttttctattataaaatgaaaggggactaccacaggtatctggcagaatttgccacaggaaatgacaggaaggaggctgtggagaacagcctagtggcttataaagctgctagtgatattgcaatgacagaacttccaccaatgcatcctactcgcttaggtcttgctctcaaatttttctgtattctactacgaaattcttaattcccctgaccatgcctgcaggttggcaaaagcagcttttgatgatacaattgcagaactggatacgctgagtgaagaaagctataaggacactatggacttcaggcatgcagggtgatggtgaagaacagaataaagaagcgctgcaggaggtggaagatgaaaatcagtgagacataaaagccaacaagaaaaaccatctccgaccaccctgctcttccctatcccaccccttggcaactccccattgtcactgagaaccaccaaatctgacttttacatttggcgtcagaatttaggttcctgccctgttttttgtttgtttgtttgtttgtttgtttgtttgttttttaaacagttttcaaaagttcttaaaggcaagagtgaat

SEQ ID NO: 9632 - DNA, 1400 bp, Homo sapiens
caggttaaggagattttgggctgagacgatggggttttctagatatacaatcatgtcatctgcaaacagggacaatttgacttcctcttttcctaattgaataccctttatttccttctcctgcttgattgccctggccagaacttccaacactatgttgaataggagtggtgatttttgcaatctactcatctgacaaagggctaatatccagaatctacaatgaactcaaacaaatttacaagaaaaaaacaacccaatcaacaagtgggctaaggatatgaaaagacccttctcaaaagaagacattgatgcagccaacaaacacatgaaaaaatgctcatcatcactggccatcagagaaatgcaaatcaaaaccacaatgagataccatttcacaccagttagaatggcgatcattaaaaagtcagggaacaacaggtgctggagaggatgtggagaaataggaacacttttacactgttggtgggactgtaaactcattcaaccattgtggaagtcagtgtggcgattcctcagggatctagaactagaaataccatttgacccagccatcccattactgggtatatacccaaaggattataaatcatgctgctataaagacacatgcacacatatgtttattgcagcactattcacaatagcaaagacttggaaccaacccaaatgtccaacaatgatagactggattaagaaaatgtggcacatatacaccatggaatactatggagccataaaaaggatgagttcatgtcctttgtaggaacatgggtgaagctggaaaccatcattctcagcaaactatcgcaaggacaaaaaccaaacaccacatgttctcactcataggtgggaaatgaacaatgagaacacatggacaaaggaaggggaacatcacccaccagggcctgttgtggggtgcggggagaggggagggatagcattaggagatatacctaatgtaaatgatgagttaatgggtgcagcacaccaacatggcacatgtatacatacgtaacaaacctgcacattgtgcacatgtaccctaaaacttaaattaaaaaaaaaaagttcaaaaaaaaacaaacaaactcctgagtacagtttttgtgctgagctctcaaagagattacagaatgaacaaatcaagattcttctataagactgaagtgctggttaccaactttcctggttaacattcagcaaaagcattttctctctaagtcctggaactaggatcaggatattttcttttgtaaaattcacttgttactttcagaccaaagttgtgttttacataaatcatgcgatcttggcactcctgattgcttggttgaaaaaatatttctgaataaaaaatattttaaatttgccatttt

SEQ ID NO: 9633 - DNA, 600 bp, Homo sapiens
tgagaacagacgggaagcgtacgaagcgggtggaaaatcccgcagtccagccattcccttcaaaacatgcctcccagccactcaggaggctgaggcaggaggatcacttgagcccaggaggtcaaggttgcagtgagccatggagtccattgcactccatccttggtgacagagtgagacatcgtttccaaaaaaattctacagaaatgctctatttacaaatttacataatttcctttggaaatagatttaaaaattttttaaggatgaggtaggtaggcaggaaaacggggttctttttggataaaaaaattcacatggccgggtgtcatggctcatgcctgtaatcccagcactttgggaggccgaggcaggcggatcacgaggtcaggagattgagaccatcctggctaacacggtgaaactccgtctctactaaaaatacaaaaaattagccaggcatggtggcgggcgcctgtagtcccagctactcgggaggctgaggcaggagaatggcgtgaacccgggaggtggagcttgcagtgagccaagatcgtgccactgcactccagcctgggcgacagagtgagactccgcctc

SEQ ID NO: 9634 - DNA, 600 bp, Homo sapiens
catccaaagatgaatatatgaagccagctgttactggttgaaagtgtgcctcttgtttgcatggcaaaggaattcagttttgtgtttatttacagctgaagctctcttgaaataattgtctcagtcacagcttttacattttggggaaccatgccattagaactgaatattaggaactgtgatcttttgtcttttcacaattgacaatacattcagaacttatttctgataaaactgggcagtttctaaggatactgtacttatgatttaaagtcataactccatgatgcaaaagagaacaagaaatatgtttcaatgactgccttttaaattagcggtactccagcactttgggaggccgaggtgacaggatcgtttgaggccgggagttcaagacagcctgggcatcatagccagaccttgtttctactaaaaataaaaaataaataaattttccgggcatggtggcccatgcctgtagccccagctactcaggaggctgaggtgggaggatggcttgggcctaggaggttgaggccacagtgaattatgattacaccacgggactctagcctgggtgacagagtgagaccctgtctg

SEQ ID NO: 9635 - DNA, 1400 bp, Homo sapiens
cctgagtctcagactccccagtacaatgactcaagcagaaattaagctctgttctttgttgctgcaagagcattttggagagattgtagaaaaaattggagtccatctgataagaaccggcagccagccactaagagtaattgcccatgacacaggaacatcactggatcaggtgaagaaagccctgtgtgtcctcgtccaacataacctggtgagttatcaagtgcacaaacgtggtgtggtggagtatgaagcccagtgcagccgggtattgcgaatgcttagatatccccggtacatctatactaccaaaactctgtacagtgacactggagagctgattgttgaggagcttctgttgaacggcaaactgacaatgtcagctgttgtgaagaaagtggcagaccggctcacagagaccatggaggatggcaagaccatggactatgctgaagtatcaaacacatttgtgcgactggcagacacacactttgtacaacgctgcccttcggtacctaccactgagaattcagaccctgggccaccaccacctgcccccacacttgtcattaatgaaaaggacatgtacctggttcctaaactcagcttgatagggaaaggtaaaaggaggagatcatctgatgaagatgctgctggggagcccaaggccaagagaccaaaatatactacagataacaaggagcccattccagatgatgggatttattggcaggccaaccttgacagattccaccaacacttccgtgaccaagccattgtgagcgcagttgctaacaggatggaccagacaagcagcgagattgtgcgaaccatgctccgaatgagtgagattaccacttcctctagtgctcccttcacccagccattgtcttccaatgagatcttcagatccctacctgttggctataacatctctaagcaagttcttgatcagtatctcactctgctggcagatgatccactagagtttgttggaaagtctggcgacagtggtggaggaatgtatgtcatcaacctccataaggcattagcatccctagccacagccactctggagtccgtcgtacaggagagatttgggtctcgctgtgctagaatattccgtctagttttgcagaagaaacacatagagcagaagcaagtggaagactttgcaatgattcctgcaaaggaggcaaaggatatgctatataagatgctctcagaaaatttcatgtcactccaggttggatgccagtgagatccaggtggacgaaaccatcttcctgctggagtcttacattgagtgcaccatgaagagacagtgatccagaagaagcatcttcctcagaagatctggggggatggaaagcaaaataaaggaggtgcctggatgcatt

SEQ ID NO: 9636 - DNA, 1400 bp, Homo sapiens
gcagagtgatggctgtgacatcgcagaccttctatgaggtcatgtttgatgatggctcctttagcagagacacatttcctgaggatatcgtgagccgagactgtctgaagctgggcccacctgctgagggagaagtcgtccaagtcaagtggcccgatggcaaactctatggagcaaaatattttggatcaaatattgcccacatgtaccaggttgagtttgaagatggatcccagatagcaatgaagagagaggacatctacactttagatgaagagttacccaagagagtgaaagctcgattttccacagcctctgacatgcgatttgaagacacgttttatggagcagacattatccaaggggagagaaagagacaaagagtgctgagctccaggtttaagaatgaatatgtggccgaccctgtataccgcacttttttgaagagctctttccagaagaagtgccagaagagacagtagtctgcatacatcgctgcaggccacagagcagcttgggttggaagagagaagatgaagggacatccttggggctgtgccgtgagttttgctggcataggtgacagggtgtgtctctgacagtggtaaatcgggtttccagagtttggtcaccaaaaatacaaaatacacccaatgaattggacgcagcaatctgaaatcatctctagtcttgctttcacttgtgagcagttgtcttctatgatcccaaagaagttttctaagtgaaaggaaatactagtgaatcacccacaaggaaaagccactgccacagaggaggcgggtccccttgtgcggcttagggccctgtcaggaaacacacggggacctctctctctagctccagcaggtggcacctcggtacccagcgggtagggcgataatttatatattttccacagtcagggaaggactctcacttatttgtttcaaattgcagtttttataaaacatttttaaaacacaaatggcatgtatgctaatgagatttacccgtgtgctatctgtatttcccttgtacagaacttttacatttttgaatattcctattacttttgattgtgtctgatgggaactgagttgttggcctttgtgaaatgaaatttttggctcttgagaaagaattcttatgaattgttatgcgaattttatatatttaaagagggagatctggggctgttatttttaaacactttttttcataatacatattccgagtagatatttataaaatatatgtttctttcattatgtgtttgtaaaattagagtttaaataaatatgctttgatgcatagttttgaactaatgtaacatgatttttcttttttaaaacagcctgaaaatgtactagtgtttaaaaataaagatttccattttctcc

SEQ ID NO: 9637 - DNA, 600 bp, Homo sapiens
gattgactaccttctgtctcagaaagttactgatgtttgtgtcagttcatcattaagctaaactctgactttcataataaaagggataaacaaagcctaaatgctagttgtgggaatactaaagcagttttttaaaaaggaaatagtagtttcatgccctcacataccattaaaagatgaacaaacatggacaaatattcaaaactgcagtcattgaaaaatataattcacaataatttagacttcatattattgtatcataaaatattcagtggaccctgaaatgaagtcagttttattcatttagaattatatctattgtgtctgtgaaatgataaatcctaaatagagaaatttgaatggatggggtttttctgactaaaatgaaattttttttctgaataattcagtttagtgagtgcttatgatatacttgtctgcagtgatagagtcactatagattatttggttattttggaaaaaccaagggttttcttaaatcagggatgtccaatctttttgcatccctgggccatacttgaagaagaagaattgtctttggcctcacataaactacactaacaatagctgatgagctac

SEQ ID NO: 9638 - DNA, 1097 bp, Homo sapiens; identical to SEQ ID NO: 4403

SEQ ID NO: 9639 - DNA, 600 bp, Homo sapiens
tcttctcccctcaccccatgagctttttgcccttgcataggatgctagtgaggtctttcctttgggagttgtggagatcatgggaagctacagagttctgtcgcagaaacccccacccgagcctggggctcccagtaggagctctcaaacacaaagcccaacgggacaggttggtggcacgagcaagatccggcctgatcattcctaattactttaagaaaatctagacattcctatcaatgtctagattgtaacatttttgaaagcaaaagaactgtcctaatgatatcatcatttgaaaaggcctttaatattgttggtaatacatactgacaacccattcagcccaatgtagcaggcagtctgctcccaccctgaccctttccgtagtgacatctggctctcagcttattgccctttcatgtaattttcataaatcctgatttagtttcctgattttctaaagagaaggtgaactggaatttgaagaaatacaggggcttaccaggctgggcgaatagcttaagtacaaagtcatggtgagtgttgagtcagtggggaccagcctgcccacaggagaaaattaaaagacacaaaaac

SEQ ID NO: 9640 - DNA, 600 bp, Homo sapiens
cgccagccaagtgcaacttgaattgtcaatgagtatttttggaagcatttggaggaattcctagacattgcgttttctgtgttgccaaaatcccttcggacatttctcagacatctcccaagttcccatcacgtcagatttggagctggtagcgcttacgatgcccccacgtgtgaacatctgtcttggtcacagagctgggtgctgccggtcaccttgagctgtggtggctcccggcacacgagtgtccggggttcggccatgtcctcacgcgggcaggggtgggagccctcacaggcaagggggctgttggatttccatttcaggtggttttctaagtgctccttatgtgaatttcaaacacgtatggaattcattccgcatggactctgggatcaaaggctctttcctcttttgtttgagagttggttgttttaaagcttaatgtatgtttctattttaaaataaatttttctggctgtggcatttttcttgacctggtataatgaaagtatttcagatatttgagtttaacccttttccagaaagtaatacatgatatggatttatttatgcattaaaagagcaaatttaaagagc

SEQ ID NO: 9641 - DNA, 600 bp, Homo sapiens
taagattcaagagtttgccgacctacctcaggttgaaacttttggctttcggggggaagctctgagctcactttgtgcactgagtgatgtcaccatttctacctgccatgtatcggcgaaggttgggactcgactggtgtttgatcactatgggaaaatcatccagaaaaccccctacccccaccccagagggatgacagtcagtgtgaagcagttattttctacgctacctgtgcaccataaagaatttcaaaggaatattaagaagaaacgtgcctgcttccccttcgccttctgccgtgattgtcagtttcctgaggcctccccagccatgcttcctgtacagcctgcagaactaggatgtaactggagagctacgggcatgcagaagttggaagatgagggaaggcatcacagaggctgtggggtgaaccgacttcaaggaatgggtgcttcccttcagaaccacatgtgtgtgggacacccagacagaaaacacgaatgcaaagtcaagtggagggcatttggaaggagcagtgaagccaagccaggaaacaccaagatggcgagccagtgtggttgtagagattgtagagaggg

SEQ ID NO: 9642 - DNA, 1400 bp, Homo sapiens
ggtgtgagctggcatgaggacctgttggaagtgggatccaggcctggtccagcctcccagctgcctcgatttgtgcgtgtgaacactctcaagacctgctccgtttatgtagttatttcaagagacaaggtttctcctatcagggtcgggcttccaggctggatggagtgccctggcgcgatctcggctcaccgcaacctctgcctcctgggttcaagcgattctcctgcttcagccttctgagcagctgggattatgaaggggtggcctgcccctccacatctgtgggatatctcatcagccttgatgacttacaagccctcaaggggaagcattttctcctggactccttgatgccggagctgctggtgtttcccgcccagacagatctgcatgaacacccactgtaccgggccggacacctcattctgcaggacagggccagctgtctcccagccatgctgctggacccccgccaggctcccatgtcatcgatgcctgtgccgccccaggcaataagaccagtcacttggctgctcttctgaagaaccaagggaagatctttgcctttgacctggatgccaagcggctggcatccatggccacgctgctggcctgggttggcgtctcctgctgtgagctggctgaggaggacttcctggcggtctcccccttagatccgcgctatcgtgaggtccactatgtcctgctggatccttcctgcagtggctcgggtgagatggtatgccgagcagacagctggaggatcccggggcagggacacctagcccggtgcgtctgcatgccctggcagggttccagcagcgagccctgtgccacgcgctcactttcccttccctgcagcggctcgtctactccatgtgctccctctgccaggaggagaatgaagacatggtaccagatgcgctgcagcagaacccgggcgccttcaggctagctcccgccctgcctgcccggccccaccgaggcctgagcacgttcccgggtgccgagcactgcctccgggcttcccccaagaccacgcttagcggtggcttcttcgttgctgtaattgaacgggtcgagatgccgacctcagcctcacaggccaaagcatcagcaccagaacgcacacccagcccagccccaaagagaaagaagagacagcaaagagccgcagccggtgcttgcacaccgccttgcacatagcagaggctccaggctgactccttcctggtgggaaaggaagatgcctgtcctctccgtggaggaccctgggccctcaccgcaggcagcagtttgcattttgaaaggttattgggtcccttcctcgggctgtgttcttgctggtgagcaaaagtgttgcctgcagaaataaaatgcagaacgtactctacgat

SEQ ID NO: 9643 - DNA, 600 bp, Homo sapiens
ttggagcaggcaggatgcccaccgctgcttcagctgcctcctcgcccagctaccctttggccccattgggccctcgtctgcctctccaggattgtatgtttcaagccttgtcctgtgttcctttgtctgacgctctgtgtattgctctttgaatcgagtttggaggaagagttgagttgtatgagtggcggcatgttggtagtgccggacttcctgtttcaagttttctggggcctcgctaattgaatgtggaaagtagcaccacttgacggctacaagtgccgactcctgaattttcccatggtgttctgacttcaagggctggcagccagggagaatgggcccaggggaagcaaagacctcttccctctgcggtttctgtcccacttaactgacctcactggaggctacgtcacccaaagtagatgttagaaaacctaaattaatgaaccatatttttaaaatcctatttttcccaaacagggccctctgcagcccatcctttccttccgtccttctgaaaccacataccccaggcccaagcgccttgctgtcacgcccaacctctttgggagaagtatgaatgcgtgtgtctaaatt

SEQ ID NO: 9644 - DNA, 600 bp, Homo sapiens
gggtgatgctactgatggctcctttgccaataagcatggccgccatgtcattggccacattgatgactacagtgccctaagacagcagattgcggagggcaagctgctggtcaaaaagatagtgtctcttgtgagatcagcgtgcagcttccctggccttgaagcccaaggcacaggggtgctaggcagcaaaggcattcatgagcttcggagcagcaccagtgccctgcaccatgccctagaggagtcggcttccctcctcaccatgttctggagagtggccctgccaagcacccacatccctgtgctgcctggcaaagtgggagaatcaacagaaagggaacttctggaactgagaaccaaagtatccaaacaggagcggctacttcagagcacagctgagcatctgaagaacgccaaccagcagaaggagagcatggagcagttcatcgtcagccagctaaccagaacacatgatgttttaaagaaggcgaggactaacttataggtgaaatccctaagggctctgctgtgtactccagccttgtgacccttgctttccaggaaccatgcaagaagcgcagccaccagaagtcctta

SEQ ID NO: 9645 - DNA, 600 bp, Homo sapiens
ataggaacttgcttgctgctcccctgtgtattacccttgctttttcaaatgataaaatattttgttgttactttagttcatcagaaaacttcagcacatgtgtattatacaaatcactatcgctctatctcacaaagagactaaaaaagtgaggacgagagtaagaactcccactaaaagtgaaaattctcaaagggggggaaatatggtatgaggtcgccacttctcctgttgtccttctcagtttctccccaacctccccttttccctagtttataagacaggagaaaagggagaaagcaaaaagttgaaaagaaacagaagtaagataaatagctagacgaccttggcaccaccacctggccctggtggctaaaataataataatattattaacccctgaccaaaactattggtgttatctgtaaattccagacactgtatgagaaaatactgtaaaactttttgttctgttagctgatgtatgtagcccccagtcatgtttctcacgcttacttgatctattatgactttttcatgtagaccccttagagttgtaagcccttaaaagggctaagaatttctttttcggggagctcg

SEQ ID NO: 9646 - DNA, 600 bp, Homo sapiens
accatgaaaaggctcgaaagactggacttattactcccaaagcaggctttgactctgattatgaccaagctcttgctgacataagagaaaatgaacagagcctcctggaatacctagagaaacagcgcaacagaattggctgtaggaccatagtctattgggggattggtaggaaccgttaccagctggaaattcctgagaatttcaccactcgcaatttgccagaagaatacgagttgaaatctaccaagaagggctgtaaacgatactggaccaaaactattgaaaagaagttggctaatctcataaatgctgaagaacggagggatgtatcattgaaggactgcatgcggcgactgttctataactttgataaaaattacaaggactggcagtctgctgtagagtgtatcgcagtgttgggtaagactttgaacaagcttgttctcaggctttgataagtagtgctgtttgccagctgtatattatccctaaaaataagtaataaggtatatatggtacatattttgacatgcatatacatatttgcatcctgactaggctgcccacagcaatttaagttacttgaaactcgctttt

SEQ ID NO: 9647 - DNA, 1244 bp, Homo sapiens; identical to SEQ ID NO: 4412

SEQ ID NO: 9648 - DNA, 935 bp, Homo sapiens; identical to SEQ ID NO: 4413

SEQ ID NO: 9649 - DNA, 1400 bp, Homo sapiens
tattgtagatcttattgaggaacgagccatctattttgatggagactttggtcagattgttcgatatggtgagattccagctgaattaagggcggcggccactgaccaccggcaggagctaattgaatgtgttgccaattcagatgaacagcttggtgagatgtttctggaagaaaaaatcccctcgatttctgatttaaagctagcaattcgaagagctactctgaaaagatcatttactcctgtatttttgggaagcgccttgaagaacaaaggagttcagcctcttttagatgctgttttagaatacctcccaaatccatctgaagtccagaactatgctattctcaataaagaggatgactcaaaagagaaaaccaaaatcctaatgaactccagtagagacaattcccacccatttgtaggcctggcttttaaactggaggtaggtcgatttggacaattaacttatgttcgcagttatcagggagagctaaagaagggtgacaccatctataacacaaggacaagaaagaaagtacggttgcaacggctggctcgcatgcatgccgacatgatggaggatgttgaggaagtatatgccggagacatctgtgcattgtttggcattgactgtgctagtggagacacattcacagacaaagccaacagcggcctttctatggagtcaattcatgttcctgatcctgtcatttcaatagcaatgaagccttctaacaagaacgatctggaaaaattttcaaaaggtattggcaggtttacaagagaagatcccacatttaaagtatactttgacactgagaacaaagagacagttatatctggaatgggagaattacacctggaaatctatgctcagaggctggaaagagagtatggctgtccttgtatcacaggaaagccaaaagttgcctttcgagagaccattactgcccctgtcccgtttgactttacacataaaaaacaatcaggtggtgcaggccagtatggaaaagtaataggtgtcctggagcctctggacccagaggactacactaaattggaattttcagatgaaacattcggatcaaatattccaaagcagtttgtgcctgctgtagaaaaggtaaatttttaaaaaagtgtttttgcatttttacttactaaaaacagtttatcaggtattaaatcatactttgtcttccatcatgttgtctatcacagtttgttttagttacagtcctgtttctctgattgttaagctttccatctgatttagaatctctaattcattaagcagaagagctgtaaatccatgctgtgacaatgatgggaaattattatgtttctgaatcatagttatatttttcttaataaattgaaactactgtattgattgt

SEQ ID NO: 9650 - DNA, 1400 bp, Homo sapiens
tctggaggcacactgccccctccagactttccacctccaccactgccggactcagccatcttcctgccccccagcctggatcctttaccagggccagtggtccggggccgtggtggggctgaggcccgtggcccaccacctcccaaggcccatccaaggcctccactgcccccaggcccctcaccagccagcactttcctgggggaagtggccagtggggatgaccggtcctgctcggtgctgcagatggccaagacgctgagcgaggtggactatgcccctgctgggcctgcacgctcagcgctcctcccaggccccctggagctgcagcccccccggggactgccctcggactatggccggcccctcagcttccctccaccccgcatccgggagagcatccaggaagacctggcagaggaggctccgtgcctgcagggcgggcgggccagcgggctgggcgaggcaggcatgagtgcctggctgcgggccatcggcttggagcgctatgaggagggcctggtgcataatggctgggacgacctggagtttctcagtgacatcaccgaggaggacttggaggaggctggggtgcaggacccggctcacaagcgcctccttctggacaccctgcagctcagcaagtgatagcggaggcaccacgaagctgtgaactcagagcccctccctgctaccaaggcccagctatggccccagggttgaaaagttatgagggtcagggcagtatctctctgcctatttattggggtgcctatttattggggatctgcattccccgctgcccaatcatttgcaatgccctaattagggcatcctgcccctcgccttttaggctcaggacggaaggtcagttgccatggttaccgaggaccctggttactctggtgctgtcctgttttactggaccccgcctcccagccccaggggtgcctgtgggggtccatttgggtacgtctgggcccccactttcaccagtttctgcggccttccaccgggcctgaaccacagcggaggagctccgctaagacctccccacccccgctgggggtgggggcgggtgtccgtccggaaatgaaggaatagcccgaggaccgggctggggtttatttaaactgttctgtgtgggtctggggagggagagcaccttaatattattggggttggttggggtggggcaggatctcagccataaagtgccagtttgcttagttctcactgtctcctggtctgtgctgccctgctctggggatgcacggcggcagggtgggggagggaggttcctcgcaggtctcagcccgggacagggtcttgcaagcagcctcctgggcagtcgtaagggttgcggcgtgatgtcttcaataaattaagttttatttgga

SEQ ID NO: 9651 - DNA, 600 bp, Homo sapiens
gtcccagcatccttgctgaactacagcttcgagaaccaagctttcccgatgttcagcatggtgtactcatccataaagtcatcctgggctcccctgcacaccgggctggtctgcggcctggtgatgtgattttggccattggggagcagatggtacaaaatgctgaagatgtttatgaagctgttcgaacccaatcccagttggcagtgcagatccggcggggacgagaaacactgaccttatatgtgacccctgaggtcacagaatgaatagatcaccaagagtatgaggctcctgctctgatttcctccttgcctttctggctgaggttctgagggcaccgagacagagggttaaatgaaccagtgggggcaggtccctccaaccaccagcactgactcctgggctctgaagaatcacagaaacactttttatataaaataaaattatacctagcaacatattatagtaaaaaatgaggtgggagggctggatcttttcccccaccaaaaggctagaggtaaagctgtatccccctaaacttaggggagatactggagctgaccatcctgacctcctattaaagaaaatgagctgctg

SEQ ID NO: 9652 - DNA, 1400 bp, Homo sapiens
gacctccgggccctgctgacgtcaggaacttctgacccccgggcccgagtgacttatgggacccccagtctctgggcccggttgtctgttggggtcactgaaccccgagcatgcctgacgtctgggaccccgggtccccgggcacaactgactgcggtgaccccagataccaggacccgggaggcctcagagaactctggaacccgttcgcgcgcgtggctggcggtggcgctgggcgctgggggggcagtgctgttgttgttgtggggcgggggtcggggtcctccggccgtcctcgccgccgtccctagcccgccgcccgcttctccccggagtcagtacaacttcatcgcagatgtggtggagaagacagcacctgccgtggtctatatcgagatcctggaccggcaccctttcttgggccgcgaggtccctatctcgaacggctcaggattcgtggtggctgccgatgggctcattgtcaccaacgcccatgtggtggctgatcggcgcagagtccgtgtgagactgctaagcggcgacacgtatgaggccgtggtcacagctgtggatcccgtggcagacatcgcaacgctgaggattcagactaaggagcctctccccacgctgcctctgggacgctcagctgatgtccggcaaggggagtttgttgttgccatgggaagtccctttgcactgcagaacacgatcacatccggcattgttagctctgctcagcgtccagccagagacctgggactcccccaaaccaatgtggaatacattcaaactgatgcagctattgattttggaaactctggaggtcccctggttaacctggctagggaactgggggctgtatccctgcaggatggggaggtgattggagtgaacaccatgaaggtcacagctggaatctcctttgccatcccttctgatcgtcttcgagagtttctgcatcgtggggaaaagaagaattcctcctccggaatcagtgggtcccagcggcgctacattggggtgatgatgctgaccctgagtcccagggctggtctgcggcctggtgatgtgattttggccattggggagcagatggtacaaaatgctgaagatgtttatgaagctgttcgaacccaatcccagttggcagtgcagatccggcggggacgagaaacactgaccttatatgtgacccctgaggtcacagaatgaatagatcaccaagagtatgaggctcctgctctgatttcctccttgcctttctggctgaggttctgagggcaccgagacagagggttaaatgaaccagtgggggcaggtccctccaaccaccagcactgactcctgggctctgaagaatcacagaaacactttttatataaaataaaattatacctagc

SEQ ID NO: 9653 - DNA, 600 bp, Homo sapiens
cccagtcttctttccctccctcccctggtccttctcctgatgtgcaactggcaactctggctcagagagtcaaggaagttttgccccatgtgccattgggtgtcatccagagagacctggccaagactggctgtgtagacttgactatcactaatctgcttgagggggccgtagctttcatgcctgaagacatcaccaagggaactcagtccctacccacagcctctgcctccaaggcattcgatgcgtgtttaatgatgatgactccgcaagccctctgacattgtgatcacctcagtttcccagctctggcccggtgacccctcagccaacagccctaacatttgccaagtcttcctgggcccggcaggagagcctgcaggagcgcaagcaagcactatatgaatacgcaagaaggagattcacagagagacgagcccaggaggctgactgagctcaaaggaacaggatggcacccagagccgcaggacggagactgggggcagccctcacccaactcacaacaggctggatgggtgggtggtaaaaagggaaggatgaggctcccccaatgtcacattaaattcatggttttcattc

SEQ ID NO: 9654 - DNA, 1400 bp, Homo sapiens
ataccatttaggtgtgagttccttagcttctgcctataggaacataagtaatgaaaggtcatctaggtgtgtgtttggaatttttttcttttgttttttggaaaatggaaagaacaaggcaaggaaggaaaattaatggggaagctgaagggaggaaatgttacagtaatccactgagatgtagtttagtcaaacataggtatatgaactgttaatcttggtggattccgttgggatttgttttttacatctcctttttccttccttgaagaaaaattcttggctgtcccaaggattcttcatgtatattgcaaaatttaatatatttgttcacttgagtcttaagagtaggtcaggccaaggcaggtggatcacctgaggtcagaagttcaagaccagcctggccaacatggtgaaaccccgtctctactaaaaatacaaaaattagctgggcgtggtggtgcatgcctgaaatcccagctacttgggaggctgaggcaggagaattgcttgaacccgggaggcggaggttgcagtaagccgagaccatgcttattgccctccagtctgggcaacaaaaatgaaactccgtctcaaaaaaaaaaaagtaggtcaattcgtaacagtttattttggacacaccctgaagcttttgttttgaattaagaaatgagtttcaggaattgacaaaccatttgttaaccagctgtcctgggctattgaagaagatttcattttccgcgcatccacttgttgcagtccaagtcctctagtgcaacgccatagcaaatataaagatttactatgcacgtgatacattttatggagtgcctcaagccaagatagtgaatttatatgaagggtgtgaaatgtatttctttactactatagtagtttagttataactttgcatctataattgagctttctcatctgtcaaatgctatggttttcttaaaatgttacaattctagatctatccaccttgtttttttattgtctacaaaccattaaatgtaaatattgtttttagagtcagtcattggctttgtcatttaccctttgagagttccacaagtggtagtagagtggtttaacgtctttcctctagtactaccagtattcataaatgtataccccttactgtaatttgttcctcttagaagtcagatcatctgatttatagaggattatgaaaaccagagtttttgaaaaggcttattttatacatacgtattatatagagaaacaaatgtttttattaaatgtttcattgacccaagtaatttaaaagtaatatgttacctatgtctttcaggaaaaataattatagcagctgatctgtaaatgactttaaaagctattttagtaatttaaataaatttactttcttggtttat

SEQ ID NO: 9655 - DNA, 1400 bp, Homo sapiens
cccggcccgggaacaccgtgaaactgaactgcatggctatggggattcccaaagctgacatcacgtgggagttaccggataagtcgcatctgaaggcaggggttcaggctcgtctgtatggaaacagatttcttcacccccagggatcactgaccatccagcatgccacacagagagatgccggcttctacaagtgcatggcaaaaaacattctcggcagtgactccaaaacaacttacatccacgtcttctgaaatgtggattccagaatgattgcttaggaactgacaacaaagcggggtttgtaagggaagccaggttggggaataggagctcttaaataatgtgtcacagtgcatggtggcctctggtgggtttcaagttgaggttgatcttgatctacaattgttgggaaaaggaagcaatgcagacacgagaaggagggctcagccttgctgagacactttcttttgtgtttacatcatgccaggggcttcattcagggtgtctgtgctctgactgcaatttttctttttttgcaaatgccactcgactgccttcataagcgtccataggatatctgaggaacattcatcaaaaataagccatagacatgaacaacacctcactaccccattgaagacgcatcacctagttaacctgctgcagtttttacatgatagactttgttccagattgacaagtcatctttcagttatttcctctgtcacttcaaaactccagcttgcccaataaggatttagaaccagagtgactgatatatatatatattttaattcagagttacatacatacagctaccattttatatgaaaaaagaaaaacatttcttcctggaactcactttttatataatgttttatatatatattttttcctttcaaatcagacgatgagactagaaggagaaatactttctgtcttattaaaattaataaattattggtctttacaagacttggatacattacagcagacatggaaatataattttaaaaaatttctctccaacctccttcaaattcagtcaccactgttatattaccttctccaggaaccctccagtggggaaggctgcgatattagatttccttgtatgcaaagtttttgttgaaagctgtgctcagaggaggtgagaggagaggaaggagaaaactgcatcataactttacagaattgaatctagagtcttccccgaaaagcccagaaacttctctgcagtatctggcttgtccatctggtctaaggtggctgcttcttccccagccatgagtcagtttgtgcccatgaataatacacgacctgttatttccatgactgctttactgtatttttaaggtcaatatactgtacatttgataataaaataatattctccc

SEQ ID NO: 9656 - DNA, 600 bp, Homo sapiens
aaagaaaactgccattttgtatttaatagcctccaggttctttcagtaatgttatttgctctgtgtgtttttgtgtgtttgttgatgtgcgtttgtgcatatgcgtgagtttcattgccggggttggggcacaattgtggactggggccatgaggccttccctggtccccactgaacccaccttagttccacatttggctgcatcttgaattatgccaactccagacttctccttcttttttgcccttggctcttgacactctaaacccctggaccatctgaatggagcagccaagttcagtcccacatttctgtactgttcctctttcacagctggaatatgtcacatgatgaagttgtatagaaacagaaccatggatggatggccaggattgccgtggtccctagctagatccccttcctatcaatcacctgatagcaacagggacagctgccaataccctgctctttactcaatggtacccagggagggagcatgggaagagggtgagctgagggctggaggagggcaacagccactgggtgagctgttcacggtcttatactattgtttgtttgtgattaaaagtgcttcaaccc

SEQ ID NO: 9657 - DNA, 794 bp, Homo sapiens; identical to SEQ ID NO: 4422

SEQ ID NO: 9658 - DNA, 877 bp, Homo sapiens; identical to SEQ ID NO: 4423

SEQ ID NO: 9659 - DNA, 1400 bp, Homo sapiens
atctaccccttttgatgaccccaggcttgagtttttaaaatgactacccagaagggcacaagggggaaggaaatggtatttgtatatgtatataaatatgcacctaggagaatgtgctttttaaaataatgactactgtttttattaaaacataagaaactacacccccaaaataagactttcattcacattcacaaagcaaacatctagtacatgtctttcacttcactttatgatagtgtattggatgatttgggcattacgatcacctcttaccacagcacagaacatacattcttcaacagcattaacggagtttgccaagtgcattaaagaggtcacgtggagggtacgttcatatgaaacaatctgcagaaagtggggtaagaaagggcacatggcacagttaaagttgtagaaatcaaattactatcattttttgttgccaaaacaaagtcttacatttaacccccctttctaccacccccctccacacttcacgtcagctacatagtttccacagggtaattcactaagagcttgtggagcttggttttaaaatccttagcctggtctgactttaggcatagcttccagttcttccttccgtgtcctggtttcttgttcagttttacttctaatccaacaacaaaagaaatgtctggctggtctcagctagagtctgatgtgtcttagagcatgtgtgcgtatctgaaccatcatccctgctctcatctcagctccctccaggcctgagcaccggttccttttgtcccatacgtcatgaagtcacactattgggaaacctgtgcttccctctccatggcttaactccctgtcagtgtcggagtgtataagaatgcttgtaaatactgtaatatatttattaatatttgaaaggcattcattcagtggacagtgggaattaactctcccaaggcaagtgaaaatgaatgattgacgtacgttgatttaacaatcttactagattttaattcttaaggatttcaaatgaaaccagaaggtggttatgtaagaggcttaaaatgatcttatgtttaaagagattctgttattagcaccatgaactcgtactatgaaatttttaagccttttatttttctaactatattactgtaggactggatattaggtgtcatataggaaacacaaaagtttattgctgtttgctaaagcaaaatagcagaaaattttgtatatgcaaaactgttgaaggaccatagagaaatgtgtactactgacggggcttttactaggcttcctgcgtgtgtaaaagtcgaggtattgctggcattcagggtgacatgatggtactaaatgttttccattaaagtcttctattttaaaatttagagaaaaataaaatggctttccatcag

SEQ ID NO: 9660 - DNA, 600 bp, Homo sapiens
aagtcaaagtaaaacttgctgcctgaagaacagtaactgccatcaagatgagagaactggaggagttccttgatctgtatatacaataacataatttgtacatatgtaaaataaaattatgccatagcaagattgcttaaaatagcaacactctatatttagattgttaaaataactagtgttgcttggactattataatttaatgcatgttaggaaaatttcacattaatatttgctgacagctgacctttgtcatctttcttctattttattccctttcacaaaattttattcctatatagtttattgacaataatttcaggttttgtaaagatgccgggttttatatttttatagacaaataataagcaaagggagcactgggttgactttcaggtactaaatacctcaacctatggtataatggttgactgggtttctctgtatagtactggcatggtacggagatgtttcacgaagtttgttcatcagactcctgtgcaactttcccaatgtggcctaaaaatgcaacttctttttattttcttttgtaaatgtttaggtttttttgtatagtaaagtgataatttctggaatta

SEQ ID NO: 9661 - DNA, 600 bp, Homo sapiens
aggccagcatctgtgacttctgctccctcactagcttttccaccagaccccacatgttaccaccctggctgtgggaagcagggatcagggagtgtggctcggtgcccgtctccagaaccctgcccaccctggcgtggtggcagacatggttacctgcagctgagctgccagttcctctgagtcctcaaagaccaggccgttttcttcatgtttcactagctcatgtaaactgcagagagaaccaagggagcctgagagctgcctggggaagacaccagacccctggggtgcccagcttgcctcccacccaccccacgctcaagccaggctgggggttggaacagggggtgtggtttctgggagctggttcttagatttggcatctgaagcatataaaggtctgggggagtgcacatcaaaatggccaaatcaatttgaggagggagccttaaggaaggtttgtacgttctgtgctggatgctcttcaagtactgaagaattatttttgcatgtttttcttaattccatggccatggaacaagtaaaggcaaccccctggggactggttcagcacataaaagatgacttttctaggacacc

SEQ ID NO: 9662 - DNA, 1400 bp, Homo sapiens
agaggggagaaggatgagcagacgaaggaagtaaaggaggcaaagaagaaagataaatgatgaagtgctgggaatcacttataccaaagccttatgaaatggatgaaattttgttaaataggcaaatgtggaattcctcacagattaaccagtattttttaaatgtattcattcctacaaattaactttcataaattttatggcatgtcttctatttaaaaggaaaagaataagtattcttgcatctggccttagaaatgtgaagttatattctcaagtttatttttttccaagtgtagctaaaatatttttgcaggtaaaataaagctgatagtacatgtgttgttcaaaccttgttaaacctaatattgaactatttttatatctgctgtctttcagaaggcaaataggaaactatatatttgcttaaaaattggcatttagtaaccttaattctttttatagaaggaatgacttaaagtattgtcccctctttttgcactaattgtggatttttttagatgcttctcaaaattttcagtgtgtaagctaaacaaaaactaaaactaagaattctcaaaaaaacttgttcaaaacagggaaagactgatgaaaagtaaaatggactacttttgtaacttacctgtttgttaggaaatggaatggtctctttgatttaaaataaataaaaatagattattacgtcttttgtattgagactgtattgttatgagcctaggaaatttgggaacatgattgtattgtattaaaattcgaagtgattattatcagcttaattggattaaaaaagtacttcaagaaattattttatcatatctgcttctgtttttccaaaaggttaaaacttgtaaaaaaaatatatataaacaattgagtttactaatggtaaacatttttattctgggattcggtcattggaatttatattaaaagacaagttattaaaaaggaaaggttctattcataatcagggtaaagaatatgaaaaccttagacgtaatccatggtggataggcattatggtttccactttggcagaaggcagactattcacagccctatttacttacataggctaaaaaactatgtaactaaatacctaatggtatttaatttttgtttattgaatttaagagattggtattagttttcatagctgtagtccattctaataatttctgatcttctagtggctacttaattagacattatttgaagctgtctgaagaatgcactttatgaattaaaaaactgaattgcctgacctcgttatcacatgagcttatattttgggaacacatagaactgatggaggcttttcctaaggccaaggataatgtactagttgttaaaatggaaataaaagtgaagtggtaaat

SEQ ID NO: 9663 - DNA, 1400 bp, Homo sapiens
aggtcactacactgtatcctatggaacagattctggggagttttcatcagttggagaggagttttataggaatcattctcagccaccgcctcttgagaccttagggctggatgcagatgaattgattttgataccaaatggagtacagattttttttgtaaatcctgcaggggaggttagtgcaccttcgtatcctgggtaccttcgaattgtgaggtttttggataattctctcgatacggttctaaaccgtcctcccgggtttcttcaggtttgtgactggttatatcctctagttcctgatagatctccggttctgaaatgtactgcgggagcctacatgtttcctgatacaatgctacaagcagcaggatgctttgtgggggtcgtcctgtcctctgagttaccagaggatgatagagagctctttgaggatctgttaaggcaaatgtctgaccttcggctccaggccaactggaacagagcagaagaagaaaatgaattccaaatccctggaagaactagaccctcctctgaccaactaaaagaagcctctggcactgatgtgaaacagttggaccaaggcaataaggatgtacgtcataaaggaaaacgtggaaaaaggctaaagatacttcaagtgaagaagttaacctgagtcacattgtaccatgtgagccagttccagaagaaaagccaaaagaattacctgaatggagtgaaaaagtggctcacaacattttgtcaggtattacagtaatgttaatttttttccctgtatgacattaagcctttggaaccaaataaagatattgtttattagggaatactgagaaagataatattttgtattttggttttaaatgatcaatttagaaataaatgtagaaggaactagtcttttgaaacatcagatattgtcatataagtataaattcttcctggcctattattctgttctactattgggaaaatggatagtgaaaagcttcaggaatcttcaaattcttaatagttctgaatctaaaattagttatgttcgtttcccctttgaagctccctcttaacctccccctacccctgtccctcagctgtggtctgaatgtgtcccttcaaaattcatatattgaaatcctaacccctgaggtgatggttttaggaggtggggcctttggaaggtgattaggtcatgagggaggagccctcatcaatgggattagtcccttataaaagagatcccaaagagctgccttgtccctttcactatgtgaggaagcagtaagaaggtgtcattctatgaaccaggaagtgggcccctcaccagagaccaaatgtaccagcaccttagtcttgtacttcccagcctctagaattgtgagaaataaatttttgttgttaat

SEQ ID NO: 9664 - DNA, 1400 bp, Homo sapiens
gccagtatacttaaatgtatactttatatacatttaagcagaaatttaaaatgtggtcttttttttttaaaagaaacacttctgtgtcagaaatgaaaataaatcatgttttttatttttaaatagaaagcacttcaaaactaaaatacagaaatttacaaaaaagaaaaattattactaagcccttgctcttatttttggcagaataaacattgattttggttggggctgcaaggatgcctttacaggtgcacaagaacgctagagtggcccatgcattgctgtgttctcttctaaaacaagctactaacaagagagagaacacatgcaatttattaccagtaagcataagtcatatttaacattggaataactaagcattttatacaaagatttttctttgacccagtttgcatttgtacattttatttttttagttcaacagctgctctgtcacataatactttgtaaatactagtgtgaaaaacagataggatgccttttccagtggtaggagcatctgtaagtgcatttaaatcattagaagcttttttccaaaactagaaacccttattaaaaaatagacatttttttctaaagattattagttaaaaataactaaaagagttccttagagtaatcatttcaaccaaatgaatttcaagcaacaacttacttactatttatcaaaaagggatttaattattttgaatataattataaattaaatttcaaatatttaaaaatactattttatataattccttatgacattttaaactttatattttaaaatatttgaatacgaaaagatcagtctacctctactccattctagacaaagtattaatccttagtgaaagtaattaattaaattgccaacttggcattattattaaacttgataggaacgcaacattaaatttaaaaatgttttcccgtgggtaattttctattatatattttcatatgggcaaagggaaaaaatgataaatcctctgtaatcacaaaccccaatttcgttttgtttattcagcttctaaaatattgaacacccagacttttaattcaacctttaagaaccttatcatttatgtttcagtagatatcaaagtaatccatgtttgtgtcaaatgatcatagaaaataaatagaagagacagtgaagcaagtaaaaagaaaagcattgttttaatttgtttgcattaatttttttcatttgtcaaaatgcttcttttgttgccacagtaaagaacagtttttattgttttgtaagtaaaattacgtagctgattttgtatgtaaagattaatttccataataaaaattattgtatgtttactgtgatcttaatgggcagggttaagaaagttatttaaaataaagttacctattctact

SEQ ID NO: 9665 - DNA, 600 bp, Homo sapiens
aggggcagccgtccgaaggcgagagcaggaatgttttgaccgagtctgcgaggatcgcccgtggcaaaatcacagacctggccaacctcagtgcagccaaccatgatgctgccatctttccaggaggctttggagcggctaaaaacctcttgtgctgcattgcacctgtcctcgcggccaaggtgctcagaggcgtcgaggtgactgtgggccacgagcaggaggaaggtggcaagtggccttatgccgggaccgcagaggccatcaaggccctgggtgccaagcactgcgtgaaggaagtggtcgaagctcacgtggaccagaaaaacaaggtggtcacgaccccagccttcatgtgcgagacggcactccactacatccatgatgggatcggagccatggtgaggaaggtgctggaactcactggaaagtgacgcgcatggacggggcccagctaggcgccaggacttggcctcaccctctggctgaggagctgtcggctgctttccatccagctgggagtctggcaggcccttttttttttttctttgccgaaacctgcaggcgttctctctctaaggaggatgtgctgcagtgcat

SEQ ID NO: 9666 - DNA, 600 bp, Homo sapiens
ctcacagcaagtgtgaaagggcttgggtgcagtggctcacgcctgtaatcccagcactttgggaggccaaggcaggcagatcacctgaggtcaggagattgagaccagctgaccaatatagagaaaccccgtctctactaaaaatacaaaatcagctgggcgtggtgttgcatgccagtaatcccagctactcgggaggctgaggcaagaggatcacttgaacctgggaggtggagattgtggtgagctgagattgcaccattgcactccagcctggacaatgagagtgaaactctgtctcaaaaaaaaaaaccaaaaaggccgggcgcggtggctcacgcctgtaatcccagcactttgggaggccgaggcgggcagatcacgaggtcaggagatcgagaccatcctggctaacacggtgaaaccccgtctctactaaaaatacaaaaaattagccgggtgcggtggcgggcacctgtagtcccagctactagggaggctgaggcaggagaatggcctgaacccgggaggcggagcttgcagtgagccgagatcgcgccactgtactcccgcctgggcaaaagagcgagactccgtctt

SEQ ID NO: 9667 - DNA, 600 bp, Homo sapiens
taaaagcagaatttaaagagggtaaaaaggaactccaggtctctctttttcaaacactggtgctgctaatgtttaatgagggagaggagttcagtttagaagagatcaagcaggcaactggaatagaggatggagagttaaggagaacactgcagtcattagcctgtggcaaagctagagttctggcgaaaaatccaaagggcaaagacattgaagatggtgacaagttcatttgtaatgatgatttcaaacataaacttttcaggataaagatcaatcaaatccagatgaaagaaacggttgaagaacaagcaagcactacagaaagagtatttcaagacagacagtatcaaattgatgctgcaattgttcgaattatgaagatgagaaagacacttagccacaatctccttgtttcagaagtgtacaaccagttgaaatttccagtaaagcctgctgatcttaagaagagaatagaatctttaattgaccgggactacatggaaagagataaagaaaatccaaaccagtacaactatattgcatagaatgttggccttgcagcatttggtgtcatatgcagtagccagtggataaact

SEQ ID NO: 9668 - DNA, 1400 bp, Homo sapiens
actttatcaacgacgccaccgacgtcaacgatgccctgggctatgtgacccgcttctaccgcgaggcctcgtccggcgctgccaagaagaggctgctgctcttctcagatggcaactcgcagggcgccacgcccgctgccatcgagaaggccgtgcaggaagcccagcgggcaggcatcgagatcttcgtggtggtcgtgggccgccaggtgaatgagccccacatccgcgtcctggtcaccggcaagacggccgagtacgacgtggcctacggcgagagccacctgttccgtgtccccagctaccaggccctgctccgcggtgtcttccaccagacagtctccaggaaggtggcgctgggctagcccaccctgcacgccggcaccaaaccctgtcctcccacccctccccactcatcactaaacagagtaaaatgtgatgcgaattttcccgaccaacctgattcgctagattttttttaaggaaaagcttggaaagccaggacacaacgctgctgcctgctttgtgcagggtcctccggggctcagccctgagttggcatcacctgcgcagggccctctggggctcagccctgagctagtgtcacctgcacagggccctctgaggctcagccctgagctggcgtcacctgtgcagggccctctggggctcagccctgagctggcctcacctgggttccccaccccgggctctcctgccctgccctcctgcccgccctccctcctgcctgcgcagctccttccctaggcacctctgtgctgcatcccaccagcctgagcaagacgccctctcggggcctgtgccgcactagcctccctctcctctgtccccatagctggtttttcccaccaatcctcacctaacagttactttacaattaaactcaaagcaagctcttctcctcagcttggggcagccattggcctctgtctcgttttgggaaaccaaggtcaggaggccgttgcagacataaatctcggcgactcggccccgtctcctgagggtcctgctggtgaccggcctggaccttggccctacagccctggaggccgctgctgaccagcactgaccccgacctcagagagtactcgcaggggcgctggctgcactcaagaccctcgagattaacggtgctaaccccgtctgctcctccctcccgcagagactggggcctggactggacatgagagccccttggtgccacagagggctgtgtcttactagaaacaacgcaaacctctccttcctcagaatagtgatgtgttcgacgttttatcaaaggccccctttctatgttcatgttagttttgctccttctgtgtttttttctgaaccatatccatgttgctgacttttccaaataaaggttttcactcctc

SEQ ID NO: 9669 - DNA, 600 bp, Homo sapiens
acgaggagtcgacccggagcgaggaggtgaccagggaggaaatggcggcagctgggctcaccgtgactgtcacccacagcaatgagaagcacgaccttcatgttacctcccagcagggcagcagtgaaccagttgtccaagacctggcccaggttgttgaagaggtcataggggttccacagtcttttcagaaactcatatttaagggaaaatctctgaaggaaatggaaacaccgttgtcagcacttggaatacaagatggttgccgggtcatgttaattgggaaaaagaacagtccacaggaagaggttgaactaaagaagttgaaacatttggagaagtctgtggagaagatagctgaccagctggaagagttgaataaagagcttactggaatccagcagggttttctgcccaaggatttgcaagctgaagctctctgcaaacttgataggagagtaaaagccacaatagagcagtttatgaagatcttggaggagattgacacactgatcctgccagaaaattttcctactctcacactggttctcaatgaaaaatagtgtctttgtgattttgagtaaagctcctatctgtttt

SEQ ID NO: 9670 - DNA, 1238 bp, Homo sapiens; identical to SEQ ID NO: 4435

SEQ ID NO: 9671 - DNA, 600 bp, Homo sapiens
gcaaaaatgccaggcagaaaactggcagtgcacctctcatcagcccaggtcccagtgccattggcttcaagaaaaaaaaaaaatctctccccaatgctctccttaacctttaagtcttacaggaagcctctcatagaaattgcctccagtccagtttcccaaaaaccccagtgttttacatatctgtttaggagtgtctaagttttgtcatcaatccaggatgttattcttccttcccaactcactgtgctcctaaaggcagcaaccattcatctttcctttgctctggatacaccgaatgaccaggtaacatcatcaggccgggtgcagtggctcctataatcccaatattttgggaggccgaggagagaggatcacttaagcccaggagtctgagaccagcctgggcaacatagcaagacccccatctctgcaaaaaaataagaaaattagcttggcatggtggcacgtgcctgtagtcccagctacatgggaggctgaggtgggaggatcacttgagcccaggaagtccagaacgtagtgagccttgattataccactgcactccagcctgggtgacagagcgagactctgtctcag

SEQ ID NO: 9672 - DNA, 771 bp, Homo sapiens; identical to SEQ ID NO: 4437

SEQ ID NO: 9673 - DNA, 600 bp, Homo sapiens
tgccagtgcccagagcttggcaggaggctcccggcggaccaaggaggaggagctgcagtgctaagtccagccagcgtgcagctgcatccagaaaccggccactacccagcccatctctgcctgtgcttatccagataagaagaccaaaatcccgctgggaaaaacccaggccttgacattgttattcaaatggcccctccagaaagtttaatgatttccatttgtatttgtgttgatgatggaccacttgaccatcacatttcagtattcatagatgactgtcacattttaaaatgttcccacttgagcaggtacacaactggtcataattcctgtctgtgtaattcgatgtatatttttccaaacatgtagctattgtttgctttgatttttgcttggcctcctttatgatgtgcatgtccttgaaggctgaatgaacagtccctttcagttcagcagatcaacaggatggagctcttcatgactgtctccagcaataggatgatttactataaatttcatccaactacttgtgatctctctcacctacatcaattatgtatgttaatttcagcaattaaaagaattgattttaatgac

SEQ ID NO: 9674 - DNA, 496 bp, Homo sapiens; identical to SEQ ID NO: 4439

SEQ ID NO: 9675 - DNA, 333 bp, Homo sapiens; identical to SEQ ID NO: 4440

SEQ ID NO: 9676 - DNA, 1400 bp, Homo sapiens
aaaaaaggaggcacatatgtaggaaggaattaaacagctttcctcactcccttatctcacttctaccttgtgaagcaggacttatgagattgccatctaggcagtcagcacccactagtcttgacaactctaaatttcctttaatcctttgactgtcagacccctctgcctggtactaaggagtaaaagaggcacacaaccgggaagatctaggttcccagccatcttcatggccccatcctcttccctaggcccttgcttctttctgtcgtgtcccattggcattgaggacttccggacctggttcattgacctgtggaacaactctatcattccctatctacaggaaggagccaaggatgggataaaggtccatggacagaaagctgcttgggaggacccagtggaatgggtccgggacacacttccctggccatcagcccaacaagacagcaccccaagttctctggactcagatcctctgatggccatgctgctgaaacttcaagaagctgccaactacattgagtctccagatcgagaaaccatcctggaccccaaccttcaggcaacactttaagggttcggcaatcactgtcacccccggacagcagaacgctggcatcagctatcttagctcctcctctcccctctcctctttcagagcactggctctccagccccaggaggagaacaggagggaggaggagatgaaagaggagggacaggttcttggtgctgtacctttgagaacttcctaggaaggaatggtggggtggcgtttgggaacttgtgccccctaaacacatttactggcctcctctaatgactttggggaaaagatgattctgggtctttcccttgacttcttgtttcaattacaaactcctgggctttctggggaggggttcagaaaacatcaaaacactgcagcagttcctaaatgattctcacaagcaaccctgagagagacagtcttgtgagggagatctgggggaggcaggaagctcctcagattttctcacagacccttcccaattccatcaccactgccaacaactcctcccccagagatctggctggagcccagaaaaagaagcatgtggtttaaaaaatgtttaaatcaatctgtaaaaggtaaaaatgaaaaacaaaaacaagcaaacaaacaaaaaacaatggaaaagatgaagctggagagagaggaaccagttgccaaggtagagagctgcccgctcctgccctctggatgacataggggacatcaacaagacggctgccaacctgagaagtcaccaaaccacaaaaataaccttacagccttcagggaaagactaccagctctgtctttctaccctctaatttaacaatgcataagagtcaataaaccctactttttt

SEQ ID NO: 9677 - DNA, 1400 bp, Homo sapiens
attgtatcataaatgagatgcgtagtttgttttctttcatgggaagtagagataaaaatatatacatttctctaattgagttgtttagagaaagaactaatgtctcatatgatgtatttacttattttaaaaaaaagaataggaatgagatgtccctgagctgtacttttctattattataaggcctttaggcatcagtgcatctgggttatcaacattttctcaaatgctgtcaatattttactgtaatttatgttcttatatttatgtatatttgttaaaactgtaaaaaaatttcacagatttttttccaatacctgtgcaagatacatgtgtagctcaaaactatttgtgatctactgtttgcatgtaagagaccaggatatgtaactcttatattttaagtgtatacatattgtgtatataacatatggatattaaaaatggggaattgcacattttaccttttggacagtaatttctatcacagttagaaggaaatgatagtcaaatacacgtttagattaaaactagtttaaaaaattataaatgaatctaatcaaaatgtgaatagtagtcaaaaggataatttaataagcattttacgttactaaatttgttcatttcaatattaactaaatttccctcatcaaagcaatctttgtgatattacttcgctattaaataaagaaaattggatgcaagacaatggagaaactttaaaactaaacaggaccaccctttattcttaaatttgtgtgtgtccaacagttgaattgaatgtctataaggtctaaaggtagaatgtgaatattgccacagagttcattgctctcagtataagattttactttattaatgcagaaggaatatggatatatttctttaagtctgcagatttttttattatggtgcagcttttttttaattatgtttttaaaattatacagttgaaaaatatgccatttcataaagtctgaggattttcgtcaaccttactgaaacacactggtgctttcatcatcagaggtcaaattattatgataactattccattaagtttgccaaacatttgtcgtggttaccagtgcagcctgtcaaattctgctatttgacacagctttggaaagatttagttcttggtttttccgttttgtattagaatgactgttacagttttatttggctgtttaaagccaaattcagctatttaattatggtttcatggacactgttgagcaatgtacagtgtatggtgtgcttacctgtccactctagagcattgcttacaggttttttgttttttaagatgctgtgctgtaaaatactgtcatacttgctatttcctggtacagtgtagtttttcccctttcatttgaataaaagcatggcaccaaatg

SEQ ID NO: 9678 - DNA, 600 bp, Homo sapiens
ctgggcttcaaacagacatggggaggcagccctgaccttgagcgtctgctgcccttatccaacatcccagggcagaaatgaatggctttgagtctggcgtgaggcgccggaatgctggcttctcccatctggggtgggcaggctgggattcctgccccctccttcccacctgcactgtacccaggaccctttcagcttcctccgaggccgccatgggccatgctgtctgtggcgtgtgctcagtgtttcccagaactccctgtgggctcatgccccatcacccccagcgagcagccctcttcctggcacagcctcccctcctgcctcagtgccctcctgtgcttctggggacccctcccaaaggagccgtcgcctgcaaaccctttcagggtccacttccccagaacccaaaccagacatcctcaggcccctggttggtttgtttttcctctttaaaaagatcagctttaggctgggcatggtggctcatgcctgtaatcccagcactttgggaggccaaggcaggtggatcacctgaggctgggagttcgagaccagcctggacagcatggtgaaacctcatctctactaaaaaatacc

SEQ ID NO: 9679 - DNA, 1400 bp, Homo sapiens
tacttataatttaaaggattggtgtcttagtacacttgtggtcacagggatcaacgaatagtaaataatgaactcgtgcaagacaaaactgaaaccctctttccaggacctcagtaggcaccgttgaggtgtcctttgtttttgtgtgtgtgtgttcttttttaattttcgcattgttgacagatacaaacagttatactcaatgtactgtaataatcgcaaaggaaaaagttttgggataacttatttgtatgttggtagctgagaaaaatatcatcagtctagaattgatatttgagtatagtagagctttggggctttgaaggcaggttcaagaaagcatatgtcgatggttgagatatttattttccatatggttcatgttcaaatgttcacaaccacaatgcatctgactgcaataatgtgctaataatttatgtcagtagtcaccttgctcacagcaaagccagaaatgctctctccagggagtagatgtaaagtacttgtacatagaattcagaactgaagatatttattaaaagttgattttttttcttgatagtatttttatgtactaaatatttacactaatatcaattacatattttggtaaactagagagacataattagagatgcatgctttgttctgtgcatagagacctttaagcaaactactacagccaactcaaaagctaaaactgaacaaatttgatgttatgcaaacatcttgcatttttagtagttgatattaagttgatgacttgtttcccttcaaggaaacattaaattgtatggactcagctagctgttcaatgaaattgtgaattagaaacatttttaaaagtttttgaaagagataagtgcatcatgaattacatgtacatgagaggagatagtgatatcagcataatgattttgaggtcagtacctgagctgtctaaaaatatattatacaaactaaaatgtagatgaattaacctctcaaagcacagaatgtgcaagaacttttgcattttaatcgttgtaaactaacagcttaaactattgactctatacctctaaagaattgctgctactttgtgcaagaactttgaaggtcaaattaggcaaattccagatagtaaaacaatccctaagccttaagtcttttttttttcctaaaaattcccatagaataaaattctctctagtttacttgtgtgtgcatacatctcatccacaggggaagataaagatggtcacacaaacagtttccataaagatgtacatattcattatacttctgacctttgggctttcttttctactaagctaaaaattcctttttatcaaagtgtacactactgatgctgtttgttgtactgagagcacgtaccaataaaaatgttaacaaaatat

SEQ ID NO: 9680 - DNA, 600 bp, Homo sapiens
ttacataacagaaaaggctaagcagaaagtaaatttcaatatgtcagtatagaggctctactttatgtagacttaaattaatgtgagatatgtaccttcatattcagaaatctggatgtttccttcatacattaaactattaataagcataacttttctactggtgtaatttaagtataaagtaaaataatgggcattatcattggatgtttccccacattggcttttaaaatacccatcttgctttctttttggtttatttgtagcaaggcacatatagaagaagaaatttctggcttttccatgttgttttattaccttttctcacttttaaaactaatacagacttatctcctcactcctttttctctccttacctttaccactaataccagtaaaattatctttctgatagtgaaaaggttctgtcaagattttcactgtaatggctgctacagagatggaccatcttcatcatcaccagtggtttcttctaattataaaatgtttaaactttctgagaatttaaaaagccaccactgttcccagtcagcatatacaagctcttaatattctgtttattaaataattcaatgtact

SEQ ID NO: 9681 - DNA, 600 bp, Homo sapiens
ggagagactgcaggccctgtatatgatccggatgaaggactccttgatttgccttgactgtgccatggagagtagcagaaacagcagcatgctcaccctccgactttctttttttgatgtggactcaaagcccctgaagacactggaggacgccctgcactgcttcttccagcccagggagttatcaagcaaaagcaaatgcttctgtgagaactgtgggaagaagacccgtgggaaacaggtcttgaagctgacccatttgccccagaccctgacaatccacctcatgcgattctccatcaggaattcacagacgagaaagatctgccactccctgtacttcccccagagcttggatttcagccagatccttccaatgaagcgagagtcttgtgatgctgaggagcagtctggagggcagtatgagctttttgctgtgattgcgcacgtgggaatggcagactccggtcattactgtgtctacatccggaatgctgtggatggaaaatggttctgcttcaatgactccaatatttgcttggtgtcctgggaagacatccagtgtacctacggaaatcctaactaccactggtaagaaac

SEQ ID NO: 9682 - DNA, 1400 bp, Homo sapiens
agtccgagacagggacgcgtgtgggcgtggtgcagtacagccacgagggcacctttgaggccatccagctggacgacgaacgtatcgactccctgtcgagcttcaaggaggctgtcaagaacctcgagtggattgcgggcggcacctggacaccctcagccctcaagtttgcctacgaccgcctcatcaaggagagccggcgccagaagacacgtgtgtttgcggtggtcatcacggacgggcgccacgaccctcgggacgatgacctcaacttgcgggcgctgtgcgaccgcgacgtcacagtgacggccatcggcatcggggacatgttccacgagaagcacgagagtgaaaacctctactccatcgcctgcgacaagccacagcaggtgcgcaacatgacgctgttctccgacctggtcgctgagaagttcatcgatgacatggaggacgtcctctgcccggaccctcagatcgtgtgcccagaccttccctgccaaacagagctgtccgtggcacagtgcacgcagcggcccgtggacatcgtcttcctgctggacggctccgagcggctgggtgagcagaacttccacaaggcccggcgcttcgtggagcaggtggcgcggcggctgacgctggcccggagggacgacgaccctctcaacgcacgcgtggcgctgctgcagtttggtggccccggcgagcagcaggtggccttcccgctgagccacaacctcacggccatccacgaggcgctggagaccacacaatacctgaactccttctcgcacgtgggcgcaggcgtggtgcacgccatcaatgccatcgtgcgcagcccgcgtggcggggcccggaggcacgcagagctgtccttcgtgttcctcacggacggcgtcacgggcaacgacagtctgcacgagtcggcgcactccatgcgcaagcagaacgtggtacccaccgtgctggccttgggcagcgacgtggacatggacgtgctcaccacgctcagcctgggtgaccgcgccgccgtgttccacgagaaggactatgacagcctggcgcaacccggcttcttcgaccgcttcatccgctggatctgctagcgccgccgcccgggccccgcagtcgagggtcgtgagcccaccccgtccatggtgctaagcgggcccgggtcccacacggccagcaccgctgctcactcggacgacgccctgggcctgcacctctccagctcctcccacggggtccccgtagccccggcccccgcccagccccaggtctccccaggccctccgcaggctgcccggcctccctccccctgcagccatcccaaggctcctgacctacctggcccctgagctctggagcaagccctgacccaataaaggctttgaacccat

SEQ ID NO: 9683 - DNA, 600 bp, Homo sapiens
catcacgaggccatgaggtgggtgctgctagcctggcgctgtgctcggcatgtggccactggtcttgaaggcccaccatgggccttgcagtctccctcagctgccgcccagctcccatgggctggccgtgcatgtgccactcggaggaagccctggattcagtgagtgaaaccatcccggggtggaagcactgacaccccccagcaccagcaggtcttgctccaaccctggcctgcctcggagctgcagctgcggctctcacatctctgggagtgggggagcccatgtcccggatgtggcccacgtgggtgtgaagctggagctgggggtgccgtccaggctctgctggacgtggtgctgcccccatggtgcactgctgcaccgtacctgggcccacaggaggtccccgggggcgttaggagctgagtccccctcagtgagccgtcccctccaggagtgtgagggtagggatgccatggagacagggtgggagggtccgacctggaggaccacagggaggaaacctcagggtctgcggtacgaagtcagcgcttcctcagcacgcgggtcgcggtgtgcgttcgggcgttccatggggag

SEQ ID NO: 9684 - DNA, 1400 bp, Homo sapiens
caggggctcctggtctttccgggagggacgtggcccagccagctctaggtgttctgagcagctctgggacccagcgattgaggggtcaggctgggggtgtcagagccagggtcctccttaagtacctcccacactacacagacagtggcccttttgtgggcagcaaattcttgagccatgaaaggatgctttgggccccttccctcccaggagggcagcctgtgcagggatggtgctcagcaggtggacagggcctggggcctgtgtcagggtctcaggcctgggagcaccagcagaggagatggcggctcccagcagtgccgcctgaaagtgtcttgggctaaggacccacacccagggctgccctgcagaaacgcccccgcagagcccagtggtctgtgaggttgcaggcagggtgcgaatggaagggcacaggtgcggggctggcacctgcccggtcctgcccacctcccctccgcccagcccgcacctgcgtctccccacagagctgtccgtggcacagtgcacgcagcggcccgtggacatcgtcttcctgctggacggctccgagcggctgggtgagcagaacttccacaaggcccggcgcttcgtggagcaggtggcgcggcggctgacgctggcccggagggacgacgaccctctcaacgcacgcgtggcgctgctgcagtttggtggccccggcgagcagcaggtggccttcccgctgagccacaacctcacggccatccacgaggcgctggagaccacacaatacctgaactccttctcgcacgtgggcgcaggcgtggtgcacgccatcaatgccatcgtgcgcagcccgcgtggcggggcccggaggcacgcagagctgtccttcgtgttcctcacggacggcgtcacgggcaacgacagtctgcacgagtcggcgcactccatgcgcaagcagaacgtggtacccaccgtgctggccttgggcagcgacgtggacatggacgtgctcaccacgctcagcctgggtgaccgcgccgccgtgttccacgagaaggactatgacagcctggcgcaacccggcttcttcgaccgcttcatccgctggatctgctagcgccgccgcccgggccccgcagtcgagggtcgtgagcccaccccgtccatggtgctaagcgggcccgggtcccacacggccagcaccgctgctcactcggacgacgccctgggcctgcacctctccagctcctcccacggggtccccgtagccccggcccccgcccagccccaggtctccccaggccctccgcaggctgcccggcctccctccccctgcagccatcccaaggctcctgacctacctggcccctgagctctggagcaagccctgacccaataaaggctttgaaccc

SEQ ID NO: 9685 - DNA, 836 bp, Homo sapiens; identical to SEQ ID NO: 4450

SEQ ID NO: 9686 - DNA, 600 bp, Homo sapiens
tctaatatttctcaacatgcctggagatgccccgattgctcctgttaaaggaactgacagcagtgcttacatcaaatccagcaaagaagttgccattctctgcagttttctgttgggccttggagacagctgctttaatacccagctgcttagtatcttgggctttctgtattctgaagacagcgccccagcatttgccatcttcaagtttgttcagtctatttgcgcagccgtggcatttttctacagcaactaccttctccttcactggcaactcctggtcatggtgatatttgggttttttggaacaatttctttcttcactgtggaatgggaagctgccgcctttgtagcccgcggctctgactaccgaagtatctgatctggtgtccgtgaggggacacgtatgacctcagaaacacagctggacacagagcttggtggaagaagtcgcctttgatcttcactatatattgggtgatgttcagtatggaaaatcaagggattaagactgttaaatcagccagagttggtgttcaagtttacagatatgagttatttaaagcaagtagaataagggaaagctgttctgtcaactgt

SEQ ID NO: 9687 - DNA, 600 bp, Homo sapiens
tctgttgggccttggagacagctgctttaatacccagctgcttagtatcttgggctttctgtattctgaagacagcgccccagcatttgccatcttcaagtttgttcagtctatttgcgcagccgtggcatttttctacagcaactaccttctccttcactggcaactcctggtcatggtgatatttgggttttttggaacaatttctttcttcactgtggaatgggaagctgccgcctttgtagcccgcggctctgactaccgaagtatctgatctggtgtccgtgaggggacacgtatgacctcagaaacacagctggacacagagcttggtggaagaagtcgcctttgatcttcactatatattgggtgatgttcagtatggaaaatcaagggattaagactgttaaatcagccagagttggtgttcaagtttacagatatgagttatttaaagcaagtagaataagggaaagctgttctgtcaactgtaattgttcaaagatgttgtttttcatttcatctatctcaattcttataatcatgttatagaatgtaaatgttttcttctctctcctgctcttgttggaagatcctgcc

SEQ ID NO: 9688 - DNA, 1400 bp, Homo sapiens
tccccaacacagatgtggctttgcttgcctgggccctagggaggtggtaggcaggacctctgggcacccatcaatgcagagcactccaggcttcacgtttggaaatctgagagtcagagagacctcctccaggctttgccacaagcttcaccagaacctccctgggtgtggagtcctgttccagagcagggctgtgaggcagggcaggccggggcttgtccaggtcacagatagagccttctgtgttgcagatgacaaggacctcccaagtgtgccaccactggagctcagtgtgcccgctgactatcctgcccaaagcccgctgtggatagaccggcagtggcagtacgacgccaaccccttcctccagtcggtgcaccgctgcatgacctccaggctgctgcagctcccggacaagcactcggtcaccgccttgctcaacacctgggcccagagcgtccaccaggcctgcctctcagccgcctagccaagactgcagggatggcccgcagcctcatcggggccaaggacacacgcctcctgtcagacacttctaggtgttggcttccttagagagcctggggttaggttagctttcctgcttttatcttctgccttggggacctgccaaacgaaatcccacacctgtacagaactgggataggcgcagtggagcgggttgcttggggggcgttggccgacttcttagagaaggccctccatgtgacttcctcccaggagccagatgcgatcctcaggctgctctcaccgtggcctgtccacggtccaggtccatctcagcagcgtgagggtgcactcagggtgttgttagagcgtctcgtgtgtgctagacgcacccctactcgttcctatagaacacagaggacataggaaacccttaaaacacacatgggattctctggtcacagttttgggttcaggctatgctgctttgggcaggtggagcaccccccgaggaagcctgcaagtccagggcacaggctgccttttggagggagggctggcccataggtgctgctggctccccgccaccagctgggcctcagccctcacggcattcctgctgagcaccgtggggcacccagggagcaggggcgtcagggatcctgctgccggcacccctgtgccgctggcatgagggccgtgtccccactgtgaaggatgaagagcaaggccctcaggacccgtgtcctcagagcaccacacactgagcacccagagacagcgggcctggcagcgggccgggccatgcagggagcgcctccctatgttgcctgccactctgggcaccggccagcaccctctggtgagaagaggtcccccctttttatgtgcactaccccaccatctgtgattataataaatttattattcctgtg

SEQ ID NO: 9689 - DNA, 1400 bp, Homo sapiens
caacatccgctcacctgtcttcaaccattccctgtaccgcacattcgttccagccatgaccgccattcacggcccacccatcacggccccagtggtgtgcacccggaagcgcaggcttgaggatgatgagcggcagagcatccccagtgtgctccagggtgaggtggccaggctggaccccaagttcctggtaaacctggacccttctcactgcagcaacaatggcactgtccacctgatctgcaagctggatgacaaggacctcccaagtgtgccaccactggagctcagtgtgcccgctgactatcctgcccaaagcccgctgtggatagaccggcagtggcagtacgacgccaaccccttcctccagtcggtgcaccgctgcatgacctccaggctgctgcagctcccggacaagcactcggtcaccgccttgctcaacacctgggcccagagcgtccaccaggcctgcctctcagccgcctagccaagactgcagggatggcccgcagcctcatcggggccaaggacacacgcctcctgtcagacacttctaggtgttggcttccttagagagcctggggttaggttagctttcctgcttttatcttctgccttggggacctgccaaacgaaatcccacacctgtacagaactgggataggcgcagtggagcgggttgcttggggggcgttggccgacttcttagagaaggccctccatgtgacttcctcccaggagccagatgcgatcctcaggctgctctcaccgtggcctgtccacggtccaggtccatctcagcagcgtgagggtgcactcagggtgttgttagagcgtctcgtgtgtgctagacgcacccctactcgttcctatagaacacagaggacataggaaacccttaaaacacacatgggattctctggtcacagttttgggttcaggctatgctgctttgggcaggtggagcaccccccgaggaagcctgcaagtccagggcacaggctgccttttggagggagggctggcccataggtgctgctggctccccgccaccagctgggcctcagccctcacggcattcctgctgagcaccgtggggcacccagggagcaggggcgtcagggatcctgctgccggcacccctgtgccgctggcatgagggccgtgtccccactgtgaaggatgaagagcaaggccctcaggacccgtgtcctcagagcaccacacactgagcacccagagacagcgggcctggcagcgggccgggccatgcagggagcgcctccctatgttgcctgccactctgggcaccggccagcaccctctggtgagaagaggtcccccctttttatgtgcactaccccaccatctgtgattataataaatttattattcctgtg

SEQ ID NO: 9690 - DNA, 600 bp, Homo sapiens
cctttcgccagagcccgagagctccgtcggctctgcgtcctggcggtggggactccccgcggagcgcttgcgcgtgccaggccacccgggactacgtttcccagcgggccgagcggccggcgccgcggctgcggtcaggtgacccggtcgcctggccgcagtgagtcaggctgggagggcggggccgcgccggctgctgcggctggcacttggccctttaatccccttcgtgggcccctcaacctggagcggataaattcttggcgcttctccgggggttgtgctcttccgtactcggatcgcttcttaggagtatcctaactgccggtggggagaacttcgccctaaacctggggttccgatccaggaactggaagttgacagcttggctgcctggctcctgcatctgccttctccactcaccatctcatttctttctccaggattgtcagtggcttcgccccgaggagagctgactgccctgggctgctgcctccggcagagctgagccaaaatgtccccggaatctaaaaagcttttcaacatcattattttaggagttgcctttatgtttatgttcactgcctttcaaacttgtgg

SEQ ID NO: 9691 - DNA, 1112 bp, Homo sapiens; identical to SEQ ID NO: 4456

SEQ ID NO: 9692 - DNA, 600 bp, Homo sapiens
caaagaagctaagcacattgcagaagaggcagataggaagtatgaagaggtggctcgtaagttggtgatcattgaaggagacttggaacgcacagaggaacgagctgagctggcagagtctaagtgttctgagctggaggaggagctgaagaatgtcaccaacaacctcaagtctcttgaggctcaggcggagaagtactctcaaaaagaagataaatatgaggaagaaatcaagattcttactgataaactcaaggaggcagagacccgtgctgagtttgctgagagatcggtagccaagctggaaaagacaattgatgacctggaagatgagctctatgcccagaaactgaagtacaaggccattagcgaggagctggaccacgccctcaatgacatgacctctatataattatcaccgtttctgctctgttctggatctgccccctttactcctcggggaacccaaggccccactctcgctctggattccatttgggtcagcctggctggtccccaaggcattaggatgggggagcaaaaagcaacttatgtattttcttccacccccaccccaaattaaaatgttaagctgctgga

SEQ ID NO: 9693 - DNA, 1400 bp, Homo sapiens
agaccgaccaggagaccttccagctggagatcgaccgcgacaacaacaagtgtgccttctgtacccacaggggcaagtactggacgctgacggccactgggggcgtgcagtccaccgcctccaccaagaatgccagctgctacttcgacattgagcggcgtgaccggcgcatcacactgcgggcgtccaatggcaagtttgtgacatctaagaagaatgggcagctggccgcctcggtggagacagcaggggactcagagctcttcctcatgaagttcatcaaccgcgccatcaccgtgttgcgcggggagcacggctttatcggctgccgcaaggtcggggcaccctggacgccaaccgctgcagctatgacgtcttccagctggagttcaacaatggtacctacaacatcaaagactccacaggcaaatactggacggtgggcagtgactccgcggtcaccagcagcggcgacactcctgtggacttcttcttcgagttctgcgactacaacaaggaggccatcaagatggacgggcgctacctgaagggcgaccacgcaggggtcctaagggcctccgcggagaccgtgcaccccgcctcgctctgggagtactagggcccgcccgcccttcccggttcctgcccacgtggcggctccttccaaccctccctgctaaccccttctcctccaggtgggctcccccgggcgggaggcaagcccccttgcctttcaaactggaaaccccagagaaaacggtgcccccacctgtcgcccctatggacttcccagtctcccctccgccctggttccctactcccctcgggtcagcggctgcggcctggccctgggagggatttcagatgcccctgccctcttgtctgccacggggcgagtctggcacctctttcttctgacctcagacggctctgagccttatttctctggaagcggctaagggacggttgggggctgggagccctgggcgtgtagtgtaactggaatctcttgcccctcccagccacctcctcccagccccccaggagctgggcacgtgtcccaagcctgtcagtggccctccctggtgcactgtcccgaaacccctgcttgggaagggaagccgtcaggtgggcgaggactgagcctcggtgtttttttgggtggtggctggaaacagcccctctcccgggtggatgaagccaggcgtcgccccctcggggagccctggggtgagccgccagggcccccctgctgccagtctcccccgtcccgtccccgacatgcatctcactctgggtgtcctggtcttttattttttgtaagtgtcatttgtataactccaaacgcccatgatagtagcttcaaactggaaatagtgaaataaaataactcagtctgc

SEQ ID NO: 9694 - DNA, 600 bp, Homo sapiens
gcgatccggtgcccattagatttctttagtacagaacctgctaaggccatcaaacctattgatcggaagtcagtccatcagatttgctctgggccggtggtaccgagtctaagcactgcggtgaaggagttagtagaaaacagtctggatgctggtgccactaatattgatctaaagcttaaggactatggagtggatctcattgaagtttcaggcaatggatgtggggtagaagaagaaaacttcgaaggcttaatctctttcagctctgaaacatcacacatctaagattcaagagtttgccgacctacctcaggttgaaacttttggctttcggggggaagctctgagctcactttgtgcactgaggtgatgtcaccatttctacctgccatgtatcggcgaaggttgggactcgactggtgtttgatcactatgggaaaatcatccagaaaaccccctacccccaccccagagggatgacagtcagtgtgaagcagttattttctacgctacctgtgcaccataaagaatttcaaaggaatattaagaagaaacgtgcctgcttccccttcgccttctgccgtgattgtcagtttc

SEQ ID NO: 9695 - DNA, 1400 bp, Homo sapiens
caggaaatgttcatcaccagtttcaaaagcttctgactgaattcaacaaatccactgatgcatatgagctgaagatcgccaacaagctcttcggagaaaagacgtatcaatttttacaggaatatttagatgccatcaagaaattttaccagaccagtgtggaatctactgattttgcaaatgctccagaagaaagtcgaaagaagattaactcctgggtggaaagtcaaacgaatgaaaaaattaaaaacctatttcctgatgggactattggcaatgatacgacactggttcttgtgaacgcaatctatttcaaagggcagtgggagaataaatttaaaaaagaaaacactaaagaggaaaaattttggccaaacaagaatacatacaaatctgtacagatgatgaggcaatacaattcctttaattttgccttgctggaggatgtacaggccaaggtcctggaaataccatacaaaggcaaagatctaagcatgattgtgctgctgccaaatgaaatcgatggtctgcagaagcttgaagagaaactcactgctgagaaattgatggaatggacaagtttgcagaatatgagagagacatgtgtcgatttacacttacctcggttcaaaatggaagagagctatgacctcaaggacacgttgagaaccatgggaatggtgaatatcttcaatggggatgcagacctctcaggcatgacctggagccacggtctctcagtatctaaagtcctacacaaggcctttgtggaggtcactgaggagggagtggaagctgcagctgccaccgctgtagtagtagtcgaattatcatctccttcaactaatgaagagttctgttgtaatcaccctttcctattcttcataaggcaaaataagaccaacagcatcctcttctatggcagattctcatccccatagatgcaattagtctgtcactccatttagaaaatgttcacctagaggtgttctggtaaactgattgctggcaacaacagattctcttggctcatatttcttttctatctcatcttgatgatgatagtcatcatcaagaatttaatgattaaaatagcatgcctttctctctttctcttaataagcccacatataaatgtacttttccttccagaaaaatttcccttgaggaaaaatgtccaagataagatgaatcatttaataccgtgtcttctaaatttgaaatataattctgtttctgacctgttttaaatgaaccaaaccaaatcatactttctcttcaaatttagcaacctagaaacacacatttctttgaatttaggtgatacctaaatccttcttatgtttctaaattttgtgattctataaaacacatcatcaataaaataatgacataaaatc

SEQ ID NO: 9696 - DNA, 600 bp, Homo sapiens
tcttatgagtgacaatcgttagtttgaggaattttgtgagacagttgtcaaattgttgctagcttgaaatctgcggcaattggagtatttacaccatagaaatgctataagtgaagacctacctttcccttaagagctagttgttaaacctttaccagcataccactggaccttgtctaaaatttctttgtgttcccagtgtcttgcccagtagatacaagataaatattgccagaatcagatatcaggaagtagtaagaaaaggagttaatatgcaaactaaatcactcgctcaattgaataattgagatcttctgttcatttgttccttggaccttaatcatttgcattttggagaaaattttttctgctttaaaagtctgtaatttcagtttttgtgtcggggagagggaaaaactatttgtctgtagttgctttttgtgacaaagtgaatacccactgggctaagtttcatatctaaagcttgtcactaagaattttcatttttaggggtcaaaaacctattttgaaaatagtgttgtgtgaatgctgtaagtgttgtacatgtctctggtttcagaattaaaagaattcagagtt

SEQ ID NO: 9697 - DNA, 1400 bp, Homo sapiens
caaaagtcccaagcaatataaaaacctttctttcatggatgctatgaataagtttaaatggactaaaaaggaaggtctctccttcaacaagctggtcctcagcctgccagtgaatgtgagatgttccaagacagacaatgctgagtggtcgattcaaggaatgacagcattacctccagatatagaaagaccctataaagcagaacctttggtgtgtggcacgtcttcttcctcttccctgcacagagatttctccatcaacttgcttgtttgccttctgctactcagctgcacgctgagcaccaagagcttgtgatcaaaattctgttggacttgacaatgttttctatgatctgaacctgtcatttgaagtacaggttaaagactgtgtccactttgggcatgaagagtgtggagacttttcttccccattttccctccctcctttttcctttccatgttacatgagagacatcaatcaggttctcttctctttcttagaaatatctgatgttatatatacatggtcaataaaataaaactggcctgacttaagataaccattttaaaaaattgggctgtcatgtgggaataaaagaattctttctttcctactacattctgttttatttaaatactcattgttgctatttcactttttgacttgacttttatatttctttaaaaaattccttccttttaaaaaatataaaagggactactgttcattccagttttcttcttctttgttgttcttctagtgtgacttttcaagtgtaacagccattcttcctgactttaatattgtccagttctggtcttttctgtgaattaccactgggccccttacctcaatgctttttgttgatgcccactctggttcccttgtttatctgagtctgttggtaccccaaatgaccccacacccatcttaaagtactttttttcaccttccctgtttagtactggccagatgagttttttctagagctctgtcactatctgaaaagaaagaggctatgggaaacatagaaatggtatgtattaataactgatcataggctgaggagaaaaaatgtagctggctgcaaacccagtgctgtgaggtgacttatatgaggttccagatcaaagacaggccgtgtgagccagtccaggagggtgtaagttctgaatggttccttgctgactttgggtgacacatgtaccacatactggctcagtttaagtcatggttctattgtagatttatttttatattagttaataaatgactttaaattgtcaccaattgaaaatcttgtcactcttttggttttctttatatagctcagccaaatcttgttttatgtcctgtcctcatctcttaagctaaatctgtttggatcatattaataaac

SEQ ID NO: 9698 - DNA, 1400 bp, Homo sapiens
ggcataaatgaccacacgtttcttttcgaaacattatcatgacttttctgatgccacattctcctggcttttcttttgccccacaggaattcctgtagacatccactgccttactagatgtagggagcacctcagggcccagccctgtgcccactcctctctttagccctcatacttttcctaagtggtaccatctggtcccttgcttgaaatgccaaatgtgcattaaatgccaaaatgtatatcttcagcccaacctctgctttaaccccagcaactgtatgtccagatcctttttctcccttaatggataaggataaagaatcatatgaggatgcttaaacaaagtaggagccaatgcaacatgtctttaaatggagggaacagatttcaggttcctaaggacagcattgatgattctacccaagtgtactgaagatttctagcaggcgtgagatgctttcctttaccattccaaagtgttgttgctgggactttgctaacttgcctctaattttttttttaaatgaatatatcccttgttcattagctacctattgaacataaataacataaatgagatatcatgtcacaccagttagaatggcgatcattaaaaagtcaggaaacaacaagtgctggagaggatgtggagaaataggaacacttttacactgttgatgggactgtaaactagttcaaccattgtggaagacagtgtggtgattcctcagggatctataactagaaataccacttgacccagccatcccattactgggtatatacccaaaggaatataaatcatgcttctataaagacacatgcacacatatgtttattgcggcactactcacaatagcaaagacttggaaccaacccaaatgtccaacaatgatagactggattaagaaaatgtggcacatatacaccatggaatactatgcagccataaaaaatgatgagttcatgtcctttgtagggacatggatgaagctggaaaccatcattctcagcaaactatcgcaaggacagaaaaccaaacattgcatgttatcactcataggtgggacttgaacaatgagaacacttggacacagaagggggaatatcacacaccggggcctgttgtggggttgggggagtggggagggttagcattaggagatatacctaatgtaaatgacgagttaatgggtgcagcacaccaacatggcacatgtatacatatataacaaacctacacgttgtgcacatgtaccctagaacttaaagtataataaaaatatatataaataaatgtaaagagactaatgtaaaaaataaataaattttaagaagagaattagctacaaataagaaaactaaagttccttagaacttaaaaaataaatcttcat

SEQ ID NO: 9699 - DNA, 1400 bp, Homo sapiens
actctcaacagcgctggggggcctactgggcgctggcttcgccatctgtacccagtcccccaagggagtagttgggtgttctcccgctgcagaggagacggcagcctgggtcctgcccttcacctctggcggctttctctacatcgccttggtgaacgtgctccctgacctcttggaagaagaggacccgtggcgctccctgcagcagctgcttctgctctgtgcgggcatcgtggtaatggtgctgttctcgctcttcgtggattaactttccctgatgccgacgcccctgccccctgcagcaataagatgctcggattcactctgtgaccgcatatgtgagaggcagagagggcgagtggctgcgagagagaatgagcctcccgccagacaggagggaggtgcgtgtggatgtatgtggtgtgcacatgtggccagaggtgtgtgcgcgagaccgacactgtgatccctgtgctgggtccggggcccagtgtagcgcctgtccccagccatgctgtggttacctctccttgccgccctgtcaccttcacctcccggagtaagcagcgaggaagagcagcactggtcccaagcagaggccttgccctgctgggaccccgggagtgagagcagcccaaggatccagggtgcagggaactccagagctgcccacctcccactgccccctcagcacacacacagtccccaggcggcctaggggccaaggctggggcggctttggtcccttttcctggcccttccttccccacttctaagccaaagaaaggagaggcaggtgctcctgtaccccagccccactcagcactgacagtccccagctcctagtagtgagctgggaggcgcttcctaagaccctttcctcagggctgccctgggagctcattcctggccaacacgccctggcagcaccagcagctcttgccacctccagctgccaaacagcagcctgccgggcagggagcagccccaggccagagaggcctcccggtccagctcagggatgctcctgccagcacaggggccagggactcctggagcaggcacatagtgagcccgggcagccctgcccagctcaggcccctttccttccccattgaggttggggtaggtgggggcggtgagggctccacgttgtcagcgctcaggaatgtgctccggcagagtgctgaagccataatccccaaccatttcccttggctgacgcccaggtactcagctggcccactccacagccaggcctggccctgcccttcaccgtggatgttttcagaagtggccatcgagaggtctggatggttttatagcaactttgctgtgattccgtttgtatctgtaaatatttgttctatagataagatacaaataaatattatccacat

SEQ ID NO: 9700 - DNA, 1400 bp, Homo sapiens
tgtagtggggttcccgggcggccgccaggcctggaggaagagctgaccctcaaatacggagcgaagcatgtgatcatgctgtttgtgcctgtcactctgtgcatgatcgtggtggtagccaccatcaagtctgtgcgcttctacacagagaagaatggacagctcatctacacgccattcactgaggacacaccctcggtgggccagcgcctcctcaactccgtgctgaacaccctcatcatgatcagcgtcatcgtggttatgaccatcttcttggtggtgctctacaagtaccgctgctacaagttcatccatggctggttgatcatgtcttcactgatgctgctgttcctcttcacctatatctaccttggggaagtgctcaagacctacaatgtggccatggactaccccaccctcttgctgactgtctggaacttcggggcagtgggcatggtgtgcatccactggaagggccctctggtgctgcagcaggcctacctcatcatgatcagtgcgctcatggccctagtgttcatcaagtacctcccagagtggtccgcgtgggtcatcctgggcgccatctctgtgtatgatctcgtggctgtgctgtgtcccaaagggcctctgagaatgctggtagaaactgcccaggagagaaatgagcccatattccctgccctgatatactcatctgccatggtgtggacggttggcatggcgaagctggacccctcctctcagggtgccctccagctcccctacgacccggagatggaagactcctatgacagttttggggagccttcataccccgaagtctttgagcctcccttgactggctacccaggggaggagctggaggaagaggaggaaagtaagggggcgtgaagcttggcctcggggacttcatcttctacagtgtgctggtgggcaaggcggctgccacgggcagcggggactggaataccacgctggcctgcttcgtggccatcctcattggcttgtgtctgaccctcctgctgcttgctgtgttcaagaaggcgctgcccgccctccccatctccatcacgttcgggctcatcttttacttctccacggacaggaagcacagcaggtttatccagatgaactgagaaggtcagattagggtggggagaagagcatccggcatgagggctgagatgcgcaaagagtgtgctcgggagtggcccctggcacctgggtgctctggctggagaggaaaagccagttccctacgaggagtgttcccaatgctttgtccatgatgtccttgttattttattgcctttagaaactgagtcctgttcttgttacggcagtcacactgctgggaagtggcttaatagtaatatcaataaatagatgagtcctgttag

SEQ ID NO: 9701 - DNA, 600 bp, Homo sapiens
gctatccatgccaaacgtgtaacaattatgccaaaagacatccagctagcacgccgcatacgtggagaacgtgcttaagaatccactatgatgggaaacatttcattctcaaaaaaaaaaaaaaaaatttctcttcttcctgttattggtagttctgaacgttagatattttttttccatggggtcaaaaggtacctaagtatatgattgcgagtggaaaaataggggacagaaatcaggtattggcagtttttccattttcatttgtgtgtgaatttttaatataaatgcggagacgtaaagcattaatgcaagttaaaatgtttcagtgaacaagtttcagcggttcaactttataataattataaataaacctgttaaatttttctggacaatgccagcatttggatttttttaaaacaagtaaatttcttattgatggcaactaaatggtgtttgtagcatttttatcatacagtagattccatccattcactatacttttctaactgagttgtcctacatgcaagtacatgtttttaatgttgtctgtcttctgtgctgttcctgtaagtttgctattaaaatacattaaactat

SEQ ID NO: 9702 - DNA, 600 bp, Homo sapiens
ggagcaggtatgaagcctattcatgctgcagacaaacagctgcttatagtggcaaatgcccacatgcattgggacccagagtattctgatgtgaagctcatccagaccatgatgtttgtctcagaggttaaaaacattctggagaaagcctctagtaggcctggaagcccaactgcagatcctaattccatcccgctggtgctatgtgcagatcttaactcattgccagattcaggtgttgtggaatacttaagcaatggaggagtagctgacaaccataaagacttcaaggaactaaggtacaatgagtgtcttatgaacttcagctgcaatggaaagaatggaagctcagaagggagaatcacacatggcttccaacttaagagcgcctatgaaaataacttgatgccttacaccaattacacctttgatttcaaagtgagtggcagcctttgggcaggtgtagaaattatttcagatacaagcatgtaacaaaaaaggtgtaaattctttatgattaattgtataatcttcaggaatttttagattcttaaaatgtctaggctaagtatgcacctaaatataagtaggtttattggg

SEQ ID NO: 9703 - DNA, 600 bp, Homo sapiens
ggtgaatgacatatatatatatatattcaatgaaagtaaaatatatatgctcatatactttctagttatcagaatgagttaagctttatgccattgggctgctgcatattttaatcagaagataaaagaaaatctgggcatttttagaatgtgatacatgtttttttaaaactgttaaatattatttcgatatttgtctaagaaccggaatgttcttaaaatttactaaaacagtattgtttgaggaagagaaaactgtactgtttgccattattacagtcatacaagtgcatgtcaagtcacccactctctcaggcatcagtatccacctcatagctttacacattttgatggggaatattgcagcatcctcaggcctgacatctgggaaaggctcagatccacctactgctccttgctcgttgattttgttttaaaatattgtgcctggtgtcaacttttaagcaacagcactgcctaaaagcaagcagagaacagaatcccagcaccattctataggcaactttttagaattcagatatagtaaatctgttccagatttatgatgttttatgtaaaaaaaattttgtataataacat

SEQ ID NO: 9704 - DNA, 1400 bp, Homo sapiens
tcagcactcattaggacttggtgcctaattttataaaaagtcactaagctcaagtgcttggatgaaaggacagcgtggataaaaaggtttttaaaacatggatgttaaggctgttttgcttggagaagacttgggactgggacagtctttagatattatttgaaatgctggcactgtctatctggatcccagggcttgaactaggatttgaggaagtcacagggaagcagatttcagtctgacatttattcagtgcaagttttttggtgctgtagtatatgatgaaagatgtaaagctgaataaagcattatttctgccctagagttgttcacagcctagtcaggcatatggatatgtaaacaatgactgtaacgtgttatagatgtaaagacaaaataaaggttaaagagggcataaaggagcactcaattgcagagatttgaggacattatttttattttgagctttaaaaagatgaataggtgttctcaggaggtagggatctggctgagagggaataatctgagcaaaggtatgaaacagcctaatgcattagagaaaaaagttcttttagtaaggcatttggggttggggaagctagaaaaagaaatgggagctggtcacacagggccttgtgtgccagactaaggggtttgtagtatatattgtaggcagaagagatccatcaacagattgcaagcaaggaagtatgttcactttaaagtttgagaaagaatagtgtggaagcacgtctcaaatttagacttgttccccctctgaaccgtgaatcagaccatttcaggtagaagtcttccccggtttatctgatctactcggggcctcaggcttctcagctgggaagagaggatgcaagaccagactgaagaacacggttgagtccccagaaccaaaagggggcctttctgcttcttagccagctacctcttcgagtttttcaaattgtgagggggaccataaaaggatggaaacttttagatgacattctacaaattatttttttctttaaattaaaagaacctagccaataagatagagaatgggcatctaaggcatctcagagctctctgatgaagccaggttgtcaaagatcatttgcaaaagaagggaaaactggcatgacaaaagctacagagaggagagtgaaatatagaagtgtttgaaatgttcaagctcacaataagcttaaatttatagaaaatgctaaggttgtcaagaaggcttttttttttttcttttttaaacctgagggcaaaaaggaatggataaagtagtgtaatggattgacaatcaggaagaacagaataactcagttttttttctcctacaaggagatatggctggaccaaaataaaatgacatgaaactgcaaaaatgaaaa

SEQ ID NO: 9705 - DNA, 1400 bp, Homo sapiens
ctcaccatttgaagttagttaaggagaactttatttttttaaaaaaagtaaatggcaaccactagtgtgctcatcctgaactgttactccaaatccactccgtttttaaagcaaaattatcttgtgattttaagaaaagagttttctatttatttaagaaagtaacaatgcagtctgcaagctttcagtagttttctagtgctatattcatcctgtaaaactcttactacgtaaccagtaatcacaaggaaagtgtcccctttgcatatttctttaaaattctttctttggaaagtatgatgttgataattaacttacccttatctgccaaaaccagagcaaaatgctaaatacgttattgctaatcagtggtctcaaatcgatttgcctccctttgcctcgtctgagggctgtaagcctgaagatagtggcaagcaccaagtcagtttccaaaattgcccctcagctgctttaagtgactcagcaccctgcctcagcttcagcaggcgtaggctcaccctgggcggagcaaagtatgggccagggagaactacagctacgaagacctgctgtcgagttgagaaaaggggagaatttatggtctgaattttctaactgtcctctttcttgggtctaaagctcataatacacaaaggcttccagacctgagccacacccaggccctatcctgaacaggagactaaacagaggcaaatcaaccctaggaaatacttgcattctgccctacggttagtaccaggactgaggtcatttctactggaaaagattgtgagattgaacttatctgatcgcttgagactcctaataggcaggagtcaaggccactagaaaattgacagttaagagccaaaagtttttaaaatatgctactctgaaaaatctcgtgaaggctgtaggaaaagggagaatcttccatgttggtgtttttcctgtaaagatcagtttggggtatgatataagcaggtattaataaaaataacacaccaaagagttacgtaaaacatgttttattaattttggtccccacgtacagacattttatttctattttgaaatgagttatctattttcataaaagtaaaacactattaaagtgctgttttatgtgaaataacttgaatgttgttcctataaaaaatagatcataactcatgatatgtttgtaatcatggtaatttagatttttatgaggaatgagtatctggaaatattgtagcaatacttggtttaaaattttggacctgagacactgtggctgtctaatgtaatcctttaaaaattctctgcattgtcagtaaatgtagtatattattgtacagctactcataattttttaaagtttatgaagttatatttatcaaataaaaactttcctatat

SEQ ID NO: 9706 - DNA, 1400 bp, Homo sapiens
caggtgcggggctggctacggaagctcagtgctgtagtccaactgtcccttgtgggcactgcgaccgtggccttgttcctgattagcctggtgccgtactcctacgtggagcccgggacccacgggcgcctctggaccggggcccaccgcctgtttggtgccgtggagcacctacagctggccaactcctacggcctcttccgccgcatgactgggcttggtggacggcctgaggtggtgctggagggcagttacgacggccaccactggacggagatcgagttcatgtacaagcctgggaacctgagccggccgcccccggttgtggtgccccaccagccacgcctggactggcagatgtggtttgcagccctgggcccacacacgcacagcccgtggttcacaagcctggtcttgcgcctgctgcagggcaaggagccagtgatccgccttgtccagagccaagtggccaggtatcccttccacaagcagccgcccacctacgtccgagcccagcgctacaagtactggttctcccagcctggggagcagggccagtggtggcggcgccagtgggtggaggagttcttcccatccgtgtccctgggggaccccacgctggagacgctgctcaggcagtttggactacaggagaaaagcccacctcgcacccgcagcgccaacagcaccctggcccaggccctccactggactcgctctcagctgtctcccctggaggcccccgccctgctctgggggctcctcatggccgtgggggctgtcagatttgtgcaagccctgctagcaccctgttctctccggtcctccccgctggcaccagtcagcggggagaagcgcaggccagcctcccagaaagactccggagctgcctccgaacaggccaccgcagcccccaacccctgctccagtagttcgaggaccacccggcgaaagaagtagctgtgttctcccagctgcacgtcctgagagggccaggtcgccgggagtgctctggcctccggcaggacaggacccagccactgtgccttagctgaccctgcagggccaggcacaggttggggggctgcccctggggtttgcagggtgctgcattgagggctccaggccccacccccacgccagccatgcccctccccaggactcccactattgcctctgtgattggcccaggaggaaaacacgaccaagctcaagacccttcccctgccctgggctgtgggggtctgagtctagagcccccaaccctaggccccgtgccagaggggaagaggctgactcccaggggaagaggggaagcactgtcatcttccacgtcatcttcacaccagcccatcctgccctttagatctgggcaccaataaaggcgtcttttgtgcttg

SEQ ID NO: 9707 - DNA, 408 bp, Homo sapiens; identical to SEQ ID NO: 4472

SEQ ID NO: 9708 - DNA, 1400 bp, Homo sapiens
gtgtaatctccctggattaaggcattcttaaaaacttaggcttggcctctttcacaaattaggccacggccctaaataggaattccctggattgtgggcaagtgggcggaagttattctggcaggtactggtgtgattattattattatttttaataaagagttttacagtgctgatatgaccctgttgtcaccccagctgaatttcttatgaccctcccaaaccaaagctcagatggggtcagaagagcttcatagaaagttgggcaaaacaggctagcaattgcaaagtcaggctttgaccaacatatttctttgcactgaggccttgctgctgtggatacggaaatggttaagtactgtgcttcctcagcagctgggctgtcagggccatagtagctccctttggagaacagggaaagcctggaggcttcccaggtggcccagcgtggtgtcctgtcagcttcctctttaggaacccaccagagggcagcaagctcctttcacttcgctagtaagaacccctccgtttttgtgtgtttttgtttttgttttctggagacaaggtcttgctttgtcacccaggctggagtgcagtgtcgtgatcaaggttcactgaagccttgacgctgtgggcactgcctcagccgcccaagtatctgggaccacaggcgtgcaccaccatgcatagctaatttattttttgtagagacagggtctccctgtgttgaccaggttggtctcgaactcctgggctcaagcagtcctcctgccttggcctcctaaagtgctgggatcacaggcgtgagccactgcgcccagcccactgctagtttgactttttataattgaacctcctggctatgccctgagatcagcgctattttgtaaaccgctgaggtatggataggaacgagtagatcagacctcttgaaaatgcttattcttcctcccttttattttttgtctcttttaagatggtaaaatggttctcagggattcctgccaatactttgaattattttttcctctccatggtatcagtgttcatttccccagttcttgcacaccgctttctgttttggcagttctgccaggcaagccctgtgttccttgggactggttttgctgtggttggatacagataccagcttgccttgatgggattggtattgctgtgtgcttccagccacaggttctcacactcaattccaaagccttcctattgggcgaattccctcaaactctatttgacctgacagccatacgtattcccctctggtagccacagacatgctgtgtttaccaatgtttgctgtttaaattgcatgttctaattccacgtatcttccagtctcttttataaagtctcagactataataaacacagcttgcccagtt

SEQ ID NO: 9709 - DNA, 653 bp, Homo sapiens; identical to SEQ ID NO: 4474

SEQ ID NO: 9710 - DNA, 1400 bp, Homo sapiens
gccagaccgctgccctgcagcaggtcctctccacccggatcctggccatgaaggcctcgctctgcaagctgtcgccctgcacggtgactcgcgtgtgcgactaccacaccaagctcttcctcatcgccatcagctccaccctgaagtcgctgctgcgcccccactttctcaacacgcctgacaagagccccggcgaccggctgaccgagatctgcaccaagatcaccgacgtcgacattgacaaggtcatgatcaacctcaagacggaggaatttgtgctggacatgaacacactgcaggcgctgcagcagctcttgcagtgggtgggcgacttcgtgctgtacctgctggccagcctacccaaccagggttccctgctgaggccgggccacagctttctgcgggacggcacctcgctgggcatgcttcgggaattgatggtggtcatccgcatctggggccttctgaagcccagctgcctgcccgtgtatacggccacttcggatacccaggacagcatgtccctgctcttccgcctgctcaccaagctctggatctgctgtcgcgatgagggcccagcgagcgagccggacgaggcgctggtggatgaatgctgcctgctgcccagccagctgcttatccccagcctggactggctgccagccagcgacggcctggtcagccgcctgcagcccaagcagccccttcgtctgcagtttggccgggcgcccacgctgcctggcagtgctgccaccctgcagctcgacggcctcgccagggccccaggccagcccaagatcgaccacctgcggaggctgcaccttggcgcttgccccacggaggaatgcaaggcctgcaccaggtgcggctgtgtcaccatgctcaagtcgcccaacagaaccacggcggtgaagcagtgggagcagcgctggatcaagaactgcctgtgcggtgggctctggtggcgggtgcccctcagctacccctgagcccagctgcccctcagctactcctcagctacccctcagctgcccctgagcccggctgctgcaagagccaccgctcgccctggactctcctcggcgcggttaacctcagcccgccctgcagggctgttgaaggccgtgggccggacgcctgcgtgaccagcagagcttctgaggaagcccctgcctttgtccagctgggcccgcagtccacacaccactctcccaggacccccagatccctggaccatctgcatccaaaggaccgtccgtgacggccgggggtccaggcggaccttgtggtgacccggctcgggcgtctcctcggtttccttgcctcacccgcggagagcgctgaacctggacaagcagcggctgggaaggacaggtccaataaacgccctctgcgcccag

SEQ ID NO: 9711 - DNA, 1400 bp, Homo sapiens
tgcgactaccacaccaagctcttcctcatcgccatcagctccaccctgaagtcgctgctgcgcccccactttctcaacacgcctgacaagagccccggcgaccggctgaccgagatctgcaccaagatcaccgacgtcgacattgacaaggtcatgatcaacctcaagacggaggaatttgtgctggacatgaacacactgcaggcgctgcagcagctcttgcagtgggtgggcgacttcgtgctgtacctgctggccagcctacccaaccagccctcccccacctcggagccctgccccacctcggagccctcccctccctcggagccctcccccacctcggagccctcctctccatgaagcctctgctggttccctgctgaggccgggccacagctttctgcgggacggcacctcgctgggcatgcttcgggaattgatggtggtcatccgcatctggggccttctgaagcccagctgcctgcccgtgtatacggccacttcggatacccaggacagcatgtccctgctcttccgcctgctcaccaagctctggatctgctgtcgcgatgagggcccagcgagcgagccggacgaggcgctggtggatgaatgctgcctgctgcccagccagctgcttatccccagcctggactggctgccagccagcgacggcctggtcagccgcctgcagcccaagcagccccttcgtctgcagtttggccgggcgcccacgctgcctggcagtgctgccaccctgcagctcgacggcctcgccagggccccaggccagcccaagatcgaccacctgcggaggctgcaccttggcgcttgccccacggaggaatgcaaggcctgcaccaggtgcggctgtgtcaccatgctcaagtcgcccaacagaaccacggcggtgaagcagtgggagcagcgctggatcaagaactgcctgtgcggtgggctctggtggcgggtgcccctcagctacccctgagcccagctgcccctcagctactcctcagctacccctcagctgcccctgagcccggctgctgcaagagccaccgctcgccctggactctcctcggcgcggttaacctcagcccgccctgcagggctgttgaaggccgtgggccggacgcctgcgtgaccagcagagcttctgaggaagcccctgcctttgtccagctgggcccgcagtccacacaccactctcccaggacccccagatccctggaccatctgcatccaaaggaccgtccgtgacggccgggggtccaggcggaccttgtggtgacccggctcgggcgtctcctcggtttccttgcctcacccgcggagagcgctgaacctggacaagcagcggctgggaaggacaggtccaataaacgccctctgcgccc

SEQ ID NO: 9712 - DNA, 1304 bp, Homo sapiens; identical to SEQ ID NO: 4477

SEQ ID NO: 9713 - DNA, 1400 bp, Homo sapiens
gacttgactgtggccttgcctctgcttgtccctattgcctaggactcatagtgtccagcaggtgctttgaggcattttagccccagttattctctaggcaactaggcttggcacagtgggaactgggcacctcccaggtgatttactgatcctctttgctccttcctttctgccttctcacttttttcccctaaatcttgtactgttcacatcttcagcacctggcctaccatgtaattcagaaatgggtggtaggacagcttctgaagtggcaagtactaaactatagcccattctcttctttagagtttgttgacatttgaagatgtggctgtgtatttttctgaggaagagtggcaattattgaatcctcttgagaagactctctacaatgatgtaatgcaggatatctatgagactgtcatctctctagggttaaagctaaaaaatgacactggaaatgatcatcctatatctgtttctacatcagaaatacaaacatcaggatgcgaagtatcaaaaaagaccagaatgaaaattgcccagaaaacaatgggcagggaaaatcctggtgatacacacagtgtacagaaatggcatcgagcttttccaaggaagaaaagaaagaaacctgcaacttgtaaacaagagcttccaaaacttatggatcttcatgggaaaggccccacaggggagaaaccttttaagtgtcaggaatgtgggaaaagcttcagagttagctctgatcttattaaacaccacagaattcacactggagagaaaccctataaatgtcaacaatgtgacaggaggtttagatggagttcagatcttaataagcacttcatgacccatcaaggaataaaaccatatagatgctcatggtgtgggaaaagctttagtcataacacaaatctacacacacaccaaagaattcacacaggagagaagccctttaaatgtgatgaatgtggaaaaagattcattcagaactcccaccttattaaacaccagagaactcacacaggtgagcagccttatacgtgtagcttatgcaagagaaactttagtaggcgatcgagccttcttagacaccagaaactccacagaagaagggaagcatgtctagtgtctccaaactgaggaaagttaccatgtagagcttgactttagaagtggtgaaagaatacaaaattatgaggcacccaatgataggaatctgtgattaataaaacatttgggaagggtacatgttacacttcacaaaaaggaatctaagctgtctgttttattcagcattgcatcttctgtgcctagcacaagagttgatacataaggagtactttataaataaaaaaatgaaagtgtagtgatgagattcctttagctatctatctata

SEQ ID NO: 9714 - DNA, 1400 bp, Homo sapiens
agcccagagcagctggagaagttccagtcctgtctgagccctgaagagccagctcccgaatccccacaagtgcccgaggcccctggtggttctgcggtgtaagtggctctgtcctcagggtgggcagagccactaaacttgttttacctagttctttccagtttgtttttggctccccaagcatcatctcacgaggagaactttacacctagcacagctggtgccaagagatgtcctaaggacatggccacctgggtccactccagcgacagacccctgacaagagcaggtctctggaggctgagttgcatggggcctagtaacaccaagccagtgagcctctaatgctactgcgccctgggggctcccagggcctgggcaacttagctgcaactggcaaaggagaagggtagtttgaggtgtgacaccagtttgctccagaaagtttaaggggtctgtttctcatctccatggacatcttcaacagcttcacctgacaacgactgttcctatgaagaagccacttgtgttttaagcagaggcaacctctctcttctcctctgtttcgtgaaggcaggggacacagatgggagagattgagccaagtcagccttctgttggttaatatggtataatgcatggctttgtgcacagcccagtgtgggattacagctttgggatgaccgcttacaaagttctgtttggttagtattggcatagtttttctatatagccataaatgcgtatatatacccatagggctagatctgtatcttagtgtagcgatgtatacatatacacatccacctacatgttgaagggcctaaccagccttgggagtattgactggtcccttacctcttatggctaagtctttgactgtgttcatttaccaagttgacccagtttgtcttttaggttaagtaagactcgagagtaaaggcaaggaggggggccagcctctgaatgcggccacggatgccttgctgctgcaaccctttccccagctgtccactgaaacgtgaagtcctgttttgaatgccaaacccaccattcactggtgctgactacatagaatggggttgagagaagatcagtttgggcttcacagtgtcatttgaaaacgttttttgttttgttttgtaattattgtggaaaactttcaagtgaacagaaggatggtgtcctactgtggatgagggatgaacaaggggatggctttgatccaatggagcctgggaggtgtgcccagaaagcttgtctgtagcgggttttgtgagagtgaacactttccactttttgacaccttatcctgatgtatggttccaggatttggattttgattttccaaatgtagcttgaaatttcaataaactttgctctgtttttctaaaaataaa

SEQ ID NO: 9715 - DNA, 600 bp, Homo sapiens
agagtatttcggcccgtatcgaacttttgttctcagtatcagcccatggtttcaggatcaaagctgtcatgttggagattggtaatggctttcctgtctttgtacagttgaattcctagtcttccttcatccttgccctctgttggcacaggcattatctctgcaattttagaaaatgacaagtagagaatactacattgagaaactaaaccctcttcttggggtcctgatactcattcccatttgtcccagtgctgacaacccaatcttcccaatactttcaggcctgctctacaaaagtacctgttcttgtagaaattttacagtctgccattttgggtgcccaccccaatttttaccttttagtaagttggcatgaaattttggtaaaatctgaaaatcacatttcagaataaaacaattgggcaaaactacctaggctttactcttgagtgtctccttttgatagggattgtttctggaccagtttgtctaagtcctggctcttattggttcatatgaaataatgttaacttcacttctttgtatattatgtataaattagaaaatgaaaaatgtgtgaataacattgtatgaaat

SEQ ID NO: 9716 - DNA, 1400 bp, Homo sapiens
ggccaccgctgtgcagtgtcatgttccagaaattactgatgaagcagcatgtgttggtggcatgtgcactggcctgccatgacagccctctgactggccccccagtgaagagtaaaggcctgcctgccgcaggcttcggaggcgtctgctgagtcctctcacccgcatgggtctggggaagtgatcacgctcagccgacggtctgaccacacttcatcctccccccggggccttctcatcttgggagatgactcctcttcagagcacctgctgcaggactggatcccacccccctgcaggtcctggggtctcagggccttggagcagcccatgctggaatcatgtttacctcctagtgcaaccgtcccctacccagggactgtcgaatggccccacggaggggacgggcggcctgctgagtgaagccacaaataccgagtggacttgaccccggcccccactaggctgcacacctagactcgccctgccagggcctcgctcttcccatctgaaaagtcctggtagttcttgaggtttacttctcaaatgaaatatttttagtaaaaagtacaggtatatctcggagatattgtgggttcagttccagaccacctcggtaaagccaacatcacaataaagcaaggaagcgcattgttttagtttcccagtgcatctaagtcatgtttactgcatattgcagtccactaaatgtgcaatagcattatgtctaacaaatgtacaaaccttaatttaaaaatatttactgttcaaaatgctgacacagaaacgcaaagtgagcacatgctgttggaaaatggtgccaaatagacttgcctgatgccaggctgctacaaaccttcaatttaaaaaaaaaacacagtattcacaaagcatagtagaatgaggtatgcctgtattgctctttctgaagtggtgtgatataaaccatctctaagaaatgtttctaccctaaagatttccccagtacagtcagctctccgtaactgtggtctccacatttagatccaaccagccttggataggaaatatttgaaaaaagaaattgcattggtactgaacacgtacagacctttttttcttgccattattccctaaacaatatggtgtagcatatttacatagcatttatattgtatttggtattataagaaatctagagatgatttaaattatacaggaaggtgtgcgtaggttacgtgcaaacgctatgccattgcccatcagggacttgagcatcctcagatgtcggtgtctgagggttgaggttgcagtcctggaacccatcccccatggatactgaggcatagctgtactgtgtgttttcactttgctttcagaactacgacttgaatgtgatcgattacaataaatgtttttct

SEQ ID NO: 9717 - DNA, 1400 bp, Homo sapiens
gcgtcgacattgaagaggtggctgcttcaaacccggagctcatttttaaggagcaaattgacatttttgaaggaataaaggacagccaagctcagcggatggccgaaaatctaggcttcgttgggcctttgaaaagccaggttgaagccatccttgtcaatatatttggtggtatcgtcaactgtgccatcattgccaatgggatcaccaaagcctgccgggagctagaactcaaggtgcccctggtggtccggcttgaaggaaccaacgtccaagaggcccagaagatactcaacaacagcggactccccattacttcagccattgacctggaggatgcagccaagaaggctgtggccagtgtggccaagaagtgatgtctttgtcctgatccaatggagaaagaaagccatttttccgtaaaaagggatggttcatcattgtgaaagaaatggttatctcattggggaagaaaaggggagggggaaggcaagaatcactgaaaaatcttaaatctgtgttttctggaataagatatctagacagcctaaatctgattttggtctttataaaaataatatcttgtgttctcatacttttctgtcactgtaagcctgcccagtaggcagtgttttgcagactttggggagtggtctatgtggccaaatattgtgtgtatagacagaatttgaaatcaagtcctgcttcatttacaagaattttggtgggcatctaatcctacataatgaaaaagaaaaacagaccatttaaaaactcagacaagattatatttaatatattaattactaaaaaggcataagattacactgaacatattagctactaaaaaggcactgctaagacattcaagcaaatagctattacacactactgcagattttacaggtttctaattctaacatatgtttgaaaaatccgtgagtattccaaaatatatttaataatggaatatctgcattaatataccatccatgtgtttttaccatttgccttaatattgaatatactgtttacctcacactaaaaagaaaaccagaagccttatttgtgattttgggagtggaagcttccatttttgtgtcaaaaatgaatcctgattcttatggaaatctctgttattaagatatttcaagatgagacaacactgaagatcaaattgtgtttagtatcactatcttctctcctcgtttctctcttactcctcatcctcccagaatctaccagtttatggtagaaagatgggaaccttatttgaatgtgttttttttttccatgatgtccaattttgttgtgggaaaggatttggataaaatttttgtttaaattttggtagatttttatctatacaaatttaaataaaattatgttttgtaagctgt

SEQ ID NO: 9718 - DNA, 1400 bp, Homo sapiens
gctttgtgaatggtgctgggctcgccatggctacttgtgatatcattttccttaatggtagaagcccagccagcttcttggatcttggaggtggtgtaaaggaagctcaagtatatcaagcattcacattgcccacagctgatcctaaggttgaagccatccttgtcaatatttttggtggtatcgtcaactgtgccatcattgccaatgggatcaccaaagcctgccaggagctagaactcaaggtgccccttgtggtttggcttgaaggaaccaacgtccaagaggcccaggaaatactcaacagcagactccccattacttcagccgttgacctggaggatgcagccaagaaggctgtggccagtgtggccaagaagtgatgtctttgtcctgatccgatggagaaacaaagccatttttccataaaaagggatggttcatcattgtgaaagaaatggttatctcgttggggaggaaaagggggggtgaaggcaagaatcactgaaaaatcttaaatctgtgttttctggaataagctatctagacagcctaaatctgattttagtctttataaaaataatatctcgtattctcatacttttctgtcactgtaagcctgcccagtaggcagtgttttgcagactttggggagcggtctatgtgaccaaatattgtgtgtatagacagaatttgaaatcgggtcctgcttcatttacaagaattttggtgggcatctaatcctacataatgaaaaagaagaacagaccatttaaaaactcagacaagattatatttaatatattaattactaaaaaggcacaagattacactgaacattagctactaaaaaggcactgccaagacattcaaacaaatagctattacacactgcagcagattttacaggtttctaattccaacatatgtttgaaaaatccatgagtgttccaaaatatacttaataatggaaggtctgcattaatataccatccatgtgtttttaccatttggtttaatattgaatatactgtttacctcacactaaaaataaaaccagaaaccttatttgtgactttggagtggaagcttccatttttgggtcaaaaatgaatcctgattcttatggaaatctctgttattaagtcatttcaagatgagacaacactgaagatcaaattgtgttgggtatcagtatcttctctcctcgtttatctcttacacctcatcctcccaggatctaccagttgatggtagaaagatgggaaccttatctgaatgttttttttttccatgatgtccaattttgttgtgggaaaggatttggataaagtttttgtttaaattttggtagatttttatctatacaagtttaaataaaattatgttttgtaagttgt

SEQ ID NO: 9719 - DNA, 600 bp, Homo sapiens
ggcaaccgagcagctatggacagcagagtagctatggtcaacaaagcagctatgggcagcagcctcccactagttacccaccccaaactggatcctacagccaagctccaagtcaatatagccaacagagcagcagctacgggcagcagagttcattccgacaggaccaccccagtagcatgggtgtttatgggcaggagtctggaggattttccggaccaggagagaaccggagcatgagtggccctgataaccggggcaggggaagagggggatttgatcgtggaggcatgagcagaggtgggcggggaggaggacgcggtggaatggggttacaaagtgagagccttgtatacacttcaatacttaaaaagtacccgtactcagtactcagccggcagcataatgaaaagtgggactagacacggtgtccatatggagaggaaaaatatacatagaatatttttaacaaaatgtattcattgtataaatggaatccttctgtaactttggtaactgcatacttgttgtttggtaatgaaccagaggaggtataatactctagaattgtgtaacattaaagtgtaaacttttgtgttt

SEQ ID NO: 9720 - DNA, 600 bp, Homo sapiens
agcaccgagctggagactggcagtgtcccaatccgggttgtggaaaccagaacttcgcctggagaacagagtgcaaccagtgtaaggccccaaagcctgaaggcttcctcccgccaccctttccgcccccggggtggtgatcgtggcagaggtggccctggtggcatgcggggaggaagaggtggcctcatggatcgtggtggtcccggtggaatgttcagaggtggccgtggtggagacagaggtggcttccgtggtggccggggcatggaccgaggtggctttggtggaggaagacgaggtggccctggggggccccctggacctttgatggaacagatgggaggaagaagaggaggacgtggaggacctggaaaaatggataaaggcgagcaccgtcaggagcgcagagatcggccctactagatgcagagaccccgcagagctgcattgactaccagatttattttttaaaccagaaaatgttttaaatttataattccatatttataatgttggccacaacattatgattattccttgtctgtactttagtatttttcaccatttgtgaagaaacattaaaacaagttaaatggt

SEQ ID NO: 9721 - DNA, 600 bp, Homo sapiens
ctcactgtggctcctctgttttacatactcattagtaagtgggaggtccactggggcaacagacactgccacaatttcagtgttgtgttcagccaaggggacggtctgggcaggcagcttaagtgtgagtttagtcacaactcctgagtgtcccgctctcctgcttacctaggaggtgagtgccaggaaaatacaccaaatgcttctagtattgtttccccacttaaaatagtcctgcttaaattcacatggtgtggtctgatgttctgagagcatcaggaaatacaacccttttgcccatttacccttctccccggatcccaaggtggtctgttgctctggcttcctttcattgtcttaggccttcatggagtggatgctgcctcctcctggctgtttttgtgcctgtttgaagctactgctgcctccatttctgggaaagacctttgagagcctagcccaggcctaagggctatgtttggtaccagtgttttgtctttagcttttctatgtgattgtgccgtcattctgttttaagctcatggatcaatggatttgtttacaatgtgatattttctattaaatccagtattttcaaat

SEQ ID NO: 9722 - DNA, 600 bp, Homo sapiens
ttagcagtgactgtttgacataaaacatgtaagaattgcttgttgggaagagtgctttagggacccactgttttcatttcttcttggagtttaccttgtttcagatgcagccatgggtaggtcagagatggattgttggtgcaataaacccaagaatcaatgtagcctcttaatcccatcaagatgtagtttgtagcagcaaagtgtacagtctgaaaccgtatgttttatccttatattttagagctttcagcagcctttttaagagaggccacttaccaaagttatttctataagctcaagagtgtttcggttggtaagttcttccagctgaagccactttttccttatagttaatacaaatgactatttttactttaaaaggcacagctgtcctggtgggaaatgaaacctgcagcagttcaggatgactaatgaaagcaattagcttgaacatttagaaaaaattcatatatgatctaaatttttatattatcatttctgtgccttctaattcctgcatccttttcaaaacatctttccagacattaacttacacattgtataaaaccgaccaaaatgatttcctaaagttcatgc

SEQ ID NO: 9723 - DNA, 1191 bp, Homo sapiens; identical to SEQ ID NO: 4488

SEQ ID NO: 9724 - DNA, 1400 bp, Homo sapiens
tgttctccagagttttacattacacttgtctgtcttataattgatattttaggatgtttgggtgtttgttacaggcagaattggatagatacagccctacaaatgtatatgccctcccctgaaaaaaattggatgaaaatctgcacagcaaagtgaaacacacagataataggaacaaaatgtagttcccatgtgccaaacaaaataaatgaaatctctgcatgtttgcagcatatctgccttttgggaatgtaatcaaggtataatctttggctagtgttatgtgcctgtatttttttaaaatggtacaccagaaaaggactggcagtctacttctaccatagttaaacttcaccctctttaatttcacaacatattctttggaagcaggaagaaatgctcataaagaggatcagaccttctttcccgtgaaaccagtatttggcgccatatataagcctggttaaattggtcatctaaagctgtcaaataagacattctgtgaaaggtaaacatcgaaactggttataagtaaaaccatcaagccaacaacagggtcttgagataacctttgaagcttattgtactggcctgcaccagaagatgtctgcattactcattgctaaaaatgtgtagcacagaactgcactaggattaatttgtttacaagaagaaatttaaactctacgtttggttttcacatacagcagctctattgaataacatgcatctgaattttaagttgcaaaggtatctgaataatttttcatgtgcatcttttgtcgaatgttttggttcaagaaagaatgtttaaagctttttaaaagacttcagttcttaatgtaactgtacccttctgcatggaaaatcataaccaacatggctgcagtagacttcttagtggtatccagcaccacttgcagagggctgctttatcatattgtacttgggtgtaggactctagtgttcttgggtgtattgcatgggctgcattatctacagcattgtacaataacaactagaaaaggcagtatacttcactgatgcttgtctggtaataatcacttctgtgttataatggaaggttttttgtgatgtatgaaacttgtgttttttatatataaatgagtatagttagtgttgtggtaatgcctgttttcatctgtaaatagttaagtatgtacacgaggcactacttctgatttattgcaatgttcagtcctagtttttacttttattcttaaagcattcagttttgctttcaattttatgtaccttagttctgagttagacctgcagatgtgtacagatagttcatatttatgtattgcacataatcatgctattcagcattgatgctatattgtattatgtaaataataaaagccatgtacagaggg

SEQ ID NO: 9725 - DNA, 600 bp, Homo sapiens
tttccaagaacatagtttaagttgattaaaaatgcttttagaatgcaggagcctacttctagctgtattttttgtatgcttaaataaaaataaaaattcataaccaaagagaatcccacattagcttgttagtaatgctctgaccaagccgagatgcccattctcttagtgatggcggcgttagggtttgagagaagggaatttggctcaacttcagttgagagggtgcagtccagacagcttgactgcttttaaatgaccaaagatgacctgtggtaagcaacctgggcatcttaggaagcagtccctggagaaggcatgttcccagaaaggtctctggagggacaaactcactcagtaaaacataatgtatcatgaagaaaactgattctctatgacatgaaatgaaaattttaatgcattgttataattactaatgtacgctgctgcaggacattaataaagttgcttttttaggctacagtgtctcgatgccataatcagaacacactttttttcctctttctcccagcttcaaatgcaaattcatcattgggctcacttctaataactgcagtgtttcccgccttgggcttgcag

SEQ ID NO: 9726 - DNA, 1400 bp, Homo sapiens
ttgattttgctgtttttgtttgttttatcacttctatatttggtgaacggccacagttactgatatttatggaaaagtactttcaagtatgaggtcaatacgtaagccagagtgaatgatactacaagttgagcatctctaattcaaaaatctgaaatccagaagcttcaaaatctgaatctttttgaacaatgacttgaccccacaagtggaaaattccccacctgacacctttgctttctgatggttcagtttaaacagattttgtttctcgcacaaaattattaaaaatgttgtataaattactttcaggctatatgtataaggtggatgtgaaacatgaattatgcaattagagtcgggtcccattgtgtatacacagatattccagaacctgaaatccaaaacacttctggtccctagcattttggataagggatactcagcttgtacctatatattcgtatatattcactgttgttagaaatttttaagttgctgttttgtgatggatctaaatcttttctcttgctaccaagctattgtcactgcagtgcattataccaaagagcaaagtgtcagtgccactgaaaataaagaacccattaatatcgtggctaactgattacatttatatccaagatgaaccttttttatatataataaaaatttgagggaatatgttttgggatgtattatagagctaaaactctaacctcttaatagttttatagaacttaaaaatttttgatagttacccaattggtgatacgatcttaagcttttgtgtcagattatttaatatgatgacttcatgctttattatgccttattatggctgatgtattactgtgatgaaacaaaatatctttaaaagttaaaacatccagacatagaaactcttttttcctaaggataaagtacctttgagcatgagtgtatcacagctttccttaggaaaacttttcattacatacttgtttaaactctgtcttccaggggaaaaataataaggttgaatcattttattaaaaatactttttaagaaaataactatgaacatctgaatattaaagatataaaaatgcacataattcatatttcaggtggtatttgcattcagtgccttactagtattctcagaacattttaatgatttctaacatttcttaacagtcatagatatataaattttcattttttgtacttgaatattctaagtaaaactgacatttactcttgacaaataaaacatatatatatttactaaaatgtgtttaattttactttttgaaaactgtcattttaaaaatattcaattaattatgtatttgaattattttggagatgaggtattttatgagtattttcagacaataaaacttaattagtctgtgtca

SEQ ID NO: 9727 - DNA, 1400 bp, Homo sapiens
ttgattttgctgtttttgtttgttttatcacttctatatttggtgaacggccacagttactgatatttatggaaaagtactttcaagtatgaggtcaatacgtaagccagagtgaatgatactacaagttgagcatctctaattcaaaaatctgaaatccagaagcttcaaaatctgaatctttttgaacaatgacttgaccccacaagtggaaaattccccacctgacacctttgctttctgatggttcagtttaaacagattttgtttctcgcacaaaattattaaaaatgttgtataaattactttcaggctatatgtataaggtggatgtgaaacatgaattatgcaattagagtcgggtcccattgtgtatacacagatattccagaacctgaaatccaaaacacttctggtccctagcattttggataagggatactcagcttgtacctatatattcgtatatattcactgttgttagaaatttttaagttgctgttttgtgatggatctaaatcttttctcttgctaccaagctattgtcactgcagtgcattataccaaagagcaaagtgtcagtgccactgaaaataaagaacccattaatatcgtggctaactgattacatttatatccaagatgaaccttttttatatataataaaaatttgagggaatatgttttgggatgtattatagagctaaaactctaacctcttaatagttttatagaacttaaaaatttttgatagttacccaattggtgatacgatcttaagcttttgtgtcagattatttaatatgatgacttcatgctttattatgccttattatggctgatgtattactgtgatgaaacaaaatatctttaaaagttaaaacatccagatatagaaactcttttttcctaaggataaagtacctttgagcatgagtgtatcacagctttccttaggaaaacttttcattacatacttgtttaaactctgtcttccaggggaaaaataataaggttgaatcattttattaaaaatactttttaagaaaataactatgaacatctgaatattaaagatataaaaatgcacataattcatatttcaggtggtatttgcattcagtgccttactagtattctcagaacattttaatgatttctaacatttcttaacagtcatagatatataaattttcattttttgtacttgaatattctaagtaaaactgacatttactcttgacaaataaaacatatatatatttactaaaatgtgtttaattttactttttgaaaactgtcattttaaaaatattcaattaattatgtatttgaattattttggagatgaggtattttatgagtattttcagacaataaaacttaattagtctgtgtca

SEQ ID NO: 9728 - DNA, 600 bp, Homo sapiens
tttagagtataatgatgttctagggcataatgaggaaaatttttaaaaaatagattataatgatacatattggtatcattaagacaacagatttgagcaaatacaattaaggtgtcttattttttgcatcaagtaattattgctgtggtctttctactccacaaaataattttttctttttgcagttgaaaattaactgcattattaactaattaataaaataaatcaagtggtataagggattagtttaccctcaagccgatgactccatggctactgatattagttagtttaggatttttaaaaagcatatcagacccccagtttcaggaattgagtataaatattgcttcttgtcaccctgggacagtaatgccttatagtggcactagtcaccttaagtagattacacatggttgaggtgaataaagctgcatgggaatttgctttcgtgatatatttcatttgcaaacttctacataatcaagttttatgtttaaaaccatcggttctatatatctagctttaggaagttgcccttacaggtgggaccttttgtgttaatctgttttctccccagtcatcttatttggctatgtt

SEQ ID NO: 9729 - DNA, 600 bp, Homo sapiens
ttatactgcttctgtataaaatgcctttcttctctatctgtgtatattttataagatgtccttcttagtgtgaaagaagggaaatgtggatcatcttgtggaagctaatcactggcaggagcctggatggctggcggaaagatatatgagaaagaaaaattatgaaggtagaacagagtgtaggaactgggaattggtttcatggtataggttttaaaatgagacaggctacccttcgggagtccacctctcttgaggcggtgagcagaagcttgtcctccatatttatacctagaagtgtggactgctggttcctgcacagactgccggttattcactaggaatatttccccaagcaccacagtataaaatactacagcactctgtgttaaagactaactgtctacatctccatatgttgtagtgttgtgaaaatgtgattttaaaaaattatcgccagttaaaactggctattcttttcctctatttcaaagtcatttttgttcagtggaatagagacagcaacatggtgttaacctctcaattaaaatacaattgacaccagtaaattttgccataaaaagttaaaatctcttgttc

SEQ ID NO: 9730 - DNA, 1400 bp, Homo sapiens
ggggctccaccaatgccatcccaaaacagggtcagacactgcccagcttccctccaggaggttcttgtctctgtgtaagggcttgtctccctcccagtttttcttttgctccacgtcattttgtcaggctggttataagccggaggcagctttaaccagcccccagggatgattgtgaaggaggcccctccccttgtgaggagggggcactcctctccagcccctggtaccacagtcctcacgatggtgcagtgatttctagccaggcgtcaagatgcgctgctttccctctcctgcctcatcccttgttggcagctccagttcaggccgtggagggacgtgatgctgggctgtgtttactaaacccatgggttttcagcctcttaagcccagctccgatctccaattagttgagagcgctgggttgactaacctctggtatctgagcacagacagagggtgctgtgggtctgctgggtggcagaaatggttccttccggcttggcgttctctcctggccactcttcctgctgcctctgactactcagccttgttttcggtgtgtaggccccagctgcccactggaactgccggctaatgcttgctctcccaagatctttaactcctcctggctgcacctgggtagggatggtggcatcgatgcccctctgtctgctgaaggacctgttgctgcttctgtcttttcacccctccttggctgatgacccagagccctctgatgatggcattctcctggcaagagaaaaagacttaactagacttctgaacttgaacagtttcaggttatattttaatttttttttttttgtacaggttctgattctaatacatttcaacatgcttttgtcccccctcgtgtcaatatttgttatagactaatcgccggggatttttcacctggttggagggtgggggtggggtggggtgtgtgtgtgtgtgtgtgtgtgtgtgtgtgtgtgtgtgtgtgtgtgtgtttgtaggtcctggactgattaaagttcattgaggaaaaagcacattttacaacaaaaaaataaaagtgtagatttaatgtatgtgactggggtttggggttgcatacctggtggatcttgaggggctgggattagggtggttcaggaaaatgtgatgctgtttccccatgtttagccatggtcaaaaaatggatttctcctttttctaaaatgtccagcaactgcctactgttgatcaaatgttgaagtattcttgtttcccttttaagccaatccatgtgcccacataacattatgcccaagtggagagttcactttaatttccaaagtatgtttcatgcagccccctgtcagctgctctgtggaaaaggggttctgttatgaaataaatgttgcactccctgc

SEQ ID NO: 9731 - DNA, 1400 bp, Homo sapiens
gaaaatgaacttggtcctgctcatggctctgctggggcttgctgggcctgtttgagtcctcaccgggacctacactgaaaaaaaaagcagggtctcaccgtgtgcatgatggcggaggtcagggcctcacttctggcccagggccttccatggcccacgctgcgcccagtgggacaggccttgggactgtgtttgctgctgctcgggtggctctcgaggggcaggggcggcctggagccccgtgggtaaaggttctgcagacattgctcggtgtgcgcgtcacctcaaggggccatggtgaagaagagggctgtcaccacagccatgtctgcgtttgaggggccggactcaggagcaagtgtgctggtctcttcagtgtgagctggggccagcttcttcatggtgcagcgctttggtctttctgtccttagactagtggttctggtagggcttggtggcagccttgtggtgaggactcagtgagttgatgtctgtatgttgattgcagcagtgtctggcacccgagaggccctagggacgtattcctcttgttctttttctcccacagcgcctggcacagagtctctgtgacacgcagtgcaacagtgaatagaagttttgagttttagaaagtgctcccctatcttcagtgcacactctgggatggaagtagctgttggggtctggtgggtgggtgacctggtgtgttgttggctgcagctatgcccctgccttccaggacctgccctcattcacccagaatgtgcacaggctggtcaacgacctgcgctactacagactctgcaacgacagcctgccccctggcactgtgaagctctaggcctgctactgcctggggacacggacttctgctgctgccacctgcgccagccctaccttccaccacagatgtctcccagatgggccttggtcacactccttggcttctcccaccgcaagcaacgctgcctgcctctgccgctcctccacatcttgccgctgcccagcagagctggcttctgggtccacctgagcactggacggtgctcccagggcgttggagcaggcggaggggtgtgtggccaggtactaggaggcaccaggaaatcccgcggggtggcccatgcagaccaggcgcacgtggctcatggggcagaattgccaaggacagctcacgacagtgccaccttctcaccattccagccaaggagagatgtgacgttggaactgctctggcacttctgtcaagcctcccccgccccaattgccttgagatctctgctctttgtcagagatttgcaaagactcacgtttttgttgttttctcatcattccattgtgatactaagaaactaagaagcttaatgaaaagaaataaaatgcctatgttgttgttctag

SEQ ID NO: 9732 - DNA, 600 bp, Homo sapiens
attgttacttgcctttaagtgcctctctttcagctcatgtggacaagaaaataatccctatcctgttgtttaaaagtgggtatacacacatttttgtgatttttagacttttttgcctgattttcacacagttttgactttaattttcttctttattagaagatatgggtaactttagaacctctgagttcaaggaaggatctaagcaatgaggccagaggagtgagatgtcctatggtaaccaagcataccatttctttgtcaagtgggcttttgtttatggctgcttaggggcttaaaagctccatggactggtgaggattatcatttgaatggaatttccccaattcaagaaccttactattatcctccaatcagttctacactgttggggaaaatcccctggaccttatataacatactttgtaaccctgcagttagttactcttacactcttgtcattataaatgcttgatcaatagttgatagactagctcttgatcagagtacccttgtatggagagaaggaaaaaatgccatacatttcacttgattctgtgaaccataatgcttaggacagtagtggtttgggtttgattt

SEQ ID NO: 9733 - DNA, 1400 bp, Homo sapiens
cttgattctgcagtagatcctgtccagatgaaaaatgtcacctttgaacatgttaaaggggtggaggaagctaaacaagaattacaggaagttgttgaattcttgaaaaatccacaaaaatttactattcttggaggtaaacttccaaaaggaattcttttagttggacccccagggactggaaagacacttcttgcccgagctgtggcgggagaagctgatgttcctttttattatgcttctggatccgaatttgatgagatgtttgtgggtgtgggagccagccgtatcagaaatctttttagggaagcaaaggcgaatgctccttgtgttatatttattgatgaattagattctgttggtgggaagagaattgaatctccaatgcatccatattcaaggcagaccataaatcaacttcttgctgaaatggatggttttaaacccaatgaaggagttatcataataggagccacaaacttcccagaggcattagataatgccttaatacgtcctggtcgttttgacatgcaagttacagttccaaggccagatgtaaaaggtcgaacagaaattttgaaatggtatctcaataaaataaagtttgatcaatccgttgatccagaaattatagctcgaggtactgttggcttttccggagcagagttggagaatcttgtgaaccaggctgcattaaaagcagctgttgatggaaaagaaatggttaccatgaaggagctggagttttccaaagacaaaattctaatggggcctgaaagaagaagtgtggaaattgataacaaaaacaaaaccatcacagcatatcatgaatctggtcatgccattattgcatattacacaaaagatgcaatgcctatcaacaaagctacaatcatgccacgggggccaacacttggacatgtgtccctgttacctgagaatgacagatggaatgaaactagagcccagctgcttgcacaaatggatgttagtatgggaggaagagtggcagaggagcttatatttggaaccgaccatattacaacaggtgcttccagtgattttgataatgccactaaaatagcaaagcggatggttaccaaatttggaatgagtgaaaagcttggagttatgacctacagtgatacagggaaactaagtccagaaacccaatctgccatcgaacaagaaataagaatccttctaagggactcatatgaacgagcaaaacatatcttgaaaactcattcttgatgtggtgtaattgaagggtgtgaaatgctttgtcaatcatttgtcacatttatccagtttgggttattctcattatgacacctattgcaaattagcatcccatggcaaatatattttgaaaaaataaagaactatcaggattgaaa

SEQ ID NO: 9734 - DNA, 600 bp, Homo sapiens
gaaaatttaaatgctggtgctggtcagactttttttgttagattctctcatttaaaaaaaatactgtttgtttaaagcatgcataaaaatttatgtattgaaatatacttaaaaattcaagatgcttcccatttgtgtaatatttacctggaggactcgtacttaggtgtcttaacgtgaattgagtctccaaggtctccatgtgaaacaagcaaaaagagaattatctgtaatgttgtaatttgtacctaagttttttaatgagtgaaatttgcattataaactttttccattcataaatacataagtgaaccaaaggtttttgtcctttccttcactgatttgctttaaaaaaaataaaagataatgatttattgcagaattatgattctattttctcaatatgttaacttggaaaaaaattttagccttatcttaatctgtcccaacagcaatgtgacggatttttgcagattcaaaatctgcaatggttatttacaagtcaatctactgaattccttttttaaataatcttttgaaactaagaaaatgtgtcaaattgtgtgcattcattctgtaggtaaaattcttaaggattgc

SEQ ID NO: 9735 - DNA, 1400 bp, Homo sapiens
acctgccgaataagcctcttctcctgcagcctgagatggatggacagacagacaccacagcctccccttcccagaccccgcagcacgcctctccccaccttcttgggactgctgtgaacatgcctcctcctgccctccgccccgtccccccatcccgtttccctccaggtgttgttgagggcatttggcttcctctgctgcatccccttccagctccctcccctgctcagaatctgataccaaagagacagggcccgggcccaggcagagagcgaccagcaggctcctcagccctctcttgccaaaaagcacaagatgttgaggcgagcagggcaggcccccggggaggggccagagttttctatgaatctatttttcttcagactgaggccttttggtagtcggagcccccgcagtcgtcagcctccctgacgtctgccaccagcgcccccactcctcctcctttctttgctgtttgcaatcacacgtggtgacctcacacacctctgccccttgggcctcccactcccatggctctgggcggtccagaaggagcaggccctgggcctccacctctgtgcagggcacagaaggctggggtggggggaggagtggattcctccccaccctgtcccaggcagcgccactgtccgctgtctccctcctgattctaaaatgtctcaagtgcaatgccccctcccctcctttaccgaggacagcctgcctctgccacagcaaggctgtcggggtcaagctggaaaggccagcagccttccagtggcttctcccaacactcttggggaccaaatatatttaatggttaagggacttgtcccaagtctgacagccagagcgttagaggggccagcggccctcccaggcgatcttgtgtctactctaggactgggcccgagggtggtttacctgcaccgttgactcagtatagtttaaaaatctgccacctgcacaggtatttttgaaagcaaaataaggttttcttttttcccctttcttgtaataaatgataaaattccgagtctttctcactgcctttgtttagaagagagtagctcgtcctcactggtctacactggttgccgaatttacttgtattcctaactgttttgtatatgctgcattgagacttacggcaagaaggcattttttttttttaaaggaaacaaactctcaaatcatgaagtgatataaaagctgcatatgcctacaaagctctgaattcaggtcccagttgctgtcacaaaggagtgagtgaaactcccaccctacccccttttttatataataaaagtgccttagcatgtgttgcagctgtcaccactacagtaagctggtttacagatgttttccactgagcatcacaataaagagaaccatgtgct

SEQ ID NO: 9736 - DNA, 1124 bp, Homo sapiens; identical to SEQ ID NO: 4501

SEQ ID NO: 9737 - DNA, 1400 bp, Homo sapiens
gaaagggagtttcgtgctccaactttggcatccctagaaaactgcatgaagctttctcagatggccgttcagggacttcagcaatttaagtctccccttctgcagctccctcatattgaagaggacaatcttagacgggtttctaatcataagaagtataaaattaaaactatccaggatttggtgagtttaaaagaatcagatcgtcacactctactgcacttccttgaagatgaaaaatatgaagaggttatggctgtccttgggagttttccatatgtgaccatggatataaaatcacaggtgttagatgatgaagatagcaacaacatcacagtaggatccttagttacagtgttggttaagttgacaaggcaaacaatggctgtaagtatttgaaaaggagcagtccatctgtgctgcagaggaacagccagcagaagatgggcagggtgaaactaacaagaacaggacaaaaggaggatggcaacagaagagtaaaggacccaagaaaactgctaaatcaaaaaaaaagaaacctttaaaaaaaaaacctacacctgtgctattaccacagtcaaagcaacagaaacaaaagcaggcaaatggagtcgttgggaatgaagctgcagtaaaggaagatgaagaagaagtttcagataagggcagtgattctgaagaagaagaaaccaatagagattcccaaagtgagaaagatgatggtagtgacagagactctgatagagagcaagatgaaaaacaaaacaaagatgatgaagcagagtggcaagaattacaacaaagcatacagcgaaaagagagagctctattggaaaccaaatcaaaaataacacatcctgtgtatagcctttactttcctgaggtagagctgaagtttcctgcaccaggcaagcctggaaattatcagtatactgtgtttctgagatcagactcctatatgggtttggatcagattaaaccattgaagttggaagttcatgaggctaagcctgtgccagaaaatcacccacagtgggatacagcaatagagggggatgaagaccaggaggacagtgagggctttgaagatagctttgaggaagaagaggaggaagaagaagatgatgactaagcagtactctgaatggaccacagtgtttgcacatatttgcaattttttgctgttttggaagtgtatcataaaccagaaacagtacagaactgatgttgagggaggtgtagtttttttactcttgaaatgggtgcataatataactaggcagtggcggtgccttggtacaacctgaaaaatgttaaggcttattgaaacctttcaagtaggggatggtacatttatttcatctgcaaatgataataaatcctttgttattataactgtc

SEQ ID NO: 9738 - DNA, 1065 bp, Homo sapiens; identical to SEQ ID NO: 4503

SEQ ID NO: 9739 - DNA, 1400 bp, Homo sapiens
ctttcctttgtactttaaaaaaaagtatgctagcactattgtaccttgaaaggatttccaccagactgtcttgagtagtgacttctttggtgaggcaagaaggatatacattattttagaatcatttactatttaaatgagacaatcatattattttagaatcatttattttaaatgagacaatcattttaagttttaagataacagaagtgaccaatgtaatttcacaacacctaaggattttttggttgatcaggttactgtagatttttactgattgtcctggatgaatagactgtgctttttctttttctctcccttccttcttggtttcccatagtataataagcatgcatactttaacttctatagttttctcctttagagggtcgtcttcagttttagaggtttacttctcccttgcctttgactcattggactagtgcagaggctttaagtagtttaaaatgggcttttgcttttctaggtcattaacgttttttatttagtttctttagccaatagtggctgagtttcgcacttgattttcaatattttatagtaagaaatgacaaactgctttgtttcatttcataaacaaactctgcatttagataactattaaaggttgttaagatgaagatttactgtttctttgttactcgttggtacagctgtttgttttacttgcacatttgtacatatacttaatgttttcaagtgccttaattgtttaaaatctctggcttcaaagtttcttggggaaaggtcggtttacctcacattttttgtttccattagtaatattctaggtacctcacaaaatgtattatggtgccatggctgttagtttttagtgagtgctgtaggattaattcgaaaataggcagaattccattcctcccaaggtggcaaaaattagctatactgatgtaattgtcatttacctgggtatgaattccctgacacacattcatgtcaacatatgtagcaaattttgtgaaaacataacaatttgaagcttctgtaattttgagcactgctctaacaacaagcataatataaaattagttagattttgcaagtctacaaatgagctcttgcaacagaactcacagcctttttacttttttcccctaactttagcaatgtagtatcttgagccattaatttttgggtttttttaaaatccagaaggtatatagaaaccttttcagatttttcatctgatttgttcttgcagatgttcttctatcaaataccttattttaccttacagatatttgttgcacaggcagatactgctgtatttagacatttctatttcagttcattaaaaactgcaaaaccaatctgtatcatgtaccaaactgacttaaaataaatctacatgtttattg

SEQ ID NO: 9740 - DNA, 1400 bp, Homo sapiens
cctttgtactttaaaaaaaagtatgctagcactattgtaccttgaaaggatttccaccagactgtcttgagtagtgacttctttggtgaggcaagaaggatatacattattttagaatcatttactatttaaatgagacaatcatattattttagaatcatttattttaaatgagacaatcattttaagttttaagataacagaagtgaccaatgtaatttcacaacacctaaggattttttggttgatcaggttactgtagatttttactgattgtcctggatgaatagactgtgctttttctttttctctcccttccttcttggtttcccatagtataataagcatgcatactttaacttctatagttttctcctttagagggtcgtcttcagttttagaggtttacttctcccttgcctttgactcattggactagtgcagaggctttaagtagtttaaaatgggcttttgcttttctaggtcattaacgttttttatttagtttctttagccaatagtggctgagtttcgcacttgattttcaatattttatagtaagaaatgacaaactgctttgtttcatttcataaacaaactctgcatttagataactattaaaggttgttaagatgaagatttactgtttctttgttactcgttggtacagctgtttgttttacttgcacatttgtacatatacttaatgttttcaagtgccttaattgtttaaaatctctggcttcaaagtttcttggggaaaggtcggtttacctcacattttttgtttccattagtaatattctaggtacctcacaaaatgtattatggtgccatggctgttagtttttagtgagtgctgtaggattaattcgaaaataggcagaattccattcctcccaaggtggcaaaaattagctatactgatgtaattgtcatttacctgggtatgaattccctgacacacattcatgtcaacatatgtagcaaattttgtgaaaacataacaatttgaagcttctgtaattttgagcactgctctaacaacaagcataatataaaattagttagattttgcaagtctacaaatgagctcttgcaacagaactcacagcctttttacttttttcccctaactttagcaatgtagtatcttgagccattaatttttgggtttttttaaaatccagaaggtatatagaaaccttttcagatttttcatctgatttgttcttgcagatgttcttctatcaaataccttattttaccttacagatatttgttgcacaggcagatactgctgtatttagacatttctatttcagttcattaaaaactgcaaaaccaatctgtatcatgtaccaaactgacttaaaataaatctacatgtttattgaatt

SEQ ID NO: 9741 - DNA, 1400 bp, Homo sapiens
tctgtacaaggctgcttgtttttttattgccaaagtcaaataaacgggagactgtcatgctcatgcatgaatagaatttagtcaaataaaaaattttggtcatttggtactgactttctctctctctctctctctcttttttttttttgacagagtctcgcactgttgcctgggctggaatgcagtggtgcgatctcggctcactgcaacctccgcctcccgggttcaagtgattctcctgcctcagcctcccaagtaggtgggattacaggcgcccgccaccacgcccagctaatttttgtatttttagtagagatggggtttcactatgttggccaggctggtctcgaactcctgacctcgtgattggcccacctcagcctcccaaagtgctggtattacagatgtgagccaccgcacccagcctgagtttctctttctctctttttaactttattttttgaaaaacccggtagactttttgtggggagcatttttgttgataattttactgatctaaagctgagtgattttttaaaagaatttgaatttggcttcctcaccagtaatatgtctccttgcttctttgatgtgatagttttgagatgggtgagaatctaatagatctgtggttgaatttgctgtgttgttatgaagtccaccctgtgggcacaataacataactgttggtaggagttgtttgagctattctggagattatttggtaaagtatactaaaagccttaaaaccatgtatgtgcgctgtttgaacccgtaagccacttctttgacattagaagacattagaagaaataatcagccttgcataaaacttatggatgaaagtattcatcacaatattatttataataaaaaattgcaaatgttataaatgaacaattgggaaatggttaaagaagtgatggtgcattgtgtggtagaatattatgcatatgtttaaagaatcatattttctaagattatttggaagcatgtttggtaatgtcaagtggagtaccccagatacattttagacatttatcgtcatcatctgctctgagtggaaggccgttcagagaggctagaggttcttattctggctataaattatgtgagtaaaattgtgctaaccagttaaaagtactgtacacccatgctcaatatatagtcctggaaatagcaattgaaacatgtcttctcacaagagaaaatgacagttttaatgatgtatttgatgaatttaaactttaagtcaggtgctgcaaattggaaagaagacttgtggtgttttaagttgctgtggacacttttaagaaacttagaacccatggaacccttgtttatcgccatgcaaattacaatcttgaatgagtgttttttaaaaataaagtattagaaaa

SEQ ID NO: 9742 - DNA, 1400 bp, Homo sapiens
  misc_feature (233)..(297): n is a, c, g, or t
gcaagtcagttggctacccccacccagactggatatggcgcaagaaggagaacgggatgcccatggacattgtcaatacctctggccgcttcttcatcatcaacaaggaaaattacactgagttgaacattgtgaacctgcagatcacggaagaccctggcgagtatgaatgtaatgccacctggccccactctggcctttcttgggaattctggctgaaattatcatccttnnnnnnnnnnnnnnnnnnnnnnnnnnnnnnnnnnnnnnnnnnnnnnnnnnnnnnnnnnnnnnnnngaaaaccaactctaccaacaatcacaaagataaaaacttgcgccagagaaacacaaattaagtactgcttacaatatctttaggttcctgaaactggtggcaacatgacctgctaaaattttctgcttggacctctttggttctctcccctttcaagtgagcaacaccacaatgactgtctaaagcatgccttatttagcctctcctgtaagggtgatctagccaggtacattttaaacaatgcttcagtgtagaaggtgtaaactattttgggcttgatgtgctgtgaatgttgcttttttttttcctttgttaaaatatttaaatagaagtgaaaaggtcctctgaggatcagatcatgcatgcgccattttttacttaatgcagctgttaaattggcaaagctctaaaatgcactgctgccatctagtgatacacttttgtaaagtacagcaaaacctacagatatatacagtatataaatatatatatatatatatttatatttttgggggtgggagaaatccaaaataaagtaaatgcttgtttcatttttaagctgctgatattcattccttattgtatgttgtcagatgaggaaattgtgcagttctggtacataaagatgagtaatataaactgaaatctataattttaagggcttaacctgtgactttaataagctggaacagtccactgaatgggtataatgaattgcagtatatacgtatgattgctttttaagtgattatcttttcttctgttaagtcatgtaaattcataaatccttttgcactgatgtgttgaaccttattcttgtacattcattcaatcaaggcaaacttttataatttttcttttgtttccaatgaccttgaaatgttatagcatggtaatattctatgcaactatagttatactttttggtttgacactgtattttttcacattgatttactggttgatgatagattttataacctaacggttctcatgcggtgcgtaattgtagatgcatgtacttgtgtgttttgtgtaattattgaagtgcaatgatgtataaaaaagtggattcacctgtttttaaaaataaaacattgata

SEQ ID NO: 9743 - DNA, 600 bp, Homo sapiens
agtgatctgcccgccttggcctgctaaagtgctgggattacaggcatgagcgactgtgcctctccagtccctgtgtttttttttgtttttggaggttttatttgtttgtttttagagacactttcactgtgttgcccaggcctgtctgttggcctcaagtgatcctcctgccttggatctcccaaagtgctgggattacaggtgtgaaccactgtgctcagcccattttttatttgtttcttgaaggaaggtagcagtattaattaattttggactttgctcactaaagtttgaatgttaagaatagatgtatacagtctggatgcagtggtgcatgcttgtaattttagcactttgggaggctgaagcgggaggatcgcttgggctcaagagtttgagaccagcctgggcaacatggtgaaaccttgtctctacaaaaaaattttaaaaaattagccagacatgatggcatgcacctataatcccagctacttgggaggctgaggtgggaggattgcttgagtccagggaggtcgaggctgcagtgagccatgatcacaccactgcactccagcctgggtgacagagtgatactgtctc

SEQ ID NO: 9744 - DNA, 1400 bp, Homo sapiens
tctggcgcgagggggaccagctgaccaaggtatcctactacaaccaggccaccccaggtgttctcaactatgtgaccaccaacgtggccggcctctcctctgagttctacaccaccttcaaggcttgtgagcagtttctcttggacaaccggaatgatctggcccccagcctccagaccctctagatgccctcagtggccacatcatgcccactcccactccatcctgtccccaaggacacacatacagtgcctggagaaagccaaagacctttatttcttcctgcctccccgtgggaagcctccgccctgaggtccgctggcccaccacccctgggtgctcagtttctaccaacatgagccagcaagtccttgtggtagccctggggtagcctgtagtagactcgggtcctgtccacagccctagctgccagcaatgctgtcctcacagaggcatagtcgcccccagctgggttgtgctccactgtgacggtggcccggggggaggatgccagcagcctgcctatggctccagctgtgctgtggcccagcagcatggcctgcatctggaaggacacaggttgccagagcccctggcacaactctagcatatctgtgagcagctgttccctgtagccactgcccagcacctcctcaggccagcctggtgccacagtcacgtgggggaagacctcagccacagctgtaagcagctctctgccagccacatggccggggaccgaaaaactcccgtgggagattttggccccaacccacacaggccaatgcaagaggccaaggctggagaggcgtgccagcaaggccagggatggccggagggctgcgggctccactatttgcaaatggatgccccagtgtccgggatgtgtggccagctgctgcaggcaggactccagcgtcaggatgttgccacttggagtatgaacaatgggcacggggttttcagccacagttccctcgaggccagtgttcagcaggatcatgccttctgtgtctggaagaggcggcagaggcaacagtgtttaggatttgggttatcataaggtgttaagagtcccttgttaaaggggcagtgggagttatggggtcatcaaggaccttgcctctctggaatctgtcaacccagttttgggctccaggtggatgggttgctttataaatgtgcctggtgcatgagaaactcttgtttcagctcttggcctttacccatgactcagcctgggggctggtgccggccttgcctgcagcaatgtagctgaggactggtctgaaggccaggagccctgtgctcttgacatcactgtactccctctccctccccgcaaccctgccccaccttgcatccagggtatggtgtaaataaacctgtgttgccatggc

SEQ ID NO: 9745 - DNA, 1400 bp, Homo sapiens
cctgttttgcctttagttacaggtcctgccttattttcatctcaccatgcacagaactagggagccttaggaagtgccaggttttcactgtcagatttgccaagtcacagaggcgcagccagccctgaagtgcctgtctggctgctgtggcattgtgtgggcatgtggccaggcagatggcatctcattactgtgctctcgccatggcccagtcttttcattctctggcagtgagggtttctgtgctgtcagacttcattgttattctgtgacttgctggaggttggcagtggcctttgtcaaacacactgagaagatggaagggccagcacttaagagcagaactgtacccttagagaaacggacagaggcgagtggcaaacttcagacggttccaatggtcttgcagtttgaaatgtgatgttctaccattggttttgagtacgtgaatacttcctgtcctactgtttcccctaccctattctcaccttctctccgcccacatcctcaccaagagattgtgtgggacatgaccttgaaatgctggcgatgatccacactgggatatcatcgctggcgactgcactctcaggagcccaaaatcaggagtgaaattgccacttctagtccccttatttcctatggaaacaacgccttccgcacccctagcacctgccgtcctcactgtaaaggttcatcaggatcgtccaccgtgtatattatacgcttcagatcatgttgcttatattgttgctgcaatgaccatcgttttcactttgctggtaaccacttgattgctgacagctacagtcaatgaacctgctgatgactttttttaatgtagtacaacagtgacagttatgacaggcttaccttggaagagttgtcatttttactgccaattttttggatgaagatgtttttataaacctttcaaaatggtctgcaaacagagcaggaattgcacaattaactcaataatgctgtgtgttctcaagaagctcccttagtgaggccgatcttaagatggccgattctgcccgttgaaggcatcctgggaaagaaaacaagcatcccagcgggcatctcaccacgacttctcctggagtcctcacacggtcactgacaactacagtcagttttaggaactagagtgccgtatcatcagacttaccctgtcctgccccaccttccctgctaacatcgaggtgtgtgcagttaccttctgagcttggaacaagcagactggaattttcctctgctacctcttgtgtataaaatcttgtttataaaatttcaaaaggaagtagatacactagggaagaaccttaattctaaatttggttcatgtgtggcaaagttcttagcttctaagagtataaaataaatttttcaaaaac

SEQ ID NO: 9746 - DNA, 1400 bp, Homo sapiens
cctacagctggacagtacctgtctgtttcctgtcctccttccagttacatctgtccatgtctggactcggctggccgttccctccagccccttgctggttatcttactctgagtgtgatgcagtcagaggcacctgcgggttagcccaggggcccaagccctggatttggcctgcggaggagcttaggatcctcgttttctgggttttggtgatgttggaggagtaccccccagcccaccgccccgattcctttttgcttctggtttggagctccggaccaggaccttcgtcctggtcagtttttaaataattatttagcagtgtaacttttagacctgcgtgacatctacaaagcgcccaataaagaaagaggaagccacggtccctaccttccttctcgggtctctggggccttctcctccctgcagtgccaacatgcactgcccacagcaggagctggatccagcgtcagtgtgtcgatgggaactgaagactagtccataggagctggaagaactttgtccctttacttctgatttgaaattgtaccttttctcaggcctgtgattcacagactttaacatgaatcagaatcacctggagggctcatgcaatcagattgccagatctcgcctcagcgtttctggttcaataggttttgggggagaccaagaacgttaacatttctagcaagtttccaggtgatgctgttgttgctggtctagagactattttgagaaccactgtccaggagcgtggttttctgattgtgatctgaggttctgccccaactgcacagcagttgggctgcttgttaaaaatgcaggccaggtgcggtggctcacacctgtaatcccagcgctttgggaggctgaggcaggtggatcacttgagctcaggagttcaagaccagcttgggaaacatggcaaaacccgtctttatgtgcctggaatcccacctgctcaggtggctagggtggatggatcgcttgagcccaggaggtggaggttgcagtgagctgagattgcaccactgcattccagcctggatgacagagcaaaaccctgtctcaaaaaaatgcagactggccaggcacagtggctcacacctgtaatccgactgtaagctcatcaccttgggaggccactgtaggaggatcaattgagcctagaagttcaagaccagcctgggcaaagtagggagaccccttctctacaaatagtaataaaatgaaccgggcatagtagcatgtgcctgcggtcccagctgctctgataagaggaggctcacttgagcccaggaggttgaggctgcagtgagcagagcgtgccgctacactccagcctgatgacagaccgagacactgtctcaaaaaaataaaaaaattcagattgctga

SEQ ID NO: 9747 - DNA, 1400 bp, Homo sapiens
ctgaggacattaaggatatgaccaaagaccagattgctaatgagaaagtggctctgcagaaagctctgttatattatgaaagcattcatggacggccggtaacaaagaacgaacggcaggtgatgaagccactatacgacaggtaccggctggtcaaacagatcctctcccgagctaacaccatacccatcattggttccccctccagcaagcggagaagccctttgctgcagccaattatcgagggcgaaactgcttccttcttcaaggagataaaggaagaagaggaggggtcagaagacgatagcaatgtgaagccagacttcatggtcactctgaaaaccgatttcagtgcacgatgctttctggaccaattcgaagatgacgctgatggatttatttccccaatggatgataaaataccatcaaaatgcagccaggacacagggctttcaaatctccatgctgcctcaatacctgaactcctggaacacctccaggaaatgagagaagaaaagaaaaggattcgaaagaaacttcgggattttgaagacaactttttcagacagaatggaagaaatgtccagaaggaagaccgcactcctatggctgaagaatacagtgaatataagcacataaaggcgaaactgaggctcctggaggtgctcatcagcaagagagacactgattccaagtccatgtgaggggcatggccaagcacagggggccggcagctgcggtgagagtttactgtccccagagaaagtgcagctctggaaggcagccttggggctggccctgcaaagcatgcagcccttctgcctctagaccatttggcatcggctcctgtttccattgcctgccttagaaactggctggtccaatgggatttacagcaacattttccattgctgaagtgaggtagcagctctcttctgtcagctgaatgttaaggatggggaaaaagaatgcctttaagtttgctcttaatcgtatggaagcttgagctatgtgttggaagtgccctggttttaatccatacacaaagacggtacataatcctacaggtttaaatgtacataaaaatatagtttggaattctttgctctactgtttacattgcagattgctataatttcaaggagtgagattataaataaaatgatgcactttaggatgtttcctatttttgaaatctgaacatgaatcattcacatgaccaaaaattgtttttttaaaaatacatgtctagtctgtcctttaatagctctcttaaataagctatgatattaatcagatcattaccagttagcttttaaagcacatttgtttaagactatgtttttggaaaaatacgctacagaatttttttttaagctacaaataaatgagatgctact

SEQ ID NO: 9748 - DNA, 1400 bp, Homo sapiens
  misc_feature (40)..(40): n is a, c, g, or t
ttccaccaccagctgaaggacatcgtggagtacgcagagnctgaagacggtgtgcttccagaacctgcgggaggtggggaacgccatcctcttctgcctgctcatcgagcagagcctgtctttagaagaagtgtgtgacctgctgcacgcggctcctttccagaacatcttgccgcgagtccatgtgaaagagggggagagacttgatgccaaaatgaaaagactagaatcaaagtacgccccgctgcatcttgtcccactgattgaaagactggggacccctcagcaaattgccatcgcaagagagggggacctgctgacaaaggagcgcctctgctgcggcctgtccatgtttgaggtcatcctgacacggatccggagctttctggatgaccccatctggcgcgggcctctgcccagcaatggggtcatgcatgtggacgagtgtgtggagtttcacagactgtggagtgccatgcagtttgtctactgcattcccgtggggacacacgagttcacagtcgagcagtgctttggtgatgggctacactgggctggctgtatgatcatcgtacttcttgggcagcagcggcgttttgctgtgctggatttctgctaccatctacttaaagtccagaaacatgatggcaaagatgagattattaaaaatgtgcctttgaagaagatggtggagagaattcgcaagttccagattctcaatgatgagatcatcaccatcctggataagtacctgaagtcaggcgacggggagggcacgccagtggagcatgtgcgctgcttccagccgcccatccaccagtccctcgccagcagctgagggcacgcgctgcactccgtaactcaacatggcatgcctttctctccgtaaactatttagtgagatttttagggactatttttcagtatctctgtacctgttaaagggggtgcttttcgatctaaaaacttaattttataaaattgacttatttttctagactaaaattgtatatgcttttggtaattaggaactcttgagaatattggctgctgattgttgccatcacgttcctacaaaattgtttttctatgggatgttctggcagctgtgtcataaaatgctgctgggttcattcattcattccataagaaacttaataccagcaaatgcattaaatcccttgccagttaccattaactgtaactatttagcttttgtttagggatctttctgatggtcttttatgagcaatcttagttctaagtcattgttcccatcccttttttgtgtgtttcagaaaatagtgaacttgattcccctgcttccactaaatccagttgtgacaaaatctaacgtgacatcagatcgaaaggttatagaaataaaactaatgagatct

SEQ ID NO: 9749 - DNA, 1380 bp, Homo sapiens; identical to SEQ ID NO: 4514

SEQ ID NO: 9750 - DNA, 600 bp, Homo sapiens
gccaggcattttccaacctcagaagaaaaaatgctgtgcacagctgcctataggagtcttcctttttacataaaaaaacaagtctcgggccaggcacagtggctcatgcctgtaatcccagcactttgggaggccgaggtgggtggatcacctgaggtcaggagttcgagaccagtctggtcaacatggcaaaaccccatctctactgaaaatacaaaaattagccgggtgtggtggcgcgtgcctgtaatcccagttactcggaggctaaggcaggagaatcgcttgaaccctggaggcagacattgcagtgagccgagatcatgctactgcataccagcctgggcaacagacaagattccctcttaaaaaaaaaaaaaagaaggttggtcagaggggctcccagtccatctgcctcagggatcacgagagagtcctggaagcagcacagaagagagatagccaagtgccatcagacaagatcagttgatcagaacagaaagctagctcggaaaatcctacaagagaaagtagatgttttctacaatggtgaaaacagtcctgttcacaaagaaaaacgagaagcggcgaagaaaaaac

SEQ ID NO: 9751 - DNA, 1400 bp, Homo sapiens
aaggacgggcagggtctcctgagcagcaggtggctcgaggcggttagcaggctccagcagctcccttcttccttccctctgtgcccgtggcgtctgcttcccatcctgggagtgtgtatatatgtagcatatcatgggggactgggaagttgggagaggtaggacctgactggtcttggctggggtcaggggctggtgcctgggagctgatgaagcaggtgccagggctgtgggaggggcaagctacggcctgggctaggtgagctgcctctgcccctgggcaaggaagcgaggccctctgggaggagggtgcttagctccagagcaggatgggacttccccaggcaggaagcacttgatggagagctgcccagctctcctacaaggttagtgccctccacctagggaagcatgaaccacagggtccctgagggccttcgacaaaagtgtgtatttgtcccggggagggtagcagtgggccatggggcttcttgtgccctaaaggggactggctgctgtgatcttctaaggggcccagggccaaccctgtaggcttcccctctgctggggacggtagttgcttttctctctcctgatgctaggttggggcccaccctgctccctgttcctgctagggcctgccagtgcccctgagcttgctttccacattctcccagggtatggagacctagacctgtctttggggccattagcatctggggttatagcaagaagagtggggagcatggaactcctgggctcttgtggggacgttcagggtatcggggtgcgaggtctgtctgcaccggcccccacatctaaccaggccctgatgtaggggtcgtccgctcaggctgcccccttgggctcttgcagctcttgttcaggtagtcgcccttctggtttgttctctgtggggcagttggtgggggctgggggaagaggctggcagaagttaccctggatagggaagggggaggaggggacttttagagccagcaggccccactgtattatgtatatatttttcaaggtctgtttttctaactgaaaagctaagggcttgattcctagccccgttctgtggggcactgggtgatactcagtttcttgttcctggccgtggagaggggcctggggcactggttccggctgtgtctggtggtctggctgcggggaaggggcaagaaggcgggcaggccttcactgcagcactgagcctcaaatccgctctggagcatgaggctggatgcagtggtggtgaggccgccccgctccatcccgaggcagccagggtttgttttgcgctctcctgtcacaaatgctgcactattggttcttaagttttttatctccagatcctaatttatgcctatgcaaaaaataaatgacgcccaaga

SEQ ID NO: 9752 - DNA, 1400 bp, Homo sapiens
ctctctcactccgagcagtccactgttgctgaggcctgcctgccagccacttcttacctcctcacctacctctccagtcacagctcagacttcatagagctgtgtctgtatacactgggtaacctgatcgtggagagtgaggctgtgagaaggcagctcctgccacagggcattgttccagccttggctgcctgcatccagtccccccatgtggctgtgctggaagctctcggatatgccttgtcccagcttctacaggctgaggaagctccagagaagatcattccccctgcttctgccagcagctccatcttggcctccactctccctcagcacatgctacaaatgttgcaacctggcccaaagctcaaccctggggtcgctgtggagtttgcctggtgccttcattacatcatctgcagccaggtcagcaatcctctgctcattggccatggggctctgtctactctggggttgctgctgttggacttggctggggctgtccagaaaaccgaggatgcaggactggagctgctggcatgccccgtgcttcgatgtctaagcaacctgctaactgaggcagcagtggagactgtgggagggcaaatgcagctcagagatgagcgtgttgtggcagccttatttatccttctgcagttctttttccagaaacagcccagtctgctcctgagggctttggctcctcaacaacctcactgcaaacagtcctagtttctgtacctccttgctctccctggatctgattgagcctctcttacagctgttgccagtatctaacgtggtgagcgtaatggtgctcacagttctgtgcaatgttgcagaaaagggtcctgcttactgccagcggctgtggccagggcccctgcttcccgccttgctgcacacactagccttttctgacactgaagtagtaggccagagtttggagctgctgcatctgctgttcctgtatcagccagaggctgttcaggtcttcctgcagcagtcagggctgcaagccctggaaaggcatcaggaagaggcccagctccaggatcgtgtgtatgctctccagcagacagctcttcaagggtgatcttgtttctcaatgtcactcattcccctctctcttaacatcaagcttgtttgtccagtagagcctttggagatttaggaccataatgaggtctcatgttctctgctcccacacctaagccaagacctttgggtcccagctcctccccttccactcagcactatccaggcaggaggaccaaaagggactcagtgtggtctacttactctggggccctagaatccctgcccccccgccacccttcatgtttgcttcagcagctggtagcttttgatgagacagaataaagttttatttttatatt

SEQ ID NO: 9753 - DNA, 600 bp, Homo sapiens
ctacctctccatcattgaggttctggtgaagctctctgcagctgtctcattccttcccaacgatagtaacaggaaatgactctttagcatcgatacctcaacatcaatttagggtagagattcctgcccctcttttgtcacagattaggaaattgagaactagggttaaccttgactatatttagaggtctttttgcctcttttccccttaacaaggatttcttatggtggtttcagtttcatttgcataaaggtattgagagggaacaaaaaacataaagctgagaatcttgagagagctcatctaccctgtctgttggtcagactcaaatgagagttaaaaaaaaaaaaaaaaatctgtatgcctgagtaccatcctggatgaatctagaaggtatggggtagagcttgacagggttcctgtgtacccactgggtatccgttagaggtaagggagaggagaggattgatagagtgttgcaaaagtatagattattcattgagataaaggatttggtttccctgccatgagtattaaaaaaatttaagttttcccaagcttgcatctctgaccaaatttcacataaaacattggaagga

SEQ ID NO: 9754 - DNA, 600 bp, Homo sapiens
gcaccacttcatcatgaatgctggttttcacaccttttccttattttattgccaatcaggacaaggccttgaaggaacgcagccttagacatcaggtgaggatgatggaggtagacagtcgactgaatgtcagctggaaaatccagtcactagttggggtttggtggccatgttttctacccagacaggccctgcttttctaggatgtggccttagagcaagaacagacccaacagccagcccttcatcctccagcgtctgccataggaatgtgagaggggtgtttgctgagcgctccgggcacggccagagggcaagtgagcatgcacggacctcttccccctgtcctgtttctcacccagcacctggggagatcggtgctaccaaggaagagagcacacagataagacagaggggaggaggtgggcatttcctacattcctccttgtttgccgctgctgagattgcagtatttattgcaatgtaaatgtatcctgaaggtggggaggaatgtttaatctaccatgtccgtgtgtcatcttggtttgtgtttttccctgtttgtagcaagactctgatgataattctgtttctcatctg

SEQ ID NO: 9755 - DNA, 1400 bp, Homo sapiens
ccgctttgatgtctatgcttggctctctgggctgcccctggtactgccgaatcctacacatctcttatcagctttcctcaaactttaaggaggctctgtgagggatgggtcatgggaagacccaagctttccctccgccaggattgcaaaagcaagtagacttggtctatgcagctcttcttccagcaatttctttatttggaattagaacttcctttgttagtatctttgatcttttgactcaagcacattttggaagggctcccttacaaaagtagaatttaaaacagaggatacagttaaagagcaacccaaaggacgcttaagaaaccgagaccacttcaccaaacaggactaaggaacactttcgtgcacagaagtcagccgcaatccaggcacaggacgaagatgggatacacgtgctcatctgtctgtcctcctttcctctccctccccgacgttctagttagcttgttgacttgttaaaccttctgttcttaaaatgaaaagctagcttacctcaaagaatcttgtttccattcggaaaccaacgattttgtgttttagaatggacagccctcccctcaccactccctaccttggcctggtgtccttgagacatacggtctttgcttagtcgtgtgttggctgctttgagcaggaacaaggcctccaggccctgaggtgggaaggaaggattggatgccactgccctcctccccactttagcatgtaggggccagcccatctcttccagcagggtcctgctgagttaccatagcaaccagcaactccagggtaccacaacagacaatggctcagcgagccgacgtgtggggatgatgcaggggttttggcccagccagaggacccagagttgagcttcaaatgctagagaaggggagaaacaggatggaagggtggtttaaggaaccggcaggggtctttgagtcacatagagaagccgttgaaggaggtagggcaggttatctctgttccagtcacccccttccagccccatcccacttctgtttcaaactaaagctcccacctcgaacattgaccctttgttagaacaaagcaaagcatatctttagacaacagtgttaaaatgagcctcaaatgtatgtggatgagatctctaagaagagggtcttctggttttgatttttaaagaagagtatcctagtaaaatattaaaaaaaaattaaaaagtttttaaaaaggaaacctgtgctatttaaattggagcccagttgtaacttggtaaaggcaagcttctgtacctttgttataattaattgtatacctgtgtatgtaaatataaggcattcctattttgcagttcagaacaaaaaaaacttatttgtaatatagaataaagtttattaaaaaataat

SEQ ID NO: 9756 - DNA, 600 bp, Homo sapiens
taaaaatgtgtttctcttgtatgaattggaaataagtataaggaaactaaatttgaatcaactattaattttataacttaaagaaaaataattgttaatgcaactgcttaatggcactaaatatattccagttttgtattttgtgtattataaaagcgaatgagacagagatcagaatacattgactgtttttgaaaatagtaatttccccttatccccttttcatttggaaaagaaacaattgtgaagacattaaattctcactaacagaagtaactttggttaattattttttgtatatcctcccaatcttttgacttatgcacatattttttcccaatatggagatcatatggaatgtactattttgtaatgtcttttttcattttacaatgtattatcaaccttttccctctcaaaaatacattgtgaatgactgcatagtattcactttatgaatatttaattcatttcacagtcttctattgttggaccacttacattgtaccaaatgttttcctttggtttattctttaatgtattaatattttactgctggtcactcatggaatcctgcagctttaattaaaagcaaagatg

SEQ ID NO: 9757 - DNA, 860 bp, Homo sapiens; identical to SEQ ID NO: 4522

SEQ ID NO: 9758 - DNA, 957 bp, Homo sapiens; identical to SEQ ID NO: 4523

SEQ ID NO: 9759 - DNA, 600 bp, Homo sapiens
aatattgtttaatatttttgaaatccctgagtatcaggccttgttataaataagctgcataatcaataaatagaacaagggactttttgttgataatccaaatactcaaagtttacgtaatgaaaattatagcgtgtgtgcaaactcttgagggttgattatgctgcaatttagcatgttggaacgtctagggagaaggttgactttttgcacttctgtatatagtcaaaagagagaaacctgtataatagtaagatcttattttgaataaaaacgtctataattacaaggagttttgttaaggctaatacaatgacagactgagcaaaattgcttgcaaaagtggcacagagttagcactccataccccttcaaacatgttgctttgctttcttgtggacagcttgtagtttgccaggattttttcagctggaaagatacgccatcctttcaaaccctcatgactgacaaaaactccatggggccaaatctgcctgaagatcattaccaaaaatagcaggtacttctaccattaaggtgaaatcatggatcagatattccttacatttttcaaaactactgcatgtttaaaacttcaac

SEQ ID NO: 9760 - DNA, 916 bp, Homo sapiens; identical to SEQ ID NO: 4525

SEQ ID NO: 9761 - DNA, 600 bp, Homo sapiens
tcatgcaaacaccctttcttcctcctgcggcagagttgttcaggttgcctgggcaggggcttaaacagtgccagcccctgccatcccaaagctattgttaagccccccaggcgtcctccacccacgcccactagcctgccatgtccacagttccttgggctgctgaggggctagtgcagtggtcctgacctctcttatcaagagcacacttctttgctggttgctccttttgagcatatgcgtgtgattatttggaacagttagacttgccacgttgggtcagttttagaaattgtttctagctagagggactggtgtccttccaagtctagcatttggggtatggaaaattgttgtggtgtgtggtagggtttttgttttcttttttgagttttttttccccctttagtctcctggctttttcctttcccttcccttctccactggccagcttgggcctcatcctcatgtcatccttctaggaaggcgcctgccccatcttgtctgccggcagcatgcatccaaggccagagctcaggcctgcagactgggctggtgcctcctccgcttcagggtatgggagttggtgaaggggctttc

SEQ ID NO: 9762 - DNA, 1400 bp, Homo sapiens
tgctttcattgacagtattcagcattgtgagcgtaacagcctacattgccttggccctgctctctgtgaccatcagctttaggatatacaagggtgtgatccaagctatccagaaatcagatgaaggccacccattcagggcatatctggaatctgaagttgctatatctgaggagttggttcagaagtacagtaattctgctcttggtcatgtgaactgcacgataaaggaactcaggcgcctcttcttagttgatgatttagttgattctctgaagtttgcagtgttgatgtgggtatttacctatgttggtgccttgtttaatggtctgacactactgattttggctctcatttcactcttcagtgttcctgttatttatgaacggcatcaggcacagatagatcattatctaggacttgcaaataagaatgttaaagatgctatggctaaaatccaagcaaaaatccctggattgaagcgcaaagctgaatgaaaacgcccaaaataattagtaggagttcatctttaaaggggatattcatttgattatacgggggagggtcagggaccatgcactgttgtgaggaaaaattacctgtcttgactgccatgtgttcatcatcttaagtattgtaagctgctatgtatggatttaaaccgtaatcatatctttttcctatctatctgaggcactggtggaataaaaaacctgtatattttactttgttgcagatagtcttgccgcatcttggcaagttgcagagatggtggagctagaaaaaaaaaaaaaaaagcccttttcagtttgtgcactgtgtatggtccgtgtagattgatgcagattttctgaaatgaaatgtttgtttagacgagatcataccggtaaagcaggaatgacaaagcttgcttttctggtatgttctaggtgtattgtgacttttactgttatattaattgccaatataagtaaatatagattatatatgtatagtgtttcacaaagcttagacctttaccttccagccaccccacagtgcttgatatttcagagtcagtcattggttatacatgtgtagttccaaagcacataagctagaagaagaaatatttctaggagcactaccatctgttttcaacatgaaatgccacacacatagaactccaacatcaatttcattgcacagactgactgtagttaattttgtcacagaatctatggactgaatctaatgcttccaaaaatgttgtttgtttgcaaatatcaaacattgttatgcaagaaattattaattacaaaatgaagatttataccattgtggtttaagctgtactgaactaaatctgtggaatgcattgtgaactgtaaaagcaaagtatcaataaagcttatagactt

SEQ ID NO: 9763 - DNA, 1400 bp, Homo sapiens
aaatgatgacttatttatttctaaggaagcacagataagagaaactgaaacgttttcagattcatctccaattgaaattatagatgagttccctacattgatcagttctaaaactgattcattttctaaattagccagggaatatactgacctagaagtatcccacaaaagtgaaattgctaatgccccggatggagctgggtcattgccttgcacagaattgccccatgacctttctttgaagaacatacaacccaaagttgaagagaaaatcagtttctcagatgacttttctaaaaatgggtctgctacatcaaaggtgctcttattgcctccagatgtttctgctttggccactcaagcagagatagagagcatagttaaacccaaagttcttgtgaaagaagctgagaaaaaacttccttccgatacagaaaaagaggacagatcaccatctgctatattttcagcagagctgagtaaaacttcagttgttgacctcctgtactggagagacattaagaagactggagtggtgtttggtgccagcctattcctgctgctttcattgacagtattcagcattgtgagcgtaacagcctacattgccttggccctgctctctgtgaccatcagctttaggatatacaagggtgtgatccaagctatccagaaatcagatgaaggccacccattcagggcatatctggaatctgaagttgctatatctgaggagttggttcagaagtacagtaattctgctcttggtcatgtgaactgcacgataaaggaactcaggcgcctcttcttagttgatgatttagttgattctctgaagtttgcagtgttgatgtgggtatttacctatgttggtgccttgtttaatggtctgacactactgattttggctctcatttcactcttcagtgttcctgttatttatgaacggcatcaggcacagatagatcattatctaggacttgcaaataagaatgttaaagatgctatggctaaaatccaagcaaaaatccctggattgaagcgcaaagctgaatgaaaacgcccaaaataattagtaggagttcatctttaaaggggatattcatttgattatacgggggagggtcagggaagaacgaaccttgacgttgcagtgcagtttcacagatcgttgttagatctttatttttagccatgcactgttgtgaggaaaaattacctgtcttgactgccatgtgttcatcatcttaagtattgtaagctgctatgtatggatttaaaccgtaatcatatctttttcctatctatctgaggcactggtggaataaaaaacctgtatattttactttgttgcagatagtcttgccgcatcttggcaagttgcagagatggtggagcta

SEQ ID NO: 9764 - DNA, 600 bp, Homo sapiens
gctatattttcagcagagctgagtaaaacttcagttgttgacctcctgtactggagagacattaagaagactggagtggtgtttggtgccagcctattcctgctgctttcattgacagtattcagcattgtgagcgtaacagcctacattgccttggccctgctctctgtgaccatcagctttaggatatacaagggtgtgatccaagctatccagaaatcagatgaaggccacccattcagggcatatctggaatctgaagttgctatatctgaggagttggttcagaagtacagtaattctgctcttggtcatgtgaactgcacgataaaggaactcaggcgcctcttcttagttgatgatttagttgattctctgaagtttgcagtgttgatgtgggtatttacctatgttggtgccttgtttaatggtctgacactactgattttggctctcatttcactcttcagtgttcctgttatttatgaacggcatcaggcacagatagatcattatctaggacttgcaaataagaatgttaaagatgctatggctaaaatccaagcaaaaatccctggattgaagcgcaaagctgaatga

SEQ ID NO: 9765 - DNA, 1400 bp, Homo sapiens
taagaagactggagtggtgtttggtgccagcctattcctgctgctttcattgacagtattcagcattgtgagcgtaacagcctacattgccttggccctgctctctgtgaccatcagctttaggatatacaagggtgtgatccaagctatccagaaatcagatgaaggccacccattcagggcatatctggaatctgaagttgctatatctgaggagttggttcagaagtacagtaattctgctcttggtcatgtgaactgcacgataaaggaactcaggcgcctcttcttagttgatgatttagttgattctctgaagtttgcagtgttgatgtgggtatttacctatgttggtgccttgtttaatggtctgacactactgattttggctctcatttcactcttcagtgttcctgttatttatgaacggcatcaggcacagatagatcattatctaggacttgcaaataagaatgttaaagatgctatggctaaaatccaagcaaaaatccctggattgaagcgcaaagctgaatgaaaacgcccaaaataattagtaggagttcatctttaaaggggatattcatttgattatacgggggagggtcagggaagaacgaaccttgacgttgcagtgcagtttcacagatcgttgttagatctttatttttagccatgcactgttgtgaggaaaaattacctgtcttgactgccatgtgttcatcatcttaagtattgtaagctgctatgtatggatttaaaccgtaatcatatctttttcctatctatctgaggcactggtggaataaaaaacctgtatattttactttgttgcagatagtcttgccgcatcttggcaagttgcagagatggtggagctagaaaaaaaaaaaaaaaagcccttttcagtttgtgcactgtgtatggtccgtgtagattgatgcagattttctgaaatgaaatgtttgtttagacgagatcataccggtaaagcaggaatgacaaagcttagacctttaccttccagccaccccacagtgcttgatatttcagagtcagtcattggttatacatgtgtagttccaaagcacataagctagaagaagaaatatttctaggagcactaccatctgttttcaacatgaaatgccacacacatagaactccaacatcaatttcattgcacagactgactgtagttaattttgtcacagaatctatggactgaatctaatgcttccaaaaatgttgtttgtttgcaaatatcaaacattgttatgcaagaaattattaattacaaaatgaagatttataccattgtggtttaagctgtactgaactaaatctgtggaatgcattgtgaactgtaaaagcaaagtatcaataaagcttatagactt

SEQ ID NO: 9766 - DNA, 1400 bp, Homo sapiens
tctctgtgaccatcagctttaggatatacaagggtgtgatccaagctatccagaaatcagatgaaggccacccattcagggcatatctggaatctgaagttgctatatctgaggagttggttcagaagtacagtaattctgctcttggtcatgtgaactgcacgataaaggaactcaggcgcctcttcttagttgatgatttagttgattctctgaagtttgcagtgttgatgtgggtatttacctatgttggtgccttgtttaatggtctgacactactgattttggctctcatttcactcttcagtgttcctgttatttatgaacggcatcaggcacagatagatcattatctaggacttgcaaataagaatgttaaagatgctatggctaaaatccaagcaaaaatccctggattgaagcgcaaagctgaatgaaaacgcccaaaataattagtaggagttcatctttaaaggggatattcatttgattatacgggggagggtcagggaagaacgaaccttgacgttgcagtgcagtttcacagatcgttgttagatctttatttttagccatgcactgttgtgaggaaaaattacctgtcttgactgccatgtgttcatcatcttaagtattgtaagctgctatgtatggatttaaaccgtaatcatatctttttcctatctatctgaggcactggtggaataaaaaacctgtatattttactttgttgcagatagtcttgccgcatcttggcaagttgcagagatggtggagctagaaaaaaaaaaaaaaaagcccttttcagtttgtgcactgtgtatggtccgtgtagattgatgcagattttctgaaatgaaatgtttgtttagacgagatcataccggtaaagcaggaatgacaaagcttgcttttctggtatgttctaggtgtattgtgacttttactgttatattaattgccaatataagtaaatatagattatatatgtatagtgtttcacaaagcttagacctttaccttccagccaccccacagtgcttgatatttcagagtcagtcattggttatacatgtgtagttccaaagcacataagctagaagaagaaatatttctaggagcactaccatctgttttcaacatgaaatgccacacacatagaactccaacatcaatttcattgcacagactgactgtagttaattttgtcacagaatctatggactgaatctaatgcttccaaaaatgttgtttgtttgcaaatatcaaacattgttatgcaagaaattattaattacaaaatgaagatttataccattgtggtttaagctgtactgaactaaatctgtggaatgcattgtgaactgtaaaagcaaagtatcaataaagcttatagactt

SEQ ID NO: 9767 - DNA, 1400 bp, Homo sapiens
tgctttcattgacagtattcagcattgtgagcgtaacagcctacattgccttggccctgctctctgtgaccatcagctttaggatatacaagggtgtgatccaagctatccagaaatcagatgaaggccacccattcagggcatatctggaatctgaagttgctatatctgaggagttggttcagaagtacagtaattctgctcttggtcatgtgaactgcacgataaaggaactcaggcgcctcttcttagttgatgatttagttgattctctgaagtttgcagtgttgatgtgggtatttacctatgttggtgccttgtttaatggtctgacactactgattttggctctcatttcactcttcagtgttcctgttatttatgaacggcatcaggcacagatagatcattatctaggacttgcaaataagaatgttaaagatgctatggctaaaatccaagcaaaaatccctggattgaagcgcaaagctgaatgaaaacgcccaaaataattagtaggagttcatctttaaaggggatattcatttgattatacggatctttatttttagccatgcactgttgtgaggaaaaattacctgtcttgactgccatgtgttcatcatcttaagtattgtaagctgctatgtatggatttaaaccgtaatcatatctttttcctatctatctgaggcactggtggaataaaaaacctgtatattttactttgttgcagatagtcttgccgcatcttggcaagttgcagagatggtggagctagaaaaaaaaaaaaaaaagcccttttcagtttgtgcactgtgtatggtccgtgtagattgatgcagattttctgaaatgaaatgtttgtttagacgagatcataccggtaaagcaggaatgacaaagcttgcttttctggtatgttctaggtgtattgtgacttttactgttatattaattgccaatataagtaaatatagattatatatgtatagtgtttcacaaagcttagacctttaccttccagccaccccacagtgcttgatatttcagagtcagtcattggttatacatgtgtagttccaaagcacataagctagaagaagaaatatttctaggagcactaccatctgttttcaacatgaaatgccacacacatagaactccaacatcaatttcattgcacagactgactgtagttaattttgtcacagaatctatggactgaatctaatgcttccaaaaatgttgtttgtttgcaaatatcaaacattgttatgcaagaaattattaattacaaaatgaagatttataccattgtggtttaagctgtactgaactaaatctgtggaatgcattgtgaactgtaaaagcaaagtatcaataaagcttatagactt

SEQ ID NO: 9768 - DNA, 600 bp, Homo sapiens
ctctgttacaaagtggcaataataataatagcactcacttccaaaagattgttgtaggattaaatgattggataggttcaaaatgttaggaacagtagtattcaataaacatagttattatttgctatctttcccactactccataaaccctctattaaaatacaaatccacattgattttaactgctttggtgtagaagtggattctaagaagaggcaatgtgaaataaatggaaaagccaaggattttatgttttttaatcctggctcccagccttctaataattttgcctctgggaattttgtcaagatttacaggctgggcgtggtggctcacgcctgtaatcccagcactttgggaggccaagggaggtggatcacctgaagtcaggagtttgagaccagcctagccaacatggcaaaaccccaactctactaacaatacaaaaattaaccgggcgtggtggcacacgcctaatagtcccagctactttggaggctaaggcagaaggatcgcttaaacccgggagacggaggttgcagtgagccaagatcgcaccactgcactgcaatctgggttacggagtgagactccgtctc

SEQ ID NO: 9769 - DNA, 600 bp, Homo sapiens
agagcgagactccatctcaaaaaaaaaaaggaatcggacgaagaaccacaggatgttgaagacaactgtctgaagtatttgtgagggacagcgatgtggccctctgtgttaagaataacgtgtcctgctttggcagagagaagaaaatagccactgcccgctttcaaggcaagatcgaccttttctgttttgttttgtttttctttctttttcctggccatgaggacaaaaattactgagtggcccttaaagagggaagtttgttttcagctgttctcttttgcccgtaggtgggagggtggggattgctgcgtcctagctagaggaatggctttgcttgaatgtgtagtgcacacgcacgggtgtttctgtgtgctagttgcttcttgctgctgcttcctgcttgtctgggactcacatacataacgtgatatatatatatatatataaatgtataaatatatattttatttttttttaaatccttggagcttctggttcctatcagttcctgttgttaatcgtagaaccgttgtcccttcccccattcccgtatccatcatgttctttttcttttaaatatcaatataaaggtaaaag

SEQ ID NO: 9770 - DNA, 600 bp, Homo sapiens
tgcgggtggaacagtcaacctttctagtagtttatgatattgccctctttgtattcccattttctacagttttttccgcagacttctttctgcaaattattcagcctccaaatgcaaatgaatgatataaaaataagtagggaacatggcagagagtggtgcttcccagcctcacaatgtgggaatttgacataggatgagagtcagagtataggtttaaaagataaaatctttagttaataattttgtatttatttattctagatgtatgtatctgaggaaagaaatctggtatttttgctttccaataaaggggatcaaagtaatggtttttctctcagttctctaagctggtctatgttatagctctagcagtatggaaatgtgctttaaaatatgcttaccttttgaatgatcatggctatatgttgttgagatatttgaaacttaccttgttttcacttgtgcactgtgaatgaactttgtattatttttttaaaaccttcacattacgtgtagatattattgcaacttatattttgcctgagcttgatcaaaggtcatttgtgtagatgagtaattaaaaaatatttaaatcac

SEQ ID NO: 9771 - DNA, 600 bp, Homo sapiens
cctctctccatgactcttgacatcctagcttcttctaaggggggagggaaaggggggagatttttatatatatatacatatatatatatcaagttttaaattattgatagttcatctggattaccaaaatcactctgcagccctgcccgaggctagtaggctgcaaccctggtccccacccctaacctcctgctccccctcaagccaactatgcagcccacaagaaggccctgcgggcccccccattgcccagcactgtctcatagaaggctctggtggtacctctgggccccaggagcatcagccccttgatcatctggggtttgtcatcaccatattttctccctgctgttcccaccatgcccttctgccatcttctgggagaaggaaaccaaaggatctaaaactggggtttgggggaaggtttcagcctctccccactccccttgccccacaccctttactccccagcccagagagacgctgcttttaccaggaaagactattgaaagatgttttattttatttttctctgacctttccatccttgaaaaaatggggaaaaaagaagaaaaaagacaaaatcgaccataaaagacc

SEQ ID NO: 9772 - DNA, 600 bp, Homo sapiens
tggtgctcctgagccctccaccatcgcccgctctctaccaaccactgtcccagagtcaccaaactaccgcaacaccaggacccctcgcactccccggacaccacagctcaaagactcaagccagacatcacggttttacccagtggtgaaagaaggacggacactggatgccaagatgcctcgaaaaagaaagacaagacacagttcaaacccacccttggagagccatgtgggctgggtgatggattcccgtgagcacaggccccgtactgcttccatcagtaagatggccccagtgtgtgtttcctgtttcccaaagcaagctttgagagccacctacctatgaccaatgctctctactccctgcagagatggcacagactgcaaataggcatgcttttgaagaaaatatacaattgatctttgaacaacgaagggcgtggggtgcccagctgcacacagttgaaaatccgtgtataacttttgactctccaaaagcctactgttaaccagaagccttaccaataacatatagtcaattagcacatgttttgcatattatatgtattacatactgtattcttacaataagctaaataa

SEQ ID NO: 9773 - DNA, 1400 bp, Homo sapiens
tttccctgcccagtctggtgcctgccccacattgtaccggacactggattcctggacccccttctcctttcctttctttccttcaggtcacgcagccctgtactgtatccagcaccacagaaacctcagtgtttttcctctgctggtttggggcacaaggaagccttagggtatggggaaaggctgttattacctagagtttactcccaggccagggggctgccatcttcttcacagacatccctgaaaggaagcccctttggggcagggaggtgaggacttcatctcaacatcggctggtggttggtaggggagctttttcttttctttcctttttttttgttttcgtttttggttttgtttttggtaacatgttaggagttaatgttgcaaagagtagtttacatcttcactttctgaagacacttgaatttaggaccgagtatctgtgacaagcatgccagaagtggcaggggccatacgggctaccccttcacacctccctcgtcccatggggatccaagacctgagataaagcaacagcctgcccagatccctctgttcatcctatcccttccaaggttggtccatgccaacataacctctgggcatcagacatcagcaggtctgtgtgcctcagccctgttaaggggcaggtttctctttagccctcttcctgcacttgggagcaaaggcactaccagtagagaagggccatccagccgtgccccagcctggacccctggggctcagatagaggtgctgagcccctgtgtcaaagttgttaaatgtttttgttttgttccattgtagctcttttttttttttttttccctttcctggtgattgattttacaaaagaaagtaagctgcttagaaggccctggaagggaagtgaggaggagggacaaggaagatgactagttacggagggtgagggttgttttttgccaaaaagcctgggtagagtgatctgaattatctggcaccctcctgaatggaaccccagagtacctcctgtgtggaagggtccctggattttccctaacacccaccctctcccccttcagccatgctgatggcagagaagataagaacttggagcccatttctcactggagaggaaaacttgtcatctggctttgcggagaaggttccaccttacgctcgtagtacattatctttactatgtgctaggatatcatatttaaaaggacaaaaaaatgtaaaatacttgaatgagcttgtattataacattaatattattgagagtatctgctttccaggctgaagtgattcattcattattctagtcctgctttagtcctttgtaatttgtggtaattatgcttttctttttaatacaaaaaaatgtataaaaataaacacttgaaaaggc

SEQ ID NO: 9774 - DNA, 600 bp, Homo sapiens
ctacgtgggggacgtgccaccagaaccctacttaggggcgggatgtcactccgaggtcaaaacctgctccgaggtggacgagccgtagctccccgaatgggcttaagaagaggtggtgttcgaggtcgtggaggtcctgggagagggggcctagggcgtggagctatgggtcgtggcggaatcggtggtagaggtcggggtatgataggtcggggaagagggggctttggaggccgaggccgaggccgtggacgagggagaggtgcccttgctcgccctgtattgaccaaggagcagctggacaaccaattggatgcatatatgtcgaaaacaaaaggacacctggatgctgagttggatgcctacatggcgcagacagatcccgaaaccaatgattgaagcctgcccatcctcccatgagagactcttgttagtcaacacatctgtaaataaccttgagataacagatgagaagaaatctgattgatgctggatggacctatcacaataggctgtggacttacttgccaccagcttgtgcatttagtgtgttccttttactttttgatactgtgttgtatgaaacccttttgtcctttg

SEQ ID NO: 9775 - DNA, 600 bp, Homo sapiens
ttaggtttctgaaatagggttctgttacatcctcttcgatagcctgtttaaaatgtttagaaggtctggagctcaaaaatgcgttcttccacattgataatttagtaaactgagaacattgacatcactacagggcagcataagaggttgcttacatgtggtagcagctctggtttgattcaagttgctaccatgtacattgacagcacatataccataaccagcgtgttgggttgaattgcactttctacctttgtatgagatttacagactttccttctgggtttgtatcatgaccagaggggtactatagggttggtttatactgcaatatagaggatcagaagccatttgatttggtaggtgtgtcagaagggagaatgatggcagacgaactgctggaagaggtcagaagatagccatgctaaaatgcaattatatcctcatgtttatcccaaactaatcttggacttttccactcattagctttgttttgcccttgtttcccttgaaggtttaagttcaaccatattctgtcaactgttcagtttcagtggaatcttgtatttctggttcattataacaaactgttcgcttaaa

SEQ ID NO: 9776 - DNA, 1400 bp, Homo sapiens
caaattcttcagcatttcggatcaatgcccgagagggaggaaaaccttcaggcagcccctaatggacctgcatggtgttggtggcttcttgcagttctccctgtagacccacgataccagctgtcggttttgtcaatgaagtctttgaaagaacggttgaccaagatacagcatatactgacctatttttctagagaccaatctaagtaactaactctttggatctccctttaaagtgaccctaatctggctgcattgatggccagattgtctgctgcctttgcacatctagtgctggtttcagaaatttaatgaaacttttctttttccttcgacctcctgaatcatgtggttctgcaaatgaataccttcaactaggatttagaccactaagaacttgcacagaaaaacacgcattgaatgtgtgtcgaacctctacattgtgaagttgcactatgtaccatactctaaaatgaaataagaactctttatgtctgtgagagagtgtgtgtgtgtgtgtgcgtgcgtgtgtgcttgtgggggttgggtagtgtgtgtgtattttctctggctttaaaattttaaaacaaacaaacaaaaaagccatagagagcagaacttgccgagggtcatttattgcccaagtttacaagagtagcgatacaagtttttgcaaattgaatttgcctcagatatatctgtcctaatgcttatatttgcacaagtatgtaaaatatcgtgttgaggatcattctttgttggaaatactgctcttgctgaactgtcttgaccattgactatgacacagtttcttatttatgtaaatacttgcatcacagtggccgacaggcattggatgcagaacctagagccagttttcaggaacaattgtaaacctgacatggtactgtgcatctattcataaaacactcaaaactgtgaaaatatggtttacatttaattgtacataaaggtaaagggagaactcaattcagtaccagttagtttgtacattttagggggcttttcacattaactgcccatttgtgtaatttatagtttgacatgatgtgtttgttttaaaaaaaaatgcatagtataaacccattaaggatctgggaaaagagaagaagtttaatatagaactaagcttttaaagtttgtttttgtttttaattctggtctcggtgcaaatgttagttatgccttattcatatcacagttagatcaccatgctgcaacatggtttatattcatgctgccctagaaacttttgtaattatttgttgcaaatttgtgactgtccttattaactttcttttatgtaagtaatttgtaaaagtttcttaaaatttttgcttttgcttatttaattttgaataaaagctaaattcctaata

SEQ ID NO: 9777 - DNA, 1400 bp, Homo sapiens
ttctccagagttcacctttcccttttccttgagttgtgctgaatgccccaccccagctctctttcccttctgggtgtctttgctgggagggggctgtgttgtgagccctcccggttctcacctcgcctggcacttaaccacaccctggttttgtgtagccgccagctctcttctggttgggcctttgaaaggctcagcctcccattgtgcagtgcttgggtttggagcttatttgaatggaagaggtcagtttgttcctggctctccatttctggcctcagttgtctacaggacagtggtcagggatgcctggaggcatatatccagctgccaccaaggggcactgtttgttcccacttatgtgagtgaccccatccatccatgaccagaggattattttcctgccttggcagaggaggaggagtcaagggagcagggcagctctaccaggcaaggtgtttccccagcataggcgcagacagttgggacgaaacttcagagcccaggcagtccctgaatgaccaggccagtgttgtcactgagtggtcccctgctggttgggagtgaagagaatccaggctggcagagctggagccagttggggagcacggttctgggagctctgcaaaatcagtagcaagtgctggaaaaggcacatgccgaagatactcaagagctcccaagatttgcttgaggctagcccagtgaaaaaaaccagagactcatgtttccaggggtcagtctgtcaggcaggaaggacccaggatttgaacccagcttcagtgtgcaggctctgaggctgcccaggacgggaaagtccaaggaaggggcctggtggtgctccacttgcagttctttaaagaatgctgctttttattctcctaaccctttcaagtgggtgcagacttctcgttagcagctggaagacattcctcccacacttttcccttcctggcccaagagagcatccagaaggcagtaggacctggtttttcaggtactgggagccgggggctcactgcttgcactgtgcttagggtagggatggtaaatatcctccctgcatggctttatcctccctctcatcccaaagcaggtatcttctggttgtcacagagtttcattgagtccagctgcagccacgtggccatctggagctggtgctataggtgaccatctggtacattgaggggacctgtttgcctcctccactctataagcagtcatcttgggagaccgggaggagaaggtggtgggctagtcctgtgtcctcctccacttcccatgcctctatgttacccatctgtgtctcctgtgcagaaggagaggaaggggcattaagagatgaagggtgattatgtattacttatccatttctgaataaacatttgttattccta

SEQ ID NO: 9778 - DNA, 1400 bp, Homo sapiens
gttctccagagttcacctttcccttttccttgagttgtgctgaatgccccaccccagctctctttcccttctgggtgtctttgctgggagggggctgtgttgtgagccctcccggttctcacctcgcctggcacttaaccacaccctggttttgtgtagccgccagctctcttctggttgggcctttgaaaggctcagcctcccattgtgcagtgcttgggtttggagcttatttgaatggaagaggtcagtttgttcctggctctccatttctggcctcagttgtctacaggacagtggtcagggatgcctggaggcatatatccagctgccaccaaggggcactgtttgttcccacttatgtgagtgaccccatccatccatgaccagaggattattttcctgccttggcagaggaggaggagtcaagggagcagggcagctctaccaggcaaggtgtttccccagcataggcgcagacagttgggacgaaacttcagagcccaggcagtccctgaatgaccaggccagtgttgtcactgagtggtcccctgctggttgggagtgaagagaatccaggctggcagagctggagccagttggggagcacggttctgggagctctgcaaaatcagtagcaagtgctggaaaaggcacatgccgaagatactcaagagctcccaagatttgcttgaggctagcccagtgaaaaaaaccagagactcatgtttccaggggtcagtctgtcaggcaggaaggacccaggatttgaacccagcttcagtgtgcaggctctgaggctgcccaggacgggaaagtccaaggaaggggcctggtggtgctccacttgcagttctttaaagaatgctgctttttattctcctaaccctttcaagtgggtgcagacttctcgttagcagctggaagacattcctcccacacttttcccttcctggcccaagagagcatccagaaggcagtaggacctggtttttcaggtactgggagccgggggctcactgcttgcactgtgcttagggtagggatggtaaatatcctccctgcatggctttatcctccctctcatcccaaagcaggtatcttctggttgtcacagagtttcattgagtccagctgcagccacgtggccatctggagctggtgctataggtgaccatctggtacattgaggggacctgtttgcctcctccactctataagcagtcatcttgggagaccgggaggagaaggtggtgggctagtcctgtgtcctcctccacttcccatgcctctatgttacccatctgtgtctcctgtgcagaaggagaggaaggggcattaagagatgaagggtgattatgtattacttatccatttctgaataaacatttgttattcct

SEQ ID NO: 9779 - DNA, 1005 bp, Homo sapiens; identical to SEQ ID NO: 4544

SEQ ID NO: 9780 - DNA, 600 bp, Homo sapiens
ggtggggggccgggccatgggcgcccgcgctgcctatatctacatccgaggggaattctacaatgaggcctccaatctgcaggtggccatccgagaggcctatgaggcaggtctgattggcaagaatgcttgtggctctggctatgattttgacgtgtttgtggtgcgcggggctggggcctacatctgtggagaggagacagcgctcatcgagtccattgagggcaagcagggcaagccccgcctgaagccccccttccccgcagacgtgggagtgtttggctgccccacaactgtggccaacgtggagacagtggcagtgtcccccacaatctgccgccgtggaggtacctggtttgctggctttggcagagaacgcaactcaggcaccaactattcaacatctctggccatgtcaaccacccttgcactgtggaggaggagatgtctgtgcccttgaaagaactgattgagaagcatgctggcacagacaggcctgggcacagctgcggtgatcgtcatggaccgctcgacggacatcgtgaaagccatcgcccgcctcattgagttctataagcacgagagctgtggccagtgtac

SEQ ID NO: 9781 - DNA, 1400 bp, Homo sapiens
gctggagggatctgagcgcaggaagacgcagaacaacagaaatagccgcccctccccgcccactgtgcctgttggcctatcatagatctctatgttcttgactttgtctctcctttccgagtcaatggtgggttacactgatcttgttccactgattactctctctgacgagtccatcacctgcaacttaaatgaacaagcttacatcccattttgagtgaagattttgaggtttttaatttaaaggctgtgtacagttatacttttttatacacctgttcatttctacttaaattatggcacagattgatgcgcaccagtcttgaggaaacgatctccctattcccttaccctgttactcagccacgccgtgtgtaggcttagcctcaggtggcagatgtttgaggaaaggaattatgccaggaaggtgggaccgggttatggtcgggtttctattgggaatgctctttgtgcttttgggcatctgaatggaagctttacatagaaccttaggtagaactcccccaaatcgccatatttaaaaattattttcactctattcttgcttaaaactgtactcttttgcaaattaacaattttatcactgattcagagttaaaaagaagactaacttttcaagcaaatgcatctgtaaagatgctttagattagactgtcatgtctcagtgtctatctgtatatattatttgatattcagagaatctaaagcactcgtctactgttttaatgagatttaacagcttttaacagtgagtttcgtttgtaaactgcttgaagtctgtggcattcaggcacacgtctggctggccggctgggtctcctcccgggctcagtgggcctggggcctctctgacgtggtgcctgctggagggaggctcgtcgtcaccagctgactgctggtccggcttctgaccggcctttgtcctggctccgtagcagaacactgtaaaagtgcccgcgtctttgcagtagttgcagatttcagtcgtcgtgttacttgtgcacaaacagaagctgggtcttacccgcagcacgagtgtctcgggctgcccggagtcgcccgggagcaggtgctgcagccagagttacgcgggggccacgcgggccggcgggggtggggggaacgtgggggaacctgtgtttcacgtgactcagcagtgcccgccgccgtcaccagctatgcattcactccgtttccagtgagcagatgtcttgcttggaaagtggacctgtgtctgtgtctgtcctgagaacttaccagcagaaatcctcatttctgtgctacggatttaccaaaaattgtcaagtctttttcagtttaacagttcctttacatgtgtagtatttgaggaaaaaaatcaataaacagttgatctcgtg

SEQ ID NO: 9782 - DNA, 600 bp, Homo sapiens
tccagccaccagctccacgcacagcgaggagggcgcggaagccatccgtacccgggccacagagctgctgaccctgctgaagatgcctagcgtggcccagtttgtgctcacacccagcacggaggtgtgcagcccccgctatcaccgcgatgccaacacggccctgcccctggccctgcgcacggtcagccggctggtggagagggaggccggcctcatgccagggtgaagggacagtggccagggacttcggtgcagattaagagcctgggcagccagcttgctactgaggccaggctgataggagctcaggagggcgcgggagtcctgggagaggaggcaaggcccacggtgggcttggcaccctcacagacacgcggggctggcccccctgctcaccctctgggctttgtctccgagccttttgctcccaggcaacactgagctgagctgaggggtgccatggagcggctctgattggaggcttgaggccctgtggctgggtcgggtggaggctgctgggtctgtttcctagtcttttgtttttggacagttgatgggcaagaagagctgcagtaaaagtaaatctcctttaataag

SEQ ID NO: 9783 - DNA, 1400 bp, Homo sapiens
cgggggtgtcctggctcccagctcccaggcactcgtggggccaccgcccaggccagctggtgctaagtccgcagcctgtgcagcagcgcccggcttaggactgggagtgtgacttgaagggccgtcccgctcatccaagggacaaggaggagctcatggccacagggcctcggagggcatgaccccagcccagggaggagcaaccttcaggtggcctccaggaggcagctgggaaaagggcaaagctcaccagctctcaactttttttttaaataaactgaaattttagaatagtttttcagatttacagaaaagatgataaaccttagaaacattatatgctaagtgaaagtgagaagtgacagcctgctggcagtcctcacagccctcgctcgctcttggcgcctcctctgcctgggctcccactttggcagcacttgaggagcccttcagcccgccactgcactgtgggagcccctttcagggctggccaaggccggagccggctccctcagcttgcggggaggtgtggagggagaggcgcggtgggaaccagggctgcacgcggtgcttgcgggccagcgcgagttccgggtgggcgtgggctctgtgggccccgcactcggagccgccggctagccccgccagcctgggcagtgaggggcttagcacctggaccagcagctgctgtgctcgatttctcactgggccttagctgccttcctgcggggcagggctggggacctgcagcccgccatgcctgagcctcccccctcccctccgtgggttcctgcgcagtccgagcctccccaacgagtgttgccacctgctcagggcacccagtcccatcgaccacccaagggctgaggagtgcctttggagcagggcacgggactggcaggcagctctacctgcagcccctgtgcaggatccactgggtgaaagccagctgggctcctgagtctggtggggacttggagaacctttatgtctagctaagggattgtaaataaaccaattggcactctgtatctagctcaaggtttgtaaacacaccaatcagcaccttgtgtctagctcagggtttgtgaatgcaccaatagacactctgtatctagctactctggtggggacttggaaaacctttttgtcaacactctgtatctagttaatctggtggggacatggagaacctttgtgtctagctcagggattgtaaacgcaccaatcagcaccctgtcaaaacagaccactcggctctaccagtcagcaggatgtgggtggggccagatgagaataaaagcaggctgcccgagccagcagtgacaacccactcgggtccccttccacaccgggatgctttgtttgttcgctctttgcaataaatcttgctgctgctc

SEQ ID NO: 9784 - DNA, 1400 bp, Homo sapiens
ctggcttacctcccctctgatgactcatcactgcccaaggacgtttctcccacacaggccaagagttctgcctttgacagatacgcagatgcggggaccgtgcaggagatgctgcggactcagtccgtggcatgcatcaagcacatcgtggactgcatccgggcagagctacagagcattgaagagggtgtgcaagggcaacaggatgccctcaacagtgccaagctgcactcagttcttttcatggccagactctgccagtccctgggagagctgtgcccccatctgaagcagtgcatcctgggaaaatcagagagctcagagaaaccagcaagggagtttagggctctgagaaaacagggaaaggtgaaaactcaggaaatcattcctacacaggccaagtggcaagaggttaaagaagtactcctccagcagagcgtgatgggctaccaggtctggagcagtgcagttgtgaaagttttgattcatggattcacccagtcattacttctagatgatgctggctcagttctggccacagccaccagctgggatgagctagaaattcaggaggaggcagagtctggcagcagtgtcacatccaagatccgactccctgcacagccgtcctggtatgtacagtccttcctgtttagtttatgccaggaaattaatcgggttggaggccatgccttgccaaaggtgacattacaggagatgctgaaaagctgtatggttcaagtagtagctgcctatgagaaactctccgaagaaaaacagattaagaaagaaggtgcatttccagtcacccagaaccgggcgctgcagctgctttatgatctgcgttacctcaacattgttctgacagccaagggtgacgaggtgaagagtggccggagcaagccagactccagaattgagaaagtgactgaccacctggaagccctcattgatccatttgacctggacgttttcacgccacacctcaacagcaaccttcatcgcctggtgcagcgaacttctgttctgtttggattggtgactggtacagagaatcagctcgccccccggagcagtacgttcaactcccaagaaccccataacatcctgccactggcatccagtcagatcaggtttggacttctcccactgagcatgacaagcactcgaaaggctaaatcaaccagaaacatcgaaacaaaagctcaggttgtccccccggcacgctccacagctggtgacccgacagttcctggctccttgttcagacagcttgtcagtgaagaagacaacacgtctgcaccttcattattcaaacttggctggctctctagtatgactaagtaacatggcaacacatctgtctctccctaaataaatactaccacattatttcttct

SEQ ID NO: 9785 - DNA, 878 bp, Homo sapiens; identical to SEQ ID NO: 4550

SEQ ID NO: 9786 - DNA, 600 bp, Homo sapiens
atgcattatccaattggtttgctatttgatcttcttgcatcaagttcagctcttccttggaacatcacagtacattttaagagttttccagaaaaagaccttctgcactgtccatctaaggatgcaattgaagctcattttatgtcatgtatgaaagaagctgatgctttaaaacataaaagtcaagtaatcaatgaaatgcagaaaaaagatcacaagcaactctggatgggattgcaaaatgacagatttgaccagttttgggccatcaatcggaaactcatggaatatcctgcagaagaaaatggatttcgttatatcccctttagaatatatcagacaacgactgaaagacctttcattcagaagctgtttcgtcctgtggctgcagatggacagttgcacacactaggagatctcctcaaagaagtttgtccttctgctattgatcctgaagatggggaaaaaaagaatcaagtgatgattcatggaattgagccaatgttggaaacacctctgcagtggctgagtgaacatctgagctacccggataattttcttcatattagtatcatcccacagccaacagattgaaggatc

SEQ ID NO: 9787 - DNA, 1400 bp, Homo sapiens
tttggacgaattccaacttgtttcacgctatatcaggatgagataactgaaagggaagcagaaccatactatttgcttttgccaagagtaagttatttgacgttggtaactgacaaagtgaaaaagcactttcagaaggttatgagacaagaagacattagtgagatatggtttgaatatgaaggcacaccactgaaatggcattatccaattggtttgctatttgatcttcttgcatcaagttcagctcttccttggaacatcacagtacattttaagagttttccagaaaaagaccttctgcactgtccatctaaggatgcaattgaagctcattttatgtcatgtatgaaagaagctgatgctttaaaacataaaagtcaagtaatcaatgaaatgcagaaaaaagatcacaagcaactctggatgggattgcaaaatgacagatttgaccagttttgggccatcaatcggaaactcatggaatatcctgcagaagaaaatggatttcgttatatcccctttagaatatatcagacaacgactgaaagacctttcattcagaagctgtttcgtcctgtggctgcagatggacagttgcacacactaggagatctcctcaaagaagtttgtccttctgctattgatcctgaagatggggaaaaaaagaatcaagtgatgattcatggaattgagccaatgttggaaacacctctgcagtggctgagtgaacatctgagctacccggataattttcttcatattagtatcatcccacagccaacagattgaaggatcaactatttgcctgaacagaatcatccttaaatgggatttatcagagcatgtcacccttttgcttcaatcaggtttggtggaggcaacctgaccagaaacacttcgctgctgcaagccagacaggaaaaagattccatgtcagataaggcaactgggctggtcttactttgcatcacctctgctttcctccactgccatcattaaacctcagctgtgacatgaaagacttaccggaccactgaaggtcttctgtaaaatataatgaagctgaaacctttggcctaagaagaaaatggaagtatgtgccactcgatttgtatttctgattaacaaataaacaggggtatttcctaaggtgaccatggttgaactttagctcatgaaagtggaaacattggtttaattttcaagagaattaagaaagtaaaagagaaattctgttatcaataacttgcaagtaattttttgtaaaagattgaattacagtaaacccatctttccttaacgaaaatttcctatgtttacagtctgtctattggtatgcaatcttgtaactttgataatgaacagtgagagatttttaaataaagcctctaaatatg

SEQ ID NO: 9788 - DNA, 1400 bp, Homo sapiens
accattaaccacgcaagtcagctggtagagcaagcccatgatatgagggataaaatccaagagatcaacaacaagatgctctattatggggaagagcatgaacttagccccaaggaaatctctgagaagctggtgttggcccagaagatgcttgaagagattagaagccgtcaaccatttttcacccaacgggagctcgtggatgaggaggcagatgaggcttacgaactactgagccaggctgagagctggcagcggctgcacaatgagacccgcactctgtttcctgtcgtcctggagcagctggatgactacaatgctaagttgtcagatctccaggaagcacttgaccaggcccttaactatgtcagggatgccgaagacatgaacagggccacagcagccaggcagcgggaccatgaggtacagcggacactcaccatcaatgcatttcagcatcagcagtgtgatggtacaccaagaaggggctgttgatataaatttttttaaaatattggtatagttaaatacttatattttaaaatattggtgtgttttttggtgctataaattactaacttgtgtgttcctaaaatcaagttgaaactaggataattgtctagttcttgctttgataagaacgcagtagttctgatgcttgtgtccatgtgtatgggtctgttattcttgcaagtgggtaagcaatgcatagctttttttatactgagagcactagaaggccaaagcatctcaaaaccatgggttctgggtatgcataatttttggaaaggcacgataagcaaatctcacagtctggctggtcagcagctgcagggataaggagactaattgccaaggccatgcaaatgcaaagaggaaggtgaggaggattcccagatgtgatcatagcttgcaaagatggtcatctcatggggccagaattcgtgcatgcccacacctacaaagctgagaactggtagtggtcatgtgtccgcttcaagcaatgcatgtattcacagccgccagcatcaagaggggccatcttttgataggatgacacatgcatgttcaaacatattttaaaagattagggagaaaagaatactgtgaacaaatagaaaccaattatgagcaaattcacgaattcggttatgtactattgtggctggcaaaagccacttaaactaggctctctagcctgattttcagccatcattacccctcactaagaatccttgtaaaatttcttccgtaaaagttaattacactcatcaccactgtttgctaatgggagcaaacccctagccaatattttttagaataatatggttgggataactttttttttttttttttgctaaatgaatgcatgattatcttatacaataaaagtataacac

SEQ ID NO: 9789 - DNA, 600 bp, Homo sapiens
ctggagcgctgcctgctcccgcgccgcgtccggggacgacaacgcttttccttttgacattgaagggagctcagcggttggcaggcaagacccgcctgagacgagcgaaccccgcgtggctctgggacgcctgccgcctgcggccgagaaatgcaatgctggattctttcacaccctgtcgggagaatgtgtgccctgcgactgtaatggcaattccaacgagtgtttggacggctcaggatactgtgtgactactgacggagaagacccaggtttttcagcttctgccctatcgttcattctcagctctcagggagccagagaagccagggctccaacatgaacacttcttgtagctcactgtcatgaccagtgtttcagtcagttcttgcaggttgcctgacttacctcatttctctcatttcctgtaagcaaccaaaaataaaaggctttcttttatttcattttgtcttattttgcttttatcttgaaggcatataagacctctgtatctgccttgttcaccttcaactgcttctaattcttcctcaattccagtgtccaatgtcaatttgaaattaaaatttacagactgatttt

SEQ ID NO: 9790 - DNA, 596 bp, Homo sapiens; identical to SEQ ID NO: 4555

SEQ ID NO: 9791 - DNA, 1058 bp, Homo sapiens; identical to SEQ ID NO: 4556

SEQ ID NO: 9792 - DNA, 1400 bp, Homo sapiens
ttccccacatgctccatggaactatcattaccattgtcctggaagtcccgatcaccaggtgccatatggccatgactaccctcgagcagcctaccagcaagtgatccagccggctctgcctgggcagcccctgcctggagccagtgtgagaggcctgcaccctgtgcagaaggttatcctgaattatcccagcccctgggaccacgaagagaggcccgcacagagagactgctcctttccggggcttccaaggcaccaggaccagccacatcaccagccacctaatagagctggtgctcctggggagtccttggagtgccctgcagagctgagaccacaggttccccagcctccgtccccagctgctgtgcctagaccccctagcaaccctccagccagaggaactctaaaaacaagcaatttgccagaagaattgcggaaagtctttatcacttattcgatggacacagctatggaggtggtgaaattcgtgaactttttgttggtaaatggcttccaaactgcagattgacatatttgaggatagaatccgaggcattgatatcattaaatggatggagcgctaccttagggataagaccgtgatgataatcgtagcaatcagccccaaatacaaacaggacgtggaaggcgctgagtcgcagctggacgaggatgagcatggcttacatactaagtacattcatcgaatgatgcagattgagttcataaaacaaggaagcatgaatttcagattcatccctgtgctcttcccaaatgctaagaaggagcatgtgcccacctggcttcagaacactcatgtctacagctggcccaagaataaaaaaaacatcctgctgcggctgctgagagaggaagagtatgtggctcctccacgggggcctctgcccacccttcaggtggttcccttgtgacaccgttcatccccagatcactgaggccaggccatgtttggggccttgttctgacagcattctggctgaggctggtcggtagcactcctggctggtttttttctgttcctccccgagaggccctctggcccccaggaaacctgttgtgcagagctcttccccggagacctccacacaccctggctttgaagtggagtctgtgactgctctgcattctctgcttttaaaaaaaccattgcaggtgccagtgtcccatatgttcctcctgacagtttgatgtgtccattctgggcctctcagtgcttagcaagtagataatgtaagggatgtggcagcaaatggaaatgactacaaacactctcctatcaatcacttcaggctacttttatgagttagccagatgcttgtgtatcctcagaccaaactgattcatgtacaaataataaaatgtttactcttttgtaa

SEQ ID NO: 9793 - DNA, 1400 bp, Homo sapiens
accatcattctcagcaaactatcacaaggacagaaaaccaaacaccgcctgttctcactcatagatccataaagctaccagctcctcgcgaagtgaacctgaagggcggaaaggcactatttcacaatattttactaccttacactgtcctgtgtgtgatgacctaactcagcatggcatctgtagtaaatgtcggagccaacctcagcatgttgcagtcatcctcaaccaagaaatccgggagttggaacgtcaacaggagcaacttgtaaagatatgcaagaactgtacaggttgctttgatcgacacatcccatgtgtttctctgaactgcccagtacttttcaaactctcccgagtaaatagagaattgtccaaggcaccatatctccggcagttattagaccagttttaaattgtcaatatcacagtattacaggtgctatttttttcagtgcttaccactaaactgttgtgcatggtgctttttaactttcatcgagtcaaggatgttcactgtctgttatctgaagactatgaagacttctatgctaaccgaattaaaatgtacttgttgatctctgaatagctcacttcttacaatgtacaaattcctcattctgtcaccttttaaacattgttttataatgcaggtgttggatttgctccagtatgtgtaccatcttgtaaattcatttgagtagatcatgtttacttcccagtggaaggagcactgaaaacctcttaaagaaaaagcatttgtgtgttttccttgaactgtctgtatcaagacgtgttacttcgagatatccattcactttataattttgactgcaaaatattttgtaaatacacttttttacttttcaaacgagcaaaataatgtgcaatgatttttatacaaatgattttcaagttgtttggtatatttcctctaggttttgcttgactcaaagtagatcgttattttgatcaaactgtgcaaacagtagtaccacgtgtagcattttgaaacattatttttttttaaaaaatgctgtcttgctttagctattaatggggcattgtgaggaactgtgcaaagacatttttgttacaaacctgtgggcctgttgcaatactttaaaaataaaaaattttattccatttgcttgttttgtatagacatttctattgcttctaaatatacttaaaatattttctttccttatgtactgtacagttaatcttatttgccatcatcttgaacacaaaatgtgtatttagaatatttgtataactgtgtaaaataaaaaaggaattatgtggtcagtgcattgttttttaaactggaaatcattttgttttaaaagttaataatggaaaccatattaaaattgaataaaatataaaataatata

SEQ ID NO: 9794 - DNA, 1400 bp, Homo sapiens
ccttggcaagaatcttctcacttattggtattgatgtcttcagctggtatcatgaattaccaaggatccataaagctaccagctcctcgcgaagtgaacctgaagggcggaaaggcactatttcacaatattttactaccttacactgtcctgtgtgtgatgacctaactcagcatggcatctgtagtaaatgtcggagccaacctcagcatgttgcagtcatcctcaaccaagaaatccgggagttggaacgtcaacaggagcaacttgtaaagatatgcaagaactgtacaggttgctttgatcgacacatcccatgtgtttctctgaactgcccagtacttttcaaactctcccgagtaaatagagaattgtccaaggcaccatatctccggcagttattagaccagttttaaattgtcaatatcacagtattacaggtgctatttttttcagtgcttaccactaaactgttgtgcatggtgctttttaactttcatcgagtcaaggatgttcactgtctgttatctgaagactatgaagacttctatgctaaccgaattaaaatgtacttgttgatctctgaatagctcacttcttacaatgtacaaattcctcattctgtcaccttttaaacattgttttataatgcaggtgttggatttgctccagtatgtgtaccatcttgtaaattcatttgagtagatcatgtttacttcccagtggaaggagcactgaaaacctcttaaagaaaaagcatttgtgtgttttccttgaactgtctgtatcaagacgtgttacttcgagatatccattcactttataattttgactgcaaaatattttgtaaatacacttttttacttttcaaacgagcaaaataatgtgcaatgatttttatacaaatgattttcaagttgtttggtatatttcctctaggttttgcttgactcaaagtagatcgttattttgatcaaactgtgcaaacagtagtaccacgtgtagcattttgaaacattatttttttttaaaaaatgctgtcttgctttagctattaatggggcattgtgaggaactgtgcaaagacatttttgttacaaacctgtgggcctgttgcaatactttaaaaataaaaaattttattccatttgcttgttttgtatagacatttctattgcttctaaatatacttaaaatattttctttccttatgtactgtacagttaatcttatttgccatcatcttgaacacaaaatgtgtatttagaatatttgtataactgtgtaaaataaaaaaggaattatgtggtcagtgcattgttttttaaactggaaatcattttgttttaaaagttaataatggaaaccatattaaaattgaataaaatataaaataatat

SEQ ID NO: 9795 - DNA, 1400 bp, Homo sapiens
agactgaatgctacttactatattaccaagcaaatccttccacccttggcaagaatcttctcacttattggtattgatgtcttcagctggtatcatgaattaccaaggatccataaagctaccagctcctcgcgaagtgaacctgaagggcggaaaggcactatttcacaatattttactaccttacactgtcctgtgtgtgatgacctaactcagcatggcatctgtagtaaatgtcggagccaacctcagcatgttgcagtcatcctcaaccaagaaatccgggagttggaacgtcaacaggagcaacttgtaaagatatgcaagaactgtacaggttgctttgatcgacacatcccatgtgtttctctgaactgcccagtacttttcaaactctcccgagtaaatagagaattgtccaaggcaccatatctccggcagttattagaccagttttaaattgtcaatatcacagtattacaggtgctatttttttcagtgcttaccactaaactgttgtgcatggtgctttttaactttcatcgagtcaaggatgttcactgtctgttatctgaagactatgaagacttctatgctaaccgaattaaaatgtacttgttgatctctgaatagctcacttcttacaatgtacaaattcctcattctgtcaccttttaaacattgttttataatgcaggtgttggatttgctccagtatgtgtaccatcttgtaaattcatttgagtagatcatgtttacttcccagtggaaggagcactgaaaacctcttaaagaaaaagcatttgtgtgttttccttgaactgtctgtatcaagacgtgttacttcgagatatccattcactttataattttgactgcaaaatattttgtaaatacacttttttacttttcaaacgagcaaaataatgtgcaatgatttttatacaaatgattttcaagttgtttggtatatttcctctaggttttgcttgactcaaagtagatcgttattttgatcaaactgtgcaaacagtagtaccacgtgtagcattttgaaacattatttttttttaaaaaatgctgtcttgctttagctattaatggggcattgtgaggaactgtgcaaagacatttttgttacaaacctgtgggcctgttgcaatactttaaaaataaaaaattttattccatttgcttgttttgtatagacatttctattgcttctaaatatacttaaaatattttctttccttatgtactgtacagttaatcttatttgccatcatcttgaacacaaaatgtgtatttagaatatttgtataactgtgtaaaataaaaaaggaattatgtggtcagtgcattgttttttaaactggaaatcattttgttttaaaagttaa

SEQ ID NO: 9796 - DNA, 600 bp, Homo sapiens
gcggtggctcacacctgtaatcccagcactttgggaggccgaggtgggcggatcacaaggtcaggagatcaagaccatcctggctaacacggtgaaaccccatctctactaaaaatacaaaaaattagccgggcgggcgtggtggcgggtgcctgtagtcccagctactcgggaggctgaggcaggagaatggcgtgaacccaggaggcggagcttgcagtgagccgagatggtgccactgcactccagcctgggtgacagagcgagactgtctcaaaaaaaaaaaacaaaaatattcaactatgagctggggaaaaaagcttcagcggtcactgaaagtgcttacaggtacagctagtatggggatggaatatgccccattagccaggccaacagatctcatataggagaatctgttttatgtttgttggacagtgggtgagttatcgcagagttatgccttttttttctgtcactattttatgtcccttatcactgtgcctttaacctactgaaatgcagttgaggccgggtgcggtggctcacgccaagatggcgccactacactccagcctgggcaacagagggagactccatctc

SEQ ID NO: 9797 - DNA, 600 bp, Homo sapiens
ctcccagagacacccagtttctcagtgtcagtacacactgcctgggttagtaagcacaggctgagacctgggaggaattgatgaaccaaatgtgtctgggcttttcacttcctcggcatgagtcagccaagaaagcccacctctcctccccagcagcgtgcagggcctctgcagataaatgtgcaggatagcagacctgggtgtggtgctgcctggcactgagccagcccccagattctttggctgcagagtggcctggccaactcacacaggtagcgcccttttattcttggaaaaggaagcaccaggtggaaagggaggttaaaggagggaacacaacttttttccagacccctctgcccaggatgttaaaggttgctggaaaatgcctttggtggctttaaatgtcacagatgacatattccaggatggatccagcctccactggacttggcccctctattttgattcctgcctttccccagcctcagccctgagcggcataatatctacacggggttagctgcaggtggaactcagaacacagctcctagacaagtagagtgaggcctatggcttcatcatcaaaatgtaaaattt

SEQ ID NO: 9798 - DNA, 593 bp, Homo sapiens; identical to SEQ ID NO: 4563

SEQ ID NO: 9799 - DNA, 1400 bp, Homo sapiens
aggtacgagtagaggtttaaagaaaaatcagtttttgttcttaaaaatgcatttaagttgtaaacgtctttttaagcctttgaagtgcctctgattctatgtaacttgttgcagactggtgttaatgagtatatgtaacagtttaaaaaaaaagttggtattttataagcacagacaattctaatggtaacttttgtagtcttatgaatagacataaattgtaatttgggaacataaaaactactgaataaatcatgtggcctaatattgaaaatgtcactgttataaattttgtacatttttgatcaaatgtacatctcccctttgctaacggccgtctgctctcaaggatgacgtgggtttgatttctaagtgtttcacagtgtctgtaaatcaagaccaaagagcctgtcgatgagactgtttattaccagattcacttctgaattggccagaggaaatctgaatgtattatcctgtgtgtgtctaggtagagatattggaaggctgccaggggatttcgaagtttgcaacctttataggataactgatggcaatattaagacagacgcctgcttttgcaaataacttacaagactgtaaattccaaagatctgaatggggctttcctgatgttggtatctaaggcttaggcctatagattgatttacctttggaattgtgctccaaatgtctactgaagcttaaccgaagaactaataaatggactacagtagctcacgttacagggaaggagggtaggcagggaggctctgtgtgttaaaatgagggtctcactgctttaggattgaagtggctggaaagagtgatgcctggggaaggagatggagttatgagggtactgtggctggtactttctgtactaaacatttcctttttctattttaccactaattttgttttaaactgtgagccgtccaagtcagaagaagacagcaaaaaaagcaacttttccaacatacaatttacttttaataaagtatgaatatttcattttgagaacattccctggaattgccacataattcattaaaaacatttttttaagcaacacttggaacagtgtttactttaaatccttaatggccttaattaattctcagattcctgccccatcacttacagaaccaattcactttagagtgactaaaaggaaacgatagcctagctttctaaagccacgctgtgtccctcaattacagagggtaggaatgggtatacctctaactgtgcaaagcagagtgaaattcaattcatagaataacaactgctgggaatatccgtgccaggaaaagaaaaatttctggcaaatattttgtcactgctgtaaagcaaaatatttgtgaaagtgccaaaataaagtctgtcatgccaaaagt

SEQ ID NO: 9800 - DNA, 600 bp, Homo sapiens
tttgttcttcataaatcaaagagtgaagaggctcatgctgaagattcggttatggaccatcatttccggaagccagcaaatgatataacgtctcagctggagatcaattttggagaccttggccgcccaggacgtggcggcaggggaggacgaggtggacgtgggcgtggtgggcgcccaaaccgtggcagcaggaccgacaagtcaagtgcttctgctcctgatgtggatgacccagaggcattcccagctctggcttaactggatgccataagacaaccctggttcctttgtgaacccttctgttcaaagcttttgcatgcttaaggattccaaacgactaagaaattaaaaaaaaaaagactgtcattcataccattcacacctaaagactgaattttatctgttttaaaaatgaacttctcccgctacacagaagtaacaaatatggtagtcagttttgtatttagaaatgtattggtagcagggatgttttcataattttcagagattatgcattcttcatgaatacttttgtattgctgcttgcaaatatgcatttccaaacttgaaatataggtgtgaacagtgtgtaccagt

SEQ ID NO: 9801 - DNA, 1400 bp, Homo sapiens
caaacagtgttaaaagccactttgcaacacttgacttcatcttaatgtacattcactgttgttacatacatatctaagtaaatcaaagttttgggtggaagtgttgagaagtatgagttttttgttgtttttgttttacttaaaacttttaatttatccagaatggcagtagctttagcaagcagatggtcacaatctgttttctaaatcattttttattaaatgaatccaaagtatcctagctctttgtcaaagatggtctgtagaaatgtttttaaagattagggatgctgtactttttgaattgttgcagtgttggagatgccattttcacctttttaaaaagatgcattttatttgcaggtttgtgaagttcttgcaaactcttactacagaaatgttttaaatacattctcaggcatgtttgcaaaaatatggcacatgtatacattttaggaaatgttacttttgttaatctttaaaaaatacacctaatgaaagacattccactattatgcgtaatgctcagctttttgtaaagaaatatttaattgtattttgtgtttatacaggtatttcacacaataatttgttcttaatgcagccactataacttgataagtcattgcactatttaaaaagttttagtaatatcatgaatttaatttgcttaagatttagtacatttcagaacttttgaacttttgacaaattgcattggaaaaagaagtctgttaatagtgatttagtctccccgcctcattcccacccccaacaaagcactatcattttcatttggaatgggtattttctgtttcatgatgtattttcaaatagagttcaggatctgcaattcagttcaacacaagtttgttgagctttaaaatgtatttgaagtaatatttaaataggcatttaaaatttcaaattagatgttaaatttatgcatagtaattttgcactgtaaaataattcccttctcccattccttgtctgccattctgaatatgcttattaaaatatttttttaaacatatttgcctacataatactgtgtgaatattttcattagattaattcactaagattttattagagattgtttgaatgatgcatgttattgacaaggcaaatatatatatatacacagtctgtttcttctattcctagacatattgcactactttttcagtggttcttggtcccctttaccacatcttgggtgatgtatttttgtcttcttcccctttgccacaagagatcctttcagtccctagacctccattcactctgtttctcttctgctggattatataatttaaaaataatgtgttcccgtattttgtagtggagttcatatcacattatgttttgcaaaataaaacttgttttgtcacaat

SEQ ID NO: 9802 - DNA, 600 bp, Homo sapiens
gatgttcctttgtggcaaaaacatggacggaacttctgaaacatgtgagagaaacccataaagaggaaatactatgtgaagtatgccggaaaacatttaaacgcaaagattaccttaagcaacacatgaaaactcatgccccagaaagggatgtatgtcgctgtccaagagaaggctgtggaagaacctatacaactgtgtttaatctccaaagccatatcctctccttccatgaggaaagccgcccttttgtgtgtgaacatgctggctgtggcaaaacatttgcaatgaaacaaagtctcactaggcatgctgttgtacatgatcctgacaagaagaaaatgaagctcaaaggtcaaaaaatctcgtgaaaaacggagtttggcctctcatctcagtggatatatccctcccaaaaggaaacaagggcaaggcttatctttgtgtcaaaacggagagtcacccaactgtgtggaagacaagatgctctcgacagttgcagtacttacccttggctaagaactgcactgctttgtttaaaggactgcagaccaaggagcgagctttctctcagagcatgcttttctttattaaaattac

SEQ ID NO: 9803 - DNA, 1400 bp, Homo sapiens
atccctcgataatgtgggccacctacctgcaggaggtgctgtgaagactgagggcggtggcagcgaggctcctctgtgtccgggtccccctgctggggaggagccggccatctctgaggcagcgcctgaagctggcgcccccacttcagccagtggcctcaatggccaccccaccctgtcagggggtggtgaccaaagggaggcccagaccttggacagccagatccaggagacaagcatctaatgatgacattctggtctcgtcttccgtctcccccgtgttcccctcttgtctcccctgttcccctctcccttccctcctcccatgtcactgcagattgagacctacaggctgacgttccgggcaaatgccagggcccgcaccgaccacggggccgacattgtctcccgccccccacacttccctggcggccccaactcgggctcccgggtccttggccccctttcccgggctgtccactagaccagtgagcgcttgggcgccgtgctgggcagcccgctaggctcgccttccctcctgctttgcgtgcccggggcagcagcagccctgccccacacctcctctcactccccagcctgggcccatctccctgctttggtcttgccccatcactgcgccactgctccgtggaggaggttgggagggggttggggtggttgaggctaagttgggatctaggagaggagaaccagattctatcctcatctttttttggttctttggtccaaacccaaaagaaactgacatgccctcccttctccctggatctacctggagggaagagtggaggtggattccgagtggtgacaggacgctgaccgtggagcttaagccactgcctctccctctggtcccacaaatgggcgcccccccctccccatgcaggtggtgtcgggcccttcttgctgccctgccccaagttgggggtcagtgctgcctgtccccatgcttttcttttctaaccaagaggctggttttggcatctctgtcccattccctgggatctggtggtcagccctaggataaaaagccagggctggagaacaagaaagggccaggagatggaattccttcaggccggcacccacaccctaggacatgtaagccctcatgtccaagggagcctcatgcagatagtaggaaatcaggtctggaaatttaaaaataaaaggcatgagactaaggctatctgcttcccttatgccctgactggagaggggagggaggagaggcaaggcccacagagggcatcccagctaggccttgggatggctgcagtgaggagaaatcccgggaactgtattgacacaaagattcttattgcacttgtattttttgtattaaagtttgcatggtttctaataaaggattcaaacat

SEQ ID NO: 9804 - DNA, 892 bp, Homo sapiens; identical to SEQ ID NO: 4569

SEQ ID NO: 9805 - DNA, 892 bp, Homo sapiens; identical to SEQ ID NO: 4569

SEQ ID NO: 9806 - DNA, 600 bp, Homo sapiens
gtagcctcactatctacaacttaacatcatcagatgaagatgagtatgaaatggaatcgccaaatattactgataccatgaagttctttctttatgtgcttgagtctcttccatctcccacactaacttgtgcattgactaatggaagcattgaagtccaatgcatgataccagagcattacaacagccatcgaggacttataatgtactcatgggattgtcctatggagcaatgtaaacgtaactcaaccagtatatattttaagatggaaaatgatcttccacaaaaaatacagtgtactcttagcaatccattatttaatacaacatcatcaatcattttgacaacctgtatcccaagcagcggtcattcaagacacagatatgcacttatacccataccattagcagtaattacaacatgtattgtgctgtatatgaatgttctttaattgagaagacaatttcttcatttttaggtattctgaaatgtgacagaaaaccagacagaaccaactccaattgattggtaacagaagatgaagacaacagcataactaaattattttaaaaactaaaaagccatctgatttctcattt

SEQ ID NO: 9807 - DNA, 1400 bp, Homo sapiens
cagtgatctaaaggacatgacctccgagcagctggatgacattttgaagtaccacactgagatagtgtttgccaggacctcccctcagcagaagctcatcattgtggaaggctgccaaagacagggtgctatcgtggctgtgactggtgacggtgtgaatgactctccagctttgaagaaagcagacattggggttgctatggggattgctggctcagatgtgtccaagcaagctgctgacatgattcttctggatgacaactttgcctcaattgtgactggagtagaggaaggtcgtctgatctttgataacttgaagaaatccattgcttataccttaaccagtaacattcccgagatcaccccgttcctgatatttattattgcaaacattccactaccactggggactgtcaccatcctctgcattgacttgggcactgacatggttcctgccatctccctggcttatgagcaggctgagagtgacatcatgaagagacagcccagaaatcccaaaacagacaaacttgtgaatgagcggctgatcagcatggcctatgggcagattggaatgatccaggccctgggaggcttctttacttactttgtgattctggctgagaacggcttcctcccaattcacctgttgggcctccgagtggactgggatgaccgctggatcaacgatgtggaagacagctacgggcagcagtggacctatgagcagaggaaaatcgtggagttcacctgccacacagccttcttcgtcagtatcgtggtggtgcagtgggccgacttggtcatctgtaagaccaggaggaattcggtcttccagcaggggatgaagaacaagatcttgatatttggcctctttgaagagacagccctggctgctttcctttcctactgccctggaatgggtgttgctcttaggatgtatcccctcaaacctacctggtggttctgtgccttcccctactctcttctcatcttcgtatatgacgaagtcagaaaactcatcatcaggcgacgccctggcggctgggtggagaaggaaacctactattagccccccgtcctgcacgccgtggagcatcaggccacacactctgcatccgacacccaccccctctttgtgtacttcagtcttggagtttggaactctaccctggtaggaaagcaccgcagcatgtggggaagcaagacgtcctggaatgaagcatgtagctctatggggggaggggggagggctgcctgaaaaccatccatctgtggaaatgacagcggggaaggtttttatgtgcctttttgtttttgtaaaaaaggaacacccggaaagactgaaagaatacattttatatctggatttttacaaataaagatggctattataatgg

SEQ ID NO: 9808 - DNA, 600 bp, Homo sapiens
gttgaaatatatgttaaataaaatttctgtttattgaacctctttattaaacctctaacttactgataagatgtttatgaagtatggcatattttgatttttttaattgtaataaatattcttaaagttaccacatcccacaaaatggcccttggtggcagcaatagagcaaaggttacctttttgtatggtgaagggaggccttcctatggctgtacaattacatcgattcttccaaatttcatatttcatacatggcactttggcataccgaaaaaacatgaaatttttcattaaaatgccatgaatcaagccagggccgttggcttatgcctgtaatcccagcactttgcaggccgaggtagacagatggcttgagctcaggagttcgtgaccagcctgggcaaccctgtctctacaaaaaatacaaaaattaaccaggcatggtggcatgcacctgtagtcccagctacttggggtgctgaggcgggaggattacttgagcccaggaggattacttcaacctgggaggttgaggctgcagtgagctgtgtttcgccactgcacaccagcctgggtgacagtgtgagacccagcctc

SEQ ID NO: 9809 - DNA, 1400 bp, Homo sapiens
ctttaaattatgacatattccttaatctatagtctttgtgtgtgtggttctcgtcaacaaaattttaagctgattttgaaatggttcctattctgtgctattgcagtgaaagttctcttaactgatgtttggttagccagtgctctccattccctttgtatgctgtactgactgataaccttagcattaagactaggctctattacatctatccacttctgtttccacccttggagttgtatgcttatcaaaagtcagttgtgtgatacctggaccccacctccagaaaatctgatacaattagtctgtagtgtgacctgaatattggtgatttagaggagacagataatcaaacacgttgaaataaaagttgtatttgtttttgagcctaaatatcccagttacactttttatgataatcaggtcgtttaattaacagtcaacttagattgaagaaatatgaatatgacaaggtagtttctatgaaaaccaagtcacttgctttggaattactcgcagctggttgaagagtgtaattgaattaagtgagcgaaaggcagctatgaaatttgaaagtcttcaaggactctgcatgcagatttgttcacaaatgtctttattgccatgccattttaaagaaactggaaaccataggttttgcagtgtaggaacagttcatagttttttcaagacccaggtcatgttaataccactcagcagagccttaaccaaagaaaaagtcttattcctacacaggaagatttatataattgaacttaaagtgaaatatattcatggctccctcttttgatcgaatgtttaaatttacctactgcccaattaccagttttttatacactccatccctgtgtatgtatatgtgtggttttatgtagctaatataatcatagactcaaagatgtaatgagtgttgttagagaaaacaaactttgggaaatgatgtgacttgctgaatttcatagactggcactgatgcctttgatttgagtaaaagacccatcatttgggggagtcttttgttagaatcaaaggcatctgtgtcagtccagtgcgttttccagaaatacttgattttggtagtgttttgtgctactgatgatgagctgtacactgcttagaatagatggaacaagtgaggcaatttacaatcctaaactcaaccacatatttgggcctttacttgcctttttaagggattggcattaagtagccatgggacaaaaagagcttctcagtacatattctactttaacactttaaggagtaaggaagcaattgttgtttgtgcctcctgttgccattgtccaaacacccattgtaaacagtgctccgaccctgaaaaaggaatcaataaatcaatatgcattgagtgcctctaa

SEQ ID NO: 9810 - DNA, 1400 bp, Homo sapiens
gtgtttttgaaatgtttcagcacaaccaattaaataggagaatggtttatgtcttcttggaaggctttttagaaaccttatttccacagtataaattccgtgaacttttcaacaaactgcattcacggtcaaagcagatgcagaaatataaacagaaacttcaaactactcaagcgccttctttgcagaaaaggtgacactccactctatgaagctggtgttcattttgtccaggactaatggtatggacagatcttctggggcttaactcaaatactgttgtgtctgcaccagtcttttagtgtctcaaaatagattattaatacatccataagtctgtggttcttctcattctcatctataatccaccactaccaagagagatttctgtgtcttaaatgatttggtgcatattttgcaacattgagagaaaactgcccccatctcaagcaagaatggcgttggtttcttccatttcaaactaatcagcattctccagcaatgacaaagtgccagagtgtatatatgaaagctaaggaaagcacaaaacaatggttcagagataaattggctaatttgtttaacagttggagactgtgcaatgtacgacttggaggagtttgtttggcataatgattttgtaggtctgtcagcattttgatatattgtggattagccaggtgaatgatccttgaaacatctctttcaggtctggagaaagagacagaatgcccttaaagtgtgaaataaccttatacctgaattacagttttgtgatataaaataaagctgagtataaaataaaaccaatcaaacacagaatttgattggatttgttattcattggtatacaacaatttttattcttatgtgtgctttaagggctgtgttttgctcttagggtactcaattttatgtttccttttggcattctttgtgcaaaaagaagcatgtggtggctctcatttaaatttcaaaattattagttttatctttaacagattactgattatacagaagatataatttattggaagaactgccaaatacattttgtccttctaaaaatatggaaatttaaatagtagtctggaaagttaccatatgataatttttaattgtgtgatctagacatgccttaggtaactgcagaaatagcaaattaaatgattaatgagcttattagtcatagtaaacatacagattcctaattctatgacagtgtacatatatgaaaataaatgatgaaaaaagaactataatatttttaaaaatatgcttttatttatatttcacataatgtaaagttctacaaaataaagctagtaggcaagacccctcagtgtatacctttaaacccataaattaattttatatcaataaaataaaatactttctct

SEQ ID NO: 9811 - DNA, 1400 bp, Homo sapiens
aatgaggaatgtttcaaatgcagttaaatcccttcctgatagcttggcagagggaatgactaaaatgtcagacaacatgggcaaaatgtcagaaagattaggtcaagacataaagcaatcattttttaagtgcctcctttaattcctaagactgattcagaccctgaacatcgccgagtttcggctcaacttgacgataatgtggatgacaatattccacttagggtaatgctgcttctcatggatgaagtattcgacttaaaagaaagaaatcagtggttgcgaaggaatatcaaaaacctacttcaacagcttattagagctacatatggcgatactattaatagaaaaatagttgaccatgttgactggatgacttcacctgaacaagtagccgactcagtgaaacgtttcagagatgcattttggccaaatggcattttagcagaggctgttccatgcagagataaaagtattcgaatgagaacaagagtagcaggaaaaacgaaattacttgcaattatgccagatgagctgaagcacattattggggctgagacaacacggaaaggtattcttcgtgtttttgaaatgtttcagcacaaccaattaaataggagaatggtttatgtcttcttggaaggctttttagaaaccttatttccacagtataaattccgtgaacttttcaacaaactgcattcacggtcaaagcagatgcagaaatataaacagaaacttcaaactactcaagcgccttctttgcagaaaaggtgacactccactctatgaagctggtgttcattttgtccaggactaatggtatggacagatcttctggggcttaactcaaatactgttgtgtctgcaccagtcttttagtgtctcaaaatagattattaatacatccataagtctgtggttcttctcattctcatctataatccaccactaccaagagagatttctgtgtcttaaatgatttggtgcatattttgcaacattgagagaaaactgcccccatctcaagcaagaatggcgttggtttcttccatttcaaactaatcagcattctccagcaatgacaaagtgccagagtgtatatatgaaagctaaggaaagcacaaaacaatggttcagagataaattggctaatttgtttaacagttggagactgtgcaatgtacgacttggaggagtttgtttggcataatgattttgtaggtctgtcagcattttgatatattgtggattagccaggtgaatgatccttgaaacatctctttcaggtctggagaaagagacagaatgcccttaaagtgtgaaataaccttatacctgaattacagttttgtgatataaaataaagctgagtataaaataaaaccaatcaaacacag

SEQ ID NO: 9812 - DNA, 600 bp, Homo sapiens
tacactaagcgatgatgaatcttttcttcttgaaattaggcagactcttcaaaacgcactcattcagtttgctactaggtcaaaagaaatagactggcaaccttattttactacacgcattgtagatgactttggcacacacttacgagtattcagaaaggctcaacagaaaataacagagaaagatgatcaagtgaaaggtacagcagaagatcttgtagataccttctttgaagttgaagttgaaatggagaaggaggtttgccgtgatctagtgtgcacttcccccaaagatgaagaaggattcctaagggatttgtgtgaggtcttactatatttattgctacctcctggagatttccagaacaagatcatgcgatactttgtcagggaaatccttgcacgaggaattcttcttccattaataaatcaactcagtgatcctgattatattaatcagtatgtcatatggatggtaggtgccttttaaaattacaactctgttttagaaataatttttgaaatgtaaaaatatagttgggagatagggtgtttaagcagtaatttattaaagaaattaagtaaaaatgtttctgaagt

SEQ ID NO: 9813 - DNA, 600 bp, Homo sapiens
acgagcatgctgccttcaagcatctgtttaacaaagcacatcttgcaccgcccttaatccatttaaccctgagtggacacagcacatgtttcagagagcacagggttgggggtaaggtcacagatcaacaggatcccaaggcagaagaatttttcttagtgcagaacaaaatgaaaagtctcccatgtctacttctttctacacagacacggcaaccatccgatttctcaatcttttccccacctttcccgcctttctattccacaaagctgccattgtcatcctggcccgttctcaatgagctgtcgggcatacctcccagacggggtggtggccgggcagaggggctcctcacttcccagtaggggcggccgggcagaggcgcccctcacctcccggacggggcggctggccgggcgggggggctgaccccccccacctccttcctggacggggcggctggccgggcggggggctgacccccccacctccctcccggacggggcagctggccgggcagaggggctcctcacttcccagtaggggcggccggggcggctggccgggcggggggctgacccccccacaacactgtctctt

SEQ ID NO: 9814 - DNA, 600 bp, Homo sapiens
cataacttactatgaccttgaattcctgggtacaaggaattctcctgtctcagccttctgaatagctggaacaacaggcacacaccactacacctagctactttatttattttttttattttttgtagggacaggggtcccactatgttgcctaggttggtctcgaattcttggcctcaagtgatcctcctgccttagcctcacaaagcattgggattagaggtgtgagccacggcatctagccatgcttaaacatttttcatttctttttctttttttttaagacggagtttcgctcttgttgcccaggctggaatgcagtggcactatcttagctcactgcaacctccacctcctgagctcagattctcgtgcctcagccttcctagtagctaggattacaggcacctgccaccatgcctggctaattttttgtattttttttagtagagacggggtttcaccatgttggccagggtggtctcaaactcctgagctcaggcaatccgcccacctcagcctcccaaagtgctgggattacaggcatgagccaccgcggctggcccatgcttaaacatttttaacaccttccaaccatgt

SEQ ID NO: 9815 - DNA, 600 bp, Homo sapiens
atttgctcatacagcaggccatagaccccaaaaatctcagccgacttttcccaggatggaaagcttgggtgtgatcttcagtatatgaattaccctttcattcagcctttagaaattatattttagcctttatttttaacctgccaacatactttaagtagggattaatatttaagtgaactattgtgggtttttttgaatgttggttttaatacttgatttaatcaccactcaaaaatgttttgatggtcttaaggaacatctctgctttcactctttagaaataatggtcattcgggctgggcgcagcggctcacgcctgtaatcccagcactttgggaggccgaggtgagcggatcacaaggtcaggagttcgagaccagcctggccaagagaccagcctggccagtatggtgaaaccctgtctctactaaaaatacaaaaattagccgagcatggtggcgggcacctgtaatcccagctactcgagaggctgaggcaggagaatctcttgaacctgggaggtgaaggttgctgtgggccaaaatcatgccattgcactccagcctgggtgacaagagcgaaactccatctcaaaaa

SEQ ID NO: 9816 - DNA, 600 bp, Homo sapiens
cctccctggccaacacccaggagcccagcagaagcacccacacgtagaaagaggctcactacagccagaagtgcagagtcagagtcctgggaccatcttgttctgcaaggtgaccccaggctccccaggacaggggagagggatcgtcctcattcagactctagctggggcctctgtactggcttctccctgggtggggttgcctgttacatagctgtgcctcagagaaagggtcctgcattttctggaatgttctctgtgcttacccctctgtgtgcccctccattgctcctctacaagcaattaggtgattcaaaagagcaacttaggctgggtgcagtgactcacacccgtaatcccggcactttgggaggccgaggcgggcagggacaggagttcaagaccagcctggccaacatggtgaaaccctgtctctacaaaaaatacaaaaattaaccagacattgtggcatgtgcctgtaatcccagctactcaggaggctgacacaggagaattgcttgaaccaggaggcggaggctgcagtgagctgagattgtgccactgcactccagcctgggcaacagaacgagactctgtctc

SEQ ID NO: 9817 - DNA, 600 bp, Homo sapiens
ttaatcccacttgcccctgttacctaattagagcagatgacccctcccctaatgcctgcggagttgtgcacgtagtagggtcaggccacggcagcctaccggcaatttccggccaacagttaaatgagaacatgaaaacagaaaacggttaaaactgtccctttctgtgtgaagatcacgttccttcccccgcaatgtgcccccagacgcacgtgggtcttcagggggccaggtgcacagacgtccctccacgttcacccctccacccttggactttcttttcgccgtggctgcggcacccttgcgcttttgctggtcactgccatggaggcacacagctgcagagacagagaggacgtgggcggcagagaggactgttgacatccaagcttcctttgtttttttttcctgtccttctctcacctcctaaagtagacttcatttttcctaacaggattagacagtcaaggagtggcttactacatgtgggagcttttggtatgtgacatgcgggctgggcagctgttagagtccaacgtggggcagcacagagagggggccacctccccaggccgtggctgcccacacaccccaattagc

SEQ ID NO: 9818 - DNA, 1400 bp, Homo sapiens
acatgaaaacagaaaacggttaaaactgtccctttctgtgtgaagatcacgttccttcccccgcaatgtgcccccagacgcacgtgggtcttcagggggccaggtgcacagacgtccctccacgttcacccctccacccttggactttcttttcgccgtggctgcggcacccttgcgcttttgctggtcactgccatggaggcacacagctgcagagacagagaggacgtgggcggcagagaggactgttgacatccaagcttcctttgtttttttttcctgtccttctctcacctcctaaagtagacttcatttttcctaacaggattagacagtcaaggagtggcttactacatgtgggagcttttggtatgtgacatgcgggctgggcagctgttagagtccaacgtggggcagcacagagagggggccacctccccaggccgtggctgcccacacaccccaattagctgaattcgcgtgtggcagagggaggaaaaggaggcaaacgtgggctgggcaatggcctcacataggaaacagggtcttcctggagatttggtgatggagatgtcaagcaggtggcctctggacgtcaccgttgccctgcatggtggccccagagcagcctctatgaacaacctcgtttccaaaccacagcccacagccggagagtccaggaagacttgcgcactcagagcagaagggtaggagtcctctagacagcctcgcagccgcgccagtcgcccatagacactggctgtgaccgggcgtgctggcagcggcagtgcacagtggccagcactaaccctccctgagaagataaccggctcattcacttcctcccagaagacgcgtggtagcgagtaggcacaggcgtgcacctgctcccgaattactcaccgagacacacgggctgagcagacggccccgtggatggagacaaagagctcttctgaccatatccttcttaacacccgctggcatctcctttcgcgcctccctccctaacctactgacccaccttttgattttagcgcacctgtgattgataggccttccaaagagtcccacgctggcatcaccctccccgaggacggagatgaggagtagtcagcgtgatgccaaaacgcgtcttcttaatccaattctaattctgaatgtttcgtgtgggcttaataccatgtctattaatatatagcctcgatgatgagagagttacaaagaacaaaactccagacacaaacctccaaatttttcagcagaagcactctgcgtcgctgagctgaggtcggctctgcgatccatacgtggccgcacccacacagcacgtgctgtgacgatggctgaacggaaagtgtacactgttcctgaatattgaaataaaacaataaactttt

SEQ ID NO: 9819 - DNA, 600 bp, Homo sapiens
ccacccagctgacccagggagccgcccccacttgatccgcctcttttcccgagatgccccggggagggaggacaacaccttcaaagacaggccctctgagtccgacgagctccagaccatccaagaagacagtgcagccacctccgagagcctggatgtgatggcgtcacagaagagaccctcccagaggcacggatccaagtacctggccacagcaagtaccatggaccatgccaggcatggcttcctcccaaggcacagagacacgggcatccttgactccatcgggcgcttctttggcggtgacaggggtgcgcccaagcggggctctggcaaggtgagctctgaggagtagaggagttttagtttaaatggaaaaagcaaaggagaaatcagtaggtgaactcagccattagaggaagaactggcacgtagcctcttgctgtctaaggtctcgttccgtgctggagaatgcatatgagcccaagagtgtgggcctgagtggctgcttaggacgttttcgtttaactcaccccctcttttcctcacaagggatggtggccggggtgtggctcaggaatgtaaggacatgctgaattc

SEQ ID NO: 9820 - DNA, 1400 bp, Homo sapiens
tgatgttaagaatgaccgttacattgtcaatggatctcatgaggcgaataagctgcaagacatgttggatggattcattaaaaaatttgttctctgtcctgaatgtgagaatcctgaaacagatttgcatgtcaatccaaagaagcaaacaataggtaattcttgtaaagcctgtggctatcgaggcatgcttgacacacatcataaactctgcacattcattctcaaaaacccacctgagaatagtgacagtggtacaggaaagaaagaaaaagaaaagaaaaacagaaagggcaaagacaaggaaaatggctccgtatccagcagtgagacaccaccaccaccaccaccaccaaatgaaattaatcctcctccacatacaatggaagaagaggaggatgatgactggggagaagatacaactgaggaagctcaaaggcgtcgaatggatgaaatcagtgaccatgcaaaagttctgacactcagtgatgatttggaaagaacaattgaggagagggtcaatatcctctttgattttgttaagaaaaagaaagaagagggtgttattgattcatctgacaaagaaatcgttgctgaagcagaaagactggatgtaaaagccatgggccctcttgttctaactgaagttctttttaatgagaagattagagaacagattaagaaatacaggcgccatttcctacgattttgtcacaacaacaaaaaagcccaacggtaccttcttcatggtttggagtgtgtggtagcaatgcatcaagctcagcttatctccaagattccacatatcttgaaggagatgtacgatgcagaccttttagaagaagaggtcatcatcagctggtcggaaaaggcctctaagaaatatgtctccaaagaacttgccaaagagattcgtgtcaaagcagaaccatttataaaatggttgaaggaggcagaggaagaatcttctggtggcgaagaagaagatgaagatgagaacattgaggtggtgtattcgaaggctgccagtgtaccgaaagttgagactgtaaagtcagacaacaaggatgacgacatcgatattgatgccatttaaagggatggatgcaacctagcttaacagtataatgctgcaaattttcctccattatcagccagaagtgcaacatgtatgtgcaaaagctaaaatggcttaacatcatgctacactttacactaaaaatctattactgtgagtggtctgttattaagcccaatgagacatctagggagtccatacacatcagtgagcagatgtagtttgcttatttatagcatgtttctttttgaaaaactagtggtggacacatttggatcacatttatacagttataaaaataaaggtttgattttggtcgttc

SEQ ID NO: 9821 - DNA, 600 bp, Homo sapiens
tataaggaaaatggagactgagaaaattctgtttaatttggtgattgggaggcagttggtacctttcaagataccaattaaatgagagcataagtaaaaggtttgctcagtatatctatctttaacacaaagatgaatgtctttattttatataaaattactgtccttttttttcttgacatgtttttatttccttttctccccttaccataatggatgctctgtgaaaacaagggctttgttttatcttgttttatttactgctacatctgccatcaccgagaacagtatgtgtagcaggcttacaagaaatacttgtggccgggcgcggtggctcacgcctgtaatcccagcactttgggaggccgaggcgggcggatcacgaggtcaggagatcgagaccatcccggctaaaacggtgaaaccccgtctctactaaaaatacaaaaaattagccgggcgtagtggcgggcacctgtagtcccagctacttgggaggctgaggcaggagaatggcgtgaacccgggaggcggagcttgcagtgagccgagatcccgccactgcactccagcctgggcgacagagcgagactccgtctc

SEQ ID NO: 9822 - DNA, 600 bp, Homo sapiens
gcacagcaggttactcagcagtttgtgcctcctacacagtcaaagaaagagaaaaaagataaagtagaaaaagaaaaaagtgaaaaggaaacaactagcaaaaagaatagccataagaaaaccaggccaagattgaaaaatgtggatcggagtagtgctcagcatttggaagttactgttggagatctgacagtcattattacagactttaaggagaaaacaaagtcaccgcctgcatctagtgctgcttctgcagatcaacacagtcaaagcggctctagctctgataacacagagagaggaatgtccaggtcatcttcacccagaggagaagcctcatcattgaatggagaatctcattaaagtttattttctccaatttcttagtcacttctgtcctaccatgcaaatacacagattatgccaagaggtaccacattttcatgacagatacattcatgcacaatccataatttgagttttacataaaatagaaatttgttagaatttgttagattttattgcaatgatgcctaccaaacatttccagacttaacattttggtctctgcagttaagtgccatgaaaatgtggttgaat

SEQ ID NO: 9823 - DNA, 1400 bp, Homo sapiens
cagggcatggccccatctctccttttagcctctgtgtttcattaggcattcatcctgccaaccagggcaggcccggcgtctgggctctgggaacaaatggggcccacatcctggagtggcaaattttgggggatgcgctacctgtcccagctggccctgtgcctccaacccagagctccccacagacctggtgtaatttcacaagggccatccctttccccaggcttccctgagggaggcggaagtttgaacccttatgtggggttcattgggctagggtagtggtatgaggtttaaaactatttaaggattaggaggagaaagagtcttcaggaaactcttgtttcactggactctgcagcctgcagaactggggcaagggtaggagttccagtaggggaaggagcaggtagactcttcagctgcctcagctgggactgaagacctaagctgattctctttcctctccactcctaagaagcaattttctgttcctctccttccaccactttttactttctgctatctcccatctcccgcttcccttccatttcctttctagaaaaccctggtatttagctcaggccaaactgcctcagcagaaaggtggccttggacaaaactggtccaagaatttgaagtggcagtacttgcggattggctctgtccagcaaggcctcagctgcttgttgcgtctgctttccctcccctaacagaagggtaccctggcttattcaggggactccttagtccacactgtgtcacctgcatgccttaatctttcattgctggggtgtggccttgggagatcctgggccagcccctccacacatctccctaagtcagagtggctgctggccctggtagatttgacttgctcttgcctcactcgacctccaaagtgggactgaagacagtggtcaagagacttgagttcgggacagtaagccaggggttaaggttctttcctttttttgaaagccaaagacccagtttgcattgtgctgctgcattcatggttagaagctttccatgcctaggttctagggaatttatttttctatgtgtatatattttcaaactttgtttcctgggtactgggcatgtgcctgtctgagccccaggtctgtctacaccccaccattcattctgtctgtctgttccctggacactgcctaaaagggtctcaagacagtgccctgtgggttcctaggactagggcccatcactgttctcttctgctgggaaatgcagctttaaaatggctaaccacagcagagggcagatgcttgatagattatcttttccttgctttcttgtttctgttttgaaagtgaaatggggttttaaattgttatttaaactctttttccaaataaaggtttaccttttttcccccc

SEQ ID NO: 9824 - DNA, 600 bp, Homo sapiens
tggatgttatgatgggaacgttcacaaagagttttggtgcttctggaggatatattggaggcaagaaggagctgatagactacctgcgaacacattctcatagtgcagtgtatgccacgtcattgtcacctcctgtagtggagcagatcatcacctccatgaagtgcatcatggggcaggatggcaccagccttggtaatggcatcactattcatgaagttgtccaaacaagaaatacctatcatcgtttctctcctttatcccctgtatttagtcaccagtgcctatggatcatgcttccttaatatctttgaacctgtctacttctccatatctcattgttatttacttgacttagatttctgtccactttcacctggttttaatagccagccagtcataatagtagaggaatcagtcaagcaaaaatgctttggaagaattaaataagcaatgctgaacatcaggaattgtagatatccgtacagagagttccagtaaaattttatgagtccacgaccccttttctaagcagtctggtccatgttggtctcatacctcatatgcaggattcattcattcattaaatatttgtttcat

SEQ ID NO: 9825 - DNA, 1400 bp, Homo sapiens
atataaaatcctgcatacttcatttcctgtgagcttgaacagctgctgttgtgttttggggatgcttgatcatctttgcactctgccttaaagattgaaaaatcaaaactcttgttagggtatctaaacatttttgagtgtgaactggggattggaagttaatacaaaaaaatttcaaattatttctattgtaaatgaataagctagtcatggctaggataatccattttcatgtatttatgcaataaactgaattttaaggcaaaaacaacacttttctatatagtgtatgcaggacagattttagaaacttagattaaaatacaaatcccattacatttggttaaaatgaaaatctctgcttaatggaaaaaatactaatctttagcctattttgagtctataagatatatttcattttagacatgccttctaagttgttcacagatttttacctgctaaaacaatattatttccagtaaaacctctcctaacaggaaaagtggagttcaaaatatccaattggagaaaaattcagagttccttcattaaatataatttttttcatctagtatgtactatttcaagaagtgcaaaaagtaatgatagtgaatgtgataccatacttaactaaggtaatatatatccttagtttgctcaaaagagtcctggttattcctgttttctcagcttaatagtgcctcatcgtactctcaaaagtgttctaatttggaggataagttatatgatcatcctgtgtataattgtagactgtaccaagaagcaactaccttagctccactgccctttgagggatggaactggggtaagggcaggagccagttattattgccacagtgttttctaatgaaccatttggcctgtagaagaggaatagtattttttttaatagttgtatttgaatgattccagcttatcgtaaatactaaactgaatggcttttatatttttaactgctgttaaatgttattttagcatttattagttgtttattatttaattcttcaaatagtcatatgaaaacatatatttgataaaggtcaattgttagatgataatgtgccattcattatcataggaatgtccttgcccatatataaaacatgctggcatgtattttacttgttaataaagttgtatagatgtggaagtgtgaacctgtgatgcatccttttcaaaatcagtttaagattcgcatattatcatgactgtgacctcactaaactgtttatgtgacaaacctttcaagattggagatgaaaacaacacttgtgaaattaggttggggttgcaacatcttttaacttctcagttatttgtatgtcaggagacagattgtggtttaattttaataaacaaaatatcatctttttgaaaat

SEQ ID NO: 9826 - DNA, 1400 bp, Homo sapiens
ataggctcagttagaaaaggactccctggccaggcgcagtgacttacgcctgtaatctcagcactttgggaggccaaggcaggcagatcacgaggtcaggagttcgagaccatcctggccaacatggtgaaaccccgtctctactaaaaatataaaaattagctgggtgtggtggcaggagcctgtaatcccagctacacaggaggctgaggcacgagaatcacttgaactcaggagatggaggtttcagtgagccaagatcacaccactgcactccagcctggcaacagagcgagactccatctcaaaaaaaaaaaaaaaagtaagaaagaaaaggactcccttagaatgggaaagaaaaatcataaaatattgagctgatgcctgtatatagaaattaagcgtttctcgaaagctgttctatgttttgctgttattttagtctttattctcttcctttaggtggagaaacaaagtaccaatttgaagggattttttttattttgtcttttggtttctgtcagtagaaataaccatatgtgctaaccaaatttctgtgaagaatgttttcatggttatcattatatctaactataacctcccccatagttatgaagagtaacctgaaatgccactattgtggaaataggataattgtaattgtgaaaaaataattttaaggaaatcttacaagtattacattaaaaagatactatgactgccacctgccatttaccttctaataaccctgccatgtggtttgcagaaagagatggatatagtagcctcagaagaaatattttatgtgggttttttgtttttcgttactagatttcatggatgaggggatatggttgaccttttactttttaatggagcagccagtttttgttaattactcacttgtaaattgtgagattctgaattccttacctgctattcttgtacttgtctcaggccaaatctatgctgtggttcttatgagacttgtatgaagatgccctgatttgtacagattgaccacgggaatactactgccatgtaatctgtatagttccagataatttgtcatgaacattgacagaatgacaattttttgtatttgctttttctccctttaagagcacattcttctgtaaggagaaaggcagcattctggctaaaatgtgtagaaggtaatttactacacttataaaatagtgtgacttttgtgaaaattttgaattagctttcatatgaagtgccttaagtagactcttcatttacttttctggtaatggtttaaatatcatttgttatgcatttttaagatacagttcagaatgacacattgtagtggcaaagataaccaaatgtctggctgtttgctttttgaccatatcaataaacttttacaatct

SEQ ID NO: 9827 - DNA, 1400 bp, Homo sapiens
aaaatgtattacattttattttttcttaatccagttctgcaaaaatgacctataaatttattcatgtacaattttggttacttgaattgttaaagaaaacattgtttttgactatgggagtcaactcaacatggcagaaccatttttgagatgatgatacaacaggtagtgaaacagcttaagaattccaaaaaaaaaaaaaaaaaaaaaaaaaagaaaactgggtttgggctttgctttaggtatcactggattagaatgagtttaacattagctaaaactgctttgagttgtttggatgattaagagattgccatttttatcttggaagaactagtggtaaaacatccaagagcactaggattgtgatacagaatttgtgaggtttggtggatccacgcccctctcccccactttcccatgatgaaatatcactaataaatcctgtatatttagatattatgctagccatgtaatcagatttatttaattgggtggggcaggtgtgtatttactttagaaaaaatgaaaaagacaagatttatgagaaatatttgaaggcagtacactctggccaactgttaccagttggtatttctacaagttcagaatattttaaacctgatttactagacctgggaattttcaacatggtctaattatttactcaaagacatagatgtgaaaattttaggcaaccttctaaatctttttcaccatggatgaaactataacttaaagaataatacttagaagggttaattggaaatcagagtttgaaataaaacttggaccactttgtatacactcttctcacttgacattttagctatataatatgtactttgagtataacatcaagctttaacaaatatttaaagacaaaaaaatcacgtcagtaaaatactaaaaggctcatttttatatttgttttagatgttttaaatagttgcaatggattaaaaatgatgatttaaaatgttgcttgtaatacagttttgcctgctaaattctccacattttgtaacctgttttatttctttgggtgtaaagcgtttttgcttagtattgtgatattgtatatgttttgtcccagttgtatagtaatgtttcagtccatcatccagctttggctgctgaaatcatacagctgtgaagacttgcctttgtttctgttagactgcttttcagttctgtattgagtatcttaagtactgtagaaaagatgtcacttcttcctttaaggctgttttgtaatatatataaggactggaattgtgtttttaaagaaaagcattcaagtatgacaatatactatctgtgttttcaccattcaaagtgctgtttagtagttgaaacttaaactatttaatgtcatttaataaagtgaccaaaatgtg

SEQ ID NO: 9828 - DNA, 1400 bp, Homo sapiens
cagatgtcctcaggtagaagaggccattgtccagagtggacagaaaaagctggtacttatattaaataaatcagatctggtaccaaaggagaatttggagagctggctaaattatttgaagaaagaattgccaacagtggtgttcagagcctcaacaaaaccaaaggataaagggaagataaccaagcgtgtgaaggcaaagaagaatgctgctccattcagaagtgaagtctgctttgggaaagagggcctttggaaacttcttggaggttttcaggaaacttgcagcaaagccattcgggttggagtaattggtttcccaaatgtggggaaaagcagcattatcaatagcttaaaacaagaacagatgtgtaatgttggtgtatccatggggcttacaaggagcatgcaagttgtccccttggacaaacagatcacaatcatagatagtccgagcttcatcgtatctccacttaattcctcctctgcgcttgctctgcgaagtccagcaagtattgaagtagtaaaaccgatggaggctgccagtgccatcctttcccaggctgatgctcgacaggtagtactgaaatatactgtcccaggctacaggaattctctggaattttttactgtgcttgctcagagaagaggtatgcaccaaaaaggtggaatcccaaatgttgaaggtgctgccaaactgctgtggtctgagtggacaggtgcctcattagcttactattgccatccccctacatcttggactcctcctccatattttaatgagagtattgtggtagacatgaaaagcggcttcaatctggaagaactggaaaagaacaatgcacagagcataagagccatcaagggccctcatttggccaatagcatccttttccagtcttccggtctgacaaatggaataatagaagaaaaggacatacatgaagaattgccaaaacggaaagaaaggaagcaggaggagagggaggatgacaaagacagtgaccaggaaactgttgatgaagaagttgatgaaaacagctcaggcatgtttgctgcagaagagacaggggaggcactgtctgaggagactacagcaggtgaacagtctacaaggtcttttatcttggataaaatcattgaagaggatgatgcttatgacttcagtacagattatgtgtaacagaacaatggctttttatgattttttttttaacattttaagcagactgctaaactgttctctgtataagttatggtatgcatgagctgtgtaaattttgtgaatatgtattatattaaaaccaggcaacttggaatccctaaattctgtaaaaagacaattcatctcattgtgagtggaagtagttatctggaataaaaaaagaagatacctattg

SEQ ID NO: 9829 - DNA, 600 bp, Homo sapiens
gttacataaaatataaggaaatctttatactattttacagtaaccacaatctaaatatttacatatacccaaaattaacttatgctcatatattaggatgtgagaatatcatctgtttatggacacatgaaacctcctaatgacctggaattgttagaatatttgactttttatatgcaaagtttttcaaccaagtggtttgtctaatatttaaacatgtactggcacaatttgtgatgaaaatattagcacatttgcaataatgtttctccataacagagaatgttaatggataccagaattttatttttgtatttatgttcatagtacttttcctcttgtctactccagacagttattccataaagcatttgtataattaaaaggaaaacagaaaaaggaaaagtaggcaaatgtgaaaatagtttcaatatatcttatgatttcttaatgtaaaatgttttgttgaagtatatggctatcatgactaagtgctagaatttatagttacaggcggtgtccttttaaatgtggaaaggcttttaaaatattttaaaactggacctgtattatcctgaatacactattttgaaaattttt

SEQ ID NO: 9830 - DNA, 1400 bp, Homo sapiens
gatcaatcagctaataataataatgtcttcacaaagaaaacggggaatcagcagaaagtgaatgatgcttcagtaaacacagacccagccacttctgcctctactgtagatgtaaagccatcaccttctgcagcagaggcagattttgacatagtaacaaaggggcaagtctgtgaaatgaccaaagaaattgctgacaaaacagaaaagtataataaatgtaaacaactcttgcaggatgagaaagcaaaatgcaataaatatgctgatgaacttgcaaaaatggagctgaaatggaaagaacaagtgaaaattgctgaaaatgtaaaacttgaactagctgaagtacaggacaattataaagaacttaaaaggagtctagaaaatccagcagaaaggaaaatggaaggtcagaattcccagagtcctcaatgtttcaaaacatgctcagagcaaaatggttatgttctcacattgtcaaatgcacaaccagttctgcaatatggtaatccttatgcatctcaggaaacaagagatggagcagatggtgctttttacccagatgaaatacaaaggccacctgtcagagtcccctcttggggactggaagacaatgttgtctgcagccagcctgctcgaaactttagtcggcctgatggcttagaggactctgaggatagcaaagaagatgagaatgtgcctactgctcctgatcctccaagtcaacatttacgtgggcatgggacaggcttttgctttgattccagctttgatgttcacaagaagtgtcccctctgtgagttaatgtttcctcctaactatgatcagagcaaatttgaagaacatgttgaaagtcactggaaggtgtgcccgatgtgcagcgagcagttccctcctgactatgaccagcaggtgtttgaaaggcatgtgcagacccattttgatcagaatgttctaaattttgactagttactttttattatgagttaatatagtttagcagtaaaaaaaaaaaaaaaaaccacacctaaaatagaccactgaggagaccatagagcggatgctttcatgcaccctttactgcactttctgaccaggagctactttgagtttggtgttactaggatcagggtcagtctttggcttatcaataaattttaatctctgttaatcttacctgctttaaaaaaaagttcttgtgtgttcgtatctttatttattccctagtttgcagaactgtctgaataaaggatacaaggattatttcaatgttactgcactgaaaaacgtgtatgtattagtgtgctagattatttagcagaatattcacaagtttctgttgaccttgttgattgagcatgactactaaatattatgtaataaaaagcatttgtcataac

SEQ ID NO: 9831 - DNA, 600 bp, Homo sapiens
tctgccctttagaatggcttgtcccatcagcagatgaatgtgttaagcacaaagcatcttccttaaagcacaaagagagggactaactgatgctgcatctagaaaacacctttaagttgcctttcctctttgtagttagcgttcaggcaggtgacgtgtggaaagtctagggggttccattctggccatgcgagcccagctcctaccaacgtcggtaacttgagcagtccctgttgctggccagagactgcctggtcgccagcgctcaccatgggtgccaggatgcttcgcagaggcactgtgctcacggttggacttggtgtcagtgggaaagggcagtgtggggactgtcatttttgtgatttaataacacacagtgaaaatccaggaagaatgaattaagcttcttctgggagttgtttattcctgctcgtgcttaagattgatgatttcgtgaaataaagaacatcatttcatttaagagatcatttcattaagatctctaatctgttttgagtctttacaaaatagccagttataaaatggggcttgatttgtttagactgaaggaagacgttttcccaaaatatactacagaag

SEQ ID NO: 9832 - DNA, 1400 bp, Homo sapiens
tttcatgtcagaagattgcgagcaccttatccgaaggatgttggtcctagacccatccaaacggctaaccatagcccaaatcaaggagcataaatggatgctcatagaagttcctgtccagagacctgttctctatccacaagagcaagaaaatgagccatccatcggggagtttaatgagcaggttctgcgactgatgcacagccttggaatagatcagcagaaaaccattgagtctttgcagaacaagagctataaccactttgctgccatttatttcttgttggtggagcgcctgaaatcacatcggagcagtttcccagtggagcagagacttgatggccgccagcgtcggcctagcaccattgctgagcaaacagttgccaaggcacagactgtggggctcccagtgaccatgcattcaccgaacatgaggctgctgcgatctgccctcctcccccaggcatccaacgtggaggccttttcatttccagcatctggctgtcaggcggaagctgcattcatggaagaagagtgtgtggacactccaaaggtcaatggctgtctgcttgaccctgtgcctcctgtcctggtgcggaagggatgccagtcactgcccagcaacatgatggagacctccattgacgaagggctggagacagaaggagaggccgaggaagaccccgctcatgcctttgaggcatttcagtccacacgcagcgggcagagacggcacactctgtcagaagtgaccaatcaactggtcgtgatgcctggggcagggaaaattttctccatgaatgacagcccctcccttgacagtgtggactctgagtatgatatggggtctgttcagagggacctgaactttctggaagacaacccttcccttaaggacatcatgttagccaatcagccttcaccaaaatctctgaaggggaaagaagtggagagaaaggtttgcttcacttcggggactgcagtttgagaaataaaagggatacagagatatctgcactttgtagaaagggcaagattatttgcttatatctgaagggaggtgggtggttttgctggatgtttggtctgaaagagttacttttgataaagttaatctaactgtagttatattttctgtgtgcttttttttaattactaagaaaaaaattggtgagttcagtagctttggtattatgagtgcaaatcataatagctccaatgtgaaaaaaaaaatcaaaagtataacttgtcacttaatgttagaaaattgcctaaaatgcagtgtaataaataatctctgtaccaaatagtaatttaaatggggtaattttctgcaaggaaaatgtactgtttttatgtttccaaccctcttgaattaaaataaaaacaacttcttttct

SEQ ID NO: 9833 - DNA, 600 bp, Homo sapiens
ggtcacttctgacagagtgtgccgtctctgcccgctgcgtgtggactgaaatgcctcaaaggcatgagcggggtcttcctcggcctctccttctgtctccagcccttcgtcaatggaggtctccatcatgttgctgggcagtgactggcatcccttccgcaccaggacaggaggcacagggtcaagcagacagccattgacctaaacgccaggggagagaggaaactcagtttctgcactgctgagacagaaaaatccacaaaggaaaacatgtcaagacttgtggcgaactagaaattaagtaaaatatttaaacatgcacatatttattatgcatgacaacacatagattagaagtgaaggcaagtcaactgcaggactcagaactctgagacagaagcccatgatgacccaaactggcactgctgcccaggtttctctgagtcatcattattacaataaacaacttttttagtggtttccagaagaacaggggtatattagtttgaggactaccagttattatttttttttaaataagggaaatgaagagggggaagatgagttgtttttttttttttaactacttggctcattgct

SEQ ID NO: 9834 - DNA, 1400 bp, Homo sapiens
aaagtcaaccagacgttaaagcatttatggcttatccagaatcagatcacagctaaggggactgcccagctggcagatgcgttacagagcaacactggcataacagagatttgaacttgtttggaacttgtcataaaatcgatcagtttggtgaattgcaaccaacaatatttaaaaagaaaacagaacagaacaaaatatcaggatgcaatgtgcatgcctaaatggaaacctgataaaaccagaggaggccaaagtctatgaagatgagaagcggattatctgtttctgagaggatgctttcctgttcatggggtttttgccctggagcctcagcagcaaatgccactctgggcagtcttttgtgtcagtgtcttaaaggggcctgcgcaggcgggactatcaggagtccactgcctccatgatgcaagccagcttcctgtgcagaaggtctggtcggcaaactccctaagtacccgctacaattctgcagaaaaagaatgtgtcttgcgagctgttgtagttacagtaaatacactgtgaagagactttattgcctattataattatttttatctgaagctagaggaataaagctgtgagcaaacagaggaggccagcctcacctcattccaacacctgccatagggaccaacgggagcgagttggtcaccgctcttttcattgaagagttgaggatgtggcacaaagttggtgccaagcttcttgaataaaacgtgtttgatggattagtattatacctgaaatattttcttccttctcagcactttcccatgtattgatactggtcccacttcacagctggagacaccggagtatgtgcagtgtgggatttgactcctccaaggttttgtggaaagttaatgtcaaggaaaggatgcaccacgggcttttaattttaatcctggagtctcactgtctgctggcaaagatagagaatgccctcagctcttagctggtctaagaatgacgatgccttcaaaatgctgcttccactcagggcttctcctctgctaggctaccctcctctagaaggctgagtaccatgggctacagtgtctggccttgggaagaagtgattctgtccctccaaagaaatagggcatggcttgcccctgtggccctggcatccaaatggctgcttttgtctcccttacctcgtgaagaggggaagtctcttcctgcctcccaagcagctgaagggtgactaaacgggcgccaagactcaggggatcggctgggaactgggccagcagagcatgttggacaccccccaccatggtgggcttgtggtggctgctccatgagggtgggggtgatactactagatcacttgtcctcttgccagctcatttgttaataaaatactgaaaacactc

SEQ ID NO: 9835 - DNA, 600 bp, Homo sapiens
cattccagtttccaaagcgagaggagccttctgagcagaagtatgcaagactgattctgtttggaacagtttcctatttggctgcattctaggaggcctcctgacttattcatagtattgtcgcctggtggcattggtgtggggtagcttgtcctgctacttgctaaagttctctttctttgagaaaactgaggaaccagaatgcttagagttcataaaataatctctaaaccatgttaggttaaaacaaaatgaccatctcacaaaaacgagtttagttgaatgctcaattccttacaaaatcttcatttaaggctgagtgtggtggctcatgcctgtaattccagcactttgggaggccgaggcaggaagactgcttgagcccaggagttcaagaccagcctgggcaacataggaagactccgtctctacatagaaattttattataaaagtagctggggatggtggcacacacctgtagtcccagctactcaggaggttgaggtgggaagattgcttgagcccaggagtttgaggttgcagtgagctgatcatgccactgcactctagcctaggctacagagcaggaccccatctcc

SEQ ID NO: 9836 - DNA, 1400 bp, Homo sapiens
cgggctgaagcgactgagtccgcgatggagagagaaaaggaacagttccgtaagctctttattggtggcttaagctttgaaaccacagaagaaagtttgaggaactactacgaacaatggggaaagcttacagactgtgtggtaatgagggatcctgcaagcaaaagatcaagaggatttggttttgtaactttttcatccatggctgaggttgatgctgccatggctgcaagacctcattcaattgatgggagagtagttgagccaaaacgtgctgtagcaagagaggaatctggaaaaccaggggctcatgtaactgtgaagaagctgtttgttggcggaattaaagaagatactgaggaacatcaccttagagattactttgaggaatatggaaaaattgataccattgagataattactgataggcagtctggaaagaaaagaggctttggctttgttacttttgatgaccatgatcctgtggataaaatcgtattgcagaaataccataccatcaatggtcataatgcagaagtaagaaaggctttgtctagacaagaaatgcaggaggacctggaggtggcaattttggaggtagccccggttatggaggaggaagaggaggatatggtggtggaggacctggatatggcaaccagggtgggggctacggaggtggttatgacaactatggaggaggaaattatggaagtggaaattacaatgattttggaaattataaccagcaaccttctaactacggtccaatgaagagtggaaactttggtggtagcaggaacatggggggaccatatggtggaggaaactatggtccaggaggcagtggaggaagtgggggttatggtgggaggagccgatactgagcttcttcctatttgccatgggcttcactgtataaataggagaggatgagagcccagaggtaacagaacagcttcaggttatcgaaataacaatgttaaggaaactcttatctcagtcatgcataaatatgcagtgatatggcagaagacaccagagcagatgcagagagccattttgtgaatggattggattatttaataacattaccttactgtggaggaaggattgtaaaaaaaaatgcctttgagacagtttcttagctttttaattgttgtttctttctagtggtctttgtaagagtgtagaagcattccttctttgataatgttaaatttgtaagtttcaggtgacatgtgaaaccttttttaagatttttctcaaagttttgaaaagctattagccaggatcatggtgtaataagacataacgtttttcctttaaaaaaatttaagtgcgtgtgtagagttaagaagctgttgtacatttatgatttaataaaataattctaaagg

SEQ ID NO: 9837 - DNA, 1400 bp, Homo sapiens
ttttgcatctattgtagaagaagaactacaacaagaagcagctcttattagaagtcgagaaaaaccgttggctctgattcagattgaggagcatgccatacaagatttattggttttctatgaggcatttggcaaccctgaagagtttgtcattgttgaaaggacaccgcagggaccactggcagtacctatgtggaataagcatggatgctagttcactgtggagttgagatgcattttacataattatgagtttgttcatataaagaaaagctgtggaaaagagtcttagagattttgtaatatcattctaaatagattaagaaaagatataatttctttactgcagttaaatcatataatgtttgtatgattaaaaataaatttctcagaattgtgattttagtaactttatataaaatgtgtgagacaaaaacttattaaggttaaatagaattgtttcttctgaataatctaacaaaggaaaatataagtgattgaatcataagatataaggggggtaaagtattaaaaataacttttttgtttgataacttgagaatttagaagattttgccaagtatgtgttgttgcttgacttcttaaatatggcattgatgaatttaaagtaggagcatcagttattacttctgattcattaatggccagaattttgtgtttggtgtaatagttgtgtcaccattcttgttgctttttaaaaatcaggctaatcatgtggtccatgtctcttcaaagcttgacctgcacaaatgccatatttctatttggaccacatattctccattttgcattgagcagtagagtacagtggaaagggaataagaatactgattattctgaacagtttagtcccaagagaatagcgttttaaaaaagaaaaacaagatttggagtcattgtgggttatttttggtgggatggaggatcttaaaaatgcctaattgtgagagaatcaattgctgaaagtgttaaaatttctgaaaataaatgcttaattacatatacaggaattaaatagtttggaagagggttggattatcattacctttacaatactgtataatcagaagttctctgaacctcaattgtatatctagacataaaaattgttttctgtataggatgttgtttggtttgtttctgagtgtttaaattttgcaaaaacaaatgttaaatttgtgcttcagtacctagataaattggaaaggttaatgttctagtttctggaaggtaagcctgggagacacataagcaattcactgctataatttagttgatgtaaaatgacggaaactgactcaatatgtcaggtttaactctgcccaaaagcagcagacatgtaagcagatgtgcaataaaaaatgatcttgatccatttc

SEQ ID NO: 9838 - DNA, 1400 bp, Homo sapiens
cacttttgcatctattgtagaagaagaactacaacaagaagcagctcttattagaagtcgagaaaaaccgttggctctgattcagattgaggagcatgccatacaagatttattggttttctatgaggcatttggcaaccctgaagagtttgtcattgttgaaaggacaccgcagggaccactggcagtacctatgtggaataagcatggatgctagttcactgtggagttgagatgcattttacataattatgagtttgttcatataaagaaaagctgtggaaaagagtcttagagattttgtaatatcattctaaatagattaagaaaagatataatttctttactgcagttaaatcatataatgtttgtatgattaaaaataaatttctcagaattgtgattttagtaactttatataaaatgtgtgagacaaaaacttattaaggttaaatagaattgtttcttctgaataatctaacaaaggaaaatataagtgattgaatcataagatataaggggggtaaagtattaaaaataacttttttgtttgataacttgagaatttagaagattttgccaagtatgtgttgttgcttgacttcttaaatatggcattgatgaatttaaagtaggagcatcagttattacttctgattcattaatggccagaattttgtgtttggtgtaatagttgtgtcaccattcttgttgctttttaaaaatcaggctaatcatgtggtccatgtctcttcaaagcttgacctgcacaaatgccatatttctatttggaccacatattctccattttgcattgagcagtagagtacagtggaaagggaataagaatactgattattctgaacagtttagtcccaagagaatagcgttttaaaaaagaaaaacaagatttggagtcattgtgggttatttttggtgggatggaggatcttaaaaatgcctaattgtgagagaatcaattgctgaaagtgttaaaatttctgaaaataaatgcttaattacatatacaggaattaaatagtttggaagagggttggattatcattacctttacaatactgtataatcagaagttctctgaacctcaattgtatatctagacataaaaattgttttctgtataggatgttgtttggtttgtttctgagtgtttaaattttgcaaaaacaaatgttaaatttgtgcttcagtacctagataaattggaaaggttaatgttctagtttctggaaggtaagcctgggagacacataagcaattcactgctataatttagttgatgtaaaatgacggaaactgactcaatatgtcaggtttaactctgcccaaaagcagcagacatgtaagcagatgtgcaataaaaaatgatcttgatccat

SEQ ID NO: 9839 - DNA, 1400 bp, Homo sapiens
aaaggagtacaggaacagcaggttcggcatgagtgtgaagttacaaagcctgagaaagagaagggtgaggagacaaggattgagaatgggaagcttattgtagtaacagactcttgtggaagagtagagtcatctgggaaaatatctgaacccatggaggctcataatgagggctctaacttggaaaggcatcaggccaagcccaaagagaagattgagtataaatgctcagaacgtgagcagagattcatccagcacttggacctgattgaacatgcgagtacacacacgggaaagaaactctgcgagtctgatgtgtgtcagagttccagtcttacaggacataagaaagtcctctctagagagaaaggtcatcagtgtcatgagtgtgggaaagcctttcagaggagttcacacctcgtcagacatcagaaaatccatcttggtgagaagccttatcagtgcaatgagtgtggcaaagtctttagccagaatgcaggccttttggaacatctcagaattcatactggagagaaaccttatctatgtatccattgtggaaaaaattttaggcgcagctctcaccttaatcgacatcagagaattcacagtcaggaggagccctgtgagtgcaaggagtgtggaaaaacctttagtcaggccttactcctcacccaccatcagagaatccatagtcactccaaaagccatcaatgtaacgagtgtggaaaagctttcagtttgacctcagaccttattcgacaccacagaattcatactggagaaaaacctttcaagtgtaacatatgccagaaagccttccgactaaactcacaccttgctcagcatgtaagaatccacaatgaagaaaaaccctatcagtgtagtgaatgtggagaagccttcaggcaaaggtcaggtctttttcaacatcagagatatcaccacaaagacaaactggcttgatgaggtgttctctccttgtagaacatcagagaaggcacattgactagcaaacagcactttaggaaaagtcaccgtagcccactgtggcatcagaaaattcttgggggctgagttggaggctccctgcctctattctctctcctttgctttccttgaagtcagctttggaccacaataatttcactgtagatgatatgctaggatcaaagttaaacagcattcttcactgcaggacatctcagagcatgtaacataactgcatgattatatactctaagcaatagagagcttcatgactgagtaagagttttgaagtcagcagtgaatcaagtgcccacagatttgcaggcttaagcagaacaagggaagattgatatttttggatatgctatagcagctttctcctatgaaataaaactgatgatgtttggaag

SEQ ID NO: 9840 - DNA, 600 bp, Homo sapiens
gggtctggaacccacaggagaggcctgaaggacccagggccctctggctggatgcgtttgcctatcaggacccagaattacttacagacctgtttagggctaggcttggcctctttcttgagctcatctggaggggtgtggcaacactcattcttcatccttattctccctggctgtgggcaacactggtcctcagtgtcaccagatggtcctcctctgtgcccatgacccctcagcagccaaggctggccctgccagataaatgtgtgtgcccatgatcacacccaggggcacaggccacatacgtttccctgaaaccttgggctccagcctccatcccgtccatgtgggagggaacttgggtcccagcagtgtgtctttcagcaccaagtcatgtttaaaagaccagagagacaagcattttgccaagatcttccagggaagatgcatgtgtgacacattaacattcaaatcaggccagcgcggtgctcatgcctgtcatcccagcactttgggaggccgaggcgggaggatcacttgagcccaggacttggagaccagtctgggcaacacagtgagaccccatctctacaaaaagtt

SEQ ID NO: 9841 - DNA, 600 bp, Homo sapiens
tatctatttagagttgccttaacattgcaattgcatttaacagtgttacttttaacattgcctcgtggcctcagccatgtaattttgaagtttactgttgaaattttctgacaagaagttgttctttctgagttcattgtcagattttctgagtacagtctctcaaccatcctaagagctgaaaaatacttgttatgagcctgcattctatttacagtgtaccctttgaatgggaatttacaagctgtactaaacacacgattgaatatatctctacattttgagtttgatggtaaagtgaactttcgtttgaaagtcagctgggcacggtggctcatgcctgtaatcccagcactttgggaggccaaggcaggcagatcacctgaggttgggagctcgagaccagcctgaccaacatggagaaaccccgtctctactaaaaacacaaaattagccgggcatggtggtgcatgcctatactcccagctccttggaaggctgaggcaggagaattgcttgaacccggaaggtggaggttgcagtgagccaagatcacgccattgcactccagcctgggcaacaagagcaaaattctgtctc

SEQ ID NO: 9842 - DNA, 600 bp, Homo sapiens
agcacgtctaacagttacatagaatagggcttgacaaagagttattagcataaagcaaggaggtttgaaggaagttcgtctttaaaagaaaccattatttctaacacttacgatttattctttaacaagaagggaaactttcaagaggaacttttactttctacaacagctgacctctgctgagcgcttactacatgccaagcactgctctgaaagtttaacataccattcactcatgtaatcctcatattaatgcacatttactcacgtggaagccgagttccagggcatttgtcacttaccaaatgtcacatagccaaaatttgaatttgagcccaggtagtccagctctgggaccctgctgtgggccttcctgctgggccacctcaagggcattgaaagccagccccaccccactgggacacaagttcagagaagggcagagctggctgcctgtccagtgcttctttcactccaccacctacagctggccgctgagggagcattcacatgtgactctgtccccagggactccgatcttgccttaaagtcctccagggcctctgaggatgggggcacagccttcaccctcaccccctc

SEQ ID NO: 9843 - DNA, 1400 bp, Homo sapiens
cgatacttgggcaggctcccactccttgaggtatttcagcaccgctgtgtcgcggcccggccgcggggagccccgctacatcgccgtggagtacgtagacgacacgcaattcctgcggttcgacagcgacgccgcgattccgaggatggagccgcgggagccgtgggtggagcaagaggggccgcagtattgggagtggaccacagggtacgccaaggccaacgcacagactgaccgagtggccctgaggaacctgctccgccgctacaaccagagcgaggctggggtctcacaccctccagggaatgaatggctgcgacatggggcccgacggacgcctcctccgcgggtatcaccagcacgcgtacgacggcaaggattacatctccctgaacgaggacctgcgctcctggaccgcggcggacaccgtggctcagatcacccagcgcttctatgaggcagaggaatatgcagaggagttcaggacctacctggagggcgagtgcctggagttgctccgcagatacttggagaatgggaaggagacgctacagcgcgcagatcctccaaaggcacacgttgcccaccaccccatctctgaccatgaggccaccctgaggtgctgggccctgggcttctaccctgcggagatcacgctgacctggcagcgggatggggaggaacagacccaggacacagagcttgtggagaccaggcctgcaggggatggaaccttccagaagtgggccgctgtggtggtgcctcctggagaggaacagagatacacatgccatgtgcagcacgaggggctgccccagcccctcatcctgagatgggagcagtctccccagcccaccatccccatcgtgggcatcgttgctggccttgttgtccttggagctgtggtcactggagctgtggtcgctgctgtgatgtggaggaagaagagctcagatagaaacagagggagctactctcaggctgcagcctactcagtggtcagcggaaacttgatgataacatggtggtcaagcttatttctcctgggggtgctcttccaaggatatttgggctgcctccggagtcacagtgtcttgggccgccggaaggtgggtgacatgtggatcttgttttttttgtggctgtggacatctttcaacactgccttcttggccttgcaaagccttcgctttggcttcggctttaggaggggcaggagcttccttcttcgttcttggcaccatcttatgaaaagggtccagattaagatttttgactgagtcattctaaagtaagttgcaagacccatgatactagaccactaaatacttcatcacacacctcctaagaataagaaccaacattatcacaccaaagaaaataaataattccataatatt

SEQ ID NO: 9844 - DNA, 600 bp, Homo sapiens
aggaggtcctgttaaaggatgcactcagagcccgggctccctaacatatgagagtgctaaccagcaggtgtagacttttcaggagtgaagaatgaggcaggcattccaaacctggaccttcatcaccttttgtttcatctcaagacaattctgagggactgttttggagcgtgtctggaaggtgaaccttgaagaagagtgtgggttttgatgtgactcagttgagatctttcatggggaggcaggaattcaatgcccagaatctgggctggtgtctttgaggtcagtaggttgcgtctttgtatccaagtccattgttactaggttggaggctggagattctaaatggcttccagaccatctctctgattctctttgggagatggggtctgaaagacaatgtcagtagttttgggaaattctagaaagtgtgcttggaaacgtgggaagagctcttgcctagtgcctaaatgctccatttgcagctctagccaagtagatacttggtaggtatagagccgggtttgcgtttatattagcaaaacctatgtcagagttgaagaagtagtcaggaaaaagcgtcttggtcgcaggccgggg

SEQ ID NO: 9845 - DNA, 600 bp, Homo sapiens
tgctgcagcgcgcggacccccccaagacacacgtgacccaccaccctgtctttgactatgaggccaccctgaggtgctgggccctgggcttctaccctgcggagatcatactgacctggcagcgggatggggaggaccagacccaggacgtggagctcgtggagaccaggcctgcaggggatggaaccttccagaagtgggcagctgtggtggtgccttctggagaggagcagagatacacgtgccatgtgcagcatgaggggctgccggagcccctcatgctgagatggagtaaggagggagatggaggcatcatgtctgttagggaaagcaggagcctctctgaagacctttaacagggtcggtggtgagggctgggggtcagagaccctcaccttcacctcctttcccagagcagtcttccctgcccaccatccccatcatgggtatcgttgctggcctggttgtccttgcagctgtagtcactggagctgcggtcgctgctgtgctgtggagaaagaagagctcagattgaaaaggagggagctactctcaggctgcaatgtgaaacagctgccctgtgtgggactgagtggcaag

SEQ ID NO: 9846 - DNA, 580 bp, Homo sapiens; identical to SEQ ID NO: 4611

SEQ ID NO: 9847 - DNA, 600 bp, Homo sapiens
aggagacacggaacaccaaggcccacgcacagactgacagaatgaacctgcagaccctgcgcggctactacaaccagagcgaggccaacccccccaagacacacgtgacccaccaccctgtctttgactatgaggccaccctgaggtgctgggccctgggcttctaccctgcggagatcatactgacctggcagcgggatggggaggaccagacccaggacgtggagctcgtggagaccaggcctgcaggggatggaaccttccagaagtgggcagctgtggtggtgccttctggagaggagcagagatacacgtgccatgtgcagcatgaggggctgccggagcccctcatgctgagatggaagcagtcttccctgcccaccatccccatcatgggtatcgttgctggcctggttgtccttgcagctgtagtcactggagctgcggtcgctgctgtgctgtggagaaagaagagctcagattgaaaaggagggagctactctcaggctgcaatgtgaaacagctgccctgtgtgggactgagtggcaagtccctttgtgacttcaagaaccctgactcctctttgtgcagagaccagcc

SEQ ID NO: 9848 - DNA, 600 bp, Homo sapiens
tgcagaccctgcgcggctactacaaccagagcgaggccaacccccccaagacacacgtgacccaccaccctgtctttgactatgaggccaccctgaggtgctgggccctgggcttctaccctgcggagatcatactgacctggcagcgggatggggaggaccagacccaggacgtggagctcgtggagaccaggcctgcaggggatggaaccttccagaagtgggcagctgtggtggtgccttctggagaggagcagagatacacgtgccatgtgcagcatgaggggctgccggagcccctcatgctgagatggaagcagtcttccctgcccaccatccccatcatgggtatcgttgctggcctggttgtccttgcagctgtagtcactggagctgcggtcgctgctgtgctgtggagaaagaagagctcagattgaaaaggagggagctactctcaggctgcaagcagtgacagtgcccagggctctaatgtgtctctcacggcttgtaaattgtgaaacagctgccctgtgtgggactgagtggcaagtccctttgtgacttcaagaaccctgactcctctttgtgcagagaccagcc

SEQ ID NO: 9849 - DNA, 1400 bp, Homo sapiens
tggcgccccgaaccctcctcctgctactctcgggggccctggccctgacccagacctgggcaggctcccactccatgaggtatttcttcacatccgtgtcccggcccggccgcggggagccccgcttcatcgccgtgggctacgtggacgacacgcagttcgtgcggttcgacagcgacgccgcgagccagaggatggagccgcgggcgccgtggatagagcaggaggggccggagtattgggaccaggagacacggaatgtgaaggcccagtcacagactgaccgagtggacctggggaccctgcgcggctactacaaccagagcgaggccggttctcacaccatccagataatgtatggctgcgacgtggggtcggacgggcgcttcctccgcgggtaccggcaggacgcctacgacggcaaggattacatcgccctgaacgaggacctgcgctcttggaccgcggcggacatggcggctcagatcaccaagcgcaagtgggaggcggcccatgaggcggagcagttgagagcctacctggatggcacgtgcgtggagtggctccgcagatacctggagaacgggaaggagacgctgcagcgcacggacccccccaagacacatatgacccaccaccccatctctgaccatgaggccaccctgaggtgctgggccctgggcttctaccctgcggagatcacactgacctggcagcgggatggggaggaccagacccaggacacggagctcgtggagaccaggcctgcaggggatggaaccttccagaagtgggcggctgtggtggtgccttctggagaggagcagagatacacctgccatgtgcagcatgagggtctgcccaagcccctcaccctgagatgggagctgtcttcccagcccaccatccccatcgtgggcatcattgctggcctggttctccttggagctgtgatcactggagctgtggtcgctgccgtgatgtggaggaggaagagctcagatagaaaaggaggcaagagttgttcctgcccttccctttgtgacttgaagaaccctgactttgtttctgcaaaggcacctgcatgtgtctgtgttcgtgtaggcataatgtgaggaggtggggagaccaccccacccccatgtccaccatgaccctcttcccacgctgacctgtgctccctccccaatcatctttcctgttccagagaggtggggctgaggtgtctccatctctgtctcaacttcatggtgcactgagctgtaacttcttccttccctattaaaattagaaccttagtataaatttactttctcaaattcttgccatgagaggttgatgagttaattaaaggagaagattcctaaaatttgagagacaaaataaatggaagacatgag

SEQ ID NO: 9850 - DNA, 1400 bp, Homo sapiens
aacactgctccttctcctcgctctcagttgttgggaaagcatggttacattgaatggtcagcgttaagtgagctttgcaatagttgctgtgcttataaagcaactgacaactggcccttgtcctttcctaggtattgttgcagcatctggcagtgagactgaggatgaggacagcatggacattcccttggacctttcttcatccgctggctcaggcaagagaaggagaaggggcaacctacccaaggagtctgtgcagattcttcgggattggctgtatgagcaccgttacaatgcctatccttcagagcaagaaaaagcgttgctgtcccagcaaacacacctgtctacgctacaggtctgtaactggttcatcaacgcccgccgcaggctcctccctgacatgctgagaaaggatggcaaagatccaaatcagttcacaatttcccgccgtggggccaagatttctgaaacgagctctgtggagtccgtgatgggcatcaaaaacttcatgccagctctagaggagaccccatttcattcctgtacagctgggccaaacccaaccctagggaggccactgtctcctaagccgtcatccccgggatcagttttggctcgtccatcagtgatctgccataccactgtgactgcattgaaagatgtccctttctctctctgccagtcggtcggtgtgggacaaaacacagatatacagcagatagcggccaaaaacttcacagacacctctctcatgtacccagaggacacttgtaaatctggaccaagtacgaatacacagagtggtcttttcaacactcctccccctactccaccggacctcaaccaggacttcagtggatttcagcttctagtggatgttgcactcaaacgggctgcagagatggagcttcaggcaaaacttacagcttaacccattttcaagcaaaacagttctcagaaatgtcatgattgccggggtgaaggcaagagatgaattgcattattttatatattttttattaatatttgcacatgggattgctaaaacagcttcctgttactgagatgtcttcaatggaatacagtcattccaagaactataaacttaaagctactgtagaaacaaagggttttcttttttaaatgtttcttggtagattattcataatgtgagatggttcccaatatcatgtgattttttttttcctccccttccctttttttgttattttttcagactgtgcaatacttagagaacctatagcatcttctcattcccatgtggaacaggatgcccacatactgtctaattaataaattttccattttttttcaaacaagtatgaatctagttggttgatgccttttttttcatgacataataaagtattttcttt

SEQ ID NO: 9851 - DNA, 779 bp, Homo sapiens; identical to SEQ ID NO: 4616

SEQ ID NO: 9852 - DNA, 1400 bp, Homo sapiens
ggtcggatgtccatgaaggaggtcgatgagcagatgcttaacgtgcagaacaagaacagcagctactttgtggaatggatccccaacaatgtcaagacagccgtctgtgacatcccacctcgtggcctcaagatggcagtcaccttcattggcaatagcacagccatccaggagctcttcaagcgcatctcggagcagttcactgccatgttccgccggaaggccttcctccactggtacacaggcgagggcatggacgagatggagttcaccgaggctgagagcaacatgaacgacctcgtctctgagtatcagcagtaccaggatgccaccgcagaagaggaggaggatttcggtgaggaggccgaagaggaggcctaaggcagagcccccatcacctcaggcttctcagttcccttagccgtcttactcaactgcccctttcctctccctcagaatttgtgtttgctgcctctatcttgttttttgttttttcttctggggggggtctagaacagtgcctggcacatagtaggcgctcaataaatacttgtttgttgaatgtctcctctctctttccactctgggaaacctaggtttctgccattctgggtgaccctgtatttctttctggtgcccattccatttgtccagttaatacttcctcttaaaaatctccaagaagctgggtctccagatcccatttagaaccaaccaggtgctgaaaacacatgtagataatggccatcatcctaagcccaaagtagaaaatggtagaaggtagtgggtagaagtcactatataaggaaggggatgggattttccattctaaaagttttggagagggaaatccaggctattaaagtcactaaatttctaagtatgtccatttcccatctcagcttcaagggaggtgtcagcagtattatctccactttcaatctccctccaagctctactctggaggagtctgtcccactctgtcaagtggaatccttccctttccaactctacctccctcactcagctcctttcccctgatcagagaaagggatcaagggggttgggaggggggaaagagaccagccttggtccctaagcctccagaaacgtcttcttaatccccaccttttcttactcccaaaaaagaatgaacacccctgactctggagtggtgtatactgccacatcagtgtttgagtcagtccccagaggagaggggaaccctcctccatcttttttgcaacatctcatttcttccttttgctgttgcttcccccctcacacacttggttttgttctatcctacatttgagatttctattttatgttgaacttgctgctttttttcatattgaaaagatgacatcgccccaagagccaaaaataaatgggaattg

SEQ ID NO: 9853 - DNA, 1312 bp, Homo sapiens; identical to SEQ ID NO: 4618

SEQ ID NO: 9854 - DNA, 1327 bp, Homo sapiens; identical to SEQ ID NO: 4619

SEQ ID NO: 9855 - DNA, 600 bp, Homo sapiens
tgactgacacaaagtgactttcagggctgtggtcaggcccatgtggtggtgtgatgggtgtgtgcacatatgcctcaggtgtgcttttgggactgcatggatatgtgtgtgctcaaacgtgtatcacttttcaaaaagaggttacacagactgagaaggacaagacctgtttccttgagactttcctaggtggaaaggaaagcaagtctgcagttccttgctaatctgagctacttagagtgtggtctccccaccaactccagttttgtgccctaagcctcatttctcatgttcagacctcacatcttctaagccgccctgtgtctctgaccccttctcatttgcctagtatctctgcccctgcctccctaattagctagggctggggtcagccactgccaatcctgccttactcaggaaggcaggaggaaagagactgcctctccagagcaaggcccagctgggcagagggtgaaaaagagaaatgtgagcatccgctcccccaccaccccgcccagcccctagccccactccctgcctcctgaaatggttcccacccagaactaatttattttttattaaagatggtcatgacaaatg

SEQ ID NO: 9856 - DNA, 600 bp, Homo sapiens
gcagttacagaaatgaacggtagaattgtggccacaaagccattgtatgtagctttagctcagcgcaaagaagagcgccaggctcacctcactaaccagtatatgcagagaatggcaagtgtacgagctgttcccaaccctgtaatcaacccctaccagccagcacctccttcaggttacttcatggcagctatcccacagactcagaaccgtgctgcatactatcctcctagccaaattgctcaactaagaccaagtcctcgctggactgctcagggtgccagacctcatcctgctgttcatgtacaaggtcaggaacctttgactgcttccatgttggcatctgcccctcctcaagagcaaaagcaaatgttgggtgaacggctgtttcctcttattcaagccatgcaccctactcttgctggtaaaatcactggcatgttgttggagattgataattcagaacttcttcatatgctcgagtctccagagtcactccgttctaaggttgatgaagctgtagctgtactacaagcccaccaagctaaagaggctgcccagaaagcagttaacagtgccaccggtgttccaactgtttaa

SEQ ID NO: 9857 - DNA, 1400 bp, Homo sapiens
tcagcatgagtgtactgctgaggtcaggtttggggccgttgtgtgccgtggcgcgcgcagccattccttttatttggagagggaaatacttcagctccgggaatgagcctgcagaaaacccggtgacgccgatgctgcggcatcttatgtacaaaataaagtctactggtcccatcactgtggccgagtacatgaaggaggtgttgactaatccagccaagggttattatgtgtaccgtgacatgctaggcgaaaaaggagatttcattacttcacctgaaataagtcaaatctttggggagctactaggtatatggttcattagtgaatggatggccactggaaaaagcacagctttccagctggtggaactgggcccaggtaggggaaccctcgtgggagatattttgagggtgttcactcaacttggatctgtgctgaaaaattgtgacatttcagtacatctggtagaggtaagccaaaaattaagtgagattcaagcattgacactgactaaagagaaggtcccgttagagcgaaatgctggatccccagtgtatatgaaaggtgtcactaagtctgggattccaatttcctggtaccgagatctgcacgatgttccaaaagggtacagcttttatcttgcacatgaattttttgatgttcttcctgtgcataaatttcagaaaacaccacagggatggcgagaagtatttgttgacattgatccacaggtttctgataaactgaggtttgttttggcaccttctgccaccccagcagaagccttcatacaacatgacgaaacaagggatcatgttgaagtgtgtcctgatgctggtgttatcatcgaggaactttctcaacgcattgcattaactggaggtgctgcactggttgctgattatggtcatgatggaacaaagacagataccttcagagggttttgcgaccacaagcttcatgatgtcttaattgccccaggaacagcagatctaacagctgatgtggacttcagttatttgcgaagaatggcacagggaaaagtagcctctctgggcccaataaaacaacacacatttttaaaaaatatgggtattgatgtccggctgaaggttcttttagataaatcaaatgagccatcagtgaggcagcagttacttcaaggatatgatatgttaatgaatccaaagaagatgggagagagatttaacttttttgccttgctacctcatcagagacttcaaggtggaagatatcagaggaatgcacgtcagtcaaaaccctttgcatccgttgtagctgggtttagtgaacttgcttggcagtgatatttcagcttggacattttacccttcagtcggcccaagaaatcaaaataaaggaaacacatttcatat

SEQ ID NO: 9858 - DNA, 1400 bp, Homo sapiens
ctacaaatggatgaactcaaatgtcgcaaacgtgttttaagaaggttgggatttgctacttcttctgatgtaatagagatgaaaggacgagtggcttgtgagataagcagtgctgatgagctccttctaactgagatgatgtttaatggccttttcaatgacctttctgcagaacaggcaacagcattattaagctgctttgtgtttcaagagaattctagtgagatgcccaaattaacagaacaattagcaggaccacttcgtcaaatgcaggaatgtgctaaaagaattgcaaaagtttcagcagaagccaaattggaaattgatgaggaaacttatctaagctcatttaaacctcacttaatggatgtagtatatacctgggcaactggagctacatttgcccatatctgcaaaatgacagatgtctttgaaggcagcataattcgttgtatgaggcgcctggaagaattgcttcgacaaatgtgtcaagcagcaaaagccattggaaacactgagctggaaaataaatttgcagaaggaatcaccaaaatcaagagagatattgtgtttgctgccagcctctacttgtagagtcagctaaaggaatgtgagattttaaattattgaccacctgtttgattacagttgactacaaatgcctgcaagtgtggatttggttctcccatacattttaatatgtattatatttaaatcaaacatcattcatagaaagcatattacatacatgtttatacataagcattacatttttttaataaaaatgtatacaggtggggcactgttttggtggaaggcttggagtttttttaatgagtttagagctattagataaccactgagttaaaggtaactatgtacacacaaagtgtgcatccaagaggcatagcagcagcagaagtctttaaaggcttgtacaccaggaagaaagatgcatcctcttgccttgtggcaatcattttcctttagaaaacaggccagcttcacctgggcaccctgctgcctttcaaggctggtgattgctcggatagtgattcccagttgttggtgtttcatgcagagttgtatgagagtcctcctcttttctttctttaaaagaagttctttctttgaagaaatccgatacatatacagcctacagtgcaaaatatttaatggtataatttagatcaagttaaaaactacatacaaagttgtgatcaacagcatcctaagataaatataaacaaaaggatatactttgaggtgtacagattaagcatataaaaaattagagactaactgggattttttaaagattattccaaattaagagttgctttgttatgccttcagcaaatagcttcattttgccaatactgaataaaagagttatttct

SEQ ID NO: 9859 - DNA, 1400 bp, Homo sapiens
cccggcccggcccagcccgtggcgcagctagatctacagaccttccgcgactacggccagagctgctacgccttccgcaaggcgcaggagagccacttccacccgcgggaggcgctggcacggcagccacaagtgaggtgctggtagagccagctccacgccgccgctcttcctctcctcccaggctctctcctctcctgccggctcggccctccgagcgcccgggcccgcgacagcccaggtcccgccccgagtcgaagcacaaggggccgtggaggggcgtcaccggcctcattttacagatggagaaaagtggggcgtagacggcttgagggacttgccccgtcccaagctggctactggggcacggtagagaggaattcgtttccgggttgagtctggactcctaccgaactcgggcaagttatttaacacccctgagcttctttcttcatctgcaaaatggaacccctccccttcctttgaattgctgagcccattacgcgaggtgacggcggaatcccgctgtaagctgctcagctggctgatcccggtgcaccgccaattcggcctctccttcgagtcgctgtgcctgacggtgaacactctggaccgcttcctcaccaccacgccggtggctgcagactgcttccagctgcttggggtcacctccttgctcatcgcttgcaaacaggtggaggtgcacccgccgcgcgtgaagcagcttctggccctctgctgcggcgccttctcccggcagcagctctgcaacctcgagtgcatcgtgctgcacaagctgcacttcaccctgggtgcgcccaccattagcttcttcctggagcatttcacgcacgctcgcgtggaggcggggcaggctgaggcctccgaagctctggaagcgcaagccctggcgcggggggtggcagagctgagtctggccgactatgccttcaccagctactccccttccctcctggcgatctgctgcctggcgctggcggaccgcatgctgcgggtctcgcggcccgtggacttgcgactgggagaccacccggaggcggcgctggaggactgtatgggcaagttgcagctgctggtggccataaacagtacttccttgactcacatgctgcccgttcagatctgcgagaagtgcagcctgcccccgagctcgaaataaaacagatccttcgtttccttttagtccctggcccggctgctggacctctcccgtagcctcagaagagtgcagtactggtccacagagaaggcttcaggacctgcttggtcagctgcaggttgtaaatagtgtacgatactagcatctggtattttatttattttgcagcgagcacatgaggaagctgagtctttcaccaataaacagttgtggtttgtct

SEQ ID NO: 9860 - DNA, 1400 bp, Homo sapiens
ggagccggccgggtacttaggaccgcgccagcctctgagcccggcctccttcgcactttcgagtgcgcgtttgctgcccgccgcagcccgggcgttgaaggtagtaaagcggccacccggccgcatcatggtgaccccctgtcccaccagcccctcgagccccgccgcccgagcggggaggcgggacaacgaccagaaccttcgcgccccggtgaagaagagcaggcgtccgcgcctccggaggaagcagccgctgcatcccctgaacccgtgcccgctcccgggagactccggcatttgcgacctgttcgagtcccccagctccggctcagacggcgcagagagcccctctgcggcgcggggtggtagccccctgcccggcccggcccagcccgtggcgcagctagatctacagaccttccgcgactacggccagagctgctacgccttccgcaaggcgcaggagagccacttccacccgcgggaggcgctggcacggcagccacaagtgacggcggaatcccgctgtaagctgctcagctggctgatcccggtgcaccgccaattcggcctctccttcgagtcgctgtgcctgacggtgaacactctggaccgcttcctcaccaccacgccggtggctgcagactgcttccagctgcttggggtcacctccttgctcatcgcttgcaaacaggtggaggtgcacccgccgcgcgtgaagcagcttctggccctctgctgcggcgccttctcccggcagcagctctgcaacctcgagtgcatcgtgctgcacaagctgcacttcaccctgggtgcgcccaccattagcttcttcctggagcatttcacgcacgctcgcgtggaggcggggcaggctgaggcctccgaagctctggaagcgcaagccctggcgcggggggtggcagagctgagtctggccgactatgccttcaccagctactccccttccctcctggcgatctgctgcctggcgctggcggaccgcatgctgcgggtctcgcggcccgtggacttgcgactgggagaccacccggaggcggcgctggaggactgtatgggcaagttgcagctgctggtggccataaacagtacttccttgactcacatgctgcccgttcagatctgcgagaagtgcagcctgcccccgagctcgaaataaaacagatccttcgtttccttttagtccctggcccggctgctggacctctcccgtagcctcagaagagtgcagtactggtccacagagaaggcttcaggacctgcttggtcagctgcaggttgtaaatagtgtacgatactagcatctggtattttatttattttgcagcgagcacatgaggaagctgagtctttcaccaataaacagttgtggtttgtct

SEQ ID NO: 9861 - DNA, 1008 bp, Homo sapiens; identical to SEQ ID NO: 4626

SEQ ID NO: 9862 - DNA, 600 bp, Homo sapiens
ccttacccagcaagcctggagaggagccatccccactgctgccatctggagattttcttccccgtgggttgttggtgagaccccaggctgagcttgctggtttccataaaccaaacaaccaactcagaaattcgtgggaatacacgagacctccgtacagggaagaagagccgtcagagtgggcctggcctgtctgcttctcagcagtggcccccacccggcggggcctggcacacagcagcgtggcttcagggagtgttcccagggagcctctgcaggcccattatcctccaccacaaagggctggacttgaggatctgaagggccctctggaggccgcctcccacactgctgagcctggctttgtctggctgtggttcagtgatactttgaaccttatgctcctgggcggacagaccctaaaactcacgtggtcgtagctcctcacactgtccctaggggtgccttcaggccactgggcatgtatggaggtgtgattctctgaggaaagagtgattctgatatatgtacttgtcacattggtgttggacacatttgcgccaaaagtatggtaattctattattaaataattctctgag

SEQ ID NO: 9863 - DNA, 600 bp, Homo sapiens
ctgtaagtatacctaagacttactgctttaaaagtcagtgccaagtgagtggaaaaattcattctgtaggttgttctgcctcaaaggtggcctgggcggagggatctttggggtacccatgtcaccactgtcattcccaggggcgacgtcgtaaaccaggacgacctgtaccaggccttggccagtggtaagattgcagctgctggactggatgtgacgagcccagaaccactgcctacaaaccaccctctcctgaccctgaagaactgtgtgattctgccccacattggcagtgccacccacagaacccgcaacaccatgtccttgttggcagctaacaacttgctggctggcctgagaggggagccgatgcctagtgaactcaagctgtagccaaacagtagagatggagggccgggaagcaaaccgtgccctggtattgtcagacacacccaggcttgatttggatccacaggcagagccaagggaaggtgtgattctctgaggaaagagtgattctgatatatgtacttgtcacattggtgttggacacatttgcgccaaaagtatggtaattctattattaaataattctctgag

SEQ ID NO: 9864 - DNA, 600 bp, Homo sapiens
cttctcccaacactcagcttttcgcaacataatcccagcactttggaacgctgggtggattgcttgaacccaggagttcgagaccatcctgggcaatatggcaaaaccccatctttaccaaaaataagctgggtgtggtggaacatgcctgtggtcccagcttcttgggaggctgaggtgggaggattgcttgaacccgggaggtagaggctgcaatgggccatgatcacgatcctgcactccagcctgggcaacagagagagacagtccctggcccactgcccccttccctggcccagtctcaaaaaaaatgaggctgggcgtggtggctcacatctgtaatcccagccaaggctggcagatcacttgaggccaggagttctgagaccagcctggcttacatggtgaaaccccatctctactaaaaatacaaaaactagccaggcatggtgggaggcacctgtaatcccagctacttgggaggctgaagcaggagaatcactttaacccgggaggtggaggttgcagtgagctgagatcacaccactgcactccagcctgggcggcagagcaaaactgaaaaaaagagaaaaaaaaaaa

SEQ ID NO: 9865 - DNA, 1400 bp, Homo sapiens; identical to SEQ ID NO: 4630

SEQ ID NO: 9866 - DNA, 600 bp, Homo sapiens
ttgcaatggcattttgaaggagttactctctaagaagcatgctgcctatgcttggcctttctataaaccagtggatgcttctgcacttggcctgcatgactaccatgacatcattaagcaccccatggacctcagcactgtcaagcggaagatggagaaccgtgattaccgggatgcacaggagtttgctgctgatgtacggcttatgttctccaactgctataagtacaatcccccagatcacgatgttgtggcaatggcacgaaagctacagatgtatttgagttccgttatgccaagatgccagatgaaccactagaaccagggcctttaccagtctctactgccatgccccctggcttggccaaatcgtcttcagagtcctccagtgaggaaagtagcagtgagagctcctctgaggaagaggaggaggaagatgaggaggacgaggaggaagaagagagtgaaagctcagactcagaggaagaaagggctcatcgcttagcagaactacaggaacagcttcgggcagtacatgaacaactggctgctctgtcccagggtccaatatccaagcccaagaggaaaagagagaaaaaa

SEQ ID NO: 9867 - DNA, 600 bp, Homo sapiens
caggacacccggggtcccccaggcgaggtgatccagccactgcccattcagatgcccaagaagactcggcgctcggtggatggaagccgtctgatgcaggaagatgaggccataccgaccgggggagcccccggcagtcctggggggctggaggagatctttggctcactcgactccctgcgggaggagatcgagcagatgaggcggccaacagggacccaggacagccctgctcgcacctgccaggacctgaagctgtgccacccagagcttcccgatggagagtactgggtcgaccccaaccagggctgtgctcgggatgccttccgagttttctgcaacttcacagcagggggtgagacctgtgtgacgcctagggatgacgtcacgcagttctcttacgtggactcagagggctccccagtgggtgtggtccagctcaccttcctgcggctgctcagcgtctcagcccaccaggacgtctcctacccctgctctggagcagcccgtgacggtcccctgagactccgtggggccaatgaggatgagctgagcccggagactagcccctatgtcaaagaattcagagatggctgccag

SEQ ID NO: 9868 - DNA, 600 bp, Homo sapiens
cacccaggaagacaggagctcactctcaccccttctgcctgccaggtctttcagggccctcccttgaggacagcgtaggccttttcctgtctgcctttcttctgcttgggctcttcaaggcactgggctgggctggtaagtgtcagccctaccctgaccatgacctgaggttggtggactttccccacctactcccaagagcctgacacccatccctctgccctccacctctaccactccagcatcccatcccttctcaatctttccccacagctgtctacctgtccacctgcaaggattcaaagaaggtacagtgctccacctctctgtatctttcccttgtcactttatctcctcatcctatctcaaaacccatggagggaggctgctggtgtggtaggcagaacctaggcttggaattcacactgatctgggttaaaacctggcactatatcctaactgtaggactctttgagcatgctacttaatctatatgtttccttgggtgtagggattttaaaaagttacttaggcagtgctgtccaatagaaagataatgcaagccacatatgtaaatttaaatactctagtactcacatt

SEQ ID NO: 9869 - DNA, 1400 bp, Homo sapiens
ggcggggctcctggcctccttaggggctgcccgctctgggccacacagccagagaaacactgtccatctggctggcttggcctgtggggtgcaaaagaggtgttttcactttgctttggaaacatggaaattaccaagtgacttaaccataacaccaaatgatgatttttaaatttatgaaaattatggaaccagatgggacacagggaaacgagaacgatactgaaaaggtctgagtcctgtggggggtccaggtcccgcaagacagctaatcaggtgcccctgtctgttattcgggtaaatgtagcagctgggtccaggctcgggcagagcagctttctacagcaggggtgtccgccctctcccggggttcccacggggttcccaggggccccttactctgccacgatgtgggagttccaccaccacagggacttgagcggcagctccggctcttacgtagaaacgcgcaactccagtccctaggttgtgtccgaggttgctatggtgccatcccatcttgccgctcactctgcgactgtgcggagaaacgcaagtgcccccgaagggtgggcgtggcctctgatgaatgcacacgttggtgggaggtggcttccgtttgtacgaagcgcctcttcacgcgagcgttcacctcggtctcccctttgcttggtccagttccagaaacgccgctggactgcgaggtctccctgtggtcgtcctggggactgtgcggaggccactgtgggaggctcgggaccaagagcaggactcgctacgtccgggtccagcccgccaacaacgggagcccctgccccgagctcgaagaagaggctgagtgcgtccctgataactgcgtctaagaccagagccccgcagcccctggggccccccggagccatggggtgtcgggggctcctgtgcaggctcatgctgcaggcggccgagggcacagggggtttcgcgctgctcctgaccgcggtgaggccgcgccgaccatctctgcactgaagggccctctggtggccggcacgggcattgggaaacagcctcctcctttcccaaccttgcttcttaggggcccccgtgtcccgtctgctctcagcctcctcctcctgcaggataaagtcatccccaaggctccagctactctaaattatgtctccttataagttattgctgctccaggagattgtccttcatcgtccaggggcctggctcccacgtggttgcagatacctcagacctggtgctctaggctgtgctgagcccactctcccgagggcgcatccaagcgggggccacttgagaagtgaataaatggggcggtttcggaagcgtcagtgtttccatgttatggatctctctgcgtttgaataaagactatctctgttgctcac

SEQ ID NO: 9870 - DNA, 1400 bp, Homo sapiens
ctcactgcaacctccacctcctgggttcaagcagttctcgtgccgcagcctcccaagtagctgggactacaggcatgcaccaccacgccaggctaatttttgtatttttagtagagatggggtttcaccatgtctcaaactcctgacctcaggcgatccacccacctcagcgtcccaaagtgctgggattataggcgtgagccaccgcacctggcctatgagtggtcttttaattaggaacaaatctaatggaaaggagagttgactgaagttggcccacaggattgtgagctgggcagtgccttcatgaaggcttgccaccttgggacgccccagtttactggggtgtcttgcggagtgcagaaggctttctggcagctgcctgggtttggccagaccctgcctcccctcccgccggccaacccctagtccccttcctgtctccacttgcattcaggggtggctgctgttctgagaacattagaactgggaagagagatggagtcacatggatttttggtgggcattattctaaactttcgtatccaagttagtcccccttattccactgtggcattgccgttctaagcagttacctgatgcctgctgctgaagagctgctcacaggaggcggcggcggccctggcactgccccttgcattaggtcttgtgtttgatgtgttcttgtgaatttactttgtcagaacaaaatatttacgcgttgggttcaggaatttcttttagctccccatctggctgtgaaattcaggaaacctcccgttgcctagtaatcaccccatgtaggtgtacattgtgacaaagtgcatctgaccactaaggggcccccttggtgaccccagcacattcacagcagtgttaaaatggcctgcattttggagatgctggctggcctttcagtgcctcccaggaagacacatggcctttccctcttcagatgcctgaagggagtgctttgaggcaggtgatgtgctgggagtgtgggcggcctccctctggccccggggccctctgtggaccttggctccctccgtggacctgggcttcgtggtgagcactgcagcctccctgggcattccctccagcgccagcaccactgcaacatatagacctgagtgctattgtattttggcttggtgtgtatgctcttcattgtgtaaaattgctgttcttttgacaatttaagtgattgttttgtttactgtaagtttgaaaataaaaatgaagaaaaaaattccaatgactgtgctgtggttggagactttatttaccaagatgtttactcttcctttccccttccattttgaggagctgtgtcactcctcctcccccccagtgctttgtagtctctcctatgtcataataaagctacattttctctg

SEQ ID NO: 9871 - DNA, 600 bp, Homo sapiens
ttttaatctctcgactgaatggactttgcacactttggcccagggtggccacacctctatcccggctttggtgcggggtacacaagaggggatgagttgtgtgaataccccaagactcccatgagggagatgccatgagccgcccaaggccttcccctggcactggcaaacagggcctctgcggagcacactggctcacccagtcctgcccgccaccgttatcggtgtcattcacctttcgtgttttttttaatttatcctctgttgattttttcttttgctttatgggtttggcttgtttttcttgcatggtttggagctgatcgcttctcccccaccccctagggtaccagcaggcagagccttgccctctgctcaggctggggtccagtgggaggggcccaagatctctgctcagagaagtgcagggggagccttccagctcactctccctgaggactggcttgacaggggctatgggtttgctttggtgttgtttttaaaaaaagaaaatatatttttttgaaaaaacgactgcccatcccgggtcctttccctgatgggttggggcagttacctggttgctgttttaattaaaaa

SEQ ID NO: 9872 - DNA, 600 bp, Homo sapiens
gcagtctgtcctgggcttgggtgagcccagcttgacctccccttggttcccagggtcctgctccgaagcagtcatctctgcctgagatccattcttcctttacttcccccaccctcctctcttggatatggttggttttggctcatttcacaatcagcccaaggctgggaaagctggaatgggatgggaacccctccgccgtgcatctgaatttcaggggtcatgctgatgcctctcgagacatacaaatccttgctttgtcagcttgcaaaggaggagagtttaggattagggccagggccagaaagtcggtatcttggttgtgctctggggtgggggtggggtgtttctgatgttattccagcctcctgctacattatatccagaagtaattgcggaggctccttcagctgcctcagcactttgattttggacagggacaaggtaggaagagaagcttcccttaaccagaggggccatttttccttttggctttcgagggcctgtaaatatctatatataattctgtgtgtattctgtgtcatgttggggtttttaatgtgattgtgtattctgtttacattaaaaagaagcaaaaat

SEQ ID NO: 9873 - DNA, 1321 bp, Homo sapiens; identical to SEQ ID NO: 4638

SEQ ID NO: 9874 - DNA, 1159 bp, Homo sapiens; identical to SEQ ID NO: 4639

SEQ ID NO: 9875 - DNA, 600 bp, Homo sapiens
cctatccatctggctctggcaagcccaaggccaaatatccctttaagaagcgggccagcctgcaggcctccactgcagctccagaggctcggggtggtctgggggcccctccgctgcagtctgcccgatccctgccgggccccgccccctgcctcaagcacttcccgctcgacctgcgcacgtctatggatggcaaatgcaaggagatcgccgaggagctgttcacccgctcactggctgagagcgagctccgtagtgccccgtatgagttccccgaggagagccccattgaacagctggaggagcggcggcagcggctggagcggcagatcagccaggatgtcaagctggagccagacatcctgcttcgggccaagcaagatttcctgaagacggacagtgactcggacctacagctctacaaggaacagggtgaggggcagggtgaccggagcctgcgggagcgtgatgtgctggaacgggagtttcagcgggtcaccatctctggggaggagaagtgtggggtgccgttcacagacctgctggatgcagccaagagtgtggtgcgggcgctcttcatccgggagaagtacatggccc

SEQ ID NO: 9876 - DNA, 600 bp, Homo sapiens
gttcatgtgctgagacatataggcggtcctgagagcgaacctccccaggcacttcggccacgggatagaagacggcaggaggaaattgattatagacctgatggtggagcaggtgatgccgatttccattataggggccaaatgggccccactgagcaaggcccttatgccaaaacgtatgagggtagaagagagattttgagagagagagatgttgacttgagatttcagactggcaacaagagccctgaagtgctccgggcatttgatgtaccagacgcagaggcacgagagcatcccacggtggtacccagtcataaatcacctgttttggatacaaagcccaaggagacaggtggaatcctgggggaaggcacaccgaaagaaagcagtactgaaagcagccagtcggccaagcctgtctctggccaagacacatcagggaatacagaaggttcacccgcagcggaaaaggcccagctcaagtctgaagccgcaggcagcccagaccaaggcagcacatacagccccgcaagaggtgtggctggaccacgtggacaggatccggtcagcagcccctgtggctagaggaacaccagc

SEQ ID NO: 9877 - DNA, 600 bp, Homo sapiens
tcatatctaagatagagttatgcattgcacatacacaaataaacttttattagatagatacctataaaagaaacataaaagtatgttgtgtattactgacagttctagattaatttcttttagaattaaagtagatttgttaaagtgtattgtgtgttgtaaattttttaagtgaaatttgcttgcgctctgccttgccatttctttccagtaagtataattttgaaaaaattagaatatatgccaaatattgagtgctgtgactcttcctcataagagatgtgccagattctatgtctaattgcatattctcttcagaggagatgatgcttattttaaacctttttctctataacttttaaaaagtggtgctgagtattcactagagtggcaagtctttgtgctttaatgcactcaatttgtggaaattacttaaatagcaggttatcagatggttctgaatgacaaaggtgttaaatttgggatttttttttcaagctttagatatggctggagagtaatgagacagaaggaatgtcttatattgttctgactgctgacaattcctaaagaaaagtgatagaagggtttttaacaaaa

SEQ ID NO: 9878 - DNA, 600 bp, Homo sapiens
gacaaagccaacaacaaccggggcctcagcagtagcagtggcagtggtggcagcagtaagagccaaagcagcacctcccctgagggccaggccttggagaaccggatgaagcagctctccctacagtgctcaaagggaagagatggaattattgctgacataaaaatggtgcagattggctgattcatcctgggccctggccgatgtgcatatcaacatttatacatggaactggagaacattgtgccaataatcatttaatatatgccaaatcttacacgtctactctaaactgctctaatgaagtttcagtgaccttgagggctaaagattgttcttctgggtaagagctcttgggctggtttttcagagcagagttcttgttgtgggtagactgtgactaggttcacagcctttgtggaacattccgtataacggcattgtggaagcaataactagttcctatgaaagaaccagagctgggaagatggctgggaagccaggccaaagtgggggcaacagcttgcttctctttctcttctcaccctcagtttgtatgggaaaatggagatgtcctctccactttatcccacgatatct

SEQ ID NO: 9879 - DNA, 1400 bp, Homo sapiens
ctcaaagttgagcttgcatcaaaatccccttgggtgttaagactcagctcactagactccaacctcagagtttctaattcagtcggtctagagtgggacctggtctatcaggtctccaggtgatgctgatgctgctggtcctaagagcatgctgtgagaaccactggcctagtacaacagagaaggtgactgaatggcagttacagaggttcagagaccactgaagacccaaccgagacaattttgaggtctgaaaactcagtaaagcctgtctctccactttccccttatagcaagtggcccatgtgatactctgctaccccagaaaagtgaagctttgagtgcagaaaaatctcatcagtgacgaagcccaaagctacacatacctcgagctgcacatagtactttgccttgagttcaaaataaggcctgcagaagacaggaaggaaagccatcagagtaatataatacagtgaccacagtcaactccacaagatgaacaagaggcatcagctaccactggccaggtcgtccttccaatatttagtaaactcttaacaaggccgtgacatgtcagtgatgctcctagctctggagactgacagacaccagatggaacgactgggctcacccagggctatattaacaggaggcccatctcaagacacggggaacccacacacacatatcttggggactctgcaacttagctcatgttcctcctctgtgggaaggctgttcagagcctcacaggttatacccagcagtaagggtggcctggatctgctctcctaatgaagttggctccccagggatgaagagcagctgaggctggagaaggggctgcttaaacctcctcctctactgaagtcaactggggaagagagagaagcaccactcctccctcacagcacagcaaggccaccactaggagggggtctcaggttggtcctcccaaaccttgtccaaagactggagttattagttggctgactcagccacataatgggcccaagaaatgccagcgtcctagcagttcccttggttctgggtcagctgaaagagcttggctcttttttaggaactttggtgcctgaacattaagagtagatcactgctttattcttgagctgttcaccctccatgaagctctcaagtcctgcatcctgaggatccagatggatgacaaggacacaggactgccattgagaaatgaagatgaactgtgtcacagatgcagtggattactgactgcccttgtaatagtccattttgcatctgttggtaattcattgaggcactcttggttttctatgagtttgtattttttgaattcaagaattgtaacatcactgttagatccctccttatttaatgagagaaataaaatatttgacacg

SEQ ID NO: 9880 - DNA, 1400 bp, Homo sapiens
gagaagaagctgcggccgcacctggccaaggtgctagtgtatgagttgttgttgggaaagggctttcgagggggtgggggccgatggaaggctctgttgggccggcaccaggcgaggctcaaggctgagttggctcggctcaaggttcatcggggtgtgagccggaatgaggacctgttggaagtgggatccaggcctggtccagcctcccagctgcctcgatttgtgcgtgtgaacactctcaagacctgctccgatgatgtagttgattatttcaagagacaaggtttctcctatcagggtcgggcttccagcctcgatgacttacgagccctcaaggggaagcattttctcctggaccccttgatgccggagctgctggtgtttcccgcccagacagatctgcatgaacacccactgtaccgggccggacacctcattctgcaggacagggccagctgtctcccagccatgctgctggaccccccgccaggctcccatgtcatcgatgcctgtgccgccccaggcaataagaccagtcacttggctgctcttctgaagaaccaagggaagatctttgcctttgacctggatgccaagcggctggcatccatggccacgctgctggcccgggctggcgtctcttgctgtgaactggctgaggaggacttcctggcggtctccccctcggatccacgctaccatgaggtccactacatcctgctggatccttcctgcagtggctcgggtatgccgagcagacagctggaggagcccggggcaggcacacctagcccggtgcgtctgcatgccctggcagggttccagcagcgagccctgtgccacgcgctcactttcccttccctgcagcggctcgtctactccacgtgctccctctgccaggaggagaatgaagacgtggtgcgagatgcgctgcagcagaacccgggcgccttcaggctagctcccgccctgcctgcctggccccaccgaggcctgagcacgttcccgggtgccgagcactgcctccgggcctcccctgagaccacactcagcagtggcttcttcgttgctgtaattgaacgggtcgaggtgccaagctcagcctcacaggccaaagcatcagcaccagaacgcacacccagcccagccccaaagagaaagaagagacagcaaagagccgcagccggtgcttgcacaccgccttgcacatagcagaggctccgggctgactccttcctggtgggaaaggaagatgcctgtcctctccgtggaggaccctgggccctcaccgcaggaagcagtttgggttttgaaaggttattgggtcccttccttgggctgtgttcttgctggtgagcaaagtgttgcctgcaaaaataaaatgcagaacgtactct

SEQ ID NO: 9881 - DNA, 600 bp, Homo sapiens
gcaagaagcataggagataaaacccccactgagatgcctctcatgcctcagctgggacccaccgtgtagacacacgacatgcaagagttgcagcggctgctccaactcactgctcaccctcttctgtgagcaggaaaagaaccctactgacatgcatggtttaacttcctcatcagaactctgcccttccttctgttcttttgtgctttcaaataactaacacgaacttccagaaaattaacatttgaacttagctgtaattctaaactgacctttccccgtactaacgtttggtttccccgtgtggcatgttttctgagcgttcctactttaaagcatggaacatgcaggtgatttgggaagtgtagaaagacctgagaaaacgagcctgtttcagaggaacatcgtcacaacgaatacttctggaagcttaacaaaactaaccctgctgtcctttttattgtttttaattaatatttttgttttaattgatagcaaaatagtttatgggtttggaaacttgcatgaaaatattttagccccctcagatgttcctgcagtgctgaaattcatcctacggaagtaaccgcaaaactctag

SEQ ID NO: 9882 - DNA, 585 bp, Homo sapiens; identical to SEQ ID NO: 4647

SEQ ID NO: 9883 - DNA, 1400 bp, Homo sapiens
atgctgccagaccctcagaatatttctcttagaagatgacatccatgtttcctgatgcttgttttattcatacaagattggatttgagacccatcagactgcttcatcttttatctcagaaatagggttgacgtacatagtgagggttgacttccccattccataaggttttcattctgaagagtaaaacttccccaggtagaagactttctccttcttaaaaaatatagggtgatttctttaaaactttgttatctagagacagtttaattacagttatatacaggtttatgcctaggatgtattcagatgggtgggacctgtgtgctgcttttgtcatcccacactcaaagttgtctctttgtttcttgctgccactgccagctcattgttgagactgccatttctttctcttactcagctctccccagtgccttttggccactgcagctaccgtagaatggcattttatatgtaccttgtcacccacttctgtttactttttcctctccagtaaaaagtaaaagatttctttcaattggtcttcccattgcagttactgttatttctcttttttggttaactttaaatcaaaactcaaaatatgttcatccagagtgtgtcttaagtaacttacgtgtcttaagtaacagggaccagagacatgttacctacaagagttctgggctatccttttcattcttatcacatatcatagcttgaatattacaacagtgtgggagagaatcaaccgtaaaaatgtcttcattaattagacccagttattccacttttgttaatgtctctcaaattgtacaaagtataaaaaattatatgcacaaagatgttccaagtgacattacttttagtagcccaaattataaaccactttaaagtttggggtaaagattggcaaactttttctataaagggccagaaagtaactattttaggtttttaaacctactgtctctgtcataacttgtcaacactgctgtatgaagcacaaaagcagccatagacaatacataaacaatacgggcgtggctttgttccagtaaaactttgtttacaaatgtggtgccatagtttgtcatccctgggtctaggaaatagtcaataaacagatatatacaaatgatacataatgtacttattaaaaattagtaatgaatattattaaaaacatgaaaatattaccttaagtaaaaattgcaagacggaaaagtgtataagtgggtgtaatcatggctgaaataacagaccaagcatatgataaaaagataacaaagtaaatcaaattactaactggttatagtgggataggaggcagaaaatggatgactttgtcttttctcaatgtttttatttgtattttataataaaaatgttttaaaatt

SEQ ID NO: 9884 - DNA, 600 bp, Homo sapiens
ctgttctactgtgaagaaagttctgtctcctttagcccggtttgtttctccctgctcaggtctagaatcccaagcagtgttcttttctggtgaacactgtgagccgcagatgtgactttttttttaaagtcatctcttcagcaatccagaggttccttgacctcattatttgtcctatctctcccttatagtcctaagccaagacatttgacctttgacatttgacctttgcagtgtcatgtgagggcgtcagtatagaggcctttgcatctgggcctggcacccgctctctgcctctggaggctaaaccctgtctggatttctcttgggatctaacgtgggatcttctggacagacaaccgtgacatcagcagtgctggtgctgctgtgtgtggactgaacacctgcactttgcagaggacacgctgcatgggccccgcttgcggttcattcaggcctgctgcaggagctctgagaacaagaaagagtggacacccgttcccctgcatcatctgtcttgcgtgctatttcagagtggggaagtgataaactatttgccttctggagctctttgtgaaaaattaaaaaaaaacttagctc

SEQ ID NO: 9885 - DNA, 600 bp, Homo sapiens
gggcggaggtgaaggtggggcaggagcagatgaggaaaaggagcagtcgcacagacctttcctcatgctgcaggcccggcagtctgaagaccaccctcatcgccggcgtcggcggggcttggagtgtgatggcaaggtcaacatctgctgtaagaaacagttctttgtcagtttcaaggacatcggctggaatgactggatcattgctccctctggctatcatgccaactactgcgagggtgagtgcccgagccatatagcaggcacgtccgggtcctcactgtccttccactcaacagtcatcaaccactaccgcatgcggggccatagcccctttgccaacctcaaatcgtgctgtgtgcccaccaagctgagacccatgtccatgttgtactatgatgatggtcaaaacatcatcaaaaaggacattcagaacatgatcgtggaggagtgtgggtgctcatagagttgcccagcccagggggaaagggagcaagagttgtccagagaagacagtggcaaaatgaagaaatttttaaggtttctgagttaaccagaaaaatagaaattaaaaacaaaacaaaaaaaaaaacaaaaaaa

SEQ ID NO: 9886 - DNA, 1400 bp, Homo sapiens
gatcttaatttaagaatattatcctggtttaacaacagtgccctgtttacaacagattgtgccctatctcatctgcagccgaggaataaaggattctgattagaaagagggttgcctacagattagtaagcaattccttggatcttatgcacagaacttgtaccatttgaatctgttttatgcttaaatcaaagtgctttgatcaaatgcataacctgccatatctttacatatttgttggtagcaatttgtattaaagaaatcacaagtgcaaataaaaagtcatttatcatttgtttaactaaactgtcatggtttagtttacaatttttaaaaagttcttaaaatactgaaaatgcagttgacacttgtgtatggcttatgaagttatttttgatagtcttacattacttgaattgttcaaagtacagtatattttaaattaagaaaagtgaactatatgtatttgttttatacatttaaggcttagactcataaataatgctattgtttatgatttgaaaactttcaggcaaaatccaatttacatttttcccttccctagcaattacttttttccagcttcaactcttcttagttactaatactttgttgactttaaaaatgaaatcattcacaaacttttggtatatgatggagaatgaaaaactagagtcagacagctttaattgacattgtcaacacctccagttatcaggaatacatttttttactgccttaacctgtagtgcgtagaatatgcatcaatttcttgaaggagattcatgtttttataagaattttcatgtaattattgcaattgtggtcaaataaggaacgtttcctgcttgaaattatattgatttaaatgatgtgtgagatgtttcaccattttcaggcactgtgtaattctattgtaataaactggcaggtatctttgtaactataaatagtgcatgctcagccatgtacactgtaaatagcctttaccaaacgtgtttgacaaggaccataattaacatcacttagtgaattgtgataaagaaaaaaaagccatgatttattcgatgtgattggcttgtttttatgtggcgccaagaacgaacctgtttaacagctgtaaccaatggtactgatctatccatccaatgttgtcattatatttgactgtggttcaacagtattgcgttgtcagactaggaaagctaaacgaacaaaatggttttagttttgctgaagactggccttattaatggacagctttcctaacaagagattattaacttttatcaggtgttaacatctgtttcaggaacatggcagtatgtttacatgtcagaagttttgtttaattctatggtatttctaaattgacttgtttaaataaattcagcaaatgg

SEQ ID NO: 9887 - DNA, 1400 bp, Homo sapiens
tcattgcctcaaaccctggggtaggtgggacggggggtctcgtgcccagatgaaaccatttggaaactcggcagcagagtttgtccaaatgacccttttcaggatgtctcaaagcttgtgccaaaggtcacttttctttcctgccttctgctgtgagccctgagatcctcctcccagctcaagggacaggtcctgggtgagggtgggagatttagacacctgaaactgggcgtggagagaagagccgttgctgtttgttttttgggaagagcttttaaagaatgcatgtttttttcctggttggaattgagtaggaactgaggctgtgcttcaggtatggtacaatcaagtgggggattttcatgctgaaccattcaagccctccccgcccgttgcacccactttggctggcgtctgctggagaggatgtctctgtccgcattcccgtgcagctccaggctcgcgcagttttctctctctccctggatgttgagtctcatcagaatatgtgggtagggggtggacgtgcacgggtgcatgattgtgcttaacttggttgtatttttcgatttgacatggaaggcctgttgctttgctcttgagaatagtttctcgtgtccccctcgcaggcctcattctttgaacatcgactctgaagtttgatacagataggggcttgatagctgtggtcccctctcccctctgactacctaaaatcaatacctaaatacagaagccttggtctaacacgggacttttagtttgcgaagggcctagatagggagagaggtaacatgaatctggacagggagggagatactatagaaaggagaacactgcctactttgcaagccagtgacctgccttttgaggggacattggacgggggccgggggcgggggttgggtttgagctacagtcatgaacttttggcgtctactgattcctccaactctccaccccacaaaataacggggaccaatatttttaactttgcctatttgtttttgggtgagtttcccccctccttattctgtcctgagaccacgggcaaagctcttcattttgagagagaagaaaaactgtttggaaccacaccaatgatatttttctttgtaatacttgaaatttatttttttattattttgatagcagatgtgctatttatttatttaatatgtataaggagcctaaacaatagaaagctgtagagattgggtttcattgttaattggtttgggagcctcctatgtgtgacttatgacttctctgtgttctgtgtatttgtctgaattaatgacctgggatataaagctatgctagctttcaaacaggagatgcctttcagaaatttgtatattttgcagttgccagaccaataaaatacctggttgaaatac

SEQ ID NO: 9888 - DNA, 1400 bp, Homo sapiens
ttaaggcctttgttcttgtgagatgcaaaacagctgctagtctgcaacctagttttccctctcacctttaactgacgttttgtcctcaataattacacaaggacctagagtacctataggacaaaaagtatagaataaaaatatgcctttagtcatttggtttttcttaaaaagttgagattcttaatctgacttacatgttactttatccgtatgtctttgttagtggagaccgctaaactaatgatgtttgaaaacagttcctctgttttagattggaagatagcactctagagtggacatacggaaagactgtgactttattttgtaatgggaggaagaaattttctcagagcaaactttctattttttacctgtgaaataacagtgactttttaaaatggtgacagtgttggcaaggaaacagcaacacaggctgcgctgttggtaggagtgaaaaccagtataattcttctgaaaaacatttatcagaaacttaaaatatttcataccgtttgatccagtagcttcttctaaatcataaatgcagacaatgtttaggtaaagacatactcattaagtgttatttattttactcaagaactggaaaccaactaaatgccttctatagaagtaatttttgatgaggagaaatggtacaatactaattaacaacttggtttaacatgtttactgagcatctgttaagtgttgggggaaaaagcagcaggatccagagctataggtacagtgtgatctcagctttgcaaacacattttctacatagatagtactaggtattaatagatatgtaaagaaagaaatcacaccattaataatggtaagattggtttatgtgattttagtggtatttttggcacccttatatatgttttccaaactttcagcagtgatattatttccataacttaaaaagtgagtttgaaaaagaaaatctccagcaagcatctcatttaaataaaggtttgtcatctttaaaaatacagcaatatgtgactttttaaaaaagctgtcaaataggtgtgaccctactaataattattagaaatacatttaaaaacatcgagtacctcaagtcagtttgccttgaaaaatatcaaatataactcttagagaaatgtacataaaagaatgcttcgtaattttggagtaggaggttccctcctcaattttgtatttttaaaagtacatggtaaaaaaaaaaattcacaacagtatataaggctgtaaaatgagaattctgccccctcacctcttaccccagtactattctccagaggtaatctattaacaatttcttatgtaattttcagaaaatttgtatgcgtatataagcaaatatgtaatctttattttttaaataaatgggatcatattat

SEQ ID NO: 9889 - DNA, 600 bp, Homo sapiens
  misc_feature (1)..(29): n is a, c, g, or t
nnnnnnnnnnnnnnnnnnnnnnnnnnnnnatccttgatgtcaacacagcccaaaaaccgcagagcatctttgtagtaggacgcgtggtttccgattgtttgatagtatttactggagagatcatagaaacgactgtgaaccgatgtcacaccaggaaggttgttgagcatttcttcaacatcttcaattgtttcctttgtaacctgtaggtccccgatgtttaattttagagctccaattgctgttttacacaggatcactgcctcatcactacttttcaccttctcacgagtcttttccagaaaagtaagagccacattaggatccagtcatctgtctaactacgtgaagaatgatttccacgagggacagaggattcaccctgtgttcaaattcactgataaagttttcataaagcttaatgagaccatctccttgggcaaagcacggatcctgcacaaaatcaagcacctgaagtgtcagctgatgccacaacttcttcgtgtagagctcctccagacggtgccacacagcgggctgcccgggcccggagctctggctctgctgtaggaagcccggtacgtccttcatgacagcagg

SEQ ID NO: 9890 - DNA, 600 bp, Homo sapiens
tcaggaaacccttgggcttaagcctcacttgctggtcctcaacaagatggacttggcggatcttacagagcagcagaaaattatgcaacacttagaaggagaaggcctaaaaaatgtcatttttaccaactgtgtaaaggatgaaaatgtcaagcagatcatcccgatggtcactgaactgattgggagaagccaccgctaccaccgaaaagagaacctggagtactgtatcatggtcattggggtccccaacgtgggcaagtcctccctcatcaactccctccggaggcagcacctcaggaaagggaaagccaccagggtgggtggcgagcctgggatcaccagagctgtgatgtccaaaattcaggtctctgagcggcccctgatgttcctgttggacactcctggcgtgctggctcctcggattgaaagtgtggagacaggcctgaagctggccctgtgtggaacggtgctggaccacctggtcggggaggagaccatggctgactacctgctgtacaccctcaacaaacaccagcgctttgggtgagtgcagtgaatgcagggcagctggggcccctcctcctagtcacctcattt

SEQ ID NO: 9891 - DNA, 600 bp, Homo sapiens
gggaaagtagaggatggctcgatgttttgcagctacctcttttccccgtgtttctttttagacaaattacactgcctgaagttgcagttcccctttccctggggagccccaagaacagagtcaggcaaggggtggggagtccaggggaacatcccagaatgcatatcgatcagctctcagccaggcttcgacaatctcgcagcccccactaggtggacacattaatgatttggtttctcccctgggcagccaacctgccccagaggcaccagacctgggctttcagctttgggaccaggctgcccaaaggtactcctttatacacccggcaccttccacgaaagatggtacttcccaagcaagcccctatgatttgtcactatagatggaaatgtgtggcatgcacatgagttgaaattcttttatgcatttttttgaagaaaaaaaaaaaaacaactctgaggacataggggatgtcagtttcctatggaagagacacctctgacccgttattcttataatcaaaatctgaagggaaaaaaatgttttagttctttccccactcgttgggttcaactagattaaaaggctgattttcag

SEQ ID NO: 9892 - DNA, 600 bp, Homo sapiens
ctgcgatgaatgtaggccacaaaccacagtagtattagcagtgcctgggacctcctcaacaacagaaattgccggtatttatagcacgttacagttgttgcagataatttccagagactgtttatatgcaccactgttttaaaattacggtgattggccaggtgcagtggctcacacctgtaatcccagcactttgggaggccaaagtgggtggatcacttgaggagttcaagaccagcctggtcaacatgtcaaaaccctgtacctacaaaaaaatacaaaagttaaccaagcctatgcttgtagtcacagctactcgggaggccgaggtgggagggtcttctgagcccagggaggtagaggcttcagtgagctgagatcgcaccaccacactccagcctgggtgacagagtgaaacccttaatcaatcagtcaataaaaattacagtaattattagacccaccactaggtcatcttatttgatgcatcagtaaagcagcatattcaaatgtggatttttaaatattttaattactatttaaatatctctttactttgtaatcctatgcattttacgcattaaaacattttaagcattt

SEQ ID NO: 9893 - DNA, 1400 bp, Homo sapiens
cagtagtgctctgcatagtttactgaaacgagtggtcagcacatttagtaaggacacaggagagcttgcatcttcatttttagaatttatgagacaaattcttaactctgacacaattggatgctgtggagatgataatggtctcatggaagtagagggagctcatacatcacggacgatgagtattaatgctgcagagttaaaacagcttctacaaagcaaagaagaaagtccagaaaatttgttccttgaactagagaagcttgttttggaacattcaaaagatgatgacaatctggattctttgttggacagtgtagttggacttaagcagatgctggagtcatcaggtgaccctttacctctcagtgaccaggatgtagaaccagtactttcagctccagaatctcttcagaatctgtttaacaataggactgcctatgtgcttgctgatgtcatggatgatcagttgaaatctatgtggttcactccatttcaggctgaagagatagatacagatctggatttggtaaaggttgacttaattgaactctctgaaaaatgctgtagtgactttgatttgcactcagaattagagcgctcatttttgtcagaaccatcatctccaggaagaaccaagactactaaaggattcaaacttgggaagcacaagcatgagacctttataacgtcaagtggaaaatctgaatacattgaacctgccaaaagagctcatgttgtgccaccaccaagaggaaggggcaggggaggatttggacagggtatacgacctcatgatatttttcgtcagagaaaacagaacacaagtagaccaccatctatgcatgtggatgactttgttgctgctgaaagtaaagaagtggttcctcaagatggaatacctccaccaaaacggccactcaaagtatcacagaaggaacaagaggctccagttggagtgctcagaatactcctcgaggaaattacaatgaaagtcgtggaggccagagcaattttaacagaggccctcttccaccattacgaccccttagttctacaggttaccgcccaagtcctcgggaccgtgcttctagaggtcgtgggggacttggaccttcctgggctagtgcaaatagcggcagtggaggctcaagaggaaagtttgttagtggaggcagtggtagaggtcgtcatgtacgctcctttacacgataaaaatccttttgggaacatcttaactgtatatgaacatttcacgaggacaataaaaataagacattgaaggaccaatttagacttagcagttatctggagacatctgagagaatatttttatctgaagaaagcagaatttgtttgatacctaacaagatttcaataaaaatccaaactttgtatgt

SEQ ID NO: 9894 - DNA, 600 bp, Homo sapiens
aaataggtcactgaatgataagatttgcaccttagaacaataatcattttaaggataacaagtaaatgtctgaaagcatgaggggctttatttgcctttacctcatatgagtctttgatcttgaaccgatacttttggatctcattgttgatatacctgaatttactttgtaagagattttaacttcacttcatgctgatgatgtatcaaattcattttatagaaagatttaaagtttttttctggaagtgatatatgtcaaattacatttcctactgcagtatttgagcagggacagtcattttttaaatgtttttggccgggcgtggtggctcatgcctgtaatctcagtacattgggaggccaaggcaggtggatcacctgaggtcaagagttcgaggccagcctggccaacatggtgaaaccctgtctctactaaaaatacaaaaaattggccgggcgtgatggtgggcgcctgtaatcccagccactccagaggctgaggcaggagaatcgcttgaacctgcgaggcagagattgcagtgagccaagatcaagccattgtactccagcctggacaacaagagcgaaactctgtct

SEQ ID NO: 9895 - DNA, 600 bp, Homo sapiens
ttttatgtcacccatgatgaaaactggactttatatatctaaacatacaagtatgaactattctatttaaaatttttaatagtttttttcttttttggtgcctataattgattggtcatttctgctggcttttctccaatgaacattgaaatcttcctgtatatgttaccaataagaaaactaccctggaacagtagaaaaacccaacaagagacttggcattcatcaagcacattatcagactttgagaacatattgaaggcattgactttgaaaatcatctctttttctcaagaagaaagcaatggagaagcaaatttgtttcattcagtgaatccccagtttggggcttgtggggcttagagacattgtgaaatcaaatcttgtgttatacttttctcctggctcactttttttgagaaggtttatgggctatttggctggtgagacacgatcccctcctaagaaaatgtaggtgctcagacaggtaaccactgctgctactgtttttatttgtttgtttgttcaattttatttaagatttgtttttgttgtactaggattttaaaaaatgtaatatattgcaggatttataaccag

SEQ ID NO: 9896 - DNA, 600 bp, Homo sapiens
tgaccggactggggttttaaggggtgtggcaggaggttttggactcgatgagtttccaccgaaatgtcggagaagtcaggccagagcacaaaagcaaaggatgggaaaaagtatgcaacactcagtttatttaatacttacaaggggaaatcattagaaacacagaaaaccacagttgcagctcgacatggattacagagtcttggaaaagtcggtatttcacggcgtatgcctccacctgctaacctcccaagtcttaaagcagaaaacaaaggcaatgatcctaatgtaaacattgtacctaaagatggcacagggtgggcatcaaaacaagagcaacatgaagaagaaaaaacaccagaagtgccaccagcacagccaaaacctggggttgcagctcccccagaagtagcacctgctcccaaatcatgggccagtaacaagcaaggaatccaagtgaatagtcagtttcagcaagaatttcccagcctgcaggcagctggggatcaggaaaaaaaagaaaaggaaacaaatgatgacaactatggacctggacccagtttacgtccaccaaactagatgttgcttgttggagagatg

SEQ ID NO: 9897 - DNA, 1400 bp, Homo sapiens
gtatgcacccatttttttgagtgcatataatttagacctaaaaatccttatgattagatgaaacaccaaaaatataaggaaaataacacagcagaggaatagctcagcctgaacagtgtgatggtcccagctactacatcagatgcggtttttttgctcccttatgttcttcggatatggttatggcatttgtaggcttggaggtaaagaactgaagataactggtgctggatagaggagccttattttttattatggcagcttgctatttttataacatggtgattgagttgaacacaatcaaagtacagtagtaactgatgtccccttcttcctggatgaatgagcagataaatattgatgtcagcatccttgaaccatatcaaagtgagcagtgtttggctactgcttctatttgaaatggtgctgtgttttggttgtggtctgaagctttgaagcgctacttagcatctcctttcttccatggagctctcacgattcaaacatgacagatttggtaaaatgctggttaggttgagtcttccttgcccccactcagtcatctttgtatgaatcccatgatttgggggtttttttctttttttttttataccagtttttagctggtgtttatgaagaacagtgagtacctagaactgtgccactaattaaaggaaatcctaagaaggtgcatttctttacagagctgtgtcatgccatcctttgggccctctgctggaaaagtagaatcaagtctcaaataatgcctttttaattgtatcctctagtattatagatataggacagtactgtatcatacctctgtgaatgtaaaatatcttgtacctgctttatgatacgtagtagtgaccgtgctttatcagagctgtttttaatgatgttattctagaatgttttctttccagatgatgattcagaagctaattttaaaaaacggtgccaggtaccacaacagtaacagaactttgcaattttctggggttttgttttttacctttttccccccttttttttaaatggagtgtgctggatgtctctataattttattcagatgactgcagaacctggaaaagctgttgctgctattgatgcataacatactgctattggtctttttatataaatatatatatatatatacatatatatatataatttgaatttttggaaactttagctgtgctgtcaactttggaaaaagtatcccggtttactgtgttgagttggcattgtacagaaattaacagccatattggtctagaaacgttaaacttaatttttttccatttgtacaggggtaacgcactgtattaaatatgtaaggtcttatctacatgggtttgattacagaaactaataaagtattctctaaataatg

SEQ ID NO: 9898 - DNA, 600 bp, Homo sapiens
ccaggtaacaaaactaaagcatgggcaacatttacagaccactggatggtgaagaattcccatgaacccctggttcacactgtaaggacacactactcagcatgggcaacatttacagactactggatggtgaagaattcccatgaacccctggttcacactgtaaggacagactactcagcatgggcaacatttacagaccactggatgatgaagaattcccatgaactcctggttccaactgtaaggacacactactcagctgtagcctgaagccgcctccttacatactgtaagtttagcctataggtttctccatacgtagtgaacagtcatctaattggatgtgtggacactgtaacctactcttgaatcagtcacaggcagcagcacttcaaactctgtttcaataagccagacacgagctgtagccaccctgctgtttgcaggcctcacctctgccttctgtgcctcactcccttttctgtccgtaagtctttggccacacagtggcactggagtctctctgagcctattctggtttgaggggttcccctgattcctgaatcattctttgctcaattaaactctgtaaaattt

SEQ ID NO: 9899 - DNA, 600 bp, Homo sapiens
ggtctcactctgctcatcagcatgattctggctgtcctctatagaaggaaaaactctaaacgggattacactgggtaagaaacactgtttttttagggcaggggtggagggagggaatcagggtttatagaaacttctgtatttaatgaaaaaaggattttaaagaattaactactattttctttcatgtcagaatcaggcagtctccttaggaggtgttctaacatgggcaagtggaaatcagtgggcctgctattaaatgtggaatatgattctaatctctgttccagtttccttcttaggtttggtgagatgagctgctcagcagtctgtgctctgtgtttcaataccatccactatgcaattagtattcttaagacatcacttacccaatttaagagtttaatttcaatttcttgctaataaactcacaaggtggttctttccagttaggaaatataaaaccctaattaagaagttgtgagctggaattagtggcatgtgcctgtaagtcccagctacttaggctgtggcaggaggattgcttgagccgaggcgtttgaatctagcctaggcaacatagcaagatcctgtctcttt

SEQ ID NO: 9900 - DNA, 600 bp, Homo sapiens
caccatttaaagacagaatcagctgggctggagaccttgacaagaaagatgcatcaatcaacatagaaaatatgcagtttatacacaatggcacctatatctgtgatgtcaaaaaccctcctgacatcgttgtccagcctggacacattaggctctatgtcgtagaaaaagagaatttgcctgtgtttccagtttgggtagtggtgggcatagttactgctgtggtcctaggtctcactctgctcatcagcatgattctggctgtcctctatagaaggaaaaactctaaacgggattacactggctgcagtacatcagagagtttgtcaccagttaagcaggctcctcggaagtccccctccgacactgagggtcttgtaaagagtctgccttctggatctcaccagggcccagtcatatatgcacagttagaccactccggcggacatcacagtgacaagattaacaagtcagagtctgtggtgtatgcggatatccgaaagaattaagagaatacctagaacatatcctcagcaagaaacaaaaccaaactggactctcgtgcagaaaatgtagcccattaccacatgtagccttgga

SEQ ID NO: 9901 - DNA, 600 bp, Homo sapiens
tcagagaaagcagtgaaagattatgaacaggaaaagtcttggcaagactcagagagattaaaaggaatcttagagcgtggaaaagaagaattggctgaagctgagattataaaagattcgcctgattccccagaacctccaaacaaaaaaccccttgttgaaatggatgaaactccacaagtggaaaaatcaaaagggccagtgtcgttattatccttgtggagtaatagaatcaatactgccaattccagaaaacatcaggaatttgctggacgtttgaactctgttaataacagagctgaactatatcaacatcttaaagaggaaaatgggatggagacaacagaaaatggaaaagccagccggcagtgaagagtgacttgaagaactaaatttagcatattgcaaaaatattttgtgcggaattcgatataagtacttttacagcaagatggtatagttatgttgcctggactggtttttacatttttaaaatatttcagctgtcatttttgtactaattataaaattggcacataattcaaaaatatacatttgagatgatttgtcctcccaaattatacaagtttattttatggt

SEQ ID NO: 9902 - DNA, 600 bp, Homo sapiens
tttatatggtaattttatgtataatttcatatattggtaaaattcaaaactacacttgagaatttttttatcttaagtttggggtgaatggggtggatgagactgattgaatagaaaagggctaatggcccaaacattatatagatttctttttttcagtcagaggccttatttgatattttataaataaatgacagtttttatttttaaactttttattgtttttgggaaagtattccttaatttaatgacacattcattcagatacttcttatccctgctaataaaggaaatctatttcaagctacaccattgagattaagtctgaggcagttcattgaggcagctctactataaaagcttacttgataaataattatttttgtaaacaagttgggttaacttattcttcgtctttttgcttggatatgaatttaaggtcttcatgtttaaagacatttactttgttatttagtgacacatttccatcctattttttttttttttttggttgttgttaaacagaaccttaagtttatgtttgaggtatgtactgcataggaacctattttattattaaagatgaatgattaaaattgg

SEQ ID NO: 9903 - DNA, 1400 bp, Homo sapiens
tgtccacctctgattacatgtatgttcttgtttgtatcattagcaacaacatgctaatgacgacacctagctctaagagcaattctgggagaatgaaaggaagtataaagtaacccataatctgcttggcaatagttaagtcaatctatcttcagtttttctctggcctttaaggtcaaacacaagaggcttccctagtttacaagtcagagtcacttgtagtccatttaaatgccctcatccgtattctttgtgttgataagctgcacatgactacatagtaagtacagaacagtaaagttaaaacggatgtctccattgatctgccaaatcgttatagagagcaatttgtctggactagaaaatctgagttttacaccatactgttaagagtccttttgaattaaactcgactaaaacaagtgtataactaaactaacaagattaaatatccagccagtacagtattttttaaggcaaataaagatgattagctcaccttgagataacaatcaggtaagatcataacaatgtctcatgatgtaaaaaatattaaagatatcaatactaagtgacagtatcactctaatataatatggatcagagcatttattttggggaggaaaacagtggtgattaccggcattttattaaacttaaaactttgtagaaagcaaacaaaattgttcttgggagaaaatcaacttttagattaaaaaaattttaagtatctaggagtatttaaatccttttcccataaataaaagtacagttttcttggtggcagaatgaaaatcagcaacttctagcatatagactatataatcagattgacagcatatagaatatattatcagacaagatgaggaggtacaaaagttactattgctcataatgacttacaggctaaaattagttttaaaatactatattaaattctgaatgcaatttttttttgttcccttgagaccaaaatttaagttaactgttgctggcagtctaagtgtaaatgttaacagcaggagaagttaagaattgagcagttctgttgcatgatttcccaaatgaaatactgccttggctagagtttgaaaaactaattgagcctgtgcctggctagaaaacaagcgtttatttgaatgtgaatagtgtttcaaaggtatgtagttacagaattcctaccaaacagcttaaattcttcaagaaagaattcctgcagcagttattcccttacctgaaggcttcaatcatttggatcaacaactgctactctcgggaagactcctctactcacagctgaagaaaatgagcacacccttcacactgttatcacctatcctgaagatgtgatacactgaatggaaataaatagatgtaaataaaattgagttctcatttaa

SEQ ID NO: 9904 - DNA, 600 bp, Homo sapiens
aatctgagttggttggttggtttttttttttcactccaaacccttggtcaccagcttatattgtcatttagagtatcagaaaaattgccccagactctgcaacaacatggagcttgggttcaccagcctccctttccatagtcctcattgccactgctgctgtccagggtctgatttcactaccctgagtctcatttccttatctctcagtggaagataaagccactgcctagcacccaggattgttacagggatcagattagatgctcaggaagatgctcttgggacactgcaagggacaggattcttcaggcgtcgcttggaactgtggtgcctctgtgaggtggatgtcccaggcagagccagccagccagccctgacctgagctcgctgctgaccctgccacagattggctgtgtgtctctggacaggtggcttggccactctggacctctaccaaataaagagctggccggccaggcacagtggctcacacctgtaatcccagcactttgggaggccgaggcgggtggatcacaaggtcaggagattgagaccatcctggctaacacggtgaaaccccatctctaccaaaaatac

SEQ ID NO: 9905 - DNA, 600 bp, Homo sapiens
ccccagacttaatacccattgaaatttcacctcaggtgttgtgtcctgtgtctggttaagtgtcccatggaaggggaaagccttcacgtcagaacccaaccctataccttttacttcttaaatggtgctaaccacaggtgtcccagggtgctctgtgccagttaagatttttaactttcaaggggcagggcatactgggaaatgtagtttcccaaactgccttatcacttgggtggacatatgtctccttttatgccttttggtcttgagtaattaacagcatcctcttccacgctcagaagtgttctggttggggccaggcatggtggctcacacctgtagtcccaacacttagggaggccgaggcgggcggatcacctgagatcaggagttcaagaccagcctggccaacatggcgaattcccgttctctactaaaaatacaaaaaatgtgtggggtgtggtggcaggagcctgtaatcctagctactcaggaggctgaggcaggagaatcgcttgagcccaggaggcggagattgcagtgagccgagatcgtgtcactgcactccagcctgggtgacaagagtgagactccgtctcc

SEQ ID NO: 9906 - DNA, 600 bp, Homo sapiens
gtccaatgaggaccagtccatgggcaattggcagatcaagcgccagaatggagatgatcccttgctgacttaccggttcccaccaaagttcaccctgaaggctgggcaggtggtgacgatctgggctgcaggagctggggccacccacagcccccctaccgacctggtgtggaaggcacagaacacctggggctgcgggaacagcctgcgtacggctctcatcaactccactggggaaggctcccactgcagcagctcgggggaccccgctgagtacaacctgcgctcgcgcaccgtgctgtgcgggacctgcgggcagcctgccgacaaggcatctgccagcggctcaggagcccaggtgggcggacccatctcctctggctcttctgcctccagtgtcacggtcactcgcagctaccgcagtgtggggggcagtgggggtggcagcttcggggacaatctggtcacccgctcctacctcctgggcaactccagcccccgaacccagagcccccagaactgcagcatcatgtaatctgggacctgccaggcaggggtgggggtggaggcttcctgcgtcctcctcacctcatgcccacc

SEQ ID NO: 9907 - DNA, 600 bp, Homo sapiens
cccccaccccggggaccctgtgacatggtgcctgagaggcaggcatagaggcttctccgccagcctcctctggacggcaggctcactgccaggccagcctccgagagggagagagagagagagaggacagcttgagccgggcccctgggcttggcctgctgtgattccactacacctggctgaggttcctctgcctgccccgcccccagtccccacccctgcccccagccccggggtgagtccattctcccaggtaccagctgcgcttgcttttctgtattttatttagacaagagatgggaatgaggtgggaggtggaagaagggagaagaaaggtgagtttgagctgccttccctagctttagaccctgggtgggctctgtgcagtcactggaggttgaagccaagtggggtgctgggaggagggagagggaggtcactggaaaggggagagcctgctggcacccaccgtggaggaggaaggcaagagggggtggaggggtgtggcagtggttttggcaaacgctaaagagcccttgcctccccatttcccatctgcaccccttctctcctccccaaatcaatacactagttgtttct

SEQ ID NO: 9908 - DNA, 781 bp, Homo sapiens; identical to SEQ ID NO: 4673

SEQ ID NO: 9909 - DNA, 1400 bp, Homo sapiens
attgaaattgagtccttctatgaaggagaagacttttctgagaccctgactcgggccaaatttgaagagctcaacatggatctgttccggtctactatgaagcccgtccagaaagtgttggaagattctgatttgaagaagtctgatattgatgaaattgttcttgttggtggctcgactcgaattccaaagattcagcaactggttaaagagttcttcaatggcaaggaaccatcccgtggcataaacccagatgaagctgtagcgtatggtgctgctgtccaggctggtgtgctctctggtgatcaagatacaggtgacctggtactgcttgatgtatgtccccttacacttggtattgaaactgtgggaggtgtcatgaccaaactgattccaaggaacacagtggtgcctaccaagaagtctcagatcttttctacagcttctgataatcaaccaactgttacaatcaaggtctatgaaggtgaaagacccctgacaaaagacaatcatcttctgggtacatttgatctgactggaattcctcctgctcctcgtggggtcccacagattgaagtcacctttgagatagatgtgaatggtattcttcgagtgacagctgaagacaagggtacagggaacaaaaataagatcacaatcaccaatgaccagaatcgcctgacacctgaagaaatcgaaaggatggttaatgatgctgagaagtttgctgaggaagacaaaaagctcaaggagcgcattgatactagaaatgagttggaaagctatgcctattctctaaagaatcagattggagataaagaaaagctgggaggtaaactttcctctgaagataaggagaccatggaaaaagctgtagaagaaaagattgaatggctggaaagccaccaagatgctgacattgaagacttcaaagctaagaagaaggaactggaagaaattgttcaaccaattatcagcaaactctatggaagtgcaggccctcccccaactggtgaagaggatacagcagaaaaagatgagttgtagacactgatctgctagtgctgtaatattgtaaatactggactcaggaacttttgttaggaaaaaattgaaagaacttaagtctcgaatgtaattggaatcttcacctcagagtggagttgaaactgctatagcctaagcggctgtttactgcttttcattagcagttgctcacatgtctttgggtgggggggagaagaagaattggccatcttaaaaagcgggtaaaaaacctgggttagggtgtgtgttcaccttcaaaatgttctatttaacaactgggtcatgtgcatctggtgtaggaagttttttctaccataagtgacaccaataaatgtttgttatttacactggtc

SEQ ID NO: 9910 - DNA, 1021 bp, Homo sapiens; identical to SEQ ID NO: 4675

SEQ ID NO: 9911 - DNA, 1400 bp, Homo sapiens
atgacatttcagctgctttggccacatgaagttctggtattcttttgagctaatatggtattgagtaaagtatactttttgcagtagatcatgccctgacctccaataaaaacctctttaaaacaatgctgatttttgaattcatgattagttttagtaaattaataggtttggccattctaaaatccaaaattatgataactgtatttctaggggtatgtttcaccttgattttggcccggttctttcagtgttccgtttaccctttttactgaaagtaagtgacttaaaaggatggaagaaaaactacatggttggagtgtttttagatcagataaatatagaaaagtaaaatggaaaatgatactcaatacctagttaaactcatttcacttctcctgggagacgtattaagactggaagtcctattttatttaatcagtatcagtaaaaagacaaaaattacagtgtgaacaagagaaaaacaggaatagaagaaaaaagttgcaggttgaattatctatctggatattactagagttgtaaaacacaacttggaaactggaatttatgtgaagaaccaaacaacttaaaccagcatcacttttgtcttcaatttgccttccagtgattttagtttacaacctgcgttttgttatttgaaacacacacacttatatataaacacatgtaattttactattttattgtctttcctttaatcgatgaattgattaaatttagacaattaaaacatttctaaagtgagactgaaaataatatagaaaatctcattgctacttgtgattatcaaaaaaagtatgtattttctttctaaagttatctataaatatgtttttgatatgttggacatgaattaccctgtcatgaagcgtttaaattgttaaaatgctgattttcttattagtttgttaattgcctgttactagtacttgaccaatacattgtgctatatgtaaatgtgtaaataaatattgtaattttctcacaaagtctgtgaatatcacattatgatttatttatcagaaattccaaaaagtaaaaatattacctttgaggactttttttttttaaaaaaagaattattatcagagaacataagcacaagtataagattgtatccataaaagtttctgaaaaacttagggacatcctgtttttaaatgggtttgtttgagggtattatcttctggtaatatagatgagctttatatttttatattatgtaatttgagttgaaagtataacattttactactgacttctctaaacagaagcatttctatagatagttgtgcttttatttatgaaatacataaaagccaacagtttcattgtctaacacacttctttttctaaggaataaacaagtctgatgt

SEQ ID NO: 9912 - DNA, 1400 bp, Homo sapiens
cagaaagtgcaagacatgccaatttgagacacacggtcttctaagactgaaggataaatttaatgcatttcagaaactaaacatcacagcaagctctatctctgagctataatttgtttttaatgcaaagacactagtttgataatatatactgtaatcctgaaacatttgtgttacttacctttggaggtagaaattataccaataaattattgcaccgttagtattagattctgtgtaccttggaagttatgtcattaatataggctggttcatcaaataaagcaaaaccttgcaatatcagctagatttacactccgggacgttgcccaaaggtaggaagaaagcagagggaaatatttcagtcatcatttccaaagtcattatcaaaatctgtgaggaagtttaatcttccaaagagtcaatgtcagacatcaggcctctgttgcctgcttctctcgaggcactagattaggagtcttcaataagagacttaacatgaggtatatggaagatgaggcaccgagataagttcatcattaggtgtgagcactgctcacccttgctggcaagttctccttaagggcctgaagcacaggtgtccaaagaaaagcgttaagtccatcttaatagaatctatgtggtatatgatgtggtcagcccctggtctgtgatcagcaagaacctacagcacagattatgccctgcccacttcaatgaatacctactctcctccattctccatcactttttttgctatcaagaactccggaccttgcccatggagaagtttagagaggaactcttgtggagagctggtttattttctgccctgtgcgacgagtttcagctggccaagaaaggagtcaagttattaaaaagcatcacaatgtagatctccaggctggttttttgttttttgttgttaagactggggaaagggggactatttattctgccttaaatcaatggcaaataagtcaagatgacattttgtgaatgtagactatggatacactcctaatagattgatgtagtcataaaagggggtcaagtagatgtttttctgttatgtaagcaataatttttccgtgtcttattgagtatggctagcgattatttattacatgctagatgggttctttgcatgtgggttccatataggtgcagaaatttcctcagccactggagggatttcgaccatatttgtcatttggatgagctgttattagattgaaatctacacatcatttcattaaaaattgtgccttagaaaacgcaaagctgttgcacatggcgataaattatggatgcagtacattgaagagagatgaagtcacttccaagtttccaagacttctcatggaggtgtttgctgttttacaggaaaaaataaaaat

SEQ ID NO: 9913 - DNA, 1345 bp, Homo sapiens; identical to SEQ ID NO: 4678
  misc_feature (672)..(674): n is a, c, g, or t

SEQ ID NO: 9914 - DNA, 1400 bp, Homo sapiens
cggggggtggcgggcccaggccctattggccgggagccggaccccgattccgactgggagccggaggaacgggagctgcaggaggtggagaggtaccggcttctccccgggccctcagcttgaagcagggcctcgtgccccggcgctccaggccgcgcccccttggcgccgggtgtcctgccgctgcttgcgcagcggcccttgtttcttcttacccgttgttaggggcgcagcgtcaggtgttcagctcccctgggaccactggtcccttcattagtgacgtatttcatcatcagtttagagagttcggcatgcttacaggcagttattgttctaggtgttagctttctgggtgtacggagcagctctaagccggcaacatggcccggttgcccttgcgatcaaagagaagagggctgggcgctccatgatttagcctgaggctcttcaaacatccattctgcttccacgcatggcttctgccattggttctcttcccccagcaccctgaaacgacagaaacaagcaatccgattccagaaaattcggaggcaaatggaggcgcctggtgccccgcccaggaccctgacgtgggaagccatggagcagatacggtatttacatgaggaatttccagagtcctggtcagttcccaggttggctgaaggctttgatgtcagcactgatgtgatccgaagagttttaaaaagcaagtttttacccacattggagcagaagctgaagcaggatcaaaaagtccttaagaaagctgggcttgcccactcgctgcagcacctccggggctctggaaatacctcaaagctgctccctgcaggccactctgtatcaggctctttgcttatgccagggcatgaagcctcatctaaagacccaaatcacagcacagctttgaaagtgatagagtcagacactcacaggacaaatacaccaaggagaaggaagggaagaaataaagaaatccaggacctggaggagagctttgtgcctgttgctgcacccctaggtcatccaagagagctgcagaagtactccagtgattctgagagccccagaggaactggcagtggtgcgttgccaagtggtcagaagctggaggagttgaaggcagaggagccagataacttcagcagcaaagtagtgcagaggggccgagagttctttgacagcaacgggaacttcctgtacagaatttgagtcggggcttggcttatggagatgcctcgtgaaacacagctgggcaagtattaatgtatatggaacagcctggataagtttgccttctgacctcatttccttcttgatcagtgaacactaacattttggggacaacttagtcaattggttttccttacaacaaaataaagtaaaatgtagcagtc

SEQ ID NO: 9915 - DNA, 1400 bp, Homo sapiens
agacaggtcctactggaaggagttcctggtgatgtgcacgctctttgtgctggccgtgctgctcccagttttattcttgctctaccggcaccggaacagcatgaaagtcttcctgaagcagggggaatgtgccagcgtgcaccccaagacctgccctgtggtgctgccccctgagacccgcccactcaacggcctagggccccctagcaccccgctcgatcaccgagggtaccagtccctgtcagacagccccccggggtcccgagtcttcactgagtcagagaagaggccactcagcatccaagacagcttcgtggaggtatccccagtgtgcccccggccccgggtccgccttggctcggagatccgtgactctgtggtgtgagagctgacttccagaggacgctgccctggcttcaggggctgtgaatgctcggagagggtcaactggacctcccctccgctctgctcttcgtggaacacgaccgtggtgcccggcccttgggagccttggggccagctggcctgctgctctccagtcaagtagcgaagctcctaccacccagacacccaaacagccgtggccccagaggtcctggccaaatatgggggcctgcctaggttggtggaacagtgctccttatgtaaactgagccctttgtttaaaaaacaattccaaatgtgaaactagaatgagagggaagagatagcatggcatgcagcacacacggctgctccagttcatggcctcccaggggtgctggggatgcatccaaagtggttgtctgagacagagttggaaaccctcaccaactggcctcttcaccttccacattatcccgctgccaccggctgccctgtctcactgcagattcaggaccagcttgggctgcgtgcgttctgccttgccagtcagccgaggatgtagttgttgctgccgtcgtcccaccacctcagggaccagagggctaggttggcactgcggccctcaccaggtcctgggctcggacccaactcctggacctttccagcctgtatcaggctgtggccacacgagaggacagcgcgagctcaggagagatttcgtgacaatgtacgcctttccctcagaattcagggaagagactgtcgcctgccttcctccgttgttgcgtgagaacccgtgtgccccttcccaccatatccaccctcgctccatctttgaactcaaacacgaggaactaactgcaccctggtcctctccccagtccccagttcaccctccatccctcaccttcctccactctaagggatatcaacactgcccagcacaggggccctgaatttatgtggtttttatacattttttaataagatgcactttatgtcattttttaataaagtctgaagaattactgttt

SEQ ID NO: 9916 - DNA, 1400 bp, Homo sapiens
acacagcagatggtacaccgtgacccacccgtgcccacaccccggcctggagcgtgcatcaccaacagtgcccgggaaaggaagatcaactcatccctgcagctcccagaccgcgtgctgaacttcctcaaggaccacttcctgatggacgggcaggtccgaagccgcatgctgctgctgcagccccaggctcgctaccagcgcgtggctgtacaccgcgtccctggcctgcaccacacctacgatgtcctcttcctgggcactggtgacggccggctccacaaggcagtgagcgtgggcccccgggtgcacatcattgaggagctgcagatcttctcatcgggacagcccgtgcagaatctgctcctggacacccacagggggctgctgtatgcggcctcacactcgggcgtagtccaggtgcccatggccaactgcagcctgtacaggagctgtggggactgcctcctcgcccgggacccctactgtgcttggagcggctccagctgcaagcacgtcagcctctaccagcctcagctggccaccaggccgtggatccaggacatcgagggagccagcgccaaggacctttgcagcgcgtcttcggttgtgtccccgtcttttgtaccaacaggggagaagccatgtgagcaagtccagttccagcccaacacagtgaacactttggcctgcccgctcctctccaacctggcgacccgactctggctacgcaacggggcccccgtcaatgcctcggcctcctgccacgtgctacccactggggacctgctgctggtgggcacccaacagctgggggagttccagtgctggtcactagaggagggcttccagcagctggtagccagctactgcccagaggtggtggaggacggggtggcagaccaaacagatgagggtggcagtgtacccgtcattatcagcacatcgcgtgtgagtgcaccagctggtggcaaggccagctggggtgcagacaggtcctgggctcggacccaactcctggacctttccagcctgtatcaggctgtggccacacgagaggacagcgcgagctcaggagagatttcgtgacaatgtacgcctttccctcagaattcagggaagagactgtcgcctgccttcctccgttgttgcgtgagaacccgtgtgccccttcccaccatatccaccctcgctccatctttgaactcaaacacgaggaactaactgcaccctggtcctctccccagtccccagttcaccctccatccctcaccttcctccactctaagggatatcaacactgcccagcacaggggccctgaatttatgtggtttttatacattttttaataagatgcactttatgtcattttttaataaagtctgaagaattactgttt

SEQ ID NO: 9917 - DNA, 1400 bp, Homo sapiens
catcaacctcaactgtgtgtgcaactgaggaacatggctcaagaaactaatcacagccaagtgcctatgctttgttccactggctgtggattttatggaaaccctcgtacaaatggcatgtgttcagtatgctataaagaacatcttcaaagacagaatagtagtaatggtagaataagcccacctgcaacctctgtcagtagtctgtctgaatctttaccagttcaatgcacagatggcagtgtgccagaagcccagtcagcattagactctacatcttcatctatgcagcccagccctgtatcaaatcagtcacttttatcagaatctgtagcatcttctcaattggacagtacatctgtggacaaagcagtacctgaaacagaagatgtgcaggcttcagtatcagacacagcacagcagccatctgaagagcaaagcaagtctcttgaaaaaccgaaacaaaaaaagaatcgctgtttcatgtgcaggaagaaagtgggacttactgggtttgaatgccggtgtggaaatgtttactgtggtgtacaccgttactcagatgtacacaattgctcttacaattacaaagccgatgctgctgagaaaatcagaaaagaaaatccagtagttgttggtgaaaagatccaaaagatttgaactcctgctggaatacaaaattcttgagcatctgcaaactaaaaattgacttgaggttttttttttcctagtcattgggaatgtagagcagtgtatcttgcatgtcatcggaagaatagatttttgttttggttttgttttgaaaatgactctgaacatttatttccattgcaatttctgtggctgaggagacttaaactttacaagtattatccttttaagatcattttaattttagttgagtgcagagggcttttataacaaacgtgcagaaattttggagggctgtgatttttccagtattaaacatgcatgcattaatcttgcagtttattttctcattgtgtatgtatatatcgcttttctctgcagcacgatttctcttttgataatgccctttagggcacaactagttatcagtaactgaatgtatcttaatcattatggctgcttctgttttttcattaacaaaggttattcatatgttagcatatagtttctttgcacccactatttatgtctgaatcatttgtcacaagagagtgtgtgctgatgagattgtaagtttgtgtgtttaaacttttttttgagcgagggaagaaaaagctgtatgcatttcattgctgtctacaggtttctttcagattatgttcatgggtttgtgtgtatacaatatgaagaatgatctgaagtaattgtgctgtatttatgtttattcaccagtctttgattaaataaaa

SEQ ID NO: 9918 - DNA, 1400 bp, Homo sapiens
ttccacgtggtgatcggctctcaggcggaagaaggccagtacagcctgaacttccacaactgcaacaattcagtgccaggaaaggagcatccattcgacatcacggtgatgatccgggagaagaaccccgatggcttcctgtcggcagcggagatgccccttttcaagctctacatggtcatgtccgcctgcttcctggccgctggcatcttctgggtgtccatcctctgcaggaacacgtacagcgtcttcaagatccactggctcatggcggccttggccttcaccaagagcatctctctcctcttccacagcatcaactactacttcatcaacagccagggccaccccatcgaaggccttgccgtcatgtactacatcgcacacctgctgaagggcgccctcctcttcatcaccatcgccctgattggctcaggctgggccttcatcaagtacgtcctgtcggataaggagaagaaggtctttgggatcgtgatccccatgcaggtcctggccaacgtggcctacatcatcatcgagtcccgcgaggaaggcgccagcgactacgtgctgtggaaggagattttgttcctggtggacctcatctgctgtggtgccatcctgttccccgtagtctgtggcagtgaacctggccaagctgaagctgttccggcattactatgtcatgtcctggccccacgcctgctcgcgcccctgcaggtcatctgctacgtctacttcacccgcatcatcgccatcctgctgcaggtggctgtgccctttcagtggcagtggctgtaccagctcttggtggagggctccaccctggccttcttcgtgctcacgggctacaagttccagcccacaggaaacaacccgtacctgcagctgccccaggaggacgaggaggatgttcagatggagcaagtaatgacggactctgggttccgggaaggcctctccaaagtcaacaaaacagccagcgggcgggaactgttatgatcacctccacatctcagaccaaagggtcgtcctcccccagcatttctcactcctgcccttcttccacagcgtatgtggggaggtggagggggtccatgtggaccaggcgcccagctccccgggaccccggttcccggacaagcccatttggaagaagagtcccttcctccccccaaatattgggcagccctgtccttaccccgggaccacccctcccttccagctatgtgtacaataatgaccaatctgtttggctacgccgttgtcttgcctttttgggggttggggtctacacggaggttgtgtttacaatgtagaaacctgttttcgctgtgtgtggcgggggcgcgggcacagggtccgtgtctttgtatattcaataaatattcattcagtaa

SEQ ID NO: 9919 - DNA, 600 bp, Homo sapiens
cagcacgcccccgccaatgactacctggtgacctcacacatccacctgcatgtgcccgagggcgccacccccaaggacggcccaagcgcaggctgcaccatcgtcacggccctgctgtccctggccatgggcaggcctgtccggcagaatctggccatgactggcgaagtctccctcacgggcaagatcctgcctgttggtggcatcaaggagaagaccattgcggccaagcgcgcaggggtgacgtgcatcgtcctgccagccgagaacaagaaggacttctacgacctggcagccttcatcaccgagggcctggaggtgcacttcgtggaacactaccgggagatcttcgacatcgccttcccggacgagcaggcagaggcgctggccgtggaacggtgacggccaccccgggactgcaggcggcggatgtcaggccctgtctgggccagaactgagcgctgtggggagcgcgcccggacctggcagtggagccaccgagcgagcagctcggtccagtgacccagatcccagggacctcagtcggcttaatcagagtgtggcatagaagctatttaatgattaaagtcatttgcagta

SEQ ID NO: 9920 - DNA, 600 bp, Homo sapiens
gccaggagaaaaaggagagaaaggagatactggccttccaggtccacagggtatcccaggaggcgttggttcaccaggacgtgatggctcaccaggccagaggggccttccgggaaaggatggatcctcgggacctccaggaccaccagggccaataggcattcctggcacccctggagtcccagggatcacaggaagcatgggaccgcaaggcgccctgggaccacctggtgtccctggagcaaagggggaacgaggagagcggggtgacctgcagtctcaagccatggtgagatcagtggcgcgtcaagtatgcgaacagctcatccagagtcacatggccaggtacactgccatcctcaaccagattcccagccactcctcatccatccggactgtccaagggcctcctggggagcctgggaggccaggctcacctggagcccctggtgaacaaggacccccaggcacaccaggcttccccggaaatgcaggcgtgccagggaccccaggagaacgaggtctaactggtatcaaaggagaaaaaggaaatccaggcgttggaacccaaggtccaagaggcccccctggaccagcagg

SEQ ID NO: 9921 - DNA, 600 bp, Homo sapiens
gcttcttccagtggctcagcatccaaatccgataaagatttagaaacgcaggtcatacagcttaatgaacaggtaatgcatcagctctggccacgcctctaggagcagtgacgtgtgtaagaggtagggggcctaggatcccctaggactggggtaagggagggaagggtaaggaagaatccttggtttcaagtaagtgagaataaaaagaattgttcgaagacaaaatcagtagcccatgatgaataaaaagtgttagtcacaaatctcaaagctgtacattaagatggggcagatggctcagccttgctgcagacttcaggctaccttcccctcccctgctcctcagggctgtcaagagctccaggctagaccgttgcccatcctgcccacttctggccattctagatagtgctgcattagggtgagtctgcctccctctctttttaaaggctgggtcagggttagtctgtctccctcccactctcttcttttttcccttcttcctttctttcttcagctattagtagttgagcttattctatatgaaagatattacgcttaatgctggtaatataaaggtagtaaaatagatacctt

SEQ ID NO: 9922 - DNA, 1400 bp, Homo sapiens
caaccaccgcgcacggccccctgactccgtccagtattgatcgggagagccggagcgagctcttcggggagcagcgatgcgaccctccgggacggccggggcagcgctcctggcgctgctggctgcgctctgcccggcgagtcgggctctggaggaaaagaaagtttgccaaggcacgagtaacaagctcacgcagttgggcacttttgaagatcattttctcagcctccagaggatgttcaataactgtgaggtggtccttgggaatttggaaattacctatgtgcagaggaattatgatctttccttcttaaagaccatccaggaggtggctggttatgtcctcattgccctcaacacagtggagcgaattcctttggaaaacctgcagatcatcagaggaaatatgtactacgaaaattcctatgccttagcagtcttatctaactatgatgcaaataaaaccggactgaaggagctgcccatgagaaatttacaggaaatcctgcatggcgccgtgcggttcagcaacaaccctgccctgtgcaacgtggagagcatccagtggcgggacatagtcagcagtgactttctcagcaacatgtcgatggacttccagaaccacctgggcagctgccaaaagtgtgatccaagctgtcccaatgggagctgctggggtgcaggagaggagaactgccagaaactgaccaaaatcatctgtgcccagcagtgctccgggcgctgccgtggcaagtcccccagtgactgctgccacaaccagtgtgctgcaggctgcacaggcccccgggagagcgactgcctggtctgccgcaaattccgagacgaagccacgtgcaaggacacctgccccccactcatgctctacaaccccaccacgtaccagatggatgtgaaccccgagggcaaatacagctttggtgccacctgcgtgaagaagtgtccccgtaattatgtggtgacagatcacggctcgtgcgtccgagcctgtggggccgacagctatgagatggaggaagacggcgtccgcaagtgtaagaagtgcgaagggccttgccgcaaagtgtgtaacggaataggtattggtgaatttaaagactcactctccataaatgctacgaatattaaacacttcaaaaactgcacctccatcagtggcgatctccacatcctgccggtggcatttaggggtgactccttcacacatactcctcctctggatccacaggaactggatattctgaaaaccgtaaaggaaatcacaggtttgagctgaattatcacatgaatataaatgggaaatcagtgttttagagagagaacttttcgacatatttcctgttcccttggaataaaaacatttcttctgaaattttaccgtt

SEQ ID NO: 9923 - DNA, 1400 bp, Homo sapiens
ttcaggcttggcctgaaaacaggacggacctccatgcctttgagaacctagaaatcatacgcggcaggaccaagcaacatggtcagttttctcttgcagtcgtcagcctgaacataacatccttgggattacgctccctcaaggagataagtgatggagatgtgataatttcaggaaacaaaaatttgtgctatgcaaatacaataaactggaaaaaactgtttgggacctccggtcagaaaaccaaaattataagcaacagaggtgaaaacagctgcaaggccacaggccaggtctgccatgccttgtgctcccccgagggctgctggggcccggagcccagggactgcgtctcttgccggaatgtcagccgaggcagggaatgcgtggacaagtgcaaccttctggagggtgagccaagggagtttgtggagaactctgagtgcatacagtgccacccagagtgcctgcctcaggccatgaacatcacctgcacaggacggggaccagacaactgtatccagtgtgcccactacattgacggcccccactgcgtcaagacctgcccggcaggagtcatgggagaaaacaacaccctggtctggaagtacgcagacgccggccatgtgtgccacctgtgccatccaaactgcacctacgggccaggaaatgagagtctcaaagccatgttattctgcctttttaaactatcatcctgtaatcaaagtaatgatggcagcgtgtcccaccagagcgggagcccagctgctcaggagtcatgcttaggatggatcccttctcttctgccgtcagagtttcagctgggttggggtggatgcagccacctccatgcctggccttctgcatctgtgatcatcacggcctcctcctgccactgagcctcatgccttcacgtgtctgttccccccgcttttcctttctgccacccctgcacgtgggccgccaggttcccaagagtatcctacccatttccttccttccactccctttgccagtgcctctcaccccaactagtagctaaccatcacccccaggactgacctcttcctcctcgctgccagatgattgttcaaagcacagaatttgtcagaaacctgcagggactccatgctgccagccttctccgtaattagcatggccccagtccatgcttctagccttggttccttctgcccctctgtttgaaattctagagccagctgtgggacaattatctgtgtcaaaagccagatgtgaaaacatctcaataacaaactggctgctttgttcaatgctagaacaacgcctgtcacagagtagaaactcaaaaatatttgctgagtgaatgaacaaatgaataaatgcataataaataattaaccaccaatccaacatccaga

SEQ ID NO: 9924 - DNA, 1400 bp, Homo sapiens
atgaatgtggtctgcagacattgatgaagaaaatctgttggtaattgatacatgggctaaagcatcagaggtttaatttgaagtttatgttcacacactgaaaacttagtttttttgttggtagatccatgtgcatgctagaatttgggacaggcactatttgcataaagtattaaagtcaatttttaaactaagcaaaggtacacgttgtaacggtggggcatctgtgaaaaagatgtccctttcataatatatgcaatatattccagatgttttgagagattacagaagaggaggcctgcttcacttgcagataagtttattataattctccagaaatgtgcaggatgtgcattagcaaattgcactgtacttttcactccagcctgggtgacagagcaagactcccgtctcgggggcttaaaaaaaaaaaatgctgtatctaaatgaatctgtgtaattgggcccagatgtgggtttgctcagtattagtagacaaggtctttgttcagacgattaggtgcctaactggcaaatgccttagtttcttaaaacgtattttctgatgtggctttacatttcaaaagtgaacttgattcaacctgagaaaactgattaaaaaattagtttaaatttgccagcagggaagtaaaataattatgggaagagtgtcttaagcctaatattaaatcagttttgttaaggggaaaactcaatagttctgttacttaggctgttagatccaagttgatttttgtgtctacagctaaattttgtttacaattaggctattttttaatataggatttagaaaccaagggtatgtgttttaaaattacactttttcttaacctgtctagctgtcggaaaaggtaacagaagatggaactcgaaatcccaatgaaaaacctacccagcaaagaagcatagcttttagctctaataattctgtagcaaagccaatacaaaaatcagctaaagctgccacagaagaggcatcttcaagatcaccaaaaatagatcagaaaaaaagtccatatggactgtggatacctatctaaaagaagaaaactgatggctaagtttgcatgaaaactgcactttattgcaagttagtgtttctagcattatcccatccctttgagccattcaggggtacttgtgcatttaaaaaccaacacaaaaagatgtaaatacttaacactcaaatattaacattttaggtttctcttgcagatatgagagatagcacagatggaccaaaggttatgcacaggtgggagtcttttgtatatagttgtaaatattgtcttggttatgtaaaaatgaaattttttagacacagtaattgaactgtattcctgttttgtatatttaataaatttcttgttttcattctt

SEQ ID NO: 9925 - DNA, 600 bp, Homo sapiens
ggataaagggtgcccaagcctctcctgatgcatttgtaaacaagaaggtttcagcagtattacaccacctccctcatgcctccgagggggtggaagggggtgggcacactccagggccccccatgcccctggcccccagggactggaagaggctcccaacccagagtgtccctgtgggaggcaggcagaaggtgacaattgacacgatttcctgcacgcgtcctcctctaccttggaagcagttagaatctaccaggcacagatgaggccgcccttgcctgacggagcttgatgagcagcccttggtctccggttccaggactgagagcccagctgcctctgcccacccttccccaggcctctgccagcctctggctgcacggtcaggccctgccccatggcaggcctgccagagcttggctggggacccctcccgcctctggctccctgatgggctggatgtaacttgtgtcttctagccccttaaggagcccaggtgttttaaggaatgaattggtcactgcatcttgtatcgattatggttctgagaaaagcaaatatcacttttggctgcattaaaagaagcatcatatataaaat

SEQ ID NO: 9926 - DNA, 1400 bp, Homo sapiens
cattttttgttttgagttccctcattcttattaccagaaagagcttgcaaatagttttactttcttggcactggaagggtagttctggaaagctactttgttgagagtctcattcttccctggagttaatagagtgattcacaatctttggggttttctcctcatcaaaagcatttcttaagtgcctatctaaaagcaattaaagactgtgtctgccctttagaagctaagaatttgattcatgatgcaaattaactagataatttgcaaagtacccttgagattgaattttctctattatatatttcccatatttcaggtgaataatttaatttaaatgacaaaaccctatctagtcaactgggcataatgacattttctttaaattagactctattttgaattaaaagagttttattataaaccgtgtgtttttggtttttctaagtatatagaaagcttgtataattcagatttatcaatttcctgatttaatgtagactttgacttttttattaaaaacctttgtattaaagcaagttatgttatttttcttttatgcatttattactaacatagctttaaatctttaaatgtattgaagcattgtgctgtctgaaaataaggaattgcttataaaccagccacttctgaatacaatatgtagctgatttaataagctagttagtgaatggaaaataagtgtggagtattaaaaatgttctttggttggtaaggcctaagatagggtttcatttatttctatactttttctgttttttaaacacctgcatatttttatgtaaatctctaaatttaaaatattttaagtacatttatttttggtgttttattgtataaaaccttagacaatcaatcagtcagtctttactgacaggagcagcagctatctgtcttttgctgatctacaaataaatgaattgagaatttagtccatagaggtccctggctaccaaacacattctcctttgaattgttaaaattcagaacattcaaaataactgttttgctacaacccatgattattttcctgttgtgtttatttaaatttactttctctttagaagtgcacttatttctgaaaaatcttaatgaaacaaacgcttagaacaaatataaatatgagacacttgggactactagagatattttagatttttatgaaaaaaatgtgaggggatattgctgctttaaaaaggaataaagtaataaaaatatatctcagctatttttttaaagcaatataattcagcaattgtctagaaaagtaatcatgaggctactgagtttggtgttcagttactgagtttcaaaaatgttttggtggcatgaggacaaaatttcattgaaggtaagataagaataaaaactatgtttac

SEQ ID NO: 9927 - DNA, 600 bp, Homo sapiens
cctatacatttagaagatgagtcagttgaattagtactggacaaacagttggagattagtttgcaaataagcatatcatatcaaatacaatattccagccaaccagttaattctcttcctggttacattcattgggtctatttgcctaatgttgacaattagattcttggaccaagtgagggtgtactctgatccacaaagctcttttataaaccaggtttgaggttgtgtgtgtgtgtgggggtgtgtgtgtgtgtgtgtgtgtatgtttgcatattatagctctctttaagacagacatctaaaaagattttggttattctgggctgccagcagtacgtgggaaaggtggaatgtgcaataggaacagatctgtgcattttgtgacatcgtccttcctgctgtgcacatcagctgtgatgacattttgagggtagttttaatttagctcggttctcttgttggtgccagtattacattgaagactacctatgatagaggcaatgttgctttgaaaatctcccttcaggcggaggttgcagtgagccgagattgtgccattgcactccagcctgggcgacagtgcaagactctgtctcc

SEQ ID NO: 9928 - DNA, 1400 bp, Homo sapiens
gccagtggctcggagctatcagaaagtgccttcggctactttatcacagcctgtgctgttatcattttgaccatcatctgttacctgggcctgccccgcctggaattctaccgctactaccagcagctcaagcttgaaggacccggggagcaggagaccaagttggacctcattagcaaaggagaggagccaagagcaggcaaagaggaatctggagtttcagtctccaactctcagcccaccaatgaaagccactctatcaaagccatcctgaaaaatatctcagtcctggctttctctgtctgcttcatcttcactatcaccattgggatgtttccagccgtgactgttgaggtcaagtccagcatcgcaggcagcagcacctgggaacgttacttcattcctgtgtcctgtttcttgactttcaatatctttgactggttgggccggagcctcacagctgtattcatgtggcctgggaaggacagccgctggctgccaagcctggtgctggcccggctggtgtttgtgccactgctgctgctgtgcaacattaagccccgccgctacctgactgtggtcttcgagcacgatgcctggttcatcttcttcatggctgcctttgccttctccaacggctacctcgccagcctctgcatgtgcttcgggcccaagaaagtgaagccagctgaggcagagaccgcaggagccatcatggccttcttcctgtgtctgggtctggcactgggggctgttttctccttcctgttccgggcaattgtgtgacaaaggatggacagaaggactgcctgcctccctccctgtctgcctcctgccccttccttctgccaggggtgatcctgagtggtctggcggttttttcttctaactgacttctgctttccacggcgtgtgctgggcccggatctccaggccctggggagggagcctctggacggacagtggggacattgtgggtttggggctcagagtcgagggacggggtgtagcctcggcatttgcttgagtttctccactcttggctctgactgatccctgcttgtgcaggccagtggaggctcttgggcttggagaacacgtgtgtctctgtgtatgtgtctgtgtgtctgcgtccgtgtctgtcagactgtctgcctgtcctggggtggctaggagctgggtctgaccgttgtatggtttgacctgatatactccattctcccctgcgcctcctcctctgtgttctctccatgtccccctcccaactccccatgcccagttcttacccatcatgcaccctgtacagttgccacgttactgccttttttaaaaatatatttgacagaaaccaggtgccttcagaggctctctgatttaaataaacctttcttgtttttttc

SEQ ID NO: 9929 - DNA, 1279 bp, Homo sapiens; identical to SEQ ID NO: 4694

SEQ ID NO: 9930 - DNA, 1200 bp, Homo sapiens; identical to SEQ ID NO: 4695

SEQ ID NO: 9931 - DNA, 600 bp, Homo sapiens
tctgaactccaatgtttataaagcctgtacccctgttgcctatgtaggttctctgacaaaagttatacttagtgctctttctttcttatggggaaaaatccgtggaactgaagctgagatctttagtacgtggagtcaccttacagatatagagcatttatgcggtattcattggtgcctaaagaactttaggcatcctctggaaaaccggcccagcacgtttcttggagcaggctaagtgtgagtgtcatttcctcaatgggacggagcgagtgtggaacctgatcagatacatctataaccaagaggagtacgcgcgctacaacagtgacctgggggagtaccaggcggtgacggagctggggcggcctgacgctgagtactggaacagccagaaggacctcctggagcggaggcgggccgaggtggacacctactgcagatacaactacggggttgtggagagcttcacagtgcagcggcgagtccaacctaaggtgactgtgtatccttcaaagacccagcccctgcagcaccacaacctcctggtctgctctgtgaatggtttctatccaggcagcattgaagtcaggtggttcc

SEQ ID NO: 9932 - DNA, 600 bp, Homo sapiens
gagatacttttggcatgttaagagatacaatggttcatgcctgtaatccagcactttgggaggctaaggtgggtgggttgcctgagctcaggagttcaagaccaggctgggcaacatggcaaaatcctatctctactcaagaatacaaaaattaaccaggcatggtactgcacaactgtagtcccagctacttgagaagctgaggaaggagaatctcttgaacctggcaggtggaggttgcagtgagctgagatcatgccactacactccagcctgggtgacagagtgaaattctatctcaaaaaaaaaaaaaaaaaaagaggccaggtatggtggctcatgcctgtaatcccagcattttgggaggccaaagcaggtggatcacttgaggtcaggagctcgagaccagcctggccaacatggtgaaaccctgtctctactaaaagtacaaaaatcagccaagcgtggtggtgcatgcctgcagtcccagctactcgggaggctgaggcaggagaatggcatgaacacaggaggtaaaggttgcagtgagccgagatcacaccactgcactccagcctgggcgacagtgcgagactctgt

SEQ ID NO: 9933 - DNA, 600 bp, Homo sapiens
gtttagatgcccccccatcttagacctcagctcccacagtgccttttaagggggacctcacctcctgtgcacagcccacccactttcctctgcttccctggcacagcccaggcatagacgagctggcgttggacccagttcttcccccttttcagccccacagctgctgccacaggggccaactagggccaggtggaaggggagctgagaagccaacccctagcccaggggtgctgtgggaactgggatccaatttgtagcttcctgcctggcttcagagagcccagcaaccttctaggcctgctttccagacttctgagatagcctgggatgagcaatcctgttatagtacatctggaccttccctacctgggctctggggaggctgtgggcctggagagggaaaaggagggagggggtgtctgcaccacctgggaagatagcacaaggcctaatgaggtcaccctgactccccaccccagcatttcattcataccagataatagctgcattactgccaactgaccttataaccctctgcaccttcaaaaagattcatggtttttaattgctgcttttaataacatttgttaaagttat

SEQ ID NO: 9934 - DNA, 600 bp, Homo sapiens
cctccgtccttgatggccaccagcgaccctcctcaaagtctggatacctctctcttttttggaacggcggccactggttttcagcagagctccttaaatatggatgaggtctcaagtgtaagtgtggggccattgggatctctggactctttggccatgaaaaactccagtccagagcctcaggctttgacacccagcagtaagctaacagtggacacagatgctctgactccttcgagcaccctttgtgaaaacagtgtctcagaactactgacaccaaccaaagcggagtggaacgtacatcctgactctgacttctttggacaggagggagaaacccagtttggattccccaatgcagcaggaaaccatggttctcagaaagaaacagatcttatcactgtgactggcagctcatttttggtatgaaccaactctattcattcctcatcatgtggcttacttttattacagtcaattttgaggatattctggactaaatatttaagtgcagtcatttctttttggtttgcaaaaagagcacagccctggactacaagtttggagatttaaattctgatcttgagtttggaactgaca

SEQ ID NO: 9935 - DNA, 1400 bp, Homo sapiens
ttgaggaggaagtggaaattgggcaaaacattccttttggaagtttggatggtaaaaggaagttgttggggaagggaataacaggatctttatgtttggcttatttactggtctatggggaggaggtgggcgaggaaaaagctagatacaagacctgggcaaacaaagaaggctctggagggaagtgtaggttagaacaaaggtaagtctgagaggtaagagagaaggaacacactttgggcttggcctgaaatgagagggaatgaggaaaactgggtagagggcaaggatgctccagcctggtggctctgctctccaagaggaaggaatagagctttagaagtgtggatggccagagttcagggcagcctggctcccaagcctacctaaaacaaccatcccattcctagacccgtggattgaggactgggcagagatgaatcatccattccagggaagccataggcagaccccagacttcggggagcacctggccttgctcccacccccaccttcttctttgcctcctcccatgccttttccctacccgcttcctcagccctcgccacctcccctcttcccacccctgccccaggataccccttttttcccaggccagcccttcccaccccatgaattcttcaactataatccagtggaggacttctcgatgccaccccacttaggtaggtgcttctgcagctcccccaccctcttgtacctccccttacccagcctcctatgcctaggtgagctgagaggagttgggtagctccttgtgcccctagcactgggtttggtcacagcagtccctgagtctgaaacatcatctgtaggttcattaatcagctcactggttgtcactgtttcaccgtctgaaggtaggggaaggactatcccttttttgtagatagggaaacagagaagctcacctggaggacaagagttgcttcaaggcagagctgcactcactctggccagaagcctgctcttataatgactggttcttttgtaggatgtggccctggagtgaactttgtgcctggccctctgccacctccaatccctggccctaatccccatggtcagcactggggcccagtggtccaccgggggatgccacgctatgttcctaacagcccctaccatgtgcggagaatgggggggccctgcaggcagcggctcagacactcagagagactgatccacacatacaaactggacagacggcctcctgcccattcggggacatggcctgggtagactggatcttgggctgggactggatgtgccaatggcccttcagggcctgcctggcacctcaggtactgggctagggtgtctgctatgcctggtattgttcttgtccattgctgtcaccaataaaggcatggaagaac

SEQ ID NO: 9936 - DNA, 600 bp, Homo sapiens
cagccagggccctcttctccacacaattgaggacttctggcgaatgatctgggagtggaaatcctgctctatcgtgatgctaacagaactggaggagagaggccaggagaagtgtgcccagtactggccatctgatggactggtgtcctatggagatattacagtggaactgaagaaggaggaggaatgtgagagctacaccgtccgagacctcctggtcaccaacaccagggagaataagagccggcagatccggcagttccacttccatggctggcctgaagtgggcatccccagtgacggaaagggcatgatcagcatcatcgccgccgtgcagaagcagcagcagcagtcagggaaccaccccatcaccgtgcactgcagcgccggggcaggaaggacggggaccttctgtgccctgagcaccgtcctggagcgtgtgaaagcagaggggattttggatgtcttccagactgtcaagagcctgcggctacagaggccacacatggtccagacactggaacagtatgagttctgctacaaggtggtgcaggagtatattgatgcattctcagattatgccaacttcaagtaagcggc

SEQ ID NO: 9937 - DNA, 530 bp, Homo sapiens; identical to SEQ ID NO: 4702

SEQ ID NO: 9938 - DNA, 600 bp, Homo sapiens
tcctttgaacatataccaaatagtgggattggtggataatatggtagttctattttttaatgttttgaggaccctccatactgttttccataatggctataataatttacattgccaccaacagtgtacaaagcttttctttccttttctctgcatcctctccaacacttcccttttgtcttcttgataatagtcattctaacgggtatgattacagtagctttgtagtgggttttctgtgctgtgctttttaatttcatgtatgtaaaaaacattgggtattttgaatgtttttcttttctcaccttatcctagaacttgaggctgggcgcggtggctcatccctgtaatctcagcactttgggaggccaaattgggcagatcacttgaggtcaggagttcgagaccagcctggccaacatggtgaaaccccatttctactaaaaatacaaaaattagccaggcgtggtggtgcacgcctgtagtcccagccaatcagtaggctgaggcacgagaatcgcttgaacccaggaggccaaggctgcagtgagccacgattgcaccactgcactctaacctgagcaacacagactccatctc

SEQ ID NO: 9939 - DNA, 1400 bp, Homo sapiens
tggaccgagatccccggcgctcaccacatcatcccctcgggcttcatgcgggttgtggagctgctggcggagggcatccctgcccacgtcatccagctagggaaacctgtccgctgcattcactgggaccaggcctcagcccgccccagaggccctgagattgagccccggggtgagggcgaccacaatcacgacactggggagggtggccagggtggagaggagccccgggggggcaggtgggatgaggatgagcagtggtcggtggtggtggagtgcgaggactgtgagctgatcccggcggaccatgtgattgtgaccgtgtcgctaggtgtgctaaagaggcagtacaccagtttcttccggccaggcctgcccacagagaaggtggctgccatccaccgcctgggcattggcaccaccgacaagatctttctggaattcgaggagcccttctggggccctgagtgcaacagcctacagtttgtgtgggaggacgaagcagagagccacaccctcacctacccacctgagctctggtaccgcaagatctgcggctttgatgtcctctacccgcctgagcgctacggccatgtgctgagcggctggatctgcggggaggaggccctcgtcatggagaagtgtgatgacgaggcagtggccgagatctgcacggagatgctgcgtcagttcacagggaaccccaacattccaaaacctcggcgaatcttgcgctcggcctggggcagcaacccttacttccgcggctcctattcatacacgcaggtgggctccagcggggcggatgtggagaagctggccaagcccctgccgtacacagagagctcaaagacagcgcatggaagctccacaaagcagcagcctggtcaccttttctcttccaagtgcccagaacagcccctggatgctaacaggggcgccgtaaagcccatgcaggtgctgttttccggtgaggccacccaccgcaagtactattccaccacccacggtgctctgctgtccggccagcgtgaggctgcccgcctcattgagatgtaccgagacctcttccagcaggggacctgagggctgtcctcgctgctgagaagagccactaactcgtgacctccagcctgccccttgctgccgtgtgctcctgccttcctgatcctctgtagaaaggatttttatcttctgtagagctagccgccctgactgccttcagacctggccctgtagcttttctttttctccaggctgggccgtgagcaggtgggccgttgagttacctctgtgctggatcccgtgcccccacttgcctaccctctgtcctgccttgttattgtaagtgccttcaatactttgcattttgggataataaaaaaggctccctcccctgc

SEQ ID NO: 9940 - DNA, 600 bp, Homo sapiens
gcggttcaggcggggcacagaggatgccgctctgtgacaaatgtgggagtggcatagttggtgctgtggtgaaggcgcgggataagtaccggcaccctgagtgcttcgtgtgtgccgactgcaacctcaacctcaagcaaaagggctacttcttcatagaaggggagctgtactgcgaaacccacgcaagagcccgcacaaagcccccagagggctatgacacggtcactctgtatcccaaagcttaagtctctgcaggcgtggcacgcacgcacgcacccacccacgcgcacttacacgagaagacattcatggctttgggcagaaggattgtgcagattgtcaactccaaatctaaagtcaaggctttagacctttatcctattgtttattgaggaaaaggaatgggaggcaaatgcctgctatgtgaaaaaaacatacacttagctatgttttgcaactctttttggggctagcaataatgatatttaaagcaataattttttgtatgtcatactccacaatttacatgtatattacagccatcaaacacataaacatcaagatatttgaaggactctaattgtctttccttgacaa

SEQ ID NO: 9941 - DNA, 600 bp, Homo sapiens
gctctggggcttcagaaggcttgaataaagtgatacgttagagtaacacatatcctgcctttactaaaaacctataacatttaattttataaaaagtcaggaaagtcagagaatcctaggtatataatcaccttttaaaaaaatttttcattttaacttaaacatagggataatggcaagccactcataatgttgtcatttgaagatcacaccttttaatgtagctgaatttggaagagagaaggagagaaacagaaatgagaaggtttgcttaaaaaacagatgccagtgcacaaatcttaaagaattataaggcctggtgcgatggctcacacctgtaatcccagcactttgggagacagaggtgggcgaatcacaaggtcaggagttcgagaccatcctggccaacatggtgtaaccccatgtctaccaaaaatacaaaaaattagctgggcatggtggcgggcacctgtaatcccagctactggggaggctgaggcaggagaatcgcctgagcctgggaggcggaggttgtagtgagctgagatcatgccactgcaacaagcgtgagactccatctcaaaaaaaaaaaaaaaaaaa

SEQ ID NO: 9942 - DNA, 1400 bp, Homo sapiens
tcgcctactggaaccactacctcagctgcacctccccgtgttcctgctatcgcccgctctgccgcctcaacttcggcctcaatgtcgtggagaacctcgcgttgctagtgctcacttatgtctcctcctccgaggacttcaccatccacgaaaatgctttcattgtgttcattgcctcatccctcgggcacatgctcctcacctgcattctctggcggttgaccaagaagcacacagtaagtcaggaggatcgcaagtcctacagctggaaacagcggctcttcatcatcaacttcatctccttcttctcggcgctggctgtctactttcggcacaacatgtattgtgaggctggagtgtacaccatctttgccatcctggagtacactgttgtcttaaccaacatggcgttccacatgacggcctggtgggacttcgggaacaaggagctgctcataacctctcagcctgaggaaaagcgattctgaacccttcagtcctgcttgggaggacgcagcccactgcccagaaacaagaaacacgataccattctggccttccccaccccacatcctctcttggccttactgaagatgggggaagggtaagaaggaagggtgtaggccaaggctcaccccagtgctgctggcttctcctctccacccctcatatgggcgtggggtcctcaaacatcacctttacctgagaggccccaagaagctgagctggcagagagctccaccatttggtgctaaaaaaaaaaacgtcctgaggttcatgaccaccatccagtttctggcctttacacagtcacctttcactgaggtcaggagcccctgagcagtggctgctccctgacaaccacagccatttctctgcacgggggtcattcataggactaatgtatttcatgatctactgtgcacatccaggcctgtggccacagtcccctgctaaagttgctcaggtgttctagtcctgacttcacctttttgatttggtgtgtgccctagggtatgtacccttccccatctgagcctcggtgtgtccatgtgtctggcgggggatgggtggactgtatgatttccaaggactctaccagtcagtggttctgatgtcatcgggtggaggtggtgttctatacctaaaggatgacctgctccagaaacagcaccagcacagcatgtattttcttctcttctgaaagttctggcttgtagacccctcccctcctttgcaaaggtatgggatagaggggtcagatgcagatctctactgtaaaatgggctccctggtatctcctgtcttccctactgctccaaaccctaaattttggttgtacattttatttgaaaggaaaataaattttttttttgggccaacagttgcctaggcttgct

SEQ ID NO: 9943 - DNA, 384 bp, Homo sapiens; identical to SEQ ID NO: 4708

SEQ ID NO: 9944 - DNA, 600 bp, Homo sapiens
tctgcaagtatgtctacaaatggaaggaacatttttctgtgcctttaccagtgtgtggatcatgcctttaccagtgtgtggatcacagtgatgtgaaaatgagatgtagggaggtttttggggattagggaagcaaggaagagatggggaggataccttaaagtagataaagtatatgtggaaaggaagtgataaaacagagaccctaagttgaagaaggtgttgtttcagataggggtcaaggaaataagaaatagtatgtttgtagcattggatttttagtatcaatcctgttgagttacatttagatataggtagatattcgaataagcacgtagcacattctgcttgtcctcacatccagatcatttctaggactaattctccaagaagcagtcatacgtacacttgaatcttcagtttcttcagcacttgaatgtaaagctgtattgtcatatatcaagtactgagtgaagtgcctaaaactgtgctagttgacactactttataagctgtttgtgttgctggtggttttatatttagattccaactagattgttattctggcatcttgggaagtaaatgttcttctgaattttg

SEQ ID NO: 9945 - DNA, 600 bp, Homo sapiens
gaactgttgatgttcaggtggactacatgaagataacatgcttaaaaatggaaagcagaaagtaactgcagtgatgaacattttggtccaaattcttgttttaaatcttacacctgaaagtaaaatattgggatcacttttccctgtctaaactccaggatacagtatccaatttatccaaacagaactgtggtgtcaatgtgtaattaattgtgtaaaatagccttcccaagtttctttttccctggaaaataaaaaaggtaatagaacttgtagtttatttaaaccccatgtcatgaggaggtactagttccaagcaacaaactccttaatttgctctaatagataggtatggtttaatctttccattgtgtcttttcatttaattttcctgaagcttgcaggatagattgaaatgttataggtttgtttggagtaaccaaacagtatgcaaattaagaaaaagccagagaacctagaaaacatccagtggattacagaatttcttccccatattcactcctcacttttacaattttcccacaatcctctacttcagtgggatgctgtgtctagtgattaaacaaaaatatagagctg

SEQ ID NO: 9946 - DNA, 1400 bp, Homo sapiens
aggcggcggctacggacggcggagccgcagctacgggcggcggagccgcagccccaggcggcgacaccgcagccgatcccggggtcccagctgctccaggtcccgcagccgatctcgctataggggttctcgctatagccggtctccctacagccgatctccttacagccggtcgcgctacagcgctctccctacagcagatctcgctacagggaatctcgctacggcggatctcactacagctcatctggttacagtaactctcgctacagccgatatcacagcagccggtctcactcgaagtctgggtcctccactagctctcgctctgcatcaacctccaaatcgagctctgcgcgacgatccaagtcctcctcggtctccaggtctcgctcgcggtccaggtcttcatctatgaccaggagtcctccccgggtatccaagaggaaatccaagtcaaggtcgcgatccaagaggccccccaagtctcctgaagaggaaggacagatgtcctcttaagaaaatgatgcatcaggaagcaacgtgatggaggacttgggggaaaaggatcacatactcagtctatggaagcaacgtccctgttgcagtgcagagtgctgagctgcttcctgttttcttctgattgctcctggggaaaacacgccttgtcctgaagaacaaatggctgtccagtttattaaaatgcctgtcaactgcacttccagtcacccaggccttgcagataaataatggagcatgcagtgagcacatctagctgacgataatcacaccttttcccccgtcttttctgaaaaattgtaaatctgatcatatcaacatgtatgaacttaaaatatggagaatgttatggaagaaatagtttataagtttgttaagtacttataacatggtttatctttttgattattaattttttacgctaaccattgtttctgtagttaaaattgttttcttggtgttatcttttctcagaataaaattagaaacttttgatggaaagtaggttgttttattttctgtatgacttttggatatttgtacttttgagaaaattattagcaccaagtgtttctcaaaatataatttttaaaaaatccttaataggcttttagctatgtgctttattgttttatcacaatgcagtttatttgtagtttctctcttttttcctcacacctatggtttttttacttccaaaattattttcaaataatccatttttggctttcatcattatccctactagatgttatgtgttcttttgcaattgtttctgcttatacctttactagcaaagggaaaaataacaatttggtgtcaatgatctggtgacaataggattacattggagccaattgaataaatttattctttcaatc

SEQ ID NO: 9947 - DNA, 600 bp, Homo sapiens
cctgcctgtgtccgcttttgcagctcaatgcagccatgacaaggaaagaaaagacaaaggaaggccagagagccgcgcagttctctgcaggtgcagatgcaggcagtggaggtggcctgagcaggcagaaggacaccaagcgccctatgttgcttgtcattcatgacgtggtcttggagcttctgactagttcagactgccacgccaaccccagaaaataccccacatgccagaaaagtgaagtcctaggtgtttccatctatgtttcaatctgtccatctaccaggcctcgcgataaaaacaaaacaaaaaaacgctgccaggttttagaagcagttctggtctcaaaaccatcaggatcctgccaccagggttcttttgaaatagtaccacatgtaaaagggaatttggctttcacttcatctaataactgaattgtcaggctttgattgataattgtagaaataagtagccttctgttgtgggaataagttataatcagtattcatctctttgttttttgtcactcttttctctctaattgtgtcatttgtactgtttgaaaaatatttcttctataaaattaaactaacctgcctt

SEQ ID NO: 9948 - DNA, 1035 bp, Homo sapiens; identical to SEQ ID NO: 4713

SEQ ID NO: 9949 - DNA, 1400 bp, Homo sapiens
ttgtgtaacaatccggataaacacgcctagattgtttttacaaataataatgttgctatatttgcttaacgtggtgcttttaatgctgtgaatctagccctcctcttgaccaacttacttggaacattccttttttatcctgttaaccattttagtgaatcagaagcatgcctggtaattgggaaaaattaaaaactaagtaaaaaaagaaaaaactccttgattgaatgtagaaacctaattttcagcgttcatacccagctagccaatcatccagtttggcagtgttacaacgtagctcccaatctccctctgacttcaaaagcttagaagaaagggagtgggatggaaacaaattgtggggttcagtttcttctggcattttttccctctctcttcctgttaaacttggctcctctggcttgttttttgtagcaactattggatgattatccgaaatgtttcattgtgggagcagacaatgtgggctccaagcagatgcagcagatccgcatgtcccttcgcgggaaggctgtggtgctgatgggcaagaacaccatgatgcgcaaggccatccgagggcacctggaaaacaacccagctctggagaaactgctgcctcatatccgggggaatgtgggctttgtgttcaccaaggaggacctcactgagatcagggacatgttgctggccaataaggtgccagctgctgcccgtgctggtgccattgccccatgtgaagtcactgtgccagcccagaacactggtctcgggcccgagaagacctcctttttccaggctttaggtatcaccactaaaatctccaggggcaccattgaaatcctggtgatgtgcagctgatcaagactggagacaaagtgggagccagcgaagccacgctgctgaacatgctcaacatctcccccttctcctttgggctggtcatccagcaggtgttcgacaatggcagcatctacaaccctgaagtgcttgatatcacagaggaaactctgcattctcgcttcctggagggtgtccgcaatgttgccagtgtctgtctgcagattggctacccaactgttgcatcagtaccccattctatcatcaacgggtacaaacgagtcctggccttgtctgtggagacggattacaccttcccacttgctgaaaaggtcaaggccttcttggctgatccatctgcctttgtggctgctgcccctgtggctgctgccaccacagctgctcctgctgctgctgcagccccagctaaggttgaagccaaggaagagtcggaggagtcggacgaggatatgggatttggtctctttgactaatcaccaaaaagcaaccaacttagccagttttatttgcaaaacaaggaaataaaggcttacttcttt

SEQ ID NO: 9950 - DNA, 1400 bp, Homo sapiens
catggacacaactggggagcgttctccatcaccactgaccgggaaagtcaatcagctggaattaattcttcgacaactccagaccgaccttcggaaggaaaaacaagacaaggccgttctccaagcagaagtgcagcacctgagacaggacaacatgagactgcaggaggagtcccagaccgcgacagctcagctgcggaaattcacagaatggtttttcaccaccatcgacaaaaaatcttagccaatccgcacctcatcaagggaccactgggaaatgccccttgtccctttgaagtcacaaacatgtggtttttctgtgtgctttcaaccaatcgtagatgtttttgctgttccattctgtgtagcaccattcaccacagcaggatagggagcctcgactctttctcggtaaccacggcagagagcagcgccgatgtgaagatgaatgaatgtaactcctggtgtgaagatgaatgtaaaccctggcgacagttgagacctttttcttttagactctgctaaaacagtgctctggcttgggcttacctcaagagggaagatagttgagttttatttcctgtatatcaggtgacctggtagagatgtaaagcaatttaccatagtttgggctttagtattgtaaaataaacatgagaacaaataatcagacatatactttaatgttaaaggtgctctatttttttggatgtacagtagttttatttccacagccacattaccatagcaataagaaaggaggcatagtacatagttggaaaagctttgtggggggattaaaaaaaaaaaaaagcactgttgtgtttaacactagttcagatgcagttaccttagagacttatttatttgcaggaacaaatggtgcctgaatattaacagtgttctgattaaaaacaaaaaaaagatacatatgccttgtaaatggctcaccgagtggtcagtagtcacttcaactcttagttcacttttgtatagttgctctgctggaaagaaatgagagtgaatctgcttactcactagaacttccctgtgtgctgtgagccagcggaaccacttgtacaatgccagatttgtttatctttgtacagaagctttgatgaagtgtcttgtatttaacacccttatttaagcttatttaaccttaaattgttaattttataaaatttggtttggcctgcactacgatgagggatggaggtagctgcaggctcagaagagactgagcttgcacagatcagaccgagaagcagggtgagagattctaacgactggatgctgctagtaacacattgtttgtattgctttaccatttttaactgttagatttgagatgaacatacattttgcttttttaataaatgtttaaaagaagtccacat

SEQ ID NO: 9951 - DNA, 1400 bp, Homo sapiens
cacttatctttttaaaaaactctcatttttacaaagactatcttccctcccttccctgaattcagaactgtagttctccatggcatgatacaaacaggtccttgttctcttctcctcttccccttttccacatcccagccccacctctgtaaaggctttgtgcattataaacctggaatgtatcgactttctttcaggggatattggaaagataatggtcattatacttataaactcaaattttgagaggttttagattattcagaagcatacttggaactaatgaagggtatataataaaacaactggaatccaatttggtaagctaaaattatgactttccctgggtaaaaagtcttctcagaaaaacaatgtcagaaaataacagcgtgctgcttagaaatacggctgggctctgtactatgcaaaatctagaaagtgtggggaaactttaaacccaagaaaacgttcttagtattcatcctccaggtgtcttacttcagaatgcatcctttgagattatgtccacttaagagaaatcatcagttaagaaatctactttaacaaaacaaaaaggagaaaaagtaataatgtgatggcaatcttaatttttgggtacaacatgacaagctgtgagtttgtgtgtttgtaagagaaaaatgtgtgggtacttgctaataaacaggtgaattaatgcacatccttatctcattgctggcttctttccaagttgagcaacaacaaaatgctgtatttgagtttctgacaaatttgttttaaaaatcaaatttgaatgtactattctataaattgcctttctgaatagaacatgacatgccattttctagcagctgccagtgataatttgttttacactaacttttaaatcagtgtgtgtactgcagggaaaaggatataggaatactcatcttacaggggaatttgtgaccagaagatgtagtaacttcaatgactgaaagtcaatgctgatagtttactggcaacattaattgaagcatcaaaaataaatggcaaagagaaatcaggacaaaaaatctaattgctgtttgggaaaaaacttgattttgatgtttattctccaggtttttggttgtttttttttctttcttctttcttaatgcctgaaattttctccattggcccgaaagcagtaaaaattgttcattaatcttccgttaggccaataaaagaagggcctcacaagacaaaacaggagccagaagtaaggactgaaggagaaggggagaatagctaatagctatagtatatgtatatgttaaaaactgaatatcccatcatcctatttcatgtatagttgagttctcaaatttgtaagtttttatacatcctttcattgaataaacgtttaattaaatgag

SEQ ID NO: 9952 - DNA, 600 bp, Homo sapiens
acgcctcatctgagggagcttcacttggacaacaacaagcttaccagagtacctggtgggctggcagagcataagtacatccaggttgtctaccttcataacaacaatatctctgtagttggatcaagtgacttctgcccacctggacacaacaccaaaaaggcttcttattcgggtgtgagtcttttcagcaacccggtccagtactgggagatacagccatccaccttcagatgtgtctacgtgcgctctgccattcaactcggaaactataagtaattctcaagaaagccctcatttttataacctggcaaaatcttgttaatgtcattgctaaaaaataaataaaagctagatactggaaacctaactgcaatgtggatgttttacccacatgacttattatgcataaagccaaatttccagtttaagtaattgcctacaataaaaagaaattttgcctgccattttcagaatcatcttttgaagctttctgttgatgttaactgagctactagagatattcttatttcactaaatgtaaaatttggagtaaatatatatgtcaatatttagtaaagcttttcttttttaatttcc

SEQ ID NO: 9953 - DNA, 519 bp, Homo sapiens; identical to SEQ ID NO: 4718

SEQ ID NO: 9954 - DNA, 600 bp, Homo sapiens
tcctgggctggaccgtttcaacagagaggcttatttgactttatgctagaagatgaggcttctgggataggcccagaagttcctgatgaccgcgacttcgagccctccctaggcccagtgtgccccttccgctgtcaatgccatcttcgagtggtccagtgttctgatttgggtcttcctccttcccttacggaattacatcttgatggcaacaaaatcagcagagttgatgcagctagcctgaaaggactgaataatttggctaagttgggattgagtttcaacagcatctctgctgttgacaatggctctctggccaacacgcctcatctgagggagcttcacttggacaacaacaagcttaccagagtacctggtgggctggcagagcataagtacatccaggttgtctaccttcataacaacaatatctctgtagttggatcaagtgacttctgcccacctggacacaacaccaaaaaggcttcttattcgggtgtgagtcttttcagcaacccggtccagtactgggagatacagccatccaccttcagatgtgtctacgtgcgctctgccattcaactcggaaactataagtaa

SEQ ID NO: 9955 - DNA, 600 bp, Homo sapiens
ccagtgtgccccttccgctgtcaatgccatcttcgagtggtccagtgttctgatttggaactgggcaccaatccgctgaagagctcaggaattgaaaatggggctttccagggaatgaagaagctctcctacatccgcattgctgataccaatatcaccagcattcctcaaggtcttcctccttcccttacggaattacatcttgatggcaacaaaatcagcagagttgatgcagctagcctgaaaggactgaataatttggctaagttgggattgagtttcaacagcatctctgctgttgacaatggctctctggccaacacgcctcatctgagggagcttcacttggacaacaacaagcttaccagagtacctggtgggctggcagagcataagtacatccaggttgtctaccttcataacaacaatatctctgtagttggatcaagtgacttctgcccacctggacacaacaccaaaaaggcttcttattcgggtgtgagtcttttcagcaacccggtccagtactgggagatacagccatccaccttcagatgtgtctacgtgcgctctgccattcaactcggaaactataagtaa

SEQ ID NO: 9956 - DNA, 1400 bp, Homo sapiens
caacaggcagagctcgccctgcaggaggcaattaggattgcccaggagtccaacgatcacgtgtgtctccagcactgtttgagctggctttatgtgctggggcagaagagatccgatagctatgttctgctggagcattctgtgaagaaggcagtacattttgggttaccgagagcttttgctgggaagacggcaaacaagctgatggatgccctaaaggactccgacctcctgcactggaaacacagcctgtcagagctcatcgatatcagcatcgcacagaaaacggccatctggaggctgtatggccgcagcaccatggcactgcaacaggcccagatgttgctgagcatgaacagcctggaggcggtgaatgcgggcgtgcagcagaacaacacagagtcctttgctgtcgcactctgccacctcgcagagctacacgcggagcagggctgttttgctgcagcttctgaagtgttaaagcacttgaaggaacgatttccgcctaatagtcagcacgcccagttatggatgctatgtgatcaaaaaatacagtttgacagagcaatgaatgatggcaaatatcatttggctgattcacttgttacaggaatcacagctctcaatagcatagagggtgtttataggaaagcggttgtattacaagctcagaaccaaatgtcagaggcacataagcttttacaaaaattgttggttcattgtcagaaactgaagaacacagaaatggtgatcagtgtcctactgtccgtggcagagctgtactggcgatcttcctcccctaccatcgcgctgcccatgctcctgcaggctctggccctctccaaggagtaccggttacagtacttggcctctgaaacagtgctgaacttggcttttgcgcagctcattcttggaatcccagaacaggccttaagtcttctccacatggccatcgagcccatcttggctgacggggctatcctggacaaaggtcgtgccatgttcttagtggccaagtgccaggtggcttcagcagcttcctacgatcagccgaagaaagcagaagctctggaggctgccatcgagaacctcaatgaagccaagaactattttgcaaaggttgactgcaaagagcgcatcagggacgtcgtttacttccaggccagactctaccataccctggggaagacccaggagaggaaccggtgtgcgatgctcttccggcagctgcatcaggagctgccctctcatggggtacccttgataaaccatctctagagaggacatccctgctgggctgctgtgcagagtataagattttggacttgttcatgtcccctctctccctataaatgatgtatttgtgacaccctatcttgtcaataaacagcattctgatt

SEQ ID NO: 9957 - DNA, 1400 bp, Homo sapiens
gtcgatggctcctgggggtgctgccccatgccccaggcttcctgctgtgaagacagggtgcactgctgtgtgtgacctgatccagagtaagtgcctctccaaggagaacgctaccacggacctcctcactaagctgcctgcgcacacagtgggggatgtgaaatgtgacatggaggtgagctgcccagatggctatacctgctgccgtctacagtcgggggcctggggctgctgcccttttacccaggctgtgtgctgtgaggaccacatacactgctgtcccgcggggtttacgtgtgacacgcagaagggtacctgtgaacaggggccccaccaggtgccctggatggagaaggccccagctcacctcagcctgccagacccacaagccttgaagagagatgtcccctgtgataatgtcagcagctgtccctcctccgatacctgctgccaactcacgtctggggagtggggctgctgtccaatcccagaggctgtctgctgctcggaccaccagcactgctgcccccagggctacacgtgtgtagctgaggggcagtgtcagcgaggaagcgagatcgtggctggactggagaagatgcctgcccgccgggcttccttatcccaccccagagacatcggctgtgaccagcacaccagctgcccggtggggcagacctgctgcccgagcctgggtgggagctgggcctgctgccagttgccccatgctgtgtgctgcgaggatcgccagcactgctgcccggctggctacacctgcaacgtgaaggctcgatcctgcgagaaggaagtggtctctgcccagcctgccaccttcctggcccgtagccctcacgtgggtgtgaaggacgtggagtgtggggaaggacacttctgccatgataaccagacctgctgccgagacaaccgacagggctgggcctgctgtccctaccgccagggcgtctgttgtgctgatcggcgccactgctgtcctgctggcttccgctgcgcagccaggggtaccaagtgtttgcgcagggaggccccgcgctgggacgcccctttgagggacccagccttgagacagctgctgtgagggacagtactgaagactctgcagccctcgggaccccactcggagggtgccctctgctcaggcctccctagcacctccccctaaccaaattctccctggaccccattctgagctccccatcaccatgggaggtggggcctcaatctaaggccttccctgtcagaagggggttgtggcaaaagccacattacaagctgccatcccctccccgtttcagtggaccctgtggccaggtgcttttccctatccacaggggtgtttgtgtgtgtgcgcgtgtgcgtttcaataaagtttgtacactttc

SEQ ID NO: 9958 - DNA, 1400 bp, Homo sapiens
ctttaccgtctcagggacttccagttgctgccccttcccagaggccgtggcatgcggggatggccatcactgctgcccacggggcttccactgcagtgcagacgggcgatcctgcttccaaagatcaggtaacaactccgtgggtgccatccagtgccctgatagtcagttcgaatgcccggacttctccacgtgctgtgttatggtcgatggctcctgggggtgctgccccatgccccaggcttcctgctgtgaagacagggtgcactgctgtccgcacggtgccttctgcgacctggttcacacccgctgcatcacacccacgggcacccaccccctggcaaagaagctccctgcccagaggactaacagggcagtggccttgtccagctcggtcatgtgtccggacgcacggtcccggtgccctgatggttctacctgctgtgagctgcccagtgggaagtatggctgctgcccaatgcccaacgccacctgctgctccgatcacctgcactgctgcccccaagacactgtgtgtgacctgatccagagtaagtgcctctccaaggagaacgctaccacggacctcctcactaagctgcctgcgcacacagtgggggatgtgaaatgtgacatggaggtgagctgcccagatggctatacctgctgccgtctacagtcgggggcctggggctgctgcccttttacccaggctgtgtgctgtgaggaccacatacactgctgtcccgcggggtttacgtgtgacacgcagaagggtacctgtgaacaggggccccaccaggtgccctggatggagaaggccccagctcacctcagcctgccagacccacaagccttgaagagagatgtcccctgtgataatgtcagcagctgtccctcctccgatacctgctgccgagacaaccgacagggctgggcctgctgtccctaccgccagggcgtctgttgtgctgatcggcgccactgctgtcctgctggcttccgctgcgcagccaggggtaccaagtgtttgcgcagggaggccccgcgctgggacgcccctttgagggacccagccttgagacagctgctgtgagggacagtactgaagactctgcagccctcgggaccccactcggagggtgccctctgctcaggcctccctagcacctccccctaaccaaattctccctggaccccattctgagctccccatcaccatgggaggtggggcctcaatctaaggccttccctgtcagaagggggttgtggcaaaagccacattacaagctgccatcccctccccgtttcagtggaccctgtggccaggtgcttttccctatccacaggggtgtttgtgtgtgtgcgcgtgtgcgtttcaataaagtttgtacactttc

SEQ ID NO: 9959 - DNA, 600 bp, Homo sapiens
tgcagtggctcccgggactttgggaggccgaggcgggtgcatcacgaggttaggagttcgagaccagcctgaccaacatggtgaaaccccatctctactaaacatacaaaaatcagccgggcgtggtggcgcacgcctgcaatcccagctactcaggaggctgaggcaggagaatcgcttgaacccaggaggtggaggttgcagtgagccgagattgcgccactgcactccagcctgggcgacagagtgagactccatctaaaaaaacaaaacaaacaaatacacccctcattagttaaggataaagatgaggggggcctgtcgcggtggctcacgcctgtaatcccagcactttgggaggccaaggcgggcagatcacaaggtcaagatatcaagaccatcctggccagcatggtgaaaccctgtctctactaaaaaaaaaaatacaaaaattagctgggcatggtggcgcactcctgtagtcccagctactcgggagggtgaggcaggagaattgcttgaacccgggaggcagaggttgcagtgagccgagatcgcgccactgcactccagcctggcaacagagtgagactccgtctc

SEQ ID NO: 9960 - DNA, 1400 bp, Homo sapiens
ccatcagaggacaagcaggtgcaggcagcagcagtccagaggcccccctgagatctgaggatagcacctgcctccctcccagccctggcctcatcactgtgcggctcaaattcctcaatgataccgaggagctggctgtggctaggccagaggataccgtgggtgccctgaagagcaaatacttccctggacaagaaagccagatgaaactgatctaccagggccgcctgctacaagacccagcccgcacactgcgttctctgaacattaccgacaactgtgtgattcactgccaccgctcacccccagggtcagctgttccaggcccctcagcctccttggccccctcggccactgagccacccagccttggtgtcaatgtgggcagcctcatggtgcctgtctttgtggtgctgttgggtgtggtctggtacttccgaatcaattaccgccaattcttcacagcacctgccactgtctccctggtgggagtcaccgtcttcttcagcttcctagtatttgggatgtatggacgataaggacataggaagaaaatgaaaggcatggtctttctcctttacggcctccccacttttcctggccagagctgggcccaagggccggggagggaggggtggaaaggatgtgatggaaatctcctccataggacacaggaggcaagtatgcggcctccccttctcatccacaggagtacagatgtccctcccgtgcgagcacaactcaggtagaaatgaggatgtcatcttccttcacttttagggtcctctgaaggagttcaaagctgctggccaagctcagtggggagcctgggctctgagattccctcccacctgtggttctgactcttcccagtgtcctgcatgtctgcccccagcacccagggctgcctgcaagggcagctcagcatggccccagcacaactccgtagggagcctggagtatccttccatttctcagccaaatactcatcttttgagactgaaatcacactggcgggaatgaagattgtgccagccttctcttatgggcacctagccgccttcaccttcttcctctaccccttagcaggaatagggtgtcctcccttctttcaaagcactttgcttgcattttattttatttttttaagagtccttcatagagctcagtcaggaaggggatggggcaccaagccaagcccccagcattgggagcggccaggccacagctgctgctcccgtagtcctcaggctgtaagcaagagacagcactggcccttggccagcgtcctaccctgcccaactccaaggactgggtatggattgctgggccctaggctcttgcttctggggctattggagggtcagtgtctgtgactgaataaagttccattttgtggt

SEQ ID NO: 9961 - DNA, 1400 bp, Homo sapiens
cttggtcctagcttggctctctacctacgtagcagacagcggtagcaaccagctcctgggcgctattgtgtcagcaggcgacacatccgtcctccacctggggcatgtggaccacctggtggcaggccaaggcaaccccgagccaactgaactcccccatccatcagaggcaaatacttccctggacaagaaagccagatgaaactgatctaccagggccgcctgctacaagacccagcccgcacactgcgttctctgaacattaccgacaactgtgtgattcactgccaccgctcacccccagggtcagctgttccaggcccctcagcctccttggccccctcggccactgagccacccagccttggtgtcaatgtgggcagcctcatggtgcctgtctttgtggtgctgttgggtgtggtctggtacttccgaatcaattaccgccaattcttcacagcacctgccactgtctccctggtgggagtcaccgtcttcttcagcttcctagtatttgggatgtatggacgataaggacataggaagaaaatgaaaggcatggtctttctcctttacggcctccccacttttcctggccagagctgggcccaagggccggggagggaggggtggaaaggatgtgatggaaatctcctccataggacacaggaggcaagtatgcggcctccccttctcatccacaggagtacagatgtccctcccgtgcgagcacaactcaggtagaaatgaggatgtcatcttccttcacttttagggtcctctgaaggagttcaaagctgctggccaagctcagtggggagcctgggctctgagattccctcccacctgtggttctgactcttcccagtgtcctgcatgtctgcccccagcacccagggctgcctgcaagggcagctcagcatggccccagcacaactccgtagggagcctggagtatccttccatttctcagccaaatactcatcttttgagactgaaatcacactggcgggaatgaagattgtgccagccttctcttatgggcacctagccgccttcaccttcttcctctaccccttagcaggaatagggtgtcctcccttctttcaaagcactttgcttgcattttattttatttttttaagagtccttcatagagctcagtcaggaaggggatggggcaccaagccaagcccccagcattgggagcggccaggccacagctgctgctcccgtagtcctcaggctgtaagcaagagacagcactggcccttggccagcgtcctaccctgcccaactccaaggactgggtatggattgctgggccctaggctcttgcttctggggctattggagggtcagtgtctgtgactgaataaagttccattttgtggtcctgc

SEQ ID NO: 9962 - DNA, 600 bp, Homo sapiens
tcaaagttaagcccgcacgccaggcccagttaatgctagtctttcatgtgaaatgtgaagctgccatgttgccttttctcttagtaggataactagtagctggtacataatcactgaggagctatttcttaacatgcttttatagaccatgctaatgctagaccagtatttaagggctaatctcacacctccttagctgtaagagtctggcttagaacagacctctctgtgcaataacttgtggccactggaaatccctgggccggcatttgtattggggttgcaatgactcccaagggccaaaagagttaaaggcacgactgggatttcttctgagactgtggtgaaactccttccaaggctgagggggtcagtaggtgctctggagggactcggcaccacttgatattcaacagccacttgagccaaatataaaattgtatttacagctgatggactcaatttgagccttcaaacttgtagttatcctattatattgtaaactaatacattgtctagcattgatttggttcctgtgcatatgtattttcactatgtgctcccctccccagatcttaattaaaccagattttgcaattc

SEQ ID NO: 9963 - DNA, 1400 bp, Homo sapiens
cagtgagctatgattgtgccattgcactctagtgtggctgacagtgcaagaccctgtctctaaaaataactaataagtgccaaatttgtaagaagacagaattgacataactcatggatttggtgaatctaatttttgtaaatatgtgaattatatgatattcatgactatgttttttattccttgtggaaccatatgtataaataattcgatactgaatttaatcatttcataaacattattacttataagcaaggcagtgtgcatatttgttgtacgttttgaagtgctgattaaagtccacattttcattatcagcagtctattggccagtttaaacaaatattaatgtaaagaaattggttcattgatattttttccctgagcagttctgtatttacctgatgctctaaaattaagttttctgtcgttactcaaatgtacagttggcaacacattttgttatcaatagacaattatgtttactatagagtaaactattagtaattatttatgaccttatgattgggagaccttttcacaaatttaagtatttcataacatttctaataacatttctataaatggctttggatcaaatagtttaaagtatataattcagtatgttgataatgaattgtttcgtttcatttcacaactgagaggatttttcccttatgtttttccttcatttttgtgagaatagagattattacctgttgttccttttaattgttcataagtaaataaatacattcaggcactcattcatctatcactggcagttctgttttcatattttatttatgtcttaaaaactacctcatgacgttggtaggaaagcatttctttacatggaggtttattttgtgggacattacctcctctggatgttacttcctcagtttacaagtagtgtaaattctcattgattcttttatgaattgtaatggattttctcttagcttttgagaatttagaatctgaaatttgaataaaaagtaaatatattcagtataatttttcaaaatgctctagtttcaagatagttaaaaaattatgtggaatttacataattaattcaaatatagtttgtatttagttccttatcaaataatgcaaatagttggagatacctcaatttcttttgagtgttaagaagagcaagaaaggagtgaagtttttgcaacacattgtgtctttatttggtctgcctatgtttttatcacattgcttataaaacttttaaaatccttgtttgtataaaaagtttctttagttaaataaaagtgtgtgtattaattagtgtgccttctggacaaattaagaaatattttttctatatttcaatgcggttgtatttaataacttataataaatgagtaggaagcattcatatt

SEQ ID NO: 9964 - DNA, 1400 bp, Homo sapiens
ttgcaaagttctttggtttgacaagcattagtgacaaaggcagaaaagatttatcagccatgctaaaagagtgaagaattttgatctttagagacactagttttggccaacttaagattttacgttaatttttacatagtatttgacactcatgcaaaataatgtgaaaacatctagatttagtagtttattctgcgccttttgttaaaactgaagattttggaaaatggttgtcactgctcttccagcctatgaatatttttgtgaaatggaaccatggatttatgtctggatcatccatacagaaccaacaattttattcaaaaacaatgtgttcatcaaagtaattgctcacattgtgcagtactatgttgtacagaccacgtgaaagggaatgctggtctagctggcgtggtatgtttataggcgaatttcagcagaaggaagccaaaatagttttttccttttgaaagttttttaaaaattatttcatgggtcttttttttaattaatatgtgtgcattgttacaatgtatgttggatgtcttttgaccctaaatgctttttttgttatcagagattgtgtactatttttatttttaataaatgtatcttccctttccttgttttagatttactttgctcttcgttaatcttattcctgatgatctagaacattagtcatcaacattacatgtttcatgcttcagatattttactgcttgtgtccttattgttggacagctttaaacagagttgatgtacttcaaatatagctcattgatacttaaggcatcttcttggaatgtggcttttgaagaaaaaaattactcaaagcaaatcaagagttaacaaacctaacgtaacctgaggtttaatattctactatcatattttttagagctataacttttgattatattaaactgcctccagctgtactatgtaaaacagatttacttttaaaaattacagtatacctgctttgttctatatgtatatgtttaactcatgaagtggactcttagaaggatttgaaatggactctggccacagaatttgtgagcagacagtagtagtgataataataaaagaaggcaatcaaaatttaattttatcatgccctctcacaggtttgtgttataattgtaagcccatattacttgtgttagtagttttgtctctataggtaacataatgacagtggtgtaaagtttctgttcaagaaacatatgttgtaaagttactttatacaagatacctgccaaaggaaatggtcttactttcaaatgactttgaaagcatgtataattgcaaacagagcaggagaagactttaatcagaatttccttgtgtccttttcctttactaagtgttttgaataaagaaaaaaaaaatgt

SEQ ID NO: 9965 - DNA, 1400 bp, Homo sapiens
actgtattttcatctcagcctagtgacgatgaatcaagtagtgatgaaaccagtaatcagcccagtcctgcctttagacgacgccgtgctaggaagaagaccgtttctgcttcagaatctgaagaccggctagttgctgaacaagaaactgaaccttctaaggagttgagtaaacgtcagttcagtagtggtctcaataagtgtgttatacttgctttggtgattgcaatcagcatgggatttggccatttctatggcacaattcagattcagaagcgtcaacagttagtcagaaagatacatgaagatgaattgaatgatatgaaggattatctttcccagtgtcaacaggaacaagaatcttttatagattataagtcattgaaagaaaatcttgcaaggtgttggacacttactgaagcagagaagatgtcctttgaaactcagaaaacgaaccttgctacagaaaatcagtatttaagaaagctcttcactgactttgttaatgatgttaaagattatcttagaaacatgaaggaatatgaagtagataatgatggagtatttgagaagttggatgaatatatatatagacacttctttggtcacactttttcccctccatatggacccagtcgacctgataaaaagcaacgtatggtaaatattgaaaactccaggcatcgaaaacaagagcagaagcaccttcagccacagccttataaaagggaaggtaaatggcataaatatggtcgcactaatggaagacaaatggcaaatcttgaaatagaattggggcaattaccttttgatcctcaatactgattcacaattgagttaaattagacaactgtaagagaaaaatttatgctttgtataatgtttggtattgaaactaatgaaattaccaagatgacaatgtcttttcttttgtttctaagtatcagtttgataactttatattattcctcagaagcattagttaaaagtctactaacctgcattttcctgtagtttagcttcgttgaattttttttgacactggaaatgttcaactgtagttttattaaggaagccaggcatgcaacagattttgtgcatgaaatgagacttcctttcagtgtaagagcttaaagcaagctcagtcatacatgacaaagtgtaattaacactgatgtttgtgttaaatttgcagcagagcttgagaaaagtacattgttctggaatttcatcattaacattttataatcttacactcacttcttgtctttttgtgggttcaagagccctctgacttgtgaagaatttgctgccctcttaagagcttgctgacttgttttcttgtgaaattttttgcacatctgaatatcgtggaagaaacaataaaactacaccatgag

SEQ ID NO: 9966 - DNA, 1400 bp, Homo sapiens
agggaaggctaaggacaggagtggggagtggtaccttgaaaatccaaaagccatctcaagtaaaaggaataaatgtgtcatgctttttaaaaagttgatgtgcggaaaatgttttcttggcttggaaactgggcggccaggggatgacagtatggacttccagtgaagtagtgacggaagcctgatcatagacattaaggaaagcggtgtaggtgttgtgagcttttgctgtaagaaaaagttgagacttttgttttgctttgtttgtgagagatgtgtatgtatttctgctgagtgataaagccagcggggagggactgatttttataggaaaggaggaaaaataatggaaacacatctcattattttattgtcacatttcttttctttgttatcttttgagtgtttcccttttttgccagtagagttattgtctattttttctttctataggacaaaaaaactaatacagactcctttatttttatatggatatactaggattgtaattcagatatttaatatcttttatcagtgttcagatcatagattaatggagaaaacatttaaaattgttttaaatttaaatacattgaactctaacatagatgaaaaatgtgtttactgctttcagtcgacctgataaaaagcaacgtatggtaaatattgaaaactccaggcatcgaaaacaagagcagaagcaccttcagccacagccttataaaagggaaggtaaatggcataaatatggtcgcactaatggaagacaaatggcaaatcttgaaatagaattggggcaattaccttttgatcctcaatactgattcacaattgagttaaattagacaactgtaagagaaaaatttatgctttgtataatgtttggtattgaaactaatgaaattaccaagatgacaatgtcttttcttttgtttctaagtatcagtttgataactttatattattcctcagaagcattagttaaaagtctactaacctgcattttcctgtagtttagcttcgttgaattttttttgacactggaaatgttcaactgtagttttattaaggaagccaggcatgcaacagattttgtgcatgaaatgagacttcctttcagtgtaagagcttaaagcaagctcagtcatacatgacaaagtgtaattaacactgatgtttgtgttaaatttgcagcagagcttgagaaaagtacattgttctggaatttcatcattaacattttataatcttacactcacttcttgtctttttgtgggttcaagagccctctgacttgtgaagaatttgctgccctcttaagagcttgctgacttgttttcttgtgaaattttttgcacatctgaatatcgtggaagaaacaataaaactacaccatgagg

SEQ ID NO: 9967 - DNA, 600 bp, Homo sapiens
gtattgttgatatttgcaacttgttttgcttttccattggtggaattgaaataattagtttttaattacataagatgcctgtttgctatttggtggaagatagatgttcatattgaagcagtcacatttgtactgtagttcaataaaagaaaaatgaagtattctgtagcctatatttttcatagagctcatgagcatttactgtacttgctgggtcttgccaagatcatttattccgctgcattgccaaagtgtcttcataccaaattaaaggtggttttaatatatgtttcatggaagttgtttataaaattcaaaggtatttcatttaggtgaaaagtcttatttattaaagtggtttgaataaagtagatcaaaacttccagagatcttaatggctatataggaagaaatatcactcaccataatttaaataaagaataaaaatacttgtattttgtggtggcaaatgtttggtagaactgtaattagaaaaatacaagtatatttgcgtgatggttacactagaagcccagactttacgactacacaatatattcatgtatctaaactgtacttgtaccccctaaatttattttt

SEQ ID NO: 9968 - DNA, 600 bp, Homo sapiens
ttcagctacgagtcctcggcggaaatcctgcctcataccccgaggctcacccacttccccacagtctcgggctccccagccagcctggccgactccatgcagcagaagctagctggccctcgccgccggcgcccgcagaatcccagcgccatttatgaggagtcaaatcctaaggatccagcggcagtgacagaatccaaagagggaacagaggcatcagcatcgaaggggctggagaagaaagagaaatgatgcagctggtgcccgagcctctcagggccagaccagacagatgggggctgggcccacacaggcgtgcaccggtagagggcacaggaggccaagggcagctccaggacagggcagggggcagcaggatacctccagccaggcctctgtggcctctgtttccttctccctttcttggccctcctctgctcctccccacaccctgcaggcaaaagaaacccccagcttcccccctccccgggagccaggtgggaaaagtgggtgtgatttttagattttgtattgtggactgattttgcctcacattaaaaactcatcccatggccagggcgggccactgtgctcctggaa

SEQ ID NO: 9969 - DNA, 1288 bp, Homo sapiens; identical to SEQ ID NO: 4734

SEQ ID NO: 9970 - DNA, 1400 bp, Homo sapiens
accaacatggccggtggggacatggcacgagtcagcacctacacaaatgcctttgccttcactcagttcggagtgctgtgtgccccctggaatggcctgctcatggaccggcttaaacagaagtaccagaaggaagcaagaaagacaggttcctccactttggcggtggccctctgctcgacggtgccttcgctggccctgacatccctgctgtgcctgggcttcgccctctgtgcctcagtccccatcctccctctccagtacctcaccttcatcctgcaagtgatcagccgctccttcctctatgggagcaacgcggccttcctcacccttgctttcccttcagagcactttggcaagctctttgggctggtgatggccttgtcggctgtggtgtctctgctccagttccccatcttcaccctcatcaaaggctcccttcagaatgacccattttacgtgaatgtgatgttcatgcttgccattcttctgacattcttccacccctttctggtatatcgggaatgccgtacttggaaagaaagtccctctgcaattgcatagttcagaagccctcacttttcagccccgaggatggttttgttcatcttccaccacctttgaggacctcgtgtcccaaaagactttgcctatcccagcaaaacacacacacacacacacacacacacaaaataaagacacacaaggacgtctgcgcagcaagaaaagaatctcagttgccaagcagattgatatcacacagactcaaagcaaaggcatgtggaacttctttatttcaaaacagaagtgtctccttgcacttagccttggcagacccttgactccaggggagatgacctgggggaggaagtgtgtcaactatttctttaggcctgtttggctccgaagcctatatgtgcctggatcctctgccacgggttaaattttcaggtgaagagtgaggttgtcatggcctcagctatgcttcctggctctccctcaagagtgcagccttggctagagaactcacagctctgggaaaaagaggagcagacagggttccctgggcccagtctcagcccagccactgatgctggatgaccttggcctgaccctggtctggtctcagaatcacttttcccatctgtaaaattgagatgaattttggtgttgaaagttcttcctggagcagatgtcctagaaggttttaggaatagtgacagagtcaggccaccccaagggccatgggagccagctgacctgcttgaccgaaggatttctgacagactatctttggggatgttttcaagaagggatataagttatttactttgggcatttaaaagaaaatttctctcgggaataattttatagaaaaataaagcttctgtgtctaaggc

SEQ ID NO: 9971 - DNA, 1400 bp, Homo sapiens
tattattaagcttctttatgaaaaaggcatcagcctcagggcctccttcatcttcatctctgtctgcagtacctggcatgtagcacgcactttcctcctgatgccccgggggcacatcccatacccactgccccccaactacagcatagcctgtgccctgggaatggcaccacaaaggaagagaaggaaacagctgagcatgaaaacagggagctacagtcaaaggagttcctttcagcgaaggaagagaccccaggggcagggcagaagcaggaactccgctccttctggagctacgctttctctcggcgctttgcctggcacctggtgtggctgtctgtgatacagttgtggcactacctcttcattggcactctcaactccttgctgaccaacatggccggtggggacatggcacgagtcagcacctacacaaatgcctttgccttcactcagttcggagtgctgtgtgccccctggaatggcctgctcatggaccggcttaaacagaagtaccagaaggaagcaagaaagacagggtcttttaacatccgaggaccacattctttgtgctttccaaatcatcacctgccccatgcaacttacagggataaagccaagatgaaactccccctacttctggctcttctatttggggcagtttctgctcttcatctaaggtctgagacttccacctttgagacccctttgggtgctaagacgctgcctgaggatgaggagacaccagagcaggagatggaggagaccccttgcagggagctggaggaagaggaggagtggggctctggaagtgaagatgcctccaagaaagatggggctgttgagtctatctcagtgccagatatggtggacaaaaaccttacgtgtcctgaggaagaggacacagtaaaagtggtgggcatccctgggtgccagacctgccgctacctcctggtgagaagtcttcagacgtttagtcaagcttggtttacttgccggaggtgctacaggggcaacctggtttccatccacaacttcaatattaattatcgaatccagtgttctgtcagcgcgctcaaccagggtcaagtctggattggaggcaggatcacaggctcgggtcgctgcagacgctttcagtgggttgacggcagccgctggaactttgcgtactgggctgctcaccagccctggtcccgcggtggtcactgcgtggccctgtgtacccgaggaggctactggcgtcgagcccactgcctcagaagacttcctttcatctgttcctactgagctggtcccagccagcagttcagagctgccctctcctgggcagctgcctcccctcctctgcttgccatccctccctccacctccctgcaataaaatgggttttactgaaa

SEQ ID NO: 9972 - DNA, 1400 bp, Homo sapiens
gcgcgagtcgtccatcctggccaagctgaaacgcaagaaggggccaggggccggcagcgccctggacgatggccggagggaccccagcagcaacgacatcaacgggggcatggagcccacccccagcactgtgtcgacgccctcgccctccgccgacctcctggggctgcgggcagcccctcccccggcagcacccccggcttctgcaggagcagggaaccttctggtggacgtcttcgatggcccggccgcccagcccagcctggggcccacccccgaggaggccttcctcagcccaggtcctgaggacatcggccctcccattccggaagccgatgagttgctgaataagtttgtgtgtaagaacaacggggtcctgttcgagaaccagctgctgcagatcggagtcaagtcagagttccgacagaacctgggccgcatgtatctcttctatggcaacaagacctcggtgcagttccagaatttctcacccactgtggttcacccgggagacctccagactcagctggctgtgcagaccaagcgcgtggcggcgcaggtggacggcggcgcgcaggtgcagcaggtgctcaatatcgagtgcctgcgggacttcctgacgcccccgctgctgtccgtgcgcttccggtacggtggcgccccccaggccctcaccctgaagctcccagtgaccatcaacaagttcttccagcccaccgagatggcggcccaggatttcttccagcgctggaagcagctgagcctccctcaacaggaggcgcagaaaatcttcaaagccaaccaccccatggacgcagaagttactaaggccaagcttctggggtttggctctgctctcctggacaatgtggaccccaaccctgagaacttcgtgggggcggggatcatccagactaaagccctgcaggtgggctgtctgcttcggctggagcccaatgcccaggcccagatgtaccggctgaccctgcgcaccagcaaggagcccgtctcccgtcacctgtgtgagctgctggcacagcagttctgagccctggactctgccccgggggatgtggccggcactgggcagccccttggactgaggcagttttggtggatgggggacctccactggtgacagagaagacaccagggtttgggggatgcctgggactttcctccggccttttgtatttttatttttgttcatctgctgctgtttacattctggggggttagggggagtccccctccctccctttcccccccaagcacagaggggagaggggccagggaagtggatgtctcctcccctcccaccccaccctgttgtagcccctcctaccccctccccatccaggggctgtgtattattgtgagcgaataaacagagagacgct

SEQ ID NO: 9973 - DNA, 1400 bp, Homo sapiens
ggcacatctgtcaggcttagttctcccatgcgccatcctcaagaggcaccagcactttatctgttgagcctttatgtggcaccaactgtgtgcactattacccggttttacagatgatggaggcccagaagcaggaggtggctggtgttaggtcacacagctaggaggcagcagaacggtggggcgctgcctgtgctcttaacccccaggccaagtcaccccatcaggcagtcaggagggctggcggcagggggtgatgtgggtgggaggtagtgccttcttggcattctcaccgcagcctgggtgccgggtgccactctgacctcagccatggcagggtcgggggatgccgatgggcgctgcacgggctctcagaggcccctcacctatggccatggccttgactgtgggggcctctgtccaccgatgatctcccttcatcccctacaggtggggcggtccagggtggtgggggcacagtggccccgggcagtgaccacagggtcctgacccgcggcccccgcaggcgggctgcatgctgttcccccacatctccccctgtgaggtgcgcgtgctcatgctcctgtactcgtccaagaagaagatcttcatgggcctcatcccctacgaccagagcggcttcgtcagtgccatccggcaggtcatcaccacccgcaagcaggcagtgggacctggtggtgtcaactcaggcccagtccagatcgtcaacaacaagtttctggcatggagtggtgtcatggagtggcaggagcccaggcctgagcccaacagtcggtccaagaggtggctgccatcccacgtctacgtgaaccagggggagatcctgaggaccgagcagtggccaaggaagctgtacatgcagctcatcccgcagcagctgctgaccaccctagtgccgctgttccggaactcgcgcctggtccagttccacttcaccaaggacctggagacactgaagagcctgtgccggatcatggacaatggcttcgccggctgcgtgcacttttcctacaaagcatcgtgtgagatccgcgtgcttatgctcctgtactcttcagagaagaaaatcttcattggcctcatcccccatgaccagggcaactttgtcaacggcatccggcgtgtcattgccaaccagcagcaggtcctgcagcggaacctggagcaggagcaacagcaacgagggatgggggggtagtggttaccccgggctgggcccctccaggagtcacagatgaggcccccgcagagactggtgacacgcttctgagcaggggcccctggggacttcaactgcccagcaacatggaggatggtgtcctgaggcctccaaggacggtccccacccctctacgtttccccaataaagccttttaaaa

SEQ ID NO: 9974 - DNA, 600 bp, Homo sapiens
gatggcactgacgaagccgctctggtcgtaggggatgaggcccatgaagatcttcttcttggacgagtacaggagcatgagcacgcgcacctcacagggggagatgtgggggaacagcatgcagcccgcctgcgggggccgcgggtcaggaccctgtggtcactgcccggggccactgtgcccccaccaccctggaccgccccacctgtaggggatgaagggagatcatcggtggacagaggcccccacagtcaaggccatggccataggtgaggggcctctgagagcccgtgcagcgcccatcggcatcccccgaccctgccatggctgaggtcagagtggcacccggcacccaggctgcggtgagaatgccaagaaggcactacctcccacccacatcaccccctgccgccagccctcctgactgcctgatggggtgacttggcctgggggttaagagcacaggcagcgccccaccgttctgctgcctcctagctgtgtgacctaacaccagccacctcctgcttctgggcctccatcatctgtaaaaccgggtaatagtgcacacagttggtgccacataaaggctcaacagataaa

SEQ ID NO: 9975 - DNA, 600 bp, Homo sapiens
cacaggaagttctgggatcaccaaggattgttggagagtccagtgagatggaaccacacaaccagttccctaccagtgtcttgtcagctctgggtgtttgttccctgccactaagtggctcagtcacacctttgctgaaacacagtagtcttatgaaaagcactggacacatactttgaatacctttcatattttaggtgctgaaaatggtgagggagtgagtgctctgcacccttgggcttttcaactcttgcacctggagttctgctggttaagtttgttaaacttagttgaaactgggaacctgttggctaaccattggggccttacactgtttttcaaatggttgcaacatttaacttctcgcacatggttcccgtcctctggagctctgtcttgtcggggagatgggcatgttgtataccaaaagagtgtacaaagtgttgcagggctgtgacacaatagggactctatggaaaactggcagccattgggtgtgggggcagtctgtaaatcagtcacctgtgttgctgcaggccaaggtagaaacgccctccgtgtgtgcatatttgttggttctctgattaaagttttgagtct

SEQ ID NO: 9976 - DNA, 600 bp, Homo sapiens
ccaggggagcagctcagcttagcccagcatgaagagatgggctctgctctgagagtagggcgggcttgaaggccctgatgggtggaccaccagcctgggcgcagtggtgctgggggcgtgcagctgggcccaggggctgtgcactcaggcctgacccgttgcactgaacaagaccaaatctctggttgtgcgcttaacgtgagggtgggtccagtgtgccctgcgatgggtcccgtgtcactgtttacatgacctatttgtgtggttatatagccctttatttaaaagagagaagttccttttacaaagttattaaattaattatatgtttaaaagttaaagaaaaaagagctgcagagtatttataaaactgtcttttagaaaaaaaacaagcaagaagaccatttgaccatatgaatggaaaagggaagaaagtataatagaaactttgctagttaaaaaaaaaagaaaaaaaaagaaaaaaaatccctttcttgtaaacttacggacacctctttgtggctgttggagtttagtttttatatacacagagttatcagacattatttataaaacttagtttaaaaaaaagacaaaaaa

SEQ ID NO: 9977 - DNA, 1400 bp, Homo sapiens
agtaatcacaagcagcatccgttttgttttctcttcttgggagacatctgtcaaaccaggaatattcttgaaaagaacgtgagcaggaaaaactgctggtgatactttttttaagttttgtttttatcttgcctgttggcttcaatacatttgagaatacgctgaagagggaaaatttcagtgatggagattctagattaaatatcaggactgatttcctggtgggattatggtccagttttaccaaagaaccaattccttgaatgttggaatctaactttttatattgtcattattattgttgtttttaaacggttctttgtcttttctgttttatttttctcaagctgctttcaggagctagcagaaaataactcaaagttgaagactctggaagattttgctttaacctaactcgcattgatgtattaaatttataattttagcattcccaatagatcctatcattccttaaacataataccctttgtcttggagtagaatactaagttagagttagtggatttctagtttaggagaggagctcaaaactataatctttaacaaattgaaaaatgaaatagggtgttttccctttttgtgcacacctatattaccttaagaaatttccttccatagacagctgcctcaaagggaaatcctctttaaaccgtagttggcgcagaggtcagtcctagtcggagcttaggaggggcggagacgctcacatcgtctgacttgagtcgccactgattgtggcaacagctttgcctcatgagtcaaaaattggcaatttcttttgatttttagttgttgaatttgctgtttcaagcatttgtacatattagaagtctaaggagtagcaagtcagtgggaggactttttcacccctggcattagcagcttcgacctcattttccagatgcaccagctcctattaataagttagcaaggaaagtgtatgtcacgtgcaggaacagtgaggcagggacaggggttctgctccttctcacttcaccaccggcacacagcttgcccctgtctttgcccccaaaggtattttgtgtctagtgtcaaattggagctattcttcactggtccttaaccttgggttttaaaaagaaggcttctctgtttgggtagcgtaagagctgagtatagtaagtcctcttccaaagagatggcaatatgctgggcatctactttaaaacaaagttgtctgatttttgcaagagaggttaggattttattgttcttatttccctttacagttctgcagttccatcacagtatttttttaaataactcaggtgtatgagaagaaattagaaaagaaaattaacttatgtggactgtaaatgttttatttgtaagattctataaataaagctatattctgt

SEQ ID NO: 9978 - DNA, 600 bp, Homo sapiens
tctgcatggcggtggtggggaggaggggtgcgccatggcctggaggggagtgtgtgttggggtgtgtgtgtggaggttcttttgagtcacacacaaagcattgtgctgagacactgcattcctgctggctgggcttcctgtttccagatgcattcctgtcccagagtcaccacagagactgtttggaatcccgccccacattctccaaattcagggcgcgatctggcaaaggctccctcccccaccctcttactttggagggagtctgggctccctcctacccagggagggctggcagggctctggcacggccggggtgtgattccacacatcttcttggtcttgcataaggcagttcctggagacccagcactctggttctctctctgcctgtgagaagcggaatgggtactgtctaggaggactgggcagggtgggggcaacccagaggacccatggctagcagggaagggcctgggcttgaatgtgactctgttgagacatggccagcaattctggcacttggctgtcattcggctggcctgcgcagagattggctgtgggcctcagtttccccattttataaagttttaaaatctg

SEQ ID NO: 9979 - DNA, 973 bp, Homo sapiens; identical to SEQ ID NO: 4744

SEQ ID NO: 9980 - DNA, 600 bp, Homo sapiens
ggtcctggatctgagcccttggggtgtttcactcaagagccactgagccgtccccatcttccacaaagcagtttccacaagcaagccagggccagccctgcctgcactctgcccgcagtgcccctcaacgtctgggatgaggatgagcctgctgagatgagggcagctctctccatccagcagtacctcatggagtgctcactaaggagttaggaatggcaggccacgctggcatctggggttcaaggtggctcctgtggcaggaacaggtgtccatgaccctgattacctggatctcacaggttctgggaatgcaataggggcctgctgtggctattccaacatctctggtcagggcctggaagtaccttaggacacatggggttggggtcaggactgcattctcagggaccagtggagagccctggaccagatgaactggagtctaggcctctctcgtgactgggacttgtgggacgtgggaggcctgtgagatccaggactaaagattatgctgtttcctaatgggcagatatgtaagtaggtaagtgggatcctcaggtaagcgggatccagaactaaagactgtgctatttcctg

SEQ ID NO: 9981 - DNA, 423 bp, Homo sapiens; identical to SEQ ID NO: 4746

SEQ ID NO: 9982 - DNA, 600 bp, Homo sapiens
  misc_feature (328)..(328): n is a, c, g, or t
tcagagatgtcccctgccatgcagagcaggaagcctcagctgggcctggagtgtccctgctccagccctgccagggacaggtttctccctggatactcttggcccaccgcagatctgtagccagtcagaggaggaggagaaggagcccctcagcagagtggtgcagtttcgctcagagcttgtctccttggcttccaaccccagaaatgcctgctgggccttaagctttccaggggccggggcagtggggagcccccatcccttcacaccgccaccaactaaccaagcttggcctctgactcccgtctctgtgcttgcccccatctcnagggaccatgatgtctcagtcactccacgctccccacaggccaaccctggcacaggtcatgtctgcagcccccagaatgttctggacatgcaccaccagccggtggtcccaatgtccacccctgcctccccttcactggggactggggttttcgccccatgctgcatcgtgttgtattgggatggggctgaggaacatgctccctccctccctcccataaaatgcctgctcttcacctcccacctttgtggggggcttttgaggacccagct

SEQ ID NO: 9983 - DNA, 1400 bp, Homo sapiens
caggtgaagagtgcgacattgacataaatgaatgtgacagtaacccctgccaccatggtgggagctgcctggaccagcccaatggttataactgccactgcccgcatggttgggtgggagcaaactgtgagatccacctccaatggaagtccgggcacatggcggagagcctcaccaacatgccacggcactccctctacatcatcattggagccctctgcgtggccttcatccttatgctgatcatcctgatcgtggggatttgccgcatcagccgcattgaataccagggttcttccaggccagcctatgaggagttctacaactgccgcagcatcgacagcgagttcagcaatgccattgcatccatccggcatgccaggtttggaaagaaatcccggcctgcaatgtatgatgtgagccccatcgcctatgaagattacagtcctgatgacaaacccttggtcacactgattaaaactaaagatttgtaatctttttttggattatttttcaaaaagatgagatactacactcatttaaatatttttaagaaaataaaaagcttaagaaatttaaaatgctagctgctcaagagttttcagtagaatatttaagaactaattttctgcagcttttagtttggaaaaaatattttaaaaacaaaatttgtgaaacctatagacgatgttttaatgtaccttcagctctctaaactgtgtgcttctactagtgtgtgctcttttcactgtagacactatcacgagacccagattaatttctgtggttgttacagaataagtctaatcaaggagaagtttctgtttgacgtttgagtgccggctttctgagtagagttaggaaaaccacgtaacgtagcatatgatgtataatagagtatacccgttacttaaaaagaagtctgaaatgttcgttttgtggaaaagaaactagttaaatttactattcctaacccgaatgaaattagcctttgccttattctgtgcatgggtaagtaacttatttctgcactgttttgttgaactttgtggaaacattctttcgagtttgtttttgtcattttcgtaacagtcgtcgaactaggcctcaaaaacatacgtaacgaaaaggcctagcgaggcaaattctgattgatttgaatctatatttttctttaaaaagtcaagggttctatattgtgagtaaattaaatttacatttgagttgtttgttgctaagaggtagtaaatgtaagagagtactggttccttcagtagtgagtatttctcatagtgcagctttatttatctccaggatgtttttgtggctgtatttgattgatatgtgcttcttctgattcttgctaatttccaaccatattgaataaatgtgatcaagtc

SEQ ID NO: 9984 - DNA, 506 bp, Homo sapiens; identical to SEQ ID NO: 4749

SEQ ID NO: 9985 - DNA, 600 bp, Homo sapiens
agatgacatggaatcattaggatatgttttgatgtattttaatagaaccagcctgccatggcaagggctaaaggctgcaacaaagaaacaaaaatatgaaaagattagtgaaaagaagatgtccacgcctgttgaagttttatgtaaggggtttcctgcagaatttgcgatgtacttaaactattgtcgtgggctacgctttgaggaagccccagattacatgtatctgaggcagctattccgcattcttttcaggaccctgaaccatcaatatgactacacatttgattggacaatgttaaagcagaaagcagcacagcaggcagcctcttccagtgggcagggtcagcaggcccaaacccccacaggtttctaagcatgaattgaggaacagaagaagcagagcagatgatcggagcagcatttgtttctccccaaatctagaaattttagttcatatgtacactagccagtggttgtggacaaccatttacttggtgtaaagaacttaatttcagtataaactgactctgggcagcattggtgatgctgtatcctgagttgtagcctctgtaattgtgaatattaactgagatagtg

SEQ ID NO: 9986 - DNA, 1400 bp, Homo sapiens
ccgctcccggggatgcctgcgggctcctgggacccggccggttacctgctctactgcccctgcatggggcgctttgggaaccaggccgatcacttcttgggctctctggcatttgcaaagctgctaaaccgtaccttggctgtccctccttggattgagtaccagcatcacaagcctcctttcaccaacctccatgtgtcctaccagaagtacttcaagctggagcccctccaggcttaccatcgggtcatcagcttggaggatttcatggagaagctggcacccacccactggccccctgagaagcgggtggcatactgctttgaggtggcagcccagcgaagcccagataagaagacgtgccccatgaaggaaggaaacccctttggcccattctgggatcagtttcatgtgagtttcaacaagtcggagctttttacaggcatttccttcagtgcttcctacagagaacaatggagccagaggcgtgagaatcactcctgtgttaccttactcttcccaaggtgaaactggaagcagcttctagagaacagcttcaggtgcagaccgagaaatgacgtcatcctgataattattggacgtgtttattaattgcaccccattagcccctgtttttaaaaaatataggttagcaggacgtgggcacaggccgtgaaacatttatagggcgcctgtcacgtgtgagacatagtaatcagaggccaatggtgatgtgtgaaaatgaggatgaccagctctggttttctaggagctatggtctcataatgacaataatcagcatagtgtacttgtccttaatgttatagcatggcaggaaagaccatgggcttagaaggcagacattggttaggaggtgcagggaacatactaattcatgtgcggtcaaagcacttggcatttaatagggcaaaggtaaacagatgtagagaaatgagtctcatgcctgtaatcccagcactttgggaggccaaggtgggtggatcacttgagcctaagagatcaaggctgcagtgagccatgatggtacccctgcactccagcccaggttacagagcaagggcctgtctcagcaaaacaaaacaagcacaggccaaggagtgagatagccagcgctgatggtatctgcctcgtagtgcatgaagtgcatgtcatacactaagcagccagccagtgttggctgtcagtgttattactcacatgctttattttatttaagactttgagatagttcatgaagtgggtattattatcaatttccattttataggtgaggaaactgagcccagtgaagttaaataacttcccaaggtcattgagctgttgagtggacagctcaggtctgtttgtaaatctttaataaataacaacagctaagattc

SEQ ID NO: 9987 - DNA, 1400 bp, Homo sapiens
agcgtaaagtctttgttctcaaggaatttgcattctagaaagtagaagatgtaataaatgtactgtgggacatgttaataagtgctataaagaaatataaagggtttgggagcaaaaagagggagtggatctattttagatgagcccaggtaagacctctctgaagagctgtcatgaaggagggagggagcacattcctggcagagaaaacagcacgtgcaaaggccccgagactggagtgtgttcctgaagagcagccaggaggccagcatggctggagaggcaggcataggcagggaaccgagcagcaggtcagagcaggcgagctgacattctgcagcctggacggccatggcaggaagcttttagttggagagatacaggaagcctcctagggttctgagcagaagaggggcatgagctgattcacattctgaaggacctctctagctggccagtgctgaggaggttggagagagaaagggtgaaagcagagagaccagtgcagggctgttaacagggttgcaggcgagagactggggtgctgggctcccctagactaggactccagtgccctcctctcccaagagacaaaggccattgcattgaaggaggtgggaaatgattagattctgaacatatgtaattatttttcagtctttttcaaagatacaaatatttacatagttttaatcatgtaatatatacaatttaatgtcctagtgttttacttaatagtgtatcatgttttccctgttggtatgtagcctggataaatgctcttaattataaaaaattctgtcgaggagtgttccatagtttattgttttcctattatgagaatttaggccaagtgtggtggctcatgcctgtaatcccagcactttgcgaggccgaggtgggcagatcacttgaggtgaggagttcaagaccagcctggccaacatggtgaattatctctactaaaaatacaaaaaaataataataatagccaggcgtggtggcacatgcctgtattcccagctgcttgggaggctgaggcaggagaatggcttgaacctgggaggtggaggttgcagtgagccgagatggtgccactgcattccagcctgggcaacagagcgagactccatctcaaaaaaaaggagacttcatgtgcccccaatttttcactattgttatttgaaaaaatatttttatttgtaagagtttttctttatttaaaatgttcattaataaagttgttggacgggaagcaaaaaaaaaaagttgtttaagataaattcccagaagtgaatttgttagatcaaacacttaaaactttttgttatggaagaattcaaatataaataaaaaattgtgagtaataaaatgaactcacagtttcaacaatgacccac

SEQ ID NO: 9988 - DNA, 600 bp, Homo sapiens
gagcacataaaatgccaaggggtgtgcctgataccaagttgtaaaacacctaagaaatgtagctgtaattattttcagattgaaagggttttagatttgaaaacccatagagaaactttctactttggccttttttctttgagtgctgcaagaaataaaatatagcccaacatttattttttatgattcattgaaactctaggggtagaaatggaaagctttctgtaactactagtgtccttaggtcaaggccctcagaaagcgtgtggttttacatttgagaaaccaatcctcttttgttttactgtattttaaaatagcttcttactctgttttgttgtttatacattgtatgtttggcttcttgaggtctctggctcctcagtttttccttggctcataacatagtatcctcattgatccaagcatgaccctgttttgcttatttttattttacttatactaataatataatgaatatccacaaattcagtgcccaatgaggcaggagaatcgctcgaacccagtaggcagaggctgtggtgagccaagatcacgctactgcattccagcctgggcaacagtgcgagattctgtctc

SEQ ID NO: 9989 - DNA, 600 bp, Homo sapiens
tgagtatttttctttttaccagttttttagtttgagctcttaggtttattggagctagcaataattggttctggcaagtttggccagactgacttcaaaaaattaatgtgtatccagggacattttaaaaacctgtacacagtgtttattgtggttaggaagcaatttcccaatgtacctataagaaatgtgcatcaagccagcctgaccaacatggtgaaaccccatctgtactaaacataaaaaaattagcctggcatggtggtgtacgcctgtaatcccagtgacttgggaggctgaggcaggagaatcgcttgaacccgggaggcggaggttgcagtgagctaagatcgcgccactgtactccagcctgggcaacagcgagactccatctcaaaaaaaaaggaaatgtgtatcaagaacatgattatccaggggtattttctaattcagatcatcaaactgattatatagaagagttggctttaaaatgtttgcaaatgtctttttttttttaatactggaagaaaaaatattctgttgtgtctcatacagtgcttaggatgtctttcacagagcttattaaaaagatgaaacctg

SEQ ID NO: 9990 - DNA, 600 bp, Homo sapiens
tgggcttcctctttgcctacagcatgagacagaagacacgggcatatcataggctgaaggatgatgtcccggaagaggtaaaattaaggcgtttggaggaactcatcactatcttccgagaagaagcaacaaaagccaatcagacctctgtgggctgtacccagttggtgctagtggaagggctcagtaaacgctctgccactgacctgtgtggcaggaatgatggaaaccttaaggtgatcttccctgatgcagagatggaggatgtcaataaccctgggctcagggtcagagcccagcctggggactatgtgctggtgaagatcacctcagccagttctcagacacttaggggacatgttctctgcaggaccactctgagggactcttctgcatattgctgacctgagaggatggcctcagagctgacttgggcaatcctccccaacaggaaggggagacattgcctgccactgaggaaacaggtcatgaaggtggagataagctgcaaggggcgaagcaactttatgtcagtggaaaacgtgtctctttaaagctgctatgtgaacagcttttacagtcattaaatttacctaaact

SEQ ID NO: 9991 - DNA, 600 bp, Homo sapiens
cgatttcacaaaaacatgatcaagtccttctatactgcaagtcttttgatagatgtcataacagtatttggagaactcactgatgaaaatgtgaaacacaggaagtatgccagatggaaggcaacatacatccataattgtttaaagaatggggagactcctcaagcaggccctgttggaattgaagaagataatgatattgaagaaaatgaagatgctggagcagcctctctgcccactcagccaactcagccatcatcatcttcaacttatgacccaagcaacatgccatcaggcaactatactggaatacagattcctccgggtgcacacgctccagctaatacaccagcagaagtgcctcacagcacaggtgtagcaagtaatactatccaacctactccacagactatacctgccattgatcccgcacttttcaatacaatttcccagggggatgttcgtctaaccccagaagactttgctagagctcagaagtactgcaaatatgctggcagtgctttgcagtatgaagatgtaagcactgctgtccagaatctacaaaaggctctcaagttactgacgacaggcagagaatga

SEQ ID NO: 9992 - DNA, 600 bp, Homo sapiens
caggagccagaatcatcttctttgggtctacaaccatcttaatgaacttcctgtacctgctgggagaagttctgaacaactatatctgggatacacagaaaaagcctccatcttggcaagatatgaaaattaagtttatgtacctaggaccatctagttagttccacaaagacagatgttttgtgccaagtaagtatcatcctcatttacaagaggggtcacaaactgctggcctcccccaacttctacctatcaagttctgttaggcctacatcgtggaatttttgtttttgaatcagtattttaaaattgggtgattttggctgggcgcagtggctcatgcctgtaatcccggcactttgggagactgaggcaggtggatcacgaggtcaagagatggagaccatcctggccaacatggtgaaatcccatctctactaaaaatacaaaaattagccaggcatggtggcgtgtgcctgtagtcccaggtactcgggaggctgaggcaggagaactgcttgaacccaggaggcagaggttgcagtgagctgagatcatgccactgcaccccagcctggcaacagaacaagactccatctc

SEQ ID NO: 9993 - DNA, 1400 bp, Homo sapiens
gacatcagactcttccctaaacgtgctctctgggcacccctgaacttgctcatccgggttccccctcccacagcactttctgcagctagagctgattaatgggcgcttgagtgcctccttgctgcactcccatgacacagagacacgggccaccatgaacttggcactggctggtgacatccttgctgcagggcaggatgcccactgtcagctcctgcgcttccaggcacatcaacagcagggcaacaaggcagagaaggccggtgaggagctccctctctacccccttggggaaagggttgaacgagtaaggtcactcttggtgtctctaaagaagtgggtctggaagtagggttttggtagcaagctagaagttgtatgggcacctgccatggagagaggggccagtactccttactgtagaagcctggaacctggccaagtgtttgtgttacaggttccaaggagcaggggcctcgacaaaggaagggagcagccccagcagagaagaaatgtggagcggaaacccagcacgaggggctagaactcagggtagagaatttgcaggcggtgcagacagactttagctccgatccactgcagaaagttgtgtgcttcaaccacgataataccctgcttgccactggaggaacagatggctacgtccgtgtctggaaggtgcccagcctggagaaggttctggagttcaaagcccacgaaggggagattgaagacctggctttagcttccctgcttcctgggaatcaggagcctggacactgccatctctagagcagagtggaggcctggactccctttgctcactccattcgggtccacagctgaggttgccgctgacaagatgaatgggcactgcctgcccttctagtgaaaaggcttggctatggccctgtgtgactccaggtcccaggaaccttgccttcgtcatctgtggatccatccagaacagcggtatctgaagcccaggccatactccctgcctcctttcttctgcctaccagaggctccagagttgagcttgtccttatctagaaacatgtgaagatgcccaagagcctggaggcactgctgtccttcctgcagaaacagtttctcctcctcccctcagccttgtggccagttcctcttcacatgaagcccctggcatttgctggggaagggactggcctggtacttgctgttagggcaggaaggggcaaaaggaagacttgggtagtaatctgggggttcagatgggtagcactaagccagctggcctaaagatgcaataagttcctaggtagtctacccttaccttgaggaatgggaaaatgaacctcagcccattaggcaggaaaagttgatatttaataaacaaggaaagagtgaactgagacccc

SEQ ID NO: 9994 - DNA, 1400 bp, Homo sapiens
aggggcctcgacaaaggaagggagcagccccagcagagaagaaatgtggagcggaaacccagcacgaggggctagaactcagggtagagaatttgcaggcggtgcagacagactttagctccgatccactgcagaaagttgtgtgcttcaaccacgataataccctgcttgccactggaggaacagatggctacgtccgtgtctggaaggtgcccagcctggagaaggttctggagttcaaagcccacgaaggggagattgaagacctggctttagggcctgatggcaagttggtaaccgtgggccgggaccttaaggccccctccctgctacctcacagcctgggatggctccaacttcttgccccttcggaccaagtcctgtggccatgaagtcgtctcctgcctcgatgtcagtgaatccggcaccttcctaggcctgggcacagtcactggctctgttgccatctacatagctttctctctccagtgcctctactacgtgagggaggcccatggcattgtggtgacggatgtggcctttctacctgagaagggtcgtggtccagagctccttgggtcccatgaaactgccctgttctctgtggctgtggacagtcgttgccagctgcatctgttgccctcacggcgggagtgttcctgtgtggctcctgctcctgctgtgtgtcgggcttattattgtgaccatcctgctgctccagagtgcctttccaggtttcctttagcttccctgcttcctgggaatcaggagcctggacactgccatctctagagcagagtggaggcctggactccctttgctcactccattcgggtccacagctgaggttgccgctgacaagatgaatgggcactgcctgcccttctagtgaaaaggcttggctatggccctgtgtgactccaggtcccaggaaccttgccttcgtcatctgtggatccatccagaacagcggtatctgaagcccaggccatactccctgcctcctttcttctgcctaccagaggctccagagttgagcttgtccttatctagaaacatgtgaagatgcccaagagcctggaggcactgctgtccttcctgcagaaacagtttctcctcctcccctcagccttgtggccagttcctcttcacatgaagcccctggcatttgctggggaagggactggcctggtacttgctgttagggcaggaaggggcaaaaggaagacttgggtagtaatctgggggttcagatgggtagcactaagccagctggcctaaagatgcaataagttcctaggtagtctacccttaccttgaggaatgggaaaatgaacctcagcccattaggcaggaaaagttgatatttaataaacaaggaaagagtgaactgagacccc

SEQ ID NO: 9995 - DNA, 600 bp, Homo sapiens
cagacagacagtggccgaccaggtgctagtaggaagctactgtgtcttcagcaatcagggagggctggtgcatcccaagacttcaattgaagaccaggatgagctgtcctctcttcttcaagtcccccttgtggcggggactgtgaaccgaggcagtgaggtgattgctgctgggatggtggtgaatgactggtgtgccttctgtggcctggacacaaccagcacagagctgtcagtggtggagagtgtcttcaagctgaatgaagcccagcctagcaccattgccaccagcatgcgggattccctcattgacagcctcacctgagtcaccttccaagttgttccatgggctcctggctctggactgtggccaaccttctccacattccgcccaatctgtaccggatgctggcagggaggtggcagagagctcactgggactgaggggctgggcacccaacccttttccacctgtgcttatcgcctggatctatcattactgcaaaaacctgctctgttgtgctggctggcaggccctgtggctgctggctgagggttctgctgtcctgtgccaccccattaaagtgcagttccctccgg

SEQ ID NO: 9996 - DNA, 600 bp, Homo sapiens
tgatagcacggagcctggcttgtggtaggtacttgttgaaatggtagccccccgtgtccgatgatgacctgtgcatgaggctttgggagaagcagagctaggttggagcacaggttctgccacacctgggctatgtcatatttgggccctatttagttgcttcttctgtaaaatggggatgatgataatagtacccactcacagggctgttggggtgaacaaatgagatttattctcattcatttgttcattcatgcattcacaaaatatttagtaatcacctactagtctagttgctaagggtacagtagtgaacaatctgtgccctcagaacattctagtaaagaaatagacaataagtatataaaatataaatagtccccaattaacaatggttcagcttgcaatttttaacttcatgatgggtattacatgcatttttcacttaacgatattttctttttcttttttgagacagagtctcactctgtcgcccaggctggagtgcagtggcatgatcttgactcactgcaacctccacctcctggattcaagtgattctcctacctcagcctcttgagtagctgggtgtacaggtgc

SEQ ID NO: 9997 - DNA, 600 bp, Homo sapiens
gcttcagccagaagatgcaggagcagaagaatgaaggctgccaggtgtatggcttcttggaagtcaataaggtggccggaaacttccactttgcccctgggaagagcttccagcagtcccatgtgcacgtccatgacttgcagagctttggccttgacaacatcaacatgacccactacatccagcacctgtcatttggggaggactatccaggcattgtgaaccccctggaccacaccaatgtcactgcgccccaagcctccatgatgttccagtactttgtgaaggtggtgcccactgtgtacatgaaggtggacggagaggtactgaggacaaatcagttctctgtgaccagacatgagaaggttgccaatgggctgttgggcgaccaaggccttcccggagtcttcgctcatctaccactcagcacgagccatccagaagaaaattgatctagggaagacaacgtagtcaccctcggtgcttcctctgtctcctctttctccctggcctgtggttgtcccccagcctctgccaccctccacctcctcggtcagccccagccccaggttgataaatctattgattgattgtgatagt

SEQ ID NO: 9998 - DNA, 1400 bp, Homo sapiens
aatcgtgtagtaaccatggaggtagaggccagaaacctagataagaaggacttcctgggaaaatcagatccatttctggagttcttccgccagggtgatgggaaatggcacctggtgtacagatctgaggtcatcaagaacaacctgaaccctacatggaagcgtttctcagtccccgttcagcatttctgtggtgggaaccccagcacacccatccaggtgcaatgctccgattatgacagtgacgggtcacatgatctcatcggtaccttccacaccagcttggcccagctgcaggcagtcccgctgagtttgaatgcatccaccctgagaagcagcagaaaaagaaaagctacaagaactctggaactatccgtgtcaagatttgtcgggtagaaacagagtactcctttctggactatgtgatgggaggctgtcagatcaacttcactgtgggcgtggacttcactggctccaatggagacccctcctcacctgactccctacactacctgagtccaacaggggtcaatgagtacctgatggcactgtggagtgtgggcagcgtggttcaggactatgactcagacaagctgttccctgcatttggatttggggcccaggttccccctgactggcaggtctcgcatgaatttgccttgaatttcaaccccagtaacccctactgtgcaggcatccagggcattgtggatgcctaccgccaagccctgccccaagttcgcctctatggccctaccaactttgcacccatcatcaaccatgtggccaggtttgcagcccaggctgcacatcaggggactgcctcgcaatacttcatgctgttgctgctgactgatggtgctgtgacggatgtggaagccacacgtgaggctgtggtgcgtgcctcgaacctgcccatgtcagtgatcattgtgggtgtgggtggtgctgactttgaggccatggagcagctggacgctgatggtggacccctgcatacacgttctgggcaggctgctgcccgcgacattgtgcagtttgtaccctaccgccggttccagaatgcccctcgggaggcattggcacagaccgtgctcgcagaagtgcccacacaactggtctcatacttcagggcccagggttgggccccgctcaagccacttccaccctcagccaaggatcctgcacaggccccccaggcctaggttcccttggaggctgtggcaagtcctcaatcctgtgtcccagaggtccctctgggccacaacccaacccttctcactctcctcagtgctagcactttgtattttttgatacttttatacttgtttctgcttttgctgctcttgatcccacctttgctcctgacaaccctcattcaataaagaccagtgaagacc

SEQ ID NO: 9999 - DNA, 1400 bp, Homo sapiens
tgaccacctacggtttcccgtcaccaattttccttggaattggacagatggcagccaccataatgatactatatgtgtccaagctaaacaaaatcattcacttccctgattttgataagaaaattcctgtaaagctgtttcctctgcctctcctctacgttggaaaccacataagtggattatcaagcacaagtaaattaagcctaccgatgttcaccgtgctcaggaaattcaccattccacttaccttacttctggaaaccatcatacttgggaagcagtattcactcaacatcatcctcagtgtctttgccattattctcggggctttcatagcagctgggtctgaccttgcttttaacttagaaggctatatttttgtattcctgaatgatatcttcacagcagcaaatggagtttataccaaacagaaaatggacccaaaggagctagggaaatacggagtacttttctacaatgcctgcttcatgattatcccaactcttattattagtgtctccactggagacctgcaacaggctactgaattcaaccaatggaagaatgttgtgtttatcctacagtttcttctttcctgttttttggggtttctgctgatgtactccacggttctgtgcagctattacaattcagccctgacgacagcagtggttggagccatcaagaatgtatccgttgcctacattgggatattaatcggtggagactacattttctctttgttaaactttgtagggttaaatatttgcatggcagggggcttgagatattcctttttaacactgagcagccagttaaaacctaaacctgtgggtgaagaaaacatctgtttggatttgaagagctaaagagtctgcagcaggattggagactgacttgtgactgcgggctgggggggcattcccagtaggaatgtgaagccagaggtttcggattcgtgacatccaccccctgggcaagtgagagcatctgcaaaatgcaaagagaactacctcatatgcaggatgagccaatggcagtctcaagaaatgtactcgggcgacaccttacctgtggaaagcaaatcttttcaaaataagccactgggactcggtaggtggagccccagctgctcttctagggacctatggggccttcgtggcatctctgtgctgtgtgctggggaggaggttgatgtaatggtgactcttttctgatcagcaccttggccgtgattcccaaggtcccagccaaagcaaagggccagttgtttcagtttaaacagacatgtctttagtctaataaaattagttaactgccagtaaagttatttgttagctttgatgaaagctatgttggtatctttccctaatcatcaaagtaaataaaaaatcatttct

SEQ ID NO: 10000 - DNA, 1400 bp, Homo sapiens
cttctcggttcctggggaattggatccaactgggagaagaccacctgaattctcatcccatctaagttgaagatgctattttttaaaaatttaatttgtaattttaagttctgggatacatgtgcaggatgtgcaggtttgttacataggtaaatgtgtgccctggtggtttgctgcacctatcaacctatcacctaggtattaagccccacatgcattagctatttatcctgatgctccctctcccgcacccccctaacaggccccagtgtgtgttgttcccctccctgtgtccatgtattctcattgttcagctcccacttataagtgaaaacatgcagtgtttggttttctgttcctgtgttagtttgctgaggataatggcttctagctccatccatgtccctgcaatggacatgatctcgttccttttgatggctgcatagtattccgtggtgtgtatgtaccatgttttctttatccagtctatcatagatgggcatttgggttgattccatgtttttgctgttgtgaatagtgctgcagtgaacatacacatgcttgtatctttatttttaaaaatctttttttttgaagacagggtctggctctgttgcccaggcaggagtacagtggcattatctcagctcactgcaaccactgcctcccaggctcaagtgatctgccctcctcagcctcctaagtagctgagaccacagggacacaccattacacctggctaattgttgtattttagtagagatgggatctttctatgttgcctaggctggcctcaagtgatcctcctgccttggcctcccaaagtgctgtgattacaggtgtgaaccaccatgcccagccagagatgctcaattcctggtgagtgcagctgaggggctagggccctctctaccaagcccctacccattagatgcaggctctacctcaagtacagcaggccacaaatactggggtccccattacccttgccccagctcacttggaaggctgttccacactggggagagatgatctgacaagaccagaggctaccaccctgtccagcacccagacgagtggctcagagaggctgcccagggaggacgcagcctgtgcagtaaagaatttaatcttgcccaaaaagatgtctggtctttgccctaagcttcttggaatatcatgccaaagaggagtgtctttgtttgcctggggaccttgggttacattagatagtctaacaatgtgatttcagatgggggctggctacaccagaaagaccaacagggtggtttagggtgaaggctttgggtgatacctggggagtctggagacagagatcagccatgtgggcaatcagtgaagtttatgtaatgaagccctaataaaaactctgaacactg

SEQ ID NO: 10001 - DNA, 1400 bp, Homo sapiens
atcttggcctggaggacacgcctggggcagcgtgtctgtgctcagtgagggccgatgaagaaagtgcgttttctgttttcatttaattcagttttgtgttaagggtggaacaaagctctgttctagagggaaagttaggaataggcctcccagaggatactccagacagttgacaagcatcgcagcccctgtcaggtcaaggaattttaacctgggagactcctgaaaatcagcctaatgtctgggggcagctggcgctgaggctgtgcagatgtgtatggccttgggtcacagctccctactggggctgcagcctttagaccctgggtctgggatccacgtctagggaccactctggcttctgtgcatccacccaggcccccgacccatcactgccacattctccgggtcatggccgagcttgacctctgcatccatggtgacggaggtggcaatgacatcatcaaggtcagagggtaaattcctaacaggagaccacaaaggtttcacttcttttagatccatccaatatgcgaaaaaagggtacattttaatttaatgtgttaaaaacacaatgtccctaccgtgtaaatagaatccaagtcaattgtgactgcaattccaagttagtatttaaaaatagagaaattgcacttcctggaaaaaattaaaaagtagttagtttaattattctgtaaattatttaattttgtcaagatgtaagtatttatattcacagcctcttatgttaacgtttgctatttatttaacatttttatttattaattttatactatttcaactagaccccacaccagggcaccctaagaggggaaaaaagtgaattcaaagcaaaaataactatttgactataatataggccacaaaaaatcttgatataactcctagttataattttgatgcaaccaagttattttttatatattttgttatttattcttttaataatggaatttttttaaaaagtattttgtaactgaggaattttgataatttggggattttgttttcccttggtctaatggagagaaagacattttggttttctttttccattttgggttccttttgtttcaggcacggataacagcaaatggaattctgtatttattattatttaagtgtagcgcagatgtgtgtgcttgggcgtgtttctcgtgtcgcgtttgcgtgtcggctcttgcggtggagtcctgttgctgtgagggagtgctggccgcaggcagcctcgagtcaccgccaggctcacaggctgtgccacccgtccctccgacagctccaatactgtgaccctccttcctcaggaagcgcgttgaacccacagcactccgtggtgtgtttgcagggtgatttcctaataaaagtccactctgactgtg

SEQ ID NO: 10002 - DNA, 600 bp, Homo sapiens
ccaatatccgccttccgcacatggagccaatatgcgaacagaatttcgatgcctatgtgagcaccctcaccgacatgtactccaaccaggacccggagaacaaggacctcctggagagcatcaagcaggctgtgaggggcatccaggtctaggccgtgtggtacccagaagtgtcccagcccaccacaccgtttacctccctcgccctgccccgcaccgtggggatgcccaactcacagtgacttcccgtttggggcccggtgtggccgcgggcgggtttatccaaagggatggctggaaattggccgctcccacgaggctccctccaggcttggggccgtggtggccctatctgtgtgcataggggcactgaagaattacaaagtgatttatttttgttttctgaaagaaatctgaagagcagctcaaagtctccagtggaagctcatggacaaggttctcagggaagttttggagtttgcaaccacagtattcctttgtctgtcgaggctgggagggtagccgtgagcgtggtgggtgggtggtgtgagtggcatcttggcctggaggacacgcctggggcagcgtgtctgtgctcag

SEQ ID NO: 10003 - DNA, 600 bp, Homo sapiens
gagcccccactggtgctggatggctcgcagcgccgctgcgtctccaacgagagccagagcctcgatgacaatctgggagtgtgctggcaggaagtgggggctgacctcgtgtgcagccaccctcggctggaccgtcaggccacctacacagagtgctgctgcctgtatggagaggcctggggcatggactgcgccctctgccctgcgcaggactcagatgacttcgaggccctgtgcaatgtgctacgcccccccgcatatagccccccgcgaccaggtggctttggactcccctacgagtacggcccagacttaggtccaccttaccagggcctcccatatgggcctgagttgtacccaccacctgcgctaccctacgacccctacccaccgccacctgggcccttcgcccgccgggaggctccttatggggcaccccgcttcgacatgccagactttgaggacgatggtggcccctatggcgaatctgaggctcctgcgccacctggcccgggcacccgctggccctatcggtcccgggacacccgccgctccttcccagagcccgaggagcctcctgaaggtggaagctatgctggt

SEQ ID NO: 10004 - DNA, 1246 bp, Homo sapiens; identical to SEQ ID NO: 4769

SEQ ID NO: 10005 - DNA, 1400 bp, Homo sapiens
tggaactgtcaactcaggcgagaatggaactgcagcagttaatttctgtgtggattcaagctcaaagcaagaaaacaaaaagcatcgctgaagaactggaactcagtattttgaaaatcagtcacagtcttaatgaacttaagaaagaacttcatagtacagcgacacagctggcagcagatctattaaaataccatgctgatcatgtggttctaaaagcattaaaacttactggagtagaaggaaatttagaagctttggctgaatatgcctgtaaactctctgaacagaaagagcagcttgttgagacctgtcgattgttacgacacatatctgggacagaacctctggaaataacctgtatacatgcagaggagacatttcaggtgactggccaacagataatttctgctgctgaaacattgacattgcatccatctagtaaaattgctaaagaaaacctagatgtattttgtgaagcttgggaatcccaaattagtgacatgtcaacactgctgagagaaatcaatgacgtgtttgaaggaagacgaggagagaagtatggctacctttcacttccaaagccaatgaagaataatgcaaacctgaaatcattaaagccagacaagcctgactctgaggagcaagccaagatagcaaagcttggacttaagctgggtttgctcacctctgacgctgactgcgaaattgagaagtgggaagatcaggagaatgagattgttcaatatggacggaacatgtccagtatggcctattctctgtatttatttactagaggagaggggccactgaaaacttcccaggatttaattcatcaactagaggtttttgctgcagagggtttaaagcttacttccagtgttcaagctttttcaaaacagctgaaagacgatgacaagcttatgcttctcctggaaataaacaagctaattcctctatgccaccagctccagacagtaactaagacttctttgcagaataaagtatttctaaaggttgacaagtgtattacgaagacaagatccatgatggctctcttagtccaacttctttcactttgttataaactgctgaagaaggtgaaaccagatactaattgtcttaactctttccagcttcagatggaaaataacggatgggtctcagttacaaataaggacactatggatagtaaaacttgagaagcttttggggtcagatctctggaacatcatgtgatgaagctgacatttttaaaaatcaaatgatcctttatcttttcagaaattcatcaattttataaagaaaacaatattgaaattttgctctattttctgatcatgaaactgattgtaaagctttttgacaactaataaatgtcttggtaattgctagattct

SEQ ID NO: 10006 - DNA, 1400 bp, Homo sapiens
gcacattgatgcggccatggttttggaagagtgtgcccaggattatgaagaagctgtgctcttgctgttagaaggagctgcctgggaagaagctttgaggctggtatacaaatataacagactggatattatagaaaccaacgtaaagccttccattttagaagcccagaaaaattatatggcatttctggactctcagacagccacattcagtcgccacaagaaacgtttattggtagttcgagagctcaaggagcaagcccagcaggcaggtctggatgatgaggtaccccacgggcaagagtcagacctcttctctgaaactagcagtgtcgtgagtggcagtgagatgagtggcaaatactcccatagtaactccaggatatcagcgagatcatccaagaatcgccgaaaagcggagcggaagaagcacagcctcaaagaaggcagtccgctggaggacctggccctcctggaggcactgagtgaagtggtgcagaacactgaaaacctgaaagatgaagtataccatattttaaaggtactctttctctttgagtttgatgaacaaggaagggaattacagaaggcctttgaagatacgctgcagttgatggaaaggtcacttccagaaatttggactcttacttaccagcagaattcagctaccccgacatggggagagggagtcttgctgtgttgcccaagctggtcttgaactcctggcctcaagtgatcctcctgccttggcctcccaaagtgctgagattacaggtgttctaggtcccaattctactgcaaatagtatcatggcatcttatcagcaacagaagacttcggttcctgttcttgatgctgagctttttataccaccaaagatcaacagaagaacccagtggaagctgagcctgctagactgagtgactgcagttaggagggatccgacagagaagaccatttccactcattcctgttgtcctaccaccccttgctctttgagggctggctattgagaactggaaagagtaaaatgataacttaccttagcattgccaagaacttcagcagacaacaagcaattctatttattttatgttgtgtatacatcttgatcattagcaagacattaagctttaaccattatggcaccattttgtgagaatgattgttctttcacttgggctgtttgagagcataattatggtaatcatgagattaatgtttcatgatttctacctccaaagtgtgaagacaagtaaaacaatgtttctaaattgtcttattttgttggcggagaagattacaatggctattagtgctacatttggtcaaatgtaatcacttaaatagcttcttgtcaccttaaactaaagcagaataaaaagtatcctttgaaatta

SEQ ID NO: 10007 - DNA, 600 bp, Homo sapiens
gctaattttgtgtttttagtagagatggggtttctccatgttggtcaggctcgtctcgaactcccaacctcaggtgatccacccgcctcagcctcccgaagtgctgggattacaggtgtgagccactgcgcccggcctcccaaagtgctgggattacaggcgtgagccaccacacccagcctaagtgttgtttctgcaccatggtatacccaggtcatttcctcaccccaatggtagcatgtgtccagatgttggctacagtccccggtgtctgcaggcatttctgtgaaactgcccaagaatgagtatatatcctgcatgctgccagtgccttcagtagagttacgtggctcacactgagtgtctgcccaggtccttcaccttcttactcgtagtcgacggtagtggtttggaaacctgccgtcgtgtgtgggcagaagtgttggggttttgattgtgggtagatcaaggatgttttcatatgctgttgttcacgccttccctggatttctaacaggttttgctttatattttactttacatttttggtgttgatgggtttcttcgggaatattaattaaaaatagactttaaaatgtc

SEQ ID NO: 10008 - DNA, 1206 bp, Homo sapiens; identical to SEQ ID NO: 4773

SEQ ID NO: 10009 - DNA, 1186 bp, Homo sapiens; identical to SEQ ID NO: 4774

SEQ ID NO: 10010 - DNA, 1400 bp, Homo sapiens
ggccgtgtaccctcaggtccagtgcttggtcctgctctggtcactggggcttcccaggaggcagcagggtctggtcataatccagtgtgaagatgaggtgaggaaggaaggggttgctgtccagtgttggcctggtcgctttgattcttcctgcacagctcagcccaccccatctgtactggaagggaccctggagccctgggaccaccccctttcaagtcccaaacactgagtcctctgtcatgtgtccttgtccctaggctacaatgctacacttggctcaggctgatcaccatgctagtcacaggagggagagagaggcagtgtacttgcccccatctcctggagggaggtgcgttggaaattctaggcccttcagcagagacccatttgtgcccagaccacaatatttcttcttcctcagggactacatgccacagacctgtatccccagtggcaactcctgttagctcccaaacttaaacagtgatctcttctaaatatacaaggcatctacccagccccaatagtgaataaaagtcacaaatttaagttcaacaccctaagcaatttctcaaagccagtctacctgactaggtctatccacgcacggttcccaacccaagggggaattaggggattagattaagagtaggtaaagacccttttgttctttcctgttgtaggggaggaagctgttctccccacacccaggtgcctttggaggttaaggctaggttagccctgcactccacctggggacggccctcatcacctgaagtcctctgctgtgttgactggacccgcagttcccacactgctaagtactatgaaagctgctctggcctcgtcttctagcttgtgcctagttgaaagtctcacctttacaggatcatttgtaatgctggtgtacatgcagggaactcacaagctgtgtcaggtatgcaggacaaggaatgtctgctctgggggcacaggccaactatatggagggagggtcccaaattagcaaacccttcatttaaagcaaacccttgtcaagcctaccagagcagctgatacgtgtgcataacagtgaggcattgtgtcctggatcgtctgggagcccagtgtcaagtctgctggaatgcaggaagtagaacagaatcgccacaggactgttctggggccagcttcccttaactctgtagcctggcagtctgacccaaagttgccctcacccaaaggttctggctcttccctccctcacttttactttcccttcccccataagttggaggataaaatgggtatcaatgctaatatttccagggagaacatgaaaccagaggtttctttctttctctgtaatctgctatgaaagaaaataacaaatgaaaataaatgtgtactacactttg

SEQ ID NO: 10011 - DNA, 1400 bp, Homo sapiens
ccctcaggtccagtgcttggtcctgctctggtcactggggcttcccaggaggcagcagggtctggtcataatccagtgtgaagatgaggtgaggaaggaaggggttgctgtccagtgttggcctggtcgctttgattcttcctgcacagctcagcccaccccatctgtactggaagggaccctggagccctgggaccaccccctttcaagtcccaaacactgagtcctctgtcatgtgtccttgtccctaggctacaatgctacacttggctcaggctgatcaccatgctagtcacaggagggagagagaggcagtgtacttgcccccatctcctggagggaggtgcgttggaaattctaggcccttcagcagagacccatttgtgcccagaccacaatatttcttcttcctcagggactacatgccacagacctgtatccccagtggcaactcctgttagctcccaaacttaaacagtgatctcttctaaatatacaaggcatctacccagccccaatagtgaataaaagtcacaaatttaagttcaacaccctaagcaatttctcaaagccagtctacctgactaggtctatccacgcacggttcccaacccaagggggaattaggggattagattaagagtaggtaaagacccttttgttctttcctgttgtaggggaggaagctgttctccccacacccaggtgcctttggaggttaaggctaggttagccctgcactccacctggggacggccctcatcacctgaagtcctctgctgtgttgactggacccgcagttcccacactgctaagtactatgaaagctgctctggcctcgtcttctagcttgtgcctagttgaaagtctcacctttacaggatcatttgtaatgctggtgtacatgcagggaactcacaagctgtgtcaggtatgcaggacaaggaatgtctgctctgggggcacaggccaactatatggagggagggtcccaaattagcaaacccttcatttaaagcaaacccttgtcaagcctaccagagcagctgatacgtgtgcataacagtgaggcattgtgtcctggatcgtctgggagcccagtgtcaagtctgctggaatgcaggaagtagaacagaatcgccacaggactgttctggggccagcttcccttaactctgtagcctggcagtctgacccaaagttgccctcacccaaaggttctggctcttccctccctcacttttactttcccttcccccataagttggaggataaaatgggtatcaatgctaatatttccagggagaacatgaaaccagaggtttctttctttctctgtaatctgctatgaaagaaaataacaaatgaaaataaatgtgtactacactttgaaatatttt

SEQ ID NO: 10012 - DNA, 1400 bp, Homo sapiens
gcattgagcagtatgggcacatgccctgtggacagttactggacgttaatgaactcagaggagaaaagcagtgagccacttgttctgtgtgatttatggtacttcattgctcttccttcacctctagtcactttctattgctacctgccctacattggctcctgccaaggtccctctctctccctgttttccttttttttttttttttttttttttttgagacggaggacggagtcttgctctgtcgcccaggttggagtgcagtggcgcgatctcggctcactgcaacctccacctcccgggttcaagcgattctcctgcctcagcctcccgagtagctgggactacaggcgcgcgccgccacgcccggctaatttttatatttttagtagagacggggtttcaccatgctggccaggctggtctcgaaccccgatctcgtgatccgccctccttagcctcccaatcctctcttaaaaaagtgatagctcagaaacatttgtaaaagcaaggtttttatttcattttggctctgtcattttcagaggcaaagaagttggcctgtaaaatagagtgctagagctcttacgcccctccccttcttcccaacttcctacttcctagcccttttatcaactcctagaatagttaaagagagacacatctagatgggatgaaaggtgccctaagcaggagaaactgaacaaaaggctagaggcatgggccaggtaaaaattgggcctagagtgaagactgtgctgtcgttaagagctttcgaggaaggagtacttactccccaatgatgatgaatggaaaaatacttttcagggagaattgaaggggttaaagtgttaaatatgttgcctagacaagggttctttaaagaaagacagcgcaactttgaatgctttcttacttgttttgtgacctaatttatgtggaagattgttatttcattaggatttagtaaaatttttttttctgattctaaacttattgtgaaaattgagctgtacagatattcttttgatttcaattgggaacatttggaagaacaacagtcttacttgcctgtacaatatagagacatatgaatagtcataacagttttcaacttgttcttgtttctgttaaactatattcctagaaacatagtttgaacaacttggtctttgttaggcttgtcaaattgccttcatggaaaaataatctacaaaagtatggtttaattgattgtcttacatgataattttccctggtaacaacttagtaagtgatatatcttttttcctaaattgcttaaatactgtgaaattgctctgacaaattggaagtgtaccattggcatatttgtcttcctttttatgcatgatggtaaaataaaagcatgttgttctgct

SEQ ID NO: 10013 - DNA, 600 bp, Homo sapiens
ggcctcccaaaatgctgggattacaggggtgagccaccgtgcccaacctcacttgcttcttatccttacactcccccagccccagagaaactgccacatacaccacaaaaaccaaacatcccccaatgaccttagccccattgctccattcactcccaggtgagaattcaggcaaacgtccacaaaggtcacaggcagcgtacatacggttctgttataccccatatattaccccttcatgtcctaaagaagacattttctcttagagattttcattttagtgtatctttaaaaaaaaatcttgtgttaacttgcctccatctttttcttgggtgaggacacccaggaatgacccttttgtgtctatgatgttgctgttcacagcttttcttgataggcctagtacaatcttgggaacagggttactgtatactgaaggtctgacagtagctcttagactcgcctatcttaggtagtcatgctgtgcattttttttttcattggtgtactgtgtttgatttgtctcatatatttggagtttttctgaaaaatggagcagtaatgcagcatcaacctattaaaatacattttaagcctttt

SEQ ID NO: 10014 - DNA, 600 bp, Homo sapiens
cgaaagcaactggagctcaggcaggaggaagagcgcaggcgccgtgaagaagagatgcggcggcagcaagaagaaatgatgcggcgacagcaggaaggattcaagggaaccttccctgatgcgagagagcaggagattcggatgggtcagatggctatgggaggtgctatgggcataaacaacagaggtgccatgccccctgctcctgtgccagctggtaccccagctcctccaggacctgccactatgatgccggatggaactttgggattgaccccaccaacaactgaacgctttggtcaggctgctacaatggaaggaattggggcaattggtggaactcctcctgcattcaaccgtgcagctcctggagctgaatttgccccaaacaaacgtcgccgatactaataagttgcagtgtctagtttctcaaaacccttaaaagaaggaccctttttggactagccagaattctaccctggaaaagtgttagggattccttccaatagttagatctaccctgcctgtactactctagggagtatgctggaggcagagggcaagggaggggtggtattaaacaagtcaattctgtgtggt

SEQ ID NO: 10015 - DNA, 600 bp, Homo sapiens
actaggctgagcaatgacagaaccagctgcaccatgtaccccaccttcagtttaaaagaaaaaaaaaatccccttcactcctactgggaggtgggacccctttcattttcagttttgctcatctagggaaaataaggctttggtttccagtttaattgtttttgaccttctaaaatgtttttatgttagcactgatagttggcattactgttgttaagcactgtgttccagaccgtgtctgacttagtgtaacctaggagattttatagttttattttaatgaaaccctgattgacgcacagcagtggggagaacagcgtcttttacctgtcaccgaagccaggaagccccgtttgtaagcgtgtgttgtggtgctttattgtacatcctccagtggcgttctttttactctaatgttcttttggtttcccccctcagaagaatcatgaatttgcaacagacctaatttttggttactttttgtcttattgatggatttgaaaatgaaagatttaataaggcaaagcagaatctgttgtccttaattatatttgcaatttggaatttgtgtgagttgatttagtaaaatgttaaaccgtt

SEQ ID NO: 10016 - DNA, 600 bp, Homo sapiens
gtgaaacaaaattgatgttgtttaactagaagttatgagtatcttaactgcctttattccttttcaaaaaggaaaaagctgtagaacattttgtagatgaaactactgtttaagattaatgaattaatattgtgaatgaaaatcaaaatccatactttaaaggtaatcatgttactaacaacctatttttgaattcataaaaatttctttataaatgatgttttgtgaacatagtaaaatagaccattatactatgtgtatgtttgatacagcgtcgccaaaactagtgttctttattagtgcctctcacaaaagatcctggatggaggagtaagatgaaatattatgctattatatgatgctgtttgtaaaggtattaatgtactagtaaggtgttaatgacaaggaattagtactattcctgttgtaaagttagattttgcatattgtatctatcaaaatatgtttgggtttagattttaagttgtctactgagcagatttctgcattggttttccagtcctgttaaaagtttagaaacttcatatgtgtcatcacagcttttgtaaagaaagtatccttaatattttatgacattct

SEQ ID NO: 10017 - DNA, 600 bp, Homo sapiens
aatccacacatcagtaatgtattctatctctctttacattttggtctctatactacattattaatgggttttgtgtactgtaaagaatttagctgtatcaaactagtgcatgaatagattctctcctgattatttatcacatagccccttagccagttgtatattattcttgtggtttgtgacccaattaagtcctactttacatatgctttaagaatcgatgggggatgcttcatgtgaacgtgggagttcagctgcttctcttgcctaagtattcctttcctgatcactatgcattttaaagttaaacatttttaagtatttcagatgctttagagagattttttttccatgactgcattttactgtacagattgctgcttctgctatatttgtgatataggaattaagaggatacacacgtttgtttcttcgtgcctgttttatgtgcacacattaggcattgagacttcaagcttttctttttttgtccacgtatctttgggtctttgataaagaaaagaatccctgttcattgtaagcacttttacggggcgggtggggaggggtgctctgctggtcttcaattaccaagaattc

SEQ ID NO: 10018 - DNA, 600 bp, Homo sapiens
catgtgcgcatggtggatcccaagaaagccgctcagatccggtcccaggttatgacacacctccgtgtgatttatgagcgcatgaatcagtctctctccctgctctacaacgtgcctgcagtggccgaggagattcaggatgaagttggtgcagtggctcatgcctgtaattccagcattttgggaggccaaggtgggcagatgacttgagcccagaagttcaagaccagaatgggaaacatggcaagaccacatttctacaaaaaaattatccaggcatgataacatctatttgtagtcccagctactcaggaggctgtggtgggaggatctcctgagcctggggtggctgaggctgcagtgagccttgatcacgccacctgggcaatagagcaagaccctgtctcaaaaaaaggaagaaaaagactattatttcccccattgaatggtcttggcactattacacaaaatcaattgtccatagataatatgggtttatttcttaattcttagttcttttctttgatctgtgtgcctgtgcttactgtagtaccacactgttttgattattgtagctttgtagtaaattttgaaatcagc

SEQ ID NO: 10019 - DNA, 600 bp, Homo sapiens
gaagaaagtgacaatgtggattctgctgatgcggaggaggatgactcggatgtctggtggggcggagcagacacagactatgcagatgggagtgaagacaaagtagtagaagtagcagaggaggaagaagtggctgaggtggaagaagaagaagccgatgatgacgaggacgatgaggatggtgatgaggtagaggaagaggctgaggaaccctacgaagaagccacagagagaaccaccagcattgccaccaccaccaccaccaccacagagtctgtggaagaggtggttcgagagaagtggtataaggaagtacattctggccaggcacgatggctcatgctgtaatcccagcactttgggaggccgaggtgggtgcatcacctgaggtcaggagtttgagaccagcctggccaacatggtgaaacccctcgctactaaaaatacaaaaattagccgggcgtggtggcacacacctgtggtcccagctactcgggaggctgaagcaggagaatcgcttgaacccgggagacggaggttgcagtaagccgagttcactccattgtactctagcctgggtgacagagcgagattcgtctc

SEQ ID NO: 10020 - DNA, 600 bp, Homo sapiens
tgtttttatgaggttttgccaagcaagaactcttgattactaagaggcagttagagacaaaccaatttaattccatgtcttcaattgtcacgcatttcttcttttactctttgaaactattctttgagtcaattttatggttctcagaagccaaaatacacaacttttagcacataaacaccaacgatggcctctttttgaggagttatgcatagacccactctagagtaatgatggtccctgtggtatatactttctcctactctagcaaacatgtagtttaatcttaatgtgttgtttccataagtgacatgaagtggatagattctcaattgttatgtccacttattcactaggtaaattttcagttttaatacttttctccttaccccttcctttgatcatttcatgtgaatattctatttgtatgatacactgtatttcaataaattccttgttgatgtacccttaaattgaagaaatttaagctgcaaaaccaaatctcattgtataagacttttttgaagtatcttgtatcgactacatatgtatttgaccctgtgggaggatggtacttttctttttaacttttattttaag

SEQ ID NO: 10021 - DNA, 1400 bp, Homo sapiens
ataatgtcttaattttgtaccaattcaggtagaagtagaggcctaccttgaattaagggttatactcagtttttaacacattgttgaagaaaaggtaccagctttggaacgagatgctatactaataagcaagtgtaaaaaaaaaaaaaaaagaggaagaaaatcttaagtgattgatgctgttttcttttaaaaaaaaaaaaaaaaattcattttctttgggttagagctagagagaaggccccaagcttctatggtttcttctaattcttattgcttaaagtatgagtatgtcacttacccgtgcttctgtttactgtgtaattaaaatgggtagtactgtttacctaactacctcatggatgtgttaaggcatattgagttaaatctcatataatgtttctcaatcttgttaaaagctcaaaattttgggcctatttgtaatgccagtgtgacactaagcattttgttcacaccacgctttgataactaaactggaaaacaaaggtgttaagtacctctgttctggatctgggcagtcagcactctttttagatctttgtgtggctcctatttttatagaagtggagggatgcactatttcacaaggtccaagatttgttttcagatatttttgatgactgtattgtaaatactacagggatagcactatagtattgtagtcatgagacttaaagtggaaataagactatttttgacaaaagatgccattaaatttcagactgtagagccacatttacaatacctcaggctaattactgttaattttggggttgaacttttttttgacagtgagggtggattattggattgtcattagaggaaggtctagatttcctgctcttaataaaattacattgaattgatttttagaggtaatgaaaacttcctttctgagaagttagtgttaaggtcttggaatgtgaacacattgtttgtagtgctatccattcctctcctgagattttaacttactactggaaatccttaaccaattataatagctttttttctttattttcaaaatgatttcctttgctttgattagacactatgtgctttttttttttaaccatagttcatcgaaatgcagctttttctgaacttcaaagatagaatcccatttttaatgaactgaagtagcaaaatcatctttttcattctttaggaaatagctattgccaaagtgaaggtgtagataatacctagtcttgttacataaaggggatgtggtttgcagaagaattttctttataaaattgaagttttaagggacgtcagtgtttatgccatttttccagttccaaaatgattccattccattctagaaatttgaagtatgtaacctgaaatccttaataaaatttggatttaatttt

SEQ ID NO: 10022 - DNA, 1400 bp, Homo sapiens
tgttttaaattaagaactttttgaactaaaaccagaaactctgccatagttcattgatttttacatgaaacatttatttacaagatgatatcaagattacttttcacaaaataggcacattatatcaacactttgctctgctttgtaaatttgccatccaggattttggggtggtattcatgtgaaattaaagcagattctctagcagtttcctatagctacagtttttttttttcattgcttctaattggatatagttactatgagtccatgaaatacaatggaaatgtgaataaagaatttactacattgaagattttaaacatttggtattaaaaaaaaatcctttgtgaatgtgatagaaaactagtagtgtggagcagtgtaaatatttgaggtggtgatttgtgaagtagcccagtattgccttaaataaaatcacatttcatttcttgttttatacatgtgatcttataaagattttttgttttgttttgttttccattttctgagatttatagattggtgtatagctttaaactgtataaagttttgtggaaagatttttttaaacatttttataaatcttaaaattgatatcatcaaagtgagcccatcttgtgtttataaaatacaagagtccttaacatttataattacatagataaaacactttctataaggaagttggatgttttgattttactgtttatagatgttagattgtacagatttgtctgtatttctcaccatatctaatgatacttttttcattagattggtcttcaagaacagtattagttataattattttggttattcagtatatagttagctcttacagtttagctttattcaccatatttatactgtggattcacagcgagaggtagaggttattccaggagagttgatgaccttcatttaaagtccaactaaaatcagtagtagaaacataagaaaacatctttgcaatatttacttttgtttctgtttgccgtaaatagtaacattgtttttttttattttgtgtttgttataaaacagttgcattcacaatattattggcctgagatattgatgatattgtgatggtatgaaaatgtgtacattccctgtgcaacatcagatttgcaggaaaaatgaagcacttactgaaatcgctggtactctgaataaataagcatggtcaaggagtgaactattttcttttggaaatttctttttaatttttattattaaagtattttatttttagggccttttgggttttattgaatagttcatttcacctgtttaagacttactaccaataagcataaaacctgacacgttaaaatccctgccctttggtgagcccactgttatttattaaaataaaagttattttatgggtgatt

SEQ ID NO: 10023 - DNA, 1400 bp, Homo sapiens
aaagtaaatctggtggctctggaaacaatgcacaaaatgattcctctacttagagaccacttatctcctataatcaacatgctaattccagcaatagtggataacaatctgaattccaagaatccaggcatctatgcggctgctacaaatgttgttcaggcactgagtcagcatgtagacaattacttacttctacagccattttgcacaaaagctcagtttttaaatggaaaagcaaaacaggacatgacggaaaagcttgctgatattgttacggaactttatcaaaggaagccgcatgccacagagcagaaagtgttggttgttttatggcatctcttaggaaatatgacaaatagtggctctctgcctggagctggaggaaatatacgaacagccacagctaaattatcaaaagcactctttgcacagatgggtcagaatctgttaaatcaggctgcatctcaaccaccacatatcaaaaagagtttggaggaattactcgatatgacaattttaaatgaattatgaatcttcgataaaatactgtatgatgaacaaaagtgtttacatgatgacaaatggaactttctaaaagttatgttatcagtgcctgcacttcacatccagcaaattaagtcaatggctatttttatttgcagcctatgagtacacatctgtcctatatcaaccttaccacttatattcatcacataaaaacctaaaatattcatgaataattcatgaaatctgagtcacatgggatgaattcaattttaatatttttgagaaaagtcctgctcatttgcactattctatagaaactacaatttgttgccctatatgtaaaattagaattgtaattaaaaatacacattttattatgtaatcatgttctggtatgtctcatttctcagccttattttataacgtggaagtcattgaactatgttatcagaaactaagtttgtatattatttgtgaaaaacatgtatttctgaatcagtccgctaatatgattgtgcagtattagcttgcttttgctgctgtgttaatgtcatatatttgcttaccttttgggttcaattatctacataattgtgaaatttaacaagttataataaagcatgacaaccaaagttttagaaaacattaaacattttaaatgcacgtttaaaaaacgtgttgaatgtaacccccctatttttgtgtgcaaacactaaattttattgctttatgttttgacctttataaaggtgttattctgctgcccagttttgtaattctcaaaaatagtgccaggtcttctatagcttttttcagaattcatgggcttacaagtactgtatgcatctttaaaaagaaaaggaatgttataaaataaaaggatttatttcttt

SEQ ID NO: 10024 - DNA, 1400 bp, Homo sapiens
gaaaaagagtttattttccatcttgtttgttttcctaccttatgctgagtagtccagagagttaaaaaaattctctgcatgttggtcttttaagtctgttttgctctaatcctccattaagcgagcatacctcaagtgggtctattagcatttaatgaccttttgtgccagttgtgccatcccttaagatgaaaagttccttttcttgtgttaatgtacaaagcttttcttttggcactgacaactgtgttctacctgggaattttgaatagccattttcatggctgtgtgttgtgtaacacaaatgtttttaaatggtattctcacccagtaggccagctctccaaacgttgcttagatgcttcaaaattagcatattttaagtttaccagtataaaataccaatgcaactactctacatagccaaatgtttgtaaatcacgtcttattttcctgaggtttttcactccaccaaatcttacaaatcattgaaagaaatatattctaacagtacgcactgaatagtgaaaataattagacattttaagaaccagagccatagaattattttaaattagtagaaaagaggagctatttccgaatctatagaataaagtaccacctaaaactgaattttatcatataagcaagtaatacctattagtcatacctaaatttttcagcacttcattcaattaaaatacatgaattttaaatattttacatgatgtgaataggcatgataatacttttagtataaaatctaaactttttccatttatcagaaatgataaaatccagttaccacatatcacgtttataaaatccttaattaaatgagtaacttctaaaatataacaatactaaatatcacactgcgatggaggtcccaaatatgtggtctatcaccactgaattcatgtaatagataagaaaaaaattagaggtggatgtcttgttttgtgtcatgaattactaaaatctcttagtagttgtggtatatttttgagtaaaattaccatttccagatttgagtttgaagggcttttatagttgtattttcctcctcactgttaataatcataatcctttttcagtattttagtggccttgaacaactggtttatctacaatctcaaatcctaagtgtataattatgtgcaatgttcaatacctcatataatacttgctcaacagtatagtggtaccaatggcattaagatggtgtttttgttctacatatttttcaataatttattctttctaatgttgaaattatatcaggctttaccggtttttttagttgtttaaataagtaatattttcaaaagaataaaataaccaatgatatctcttggaataatctgtaaaacgtagttataaaattctattttctactt

SEQ ID NO: 10025 - DNA, 737 bp, Homo sapiens; identical to SEQ ID NO: 4790

SEQ ID NO: 10026 - DNA, 1270 bp, Homo sapiens; identical to SEQ ID NO: 4791

SEQ ID NO: 10027 - DNA, 600 bp, Homo sapiens
atgatggagccagctcagacgggcacctggcacacatcttcagacatgcggccaaggagctgttcaacgaggatgtggaggaggtcacttaccgagccctgagaaacaaagacttccaagaggtcacccttgagaagaacggagaggtggtgttacgctttgctgcagcctatggctttcgaaacatccagaacatgatcctgaagcttaagaagggcaagttcccattccactttgtggaggtcctcgcctgtgctggaggatgcttaaatggcagaggcaagcccagactccagacggacatgcggataaggccctgctgcggcagatggaaggcatttacgctgacatccctgtgcggcgtccggagtccagtgcacacgtgcaggagctgtaccaggagtggctggaggggatcaactcccccaaggcccgagaggtgctgcataccacgtaccagagccaggagcgtggcacacacagcctggacatcaagtggtgaagtcaggccagggccttccagctgctcttggggccagagccaagagcctctcagtagagggaggggctgccctgagtggagtattaaagacacttaag

SEQ ID NO: 10028 - DNA, 1400 bp, Homo sapiens
tagaagtggacgtgcattccccacccttttcccgtccctcgtttgggttgttccttgaggggcaaagtgcctgttgggctttctgtgaacctcacctaacctgtgttttttcactcccctgcagttaccggtattgtaagaacaagccgtacccaaagtctcgcttctgccgaggtgtccctgatgccaagattcgcatttttgacctggggcggaaaaaggcaaaagtggatgagtttccgctttgtggccacatggtgtcagatgaatatgagcagctgtcctctgaagccctggaggctgcccgaatttgtgccaataagtacatggtaaaaagttgtggcaaagatggcttccatatccgggtgcggctccaccccttccacgtcatccgcatcaacaagatgttgtcctgtgctggggctgacaggtgagcttggtctgggccttttaaggcagttggagtctctacattattaggcttgcattattttatcagagcatagaggtggccccagtgactcagccactatggctactagaaaagccaggctggcaagtgactttcagtggtcactcaggaccccttcctgcagatacaaacaaagcatgagtaagtcttagcaagctcttccccacaggttaggggaaacactggtgatgggagtagctcttcttgcttttagctgaatgacaaccatcttgccagcaggtagctgaagctggcagaggagcccagtggcgccttttcagtggttcttgggatctccgcagccaattaagccgactgagttcctttcctcatggggacccagtgtgcgatggctgcacacagcagcttccttggtagtgtacgcagcctgttggttgtatgggttgctctaagggaccttggagacaggcctttcaggtggatgttcatgtttctgaccttgcactaccccaatgtaggctccaaacaggcatgcgaggtgcctttggaaagccccagggcactgtggccagggttcacattggccaagttatcatgtccatccgcaccaagctgcagaacaaggagcatgtgattgaggccctgcgcagggccaagttcaagtttcctggccgccagaaggtatgtagtgctgcagcccccttctcccacctttgccccaggcctcctgactcagttctttccattgctccttagatccacatctcaaagaagtggggcttcaccaagttcaatgctgatgaatttgaagacatggtggctgaaaagcggctcatcccagatggctgtggggtcaagtacatccccagtcgtggccctctggacaagtggcgggccctgcactcatgagggcttccaatgtgctgcccccctcttaatactcaccaataaattctacttcctgtcc

SEQ ID NO: 10029 - DNA, 1400 bp, Homo sapiens
cagaaaattgtggaggttttgttggtgtgcaatggaggaacatggctcaagaaactaatcacagccaagtacctatgctttgttccactggctgcggattttatggaaaccctcgtacaaatggcacgtgttcagtatgctataaagaacatcttcaaagactgaatagtagtaatggtagaataagccaacctgcaacctctgaatctttaccagttcaatgcacagatggcagtgtcccagaagcccagtcaacattagactctacatcttcatctatgcagccaagccctgtatcaaatcagtcacttttatcagaatctgtagcatcttctcaattggacagtacatctgtggacaagcagtacctgaaacagaagatctgcaggcttcagtatcagacatggcacagcagccatctgaagagcaaagcaagtctcttgaaaaaccaaaacaaaaaaagaatctctgtttcatgtgcaggaagaaagtgggacttactaggtttgaatgcggtgtagaaatgtttactgtggtgtacactgttactcagatctacacaattgctcttaaaattacaaagctgatgccgctgagaaaatcagaaaagaaaatccagtagttgttggcgagaagatccaaaagatttgaactcctgctggaatacaaaattcttgatcatctgcaaactaaaaattgacttgaggtttttttttccctagtcattgggaaagtagagcagtgtatcttgcatgtcatcggatgaatagatttttgttttgattttgttttgaaaatgactctgaacatttatttccattgcaatttctgtggctgagaagacttaaactttacaagtattatccttataagatcattttaattttagttgagtgcagagggcttttataacaaacgtgcagaaattttggtggactgtgatttttccagtattaaatatgcatgcattaatcttgcagtttattttctcattgtgtacatatatattgcttttctttgcagcacgatttctcttttgataatgccctttggggcacaactagttatcggtaactgaatgtatcttaatcattatggctgcttctgttttttcattaacaaaggttattcatatgttagcatatagtttctttgcacccactatttatgtctgaatcatttgtcacgagagtgtgtgctgatgagattctaagtttgtgtgtttaaacttttttttgagcgagggaagaaaaagctgtatgcatttcattgctgtctacaggtttctttcagattatgttcatgggtttgtgtgtatacgatatgaagaatgatctgaagtaattgtgctgtatttatgtttattcaccagtctttgattaaataaaaaggaaaaccag

SEQ ID NO: 10030 - DNA, 1400 bp, Homo sapiens
atagttgccggaatggagaaaaacacatgctgcctggcctgtcacacaacaaggagcacttaacagaacaaatcaatgtagaggaaaagttgtgttctgcagagaaaaactcgtgtgttcagcagagtgacaatttaaaagttgcacaaaactcaccatcagtagaaaacatacagacttctcaagcagaacaagcaaaacccttacaggaggatattttaatgcaaaatattgaaactgtgcacccatttcgaagaggatcagcagtagcgacatctcattttgaagttggaaacacatgtccatcagaatttccttctaaaagcatcacctttacttccagaagcaccagccccagaacaagtacaaacttttcacccatgaggccacagcagcccaaccttcagcatctcaagtctagcccacctggatttccatttccagggcctcctaattttcccccacaaagcatgtttggatttccaccacatttgccacctccattacttccccctccaggctttggctttgctcaaaatcccatggttccctggccacctgttgttcatctcccaggtcagccacagcgtatgatgggtcctctctcacaagcatcaaggtatataggcccgcagaatttttaccaggttaaagacattcggaggccagaaaggcgccatagtgacccttggggtaggcaagaccaacagcaactggataggccatttaataggggtaaaggggaccgccagagattttatagtgattcacaccatttgaaaagagagcgacatgaaaaggaatgggagcaagaatctgaaaggcatagacgcagagacagaagccaagacaaggacagagacagaaaaagcagggaggaagggcacaaagataaagagagggcacggttatcacatggtgatcgaggaacagatggaaaagcaagcagagatagtaggaatgtagacaagaagccagataaacctaaaagtgaagactatgagaaggacaaagaacgagagaaaagtaaacacagagaaggagaaaaggacagggataggtaccacaaagatagggaccacactgacagaactaaaagcaaaaggtaaaatttgcaggctgcttcaggattacatttaaataactgttaaaatgttgtatcttgtaaacaaaagaaagattgcctgctaggattgtgccatctttaaaatttttactattggtcatttgcagaacagtaaattctgtgtgttggtacagagtgctctgtaccagtgctcatcatcccttcttcataccaacggtccctagttataggaatttaatatttttaaaagttttacattgctgtatattcaaagatttgttttattaatatgcaataaaggcttagaaatttt

SEQ ID NO: 10031 - DNA, 1186 bp, Homo sapiens; identical to SEQ ID NO: 4796

SEQ ID NO: 10032 - DNA, 1400 bp, Homo sapiens
caatgattttcagaacaacgtgcaggtcaaagtcattcgaagccctgcggatttgattcgattcatagaggagctgaaaggtggaacaaaaaaggggaagccaaatataggccaagagcagcctgtggatgatgctgcagaagtccctcagagggaaccagagaaggaaaggggtgatccagaacggcagagagagatggaagaagaggaggatgaggatgaggatgaggatgaagatgaggatgaacggcagttactgggagaatttgagaaggaactggaagggatcctgcttccgtcagaccgagaccggctccgttcggagacagagaaagagctggacccagatgggctgaagaaggagtcagagcgggatcgggcaatgctggctctcacatccactctcaacaaactcatcaaaagactggaggaaaaacagagtccagagctggtgaagaagcacaagaaaaagagggttgtccccaaaaagcctcccccatcaccccaacctacagggaaaattgagatcaaaattgtccgcccatgggctgaagggactgaagagggtgcacgttggctgactgatgaggacacgagaaacctcaaggagatcttcttcaatatcttggtgccgggagctgaagaggcccagaaggaacgccagcggcagaaagagctggagagcaattaccgccgggtgtggggctctccaggtggggagggcacaggggacctggacgaatttgacttctgagaccaacactacacttgacccttcacggaatccagactcttcctggactggcttgcctcctccccacctccccaccctggaacccctgagggccaaacagcagagtggagctgagctgtggacctctcgggcaactctgtgggtgtgggggccctgggtgaatgctgctgcccctgctggcagccaccttgagacctcaccgggcctgtgatatttgctctcctgaactctcactcaatcctcttcctctcctctgtggcttttcctgttattgtcccctaatgataggatattccctgctgcctacctggagattcagtaggatcttttgagtggaggtgggtagagagagcaaggagggcaggacacttagcaggcactgagcaagcaggcccccacctgcccttagtgatgtttggagtcgttttaccctcttctattgaattgccttgggatttccttctccctttccctgcccaccctgtcccctacaatttgtgcttctgagttgaggagccttcacctctgttgctgaggaaatggtagaatgctgcctatcacctccagcacaatcccagtgaaaaaggtgtgaagcacccaccatgttcttgaacaatcaggtttctaaataaacaactggaccatc

SEQ ID NO: 10033 - DNA, 1400 bp, Homo sapiens
tcccaacatatggaggaggagaccacacttttccaacctgcttcttcaaacagaactttgttggtgcaggtggcctgattttggctttagaaaacatttgttttcctataggtgacgggcagaattattgggtagggcgggaagatggaaggctgcaattggtggagggagctctacaggctgaactgggaggggcggggcacacatttttttgagccctggctcatatacatgttgagatggaagagctgccaaagccaactgatgttttagggggagatgacccccacacccctaaccctggagtcacgcctctgctttgtgtttccctgtgtgtctccccctctaagaggaggatcctgagcacagagtccgggtccgggtcaccaagctccgtctcggaggccctaatcaggatctgactgtcctcgagatgaaacgggaaaacccacagctgaaacaaatcgaggggctggtgaaggagctgctggagagggagggactcacagctgcagggaaaattgagatcaaaattgtccgcccatgggctgaagggactgaagagggtgcacgttggctgactgatgaggacacgagaaacctcaaggagatcttcttcaatatcttggtgccgggagctgaagaggcccagaaggaacgccagcggcagaaagagctggagagcaattaccgccgggtgtggggctctccaggtggggagggcacaggggacctggacgaatttgacttctgagaccaacactacacttgacccttcacggaatccagactcttcctggactggcttgcctcctccccacctccccaccctggaacccctgagggccaaacagcagagtggagctgagctgtggacctctcgggcaactctgtgggtgtgggggccctgggtgaatgctgctgcccctgctggcagccaccttgagacctcaccgggcctgtgatatttgctctcctgaactctcactcaatcctcttcctctcctctgtggcttttcctgttattgtcccctaatgataggatattccctgctgcctacctggagattcagtaggatcttttgagtggaggtgggtagagagagcaaggagggcaggacacttagcaggcactgagcaagcaggcccccacctgcccttagtgatgtttggagtcgttttaccctcttctattgaattgccttgggatttccttctccctttccctgcccaccctgtcccctacaatttgtgcttctgagttgaggagccttcacctctgttgctgaggaaatggtagaatgctgcctatcacctccagcacaatcccagtgaaaaaggtgtgaagcacccaccatgttcttgaacaatcaggtttctaaataaacaactggaccatc

SEQ ID NO: 10034 - DNA, 1400 bp, Homo sapiens
tgcggatttgattcgattcatagaggagctgaaaggtggaacaaaaaaggggaagccaaatataggccaagagcagcctgtggatgatgctgcagaagtccctcagagggaaccagagaaggaaaggggtgatccagaacggcagagagagatggaagaagaggaggatgaggatgaggatgaggatgaagatgaggatgaacggcagttactgggagaatttgagaaggaactggaagggatcctgcttccgtcagaccgagaccggctccgttcggaggtgaaggctggcatggagcgggaactggaaaacatcatccaggagacagagaaagagctggacccagatgggctgaagaaggagtcagagcgggatcgggcaatgctggctctcacatccactctcaacaaactcatcaaaagactggaggaaaaacagagtccagagctggtgaagaagcacaagaaaaagagggttgtccccaaaaagcctcccccatcaccccaacctacagggaaaattgagatcaaaattgtccgcccatgggctgaagggactgaagagggtgcacgttggctgactgatgaggacacgagaaacctcaaggagatcttcttcaatatcttggtgccgggagctgaagaggcccagaaggaacgccagcggcagaaagagctggagagcaattaccgccgggtgtggggctctccaggtggggagggcacaggggacctggacgaatttgacttctgagaccaacactacacttgacccttcacggaatccagactcttcctggactggcttgcctcctccccacctccccaccctggaacccctgagggccaaacagcagagtggagctgagctgtggacctctcgggcaactctgtgggtgtgggggccctgggtgaatgctgctgcccctgctggcagccaccttgagacctcaccgggcctgtgatatttgctctcctgaactctcactcaatcctcttcctctcctctgtggcttttcctgttattgtcccctaatgataggatattccctgctgcctacctggagattcagtaggatcttttgagtggaggtgggtagagagagcaaggagggcaggacacttagcaggcactgagcaagcaggcccccacctgcccttagtgatgtttggagtcgttttaccctcttctattgaattgccttgggatttccttctccctttccctgcccaccctgtcccctacaatttgtgcttctgagttgaggagccttcacctctgttgctgaggaaatggtagaatgctgcctatcacctccagcacaatcccagtgaaaaaggtgtgaagcacccaccatgttcttgaacaatcaggtttctaaataaacaactggaccatc

SEQ ID NO: 10035 - DNA, 600 bp, Homo sapiens
gatttccttatggggctgcaggtcatcaccattttcctgatgctgatgatattagaaaaactttgaaaagattgaaggcggtgtctaaacaagccaatgcaaacaggcaaaaagggcagctagctgtagaaagagctaaacaagtagaagagttcctgcagcgaaaacgggaagctatgcagaataaagctcgagccgaaggacatatggtttatctggcaagactgaggcaaataagactacagaatttcaatgagcgccaacagattaaagccaaacttcgtggtgaaaagaaagaagctaatcattctgaaggacaagaaggaagtgaagaggctgacatgaggcgcaaaaaaatcgaatcactgaaggcccatgcaaatgcacgtgctgctgtactaaaagaacaactagaacgaaagagaaaggaggcttatgagagagaaaaaaaagtgtgggaagagcatttggtggctaaaggagttaagagttctgatgtttctccacctttgggacagcatgaaacaggtggctctccatcaaagcaacagatgagatctgttatttctgtaacttcagctttgaaagaagttggcgtgg

SEQ ID NO: 10036 - DNA, 600 bp, Homo sapiens
caaaattatatttcttgacatataaaaagttggtttaatgcctttatttctctttaaggaccagaaccaggaatactatatcgaaaaattagtctgtggatttaacactgacttagcatatagcttaaagttgctcttttggtttttaacttcctccatacataagcttcaaggacaataagatgttaaaaaggaggaaataattatttttattttgacactgtgacagttttggtaactaggatcctagggagggaaatgtttgcctgttgaacttctttctgttatgagaggatttagttaggtcattaagatgttgatcacacagcttcaatcacaatatgccaagtataacctggtttcgttagaggtgtctacagtccagatgttcttcgtaataaaagcaaagtttttgaacctctgagtccaaagcaggctggttggcataatatgtaatttgaaaaataaaatcttatcttgcagcactatcagtatgttgaatttattatgtatattatttctaatatccgaaactaaatacttgattttttaatgtgtgtgtttattttatgatattgctattaaatttttattatctac

SEQ ID NO: 10037 - DNA, 600 bp, Homo sapiens
tagcaaaattatatttcttgacatataaaaagttggtttaatgcctttatttctctttaaggaccagaaccaggaatactatatcgaaaaattagtctgtggatttaacactgacttagcatatagcttaaagttgctcttttggtttttaacttcctccatacataagcttcaaggacaataagatgttaaaaaggaggaaataattatttttattttgacactgtgacagttttggtaactaggatcctagggagggaaatgtttgcctgttgaacttctttctgttatgagaggatttagttaggtcattaagatgttgatcacacagcttcaatcacaatatgccaagtataacctggtttcgttagaggtgtctacagtccagatgttcttcgtaataaaagcaaagtttttgaacctctgagtccaaagcaggctggttggcataatatgtaatttgaaaaataaaatcttatcttgcagcactatcagtatgttgaatttattatgtatattatttctaatatccgaaactaaatacttgattttttaatgtgtgtgtttattttatgatattgctattaaatttttattatc

SEQ ID NO: 10038 - DNA, 1400 bp, Homo sapiens
acccgggaatgacttgggccaatcactgagtttgtggtgatcgcacaaggacatttgggactgtcttgagaaaacagataatgatagtgttttgtacttgttcttttctggtaggttctgtctgtgccaagggcaggttgatcagtgagctcaggagagagcttcctgtttctaagtggcctgcaggggccactctctactggtaggaagaggtaccacaggaagccgcctagtgcagagaggttgtgaaaacagcagcaatgcaatgtggaaattgtagcgtttcctttcttccctcatgttctcatgtttgtgcatgtatattactgatttacaagactaacctttgttcgtatataaagttacaccgttgttgttttacatcttttgggaagccaggaaagcgtttggaaaacgtatcacctttcccagattctcggattctcgactctttgcaacagcacttgcttgcggaactcttcctggaatgcattcactcagcatccccaaccgtgcaacgtgtaacttgtgcttttgcaaaagaagttgatctgaaattcctctgtagaatttagcttatacaattcagagaatagcagtttcactgccaacttttagtgggtgagaaattttagtttaggtgtttgggatcggacctcagtttctgttgtttcttttatgtggtggtttctatacatgaatcatagccaaaaacttttttggaaactgttggttgagatagttggttcttttaccccacgaagacatcaagatacacttgtaaataaagctgatagcatatattcatacctgttgtacacttgggtgaaaagtatggcagtgggagactaagatgtattaacctacctgtgaatcatatgttgtaggaaaagctgttcccatgtctaacaggacttgaattcaaagcatgtcaagtggatagtagatctgtggcgatatgagagggatgcagtgcctttccccattcattcctgatggaattgttatactaggttaacatttgtaatttttttctagttgtaatgtgtatgtctggtaaataggtattatattttggccttacaataccgtaacaatgtttgtcattttgaaatacttaatgccaagtaacaatgcatgctttggaaatttggaagatggttttattctttgagaagcaaatatgtttgcattaaatgctttgattgttcatatcaagaaattgattgaacgttctcaaaccctgtttacggtacttggtaagagggagccggtttgggagagaccattgcatcgctgtccaagtgtttcttgttaagtgcttttaaactggagaggctaacctcaaaatattttttttaactgcattctataataaatgggcacagtatgctccttac

SEQ ID NO: 10039 - DNA, 1249 bp, Homo sapiens; identical to SEQ ID NO: 4804

SEQ ID NO: 10040 - DNA, 1400 bp, Homo sapiens
gggaaaacctccaccctgatccctccccctggggagcagttggctgtggggggatccctcgtccagccagcagttgctcccagttcaggaggtgctcctgtaccctggccacagcccaatcctgccactgctgacatctggggagactttaccaaatctacaggatcaacttccagccagacccagccaggcacaggctgggtccagttctgacctgagcacggtttttcctcatgtgacttctgggaaggcgctccctcatctgggccaaaggaaggaggacgaagccctcctcagctggcctgtgtttggggcatgaatctctcctctcctccttgtctggctctgttgacaaaccgggcatgtttggcagtaaattggcaccgtgtcacactgtttcctgggattcaagtatgcaaccagaacacaggagaagaaaagctccaggatccctgtccccatctgtcctcttgatgtgagagagactctgagacttcttccatcgcaatgacctgtattaaacacaagccccccaagcaaaagaagaggttgagtttgctgccaggattcagatcagcccttcccagggtctgcaggtgtcacatgatcacagttcagcgggaggctttccgtacccacactggctgtagccacttcagtccatctgccctccagaggaggggtttcttcctgatttttagcaggtttagaggctgcagcttgagctacaatcaggagggaaattggaaggattagcagcttttaaaaatgtttaaatattttgctttgctaatgtgctgatccgcactaactcatctttgcaaaaggaactgctccctcggcgtgccccagctggggcctctgaagggattcctcactgtgggcagctgccctgagcttcaggcagcagtgtttatctctggccagttgtctggtttccatgtattctaggccaggtaggcaacacagagccaaggcgggtgctggaagccagacggaacagtgttggggcaggaaggtggatgctgttgtcatggagctgtgggagttggcactctgtctgctggtggccctctcggctcacatgttcacagtgcagctcctggcagacttgggttttctctttggtggtttctaaagtgccttatctgcaaacaacttcttttctccttcaggaactgtgaatggctagaagaaggagctcagtaaactagaagtccagggttgcttggtttactggtttataagaaatctgaaagcacctctgacattccttttattaactcacctctcagttgaaagatttcttctttgaaaggtcaagaccgtgaactgaaaaaagtgttggcctttttgcgggaccagatttttaagataaaataaatatttttacttctgtc

SEQ ID NO: 10041 - DNA, 600 bp, Homo sapiens
attgttgaaagtaaccgtcgtcagaaccccgctttgagcccggcccatggtggagctggtccagccttcaacttccgagcgagcgcggagcccccgacaaatgaagctgagaagctacagaaaccttccaactgcttgcaagcttctgttactagcgtgtgattgtccttctgcctcagatcttctgtctcattcgatacagcaaagtttacgacactgggactgatgtttacatctttggaaagacaagcatctcaaccacagtttttgtgtttacttaaactgtgctgctaagtagggctagggcaaaaaaacaaaaaatctttatttcagagtattgcttttcacatttatggctctgtagcaactgagtaacagtaggggtgatatgtatacttttgcttcactaattgtatctgagcacacataggaaagtctagacactgtaagtgtaatacgcattttcaatgtcatgcagttgccaattccattttaaaatgccacagatgcgtgttgctcccagtctgtggttaaacggtgccacagaactgatccttgacacttccaaaaaaaaaaaaacaaaacaaaacaaaaaaaatt

SEQ ID NO: 10042 - DNA, 600 bp, Homo sapiens
ggagaaaaatagagaggacgtaggcaccatgcagtggctcctcgagcgggagaaggaaagagacttgcagaggaaatttgaaaagaacctcacccttcttgctccaaaagaaaccgacagcagcagcaaccagagagccacccattcagcccggctcgacagcatggacagcagcagcatcacagtggacagtggattcaactccccacggaattgaaaaaaatgtttctgcacctgtagagatcaccaatctggactgtactcgggagagcctggcttccaacacatcaagcattgttgaaagtaaccgtcgtcagaaccccgctttgagcccggcccatggtggagctggtccagccttcaacttccgagcgagcgcggagcccccgacaaatgaagctgagaagctacagaaaccttccaactgcttgcaagcttctgttactagcgtgtgattgtccttctgcctcagatcttctgtctcattcgatacagcaaagtttacgacactgggactgatgtttacatctttggaaagacaagcatctcaaccacagtttttgtgtttacttaaactgtgctgctaagtagggctagggc

SEQ ID NO: 10043 - DNA, 696 bp, Homo sapiens; identical to SEQ ID NO: 4808

SEQ ID NO: 10044 - DNA, 727 bp, Homo sapiens; identical to SEQ ID NO: 4809

SEQ ID NO: 10045 - DNA, 1400 bp, Homo sapiens
ggtgactctcacatgggcatcgaagaagtacaacccacagagccctctggagaccgcctagatcagagactcagcaaaaacaggctcgccttccctctcccacatatgagtggaacttacatgtgtcctggtttgaatgatcattttgcaagccacacgggttgggagaggtggtctcaccacagacgtctttgctaatttggccaccttcacctactgacatgaccaggattttcctttgccattaaggaatgaactctttcaaggagaggaaaccctagactctgtgtcactctcaacacacacagctcctttcactcctgcctgactgccaagccacctgcatcccccgccccagatctcatgagatcaatcacttgtatgtctcacgcaacttggtccaccaaacgcctgtcccctgcaactcctaggggtgcgcctagacaggtacgtctgttttttattttaaaagatatgctatgtagatataagtagaggaagctcacctcaaaagcctagaatgcagtttcacagtagctgggatgcatggatgacccatctcacccctttttttttcctgcctcaatatcttgatatgtttactcccaatctcccatttttaccactaaaattctccaactttcataaacttttttttggaaaaatttccattgtatcagcccctgacagaaaaaggatctctgagcctaaaggaggaaaagtcccaccaactaccagaccagaacacgagcccctctgggcagcaggattcctaagtcaaagaccagtttgacccaaactggccttttaaaataatcaggagtgacagagtcaacttctgcagcacctgcttctcccccactgtcccttccatcttggaatgtgtctaaaaaagcatagctgccctttgctgtcctcagagtgcatttcctggagacggcaggcttaggtctcactgacagcatgccagacacaactgaatcgaagcaggcctgaagcctaggtcagggtttcaggagtccagccccaggaggcaaagtcaccaatgcagggaggtaaatgccttttggcaggaaaaccaatagagttggttgggtggggagtcaggggtgggaggagaaggaggaagaggaggaaggccagactggcctgccctttctcccatacttcaccccagcagaggttcatgggacacagttggaaagccactgggaggaaatgcctcactacaggggggcctcctgtagcaagcccagccggtaatcctcctaatgaacccacaaggtcaattcacaactgatatcttagctattaaagaagtactgactttaccaaaagaatcatcaagaaagctatttatataaaccccctcagtcattttgaaataaaattaattttac

SEQ ID NO: 10046 - DNA, 600 bp, Homo sapiens
  misc_feature (189)..(202): n is a, c, g, or t
agacgtatcatggcgtgtttgtcaacattcagtatacactgcgctgtgacatgaagcggtctctgttggccaaggacttgacaaagacctgtgaatttatcgttcactccgctcctcagaaggggaagtttactcccagtcccgtggacttcacgattacacctgaaaccttacagaacgtcaaagagnnnnnnnnnnnnnnatttctccttcgaggacatctcaactcaacaaactgtgtcatcacgcagccactaacgggagagctggtggtggagagctcggaagccgccatcagaagcgtggagctgcagctggtgcgcgtggagacgtgcgggtgtgcagaaggctatgcccgcgacgccacggagattcagaacattcagatcgccgacggggatgtgtgcaggggcctctctgtccccatctacatggtcttccctaggctgttcacctgccctacactggagaccaccaacttcaaagtggaatttgaggttaacatcgtggtgctgcttcaccctgaccacctcatcacggagaacttcccgctgaagctctgcaggatatagcccggaggagggaagcatagagaacggg

SEQ ID NO: 10047 - DNA, 600 bp, Homo sapiens
ttcaccaccttcactgtgacgaaatactggttttaccgcttgctgtctgccctctttggcatcccgatggcactcatctggggcatttacttcgccattctctctttcctgcacatctgggcagttgtaccatgcattaagagcttcctgattgagattcagtgcatcagccgtgtctattccatctacgtccacaccgtctgtgacccactctttgaagctgttgggaaaatattcagcaatgtccgcatcaacttgcagaaagaaatataaatgacatttcaaggatagaagtatacctgattttttttccttttaattttcctggtgccaatttcaagttccaagttgctaatacagcaacaatttatgaattgaattatcttggttgaaaataaaaagatcactttctcagttttcataagtattatgtctcttctgagctatttcatctatttttggcagtctgaatttttaaaacccatttaaatttttttccttacctttttatttgcatgtggatcaaccatcgctttattggctgagatatgaacatattgttgaaaggtaatttgagagaaatatgaagaactgaggagg

SEQ ID NO: 10048 - DNA, 1400 bp, Homo sapiens
accaccctcgggtgctctacattgacattgacatccaccatggtgacggggttcaagaagctttctacctcactgaccgggtcatgacggtgtccttccacaaatacggaaattacttcttccctggcacaggtgacatgtatgaagtcggggcagagagtggccgctactactgtctgaacgtgcccctgcgggatggcattgatgaccagattacaagcaccttttccagccggttatcaaccaggtagtggacttctaccaacccacgtgcattgtgctccagtgtggagctgactctctgggctgtgatccattgggctgctttaacctcagcatccgagggcatggggaatgcgttgaatatgtcaagagcttcaatatccctctactcgtgctgggtggtggtggttatactgtccgaaatgttgcccgctgctggacatatgagacatcgctgctggtagaagaggccattagtgaggagcttccctatagtgaatacttcgagtactttgccccagacttcacacttcatccagatgtcagcacccgcatcgagaatcagaactcacgccagtatctggaccagatccgccagacaatctttgaaaacctgaagatgctgaaccatgcacctagtgtccagattcatgacgtgcctgcagacctcctgacctatgacaggactgatgaggctgatgcagaggagaggggtcctgaggagaactatagcaggccagaggcacccaatgagttctatgatggagaccatgacaatgacaaggaaagcgatgtggagatttaagagtggcttgggatgctgtgtcccaaggaatttcttttcacctcttggttgggctggagggaaaaggagtggctcctagagtcctgggggtcaccccagggcttttgctgactctgggaaagagtctggagaccacatttggttctcgaaccatctacctgcttttcctctctctcccaaggcctgacaatggtacctattagggatgagatacagacaaggatagctatctgggacattattggcagtgggccctggaggccagtccctagccccccttgccccttatttcttccctgcttccctcgaacccagagatttttgagggatgaacgggtagacaaggactgagattgcctctgacttcctcctcccctgggttctgacttcttcctccccttgcttccagggaagatgaagagagagagatttggaaggggctctggctccctaacacctgaatcccagatgatgggaagtatgttttcaagtgtggggaggatatgaaaatgttctgttctcacttttggctttatgtccattttaccactgtttttatccaataaactaagtcggtattttttgtaccttt

SEQ ID NO: 10049 - DNA, 600 bp, Homo sapiens
gctcgcactttgtgggcgcggacggggttcgggctttcctgcagacctattcccacgaggtctccctcactgcggactcgcggaagagccacctgattttcccccagcccaactatgcggacacgctcatcagccaggagagctgtgagaaaagcgagcctcttctgataactcaggatttacttgaaatgaaaggagattccaacctacttcagcaagccccgcccaacacggactggcgtttctctcaggcccagagacccggcaccagcggctcccaaaatggcgatgacaccggcacctggcccaacaaccagtttgacacagagatgctgcaagccatgatcttggcgtccgccagtgaagctgctgatgggagctccaccctgggagggggtgccggcaccatgggattgagcgcccgctacggaccccagttcaccctgcagcacgtgcccgactaccgccagaatgtctacatcccaggcagcaatgccacactgaccaacgcagctggcaagcgggatggcaaggccccagcaggtggcaatggcaacaagaagaagtcgggcaagaaggagaagaagtaacatggaggcc

SEQ ID NO: 10050 - DNA, 600 bp, Homo sapiens
actacataatagggctcagcccaggcagccagctttgggctgagctaacaggaccaatggattaaactggcatttcagtccaaggaagctcgaagcaggtttaggaccaggtccccttgagaggtcagaggggcctctgtgggtgctgggtactccagaggtgccactggtggaagggtcagcggagccccagtgcctccttgtgcatagaccttcttctcccacccccttctgcccctgggtccccggccatccagcggggctgccagagaaccccagacctgcccttacagtagtgtagcgccccctccctctttcggctggtgtagaatagccagtagtgtagtgcggtgtgcttttacgtgatggcgggtgggcagcgggcggcgggctccgcgcagccgtctgtccttgatctgcccgcggcggcccgtgttgtgttttgtgctgtgtccacgcgctaaggcgaccccctcccccgtactgacttctcctataagcgcttctcttcgcatagtcacgtagctcccaccccaccctcttcctgtgtctcacgcaagttttatactctaatatttatatggctttttttcttcgaca

SEQ ID NO: 10051 - DNA, 1400 bp, Homo sapiens
cctgaggcctacaagcggctcctatccagcttctactgcaaggggacacacggcatcatgtcaccactggccaaaaagaagctcctggcccaggtgagcaaggtggaggccttgcagtgccaggaggagggctgccgccatggggcagagccccaggcgtccccagctgttcacctcccagagagtccccagagccccaaagggctgactgagaactccaggcaccggctgacccctcaggagggattgcaggccccaggtggcagcctcagagaggaggcgcaggcaggcccctgcccggcagcccccatcttcaagggctgcttctacacccaccccaccgaggtgctgaagcctgtcagccagcaccccagggacttcttctctagacttaaagatggggtgctattggggcctcctggcaaagaggggctgtcagtgaaagagccccagctggtgtggggcggagacgctaaccgcccttctgcgttccataaaggtggctccagaaagggcatcctctaccccaagcccaaagcctgctgggtgtcccccatggccaaggtcccagccgagagccccacgctcccgcccaccttccccagtagcccaggcctgggcagcaagcgcagcctggaggaagagggtgctgcccacagtgggaagagactgcgggccgtgtctccctttcttaaggaggcggatgccaagaagtgtggggccaaacctgcagggtccggcctggtctcctgccttctgggcccagccctggggcctgtgcccccagaggcctacaggggcaccatgctgcactgcccgctgaacttcactggcaccccgggccccttgaagggccaggctgcactccccttcagccccctggtcatcccggccttcccggcccacttcctggccaccgcaggcccctcgcccatggccgctggcctgatgcacttccccccaacgtccttcgacagtgccctccgccacagactttgcccggcctcatctgcctggcacgcaccaccagtcacaacctatgcagcgccccacttcttccacctcaacaccaagctgtaggccagcccatggtgttgtgtacactgtggagtcgacaggggcctacaacaggcaggtactgctgccagggggctctgaactagtgcctgctacccaggacacccgggccatgcccctggctgggcagcctggcacaagtgaagaagaaggcagtgggaaaactgggtttatctcaaggcagcagcctgagcccaggagcagaggacccagttgttataaggcgctgggagaggatgggcagctcccactgccccagagcggagctcgaagcacccaggttgcccacggaaaatccaataaaaagacaccagtgtgaatcc

SEQ ID NO: 10052 - DNA, 646 bp, Homo sapiens; identical to SEQ ID NO: 4817

SEQ ID NO: 10053 - DNA, 569 bp, Homo sapiens; identical to SEQ ID NO: 4818

SEQ ID NO: 10054 - DNA, 1400 bp, Homo sapiens
aaaatattttatgcatgttaagtatggtcgcagtaaatgaaattgtgtttaagactaaatttactaccgttttgaacagacattcccagatcattcttatattgtcagataacacttgtgtataatatcactttggatcatggacatgagctggaaaaatgatgtatttttgtagattgtatgtccagaatgactttagaaccgcatgatacggtggaaggagcactggactagtcgtcactaccctttttggattcagggctcctcacaattaaaatgagtgtaatgaaacaaggtgaaaatatagaagcatccctttgtatactgttttgctacttacagtgtacttggcattgctttatctcactggattctcatggtaggatttctgagatcttaatctaagctccaaagttgtctacttttttgatcctagggtgctccttttgttttacagagcagggtcacttgatttgctagctggtggcagaattggcaccattacccaggtctgactgaccaccagtcagaggcactttatttgtatcatgaaatgatttgaaatcattgtaaagcagcgaagtctgataatgaatgccagctttccttgtgctttgataacaaagactccaaatattctggagaacctggataaaagtttgaagggctagattgggatttgaagacaaaattgtaggaaatcttacatttttgcaataacaaacattaatgaaagcaaaacattataaaagtaattttaattcaccacatacttatcaatttcttgatgcttccaaatgacatctacagatatggttttgtggacatctttttctgtttacataaatttatccacttaaaatgtgataatgtggagacaaagcaagatttgattacataaacttttctctgcattggtcttttcactatcttatttgctaacttttcttatttttcttcaacctccccaccctccattttttggatattaaacagggaaagcttgctacattataaagattgttggcaccatttattttacacaaaggctaaaggttaacttttggaaatgatgagctacttttatatatgtgtttactcatgctttgtgatatttctggatcattccagtcataaagacttattacatgtactatttcttgctacctgtgaaaaggtatattttaaagaatgtataaccaacagtccatttactttttattagtatgtagaggatttgtatctaattcatgaatgtagttttacagtagtttgtcattgtaaatggagcaaagtacattatcttctaaaatgtacattatgtaagaattgtaaatatacttaagtaatttgtatgccaaaaaattacaataagtcaataaagatctcacctctggctt

SEQ ID NO: 10055 - DNA, 600 bp, Homo sapiens
gcccagctgtgccacctgcaggagttcgctcttgcgtttcttcccctccccaagaagggagggggctacttcaggcccttctgtgtgttgcctggcaggataccttgtccaaccagctacccacctcaactcccctgtagtttaggacacaaaacagctaccagcggtacagagcggtgatcaaagccgagtacttacaactctggtaagcctagcttctccgcctcagcccttctgcttctggaagggctatcctgggggtgaacttgaaactctcatcaggcttccacttcaaaccttcagtgagggggtgggatggagagaatgctgaatcttttttttgacgggatggggtttttctctttgtaattatttctttagtttaattaaccttttggttgtttgtgcaatattatatattttaaattataatgcatctccccagagtattttgtagctgggaaaagaaaaaaggaaaaaaagaaaaaaagattctaacagctgttagttttataattaaaaaagaaagaaaaaagaactttgtcctgaaccttttacagacttgccgttaacagcattaaagtgattcacccgaagctg

SEQ ID NO: 10056 - DNA, 1400 bp, Homo sapiens
accagcctcagcactgctgggggtcacaccgtgccaccgactgggggccgctacttgagcattggagatggctctgtgatggagtttgagtttcctgaggacagtgagggcatcatcgtgatctccagccagtacccaggccaggccaacaggacggcgcctggccccatgctcagggtcacctccctggacacagaggtgctgaccatcaagaacctcgtggacgcccatgaggccccgcccacactgattgaggagcggagagacttctgcatcaaggtctcacctgctgaagacacgcctgccaccctcagcgccgacctggcccacttctcggaaaacccaatcctctacctgctcctgcctcttatctttgtcaacaagtgttcgtttgggtgcaaagtggaactcgaggttctgaaggggctcatgcagagcccccagcccatgctgctgggcctcctgggccagtttctggtcatgcccttgtacgctttcctcatggccaaggtcttcatgctgcccaaggccctggctctgggcctcatcatcacctgctcgtcgcctggcggcggggggagctacctcttcagcctccttcttggaggggacgtcaccctggccatctccatgactttcctctctacggtggctgccactggcttcttgcctctgtcttcggccatctacagccgcctgctcagcatccatgagacgctccacgtgcccatctccaagatcctggggaccctgctgttcattgccatccccatagccgtgggcgtgctgatcaagtccaagctccccaagttctcccagctgctgctgcaggtcgtcaagcccttcagctttgtgctcctcctgggcggcctcttcctggcctatcgcatgggggtcttcatcctggcaggcatccggctacccatcgtactggtgggtatcacggtgcccctggttggcctgttggtgggctactgcctagccacgtgtctgaagctgccagtggcccagcggcggacggtcagcattgaggtaggggtgcagaacagcctgctggccttggccatgctgcagctatccctccgccgccttcaagctgactatgcctcccaggcccccttcattgtggcgctgagcggcacctccgagatgctggccttggtcattggccacttcatctacagcagcctgttcccagttccctgaggcctctgggtcaagctttcatcagccccagcccccacactccaccaaagttctcatgcactatgcactcagaaaaatccaggcttattttttttactgattttttattctccagctttcagtgccaaagaggccatgctgagttaggtaggtgggcgctgcccagaaaatatatttcaataaaagagagaagc

SEQ ID NO: 10057 - DNA, 1400 bp, Homo sapiens
actctttttagttaatataccaaagcttatgaataattgtttgttaattgaacattttcaattatatgcagactgactgattctaagataaattctaaggaggtttctaattttgtaattgttaaaaatagagttaattttgactttgttagatgagggaggaaaactcaactgtttctctttgttatctaaatgtttcagaattcaatcgtgaaggaacaggcattttacactatgaagacattcttttgagatttttatttcagttgctatatcataagcatttttaaagtttcttttctaattttacattgtattagattttctgattcttttgtaaatacagaacttaaatagaaggcaacaggaaatttatataggaactattttcattccacttgtgtaagttaagtcttgactctttcaaatgcaaaaaacctattttatgctttgttaaaattatggtgtcacttagattgactttagttgactgcactatataatatagaactatgaatatgtagaataacatgaaaaattggaggtgctggtggtatggctgaccctgtttcagaagcaggatagtataaaagcatcagcctaagaatggcactcccactaactagctatgtaatcttgacctctttgggctttagttcctctcataaaaggaagagatgtattggattagactagatgatcaccactttctcttctagttctaatttttttaattctaatacctatattttcaagttatgtcaattaaatcattatcaggttatttcctaatgtaagaatagctaaaatgttgcagagaaataagtgacccaacaaaatttattcatctgttatgggtaagatctgccataaattcttcctaaataatttgtttactaactctttaggccactgtgctttgcggtccattagtaaacttgtgttgctaagtgctaaacagaatactgctattttgagagagtcaagactctttcttaagggccaagaaagcaacttgagccttgggctaatctggctgagtagtcagttataaaagcataattgctttatattttggatcattttttactgggggcggacttggggggggttgcatacaaagataacatatatatccaactttctgaaatgaaatgtttttagattactttttcaactgtaaataatgtacatttaatgtcacaagaaaaaaatgtcttctgcaaattttctagtataacagaaatttttgtagatgaaaaaaatcattatgtttagaggtctaatgctatgttttcatattacagagtgaatttgtatttaaacaaaaatttaaattttggaatcctctaaacatttttgtatctttaattggtttattattaaataaatcatataaa

SEQ ID NO: 10058 - DNA, 1400 bp, Homo sapiens
ctcgtcctcccaaagtgctgggattacaggtgtgagccaccacgcccagccaccactacgcactttaaaaccaaaaaaagctcaaagggatggatcattgtccatggctcaggagccccactgtggggtaagtgtgatgtcgatggattaatttagacagtggtgtattcatcagggcaaaggaaattcttccagaggtgatgatgcggcagatattcccagtgctctcccaaagcaagctggccctcttgtcatcctctcagtgggcggcaccagctgcccctccttccacaagtactcaagcctgtttgtaaatactgaaggaattgatggggttgaggaaaggaggtgcatgtgaccagggtcccaaggccacagcttttcagatcctaggaagcaagtggcatttgcttgagttgtggcctcggaaggagaatgtttatctgttttctaactttgctgacaccaggattctccctgtcattgagaagaaagcattatctaattaccttcaggtggtttacttattctgtaaagaatatgtgtaaatattttgtacagagccctgtatcaaataaacagccatatgtggttactaatcacctcttctgtcattccgtccttggccaccgctcagtgggaatggtctctgatctggatgctcccaccttccatgtcaggcccagaactgtgccatggtctgtggactcctggtcagccttgactggctaggagaccttgggcagtacctacagtcttgctgtttctgtttcatctgcaagaattatgacccacacactccagctgcagcccagggcactgtgatattttatacgtgtgtagatgtttttgtccacagttcctggttcatcactcccataaccctttgttataatgttgggacactgcaggcctcagaaaacggaatctctgtctgtgaccttctcctgccccatttcacttgctcaacaccagactttaatctgactgtagctcataagaccctcattccagagagggtgctgccccatacccggaaggaggaacgctgcacagagaggccaagaagcatctggacagacaggccttgctgggtttagaccttatgctttttgtccagtttcatctcaacacagctgccatgcttcagccatgcctatccaatgacgtctccataaaaggcccaggaacacgggagcttctgaagagctgaacatgtggagggaggggaacgagaacttgtccatgtgccaagagggtggcgcacccccactccatggggacagaagctccagcatttgcccaggacccgtccagacctcaccctgtgtgtatcttcatctggctgtttacttatttgtatccttttctaataatgtttgtaataaactggtaaacat

SEQ ID NO: 10059 - DNA, 600 bp, Homo sapiens
atctggtagatgtccatgcccatgtgctcctgctgggactcaattcaggctatgtatgactatgaagtcaggctcatctgcttactggctgtgtgaactttttgtatcttggttttcttcatccatgaaatccaagtaatactacctaattgttactgtggagattaagttcaaatgcaatgtatagtaatattaagcaatttctagttattattctagccagtaatggacttcagaatcttttattacacaatataagaatatgtatgtaaagacattttggaatttcctggatgagaaggaagtctgggctgggcatggtggctcacccctgtaaccctagcactttaggaaatcgaggcgagtggatcacttaagctcaggagttcaaggccagcctgggcaacatggcaaaaccccatttctacaaaaaatacaaaaattagctgggcatggtggcacccgcctgtagtccagctacttgaggctgagatgggaggatgagggaggtcggggctgcagtgagccaagatcacgccactgcactccagcaccctgggcgacagagtgagaccctgtctcaaaaaaaaaaaaaaaaaa

SEQ ID NO: 10060 - DNA, 600 bp, Homo sapiens
aaagaaatttgattcctcccgggacagaaacaagccctttaagtttatgctaggcaagcaggaggtgatccgaggctgggaagaaggggttgcccagatgagtgtgggtcagagagccaaactgactatatctccagattatgcctatggtgccactgggcacccaggcatcatcccaccacatgccactctcgtcttcgatgtggagcttctaaaactggaatgacaggaatggcctcctcccttagctccctgttcttgggtaaggaaatggaatactgaagggcccttcactgcctttgctcctcccatgttatgcccagcgtttgatgggtagcagagagaacaaaaaacaccacaaggctatttttccccctgcattctttctgtattgagtatcctttcagtgttattagtgtatgctttgaatgtaaaaattggtcaccctaaggaaaggaattggcatgtgtatgttcccagttcaactcatggagatggcagctgtttaaatgtttttctatgtagtttataaattaaaactgaattgaggactatggaaatgtaggccaaatttgtagtgccaacattttagttctttgg

SEQ ID NO: 10061 - DNA, 600 bp, Homo sapiens
gaccccagtgaatgaagctgatgcacagggagcaccaaaggaccttcgttaagtgataattgtcctggcctctcagccatgaccgttatgaggaaatatcccccattcgaacttaacagatgcctcctctccaaagagaattaaaatcgtagcttgtacagatcaagagaatatactgggcagaatgaagtatgtttgtttatttttctttaaaaataaaggattttggaactctggagagtaagaatatagtatagagtttgcctcaacacatgtgagggccaaataacctgctagctaggcagtaataaactctgttacagaagagaaaaagggccgggcacagtggcttattcctgtaatcccaacactgtggaaggccgaggcaggaggatcacttgagtccaggagtttgaaacctacctaggcaacatggtgaaaccttgtctctaccaaaataaaaattagctgggcatggtggcacgtgcctgtggtcccagctacttgggaggctgaggtgggagcctgggaggtcaaggctgcagtgagccatgatcatgccactgcactccatcctgggtgacagcaagatcttgtctc

SEQ ID NO: 10062 - DNA, 600 bp, Homo sapiens
aggaagcctctgtgacttctgctccctccctagcttttccaccagaccctgcatggtcccaccctggctgtgtgaagcagggatcagggagcgtggctcgatgtcagtctccagaaccctgtccaccctggcgtggtggcagacatggctacctgcagctgagctgccagttcctctgagtcctcaaagaccaggccattttctttatgtttcaccagctcatgtaaactgcagagagaaccaagggagcctgagagctgcctggggaagacaccagacccctggggtgcccagctgggctcccacccaccccacgctcaagccaggctgggggttggaacagggggtgtggtttctgggagctggttcttagatttggcatctgaagggtataaaggcctggggggggtgcacatcaaaatgaccaaatcgatttgaggagagagccttaaggaaggtttgtaccttctgtgctggatgctcttcaaggactgaagaattatttttgcatgtttttcttaattccatggccatggaacaagtaaaggcaaccccctggggactggttcagcacataaaagatgacttttctaggacacc

SEQ ID NO: 10063 - DNA, 600 bp, Homo sapiens
ttaaaaaaatgctatttccagttaatgcatttggccctattgaattttcagggaccagaaaacattaaaaagttctgcatcttataatggtaaccaattaagcttgagattgttctgaaagtatcaattgctttaaaactgttgtaagtacagttggcaagatctccaagctgaaacttccacgttaaaacttttgcctgtaagaatttgcacatgaatgttaatggaaaacacaaaactaaagatggcccaaaacaaaagccacaaacagttcatcatttggtgcttagtctttgtaagggctctctgtggtttgacttaccccagctaccgttaaatgaggacaaatcaccttaaaacatgttcatttgattcataacaaggaaaattgggtctatgattttttgccaatcttagcctaaaagaaattgctttagcttctggtcagcactgattaaaatgtgaatagtgaagtggctatcctaaactggtttatctccacccacactatcatagatttcttaggtaaatacaattcttatctagtggtattctacttgtattcagaatactgtattaaaattttactatttcattttt

SEQ ID NO: 10064 - DNA, 600 bp, Homo sapiens
  misc_feature (194)..(434): n is a, c, g, or t
tgacacctggggtcagtttacctctgtgtatggtcactagagattgggacttaccctttaggttttaggaggcttgagaatggaaggatcctcatttctgcccttcctggttccctgctttggtgtaggggttgggaaaaacaggaaattcctctcagctctgcctcagatctcctacctctccttaagtcttnnnnnnnnnnnnnnnnnnnnnnnnnnnnnnnnnnnnnnnnnnnnnnnnnnnnnnnnnnnnnnnnnnnnnnnnnnnnnnnnnnnnnnnnnnnnnnnnnnnnnnnnnnnnnnnnnnnnnnnnnnnnnnnnnnnnnnnnnnnnnnnnnnnnnnnnnnnnnnnnnnnnnnnnnnnnnnnnnnnnnnnnnnnnnnnnnnnnnnnnnnnnnnnnnnnnnnnnnnnnnnnnnnnnnnnnnnnnnnnnncagctctgagaccagatgttggctgctgtacttactccctgaggtagggaatgtgtggtgatcgagtggtctgtgttcctattgctggtggggtgatagggtgggctaaaaaccatgcactctggaatttgttgtattttctcccagtaaagcttttcttctcccg

SEQ ID NO: 10065 - DNA, 600 bp, Homo sapiens
acctcaagtgctccgcctacctcagcctcccagagtgctggggattacaggcatgagccaccacgcctggccagaagacatgattttaatgagtgctttagtgagtcctcagccacccaaaaggaataaagcctgcgtggcaggtgccgggttacttatcccaggcagaagaggacttttgggaagagattccttcaaaaaaacaatagcagcatttctcaaaaagttaaacatcaagttaccatatgatttagcaatgctgtttctgggtatatacccaaaataattgaaagcagggactcggccaggcccggtggctcatgcatgtaatcccagcactttgggaggccgaggcgggcggatcacctgaggtcaggagttcaagaccagcctggccaacatggtgaaacccatctctactaaaaatacaaaaattagccgggtgtggtggtgggcgcctgttaatcccagcgacttgggaagccgaggcaggagaatcgcttcaacccgggaggcgggggttgcagcgagccgagattgtgccattgcactccagcctgggcaacaagagcaaaactgtctcaaaaaaaaaaaaaaaaa

SEQ ID NO: 10066 - DNA, 600 bp, Homo sapiens
actttaattcctcctgaggaactctactttctgagccaaactgctaattttctgcggaactgtctagaagatcattcaagagaccctgcagttgcactttctcgtaaaagttaaaaaaaaaaaaaaaaaaaaaaggtttttcccggcctttgaacattttgcctatgagagttttgcatatattttatacttgagtagacaactttaataatccatatttatactatcgcagaagtaagcatttggcaaacgttcagccattagcactcatttaaccctgttagcaatattcttttgaaaaaagtgccagtccttatgtgataaactaagaagcccattgaatataaaagtgtgtaggactgaaacagtgaccttatattattgctaagggaatatgagattaacttcctacaggggccaaaaccagagaaaggcttccagcaacttcgatgaaagtagtttggccacatgtcaagccaattgtttgtactatttatgtacctttttcataactggaattgccaaataagcatggagatctaaatgatgtacttgttagtgtattcattcatattgactgtaaaggattatttttcactc

SEQ ID NO: 10067 - DNA, 1400 bp, Homo sapiens
gtgtcagcgtgccctgtatgctcagggcagctgtttccactggacattctccctttgcctctctgggcagcaactcctaggccagccgacctgctgtgtcgagtaaccaggatttctcaatcttggcatggttgccattttggaccagatcgttctttgttgtgggggctgccctgtacggcaaagaatgccgagcagcacttccagtctccacccacaggacgccagtagcaccctctaagttgtgagaactcaaaatgtccccagaggatgccagatgtcccctggggtggggacacaatcaccccaggttgagatccatggagccaggtctgtttgccaccaaggggtaaagctccattcccaccttaggagggctaggaggcagcatcgtggggccacagaaggcctgggtttgcagtcagaggacaggatgcacattccttcaagatacagacccagattgttgggcatctagttcttgggttttctgttgttgctgttccgttttgtctgtcttccctcctttgtttactagcagcctggaatttgccactttttctaaacgaagatttatggaacacttaccacacggctgacgctgcgcgaggctaaggttctaatacaccgcagctcacttaactctcgcaataccataaacgcacactgtttcatcttgaccctttcttgggaaggtgacagagaggtaggagggcaaacatcttgtgtgccccgtcccaagggtattactggtggaataatatccgccccccaccccagtttctaatttgctgtaggctgtgacgctgtggggcaagactaggagtcctgttgaaattaggaataagtgtgctgtgagggaagggctgccttattttagagcacagattttctgaatatctattttgacaggttcgatcctctccccttcctgccttccttctgtcgattttcaatgtcttgatggtgtcccacctgagtggcctttagagatgtgagttgtgaggcactggggaggcaggcacacgtcctccagcccaagactgcctaatttaacagggatttctgcattctggaacaagcctccattttccccaagcaggattactccagagggcaaaacacagcccaatagtatcacatttcctttctgctttagcaaaaataaccactgtctcattcatgggaaaaggccgccaaacaaatttgttactggaaccatttgtaacaacttctagtttgcactgccttggagcaagcacactttgtagaggagggatttgcagttacttgggcaacaaggtaaccactgatcattacaggaagcttcagaaaccgtgggaccagtgtagaagaatggactatctgtccaaactaagaataaaaagaatgacacttgt

SEQ ID NO: 10068 - DNA, 600 bp, Homo sapiens
tgagacgagggagggctgaaggggggagtcggcttggggggagagtgttctcctgcccacccaggcactgggcgtggcccagccccacagacagaacagttctttcttccttattttattttttattagagacagggtctcactctgtcgcccaggctggagtgcagtcgtgtgattggcctcaagcgattctcccacctcagccttccaaagcactgggattacagcagtgagccagtgtgcccagcctcttcctaagtttacaccagtgtgggcatccagtgaggggaactggcctgtgatgcggtggtccttgtgacatgtcaggcagttttagagtagggtttgttaaaacatgggttaaattgggccccacccccagccctccactcctcagccattcaggagaagcgcgaggcatgggtgcgcgaaaattctgagtctgccttccacctgaaccccctctggaaggtctgaccacgggctgggtgtggtggctcatgcctgtaatcccagcacttttgggaggccgaggcgggtggctaatgaggtcaggagttaaagattagcctggctgatatggtgaaaccacgtatctac

SEQ ID NO: 10069 - DNA, 600 bp, Homo sapiens
gttgcaagaacagttttgagccattgttaacaatgccttttttcttcacataaagtagttgattacgagggagtcaaattttctttttaaaaaggagcttcaatgatttgtaactgaaatatcaggttctagaagaaactggcgcttaaaccaaatcgcatggatttctttttcagtgacgttcaagtgtttctcacggatggaattctagtcagctgcaggcgggaagccaggcgggtggagcccatgggagcaagggcgagtggccggtccccgctgtgccaggtgggcaggcaggagcaaggcctgcgagggaggaacgggccgctccccgccagccgccttccccagcagccgcaggtggtgccagccactccacagagcccgagggatgatctagcctgattcctgcgtgtccgaaagaacttaacgttttaaaggtgattgtcaagtaactgtgtggggttctaatgccagtttcctaattccatctcactggagatgtttaaagttggcctctatcctaatgactcaaaacttggttcttaactaccatgattgcttttgagggcccggaattataaatatatattatatttt

SEQ ID NO: 10070 - DNA, 1400 bp, Homo sapiens
tgagccccgcacctgcccactccctcccctccccgggcctcctacccacccctgacactgcaccccgcctccccaggagtccacattccaggagctgtgcgaggggctgctggaggagtcggatggtgagggggagccaggccagggcgaggggccggaggctggggatgccgaggtctgtcccacgcccgcccgcctggccaccacagagaagaagacggagcagcagcggcggcgggagaaggctgtgcacaggctgcgggtacagcaggccgcgttgcgggccgcccggctccggcaccaggagctgttccggctgcgcgggatcaaggcccaggtggccctgaggctggcggagctggcgcggcggcagaggcggcggcaggcgcggcgggaggctgaggctgacaagccccgaaggctggggcggctcaagtaccaggcacctgacatcgacgtgcagctgagctcggagctgacagactcgctcaggaccctgaaggtgctcactgtgtcctgccgtggagccccgtgcccagtgatgacaccatccttgctccccgtgccccccaggggctatgggcgacaccatggctgcccctgggctgggccagtggggccaatgcccaggggctgagggcacgggatgctgggatgagatcccagggtgaggggccaggctaaggtttgagtccgggaccctaagaaggcctttccttccagctggtccctgttgcagtcccggtcacctttaggactagagggaccttcctgaagctcagaaccaaccctgtccctcccctgctcggaacctgctgtggctccccagtgcccctgaggaagcccagctcctctgtcagccacacgcctgggccgacccggccgtggggctccagccagttgtgctcatgagcggactgtgccttctccctctgatccagcctttgccctcgctgtccccttttctgtgtcgtcaccagcccacttcccgtgactcctctaagcccagcttagagatggccataggttggtggctgtcatcccaacactgagccccagcagctgagggccaggctgagtccctggtgcccacaggctgccctggggggagactgcatggggctgagccctgccaggaccccgaggagaggtccaggcccttgggcttctgccaggccctgctgaggcctccctctctgtcctgtagcccgagggcaacatccttcgagaccggttcaagagcttccagaggaggaatatgatcgagcctcgagagagagccaagttcaaacgcaagtacaaggtgaagctggtggagaagcgggcgttccgtgagatccagttgtagctgccatcagatgccggagactcgcccttcaataaaaaatctcttctagctg

SEQ ID NO: 10071 - DNA, 600 bp, Homo sapiens
aggggaagggcgggaggattgagaagggacaagccaccttgaccgtaggggaaggaggaatgtgggctgggggaagatgccctcaactcaccccctacacacacatgagagagagcccccacccagttccttggcctaggtctcccctccaggctgagggcctctctacttccccagatgcctgggtgcaaagaacggcttggcttggctcctcctctggaggttaaaatttatagtcattctaactgcactttgcgagctgccccttcttcccccacatcagagagaaatgcccccacaccagagccccaagggtagggctgccgatcagagctgtgagttaacacaacagggtcctggccaccccccttgccataccccgccctctgtgcccctttggcaccccccaaccctagtatgtcctctgctttctgccactcgtgcccgctgagttccatctacctctcatgctggatgccagctggcccctcaccagcctgccctgctgcccacacagctcccctttaagtgcccagccctaggggcctctccccatccacctcctccttccacaccttggcacccacccaggaaaaaact

SEQ ID NO: 10072 - DNA, 600 bp, Homo sapiens
ctgatttgttctgttcctgtctcaaatccaatagttcacagctgagctggcttctgtggtgtgtgctcgtttggggggtggggtggaaatactgccaaggctggggggggccacctctccatctggtcagtttgtggggtgggtactctgccagcagatgggaggatatagggaaacagcacacaagtctaaggggggtgcccaagggggttattttcatcatatatttattacataaatatatagtaaaatagacgagcaacaattaccataaaaatatctttctttaaaatcctgacccaaaacacaacggggtgttctctccaggctcctccccaccagctccgcacaccctctggccgcctgaggctttagacttcctgatcctcaaagacctcgaggaagagtggggggaagagttcggtggggcactcgactttcatgtggaggaagcggctggcgtggcaggccccgatcatgcggaggtcagtcaccttcatcagcagcttgggccagaagtgcggaatgttgtgtttgcggtggttgacgtagtgctcgaacgccagcaggtacgcctcctgactcttctcgatcttgtcc

SEQ ID NO: 10073 - DNA, 1400 bp, Homo sapiens
ccttaagccctcaaagatgaatgagttcctggaaaattttgagaaaaacgctcatcttcggacagctcactctgaattggttggatactggagtgtagaatttggaggcagaatgaatacagtgtttcatatttggaagtatgataattttgctcatcgaactgaagttcggaaagccttggccaaagataaggaatggcaagaacaattcctcattccaaatttggctctcattgataaacaagagagtgagattacttatctggtaccatggtgcaaattagaaaaacctccaaaagaaggagtctatgaactggccacttttcagatgaaacctggtgggccagctctgtggggtgatgcatttaaaagggcagttcatgctcatgtcaatctaggctacacaaaactagttggagtgttccacacagagtacggagcactcaacagagttcatgttctttggtggaatgagagtgcagatagtcgtgcagctgggagacataagtcccatgaggatcccagagttgtggcagctgttcgggaaagtgtcaactacctagtatctcagcagaatatgcttctgattcctacatcgttttcaccactgaaatagttttctactgaaatacaaaacatttcattaactgctataggatctgtctgctaatggtgcttaaattctcccaagaggttctcacttttatttgaaggaggtgttaagttaatttgctatgtttcttgcattatgaaggctacatctgtgctttgtaagtaccacttcaaaaaatagttctgtttactttctgcatggtatttcagtgtctgtcatacattaaaaatacttgtcactgttttaagatcttgactcttcatttgtttcagaatagctcttctactgtattctgacaactctttgctttatagcattttgttgtattcaaatgataatggtagcatttccatgcttgtgacagcatttttaagttattaatatattttatcaacctttccatcatgtctgttttcctggttttttttggttgttttttgaccagtaaaatttattttgtaataccaaataggatttaagaaaattaacgtatttctttactatggaaaaccacattgtcatttgtgacatcatctatattaaatatggttttcacattagttatttgtcacttacttggaaaatgatgctgttaggtcctggtattaaaaatctagaaaagacttgttggtttatgtgctgaaatgtctttatttataattaattttaactactatttacttcatttcggatcctgtttaacaaagatacttgagacatccatttgttttaatgaaatctgtatggatatggaaatgcttgccctaataaaagcctacatatacct

SEQ ID NO: 10074 - DNA, 1400 bp, Homo sapiens
cttatagatactttcaccgtttgcagggttgctaatcagatacctgctgtcaccacacttgggtcaggaaccctaatgagaacggggagctgccagggtgagggcagccctcagggtcggccgctttccctctggaccacctcccgctgcgtttcctactcagagaaacagcaagggcggggtcaagacacgggatgacgggaagcaggaagcggggcagcagcacagcgtggggtcctggcactgcaggccaggccaggatgcccaccccgccctctacacggccccttggggcctgcgcccgtgaaactggtgccagggagcactgccagcttgccagtttctgcccagcaaaagcacgtatgcttcaggggccttctgagaccaccttccccactgagccccagctgctgagaaggccttgagggaagtagaggctgggagcaaatgccccatgcggtgagaggatgaggggagcctacgcctcaggcatgtggtgagaggatgagggggagggagcccacgcctcaggtggagtgggcagaggtgcaagagagggatgtactgaagcttcttcccgtcctgccacagacacttctcctgccttcccaccctgacccggcagaacccaccaagtgcctgtgtgcagcctcctgtgcctcacccagggcctgaccccagagtggtcccaacaacccggtctcatgcccactccccatccctgcttcccaaaaattgcactgtgtgcagtttgcaacaaagaatcccgctggcatcctgtccttgggaaccctttctcattctccaagcctggtcagctgcctgcacaggcagaggtgccctcagcccagattagcaacactcatagttttgccaattaccagtagacactagtggaaccatctaactggaacttcctctctccttccacttatttcctcaaacttgttgctttacactagacacatgcaaatgtatgttttaaacacaccaaaacagatcatgccaaatgagttgcctgtcaaaggctggagggcaggaggagggcctgggtttgggttctttcctcccagcctttggatggtgccttgggccccttagccccagcgccagggcctcccagctgaggccacaggacaagcacttttttatgatgtactaaaagccacagtatgtggaaactgcaaaaggatcaggaatttagggtatgatctcggtcacgtgtcccgggcgctgaggggaaaggaagcgggcatgattgtagacaatgagggggttctcttgatgtaatgaaatgcaattttatggtttggtgcaaaaactcctattttccagtaaattaactttatttctaaagcatattttgatttgccatcaagagcaataaagcattaaatctt

SEQ ID NO: 10075 - DNA, 1400 bp, Homo sapiens
acacccagtcattttgcggtgaaaacataatgatgccaatgggtggaatgatgccacctggaccaggaataccacctctgatgcctggaatgccaccaggtatgcccccacctgttccacgtcctggaattcctccaatgactcaagcacaggctgtttcagcgccaggtattcttaatagaccacctgcaccaacagcaactgtacctgccccacagcctccagttactaagcctcttttccccagtgctggacaggctcaggcagctgtccaaggacctgttggtacagatttcaaacccttaaatagtacccctgcaacaactacagaacccccaaagcctacattccctgcttatacacagtctacagcttcaacaactagtacaacaaatagtactgcagctaaaccagcggcttcaataacaagtaagcctgctacacttacaacaactagtgcaaccagtaagttgatccatccagatgaggatatatccctggaagagagaagggcacagttacctaagtatcaacgtaatcttcctcggccaggacaggcccccatcggtaatccaccagttggaccaattggaggtatgatgccaccacagccaggcatcccacagcaacaaggaatgagacccccaatgccacctcatggtcagtatggtggtcatcatcaaggcatgccaggataccttcctggtgctatgcccccgtatgggcagggaccgccaatggtgcccccttaccagggtgggcctcctcgacctccgatgggaatgagacctcctgtaatgtcgcaaggtggccgttactgatcttacttcatccagtctaataggtttggagattaaaccttttctcaacttgtgctgtttatatagccaagcttccgtcaataaggcttcattgtgactttaacaaacattatcttcccacataccaggaactattggacatttattttacatgggaaaaattatttggaataataaagcaggaacttttcctgaagttgcaatttatactgtatggcttctttttcatgtttcatctaggtttttagaagtgaagtatagtaaatttggttcgttaaattgtgaaggcgctggaattacatgaacataccaccctagtaaaggcaagttctgtaagcttacattgctatttgtaaagtttgccttcacagcatttcagatgctgttggacttcatgtccccaacctagcttggtgagggctgtaactgtttccaagtacttgtacattggaagtctgaatgtgtaacaatatttaatgtatttagagttcctcatgttgcagggtttaagaaatctgacccaccaaggtcatgtgacttttctgtactgttaaacttcattgtaataaaatgagagaa

SEQ ID NO: 10076 - DNA, 1400 bp, Homo sapiens
caccaggtatgcccccacctgttccacgtcctggaattcctccaatgactcaagcacaggctgtttcagcgccaggtattcttaatagaccacctgcaccaacagcaactgtacctgccccacagcctccagttactaagcctcttttccccagtgctggacagatggggacacctgtcacaagctcaagtacagcttcatccaattcagaaagtctgtctgcatcttctaaagctctgtttcctagcacagcacaagctcaggcagctgtccaaggacctgttggtacagatttcaaacccttaaatagtacccctgcaacaactacagaacccccaaagcctacattccctgcttatacacagtctacagcttcaacaactagtacaacaaatagtactgcagctaaaccagcggcttcaataacaagtaagcctgctacacttacaacaactagtgcaaccagtaagttgatccatccagatgaggatatatccctggaagagagaagggcacagttacctaagtatcaacgtaatcttcctcggccaggacaggcccccatcggtaatccaccagttggaccaattggaggtatgatgccaccacagccaggcatcccacagcaacaaggaatgagacccccaatgccacctcatggtcagtatggtggtcatcatcaaggcatgccaggataccttcctggtgctatgcccccgtatgggcagggaccgccaatggtgcccccttaccagggtgggcctcctcgacctccgatgggaatgagacctcctgtaatgtcgcaaggtggccgttactgatcttacttcatccagtctaataggtttggagattaaaccttttctcaacttgtgctgtttatatagccaagcttccgtcaataaggcttcattgtgactttaacaaacattatcttcccacataccaggaactattggacatttattttacatgggaaaaattatttggaataataaagcaggaacttttcctgaagttgcaatttatactgtatggcttctttttcatgtttcatctaggtttttagaagtgaagtatagtaaatttggttcgttaaattgtgaaggcgctggaattacatgaacataccaccctagtaaaggcaagttctgtaagcttacattgctatttgtaaagtttgccttcacagcatttcagatgctgttggacttcatgtccccaacctagcttggtgagggctgtaactgtttccaagtacttgtacattggaagtctgaatgtgtaacaatatttaatgtatttagagttcctcatgttgcagggtttaagaaatctgacccaccaaggtcatgtgacttttctgtactgttaaacttcattgtaataaaatgagagaa

SEQ ID NO: 10077 - DNA, 600 bp, Homo sapiens
gggttcagaggccgaggaggcactggaggctgctggccgtttcctactgcctgggctggaggaggagctggaagaggccgtgggccgcatccacctgggaccccagggtggcccggagtcagtgggtgaggtgttccgcctgggccggccccggctggctgcccactgtgcccgctggacactggggtcagagcagtgcccgaggaagcggggtctggccctggtggggcttgtggaggcagcaggtgaagaggcagggcccctgacggaggctttgctggctgtggtgatggggattgagttgggggcaagggtccctgcctagactgttgacgtcccctgggaaggggacccaaggatgaattggctgtgaaggatcctccctgagactggcaagggaggaggctgagcagaaggagtcatcatggaggagcggtgagaacatggaaccggactccaagatgacgatctaaagacccgggagcgagaagccaaggccaggttctgggtgtagggcccagagaagcagaacagcccagagccccaggtgcctggcctggcctagacctctggaattgagattaaacaatttggagttgg

SEQ ID NO: 10078 - DNA, 1400 bp, Homo sapiens
gaccagtcacaaaaccaggtacaggtagttctgaaccagaaggcaggccccaagaccatcctaagggccgccacacatgggctgatgcttggggccctgcagggagatggaccccttccagcagagctggaggagctgaggaaccgggtgcgggcaggtcctaagaaagagagctgggtcgtcgtcaaggagacacacgaagtgttggacatgctgttcccaaagttcttgaaaggactgcaggatgccggctggaagaccgagaagcaccagctagaggtggatgagtggagggccacatggcttctgtctcccgaaaagaaggtcttgtgagcagcccagacggaggcccaagcccagggcaggaacctggagcaaggacactttggccacagcaggacaggggaaaggcagctttatttttccttagggcaactgcagcgggtgggccaggccctcatgggaagtgactgccaatcagatgcagtgggccccaggcagaggaaggccgggagaaggggagccaggaccttctcaccccactgccccttccccttttctggggagcaccgcaggctcctcacccccacttcctgtgaggctgtggcttatggtgtccaacgcagttggtcttaggcatagaagccccagaggaacacggccactgccatcatgagcagggcattgaggttgaccacacgggcccagctcgggtcctcgctgatgtcctccaggtcctcccgttcctccttgctatgccggagactgaagaccaggcggtggagctggggagggtgggagcacgaacgaggtgggagttctgtccccccatgcctggccctaaagtctcttgcacaccagctcgtcactgcctgccctacccacctctgtccagtctacacacccagcccaggcttaactcatgccaactccaccctacatggctgccctgtgccctcgggataaaccccaagcccctgagcttgtgtttaaagccgttggccttgctcccccagctttgtcagctcaggtctgtctacacccagatggtagcgcttgtgacactggcctggcagtcctgctcacagtgttctgtgcctgtgtgctcccaccctttcctcctgctgctgcagaaacccggccatccttccacacccagatctcttgtcctgtcctcaccccaccctgccaccatcagccctgcctggagccacctgccctttggcaacaaaaccaaacctttttgtgggcgttcaagatggtattgtgcccaccagtcagatcctgtgttttgagtcccaaaggccatgccaaggattggctttgggaggctttaatcaccaacccatcaacatcaagcctcccccaggccggttcaaataaatgtatttaaataaaaa

SEQ ID NO: 10079 - DNA, 1181 bp, Homo sapiens; identical to SEQ ID NO: 4844

SEQ ID NO: 10080 - DNA, 600 bp, Homo sapiens
cggagaaggcggcttccttggagtatgactatgagaccatccgcaacatcgactgctacagcacagatttctgcgtgcgggtgcgcgatggcatgcggtactggaacatgacggtgcagtggtggctggcgcagtatatctacaagagcgcacctgcccgttcctatgtcctgcggtgagtgagcccgcccagtctcaggtgacactgcagaactacatctcccagcaggccccagggtagcctgcagcgtccctggctggcccctgcccccggaggctcatgggaattgtagtttgtttagcctggttttgccctgcctctaattatagtggcagcatgccggtgtaaaatcgttccccctctcggggcctcagttgctacttctgtaaagtcagcctcactcagcagaagcaatgtactgagtcctgtggactcaatagccagccttcctggaatcttggccgtccaggttatggagaaaccttgaggagttagttgacctcttagttgcctcaagtgttgaatggagtgaatgctatttattactggtttcataggtagatagaaggactaaatgtgataaaatgtgaaatgtattt

SEQ ID NO: 10081 - DNA, 600 bp, Homo sapiens
ggagggaaattacatgctgacatgttctgccacaggcggcgtcatctacaagctgggtggcgatgagaaggttctggagagctgcttgagcctaggtggccaccgagcccctgtggtcaccgtggactggagcactgccatggactgtgggacctgcctcaccgcctccatggatggcaagatcaagctgaccaccctcctggcccataaagcctgatgacttgccccaagggccacccgaggaagcagtattatctgcggtggggggaggagatataggacaggaaaaccacgtgctccactccagctccctgccagtgcagtgactctgcagggaaagactggcaaggaggctcaggtgcttccatctgtggtgactggaatgggacccacgtggagtaggtgacatatgcttcccagagactggtattgtggctgtgccaggagtacatgtgagactatgggaggaaagctccggaagaaggagaaacattgcagtggctactgtgttggcccagtagaaattgacagtattttgtatatatgtgcccatttatctttttcttttttaaaaaaagagaatactcttgtggtcccctg

SEQ ID NO: 10082 - DNA, 1400 bp, Homo sapiens
cttctctcaggccttcgggccccctggttaaactgcaccaagggtgtttcctgttggggtgtgtctcaggcaggcagctgcgtcttgttggtgataacctctgctgggaggttactttgttgcctagaaagttctggaatccacaaccaggggctggcactggagccagcagcttggccgagtcacaggtgacccgtggccctcacgtctctggttttacctttccttacttcattcattcactcacccagtccttacgaatcaccgaggaacactgggctgagcacatgacagggagcctggagccccggggcctccagcgaggcctgagaagggtggttcgggtaaccactgtgggctctctcccatcacagaaggtggacagggcctacccaggtggaggggaccaccctgcgatcaggtgtttgcgacaggggttgggccagctgaggcaagctgtcttttttcccttttctttttaatagatgcaacatttttataataatcctagagaccttttttctaccaaagatcacagaccagaaaaagttccatctaaaatatcatgcccaggaaagcacatgggatcaaaagtaaaatagcatcatgtgtgatctcgtcttccagcgtgccgctcagttccccgaatccgtgtgcacacgtgtgatctcgtcttcagtgtgccgctcagttccctgaatccgtgtgcacactgcgtatgtgtacgcgcagcatgctatactgaactcaacaagatcttggctgtacataaatatttgtaaaagagaccctttgcacctttttactgtaatgttgagacttcattacttaaatgttctacggaaggttctggtgtggttgttggagccggagggagcgtgtcagcacgtgctgagggcatggggcctgccccctgggcacccatccacaagctgggccacggagctccagcttctcaggacaaagccccggggctggcgcatcctgagggtctctgggggtgtttgccaggctcctgggatgggccgctttcagaagccctgcagtgcctccagatggaaaggcgggcccggcctccggttgggtctgcattttggagagtccacaccacggaccaggttttcccccaaggcttggctttgtgtagctactaacttcttggggcattctgagagtgtgggcagagagaattatgtggcctcatcctcccccaaggctgtgcttgcagcccgggcaccttcccactttctagctctggagaggttggattttgcttttgtaaacacatgaatccttatgataaaagtctgtcagtcaaaaatacatttataaattatttaatgccagtcctcatgtaacctcaggtatcttcagcttgtggagaataaatctggtttaat

SEQ ID NO: 10083 - DNA, 1256 bp, Homo sapiens; identical to SEQ ID NO: 4848

SEQ ID NO: 10084 - DNA, 600 bp, Homo sapiens
aggccgcctgccgccaggccgcgcccctggagcccgcgcctcccagctgctgcgccctcgagcagcggctgccggcctcgtcgtcctccacctacggggatgacctggcttctgtggccccggggcctttacagcaggacgtgaagctgaatggagccggccttgaggtggaggactcagaccctgagcctgaaggggaggcggaggacagggtcacagccgggcctcggcctcctgtgagcagcgggaacctggaaagcagcacccagagcgccagcccgttccacagatggggccagactccggcccctcagagacatagtggccgggtggtgggggcccacaggccagggcttctgagccctgtcttcgtctacagcccagcctttcagagtggtggggaggagggtttatggatgtcaaacacctgcaccttgagataatcctacaaccacatgcagttgtgggaccgcagtttggtcctggggaccattcatacccacacacccagcttgtgcctgtggttaacatctcagaaaactctggtaaatgatcactccaggatattgacaagaatacacgttactgatcttactcaca

SEQ ID NO: 10085 - DNA, 977 bp, Homo sapiens; identical to SEQ ID NO: 4850

SEQ ID NO: 10086 - DNA, 1400 bp, Homo sapiens
aatgaaggctgaaaggatgactttcgcttaactctttcctgctgcaccaaagtagttcacggtatttgccccaagctaagctttccccactgcaggtgtgagatgtggatcccttagcccttggggcagagaccccaggccagttacctctgaccctgggccctttaaatataggctgtttcaatattgtgtgtcctggcttaacctgcatgttctggttgtctgtgtcagctgtgacaggcccttagctgctccatgcatgctcagctcacccctgctctgccctctgccctaggaagatctttgcctttgacctggatgccaggcggctggcatccatggccacgctgctggcctgggctggcgtctcctgctgtgagctggctgaggaggacttcctggcggtctcccccttagatccgcgctatcgtgaggtccactatgtcctgctggatccttcctgcagtggctcgggtgagatggtgagaaggcgtggctgagggactcagaggtccacagcagcttagacctggagtcatctgttttggtcttagttctgacactttaatgggcttgggaccctggagcaaaagttctcctctgtgaagcgaggatttcaggagcgaggatttcaggactgaggcagcctgtgaagctgtgtaaccgagacacgcttttccttaggtatgccgagcagacagctggaggagcccggggcagggacacctagcccggtgcgtctgcatgccctggcagggttccagcagcgagccctgtgccacgcgctcactttcccttccctgcagcggctcgtctactccatgtgctccctctgccaggaggagaatgaagacatggtacaagatgcgctgcagcagaacccgggcgccttcaggctagctcccgccctgcctgcccggccccaccgaggcctgagcacgttcccgggtgccgagcactgcctccgggcttcccccaagaccacgcttagcggtggcttcttcgttgctgtaattgaacgggtcgagatgccgacgtgagtgagtgggggcatgcttgggaggcgcaggatggtactggcacatctaacatctacatttctctagctcagcctcacaggccaaagcatcagcaccagaacgcacacccagcccagccccaaagagaaagaagagagcaaaaagctgcagccggtgcttgcacaccgccttgcacatagcagaggctccgggctcactccttcctggtgggaaaggaagatgcctgtcctctccgtggaagaccctgggccctcaccgcaggcagcagtttgcgttttgaaaggttattgggtcccttcctcgggctgtgttcttgctggtgagcaaaagtgttgcctgcagaaataaaatgcagaacgt

SEQ ID NO: 10087 - DNA, 600 bp, Homo sapiens
gtggaagctaacaagaacccgtggagttgcatcttctgcaggataaagactattcaggaaagatgcccagaaagccaatcaggtcatcaggaatctgaagtcctgatgaggcagatgctgcctgaggagcagttgaaatgtgaattcctcctcttgaaggtctactgtgattcgaaaagctgctttttcgcctcagaaccgtattataacagagaggggtctcagggcccacagaagcccatgtggttaaacaaagtcaagacaagtttgaatgagcagatgtacacccgagtagaagggtttgtgcaggacatgcgtctcatctttcataaccacaaggaattttacagggaagataaattcaccagactgggaattcaagtacaggacatctttgagaagaatttcagaaacatttttgcaattcaggaaacaagcaagaacattataatgtttatttagccattcttatctcctcccttcagatcctctggcagctagctacgcaatgtgcctgtggtcccactaatctgtgactgctcctgtggaaactccacatcacaattctccaaaatttatcattgccattttaaaaccgtc

SEQ ID NO: 10088 - DNA, 600 bp, Homo sapiens
attctactttggaaaaacacagtgggaaaagaagaaaaaagagaaggcatagatctaaagtaaatggtctccaaagagggagaaagaaagacagacctagaaaacatttaactctgaataacaaagtccaaaagaaaagatggcaacaaagaggaagaaaagccaacactagacctttgaaaagaagaagaaaaagaggtccaagaattcccaaagatgaaaatattaattttaaacaatctgaacttcctgtgacctgtggtgaggtgaagggcactctatataaggagcgattcaaacaaggaacctcaaagaagtgtatacagagtgaggataaaaagtggttcactcccagggaatttgaaattgaaggagaccgcggagcatccaagaactggaagctaagtatacgctgcggtggatataccctgaaagtcctgatggagaacaaatttctgccagaaccaccaagcacaagaaaaaaggtgatgatcaagtgatcttctgccaatgtctcgtctattatgttgttgattttctatctctgtggacttacagtctttaaattgacccatcatcataaaatttgattttataata

SEQ ID NO: 10089 - DNA, 600 bp, Homo sapiens
tgaggatggtagttttttcaccttcagttgtctctgatgtagcttatacaaaacatttgttgttctgttaactgaatgccactctgtaattgcaaaaaaaaaaaacagttgcagctgttttgttgacattctgaatgcttctaagtaaatacaatttttaaaaaaccgtatgagggaactgtgtagacaaggtaccaggtcagtcttcttccatgtctattagctccacaaagccaatctcaatccctcaaaacaatcttgtcatacttgaaaatatgacactctagtcaaagccttggtaaaataatcagtgtttccaatctgtcctgttacaaaagaaacagattattattgaacttatgcaaataaccattgtcataagaatgtttatgaatagtttccaaattatggcaaattcatgtagagagagaaaagtaactgttttggttttgctcacaaaagtctactttacctaagggctgtcagatataagtaacttaaaagaaagagaagttttcttgacttttgaaaacaaaatatgaaaagaatcggcaatgtttcaaacaaaaagtcataaaagtcactttattcctccatcaa

SEQ ID NO: 10090 - DNA, 1400 bp, Homo sapiens
atgagaaccccacctacaaatacctggagcagatgcagatttaggtggcagggagcgcggcagccctggcggagggatgcaggtgggccggaagatcccacgattccgatcgactgccaagcagcagccgctgccaggggctgcgtctgacatcctgacctcctggactgtaggactatataaagtactactgtagaactgcaatttccattcttttaaatgggtgaaaaatggtaatataacaatatatgatatataaaccttaaatgaaaaaaatgatctattgcagatatttgatgtagttttcttttttaaattaatcagaaaccccacttccattgtattgtctgacacatgctctcaatatataataaatgggaaatgtcgattttcaataatagacttatatgcaggctgtcgttccggttatgttgtgtaagtcaactcttcagcctcattcactgtcctggcttttatttaaagaaaaaaaaggcagtattccctttttaaatgagctttcaggaagttgctgagaaatggggtggaatagggaactgtaatggccactgaagcacgtgagagaccctcgcaaaatgatgtgaaaggaccagtttcttgaagtccagtgtttccacggctggatacctgtgtgtctccataaaagtcctgtcaccaaggacgttaaaggcattttattccagcgtcttctagagagcttagtgtatacagatgagggtgtccgctgctgctttccttcggaatccagtgcttccacagagattagcctgtagcttatatttgacattcttcactgtctgttgtttacctaccgtagctttttaccgttcacttccccttccaactatgtccagatgtgcaggctcctcctctctggactttctccaaaggcactgaccctcggcctctactttgtcccctcacctccaccccctcctgtcaccggccttgtgacattcactcagagaagaccacaccaaggaggcggccgctggcccaggagagaacacggggaggtttgtttgtgtgaaaggaaagtagtccaggctgtccctgaaactgagtctgtggacactgtggaaagctttgaacaattgtgttttcgtcacaggagtctttgtaatgcttgtacagttgatgtcgatgctcactgcttctgctttttctttctttttattttaaatctgaaggttctggtaacctgtggtgtatttttattttcctgtgactgtttttgttttgtttttttcctttttcctcccctttgaccctattcatgtctctacccactatgcacagattaaacttcacctacaaactccttaatatgatctgtggagaatgtacacagtttaaacacatcaataaatactttaacttcc

SEQ ID NO: 10091 - DNA, 600 bp, Homo sapiens
atcggtgccgaagagaaagtgattaacagtaagaataaagtggatgaaaacatggtcattgacgagactctggatgttaaggaaatgattttcaatgccgagagagttggaggcctcgaggaagagcgggaatccgtgggcccactgcgggaggacttcagtctgagtagcagtgctctcattggcctgctggtcatcgcagtggccattgccacggtcatcgtcatcagcctggtgatgctgaggaagaggcagtatggcaccatcagccacgggatcgtggaggttgatccaatgctcaccccagaagagcgtcacctgaacaagatgcagaaccatggctatgagaaccccacctacaaatacctggagcagatgcagatttaggtggcagggagcgcggcagccctggcggagggatgcaggtgggccggaagatcccacgattccgatcgactgccaagcagcagccgctgccaggggctgcgtctgacatcctgacctcctggactgtaggactatataaagtactactgtagaactgcaatttccattcttttaaatgggtgaaaaatggtaatataacaatatatgatatat

SEQ ID NO: 10092 - DNA, 600 bp, Homo sapiens
gtaccagctcaagccttccagctctccggtcatctttgcaggcggtcaggcctatacccttcaaggacagtttgccattccacagccagatttgaccatgctgcaccagttggcaatgcaacagtctcattttcccatgacgcatggcaacactggattcagtgcaggtttggatacatctgctcagactacttctcatgaacttaccattccaaacgatttgattggctgcataatcgggcgtcaaggcgccaaaataaatgagatccgtcagatgtctggggcacagatcaaaattgcgaacccagtggaaggatctactgataggcaggttaccatcactggatctgctgccagcattagcctggctcaatatctaatcaatgtcaggctttcctcggagacgggtggcatggggagcagctagaacaatgcagatttatccacaatccctttctgctgttcaccaccacccatgatccatctgtgtagtttctgaacagtcagcgatttcaggttttaaatagtttgtaaattttcagtttctacacactttatcatccactcgtgattttttacttaaagtgttttaattccttt

SEQ ID NO: 10093 - DNA, 1400 bp, Homo sapiens
gatgctcactagaatctctagaatttgaaatggaccctggggctttgcaaatgacttagtgactatgagaagagagacaagtcttagagctggcttttggaaaggagaaacttgcagtcagaagcccagtgtcctatgtatgcaggaagctgtgctctagcaatagacagtgttggtaatggttgtgctgtacggcgtttggggtggccccatgttccatgctcagctgaccggatgccaactcagatgaaaagaattcatggctctgggcaccccgtgaggcagtgcttgcacatggctgggagtttgtcgggattgaaccaaacctagtgcttcaaagctcctgggacacctccagtgtccagcacacattctcatacatactgcccctaatttctaaagtccctaaagcactacattctgtaaccttgtttcttttactccattcccagattagttatgcaaaattcaactgcgttctacttttagaagtgtttagggtctttattttctgttgacccttcatctgaaagattctcttcccttgttaggtacaatcactgcccccccgcttttttttttgagatggggtcttgctatgttgcccaggctggtcttaaacgcctgggctcaagcaaccctcccgcctccctgctgagattacaggtgtaagccaccataccgcaacctcaatgacacctttctgatggtctttacacagtctgtgatgtctggtggcccccctgccctggactcaataattgatagattttcctagagtaacagtatgagagctccagccattccattaaaagtattagttctgctttgagctgaaaccagttgagcctaatggaagactggatgtctttcttcttcatccaagcaccctaatgactgtttagttacatccatagatgcagacaacataacacctgtgacttacttgaattgggataagccattccagaagtagcttatcctagacttggaaataagatttttttcaccactaacttccatgcttcagagatgacattcaaagccagattcccaagtgcctgatcatacctcccagtctcaggaagatatttgcttaccccttagaccaagaatcttaagatcttccccagctatgaagcctatcttggaatgggaaaccatgaaatttgtcttttaaaagaaagggaagaaatagccttacagcccctgttcctccaagtgcacatttagccttaaaatcctgggagtcgggagacaccgtggagtcctaacatccacagtgtctgctggtcgtggtcagaaggcagtaatgcaagagtccttttgtgaagagtgtttctatgtagagatgtttatatttaagtagttcttttataaataaaagcatttctaatggc

SEQ ID NO: 10094 - DNA, 1400 bp, Homo sapiens
tcagttaatttcatatgctcctggattgatagcagtatttggcaatacctatctgtatgagaagacatttttaaagatgaaatgtgtaaaatcttattaccattagtattaatggttaatgatggttaatgataaccattaataggcaatcatttacaactgattttgatcacagggaacacttacttagaaccctgattagaggcaatgttattctcaccaaaaaaggcattacaaaaaattgggctatattttgaattttgtcaattaaaaaagcgtgggagcagtgtgaaggagaagaggcaagaacgacccctggaccgaccaaagcccgcgcgctgctgcgtcccacacccggtgcccacatcccgccgccgccgccgccgccatgcccaagagaaagactgaaggggatgctaaaggagataaagccaaggtgaaggatgaatcacagagaagatctgcgaggttgtctgctaaacctgctcctccaaagccagagcccaagcctaaaaaggcccctgcaaagaagggagagaaggtacccaaagggaaaaagagaaaagctgatgctggcaaggagcgggaaggtgctggagatcccaagtgaagtgtgtgcattttttataactgtacttctggtgactgtacagtttgaaatattctttatcaagttttataaaaatgcagaattttgttttactttttttaagctatgttgttagcacacagaacacttcattgttgtttttgggggaaggggtatgtgtcactaatagaatatctctgaagctggattgatacggggaaaacatctttcccttctagttttgagagacttcctcttggctcccaggaggagggatttcctgactttgacacacatggccaccttggcacaaaagccttgtggtatggaaaaacaaattcgtttttatgtcttcttttccctttccatctttcagcatagacttaatccccttaagcccagacatctgttgggacctgacccccggtcattggttaccagtgtgtctggcaatctggactttccagtgatgccactgagatggcacctgtcaaaagagcagtggttccatttctagattatggatcttcggataaattctgccattttcatttcacttcctgaaagtcagggttggcttgtgaaaagttgttaaacaacatgctaaatgtgaaatgttaaccctctaaactttccctgttcagagcatcagatgaggacttcattgggttttatagcggctgatttttggtagtccattgaagaagagagtttgaaagttgtatactgttaatgactgtctgcccatgtcctgcctgaaataccatgattgtttatggaaagtatctttaataaagctggatacagtttg

SEQ ID NO: 10095 - DNA, 1194 bp, Homo sapiens; identical to SEQ ID NO: 4860

SEQ ID NO: 10096 - DNA, 1304 bp, Homo sapiens; identical to SEQ ID NO: 4861

SEQ ID NO: 10097 - DNA, 600 bp, Homo sapiens
ccgtgcccgatttgaagaactgaatgctgacctgttccgtggcaccctggacccagtagagaaagcccttcgagatgccaaactagacaagtcacagattcatgatattgtcctggttggtggttctactcgtatccccaagattcagaagcttctccaagacttcttcaatggaaaagaactgaataagagcatcaaccctgatgaagctgttgcttatggtgcagctgtccaggcagccatcttgtctggagacaagtctgagaatgttcaagatttgctgctcttggatgtcactcctctttcccttggtattgaaactgctggtggagtcatgactgtcctcatcaagcgtaataccaccattcctaccaagcagacacagaccttcactacctattctgacaaccagcctggtgtgcttattcaggtttatgaaggcgagcgtgccatgacaaaggataacaacctgcttggcaagtttgaactcacaggcatgccaggaggaatgcctgggggatttcctggtggtggagctcctccctctggtggtgcttcctcagggcccaccattgaagaggttgattaagccaaccaagt

SEQ ID NO: 10098 - DNA, 1400 bp, Homo sapiens
cttcagggcttttcaacagagcacagctgcttctctcaccagtcctagaagtgggaatcctggctatatagttgggaagccactcttggctctgactgatgatataagttactcaatgaccctcttacagagccagggtaatggaagttgctctgttaaaagacatgaagtgcagtttggagtgaatgcaatatctggatgcaagctcaggttgaagaaggcagactgcagccacttgcagcaggagatttatcagactcttcatggaaggcccagaccagagtatgttgccatctttggtaatgctgacccagcccagaaaggagggtggaccaggatcctcaacaggcactgcagcatttcagctataaactgtacttcctgctgtctcataccagtttccctggagatccaggtattgtgggcatatgtaggtctcctgtccaacccgcaagctcatgtatcaggagttcgattcctataccagtgccagtctatacaggattctcagcaagttacagaagtatctttgacaactcttgtgaactttgtggacattacccagaagccacagcctccaaggggccaacccaaaatggactggaaatggccattcgacttctttcccttcaaagtggcattcagcagaggagtattctctcaaaaatgctcagtctctcccatccttatcctgtgcctcttactacttggagttctcaacctagagactatgtgaagaaaagaaaataatcagatttcagttttccctatgagaaactctgaggcagccacttatcttggctaaatagaacctcacctgctcatgaccagagagcatttaggataatagaggacctaactgaaggaatccttgtatatgaaaggagttattttagaaaagcaataaaaatattttattcatcatagctctctgctttgggctctgcaggccaccagatacacatgaggcccctacttctcaagctgggaaggccaagagccttccttcagcctttctggttatgttacacctagctgaatgtttacaaggtctggatccatcagccctcaggcacagttgggccaagcagaaagagagaaacacttctgctgtcaccttgaatgaactcaggaatagcttccctctggactgtagaggagctaactgtttggaacagaaaactgctggctgttgattttgtctggttcctttgccaacatctgggcacaccctttgcccagacacgagtggggaaagcagttctttctcctcagtttccaaagtaaatggggaatcccagctttcttttctactagcaaatgaccctaccatttatttctgcctttttcttccgttcattgtgaggaaaaataaaactggttgagagctttgttgtact

SEQ ID NO: 10099 - DNA, 1229 bp, Homo sapiens; identical to SEQ ID NO: 4864

SEQ ID NO: 10100 - DNA, 600 bp, Homo sapiens
ggccatgaagatgggtgactggaagacctgtcacagttttatcatcaatgagaagatgaatgggaaagtgtgggaccttttccccgaggctgacaaagtccgcaccatgctggttaggaagatccaggaagagtcactgaggacctacctcttcacctacagcagtgtctatgactccatcagcatggagacgctgtcagacatgtttgagctggatctgcccactgtgcactccatcatcagcaaaatgatcattaatgaggagctgatggcctccctggaccagccaacacagacagtggtgatgcaccgcactgagcccactgcccagcagaacctggctctgcagctggccgagaagctgggcagcctggtggagaacaacgaacgggtgtttgaccacaagcagggcacctacgggggctacttccgagaccagaaggacggctaccgcaaaaacgagggctacatgcgccgcggtggctaccgccagcagcagtctcagacggcctactgagctctccactctgtttcccgcctgggccatccaaccttgaagtcctaaaccacacctcagtcactaaaggtctgtttaaagtt

SEQ ID NO: 10101 - DNA, 1400 bp, Homo sapiens
gtgaagaaccaggagcggattctccgcgaggtgtgcagagtgctgagaccgggaggggctttctatttcatggagcatgtggcagctgagtgttcgacttggaattacttctggcaacaagtcctggatcctgcctggcaccttctgtttgatgggtgcaacctgaccagagagagctggaaggccctggagcgggccagcttctctaagctgaagctgcagcacatccaggccccactgtcctgggagttggtgcgccctcatatctatggatatgctgtgaaatagtgtgagctggcagttaagagctgaatggctcaaagaatttaaagcttcagttttacatttaaaatgctaagtgggagaagagaaaccttttttttggggggcggtttttttggtttgttgttggttttttttttttttttggcgggaagaaagagttttgctcttgttgcccaggctggagtgcaatgacgtgatctccgctcactgcaacctccacctcgcgggtttaagcgattcttctgcctcagcctccctggtgcctgtaatcccaggtacttggaaggctgaggcaggagaatctcttgaacccagaaggcgaaggttgcagtgaaccgagatcatgccattgtactctagcctgggtgacaagagcaagactccgtctcaaaaaaaaaaaaaaaaaaaaaaagaagtagagacagggagacagggtctcactgtgttgcctaggccggtcttgaactcctgggctcaagtgattctcccaccttgacctcctaaattgttgggattacaggtgtgagacagtgcacctggccgaaatagctcaagtttctgaaaaacaaatctgaatctatttgttattcttagcgtcactggtctggctttcagaattaacatacaaggttgccacacctagttctgcccagctttatgtcttttattccagtattccaccaaagtttgttttcctgcattccagttctcaagtcttaagataaagattgtacttgacagtttagtatatccataaaactatttgaggtggttaaggttcttgggttcattttccttaatactttgctgaatattgtagattgtaggcaatgaaaaagtctactaaattaggaaaaccttgaataattaggtatcctaggtaagagcccctaaacatcaagcaatctgtgagtctgtaaagaaataaatattttttggattattcttatctaattccacccctgttggaagatgatttctttgttctttgcaactatggaagctgtgaaaatcatcacaagtgcctctgaaagcgagtgttaggttggttagagggtttaatattttctgcaatggtttgtaggaattttaataaatgtagtatattttctgag

SEQ ID NO: 10102 - DNA, 1400 bp, Homo sapiens
tcttctgcctcagcctccctagtagctgggattacaggtgcccaccaccatgcccagctaatttgtatttttagttgagacagggtttcactacgttggccaggctggtcttgaactcctgatctcaggcaatccacccacctcagcctcccaaagtgctgggatgacaggcgtgagcaaccgcacccagcttaaggtttttttgttttgttttgagacggagttttcgctcttgttgcccaggctggagtgcaatgctgtgatctcagcttaccacaacctccacctcccgggttcaagtgattcacctgcctcagcctcctgagtagctggtattacaggcatgcgtcaccacgccggctaattttgtacttttagtagagatggtgtttccccacgttggtcagtctggccaacatggcaaaaccctactaaagatacaaaaaaaaaaaaaaattagccaggcgtggtggtgggtgcctgtaatcccaggtacttggaaggctgaggcaggagaatctcttgaacccagaaggcgaaggttgcagtgaaccgagatcatgccattgtactctagcctgggtgacaagagcaagactccgtctcaaaaaaaaaaaaaaaaaaaaaaagaagtagagacagggagacagggtctcactgtgttgcctaggccggtcttgaactcctgggctcaagtgattctcccaccttgacctcctaaattgttgggattacaggtgtgagacagtgcacctggccgaaatagctcaagtttctgaaaaacaaatctgaatctatttgttattcttagcgtcactggtctggctttcagaattaacatacaaggttgccacacctagttctgcccagctttatgtcttttattccagtattccaccaaagtttgttttcctgcattccagttctcaagtcttaagataaagattgtacttgacagtttagtatatccataaaactatttgaggtggttaaggttcttgggttcattttccttaatactttgctgaatattgtagattgtaggcaatgaaaaagtctactaaattaggaaaaccttgaataattaggtatcctaggtaagagcccctaaacatcaagcaatctgtgagtctgtaaagaaataaatattttttggattattcttatctaattccacccctgttggaagatgatttctttgttctttgcaactatggaagctgtgaaaatcatcacaagtgcctctgaaagcgagtgttaggttggttagagggtttaatattttctgcaatggtttgtaggaattttaataaatgtagtatattttctgagatgattttgtaaaagtactattttaaatatcaaatcaaccaataaattcacatttgtgttaggaacag

SEQ ID NO: 10103 - DNA, 600 bp, Homo sapiens
ttttctattgtctcccaaagaattcacatcaaaaaaacagctttgaactcccccttcaaaggaaacagtcgactttcataattagcatctaccattatccccaaatcttattttattcattgacttgaaattttttccaattgcttttttttttttttttttaaggttaagagcagaggtttactaggccaaagaaagagaatagctctctgttgcagagaggggtcctggagaaatgggttaccccagttgtcttatttaaatggttacccatcagattttaattttatcttctctttgagagcttggtaataagaagcacttaaatcactccaaagaagactttaaaaagggagcagtgaaaaggtcttaataatttattgattgaattaagaaatactagctaattaagaatctgagtctaaacagcacagattttttctttctgcttttaaattgtgttttaaaaaaagagacagggggctgggcgtggtggctcacgcctgtaatcctagcactttgggaggccgaggcgggtggatcacgaggtaggagttaaagaccagcctggccaacatggcaaaaccctactaaagatac

SEQ ID NO: 10104 - DNA, 1400 bp, Homo sapiens
gctgagcgatcggtagccaagctggaaaagacaattgatgacttggaagataaactgaaatgcaccaaagaggagcacctctgtacacaaaggatgctggaccagactctgcttgacctgaatgagatgtagaatgccccagtcccaccctgctgctgctcctccctgtgacccagactccgcctgaggccagcctgccagaagctgacctttaactgagggctgatctttaactggaaggctgctttctcctttcaccgccccctccttccctgtgtctttttcgccaaactgtctctgccttttcccggagaatccagctgggctagaggctgagcacctttggaaacaacatttaagggaatgtgagcacaatgcataatgtctttaaaaagcgtgttgtgatgtacacattttgtaattaccttttttgttgttttgtagcaaacatttgtaaaacattccaaataattccacagccctgaagcagcaatcaaatccctttctcacttttggaaggtgacttttcaccttaatgcatattcccctctccatagaggagaggaaaaggtataggcttgccttgctgagagccaaacagagcccagggagactccactgtgggaaacctcattgctctgtacaaagtactagctaaaccagaaaggtgattccaggaggagttagcccaacaacaacaaaaacaaaaatgtgctgttcaagttttcagctttaagatatctttggataatattatttctattttttatttttttcattagaaatgatcaaattaagatggttaagacctctgagaccaaaactttctctcatctctaccccctcccaactgctcacagaacggatcatgtcccccttatgttgaggtgaccacttaattgctttcctgcctccttgaaagaaagaagattgtgttttctccactgatttagccatgtgaaactcatctcattacccttttctgggtttcaagctgctgtctctagaagtgccatctcattgtgcttcgtatcagtcagtgctggagaaatcttgaatagcttatgtacaaaactttttaaattttatattattttaaaactttgcttctttgggtttgtggcaccctggccaccccatgtggctgtgacagcctctgcagtccgtgggctggcagtttgctgatctgttaaaatttctttccctacccagtccccattttctggtaaggtttctaggaggtctgttaggtgtacatcctgcagcttattggcttaaaatgtactctccttttatgtcgtctctttggggctgattgggagaaagagaaatcaatagtgcaactgttttgatactgaatattgacaagtgtctttttgaaataaagaaccagtccctcc

SEQ ID NO: 10105 - DNA, 1400 bp, Homo sapiens
agacgcgtagcagcacacacttcacaaagccaagcctaggccgccctgagcatcctggttcaaacgggtgcctggtcagaaggccagccgcccacttcccgtttcctctttaactgaggagaagctgatccagtttccggaaacaaaatccttttctcatttggggaggggggtaatagtgacatgcaggcacctcttttaaacaggcaaaacaggaagggggaaaaggtgggattcatgtcgaggctagaggcatttggaacaacaaatctacgtagttaacttgaagaaaccgatttttaaagttggtgcatctagaaagctttgaatgcagaagcaaacaagcttgatttttctagcatcctcttaatgtgcagcaaaagcaggcgacaaaatctcctggctttacagacaaaaatatttcagcaaacgttgggcatcatggtttttgaaggctttagttctgctttctgcctctcctccacagccccaacctcccacccctgatacatgagccagtgattattcttgttcagggagaagatcatttagatttgttttgcattccttagaatggagggcaacattccacagctgccctggctgtgatgagtgtccttgcaggggccggagtaggagcactggggtgggggtggaattggggttactcgatgtaagggattccttgttgttgtgttgagatccagtgcagttgtgatttctgtggatcccagcttggttccaggaattttgtgtgattggcttaaatccagttttcaatcttcgacagctgggctggaacgtgaactcagtagctgaacctgtctgacccggtcacgttcttggatcctcagaactctttgctcttgtcggggtgggggtgggaactcacgtggggagcggtggctgagaaaatgtaaggattctggaatacatattccatgggactttccttccctctcctgcttcctcttttcctgctccctaacctttcgccgaatggggcagcaccactgacgtttctgggcggccagtgcggctgccaggttcctgtactactgccttgtacttttcattttggctcaccgtggattttctcataggaagtttggtcagagtgaattgaatattgtaagtcagccactgggacccgaggatttctgggaccccgcagttgggaggaggaagtagtccagccttccaggtggcgtgagaggcaatgactcgttacctgccgcccatcaccttggaggccttccctggccttgagtagaaaagtcggggatcggggcaagagaggctgagtacggatgggaaactattgtgcacaagtctttccagaggagtttcttaatgagatatttgtatttatttccagaccaataaatttgtaactttgc

SEQ ID NO: 10106 - DNA, 1400 bp, Homo sapiens
acagcacaggaccaccaggaggctggtcgtgctcgccacccctcaggtctcagactccatgagaaaagttttagagacagtctttgatgaagtcatcatggtagatgtcttggacagtggcgattctgctcatctaaccttaatgaagaggccagagttgggtgtcacgctgacaaagctccactgctggtcgcttacacagtattcaaaatgtgtattcatggatgcagatactctggtcctagcaaatattgatgatctttttgacagagaagaattgtcagcagcaccagacccagggtggcctgactgcttcaattccggagtcttcgtttatcagccttcagttgaaacatacaatcagctgttgcatcttgcttctgagcaaggtagttttgatggtggggaccaaggcatactgaacacattttttagcagctgggcaacaacagatatcagaaaacacctgccgtttatttataacctaagcagcatctctatatactcctacctcccggcatttaaagtgaagatgtctcaggagccatatcacatctgtcccttggggagatcccagctatggcacagccgtttgtatcctcggaagaacggaaggaacgatgggaacagggccaggctgattatatgggagcagattcctttgacaacatcaagaggaaacttgacacttacctccagtagaaacactgcatttttctgtgaacacatccacttcacaagccttgtttctgatacttagtatctagagctgggttgagaaaagtctgttacagttgctagaggttttcattaaaacttatcagatgagaggcttttttaggataagaggtgagaactgggcaaaagttgtgaagcagcaattctgttatatggacagtgttctgctttttaatcctatttagcttgtttcagaaattctcacttttgttgactgccaacatacaaagtaagggaaactcaagatattaagatggctgtatcagttcttaaaatctgcagagcctggttcaaaatcagtcactcccttcagaagcagacatggcatctgttccttgcttgcttgttggttgtgtacctttcacgagacctgaattttagaattgcccagtgctgccagagtgagtgagtgtaattctcctttcaggtaaagataggctatctcaacactgctgagtgattcataaacatatcaaccaatagcattaacccattttatttcctgtccttagtgtctgaagatgctcaccagttttctgtgtacagtaaggcagcatgctaaaatgcttttgttcagttctgtatatttgaaaatagcagtgtgttctctgatggttacctgcagtggcaccctgtacaaaaaataaaagacttattgctgt

SEQ ID NO: 10107 - DNA, 1376 bp, Homo sapiens; identical to SEQ ID NO: 4872

SEQ ID NO: 10108 - DNA, 600 bp, Homo sapiens
caggcctgggtgctggggagttcctgagggcatgggtggggcaggagtgagtgcctcgtgatcccagcctcagtttctctcttgtcactttctcaaacctgcaggtctcagggccccgggctcctcctgggcaggatggggggcaggggctgggccttggggtggtgctggctctgatgattccagagcctgtatccaccttctgggctcctggccagcaccccacccccaggagccagggacaggtggcatgtgttggggtcgggggatggcccccatctcgaagtgttctggaatttgggggcaacccttgcccagcccagccatcaagaacttctgatctcctgcccaccaggaggggacttagccatggacttggccagtaggcctggggagggagggctttggcagccaaagtccactggccctgccgtgcccctgagtaggaaactgtcccctaggggctgggtggccccactgatatatgcaaacccgccggtccgagccctgttcctgcctgtgctcctctgtgcccaggctggctctcccccaaccctagcatgtatactctgccacggacgtcccgtgggccatgattgt

SEQ ID NO: 10109 - DNA, 1400 bp, Homo sapiens
tttaatctgtgaaaatggagagctggcttcagaaaattaatcacatacaatgtatgtgtcctcttttgaccttggaaatctgtatgtggtggagaagtatttgaatgcatttaggcttaatttcttcgccttccacatgttaacagtagagctctatgcactccggctgcaatcgtatggctttctctaacccctgcagtcacttccagatgcctgtgcttacagcattgtggaatcatgttggaagctccacatgtccatggaagtttgtgatgtacggccgaccctacaggcagttaacatgcatgggctggtttgtttcttgggattttctgttagtttgtcttgttttgctttccagagatcttgctcatacaatgaatcacgcaaccactaaagctatccagttaagtgcaggtagttcccctggaggaaataatattttcaaactgtcgttggtgtgatactttggctcaaaggatctttgcttttccattttaagcttctgttttgagttttgccctggggcttgaatgagtcccagagagtcgttcggatggtgggaggctgcctaggaggcagtaaatccagtcacagtgcctgggaggggcccatccttccaaaatgtaaatccagtcgcggtgtgaccgagctggctaacaggcttgtctgcctggttttcctcctacacgtggacattattctcctgatcctcctacctggtccaccccagggctaccggaaggtaaaatcttcacctgaaccaattatgagcagtctccttactgaaggtacagccggatacgtggtgcccccggggctggtgttggcagccggggggaggtgcctgagggtccccacggttcctttctgcttttctgaatgcatcaagggtacgagaacttgccaatgggaaattcatccgagtggcactggcagagaaggataggagtggaatgcccacacagtgaccaacagaactggtctgcgtgcataaccagctgccaccctcaggcctgggccccagagctcagggcacccagtgtcttaaggaaccatttggaggacagtctgagagcaggaacttcaagctgtgattctatctcggctcagacttttggttggaaaaagatcttcatggccccaaatcccctgagacatgccttgtagaatgattttgtgatgttgtgatgcttgtggagcatcgcgtaaggcttcttgcttatttaaactgtgcaaggtaaaaatcaagcctttggagccacagaaccagctcaagtacatgccaatgttgtttaagaaacagttatgatcctaaactttttggataatcttttatatttctgacctttgaatttaatcattgttcttagattaaaataaaatatgctattgaaact

SEQ ID NO: 10110 - DNA, 901 bp, Homo sapiens; identical to SEQ ID NO: 4875

SEQ ID NO: 10111 - DNA, 1303 bp, Homo sapiens; identical to SEQ ID NO: 4876

SEQ ID NO: 10112 - DNA, 1303 bp, Homo sapiens; identical to SEQ ID NO: 4876

SEQ ID NO: 10113 - DNA, 1400 bp, Homo sapiens
ttgaagcagttgtccttgtgagaaccggtctttgcctttagctcatgtcgtgtttcacagcaaagagggtacagaaccatcactggtccaggttaatgtacaaaattttctggcaatgcctgattaaaaaaataaaattggcttgttgagaacagctgttttcgatttctaatgtgaagcaagacagagcactgctgtaaatgtctagcagcagattttttttttattggtacatattatccttcaaatctgagaatttggactaactgcaccaaagaaccctctaatttggtccctggcacatgcatacttgtcaatgtttttattcttttacaagacctgcattttatttgaattacccgaatagcaatatgtaaaatacaagtgacaaaatgtgatgagagcttcttgaaccggtaaactagtacaggtctgagaaagacatattagaagaatcattatacttccttgaattatatttattttcatgtttctctaatgcaaagaatgtttcatcaaatgtatattttctgttgcttactgtttgctctgagaagaagctgctgtttcaaagatggacctctgagtagctaattgattcaagtagtttttttatgttgacacattattactgctgttagcagtcgttttcaccaggtacttacagagcagatttcatacatcattcattcaagggctaaatttatattttttggaaatcatggcaactacacaggatgttgcttaccaggacggagttttggtatcttagtactgaagttagcactatgtttacatgcaaaagattaaggaaaaaacccttaaagtggacaggtatccaaagttcattttctgtgactcatcaaagtgacaaaagacttgtaacaactttgcctggacttttttcattttacaacagttcatccattcacaatgattttgttctctgctccatattttttaatcccttaagcatttgatgaaacactctttagtgctatatgcattttcttacttttgttaaaaatgtgacagttgtcaaaaaatgcactaaaatgtaaatggagattgaacaagttcactttccagcttataggcaactttatacagacttgaacattttctccagttgtttagtaaaagtgaaagagaaagggtttttcctgccacaggatataacttttttttatataacaagcataacacaccactgcttttggtggaaaagtgcagaatagtatgtaccttttatgaagaaaaatgtaatttacaatattcagtgagaatgttactgctgattttcttttccaaggtgtagaatattctttgatttatagaattcatttttgacccagatgatggttcctttacagaacaataaaatggctgaacattttcac

SEQ ID NO: 10114 - DNA, 1400 bp, Homo sapiens
ggatgccagcagcaccctacccaatgcagtacccaccaccttacccagcccagcccatgggcccaccggcctaccacgagaccctggctggaggagcagccgcgccctaccccgccagccagcctccttacaacccggcctacatggatgccccgaaggcggccctctgagcattccctggcctctctggctgccacttggttatgttgtgtgtgtgcgtgagtggtgtgcaggcgcggttccttacgccccatgtgtgctgtgtgtgtccaggcacggttccttacgccccatgtgtgctgtgtgtgtcctgcctgtatatgtggcttcctctgatgctgacaaggtggggaacaatccttgccagagtgggctgggaccagactttgttctcttcctcacctgaaattatgcttcctaaaatctcaagccaaactcaaagaatggggtggtggggggcaccctgtgaggtggcccctgagaggtgggggcctctccagggcacatctggagttcttctccagcttaccctagggtgaccaagtagggcctgtcacaccagggtggcgcagctttctgtgtgatgcagatgtgtcctggtttcggcagcgtagccagctgctgcttgaggccatggctcgtccccggagttgggggtacccgttgcagagccagggacatgatgcaggcgaagcttgggatctggccaagttggactttgatcctttgggcagatgtcccattgctccctggagcctgtcatgcctgttggggatcaggcagcctcctgatgccagaacacctcaggcagagccctactcagctgtacctgtctgcctggactgtcccctgtccccgcatctcccctgggaccagctggagggccacatgcacacacagcctagctgcccccagggagctctgctgcccttgctggccctgcccttcccacaggtgagcagggctcctgtccaccagcacactcagttctcttccctgcagtgttttcattttattttagccaaacattttgcctgttttctgtttcaaacatgatagttgatatgagactgaaacccctgggttgtggagggaaattggctcagagatggacaacctggcaactgtgagtccctgcttcccgacaccagcctcatggaatatgcaacaactcctgtaccccagtccacggtgttctggcagcagggacacctgggccaatgggccatctggaccaaaggtggggtgtggggccctggatggcagctctggcccagacatgaatacctcgtgttcctcctccctctattactgtttcaccagagctgtcttagctcaaatctgttgtgtttctgagtctagggtctgtacacttgtttataataaatgcaatcgtttgg

SEQ ID NO: 10115 - DNA, 1400 bp, Homo sapiens
ctcaacaggcctctgcccctttctgcttgcctgccactcacacggcagcccaccatgctcacagccaaccagggtcctctctgctttcaggaggagcagccgcgccctaccccgccagccagcctccttacaacccggcctacatggatgccccgaaggcggccctctgagcattccctggcctctctggctgccacttggttatgttgtgtgtgtgcgtgagtggtgtgcaggcgcggttccttacgccccatgtgtgctgtgtgtgtccaggcacggttccttacgccccatgtgtgctgtgtgtgtcctgcctgtatatgtggcttcctctgatgctgacaaggtggggaacaatccttgccagagtgggctgggaccagactttgttctcttcctcacctgaaattatgcttcctaaaatctcaagccaaactcaaagaatggggtggtggggggcaccctgtgaggtggcccctgagaggtgggggcctctccagggcacatctggagttcttctccagcttaccctagggtgaccaagtagggcctgtcacaccagggtggcgcagctttctgtgtgatgcagatgtgtcctggtttcggcagcgtagccagctgctgcttgaggccatggctcgtccccggagttgggggtacccgttgcagagccagggacatgatgcaggcgaagcttgggatctggccaagttggactttgatcctttgggcagatgtcccattgctccctggagcctgtcatgcctgttggggatcaggcagcctcctgatgccagaacacctcaggcagagccctactcagctgtacctgtctgcctggactgtcccctgtccccgcatctcccctgggaccagctggagggccacatgcacacacagcctagctgcccccagggagctctgctgcccttgctggccctgcccttcccacaggtgagcagggctcctgtccaccagcacactcagttctcttccctgcagtgttttcattttattttagccaaacattttgcctgttttctgtttcaaacatgatagttgatatgagactgaaacccctgggttgtggagggaaattggctcagagatggacaacctggcaactgtgagtccctgcttcccgacaccagcctcatggaatatgcaacaactcctgtaccccagtccacggtgttctggcagcagggacacctgggccaatgggccatctggaccaaaggtggggtgtggggccctggatggcagctctggcccagacatgaatacctcgtgttcctcctccctctattactgtttcaccagagctgtcttagctcaaatctgttgtgtttctgagtctagggtctgtacacttgtttataataaatgcaatcgtttgg

SEQ ID NO: 10116 - DNA, 1330 bp, Homo sapiens; identical to SEQ ID NO: 4881

SEQ ID NO: 10117 - DNA, 1400 bp, Homo sapiens
gtgtcgtctgcatcctggtgtggctgctggccttctgcgtgtctctgcctgacacctactacctgaagaccgtcacgtctgcgtccaacaatgagacctactgccggtccttctaccccgagcacagcatcaaggagtggctgatcggcatggagctggtctccgttgtcttgggctttgccgttcccttctccattatcgctgtcttctacttcctgctggccagagccatctcggcgtccagtgaccaggagaagcacagcagccggaagatcatcttctcctacgtggtggtcttccttgtctgctggctgccctaccacgtggcggtgctgctggacatcttctccatcctgcactacatccctttcacctgccggctggagcacgccctcttcacggccctgcatgtcacacagtgcctgtcgctggtgcactgctgcgtcaaccctgtcctctacagcttcatcaatcgcaactacaggtacgagctgatgaaggccttcatcttcaagtactcggccaaaacagggctcaccaagctcatcgatgcctccagagtctcagagacggagtactctgccttggagcagagcaccaaatgatctgccctggagaggctctgggacgggtttacttgtttttgaacagggtgatgggccctatggttttctagagcaaagcaaagtagcttcgggtcttgatgcttgagtagagtgaagaggggagcacgtgccccctgcatccattctctctttctcttgatgacgcagctgtcatttggctgtgcgtgctgacagttttgcaacaggcagagctgtgtcgcacagcagtgctgtgcgtcagagccagctgaggacaggcttgcctggacttctgtaagataggattttctgtgtttcctgaattttttatatggtgatttgtatttaaattttaagactttattttctcactattggtgtaccttataaatgtatttgaaagttaaatatattttaaatattgtttgggaggcatagtgctgacatatattcagagtgttgtagttttaaggttagcgtgacttcagttttgactaaggatgacactaattgttagctgttttgaaattatatatatataaatatatataaatatataaatatatgccagtcttggctgaaatgttttatttaccatagttttatatctgtgtggtgttttgtaccggcacgggatatggaacgaaaactgctttgtaatgcagtttgtgacattaatagtattgtaaagttacattttaaaataaacaaaaaactgttctggactgcaaatctgcacacacaacgaacagttgcatttcagagagttctctcaatttgtaagttatttttttttaataaagatttttgtttcct

SEQ ID NO: 10118 - DNA, 1400 bp, Homo sapiens
aatttgtttgactattttaaaattatattagaccttaagctgttttagcaagcattaaagcaaatgtatggctgccttttgaaatatttgatgtgttgcctggcaggatactgcaaagaacatggtttattttaaaatttataaacaagtcacttaaatgccagttgtctgaaaaatcttataaggttttacccttgatacggaatttacacaggtagggagtgtttagtggacaatagtgtaggttatggatggaggtgtcggtactaaattgaataacgagtaaataatcttacttgggtagagatggcctttgccaacaaagtgaactgttttggttgttttaaactcatgaagtatgggttcagtggaaatgtttggaactctgaaggatttagacaaggttttgaaaaggataatcatgggttagaaggaagtgtttgaaagtcactttgaaagttagttttgggccagcacggtagctcacccttgtaatcccagcactttgggaggctgaggtgggtagattacttgagcccaggaattcaagaccagcctgggcaacatggtgaaaccctgtttctataaaaaataatctgggctttgtagcatatgcctgtggtcccagctactgaggaggctgaggtgggaggattgcttgagcccaggaggcagaggttgcagtgagccaaggtcacgtcactgcactctagcctgggcaacagagtaagacaaaaaaatatatatatattgaaaatcaaaggaggcaaaattttgacagggaaggaagtaactgcaaaacactaggctttagtaggtacttatataaaatctagtccagttctctcatttaaaaaaatgaagacactgaaatacagacttaaatagctcagatagctaattaggaaatttcaagttggccaataatagcattctctctgacatttaaaaataatttctattcaaaatacatgcataattgattttacacctcattactggtggataatttatgtgatgtggattgctggtgtccagcatgacccataaacaggtcagaagaatgatggaatgttttagaataaactcctgcttatagtatactacacagttcaaaagatgtttaaaatgcttttgtatttactgccatgtaattgaaatatatagattattgtaacctttcaacctgaaaatcaagcagtatgagagtttagttatttgtatgtgtcactagtgtctaatgaagcttttaaaatctacaatttcttctttaaaaatatttattaatgtgaatggaatataacaattcagcttaattccccaaccttattctgtgtgtagacattgtattccacaattttgaatggctgtgttttacctctaaataaatgaattcagag

SEQ ID NO: 10119 - DNA, 943 bp, Homo sapiens; identical to SEQ ID NO: 4884

SEQ ID NO: 10120 - DNA, 600 bp, Homo sapiens
ttttttggcaccttatgtttaaatcagattcttagatttggagtagacctgaccttgttatttattagataacattttgaatgtatccattggatttctaaaatgtattgtgaatttctcagacaaacaggatttatgctggagctctgttttgcttagaaataaaatatttagtagtttatttctgctctaattaaaatgtcactttacccctggataaaggcactttcactgcctgtcactgatcagcagatactgacttgttgccattaagtgaacttgacttcttatgtgtgctctatgagtttgttgtaattttcttcttgaaattgtgatttttcactgacagtaatgacaaatttaatgtatgtaattgtctatgcattttaagttaaactgcctaaaatgtgatttgagacatatacatatgtttgtattataaattgtaagcaatcagtttgagatactaggttttatcacctgctgctgtatttgtaaacaaagacaaatgttgctttaagaagtaattataattaggaataggctatggatgtgatacttggtattttttaagataaacttgtttgcttttgtgtatta

SEQ ID NO: 10121 - DNA, 1400 bp, Homo sapiens
agaagaacttattggaattgcatacaacagactgattcggatggatgccagcactggagatgcaattaaaacatggcgtttcagcaacatgaaacagtggaatgtcaactgggaaatcaaaatggtcaccgtagagtttgcagatgaagtacgattgtccttcatttgtactgaagtagattgcaaagtggttcatgaattcattggtggctacatatttctctcaacacgtgcaaaagaccaaaacgagagtttagatgaagagatgttctacaaacttaccagtggttgggtgtgaataggaatactgtttaatgaaactccacggccataacaatatttaactttaaaagctgtttgttatatgctgcttaataaagtaagcttgaaatttatcattttatcatgaaaacttctttgccttaccagaccagttaatatgtgcactaaacaagcacgactattaatctatcatgttatgatataataaacttgaatttgtcacacattccttagggccatgaattgaaaactgaaatagtgggcaaatcaggaacaaaccatcactgatttactgatttaagctagccaaactgtaagaaacaagccatctattttaaagctatccagggcttaacctatatgaactctatttatcatgtctaatgcatgtgatttaatgtatgtttaatttgatatcatgttttaaaatatcctacttctggtagccatttaattcctccccctacccccaaataaatcaggcatgcaggaggcctgatatttagtaatgtcattgtgtttgaccttgaaggaaaatgctattagtccgtcgtgcttgatttgtttttgtccttgaataagcatgttatgtatattgtctcgtgtttttatttttacaccatattgtattacacttttagtattcaccagcataatcactgtctgcctaaaatatgcaactctttgcattacaatatgaagtaaagttctatgaagtatgcattttgtgtaactaatgtaaaaacacaaattttataaaattgtacagttttttaaaaactactcacaactagcagatggcttaaatgtagcaatctctgcgttaattaaatgcctttaagagatataattaacgtgcagttttaatatctactaaattaagaatgacttcattatgatcatgatttgccacaatgtccttaactctaatgcctggactggccatgttctagtctgttgcgctgttacaatctgtattggtgctagtcagaaaattcctagctcacatagcccaaaagggtgcgagggagaggtggattaccagtattgttcaataatccatggttcaaagactgtataaatgcattttattttaaataaaagcaaaacttttattt

SEQ ID NO: 10122 - DNA, 600 bp, Homo sapiens
atcagaatcaagttgtgggtggaaaaatcaacgtggcctttgagttcagttgttataaaccattgtgactattgttggtcaaagtattggtacttatattgttagtaattgcatcataattacattaccagtgttggaaaactaatgaagaaaacactgtaattgctactcagcaaatgtgaataaaaggtgtttgcgttattaggatgtctgttaagtaatcatttaatattattatattggtaatggttgtatgtgtgatgctatgcccagaatatgaagtatctgtttttgaaattcactttatttaaaagataagcagctgactgggcacggtgcctcatgcctgtaatcctagcaccttgggaggctgaggcaggtggatcacctaaggtcaggagttcaacaacaccagcctgaccaacatggtgaaaccccatctctactaaaaatacaaaaatcagccgggtctcatggcaggcacctgtaatcccatctactgaggcaggagaattgcttgacccaggaggcagaggttgcagtgagccaagatcacgccattgcactccagcctgggggacagagcaagactctatctcc

SEQ ID NO: 10123 - DNA, 1400 bp, Homo sapiens
aaaaaaaaaaagtaaagtgtggtatgccatatttagtagagatgttaattctgaaatgattattatttaatgtccattgaactactagttttatatgactacttgagaactaagtatagttaacggtattaatcatcagataacattgctgtatgaaccataagattttggtatgttttgcagatcaaggatctggattttgcataactggtaaaatagaagctggttatatccaaactggtgaccgactactggcaatgcctcctaatgaaacttgtaccgtgaaaggaatcactctgcatgatgaacctgtcgactgggcggcagcaggcgatcatgttagtcttactttggttgggatggatatcatcaaaatcaatgttggctgcatattttgtggccccaaagtacccattaaagcttgcactcgtttcagagcccgaatcctcatctttaatattgaaattcctatcactaaaggatttcctgtgctgttacactaccaaactgtcagtgaacccgccgttattaaacgattgattagtgtcttaaacaaaagcacgggtgaagtcacaaagaaaaagcctaagtttttgactaaaggccagaatgcattggtagagctacagacacaaagaccaatagctcttgagctatataaagactttaaagagctggggaggttcatgctacgttacggtggttctacaatagctgctggtgttgtcactgagataaaagaatgatgggtcagaatttctaccacgtttctggatacagtgaaatagctaacctctgtttcaagaatgcagttattaagtcaaaggaacaatgtgcaattgatatgtttttagatgagagagaaaaattaaagctaaaattagctgcaaagaagtattaataatcacctctgcaaaaattctaagttgccaactggcaaagaaagtctaatgttaaaaacaactttgcctttgaaacgttaataaatggatttactttgctaagatttatggcaagtgtcaaaaatagtatctgaagatactgaatcatcatgaaatgaactctacttctggccaaagcacaatgtatttgcagttttctcttttgattcaattatactgcacatgttttaaggaaaagtaacttaattgggtttttcaggcagttgatatttgacctaagctttttttttttttttttttccagttaatgctaagaaaagatttggggaaggttataataaaagtattttgtggtgaccataagaatgtccctccccaaacaagtaaacttgtgaaagtttaatttggaattagtggaagctgttcctttgaaagccaagatattatttaagttgtaaagccagctaataaaatgccttagtttgagcataatacaaa

SEQ ID NO: 10124 - DNA, 1400 bp, Homo sapiens
agaccctgtggctagaagtggcagagggagaggcagcaggaaggccagcggggaggctggggcccagtgcaggcccaggttggaggagcgtagcacatggagtttggtaggagtttgggacgccctggtggatcttaattgtgatggggtgggtgtgaaaggcagtccaggttgcactggttgcacaggagaagtgatcagaagaggaccccagcaggtgtgagccgtgagctgggaggtgcttcagtagtgcaggccatagctgaaggtgtcctacatcagcagggtgatggtgaggtttgaaccactgtttcactgcatagtccctgctgatggacacttgagtgttcagattttttgctggtatattcagtgctgcagtggacattttcatacaaaatatttcggtacacttttgtttatatctgaaaggtaaattcctagcagtagaattattagagcaaacggaatttaacattttggtgtgtattgccaaattgccctcccaagtggtttagtcagcttacccttgccaacaatagatctatccttgccagccttgggcatcacatttaccagtttaatagattgtaaaaccatatcttaattggctaccctgaagccaccatactggagaggctgcgtacagtgtttcacgtagagagagggatacccaggaggcccacctgctccaaccccagctgcatgagtcttcccagcccaggcacagacatgtggataagatttaaacatttccagccccagccttcaagcaatcctagttgacactgaggggagccaacataagctgagctgagaaacagtctgcccagtctgcagattcatgagcaaaagaaatgttgggctgggtacagtggctcacgcctgtaatcccagtactttgggaggccgaggtgggtggatcagttgaggtcaggagtttgagaccagcctggccaacatggtgaagccctgtctctactaaaaattagccgagtgtggtggtgcgggcctgtaatcccagctactcaggtggctgaggcaggagaatggcttgaacccgggaggcggaggttgcagtgagccaagatcaggccactgcactccagcctggatgacgggatgagactctgtctcaaaaaaacgaaacaaaaattttttaagagaaatgtcatttgtttttgtttttgagacagggtctcactctgttgccctcactagagtgcagtaggatcacggctcactgaagtctctacctaccggctcaattgatcttcccaccacagcctcccaaatagctgggagaaatgtcctgtttttaatgaatttgtcttcctttttgtcttgtttgttttaatatctagtgatctaataaatttggatgatatcttttgactatc

SEQ ID NO: 10125 - DNA, 1400 bp, Homo sapiens
aaagaaccacacagctaagggagggcctggggagccccaccctagcccttgctgccacaccacattgcctcaacaaccggccccagagtgcccaggcactcctgaggtagcttctggaaatggggacaagtcccctcgaaggaaaggaaatgactagagtagaatgacagctagcagatctcttccctcctgctcccagcgcacacaaacccgccctccccttggtgttggcggtccctgtggccttcactttgttcactacctgtcagcccagcctgggtgcacagtagctgcaactccccattggtgctacctggctctcctgtctctgcagctctacaggtgaggcccagcagagggagtagggctcgccatgtttctggtgagccaatttggctgatcttgggtgtctgaacagctattgggtccaccccagtccctttcagctgctgcttaatgccctgctctctccctggcccaccttatagagagcccaaagagctcctgtaagagggagaactctatctgtggtttataatcttgcacgaggcaccagagtctccctgggtcttgtgatgaactacatttatcccctttcctgccccaaccacaaactctttccttcaaagagggcctgcctggctccctccacccaactgcacccatgagactcggtccaagagtccattccccaggtgggagccaactgtcagggaggtctttcccaccaaacatctttcagctgctgggaggtgaccatagggctctgcttttaaagatatggctgcttcaaaggccagagtcacaggaaggacttcttccagggagattagtggtgatggagaggagagttaaaatgacctcatgtccttcttgtccacggttttgttgagttttcactcttctaatgcaagggtctcacactgtgaaccacttaggatgtgatcactttcaggtggccaggaatgttgaatgtctttggctcagttcatttaaaaaagatatctatttgaaagttctcagagttgtacatatgtttcacagtacaggatctgtacataaaagtttctttcctaaaccattcaccaagagccaatatctaggcattttcttggtagcacaaattttcttattgcttagaaaattgtcctccttgttatttctgtttgtaagacttaagtgagttaggtctttaaggaaagcaacgctcctctgaaatgcttgtcttttttctgttgccgaaatagctggtcctttttcgggagttagatgtatagagtgtttgtatgtaaacatttcttgtaggcatcaccatgaacaaagatatattttctatttatttattatatgtgcacttcaagaagtcactgtcagagaaataaagaattgtcttaaatgtc

SEQ ID NO: 10126 - DNA, 600 bp, Homo sapiens
aaccactaaagctagatgtttacctatattatctcatttcatcttcatagcaaaactatgaggctgctgttagttttacagataaggaaactcatcctcagagaggttcagttacttacccaggatcacaaagccagtaggtggcagagctaaaacttgaacccagacttatgtaactacatcacaacacttctaagccccatccactcttgccctaaggtggaagccgcctaatgtcttttgttcaaatgtctgcctcctcccaccgcatggtgggctctgggtgggcaaggagctggtttttgcccccttgtccccagcattcagcccagggcctggcacagagtgaggtctcagtggatgagggctggctggtgagcagctacaaggccaggtggagaatttagggagcaggcctccagggagggcatgatccctgccagctggggcccatcccagagccagggtgtgtctgcatcctgaccatgactatcattcaaagacatgcaatttagagcaagggctgcagctgctgtcatctttggcatagagaccaaagggaccagactggggtaataaggaaggaaagtatagccagtc

SEQ ID NO: 10127 - DNA, 600 bp, Homo sapiens
atgcctttcttcttaaagtattacttctcatggaaatcttaagatcaacatgtcagtgaggaaatcacctagaatttagacattttctttggaactttggctggtctgtatcattattttgaaaatctccttgatgtttacaagctacctgactactttatcttttattctttaatgattagggtgacctagttccacatggcctgaaggtaacattggcagtaatgtgactaggtacatgtagacttgaaattaaactcagcataaataagagttctctctctccctccttttatacctcttattgtttcaaattctctatcctttctaagttaaaagtactaaaattgcattctttttctgttaaacaggctgcttccttgggattactacagtttcctatccttaacgcttctgtggatgaaaactgccagaatataacatataaggttggctatgcagagtaaaaatgttcttattattaatagaagatggggcaaatgtgcttgtagattagagacttctattgtacctcaaatagtgatcttttttagactagaattaaaggtatggggtaaaacattaaacttaagtctaatt

SEQ ID NO: 10128 - DNA, 600 bp, Homo sapiens
gtgaactttcaaaaattttagttctaaaagttgaaacttaaatcctctttattttgtcatagggaggatttgagctcataggaacaggtagactttcaactattgttagatgttggtatgtatatttatttgaaatgtttaggtaactgcaaaaacaatggctcagcatgaagaactgatgaagaaaactgaaacaatgaatgtagttatggagaccaataaaatgctaagagaagagaaggagagactagaacaggatctacagcaaatgcaagcaaaggtgaggaaactggagttagatattttacccttacaagaagcaaatgctgagctgagtgagaaaagcggtatgttgcaggcagagaagaagctcttagaagaggatgtcaaacgttggaaagcacgtaaccagcatctagtaagtcaacagaaagatccagatacagaagaatatcggaagctcctttctgaaaaggaagttcatactaagcgtattcaacaattgacagaagaaattggtagacttaaagctgaaattgcaagatcaaatgcatctttgactaacaaccagaacttaattcagagtctgaaggaagatct

SEQ ID NO: 10129 - DNA, 1400 bp, Homo sapiens
aaacacaagccctcagcaccactttgaacagaattccatcatccctggccctcccttcctatttggagcctgttcagtactgctggctctgcttgttgccttgtttattccggaacataccaatttaagcttaaggtccagcagttggagaaagcactgtggcagtcacagccatcctcataatacacaagcgccaggagaggccaaagaacctttactccaggacacaaatgtgtgacgactgaaatcaggaagatttttctatcagcacccaggtcttagttttcacctctagttctggatgtacattccatttccatccacagtgtactttaagattgtcttaagaaatgtatctgcatgaactccgtgggaactaaaggaagtgggaacttagaaccagacagttttccaaagatgttacaatttcttttgaaaaaccttttgtttattagcaccaatttcttgccactaagctatttgttttattatacatcctttaattaaaaactatatatgtaacttcttagatattagcaaatgtctctgctaccatttccttaaggtgttgagctttaactctatgctgactcagtgagacacagtaggtagtatggttgtggacctatttgttttaacattgtaaaattttgagtcagattttaatattgtaaaatcttgggtcaaataattcaaagccttaatgcagatgcactaaaacaaagaaatggtaaatgaattgtttgcatttaaaaaaaaaaactcttaagaaaactgtactaaatctgaatcatgttttgagcttgtttgcagtacttttaaacattattcactactgtttttgaagtgagaaagtatcagccatttagcatttaagttggggtatttagagcctgtaatctaaatgctggctcaaatttattccccagctacttcttataccactattcttttaatgtttgcataatcataagcacctcaacacttgaatacataatctaaaaattatatagtaaagctggtagccttgaaaatgtcagtgtgatatctattatgtagataaatatatatagtggcctttcaggactgtcacagtaacactttatttacagagctaatgtttgtcctaaattttcaggaccctagaggagagctttatacaattaccgatgtgaatttctctaaagtgtatatttttgtgtccagttatattatttaaaaaagtgttactttgtaaaaattgtatataaagaactgtatagtttacactgttttcatcttgtgtgtggttattgcttaatgctttttaaacttggaacactcactatggttaaataaggtcttaaaagaaatgtaaatattctgttaataaagttaaatattttaatgatttttttttt

SEQ ID NO: 10130 - DNA, 1400 bp, Homo sapiens
aaggaaaaaaatctgggctgttagagtgaaaaagtgtgttttatgtcaattgtgaaaggaaaatgttaggagtatggtttttaaacttgggcttcattttaaacttttttttttaaacccagttatttcacttgatttgctagcttcagagaagagatccgaatctgtgcccagcgctaaaggctcagtgttagcatggcttgtgctggccggtgtgccatattcttgttggagatgaaccgtagcaccagagcccattcttccttgtcagtcttggcccaaagatgtcaccattcctagttatttgtcaccacataattggtgttgattggaaactttttctgagatgggacagaactgctgggttgtctttttccatgtaacttaagcatagtaatataaataaagtaatagttggatgcttttggtcctgtgttgcttttaaaaacaccttataaaagaggagagtatttgataagcaattttcatagtagtaaagttttttttcatctcttaaactaaattgaccatgcatataatattctttgtttaaatgaaagcatactgttgaaacccgcagtgttgcatttagaaaacagttgaacagaatgtcaatgtgcattcatgcaaaaaaacatttaatctgcatctgttttagaaaagggggaaatgaagcaacttgtctaaaaatactgctttacaaagcatttcagcctttccccctcagttttgcattgattttttgacaagtctgtagagcctaatagtttccatcaaaggcctagatctcttatttagcatttttttcagctcttctctcagaagttcagctgttgaaacgaaaactgtactttgtaccctcacatacaaagggatcaaatttgacctggtgttattttagccccaaatttatgacattacacaatattaaaatgtaaatgtttctttacccaaactacttctagatattctagtatttgcttctggtggaattaaatgacggtaaaattggctaattatttgaatgaatgaatggatggatgttttgcatgctcaatttctaggtcctttgtctagaaaggaaatttgcctcagttgaattagtgaaatatttctgtcgttgatattaaaagtgacttctgagtacagttaagttcctcctatttgccactgggctgttggttagaagcataggtaactgattaagtaggtatgatactgcatttgaaataagtggacacaaactatcctttctccaccatggactcaatctgagaacaacagcattcatttccattcatttccatactggcttttgattatatgcagattcctagtagcatgccttacctacagcactatgtgcatttgctgtcacaataaagtatattttgtcttgc

SEQ ID NO: 10131 - DNA, 600 bp, Homo sapiens
ctgttaacatgggagtcacacaagccgcctgactttttctcattgccattagtaatgactgatggaaaacccagccaccactgtgatgcgaaatgatcagtctgttgcctgaaacagcccagtcctcttaactgaaacagcattctacttcttgttccaagatgagcctctgcaatattctggcaatttaatataccccctacaaaagcactccacagcttttacactattttgactttgagttataactagtattattcatgttttcataaaaagaagttagtgacccagagctataatcatccatcaagtcttccacaataattcccaactcataaattgctttcctaacaactagcaaaagctattgttcataatggcatttctaaagcttttgggcactgtgtaccaggatgaggaagagaagaaatgaggagcctgtcttttaatattccagtatttgtgtgtttgattttttttgacaacagtacatatatctatttctctagggatatggaagtaagtggagaagggcctacctttttaaaggacaaatataaaaatagcaacagtatctttgctaatcttactaatagatat

SEQ ID NO: 10132 - DNA, 1400 bp, Homo sapiens
gtaaaatgtgaccgtttgacatctgtggtagattgaacggaatatcacagctgctgagtttactccatagctttcaaaccttttttattttaagaaattcttgaaaaaccctatgttccatgggaacataaagttattatagtgcctcctaaggggttaatataaatcaaggaggaagtttatatttaaggaagaattggagtgacgtatcttagaaaaggaaaggctgatgtttccatatagcttgctctccaccaggcctatcatttttctttttagagacaaacgtgacaggctagtcttgtctctctcatatgctaggtagcaaatggggtgatatttttatagaagtgggcaaaaattattttctcaattttactgagtaggcacagaagaaaagtacagataggctgatggttattgccttattttgactgcatttctcttaaatggatcatttaaattagttcttcaagtaacagtttactggttgttccattcctgaatatgcaggctaatttgtacagatagggattaaggaatacagactattagagaagatccttatatttacatctagtatatatgtggtaaggaaatgccgattcttcattataaacaagttttaaaattgttctttcttagttcaaatgatagcaatacccctatagcattaggtagaaacaaattattcattacatcgtaaatctctttactatgtcctagctctgtcctgctacctaaaggatataaagaaatactattgctctagaatgtattactttgttctcccatgaaagaattcagtttgttagtacctatatttttaaactggtgaaactgacccaaatatgtaataaataccatagtagctcagacccaaggagatatttttctaaaatcagttttcgttaaagtacttctacttccgttattggatatggtatctcctaaagtgtaaaaaaaatctgttactatatagtgataaaccatctgctcatcgtaagtgtaaggcttaacaaataagtaatacatgctatatttattcaagtgtctattgcttaattgttaattgtgagcagatttattgaatgcctattctattttctgcagtttacaatacaataactctttgagtaagttgaagtttaattgtgcaacaaatttgtattagagtacaatttaaagtgtttttctctatagccttttttgactggggaagcaaggggtaatgttaattagtacactttgttcttgtactagctatgtttctataagatatggtgccctgtgtatcccagagatgctagaaaactgttctttgctcctatttgtgggttctgtttttgtgggtttttttttttgagaaaatgtacacaataaaacattccttgcttgtt

SEQ ID NO: 10133 - DNA, 1400 bp, Homo sapiens
ccggctgctgctgctggtgctgttgtgcctgccggccgtgtggggtgactgtggccttcccccagatgtacctaatgcccagccagctttggaaggccgtacaagttttcccgaggatactgtaataacgtacaaatgtgaagaaagctttgtgaaaattcctggcgagaaggactcagtgatctgccttaagggcagtcaatggtcagatattgaagagttctgcaatcgtagctgcgaggtgccaacaaggctaaattctgcatccctcaaacagccttatatcactcagaattattttccagtcggtactgttgtggaatatgagtgccgtccaggttacagaagagaaccttctctatcaccaaaactaacttgccttcagaatttaaaatggtccacagcagtcgaattttgtaaaaagaaatcatgccctaatccgggagaaatacgaaatggtcagattgatgtaccaggtggcatattatttggtgcaaccatctccttctcatgtaacacagggtacaaattatttggctcgacttctagtttttgtcttatttcaggcagctctgtccagtggagtgacccgttgccagagtgcagagaaatttattgtccagcaccaccacaaattgacaatggaataattcaaggggaacgtgaccattatggatatagacagtctgtaacgtatgcatgtaataaaggattcaccatgattggagagcactctatttattgtactgtgaataatgatgaaggagagtggagtggcccaccacctgaatgcagaggaaaatctctaacttccaaggtcccaccaacagttcagaaacctaccacagtaaatgttccaactacagaagtctcaccaacttctcagaaaaccaccacaaaaaccaccacaccaaatgctcaagcaacacggagtacacctgtttccaggacaaccaagcattttcatgaaacaaccccaaataaaggaagtggaaccacttcaggtactacccgtcttctatctggttctcgtcctgtcacccaggctggtatgcggtggtgtgatcgtagctcactgcagtctcgaactcctgggttcaagcgatccttccacttcagcctcccaagtagctggtactacaggtgtgtgccacgacacccggctaagtttttgaaatttattttttgtagagacaggattttcctatgttgcccaggctggtttcaaactcctggccgtaagcgatttttccggcctcccaaaacgttgcgattataagtgtgagccactgcacctggccccacattttctttatccatttgtacattgatggacacttaagatgattccatatctttgctattgtgaatagtgcttcaataaatatgtgaatgcacat

SEQ ID NO: 10134 - DNA, 1400 bp, Homo sapiens
tgcatgtaataaaggattcaccatgattggagagcactctatttattgtactgtgaataatgatgaaggagagtggagtggcccaccacctgaatgcagaggaaaatctctaacttccaaggtcccaccaacagttcagaaacctaccacagtaaatgttccaactacagaagtctcaccaacttctcagaaaaccaccacaaaaaccaccacaccaaatgctcaagcaacacggagtacacctgtttccaggacaaccaagcattttcatgaaacaaccccaaataaaggaagtggaaccacttcaggtactacccgtcttctatctggttctcgtcctgtcacccaggctggtatgcggtggtgtgatcgtagctcactgcagtctcgaactcctgggttcaagcgatccttccacttcagcctcccaagtagctggtactacagggcacacgtgtttcacgttgacaggtttgcttgggacgctagtaaccatgggcttgctgacttagccaaagaagagttaagaagaaaatacacacaagtatacagactgttcctagtttcttagacttatctgcatattggataaaataaatgcaattgtgctcttcatttaggatgctttcattgtctttaagatgtgttaggaatgtcaacagagcaaggagaaaaaaggcagtcctggaatcacattcttagcacacctacacctcttgaaaatagaacaacttgcagaattgagagtgattcctttcctaaaagtgtaagaaagcatagagatttgttcgtatttagaatgggatcacgaggaaaagagaaggaaagtgatttttttccacaagatctgtaatgttatttccacttataaaggaaataaaaaatgaaaaacattatttggatatcaaaagcaaataaaaacccaattcagtctcttctaagcaaaattgctaaagagagatgaaccacattataaagtaatctttggctgtaaggcattttcatctttccttcgggttggcaaaatattttaaaggtaaaacatgctggtgaaccaggggtgttgatggtgataagggaggaatatagaatgaaagactgaatcttcctttgttgcacaaatagagtttggaaaaagcctgtgaaaggtgtcttctttgacttaatgtctttaaaagtatccagagatactacaatattaacataagaaaagattatatattatttctgaatcgagatgtccatagtcaaatttgtaaatcttattcttttgtaatatttatttatatttatttatgacagtgagacattctgattttacatgtaaaacagaaagttgaagaagattgtgaagaaaatgtatttttcctaaatagaaataaatgatcccattttttggt

SEQ ID NO: 10135 - DNA, 1400 bp, Homo sapiens
gaacttctgattctgattgctgttacttgaataggaaatggttactcattctgtataaaagttttgcaagagaatgaattttttattctgtaatcaaaaagcaataacttgaaattcactctgtaatattataggtcagtcagaattatacaagttttaccaaattgttacacttattctccaagctgccagaacctggtatctgtatctgtaaaaccaaattaacttttgcttaaatgggaagtatacatatatctgtatagatacattacccctttacatgtttaacatacacacacttaaacacataaatactagtgtgattatatctttggagtttgcaatatagcataaaggacaagtagaactgcacattaagattacctaccgaagcaactagatgtggctgggacacaatcaaaggaggaattttgtccacaggaaggtgaggaaattccaaatgaagcctagatcttcagtatcataaaaaggcagagctggccaggcacagtggctcatgcctgtaatcttatcactttgggaggctgagatgggaggatctcttgagaccaggtgttcaagaccagcctcatcaacatagtgagaccccatctctattaaaaaaataaataggcagagctaaactaaccccagtgtcacaaaactcaactggtcatataaatgagtgaaacaggcctctcacacaagcgatgtaaaacagctgggagcagtgggagctgtggcaaactaaagtgcccaagccgcatttaaaaagggcatctgttcagctccatctgcttgctgcggtgcaagaatgctaaaccaggattaccagttcttcacattttttgaaatccaaattttcatgagaaacattctcatttttaaatatcaagaagtgattttaaaatgtttaaatggtgctggttaaacaaacacgtctgcagctggatttagcttgcaagctgccaagttgcaacctctttcattctagaaacttctgtcattttcatcatagcaagtctatgcggacaaaagcctccaaactttccaactgtgtaggccagtacagctggcaaggttcatagaatataatggctatccccctctgccaaataagactatccacaacccagctcagacacagtggttatatgattttgtgtccatacaggagaggccttggtgtcttcacatacattctctgagccaacatctatccagcagccctgacctcctgctataatttaagtctatttccttttaatctaataagagttgatagtaaaaaggcaggtgatggaaatcagtgtataaatcacaatggagtatattggcaactccacagcttatagtttgataaaggcaaatacatgaaaaataaaaatgctactaatgcc

SEQ ID NO: 10136 - DNA, 600 bp, Homo sapiens
tgtctggtccttcggggtgttaatgtgggagatcttcactttagggggctcgccctacccagggattcccgtggaggaactttttaagctgctgaaggaaggacacagaatggataagccagccaactgcaccaacgaactgtacatgatgatgagggactgttggcatgcagtgccctcccagagaccaacgttcaagcagttggtagaagacttggatcgaattctcactctcacaaccaatgagatctgaaagtttatggcttcattgagaaactgggaaaagttggtcaggcgcagtggctcatgcctgtaatcccagcactttgggaggccgaggcaggcggatcatgaggtcaggagttccagaccagcctggccaacatggtgaaaccctgtctctactaaagatacaaaaaattagccgggcgtgttggtgtgcgcctgtaatcccagctactccgggaggctgaggcaggagagtcacttgaaccggggaggcggaggttgcagtgagccgagatcatgccattgcattccagccttggcgacagaacgagactcccgtctcaaaaaaaaaaaaaaaaaaaaaaaaaaaaa

SEQ ID NO: 10137 - DNA, 600 bp, Homo sapiens
tcccttcccacgaggccgtatttcagactatcacatggggagaaaccttggacaatacctggctttcctaggcagaggtccctgcggccttccgcagtttttgtgtccctgggtacttgagattagggagtggtgatgactcttaaggagcatgctgccttcaagcatctgtttaacaaagcacatcttgcaccgcccttaatccattcaactctgtgacacagcacatgtttcagagagcacggggttgggggtaaggttatagattaacagaatctcaaggcagaagaatttttcttagtacagaacaaaatggagtctcctatgtctacttctttctacacagacacagtaacaatctgatctctcttgcttttccccacaggttgtcattacttaattatttaagattcaaaaatttaaaaattccacattgaagttgtgtgcagtggctcactactgtagtcccagttactagggaagctgaggcaggaagactgcttgagtccaggagatcgaggctccagtaagccatgatcacaccactaccctccagcctgagctacagagagagaccctctcctaaaagaagaaaaaaac

SEQ ID NO: 10138 - DNA, 600 bp, Homo sapiens
ttgagctcatctataagcagggcccagctcctaacatgcaggtgtcaccagagagaaatgcaccactgtgcccagcaccatagctctggctcagagagtttgcctgagaaagcagcagacagaaaacagaaggtgcgagttgctcccgaaggaactgacttcatgtgcaacagagctcggagaagtccaaggctaagcacactctccagaacagtggaggttgtgctgaaaggcaactgggaggcgacggagagcctgggaggtgcgggctacactggaggccagcaagtctgccagagagaaacagaaaaaaagacaggtgggaagagctctcctggggtcagaacaaagcttaatatcttctttgacaaagaacgtaacatcaaaatagccaactatgggtttagttcaacatttgcaaagagagacaacactgaaaagggaacgtttgatgggactctcccttatgcaggcccagaactcttcttgggccatgggtaccaatgccctgccatcaacgtttggagccttggcatcatcgtatgcaaaatggtggctggggccctgccattttatgagcagaactgtaaggatatactg

SEQ ID NO: 10139 - DNA, 600 bp, Homo sapiens
ctcttacctctccccaaactcccagccccgtttctgccagggctagtattgcttctcaatactattgcttcaggcttttataaaagaaaaaacatttaatatcccaaaaatcatataatgcagttactagttttatctctcttttatgaatgaggaaattgagggcagggcagatggagtagcatgcccaaggctacaaagctagaaagtgtcagaacccagatgtgaacacagcctagcaccagggagatccagttaccttgttgaatgggggaaaacaaatattagaataacatgcggtggctcatacctgtaatcccagcattttgggaggccaaggcgggtgggtcacctgaggtcaggagtttgagaccagcctcgccaacatggtgaaagcttatctctagtaaaaatccaaaaattagccaggacatggtggctcgtgcctgtaatctgagctactcgggaggctgaggcatgggagtctaagacagaagaatagaagaattgcttaaacccgggaggcagaggctgcaatgagctgagatcgtgccactgcactccagcctgggcaacaggctttttctgtgagactgcgtt

SEQ ID NO: 10140 - DNA, 1400 bp, Homo sapiens
acttagagctttaaggaaaaaagaactagatgaggaggaaagcattcggaaaaaagctgtgcagtttggaaccggtgaactgtgtgatgccatctctgcagtagaagagaaagtgagctacttgagacctttagattttgaagaagccagagaacttttcttattgggtcagcactatgtctttgaggcaaaagagttctttcagattgatggttatgtcactgaccatattgaagttgtccaagaccacagtgctctgtttaaggtgcttgcattctttgaaactgacatggagagacggtgcaagatgcataaacgcagaatagccatgctagagcccctaactgtagacctgaatccacagtattatctgttggtcaacagacagatccagtttgaaattgcacatgcttactatgatatgatggatttgaaggttgccattgctgacaggctaagggatcctgattcacacattgtaaaaaaaataaataatcttaataagtcagcactgaagtactaccagctcttcttagactccctgagagacccaaataaagtattccctgagcatataggggaagatgttcttcgccctgccatgttagctaagtttcgagttgcccgtctctatggcaaaatcattactgcagatcccaagaaagagctggaaaatttggcaacatcattggaacattacaaatttattgttgattactgtgaaaagcatcctgaggccgcccaggaaatagaagttgagctagaacttagtaaagagatggttagtcttctcccaacaaaaatggagagattcagaaccaagatggccctgacttaatccttgtttttaaagaaaggaaatgtgcaatattgaagtgatctttttccctagtcagacaggcccaattccattgtgatgtttacctttatagccaggtgagtgcagtttgaacttgagatacagtcaactgagtgtttgctaggatcctaaggaacataaagttaattaaaaacttacacctaattatgtaaattgccttgttaaagacatgtgatttgtattttagatgcttgtttcctattaaaatacagacatttctaccctcagtttctaaatgtagactatttgttggctagtacttgatagattccttgtaagaaaaaatgctgggtaatgtacctggtaacaagcctgttaatatattaagattgaaaaagtaacttctatagttactccttctaaaatatttgacttcctaaattccccccacccaaaatctttcccttttgaaaatactaaaaactaagttatgttattataaagtgtaaaatggtttgtcttaattataggagaaaaaggccttgttagaaataaaataaactgacttatttcactaatg

SEQ ID NO: 10141 - DNA, 1400 bp, Homo sapiens
ctgagtcccaaatcccaagctggagccgttcagctcccctccaccgcttagagatttggggggctctggccccgtccttgcggaccattccgaggggagtccagaggtgtcagtaattaacactgtggatacctcccatgaggacatgattcacgacgcccagatggactactatggcacccgcctggcaacctgctcatcagacaggtccgtcaaaatctttgatgtgcgcaatggagggcagatccttatcgccgacctcaggggtcatgagggtcctgtgtggcaagtggcctgggctcaccccatgtacggcaacatcctggcatcgtgctcctatgaccggaaagtcattatctggagagaggaaaacggcacctgggagaagagccacgagcatgcgggacacgactcctcagtgaactcggtgtgctgggccccccatgactacggcctgatcctggcctgtgggagctcggatggggccatctccctgctgacttacaccggggaaggccaatgggaagtaaagaagatcaacaacgctcacaccattggctgcaatgccgtcagctgggcccctgctgttgtacctggaagcctcatagaccacccatcggggcagaaacccaattacatcaagaggtttgcatcaggtggctgtgacaacctcatcaagctgtggaaggaggaggaggacggccagtggaaggaggagcagaagctagaagcgcacagtgactgggttcgagatgtggcctgggccccctccatcggcctgcccaccagcaccatcgccagctgctcccaggatggtcgtgtgttcatttggacctgtgatgatgcctcaagcaatacgtggtcccctaaattgttgcacaagttcaacgatgtggtgtggcatgtgagctggtccatcacagccaacatcctggctgtctctggtggagacaataaggtgaccctgtggaaggagtcagttgatgggcagtgggtgtgcatcagtgatgtcaacaagggccagggctccgtatcagcatcagtgacagagggccagcagaacgagcagtgacaagacaggtggggcctggctccccacccgccagctccaggactgccccttcctgggccaactaaccagacaactgggaagagcccccaactccaacaggattattttcccaggaggagttacagatgcagccacagattgatcatctgccttaacgtgatcggagatgctttgtaatctactgtccagctgaaagcactcatgttacgaggaagaaactacaagtgatgttcaaatctattttgggtcatttttatgtacctttgggttcaggcattatttggggggttttgtttccaaaggaactaaataaagtcatattgcttat

SEQ ID NO: 10142 - DNA, 600 bp, Homo sapiens
gcctgcacggcagccacctgtacacctccctccccagccttggcctggagcagcccctcgcactgaccaagaacagcctggacgccagcaggccagccggcctctcgcccacactgaccccgggggagcggcagcagaaccggccctccgtgatcacctgtgcctcggctggcgcccgcaactgcaacctctcgcactgccccatcgcgcacagcggctgtgccgcgcccgggcctgccagctaccggaggccaccgagcgctgccaccacctgtgaccccgtggtggaggagcatttccgcaggagcctgggcaagaattacaaggagcccgagccggcacccaactccgtgtccatcacgggctccgtggacgaccactttgccaaagctctgggtgacacgtggctccagatcaaagcggccaaggacggagcatccagcagccctgagtccgcctctcgcaggggccagcccgccagcccctctgcccacatggtcagccacagtcactccccctctgtggtctcctgaagggagcgcctcctccaacaacacgtggatctgcatggtttgcctgagctttgaacagtcagtactt

SEQ ID NO: 10143 - DNA, 1400 bp, Homo sapiens
tcatttatttttgcatccctgtctgctttgttacaagctcccaggggaggtggggtttgtgtcttccaacttccctacatgcagaaactgctccctttgaactctcttggctgaacagcagattactgacagacaatctgtgatatggtgttttatacgcttcctcgtacgctggggccaaggcagtatacattcctctgactttatactgttattactgcatttattatttgctatattaatagctactaactagaaattagatgaagcaagcatgacagacacagctgtggaggtcacagctgctcctttttggtcaatgagcgtttctatcccctccccctggggtgtgctgtgtcccacctggcccaccagaggctcacgacgatggcacctgaccaggtgacgtgggcgtggtcacctcacctgcaaggctttgtggactctgcacaccgtatgacccccggttttacagtttttagctgttgaattttggaaattggcactgggtgaaaaggtcggaggactggctcttgtagtcacagagtggctgcaggcctttgaaaagtggaggaaagaaaagcccttctccttgccccgcacacatttcactcccactgtactgggcttccaagctttggcattcaggcccctatattttctgtaggaaaaatcgttgagaacacttttctatatgggtgattttgagaccatcgttacgctgtgcgtaaagaatgtacagagaaatttgtaggtattttttgaagaacattaatttgttaatgatatgtagctatttaatttttccctttcctattgtaatcattcattttttttgttgttcggaaaaaaaaagttgatctttttttttgtcgtagatttgtctgtaaaagtgcaggaacagttattctatgagaacactgcatctgcattcatagccacgagtttgttattgctacaggctactgagcgtcgtaacaggaaaaccacccacagctgaccggctcggtggaggacactcctgggacaggtctctttgtcagtgaacaagggcgtcactctgggaggggtcggcggtgctggcggccgggtccctggtgcactgacctatctgggataggcagtaccctggaggggggcctggggcagaggaggcagcagaaaaccaaacatttcactgagaaagccccctccctgctctaagaaggggctccgtgaagttcttcccagagccgcgctgcctgcagtgcgctctgaccttctcttcatgtgtgtaaatctgtaatataccattctctgtggcctgtttttcctggaagaagaaaaaaaaaggtttggcaggccatctttttttgtacttaaaagtagccttaagaacaataataaagtgctcttaaacc

SEQ ID NO: 10144 - DNA, 1400 bp, Homo sapiens
atcctgtcgatcatcttcagcattctgtctctgttcctgttcttctgccaactcttcaccctcaccaaggggggcaggttttacatcactggaatcttccaaattcttgctggtctgtgcgtgatgagtgctgcggccatctacacggtgaggcacccggagtggcatctcaactcggattactcctacggtttcgcctacatcctggcctgggtggccttccccctggcccttctcagcggtgtcatctatgtgatcttgcggaaacgcgaatgaggcgcccagacggtctgtctgaggctctgagcgtacatagggaagggaggaagggaaaacagaaagcagacaaagaaaaaagagctagcccaaaatcccaaactcaaaccaaaccaaacagaaagcagtggaggtgggggttgctgttgattgaagatgtatataatatctccggtttataaaacctatttataacactttttacatatatgtacatagtattgtttgctttttatgttgaccatcagcctcgtgttgagccttaaagaagtagctaaggaactttacatcctaacagtataatccagctcagtatttttgttttgttttttgtttgtttgttttgttttacccagaaataagataactccatctcgccccttccctttcatctgaaagaagatacctccctcccagtccacctcatttagaaaaccaaagtgtgggtagaaaccccaaatgtccaaaagcccttttctggtgggtgacccagtgcatccaacagaaacagccgctgcccgaacctctgtgtgaagctttacgcgcacacggacaaaatgcccaaactggagcccttgcaaaaacacggcttgtggcattggcatacttgcccttacaggtggagtatcttcgtcacacatctaaatgagaaatcagtgacaacaagtctttgaaatggtgctatggatttaccattccttattatcactaatcatctaaacaactcactggaaatccaattaacaattttacaacataagatagaatggagacctgaataattctgtgtaatataaatggtttataactgcttttgtacctagctaggctgctattattactataatgagtaaatcataaagccttcatcactcccacatttttcttacggtcggagcatcagaacaagcgtctagactccttgggaccgtgagttcctagagcttggctgggtctaggctgttctgtgcctccaaggactgtctggcaatgacttgtattggccaccaactgtagatgtatatatggtgcccttctgatgctaagactccagaccttttgtttttgctttgcattttctgattttataccaactgtgtggactaagatgcattaaaataaac

SEQ ID NO: 10145 - DNA, 1400 bp, Homo sapiens
cacttctacttcaacaagaccaagggcttcccctgcctgaagaaggcggagggcagcagccggccccattgcctgggcaagaccaagggcaggacccatcctgagatcgaccgcgaggtggtgcgcaggctgcgcgagttctaccggcctttcaacctcaagttctaccagatgaccgggcacgactttggctgggattgagcagacccgggctatgtaccttacccacgtggcttatctattgacagagattatatcataacatggcttgaagtaaaaggcagtatccaagtccttcacctggtcttgccctgtctactttctgatcattctgatggtctgatgtggctgttgatgtggaactgcagaagagttcagagaagagtatgcaacaaagccataggaaaacacacaggagcttttccctccccttcaggtccccgccctctttccaagctggacaattttttattaagttgtttattccctgccttaaaactgaaacaggaaattttctggtagaaggagggtcatttagtcacgaacactgaagtgggtcaaaattctattctgggtcaaatccttgaattcaaacagatgtccataatcagtactgatggaatagagcaagtttttctatgtaagacaaataaatcaaacatcatgtgcatctcctcataagggtctgcaagggtctgatggtttaaagttcctaacagatctggttgcagcatctgccggagcttgcaccccatcatcggacggtcatcttcctgctgcagaagttaggtaacataagacttagatttcttcctgttctagcaatctgcaagaccaccaggcttaactttttagctgccagaagacaaacccccttttctgtttcggcaatttgtcctggcacgtgttttggacttcctccgatttacacgaaaagctctgatattcattggagtactttattttttttcctcagttttgtttcttttctcatgtaaaaacaaacaaaaaggtcaacaaaaaaaaattgaggtttttcttgtttctatctagttcatgctttctttgcggtgtttgaacagtagtctgttaacttagtaggtggtacctggaaaggtattttaagtatagtgactgtttaataaatacttaattggatgatggaggaggagaaattgttttcttcccaggattctctttgggggtcattttgtgtgacagatatattttagacatttggagaaacagtttcagatcctgccaggatatttttgtaaaaaaggaaaatggaagattccaataaactagaaacagtacgtatctaagatgctgacacagaagctaatgtgacttttcagcttatcaagaggatggccaataaaacttaaaggtgtggttag

SEQ ID NO: 10146 - DNA, 600 bp, Homo sapiens
cccagggcacactgtcggagttctatcacttgcttgacccctggacccataaaccagtccactgttatacccggggcactctaaccatcacaatcaatcaatcaaattcccttaaatttgtatggcactggaactttggcaaagcacttttgacaagttgtgtctgattggagcttcatgatagccttgtgacatctttagggcaggattcttatccccattttgcagatgaaaaccctgagtcacagatttctgtgggactgtggatctcactggaagctatccaagagcccactgtcaccttctagaccacatgatagggctagacagctcagttcaccatgattctcttctgtcacctctgctggcacaccagtggcaaggcccagaatggcgacctctctttagctcaatttctgggcctgaggtgctcagactgcccccaagatcaaatctctcctggctgtagtaacccagtggaatgaatttggacatgccccaatgcttctatatgctaagtgaaatctgtgtctgtaatttgttggggggtggatagggtggggtctccatctactttttgtcaccatcatctgaaatggg

SEQ ID NO: 10147 - DNA, 1400 bp, Homo sapiens
attgggaacaaagttggggtcaagaggaaagaatgcgtgctggttttgttaggcgttagtataccgtttttttgtggcctctccctcccacgctgttaattagagaaagataacagtaacttcggttttgtttttgtgaaacataaaagtcaattctaatagggcagtcgccagaagtagacctgtctaggcactaagggagtttggggaaagccaaagaagacctaggccatagagcacagtggaacgcaggctgagaacgcagggaaggagaaataaagagtaaagccagaggccattacctgaaatttccagattgttctatgagacaggtatgtcagaggaccgtgtctcaaagaagtggcattcttctgggtggttcacatttatttttaacatcaggatatggaactttgagagtcaatgtcttcatggtaaatttctcccaattgtgctttaggttcacagctgaggactgtagtcaactggtaaggatgaactgacaccttgaggaaactgaaacagcttgtcattttctctgttttgtttttgtatgttttttaccccgatgtaacagtctcccttatggtcagtgattgatgacctcgatatggatttagattatcaaatgtgtttggttttggaaatataacttttgtcaaagaaatactctcagaagagaaatggggcttaattaagttgtttttgtggtcacgtttattcttgttacttcgctgtgtttttgaaatgttgggcatggcctcgtattttgctgttacctttgtgacctgattgttttttggaacacgtcaagacgtgggatcagaatcttccaactttagaggtgcaatggaagacactacgctacttggttgagcctggtgaagaatgtattaatgagactgctttgcataaaactgggaagaaagagaagacagttggagatggaagatggttttgtatatattttggaactttagttcctctgtgagacgaaagaggagagctatgttttgtggcacattgtctgatatatattgtgtaacctgtcaggtgagttgatttagacaacatagctgaccttttatgacaaggcagtttgaatagggactattgtaataccctcacacattataggggcatcagagaatggcatggaagagacagtctacagagagctttaagaggccggagaaaggaaaagacattatcagggcctggaaagtctcttccagttcatcagggtagtagacctgtcagattggaggtcaaagtcaaaagtataataagtgttaatttgccttgaaaaacaaagacctaaaaagccttttttaagaaataaattttttgttcacatgaccaaagcccctcctgtgtgtgttaataaaagaatcataaac

SEQ ID NO: 10148 - DNA, 600 bp, Homo sapiens
agaacctggaagaggacatgggtcagagtgaacagaaggcagatcctcctgctacagagaagaccctcctggaagagaaggtcaagttggaggaacagctgaaggagactgtggaaaaatataaacgagctttggcagacactgagaacttacggcagaggagccagaaattggtggaggaggcaaaattatacggcattcaagccttctgcaaggacttgttggaggtggcagacgttctggagaaggcaacacagtgtgttccaaaagaagaaattaaagacgataaccctcacctgaagaacctctatgaggggctggtcatgactgaagtccagatccagaaggtgttcacaaagcatggcttgctcaagttgaaccctgtcggagccaagttcgacccttatgaacatgaggccttgttccacacaccggttgaggggaaggagccaggcacagtggccctagttagcaaagtggggtacaagctgcatgggcgcactctgagacccgccctggtgggggtggtgaaggaagcttagctgctgttgatggggtgggtgtttttaaactcacttgatgtaaaaaaaaaaaaaaaaa

SEQ ID NO: 10149 - DNA, 600 bp, Homo sapiens
ctgatgctttaggaaatgtctactgaggaccctgggacttaagaagaagggcggggagagtgccattgcctgtttgggagacaaaaatgaacgaaaacaggtgactttggaaagcaaagtcaaaacccagtttaggatgtagcacctgccccaggattcctgccctcggctttgccccagacccttattccagatgctgagagtgaccaggacagcagctcctgaggcccagtggtcttctttccaacaggaaaagaaggctgtgatgtcgctgtcaggatcatgccctgtggcacagcacaggtggtgggaggtggttttctgactgagatgttgcctgatggatggaaagaaatgtatttttaagttcaaaaagcattatcctgtggcgttgcctggacatccactccctgacagcccagagcagcactgtctggcttcccttcatgcttgtggctttgttgtgtttgatcagaattttgggggaaatggaaagttttcctcaaggagcagctgggggcagaataggtagtatttaagcaaatacttaagtccaagcaaatcatccccattaaaaagcttttcctgtaggctagtagg

SEQ ID NO: 10150 - DNA, 600 bp, Homo sapiens
gaactcctggcctcaagtgatccaccggcctcggcctcccaaagtgctgggatgacaggcatgaatcactgtgctcagccaccatctggagttttaaaaggctcccatgtgagtccctgtgatggccaggccaggggacccctgccagttctctgtggaagcaaggctggggtcttgggttcctgtatggtggaagctgggtgagccaaggacagggctggctcctctgcccccgctgacgcttcccttgccgttggctttggatgtctttgctgcagtcttctctctggctcaggtgtgggtgggaggggcccacaggaagctcagccttctcctcccaaggtttgagtccctccaaagggcagtgggtggaggaccgggagctttgggtgaccagccactcaaaggaactttctggtcccttcagtatcttcaaggtttggaaactgcaaatgtccccttgatggggaatccgtgtgtgtgtgtgtgtgtgtgtgtgtgtgtgtgtgtgtgtgtgtgtgttttctcctagacccgtgacctgagatgtgtgatttttagtcattaaatggaagtgtctgccagctgggcccagcacct

SEQ ID NO: 10151 - DNA, 630 bp, Homo sapiens; identical to SEQ ID NO: 4916

SEQ ID NO: 10152 - DNA, 1400 bp, Homo sapiens
ctgtatcctggccgcagggtaatagagttctctgaggataaggttcggatcccccgcaacagccccctgcccaactgcacttacgctacccgccaggccatttccctgagcctggtagaggaggggagtgagcgggcccgccccagcccagtgcccagcacccctgcctcagcccaggcctcaccccaccaccagcccagcccagcacccctaacactcagtgccccagctagctctgccagctctgaagaggacctgctggtcagctggcagcgggcatttgtggaccgtactccaccacctgctgctgtggcccagcgcacagcctttggacgcgatgccctccctgagctgcagcgccattttgcccatagccccgctgacagagatgaggtggtccaggcaccttctgcccgacccgaagagagtgagcttttgctacccacagaacctgactctggctttcccagggaggaagaagagctgaacctgcctatcagtcctgaggaagagcgccagagcctgctgcccattaacaggggcacagaggaggggccaggcacttcccacaccgagggcagggcctggccactccccagctccagtcgcccccagcgcagccccaagaggatgggggttcaccacctgcaccgcaaggacagcctgacccaggcccaggagcagggcaacctgctcaactagggcccctgctggccttcctgccattgctgcaccaggactgcaaggagtccccacaccttggcagctcagggtccccagtccaagcccttgacctctcctctatccagacccgcacagctgtttcctgtgtggatggggtcaggttgtgggccatgccaggcctgtcagctgcgttgactgactgcagcagcttgcctcatggttttccctttttcttagaatatttattcttcagaggtaacatgcagttgggtctcaagacctttcctccaatcagcccaacccagcccagactgggcttttctggggagctgaggagtttatcagtattcatcttccatcctttcatagtcacaagttttgttattttgtttttttttgggggtgatggtgtaattgttaacctcatttccgtttcctacctgtttgcttccccccccagtcctccgcatgagctgttgccctccaggggcctggcacagctggccttggggacgagggagaggactgattcagggccccctcagctgtctcctccctccctctggaaaggagggtggggctcaggggcctcaagctgggctctgtgtgaggcctggcccccactcccaaccttggctctagactgttactcttaagctttgagaaattttcacattgatgactattttaaaatcaaataaaactattttactggt

SEQ ID NO: 10153 - DNA, 1064 bp, Homo sapiens; identical to SEQ ID NO: 4918

SEQ ID NO: 10154 - DNA, 1036 bp, Homo sapiens; identical to SEQ ID NO: 4919

SEQ ID NO: 10155 - DNA, 933 bp, Homo sapiens; identical to SEQ ID NO: 4920

SEQ ID NO: 10156 - DNA, 600 bp, Homo sapiens
cgtccttctgacctgggcaagagctgtagcctgtcggttgcctactctgctgtctgggtgacccccatgcgtggctgtgggggtggctggtgccagtatgacccacttggactcaccccctcttggggagggagttctgggcctggccaggtctgagatgaggccatgcccctggctgctcttatggagccgagatccagtcagggtgggggcgctggagccgtgggagcccggccagggcagggggctcgttgctgtggcaccccctctctgccagcaccaagagattatttaatgggctatttaattaaggggtaggaaggtgctgtgggctggtcccacacatccaggaaagaggccagtagagaattctgcccactttttataaaaacttacagcgatggccccaccaaggcctagacacggcactggcctcccaggagggcaggggcattgggaatgggtgggtgccctccagagaggggctgctacctcccagcaggcatgggaagagcactggtgtgggggttccaccgagaaggggacctcatctagaaaagaggttacaaacctaccattaaactatttttcctaaaacgg

SEQ ID NO: 10157 - DNA, 1400 bp, Homo sapiens
  misc_feature (201)..(344): n is a, c, g, or t
gaaccaagggtctgatgaacccaaatgctacactatctcaggttttacgagaggcgaaggagaaagaagagatacggacctccaatgaggttaccgtggaaacagacaagaaaactcattatgggctactctttgatgaatttcaaggcctttcacatctagaagctctggagatgctttcccaagaaagtgaaataaagnnnnnnnnnnnnnnnnnnnnnnnnnnnnnnnnnnnnnnnnnnnnnnnnnnnnnnnnnnnnnnnnnnnnnnnnnnnnnnnnnnnnnnnnnnnnnnnnnnnnnnnnnnnnnnnnnnnnnnnnnnnnnnnnnnnnnnnnnnnnnnnngacataacagagctgttttcccagctgcacgtttcctccaaaccagagaaacttgccagggcaagaaataccgcccacgaatggatcaggaagtctctgaccaagccattagcagagaatgaagaaggagaaaaacagtcggaagcagaaaatactgagcaagtcaacaaaaattcaatagaggatatccatgcgtttgcaatccggagcctggctgaactgactgcctgctcaattgaactattccacaaaacagctgcattggttctgcatggcaggaagcaggaagtgacagccatagaaaggagccaaactctttcccagatgacaattgtgttgtgtaaagagttgtcctctctgtctaaagagttcactacctgcctaacaactgctggggtcaaagaaatggcagatgtccttaacccattaatcactgcagtatttctagaggcatcaaacagtgcctcctacatccaggacgcctttcagctactcttacctgtgctagagatctctctcattgagaacaagattgaatcacacagacatgagctgcagggccagaaacctttgttagaacattgaagaatggagacgttttgacctgggacttgtgacggccaaggaatgccaccttattctggctactcctgcagaaatgaaggagtggggttattttagtatataaaaattcaggcaggagagatggtttaaagaggaagattgttgccttcagtgtttgattgaagtattcaggttctcacagtattctttccagttgttgtaattcataaattatttgaaaagaaactttgtagaaagtccaagaataataactctagataaagattagtgggacactcaggcaaaaatgttggtctttctttgacatgttgcaaaatgttatcaatttgtcatggatataatttgcagcccatggatataactggttgataagccagagaaaaataatttagtgttctaaaattcatggcatgtgtggtttattaatgccatgtactttctcctttctggaataaaatctatggctttaag

SEQ ID NO: 10158 - DNA, 1400 bp, Homo sapiens
cctgcactcggcgcctcgcttcttggtggccttcgcctactggaaccactacctcagctgcacctccccgtgttcctgctatcgcccgctctgccgcctcaacttcggcctcaatgtcgtggagaacctcgcgttgctagtgctcacttatgtctcctcctccgaggacttcaccatccacgaaaatgctttcattgtgttcattgcctcatccctcgggcacatgctcctcacctgcattctctggcggttgaccaagaagcacacagatcgcaagtcctacagctggaaacagcggctcttcatcatcaacttcatctccttcttctcggcgctggctgtctactttcggcacaacatgtattgtgaggctggagtgtacaccatctttgccatcctggagtacactgttgtcttaaccaacatggcgttccacatgacggcctggtgggacttcgggaacaaggagctgctcataacctctcagcctgaggaaaagcgattctgaacccttcagtcctgcttgggaggacgcagcccactgcccagaaacaagaaacacgataccattctggccttccccaccccacatcctctcttggccttactgaagatgggggaagggtaagaaggaagggtgtaggccaaggctcaccccagtgctgctggcttctcctctccacccctcatatgggcgtggggtcctcaaacatcacctttacctgagaggccccaagaagctgagctggcagagagctccaccatttggtgctaaaaaaaaaaacgtcctgaggttcatgaccaccatccagtttctggcctttacacagtcacctttcactgaggtcaggagcccctgagcagtggctgctccctgacaaccacagccatttctctgcacgggggtcattcataggactaatgtatttcatgatctactgtgcacatccaggcctgtggccacagtcccctgctaaagttgctcaggtgttctagtcctgacttcacctttttgatttggtgtgtgccctagggtatgtacccttccccatctgagcctcggtgtgtccatgtgtctggcgggggatgggtggactgtatgatttccaaggactctaccagtcagtggttctgatgtcatcgggtggaggtggtgttctatacctaaaggatgacctgctccagaaacagcaccagcacagcatgtattttcttctcttctgaaagttctggcttgtagacccctcccctcctttgcaaaggtatgggatagaggggtcagatgcagatctctactgtaaaatgggctccctggtatctcctgtcttccctactgctccaaaccctaaattttggttgtacattttatttgaaaggaaaataaattttttttttgggcc

SEQ ID NO: 10159 - DNA, 1400 bp, Homo sapiens
  misc_feature (764)..(796): n is a, c, g, or t
ggactggcatcagctccaagcagactccttcatccaggatgagagactgcgcatctttgctctgttggctggaaaaccggtgtggcagctctcagaaaagaagcaaataaacgtgtgctcccagttggattggaaacgctccctggctatccatctttggtatttgcttccaccaacagcctccatttttagggcgctcagcatgtatgaagaagcatttcagaatacctctgacagtgacagatatgcctgctccccacttccttcgtatctggagggttctggctgtgtgatagcggaggagcaaaactcacagacaccacttcgagatgtctgctttcaccttctaaaactctacagtgacagcatacgtgagaaggctgttcgagagctgcttacccggcactgccagctgttggagacccctgaatcttgggctaaagagactttccttacccagaagctccgtgtacctgccaaatggatccacgaggccaaagctgtgcgagcacacatggaatctgacaagcacttagaggccctttgcttatttaaggctgagcactggaaccgctgccacaagctcatcatccgacacttagcttctgatgccatcattaatgagaactatgactacctgaaggggttcttggaagacctggcacctccagagcgcagcagcctaattcaggattgggaaacatctgggcttgtttacctggactatattagagtcattgaaatgctccgccatatacagcagnnnnnnnnnnnnnnnnnnnnnnnnnnnnnnnnngtaatgacctggagcagttacacatcaaagtgacttcactgtgcagtcggatagagcagattcagtgttacagtgctaaagatcgcctggctcagtcagacatggccaaacgtgtagccaacctgctgcgcgtggtgctgagtctgcatcatcctcctgatagaacctccgactcaacaccagaccctcagcgagtccctttgcgcctcttggctccccacattggccggcttcccatgcctgaggactatgccatggacgaactgcgcagccttacccagtcctatctgcgagaactggctgttgggagcctgtgagccccaggcactttgcatcacagtcacatgcccattcacaccacacagaggttccctgccttgtttggattggcactgtttgccattctctgggttggctgtggcatctaccctccctccctgctgccagaagcagcatcctccacttgttcagggcttttcttaatactgaacgtagcataagggcttctggaacccagaagaggagacagtttaccatcctcaagatcattcagtgtttttcctttaaaaaaatggtcaataaagctcctttggcagaatccccc

SEQ ID NO: 10160 - DNA, 1058 bp, Homo sapiens; identical to SEQ ID NO: 4925
  misc_feature (172)..(172): n is a, c, g, or t

SEQ ID NO: 10161 - DNA, 1400 bp, Homo sapiens
agaaacatgctctgtaaagggtcttcctgaagatgtggattctatctttatgtagcaagaaatctacatccaccaaaattgtgtgtgtttgggggagagagagacatagagatagagacagagaggcagagaagagacccctttagaagagagctgagctgattaagctgagtggttttttgttttgttttgtttttgctttttaatacatttggagctttgggagtattaaagtatttacaccaagcttgtccaacccgtggcatgtgtcccaggacagctttgaatgtggcccaatacaaattttaaactttattaaaacatgagttttgtttttttttttgctattttttttaaagctcgtcagctatcgttagtgttagtgtactttatgtgtggcccaagacaactcttcttccagtgtggcacagggaagctaaaagattggacacctctgatttatactagctcgttttgcttgttgaaaaatttggccaaatacctattgtcagcattcttgggtgaggattagcctaccatgttctaatctggccctgccactactatgctctacctttggtgagttgctttacctctctgggctgccccatttttaactgtaggttgacaggtctagagtgatccatcccacctctaatattttgtgaatttatgactttgccttcagatgaggctgagctatacataaaacagtataaactagggtactgcctcgtatctcttgtaggctctctcaaatctctgtaccttccacttaaccctaattgagccaagctttagtcaggggatctggttgtctaccagaatgtcaggagactcatcttacacagtcatggtggccaatgtttctggtgggttgtgctgaaacagctcttctgagaacttccaaccacccatgctctaacctggagacagccatcccctgcctcagaataagtaccaattcgtagtacatgtatggtactcttgtccccaagaaatgttaggaagcttgtcagctgaatgagaggaggtgccttctgggtatctctgtgttggtgtatctgtgccattggctacagaacaagaaaaatactatttgccatgctattaccttggcagatgtgtaggtgatagtcatctggctttgagctgagatggtcagtgggttgtaaattccccactagcagatattcagggtggcctgagttatgtaaacaagtgagcaacacagctttaatttcatggaggaatcaaagctgcacactggtattaaaacaacttgattttgcgcacacagttgcatgcatggcaagctgttaacctctgggtggcattttcattatgaatttgttcaccacctgtcttgcttaagctacaaaataaatgcatttgactgc

SEQ ID NO: 10162 - DNA, 1400 bp, Homo sapiens
catctataagaagctgaccggctccaagtttgactgtgcccttcatggaaaccactgggaggacctgggctttcagggagcgaatccagccacagacctgagaggcgcaggcttccttgccctcctgcatctgctctacctggtgatggactcaaagaccttgccgatggcgcaggagattttccgcctgtctcgtcaccacatccagcaattccctttctgtttgatgtccgtgaacatcacccacattgccatccaggccttgagagaggagtgtctctccagagagtgtaatcggcagcagaaggtcatccccgtggtgaacagcttctatgccgccacattcctccacctcgcacatgtctggaggacacagcggaagaccatctcagactcgggctttgtcctcaaagagttggaagtattggccaagaagagcccacggcggctgctcaagaccctggagctgtacttggccagggtgtcaaagggacaggcctccttgttgggagcacagaagtgctatgggccagaagcccctcccttcaaggatctcaccttcacaggtgagagtgacctgcagtctcactcatccgaaggcgtatggctgatctgacctccgagatgaatggaggcttaaaggctgagctgcaggggctttcagggggtcagtggagccatgtcaggagcctggccaggccgcaccccttgctgtctcagcagatgggatataggaagctcctgggcttagctgtgggaagccaagtaccctcaccggcatgggacatgaggggcagctagacttcacccccttcccgcagacctgcctccagagcaaggagaattctgccttaatctgttgggctccagtctccgggttgaattccagtgtatcccactgggagtgaatggatcatgaggtgggatggccccatctggatgttctgcagatccccacatgggaggagattcccaagtagaggcagccagaattctgactccctggcagcagcagggctttcaggcaccagtgtctgtgttgttagaactcagaggaagaggcaggggcagcagccgacagggggcagcatgacccaagcaaggggcctgaggcctcagtgggggtagggcaaggaggtacctcacaggtgggtgtgaggccccctctggagtttctggccattcacttacccactctcttctccccctgacccccgctccattgtttatgatggaaaaacggacatttggctaggtgtctctcacggctgctccatcctagcccccacaagctggggcttcctcctgtagatgctgtgcatgccccatgatgagtttctggcctaattgagggaaggaggaaattcataccagcagttttcaaataaaagaattgttct

SEQ ID NO: 10163 - DNA, 600 bp, Homo sapiens
gggagatcaagaggatttggatttgtgcttttcaaagatgctgctagtgttgataaggttttggaactgaaagaacacaaactggatggcaaattgatagatcccaaaagggccaaagctttaaaagggaaagaacctcccaaaaaggtttttgtgggtggattgagcccggatacttctgaagaacaaattaaagaatattttggagcctttggagagattgaaaatattgaacttcccatggatacaaaaacaaatgaaagaagaggattttgttttatcacatatactgatgaagagccagtaaaaaaattgttagaaagcagataccatcaaattggttctgggaagtgtgaaatcaaagttgcacaacccaaagaggtatataggcagcaacagcaacaacaaaaaggtggaagaggtgctgcagctggtggacgaggtggtacgaggggtcgtggccgaggccaacagagcacttatggcaaggcatctcgagggggtggcaatcaccaaaacaattaccagccatactaaaggagaacattggagaaaacaggaggagatgttaaagtaacccatcttgcaggacgacattga

SEQ ID NO: 10164 - DNA, 841 bp, Homo sapiens; identical to SEQ ID NO: 4929

SEQ ID NO: 10165 - DNA, 1400 bp, Homo sapiens
agctccgaggattccgacgcggaaacagatggccaagcctcggggggcagtgattctggggactggatcttcacaatccgagaaaaagatcccaagaatctcgagaatggagctcttcagccatcggacttggacagaaataagatgaaagacatcccgaagaggcctttctctcagtgtttatctacaattatttctcctctgtttgcagagttgaaggagaagagccaggcgtgcggagggaacttggggtccattgaagagctgcgaggggccatctacctagcggaggaggcgtgccctggcatctccgacaccatggtggcccagctcgtgcagcggctccagagatactctctaagtggtggaggaacttcatcccactgaaattcctttggcatttggggttttgtttttccttttttccttcttcatcctcctccttttttaaaagtcaacgagagccttcgctgactccaccgaagaggtgcgccactgggagccaccccagcgccaggcgcccgtccagggacacacacagtcttcactgtgctgcagccagatgaagtctctcagatgggtggggagggtcagctccttccagcgatcattttattttattttattacttttgtttttaattttaaccatagtgcacatattccaggaaagtgtctttaaaaacaaaaacaaaccctgaaatgtatatttgggattatgataaggcaactaaagacatgaaacctcaggtatcctgctttaagttgataactccctctgggagctggagaatcgctctggtggatgggtgtacagatttgtatataatgtcatttttacggaaaccctttcggcgtgcataaggaatcactgtgtacaaactggccaagtgcttctgtagataacgtcagtggagtaaatattcgacaggccataacttgagtctattgccttgcctttattacatgtacattttgaattctgtgaccagtgatttgggttttattttgtatttgcagggtttgtcattaataattaatgcccctctcttacagaacactcctatttgtacctcaacaaatgcaaattttccccgtttgccctacgccccttttggtacacctagaggttgatttcctttttcatcgatggtactatttcttagtgttttaaattggaacatatcttgcctcatgaagctttaaattataattttcagtttctccccatgaagcgctctcgtctgacatttgtttggaatcgtgccactgctggtctgcgccagatgtaccgtcctttccaatacgattttctgttgcaccttgtagtggattctgcatatcatctttcccacctaaaaatgtctgaatgcttacacaaataaattttataacacgctt

SEQ ID NO: 10166 - DNA, 1400 bp, Homo sapiens
gcggccaacgtcctgctgtctgagcatggcgaggtgaagctggcggactttggcgtggctggccagctgacagacacccagatcaaaaggaacaccttcgtgggcaccccattctggatggcacccgaggtcatcaaacagtcggcctatgactcgaaggcagacatctggtccctgggcataacagctattgaacttgcaagaggggaaccacctcattccgagctgcaccccatgaaagttttattcctcattccaaagaacaacccaccgacgttggaaggaaactacagtaaacccctcaaggagtttgtggaggcctgtttgaataaggagccgagctttagacccactgctaaggagttattgaagcacaagtttatactacgcaatgcaaagaaaacttcctacttgaccgagctcatcgacaggtacaagagatggaaggccgagcagagccatgacgactcgagctccgaggattccgacgcggaaacagatggccaagcctcggggggcagtgattctggggactggatcttcacaatccgagaaaaagatcccaagaatctcgagaatggagctcttcagccatcggacttggacagaaataagatgaaagacatcccgaagaggcctttctctcagtgtttatctacaattatttctcctctgtttgcagagttgaaggagaagagccaggcgtgcggagggaacttggggtccattgaagagctgcgaggggccatctacctagcggaggaggcgtgccctggcatctccgacaccatggtggcccagctcgtgcagcggctccagaggagtatccatgggaaccaagcccctcctgactgccatctggcacaagtgcaggcgtttggaggcagtggatgtgtgctgggaagccgctctgtgtgacctgagggtgatttgtcactgggctgtcctccacacccccaggaggaccaggcgtgctgctgccttgacagttcatcttcaggtgtccaggctgacacctcccaaagctggctgagactctgtgatcatgagggggatttctgggtctttcctgagactgcgtcccacctgacagtacataaagaagttttgcacacgtgaggtcccttttgctatttggaagtgattgaaggggctgcctactgtcctgtgaagagcccctctacgtggggacagcaggagaaaaccacagttctgatacttcacgtttatgcttctgaactcgggtttcttagtaagacatttcaactttttaagttgctagaaaataaaaatgatctacttggctgccttcaattttgaggcaattgaaggacgatccctccctcctttgatactaaaaacaatataggaataaaggaaaatagaattaaaaagtcacc

SEQ ID NO: 10167 - DNA, 600 bp, Homo sapiens
agatcaaaacagaattgtgtaaaaaggaagtgctaaacatgctgaaggaaagcaaagcagacatctttgttgacccggtacttcatactgcttgtgccctggacattaaacaccactgcgcagccatcacccctggccgcgggcgtcaaatgtcctgtctcatggaagcactggaggataagcgggtgaggttacagcccgagtgcaaaaagcgcctcaatgaccggattgagatgtggagttacgcagcaaaggtggccccagcagatggcttctctgatcttgccatgcaagtaatgacgtctccatctaagaactacattctctctgtgatcagtgggagcatctgtatattgttcctgattggcctgatgtgtggacggatcaccaagcgagtgacacgagagctcaaggacaggctacaatacaggtcagagacaatggcttataaaggtttagtgtggtctcaggatgtgacaggcagtccagcctgacctttctgcacactccagacaaacttcccagacaagctcctttgtgcctctacgtggagagggtgtggaaagttatcacattaaaagatggaggatttgctctgtt

SEQ ID NO: 10168 - DNA, 600 bp, Homo sapiens
ggacacagaagagtttcagagtgaccctaagccttctcaatacagaaagccttcgctttttcatcaatcaacctcaagcccatatgtatcaaaaagtgaaacacatcagccaatgacttctggttcttttccaattaatgggctgcattctcattcagaagttttaactgcaagaccacagtctatggagaattcaccaaccatcaatgaacccaaagataaatcatcagaattaacaaggcttgaatctgtattacccagaagccctgctggtaagagagttgtcactactagattataaaaacttggtggggccgggcgcggtggctcacgcctgtaatcccagcactttgggaggccgaggcgggtggatcatgaggtcaggagatcgagaccatcctggctaacaaggtgaaaccccgtctctactaaaaatacaaaaaattagccgggcgcggtggcgggcgcctgtagtcccagctactcgggaggctgaggcaggagaatggcgtgaacccgggaagcggagcttgcagtgagccgagattgcgccactgcagtccgcagtccggcctgggcgacagagcgagactccgtctc

SEQ ID NO: 10169 - DNA, 600 bp, Homo sapiens
tcatcccttactggtctcaaccaaaatattcctgttggaatcatgatgataatcatagcagcacttttcacagcatcagcagtcatctcactagttatgttcaaaaaagtacatggactatatcgcacaacaggtgctagttttgagaaggcccaacaggagtttgcaacaggtgtgatgtccaacaaaactgtccagaccgcagctgcaaatgcagcttcaactgcagcatctagtgcagctcagaatgctttcaagggtaaccagatttaagaatcttcaaacaatacactgttaccttttgactgtacctttttctccagttactgtattctacaaatatttttatgttcaaaacacacagtacagacagcatggatatttcctgttcacttgtgcatgggctaaaaccaggaaaacttccttgtcttattactttacctaatagtttcttaatatttcagtgccccttgcagaaaaaatattacatgctaaataaatattctccatatttttgggggatgacattcagtgaattatttcagtggtgacccactgaaaattaataatggtacttatgattaaaaacgcatttaatac

SEQ ID NO: 10170 - DNA, 600 bp, Homo sapiens
gtatcagtgagggcggccgggagggcgagcgagggagaggagggagagggggaggggaggagtccagggagaggcgggatcacggcccaggctgctgacacccgcgcgtggggaggactcgggccacgaaaggaaagaaatgtataccgtatctatctacccgacagcagcgaccgagacccggtgggacactccccttctccccactttcacctccccacccaaactttataaaagttgaaaaaatatcatttgactttttatagaaaaaaaaaggaaaaaataattgagaaagtgttcatctgaggactgcatcggtggacactggtatttatttatgttagctccaagcggaccggtggttcaaaagtgcattatttagtttgagctctgtaggtaaaaaggaggtgggaaaaattttaaaacttgagggtaaaaatgtggaaaacaaaccctcccatcccttgtagattataaataaaagcaaaaccgccacagaactagaggtcttctctttaatgttactttaaaattgctatgattgtattgtacgttatttaatgtctgattgaaacacaaatttacatgcatgtttgttac

SEQ ID NO: 10171 - DNA, 641 bp, Homo sapiens; identical to SEQ ID NO: 4936

SEQ ID NO: 10172 - DNA, 600 bp, Homo sapiens
tcaaggtgccaaaaagttaaatgagtacttgattcttcagaaaacctccaaagtagatgtggactcaagtggaaagaaatgcaaagagaaaatgattagtgtactgtttgaaacaaaagtacagacagaacacaaaaggtttctggcatttgaagtcaaagagtattcagcgttggatgaattacaaaaggaatttgaaactgcaggacttaagaagcttttctccgaatttgtacttgctctggtaaaatgaaatggaagacaggaatcttttagtaaaatagaagtgttttttgttgtttttgcattggatttggggagtggttaattgaaatagtcaattttaaagtttctctgaagcaaaatgataggcatcattctaacttcaggaacaaaagccagttctgttttatgaaatattaaacatgaagaaaacttgtatattctaatgtttgccaggaaaggctaggttcagtagatgagacattatttaaaagataaatttaaaaagatggtaaatgaacacttgtttttatagacaatatttgtttgaaactatgtaattttctggctaattttcttgtaattaaatgatttttt

SEQ ID NO: 10173 - DNA, 1213 bp, Homo sapiens; identical to SEQ ID NO: 4938

SEQ ID NO: 10174 - DNA, 600 bp, Homo sapiens
ttgctgacctcgcctggggtctcagggccaaggcctaaggatcgccgacctctgccccccagtcctttcagcttaacttactctttcatccgatgtttactgagctcctgttccgtgccaaactctgtcctaggcagggagcgtatgttggtgagttgtgcaaaaatctcttcccgatctaggagaactctcacgttcttgggtgaaatcaccgcctgcagttcggtagaagagagataagtgctggggagggaaaggaaggacagaggggctgaagagagagttgcaggggagccgagttgctctgttagaaggagcggaggctgtgctcggtggctcacgcctgtaatgccagcactttgggaggccgaggcgggcagattacctgaggtcaggaattcgagaccagcctgaccaacacggaaaaatcatgtctctactaaaaatataaaaattagccgggcgtggtgggcacctgtaatcccaactactcgggaggctgaggcaggagaatcgcttgaacttgggaggcggaggttgcagtgagccgagatggcaccattgcattccagcctgggtgagagagtgagactccatctc

SEQ ID NO: 10175 - DNA, 1400 bp, Homo sapiens
taattgacagtgatgatgaagaagaggatgatgatgaaaatgatggagaacatgaggattatgaagaggatgaggaagatgatgatgatgatgaagatgacacagggatgggagatgagggtgaagatagtaatgaaggaactggtagtgccgatggcaatgatggttatgaagctgatgatgctgagggtggtgatgggactgatccaggtacagaaacagaagaaagtatgggtggaggtgaaggtaatcacagagctgctgattctcaaaacagtggtgaaggaaatacaggtgctgcagaatcttctttttctcaggaggtttctagagaacaacagccatcatcagcatctgaaagacaggcccctcgagcacctcagtcaccgagacgcccaccacatccacttcccccaagactgaccattcatgccccacctcaggagttgggaccaccagttcagagaattcagatgacccgaaggcagtctgtaggacgtggccttcagttgactccaggaataggtggcatgcaacagcatttttttgatgatgaagacagaacagttccaagtactccaactcttgtggtgccacatcgtactgatggatttgctgaagcaattcattcgccgcaggttgctggtgtccctagattccggtttgggccacctgaagatatgccacaaacaagttctagtcactctgatcttggccagcttgcttctcaaggaggtttaggaatgtatgaaacacccctgttcctagctcatgaagaagagtcaggtggccgaagtgttcccactactccactacaagtagcagccccagtgactgtatttactgagagcaccacctctgatgcttcggaacatgcctctcaatctgttccaatggtgactacatccactggcactttatctacaacaaatgaaacagcaacaggtgatgatggagatgaagtatttgtggaggcagaatctgaaggtattagttcagaagcaggcctagaaattgatagccagcaggaagaagagccggttcaagcatctgatgagtcagatctcccctccaccagccaggatcctccttctagctcatctgtagatactagtagtagtcaaccaaagcctttcagacgagtaagacttcagacaacattgagacaaggtgtccgtggtcgtcagtttaacagacagagaggtgtgagccatgcaatgggagggagaggaggaataaacagaggaaatattaattaaatggtctgtaaacaataacaactgtgaataagattatcaaatctgttttagtgtaatgattgtcaagtttaaaaacatttttatatataaactggtatactcatgtcaatattctttattaataaaatgtttttcagtgtc

SEQ ID NO: 10176 - DNA, 600 bp, Homo sapiens
ctgctgcctgaaggtctccaattagatagtcctttcccaaaggcaacagctgccaccaaggcattagtgtctgtagggttaaaggtctgcttgttcggccggagacctccactctctgattctcgctcctctttgctgattttctccagaaggtttgaacacattttattcaagctctggatctgcttctgggctgcatctgcaccaatgcgggcagcatctgtcgtcagttgcttctcctgttcttccacttcagggtcaggcttggttctcagatggtcagggactacctcatggctgaaaacaggcacccgtccttcagtctgccccatgagatcttcatctcggtctggagacaacaccagaggaatgatgacctggttacggaacagcggtgttttttcatgcttcaagaccttgttcagagtgttcagctgtccagaaagcaaggcaaagctgtccaggacagatggcctggtcagccggccatactcgttctccaacttgcaaatgaaactccccagagagttcttcagatcagccacttgactcagcagtgcatctaatgatgcctcaagctgcttctcctctctctgcacc

SEQ ID NO: 10177 - DNA, 1187 bp, Homo sapiens; identical to SEQ ID NO: 4942

SEQ ID NO: 10178 - DNA, 763 bp, Homo sapiens; identical to SEQ ID NO: 4943

SEQ ID NO: 10179 - DNA, 700 bp, Homo sapiens; identical to SEQ ID NO: 4944

SEQ ID NO: 10180 - DNA, 1190 bp, Homo sapiens; identical to SEQ ID NO: 4945

SEQ ID NO: 10181 - DNA, 600 bp, Homo sapiens
aaaagcctgatcccaggaggccctgcagttcccccgacccgcggatggcagtctggaataaagccccctagttgcctttggccccacctttgcaaagttccagagggctgaccctctctgcaaaactctcccctgtcctctagaccccaccctgggtgtatgtgagtgtgcaagggaaggtgttgcatccccaggggctgccgcagaggccggagacctcctggactagttcggcgaggagactggccactgggggtggctgttcgggactgagagcgccaagggtctttgccagcaaaggaggttctgcctgtaattgagcctctctgatgatggagatgaagtgaaggtctgagggagcgggccctggggcgaggccatctctgcctgcctccctagcaggcgccagcggtggaggctgagtcgcaggacacatgccggccagttaattcattctcagccaatgaaggtttgtctaagctgcctgggtatccacgggacaaaaacagcaaactccctcagactttgtccatgtataaacttgaagtggttgtgttgtagggttgcaggttttttgttacgctgctgtcactttctgtc

SEQ ID NO: 10182 - DNA, 600 bp, Homo sapiens
ccctctccgagctggtaggcattccagctcctccgtgcttcctcagttacacaaaggacctcagctgcttctcccacttggccaagcagggaggaagaagcttaggcagggctctctttccttcttgccttcagatgttctctcccaggggctggcttcaggagggagcatagaaggcaggtgagcaaccagttggctaggggagcagggggcccaccagagctgtggagaggggaccctaagactcctcggcctggctcctacccaccgcccttgccgaaccaggagctgctcactacctcctcagggatggccgttggccacgtcttccttctgcctgagcttcccccccaccacaggccctttcctcaggcaaggtctggcctcaggtgggccgcaggcgggaaaagcagcccttggccagaagtcaagcccagccacgtggagcctagagtgagggcctgaggtctggctgcttgcccccatgctggcgccaacaacttctccatcctttctgcctctcaacatcacttgaatcctagggcctgggttttcatgtttttgaaacagaaccataaagcatatgtgttggcttgttgt

SEQ ID NO: 10183 - DNA, 1157 bp, Homo sapiens; identical to SEQ ID NO: 4948

SEQ ID NO: 10184 - DNA, 600 bp, Homo sapiens
ttccagaaccttgcaaacgaagaagtaagaaaattaacacagcgcttagaagaaatgacacagagaatggaagccctggaaaatcgcctgagatacagatgaagattagaaatcgcgacacatttgtagtcattgtatcacggattacaatgaacgcagtgcagagccccaaagctcaggctattgttaaatcaataatgttgtgaagtaaaacaatcagtactgagaaacctggtttgccacagaacaaagacaagaagtatacactaacttgtataaatttatctaggaaaaaaatccttcagaattctaagatgaatttaccaggtgagaatgaataagctatgcaaggtattttgtaatatactgtggacacaacttgcttctgcctcatcctgccttagtgtgcaatctcatttgactatacgataaagtttgcacagtcttacttctgtagaacactggccataggaaatgctgtttttttgtactggactttaccttgatatatgtatatggatgtatgcataaaatcataggacatatgtacttgtggaacaagttggattttttatacaatattaaaattcaccacttcag

SEQ ID NO: 10185 - DNA, 1400 bp, Homo sapiens
agacaccttccgagcgtcagctcactccccttccaccctcagctccaccctcagcagatgataatatcaagacacctgccgagcgtctgcgggggccgcttccaccctcagcggatgataatctcaagacaccttccgagcgtcagctcactccccttccaccctcagctccaccctcagcagatgataatatcaagacacctgccgagcgtctgcgggggccgcttccaccctcagcggatgataatctcaagacaccttccgagcgtcagctcactccccttccaccctcagctccaccctcagcagatgataatatcaagacacctgccgagcgtctgcggggagcgtctgcgggggccgcttccaccctcagcggatgataatctcaagacaccttccgagcgtcagctcactccccttccaccctcagctccaccctcagcagatgataatatcaagacacctgccgagcgtctgcggaggccgcttccaccctcagcggatgataatctcaagacaccttccgagcgtcagctcactccccttccaccctcagctccaccctcagcagatgataatatcaagacacctgccgagcgtctgcgggggccgcttccaccctcagcggatgataatctcaagacaccttccgagcgtcagctcactccccttccaccctcagctccaccctcagcagatgataatatcaagacacctgccgagcgtctgcgggggccgcttccaccctcagcggatgataatctcaagacaccttccgagcgtcagctcactccccttccaccctcagctccaccctcagcagatgataatatcaagacacctgccgagcgtctgcgggggccgcttccaccctcagcggatgataatctcaagacacctcccttagctactcaggaggctgaggcagaaaaaccacgcaaacccaagaggcagagggcggctgagatggaaccacctcccgaacccaagaggcggagggtcggtgacgtggaaccgtcacgcaaacccaagaggcggagggccgctgacgtggaaccatcatcacccaaacccaagaggcggagggtcggtgatgtggaaccgtcacgcaaacccaagaggcggagggccgctgacgtggaaccatcatcacccgaacccaagaggcggagggtcggtgacgtggaaccgtcacgcaaacccaagaggcggagggccgctgacgtggaaccatcatcacccgaacccaagaggcggaggttgagctgagaagaggccagtgcactcaagcctgagcaataagaataaaaccgagtagaacaaaataaaaaattcaaaaaacaaaacaaaacccacactccaaaaactaacaaagaataaataaataatataaaaat

SEQ ID NO: 10186 - DNA, 1400 bp, Homo sapiens
gctggggcctgaaggggagctgcttatccgcttcttcaactccttcaatgaggccaccatggttctggtctcctggatcatgtggtacgcccctgtgggcatcatgttcctggtggctggcaagatcgtggagatggaggatgtgggtttactctttgcccgccttggcaagtacattctgtgctgcctgctgggtcacgccatccatgggctcctggtactgcccctcatctacttcctcttcacccgcaaaaacccctaccgcttcctgtggggcatcgtgacgccgctggccactgcctttgggacctcttccagttccgccacgctgccgctgatgatgaagtgcgtggaggagaataatggcgtggccaagcacatcagccgtttcatcctgcccatcggcgccaccgtcaacatggacggtgccgcgctcttccagtgcgtggccgcagtgttcattgcacagctcagccagcagtccttggacttcgtaaagatcatcaccatcctggtcacggccacagcgtccagcgtgggggcagcgggcatccctgctggaggtgtcctcactctggccatcatcctcgaagcagtcaacctcccggtcgaccatatctccttgatcctggctgtggactggctagtcgaccggtcctgtaccgtcctcaatgtagaaggtgacgctctgggggcaggactcctccaaaattacgtggaccgtacggagtcgagaagcacagagcctgagttgatacaagtgaagagtgagctgcccctggatccgctgccagtccccactgaggaaggaaaccccctcctcaaacactatcgggggcccgcaggggatgccacggtcgcctctgagaaggaatcagtcatgtaaaccccgggagggaccttccctgccctgctgggggtgctctttggacactggattatgaggaatggataaatggatgagctagggctctgggggtctgcctgcacactctgggatgcctggctgctggagtacatgtgttcacaagggttactcctcaaaacccccagttctcactcatgtccccaactcaaggctagaaaacagcaagatggagaaataatgttctgctgcgtccccaccgtgacctgcctggcctcccctgtctcagggagcaggtcacaggtcaccatggggatgtgtgtgtgcacgtgtgtgtgtgtgtgtgtgtgtgtgtgtgtgtgtgtgttctgtgacctcctgtccccatggtacgtcccaccctgtccccagatcccctattccctccacaataacagaaacactcccagggactctggggagaggctgaggacaaatacctgctgtcactccagaggacattttttttagcaataaaattgagtgtcaactattt

SEQ ID NO: 10187 - DNA, 1400 bp, Homo sapiens
cagtgtgtgtgggtgtgattgtgtgagcaactgggtgtgtgaggttcaggcccagtcggcttgtccagacgccaggcctgagatgccctgggggtgctaagaggggtagagagaagccaaaggaacacaggctttgaaacgaggcagaattgagttggagtcccaaccccaccaacctcacctctcttcactcttcaggcagcgtagaaaacaatgcctgccttttgccaggcatcctcatggaagtgacatcgtctttaaacctgtgtggcaatccctgacgcaccaccgtgatgcccagggaagacagggtgacctggaaacccaactacttccttaagatcatccagctattggatgattatctgaaatgtttcatcgtgggagcagacaatgtgaactccaagcagatgcagcagatccgcatgtccctctgcggcaaggccgtggtgctgatgggcaagaacgccatgacgcgcaaggccatccgagggcacctggaaaacagcccagctctggagaaactgctgcctcgcatctgggagaatgtgggctttgtgttcaccaaggaggacctcactgagatcagggacctgctgctggccaataaggtgccagctgccacccgtgctggtgccattaccccatgtgaagtcactgtgccagcccagaatactggtctggaccccgagaagacctcctttttccaggctttaggtatcatcactaaaatctccaggggcgccattgaaatcctgagtgatgcgcagctgatcaagacgggagacaaagtgggagccagtgaagccacgctgctgaccatgctcaacatctcccccttctcctctgggctggtcatccagcaggtgttcgacaacggcagcatctacaaccctgaagtgcttgacatcacagaggaaactctgtattctcgcttcctggagggtgtccgcaatgttgccggtgtctgtccgcagatccactacccaactgttgcatcagtgccccattctatcatcgacgggtacaaacgagtcctggccttgtctgtggagactgatgacaacttcctgcttgctgaaaaggtcaaggccttcttggctgatccatctgcctttgtggctgcagcccctgtggctgctgccaccacagctgctcctgctgctgctgctgcagccccagctaaggatgaagccaaggaagagtcggagggaggagtcagacgaggatatgggattgggtctctttgactaatcaccaaaaagcaaccaacttagccagctttatttgcaaaacaaggaaataaaggcttacttctttaaaaaaaaaaaaagaaaagaaaaaaagaagaaagaaagaaacaaagaaagaaagaaagagaaagaaagaaaagaaaaaaa

SEQ ID NO: 10188 - DNA, 1400 bp, Homo sapiens
cctgcctgatgtggctctgggaattcctgcagagaagagcaggggtggccaggagatagtgagcagctcccaggaggcatggagggatccagaacctggactgaagaaccacctagaaataactcagcagaattctgaaaatgaggtcacgctggattttccaatccataggcccaaagtgaactcccacgtggagtaggatgaaaacccacagcatctagatcttcaaattctggagaaaaagagagtgtgaaagactgctcagtggctggggtgagagtcaagtctggccaggtgctaatctggagaaaagccaagacctggagcgagctggagtggcaggccctggaggatgagaaggtggcaggagtgcactggggatacaaagaaaccaagatttttctgggaattctcagaggcctggatccacgaaaaactccgcacctgccatcgaaaccaccaggtgtaccggattatggctgagcagctgtgagaacatggcttcctgtggaccctggagcaatgttgctatcggttcaaaaacctcctgaccgactactgcaaagccaggagcacctacacaccaggcaccagtgtcttctatgatgagatggatgccctgttgagtcttggggcactttctaacacctttgatgccttagaggtggtaggaggccttctttgggattgagaggattccaaagggaaccagggcatagcactagaagatgtggcgggatggtaatgaaatagtggaggagtctcaagaggaatcctggaggcttggtccccaggccttgaggtggaatcccagtggcaactctcccccacaatggacctcagagcagtgggagcgacgcagtcctgtgggaagcattcaggctcagaatcaggagatgtgattattgtcctggctctgttatgactaatttgggtctggaatggcctcatcgggggaaaaattggtgacaactttaagaaatactgtttatatcccgtcctcaaatattgcttgactcaaccctctactgaaccagtagtccagggtggctcacaaagaccactttgaggctcttgctctgctctttagccaaggagtctcccttcctgccttcagtaacaacattacaggaagagaggagagaaaggtaggagttaaagatccagtcatttgtttccatctaaagtgccctataagccgggcatggtggcgcaagcctgtagtcccagctactcgggaggctggggcaggagaatcacttgagcccaggagttggaggccgcagtgagctgtgatcatgccactgcattccagcctgggcgacagagtgagacccagactcagctgaaaaataataatattattaaaagaatttaaaataaagtgttccatagatgtg

SEQ ID NO: 10189 - DNA, 1400 bp, Homo sapiens
caacattgatcccaatgccaagggttggatggattgggcagcccacaagctaacaggcctcacctcttccattccggagatgatccttggacatcttttcagccaggaagagctctctggaaattctgagttgatacaaaagtacagaaatatcattacacatgcacccaacctggataacattgaattgtactggaacagctacaacaaccgccgagacctgaactttgagcgtggaggtgatatcaccctcaggtgtcctgtgatgctggtggtggaatgtaactcaaaactggaccccacccagacctcgttcctcaagatggctgactccggaggtcagccccagctgactcagccaggcaagctgaccgaggccttcaagtacttcctgcaaggcatgggctacatggcctcatcctgcatgactcgcctgtcccggtctcgtacagcctctctgaccagtgcagcatccgttgatggcaaccggtcccgctctcgcaccctgtcccagagcagcgagtctggaactctttcttcggggcccccggggcacaccatggaggtctcctgttgaatggcccttgttgccctagagtgggacccagccctcacctcccccagagctaacctgggaggtgctgaaggggcattgggccaccgtaagcaagggaaaaagggcagatcatgcggggagatgaccttgatctttgattgctaccctaaccttgacctttaacccgtgattccccccagctcctggaagagatgtcctaatatctcttagggacccagacccctaaattctcctcctcccccattttgatgttaaggtggagagggcatatgcatcctctgtcctgatctaggtgtctatagctgaggggtaagaggttgttgtagttgtcctggtgcctccatcagactctccctacttgtcccatatttgcaaggggaggggatttggggctggggctccattcaccaaagctgaggtggcttctcattaaccctttaggactctgaagggtatggacctacgtgaatgtgtgtcagggggagacttgctggtgggttagtggtcctcaggatgtgatagaaacatccagtgtaaaaaggaagttggaatgggagttggcgggcagtgaacgagtgtggggaaggattggtgctggggcaacaggaaggggcctggggccgtttggctgcactaactttggtagctcagtgtgcatctagagtgggactggggagggagctaagcttgggctgggctgcttggggcttggcatagggtggaaagggctaccctggggctctgaccacactgtagtatgtgtggagggtgccctcccgtctcccacaacttctgctataacaataaactgtagaggaatctg

SEQ ID NO: 10190 - DNA, 600 bp, Homo sapiens
tgcccagcagtggaaccagtactatcagaaccagggccagtggccgccatactacgggaactacgactacgggagctactccgggaacacacagggtggcacaagtacacagtagccagtgtgacccagaggctcccggaggcccctgccggcttcctccaccagcgcctgcctcggcccctcctctgcccccgccagatcccgtggtgctggggatggggtcatcccagggctgcctccctccagcccactgcctcccctctgaggggcttccttcccctccatagggccaggcatttttttctggattcaaacaggcaacaatgaccttttattttctgtttgtccccacctccccagccttccacctcctgttcttcctaccttcttcctttttgactaaataatccccacctcccttgatcatacagtgaggctacagtgactgaggggagaatcccctcctgttcactctcccaaccctgctccagcccctcagcttcccagaccctcatgcagttggttgtaaattctcccaggagctgttttactgtctacttttcaggattaaaaaaaaaatcaaaacttaaaaaaaaaaaa

SEQ ID NO: 10191 - DNA, 1400 bp, Homo sapiens
gctcccggaggctggccgggcaggcgtggtgcgcggtaggagctgggcgcgcacggctaccgcgcgtggaggagacactgccctgccgcgatgggggcccggggcgctccttcacgccgtaggcaagcggggcggcggctgcggtacctgccccaccgggagctttcccttccttctcctgctgctgctgctctgcatccagctcgggggaggacagaagaaaaaggagaatcttttagctgaaaaagtagagcagctgatggaatggagttccagacgctcaatcttccgaatgaatggtgataaattccgaaaatttataaaggcaccacctcgaaactattccatgattgttatgttcactgctcttcagcctcagcggcagtgttctgtgtgcaggcaagctaatgaagaatatcaaatactggcgaactcctggcgctattcatctgctttttgtaacaagctcttcttcagtatggtggactatgatgaggggacagacgtttttcagcagctcaacatgaactctgctcctacattcatgcattttcctccaaaaggcagacctaagagagctgatacttttgacctccaaagaattggatttgcagctgagcaactagcaaagtggattgctgacagaacggatgttcatattcgggttttcagaccacccaactactctggtaccattgctttggccctgttagtgtcgcttgttggaggtttgctttatttgagaaggaacaacttggagttcatctataacaagactggttgggccatggtgtctctggtatagtctttgctatgacttctggccagatgtggaaccatatccgtggacctccatatgctcataagaacccacacaatggacaagtgagctacattcatgggagcagccaggctcagtttgtggcagaatcacacattattctggtactgaatgccgctatcaccatggggatggttcttctaaatgaagcagcaacttcgaaaggcgatgttggaaaaagacggataatttgcctagtgggattgggcctggtggtcttcttcttcagttttctactttcaatatttcgttccaagtaccacggctatccttatagctttttaattaaatgaagccaagtgggatttgcataaagtgaatgtttaccatgaagataaactgttcctgactttatactattttgaattcattcatttcattgtgatcagctagcttattcttgtgtactttttttaaactgtgggttttcctagtaaatttaatttacagaaatcaatggtagcatttagtaatctacaaaggaaatatcaaagtgtttttcaagcctgttatattcagtgtgtgccacaggattgaaataaatgacaatgtaattatg

SEQ ID NO: 10192 - DNA, 600 bp, Homo sapiens
tattgtttcctatttcattgatttatcctctaatttttattataattttctttgtttggcttactttgagtttggttttctccgcattttaatttttgaaatggtagctgaggctattgatttgagacctttcttgtaatgtagtcattccctcttaactactgctttagtagtatctcaaagattgtgttatgttgcgttttcattttcattcagttcaaagtatttccaatttcacttttgttttcttctttgacttatgagttatttagaggcatgccacttcgttttcaaatatttgggagttttttcagaaatttttgttgttgatttttgattccgctatagtcagaaaatatgtttttatgactttaaacattttaaatttattgagactagtttttggtctagatggtctattgctgtattcagtgttcactttaaaataatgtgtatccacttatttatgggtattttataaatgcctgttagataaaatcggttaattatgttattcaagtcttctggagcctttctgattttctgtcttcttgtatcaatatttgagagaggggtattaaaacctctgattatggactt

SEQ ID NO: 10193 - DNA, 600 bp, Homo sapiens
tcagcaaccgctggaagctggcccaggtacaagtacaaaaagactctaaagaagctgtcaagaagaaggcagctgagcaaacagctgcccgggaacaggcaaaggaggcgtgcaaagctgcagcagaacaggccatctccgtccgacagcaggtcgtgctagaaaatgctgcaaagaagagagagcgagcaacaagcgacccaaggaccacagaacagaaacaagagaagaaacgactcaaaatttccaagaagccaaaggacccagagccaccagaaaaagagtttacgccttacgactacagccagtcagacttcaaggcttttgctggaaacagcaaatccaaagtttcttctcagtttgatccaaataaacagaccccgtctggcaagaaatgcattgcagccaaaaaaattaaacagtcggtgggaaacaaaagcatgtcctttccaactggaaagtcagacagaggcttcaggtacaactggccacagagatagtcctggaagacacgtggcgcctgtggaccggaagcaccaaatgctggtgctgcttttgtacatacatatttttaaaccattaaaattcttcctgaagaaa

SEQ ID NO: 10194 - DNA, 1400 bp, Homo sapiens
gtgagagggagctctacatcccatctgtggatcttctgactgcccaggacctgctgtcctttgagctgttggatataaacattgttcaagagttggagagagtgccccacaacacccctgtggatgtgactccctgcatgtctcctctgccacatgacagtcctttaatagagaagccaggcttggggcagatagaggaagagaatgaaggggcaggatttaaagcacttcctgattctatggtgtcagtaaagaggaaggctgagaacattgcttctgtggaggaagcagaagaagacctgagtgggacccagtttgtgtgtgagacagtaatccgatcccttaccttggatgctgccccagaccacaaccctccttgcagacagaagtccttgcagatgacatttgccttgcctgaaggaccacttggaaatgagaaggaggagattatccatatcgctgaggaagaagctgtcatggaggaggaggaggatgaggaggatgaggaggaggaggatgagctcaaagatgaagttcaaagtcagtcctctgcttcctcagaggattacatcatcatcctgcctgagtgctttgataccagccgccccctgggggattctatgtacagctctgcgctctcacagccaggcctggagcgaggtgctgaaggcaagcctggggttgaggctgggcaggaaccagctgaggctggggaaagactccctggaggggagaaccagccacaggagcacagcataagtgacatcctcacgacctcacagactctggaaacagtgcccctaatcccagaggtagtggagcttccaccgtcactgcccaggagctctccttgtgtacatcatcatggttccccaggagtggatttaccagttaccataccagaagtttcttcagtccctgatcagatcagaggagagcccagaggctcatcaggacttgtaaacagcagacagaagagctatgaccactcaaggcaccatcatgggagcagcattgctggaggactggtgaagggggctttgtctgttgctgcctctgcatacaaggccctgtttgctgggccaccagtcactgcacagggtctctggggcttgctgtcattccttcatctggccaaaaaatgcttcttcctgaaagccccgagtgaagcattctcctggttctaagtacagttcattagctccccggtttcccttttctcctccttcaagtacacagataactaatctaaaatagggccttcccagtccgaaccgttggtatcaagtacacaggagtgccatagccttgaatctaattacctagtactttgaataaatctggaaagactagtatgcttgcaagatgatacaaatgtataaaataaacatttaaattat

SEQ ID NO: 10195 - DNA, 600 bp, Homo sapiens
gtttcagtgcaccatgtgtttgctttgtgaaggtgaagaatatgttggtttagagaaagaaattggatgtaattttatgcaatttacttttaaagacaaacataactatttagcagagaatattttaataaatgcaaaacaacagctggactgctgtacatcaaggacagattaactggaaaacatatgttccttatgtgtgatcgagagccattcagaaaagacttcctttgtgttcagcctatacttttccatatggtataccttgaaaaaaattagcacaccatggttatttttctaccttttataaaagacagagcctgtttactcatttagaagatagagaaaattggtctaaaattgaacatcctagattcacactcccaagtcacttaaggtgatttgatggtgaggaaaatgattgacaaagcccaacaatgatctcaggaattacattttccaacagaccaaaaaatgttttcatgtagcagcaatgcagatttggtgaatatttaatatatattttagtatgtatttcactttatgactgacaattaaaaaatattgtttggccaaatagtaaacacccttttgaaacca

SEQ ID NO: 10196 - DNA, 600 bp, Homo sapiens
gccccagccagccccggaaagccagcgccacatgcagttcggccacagcagcagcctccagtggcctggaggagtggactagccggtccccgcggcagcggagttcagcctcgtcacctgagcaccctgagctgcatgctgaattgggcatgaagcccccttccccaggcactgttttagctcttgccaaacctccttcgccctgtgcgccaggtacaagcagtcagttctcggcaggggccgaccgggcaacttccccccttgtgtccctctaccctgctttggagtgccgggccctcattcagcagatgtccccctctgcctttggtctgaatgactgggaagatagacaagaggcacacagagacagaccaactggcagccaggcagccccagaggagagagacattcagacagaggaaagtctccctgcccctcattccttccaagatgagaaaaacttgccgccaccccccgacactgatgccagggaggtgggaggaagaagtgggaaatttcccttcccagtacccccaagaacgtctgagccttcaatgttgaattttttctttattaaaattacttttatcttataaaatc

SEQ ID NO: 10197 - DNA, 600 bp, Homo sapiens
atagccaatcccaccgatgttctaaagattcgaatgcaggctcaaggaagcttgttccaagggagcatgattggaagctttatcgatatataccaacaagaaggcaccaggggtctgtggaggtgcttatgttcaaaagctgttaccggctgtgtgctgtggctcatgcctgtaatcccagcactttgggaggccaacgcgggtggatcacttgagggtgtggttccaactgctcagcgtgctgccatcgttgtaggagtagagctaccagtctatgatattactaagaagcatttaatattgtcaggaatgatgggcgatacaattttaactcacttcgtttccagctttacatgtggtttggctggggctctggcctccaacccggttgatgtggttcgaactcgcatgatgaaccagagggcaatcgtgggacatgtggatctctataagggcactgttgatggtattttaaagatgtggaaacatgagggcttttttgcactctataaaggattttggccaaactggcttcggcttggaccctggaacatcattttttttattacatacgagcagctaaagaggcttcaaatctaa

SEQ ID NO: 10198 - DNA, 1152 bp, Homo sapiens; identical to SEQ ID NO: 4963

SEQ ID NO: 10199 - DNA, 1400 bp, Homo sapiens
gagacacaagaagcggatccaggaagttggtgaaccatctaaagaagagaaggctgtggccaagtatcttcgattcaactgtccaacaaagtccaccaatatgatgggtcaccgggttgattattttattgcttcaaaagcagtggactgtcttttggattcaaagtgggcaaaggccaagaaaggagaggaagctttatttacaaccagggagtctgtggttgactactgcaacaggcttttaaagaagcagttttttcaccgagccctaaaagtaatgaaaatgaaatatgataaagacataaagaaagaaaaagataaaggaaaagctgaaagtggaaaagaagaagataaaaagagcaagaaagaaaatataaaggatgagaagacaaaaaaagaaaaagagaaaaaaaaagatggtgaaaaggaagaatccaaaaaggaggaaactccaggaactcctaaaaagaaggaaactaagaaaaaattcaaacttgagccacatgatgatcaggtttttctggatggaaatgaggtgtatgtatggatctatgacccagttcactttaaaacatttgtcatgggattaattcttgtgattgcagtaatagcggccaccctcttccccctttggccagcagaaatgagagtaggtgtttattacctcagtgtgggtgcaggctgttttgtagccagtattcttctccttgctgttgctcgatgcattctatttctcatcatttggctcataactggaggaaggcaccacttttggttcttgccaaatctgactgctgatgtgggcttcattgactccttcaggcctctgtacacacatgaatacaaaggaccaaaagcagacttaaagaaagatgagaagtctgaaaccaaaaagcaacagaagtccgacagtgaggaaaagtcagacagtgagaaaaaggaagatgaggaggggaaagtaggaccaggaaatcatggaacagaaggctcggggggagaacggcattcagacacggacagtgacaggagggaagatgatcgatcccagcacagtagtggaaatggaaatgattttgaaatgataacaaaagaggaactggaacagcaaacagatggggattgtgaagaggatgaggaagaggaaaatgatggagaaacacctaaatcttcacatgaaaaatcataatctgactaattttgggactgaatgaataagtacaagaggaaatccacactgatttgtacgtctgactgagagaaagatggtcgtctccagcagagaaagtgaacagcatttgttggaaggtgatggctctccctcctccctccccatttcattggcgtaacgtaaagtgtattctgtacataatttacaaataaaacattttattttaattgtt

SEQ ID NO: 10200 - DNA, 1400 bp, Homo sapiens
gatcacgtggaactcacattcaatgacatgaagaacgtgccagaagccttcaaagggaccaagaaaggcactgtctaccttaccccttaccgggtcatctttctgtccaagggcaaggatgccatgcagtccttcatgatgccattttatctcatgaaagactgtgagatcaagcagcccgtatttggtgcaaactacatcaagggaacagtgaaggcggaagcgggaggtggctgggaaggctctgcttcctacaagttgactttcacggcagggggcgccattgagttcggacagcggatgctccaggtggcatctcaagcctccagaggtgaagtccccagtggagcctatggctactcttacatgcccagcggggcctatgtctatcccccgccagtcgccaatggaatgtacccctgccctcctggctacccctatccaccgcccccacctgagttctatccaggaccccccatgatggacggggccatgggatacgtgcagcccccaccaccgccctaccctgggcccatggaacctccggtcagcggccccgatgtcccctccactcctgcagccgaagccaaggccgcagaagcagccgccagcgcctattacaacccaggcaatcctcacaacgtctacatgcccacgagccagccgccgccacctccctactacccaccggaagataagaagacccagtaggccctcctgcctccctgcctcccaccctcatctctctaccctacccctcccatcggggctgtgctggggcttggggaggggagggggcgccttgttctccctccaggtctgatcataaacaattaccaggaactagcattgtgggacattagggcccccggcctcgggagaggtgccgcccagcttcccatgccagcccggagcccacagtgctgcccagcgtacctccctcaccgtctggggctcttctgggagcacggagcatcccctgttcctgtttcactctcagcttctcccctcgaagggactctctggccacctcctccaccgcagtccagctccctcagtctggcacccactgctacactcagcctcatgagccacttcagaccagccagaaggagcttcctgactggaaccagagaatgcatgtctgtccacttggtggctgctgggtggggccgggaacaagggcccctgaccctgtgtgctggccgggacctgccaccagccccccagcctgcttcttccccttaagctttgtgcccctggatgcgctaacattcactcttgtttgtccctggactggccatgaagtgaggagatggttatttaaagagaattccctatttatttgacaaaaaatccagttaatatattaatgtgaaataaaccctgtttgcacctcg

SEQ ID NO: 10201 - DNA, 600 bp, Homo sapiens
gcgggccgggcctccgccaccgcgtggtcctttgcaagagcgcagaccaccgcgccacgctgcccccggcgcactgctcacccgccgccaagccaccggccaccatgcgctgcaacttgcgccgctgccccccggcccgctgggtggctggcgagtggggtgagtgctctgcacagtgcggcgtcgggcagcggcagcgctcggtgcgctgcaccagccacacgggccaggcgtcgcacgagtgcacggaggccctgcggccgcccaccacgcagcagtgtgaggccaagtgcgacagcccaacccccggggacggccctgaagagtgcaaggatgtgaacaaggtcgcctactgccccctggtgctcaaatttcagttctgcagccgagcctacttccgccagatgtgctgcaaaacctgccatggccactagggggcgcgcggcacccggagccacagctggcggggtctccgccgccagccctgcagcgggccggccagagggggccccgggggggcgggaactgggagggaagggtgagacggagccggaagttatttattgggaacccctgcagggccctggctggggggatgga

SEQ ID NO: 10202 - DNA, 600 bp, Homo sapiens
ttacgtttgaagacattgcaccagatgccattacatttattggccccccgaccttgtagaaaaacccctaccctcacaataccttatttaagtaactttaaattatgccgttacttttcatatttgcactaagatatttccaggctgcatttgtatatttagattttttggttaagctttgacactggaatgagttgaaaaaatgtgccattttgcattttcatctactcatttaaagtattttattcttattcaaagaaatatctgagctctttgcactacctgttatcagtagtgcctttacttcaggcttgataatacttaggtgtgattataaaatcatgaagcaggtaaagggaggggcaagcccccaaactgctgtggggacattttataatctatatgctgcacccacttaatctactgtggtgttttgtttattagttttgcataatttcagcttctatatattgtatgtatatattttttaaaaatctatattttgggaaaaaaacatacacaatgtgtctttctttttggacatttacctttttgaaaaagaaaacacttaaaatgatcattaggacataacagactagg

SEQ ID NO: 10203 - DNA, 600 bp, Homo sapiens
  misc_feature (139)..(196): n is a, c, g, or t
ctgtcgccccaggccgccccttgactgcttccagtgaacaaacctgctgttcctcctcatccagctgccctgcccattttgaaggaacaaatgtggaaggtgtttcctcccaccagagtgccctccctcatcaggaggnnnnnnnnnnnnnnnnnnnnnnnnnnnnnnnnnnnnnnnnnnnnnnnnnnnnnnnnnntttaactggcgactccggtattaagctctgcccttgtcctgcctccggtgaggctgagccagtcaaggaggtgagggttagtgccaccctgccagatctggaggactactccccgtgtgcactgcccccagattctgtaccgcaggtctttcccatggggctgtcttccagtgaaggggacatcccatacgtagttttgagagggtggatgggttacttgcccaccagaaacagccctagtcccaactccttgcgttccttttggcccctccctgcctacctagaatctgcctgaaagggctggagccctgaggagaggggcagtattgggggactgtgctagctttacccccgcaagacatacacaggagcctttgatctcattaaagagacgtgaaccagct

SEQ ID NO: 10204 - DNA, 600 bp, Homo sapiens
aaactttgtacacacaaaaactggtgtaattggcaaataactcaagactcacaagaaacctataacttcacactcatagctgaaaattacttaaggaagagaagtgtcaatatcctttttaacctgactcatcgaggtgagactagagttgtcacagcccaccgtggccactaacgtgtctttgtttcacagactgtgtgatcaagtaaatgtgctgtagatctttgcctcattcacagcggaggtgagagttagaatttatacctattgttcatgccacgtttctcctcatggatgcacgcatcccctattatttgtttcttttaataatgtcacgagcaccaatgagcttactacccaacttcaaaactaggactctaacaataacttctgtcatatctcatcctgtaacgcccccaccttcgctccttccgccaagataattatcactttaaattgtgtgcgtgtgtattctcatttcttatgtgatggtaaaaatgcctttattttgtttggttttaatgcatagaaaggacatcaagctgtatgtaataattcagtaattatgtttatataatattaaattgctaatatttgccc

SEQ ID NO: 10205 - DNA, 1400 bp, Homo sapiens
ccatgcaaccttgggcgctgccaaccgtgggcgagctctgggtgtgcgggcggcctggcgcggcgctccgctgtgtcagcgtgttatgatgccgtcccgtaccaacctggctactggaatccccagtagtaaagtgaaatattcaaggctctccagcacagacgatggctacattgaccttcagtttaagaaaacccctcctaagatcccttataaggccatcgcacttgccactgtgctgtttttgattggcgcctttctcattattataggctccctcctgctgtcaggctacatcagcaaagggggggcagaccgggccgttccagtgctgatcattggcattctggtgttcctacccggattttaccacctgcgcatcgcttactatgcatccaaaggctaccgtggttactcctatgatgacattccagactttgatgactagcacccaccccatagctgaggaggagtcacagtggaactgtcccagctttaagatatctagcagaaactatagctgaggactaaggaattctgcagcttgcagatgtttaagaaaataatggccagattttttgggtccttcccaaagatgttaagtgaacctacagttagctaattaggacaagctctatttttcatccctgggccctgacaagtttttccacaggaatatgtatcatggaagaatagaggttattctgtaatggaaaagtgttgcctgccaccaccctctgtagagctgagcatttcttttaaatagtcttcattgccaatttgttcttgtagcaaatggaacaatgtggtatggctaatttcttattattaagtaatttattttaaaaatatctgagtatattatcctgtacacttatccctaccttcatgttccagtggaagaccttagtaaaatcaaagatcagtgagttcatctgtaatattttttttacttgctttcttactgacagcaaccaggaatttttttatcctgcagagcaagttttcaaaatgtaaatacttcctctgtttaacagtccttggaccattctgatccagttcaccagtaggttggacagcatataatttgcatcattttgtcccttgtaaatcaagatgttctgcagattattcctttaacggccggacttttggctgtttcctaatgaaacatgtagtggttattatttagagtttatagccgtattgctagcaccttgtagtatgtcatcattctgctcatgattccaaggatcagcctggatgcctagaggactagatcaccttagtttgattctattttttagcttgcaaaaagtgacttatattccaaagaaattaaaatgttgaaatccaaatcctagaaataaaatgagttaacttcaaacatttcagaaaac

SEQ ID NO: 10206 - DNA, 600 bp, Homo sapiens
acccccaccctctgggacaggccctcccccatgttcttctgtctccaggaagggcagcggccctcccatcactggaagtctgcagtgggggtcgctgggggtggagagaacactaagaggtgaacatgtatgagtgtgtgcacgcgtgtgagtgtgcatgtgtgtgtgtgcaaaggtccagccaccccgtcctccagcctgcaaggggtgtctggcgccttgcctgacacccagccccctctccccctgagccattgtgggggtcgatcatgaatgtccgaagagtggccttttcccgtagccctgcgccccctttctgtggctggatggggagacaggtcagggccccccaccctctccagcccctgcagcaaatgactactgcacctggacagcctcctcttttctagaagtctatttatattgtcattttataacactctagcccctgcccttattgggggacagatggtccctgtcctgcggggtggccctggcagaaccactgcctgaagaaccaggttcctgcccggtcagcgcagccccagcccgcccacccctgcctcgagttagttttacaattaaaacattgtcttgttt

SEQ ID NO: 10207 - DNA, 1400 bp, Homo sapiens
atatcttgaacaggttattggtcagttatgatcccaggataagaccaaacttcaaaggcattcctgttgatgtagtagtcaacatttttattaacagttttggatccattcaagaaacaacaatggactatagagttaacatcttcctgagacaaaaatggaatgaccccaggctgaagctccccagtgattttaggggttcagatgcactgacagtggatccaacaatgtacaagtgtttatggaaacctgatttattttttgcaaatgaaaaaagtgccaattttcatgatgtgacccaggaaaacatcctcctctttatttttcgtgatggagatgtccttgtcagcatgaggttatctattactctttcatgccctttggacttgacattgtttcccatggatacacaacgttgcaagatgcaactggagagctttggttacacaactgatgatttacgatttatctggcagtcaggagatcctgtgcaattagaaaaaattgccttgcctcaatttgatatcaaaaaggaagatattgaatatggtaactgtacaaaatactataaaggcacgggctactacacatgcgtggaagtcatcttcaccctgaggaggcaggtcggcttttacatgatgggggtctacgccccaactctgctcattgttgttctctcctggctttccttctggatcaacccggacgcgagtgctgccagagtgcccctgggtatcttctcagtcctcagcttggcctctgagtgcacaacccttgccgctgagcttcccaaagtttcctatgtgaaggctcttgatgtttggcttattgcttgccttctctttgggtttgcttccctggtggagtatgcagttgtccaggtgatgctgaacaaccccaaaagggttgaagctgaaaaagccagaattgctaaggctgagcaagcagatggaaaaggtggaaatgtggctaaaaagaatactgtgaatggaacagggactcctgttcatattagcactttgcaggttggtgagaccagatgcaaaaaagtttgtacttctaagtctgatctgagatctaatgacttcagcattgttggaagcttaccaagagattttgaactatccaattatgactgctatggaaaacccattgaagttaacaacggacttgggaaatctcaggctaagaacaacaagaagcctccccctgcgaaacctgttattccaacagcagcaaagcgaattgatctttatgcaagagcattgtttcctttctgcttcttgttcttcaatgttatatattggtctatatatttatgataaatcttttccatttgtacaaaataaaattccatttcattgtgacctactcctttcataaatgccaatctgtgagaa

SEQ ID NO: 10208 - DNA, 1400 bp, Homo sapiens
aggtggcaccatctaaagaaaagaggtcttgttttttgtttaaaaaagtttgtggggaggaaagacatctgtgtatcacttcaaaatattgatttactgctaaacatcactctgaatttatgatgtggatactaacttcatacatttatcggcattgtccaaaatattttattctttaatggaaaaagccattaatattcaaatgaagggatcacattaaaaaaaacccatacataagaaacagcctccaagaacattcaagcagcagtcagagagaaaaatgtttcgacagccaagttttcttcaaaatattatgtgacagaatacgactcaattcaccggctacaacaattcatagaatttttcaatgttttcttgagatgcaaaagttcactgttgcagtgttttcaaatgaccaatcaagtactacttcttggttaaaaggccactggtagagtcatctgagtgtagagaatgtcccttcactgctggaaaaatccactggctcccaagaaaagaaaatggtctgaagcctctgttgtggctctcacaactcatctttccctaagtcatcaagctccacatcactgaggtcaatgtcatcctccacgggaagctgggagacgacagaaagccactgttagatctgcagaaggggacaccctggaaggtcaacatctcattttatggaagagcgactctctggagctactcctgctacaatccaggttctcctcagtctgactcctaccctgaccttcgtacctatgattatacggatggaaaagctcagaactcaggtgaaacatttcaacatcacatcactcaccattttaacactggaagccacttgaacgtgtccttttgaggagggtgggacacaacagtacagaaataagtgctaatttcaaagctatcattttctatttttctaagataaagtaaatgaattccaggttaaatgttcactttaaggtaataatcaggaaagcaaccttactactgaaatgtatcttggctgtcaagagtatcaaatgccatgcagcacttaaacttgtgataaggaagatgaagggtcttcagagaagaacctcttaaaaggcccacgggtgcaccagggctgaggtctgatgggaaggacttgactccaggtgcagagatgcacaggctcaagagagtaaaccaggactgctgcccgcacagcttccctcccgggcactcacctcgccatccctgccgtcccaaggctctctctcaacgatggtagggaaagccccgcctcctacaggtgccgtggagccacgcccaaaagagagctcccttagggaaaaatgaccaaaacacacacacacatttacaatggactgctggtgcagaagaataaacaactttaaaaataa

SEQ ID NO: 10209 - DNA, 600 bp, Homo sapiens
agctcagaggcaaggtaataaagcacttcagggcttgctccccaagtgggcctgatttagcaggtggtcctgcgggcgtccaggtcagcaccttcctgtagggcactggggctagggtcacagcccctaactcataaagcaatcaaagaaccattagaaagggctcattaagccttttggacacaggaccccagagaggaaaaagtgacttgcccaaggtcgtaagcaagctactggcatggcaagagcccagcttcctgacggagcgcaacatttctccactgcactgtgctagcagctcagcagggcctctaacctgtgatgtcacactcaagaggccttggcagctcctagccatagagcttcctttccagaacccttccactgcccaatgtggagacgggttagtggggctttctatggagccatctgctttggggacctagacctcaggtggtctcttggtgttagtgatgctggagaagagaatattactggtttctacttttctataaaggcatttctctatatacatgttttatatacctcattctgacacctgcatatagtgtgggaaattgctctgcatttgacttaatt

SEQ ID NO: 10210 - DNA, 600 bp, Homo sapiens
gaatggacctgtgagaggaagggaaggtggcagaaagtctcatttcaggaaggacggtgttaactctttctgctccttgcattttgacatccctgaaggggagctcttggatatcattggccatgtttcaatcgaatggagccactgggccccaacactggctttgagatttagagtcaaagggtagagtgaacaggaaagggtcacgtggtcccatgttgcaacagccccaacatcacgcatgtcattcactgccttgccactccatctccctccgtgctccagccacccctgagctgaggctcccattgtctccatcagagcctgcatgtgtatgccgtcctcccctggtccggtgtttgtgttccccacccctcacagactgcctgagctcttctgtaagctggggtagggtgatggcagtgctccgggaactgggcctgcagccttcctcttctgggactgctgtgaggcagaggaatgatggagaatctagtgtagcagcctccaggcaggattcagcacaacactggggagtcacccttccctcgggcctctgcctaccaacaactgggcttatcactgggaaaacacaaaaaa

SEQ ID NO: 10211 - DNA, 1400 bp, Homo sapiens
cccgcgttctctccttgaatccactcgccagcccgccgccctctgccgccgcaccctgcacacccgcccctctcctgtgccaggaacttgctactaccagcaccatgccctaccaatatccagcactgaccccggagcagaagaaggagctgtctgacatcgctcaccgcatcgtggcacctggcaagggcatcctggctgcagatgagtccactgggagcattgccaagcggctgcagtccattggcaccgagaacaccgaggagaaccggcgcttctaccgccagctgctgctgacagctgacgaccgcgtgaacccctgcattgggggtgtcatcctcttccatgagacactctaccagaaggcggatgatgggcgtcccttcccccaagttatcaaatccaagggcggtgttgtgggcatcaaggtagacaagggcgtggtccccctggcagggacaaatggcgagactaccacccaagggttggatgggctgtctgagcgctgtgcccagtacaagaaggacggagctgacttcgccaagtggcgttgtgtgctgaagattggggaacacaccccctcagccctcgccatcatggaaaatgccaatgttctggcccgttatgccagtatctgccagcagaatggcattgtgcccatcgtggagcctgagatcctccctgatggggaccatgacttgaagcgctgccagtatgtgaccgagaaggtgctggctgctgtctacaaggctctgagtgaccaccacatctacctggaaggcaccttgctgaagcccaacatggtcaccccaggccatgcttgcactcagaagttttctcatgaggagattgccatggcgaccgtcacagcgctgcgccgcacagtgccccccgctgtcactgggatcaccttcctgtctggaggccagagtgaggaggaggcgtccatcaacctcaatgccattaacaagtgccccctgctgaagccctgggccctgaccttctcctacggccgagccctgcaggcctctgccctgaaggcctggggcgggaagaaggagaacctgaaggctgcgcaggaggagtatgtcaagcgagccctggccaacagccttgcctgtcaaggaaagtacactccgagcggtcaggctggggctgctgccagcgagtccctcttcgtctctaaccacgcctattaagcggaggtgttcccaggctgcccccaacactccaggccctgccccctcccactcttgaagaggaggccgcctcctcggggctccaggctggcttgcccgcgctctttcttccctcgtgacagtggtgtgtggtgtcgtctgtgaatgctaagtccatcaccctttccggcacactgccaaataaacagctatttaaggggg

SEQ ID NO: 10212 - DNA, 1287 bp, Homo sapiens; identical to SEQ ID NO: 4977

SEQ ID NO: 10213 - DNA, 600 bp, Homo sapiens
agtacaggaaccagcctcatttgattccttctatttgcacaagtcaccttggactgcagggagctgttttgcaaaagcagtttagtaggcttagatctcaaattcatcttgagaacatttttttgaggtagtaatttcctcagaagactcttgtgttttgttttggtttttttttctgagctactcggactctttattagaacaatcaatcattttcctttggacctacaatttttgcctatgctgcagccactttgtgagtgagaatgaatatgtctgtgtgaacacacaggcatgcgtgtgtatgtgcacgtacatgggccagaatgaatggatgtgtgtgtgtgagggatacctcagatttttcttttcttattttgtgtgaaaatctcttttctacagattttccagggtttaagcattgcttgctgtataaaaaactttactgaattatatacagtttgaatgaaatgttattttaaaaacaaaacaattgttaagtgttccataaaggttatgttgaattttggtcagatgaatatttgtaagtaaaaaatatatgcatttctgaacctcaacttacatagattttctttatat

SEQ ID NO: 10214 - DNA, 600 bp, Homo sapiens
gcatcccacctccttgtttaaggaagtacaggaaccagcctcatttgattccttctatttgcacaagtcaccttggactgcagggagctgttttgcaaaagcagtttagtaggcttagatctcaaattcatcttgagaacatttttttgaggtagtaatttcctcagaagactcttgtgttttgttttggtttttttttctgagctactcggactctttattagaacaatcaatcattttcctttggacctacaatttttgcctatgctgcagccactttgtgagtgagaatgaatatgtctgtgtgaacacacaggcatgcgtgtgtatgtgcacgtacatgggccagaatgaatggatgtgtgtgtgtgagggatacctcagatttttcttttcttattttgtgtgaaaatctcttttctacagattttccagggtttaagcattgcttgctgtataaaaaactttactgaattatatacagtttgaatgaaatgttattttaaaaacaaaacaattgttaagtgttccataaaggttatgttgaattttggtcagatgaatatttgtaagtaaaaaatatatgcatttctgaacctc

SEQ ID NO: 10215 - DNA, 1400 bp, Homo sapiens
gcactgtgaagcttcagacaccttgaaagtcctaacattagaattgtaaatgttatttatggaaataccttccaatgctattgagaaattcaaatctctattgtatattgttctttgatatgtggcttagttttatgttttgattttttttgctactgtgcaagtttaatgtgaataaaatctttgtggaatgatgattttatgtttagtgagtggtcatctgaattttccagctccccagaaaatgtatgcactggtatagcacccttatgttactaaagcctagtctaacactgaactcatgttcttgatgagaatacttctagatgaggagtatagtggtaagtaagctctgacttggctccttccacaaaccaaaaagctggaacttaccactcaaaaacatgtataacctaataaattctacacaaggctttcaagaccatcagagagcaaaaccacatgttctgtcttgaggagccatagcagaaagagcaaattagtcattatttactgaacatgatgatttactaaatctctccatctgcattagtattttaaggagcactgtgagagaaatcacaaagtattagagtttaccatgattcagagaagttcttcaggcctgtagaaagaggagtatggaccagccttacatttgttgaaataacttgaaaaggacccatttcttgaagaaactgaagtaatagcaataagatttgatgtgtgagtagctttgatttaaaatcaatgcaaaaagcacaactaataaattgaatgtttccatgtacctcactttatttcagttaacaagatactttgacttgaagtgtttttagtgtatccctatgaaaatcatttttggtacatctaagttttcacttataaactgttatttcaaagcaaacatactagtgatatatatatgatttatggatgttgacgccaatgttcagtttgggtacgttggtgtattgcaaggggagaggcttttataacaatagatttgaacatttttaaaaaattggactgtgtaacttaaatacacaattatttggtttaggatggttattagggcccattagaaacaggagaagtattttacccattcttaaagctctaaaaaaccatctcatggactgaaaggtagatagacagatggaccacaatgggaaataggatgtccatttgtacttctttgtacttttttgttaataaactgttttggaattaatggcttaatttgtgatatcatgttctagaaatacctgcaacatgacagtctaatcagtagtctattaaaacttgtattcataatgtgtataatttcctggtaaggctaactcctgatcgtttctgtagaaagatgacaaataaagaaaaagttataattattaatt

SEQ ID NO: 10216 - DNA, 1400 bp, Homo sapiens
ctagaagatgcccaagagtcaaaggctttagttaacatgcctggcccatcttctgaatcccttgggaaggatgacaaacccataagcttacaaaactggaaaagaggattggatatattatcacccatggagagattccaccttaaatatttatatgtcactgacctggctactcagaactggtgtgaactgcaaacagcatatgggaaggagcttcctggtttcttggcacctgagaaggcagctgtgttggacactggtgccagcatacacctagctagagaactagaacttcatgatcttgtgactgtcccagtcaccactaaagaagatgcttgggcaattaagtttctgaacatacttttgctgattcctaccctgcagtcagaagggcacatcagagagtttccagtgtttggggaaggggagggtgtacttcttgttggagtgattgatgagctgcactatacagccaagggggaactggagctggcggaactcaagacacgcaggcgccctatgctccctctggaagctcagaagaagaaagactgttttcaagtcagcctatacaaatatatctttgatgccatggtacaaggaaaagtgacccctgctagcctaatccaccacacaaagttgtgtctagaaaagccactggggccatcagtgctgaggcatgcccagcagggaggcttctctgtgaagtctttgggtgacctcatggaacttgtcttcttgtctctaacactgtcagacctcccagttattgatatcttgaagattgagtatatccaccaagagactgccactgtgctgggtactgagattgtagccttcaaagagaaggaggtgagagccaaggtgcagcattatatggcctactggatgggccaccgagagccccagggagttgacgtggaggaggcttggaagtgccggacgtgtacctatgcagacatttgtgagtggagaaagggcagtggagtgctcagctctacactggcgccccaagtcaaaaaagccaaatgaatagaaggtatgctttcaagaatgttgatccttcctgctcctgttgtacctaagcaaaagaggaccagtctctgagcttggcttttatggagagtgttcttattttggttcttttttttatttccacaacctctaaccacattcagtccaggaccaaggctcagggatgagtgggagagatgggttatactgtccctggagcttcatcatgattgcctgagaagacagatgctcatcatggctggaatgaaggtatccttcagtaaactttgctttcctaagaaaattcttcagtttctgataagtcatccctatttttatcttgatcaaggctttctacagttacataataaaatgaaatgctgtcc

SEQ ID NO: 10217 - DNA, 600 bp, Homo sapiens
tacagaggaaactttgtcagagcccaacttttatgacacgataagcaagattcgtttaagacaacaactggaaatgtattccatttcaagaaagtacgactatcagcagccacaaaaccaagctgacagtgtgcaactctcattggaatgaaacctcagaaaaagagcaacagaagtaattgtttcaagctcctgattctttctactaaatcatgaacagctttaaaaacatttctgtctgcataaaattattttacttgtaacttttccccaattgttctgtgcattgttttgcctttttaaattacatctccaagtggctcaaaaggccttgacacagggaacctgcacatatccaggatatgtgtaaccagcgatggtgacttgaccttgccaagacctgtgattccttcaggatacaatcagtgagaaataaaaacacatcttgggaagtgggaatcctggagtttatgccatttgcaatattaaaaaataaaaatgcaagttattatttcaataataacttcctgtttcattgtattctgtgagtgataagtgtcagatcaataacagattaatttgttgttaacagctcttttt

SEQ ID NO: 10218 - DNA, 600 bp, Homo sapiens
tctcttcagccagaggggcctccgggggcttcctgggcctacagccaagcaggtgtgggaggctgcccgctgtagtgctcacccacattctatgactggaatgctgcaagcctcttccagagggagccctccaggagcagggaagtcatatccgtggaccatttgtaggtttccctctgcaaacttcctgaactgggtggtgatttttctggcgagttaagtccagcaggttctgcgtggctgcccccagggggccccacccgggccttccagtgatctggaccaggaagacggattgctgctgggtcatgatttccacatcatgagcgaagttctttgttttttgtgtgcatgcaaaatattgtttctttaaatttaatatcttttcctaacttttctactaacctagaaggtatgtgtgattattatcttttttattcttatcactgtacttgttagtatctgatattaggtattcccaaatagaacataatttattttgttaatgttctctatttcttcttgattatttattagctttggatgttaaaaattagccaaaagtggctgctctgcctatgaagtagccattctttgttt

SEQ ID NO: 10219 - DNA, 600 bp, Homo sapiens
ggagcagatcatgaagtccatcatcccagtggtcatggctggcatcatcgccatctacggcctggtggtggcagtcctcatcgccaactccctgaatgacgacatcagcctctacaagagcttcctccagctgggcgccggcctgagcgtgggcctgagcggcctggcagccggctttgccatcggcatcgtgggggacgctggcgtgcggggcaccgcccagcagccccgactattcgtgggcatgatcctgattctcatcttcgccgaggtgctcggcctctacggtctcatcgtcgccctcatcctctccacaaagtagaccctctccgagcccaccagccacagaatattatgtaaagaccacccctcctcattccagaacgaacagcctgacacatacgcacggggccgccgcccccagtagttggtcttgtacatgcgcagtgtcctagtgcccatcgtctgtttccccggccttgcccccgcccgccccgtgccgtggacatctgggcccactcatcgcccctccaggcccccggcgccccaccccctagagtgctctgtgtatgcggatgatttagaattgtcatttctctt

SEQ ID NO: 10220 - DNA, 1400 bp, Homo sapiens
tgcgcaaggcccccgtcctgcagtacctgtactacctggcccagatcggcatcgccatgtctccgctcagcaacaacagcctcttcctcagctatcaccggaatccgctaccggagtacctgtcccgcggcctcatggtctccctgtccactgatgatcccttgcagttccacttcaccaaggagccgctgatggaggagtacagcatcgccacccaggtgtggaagctcagctcctgcgatatgtgtgagctggcccgcaacagcgtgctcatgagcggcttctcgcacaaggtaaagagccactggctgggacccaactataccaaggaaggccctgaggggaatgacatccgccggaccaatgtgccagacatccgcgtgggctaccgctacgagaccctgtgccaggagctggcgctcatcacgcaggcagtccagagtgagatgctggagaccattccagaggaggcgggtatcaccatgagcccagggcctcaatgagcctggtccatgaagtgcccaccacatcgcagcacttttaccacgttttgtcctcagaccccgcccatgctgtgtggtctctgcatgtctccattcttctctgtctctgtcttgcatgtctcctaccatgtcactgtccctgggccacccagtgaaagcaaagcctgggaatctgctcattgttgtttgggctcaggtattgagcctgatggcccaggtattgagggcctcccctgctggtggccctgtcctgggatcctcagaagcctgactgtcctatgggcttctccagtgtccacaggggcttgggatggttgtggggggctggcccctctagcctttccggtccttcctgggcaaatctaagccttggccagggccgaagtttaggcccctgtcttgttcatgtagccgaggggcaggcgggggacctctacacctctgctgtgggcacggggctgctgagggtctgtggaactccagcagctctgcactgggtagagctgggcctagagctcagtcacaggcctgggcttcctggcctgagtgggtagacgcaggcggcagaggtgctggaccacatctccgccaagtcactgcccagcagccttctccgtcctgtccccagcccacgtgctccttgggtgtcagcttcctgtgcctctgtgggagagggcagctgccttgtgttatgtctggggccacagttgctgcaaagtcctggatctgccactcaaccccgggagtggtgttcccagtgtggctcccagagctttgaccagattgtgatcccagctggcccctatgttgtgttctggactgaggcctttgctgtgaactgcagtgtttcatacgaaccatctttcctagtgcatgagaaataaagattatttaagt

SEQ ID NO: 10221 - DNA, 1400 bp, Homo sapiens
gggggcacatgccacctggggacacggcaccacctggcgtgcttgtgccccgaaggcttcacgggcctgtactgtgagagccagatggggcaggggacacggcccagccctacaccagtcacgccgaggccaccacggtccctgaccctgggcatcgagccggtgagccccacctccctgcgcgtggggctgcagcgctacctccaggggagctccgtgcagctcaggagcctccgtctcacctatcgcaacctatcgggccctgataagcggctggtgacgctgcgactgcctgcctcgctcgctgagtacacggtcacccagctgcggcccaacgccacttactccgtctgtgtcatgcctttggggcccgggcgggtgccggagggcgaggaggcctgcggggaggcccatacacccccagccgtccactccaaccacgccccagtcacccaggcccgcgagggcaacctgccgctcctcattgcgcccgccctggccgcggtgctcctggccgcgctggctgcggtgggggcagcctactgtgtgcggcgggggcgggccatggcagcagcggctcaggacaaagggcaggtggggccaggggctgggcccctggaactggagggagtgaaggtccccttggagccaggcccgaaggcaacagagggcggtggagaggccctgcccagcgggtctgagtgtgaggtgccactcatgggcttcccagggcctggcctccagtcacccctccacgcaaagccctacatctaagccagagagagacagggcagctggggccgggctctcagccagtgagatggccagccccctcctgctgccacaccacgtaagttctcagtcccaacctcggggatgtgtgcagacagggctgtgtgaccacagctgggccctgttccctctggacctcggtctcctcatctgtgagatgctgtggcccagctgacgagccctaacgtccccagaaccgagtgcctatgaggacagtgtccgccctgccctccgcaacgtgcagtccctgggcacggcgggccctgccatgtgctggtaacgcatgcctgggccctgctgggctctcccactccaggcggaccctgggggccagtgaaggaagctcccggaaagagcagagggagagcgggtaggcggctgtgtgactctagtcttggccccaggaagcgaaggaacaaaagaaactggaaaggaagatgctttaggaacatgttttgcttttttaaaatatatatatatttataagagatcctttcccatttattctgggaagatgtttttcaaactcagagacaaggactttggtttttgtaagacaaacgatgatatgaaggccttttgtaagaaaaaataaaagatgaagtgtg

SEQ ID NO: 10222 - DNA, 1400 bp, Homo sapiens
ggtggaggttgcggtgagccaagatcgtgccactgcactccagcctgggctacaagattgaaaagatcgaaactctgtctcaaacaaaaaaaaaaaaattcaaggctgtttccaaggcagcctcaaaaagagcctggtgcccagggggtccttcgtttctgtgtggctgcagaggccaggagtgcagtgactgtctcactgcctagtggttgtggctcacatcctgccctgatggagaggggggcccgtcgtccaaccctctctgaaaaactgcagtagactttaccatttcaggccccacctaatgttctttccttccttccccctacattcttcccgcccctttcatagttaagatgcataagctgagcaataaccccacttcctgatttccctgaaatatgagcccagaagcagcaggtgacagggagcttcccttaccctggggtggtggcacacagaccacctcctgtcctgtcccctgcaggtagtattcacagtgtggtgttacctgggaggagggaggaaggagctgagatgaaggagattcaggtaaacagtagccacagtggccaggacccccttcctgaggatccctgtccttcctcgcagcaggtgcttagtcctctcctagggagaagcacggaaagattcctcaaggcctcagtcccatgtctaaggcatacctaggttagaaatgtcctttacttgtttctcagttactatttctcctcttcctccctccccctgccttctcttggctgtcatttagctctctggcccacagaaatactccatccaaggagctggtcctcagtcagcctgatgaggacaggtcagtggccaacccttttgccccagtccttcatctggagacagtcacatagtcacgtcaacagttcacccaaagagaagaggtggggcctggcttctcccacagggcacagcctaactatggagacccagggctccttcctgctgcactaggcctgtgctctccctattgccttcaggtggtgtgatcccggcttcctcacagagcccttttttccttctgcccagctccatcccaccagagtttctacccccgctgaggcatctcctgggcacagaccaccacactctaagccggctggcctgggagttagggtcctgcccacctcacctgggagttggggtcctgcccacctggagtttagcacgctggtcgctcactttgctttggtctgcacacctggtgtgtgcatgtgtatactgcttgtgccatctgtgtacccctctccctggagtacacttgtggtcacactacagtggggacatcaagaatgcaatatttatggattgctgcatgattcttaaaaatgaataaaactgtttacaagggaaggagagctaactgc

SEQ ID NO: 10223 - DNA, 1055 bp, Homo sapiens; identical to SEQ ID NO: 4988

SEQ ID NO: 10224 - DNA, 1400 bp, Homo sapiens
agacaaggaaggcattcctcctgaccagcagaggttgatctttgccggaaagcagctggaagatgggcgcaccctgtctgactacaacatccagaaagagtctaccctgcacctggtgctccgtctcagaggtgggatgcagatcttcgtgaagaccctgactggtaagaccatcaccctcgaagtggagccgagtgacaccattgagaatgtcaaggcaaagatccaagacaaggaaggcatccctcctgaccagcagaggttgatctttgccggaaaacagctggaagatggtcgtaccctgtctgactacaacatccagaaagagtccaccttgcacctggtgctccgtctcagaggtgggatgcagatcttcgtgaagaccctgactggtaagaccatcactctcgaggtggagccgagtgacaccattgagaatgtcaaggcaaagatccaagacaaggaaggcatccctcctgatcagcagaggttgatctttgctgggaaacagctggaagatggacgcaccctgtctgactacaacatccagaaagagtccaccctgcacctggtgctccgtcttagaggtgggatgcagatcttcgtgaagaccctgactggtaagaccatcactctcgaagtggagccgagtgacaccattgagaatgtcaaggcaaagatccaagacaaggaaggcatccctcctgaccagcagaggttgatctttgctgggaaacagctggaagatggacgcaccctgtctgactacaacatccagaaagagtccaccctgcacctggtgctccgtcttagaggtgggatgcagatcttcgtgaagaccctgactggtaagaccatcactctcgaagtggagccgagtgacaccattgagaatgtcaaggcaaagatccaagacaaggaaggcatccctcctgaccagcagaggttgatctttgctgggaaacagctggaagatggacgcaccctgtctgactacaacatccagaaagagtccaccctgcacctggtgctccgtctcagaggtgggatgcagatcttcgtgaagaccctgactggtaagaccatcaccctcgaggtggagcccagtgacaccatcgagaatgtcaaggcaaagatccaagataaggaaggcatccctcctgatcagcagaggttgatctttgctgggaaacagctggaagatggacgcaccctgtctgactacaacatccagaaagagtccactctgcacttggtcctgcgcttgagggggggtgtctaagtttccccttttaaggtttcaacaaatttcattgcactttcctttcaataaagttgttgcattcccaattggtgttttttttttttttttttttttttttttaagtttattttgcatt

SEQ ID NO: 10225 - DNA, 600 bp, Homo sapiens
cacagagactctccatgggagggggagcagtattctcctggatcctggggcctgggtgggctgggggacagctgaggatgggcctagcagatgaagcttgccagcaaggccaaagcaaacggtttctcctgtggatagtggacagagacctttgtaaccaatggaattattcatttttctctatcttttattttttcaaagatattatttgactctatcaaaagtctctcctttttaaaccttttcttatggatggctgtcaatcccgaggcagaagttttcaggtggagaccaagcggcctttgctcttcttccttcttcctgccacactctgctttcttcctgccatggacccctggaggagacctatggagggacagttttgacctgacccctagaggagacagttttgacctcttcagcaccaggaaggaagctctgaggatggttgcagtgaggaagcatgggtctttaaggacttctctctcttttttgctggacattattgagtttgtgggaccctgcctcttcctgctacctgtgggtctgcccagagtccctgcaggcctgtccatgcattaaaaattcctattgtctctc

SEQ ID NO: 10226 - DNA, 600 bp, Homo sapiens
ttattttattttctagtaccagcctaggaattcggttagtactcatttgtattcactgtcactttttctcatgttctaattataaatgaccaaaatcaagattgctcaaaagggtaaatgatagccacagtattgctccctaaaatatgcataaagtagaaattcactgccttcccctcctgtccatgaccttgggcacagggaagttctggtgtcatagatatcccgttttgtgaggtagagctgtgcattaaacttgcacatgactggaacgaagtaggagtgcaactcaaatgtgttgaagatactgcagtcatttttgtaaagaccttgctgaatgtttccaatagactaaatactgtttaggccgcaggagagtttggaatccggaataaatactacctggaggtttgtcctctccatttttctctttctcctcctggcctggcctgaatattatactactctaaatagcatatttcatccaagtgcaataatgtaagctgaatcttttttggacttctgctggcctgttttatttcttttatataaatgtgatttctcagaaattgatattaaacactatcttatcttctcctg

SEQ ID NO: 10227 - DNA, 1289 bp, Homo sapiens; identical to SEQ ID NO: 4992

SEQ ID NO: 10228 - DNA, 1400 bp, Homo sapiens
tcgaggccttagagtacagatgggtgtgcctttcactgagcaaatcatacagactttcctcaacatgtttaccagagagcagttagccgagagcatcctccacgagggcagcacaggctgccgggtggtggagaagtttctgaagatcctgcaggtggtggtccaggagccaggccaggtgttcaagcccttcctccccagcatcatcgccctgtgcatggagcaagtgtatcccatcattgccgagcgtccctcccctgatgtgaaggccgagctgtttgagctccttttccggacgctccatcacaactggaggtacttcttcaagtccaccgtgctggccagtgtccagagggggatcgctgaggagcagatggagaatgagccccagttcagtgccatcatgcaggctttcggacagtcctttctccagcccgacatccacctttttaaacaaaatctcttctacttggagactctcaacaccaagcagaagctgtaccacaagaagatcttccggactgccatgctgttccagtttgtgaacgtgctgctccaggtcctggtccacaagtcccatgatcttctgcaggaggagattggcatcgccatctacaacatggcctcagtcgactttgatggcttctttgccgccttcctcccagagttcctgaccagctgtgatggtgtggatgccaaccagaaaagtgtgctggggcggaatttcaagatggatcgggacctgccctcattcacccagaatgtgcacaggctggtcaacgacctgcgctactacagactctgcaacgacagcctgccccctggcactgtgaagctctaggcctgctactgcctggggacacggacttctgctgctgccacctgcgccagccctaccttccaccacagatgtctcccagatgggccttggtcacactccttggcttctcccaccgcaagcaacgctgcctgcctctgccgctcctccacatcttgccgctgcccagcagagctggcttctgggtccacctgagcactggacggtgctcccagggcgttggagcaggcggaggggtgtgtggccaggtactaggaggcaccaggaaatcccgcggggtggcccatgcagaccaggcgcacgtggctcatggggcagaattgccaaggacagctcacgacagtgccaccttctcaccattccagccaaggagagatgtgacgttggaactgctctggcacttctgtcaagcctcccccgccccaattgccttgagatctctgctctttgtcagagatttgcaaagactcacgtttttgttgttttctcatcattccattgtgatactaagaaactaagaagcttaatgaaaagaaataaaatgcctatgttgttgttctag

SEQ ID NO: 10229 - DNA, 588 bp, Homo sapiens; identical to SEQ ID NO: 4994

SEQ ID NO: 10230 - DNA, 1400 bp, Homo sapiens
cctggaacttctaccagtgccactctgacaggcctcaccagaggtgccacctacaacgtcatagtggaggcactgaaagaccagcagaggcataaggttcgggaagaggttgttaccgtgggcaactctgtcaacgaaggcttgaaccaacctacggatgactcgtgctttgacccctacacagtttcccattatgccgttggagatgagtgggaacgaatgtctgaatcaggctttaaactgttgtgccagtgcttaggctttggaagtggtcatttcagatgtgattcatctagatggtgccatgacaatggtgtgaactacaagattggagagaagtgggaccgtcagggagaaaatggccagatgatgagctgcacatgtcttgggaacggaaaaggagaattcaagtgtgaccctcatgaggcaacgtgttatgatgatgggaagacataccacgtaggagaacagtggcagaaggaatatctcggtgccatttgctcctgcacatgctttggaggccagcggggctggcgctgtgacaactgccgcagacctgggggtgaacccagtcccgaaggcactactggccagtcctacaaccagtattctcagagataccatcagagaacaaacactaatgttaattgcccaattgagtgcttcatgcctttagatgtacaggctgacagagaagattcccgagagtaaatcatctttccaatccagaggaacaagcatgtctctctgccaagatccatctaaactggagtgatgttagcagacccagcttagagttcttctttctttcttaagccctttgctctggaggaagttctccagcttcagctcaactcacagcttctccaagcatcaccctgggagtttcctgagggttttctcataaatgagggctgcacattgcctgttctgcttcgaagtattcaataccgctcagtattttaaatgaagtgattctaagatttggtttgggatcaataggaaagcatatgcagccaaccaagatgcaaatgttttgaaatgatatgaccaaaattttaagtaggaaagtcacccaaacacttctgctttcacttaagtgtctggcccgcaatactgtaggaacaagcatgatcttgttactgtgatattttaaatatccacagtactcactttttccaaatgatcctagtaattgcctagaaatatctttctcttacctgttatttatcaatttttcccagtatttttatacggaaaaaattgtattgaaaacacttagtatgcagttgataagaggaatttggtataattatggtgggtgattattttttatactgtatgtgccaaagctttactactgtggaaagacaactgttttaataaaagatttacattcc

SEQ ID NO: 10231 - DNA, 1400 bp, Homo sapiens
caggggaccctgctctccctctctgaacaggagctcttggactgtgacaagatggacaaggcctgcatgggcggcttgccctccaatgcctactcggccataaagaatttgggagggctggagacagaggatgactacagctaccagggtcacatgcagtcctgcaacttctcagcagagaaggccaaggtctacatcaatgactccgtggagctgagccagaacgagcagaagctggcagcctggctggccaagagaggcccaatctccgtggccatcaatgcctttggcatgcagttttaccgccacgggatctcccgccctctccggcccctctgcagcccttgcgtcattgaccatgcggtgttgcttgtgggctacggaaccgtgagttccgctgcctgtcctgcatccagccaggccacagcgaggggtgggatcacagcatctcaggtcctctagaggggaaatagggggaatgcctaggaaccctgtccttacccactgcctgggccatgaccagctgggcatcatctgtcctctctatggcagggaagctgagctgtgggagggtaaatattgatggcctaataacctgcaataggcgggtgggtgcgtgcttcctccctgccccagggcttctccctgaggctggtaggtgggcccctcgctttctgctcttttcctagtccctgtcacacagtaggcccagtgcaagtatttgaagggtgcaaagtgattaaggctctgcctggagaattaaggaccctgatccttgcgctctgcactgcaccccaggctctgacgttcccttttgggccatcaagaacagctggggcactgactggggtgagaagggttactactacttgcatcgcgggtccggggcatgtggcgtgaacaccatggccagctcggcggtggtggactgaagaggggcccccagctcgggacctggtgctgatcagagtggctgctgccccagcctgacatgtgtccaggcccctccccgggaggtacagctggcagagggaaaggcactgggtacctcagggtgagcagagggcactgggctggggcacagcccctgcttccctgcaccccattcccaccctgaagttctgcacctgcacctttgttgaattgtggtagcttaggaggatgtcggggtgaagggtggtatcttggcagttgaagctggggcaagaactctgggcttgggtaatgagcaggaagaaaattttctgatcttaagcccagctctgttctgcccccgctttcctctgtttgatactataaattttctggttcccttggatttagggatagtgtccctctccatgtccaggaaacttgtaaccacccttttctaacagcaataaagaggtgtccttgtcccg

SEQ ID NO: 10232 - DNA, 600 bp, Homo sapiens
gcaccgagaggggctgctgagctagaattcccacctatgtctttccaagggactgttcacggcttgggacttggtctctgtcctgccccatcctcgtcacttgggaccacgagccctggttcagtcacccagggaagcctcccagcggctcatgaagcatcgagctccaagcccagatgccaagctccctggctgagctgaatgatgtcactcatggtggacgcgttctgctcacgggcccagagccctgtgaaatgcatcaaggtcctctccgctggccagcagcatccccaggcttctctcaggcgcccgtgttcacattttctccagcctgagacgcagcctcccgcctggaagggcctgtgccagcaccaggcagagggcaagacggagagggcagagcaagaactgcactgcatctcactgcagtctgaatctagacatcgccattccccgaggtgcgacctcagactaatgacatcctggctgagcctctgtttttctctctaggaaatgggggtgataattgtgcctacctcagatagacagtgccagaattaagtgagtcaagccaagtaaagcccagagaagattctcatc

SEQ ID NO: 10233 - DNA, 600 bp, Homo sapiens
gacattaaacatggaggtctatatcatgagaatatgcgtagaccatactttccagtagctgtaggaaaatattactcctattactgtgatgaacattttgagactccgtcaggaagttactgggatcacattcattgcacacaagatggatggtcgccagcagtaccatgcctcagaaaatgttattttccttatttggaaaatggatataatcaaaatcatggaagaaagtttgtacagggtaaatctatagacgttgcctgccatcctggctacgctcttccaaaagcgcagaccacagttacatgtatggagaatggctggtctcctactcccagatgcatccgtgtcagctttaccctctgaacttctgatcgaaggtcatccctctccagcttgagtggatcaaagatgacaagggccaatggaaccaagtttgagtcttgccaggtcaatacttgggtcctgagtatggtgactagtatctgttttgttatgtgtgtattattccagccagaatgggaaatgctaattcagctcctccaggcagcccaatggggctggtggctttgagattattaaactctttctctgctgcaa

SEQ ID NO: 10234 - DNA, 1400 bp, Homo sapiens
gtaccaaaccaggaagaggcagaaggactgctaagtcttcagccaatgacttgcttgcatcagacatctttgctcctcccgtctcagaaccttcaggccaggcgtcacccacaggacaacctacagccctgcagcccaaccctctggatctcttcaaaacaagtgctcctgccccagtggggcccctggtgggtctaggtaggtgtaactgtcacactccctcaggcaggaccatggaacacagcatctttggtcttcaatcagtccccttcaatggctccgggagccatgatgggtggtcaaccttcaggttttagtcagcccgtcatttttggtacaagtccagctgtttcaggttggaaccagccttcaccctttgcagcctcaactccccctccagtgcctgttgtctggggcccttctgcatctgtggcacccaatgcttggtcaacaacaagccctttggggaatccttttcagagcaatatttttccagctcctgctgtgtccactcagcccccatccatgcactcctctctcctggtcactcctcctcagccacctcccagagctggccctcccaaggacatctccagtgatgccttcactgccttagacccacttggggataaagagatcaaggatgtgaaagaaatgtttaaggatttccaactgcggcagccacctgctgtgcccgcgcggaagggagagcagacttcttctgggactttgagtgcctttgccagttatttcaacagcaaggttggcattcctcaggagaatgcagaccatgatgactttgatgctaatcaactattgaacaagatcaatgaaccaccaaagccagctcccagacaagtttccctgccagttaccaaatctactgacaatgcatttgagaaccctttctttaaagattcttttggttcatcacaagcctctgtggcttcttctcaacctgtatcttctgagatgtatagggatccatttggaaatccttttgcctaaattctgaacttggtctgcagaccatccagaggaataaaaaggttggccttagtagtcaaaaacaaagctgatagccagacacgttctgatttctgcccttgttccagctttgacgtattatctgttgccttatttctcattgcctcttctacttgtaaaatgcttttcactttctgtctaggttaaagctaaactgaatctatggctttaaataaattaagatcctaaactctctagcttaagtgtaaatgaagtacagtagtttccctactgaaccctgcctcttgtgtccctggaaccttctagaacacctgccttctaccctctggttgggagatgcagccaccacatcccttcatatcatactgttttgaataaattttcaaatcctt

SEQ ID NO: 10235 - DNA, 1400 bp, Homo sapiens
atacttctcagggctagggaacatcattaagaatgaagccttgtacagagctgggatccatcccctttctctcggttcagtcctgagtgcctcgcgtcgggaggtcctggtggatcacgtggtggagttcagtacagcctggctgcagggcaagttccaaggcagaccgcagcacacacaggtctaccagaaagaacagtgccctgctggccaccaggtcatgaaggaggcgtttgggcccgaagatgggttacagaggctcacctggtggtgcccgcagtgccagccccagttgtcagaggagccagagcagtgccagttctcctaaggagctggtggtgctcctcacggaaccttgccgcttggggaacctgacgtctaagtgtccagaaaggaggatgtgggcagggacggggtacagaggatagtgtgggtcagaggtgccagtagtataatattcgtctccctggagttatgttgaaggcagagttttcatagggttagattttttttatccttttctagttcagttaattcatcctgttgaattgcaccatcgtgaaagatgggaaaaatcgtgatgatgggtaaggggaaaacttcccggaaggcaatggggcaaggaaaaagaaagcctatgggaaatggctgtgctcccaacatagctttgcagatgatgtgggttttttttttttttttggttgtttgttttgagagagagtcttgctctgtctccctggctagggtgtggtggtgtgatcttggctcacggcagccttgccctccctggctcaagcagtcttcatctcagcctccagagtagctgggactacaggcatgtgatatgatgctcggctgatttttgtttactttttagagagatggggtcttgccatatttgccaggctggtttgaactcctacaactcaagcattcctcccaccttggtctcccaaaatgttgggaccacgggtgtgagccaccgcgcccagctagctcctgtgttttgtttttgttttgtaactttggttgatgttaaggccctccattttggaaagcaggaaaacaggatttttttttttttatcttgttccctggaggatccagggatgaggatagagtggcctgagagcagtgcttggattcagcctcctgctgggtccttctgctggatacaggcaccaagaggcggtcgtggagcagggagctgcgccttcctggggtgcccggtggtgtgtagagaaaagctgcttgtttactccttaagtcaatgtattggtgactgttgatttgttgaacaattcaggaatcaagggctgtggagaaactccctcatgttgttggcaacaggtgaatgaacctagagcggtgacatgaaaataaagctcactgttactcgc

SEQ ID NO: 10236 - DNA, 1400 bp, Homo sapiens
aagccgggccagacagtgttccctctgcctcccgcgggtatgacctacccaggcagcctggccggggcctacgccggctacccgccccagttcctgccacacggcgtggcacttgaccccaccaagccgggcagcctggtgggggcgcagctggcggcggccgcggccgggtctctgggctgcagtaagccggccggctccagccctttggccggagcgtctccgccgtccgtgatgacagccagtttgtgccgggacccttactgcctcagctaccactgcgctagccacctggcaggggcggcggccgccagcgcttcttgcgcacatgatccggctgctgcggctgcggcgctgaagtccggatacccgctggtgtaccccacgcacccgctgcacggtgtgcactcctcgctaacggccgccgcggctgctggcgccacaccgccctccctggccggccaccccctctacccctacggctttatgctccctaacgacccactcccccacatctgcaactgggtgtcggccaacgggccgtgcgacaagcgcttcgccacgtccgaagagctgctgagccacttgcggacccatacggcatttcccgggacagacaaactgctgtcgggctaccccagctcgtcgtctctggccagcgctgccgcggccgccatggcttgccacatgcacatccccacctcgggcgcaccgggcagccctgggacgctggcgctgcgcagcccccaccacgcgctgggactcagcagccgctaccacccctactccaagagcccgcttcccacgcctggcgcccccgtgccggtgcccgccgccaccggaccgtactactccccctacgccctctacggacagagactgaccaccgcctcggcgctggggtatcagtgagggcggccgggagggcgagcgagggagaggagggagagggggaggggaggagtccagggagaggcgggatcacggcccaggctgctgacacccgcgcgtggggaggactcgggccacgaaaggaaagaaatgtataccgtatctatctacccgacagcagcgaccgagacccggtgggacactccccttctccccactttcacctccccacccaaactttataaaagttgaaaaaatatcatttgactttttatagaaaaaaaaaggaaaaaataattgagaaagtgttcatctgaggactgcatcggtggacactggtatttatttatgttagctccaagcggaccggtggttcaaaagtgcattatttagtttgagctctgtaggtaaaaaggaggtgggaaaaattttaaaacttgagggtaaaaatgtggaaaacaaaccctcccatcccttgtagattataaataaaagcaaaaccgccacag

SEQ ID NO: 10237 - DNA, 600 bp, Homo sapiens
tgttgaaaaccaaaatgacatctttttaaagcttatccataaaaaaaaatagatgtcttttatagtggaaaaacacatggggaaaaaaatcatctattttgatgcagcatttgataatgataaaacacctcacacctcactctttatagtgcacaaaatgaatgaggtctgggctaggtagaaaaagggtcaatgctatttttgtttttagaatcattaccttttaccagcttttaaccatctgatatctatagtagacacactatcatagttaacatagtaagttcagcacttgtctcattttaatgtaaagatttgcttccattttcctacaggcagtctctctcttcctcacagtcccactgtgcaggtgctattgttactcttacgaatattttcagtaatgttattttcttctaagtgaaatttctagcctgcactttgatgtcatgtgttccctttgtctttcaaactccaaggttcccttgtggccctctcccttaccctgggaaggcctcttggagaccttacccctggctgtttggactttgtatactttaaataatttaactacccttaattacttaaaaaaaaaaaaaa

SEQ ID NO: 10238 - DNA, 712 bp, Homo sapiens; identical to SEQ ID NO: 5003

SEQ ID NO: 10239 - DNA, 1266 bp, Homo sapiens; identical to SEQ ID NO: 5004

SEQ ID NO: 10240 - DNA, 1400 bp, Homo sapiens
gtttggtttcataaacaacccaaagcccaagaaacctctcacgctctccctgcacgggtggacaggcaccggcaaaaatttcgtcagcaagatcatcgcagagaatatttacgagggtggtctgaacagtgactatgtccacctgtttgtggccacattgcactttccacatgcttcaaacatcaccttgtacaaggcaaggatggaagtttggaatcccttcctggatgtcatcgggtttggggtctctttgttgtgggatgagatttgggagttctatgttgaaatgagtgagcccggaaaacggttcatgtctcagttccccttggaaaggtgtagaagttaagagtttgagatgcgtggagcagttaataccatcaaagctttgtggtgggttctgaaaatcggtccagtgagtatgtagggtcatgggattttagaggtggacatgatcaaatccatcttagagatcaacacatctcactcatttttttatttttttctttattttgagacggagtttcactcttcttacccgggctggagtgcaatggcatgatctcagctcactgcaacctctgcctcccggttgaagcaattatcctgcctcagcctcccgggtagctgggattacagggtcctgccaccatgcccagctaatttttgtatttttagtagagatggggttttgccaacttggccaggctggtctcgaactcctgatctcaggtgatgtgcctgcctcagcttcccgaagtgctgggattacaggcgtgagccaccatgcctggccacatctcactcattttgtgaaagaggaaacatgtagagtcctaagtttgttgaacctactgttgtaaactgcctttttttttttttctttgagtcagggtctcactctgttgtccaggctggagtgcagtgacgccatctcagctcactacagcctccaccttcccggttcaagcgattctcctgcctcagcctcccaagtagctgtgactacaggcatgtgccaccacagccggctaatttttgtatttctagtagagatggggtttcctcacattggccaggctggtctcgaactcctgacctcaagtgatctgcctacctcagcctcccagagtgctaggattacaggcgtgagccaccttgcccagccgcaaacagcttttatggttgaactcactgatgagcagcttgggctttggcagcagacacatctggatttgagtcctaacactctcccagctccgtagtcttaggaaagttgcctgacctgagactcagattctgacttacaaagtgttgcttgtaacaatccagggagctctgtctgtcaagtgcataacatgtacctggtgcatgttacaaataaatgttaactgttgcctttt

SEQ ID NO: 10241 - DNA, 600 bp, Homo sapiens
tccaggtgacctatacaggttctggtggtgggtaggcaggcgtttcctcaggcctctcagtagtaagtgtgagcaccagctctggaggcaggtgagtcaatctccaggtccccggatggtacattcaggcaccagcatattcctatgcatttctagataaaagtatttttcagaaaacctgagcatatgtcctattaatacaacttaccctcatcagctctgcatgagaagaaggcggaattccctcagtagaacagtcagaatggaatcacagacttgttttgagccagtcactggtgagggggggtaggataacatgataagctcagaatctaaaccttagactagggaatggcaaactttttccataaagaggcaaacggtaatattttaggctttttgtctagataacctcttttgtagtgacacagtggtgccatcgtagcctaaaagcgtatgtagacaatggataaatcaatggacctggttttattccagtaaaacttaatttatacagtcagagggccagatttggcccttggtctatggttgtttagagcagtcaaaatttattccctggggctgggccaactttttctt

SEQ ID NO: 10242 - DNA, 600 bp, Homo sapiens
catggactgcccgagcgccctgcaccaactcatgctggactgttggcagaaggaccgcaaccaccggcccaagttcggccaaattgtcaacacgctagacaagatgatccgcaatcccaacagcctcaaagccatggcgcccctctcctctggcatcaacctgccgctgctggaccgcacgatccccgactacaccagctttaacacggtggacgagtggctggaggccatcaagatggggcagtacaaggagagcttcgccaatgccggcttcacctcctttgacgtcgtgtctcagatgatgatggaggacattctccgggttggggtcactttggctggccaccagaaaaaaatcctgaacagtatccaggtgatgcgggcgcagatgaaccagattcagtctgtggaggtttgacattcacctgcctcggctcacctcttcctccaagccccgccccctctgccccacgtgccggccctcctggtgctctatccactgcagggccagccactcgccaggaggccacgggccacgggaagaaccaagcggtgccagccacgagacgtcaccaagaaaacatgcaactcaaacgacgg

SEQ ID NO: 10243 - DNA, 549 bp, Homo sapiens; identical to SEQ ID NO: 5008
  misc_feature (344)..(526): n is a, c, g, or t

SEQ ID NO: 10244 - DNA, 600 bp, Homo sapiens
gtgtttgtactgctatttatttttgtgaagaggcaaatcatgcgctttgcaatgaaatctcgaaggggacctcatgtccctgtgggacacaatgcccccaaggacttgaaagaggagattgatattcgactctccagggttcaggatatcaagtatgagccccagctccttgcagatgatgatgctagactactacaactggaaacccagggaaatcaaagttgctacaactatctgtataggatgaaagctctggatgccattcgtacctctgagatcccatttcattctgaaggccggcatccccgttccttaatgggcaagaatttccgctcctacctgctggatctgcgaaacactagtacgcctttcaagggtgtacgcaaagcactcattgatacccttttggatggctatgaaacagcccgctatgggacaggggtctttggccagaatgagtacctacgctatcaggaggccctgagtgagctggccactgcgtgagtttggaggggaacgtgtcagagggagctggtacagtagtgttggactgttgccacagtgcagtgaccttcataaagcatataaacaaaatccatg

SEQ ID NO: 10245 - DNA, 1400 bp, Homo sapiens
tgggctgaccagccaggacagcggggtaaacccgaacaattctgcgcgaggtagggaggccatggcgtccggcagtaactggctctccggggtgaatgtcgtgctggtgatggcctacgggagcctggacttgaaagaggagattgatattcgactctccagggttcaggatatcaagtatgagccccagctccttgcagatgatgatgctagactactacaactggaaacccagggaaatcaaaagatcccatttcattctgaaggccggcatccccgttccttaatgggcaagaatttccgctcctacctgctggatctgcgaaacactagtacgcctttcaagggtgtacgcaaagcactcattgatacccttttggatggctatgaaacagcccgctatgggacaggggtctttggccagaatgagtacctacgctatcaggaggccctgagtgagctggccactgcggttaaagcacgaattgggagctctcagcgacatcaccagtcagcagccaaagacctaactcagtcccctgaggtctccccaacaaccatccaggtgacatacctcccctccagtcagaagagtaaacgtgccaagcacttccttgaattgaagagctttaaggataactataacacattggagagtactctgtgacggagctgaaggactcttgccgtagattaagccagtcagttgcaatgtgcaagacaggctgcttgccgggccgccctcggaacatctggcccagcaggcccagactgtatccatccaagttcccgttgtatccagagttcttagagcttgtgtctaaagggtaattccccaacccttccttatgagcatttttagaacattggctaagactattttcccccagtagcgcttttttctggatttgcattcaggtgttattcttaatgtttctgtcaaagcttcttaaaaatcttcacttggtttcagccatagttcaccttccctgttccaggtttatttaattccaaaggtgagagttggagtgagatgtcttccatatctatacctttgtgcacagttgaatgggaactgtttgggtttagggcatcttagagttgattgatggaaaaagcagacaggaactggtgggaggtcaagtggggaagttggtgaatgtggaataacttacctttgtgctccacttaaaccagatgtgttgcagctttcctgacatgcaaggatctactttaattccacactctcattaataaattgaataaaagggaatgttttggcacctgatataatctgccaggctatgtgacagtaggaaggaatggtttcccctaacaagcccaatgcactggtctgactttataaattatttaataaaatgaactattatcaaataaaa

SEQ ID NO: 10246 - DNA, 1400 bp, Homo sapiens
gaggcaaatcatgcgctttgcaatgaaatctcgaaggggacctcatgtccctgtgggacacaatgcccccaaggacttgaaagaggagattgatattcgactctccagggttcaggatatcaagtatgagccccagctccttgcagatgatgatgctagactactacaactggaaacccagggaaatcaaagttgctacaactatctgtataggatgaaagctctggatgccattcgtacctctgagatcccatttcattctgaaggccggcatccccgttccttaatgggcaagaatttccgctcctacctgctggatctgcgaaacactagtacgcctttcaagggtgtacgcaaagcactcattgatacccttttggatggctatgaaacagcccgctatgggacaggggtctttggccagaatgagtacctacgctatcaggaggccctgagtgagctggccactgcggttaaagcacgaattgggagctctcagcgacatcaccagtcagcagccaaagacctaactcagtcccctgaggtctccccaacaaccatccaggtgacatacctcccctccagtcagaagagtaaacgtgccaagcacttccttgaattgaagagctttaaggataactataacacattggagagtactctgtgacggagctgaaggactcttgccgtagattaagccagtcagttgcaatgtgcaagacaggctgcttgccgggccgccctcggaacatctggcccagcaggcccagactgtatccatccaagttcccgttgtatccagagttcttagagcttgtgtctaaagggtaattccccaacccttccttatgagcatttttagaacattggctaagactattttcccccagtagcgcttttttctggatttgcattcaggtgttattcttaatgtttctgtcaaagcttcttaaaaatcttcacttggtttcagccatagttcaccttccctgttccaggtttatttaattccaaaggtgagagttggagtgagatgtcttccatatctatacctttgtgcacagttgaatgggaactgtttgggtttagggcatcttagagttgattgatggaaaaagcagacaggaactggtgggaggtcaagtggggaagttggtgaatgtggaataacttacctttgtgctccacttaaaccagatgtgttgcagctttcctgacatgcaaggatctactttaattccacactctcattaataaattgaataaaagggaatgttttggcacctgatataatctgccaggctatgtgacagtaggaaggaatggtttcccctaacaagcccaatgcactggtctgactttataaattatttaataaaatgaactattatcaaataaaa

SEQ ID NO: 10247 - DNA, 1169 bp, Homo sapiens; identical to SEQ ID NO: 5012

SEQ ID NO: 10248 - DNA, 600 bp, Homo sapiens
ggactgtgatgaggagccccagttccctcctccctcggttataaagattcccatggaaagtgtccaatcagatccccaaaacggtatccactgcattgccaggaaaaagatcttccagttggagttactcactctgattcttccttcagtgacacagaacttgaccgaaggtaagcaggcatggattagagacataagctatacgtcacttacaaaaacatctccagcaaactatctaaacttctttaaactccagagaactatcaaaagaataacgccagctggcagaagaacgaggacggaggttaatggctgctcctggctagatcacaggaccctgcatgatactggaatgctccctggtgaggtactgcagagttacaggatcgtgaactctatttattcccacatcaatgactgctgctccttccttgatcatatctgctgtgatcagatttggaatacctggaaatggagaaaggaaagatcaacttagtactgaaaacagtctacctgtcagattcttgtctaacttcaatttcaagagaccctgaagaactaatcaacatgttttattaaaacctgttaaaaatattaact

SEQ ID NO: 10249 - DNA, 1400 bp, Homo sapiens
gggcaaggtgtgccacgtcatcaccgaggtgaaatctggaaatttctagctgagcaattccaccttaaacaccagtttcccagcaaacagcagccaaaggatgtgccatacaaagaactcttaaagcagctgacttcccagcagcatgcgattcttattgaccttgggcgaacctttcctacacacccatacttctctgcccagcttggagcaggacagctatcgctttacaacattttgaaggcctactcacttctagaccaggaagtgggatattgccaaggtctcagctttgtagcaggcattttgcttcttcatatgagtgaggaagaggcgtttaaaatgctcaagtttctgatgtttgacatggggctgcggaaacagtatcggccagacatgattattttacagatccagatgtaccagctctcgaggttgcttcatgattaccacagagacctctacaatcacctggaggagcacgagatcggccccagcctctacgctgccccctggttcctcaccatgtttgcctcacagttcccgctgggattcgtagccagagtctttgatatgatttttcttcagggaacagaggtcatatttaaagtggctttaagtctgttgggaagccataagcccttgattctgcagcatgaaaacctagaaaccatagttgactttataaaaagcacgctacccaaccttggcttggtacagatggaaaagaccatcaatcaggtatttgaaatggacatcgctaaacagttacaagcttatgaagttgagtaccacgtccttcaagaagaacttatcgattcctctcctctcagtgacaaccaaagaatggataaattagagaaaaccaacagcagcttacgcaaacagaaccttgacctccttgaacagttgcaggtggcaaatggtaggatccaaagccttgaggccaccattgagaagctcctgagcagtgagagcaagctgaagcaggccatgcttaccttagaactggagcggtcggccctgctgcagacggtggaggagctgcggcggcggagcgcagagcccagcgaccgggagcctgagtgcacgcagcccgagcccacgggcgactgacagctctgcaggagagattgcaacaccatcccacactgtccaggccttaactgagagggacagaagacgctggaaggagagaaggaagcgggaagtgtgcttctcagggaggaaaccggcttgccagcaagtagattcttacgaactccaacttgcaattcagggggcatgtcccagtgttttttttgttgtttttagatactaaatcgtcccttctccagtcctgattactgtacacagtagctttagatggcgtggacgtgaataaatgcaacttatgtttt

SEQ ID NO: 10250 - DNA, 600 bp, Homo sapiens
tctatatctcaaccaattgcccctctcagtgcaatgaaaatcctgtggatggccacggactccagtgccactgtgaggaaggacaggcacctgtagcctgtgaagaaaccttacatgttaccaatatcaccatcttggttgttgtgcttgtcctggttattgtcggtatcggagttcttatactattagttcgttaccgaaaatgtatcaagttgaagcaagttcagagcccacctacagaaaccctgggagtggagaacaaaggatactttggtgatgagcagcagataaggactgagccaatcctgccagaaattcatttcctaaataaacctgcaagtaaagattcaagaggaatcgcagatcccaatcaaagtgccaagtgagcttgaagttggatatccaaaatggccgtgcaagcttaggctggggattctggatgcaacgtctttacaaccttacctagatatctgctactcacatttttggtagtgtttcaaacgttctttatccagacagacaatgtttaagagaaacaacttatttctgttaatatttaccggtagaattcacaccctctatcataaacatatgctgcag

SEQ ID NO: 10251 - DNA, 600 bp, Homo sapiens
atgctgtggttactagtgccaaaaatgctggcaggaacaaggaggagaagacaatcataaaaaagctgttcttttttcgatcggggaaacagacctagatccaaggccacaagtaaggctatggctctgattctagaagacaaccttccaagatgcctggcaaaaccacctccctgtgccacacagacacactaggcctgtgtatttatttccccttcaaagcagactgaggagggaggagacgaggttctcttggcatcactttctccctggctgcagaactagacacccttgaagatttggcctgggccagtgagactgaaatcaagaaaaacagaagggatgtgcagggtgggggggtccacttcctgctcccatgtcaacccccagggcctccagcgtgcagacgcgtgtcctactcatctgctcccacggatgaccctggtcttcaatggttagcagaagggagaaaagaaagcaggaaaatgtgctattgagattccagtggtgacttcactgatatttagtgaatatttgatttagccaacatgcctttctttatgtgattttgtattaaagtaaaatgatttttatactttc

SEQ ID NO: 10252 - DNA, 1400 bp, Homo sapiens
cccccactatgaagtggcagagtcagatttctccaacaatatgctgcagtgccgctgcaagtatgatgggcaccgggtctggctgcacaactgccacacagggaattcatacccagccaatgcagaactctccctggagcaggaacagcgtctcaggaacaacctcatctgaagctgtcactgcacactcctagctgctgccgatacaccagatacctcagcttattggagccatgcccttcacagagtcccaactcagaggaaaagggccagtgccaaggggcaccaagaacctgctcaggaagccttttgatggcaagatcaccaatccagatggtattgctccctcaggatggctctgggcctgcccctaagggcctgtggcctatggaatatgtcctccaggctttgctcagctgagctcctcttctgtaaggaaacccagtcatccctgaatcttgccacagagatccgggattcaggagctctcagtttcttagggatggactatggcccagtcccccatctaagtggtgctttgcaaatgtcttggaggagtataggacagaggaccaaaatacacagcaggtagtgttagctctctgctaggagctcaaagcaacacaacttgtatcaaaatcacaactggcagagaagctggtggatccaatcctttcttcatctgttgttatttagaactcacctctcacactctgttctttagtgtccttacctttatcttaccacacacatgggtgtttctattatccttggaagcacagacctcgggcatccccttattgcctgatgggccaacaccaacagttacggagtgcttgagaaggggcaagtttcacagaaatggccagatagggccttcctacagagcagcaagagtaggccaagcagaaagactgctgaggtaacacggaccccagcccctgtcagggcctctgccaaggaaataatatggaccatttacctggcaggcagtctgctctctctcaggatcaccacgcatctcaggattggtctaaacttcaagtctcaaccaagtgtctgaagtgaactttgcattgaataaatttttgccatggaaagaacatcaaacaagccactcatctctacagagataagaaaacaagtttggcagagcaagagacagaagaccgtggagaaatcagaagggggaacagtcagtttagttaaggatggaacctgggaaaggccaccattcctgcttgatggggctctgatttgctcttgctcaagtggaataaaaccccatggtcttcttgacatgattcttgatcttttctccactgagacacacttaagtgatgatccttacaggactgacaccctaatgccaataaaagttgctcattatggactgctac

SEQ ID NO: 10253 - DNA, 1373 bp, Homo sapiens; identical to SEQ ID NO: 5018

SEQ ID NO: 10254 - DNA, 1400 bp, Homo sapiens
tatcctcctcaggaactgcaaaggaatccccgagcagcatgcagccacagcccttggagaccagtcacaaatacgagtcttgggggcccctgtacatccaagagtctggtgaggagcaggagttcgctcaagatccaagaaaggtccgagattgcagattgagtacccagcacgaggaatcagcagatgagcagaaaggttctgaagcagaggggctcaaaggggatataatttctgtgattatcgccaataaacctgaggccagcttagagaggcagtgcgtaaaccttgaaaatgaaaaaggaacaaaaccccctcttcaagaggcaggctccaagaaaggtagagaatcagttcctactaaacctaccccaggagagagacgttatatatgtgctgaatgtggcaaagcctttagtaatagctcaaatctcaccaaacacaggagaacacacactggggagaaaccttacgtgtgcaccaagtgtgggaaagctttcagccacagctcaaacctcaccctccactacagaacacacttggtggaccggccctatgactgtaagtgtggaaaagcttttgggcagagctcagaccttcttaaacatcagagaatgcacacagaagaggcgccatatcagtgcaaagattgtggcaaggctttcagcgggaaaggcagcctcattcgtcactatcggatccacactggggagaagccttatcagtgtaacgaatgtgggaagagcttcagtcagcatgcgggcctcagctcccaccagagactccacaccggagagaagccatataagtgtaaggagtgtgggaaagccttcaaccacagctccaacttcaataaacaccacagaatccacaccggggaaaagccctactggtgtcatcactgtggaaagaccttctgtagcaagtccaatctttccaaacatcagcgagtccacactggagagggagaagcaccgtaactttcaagcgctcctgttgttgtcgttgttttaaactttagaatctgaaaaccagaaagaagtcttgtcattgcagcagcatcgattccggtgatagagtttgtatcactcaacatcaggggatgcctgaggagtgcgagctccacagcaacatggcaggcaggaggtcctcagaaggtgtcaggaggttccacactcgccagttcactggagcagagtcccttcgccacacttagggtcccagtaagccatgccagcattaccttttgcgtagttaaacagacgtgtatccagtctagttaaggaagaaacattaagattgtttaatttttaacatatattcaagaattttaatttgtaaagaattgagccacattgaacacaattgaatgagattcagaataaacttataacatcttg

SEQ ID NO: 10255 - DNA, 1400 bp, Homo sapiens
atgaccaagtacaagcccgaatcggaggagctgacggcagagaggatcacagagttctgccaccgcttcctggagggcaaaatcaagccccacctgatgagccaggagctgccggaggactgggacaagcagcctgtcaaggtgcttgttgggaagaactttgaagacgtggcttttgatgagaaaaaaaacgtctttgtggagttctatgccccatggtgtggtcactgcaaacagttggctcccatttgggataaactgggagagacgtacaaggaccatgagaacatcgtcatcgccaagatggactcgactgccaacgaggtggaggccgtcaaagtgcacagcttccccacactcaagttctttcctgccagtgccgacaggacggtcattgattacaacggggaacgcacgctggatggttttaagaaattcctggagagcggtggccaggatggggcaggggatgatgacgatctcgaggacctggaagaagcagaggagccagacatggaggaagacgatgatcagaaagctgtgaaagatgaactgtaatacgcaaagccagacctcggcgctgccgagacactcgggggctgcacacccagcagcagcgcacgcctccgaacgtgcggcctcgcttgaaggaggcgtcgccggaaacccagggaacctctctgaagtgacacctcacccctacacaccgtccgttcacccccgtctcttccttctgcttttcggtttttggaaagggatccatctccaggcagcccaccctggtggggcttgtttcctgaaaccatgatgtactttttcatacatgagtctgtccagagtgcttgctaccgtgttcggagtctcgctgcctccctcccgcgggaggtttctcctctttttgaaaattccgtctgtgggatttttagacatttttcgacatcagggtatttgttccaccttggccaggcctcctcggagaagcttgtcccccgtgtgggagggacggagccggactggacatggtcactcagtaccgcctgcagtgtcgccatgactgatcatggctcttgcatttttgggtaaatggagacttccggatcctgtcagggtgtcccccatgcctggaagaggagctggtggctgccagccctggggcccggcacaggcctgggccttccccttccctcaagccagggctcctcctcctgtcgtgggctcattgtgaccactggcctctctacagcacggcctgtggcctgttcaaggcagaaccacgacccttgactcccgggtggggaggtggccaaggatgctggagctgaatcagacgctgacagttcttcaggcatttctatttcacaatcgaattgaacacattggccaaataaagttgaaatttt

SEQ ID NO: 10256 - DNA, 1400 bp, Homo sapiens
cagcaaaggcatctgcctaatagggtcccccagggccccacctgtctcacaagaacttcactcaaccccgtgccaggactcagcagtggcctggacacagcctcagcttcctctacccatcttcttttcttaaagcaggctatgtgccctacatgtgcaaggcaccatgactgcccatcgagatgccaagaagggctatggaactatgcaggtggctagtggtcagactgaagtcaccagctgaataccttaaggaggactcttgaggctcataatggagttcctggggcacagggattagttatgagcattaaagttcctaagacccagtgacagtactgggagaaaccaaggctgaagagtcaggttgaagcacaggcttttgttttttgttgtttttgttttttgagacagagtctcattctgtcacccaggctggagtgcagtggcgcaatcttggctcactgcaacctccgactcccaggttcaagcaattctcctgcctcggcctcctttagtaggtgggattacaggtgcataccaccacacctttctaatttttgcatttttagtagagatggggtttcaccatgttggtcaggctggtctcaacctcctgacctcaagtgatctgcccgcctcagcctcccaaagtgctgggatgataggcgtgagccaccacacccggccaagcacaggcttttgaatggtctccctctccccagcccaggtacatgaggccaaggtgaactgtgcatcctgagaccttgtgtccctgagtctcctttctgagtgcaagctgcactgtgagctggctgtgggatactcacacattcccacattctcctttctgccacatctcgcccttctggacctgcactgggagaaattcaggacaggagtgaactcaaggccatgaactcactggatttccatttttaggcacccatagggatgtttttaggatgtaagtttctgaggagaaagctagctctagcatgaagcttttttggattggcttctccatcgtgttggggtaacattttttttccaattttttttttcccaaaacatcgtctcagctcatttatcaagtaggtaaaatgagccttttgtgtacacacagaggcacatgtgcatgcacacacaacttgtgaacacacatttctgttaaagaagttagaaaatgagagatgggttggggcttgaagtgcatcagaggtatgaatgttgtaaaactgtcaggagatgtaaaattcctttctgaagtgtctcttctgtgaaagggttcagagcagattttgcttactatgtagtgttgcccttaagtacagtggtgtaattttattcaagattgtgctcttctatcaaaagcctctggaaataaatgttccgggatc

SEQ ID NO: 10257 - DNA, 600 bp, Homo sapiens
gttgtaggtcaaagacaatcatcaatgatgccttttactttagaagagctgataatgttgtctcgatgccttcgagatgcatgcctggggatcatcaagttggcttatccagaaaccaagccagaagttcgagaagaatatattacagcatttcagagtattggagttactactagctctgaaatgcaacaatgcatacagatggaacagaaaagatggattcagttatttaaggttatcaccaatctagtgaaaatgttgaagtccagagacacgaggagaaatttttgtcctccaaaccactggctgtcagaacaagaagatattaaagcagataaggtgttattgaaagatctttttaatatttatcattaaaaaatacattcagcttgtgtctttctggagagaagaattaagcactttaaaattatttattttatgactcatatgactaaatagtaatgataaaccttattactaactcttacgccaacttcttaatggaacatatagcagtatcattgacttaaaatgatattctgagttattaatcctcaattttcctttttaacctgagattatattaaagccttaatgatt

SEQ ID NO: 10258 - DNA, 600 bp, Homo sapiens
tccaggcattaattccacccagggaattttagctatgccctcatgtcccagggagagagccacacgcctgttttccatttatagcaagattgtttgcatacttttgtaatgaaggggagtgtccagtggaaggatttttaaaattatcttatggatagctcaagtctctgccatttgtaatttttggctctaagctccgattggagacgcttctccttgtgcatgtgagttgactgatgttgtgagtgtaaatgcatttggttatttctggtatcggtggccacttggatggatttttttacattctgttccccagttacaggaaggagtccctttggtgtgtgaatatgtgtgcctgtagagggtggggcagggtggggtggggatggaaatgtgtggcatgcacatgagttgaaattcttttatgcatttttttgaagaaaaaaaaaaaaacaactctgaggacataggggatgtcagtttcctatggaagagacacctctgacccgttattcttataatcaaaatctgaagggaaaaaaatgttttagttctttccccactcgttgggttcaactagattaaaaggctgattttcag

SEQ ID NO: 10259 - DNA, 600 bp, Homo sapiens
cactgtactctgaggtccaaatactgtctgtcaatgtgtaacctgatgtctcaaccccctgtgagaagagtccattatttggtgttcaccaacgtgggagacttcaccggaacaggcttttttgctttgggctctgctatttgtttgcagaacacccaagagcgagcaaacatgctctcttcacagcagtaccttagggttttgccattgtaaatgggtctgatgtgatatgacaagaccagagaaattggatgtaaatttacatttttgaatatgcttgttgtttcacatgatacatttagggtatgcagctccttttgtagtttttatttttactatttaagtttggaaatgatgccaaatttttgtatttctttaatcaatgtgttctcttcggtgatatatattgcattatatattgatgtgtgtatcaatatatattgatatgtattacacttacacatacaaacacatataagagggggtgaaaaccgtagcctttgcattctctatagcctctgcagagagatactaagcagcaaaatcttggtgttgtgatgtacagaaatggagaagagtattaaaccatatttaagaata

SEQ ID NO: 10260 - DNA, 600 bp, Homo sapiens
gtatgtcgagagtaccaacgtggcaattgcaaccgaggagaaaatgattgtcggtttgctcatcctgctgacagcacaatgattgacaccaatgacaacacagtcactgtgtgtatggattacatcaaagggagatgctctcgggaaaagtgcaaatactttcatccccctgcacatttgcaagccaagatcaaggctgcccaataccaggtcaaccaggctgcagctgcacaggctgcagccaccgcagctgccatgggaattcctcaagctgtacttcccccattaccaaagaggcctgctcttgaaaaaaccaacggtgccaccgcagtctttaacactggtattttccaataccaacaggctctagccaacatgcagttacaacagcatacagcatttctcccaccaggctcaatattgtgcatgacacccgctacaagtgttgttcccatggtgcacggtgctacgccagccactgtgtccgcagcaacaacatctgccacaagtgttcccttcgctgcaacagccacagccaaccagatacccataatatctgccgaacatctgactagccacaagtatgttacccagatgtag

SEQ ID NO: 10261 - DNA, 1400 bp, Homo sapiens
gctcctaggttcttaaggataattttcctcaatcacactacacatcacacaagatttgactgtaatatttaaatattaccctccaagtctgtacctcaaatgaattctttaaggagatggactaattgacttgcaaagacctacctccagacttcaaaaggaatgaacttgttacttgcagcattcatttgttttttcaatgtttgaaatagttcaaactgcagctaaccctagtcaaaactatttttgtaaaagacatttgatagaaaggaacacgtttttacatacttttgcaaaataagtaaataataaataaaataaaagccaaccttcaaagaaacttgaagctttgtaggtgagatgcaacaagccctgcttttgcataatgcaatcaaaaatatgtgtttttaagattagttgaatataagaaaatgcttgacaaatattttcatgtattttacacaaatgtgatttttgtaatatgtctcaaccagatttattttaaacgcttcttatgtagagtttttatgcctttctctcctagtgagtgtgctgactttttaacatggtattatcaactgggccaggaggtagtttctcatgacggcttttgtcagtatggcttttagtactgaagccaaatgaaactcaaaaccatctctcttccagctgcttcagggaggtagtttcaaaggccacatacctctctgagactggcagatcgctcactgttgtgaatcaccaaaggagctatggagagaattaaaactcaacattactgttaactgtgcgttaaataagcaaataaacagtggctcataaaaataaaagtcgcattccatatctttggatgggccttttagaaacctcattggccagctcataaaatggaagcaattgctcatgttggccaaacatggtgcaccgagtgatttccatctctggtaaagttacacttttatttcctgtatgttgtacaatcaaaacacactactacctcttaagtcccagtatacctcatttttcatactgaaaaaaaaagcttgtggccaatggaacagtaagaacatcataaaatttttatatatatagtttatttttgtgggagataaattttataggactgttctttgctgttgttggtcgcagctacataagactggacatttaacttttctaccatttctgcaagttaggtatgtttgcaggagaaaagtatcaagacgtttaactgcagttgactttctccctgttcctttgagtgtcttctaactttattctttgttctttatgtagaattgctgtctatgattgtactttgaatcgcttgcttgttgaaaatatttctctagtgtattatcactgtctgttctgcacaataaacataacagcctctgtga

SEQ ID NO: 10262 - DNA, 600 bp, Homo sapiens
cagagtcgtcatggggcgagaacaagtgactctgaccagcaggcttaccttgttcaaagaggagctgaggacagggactggcggcaacagcggaatattccgattcattcctgccccaagtgtggagaggttctgcctgacatagacacgttacagattcacgtgatggattgcatcatttaagtgttgatgtatcacctccccaaaactgttggtaaatgtcagattttttcctccaagagttgtgcttttgtgttatttgttttcactcaaatattttgcctcattattcttgttttaaaagaaagaaaacaggccgggcacagtggctcatgcctgtaatcccagcactttgggaggtcgaggtgggtggatcacttggggtcagggtttgagaccagcctggccaacatggcggaaccctgtctctaccaaaattacaaaaattagccgagcatggtggcgcatgcctgtagtcgcagctactcgcgaggttgaggcaggagaattgcttgaacccaggaagtggcagttgcagtgagccgagacgacaccactgcactccagcctgggtgacagagggagactctgtctcgaaag

SEQ ID NO: 10263 - DNA, 600 bp, Homo sapiens
gtttcatgtgattagtttccaaaggttacagataataaagaaatcagaaatggtacctttttaagaattgcatatttttttagacacaactattagtacattaagagggaagcaaagttactgtctatttaaaactgcaagcagttaactctcttaactcccttattacctaaacttgtctggctcccaggaacagccttatagagagagggagtattgtattgggaagaaaatgttactgaactattgactgaaagtaaatttagataaaatacagcttttttccttatgggcatttgttttgtttcaagtcatcataaactaggtattgcattgctatccgtggatacagacgcttagctcttaaaagattttttttttatgtaaactgttgaatatttgaaatagtccacttcaccttaatgggtcttgtctatcttcattagtcttcaaagaaaaaccatttgctaccaaagtaaatcagtattttgaatgtgcttctcttgttttttgtttattagctagttcctgtaagcatttccaccagaacttgaggcaaatcgtaaggaagctgtttcttttaaaacacaaaccaccacc

SEQ ID NO: 10264 - DNA, 600 bp, Homo sapiens
gttcagaggccgaggaggcactggaggctgctggccgtttcctactgcctgggctggaggaggagctggaagaggccgtgggccgcatccacctgggaccccagggtggcccggagtcagtgggtgaggtgttccgcctgggccggccccggctggctgcccactgtgcccgctggacactggggtcagagcagtgcccgaggaagcggggtctggccctggtggggcttgtggaggcagcaggtgaagaggcagggcccctgacggaggctttgctggctgtggtgatggggattgagttgggggcaagggtccctgcctagactgttgacgtcccctgggaaggggacccaaggatgaattggctgtgaaggatcctccctgagactggcaagggaggaggctgagcagaaggagtcatcatggaggagcggtgagaacatggaaccggactccaagatgacgatctaaagacccgggagcgagaagccaaggccaggttctgggtgtagggcccagagaagcagaacagcccagagccccaggtgcctggcctggcctagacctctggaattgagattaaacaatttggagttggat

SEQ ID NO: 10265 - DNA, 1348 bp, Homo sapiens; identical to SEQ ID NO: 5030

SEQ ID NO: 10266 - DNA, 1400 bp, Homo sapiens
catggacacaactggggagcgttctccatcaccactgaccgggaaagtcaatcagctggaattaattcttcgacaactccagaccgaccttcggaaggaaaaacaagacaaggccgttctccaagcagaagtgcagcacctgagacaggacaacatgagactgcaggaggagtcccagaccgcgacagctcagctgcggaaattcacagaatggtttttcaccaccatcgacaaaaaatcttagccaatccgcacctcatcaagggaccactgggaaatgccccttgtccctttgaagtcacaaacatgtggtttttctgtgtgctttcaaccaatcgtaaatgtttttgctgttccattctgtgtagcaccattcaccacagcaggatagggagcctcgactctttctcggtaaccacggcagagagcagcgccgatgtgaagatgaatgaatgtaactcctggtgtgaagatgaatgtaaaccctggcgacagttgagacctttttcttttagactctgctaaaacagtgctctggcttgggcttacctcaagagggaagatagttgagttttatttcctgtatatcaggtgacctggtagagatgtaaagcaatttaccatagtttgggctttagtattgtaaaataaacatgagaacaaataatcagacatatactttaatgttaaaggtgctctatttttttggatgtacagtagttttatttccacagccacattaccatagcaataagaaaggaggcatagtacatagttggaaaagctttgtggggggattaaaaaaaaaaaaaagcactgttgtgtttaacactagttcagatgcagttaccttagagacttatttatttgcaggaacaaatggtgcctgaatattaacagtgttctgattaaaaacaaaaaaaagatacatatgccttgtaaatggctcaccgagtggtcagtagtcacttcaactcttagttcacttttgtatagttgctctgctggaaagaaatgagagtgaatctgcttactcactagaacttccctgtgtgctgtgagccagcggaaccacttgtacaatgccagatttgtttatctttgtacagaagctttgatgaagtgtcttgtatttaacacccttatttaagcttatttaaccttaaattgttaattttataaaatttggtttggcctgcactacgatgagggatggaggtagctgcaggctcagaagagactgagcttgcacagatcagaccgagaagcagggtgagagattctaacgactggatgctgctagtaacacattgtttgtattgctttaccatttttaactgttagatttgagatgaacatacattttgcttttttaataaatgtttaaaagaagtccacat

SEQ ID NO: 10267 - DNA, 1400 bp, Homo sapiens
  misc_feature (231)..(363): n is a, c, g, or t
tccagaagaatgtccagaggaggtttatgaccctcgatctctatatgaaaggctacaggaacagaaggacaggaagcagcaggagtacgaggaacagttcaaattcaaaaacatggtaagaggcttagatgaagatgagaccaacttccttgatgaggtttctcgacagcaggaactaatagaaaagcaacgaagagaagaagaactgaaagaactgaaggaatacagaannnnnnnnnnnnnnnnnnnnnnnnnnnnnnnnnnnnnnnnnnnnnnnnnnnnnnnnnnnnnnnnnnnnnnnnnnnnnnnnnnnnnnnnnnnnnnnnnnnnnnnnnnnnnnnnnnnnnnnnnnnnnnnnnnnnnctcagagagtggcaacagtgtgaaaagactgaaaccggaccctgagccagatgacaagaatcaagagccctcatcctgcaagtctctcggaaacacctccctgagtggcccctccatccactgcccctctgctgcagtatgtatcggcatcctcccaggcctgggtgcctactctgggagcagcgactccgagtccagctcagacagcgaaggcaccatcaatgccaccggaaagattgtctcctccatcttccgaaccaacaccttcctcgaggccccctagtttctccgtccctacacagggagctcctccccaagggtagatcggaccgttcatgctgcctataggcattatgtccctcaaaaaaaaactcctttgcctgcatcctgtgtacaacatgacatttttaaccaatccaatctaaaaatgtgccagaatccacctgtggcccgaatcgtgtttggttcctctttctactccactgcagatgaccaaacctgtcccgctgccactttcctcactgatattgggaggagggcaaggcccagccgaagttccactaaaaatgccccaggagaataggcaccggctggcttgccaaagggtttgggttttattgctttctgttttttcttttcccgacagcacaaagaagtaagggcagttattggacaggtgttatttaaacattctattgtaaatgaatgtgttgtttggttctactgcattgtggagcatgcgggggaagagaactgacccaggtagtgaaatggagcccttccctggaactaaccagtccttgatgttgtgtgactaagtaaagatgataaaccccatctgctgggggtgtcacttcacactcggcatgcattgtgaaagctttccatacccttggccattccctctctcctctctctccaaccccatttatgcaggaagggactgctaacaagaacgcttccatctcaaaccttttctctgcctgggaaattattttatgtttgtttttgaaataaaggatttagtttaagattct

SEQ ID NO: 10268 - DNA, 1400 bp, Homo sapiens
ggactcgttctcaggcggccccgcgggggtgcggcttccgaggtcgccgccactcaaggtgctggcggagcagctgcggcgcgacgcggagggcggcccgggcgcgtggcggctgtcacgggcggcggcgggccgcgggccgctggacctggcggccgtgtggatgcagggcagggtagtgatggcggaccgcggcgaggctcggctgagggacccgagcggggacttctcggtccgcggcctggagcgggtgccgcgcgggcggccctgtctagtcccaggaaagtatgtgatggtgatgggagtggttcaggcctgcagccctgagccctgcctgcaggctgtgaagatgacagacctttctgataatcccatccatgaaagtatgtgggaactggaggtagaagatttacacaggaatattccttagagtatgttggaactgtcgttaaaaacaaccaaaatcccgaaactatttagaagcttataatgatgtggatttcatggacacttttcaatgcgtatttttcaaatgcttctcagagagccttgctttggttgaccaaggagtccggatgtaggaatgtttaaatcctcggatacttcagtgacacagcctctgctgccccttgctttgcctgtgtttgctgatgaaaagcagatgcttgtgtttcattttccttcctggtttgtgtgtgttaattctctctctctctctcagacacagaagtctcatgttgcattttccaaattttatgagtgatgatactttttccattactgctgcgtccctgttttacaatgcaaaatttaagtacggtcgttgcccatggtgattaaagtgtggttatgggcaggaagacagactgtgtaaaaaaggaatgacatcctggctcctcatcttcttcatcagcaactaccataaccagtttgcgagtcaaatggcatttcctaacggcaggcatggcggcccctgaaagacaacagctccctttctgcttcggacaccactcaaacatttagacgcagctctatcccttttcctagctagagaaggtgatgccttcttccattactcagagatgttgagacgttttcagaatttcttgttgaaatgaaaaacatcaagataaaggacgcctttcaggcattagctaaacttccacttcataactttcggcgagacatggtgagcctcctggtgtagagttcttttgtctttgtatggaatgactttttgctgtgatggttttgaatgttgggtttctgctgtctgcttagtacccatgcctgaattttttgagattgtaaatatcaaaggagttagattgtgttctgacatggttgtagactttcacctggattattgatattctacctctaataaatttttaataggc

SEQ ID NO: 10269 - DNA, 1400 bp, Homo sapiens
agcgcggctgcccaggttgacctttctgcgggagggctttctctacgtgctgttgtctcactgggtttttgtcggagccccacgccctccggcctctgattcctggaagaaagggttggtcccctcagcacccccagcatcccggaaaatggggagcaaggctctgccagcgcccatcccgctccacccgtcgctgcagctcaccaattactccttcctgcaggccgtgaacaccttcccggccacggtggaccacctgcagggcctgtacggtctcagcgcggtacagaccatgcacatgaaccactggacgctggggtatcccaatgtgcacgagatcacccgctccaccatcacggagatggcggcggcgcagggcctcgtggacgcgcgcttccccttcccggccctgccttttaccacccacctattccaccccaagcagggggccattgcccacgtcctcccagccctgcacaaggaccggccccgttttgactttgccaatttggcggtggctgccacgcaagaggatccgcctaagatgggagacctgagcaagctgagcccaggactgggtagccccatctcgggcctcagtaaattgactccggacagaaagccctctcgaggaaggttgccctccaaaacgaaaaaagagtttatctgcaagttttgcggcagacactttaccaaatcctacaatttgctcatccatgagaggacccacacggacgagaggccgtacacgtgtgacatctgccacaaggccttccggaggcaagatcacctgcgggatcacagatacatccattccaaagaaaaacccttcaaatgtcaggagtgtgggaaaggattttgtcagtctagaactctagcagttcacaaaactttacacatgcagacatcaagccctacagctgcgagcagtgcggcaaagtgttcaggcgaaactgtgatctgcggcggcacagcctgactcacaccccgcggcaggacttctagagaagcccaggatctgtcccgtgccgccgctgctcccctccccagacacctctccacgtctcctacccagggggtcgcatccctagcccttcactgaccccagctcttcccttgctgcagccgcacctgcagctccagggagttaactcttcttctgggggactgagaactgtagaaagccacacactactacatcccttcacaaagagtatatgctagtttcttgtagatattcacagctcattttagagctctgtacataatgttgtgggtctttgttttgttgttttgtttgctttgggatcttgttggatgcacttagatatggaaaatggaagccaaattttatctttaaagactgtattttcaaaataaaactttttcttgtttgtttc

SEQ ID NO: 10270 - DNA, 1400 bp, Homo sapiens
cgccctccggcctctgattcctggaagaaagggttggtcccctcagcacccccagcatcccggaaaatggggagcaaggctctgccagcgcccatcccgctccacccgtcgctgcagctcaccaattactccttcctgcaggccgtgaacaccttcccggccacggtggaccacctgcagggcctgtacggtctcagcgcggtacagaccatgcacatgaaccactggacgctggggtatcccaatgtgcacgagatcacccgctccaccatcacggagatggcggcggcgcagggcctcgtggacgcgcgcttccccttcccggccctgccttttaccacccacctattccaccccaagcagggggccattgcccacgtcctcccagccctgcacaaggaccggccccgttttgactttgccaatttggcggtggctgccacgcaagaggatccgcctaagatgggagacctgagcaagctgagcccaggactgggtagccccatctcgggcctcagtaaattgactccggacagaaagccctctcgaggaaggttgccctccaaaacgaaaaaagagtttatctgcaagttttgcggcagacactttaccaaatcctacaatttgctcatccatgagaggacccacacggacgagaggccgtacacgtgtgacatctgccacaaggccttccggaggcaagatcacctgcgggatcacagatacatccattccaaagaaaaacccttcaaatgtcaggagtgtgggaaaggattttgtcagtctagaactctagcagttcacaaaactttacacatgcaggaatctccacacaaatgtcccacatgtggaagaacctttaatcagagaagtaatctgaaaactcaccttctcacccatacagacatcaagccctacagctgcgagcagtgcggcaaagtgttcaggcgaaactgtgatctgcggcggcacagcctgactcacaccccgcggcaggacttctagagaagcccaggatctgtcccgtgccgccgctgctcccctccccagacacctctccacgtctcctacccagggggtcgcatccctagcccttcactgaccccagctcttcccttgctgcagccgcacctgcagctccagggagttaactcttcttctgggggactgagaactgtagaaagccacacactactacatcccttcacaaagagtatatgctagtttcttgtagatattcacagctcattttagagctctgtacataatgttgtgggtctttgttttgttgttttgtttgctttgggatcttgttggatgcacttagatatggaaaatggaagccaaattttatctttaaagactgtattttcaaaataaaactttttcttgtttgtttc

SEQ ID NO: 10271 - DNA, 1400 bp, Homo sapiens
tagaataaatgaaatcttgttactagaacaagaaatgtcagatggccaaaaacaagatgaccagatttgatctcagcctgatgaccctacaggtcgtgctatgatatggagtcctcatgggtaaagcaggaagagagtgggaaagagaaccaccccactctgtcttcatatttgcatttcatgtttaacctccggctggaaatagaaagcattcccttagagatgaggataaaagaaagtttcagattcaacagggggaagaaaatggagatttaatcctaaaactgtgacttggggaggtcagtcatttacagttagtcctgtgtctttcgacttctgtgattattaaccccactcactaccctgtttcagatgcatttggaataccaaagattaaagccttgacataagatctcatttgcagaaagcagattaaagaccatcagaaggaaattatttaggttgtaatgcacaggcaactgtgagaaactgttgtgccaaaaatagaattccttctagtttttcttgttctcatttgaaaggagaaaattccactttgtttagcatttcaagcttttatgtatccatcccatctaaaaactcttcaaactccacttgttcagtctgaaatgcagctccctgtccaagtgccttggagaactcacagcagcacgccttaatcaaaggttttaccagcccttggacactatgggaggagggcaagagtacaccaatttgttaaaagcaagaaaccacagtgtctcttcactagtcatttagaacatggttatcatccaagactactctaccctgcaacattgaactcccaagagcaaatccacattcctcttgagttctgcagcttctgtgtaaatagggcagctgtcgtctatgccgtagaatcacatgatctgaggaccattcatggaagctgctaaatagcctagtctggggagtcttccataaagttttgcatggagcaaacaaacaggattaaactaggtttggttccttcagccctctaaaagcatagggcttagcctgcaggcttccttgggctttctctgtgtgtgtagttttgtaaacactatagcatctgttaagatccagtgtccatggaaaccttcccacatgccgtgactctggactatatcagtttttggaaagcagggttcctctgcctgctaacaagcccacgtggaccagtctgaatgtctttcctttacacctatgtttttaaatagtcaaacttcaagaaacaatctaaacaagtttctgttgcatatgtgtttgtgaacttgtatttgtatttagtaggcttctatattgcatttaacttgtttttgtaactcctgattcttccttttcggatactattgatgaataaagaaattaaagtg

SEQ ID NO: 10272 - DNA, 1400 bp, Homo sapiens
tggaagcacagcctcggggatggggagggaaagacggtgctatatccagttcctgctctctgctcatgggtggctgtgacaaccctggcctcacttgattcatctctggttttcttgccaccctctgggagtccccatcccattttcatcctgagcccaaccaggccctgccattggcctcttgtcccttggcacacttgtacccacaggtgaggggcaggacctgaaggtattggcctgttcaacaatcagtcatcatgggtgtttttgtcaactgcttgttaattgatttggggatgtttgccccgaatgagaggttgaggaaaagactgtgggtggggaggccctgcctgacccatcccttttcctttctggccccagcctaggtggaggcaagtggaatatcttatattgggcgatttgggggctcggggaggcagagaatctcttgggagtcttgggtggcgctggtgcattctgtttcctcttgatctcaaagcacaatgtggatttggggaccaaaggtcagggacacatccccttagaggacctgagtttgggagagtggtgagtggaagggaggagcagcaagaagcagcctgttttcactcagcttaattctccttcccagataaggcaagccagtcatggaatcttgctgcaggccctccctctactcttcctgtcctaaaaataggggccgttttcttacacacccccagagagaggagggactgtcacactggtgctgagtgaccgggggctgctgggcgtctgttctttaccaaaaccatccatccctagaagagcacagagccctgaggggctgggctgggctgggctgagcccctggtcttctctacagttcacagaggtctttcagctcatttaatcccaggaaagaggcatcaaagctagaatgtgaatataacttttgtggaccaatactaagaataacaagaagcccagtggtgaggaaagtgcgttctcccagcactgcctcctgttttctccctctcatgtccctccagggaaaatgactttattgcttaatttctgcctttcccccctcacacatgcacttttgggcctttttttatagctggaaaaaacaaaataccaccctacaaacctgtatttaaaaagaaacagaaatgaccacgtgaaatttgcctctgtccaaacatttcatccgtgtgtatgtgtatgtgtgtgagtgtgtgaagccgccagttcatctttttatatggggttgttgtctcattttggtctgttttggtcccctccctcgtgggcttgtgctcgggatcaaacctttctggcctgttatgattctgaacatttgacttgaaccacaagtgaatctttctcctggtgactcaaataaaagtataattttt

SEQ ID NO: 10273 - DNA, 600 bp, Homo sapiens
tcctttcccctaattcacagggtgaagccagatttggtgttgtgtaacggaccaggaacatgtgttcctatctgtgtatctgcccttctccttgggatactaggaataaagaaagtgatcattgtctacgttgaaagcatctgccgtgtagaaacgttatccatgtccggaaagattctgtttcatctctcagattacttcattgttcagtggccggctctgaaagaaaagtatcccaaatcggtgtaccttgggcgaattgtttgacaaatggcaactgacttctttagaattttgcagttaacagtagtatgtactcaaattggggggaaaaaaaccctacatgtttcttgtaaaggcgtctgacagtcctgagaattattgatggtaaggaataaaaaatgtacagatgactcagtgaagaaactgaggcttctcttatgaaacaaacattgataaacgtaactactaaatgtttatgcctctgtaaaccaaatttcttttctagataaaaatatgtattactacctgcaaattttcttctggctgttttagtagtattttttttacagaactaaatatagagtttgtatgattagt

SEQ ID NO: 10274 - DNA, 600 bp, Homo sapiens
atttgtcactggaacctccctgggcctgtctcagattgggattaacataaaagagtggaactatccaaaagagacagggagaaataaataaattgcctcccttcctccgctcccctttcccatcaccccttccccatttcctcttccttctctactcatgccagattttgggattacaaatagaagcttcttgctcctgtttaactccctagttacccaccctaatttgcccttcaggacccttctactttttccttcctgccctgtacctctctctgctcctcacccccacccctgtacccagccaccttcctgactgggaaggacataaaaggtttaatgtcagggtcaaactacattgagcccctgaggacaggggcatctctgggctgagcctactgtctccttcccactgtcctttctccaggccctcagatggcacattagggtgggcgtgctgcgggtgggtatcccacctccagcccacagtgctcagttgtactttttattaagctgtaatatctatttttgtttttgtctttttcctttattctttttgtaaatatatatataatgagtttcattaaaatagattatccc

SEQ ID NO: 10275 - DNA, 1400 bp, Homo sapiens
ggcggctgggcctggaacagtcggagcagccgctagcagaaggatgacccaagacgggaagcgggctgctgagcctcgccgattcccgtgcttgtaactgccccagccggacaccccccctcccttgacctacccggagctcagcctggccttacttcagtgataaaaggaggaaaggctggctacagcaaacatcattcaagatgtccagcaaagggagcagcacagatggcagaacagacttagctaatggaagcctgtctagcagtccagaggagatgtctggagctgaagaggggagggagacatcctcaggcattgaagtggaggcctcagacctgagtttgagcttgactggggatgatggtggccccaaccgcaccagcacagaaagtcgaggcacagacacagagagctcaggtgaagataaggactctgacagcatggaggacactggtcattactccattaatgatgaaaatcgagtccatgaccgctcagaggaagaggaagaggaggaagaagaggaggaagaagagcagcctcggcgccgtgtacagcgcaagcgggctaaccgtgaccaggactcatcagatgatgagcgggccctagaggactgggtgtcctcagaaacatcagctctaccccgacctcgctggcaagccctccctgcccttcgggagcgggagctgggttcaagtgcccgctttgtctatgaggcctgtggggcaagagtctttgtgcagcgtttccgcctgcagcatgggcttgagggccatactggttgtgtcaataccctgcactttaaccagcgcggcacctggctggccagtggcagcgatgacctgaaggtggtggtgtgggattgggtacggcggcagccagtactggactttgagagtggccacaaaagtaatgtgttccaggtgaggcaagggagcataatagcaactgagagaatcaggcatgagttagagaaatctgaactgcagcatggattgggagctgatagtgagttattgtaggaattacatatcgggacatggccctactttggctcccctaatgacctaaatacactgaaagactcttggcaaccctagattccttgagcatgtggactgttggaagcctcataggtagggtgcatgcagcttattaaatgtgtgctggtaggaggcagtgtagtataagcacaggctcttgaaccaaactgcctgagttcaaatcctagcccttctgcttactagctcagtgatcttggccaagttattttacctttgtcttcagtttatctgtaaaatgggactaataacacatagggttatgaggattaagtaacaatagaagctaagcagttagaactgtgactggtacttaataaacatttgataaatgtt

SEQ ID NO: 10276 - DNA, 1400 bp, Homo sapiens
agtgagacacctacaatcaccagtctcaaatgcgctattgtttcttttcagagtgttgcagatttgccatttctccataatatggggatagaaaatggaataaagatagaagggatgtagaatatgctttcctgccaacatggtttggagtcgactttggtatattgactagatttgaaaatacaagattgattagatgaatctacaaaaaagttgtcctcctctcaggtcccttttacactttttgactaactagcatctatattccacacttagcttttttgtcacacttatcctttgtctccgtaaatttcatttgcagtggttagtcatcagatattttagccacctacacaaaagcaaactgcatttttaaaaatctttctgagatgggagaaaatgtattctcctttcctataccgctctcccaacaaaaaaacaactagttagttctactaattagaaacttgctgtactttttcttttcttttaggggtcaaggaccctctttatagctaccatttgcctacaataaattattgcagcagtttgcaatactaaaatattttttatagactttatatttttccttttgataaagggatgctgcatagtagagttggtgtaattaaactatctcagccgtttccctgctttcccttctgctccatatgcctcattgtccttccagggagctcttttaatcttaaagttctacatttcatgctcttagtcaaattctgttacctttttaataactcttcccactgcatatttccatcttgaattggtggttctaaattctgaaactgtagttgagatacagctatttaatatttctgggagatgtgcatccctcttctttgtggttgcccaaggttgttttgcgtaactgagactccttgatatgcttcagagaatttaggcaaacactggccatggccgtgggagtactgggagtaaaataaaaatatcgaggtatagactagcatccacatagagcacttgaacctcctttgtacctgtttggggaaaaagtataatgagtgtactaccaatctaactaagattattatagtctggttgtttgaaataccatttttttctccttttgtgtttttcccactttccaatgtactcaagaaaattgaacaaatgtaatggatcaatttaaaatattttatttcttaaaagccttttttgcctgttgtaatgtgcaggacccttctcctttcatgggagagacaggtagttacctgaatataggttgaaaaggttatgtaaaaagaaattataataaaagggatactttgcttttcaaatctttgttttctcttattctaggtaaggcatattaaaaataaatatgtaaagaagaaaaataaaagttgtcttcatgg

SEQ ID NO: 10277 - DNA, 1400 bp, Homo sapiens
tacatgacaggtgtaattagtctgctgagccagctttacccaatgaagggcatatgtgttagagagattagctaagagtagaaattcgagcatagaggccaggtgcggtggctcacgcctgtaatcccagcactttgggaggttgaggcaggcgtgtcacttgaggccaggagttcgagaccagcctggccaacatgatgaaaccccgtctctactacaaatacaaaaattagccgggtgtggtggcacacgcctgtagtcccagctactggggaggctgaggcagcattgcttgaacccaggaggtggaggttgcagtgagccaagatcacaccactgcactccagcctgggcgacagagggagacactgtctccaaaagaaagaaatcccagcgtagatccaaactgagacactgaggcttcgtccttatagtagtcaggagcaggcgattgaagtaattctgtcctgcggggttcagcatcatgcacgttccccctgggccattctctgatgcagggcacttgctccacactctgggaacccagattcaccagtctgccctgtcacgtagttgaaggagttgcatttatctttctggctcctaattcctttaaaattacatttgttgcagaacctccacaaggctaaataaaattacatttgtgaccatcagagaactgaataaaccattaactggccatcctggttttgcagagatcaggttgttgacagttcctggttgacccacagctacccatgtcagttatctccactaacatatccaagaatctttgtaggacaatttctccacctgcaaggtctttcaggtagaactcttcttttaaggcaattagcccattgccaaaaggttttactgtcttaaagctgtctttctgagatctaattccaaggacttctccacagctaagtgagatgcctcacaccattaggtgatgctttggacagaacagagtattttcatcttgtgtttaaagcaattccttggcttcggctcctcaccactttctatgccagtctcccatttatgtccctagtaatgcctatgcaaaaaaaaaaaaagaaaaaaaagaaaaactgatggtgaaacctacaggtttaagggcttaaatctcaaactttgttaggagtaacaggagcgtgctgagcgggcaagcaataaaacaaatcataccaaaaagccacattgctctctcctaagccccaaccccactccactcctgtggccaggggtccaaacagaaaataaccggagaagacaaggaggtcaaaggatcagggaactaagcattatgtgaattcaccagcaagatgtacagaacgcctgtgtttacattgtttttatggaactagcagaataaaacatctattttaaaaatg

SEQ ID NO: 10278 - DNA, 1400 bp, Homo sapiens
cacaactgtagagcagaccaagtgtgcatcaatttacggggatcctttgcatgtcagtgccctcctggatatcagaagcgaggggagcagtgcgtagacatagatgaatgtaccatccctccatattgccaccaaagatgcgtgaatacaccaggctcattttattgccagtgcagtcctgggtttcaattggcagcaaacaactatacctgcgtagatataaatgaatgtgatgccagcaatcaatgtgctcagcagtgctacaacattcttggttcattcatctgtcagtgcaatcaaggatatgagctaagcagtgacaggctcaactgtgaagacattgatgaatgcagaacctcaagctacctgtgtcaatatcaatgtgtcaatgaacctgggaaattctcatgtatgtgcccccagggataccaagtggtgagaagtagaacatgtcaagatataaatgagtgtgagaccacaaatgaatgccgggaggatgaaatgtgttggaattatcatggcggcttccgttgttatccacgaaatccttgtcaagatccctacattctaacaccagagaaccgatgtgtttgcccagtctcaaatgccatgtgccgagaactgccccagtcaatagtctacaaatacatgagcatccgatctgataggtctgtgccatcagacatcttccagatacaggccacaactatttatgccaacaccatcaatacttttcggattaaatctggaaatgaaaatggagagttctacctacgacaaacaagtcctgtaagtgcaatgcttgtgctcgtgaagtcattatcaggaccaagagaacatatcgtggacctggagatgctgacagtcagcagtatagggaccttccgcacaagctctgtgttaagattgacaataatagtggggccattttcattttagtcttttctaagagtcaaccacaggcatttaagtcagccaaagaatattgttaccttaaagcactattttatttatagatatatctagtgcatctacatctctatactgtacactcacccataattcaaacaattacaccatggtataaagtgggcatttaatatgtaaagattcaaagtttgtctttattactatatgtaaattagacattaatccactaaactggtcttcttcaagagagctaagtatacactatctggtgaaacttggattctttcctataaaagtgggaccaagcaatgatgatcttctgtggtgcttaaggaaacttactagagctccactaacagtctcataaggaggcagccatcataaccattgaatagcatgcaagggtaagaatgagtttttaactgctttgtaagaaaatggaaaaggtcaataaagatatatttctttag

SEQ ID NO: 10279 - DNA, 1400 bp, Homo sapiens
cccaagggggagagcaagagaaaacactctagggagtaaagctccccgggcgtcagagttgagccctgcctgggctgaaggactgtcttcacgaagtcagtcctgaggaaaaatattggggactccaaatgtcctctggcagaggacccagaaaaccacactggctccaacttcctcctcatggggcattacacttcaaaacagtggggagcaacttttccaccaaagctacaaacctaaaatgctgctgccccaaagcacaagagggaagagcaccgccggggccacaggacgtctgtcctccagtcacaggccatccttgctgctccctactgactctagcttacttcccctgtgaagaaacaggtgttctcggctgagcccccaaccctctgcagaaccaggttgatctgccacagaaaaagcatctttgaagacaaagagggtgaggtcttcatgagtctcctgggcccaaagccatcttctgatggaaggaagagagtagggccagtgaaggctgcccagagagaatgtcacagatgaggctgcccctgccccccccccgccagggaggtttcatgagctcatgtctatgcagcacataagggttcttcagtgaaaagcaggagaagagcccactgcaaggatagctcattaggcacatgaccgatgcagggaaggccatgccggggaagctcttcctgcaggtattttccatctgctgtgccaaggctgagcggcagaaacttgtctcataaattggcactgatggagcatcagctgtggcccacagagagccttgctgagaagggggcaggtaaagcagagattttagcattgccttggcataacaagggcccatcgattccctactaatgagaggcagggagagcatgggcaatggagacccaccaatgatccccaaccccggtgggtactggctgcctgccctgggccagggaatggctccttataccaaagatgctggcacatagcagaacccagtgcacgtcctccccttcccacccacctctggctgaaggtgctcaagagggaagcaattataaggtgggtggcaggagggaacaggtgccacctgctggacaatcacacgaaaggcaggcgggctgtgtactgggccctgactgtgcgtccactgctgtcttccctacctcaccaggctactggcagcagcatcccgagagcacatcatctccacagcctggtaaattccatgtgcctctgggtacaaaagtgcctcaacgacatgctctggaaatcccaaatgccacagtctgaggttgatatctaaaatctatgccttcaaaagagtctctgttttttttttttaacctggtagacagtataaaagcagtgcaaataaacacctaaccttctgc

SEQ ID NO: 10280 - DNA, 1400 bp, Homo sapiens
cacccaccatcagagaatccatagtcactccaaaagccatcaatgtaacgagtgtggaaaagctttcagtttgacctcagaccttattcgacaccacagaattcatactggagaaaaacctttcaagtgtaacatatgccagaaagccttccgactaaactcacaccttgctcagcatgtaagaatccacaatgaagaaaaaccctatcagtgtagtgaatgtggagaagccttcaggcaaaggtcaggtctttttcaacatcagagatatcaccacaaagacaaactggcttgatgaggtgttctctccttgtagaacatcagagaaggcacattgactagcaaacagcactttaggaaaagtcaccgtagcccactgtggcatcagaaaattcttgggggctgagttggaggctccctgcctctattctctctcctttgctttccttgaagtcagctttggaccacaataatttcactgtagatgatatgctaggatcaaagttaaacagcattcttcactgcaggacatctcagagcatgtaacataactgcatgattatatactctaagcaatagagagcttcatgactgagtaagagttttgaagtcagcagtgaatcaagtgcccacagatttgcaggcttaagcagaacaagggaagattgatatttttggatatgctatagcagctttctcctatgaaataaaactgatgatgtttggaagtatactactctcaaaggtgtctttaaagtacaggttaatggtgaacattttcccccagtggcttcacctcattcctcccactggccttaccccttccttccccagtggaagcattttcaaaagcaaagataattttcgctggtgaacttcagaacttgccttcagggttagcttcatgtaattttaccatttcccatccccattccccaccacattatgtcaagattcaagttataaattaacgttttacttagactttgaaagagatttcatgagtaatttgaatgaaccttgctgaattaatctgaatagcaactgtctgacttgataactccagtgccagtatagtggctgctgcatagacactattcagtaaatgtctgatgaaagaaattggactttttccctttaatactgatgatgcaattttgaaatgttgcttgttctggaatacttcggaagttaaacaataaagtcagcttggagaggagatcatgatctttatactgtgaatagcagaatgtcacagatgaagaatattaaaattaggggcgtccactccaaaacatatcaccagagtgacaacttcagccctcagcctctgcaatccatatatatcctggtcttgggagtccatagaatactgtttccttctaataaaggtttcaaac

SEQ ID NO: 10281 - DNA, 600 bp, Homo sapiens
cgggcgtggccgggaaggaaatgggactggagtccagagcatcagacctggccgcctccatccaaggcattgggaccatgggtgccggagccacgtgtggctgagggctggcggagcctgctccccagggagcactgattcctggaggtggtcgtttttgagggggctgtggggcttgtcttacctgcccccttctgtccagcacttgcatggcacttccctctattttcactcttggcggctgcccacacgttgcatttctcttcctttcttcttctcgctgtcctccatcctccattctgtccaactcctatcccagcccctggggagcctacctcaggtctgagagtctgggtgtgtggatttccttcagctacccggatgtccccacaggcaatctgattttttctccacatctggacccctccccctctatccctaaccctgtctaaactaatggcgcagtggtagctgcaagggcagggatgggagtggctgaagcctacttcactcccaaagatttctaaggaaaatggttctactgcatcctttggctgggccttgttgacccgtgaccctcttccaagaacattcactctg

SEQ ID NO: 10282 - DNA, 600 bp, Homo sapiens
  misc_feature (556)..(556): n is a, c, g, or t
  misc_feature (559)..(560): n is a, c, g, or t
  misc_feature (562)..(562): n is a, c, g, or t
ttcaaaaactttgccctgaagttttattttaatcgtcattgagaaagagggctcctgttctgacctcaaaaacagcaaagctgttgtaaagaagagagctgcttatacgaaaacccacattccaagacttggtataaggtattcctgaggccttgatttcaggtttggataatcttgccccagattctagatcttgttcttctagatcaaatcagaagaaactttgaaataactccaagaatctgcactgaaatgtagacagcactcgataatctaagggacattatcttgttgtgaaaaattatctccctcctggctgggagcggtggcacacacctataatctcagcactttgggaggccgaggtgggtggatcacgaggtcaggagatcgagaccatcctggctaacacagtgaaacctcatctctactaaaaatacaaaaaattagccgggcgtggtagcgggtgcctgtaatcccagttactcaggaggctgaggcaggagaatggcgtgaacccgggaggcggagcttgcagtgagctgagatcgcaccnacnntngcactccagcctgggcgacagagtaagactgtgtttca

SEQ ID NO: 10283 - DNA, 600 bp, Homo sapiens
taccgctgggcaggagaggttcaaatgcattgcatcaacctactatagaggagctcaagccatcatcattgtcttcaacctgaatgatgtggcatctctggaacataccaagcagtggctggccgatgccctgaaggagaatgacccttccagtgtgcttctcttccttgtaggttccaagaaggatctgagtacccctgctcagtatgcgctgatggagaaagacgccctccaggtggcccaggagatgaagactgttcagagactgcccagccctagggcactgtgccaccctcattcctccagagcttgacccctggacatttgcactgactttatccagaccaaagagctgcctcttggtggcagtattcccacagaggggtagctgggatcatgctagtcacttcctgcccccaggcaccgtgccaaagactggatgccccctactcctcaggggactgtccagggcgcccagtggtagtgagggagagtgtctctgttcttttgctcagcctgctgggccctttgtgtttgaggatgcttaatgattccagcctctcactgtgccttatgcattaaaatttctttgttacgagc

SEQ ID NO: 10284 - DNA, 600 bp, Homo sapiens
gagcccctgggcaccctgggctactgtggggctgtgggcctgttacccccaggcgcagcagctccctccggctgggcccaggctccactcagtgacacggctcaagtctacatggagctgcagggcctggtggacccgcagatccagctacctctgttagccgcccgaaggtacaagttgcagaagcagcttgacagcctcacagccaggaccccatcagaaggggaggcagggactcagaggcaacaaaagctttcttccctccagctggaattgtcaaaactggacaaggcagcctctcacctccggcagctgatggatgagcctccagccccagggagcccggagctctaactcatcatccccatcagttttcctccctctcagacctgtctttgaggacaaacagatttgtcagctgtcagggtgcagtgggacgtcagagactatgtggtccatcgccttcattgtgtaaatgaggacacagactggcttggtcgcagtgactgtggtgtccttgagatgctcacattactgcccggcctgcctcccacctggaagtctgggaatgaggagattgagataaacttttgaaatccc

SEQ ID NO: 10285 - DNA, 600 bp, Homo sapiens
cttccttggccagaagctgaaccttattcacagtgaaatcagtaatttagccggctttgaggtggaggccataatcaatcctaccaatgctgacattgaccttaaagatgacctaggaaacacgctggagaagaaaggtggcaaggagtttgtggaagctgtcctggaactccggaaaaagaacgggcccttggaagtagctggagctgctgtcagcgcaggccatggcctgcctgccaagtttgtgatccactgtaatagtccagtttggggtgcagacaagtgtgaagaacttctggaaaagacagtgaaaaactgcttggccctggctgatgataagaagctgaaatccattgcatttccatccatcggcagcggcaggaacggttttccaaagcagacagcagctcagctgattctgaaggccatctccagttacttcgtgtctacaatgtcctcttccatcaaaacggtgtacttcgtgctttttgacagcgagagtataggcatctatgtgcaggaaatggccaagctggacgccaactaggctgagcaatgacagaaccagctgcaccatgtaccccaccttcagtttaaaag

SEQ ID NO: 10286 - DNA, 1193 bp, Homo sapiens; identical to SEQ ID NO: 5051

SEQ ID NO: 10287 - DNA, 600 bp, Homo sapiens
agcaaaattatatttcttgacatataaaaagttggtttaatgcctttatttctctttaaggaccagaaccaggaatactatatcgaaaaattagtctgtggatttaacactgacttagcatatagcttaaagttgctcttttggtttttaacttcctccatacataagcttcaaggacaataagatgttaaaaaggaggaaataattatttttattttgacactgtgacagttttggtaactaggatcctagggagggaaatgtttgcctgttgaacttctttctgttatgagaggatttagttaggtcattaagatgttgatcacacagcttcaatcacaatatgccaagtataacctggtttcgttagaggtgtctacagtccagatgttcttcgtaataaaagcaaagtttttgaacctctgagtccaaagcaggctggttggcataatatgtaatttgaaaaataaaatcttatcttgcagcactatcagtatgttgaatttattatgtatattatttctaatatccgaaactaaatacttgattttttaatgtgtgtgtttattttatgatattgctattaaatttttattatct

SEQ ID NO: 10288 - DNA, 600 bp, Homo sapiens
aggaggaggagtgcggcgcggcggccccgggaccaaggagggacccagacatggagctgcgggaagaagcctggtctccggggccgctggattctgaggaccagcagatggccagtcacgagaacccagtggacatcctcatcatggatgatgacgacgtccccagctggcctcccaccaagctgtccccgccccagtctgcgcccccagccggcccgcggcagccatggcgggcgcgggggcaaaggccgcggggccccggtcgcggcgcgccccggcccccaagccgtacgtgtgtctggagtgcgggaagggcttcgggcacggggccgggctcctggcgcaccagcgggcccagcacggggacgggctcggggcggcggggggcgaggagccggcccacatctgcgtggagtgcggggagggcttcgtgcagggcgccgcgctccggagacacaagaagatccacgcggtgggcgcgccctcggtctgcagcagctgcggacagagctactaccgcgcgggcggggaggaggaggacgacgacgacgacgaggccgcgggcgggcggtgccccgagtgccgcggtggggagggccg

SEQ ID NO: 10289 - DNA, 600 bp, Homo sapiens
gaatggcagaacaattacacacagtgcgctccttgtgcaagcttatcttcctgtccagtctgctattgaaactatagagaagaagatcttattctgcaatgtagacaatgtgatagatggatgcatgcagttcgtcagaacttaaatactgaggaagaagtggaaaatgtagcagacattggttttgattgtaacatgtgcagaccctatatgcctgcatctaatgtgccttcctcagactgctgtggatcttcacttgtagcacaaattgtcacaaaagtaaaaaagctagacccacccaagacttatacccaggatgatgtgtgtttgattgaatcagggatgactcagttacagagcctcacagttacagttccaagaagaaaactgtcaaaaccaaaactgaaattgaagattataaatcagaatagcgtggccgtccttcagacccctccagacatccaatcagaacattcaagggatggtgatatggatgatagtcgaggagaacttatggattgtgatggaaaatcagaatctagtcctgagcgggaagctgtgaatgatgaaactaagggagtggaaggaacagatggtgtc

SEQ ID NO: 10290 - DNA, 1400 bp, Homo sapiens
ggtccctggccaaagatttatttctcttgacaaccaagggcctccgtctggatttccaaggaagaatttcctctgaagcaccggaacttgctactaccagcaccatgccctaccaatatccagcactgaccccggagcagaagaaggagctgtctgacatcgctcaccgcatcgtggcacctggcaagggcatcctggctgcagatgagtccactgggagcattgccaagcggctgcagtccattggcaccgagaacaccgaggagaaccggcgcttctaccgccagctgctgctgacagctgacgaccgcgtgaacccctgcattgggggtgtcatcctcttccatgagacactctaccagaaggcggatgatgggcgtcccttcccccaagttatcaaatccaagggcggtgttgtgggcatcaaggtagacaagggcgtggtccccctggcagggacaaatggcgagactaccacccaagggttggatgggctgtctgagcgctgtgcccagtacaagaaggacggagctgacttcgccaagtggcgttgtgtgctgaagattggggaacacaccccctcagccctcgccatcatggaaaatgccaatgttctggcccgttatgccagtatctgccagcagaatggcattgtgcccatcgtggagcctgagatcctccctgatggggaccatgacttgaagcgctgccagtatgtgaccgagaaggtgctggctgctgtctacaaggctctgagtgaccaccacatctacctggaaggcaccttgctgaagcccaacatggtcaccccaggccatgcttgcactcagaagttttctcatgaggagattgccatggcgaccgtcacagcgctgcgccgcacagtgccccccgctgtcactgggatcaccttcctgtctggaggccagagtgaggaggaggcgtccatcaacctcaatgccattaacaagtgccccctgctgaagccctgggccctgaccttctcctacggccgagccctgcaggcctctgccctgaaggcctggggcgggaagaaggagaacctgaaggctgcgcaggaggagtatgtcaagcgagccctggccaacagccttgcctgtcaaggaaagtacactccgagcggtcaggctggggctgctgccagcgagtccctcttcgtctctaaccacgcctattaagcggaggtgttcccaggctgcccccaacactccaggccctgccccctcccactcttgaagaggaggccgcctcctcggggctccaggctggcttgcccgcgctctttcttccctcgtgacagtggtgtgtggtgtcgtctgtgaatgctaagtccatcaccctttccggcacactgccaaataaacagctatttaaggggg

SEQ ID NO: 10291 - DNA, 600 bp, Homo sapiens
cccagaaggacgaaccaattttgataatgacattgcactggtgcggctgaaagacccagtgaaaatgggacccaccgtctctcccatctgcctaccaggcacctcttccgactacaacctcatggatggggacctgggactgatctcaggctggggccgaacagagaagagagatcgtgctgttcgcctcaaggcggcaaggttacctgtagctcctttaagtttcactcctaacatgatctgtgctggaggagagaagggcatggatagctgtaaaggggacagtggtggggcctttgctgtacaggatcccaatgacaagaccaaattctacgcagctggcctggtgtcctgggggccccagtgtgggacctatgggctctacacacgggtaaagaactatgttgactggataatgaagactatgcaggaaaatagcaccccccgtgaggactaatccagatacatcccaccagcctctccaagggtggtgaccaatgcattaccttctgttccttatgatattctcattatttcatcatgactgaaagaagacacgagcgaatgatttaaatagaacttgattgttgagacgccttg

SEQ ID NO: 10292 - DNA, 600 bp, Homo sapiens
attgaaaccggcagccatggccctccacagcccgcagtatatttttggagattttagccctgatgaattcaatcagttctttgtgactcctcgatcttcagttgagcttcctccatgcagtggaacagttctgtgtggcacacaagctggggataaactacctgatggacgattcgtttatgagaagactggtggtgtcagaagcttatcaaaaatactgaatatcctgtggacttggaaattagtaaagaactgctttctccaggggttaaaaataagaattttaaatgccacagaacctatcggctctttgcagtggtctaccatcacggcaacagtgcgacgggtggacattacactagagacgtcttccagatcggtctgaatggctggctgcgcatcgatgaccagacagtcaaggtgatcaaccagtaccaggtggtgaaaccaactgctgaacgcacagcccatctgctgtattactgccgagtggacctgctgtaaaccctgtgtgcgctgtgtgtgagcccagtgtccgctttgtaggacaccacctcacactcacttcccgcctctctttattggctctttagagagaaa

SEQ ID NO: 10293 - DNA, 600 bp, Homo sapiens
aaactggaggctttcttaggcagaaaaggagacaaactggcctttgtggaagagaaagcccctgcccaacaaaacagctatgactgtgggatgtacgtgatatgtaacactgaggccttgtgtcagaacttctttaggcaacagacagaatcactgctgcagctactcacccctgcatacatcacaaagaagaggggagaatggaaagatctcattaccacacttgctaaaaagtagctattgaagtatatttgcgacttttgaaggctcctctttctgcccttccccatttgttggatggctgcaatctcagtgcctgagggaagatgcctagtagaggaaagcttaatactctttttcctgaaagaatatcatcctctgcattatccccatggaacgtttcactttaaccctgactggggagcaatatgttctgtgaaaatatcttgaaattgtacaccaaaaccttacaaccaacttatttgaacatttattacacacagggtttacgtaagacttttcttattggtatataattaatttcctttggtctcccttatccacattggcttattctggaggaaaagcagtgatctgtaa

SEQ ID NO: 10294 - DNA, 616 bp, Homo sapiens; identical to SEQ ID NO: 5059

SEQ ID NO: 10295 - DNA, 600 bp, Homo sapiens
cagatgggaagcaaaagcagcccaccctccccctatatgggattctctggaaacagcaaagacagtcgccgaggcacctctgagctagacagacccctgcaggggacactcacccttctgaggtccgtgtttcggaagaaggagaacaggaggaatgagagggcagaggtctctccacaggtgccccccgtctccctggtgagtggcgctgagccttccatggacggcaggctccagctcacctcctgccctcaggatcccagagggcctgccaggggcctgggcagccggctcgagagggatgtctggtcagcccccagctctctccgcctccctcgtaaagccagcagggccccgagaggcagtgcactgggcatgtcacaaaggactgttccaggggagcaggcttcttatggcacctttcagagagtcaaatatcacactctttctttaggtcgaaagaaaaccttaccggagtccagcttttgatggagcgtgtcagtattgtgtgacgctggcattcttgggactttgccaagcaactgtaggcagctcatgttgagaatgggtttccaggaaacccgttgtcttgtaatctct

SEQ ID NO: 10296 - DNA, 1400 bp, Homo sapiens
ggccttagggggccctgaaagggtgaccttccactccacaccaggtcctaaggccactgtggcggccagccacctccgtgtggagtttgggggccaggccgggctagcggcagctgggctgagaggccgctgccagtgtcatggccacgctgcccgctgtgccgcccgtgcccggcccccccgctgccactgccgccaccataccactggcccggggtgcgagagctgccgcccgtcccatcgagactggccctggcggcctgccacgccccggcacccccacccttgcctaccctgctcctgcaaccagcacgcccgacgctgccggttcaactctgagctgttcagactgtcgggcggccggagtgggggtgtttgtgagcggtgccgccaccacacagctgggcggcactgccactactgccaacctgggttctggagggaccctagccagcctatcttcagccgcagggcctgcagagcctgccagtgccaccctattggggcaacaggaggaacctgcaaccagaccagtgggcagtgcacctgcaagttaggggtcacaggcctgacctgcaaccgctgtggccctggctaccagcagagccgctcccccaggatgccctgccagcgaattccagaggcaacaaccacccttgccactactcctggtgcttatagctctgaccctcagtgtcaaaactactgcaatatgtcggacaccagggtacacatgagccttcggaggtactgccagcaggaccatgttctccgcgcgcaggtgctagcgtccgaggcggcgggcccggcatggcagcggctggccgtgcgcgtgctggccgtttacaagcagcgggcgcagcccgtgcgacgcggcgaccaggacgcctgggtgccccgcgccgacctgacctgcggctgcctgcgcctgcagccaggcaccgactacctgctgctgggcagcgccgtgggcgaccccgaccccacgcgcctcatcctcgaccgccacggcctcgcgctgccatggaggccgcgctgggcccggcccctgaagcggctgcagcaggaggagcgcgccggaggctgccgcggcgtgcgggcacccacacccagtcccaggccggagcactagacgtgagatggggctgcctcgagcaccaacaaagtaatttgggagcgactaggagctgagccttctacctcgacggtgcactgcagagagccaatcagacgtcgcagagccccgacgacactatgcttgcgcccacgccgagcaggcgtgcggaacttttagcaaaaggcggcaagcgggacttctggtcccaacatttcctcctttggcctgtggcttattccccgccagtgatctgtttcccccaataaagtctcaaatctttggg

SEQ ID NO: 10297 - DNA, 675 bp, Homo sapiens; identical to SEQ ID NO: 5062

SEQ ID NO: 10298 - DNA, 600 bp, Homo sapiens
acctggaagtcggtggcctcttaaaggacagcgagctactgaccttcagcctctcccggcatcgctcctggtggcgtgagcgctggccaggctgtctgcatgaggaggtgccagcagtgggcctcggggccccccatggccaggccctggtgtcaggtgctggctgtgccctggagcccagctatgtggaggccctacacagttgcctgcagatcctgatcgcgcttctgggctttgtctgtggctgccaggtggtcagcgtgtttacggaggaagaggacagctttgatttcattggtggatttgatccatttcctctctaccatgtcaatgaaaagccatccagtctcttgtccaagcaggtgtacttgcctgcgtaagtgaggaaacagctgatcctgctcctgtggcctccagcctcagcgaccgaccagtgacaatgacaggagctcccaggccttgggacgcgcccccacccagcaccccccaggcggccggcagcacctgccctgggttctaagtactggacaccagccagggcggcagggcagtgccacggctggctgcagcgtcaagagagtttgtaatttcctttctctt

SEQ ID NO: 10299 - DNA, 1400 bp, Homo sapiens
atctgctgtccccagatcttattgatggtgtgctcaccagactggtcctcgtcaacgcagtgtatttcaagggtctgtggaaatcacggttccaacccgagaacacaaagaaacgcactttcgtggcagccgacgggaaatcctatcaagtgccaatgctggcccagctctccgtgttccggtgtgggtcgacaagtgcccccaatgatttatggtacaacttcattgaactgccctaccacggggaaagcatcagcatgctgattgcactgccgactgagagctccactccgctgtctgccatcatcccacacatcagcaccaagaccatagacagctggatgagcatcatggtgcccaagagggtgcaggtgatcctgcccaagttcacagctgtagcacaaacagatttgaaggagccgctgaaagttcttggcattactgacatgtttgattcatcaaaggcaaattttgcaaaaataacaaggtcagaaaacctccatgtttctcatatcttgcaaaaagcaaaaattgaagtcagtgaagatggaaccaaagcttcagcagcaacaactgcaattctcattgcaagatcatcgcctccctggtttatagtagacagaccttttctgtttttcatccgacataatcctacaggtgctgtgttattcatggggcagataaacaaaccctgaagagtatacaaaagaaaccatgcaaagcaacgactactttgctacgaagaaagactcctttcctgcatctttcatagttctgttaaatatttttgtacatcgcttctttttcaaaactagttcttaggaacagactcgatgcaagtgtttctgttctgggaggtattggagggaaaaaacaagcaggatggctggaacactgtactgaggaatgaatagaaaggcttccagatgtctaaaagattctttaaactactgaactgttacctaggttaacaaccctgttgagtatttgctgtttgtccagttcaggaatttttgttttgttttgtctatatgtgcggcttttcagaagaaatttaatcagtgtgacagaaaaaaaaatgttttatggtagcttttactttttatgaaaaaaaaattatttgccttttaaattcttttcccccatccccctccaaagtcttgatagcaagcgttattttggtggtagaaacggtgaaatctctagcctctttgtgtttttgttgttgttgttgttgttgttttatataatgcatgtattcactaaaataaaatttaaaaaactcctgtcttgctagacaaggttgctgttgtgcagtgtgcctgtcactactggtctgtactccttggatttgcatttttgtattttgtacaaagtaaaaataaactgttatgagtagt

SEQ ID NO: 10300 - DNA, 600 bp, Homo sapiens; identical to SEQ ID NO: 5065

SEQ ID NO: 10301 - DNA, 600 bp, Homo sapiens
tggaagccggaacaaattcgtagcaaggtagcagagcaggcaccaggacggatggagcccttcagggctggaaccaggacgcggtgtacatctgttcatgcatttttccagttgcgagtcccacaggtgagcaaggtgcccaggggacaattcatctccattatgcctcaggccttgggcttcaaaatcctgggccagcttccttggtatagagcaaggtccatggataaagtcatgaagtctatgaacttaccagatgtaacagaagcggttcttctgttctcgtggaagatgaagttgtcctttgttttgatgagtcctgaaggacttaaagcatctgctgaagtgagtgacacacccagctttgagttaataaagtgtggtagtgcctatgaatgcagcaaactggtgcagacaaggacagcagtcacaggaggaacaggacctagaaagaagaggggcagctttgttggaatttattgctggttctggcccccttttgtaaaagagacgaggcaactgtttttccatctgggctctctgggctctctgggcctcctgggatccgaggatataggaccaagattacagaatgaataa

SEQ ID NO: 10302 - DNA, 600 bp, Homo sapiens
cagcttgtgcccctgagatgagacgcctcatagcacaaattgtagcaagcgatccagacttctatagtgaggcaatactgggaaaaacaaatcaagagtactgtgactggatcaaaagggatgacacttggggaggagcaatagagatatcgattttgtccaagttttaccaatgtgaaatatgtgtagtggatacacagacagtaagaattgatcgttttggggaagatgcaggatataccaaaagggttctgcttatttatgatggcatccactatgatccacttcagcgtaacttccctgatccagatacacctcctctgaccattttctcctctaatgatgatattgttcttgtacaagcactggaattagcagatgaagctagaagaaggagacagtttactgatgtcaaccgcttcaccctgagatgcatggtatgtcagaaaggattaactggacaagcagaagcaagggaacatgccaaggagacaggccataccaactttggagaagtgtgacctatgcatgaatgagggttgaagcctactacctcacacatccagaaggctctgggttttccaataagctatggtaacc

SEQ ID NO: 10303 - DNA, 600 bp, Homo sapiens
atgctgaagccatgcagatgcagagcaaagcgggcagctgctggctgtgaggagactgtggaaggtgtgaggaggatccatggtgaagaaggaataatttttggaacaaatggacctgttgaccagaaaaaggtaacaagttttttcagaggggattgttgtagaagtctaactggaaaacccaagcttttcattattcaggcctgccatggtacagaactggattctggcattgagactgacagtggtattgatgatgacatggctgttcttcttagggccatagatgtttgcccacaaaaactgagtcaacatgattccttgttcatatccactctggttctttccagaaaccttaaagaagcctcttcctcatgttaccttatattggctaagacaggccagtttgtgaatcaatctgtcaaggaaggatggaattactatgaccaacttatattgatcatctgcagtgaagtagatgttaccatcatgcttttacccttggaccgaattcttctaaatggatttaagcctttgagaacaaaagccagagaacttattcctactccccacttcaccgtcccatgcactttgccctaa

SEQ ID NO: 10304 - DNA, 600 bp, Homo sapiens
tgtggctcttgttgggcttttagtgcaactggtgctctggaagggcagatgttctggaaaacaggcaaacttatctcactgaatgagcagaatctggtagactgctctgggcctcaaggcaatgagggctgcaatggtgacttcatggataatcccttccggtatgttcaggagaacggaggcctggactctgaggcatcctatccatatgaaggaaaggttaaaacctgtaggtacaatcccaagtattctgctgctaatgacactggttttgtggacatcccttcacgggagaaggacctggcgaaggcagtggcaactgtggggcccatctctgttgctgttggtgcaagccatgtcttcttccagttctataaaaaaggaatttattttgagccacgctgtgaccctgaaggcctggatcatgctatgctggtggttggctacagctatgaaggagcagactcagataacaataaatattggctggtgaagaacagctggggtaaaaactggggcatggatggctacataaagatggccaaagaccggaggaacaactgtggaattgccacagcagccagctaccccactgtgtga

SEQ ID NO: 10305 - DNA, 600 bp, Homo sapiens
tgtggctcttgttgggcttttagtgcaactggtgctctggaagggcagatgttctggaaaacaggcaaacttatctcactgaatgagcagaatctggtagactgctctgggcctcaaggcaatgagggctgcaatggtggcttcatggataatcccttccggtatgttcaggagaacggaggcctggactctgaggcatcctatccatatgaaggaaaggttaaaacctgtaggtacaatcccaagtattctgctgctaatgacactggctttgtggacatcccttcacgggagaaggacttggcgaaggcagtggcaactgtggggcccatctctgttgctgttggtgcaagccatgtctccttccagttctataaaaaaggaatttattttgagccacgctgtgaccctgaaggcctggatcatgctatgctggtagttggctacagctatgaaggagcagactcagataacaataaatattggctggtgaagaacagctggggtaaaaactggggcatggatggctacataaagatggccaaagaccggaggaacagctgtggaattgccacagcagccagctaccccactgtgtga

SEQ ID NO: 10306 - DNA, 600 bp, Homo sapiens
ttccctgaggtggctaaggagagagaacatccccagggggttgtgatagctttaaggaatgaggcaaaggacacagtagccaatggggtgagctatgagccacctggatggtcttcccccatgagctggacccaagagtcctgtgcactggtagctgggccatcttcaagggactcatcatatggctgctacaatgagaagcacaggaacgctccaggcccttgccatatgatactggacccctcagctggggttagagcccatgatagcagctgcagctttgccttgacttgtgcagacacctgcacagggctgctgcagatgtatcccagcaaaagtgccatccagaaaaccatcataaaagaactagagcagccatgtgtagcctatggcatccccgctgatatcaacagtgaccagggctcgcactttactggacataaagtgcagggatgggtggaggccctggatatccactggcatttccacctgccaaacaactctacagcagcagggctgactgaacagatgaatgagctgttgaagcaacaactctggcaggagatgctgcttaccatcagccacctgcaccctgaatga

SEQ ID NO: 10307 - DNA, 534 bp, Homo sapiens; identical to SEQ ID NO: 5072

SEQ ID NO: 10308 - DNA, 600 bp, Homo sapiens
gatttgcttgactctgttattcggaaaggggcacgggcatgtgaaatttgcatcacatacatttgtgaagaagacaggtacctggcagggacgctgggactctcagcagagtttgatagtctttctaaaataacgggagctgaggttgacatcataggcatgacgatgctgctgcaaaatctggggtacaaggtggacgtgaaaagaaatctcactgcttgggaaatgactacagagctggaggcatttgctcaccgcccagagcacaagacctctgacagcaccttcccggtgttcttgtctcatggtgttcgggaaggcatttgtgggaagaaatactctgaacaagtccgtgatatattacaactcaatgaaatatttaaaatgttgaatagcaagaactgcccaagtttgaaggacaaacccaaggtgatcatcttcgaggcctgctgtggtgattttgaggatgatgctattaagaaagcccacatagagaaggattttattgctttctgctcttccgcatcaggtaacaggtttcttgtacacagaatatctttgtgggtgttatcaatagaaaaactcacaaccacccactag

SEQ ID NO: 10309 - DNA, 600 bp, Homo sapiens
tcatctcataaaccatacttggaagtaaaaattaatggagttatgtttatgggaattattgacacaagagctgatcaaactattatagctaaaaaacactggccttcagattgggcctcctcttctgccttatgttctatcatgggtgttggagagtatcagcagccattaaaaaacataaatataattagtgattcctcttatgcggtgtgtagtattactcatttagatctcgcacatctgaaaggcactactaatgaacccctactaaccctacttctcacagtgcaggagctcctctgtgcccgtcatcaccccctttatatcacacatattcgctctcattctgggctacctggtccctgtcagaagggaatgtttgagttgatgctctggtacaaccacagatgtggttttcagactctcttgcttttttgtgagctcaagctgatcattcctttttttcatcagaacgcccgcagtcttacacaacagtttcatttaacgcttgctcaagctcgcatgattattaaaacttgtcctgattgccaagggcattctctctcccctttttcattggaacttggtgccaacccatga

SEQ ID NO: 10310 - DNA, 600 bp, Homo sapiens
aatactggaggattggaaaccaaattcaggaaattaaggaatctggaatctgtggagcttcctctcacctattctgaatactatgaagaaatgggtatgaagcctcctcaagggggtcgttctctatggtccactgggcacaggggagatgtgaaagctatcatggccacaaaccaaatagaaactttggatccagcatttatcagaccaggctgcattgacaggaagatcgaggtcctcctgcctgatgaaaagaatgagaagcacatcattcagattcacactagcaggatgagggtggccgatgatgtaaccctgcatgacttgatcatggctaaagatgacctctctggtgatgacatcaaagcaatctgtacaaaagctggtctgaagtccttaagagaacttagaataaaagtaacaaatgaagacttcaaaaaatcgaaagaaaatgttctttataagaaacaggaaggggatctatttctagtgaaccacagctgccatcaggaaaatagttgggagatttcccgtcccctgagagggatgagtttgagggagtttcccaggggaatccctgttcccattgatttttcttag

SEQ ID NO: 10311 - DNA, 600 bp, Homo sapiens
gaagctgctgcagccaccagcattcagctcacccctgggcctcgcccagaccttgacttcccacccactctgggcactgagttcagtcggcccttcctgacgagaaaacagcaaggaaggctcaactcgggcttgcccggggggctcttccccttcggcgtggaagtttcaatgcgaggaagcaaagagcctaaaatacgaacacccaggaaattaagcaggggaaggggcccttctgagacagtaaagaaacatacatccgaagacggtggaaagtgttcagttgttggcttcagcaaatataaagcagaaagagccacgaggggtggacccagcctgggcgcggctggccggggcctccgcgctggatccagggaagcgccgtccccgcacccgccacgaggcggcgccagagcagcgtccacagcccgggcctctcggcaggcttggggctgcgagaggggccgcggagacaaaccaggcctccaaccaggcttcctgcaaagaccagggaagcggcagagcttctcctcggggagcggtgaaccgagggccgacgcagacacctccatgtgtgggacactgattagacaatcatag

SEQ ID NO: 10312 - DNA, 387 bp, Homo sapiens; identical to SEQ ID NO: 5077

SEQ ID NO: 10313 - DNA, 600 bp, Homo sapiens
ctgagggtctacagctaccactgggcctcctgggcgcacatctgtgggggctccctcatccacccccagtgggtgctgactgctgcccactgcattttctggaaggacaccgacccgtccatctaccggatccacgctggggacgtgtatctctacgggggccgggggctgctgaacgtcagccggatcatcgtccaccccaactatgtcactgcggggctgggtgcggatgtggccctgctccagctgccggggtcacctctctccccagagtcgctgccgccgccctaccgcctgcagcaggcgagtgtgcaggtgctggagaacgccgtctgtgagcagccctaccgcaacgcctcagggcacactggcgaccggcagctcatcctggatgacatgctgtgtgccggcagcgagggccgagactcctgctacggtgactccggcggccctctggtctgcaggctgcgggggtcctggcgcctggtgggggtggtcagctggggctacggctgtaccctgcgggactttcccggcgtctacacccacgtccagatctacgtgctctggatcctgcagcaagtcggggagttgccctga

SEQ ID NO: 10314 - DNA, 600 bp, Homo sapiens
tacagtgatcggcccagcattggcgtctacacacgcccagagaccagctggcagggtgccaaccatgcagacgcccagagaccagctggcagggtgccaaccatgcagaggcccagagacatgggccagggccaggagtgggtctgcaggcccttcacccacgtcacctgctacccgacggccatccccaggcccttcacccatgtcacctgctacctgatggctgtccccagcaccctcacccacgtcacctgctacccgacggccgtccccaggcccttcacccatgtcacctgctacctgatggctgtccccagcaccctcacccacatcacctgctacatgatggccgtccccaggccctttacccacatcacctgctacccaatggctgtccccagcacccttacccacgtcacctgccacccgacggccatccccaggcccttcacccacatcacctgctacacgatggccatccccaggccttcaaccacgccacctgctacacgacggccatccccagcaccctcacccacgtcacctgctacacgatggccgtccccaggcccatcacccatgtcacctgctacacgatag

SEQ ID NO: 10315 - DNA, 600 bp, Homo sapiens
tgcatgagcgggccgctggccgcgtgcagcctgcccgccctgcaggggccctgcaaagcctacgcgcctcgctgggcttacaacagccagacgggccagtgccagtcctttgtctatggtggctgcgagggcaatggcaacaactttgagagccgtgaggcctgtgaggagtcgtgccccttccccagggggaaccagcgctgtcgggcctgcaagcctcggcagaagctcgttaccagcttctgtcgcagcgactttgtcatcctgggccgagtctctgagctgaccgaggagcctgactcgggccgcgccctggtgactgtggatgaggtcctaaaggatgagaaaatgggcctcaagttcctgggccaggagccattggaggtcactctgcttcacgtggactgggcatgcccctgccccaacgtgaccgtgagcgagatgccgctcatcatcatgggggaggtggacggcggcatggccatgctgcgccccgatagctttgtgggcgcatcgagtgcccgccgggtcaggaagcttcgtgaggtcatgcacaagaagacctgtgacgtcctcaaggagtttcttggcttgcactga

SEQ ID NO: 10316 - DNA, 339 bp, Homo sapiens; identical to SEQ ID NO: 5081

SEQ ID NO: 10317 - DNA, 600 bp, Homo sapiens
ggcaaaatttttaagtggtcttcgaaccttactatacatcagagaattcatagtggagagaaaccctacaaatgtgaagaatgtggcaaagcctttaagcaatcttcaaaactgaatgaacatatgagagctcatactggagagaaattctacaaatgtgaagaatgtggcaaagcttttaagcacccttcaggccttactctacataagagaattcatactggagagaacccttacaaattcgaagaatgtgataaagccttttattgggttttaagctttactaaacatatgataattcataggggagagaaaccctacaaatatcaagaatgtggcaaagcttttaagtggtcttcaaaccttactatacacaagagaattcatacgggagagaaaccctgcaaatgtgaagaatgtggcaaagcttgtaagcagtctttggggcttactattcaaaagagaattcatactgaagagaaaccctacaaatgtgaagaatgtggtaaagccttttactggtccttaagctttactaaacatgatagttcatactggagagaagcactacagttgtcaagaatgcatcaaagcttttaa

SEQ ID NO: 10318 - DNA, 600 bp, Homo sapiens
cgcgtcgagttcgccggcgacgtccatgaccgctacgagagccgccacggcgtccggctgcacgtgacaggcgaggcggcagtgactgtccccagtggctctcagacgaagaggcgagaaagacaagtgaatggcaatcctaaatatgccaagaggtgcaatgtggtgtgtgctaccagcccggaaagacactcgcagcccctctacccaggggtgcacagacagcccaccaacttggcagccgtgcggagcccgcgtgagggtcacggccacctagtgaccgccgaactgcccgcactgacccatgacggccgctacacgtgtacggccgccaacagcctgggccgctccgaggccagcgtctacctgttccgcttccatggcgccagcggggcctcgacggtcgccctcctgctcggcgctctcggcttcaaggcgctgctgctgctcggggtcctggccgcccgcgctgcccgccgccgcccagagcatctggacaccccggacaccccaccacggtcccaggcccaggagtccaattatgaaaatttgagccagatgaacccccggagcccaccagccaccatgtgctcaccgtga

SEQ ID NO: 10319 - DNA, 600 bp, Homo sapiens
ctcatcagtgaccgctggctgctcacagctgcccactgccgcaagccgtatctgtgggtccgccttggagagcaccacctctggaaatgggagggtccggagcagctgttccgggttacggacttcttcccccaccctggcttcaacaaggacctcagcgccaatgaccacaatgatgacatcatgctgatccgcctgcccaggcaggcacgtctgagtcctgctgtgcagcccctcaacctcagccagacctgtgtctccccaggcatgcagtgtctcatctcaggctggggggccgtgtccagccccaaggcgctgtttccagtcacactgcagtgtgccaacatcagcatcctggagaacaaactctgtcactgggcataccctggacacatctcggacagcatgctctgtgcgggcctgtgggaggggggccgaggttcctgccagggtgactctgggggccccctggtttgcaatggaaccttggcaggcgtggtgtctgggggtgctgagccctgctccagaccccggcgccccgcagtctacaccagcgtatgccactaccttgactggatccaagaaatcatggagaactga

SEQ ID NO: 10320 - DNA, 600 bp, Homo sapiens
ccaccacctgagaccatcgatttctcagaaacgcccgcctgggctccaggcgttgctggccacagccaggctccccctttccggccgttggctgagggtgggagccacggcccgaagacctctgcggggagacgccagcctgcgtctgccatggggctcgggttgaggggctggggacgtcctctgctgactgtggccaccgccctgatgctgcccgtgaagccccccgccccgtcatccgttcctcccgcctcgtccctgactcaggccgtccctccagcaggctcctggggggcccagatcatcgggggccacgaggtgaccccccactccaggccctacatggcatccgtgcgcttcgggggccaacatcactgcggaggcttcctgctgcgagcccgctgggtggtctcggccgcccactgcttcagccacagagacctccgcactggcctggtggtgctgggcgcccacgtcctgagtactgcggagcccacccagcaggtgtttggcatcgatgctctcaccacacaccccgactaccaccccatgacccacgccaacgacatctgcctgctgcggccccgggggtggatctga

SEQ ID NO: 10321 - DNA, 447 bp, Homo sapiens; identical to SEQ ID NO: 5086

SEQ ID NO: 10322 - DNA, 459 bp, Homo sapiens; identical to SEQ ID NO: 5087

SEQ ID NO: 10323 - DNA, 600 bp, Homo sapiens
tcccagggcgcctgtgcgcgcctggcgcaccagcagtgcctgcagcgccggcggcgatgcgagctgcgctcgctggcgcacacgctgctgggcctgctgcggaacgcgcaggagctgctcgggcctcgtccgggactgcggcgcctggcccccgccctggctctccccgctccagcgctcagggagtctcctctgcaccccgcccgggagctgcggcttcactcaggctgccctgggctggagcccctgcgacagaagttggctgccctgcagggggcccatgcctggatcctgcaggtcccctcggagcacctggccatgaactttcatgaggtcctggcagatctgggctccaagacactgaccgggcttttcagagcctgggtgcgggcaggcttggggggccggcatgtggccttcagcggcctggtgggcctggagccggccacactggctcgcagcctcccccggctgctggtgcaggccctgcaggccttccgcgtggctgccctggcagaaggggagcccgagggaccctggatggatgtagggcaggggcccgggctggagaggaaggggcaccacccactcaaccctcag

SEQ ID NO: 10324 - DNA, 600 bp, Homo sapiens
tgccagactggttggcacgtttacaatgactcttgtgtctcccctggatggattgtgaaatccagtcctgataaagagcatagtgaagactggcagagacctagggagaaagaaagaagtcacgccaatggctcagcagtcacaatgtggtcaaagaatggccccaggaacttgtctgctttagaaatgctgcctgatggaccagcaccaaggacgtttcttcagaagaaaagctgtctctttcccctgttctcttacattcttttgcataaggcaggtaaactcttccagcctgatgctcatggatttctagtgaagggcaaagatttcaatcatgtggagaaagaaaagattgtcaaaaatgtggaggaaaaagattataatcccagctttgttcaaaggaaaccctggctggctctgcccactcactggactcaagagccctcagcagtccatggagatgccagttacaaccttaacagcatgaggaggaagagaaaaaccccactatccacggatagtgagggagtggctgctggagactttgggaccacccagcctgggaaacctgggaatctgccctctcctgaccagacctag

SEQ ID NO: 10325 - DNA, 600 bp, Homo sapiens
aaggaacttcaattcactaaggccaatctagctgctgctatttccagatgtcatgtctgccagccacagaaaccgatgctgagcccggatgtggtacaatttcagtccaaccagccacctgggggcaagcacaggggattcgtcttgactgaaatcgacgtatattctaggtatgagtttgcctttgtttgcaaggcctcggtcaactatctgaagacttggacatgtatatgtctgggcaaggccatttcaagccaagggaagagcataaggaacatgctctttgctgagacagagttcggcaaaagcaaggaattcagtttgacagaatacagtttaagtaaagtaacagtggatgagcgaacaagaaactgctgggatcaagcttttctggccatccaagtagtgaatgaacttgcagcaaaccttggaaaaccttatgcaatcctgtgtcaagaatctcgtgacaaaggcccaatcttgtcattgtgcagcccaactgctcgtggaatgccggggccagagcagatgcccaataggcatttgccagccgacgaaaaccagataattactgagtttgaagaactgctcactgactga

SEQ ID NO: 10326 - DNA, 600 bp, Homo sapiens
ataaaaatcagagatatgaattcaactcctcacatgagaaggacagctaacccttcagatatttcagtcaagtccgggattcttctatctgctgtctgcaacatcatgaagcctgaatgggctcacttttctctatggctcctcatcttgtccatgcttctccacacaccttcagggaacatatttcctccacaactcagaaaacagttacgtgaaagtggacatcttggagaatactgcaactatcctctgaagaagggcacctgtaattcatatttgaccagattctactacaacactttgacatttttatgtgagccctttgtcttcagtggctgtggaggcaacagaaacaactttaaacagaaatatttctgtgaaaaaatgtgtattactgaaaaagtgctgtcaattccctaccatggagccctagctttgcataaatcatacgagccccaatttccttccagttcactgtcatttgcccaagtcagccagtatctttctgttgatggtaaccaagaacccttacgcccaaccatccaattagaggagggctccattccagggcagggcaggcttacccagctgctaggctaa

SEQ ID NO: 10327 - DNA, 600 bp, Homo sapiens
ggagagaagcttctggtggagaaggacattactctagaggacttcatcaccatcaaggttctgggcccagccatggtgggagtggcagttacagtggaagtgacagtagtcaaccccctcatagagagagtgaaggactgtgcgctgatggtggagggcagcggccttctccaggaacagctcagcatcgacgtgcctaccctggagcctcaggagagggcctcagtccagtttgacatcaccccctccaaaagtggcccaaggcagctgcaggtggaccttccccagtggaaagcagaagccgccccaacagccaatgagaaagccctgcttgtgagtgggagaggtagagaaattgacagaagacagcttagaagtccaagggagagtgtgagtgggaatgtggttttggaaattacaaagaaaaatgtgcaggctgaggaagacagatctttctgcagcctgccctcagtacagcccacagtgggtgccttgactcagatggtgcatatgctccctcctggaacttggatcttaagagatcagaatggagagaagcttcagaaggcactaaaggtggtggtggtggtagtgccctag

SEQ ID NO: 10328 - DNA, 600 bp, Homo sapiens
gctgcattcctgcaggcagaggaaacggcaggggaggtggaggcctctggcttagttgctcagaccctacctgccttggttcagcagcgggtcaatgctgtcaggaaacttcaggcagcatatgcacaagtagaagctcaagtctataaagggccaggaacaatcagcagcacagggtgtgagatctgttggaaagaggggaaaaatattatggtgaaaaatatcaagaagcaaaaatgtgagggtcctggaagtgttgtacttaccagtaggaacattctcagctattctttttcccctacatatttctattccccaggttctgctgagcatagagtatgggatacggctactgaggataaactggaataccttttccaagaacgtctcccaatatctgaattattcttctctaaagaagcggctgaatataagtatgaaaattctgatgaggaggctcaagaagctggaggcaagaaggagagagaagaggatgaaaatgaagaactggaagaaggacttgaaaaggatctggactcagcagagcacagccccttcaaaaaatccaggtattcatgtatagtcttgagtattagctaa

SEQ ID NO: 10329 - DNA, 600 bp, Homo sapiens
aaggacttcaccatcacccgtgggaaggcgcacgcagaggatccccaggagcacatccacacccaatgggtggatgatgacaagaacgttagcaagggcgtcgtaagtcctatagatgggaagtccatggagactataacaaatgtgaagatattctatggatcagaatgtaaagcaaatggaaaagtcatcagatggacagaggtgtttttcccagaaaatcctgaccagcacaattgcctcagtgatcctgcagatcacagtagattgactgagcatgttaccaaggctttttgtcttgctctctgtcctcacctgaagcttctgaaggaagatggaatgaccaaactgggactacgtgtgacacttgattcagatcaggtcggctatcaagcagggagaaatggccagccccttccctcgcagtgcatgaatgatctggacagcgccttggtgccggtgatccatggaggggcctgtcagctcatgcaggaaagtacattagaagaatgtaggaatgagtgttgggcactgggcatcaatcagccttgtctacccccacacttctggcttgttaacagattgtttcatgtgttttag

SEQ ID NO: 10330 - DNA, 600 bp, Homo sapiens
cgctcctccaaagcccacagaaagagagaaagaatggagtccgaggagagggagcgccaggagagcatcttccaggctgagatgtcggagcacctggccggcttcaagcgcgaggaggaggagaagctcgccgccatcctgggagccaggggtctggagatgaaagcgatcccggccgacggccactgcatgtaccgcgccatccaagaccagctggtgttcagcgtgtctgtggagatgctgcgctgccgcaccgccagctacatgaagaagcacgtcgacgagttcctgcccttcttcagcaaccccgagaccagcgactccttcggctacgacgacttcatgatctactgcgacaacatcgtgcgcaccacggcatggggaggccagctggagctgagggccctgtcgcacgtcctgaagacccccatcgaggtgatccaggccgactcgcccaccttgatcatcggggaggagtacgtcaagaagccgatcatcctggtctacctgcgctatgcctacagcctcggcgagcactacaactccgtgacaccgctcgaggccggcgccgccgggggcgtgctcccgcgtctcctgtag

SEQ ID NO: 10331 - DNA, 600 bp, Homo sapiens
accacgtggttcctggagcctcggatcggctacttcagacacagacgtctcagagtcgtcagtgcagatttggacttcccctggggaagtaaacttgggtcacctgatctgctgttagtctcagtcagcaaatggccactgactgctctagtattagagggacagcacttctccctgaccgcaccaacagaaagcattcagggtttgcttgacgatttcatgacggaaatatattgggatggaagaatgttccctgcaagcttgttttggaacttcagagctcaggcaggctccagtgacaatcgtgtgattagggagcccagactgatggcagacccagggcccactactctcctccaaattcgcgaggctcccattgtcatggctcacaggaatccaagaagagcaccagggacaggaggcagacatcctgacattgtgacaaggatgggtgcatgggcattcttgctagaccttctactctcctggaactgccaggcccctggtgttgcatattcccctggttctcagggccctttgcgatgcatcttccccatccctcatgaccctcatggcctacctgctaggcccacggtctag

SEQ ID NO: 10332 - DNA, 330 bp, Homo sapiens; identical to SEQ ID NO: 5097

SEQ ID NO: 10333 - DNA, 600 bp, Homo sapiens
agacgcgggctctttgacctaaatcagattgcaaaccacctccagatgtcagccctgatctctgaccaagatgaagacatgctgagctacatgatcaacttggaggtgatgccgggaagactgaggctagagggtttagcgggggaggaatacagggcttcccattccactccaattcagcggtatccgaattatgaagtggaggcctatcgccacagacaccacaacaggagacttaacttcttcaactggttttctgaccacgactttgcaggatctaataggattgctgaggtggatcctcactgggaaacatcaggaatgactctgtctttgcatggaaaagcaataaaagtagaacaagccaagaaaccatcttttcaaagtggtggtaggcggagaccaccaacttcttcgagaaacagaagcccttcaggaagtctgagatctgcaagaggaagcagtggaggaacaagagggtggcttccctcacatgaagggcacctgagtaatgttttaaaatataaagatggaaccataggactgaaagaaaataagtttgacgatatcgaaatttctcaaattttatttcgtgtatga

SEQ ID NO: 10334 - DNA, 600 bp, Homo sapiens
ctccacgatgtccagactcccatttggctcttatcactcttgggctatctgaggaacctgaatagttcagaatgctggctctctaggccacatattgttacaccagctgtcctgcttagacacccctgggccccagggggaccgcaacctcacccaggcactggaccactcccacagattcaggctcagcagcctaacctgcaaatccatcatgtagctcagcaggacttcatcatttgtgaccctggtccatatctgggcccaagtcttgagcaccatgtgtttctggggccgccctctcccgcagagcctccagacttaacacggtgccctcctagggctcccacagaccaagggctcacagtctgcgtgtgcctgaacccaccaccaccttgcacaagcatcttctcagaggaggactaccgcgggaggatggagctgcaggccacccaggggaggggctcctcaggagacgcctaccgctcttgcaataattggcagatgcccactgccttcccaatgattggctggaggccagctgcagcggtctttcctgcagttggccctgtggtgtcccgaagccggatgcatacgacctga

SEQ ID NO: 10335 - DNA, 600 bp, Homo sapiens
caccctgaggcaccactgagagttgtgaaggtgtctaccattctactgcatgacagattctggttggtgactgaggcagcaagaaatattctggaattgctactcctccacgatgtccagactcccatttggctcttatcactcttgggctatctgaggaacctgaatagttcagaatgctggctctctaggccacatattgttacaccagctgtcctgcttagacacccctgggccccagggggaccgcaacctcacccaggcactggaccactcccacagattcaggctcagcagcctaacctgcaaatccatcatgtagctcagcaggacttcatcatttgtgaccctggtccatatctgggcccaagtcttgagcaccatgtgtttctgggctgcgaagacatggctctggcccggaaaccggggatgccctgtggcttgaggcatttacaaagcccagctgcaaatgatggacctccagcgagtccgttgcgggccggggcatactggggccagggcccggctctgcccagtggtcctcctgctgctgctccacgtcggcctcttccttggccaccacttccacttctgtcgtga

SEQ ID NO: 10336 - DNA, 600 bp, Homo sapiens
ctgtaccaactagagtggagaagaagaaaacaaagggaccagatgctgccagcaaactgccactgccacaaggtgcatgcagtgataggggtgctgatggatgacacggatcccctattcacagtgatgaaggaaattaaggaatctgtgaagcctcctctcacccaacatgaatattatgaagagacgggtgtaaagcctcctacggggtggggggtcattctctatggtccacctggcacagttgctgaagaacacgcaccatccactgtgtttattgatgatattaatgtcactgggacaaaaagatatgactcaaattctggtggtgagatagcaattcagcgaacaatgttggaactgtggaaccagttggatggatttgattctaggggagatgtgaaaatgcatacaagcatgatgacactggccgatgatgtaaacctggacgacttgataatgactaaagatgacctctttggtgctgacatcaaggcaatctgcacagaagcttgcctgatggccttaagagagccacagaatgaagaaaatgttctttgcaaaaaacaggaaggcactcccaaggggctctatctctag

SEQ ID NO: 10337 - DNA, 600 bp, Homo sapiens
aagattactgatacaaacacttgtaatgctaaagaagcctatcgtagtatggtacaggatagagtgctatgtgctgggtacatggaaggaaatatagacgcctgccagggagactctggaggaccactagttcatcctaattctctaaatatttggtatatttggtaccttgttggagtagtgagctggggaaggaatgaatgtggtgcaatcaatagtccaggggtctacacgtctgacagagggatgtggccggtgggcctcttgaaggcccctgggggccgcaggctccttgctgcgctggaggaagaggcctgcccagcgcgggttgggcccctccagcctgctgagtctgagggctccgcgctggttttgcgtcttccacagactctgggcgccctgtcgcttctcctgggccagctctcagaagtggcccatgccctccagggtcacgtcgtcgcggtagaaatggaggatgagagagaggtaggtaagggaagcccgcagctgccggtggaccaggctgctgacggcggcttccacttcggtgcagtaattctggctgatgtgggaactcatggttctttggaaaggagctaa

SEQ ID NO: 10338 - DNA, 600 bp, Homo sapiens
aggtggctattatctgcagctcactgctttgctaagaaaaataattcaaaagattggactgtcaactttggaattgtagtaaataaaccatatatgacacggaaagtccaaaacattatttttcatgaaaattatagcagtcctgggcttcatgatgatattgcccttgtgcagcttgctgaagaagtttcttttacagagtacattcgtaagatttgtcttcctgaagccaaaatgaagctctcagaaaatgacaatgttgtagttacaggttggggaacactttatatgaatggttcatttccagtgatacttcaagaagactttttgaagattattgacaacaaaatttgcaatgcctcatatgcatactctggctttgtgactgatacaatgttatgtgctggatttatgtcaggagaagctgatgcatgtcagaatgattctggtggaccactagcttaccctgattccagaaatatctggcatcttgttggaatagtaagctggggtgatggatgtggtaaaaagaataagccaggtgtctatactcgagtgacttcttatcgcaattggattacatccaagactggactctga

SEQ ID NO: 10339 - DNA, 600 bp, Homo sapiens
caaatcaagaaaaaaattgaaaaggctttatatcaaagtttgaagaccaaacaattgtctttgaccataaacaaaccatcatttagactcacacgctgtggaataaggatgacatcttcaaacatgccattaccagcatcctcttctactcaaagaattgtccaaggaagggaaacagctatggaaggggaatggccatggcaggccagcctccagctcatagggtcaggccatcagtgtggagccagcctcatcagtaacacatggctgctcacagcagctcactgcttttggaaaaataaagacccaactcaatggattgctacttttggtgcaactataacaccacccgcagtgaaacgaaatgtgaggaaaattattcttcatgagaattaccatagagaaacaaatgaaaatgacattgctttggttcagctctctactggagttgagttttcaaatatagtccagagagtttgcctcccagactcatctataaagttgccacctaaaacaagtgtgttcgtcacaggatttggatccattgtagatgatggtgagcagtttcaacctaattttcttagcacaagaatgtcttga

SEQ ID NO: 10340 - DNA, 600 bp, Homo sapiens
caagcagaacacattctgaacagctgttgtggtttagggaaggagtttccatccaccaaaagaattgctgatggtcggattgcaagaaaagctagcctgcaggtggaggggatccatttgtgtggtgcatctttgatcagtgaagagtggctcctgacagcgggtcactgttttgacttaaagggggagtcaattattattcatgagaactatgctgcccataaacacgaggatgatatcgctgtagtgaagctcttcacccccatcatattttccaatgaggtgcacagagtctgtcttccagaagctacttttgaagccttgcctaagagtaaagtgtttgtcactggatggggagcacttaaattagatggtccctttcccaatatgctacgggaagttgaggtagagatcataagtaatgatatatgtaatcaagttcatgtgtatgtatcatcaggaatgatatgtgctggattcttgtcaggaaaactagatgcctgtaagggtgattctggaggtcctctggttattgcacgtgatagaaatgcctggtaccttgttggaatagtaagctggggaatagactgtggaaaataa

SEQ ID NO: 10341 - DNA, 600 bp, Homo sapiens
acatggcttgtcactgcagcacactgcttccagaagtataaaaatccacatcaatggactgttagttttggaacaaaaatcaaccctcccttaatgaaaagaaatgtcagaagatttattatccatgagaagtaccgctctgcagcaagagagtacgacattgctgttgtgcaggtctcttccagagtcaccttttcggatgacatacgccagatttgtttgccagaagcctctgcatccttccaaccaaatttgactgtccacatcacaggatttggagcactttactatggtggggaatcccaaaatgatctccgagaagccagagtgaaaatcataagtgatgatgtctgcaagcaaccacaggtgtatggcaatgatataaaacctggaatgttctgtgccggatatatggaaggaatttatgatgcctgcaggggtgattctgggggacctttagtcacaagggatctgaaagatacgtggtatctcattggaattgtaagctggggagataactgtggtcaaaaggacaagcctggagtctacacacaagtgacttattaccgaaactggattgcttcaaaaacaggcatctaa

SEQ ID NO: 10342 - DNA, 600 bp, Homo sapiens
acagccactttcttgagagtggttggctctgaacttattcagaagtacctaggtgatgggcccaaactcgtacggcaagtatttcaagttgctgaagaacatgcaccatccatcatgtttactgatgaaattgaagccattgggacaaaaagatatgactccaattctggtggtgagagagaaattcagcaaacaatgttggaattggaactgttgaaccaattgggtggatttgattctagggaagatgtgaaagttatcatggccacaaaacaagtagaaactttggatccagtacttatcagaccaggccgcattgacaagaagatcgagttccacctgcctgatgaaaagactaagaagcacatctttcagattcacacaagcaggatgacactggccaatgatgtaaccctggacgacttgatcatggctaaagatgacttctctggtgctgacatcaaggcaatctgtacagaagctggtctgatggccttaagagaacatagaatgaaagcaacaaatgaagacttcaaaaaatctatagaaagtgttctttataagaaacacgaaggcatccctgaggggctttatctctag

SEQ ID NO: 10343 - DNA, 600 bp, Homo sapiens
ggcctggactctgaggaatccttttcatatgaagaaaaggaaaaagcctgtaggtacaatcccaagtattctgctactaatgacactgggtacatgcaaatactccctgtggaagagaaggccctaatgaaggctgtggcaactgtggggcgcatctctgctgttgtttatggacttcttgattccttctggtcctataaaaaaagaagacttgatttgattccattcactcctcacaacaaccacgtgaagaaagaatcacgaagcaattgtataattgaaacacaaaaggaaagttacttgtgtgcccttggtcaatattctgggaagcatcaagtgcagtgtcatcttatcgaggaggctctgcagatgctaagtggtggggatgaggatcacgatgaagacaaatggccccatgacatgaggaatcatctggctggagaggcccagagcaacacagaacgttttgactgtcagtgcctagtcactatttacaatcagagccaaaaaggcttctctgaagaggaagaaacttttggaaaacattgcccctgtaggcagacacttcatgtaagagacacagctgcttgccttggttga

SEQ ID NO: 10344 - DNA, 600 bp, Homo sapiens
ggattttttgttatattttggagtaggctttcagttcttggatctaaaacatttgaagcgcccgagggcaccgggctctgcgtgtgcgcgcagcgcggcaccgtctgcggctccgacggtcgctcgtaccccagcgtctgcgcgctgcgcctgcgcgctcggcacacgccccgcgcgcaccccggtcacctgcacaaggcgcgcgacggcccttgcgagttcgctcctgtggtcgtcgttcctccccgaagtgttcacaacgtcaccggggcgcaggtgggcctgtcctgtgaagtgagggctgtgcctaccccagtcatcacgtggagaaaggtcacgaagtcccctgagggcacccaagcactggaggagctgcctggggaccatgtcaatatagctgtccaagtgcgagggggcccttctgaccatgaggccacggcctggattttgatcaaccccctgcgaaaggaggatgagggtgtgtaccagtgccatgcagccaacatggtgggagaggctgagtcccacagcacagtgacggttctagatctgagtaaatacaggagcttccacttcccagctcccgatgaccgcatgtga

SEQ ID NO: 10345 - DNA, 600 bp, Homo sapiens
tcagtgtgcaccatgctcctcaaatcccaggccccgaagaactatcaggttctgttgggaaacatccaactgtatcatcaaacccagcacacccagaagatgtctgtgcaccggatcatcacccatccagactttgagaagctccacccctttgggagtgacattgccatgttgcagctgcacctgcctatgaacttcacttcctacattgtccctgtctgcctcccatcccgggacatgcagctgcccatgcaactgtcaccacccttctatctccaggagggcaagggcgattctggggggcctctagtctgctacctccccagtgcctgggtcctggtggggctggccagctggggcctggactgccggcatcctgcctaccccagcatcttcaccagggtcacctacttcatcaactggattgacaaaatcatgaggctcactcctctttctgaccccgcgctggctcctcacacctgctctccacccaagcctctgagggctgctggcctgcctgggccctgcgcagcccttgtgctgccacagacctggctcctgctgccacttaccctcagggccccatggcagaccctgtga

SEQ ID NO: 10346 - DNA, 600 bp, Homo sapiens
gagggagagaagtttaactgtgaaaaatgccacgagagctgcatggaatgcaagggaccaggggccaagaactgcaccttgtgccctgccaacctggtgctgcacatggacgacagccactgcctccactgctgcaacacctctgatccccccagtgcccaggagtgctgtgactgccaggacaccacggacgaatgcatccttcgaacaagcaaggttaggcctgcaactgagcatttcaagacagctctgttcatcacctcctccatgatgctggtgcttctgctcggggcagctgtggtagtgtggaagaaatctcgtggccgagtccagccagcagcaaaggccggctatgaaaaactggccgaccccaacaagtcttactcctcctataagagcagctatagagagagcaccagctttgaagaggatcaggtgattgagtacagggatcgggactatgatgaggatgatgatgatgacatcgtctacatgggccaggatggcacagtctaccggaaatttaaatatgggctgctggatgacgatgacatagatgagctggaatatgatgacgagagttactcctactaccagtaa

SEQ ID NO: 10347 - DNA, 600 bp, Homo sapiens
atgggagaatgtgagtcctgccaccgagcatgcgaaacctgcacaggccctggtcatgacgagtgcagcagctgccaggaaggactgcagctgctgcgtgggatgtgcgtgcatgccaccaagacccaggaggagggcaaattctggaatgtcacaaaaacaggagctgctcttcatttgatttcgaggcaagaatttgttaaaagggtcacttcggtgcaaaggcaacggcagccgaagagagtgctgtacaggaggagtgtgctaagggctcgagggagtgacagctctgtggtttttgctgggctggagaggaggcacgtccatggctgctgtctactacggcagttttacacatgtgacttcaaggaagagcagctcagagaccgtggaaagcccagcagccaaaggccacggagaacacgggccctatttcagagacagagccgagaagattattcaatccagattgggctatcttctgcatttaagaggcagtgcaagccaaaaggaaaatggtctggtgctgtgtttctagctgaacatctgtattttatctggcgtccagatgatgacacggtccagggagccaagagttag

SEQ ID NO: 10348 - DNA, 600 bp, Homo sapiens
tgccaaggaagtggccctacccactgcacctcctgtggagcagacaactatggccgagagcacttcctgtaccagggagagtgtggagatagctgcccagagggccactatgccactgaggggaacacctgcctgccctgcccagacaactgtgagctttgccacagcgtgcatgtctgcacaagatgcatgaagggctacttcatagcgcccaccaaccacacatgccagaagttagagtgtggacaaggtgaagtccaagacccagactatgaagaatgtgtcccttgtgaagaaggatgtctgggatgcagcttgggcactcttgtcattgctgtcagcctcagtgacaccatcaacgtcttaagtaggctttcttcaatacaaacaggatcactgttcagtgaggatcttatcatggaggtgggaacagtgacaagaaaaccatggtcactaggtgttcgcattggcctcattctccacttagctgacccagctaaagatgagaccaaggggaagtcactggaaatggactccacagcagacactgaccctctggggactcaaaatccaaaagactcaccttgcaaaaaaagatag

SEQ ID NO: 10349 - DNA, 600 bp, Homo sapiens
caaaagagaattcatactgaagagaaaccctacaaatgtgaagaatgtgggtcttcaaatcttactatatataagaaaattcatgctggagagaaaccatacaattgtgaaaaatgtggcaaagcgttttactgttcctcaaaccttattcaaaataacatagttcatgctgaagagaaacactacaaatgtcaagaatgtggcaaagcttttaagaagtctttagaccttaatgtacataagataattcatagtggagagaaaccctacagatatgaagaatgtggcaaaataactcatagtggagaggaatcctacaaatgtgaagaatgtggcaaaggcttttactgttcctcaagccttactaagcatatgatagttcatactgaagagaaactgtacaaatgtgaagaatgtggcaaagcttttaagtggtcctctgagcttactatacatcagagaattcgtactgaagagaaaccctataaatgtgaagaatgtgtcagagtctttaaacactcctcaaaactgaatgaacataagagaaatcatactggagagaaaccctacaaatgtgaagcatgtggcaaagctttttaa

SEQ ID NO: 10350 - DNA, 480 bp, Homo sapiens; identical to SEQ ID NO: 5115

SEQ ID NO: 10351 - DNA, 1364 bp, Homo sapiens; identical to SEQ ID NO: 5116

SEQ ID NO: 10352 - DNA, 600 bp, Homo sapiens
cagttaaaattactgaagttagagagaattaaagactatcttctcatggaggaagaattcattagaaatcaggaacaaatgaaaccattagaagaaaagcaagaagggaaaagatcaaaagtggatgatctgagggggaccccaatgtcagtaggaatcttggaagagatcattgatgacaatcatgccatcgtgtctacatctgtgggctcagaacactacatcagcattctttcatttgcagacaaggatcttctggaacctggctgctcggtcaggctcaaccacaaggtgcataccatgataggggtgctgatggatgacatggatcccctggtcacagtgatgaagattcgggaaattaaggaatctgtggagcttcctctcacccatcctgaatattatgaagagatgggtataaagcctccaagggggtcattctctgtggtccacctggcacaggtaaaaccttgttagccaaagcagtagcaaaccaaacctcagccactttcttgagagtggttggctctgaacttattcagaagtacctaggtgatgggcccaaactcggacgggaattgtttcgagttgctgaagaac

SEQ ID NO: 10353 - DNA, 600 bp, Homo sapiens
attttcttcacctctggttatccctccatctcaggtgtctgaaagtcacggacaattgtcttaccaggctgatcttgaatctgagacccctgggcagcttctgcatgctgattatgaagagtcactgagtggcaagaatatgttcccccagccatcttttggacccaatccattcttaggcccagttcctattgcacctcctttctttcctcatgtttggcatgggtacccttttcagggattcatagaaaatccagtaatgaggcagaatattgtcctgccctctgatgagaaaggagaattggatctgtctctggaaaatctggatctgtctaaagattgtggttcagtttccacagtagatgagtttccagcagccaggagtgaacatgtacattctctccctgaagcaagtgtgagcagtaagccagacgaaggccggacagagcaatcttcccagacacgaaaggcagatatggcattggcttccatccctcctgtagcagagggaaaggctcaccctcccactcagattctaaacagagagagagagaaattgtgcctgttgaacttgaacctaaaaggaccattcaaagtctg

SEQ ID NO: 10354 - DNA, 476 bp, Homo sapiens; identical to SEQ ID NO: 5119

SEQ ID NO: 10355 - DNA, 1400 bp, Homo sapiens
ggtctgtggtttaccagcagagtgcaaaagaatctgccactttgcagccatttttcacgttgcagttggatatccagtctgacaaaatacgcacagtccaggatgcactggagagcttggtggcaagagaatctgtccaaggttataccacaaaaaccgaacaagaagttgagataagtcgaagagtgactctggaaaaactccctcctctcctcgtgctgcacctgaaacgattcgtttatgagaagactggtggtgtcagaagcttatcaaaaatactgaatatcctgtggacttggaaattagtaaagaactgctttctccaggggttaaaaataagaattttaaatgccacagaacctatcggctctttgcagtggtctaccatcacggcaacagtgcgacgggtggacattacactagagacgtcttccagatcggtctgaatggctggctgcgcatcgatgaccagacagtcaaggtgatcaaccagtaccaggtggtgaaaccaactgctgaacgcacagcccatctgctgtattactgccgagtggacctgctgtaaaccctgtgtgcgctgtgtgtgagcccagtgtccgctttgtaggacaccacctcacactcacttcccgcctctctttattggctctttagagagaaactctttctccctttgcaaaaatgggctagaatgaaaaggggatgccttggggttcgtgcacaacatagcttctgttgactctaactttgaaatcaaaatcatttggttgaaacagactgtcgcttgattttaaaaaatacacaaaaacccatatttctgaaataatgctgattcctgagataagaaagtggatttgatccccagtctcattgcttagtagaataaatcctgcaccagcaacacttgtaaatttgtgaaaatgaattttatctttccttaaaaaagaaatgttttaatccatcacatttttcttccctaccctttagtttttgataaatgataaaaatgagccagttatcaaagaagaactagtttttacttcaaaagaaaaataaacataaaaaataagttgccggttcctaacaggaaaaaaattagtaattgtgctgagggaaactgcttacatagacattgcagatcaaatatttggagttaaaatgttagtctacatagatggatgattgtaactttactgccattaaaaagatttcagattgcattcatgcttctgtgtacacataatgaaaaatggacaaataatgaagatctctccttcagtctgctctgtttaattctgctgtctgctcttctctaatgctgcatccctaattgtacacagtttagtgatatctaggagtataaagttgtcacccatcaataaaaatcacaaagctggttt

SEQ ID NO: 10356 - DNA, 600 bp, Homo sapiens
aacacacgggcagatgaaaaggggtgcagagacagacgggggatctggctggtggggaccgggtggaccttggcccccatcctcagcacctgcccccaggcgacaggttcttgccacccacccttgctctcttgctctgggccctgcaggagggcgtgggcagcgtgggggctgtggggggatgagctcactctggccccacagacctgtggctccaaggaatcttcccacggccactcctagggctgccagacatacgctggagccaggagcgttatcaacgcaaggactggtgatgagtagagacggggtttcaccgtgttaaccaggatggtctcgatctcctgacctcgtcatccgcccgccttggcctcccaaagtgctgcgattacaggcctgagccaccgcgcccagccctatggcaatgactcttaaaagttcgaggctcaggcaggccgggagccccaggtcaaacatgcccatccccagccccaaatgcccagaagcaaaaagcccgccgtgccatgtttcatcaaggcaccacatcctccgtggccagatcgtcctccccttcctcctcacaccctgccagctggcccc

SEQ ID NO: 10357 - DNA, 600 bp, Homo sapiens
cctgaccaggagcatatgatttatcctcttggttgcacagtcctcattcaggcaataaatactaaagagcagaacttcctacagggtcatggcaacaacgtctcctgcttggccatctccaggtctggagagtacatcgcctccggacaagtcacattcatggggttcaaggcagacatcattttgtgggattataagaacagagagctgcttgctcggctgtcccttcacaaaggcaaaattgaagctctggccttttctccaaatgatttgtacttggtatcactaggaggcccagatgacggaagtgtggtggtgtggagcatagccaagagagatgccatctgtggcagccctgcagccggcctcaatgttggcaatgccaccaatgtgatcttctccaggtgccgggatgagatgtttatgactgctggaaagtatgtgtctgcgttcggagttttcagaactcataaattgctatattttcttgcacagaaaacatggtcattctgatctgggggaacacgtctttagtcctggataaataccttacatcatagtttttgtgattttgtactcattaaaagttctcttcactgg

SEQ ID NO: 10358 - DNA, 1389 bp, Homo sapiens; identical to SEQ ID NO: 5123

SEQ ID NO: 10359 - DNA, 1360 bp, Homo sapiens; identical to SEQ ID NO: 5124

SEQ ID NO: 10360 - DNA, 443 bp, Homo sapiens; identical to SEQ ID NO: 5125

SEQ ID NO: 10361 - DNA, 600 bp, Homo sapiens
acacaaaaacccatatttctgaaataatgctgattcctgagataagaaagtggatttgatccccagtctcattgcttagtagaataaatcctgcaccagcaacacttgtaaatttgtgaaaatgaattttatcttccttaaaaaagaaatgttttaatccatcacatttttcttccctaccctttagtttttgataaatgataaaaatgagccagttatcaaagaagaactagttcttacttcaaaagaaaaataaacataaaaaataagttgctggttcctaacaggaaaaaaattagtaattgtgctgagggaaactgcttacatagacattgcagatcaaatatttggagttaaaatgttagtctacatagatggatgattgtaactttactgccattaaaaagatttcagattgcattcatgcttctgtgtacacataatgaaaaatggacaaataatgaagatctctccttcagtctgctctgtttaattctgctgtctgctcttctctaatgctgcatccctaattgtacacagtttagtgatatctaggagtataaagttgtcacccatcgataaaaatcacaaagttggttt

SEQ ID NO: 10362 - DNA, 1400 bp, Homo sapiens
tgtgggtttctcttcttggcgtgggttgctgctgaggttccagaggagagcagcaggatggccgggagcggagccaggagtgaggaaggccgccggcagcatgccttcgtcccggaaccttttgatggggccaatgtcgtcccaaacctctggctgcacagctttgaagtcatcaatgacctcaaccattgggaccatatcaccaagctaaggttcctgaaagagtccctcagaggagaggccctgggtgtctacaataggctcagtccccaggaccagggagactatgggactgtgaaagaggccctcctgaaggcctttggggtccctggggctgcccccagccacctgcccaaagagatcgtctttgccaacagcatgggtaagggctactatctcaaggggaagattggcaaagtgcccgtgaggttcctggtggactctggggcccaggtctctgtggtccacccaaacttgtgggaggaggtcactgatggcgatctggacaccctgcagccctttgagaatgtggtaaaggtggccaatggtgctgaaatgaagatcctgggtgtctgggatacagcggtgtccctaggcaagctgaagctgaaggcacagttcctagtggccaatgcgagtgccgaggaagccatcattggcactgatgtgctccaggaccacaatgctatcctggactttgagcaccgcacatgcaccctgaaagggaagaagtttcgccttctgcctgtgggagggtccctggaagatgagtttgacctggagctcatagaggaggacccctcctcagaagaagggcggcaggagctatcccactgagaagccaccttttctttaacctcctaaatattggtgggaagacccaccgctgtggggggggttgcatatcctcatgggggtcactgggcttggccagtctgcttatcaactcttgctcttctctcccctttgcctccctctgcaggggccttaatctgcccctggtaggggaggcttccactgaacaggcacaggtgagggagagcaggctggcttagagggacagggtccccatggtcatcaagctgctgttgatgacaaagactcaaaggctggaagagctcccaaggaagctagaaatgcttgtctttgaaagaactgtgggaccccttcagattccctgaggtatggcttggtcactctcaggtcctcaaagcctgtcttagttgggctgggtcctagctgcagggtctttgtgagggtcacagttgctctgggacacctccctgaagagcctttccacctgtacaatcgtattttctttctgtcatttgctttgaagcccattgtgccttatgccaataattcaattgctgcaaacaccaataaagattgattcatgg

SEQ ID NO: 10363 - DNA, 1400 bp, Homo sapiens
gctggcagtgatggaacagcctagtggcagccctgtgagggtttgccagttttccccagactccacgtgtttggcatcaggggcagctgatggaactgtggttttgtggaatgcacagtcatacaaattatatagatgtggtagtgttaaagatggctccttggcggcatgtgcattttctcctaatggaagcttctttgtcactggctcctcatgtggtgatttaacagtgtgggatgataaaatgaggtgtccgcatagtgaaaaagcacatgatcttggaattacctgctgcgatttttcttcacagccagtttctgatggagaacaaggtcttcagttttttcgactggcatcatgtggtcaggattgccaagtcaaaatttggattgtttcttttacccatatcttaggttttgaattaaaatataaaagtacactgagtgggcactgtgctcctgttctggcttgtgctttttcccatgatgggcagatgctagtctcagggtcagtggataagtctgtcatagtatatgatactaatactgagaatatacttcacacattgactcagcacaccaggtatgtcacaacttgtgcttttgcacctaatacccttttacttgctactggttcaatggacaaaacagtgaacatctggcaatttgacctggaaacactttgccaagcaaggcgcacagaacatcagctgaagcaatttaccgaagattggtcagaggaggatgtctcaacatggctttgtgcacaagatttaaaagatcttgttggtattttcaagatgaataacattgatggaaaagaactgttgaatcttacaaaagaaagtctggctgatgatttgaaaattgaatctctaggactgcgtagtaaagtgctgaggaaaattgaagagctcaggaccaaggttaaatccctttcttcaggaattcctgatgaatttatatgtccaataactagagaacttatgaaagatccggtcatcgcatcagatggctattcatatgaaaaggaagcaatggaaaattggatcagcaaaaagaaacgtacaagtcccatgacaaatcttgttcttccttcagcggtacttacaccaaataggactctgaaaatggccatcaatagatggctggagacacaccaaaagtaaaattgttgatattgtattatttatattttcagtgatctcatttgaatgatttataggtaaatactaatcagacattattaaaagcaaaacaggaaaaaggtaaacttcttaaatttagttacctataaaaattgtcaattttcattctttaaaaaacacatggacttactataaaagcctttttgtactagtgaaaagaatcttcagctatatagaaataaagttatacttt

SEQ ID NO: 10364 - DNA, 491 bp, Homo sapiens; identical to SEQ ID NO: 5129

SEQ ID NO: 10365 - DNA, 1022 bp, Homo sapiens; identical to SEQ ID NO: 5130

SEQ ID NO: 10366 - DNA, 442 bp, Homo sapiens; identical to SEQ ID NO: 5131

SEQ ID NO: 10367 - DNA, 1400 bp, Homo sapiens
tggcactgctagacgctcggtggcctgtgtgcagctcgaccaaggccaggacgtggaggtggacgaggcggcctgtgcggcgctggtgcggcccgaggccagtgtcccctgtctcattgccgactgcacctaccgctggcatgttggcacctggatggagtgctctgtttcctgtggggatggcatccagcgccggcgtgacacctgcctcggaccccaggcccaggcgcctgtgccagctgatttctgccagcacttgcccaagccggtgactgtgcgtggctgctgggctgggccctgtgtgggacagggtacgcccagcctggtgccccacgaagaagccgctgctccaggacggaccacagccacccctgctggtgcctccctggagtggtcccaggcccggggcctgctcttctccccggctccccagcctcggcggctcctgcccgggccccaggaaaactcagtgcagtccagtgcctgtggcaggcagcaccttgagccaacaggaaccattgacatgcgaggcccagggcaggcagactgtgcagtggccattgggcggcccctcggggaggtggtgaccctccgcgtccttgagagttctctcaactgcagtgcgggggacatgttgctgctttggggccggctcacctggaggaagatgtgcaggaagctgttggacatgactttcagctccaagaccaacacgctggtggtgaggcagcgctgcgggcggccaggaggtggggtgctgctgcggtatgggagccagcttgctcctgaaaccttctacagagaatgtgacatgcagctctttgggccctggggtgaaatcgtgagcccctcgctgagtccagccacgagtaatgcagggggctgccggctcttcattaatgtggctccgcacgcacggattgccatccatgccctggccaccaacatgggcgctgggaccgagggagccaatgccagctacatcttgatccgggacacccacagcttgaggaccacagcgttccatgggcagcaggtgctctactgggagtcagagagcagccaggctgagatggagttcagcgagggcttcctgaaggctcaggccagcctgcggggccagtactggaccctccaatcatgggtaccggagatgcaggaccctcagtcctggaagggaaaggaaggaacctgagggtcattgaacatttgttccgtgtctggccagccctggagggttgacccctggtctcagtgctttccaattcgaactttttccaatcttaggtatctactttagagtcttctccaatgtccaaaaggctagggggttggaggtggggactctggaaaagcagcccccatttcctcgggtaccaataaataaaacatgcaggctg

SEQ ID NO: 10368 - DNA, 600 bp, Homo sapiens
tctctcttctcccttccgtcatgtctaagtcaaagtctcctaaagagcctgaacagcagaggaagctcttcatcggagggttgagctttgaaacaaccgatgagagcctgaggagccattgtgagcaatggggaatgctcacggactgtgtggtaatgagagatccaaacttcaagcactccaggggttgtgggtttgtcacatatgccactgtggaggaggtggatgcagccatgaatgcaaggccacacaaggtggatggaagagttgtggaaccaaagagagctgtctcaagagaagattctcaaagaccaggtgcccacttaactgtgaaaaagatatttgttggtggcattaaagaagatactgaagaacatcacttaagagattattttgaacagtgaaaaattgaagtgactgaaatcatgactgaccaaggcagtggcaagaaaaggggctttgcctttgtaacctttgacgaccatgactctgtggataagcttgtcattcagaaataccatactgtgaatggccacaactgtgaggttagaagtggttctggaaactttggtggtggtcttggacgtggtttcagtggga

SEQ ID NO: 10369 - DNA, 600 bp, Homo sapiens
cccactttccacggtgtcccgcccccccccaacagggcccttgacggcactggaggagccagacccatttcactgacagcctcagagagcagcagaggcccctcactcctgaacatccctccaagggtgccaggacaacgagccttgagccagggagacaagggagtcggtgtccctgacccccagagctttcagggcaagggcacaggtgggacccctggcccagagccagagccaagagttcagccagcagcctgcaggtgtgtcctcagtgtcagaccccaggggccaccgagagaccctgaggactccggagacccaggcaggtggggcccggcccagaaaggactctttgggcccactggagccaaacccaggcaagggtcctcagcagccagggctgtgctggcttcacgtggcaggaaggccctctgcaagggggatgggcagccctgggaccatggggcaggcttagccccggaagcccatggggacccccatatcaggccctgcctaggcccatcaggactaagagggaagttgggagatgcccccacagcagcatgggcacctgcatctggcccccttggtggccaatga

SEQ ID NO: 10370 - DNA, 291 bp, Homo sapiens; identical to SEQ ID NO: 5135

SEQ ID NO: 10371 - DNA, 600 bp, Homo sapiens
ctggccaggtggctgcagcagctccctgtgtgcccatccctagctctggccccgacggacccccggacccccatcatctggagtgtccgcctggccctacttccagggacctctgcccacccccacctgcagccgcccaaggcccctctcttcacccacccacccccttcatgggaacccccgaaggccccctccctctgtcatccccgctcctcaccctaccctccctgctctcctgccagcctcctgtggggcgctgcctgttccctgtgccctggaagttcaggggcccaggaagagcaaaatggggtggggcccgtgtcccccaaccacttgggaacgcctcagggacctgccacccccaccgagtccagacacgcactcaggcatcccaggcttcaggtgcccagagatcaggtgtccagggctcaggtgcccacagcccaagtgtccacagcccaggtatccaagccccaggtgcccacagcccagggaaggctccgtgggaggctgggcaaggccgcctgcagctgcaccccagaccagccctggagcttagctccccggagggcagccatgggggccgagcacatgtgctag

SEQ ID NO: 10372 - DNA, 285 bp, Homo sapiens; identical to SEQ ID NO: 5137

SEQ ID NO: 10373 - DNA, 600 bp, Homo sapiens
gaaagcctccacctatattatgagagcaagcaacggtgtgtctggaccctgctggtaccagaggaaatgcatgtgttgctcagtttttcccacctagatgttgagtcttgtcaccacagttacctgtcaatgtattctttagaagacagacccattgattcaggttgcagttacttaactgtcctttttgaagaaggtctcatacagagtctaaactatcctgaaaactacagtgacaaggctaactgtgactggatttttcaagcctccaaacatcacctaattaagagtctggaaatagaagaaagtggagactgcacttccgactatgtgacagtgcacagcgatgtagaaaggaagaaggaaatagctcggctgtgtggctatgatgtccccacccctgtgctgagcccctccagcatcatgctcatcagcttccaatcagatgaaaacgggacctgcaggggctttcaggctacagtctccttcattcctaaagcagcccaagctgtgaactcacaagcaattccttctggaggctctaacccagcccctaccacaacagatgccgtttataaagagttgaagcaactgctgtaa

SEQ ID NO: 10374 - DNA, 600 bp, Homo sapiens
agacaaacaagaaggaatgagaagatctatccaataaaggagagaaaggaccgcatacgcctggttctcatcatatgcaataaagagtttgaccatctgcctccaagaaatggggctgactttgccatcatggagatgaagaagctgcttgaggatctgggttacagtgtggatgtagaagagaatctgacagccaggcctccgtggggagataacacaggggttggactggactaccagaaggagacaaccttggagagacatgaatgcagtgccttcaaagtacgagaagctacctgtgaaagagctgagctgaaaatgaaactggcacatgagaagcacaaagagaagaccagtatgactcaagtttggaggagaagggacatagtatataacgtgtccaggagagacagcacaaggggctccatcttcatcacacaactcatcgcatgcttccagagatattcctggcgctgccacctagaggaagtattttggaaggttcagcaagcatttgaaagtccggaggcaacagtccaaatgcccaccatagaacgagtgtccatgacaagatatttctacctctttcctggcaattga

SEQ ID NO: 10375 - DNA, 312 bp, Homo sapiens; identical to SEQ ID NO: 5140

SEQ ID NO: 10376 - DNA, 600 bp, Homo sapiens
gatgtcataggcatgatgatgctgctacaaaatctggggtacaaggtggatgagaaaagaaatctcactgcttcgactaaaaggttttttggccctccattgtttgtcatgaaattacttaagaaatccttaagtacttatttattggctttccaaggtgccatgagggttaatcacatagtccaaaatcagcagtatggtctctttcaggaaatgactacagagttggaggtattttctctgcaccaagagcacaaggcctctggcatttgtgggaagaaatactctgagcaagtcccagatgtattacaactcaatgaaatctttaaaacgttgaatagcaagaactgcccaagtttgaaggacaaacccaaggtgataatcatccaggcctgccatgttgagaaccatggtgtggtgttggtaaaagattcagtaccggcctctgaaaatatatctttaccaactccgggagattttgaggatgatgctattaatcaagttcaactttcatttgagcagccagatgataaagcacagatgcccagcactgaaagagttacttcgacaagacgtttctatctcttcccagtacattaa

SEQ ID NO: 10377 - DNA, 600 bp, Homo sapiens
gctcagagtttcaaagaccacgttaagcctgcccccccagccctgtatcaccagccctatgcttcattaagggagcacaatgtgtccccgtggtcgcctgccagccgggatgtcctgtgtgacagcagatgcaaagagaatgaacaggcggctgaaaaggctggagacaaaaagagcacattgtccagagctctgaaagggctgcctgagaggggacatatgcatctgaaaaaaataccccacccctcccaaggtatccttaagtggaccccacagactcagacagcatctccccgggaaatgagctcaccggctgtgtgcgagcagatgtggggaagaaaatccatgacatgtgaggaatgggctggcttggtctgccagacgtgggggctccttgcccactgggtcgggcagtccactcaagagaccacagaggcagcggctgtaaaggtctttgttgctgttgctgccatgttaatgacccagcttggggcgctgccgccgccgccggccgcttcttccaaagaaaacaaatcaaaggagctggagaacagacttctgattccaaaacattctgaaaagccaaatggaggcgtctag

SEQ ID NO: 10378 - DNA, 600 bp, Homo sapiens
tgttgctctgaagcagagctagaaaagcctagaggcttttttcccacaccacggtatctactggattatagaggaagactggaatgttcttgggtgctcagagtttcagcaagcagtatggcaaaatttaccattgagtatctgtcactcctggggtctcctgtgtgtcaagactcagttctaattatttatgaagaaagacacagtaagagaaagacggcaggtccaaaggacagtaaaataaccagactttcccaaagttcaaacagagagcacttggtcccttgtgaggatgttcttctgaccaagccagaagggatcatgcagatcccaagaaattctcacagaactactatgggttgccaatggagattagtagcccctttaaatcacatcattcagcttaatattattaacttcccgatgaagccaacaacttttgtctgtcatggtcatctgcgtgtttacgaaggatttggaccaggaaaaaaattaatagctcatttacatggctccaagaaagagtttatcttgatatccagtgctgcttacctgactgtgcattttaagactgatgagtctgagagaaagaggttttaa

SEQ ID NO: 10379 - DNA, 600 bp, Homo sapiens
tatatcattaaaatggtggagcaacagtatggttggtctgcatctaagactaactttttgttgggagtcctcgccctacctgctgttgcaattggcatgttttcaggaggatatatcattaaaaaattcaaattgtctttagttggacttgccaaattggcattttgttctgcaacagtgcatctcttatctcaagttttatatttctttctaatctgtgaaagcaaatcagttgccggcctaaccttgacctatgatggaaatagtccagtaagatctcatgtagatgtaccactttcttattgcaactcagagtgcaattgtgatgaaagtcaatgggaacccgtctgtggaaacaatggaataacttacctgtcaccttgtctagcaggatgcaaatcttcaagtggtaataaagagcccatattatatctgaaacattttccttggattgatatcttcttatctcatgttgcaggaggtattctagttccaatatattttggggctctgattgatacaacgtgtatgaagtggtccaccaacagctgtggagcacgaggggcttgtaggatatataattccacatatttggggtaa

SEQ ID NO: 10380 - DNA, 600 bp, Homo sapiens
aagcaagatggctcaaaatgtcatacaatttacgagtgccttaaagttcattgtatggaccctaataatcagtgcttacaattatatggatatggtgcaaaatcagcctcacaagagtgttacaattcaatgaacagcaaaggggaccaatttggaaactgtggcatttctaccagtcctgggtcacaatatgttcggtgttcagatggtaatatattttgtgggaaacttatatgttcaggtattacaggcttaccaaaaatcaatctccaacatacaatgattcaggtccctcagggagatggctcatgttggagcatggatgcctatatgagtactgacattcctgatgaaggagatgtgcacaatggcacttactgtgcaccaaacaaagtctgcctgaattccgcctgcacagataaaaccccagtgatttctgcctgcaacccagaaaaaacgtgtaatgggaagggagtttgtaatgatttagggcactgccactgtaatgaagggcatgccccccctgactgtgttactgcaggaagtggaggtagtgtggacagtggccctcctggaatgtctgatggaaattcctcctaa

SEQ ID NO: 10381 - DNA, 600 bp, Homo sapiens
ctcaccaacatactcaacttagaagctgacttctcaggagtcactgggcagctcaacaaaaccatctccaaggtgtcacacaaggcgatggtggacatgagtgagaaggggaccgaggccggggctgcttcaggcctcctctcccagcccccatctctgaacaccatgtcagacccacatgcccacttcaacaggcctttcctcttgctcctttgggagataactccttcagtcatctgtgaattaggtaaaagaacagaagctcggagcctttcagtagcttgtagttcaggttcctggaaaacgcagatttgcatgcaagaagtttatcagggaacactctcaggaacaacctctgtgaaggagcaagaaaaacaggtttgcaccaaaggaaaacttcaacgcaattgcaacagcaatgtcagattgcacaggatgctctgtaatggagatatgccaaatgaaattgaagaggagcgagcctttgtacccccacatcaacccatcactggtgcagatttatccccagaggggttgtcactttgggcatggcagcttcctacagtagaaaaccattttcagagagaaacaaaaccatga

SEQ ID NO: 10382 - DNA, 600 bp, Homo sapiens
aaagtgcaggacatcattgtgaaccctgacgcacttggggttttacgcaatgacattgccctgctgagactggcctcttctgtcacctacaatgcgtacatccagcccatttgcatcgagtcttccaccttcaacttcgtgcaccggccggactgctgggtgaccggctgggggttaatcagccccagtggcacacctctgccacctccttacaacctccgggaagcacaggtcaccatcttaaacaacaccaggtgtaattacctgtttgaacagccctctagccgtagtatgatctgggattccatgttttgtgctggtgctgaggatggcagtgtagacacctgcaaaggtgactcaggtggacccttggtctgtgacaaggatggactgtggtatcaggttggaatcgtgagctggggaatggactgcggtcaacccaatcggcctggtgtctacaccaacatcagtgtgtacttccactggatccggagggtggaggacggggtcaccaagagggcagccgggacccctgggctgcagacaagaaagggactgtggggtccaccgggtctgggccacatcaagaagtgtggttga

SEQ ID NO: 10383 - DNA, 600 bp, Homo sapiens
gcagacacaagcagtatggatgaagactttgagtctgattacaaaaagatacttcaagtatcctcagaaatgtattctgcacccccggccccgcccatgctgagggaaggggagcagttgccaatatttgcaccatcttcacatgcacatgttgcaacaagagcttctgggaagtcctcagagtacagcaagtggaagttcaccaacagccccacgttcctggagctgctggaggagttcccatccctgcaggtgtctgctggcttcctgctctccctgctccccattctgaagcccaggttttactccatcagctcctcccaggatcacacgcccacagcgatccacctgactgtggccgtgctcatgtaccacactcgagggctcagggtctgccctctgagccccaacttcaacacctcccatgggaaccctccaaagaatgaaccaggaatggaaaccatagagcccacggcaccccggcacctgagacccaatgagaatcaacactgcctctccagccaacatgcaaggctgcagcctggacccagtgccagcatcccaaatgcaggccctccatttggggagtggatggagtag

SEQ ID NO: 10384 - DNA, 600 bp, Homo sapiens
gaacttattcagaagtacctagttgctgaagagcatgaactatccatcatgtttactgatgaaattggagccattgggacaaaaagatatgactcaaattctggtggccgcattgacaggaagatcaagttctccctgcctgatgaaaggactaagaagcgtatctttcagaatcacacaagcaggatgacactggccgatgaagtaaccctggacgacttgatcatggttaaagatgacctctctggtgctgacatcaaggcaatctgtacagaagctggtctgatggcctcaagagaacgtagaatgaaagtaacgaatgaattcttcaaaaaatataaagaaatgttctttataagaaacaggaaggcacccctgaggggctctatctctagtgaaccacagctgccatcaggaaaatggttgggcgattcctcgacccctgaaaaggatgagcaacttgttcccaaagctggagaagacactcctgagggctatttaggacaacttatgactcagctctttgagcagaaagaggccaaaaagttcagcagaaaaagccctgaactcttggaagagctggcttcaagcctggcttag

SEQ ID NO: 10385 - DNA, 600 bp, Homo sapiens
gtgctaagccaccgccacagagatggctataacacagcggacattgaatatcttgaagatgaaaaggtggagggtccagagtatgaagaacttgccgctctccacgattctgtgcatcaacagtctgtttcctggttcgcgtctctccaggatcgcatgaaagaacaaattttaagtcattttggggtaatgccagacagagaacctgagcctcagagtaatcccagcggccctgcctggtcctggtggatcctggccgtgctgcccctggagcgcaaggctcagctggccatcctcggcatgacctcgctcaaagagcggctccttgccatccgacggatattagtcatcatcacgccgttgctggctcggttatcagactctcatccaacacaagctcacagggaaagccgttccttgctccttgtggagggagctaccgtcattgccctgagaccaccagccaagaaagtaggtatgtccagagcagtcgctactgctcagcagataaccaaggtgccagctgagcggaaccagcctcacaggcctgcagaggctcagatctgcatgttggcccagaccccaaaaatggaacggtag

SEQ ID NO: 10386 - DNA, 600 bp, Homo sapiens
gaggctggcccctgcctggcctccataccacactggtgccaggggaacaataacaacttccaaactgaagctatctgtctggtcacctgcaaaaaataccataagtcccagaggtcccggtctcctgtgctcaccaaggccacactgggagagcttcgatcagaactagcacgagacactatcaaggatctcctcccaaatgtatgcgcttttcctatggaaaagggcccttgtcaaacctacatgacgcgatggtttttcaactttgaaactggtgaatatcctggttgggactgcccagccatgggcacaaggttcttccatggtcgccagaattgtcatagaaccccagattcaggcttgtgtacccaatgggcagctgatgccaacattgatgcatgggtgtttggagatggagaaatgtttattcaatgtaaccaaagcaagaaggcagaaggagagatcatttgtcatatggtttttgcccacacagaagggaatatgattgtctgcacagcatatgttcatgaatgtctaaagtgtagcatgaaggttggccagccagattatgatgcagcacattgtactggcctgtgctga

SEQ ID NO: 10387 - DNA, 600 bp, Homo sapiens
tcccagatctccctcaccgggcccggtgtgcgggtgcactatggcttgtacaaccagtcggacccctgccctggagagttcctctgttctgtgaatggactctgtgtccctgcctgtgatggggtcaaggactgccccaacggcctggatgagagaaactgcgtttgcagagccacattccagtgcaaagaggacagcacatgcatctcactgcccaaggtctgtgatgggcagcctgattgtctcaacggcagcgacgaagagcagtgccaggaaggggtgccatgtgggacattcaccttccagtgtgaggaccggagctgcgtgaagaagcccaacccgcagtgtgatgggcggcccgactgcagggacggctcggatgaggagcactgtggtgagccctgcctggctgccggggccctggagcttgggagggaggggggcccctccagccgcattgttggtggagctgtgtcctccgagggtgagtggccatggcaggccagcctccaggttcggggtcgacacatctgtgggggggccctcatcgctgaccgctgggtgataacagctgcccactgcttccaggaggacaggtag

SEQ ID NO: 10388 - DNA, 600 bp, Homo sapiens
gacatcagtttggacttgcctggctcttgtgccacattcgattcccagaacccagagagggctgacagcacagtgagcagggatgaccacataccaggaatcccctcacttacagactgtctacagtggtttacaaggccagagcacctaggaagcagtgccaaaatcaaatgcaatagttgccaaagctaccaggagtctactaaacagctcacaatgaaaaaattacccattgtggcttgttttcatctcaagcggtttgagcatgtaggcaaacagaggcgaaagattaatacctttatctcctttcccttggagctggacatgactccgtttttggcctctactaaagagagcagaatgaaagaaggccagccaccaacagattgtgtgcccaatgagaataagtattccttgtttgcagtgattaatcaccatggaactttggaaagtggccactataccagcttcatccggcaacaaaaggaccagtggttcagctgtgatgatgccatcatcaccaaggctaccattgaggacttactctacagtgaagggtatttactgttctatcacaaacagggtctagagaaagactag

SEQ ID NO: 10389 - DNA, 314 bp, Homo sapiens; identical to SEQ ID NO: 5154

SEQ ID NO: 10390 - DNA, 300 bp, Homo sapiens; identical to SEQ ID NO: 5155

SEQ ID NO: 10391 - DNA, 330 bp, Homo sapiens; identical to SEQ ID NO: 5156

SEQ ID NO: 10392 - DNA, 600 bp, Homo sapiens
aaagaaataaaagtagaacaagcaaagaaaccatcttttccaagtggtggtaggcggagaccaccaccttcttcaagaaacagaagcccttcaggaagtctgagatctgcaagaggaagtagtggaggaacaagaccgtggctgccctcacatgaaggacacttggatgatggtggatacgctcttgatctcaacacgagttcttctaggggagccattccaattaaaagaggtccatcttcacgaagtggaggtcctcctcctaaaacatctgctccttctgctatggcaagaagcaatagttggatgggaggccaaggtcccatatcacgtggaagagagaattatggaggtcctccatgcagagagccaatctcttcctggagaaatgaccgtatgtcaccaagagatgatggttatgcaattaaggaaagaaatcatccactttcccgagaatctagggattatgctccactgtctagagactatgcataccatgattatggtcattctagttgggatgaacatttctctagaggatatagagatcattctgaacgtccaagtggaagttcttatagagatgcatttcagagatag

SEQ ID NO: 10393 - DNA, 390 bp, Homo sapiens; identical to SEQ ID NO: 5158

SEQ ID NO: 10394 - DNA, 600 bp, Homo sapiens
gcccactgttttcatggaaacaggctgtcagatcccacaccatggactgcacacctcgggatgtatgttcaggggaatgccaagtttgtctccccggtgagaagaattgtggtccacgagtactataacagtcagacttttgattatgatattgctttgctacagctcagtattgcctggcctgagaccctgaaacagctcattcagccaatatgcattcctcccactggtcagagagttcgcagtggggagaagtgctgggtaactggctgggggcgaagacacgaagcagataataaaggctccctcgttctgcagcaagcggaggtagagctcattgatcaaacgctctgtgtttccacctacgggatcatcacttctcggatgctctgtgcaggcataatgtcaggcaagagagatgcctgcaaaggagattcgggtggacctttatcttgtcgaagaaaaagtgatggaaaatggattttgactggcattgttagctggggacatggatgtggacgaccaaactttcctggtgtttacacaagggtgtcaaactttgttccctggattcataaatatgtcccttctcttttgtaa

SEQ ID NO: 10395 - DNA, 600 bp, Homo sapiens
atcctgcctatttgcttgcccagtgtcacaaagcagttggcaattccacccttttgttgggtgaccggatggggaaaagttaaggaaagttcagatagagattaccattctgcccttcaggaagcagaagtacccattattgaccgccaggcttgtgaacagctctacaatcccatcggtatcttcttgccagcactggagccagtcatcaaggaagacaagatttgtgctggtgatactcaaaacatgaaggatagttgcaagggtgattctggagggcctctgtcgtgtcacattgatggtgtatggatccagacaggagtagtaagctggggattagaatgtggtaaatctcttcctggagtctacaccaatgtaatctactaccaaaaatggattaatgccactatttcaagagccaacaatctagacttctctgacttcttgttccctattgtcctactctctctggctctcctgcgtccctcctgtgcctttggacctaacactatacacagagtaggcactgtagctgaagctgttgcttgcatacagggctgggaagagaatgcatggagatttagtcccaggggcagataa

SEQ ID NO: 10396 - DNA, 600 bp, Homo sapiens
accctcatctcagaggagtgggtgctgacagtggcgatctgcttcccattatccccccaccctgatttccaagcaaacacatctagtgccatcgctgtggtagaactgccctccccagtttctgttagccctgttgtcctgctcatctgccttccctcatctgaagtctacctgaagaagaatacaacctcctgctgggtgactggatggggctatactggaatattccaatatatcaagcgttcttatacactgaaggagctgaaagtgcccctcattgatctccagacatgcggtgaccactatcaaaatgaaatcttgctgcacggagttgagctcatcatcagtgaagctatgatctgctccaagctcccagtggggcagatggatcagtgtactgtcctggcaggagtggtaagccagggatcaaactgcatccaaaccagtgggcctggaatatacacaaacatccatttctacaagtcttggattgagaagtctcccatctcgcttgctgagttttctgctaccctcagtctgggcctctctgggctcctgcctattatgcttctgcctctgattttcctgaggccaccttaa

SEQ ID NO: 10397 - DNA, 600 bp, Homo sapiens
cccaatacatatgttaagttaactctacggaaatccacggatcaagagatgtccaaatgcaagatatccatccgcagagggcggccaaatccagtatacaaggaaacttttgttttcaaagtgaccctatttcagctttctcatgtgacactcatgctgtctgtgtataacaaaagcagcatgagaagaaagatgataggctggatttatttaggtctcaacagctctggagaagaactcaatcactggactgaaatgaaagagtcaaaaggacggcaagtacgacctatacaaaatacacttcggcaagccagagtggaaaccataagcactgatgtgtgtaacagaaaggatgtgtatgatggcctgataactccaggaatgttatgtgctggattcatggaaggaaaaatagatgcatgtaagggagattctggtggacctctggtttatgataatcatgacatctggtacattgtaggtatagtaagttggggacaatcatgtgcacttcccaaaaaacctggagtctacaccagagtaactaagtatcgagattggattgcctcaaagactgccccaatttctattatgttctaa

SEQ ID NO: 10398 - DNA, 600 bp, Homo sapiens
aagggaaacccgaaggactataaagataataccagcaaaggcaagtcttgcttcaaatgcaagaaaagcgggcattgggcaaaggaatgtactaagcccccgccctccagctcccctcaggcccctgctgtcaacgcaaaggcaccagtcacgaaccctggcactggagaattgattgcctctgctcccactgaggggctgggggcaaattacactgtccttactgcttatgcagggaaacttccctcctggtccatgagtgttatgggaatggaagggaagccacaaaccagattttttactcctcctttgatttgtcaatttgagaaacgaatcttccaacaggagtgcctagtagtatcaagctacgcaatccccctgctgggaagagagattatggttaaaataagggcactactacaatttaagcatcacccagtgaaattgctaatagtcaaaaatacagacaatgtccaagaccacattaataaacaggttaacctgctggcattgtatactagaaaactgaggaaggctaaaacagcagtgccagtcaaaatacagcttgaagaccccagctgttttcccagtcaaaaataa

SEQ ID NO: 10399 - DNA, 276 bp, Homo sapiens; identical to SEQ ID NO: 5164

SEQ ID NO: 10400 - DNA, 600 bp, Homo sapiens
agggaatcaaaactgagtggaagttttacagaagagaaaaggatcaacgctcagaaggtagcctcagaggaccagttttgtggccaccagggaaatgacatgtacgatgaagaaaaagtgaaatatactgtgttcaaagtattgaagaactcctcacttgctgagtttgttcagaacctctctcagatcatggaatttccacaagatcaaattcaattgtggcccatgcaagcaaggagtaatggaacaaaacggccagcaatgttagataatgaagctgatggcaataaagcaatgattgaggtcagtgataatgaaaactcttggacaatattcctggaaacagtcgatctcgagctggctgctagtggagtgaccttacccaagtttgataaagctcatgatgtaatgttttttttgaagatgtatgatcccaaaatgcggagcttgaattactgtgggcatatctacacaccaatatcctgtgaaatacgtgacttgctcccagttatgtgtaacagagcaggatttattcaagatactagccttatcctctatgaggaagttaaactgaatttaacagagagaattcaggactaa

SEQ ID NO: 10401 - DNA, 600 bp, Homo sapiens
caaagagagggtaccagagagcatctgcgggagagagcgaagggtgggagaagaagaaaaaaatctggccggggtcagaggattgccgaagggaggccttcctttcagtggacccgggtcaagaatacccacattccgaagggctgggcacgaggaggcatgggggacgctaccttggactatgactatgctcttctggagctgaagcgtgctcacaaaaagaaatacatggaacttggaatcagcccaacgatcaagaaaatgcctggtggaatgatccacttctcaggatttgataacgatagggctgatcagttggtctatcggttttgcagtgtgtccgacgaatccaatgatctcctttaccaatactgcgatgctgagtcgggctccaccggttcgggggtctatctgcgtctgaaagatccagacaaaaagaattggaagcgcaaaatcattgcggtctactcagggcaccagtgggtggatgtccacggggttcagaaggactacaacgttgctgttcgcatcactcccctaaaatacgcccagatttgcctctggattcacgggaacgatgccaattgtgcttacggctaa

SEQ ID NO: 10402 - DNA, 800 bp, Homo sapiens; identical to SEQ ID NO: 5167

SEQ ID NO: 10403 - DNA, 600 bp, Homo sapiens
ggttcagcatgggagatgtgtagaaataaaattgagcaatgcagctgctggttggatgtgagaaatagaaaggccaaaatgttgatattggacaataaaagcaccatcactgccagcaacagagactgtcaccaagtctcccttatggaggcttttcttcgggatacctactggccacagttgacaagttcacaactgaatggatggagcctttcatcctggaagggtcagcggtttgttcacacaggaatggatgcacattcaagtgtggagttgttttctgccggccaggtctcagccagcattattagccaaaggcttacagagagcttgattcaccagtacaggatcccacataacactgcattggaccgggggcctactttagagaaaagcaagtgcaggagtggactcatgaccatgagactcgatggtcacatcccatacacaccacccagaagttgtcagcataatagagatttggaacgacttgttgggagcacagccagaacaccagcttggagtcaactacatgaggatgactcaggacgctggatacatatttatatgtgtagaaaggacttttatttgagtgcataa

SEQ ID NO: 10404 - DNA, 600 bp, Homo sapiens
tcgtggaaggataggggctttggagtcccacaaaccacagtttgcaagaccaggagcatcctgcacttccttgcacacatcctggcaacctcagccaatgagtccaacgtcaacttcctgtccttgcctgacactaacagccctgagatcagacctgaccattcacctccagtaccagataggtccgtcagtcctttggaacatatcccacgaacattccccaaaccaggcaccggactccacacatcaacaccgtcacagagagcttcagcctgtgtagtccagctgtgctcaaatggaaatccagaaacccagatgttggtccaaacaccctgtctcagggagctggctctgcaggtccccagcgtgggagtgaaccgggtgggccacctgcccttcctgcccacatccctgcttcctggaatcctggaccctgagaaccagggggacatgcaagaaggaaaatccctgcaacgtggatgcacctctgcaggaatccctctgcaggagccccaagatgagaataaccttcctgatctggtttcaaccctggatgctttcaactggtgcgtccatcaaggatttcagggactccagtga

SEQ ID NO: 10405 - DNA, 600 bp, Homo sapiens
accgacggcaagctgcccaaggtcaccaaggacatggagtgcatggatggcgccctgcttgtcaacaccatgttcttcaagccacactggaatgagaaattccaccacaagatggtggaaaaccgtggcttcatggtgactcggttctataccgtgggtgtcatggtgatgcaccagacaggcctctacaactactatgacaatgagaaggaaaagctgcaaatcgtggagatgcccctggcccacaagctctccagcctcatcatcctcatgccccaccacgtggagcccctcgaggccttaaaaagctggcttggcctgactgaggccattgacaagaacaaggcaaacttgtcacgcatgccacacaagaaggacctgtacctgaccagcgtgttccacgccaccgcctttgagttggacacagacggcaactcctttgaccaggacatctatgggagcaaggagctgcgcagccccaagctgttctactccgaccaccccttcatcttcctggtgtgggacacccagagcggctccctgctgttcactgggcacctggtccggcctaaggttgacaagatgcaagacgagttttag

SEQ ID NO: 10406 - DNA, 600 bp, Homo sapiens
ctgtgggatggatggtgtgttgtgggcccacgatttgcagcagaacattgccctacctgccaccaaactagtaaaattgaaagacaggaaggttcaggaacatgagaaatacatagaatattatttggtcctggataatggtgagtttaaaaggtacaatgagaatcaagatgagatcagaaagagggtatttgagatggctaattatgtcaacatgctttataaaaagctcaatactcatgtggccttagttggtatggaaatctggactgacaaggataagataaagataaccccaaatgcaagcttcaccttggagaatttttctaaatggagggggagtgttctctcaagaagaaagcgtcatgatattgctcagttaatcacagcaacagaacttgctggaacgactgtgggtcttgcatttatgtctacaatgtgttctccttattctgttggcgttgttcaggaccacagcgataatcttcttagagttgcagggacaatggcacatgaaatgggccacaactttggaatgtttcatgacgactattcttgcaagtgtccttctacaatatgtgtgatggacaaagcactgag

SEQ ID NO: 10407 - DNA, 600 bp, Homo sapiens
ctggaccgtttactacatgctggaagtatatgtgaaccagaggaatgtggcttccaatcaagtttgtatgagtggaccctgccactggccctatcgaagccagaaagccaaggaggaagggacagagctagaatcagtgccactttgcagcagcaaggatccagacgaagtggaaacagagagcaggggccctcccaccacctctgacctccttgccccagacctgctggagcaaggggactggagcctgtcccagaacaagagcgccctggactgccctcatcagcacctagacgtaccgcacgggaaggaggagcagatctgctgacctcagggcctgacagtgtgggacaggctcttctttcccaaaattagggagctcttgacagaaagcagttctgatgcttacatctggaatctgaggcatcctctgactccactcaaagagggtgagggccttcttaagatacaaatggcggaggattgctgccagagaagtctggtcagagccacagggtctgcctccagccaaacgggagcttttggtgagaaggtgttggacaggggattggcgccccctttgggttggcctccatcctc

SEQ ID NO: 10408 - DNA, 1400 bp, Homo sapiens
aaacatctgaaagtggcacaccaagttcctctactcctcaagaaaacaccatatctggatatagccttttaacctgcaaaagaactttacctgaaccctgccattctaaaatttacccgggagttgactttggaggagaagaattgaatgtgacttttgttaaaggagtgaatgtttgccaagagacttgcacaaagatgattcgctgtcagtttttcacttattctttactcccagaagactgtaaggaagagaagtgtaagtgtttcttaagattatctatggatggttctccaactaggattgcgtatgggacacaagggagctctggttactctttgagattgtgtaacactggggacaactctgtctgcacaacaaaaacaagcacacgcattgttggaggaacaaactcttcttggggagagtggccctggcaggtgagcctgcaggtgaagctgacagctcagaggcacctgtgtggagggtcactcataggacaccagtgggtcctcactgctgcccactgctttgatgggcttcccctgcaggatgtttggcgcatctatagtggcattttaaatctgtcagacattacaaaagatacacctttctcacaaataaaagagattattattcaccaaaactataaagtctcagaagggaatcatgatatcgccttgataaaactccaggctcctttgaattacactgaattccaaaaaccaatatgcctaccttccaaaggtgacacaagcacaatttataccaactgttgggtaaccggatggggcttctcgaaggagaaaggtgaaatccaaaatattctacaaaaggtaaatattcctttggtaacaaatgaagaatgccagaaaagatatcaagattataaaataacccaacggatggtctgtgctggctataaagaagggggaaaagatgcttgtaagggagattcaggtggtcccttagtttgcaaacacaacggaatgtggcgtttggtgggcatcaccagctggggtgaaggctgtgcccgcagggagcaacctggtgtctacaccaaagtcgctgagtacatggactggattttagagacaacacagagcagtgatggaaaagctcagatgcagtcaccagcatgagaagcagtccagagtctaggcaatttttacaacctgagttcaagtcaaattctgagcctggggggtcctcatctgcaaagcatggagagtggcatcttctttgcatcctaaggacgaaagacacagtgcactcagagctgctgaggacaatgtctggctgaagcccgctttcagcacgccgtaaccaggggctgacaatgcgaggtcgcaactgagatctccatgactgtgtgttgtgaaataaaatggtgaaagatc

SEQ ID NO: 10409 - DNA, 600 bp, Homo sapiens
acgaatgcaccattcagattgaataagaaagacagaaaaactgtgaaaatgatgtatcagaagaaaaaatttgcatatggctacatcgaggaccttaagtgccgtgtgctggaactgccttaccaaggcgaggagctcagcatggtcatcctgctgccggatgacattgaggacgagtccacgggcctgaagaagattgaggaacagttgactttggaaaagttgcatgagtggactaaacctgagaatctcgatttcattgaagttaatgtcagcttgcccaggttcaaactggaagagagttacactctcaactccgacctcgcccgcctaggtgtgcaggatctctttaacagtagcaaggctgatctgtctggcatgtcaggagccagagatatttttatatcaaaaattgtccacaagtcatttgtggaagtgaatgaagagggaacagaggcggcagctgccacagcaggcatcgcaactttctgcatgttgatgcccgaagaaaatttcactgccgaccatccattccttttctttattcggcataattcctcaggtagcatcctattcttggggagattttcttccccttag

SEQ ID NO: 10410 - DNA, 804 bp, Homo sapiens; identical to SEQ ID NO: 5175
  misc_feature (54)..(106): n is a, c, g, or t
  misc_feature (468)..(647): n is a, c, g, or t

SEQ ID NO: 10411 - DNA, 1400 bp, Homo sapiens
tccgttccgcgcacaacgtggataggaacttgaccatcgatacgtactatgaccgaaatgccgagatgctgtcaactcagaaacgagacaaaatatggaacttccacgtctggaatgagtgctggatgatccggaaagatctcccaccaggatacaacgggtggcaggttctggaccccactccccagcagaccagcagtgggctgttctgctgtggccctgcctctgtgaaggccatcagggaaggggatgtccacctggcctatgacaccccttttgtgtatgccgaggtgaacgccgatgaagtcatttggctccttggggatggccaggcccaggaaatcctggcccacaacaccagttccatcgggaaggagatcagcactaagatggtggggtcagaccagcgccagagcatcaccagctcctacaagtacccagaaggatcccctgaggagagagctgtcttcatgaaggcttctcggaaaatgctgggcccccaaagagcttctttgcccttcctggatctcctggagtctgggggtcttagggatcagccagcgcagctgcagcttcacctggccaggatacccgagtggggccaggacctgcagctgctgctgcgtatccagagggtgccagacagcacccaccctcgggggcccatcggactggtggtgcgcttctgtgcacaggccctgctgcatgggggtggtacccagaagcccttctggaggcacacagtgcggatgaacctggactttgggaaggagacacagtggccgctcctcctgccctacagcaattacagaaacaagctaacggacgaaaagctcatccgcgtgtctggcatcgcggaggttgaagagacagggaggtccatgctggtcctaaaagatatctgtctggagcctccccacttgtctattgaggtgtctgagagggctgaggtgggcaaggcgctgagagtccatgtcaccctcaccaacaccttaatggtggctctgagcagctgcacgatggtgctggaaggaagcggcctcatcaatgggcagatagcaaaggaccttgggactctggtggccggacacaccctccaaattcaactggacctctacccgaccaaagctggaccccgccagctccaggttctcatcagcagcaacgaggtcaaggagatcaaaggctacaaggacatcttcgtcactgtggctggggctccctgagacccgccctccagctgccctccctggcacccctgccccacctggctcctttctactcctggctatgtcgtcttggctccacctctgtcctctctctagcctgcctgggaatgaatgaagctctgttagaaacaccgtgtgctttgggaagagacaataaagatgtctttattt

SEQ ID NO: 10412 - DNA, 567 bp, Homo sapiens; identical to SEQ ID NO: 5177

SEQ ID NO: 10413 - DNA, 1400 bp, Homo sapiens
ccaggccctgggctttgagagctgcgagaggagggaggtcccggtccagggcttcctcgaggaactggcttggttccaggagcagctggatgcccacgggcgccctgtggggtgtgccttagtggccttgatgcccccagagggcagctgaggcagccacagcagctggtccgggagctgagcggctgccgggccctgcggggctgccccaaagtcttcctgctgctctcaagtggtcctgggtcctccctggagcccggagccttccttgctggcctgagagagctgtgtggccgctctcctcactggtccctggtgcagctgctgacgaagctcttccgcagggtggctgaagagtccgcagggggcacctgctgccccgtccttcggagctccttgaggggggcactgtgcctgggaggcgtggagccctggaggcctgagccggcccccggtcccagcacacagtatgacctgtccaaggccagggctgccctcctcctggctgtgatccaaggccggcctggggcccagcatgacgtggaggcgctggggggcctgtgctgggccctgggctttgagaccaccgtgagaacggaccctacagcccaggctttccaggaggagctggcccagttccgggagcaactggacacctgcaggggccctgtgagctgtgcccttgtggccctgatggcccatgggggaccacggggtcagctgctgggggctgacgggcaagaggtgcagcccgaggcactcatgcaggagctgagccgctgccaggtgctgcagggccgccccaagatcttcctgttgcaggcctgccgtgggggaaacagggatgctggtgtggggcccacagctctcccctggtactggagctggctgcgggcacctccatctgtcccctcccatgcagatgtcctgcagatctacgctgaggcccaaggcagctcctgcaggggcacccctccagggagctctgaccaagcagacatcctgacggtctactcagccgcagagggttatgtggcctatcgcgatgacaagggctcagactttatccagacactggtggaggtcctcagagccaaccccgggagagaccttctggagctgctgactgaggtcaacaggcgggtgtgcgagcaggaggtgctgggccccgactgcgatgaactccgcaaggcctgcctggagatccgcagctcgctccggcgccggctctgcctccaggcctgagggtgcggcggccacgggggcgctgctgagacggtggccagatcccagcgccattcttgcctccatccaccccccatccccccggtttcctcatctgagagcgaggcgtggcagcgtgggggtggccgtgcaataaatatctgccgtgaacagtg

SEQ ID NO: 10414 - DNA, 600 bp, Homo sapiens
tcgaccagtacccaggctgtgccctcgctttggatggaagttctagtgtggaggcggaagttttggaaaatgatggtgtctcaggtggtcttggacaaagggagcgtaaaaagaagaaaaagcagccacctggatattacagctgtttgaaagatggtggcgatgatagtatttccacagaagccctggctgcgcatcgatgaccagacagtcaaggtgatcaaccagtaccaggtggtgaaaccaactgctgaacgcacagcccatctcctgtattactgccgagtggacctgctgtaaaccctgtgtgcgctgtgtgtgagcccagtgtccgctttgtaggacaccacctcacactcactttccgcctctctttattggctctttagagagaaactctttctccctttgcaaaaatgggctagaatgaaaaggagatgccttggggttcgtgcacaacatagcttctgttgactctaactttgaaatcaaaatcatttggttgaaacagactgtcgcttgattttaaaaaacacacaaaaacccatatttctgaaataatgctgattcctgagataagaaagtggatttgatccccag

SEQ ID NO: 10415 - DNA, 1400 bp, Homo sapiens
gatgctggccagtgggcccattgaggttggctccttgccagctggcgagagggtgtcccgacccgaagctgctgtgcctgggtaccagcatccaagtgaagctatgaatgcccacacaccccagttcttcatctataaaattgattcatccaaccgagagcagcggctagaggacaaaggagacaccccactggagctgggtgacgactgtagcctggctctcgtctggcggaacaatgagcgcttgcaggagtttgtgttggtagcctccaaggagctggaatgtgctgaggatccaggctctgccggtgaggctgcccgggccggccacttcaccctggaccagtgcctcaacctcttcacacggcctgaggtgctggcacccgaggaggcctggtactgcccacagtgcaaacagcaccgtgaggcctccaagcagctgttgctatggcgcctgccaaatgttctcatcgtgcagctcaagcgcttctcctttcgtagttttatctggcgtgacaagatcaatgacttggtggagttccctgttaggaacctggacctgagcaagttctgcattggtcagaaagaggagcagctgcccagctacgatctatatgctgtcatcaaccactatggaggcatgattggtggccactacactgcctgtgcacgcctgcccaatgatcgtagcagtcagcgcagtgacgtgggctggcgcttgtttgatgacagcacagtgacaacggtagacgagagccaggttgtgacgcgttatgcctatgtactcttctaccgccggcggaactctcctgtggagaggccccccagggcaggtcactctgagcaccacccagacctaggccctgcagctgaggctgctgccagccaggcttcccggatttggcaggagctggaggctgaggaggagccggtgcctgaggggtctgggcccctgggtccctgggggccccaagactgggtgggccccctaccacgtggccctaccacaccagatgagggctgcctccggtactttgtcctgggcaccgtggcggctttggtggccctcgtgctcaacgtgttctatcctctggtatcccagagtcgctggagatgagctcgcctgcaggcagctgctgtgagctggcctacctgcctgccccaggccatgcctgcctttgttgtggggaacacctctgggctttgggcctcagcttatgcatctggtgggagagggtggggaggttgtggcccctgcaggggcagagtatcctagggtgtgtatccatctggctgtctgtccattcatcctgctgctctgacccttggcctcaggcttggccctgcccaagctacttcctgtacttaaaagtgttaataaaaccagactattcaggccc

SEQ ID NO: 10416 - DNA, 1400 bp, Homo sapiens
atggcgaggtcattggcatcaacacgctcaaggtcacggctggcatctcctttgccatcccctcagaccgcatcacacggttcctcacagagttccaagacaagcagatcaaagactggaagaagcgcttcatcggcatacggatgcggacgatcacaccaagcctggtggatgagctgaaggccagcaacccggacttcccagaggtcagcagtggaatttatgtgcaagaggttgcgccgaattcaccttctcagagaggcggcatccaagatggtgacatcatcgtcaaggtcaacgggcgtcctctagtggactcgagtgagctgcaggaggccgtgctgaccgagtctcctctcctactggaggtgcggcgggggaacgacgacctcctcttcagcatcgcacctgaggtggtcatgtgaggggcgcattcctccagcgccaagcgtcagagcctgcagacaacggagggcagcgcccccccgagatcaggacgaaggaccaccgtcggtcctcagcagggcggcagcctcctcctggctgtccggggcagagcggaggctgggcttggccaggggcccgaatttccgcctggggagtgttggatccacatcccggtgccggggagggaagcccaacatccccttgtacagatgatcctgaaagtcacttccaagttctccggatattcacaaaactgccttccatggaggtcccctcctctcctagcttcccgcctctgcccctgtgaacacccatctgcagtatcccctgctcctgcccctcctactgcaggtctgggctgccaagcttcttcccccctgacaaacgcccacctgacctgaggccccagcttccctctgccctaggacttaccaagctgtagggccagggctgctgcctgccagcctggggtccctggaggacaggtcacatctgatccctttggggtgcgggggtggggtccagcccagagcaggcactgagtgaatgccccctggctgcggagctgagccccgccctgccatgaggttttcctccccaggcaggcaggaggccgcggggagcacgtggaaagttggctgctgcctggggaagcttctcctccccaaggcggccatggggcagcctgcagaggacagtggacgtggagctgcggggtgtgaggactgagccggcttccccttcccacgcagctctgggatgcagcagccgctcgcatggaagtgccgcccagaggcatgcaggctgctgggcaccaccccctcatccagggaacgagtgtgtctcaaggggcatttgtgagctttgctgtaaatggattcccagtgttgcttgtactgtatgtttctctactgtatggaaaataaagtttacaagcacacggttctcagcca

SEQ ID NO: 10417 - DNA, 1400 bp, Homo sapiens
tttcccgagtccgtttgaggaagtccccgaggcgcacagagcaagcccacgcgagggcacctctggaggggagcgcctgcaggaccttgtaaagtcaaaaatgtcagaaacttccaggaccgcctttggaggcagaagagcagttccacccaataactctaatgcagcggaagatgacctgcccacagtggagcttcagggcgtggtgcccggggcgtcaacctgcaagagtttcttaatgtcacgagcgttcacctgttcaaggagagatgggacactaacaaggtggaccaccacactgacaagtatgaaaacaacaagctgattgtccgcagagggcagtctttctatgtgcagattgacttcagtcgtccatatgaccccagaagggatctcttcagggtggaatacgtcattggtcgctacccacaggagaacaagggaacctacatcccagtgcctatagtctcagagttacaaagtggaaagtggggggccaagattgtcatgagagaggacaggtctgtgcggctgtccatccagtcttcccccaaatgtattgtggggaaattccgcatgtatgttgctgtctggactccctatggcgtacttcgaaccagtcgaaacccagaaacagacacgtacattctcttcaatccttggtgtgaagatgatgctgtgtatctggacaatgagaaagaaagagaagagtatgtcctgaatgacatcggggtaattttttatggagaggtcaatgacatcaagaccagaagctggagctatggtcagtttgaagatggcatcctggacacttgcctgtatgtgatggacagagcacaaatggacctctctggaagagggaatcccatcaaagtcagccgtgtggggtctgcaatggtgaatgccaaagatgacgaaggtgtcctcgttggatcctgggacaatatctatgcctatggcgtccccccatcggcctggactggaagcgttgacattctattggaataccggagctctgagaatccagtccggtatggccaatgctgggtttttgctggtgtctttaacacatttttacgatgccttggaataccagcaagaattgttaccaattatttctctgcccatgataatgatgccaatttgcaaatggacatcttcctggaagaagatgggaacgtgaattccaaactcaccaaggattcagtgtggtacccatccattcctgctgctggaatgtctccaaagagcgcctgaagccctcattccactcaagtctcacttgagagtaaaccaaggggagtttgggggtaaaatgtcagaggtcattgtaataacttcttgggaaattaggcagaaagggaaaaaaagtgggaatcatttaataaaccacatagaaa

SEQ ID NO: 10418 - DNA, 1122 bp, Homo sapiens; identical to SEQ ID NO: 5183

SEQ ID NO: 10419 - DNA, 600 bp, Homo sapiens
catggctgttcttcggggaaaagataatttgctcctgacagtcatacctgaaacaatcaattaaatatcttgttttaaagtgggattatctaaaaaaaaaaaaaccagttatatcacgtggtttgtattggagatgtgccaaacatggcaagaagtttttggatctttttcttacaaagaaaaatggatggttatcaacccaaatgcccatcaatgacagactggataaagcaaatgtggtacatatacaccatggaatactatgcagccataaaaagcaacagtcctctgcagggacatggatggagctggaaaccattatcctcagcaaactaacgcaggaacagaaaaccaaatactgcatgttctcacttataagtgggagctgaacaatgagaacacatgaacatagggaggggaacaacacacactggggcctggcagtgggtagggtagagggagggagagcattagcaaaaatagctaatgcatgctgggcttaacacccaggtgatgggttgattgataggtgcagcaaaccatcatggcacacatttacctatgaaacaaacctgcacatcctgcatatgtacctcagaa

SEQ ID NO: 10420 - DNA, 600 bp, Homo sapiens
ggaaacagttgaaaaagtggttcgccaaggaagaggaattcccaagtagcgaatctaaatcggaaggtagcacacagacatatgccagccaatccagctcagaaggcagcactcagacatatgccagccaaaccagatcagaaagcagcagtcaagctgatactagcaagtaagtgaattagggggcattttttttatataataagtatatgttaaaaattgagatgaacaaattgataattaacaattacttgctaactattaactgagtagccacaattagtaaagtactgtaccttaaaacaacctatttgctgatctagtaacttgcgagtatttgtctaaataagacaatatcttctttcctgcagtttagttaatatgtgttgggagtttatttttgggaaacaaaggaaaacatttttggtgaaatgtttaaggagctaattcataaaaaggatctttttgtattctttttcttggagtacaccaaggggaagtttacttttttatttggagatggcacaactagaaactaatatgtatgctgatgaataactgagtgaatgctcgcatagatcacctgggaagaatttgttg

SEQ ID NO: 10421 - DNA, 600 bp, Homo sapiens
atagccaccacctgtcagcatatccaaaactccccatggggacagtggcactgtctgccattcagaatgactgtgtaaagcctcttttcagaagtgccgtgactgagagagggcagtatctttgggaaaagggagcaggagcttccagatgggcatcagggatactccagtcttgtctatgggggttctctgcaggagctgttagcttcagggctcctgaacaggagtcttctgaagttttctgtctccctagggtacttgggttggtggttgcccttcctttctctgtctccttggttttgtttactatataagattttatcttcatgtggtctagacatttgctgctgaatacagtcactactagtcatgtacagctcttgagcccttgaaatatggccaatacaaattgagatctgctgtaagtatgaaatacacaccacatgcagaagacttggtatgaaaaaagtaggtgaaatatctcactaataattgttcatattgattacatgttgaaatcctgattgtttgcactggattaagtaacacgtactattaagattggccttactttttaaaaaatttattcatatggccact

SEQ ID NO: 10422 - DNA, 291 bp, Homo sapiens; identical to SEQ ID NO: 5187

SEQ ID NO: 10423 - DNA, 600 bp, Homo sapiens
ggcacccacaagccgcctgtgctgaggccacgaggtcagcccaaccagtgcgtgggccacagggaggccagcatccacgcttcctgctgccatgccccaggtctggaatgcaaagtcaaggagcatggaatcccggcccctcaggagcaggtgaagaggcccaaggatgtcggagggagaaatgaagtgtgggtgggggtcccgggccacgctagacatgtgctttcttttcctcgggctctggcaggtgaccgtggcctgcgaggagggctggaccctgactggctgcagtgccctccctgggacctcccacgtcctgggggcctacgccgtagacaacacagggttagcaggtggtcaccagggatcggggaggaaggggtgtggcttgcaggaaggcgaaaatctggactagcaaatagggaaggggacccatgtgagcaacgctggccactaggaatgagactgagacctgtgggatctagcaagaagcccagtgtgaccagcgacacgatctatgctggggaccacttgggagagccaaaagctttggtggagatgaatggagaccatcaacctaagttcagcatcctcctctaa

SEQ ID NO: 10424 - DNA, 600 bp, Homo sapiens
gctggtgtatctaggcagcgggcagccactcaaggtcttggctccaaccaaaacgctttgaagtacttgggccaggatttcaagaccctgaggcaacagtgcttggactcaggggtcctatttaaggaccctgagttcccagcatgtccatcagctttgggctacaaggatcttggaccaggctctccgcaaactcaaggcatcatctggaagcggcccacggagttgtgtcccagccctcagtttatcgttggtggagccacgcgcacagacatttgtcagggtggtctagaacaaacgcagcagcctctgtggtggctgccccggggagcccagccgctgcagtggtggtttttaatgaacagagcggaaaggggctggggagtccaatctcctgaaaggagccaggtgcagactgagcctttgccagtagaagaggagattcacagcgccaaggctataacccagagcgtcaggtggactctcaagggtgcacatcactcaggaaacttcagcgacccagccagtccctccactgctcgttccagcacagtctctctcccttgcattttggcctatgcacgtctcagagcatcttga

SEQ ID NO: 10425 - DNA, 285 bp, Homo sapiens; identical to SEQ ID NO: 5190

SEQ ID NO: 10426 - DNA, 600 bp, Homo sapiens
aagaagataaaaattaaagcaatcattattcatccaaacttcattttggaatcttatgtaaatgatattgcactttttcacttaaaaaaagcagtgaggtataatgactatattcagcctatttgcctaccttttgatgttttccaaatcctggacggaaacacaaagtgttttataagtggctggggaagaacaaaagaagaaggtaacgctacaaatattttacaagatgcagaagtgcattatatttctcgagagatgtgtaattctgagaggagttatgggggaataattcctaacacttcattttgtgcaggtgatgaagatggagcttttgatacttgcaggggtgacagtgggggaccattaatgtgctacttaccagaatataaaagattttttgtaatgggaattaccagttacggacatggctgtggtcgaagaggttttcctggtgtctatattgggccatccttctaccaaaagtggctgacagagcatttcttccatgcaagcactcaaggcatacttactataaatattttacgtggccagatcctcatagctttatgttttgtcatcttactagcaacaacataa

SEQ ID NO: 10427 - DNA, 336 bp, Homo sapiens; identical to SEQ ID NO: 5192

SEQ ID NO: 10428 - DNA, 509 bp, Homo sapiens; identical to SEQ ID NO: 5193

SEQ ID NO: 10429 - DNA, 486 bp, Homo sapiens; identical to SEQ ID NO: 5194

SEQ ID NO: 10430 - DNA, 417 bp, Homo sapiens; identical to SEQ ID NO: 5195

SEQ ID NO: 10431 - DNA, 600 bp, Homo sapiens
ctggaagagaagcctgatcccaatccattagggaaaagttcctctgcagagggagatggacccgagagtccaccagctgaaaaccaacctatgcaggctgcaatcaactgcccacacatcagtgaagctgaatgggtccgttggcacaaaggccgcttatgcctctactgtggttatcctggtcattttgccagagattgccctgtcaagcctcatcaggccctgcaggcgggaaacatccaggcctgccaaaacagcattgatcatactgtggttcttcgagagaagctgcccatccgcagtaatatcttccctctgatgctggaaactgtcgacggccatccacttattaatggacccataactaaggaaacatcacctgtccaagttcaaattggaaaccatgttgaagagctccagtttgacattattcatgcaccacgataccctctgattattggaatccattggcttgagacacatgacccaaacatagaatggagtacccgcactgtgtcctttctatcacgttattgtcactacaattgcttcaggcacaggtggaatagaagaaatcgtgatgaaataatttctgggtag

SEQ ID NO: 10432 - DNA, 498 bp, Homo sapiens; identical to SEQ ID NO: 5197

SEQ ID NO: 10433 - DNA, 279 bp, Homo sapiens; identical to SEQ ID NO: 5198

SEQ ID NO: 10434 - DNA, 600 bp, Homo sapiens
gttcttcaggagactgagctaaacattatgcgtcatgagaaatgttgtgagatgctcaagaacaagaatatatccaagagtaaaatggtcacgagggggaccgtctgtggctataatgaccaagggaaggatgcctgtcagggagattctggggggcccctggtctgtgaattaaatggcacatgggtccaggtggggattgtgagctggggcattggctgcggtcgcaaaggataccctggagtttacacagaagcctcgaaaaagcccaagacagcagaagcagacacctccagtgaactagcaaagaaaagcaaagaagtattcagaaaagagatgtcccagttcatcgtccagtgcctgaacccttaccggaaacctgactgcaaagtgggaagaattaccacaactgaagactttaaacatctggctcgcaagctgactcacggtgttatgaataaggagctgaagtactgtaagaatcctgaggacctggagtgcaatgagaatgtgaaacacaaaaccaaggagtacattaagaagtacatgcagaagtttggggctgtttacaaacccaaagaggacactgaattagagtga

SEQ ID NO: 10435 - DNA, 1400 bp, Homo sapiens
agaattctgaccatgaatactgcagagagaaaaatctcttgaaggcagttactgactttccatcaaatagtgctttaggtcaggccaatggtcacagacctaggacagacccacaaccttctgactttcccatgaagttcaatggggagagccaaagtccaggtgagagtggcacgattgtggtcaccttgaacaaccataagagaaagggcttttgttacggctgctgccaagggccggagcaccacaggaatgggggacccttgattccaaaaaagttccaacttaaccaacatagaaggataaaattatctcctcttatgatgtatgagaaattatccatgattagatttcggtacaggattctcagatcccagcacttcagaaccaaaagcaaggtttgcaagctaagaaaagcccagcgaagctgggtacagaaagtcactggggaccatcaagagacccgtagggagaacggtgagggtggcagttgcagcccatttccttccccagaacctaaagacccttcttgtcggcatcagccgtactttccagatatggacagcagtgctgtggtgaaggggacgaactctcatgtgcctgattgccacactaaaggaagctctttcttgggcaaggagcttagtttagacgaagcattccctgaccaacagaatggcagtgccacaaacgcctgggaccagtcatcctgttcttctcctaagtgggagtgtacagagctgattcatgacatccccttaccagaacatcgttctaataccatgttcatttcagaaactgaaagagaaattatgactctgggtcaggaaaatcagacaagttctgtcagtgatgacagagtaaaactgtcagtgtctggagcagatacatctgtgagtagcgtagatgggcctgtgtcccaaaaggctgttcaaaatgagaactcataccagatggaggaggatggatctctcaagcagagcattcttagttctgagttgctggaccacccttactgtaaaagtccactggaggctcccttggtgtgcagtggactcaaactagaaaatcaagtaggaggtggaaagaacagtcagaaagcctctccagtggatgatgaacagctgtcagtctgtctttctggattcctagatgaggttatgaagaagtatggcagtttggttccactcagtgaaaaagaagtccttggaagattaaaagatgtctttaatgaagacttttctaatagaaaaccatttatcaatagggaaataacaaactatcgggccagacatcaaaaatgtaacttccgtatcttctataataaacacatgctggatatggacgacctggcgactctggatggtcagaactggctgaatgaccagataaatctttga

SEQ ID NO: 10436 - DNA, 600 bp, Homo sapiens
acagcagtaataactgttatggatcaaaaacctgatgccttggcacaagcgtcagatccaagagcaggattcactaaacttgtgttgtggtcctccagaggcatgttttcacatactttgagaaacactgatttcatccaactcccctgttgtagaagtgaagatgctggagcagcccagggaagctggacactagaacacgcttcctgtctttcattaccccgtgacctttcctatcagcagcccgtggctgtgaattctttatccctgggaacttggctgccacatgtgattctgatggaagatggaatgaagccgttggctgagccagcaggtgcaagcttcaagggagtacgtgcatctgcaacagcagagcatgactttgtcttcctgagctgcctgctaaaaggaaaacaaacctggctgtatgtggtctactgtgtctccactgatatcagcagtgaccagggctctcattttaccagtcatgaaatgcagcaatgggtggagaccctggatatccactggcattcccacctgccatgcaaccctacagcagcagagctgattgagtggatgaatggactgttgaagcaataa

SEQ ID NO: 10437 - DNA, 414 bp, Homo sapiens; identical to SEQ ID NO: 5202

SEQ ID NO: 10438 - DNA, 600 bp, Homo sapiens
ccagttgtccaagacctggcccaggttgttgaagaggtcataggggttccacagtcttttcagaaactcatatttaaggttttactatgcccaaacagaaatcctgatgggaaaggaaaatgccttgctatatctgtaatttatcaacatgaaaacattacggttttaatcataaaattcaagagatttaacttgtttgccatcagttctccaccaaggaaagataagttgatattgccagcctttcatgagcttcctcctaacagtaggcttatcgcctttgcacattcctatagcagagaacatagatctgactgccttaagggataccaatttcctctctcttcaaattctatcatcctcagtgggcaaacagaagccagaaaatcctgccaaaaacctttcatctggtcagggagtggaggccgtgctgtgcgcgccctcttgcgggagccaccaggcaagcatcttaagaggggcaagcggaaaagggtgtctgtggatctgccctgttctggtggtttcaggcagccctgctttcttcccgcctggcagtcagcagggggggagagtcactcagagcaagatggagagccttag

SEQ ID NO: 10439 - DNA, 468 bp, Homo sapiens; identical to SEQ ID NO: 5204

SEQ ID NO: 10440 - DNA, 462 bp, Homo sapiens; identical to SEQ ID NO: 5205

SEQ ID NO: 10441 - DNA, 297 bp, Homo sapiens; identical to SEQ ID NO: 5206

SEQ ID NO: 10442 - DNA, 501 bp, Homo sapiens; identical to SEQ ID NO: 5207

SEQ ID NO: 10443 - DNA, 600 bp, Homo sapiens
caccctggtgaatgtcagcacctggcagcttgtgagaggcctgctgagtccgtgggcgcagaaagtccctcttccttccaggggtccagctttgttccactctctcatcttcccaaacaagctgcattatcagcactggggcagtgtgatggagggcagggcagctcccacacacacgacggctccccccatactgtggcttccctgcacacgacagctccccccccacacaccatggttccccccacacggtggctccccctcacacagcagctcccccgctacacggcggctcccccgacacggtggctccccacacgtacctttgggactggccttctcaaggaagcccagctccttgttattgagaatgaagtgtgcaatcactataagtatatttgtgctgagcatttggccagaggcactgacagttgccagggtgacagtggagggcctctggtttgcttcgagaaggacaaatacattttacaaggagtcacttcttggggtcttggctgtgcacgccccaataagcctggtgtctatgctcgtgtttcaaggtttgttacttggattgagggaatgatgagaaataattaa

SEQ ID NO: 10444 - DNA, 600 bp, Homo sapiens
ttaacagactccgtggactctgttcttggcaaggacacttggactaaagattgggacagtttacagcttgatcaacttgtctgttcctggcgagatctgtctgccacgaagggttttctcatcgtcgctctcttgagtgcagctggagctgctctggctaaagactctaaagataatcaggagctgacatataattttactattccttacatggtctatcttcagtccttcccagaaccctgcgtggggtctctcattcaccttgactgggtattgacagctgcccactgccccttaccagtgctactcatacccactgcttcttcccagagttcccatttaggggtggagactttggtggttcgtagggaaattgattattatgacataatcagttgttatctccctggtctgacatgcctcacaagaaaaacagtggcagcccatgttgatgtttcggctgccccagccatctgcaatgggaggttgcatggaatcttgtcctgggcagaaggaagtgtcaccctaggaagtgaaggattcttcacaggtgttcatagctatgcaagatggatcttgaaaattatggatacccactga

SEQ ID NO: 10445 - DNA, 600 bp, Homo sapiens
attaaggaatctgtggagcttcctctcactcatcctgaatattatgaagagatgggtataaagccccctaagggggtcattcactatggtccacctggcacagaatatgcactgtccatcatgtttattgatgaaattgacgcaattgggacaaaaagatatgactcaaattctggtagtgagagagaaattcagcgatcagcattggaactgttgaaccagtcagatggatttgattctaggggagatgtgaaagttatcatggccacaaaccaaatagaaactttggatccagcacttatcagaccaggctgcattgacaggaagattgagttcccccttcatgatgaaaatactaagaagcgcatctttcagattcacacaatcaggatgacgctggccaatgatgtaaacctggacgacttgatcgtgactagagatgacctctctggtgctgacatcaaggcaatctgtacagaagttggtctgatggcctcaagagaatgtagaatgcaagtaaaaaatgaagacttccaaaagtctaaagaaaatgttctttataagaaacaggaaggcacccctgagaggctctatctctag

SEQ ID NO: 10446 - DNA, 600 bp, Homo sapiens
ttagcactggtgtttttatattcgttctttagattagacatggccgtggtaaatgtcactgtggtcatgggaacgagaacattcagcaacatccactcggagagaaagcaagtgcagaaggtcattattcacaaagattacaaaccgccccagctcgacagtgacctctctctgcttctacttgccacaccagtgcaattcagcaatttcaaaatgcctgtctgcctgcaggaggaggagaggacctgggactggtgttggatggcacagtgggtaacgaccaatgggtatgaccaatatgatgacttaaacatgcacctggaaaagctgagagtggtgcagattagccggaaagaatgtgccaagaggataaaccagctgtccaggaacatgatttgtgcttggaacgaaccaggcaccaatggtatcttcaagggagacagtggggcacctctggtttgtgctatttatggaacccagagactcttccaagtgggtgtcttcagtgggggcataagatctggctccagggggagacctggattggggtctcaaatgctgctggccaccatgtttaccgttgataaacctaactgctaa

SEQ ID NO: 10447 - DNA, 588 bp, Homo sapiens; identical to SEQ ID NO: 5212

SEQ ID NO: 10448 - DNA, 1400 bp, Homo sapiens
ccggggggaggatgaggacgaggtctccgaggcccaggagactccagaccacgccatcttccggtggcttgccatctccttcgcctccgcacacctcaccttgaccgagccctaccgcggaggctgccaagcccaggactacaccggcggcatgggcatcgtcaacggggccaagtggaacccccggaccgggactatcaatgacttcagttacctgcataccaactgcctggagctctccttctacctgggctgtgacaagttccctcatgagagtgagctgccccgcgagtgggagaacaacaaggaggcgctgctcaccttcatggagcaggtgcaccgcggcattaagggggtggtgacggacgagcaaggcatccccattgccaacgccaccatctctgtgagtggcattaatcacggcgtgaagacagccagtggtggtgattactggcgaatcttgaacccgggtgagtaccgcgtgacagcccacgcggagggctacaccccgagcgccaagacctgcaatgttgactatgacatcggggccactcagtgcaacttcatcctggctcgctccaactggaagcgcatccgggagatcatggccatgaacgggaaccggcctatcccacacatagacccatcgcgccctatgaccccccaacagcgacgcctgcagcagcgacgcctacaacaccgcctgcggcttcgggcacagatgcggctgcggcgcctcaacgccaccaccaccctaggcccccacactgtgcctcccacgctgccccctgcccctgccaccaccctgagcactaccatagagccctggggcctcataccgccaaccaccgctggctgggaggagtcggagactgagacctacacagaggtggtgacagagtttgggaccgaggtggagcccgagtttgggaccaaggtggagcccgagtttgagacccagttggagcctgagtttgagacccagctggaacccgagtttgaggaagaggaggaggaggagaaagaggaggagatagccactggccaggcattccccttcacaacagtagagacctacacagtgaactttggggacttctgagatcagcgtcctaccaagaccccagcccaactcaagctacagcagcagcacttcccaagcctgctgaccacagtcacatcacccatcagcacatggaaggcccctggtatggacactgaaaggaagggctggtcctgcccctttgagggggtgcaaacatgactgggacctaagagccagaggctgtgtagaggctcctgctccacctgccagtctcgtaagagatggggttgctgcagtgttggagtaggggcagagggagggagccaaggtcactccaataaaacaagctcatggc

SEQ ID NO: 10449 - DNA, 1400 bp, Homo sapiens
cctgttttgcctttagttacaggtcctgccttattttcatctcaccatgcacagaactagggagccttaggaagtgccaggttttcactgtcagatttgccaagtcacagaggcgcagccagccctgaagtgcctgtctggctgctgtggcattgtgtgggcatgtggccaggcagatggcatctcattactgtgctctcgccatggcccagtcttttcattctctggcagtgagggtttctgtgctgtcagacttcattgttattctgtgacttgctggaggttggcagtggcctttgtcaaacacactgagaagatggaagggccagcacttaagagcagaactgtacccttagagaaacggacagaggcgagtggcaaacttcagacggttccaatggtcttgcagtttgaaatgtgatgttctaccattggttttgagtacgtgaatacttcctgtcctactgtttcccctaccctattctcaccttctctccgcccacatcctcaccaagagattgtgtgggacatgaccttgaaatgctggcgatgatccacactgggatatcatcgctggcgactgcactctcaggagcccaaaatcaggagtgaaattgccacttctagtccccttatttcctatggaaacaacgccttccgcacccctagcacctgccgtcctcactgtaaagcttcatcaggatcgtccaccgtgtatattatacgcttcagatcatgttgcttatattgttgctgcaatgaccatcgttttcactttgctggtaaccacttgattgctgacagctacagtcaatgaacctgctgatgactttttttaatgtagtacaacagtgacagttatgacaggcttaccttggaagagttgtcatttttactgccaattttttggatgaagatgtttttataaacctttcaaaatggtctgcaaacagagcaggaattgcacaattaactcaataatgctgtgtgttctcaagaagctcccttagtgaggccgatcttaagatggccgattctgcccgttgaaggcatcctgggaaagaaaacaagcatcccagcgggcatctcaccacgacttctcctggagtcctcacacggtcactgacaactacagtcagttttaggaactagagtgccgtatcatcagacttaccctgtcctgccccaccttccctgctaacatcgaggtgtgtgcagttaccttctgagcttggaacaagcagactggaattttcctctgctacctcttgtgtataaaatcttgtttataaaatttcaaaaggaagtagatacactagggaagaaccttaattctaaatttggttcatgtgtggcaaagttcttagcttctaagagtataaaataaatttttcaaaaac

SEQ ID NO: 10450 - DNA, 1349 bp, Homo sapiens; identical to SEQ ID NO: 5215

SEQ ID NO: 10451 - DNA, 309 bp, Homo sapiens; identical to SEQ ID NO: 5216

SEQ ID NO: 10452 - DNA, 785 bp, Homo sapiens; identical to SEQ ID NO: 5217

SEQ ID NO: 10453 - DNA, 600 bp, Homo sapiens
aaggatcagggtcagtgtggctcttgttgggcttttagtgcaactggtgctctggaagggcagatgttctggaaaacaggcaaacttatctcactgaatgagcagaatctggtagactgctctgggcctcaaggcaatgagggctgcaatggtggcttcatggataatcccttccggtatgttcaggagaacggaggcctggactctgaggcatcctatccatatgaaggaaaggttaaaacctgtaggtacaatcccaagtattctgctgctaatgacactggctttgtggacatcccttcacaggagaaggacctggcgaaggcagtggcaactgtggggcccatctctgttgctgctggtgcaagccatgtctccttccagttctataaaaaaggaatttattttgagccacgctgtgaccccgaaggtctggatcatgctatgctgctggttggctacagctatgaaggagcagactcagataacaataaatattggctgggtaaaaactggggcatggatggctacataaagatggccaaagaccggaggaacaactgtggaattgccacagcagccagctaccccactgtgtga

SEQ ID NO: 10454 - DNA, 501 bp, Homo sapiens; identical to SEQ ID NO: 5219

SEQ ID NO: 10455 - DNA, 600 bp, Homo sapiens
tcggatcccagagacgagaagctggccctatacctggccgaggtggagaagcaggacaagtatctgcggcagaggaataagtaccgattccacatcattccagacggcaactgcctctaccgagctgtcagcaagacggtgtatggggaccagagcctgcaccgggagttgagggagcagacggtgcactacatcgccgaccatctcgaccacttcagccccctgattgagggcgacgtgggggagtttatcatcgctgctgcccaagacggggcatgggccgggtacccggagttgctggccatggggcagatgctgaatgtgaatatccatttaactactggagggaggctggagagtcccacggtgtctaccatgattcattatttgggcccagaggattccctgaggcctagtatttggctcagttggctcagtaacggacactatgatgctgtatttgatcactcctatcctaacccagagtacgacaactggtgcaaacaaactcaagtgcaaaggaaacgcgacgaagaacttgccaaatctatggccatatccttgtctaaaatgtatattgaacaaaatgcatgctcttga

SEQ ID NO: 10456 - DNA, 600 bp, Homo sapiens
catcacgtttgtgcccggaaattggccatggggcagtccttacaccacaaagatgctataaatcagggtgccatggaactcatcaacagctcctacaatgtagcagaattcaggatcgatatgcagcaatgcagtcctgaccttttcaccatggaatcagtaacaccattgagaccacttttcctggattattatcctggcccacgatattggattcttattggaaaaacaattggtgttgatggacagagacagaagagtactacatctacattcagcttggaaaagagaatgagtgaattagtgctcggcagctacaacaggggctatttaaagccaacccatgctaaaatctgtttctaccccaccccatgtggaccaagccaaatgccggccttgacctaccaaccttttcctctcctgttcatttgccagtcaggtaccagaggattagaagtgattttagcttcgttttggcagtcacatcttgctgataaccagggaactgcctgcatctttgaaacggatattctctcctgtgtttctttaaaaatcgctctccgatcttgtaataccaaagcacctcgattttctttttaa

SEQ ID NO: 10457 - DNA, 402 bp, Homo sapiens; identical to SEQ ID NO: 5222

SEQ ID NO: 10458 - DNA, 600 bp, Homo sapiens
gaccttaaagtcaccattgggaagatcaattaccagtttgcaggatacagtcaagattcacaagaattttttctgttcctaatggatggtctccgtgaagatctaaataaaactgataatcggaagacatataaagaagaaaataatgatcatctcaatgactttaaagctgcagaacatgcctggcagaaacacaagcggctctatgagtctattattgttgcactttttcaggagctcgacgggattcttaaaaaagaaatctggaagttaccacctgtgcttttagtgcatctgaaacatttttcctacaatggcaggtggaaacaaaaattacagacatctgtggacttcccgttagaaaatcttgccttgtcacagtatgttattggtccaaagaacaatttgaagaactataatttgttttctgtttcagatcactgcggtgggctggatggaggccattacacagcctactgtaaaaatgcagcaaaacagcggtggtttaagtttgatgatcatgaagtttctgatatctctgtttcttctgtgaaatcttcagcagcttatatcctcttttatacttctttgggaccatga

SEQ ID NO: 10459 - DNA, 600 bp, Homo sapiens
gatctgctggcaactggctgctcagtcctgctcaatcacaaggtgcatgccatgagaggggtgctgatggatgacgtggatcccctggtcacagtgatgaaggtggaaaaggtcccccaggagacctatgccaatactgggaggttggataatcaaattcaggaaattaaggaatctgtggagcttcctctcacccatgctgaacattatgaagagatgggtataaagcctcctaagggggtcattctctatggtccacctggcatagttaaaaccttgctagccaaagcggtagcaaaccaaacctcagccactttcttgaaagtggttggctctgaacttattcagaagtacctaggtgatgggcccaaacttgtacgggaattgtttcaagttgctggagaacatgcaccatccatcgtgtttactgatgaaactgacgccattgggacaaaaagatatgactcaaattctggtgaagctggtctgatggccttaagagaacgtagaatgaaagcaacaaatgaagacttcaaaaaatctaaagaaaatgttctttataagaaacaggaaggcacccctgaggggctgtctctctag

SEQ ID NO: 10460 - DNA, 423 bp, Homo sapiens; identical to SEQ ID NO: 5225

SEQ ID NO: 10461 - DNA, 600 bp, Homo sapiens
atgaaggtggaaaagaccccccaggagacctgtgttgatactggggggttggacagccaaattcaggaaattaaggaaatcattctgaatattatgaagagatggaaatacctacatgatgggcccaaactcatatgggaattgtttctagttgctgaagaacatgcaccttccatcatgtttattgatgaaattgatgctattaggacaaaaagatgtgactcaaattctgatagtgagagagaaattcagcaaataatgctggaaatgttgaaccagttggatggatttgattcaaggggagatgtgaaagttatcatatccacaagccgaatagaaactttggatctagcacttatcagaccaggctacactgacaggaagctcaagttccccctgcctgatgaaaagactaagaagcacatctttcagatgcacacaagcagcatgacactggccaatgatgcaatctgcacagaagctagtctgatggccttaaaagaacatggaatgaaagtaacaaatgaaaacttcaaaaaatctcaagaaaatgttctttataaagaacaggaagacacccccaaggggctctgtctctag

SEQ ID NO: 10462 - DNA, 600 bp, Homo sapiens
gtggagatatttgtgataggggtggtgaagaaaaatgatcccaactttgaaatattccacaaagaaatgaatctaattgctactgacccagagcatgtttaccagtttgatgatttctttaccctgcaagacaccctgaagcaaaaattgtttcaaaaaatttgtgaggattttgattcctatctcgttcaaatttttggttcatcgtcacctcaacctggatttgggatgtcaggggaagaactcagtgaatctactccagagcctcaaaaagaaatttctgagtcattgagtgtcaccagagaccaggatgaagatgataaggctccagagccaacgtgggctgatgatctgcctgccactacctcatctgaggccaccaccacccccaggccactgctcagcacccctgtggatggggcagaggatcctagatgtttggaagccttgaagcctggaaactgtggtgaatatgtggttcgatggtattatgacaaacaggtcaactcttgtgcccgattttggttcagtggctgtaatggctcaggaaatagattcaacagtgaaaaggaatgtcaagaaacctgcattcaaggatga

SEQ ID NO: 10463 - DNA, 1400 bp, Homo sapiens
gaaacattattttctttggcaaattctgttctccttaagtggcatagcccatgttaagtcctccctgacttttctgtggatgccgatttctgtaaactctgcatccagagattcattttctagatacaataaattgctaatgttgctggatcaggaagccgccagtacttgtcatatgtagccttcacacagatagaccttttttttttttccaattctatcttttgtttccttttttcccataagacaatgacatacgcttttaatgaaaaggaatcacgttagaggaaaaatatttattcattatttgtcaaattgtccggggtagttggcagaaatacagtcttccacaaagaaaattcctataaggaagatttggaagctcttcttcccagcactatgctttccttctttgggatagagaatgttccagacattctcgcttccctgaaagactgaagaaagtgtagtgcatgggacccacgaaactgccctggctccagtgaaacttgggcacatgctcaggctactataggtccagaagtccttatgttaagccctggcaggcaggtgtttattaaaattctgaattttggggattttcaaaagataatattttacatacactgtatgttatagaacttcatggatcagatctggggcagcaccctataaatcaacaccttaatatgctgcaacaaaatgtagaatattcagacaaaatggatacataaagactaagtagcccataaggggtcaaaatttgctgccaaatgcgtatgccaccaacttacaaaaacacttcgttcgcagagcttttcagattgtggaatgttggataaggaattatagacctctagtagctgaaatgcaagaccccaagaggaagttcagatcttaatataaattcactttcatttttgatagctgtcccatctggtcatttggttggcactagactggtggcaggggcttctagctgacttgcacagggattctcacaatagccgatatcagaatttgtgttgaaggaacttgtctcttcatctaatatgatagcgggaaaaggagaggaaactactgcctttagaaaatataagtaaagtgattaaagtgctcacgttaccttgacacatagtttttcagtctatgggtttagttactttagatggcaagcatgtaacttatattaatagtaatttgtaaagttggttggataagctatccgtgttgcaggttcatggattacttctctataaaaaatatgtatttaccaaaaattttgtgacattccttctcccatctcttccttgacctgcattgtaaataggttcttcttgttctgagattcaatattgaatttttcctatgctattgacaataaaatattattgaactac

SEQ ID NO: 10464 - DNA, 600 bp, Homo sapiens
cggcgggtctctctggggatggcaagatgcgaggggtgctcctggtgctgctcggccttctctattcttccaccagttgtggcgtccagaaagcttccgttttctacggtcctgaccccaaggagggcttggtcagcagcatggagttcccgtgggtggtgtcgctgcaggactcccagtacacacacctggctttcggctgcatcctgagcgagttctgggtcctcagcatcgcatccgccattcagaacaggaaggacattgtcgttatagtgggtataagtaacatggatcctagcaagattgctcacacagagtatccagtcaataccatcatcatccatgaggactttgataacaactccatgagcaacaacatagccctcctgaagacagacacagcgatgcattttggcaacctggtccagtccatctgcttcctcggcagaatgctgcatacaccaccagtcttgcagaactgctgggtgtcaggatggaatcccacatctgcagaaatcacatgacgatgagtgtcctgaggaaaatcttcgtgaaagatcttgacatgtgtcccctatacaaactccagaagacagaatg

SEQ ID NO: 10465 - DNA, 540 bp, Homo sapiens; identical to SEQ ID NO: 5230

SEQ ID NO: 10466 - DNA, 1400 bp, Homo sapiens
tattaaaggctaaaaacaataccaccaataaatcatcaaacaaaccgtacaaagtaattctctctttgggaggctcctttcgtgatagagggacatgggtggaattgacaatgaaacttagatgaacaaggtccatgttattttaggtggtagaacagggtagagtcatgtcattatttgctggtggaagacactatttaccaggtgttctttgctgaataaatcattaaacatttttaaaaatccaacaatccactttattttgtgtcattgacaaaaggatcttttaaatcagaaggtttcaatgcaatttttggtttggctgtttgaataatggttatgtactgttataattgtagacattttctcacgtctaccaggaattgaagtgtaaaactaaaatatttttcataatgcctctgccgtgcagaaggaatgataatccttttgtatacttctttaattttattgtaaaatgtgtaatgacttttacctatatgctgtgggcaggtcctcagtaaaatctattgagtcaatttctagtattaacaggcttttgcttgctatctaagtgtttcaaattatgggaagtgtgagacactggaaggcaagaaaattaacaataatggcatgtgatagcaaaattgtatttcacttattcctgtgaatatttcttgttggtaccaatggtactgtacaaagtgaatgttatagccacaacattctcttgaaaagaacactgtcaagaagtgggaaattgctgtcaggcatttcattgttgtttttaaacttttttaaaagaaatactggttttgcaatatagagatcatgtggtaaagaattttaataagatcttatactaaaaagccttaaatcaatttattgagattcaaaaaatactattataattaattacatcccatacatataggcaaactcatttaaaaaataaaactaattttggtaaaagtacatggcctttgtttttaaaatacataattttaaaataaatcacttgtcatgataaagtccaaaaagaagttatcattcaacattcaactaaggttggagctaagaatttactaatacaaaaaaagttaaaattttttggaccatatatatcttgacagtgtaacttttaagtaggttcatttccatttgcacagaaagtttctgtctttaggaaactgaaaatgaaatactgtggatgctatgactgtttgtcttgtatgtaaataggaaattaataagctgcctattgagtggtatagctgtatgcttacccaaaaaagggaacactgtggttatgacttgtattataaactttctgtagttaataaagttgttatttttataaccatgattatattattattattaataaaatattttatcaaaat

SEQ ID NO: 10467 - DNA, 600 bp, Homo sapiens
actattgacatctccaagctgcccatttcctacaaaaccaacacacccaaggaggaacacctgctgcaggtggcagacaacttctcccgccagtacagccatctgtgcccggaccgcgtgcccctcttcctgcaccccctgaacgagtgtgaagtgcccaagttcgtgagcacaaccctccggcccacactgatgccctaccccgagctctacaactgggacagctgtgcccagtttgtctccgacttcctcaccatggtgcccctgcctgaccctctcaagccgccctcgcacctgtactcctcgaccactgtgctcaagtaccagaaggggaactgctttgacttcagtacgctgctctgctccatgcttatcggctctggctatgatgcttactgcgtcaacggctacggctcgctggacctgtgccacatggacctgacgcgggaggtgtgcccactcactgtgaagcccaaggagaaagcaggcgaatactccctctatggtggtggcactcacgcgctagaattaccgaggagcctcatcttacgagaaaaagaactgtctgtggactgggaaacaaagtcttacgctctctga

SEQ ID NO: 10468 - DNA, 414 bp, Homo sapiens; identical to SEQ ID NO: 5233

SEQ ID NO: 10469 - DNA, 600 bp, Homo sapiens
actgatgtagaaggaaggattctttcacttttattatttattttggtaattaaatttacattaatttaatatgttaaatattttagtaccttttgctttttcacatttcatttgaaccattaacatgcatctttggacatcaatgtccttgtctttttggcccaattgttttagtcaccagaaactttttcaggacatgctatcttctatttgtttgacatacagaatcatatgtacctgaatttattactaactctgggattttcattttaagtaacaactacctattatgtgaggacagttgtttatgtgattggttgttctaacttgccctataaatgtgcattcatcaaaggagaagtttttaaatccaaaaacaaataaaacccgattcatattagacaactcttcaggttccacatggtatagttactgagtccactttattctggggcactgtgggagggactatatcaaagtagaagaccctgattgcccgtaggttaagaggtcagcattgaggtcacctgctttccaaatctggcagatgtttaatatgatatatgtatatttgatttattacttcccaatatttctaga

SEQ ID NO: 10470 - DNA, 600 bp, Homo sapiens
aatggttcaaaacaatgggggacctatgcagaagctataagtgcatgtggtcaacacaggttatgtagattccaaggatgcaaatatcttagtgacataaatataacaagatataacataaattgcagagagaatagggcttgcaatgaacttttccattgtcagtgtgatcctggttatgcacctccagattgtgagccgccaatatcatcaccaggaggagtgtttaatgatggatttaggcttacggtagaaaaaagtgtacccttgtttccaaaacgacgtgctgctcctaaaaacaatggtcttttgatcagtttctacatttctttttcacctttgctcattttaattgctattgttagtcttaaatggaataaaatgaagagattttggagcaaaggcggaacaataagcagcatatctatctcagaagacagcagcaggaacaacaacgagtcacagagttaaagtagcccaagtgataacttcgaagccatagggtggagaaaggatattaccaagaaactcaccattaactggcctgatctaacaatgaaaaaaaaaagttttctctcattttgttatggcttaaagctt

SEQ ID NO: 10471 - DNA, 25 bp, Probe Sequence
tgtgtgtgtgtgtgtgtgtatatat

SEQ ID NO: 10472 - DNA, 25 bp, Probe Sequence
gtgtgtgtgtgtgtgtgtgtatata

SEQ ID NO: 10473 - DNA, 25 bp, Probe Sequence
tgtgtgtgtgtgtgtgtgtgtatat

SEQ ID NO: 10474 - DNA, 25 bp, Probe Sequence
ccatcaagagactgagtacaagttg

SEQ ID NO: 10475 - DNA, 25 bp, Probe Sequence
gagactgagtacaagttgttcctta

SEQ ID NO: 10476 - DNA, 25 bp, Probe Sequence
atcaagagactgagtacaagttgtt

SEQ ID NO: 10477 - DNA, 25 bp, Probe Sequence
tcaagagactgagtacaagttgttc

SEQ ID NO: 10478 - DNA, 25 bp, Probe Sequence
agactgagtacaagttgttccttaa

SEQ ID NO: 10479 - DNA, 25 bp, Probe Sequence
catcaagagactgagtacaagttgt

SEQ ID NO: 10480 - DNA, 25 bp, Probe Sequence
agagactgagtacaagttgttcctt

SEQ ID NO: 10481 - DNA, 25 bp, Probe Sequence
aagagactgagtacaagttgttcct

SEQ ID NO: 10482 - DNA, 25 bp, Probe Sequence
caagagactgagtacaagttgttcc

SEQ ID NO: 10483 - DNA, 25 bp, Probe Sequence
ttgtgtgtgtgtgtgtgtgtgtata

SEQ ID NO: 10484 - DNA, 25 bp, Probe Sequence
tattgtgtgtgtgtgtgtgtgtgta

SEQ ID NO: 10485 - DNA, 25 bp, Probe Sequence
cagtttatttgttgagagtgtgacc

SEQ ID NO: 10486 - DNA, 25 bp, Probe Sequence
tctgaacaccataggtagaatgtaa

SEQ ID NO: 10487 - DNA, 25 bp, Probe Sequence
agtttatttgttgagagtgtgacca

SEQ ID NO: 10488 - DNA, 25 bp, Probe Sequence
ctggaagcatttgtttctactttga

SEQ ID NO: 10489 - DNA, 25 bp, Probe Sequence
aatgacactgttcaggaatcggaat

SEQ ID NO: 10490 - DNA, 25 bp, Probe Sequence
tggaagcatttgtttctactttgat

SEQ ID NO: 10491 - DNA, 25 bp, Probe Sequence
cctggaagcatttgtttctactttg

SEQ ID NO: 10492 - DNA, 25 bp, Probe Sequence
gtttatttgttgagagtgtgaccaa

SEQ ID NO: 10493 - DNA, 25 bp, Probe Sequence
acctggaagcatttgtttctacttt

SEQ ID NO: 10494 - DNA, 25 bp, Probe Sequence
tttcacctggaagcatttgtttcta

SEQ ID NO: 10495 - DNA, 25 bp, Probe Sequence
aacctcgtctctaccagatatacaa

SEQ ID NO: 10496 - DNA, 25 bp, Probe Sequence
catcaagtgtatcatattgccaagt

SEQ ID NO: 10497 - DNA, 25 bp, Probe Sequence
ctcacacttgtaatcctagcacttg

SEQ ID NO: 10498 - DNA, 25 bp, Probe Sequence
acatcaagtgtatcatattgccaag

SEQ ID NO: 10499 - DNA, 25 bp, Probe Sequence
caagtgtatcatattgccaagtacg

SEQ ID NO: 10500 - DNA, 25 bp, Probe Sequence
aagtgtatcatattgccaagtacgc

SEQ ID NO: 10501 - DNA, 25 bp, Probe Sequence
tcaagtgtatcatattgccaagtac

SEQ ID NO: 10502 - DNA, 25 bp, Probe Sequence
atcaagtgtatcatattgccaagta

SEQ ID NO: 10503 - DNA, 25 bp, Probe Sequence
tcacacttgtaatcctagcacttgt

SEQ ID NO: 10504 - DNA, 25 bp, Probe Sequence
gaaacctcgtctctaccagatatac

SEQ ID NO: 10505 - DNA, 25 bp, Probe Sequence
tgaaacctcgtctctaccagatata

SEQ ID NO: 10506 - DNA, 25 bp, Probe Sequence
acctcgtctctaccagatatacaaa

SEQ ID NO: 10507 - DNA, 25 bp, Probe Sequence
aaacctcgtctctaccagatataca

SEQ ID NO: 10508 - DNA, 25 bp, Probe Sequence
ctacatcctactgtgcgtgtatata

SEQ ID NO: 10509 - DNA, 25 bp, Probe Sequence
gtacatcaagtgtatcatattgcca

SEQ ID NO: 10510 - DNA, 25 bp, Probe Sequence
gattacctgatgatgggagttcaag

SEQ ID NO: 10511 - DNA, 25 bp, Probe Sequence
gtgaaacctcgtctctaccagatat

SEQ ID NO: 10512 - DNA, 25 bp, Probe Sequence
agtgtatcatattgccaagtacgcc

SEQ ID NO: 10513 - DNA, 25 bp, Probe Sequence
agtacatcaagtgtatcatattgcc

SEQ ID NO: 10514 - DNA, 25 bp, Probe Sequence
ggcagtacatcaagtgtatcatatt

SEQ ID NO: 10515 - DNA, 25 bp, Probe Sequence
attacctgatgatgggagttcaaga

SEQ ID NO: 10516 - DNA, 25 bp, Probe Sequence
tacatcaagtgtatcatattgccaa

SEQ ID NO: 10517 - DNA, 25 bp, Probe Sequence
acacttgtaatcctagcacttgtgg

SEQ ID NO: 10518 - DNA, 25 bp, Probe Sequence
gctacatcctactgtgcgtgtatat

SEQ ID NO: 10519 - DNA, 25 bp, Probe Sequence
atgacttatggactttctacttggc

SEQ ID NO: 10520 - DNA, 25 bp, Probe Sequence
gacttatggactttctacttggcag

SEQ ID NO: 10521 - DNA, 25 bp, Probe Sequence
tgacttatggactttctacttggca

SEQ ID NO: 10522 - DNA, 25 bp, Probe Sequence
catgacttatggactttctacttgg

SEQ ID NO: 10523 - DNA, 25 bp, Probe Sequence
acttatggactttctacttggcagt

SEQ ID NO: 10524 - DNA, 25 bp, Probe Sequence
cttatggactttctacttggcagta

SEQ ID NO: 10525 - DNA, 25 bp, Probe Sequence
ttatggactttctacttggcagtac

SEQ ID NO: 10526 - DNA, 25 bp, Probe Sequence
ccagtacatgacttatggactttct

SEQ ID NO: 10527 - DNA, 25 bp, Probe Sequence
gtacatgacttatggactttctact

SEQ ID NO: 10528 - DNA, 25 bp, Probe Sequence
ataatgcccagtacatgacttatgg

SEQ ID NO: 10529 - DNA, 25 bp, Probe Sequence
tatggactttctacttggcagtaca

SEQ ID NO: 10530 - DNA, 25 bp, Probe Sequence
cagtacatgacttatggactttcta

SEQ ID NO: 10531 - DNA, 25 bp, Probe Sequence
agtacatgacttatggactttctac

SEQ ID NO: 10532 - DNA, 25 bp, Probe Sequence
taatgcccagtacatgacttatgga

SEQ ID NO: 10533 - DNA, 25 bp, Probe Sequence
atggactttctacttggcagtacat

SEQ ID NO: 10534 - DNA, 25 bp, Probe Sequence
tacatgacttatggactttctactt

SEQ ID NO: 10535 - DNA, 25 bp, Probe Sequence
tggactttctacttggcagtacatc

SEQ ID NO: 10536 - DNA, 25 bp, Probe Sequence
aatgcccagtacatgacttatggac

SEQ ID NO: 10537 - DNA, 25 bp, Probe Sequence
gcataatgcccagtacatgacttat

SEQ ID NO: 10538 - DNA, 25 bp, Probe Sequence
cataatgcccagtacatgacttatg

SEQ ID NO: 10539 - DNA, 25 bp, Probe Sequence
agcgaaacgccatctcaaaacaaaa

SEQ ID NO: 10540 - DNA, 25 bp, Probe Sequence
gagcgaaacgccatctcaaaacaaa

SEQ ID NO: 10541 - DNA, 25 bp, Probe Sequence
atggacttctactcgcagtacatta

SEQ ID NO: 10542 - DNA, 25 bp, Probe Sequence
tatggacttctactcgcagtacatt

SEQ ID NO: 10543 - DNA, 25 bp, Probe Sequence
ctatggacttctactcgcagtacat

SEQ ID NO: 10544 - DNA, 25 bp, Probe Sequence
tggacttctactcgcagtacattac

SEQ ID NO: 10545 - DNA, 25 bp, Probe Sequence
gactatggacttctactcgcagtac

SEQ ID NO: 10546 - DNA, 25 bp, Probe Sequence
actatggacttctactcgcagtaca

SEQ ID NO: 10547 - DNA, 25 bp, Probe Sequence
tcgcagtacattacgtattagtcat

SEQ ID NO: 10548 - DNA, 25 bp, Probe Sequence
ctcgcagtacattacgtattagtca

SEQ ID NO: 10549 - DNA, 25 bp, Probe Sequence
cagtacattacgtattagtcatcgc

SEQ ID NO: 10550 - DNA, 25 bp, Probe Sequence
gcagtacattacgtattagtcatcg

SEQ ID NO: 10551 - DNA, 25 bp, Probe Sequence
cgcagtacattacgtattagtcatc

SEQ ID NO: 10552 - DNA, 25 bp, Probe Sequence
agtacattacgtattagtcatcgct

SEQ ID NO: 10553 - DNA, 25 bp, Probe Sequence
ggactatggacttctactcgcagta

SEQ ID NO: 10554 - DNA, 25 bp, Probe Sequence
caggactatggacttctactcgcag

SEQ ID NO: 10555 - DNA, 25 bp, Probe Sequence
ggacttctactcgcagtacattacg

SEQ ID NO: 10556 - DNA, 25 bp, Probe Sequence
tgtacggtgggaggtcctatataag

SEQ ID NO: 10557 - DNA, 25 bp, Probe Sequence
actcgcagtacattacgtattagtc

SEQ ID NO: 10558 - DNA, 25 bp, Probe Sequence
gtgtacggtgggaggtcctatataa

SEQ ID NO: 10559 - DNA, 25 bp, Probe Sequence
gacttctactcgcagtacattacgt

SEQ ID NO: 10560 - DNA, 25 bp, Probe Sequence
ttacgtattagtcatcgctattacc

SEQ ID NO: 10561 - DNA, 25 bp, Probe Sequence
gtacattacgtattagtcatcgcta

SEQ ID NO: 10562 - DNA, 25 bp, Probe Sequence
acattacgtattagtcatcgctatt

SEQ ID NO: 10563 - DNA, 25 bp, Probe Sequence
aggactatggacttctactcgcagt

SEQ ID NO: 10564 - DNA, 25 bp, Probe Sequence
cttctactcgcagtacattacgtat

SEQ ID NO: 10565 - DNA, 25 bp, Probe Sequence
tggaggagttaagtatgacattgac

SEQ ID NO: 10566 - DNA, 25 bp, Probe Sequence
ggaggagttaagtatgacattgacc

SEQ ID NO: 10567 - DNA, 25 bp, Probe Sequence
ttggaggagttaagtatgacattga

SEQ ID NO: 10568 - DNA, 25 bp, Probe Sequence
gcttggaggagttaagtatgacatt

SEQ ID NO: 10569 - DNA, 25 bp, Probe Sequence
cttggaggagttaagtatgacattg

SEQ ID NO: 10570 - DNA, 25 bp, Probe Sequence
gagttaagtatgacattgacctgcc

SEQ ID NO: 10571 - DNA, 25 bp, Probe Sequence
ggagttaagtatgacattgacctgc

SEQ ID NO: 10572 - DNA, 25 bp, Probe Sequence
cctcagttgtcctattccttcctag

SEQ ID NO: 10573 - DNA, 25 bp, Probe Sequence
aggagttaagtatgacattgacctg

SEQ ID NO: 10574 - DNA, 25 bp, Probe Sequence
gaggagttaagtatgacattgacct

SEQ ID NO: 10575 - DNA, 25 bp, Probe Sequence
ctcagttgtcctattccttcctagc

SEQ ID NO: 10576 - DNA, 25 bp, Probe Sequence
agcttggaggagttaagtatgacat

SEQ ID NO: 10577 - DNA, 25 bp, Probe Sequence
agttgtcctattccttcctagcttc

SEQ ID NO: 10578 - DNA, 25 bp, Probe Sequence
cagttgtcctattccttcctagctt

SEQ ID NO: 10579 - DNA, 25 bp, Probe Sequence
gttgtcctattccttcctagcttcc

SEQ ID NO: 10580 - DNA, 25 bp, Probe Sequence
tcagttgtcctattccttcctagct

SEQ ID NO: 10581 - DNA, 25 bp, Probe Sequence
aacaagaaggtctgcattgaatctg

SEQ ID NO: 10582 - DNA, 25 bp, Probe Sequence
caacaagaaggtctgcattgaatct

SEQ ID NO: 10583 - DNA, 25 bp, Probe Sequence
caagaaggtctgcattgaatctgag

SEQ ID NO: 10584 - DNA, 25 bp, Probe Sequence
ttaagtatgacattgacctgcccaa

SEQ ID NO: 10585 - DNA, 25 bp, Probe Sequence
agttaagtatgacattgacctgccc

SEQ ID NO: 10586 - DNA, 25 bp, Probe Sequence
acaagaaggtctgcattgaatctga

SEQ ID NO: 10587 - DNA, 25 bp, Probe Sequence
atctacgggatctttccattatgtc

SEQ ID NO: 10588 - DNA, 25 bp, Probe Sequence
ccctcagttgtcctattccttccta

SEQ ID NO: 10589 - DNA, 25 bp, Probe Sequence
gagagtagagtgcttagttgaacag

SEQ ID NO: 10590 - DNA, 25 bp, Probe Sequence
ctgagagtagagtgcttagttgaac

SEQ ID NO: 10591 - DNA, 25 bp, Probe Sequence
tgagagtagagtgcttagttgaaca

SEQ ID NO: 10592 - DNA, 25 bp, Probe Sequence
atatagaggagacaagtcgtaacat

SEQ ID NO: 10593 - DNA, 25 bp, Probe Sequence
actgagagtagagtgcttagttgaa

SEQ ID NO: 10594 - DNA, 25 bp, Probe Sequence
agagtagagtgcttagttgaacagg

SEQ ID NO: 10595 - DNA, 25 bp, Probe Sequence
tatatagaggagacaagtcgtaaca

SEQ ID NO: 10596 - DNA, 25 bp, Probe Sequence
ttaacatatctgaacacacaatagc

SEQ ID NO: 10597 - DNA, 25 bp, Probe Sequence
ggctttaacatatctgaacacacaa

SEQ ID NO: 10598 - DNA, 25 bp, Probe Sequence
tggctttaacatatctgaacacaca

SEQ ID NO: 10599 - DNA, 25 bp, Probe Sequence
tagccctaaacctcaacagttaaat

SEQ ID NO: 10600 - DNA, 25 bp, Probe Sequence
taacatatctgaacacacaatagct

SEQ ID NO: 10601 - DNA, 25 bp, Probe Sequence
ttatatagaggagacaagtcgtaac

SEQ ID NO: 10602 - DNA, 25 bp, Probe Sequence
ttagccctaaacctcaacagttaaa

SEQ ID NO: 10603 - DNA, 25 bp, Probe Sequence
ccctaaacctcaacagttaaatcaa

SEQ ID NO: 10604 - DNA, 25 bp, Probe Sequence
cttagccctaaacctcaacagttaa

SEQ ID NO: 10605 - DNA, 25 bp, Probe Sequence
gtaaactgagagtagagtgcttagt

SEQ ID NO: 10606 - DNA, 25 bp, Probe Sequence
agccctaaacctcaacagttaaatc

SEQ ID NO: 10607 - DNA, 25 bp, Probe Sequence
acgcatttatatagaggagacaagt

SEQ ID NO: 10608 - DNA, 25 bp, Probe Sequence
agtaaactgagagtagagtgcttag

SEQ ID NO: 10609 - DNA, 25 bp, Probe Sequence
gccctaaacctcaacagttaaatca

SEQ ID NO: 10610 - DNA, 25 bp, Probe Sequence
gcatttatatagaggagacaagtcg

SEQ ID NO: 10611 - DNA, 25 bp, Probe Sequence
cgcatttatatagaggagacaagtc

SEQ ID NO: 10612 - DNA, 25 bp, Probe Sequence
gctttaacatatctgaacacacaat

SEQ ID NO: 10613 - DNA, 25 bp, Probe Sequence
gatgagtaagaagattcctgctaca

SEQ ID NO: 10614 - DNA, 25 bp, Probe Sequence
tgagtaagaagattcctgctacaac

SEQ ID NO: 10615 - DNA, 25 bp, Probe Sequence
atgagtaagaagattcctgctacaa

SEQ ID NO: 10616 - DNA, 25 bp, Probe Sequence
gagtaagaagattcctgctacaact

SEQ ID NO: 10617 - DNA, 25 bp, Probe Sequence
agtaagaagattcctgctacaacta

SEQ ID NO: 10618 - DNA, 25 bp, Probe Sequence
gtaagaagattcctgctacaactat

SEQ ID NO: 10619 - DNA, 25 bp, Probe Sequence
ggatgagtaagaagattcctgctac

SEQ ID NO: 10620 - DNA, 25 bp, Probe Sequence
tggaagcggatgagtaagaagattc

SEQ ID NO: 10621 - DNA, 25 bp, Probe Sequence
gtggaagcggatgagtaagaagatt

SEQ ID NO: 10622 - DNA, 25 bp, Probe Sequence
gttagagtttggattagtgggctat

SEQ ID NO: 10623 - DNA, 25 bp, Probe Sequence
tagtgttagagtttggattagtggg

SEQ ID NO: 10624 - DNA, 25 bp, Probe Sequence
tagagtttggattagtgggctattt

SEQ ID NO: 10625 - DNA, 25 bp, Probe Sequence
ttagagtttggattagtgggctatt

SEQ ID NO: 10626 - DNA, 25 bp, Probe Sequence
cggatgagtaagaagattcctgcta

SEQ ID NO: 10627 - DNA, 25 bp, Probe Sequence
tgttagagtttggattagtgggcta

SEQ ID NO: 10628 - DNA, 25 bp, Probe Sequence
gcatagtgttagagtttggattagt

SEQ ID NO: 10629 - DNA, 25 bp, Probe Sequence
gaagcggatgagtaagaagattcct

SEQ ID NO: 10630 - DNA, 25 bp, Probe Sequence
agcatagtgttagagtttggattag

SEQ ID NO: 10631 - DNA, 25 bp, Probe Sequence
taagaagattcctgctacaactata

SEQ ID NO: 10632 - DNA, 25 bp, Probe Sequence
aagaagattcctgctacaactatag

SEQ ID NO: 10633 - DNA, 25 bp, Probe Sequence
aagcggatgagtaagaagattcctg

SEQ ID NO: 10634 - DNA, 25 bp, Probe Sequence
atagtgttagagtttggattagtgg

SEQ ID NO: 10635 - DNA, 25 bp, Probe Sequence
aagcatagtgttagagtttggatta

SEQ ID NO: 10636 - DNA, 25 bp, Probe Sequence
taagcatagtgttagagtttggatt

SEQ ID NO: 10637 - DNA, 25 bp, Probe Sequence
caatgtggtggagtatttacggtaa

SEQ ID NO: 10638 - DNA, 25 bp, Probe Sequence
tcaatgtggtggagtatttacggta

SEQ ID NO: 10639 - DNA, 25 bp, Probe Sequence
atggtttcatttagcagactttact

SEQ ID NO: 10640 - DNA, 25 bp, Probe Sequence
tggtttcatttagcagactttacta

SEQ ID NO: 10641 - DNA, 25 bp, Probe Sequence
ctcatggtttcatttagcagacttt

SEQ ID NO: 10642 - DNA, 25 bp, Probe Sequence
actcatggtttcatttagcagactt

SEQ ID NO: 10643 - DNA, 25 bp, Probe Sequence
aactcatggtttcatttagcagact

SEQ ID NO: 10644 - DNA, 25 bp, Probe Sequence
aatgtggtggagtatttacggtaaa

SEQ ID NO: 10645 - DNA, 25 bp, Probe Sequence
catggtttcatttagcagactttac

SEQ ID NO: 10646 - DNA, 25 bp, Probe Sequence
tcatggtttcatttagcagacttta

SEQ ID NO: 10647 - DNA, 25 bp, Probe Sequence
atgtggtggagtatttacggtaaac

SEQ ID NO: 10648 - DNA, 25 bp, Probe Sequence
gtggtggagtatttacggtaaactg

SEQ ID NO: 10649 - DNA, 25 bp, Probe Sequence
gtcaatgtggtggagtatttacggt

SEQ ID NO: 10650 - DNA, 25 bp, Probe Sequence
tgtggtggagtatttacggtaaact

SEQ ID NO: 10651 - DNA, 25 bp, Probe Sequence
agcagactttactaagaaaggactg

SEQ ID NO: 10652 - DNA, 25 bp, Probe Sequence
gcagactttactaagaaaggactgt

SEQ ID NO: 10653 - DNA, 25 bp, Probe Sequence
tactaagaaaggactgttgttatct

SEQ ID NO: 10654 - DNA, 25 bp, Probe Sequence
tagcagactttactaagaaaggact

SEQ ID NO: 10655 - DNA, 25 bp, Probe Sequence
gactttactaagaaaggactgttgt

SEQ ID NO: 10656 - DNA, 25 bp, Probe Sequence
agactttactaagaaaggactgttg

SEQ ID NO: 10657 - DNA, 25 bp, Probe Sequence
cagactttactaagaaaggactgtt

SEQ ID NO: 10658 - DNA, 25 bp, Probe Sequence
ggtttcatttagcagactttactaa

SEQ ID NO: 10659 - DNA, 25 bp, Probe Sequence
actttactaagaaaggactgttgtt

SEQ ID NO: 10660 - DNA, 25 bp, Probe Sequence
ttagcagactttactaagaaaggac

SEQ ID NO: 10661 - DNA, 25 bp, Probe Sequence
cttggcagtaacatcaaagtgtatc

SEQ ID NO: 10662 - DNA, 25 bp, Probe Sequence
tggcagtaacatcaaagtgtatcat

SEQ ID NO: 10663 - DNA, 25 bp, Probe Sequence
ttggcagtaacatcaaagtgtatca

SEQ ID NO: 10664 - DNA, 25 bp, Probe Sequence
ggcagtaacatcaaagtgtatcata

SEQ ID NO: 10665 - DNA, 25 bp, Probe Sequence
caaagtgtatcatatgccaagtacg

SEQ ID NO: 10666 - DNA, 25 bp, Probe Sequence
gcagtaacatcaaagtgtatcatat

SEQ ID NO: 10667 - DNA, 25 bp, Probe Sequence
catcaaagtgtatcatatgccaagt

SEQ ID NO: 10668 - DNA, 25 bp, Probe Sequence
tcaaagtgtatcatatgccaagtac

SEQ ID NO: 10669 - DNA, 25 bp, Probe Sequence
aaagtgtatcatatgccaagtacgc

SEQ ID NO: 10670 - DNA, 25 bp, Probe Sequence
acttggcagtaacatcaaagtgtat

SEQ ID NO: 10671 - DNA, 25 bp, Probe Sequence
acatcaaagtgtatcatatgccaag

SEQ ID NO: 10672 - DNA, 25 bp, Probe Sequence
aacttggcagtaacatcaaagtgta

SEQ ID NO: 10673 - DNA, 25 bp, Probe Sequence
atcaaagtgtatcatatgccaagta

SEQ ID NO: 10674 - DNA, 25 bp, Probe Sequence
aacatcaaagtgtatcatatgccaa

SEQ ID NO: 10675 - DNA, 25 bp, Probe Sequence
taacatcaaagtgtatcatatgcca

SEQ ID NO: 10676 - DNA, 25 bp, Probe Sequence
attgctttgagcttaggagtttgag

SEQ ID NO: 10677 - DNA, 25 bp, Probe Sequence
gattgctttgagcttaggagtttga

SEQ ID NO: 10678 - DNA, 25 bp, Probe Sequence
agattgctttgagcttaggagtttg

SEQ ID NO: 10679 - DNA, 25 bp, Probe Sequence
cagattgctttgagcttaggagttt

SEQ ID NO: 10680 - DNA, 25 bp, Probe Sequence
gtaacatcaaagtgtatcatatgcc

SEQ ID NO: 10681 - DNA, 25 bp, Probe Sequence
caacttggcagtaacatcaaagtgt

SEQ ID NO: 10682 - DNA, 25 bp, Probe Sequence
agtaacatcaaagtgtatcatatgc

SEQ ID NO: 10683 - DNA, 25 bp, Probe Sequence
ccaacttggcagtaacatcaaagtg

SEQ ID NO: 10684 - DNA, 25 bp, Probe Sequence
ttgctttgagcttaggagtttgagg

SEQ ID NO: 10685 - DNA, 25 bp, Probe Sequence
gtgactggtggatgaatacaatgtg

SEQ ID NO: 10686 - DNA, 25 bp, Probe Sequence
actggtggatgaatacaatgtggaa

SEQ ID NO: 10687 - DNA, 25 bp, Probe Sequence
gaggtgactggtggatgaatacaat

SEQ ID NO: 10688 - DNA, 25 bp, Probe Sequence
aggtgactggtggatgaatacaatg

SEQ ID NO: 10689 - DNA, 25 bp, Probe Sequence
gactggtggatgaatacaatgtgga

SEQ ID NO: 10690 - DNA, 25 bp, Probe Sequence
tgactggtggatgaatacaatgtgg

SEQ ID NO: 10691 - DNA, 25 bp, Probe Sequence
ggtgactggtggatgaatacaatgt

SEQ ID NO: 10692 - DNA, 25 bp, Probe Sequence
ggattccctggttatgattctgaaa

SEQ ID NO: 10693 - DNA, 25 bp, Probe Sequence
ctggtggatgaatacaatgtggaaa

SEQ ID NO: 10694 - DNA, 25 bp, Probe Sequence
ggtgtgaagttggctgacaattatg

SEQ ID NO: 10695 - DNA, 25 bp, Probe Sequence
gtgaagttggctgacaattatgctg

SEQ ID NO: 10696 - DNA, 25 bp, Probe Sequence
atatggtgtgaagttggctgacaat

SEQ ID NO: 10697 - DNA, 25 bp, Probe Sequence
tggtgtgaagttggctgacaattat

SEQ ID NO: 10698 - DNA, 25 bp, Probe Sequence
atggtgtgaagttggctgacaatta

SEQ ID NO: 10699 - DNA, 25 bp, Probe Sequence
tatggtgtgaagttggctgacaatt

SEQ ID NO: 10700 - DNA, 25 bp, Probe Sequence
aatatggtgtgaagttggctgacaa

SEQ ID NO: 10701 - DNA, 25 bp, Probe Sequence
gtgtgaagttggctgacaattatgc

SEQ ID NO: 10702 - DNA, 25 bp, Probe Sequence
tgtgaagttggctgacaattatgct

SEQ ID NO: 10703 - DNA, 25 bp, Probe Sequence
cggattccctggttatgattctgaa

SEQ ID NO: 10704 - DNA, 25 bp, Probe Sequence
ggaggtgactggtggatgaatacaa

SEQ ID NO: 10705 - DNA, 25 bp, Probe Sequence
caaatatggtgtgaagttggctgac

SEQ ID NO: 10706 - DNA, 25 bp, Probe Sequence
aacggattccctggttatgattctg

SEQ ID NO: 10707 - DNA, 25 bp, Probe Sequence
caacggattccctggttatgattct

SEQ ID NO: 10708 - DNA, 25 bp, Probe Sequence
gatctatgaagccaagtggaggtga

SEQ ID NO: 10709 - DNA, 25 bp, Probe Sequence
taggtattgatgaagatgaagtggc

SEQ ID NO: 10710 - DNA, 25 bp, Probe Sequence
cgacaagaatgataaggcagttaag

SEQ ID NO: 10711 - DNA, 25 bp, Probe Sequence
acaagaatgataaggcagttaagga

SEQ ID NO: 10712 - DNA, 25 bp, Probe Sequence
caagaatgataaggcagttaaggac

SEQ ID NO: 10713 - DNA, 25 bp, Probe Sequence
gacaagaatgataaggcagttaagg

SEQ ID NO: 10714 - DNA, 25 bp, Probe Sequence
aagaatgataaggcagttaaggacc

SEQ ID NO: 10715 - DNA, 25 bp, Probe Sequence
cgattaggttaggagttcatagttg

SEQ ID NO: 10716 - DNA, 25 bp, Probe Sequence
ccgacaagaatgataaggcagttaa

SEQ ID NO: 10717 - DNA, 25 bp, Probe Sequence
attaggttaggagttcatagttgga

SEQ ID NO: 10718 - DNA, 25 bp, Probe Sequence
ttaggttaggagttcatagttggaa

SEQ ID NO: 10719 - DNA, 25 bp, Probe Sequence
gattaggttaggagttcatagttgg

SEQ ID NO: 10720 - DNA, 25 bp, Probe Sequence
ggattggatgttgtgtattgtggtt

SEQ ID NO: 10721 - DNA, 25 bp, Probe Sequence
ggtattgatgaagatgaagtggcag

SEQ ID NO: 10722 - DNA, 25 bp, Probe Sequence
ctaggtattgatgaagatgaagtgg

SEQ ID NO: 10723 - DNA, 25 bp, Probe Sequence
gctaggtctaggtattgatgaagat

SEQ ID NO: 10724 - DNA, 25 bp, Probe Sequence
aggtattgatgaagatgaagtggca

SEQ ID NO: 10725 - DNA, 25 bp, Probe Sequence
aggtctaggtattgatgaagatgaa

SEQ ID NO: 10726 - DNA, 25 bp, Probe Sequence
caggattggatgttgtgtattgtgg

SEQ ID NO: 10727 - DNA, 25 bp, Probe Sequence
ggtctaggtattgatgaagatgaag

SEQ ID NO: 10728 - DNA, 25 bp, Probe Sequence
gtattgatgaagatgaagtggcagc

SEQ ID NO: 10729 - DNA, 25 bp, Probe Sequence
aggattggatgttgtgtattgtggt

SEQ ID NO: 10730 - DNA, 25 bp, Probe Sequence
cagcaggattggatgttgtgtattg

SEQ ID NO: 10731 - DNA, 25 bp, Probe Sequence
ctctctactcttgacagcaggattg

SEQ ID NO: 10732 - DNA, 25 bp, Probe Sequence
aagctaggtctaggtattgatgaag

SEQ ID NO: 10733 - DNA, 25 bp, Probe Sequence
ctgagtcttctgtaacttcacttga

SEQ ID NO: 10734 - DNA, 25 bp, Probe Sequence
actgagtcttctgtaacttcacttg

SEQ ID NO: 10735 - DNA, 25 bp, Probe Sequence
tactgagtcttctgtaacttcactt

SEQ ID NO: 10736 - DNA, 25 bp, Probe Sequence
tgagtcttctgtaacttcacttgac

SEQ ID NO: 10737 - DNA, 25 bp, Probe Sequence
gtactgagtcttctgtaacttcact

SEQ ID NO: 10738 - DNA, 25 bp, Probe Sequence
gagtcttctgtaacttcacttgacg

SEQ ID NO: 10739 - DNA, 25 bp, Probe Sequence
caacacactagctctgtattaatcc

SEQ ID NO: 10740 - DNA, 25 bp, Probe Sequence
ccaacacactagctctgtattaatc

SEQ ID NO: 10741 - DNA, 25 bp, Probe Sequence
gccaacacactagctctgtattaat

SEQ ID NO: 10742 - DNA, 25 bp, Probe Sequence
gagataaagtccaaatgccaacaca

SEQ ID NO: 10743 - DNA, 25 bp, Probe Sequence
tgagataaagtccaaatgccaacac

SEQ ID NO: 10744 - DNA, 25 bp, Probe Sequence
tcttctgtaacttcacttgacgcac

SEQ ID NO: 10745 - DNA, 25 bp, Probe Sequence
ttgagataaagtccaaatgccaaca

SEQ ID NO: 10746 - DNA, 25 bp, Probe Sequence
ataaagtccaaatgccaacacacta

SEQ ID NO: 10747 - DNA, 25 bp, Probe Sequence
atgccaacacactagctctgtatta

SEQ ID NO: 10748 - DNA, 25 bp, Probe Sequence
agataaagtccaaatgccaacacac

SEQ ID NO: 10749 - DNA, 25 bp, Probe Sequence
tgccaacacactagctctgtattaa

SEQ ID NO: 10750 - DNA, 25 bp, Probe Sequence
taaagtccaaatgccaacacactag

SEQ ID NO: 10751 - DNA, 25 bp, Probe Sequence
agtcttctgtaacttcacttgacgc

SEQ ID NO: 10752 - DNA, 25 bp, Probe Sequence
gataaagtccaaatgccaacacact

SEQ ID NO: 10753 - DNA, 25 bp, Probe Sequence
gtcttctgtaacttcacttgacgca

SEQ ID NO: 10754 - DNA, 25 bp, Probe Sequence
ggagtactgagtcttctgtaacttc

SEQ ID NO: 10755 - DNA, 25 bp, Probe Sequence
agtactgagtcttctgtaacttcac

SEQ ID NO: 10756 - DNA, 25 bp, Probe Sequence
ccatagcctatttaggtgacactat

SEQ ID NO: 10757 - DNA, 25 bp, Probe Sequence
tacatcaccatcatcaaagaccaaa

SEQ ID NO: 10758 - DNA, 25 bp, Probe Sequence
aaactaacaaacagaaaggacatcc

SEQ ID NO: 10759 - DNA, 25 bp, Probe Sequence
gtacatcaccatcatcaaagaccaa

SEQ ID NO: 10760 - DNA, 25 bp, Probe Sequence
accatcatcaaagaccaaaagtaga

SEQ ID NO: 10761 - DNA, 25 bp, Probe Sequence
caccatcatcaaagaccaaaagtag

SEQ ID NO: 10762 - DNA, 25 bp, Probe Sequence
tcaccatcatcaaagaccaaaagta

SEQ ID NO: 10763 - DNA, 25 bp, Probe Sequence
ggaaaactaacaaacagaaaggaca

SEQ ID NO: 10764 - DNA, 25 bp, Probe Sequence
aggaaaactaacaaacagaaaggac

SEQ ID NO: 10765 - DNA, 25 bp, Probe Sequence
catcaccatcatcaaagaccaaaag

SEQ ID NO: 10766 - DNA, 25 bp, Probe Sequence
atcaccatcatcaaagaccaaaagt

SEQ ID NO: 10767 - DNA, 25 bp, Probe Sequence
acatcaccatcatcaaagaccaaaa

SEQ ID NO: 10768 - DNA, 25 bp, Probe Sequence
aaggaaaactaacaaacagaaagga

SEQ ID NO: 10769 - DNA, 25 bp, Probe Sequence
ccatcatcaaagaccaaaagtagat

SEQ ID NO: 10770 - DNA, 25 bp, Probe Sequence
gaaggaaaactaacaaacagaaagg

SEQ ID NO: 10771 - DNA, 25 bp, Probe Sequence
agaccaaaagtagataaaaccacaa

SEQ ID NO: 10772 - DNA, 25 bp, Probe Sequence
aagaccaaaagtagataaaaccaca

SEQ ID NO: 10773 - DNA, 25 bp, Probe Sequence
aaaactaacaaacagaaaggacatc

SEQ ID NO: 10774 - DNA, 25 bp, Probe Sequence
gaaaactaacaaacagaaaggacat

SEQ ID NO: 10775 - DNA, 25 bp, Probe Sequence
accaaaagtagataaaaccacaaag

SEQ ID NO: 10776 - DNA, 25 bp, Probe Sequence
gaccaaaagtagataaaaccacaaa

SEQ ID NO: 10777 - DNA, 25 bp, Probe Sequence
catctgtacatcaccatcatcaaag

SEQ ID NO: 10778 - DNA, 25 bp, Probe Sequence
agaaggaaaactaacaaacagaaag

SEQ ID NO: 10779 - DNA, 25 bp, Probe Sequence
ccaaaagtagataaaaccacaaaga

SEQ ID NO: 10780 - DNA, 25 bp, Probe Sequence
aaagaccaaaagtagataaaaccac

SEQ ID NO: 10781 - DNA, 25 bp, Probe Sequence
aggaaggtggaatgaattggagatt

SEQ ID NO: 10782 - DNA, 25 bp, Probe Sequence
aaggaaggtggaatgaattggagat

SEQ ID NO: 10783 - DNA, 25 bp, Probe Sequence
tttgagtgttcttagggatgtgtta

SEQ ID NO: 10784 - DNA, 25 bp, Probe Sequence
ttgagtgttcttagggatgtgttat

SEQ ID NO: 10785 - DNA, 25 bp, Probe Sequence
atgtttgagtgttcttagggatgtg

SEQ ID NO: 10786 - DNA, 25 bp, Probe Sequence
tgagtgttcttagggatgtgttata

SEQ ID NO: 10787 - DNA, 25 bp, Probe Sequence
gtttgagtgttcttagggatgtgtt

SEQ ID NO: 10788 - DNA, 25 bp, Probe Sequence
caaggaaggtggaatgaattggaga

SEQ ID NO: 10789 - DNA, 25 bp, Probe Sequence
gaaggtggaatgaattggagattta

SEQ ID NO: 10790 - DNA, 25 bp, Probe Sequence
ggaaggtggaatgaattggagattt

SEQ ID NO: 10791 - DNA, 25 bp, Probe Sequence
gagtgttcttagggatgtgttatag

SEQ ID NO: 10792 - DNA, 25 bp, Probe Sequence
gctttgtattctgtcagtgatcttt

SEQ ID NO: 10793 - DNA, 25 bp, Probe Sequence
gtgttcttagggatgtgttatagac

SEQ ID NO: 10794 - DNA, 25 bp, Probe Sequence
agtgttcttagggatgtgttataga

SEQ ID NO: 10795 - DNA, 25 bp, Probe Sequence
aggtggaatgaattggagatttatt

SEQ ID NO: 10796 - DNA, 25 bp, Probe Sequence
aaggtggaatgaattggagatttat

SEQ ID NO: 10797 - DNA, 25 bp, Probe Sequence
tgtttgagtgttcttagggatgtgt

SEQ ID NO: 10798 - DNA, 25 bp, Probe Sequence
tgttcttagggatgtgttatagaca

SEQ ID NO: 10799 - DNA, 25 bp, Probe Sequence
cctggttaaggataaatctgtagca

SEQ ID NO: 10800 - DNA, 25 bp, Probe Sequence
catgtttgagtgttcttagggatgt

SEQ ID NO: 10801 - DNA, 25 bp, Probe Sequence
tcttagggatgtgttatagacaagt

SEQ ID NO: 10802 - DNA, 25 bp, Probe Sequence
ctggttaaggataaatctgtagcag

SEQ ID NO: 10803 - DNA, 25 bp, Probe Sequence
ttatttcaggcatgtttgagtgttc

SEQ ID NO: 10804 - DNA, 25 bp, Probe Sequence
ctgagtttacaaacacatcacctga

SEQ ID NO: 10805 - DNA, 25 bp, Probe Sequence
aacaagtcagacaaataaagcaagg

SEQ ID NO: 10806 - DNA, 25 bp, Probe Sequence
gaacaagtcagacaaataaagcaag

SEQ ID NO: 10807 - DNA, 25 bp, Probe Sequence
gtgaacaagtcagacaaataaagca

SEQ ID NO: 10808 - DNA, 25 bp, Probe Sequence
tgaacaagtcagacaaataaagcaa

SEQ ID NO: 10809 - DNA, 25 bp, Probe Sequence
caagtcagacaaataaagcaagggt

SEQ ID NO: 10810 - DNA, 25 bp, Probe Sequence
acaagtcagacaaataaagcaaggg

SEQ ID NO: 10811 - DNA, 25 bp, Probe Sequence
tgtgaacaagtcagacaaataaagc

SEQ ID NO: 10812 - DNA, 25 bp, Probe Sequence
gaactgtgaacaagtcagacaaata

SEQ ID NO: 10813 - DNA, 25 bp, Probe Sequence
actgtgaacaagtcagacaaataaa

SEQ ID NO: 10814 - DNA, 25 bp, Probe Sequence
aactgtgaacaagtcagacaaataa

SEQ ID NO: 10815 - DNA, 25 bp, Probe Sequence
tgaactgtgaacaagtcagacaaat

SEQ ID NO: 10816 - DNA, 25 bp, Probe Sequence
aagtcagacaaataaagcaagggtc

SEQ ID NO: 10817 - DNA, 25 bp, Probe Sequence
ctgtgaacaagtcagacaaataaag

SEQ ID NO: 10818 - DNA, 25 bp, Probe Sequence
gatctcctactgtgaagaacagacc

SEQ ID NO: 10819 - DNA, 25 bp, Probe Sequence
ggatctcctactgtgaagaacagac

SEQ ID NO: 10820 - DNA, 25 bp, Probe Sequence
ctgaactgtgaacaagtcagacaaa

SEQ ID NO: 10821 - DNA, 25 bp, Probe Sequence
agtcagacaaataaagcaagggtct

SEQ ID NO: 10822 - DNA, 25 bp, Probe Sequence
gctgaactgtgaacaagtcagacaa

SEQ ID NO: 10823 - DNA, 25 bp, Probe Sequence
tgaaatcccctctagtcacccattc

SEQ ID NO: 10824 - DNA, 25 bp, Probe Sequence
ctgaaatcccctctagtcacccatt

SEQ ID NO: 10825 - DNA, 25 bp, Probe Sequence
gaaaatgattgatgggctggggaac

SEQ ID NO: 10826 - DNA, 25 bp, Probe Sequence
aaataaagcaagggtctgcaccaaa

SEQ ID NO: 10827 - DNA, 25 bp, Probe Sequence
gaaatcccctctagtcacccattcc

SEQ ID NO: 10828 - DNA, 25 bp, Probe Sequence
agaaaatgattgatgggctggggaa

SEQ ID NO: 10829 - DNA, 25 bp, Probe Sequence
taagtcctgtaattccagattgctt

SEQ ID NO: 10830 - DNA, 25 bp, Probe Sequence
ataagtcctgtaattccagattgct

SEQ ID NO: 10831 - DNA, 25 bp, Probe Sequence
gataagtcctgtaattccagattgc

SEQ ID NO: 10832 - DNA, 25 bp, Probe Sequence
acagactaatggctatgaccttcag

SEQ ID NO: 10833 - DNA, 25 bp, Probe Sequence
aagtcctgtaattccagattgcttg

SEQ ID NO: 10834 - DNA, 25 bp, Probe Sequence
cacagactaatggctatgaccttca

SEQ ID NO: 10835 - DNA, 25 bp, Probe Sequence
taatggctatgaccttcaggacaag

SEQ ID NO: 10836 - DNA, 25 bp, Probe Sequence
ctaatggctatgaccttcaggacaa

SEQ ID NO: 10837 - DNA, 25 bp, Probe Sequence
ggataagtcctgtaattccagattg

SEQ ID NO: 10838 - DNA, 25 bp, Probe Sequence
gatcagttcaccgtctcttctactt

SEQ ID NO: 10839 - DNA, 25 bp, Probe Sequence
tctctcctgctagaacatgaacttc

SEQ ID NO: 10840 - DNA, 25 bp, Probe Sequence
gttcaccgtctcttctactttctaa

SEQ ID NO: 10841 - DNA, 25 bp, Probe Sequence
tgccgatacttgttattgtctgctt

SEQ ID NO: 10842 - DNA, 25 bp, Probe Sequence
ctatttcttgtctttctctcctgct

SEQ ID NO: 10843 - DNA, 25 bp, Probe Sequence
actatttcttgtctttctctcctgc

SEQ ID NO: 10844 - DNA, 25 bp, Probe Sequence
tatttcttgtctttctctcctgcta

SEQ ID NO: 10845 - DNA, 25 bp, Probe Sequence
gactaatggctatgaccttcaggac

SEQ ID NO: 10846 - DNA, 25 bp, Probe Sequence
cagactaatggctatgaccttcagg

SEQ ID NO: 10847 - DNA, 25 bp, Probe Sequence
ttcaccgtctcttctactttctaag

SEQ ID NO: 10848 - DNA, 25 bp, Probe Sequence
agactaatggctatgaccttcagga

SEQ ID NO: 10849 - DNA, 25 bp, Probe Sequence
accgtctcttctactttctaaggaa

SEQ ID NO: 10850 - DNA, 25 bp, Probe Sequence
ctctcctgctagaacatgaacttca

SEQ ID NO: 10851 - DNA, 25 bp, Probe Sequence
tatccatctttgccacagactaatg

SEQ ID NO: 10852 - DNA, 25 bp, Probe Sequence
gtatccatctttgccacagactaat

SEQ ID NO: 10853 - DNA, 25 bp, Probe Sequence
cctaactctatccttgctctcctag

SEQ ID NO: 10854 - DNA, 25 bp, Probe Sequence
tattctccctaactctatccttgct

SEQ ID NO: 10855 - DNA, 25 bp, Probe Sequence
atattctccctaactctatccttgc

SEQ ID NO: 10856 - DNA, 25 bp, Probe Sequence
attctccctaactctatccttgctc

SEQ ID NO: 10857 - DNA, 25 bp, Probe Sequence
ttctccctaactctatccttgctct

SEQ ID NO: 10858 - DNA, 25 bp, Probe Sequence
tttgctttctcaccaccatactttg

SEQ ID NO: 10859 - DNA, 25 bp, Probe Sequence
gtttgctttctcaccaccatacttt

SEQ ID NO: 10860 - DNA, 25 bp, Probe Sequence
ttcagaattcaattaacacgtcacc

SEQ ID NO: 10861 - DNA, 25 bp, Probe Sequence
tcagaattcaattaacacgtcacct

SEQ ID NO: 10862 - DNA, 25 bp, Probe Sequence
ccctaactctatccttgctctccta

SEQ ID NO: 10863 - DNA, 25 bp, Probe Sequence
ctaactctatccttgctctcctagc

SEQ ID NO: 10864 - DNA, 25 bp, Probe Sequence
cttcagaattcaattaacacgtcac

SEQ ID NO: 10865 - DNA, 25 bp, Probe Sequence
tcttcagaattcaattaacacgtca

SEQ ID NO: 10866 - DNA, 25 bp, Probe Sequence
tctccctaactctatccttgctctc

SEQ ID NO: 10867 - DNA, 25 bp, Probe Sequence
aacacagctttagcaataactcaac

SEQ ID NO: 10868 - DNA, 25 bp, Probe Sequence
aaacacagctttagcaataactcaa

SEQ ID NO: 10869 - DNA, 25 bp, Probe Sequence
ttaagtacccacagttccctgaata

SEQ ID NO: 10870 - DNA, 25 bp, Probe Sequence
tcctagctgttcttcagaattcaat

SEQ ID NO: 10871 - DNA, 25 bp, Probe Sequence
gttcttcagaattcaattaacacgt

SEQ ID NO: 10872 - DNA, 25 bp, Probe Sequence
ctcctagctgttcttcagaattcaa

SEQ ID NO: 10873 - DNA, 25 bp, Probe Sequence
cagaattcaattaacacgtcacctg

SEQ ID NO: 10874 - DNA, 25 bp, Probe Sequence
cctagctgttcttcagaattcaatt

SEQ ID NO: 10875 - DNA, 25 bp, Probe Sequence
ctctcctagctgttcttcagaattc

SEQ ID NO: 10876 - DNA, 25 bp, Probe Sequence
ttcttcagaattcaattaacacgtc

SEQ ID NO: 10877 - DNA, 25 bp, Probe Sequence
ctaatctaaggcagttgctatccac

SEQ ID NO: 10878 - DNA, 25 bp, Probe Sequence
cagcctgtcatcatggatcttataa

SEQ ID NO: 10879 - DNA, 25 bp, Probe Sequence
agcctgtcatcatggatcttataat

SEQ ID NO: 10880 - DNA, 25 bp, Probe Sequence
taatctaaggcagttgctatccaca

SEQ ID NO: 10881 - DNA, 25 bp, Probe Sequence
gcctgtcatcatggatcttataatc

SEQ ID NO: 10882 - DNA, 25 bp, Probe Sequence
aatctaaggcagttgctatccacat

SEQ ID NO: 10883 - DNA, 25 bp, Probe Sequence
attctccgacagataggaatatgaa

SEQ ID NO: 10884 - DNA, 25 bp, Probe Sequence
ggaatcttaatgcttatagggctga

SEQ ID NO: 10885 - DNA, 25 bp, Probe Sequence
ttggaatcttaatgcttatagggct

SEQ ID NO: 10886 - DNA, 25 bp, Probe Sequence
gctaatctaaggcagttgctatcca

SEQ ID NO: 10887 - DNA, 25 bp, Probe Sequence
tggaatcttaatgcttatagggctg

SEQ ID NO: 10888 - DNA, 25 bp, Probe Sequence
cttggaatcttaatgcttatagggc

SEQ ID NO: 10889 - DNA, 25 bp, Probe Sequence
acagcctgtcatcatggatcttata

SEQ ID NO: 10890 - DNA, 25 bp, Probe Sequence
tacagcctgtcatcatggatcttat

SEQ ID NO: 10891 - DNA, 25 bp, Probe Sequence
tatgaaatgaagttgttccctcctt

SEQ ID NO: 10892 - DNA, 25 bp, Probe Sequence
atatgaaatgaagttgttccctcct

SEQ ID NO: 10893 - DNA, 25 bp, Probe Sequence
cttaatgcttatagggctgatttgt

SEQ ID NO: 10894 - DNA, 25 bp, Probe Sequence
ttacagcctgtcatcatggatctta

SEQ ID NO: 10895 - DNA, 25 bp, Probe Sequence
agatggacatttgagagttaggtaa

SEQ ID NO: 10896 - DNA, 25 bp, Probe Sequence
ttagatggacatttgagagttaggt

SEQ ID NO: 10897 - DNA, 25 bp, Probe Sequence
aatatgaaatgaagttgttccctcc

SEQ ID NO: 10898 - DNA, 25 bp, Probe Sequence
aatgcttatagggctgatttgttta

SEQ ID NO: 10899 - DNA, 25 bp, Probe Sequence
taatgcttatagggctgatttgttt

SEQ ID NO: 10900 - DNA, 25 bp, Probe Sequence
atgaaatgaagttgttccctccttt

SEQ ID NO: 10901 - DNA, 25 bp, Probe Sequence
catgacttatggactttctacttgc

SEQ ID NO: 10902 - DNA, 25 bp, Probe Sequence
atgacttatggactttctacttgca

SEQ ID NO: 10903 - DNA, 25 bp, Probe Sequence
tgacttatggactttctacttgcag

SEQ ID NO: 10904 - DNA, 25 bp, Probe Sequence
gacttatggactttctacttgcagt

SEQ ID NO: 10905 - DNA, 25 bp, Probe Sequence
ttatggactttctacttgcagtaca

SEQ ID NO: 10906 - DNA, 25 bp, Probe Sequence
acttatggactttctacttgcagta

SEQ ID NO: 10907 - DNA, 25 bp, Probe Sequence
cttatggactttctacttgcagtac

SEQ ID NO: 10908 - DNA, 25 bp, Probe Sequence
ctgggcagtacatcaagtgtatcat

SEQ ID NO: 10909 - DNA, 25 bp, Probe Sequence
gttttggtactaaggtgctcagtcc

SEQ ID NO: 10910 - DNA, 25 bp, Probe Sequence
ttggtactaaggtgctcagtccttg

SEQ ID NO: 10911 - DNA, 25 bp, Probe Sequence
cgttttggtactaaggtgctcagtc

SEQ ID NO: 10912 - DNA, 25 bp, Probe Sequence
ctcagtccttgcaatgttctaggtg

SEQ ID NO: 10913 - DNA, 25 bp, Probe Sequence
ttttggtactaaggtgctcagtcct

SEQ ID NO: 10914 - DNA, 25 bp, Probe Sequence
cagtccttgcaatgttctaggtgac

SEQ ID NO: 10915 - DNA, 25 bp, Probe Sequence
tcagtccttgcaatgttctaggtga

SEQ ID NO: 10916 - DNA, 25 bp, Probe Sequence
tttggtactaaggtgctcagtcctt

SEQ ID NO: 10917 - DNA, 25 bp, Probe Sequence
agtccttgcaatgttctaggtgacc

SEQ ID NO: 10918 - DNA, 25 bp, Probe Sequence
gaggtctgagactcaggagagactc

SEQ ID NO: 10919 - DNA, 25 bp, Probe Sequence
ccgttttggtactaaggtgctcagt

SEQ ID NO: 10920 - DNA, 25 bp, Probe Sequence
gtgctcagtccttgcaatgttctag

SEQ ID NO: 10921 - DNA, 25 bp, Probe Sequence
gctcagtccttgcaatgttctaggt

SEQ ID NO: 10922 - DNA, 25 bp, Probe Sequence
gtctgagactcaggagagactcacc

SEQ ID NO: 10923 - DNA, 25 bp, Probe Sequence
ggtctgagactcaggagagactcac

SEQ ID NO: 10924 - DNA, 25 bp, Probe Sequence
tactaaggtgctcagtccttgcaat

SEQ ID NO: 10925 - DNA, 25 bp, Probe Sequence
cttaaaggaattgacggaagggctc

SEQ ID NO: 10926 - DNA, 25 bp, Probe Sequence
ttaaaggaattgacggaagggctct

SEQ ID NO: 10927 - DNA, 25 bp, Probe Sequence
acttaaaggaattgacggaagggct

SEQ ID NO: 10928 - DNA, 25 bp, Probe Sequence
taaaggaattgacggaagggctctg

SEQ ID NO: 10929 - DNA, 25 bp, Probe Sequence
tagtacaacagctccaagtattcac

SEQ ID NO: 10930 - DNA, 25 bp, Probe Sequence
gtagtacaacagctccaagtattca

SEQ ID NO: 10931 - DNA, 25 bp, Probe Sequence
ggtagtacaacagctccaagtattc

SEQ ID NO: 10932 - DNA, 25 bp, Probe Sequence
tacaacagctccaagtattcaccta

SEQ ID NO: 10933 - DNA, 25 bp, Probe Sequence
atggtgaaatcctgcctctactaaa

SEQ ID NO: 10934 - DNA, 25 bp, Probe Sequence
tagatcaccagttcaagactagcct

SEQ ID NO: 10935 - DNA, 25 bp, Probe Sequence
gtagatcaccagttcaagactagcc

SEQ ID NO: 10936 - DNA, 25 bp, Probe Sequence
gatggtgaaatcctgcctctactaa

SEQ ID NO: 10937 - DNA, 25 bp, Probe Sequence
gtacaacagctccaagtattcacct

SEQ ID NO: 10938 - DNA, 25 bp, Probe Sequence
agtacaacagctccaagtattcacc

SEQ ID NO: 10939 - DNA, 25 bp, Probe Sequence
ggtagatcaccagttcaagactagc

SEQ ID NO: 10940 - DNA, 25 bp, Probe Sequence
agatggtgaaatcctgcctctacta

SEQ ID NO: 10941 - DNA, 25 bp, Probe Sequence
gatgatgcaaatctctataccagct

SEQ ID NO: 10942 - DNA, 25 bp, Probe Sequence
gggtagtacaacagctccaagtatt

SEQ ID NO: 10943 - DNA, 25 bp, Probe Sequence
ttacagtaggtagatgatgcaaatc

SEQ ID NO: 10944 - DNA, 25 bp, Probe Sequence
caagatggtgaaatcctgcctctac

SEQ ID NO: 10945 - DNA, 25 bp, Probe Sequence
tttggcttggatggtattttgtttt

SEQ ID NO: 10946 - DNA, 25 bp, Probe Sequence
atttggcttggatggtattttgttt

SEQ ID NO: 10947 - DNA, 25 bp, Probe Sequence
gtgttttatttggcttggatggtat

SEQ ID NO: 10948 - DNA, 25 bp, Probe Sequence
agatgtgttttatttggcttggatg

SEQ ID NO: 10949 - DNA, 25 bp, Probe Sequence
cagatgtgttttatttggcttggat

SEQ ID NO: 10950 - DNA, 25 bp, Probe Sequence
gggtagatcaccagttcaagactag

SEQ ID NO: 10951 - DNA, 25 bp, Probe Sequence
tatttggcttggatggtattttgtt

SEQ ID NO: 10952 - DNA, 25 bp, Probe Sequence
ttatttggcttggatggtattttgt

SEQ ID NO: 10953 - DNA, 25 bp, Probe Sequence
aagttctgctattgtggtattctgg

SEQ ID NO: 10954 - DNA, 25 bp, Probe Sequence
taagttctgctattgtggtattctg

SEQ ID NO: 10955 - DNA, 25 bp, Probe Sequence
gttctgctattgtggtattctggtg

SEQ ID NO: 10956 - DNA, 25 bp, Probe Sequence
agttctgctattgtggtattctggt

SEQ ID NO: 10957 - DNA, 25 bp, Probe Sequence
ttaagttctgctattgtggtattct

SEQ ID NO: 10958 - DNA, 25 bp, Probe Sequence
ttctgctattgtggtattctggtgg

SEQ ID NO: 10959 - DNA, 25 bp, Probe Sequence
gggtgttggcattcttgttatttaa

SEQ ID NO: 10960 - DNA, 25 bp, Probe Sequence
ctgctattgtggtattctggtggag

SEQ ID NO: 10961 - DNA, 25 bp, Probe Sequence
cgattcttaagttctgctattgtgg

SEQ ID NO: 10962 - DNA, 25 bp, Probe Sequence
ccgattcttaagttctgctattgtg

SEQ ID NO: 10963 - DNA, 25 bp, Probe Sequence
tctgctattgtggtattctggtgga

SEQ ID NO: 10964 - DNA, 25 bp, Probe Sequence
ggtgttggcattcttgttatttaac

SEQ ID NO: 10965 - DNA, 25 bp, Probe Sequence
gattcttaagttctgctattgtggt

SEQ ID NO: 10966 - DNA, 25 bp, Probe Sequence
tgctattgtggtattctggtggaga

SEQ ID NO: 10967 - DNA, 25 bp, Probe Sequence
ctggaataaaggtacagatagaggc

SEQ ID NO: 10968 - DNA, 25 bp, Probe Sequence
gctggaataaaggtacagatagagg

SEQ ID NO: 10969 - DNA, 25 bp, Probe Sequence
ggctggaataaaggtacagatagag

SEQ ID NO: 10970 - DNA, 25 bp, Probe Sequence
ctggctggaataaaggtacagatag

SEQ ID NO: 10971 - DNA, 25 bp, Probe Sequence
tcttaagttctgctattgtggtatt

SEQ ID NO: 10972 - DNA, 25 bp, Probe Sequence
ttcttaagttctgctattgtggtat

SEQ ID NO: 10973 - DNA, 25 bp, Probe Sequence
attcttaagttctgctattgtggta

SEQ ID NO: 10974 - DNA, 25 bp, Probe Sequence
tggctggaataaaggtacagataga

SEQ ID NO: 10975 - DNA, 25 bp, Probe Sequence
cttaagttctgctattgtggtattc

SEQ ID NO: 10976 - DNA, 25 bp, Probe Sequence
gctattgtggtattctggtggagaa

SEQ ID NO: 10977 - DNA, 25 bp, Probe Sequence
tgttattatgatgttcagtccaagg

SEQ ID NO: 10978 - DNA, 25 bp, Probe Sequence
gctctctcctaacttagtaatgatg

SEQ ID NO: 10979 - DNA, 25 bp, Probe Sequence
atagtgttcttgaagtcagagacaa

SEQ ID NO: 10980 - DNA, 25 bp, Probe Sequence
gttattatgatgttcagtccaagga

SEQ ID NO: 10981 - DNA, 25 bp, Probe Sequence
tatagtgttcttgaagtcagagaca

SEQ ID NO: 10982 - DNA, 25 bp, Probe Sequence
acttagtaatgatgataactcgtgg

SEQ ID NO: 10983 - DNA, 25 bp, Probe Sequence
atgataactcgtggaatatcctgac

SEQ ID NO: 10984 - DNA, 25 bp, Probe Sequence
gatgataactcgtggaatatcctga

SEQ ID NO: 10985 - DNA, 25 bp, Probe Sequence
tgatgataactcgtggaatatcctg

SEQ ID NO: 10986 - DNA, 25 bp, Probe Sequence
cttagtaatgatgataactcgtgga

SEQ ID NO: 10987 - DNA, 25 bp, Probe Sequence
cttatagtgttcttgaagtcagaga

SEQ ID NO: 10988 - DNA, 25 bp, Probe Sequence
atgatgataactcgtggaatatcct

SEQ ID NO: 10989 - DNA, 25 bp, Probe Sequence
ctaattcacgctcattccacaagag

SEQ ID NO: 10990 - DNA, 25 bp, Probe Sequence
tattatgatgttcagtccaaggatc

SEQ ID NO: 10991 - DNA, 25 bp, Probe Sequence
agtaagtctgggatttagggatgta

SEQ ID NO: 10992 - DNA, 25 bp, Probe Sequence
gataactcgtggaatatcctgacct

SEQ ID NO: 10993 - DNA, 25 bp, Probe Sequence
aatgatgataactcgtggaatatcc

SEQ ID NO: 10994 - DNA, 25 bp, Probe Sequence
ttatagtgttcttgaagtcagagac

SEQ ID NO: 10995 - DNA, 25 bp, Probe Sequence
ttagtaatgatgataactcgtggaa

SEQ ID NO: 10996 - DNA, 25 bp, Probe Sequence
ttattatgatgttcagtccaaggat

SEQ ID NO: 10997 - DNA, 25 bp, Probe Sequence
gtaagtctgggatttagggatgtat

SEQ ID NO: 10998 - DNA, 25 bp, Probe Sequence
ataactcgtggaatatcctgacctg

SEQ ID NO: 10999 - DNA, 25 bp, Probe Sequence
tgataactcgtggaatatcctgacc

SEQ ID NO: 11000 - DNA, 25 bp, Probe Sequence
agtaatgatgataactcgtggaata

SEQ ID NO: 11001 - DNA, 25 bp, Probe Sequence
gagacaccactacatatcaatgaga

SEQ ID NO: 11002 - DNA, 25 bp, Probe Sequence
caatactaagtggtgttgaagatgc

SEQ ID NO: 11003 - DNA, 25 bp, Probe Sequence
agacaccactacatatcaatgagat

SEQ ID NO: 11004 - DNA, 25 bp, Probe Sequence
agacaatactaagtggtgttgaaga

SEQ ID NO: 11005 - DNA, 25 bp, Probe Sequence
gacaccactacatatcaatgagatt

SEQ ID NO: 11006 - DNA, 25 bp, Probe Sequence
acaatactaagtggtgttgaagatg

SEQ ID NO: 11007 - DNA, 25 bp, Probe Sequence
aagacaatactaagtggtgttgaag

SEQ ID NO: 11008 - DNA, 25 bp, Probe Sequence
gacaatactaagtggtgttgaagat

SEQ ID NO: 11009 - DNA, 25 bp, Probe Sequence
aatactaagtggtgttgaagatgca

SEQ ID NO: 11010 - DNA, 25 bp, Probe Sequence
acaccactacatatcaatgagatta

SEQ ID NO: 11011 - DNA, 25 bp, Probe Sequence
acacagacttgtatatgaatgttca

SEQ ID NO: 11012 - DNA, 25 bp, Probe Sequence
ttaagctcatgttctacacagactt

SEQ ID NO: 11013 - DNA, 25 bp, Probe Sequence
attaagctcatgttctacacagact

SEQ ID NO: 11014 - DNA, 25 bp, Probe Sequence
tgggaacaacttaaacattcatcag

SEQ ID NO: 11015 - DNA, 25 bp, Probe Sequence
taagctcatgttctacacagacttg

SEQ ID NO: 11016 - DNA, 25 bp, Probe Sequence
aattaagctcatgttctacacagac

SEQ ID NO: 11017 - DNA, 25 bp, Probe Sequence
gggaacaacttaaacattcatcagc

SEQ ID NO: 11018 - DNA, 25 bp, Probe Sequence
ttgggaacaacttaaacattcatca

SEQ ID NO: 11019 - DNA, 25 bp, Probe Sequence
caatgcccatagacctgaatgttaa

SEQ ID NO: 11020 - DNA, 25 bp, Probe Sequence
ctcactattgtttacccaaaggaaa

SEQ ID NO: 11021 - DNA, 25 bp, Probe Sequence
ataacctattagtttgctcctcact

SEQ ID NO: 11022 - DNA, 25 bp, Probe Sequence
gctcatgttctacacagacttgtat

SEQ ID NO: 11023 - DNA, 25 bp, Probe Sequence
agtttgctcctcactattgtttacc

SEQ ID NO: 11024 - DNA, 25 bp, Probe Sequence
gtttgctcctcactattgtttaccc

SEQ ID NO: 11025 - DNA, 25 bp, Probe Sequence
aagtcatcagcagaaaggaaagtat

SEQ ID NO: 11026 - DNA, 25 bp, Probe Sequence
agtcatcagcagaaaggaaagtata

SEQ ID NO: 11027 - DNA, 25 bp, Probe Sequence
agtgtataaacctccattaagccat

SEQ ID NO: 11028 - DNA, 25 bp, Probe Sequence
ctgtgagtatagaaattaggaggca

SEQ ID NO: 11029 - DNA, 25 bp, Probe Sequence
aatttaattgccaagtgctttctgt

SEQ ID NO: 11030 - DNA, 25 bp, Probe Sequence
caagtcatcagcagaaaggaaagta

SEQ ID NO: 11031 - DNA, 25 bp, Probe Sequence
gtgtataaacctccattaagccatt

SEQ ID NO: 11032 - DNA, 25 bp, Probe Sequence
gaatttaattgccaagtgctttctg

SEQ ID NO: 11033 - DNA, 25 bp, Probe Sequence
ggcgattaaattaagtgtatcctgt

SEQ ID NO: 11034 - DNA, 25 bp, Probe Sequence
aaggaatttaattgccaagtgcttt

SEQ ID NO: 11035 - DNA, 25 bp, Probe Sequence
atttaattgccaagtgctttctgtg

SEQ ID NO: 11036 - DNA, 25 bp, Probe Sequence
gtcatcagcagaaaggaaagtatat

SEQ ID NO: 11037 - DNA, 25 bp, Probe Sequence
ctttgatatgatagcaatagcctgg

SEQ ID NO: 11038 - DNA, 25 bp, Probe Sequence
cctttgatatgatagcaatagcctg

SEQ ID NO: 11039 - DNA, 25 bp, Probe Sequence
tcctttgatatgatagcaatagcct

SEQ ID NO: 11040 - DNA, 25 bp, Probe Sequence
tctgtgagtatagaaattaggaggc

SEQ ID NO: 11041 - DNA, 25 bp, Probe Sequence
ggaatttaattgccaagtgctttct

SEQ ID NO: 11042 - DNA, 25 bp, Probe Sequence
aggaatttaattgccaagtgctttc

SEQ ID NO: 11043 - DNA, 25 bp, Probe Sequence
agcagaaaggaaagtatatagcagt

SEQ ID NO: 11044 - DNA, 25 bp, Probe Sequence
tcagcagaaaggaaagtatatagca

SEQ ID NO: 11045 - DNA, 25 bp, Probe Sequence
tagtcaagtcatcagcagaaaggaa

SEQ ID NO: 11046 - DNA, 25 bp, Probe Sequence
aaacctccattaagccattaacatt

SEQ ID NO: 11047 - DNA, 25 bp, Probe Sequence
aaaggctgctgattaaacactatat

SEQ ID NO: 11048 - DNA, 25 bp, Probe Sequence
gcagaaaggaaagtatatagcagtc

SEQ ID NO: 11049 - DNA, 25 bp, Probe Sequence
tagagctagtttgttgtggtagtgg

SEQ ID NO: 11050 - DNA, 25 bp, Probe Sequence
gaacgtcaatgggtggagtatttac

SEQ ID NO: 11051 - DNA, 25 bp, Probe Sequence
tgtggtagtggttttaataagtcct

SEQ ID NO: 11052 - DNA, 25 bp, Probe Sequence
agtttgttgtggtagtggttttaat

SEQ ID NO: 11053 - DNA, 25 bp, Probe Sequence
agctagtttgttgtggtagtggttt

SEQ ID NO: 11054 - DNA, 25 bp, Probe Sequence
ttgtggtagtggttttaataagtcc

SEQ ID NO: 11055 - DNA, 25 bp, Probe Sequence
gtggtagtggttttaataagtcctt

SEQ ID NO: 11056 - DNA, 25 bp, Probe Sequence
tagtttgttgtggtagtggttttaa

SEQ ID NO: 11057 - DNA, 25 bp, Probe Sequence
tgaacgtcaatgggtggagtattta

SEQ ID NO: 11058 - DNA, 25 bp, Probe Sequence
ctagtttgttgtggtagtggtttta

SEQ ID NO: 11059 - DNA, 25 bp, Probe Sequence
tgttgtggtagtggttttaataagt

SEQ ID NO: 11060 - DNA, 25 bp, Probe Sequence
gagctagtttgttgtggtagtggtt

SEQ ID NO: 11061 - DNA, 25 bp, Probe Sequence
gttgtggtagtggttttaataagtc

SEQ ID NO: 11062 - DNA, 25 bp, Probe Sequence
tggtagtggttttaataagtccttt

SEQ ID NO: 11063 - DNA, 25 bp, Probe Sequence
gtttgttgtggtagtggttttaata

SEQ ID NO: 11064 - DNA, 25 bp, Probe Sequence
gctagtttgttgtggtagtggtttt

SEQ ID NO: 11065 - DNA, 25 bp, Probe Sequence
ttgttgtggtagtggttttaataag

SEQ ID NO: 11066 - DNA, 25 bp, Probe Sequence
aatagggactttccattgaacgtca

SEQ ID NO: 11067 - DNA, 25 bp, Probe Sequence
agagctagtttgttgtggtagtggt

SEQ ID NO: 11068 - DNA, 25 bp, Probe Sequence
caatagggactttccattgaacgtc

SEQ ID NO: 11069 - DNA, 25 bp, Probe Sequence
tttgttgtggtagtggttttaataa

SEQ ID NO: 11070 - DNA, 25 bp, Probe Sequence
atagggactttccattgaacgtcaa

SEQ ID NO: 11071 - DNA, 25 bp, Probe Sequence
ggtagtggttttaataagtccttta

SEQ ID NO: 11072 - DNA, 25 bp, Probe Sequence
ccaatagggactttccattgaacgt

SEQ ID NO: 11073 - DNA, 25 bp, Probe Sequence
ttacctatcaattctcaccatcagc

SEQ ID NO: 11074 - DNA, 25 bp, Probe Sequence
aacacttacctatcaattctcacca

SEQ ID NO: 11075 - DNA, 25 bp, Probe Sequence
cttccagagaacacttacctatcaa

SEQ ID NO: 11076 - DNA, 25 bp, Probe Sequence
acacttacctatcaattctcaccat

SEQ ID NO: 11077 - DNA, 25 bp, Probe Sequence
acttacctatcaattctcaccatca

SEQ ID NO: 11078 - DNA, 25 bp, Probe Sequence
tcttccagagaacacttacctatca

SEQ ID NO: 11079 - DNA, 25 bp, Probe Sequence
tccagagaacacttacctatcaatt

SEQ ID NO: 11080 - DNA, 25 bp, Probe Sequence
ttccagagaacacttacctatcaat

SEQ ID NO: 11081 - DNA, 25 bp, Probe Sequence
cacttacctatcaattctcaccatc

SEQ ID NO: 11082 - DNA, 25 bp, Probe Sequence
aattcatcattccttctcttccaga

SEQ ID NO: 11083 - DNA, 25 bp, Probe Sequence
caccatcagcaagagaagtcaatag

SEQ ID NO: 11084 - DNA, 25 bp, Probe Sequence
gaacacttacctatcaattctcacc

SEQ ID NO: 11085 - DNA, 25 bp, Probe Sequence
ctatcaattctcaccatcagcaaga

SEQ ID NO: 11086 - DNA, 25 bp, Probe Sequence
cttacctatcaattctcaccatcag

SEQ ID NO: 11087 - DNA, 25 bp, Probe Sequence
tacctatcaattctcaccatcagca

SEQ ID NO: 11088 - DNA, 25 bp, Probe Sequence
ccagagaacacttacctatcaattc

SEQ ID NO: 11089 - DNA, 25 bp, Probe Sequence
tcaccatcagcaagagaagtcaata

SEQ ID NO: 11090 - DNA, 25 bp, Probe Sequence
cctatcaattctcaccatcagcaag

SEQ ID NO: 11091 - DNA, 25 bp, Probe Sequence
tatcaattctcaccatcagcaagag

SEQ ID NO: 11092 - DNA, 25 bp, Probe Sequence
agatgtggagagtataacagagtct

SEQ ID NO: 11093 - DNA, 25 bp, Probe Sequence
atgaatcacaacagaattaagatgc

SEQ ID NO: 11094 - DNA, 25 bp, Probe Sequence
ggatgtagatgtggagagtataaca

SEQ ID NO: 11095 - DNA, 25 bp, Probe Sequence
acctatcaattctcaccatcagcaa

SEQ ID NO: 11096 - DNA, 25 bp, Probe Sequence
gtagatgtggagagtataacagagt

SEQ ID NO: 11097 - DNA, 25 bp, Probe Sequence
cataagagcatgaacaagaagacaa

SEQ ID NO: 11098 - DNA, 25 bp, Probe Sequence
acataagagcatgaacaagaagaca

SEQ ID NO: 11099 - DNA, 25 bp, Probe Sequence
aacataagagcatgaacaagaagac

SEQ ID NO: 11100 - DNA, 25 bp, Probe Sequence
gagcatgaacaagaagacaaatagt

SEQ ID NO: 11101 - DNA, 25 bp, Probe Sequence
agagcatgaacaagaagacaaatag

SEQ ID NO: 11102 - DNA, 25 bp, Probe Sequence
taccatactaaagttcagagaaagc

SEQ ID NO: 11103 - DNA, 25 bp, Probe Sequence
aagagcatgaacaagaagacaaata

SEQ ID NO: 11104 - DNA, 25 bp, Probe Sequence
taagagcatgaacaagaagacaaat

SEQ ID NO: 11105 - DNA, 25 bp, Probe Sequence
ataagagcatgaacaagaagacaaa

SEQ ID NO: 11106 - DNA, 25 bp, Probe Sequence
agcatgaacaagaagacaaatagtt

SEQ ID NO: 11107 - DNA, 25 bp, Probe Sequence
tctcttgaagtcaggagttccacat

SEQ ID NO: 11108 - DNA, 25 bp, Probe Sequence
aaacataagagcatgaacaagaaga

SEQ ID NO: 11109 - DNA, 25 bp, Probe Sequence
gcatgaacaagaagacaaatagttt

SEQ ID NO: 11110 - DNA, 25 bp, Probe Sequence
accatactaaagttcagagaaagct

SEQ ID NO: 11111 - DNA, 25 bp, Probe Sequence
ctcttgaagtcaggagttccacatg

SEQ ID NO: 11112 - DNA, 25 bp, Probe Sequence
ctctcttgaagtcaggagttccaca

SEQ ID NO: 11113 - DNA, 25 bp, Probe Sequence
actaccatactaaagttcagagaaa

SEQ ID NO: 11114 - DNA, 25 bp, Probe Sequence
ctaccatactaaagttcagagaaag

SEQ ID NO: 11115 - DNA, 25 bp, Probe Sequence
tgaacaagaagacaaatagtttgga

SEQ ID NO: 11116 - DNA, 25 bp, Probe Sequence
tcttgaagtcaggagttccacatgg

SEQ ID NO: 11117 - DNA, 25 bp, Probe Sequence
gaggctctcttgaagtcaggagttc

SEQ ID NO: 11118 - DNA, 25 bp, Probe Sequence
gaacaagaagacaaatagtttggaa

SEQ ID NO: 11119 - DNA, 25 bp, Probe Sequence
atgaacaagaagacaaatagtttgg

SEQ ID NO: 11120 - DNA, 25 bp, Probe Sequence
gaagtcaggagttccacatggagaa

SEQ ID NO: 11121 - DNA, 25 bp, Probe Sequence
tcaggaggctaagacaagagaattg

SEQ ID NO: 11122 - DNA, 25 bp, Probe Sequence
ctcaggaggctaagacaagagaatt

SEQ ID NO: 11123 - DNA, 25 bp, Probe Sequence
tactcaggaggctaagacaagagaa

SEQ ID NO: 11124 - DNA, 25 bp, Probe Sequence
agtaagatttcaggtgacaagtagg

SEQ ID NO: 11125 - DNA, 25 bp, Probe Sequence
cagagtaagatttcaggtgacaagt

SEQ ID NO: 11126 - DNA, 25 bp, Probe Sequence
gtaagatttcaggtgacaagtaggg

SEQ ID NO: 11127 - DNA, 25 bp, Probe Sequence
ctactcaggaggctaagacaagaga

SEQ ID NO: 11128 - DNA, 25 bp, Probe Sequence
agagtaagatttcaggtgacaagta

SEQ ID NO: 11129 - DNA, 25 bp, Probe Sequence
gagtaagatttcaggtgacaagtag

SEQ ID NO: 11130 - DNA, 25 bp, Probe Sequence
ggaggctaagacaagagaattgctt

SEQ ID NO: 11131 - DNA, 25 bp, Probe Sequence
actcaggaggctaagacaagagaat

SEQ ID NO: 11132 - DNA, 25 bp, Probe Sequence
tcagagtaagatttcaggtgacaag

SEQ ID NO: 11133 - DNA, 25 bp, Probe Sequence
ttcagagtaagatttcaggtgacaa

SEQ ID NO: 11134 - DNA, 25 bp, Probe Sequence
tttcagagtaagatttcaggtgaca

SEQ ID NO: 11135 - DNA, 25 bp, Probe Sequence
gtttcagagtaagatttcaggtgac

SEQ ID NO: 11136 - DNA, 25 bp, Probe Sequence
agtttcagagtaagatttcaggtga

SEQ ID NO: 11137 - DNA, 25 bp, Probe Sequence
tagtttcagagtaagatttcaggtg

SEQ ID NO: 11138 - DNA, 25 bp, Probe Sequence
agggctaattaaggaaagaatggaa

SEQ ID NO: 11139 - DNA, 25 bp, Probe Sequence
aattaaggaaagaatggaaatgtcg

SEQ ID NO: 11140 - DNA, 25 bp, Probe Sequence
gggctaattaaggaaagaatggaaa

SEQ ID NO: 11141 - DNA, 25 bp, Probe Sequence
tagggctaattaaggaaagaatgga

SEQ ID NO: 11142 - DNA, 25 bp, Probe Sequence
taagatttcaggtgacaagtagggc

SEQ ID NO: 11143 - DNA, 25 bp, Probe Sequence
aggaggctaagacaagagaattgct

SEQ ID NO: 11144 - DNA, 25 bp, Probe Sequence
caggaggctaagacaagagaattgc

SEQ ID NO: 11145 - DNA, 25 bp, Probe Sequence
gagggctgactttcaatagatcgca

SEQ ID NO: 11146 - DNA, 25 bp, Probe Sequence
agggctgactttcaatagatcgcag

SEQ ID NO: 11147 - DNA, 25 bp, Probe Sequence
aagcaggtcgtctacgaatggttta

SEQ ID NO: 11148 - DNA, 25 bp, Probe Sequence
tcgagggctgactttcaatagatcg

SEQ ID NO: 11149 - DNA, 25 bp, Probe Sequence
agcaggtcgtctacgaatggtttag

SEQ ID NO: 11150 - DNA, 25 bp, Probe Sequence
ctgactttcaatagatcgcagcgag

SEQ ID NO: 11151 - DNA, 25 bp, Probe Sequence
gaagcaggtcgtctacgaatggttt

SEQ ID NO: 11152 - DNA, 25 bp, Probe Sequence
tgactttcaatagatcgcagcgagg

SEQ ID NO: 11153 - DNA, 25 bp, Probe Sequence
cacctaagagcataactaacactga

SEQ ID NO: 11154 - DNA, 25 bp, Probe Sequence
aggcagtatagaagtgagtaagagt

SEQ ID NO: 11155 - DNA, 25 bp, Probe Sequence
ggcagtatagaagtgagtaagagtt

SEQ ID NO: 11156 - DNA, 25 bp, Probe Sequence
aaggcagtatagaagtgagtaagag

SEQ ID NO: 11157 - DNA, 25 bp, Probe Sequence
acctaagagcataactaacactgat

SEQ ID NO: 11158 - DNA, 25 bp, Probe Sequence
ccacctaagagcataactaacactg

SEQ ID NO: 11159 - DNA, 25 bp, Probe Sequence
cctaagagcataactaacactgatt

SEQ ID NO: 11160 - DNA, 25 bp, Probe Sequence
gccacctaagagcataactaacact

SEQ ID NO: 11161 - DNA, 25 bp, Probe Sequence
agccacctaagagcataactaacac

SEQ ID NO: 11162 - DNA, 25 bp, Probe Sequence
cagccacctaagagcataactaaca

SEQ ID NO: 11163 - DNA, 25 bp, Probe Sequence
agaagtgagtaagagttacatcagg

SEQ ID NO: 11164 - DNA, 25 bp, Probe Sequence
gcagtatagaagtgagtaagagtta

SEQ ID NO: 11165 - DNA, 25 bp, Probe Sequence
gaagtatcttatgacctgggcatta

SEQ ID NO: 11166 - DNA, 25 bp, Probe Sequence
actgctgcccattagaattagaaat

SEQ ID NO: 11167 - DNA, 25 bp, Probe Sequence
caaaggcagtatagaagtgagtaag

SEQ ID NO: 11168 - DNA, 25 bp, Probe Sequence
ccaagtagcgagataaattccaaga

SEQ ID NO: 11169 - DNA, 25 bp, Probe Sequence
aaaggcagtatagaagtgagtaaga

SEQ ID NO: 11170 - DNA, 25 bp, Probe Sequence
tgcccattagaattagaaatatcgc

SEQ ID NO: 11171 - DNA, 25 bp, Probe Sequence
aactgctgcccattagaattagaaa

SEQ ID NO: 11172 - DNA, 25 bp, Probe Sequence
aagtatcttatgacctgggcattaa

SEQ ID NO: 11173 - DNA, 25 bp, Probe Sequence
gcccattagaattagaaatatcgct

SEQ ID NO: 11174 - DNA, 25 bp, Probe Sequence
cgagataaattccaagaagaactgc

SEQ ID NO: 11175 - DNA, 25 bp, Probe Sequence
gcgagataaattccaagaagaactg

SEQ ID NO: 11176 - DNA, 25 bp, Probe Sequence
agcgagataaattccaagaagaact

SEQ ID NO: 11177 - DNA, 25 bp, Probe Sequence
aactaaggtgagaatgatatggtgc

SEQ ID NO: 11178 - DNA, 25 bp, Probe Sequence
atgagacattagtgacttcgtaagc

SEQ ID NO: 11179 - DNA, 25 bp, Probe Sequence
ctcatacatagaattgcctagaagc

SEQ ID NO: 11180 - DNA, 25 bp, Probe Sequence
ttggtcagtgtctactcatacatag

SEQ ID NO: 11181 - DNA, 25 bp, Probe Sequence
cttggtcagtgtctactcatacata

SEQ ID NO: 11182 - DNA, 25 bp, Probe Sequence
tcttggtcagtgtctactcatacat

SEQ ID NO: 11183 - DNA, 25 bp, Probe Sequence
atcttggtcagtgtctactcataca

SEQ ID NO: 11184 - DNA, 25 bp, Probe Sequence
tagtgacttcgtaagcctgttgtta

SEQ ID NO: 11185 - DNA, 25 bp, Probe Sequence
gatcttggtcagtgtctactcatac

SEQ ID NO: 11186 - DNA, 25 bp, Probe Sequence
catgagacattagtgacttcgtaag

SEQ ID NO: 11187 - DNA, 25 bp, Probe Sequence
cattagtgacttcgtaagcctgttg

SEQ ID NO: 11188 - DNA, 25 bp, Probe Sequence
gagacattagtgacttcgtaagcct

SEQ ID NO: 11189 - DNA, 25 bp, Probe Sequence
tggtcagtgtctactcatacataga

SEQ ID NO: 11190 - DNA, 25 bp, Probe Sequence
actaaggtgagaatgatatggtgcg

SEQ ID NO: 11191 - DNA, 25 bp, Probe Sequence
actcatacatagaattgcctagaag

SEQ ID NO: 11192 - DNA, 25 bp, Probe Sequence
attagtgacttcgtaagcctgttgt

SEQ ID NO: 11193 - DNA, 25 bp, Probe Sequence
tcatacatagaattgcctagaagct

SEQ ID NO: 11194 - DNA, 25 bp, Probe Sequence
agacattagtgacttcgtaagcctg

SEQ ID NO: 11195 - DNA, 25 bp, Probe Sequence
tgagacattagtgacttcgtaagcc

SEQ ID NO: 11196 - DNA, 25 bp, Probe Sequence
gtgtctactcatacatagaattgcc

SEQ ID NO: 11197 - DNA, 25 bp, Probe Sequence
ggtcagtgtctactcatacatagaa

SEQ ID NO: 11198 - DNA, 25 bp, Probe Sequence
gtgttgatctccttagcagcttatt

SEQ ID NO: 11199 - DNA, 25 bp, Probe Sequence
tgtctactcatacatagaattgcct

SEQ ID NO: 11200 - DNA, 25 bp, Probe Sequence
agtgacttcgtaagcctgttgttaa

SEQ ID NO: 11201 - DNA, 25 bp, Probe Sequence
ctaagaggtagaggttacagtgagc

SEQ ID NO: 11202 - DNA, 25 bp, Probe Sequence
caggagaatcacttgaacctaagag

SEQ ID NO: 11203 - DNA, 25 bp, Probe Sequence
cctaagaggtagaggttacagtgag

SEQ ID NO: 11204 - DNA, 25 bp, Probe Sequence
aggagaatcacttgaacctaagagg

SEQ ID NO: 11205 - DNA, 25 bp, Probe Sequence
taagaggtagaggttacagtgagcc

SEQ ID NO: 11206 - DNA, 25 bp, Probe Sequence
agtgagccaagattgtaccattgta

SEQ ID NO: 11207 - DNA, 25 bp, Probe Sequence
gtggattacttgaggtcaggagttc

SEQ ID NO: 11208 - DNA, 25 bp, Probe Sequence
gcaggagaatcacttgaacctaaga

SEQ ID NO: 11209 - DNA, 25 bp, Probe Sequence
tggattacttgaggtcaggagttca

SEQ ID NO: 11210 - DNA, 25 bp, Probe Sequence
aacaattaggtacaaatggaatccc

SEQ ID NO: 11211 - DNA, 25 bp, Probe Sequence
ggttgacacaggagaatcacttgag

SEQ ID NO: 11212 - DNA, 25 bp, Probe Sequence
gaggttgacacaggagaatcacttg

SEQ ID NO: 11213 - DNA, 25 bp, Probe Sequence
gaacaattaggtacaaatggaatcc

SEQ ID NO: 11214 - DNA, 25 bp, Probe Sequence
ccaagattgtaccattgtactccag

SEQ ID NO: 11215 - DNA, 25 bp, Probe Sequence
cagtgagccaagattgtaccattgt

SEQ ID NO: 11216 - DNA, 25 bp, Probe Sequence
gagccaagattgtaccattgtactc

SEQ ID NO: 11217 - DNA, 25 bp, Probe Sequence
aggttgacacaggagaatcacttga

SEQ ID NO: 11218 - DNA, 25 bp, Probe Sequence
ggcaggagaatcacttgaacctaag

SEQ ID NO: 11219 - DNA, 25 bp, Probe Sequence
caagattgtaccattgtactccagc

SEQ ID NO: 11220 - DNA, 25 bp, Probe Sequence
acaattaggtacaaatggaatccca

SEQ ID NO: 11221 - DNA, 25 bp, Probe Sequence
ggtggattacttgaggtcaggagtt

SEQ ID NO: 11222 - DNA, 25 bp, Probe Sequence
ttaggtacaaatggaatcccaatct

SEQ ID NO: 11223 - DNA, 25 bp, Probe Sequence
tgagccaagattgtaccattgtact

SEQ ID NO: 11224 - DNA, 25 bp, Probe Sequence
gtgagccaagattgtaccattgtac

SEQ ID NO: 11225 - DNA, 25 bp, Probe Sequence
ccaacctgagaaagccaattatatg

SEQ ID NO: 11226 - DNA, 25 bp, Probe Sequence
accaacctgagaaagccaattatat

SEQ ID NO: 11227 - DNA, 25 bp, Probe Sequence
caacctgagaaagccaattatatgc

SEQ ID NO: 11228 - DNA, 25 bp, Probe Sequence
gaccaacctgagaaagccaattata

SEQ ID NO: 11229 - DNA, 25 bp, Probe Sequence
aacctgagaaagccaattatatgcc

SEQ ID NO: 11230 - DNA, 25 bp, Probe Sequence
ttctcacttccaacttaggaccaac

SEQ ID NO: 11231 - DNA, 25 bp, Probe Sequence
gttctcacttccaacttaggaccaa

SEQ ID NO: 11232 - DNA, 25 bp, Probe Sequence
tttctcatttagttggtctttgttt

SEQ ID NO: 11233 - DNA, 25 bp, Probe Sequence
tagttggtctttgtttatttccaca

SEQ ID NO: 11234 - DNA, 25 bp, Probe Sequence
ttccaacttaggaccaacctgagaa

SEQ ID NO: 11235 - DNA, 25 bp, Probe Sequence
acctgagaaagccaattatatgccc

SEQ ID NO: 11236 - DNA, 25 bp, Probe Sequence
cacaacctgtaatcccaacactttg

SEQ ID NO: 11237 - DNA, 25 bp, Probe Sequence
tcacaacctgtaatcccaacacttt

SEQ ID NO: 11238 - DNA, 25 bp, Probe Sequence
ggaccaacctgagaaagccaattat

SEQ ID NO: 11239 - DNA, 25 bp, Probe Sequence
ttctcatttagttggtctttgttta

SEQ ID NO: 11240 - DNA, 25 bp, Probe Sequence
tactccacctctacaaaacaaacaa

SEQ ID NO: 11241 - DNA, 25 bp, Probe Sequence
ctgcttttctcatttagttggtctt

SEQ ID NO: 11242 - DNA, 25 bp, Probe Sequence
ttctgcttttctcatttagttggtc

SEQ ID NO: 11243 - DNA, 25 bp, Probe Sequence
cttctgcttttctcatttagttggt

SEQ ID NO: 11244 - DNA, 25 bp, Probe Sequence
cttccaacttaggaccaacctgaga

SEQ ID NO: 11245 - DNA, 25 bp, Probe Sequence
tctgcttttctcatttagttggtct

SEQ ID NO: 11246 - DNA, 25 bp, Probe Sequence
ttagttggtctttgtttatttccac

SEQ ID NO: 11247 - DNA, 25 bp, Probe Sequence
ccacctctacaaaacaaacaaacaa

SEQ ID NO: 11248 - DNA, 25 bp, Probe Sequence
ctccacctctacaaaacaaacaaac

SEQ ID NO: 11249 - DNA, 25 bp, Probe Sequence
tagtcatcgctattaccatgctgat

SEQ ID NO: 11250 - DNA, 25 bp, Probe Sequence
ttagtcatcgctattaccatgctga

SEQ ID NO: 11251 - DNA, 25 bp, Probe Sequence
cgttatttagtcatcgctattacca

SEQ ID NO: 11252 - DNA, 25 bp, Probe Sequence
gtcatcgctattaccatgctgattg

SEQ ID NO: 11253 - DNA, 25 bp, Probe Sequence
agtcatcgctattaccatgctgatt

SEQ ID NO: 11254 - DNA, 25 bp, Probe Sequence
gggacggataacaatttcacatcat

SEQ ID NO: 11255 - DNA, 25 bp, Probe Sequence
tagttacgtccaatagtgacttgtc

SEQ ID NO: 11256 - DNA, 25 bp, Probe Sequence
ccatagttacgtccaatagtgactt

SEQ ID NO: 11257 - DNA, 25 bp, Probe Sequence
atagttacgtccaatagtgacttgt

SEQ ID NO: 11258 - DNA, 25 bp, Probe Sequence
attctatcttggacaaccagctatc

SEQ ID NO: 11259 - DNA, 25 bp, Probe Sequence
gattctatcttggacaaccagctat

SEQ ID NO: 11260 - DNA, 25 bp, Probe Sequence
catagttacgtccaatagtgacttg

SEQ ID NO: 11261 - DNA, 25 bp, Probe Sequence
gacggataacaatttcacatcatgg

SEQ ID NO: 11262 - DNA, 25 bp, Probe Sequence
ggacggataacaatttcacatcatg

SEQ ID NO: 11263 - DNA, 25 bp, Probe Sequence
cggataacaatttcacatcatggaa

SEQ ID NO: 11264 - DNA, 25 bp, Probe Sequence
ttatgcccaagtaacatgaccttat

SEQ ID NO: 11265 - DNA, 25 bp, Probe Sequence
attatgcccaagtaacatgacctta

SEQ ID NO: 11266 - DNA, 25 bp, Probe Sequence
atttagtcatcgctattaccatgct

SEQ ID NO: 11267 - DNA, 25 bp, Probe Sequence
acggataacaatttcacatcatgga

SEQ ID NO: 11268 - DNA, 25 bp, Probe Sequence
tatgcccaagtaacatgaccttatg

SEQ ID NO: 11269 - DNA, 25 bp, Probe Sequence
ttctatcttggacaaccagctatca

SEQ ID NO: 11270 - DNA, 25 bp, Probe Sequence
tttagtcatcgctattaccatgctg

SEQ ID NO: 11271 - DNA, 25 bp, Probe Sequence
agtaacatgaccttatgggactttc

SEQ ID NO: 11272 - DNA, 25 bp, Probe Sequence
tatttagtcatcgctattaccatgc

SEQ ID NO: 11273 - DNA, 25 bp, Probe Sequence
gtgtacggtgcgagttctatataag

SEQ ID NO: 11274 - DNA, 25 bp, Probe Sequence
tgtacggtgcgagttctatataagc

SEQ ID NO: 11275 - DNA, 25 bp, Probe Sequence
cgtgtacggtgcgagttctatataa

SEQ ID NO: 11276 - DNA, 25 bp, Probe Sequence
tacggtgcgagttctatataagcag

SEQ ID NO: 11277 - DNA, 25 bp, Probe Sequence
tttctgcctcactgaagcgaataaa

SEQ ID NO: 11278 - DNA, 25 bp, Probe Sequence
gtacggtgcgagttctatataagca

SEQ ID NO: 11279 - DNA, 25 bp, Probe Sequence
ttctgcctcactgaagcgaataaag

SEQ ID NO: 11280 - DNA, 25 bp, Probe Sequence
cggtgcgagttctatataagcagag

SEQ ID NO: 11281 - DNA, 25 bp, Probe Sequence
gcgtgtacggtgcgagttctatata

SEQ ID NO: 11282 - DNA, 25 bp, Probe Sequence
gtgcgagttctatataagcagagct

SEQ ID NO: 11283 - DNA, 25 bp, Probe Sequence
ggtgcgagttctatataagcagagc

SEQ ID NO: 11284 - DNA, 25 bp, Probe Sequence
acggtgcgagttctatataagcaga

SEQ ID NO: 11285 - DNA, 25 bp, Probe Sequence
ttttctgcctcactgaagcgaataa

SEQ ID NO: 11286 - DNA, 25 bp, Probe Sequence
gttttctgcctcactgaagcgaata

SEQ ID NO: 11287 - DNA, 25 bp, Probe Sequence
tctgcctcactgaagcgaataaagg

SEQ ID NO: 11288 - DNA, 25 bp, Probe Sequence
gagaaagttttctgcctcactgaag

SEQ ID NO: 11289 - DNA, 25 bp, Probe Sequence
tgcgagttctatataagcagagctc

SEQ ID NO: 11290 - DNA, 25 bp, Probe Sequence
gaaagttttctgcctcactgaagcg

SEQ ID NO: 11291 - DNA, 25 bp, Probe Sequence
agttttctgcctcactgaagcgaat

SEQ ID NO: 11292 - DNA, 25 bp, Probe Sequence
agaaagttttctgcctcactgaagc

SEQ ID NO: 11293 - DNA, 25 bp, Probe Sequence
tgagaaagttttctgcctcactgaa

SEQ ID NO: 11294 - DNA, 25 bp, Probe Sequence
ctgagaaagttttctgcctcactga

SEQ ID NO: 11295 - DNA, 25 bp, Probe Sequence
tctgagaaagttttctgcctcactg

SEQ ID NO: 11296 - DNA, 25 bp, Probe Sequence
gtctgagaaagttttctgcctcact

SEQ ID NO: 11297 - DNA, 25 bp, Probe Sequence
cgtctgagaaagttttctgcctcac

SEQ ID NO: 11298 - DNA, 25 bp, Probe Sequence
tatataagcagaggctcgtttagtg

SEQ ID NO: 11299 - DNA, 25 bp, Probe Sequence
ctatataagcagaggctcgtttagt

SEQ ID NO: 11300 - DNA, 25 bp, Probe Sequence
gtctatataagcagaggctcgttta

SEQ ID NO: 11301 - DNA, 25 bp, Probe Sequence
tctatataagcagaggctcgtttag

SEQ ID NO: 11302 - DNA, 25 bp, Probe Sequence
aacaaaatcccaatccaagtcaaac

SEQ ID NO: 11303 - DNA, 25 bp, Probe Sequence
caacaaaatcccaatccaagtcaaa

SEQ ID NO: 11304 - DNA, 25 bp, Probe Sequence
tcaacaaaatcccaatccaagtcaa

SEQ ID NO: 11305 - DNA, 25 bp, Probe Sequence
aaatcccaatccaagtcaaactttg

SEQ ID NO: 11306 - DNA, 25 bp, Probe Sequence
ctcaacaaaatcccaatccaagtca

SEQ ID NO: 11307 - DNA, 25 bp, Probe Sequence
acaaaatcccaatccaagtcaaact

SEQ ID NO: 11308 - DNA, 25 bp, Probe Sequence
atataagcagaggctcgtttagtgg

SEQ ID NO: 11309 - DNA, 25 bp, Probe Sequence
tccaagtcaaactttgcacatattt

SEQ ID NO: 11310 - DNA, 25 bp, Probe Sequence
atccaagtcaaactttgcacatatt

SEQ ID NO: 11311 - DNA, 25 bp, Probe Sequence
aatccaagtcaaactttgcacatat

SEQ ID NO: 11312 - DNA, 25 bp, Probe Sequence
caatccaagtcaaactttgcacata

SEQ ID NO: 11313 - DNA, 25 bp, Probe Sequence
aatcccaatccaagtcaaactttgc

SEQ ID NO: 11314 - DNA, 25 bp, Probe Sequence
tataagcagaggctcgtttagtgga

SEQ ID NO: 11315 - DNA, 25 bp, Probe Sequence
ccaagtcaaactttgcacatattta

SEQ ID NO: 11316 - DNA, 25 bp, Probe Sequence
aaaatcccaatccaagtcaaacttt

SEQ ID NO: 11317 - DNA, 25 bp, Probe Sequence
caaaatcccaatccaagtcaaactt

SEQ ID NO: 11318 - DNA, 25 bp, Probe Sequence
ataagcagaggctcgtttagtggaa

SEQ ID NO: 11319 - DNA, 25 bp, Probe Sequence
ccaatccaagtcaaactttgcacat

SEQ ID NO: 11320 - DNA, 25 bp, Probe Sequence
caagtcaaactttgcacatatttat

SEQ ID NO: 11321 - DNA, 25 bp, Probe Sequence
atcccaatccaagtcaaactttgca

SEQ ID NO: 11322 - DNA, 25 bp, Probe Sequence
catcaagtgtatcaatgccaagtac

SEQ ID NO: 11323 - DNA, 25 bp, Probe Sequence
acatcaagtgtatcaatgccaagta

SEQ ID NO: 11324 - DNA, 25 bp, Probe Sequence
atcaagtgtatcaatgccaagtacg

SEQ ID NO: 11325 - DNA, 25 bp, Probe Sequence
tacatcaagtgtatcaatgccaagt

SEQ ID NO: 11326 - DNA, 25 bp, Probe Sequence
gtacatcaagtgtatcaatgccaag

SEQ ID NO: 11327 - DNA, 25 bp, Probe Sequence
agtacatcaagtgtatcaatgccaa

SEQ ID NO: 11328 - DNA, 25 bp, Probe Sequence
cagtacatcaagtgtatcaatgcca

SEQ ID NO: 11329 - DNA, 25 bp, Probe Sequence
tggcagtacatcaagtgtatcaatg

SEQ ID NO: 11330 - DNA, 25 bp, Probe Sequence
tcaagtgtatcaatgccaagtacgc

SEQ ID NO: 11331 - DNA, 25 bp, Probe Sequence
gcagtacatcaagtgtatcaatgcc

SEQ ID NO: 11332 - DNA, 25 bp, Probe Sequence
ggcagtacatcaagtgtatcaatgc

SEQ ID NO: 11333 - DNA, 25 bp, Probe Sequence
caagtgtatcaatgccaagtacgcc

SEQ ID NO: 11334 - DNA, 25 bp, Probe Sequence
catatgcccagtacaggaccttatg

SEQ ID NO: 11335 - DNA, 25 bp, Probe Sequence
gatcacggtgaagagacatgagagg

SEQ ID NO: 11336 - DNA, 25 bp, Probe Sequence
ggatcacggtgaagagacatgagag

SEQ ID NO: 11337 - DNA, 25 bp, Probe Sequence
atcacggtgaagagacatgagaggt

SEQ ID NO: 11338 - DNA, 25 bp, Probe Sequence
cggtgaaataccactactctgatca

SEQ ID NO: 11339 - DNA, 25 bp, Probe Sequence
gtgatacgtttgactccgggatttc

SEQ ID NO: 11340 - DNA, 25 bp, Probe Sequence
ctgtacggtttgcagacatcaatgg

SEQ ID NO: 11341 - DNA, 25 bp, Probe Sequence
cctgtacggtttgcagacatcaatg

SEQ ID NO: 11342 - DNA, 25 bp, Probe Sequence
atcaatggcgtgatacgtttgactc

SEQ ID NO: 11343 - DNA, 25 bp, Probe Sequence
atacgtttgactccgggatttccag

SEQ ID NO: 11344 - DNA, 25 bp, Probe Sequence
gatacgtttgactccgggatttcca

SEQ ID NO: 11345 - DNA, 25 bp, Probe Sequence
tgatacgtttgactccgggatttcc

SEQ ID NO: 11346 - DNA, 25 bp, Probe Sequence
catcaatggcgtgatacgtttgact

SEQ ID NO: 11347 - DNA, 25 bp, Probe Sequence
gacatcaatggcgtgatacgtttga

SEQ ID NO: 11348 - DNA, 25 bp, Probe Sequence
agacatcaatggcgtgatacgtttg

SEQ ID NO: 11349 - DNA, 25 bp, Probe Sequence
cagacatcaatggcgtgatacgttt

SEQ ID NO: 11350 - DNA, 25 bp, Probe Sequence
tttgcagacatcaatggcgtgatac

SEQ ID NO: 11351 - DNA, 25 bp, Probe Sequence
gtttgcagacatcaatggcgtgata

SEQ ID NO: 11352 - DNA, 25 bp, Probe Sequence
acatcaatggcgtgatacgtttgac

SEQ ID NO: 11353 - DNA, 25 bp, Probe Sequence
gtttgactccgggatttccagtctc

SEQ ID NO: 11354 - DNA, 25 bp, Probe Sequence
tgtacaaaataagcaggctggtacc

SEQ ID NO: 11355 - DNA, 25 bp, Probe Sequence
tacaaaataagcaggctggtaccgg

SEQ ID NO: 11356 - DNA, 25 bp, Probe Sequence
gtacaaaataagcaggctggtaccg

SEQ ID NO: 11357 - DNA, 25 bp, Probe Sequence
aactatggctgtctacactgtctac

SEQ ID NO: 11358 - DNA, 25 bp, Probe Sequence
caactatggctgtctacactgtcta

SEQ ID NO: 11359 - DNA, 25 bp, Probe Sequence
ctatggctgtctacactgtctactg

SEQ ID NO: 11360 - DNA, 25 bp, Probe Sequence
tatggctgtctacactgtctactga

SEQ ID NO: 11361 - DNA, 25 bp, Probe Sequence
actatggctgtctacactgtctact

SEQ ID NO: 11362 - DNA, 25 bp, Probe Sequence
accctgatttcaatcttctaccctt

SEQ ID NO: 11363 - DNA, 25 bp, Probe Sequence
tgtctacactgtctactgaccagag

SEQ ID NO: 11364 - DNA, 25 bp, Probe Sequence
ctgtctacactgtctactgaccaga

SEQ ID NO: 11365 - DNA, 25 bp, Probe Sequence
cctgatttcaatcttctacccttgg

SEQ ID NO: 11366 - DNA, 25 bp, Probe Sequence
ccctgatttcaatcttctacccttg

SEQ ID NO: 11367 - DNA, 25 bp, Probe Sequence
gaccctgatttcaatcttctaccct

SEQ ID NO: 11368 - DNA, 25 bp, Probe Sequence
gatttcaatcttctacccttgggag

SEQ ID NO: 11369 - DNA, 25 bp, Probe Sequence
ctgatttcaatcttctacccttggg

SEQ ID NO: 11370 - DNA, 25 bp, Probe Sequence
acaactatggctgtctacactgtct

SEQ ID NO: 11371 - DNA, 25 bp, Probe Sequence
cacaactatggctgtctacactgtc

SEQ ID NO: 11372 - DNA, 25 bp, Probe Sequence
atttcaatcttctacccttgggagt

SEQ ID NO: 11373 - DNA, 25 bp, Probe Sequence
tgatttcaatcttctacccttggga

SEQ ID NO: 11374 - DNA, 25 bp, Probe Sequence
tttcaatcttctacccttgggagtt

SEQ ID NO: 11375 - DNA, 25 bp, Probe Sequence
tgaccctgatttcaatcttctaccc

SEQ ID NO: 11376 - DNA, 25 bp, Probe Sequence
ttcaatcttctacccttgggagttc

SEQ ID NO: 11377 - DNA, 25 bp, Probe Sequence
atggctgtctacactgtctactgac

SEQ ID NO: 11378 - DNA, 25 bp, Probe Sequence
caatcttctacccttgggagttctg

SEQ ID NO: 11379 - DNA, 25 bp, Probe Sequence
tcaatcttctacccttgggagttct

SEQ ID NO: 11380 - DNA, 25 bp, Probe Sequence
gtctacactgtctactgaccagagc

SEQ ID NO: 11381 - DNA, 25 bp, Probe Sequence
aaccctatttcgccgtcctataata

SEQ ID NO: 11382 - DNA, 25 bp, Probe Sequence
atgtctacataactttcgtaatggc

SEQ ID NO: 11383 - DNA, 25 bp, Probe Sequence
tcacctaatcatgtctacataactt

SEQ ID NO: 11384 - DNA, 25 bp, Probe Sequence
ttcacctaatcatgtctacataact

SEQ ID NO: 11385 - DNA, 25 bp, Probe Sequence
gcctttcacctaatcatgtctacat

SEQ ID NO: 11386 - DNA, 25 bp, Probe Sequence
gagcctttcacctaatcatgtctac

SEQ ID NO: 11387 - DNA, 25 bp, Probe Sequence
agcctttcacctaatcatgtctaca

SEQ ID NO: 11388 - DNA, 25 bp, Probe Sequence
agagcctttcacctaatcatgtcta

SEQ ID NO: 11389 - DNA, 25 bp, Probe Sequence
tagagcctttcacctaatcatgtct

SEQ ID NO: 11390 - DNA, 25 bp, Probe Sequence
gaaccctatttcgccgtcctataat

SEQ ID NO: 11391 - DNA, 25 bp, Probe Sequence
tatttacggtaaactgtcccacttg

SEQ ID NO: 11392 - DNA, 25 bp, Probe Sequence
gtatttacggtaaactgtcccactt

SEQ ID NO: 11393 - DNA, 25 bp, Probe Sequence
ttagagcctttcacctaatcatgtc

SEQ ID NO: 11394 - DNA, 25 bp, Probe Sequence
tttagagcctttcacctaatcatgt

SEQ ID NO: 11395 - DNA, 25 bp, Probe Sequence
ctttagagcctttcacctaatcatg

SEQ ID NO: 11396 - DNA, 25 bp, Probe Sequence
gagtatttacggtaaactgtcccac

SEQ ID NO: 11397 - DNA, 25 bp, Probe Sequence
agtatttacggtaaactgtcccact

SEQ ID NO: 11398 - DNA, 25 bp, Probe Sequence
catgtctacataactttcgtaatgg

SEQ ID NO: 11399 - DNA, 25 bp, Probe Sequence
cctttcacctaatcatgtctacata

SEQ ID NO: 11400 - DNA, 25 bp, Probe Sequence
agaaccctatttcgccgtcctataa

SEQ ID NO: 11401 - DNA, 25 bp, Probe Sequence
gctttagagcctttcacctaatcat

SEQ ID NO: 11402 - DNA, 25 bp, Probe Sequence
cctaatcatgtctacataactttcg

SEQ ID NO: 11403 - DNA, 25 bp, Probe Sequence
tcatgtctacataactttcgtaatg

SEQ ID NO: 11404 - DNA, 25 bp, Probe Sequence
tgtctacataactttcgtaatggcc

SEQ ID NO: 11405 - DNA, 25 bp, Probe Sequence
gaggagaagaaactaaccaggattc

SEQ ID NO: 11406 - DNA, 25 bp, Probe Sequence
ggaggagaagaaactaaccaggatt

SEQ ID NO: 11407 - DNA, 25 bp, Probe Sequence
gtacatacaagtggtatcatatgcc

SEQ ID NO: 11408 - DNA, 25 bp, Probe Sequence
ggtacatacaagtggtatcatatgc

SEQ ID NO: 11409 - DNA, 25 bp, Probe Sequence
cggtacatacaagtggtatcatatg

SEQ ID NO: 11410 - DNA, 25 bp, Probe Sequence
agaagaaactaaccaggattccctc

SEQ ID NO: 11411 - DNA, 25 bp, Probe Sequence
gagaagaaactaaccaggattccct

SEQ ID NO: 11412 - DNA, 25 bp, Probe Sequence
ccggtacatacaagtggtatcatat

SEQ ID NO: 11413 - DNA, 25 bp, Probe Sequence
aagaaactaaccaggattccctcag

SEQ ID NO: 11414 - DNA, 25 bp, Probe Sequence
gaagaaactaaccaggattccctca

SEQ ID NO: 11415 - DNA, 25 bp, Probe Sequence
aggagaagaaactaaccaggattcc

SEQ ID NO: 11416 - DNA, 25 bp, Probe Sequence
ctttcccaaatgtcgtataccactc

SEQ ID NO: 11417 - DNA, 25 bp, Probe Sequence
ggagaagaaactaaccaggattccc

SEQ ID NO: 11418 - DNA, 25 bp, Probe Sequence
actttcccaaatgtcgtataccact

SEQ ID NO: 11419 - DNA, 25 bp, Probe Sequence
cggaggagaagaaactaaccaggat

SEQ ID NO: 11420 - DNA, 25 bp, Probe Sequence
gccggtacatacaagtggtatcata

SEQ ID NO: 11421 - DNA, 25 bp, Probe Sequence
ccgtacatgaccttatgggactttc

SEQ ID NO: 11422 - DNA, 25 bp, Probe Sequence
agaaactaaccaggattccctcagt

SEQ ID NO: 11423 - DNA, 25 bp, Probe Sequence
tacatacaagtggtatcatatgccc

SEQ ID NO: 11424 - DNA, 25 bp, Probe Sequence
gactttcccaaatgtcgtataccac

SEQ ID NO: 11425 - DNA, 25 bp, Probe Sequence
tttcccaaatgtcgtataccactcc

SEQ ID NO: 11426 - DNA, 25 bp, Probe Sequence
tacaagtggtatcatatgcccagta

SEQ ID NO: 11427 - DNA, 25 bp, Probe Sequence
catacaagtggtatcatatgcccag

SEQ ID NO: 11428 - DNA, 25 bp, Probe Sequence
atacaagtggtatcatatgcccagt

SEQ ID NO: 11429 - DNA, 25 bp, Probe Sequence
gtcttccacaacatattgaacctgt

SEQ ID NO: 11430 - DNA, 25 bp, Probe Sequence
cgtcttccacaacatattgaacctg

SEQ ID NO: 11431 - DNA, 25 bp, Probe Sequence
ttgcgtcttccacaacatattgaac

SEQ ID NO: 11432 - DNA, 25 bp, Probe Sequence
taaaggcaagaagatgaggaagaag

SEQ ID NO: 11433 - DNA, 25 bp, Probe Sequence
ttaaaggcaagaagatgaggaagaa

SEQ ID NO: 11434 - DNA, 25 bp, Probe Sequence
agtcacctctttcgtcttaatgttc

SEQ ID NO: 11435 - DNA, 25 bp, Probe Sequence
cttaaaggcaagaagatgaggaaga

SEQ ID NO: 11436 - DNA, 25 bp, Probe Sequence
tcacctctttcgtcttaatgttcac

SEQ ID NO: 11437 - DNA, 25 bp, Probe Sequence
gtcacctctttcgtcttaatgttca

SEQ ID NO: 11438 - DNA, 25 bp, Probe Sequence
acttaaaggcaagaagatgaggaag

SEQ ID NO: 11439 - DNA, 25 bp, Probe Sequence
ggcaagaagatgaggaagaaggaag

SEQ ID NO: 11440 - DNA, 25 bp, Probe Sequence
cacttaaaggcaagaagatgaggaa

SEQ ID NO: 11441 - DNA, 25 bp, Probe Sequence
atcacttaaaggcaagaagatgagg

SEQ ID NO: 11442 - DNA, 25 bp, Probe Sequence
gagtcacctctttcgtcttaatgtt

SEQ ID NO: 11443 - DNA, 25 bp, Probe Sequence
cacctctttcgtcttaatgttcacc

SEQ ID NO: 11444 - DNA, 25 bp, Probe Sequence
caagaagatgaggaagaaggaagcg

SEQ ID NO: 11445 - DNA, 25 bp, Probe Sequence
aggcaagaagatgaggaagaaggaa

SEQ ID NO: 11446 - DNA, 25 bp, Probe Sequence
aaggcaagaagatgaggaagaagga

SEQ ID NO: 11447 - DNA, 25 bp, Probe Sequence
ctctttcgtcttaatgttcaccgtc

SEQ ID NO: 11448 - DNA, 25 bp, Probe Sequence
aacaagtggctgattgagaaggaag

SEQ ID NO: 11449 - DNA, 25 bp, Probe Sequence
gatcacttaaaggcaagaagatgag

SEQ ID NO: 11450 - DNA, 25 bp, Probe Sequence
tttgcgtcttccacaacatattgaa

SEQ ID NO: 11451 - DNA, 25 bp, Probe Sequence
tcacttaaaggcaagaagatgagga

SEQ ID NO: 11452 - DNA, 25 bp, Probe Sequence
gcaagaagatgaggaagaaggaagc

SEQ ID NO: 11453 - DNA, 25 bp, Probe Sequence
ttcggtggagttcctatataagcag

SEQ ID NO: 11454 - DNA, 25 bp, Probe Sequence
cactccataacgctcctcatactag

SEQ ID NO: 11455 - DNA, 25 bp, Probe Sequence
cggtggagttcctatataagcagag

SEQ ID NO: 11456 - DNA, 25 bp, Probe Sequence
ggtggagttcctatataagcagagc

SEQ ID NO: 11457 - DNA, 25 bp, Probe Sequence
tcggtggagttcctatataagcaga

SEQ ID NO: 11458 - DNA, 25 bp, Probe Sequence
ctcaactttcctcactatctgcttc

SEQ ID NO: 11459 - DNA, 25 bp, Probe Sequence
ttattggctcaactttcctcactat

SEQ ID NO: 11460 - DNA, 25 bp, Probe Sequence
attattggctcaactttcctcacta

SEQ ID NO: 11461 - DNA, 25 bp, Probe Sequence
tattggctcaactttcctcactatc

SEQ ID NO: 11462 - DNA, 25 bp, Probe Sequence
ccactccataacgctcctcatacta

SEQ ID NO: 11463 - DNA, 25 bp, Probe Sequence
cattattggctcaactttcctcact

SEQ ID NO: 11464 - DNA, 25 bp, Probe Sequence
tcattattggctcaactttcctcac

SEQ ID NO: 11465 - DNA, 25 bp, Probe Sequence
gtcattattggctcaactttcctca

SEQ ID NO: 11466 - DNA, 25 bp, Probe Sequence
tttcggtggagttcctatataagca

SEQ ID NO: 11467 - DNA, 25 bp, Probe Sequence
cttcacgtcattattggctcaactt

SEQ ID NO: 11468 - DNA, 25 bp, Probe Sequence
attggctcaactttcctcactatct

SEQ ID NO: 11469 - DNA, 25 bp, Probe Sequence
cttccactccataacgctcctcata

SEQ ID NO: 11470 - DNA, 25 bp, Probe Sequence
actccataacgctcctcatactagg

SEQ ID NO: 11471 - DNA, 25 bp, Probe Sequence
cgtcattattggctcaactttcctc

SEQ ID NO: 11472 - DNA, 25 bp, Probe Sequence
ttccactccataacgctcctcatac

SEQ ID NO: 11473 - DNA, 25 bp, Probe Sequence
gctcaactttcctcactatctgctt

SEQ ID NO: 11474 - DNA, 25 bp, Probe Sequence
ttggctcaactttcctcactatctg

SEQ ID NO: 11475 - DNA, 25 bp, Probe Sequence
gtggagttcctatataagcagagct

SEQ ID NO: 11476 - DNA, 25 bp, Probe Sequence
acttcacgtcattattggctcaact

SEQ ID NO: 11477 - DNA, 25 bp, Probe Sequence
gctctgaatgtcaaagtgaagaaat

SEQ ID NO: 11478 - DNA, 25 bp, Probe Sequence
tgctctgaatgtcaaagtgaagaaa

SEQ ID NO: 11479 - DNA, 25 bp, Probe Sequence
gtgctctgaatgtcaaagtgaagaa

SEQ ID NO: 11480 - DNA, 25 bp, Probe Sequence
ctctgaatgtcaaagtgaagaaatt

SEQ ID NO: 11481 - DNA, 25 bp, Probe Sequence
agtgctctgaatgtcaaagtgaaga

SEQ ID NO: 11482 - DNA, 25 bp, Probe Sequence
cagtgctctgaatgtcaaagtgaag

SEQ ID NO: 11483 - DNA, 25 bp, Probe Sequence
tctgaatgtcaaagtgaagaaattc

SEQ ID NO: 11484 - DNA, 25 bp, Probe Sequence
caaagtgaagaaattcaatgaagcg

SEQ ID NO: 11485 - DNA, 25 bp, Probe Sequence
tacctactatccagcgaaaccacag

SEQ ID NO: 11486 - DNA, 25 bp, Probe Sequence
ctacctactatccagcgaaaccaca

SEQ ID NO: 11487 - DNA, 25 bp, Probe Sequence
tcaaagtgaagaaattcaatgaagc

SEQ ID NO: 11488 - DNA, 25 bp, Probe Sequence
gtccctacctactatccagcgaaac

SEQ ID NO: 11489 - DNA, 25 bp, Probe Sequence
ccagtgctctgaatgtcaaagtgaa

SEQ ID NO: 11490 - DNA, 25 bp, Probe Sequence
atctaattagtgacgcgcatgaatg

SEQ ID NO: 11491 - DNA, 25 bp, Probe Sequence
catctaattagtgacgcgcatgaat

SEQ ID NO: 11492 - DNA, 25 bp, Probe Sequence
cctacctactatccagcgaaaccac

SEQ ID NO: 11493 - DNA, 25 bp, Probe Sequence
tgtcaaagtgaagaaattcaatgaa

SEQ ID NO: 11494 - DNA, 25 bp, Probe Sequence
tgtccctacctactatccagcgaaa

SEQ ID NO: 11495 - DNA, 25 bp, Probe Sequence
atgtcaaagtgaagaaattcaatga

SEQ ID NO: 11496 - DNA, 25 bp, Probe Sequence
taattagtgacgcgcatgaatggat

SEQ ID NO: 11497 - DNA, 25 bp, Probe Sequence
gtcaaagtgaagaaattcaatgaag

SEQ ID NO: 11498 - DNA, 25 bp, Probe Sequence
cgcatgaatggatgaacgagattcc

SEQ ID NO: 11499 - DNA, 25 bp, Probe Sequence
aatgtcaaagtgaagaaattcaatg

SEQ ID NO: 11500 - DNA, 25 bp, Probe Sequence
gaatgtcaaagtgaagaaattcaat

SEQ ID NO: 11501 - DNA, 25 bp, Probe Sequence
tagaagaactggtggagcagtcaag

SEQ ID NO: 11502 - DNA, 25 bp, Probe Sequence
ctagaagaactggtggagcagtcaa

SEQ ID NO: 11503 - DNA, 25 bp, Probe Sequence
cttgacgcatgaagtttcgcaacat

SEQ ID NO: 11504 - DNA, 25 bp, Probe Sequence
gaagaactggtggagcagtcaagag

SEQ ID NO: 11505 - DNA, 25 bp, Probe Sequence
catgaagtttcgcaacatggagacg

SEQ ID NO: 11506 - DNA, 25 bp, Probe Sequence
gatccagcaacgttccctagaagaa

SEQ ID NO: 11507 - DNA, 25 bp, Probe Sequence
atccagcaacgttccctagaagaac

SEQ ID NO: 11508 - DNA, 25 bp, Probe Sequence
caacgttccctagaagaactggtgg

SEQ ID NO: 11509 - DNA, 25 bp, Probe Sequence
aacgttccctagaagaactggtgga

SEQ ID NO: 11510 - DNA, 25 bp, Probe Sequence
accagaaccaacaagattgagaatt

SEQ ID NO: 11511 - DNA, 25 bp, Probe Sequence
caccagaaccaacaagattgagaat

SEQ ID NO: 11512 - DNA, 25 bp, Probe Sequence
tgggatgagtaggacaacatatttc

SEQ ID NO: 11513 - DNA, 25 bp, Probe Sequence
gtgggatgagtaggacaacatattt

SEQ ID NO: 11514 - DNA, 25 bp, Probe Sequence
tagtacaggtggtgtgtaagaagta

SEQ ID NO: 11515 - DNA, 25 bp, Probe Sequence
ccagaaccaacaagattgagaattt

SEQ ID NO: 11516 - DNA, 25 bp, Probe Sequence
catagtacaggtggtgtgtaagaag

SEQ ID NO: 11517 - DNA, 25 bp, Probe Sequence
gggatgagtaggacaacatatttca

SEQ ID NO: 11518 - DNA, 25 bp, Probe Sequence
atagtacaggtggtgtgtaagaagt

SEQ ID NO: 11519 - DNA, 25 bp, Probe Sequence
agcactcaatgacaatctggagaag

SEQ ID NO: 11520 - DNA, 25 bp, Probe Sequence
acatagtacaggtggtgtgtaagaa

SEQ ID NO: 11521 - DNA, 25 bp, Probe Sequence
aacaagattgagaatttctgagcag

SEQ ID NO: 11522 - DNA, 25 bp, Probe Sequence
ggatgagtaggacaacatatttcag

SEQ ID NO: 11523 - DNA, 25 bp, Probe Sequence
caagattgagaatttctgagcagtg

SEQ ID NO: 11524 - DNA, 25 bp, Probe Sequence
cagaaccaacaagattgagaatttc

SEQ ID NO: 11525 - DNA, 25 bp, Probe Sequence
caacaagattgagaatttctgagca

SEQ ID NO: 11526 - DNA, 25 bp, Probe Sequence
aagttagcacatagtacaggtggtg

SEQ ID NO: 11527 - DNA, 25 bp, Probe Sequence
aagattgagaatttctgagcagtgt

SEQ ID NO: 11528 - DNA, 25 bp, Probe Sequence
acaagattgagaatttctgagcagt

SEQ ID NO: 11529 - DNA, 25 bp, Probe Sequence
accaacaagattgagaatttctgag

SEQ ID NO: 11530 - DNA, 25 bp, Probe Sequence
ccaacaagattgagaatttctgagc

SEQ ID NO: 11531 - DNA, 25 bp, Probe Sequence
ggtgggatgagtaggacaacatatt

SEQ ID NO: 11532 - DNA, 25 bp, Probe Sequence
aaccaacaagattgagaatttctga

SEQ ID NO: 11533 - DNA, 25 bp, Probe Sequence
gaaccaacaagattgagaatttctg

SEQ ID NO: 11534 - DNA, 25 bp, Probe Sequence
gtctaatcgtcataggttactgcta

SEQ ID NO: 11535 - DNA, 25 bp, Probe Sequence
cttctacagtctaatcgtcataggt

SEQ ID NO: 11536 - DNA, 25 bp, Probe Sequence
ttctacagtctaatcgtcataggtt

SEQ ID NO: 11537 - DNA, 25 bp, Probe Sequence
ctaatcgtcataggttactgctaga

SEQ ID NO: 11538 - DNA, 25 bp, Probe Sequence
tctaatcgtcataggttactgctag

SEQ ID NO: 11539 - DNA, 25 bp, Probe Sequence
aatcgtcataggttactgctagaac

SEQ ID NO: 11540 - DNA, 25 bp, Probe Sequence
aggttactgctagaacattaaggtg

SEQ ID NO: 11541 - DNA, 25 bp, Probe Sequence
cgtcataggttactgctagaacatt

SEQ ID NO: 11542 - DNA, 25 bp, Probe Sequence
taatcgtcataggttactgctagaa

SEQ ID NO: 11543 - DNA, 25 bp, Probe Sequence
agtctaatcgtcataggttactgct

SEQ ID NO: 11544 - DNA, 25 bp, Probe Sequence
acttctacagtctaatcgtcatagg

SEQ ID NO: 11545 - DNA, 25 bp, Probe Sequence
ctacagtctaatcgtcataggttac

SEQ ID NO: 11546 - DNA, 25 bp, Probe Sequence
tctacagtctaatcgtcataggtta

SEQ ID NO: 11547 - DNA, 25 bp, Probe Sequence
taggttactgctagaacattaaggt

SEQ ID NO: 11548 - DNA, 25 bp, Probe Sequence
tcgtcataggttactgctagaacat

SEQ ID NO: 11549 - DNA, 25 bp, Probe Sequence
atcgtcataggttactgctagaaca

SEQ ID NO: 11550 - DNA, 25 bp, Probe Sequence
ctgctagaacattaaggtgtaggtt

SEQ ID NO: 11551 - DNA, 25 bp, Probe Sequence
tactgctagaacattaaggtgtagg

SEQ ID NO: 11552 - DNA, 25 bp, Probe Sequence
tggtacttctacagtctaatcgtca

SEQ ID NO: 11553 - DNA, 25 bp, Probe Sequence
ggttactgctagaacattaaggtgt

SEQ ID NO: 11554 - DNA, 25 bp, Probe Sequence
ggtacttctacagtctaatcgtcat

SEQ ID NO: 11555 - DNA, 25 bp, Probe Sequence
atggtacttctacagtctaatcgtc

SEQ ID NO: 11556 - DNA, 25 bp, Probe Sequence
tgctagaacattaaggtgtaggtta

SEQ ID NO: 11557 - DNA, 25 bp, Probe Sequence
tacagtctaatcgtcataggttact

SEQ ID NO: 11558 - DNA, 25 bp, Probe Sequence
actctccaagtaattctgataccaa

SEQ ID NO: 11559 - DNA, 25 bp, Probe Sequence
aactctccaagtaattctgatacca

SEQ ID NO: 11560 - DNA, 25 bp, Probe Sequence
ctctccaagtaattctgataccaat

SEQ ID NO: 11561 - DNA, 25 bp, Probe Sequence
gccagtacatcacagtgtatcatat

SEQ ID NO: 11562 - DNA, 25 bp, Probe Sequence
tctccaagtaattctgataccaata

SEQ ID NO: 11563 - DNA, 25 bp, Probe Sequence
cagtacatcacagtgtatcatatgc

SEQ ID NO: 11564 - DNA, 25 bp, Probe Sequence
aaactctccaagtaattctgatacc

SEQ ID NO: 11565 - DNA, 25 bp, Probe Sequence
ctccaagtaattctgataccaataa

SEQ ID NO: 11566 - DNA, 25 bp, Probe Sequence
ttctgataccaataaagtgggagac

SEQ ID NO: 11567 - DNA, 25 bp, Probe Sequence
attctgataccaataaagtgggaga

SEQ ID NO: 11568 - DNA, 25 bp, Probe Sequence
tgataccaataaagtgggagacctc

SEQ ID NO: 11569 - DNA, 25 bp, Probe Sequence
ctgataccaataaagtgggagacct

SEQ ID NO: 11570 - DNA, 25 bp, Probe Sequence
tctgataccaataaagtgggagacc

SEQ ID NO: 11571 - DNA, 25 bp, Probe Sequence
aattctgataccaataaagtgggag

SEQ ID NO: 11572 - DNA, 25 bp, Probe Sequence
gagtatttacggtaactgcccaact

SEQ ID NO: 11573 - DNA, 25 bp, Probe Sequence
ccagtacatcacagtgtatcatatg

SEQ ID NO: 11574 - DNA, 25 bp, Probe Sequence
agtatttacggtaactgcccaactg

SEQ ID NO: 11575 - DNA, 25 bp, Probe Sequence
gtaattctgataccaataaagtggg

SEQ ID NO: 11576 - DNA, 25 bp, Probe Sequence
taattctgataccaataaagtggga

SEQ ID NO: 11577 - DNA, 25 bp, Probe Sequence
gtatttacggtaactgcccaactgg

SEQ ID NO: 11578 - DNA, 25 bp, Probe Sequence
ggagtatttacggtaactgcccaac

SEQ ID NO: 11579 - DNA, 25 bp, Probe Sequence
gataccaataaagtgggagacctcc

SEQ ID NO: 11580 - DNA, 25 bp, Probe Sequence
ggccagtacatcacagtgtatcata

SEQ ID NO: 11581 - DNA, 25 bp, Probe Sequence
tccaagtaattctgataccaataaa

SEQ ID NO: 11582 - DNA, 25 bp, Probe Sequence
gttgacacagcaggagataagatta

SEQ ID NO: 11583 - DNA, 25 bp, Probe Sequence
ttgacacagcaggagataagattaa

SEQ ID NO: 11584 - DNA, 25 bp, Probe Sequence
atattgtcttcctgcgagaatagaa

SEQ ID NO: 11585 - DNA, 25 bp, Probe Sequence
atagatgttgacacagcaggagata

SEQ ID NO: 11586 - DNA, 25 bp, Probe Sequence
tgacacagcaggagataagattaat

SEQ ID NO: 11587 - DNA, 25 bp, Probe Sequence
tagatgttgacacagcaggagataa

SEQ ID NO: 11588 - DNA, 25 bp, Probe Sequence
gacacagcaggagataagattaatg

SEQ ID NO: 11589 - DNA, 25 bp, Probe Sequence
aatattgtcttcctgcgagaataga

SEQ ID NO: 11590 - DNA, 25 bp, Probe Sequence
atgttgacacagcaggagataagat

SEQ ID NO: 11591 - DNA, 25 bp, Probe Sequence
aatagatgttgacacagcaggagat

SEQ ID NO: 11592 - DNA, 25 bp, Probe Sequence
tgttgacacagcaggagataagatt

SEQ ID NO: 11593 - DNA, 25 bp, Probe Sequence
acacagcaggagataagattaatgt

SEQ ID NO: 11594 - DNA, 25 bp, Probe Sequence
tatggtcaggatatttggattagcc

SEQ ID NO: 11595 - DNA, 25 bp, Probe Sequence
ctgaggtgagagaattgcttgaact

SEQ ID NO: 11596 - DNA, 25 bp, Probe Sequence
cagcaggagataagattaatgttct

SEQ ID NO: 11597 - DNA, 25 bp, Probe Sequence
cacagcaggagataagattaatgtt

SEQ ID NO: 11598 - DNA, 25 bp, Probe Sequence
gatgttgacacagcaggagataaga

SEQ ID NO: 11599 - DNA, 25 bp, Probe Sequence
agatgttgacacagcaggagataag

SEQ ID NO: 11600 - DNA, 25 bp, Probe Sequence
acagcaggagataagattaatgttc

SEQ ID NO: 11601 - DNA, 25 bp, Probe Sequence
caatagatgttgacacagcaggaga

SEQ ID NO: 11602 - DNA, 25 bp, Probe Sequence
tgaggtgagagaattgcttgaactc

SEQ ID NO: 11603 - DNA, 25 bp, Probe Sequence
acaatagatgttgacacagcaggag

SEQ ID NO: 11604 - DNA, 25 bp, Probe Sequence
atatggtcaggatatttggattagc

SEQ ID NO: 11605 - DNA, 25 bp, Probe Sequence
gaggtgagagaattgcttgaactcc

SEQ ID NO: 11606 - DNA, 25 bp, Probe Sequence
attatcttcttactgctccactgac

SEQ ID NO: 11607 - DNA, 25 bp, Probe Sequence
cattatcttcttactgctccactga

SEQ ID NO: 11608 - DNA, 25 bp, Probe Sequence
acattatcttcttactgctccactg

SEQ ID NO: 11609 - DNA, 25 bp, Probe Sequence
aacattatcttcttactgctccact

SEQ ID NO: 11610 - DNA, 25 bp, Probe Sequence
caacattatcttcttactgctccac

SEQ ID NO: 11611 - DNA, 25 bp, Probe Sequence
tcaacattatcttcttactgctcca

SEQ ID NO: 11612 - DNA, 25 bp, Probe Sequence
ttctcctcctcttctccttcatatt

SEQ ID NO: 11613 - DNA, 25 bp, Probe Sequence
cttctccttcatattgctaactcct

SEQ ID NO: 11614 - DNA, 25 bp, Probe Sequence
tcttctccttcatattgctaactcc

SEQ ID NO: 11615 - DNA, 25 bp, Probe Sequence
cctcttctccttcatattgctaact

SEQ ID NO: 11616 - DNA, 25 bp, Probe Sequence
tcctcttctccttcatattgctaac

SEQ ID NO: 11617 - DNA, 25 bp, Probe Sequence
ctcctcttctccttcatattgctaa

SEQ ID NO: 11618 - DNA, 25 bp, Probe Sequence
ttctccttcatattgctaactcctt

SEQ ID NO: 11619 - DNA, 25 bp, Probe Sequence
agtgactgacatacatagcagatat

SEQ ID NO: 11620 - DNA, 25 bp, Probe Sequence
tctcctcctcttctccttcatattg

SEQ ID NO: 11621 - DNA, 25 bp, Probe Sequence
ttcaacattatcttcttactgctcc

SEQ ID NO: 11622 - DNA, 25 bp, Probe Sequence
cctcctcttctccttcatattgcta

SEQ ID NO: 11623 - DNA, 25 bp, Probe Sequence
tatcttcttactgctccactgacaa

SEQ ID NO: 11624 - DNA, 25 bp, Probe Sequence
ttatcttcttactgctccactgaca

SEQ ID NO: 11625 - DNA, 25 bp, Probe Sequence
ctcttctccttcatattgctaactc

SEQ ID NO: 11626 - DNA, 25 bp, Probe Sequence
tctccttcatattgctaactcctta

SEQ ID NO: 11627 - DNA, 25 bp, Probe Sequence
aggaacacattgaagactaagagtt

SEQ ID NO: 11628 - DNA, 25 bp, Probe Sequence
caggaacacattgaagactaagagt

SEQ ID NO: 11629 - DNA, 25 bp, Probe Sequence
gcaggaacacattgaagactaagag

SEQ ID NO: 11630 - DNA, 25 bp, Probe Sequence
tatcatatgccaagtacgcccctat

SEQ ID NO: 11631 - DNA, 25 bp, Probe Sequence
atatgccaagtacgcccctattgac

SEQ ID NO: 11632 - DNA, 25 bp, Probe Sequence
atcatatgccaagtacgcccctatt

SEQ ID NO: 11633 - DNA, 25 bp, Probe Sequence
gtatcatatgccaagtacgccccta

SEQ ID NO: 11634 - DNA, 25 bp, Probe Sequence
catatgccaagtacgcccctattga

SEQ ID NO: 11635 - DNA, 25 bp, Probe Sequence
tcatatgccaagtacgcccctattg

SEQ ID NO: 11636 - DNA, 25 bp, Probe Sequence
tttaggaatctctttggaattggga

SEQ ID NO: 11637 - DNA, 25 bp, Probe Sequence
ctctgcccttctgtatcctatgtat

SEQ ID NO: 11638 - DNA, 25 bp, Probe Sequence
tctgcccttctgtatcctatgtatg

SEQ ID NO: 11639 - DNA, 25 bp, Probe Sequence
cctcctttaactgagtcatcatctt

SEQ ID NO: 11640 - DNA, 25 bp, Probe Sequence
atttgtctcctcctttaactgagtc

SEQ ID NO: 11641 - DNA, 25 bp, Probe Sequence
ttaggaatctctttggaattgggag

SEQ ID NO: 11642 - DNA, 25 bp, Probe Sequence
ctcctcctttaactgagtcatcatc

SEQ ID NO: 11643 - DNA, 25 bp, Probe Sequence
catttgtctcctcctttaactgagt

SEQ ID NO: 11644 - DNA, 25 bp, Probe Sequence
tcctcctttaactgagtcatcatct

SEQ ID NO: 11645 - DNA, 25 bp, Probe Sequence
tctcctcctttaactgagtcatcat

SEQ ID NO: 11646 - DNA, 25 bp, Probe Sequence
gtcagcatttgtctcctcctttaac

SEQ ID NO: 11647 - DNA, 25 bp, Probe Sequence
agcatttgtctcctcctttaactga

SEQ ID NO: 11648 - DNA, 25 bp, Probe Sequence
tcagcatttgtctcctcctttaact

SEQ ID NO: 11649 - DNA, 25 bp, Probe Sequence
ttgtctcctcctttaactgagtcat

SEQ ID NO: 11650 - DNA, 25 bp, Probe Sequence
tttgtctcctcctttaactgagtca

SEQ ID NO: 11651 - DNA, 25 bp, Probe Sequence
gtctcctcctttaactgagtcatca

SEQ ID NO: 11652 - DNA, 25 bp, Probe Sequence
tgtctcctcctttaactgagtcatc

SEQ ID NO: 11653 - DNA, 25 bp, Probe Sequence
gcatttgtctcctcctttaactgag

SEQ ID NO: 11654 - DNA, 25 bp, Probe Sequence
tttaactgagtcatcatcttagtcc

SEQ ID NO: 11655 - DNA, 25 bp, Probe Sequence
cctttaactgagtcatcatcttagt

SEQ ID NO: 11656 - DNA, 25 bp, Probe Sequence
ctgcccttctgtatcctatgtatgc

SEQ ID NO: 11657 - DNA, 25 bp, Probe Sequence
tcctttaactgagtcatcatcttag

SEQ ID NO: 11658 - DNA, 25 bp, Probe Sequence
cagcatttgtctcctcctttaactg

SEQ ID NO: 11659 - DNA, 25 bp, Probe Sequence
ctcctttaactgagtcatcatctta

SEQ ID NO: 11660 - DNA, 25 bp, Probe Sequence
gcttacaggtaggtagaacatagta

SEQ ID NO: 11661 - DNA, 25 bp, Probe Sequence
agcttacaggtaggtagaacatagt

SEQ ID NO: 11662 - DNA, 25 bp, Probe Sequence
gagagacaagagcagcaagaagtaa

SEQ ID NO: 11663 - DNA, 25 bp, Probe Sequence
gctcatgttattctacacacagatc

SEQ ID NO: 11664 - DNA, 25 bp, Probe Sequence
acacatcctactaaattcctgactc

SEQ ID NO: 11665 - DNA, 25 bp, Probe Sequence
gacacatcctactaaattcctgact

SEQ ID NO: 11666 - DNA, 25 bp, Probe Sequence
tgacacatcctactaaattcctgac

SEQ ID NO: 11667 - DNA, 25 bp, Probe Sequence
agctcatgttattctacacacagat

SEQ ID NO: 11668 - DNA, 25 bp, Probe Sequence
catcctactaaattcctgactctgt

SEQ ID NO: 11669 - DNA, 25 bp, Probe Sequence
acatcctactaaattcctgactctg

SEQ ID NO: 11670 - DNA, 25 bp, Probe Sequence
cacatcctactaaattcctgactct

SEQ ID NO: 11671 - DNA, 25 bp, Probe Sequence
cttacaggtaggtagaacatagtac

SEQ ID NO: 11672 - DNA, 25 bp, Probe Sequence
ttgacacatcctactaaattcctga

SEQ ID NO: 11673 - DNA, 25 bp, Probe Sequence
cttgacacatcctactaaattcctg

SEQ ID NO: 11674 - DNA, 25 bp, Probe Sequence
tcttgacacatcctactaaattcct

SEQ ID NO: 11675 - DNA, 25 bp, Probe Sequence
ttgagggacaaatgaattagagacc

SEQ ID NO: 11676 - DNA, 25 bp, Probe Sequence
tagatactaaagttcaagcactggc

SEQ ID NO: 11677 - DNA, 25 bp, Probe Sequence
atctctgattgagggacaaatgaat

SEQ ID NO: 11678 - DNA, 25 bp, Probe Sequence
tctctgattgagggacaaatgaatt

SEQ ID NO: 11679 - DNA, 25 bp, Probe Sequence
tcctactaaattcctgactctgtaa

SEQ ID NO: 11680 - DNA, 25 bp, Probe Sequence
attgagggacaaatgaattagagac

SEQ ID NO: 11681 - DNA, 25 bp, Probe Sequence
tgattgagggacaaatgaattagag

SEQ ID NO: 11682 - DNA, 25 bp, Probe Sequence
ctgattgagggacaaatgaattaga

SEQ ID NO: 11683 - DNA, 25 bp, Probe Sequence
tctgattgagggacaaatgaattag

SEQ ID NO: 11684 - DNA, 25 bp, Probe Sequence
ccttgttgtctggatgatgtattac

SEQ ID NO: 11685 - DNA, 25 bp, Probe Sequence
aagagaacaagcatacctatctgac

SEQ ID NO: 11686 - DNA, 25 bp, Probe Sequence
agagaacaagcatacctatctgact

SEQ ID NO: 11687 - DNA, 25 bp, Probe Sequence
tgctctgagaaccaagaacttaatt

SEQ ID NO: 11688 - DNA, 25 bp, Probe Sequence
tgttgtctggatgatgtattacttc

SEQ ID NO: 11689 - DNA, 25 bp, Probe Sequence
cttgttgtctggatgatgtattact

SEQ ID NO: 11690 - DNA, 25 bp, Probe Sequence
aacaagcatacctatctgactcctt

SEQ ID NO: 11691 - DNA, 25 bp, Probe Sequence
gaacaagcatacctatctgactcct

SEQ ID NO: 11692 - DNA, 25 bp, Probe Sequence
gtgctctgagaaccaagaacttaat

SEQ ID NO: 11693 - DNA, 25 bp, Probe Sequence
gttgtctggatgatgtattacttct

SEQ ID NO: 11694 - DNA, 25 bp, Probe Sequence
gagaacaagcatacctatctgactc

SEQ ID NO: 11695 - DNA, 25 bp, Probe Sequence
ttgttgtctggatgatgtattactt

SEQ ID NO: 11696 - DNA, 25 bp, Probe Sequence
acaagcatacctatctgactccttc

SEQ ID NO: 11697 - DNA, 25 bp, Probe Sequence
agaacaagcatacctatctgactcc

SEQ ID NO: 11698 - DNA, 25 bp, Probe Sequence
agtgctctgagaaccaagaacttaa

SEQ ID NO: 11699 - DNA, 25 bp, Probe Sequence
caagcatacctatctgactccttcc

SEQ ID NO: 11700 - DNA, 25 bp, Probe Sequence
tccttgttgtctggatgatgtatta

SEQ ID NO: 11701 - DNA, 25 bp, Probe Sequence
gtccttgttgtctggatgatgtatt

SEQ ID NO: 11702 - DNA, 25 bp, Probe Sequence
catacctatctgactccttccagtg

SEQ ID NO: 11703 - DNA, 25 bp, Probe Sequence
aagcatacctatctgactccttcca

SEQ ID NO: 11704 - DNA, 25 bp, Probe Sequence
cagaggaaagatgagaaagagaaca

SEQ ID NO: 11705 - DNA, 25 bp, Probe Sequence
agtccttgttgtctggatgatgtat

SEQ ID NO: 11706 - DNA, 25 bp, Probe Sequence
agaggaaagatgagaaagagaacaa

SEQ ID NO: 11707 - DNA, 25 bp, Probe Sequence
aaagtatcaatgtccctctcctaag

SEQ ID NO: 11708 - DNA, 25 bp, Probe Sequence
atgaagaatgagacgcagacaagta

SEQ ID NO: 11709 - DNA, 25 bp, Probe Sequence
aagagtgaaagcaaatgaagaagtc

SEQ ID NO: 11710 - DNA, 25 bp, Probe Sequence
gaaagcaaatgaagaagtctgagaa

SEQ ID NO: 11711 - DNA, 25 bp, Probe Sequence
tgaaagcaaatgaagaagtctgaga

SEQ ID NO: 11712 - DNA, 25 bp, Probe Sequence
gtgaaagcaaatgaagaagtctgag

SEQ ID NO: 11713 - DNA, 25 bp, Probe Sequence
gagtgaaagcaaatgaagaagtctg

SEQ ID NO: 11714 - DNA, 25 bp, Probe Sequence
aaagcaaatgaagaagtctgagaaa

SEQ ID NO: 11715 - DNA, 25 bp, Probe Sequence
agtgaaagcaaatgaagaagtctga

SEQ ID NO: 11716 - DNA, 25 bp, Probe Sequence
taagagtgaaagcaaatgaagaagt

SEQ ID NO: 11717 - DNA, 25 bp, Probe Sequence
agagtgaaagcaaatgaagaagtct

SEQ ID NO: 11718 - DNA, 25 bp, Probe Sequence
ctaagagtgaaagcaaatgaagaag

SEQ ID NO: 11719 - DNA, 25 bp, Probe Sequence
tgaagaatgagacgcagacaagtac

SEQ ID NO: 11720 - DNA, 25 bp, Probe Sequence
tttcagagaatctttaccctccatc

SEQ ID NO: 11721 - DNA, 25 bp, Probe Sequence
tcagtttcagagaatctttaccctc

SEQ ID NO: 11722 - DNA, 25 bp, Probe Sequence
ctcagtttcagagaatctttaccct

SEQ ID NO: 11723 - DNA, 25 bp, Probe Sequence
gaccctcagtttcagagaatcttta

SEQ ID NO: 11724 - DNA, 25 bp, Probe Sequence
gtttcagagaatctttaccctccat

SEQ ID NO: 11725 - DNA, 25 bp, Probe Sequence
accctcagtttcagagaatctttac

SEQ ID NO: 11726 - DNA, 25 bp, Probe Sequence
agagagatcggtgaagtcttgagaa

SEQ ID NO: 11727 - DNA, 25 bp, Probe Sequence
actaagagtgaaagcaaatgaagaa

SEQ ID NO: 11728 - DNA, 25 bp, Probe Sequence
cagtttcagagaatctttaccctcc

SEQ ID NO: 11729 - DNA, 25 bp, Probe Sequence
cctcagtttcagagaatctttaccc

SEQ ID NO: 11730 - DNA, 25 bp, Probe Sequence
ccctcagtttcagagaatctttacc

SEQ ID NO: 11731 - DNA, 25 bp, Probe Sequence
agtttcagagaatctttaccctcca

SEQ ID NO: 11732 - DNA, 25 bp, Probe Sequence
tggaattacaattaactgctgaagt

SEQ ID NO: 11733 - DNA, 25 bp, Probe Sequence
gttctctgtactgaagtagtcatgt

SEQ ID NO: 11734 - DNA, 25 bp, Probe Sequence
agttctctgtactgaagtagtcatg

SEQ ID NO: 11735 - DNA, 25 bp, Probe Sequence
ttggaattacaattaactgctgaag

SEQ ID NO: 11736 - DNA, 25 bp, Probe Sequence
ttctctgtactgaagtagtcatgtt

SEQ ID NO: 11737 - DNA, 25 bp, Probe Sequence
ctctgtactgaagtagtcatgttac

SEQ ID NO: 11738 - DNA, 25 bp, Probe Sequence
tctctgtactgaagtagtcatgtta

SEQ ID NO: 11739 - DNA, 25 bp, Probe Sequence
gtgaaccattagtttgtatccctct

SEQ ID NO: 11740 - DNA, 25 bp, Probe Sequence
ttgtgaaccattagtttgtatccct

SEQ ID NO: 11741 - DNA, 25 bp, Probe Sequence
tgaaccattagtttgtatccctctt

SEQ ID NO: 11742 - DNA, 25 bp, Probe Sequence
tgtgaaccattagtttgtatccctc

SEQ ID NO: 11743 - DNA, 25 bp, Probe Sequence
tttgtgaaccattagtttgtatccc

SEQ ID NO: 11744 - DNA, 25 bp, Probe Sequence
tctgtactgaagtagtcatgttact

SEQ ID NO: 11745 - DNA, 25 bp, Probe Sequence
gaaccattagtttgtatccctcttt

SEQ ID NO: 11746 - DNA, 25 bp, Probe Sequence
aaacaaattcaatgccctaatcaaa

SEQ ID NO: 11747 - DNA, 25 bp, Probe Sequence
gtaaacaaattcaatgccctaatca

SEQ ID NO: 11748 - DNA, 25 bp, Probe Sequence
tgtaaacaaattcaatgccctaatc

SEQ ID NO: 11749 - DNA, 25 bp, Probe Sequence
aacgtgaattcttaatgtatgtcgg

SEQ ID NO: 11750 - DNA, 25 bp, Probe Sequence
atgatagaaagaacatgagcatgga

SEQ ID NO: 11751 - DNA, 25 bp, Probe Sequence
acgtgaattcttaatgtatgtcgga

SEQ ID NO: 11752 - DNA, 25 bp, Probe Sequence
tgatagaaagaacatgagcatggaa

SEQ ID NO: 11753 - DNA, 25 bp, Probe Sequence
gatatgtaaacaaattcaatgccct

SEQ ID NO: 11754 - DNA, 25 bp, Probe Sequence
agaaagaacatgagcatggaaatag

SEQ ID NO: 11755 - DNA, 25 bp, Probe Sequence
gatagaaagaacatgagcatggaaa

SEQ ID NO: 11756 - DNA, 25 bp, Probe Sequence
tatagaacaagtttgctacgaacaa

SEQ ID NO: 11757 - DNA, 25 bp, Probe Sequence
acggataacaatgttcacacaggaa

SEQ ID NO: 11758 - DNA, 25 bp, Probe Sequence
ggataacaatgttcacacaggaaac

SEQ ID NO: 11759 - DNA, 25 bp, Probe Sequence
ccatctacgtattagtcatcgctat

SEQ ID NO: 11760 - DNA, 25 bp, Probe Sequence
gcagtaccatctacgtattagtcat

SEQ ID NO: 11761 - DNA, 25 bp, Probe Sequence
agtaccatctacgtattagtcatcg

SEQ ID NO: 11762 - DNA, 25 bp, Probe Sequence
accatctacgtattagtcatcgcta

SEQ ID NO: 11763 - DNA, 25 bp, Probe Sequence
taccatctacgtattagtcatcgct

SEQ ID NO: 11764 - DNA, 25 bp, Probe Sequence
gtaccatctacgtattagtcatcgc

SEQ ID NO: 11765 - DNA, 25 bp, Probe Sequence
gtattagtcatcgctattaccatga

SEQ ID NO: 11766 - DNA, 25 bp, Probe Sequence
attagtcatcgctattaccatgatg

SEQ ID NO: 11767 - DNA, 25 bp, Probe Sequence
ctatagaacaagtttgctacgaaca

SEQ ID NO: 11768 - DNA, 25 bp, Probe Sequence
acactatagaacaagtttgctacga

SEQ ID NO: 11769 - DNA, 25 bp, Probe Sequence
gacactatagaacaagtttgctacg

SEQ ID NO: 11770 - DNA, 25 bp, Probe Sequence
cggataacaatgttcacacaggaaa

SEQ ID NO: 11771 - DNA, 25 bp, Probe Sequence
ggcagtaccatctacgtattagtca

SEQ ID NO: 11772 - DNA, 25 bp, Probe Sequence
actatagaacaagtttgctacgaac

SEQ ID NO: 11773 - DNA, 25 bp, Probe Sequence
cactatagaacaagtttgctacgaa

SEQ ID NO: 11774 - DNA, 25 bp, Probe Sequence
ggtgacactatagaacaagtttgct

SEQ ID NO: 11775 - DNA, 25 bp, Probe Sequence
aggtgacactatagaacaagtttgc

SEQ ID NO: 11776 - DNA, 25 bp, Probe Sequence
cagtaccatctacgtattagtcatc

SEQ ID NO: 11777 - DNA, 25 bp, Probe Sequence
tgacactatagaacaagtttgctac

SEQ ID NO: 11778 - DNA, 25 bp, Probe Sequence
gtgacactatagaacaagtttgcta

SEQ ID NO: 11779 - DNA, 25 bp, Probe Sequence
atagaacaagtttgctacgaacaaa

SEQ ID NO: 11780 - DNA, 25 bp, Probe Sequence
taatcttcaactcctacatacttcc

SEQ ID NO: 11781 - DNA, 25 bp, Probe Sequence
cggactaatcttcaactcctacata

SEQ ID NO: 11782 - DNA, 25 bp, Probe Sequence
gactaatcttcaactcctacatact

SEQ ID NO: 11783 - DNA, 25 bp, Probe Sequence
cctatcatagaagagcttatcacct

SEQ ID NO: 11784 - DNA, 25 bp, Probe Sequence
aatcttcaactcctacatacttccc

SEQ ID NO: 11785 - DNA, 25 bp, Probe Sequence
ggactaatcttcaactcctacatac

SEQ ID NO: 11786 - DNA, 25 bp, Probe Sequence
actaatcttcaactcctacatactt

SEQ ID NO: 11787 - DNA, 25 bp, Probe Sequence
atccctcccttaccatcaaatcaat

SEQ ID NO: 11788 - DNA, 25 bp, Probe Sequence
gcggactaatcttcaactcctacat

SEQ ID NO: 11789 - DNA, 25 bp, Probe Sequence
tccctcccttaccatcaaatcaatt

SEQ ID NO: 11790 - DNA, 25 bp, Probe Sequence
ctaatcttcaactcctacatacttc

SEQ ID NO: 11791 - DNA, 25 bp, Probe Sequence
ctatcatagaagagcttatcacctt

SEQ ID NO: 11792 - DNA, 25 bp, Probe Sequence
ccctatcatagaagagcttatcacc

SEQ ID NO: 11793 - DNA, 25 bp, Probe Sequence
tagaagagcttatcacctttcatgg

SEQ ID NO: 11794 - DNA, 25 bp, Probe Sequence
gatccctcccttaccatcaaatcaa

SEQ ID NO: 11795 - DNA, 25 bp, Probe Sequence
aagagcttatcacctttcatggatc

SEQ ID NO: 11796 - DNA, 25 bp, Probe Sequence
gaagagcttatcacctttcatggat

SEQ ID NO: 11797 - DNA, 25 bp, Probe Sequence
tcatagaagagcttatcacctttca

SEQ ID NO: 11798 - DNA, 25 bp, Probe Sequence
gagcttatcacctttcatggatcac

SEQ ID NO: 11799 - DNA, 25 bp, Probe Sequence
agagcttatcacctttcatggatca

SEQ ID NO: 11800 - DNA, 25 bp, Probe Sequence
agaagagcttatcacctttcatgga

SEQ ID NO: 11801 - DNA, 25 bp, Probe Sequence
atagaagagcttatcacctttcatg

SEQ ID NO: 11802 - DNA, 25 bp, Probe Sequence
catagaagagcttatcacctttcat

SEQ ID NO: 11803 - DNA, 25 bp, Probe Sequence
atcatagaagagcttatcacctttc

SEQ ID NO: 11804 - DNA, 25 bp, Probe Sequence
aagcggtatcctgattagtctaaca

SEQ ID NO: 11805 - DNA, 25 bp, Probe Sequence
cggtatcctgattagtctaacagtt

SEQ ID NO: 11806 - DNA, 25 bp, Probe Sequence
atcctgattagtctaacagttgtgt

SEQ ID NO: 11807 - DNA, 25 bp, Probe Sequence
agcggtatcctgattagtctaacag

SEQ ID NO: 11808 - DNA, 25 bp, Probe Sequence
ggtatcctgattagtctaacagttg

SEQ ID NO: 11809 - DNA, 25 bp, Probe Sequence
gcggtatcctgattagtctaacagt

SEQ ID NO: 11810 - DNA, 25 bp, Probe Sequence
gcctaaataaacctacacaaaccag

SEQ ID NO: 11811 - DNA, 25 bp, Probe Sequence
ctatgaagagaaacaagtagccaca

SEQ ID NO: 11812 - DNA, 25 bp, Probe Sequence
gtagtagaaagcggtatcctgatta

SEQ ID NO: 11813 - DNA, 25 bp, Probe Sequence
gtagaaagcggtatcctgattagtc

SEQ ID NO: 11814 - DNA, 25 bp, Probe Sequence
gattatgtgctcctcaacgtagtag

SEQ ID NO: 11815 - DNA, 25 bp, Probe Sequence
tatgaagagaaacaagtagccacac

SEQ ID NO: 11816 - DNA, 25 bp, Probe Sequence
agtagaaagcggtatcctgattagt

SEQ ID NO: 11817 - DNA, 25 bp, Probe Sequence
tagtagaaagcggtatcctgattag

SEQ ID NO: 11818 - DNA, 25 bp, Probe Sequence
tatcctgattagtctaacagttgtg

SEQ ID NO: 11819 - DNA, 25 bp, Probe Sequence
aaagcggtatcctgattagtctaac

SEQ ID NO: 11820 - DNA, 25 bp, Probe Sequence
gaaagcggtatcctgattagtctaa

SEQ ID NO: 11821 - DNA, 25 bp, Probe Sequence
attatgtgctcctcaacgtagtaga

SEQ ID NO: 11822 - DNA, 25 bp, Probe Sequence
cctaaataaacctacacaaaccagt

SEQ ID NO: 11823 - DNA, 25 bp, Probe Sequence
gtatcctgattagtctaacagttgt

SEQ ID NO: 11824 - DNA, 25 bp, Probe Sequence
ttatgtgctcctcaacgtagtagaa

SEQ ID NO: 11825 - DNA, 25 bp, Probe Sequence
agaaagcggtatcctgattagtcta

SEQ ID NO: 11826 - DNA, 25 bp, Probe Sequence
tagaaagcggtatcctgattagtct

SEQ ID NO: 11827 - DNA, 25 bp, Probe Sequence
actatgaagagaaacaagtagccac

SEQ ID NO: 11828 - DNA, 25 bp, Probe Sequence
gtattagtcatcgctattaccctgg

SEQ ID NO: 11829 - DNA, 25 bp, Probe Sequence
cgtattagtcatcgctattaccctg

SEQ ID NO: 11830 - DNA, 25 bp, Probe Sequence
ctactgactatcctagaaatcgctg

SEQ ID NO: 11831 - DNA, 25 bp, Probe Sequence
tattagtcatcgctattaccctggt

SEQ ID NO: 11832 - DNA, 25 bp, Probe Sequence
ttgccagtacatcaagtgtatcata

SEQ ID NO: 11833 - DNA, 25 bp, Probe Sequence
tactgactatcctagaaatcgctgt

SEQ ID NO: 11834 - DNA, 25 bp, Probe Sequence
tgccagtacatcaagtgtatcatat

SEQ ID NO: 11835 - DNA, 25 bp, Probe Sequence
caatgggtggagtatttacggtaac

SEQ ID NO: 11836 - DNA, 25 bp, Probe Sequence
taaggtgacactatagaacacagtt

SEQ ID NO: 11837 - DNA, 25 bp, Probe Sequence
ttaaggtgacactatagaacacagt

SEQ ID NO: 11838 - DNA, 25 bp, Probe Sequence
aatgggtggagtatttacggtaact

SEQ ID NO: 11839 - DNA, 25 bp, Probe Sequence
attagtcatcgctattaccctggtg

SEQ ID NO: 11840 - DNA, 25 bp, Probe Sequence
tctactgactatcctagaaatcgct

SEQ ID NO: 11841 - DNA, 25 bp, Probe Sequence
cttcacaattctaattctactgact

SEQ ID NO: 11842 - DNA, 25 bp, Probe Sequence
tcttcacaattctaattctactgac

SEQ ID NO: 11843 - DNA, 25 bp, Probe Sequence
atgggtggagtatttacggtaactg

SEQ ID NO: 11844 - DNA, 25 bp, Probe Sequence
actgactatcctagaaatcgctgtc

SEQ ID NO: 11845 - DNA, 25 bp, Probe Sequence
acgtattagtcatcgctattaccct

SEQ ID NO: 11846 - DNA, 25 bp, Probe Sequence
acaattctaattctactgactatcc

SEQ ID NO: 11847 - DNA, 25 bp, Probe Sequence
ccagtacatcaagtgtatcatatgc

SEQ ID NO: 11848 - DNA, 25 bp, Probe Sequence
gccagtacatcaagtgtatcatatg

SEQ ID NO: 11849 - DNA, 25 bp, Probe Sequence
cttgccagtacatcaagtgtatcat

SEQ ID NO: 11850 - DNA, 25 bp, Probe Sequence
acactatagaacacagtttgtagca

SEQ ID NO: 11851 - DNA, 25 bp, Probe Sequence
tagtcatcgctattaccctggtgat

SEQ ID NO: 11852 - DNA, 25 bp, Probe Sequence
acctgccactaatagttatgtcatc

SEQ ID NO: 11853 - DNA, 25 bp, Probe Sequence
aacctgccactaatagttatgtcat

SEQ ID NO: 11854 - DNA, 25 bp, Probe Sequence
cctgccactaatagttatgtcatcc

SEQ ID NO: 11855 - DNA, 25 bp, Probe Sequence
taacctgccactaatagttatgtca

SEQ ID NO: 11856 - DNA, 25 bp, Probe Sequence
cctcttattaatcatcatcctagcc

SEQ ID NO: 11857 - DNA, 25 bp, Probe Sequence
ctaacctgccactaatagttatgtc

SEQ ID NO: 11858 - DNA, 25 bp, Probe Sequence
actaacctgccactaatagttatgt

SEQ ID NO: 11859 - DNA, 25 bp, Probe Sequence
caaacaactaacctgccactaatag

SEQ ID NO: 11860 - DNA, 25 bp, Probe Sequence
acaaacaactaacctgccactaata

SEQ ID NO: 11861 - DNA, 25 bp, Probe Sequence
tacaaacaactaacctgccactaat

SEQ ID NO: 11862 - DNA, 25 bp, Probe Sequence
ctaccacaactcaacggctacatag

SEQ ID NO: 11863 - DNA, 25 bp, Probe Sequence
ctacaaacaactaacctgccactaa

SEQ ID NO: 11864 - DNA, 25 bp, Probe Sequence
taatcatcatcctagccctaagtct

SEQ ID NO: 11865 - DNA, 25 bp, Probe Sequence
ttaatcatcatcctagccctaagtc

SEQ ID NO: 11866 - DNA, 25 bp, Probe Sequence
taccacaactcaacggctacataga

SEQ ID NO: 11867 - DNA, 25 bp, Probe Sequence
aaaggattagactgaaccgaataaa

SEQ ID NO: 11868 - DNA, 25 bp, Probe Sequence
gccactaatagttatgtcatccctc

SEQ ID NO: 11869 - DNA, 25 bp, Probe Sequence
aatcatcatcctagccctaagtctg

SEQ ID NO: 11870 - DNA, 25 bp, Probe Sequence
ctgccactaatagttatgtcatccc

SEQ ID NO: 11871 - DNA, 25 bp, Probe Sequence
actaccacaactcaacggctacata

SEQ ID NO: 11872 - DNA, 25 bp, Probe Sequence
ccactaatagttatgtcatccctct

SEQ ID NO: 11873 - DNA, 25 bp, Probe Sequence
tgccactaatagttatgtcatccct

SEQ ID NO: 11874 - DNA, 25 bp, Probe Sequence
cctacaaacaactaacctgccacta

SEQ ID NO: 11875 - DNA, 25 bp, Probe Sequence
taccatgagccctacaaacaactaa

SEQ ID NO: 11876 - DNA, 25 bp, Probe Sequence
gtgatattgccataattgttccgaa

SEQ ID NO: 11877 - DNA, 25 bp, Probe Sequence
tgtgtgatattgccataattgttcc

SEQ ID NO: 11878 - DNA, 25 bp, Probe Sequence
agtgtgtgatattgccataattgtt

SEQ ID NO: 11879 - DNA, 25 bp, Probe Sequence
tgatattgccataattgttccgaat

SEQ ID NO: 11880 - DNA, 25 bp, Probe Sequence
tgtgatattgccataattgttccga

SEQ ID NO: 11881 - DNA, 25 bp, Probe Sequence
gtgtgatattgccataattgttccg

SEQ ID NO: 11882 - DNA, 25 bp, Probe Sequence
gtgtgtgatattgccataattgttc

SEQ ID NO: 11883 - DNA, 25 bp, Probe Sequence
tagtgtgtgatattgccataattgt

SEQ ID NO: 11884 - DNA, 25 bp, Probe Sequence
ttagtgtgtgatattgccataattg

SEQ ID NO: 11885 - DNA, 25 bp, Probe Sequence
gatattgccataattgttccgaatt

SEQ ID NO: 11886 - DNA, 25 bp, Probe Sequence
attgataatcctgcccatcctttaa

SEQ ID NO: 11887 - DNA, 25 bp, Probe Sequence
ctatgaaatgggctcgtaacagaat

SEQ ID NO: 11888 - DNA, 25 bp, Probe Sequence
aattgataatcctgcccatccttta

SEQ ID NO: 11889 - DNA, 25 bp, Probe Sequence
tatgaaatgggctcgtaacagaatt

SEQ ID NO: 11890 - DNA, 25 bp, Probe Sequence
agtaaggtagttctactatcatgcc

SEQ ID NO: 11891 - DNA, 25 bp, Probe Sequence
attgccataattgttccgaatttct

SEQ ID NO: 11892 - DNA, 25 bp, Probe Sequence
cataattgttccgaatttctccact

SEQ ID NO: 11893 - DNA, 25 bp, Probe Sequence
ttgccataattgttccgaatttctc

SEQ ID NO: 11894 - DNA, 25 bp, Probe Sequence
ccataattgttccgaatttctccac

SEQ ID NO: 11895 - DNA, 25 bp, Probe Sequence
tgaaatgggctcgtaacagaattta

SEQ ID NO: 11896 - DNA, 25 bp, Probe Sequence
taattgttccgaatttctccacttt

SEQ ID NO: 11897 - DNA, 25 bp, Probe Sequence
attagtgtgtgatattgccataatt

SEQ ID NO: 11898 - DNA, 25 bp, Probe Sequence
ataattgttccgaatttctccactt

SEQ ID NO: 11899 - DNA, 25 bp, Probe Sequence
tctatgaaatgggctcgtaacagaa

SEQ ID NO: 11900 - DNA, 25 bp, Probe Sequence
atcaagtgtatcatatgccaagaac

SEQ ID NO: 11901 - DNA, 25 bp, Probe Sequence
catcaagtgtatcatatgccaagaa

SEQ ID NO: 11902 - DNA, 25 bp, Probe Sequence
tcaagtgtatcatatgccaagaacg

SEQ ID NO: 11903 - DNA, 25 bp, Probe Sequence
acatcaagtgtatcatatgccaaga

SEQ ID NO: 11904 - DNA, 25 bp, Probe Sequence
gacatcaagtgtatcatatgccaag

SEQ ID NO: 11905 - DNA, 25 bp, Probe Sequence
ggacatcaagtgtatcatatgccaa

SEQ ID NO: 11906 - DNA, 25 bp, Probe Sequence
caggacatcaagtgtatcatatgcc

SEQ ID NO: 11907 - DNA, 25 bp, Probe Sequence
ggcaggacatcaagtgtatcatatg

SEQ ID NO: 11908 - DNA, 25 bp, Probe Sequence
aggacatcaagtgtatcatatgcca

SEQ ID NO: 11909 - DNA, 25 bp, Probe Sequence
gggcaggacatcaagtgtatcatat

SEQ ID NO: 11910 - DNA, 25 bp, Probe Sequence
caagtgtatcatatgccaagaacgc

SEQ ID NO: 11911 - DNA, 25 bp, Probe Sequence
tgggcaggacatcaagtgtatcata

SEQ ID NO: 11912 - DNA, 25 bp, Probe Sequence
aagtgtatcatatgccaagaacgcc

SEQ ID NO: 11913 - DNA, 25 bp, Probe Sequence
gcaggacatcaagtgtatcatatgc

SEQ ID NO: 11914 - DNA, 25 bp, Probe Sequence
tttatgccccagtacatgaccttat

SEQ ID NO: 11915 - DNA, 25 bp, Probe Sequence
atttatgccccagtacatgacctta

SEQ ID NO: 11916 - DNA, 25 bp, Probe Sequence
ttatgccccagtacatgaccttatg

SEQ ID NO: 11917 - DNA, 25 bp, Probe Sequence
ctgggcaggacatcaagtgtatcat

SEQ ID NO: 11918 - DNA, 25 bp, Probe Sequence
catttatgccccagtacatgacctt

SEQ ID NO: 11919 - DNA, 25 bp, Probe Sequence
tatgccccagtacatgaccttatgg

SEQ ID NO: 11920 - DNA, 25 bp, Probe Sequence
agtgtatcatatgccaagaacgccc

SEQ ID NO: 11921 - DNA, 25 bp, Probe Sequence
gagtattacggtaactggcccactg

SEQ ID NO: 11922 - DNA, 25 bp, Probe Sequence
gcatttatgccccagtacatgacct

SEQ ID NO: 11923 - DNA, 25 bp, Probe Sequence
taggattacagatgtgagctaccat

SEQ ID NO: 11924 - DNA, 25 bp, Probe Sequence
ctaggattacagatgtgagctacca

SEQ ID NO: 11925 - DNA, 25 bp, Probe Sequence
aaagtgctaggattacagatgtgag

SEQ ID NO: 11926 - DNA, 25 bp, Probe Sequence
caaagtgctaggattacagatgtga

SEQ ID NO: 11927 - DNA, 25 bp, Probe Sequence
aggattacagatgtgagctaccatg

SEQ ID NO: 11928 - DNA, 25 bp, Probe Sequence
ccaaagtgctaggattacagatgtg

SEQ ID NO: 11929 - DNA, 25 bp, Probe Sequence
ctttgttcccattgtcactgtcatc

SEQ ID NO: 11930 - DNA, 25 bp, Probe Sequence
gattcactcattgtaagataacagt

SEQ ID NO: 11931 - DNA, 25 bp, Probe Sequence
tgattcactcattgtaagataacag

SEQ ID NO: 11932 - DNA, 25 bp, Probe Sequence
actcattgtaagataacagtttggt

SEQ ID NO: 11933 - DNA, 25 bp, Probe Sequence
cactcattgtaagataacagtttgg

SEQ ID NO: 11934 - DNA, 25 bp, Probe Sequence
cccaaagtgctaggattacagatgt

SEQ ID NO: 11935 - DNA, 25 bp, Probe Sequence
attcactcattgtaagataacagtt

SEQ ID NO: 11936 - DNA, 25 bp, Probe Sequence
aagtgctaggattacagatgtgagc

SEQ ID NO: 11937 - DNA, 25 bp, Probe Sequence
gattacagatgtgagctaccatgcc

SEQ ID NO: 11938 - DNA, 25 bp, Probe Sequence
ggattacagatgtgagctaccatgc

SEQ ID NO: 11939 - DNA, 25 bp, Probe Sequence
tgctaggattacagatgtgagctac

SEQ ID NO: 11940 - DNA, 25 bp, Probe Sequence
gtgctaggattacagatgtgagcta

SEQ ID NO: 11941 - DNA, 25 bp, Probe Sequence
ctcccaaagtgctaggattacagat

SEQ ID NO: 11942 - DNA, 25 bp, Probe Sequence
tcccaaagtgctaggattacagatg

SEQ ID NO: 11943 - DNA, 25 bp, Probe Sequence
tcactcattgtaagataacagtttg

SEQ ID NO: 11944 - DNA, 25 bp, Probe Sequence
attacagatgtgagctaccatgcct

SEQ ID NO: 11945 - DNA, 25 bp, Probe Sequence
gctaggattacagatgtgagctacc

SEQ ID NO: 11946 - DNA, 25 bp, Probe Sequence
tttgttcccattgtcactgtcatcc

SEQ ID NO: 11947 - DNA, 25 bp, Probe Sequence
ttcactatcatattcatcggcgtaa

SEQ ID NO: 11948 - DNA, 25 bp, Probe Sequence
catcataggaggcttcattcactga

SEQ ID NO: 11949 - DNA, 25 bp, Probe Sequence
tacagtaggaatagacgtagacaca

SEQ ID NO: 11950 - DNA, 25 bp, Probe Sequence
atcatctgtaggctcattcatttct

SEQ ID NO: 11951 - DNA, 25 bp, Probe Sequence
attcatcggcgtaaatctaactttc

SEQ ID NO: 11952 - DNA, 25 bp, Probe Sequence
tcactatcatattcatcggcgtaaa

SEQ ID NO: 11953 - DNA, 25 bp, Probe Sequence
tttcactatcatattcatcggcgta

SEQ ID NO: 11954 - DNA, 25 bp, Probe Sequence
ccatttcactatcatattcatcggc

SEQ ID NO: 11955 - DNA, 25 bp, Probe Sequence
catctgtaggctcattcatttctct

SEQ ID NO: 11956 - DNA, 25 bp, Probe Sequence
tcatctgtaggctcattcatttctc

SEQ ID NO: 11957 - DNA, 25 bp, Probe Sequence
catcggcgtaaatctaactttcttc

SEQ ID NO: 11958 - DNA, 25 bp, Probe Sequence
catttcactatcatattcatcggcg

SEQ ID NO: 11959 - DNA, 25 bp, Probe Sequence
atttcactatcatattcatcggcgt

SEQ ID NO: 11960 - DNA, 25 bp, Probe Sequence
tcatcggcgtaaatctaactttctt

SEQ ID NO: 11961 - DNA, 25 bp, Probe Sequence
ttcatcggcgtaaatctaactttct

SEQ ID NO: 11962 - DNA, 25 bp, Probe Sequence
gtaggctcattcatttctctaacag

SEQ ID NO: 11963 - DNA, 25 bp, Probe Sequence
ctgtaggctcattcatttctctaac

SEQ ID NO: 11964 - DNA, 25 bp, Probe Sequence
ttacagtaggaatagacgtagacac

SEQ ID NO: 11965 - DNA, 25 bp, Probe Sequence
tctgtaggctcattcatttctctaa

SEQ ID NO: 11966 - DNA, 25 bp, Probe Sequence
ccatcataggaggcttcattcactg

SEQ ID NO: 11967 - DNA, 25 bp, Probe Sequence
catattcatcggcgtaaatctaact

SEQ ID NO: 11968 - DNA, 25 bp, Probe Sequence
tcatattcatcggcgtaaatctaac

SEQ ID NO: 11969 - DNA, 25 bp, Probe Sequence
cactatcatattcatcggcgtaaat

SEQ ID NO: 11970 - DNA, 25 bp, Probe Sequence
atctgtaggctcattcatttctcta

SEQ ID NO: 11971 - DNA, 25 bp, Probe Sequence
cagaatgttatggttgtgataggac

SEQ ID NO: 11972 - DNA, 25 bp, Probe Sequence
ccgattggtagagaattggatattg

SEQ ID NO: 11973 - DNA, 25 bp, Probe Sequence
cgattggtagagaattggatattgt

SEQ ID NO: 11974 - DNA, 25 bp, Probe Sequence
gctaaggactctcacagatatgata

SEQ ID NO: 11975 - DNA, 25 bp, Probe Sequence
ttgtgataggacagcagtattatgg

SEQ ID NO: 11976 - DNA, 25 bp, Probe Sequence
ggttgtgataggacagcagtattat

SEQ ID NO: 11977 - DNA, 25 bp, Probe Sequence
agaatgttatggttgtgataggaca

SEQ ID NO: 11978 - DNA, 25 bp, Probe Sequence
gaatgttatggttgtgataggacag

SEQ ID NO: 11979 - DNA, 25 bp, Probe Sequence
gttgtgataggacagcagtattatg

SEQ ID NO: 11980 - DNA, 25 bp, Probe Sequence
tatggttgtgataggacagcagtat

SEQ ID NO: 11981 - DNA, 25 bp, Probe Sequence
aatgttatggttgtgataggacagc

SEQ ID NO: 11982 - DNA, 25 bp, Probe Sequence
tggttgtgataggacagcagtatta

SEQ ID NO: 11983 - DNA, 25 bp, Probe Sequence
ttatggttgtgataggacagcagta

SEQ ID NO: 11984 - DNA, 25 bp, Probe Sequence
tccgattggtagagaattggatatt

SEQ ID NO: 11985 - DNA, 25 bp, Probe Sequence
ttccgattggtagagaattggatat

SEQ ID NO: 11986 - DNA, 25 bp, Probe Sequence
atggttgtgataggacagcagtatt

SEQ ID NO: 11987 - DNA, 25 bp, Probe Sequence
actaagctaaggactctcacagata

SEQ ID NO: 11988 - DNA, 25 bp, Probe Sequence
ccagaatgttatggttgtgatagga

SEQ ID NO: 11989 - DNA, 25 bp, Probe Sequence
ttattccgattggtagagaattgga

SEQ ID NO: 11990 - DNA, 25 bp, Probe Sequence
attccgattggtagagaattggata

SEQ ID NO: 11991 - DNA, 25 bp, Probe Sequence
tattccgattggtagagaattggat

SEQ ID NO: 11992 - DNA, 25 bp, Probe Sequence
aactaagctaaggactctcacagat

SEQ ID NO: 11993 - DNA, 25 bp, Probe Sequence
atgttatggttgtgataggacagca

SEQ ID NO: 11994 - DNA, 25 bp, Probe Sequence
taagctaaggactctcacagatatg

SEQ ID NO: 11995 - DNA, 25 bp, Probe Sequence
gaacaggtcaagaataacacttcaa

SEQ ID NO: 11996 - DNA, 25 bp, Probe Sequence
gtgaacaggtcaagaataacacttc

SEQ ID NO: 11997 - DNA, 25 bp, Probe Sequence
tgtgaacaggtcaagaataacactt

SEQ ID NO: 11998 - DNA, 25 bp, Probe Sequence
atgttcaacacacttcacagtacag

SEQ ID NO: 11999 - DNA, 25 bp, Probe Sequence
catgttcaacacacttcacagtaca

SEQ ID NO: 12000 - DNA, 25 bp, Probe Sequence
acaggtcaagaataacacttcaaag

SEQ ID NO: 12001 - DNA, 25 bp, Probe Sequence
aacggtgtgaacaggtcaagaataa

SEQ ID NO: 12002 - DNA, 25 bp, Probe Sequence
aacaggtcaagaataacacttcaaa

SEQ ID NO: 12003 - DNA, 25 bp, Probe Sequence
aataacacttcaaagtcatcttgcc

SEQ ID NO: 12004 - DNA, 25 bp, Probe Sequence
gttcaacacacttcacagtacagga

SEQ ID NO: 12005 - DNA, 25 bp, Probe Sequence
ggtcaagaataacacttcaaagtca

SEQ ID NO: 12006 - DNA, 25 bp, Probe Sequence
caggtcaagaataacacttcaaagt

SEQ ID NO: 12007 - DNA, 25 bp, Probe Sequence
tgaacaggtcaagaataacacttca

SEQ ID NO: 12008 - DNA, 25 bp, Probe Sequence
aggtcaagaataacacttcaaagtc

SEQ ID NO: 12009 - DNA, 25 bp, Probe Sequence
acggtgtgaacaggtcaagaataac

SEQ ID NO: 12010 - DNA, 25 bp, Probe Sequence
caacggtgtgaacaggtcaagaata

SEQ ID NO: 12011 - DNA, 25 bp, Probe Sequence
ataacacttcaaagtcatcttgcca

SEQ ID NO: 12012 - DNA, 25 bp, Probe Sequence
gaataacacttcaaagtcatcttgc

SEQ ID NO: 12013 - DNA, 25 bp, Probe Sequence
cggtgtgaacaggtcaagaataaca

SEQ ID NO: 12014 - DNA, 25 bp, Probe Sequence
taacacttcaaagtcatcttgccag

SEQ ID NO: 12015 - DNA, 25 bp, Probe Sequence
tgttcaacacacttcacagtacagg

SEQ ID NO: 12016 - DNA, 25 bp, Probe Sequence
gtcaagaataacacttcaaagtcat

SEQ ID NO: 12017 - DNA, 25 bp, Probe Sequence
agaataacacttcaaagtcatcttg

SEQ ID NO: 12018 - DNA, 25 bp, Probe Sequence
caagaataacacttcaaagtcatct

SEQ ID NO: 12019 - DNA, 25 bp, Probe Sequence
agtgatgtctgtgccattaaagtca

SEQ ID NO: 12020 - DNA, 25 bp, Probe Sequence
cagtgatgtctgtgccattaaagtc

SEQ ID NO: 12021 - DNA, 25 bp, Probe Sequence
tgatgtctgtgccattaaagtcacg

SEQ ID NO: 12022 - DNA, 25 bp, Probe Sequence
gatgtctgtgccattaaagtcacgc

SEQ ID NO: 12023 - DNA, 25 bp, Probe Sequence
gcagtgatgtctgtgccattaaagt

SEQ ID NO: 12024 - DNA, 25 bp, Probe Sequence
gtgatgtctgtgccattaaagtcac

SEQ ID NO: 12025 - DNA, 25 bp, Probe Sequence
atgtctgtgccattaaagtcacgct

SEQ ID NO: 12026 - DNA, 25 bp, Probe Sequence
tgcagtgatgtctgtgccattaaag

SEQ ID NO: 12027 - DNA, 25 bp, Probe Sequence
gcataaaggcagtcgtacatactac

SEQ ID NO: 12028 - DNA, 25 bp, Probe Sequence
cgcataaaggcagtcgtacatacta

SEQ ID NO: 12029 - DNA, 25 bp, Probe Sequence
gaatgacgtatgtgcccatagtaac

SEQ ID NO: 12030 - DNA, 25 bp, Probe Sequence
atgaatgacgtatgtgcccatagta

SEQ ID NO: 12031 - DNA, 25 bp, Probe Sequence
gtatgtgcccatagtaacgccatag

SEQ ID NO: 12032 - DNA, 25 bp, Probe Sequence
tgaatgacgtatgtgcccatagtaa

SEQ ID NO: 12033 - DNA, 25 bp, Probe Sequence
atgaacgtcaatgggtggagtattt

SEQ ID NO: 12034 - DNA, 25 bp, Probe Sequence
catgaacgtcaatgggtggagtatt

SEQ ID NO: 12035 - DNA, 25 bp, Probe Sequence
catgaatgacgtatgtgcccatagt

SEQ ID NO: 12036 - DNA, 25 bp, Probe Sequence
tatgtgcccatagtaacgccatagg

SEQ ID NO: 12037 - DNA, 25 bp, Probe Sequence
cataaaggcagtcgtacatactacg

SEQ ID NO: 12038 - DNA, 25 bp, Probe Sequence
aaggcagtcgtacatactacgtaat

SEQ ID NO: 12039 - DNA, 25 bp, Probe Sequence
aatgacgtatgtgcccatagtaacg

SEQ ID NO: 12040 - DNA, 25 bp, Probe Sequence
tcatgaatgacgtatgtgcccatag

SEQ ID NO: 12041 - DNA, 25 bp, Probe Sequence
ataaaggcagtcgtacatactacgt

SEQ ID NO: 12042 - DNA, 25 bp, Probe Sequence
cccatagtaacgccatagggacttt

SEQ ID NO: 12043 - DNA, 25 bp, Probe Sequence
aggcagtcgtacatactacgtaatg

SEQ ID NO: 12044 - DNA, 25 bp, Probe Sequence
cacgcataaaggcagtcgtacatac

SEQ ID NO: 12045 - DNA, 25 bp, Probe Sequence
acgcataaaggcagtcgtacatact

SEQ ID NO: 12046 - DNA, 25 bp, Probe Sequence
tcacgcataaaggcagtcgtacata

SEQ ID NO: 12047 - DNA, 25 bp, Probe Sequence
cagtcgtacatactacgtaatggcc

SEQ ID NO: 12048 - DNA, 25 bp, Probe Sequence
ggcagtcgtacatactacgtaatgg

SEQ ID NO: 12049 - DNA, 25 bp, Probe Sequence
tagctattcggccttcacgcataaa

SEQ ID NO: 12050 - DNA, 25 bp, Probe Sequence
cgtatgtgcccatagtaacgccata

SEQ ID NO: 12051 - DNA, 25 bp, Probe Sequence
ataatctagcatgtcttccttccac

SEQ ID NO: 12052 - DNA, 25 bp, Probe Sequence
atctgagtcacatggcaattctatt

SEQ ID NO: 12053 - DNA, 25 bp, Probe Sequence
aataatctagcatgtcttccttcca

SEQ ID NO: 12054 - DNA, 25 bp, Probe Sequence
gatctgagtcacatggcaattctat

SEQ ID NO: 12055 - DNA, 25 bp, Probe Sequence
ttctatgccatgactgctaacataa

SEQ ID NO: 12056 - DNA, 25 bp, Probe Sequence
taatctagcatgtcttccttccaca

SEQ ID NO: 12057 - DNA, 25 bp, Probe Sequence
ctaatgacagaagatgcaccactaa

SEQ ID NO: 12058 - DNA, 25 bp, Probe Sequence
atttcctcccaattattcttcgtct

SEQ ID NO: 12059 - DNA, 25 bp, Probe Sequence
catttcctcccaattattcttcgtc

SEQ ID NO: 12060 - DNA, 25 bp, Probe Sequence
tcatttcctcccaattattcttcgt

SEQ ID NO: 12061 - DNA, 25 bp, Probe Sequence
ccaattattcttcgtctaatgacag

SEQ ID NO: 12062 - DNA, 25 bp, Probe Sequence
ttcctcccaattattcttcgtctaa

SEQ ID NO: 12063 - DNA, 25 bp, Probe Sequence
tttcctcccaattattcttcgtcta

SEQ ID NO: 12064 - DNA, 25 bp, Probe Sequence
cctgcttcactcttctgtaaattag

SEQ ID NO: 12065 - DNA, 25 bp, Probe Sequence
atcatttcctcccaattattcttcg

SEQ ID NO: 12066 - DNA, 25 bp, Probe Sequence
gcctgcttcactcttctgtaaatta

SEQ ID NO: 12067 - DNA, 25 bp, Probe Sequence
tctaatgacagaagatgcaccacta

SEQ ID NO: 12068 - DNA, 25 bp, Probe Sequence
cctcccaattattcttcgtctaatg

SEQ ID NO: 12069 - DNA, 25 bp, Probe Sequence
tcctcccaattattcttcgtctaat

SEQ ID NO: 12070 - DNA, 25 bp, Probe Sequence
cccaaataatctagcatgtcttcct

SEQ ID NO: 12071 - DNA, 25 bp, Probe Sequence
tctgagtcacatggcaattctattt

SEQ ID NO: 12072 - DNA, 25 bp, Probe Sequence
ctcccaattattcttcgtctaatga

SEQ ID NO: 12073 - DNA, 25 bp, Probe Sequence
aatctagcatgtcttccttccacac

SEQ ID NO: 12074 - DNA, 25 bp, Probe Sequence
ccaaataatctagcatgtcttcctt

SEQ ID NO: 12075 - DNA, 25 bp, Probe Sequence
ttctcgtgatagtgagtgagttctc

SEQ ID NO: 12076 - DNA, 25 bp, Probe Sequence
gttctcgtgatagtgagtgagttct

SEQ ID NO: 12077 - DNA, 25 bp, Probe Sequence
tgttctcgtgatagtgagtgagttc

SEQ ID NO: 12078 - DNA, 25 bp, Probe Sequence
ctgttctcgtgatagtgagtgagtt

SEQ ID NO: 12079 - DNA, 25 bp, Probe Sequence
tctcactaactccatttcacagatg

SEQ ID NO: 12080 - DNA, 25 bp, Probe Sequence
gtctcactaactccatttcacagat

SEQ ID NO: 12081 - DNA, 25 bp, Probe Sequence
cttcgccttccactatgactgtaag

SEQ ID NO: 12082 - DNA, 25 bp, Probe Sequence
accattctactttgtgtctctatga

SEQ ID NO: 12083 - DNA, 25 bp, Probe Sequence
cttccactatgactgtaagtttcct

SEQ ID NO: 12084 - DNA, 25 bp, Probe Sequence
ttccactatgactgtaagtttcctg

SEQ ID NO: 12085 - DNA, 25 bp, Probe Sequence
ctcactaactccatttcacagatga

SEQ ID NO: 12086 - DNA, 25 bp, Probe Sequence
ccactatgactgtaagtttcctgag

SEQ ID NO: 12087 - DNA, 25 bp, Probe Sequence
ccttccactatgactgtaagtttcc

SEQ ID NO: 12088 - DNA, 25 bp, Probe Sequence
tccactatgactgtaagtttcctga

SEQ ID NO: 12089 - DNA, 25 bp, Probe Sequence
cactatgactgtaagtttcctgagg

SEQ ID NO: 12090 - DNA, 25 bp, Probe Sequence
ttagtcagcttagcatcatgtcgtt

SEQ ID NO: 12091 - DNA, 25 bp, Probe Sequence
agtctcactaactccatttcacaga

SEQ ID NO: 12092 - DNA, 25 bp, Probe Sequence
aaccgtgagtgaattaaacctcttt

SEQ ID NO: 12093 - DNA, 25 bp, Probe Sequence
ccattctactttgtgtctctatgaa

SEQ ID NO: 12094 - DNA, 25 bp, Probe Sequence
gccttccactatgactgtaagtttc

SEQ ID NO: 12095 - DNA, 25 bp, Probe Sequence
ctgaagacaggaatgtttagaaagc

SEQ ID NO: 12096 - DNA, 25 bp, Probe Sequence
gatgaagaaactgaagacaggaatg

SEQ ID NO: 12097 - DNA, 25 bp, Probe Sequence
agatgaagaaactgaagacaggaat

SEQ ID NO: 12098 - DNA, 25 bp, Probe Sequence
atgaagaaactgaagacaggaatgt

SEQ ID NO: 12099 - DNA, 25 bp, Probe Sequence
atcaggatataaacccagacattcg

SEQ ID NO: 12100 - DNA, 25 bp, Probe Sequence
tagcaaatagttcgttcaaagtgga

SEQ ID NO: 12101 - DNA, 25 bp, Probe Sequence
ctagcaaatagttcgttcaaagtgg

SEQ ID NO: 12102 - DNA, 25 bp, Probe Sequence
agcaaatagttcgttcaaagtggag

SEQ ID NO: 12103 - DNA, 25 bp, Probe Sequence
gatcaggatataaacccagacattc

SEQ ID NO: 12104 - DNA, 25 bp, Probe Sequence
atcatctattgcctaagagcacaac

SEQ ID NO: 12105 - DNA, 25 bp, Probe Sequence
caaatagttcgttcaaagtggagcc

SEQ ID NO: 12106 - DNA, 25 bp, Probe Sequence
caggatataaacccagacattcgag

SEQ ID NO: 12107 - DNA, 25 bp, Probe Sequence
gaccagtcagatagtaaagagagct

SEQ ID NO: 12108 - DNA, 25 bp, Probe Sequence
tcaggatataaacccagacattcga

SEQ ID NO: 12109 - DNA, 25 bp, Probe Sequence
tgaccagtcagatagtaaagagagc

SEQ ID NO: 12110 - DNA, 25 bp, Probe Sequence
gcaaatagttcgttcaaagtggagc

SEQ ID NO: 12111 - DNA, 25 bp, Probe Sequence
ccaactatcgaatccctaagcctag

SEQ ID NO: 12112 - DNA, 25 bp, Probe Sequence
ggatataaacccagacattcgagct

SEQ ID NO: 12113 - DNA, 25 bp, Probe Sequence
aggatataaacccagacattcgagc

SEQ ID NO: 12114 - DNA, 25 bp, Probe Sequence
gatataaacccagacattcgagctg

SEQ ID NO: 12115 - DNA, 25 bp, Probe Sequence
aaatagttcgttcaaagtggagccc

SEQ ID NO: 12116 - DNA, 25 bp, Probe Sequence
gctctgttttcactctactaaatct

SEQ ID NO: 12117 - DNA, 25 bp, Probe Sequence
caactatcgaatccctaagcctagc

SEQ ID NO: 12118 - DNA, 25 bp, Probe Sequence
ctccaatgttaatgacatcaaaggc

SEQ ID NO: 12119 - DNA, 25 bp, Probe Sequence
gctccaatgttaatgacatcaaagg

SEQ ID NO: 12120 - DNA, 25 bp, Probe Sequence
tcatctattgcctaagagcacaacg

SEQ ID NO: 12121 - DNA, 25 bp, Probe Sequence
ctaagagacaggacgtagctggatt

SEQ ID NO: 12122 - DNA, 25 bp, Probe Sequence
ctgttttcactctactaaatcttgc

SEQ ID NO: 12123 - DNA, 25 bp, Probe Sequence
gatcacaaggttaagagatggagac

SEQ ID NO: 12124 - DNA, 25 bp, Probe Sequence
gatggatcacaaggttaagagatgg

SEQ ID NO: 12125 - DNA, 25 bp, Probe Sequence
atggatcacaaggttaagagatgga

SEQ ID NO: 12126 - DNA, 25 bp, Probe Sequence
cgatggatcacaaggttaagagatg

SEQ ID NO: 12127 - DNA, 25 bp, Probe Sequence
ggatcacaaggttaagagatggaga

SEQ ID NO: 12128 - DNA, 25 bp, Probe Sequence
tggatcacaaggttaagagatggag

SEQ ID NO: 12129 - DNA, 25 bp, Probe Sequence
atcacaaggttaagagatggagacc

SEQ ID NO: 12130 - DNA, 25 bp, Probe Sequence
gcgatggatcacaaggttaagagat

SEQ ID NO: 12131 - DNA, 25 bp, Probe Sequence
aagcgatggatcacaaggttaagag

SEQ ID NO: 12132 - DNA, 25 bp, Probe Sequence
gaagcgatggatcacaaggttaaga

SEQ ID NO: 12133 - DNA, 25 bp, Probe Sequence
cagaagaatcacttgaaccgaggag

SEQ ID NO: 12134 - DNA, 25 bp, Probe Sequence
catagtgaaaccctatctctgctaa

SEQ ID NO: 12135 - DNA, 25 bp, Probe Sequence
acatagtgaaaccctatctctgcta

SEQ ID NO: 12136 - DNA, 25 bp, Probe Sequence
ccaacatagtgaaaccctatctctg

SEQ ID NO: 12137 - DNA, 25 bp, Probe Sequence
atagtgaaaccctatctctgctaaa

SEQ ID NO: 12138 - DNA, 25 bp, Probe Sequence
aacatagtgaaaccctatctctgct

SEQ ID NO: 12139 - DNA, 25 bp, Probe Sequence
caacatagtgaaaccctatctctgc

SEQ ID NO: 12140 - DNA, 25 bp, Probe Sequence
accaagaccagaagtaaggaaggac

SEQ ID NO: 12141 - DNA, 25 bp, Probe Sequence
caccaagaccagaagtaaggaagga

SEQ ID NO: 12142 - DNA, 25 bp, Probe Sequence
tcacaaggttaagagatggagacca

SEQ ID NO: 12143 - DNA, 25 bp, Probe Sequence
agcgatggatcacaaggttaagaga

SEQ ID NO: 12144 - DNA, 25 bp, Probe Sequence
gccaacatagtgaaaccctatctct

SEQ ID NO: 12145 - DNA, 25 bp, Probe Sequence
ggaagcgatggatcacaaggttaag

SEQ ID NO: 12146 - DNA, 25 bp, Probe Sequence
agaagaatcacttgaaccgaggagg

SEQ ID NO: 12147 - DNA, 25 bp, Probe Sequence
gggatctcaacagttaaatcaacaa

SEQ ID NO: 12148 - DNA, 25 bp, Probe Sequence
cgggatctcaacagttaaatcaaca

SEQ ID NO: 12149 - DNA, 25 bp, Probe Sequence
accacctcttgctcagcctatatac

SEQ ID NO: 12150 - DNA, 25 bp, Probe Sequence
caccacctcttgctcagcctatata

SEQ ID NO: 12151 - DNA, 25 bp, Probe Sequence
tcagcctatataccgccatcttcag

SEQ ID NO: 12152 - DNA, 25 bp, Probe Sequence
ctcagcctatataccgccatcttca

SEQ ID NO: 12153 - DNA, 25 bp, Probe Sequence
ggatctcaacagttaaatcaacaaa

SEQ ID NO: 12154 - DNA, 25 bp, Probe Sequence
ccacctcttgctcagcctatatacc

SEQ ID NO: 12155 - DNA, 25 bp, Probe Sequence
gaggagcctgttctgtaatcgataa

SEQ ID NO: 12156 - DNA, 25 bp, Probe Sequence
cacctcttgctcagcctatataccg

SEQ ID NO: 12157 - DNA, 25 bp, Probe Sequence
gcctatataccgccatcttcagcaa

SEQ ID NO: 12158 - DNA, 25 bp, Probe Sequence
gctcagcctatataccgccatcttc

SEQ ID NO: 12159 - DNA, 25 bp, Probe Sequence
agaggagcctgttctgtaatcgata

SEQ ID NO: 12160 - DNA, 25 bp, Probe Sequence
ccgggatctcaacagttaaatcaac

SEQ ID NO: 12161 - DNA, 25 bp, Probe Sequence
tcaccacctcttgctcagcctatat

SEQ ID NO: 12162 - DNA, 25 bp, Probe Sequence
cagcctatataccgccatcttcagc

SEQ ID NO: 12163 - DNA, 25 bp, Probe Sequence
cttgctcagcctatataccgccatc

SEQ ID NO: 12164 - DNA, 25 bp, Probe Sequence
aggagcctgttctgtaatcgataaa

SEQ ID NO: 12165 - DNA, 25 bp, Probe Sequence
gagcctgttctgtaatcgataaacc

SEQ ID NO: 12166 - DNA, 25 bp, Probe Sequence
ggagcctgttctgtaatcgataaac

SEQ ID NO: 12167 - DNA, 25 bp, Probe Sequence
atctcaacagttaaatcaacaaaac

SEQ ID NO: 12168 - DNA, 25 bp, Probe Sequence
agcctgttctgtaatcgataaaccc

SEQ ID NO: 12169 - DNA, 25 bp, Probe Sequence
gatctcaacagttaaatcaacaaaa

SEQ ID NO: 12170 - DNA, 25 bp, Probe Sequence
tctcaacagttaaatcaacaaaact

SEQ ID NO: 12171 - DNA, 25 bp, Probe Sequence
ctgtggaaggaagagtaacactatg

SEQ ID NO: 12172 - DNA, 25 bp, Probe Sequence
tgtggaaggaagagtaacactatgt

SEQ ID NO: 12173 - DNA, 25 bp, Probe Sequence
tgttctgaatagctctgttgtgatg

SEQ ID NO: 12174 - DNA, 25 bp, Probe Sequence
cctgtggaaggaagagtaacactat

SEQ ID NO: 12175 - DNA, 25 bp, Probe Sequence
tctaagacgtgatagtgatggaatt

SEQ ID NO: 12176 - DNA, 25 bp, Probe Sequence
atctaagacgtgatagtgatggaat

SEQ ID NO: 12177 - DNA, 25 bp, Probe Sequence
gttctgaatagctctgttgtgatgg

SEQ ID NO: 12178 - DNA, 25 bp, Probe Sequence
aactgtaagaagattctggctagaa

SEQ ID NO: 12179 - DNA, 25 bp, Probe Sequence
ggaaactgtaagaagattctggcta

SEQ ID NO: 12180 - DNA, 25 bp, Probe Sequence
aaactgtaagaagattctggctaga

SEQ ID NO: 12181 - DNA, 25 bp, Probe Sequence
gaaactgtaagaagattctggctag

SEQ ID NO: 12182 - DNA, 25 bp, Probe Sequence
cacacatctaagacgtgatagtgat

SEQ ID NO: 12183 - DNA, 25 bp, Probe Sequence
atggaaactgtaagaagattctggc

SEQ ID NO: 12184 - DNA, 25 bp, Probe Sequence
acaacttggaaaggtgacatcattc

SEQ ID NO: 12185 - DNA, 25 bp, Probe Sequence
cttatttggtcacacatctaagacg

SEQ ID NO: 12186 - DNA, 25 bp, Probe Sequence
gcttatttggtcacacatctaagac

SEQ ID NO: 12187 - DNA, 25 bp, Probe Sequence
gcatggaaactgtaagaagattctg

SEQ ID NO: 12188 - DNA, 25 bp, Probe Sequence
catggaaactgtaagaagattctgg

SEQ ID NO: 12189 - DNA, 25 bp, Probe Sequence
ctaagacgtgatagtgatggaattc

SEQ ID NO: 12190 - DNA, 25 bp, Probe Sequence
caacttggaaaggtgacatcattca

SEQ ID NO: 12191 - DNA, 25 bp, Probe Sequence
tgatagtgatggaattcaagcctag

SEQ ID NO: 12192 - DNA, 25 bp, Probe Sequence
aagacgtgatagtgatggaattcaa

SEQ ID NO: 12193 - DNA, 25 bp, Probe Sequence
gtgatagtgatggaattcaagccta

SEQ ID NO: 12194 - DNA, 25 bp, Probe Sequence
taagacgtgatagtgatggaattca

SEQ ID NO: 12195 - DNA, 25 bp, Probe Sequence
catagccagcatgtcctcaatgaac

SEQ ID NO: 12196 - DNA, 25 bp, Probe Sequence
cattggattaagtagagttgttgcc

SEQ ID NO: 12197 - DNA, 25 bp, Probe Sequence
ccattggattaagtagagttgttgc

SEQ ID NO: 12198 - DNA, 25 bp, Probe Sequence
attggattaagtagagttgttgcca

SEQ ID NO: 12199 - DNA, 25 bp, Probe Sequence
caacacacaaactaagcctacattt

SEQ ID NO: 12200 - DNA, 25 bp, Probe Sequence
ctcaagagacaacacacaaactaag

SEQ ID NO: 12201 - DNA, 25 bp, Probe Sequence
actcaagagacaacacacaaactaa

SEQ ID NO: 12202 - DNA, 25 bp, Probe Sequence
aactcaagagacaacacacaaacta

SEQ ID NO: 12203 - DNA, 25 bp, Probe Sequence
acaacacacaaactaagcctacatt

SEQ ID NO: 12204 - DNA, 25 bp, Probe Sequence
acccattggattaagtagagttgtt

SEQ ID NO: 12205 - DNA, 25 bp, Probe Sequence
cccattggattaagtagagttgttg

SEQ ID NO: 12206 - DNA, 25 bp, Probe Sequence
aaactcaagagacaacacacaaact

SEQ ID NO: 12207 - DNA, 25 bp, Probe Sequence
caaactcaagagacaacacacaaac

SEQ ID NO: 12208 - DNA, 25 bp, Probe Sequence
gacaacacacaaactaagcctacat

SEQ ID NO: 12209 - DNA, 25 bp, Probe Sequence
acaaactcaagagacaacacacaaa

SEQ ID NO: 12210 - DNA, 25 bp, Probe Sequence
tcaagagacaacacacaaactaagc

SEQ ID NO: 12211 - DNA, 25 bp, Probe Sequence
gagacaacacacaaactaagcctac

SEQ ID NO: 12212 - DNA, 25 bp, Probe Sequence
agagacaacacacaaactaagccta

SEQ ID NO: 12213 - DNA, 25 bp, Probe Sequence
gacaaactcaagagacaacacacaa

SEQ ID NO: 12214 - DNA, 25 bp, Probe Sequence
agacaacacacaaactaagcctaca

SEQ ID NO: 12215 - DNA, 25 bp, Probe Sequence
aagagacaacacacaaactaagcct

SEQ ID NO: 12216 - DNA, 25 bp, Probe Sequence
caagagacaacacacaaactaagcc

SEQ ID NO: 12217 - DNA, 25 bp, Probe Sequence
cttccagatttggttctcctagttt

SEQ ID NO: 12218 - DNA, 25 bp, Probe Sequence
tggattaagtagagttgttgccaaa

SEQ ID NO: 12219 - DNA, 25 bp, Probe Sequence
tccagatttggttctcctagtttaa

SEQ ID NO: 12220 - DNA, 25 bp, Probe Sequence
ttctgtaatggagagagaggtatca

SEQ ID NO: 12221 - DNA, 25 bp, Probe Sequence
tgttctgtaatggagagagaggtat

SEQ ID NO: 12222 - DNA, 25 bp, Probe Sequence
gttctgtaatggagagagaggtatc

SEQ ID NO: 12223 - DNA, 25 bp, Probe Sequence
tctgtaatggagagagaggtatcac

SEQ ID NO: 12224 - DNA, 25 bp, Probe Sequence
gtaatggagagagaggtatcacagg

SEQ ID NO: 12225 - DNA, 25 bp, Probe Sequence
ttctgtgttctgtaatggagagaga

SEQ ID NO: 12226 - DNA, 25 bp, Probe Sequence
taatggagagagaggtatcacagga

SEQ ID NO: 12227 - DNA, 25 bp, Probe Sequence
gtgttctgtaatggagagagaggta

SEQ ID NO: 12228 - DNA, 25 bp, Probe Sequence
tcaatagttggcttctggaatgatt

SEQ ID NO: 12229 - DNA, 25 bp, Probe Sequence
ttcaatagttggcttctggaatgat

SEQ ID NO: 12230 - DNA, 25 bp, Probe Sequence
tctgtgttctgtaatggagagagag

SEQ ID NO: 12231 - DNA, 25 bp, Probe Sequence
aatagttggcttctggaatgattgc

SEQ ID NO: 12232 - DNA, 25 bp, Probe Sequence
agagaggtatcacaggatagaatgt

SEQ ID NO: 12233 - DNA, 25 bp, Probe Sequence
gagagagaggtatcacaggatagaa

SEQ ID NO: 12234 - DNA, 25 bp, Probe Sequence
gagagaggtatcacaggatagaatg

SEQ ID NO: 12235 - DNA, 25 bp, Probe Sequence
agagagaggtatcacaggatagaat

SEQ ID NO: 12236 - DNA, 25 bp, Probe Sequence
gttcaatagttggcttctggaatga

SEQ ID NO: 12237 - DNA, 25 bp, Probe Sequence
tgtaatggagagagaggtatcacag

SEQ ID NO: 12238 - DNA, 25 bp, Probe Sequence
ctgtaatggagagagaggtatcaca

SEQ ID NO: 12239 - DNA, 25 bp, Probe Sequence
aatggagagagaggtatcacaggat

SEQ ID NO: 12240 - DNA, 25 bp, Probe Sequence
atggagagagaggtatcacaggata

SEQ ID NO: 12241 - DNA, 25 bp, Probe Sequence
ctgtgttctgtaatggagagagagg

SEQ ID NO: 12242 - DNA, 25 bp, Probe Sequence
ggagagagaggtatcacaggataga

SEQ ID NO: 12243 - DNA, 25 bp, Probe Sequence
ggttcaatagttggcttctggaatg

SEQ ID NO: 12244 - DNA, 25 bp, Probe Sequence
aatgcttgataatggttctgtcttc

SEQ ID NO: 12245 - DNA, 25 bp, Probe Sequence
taatgcttgataatggttctgtctt

SEQ ID NO: 12246 - DNA, 25 bp, Probe Sequence
atgcttgataatggttctgtcttca

SEQ ID NO: 12247 - DNA, 25 bp, Probe Sequence
ttaatgcttgataatggttctgtct

SEQ ID NO: 12248 - DNA, 25 bp, Probe Sequence
gcattatatgtccactaacagatgt

SEQ ID NO: 12249 - DNA, 25 bp, Probe Sequence
ccagtcaggactctatgttcaatat

SEQ ID NO: 12250 - DNA, 25 bp, Probe Sequence
accagtcaggactctatgttcaata

SEQ ID NO: 12251 - DNA, 25 bp, Probe Sequence
caccagtcaggactctatgttcaat

SEQ ID NO: 12252 - DNA, 25 bp, Probe Sequence
tacatacaaatgggcttatattgcg

SEQ ID NO: 12253 - DNA, 25 bp, Probe Sequence
aatgaatgtccctttgtatttcctt

SEQ ID NO: 12254 - DNA, 25 bp, Probe Sequence
cagtcaggactctatgttcaatatt

SEQ ID NO: 12255 - DNA, 25 bp, Probe Sequence
atgaaacaaattgaagcctcagatg

SEQ ID NO: 12256 - DNA, 25 bp, Probe Sequence
aatgaaacaaattgaagcctcagat

SEQ ID NO: 12257 - DNA, 25 bp, Probe Sequence
ctctgttgtatgtttaagatgttgc

SEQ ID NO: 12258 - DNA, 25 bp, Probe Sequence
gtcctctgttgtatgtttaagatgt

SEQ ID NO: 12259 - DNA, 25 bp, Probe Sequence
tgtcctctgttgtatgtttaagatg

SEQ ID NO: 12260 - DNA, 25 bp, Probe Sequence
taatgaaacaaattgaagcctcaga

SEQ ID NO: 12261 - DNA, 25 bp, Probe Sequence
tctaatgaaacaaattgaagcctca

SEQ ID NO: 12262 - DNA, 25 bp, Probe Sequence
atctgttcactccatcaaagtcttt

SEQ ID NO: 12263 - DNA, 25 bp, Probe Sequence
ctaatgaaacaaattgaagcctcag

SEQ ID NO: 12264 - DNA, 25 bp, Probe Sequence
tgaatgtccctttgtatttccttaa

SEQ ID NO: 12265 - DNA, 25 bp, Probe Sequence
tgcattatatgtccactaacagatg

SEQ ID NO: 12266 - DNA, 25 bp, Probe Sequence
gaaacaaattgaagcctcagatgtc

SEQ ID NO: 12267 - DNA, 25 bp, Probe Sequence
ttctaatgaaacaaattgaagcctc

SEQ ID NO: 12268 - DNA, 25 bp, Probe Sequence
tcagacatgaccataaatagcgtat

SEQ ID NO: 12269 - DNA, 25 bp, Probe Sequence
atcagacatgaccataaatagcgta

SEQ ID NO: 12270 - DNA, 25 bp, Probe Sequence
tatcagacatgaccataaatagcgt

SEQ ID NO: 12271 - DNA, 25 bp, Probe Sequence
cagacatgaccataaatagcgtata

SEQ ID NO: 12272 - DNA, 25 bp, Probe Sequence
atatcagacatgaccataaatagcg

SEQ ID NO: 12273 - DNA, 25 bp, Probe Sequence
agaacatatatcagacatgaccata

SEQ ID NO: 12274 - DNA, 25 bp, Probe Sequence
gtatacgagccttcacgcataagag

SEQ ID NO: 12275 - DNA, 25 bp, Probe Sequence
gaacatatatcagacatgaccataa

SEQ ID NO: 12276 - DNA, 25 bp, Probe Sequence
agacatgaccataaatagcgtatac

SEQ ID NO: 12277 - DNA, 25 bp, Probe Sequence
tatacgagccttcacgcataagagg

SEQ ID NO: 12278 - DNA, 25 bp, Probe Sequence
tatatcagacatgaccataaatagc

SEQ ID NO: 12279 - DNA, 25 bp, Probe Sequence
aacatatatcagacatgaccataaa

SEQ ID NO: 12280 - DNA, 25 bp, Probe Sequence
acatatatcagacatgaccataaat

SEQ ID NO: 12281 - DNA, 25 bp, Probe Sequence
caacacggaatgtaaaggaaagtta

SEQ ID NO: 12282 - DNA, 25 bp, Probe Sequence
acacggaatgtaaaggaaagttaaa

SEQ ID NO: 12283 - DNA, 25 bp, Probe Sequence
aacacggaatgtaaaggaaagttaa

SEQ ID NO: 12284 - DNA, 25 bp, Probe Sequence
ccaacacggaatgtaaaggaaagtt

SEQ ID NO: 12285 - DNA, 25 bp, Probe Sequence
cttcaccagtcaaagcgaactacta

SEQ ID NO: 12286 - DNA, 25 bp, Probe Sequence
aaagttaaggactcgcaatctaccc

SEQ ID NO: 12287 - DNA, 25 bp, Probe Sequence
caccaacacggaatgtaaaggaaag

SEQ ID NO: 12288 - DNA, 25 bp, Probe Sequence
ataacagcgcaatcctattctagag

SEQ ID NO: 12289 - DNA, 25 bp, Probe Sequence
gataacagcgcaatcctattctaga

SEQ ID NO: 12290 - DNA, 25 bp, Probe Sequence
accaacacggaatgtaaaggaaagt

SEQ ID NO: 12291 - DNA, 25 bp, Probe Sequence
taacagcgcaatcctattctagagt

SEQ ID NO: 12292 - DNA, 25 bp, Probe Sequence
atcaacaatagggtttacgacctcg

SEQ ID NO: 12293 - DNA, 25 bp, Probe Sequence
cacggaatgtaaaggaaagttaaaa

SEQ ID NO: 12294 - DNA, 25 bp, Probe Sequence
aaaagttaaggactcgcaatctacc

SEQ ID NO: 12295 - DNA, 25 bp, Probe Sequence
aacagcgcaatcctattctagagtc

SEQ ID NO: 12296 - DNA, 25 bp, Probe Sequence
ttgaccaacggaacaagttacccta

SEQ ID NO: 12297 - DNA, 25 bp, Probe Sequence
gtttacgacctcgatgttggatcag

SEQ ID NO: 12298 - DNA, 25 bp, Probe Sequence
aatagggtttacgacctcgatgttg

SEQ ID NO: 12299 - DNA, 25 bp, Probe Sequence
caatagggtttacgacctcgatgtt

SEQ ID NO: 12300 - DNA, 25 bp, Probe Sequence
aacaatagggtttacgacctcgatg

SEQ ID NO: 12301 - DNA, 25 bp, Probe Sequence
caacaatagggtttacgacctcgat

SEQ ID NO: 12302 - DNA, 25 bp, Probe Sequence
acttcaccagtcaaagcgaactact

SEQ ID NO: 12303 - DNA, 25 bp, Probe Sequence
tgaccaacggaacaagttaccctag

SEQ ID NO: 12304 - DNA, 25 bp, Probe Sequence
tcaacaatagggtttacgacctcga

SEQ ID NO: 12305 - DNA, 25 bp, Probe Sequence
ataggtaggttccacagttactctt

SEQ ID NO: 12306 - DNA, 25 bp, Probe Sequence
taggtaggttccacagttactcttc

SEQ ID NO: 12307 - DNA, 25 bp, Probe Sequence
cataggtaggttccacagttactct

SEQ ID NO: 12308 - DNA, 25 bp, Probe Sequence
gcataggtaggttccacagttactc

SEQ ID NO: 12309 - DNA, 25 bp, Probe Sequence
atcttccaggtaagcagtttattct

SEQ ID NO: 12310 - DNA, 25 bp, Probe Sequence
catcttccaggtaagcagtttattc

SEQ ID NO: 12311 - DNA, 25 bp, Probe Sequence
ccatcttccaggtaagcagtttatt

SEQ ID NO: 12312 - DNA, 25 bp, Probe Sequence
aggtaggttccacagttactcttcc

SEQ ID NO: 12313 - DNA, 25 bp, Probe Sequence
gaggcataggtaggttccacagtta

SEQ ID NO: 12314 - DNA, 25 bp, Probe Sequence
ttactcttcccacaagttcccttaa

SEQ ID NO: 12315 - DNA, 25 bp, Probe Sequence
ttccaggtaagcagtttattctgag

SEQ ID NO: 12316 - DNA, 25 bp, Probe Sequence
cttccaggtaagcagtttattctga

SEQ ID NO: 12317 - DNA, 25 bp, Probe Sequence
tcttccaggtaagcagtttattctg

SEQ ID NO: 12318 - DNA, 25 bp, Probe Sequence
aggcataggtaggttccacagttac

SEQ ID NO: 12319 - DNA, 25 bp, Probe Sequence
ggcataggtaggttccacagttact

SEQ ID NO: 12320 - DNA, 25 bp, Probe Sequence
gttactcttcccacaagttccctta

SEQ ID NO: 12321 - DNA, 25 bp, Probe Sequence
cccatcttccaggtaagcagtttat

SEQ ID NO: 12322 - DNA, 25 bp, Probe Sequence
gtcaagagaggcataggtaggttcc

SEQ ID NO: 12323 - DNA, 25 bp, Probe Sequence
ggtcaagagaggcataggtaggttc

SEQ ID NO: 12324 - DNA, 25 bp, Probe Sequence
caagagaggcataggtaggttccac

SEQ ID NO: 12325 - DNA, 25 bp, Probe Sequence
tcaagagaggcataggtaggttcca

SEQ ID NO: 12326 - DNA, 25 bp, Probe Sequence
tccaggtaagcagtttattctgagc

SEQ ID NO: 12327 - DNA, 25 bp, Probe Sequence
gttccacagttactcttcccacaag

SEQ ID NO: 12328 - DNA, 25 bp, Probe Sequence
aagagaggcataggtaggttccaca

SEQ ID NO: 12329 - DNA, 25 bp, Probe Sequence
ccacaatcataggtatcagcgtatt

SEQ ID NO: 12330 - DNA, 25 bp, Probe Sequence
ctctggtagtaggatggaattgatg

SEQ ID NO: 12331 - DNA, 25 bp, Probe Sequence
agtaactctggtagtaggatggaat

SEQ ID NO: 12332 - DNA, 25 bp, Probe Sequence
cacaatcataggtatcagcgtatta

SEQ ID NO: 12333 - DNA, 25 bp, Probe Sequence
actctggtagtaggatggaattgat

SEQ ID NO: 12334 - DNA, 25 bp, Probe Sequence
acaatcataggtatcagcgtattac

SEQ ID NO: 12335 - DNA, 25 bp, Probe Sequence
aactctggtagtaggatggaattga

SEQ ID NO: 12336 - DNA, 25 bp, Probe Sequence
taactctggtagtaggatggaattg

SEQ ID NO: 12337 - DNA, 25 bp, Probe Sequence
gtaactctggtagtaggatggaatt

SEQ ID NO: 12338 - DNA, 25 bp, Probe Sequence
tgattcacagactcaacttgttaca

SEQ ID NO: 12339 - DNA, 25 bp, Probe Sequence
ctggtagtaggatggaattgatgct

SEQ ID NO: 12340 - DNA, 25 bp, Probe Sequence
tctggtagtaggatggaattgatgc

SEQ ID NO: 12341 - DNA, 25 bp, Probe Sequence
tggtagtaggatggaattgatgctg

SEQ ID NO: 12342 - DNA, 25 bp, Probe Sequence
agatcaagacaatcctggctaacat

SEQ ID NO: 12343 - DNA, 25 bp, Probe Sequence
gattcacagactcaacttgttacaa

SEQ ID NO: 12344 - DNA, 25 bp, Probe Sequence
gagtaactctggtagtaggatggaa

SEQ ID NO: 12345 - DNA, 25 bp, Probe Sequence
atgagtaactctggtagtaggatgg

SEQ ID NO: 12346 - DNA, 25 bp, Probe Sequence
gatcaagacaatcctggctaacatg

SEQ ID NO: 12347 - DNA, 25 bp, Probe Sequence
tgagtaactctggtagtaggatgga

SEQ ID NO: 12348 - DNA, 25 bp, Probe Sequence
ggtagtaggatggaattgatgctgg

SEQ ID NO: 12349 - DNA, 25 bp, Probe Sequence
gagatcaagacaatcctggctaaca

SEQ ID NO: 12350 - DNA, 25 bp, Probe Sequence
tatgagtaactctggtagtaggatg

SEQ ID NO: 12351 - DNA, 25 bp, Probe Sequence
caagatggatatcacagaggaagag

SEQ ID NO: 12352 - DNA, 25 bp, Probe Sequence
cacgttcgttgtcaacattatagta

SEQ ID NO: 12353 - DNA, 25 bp, Probe Sequence
ataaggatagacttgaagcacagag

SEQ ID NO: 12354 - DNA, 25 bp, Probe Sequence
cataaggatagacttgaagcacaga

SEQ ID NO: 12355 - DNA, 25 bp, Probe Sequence
tactgaatgtgcctaatggagaaga

SEQ ID NO: 12356 - DNA, 25 bp, Probe Sequence
tcataaggatagacttgaagcacag

SEQ ID NO: 12357 - DNA, 25 bp, Probe Sequence
taaggatagacttgaagcacagagg

SEQ ID NO: 12358 - DNA, 25 bp, Probe Sequence
gtactgaatgtgcctaatggagaag

SEQ ID NO: 12359 - DNA, 25 bp, Probe Sequence
gtcataaggatagacttgaagcaca

SEQ ID NO: 12360 - DNA, 25 bp, Probe Sequence
ggtcataaggatagacttgaagcac

SEQ ID NO: 12361 - DNA, 25 bp, Probe Sequence
cttgactggatggaaggagacttag

SEQ ID NO: 12362 - DNA, 25 bp, Probe Sequence
gatgtggtactgaatgtgcctaatg

SEQ ID NO: 12363 - DNA, 25 bp, Probe Sequence
agatgtggtactgaatgtgcctaat

SEQ ID NO: 12364 - DNA, 25 bp, Probe Sequence
aagatgtggtactgaatgtgcctaa

SEQ ID NO: 12365 - DNA, 25 bp, Probe Sequence
actgaatgtgcctaatggagaagac

SEQ ID NO: 12366 - DNA, 25 bp, Probe Sequence
ggaagataagtaatgcaagatgtgg

SEQ ID NO: 12367 - DNA, 25 bp, Probe Sequence
ggtactgaatgtgcctaatggagaa

SEQ ID NO: 12368 - DNA, 25 bp, Probe Sequence
gtaatgcaagatgtggtactgaatg

SEQ ID NO: 12369 - DNA, 25 bp, Probe Sequence
taatgcaagatgtggtactgaatgt

SEQ ID NO: 12370 - DNA, 25 bp, Probe Sequence
gaagataagtaatgcaagatgtggt

SEQ ID NO: 12371 - DNA, 25 bp, Probe Sequence
caagatgtggtactgaatgtgccta

SEQ ID NO: 12372 - DNA, 25 bp, Probe Sequence
agataagtaatgcaagatgtggtac

SEQ ID NO: 12373 - DNA, 25 bp, Probe Sequence
ctgaatgtgcctaatggagaagacc

SEQ ID NO: 12374 - DNA, 25 bp, Probe Sequence
gactggatggaaggagacttaggaa

SEQ ID NO: 12375 - DNA, 25 bp, Probe Sequence
agtcagggtgggaagataagtaatg

SEQ ID NO: 12376 - DNA, 25 bp, Probe Sequence
cagtcagggtgggaagataagtaat

SEQ ID NO: 12377 - DNA, 25 bp, Probe Sequence
atgttcctccttaactatacttgct

SEQ ID NO: 12378 - DNA, 25 bp, Probe Sequence
tgttcctccttaactatacttgcta

SEQ ID NO: 12379 - DNA, 25 bp, Probe Sequence
ttcctccttaactatacttgctaga

SEQ ID NO: 12380 - DNA, 25 bp, Probe Sequence
tcctccttaactatacttgctagat

SEQ ID NO: 12381 - DNA, 25 bp, Probe Sequence
tatgttcctccttaactatacttgc

SEQ ID NO: 12382 - DNA, 25 bp, Probe Sequence
gttcctccttaactatacttgctag

SEQ ID NO: 12383 - DNA, 25 bp, Probe Sequence
gactgctttctatgttcctccttaa

SEQ ID NO: 12384 - DNA, 25 bp, Probe Sequence
cctccttaactatacttgctagatt

SEQ ID NO: 12385 - DNA, 25 bp, Probe Sequence
gacatctttgcttcattccttatct

SEQ ID NO: 12386 - DNA, 25 bp, Probe Sequence
atagtcaaattgctggaataaaccc

SEQ ID NO: 12387 - DNA, 25 bp, Probe Sequence
ctgctttctatgttcctccttaact

SEQ ID NO: 12388 - DNA, 25 bp, Probe Sequence
actgctttctatgttcctccttaac

SEQ ID NO: 12389 - DNA, 25 bp, Probe Sequence
acatctttgcttcattccttatctt

SEQ ID NO: 12390 - DNA, 25 bp, Probe Sequence
tgctttctatgttcctccttaacta

SEQ ID NO: 12391 - DNA, 25 bp, Probe Sequence
ttctacagcagcataccatgttaca

SEQ ID NO: 12392 - DNA, 25 bp, Probe Sequence
caacagaacaagactccatctcgtt

SEQ ID NO: 12393 - DNA, 25 bp, Probe Sequence
attgctggatctggtttggtaatat

SEQ ID NO: 12394 - DNA, 25 bp, Probe Sequence
tacagcagcataccatgttacagtt

SEQ ID NO: 12395 - DNA, 25 bp, Probe Sequence
cattgctggatctggtttggtaata

SEQ ID NO: 12396 - DNA, 25 bp, Probe Sequence
caatcttaaagaggagtgaagtggg

SEQ ID NO: 12397 - DNA, 25 bp, Probe Sequence
tctacagcagcataccatgttacag

SEQ ID NO: 12398 - DNA, 25 bp, Probe Sequence
aatagtcaaattgctggaataaacc

SEQ ID NO: 12399 - DNA, 25 bp, Probe Sequence
cttaaagaggagtgaagtgggtgat

SEQ ID NO: 12400 - DNA, 25 bp, Probe Sequence
gctggatctggtttggtaatatttg

SEQ ID NO: 12401 - DNA, 25 bp, Probe Sequence
atgacttatgggactttctacttgg

SEQ ID NO: 12402 - DNA, 25 bp, Probe Sequence
acatgacttatgggactttctactt

SEQ ID NO: 12403 - DNA, 25 bp, Probe Sequence
catgacttatgggactttctacttg

SEQ ID NO: 12404 - DNA, 25 bp, Probe Sequence
acttatgggactttctacttggcag

SEQ ID NO: 12405 - DNA, 25 bp, Probe Sequence
gacttatgggactttctacttggca

SEQ ID NO: 12406 - DNA, 25 bp, Probe Sequence
tgacttatgggactttctacttggc

SEQ ID NO: 12407 - DNA, 25 bp, Probe Sequence
cagtacatgacttatgggactttct

SEQ ID NO: 12408 - DNA, 25 bp, Probe Sequence
tacatgacttatgggactttctact

SEQ ID NO: 12409 - DNA, 25 bp, Probe Sequence
gtacatgacttatgggactttctac

SEQ ID NO: 12410 - DNA, 25 bp, Probe Sequence
agtacatgacttatgggactttcta

SEQ ID NO: 12411 - DNA, 25 bp, Probe Sequence
cttatgggactttctacttggcagt

SEQ ID NO: 12412 - DNA, 25 bp, Probe Sequence
ttatgggactttctacttggcagta

SEQ ID NO: 12413 - DNA, 25 bp, Probe Sequence
tatgggactttctacttggcagtac

SEQ ID NO: 12414 - DNA, 25 bp, Probe Sequence
tcattatgcccagtacatgacttat

SEQ ID NO: 12415 - DNA, 25 bp, Probe Sequence
tgggactttctacttggcagtacat

SEQ ID NO: 12416 - DNA, 25 bp, Probe Sequence
atgggactttctacttggcagtaca

SEQ ID NO: 12417 - DNA, 25 bp, Probe Sequence
gcctgtcattatgcccagtacatga

SEQ ID NO: 12418 - DNA, 25 bp, Probe Sequence
gcctttaattgtcttgctctctatg

SEQ ID NO: 12419 - DNA, 25 bp, Probe Sequence
tgcctttaattgtcttgctctctat

SEQ ID NO: 12420 - DNA, 25 bp, Probe Sequence
taattgtcttgctctctatgggaaa

SEQ ID NO: 12421 - DNA, 25 bp, Probe Sequence
ttaattgtcttgctctctatgggaa

SEQ ID NO: 12422 - DNA, 25 bp, Probe Sequence
tttaattgtcttgctctctatggga

SEQ ID NO: 12423 - DNA, 25 bp, Probe Sequence
ctttaattgtcttgctctctatggg

SEQ ID NO: 12424 - DNA, 25 bp, Probe Sequence
cctttaattgtcttgctctctatgg

SEQ ID NO: 12425 - DNA, 25 bp, Probe Sequence
ctgcctttaattgtcttgctctcta

SEQ ID NO: 12426 - DNA, 25 bp, Probe Sequence
cgggatggaaatagagaagtaactt

SEQ ID NO: 12427 - DNA, 25 bp, Probe Sequence
agaagtaacttaaaggtcacactga

SEQ ID NO: 12428 - DNA, 25 bp, Probe Sequence
gagaagtaacttaaaggtcacactg

SEQ ID NO: 12429 - DNA, 25 bp, Probe Sequence
agagaagtaacttaaaggtcacact

SEQ ID NO: 12430 - DNA, 25 bp, Probe Sequence
tagagaagtaacttaaaggtcacac

SEQ ID NO: 12431 - DNA, 25 bp, Probe Sequence
gggatggaaatagagaagtaactta

SEQ ID NO: 12432 - DNA, 25 bp, Probe Sequence
cttgctgcctttaattgtcttgctc

SEQ ID NO: 12433 - DNA, 25 bp, Probe Sequence
ctgcttgctgcctttaattgtcttg

SEQ ID NO: 12434 - DNA, 25 bp, Probe Sequence
atagagaagtaacttaaaggtcaca

SEQ ID NO: 12435 - DNA, 25 bp, Probe Sequence
aattgtcttgctctctatgggaaaa

SEQ ID NO: 12436 - DNA, 25 bp, Probe Sequence
ttgctgcctttaattgtcttgctct

SEQ ID NO: 12437 - DNA, 25 bp, Probe Sequence
gctgcctttaattgtcttgctctct

SEQ ID NO: 12438 - DNA, 25 bp, Probe Sequence
actgcttgctgcctttaattgtctt

SEQ ID NO: 12439 - DNA, 25 bp, Probe Sequence
aactgactgcttgctgcctttaatt

SEQ ID NO: 12440 - DNA, 25 bp, Probe Sequence
tgctgcctttaattgtcttgctctc

SEQ ID NO: 12441 - DNA, 25 bp, Probe Sequence
gaatttctggttctgagcgtcaact

SEQ ID NO: 12442 - DNA, 25 bp, Probe Sequence
tccagatgatagacaggttgaacaa

SEQ ID NO: 12443 - DNA, 25 bp, Probe Sequence
tagtatctcaacaatctggatcaca

SEQ ID NO: 12444 - DNA, 25 bp, Probe Sequence
gtagtatctcaacaatctggatcac

SEQ ID NO: 12445 - DNA, 25 bp, Probe Sequence
agtagtatctcaacaatctggatca

SEQ ID NO: 12446 - DNA, 25 bp, Probe Sequence
agatgatagacaggttgaacaactt

SEQ ID NO: 12447 - DNA, 25 bp, Probe Sequence
caggttgaacaacttattctatggc

SEQ ID NO: 12448 - DNA, 25 bp, Probe Sequence
cagatgatagacaggttgaacaact

SEQ ID NO: 12449 - DNA, 25 bp, Probe Sequence
aataattaccatcagagcatcagcc

SEQ ID NO: 12450 - DNA, 25 bp, Probe Sequence
taattaccatcagagcatcagccta

SEQ ID NO: 12451 - DNA, 25 bp, Probe Sequence
taataattaccatcagagcatcagc

SEQ ID NO: 12452 - DNA, 25 bp, Probe Sequence
acaggttgaacaacttattctatgg

SEQ ID NO: 12453 - DNA, 25 bp, Probe Sequence
agtatctcaacaatctggatcacag

SEQ ID NO: 12454 - DNA, 25 bp, Probe Sequence
aattaccatcagagcatcagcctag

SEQ ID NO: 12455 - DNA, 25 bp, Probe Sequence
ataattaccatcagagcatcagcct

SEQ ID NO: 12456 - DNA, 25 bp, Probe Sequence
gatgatagacaggttgaacaactta

SEQ ID NO: 12457 - DNA, 25 bp, Probe Sequence
ccagatgatagacaggttgaacaac

SEQ ID NO: 12458 - DNA, 25 bp, Probe Sequence
aagtagtatctcaacaatctggatc

SEQ ID NO: 12459 - DNA, 25 bp, Probe Sequence
cactaaagatagcagaaacatccct

SEQ ID NO: 12460 - DNA, 25 bp, Probe Sequence
gtccagatgatagacaggttgaaca

SEQ ID NO: 12461 - DNA, 25 bp, Probe Sequence
tgatagacaggttgaacaacttatt

SEQ ID NO: 12462 - DNA, 25 bp, Probe Sequence
acactaaagatagcagaaacatccc

SEQ ID NO: 12463 - DNA, 25 bp, Probe Sequence
agtccttctctgcttaaataaatgc

SEQ ID NO: 12464 - DNA, 25 bp, Probe Sequence
gacaggttgaacaacttattctatg

SEQ ID NO: 12465 - DNA, 25 bp, Probe Sequence
actaaagatagcagaaacatccctt

SEQ ID NO: 12466 - DNA, 25 bp, Probe Sequence
ggacgacaggttcatctctatttaa

SEQ ID NO: 12467 - DNA, 25 bp, Probe Sequence
ttaaaggaacgaaatgtgagcaaag

SEQ ID NO: 12468 - DNA, 25 bp, Probe Sequence
ggtctatataatgcagagtctcgtt

SEQ ID NO: 12469 - DNA, 25 bp, Probe Sequence
aggtctatataatgcagagtctcgt

SEQ ID NO: 12470 - DNA, 25 bp, Probe Sequence
taaaggaacgaaatgtgagcaaagt

SEQ ID NO: 12471 - DNA, 25 bp, Probe Sequence
gaggtctatataatgcagagtctcg

SEQ ID NO: 12472 - DNA, 25 bp, Probe Sequence
ggaggtctatataatgcagagtctc

SEQ ID NO: 12473 - DNA, 25 bp, Probe Sequence
gggacgacaggttcatctctattta

SEQ ID NO: 12474 - DNA, 25 bp, Probe Sequence
tttaaaggaacgaaatgtgagcaaa

SEQ ID NO: 12475 - DNA, 25 bp, Probe Sequence
aacgaaatgtgagcaaagtggttag

SEQ ID NO: 12476 - DNA, 25 bp, Probe Sequence
gaacgaaatgtgagcaaagtggtta

SEQ ID NO: 12477 - DNA, 25 bp, Probe Sequence
gaaatgtgagcaaagtggttagtgg

SEQ ID NO: 12478 - DNA, 25 bp, Probe Sequence
cgacaggttcatctctatttaaagg

SEQ ID NO: 12479 - DNA, 25 bp, Probe Sequence
gaccttatgggactttcctactttg

SEQ ID NO: 12480 - DNA, 25 bp, Probe Sequence
tgaccttatgggactttcctacttt

SEQ ID NO: 12481 - DNA, 25 bp, Probe Sequence
aaaggaacgaaatgtgagcaaagtg

SEQ ID NO: 12482 - DNA, 25 bp, Probe Sequence
acgacaggttcatctctatttaaag

SEQ ID NO: 12483 - DNA, 25 bp, Probe Sequence
gacgacaggttcatctctatttaaa

SEQ ID NO: 12484 - DNA, 25 bp, Probe Sequence
ataatgcagagtctcgtttagtgaa

SEQ ID NO: 12485 - DNA, 25 bp, Probe Sequence
atgtgagcaaagtggttagtggaaa

SEQ ID NO: 12486 - DNA, 25 bp, Probe Sequence
aatgtgagcaaagtggttagtggaa

SEQ ID NO: 12487 - DNA, 25 bp, Probe Sequence
aaatgtgagcaaagtggttagtgga

SEQ ID NO: 12488 - DNA, 25 bp, Probe Sequence
cgaaatgtgagcaaagtggttagtg

SEQ ID NO: 12489 - DNA, 25 bp, Probe Sequence
tataatgcagagtctcgtttagtga

SEQ ID NO: 12490 - DNA, 25 bp, Probe Sequence
agtcttagatagaacatggatcagg

SEQ ID NO: 12491 - DNA, 25 bp, Probe Sequence
gccatcaaggatatacaatgtagat

SEQ ID NO: 12492 - DNA, 25 bp, Probe Sequence
gagggtaatttggtagaatctgtca

SEQ ID NO: 12493 - DNA, 25 bp, Probe Sequence
ttggagggtaatttggtagaatctg

SEQ ID NO: 12494 - DNA, 25 bp, Probe Sequence
tttggagggtaatttggtagaatct

SEQ ID NO: 12495 - DNA, 25 bp, Probe Sequence
ggagggtaatttggtagaatctgtc

SEQ ID NO: 12496 - DNA, 25 bp, Probe Sequence
cgacattggtcataattggcaatat

SEQ ID NO: 12497 - DNA, 25 bp, Probe Sequence
aatctcctcgacattggtcataatt

SEQ ID NO: 12498 - DNA, 25 bp, Probe Sequence
tggagggtaatttggtagaatctgt

SEQ ID NO: 12499 - DNA, 25 bp, Probe Sequence
taagatatttactcaaggcaaggtg

SEQ ID NO: 12500 - DNA, 25 bp, Probe Sequence
agggtaatttggtagaatctgtcaa

SEQ ID NO: 12501 - DNA, 25 bp, Probe Sequence
atctcctcgacattggtcataattg

SEQ ID NO: 12502 - DNA, 25 bp, Probe Sequence
ttaaatgctgctggatagggaaatg

SEQ ID NO: 12503 - DNA, 25 bp, Probe Sequence
aagtcttagatagaacatggatcag

SEQ ID NO: 12504 - DNA, 25 bp, Probe Sequence
aatagacttgctttcactgtactgt

SEQ ID NO: 12505 - DNA, 25 bp, Probe Sequence
agacttgctttcactgtactgtaaa

SEQ ID NO: 12506 - DNA, 25 bp, Probe Sequence
tagacttgctttcactgtactgtaa

SEQ ID NO: 12507 - DNA, 25 bp, Probe Sequence
atagacttgctttcactgtactgta

SEQ ID NO: 12508 - DNA, 25 bp, Probe Sequence
gatagaacatggatcagggagattt

SEQ ID NO: 12509 - DNA, 25 bp, Probe Sequence
tagatagaacatggatcagggagat

SEQ ID NO: 12510 - DNA, 25 bp, Probe Sequence
ttagatagaacatggatcagggaga

SEQ ID NO: 12511 - DNA, 25 bp, Probe Sequence
cttagatagaacatggatcagggag

SEQ ID NO: 12512 - DNA, 25 bp, Probe Sequence
ttcttaatagacttgctttcactgt

SEQ ID NO: 12513 - DNA, 25 bp, Probe Sequence
agatagaacatggatcagggagatt

SEQ ID NO: 12514 - DNA, 25 bp, Probe Sequence
aatagcgtcttaacacacttcctca

SEQ ID NO: 12515 - DNA, 25 bp, Probe Sequence
tgttcttaatatgtctctatccagc

SEQ ID NO: 12516 - DNA, 25 bp, Probe Sequence
cgtctgtgttcttaatatgtctcta

SEQ ID NO: 12517 - DNA, 25 bp, Probe Sequence
ctagagtgtgttctgtgaagtcttc

SEQ ID NO: 12518 - DNA, 25 bp, Probe Sequence
tagagtgtgttctgtgaagtcttct

SEQ ID NO: 12519 - DNA, 25 bp, Probe Sequence
cttaacacacttcctcacctagtct

SEQ ID NO: 12520 - DNA, 25 bp, Probe Sequence
tcttaacacacttcctcacctagtc

SEQ ID NO: 12521 - DNA, 25 bp, Probe Sequence
taatatgtctctatccagctcggta

SEQ ID NO: 12522 - DNA, 25 bp, Probe Sequence
cttaatatgtctctatccagctcgg

SEQ ID NO: 12523 - DNA, 25 bp, Probe Sequence
aatatgtctctatccagctcggtaa

SEQ ID NO: 12524 - DNA, 25 bp, Probe Sequence
ttaatatgtctctatccagctcggt

SEQ ID NO: 12525 - DNA, 25 bp, Probe Sequence
ttaacacacttcctcacctagtctg

SEQ ID NO: 12526 - DNA, 25 bp, Probe Sequence
gtcttaacacacttcctcacctagt

SEQ ID NO: 12527 - DNA, 25 bp, Probe Sequence
tcttaatatgtctctatccagctcg

SEQ ID NO: 12528 - DNA, 25 bp, Probe Sequence
agagtgtgttctgtgaagtcttctt

SEQ ID NO: 12529 - DNA, 25 bp, Probe Sequence
atagcgtcttaacacacttcctcac

SEQ ID NO: 12530 - DNA, 25 bp, Probe Sequence
acgtctgtgttcttaatatgtctct

SEQ ID NO: 12531 - DNA, 25 bp, Probe Sequence
cgtcttaacacacttcctcacctag

SEQ ID NO: 12532 - DNA, 25 bp, Probe Sequence
tgtgttcttaatatgtctctatcca

SEQ ID NO: 12533 - DNA, 25 bp, Probe Sequence
aaatagcgtcttaacacacttcctc

SEQ ID NO: 12534 - DNA, 25 bp, Probe Sequence
atgtgaatcccaagcgtgttatatc

SEQ ID NO: 12535 - DNA, 25 bp, Probe Sequence
gatgtgaatcccaagcgtgttatat

SEQ ID NO: 12536 - DNA, 25 bp, Probe Sequence
gaaatagcgtcttaacacacttcct

SEQ ID NO: 12537 - DNA, 25 bp, Probe Sequence
agaaatagcgtcttaacacacttcc

SEQ ID NO: 12538 - DNA, 25 bp, Probe Sequence
cctttagatactccaactcaccaaa

SEQ ID NO: 12539 - DNA, 25 bp, Probe Sequence
agaacctttagatactccaactcac

SEQ ID NO: 12540 - DNA, 25 bp, Probe Sequence
gaacctttagatactccaactcacc

SEQ ID NO: 12541 - DNA, 25 bp, Probe Sequence
acctttagatactccaactcaccaa

SEQ ID NO: 12542 - DNA, 25 bp, Probe Sequence
aacctttagatactccaactcacca

SEQ ID NO: 12543 - DNA, 25 bp, Probe Sequence
gattctcaaagttcagcattcattt

SEQ ID NO: 12544 - DNA, 25 bp, Probe Sequence
gctgacaaagtgcttatagaatttc

SEQ ID NO: 12545 - DNA, 25 bp, Probe Sequence
tgattctcaaagttcagcattcatt

SEQ ID NO: 12546 - DNA, 25 bp, Probe Sequence
tagaacctttagatactccaactca

SEQ ID NO: 12547 - DNA, 25 bp, Probe Sequence
catcatatgtcacagtgttcagaat

SEQ ID NO: 12548 - DNA, 25 bp, Probe Sequence
ccatcatatgtcacagtgttcagaa

SEQ ID NO: 12549 - DNA, 25 bp, Probe Sequence
actggatttcaatgtaagcaaatga

SEQ ID NO: 12550 - DNA, 25 bp, Probe Sequence
cacagtgttcagaattcaagcatat

SEQ ID NO: 12551 - DNA, 25 bp, Probe Sequence
catatgtcacagtgttcagaattca

SEQ ID NO: 12552 - DNA, 25 bp, Probe Sequence
tcacagtgttcagaattcaagcata

SEQ ID NO: 12553 - DNA, 25 bp, Probe Sequence
tatgtcacagtgttcagaattcaag

SEQ ID NO: 12554 - DNA, 25 bp, Probe Sequence
acagtgttcagaattcaagcatatt

SEQ ID NO: 12555 - DNA, 25 bp, Probe Sequence
atcatatgtcacagtgttcagaatt

SEQ ID NO: 12556 - DNA, 25 bp, Probe Sequence
tcatatgtcacagtgttcagaattc

SEQ ID NO: 12557 - DNA, 25 bp, Probe Sequence
aattcaagcatatttaagggcattt

SEQ ID NO: 12558 - DNA, 25 bp, Probe Sequence
aactggatttcaatgtaagcaaatg

SEQ ID NO: 12559 - DNA, 25 bp, Probe Sequence
gaattgagaagcctatacatttagc

SEQ ID NO: 12560 - DNA, 25 bp, Probe Sequence
atatgtcacagtgttcagaattcaa

SEQ ID NO: 12561 - DNA, 25 bp, Probe Sequence
aagcataacctaagacagggaattg

SEQ ID NO: 12562 - DNA, 25 bp, Probe Sequence
agatagtaactctgttgacattcct

SEQ ID NO: 12563 - DNA, 25 bp, Probe Sequence
cttgaggcttgtgatctgagtaatt

SEQ ID NO: 12564 - DNA, 25 bp, Probe Sequence
cgaagagatataggagccatgtaag

SEQ ID NO: 12565 - DNA, 25 bp, Probe Sequence
gaagagatataggagccatgtaagc

SEQ ID NO: 12566 - DNA, 25 bp, Probe Sequence
gatgtacttgtcttccgtcttgtag

SEQ ID NO: 12567 - DNA, 25 bp, Probe Sequence
tgaggcttgtgatctgagtaattag

SEQ ID NO: 12568 - DNA, 25 bp, Probe Sequence
aagagatataggagccatgtaagca

SEQ ID NO: 12569 - DNA, 25 bp, Probe Sequence
ttgaggcttgtgatctgagtaatta

SEQ ID NO: 12570 - DNA, 25 bp, Probe Sequence
tgatgtacttgtcttccgtcttgta

SEQ ID NO: 12571 - DNA, 25 bp, Probe Sequence
gatagtaactctgttgacattcctt

SEQ ID NO: 12572 - DNA, 25 bp, Probe Sequence
cttaatccttgaggcttgtgatctg

SEQ ID NO: 12573 - DNA, 25 bp, Probe Sequence
ccgaagagatataggagccatgtaa

SEQ ID NO: 12574 - DNA, 25 bp, Probe Sequence
agagatataggagccatgtaagcac

SEQ ID NO: 12575 - DNA, 25 bp, Probe Sequence
ttaatccttgaggcttgtgatctga

SEQ ID NO: 12576 - DNA, 25 bp, Probe Sequence
acttaatccttgaggcttgtgatct

SEQ ID NO: 12577 - DNA, 25 bp, Probe Sequence
gttgatgtacttgtcttccgtcttg

SEQ ID NO: 12578 - DNA, 25 bp, Probe Sequence
atgttgatgtacttgtcttccgtct

SEQ ID NO: 12579 - DNA, 25 bp, Probe Sequence
atgtacttgtcttccgtcttgtagg

SEQ ID NO: 12580 - DNA, 25 bp, Probe Sequence
tacttgtcttccgtcttgtaggtct

SEQ ID NO: 12581 - DNA, 25 bp, Probe Sequence
ttgatgtacttgtcttccgtcttgt

SEQ ID NO: 12582 - DNA, 25 bp, Probe Sequence
tgttgatgtacttgtcttccgtctt

SEQ ID NO: 12583 - DNA, 25 bp, Probe Sequence
taatccttgaggcttgtgatctgag

SEQ ID NO: 12584 - DNA, 25 bp, Probe Sequence
cttgtgatctgagtaattagcaggt

SEQ ID NO: 12585 - DNA, 25 bp, Probe Sequence
catgttgatgtacttgtcttccgtc

SEQ ID NO: 12586 - DNA, 25 bp, Probe Sequence
gcattactgtgttgtgaagataaga

SEQ ID NO: 12587 - DNA, 25 bp, Probe Sequence
ttactgtgttgtgaagataagaagc

SEQ ID NO: 12588 - DNA, 25 bp, Probe Sequence
tactgtgttgtgaagataagaagct

SEQ ID NO: 12589 - DNA, 25 bp, Probe Sequence
cataagagctgtaagaggaactgtg

SEQ ID NO: 12590 - DNA, 25 bp, Probe Sequence
tgaagataagaagctgctctgtatg

SEQ ID NO: 12591 - DNA, 25 bp, Probe Sequence
gtgaagataagaagctgctctgtat

SEQ ID NO: 12592 - DNA, 25 bp, Probe Sequence
actgtgttgtgaagataagaagctg

SEQ ID NO: 12593 - DNA, 25 bp, Probe Sequence
cattactgtgttgtgaagataagaa

SEQ ID NO: 12594 - DNA, 25 bp, Probe Sequence
tgttattgttgcattactgtgttgt

SEQ ID NO: 12595 - DNA, 25 bp, Probe Sequence
tgtgttattgttgcattactgtgtt

SEQ ID NO: 12596 - DNA, 25 bp, Probe Sequence
gttgcattactgtgttgtgaagata

SEQ ID NO: 12597 - DNA, 25 bp, Probe Sequence
tattgttgcattactgtgttgtgaa

SEQ ID NO: 12598 - DNA, 25 bp, Probe Sequence
ttattgttgcattactgtgttgtga

SEQ ID NO: 12599 - DNA, 25 bp, Probe Sequence
gttattgttgcattactgtgttgtg

SEQ ID NO: 12600 - DNA, 25 bp, Probe Sequence
gtgttattgttgcattactgtgttg

SEQ ID NO: 12601 - DNA, 25 bp, Probe Sequence
tgcattactgtgttgtgaagataag

SEQ ID NO: 12602 - DNA, 25 bp, Probe Sequence
gaagataagaagctgctctgtatgg

SEQ ID NO: 12603 - DNA, 25 bp, Probe Sequence
ttgcattactgtgttgtgaagataa

SEQ ID NO: 12604 - DNA, 25 bp, Probe Sequence
attgttgcattactgtgttgtgaag

SEQ ID NO: 12605 - DNA, 25 bp, Probe Sequence
gttgtgatgtaacagccataagagc

SEQ ID NO: 12606 - DNA, 25 bp, Probe Sequence
atgtgttattgttgcattactgtgt

SEQ ID NO: 12607 - DNA, 25 bp, Probe Sequence
attactgtgttgtgaagataagaag

SEQ ID NO: 12608 - DNA, 25 bp, Probe Sequence
catgtgttattgttgcattactgtg

SEQ ID NO: 12609 - DNA, 25 bp, Probe Sequence
tgtgaagataagaagctgctctgta

SEQ ID NO: 12610 - DNA, 25 bp, Probe Sequence
cacattctggagacttgctatatca

SEQ ID NO: 12611 - DNA, 25 bp, Probe Sequence
acacattctggagacttgctatatc

SEQ ID NO: 12612 - DNA, 25 bp, Probe Sequence
taacaatggcataatagtgaggtct

SEQ ID NO: 12613 - DNA, 25 bp, Probe Sequence
ctaacaatggcataatagtgaggtc

SEQ ID NO: 12614 - DNA, 25 bp, Probe Sequence
acattctggagacttgctatatcat

SEQ ID NO: 12615 - DNA, 25 bp, Probe Sequence
aagaccttgacatattcctgagatg

SEQ ID NO: 12616 - DNA, 25 bp, Probe Sequence
aacaatggcataatagtgaggtctc

SEQ ID NO: 12617 - DNA, 25 bp, Probe Sequence
tacacattctggagacttgctatat

SEQ ID NO: 12618 - DNA, 25 bp, Probe Sequence
tacttactaacgaacagacctgatt

SEQ ID NO: 12619 - DNA, 25 bp, Probe Sequence
ttacttactaacgaacagacctgat

SEQ ID NO: 12620 - DNA, 25 bp, Probe Sequence
acaatggcataatagtgaggtctct

SEQ ID NO: 12621 - DNA, 25 bp, Probe Sequence
gtacacattctggagacttgctata

SEQ ID NO: 12622 - DNA, 25 bp, Probe Sequence
attctggagacttgctatatcatgg

SEQ ID NO: 12623 - DNA, 25 bp, Probe Sequence
aatggcataatagtgaggtctctct

SEQ ID NO: 12624 - DNA, 25 bp, Probe Sequence
caatggcataatagtgaggtctctc

SEQ ID NO: 12625 - DNA, 25 bp, Probe Sequence
tctggagacttgctatatcatggtt

SEQ ID NO: 12626 - DNA, 25 bp, Probe Sequence
ttctggagacttgctatatcatggt

SEQ ID NO: 12627 - DNA, 25 bp, Probe Sequence
atggcataatagtgaggtctctctg

SEQ ID NO: 12628 - DNA, 25 bp, Probe Sequence
cattctggagacttgctatatcatg

SEQ ID NO: 12629 - DNA, 25 bp, Probe Sequence
cctaacaatggcataatagtgaggt

SEQ ID NO: 12630 - DNA, 25 bp, Probe Sequence
ggcataatagtgaggtctctctgtg

SEQ ID NO: 12631 - DNA, 25 bp, Probe Sequence
atttgtaatgtgttcctccttgttg

SEQ ID NO: 12632 - DNA, 25 bp, Probe Sequence
ccatttacttactaacgaacagacc

SEQ ID NO: 12633 - DNA, 25 bp, Probe Sequence
aaagaccttgacatattcctgagat

SEQ ID NO: 12634 - DNA, 25 bp, Probe Sequence
aaatcctttcagaatgtagcactca

SEQ ID NO: 12635 - DNA, 25 bp, Probe Sequence
aatcctttcagaatgtagcactcac

SEQ ID NO: 12636 - DNA, 25 bp, Probe Sequence
taaatcctttcagaatgtagcactc

SEQ ID NO: 12637 - DNA, 25 bp, Probe Sequence
ataaatcctttcagaatgtagcact

SEQ ID NO: 12638 - DNA, 25 bp, Probe Sequence
aataaatcctttcagaatgtagcac

SEQ ID NO: 12639 - DNA, 25 bp, Probe Sequence
aatgtagcactcacgccctaataag

SEQ ID NO: 12640 - DNA, 25 bp, Probe Sequence
gaatgtagcactcacgccctaataa

SEQ ID NO: 12641 - DNA, 25 bp, Probe Sequence
atcctttcagaatgtagcactcacg

SEQ ID NO: 12642 - DNA, 25 bp, Probe Sequence
aaataaatcctttcagaatgtagca

SEQ ID NO: 12643 - DNA, 25 bp, Probe Sequence
agaatgtagcactcacgccctaata

SEQ ID NO: 12644 - DNA, 25 bp, Probe Sequence
tgtcccaaaataaatcctttcagaa

SEQ ID NO: 12645 - DNA, 25 bp, Probe Sequence
ccttgtcccaaaataaatcctttca

SEQ ID NO: 12646 - DNA, 25 bp, Probe Sequence
ccatcaataaaagtaatttcacccg

SEQ ID NO: 12647 - DNA, 25 bp, Probe Sequence
gccttgtcccaaaataaatcctttc

SEQ ID NO: 12648 - DNA, 25 bp, Probe Sequence
cgctcaccatcaataaaagtaattt

SEQ ID NO: 12649 - DNA, 25 bp, Probe Sequence
cttgtgccttgtcccaaaataaatc

SEQ ID NO: 12650 - DNA, 25 bp, Probe Sequence
ctaataaggagcgaatcctacatcc

SEQ ID NO: 12651 - DNA, 25 bp, Probe Sequence
cctaataaggagcgaatcctacatc

SEQ ID NO: 12652 - DNA, 25 bp, Probe Sequence
ttgtcccaaaataaatcctttcaga

SEQ ID NO: 12653 - DNA, 25 bp, Probe Sequence
tgccttgtcccaaaataaatccttt

SEQ ID NO: 12654 - DNA, 25 bp, Probe Sequence
cttgtcccaaaataaatcctttcag

SEQ ID NO: 12655 - DNA, 25 bp, Probe Sequence
taataaggagcgaatcctacatcca

SEQ ID NO: 12656 - DNA, 25 bp, Probe Sequence
cccaaaataaatcctttcagaatgt

SEQ ID NO: 12657 - DNA, 25 bp, Probe Sequence
catcaataaaagtaatttcacccga

SEQ ID NO: 12658 - DNA, 25 bp, Probe Sequence
gaaacttaaaggaattgacggaagc

SEQ ID NO: 12659 - DNA, 25 bp, Probe Sequence
agagctgaaacttaaaggaattgac

SEQ ID NO: 12660 - DNA, 25 bp, Probe Sequence
cagagctgaaacttaaaggaattga

SEQ ID NO: 12661 - DNA, 25 bp, Probe Sequence
gagctgaaacttaaaggaattgacg

SEQ ID NO: 12662 - DNA, 25 bp, Probe Sequence
aaacttaaaggaattgacggaagcg

SEQ ID NO: 12663 - DNA, 25 bp, Probe Sequence
gcagagctgaaacttaaaggaattg

SEQ ID NO: 12664 - DNA, 25 bp, Probe Sequence
tgcagagctgaaacttaaaggaatt

SEQ ID NO: 12665 - DNA, 25 bp, Probe Sequence
ttgcagagctgaaacttaaaggaat

SEQ ID NO: 12666 - DNA, 25 bp, Probe Sequence
tatggttgcagagctgaaacttaaa

SEQ ID NO: 12667 - DNA, 25 bp, Probe Sequence
gtatggttgcagagctgaaacttaa

SEQ ID NO: 12668 - DNA, 25 bp, Probe Sequence
gttgcagagctgaaacttaaaggaa

SEQ ID NO: 12669 - DNA, 25 bp, Probe Sequence
atggttgcagagctgaaacttaaag

SEQ ID NO: 12670 - DNA, 25 bp, Probe Sequence
agtatggttgcagagctgaaactta

SEQ ID NO: 12671 - DNA, 25 bp, Probe Sequence
gggcaaaatacgatttcatttaaca

SEQ ID NO: 12672 - DNA, 25 bp, Probe Sequence
tgggcaaaatacgatttcatttaac

SEQ ID NO: 12673 - DNA, 25 bp, Probe Sequence
gtgggcaaaatacgatttcatttaa

SEQ ID NO: 12674 - DNA, 25 bp, Probe Sequence
gagtatggttgcagagctgaaactt

SEQ ID NO: 12675 - DNA, 25 bp, Probe Sequence
ggttgcagagctgaaacttaaagga

SEQ ID NO: 12676 - DNA, 25 bp, Probe Sequence
ggcaaaatacgatttcatttaacaa

SEQ ID NO: 12677 - DNA, 25 bp, Probe Sequence
tggttgcagagctgaaacttaaagg

SEQ ID NO: 12678 - DNA, 25 bp, Probe Sequence
cgtgggcaaaatacgatttcattta

SEQ ID NO: 12679 - DNA, 25 bp, Probe Sequence
gcaaaatacgatttcatttaacaaa

SEQ ID NO: 12680 - DNA, 25 bp, Probe Sequence
ggagtatggttgcagagctgaaact

SEQ ID NO: 12681 - DNA, 25 bp, Probe Sequence
ccgtgggcaaaatacgatttcattt

SEQ ID NO: 12682 - DNA, 25 bp, Probe Sequence
ggaatgggaccttctaatctctcat

SEQ ID NO: 12683 - DNA, 25 bp, Probe Sequence
tgagttatttcctattctgtggttt

SEQ ID NO: 12684 - DNA, 25 bp, Probe Sequence
cccatgagttatttcctattctgtg

SEQ ID NO: 12685 - DNA, 25 bp, Probe Sequence
tcccatgagttatttcctattctgt

SEQ ID NO: 12686 - DNA, 25 bp, Probe Sequence
gaatgggaccttctaatctctcatg

SEQ ID NO: 12687 - DNA, 25 bp, Probe Sequence
atgagttatttcctattctgtggtt

SEQ ID NO: 12688 - DNA, 25 bp, Probe Sequence
catgagttatttcctattctgtggt

SEQ ID NO: 12689 - DNA, 25 bp, Probe Sequence
atcccatgagttatttcctattctg

SEQ ID NO: 12690 - DNA, 25 bp, Probe Sequence
ggaccttctaatctctcatgaatgt

SEQ ID NO: 12691 - DNA, 25 bp, Probe Sequence
accttctaatctctcatgaatgtct

SEQ ID NO: 12692 - DNA, 25 bp, Probe Sequence
ccatgagttatttcctattctgtgg

SEQ ID NO: 12693 - DNA, 25 bp, Probe Sequence
aggaatgggaccttctaatctctca

SEQ ID NO: 12694 - DNA, 25 bp, Probe Sequence
aatcccatgagttatttcctattct

SEQ ID NO: 12695 - DNA, 25 bp, Probe Sequence
ccttctaatctctcatgaatgtctt

SEQ ID NO: 12696 - DNA, 25 bp, Probe Sequence
gaccttctaatctctcatgaatgtc

SEQ ID NO: 12697 - DNA, 25 bp, Probe Sequence
gggaccttctaatctctcatgaatg

SEQ ID NO: 12698 - DNA, 25 bp, Probe Sequence
tgggaccttctaatctctcatgaat

SEQ ID NO: 12699 - DNA, 25 bp, Probe Sequence
atgggaccttctaatctctcatgaa

SEQ ID NO: 12700 - DNA, 25 bp, Probe Sequence
aatgggaccttctaatctctcatga

SEQ ID NO: 12701 - DNA, 25 bp, Probe Sequence
tatttacggtaaactgcccacttgc

SEQ ID NO: 12702 - DNA, 25 bp, Probe Sequence
gagttatttcctattctgtggtttt

SEQ ID NO: 12703 - DNA, 25 bp, Probe Sequence
taatcccatgagttatttcctattc

SEQ ID NO: 12704 - DNA, 25 bp, Probe Sequence
ctaatctctcatgaatgtctttcct

SEQ ID NO: 12705 - DNA, 25 bp, Probe Sequence
tctaatctctcatgaatgtctttcc

SEQ ID NO: 12706 - DNA, 25 bp, Probe Sequence
gacttctacttgcagtacattacgt

SEQ ID NO: 12707 - DNA, 25 bp, Probe Sequence
ggacttctacttgcagtacattacg

SEQ ID NO: 12708 - DNA, 25 bp, Probe Sequence
cttgcagtacattacgtattagtca

SEQ ID NO: 12709 - DNA, 25 bp, Probe Sequence
tgcagtacattacgtattagtcatc

SEQ ID NO: 12710 - DNA, 25 bp, Probe Sequence
acttgcagtacattacgtattagtc

SEQ ID NO: 12711 - DNA, 25 bp, Probe Sequence
ttgcagtacattacgtattagtcat

SEQ ID NO: 12712 - DNA, 25 bp, Probe Sequence
acttctacttgcagtacattacgta

SEQ ID NO: 12713 - DNA, 25 bp, Probe Sequence
gggacttctacttgcagtacattac

SEQ ID NO: 12714 - DNA, 25 bp, Probe Sequence
agggacttctacttgcagtacatta

SEQ ID NO: 12715 - DNA, 25 bp, Probe Sequence
tagggacttctacttgcagtacatt

SEQ ID NO: 12716 - DNA, 25 bp, Probe Sequence
cttctacttgcagtacattacgtat

SEQ ID NO: 12717 - DNA, 25 bp, Probe Sequence
ctagggacttctacttgcagtacat

SEQ ID NO: 12718 - DNA, 25 bp, Probe Sequence
ttctacttgcagtacattacgtatt

SEQ ID NO: 12719 - DNA, 25 bp, Probe Sequence
tacttgcagtacattacgtattagt

SEQ ID NO: 12720 - DNA, 25 bp, Probe Sequence
tctacttgcagtacattacgtatta

SEQ ID NO: 12721 - DNA, 25 bp, Probe Sequence
ctacttgcagtacattacgtattag

SEQ ID NO: 12722 - DNA, 25 bp, Probe Sequence
cctagggacttctacttgcagtaca

SEQ ID NO: 12723 - DNA, 25 bp, Probe Sequence
gcctagggacttctacttgcagtac

SEQ ID NO: 12724 - DNA, 25 bp, Probe Sequence
agcctagggacttctacttgcagta

SEQ ID NO: 12725 - DNA, 25 bp, Probe Sequence
cccgattacatttctaagcgtgaaa

SEQ ID NO: 12726 - DNA, 25 bp, Probe Sequence
gagcttctcattgtgtagaatttct

SEQ ID NO: 12727 - DNA, 25 bp, Probe Sequence
gcttctcattgtgtagaatttctag

SEQ ID NO: 12728 - DNA, 25 bp, Probe Sequence
agcttctcattgtgtagaatttcta

SEQ ID NO: 12729 - DNA, 25 bp, Probe Sequence
attcagaccctgatagagtcagatc

SEQ ID NO: 12730 - DNA, 25 bp, Probe Sequence
gattcagaccctgatagagtcagat

SEQ ID NO: 12731 - DNA, 25 bp, Probe Sequence
ccgattacatttctaagcgtgaaaa

SEQ ID NO: 12732 - DNA, 25 bp, Probe Sequence
tcattgtgtagaatttctagatccc

SEQ ID NO: 12733 - DNA, 25 bp, Probe Sequence
gagattcagaccctgatagagtcag

SEQ ID NO: 12734 - DNA, 25 bp, Probe Sequence
tgagcttctcattgtgtagaatttc

SEQ ID NO: 12735 - DNA, 25 bp, Probe Sequence
agattcagaccctgatagagtcaga

SEQ ID NO: 12736 - DNA, 25 bp, Probe Sequence
catggagattcagaccctgatagag

SEQ ID NO: 12737 - DNA, 25 bp, Probe Sequence
ccccgattacatttctaagcgtgaa

SEQ ID NO: 12738 - DNA, 25 bp, Probe Sequence
ttgagcttctcattgtgtagaattt

SEQ ID NO: 12739 - DNA, 25 bp, Probe Sequence
tttgagcttctcattgtgtagaatt

SEQ ID NO: 12740 - DNA, 25 bp, Probe Sequence
atggagattcagaccctgatagagt

SEQ ID NO: 12741 - DNA, 25 bp, Probe Sequence
ctcattgtgtagaatttctagatcc

SEQ ID NO: 12742 - DNA, 25 bp, Probe Sequence
ggagattcagaccctgatagagtca

SEQ ID NO: 12743 - DNA, 25 bp, Probe Sequence
tggagattcagaccctgatagagtc

SEQ ID NO: 12744 - DNA, 25 bp, Probe Sequence
gggctggttttctatgaacgattcc

SEQ ID NO: 12745 - DNA, 25 bp, Probe Sequence
ggggctggttttctatgaacgattc

SEQ ID NO: 12746 - DNA, 25 bp, Probe Sequence
cattgtgtagaatttctagatcccc

SEQ ID NO: 12747 - DNA, 25 bp, Probe Sequence
ggctggttttctatgaacgattccg

SEQ ID NO: 12748 - DNA, 25 bp, Probe Sequence
ttcagaccctgatagagtcagatct

SEQ ID NO: 12749 - DNA, 25 bp, Probe Sequence
tgaatgctactgattgtgtaactga

SEQ ID NO: 12750 - DNA, 25 bp, Probe Sequence
ttgaatgctactgattgtgtaactg

SEQ ID NO: 12751 - DNA, 25 bp, Probe Sequence
gaatgctactgattgtgtaactgaa

SEQ ID NO: 12752 - DNA, 25 bp, Probe Sequence
aatgctactgattgtgtaactgaat

SEQ ID NO: 12753 - DNA, 25 bp, Probe Sequence
atgctactgattgtgtaactgaatt

SEQ ID NO: 12754 - DNA, 25 bp, Probe Sequence
gaagttatgagccttgttctaagta

SEQ ID NO: 12755 - DNA, 25 bp, Probe Sequence
aagttatgagccttgttctaagtac

SEQ ID NO: 12756 - DNA, 25 bp, Probe Sequence
gagccttgttctaagtacagatgaa

SEQ ID NO: 12757 - DNA, 25 bp, Probe Sequence
atgagccttgttctaagtacagatg

SEQ ID NO: 12758 - DNA, 25 bp, Probe Sequence
agttatgagccttgttctaagtaca

SEQ ID NO: 12759 - DNA, 25 bp, Probe Sequence
ttatgagccttgttctaagtacaga

SEQ ID NO: 12760 - DNA, 25 bp, Probe Sequence
gttatgagccttgttctaagtacag

SEQ ID NO: 12761 - DNA, 25 bp, Probe Sequence
atgtccatgctacaagaagttatga

SEQ ID NO: 12762 - DNA, 25 bp, Probe Sequence
tgaatgtccatgctacaagaagtta

SEQ ID NO: 12763 - DNA, 25 bp, Probe Sequence
tatgagccttgttctaagtacagat

SEQ ID NO: 12764 - DNA, 25 bp, Probe Sequence
tgtccatgctacaagaagttatgag

SEQ ID NO: 12765 - DNA, 25 bp, Probe Sequence
aatgtccatgctacaagaagttatg

SEQ ID NO: 12766 - DNA, 25 bp, Probe Sequence
tgagccttgttctaagtacagatga

SEQ ID NO: 12767 - DNA, 25 bp, Probe Sequence
gaatgtccatgctacaagaagttat

SEQ ID NO: 12768 - DNA, 25 bp, Probe Sequence
ttgaatgtccatgctacaagaagtt

SEQ ID NO: 12769 - DNA, 25 bp, Probe Sequence
aaccttgtatttgtgtaatctccca

SEQ ID NO: 12770 - DNA, 25 bp, Probe Sequence
gaaccttgtatttgtgtaatctccc

SEQ ID NO: 12771 - DNA, 25 bp, Probe Sequence
gttgaatgtccatgctacaagaagt

SEQ ID NO: 12772 - DNA, 25 bp, Probe Sequence
tgttgaatgtccatgctacaagaag

SEQ ID NO: 12773 - DNA, 25 bp, Probe Sequence
ctaatctactccacctcaatcacac

SEQ ID NO: 12774 - DNA, 25 bp, Probe Sequence
tacttctacctacgcctaatctact

SEQ ID NO: 12775 - DNA, 25 bp, Probe Sequence
ctctacttctacctacgcctaatct

SEQ ID NO: 12776 - DNA, 25 bp, Probe Sequence
ctacttctacctacgcctaatctac

SEQ ID NO: 12777 - DNA, 25 bp, Probe Sequence
tccttaacctctacttctacctacg

SEQ ID NO: 12778 - DNA, 25 bp, Probe Sequence
cctccttaacctctacttctaccta

SEQ ID NO: 12779 - DNA, 25 bp, Probe Sequence
acttctacctacgcctaatctactc

SEQ ID NO: 12780 - DNA, 25 bp, Probe Sequence
tctacttctacctacgcctaatcta

SEQ ID NO: 12781 - DNA, 25 bp, Probe Sequence
ctccttaacctctacttctacctac

SEQ ID NO: 12782 - DNA, 25 bp, Probe Sequence
cctaatctactccacctcaatcaca

SEQ ID NO: 12783 - DNA, 25 bp, Probe Sequence
cttctacctacgcctaatctactcc

SEQ ID NO: 12784 - DNA, 25 bp, Probe Sequence
cctctacttctacctacgcctaatc

SEQ ID NO: 12785 - DNA, 25 bp, Probe Sequence
taacctctacttctacctacgccta

SEQ ID NO: 12786 - DNA, 25 bp, Probe Sequence
ttctacctacgcctaatctactcca

SEQ ID NO: 12787 - DNA, 25 bp, Probe Sequence
acctctacttctacctacgcctaat

SEQ ID NO: 12788 - DNA, 25 bp, Probe Sequence
cttaacctctacttctacctacgcc

SEQ ID NO: 12789 - DNA, 25 bp, Probe Sequence
ccttaacctctacttctacctacgc

SEQ ID NO: 12790 - DNA, 25 bp, Probe Sequence
aacctctacttctacctacgcctaa

SEQ ID NO: 12791 - DNA, 25 bp, Probe Sequence
ttaacctctacttctacctacgcct

SEQ ID NO: 12792 - DNA, 25 bp, Probe Sequence
gcctaatctactccacctcaatcac

SEQ ID NO: 12793 - DNA, 25 bp, Probe Sequence
tctacctacgcctaatctactccac

SEQ ID NO: 12794 - DNA, 25 bp, Probe Sequence
tacgcctaatctactccacctcaat

SEQ ID NO: 12795 - DNA, 25 bp, Probe Sequence
ctacgcctaatctactccacctcaa

SEQ ID NO: 12796 - DNA, 25 bp, Probe Sequence
caccctccttaacctctacttctac

SEQ ID NO: 12797 - DNA, 25 bp, Probe Sequence
gtcttgttaatgtcattgctagaga

SEQ ID NO: 12798 - DNA, 25 bp, Probe Sequence
agtcttgttaatgtcattgctagag

SEQ ID NO: 12799 - DNA, 25 bp, Probe Sequence
aagtcttgttaatgtcattgctaga

SEQ ID NO: 12800 - DNA, 25 bp, Probe Sequence
tcttgttaatgtcattgctagagaa

SEQ ID NO: 12801 - DNA, 25 bp, Probe Sequence
acacagtaacagctatgaccattag

SEQ ID NO: 12802 - DNA, 25 bp, Probe Sequence
cacacagtaacagctatgaccatta

SEQ ID NO: 12803 - DNA, 25 bp, Probe Sequence
cacagtaacagctatgaccattagg

SEQ ID NO: 12804 - DNA, 25 bp, Probe Sequence
cggaatacattcacacagtaacagc

SEQ ID NO: 12805 - DNA, 25 bp, Probe Sequence
gcggaatacattcacacagtaacag

SEQ ID NO: 12806 - DNA, 25 bp, Probe Sequence
tacattcacacagtaacagctatga

SEQ ID NO: 12807 - DNA, 25 bp, Probe Sequence
atacattcacacagtaacagctatg

SEQ ID NO: 12808 - DNA, 25 bp, Probe Sequence
gaatacattcacacagtaacagcta

SEQ ID NO: 12809 - DNA, 25 bp, Probe Sequence
ggaatacattcacacagtaacagct

SEQ ID NO: 12810 - DNA, 25 bp, Probe Sequence
ataaagcacaagcatacatttcctg

SEQ ID NO: 12811 - DNA, 25 bp, Probe Sequence
tggtaacttatgtcatctatgttga

SEQ ID NO: 12812 - DNA, 25 bp, Probe Sequence
ttatgaagggagaagacattggttt

SEQ ID NO: 12813 - DNA, 25 bp, Probe Sequence
tttatgaagggagaagacattggtt

SEQ ID NO: 12814 - DNA, 25 bp, Probe Sequence
taaagcacaagcatacatttcctga

SEQ ID NO: 12815 - DNA, 25 bp, Probe Sequence
acattcacacagtaacagctatgac

SEQ ID NO: 12816 - DNA, 25 bp, Probe Sequence
aatacattcacacagtaacagctat

SEQ ID NO: 12817 - DNA, 25 bp, Probe Sequence
tatgaagggagaagacattggtttg

SEQ ID NO: 12818 - DNA, 25 bp, Probe Sequence
tataaagcacaagcatacatttcct

SEQ ID NO: 12819 - DNA, 25 bp, Probe Sequence
cgaaagtcttgttaatgtcattgct

SEQ ID NO: 12820 - DNA, 25 bp, Probe Sequence
ttgagtatggtaacttatgtcatct

SEQ ID NO: 12821 - DNA, 25 bp, Probe Sequence
aactacctaccgtgtgtattctctt

SEQ ID NO: 12822 - DNA, 25 bp, Probe Sequence
ctacctaccgtgtgtattctcttga

SEQ ID NO: 12823 - DNA, 25 bp, Probe Sequence
actgccttaaccttaactgttcttc

SEQ ID NO: 12824 - DNA, 25 bp, Probe Sequence
ccttaaccttaactgttcttcctgg

SEQ ID NO: 12825 - DNA, 25 bp, Probe Sequence
tacctaccgtgtgtattctcttgac

SEQ ID NO: 12826 - DNA, 25 bp, Probe Sequence
actacctaccgtgtgtattctcttg

SEQ ID NO: 12827 - DNA, 25 bp, Probe Sequence
cactgccttaaccttaactgttctt

SEQ ID NO: 12828 - DNA, 25 bp, Probe Sequence
cttaaccttaactgttcttcctggc

SEQ ID NO: 12829 - DNA, 25 bp, Probe Sequence
gccttaaccttaactgttcttcctg

SEQ ID NO: 12830 - DNA, 25 bp, Probe Sequence
ctgccttaaccttaactgttcttcc

SEQ ID NO: 12831 - DNA, 25 bp, Probe Sequence
ctcactgccttaaccttaactgttc

SEQ ID NO: 12832 - DNA, 25 bp, Probe Sequence
tgccttaaccttaactgttcttcct

SEQ ID NO: 12833 - DNA, 25 bp, Probe Sequence
tcactgccttaaccttaactgttct

SEQ ID NO: 12834 - DNA, 25 bp, Probe Sequence
tatgaggctctcgctgtatgttatt

SEQ ID NO: 12835 - DNA, 25 bp, Probe Sequence
ttatgaggctctcgctgtatgttat

SEQ ID NO: 12836 - DNA, 25 bp, Probe Sequence
cctcactgccttaaccttaactgtt

SEQ ID NO: 12837 - DNA, 25 bp, Probe Sequence
ctaagaaactacctaccgtgtgtat

SEQ ID NO: 12838 - DNA, 25 bp, Probe Sequence
tctcgctgtatgttatttaaggact

SEQ ID NO: 12839 - DNA, 25 bp, Probe Sequence
tattgtaaaccctgctctttctgtc

SEQ ID NO: 12840 - DNA, 25 bp, Probe Sequence
ctattgtaaaccctgctctttctgt

SEQ ID NO: 12841 - DNA, 25 bp, Probe Sequence
actattgtaaaccctgctctttctg

SEQ ID NO: 12842 - DNA, 25 bp, Probe Sequence
cactattgtaaaccctgctctttct

SEQ ID NO: 12843 - DNA, 25 bp, Probe Sequence
ctctcgctgtatgttatttaaggac

SEQ ID NO: 12844 - DNA, 25 bp, Probe Sequence
taagaaactacctaccgtgtgtatt

SEQ ID NO: 12845 - DNA, 25 bp, Probe Sequence
gtaacaaccaagctctctcagaatt

SEQ ID NO: 12846 - DNA, 25 bp, Probe Sequence
taacaaccaagctctctcagaattg

SEQ ID NO: 12847 - DNA, 25 bp, Probe Sequence
agtaacaaccaagctctctcagaat

SEQ ID NO: 12848 - DNA, 25 bp, Probe Sequence
aagtaacaaccaagctctctcagaa

SEQ ID NO: 12849 - DNA, 25 bp, Probe Sequence
caaccaagctctctcagaattgaag

SEQ ID NO: 12850 - DNA, 25 bp, Probe Sequence
taccgcttccttagaacttctacag

SEQ ID NO: 12851 - DNA, 25 bp, Probe Sequence
aaccaagctctctcagaattgaaga

SEQ ID NO: 12852 - DNA, 25 bp, Probe Sequence
gtaccgcttccttagaacttctaca

SEQ ID NO: 12853 - DNA, 25 bp, Probe Sequence
caagtaacaaccaagctctctcaga

SEQ ID NO: 12854 - DNA, 25 bp, Probe Sequence
ccgcttccttagaacttctacagaa

SEQ ID NO: 12855 - DNA, 25 bp, Probe Sequence
acaaccaagctctctcagaattgaa

SEQ ID NO: 12856 - DNA, 25 bp, Probe Sequence
aacaaccaagctctctcagaattga

SEQ ID NO: 12857 - DNA, 25 bp, Probe Sequence
ttcgtaccgcttccttagaacttct

SEQ ID NO: 12858 - DNA, 25 bp, Probe Sequence
cgtaccgcttccttagaacttctac

SEQ ID NO: 12859 - DNA, 25 bp, Probe Sequence
ccaagtaacaaccaagctctctcag

SEQ ID NO: 12860 - DNA, 25 bp, Probe Sequence
tcgtaccgcttccttagaacttcta

SEQ ID NO: 12861 - DNA, 25 bp, Probe Sequence
accgcttccttagaacttctacaga

SEQ ID NO: 12862 - DNA, 25 bp, Probe Sequence
cttccttagaacttctacagaagcc

SEQ ID NO: 12863 - DNA, 25 bp, Probe Sequence
ccttagaacttctacagaagccaag

SEQ ID NO: 12864 - DNA, 25 bp, Probe Sequence
cgcttccttagaacttctacagaag

SEQ ID NO: 12865 - DNA, 25 bp, Probe Sequence
tccttagaacttctacagaagccaa

SEQ ID NO: 12866 - DNA, 25 bp, Probe Sequence
ttccttagaacttctacagaagcca

SEQ ID NO: 12867 - DNA, 25 bp, Probe Sequence
aagctctctcagaattgaagaggaa

SEQ ID NO: 12868 - DNA, 25 bp, Probe Sequence
ctctagctttgcagtcgtgtaattg

SEQ ID NO: 12869 - DNA, 25 bp, Probe Sequence
ctcacacctataatcccagcaattt

SEQ ID NO: 12870 - DNA, 25 bp, Probe Sequence
tcacacctataatcccagcaatttg

SEQ ID NO: 12871 - DNA, 25 bp, Probe Sequence
caggcagatcagttgaagtcaagag

SEQ ID NO: 12872 - DNA, 25 bp, Probe Sequence
acctataatcccagcaatttggaag

SEQ ID NO: 12873 - DNA, 25 bp, Probe Sequence
cacctataatcccagcaatttggaa

SEQ ID NO: 12874 - DNA, 25 bp, Probe Sequence
cctataatcccagcaatttggaagg

SEQ ID NO: 12875 - DNA, 25 bp, Probe Sequence
acacctataatcccagcaatttgga

SEQ ID NO: 12876 - DNA, 25 bp, Probe Sequence
cacacctataatcccagcaatttgg

SEQ ID NO: 12877 - DNA, 25 bp, Probe Sequence
ctataatcccagcaatttggaaggc

SEQ ID NO: 12878 - DNA, 25 bp, Probe Sequence
ccccgtctctactaaaactacaaaa

SEQ ID NO: 12879 - DNA, 25 bp, Probe Sequence
gaaaccccgtctctactaaaactac

SEQ ID NO: 12880 - DNA, 25 bp, Probe Sequence
accccgtctctactaaaactacaaa

SEQ ID NO: 12881 - DNA, 25 bp, Probe Sequence
aaccccgtctctactaaaactacaa

SEQ ID NO: 12882 - DNA, 25 bp, Probe Sequence
aaaccccgtctctactaaaactaca

SEQ ID NO: 12883 - DNA, 25 bp, Probe Sequence
cgaaaccccgtctctactaaaacta

SEQ ID NO: 12884 - DNA, 25 bp, Probe Sequence
gtatttacggtaactgcccacttgg

SEQ ID NO: 12885 - DNA, 25 bp, Probe Sequence
aggcagatcagttgaagtcaagagc

SEQ ID NO: 12886 - DNA, 25 bp, Probe Sequence
gctcacacctataatcccagcaatt

SEQ ID NO: 12887 - DNA, 25 bp, Probe Sequence
gcaggcagatcagttgaagtcaaga

SEQ ID NO: 12888 - DNA, 25 bp, Probe Sequence
ggcagatcagttgaagtcaagagct

SEQ ID NO: 12889 - DNA, 25 bp, Probe Sequence
catgcctacagtcctagctacttgg

SEQ ID NO: 12890 - DNA, 25 bp, Probe Sequence
catagtaaccccaatagggactttc

SEQ ID NO: 12891 - DNA, 25 bp, Probe Sequence
atagtaaccccaatagggactttcc

SEQ ID NO: 12892 - DNA, 25 bp, Probe Sequence
ccatagtaaccccaatagggacttt

SEQ ID NO: 12893 - DNA, 25 bp, Probe Sequence
taaatcaccacgatcaaaagggaca

SEQ ID NO: 12894 - DNA, 25 bp, Probe Sequence
aaatcaccacgatcaaaagggacaa

SEQ ID NO: 12895 - DNA, 25 bp, Probe Sequence
aatcaccacgatcaaaagggacaag

SEQ ID NO: 12896 - DNA, 25 bp, Probe Sequence
acgatcaaaagggacaagcatcaag

SEQ ID NO: 12897 - DNA, 25 bp, Probe Sequence
atcaaaagggacaagcatcaagcac

SEQ ID NO: 12898 - DNA, 25 bp, Probe Sequence
gatcaaaagggacaagcatcaagca

SEQ ID NO: 12899 - DNA, 25 bp, Probe Sequence
cacgatcaaaagggacaagcatcaa

SEQ ID NO: 12900 - DNA, 25 bp, Probe Sequence
cgatcaaaagggacaagcatcaagc

SEQ ID NO: 12901 - DNA, 25 bp, Probe Sequence
actaaccccagggttggtcaatttc

SEQ ID NO: 12902 - DNA, 25 bp, Probe Sequence
tacttcacagtgttaatcagaggtt

SEQ ID NO: 12903 - DNA, 25 bp, Probe Sequence
ttacttcacagtgttaatcagaggt

SEQ ID NO: 12904 - DNA, 25 bp, Probe Sequence
cttacttcacagtgttaatcagagg

SEQ ID NO: 12905 - DNA, 25 bp, Probe Sequence
ggtagtaacaacacttctggatctt

SEQ ID NO: 12906 - DNA, 25 bp, Probe Sequence
ttggtagtaacaacacttctggatc

SEQ ID NO: 12907 - DNA, 25 bp, Probe Sequence
acttacttcacagtgttaatcagag

SEQ ID NO: 12908 - DNA, 25 bp, Probe Sequence
tggtagtaacaacacttctggatct

SEQ ID NO: 12909 - DNA, 25 bp, Probe Sequence
gtagtaacaacacttctggatctta

SEQ ID NO: 12910 - DNA, 25 bp, Probe Sequence
cagtgttaatcagaggtttggtagt

SEQ ID NO: 12911 - DNA, 25 bp, Probe Sequence
acagtgttaatcagaggtttggtag

SEQ ID NO: 12912 - DNA, 25 bp, Probe Sequence
cttcacagtgttaatcagaggtttg

SEQ ID NO: 12913 - DNA, 25 bp, Probe Sequence
agtgttaatcagaggtttggtagta

SEQ ID NO: 12914 - DNA, 25 bp, Probe Sequence
cacagtgttaatcagaggtttggta

SEQ ID NO: 12915 - DNA, 25 bp, Probe Sequence
aatcagaggtttggtagtaacaaca

SEQ ID NO: 12916 - DNA, 25 bp, Probe Sequence
tttggtagtaacaacacttctggat

SEQ ID NO: 12917 - DNA, 25 bp, Probe Sequence
atcagaggtttggtagtaacaacac

SEQ ID NO: 12918 - DNA, 25 bp, Probe Sequence
ttcacagtgttaatcagaggtttgg

SEQ ID NO: 12919 - DNA, 25 bp, Probe Sequence
gaggtttggtagtaacaacacttct

SEQ ID NO: 12920 - DNA, 25 bp, Probe Sequence
agaggtttggtagtaacaacacttc

SEQ ID NO: 12921 - DNA, 25 bp, Probe Sequence
gtgttaatcagaggtttggtagtaa

SEQ ID NO: 12922 - DNA, 25 bp, Probe Sequence
acttcacagtgttaatcagaggttt

SEQ ID NO: 12923 - DNA, 25 bp, Probe Sequence
cacttctggatcttaaggcttcata

SEQ ID NO: 12924 - DNA, 25 bp, Probe Sequence
gtttggtagtaacaacacttctgga

SEQ ID NO: 12925 - DNA, 25 bp, Probe Sequence
aggtttggtagtaacaacacttctg

SEQ ID NO: 12926 - DNA, 25 bp, Probe Sequence
aagccaactatctaatcaatgccaa

SEQ ID NO: 12927 - DNA, 25 bp, Probe Sequence
gaagccaactatctaatcaatgcca

SEQ ID NO: 12928 - DNA, 25 bp, Probe Sequence
agaagccaactatctaatcaatgcc

SEQ ID NO: 12929 - DNA, 25 bp, Probe Sequence
tagaagccaactatctaatcaatgc

SEQ ID NO: 12930 - DNA, 25 bp, Probe Sequence
agccaactatctaatcaatgccaaa

SEQ ID NO: 12931 - DNA, 25 bp, Probe Sequence
cgtgtggagaaactaaattagggta

SEQ ID NO: 12932 - DNA, 25 bp, Probe Sequence
aataatttgagagtgtgtggaagtc

SEQ ID NO: 12933 - DNA, 25 bp, Probe Sequence
ataatttgagagtgtgtggaagtcc

SEQ ID NO: 12934 - DNA, 25 bp, Probe Sequence
caataatttgagagtgtgtggaagt

SEQ ID NO: 12935 - DNA, 25 bp, Probe Sequence
tcaaagtacaggatcacagcataaa

SEQ ID NO: 12936 - DNA, 25 bp, Probe Sequence
ttcaaagtacaggatcacagcataa

SEQ ID NO: 12937 - DNA, 25 bp, Probe Sequence
attcaaagtacaggatcacagcata

SEQ ID NO: 12938 - DNA, 25 bp, Probe Sequence
ttaccattcaaagtacaggatcaca

SEQ ID NO: 12939 - DNA, 25 bp, Probe Sequence
taccattcaaagtacaggatcacag

SEQ ID NO: 12940 - DNA, 25 bp, Probe Sequence
tgtggagaaactaaattagggtaac

SEQ ID NO: 12941 - DNA, 25 bp, Probe Sequence
gtgtggagaaactaaattagggtaa

SEQ ID NO: 12942 - DNA, 25 bp, Probe Sequence
agacaataatttgagagtgtgtgga

SEQ ID NO: 12943 - DNA, 25 bp, Probe Sequence
cttaccattcaaagtacaggatcac

SEQ ID NO: 12944 - DNA, 25 bp, Probe Sequence
tcttaccattcaaagtacaggatca

SEQ ID NO: 12945 - DNA, 25 bp, Probe Sequence
acaataatttgagagtgtgtggaag

SEQ ID NO: 12946 - DNA, 25 bp, Probe Sequence
gacaataatttgagagtgtgtggaa

SEQ ID NO: 12947 - DNA, 25 bp, Probe Sequence
aagacaataatttgagagtgtgtgg

SEQ ID NO: 12948 - DNA, 25 bp, Probe Sequence
gtggagaaactaaattagggtaact

SEQ ID NO: 12949 - DNA, 25 bp, Probe Sequence
cattcaaagtacaggatcacagcat

SEQ ID NO: 12950 - DNA, 25 bp, Probe Sequence
ggaccaaatgaacagaaagtctcag

SEQ ID NO: 12951 - DNA, 25 bp, Probe Sequence
gaccaaatgaacagaaagtctcagc

SEQ ID NO: 12952 - DNA, 25 bp, Probe Sequence
agggaccaaatgaacagaaagtctc

SEQ ID NO: 12953 - DNA, 25 bp, Probe Sequence
gggaccaaatgaacagaaagtctca

SEQ ID NO: 12954 - DNA, 25 bp, Probe Sequence
cagggaccaaatgaacagaaagtct

SEQ ID NO: 12955 - DNA, 25 bp, Probe Sequence
caaagatcgaacaggttagacggtc

SEQ ID NO: 12956 - DNA, 25 bp, Probe Sequence
gcagggaccaaatgaacagaaagtc

SEQ ID NO: 12957 - DNA, 25 bp, Probe Sequence
aaagatcgaacaggttagacggtcc

SEQ ID NO: 12958 - DNA, 25 bp, Probe Sequence
atagcctggttaaagttccccagtg

SEQ ID NO: 12959 - DNA, 25 bp, Probe Sequence
catagcctggttaaagttccccagt

SEQ ID NO: 12960 - DNA, 25 bp, Probe Sequence
ccatagcctggttaaagttccccag

SEQ ID NO: 12961 - DNA, 25 bp, Probe Sequence
tgagtatggtgaacttatgtcatct

SEQ ID NO: 12962 - DNA, 25 bp, Probe Sequence
tggtgaacttatgtcatctatgttg

SEQ ID NO: 12963 - DNA, 25 bp, Probe Sequence
ggtgaacttatgtcatctatgttga

SEQ ID NO: 12964 - DNA, 25 bp, Probe Sequence
ttgagtatggtgaacttatgtcatc

SEQ ID NO: 12965 - DNA, 25 bp, Probe Sequence
atggtgaacttatgtcatctatgtt

SEQ ID NO: 12966 - DNA, 25 bp, Probe Sequence
gagtatggtgaacttatgtcatcta

SEQ ID NO: 12967 - DNA, 25 bp, Probe Sequence
tataaagcaccaagcatacatttcc

SEQ ID NO: 12968 - DNA, 25 bp, Probe Sequence
aagcatacatttcctgactggttta

SEQ ID NO: 12969 - DNA, 25 bp, Probe Sequence
gtgaacttatgtcatctatgttgag

SEQ ID NO: 12970 - DNA, 25 bp, Probe Sequence
catacatttcctgactggtttagag

SEQ ID NO: 12971 - DNA, 25 bp, Probe Sequence
gcatacatttcctgactggtttaga

SEQ ID NO: 12972 - DNA, 25 bp, Probe Sequence
agcatacatttcctgactggtttag

SEQ ID NO: 12973 - DNA, 25 bp, Probe Sequence
tgaacttatgtcatctatgttgaga

SEQ ID NO: 12974 - DNA, 25 bp, Probe Sequence
atacatttcctgactggtttagaga

SEQ ID NO: 12975 - DNA, 25 bp, Probe Sequence
ataaagcaccaagcatacatttcct

SEQ ID NO: 12976 - DNA, 25 bp, Probe Sequence
tgactggtttagagaactgatgttt

SEQ ID NO: 12977 - DNA, 25 bp, Probe Sequence
tacatttcctgactggtttagagaa

SEQ ID NO: 12978 - DNA, 25 bp, Probe Sequence
gactggtttagagaactgatgtttc

SEQ ID NO: 12979 - DNA, 25 bp, Probe Sequence
atttcctgactggtttagagaactg

SEQ ID NO: 12980 - DNA, 25 bp, Probe Sequence
catttcctgactggtttagagaact

SEQ ID NO: 12981 - DNA, 25 bp, Probe Sequence
ctgactggtttagagaactgatgtt

SEQ ID NO: 12982 - DNA, 25 bp, Probe Sequence
acatttcctgactggtttagagaac

SEQ ID NO: 12983 - DNA, 25 bp, Probe Sequence
tatggtgaacttatgtcatctatgt

SEQ ID NO: 12984 - DNA, 25 bp, Probe Sequence
actggtttagagaactgatgtttca

SEQ ID NO: 12985 - DNA, 25 bp, Probe Sequence
gcatttcgctacatacttcgttaat

SEQ ID NO: 12986 - DNA, 25 bp, Probe Sequence
atttcgctacatacttcgttaatgc

SEQ ID NO: 12987 - DNA, 25 bp, Probe Sequence
tttcgctacatacttcgttaatgcc

SEQ ID NO: 12988 - DNA, 25 bp, Probe Sequence
ttcgctacatacttcgttaatgccg

SEQ ID NO: 12989 - DNA, 25 bp, Probe Sequence
ctacatacttcgttaatgccgcctg

SEQ ID NO: 12990 - DNA, 25 bp, Probe Sequence
tgcatttcgctacatacttcgttaa

SEQ ID NO: 12991 - DNA, 25 bp, Probe Sequence
catttcgctacatacttcgttaatg

SEQ ID NO: 12992 - DNA, 25 bp, Probe Sequence
taatgacgtatgttcccatagtgac

SEQ ID NO: 12993 - DNA, 25 bp, Probe Sequence
ataatgacgtatgttcccatagtga

SEQ ID NO: 12994 - DNA, 25 bp, Probe Sequence
cataatgacgtatgttcccatagtg

SEQ ID NO: 12995 - DNA, 25 bp, Probe Sequence
gtatgttcccatagtgacgccatag

SEQ ID NO: 12996 - DNA, 25 bp, Probe Sequence
tacatacttcgttaatgccgcctgg

SEQ ID NO: 12997 - DNA, 25 bp, Probe Sequence
tatgttcccatagtgacgccatagg

SEQ ID NO: 12998 - DNA, 25 bp, Probe Sequence
ctagatgcatttcgctacatacttc

SEQ ID NO: 12999 - DNA, 25 bp, Probe Sequence
atgcatttcgctacatacttcgtta

SEQ ID NO: 13000 - DNA, 25 bp, Probe Sequence
tagatgcatttcgctacatacttcg

SEQ ID NO: 13001 - DNA, 25 bp, Probe Sequence
gctagatgcatttcgctacatactt

SEQ ID NO: 13002 - DNA, 25 bp, Probe Sequence
gatgcatttcgctacatacttcgtt

SEQ ID NO: 13003 - DNA, 25 bp, Probe Sequence
ccatagtgacgccatagggactttc

SEQ ID NO: 13004 - DNA, 25 bp, Probe Sequence
aatgacgtatgttcccatagtgacg

SEQ ID NO: 13005 - DNA, 25 bp, Probe Sequence
agatgcatttcgctacatacttcgt

SEQ ID NO: 13006 - DNA, 25 bp, Probe Sequence
catagtgacgccatagggactttcc

SEQ ID NO: 13007 - DNA, 25 bp, Probe Sequence
cgctagatgcatttcgctacatact

SEQ ID NO: 13008 - DNA, 25 bp, Probe Sequence
cgtatgttcccatagtgacgccata

SEQ ID NO: 13009 - DNA, 25 bp, Probe Sequence
taatgatgttgaacttgttgctgag

SEQ ID NO: 13010 - DNA, 25 bp, Probe Sequence
ctaatgatgttgaacttgttgctga

SEQ ID NO: 13011 - DNA, 25 bp, Probe Sequence
tctaatgatgttgaacttgttgctg

SEQ ID NO: 13012 - DNA, 25 bp, Probe Sequence
ctctaatgatgttgaacttgttgct

SEQ ID NO: 13013 - DNA, 25 bp, Probe Sequence
ggctctaatgatgttgaacttgttg

SEQ ID NO: 13014 - DNA, 25 bp, Probe Sequence
gctctaatgatgttgaacttgttgc

SEQ ID NO: 13015 - DNA, 25 bp, Probe Sequence
aatgatgttgaacttgttgctgagg

SEQ ID NO: 13016 - DNA, 25 bp, Probe Sequence
tcacttacactgttcttgtagatgg

SEQ ID NO: 13017 - DNA, 25 bp, Probe Sequence
ggttcacttacactgttcttgtaga

SEQ ID NO: 13018 - DNA, 25 bp, Probe Sequence
aggttcacttacactgttcttgtag

SEQ ID NO: 13019 - DNA, 25 bp, Probe Sequence
caggttcacttacactgttcttgta

SEQ ID NO: 13020 - DNA, 25 bp, Probe Sequence
ttcacttacactgttcttgtagatg

SEQ ID NO: 13021 - DNA, 25 bp, Probe Sequence
gttcacttacactgttcttgtagat

SEQ ID NO: 13022 - DNA, 25 bp, Probe Sequence
gggctctaatgatgttgaacttgtt

SEQ ID NO: 13023 - DNA, 25 bp, Probe Sequence
cttacactgttcttgtagatggctg

SEQ ID NO: 13024 - DNA, 25 bp, Probe Sequence
gtctggctaggagaaactatcaatg

SEQ ID NO: 13025 - DNA, 25 bp, Probe Sequence
ctgttcttgtagatggctgctctaa

SEQ ID NO: 13026 - DNA, 25 bp, Probe Sequence
acttacactgttcttgtagatggct

SEQ ID NO: 13027 - DNA, 25 bp, Probe Sequence
cacttacactgttcttgtagatggc

SEQ ID NO: 13028 - DNA, 25 bp, Probe Sequence
attctacagggctctaatgatgttg

SEQ ID NO: 13029 - DNA, 25 bp, Probe Sequence
cagggctctaatgatgttgaacttg

SEQ ID NO: 13030 - DNA, 25 bp, Probe Sequence
agggctctaatgatgttgaacttgt

SEQ ID NO: 13031 - DNA, 25 bp, Probe Sequence
ctacagggctctaatgatgttgaac

SEQ ID NO: 13032 - DNA, 25 bp, Probe Sequence
tctacagggctctaatgatgttgaa

SEQ ID NO: 13033 - DNA, 25 bp, Probe Sequence
tcagatgctcattacaaatccagat

SEQ ID NO: 13034 - DNA, 25 bp, Probe Sequence
atcagatgctcattacaaatccaga

SEQ ID NO: 13035 - DNA, 25 bp, Probe Sequence
aatcagatgctcattacaaatccag

SEQ ID NO: 13036 - DNA, 25 bp, Probe Sequence
cagatgctcattacaaatccagatg

SEQ ID NO: 13037 - DNA, 25 bp, Probe Sequence
ctcattacaaatccagatgctcatt

SEQ ID NO: 13038 - DNA, 25 bp, Probe Sequence
aaatcagatgctcattacaaatcca

SEQ ID NO: 13039 - DNA, 25 bp, Probe Sequence
tacaaatccagatgctcattacaaa

SEQ ID NO: 13040 - DNA, 25 bp, Probe Sequence
ttacaaatccagatgctcattacaa

SEQ ID NO: 13041 - DNA, 25 bp, Probe Sequence
actttggtcatttctgtatgttcat

SEQ ID NO: 13042 - DNA, 25 bp, Probe Sequence
catgtataggtgtgtatatgtgcat

SEQ ID NO: 13043 - DNA, 25 bp, Probe Sequence
atctccagttgaaacgatatacact

SEQ ID NO: 13044 - DNA, 25 bp, Probe Sequence
attacaaatccagatgctcattaca

SEQ ID NO: 13045 - DNA, 25 bp, Probe Sequence
gctcattacaaatccagatgctcat

SEQ ID NO: 13046 - DNA, 25 bp, Probe Sequence
atgctcattacaaatccagatgctc

SEQ ID NO: 13047 - DNA, 25 bp, Probe Sequence
gatgctcattacaaatccagatgct

SEQ ID NO: 13048 - DNA, 25 bp, Probe Sequence
agatgctcattacaaatccagatgc

SEQ ID NO: 13049 - DNA, 25 bp, Probe Sequence
tctccagttgaaacgatatacacta

SEQ ID NO: 13050 - DNA, 25 bp, Probe Sequence
tacacacttcctatatgtatccaca

SEQ ID NO: 13051 - DNA, 25 bp, Probe Sequence
cattacaaatccagatgctcattac

SEQ ID NO: 13052 - DNA, 25 bp, Probe Sequence
tcattacaaatccagatgctcatta

SEQ ID NO: 13053 - DNA, 25 bp, Probe Sequence
gactttggtcatttctgtatgttca

SEQ ID NO: 13054 - DNA, 25 bp, Probe Sequence
aacccagttcagtttatctccagtt

SEQ ID NO: 13055 - DNA, 25 bp, Probe Sequence
ctccagttgaaacgatatacactat

SEQ ID NO: 13056 - DNA, 25 bp, Probe Sequence
acacacttcctatatgtatccacat

SEQ ID NO: 13057 - DNA, 25 bp, Probe Sequence
cagtacatcaatgggcgtggattat

SEQ ID NO: 13058 - DNA, 25 bp, Probe Sequence
agtacatcaatgggcgtggattatg

SEQ ID NO: 13059 - DNA, 25 bp, Probe Sequence
gtcatcggtattacccatgtgtgat

SEQ ID NO: 13060 - DNA, 25 bp, Probe Sequence
ttgtcatcggtattacccatgtgtg

SEQ ID NO: 13061 - DNA, 25 bp, Probe Sequence
tgtcatcggtattacccatgtgtga

SEQ ID NO: 13062 - DNA, 25 bp, Probe Sequence
gtacatcaatgggcgtggattatgc

SEQ ID NO: 13063 - DNA, 25 bp, Probe Sequence
gaacgatgaatgtcaatgtcagaag

SEQ ID NO: 13064 - DNA, 25 bp, Probe Sequence
gatgaacgatgaatgtcaatgtcag

SEQ ID NO: 13065 - DNA, 25 bp, Probe Sequence
atgaacgatgaatgtcaatgtcaga

SEQ ID NO: 13066 - DNA, 25 bp, Probe Sequence
tgaacgatgaatgtcaatgtcagaa

SEQ ID NO: 13067 - DNA, 25 bp, Probe Sequence
aacgatgaatgtcaatgtcagaagg

SEQ ID NO: 13068 - DNA, 25 bp, Probe Sequence
ctgtggatgaacgatgaatgtcaat

SEQ ID NO: 13069 - DNA, 25 bp, Probe Sequence
ggatgaacgatgaatgtcaatgtca

SEQ ID NO: 13070 - DNA, 25 bp, Probe Sequence
tggatgaacgatgaatgtcaatgtc

SEQ ID NO: 13071 - DNA, 25 bp, Probe Sequence
gtggatgaacgatgaatgtcaatgt

SEQ ID NO: 13072 - DNA, 25 bp, Probe Sequence
tgtggatgaacgatgaatgtcaatg

SEQ ID NO: 13073 - DNA, 25 bp, Probe Sequence
taaatgctgtggatgaacgatgaat

SEQ ID NO: 13074 - DNA, 25 bp, Probe Sequence
ataaatgctgtggatgaacgatgaa

SEQ ID NO: 13075 - DNA, 25 bp, Probe Sequence
gataaatgctgtggatgaacgatga

SEQ ID NO: 13076 - DNA, 25 bp, Probe Sequence
agataaatgctgtggatgaacgatg

SEQ ID NO: 13077 - DNA, 25 bp, Probe Sequence
ttccactggtttctgtctatgtcta

SEQ ID NO: 13078 - DNA, 25 bp, Probe Sequence
tttcacaccttatttcattgactgc

SEQ ID NO: 13079 - DNA, 25 bp, Probe Sequence
ttcacaccttatttcattgactgct

SEQ ID NO: 13080 - DNA, 25 bp, Probe Sequence
aatgctgtggatgaacgatgaatgt

SEQ ID NO: 13081 - DNA, 25 bp, Probe Sequence
attccactggtttctgtctatgtct

SEQ ID NO: 13082 - DNA, 25 bp, Probe Sequence
tccactggtttctgtctatgtctac

SEQ ID NO: 13083 - DNA, 25 bp, Probe Sequence
cattccactggtttctgtctatgtc

SEQ ID NO: 13084 - DNA, 25 bp, Probe Sequence
tcacaccttatttcattgactgctg

SEQ ID NO: 13085 - DNA, 25 bp, Probe Sequence
atgctgtggatgaacgatgaatgtc

SEQ ID NO: 13086 - DNA, 25 bp, Probe Sequence
cacaccttatttcattgactgctgg

SEQ ID NO: 13087 - DNA, 25 bp, Probe Sequence
cattatgcccgtaccatgacttatg

SEQ ID NO: 13088 - DNA, 25 bp, Probe Sequence
tgacttatgggactttcctacttgc

SEQ ID NO: 13089 - DNA, 25 bp, Probe Sequence
catggtggagtatttccgtaaactg

SEQ ID NO: 13090 - DNA, 25 bp, Probe Sequence
tcatggtggagtatttccgtaaact

SEQ ID NO: 13091 - DNA, 25 bp, Probe Sequence
gtcatggtggagtatttccgtaaac

SEQ ID NO: 13092 - DNA, 25 bp, Probe Sequence
gagtatttccgtaaactgcccactt

SEQ ID NO: 13093 - DNA, 25 bp, Probe Sequence
gtcatcgctattaccactggtgatc

SEQ ID NO: 13094 - DNA, 25 bp, Probe Sequence
agtatttccgtaaactgcccacttg

SEQ ID NO: 13095 - DNA, 25 bp, Probe Sequence
atggtggagtatttccgtaaactgc

SEQ ID NO: 13096 - DNA, 25 bp, Probe Sequence
cgtcatggtggagtatttccgtaaa

SEQ ID NO: 13097 - DNA, 25 bp, Probe Sequence
acttatgggactttcctacttgcag

SEQ ID NO: 13098 - DNA, 25 bp, Probe Sequence
gacttatgggactttcctacttgca

SEQ ID NO: 13099 - DNA, 25 bp, Probe Sequence
atcggttttggcagttacatcaatg

SEQ ID NO: 13100 - DNA, 25 bp, Probe Sequence
gatcggttttggcagttacatcaat

SEQ ID NO: 13101 - DNA, 25 bp, Probe Sequence
taccatgacttatgggactttccta

SEQ ID NO: 13102 - DNA, 25 bp, Probe Sequence
gtatttccgtaaactgcccacttgc

SEQ ID NO: 13103 - DNA, 25 bp, Probe Sequence
gatttccaagtctccaaccccattt

SEQ ID NO: 13104 - DNA, 25 bp, Probe Sequence
tcatcgctattaccactggtgatcg

SEQ ID NO: 13105 - DNA, 25 bp, Probe Sequence
agttacatcaatgggcgtgggatac

SEQ ID NO: 13106 - DNA, 25 bp, Probe Sequence
cagttacatcaatgggcgtgggata

SEQ ID NO: 13107 - DNA, 25 bp, Probe Sequence
ccatgacttatgggactttcctact

SEQ ID NO: 13108 - DNA, 25 bp, Probe Sequence
accatgacttatgggactttcctac

SEQ ID NO: 13109 - DNA, 25 bp, Probe Sequence
gtaccatgacttatgggactttcct

SEQ ID NO: 13110 - DNA, 25 bp, Probe Sequence
atttccaagtctccaaccccatttg

SEQ ID NO: 13111 - DNA, 25 bp, Probe Sequence
gccatgttcctgatattagttctga

SEQ ID NO: 13112 - DNA, 25 bp, Probe Sequence
cgccatgttcctgatattagttctg

SEQ ID NO: 13113 - DNA, 25 bp, Probe Sequence
ccatgttcctgatattagttctgat

SEQ ID NO: 13114 - DNA, 25 bp, Probe Sequence
gggttctttagtgttgtttctttca

SEQ ID NO: 13115 - DNA, 25 bp, Probe Sequence
agggttctttagtgttgtttctttc

SEQ ID NO: 13116 - DNA, 25 bp, Probe Sequence
ccgccatgttcctgatattagttct

SEQ ID NO: 13117 - DNA, 25 bp, Probe Sequence
ctgacggtgagaggaaattagaatc

SEQ ID NO: 13118 - DNA, 25 bp, Probe Sequence
cggtgagaggaaattagaatctgtt

SEQ ID NO: 13119 - DNA, 25 bp, Probe Sequence
tgagaggaaattagaatctgtttgc

SEQ ID NO: 13120 - DNA, 25 bp, Probe Sequence
tagggttctttagtgttgtttcttt

SEQ ID NO: 13121 - DNA, 25 bp, Probe Sequence
ttagggttctttagtgttgtttctt

SEQ ID NO: 13122 - DNA, 25 bp, Probe Sequence
tttagggttctttagtgttgtttct

SEQ ID NO: 13123 - DNA, 25 bp, Probe Sequence
gacggtgagaggaaattagaatctg

SEQ ID NO: 13124 - DNA, 25 bp, Probe Sequence
ggtgagaggaaattagaatctgttt

SEQ ID NO: 13125 - DNA, 25 bp, Probe Sequence
tgacggtgagaggaaattagaatct

SEQ ID NO: 13126 - DNA, 25 bp, Probe Sequence
acggtgagaggaaattagaatctgt

SEQ ID NO: 13127 - DNA, 25 bp, Probe Sequence
ttctttagtgttgtttctttcaccc

SEQ ID NO: 13128 - DNA, 25 bp, Probe Sequence
ctttagtgttgtttctttcacccag

SEQ ID NO: 13129 - DNA, 25 bp, Probe Sequence
gccaattaactgagaatgtaagaaa

SEQ ID NO: 13130 - DNA, 25 bp, Probe Sequence
ggccaattaactgagaatgtaagaa

SEQ ID NO: 13131 - DNA, 25 bp, Probe Sequence
tctttagtgttgtttctttcaccca

SEQ ID NO: 13132 - DNA, 25 bp, Probe Sequence
gttctttagtgttgtttctttcacc

SEQ ID NO: 13133 - DNA, 25 bp, Probe Sequence
ggttctttagtgttgtttctttcac

SEQ ID NO: 13134 - DNA, 25 bp, Probe Sequence
gtgagaggaaattagaatctgtttg

SEQ ID NO: 13135 - DNA, 25 bp, Probe Sequence
ctcaagtcctggtataagagtctcc

SEQ ID NO: 13136 - DNA, 25 bp, Probe Sequence
aagccatcactatacctgactcaag

SEQ ID NO: 13137 - DNA, 25 bp, Probe Sequence
caagccatcactatacctgactcaa

SEQ ID NO: 13138 - DNA, 25 bp, Probe Sequence
aataaacacaaggcaaagtctcaaa

SEQ ID NO: 13139 - DNA, 25 bp, Probe Sequence
aaataaacacaaggcaaagtctcaa

SEQ ID NO: 13140 - DNA, 25 bp, Probe Sequence
caaataaacacaaggcaaagtctca

SEQ ID NO: 13141 - DNA, 25 bp, Probe Sequence
tggaagaatggcaaataaacacaag

SEQ ID NO: 13142 - DNA, 25 bp, Probe Sequence
atcactatacctgactcaagtcctg

SEQ ID NO: 13143 - DNA, 25 bp, Probe Sequence
catcactatacctgactcaagtcct

SEQ ID NO: 13144 - DNA, 25 bp, Probe Sequence
ggaagaatggcaaataaacacaagg

SEQ ID NO: 13145 - DNA, 25 bp, Probe Sequence
agccatcactatacctgactcaagt

SEQ ID NO: 13146 - DNA, 25 bp, Probe Sequence
cctgactcaagtcctggtataagag

SEQ ID NO: 13147 - DNA, 25 bp, Probe Sequence
aatggcaaataaacacaaggcaaag

SEQ ID NO: 13148 - DNA, 25 bp, Probe Sequence
gaatggcaaataaacacaaggcaaa

SEQ ID NO: 13149 - DNA, 25 bp, Probe Sequence
gcaaataaacacaaggcaaagtctc

SEQ ID NO: 13150 - DNA, 25 bp, Probe Sequence
gaagaatggcaaataaacacaaggc

SEQ ID NO: 13151 - DNA, 25 bp, Probe Sequence
ccatcactatacctgactcaagtcc

SEQ ID NO: 13152 - DNA, 25 bp, Probe Sequence
agaatggcaaataaacacaaggcaa

SEQ ID NO: 13153 - DNA, 25 bp, Probe Sequence
aagaatggcaaataaacacaaggca

SEQ ID NO: 13154 - DNA, 25 bp, Probe Sequence
gccatcactatacctgactcaagtc

SEQ ID NO: 13155 - DNA, 25 bp, Probe Sequence
accctgagcctctttatttggattt

SEQ ID NO: 13156 - DNA, 25 bp, Probe Sequence
atggcaaataaacacaaggcaaagt

SEQ ID NO: 13157 - DNA, 25 bp, Probe Sequence
tccaagccatcactatacctgactc

SEQ ID NO: 13158 - DNA, 25 bp, Probe Sequence
gtggaagaatggcaaataaacacaa

SEQ ID NO: 13159 - DNA, 25 bp, Probe Sequence
tatatctgtggaaggcatttggtag

SEQ ID NO: 13160 - DNA, 25 bp, Probe Sequence
gtatatctgtggaaggcatttggta

SEQ ID NO: 13161 - DNA, 25 bp, Probe Sequence
aaagtatatctgtggaaggcatttg

SEQ ID NO: 13162 - DNA, 25 bp, Probe Sequence
caaagtatatctgtggaaggcattt

SEQ ID NO: 13163 - DNA, 25 bp, Probe Sequence
aagtatatctgtggaaggcatttgg

SEQ ID NO: 13164 - DNA, 25 bp, Probe Sequence
cgtatgttagtctcttaatttcccg

SEQ ID NO: 13165 - DNA, 25 bp, Probe Sequence
ggacttcattctgacgtatgttagt

SEQ ID NO: 13166 - DNA, 25 bp, Probe Sequence
tggacttcattctgacgtatgttag

SEQ ID NO: 13167 - DNA, 25 bp, Probe Sequence
ctggacttcattctgacgtatgtta

SEQ ID NO: 13168 - DNA, 25 bp, Probe Sequence
gcaaagtatatctgtggaaggcatt

SEQ ID NO: 13169 - DNA, 25 bp, Probe Sequence
accctttgtctagtgatcttgtaaa

SEQ ID NO: 13170 - DNA, 25 bp, Probe Sequence
ccctttgtctagtgatcttgtaaac

SEQ ID NO: 13171 - DNA, 25 bp, Probe Sequence
agtatatctgtggaaggcatttggt

SEQ ID NO: 13172 - DNA, 25 bp, Probe Sequence
acttcattctgacgtatgttagtct

SEQ ID NO: 13173 - DNA, 25 bp, Probe Sequence
tctgtggaaggcatttggtagatat

SEQ ID NO: 13174 - DNA, 25 bp, Probe Sequence
atatctgtggaaggcatttggtaga

SEQ ID NO: 13175 - DNA, 25 bp, Probe Sequence
tcattctgacgtatgttagtctctt

SEQ ID NO: 13176 - DNA, 25 bp, Probe Sequence
ttcattctgacgtatgttagtctct

SEQ ID NO: 13177 - DNA, 25 bp, Probe Sequence
cttcattctgacgtatgttagtctc

SEQ ID NO: 13178 - DNA, 25 bp, Probe Sequence
agcaaagtatatctgtggaaggcat

SEQ ID NO: 13179 - DNA, 25 bp, Probe Sequence
aactcagcaaagtatatctgtggaa

SEQ ID NO: 13180 - DNA, 25 bp, Probe Sequence
aaactcagcaaagtatatctgtgga

SEQ ID NO: 13181 - DNA, 25 bp, Probe Sequence
actcagcaaagtatatctgtggaag

SEQ ID NO: 13182 - DNA, 25 bp, Probe Sequence
tctagtgatcttgtaaactcagcaa

SEQ ID NO: 13183 - DNA, 25 bp, Probe Sequence
gttgtcagttatctcatattggtgg

SEQ ID NO: 13184 - DNA, 25 bp, Probe Sequence
ggttgtcagttatctcatattggtg

SEQ ID NO: 13185 - DNA, 25 bp, Probe Sequence
tgtcagttatctcatattggtggaa

SEQ ID NO: 13186 - DNA, 25 bp, Probe Sequence
ttgtcagttatctcatattggtgga

SEQ ID NO: 13187 - DNA, 25 bp, Probe Sequence
attacacgctggttctcctcttata

SEQ ID NO: 13188 - DNA, 25 bp, Probe Sequence
ttacacgctggttctcctcttatat

SEQ ID NO: 13189 - DNA, 25 bp, Probe Sequence
ttattactccagtgcttcatagtcc

SEQ ID NO: 13190 - DNA, 25 bp, Probe Sequence
tacacgctggttctcctcttatata

SEQ ID NO: 13191 - DNA, 25 bp, Probe Sequence
tattactccagtgcttcatagtcct

SEQ ID NO: 13192 - DNA, 25 bp, Probe Sequence
aattacacgctggttctcctcttat

SEQ ID NO: 13193 - DNA, 25 bp, Probe Sequence
attactccagtgcttcatagtcctc

SEQ ID NO: 13194 - DNA, 25 bp, Probe Sequence
ttcttcattctcctgtctgtatagg

SEQ ID NO: 13195 - DNA, 25 bp, Probe Sequence
attattactccagtgcttcatagtc

SEQ ID NO: 13196 - DNA, 25 bp, Probe Sequence
gaattacacgctggttctcctctta

SEQ ID NO: 13197 - DNA, 25 bp, Probe Sequence
cctgattattattactccagtgctt

SEQ ID NO: 13198 - DNA, 25 bp, Probe Sequence
tgattattattactccagtgcttca

SEQ ID NO: 13199 - DNA, 25 bp, Probe Sequence
gggttgtcagttatctcatattggt

SEQ ID NO: 13200 - DNA, 25 bp, Probe Sequence
aaggataggagagtgaattacacgc

SEQ ID NO: 13201 - DNA, 25 bp, Probe Sequence
gtcagttatctcatattggtggaaa

SEQ ID NO: 13202 - DNA, 25 bp, Probe Sequence
ctgattattattactccagtgcttc

SEQ ID NO: 13203 - DNA, 25 bp, Probe Sequence
tattattactccagtgcttcatagt

SEQ ID NO: 13204 - DNA, 25 bp, Probe Sequence
gattattattactccagtgcttcat

SEQ ID NO: 13205 - DNA, 25 bp, Probe Sequence
gataggagagtgaattacacgctgg

SEQ ID NO: 13206 - DNA, 25 bp, Probe Sequence
ggataggagagtgaattacacgctg

SEQ ID NO: 13207 - DNA, 25 bp, Probe Sequence
gttgctaatgtgaataatgctgcta

SEQ ID NO: 13208 - DNA, 25 bp, Probe Sequence
tgagttgctaatgtgaataatgctg

SEQ ID NO: 13209 - DNA, 25 bp, Probe Sequence
ttgagttgctaatgtgaataatgct

SEQ ID NO: 13210 - DNA, 25 bp, Probe Sequence
ttgctaatgtgaataatgctgctat

SEQ ID NO: 13211 - DNA, 25 bp, Probe Sequence
gagttgctaatgtgaataatgctgc

SEQ ID NO: 13212 - DNA, 25 bp, Probe Sequence
agttgctaatgtgaataatgctgct

SEQ ID NO: 13213 - DNA, 25 bp, Probe Sequence
tgctaatgtgaataatgctgctata

SEQ ID NO: 13214 - DNA, 25 bp, Probe Sequence
tactggatcatgtggcaattctatt

SEQ ID NO: 13215 - DNA, 25 bp, Probe Sequence
ttactggatcatgtggcaattctat

SEQ ID NO: 13216 - DNA, 25 bp, Probe Sequence
attactggatcatgtggcaattcta

SEQ ID NO: 13217 - DNA, 25 bp, Probe Sequence
gctaatgtgaataatgctgctataa

SEQ ID NO: 13218 - DNA, 25 bp, Probe Sequence
ttcatcctagccagcacttgttatt

SEQ ID NO: 13219 - DNA, 25 bp, Probe Sequence
aattactggatcatgtggcaattct

SEQ ID NO: 13220 - DNA, 25 bp, Probe Sequence
agcacttgttatttcctgtttcttg

SEQ ID NO: 13221 - DNA, 25 bp, Probe Sequence
gcacttgttatttcctgtttcttgt

SEQ ID NO: 13222 - DNA, 25 bp, Probe Sequence
ctaatatgtgtgggatggaatctca

SEQ ID NO: 13223 - DNA, 25 bp, Probe Sequence
tcttgttggtatatatccagcagtg

SEQ ID NO: 13224 - DNA, 25 bp, Probe Sequence
cctaatatgtgtgggatggaatctc

SEQ ID NO: 13225 - DNA, 25 bp, Probe Sequence
ttcttgttggtatatatccagcagt

SEQ ID NO: 13226 - DNA, 25 bp, Probe Sequence
aatatgtgtgggatggaatctcatt

SEQ ID NO: 13227 - DNA, 25 bp, Probe Sequence
atagtagtcatcctaatatgtgtgg

SEQ ID NO: 13228 - DNA, 25 bp, Probe Sequence
ggaattactggatcatgtggcaatt

SEQ ID NO: 13229 - DNA, 25 bp, Probe Sequence
atatgtgtgggatggaatctcattg

SEQ ID NO: 13230 - DNA, 25 bp, Probe Sequence
tttatttcaagaccctgctttcaat

SEQ ID NO: 13231 - DNA, 25 bp, Probe Sequence
taacacaggaacagaaagccaaata

SEQ ID NO: 13232 - DNA, 25 bp, Probe Sequence
tagcaaactaacacaggaacagaaa

SEQ ID NO: 13233 - DNA, 25 bp, Probe Sequence
gtgacacaagtttacctagaccaaa

SEQ ID NO: 13234 - DNA, 25 bp, Probe Sequence
agcaaactaacacaggaacagaaag

SEQ ID NO: 13235 - DNA, 25 bp, Probe Sequence
ctaacacaggaacagaaagccaaat

SEQ ID NO: 13236 - DNA, 25 bp, Probe Sequence
aacacaggaacagaaagccaaatac

SEQ ID NO: 13237 - DNA, 25 bp, Probe Sequence
catttgtacctcccaacctaaagta

SEQ ID NO: 13238 - DNA, 25 bp, Probe Sequence
tttgtacctcccaacctaaagtaaa

SEQ ID NO: 13239 - DNA, 25 bp, Probe Sequence
atttgtacctcccaacctaaagtaa

SEQ ID NO: 13240 - DNA, 25 bp, Probe Sequence
cgtaaatgcccatcaatgacagatt

SEQ ID NO: 13241 - DNA, 25 bp, Probe Sequence
ttagcaaactaacacaggaacagaa

SEQ ID NO: 13242 - DNA, 25 bp, Probe Sequence
cttagcaaactaacacaggaacaga

SEQ ID NO: 13243 - DNA, 25 bp, Probe Sequence
agatgctggtgaggtttgtaagaaa

SEQ ID NO: 13244 - DNA, 25 bp, Probe Sequence
acacttatacactgttaatgggaag

SEQ ID NO: 13245 - DNA, 25 bp, Probe Sequence
caaactaacacaggaacagaaagcc

SEQ ID NO: 13246 - DNA, 25 bp, Probe Sequence
catatacacccttggaatactatgc

SEQ ID NO: 13247 - DNA, 25 bp, Probe Sequence
gggaagtataaattagttcaaccac

SEQ ID NO: 13248 - DNA, 25 bp, Probe Sequence
aggaacagaaagccaaataccacat

SEQ ID NO: 13249 - DNA, 25 bp, Probe Sequence
actaacacaggaacagaaagccaaa

SEQ ID NO: 13250 - DNA, 25 bp, Probe Sequence
aactaacacaggaacagaaagccaa

SEQ ID NO: 13251 - DNA, 25 bp, Probe Sequence
aaactaacacaggaacagaaagcca

SEQ ID NO: 13252 - DNA, 25 bp, Probe Sequence
tatacacccttggaatactatgcag

SEQ ID NO: 13253 - DNA, 25 bp, Probe Sequence
aattcctgtgacacaagtttaccta

SEQ ID NO: 13254 - DNA, 25 bp, Probe Sequence
acaaattcctgtgacacaagtttac

SEQ ID NO: 13255 - DNA, 25 bp, Probe Sequence
gataacatgctgacataggcttaac

SEQ ID NO: 13256 - DNA, 25 bp, Probe Sequence
ataacatgctgacataggcttaaca

SEQ ID NO: 13257 - DNA, 25 bp, Probe Sequence
ggataacatgctgacataggcttaa

SEQ ID NO: 13258 - DNA, 25 bp, Probe Sequence
tggataacatgctgacataggctta

SEQ ID NO: 13259 - DNA, 25 bp, Probe Sequence
taacatgctgacataggcttaacag

SEQ ID NO: 13260 - DNA, 25 bp, Probe Sequence
atggataacatgctgacataggctt

SEQ ID NO: 13261 - DNA, 25 bp, Probe Sequence
acatgctgacataggcttaacagaa

SEQ ID NO: 13262 - DNA, 25 bp, Probe Sequence
aacatgctgacataggcttaacaga

SEQ ID NO: 13263 - DNA, 25 bp, Probe Sequence
gctgacataggcttaacagaaatac

SEQ ID NO: 13264 - DNA, 25 bp, Probe Sequence
tgctgacataggcttaacagaaata

SEQ ID NO: 13265 - DNA, 25 bp, Probe Sequence
actttcccaaatgttgtaaccactc

SEQ ID NO: 13266 - DNA, 25 bp, Probe Sequence
gactttcccaaatgttgtaaccact

SEQ ID NO: 13267 - DNA, 25 bp, Probe Sequence
tgacataggcttaacagaaatactt

SEQ ID NO: 13268 - DNA, 25 bp, Probe Sequence
atgctgacataggcttaacagaaat

SEQ ID NO: 13269 - DNA, 25 bp, Probe Sequence
ctttcccaaatgttgtaaccactcc

SEQ ID NO: 13270 - DNA, 25 bp, Probe Sequence
ctgacataggcttaacagaaatact

SEQ ID NO: 13271 - DNA, 25 bp, Probe Sequence
ttgccagtacatctacgtattagtc

SEQ ID NO: 13272 - DNA, 25 bp, Probe Sequence
cttgccagtacatctacgtattagt

SEQ ID NO: 13273 - DNA, 25 bp, Probe Sequence
ggttcctaataattaaagcagaagc

SEQ ID NO: 13274 - DNA, 25 bp, Probe Sequence
tgccagtacatctacgtattagtca

SEQ ID NO: 13275 - DNA, 25 bp, Probe Sequence
catgctgacataggcttaacagaaa

SEQ ID NO: 13276 - DNA, 25 bp, Probe Sequence
acttgccagtacatctacgtattag

SEQ ID NO: 13277 - DNA, 25 bp, Probe Sequence
gacataggcttaacagaaatacttt

SEQ ID NO: 13278 - DNA, 25 bp, Probe Sequence
actttcctacttgccagtacatcta

SEQ ID NO: 13279 - DNA, 25 bp, Probe Sequence
aatcacacttagaactggttagagg

SEQ ID NO: 13280 - DNA, 25 bp, Probe Sequence
atcacacttagaactggttagagga

SEQ ID NO: 13281 - DNA, 25 bp, Probe Sequence
agaatcacacttagaactggttaga

SEQ ID NO: 13282 - DNA, 25 bp, Probe Sequence
gaatcacacttagaactggttagag

SEQ ID NO: 13283 - DNA, 25 bp, Probe Sequence
caatagaatcacacttagaactggt

SEQ ID NO: 13284 - DNA, 25 bp, Probe Sequence
acaatagaatcacacttagaactgg

SEQ ID NO: 13285 - DNA, 25 bp, Probe Sequence
acacttagaactggttagaggactc

SEQ ID NO: 13286 - DNA, 25 bp, Probe Sequence
cacacttagaactggttagaggact

SEQ ID NO: 13287 - DNA, 25 bp, Probe Sequence
tcacacttagaactggttagaggac

SEQ ID NO: 13288 - DNA, 25 bp, Probe Sequence
gctggaagattatgactagatatgg

SEQ ID NO: 13289 - DNA, 25 bp, Probe Sequence
cacttagaactggttagaggactcc

SEQ ID NO: 13290 - DNA, 25 bp, Probe Sequence
aatagaatcacacttagaactggtt

SEQ ID NO: 13291 - DNA, 25 bp, Probe Sequence
tagaatcacacttagaactggttag

SEQ ID NO: 13292 - DNA, 25 bp, Probe Sequence
tggcatctacaatagaatcacactt

SEQ ID NO: 13293 - DNA, 25 bp, Probe Sequence
aactggcatctacaatagaatcaca

SEQ ID NO: 13294 - DNA, 25 bp, Probe Sequence
caactggcatctacaatagaatcac

SEQ ID NO: 13295 - DNA, 25 bp, Probe Sequence
ctggcatctacaatagaatcacact

SEQ ID NO: 13296 - DNA, 25 bp, Probe Sequence
aagcaactggcatctacaatagaat

SEQ ID NO: 13297 - DNA, 25 bp, Probe Sequence
actggcatctacaatagaatcacac

SEQ ID NO: 13298 - DNA, 25 bp, Probe Sequence
agcaactggcatctacaatagaatc

SEQ ID NO: 13299 - DNA, 25 bp, Probe Sequence
gcaactggcatctacaatagaatca

SEQ ID NO: 13300 - DNA, 25 bp, Probe Sequence
tatagatgaagttagaccattagcc

SEQ ID NO: 13301 - DNA, 25 bp, Probe Sequence
tatttcggaggtcttctaatgtctg

SEQ ID NO: 13302 - DNA, 25 bp, Probe Sequence
cgtaataaagagccaaggtagtgat

SEQ ID NO: 13303 - DNA, 25 bp, Probe Sequence
gtcacaacttcctaactcatctctc

SEQ ID NO: 13304 - DNA, 25 bp, Probe Sequence
cacaacttcctaactcatctctcac

SEQ ID NO: 13305 - DNA, 25 bp, Probe Sequence
tcacaacttcctaactcatctctca

SEQ ID NO: 13306 - DNA, 25 bp, Probe Sequence
tacattagcggtaggtatagagagc

SEQ ID NO: 13307 - DNA, 25 bp, Probe Sequence
ctgtcacaacttcctaactcatctc

SEQ ID NO: 13308 - DNA, 25 bp, Probe Sequence
tgtcacaacttcctaactcatctct

SEQ ID NO: 13309 - DNA, 25 bp, Probe Sequence
acaacttcctaactcatctctcacc

SEQ ID NO: 13310 - DNA, 25 bp, Probe Sequence
agatacataagtcaactcttctcct

SEQ ID NO: 13311 - DNA, 25 bp, Probe Sequence
atacataagtcaactcttctccttg

SEQ ID NO: 13312 - DNA, 25 bp, Probe Sequence
tatagagagctgtcacaacttccta

SEQ ID NO: 13313 - DNA, 25 bp, Probe Sequence
gatacataagtcaactcttctcctt

SEQ ID NO: 13314 - DNA, 25 bp, Probe Sequence
taggtatagagagctgtcacaactt

SEQ ID NO: 13315 - DNA, 25 bp, Probe Sequence
atagagagctgtcacaacttcctaa

SEQ ID NO: 13316 - DNA, 25 bp, Probe Sequence
gctgtcacaacttcctaactcatct

SEQ ID NO: 13317 - DNA, 25 bp, Probe Sequence
gtaggtatagagagctgtcacaact

SEQ ID NO: 13318 - DNA, 25 bp, Probe Sequence
gcattagaggaatcaaacataccag

SEQ ID NO: 13319 - DNA, 25 bp, Probe Sequence
gtatagagagctgtcacaacttcct

SEQ ID NO: 13320 - DNA, 25 bp, Probe Sequence
aggtatagagagctgtcacaacttc

SEQ ID NO: 13321 - DNA, 25 bp, Probe Sequence
attagaggaatcaaacataccagga

SEQ ID NO: 13322 - DNA, 25 bp, Probe Sequence
cattagaggaatcaaacataccagg

SEQ ID NO: 13323 - DNA, 25 bp, Probe Sequence
ggcattagaggaatcaaacatacca

SEQ ID NO: 13324 - DNA, 25 bp, Probe Sequence
tggcattagaggaatcaaacatacc

SEQ ID NO: 13325 - DNA, 25 bp, Probe Sequence
cacaccttacacgaatggtaatgaa

SEQ ID NO: 13326 - DNA, 25 bp, Probe Sequence
tagagagctgtcacaacttcctaac

SEQ ID NO: 13327 - DNA, 25 bp, Probe Sequence
atgttaagcaactcatcctgtaagt

SEQ ID NO: 13328 - DNA, 25 bp, Probe Sequence
tgttaagcaactcatcctgtaagta

SEQ ID NO: 13329 - DNA, 25 bp, Probe Sequence
gttaagcaactcatcctgtaagtaa

SEQ ID NO: 13330 - DNA, 25 bp, Probe Sequence
atacagcctaatgacaaagatggat

SEQ ID NO: 13331 - DNA, 25 bp, Probe Sequence
tacagcctaatgacaaagatggatg

SEQ ID NO: 13332 - DNA, 25 bp, Probe Sequence
gaggaagtgacaagtgagcagaatt

SEQ ID NO: 13333 - DNA, 25 bp, Probe Sequence
catacagcctaatgacaaagatgga

SEQ ID NO: 13334 - DNA, 25 bp, Probe Sequence
caaagatggatgttaagcaactcat

SEQ ID NO: 13335 - DNA, 25 bp, Probe Sequence
ggagaggaagagttgtttagtcaaa

SEQ ID NO: 13336 - DNA, 25 bp, Probe Sequence
gagaggaagagttgtttagtcaaag

SEQ ID NO: 13337 - DNA, 25 bp, Probe Sequence
agaggaagagttgtttagtcaaagc

SEQ ID NO: 13338 - DNA, 25 bp, Probe Sequence
tggagaggaagagttgtttagtcaa

SEQ ID NO: 13339 - DNA, 25 bp, Probe Sequence
atgacaaagatggatgttaagcaac

SEQ ID NO: 13340 - DNA, 25 bp, Probe Sequence
agcctaatgacaaagatggatgtta

SEQ ID NO: 13341 - DNA, 25 bp, Probe Sequence
gacaaagatggatgttaagcaactc

SEQ ID NO: 13342 - DNA, 25 bp, Probe Sequence
gtggagaggaagagttgtttagtca

SEQ ID NO: 13343 - DNA, 25 bp, Probe Sequence
taagcaactcatcctgtaagtaaac

SEQ ID NO: 13344 - DNA, 25 bp, Probe Sequence
aatgacaaagatggatgttaagcaa

SEQ ID NO: 13345 - DNA, 25 bp, Probe Sequence
gcctaatgacaaagatggatgttaa

SEQ ID NO: 13346 - DNA, 25 bp, Probe Sequence
aagcaactcatcctgtaagtaaacg

SEQ ID NO: 13347 - DNA, 25 bp, Probe Sequence
acaaagatggatgttaagcaactca

SEQ ID NO: 13348 - DNA, 25 bp, Probe Sequence
tgacaaagatggatgttaagcaact

SEQ ID NO: 13349 - DNA, 25 bp, Probe Sequence
gcatacagcctaatgacaaagatgg

SEQ ID NO: 13350 - DNA, 25 bp, Probe Sequence
taatgacaaagatggatgttaagca

SEQ ID NO: 13351 - DNA, 25 bp, Probe Sequence
gagtggctgactgtacttactgaag

SEQ ID NO: 13352 - DNA, 25 bp, Probe Sequence
gttggataggaacagagcaagtcac

SEQ ID NO: 13353 - DNA, 25 bp, Probe Sequence
ttggataggaacagagcaagtcact

SEQ ID NO: 13354 - DNA, 25 bp, Probe Sequence
tggctgactgtacttactgaaggag

SEQ ID NO: 13355 - DNA, 25 bp, Probe Sequence
tggataggaacagagcaagtcactc

SEQ ID NO: 13356 - DNA, 25 bp, Probe Sequence
gtggctgactgtacttactgaagga

SEQ ID NO: 13357 - DNA, 25 bp, Probe Sequence
agtggctgactgtacttactgaagg

SEQ ID NO: 13358 - DNA, 25 bp, Probe Sequence
ggttggataggaacagagcaagtca

SEQ ID NO: 13359 - DNA, 25 bp, Probe Sequence
cgagtggctgactgtacttactgaa

SEQ ID NO: 13360 - DNA, 25 bp, Probe Sequence
gataggaacagagcaagtcactctc

SEQ ID NO: 13361 - DNA, 25 bp, Probe Sequence
ctcagagaggacaaaataagtgtgt

SEQ ID NO: 13362 - DNA, 25 bp, Probe Sequence
tcagagaggacaaaataagtgtgtg

SEQ ID NO: 13363 - DNA, 25 bp, Probe Sequence
agagaggacaaaataagtgtgtgtg

SEQ ID NO: 13364 - DNA, 25 bp, Probe Sequence
cagagaggacaaaataagtgtgtgt

SEQ ID NO: 13365 - DNA, 25 bp, Probe Sequence
gctcagagaggacaaaataagtgtg

SEQ ID NO: 13366 - DNA, 25 bp, Probe Sequence
aagggctcagagaggacaaaataag

SEQ ID NO: 13367 - DNA, 25 bp, Probe Sequence
ctgactgtacttactgaaggagccc

SEQ ID NO: 13368 - DNA, 25 bp, Probe Sequence
gagaggacaaaataagtgtgtgtgc

SEQ ID NO: 13369 - DNA, 25 bp, Probe Sequence
ggataggaacagagcaagtcactct

SEQ ID NO: 13370 - DNA, 25 bp, Probe Sequence
ggctcagagaggacaaaataagtgt

SEQ ID NO: 13371 - DNA, 25 bp, Probe Sequence
aaaataagtgtgtgtgcagggaaaa

SEQ ID NO: 13372 - DNA, 25 bp, Probe Sequence
ataggaacagagcaagtcactctcg

SEQ ID NO: 13373 - DNA, 25 bp, Probe Sequence
caagtcactctcgattggttcctcc

SEQ ID NO: 13374 - DNA, 25 bp, Probe Sequence
gctgactgtacttactgaaggagcc

SEQ ID NO: 13375 - DNA, 25 bp, Probe Sequence
tctccttacttgaactcacttgaat

SEQ ID NO: 13376 - DNA, 25 bp, Probe Sequence
ttcaagactacagaacataggcttc

SEQ ID NO: 13377 - DNA, 25 bp, Probe Sequence
ttctccttacttgaactcacttgaa

SEQ ID NO: 13378 - DNA, 25 bp, Probe Sequence
attctccttacttgaactcacttga

SEQ ID NO: 13379 - DNA, 25 bp, Probe Sequence
ctacagaacataggcttcactcatc

SEQ ID NO: 13380 - DNA, 25 bp, Probe Sequence
actacagaacataggcttcactcat

SEQ ID NO: 13381 - DNA, 25 bp, Probe Sequence
aagactacagaacataggcttcact

SEQ ID NO: 13382 - DNA, 25 bp, Probe Sequence
caagactacagaacataggcttcac

SEQ ID NO: 13383 - DNA, 25 bp, Probe Sequence
tcaagactacagaacataggcttca

SEQ ID NO: 13384 - DNA, 25 bp, Probe Sequence
aatgatggagcaaggattcttaatt

SEQ ID NO: 13385 - DNA, 25 bp, Probe Sequence
agactacagaacataggcttcactc

SEQ ID NO: 13386 - DNA, 25 bp, Probe Sequence
ctccttacttgaactcacttgaata

SEQ ID NO: 13387 - DNA, 25 bp, Probe Sequence
tattctccttacttgaactcacttg

SEQ ID NO: 13388 - DNA, 25 bp, Probe Sequence
tacagaacataggcttcactcatcc

SEQ ID NO: 13389 - DNA, 25 bp, Probe Sequence
gactacagaacataggcttcactca

SEQ ID NO: 13390 - DNA, 25 bp, Probe Sequence
tggagcaaggattcttaattaggaa

SEQ ID NO: 13391 - DNA, 25 bp, Probe Sequence
atggagcaaggattcttaattagga

SEQ ID NO: 13392 - DNA, 25 bp, Probe Sequence
gatggagcaaggattcttaattagg

SEQ ID NO: 13393 - DNA, 25 bp, Probe Sequence
ggagcaaggattcttaattaggaag

SEQ ID NO: 13394 - DNA, 25 bp, Probe Sequence
tccttacttgaactcacttgaatat

SEQ ID NO: 13395 - DNA, 25 bp, Probe Sequence
tgatggagcaaggattcttaattag

SEQ ID NO: 13396 - DNA, 25 bp, Probe Sequence
ttattctccttacttgaactcactt

SEQ ID NO: 13397 - DNA, 25 bp, Probe Sequence
tttcaagactacagaacataggctt

SEQ ID NO: 13398 - DNA, 25 bp, Probe Sequence
atgatggagcaaggattcttaatta

SEQ ID NO: 13399 - DNA, 25 bp, Probe Sequence
ctggaatgttcatctaggttctcat

SEQ ID NO: 13400 - DNA, 25 bp, Probe Sequence
aactggaatgttcatctaggttctc

SEQ ID NO: 13401 - DNA, 25 bp, Probe Sequence
actggaatgttcatctaggttctca

SEQ ID NO: 13402 - DNA, 25 bp, Probe Sequence
tctgatatgagaatgaaggtgatcc

SEQ ID NO: 13403 - DNA, 25 bp, Probe Sequence
tcatctaggttctcatgccatattc

SEQ ID NO: 13404 - DNA, 25 bp, Probe Sequence
gttcatctaggttctcatgccatat

SEQ ID NO: 13405 - DNA, 25 bp, Probe Sequence
tggaatgttcatctaggttctcatg

SEQ ID NO: 13406 - DNA, 25 bp, Probe Sequence
ttcatctaggttctcatgccatatt

SEQ ID NO: 13407 - DNA, 25 bp, Probe Sequence
atctaggttctcatgccatattcca

SEQ ID NO: 13408 - DNA, 25 bp, Probe Sequence
catctaggttctcatgccatattcc

SEQ ID NO: 13409 - DNA, 25 bp, Probe Sequence
taggttctcatgccatattccagat

SEQ ID NO: 13410 - DNA, 25 bp, Probe Sequence
ttatctagttgaggctcacaagttg

SEQ ID NO: 13411 - DNA, 25 bp, Probe Sequence
tgttcatctaggttctcatgccata

SEQ ID NO: 13412 - DNA, 25 bp, Probe Sequence
tctaggttctcatgccatattccag

SEQ ID NO: 13413 - DNA, 25 bp, Probe Sequence
gaatgttcatctaggttctcatgcc

SEQ ID NO: 13414 - DNA, 25 bp, Probe Sequence
ggaatgttcatctaggttctcatgc

SEQ ID NO: 13415 - DNA, 25 bp, Probe Sequence
gatatgagaatgaaggtgatcctgt

SEQ ID NO: 13416 - DNA, 25 bp, Probe Sequence
tgatatgagaatgaaggtgatcctg

SEQ ID NO: 13417 - DNA, 25 bp, Probe Sequence
atgagaatgaaggtgatcctgtaac

SEQ ID NO: 13418 - DNA, 25 bp, Probe Sequence
ctgatatgagaatgaaggtgatcct

SEQ ID NO: 13419 - DNA, 25 bp, Probe Sequence
ctctgatatgagaatgaaggtgatc

SEQ ID NO: 13420 - DNA, 25 bp, Probe Sequence
ctaggttctcatgccatattccaga

SEQ ID NO: 13421 - DNA, 25 bp, Probe Sequence
atgttcatctaggttctcatgccat

SEQ ID NO: 13422 - DNA, 25 bp, Probe Sequence
tatgagaatgaaggtgatcctgtaa

SEQ ID NO: 13423 - DNA, 25 bp, Probe Sequence
gatgctgaggtgaaagatgattatg

SEQ ID NO: 13424 - DNA, 25 bp, Probe Sequence
agatgctgaggtgaaagatgattat

SEQ ID NO: 13425 - DNA, 25 bp, Probe Sequence
taatagtcatgcttcatctctaacc

SEQ ID NO: 13426 - DNA, 25 bp, Probe Sequence
ttcatctctaaccctaagaccattc

SEQ ID NO: 13427 - DNA, 25 bp, Probe Sequence
cttcatctctaaccctaagaccatt

SEQ ID NO: 13428 - DNA, 25 bp, Probe Sequence
atgctgaggtgaaagatgattatgc

SEQ ID NO: 13429 - DNA, 25 bp, Probe Sequence
aagatgattatgcagatgacactga

SEQ ID NO: 13430 - DNA, 25 bp, Probe Sequence
tcatctctaaccctaagaccattcg

SEQ ID NO: 13431 - DNA, 25 bp, Probe Sequence
atgattatgcagatgacactgactc

SEQ ID NO: 13432 - DNA, 25 bp, Probe Sequence
gatgattatgcagatgacactgact

SEQ ID NO: 13433 - DNA, 25 bp, Probe Sequence
agatgattatgcagatgacactgac

SEQ ID NO: 13434 - DNA, 25 bp, Probe Sequence
gcttcatctctaaccctaagaccat

SEQ ID NO: 13435 - DNA, 25 bp, Probe Sequence
atgcttcatctctaaccctaagacc

SEQ ID NO: 13436 - DNA, 25 bp, Probe Sequence
aatagtcatgcttcatctctaaccc

SEQ ID NO: 13437 - DNA, 25 bp, Probe Sequence
tagtcatgcttcatctctaacccta

SEQ ID NO: 13438 - DNA, 25 bp, Probe Sequence
gtcatgcttcatctctaaccctaag

SEQ ID NO: 13439 - DNA, 25 bp, Probe Sequence
cagatgctgaggtgaaagatgatta

SEQ ID NO: 13440 - DNA, 25 bp, Probe Sequence
atagtcatgcttcatctctaaccct

SEQ ID NO: 13441 - DNA, 25 bp, Probe Sequence
catgcttcatctctaaccctaagac

SEQ ID NO: 13442 - DNA, 25 bp, Probe Sequence
tcatgcttcatctctaaccctaaga

SEQ ID NO: 13443 - DNA, 25 bp, Probe Sequence
agccaccctgtgataattgttatta

SEQ ID NO: 13444 - DNA, 25 bp, Probe Sequence
agtcatgcttcatctctaaccctaa

SEQ ID NO: 13445 - DNA, 25 bp, Probe Sequence
tgattatgcagatgacactgactct

SEQ ID NO: 13446 - DNA, 25 bp, Probe Sequence
gccaccctgtgataattgttattaa

SEQ ID NO: 13447 - DNA, 25 bp, Probe Sequence
cctatagaacccagtttgtacccaa

SEQ ID NO: 13448 - DNA, 25 bp, Probe Sequence
tataaccgagtctcgtttagtgaac

SEQ ID NO: 13449 - DNA, 25 bp, Probe Sequence
atataaccgagtctcgtttagtgaa

SEQ ID NO: 13450 - DNA, 25 bp, Probe Sequence
ctatagaacccagtttgtacccaaa

SEQ ID NO: 13451 - DNA, 25 bp, Probe Sequence
tatataaccgagtctcgtttagtga

SEQ ID NO: 13452 - DNA, 25 bp, Probe Sequence
ctatataaccgagtctcgtttagtg

SEQ ID NO: 13453 - DNA, 25 bp, Probe Sequence
ccctatagaacccagtttgtaccca

SEQ ID NO: 13454 - DNA, 25 bp, Probe Sequence
ctgttttgacctcccatagaagaca

SEQ ID NO: 13455 - DNA, 25 bp, Probe Sequence
gttttgacctcccatagaagacacc

SEQ ID NO: 13456 - DNA, 25 bp, Probe Sequence
tgttttgacctcccatagaagacac

SEQ ID NO: 13457 - DNA, 25 bp, Probe Sequence
tctcgtttagtgaacccgtcagatc

SEQ ID NO: 13458 - DNA, 25 bp, Probe Sequence
ataaccgagtctcgtttagtgaacc

SEQ ID NO: 13459 - DNA, 25 bp, Probe Sequence
gtctcgtttagtgaacccgtcagat

SEQ ID NO: 13460 - DNA, 25 bp, Probe Sequence
gctgttttgacctcccatagaagac

SEQ ID NO: 13461 - DNA, 25 bp, Probe Sequence
tatagaacccagtttgtacccaaaa

SEQ ID NO: 13462 - DNA, 25 bp, Probe Sequence
gacccctatagaacccagtttgtac

SEQ ID NO: 13463 - DNA, 25 bp, Probe Sequence
tgacccctatagaacccagtttgta

SEQ ID NO: 13464 - DNA, 25 bp, Probe Sequence
gagtctcgtttagtgaacccgtcag

SEQ ID NO: 13465 - DNA, 25 bp, Probe Sequence
ttttgacctcccatagaagacaccc

SEQ ID NO: 13466 - DNA, 25 bp, Probe Sequence
tatttaggtgacccctatagaaccc

SEQ ID NO: 13467 - DNA, 25 bp, Probe Sequence
ctatttaggtgacccctatagaacc

SEQ ID NO: 13468 - DNA, 25 bp, Probe Sequence
cctatttaggtgacccctatagaac

SEQ ID NO: 13469 - DNA, 25 bp, Probe Sequence
gcctatttaggtgacccctatagaa

SEQ ID NO: 13470 - DNA, 25 bp, Probe Sequence
acccctatagaacccagtttgtacc

SEQ ID NO: 13471 - DNA, 25 bp, Probe Sequence
tttaactacacatgccttgggatta

SEQ ID NO: 13472 - DNA, 25 bp, Probe Sequence
taactacacatgccttgggattaag

SEQ ID NO: 13473 - DNA, 25 bp, Probe Sequence
cggataaacaatttcacaccaggaa

SEQ ID NO: 13474 - DNA, 25 bp, Probe Sequence
ttaactacacatgccttgggattaa

SEQ ID NO: 13475 - DNA, 25 bp, Probe Sequence
ctttaactacacatgccttgggatt

SEQ ID NO: 13476 - DNA, 25 bp, Probe Sequence
acatcaagtgtatcatatgccagta

SEQ ID NO: 13477 - DNA, 25 bp, Probe Sequence
caaactttaactacacatgccttgg

SEQ ID NO: 13478 - DNA, 25 bp, Probe Sequence
ctacacatgccttgggattaagttt

SEQ ID NO: 13479 - DNA, 25 bp, Probe Sequence
gacggataaacaatttcacaccagg

SEQ ID NO: 13480 - DNA, 25 bp, Probe Sequence
ggacggataaacaatttcacaccag

SEQ ID NO: 13481 - DNA, 25 bp, Probe Sequence
aaactttaactacacatgccttggg

SEQ ID NO: 13482 - DNA, 25 bp, Probe Sequence
acggataaacaatttcacaccagga

SEQ ID NO: 13483 - DNA, 25 bp, Probe Sequence
actttaactacacatgccttgggat

SEQ ID NO: 13484 - DNA, 25 bp, Probe Sequence
aactttaactacacatgccttggga

SEQ ID NO: 13485 - DNA, 25 bp, Probe Sequence
taaacaatttcacaccaggaaacag

SEQ ID NO: 13486 - DNA, 25 bp, Probe Sequence
ggataaacaatttcacaccaggaaa

SEQ ID NO: 13487 - DNA, 25 bp, Probe Sequence
ataaacaatttcacaccaggaaaca

SEQ ID NO: 13488 - DNA, 25 bp, Probe Sequence
actacacatgccttgggattaagtt

SEQ ID NO: 13489 - DNA, 25 bp, Probe Sequence
aactacacatgccttgggattaagt

SEQ ID NO: 13490 - DNA, 25 bp, Probe Sequence
tacatcaagtgtatcatatgccagt

SEQ ID NO: 13491 - DNA, 25 bp, Probe Sequence
gataaacaatttcacaccaggaaac

SEQ ID NO: 13492 - DNA, 25 bp, Probe Sequence
gtacatcaagtgtatcatatgccag

SEQ ID NO: 13493 - DNA, 25 bp, Probe Sequence
gggcagtacatcaagtgtatcatat

SEQ ID NO: 13494 - DNA, 25 bp, Probe Sequence
cccataggacttccatgactcaatg

SEQ ID NO: 13495 - DNA, 25 bp, Probe Sequence
ggagaagagagaacaatatagagcc

SEQ ID NO: 13496 - DNA, 25 bp, Probe Sequence
caatggtgtctgttagagttatgtg

SEQ ID NO: 13497 - DNA, 25 bp, Probe Sequence
tcaatggtgtctgttagagttatgt

SEQ ID NO: 13498 - DNA, 25 bp, Probe Sequence
ggtcaatggtgtctgttagagttat

SEQ ID NO: 13499 - DNA, 25 bp, Probe Sequence
aatggtgtctgttagagttatgtgg

SEQ ID NO: 13500 - DNA, 25 bp, Probe Sequence
gtcaatggtgtctgttagagttatg

SEQ ID NO: 13501 - DNA, 25 bp, Probe Sequence
aggtcaatggtgtctgttagagtta

SEQ ID NO: 13502 - DNA, 25 bp, Probe Sequence
gaggtcaatggtgtctgttagagtt

SEQ ID NO: 13503 - DNA, 25 bp, Probe Sequence
atgtgaggtcaatggtgtctgttag

SEQ ID NO: 13504 - DNA, 25 bp, Probe Sequence
gatgtgaggtcaatggtgtctgtta

SEQ ID NO: 13505 - DNA, 25 bp, Probe Sequence
cacttatgaggcacctactgagatc

SEQ ID NO: 13506 - DNA, 25 bp, Probe Sequence
atggtgtctgttagagttatgtggc

SEQ ID NO: 13507 - DNA, 25 bp, Probe Sequence
gagagaacaatatagagcccacatt

SEQ ID NO: 13508 - DNA, 25 bp, Probe Sequence
gagaagagagaacaatatagagccc

SEQ ID NO: 13509 - DNA, 25 bp, Probe Sequence
gggagaagagagaacaatatagagc

SEQ ID NO: 13510 - DNA, 25 bp, Probe Sequence
agagaacaatatagagcccacattt

SEQ ID NO: 13511 - DNA, 25 bp, Probe Sequence
agtatgaatgagctgcttaactctt

SEQ ID NO: 13512 - DNA, 25 bp, Probe Sequence
gaagagagaacaatatagagcccac

SEQ ID NO: 13513 - DNA, 25 bp, Probe Sequence
agaagagagaacaatatagagccca

SEQ ID NO: 13514 - DNA, 25 bp, Probe Sequence
agagagaacaatatagagcccacat

SEQ ID NO: 13515 - DNA, 25 bp, Probe Sequence
tagtatgaatgagctgcttaactct

SEQ ID NO: 13516 - DNA, 25 bp, Probe Sequence
aagagagaacaatatagagcccaca

SEQ ID NO: 13517 - DNA, 25 bp, Probe Sequence
gtgaggtcaatggtgtctgttagag

SEQ ID NO: 13518 - DNA, 25 bp, Probe Sequence
gagaacaatatagagcccacatttg

SEQ ID NO: 13519 - DNA, 25 bp, Probe Sequence
ttgtggttggcaagatattactgaa

SEQ ID NO: 13520 - DNA, 25 bp, Probe Sequence
gtaactatcaacttcaaccacaatg

SEQ ID NO: 13521 - DNA, 25 bp, Probe Sequence
tggcaaggtaatgtcattagtcata

SEQ ID NO: 13522 - DNA, 25 bp, Probe Sequence
ctggcaaggtaatgtcattagtcat

SEQ ID NO: 13523 - DNA, 25 bp, Probe Sequence
ggcaaggtaatgtcattagtcataa

SEQ ID NO: 13524 - DNA, 25 bp, Probe Sequence
aactggcaaggtaatgtcattagtc

SEQ ID NO: 13525 - DNA, 25 bp, Probe Sequence
taactatcaacttcaaccacaatgg

SEQ ID NO: 13526 - DNA, 25 bp, Probe Sequence
ggtaactatcaacttcaaccacaat

SEQ ID NO: 13527 - DNA, 25 bp, Probe Sequence
cattatttcactgcggattactaca

SEQ ID NO: 13528 - DNA, 25 bp, Probe Sequence
acattatttcactgcggattactac

SEQ ID NO: 13529 - DNA, 25 bp, Probe Sequence
tgtggttggcaagatattactgaaa

SEQ ID NO: 13530 - DNA, 25 bp, Probe Sequence
caacgatgagtcacgaaataagaac

SEQ ID NO: 13531 - DNA, 25 bp, Probe Sequence
gaatcgggtaactatcaacttcaac

SEQ ID NO: 13532 - DNA, 25 bp, Probe Sequence
ttaattggtgaaatccttgatgtcg

SEQ ID NO: 13533 - DNA, 25 bp, Probe Sequence
gcttaattggtgaaatccttgatgt

SEQ ID NO: 13534 - DNA, 25 bp, Probe Sequence
gaacattatttcactgcggattact

SEQ ID NO: 13535 - DNA, 25 bp, Probe Sequence
ttcctttaccgaatccaacttatgt

SEQ ID NO: 13536 - DNA, 25 bp, Probe Sequence
aacgatgagtcacgaaataagaaca

SEQ ID NO: 13537 - DNA, 25 bp, Probe Sequence
actggcaaggtaatgtcattagtca

SEQ ID NO: 13538 - DNA, 25 bp, Probe Sequence
tcctttaccgaatccaacttatgtt

SEQ ID NO: 13539 - DNA, 25 bp, Probe Sequence
tagaaaccgaatatcagttccgaaa

SEQ ID NO: 13540 - DNA, 25 bp, Probe Sequence
ttagaaaccgaatatcagttccgaa

SEQ ID NO: 13541 - DNA, 25 bp, Probe Sequence
tttagaaaccgaatatcagttccga

SEQ ID NO: 13542 - DNA, 25 bp, Probe Sequence
ggcttaattggtgaaatccttgatg

SEQ ID NO: 13543 - DNA, 25 bp, Probe Sequence
caggaccaattacaatgacagatac

SEQ ID NO: 13544 - DNA, 25 bp, Probe Sequence
aggaccaattacaatgacagatacg

SEQ ID NO: 13545 - DNA, 25 bp, Probe Sequence
ggaccaattacaatgacagatacga

SEQ ID NO: 13546 - DNA, 25 bp, Probe Sequence
accaattacaatgacagatacgatg

SEQ ID NO: 13547 - DNA, 25 bp, Probe Sequence
ccaattacaatgacagatacgatga

SEQ ID NO: 13548 - DNA, 25 bp, Probe Sequence
gaccaattacaatgacagatacgat

SEQ ID NO: 13549 - DNA, 25 bp, Probe Sequence
atcaggaccaattacaatgacagat

SEQ ID NO: 13550 - DNA, 25 bp, Probe Sequence
tacaatgacagatacgatgagatcc

SEQ ID NO: 13551 - DNA, 25 bp, Probe Sequence
tcaggaccaattacaatgacagata

SEQ ID NO: 13552 - DNA, 25 bp, Probe Sequence
tatcaggaccaattacaatgacaga

SEQ ID NO: 13553 - DNA, 25 bp, Probe Sequence
ctatcaggaccaattacaatgacag

SEQ ID NO: 13554 - DNA, 25 bp, Probe Sequence
gctatcaggaccaattacaatgaca

SEQ ID NO: 13555 - DNA, 25 bp, Probe Sequence
caattacaatgacagatacgatgag

SEQ ID NO: 13556 - DNA, 25 bp, Probe Sequence
aattacaatgacagatacgatgaga

SEQ ID NO: 13557 - DNA, 25 bp, Probe Sequence
attacaatgacagatacgatgagat

SEQ ID NO: 13558 - DNA, 25 bp, Probe Sequence
ttacaatgacagatacgatgagatc

SEQ ID NO: 13559 - DNA, 25 bp, Probe Sequence
gaagctatcaggaccaattacaatg

SEQ ID NO: 13560 - DNA, 25 bp, Probe Sequence
ggaagctatcaggaccaattacaat

SEQ ID NO: 13561 - DNA, 25 bp, Probe Sequence
aagctatcaggaccaattacaatga

SEQ ID NO: 13562 - DNA, 25 bp, Probe Sequence
agctatcaggaccaattacaatgac

SEQ ID NO: 13563 - DNA, 25 bp, Probe Sequence
acaatgacagatacgatgagatccg

SEQ ID NO: 13564 - DNA, 25 bp, Probe Sequence
cattatcaagggaaaggcaagactg

SEQ ID NO: 13565 - DNA, 25 bp, Probe Sequence
tggaagctatcaggaccaattacaa

SEQ ID NO: 13566 - DNA, 25 bp, Probe Sequence
caatgacagatacgatgagatccgc

SEQ ID NO: 13567 - DNA, 25 bp, Probe Sequence
taatcaaatatgggcaccaaggtaa

SEQ ID NO: 13568 - DNA, 25 bp, Probe Sequence
ctaatcaaatatgggcaccaaggta

SEQ ID NO: 13569 - DNA, 25 bp, Probe Sequence
aatcaaatatgggcaccaaggtaag

SEQ ID NO: 13570 - DNA, 25 bp, Probe Sequence
acagaaagggcaaccattctaaatc

SEQ ID NO: 13571 - DNA, 25 bp, Probe Sequence
cacagaaagggcaaccattctaaat

SEQ ID NO: 13572 - DNA, 25 bp, Probe Sequence
agaaagggcaaccattctaaatcct

SEQ ID NO: 13573 - DNA, 25 bp, Probe Sequence
cagaaagggcaaccattctaaatcc

SEQ ID NO: 13574 - DNA, 25 bp, Probe Sequence
cctaatcaaatatgggcaccaaggt

SEQ ID NO: 13575 - DNA, 25 bp, Probe Sequence
atcaaatatgggcaccaaggtaagc

SEQ ID NO: 13576 - DNA, 25 bp, Probe Sequence
cattctaaatccttggtaagggctc

SEQ ID NO: 13577 - DNA, 25 bp, Probe Sequence
gaaagggcaaccattctaaatcctt

SEQ ID NO: 13578 - DNA, 25 bp, Probe Sequence
aaagggcaaccattctaaatccttg

SEQ ID NO: 13579 - DNA, 25 bp, Probe Sequence
attctaaatccttggtaagggctcc

SEQ ID NO: 13580 - DNA, 25 bp, Probe Sequence
ccctaatcaaatatgggcaccaagg

SEQ ID NO: 13581 - DNA, 25 bp, Probe Sequence
ccattctaaatccttggtaagggct

SEQ ID NO: 13582 - DNA, 25 bp, Probe Sequence
gcacagaaagggcaaccattctaaa

SEQ ID NO: 13583 - DNA, 25 bp, Probe Sequence
caaatccgactaaggagagcaggac

SEQ ID NO: 13584 - DNA, 25 bp, Probe Sequence
gcaaccattctaaatccttggtaag

SEQ ID NO: 13585 - DNA, 25 bp, Probe Sequence
aaccattctaaatccttggtaaggg

SEQ ID NO: 13586 - DNA, 25 bp, Probe Sequence
caaccattctaaatccttggtaagg

SEQ ID NO: 13587 - DNA, 25 bp, Probe Sequence
ggcaaccattctaaatccttggtaa

SEQ ID NO: 13588 - DNA, 25 bp, Probe Sequence
aagggcaaccattctaaatccttgg

SEQ ID NO: 13589 - DNA, 25 bp, Probe Sequence
accattctaaatccttggtaagggc

SEQ ID NO: 13590 - DNA, 25 bp, Probe Sequence
gggcaaccattctaaatccttggta

SEQ ID NO: 13591 - DNA, 25 bp, Probe Sequence
ggagaagaatcagtaagtgtaaggt

SEQ ID NO: 13592 - DNA, 25 bp, Probe Sequence
aggagaagaatcagtaagtgtaagg

SEQ ID NO: 13593 - DNA, 25 bp, Probe Sequence
agaagaatcagtaagtgtaaggtgt

SEQ ID NO: 13594 - DNA, 25 bp, Probe Sequence
gagaagaatcagtaagtgtaaggtg

SEQ ID NO: 13595 - DNA, 25 bp, Probe Sequence
gttaaggagaagaatcagtaagtgt

SEQ ID NO: 13596 - DNA, 25 bp, Probe Sequence
gaagaatcagtaagtgtaaggtgta

SEQ ID NO: 13597 - DNA, 25 bp, Probe Sequence
aaggagaagaatcagtaagtgtaag

SEQ ID NO: 13598 - DNA, 25 bp, Probe Sequence
agttaaggagaagaatcagtaagtg

SEQ ID NO: 13599 - DNA, 25 bp, Probe Sequence
aagaatcagtaagtgtaaggtgtac

SEQ ID NO: 13600 - DNA, 25 bp, Probe Sequence
aagttaaggagaagaatcagtaagt

SEQ ID NO: 13601 - DNA, 25 bp, Probe Sequence
tttcaggaagagagatgtgtttcaa

SEQ ID NO: 13602 - DNA, 25 bp, Probe Sequence
agaatcagtaagtgtaaggtgtact

SEQ ID NO: 13603 - DNA, 25 bp, Probe Sequence
ctttcaggaagagagatgtgtttca

SEQ ID NO: 13604 - DNA, 25 bp, Probe Sequence
cccagaagtcccaaattatcagttt

SEQ ID NO: 13605 - DNA, 25 bp, Probe Sequence
ttcaggaagagagatgtgtttcaac

SEQ ID NO: 13606 - DNA, 25 bp, Probe Sequence
taaggagaagaatcagtaagtgtaa

SEQ ID NO: 13607 - DNA, 25 bp, Probe Sequence
ttaaggagaagaatcagtaagtgta

SEQ ID NO: 13608 - DNA, 25 bp, Probe Sequence
gctaagatggtatagggactgtcat

SEQ ID NO: 13609 - DNA, 25 bp, Probe Sequence
ctaagatggtatagggactgtcata

SEQ ID NO: 13610 - DNA, 25 bp, Probe Sequence
atcagtaagtgtaaggtgtacttgg

SEQ ID NO: 13611 - DNA, 25 bp, Probe Sequence
cagtaagtgtaaggtgtacttggta

SEQ ID NO: 13612 - DNA, 25 bp, Probe Sequence
ggaataccctgaaagttaaggagaa

SEQ ID NO: 13613 - DNA, 25 bp, Probe Sequence
aaggaataccctgaaagttaaggag

SEQ ID NO: 13614 - DNA, 25 bp, Probe Sequence
ccctgaaagttaaggagaagaatca

SEQ ID NO: 13615 - DNA, 25 bp, Probe Sequence
atgttactccttgatctttgtcttt

SEQ ID NO: 13616 - DNA, 25 bp, Probe Sequence
tatgttactccttgatctttgtctt

SEQ ID NO: 13617 - DNA, 25 bp, Probe Sequence
ttatgttactccttgatctttgtct

SEQ ID NO: 13618 - DNA, 25 bp, Probe Sequence
tttatgttactccttgatctttgtc

SEQ ID NO: 13619 - DNA, 25 bp, Probe Sequence
aaccaacaaaggatctcacattttc

SEQ ID NO: 13620 - DNA, 25 bp, Probe Sequence
aaaccaacaaaggatctcacatttt

SEQ ID NO: 13621 - DNA, 25 bp, Probe Sequence
aaaaccaacaaaggatctcacattt

SEQ ID NO: 13622 - DNA, 25 bp, Probe Sequence
accaacaaaggatctcacattttct

SEQ ID NO: 13623 - DNA, 25 bp, Probe Sequence
ccaacaaaggatctcacattttctt

SEQ ID NO: 13624 - DNA, 25 bp, Probe Sequence
tactccttgatctttgtcttttgtc

SEQ ID NO: 13625 - DNA, 25 bp, Probe Sequence
ttactccttgatctttgtcttttgt

SEQ ID NO: 13626 - DNA, 25 bp, Probe Sequence
tgttactccttgatctttgtctttt

SEQ ID NO: 13627 - DNA, 25 bp, Probe Sequence
ctccttgatctttgtcttttgtcat

SEQ ID NO: 13628 - DNA, 25 bp, Probe Sequence
actccttgatctttgtcttttgtca

SEQ ID NO: 13629 - DNA, 25 bp, Probe Sequence
atttatgttactccttgatctttgt

SEQ ID NO: 13630 - DNA, 25 bp, Probe Sequence
gttactccttgatctttgtcttttg

SEQ ID NO: 13631 - DNA, 25 bp, Probe Sequence
tccttgatctttgtcttttgtcatg

SEQ ID NO: 13632 - DNA, 25 bp, Probe Sequence
caacaaaggatctcacattttctta

SEQ ID NO: 13633 - DNA, 25 bp, Probe Sequence
aatttatgttactccttgatctttg

SEQ ID NO: 13634 - DNA, 25 bp, Probe Sequence
acaaaggatctcacattttcttaaa

SEQ ID NO: 13635 - DNA, 25 bp, Probe Sequence
aacaaaggatctcacattttcttaa

SEQ ID NO: 13636 - DNA, 25 bp, Probe Sequence
aagtgaagattgctgtatactattt

SEQ ID NO: 13637 - DNA, 25 bp, Probe Sequence
aaagtgaagattgctgtatactatt

SEQ ID NO: 13638 - DNA, 25 bp, Probe Sequence
ccttgatctttgtcttttgtcatga

SEQ ID NO: 13639 - DNA, 25 bp, Probe Sequence
caggtcggtttctatctacttcaaa

SEQ ID NO: 13640 - DNA, 25 bp, Probe Sequence
taatccaggtcggtttctatctact

SEQ ID NO: 13641 - DNA, 25 bp, Probe Sequence
agtaatccaggtcggtttctatcta

SEQ ID NO: 13642 - DNA, 25 bp, Probe Sequence
aggtcggtttctatctacttcaaat

SEQ ID NO: 13643 - DNA, 25 bp, Probe Sequence
gtaatccaggtcggtttctatctac

SEQ ID NO: 13644 - DNA, 25 bp, Probe Sequence
cgctattaaaggttcgtttgttcaa

SEQ ID NO: 13645 - DNA, 25 bp, Probe Sequence
ctatctacttcaaattcctccctgt

SEQ ID NO: 13646 - DNA, 25 bp, Probe Sequence
aatccaggtcggtttctatctactt

SEQ ID NO: 13647 - DNA, 25 bp, Probe Sequence
tctatctacttcaaattcctccctg

SEQ ID NO: 13648 - DNA, 25 bp, Probe Sequence
gctattaaaggttcgtttgttcaac

SEQ ID NO: 13649 - DNA, 25 bp, Probe Sequence
ggtcggtttctatctacttcaaatt

SEQ ID NO: 13650 - DNA, 25 bp, Probe Sequence
atccaggtcggtttctatctacttc

SEQ ID NO: 13651 - DNA, 25 bp, Probe Sequence
gagtaatccaggtcggtttctatct

SEQ ID NO: 13652 - DNA, 25 bp, Probe Sequence
atctacttcaaattcctccctgtac

SEQ ID NO: 13653 - DNA, 25 bp, Probe Sequence
ttctatctacttcaaattcctccct

SEQ ID NO: 13654 - DNA, 25 bp, Probe Sequence
cggtttctatctacttcaaattcct

SEQ ID NO: 13655 - DNA, 25 bp, Probe Sequence
tcggtttctatctacttcaaattcc

SEQ ID NO: 13656 - DNA, 25 bp, Probe Sequence
gtttgttcaacgattaaagtcctac

SEQ ID NO: 13657 - DNA, 25 bp, Probe Sequence
ccaggtcggtttctatctacttcaa

SEQ ID NO: 13658 - DNA, 25 bp, Probe Sequence
tatctacttcaaattcctccctgta

SEQ ID NO: 13659 - DNA, 25 bp, Probe Sequence
tgacacctatatgaacacagtttgt

SEQ ID NO: 13660 - DNA, 25 bp, Probe Sequence
tatggtgacacctatatgaacacag

SEQ ID NO: 13661 - DNA, 25 bp, Probe Sequence
ttatggtgacacctatatgaacaca

SEQ ID NO: 13662 - DNA, 25 bp, Probe Sequence
gtacgaaaggacacgagaaataagg

SEQ ID NO: 13663 - DNA, 25 bp, Probe Sequence
gagcaataaaggagaaactgaggta

SEQ ID NO: 13664 - DNA, 25 bp, Probe Sequence
agcaataaaggagaaactgaggtac

SEQ ID NO: 13665 - DNA, 25 bp, Probe Sequence
ggagcaataaaggagaaactgaggt

SEQ ID NO: 13666 - DNA, 25 bp, Probe Sequence
tacgggagcaataaaggagaaactg

SEQ ID NO: 13667 - DNA, 25 bp, Probe Sequence
aatgaagctgagaccaagaaacttt

SEQ ID NO: 13668 - DNA, 25 bp, Probe Sequence
aaatgaagctgagaccaagaaactt

SEQ ID NO: 13669 - DNA, 25 bp, Probe Sequence
gaaatgaagctgagaccaagaaact

SEQ ID NO: 13670 - DNA, 25 bp, Probe Sequence
gtacgggagcaataaaggagaaact

SEQ ID NO: 13671 - DNA, 25 bp, Probe Sequence
atgaagctgagaccaagaaactttc

SEQ ID NO: 13672 - DNA, 25 bp, Probe Sequence
gggagcaataaaggagaaactgagg

SEQ ID NO: 13673 - DNA, 25 bp, Probe Sequence
ggaaatgaagctgagaccaagaaac

SEQ ID NO: 13674 - DNA, 25 bp, Probe Sequence
cgggagcaataaaggagaaactgag

SEQ ID NO: 13675 - DNA, 25 bp, Probe Sequence
acgggagcaataaaggagaaactga

SEQ ID NO: 13676 - DNA, 25 bp, Probe Sequence
cggaaatgaagctgagaccaagaaa

SEQ ID NO: 13677 - DNA, 25 bp, Probe Sequence
tgaagctgagaccaagaaactttcg

SEQ ID NO: 13678 - DNA, 25 bp, Probe Sequence
caataaaggagaaactgaggtaccc

SEQ ID NO: 13679 - DNA, 25 bp, Probe Sequence
gttttgggaacatctctggagagtt

SEQ ID NO: 13680 - DNA, 25 bp, Probe Sequence
gcaataaaggagaaactgaggtacc

SEQ ID NO: 13681 - DNA, 25 bp, Probe Sequence
acggaaatgaagctgagaccaagaa

SEQ ID NO: 13682 - DNA, 25 bp, Probe Sequence
tttgggaacatctctggagagttct

SEQ ID NO: 13683 - DNA, 25 bp, Probe Sequence
aataaaggagaaactgaggtacccg

SEQ ID NO: 13684 - DNA, 25 bp, Probe Sequence
gaagctgagaccaagaaactttcgc

SEQ ID NO: 13685 - DNA, 25 bp, Probe Sequence
gaacatctctggagagttctgctgg

SEQ ID NO: 13686 - DNA, 25 bp, Probe Sequence
ggaacatctctggagagttctgctg

SEQ ID NO: 13687 - DNA, 25 bp, Probe Sequence
agaccactctagccacagtatattg

SEQ ID NO: 13688 - DNA, 25 bp, Probe Sequence
cagaccactctagccacagtatatt

SEQ ID NO: 13689 - DNA, 25 bp, Probe Sequence
ttcatttctcatcccatccaatttg

SEQ ID NO: 13690 - DNA, 25 bp, Probe Sequence
ctgtggtcccttcaaagttgttata

SEQ ID NO: 13691 - DNA, 25 bp, Probe Sequence
catttctcatcccatccaatttgtc

SEQ ID NO: 13692 - DNA, 25 bp, Probe Sequence
tcatttctcatcccatccaatttgt

SEQ ID NO: 13693 - DNA, 25 bp, Probe Sequence
tttcatttctcatcccatccaattt

SEQ ID NO: 13694 - DNA, 25 bp, Probe Sequence
atttctcatcccatccaatttgtcc

SEQ ID NO: 13695 - DNA, 25 bp, Probe Sequence
gaccactctagccacagtatattgc

SEQ ID NO: 13696 - DNA, 25 bp, Probe Sequence
ccagaccactctagccacagtatat

SEQ ID NO: 13697 - DNA, 25 bp, Probe Sequence
tgtggtcccttcaaagttgttataa

SEQ ID NO: 13698 - DNA, 25 bp, Probe Sequence
tctgtggtcccttcaaagttgttat

SEQ ID NO: 13699 - DNA, 25 bp, Probe Sequence
gtggtcccttcaaagttgttataat

SEQ ID NO: 13700 - DNA, 25 bp, Probe Sequence
tctcatcccatccaatttgtccttt

SEQ ID NO: 13701 - DNA, 25 bp, Probe Sequence
ttctcatcccatccaatttgtcctt

SEQ ID NO: 13702 - DNA, 25 bp, Probe Sequence
tttctcatcccatccaatttgtcct

SEQ ID NO: 13703 - DNA, 25 bp, Probe Sequence
tggtcccttcaaagttgttataatt

SEQ ID NO: 13704 - DNA, 25 bp, Probe Sequence
ctctgtggtcccttcaaagttgtta

SEQ ID NO: 13705 - DNA, 25 bp, Probe Sequence
caatgactgtcaccttcatctcttc

SEQ ID NO: 13706 - DNA, 25 bp, Probe Sequence
cttaggaagccacataacaagccac

SEQ ID NO: 13707 - DNA, 25 bp, Probe Sequence
aatgactgtcaccttcatctcttca

SEQ ID NO: 13708 - DNA, 25 bp, Probe Sequence
aaatttgccctggaaagtaagtctc

SEQ ID NO: 13709 - DNA, 25 bp, Probe Sequence
ggtcccttcaaagttgttataattt

SEQ ID NO: 13710 - DNA, 25 bp, Probe Sequence
ctattggattcccttctcaatgtcc

SEQ ID NO: 13711 - DNA, 25 bp, Probe Sequence
cctgatgttggtattctctgagtta

SEQ ID NO: 13712 - DNA, 25 bp, Probe Sequence
cttcctgatgttggtattctctgag

SEQ ID NO: 13713 - DNA, 25 bp, Probe Sequence
acttcctgatgttggtattctctga

SEQ ID NO: 13714 - DNA, 25 bp, Probe Sequence
tagagaggactattagacaaccaag

SEQ ID NO: 13715 - DNA, 25 bp, Probe Sequence
aacttcctgatgttggtattctctg

SEQ ID NO: 13716 - DNA, 25 bp, Probe Sequence
tcctgatgttggtattctctgagtt

SEQ ID NO: 13717 - DNA, 25 bp, Probe Sequence
ttcctgatgttggtattctctgagt

SEQ ID NO: 13718 - DNA, 25 bp, Probe Sequence
gagaggactattagacaaccaagtg

SEQ ID NO: 13719 - DNA, 25 bp, Probe Sequence
agagaggactattagacaaccaagt

SEQ ID NO: 13720 - DNA, 25 bp, Probe Sequence
ttagagaggactattagacaaccaa

SEQ ID NO: 13721 - DNA, 25 bp, Probe Sequence
attagagaggactattagacaacca

SEQ ID NO: 13722 - DNA, 25 bp, Probe Sequence
cattagagaggactattagacaacc

SEQ ID NO: 13723 - DNA, 25 bp, Probe Sequence
ctgatgttggtattctctgagttat

SEQ ID NO: 13724 - DNA, 25 bp, Probe Sequence
aggactattagacaaccaagtggag

SEQ ID NO: 13725 - DNA, 25 bp, Probe Sequence
gaggactattagacaaccaagtgga

SEQ ID NO: 13726 - DNA, 25 bp, Probe Sequence
agaggactattagacaaccaagtgg

SEQ ID NO: 13727 - DNA, 25 bp, Probe Sequence
tgatgttggtattctctgagttatt

SEQ ID NO: 13728 - DNA, 25 bp, Probe Sequence
cttcctctgtagttaagtcaccacc

SEQ ID NO: 13729 - DNA, 25 bp, Probe Sequence
aatgtcagaatcgaactcagagaag

SEQ ID NO: 13730 - DNA, 25 bp, Probe Sequence
acattagagaggactattagacaac

SEQ ID NO: 13731 - DNA, 25 bp, Probe Sequence
ctactctgtatggcttgaggatgag

SEQ ID NO: 13732 - DNA, 25 bp, Probe Sequence
ctctactctgtatggcttgaggatg

SEQ ID NO: 13733 - DNA, 25 bp, Probe Sequence
tctactctgtatggcttgaggatga

SEQ ID NO: 13734 - DNA, 25 bp, Probe Sequence
atgtcagaatcgaactcagagaaga

SEQ ID NO: 13735 - DNA, 25 bp, Probe Sequence
catcgtaggtattagtcatcgctat

SEQ ID NO: 13736 - DNA, 25 bp, Probe Sequence
acatcgtaggtattagtcatcgcta

SEQ ID NO: 13737 - DNA, 25 bp, Probe Sequence
tatgagtaactggttcttatgctgc

SEQ ID NO: 13738 - DNA, 25 bp, Probe Sequence
tacatcgtaggtattagtcatcgct

SEQ ID NO: 13739 - DNA, 25 bp, Probe Sequence
atcgtaggtattagtcatcgctata

SEQ ID NO: 13740 - DNA, 25 bp, Probe Sequence
gcagtacatcgtaggtattagtcat

SEQ ID NO: 13741 - DNA, 25 bp, Probe Sequence
agtacatcgtaggtattagtcatcg

SEQ ID NO: 13742 - DNA, 25 bp, Probe Sequence
atatgagtaactggttcttatgctg

SEQ ID NO: 13743 - DNA, 25 bp, Probe Sequence
gtacatcgtaggtattagtcatcgc

SEQ ID NO: 13744 - DNA, 25 bp, Probe Sequence
atgagtaactggttcttatgctgct

SEQ ID NO: 13745 - DNA, 25 bp, Probe Sequence
ggcagtacatcgtaggtattagtca

SEQ ID NO: 13746 - DNA, 25 bp, Probe Sequence
tcgtaggtattagtcatcgctatac

SEQ ID NO: 13747 - DNA, 25 bp, Probe Sequence
cagtacatcgtaggtattagtcatc

SEQ ID NO: 13748 - DNA, 25 bp, Probe Sequence
gttgagtatatgagtaactggttct

SEQ ID NO: 13749 - DNA, 25 bp, Probe Sequence
agtaactggttcttatgctgctgtt

SEQ ID NO: 13750 - DNA, 25 bp, Probe Sequence
tgttggtaagggtttgtaatctgta

SEQ ID NO: 13751 - DNA, 25 bp, Probe Sequence
atgttggtaagggtttgtaatctgt

SEQ ID NO: 13752 - DNA, 25 bp, Probe Sequence
aatgttggtaagggtttgtaatctg

SEQ ID NO: 13753 - DNA, 25 bp, Probe Sequence
gagtaactggttcttatgctgctgt

SEQ ID NO: 13754 - DNA, 25 bp, Probe Sequence
tgagtaactggttcttatgctgctg

SEQ ID NO: 13755 - DNA, 25 bp, Probe Sequence
gtatatgagtaactggttcttatgc

SEQ ID NO: 13756 - DNA, 25 bp, Probe Sequence
gttggtaagggtttgtaatctgtaa

SEQ ID NO: 13757 - DNA, 25 bp, Probe Sequence
agggtttgtaatctgtaagaatgct

SEQ ID NO: 13758 - DNA, 25 bp, Probe Sequence
aagggtttgtaatctgtaagaatgc

SEQ ID NO: 13759 - DNA, 25 bp, Probe Sequence
gcctctataactgtgagtgaataca

SEQ ID NO: 13760 - DNA, 25 bp, Probe Sequence
cctctataactgtgagtgaatacac

SEQ ID NO: 13761 - DNA, 25 bp, Probe Sequence
aagagaaaggacagagatttaagcc

SEQ ID NO: 13762 - DNA, 25 bp, Probe Sequence
gaagagaaaggacagagatttaagc

SEQ ID NO: 13763 - DNA, 25 bp, Probe Sequence
gagaaaggacagagatttaagccac

SEQ ID NO: 13764 - DNA, 25 bp, Probe Sequence
agagaaaggacagagatttaagcca

SEQ ID NO: 13765 - DNA, 25 bp, Probe Sequence
gaagacaaaggtagagattggagtg

SEQ ID NO: 13766 - DNA, 25 bp, Probe Sequence
gtgaagacaaaggtagagattggag

SEQ ID NO: 13767 - DNA, 25 bp, Probe Sequence
gacaaaggtagagattggagtgatg

SEQ ID NO: 13768 - DNA, 25 bp, Probe Sequence
agacaaaggtagagattggagtgat

SEQ ID NO: 13769 - DNA, 25 bp, Probe Sequence
tttagatgagatcacgctggattta

SEQ ID NO: 13770 - DNA, 25 bp, Probe Sequence
ttagatgagatcacgctggatttag

SEQ ID NO: 13771 - DNA, 25 bp, Probe Sequence
aagacaaaggtagagattggagtga

SEQ ID NO: 13772 - DNA, 25 bp, Probe Sequence
tgaagacaaaggtagagattggagt

SEQ ID NO: 13773 - DNA, 25 bp, Probe Sequence
gaaaggacagagatttaagccacag

SEQ ID NO: 13774 - DNA, 25 bp, Probe Sequence
ctttagatgagatcacgctggattt

SEQ ID NO: 13775 - DNA, 25 bp, Probe Sequence
atgtgaagacaaaggtagagattgg

SEQ ID NO: 13776 - DNA, 25 bp, Probe Sequence
aaaggacagagatttaagccacaga

SEQ ID NO: 13777 - DNA, 25 bp, Probe Sequence
agaaaggacagagatttaagccaca

SEQ ID NO: 13778 - DNA, 25 bp, Probe Sequence
agaagagaaaggacagagatttaag

SEQ ID NO: 13779 - DNA, 25 bp, Probe Sequence
gagatttaagccacagacacacaag

SEQ ID NO: 13780 - DNA, 25 bp, Probe Sequence
cttagaagagaaaggacagagattt

SEQ ID NO: 13781 - DNA, 25 bp, Probe Sequence
tgtgaagacaaaggtagagattgga

SEQ ID NO: 13782 - DNA, 25 bp, Probe Sequence
taatgactgataccttagaagagaa

SEQ ID NO: 13783 - DNA, 25 bp, Probe Sequence
gcataatgacgtatggtccatagta

SEQ ID NO: 13784 - DNA, 25 bp, Probe Sequence
gtcatggtggagtatttacggtaac

SEQ ID NO: 13785 - DNA, 25 bp, Probe Sequence
atagtacccattaggacttccatga

SEQ ID NO: 13786 - DNA, 25 bp, Probe Sequence
catagtacccattaggacttccatg

SEQ ID NO: 13787 - DNA, 25 bp, Probe Sequence
ggtgacactatttagaacaagtttg

SEQ ID NO: 13788 - DNA, 25 bp, Probe Sequence
ataatgacgtatggtccatagtacc

SEQ ID NO: 13789 - DNA, 25 bp, Probe Sequence
cataatgacgtatggtccatagtac

SEQ ID NO: 13790 - DNA, 25 bp, Probe Sequence
ccatagtacccattaggacttccat

SEQ ID NO: 13791 - DNA, 25 bp, Probe Sequence
aggtgacactatttagaacaagttt

SEQ ID NO: 13792 - DNA, 25 bp, Probe Sequence
tagtacccattaggacttccatgac

SEQ ID NO: 13793 - DNA, 25 bp, Probe Sequence
catggtggagtatttacggtaactg

SEQ ID NO: 13794 - DNA, 25 bp, Probe Sequence
tcatggtggagtatttacggtaact

SEQ ID NO: 13795 - DNA, 25 bp, Probe Sequence
attatgcccagtacatgaccttgat

SEQ ID NO: 13796 - DNA, 25 bp, Probe Sequence
taggtgacactatttagaacaagtt

SEQ ID NO: 13797 - DNA, 25 bp, Probe Sequence
ttaggtgacactatttagaacaagt

SEQ ID NO: 13798 - DNA, 25 bp, Probe Sequence
ttgcagtacatcaagtgtaatcata

SEQ ID NO: 13799 - DNA, 25 bp, Probe Sequence
agtacatgaccttgatgggactttc

SEQ ID NO: 13800 - DNA, 25 bp, Probe Sequence
atcaagtgtaatcatatgcccagta

SEQ ID NO: 13801 - DNA, 25 bp, Probe Sequence
tcaagtgtaatcatatgcccagtac

SEQ ID NO: 13802 - DNA, 25 bp, Probe Sequence
tgcagtacatcaagtgtaatcatat

SEQ ID NO: 13803 - DNA, 25 bp, Probe Sequence
cgcataatgacgtatggtccatagt

SEQ ID NO: 13804 - DNA, 25 bp, Probe Sequence
gtgacactatttagaacaagtttgt

SEQ ID NO: 13805 - DNA, 25 bp, Probe Sequence
ttatgcccagtacatgaccttgatg

SEQ ID NO: 13806 - DNA, 25 bp, Probe Sequence
cattatgcccagtacatgaccttga

SEQ ID NO: 13807 - DNA, 25 bp, Probe Sequence
caacaagaacaaactccatctcaaa

SEQ ID NO: 13808 - DNA, 25 bp, Probe Sequence
caggacagactatggactttctact

SEQ ID NO: 13809 - DNA, 25 bp, Probe Sequence
aggacagactatggactttctactg

SEQ ID NO: 13810 - DNA, 25 bp, Probe Sequence
gcaacaagaacaaactccatctcaa

SEQ ID NO: 13811 - DNA, 25 bp, Probe Sequence
gaacatctacgtatagtcatcgcta

SEQ ID NO: 13812 - DNA, 25 bp, Probe Sequence
ggacagactatggactttctactgg

SEQ ID NO: 13813 - DNA, 25 bp, Probe Sequence
agactatggactttctactggcaga

SEQ ID NO: 13814 - DNA, 25 bp, Probe Sequence
ctactggcagaacatctacgtatag

SEQ ID NO: 13815 - DNA, 25 bp, Probe Sequence
tctactggcagaacatctacgtata

SEQ ID NO: 13816 - DNA, 25 bp, Probe Sequence
ggcagaacatctacgtatagtcatc

SEQ ID NO: 13817 - DNA, 25 bp, Probe Sequence
agaacatctacgtatagtcatcgct

SEQ ID NO: 13818 - DNA, 25 bp, Probe Sequence
cagaacatctacgtatagtcatcgc

SEQ ID NO: 13819 - DNA, 25 bp, Probe Sequence
gcagaacatctacgtatagtcatcg

SEQ ID NO: 13820 - DNA, 25 bp, Probe Sequence
tactggcagaacatctacgtatagt

SEQ ID NO: 13821 - DNA, 25 bp, Probe Sequence
tggcagaacatctacgtatagtcat

SEQ ID NO: 13822 - DNA, 25 bp, Probe Sequence
cagactatggactttctactggcag

SEQ ID NO: 13823 - DNA, 25 bp, Probe Sequence
gacagactatggactttctactggc

SEQ ID NO: 13824 - DNA, 25 bp, Probe Sequence
ccaggacagactatggactttctac

SEQ ID NO: 13825 - DNA, 25 bp, Probe Sequence
aacatctacgtatagtcatcgctat

SEQ ID NO: 13826 - DNA, 25 bp, Probe Sequence
ctggcagaacatctacgtatagtca

SEQ ID NO: 13827 - DNA, 25 bp, Probe Sequence
gactttctactggcagaacatctac

SEQ ID NO: 13828 - DNA, 25 bp, Probe Sequence
actggcagaacatctacgtatagtc

SEQ ID NO: 13829 - DNA, 25 bp, Probe Sequence
tatggactttctactggcagaacat

SEQ ID NO: 13830 - DNA, 25 bp, Probe Sequence
aacaagaacaaactccatctcaaaa

SEQ ID NO: 13831 - DNA, 25 bp, Probe Sequence
agtgatgtagaagcaaggtaatgta

SEQ ID NO: 13832 - DNA, 25 bp, Probe Sequence
tagtgatgtagaagcaaggtaatgt

SEQ ID NO: 13833 - DNA, 25 bp, Probe Sequence
aggtggtagataataagtggtagac

SEQ ID NO: 13834 - DNA, 25 bp, Probe Sequence
gtgatgtagaagcaaggtaatgtat

SEQ ID NO: 13835 - DNA, 25 bp, Probe Sequence
atagtgatgtagaagcaaggtaatg

SEQ ID NO: 13836 - DNA, 25 bp, Probe Sequence
aaggtggtagataataagtggtaga

SEQ ID NO: 13837 - DNA, 25 bp, Probe Sequence
ggtggtagataataagtggtagact

SEQ ID NO: 13838 - DNA, 25 bp, Probe Sequence
aatagtgatgtagaagcaaggtaat

SEQ ID NO: 13839 - DNA, 25 bp, Probe Sequence
gttaaggtggtagataataagtggt

SEQ ID NO: 13840 - DNA, 25 bp, Probe Sequence
tgttaaggtggtagataataagtgg

SEQ ID NO: 13841 - DNA, 25 bp, Probe Sequence
tatacataagtgagctgacatggtg

SEQ ID NO: 13842 - DNA, 25 bp, Probe Sequence
atatacataagtgagctgacatggt

SEQ ID NO: 13843 - DNA, 25 bp, Probe Sequence
tgatgtagaagcaaggtaatgtata

SEQ ID NO: 13844 - DNA, 25 bp, Probe Sequence
taatagtgatgtagaagcaaggtaa

SEQ ID NO: 13845 - DNA, 25 bp, Probe Sequence
gggacatagtattggaaggaaagtt

SEQ ID NO: 13846 - DNA, 25 bp, Probe Sequence
tgaaagtatattgggaagtgggaaa

SEQ ID NO: 13847 - DNA, 25 bp, Probe Sequence
ttgaaagtatattgggaagtgggaa

SEQ ID NO: 13848 - DNA, 25 bp, Probe Sequence
tttgaaagtatattgggaagtggga

SEQ ID NO: 13849 - DNA, 25 bp, Probe Sequence
tagggacatagtattggaaggaaag

SEQ ID NO: 13850 - DNA, 25 bp, Probe Sequence
agggacatagtattggaaggaaagt

SEQ ID NO: 13851 - DNA, 25 bp, Probe Sequence
ataatagtgatgtagaagcaaggta

SEQ ID NO: 13852 - DNA, 25 bp, Probe Sequence
tataatagtgatgtagaagcaaggt

SEQ ID NO: 13853 - DNA, 25 bp, Probe Sequence
ggacatagtattggaaggaaagttc

SEQ ID NO: 13854 - DNA, 25 bp, Probe Sequence
gaaagtatattgggaagtgggaaat

SEQ ID NO: 13855 - DNA, 25 bp, Probe Sequence
ggacttctattgcagtacattacgt

SEQ ID NO: 13856 - DNA, 25 bp, Probe Sequence
cattaaacctcactgaaacctgaaa

SEQ ID NO: 13857 - DNA, 25 bp, Probe Sequence
atagtatgtatacctggtgatcgtt

SEQ ID NO: 13858 - DNA, 25 bp, Probe Sequence
gcattaaacctcactgaaacctgaa

SEQ ID NO: 13859 - DNA, 25 bp, Probe Sequence
ccagacagactagggacttctattg

SEQ ID NO: 13860 - DNA, 25 bp, Probe Sequence
tatagtatgtatacctggtgatcgt

SEQ ID NO: 13861 - DNA, 25 bp, Probe Sequence
cagacagactagggacttctattgc

SEQ ID NO: 13862 - DNA, 25 bp, Probe Sequence
agggacttctattgcagtacattac

SEQ ID NO: 13863 - DNA, 25 bp, Probe Sequence
ctagggacttctattgcagtacatt

SEQ ID NO: 13864 - DNA, 25 bp, Probe Sequence
actagggacttctattgcagtacat

SEQ ID NO: 13865 - DNA, 25 bp, Probe Sequence
tagtatgtatacctggtgatcgttt

SEQ ID NO: 13866 - DNA, 25 bp, Probe Sequence
agactagggacttctattgcagtac

SEQ ID NO: 13867 - DNA, 25 bp, Probe Sequence
cagactagggacttctattgcagta

SEQ ID NO: 13868 - DNA, 25 bp, Probe Sequence
gacttctattgcagtacattacgta

SEQ ID NO: 13869 - DNA, 25 bp, Probe Sequence
gggacttctattgcagtacattacg

SEQ ID NO: 13870 - DNA, 25 bp, Probe Sequence
tagggacttctattgcagtacatta

SEQ ID NO: 13871 - DNA, 25 bp, Probe Sequence
gactagggacttctattgcagtaca

SEQ ID NO: 13872 - DNA, 25 bp, Probe Sequence
atatgccagacagactagggacttc

SEQ ID NO: 13873 - DNA, 25 bp, Probe Sequence
gccagacagactagggacttctatt

SEQ ID NO: 13874 - DNA, 25 bp, Probe Sequence
acgtatagtatgtatacctggtgat

SEQ ID NO: 13875 - DNA, 25 bp, Probe Sequence
gacagactagggacttctattgcag

SEQ ID NO: 13876 - DNA, 25 bp, Probe Sequence
acttctattgcagtacattacgtat

SEQ ID NO: 13877 - DNA, 25 bp, Probe Sequence
attaaacctcactgaaacctgaaaa

SEQ ID NO: 13878 - DNA, 25 bp, Probe Sequence
agacagactagggacttctattgca

SEQ ID NO: 13879 - DNA, 25 bp, Probe Sequence
atcaccatttcctcctttacctttc

SEQ ID NO: 13880 - DNA, 25 bp, Probe Sequence
agttcatcaccatttcctcctttac

SEQ ID NO: 13881 - DNA, 25 bp, Probe Sequence
cagttcatcaccatttcctccttta

SEQ ID NO: 13882 - DNA, 25 bp, Probe Sequence
catcaccatttcctcctttaccttt

SEQ ID NO: 13883 - DNA, 25 bp, Probe Sequence
tatagacattctcacataagcccag

SEQ ID NO: 13884 - DNA, 25 bp, Probe Sequence
gaggctgtaactgagagaaagattc

SEQ ID NO: 13885 - DNA, 25 bp, Probe Sequence
tgaggctgtaactgagagaaagatt

SEQ ID NO: 13886 - DNA, 25 bp, Probe Sequence
atatagacattctcacataagccca

SEQ ID NO: 13887 - DNA, 25 bp, Probe Sequence
ccatttcctcctttacctttcagtg

SEQ ID NO: 13888 - DNA, 25 bp, Probe Sequence
caccatttcctcctttacctttcag

SEQ ID NO: 13889 - DNA, 25 bp, Probe Sequence
tcaagagtgagatgtagaaagttgt

SEQ ID NO: 13890 - DNA, 25 bp, Probe Sequence
tcatcaccatttcctcctttacctt

SEQ ID NO: 13891 - DNA, 25 bp, Probe Sequence
ttcatcaccatttcctcctttacct

SEQ ID NO: 13892 - DNA, 25 bp, Probe Sequence
gttcatcaccatttcctcctttacc

SEQ ID NO: 13893 - DNA, 25 bp, Probe Sequence
cattctcacataagcccagttcatc

SEQ ID NO: 13894 - DNA, 25 bp, Probe Sequence
atagacattctcacataagcccagt

SEQ ID NO: 13895 - DNA, 25 bp, Probe Sequence
tagacattctcacataagcccagtt

SEQ ID NO: 13896 - DNA, 25 bp, Probe Sequence
accatttcctcctttacctttcagt

SEQ ID NO: 13897 - DNA, 25 bp, Probe Sequence
tcaccatttcctcctttacctttca

SEQ ID NO: 13898 - DNA, 25 bp, Probe Sequence
ctgaggctgtaactgagagaaagat

SEQ ID NO: 13899 - DNA, 25 bp, Probe Sequence
catttcctcctttacctttcagtgc

SEQ ID NO: 13900 - DNA, 25 bp, Probe Sequence
attctcacataagcccagttcatca

SEQ ID NO: 13901 - DNA, 25 bp, Probe Sequence
atcaagagtgagatgtagaaagttg

SEQ ID NO: 13902 - DNA, 25 bp, Probe Sequence
cataagcccagttcatcaccatttc

SEQ ID NO: 13903 - DNA, 25 bp, Probe Sequence
agctgtctacaatcctgtattcaag

SEQ ID NO: 13904 - DNA, 25 bp, Probe Sequence
gatagccccaaatgttaccaaatta

SEQ ID NO: 13905 - DNA, 25 bp, Probe Sequence
atagccccaaatgttaccaaattaa

SEQ ID NO: 13906 - DNA, 25 bp, Probe Sequence
gagaagatttgccaatggtgctttg

SEQ ID NO: 13907 - DNA, 25 bp, Probe Sequence
ggatagccccaaatgttaccaaatt

SEQ ID NO: 13908 - DNA, 25 bp, Probe Sequence
tagccccaaatgttaccaaattaac

SEQ ID NO: 13909 - DNA, 25 bp, Probe Sequence
caatggtgctttggatactcggatg

SEQ ID NO: 13910 - DNA, 25 bp, Probe Sequence
ggagaagatttgccaatggtgcttt

SEQ ID NO: 13911 - DNA, 25 bp, Probe Sequence
aatggtgctttggatactcggatgg

SEQ ID NO: 13912 - DNA, 25 bp, Probe Sequence
agtgaagggttttcaattcaatacg

SEQ ID NO: 13913 - DNA, 25 bp, Probe Sequence
ggagtgaagggttttcaattcaata

SEQ ID NO: 13914 - DNA, 25 bp, Probe Sequence
tggagtgaagggttttcaattcaat

SEQ ID NO: 13915 - DNA, 25 bp, Probe Sequence
atggagtgaagggttttcaattcaa

SEQ ID NO: 13916 - DNA, 25 bp, Probe Sequence
gtgaagggttttcaattcaatacgc

SEQ ID NO: 13917 - DNA, 25 bp, Probe Sequence
gagtgaagggttttcaattcaatac

SEQ ID NO: 13918 - DNA, 25 bp, Probe Sequence
gatggagtgaagggttttcaattca

SEQ ID NO: 13919 - DNA, 25 bp, Probe Sequence
ctttggatactcggatggagtgaag

SEQ ID NO: 13920 - DNA, 25 bp, Probe Sequence
cccaaatgttaccaaattaacagac

SEQ ID NO: 13921 - DNA, 25 bp, Probe Sequence
ggatggagtgaagggttttcaattc

SEQ ID NO: 13922 - DNA, 25 bp, Probe Sequence
gttttcaattcaatacgcgggatag

SEQ ID NO: 13923 - DNA, 25 bp, Probe Sequence
tggatggttttgtttattaaaagag

SEQ ID NO: 13924 - DNA, 25 bp, Probe Sequence
gatttgccaatggtgctttggatac

SEQ ID NO: 13925 - DNA, 25 bp, Probe Sequence
tttcaattcaatacgcgggatagcc

SEQ ID NO: 13926 - DNA, 25 bp, Probe Sequence
ggatggttttgtttattaaaagaga

SEQ ID NO: 13927 - DNA, 25 bp, Probe Sequence
catatttctgggagcactttgataa

SEQ ID NO: 13928 - DNA, 25 bp, Probe Sequence
tatttctgggagcactttgataagg

SEQ ID NO: 13929 - DNA, 25 bp, Probe Sequence
acctttgtgttggatgaatttaagc

SEQ ID NO: 13930 - DNA, 25 bp, Probe Sequence
atatttctgggagcactttgataag

SEQ ID NO: 13931 - DNA, 25 bp, Probe Sequence
gggtcattaaaggaaactgaacatt

SEQ ID NO: 13932 - DNA, 25 bp, Probe Sequence
gagtacctttgtgttggatgaattt

SEQ ID NO: 13933 - DNA, 25 bp, Probe Sequence
agagtacctttgtgttggatgaatt

SEQ ID NO: 13934 - DNA, 25 bp, Probe Sequence
tgaggaggagatggatgaatgtgag

SEQ ID NO: 13935 - DNA, 25 bp, Probe Sequence
ctgaggaggagatggatgaatgtga

SEQ ID NO: 13936 - DNA, 25 bp, Probe Sequence
aagagtacctttgtgttggatgaat

SEQ ID NO: 13937 - DNA, 25 bp, Probe Sequence
cctttgtgttggatgaatttaagcg

SEQ ID NO: 13938 - DNA, 25 bp, Probe Sequence
ggtcattaaaggaaactgaacattg

SEQ ID NO: 13939 - DNA, 25 bp, Probe Sequence
atttctgggagcactttgataagga

SEQ ID NO: 13940 - DNA, 25 bp, Probe Sequence
agtacctttgtgttggatgaattta

SEQ ID NO: 13941 - DNA, 25 bp, Probe Sequence
caagagtacctttgtgttggatgaa

SEQ ID NO: 13942 - DNA, 25 bp, Probe Sequence
gtcattaaaggaaactgaacattga

SEQ ID NO: 13943 - DNA, 25 bp, Probe Sequence
gtacctttgtgttggatgaatttaa

SEQ ID NO: 13944 - DNA, 25 bp, Probe Sequence
tacctttgtgttggatgaatttaag

SEQ ID NO: 13945 - DNA, 25 bp, Probe Sequence
ccatatttctgggagcactttgata

SEQ ID NO: 13946 - DNA, 25 bp, Probe Sequence
tttctgggagcactttgataaggac

SEQ ID NO: 13947 - DNA, 25 bp, Probe Sequence
tactccaatgaggacacactctctg

SEQ ID NO: 13948 - DNA, 25 bp, Probe Sequence
tcattaaaggaaactgaacattgaa

SEQ ID NO: 13949 - DNA, 25 bp, Probe Sequence
gtactccaatgaggacacactctct

SEQ ID NO: 13950 - DNA, 25 bp, Probe Sequence
cattaaaggaaactgaacattgaaa

SEQ ID NO: 13951 - DNA, 25 bp, Probe Sequence
tcaagtgtatcatatgcctagtacg

SEQ ID NO: 13952 - DNA, 25 bp, Probe Sequence
caagtgtatcatatgcctagtacgc

SEQ ID NO: 13953 - DNA, 25 bp, Probe Sequence
acatcaagtgtatcatatgcctagt

SEQ ID NO: 13954 - DNA, 25 bp, Probe Sequence
aagtgtatcatatgcctagtacgcc

SEQ ID NO: 13955 - DNA, 25 bp, Probe Sequence
atcaagtgtatcatatgcctagtac

SEQ ID NO: 13956 - DNA, 25 bp, Probe Sequence
tcaatgggtggagtatttacgttaa

SEQ ID NO: 13957 - DNA, 25 bp, Probe Sequence
catcaagtgtatcatatgcctagta

SEQ ID NO: 13958 - DNA, 25 bp, Probe Sequence
gtcaatgggtggagtatttacgtta

SEQ ID NO: 13959 - DNA, 25 bp, Probe Sequence
agtacatcaagtgtatcatatgcct

SEQ ID NO: 13960 - DNA, 25 bp, Probe Sequence
caatgggtggagtatttacgttaac

SEQ ID NO: 13961 - DNA, 25 bp, Probe Sequence
gtacatcaagtgtatcatatgccta

SEQ ID NO: 13962 - DNA, 25 bp, Probe Sequence
aatgggtggagtatttacgttaact

SEQ ID NO: 13963 - DNA, 25 bp, Probe Sequence
atgggtggagtatttacgttaactg

SEQ ID NO: 13964 - DNA, 25 bp, Probe Sequence
tacatcaagtgtatcatatgcctag

SEQ ID NO: 13965 - DNA, 25 bp, Probe Sequence
agtatttacgttaactgcccacttg

SEQ ID NO: 13966 - DNA, 25 bp, Probe Sequence
gtatttacgttaactgcccacttgg

SEQ ID NO: 13967 - DNA, 25 bp, Probe Sequence
ggagtatttacgttaactgcccact

SEQ ID NO: 13968 - DNA, 25 bp, Probe Sequence
catagtaccccataggactttccag

SEQ ID NO: 13969 - DNA, 25 bp, Probe Sequence
tgggtggagtatttacgttaactgc

SEQ ID NO: 13970 - DNA, 25 bp, Probe Sequence
atagtaccccataggactttccagt

SEQ ID NO: 13971 - DNA, 25 bp, Probe Sequence
agtgtatcatatgcctagtacgccc

SEQ ID NO: 13972 - DNA, 25 bp, Probe Sequence
tggagtatttacgttaactgcccac

SEQ ID NO: 13973 - DNA, 25 bp, Probe Sequence
gtggagtatttacgttaactgccca

SEQ ID NO: 13974 - DNA, 25 bp, Probe Sequence
ggtggagtatttacgttaactgccc

SEQ ID NO: 13975 - DNA, 25 bp, Probe Sequence
tagaagagaagagaactagaatggc

SEQ ID NO: 13976 - DNA, 25 bp, Probe Sequence
agattactcaacctctcagtgattc

SEQ ID NO: 13977 - DNA, 25 bp, Probe Sequence
cagattactcaacctctcagtgatt

SEQ ID NO: 13978 - DNA, 25 bp, Probe Sequence
gattactcaacctctcagtgattcc

SEQ ID NO: 13979 - DNA, 25 bp, Probe Sequence
tgtgatgttaggcagattactcaac

SEQ ID NO: 13980 - DNA, 25 bp, Probe Sequence
tactcaacctctcagtgattccatt

SEQ ID NO: 13981 - DNA, 25 bp, Probe Sequence
ttactcaacctctcagtgattccat

SEQ ID NO: 13982 - DNA, 25 bp, Probe Sequence
attactcaacctctcagtgattcca

SEQ ID NO: 13983 - DNA, 25 bp, Probe Sequence
gtgatgttaggcagattactcaacc

SEQ ID NO: 13984 - DNA, 25 bp, Probe Sequence
ctgtgatgttaggcagattactcaa

SEQ ID NO: 13985 - DNA, 25 bp, Probe Sequence
agaatagtaggtcatctcctctgag

SEQ ID NO: 13986 - DNA, 25 bp, Probe Sequence
atgtgtggcagaatagtaggtcatc

SEQ ID NO: 13987 - DNA, 25 bp, Probe Sequence
gatgttaggcagattactcaacctc

SEQ ID NO: 13988 - DNA, 25 bp, Probe Sequence
atgttaggcagattactcaacctct

SEQ ID NO: 13989 - DNA, 25 bp, Probe Sequence
gcagattactcaacctctcagtgat

SEQ ID NO: 13990 - DNA, 25 bp, Probe Sequence
tgatgttaggcagattactcaacct

SEQ ID NO: 13991 - DNA, 25 bp, Probe Sequence
gtgtggcagaatagtaggtcatctc

SEQ ID NO: 13992 - DNA, 25 bp, Probe Sequence
ttaggcagattactcaacctctcag

SEQ ID NO: 13993 - DNA, 25 bp, Probe Sequence
agtgattccatttctcgtctgtaaa

SEQ ID NO: 13994 - DNA, 25 bp, Probe Sequence
gttaggcagattactcaacctctca

SEQ ID NO: 13995 - DNA, 25 bp, Probe Sequence
tgttaggcagattactcaacctctc

SEQ ID NO: 13996 - DNA, 25 bp, Probe Sequence
atcagattccaaagaagtttccaga

SEQ ID NO: 13997 - DNA, 25 bp, Probe Sequence
catcagattccaaagaagtttccag

SEQ ID NO: 13998 - DNA, 25 bp, Probe Sequence
tcagattccaaagaagtttccagaa

SEQ ID NO: 13999 - DNA, 25 bp, Probe Sequence
gttgctacaagttctgctatctgaa

SEQ ID NO: 14000 - DNA, 25 bp, Probe Sequence
attcagttgctacaagttctgctat

SEQ ID NO: 14001 - DNA, 25 bp, Probe Sequence
agttgctacaagttctgctatctga

SEQ ID NO: 14002 - DNA, 25 bp, Probe Sequence
aattcagttgctacaagttctgcta

SEQ ID NO: 14003 - DNA, 25 bp, Probe Sequence
gaacactgatacaatatgatgaacc

SEQ ID NO: 14004 - DNA, 25 bp, Probe Sequence
ttcagttgctacaagttctgctatc

SEQ ID NO: 14005 - DNA, 25 bp, Probe Sequence
cagttgctacaagttctgctatctg

SEQ ID NO: 14006 - DNA, 25 bp, Probe Sequence
tcagttgctacaagttctgctatct

SEQ ID NO: 14007 - DNA, 25 bp, Probe Sequence
atgtttctgtttggtatctctcctt

SEQ ID NO: 14008 - DNA, 25 bp, Probe Sequence
acactgatacaatatgatgaaccca

SEQ ID NO: 14009 - DNA, 25 bp, Probe Sequence
aggagtaggagtgaaacatctatga

SEQ ID NO: 14010 - DNA, 25 bp, Probe Sequence
tgtttctgtttggtatctctccttc

SEQ ID NO: 14011 - DNA, 25 bp, Probe Sequence
caaggagtaggagtgaaacatctat

SEQ ID NO: 14012 - DNA, 25 bp, Probe Sequence
tttggtatctctccttcctttctct

SEQ ID NO: 14013 - DNA, 25 bp, Probe Sequence
gtttggtatctctccttcctttctc

SEQ ID NO: 14014 - DNA, 25 bp, Probe Sequence
aaggagtaggagtgaaacatctatg

SEQ ID NO: 14015 - DNA, 25 bp, Probe Sequence
ctgtttggtatctctccttcctttc

SEQ ID NO: 14016 - DNA, 25 bp, Probe Sequence
cagtgggttctatgttgagttcttt

SEQ ID NO: 14017 - DNA, 25 bp, Probe Sequence
ggagtaggagtgaaacatctatgat

SEQ ID NO: 14018 - DNA, 25 bp, Probe Sequence
tacaatatgatgaacccaagagtct

SEQ ID NO: 14019 - DNA, 25 bp, Probe Sequence
tgctacaagttctgctatctgaaat

SEQ ID NO: 14020 - DNA, 25 bp, Probe Sequence
ttgaataattcctaccaacaaggtt

SEQ ID NO: 14021 - DNA, 25 bp, Probe Sequence
gtatctctccttcctttctctgtca

SEQ ID NO: 14022 - DNA, 25 bp, Probe Sequence
tgtttggtatctctccttcctttct

SEQ ID NO: 14023 - DNA, 25 bp, Probe Sequence
gaacactcaagatccagaatatgct

SEQ ID NO: 14024 - DNA, 25 bp, Probe Sequence
atgaggcagatcacaacagtaatat

SEQ ID NO: 14025 - DNA, 25 bp, Probe Sequence
aggcagatcacaacagtaatattca

SEQ ID NO: 14026 - DNA, 25 bp, Probe Sequence
agatcacaacagtaatattcaggct

SEQ ID NO: 14027 - DNA, 25 bp, Probe Sequence
cagatcacaacagtaatattcaggc

SEQ ID NO: 14028 - DNA, 25 bp, Probe Sequence
gcagatcacaacagtaatattcagg

SEQ ID NO: 14029 - DNA, 25 bp, Probe Sequence
ggcagatcacaacagtaatattcag

SEQ ID NO: 14030 - DNA, 25 bp, Probe Sequence
gaggcagatcacaacagtaatattc

SEQ ID NO: 14031 - DNA, 25 bp, Probe Sequence
catgaggcagatcacaacagtaata

SEQ ID NO: 14032 - DNA, 25 bp, Probe Sequence
tgaggcagatcacaacagtaatatt

SEQ ID NO: 14033 - DNA, 25 bp, Probe Sequence
ctacaggaatctctggtcactcatt

SEQ ID NO: 14034 - DNA, 25 bp, Probe Sequence
aacactcaagatccagaatatgctg

SEQ ID NO: 14035 - DNA, 25 bp, Probe Sequence
gatcacaacagtaatattcaggcta

SEQ ID NO: 14036 - DNA, 25 bp, Probe Sequence
tacaggaatctctggtcactcattg

SEQ ID NO: 14037 - DNA, 25 bp, Probe Sequence
gaactacaggaatctctggtcactc

SEQ ID NO: 14038 - DNA, 25 bp, Probe Sequence
cactcaagatccagaatatgctgtg

SEQ ID NO: 14039 - DNA, 25 bp, Probe Sequence
acactcaagatccagaatatgctgt

SEQ ID NO: 14040 - DNA, 25 bp, Probe Sequence
ctaatggaggtggaacactcaagat

SEQ ID NO: 14041 - DNA, 25 bp, Probe Sequence
ggaacactcaagatccagaatatgc

SEQ ID NO: 14042 - DNA, 25 bp, Probe Sequence
ctgaactacaggaatctctggtcac

SEQ ID NO: 14043 - DNA, 25 bp, Probe Sequence
atcacaacagtaatattcaggctat

SEQ ID NO: 14044 - DNA, 25 bp, Probe Sequence
tcacaacagtaatattcaggctatt

SEQ ID NO: 14045 - DNA, 25 bp, Probe Sequence
actacaggaatctctggtcactcat

SEQ ID NO: 14046 - DNA, 25 bp, Probe Sequence
acaacagtaatattcaggctattct

SEQ ID NO: 14047 - DNA, 25 bp, Probe Sequence
aatgccctttggtcactgtaaatat

SEQ ID NO: 14048 - DNA, 25 bp, Probe Sequence
aaatgccctttggtcactgtaaata

SEQ ID NO: 14049 - DNA, 25 bp, Probe Sequence
gcattccttcaacagaacactttaa

SEQ ID NO: 14050 - DNA, 25 bp, Probe Sequence
ctctaagggtttctgtgattggatg

SEQ ID NO: 14051 - DNA, 25 bp, Probe Sequence
tctctaagggtttctgtgattggat

SEQ ID NO: 14052 - DNA, 25 bp, Probe Sequence
atgccctttggtcactgtaaatatg

SEQ ID NO: 14053 - DNA, 25 bp, Probe Sequence
ccctttggtcactgtaaatatgaat

SEQ ID NO: 14054 - DNA, 25 bp, Probe Sequence
acttctatttgtgggtactttagga

SEQ ID NO: 14055 - DNA, 25 bp, Probe Sequence
gtctctaagggtttctgtgattgga

SEQ ID NO: 14056 - DNA, 25 bp, Probe Sequence
ttccttcaacagaacactttaatga

SEQ ID NO: 14057 - DNA, 25 bp, Probe Sequence
gccctttggtcactgtaaatatgaa

SEQ ID NO: 14058 - DNA, 25 bp, Probe Sequence
taagggtttctgtgattggatggaa

SEQ ID NO: 14059 - DNA, 25 bp, Probe Sequence
ctaagggtttctgtgattggatgga

SEQ ID NO: 14060 - DNA, 25 bp, Probe Sequence
tctaagggtttctgtgattggatgg

SEQ ID NO: 14061 - DNA, 25 bp, Probe Sequence
attccttcaacagaacactttaatg

SEQ ID NO: 14062 - DNA, 25 bp, Probe Sequence
cattccttcaacagaacactttaat

SEQ ID NO: 14063 - DNA, 25 bp, Probe Sequence
cttctatttgtgggtactttaggaa

SEQ ID NO: 14064 - DNA, 25 bp, Probe Sequence
tgccctttggtcactgtaaatatga

SEQ ID NO: 14065 - DNA, 25 bp, Probe Sequence
tacttctatttgtgggtactttagg

SEQ ID NO: 14066 - DNA, 25 bp, Probe Sequence
ttctatttgtgggtactttaggaaa

SEQ ID NO: 14067 - DNA, 25 bp, Probe Sequence
cctttggtcactgtaaatatgaatt

SEQ ID NO: 14068 - DNA, 25 bp, Probe Sequence
tgcattccttcaacagaacacttta

SEQ ID NO: 14069 - DNA, 25 bp, Probe Sequence
cgtctctaagggtttctgtgattgg

SEQ ID NO: 14070 - DNA, 25 bp, Probe Sequence
ttggtcactgtaaatatgaattgtg

SEQ ID NO: 14071 - DNA, 25 bp, Probe Sequence
acctggaagcatatagatactaaca

SEQ ID NO: 14072 - DNA, 25 bp, Probe Sequence
tggaagcatatagatactaacaagc

SEQ ID NO: 14073 - DNA, 25 bp, Probe Sequence
ggcagtacaatctaccgtaattagt

SEQ ID NO: 14074 - DNA, 25 bp, Probe Sequence
tggcagtacaatctaccgtaattag

SEQ ID NO: 14075 - DNA, 25 bp, Probe Sequence
caatctaccgtaattagtcatcgct

SEQ ID NO: 14076 - DNA, 25 bp, Probe Sequence
ctatgtcggatctgaggtaatcaag

SEQ ID NO: 14077 - DNA, 25 bp, Probe Sequence
tctaccgtaattagtcatcgctatt

SEQ ID NO: 14078 - DNA, 25 bp, Probe Sequence
aatctaccgtaattagtcatcgcta

SEQ ID NO: 14079 - DNA, 25 bp, Probe Sequence
tatgtcggatctgaggtaatcaaga

SEQ ID NO: 14080 - DNA, 25 bp, Probe Sequence
acaatctaccgtaattagtcatcgc

SEQ ID NO: 14081 - DNA, 25 bp, Probe Sequence
atctaccgtaattagtcatcgctat

SEQ ID NO: 14082 - DNA, 25 bp, Probe Sequence
gcagtacaatctaccgtaattagtc

SEQ ID NO: 14083 - DNA, 25 bp, Probe Sequence
ccgtaattagtcatcgctattaacc

SEQ ID NO: 14084 - DNA, 25 bp, Probe Sequence
cctggaagcatatagatactaacaa

SEQ ID NO: 14085 - DNA, 25 bp, Probe Sequence
aacctggaagcatatagatactaac

SEQ ID NO: 14086 - DNA, 25 bp, Probe Sequence
caacctggaagcatatagatactaa

SEQ ID NO: 14087 - DNA, 25 bp, Probe Sequence
ttggcagtacaatctaccgtaatta

SEQ ID NO: 14088 - DNA, 25 bp, Probe Sequence
tgaggtaatcaagacagtacatctg

SEQ ID NO: 14089 - DNA, 25 bp, Probe Sequence
ggatctgaggtaatcaagacagtac

SEQ ID NO: 14090 - DNA, 25 bp, Probe Sequence
gaggtaatcaagacagtacatctga

SEQ ID NO: 14091 - DNA, 25 bp, Probe Sequence
ctgaggtaatcaagacagtacatct

SEQ ID NO: 14092 - DNA, 25 bp, Probe Sequence
tctgaggtaatcaagacagtacatc

SEQ ID NO: 14093 - DNA, 25 bp, Probe Sequence
gatctgaggtaatcaagacagtaca

SEQ ID NO: 14094 - DNA, 25 bp, Probe Sequence
accgtaattagtcatcgctattaac

SEQ ID NO: 14095 - DNA, 25 bp, Probe Sequence
atatctgtgctactactgtgctagg

SEQ ID NO: 14096 - DNA, 25 bp, Probe Sequence
gatatctgtgctactactgtgctag

SEQ ID NO: 14097 - DNA, 25 bp, Probe Sequence
ccagagtccttcctagtaattaacc

SEQ ID NO: 14098 - DNA, 25 bp, Probe Sequence
cagagtccttcctagtaattaacct

SEQ ID NO: 14099 - DNA, 25 bp, Probe Sequence
tccagagtccttcctagtaattaac

SEQ ID NO: 14100 - DNA, 25 bp, Probe Sequence
agtccttcctagtaattaacctccg

SEQ ID NO: 14101 - DNA, 25 bp, Probe Sequence
ctccagagtccttcctagtaattaa

SEQ ID NO: 14102 - DNA, 25 bp, Probe Sequence
ctaactccagagtccttcctagtaa

SEQ ID NO: 14103 - DNA, 25 bp, Probe Sequence
aactccagagtccttcctagtaatt

SEQ ID NO: 14104 - DNA, 25 bp, Probe Sequence
taactccagagtccttcctagtaat

SEQ ID NO: 14105 - DNA, 25 bp, Probe Sequence
actccagagtccttcctagtaatta

SEQ ID NO: 14106 - DNA, 25 bp, Probe Sequence
tctaactccagagtccttcctagta

SEQ ID NO: 14107 - DNA, 25 bp, Probe Sequence
ttacatggacaaggctaggaatcaa

SEQ ID NO: 14108 - DNA, 25 bp, Probe Sequence
gagtccttcctagtaattaacctcc

SEQ ID NO: 14109 - DNA, 25 bp, Probe Sequence
tatctgtgctactactgtgctaggt

SEQ ID NO: 14110 - DNA, 25 bp, Probe Sequence
agagtccttcctagtaattaacctc

SEQ ID NO: 14111 - DNA, 25 bp, Probe Sequence
agttaaacctgttgagatttgcttc

SEQ ID NO: 14112 - DNA, 25 bp, Probe Sequence
aaagttaaacctgttgagatttgct

SEQ ID NO: 14113 - DNA, 25 bp, Probe Sequence
ttgtctaactccagagtccttccta

SEQ ID NO: 14114 - DNA, 25 bp, Probe Sequence
ttaaacctgttgagatttgcttcct

SEQ ID NO: 14115 - DNA, 25 bp, Probe Sequence
gttaaacctgttgagatttgcttcc

SEQ ID NO: 14116 - DNA, 25 bp, Probe Sequence
aagttaaacctgttgagatttgctt

SEQ ID NO: 14117 - DNA, 25 bp, Probe Sequence
taaacctgttgagatttgcttcctg

SEQ ID NO: 14118 - DNA, 25 bp, Probe Sequence
gtctaactccagagtccttcctagt

SEQ ID NO: 14119 - DNA, 25 bp, Probe Sequence
atatactgcctgcttctatgatgtt

SEQ ID NO: 14120 - DNA, 25 bp, Probe Sequence
ggatatacatatactgcctgcttct

SEQ ID NO: 14121 - DNA, 25 bp, Probe Sequence
cttctcagtcctcctaattggtatg

SEQ ID NO: 14122 - DNA, 25 bp, Probe Sequence
tcagtcctcctaattggtatgtctt

SEQ ID NO: 14123 - DNA, 25 bp, Probe Sequence
ttctcagtcctcctaattggtatgt

SEQ ID NO: 14124 - DNA, 25 bp, Probe Sequence
ctcagtcctcctaattggtatgtct

SEQ ID NO: 14125 - DNA, 25 bp, Probe Sequence
tctcagtcctcctaattggtatgtc

SEQ ID NO: 14126 - DNA, 25 bp, Probe Sequence
acttctcagtcctcctaattggtat

SEQ ID NO: 14127 - DNA, 25 bp, Probe Sequence
ttagtctaactcctcaaccatctgt

SEQ ID NO: 14128 - DNA, 25 bp, Probe Sequence
agattgacagatggttgtagtaaca

SEQ ID NO: 14129 - DNA, 25 bp, Probe Sequence
tagtctaactcctcaaccatctgtg

SEQ ID NO: 14130 - DNA, 25 bp, Probe Sequence
cagattgacagatggttgtagtaac

SEQ ID NO: 14131 - DNA, 25 bp, Probe Sequence
tcagattgacagatggttgtagtaa

SEQ ID NO: 14132 - DNA, 25 bp, Probe Sequence
ttcagattgacagatggttgtagta

SEQ ID NO: 14133 - DNA, 25 bp, Probe Sequence
catatactgcctgcttctatgatgt

SEQ ID NO: 14134 - DNA, 25 bp, Probe Sequence
acatatactgcctgcttctatgatg

SEQ ID NO: 14135 - DNA, 25 bp, Probe Sequence
aggatatacatatactgcctgcttc

SEQ ID NO: 14136 - DNA, 25 bp, Probe Sequence
aaggatatacatatactgcctgctt

SEQ ID NO: 14137 - DNA, 25 bp, Probe Sequence
tacatatactgcctgcttctatgat

SEQ ID NO: 14138 - DNA, 25 bp, Probe Sequence
atacatatactgcctgcttctatga

SEQ ID NO: 14139 - DNA, 25 bp, Probe Sequence
gatatacatatactgcctgcttcta

SEQ ID NO: 14140 - DNA, 25 bp, Probe Sequence
tatactgcctgcttctatgatgttt

SEQ ID NO: 14141 - DNA, 25 bp, Probe Sequence
ctatcccagagtcagtagtccttta

SEQ ID NO: 14142 - DNA, 25 bp, Probe Sequence
cgtaaggattcgtaggattgatttc

SEQ ID NO: 14143 - DNA, 25 bp, Probe Sequence
gaataatagaggaacttacggcact

SEQ ID NO: 14144 - DNA, 25 bp, Probe Sequence
tgaataatagaggaacttacggcac

SEQ ID NO: 14145 - DNA, 25 bp, Probe Sequence
atgaataatagaggaacttacggca

SEQ ID NO: 14146 - DNA, 25 bp, Probe Sequence
ttcaagtgctctcatagttctatcc

SEQ ID NO: 14147 - DNA, 25 bp, Probe Sequence
aagtgctctcatagttctatcctct

SEQ ID NO: 14148 - DNA, 25 bp, Probe Sequence
caagtgctctcatagttctatcctc

SEQ ID NO: 14149 - DNA, 25 bp, Probe Sequence
agtgctctcatagttctatcctcta

SEQ ID NO: 14150 - DNA, 25 bp, Probe Sequence
tcaagtgctctcatagttctatcct

SEQ ID NO: 14151 - DNA, 25 bp, Probe Sequence
gtgctctcatagttctatcctctaa

SEQ ID NO: 14152 - DNA, 25 bp, Probe Sequence
aataatagaggaacttacggcactc

SEQ ID NO: 14153 - DNA, 25 bp, Probe Sequence
tatgaataatagaggaacttacggc

SEQ ID NO: 14154 - DNA, 25 bp, Probe Sequence
gtaaggcagatgctaattataaggc

SEQ ID NO: 14155 - DNA, 25 bp, Probe Sequence
tgctctcatagttctatcctctaat

SEQ ID NO: 14156 - DNA, 25 bp, Probe Sequence
tgtaaggcagatgctaattataagg

SEQ ID NO: 14157 - DNA, 25 bp, Probe Sequence
ttggaaatactttggtctctgaact

SEQ ID NO: 14158 - DNA, 25 bp, Probe Sequence
tctactgtaaggcagatgctaatta

SEQ ID NO: 14159 - DNA, 25 bp, Probe Sequence
tttggaaatactttggtctctgaac

SEQ ID NO: 14160 - DNA, 25 bp, Probe Sequence
ggaaatactttggtctctgaactgt

SEQ ID NO: 14161 - DNA, 25 bp, Probe Sequence
tggaaatactttggtctctgaactg

SEQ ID NO: 14162 - DNA, 25 bp, Probe Sequence
gctctcatagttctatcctctaatt

SEQ ID NO: 14163 - DNA, 25 bp, Probe Sequence
tacctggaggactaaatgtagatgt

SEQ ID NO: 14164 - DNA, 25 bp, Probe Sequence
ttgttacctggaggactaaatgtag

SEQ ID NO: 14165 - DNA, 25 bp, Probe Sequence
ctttgttacctggaggactaaatgt

SEQ ID NO: 14166 - DNA, 25 bp, Probe Sequence
tgttacctggaggactaaatgtaga

SEQ ID NO: 14167 - DNA, 25 bp, Probe Sequence
acagttatatgacagtggcaatgaa

SEQ ID NO: 14168 - DNA, 25 bp, Probe Sequence
ttctgtgtattggtggctaacttag

SEQ ID NO: 14169 - DNA, 25 bp, Probe Sequence
ctgtgtattggtggctaacttagtc

SEQ ID NO: 14170 - DNA, 25 bp, Probe Sequence
acagttggaatggtcaagttatact

SEQ ID NO: 14171 - DNA, 25 bp, Probe Sequence
aacagttggaatggtcaagttatac

SEQ ID NO: 14172 - DNA, 25 bp, Probe Sequence
tgaacagttggaatggtcaagttat

SEQ ID NO: 14173 - DNA, 25 bp, Probe Sequence
gtcaattccatcttactcttcttca

SEQ ID NO: 14174 - DNA, 25 bp, Probe Sequence
gaacagttggaatggtcaagttata

SEQ ID NO: 14175 - DNA, 25 bp, Probe Sequence
gtgtattggtggctaacttagtcaa

SEQ ID NO: 14176 - DNA, 25 bp, Probe Sequence
tctgtgtattggtggctaacttagt

SEQ ID NO: 14177 - DNA, 25 bp, Probe Sequence
ttgaacagacttgaacagttggaat

SEQ ID NO: 14178 - DNA, 25 bp, Probe Sequence
ggctaacttagtcaattccatctta

SEQ ID NO: 14179 - DNA, 25 bp, Probe Sequence
tgtgtattggtggctaacttagtca

SEQ ID NO: 14180 - DNA, 25 bp, Probe Sequence
tgaacagacttgaacagttggaatg

SEQ ID NO: 14181 - DNA, 25 bp, Probe Sequence
tacacagttatatgacagtggcaat

SEQ ID NO: 14182 - DNA, 25 bp, Probe Sequence
atacacagttatatgacagtggcaa

SEQ ID NO: 14183 - DNA, 25 bp, Probe Sequence
tcaattccatcttactcttcttcaa

SEQ ID NO: 14184 - DNA, 25 bp, Probe Sequence
agtcaattccatcttactcttcttc

SEQ ID NO: 14185 - DNA, 25 bp, Probe Sequence
tatacacagttatatgacagtggca

SEQ ID NO: 14186 - DNA, 25 bp, Probe Sequence
ttaggattgattacataggcactcc

SEQ ID NO: 14187 - DNA, 25 bp, Probe Sequence
cacagttatatgacagtggcaatga

SEQ ID NO: 14188 - DNA, 25 bp, Probe Sequence
gctaacttagtcaattccatcttac

SEQ ID NO: 14189 - DNA, 25 bp, Probe Sequence
acacagttatatgacagtggcaatg

SEQ ID NO: 14190 - DNA, 25 bp, Probe Sequence
tggctaacttagtcaattccatctt

SEQ ID NO: 14191 - DNA, 25 bp, Probe Sequence
cttcagactcctccttcttctcatc

SEQ ID NO: 14192 - DNA, 25 bp, Probe Sequence
tcagactcctccttcttctcatctt

SEQ ID NO: 14193 - DNA, 25 bp, Probe Sequence
ttcagactcctccttcttctcatct

SEQ ID NO: 14194 - DNA, 25 bp, Probe Sequence
tcttcagactcctccttcttctcat

SEQ ID NO: 14195 - DNA, 25 bp, Probe Sequence
ttcttctcatctttcttctcctctg

SEQ ID NO: 14196 - DNA, 25 bp, Probe Sequence
ccttcttctcatctttcttctcctc

SEQ ID NO: 14197 - DNA, 25 bp, Probe Sequence
ctccttcttctcatctttcttctcc

SEQ ID NO: 14198 - DNA, 25 bp, Probe Sequence
cctccttcttctcatctttcttctc

SEQ ID NO: 14199 - DNA, 25 bp, Probe Sequence
ctcctccttcttctcatctttcttc

SEQ ID NO: 14200 - DNA, 25 bp, Probe Sequence
cttcttctcatctttcttctcctct

SEQ ID NO: 14201 - DNA, 25 bp, Probe Sequence
tccttcttctcatctttcttctcct

SEQ ID NO: 14202 - DNA, 25 bp, Probe Sequence
tcctccttcttctcatctttcttct

SEQ ID NO: 14203 - DNA, 25 bp, Probe Sequence
actcctccttcttctcatctttctt

SEQ ID NO: 14204 - DNA, 25 bp, Probe Sequence
ctcttcagactcctccttcttctca

SEQ ID NO: 14205 - DNA, 25 bp, Probe Sequence
actcttcagactcctccttcttctc

SEQ ID NO: 14206 - DNA, 25 bp, Probe Sequence
gactcttcagactcctccttcttct

SEQ ID NO: 14207 - DNA, 25 bp, Probe Sequence
gactcctccttcttctcatctttct

SEQ ID NO: 14208 - DNA, 25 bp, Probe Sequence
agactcctccttcttctcatctttc

SEQ ID NO: 14209 - DNA, 25 bp, Probe Sequence
tgactcttcagactcctccttcttc

SEQ ID NO: 14210 - DNA, 25 bp, Probe Sequence
cttctcatctttcttctcctctgct

SEQ ID NO: 14211 - DNA, 25 bp, Probe Sequence
tcttctcatctttcttctcctctgc

SEQ ID NO: 14212 - DNA, 25 bp, Probe Sequence
cagactcctccttcttctcatcttt

SEQ ID NO: 14213 - DNA, 25 bp, Probe Sequence
ttctcatctttcttctcctctgctg

SEQ ID NO: 14214 - DNA, 25 bp, Probe Sequence
caggggagcaggaatttaatcaaaa

SEQ ID NO: 14215 - DNA, 25 bp, Probe Sequence
ttagcataatgtgaggaggtggaga

SEQ ID NO: 14216 - DNA, 25 bp, Probe Sequence
gttagcataatgtgaggaggtggag

SEQ ID NO: 14217 - DNA, 25 bp, Probe Sequence
gagagagcaaataaagacctgagaa

SEQ ID NO: 14218 - DNA, 25 bp, Probe Sequence
agagagcaaataaagacctgagaac

SEQ ID NO: 14219 - DNA, 25 bp, Probe Sequence
ctgttagcataatgtgaggaggtgg

SEQ ID NO: 14220 - DNA, 25 bp, Probe Sequence
caaataaagacctgagaaccttcca

SEQ ID NO: 14221 - DNA, 25 bp, Probe Sequence
tgagagagcaaataaagacctgaga

SEQ ID NO: 14222 - DNA, 25 bp, Probe Sequence
agcaaataaagacctgagaaccttc

SEQ ID NO: 14223 - DNA, 25 bp, Probe Sequence
gagcaaataaagacctgagaacctt

SEQ ID NO: 14224 - DNA, 25 bp, Probe Sequence
gagagcaaataaagacctgagaacc

SEQ ID NO: 14225 - DNA, 25 bp, Probe Sequence
tagcataatgtgaggaggtggagag

SEQ ID NO: 14226 - DNA, 25 bp, Probe Sequence
agagcaaataaagacctgagaacct

SEQ ID NO: 14227 - DNA, 25 bp, Probe Sequence
tgttagcataatgtgaggaggtgga

SEQ ID NO: 14228 - DNA, 25 bp, Probe Sequence
gcaaataaagacctgagaaccttcc

SEQ ID NO: 14229 - DNA, 25 bp, Probe Sequence
ataatgtgaggaggtggagagacag

SEQ ID NO: 14230 - DNA, 25 bp, Probe Sequence
cctgttagcataatgtgaggaggtg

SEQ ID NO: 14231 - DNA, 25 bp, Probe Sequence
cataatgtgaggaggtggagagaca

SEQ ID NO: 14232 - DNA, 25 bp, Probe Sequence
ctgaatgtgtctgcgttcctgttag

SEQ ID NO: 14233 - DNA, 25 bp, Probe Sequence
gatgtctccatctctgtctcaactt

SEQ ID NO: 14234 - DNA, 25 bp, Probe Sequence
gcataatgtgaggaggtggagagac

SEQ ID NO: 14235 - DNA, 25 bp, Probe Sequence
gcgttcctgttagcataatgtgagg

SEQ ID NO: 14236 - DNA, 25 bp, Probe Sequence
agcataatgtgaggaggtggagaga

SEQ ID NO: 14237 - DNA, 25 bp, Probe Sequence
gttcctgttagcataatgtgaggag

SEQ ID NO: 14238 - DNA, 25 bp, Probe Sequence
tgcgttcctgttagcataatgtgag

SEQ ID NO: 14239 - DNA, 25 bp, Probe Sequence
aaccaagcataatatagcaaggact

SEQ ID NO: 14240 - DNA, 25 bp, Probe Sequence
accaagcataatatagcaaggacta

SEQ ID NO: 14241 - DNA, 25 bp, Probe Sequence
taaccaagcataatatagcaaggac

SEQ ID NO: 14242 - DNA, 25 bp, Probe Sequence
aagcataatatagcaaggactaacc

SEQ ID NO: 14243 - DNA, 25 bp, Probe Sequence
ccaagcataatatagcaaggactaa

SEQ ID NO: 14244 - DNA, 25 bp, Probe Sequence
ataaccaagcataatatagcaagga

SEQ ID NO: 14245 - DNA, 25 bp, Probe Sequence
caagcataatatagcaaggactaac

SEQ ID NO: 14246 - DNA, 25 bp, Probe Sequence
tcccaaacatataactgaactcctc

SEQ ID NO: 14247 - DNA, 25 bp, Probe Sequence
agcataatatagcaaggactaaccc

SEQ ID NO: 14248 - DNA, 25 bp, Probe Sequence
atcccaaacatataactgaactcct

SEQ ID NO: 14249 - DNA, 25 bp, Probe Sequence
aatcccaaacatataactgaactcc

SEQ ID NO: 14250 - DNA, 25 bp, Probe Sequence
cccaaacatataactgaactcctca

SEQ ID NO: 14251 - DNA, 25 bp, Probe Sequence
tagatatagtaccgcaagggaaaga

SEQ ID NO: 14252 - DNA, 25 bp, Probe Sequence
caatagatatagtaccgcaagggaa

SEQ ID NO: 14253 - DNA, 25 bp, Probe Sequence
atagatatagtaccgcaagggaaag

SEQ ID NO: 14254 - DNA, 25 bp, Probe Sequence
gatatagtaccgcaagggaaagatg

SEQ ID NO: 14255 - DNA, 25 bp, Probe Sequence
agatatagtaccgcaagggaaagat

SEQ ID NO: 14256 - DNA, 25 bp, Probe Sequence
aatagatatagtaccgcaagggaaa

SEQ ID NO: 14257 - DNA, 25 bp, Probe Sequence
atatagtaccgcaagggaaagatga

SEQ ID NO: 14258 - DNA, 25 bp, Probe Sequence
tatagtaccgcaagggaaagatgaa

SEQ ID NO: 14259 - DNA, 25 bp, Probe Sequence
tataaccaagcataatatagcaagg

SEQ ID NO: 14260 - DNA, 25 bp, Probe Sequence
actttccacaatgtcgtaacaactc

SEQ ID NO: 14261 - DNA, 25 bp, Probe Sequence
atagtaccgcaagggaaagatgaaa

SEQ ID NO: 14262 - DNA, 25 bp, Probe Sequence
gactttccacaatgtcgtaacaact

SEQ ID NO: 14263 - DNA, 25 bp, Probe Sequence
ttctggaagaggagattaccaagtt

SEQ ID NO: 14264 - DNA, 25 bp, Probe Sequence
aagaggagattaccaagtttgagag

SEQ ID NO: 14265 - DNA, 25 bp, Probe Sequence
gaagaggagattaccaagtttgaga

SEQ ID NO: 14266 - DNA, 25 bp, Probe Sequence
gacaatgagaccaatatagcccaat

SEQ ID NO: 14267 - DNA, 25 bp, Probe Sequence
acaatgagaccaatatagcccaatt

SEQ ID NO: 14268 - DNA, 25 bp, Probe Sequence
ggaagaggagattaccaagtttgag

SEQ ID NO: 14269 - DNA, 25 bp, Probe Sequence
aaactttctggaagaggagattacc

SEQ ID NO: 14270 - DNA, 25 bp, Probe Sequence
acaaactttctggaagaggagatta

SEQ ID NO: 14271 - DNA, 25 bp, Probe Sequence
caaactttctggaagaggagattac

SEQ ID NO: 14272 - DNA, 25 bp, Probe Sequence
gacaaactttctggaagaggagatt

SEQ ID NO: 14273 - DNA, 25 bp, Probe Sequence
agaggagattaccaagtttgagagc

SEQ ID NO: 14274 - DNA, 25 bp, Probe Sequence
ggacaatgagaccaatatagcccaa

SEQ ID NO: 14275 - DNA, 25 bp, Probe Sequence
ggacaaactttctggaagaggagat

SEQ ID NO: 14276 - DNA, 25 bp, Probe Sequence
attaccaagtttgagagcgtgtgta

SEQ ID NO: 14277 - DNA, 25 bp, Probe Sequence
ctttctggaagaggagattaccaag

SEQ ID NO: 14278 - DNA, 25 bp, Probe Sequence
ctggaagaggagattaccaagtttg

SEQ ID NO: 14279 - DNA, 25 bp, Probe Sequence
tctggaagaggagattaccaagttt

SEQ ID NO: 14280 - DNA, 25 bp, Probe Sequence
tttctggaagaggagattaccaagt

SEQ ID NO: 14281 - DNA, 25 bp, Probe Sequence
actttctggaagaggagattaccaa

SEQ ID NO: 14282 - DNA, 25 bp, Probe Sequence
aactttctggaagaggagattacca

SEQ ID NO: 14283 - DNA, 25 bp, Probe Sequence
ctgaggtggtatgtggagaagaagg

SEQ ID NO: 14284 - DNA, 25 bp, Probe Sequence
tggaagaggagattaccaagtttga

SEQ ID NO: 14285 - DNA, 25 bp, Probe Sequence
gagattaccaagtttgagagcgtgt

SEQ ID NO: 14286 - DNA, 25 bp, Probe Sequence
ttaccaagtttgagagcgtgtgtag

SEQ ID NO: 14287 - DNA, 25 bp, Probe Sequence
gactttcctactggcagtacatcta

SEQ ID NO: 14288 - DNA, 25 bp, Probe Sequence
cctactggcagtacatctacgtatt

SEQ ID NO: 14289 - DNA, 25 bp, Probe Sequence
ttcctactggcagtacatctacgta

SEQ ID NO: 14290 - DNA, 25 bp, Probe Sequence
cataagccgcaagacatgacgttag

SEQ ID NO: 14291 - DNA, 25 bp, Probe Sequence
ctttcctactggcagtacatctacg

SEQ ID NO: 14292 - DNA, 25 bp, Probe Sequence
tttcctactggcagtacatctacgt

SEQ ID NO: 14293 - DNA, 25 bp, Probe Sequence
gcaagacatgacgttagggactttc

SEQ ID NO: 14294 - DNA, 25 bp, Probe Sequence
caagacatgacgttagggactttcc

SEQ ID NO: 14295 - DNA, 25 bp, Probe Sequence
aagacatgacgttagggactttcct

SEQ ID NO: 14296 - DNA, 25 bp, Probe Sequence
ggactttcctactggcagtacatct

SEQ ID NO: 14297 - DNA, 25 bp, Probe Sequence
catgacgttagggactttcctactg

SEQ ID NO: 14298 - DNA, 25 bp, Probe Sequence
gacatgacgttagggactttcctac

SEQ ID NO: 14299 - DNA, 25 bp, Probe Sequence
agacatgacgttagggactttccta

SEQ ID NO: 14300 - DNA, 25 bp, Probe Sequence
acatgacgttagggactttcctact

SEQ ID NO: 14301 - DNA, 25 bp, Probe Sequence
ttagggactttcctactggcagtac

SEQ ID NO: 14302 - DNA, 25 bp, Probe Sequence
gttagggactttcctactggcagta

SEQ ID NO: 14303 - DNA, 25 bp, Probe Sequence
atgacgttagggactttcctactgg

SEQ ID NO: 14304 - DNA, 25 bp, Probe Sequence
gggactttcctactggcagtacatc

SEQ ID NO: 14305 - DNA, 25 bp, Probe Sequence
agggactttcctactggcagtacat

SEQ ID NO: 14306 - DNA, 25 bp, Probe Sequence
tagggactttcctactggcagtaca

SEQ ID NO: 14307 - DNA, 25 bp, Probe Sequence
cctgtatcaagtgtctcagtgtata

SEQ ID NO: 14308 - DNA, 25 bp, Probe Sequence
tgtatcaagtgtctcagtgtatatt

SEQ ID NO: 14309 - DNA, 25 bp, Probe Sequence
ctcttacattgatattcccagcgta

SEQ ID NO: 14310 - DNA, 25 bp, Probe Sequence
acattgatattcccagcgtaaattg

SEQ ID NO: 14311 - DNA, 25 bp, Probe Sequence
gcctgtatcaagtgtctcagtgtat

SEQ ID NO: 14312 - DNA, 25 bp, Probe Sequence
actccatttaccgtgatgtgaatat

SEQ ID NO: 14313 - DNA, 25 bp, Probe Sequence
atactccatttaccgtgatgtgaat

SEQ ID NO: 14314 - DNA, 25 bp, Probe Sequence
tactccatttaccgtgatgtgaata

SEQ ID NO: 14315 - DNA, 25 bp, Probe Sequence
gatactccatttaccgtgatgtgaa

SEQ ID NO: 14316 - DNA, 25 bp, Probe Sequence
ctgtatcaagtgtctcagtgtatat

SEQ ID NO: 14317 - DNA, 25 bp, Probe Sequence
aacacaaagaataaatgcttgaggg

SEQ ID NO: 14318 - DNA, 25 bp, Probe Sequence
tcactcttacattgatattcccagc

SEQ ID NO: 14319 - DNA, 25 bp, Probe Sequence
cactcttacattgatattcccagcg

SEQ ID NO: 14320 - DNA, 25 bp, Probe Sequence
tacattgatattcccagcgtaaatt

SEQ ID NO: 14321 - DNA, 25 bp, Probe Sequence
actcttacattgatattcccagcgt

SEQ ID NO: 14322 - DNA, 25 bp, Probe Sequence
cttcttcatagccttggaataccct

SEQ ID NO: 14323 - DNA, 25 bp, Probe Sequence
tttaccgtgatgtgaatattaccca

SEQ ID NO: 14324 - DNA, 25 bp, Probe Sequence
ttcttcatagccttggaataccctg

SEQ ID NO: 14325 - DNA, 25 bp, Probe Sequence
taggccattataatccagcttcttc

SEQ ID NO: 14326 - DNA, 25 bp, Probe Sequence
cataggccattataatccagcttct

SEQ ID NO: 14327 - DNA, 25 bp, Probe Sequence
ataggccattataatccagcttctt

SEQ ID NO: 14328 - DNA, 25 bp, Probe Sequence
taacacaaagaataaatgcttgagg

SEQ ID NO: 14329 - DNA, 25 bp, Probe Sequence
taccgtgatgtgaatattacccatt

SEQ ID NO: 14330 - DNA, 25 bp, Probe Sequence
ttaccgtgatgtgaatattacccat

SEQ ID NO: 14331 - DNA, 25 bp, Probe Sequence
atgctcgtgtcctcaattctaatat

SEQ ID NO: 14332 - DNA, 25 bp, Probe Sequence
aatgctcgtgtcctcaattctaata

SEQ ID NO: 14333 - DNA, 25 bp, Probe Sequence
taatgctcgtgtcctcaattctaat

SEQ ID NO: 14334 - DNA, 25 bp, Probe Sequence
gctcgtgtcctcaattctaatatca

SEQ ID NO: 14335 - DNA, 25 bp, Probe Sequence
tgctcgtgtcctcaattctaatatc

SEQ ID NO: 14336 - DNA, 25 bp, Probe Sequence
ctaatgctcgtgtcctcaattctaa

SEQ ID NO: 14337 - DNA, 25 bp, Probe Sequence
ctcgtgtcctcaattctaatatcaa

SEQ ID NO: 14338 - DNA, 25 bp, Probe Sequence
actaatgctcgtgtcctcaattcta

SEQ ID NO: 14339 - DNA, 25 bp, Probe Sequence
ttatcagttccagagtgctacttat

SEQ ID NO: 14340 - DNA, 25 bp, Probe Sequence
atcagttccagagtgctacttatat

SEQ ID NO: 14341 - DNA, 25 bp, Probe Sequence
ccagagtgctacttatatagagagg

SEQ ID NO: 14342 - DNA, 25 bp, Probe Sequence
tcgtgtcctcaattctaatatcaat

SEQ ID NO: 14343 - DNA, 25 bp, Probe Sequence
tatcagttccagagtgctacttata

SEQ ID NO: 14344 - DNA, 25 bp, Probe Sequence
aactaatgctcgtgtcctcaattct

SEQ ID NO: 14345 - DNA, 25 bp, Probe Sequence
tattggaactgagcaagcctcttaa

SEQ ID NO: 14346 - DNA, 25 bp, Probe Sequence
ttattggaactgagcaagcctctta

SEQ ID NO: 14347 - DNA, 25 bp, Probe Sequence
cagagtgctacttatatagagaggt

SEQ ID NO: 14348 - DNA, 25 bp, Probe Sequence
tcagttccagagtgctacttatata

SEQ ID NO: 14349 - DNA, 25 bp, Probe Sequence
tccagagtgctacttatatagagag

SEQ ID NO: 14350 - DNA, 25 bp, Probe Sequence
cagttccagagtgctacttatatag

SEQ ID NO: 14351 - DNA, 25 bp, Probe Sequence
tatttgtcagtgttggtagtggaat

SEQ ID NO: 14352 - DNA, 25 bp, Probe Sequence
ttatttgtcagtgttggtagtggaa

SEQ ID NO: 14353 - DNA, 25 bp, Probe Sequence
tttatttgtcagtgttggtagtgga

SEQ ID NO: 14354 - DNA, 25 bp, Probe Sequence
ataaactaatgctcgtgtcctcaat

SEQ ID NO: 14355 - DNA, 25 bp, Probe Sequence
taaccagtccttcgtattctcgtat

SEQ ID NO: 14356 - DNA, 25 bp, Probe Sequence
gcctgaggtattgtgaagattagtt

SEQ ID NO: 14357 - DNA, 25 bp, Probe Sequence
cctgaggtattgtgaagattagttc

SEQ ID NO: 14358 - DNA, 25 bp, Probe Sequence
gtaaccagtccttcgtattctcgta

SEQ ID NO: 14359 - DNA, 25 bp, Probe Sequence
aaccagtccttcgtattctcgtatc

SEQ ID NO: 14360 - DNA, 25 bp, Probe Sequence
tgtgtaaccagtccttcgtattctc

SEQ ID NO: 14361 - DNA, 25 bp, Probe Sequence
accagtccttcgtattctcgtatct

SEQ ID NO: 14362 - DNA, 25 bp, Probe Sequence
gtattctcgtatctgccatgagttc

SEQ ID NO: 14363 - DNA, 25 bp, Probe Sequence
tattctcgtatctgccatgagttca

SEQ ID NO: 14364 - DNA, 25 bp, Probe Sequence
gggtgagggaataaagaactacaaa

SEQ ID NO: 14365 - DNA, 25 bp, Probe Sequence
aacaagtgagaacatacattaacaa

SEQ ID NO: 14366 - DNA, 25 bp, Probe Sequence
gaagggtgagggaataaagaactac

SEQ ID NO: 14367 - DNA, 25 bp, Probe Sequence
ctgtgtaaccagtccttcgtattct

SEQ ID NO: 14368 - DNA, 25 bp, Probe Sequence
cccaaacaagtgagaacatacatta

SEQ ID NO: 14369 - DNA, 25 bp, Probe Sequence
gtgtaaccagtccttcgtattctcg

SEQ ID NO: 14370 - DNA, 25 bp, Probe Sequence
cttcgtattctcgtatctgccatga

SEQ ID NO: 14371 - DNA, 25 bp, Probe Sequence
agggtgagggaataaagaactacaa

SEQ ID NO: 14372 - DNA, 25 bp, Probe Sequence
aagggtgagggaataaagaactaca

SEQ ID NO: 14373 - DNA, 25 bp, Probe Sequence
ccagtccttcgtattctcgtatctg

SEQ ID NO: 14374 - DNA, 25 bp, Probe Sequence
ggtgagggaataaagaactacaaat

SEQ ID NO: 14375 - DNA, 25 bp, Probe Sequence
ggaagggtgagggaataaagaacta

SEQ ID NO: 14376 - DNA, 25 bp, Probe Sequence
tctcgtatctgccatgagttcaatt

SEQ ID NO: 14377 - DNA, 25 bp, Probe Sequence
ttctcgtatctgccatgagttcaat

SEQ ID NO: 14378 - DNA, 25 bp, Probe Sequence
attctcgtatctgccatgagttcaa

SEQ ID NO: 14379 - DNA, 25 bp, Probe Sequence
attaggaacttattggaactggagc

SEQ ID NO: 14380 - DNA, 25 bp, Probe Sequence
ttaagagcgatgacctagagtatct

SEQ ID NO: 14381 - DNA, 25 bp, Probe Sequence
ttaggaacttattggaactggagca

SEQ ID NO: 14382 - DNA, 25 bp, Probe Sequence
aattaggaacttattggaactggag

SEQ ID NO: 14383 - DNA, 25 bp, Probe Sequence
taagagcgatgacctagagtatctg

SEQ ID NO: 14384 - DNA, 25 bp, Probe Sequence
cgatgacctagagtatctggaagaa

SEQ ID NO: 14385 - DNA, 25 bp, Probe Sequence
taggaacttattggaactggagcaa

SEQ ID NO: 14386 - DNA, 25 bp, Probe Sequence
tagagattggttaagtagttgtgac

SEQ ID NO: 14387 - DNA, 25 bp, Probe Sequence
ttggaacttcttagagattggttaa

SEQ ID NO: 14388 - DNA, 25 bp, Probe Sequence
agagattggttaagtagttgtgacc

SEQ ID NO: 14389 - DNA, 25 bp, Probe Sequence
ttagagattggttaagtagttgtga

SEQ ID NO: 14390 - DNA, 25 bp, Probe Sequence
tggaacttcttagagattggttaag

SEQ ID NO: 14391 - DNA, 25 bp, Probe Sequence
tatgctaatgaggtctcagacagaa

SEQ ID NO: 14392 - DNA, 25 bp, Probe Sequence
tttagaaatgagtgatgggtagagg

SEQ ID NO: 14393 - DNA, 25 bp, Probe Sequence
tagaaatgagtgatgggtagaggtt

SEQ ID NO: 14394 - DNA, 25 bp, Probe Sequence
ttagaaatgagtgatgggtagaggt

SEQ ID NO: 14395 - DNA, 25 bp, Probe Sequence
ctatgctaatgaggtctcagacaga

SEQ ID NO: 14396 - DNA, 25 bp, Probe Sequence
acaatggaatcacctaaaggaagaa

SEQ ID NO: 14397 - DNA, 25 bp, Probe Sequence
aaagataactgaaattgtggaagca

SEQ ID NO: 14398 - DNA, 25 bp, Probe Sequence
atggaatcacctaaaggaagaatct

SEQ ID NO: 14399 - DNA, 25 bp, Probe Sequence
cacaatggaatcacctaaaggaaga

SEQ ID NO: 14400 - DNA, 25 bp, Probe Sequence
gctgcattatggaaggctaatctta

SEQ ID NO: 14401 - DNA, 25 bp, Probe Sequence
ctttagaaatgagtgatgggtagag

SEQ ID NO: 14402 - DNA, 25 bp, Probe Sequence
gtttggaacttcttagagattggtt

SEQ ID NO: 14403 - DNA, 25 bp, Probe Sequence
aaccaccaggaggcataacttatta

SEQ ID NO: 14404 - DNA, 25 bp, Probe Sequence
accaccaggaggcataacttattaa

SEQ ID NO: 14405 - DNA, 25 bp, Probe Sequence
agaagctggttgactgattagataa

SEQ ID NO: 14406 - DNA, 25 bp, Probe Sequence
aagaagctggttgactgattagata

SEQ ID NO: 14407 - DNA, 25 bp, Probe Sequence
caagaagctggttgactgattagat

SEQ ID NO: 14408 - DNA, 25 bp, Probe Sequence
ccaccaggaggcataacttattaaa

SEQ ID NO: 14409 - DNA, 25 bp, Probe Sequence
caccaggaggcataacttattaaag

SEQ ID NO: 14410 - DNA, 25 bp, Probe Sequence
ggaaatgagaaagactttatgagca

SEQ ID NO: 14411 - DNA, 25 bp, Probe Sequence
aggaaatgagaaagactttatgagc

SEQ ID NO: 14412 - DNA, 25 bp, Probe Sequence
ctttcaaggcactattaggaagttt

SEQ ID NO: 14413 - DNA, 25 bp, Probe Sequence
atgtttggagacagattatggagag

SEQ ID NO: 14414 - DNA, 25 bp, Probe Sequence
aatgtttggagacagattatggaga

SEQ ID NO: 14415 - DNA, 25 bp, Probe Sequence
gctttcaaggcactattaggaagtt

SEQ ID NO: 14416 - DNA, 25 bp, Probe Sequence
aaatgtttggagacagattatggag

SEQ ID NO: 14417 - DNA, 25 bp, Probe Sequence
aaaccaccaggaggcataacttatt

SEQ ID NO: 14418 - DNA, 25 bp, Probe Sequence
gccatcttctcatgtatcttaaccc

SEQ ID NO: 14419 - DNA, 25 bp, Probe Sequence
cttacagatttgaaagtgaaaggtt

SEQ ID NO: 14420 - DNA, 25 bp, Probe Sequence
ttcaaggcactattaggaagtttaa

SEQ ID NO: 14421 - DNA, 25 bp, Probe Sequence
tttcaaggcactattaggaagttta

SEQ ID NO: 14422 - DNA, 25 bp, Probe Sequence
agacagattatggagagctttcaag

SEQ ID NO: 14423 - DNA, 25 bp, Probe Sequence
gagacagattatggagagctttcaa

SEQ ID NO: 14424 - DNA, 25 bp, Probe Sequence
cactggataaacctggttcatcttt

SEQ ID NO: 14425 - DNA, 25 bp, Probe Sequence
gaaatgagaaagactttatgagcaa

SEQ ID NO: 14426 - DNA, 25 bp, Probe Sequence
ttacagatttgaaagtgaaaggttt

SEQ ID NO: 14427 - DNA, 25 bp, Probe Sequence
ctatatcctcattagtgaaggtggc

SEQ ID NO: 14428 - DNA, 25 bp, Probe Sequence
gctatatcctcattagtgaaggtgg

SEQ ID NO: 14429 - DNA, 25 bp, Probe Sequence
tatatcctcattagtgaaggtggct

SEQ ID NO: 14430 - DNA, 25 bp, Probe Sequence
aattgtggtagatggaagaatcctg

SEQ ID NO: 14431 - DNA, 25 bp, Probe Sequence
atatcctcattagtgaaggtggctt

SEQ ID NO: 14432 - DNA, 25 bp, Probe Sequence
ctgttcacatctctgagctatatcc

SEQ ID NO: 14433 - DNA, 25 bp, Probe Sequence
tgttcacatctctgagctatatcct

SEQ ID NO: 14434 - DNA, 25 bp, Probe Sequence
gttcacatctctgagctatatcctc

SEQ ID NO: 14435 - DNA, 25 bp, Probe Sequence
attgtggtagatggaagaatcctgg

SEQ ID NO: 14436 - DNA, 25 bp, Probe Sequence
agctatatcctcattagtgaaggtg

SEQ ID NO: 14437 - DNA, 25 bp, Probe Sequence
gagctatatcctcattagtgaaggt

SEQ ID NO: 14438 - DNA, 25 bp, Probe Sequence
ttaatcctgtttcacctggtttgtc

SEQ ID NO: 14439 - DNA, 25 bp, Probe Sequence
gtagatggaagaatcctggacttgg

SEQ ID NO: 14440 - DNA, 25 bp, Probe Sequence
ggtagatggaagaatcctggacttg

SEQ ID NO: 14441 - DNA, 25 bp, Probe Sequence
gttaatcctgtttcacctggtttgt

SEQ ID NO: 14442 - DNA, 25 bp, Probe Sequence
tggtagatggaagaatcctggactt

SEQ ID NO: 14443 - DNA, 25 bp, Probe Sequence
atgtgaacaccatcatgcctttata

SEQ ID NO: 14444 - DNA, 25 bp, Probe Sequence
tgtgaacaccatcatgcctttataa

SEQ ID NO: 14445 - DNA, 25 bp, Probe Sequence
ttgtggtagatggaagaatcctgga

SEQ ID NO: 14446 - DNA, 25 bp, Probe Sequence
tggctaacctgaccaataaagttat

SEQ ID NO: 14447 - DNA, 25 bp, Probe Sequence
gctgttcacatctctgagctatatc

SEQ ID NO: 14448 - DNA, 25 bp, Probe Sequence
ccctgatactgtgtatgctttgaag

SEQ ID NO: 14449 - DNA, 25 bp, Probe Sequence
tatcctcattagtgaaggtggcttt

SEQ ID NO: 14450 - DNA, 25 bp, Probe Sequence
agcaattgtggtagatggaagaatc

SEQ ID NO: 14451 - DNA, 25 bp, Probe Sequence
gcatcacttcacaatgttcaactat

SEQ ID NO: 14452 - DNA, 25 bp, Probe Sequence
tgataagagactgaacacataggtt

SEQ ID NO: 14453 - DNA, 25 bp, Probe Sequence
atgataagagactgaacacataggt

SEQ ID NO: 14454 - DNA, 25 bp, Probe Sequence
aaccatgataagagactgaacacat

SEQ ID NO: 14455 - DNA, 25 bp, Probe Sequence
ggcatcacttcacaatgttcaacta

SEQ ID NO: 14456 - DNA, 25 bp, Probe Sequence
accatgataagagactgaacacata

SEQ ID NO: 14457 - DNA, 25 bp, Probe Sequence
gacaagatgtaggagtagcacaatg

SEQ ID NO: 14458 - DNA, 25 bp, Probe Sequence
catcacttcacaatgttcaactatt

SEQ ID NO: 14459 - DNA, 25 bp, Probe Sequence
catgataagagactgaacacatagg

SEQ ID NO: 14460 - DNA, 25 bp, Probe Sequence
ccatgataagagactgaacacatag

SEQ ID NO: 14461 - DNA, 25 bp, Probe Sequence
atgaatggtggatctgcttcttact

SEQ ID NO: 14462 - DNA, 25 bp, Probe Sequence
ccaatagaggactaagctaagatgt

SEQ ID NO: 14463 - DNA, 25 bp, Probe Sequence
catgaatggtggatctgcttcttac

SEQ ID NO: 14464 - DNA, 25 bp, Probe Sequence
ggctagattatcttccaatagagga

SEQ ID NO: 14465 - DNA, 25 bp, Probe Sequence
cagagcactacttgtttcatttgtt

SEQ ID NO: 14466 - DNA, 25 bp, Probe Sequence
ggacaagatgtaggagtagcacaat

SEQ ID NO: 14467 - DNA, 25 bp, Probe Sequence
agagcactacttgtttcatttgttt

SEQ ID NO: 14468 - DNA, 25 bp, Probe Sequence
atgtttctttcctatcttccctgtg

SEQ ID NO: 14469 - DNA, 25 bp, Probe Sequence
gtttctttcctatcttccctgtgat

SEQ ID NO: 14470 - DNA, 25 bp, Probe Sequence
aatgcctttattgaatctgaaacca

SEQ ID NO: 14471 - DNA, 25 bp, Probe Sequence
tactcagagcactacttgtttcatt

SEQ ID NO: 14472 - DNA, 25 bp, Probe Sequence
aatactcagagcactacttgtttca

SEQ ID NO: 14473 - DNA, 25 bp, Probe Sequence
atactcagagcactacttgtttcat

SEQ ID NO: 14474 - DNA, 25 bp, Probe Sequence
taccaacaaatactcagagcactac

SEQ ID NO: 14475 - DNA, 25 bp, Probe Sequence
tattcatagttaccgtacattgctg

SEQ ID NO: 14476 - DNA, 25 bp, Probe Sequence
gtattcatagttaccgtacattgct

SEQ ID NO: 14477 - DNA, 25 bp, Probe Sequence
attcatagttaccgtacattgctgc

SEQ ID NO: 14478 - DNA, 25 bp, Probe Sequence
atagttaccgtacattgctgccata

SEQ ID NO: 14479 - DNA, 25 bp, Probe Sequence
tgttagagaagtggtaattgtaagt

SEQ ID NO: 14480 - DNA, 25 bp, Probe Sequence
agtgttagagaagtggtaattgtaa

SEQ ID NO: 14481 - DNA, 25 bp, Probe Sequence
aagtgttagagaagtggtaattgta

SEQ ID NO: 14482 - DNA, 25 bp, Probe Sequence
taagtgttagagaagtggtaattgt

SEQ ID NO: 14483 - DNA, 25 bp, Probe Sequence
accgttagctgtgaatagtataaga

SEQ ID NO: 14484 - DNA, 25 bp, Probe Sequence
gtgttagagaagtggtaattgtaag

SEQ ID NO: 14485 - DNA, 25 bp, Probe Sequence
tcagttaagttatcccaatccaaga

SEQ ID NO: 14486 - DNA, 25 bp, Probe Sequence
ttgatgcacaactagatagagatgg

SEQ ID NO: 14487 - DNA, 25 bp, Probe Sequence
ccgttagctgtgaatagtataagat

SEQ ID NO: 14488 - DNA, 25 bp, Probe Sequence
ccaccgttagctgtgaatagtataa

SEQ ID NO: 14489 - DNA, 25 bp, Probe Sequence
tagttaccgtacattgctgccatac

SEQ ID NO: 14490 - DNA, 25 bp, Probe Sequence
atcagttaagttatcccaatccaag

SEQ ID NO: 14491 - DNA, 25 bp, Probe Sequence
tgtattcatagttaccgtacattgc

SEQ ID NO: 14492 - DNA, 25 bp, Probe Sequence
cacaactagatagagatggcacacg

SEQ ID NO: 14493 - DNA, 25 bp, Probe Sequence
caccgttagctgtgaatagtataag

SEQ ID NO: 14494 - DNA, 25 bp, Probe Sequence
cagttaagttatcccaatccaagat

SEQ ID NO: 14495 - DNA, 25 bp, Probe Sequence
aatctttgtttgtaaacctcttggg

SEQ ID NO: 14496 - DNA, 25 bp, Probe Sequence
gttagagaagtggtaattgtaagtt

SEQ ID NO: 14497 - DNA, 25 bp, Probe Sequence
ctttgtttgtaaacctcttgggatg

SEQ ID NO: 14498 - DNA, 25 bp, Probe Sequence
tctttgtttgtaaacctcttgggat

SEQ ID NO: 14499 - DNA, 25 bp, Probe Sequence
atagtcatacaggtggagtaaggaa

SEQ ID NO: 14500 - DNA, 25 bp, Probe Sequence
aatagtcatacaggtggagtaagga

SEQ ID NO: 14501 - DNA, 25 bp, Probe Sequence
taatagtcatacaggtggagtaagg

SEQ ID NO: 14502 - DNA, 25 bp, Probe Sequence
aatgatgaagtcaagatgatgtcag

SEQ ID NO: 14503 - DNA, 25 bp, Probe Sequence
atgatgaagtcaagatgatgtcagc

SEQ ID NO: 14504 - DNA, 25 bp, Probe Sequence
ttgttgaagacctaatcctctgtgt

SEQ ID NO: 14505 - DNA, 25 bp, Probe Sequence
gatgaagtcaagatgatgtcagcaa

SEQ ID NO: 14506 - DNA, 25 bp, Probe Sequence
ctaatagtcatacaggtggagtaag

SEQ ID NO: 14507 - DNA, 25 bp, Probe Sequence
gcctaatagtcatacaggtggagta

SEQ ID NO: 14508 - DNA, 25 bp, Probe Sequence
aagaactgacacaaggtgcttaatt

SEQ ID NO: 14509 - DNA, 25 bp, Probe Sequence
caagtctctggtaactctgttatgg

SEQ ID NO: 14510 - DNA, 25 bp, Probe Sequence
taatgatgaagtcaagatgatgtca

SEQ ID NO: 14511 - DNA, 25 bp, Probe Sequence
cctaatagtcatacaggtggagtaa

SEQ ID NO: 14512 - DNA, 25 bp, Probe Sequence
tgatgaagtcaagatgatgtcagca

SEQ ID NO: 14513 - DNA, 25 bp, Probe Sequence
ccaagtctctggtaactctgttatg

SEQ ID NO: 14514 - DNA, 25 bp, Probe Sequence
gaagaactgacacaaggtgcttaat

SEQ ID NO: 14515 - DNA, 25 bp, Probe Sequence
gttgaagacctaatcctctgtgtca

SEQ ID NO: 14516 - DNA, 25 bp, Probe Sequence
tgttgaagacctaatcctctgtgtc

SEQ ID NO: 14517 - DNA, 25 bp, Probe Sequence
ttgaagacctaatcctctgtgtcac

SEQ ID NO: 14518 - DNA, 25 bp, Probe Sequence
gaagggagaagagcagatattgttt

SEQ ID NO: 14519 - DNA, 25 bp, Probe Sequence
tagtcatacaggtggagtaaggaaa

SEQ ID NO: 14520 - DNA, 25 bp, Probe Sequence
ggaagataatgaaaggtttacagca

SEQ ID NO: 14521 - DNA, 25 bp, Probe Sequence
tggaagataatgaaaggtttacagc

SEQ ID NO: 14522 - DNA, 25 bp, Probe Sequence
tcatacaggtggagtaaggaaatct

SEQ ID NO: 14523 - DNA, 25 bp, Probe Sequence
attatctcattgcctgctacataca

SEQ ID NO: 14524 - DNA, 25 bp, Probe Sequence
aagtgtgtgtattatctcattgcct

SEQ ID NO: 14525 - DNA, 25 bp, Probe Sequence
cttgtagttggtgttgagcatattc

SEQ ID NO: 14526 - DNA, 25 bp, Probe Sequence
gtgtgtattatctcattgcctgcta

SEQ ID NO: 14527 - DNA, 25 bp, Probe Sequence
tgtgtattatctcattgcctgctac

SEQ ID NO: 14528 - DNA, 25 bp, Probe Sequence
agtgtgtgtattatctcattgcctg

SEQ ID NO: 14529 - DNA, 25 bp, Probe Sequence
ttatctcattgcctgctacatacaa

SEQ ID NO: 14530 - DNA, 25 bp, Probe Sequence
ttgtagttggtgttgagcatattcc

SEQ ID NO: 14531 - DNA, 25 bp, Probe Sequence
atattcctgcttgtagttggtgttg

SEQ ID NO: 14532 - DNA, 25 bp, Probe Sequence
gtgaacggcagagtgagatattatg

SEQ ID NO: 14533 - DNA, 25 bp, Probe Sequence
ggattagcaacagtaattcacagtt

SEQ ID NO: 14534 - DNA, 25 bp, Probe Sequence
agtgaacggcagagtgagatattat

SEQ ID NO: 14535 - DNA, 25 bp, Probe Sequence
aagtgaacggcagagtgagatatta

SEQ ID NO: 14536 - DNA, 25 bp, Probe Sequence
aacggcagagtgagatattatggaa

SEQ ID NO: 14537 - DNA, 25 bp, Probe Sequence
tattatctcattgcctgctacatac

SEQ ID NO: 14538 - DNA, 25 bp, Probe Sequence
gtattatctcattgcctgctacata

SEQ ID NO: 14539 - DNA, 25 bp, Probe Sequence
gtagttggtgttgagcatattcctg

SEQ ID NO: 14540 - DNA, 25 bp, Probe Sequence
tgtagttggtgttgagcatattcct

SEQ ID NO: 14541 - DNA, 25 bp, Probe Sequence
acggcagagtgagatattatggaag

SEQ ID NO: 14542 - DNA, 25 bp, Probe Sequence
gaacggcagagtgagatattatgga

SEQ ID NO: 14543 - DNA, 25 bp, Probe Sequence
tattcctgcttgtagttggtgttga

SEQ ID NO: 14544 - DNA, 25 bp, Probe Sequence
taatattcctgcttgtagttggtgt

SEQ ID NO: 14545 - DNA, 25 bp, Probe Sequence
cctaatattcctgcttgtagttggt

SEQ ID NO: 14546 - DNA, 25 bp, Probe Sequence
gtgtgtgtattatctcattgcctgc

SEQ ID NO: 14547 - DNA, 25 bp, Probe Sequence
aagtacagaagaatggatggaggaa

SEQ ID NO: 14548 - DNA, 25 bp, Probe Sequence
agtacagaagaatggatggaggaag

SEQ ID NO: 14549 - DNA, 25 bp, Probe Sequence
gtacagaagaatggatggaggaagg

SEQ ID NO: 14550 - DNA, 25 bp, Probe Sequence
tttggaggacagatgctattacttt

SEQ ID NO: 14551 - DNA, 25 bp, Probe Sequence
ctttggaggacagatgctattactt

SEQ ID NO: 14552 - DNA, 25 bp, Probe Sequence
agaaaggaggactgggatactaata

SEQ ID NO: 14553 - DNA, 25 bp, Probe Sequence
ttggaggacagatgctattactttg

SEQ ID NO: 14554 - DNA, 25 bp, Probe Sequence
aggaggactgggatactaataatca

SEQ ID NO: 14555 - DNA, 25 bp, Probe Sequence
gacagatgctattactttgccttta

SEQ ID NO: 14556 - DNA, 25 bp, Probe Sequence
gagaaaggaggactgggatactaat

SEQ ID NO: 14557 - DNA, 25 bp, Probe Sequence
gatgagtcagagaaagaaggatgtc

SEQ ID NO: 14558 - DNA, 25 bp, Probe Sequence
gaaaggaggactgggatactaataa

SEQ ID NO: 14559 - DNA, 25 bp, Probe Sequence
gctgcttggacctattaaagataag

SEQ ID NO: 14560 - DNA, 25 bp, Probe Sequence
aaggtagtgctagagctgtaatgtc

SEQ ID NO: 14561 - DNA, 25 bp, Probe Sequence
gctagagctgtaatgtcagtaatga

SEQ ID NO: 14562 - DNA, 25 bp, Probe Sequence
tgctagagctgtaatgtcagtaatg

SEQ ID NO: 14563 - DNA, 25 bp, Probe Sequence
gtgctagagctgtaatgtcagtaat

SEQ ID NO: 14564 - DNA, 25 bp, Probe Sequence
tagtgctagagctgtaatgtcagta

SEQ ID NO: 14565 - DNA, 25 bp, Probe Sequence
ggacagatgctattactttgccttt

SEQ ID NO: 14566 - DNA, 25 bp, Probe Sequence
aaggaggactgggatactaataatc

SEQ ID NO: 14567 - DNA, 25 bp, Probe Sequence
ggatactaataatcagctaggaacc

SEQ ID NO: 14568 - DNA, 25 bp, Probe Sequence
cagtaatgaaagcaaatgtgtgagc

SEQ ID NO: 14569 - DNA, 25 bp, Probe Sequence
acagatgctattactttgcctttaa

SEQ ID NO: 14570 - DNA, 25 bp, Probe Sequence
tcagtaatgaaagcaaatgtgtgag

SEQ ID NO: 14571 - DNA, 25 bp, Probe Sequence
gctaactcctgatctaactgatgaa

SEQ ID NO: 14572 - DNA, 25 bp, Probe Sequence
ctgctaactcctgatctaactgatg

SEQ ID NO: 14573 - DNA, 25 bp, Probe Sequence
tgctaactcctgatctaactgatga

SEQ ID NO: 14574 - DNA, 25 bp, Probe Sequence
gctgctaactcctgatctaactgat

SEQ ID NO: 14575 - DNA, 25 bp, Probe Sequence
tagtttatggcttctttcacagtgt

SEQ ID NO: 14576 - DNA, 25 bp, Probe Sequence
ctagtttatggcttctttcacagtg

SEQ ID NO: 14577 - DNA, 25 bp, Probe Sequence
aagctgctaactcctgatctaactg

SEQ ID NO: 14578 - DNA, 25 bp, Probe Sequence
tataggattaagtgcattcgattgt

SEQ ID NO: 14579 - DNA, 25 bp, Probe Sequence
agtttatggcttctttcacagtgtc

SEQ ID NO: 14580 - DNA, 25 bp, Probe Sequence
tttatggcttctttcacagtgtcac

SEQ ID NO: 14581 - DNA, 25 bp, Probe Sequence
gtttatggcttctttcacagtgtca

SEQ ID NO: 14582 - DNA, 25 bp, Probe Sequence
caataagcgggctacaaagtacatt

SEQ ID NO: 14583 - DNA, 25 bp, Probe Sequence
agctgctaactcctgatctaactga

SEQ ID NO: 14584 - DNA, 25 bp, Probe Sequence
taaagctgctaactcctgatctaac

SEQ ID NO: 14585 - DNA, 25 bp, Probe Sequence
gataaagctgctaactcctgatcta

SEQ ID NO: 14586 - DNA, 25 bp, Probe Sequence
ataaagctgctaactcctgatctaa

SEQ ID NO: 14587 - DNA, 25 bp, Probe Sequence
tgtggaattgtgacagacactgaag

SEQ ID NO: 14588 - DNA, 25 bp, Probe Sequence
ctaactcctgatctaactgatgaaa

SEQ ID NO: 14589 - DNA, 25 bp, Probe Sequence
aaagctgctaactcctgatctaact

SEQ ID NO: 14590 - DNA, 25 bp, Probe Sequence
atataggattaagtgcattcgattg

SEQ ID NO: 14591 - DNA, 25 bp, Probe Sequence
atgcacttaactttcattctgggaa

SEQ ID NO: 14592 - DNA, 25 bp, Probe Sequence
ttacagataaagctgctaactcctg

SEQ ID NO: 14593 - DNA, 25 bp, Probe Sequence
tttacagataaagctgctaactcct

SEQ ID NO: 14594 - DNA, 25 bp, Probe Sequence
gcaatgcccattcatttacatacta

SEQ ID NO: 14595 - DNA, 25 bp, Probe Sequence
ttctcaggtgtgaatcaacttcttg

SEQ ID NO: 14596 - DNA, 25 bp, Probe Sequence
gtgaggaatgtgttagtgtctggag

SEQ ID NO: 14597 - DNA, 25 bp, Probe Sequence
tctcaggtgtgaatcaacttcttgg

SEQ ID NO: 14598 - DNA, 25 bp, Probe Sequence
tagaatgggtgaggaatgtgttagt

SEQ ID NO: 14599 - DNA, 25 bp, Probe Sequence
ctagaatgggtgaggaatgtgttag

SEQ ID NO: 14600 - DNA, 25 bp, Probe Sequence
tttctcaggtgtgaatcaacttctt

SEQ ID NO: 14601 - DNA, 25 bp, Probe Sequence
ttgtttctcaggtgtgaatcaactt

SEQ ID NO: 14602 - DNA, 25 bp, Probe Sequence
gtttctcaggtgtgaatcaacttct

SEQ ID NO: 14603 - DNA, 25 bp, Probe Sequence
tgtttctcaggtgtgaatcaacttc

SEQ ID NO: 14604 - DNA, 25 bp, Probe Sequence
cttgtttctcaggtgtgaatcaact

SEQ ID NO: 14605 - DNA, 25 bp, Probe Sequence
gacttgtttctcaggtgtgaatcaa

SEQ ID NO: 14606 - DNA, 25 bp, Probe Sequence
acttgtttctcaggtgtgaatcaac

SEQ ID NO: 14607 - DNA, 25 bp, Probe Sequence
gaagtcagatgggattgaaaggatc

SEQ ID NO: 14608 - DNA, 25 bp, Probe Sequence
agaatgggtgaggaatgtgttagtg

SEQ ID NO: 14609 - DNA, 25 bp, Probe Sequence
aatgggtgaggaatgtgttagtgtc

SEQ ID NO: 14610 - DNA, 25 bp, Probe Sequence
gaatgggtgaggaatgtgttagtgt

SEQ ID NO: 14611 - DNA, 25 bp, Probe Sequence
ggtgaggaatgtgttagtgtctgga

SEQ ID NO: 14612 - DNA, 25 bp, Probe Sequence
ggaagtcagatgggattgaaaggat

SEQ ID NO: 14613 - DNA, 25 bp, Probe Sequence
cctagaatgggtgaggaatgtgtta

SEQ ID NO: 14614 - DNA, 25 bp, Probe Sequence
gaatgtgttagtgtctggagccatg

SEQ ID NO: 14615 - DNA, 25 bp, Probe Sequence
tgaggaatgtgttagtgtctggagc

SEQ ID NO: 14616 - DNA, 25 bp, Probe Sequence
tcagatgggattgaaaggatcttct

SEQ ID NO: 14617 - DNA, 25 bp, Probe Sequence
gtcagatgggattgaaaggatcttc

SEQ ID NO: 14618 - DNA, 25 bp, Probe Sequence
atgtgttagtgtctggagccatgaa

SEQ ID NO: 14619 - DNA, 25 bp, Probe Sequence
gccttagcaatagattagtcagatc

SEQ ID NO: 14620 - DNA, 25 bp, Probe Sequence
aatcttaacaaccttgagaggactg

SEQ ID NO: 14621 - DNA, 25 bp, Probe Sequence
ttaacaaccttgagaggactggaat

SEQ ID NO: 14622 - DNA, 25 bp, Probe Sequence
gagaggactggaatggtatcaaata

SEQ ID NO: 14623 - DNA, 25 bp, Probe Sequence
atcttaacaaccttgagaggactgg

SEQ ID NO: 14624 - DNA, 25 bp, Probe Sequence
acggaaacattggatttgaattaca

SEQ ID NO: 14625 - DNA, 25 bp, Probe Sequence
cagaaatataccaaacattccaccc

SEQ ID NO: 14626 - DNA, 25 bp, Probe Sequence
cggaaacattggatttgaattacac

SEQ ID NO: 14627 - DNA, 25 bp, Probe Sequence
agaggactggaatggtatcaaatat

SEQ ID NO: 14628 - DNA, 25 bp, Probe Sequence
tatggagcacttaaataccgtatgt

SEQ ID NO: 14629 - DNA, 25 bp, Probe Sequence
acagaaatataccaaacattccacc

SEQ ID NO: 14630 - DNA, 25 bp, Probe Sequence
accatagaccaattatctacagaga

SEQ ID NO: 14631 - DNA, 25 bp, Probe Sequence
acattggatttgaattacaccttcg

SEQ ID NO: 14632 - DNA, 25 bp, Probe Sequence
cccatttcaaccatagaccaattat

SEQ ID NO: 14633 - DNA, 25 bp, Probe Sequence
cttaacaaccttgagaggactggaa

SEQ ID NO: 14634 - DNA, 25 bp, Probe Sequence
ggaaacattggatttgaattacacc

SEQ ID NO: 14635 - DNA, 25 bp, Probe Sequence
aaatataccaaacattccacccgac

SEQ ID NO: 14636 - DNA, 25 bp, Probe Sequence
taacaaccttgagaggactggaatg

SEQ ID NO: 14637 - DNA, 25 bp, Probe Sequence
gaaatataccaaacattccacccga

SEQ ID NO: 14638 - DNA, 25 bp, Probe Sequence
agaaatataccaaacattccacccg

SEQ ID NO: 14639 - DNA, 25 bp, Probe Sequence
caaccatagaccaattatctacaga

SEQ ID NO: 14640 - DNA, 25 bp, Probe Sequence
tcaaccatagaccaattatctacag

SEQ ID NO: 14641 - DNA, 25 bp, Probe Sequence
attggagtacctacaatacactgaa

SEQ ID NO: 14642 - DNA, 25 bp, Probe Sequence
atatggagcacttaaataccgtatg

SEQ ID NO: 14643 - DNA, 25 bp, Probe Sequence
actgtcagagttctaatccatcttg

SEQ ID NO: 14644 - DNA, 25 bp, Probe Sequence
gactgtcagagttctaatccatctt

SEQ ID NO: 14645 - DNA, 25 bp, Probe Sequence
agactgtcagagttctaatccatct

SEQ ID NO: 14646 - DNA, 25 bp, Probe Sequence
cagactgtcagagttctaatccatc

SEQ ID NO: 14647 - DNA, 25 bp, Probe Sequence
aacagagttcttagagtgacttaca

SEQ ID NO: 14648 - DNA, 25 bp, Probe Sequence
ctgtcagagttctaatccatcttgc

SEQ ID NO: 14649 - DNA, 25 bp, Probe Sequence
acagagttcttagagtgacttacat

SEQ ID NO: 14650 - DNA, 25 bp, Probe Sequence
ccagactgtcagagttctaatccat

SEQ ID NO: 14651 - DNA, 25 bp, Probe Sequence
tgtccagactgtcagagttctaatc

SEQ ID NO: 14652 - DNA, 25 bp, Probe Sequence
cactatgacctgaacaattaggaga

SEQ ID NO: 14653 - DNA, 25 bp, Probe Sequence
tcactatgacctgaacaattaggag

SEQ ID NO: 14654 - DNA, 25 bp, Probe Sequence
ctcactatgacctgaacaattagga

SEQ ID NO: 14655 - DNA, 25 bp, Probe Sequence
gtgtccagactgtcagagttctaat

SEQ ID NO: 14656 - DNA, 25 bp, Probe Sequence
cagagttcttagagtgacttacatt

SEQ ID NO: 14657 - DNA, 25 bp, Probe Sequence
actatgacctgaacaattaggagaa

SEQ ID NO: 14658 - DNA, 25 bp, Probe Sequence
gctcactatgacctgaacaattagg

SEQ ID NO: 14659 - DNA, 25 bp, Probe Sequence
gtccagactgtcagagttctaatcc

SEQ ID NO: 14660 - DNA, 25 bp, Probe Sequence
gtatcttgtgtccagactgtcagag

SEQ ID NO: 14661 - DNA, 25 bp, Probe Sequence
agctcactatgacctgaacaattag

SEQ ID NO: 14662 - DNA, 25 bp, Probe Sequence
tccagactgtcagagttctaatcca

SEQ ID NO: 14663 - DNA, 25 bp, Probe Sequence
atagttccttcccttgagaaatgtc

SEQ ID NO: 14664 - DNA, 25 bp, Probe Sequence
catagttccttcccttgagaaatgt

SEQ ID NO: 14665 - DNA, 25 bp, Probe Sequence
acatagttccttcccttgagaaatg

SEQ ID NO: 14666 - DNA, 25 bp, Probe Sequence
cacatagttccttcccttgagaaat

SEQ ID NO: 14667 - DNA, 25 bp, Probe Sequence
gtacaattctgtgacattcaggatg

SEQ ID NO: 14668 - DNA, 25 bp, Probe Sequence
tacaattctgtgacattcaggatgt

SEQ ID NO: 14669 - DNA, 25 bp, Probe Sequence
caattctgtgacattcaggatgttc

SEQ ID NO: 14670 - DNA, 25 bp, Probe Sequence
aattctgtgacattcaggatgttca

SEQ ID NO: 14671 - DNA, 25 bp, Probe Sequence
acaattctgtgacattcaggatgtt

SEQ ID NO: 14672 - DNA, 25 bp, Probe Sequence
gacattcaggatgttcaccatgttg

SEQ ID NO: 14673 - DNA, 25 bp, Probe Sequence
tgtacaattctgtgacattcaggat

SEQ ID NO: 14674 - DNA, 25 bp, Probe Sequence
gtgtacaattctgtgacattcagga

SEQ ID NO: 14675 - DNA, 25 bp, Probe Sequence
tgacattcaggatgttcaccatgtt

SEQ ID NO: 14676 - DNA, 25 bp, Probe Sequence
tgtgtacaattctgtgacattcagg

SEQ ID NO: 14677 - DNA, 25 bp, Probe Sequence
attctgtgacattcaggatgttcac

SEQ ID NO: 14678 - DNA, 25 bp, Probe Sequence
acattcaggatgttcaccatgttgg

SEQ ID NO: 14679 - DNA, 25 bp, Probe Sequence
atgtgtacaattctgtgacattcag

SEQ ID NO: 14680 - DNA, 25 bp, Probe Sequence
gtgacataccaagactctgtctcaa

SEQ ID NO: 14681 - DNA, 25 bp, Probe Sequence
accatttaatgtgtacaattctgtg

SEQ ID NO: 14682 - DNA, 25 bp, Probe Sequence
ttctgtgacattcaggatgttcacc

SEQ ID NO: 14683 - DNA, 25 bp, Probe Sequence
ctgtgacattcaggatgttcaccat

SEQ ID NO: 14684 - DNA, 25 bp, Probe Sequence
ccatttaatgtgtacaattctgtga

SEQ ID NO: 14685 - DNA, 25 bp, Probe Sequence
tgacataccaagactctgtctcaaa

SEQ ID NO: 14686 - DNA, 25 bp, Probe Sequence
gtgacattcaggatgttcaccatgt

SEQ ID NO: 14687 - DNA, 25 bp, Probe Sequence
tgtgacattcaggatgttcaccatg

SEQ ID NO: 14688 - DNA, 25 bp, Probe Sequence
cattcaggatgttcaccatgttggg

SEQ ID NO: 14689 - DNA, 25 bp, Probe Sequence
aaccatttaatgtgtacaattctgt

SEQ ID NO: 14690 - DNA, 25 bp, Probe Sequence
ggtgacataccaagactctgtctca

SEQ ID NO: 14691 - DNA, 25 bp, Probe Sequence
ctaatggcttgtctactcttcttca

SEQ ID NO: 14692 - DNA, 25 bp, Probe Sequence
ttcacattactccaatctaccactc

SEQ ID NO: 14693 - DNA, 25 bp, Probe Sequence
cttcacattactccaatctaccact

SEQ ID NO: 14694 - DNA, 25 bp, Probe Sequence
tctaatggcttgtctactcttcttc

SEQ ID NO: 14695 - DNA, 25 bp, Probe Sequence
ctctaatggcttgtctactcttctt

SEQ ID NO: 14696 - DNA, 25 bp, Probe Sequence
actctaatggcttgtctactcttct

SEQ ID NO: 14697 - DNA, 25 bp, Probe Sequence
cactctaatggcttgtctactcttc

SEQ ID NO: 14698 - DNA, 25 bp, Probe Sequence
cacattactccaatctaccactcta

SEQ ID NO: 14699 - DNA, 25 bp, Probe Sequence
tcacattactccaatctaccactct

SEQ ID NO: 14700 - DNA, 25 bp, Probe Sequence
ccttcacattactccaatctaccac

SEQ ID NO: 14701 - DNA, 25 bp, Probe Sequence
atggcttgtctactcttcttcatac

SEQ ID NO: 14702 - DNA, 25 bp, Probe Sequence
aatggcttgtctactcttcttcata

SEQ ID NO: 14703 - DNA, 25 bp, Probe Sequence
taatggcttgtctactcttcttcat

SEQ ID NO: 14704 - DNA, 25 bp, Probe Sequence
acattactccaatctaccactctaa

SEQ ID NO: 14705 - DNA, 25 bp, Probe Sequence
ggcttgtctactcttcttcatacat

SEQ ID NO: 14706 - DNA, 25 bp, Probe Sequence
ccttgtgaatctctatggtaagaca

SEQ ID NO: 14707 - DNA, 25 bp, Probe Sequence
tggcttgtctactcttcttcataca

SEQ ID NO: 14708 - DNA, 25 bp, Probe Sequence
actcttcttcatacatgactagcaa

SEQ ID NO: 14709 - DNA, 25 bp, Probe Sequence
tactcttcttcatacatgactagca

SEQ ID NO: 14710 - DNA, 25 bp, Probe Sequence
gcttgtctactcttcttcatacatg

SEQ ID NO: 14711 - DNA, 25 bp, Probe Sequence
accttgtgaatctctatggtaagac

SEQ ID NO: 14712 - DNA, 25 bp, Probe Sequence
caccttgtgaatctctatggtaaga

SEQ ID NO: 14713 - DNA, 25 bp, Probe Sequence
atctaccactctaatggcttgtcta

SEQ ID NO: 14714 - DNA, 25 bp, Probe Sequence
attactccaatctaccactctaatg

SEQ ID NO: 14715 - DNA, 25 bp, Probe Sequence
gattaccagtaaccaccagaacaac

SEQ ID NO: 14716 - DNA, 25 bp, Probe Sequence
aactcttctattggtggatgagatc

SEQ ID NO: 14717 - DNA, 25 bp, Probe Sequence
aagaacacggaggattaccagtaac

SEQ ID NO: 14718 - DNA, 25 bp, Probe Sequence
ggattaccagtaaccaccagaacaa

SEQ ID NO: 14719 - DNA, 25 bp, Probe Sequence
gaggattaccagtaaccaccagaac

SEQ ID NO: 14720 - DNA, 25 bp, Probe Sequence
taccagtaaccaccagaacaaccta

SEQ ID NO: 14721 - DNA, 25 bp, Probe Sequence
attaccagtaaccaccagaacaacc

SEQ ID NO: 14722 - DNA, 25 bp, Probe Sequence
gcaagtaatcaacacatattagctg

SEQ ID NO: 14723 - DNA, 25 bp, Probe Sequence
tgcaagtaatcaacacatattagct

SEQ ID NO: 14724 - DNA, 25 bp, Probe Sequence
ctgcaagtaatcaacacatattagc

SEQ ID NO: 14725 - DNA, 25 bp, Probe Sequence
aggattaccagtaaccaccagaaca

SEQ ID NO: 14726 - DNA, 25 bp, Probe Sequence
aaactcttctattggtggatgagat

SEQ ID NO: 14727 - DNA, 25 bp, Probe Sequence
aaagaacacggaggattaccagtaa

SEQ ID NO: 14728 - DNA, 25 bp, Probe Sequence
cctgcaagtaatcaacacatattag

SEQ ID NO: 14729 - DNA, 25 bp, Probe Sequence
accagtaaccaccagaacaacctaa

SEQ ID NO: 14730 - DNA, 25 bp, Probe Sequence
ggaggattaccagtaaccaccagaa

SEQ ID NO: 14731 - DNA, 25 bp, Probe Sequence
caaagaacacggaggattaccagta

SEQ ID NO: 14732 - DNA, 25 bp, Probe Sequence
ttaccagtaaccaccagaacaacct

SEQ ID NO: 14733 - DNA, 25 bp, Probe Sequence
cttctattggtggatgagatctgat

SEQ ID NO: 14734 - DNA, 25 bp, Probe Sequence
tcttctattggtggatgagatctga

SEQ ID NO: 14735 - DNA, 25 bp, Probe Sequence
ttctattggtggatgagatctgatt

SEQ ID NO: 14736 - DNA, 25 bp, Probe Sequence
ccagtaaccaccagaacaacctaaa

SEQ ID NO: 14737 - DNA, 25 bp, Probe Sequence
agaacacggaggattaccagtaacc

SEQ ID NO: 14738 - DNA, 25 bp, Probe Sequence
ctcttctattggtggatgagatctg

SEQ ID NO: 14739 - DNA, 25 bp, Probe Sequence
gctagaacactccagataagtcaat

SEQ ID NO: 14740 - DNA, 25 bp, Probe Sequence
attgctagaacactccagataagtc

SEQ ID NO: 14741 - DNA, 25 bp, Probe Sequence
aattgctagaacactccagataagt

SEQ ID NO: 14742 - DNA, 25 bp, Probe Sequence
tgctagaacactccagataagtcaa

SEQ ID NO: 14743 - DNA, 25 bp, Probe Sequence
ttgctagaacactccagataagtca

SEQ ID NO: 14744 - DNA, 25 bp, Probe Sequence
ctagaacactccagataagtcaatt

SEQ ID NO: 14745 - DNA, 25 bp, Probe Sequence
actgtactgaatagttaatggttcc

SEQ ID NO: 14746 - DNA, 25 bp, Probe Sequence
tgaaagaagtaagtgtccctgtaaa

SEQ ID NO: 14747 - DNA, 25 bp, Probe Sequence
ctgaaagaagtaagtgtccctgtaa

SEQ ID NO: 14748 - DNA, 25 bp, Probe Sequence
atttcaggcagatagataggtgttt

SEQ ID NO: 14749 - DNA, 25 bp, Probe Sequence
gcatatttcaggcagatagataggt

SEQ ID NO: 14750 - DNA, 25 bp, Probe Sequence
gcttactgttctgctaaatgaccta

SEQ ID NO: 14751 - DNA, 25 bp, Probe Sequence
tttcaggcagatagataggtgtttg

SEQ ID NO: 14752 - DNA, 25 bp, Probe Sequence
gaaagaagtaagtgtccctgtaaag

SEQ ID NO: 14753 - DNA, 25 bp, Probe Sequence
aatggttcccttaatagactcttgt

SEQ ID NO: 14754 - DNA, 25 bp, Probe Sequence
tatttcaggcagatagataggtgtt

SEQ ID NO: 14755 - DNA, 25 bp, Probe Sequence
cccaaaggatagaagtgtaggtttc

SEQ ID NO: 14756 - DNA, 25 bp, Probe Sequence
atatttcaggcagatagataggtgt

SEQ ID NO: 14757 - DNA, 25 bp, Probe Sequence
tcactgtactgaatagttaatggtt

SEQ ID NO: 14758 - DNA, 25 bp, Probe Sequence
aaagccgacttaatgacttctgaaa

SEQ ID NO: 14759 - DNA, 25 bp, Probe Sequence
tctgaaagaagtaagtgtccctgta

SEQ ID NO: 14760 - DNA, 25 bp, Probe Sequence
cttactgttctgctaaatgacctaa

SEQ ID NO: 14761 - DNA, 25 bp, Probe Sequence
catatttcaggcagatagataggtg

SEQ ID NO: 14762 - DNA, 25 bp, Probe Sequence
actgccattctttaacctgttactc

SEQ ID NO: 14763 - DNA, 25 bp, Probe Sequence
tactaaggactgaagccactacata

SEQ ID NO: 14764 - DNA, 25 bp, Probe Sequence
gaatactaaggactgaagccactac

SEQ ID NO: 14765 - DNA, 25 bp, Probe Sequence
atactaaggactgaagccactacat

SEQ ID NO: 14766 - DNA, 25 bp, Probe Sequence
aatactaaggactgaagccactaca

SEQ ID NO: 14767 - DNA, 25 bp, Probe Sequence
aataatgcttatcactggcttgttg

SEQ ID NO: 14768 - DNA, 25 bp, Probe Sequence
cactacatacctacacaccagaatg

SEQ ID NO: 14769 - DNA, 25 bp, Probe Sequence
ggaatactaaggactgaagccacta

SEQ ID NO: 14770 - DNA, 25 bp, Probe Sequence
cttatcactggcttgttgtcaataa

SEQ ID NO: 14771 - DNA, 25 bp, Probe Sequence
ataatgcttatcactggcttgttgt

SEQ ID NO: 14772 - DNA, 25 bp, Probe Sequence
ccactacatacctacacaccagaat

SEQ ID NO: 14773 - DNA, 25 bp, Probe Sequence
actaaggactgaagccactacatac

SEQ ID NO: 14774 - DNA, 25 bp, Probe Sequence
taatgcttatcactggcttgttgtc

SEQ ID NO: 14775 - DNA, 25 bp, Probe Sequence
gcttatcactggcttgttgtcaata

SEQ ID NO: 14776 - DNA, 25 bp, Probe Sequence
ctaaggactgaagccactacatacc

SEQ ID NO: 14777 - DNA, 25 bp, Probe Sequence
gactgaagccactacatacctacac

SEQ ID NO: 14778 - DNA, 25 bp, Probe Sequence
ctgaagccactacatacctacacac

SEQ ID NO: 14779 - DNA, 25 bp, Probe Sequence
tttcccactccacactctatatttc

SEQ ID NO: 14780 - DNA, 25 bp, Probe Sequence
gatttcccactccacactctatatt

SEQ ID NO: 14781 - DNA, 25 bp, Probe Sequence
cggactgatgttagactttggataa

SEQ ID NO: 14782 - DNA, 25 bp, Probe Sequence
ttcccactccacactctatatttct

SEQ ID NO: 14783 - DNA, 25 bp, Probe Sequence
atttcccactccacactctatattt

SEQ ID NO: 14784 - DNA, 25 bp, Probe Sequence
aaatatgtgggtaaatctctgctcc

SEQ ID NO: 14785 - DNA, 25 bp, Probe Sequence
tgatttcccactccacactctatat

SEQ ID NO: 14786 - DNA, 25 bp, Probe Sequence
actgaagccactacatacctacaca

SEQ ID NO: 14787 - DNA, 25 bp, Probe Sequence
taagatgtgctgtacctgacaactt

SEQ ID NO: 14788 - DNA, 25 bp, Probe Sequence
tgctgtacctgacaacttcaagtaa

SEQ ID NO: 14789 - DNA, 25 bp, Probe Sequence
gccttgctagtcattaacagaaata

SEQ ID NO: 14790 - DNA, 25 bp, Probe Sequence
gtaagatgtgctgtacctgacaact

SEQ ID NO: 14791 - DNA, 25 bp, Probe Sequence
agtaagatgtgctgtacctgacaac

SEQ ID NO: 14792 - DNA, 25 bp, Probe Sequence
tgtgattagatcagcagatatggtg

SEQ ID NO: 14793 - DNA, 25 bp, Probe Sequence
gctatcattgtgattagatcagcag

SEQ ID NO: 14794 - DNA, 25 bp, Probe Sequence
ttgtgattagatcagcagatatggt

SEQ ID NO: 14795 - DNA, 25 bp, Probe Sequence
cagtaagatgtgctgtacctgacaa

SEQ ID NO: 14796 - DNA, 25 bp, Probe Sequence
gtgattagatcagcagatatggtgg

SEQ ID NO: 14797 - DNA, 25 bp, Probe Sequence
gtgctgtacctgacaacttcaagta

SEQ ID NO: 14798 - DNA, 25 bp, Probe Sequence
caagccttgctagtcattaacagaa

SEQ ID NO: 14799 - DNA, 25 bp, Probe Sequence
attagatcagcagatatggtggctt

SEQ ID NO: 14800 - DNA, 25 bp, Probe Sequence
aagatgtgctgtacctgacaacttc

SEQ ID NO: 14801 - DNA, 25 bp, Probe Sequence
attgtgattagatcagcagatatgg

SEQ ID NO: 14802 - DNA, 25 bp, Probe Sequence
gtcaatcacttacacaagaagtagt

SEQ ID NO: 14803 - DNA, 25 bp, Probe Sequence
tgtcaatcacttacacaagaagtag

SEQ ID NO: 14804 - DNA, 25 bp, Probe Sequence
ctgtacctgacaacttcaagtaaat

SEQ ID NO: 14805 - DNA, 25 bp, Probe Sequence
ccttgctagtcattaacagaaatac

SEQ ID NO: 14806 - DNA, 25 bp, Probe Sequence
ctatcattgtgattagatcagcaga

SEQ ID NO: 14807 - DNA, 25 bp, Probe Sequence
gctgtacctgacaacttcaagtaaa

SEQ ID NO: 14808 - DNA, 25 bp, Probe Sequence
gattagatcagcagatatggtggct

SEQ ID NO: 14809 - DNA, 25 bp, Probe Sequence
agctatcattgtgattagatcagca

SEQ ID NO: 14810 - DNA, 25 bp, Probe Sequence
atgtgctgtacctgacaacttcaag

SEQ ID NO: 14811 - DNA, 25 bp, Probe Sequence
gatgtcatcttgcttccttaatgtc

SEQ ID NO: 14812 - DNA, 25 bp, Probe Sequence
attcaagtttcctaagctcagagtt

SEQ ID NO: 14813 - DNA, 25 bp, Probe Sequence
aagattcaagtttcctaagctcaga

SEQ ID NO: 14814 - DNA, 25 bp, Probe Sequence
agattcaagtttcctaagctcagag

SEQ ID NO: 14815 - DNA, 25 bp, Probe Sequence
gattcaagtttcctaagctcagagt

SEQ ID NO: 14816 - DNA, 25 bp, Probe Sequence
ttcaagtttcctaagctcagagttc

SEQ ID NO: 14817 - DNA, 25 bp, Probe Sequence
aaagattcaagtttcctaagctcag

SEQ ID NO: 14818 - DNA, 25 bp, Probe Sequence
agatgtcatcttgcttccttaatgt

SEQ ID NO: 14819 - DNA, 25 bp, Probe Sequence
cagatgtcatcttgcttccttaatg

SEQ ID NO: 14820 - DNA, 25 bp, Probe Sequence
acagatgtcatcttgcttccttaat

SEQ ID NO: 14821 - DNA, 25 bp, Probe Sequence
taggaattgcgacttgtcaagctag

SEQ ID NO: 14822 - DNA, 25 bp, Probe Sequence
tcaagtttcctaagctcagagttct

SEQ ID NO: 14823 - DNA, 25 bp, Probe Sequence
cacagatgtcatcttgcttccttaa

SEQ ID NO: 14824 - DNA, 25 bp, Probe Sequence
tatctgctaaactatattgggagac

SEQ ID NO: 14825 - DNA, 25 bp, Probe Sequence
tatctcacgtttctgtagaacttgt

SEQ ID NO: 14826 - DNA, 25 bp, Probe Sequence
ggtatctcacgtttctgtagaactt

SEQ ID NO: 14827 - DNA, 25 bp, Probe Sequence
gtatctcacgtttctgtagaacttg

SEQ ID NO: 14828 - DNA, 25 bp, Probe Sequence
gtaggaattgcgacttgtcaagcta

SEQ ID NO: 14829 - DNA, 25 bp, Probe Sequence
acattagtggcacttaataagttca

SEQ ID NO: 14830 - DNA, 25 bp, Probe Sequence
acgacattagaaacatgaaacttag

SEQ ID NO: 14831 - DNA, 25 bp, Probe Sequence
ccttgtaggaattgcgacttgtcaa

SEQ ID NO: 14832 - DNA, 25 bp, Probe Sequence
attagtggcacttaataagttcagt

SEQ ID NO: 14833 - DNA, 25 bp, Probe Sequence
tggtatctcacgtttctgtagaact

SEQ ID NO: 14834 - DNA, 25 bp, Probe Sequence
acacagatgtcatcttgcttcctta

SEQ ID NO: 14835 - DNA, 25 bp, Probe Sequence
acctcaagaagttagaagaacaagt

SEQ ID NO: 14836 - DNA, 25 bp, Probe Sequence
cacctcaagaagttagaagaacaag

SEQ ID NO: 14837 - DNA, 25 bp, Probe Sequence
cctcaagaagttagaagaacaagtt

SEQ ID NO: 14838 - DNA, 25 bp, Probe Sequence
gcacctcaagaagttagaagaacaa

SEQ ID NO: 14839 - DNA, 25 bp, Probe Sequence
gaagttagaagaacaagttactcca

SEQ ID NO: 14840 - DNA, 25 bp, Probe Sequence
agaagttagaagaacaagttactcc

SEQ ID NO: 14841 - DNA, 25 bp, Probe Sequence
aagttagaagaacaagttactccaa

SEQ ID NO: 14842 - DNA, 25 bp, Probe Sequence
aatggataggtcaagcaagactgat

SEQ ID NO: 14843 - DNA, 25 bp, Probe Sequence
tatgcacctcaagaagttagaagaa

SEQ ID NO: 14844 - DNA, 25 bp, Probe Sequence
ttatgcacctcaagaagttagaaga

SEQ ID NO: 14845 - DNA, 25 bp, Probe Sequence
gttatgcacctcaagaagttagaag

SEQ ID NO: 14846 - DNA, 25 bp, Probe Sequence
agaagaacaagttactccaaagaca

SEQ ID NO: 14847 - DNA, 25 bp, Probe Sequence
gaagaacaagttactccaaagacag

SEQ ID NO: 14848 - DNA, 25 bp, Probe Sequence
cctgggtctttgaaatgcttaataa

SEQ ID NO: 14849 - DNA, 25 bp, Probe Sequence
gcaacaaactcacagcagaaataat

SEQ ID NO: 14850 - DNA, 25 bp, Probe Sequence
tagcaacaaactcacagcagaaata

SEQ ID NO: 14851 - DNA, 25 bp, Probe Sequence
cgttatgcacctcaagaagttagaa

SEQ ID NO: 14852 - DNA, 25 bp, Probe Sequence
acctgggtctttgaaatgcttaata

SEQ ID NO: 14853 - DNA, 25 bp, Probe Sequence
atgcacctcaagaagttagaagaac

SEQ ID NO: 14854 - DNA, 25 bp, Probe Sequence
ctcgttatgcacctcaagaagttag

SEQ ID NO: 14855 - DNA, 25 bp, Probe Sequence
caacaaactcacagcagaaataatt

SEQ ID NO: 14856 - DNA, 25 bp, Probe Sequence
aagaacaagttactccaaagacagt

SEQ ID NO: 14857 - DNA, 25 bp, Probe Sequence
atggataggtcaagcaagactgatc

SEQ ID NO: 14858 - DNA, 25 bp, Probe Sequence
tcaagaagttagaagaacaagttac

SEQ ID NO: 14859 - DNA, 25 bp, Probe Sequence
attcttctcctgttggttattctga

SEQ ID NO: 14860 - DNA, 25 bp, Probe Sequence
cattcttctcctgttggttattctg

SEQ ID NO: 14861 - DNA, 25 bp, Probe Sequence
ttcttctcctgttggttattctgag

SEQ ID NO: 14862 - DNA, 25 bp, Probe Sequence
cttctcctgttggttattctgagtc

SEQ ID NO: 14863 - DNA, 25 bp, Probe Sequence
ttctcctgttggttattctgagtct

SEQ ID NO: 14864 - DNA, 25 bp, Probe Sequence
tcttctcctgttggttattctgagt

SEQ ID NO: 14865 - DNA, 25 bp, Probe Sequence
tcctgttggttattctgagtctgac

SEQ ID NO: 14866 - DNA, 25 bp, Probe Sequence
ctgttggttattctgagtctgacac

SEQ ID NO: 14867 - DNA, 25 bp, Probe Sequence
ctcctgttggttattctgagtctga

SEQ ID NO: 14868 - DNA, 25 bp, Probe Sequence
tctcctgttggttattctgagtctg

SEQ ID NO: 14869 - DNA, 25 bp, Probe Sequence
gttggttattctgagtctgacacag

SEQ ID NO: 14870 - DNA, 25 bp, Probe Sequence
tgttggttattctgagtctgacaca

SEQ ID NO: 14871 - DNA, 25 bp, Probe Sequence
ctgttggagaactgagaatgaggtt

SEQ ID NO: 14872 - DNA, 25 bp, Probe Sequence
ccattcttctcctgttggttattct

SEQ ID NO: 14873 - DNA, 25 bp, Probe Sequence
ccttggatttcatagtttctctgtc

SEQ ID NO: 14874 - DNA, 25 bp, Probe Sequence
cctgttggttattctgagtctgaca

SEQ ID NO: 14875 - DNA, 25 bp, Probe Sequence
ctgccttggatttcatagtttctct

SEQ ID NO: 14876 - DNA, 25 bp, Probe Sequence
tttcatagtttctctgtcagtagca

SEQ ID NO: 14877 - DNA, 25 bp, Probe Sequence
tggatttcatagtttctctgtcagt

SEQ ID NO: 14878 - DNA, 25 bp, Probe Sequence
gccttggatttcatagtttctctgt

SEQ ID NO: 14879 - DNA, 25 bp, Probe Sequence
tgccttggatttcatagtttctctg

SEQ ID NO: 14880 - DNA, 25 bp, Probe Sequence
ttcatagtttctctgtcagtagcat

SEQ ID NO: 14881 - DNA, 25 bp, Probe Sequence
cttggatttcatagtttctctgtca

SEQ ID NO: 14882 - DNA, 25 bp, Probe Sequence
tccaatggctttatcctacctagat

SEQ ID NO: 14883 - DNA, 25 bp, Probe Sequence
ttggcagaacatcaagtgtatcata

SEQ ID NO: 14884 - DNA, 25 bp, Probe Sequence
cttggcagaacatcaagtgtatcat

SEQ ID NO: 14885 - DNA, 25 bp, Probe Sequence
ccttggcagaacatcaagtgtatca

SEQ ID NO: 14886 - DNA, 25 bp, Probe Sequence
cccttggcagaacatcaagtgtatc

SEQ ID NO: 14887 - DNA, 25 bp, Probe Sequence
ccccttggcagaacatcaagtgtat

SEQ ID NO: 14888 - DNA, 25 bp, Probe Sequence
tagtctcaggcttcaacatcgaata

SEQ ID NO: 14889 - DNA, 25 bp, Probe Sequence
ttcttcatagccgaatacataaaca

SEQ ID NO: 14890 - DNA, 25 bp, Probe Sequence
tcttcatagccgaatacataaacat

SEQ ID NO: 14891 - DNA, 25 bp, Probe Sequence
ttataataaacaccctcaccactgc

SEQ ID NO: 14892 - DNA, 25 bp, Probe Sequence
ctagtctcaggcttcaacatcgaat

SEQ ID NO: 14893 - DNA, 25 bp, Probe Sequence
agtctcaggcttcaacatcgaatac

SEQ ID NO: 14894 - DNA, 25 bp, Probe Sequence
cttcatagccgaatacataaacatt

SEQ ID NO: 14895 - DNA, 25 bp, Probe Sequence
aatatgatttatctccacactagca

SEQ ID NO: 14896 - DNA, 25 bp, Probe Sequence
gccataatatgatttatctccacac

SEQ ID NO: 14897 - DNA, 25 bp, Probe Sequence
taggaacaacatatgacgcactctc

SEQ ID NO: 14898 - DNA, 25 bp, Probe Sequence
ctaggaacaacatatgacgcactct

SEQ ID NO: 14899 - DNA, 25 bp, Probe Sequence
tataataaacaccctcaccactgca

SEQ ID NO: 14900 - DNA, 25 bp, Probe Sequence
cctattcttcatagccgaatacata

SEQ ID NO: 14901 - DNA, 25 bp, Probe Sequence
gcgtagctttcgtggagttctatat

SEQ ID NO: 14902 - DNA, 25 bp, Probe Sequence
gtctcaggcttcaacatcgaatacg

SEQ ID NO: 14903 - DNA, 25 bp, Probe Sequence
taataaacaccctcaccactgcaat

SEQ ID NO: 14904 - DNA, 25 bp, Probe Sequence
ataataaacaccctcaccactgcaa

SEQ ID NO: 14905 - DNA, 25 bp, Probe Sequence
ttcatagccgaatacataaacatta

SEQ ID NO: 14906 - DNA, 25 bp, Probe Sequence
attcttcatagccgaatacataaac

SEQ ID NO: 14907 - DNA, 25 bp, Probe Sequence
attataataaacaccctcaccactg

SEQ ID NO: 14908 - DNA, 25 bp, Probe Sequence
cttatgaattcgaacagcatactcc

SEQ ID NO: 14909 - DNA, 25 bp, Probe Sequence
ccctattcttcatagccgaatacat

SEQ ID NO: 14910 - DNA, 25 bp, Probe Sequence
tcatagccgaatacataaacattat

SEQ ID NO: 14911 - DNA, 25 bp, Probe Sequence
tcttatgaattcgaacagcatactc

SEQ ID NO: 14912 - DNA, 25 bp, Probe Sequence
ataatacaactcagtgctaccaagt

SEQ ID NO: 14913 - DNA, 25 bp, Probe Sequence
taatacaactcagtgctaccaagtg

SEQ ID NO: 14914 - DNA, 25 bp, Probe Sequence
tataatacaactcagtgctaccaag

SEQ ID NO: 14915 - DNA, 25 bp, Probe Sequence
gatataatacaactcagtgctacca

SEQ ID NO: 14916 - DNA, 25 bp, Probe Sequence
agatataatacaactcagtgctacc

SEQ ID NO: 14917 - DNA, 25 bp, Probe Sequence
atacaactcagtgctaccaagtgaa

SEQ ID NO: 14918 - DNA, 25 bp, Probe Sequence
aatacaactcagtgctaccaagtga

SEQ ID NO: 14919 - DNA, 25 bp, Probe Sequence
atataatacaactcagtgctaccaa

SEQ ID NO: 14920 - DNA, 25 bp, Probe Sequence
tatagtgaaggtattagcaaccgag

SEQ ID NO: 14921 - DNA, 25 bp, Probe Sequence
atagtgaaggtattagcaaccgagt

SEQ ID NO: 14922 - DNA, 25 bp, Probe Sequence
ctcctgagttcaagtgattctcctg

SEQ ID NO: 14923 - DNA, 25 bp, Probe Sequence
tagtgaaggtattagcaaccgagtt

SEQ ID NO: 14924 - DNA, 25 bp, Probe Sequence
ttcccaagagttacacacatttcta

SEQ ID NO: 14925 - DNA, 25 bp, Probe Sequence
tcccaagagttacacacatttctat

SEQ ID NO: 14926 - DNA, 25 bp, Probe Sequence
tttcccaagagttacacacatttct

SEQ ID NO: 14927 - DNA, 25 bp, Probe Sequence
ctgtcactagcactcttctttcttt

SEQ ID NO: 14928 - DNA, 25 bp, Probe Sequence
cctagcattcttctttggaaatctt

SEQ ID NO: 14929 - DNA, 25 bp, Probe Sequence
gctgatttcaaactccttacctcat

SEQ ID NO: 14930 - DNA, 25 bp, Probe Sequence
gatttcaaactccttacctcatgtg

SEQ ID NO: 14931 - DNA, 25 bp, Probe Sequence
gcctagcattcttctttggaaatct

SEQ ID NO: 14932 - DNA, 25 bp, Probe Sequence
cccaagagttacacacatttctata

SEQ ID NO: 14933 - DNA, 25 bp, Probe Sequence
ctatagtgaaggtattagcaaccga

SEQ ID NO: 14934 - DNA, 25 bp, Probe Sequence
tctatagtgaaggtattagcaaccg

SEQ ID NO: 14935 - DNA, 25 bp, Probe Sequence
cacctcctgagttcaagtgattctc

SEQ ID NO: 14936 - DNA, 25 bp, Probe Sequence
atacagacttagggacttctactgc

SEQ ID NO: 14937 - DNA, 25 bp, Probe Sequence
atctacgtattagttcatccgctat

SEQ ID NO: 14938 - DNA, 25 bp, Probe Sequence
tacagacttagggacttctactgcc

SEQ ID NO: 14939 - DNA, 25 bp, Probe Sequence
agtaccgtaagggaaagttgaaaag

SEQ ID NO: 14940 - DNA, 25 bp, Probe Sequence
cagacttagggacttctactgccag

SEQ ID NO: 14941 - DNA, 25 bp, Probe Sequence
acagacttagggacttctactgcca

SEQ ID NO: 14942 - DNA, 25 bp, Probe Sequence
agacttagggacttctactgccagt

SEQ ID NO: 14943 - DNA, 25 bp, Probe Sequence
caggagattaccagttatacaccat

SEQ ID NO: 14944 - DNA, 25 bp, Probe Sequence
ggagattaccagttatacaccatca

SEQ ID NO: 14945 - DNA, 25 bp, Probe Sequence
aggagattaccagttatacaccatc

SEQ ID NO: 14946 - DNA, 25 bp, Probe Sequence
ccaggagattaccagttatacacca

SEQ ID NO: 14947 - DNA, 25 bp, Probe Sequence
gagattaccagttatacaccatcac

SEQ ID NO: 14948 - DNA, 25 bp, Probe Sequence
agattaccagttatacaccatcact

SEQ ID NO: 14949 - DNA, 25 bp, Probe Sequence
gtggctcattcctccttataacatt

SEQ ID NO: 14950 - DNA, 25 bp, Probe Sequence
aaagcccaggagattaccagttata

SEQ ID NO: 14951 - DNA, 25 bp, Probe Sequence
cgtggctcattcctccttataacat

SEQ ID NO: 14952 - DNA, 25 bp, Probe Sequence
aagcccaggagattaccagttatac

SEQ ID NO: 14953 - DNA, 25 bp, Probe Sequence
cccaggagattaccagttatacacc

SEQ ID NO: 14954 - DNA, 25 bp, Probe Sequence
tggctcattcctccttataacattt

SEQ ID NO: 14955 - DNA, 25 bp, Probe Sequence
gctcattcctccttataacatttcc

SEQ ID NO: 14956 - DNA, 25 bp, Probe Sequence
ggctcattcctccttataacatttc

SEQ ID NO: 14957 - DNA, 25 bp, Probe Sequence
attcctccttataacatttccctgc

SEQ ID NO: 14958 - DNA, 25 bp, Probe Sequence
cattcctccttataacatttccctg

SEQ ID NO: 14959 - DNA, 25 bp, Probe Sequence
tcattcctccttataacatttccct

SEQ ID NO: 14960 - DNA, 25 bp, Probe Sequence
ctccttataacatttccctgccttc

SEQ ID NO: 14961 - DNA, 25 bp, Probe Sequence
ctcattcctccttataacatttccc

SEQ ID NO: 14962 - DNA, 25 bp, Probe Sequence
caaagcccaggagattaccagttat

SEQ ID NO: 14963 - DNA, 25 bp, Probe Sequence
gcccaggagattaccagttatacac

SEQ ID NO: 14964 - DNA, 25 bp, Probe Sequence
catcttattcagcttcggtgtcact

SEQ ID NO: 14965 - DNA, 25 bp, Probe Sequence
cttataacatttccctgccttctgg

SEQ ID NO: 14966 - DNA, 25 bp, Probe Sequence
ccttataacatttccctgccttctg

SEQ ID NO: 14967 - DNA, 25 bp, Probe Sequence
gaccggataacaatttcacacagga

SEQ ID NO: 14968 - DNA, 25 bp, Probe Sequence
ctgttttgacctccctagaagacac

SEQ ID NO: 14969 - DNA, 25 bp, Probe Sequence
ggaccggataacaatttcacacagg

SEQ ID NO: 14970 - DNA, 25 bp, Probe Sequence
gggaccggataacaatttcacacag

SEQ ID NO: 14971 - DNA, 25 bp, Probe Sequence
tgttttgacctccctagaagacacc

SEQ ID NO: 14972 - DNA, 25 bp, Probe Sequence
gctgttttgacctccctagaagaca

SEQ ID NO: 14973 - DNA, 25 bp, Probe Sequence
tggaggtctatataagcagagctcg

SEQ ID NO: 14974 - DNA, 25 bp, Probe Sequence
gttttgacctccctagaagacaccg

SEQ ID NO: 14975 - DNA, 25 bp, Probe Sequence
cgctgttttgacctccctagaagac

SEQ ID NO: 14976 - DNA, 25 bp, Probe Sequence
gaaggtggagaagagaggagataac

SEQ ID NO: 14977 - DNA, 25 bp, Probe Sequence
aaggtggagaagagaggagataaca

SEQ ID NO: 14978 - DNA, 25 bp, Probe Sequence
aggcaataattcctatacgaagcaa

SEQ ID NO: 14979 - DNA, 25 bp, Probe Sequence
aaggcaataattcctatacgaagca

SEQ ID NO: 14980 - DNA, 25 bp, Probe Sequence
aataacaacatgacaatcaggtgga

SEQ ID NO: 14981 - DNA, 25 bp, Probe Sequence
ataacaacatgacaatcaggtggag

SEQ ID NO: 14982 - DNA, 25 bp, Probe Sequence
aggtggagaagagaggagataacag

SEQ ID NO: 14983 - DNA, 25 bp, Probe Sequence
ggaaggtggagaagagaggagataa

SEQ ID NO: 14984 - DNA, 25 bp, Probe Sequence
atatggaaggtggagaagagaggag

SEQ ID NO: 14985 - DNA, 25 bp, Probe Sequence
gatatggaaggtggagaagagagga

SEQ ID NO: 14986 - DNA, 25 bp, Probe Sequence
taaggcaataattcctatacgaagc

SEQ ID NO: 14987 - DNA, 25 bp, Probe Sequence
ataattccattgaaccttgattctg

SEQ ID NO: 14988 - DNA, 25 bp, Probe Sequence
taattccattgaaccttgattctgg

SEQ ID NO: 14989 - DNA, 25 bp, Probe Sequence
tggatatggaaggtggagaagagag

SEQ ID NO: 14990 - DNA, 25 bp, Probe Sequence
ttgaaccttgattctggaaactttg

SEQ ID NO: 14991 - DNA, 25 bp, Probe Sequence
cattgaaccttgattctggaaactt

SEQ ID NO: 14992 - DNA, 25 bp, Probe Sequence
gaaccttgattctggaaactttgat

SEQ ID NO: 14993 - DNA, 25 bp, Probe Sequence
gtggatatggaaggtggagaagaga

SEQ ID NO: 14994 - DNA, 25 bp, Probe Sequence
attgaaccttgattctggaaacttt

SEQ ID NO: 14995 - DNA, 25 bp, Probe Sequence
ggcaataattcctatacgaagcaaa

SEQ ID NO: 14996 - DNA, 25 bp, Probe Sequence
tgaaccttgattctggaaactttga

SEQ ID NO: 14997 - DNA, 25 bp, Probe Sequence
caatcaggtggaggaaatgtataat

SEQ ID NO: 14998 - DNA, 25 bp, Probe Sequence
aatggtggatatggaaggtggagaa

SEQ ID NO: 14999 - DNA, 25 bp, Probe Sequence
gcaataattcctatacgaagcaaac

SEQ ID NO: 15000 - DNA, 25 bp, Probe Sequence
agatttatagttgagtcccacatcg

SEQ ID NO: 15001 - DNA, 25 bp, Probe Sequence
caatgttgatgaggacaagaccttc

SEQ ID NO: 15002 - DNA, 25 bp, Probe Sequence
gatttatagttgagtcccacatcgt

SEQ ID NO: 15003 - DNA, 25 bp, Probe Sequence
aatgttgatgaggacaagaccttca

SEQ ID NO: 15004 - DNA, 25 bp, Probe Sequence
aagcaagatttatagttgagtccca

SEQ ID NO: 15005 - DNA, 25 bp, Probe Sequence
gaagcaagatttatagttgagtccc

SEQ ID NO: 15006 - DNA, 25 bp, Probe Sequence
agcaagatttatagttgagtcccac

SEQ ID NO: 15007 - DNA, 25 bp, Probe Sequence
cacaaagttctgaatgatttcctgc

SEQ ID NO: 15008 - DNA, 25 bp, Probe Sequence
gcacaaagttctgaatgatttcctg

SEQ ID NO: 15009 - DNA, 25 bp, Probe Sequence
taagagcatatctcgccaggatgta

SEQ ID NO: 15010 - DNA, 25 bp, Probe Sequence
gcaagatttatagttgagtcccaca

SEQ ID NO: 15011 - DNA, 25 bp, Probe Sequence
tggaagcaagatttatagttgagtc

SEQ ID NO: 15012 - DNA, 25 bp, Probe Sequence
tatcaactcagaatttccagagagc

SEQ ID NO: 15013 - DNA, 25 bp, Probe Sequence
ctggaagcaagatttatagttgagt

SEQ ID NO: 15014 - DNA, 25 bp, Probe Sequence
tcaatgttgatgaggacaagacctt

SEQ ID NO: 15015 - DNA, 25 bp, Probe Sequence
aagatttatagttgagtcccacatc

SEQ ID NO: 15016 - DNA, 25 bp, Probe Sequence
tgtatcaactcagaatttccagaga

SEQ ID NO: 15017 - DNA, 25 bp, Probe Sequence
caagatttatagttgagtcccacat

SEQ ID NO: 15018 - DNA, 25 bp, Probe Sequence
gtatcaactcagaatttccagagag

SEQ ID NO: 15019 - DNA, 25 bp, Probe Sequence
ttgtatcaactcagaatttccagag

SEQ ID NO: 15020 - DNA, 25 bp, Probe Sequence
gttaagagcatatctcgccaggatg

SEQ ID NO: 15021 - DNA, 25 bp, Probe Sequence
tttgtatcaactcagaatttccaga

SEQ ID NO: 15022 - DNA, 25 bp, Probe Sequence
atttatagttgagtcccacatcgtg

SEQ ID NO: 15023 - DNA, 25 bp, Probe Sequence
ggaagcaagatttatagttgagtcc

SEQ ID NO: 15024 - DNA, 25 bp, Probe Sequence
gcagatgacaatttaaggaagaatc

SEQ ID NO: 15025 - DNA, 25 bp, Probe Sequence
gtgcagatgacaatttaaggaagaa

SEQ ID NO: 15026 - DNA, 25 bp, Probe Sequence
aagtgcagatgacaatttaaggaag

SEQ ID NO: 15027 - DNA, 25 bp, Probe Sequence
gaagtgcagatgacaatttaaggaa

SEQ ID NO: 15028 - DNA, 25 bp, Probe Sequence
agtgcagatgacaatttaaggaaga

SEQ ID NO: 15029 - DNA, 25 bp, Probe Sequence
tgaagtgcagatgacaatttaagga

SEQ ID NO: 15030 - DNA, 25 bp, Probe Sequence
tgcagatgacaatttaaggaagaat

SEQ ID NO: 15031 - DNA, 25 bp, Probe Sequence
cctgtaccacaaacacattacatta

SEQ ID NO: 15032 - DNA, 25 bp, Probe Sequence
ctttctcaggacctagttgctactg

SEQ ID NO: 15033 - DNA, 25 bp, Probe Sequence
ctgaagtgcagatgacaatttaagg

SEQ ID NO: 15034 - DNA, 25 bp, Probe Sequence
ccctgtaccacaaacacattacatt

SEQ ID NO: 15035 - DNA, 25 bp, Probe Sequence
gctgaagtgcagatgacaatttaag

SEQ ID NO: 15036 - DNA, 25 bp, Probe Sequence
agctgaagtgcagatgacaatttaa

SEQ ID NO: 15037 - DNA, 25 bp, Probe Sequence
ttattcttccacgagagagggcttt

SEQ ID NO: 15038 - DNA, 25 bp, Probe Sequence
ctggtctgttctgttgagtggtttc

SEQ ID NO: 15039 - DNA, 25 bp, Probe Sequence
gagctgaagtgcagatgacaattta

SEQ ID NO: 15040 - DNA, 25 bp, Probe Sequence
tcaccctgtaccacaaacacattac

SEQ ID NO: 15041 - DNA, 25 bp, Probe Sequence
ggctgttattcttccacgagagagg

SEQ ID NO: 15042 - DNA, 25 bp, Probe Sequence
accctgtaccacaaacacattacat

SEQ ID NO: 15043 - DNA, 25 bp, Probe Sequence
tggctgttattcttccacgagagag

SEQ ID NO: 15044 - DNA, 25 bp, Probe Sequence
ctggctgttattcttccacgagaga

SEQ ID NO: 15045 - DNA, 25 bp, Probe Sequence
ctcaggacctagttgctactggttc

SEQ ID NO: 15046 - DNA, 25 bp, Probe Sequence
ctgtaccacaaacacattacattat

SEQ ID NO: 15047 - DNA, 25 bp, Probe Sequence
ctgagctgaagtgcagatgacaatt

SEQ ID NO: 15048 - DNA, 25 bp, Probe Sequence
caatgggtggagtattacggtaaac

SEQ ID NO: 15049 - DNA, 25 bp, Probe Sequence
tcaatgggtggagtattacggtaaa

SEQ ID NO: 15050 - DNA, 25 bp, Probe Sequence
aatgggtggagtattacggtaaact

SEQ ID NO: 15051 - DNA, 25 bp, Probe Sequence
gtcaatgggtggagtattacggtaa

SEQ ID NO: 15052 - DNA, 25 bp, Probe Sequence
atgggtggagtattacggtaaactg

SEQ ID NO: 15053 - DNA, 25 bp, Probe Sequence
gagtattacggtaaactgcccactg

SEQ ID NO: 15054 - DNA, 25 bp, Probe Sequence
ggagtattacggtaaactgcccact

SEQ ID NO: 15055 - DNA, 25 bp, Probe Sequence
tgggtggagtattacggtaaactgc

SEQ ID NO: 15056 - DNA, 25 bp, Probe Sequence
tggagtattacggtaaactgcccac

SEQ ID NO: 15057 - DNA, 25 bp, Probe Sequence
gtggagtattacggtaaactgccca

SEQ ID NO: 15058 - DNA, 25 bp, Probe Sequence
agtattacggtaaactgcccactgc

SEQ ID NO: 15059 - DNA, 25 bp, Probe Sequence
ggtggagtattacggtaaactgccc

SEQ ID NO: 15060 - DNA, 25 bp, Probe Sequence
gggtggagtattacggtaaactgcc

SEQ ID NO: 15061 - DNA, 25 bp, Probe Sequence
cgtcaatgggtggagtattacggta

SEQ ID NO: 15062 - DNA, 25 bp, Probe Sequence
tcaatggtggagtatttacggaaac

SEQ ID NO: 15063 - DNA, 25 bp, Probe Sequence
gtcaatggtggagtatttacggaaa

SEQ ID NO: 15064 - DNA, 25 bp, Probe Sequence
cgtatttagtcatcgctattaccaa

SEQ ID NO: 15065 - DNA, 25 bp, Probe Sequence
tgagaaaccagagaaggagaagaaa

SEQ ID NO: 15066 - DNA, 25 bp, Probe Sequence
ttgagaaaccagagaaggagaagaa

SEQ ID NO: 15067 - DNA, 25 bp, Probe Sequence
tggcagtacatcaagtgtatcaata

SEQ ID NO: 15068 - DNA, 25 bp, Probe Sequence
atttagtcatcgctattaccaatgg

SEQ ID NO: 15069 - DNA, 25 bp, Probe Sequence
aatggtggagtatttacggaaactg

SEQ ID NO: 15070 - DNA, 25 bp, Probe Sequence
caatggtggagtatttacggaaact

SEQ ID NO: 15071 - DNA, 25 bp, Probe Sequence
cttgagaaaccagagaaggagaaga

SEQ ID NO: 15072 - DNA, 25 bp, Probe Sequence
ttagtcatcgctattaccaatggtg

SEQ ID NO: 15073 - DNA, 25 bp, Probe Sequence
tagtcatcgctattaccaatggtga

SEQ ID NO: 15074 - DNA, 25 bp, Probe Sequence
agtcatcgctattaccaatggtgat

SEQ ID NO: 15075 - DNA, 25 bp, Probe Sequence
atggtggagtatttacggaaactgg

SEQ ID NO: 15076 - DNA, 25 bp, Probe Sequence
gtatttagtcatcgctattaccaat

SEQ ID NO: 15077 - DNA, 25 bp, Probe Sequence
gcttgagaaaccagagaaggagaag

SEQ ID NO: 15078 - DNA, 25 bp, Probe Sequence
tatttagtcatcgctattaccaatg

SEQ ID NO: 15079 - DNA, 25 bp, Probe Sequence
tttagtcatcgctattaccaatggt

SEQ ID NO: 15080 - DNA, 25 bp, Probe Sequence
gagaaaccagagaaggagaagaaaa

SEQ ID NO: 15081 - DNA, 25 bp, Probe Sequence
gcagtacatcaagtgtatcaatatt

SEQ ID NO: 15082 - DNA, 25 bp, Probe Sequence
gtcatcgctattaccaatggtgatg

SEQ ID NO: 15083 - DNA, 25 bp, Probe Sequence
gcaagtacatctacgtatttagtca

SEQ ID NO: 15084 - DNA, 25 bp, Probe Sequence
tgcaagtacatctacgtatttagtc

SEQ ID NO: 15085 - DNA, 25 bp, Probe Sequence
agcttgagaaaccagagaaggagaa

SEQ ID NO: 15086 - DNA, 25 bp, Probe Sequence
agaaaggatcataagtgaacggaaa

SEQ ID NO: 15087 - DNA, 25 bp, Probe Sequence
aagaaaggatcataagtgaacggaa

SEQ ID NO: 15088 - DNA, 25 bp, Probe Sequence
caagaaaggatcataagtgaacgga

SEQ ID NO: 15089 - DNA, 25 bp, Probe Sequence
gcaagaaaggatcataagtgaacgg

SEQ ID NO: 15090 - DNA, 25 bp, Probe Sequence
tgcaagaaaggatcataagtgaacg

SEQ ID NO: 15091 - DNA, 25 bp, Probe Sequence
aaaggatcataagtgaacggaaaag

SEQ ID NO: 15092 - DNA, 25 bp, Probe Sequence
gaaaggatcataagtgaacggaaaa

SEQ ID NO: 15093 - DNA, 25 bp, Probe Sequence
aaggatcataagtgaacggaaaagc

SEQ ID NO: 15094 - DNA, 25 bp, Probe Sequence
attgacgcaaatggtcgtagtctta

SEQ ID NO: 15095 - DNA, 25 bp, Probe Sequence
ttgcaagaaaggatcataagtgaac

SEQ ID NO: 15096 - DNA, 25 bp, Probe Sequence
gatcataagtgaacggaaaagctgg

SEQ ID NO: 15097 - DNA, 25 bp, Probe Sequence
ggatcataagtgaacggaaaagctg

SEQ ID NO: 15098 - DNA, 25 bp, Probe Sequence
aggatcataagtgaacggaaaagct

SEQ ID NO: 15099 - DNA, 25 bp, Probe Sequence
tttgcaagaaaggatcataagtgaa

SEQ ID NO: 15100 - DNA, 25 bp, Probe Sequence
ttgacgcaaatggtcgtagtcttac

SEQ ID NO: 15101 - DNA, 25 bp, Probe Sequence
cattgacgcaaatggtcgtagtctt

SEQ ID NO: 15102 - DNA, 25 bp, Probe Sequence
agctcttttagtgaacgtcagatcg

SEQ ID NO: 15103 - DNA, 25 bp, Probe Sequence
ataagtgaacggaaaagctgggaac

SEQ ID NO: 15104 - DNA, 25 bp, Probe Sequence
cataagtgaacggaaaagctgggaa

SEQ ID NO: 15105 - DNA, 25 bp, Probe Sequence
atcataagtgaacggaaaagctggg

SEQ ID NO: 15106 - DNA, 25 bp, Probe Sequence
gcttccaaatgttgtaacactcggc

SEQ ID NO: 15107 - DNA, 25 bp, Probe Sequence
ctcttttagtgaacgtcagatcgcc

SEQ ID NO: 15108 - DNA, 25 bp, Probe Sequence
ttttgcaagaaaggatcataagtga

SEQ ID NO: 15109 - DNA, 25 bp, Probe Sequence
tcataagtgaacggaaaagctggga

SEQ ID NO: 15110 - DNA, 25 bp, Probe Sequence
tacagaagaccagacatctatcaga

SEQ ID NO: 15111 - DNA, 25 bp, Probe Sequence
gttacagaagaccagacatctatca

SEQ ID NO: 15112 - DNA, 25 bp, Probe Sequence
cgttacagaagaccagacatctatc

SEQ ID NO: 15113 - DNA, 25 bp, Probe Sequence
acagaagaccagacatctatcagaa

SEQ ID NO: 15114 - DNA, 25 bp, Probe Sequence
ttacagaagaccagacatctatcag

SEQ ID NO: 15115 - DNA, 25 bp, Probe Sequence
tcgttacagaagaccagacatctat

SEQ ID NO: 15116 - DNA, 25 bp, Probe Sequence
ctcgttacagaagaccagacatcta

SEQ ID NO: 15117 - DNA, 25 bp, Probe Sequence
tagcagtgtgagaacagactaatac

SEQ ID NO: 15118 - DNA, 25 bp, Probe Sequence
ttatagcagtgtgagaacagactaa

SEQ ID NO: 15119 - DNA, 25 bp, Probe Sequence
atagcagtgtgagaacagactaata

SEQ ID NO: 15120 - DNA, 25 bp, Probe Sequence
tatagcagtgtgagaacagactaat

SEQ ID NO: 15121 - DNA, 25 bp, Probe Sequence
gtgagaacagactaatacacagacc

SEQ ID NO: 15122 - DNA, 25 bp, Probe Sequence
agcagtgtgagaacagactaataca

SEQ ID NO: 15123 - DNA, 25 bp, Probe Sequence
aacagactaatacacagacccaaag

SEQ ID NO: 15124 - DNA, 25 bp, Probe Sequence
tacatccaacagccatgagtaacat

SEQ ID NO: 15125 - DNA, 25 bp, Probe Sequence
gaacagactaatacacagacccaaa

SEQ ID NO: 15126 - DNA, 25 bp, Probe Sequence
cactaaggacacatttactcatctg

SEQ ID NO: 15127 - DNA, 25 bp, Probe Sequence
tcactaaggacacatttactcatct

SEQ ID NO: 15128 - DNA, 25 bp, Probe Sequence
atttaaggttgaagatggctggaat

SEQ ID NO: 15129 - DNA, 25 bp, Probe Sequence
actaaggacacatttactcatctga

SEQ ID NO: 15130 - DNA, 25 bp, Probe Sequence
agaacagactaatacacagacccaa

SEQ ID NO: 15131 - DNA, 25 bp, Probe Sequence
cagaagaccagacatctatcagaaa

SEQ ID NO: 15132 - DNA, 25 bp, Probe Sequence
gaaccagaacaggacataaagtgag

SEQ ID NO: 15133 - DNA, 25 bp, Probe Sequence
gatttaaggttgaagatggctggaa

SEQ ID NO: 15134 - DNA, 25 bp, Probe Sequence
taacttccacatttcaacacacttc

SEQ ID NO: 15135 - DNA, 25 bp, Probe Sequence
ataacttccacatttcaacacactt

SEQ ID NO: 15136 - DNA, 25 bp, Probe Sequence
aataacttccacatttcaacacact

SEQ ID NO: 15137 - DNA, 25 bp, Probe Sequence
aacttccacatttcaacacacttca

SEQ ID NO: 15138 - DNA, 25 bp, Probe Sequence
tagaatatgtctgctctcctttgct

SEQ ID NO: 15139 - DNA, 25 bp, Probe Sequence
ctagaatatgtctgctctcctttgc

SEQ ID NO: 15140 - DNA, 25 bp, Probe Sequence
ttccacatttcaacacacttcacag

SEQ ID NO: 15141 - DNA, 25 bp, Probe Sequence
cttccacatttcaacacacttcaca

SEQ ID NO: 15142 - DNA, 25 bp, Probe Sequence
acttccacatttcaacacacttcac

SEQ ID NO: 15143 - DNA, 25 bp, Probe Sequence
catttcaacacacttcacagtacag

SEQ ID NO: 15144 - DNA, 25 bp, Probe Sequence
ccacatttcaacacacttcacagta

SEQ ID NO: 15145 - DNA, 25 bp, Probe Sequence
cacatttcaacacacttcacagtac

SEQ ID NO: 15146 - DNA, 25 bp, Probe Sequence
aaataacttccacatttcaacacac

SEQ ID NO: 15147 - DNA, 25 bp, Probe Sequence
acatttcaacacacttcacagtaca

SEQ ID NO: 15148 - DNA, 25 bp, Probe Sequence
aatatgtctgctctcctttgctctc

SEQ ID NO: 15149 - DNA, 25 bp, Probe Sequence
gaatatgtctgctctcctttgctct

SEQ ID NO: 15150 - DNA, 25 bp, Probe Sequence
atttcaacacacttcacagtacagg

SEQ ID NO: 15151 - DNA, 25 bp, Probe Sequence
aatctagaatatgtctgctctcctt

SEQ ID NO: 15152 - DNA, 25 bp, Probe Sequence
agaatatgtctgctctcctttgctc

SEQ ID NO: 15153 - DNA, 25 bp, Probe Sequence
tttcaacacacttcacagtacagga

SEQ ID NO: 15154 - DNA, 25 bp, Probe Sequence
atatgtctgctctcctttgctctct

SEQ ID NO: 15155 - DNA, 25 bp, Probe Sequence
attaaagctgggtccctaacttcaa

SEQ ID NO: 15156 - DNA, 25 bp, Probe Sequence
tccacatttcaacacacttcacagt

SEQ ID NO: 15157 - DNA, 25 bp, Probe Sequence
gattaaagctgggtccctaacttca

SEQ ID NO: 15158 - DNA, 25 bp, Probe Sequence
agaaggaggatgtggttaatctgtt

SEQ ID NO: 15159 - DNA, 25 bp, Probe Sequence
aagaaggaggatgtggttaatctgt

SEQ ID NO: 15160 - DNA, 25 bp, Probe Sequence
aagtatgagaacacagttgtcctct

SEQ ID NO: 15161 - DNA, 25 bp, Probe Sequence
gagcacttaattcttcccatttcaa

SEQ ID NO: 15162 - DNA, 25 bp, Probe Sequence
agcacttaattcttcccatttcaaa

SEQ ID NO: 15163 - DNA, 25 bp, Probe Sequence
aaggaggatgtggttaatctgtttc

SEQ ID NO: 15164 - DNA, 25 bp, Probe Sequence
gaaggaggatgtggttaatctgttt

SEQ ID NO: 15165 - DNA, 25 bp, Probe Sequence
aaagaaggaggatgtggttaatctg

SEQ ID NO: 15166 - DNA, 25 bp, Probe Sequence
caaagaaggaggatgtggttaatct

SEQ ID NO: 15167 - DNA, 25 bp, Probe Sequence
gttaatctgtttcacctggtttgtc

SEQ ID NO: 15168 - DNA, 25 bp, Probe Sequence
aggaggatgtggttaatctgtttca

SEQ ID NO: 15169 - DNA, 25 bp, Probe Sequence
ttaatctgtttcacctggtttgtcc

SEQ ID NO: 15170 - DNA, 25 bp, Probe Sequence
taaagtatgagaacacagttgtcct

SEQ ID NO: 15171 - DNA, 25 bp, Probe Sequence
aaagtatgagaacacagttgtcctc

SEQ ID NO: 15172 - DNA, 25 bp, Probe Sequence
ttaaagtatgagaacacagttgtcc

SEQ ID NO: 15173 - DNA, 25 bp, Probe Sequence
atctgtttcacctggtttgtcctaa

SEQ ID NO: 15174 - DNA, 25 bp, Probe Sequence
aatctgtttcacctggtttgtccta

SEQ ID NO: 15175 - DNA, 25 bp, Probe Sequence
taatctgtttcacctggtttgtcct

SEQ ID NO: 15176 - DNA, 25 bp, Probe Sequence
atgtgaacaccatcatgcctttata

SEQ ID NO: 15177 - DNA, 25 bp, Probe Sequence
tgtgaacaccatcatgcctttataa

SEQ ID NO: 15178 - DNA, 25 bp, Probe Sequence
atacaaccctctgctttcacatctc

SEQ ID NO: 15179 - DNA, 25 bp, Probe Sequence
tggctaacctgaccaataaagttat

SEQ ID NO: 15180 - DNA, 25 bp, Probe Sequence
ccctgatactgtgtatgctttgaag

SEQ ID NO: 15181 - DNA, 25 bp, Probe Sequence
atccctgatactgtgtatgctttga

SEQ ID NO: 15182 - DNA, 25 bp, Probe Sequence
aatcaaggtgtatcaagccaagtac

SEQ ID NO: 15183 - DNA, 25 bp, Probe Sequence
aaatcaaggtgtatcaagccaagta

SEQ ID NO: 15184 - DNA, 25 bp, Probe Sequence
attatgccgcagtacatgaccttat

SEQ ID NO: 15185 - DNA, 25 bp, Probe Sequence
gaaatcaaggtgtatcaagccaagt

SEQ ID NO: 15186 - DNA, 25 bp, Probe Sequence
atcaaggtgtatcaagccaagtacg

SEQ ID NO: 15187 - DNA, 25 bp, Probe Sequence
ttatgccgcagtacatgaccttatg

SEQ ID NO: 15188 - DNA, 25 bp, Probe Sequence
cattatgccgcagtacatgacctta

SEQ ID NO: 15189 - DNA, 25 bp, Probe Sequence
acaatctacgtattagtcatcgcta

SEQ ID NO: 15190 - DNA, 25 bp, Probe Sequence
ttcctactgcaagtacaatctacgt

SEQ ID NO: 15191 - DNA, 25 bp, Probe Sequence
tacaatctacgtattagtcatcgct

SEQ ID NO: 15192 - DNA, 25 bp, Probe Sequence
gtacaatctacgtattagtcatcgc

SEQ ID NO: 15193 - DNA, 25 bp, Probe Sequence
gcaagtacaatctacgtattagtca

SEQ ID NO: 15194 - DNA, 25 bp, Probe Sequence
tgcaagtacaatctacgtattagtc

SEQ ID NO: 15195 - DNA, 25 bp, Probe Sequence
ctgcaagtacaatctacgtattagt

SEQ ID NO: 15196 - DNA, 25 bp, Probe Sequence
caatctacgtattagtcatcgctat

SEQ ID NO: 15197 - DNA, 25 bp, Probe Sequence
actgcaagtacaatctacgtattag

SEQ ID NO: 15198 - DNA, 25 bp, Probe Sequence
agtacaatctacgtattagtcatcg

SEQ ID NO: 15199 - DNA, 25 bp, Probe Sequence
gcagtacatgaccttatgggacttt

SEQ ID NO: 15200 - DNA, 25 bp, Probe Sequence
cctactgcaagtacaatctacgtat

SEQ ID NO: 15201 - DNA, 25 bp, Probe Sequence
tcctactgcaagtacaatctacgta

SEQ ID NO: 15202 - DNA, 25 bp, Probe Sequence
tttcctactgcaagtacaatctacg

SEQ ID NO: 15203 - DNA, 25 bp, Probe Sequence
ctttcctactgcaagtacaatctac

SEQ ID NO: 15204 - DNA, 25 bp, Probe Sequence
tgggaggtctatataatgcagagct

SEQ ID NO: 15205 - DNA, 25 bp, Probe Sequence
gtgggaggtctatataatgcagagc

SEQ ID NO: 15206 - DNA, 25 bp, Probe Sequence
ttgacttctatgtcggtataatggc

SEQ ID NO: 15207 - DNA, 25 bp, Probe Sequence
attgacttctatgtcggtataatgg

SEQ ID NO: 15208 - DNA, 25 bp, Probe Sequence
atcaaggtgtatcatatgccaagta

SEQ ID NO: 15209 - DNA, 25 bp, Probe Sequence
tcaaggtgtatcatatgccaagtac

SEQ ID NO: 15210 - DNA, 25 bp, Probe Sequence
cctattgacttctatgtcggtataa

SEQ ID NO: 15211 - DNA, 25 bp, Probe Sequence
catcaaggtgtatcatatgccaagt

SEQ ID NO: 15212 - DNA, 25 bp, Probe Sequence
caaggtgtatcatatgccaagtacg

SEQ ID NO: 15213 - DNA, 25 bp, Probe Sequence
ccctattgacttctatgtcggtata

SEQ ID NO: 15214 - DNA, 25 bp, Probe Sequence
acatcaaggtgtatcatatgccaag

SEQ ID NO: 15215 - DNA, 25 bp, Probe Sequence
tgcagtacatcaaggtgtatcatat

SEQ ID NO: 15216 - DNA, 25 bp, Probe Sequence
gtgcagtacatcaaggtgtatcata

SEQ ID NO: 15217 - DNA, 25 bp, Probe Sequence
tacatcaaggtgtatcatatgccaa

SEQ ID NO: 15218 - DNA, 25 bp, Probe Sequence
agtacatcaaggtgtatcatatgcc

SEQ ID NO: 15219 - DNA, 25 bp, Probe Sequence
gtacatcaaggtgtatcatatgcca

SEQ ID NO: 15220 - DNA, 25 bp, Probe Sequence
cagtacatcaaggtgtatcatatgc

SEQ ID NO: 15221 - DNA, 25 bp, Probe Sequence
gcagtacatcaaggtgtatcatatg

SEQ ID NO: 15222 - DNA, 25 bp, Probe Sequence
aaggtgtatcatatgccaagtacgc

SEQ ID NO: 15223 - DNA, 25 bp, Probe Sequence
tgtgcagtacatcaaggtgtatcat

SEQ ID NO: 15224 - DNA, 25 bp, Probe Sequence
tattgacttctatgtcggtataatg

SEQ ID NO: 15225 - DNA, 25 bp, Probe Sequence
tgacttctatgtcggtataatggcc

SEQ ID NO: 15226 - DNA, 25 bp, Probe Sequence
ctgtgcagtacatcaaggtgtatca

SEQ ID NO: 15227 - DNA, 25 bp, Probe Sequence
actgtgcagtacatcaaggtgtatc

SEQ ID NO: 15228 - DNA, 25 bp, Probe Sequence
ctattgacttctatgtcggtataat

SEQ ID NO: 15229 - DNA, 25 bp, Probe Sequence
cactgtgcagtacatcaaggtgtat

SEQ ID NO: 15230 - DNA, 25 bp, Probe Sequence
ggaaacagcttatgacccattaggc

SEQ ID NO: 15231 - DNA, 25 bp, Probe Sequence
gatgggactttcctacttgcagtac

SEQ ID NO: 15232 - DNA, 25 bp, Probe Sequence
agggaaacagcttatgacccattag

SEQ ID NO: 15233 - DNA, 25 bp, Probe Sequence
cagggaaacagcttatgacccatta

SEQ ID NO: 15234 - DNA, 25 bp, Probe Sequence
tgatgggactttcctacttgcagta

SEQ ID NO: 15235 - DNA, 25 bp, Probe Sequence
agctgttttgacactctcactatga

SEQ ID NO: 15236 - DNA, 25 bp, Probe Sequence
ggacctgatgggactttcctacttg

SEQ ID NO: 15237 - DNA, 25 bp, Probe Sequence
gggaaacagcttatgacccattagg

SEQ ID NO: 15238 - DNA, 25 bp, Probe Sequence
gaaacagcttatgacccattaggcc

SEQ ID NO: 15239 - DNA, 25 bp, Probe Sequence
gacctgatgggactttcctacttgc

SEQ ID NO: 15240 - DNA, 25 bp, Probe Sequence
acaaccagggaaacagcttatgacc

SEQ ID NO: 15241 - DNA, 25 bp, Probe Sequence
ctgatgggactttcctacttgcagt

SEQ ID NO: 15242 - DNA, 25 bp, Probe Sequence
gctgttttgacactctcactatgag

SEQ ID NO: 15243 - DNA, 25 bp, Probe Sequence
cctgatgggactttcctacttgcag

SEQ ID NO: 15244 - DNA, 25 bp, Probe Sequence
ccagggaaacagcttatgacccatt

SEQ ID NO: 15245 - DNA, 25 bp, Probe Sequence
tacaggacctgatgggactttccta

SEQ ID NO: 15246 - DNA, 25 bp, Probe Sequence
aggacctgatgggactttcctactt

SEQ ID NO: 15247 - DNA, 25 bp, Probe Sequence
caggacctgatgggactttcctact

SEQ ID NO: 15248 - DNA, 25 bp, Probe Sequence
gccaaccattccatatctgttaagt

SEQ ID NO: 15249 - DNA, 25 bp, Probe Sequence
ttacttcgccaaccattccatatct

SEQ ID NO: 15250 - DNA, 25 bp, Probe Sequence
ccaaccattccatatctgttaagta

SEQ ID NO: 15251 - DNA, 25 bp, Probe Sequence
tagtacatcttacaactccgcatac

SEQ ID NO: 15252 - DNA, 25 bp, Probe Sequence
gtagtacatcttacaactccgcata

SEQ ID NO: 15253 - DNA, 25 bp, Probe Sequence
gatcgtagtacatcttacaactccg

SEQ ID NO: 15254 - DNA, 25 bp, Probe Sequence
cgccaaccattccatatctgttaag

SEQ ID NO: 15255 - DNA, 25 bp, Probe Sequence
ttcgccaaccattccatatctgtta

SEQ ID NO: 15256 - DNA, 25 bp, Probe Sequence
tcgccaaccattccatatctgttaa

SEQ ID NO: 15257 - DNA, 25 bp, Probe Sequence
tacttcgccaaccattccatatctg

SEQ ID NO: 15258 - DNA, 25 bp, Probe Sequence
tatattgcactggctattcatcttg

SEQ ID NO: 15259 - DNA, 25 bp, Probe Sequence
atttacttcgccaaccattccatat

SEQ ID NO: 15260 - DNA, 25 bp, Probe Sequence
agtacatcttacaactccgcatacc

SEQ ID NO: 15261 - DNA, 25 bp, Probe Sequence
atcgtagtacatcttacaactccgc

SEQ ID NO: 15262 - DNA, 25 bp, Probe Sequence
tccctagaaactgccatttacttaa

SEQ ID NO: 15263 - DNA, 25 bp, Probe Sequence
aatttacttcgccaaccattccata

SEQ ID NO: 15264 - DNA, 25 bp, Probe Sequence
tttacttcgccaaccattccatatc

SEQ ID NO: 15265 - DNA, 25 bp, Probe Sequence
attccctagaaactgccatttactt

SEQ ID NO: 15266 - DNA, 25 bp, Probe Sequence
atcattccctagaaactgccattta

SEQ ID NO: 15267 - DNA, 25 bp, Probe Sequence
ttccctagaaactgccatttactta

SEQ ID NO: 15268 - DNA, 25 bp, Probe Sequence
ccctagaaactgccatttacttaaa

SEQ ID NO: 15269 - DNA, 25 bp, Probe Sequence
cgtagtacatcttacaactccgcat

SEQ ID NO: 15270 - DNA, 25 bp, Probe Sequence
cattccctagaaactgccatttact

SEQ ID NO: 15271 - DNA, 25 bp, Probe Sequence
tcattccctagaaactgccatttac

SEQ ID NO: 15272 - DNA, 25 bp, Probe Sequence
aagtcaactgtgtgagtgtgataag

SEQ ID NO: 15273 - DNA, 25 bp, Probe Sequence
gaagtcaactgtgtgagtgtgataa

SEQ ID NO: 15274 - DNA, 25 bp, Probe Sequence
agaagtcaactgtgtgagtgtgata

SEQ ID NO: 15275 - DNA, 25 bp, Probe Sequence
agtcaactgtgtgagtgtgataagg

SEQ ID NO: 15276 - DNA, 25 bp, Probe Sequence
gggtctcttctgaataaagcaatta

SEQ ID NO: 15277 - DNA, 25 bp, Probe Sequence
tctcttctgaataaagcaattagca

SEQ ID NO: 15278 - DNA, 25 bp, Probe Sequence
cagaatgagacatccagcagatttc

SEQ ID NO: 15279 - DNA, 25 bp, Probe Sequence
gtctcttctgaataaagcaattagc

SEQ ID NO: 15280 - DNA, 25 bp, Probe Sequence
ctatacccacccagaatgagacatc

SEQ ID NO: 15281 - DNA, 25 bp, Probe Sequence
cagaagtcaactgtgtgagtgtgat

SEQ ID NO: 15282 - DNA, 25 bp, Probe Sequence
ctcttctgaataaagcaattagcaa

SEQ ID NO: 15283 - DNA, 25 bp, Probe Sequence
tctatacccacccagaatgagacat

SEQ ID NO: 15284 - DNA, 25 bp, Probe Sequence
ctgaatttccctctctcataccctc

SEQ ID NO: 15285 - DNA, 25 bp, Probe Sequence
ggtctcttctgaataaagcaattag

SEQ ID NO: 15286 - DNA, 25 bp, Probe Sequence
agtgctgaatttccctctctcatac

SEQ ID NO: 15287 - DNA, 25 bp, Probe Sequence
cagtgctgaatttccctctctcata

SEQ ID NO: 15288 - DNA, 25 bp, Probe Sequence
tcttctgaataaagcaattagcaaa

SEQ ID NO: 15289 - DNA, 25 bp, Probe Sequence
agaatgagacatccagcagatttcc

SEQ ID NO: 15290 - DNA, 25 bp, Probe Sequence
tctgaataaagcaattagcaaatca

SEQ ID NO: 15291 - DNA, 25 bp, Probe Sequence
aatgagacatccagcagatttccag

SEQ ID NO: 15292 - DNA, 25 bp, Probe Sequence
gaatgagacatccagcagatttcca

SEQ ID NO: 15293 - DNA, 25 bp, Probe Sequence
ccagaatgagacatccagcagattt

SEQ ID NO: 15294 - DNA, 25 bp, Probe Sequence
caactgtgtgagtgtgataaggctg

SEQ ID NO: 15295 - DNA, 25 bp, Probe Sequence
tcaactgtgtgagtgtgataaggct

SEQ ID NO: 15296 - DNA, 25 bp, Probe Sequence
ctcatgggaagacagaattgctcct

SEQ ID NO: 15297 - DNA, 25 bp, Probe Sequence
tcatgggaagacagaattgctcctg

SEQ ID NO: 15298 - DNA, 25 bp, Probe Sequence
tgctcatgggaagacagaattgctc

SEQ ID NO: 15299 - DNA, 25 bp, Probe Sequence
ctgctcatgggaagacagaattgct

SEQ ID NO: 15300 - DNA, 25 bp, Probe Sequence
ctgctgctcatgggaagacagaatt

SEQ ID NO: 15301 - DNA, 25 bp, Probe Sequence
agactggcaagattactgatttcat

SEQ ID NO: 15302 - DNA, 25 bp, Probe Sequence
gactggcaagattactgatttcatc

SEQ ID NO: 15303 - DNA, 25 bp, Probe Sequence
gagactggcaagattactgatttca

SEQ ID NO: 15304 - DNA, 25 bp, Probe Sequence
gtacatcgtattacacctgaggagg

SEQ ID NO: 15305 - DNA, 25 bp, Probe Sequence
gagagaatttccgtctgatctatga

SEQ ID NO: 15306 - DNA, 25 bp, Probe Sequence
cctcatcaaggtgaatgataccatt

SEQ ID NO: 15307 - DNA, 25 bp, Probe Sequence
agagaatttccgtctgatctatgac

SEQ ID NO: 15308 - DNA, 25 bp, Probe Sequence
ggagagaatttccgtctgatctatg

SEQ ID NO: 15309 - DNA, 25 bp, Probe Sequence
atttcatcaagttcgacactggtaa

SEQ ID NO: 15310 - DNA, 25 bp, Probe Sequence
tacatcgtattacacctgaggaggc

SEQ ID NO: 15311 - DNA, 25 bp, Probe Sequence
gggagagaatttccgtctgatctat

SEQ ID NO: 15312 - DNA, 25 bp, Probe Sequence
ttcatcaagttcgacactggtaacc

SEQ ID NO: 15313 - DNA, 25 bp, Probe Sequence
gatttcatcaagttcgacactggta

SEQ ID NO: 15314 - DNA, 25 bp, Probe Sequence
tttcatcaagttcgacactggtaac

SEQ ID NO: 15315 - DNA, 25 bp, Probe Sequence
ggcaagattactgatttcatcaagt

SEQ ID NO: 15316 - DNA, 25 bp, Probe Sequence
tggcaagattactgatttcatcaag

SEQ ID NO: 15317 - DNA, 25 bp, Probe Sequence
ctggcaagattactgatttcatcaa

SEQ ID NO: 15318 - DNA, 25 bp, Probe Sequence
actggcaagattactgatttcatca

SEQ ID NO: 15319 - DNA, 25 bp, Probe Sequence
catcaagttcgacactggtaacctg

SEQ ID NO: 15320 - DNA, 25 bp, Probe Sequence
tcatcaagttcgacactggtaacct

SEQ ID NO: 15321 - DNA, 25 bp, Probe Sequence
actggtaacctgtgtatggtgactg

SEQ ID NO: 15322 - DNA, 25 bp, Probe Sequence
cactggtaacctgtgtatggtgact

SEQ ID NO: 15323 - DNA, 25 bp, Probe Sequence
gcaagattactgatttcatcaagtt

SEQ ID NO: 15324 - DNA, 25 bp, Probe Sequence
cctcaccattgctgaagagagagac

SEQ ID NO: 15325 - DNA, 25 bp, Probe Sequence
ctggcagtcatcaagtgtatcatat

SEQ ID NO: 15326 - DNA, 25 bp, Probe Sequence
actggcagtcatcaagtgtatcata

SEQ ID NO: 15327 - DNA, 25 bp, Probe Sequence
agtcatcaagtgtatcatatgccag

SEQ ID NO: 15328 - DNA, 25 bp, Probe Sequence
tcatcaagtgtatcatatgccagta

SEQ ID NO: 15329 - DNA, 25 bp, Probe Sequence
gtcatcaagtgtatcatatgccagt

SEQ ID NO: 15330 - DNA, 25 bp, Probe Sequence
cagtcatcaagtgtatcatatgcca

SEQ ID NO: 15331 - DNA, 25 bp, Probe Sequence
tggcagtcatcaagtgtatcatatg

SEQ ID NO: 15332 - DNA, 25 bp, Probe Sequence
tccaagacccataggacttccatac

SEQ ID NO: 15333 - DNA, 25 bp, Probe Sequence
gcagtcatcaagtgtatcatatgcc

SEQ ID NO: 15334 - DNA, 25 bp, Probe Sequence
ggcagtcatcaagtgtatcatatgc

SEQ ID NO: 15335 - DNA, 25 bp, Probe Sequence
cccataggacttccatacgtcaatg

SEQ ID NO: 15336 - DNA, 25 bp, Probe Sequence
ccaagacccataggacttccatacg

SEQ ID NO: 15337 - DNA, 25 bp, Probe Sequence
acccataggacttccatacgtcaat

SEQ ID NO: 15338 - DNA, 25 bp, Probe Sequence
caagacccataggacttccatacgt

SEQ ID NO: 15339 - DNA, 25 bp, Probe Sequence
cactggcagtcatcaagtgtatcat

SEQ ID NO: 15340 - DNA, 25 bp, Probe Sequence
aagacccataggacttccatacgtc

SEQ ID NO: 15341 - DNA, 25 bp, Probe Sequence
ccataggacttccatacgtcaatgg

SEQ ID NO: 15342 - DNA, 25 bp, Probe Sequence
gacccataggacttccatacgtcaa

SEQ ID NO: 15343 - DNA, 25 bp, Probe Sequence
agacccataggacttccatacgtca

SEQ ID NO: 15344 - DNA, 25 bp, Probe Sequence
ccagaaacacagatgtgtctaaaga

SEQ ID NO: 15345 - DNA, 25 bp, Probe Sequence
tccagaaacacagatgtgtctaaag

SEQ ID NO: 15346 - DNA, 25 bp, Probe Sequence
cataggacttccatacgtcaatggg

SEQ ID NO: 15347 - DNA, 25 bp, Probe Sequence
cagaaacacagatgtgtctaaagaa

SEQ ID NO: 15348 - DNA, 25 bp, Probe Sequence
agaaacacagatgtgtctaaagaaa

SEQ ID NO: 15349 - DNA, 25 bp, Probe Sequence
ttctaaccttcctacctttcaatgc

SEQ ID NO: 15350 - DNA, 25 bp, Probe Sequence
gttctaaccttcctacctttcaatg

SEQ ID NO: 15351 - DNA, 25 bp, Probe Sequence
agttctaaccttcctacctttcaat

SEQ ID NO: 15352 - DNA, 25 bp, Probe Sequence
gctttgttgttgttcctttgaatac

SEQ ID NO: 15353 - DNA, 25 bp, Probe Sequence
aagttctaaccttcctacctttcaa

SEQ ID NO: 15354 - DNA, 25 bp, Probe Sequence
gctgtttaatttcctaaagtgatgc

SEQ ID NO: 15355 - DNA, 25 bp, Probe Sequence
tgttgttgttcctttgaatacagac

SEQ ID NO: 15356 - DNA, 25 bp, Probe Sequence
ttgttgttgttcctttgaatacaga

SEQ ID NO: 15357 - DNA, 25 bp, Probe Sequence
aagactggcttagctgaagttctaa

SEQ ID NO: 15358 - DNA, 25 bp, Probe Sequence
gttgttgttcctttgaatacagacg

SEQ ID NO: 15359 - DNA, 25 bp, Probe Sequence
tctaaccttcctacctttcaatgcc

SEQ ID NO: 15360 - DNA, 25 bp, Probe Sequence
tttgttgttgttcctttgaatacag

SEQ ID NO: 15361 - DNA, 25 bp, Probe Sequence
ctttgttgttgttcctttgaataca

SEQ ID NO: 15362 - DNA, 25 bp, Probe Sequence
tatcaatctctgactgcaaccactt

SEQ ID NO: 15363 - DNA, 25 bp, Probe Sequence
agactggcttagctgaagttctaac

SEQ ID NO: 15364 - DNA, 25 bp, Probe Sequence
ttgtatcaatctctgactgcaacca

SEQ ID NO: 15365 - DNA, 25 bp, Probe Sequence
agctttgttgttgttcctttgaata

SEQ ID NO: 15366 - DNA, 25 bp, Probe Sequence
tgtttaatttcctaaagtgatgctc

SEQ ID NO: 15367 - DNA, 25 bp, Probe Sequence
ctgtttaatttcctaaagtgatgct

SEQ ID NO: 15368 - DNA, 25 bp, Probe Sequence
ctggcttagctgaagttctaacctt

SEQ ID NO: 15369 - DNA, 25 bp, Probe Sequence
gtatcaatctctgactgcaaccact

SEQ ID NO: 15370 - DNA, 25 bp, Probe Sequence
gtttaatttcctaaagtgatgctct

SEQ ID NO: 15371 - DNA, 25 bp, Probe Sequence
tttgaatacagacgttgctaggaaa

SEQ ID NO: 15372 - DNA, 25 bp, Probe Sequence
cacttatgttccttctagagtaacc

SEQ ID NO: 15373 - DNA, 25 bp, Probe Sequence
tctgtggtagtagtgagtagatagc

SEQ ID NO: 15374 - DNA, 25 bp, Probe Sequence
cctctgtggtagtagtgagtagata

SEQ ID NO: 15375 - DNA, 25 bp, Probe Sequence
ctctgtggtagtagtgagtagatag

SEQ ID NO: 15376 - DNA, 25 bp, Probe Sequence
ctgtggtagtagtgagtagatagct

SEQ ID NO: 15377 - DNA, 25 bp, Probe Sequence
ttcttgagaggagagaccacagatt

SEQ ID NO: 15378 - DNA, 25 bp, Probe Sequence
gtggtagtagtgagtagatagctct

SEQ ID NO: 15379 - DNA, 25 bp, Probe Sequence
tgtggtagtagtgagtagatagctc

SEQ ID NO: 15380 - DNA, 25 bp, Probe Sequence
tggtagtagtgagtagatagctctt

SEQ ID NO: 15381 - DNA, 25 bp, Probe Sequence
agagccttgattgaagatatattct

SEQ ID NO: 15382 - DNA, 25 bp, Probe Sequence
tctgaacagtatttaaggtttccaa

SEQ ID NO: 15383 - DNA, 25 bp, Probe Sequence
ttctgaacagtatttaaggtttcca

SEQ ID NO: 15384 - DNA, 25 bp, Probe Sequence
gtagactccacctctcgtatcactg

SEQ ID NO: 15385 - DNA, 25 bp, Probe Sequence
gtcctctgtactgtctctctccttg

SEQ ID NO: 15386 - DNA, 25 bp, Probe Sequence
ctttgtcctctgtactgtctctctc

SEQ ID NO: 15387 - DNA, 25 bp, Probe Sequence
cttgagaggagagaccacagatttg

SEQ ID NO: 15388 - DNA, 25 bp, Probe Sequence
gtctttgtcctctgtactgtctctc

SEQ ID NO: 15389 - DNA, 25 bp, Probe Sequence
aagagccttgattgaagatatattc

SEQ ID NO: 15390 - DNA, 25 bp, Probe Sequence
ccctctgtggtagtagtgagtagat

SEQ ID NO: 15391 - DNA, 25 bp, Probe Sequence
tctttgtcctctgtactgtctctct

SEQ ID NO: 15392 - DNA, 25 bp, Probe Sequence
tgtcctctgtactgtctctctcctt

SEQ ID NO: 15393 - DNA, 25 bp, Probe Sequence
ttgtcctctgtactgtctctctcct

SEQ ID NO: 15394 - DNA, 25 bp, Probe Sequence
tcttgagaggagagaccacagattt

SEQ ID NO: 15395 - DNA, 25 bp, Probe Sequence
tttcttgagaggagagaccacagat

SEQ ID NO: 15396 - DNA, 25 bp, Probe Sequence
ctgaacagtatttaaggtttccaat

SEQ ID NO: 15397 - DNA, 25 bp, Probe Sequence
aagagtttacccagaatgtcagaat

SEQ ID NO: 15398 - DNA, 25 bp, Probe Sequence
taagagtttacccagaatgtcagaa

SEQ ID NO: 15399 - DNA, 25 bp, Probe Sequence
agagtttacccagaatgtcagaatt

SEQ ID NO: 15400 - DNA, 25 bp, Probe Sequence
ccattctttgcttgaacacagtatt

SEQ ID NO: 15401 - DNA, 25 bp, Probe Sequence
aatcagaaagaggagtattcagcac

SEQ ID NO: 15402 - DNA, 25 bp, Probe Sequence
cattctttgcttgaacacagtattt

SEQ ID NO: 15403 - DNA, 25 bp, Probe Sequence
atcagaaagaggagtattcagcact

SEQ ID NO: 15404 - DNA, 25 bp, Probe Sequence
gtaagagtttacccagaatgtcaga

SEQ ID NO: 15405 - DNA, 25 bp, Probe Sequence
agtaagagtttacccagaatgtcag

SEQ ID NO: 15406 - DNA, 25 bp, Probe Sequence
gagtaagagtttacccagaatgtca

SEQ ID NO: 15407 - DNA, 25 bp, Probe Sequence
tgagtaagagtttacccagaatgtc

SEQ ID NO: 15408 - DNA, 25 bp, Probe Sequence
ttgagtaagagtttacccagaatgt

SEQ ID NO: 15409 - DNA, 25 bp, Probe Sequence
agattgagtaagagtttacccagaa

SEQ ID NO: 15410 - DNA, 25 bp, Probe Sequence
gaatcagaaagaggagtattcagca

SEQ ID NO: 15411 - DNA, 25 bp, Probe Sequence
attgagtaagagtttacccagaatg

SEQ ID NO: 15412 - DNA, 25 bp, Probe Sequence
tagattgagtaagagtttacccaga

SEQ ID NO: 15413 - DNA, 25 bp, Probe Sequence
gattgagtaagagtttacccagaat

SEQ ID NO: 15414 - DNA, 25 bp, Probe Sequence
gctttgatttagattgagtaagagt

SEQ ID NO: 15415 - DNA, 25 bp, Probe Sequence
gcacggtttaaagttctgtgtattt

SEQ ID NO: 15416 - DNA, 25 bp, Probe Sequence
tagcacggtttaaagttctgtgtat

SEQ ID NO: 15417 - DNA, 25 bp, Probe Sequence
ttagattgagtaagagtttacccag

SEQ ID NO: 15418 - DNA, 25 bp, Probe Sequence
agcacggtttaaagttctgtgtatt

SEQ ID NO: 15419 - DNA, 25 bp, Probe Sequence
tgtgtaataaagtgttttcagagca

SEQ ID NO: 15420 - DNA, 25 bp, Probe Sequence
tctttgcttgaacacagtattttcc

SEQ ID NO: 15421 - DNA, 25 bp, Probe Sequence
gcttaacttattctactccgatgat

SEQ ID NO: 15422 - DNA, 25 bp, Probe Sequence
ttcagcttaacttattctactccga

SEQ ID NO: 15423 - DNA, 25 bp, Probe Sequence
agcttaacttattctactccgatga

SEQ ID NO: 15424 - DNA, 25 bp, Probe Sequence
cagcttaacttattctactccgatg

SEQ ID NO: 15425 - DNA, 25 bp, Probe Sequence
tcagcttaacttattctactccgat

SEQ ID NO: 15426 - DNA, 25 bp, Probe Sequence
tctccaaagccaataaagtgataca

SEQ ID NO: 15427 - DNA, 25 bp, Probe Sequence
ctctccaaagccaataaagtgatac

SEQ ID NO: 15428 - DNA, 25 bp, Probe Sequence
tgaatgtaacagaggaactaacgtc

SEQ ID NO: 15429 - DNA, 25 bp, Probe Sequence
attagcggtgtatttcttgaagttt

SEQ ID NO: 15430 - DNA, 25 bp, Probe Sequence
agcggtgtatttcttgaagtttaat

SEQ ID NO: 15431 - DNA, 25 bp, Probe Sequence
caaataaacgctcactccgaattag

SEQ ID NO: 15432 - DNA, 25 bp, Probe Sequence
aattagcggtgtatttcttgaagtt

SEQ ID NO: 15433 - DNA, 25 bp, Probe Sequence
gaattagcggtgtatttcttgaagt

SEQ ID NO: 15434 - DNA, 25 bp, Probe Sequence
cgaattagcggtgtatttcttgaag

SEQ ID NO: 15435 - DNA, 25 bp, Probe Sequence
ttagcggtgtatttcttgaagttta

SEQ ID NO: 15436 - DNA, 25 bp, Probe Sequence
tagcggtgtatttcttgaagtttaa

SEQ ID NO: 15437 - DNA, 25 bp, Probe Sequence
tgaggagaagtttcttatttggagt

SEQ ID NO: 15438 - DNA, 25 bp, Probe Sequence
ctgaatgtaacagaggaactaacgt

SEQ ID NO: 15439 - DNA, 25 bp, Probe Sequence
aggagaagtttcttatttggagtct

SEQ ID NO: 15440 - DNA, 25 bp, Probe Sequence
atagtcagagggatcacaatctttc

SEQ ID NO: 15441 - DNA, 25 bp, Probe Sequence
gaatagtcagagggatcacaatctt

SEQ ID NO: 15442 - DNA, 25 bp, Probe Sequence
gaggagaagtttcttatttggagtc

SEQ ID NO: 15443 - DNA, 25 bp, Probe Sequence
aatagtcagagggatcacaatcttt

SEQ ID NO: 15444 - DNA, 25 bp, Probe Sequence
agatgattcagattatccttgtact

SEQ ID NO: 15445 - DNA, 25 bp, Probe Sequence
cgtattagtcatccgctattaccat

SEQ ID NO: 15446 - DNA, 25 bp, Probe Sequence
gtattagtcatccgctattaccatg

SEQ ID NO: 15447 - DNA, 25 bp, Probe Sequence
ataaaccatcagcctactcattcaa

SEQ ID NO: 15448 - DNA, 25 bp, Probe Sequence
gataaaccatcagcctactcattca

SEQ ID NO: 15449 - DNA, 25 bp, Probe Sequence
taaaccatcagcctactcattcaac

SEQ ID NO: 15450 - DNA, 25 bp, Probe Sequence
ggataaaccatcagcctactcattc

SEQ ID NO: 15451 - DNA, 25 bp, Probe Sequence
acgtattagtcatccgctattacca

SEQ ID NO: 15452 - DNA, 25 bp, Probe Sequence
gggataaaccatcagcctactcatt

SEQ ID NO: 15453 - DNA, 25 bp, Probe Sequence
catctacgtattagtcatccgctat

SEQ ID NO: 15454 - DNA, 25 bp, Probe Sequence
tacgtattagtcatccgctattacc

SEQ ID NO: 15455 - DNA, 25 bp, Probe Sequence
agtacatctacgtattagtcatccg

SEQ ID NO: 15456 - DNA, 25 bp, Probe Sequence
acatctacgtattagtcatccgcta

SEQ ID NO: 15457 - DNA, 25 bp, Probe Sequence
tacatctacgtattagtcatccgct

SEQ ID NO: 15458 - DNA, 25 bp, Probe Sequence
gtacatctacgtattagtcatccgc

SEQ ID NO: 15459 - DNA, 25 bp, Probe Sequence
atctacgtattagtcatccgctatt

SEQ ID NO: 15460 - DNA, 25 bp, Probe Sequence
tctacgtattagtcatccgctatta

SEQ ID NO: 15461 - DNA, 25 bp, Probe Sequence
ctacgtattagtcatccgctattac

SEQ ID NO: 15462 - DNA, 25 bp, Probe Sequence
cagtacatctacgtattagtcatcc

SEQ ID NO: 15463 - DNA, 25 bp, Probe Sequence
cgggataaaccatcagcctactcat

SEQ ID NO: 15464 - DNA, 25 bp, Probe Sequence
taatccgttttgccagtacatcaat

SEQ ID NO: 15465 - DNA, 25 bp, Probe Sequence
ctcgtttagttgaaccgtcagatcg

SEQ ID NO: 15466 - DNA, 25 bp, Probe Sequence
tattagtcatccgctattaccatgg

SEQ ID NO: 15467 - DNA, 25 bp, Probe Sequence
gtaatccgttttgccagtacatcaa

SEQ ID NO: 15468 - DNA, 25 bp, Probe Sequence
gctcgtttagttgaaccgtcagatc

SEQ ID NO: 15469 - DNA, 25 bp, Probe Sequence
ggaggttctataataagccatgagc

SEQ ID NO: 15470 - DNA, 25 bp, Probe Sequence
gggaggttctataataagccatgag

SEQ ID NO: 15471 - DNA, 25 bp, Probe Sequence
attagtcatcgctatttaccatgtg

SEQ ID NO: 15472 - DNA, 25 bp, Probe Sequence
ttagtcatcgctatttaccatgtga

SEQ ID NO: 15473 - DNA, 25 bp, Probe Sequence
tagtcatcgctatttaccatgtgat

SEQ ID NO: 15474 - DNA, 25 bp, Probe Sequence
gaggttctataataagccatgagct

SEQ ID NO: 15475 - DNA, 25 bp, Probe Sequence
tgggaggttctataataagccatga

SEQ ID NO: 15476 - DNA, 25 bp, Probe Sequence
gtgggaggttctataataagccatg

SEQ ID NO: 15477 - DNA, 25 bp, Probe Sequence
tattagtcatcgctatttaccatgt

SEQ ID NO: 15478 - DNA, 25 bp, Probe Sequence
ggtgggaggttctataataagccat

SEQ ID NO: 15479 - DNA, 25 bp, Probe Sequence
ctttccaacttggcagtaaatctac

SEQ ID NO: 15480 - DNA, 25 bp, Probe Sequence
actttccaacttggcagtaaatcta

SEQ ID NO: 15481 - DNA, 25 bp, Probe Sequence
gactttccaacttggcagtaaatct

SEQ ID NO: 15482 - DNA, 25 bp, Probe Sequence
tttccaacttggcagtaaatctacg

SEQ ID NO: 15483 - DNA, 25 bp, Probe Sequence
ggactttccaacttggcagtaaatc

SEQ ID NO: 15484 - DNA, 25 bp, Probe Sequence
tggcagtaaatctacgtattagtca

SEQ ID NO: 15485 - DNA, 25 bp, Probe Sequence
agtcatcgctatttaccatgtgatg

SEQ ID NO: 15486 - DNA, 25 bp, Probe Sequence
caacttggcagtaaatctacgtatt

SEQ ID NO: 15487 - DNA, 25 bp, Probe Sequence
ttggcagtaaatctacgtattagtc

SEQ ID NO: 15488 - DNA, 25 bp, Probe Sequence
cttggcagtaaatctacgtattagt

SEQ ID NO: 15489 - DNA, 25 bp, Probe Sequence
gtaaatctacgtattagtcatcgct

SEQ ID NO: 15490 - DNA, 25 bp, Probe Sequence
agtaaatctacgtattagtcatcgc

SEQ ID NO: 15491 - DNA, 25 bp, Probe Sequence
ggcagtaaatctacgtattagtcat

SEQ ID NO: 15492 - DNA, 25 bp, Probe Sequence
acttggcagtaaatctacgtattag

SEQ ID NO: 15493 - DNA, 25 bp, Probe Sequence
atgataggacatagtagtagcggtg

SEQ ID NO: 15494 - DNA, 25 bp, Probe Sequence
tatgataggacatagtagtagcggt

SEQ ID NO: 15495 - DNA, 25 bp, Probe Sequence
ctattgccaagaatgtgttgtccaa

SEQ ID NO: 15496 - DNA, 25 bp, Probe Sequence
ttatgataggacatagtagtagcgg

SEQ ID NO: 15497 - DNA, 25 bp, Probe Sequence
gataggacatagtagtagcggtggt

SEQ ID NO: 15498 - DNA, 25 bp, Probe Sequence
tgataggacatagtagtagcggtgg

SEQ ID NO: 15499 - DNA, 25 bp, Probe Sequence
tgtttgataaatgttgtccaggttc

SEQ ID NO: 15500 - DNA, 25 bp, Probe Sequence
gtttgataaatgttgtccaggttct

SEQ ID NO: 15501 - DNA, 25 bp, Probe Sequence
gtgtttgataaatgttgtccaggtt

SEQ ID NO: 15502 - DNA, 25 bp, Probe Sequence
ctttccctaccgtgtttgataaatg

SEQ ID NO: 15503 - DNA, 25 bp, Probe Sequence
ataaatgttgtccaggttctattgc

SEQ ID NO: 15504 - DNA, 25 bp, Probe Sequence
ctaccgtgtttgataaatgttgtcc

SEQ ID NO: 15505 - DNA, 25 bp, Probe Sequence
cctaccgtgtttgataaatgttgtc

SEQ ID NO: 15506 - DNA, 25 bp, Probe Sequence
actttccctaccgtgtttgataaat

SEQ ID NO: 15507 - DNA, 25 bp, Probe Sequence
ttccctaccgtgtttgataaatgtt

SEQ ID NO: 15508 - DNA, 25 bp, Probe Sequence
tttccctaccgtgtttgataaatgt

SEQ ID NO: 15509 - DNA, 25 bp, Probe Sequence
tctattgccaagaatgtgttgtcca

SEQ ID NO: 15510 - DNA, 25 bp, Probe Sequence
taccgtgtttgataaatgttgtcca

SEQ ID NO: 15511 - DNA, 25 bp, Probe Sequence
gttatgataggacatagtagtagcg

SEQ ID NO: 15512 - DNA, 25 bp, Probe Sequence
aactttccctaccgtgtttgataaa

SEQ ID NO: 15513 - DNA, 25 bp, Probe Sequence
taaatgttgtccaggttctattgcc

SEQ ID NO: 15514 - DNA, 25 bp, Probe Sequence
aatgttgtccaggttctattgccaa

SEQ ID NO: 15515 - DNA, 25 bp, Probe Sequence
tccctaccgtgtttgataaatgttg

SEQ ID NO: 15516 - DNA, 25 bp, Probe Sequence
gaactttccctaccgtgtttgataa

SEQ ID NO: 15517 - DNA, 25 bp, Probe Sequence
ggaactcttacttaccagcagaatt

SEQ ID NO: 15518 - DNA, 25 bp, Probe Sequence
tggaactcttacttaccagcagaat

SEQ ID NO: 15519 - DNA, 25 bp, Probe Sequence
ttggaactcttacttaccagcagaa

SEQ ID NO: 15520 - DNA, 25 bp, Probe Sequence
aactcttacttaccagcagaattca

SEQ ID NO: 15521 - DNA, 25 bp, Probe Sequence
gaactcttacttaccagcagaattc

SEQ ID NO: 15522 - DNA, 25 bp, Probe Sequence
ggttctaggtcccaattctactgca

SEQ ID NO: 15523 - DNA, 25 bp, Probe Sequence
cggttctaggtcccaattctactgc

SEQ ID NO: 15524 - DNA, 25 bp, Probe Sequence
ccggttctaggtcccaattctactg

SEQ ID NO: 15525 - DNA, 25 bp, Probe Sequence
cccggttctaggtcccaattctact

SEQ ID NO: 15526 - DNA, 25 bp, Probe Sequence
cagaattcagctaccccggttctag

SEQ ID NO: 15527 - DNA, 25 bp, Probe Sequence
tttgcttctgtctgtctgtttattg

SEQ ID NO: 15528 - DNA, 25 bp, Probe Sequence
ctgatatgctgatttgctctttctc

SEQ ID NO: 15529 - DNA, 25 bp, Probe Sequence
actgatatgctgatttgctctttct

SEQ ID NO: 15530 - DNA, 25 bp, Probe Sequence
cactgatatgctgatttgctctttc

SEQ ID NO: 15531 - DNA, 25 bp, Probe Sequence
tgtatgtctatgctttgtcatcagt

SEQ ID NO: 15532 - DNA, 25 bp, Probe Sequence
gctctttctcattgtatgtctatgc

SEQ ID NO: 15533 - DNA, 25 bp, Probe Sequence
gtatgtctatgctttgtcatcagtg

SEQ ID NO: 15534 - DNA, 25 bp, Probe Sequence
tctatgctttgtcatcagtgctata

SEQ ID NO: 15535 - DNA, 25 bp, Probe Sequence
acactgatatgctgatttgctcttt

SEQ ID NO: 15536 - DNA, 25 bp, Probe Sequence
cttctgtctgtctgtttattggaaa

SEQ ID NO: 15537 - DNA, 25 bp, Probe Sequence
ttgtatgtctatgctttgtcatcag

SEQ ID NO: 15538 - DNA, 25 bp, Probe Sequence
ctcattgtatgtctatgctttgtca

SEQ ID NO: 15539 - DNA, 25 bp, Probe Sequence
gtctatgctttgtcatcagtgctat

SEQ ID NO: 15540 - DNA, 25 bp, Probe Sequence
tatgaacatacccacaaatgcctat

SEQ ID NO: 15541 - DNA, 25 bp, Probe Sequence
tctcattgtatgtctatgctttgtc

SEQ ID NO: 15542 - DNA, 25 bp, Probe Sequence
ttgcttctgtctgtctgtttattgg

SEQ ID NO: 15543 - DNA, 25 bp, Probe Sequence
gctgatttgctctttctcattgtat

SEQ ID NO: 15544 - DNA, 25 bp, Probe Sequence
tatgctgatttgctctttctcattg

SEQ ID NO: 15545 - DNA, 25 bp, Probe Sequence
gcttctgtctgtctgtttattggaa

SEQ ID NO: 15546 - DNA, 25 bp, Probe Sequence
tatgtctatgctttgtcatcagtgc

SEQ ID NO: 15547 - DNA, 25 bp, Probe Sequence
gatatgctgatttgctctttctcat

SEQ ID NO: 15548 - DNA, 25 bp, Probe Sequence
tgctctttctcattgtatgtctatg

SEQ ID NO: 15549 - DNA, 25 bp, Probe Sequence
atttgctctttctcattgtatgtct

SEQ ID NO: 15550 - DNA, 25 bp, Probe Sequence
tgatatgctgatttgctctttctca

SEQ ID NO: 15551 - DNA, 25 bp, Probe Sequence
ctcatggcttggatctctgtattca

SEQ ID NO: 15552 - DNA, 25 bp, Probe Sequence
gcagttcttaggtttgttggttaaa

SEQ ID NO: 15553 - DNA, 25 bp, Probe Sequence
tattcagcctttgttcagtccaata

SEQ ID NO: 15554 - DNA, 25 bp, Probe Sequence
gctatctaggtttgtctggaaagtt

SEQ ID NO: 15555 - DNA, 25 bp, Probe Sequence
gcctttgttcagtccaataaacttt

SEQ ID NO: 15556 - DNA, 25 bp, Probe Sequence
attcagcctttgttcagtccaataa

SEQ ID NO: 15557 - DNA, 25 bp, Probe Sequence
agtctcaaatgggtttcttggaatt

SEQ ID NO: 15558 - DNA, 25 bp, Probe Sequence
cctcatggcttggatctctgtattc

SEQ ID NO: 15559 - DNA, 25 bp, Probe Sequence
ttcagcctttgttcagtccaataaa

SEQ ID NO: 15560 - DNA, 25 bp, Probe Sequence
ttgttcagtccaataaactttgagt

SEQ ID NO: 15561 - DNA, 25 bp, Probe Sequence
cctttgttcagtccaataaactttg

SEQ ID NO: 15562 - DNA, 25 bp, Probe Sequence
agcctttgttcagtccaataaactt

SEQ ID NO: 15563 - DNA, 25 bp, Probe Sequence
tcatggcttggatctctgtattcag

SEQ ID NO: 15564 - DNA, 25 bp, Probe Sequence
gtctcaaatgggtttcttggaattt

SEQ ID NO: 15565 - DNA, 25 bp, Probe Sequence
cagtctcaaatgggtttcttggaat

SEQ ID NO: 15566 - DNA, 25 bp, Probe Sequence
ctatctaggtttgtctggaaagttt

SEQ ID NO: 15567 - DNA, 25 bp, Probe Sequence
gtattcagcctttgttcagtccaat

SEQ ID NO: 15568 - DNA, 25 bp, Probe Sequence
atcagatcagtctcaaatgggtttc

SEQ ID NO: 15569 - DNA, 25 bp, Probe Sequence
cagatcagtctcaaatgggtttctt

SEQ ID NO: 15570 - DNA, 25 bp, Probe Sequence
catcagatcagtctcaaatgggttt

SEQ ID NO: 15571 - DNA, 25 bp, Probe Sequence
tcagcctttgttcagtccaataaac

SEQ ID NO: 15572 - DNA, 25 bp, Probe Sequence
tatctaggtttgtctggaaagtttc

SEQ ID NO: 15573 - DNA, 25 bp, Probe Sequence
cttcagatcatcagatcagtctcaa

SEQ ID NO: 15574 - DNA, 25 bp, Probe Sequence
aacttcagatcatcagatcagtctc

SEQ ID NO: 15575 - DNA, 25 bp, Probe Sequence
aattcaggctagtgttgcagtatag

SEQ ID NO: 15576 - DNA, 25 bp, Probe Sequence
atttcccactaaagtcagtccattt

SEQ ID NO: 15577 - DNA, 25 bp, Probe Sequence
aatttcccactaaagtcagtccatt

SEQ ID NO: 15578 - DNA, 25 bp, Probe Sequence
gaatttcccactaaagtcagtccat

SEQ ID NO: 15579 - DNA, 25 bp, Probe Sequence
tcacctttattgtaagacagtccaa

SEQ ID NO: 15580 - DNA, 25 bp, Probe Sequence
atcacctttattgtaagacagtcca

SEQ ID NO: 15581 - DNA, 25 bp, Probe Sequence
gaattcaggctagtgttgcagtata

SEQ ID NO: 15582 - DNA, 25 bp, Probe Sequence
gatggtgaggtaactctaagttgaa

SEQ ID NO: 15583 - DNA, 25 bp, Probe Sequence
ttgatggtgaggtaactctaagttg

SEQ ID NO: 15584 - DNA, 25 bp, Probe Sequence
tggtgaggtaactctaagttgaatt

SEQ ID NO: 15585 - DNA, 25 bp, Probe Sequence
atggtgaggtaactctaagttgaat

SEQ ID NO: 15586 - DNA, 25 bp, Probe Sequence
tgatggtgaggtaactctaagttga

SEQ ID NO: 15587 - DNA, 25 bp, Probe Sequence
aacacatacaatagtaacaagagaa

SEQ ID NO: 15588 - DNA, 25 bp, Probe Sequence
tatcacctttattgtaagacagtcc

SEQ ID NO: 15589 - DNA, 25 bp, Probe Sequence
cagactgatttggttgacagaactc

SEQ ID NO: 15590 - DNA, 25 bp, Probe Sequence
acacatacaatagtaacaagagaat

SEQ ID NO: 15591 - DNA, 25 bp, Probe Sequence
agaaggaatttcccactaaagtcag

SEQ ID NO: 15592 - DNA, 25 bp, Probe Sequence
gtgaatcatttctcatgccctgttt

SEQ ID NO: 15593 - DNA, 25 bp, Probe Sequence
aaggaatttcccactaaagtcagtc

SEQ ID NO: 15594 - DNA, 25 bp, Probe Sequence
gaaggaatttcccactaaagtcagt

SEQ ID NO: 15595 - DNA, 25 bp, Probe Sequence
cagaaggaatttcccactaaagtca

SEQ ID NO: 15596 - DNA, 25 bp, Probe Sequence
cacctttattgtaagacagtccaat

SEQ ID NO: 15597 - DNA, 25 bp, Probe Sequence
agactgatttggttgacagaactcc

SEQ ID NO: 15598 - DNA, 25 bp, Probe Sequence
acctttattgtaagacagtccaatt

SEQ ID NO: 15599 - DNA, 25 bp, Probe Sequence
agtcgcatcataatcctctctcaag

SEQ ID NO: 15600 - DNA, 25 bp, Probe Sequence
cagtcgcatcataatcctctctcaa

SEQ ID NO: 15601 - DNA, 25 bp, Probe Sequence
cctacttacaggactcaacatacta

SEQ ID NO: 15602 - DNA, 25 bp, Probe Sequence
ctacttacaggactcaacatactag

SEQ ID NO: 15603 - DNA, 25 bp, Probe Sequence
ggcttacatccttcgattactattc

SEQ ID NO: 15604 - DNA, 25 bp, Probe Sequence
ttcaaactctactcccactaatagc

SEQ ID NO: 15605 - DNA, 25 bp, Probe Sequence
cacagtcgcatcataatcctctctc

SEQ ID NO: 15606 - DNA, 25 bp, Probe Sequence
ctcacagtcgcatcataatcctctc

SEQ ID NO: 15607 - DNA, 25 bp, Probe Sequence
gacttcaaactctactcccactaat

SEQ ID NO: 15608 - DNA, 25 bp, Probe Sequence
ctctcaaggacttcaaactctactc

SEQ ID NO: 15609 - DNA, 25 bp, Probe Sequence
ctctctcaaggacttcaaactctac

SEQ ID NO: 15610 - DNA, 25 bp, Probe Sequence
tctctcaaggacttcaaactctact

SEQ ID NO: 15611 - DNA, 25 bp, Probe Sequence
acagtcgcatcataatcctctctca

SEQ ID NO: 15612 - DNA, 25 bp, Probe Sequence
tcacagtcgcatcataatcctctct

SEQ ID NO: 15613 - DNA, 25 bp, Probe Sequence
acttcaaactctactcccactaata

SEQ ID NO: 15614 - DNA, 25 bp, Probe Sequence
cttcaaactctactcccactaatag

SEQ ID NO: 15615 - DNA, 25 bp, Probe Sequence
gagaactctctgtgctagtaaccac

SEQ ID NO: 15616 - DNA, 25 bp, Probe Sequence
gtcgcatcataatcctctctcaagg

SEQ ID NO: 15617 - DNA, 25 bp, Probe Sequence
actcacagtcgcatcataatcctct

SEQ ID NO: 15618 - DNA, 25 bp, Probe Sequence
cactcacagtcgcatcataatcctc

SEQ ID NO: 15619 - DNA, 25 bp, Probe Sequence
caaactctactcccactaatagctt

SEQ ID NO: 15620 - DNA, 25 bp, Probe Sequence
tcaaactctactcccactaatagct

SEQ ID NO: 15621 - DNA, 25 bp, Probe Sequence
gacctagaatcgctcattgcatact

SEQ ID NO: 15622 - DNA, 25 bp, Probe Sequence
agacctagaatcgctcattgcatac

SEQ ID NO: 15623 - DNA, 25 bp, Probe Sequence
ttaaccataaccataaccagattcc

SEQ ID NO: 15624 - DNA, 25 bp, Probe Sequence
ccttcctactgagaatctacctcta

SEQ ID NO: 15625 - DNA, 25 bp, Probe Sequence
ttccttcctactgagaatctacctc

SEQ ID NO: 15626 - DNA, 25 bp, Probe Sequence
tccttcctactgagaatctacctct

SEQ ID NO: 15627 - DNA, 25 bp, Probe Sequence
cttcctactgagaatctacctctat

SEQ ID NO: 15628 - DNA, 25 bp, Probe Sequence
taaccataaccataaccagattccc

SEQ ID NO: 15629 - DNA, 25 bp, Probe Sequence
cctactgagaatctacctctattcc

SEQ ID NO: 15630 - DNA, 25 bp, Probe Sequence
ttcctactgagaatctacctctatt

SEQ ID NO: 15631 - DNA, 25 bp, Probe Sequence
atttctctttagtcgttggtgttag

SEQ ID NO: 15632 - DNA, 25 bp, Probe Sequence
gatttctctttagtcgttggtgtta

SEQ ID NO: 15633 - DNA, 25 bp, Probe Sequence
cacaatttgagcattcccattaaca

SEQ ID NO: 15634 - DNA, 25 bp, Probe Sequence
tttccttcctactgagaatctacct

SEQ ID NO: 15635 - DNA, 25 bp, Probe Sequence
ccataaccataaccagattcccttg

SEQ ID NO: 15636 - DNA, 25 bp, Probe Sequence
tttctctttagtcgttggtgttaga

SEQ ID NO: 15637 - DNA, 25 bp, Probe Sequence
tctctttagtcgttggtgttagaag

SEQ ID NO: 15638 - DNA, 25 bp, Probe Sequence
atttccttcctactgagaatctacc

SEQ ID NO: 15639 - DNA, 25 bp, Probe Sequence
ttccaccattgtagagaatttcctt

SEQ ID NO: 15640 - DNA, 25 bp, Probe Sequence
tttccaccattgtagagaatttcct

SEQ ID NO: 15641 - DNA, 25 bp, Probe Sequence
tgagaatttccaccattgtagagaa

SEQ ID NO: 15642 - DNA, 25 bp, Probe Sequence
ctctttagtcgttggtgttagaagt

SEQ ID NO: 15643 - DNA, 25 bp, Probe Sequence
atgagaatttccaccattgtagaga

SEQ ID NO: 15644 - DNA, 25 bp, Probe Sequence
tctttagtcgttggtgttagaagta

SEQ ID NO: 15645 - DNA, 25 bp, Probe Sequence
caccattgtagagaatttccttcct

SEQ ID NO: 15646 - DNA, 25 bp, Probe Sequence
tccaccattgtagagaatttccttc

SEQ ID NO: 15647 - DNA, 25 bp, Probe Sequence
cgtattcattgtctacctgctaagt

SEQ ID NO: 15648 - DNA, 25 bp, Probe Sequence
tattcattgtctacctgctaagtca

SEQ ID NO: 15649 - DNA, 25 bp, Probe Sequence
gtattcattgtctacctgctaagtc

SEQ ID NO: 15650 - DNA, 25 bp, Probe Sequence
attcattgtctacctgctaagtcaa

SEQ ID NO: 15651 - DNA, 25 bp, Probe Sequence
ttcattgtctacctgctaagtcaag

SEQ ID NO: 15652 - DNA, 25 bp, Probe Sequence
tactgtattggcgagcatggatata

SEQ ID NO: 15653 - DNA, 25 bp, Probe Sequence
ctacttctactgtattggcgagcat

SEQ ID NO: 15654 - DNA, 25 bp, Probe Sequence
ggtctacttctactgtattggcgag

SEQ ID NO: 15655 - DNA, 25 bp, Probe Sequence
gtattggcgagcatggatatagaac

SEQ ID NO: 15656 - DNA, 25 bp, Probe Sequence
tattggcgagcatggatatagaaca

SEQ ID NO: 15657 - DNA, 25 bp, Probe Sequence
tgtattggcgagcatggatatagaa

SEQ ID NO: 15658 - DNA, 25 bp, Probe Sequence
ttagtcactgtcttcttgcttcaga

SEQ ID NO: 15659 - DNA, 25 bp, Probe Sequence
ctgtattggcgagcatggatataga

SEQ ID NO: 15660 - DNA, 25 bp, Probe Sequence
gtctacttctactgtattggcgagc

SEQ ID NO: 15661 - DNA, 25 bp, Probe Sequence
gtctttgaagttgctgggataaatt

SEQ ID NO: 15662 - DNA, 25 bp, Probe Sequence
tagggtctacttctactgtattggc

SEQ ID NO: 15663 - DNA, 25 bp, Probe Sequence
actgtattggcgagcatggatatag

SEQ ID NO: 15664 - DNA, 25 bp, Probe Sequence
ctactgtattggcgagcatggatat

SEQ ID NO: 15665 - DNA, 25 bp, Probe Sequence
attggcgagcatggatatagaacat

SEQ ID NO: 15666 - DNA, 25 bp, Probe Sequence
tcattgtctacctgctaagtcaagg

SEQ ID NO: 15667 - DNA, 25 bp, Probe Sequence
cttcttgcttcagacccatctatat

SEQ ID NO: 15668 - DNA, 25 bp, Probe Sequence
tctacttctactgtattggcgagca

SEQ ID NO: 15669 - DNA, 25 bp, Probe Sequence
ctttagtcactgtcttcttgcttca

SEQ ID NO: 15670 - DNA, 25 bp, Probe Sequence
actttagtcactgtcttcttgcttc

SEQ ID NO: 15671 - DNA, 25 bp, Probe Sequence
tgctgtccaatttctattaaaggtt

SEQ ID NO: 15672 - DNA, 25 bp, Probe Sequence
gctttcttgctgtccaatttctatt

SEQ ID NO: 15673 - DNA, 25 bp, Probe Sequence
tgttccctaagtccaactactaaac

SEQ ID NO: 15674 - DNA, 25 bp, Probe Sequence
ttccctaagtccaactactaaactg

SEQ ID NO: 15675 - DNA, 25 bp, Probe Sequence
gttccctaagtccaactactaaact

SEQ ID NO: 15676 - DNA, 25 bp, Probe Sequence
ctttgttccctaagtccaactacta

SEQ ID NO: 15677 - DNA, 25 bp, Probe Sequence
ttgttccctaagtccaactactaaa

SEQ ID NO: 15678 - DNA, 25 bp, Probe Sequence
tttgttccctaagtccaactactaa

SEQ ID NO: 15679 - DNA, 25 bp, Probe Sequence
atctgtccactcctgatgctgttat

SEQ ID NO: 15680 - DNA, 25 bp, Probe Sequence
gctgtccaatttctattaaaggttc

SEQ ID NO: 15681 - DNA, 25 bp, Probe Sequence
ttgctgtccaatttctattaaaggt

SEQ ID NO: 15682 - DNA, 25 bp, Probe Sequence
ttcctttgttccctaagtccaacta

SEQ ID NO: 15683 - DNA, 25 bp, Probe Sequence
tgtccaatttctattaaaggttcct

SEQ ID NO: 15684 - DNA, 25 bp, Probe Sequence
cttgctgtccaatttctattaaagg

SEQ ID NO: 15685 - DNA, 25 bp, Probe Sequence
ctgtccaatttctattaaaggttcc

SEQ ID NO: 15686 - DNA, 25 bp, Probe Sequence
cctttgttccctaagtccaactact

SEQ ID NO: 15687 - DNA, 25 bp, Probe Sequence
tcctttgttccctaagtccaactac

SEQ ID NO: 15688 - DNA, 25 bp, Probe Sequence
caactgtgttcactagcaacctcaa

SEQ ID NO: 15689 - DNA, 25 bp, Probe Sequence
cgctttcttgctgtccaatttctat

SEQ ID NO: 15690 - DNA, 25 bp, Probe Sequence
gatcacaactgtgttcactagcaac

SEQ ID NO: 15691 - DNA, 25 bp, Probe Sequence
tgagcatctggattctgcctaataa

SEQ ID NO: 15692 - DNA, 25 bp, Probe Sequence
ttgagcatctggattctgcctaata

SEQ ID NO: 15693 - DNA, 25 bp, Probe Sequence
tcttgctgtccaatttctattaaag

SEQ ID NO: 15694 - DNA, 25 bp, Probe Sequence
ctttcttgctgtccaatttctatta

SEQ ID NO: 15695 - DNA, 25 bp, Probe Sequence
attatgcccagtacaggaccttatg

SEQ ID NO: 15696 - DNA, 25 bp, Probe Sequence
cattatgcccagtacaggaccttat

SEQ ID NO: 15697 - DNA, 25 bp, Probe Sequence
catttgacggtctatgggatgtttg

SEQ ID NO: 15698 - DNA, 25 bp, Probe Sequence
atttgacggtctatgggatgtttgt

SEQ ID NO: 15699 - DNA, 25 bp, Probe Sequence
ttggcagtacatctacgtaatagtc

SEQ ID NO: 15700 - DNA, 25 bp, Probe Sequence
cttggcagtacatctacgtaatagt

SEQ ID NO: 15701 - DNA, 25 bp, Probe Sequence
gtacatctacgtaatagtcatcgct

SEQ ID NO: 15702 - DNA, 25 bp, Probe Sequence
agtacatctacgtaatagtcatcgc

SEQ ID NO: 15703 - DNA, 25 bp, Probe Sequence
ggcagtacatctacgtaatagtcat

SEQ ID NO: 15704 - DNA, 25 bp, Probe Sequence
cctggcagtacatcaagtgtatcat

SEQ ID NO: 15705 - DNA, 25 bp, Probe Sequence
ttgacggtctatgggatgtttgttt

SEQ ID NO: 15706 - DNA, 25 bp, Probe Sequence
tttgacggtctatgggatgtttgtt

SEQ ID NO: 15707 - DNA, 25 bp, Probe Sequence
tggcagtacatctacgtaatagtca

SEQ ID NO: 15708 - DNA, 25 bp, Probe Sequence
gcagtacatctacgtaatagtcatc

SEQ ID NO: 15709 - DNA, 25 bp, Probe Sequence
acttggcagtacatctacgtaatag

SEQ ID NO: 15710 - DNA, 25 bp, Probe Sequence
cagtacatctacgtaatagtcatcg

SEQ ID NO: 15711 - DNA, 25 bp, Probe Sequence
acatctacgtaatagtcatcgctat

SEQ ID NO: 15712 - DNA, 25 bp, Probe Sequence
cacctggcagtacatcaagtgtatc

SEQ ID NO: 15713 - DNA, 25 bp, Probe Sequence
ctacttggcagtacatctacgtaat

SEQ ID NO: 15714 - DNA, 25 bp, Probe Sequence
acctggcagtacatcaagtgtatca

SEQ ID NO: 15715 - DNA, 25 bp, Probe Sequence
tacttggcagtacatctacgtaata

SEQ ID NO: 15716 - DNA, 25 bp, Probe Sequence
cctacttggcagtacatctacgtaa

SEQ ID NO: 15717 - DNA, 25 bp, Probe Sequence
tgacggtctatgggatgtttgtttt

SEQ ID NO: 15718 - DNA, 25 bp, Probe Sequence
ccacctggcagtacatcaagtgtat

SEQ ID NO: 15719 - DNA, 25 bp, Probe Sequence
ataagaagcaggattgtataggcag

SEQ ID NO: 15720 - DNA, 25 bp, Probe Sequence
taatgctgtgtgttctgttaagttc

SEQ ID NO: 15721 - DNA, 25 bp, Probe Sequence
tataagaagcaggattgtataggca

SEQ ID NO: 15722 - DNA, 25 bp, Probe Sequence
taagaagcaggattgtataggcaga

SEQ ID NO: 15723 - DNA, 25 bp, Probe Sequence
atgctgtgtgttctgttaagttctt

SEQ ID NO: 15724 - DNA, 25 bp, Probe Sequence
aatgctgtgtgttctgttaagttct

SEQ ID NO: 15725 - DNA, 25 bp, Probe Sequence
ttaatgctgtgtgttctgttaagtt

SEQ ID NO: 15726 - DNA, 25 bp, Probe Sequence
aagaagcaggattgtataggcagaa

SEQ ID NO: 15727 - DNA, 25 bp, Probe Sequence
cgtgagatcaataagaagaacctag

SEQ ID NO: 15728 - DNA, 25 bp, Probe Sequence
aggattagcggaatgtatggttcaa

SEQ ID NO: 15729 - DNA, 25 bp, Probe Sequence
ggattagcggaatgtatggttcaac

SEQ ID NO: 15730 - DNA, 25 bp, Probe Sequence
gaatcagaaccagatgacacatgaa

SEQ ID NO: 15731 - DNA, 25 bp, Probe Sequence
gtgagatcaataagaagaacctagt

SEQ ID NO: 15732 - DNA, 25 bp, Probe Sequence
caggattagcggaatgtatggttca

SEQ ID NO: 15733 - DNA, 25 bp, Probe Sequence
ctgtatggaatcagaaccagatgac

SEQ ID NO: 15734 - DNA, 25 bp, Probe Sequence
gacgtgagatcaataagaagaacct

SEQ ID NO: 15735 - DNA, 25 bp, Probe Sequence
acgtgagatcaataagaagaaccta

SEQ ID NO: 15736 - DNA, 25 bp, Probe Sequence
aggtgttcatcctataagaagcagg

SEQ ID NO: 15737 - DNA, 25 bp, Probe Sequence
ctgtgtgttctgttaagttctttca

SEQ ID NO: 15738 - DNA, 25 bp, Probe Sequence
gtatggaatcagaaccagatgacac

SEQ ID NO: 15739 - DNA, 25 bp, Probe Sequence
actgtatggaatcagaaccagatga

SEQ ID NO: 15740 - DNA, 25 bp, Probe Sequence
cactgtatggaatcagaaccagatg

SEQ ID NO: 15741 - DNA, 25 bp, Probe Sequence
tcactgtatggaatcagaaccagat

SEQ ID NO: 15742 - DNA, 25 bp, Probe Sequence
atcactgtatggaatcagaaccaga

SEQ ID NO: 15743 - DNA, 25 bp, Probe Sequence
atcttcgcttgtcttgtcatcattc

SEQ ID NO: 15744 - DNA, 25 bp, Probe Sequence
gatcttcgcttgtcttgtcatcatt

SEQ ID NO: 15745 - DNA, 25 bp, Probe Sequence
cctatctcagacagtgaaagtgaaa

SEQ ID NO: 15746 - DNA, 25 bp, Probe Sequence
atctcagacagtgaaagtgaaatgg

SEQ ID NO: 15747 - DNA, 25 bp, Probe Sequence
agtgaaagtgaaatggactgatttg

SEQ ID NO: 15748 - DNA, 25 bp, Probe Sequence
tatctcagacagtgaaagtgaaatg

SEQ ID NO: 15749 - DNA, 25 bp, Probe Sequence
ctatctcagacagtgaaagtgaaat

SEQ ID NO: 15750 - DNA, 25 bp, Probe Sequence
ccctatctcagacagtgaaagtgaa

SEQ ID NO: 15751 - DNA, 25 bp, Probe Sequence
aatcgagtccatatagctacattcc

SEQ ID NO: 15752 - DNA, 25 bp, Probe Sequence
gtgaaagtgaaatggactgatttgc

SEQ ID NO: 15753 - DNA, 25 bp, Probe Sequence
tcttcgcttgtcttgtcatcattcg

SEQ ID NO: 15754 - DNA, 25 bp, Probe Sequence
atcacatgcagctcatctaagagaa

SEQ ID NO: 15755 - DNA, 25 bp, Probe Sequence
aatcacatgcagctcatctaagaga

SEQ ID NO: 15756 - DNA, 25 bp, Probe Sequence
ctcagacagtgaaagtgaaatggac

SEQ ID NO: 15757 - DNA, 25 bp, Probe Sequence
tctcagacagtgaaagtgaaatgga

SEQ ID NO: 15758 - DNA, 25 bp, Probe Sequence
atcgagtccatatagctacattcca

SEQ ID NO: 15759 - DNA, 25 bp, Probe Sequence
gaagagtttgtggtagcagaagagt

SEQ ID NO: 15760 - DNA, 25 bp, Probe Sequence
tcagacagtgaaagtgaaatggact

SEQ ID NO: 15761 - DNA, 25 bp, Probe Sequence
ttcgcttgtcttgtcatcattcgtc

SEQ ID NO: 15762 - DNA, 25 bp, Probe Sequence
cttcgcttgtcttgtcatcattcgt

SEQ ID NO: 15763 - DNA, 25 bp, Probe Sequence
tcgagtccatatagctacattccac

SEQ ID NO: 15764 - DNA, 25 bp, Probe Sequence
aagagtttgtggtagcagaagagtg

SEQ ID NO: 15765 - DNA, 25 bp, Probe Sequence
gaccctatctcagacagtgaaagtg

SEQ ID NO: 15766 - DNA, 25 bp, Probe Sequence
agaccctatctcagacagtgaaagt

SEQ ID NO: 15767 - DNA, 25 bp, Probe Sequence
ctccaagtaccatagaaccttagtc

SEQ ID NO: 15768 - DNA, 25 bp, Probe Sequence
tccaagtaccatagaaccttagtcg

SEQ ID NO: 15769 - DNA, 25 bp, Probe Sequence
gctccaagtaccatagaaccttagt

SEQ ID NO: 15770 - DNA, 25 bp, Probe Sequence
ccaagtaccatagaaccttagtcgg

SEQ ID NO: 15771 - DNA, 25 bp, Probe Sequence
ggctccaagtaccatagaaccttag

SEQ ID NO: 15772 - DNA, 25 bp, Probe Sequence
atcaaagtgtatcatagtgccaagt

SEQ ID NO: 15773 - DNA, 25 bp, Probe Sequence
catcaaagtgtatcatagtgccaag

SEQ ID NO: 15774 - DNA, 25 bp, Probe Sequence
tcatcaaagtgtatcatagtgccaa

SEQ ID NO: 15775 - DNA, 25 bp, Probe Sequence
atcatcaaagtgtatcatagtgcca

SEQ ID NO: 15776 - DNA, 25 bp, Probe Sequence
tgccagttatcatcaaagtgtatca

SEQ ID NO: 15777 - DNA, 25 bp, Probe Sequence
tcaaagtgtatcatagtgccaagta

SEQ ID NO: 15778 - DNA, 25 bp, Probe Sequence
gtaggatatgcggatcttgactgag

SEQ ID NO: 15779 - DNA, 25 bp, Probe Sequence
gccagttatcatcaaagtgtatcat

SEQ ID NO: 15780 - DNA, 25 bp, Probe Sequence
aattgggtggagtatttacggttaa

SEQ ID NO: 15781 - DNA, 25 bp, Probe Sequence
atataagcagagtctcgtttagtga

SEQ ID NO: 15782 - DNA, 25 bp, Probe Sequence
attgggtggagtatttacggttaaa

SEQ ID NO: 15783 - DNA, 25 bp, Probe Sequence
ttgccagttatcatcaaagtgtatc

SEQ ID NO: 15784 - DNA, 25 bp, Probe Sequence
cttgccagttatcatcaaagtgtat

SEQ ID NO: 15785 - DNA, 25 bp, Probe Sequence
ttcatatggtcgattctggttctag

SEQ ID NO: 15786 - DNA, 25 bp, Probe Sequence
cttcatatggtcgattctggttcta

SEQ ID NO: 15787 - DNA, 25 bp, Probe Sequence
tatcatcaaagtgtatcatagtgcc

SEQ ID NO: 15788 - DNA, 25 bp, Probe Sequence
tatagcttcatatggtcgattctgg

SEQ ID NO: 15789 - DNA, 25 bp, Probe Sequence
tcaacttatagcttcatatggtcga

SEQ ID NO: 15790 - DNA, 25 bp, Probe Sequence
caaagtgtatcatagtgccaagtac

SEQ ID NO: 15791 - DNA, 25 bp, Probe Sequence
attagaactatgctggatgctgtag

SEQ ID NO: 15792 - DNA, 25 bp, Probe Sequence
aattagaactatgctggatgctgta

SEQ ID NO: 15793 - DNA, 25 bp, Probe Sequence
ttagaactatgctggatgctgtaga

SEQ ID NO: 15794 - DNA, 25 bp, Probe Sequence
tagaactatgctggatgctgtagac

SEQ ID NO: 15795 - DNA, 25 bp, Probe Sequence
taattagaactatgctggatgctgt

SEQ ID NO: 15796 - DNA, 25 bp, Probe Sequence
ttaattagaactatgctggatgctg

SEQ ID NO: 15797 - DNA, 25 bp, Probe Sequence
aagctcaatcaacacactaccttaa

SEQ ID NO: 15798 - DNA, 25 bp, Probe Sequence
aatactcaacttggtccctatcttc

SEQ ID NO: 15799 - DNA, 25 bp, Probe Sequence
agaacctcaccagaaagtattcaat

SEQ ID NO: 15800 - DNA, 25 bp, Probe Sequence
aaatactcaacttggtccctatctt

SEQ ID NO: 15801 - DNA, 25 bp, Probe Sequence
cattcactctctgtgtctgttgttg

SEQ ID NO: 15802 - DNA, 25 bp, Probe Sequence
atactcaacttggtccctatcttcc

SEQ ID NO: 15803 - DNA, 25 bp, Probe Sequence
aggacaattcacagttcttgagcaa

SEQ ID NO: 15804 - DNA, 25 bp, Probe Sequence
ggattgttctgtctttgtgagtgaa

SEQ ID NO: 15805 - DNA, 25 bp, Probe Sequence
aagagaacctcaccagaaagtattc

SEQ ID NO: 15806 - DNA, 25 bp, Probe Sequence
aaagagaacctcaccagaaagtatt

SEQ ID NO: 15807 - DNA, 25 bp, Probe Sequence
gaaagagaacctcaccagaaagtat

SEQ ID NO: 15808 - DNA, 25 bp, Probe Sequence
gagaacctcaccagaaagtattcaa

SEQ ID NO: 15809 - DNA, 25 bp, Probe Sequence
tctgccaagaatttctctcacttaa

SEQ ID NO: 15810 - DNA, 25 bp, Probe Sequence
atctgccaagaatttctctcactta

SEQ ID NO: 15811 - DNA, 25 bp, Probe Sequence
gaacctcaccagaaagtattcaata

SEQ ID NO: 15812 - DNA, 25 bp, Probe Sequence
ttctgtctttgtgagtgaacataca

SEQ ID NO: 15813 - DNA, 25 bp, Probe Sequence
aaatgccaaagtgatcttacagaac

SEQ ID NO: 15814 - DNA, 25 bp, Probe Sequence
ctctctgttccactctgattccttt

SEQ ID NO: 15815 - DNA, 25 bp, Probe Sequence
atacataagttcagtagttgcttcc

SEQ ID NO: 15816 - DNA, 25 bp, Probe Sequence
ttcatacataagttcagtagttgct

SEQ ID NO: 15817 - DNA, 25 bp, Probe Sequence
tcatacataagttcagtagttgctt

SEQ ID NO: 15818 - DNA, 25 bp, Probe Sequence
catacataagttcagtagttgcttc

SEQ ID NO: 15819 - DNA, 25 bp, Probe Sequence
ttgagttagaagtatgtgtgttaca

SEQ ID NO: 15820 - DNA, 25 bp, Probe Sequence
attcatacataagttcagtagttgc

SEQ ID NO: 15821 - DNA, 25 bp, Probe Sequence
cataagttcagtagttgcttcccta

SEQ ID NO: 15822 - DNA, 25 bp, Probe Sequence
tacataagttcagtagttgcttccc

SEQ ID NO: 15823 - DNA, 25 bp, Probe Sequence
gctttgagttagaagtatgtgtgtt

SEQ ID NO: 15824 - DNA, 25 bp, Probe Sequence
taagttcagtagttgcttccctaac

SEQ ID NO: 15825 - DNA, 25 bp, Probe Sequence
ataagttcagtagttgcttccctaa

SEQ ID NO: 15826 - DNA, 25 bp, Probe Sequence
acataagttcagtagttgcttccct

SEQ ID NO: 15827 - DNA, 25 bp, Probe Sequence
tgtccttcccatgttcattaattca

SEQ ID NO: 15828 - DNA, 25 bp, Probe Sequence
ttgtccttcccatgttcattaattc

SEQ ID NO: 15829 - DNA, 25 bp, Probe Sequence
cttgtccttcccatgttcattaatt

SEQ ID NO: 15830 - DNA, 25 bp, Probe Sequence
ccttgtccttcccatgttcattaat

SEQ ID NO: 15831 - DNA, 25 bp, Probe Sequence
gtccttcccatgttcattaattcat

SEQ ID NO: 15832 - DNA, 25 bp, Probe Sequence
atccttgtccttcccatgttcatta

SEQ ID NO: 15833 - DNA, 25 bp, Probe Sequence
agctttgagttagaagtatgtgtgt

SEQ ID NO: 15834 - DNA, 25 bp, Probe Sequence
cagctttgagttagaagtatgtgtg

SEQ ID NO: 15835 - DNA, 25 bp, Probe Sequence
tccttgtccttcccatgttcattaa

SEQ ID NO: 15836 - DNA, 25 bp, Probe Sequence
aagcagctttgagttagaagtatgt

SEQ ID NO: 15837 - DNA, 25 bp, Probe Sequence
gaggatgactcttaagcacatagtg

SEQ ID NO: 15838 - DNA, 25 bp, Probe Sequence
cttcctttgacgctcctagtagttt

SEQ ID NO: 15839 - DNA, 25 bp, Probe Sequence
gaagatactggtacttgatagcctc

SEQ ID NO: 15840 - DNA, 25 bp, Probe Sequence
tgaagatactggtacttgatagcct

SEQ ID NO: 15841 - DNA, 25 bp, Probe Sequence
gtgaagatactggtacttgatagcc

SEQ ID NO: 15842 - DNA, 25 bp, Probe Sequence
agatactggtacttgatagcctctt

SEQ ID NO: 15843 - DNA, 25 bp, Probe Sequence
aagatactggtacttgatagcctct

SEQ ID NO: 15844 - DNA, 25 bp, Probe Sequence
gatactggtacttgatagcctctta

SEQ ID NO: 15845 - DNA, 25 bp, Probe Sequence
cgtgaagatactggtacttgatagc

SEQ ID NO: 15846 - DNA, 25 bp, Probe Sequence
gtctgtactgatcctcaaccaataa

SEQ ID NO: 15847 - DNA, 25 bp, Probe Sequence
atactggtacttgatagcctcttaa

SEQ ID NO: 15848 - DNA, 25 bp, Probe Sequence
tgtctgtactgatcctcaaccaata

SEQ ID NO: 15849 - DNA, 25 bp, Probe Sequence
atgtctgtactgatcctcaaccaat

SEQ ID NO: 15850 - DNA, 25 bp, Probe Sequence
aatgtctgtactgatcctcaaccaa

SEQ ID NO: 15851 - DNA, 25 bp, Probe Sequence
ttgttactgtgctgtgaaagattac

SEQ ID NO: 15852 - DNA, 25 bp, Probe Sequence
attaaatgggcaatatggagtcagt

SEQ ID NO: 15853 - DNA, 25 bp, Probe Sequence
acgtgaagatactggtacttgatag

SEQ ID NO: 15854 - DNA, 25 bp, Probe Sequence
atgtagtgtacgtgctattgagttg

SEQ ID NO: 15855 - DNA, 25 bp, Probe Sequence
catgtagtgtacgtgctattgagtt

SEQ ID NO: 15856 - DNA, 25 bp, Probe Sequence
tttgttactgtgctgtgaaagatta

SEQ ID NO: 15857 - DNA, 25 bp, Probe Sequence
aacgtgaagatactggtacttgata

SEQ ID NO: 15858 - DNA, 25 bp, Probe Sequence
ttaaatgggcaatatggagtcagtc

SEQ ID NO: 15859 - DNA, 25 bp, Probe Sequence
caacgtgaagatactggtacttgat

SEQ ID NO: 15860 - DNA, 25 bp, Probe Sequence
tagtgtacgtgctattgagttgtga

SEQ ID NO: 15861 - DNA, 25 bp, Probe Sequence
gtagtgtacgtgctattgagttgtg

SEQ ID NO: 15862 - DNA, 25 bp, Probe Sequence
tattaaatgggcaatatggagtcag

SEQ ID NO: 15863 - DNA, 25 bp, Probe Sequence
tctccttcctgcctattccattata

SEQ ID NO: 15864 - DNA, 25 bp, Probe Sequence
ttctccttcctgcctattccattat

SEQ ID NO: 15865 - DNA, 25 bp, Probe Sequence
gttctccttcctgcctattccatta

SEQ ID NO: 15866 - DNA, 25 bp, Probe Sequence
cacttagtctctctgagtctctgtt

SEQ ID NO: 15867 - DNA, 25 bp, Probe Sequence
cctgcctattccattataactcctt

SEQ ID NO: 15868 - DNA, 25 bp, Probe Sequence
ttcctgcctattccattataactcc

SEQ ID NO: 15869 - DNA, 25 bp, Probe Sequence
ccttcctgcctattccattataact

SEQ ID NO: 15870 - DNA, 25 bp, Probe Sequence
tccttcctgcctattccattataac

SEQ ID NO: 15871 - DNA, 25 bp, Probe Sequence
ctccttcctgcctattccattataa

SEQ ID NO: 15872 - DNA, 25 bp, Probe Sequence
tcctgcctattccattataactcct

SEQ ID NO: 15873 - DNA, 25 bp, Probe Sequence
tgcctattccattataactccttca

SEQ ID NO: 15874 - DNA, 25 bp, Probe Sequence
gtcacttagtctctctgagtctctg

SEQ ID NO: 15875 - DNA, 25 bp, Probe Sequence
agtcacttagtctctctgagtctct

SEQ ID NO: 15876 - DNA, 25 bp, Probe Sequence
aggtggtacttacgaaggatattaa

SEQ ID NO: 15877 - DNA, 25 bp, Probe Sequence
aaggtggtacttacgaaggatatta

SEQ ID NO: 15878 - DNA, 25 bp, Probe Sequence
aagtcacttagtctctctgagtctc

SEQ ID NO: 15879 - DNA, 25 bp, Probe Sequence
tcacttagtctctctgagtctctgt

SEQ ID NO: 15880 - DNA, 25 bp, Probe Sequence
gcctattccattataactccttcag

SEQ ID NO: 15881 - DNA, 25 bp, Probe Sequence
ctgcctattccattataactccttc

SEQ ID NO: 15882 - DNA, 25 bp, Probe Sequence
cttcctgcctattccattataactc

SEQ ID NO: 15883 - DNA, 25 bp, Probe Sequence
caagtcacttagtctctctgagtct

SEQ ID NO: 15884 - DNA, 25 bp, Probe Sequence
acaagtcacttagtctctctgagtc

SEQ ID NO: 15885 - DNA, 25 bp, Probe Sequence
gacaagtcacttagtctctctgagt

SEQ ID NO: 15886 - DNA, 25 bp, Probe Sequence
gatcacttgagtccaggaggttaag

SEQ ID NO: 15887 - DNA, 25 bp, Probe Sequence
tcaaggtagtcatatgtccaagtac

SEQ ID NO: 15888 - DNA, 25 bp, Probe Sequence
caaggtagtcatatgtccaagtacg

SEQ ID NO: 15889 - DNA, 25 bp, Probe Sequence
catcaaggtagtcatatgtccaagt

SEQ ID NO: 15890 - DNA, 25 bp, Probe Sequence
atcaaggtagtcatatgtccaagta

SEQ ID NO: 15891 - DNA, 25 bp, Probe Sequence
aaggtagtcatatgtccaagtacgc

SEQ ID NO: 15892 - DNA, 25 bp, Probe Sequence
acatcaaggtagtcatatgtccaag

SEQ ID NO: 15893 - DNA, 25 bp, Probe Sequence
ttgttaccgttggggagttctatat

SEQ ID NO: 15894 - DNA, 25 bp, Probe Sequence
tacatcaaggtagtcatatgtccaa

SEQ ID NO: 15895 - DNA, 25 bp, Probe Sequence
gttaccgttggggagttctatataa

SEQ ID NO: 15896 - DNA, 25 bp, Probe Sequence
tgttaccgttggggagttctatata

SEQ ID NO: 15897 - DNA, 25 bp, Probe Sequence
ttaccgttggggagttctatataag

SEQ ID NO: 15898 - DNA, 25 bp, Probe Sequence
gttggggagttctatataagcagag

SEQ ID NO: 15899 - DNA, 25 bp, Probe Sequence
gttgttaccgttggggagttctata

SEQ ID NO: 15900 - DNA, 25 bp, Probe Sequence
taccgttggggagttctatataagc

SEQ ID NO: 15901 - DNA, 25 bp, Probe Sequence
aggtagtcatatgtccaagtacgcc

SEQ ID NO: 15902 - DNA, 25 bp, Probe Sequence
ttggggagttctatataagcagagc

SEQ ID NO: 15903 - DNA, 25 bp, Probe Sequence
cgttggggagttctatataagcaga

SEQ ID NO: 15904 - DNA, 25 bp, Probe Sequence
gatctgttttggcagtacatcaatg

SEQ ID NO: 15905 - DNA, 25 bp, Probe Sequence
ggcctatttaggtgacactatagat

SEQ ID NO: 15906 - DNA, 25 bp, Probe Sequence
ccgttggggagttctatataagcag

SEQ ID NO: 15907 - DNA, 25 bp, Probe Sequence
taggtgacactatagatactaagtt

SEQ ID NO: 15908 - DNA, 25 bp, Probe Sequence
atctgttttggcagtacatcaatgg

SEQ ID NO: 15909 - DNA, 25 bp, Probe Sequence
gcctatttaggtgacactatagata

SEQ ID NO: 15910 - DNA, 25 bp, Probe Sequence
ggtgacactatagatactaagtttg

SEQ ID NO: 15911 - DNA, 25 bp, Probe Sequence
tcattcttcacaatcacgacttcta

SEQ ID NO: 15912 - DNA, 25 bp, Probe Sequence
attcttcacaatcacgacttctatg

SEQ ID NO: 15913 - DNA, 25 bp, Probe Sequence
cattcttcacaatcacgacttctat

SEQ ID NO: 15914 - DNA, 25 bp, Probe Sequence
ttcttcacaatcacgacttctatgc

SEQ ID NO: 15915 - DNA, 25 bp, Probe Sequence
gcaagtgtatgtaatgtatggttga

SEQ ID NO: 15916 - DNA, 25 bp, Probe Sequence
aagtgtatgtaatgtatggttgacc

SEQ ID NO: 15917 - DNA, 25 bp, Probe Sequence
caagtgtatgtaatgtatggttgac

SEQ ID NO: 15918 - DNA, 25 bp, Probe Sequence
gtcattcttcacaatcacgacttct

SEQ ID NO: 15919 - DNA, 25 bp, Probe Sequence
tgcctcagacagtgttacaagaatc

SEQ ID NO: 15920 - DNA, 25 bp, Probe Sequence
atgcaagtgtatgtaatgtatggtt

SEQ ID NO: 15921 - DNA, 25 bp, Probe Sequence
aatgcaagtgtatgtaatgtatggt

SEQ ID NO: 15922 - DNA, 25 bp, Probe Sequence
tgcaagtgtatgtaatgtatggttg

SEQ ID NO: 15923 - DNA, 25 bp, Probe Sequence
tgacccagcattatttaggaataca

SEQ ID NO: 15924 - DNA, 25 bp, Probe Sequence
agtgtatgtaatgtatggttgaccc

SEQ ID NO: 15925 - DNA, 25 bp, Probe Sequence
ggttgacccagcattatttaggaat

SEQ ID NO: 15926 - DNA, 25 bp, Probe Sequence
gacccagcattatttaggaatacaa

SEQ ID NO: 15927 - DNA, 25 bp, Probe Sequence
ttgacccagcattatttaggaatac

SEQ ID NO: 15928 - DNA, 25 bp, Probe Sequence
gttgacccagcattatttaggaata

SEQ ID NO: 15929 - DNA, 25 bp, Probe Sequence
ctgcctcagacagtgttacaagaat

SEQ ID NO: 15930 - DNA, 25 bp, Probe Sequence
acccagcattatttaggaatacaaa

SEQ ID NO: 15931 - DNA, 25 bp, Probe Sequence
gcctcagacagtgttacaagaatcc

SEQ ID NO: 15932 - DNA, 25 bp, Probe Sequence
tttagtcattcttcacaatcacgac

SEQ ID NO: 15933 - DNA, 25 bp, Probe Sequence
cttcacaatcacgacttctatgcac

SEQ ID NO: 15934 - DNA, 25 bp, Probe Sequence
tcttcacaatcacgacttctatgca

SEQ ID NO: 15935 - DNA, 25 bp, Probe Sequence
agagttactttcaatggactgaacc

SEQ ID NO: 15936 - DNA, 25 bp, Probe Sequence
aagagttactttcaatggactgaac

SEQ ID NO: 15937 - DNA, 25 bp, Probe Sequence
gagttactttcaatggactgaacca

SEQ ID NO: 15938 - DNA, 25 bp, Probe Sequence
gaagagttactttcaatggactgaa

SEQ ID NO: 15939 - DNA, 25 bp, Probe Sequence
cccatgagaatgagatcaccaaggt

SEQ ID NO: 15940 - DNA, 25 bp, Probe Sequence
cagaaaagccaaactcttcaggact

SEQ ID NO: 15941 - DNA, 25 bp, Probe Sequence
agaaaagccaaactcttcaggactg

SEQ ID NO: 15942 - DNA, 25 bp, Probe Sequence
tgcccatgagaatgagatcaccaag

SEQ ID NO: 15943 - DNA, 25 bp, Probe Sequence
ccagaaaagccaaactcttcaggac

SEQ ID NO: 15944 - DNA, 25 bp, Probe Sequence
aagaatgcccagaaaagccaaactc

SEQ ID NO: 15945 - DNA, 25 bp, Probe Sequence
gaagaatgcccagaaaagccaaact

SEQ ID NO: 15946 - DNA, 25 bp, Probe Sequence
aatgcccagaaaagccaaactcttc

SEQ ID NO: 15947 - DNA, 25 bp, Probe Sequence
gaatgcccagaaaagccaaactctt

SEQ ID NO: 15948 - DNA, 25 bp, Probe Sequence
gaaaagccaaactcttcaggactgc

SEQ ID NO: 15949 - DNA, 25 bp, Probe Sequence
cccagaaaagccaaactcttcagga

SEQ ID NO: 15950 - DNA, 25 bp, Probe Sequence
agaatgcccagaaaagccaaactct

SEQ ID NO: 15951 - DNA, 25 bp, Probe Sequence
atgcccagaaaagccaaactcttca

SEQ ID NO: 15952 - DNA, 25 bp, Probe Sequence
taagactcatgtatctggtcaccta

SEQ ID NO: 15953 - DNA, 25 bp, Probe Sequence
aataagactcatgtatctggtcacc

SEQ ID NO: 15954 - DNA, 25 bp, Probe Sequence
ataagactcatgtatctggtcacct

SEQ ID NO: 15955 - DNA, 25 bp, Probe Sequence
taagtccagtaggcacatttgatag

SEQ ID NO: 15956 - DNA, 25 bp, Probe Sequence
aagactcatgtatctggtcacctag

SEQ ID NO: 15957 - DNA, 25 bp, Probe Sequence
agtaggcacatttgatagaaaggat

SEQ ID NO: 15958 - DNA, 25 bp, Probe Sequence
ataagtccagtaggcacatttgata

SEQ ID NO: 15959 - DNA, 25 bp, Probe Sequence
cagtaggcacatttgatagaaagga

SEQ ID NO: 15960 - DNA, 25 bp, Probe Sequence
tccagtaggcacatttgatagaaag

SEQ ID NO: 15961 - DNA, 25 bp, Probe Sequence
gactcatgtatctggtcacctagtt

SEQ ID NO: 15962 - DNA, 25 bp, Probe Sequence
gtccagtaggcacatttgatagaaa

SEQ ID NO: 15963 - DNA, 25 bp, Probe Sequence
tttatggttaaagttgctgtggttg

SEQ ID NO: 15964 - DNA, 25 bp, Probe Sequence
ccagtaggcacatttgatagaaagg

SEQ ID NO: 15965 - DNA, 25 bp, Probe Sequence
agtccagtaggcacatttgatagaa

SEQ ID NO: 15966 - DNA, 25 bp, Probe Sequence
aagtccagtaggcacatttgataga

SEQ ID NO: 15967 - DNA, 25 bp, Probe Sequence
tttgaatttctaatctgtgaaggca

SEQ ID NO: 15968 - DNA, 25 bp, Probe Sequence
tgtgaaggcagtaaatgaaatatct

SEQ ID NO: 15969 - DNA, 25 bp, Probe Sequence
agactcatgtatctggtcacctagt

SEQ ID NO: 15970 - DNA, 25 bp, Probe Sequence
gtaggcacatttgatagaaaggatc

SEQ ID NO: 15971 - DNA, 25 bp, Probe Sequence
tcatgtatctggtcacctagtttac

SEQ ID NO: 15972 - DNA, 25 bp, Probe Sequence
ctcatgtatctggtcacctagttta

SEQ ID NO: 15973 - DNA, 25 bp, Probe Sequence
ttatggttaaagttgctgtggttgg

SEQ ID NO: 15974 - DNA, 25 bp, Probe Sequence
tgtatcctgataatgtttaagccaa

SEQ ID NO: 15975 - DNA, 25 bp, Probe Sequence
ttgtatcctgataatgtttaagcca

SEQ ID NO: 15976 - DNA, 25 bp, Probe Sequence
tgacatggctaactgcaagaattaa

SEQ ID NO: 15977 - DNA, 25 bp, Probe Sequence
ctgacatggctaactgcaagaatta

SEQ ID NO: 15978 - DNA, 25 bp, Probe Sequence
tccctacctagaatgtcagatgttt

SEQ ID NO: 15979 - DNA, 25 bp, Probe Sequence
ttccctacctagaatgtcagatgtt

SEQ ID NO: 15980 - DNA, 25 bp, Probe Sequence
tttccctacctagaatgtcagatgt

SEQ ID NO: 15981 - DNA, 25 bp, Probe Sequence
ctcatttccctgacttaaacctcac

SEQ ID NO: 15982 - DNA, 25 bp, Probe Sequence
ttgaaatcaagttgtctctgtgtac

SEQ ID NO: 15983 - DNA, 25 bp, Probe Sequence
atttccctgacttaaacctcactga

SEQ ID NO: 15984 - DNA, 25 bp, Probe Sequence
catttccctgacttaaacctcactg

SEQ ID NO: 15985 - DNA, 25 bp, Probe Sequence
tcatttccctgacttaaacctcact

SEQ ID NO: 15986 - DNA, 25 bp, Probe Sequence
aataacattcctctcacttgtaccc

SEQ ID NO: 15987 - DNA, 25 bp, Probe Sequence
aattgcctagcacaatagtgagtac

SEQ ID NO: 15988 - DNA, 25 bp, Probe Sequence
attgaaatcaagttgtctctgtgta

SEQ ID NO: 15989 - DNA, 25 bp, Probe Sequence
tattgaaatcaagttgtctctgtgt

SEQ ID NO: 15990 - DNA, 25 bp, Probe Sequence
tgtattgaaatcaagttgtctctgt

SEQ ID NO: 15991 - DNA, 25 bp, Probe Sequence
agcatctgagatctaagaacacaat

SEQ ID NO: 15992 - DNA, 25 bp, Probe Sequence
aagcatctgagatctaagaacacaa

SEQ ID NO: 15993 - DNA, 25 bp, Probe Sequence
atgataaactgacatggctaactgc

SEQ ID NO: 15994 - DNA, 25 bp, Probe Sequence
gtattgaaatcaagttgtctctgtg

SEQ ID NO: 15995 - DNA, 25 bp, Probe Sequence
tcaaagttgacctcaagataacatt

SEQ ID NO: 15996 - DNA, 25 bp, Probe Sequence
cctcatttccctgacttaaacctca

SEQ ID NO: 15997 - DNA, 25 bp, Probe Sequence
gcatctgagatctaagaacacaatt

SEQ ID NO: 15998 - DNA, 25 bp, Probe Sequence
cctagcacaatagtgagtacatttg

SEQ ID NO: 15999 - DNA, 25 bp, Probe Sequence
gcctagcacaatagtgagtacattt

SEQ ID NO: 16000 - DNA, 25 bp, Probe Sequence
aattcagttctgttatctgtgctct

SEQ ID NO: 16001 - DNA, 25 bp, Probe Sequence
attcagttctgttatctgtgctctg

SEQ ID NO: 16002 - DNA, 25 bp, Probe Sequence
tcgctttgattattgttgctattgt

SEQ ID NO: 16003 - DNA, 25 bp, Probe Sequence
ccatcgctttgattattgttgctat

SEQ ID NO: 16004 - DNA, 25 bp, Probe Sequence
tatcccatcgctttgattattgttg

SEQ ID NO: 16005 - DNA, 25 bp, Probe Sequence
acttctaaactttatcccatcgctt

SEQ ID NO: 16006 - DNA, 25 bp, Probe Sequence
tctaaactttatcccatcgctttga

SEQ ID NO: 16007 - DNA, 25 bp, Probe Sequence
ttctaaactttatcccatcgctttg

SEQ ID NO: 16008 - DNA, 25 bp, Probe Sequence
gtgacttctaaactttatcccatcg

SEQ ID NO: 16009 - DNA, 25 bp, Probe Sequence
cgtgacttctaaactttatcccatc

SEQ ID NO: 16010 - DNA, 25 bp, Probe Sequence
cgctttgattattgttgctattgtt

SEQ ID NO: 16011 - DNA, 25 bp, Probe Sequence
cttctaaactttatcccatcgcttt

SEQ ID NO: 16012 - DNA, 25 bp, Probe Sequence
gacttctaaactttatcccatcgct

SEQ ID NO: 16013 - DNA, 25 bp, Probe Sequence
tctcccatcaaatgtaaggtctatg

SEQ ID NO: 16014 - DNA, 25 bp, Probe Sequence
gtctcccatcaaatgtaaggtctat

SEQ ID NO: 16015 - DNA, 25 bp, Probe Sequence
ctaaactttatcccatcgctttgat

SEQ ID NO: 16016 - DNA, 25 bp, Probe Sequence
ttatcccatcgctttgattattgtt

SEQ ID NO: 16017 - DNA, 25 bp, Probe Sequence
tttatcccatcgctttgattattgt

SEQ ID NO: 16018 - DNA, 25 bp, Probe Sequence
tgacttctaaactttatcccatcgc

SEQ ID NO: 16019 - DNA, 25 bp, Probe Sequence
aaactttatcccatcgctttgatta

SEQ ID NO: 16020 - DNA, 25 bp, Probe Sequence
taaactttatcccatcgctttgatt

SEQ ID NO: 16021 - DNA, 25 bp, Probe Sequence
gcgtgacttctaaactttatcccat

SEQ ID NO: 16022 - DNA, 25 bp, Probe Sequence
tgtctcccatcaaatgtaaggtcta

SEQ ID NO: 16023 - DNA, 25 bp, Probe Sequence
atcgctttgattattgttgctattg

SEQ ID NO: 16024 - DNA, 25 bp, Probe Sequence
aattggtggtattggtactgtctcc

SEQ ID NO: 16025 - DNA, 25 bp, Probe Sequence
gtggtattggtactgtctcctgttg

SEQ ID NO: 16026 - DNA, 25 bp, Probe Sequence
aaattggtggtattggtactgtctc

SEQ ID NO: 16027 - DNA, 25 bp, Probe Sequence
attggtggtattggtactgtctcct

SEQ ID NO: 16028 - DNA, 25 bp, Probe Sequence
tggtattggtactgtctcctgttgg

SEQ ID NO: 16029 - DNA, 25 bp, Probe Sequence
ggtggtattggtactgtctcctgtt

SEQ ID NO: 16030 - DNA, 25 bp, Probe Sequence
ttggtggtattggtactgtctcctg

SEQ ID NO: 16031 - DNA, 25 bp, Probe Sequence
aaaattggtggtattggtactgtct

SEQ ID NO: 16032 - DNA, 25 bp, Probe Sequence
caaaattggtggtattggtactgtc

SEQ ID NO: 16033 - DNA, 25 bp, Probe Sequence
tggtggtattggtactgtctcctgt

SEQ ID NO: 16034 - DNA, 25 bp, Probe Sequence
ggtattggtactgtctcctgttggc

SEQ ID NO: 16035 - DNA, 25 bp, Probe Sequence
cagatcaacgttacaacggaagtaa

SEQ ID NO: 16036 - DNA, 25 bp, Probe Sequence
gtattggtactgtctcctgttggcc

SEQ ID NO: 16037 - DNA, 25 bp, Probe Sequence
ctttgctccagatcaacgttacaac

SEQ ID NO: 16038 - DNA, 25 bp, Probe Sequence
ccagatcaacgttacaacggaagta

SEQ ID NO: 16039 - DNA, 25 bp, Probe Sequence
agatcaacgttacaacggaagtaaa

SEQ ID NO: 16040 - DNA, 25 bp, Probe Sequence
cctttgctccagatcaacgttacaa

SEQ ID NO: 16041 - DNA, 25 bp, Probe Sequence
ctccagatcaacgttacaacggaag

SEQ ID NO: 16042 - DNA, 25 bp, Probe Sequence
cacctttgctccagatcaacgttac

SEQ ID NO: 16043 - DNA, 25 bp, Probe Sequence
tcacctttgctccagatcaacgtta

SEQ ID NO: 16044 - DNA, 25 bp, Probe Sequence
tccagatcaacgttacaacggaagt

SEQ ID NO: 16045 - DNA, 25 bp, Probe Sequence
acctttgctccagatcaacgttaca

SEQ ID NO: 16046 - DNA, 25 bp, Probe Sequence
gatcaacgttacaacggaagtaaaa

SEQ ID NO: 16047 - DNA, 25 bp, Probe Sequence
atcaacgttacaacggaagtaaaat

SEQ ID NO: 16048 - DNA, 25 bp, Probe Sequence
tttgctccagatcaacgttacaacg

SEQ ID NO: 16049 - DNA, 25 bp, Probe Sequence
catctcaataaacacattttggata

SEQ ID NO: 16050 - DNA, 25 bp, Probe Sequence
tctcaataaacacattttggataaa

SEQ ID NO: 16051 - DNA, 25 bp, Probe Sequence
atctcaataaacacattttggataa

SEQ ID NO: 16052 - DNA, 25 bp, Probe Sequence
cattaagtaagactggctgataaca

SEQ ID NO: 16053 - DNA, 25 bp, Probe Sequence
acattaagtaagactggctgataac

SEQ ID NO: 16054 - DNA, 25 bp, Probe Sequence
tgataacatgaccagacagacataa

SEQ ID NO: 16055 - DNA, 25 bp, Probe Sequence
aatgaaggcagtgtggtatatgtgt

SEQ ID NO: 16056 - DNA, 25 bp, Probe Sequence
aagtaagactggctgataacatgac

SEQ ID NO: 16057 - DNA, 25 bp, Probe Sequence
taagtaagactggctgataacatga

SEQ ID NO: 16058 - DNA, 25 bp, Probe Sequence
ctgataacatgaccagacagacata

SEQ ID NO: 16059 - DNA, 25 bp, Probe Sequence
attaagtaagactggctgataacat

SEQ ID NO: 16060 - DNA, 25 bp, Probe Sequence
ttaagtaagactggctgataacatg

SEQ ID NO: 16061 - DNA, 25 bp, Probe Sequence
cagtgggatttatgatgtgttgttt

SEQ ID NO: 16062 - DNA, 25 bp, Probe Sequence
atgaaggcagtgtggtatatgtgtg

SEQ ID NO: 16063 - DNA, 25 bp, Probe Sequence
tttgtttctttcttacccacttagc

SEQ ID NO: 16064 - DNA, 25 bp, Probe Sequence
cgtgccttgtatttgtttctttctt

SEQ ID NO: 16065 - DNA, 25 bp, Probe Sequence
ctcgtgccttgtatttgtttctttc

SEQ ID NO: 16066 - DNA, 25 bp, Probe Sequence
gccttgtatttgtttctttcttacc

SEQ ID NO: 16067 - DNA, 25 bp, Probe Sequence
agtaagactggctgataacatgacc

SEQ ID NO: 16068 - DNA, 25 bp, Probe Sequence
aaatgaaggcagtgtggtatatgtg

SEQ ID NO: 16069 - DNA, 25 bp, Probe Sequence
agtgggatttatgatgtgttgttta

SEQ ID NO: 16070 - DNA, 25 bp, Probe Sequence
tcgtgccttgtatttgtttctttct

SEQ ID NO: 16071 - DNA, 25 bp, Probe Sequence
tacattaagtaagactggctgataa

SEQ ID NO: 16072 - DNA, 25 bp, Probe Sequence
tgtatttgtttctttcttacccact

SEQ ID NO: 16073 - DNA, 25 bp, Probe Sequence
ttcttgtactatatcctttgcctgt

SEQ ID NO: 16074 - DNA, 25 bp, Probe Sequence
gtgccttgtatttgtttctttctta

SEQ ID NO: 16075 - DNA, 25 bp, Probe Sequence
ttatgctcgtgccttgtatttgttt

SEQ ID NO: 16076 - DNA, 25 bp, Probe Sequence
ctgtcttgtcaccaaccattcttac

SEQ ID NO: 16077 - DNA, 25 bp, Probe Sequence
tctgtcttgtcaccaaccattctta

SEQ ID NO: 16078 - DNA, 25 bp, Probe Sequence
ttcctctttcttcctcctctattct

SEQ ID NO: 16079 - DNA, 25 bp, Probe Sequence
cttcctctttcttcctcctctattc

SEQ ID NO: 16080 - DNA, 25 bp, Probe Sequence
ttctgtcttgtcaccaaccattctt

SEQ ID NO: 16081 - DNA, 25 bp, Probe Sequence
ctacctatcctgaatggtctgtcat

SEQ ID NO: 16082 - DNA, 25 bp, Probe Sequence
cctctttcttcctcctctattctct

SEQ ID NO: 16083 - DNA, 25 bp, Probe Sequence
tcctctttcttcctcctctattctc

SEQ ID NO: 16084 - DNA, 25 bp, Probe Sequence
ccttcctctttcttcctcctctatt

SEQ ID NO: 16085 - DNA, 25 bp, Probe Sequence
aactcttatagcctgccttcaattt

SEQ ID NO: 16086 - DNA, 25 bp, Probe Sequence
aaactcttatagcctgccttcaatt

SEQ ID NO: 16087 - DNA, 25 bp, Probe Sequence
gaaactcttatagcctgccttcaat

SEQ ID NO: 16088 - DNA, 25 bp, Probe Sequence
tacctatcctgaatggtctgtcatt

SEQ ID NO: 16089 - DNA, 25 bp, Probe Sequence
cattgggtagcattaactgtaagat

SEQ ID NO: 16090 - DNA, 25 bp, Probe Sequence
ctatcctgaatggtctgtcattgtc

SEQ ID NO: 16091 - DNA, 25 bp, Probe Sequence
cagcaaatctttccttagttgatga

SEQ ID NO: 16092 - DNA, 25 bp, Probe Sequence
atttcttgaaactcttatagcctgc

SEQ ID NO: 16093 - DNA, 25 bp, Probe Sequence
ttccttagttgatgagactgtgttt

SEQ ID NO: 16094 - DNA, 25 bp, Probe Sequence
tttccttagttgatgagactgtgtt

SEQ ID NO: 16095 - DNA, 25 bp, Probe Sequence
gcaaatctttccttagttgatgaga

SEQ ID NO: 16096 - DNA, 25 bp, Probe Sequence
agcaaatctttccttagttgatgag

SEQ ID NO: 16097 - DNA, 25 bp, Probe Sequence
tctttccttagttgatgagactgtg

SEQ ID NO: 16098 - DNA, 25 bp, Probe Sequence
cttctgtcttgtcaccaaccattct

SEQ ID NO: 16099 - DNA, 25 bp, Probe Sequence
ctttccttagttgatgagactgtgt

SEQ ID NO: 16100 - DNA, 25 bp, Probe Sequence
atagtccatactgagtgtcatcaac

SEQ ID NO: 16101 - DNA, 25 bp, Probe Sequence
tccatactgagtgtcatcaacaatc

SEQ ID NO: 16102 - DNA, 25 bp, Probe Sequence
catactgagtgtcatcaacaatcca

SEQ ID NO: 16103 - DNA, 25 bp, Probe Sequence
gtccatactgagtgtcatcaacaat

SEQ ID NO: 16104 - DNA, 25 bp, Probe Sequence
tagtccatactgagtgtcatcaaca

SEQ ID NO: 16105 - DNA, 25 bp, Probe Sequence
tatagtccatactgagtgtcatcaa

SEQ ID NO: 16106 - DNA, 25 bp, Probe Sequence
atactgagtgtcatcaacaatccag

SEQ ID NO: 16107 - DNA, 25 bp, Probe Sequence
atatagtccatactgagtgtcatca

SEQ ID NO: 16108 - DNA, 25 bp, Probe Sequence
ccatactgagtgtcatcaacaatcc

SEQ ID NO: 16109 - DNA, 25 bp, Probe Sequence
agtccatactgagtgtcatcaacaa

SEQ ID NO: 16110 - DNA, 25 bp, Probe Sequence
tactgagtgtcatcaacaatccaga

SEQ ID NO: 16111 - DNA, 25 bp, Probe Sequence
aagacttgctgctgatgaagatgat

SEQ ID NO: 16112 - DNA, 25 bp, Probe Sequence
ttgtatctccttagctgctcaataa

SEQ ID NO: 16113 - DNA, 25 bp, Probe Sequence
gtgtcatcaacaatccagactgaag

SEQ ID NO: 16114 - DNA, 25 bp, Probe Sequence
cttgccctttgctttctattacttg

SEQ ID NO: 16115 - DNA, 25 bp, Probe Sequence
taaatcgcctttgtatctccttagc

SEQ ID NO: 16116 - DNA, 25 bp, Probe Sequence
aatatagtccatactgagtgtcatc

SEQ ID NO: 16117 - DNA, 25 bp, Probe Sequence
tgtcatcaacaatccagactgaagt

SEQ ID NO: 16118 - DNA, 25 bp, Probe Sequence
agtgtcatcaacaatccagactgaa

SEQ ID NO: 16119 - DNA, 25 bp, Probe Sequence
ttgccctttgctttctattacttgt

SEQ ID NO: 16120 - DNA, 25 bp, Probe Sequence
gaaacaatctcttggttccctaaag

SEQ ID NO: 16121 - DNA, 25 bp, Probe Sequence
gtcatcaacaatccagactgaagtc

SEQ ID NO: 16122 - DNA, 25 bp, Probe Sequence
ttaaatcgcctttgtatctccttag

SEQ ID NO: 16123 - DNA, 25 bp, Probe Sequence
ccttgccctttgctttctattactt

SEQ ID NO: 16124 - DNA, 25 bp, Probe Sequence
attagatgcaggtcgtacataactt

SEQ ID NO: 16125 - DNA, 25 bp, Probe Sequence
aaataaagagttaccacccagcaaa

SEQ ID NO: 16126 - DNA, 25 bp, Probe Sequence
ttagatgcaggtcgtacataacttc

SEQ ID NO: 16127 - DNA, 25 bp, Probe Sequence
cattagatgcaggtcgtacataact

SEQ ID NO: 16128 - DNA, 25 bp, Probe Sequence
tacaatgggtggagtatttacggta

SEQ ID NO: 16129 - DNA, 25 bp, Probe Sequence
gaaataaagagttaccacccagcaa

SEQ ID NO: 16130 - DNA, 25 bp, Probe Sequence
acaatgggtggagtatttacggtaa

SEQ ID NO: 16131 - DNA, 25 bp, Probe Sequence
tagatgcaggtcgtacataacttcc

SEQ ID NO: 16132 - DNA, 25 bp, Probe Sequence
gtacaatgggtggagtatttacggt

SEQ ID NO: 16133 - DNA, 25 bp, Probe Sequence
gacgtacaatgggtggagtatttac

SEQ ID NO: 16134 - DNA, 25 bp, Probe Sequence
tgacgtacaatgggtggagtattta

SEQ ID NO: 16135 - DNA, 25 bp, Probe Sequence
aataaagagttaccacccagcaaaa

SEQ ID NO: 16136 - DNA, 25 bp, Probe Sequence
aattgacgtatgttcccatagtaac

SEQ ID NO: 16137 - DNA, 25 bp, Probe Sequence
cataattgacgtatgttcccatagt

SEQ ID NO: 16138 - DNA, 25 bp, Probe Sequence
atagtaacgccaatagggacttttc

SEQ ID NO: 16139 - DNA, 25 bp, Probe Sequence
ttgacgtacaatgggtggagtattt

SEQ ID NO: 16140 - DNA, 25 bp, Probe Sequence
tcataattgacgtatgttcccatag

SEQ ID NO: 16141 - DNA, 25 bp, Probe Sequence
catagtaacgccaatagggactttt

SEQ ID NO: 16142 - DNA, 25 bp, Probe Sequence
aggtcgtacataacttccggtaaat

SEQ ID NO: 16143 - DNA, 25 bp, Probe Sequence
ggtcgtacataacttccggtaaatg

SEQ ID NO: 16144 - DNA, 25 bp, Probe Sequence
gacccttaatgggactttcctactt

SEQ ID NO: 16145 - DNA, 25 bp, Probe Sequence
acccttaatgggactttcctacttg

SEQ ID NO: 16146 - DNA, 25 bp, Probe Sequence
gtcgtacataacttccggtaaatgc

SEQ ID NO: 16147 - DNA, 25 bp, Probe Sequence
taattgacgtatgttcccatagtaa

SEQ ID NO: 16148 - DNA, 25 bp, Probe Sequence
tctggcagtacatcaagtgtatcat

SEQ ID NO: 16149 - DNA, 25 bp, Probe Sequence
ctctggcagtacatcaagtgtatca

SEQ ID NO: 16150 - DNA, 25 bp, Probe Sequence
cctctggcagtacatcaagtgtatc

SEQ ID NO: 16151 - DNA, 25 bp, Probe Sequence
ccctctggcagtacatcaagtgtat

SEQ ID NO: 16152 - DNA, 25 bp, Probe Sequence
agttctagtaggctgctatggaatt

SEQ ID NO: 16153 - DNA, 25 bp, Probe Sequence
gatcagttccagaccaccataatta

SEQ ID NO: 16154 - DNA, 25 bp, Probe Sequence
atcagttccagaccaccataattaa

SEQ ID NO: 16155 - DNA, 25 bp, Probe Sequence
gagttctagtaggctgctatggaat

SEQ ID NO: 16156 - DNA, 25 bp, Probe Sequence
catggagatattacaggatcagttc

SEQ ID NO: 16157 - DNA, 25 bp, Probe Sequence
agagttctagtaggctgctatggaa

SEQ ID NO: 16158 - DNA, 25 bp, Probe Sequence
ggagatattacaggatcagttccag

SEQ ID NO: 16159 - DNA, 25 bp, Probe Sequence
gatattacaggatcagttccagacc

SEQ ID NO: 16160 - DNA, 25 bp, Probe Sequence
gatacttccagagttctagtaggct

SEQ ID NO: 16161 - DNA, 25 bp, Probe Sequence
agatattacaggatcagttccagac

SEQ ID NO: 16162 - DNA, 25 bp, Probe Sequence
atggagatattacaggatcagttcc

SEQ ID NO: 16163 - DNA, 25 bp, Probe Sequence
atacttccagagttctagtaggctg

SEQ ID NO: 16164 - DNA, 25 bp, Probe Sequence
atattacaggatcagttccagacca

SEQ ID NO: 16165 - DNA, 25 bp, Probe Sequence
gagatattacaggatcagttccaga

SEQ ID NO: 16166 - DNA, 25 bp, Probe Sequence
cctgcttctgttattctttagtgtt

SEQ ID NO: 16167 - DNA, 25 bp, Probe Sequence
ccctgcttctgttattctttagtgt

SEQ ID NO: 16168 - DNA, 25 bp, Probe Sequence
tttatgaaacttgataccacgggag

SEQ ID NO: 16169 - DNA, 25 bp, Probe Sequence
tattacaggatcagttccagaccac

SEQ ID NO: 16170 - DNA, 25 bp, Probe Sequence
ttccagagttctagtaggctgctat

SEQ ID NO: 16171 - DNA, 25 bp, Probe Sequence
ctagtaggctgctatggaatttctg

SEQ ID NO: 16172 - DNA, 25 bp, Probe Sequence
tctagtaggctgctatggaatttct

SEQ ID NO: 16173 - DNA, 25 bp, Probe Sequence
ttctagtaggctgctatggaatttc

SEQ ID NO: 16174 - DNA, 25 bp, Probe Sequence
gttctagtaggctgctatggaattt

SEQ ID NO: 16175 - DNA, 25 bp, Probe Sequence
cgatacttccagagttctagtaggc

SEQ ID NO: 16176 - DNA, 25 bp, Probe Sequence
ttaagtgttgcttagagtcattcct

SEQ ID NO: 16177 - DNA, 25 bp, Probe Sequence
taagtgttgcttagagtcattcctc

SEQ ID NO: 16178 - DNA, 25 bp, Probe Sequence
attaagtgttgcttagagtcattcc

SEQ ID NO: 16179 - DNA, 25 bp, Probe Sequence
atatgctttgtttcagggtttatgg

SEQ ID NO: 16180 - DNA, 25 bp, Probe Sequence
tttgtttcagggtttatggatttgt

SEQ ID NO: 16181 - DNA, 25 bp, Probe Sequence
gctttgtttcagggtttatggattt

SEQ ID NO: 16182 - DNA, 25 bp, Probe Sequence
tatgctttgtttcagggtttatgga

SEQ ID NO: 16183 - DNA, 25 bp, Probe Sequence
ctttgtttcagggtttatggatttg

SEQ ID NO: 16184 - DNA, 25 bp, Probe Sequence
atgctttgtttcagggtttatggat

SEQ ID NO: 16185 - DNA, 25 bp, Probe Sequence
aactgtgggtataaactgttgaaac

SEQ ID NO: 16186 - DNA, 25 bp, Probe Sequence
ttgtttcagggtttatggatttgta

SEQ ID NO: 16187 - DNA, 25 bp, Probe Sequence
tgctttgtttcagggtttatggatt

SEQ ID NO: 16188 - DNA, 25 bp, Probe Sequence
tgtttcagggtttatggatttgtat

SEQ ID NO: 16189 - DNA, 25 bp, Probe Sequence
aattaagtgttgcttagagtcattc

SEQ ID NO: 16190 - DNA, 25 bp, Probe Sequence
aaactgtgggtataaactgttgaaa

SEQ ID NO: 16191 - DNA, 25 bp, Probe Sequence
cagcgacactcattcattgaagaag

SEQ ID NO: 16192 - DNA, 25 bp, Probe Sequence
ttcagggtttatggatttgtattca

SEQ ID NO: 16193 - DNA, 25 bp, Probe Sequence
actcattcattgaagaagtgtattc

SEQ ID NO: 16194 - DNA, 25 bp, Probe Sequence
aatcacctcattcttcatttcagat

SEQ ID NO: 16195 - DNA, 25 bp, Probe Sequence
agcgacactcattcattgaagaagt

SEQ ID NO: 16196 - DNA, 25 bp, Probe Sequence
tcagggtttatggatttgtattcat

SEQ ID NO: 16197 - DNA, 25 bp, Probe Sequence
aggaagtgctctttatgtatctaac

SEQ ID NO: 16198 - DNA, 25 bp, Probe Sequence
atcacctcattcttcatttcagatc

SEQ ID NO: 16199 - DNA, 25 bp, Probe Sequence
gtttcagggtttatggatttgtatt

SEQ ID NO: 16200 - DNA, 25 bp, Probe Sequence
tagttcaatgaatctgagaggctac

SEQ ID NO: 16201 - DNA, 25 bp, Probe Sequence
ctagttcaatgaatctgagaggcta

SEQ ID NO: 16202 - DNA, 25 bp, Probe Sequence
gttcaatgaatctgagaggctactc

SEQ ID NO: 16203 - DNA, 25 bp, Probe Sequence
agttcaatgaatctgagaggctact

SEQ ID NO: 16204 - DNA, 25 bp, Probe Sequence
agactagttcaatgaatctgagagg

SEQ ID NO: 16205 - DNA, 25 bp, Probe Sequence
gactagttcaatgaatctgagaggc

SEQ ID NO: 16206 - DNA, 25 bp, Probe Sequence
actagttcaatgaatctgagaggct

SEQ ID NO: 16207 - DNA, 25 bp, Probe Sequence
ttcaatgaatctgagaggctactca

SEQ ID NO: 16208 - DNA, 25 bp, Probe Sequence
ggacagactagttcaatgaatctga

SEQ ID NO: 16209 - DNA, 25 bp, Probe Sequence
acagactagttcaatgaatctgaga

SEQ ID NO: 16210 - DNA, 25 bp, Probe Sequence
gacagactagttcaatgaatctgag

SEQ ID NO: 16211 - DNA, 25 bp, Probe Sequence
cagactagttcaatgaatctgagag

SEQ ID NO: 16212 - DNA, 25 bp, Probe Sequence
gaggccacagtatcaactttatcgc

SEQ ID NO: 16213 - DNA, 25 bp, Probe Sequence
tgagaggctactcagtagacagtcc

SEQ ID NO: 16214 - DNA, 25 bp, Probe Sequence
aggccacagtatcaactttatcgca

SEQ ID NO: 16215 - DNA, 25 bp, Probe Sequence
ctactcagtagacagtcccaccctc

SEQ ID NO: 16216 - DNA, 25 bp, Probe Sequence
gagaggctactcagtagacagtccc

SEQ ID NO: 16217 - DNA, 25 bp, Probe Sequence
ttcctatcttggcagtacatctacg

SEQ ID NO: 16218 - DNA, 25 bp, Probe Sequence
tttcctatcttggcagtacatctac

SEQ ID NO: 16219 - DNA, 25 bp, Probe Sequence
ctttcctatcttggcagtacatcta

SEQ ID NO: 16220 - DNA, 25 bp, Probe Sequence
gactttcctatcttggcagtacatc

SEQ ID NO: 16221 - DNA, 25 bp, Probe Sequence
actttcctatcttggcagtacatct

SEQ ID NO: 16222 - DNA, 25 bp, Probe Sequence
gacctgtatgggactttcctatctt

SEQ ID NO: 16223 - DNA, 25 bp, Probe Sequence
atgacctgtatgggactttcctatc

SEQ ID NO: 16224 - DNA, 25 bp, Probe Sequence
acctgtatgggactttcctatcttg

SEQ ID NO: 16225 - DNA, 25 bp, Probe Sequence
cctgtatgggactttcctatcttgg

SEQ ID NO: 16226 - DNA, 25 bp, Probe Sequence
catgacctgtatgggactttcctat

SEQ ID NO: 16227 - DNA, 25 bp, Probe Sequence
tgacctgtatgggactttcctatct

SEQ ID NO: 16228 - DNA, 25 bp, Probe Sequence
ggactttcctatcttggcagtacat

SEQ ID NO: 16229 - DNA, 25 bp, Probe Sequence
gtatgggactttcctatcttggcag

SEQ ID NO: 16230 - DNA, 25 bp, Probe Sequence
ctgtatgggactttcctatcttggc

SEQ ID NO: 16231 - DNA, 25 bp, Probe Sequence
agtacatgacctgtatgggactttc

SEQ ID NO: 16232 - DNA, 25 bp, Probe Sequence
atgggactttcctatcttggcagta

SEQ ID NO: 16233 - DNA, 25 bp, Probe Sequence
tatgggactttcctatcttggcagt

SEQ ID NO: 16234 - DNA, 25 bp, Probe Sequence
cagtacatgacctgtatgggacttt

SEQ ID NO: 16235 - DNA, 25 bp, Probe Sequence
acatgacctgtatgggactttccta

SEQ ID NO: 16236 - DNA, 25 bp, Probe Sequence
tgtatgggactttcctatcttggca

SEQ ID NO: 16237 - DNA, 25 bp, Probe Sequence
tacatgacctgtatgggactttcct

SEQ ID NO: 16238 - DNA, 25 bp, Probe Sequence
gtacatgacctgtatgggactttcc

SEQ ID NO: 16239 - DNA, 25 bp, Probe Sequence
gtttcttgtgcaataaacaatcagc

SEQ ID NO: 16240 - DNA, 25 bp, Probe Sequence
ccagtttcttgtgcaataaacaatc

SEQ ID NO: 16241 - DNA, 25 bp, Probe Sequence
acaccctcatgttcatacacctatc

SEQ ID NO: 16242 - DNA, 25 bp, Probe Sequence
caccctcatgttcatacacctatcc

SEQ ID NO: 16243 - DNA, 25 bp, Probe Sequence
gatctagtcacagccctatactccc

SEQ ID NO: 16244 - DNA, 25 bp, Probe Sequence
atctagtcacagccctatactccct

SEQ ID NO: 16245 - DNA, 25 bp, Probe Sequence
ggatctagtcacagccctatactcc

SEQ ID NO: 16246 - DNA, 25 bp, Probe Sequence
accctcatgttcatacacctatccc

SEQ ID NO: 16247 - DNA, 25 bp, Probe Sequence
aacaccctcatgttcatacacctat

SEQ ID NO: 16248 - DNA, 25 bp, Probe Sequence
tctagtcacagccctatactccctc

SEQ ID NO: 16249 - DNA, 25 bp, Probe Sequence
aaacaccctcatgttcatacaccta

SEQ ID NO: 16250 - DNA, 25 bp, Probe Sequence
gggatctagtcacagccctatactc

SEQ ID NO: 16251 - DNA, 25 bp, Probe Sequence
gagaaaacaccctcatgttcataca

SEQ ID NO: 16252 - DNA, 25 bp, Probe Sequence
agaaaacaccctcatgttcatacac

SEQ ID NO: 16253 - DNA, 25 bp, Probe Sequence
cgagaaaacaccctcatgttcatac

SEQ ID NO: 16254 - DNA, 25 bp, Probe Sequence
gaaaacaccctcatgttcatacacc

SEQ ID NO: 16255 - DNA, 25 bp, Probe Sequence
acgagaaaacaccctcatgttcata

SEQ ID NO: 16256 - DNA, 25 bp, Probe Sequence
aaaacaccctcatgttcatacacct

SEQ ID NO: 16257 - DNA, 25 bp, Probe Sequence
cgggatctagtcacagccctatact

SEQ ID NO: 16258 - DNA, 25 bp, Probe Sequence
ccctcatgttcatacacctatcccc

SEQ ID NO: 16259 - DNA, 25 bp, Probe Sequence
tattggacgttcatggacgggtaaa

SEQ ID NO: 16260 - DNA, 25 bp, Probe Sequence
ttattggacgttcatggacgggtaa

SEQ ID NO: 16261 - DNA, 25 bp, Probe Sequence
cttattggacgttcatggacgggta

SEQ ID NO: 16262 - DNA, 25 bp, Probe Sequence
ttcacacgagaaaacaccctcatgt

SEQ ID NO: 16263 - DNA, 25 bp, Probe Sequence
attggacgttcatggacgggtaaat

SEQ ID NO: 16264 - DNA, 25 bp, Probe Sequence
cacgagaaaacaccctcatgttcat

SEQ ID NO: 16265 - DNA, 25 bp, Probe Sequence
aagttattagagaggatgaagcatt

SEQ ID NO: 16266 - DNA, 25 bp, Probe Sequence
ttagatttccctattgtgacagagc

SEQ ID NO: 16267 - DNA, 25 bp, Probe Sequence
gcttagatttccctattgtgacaga

SEQ ID NO: 16268 - DNA, 25 bp, Probe Sequence
gaaatgttctgtcaaatgtgtctca

SEQ ID NO: 16269 - DNA, 25 bp, Probe Sequence
accataatgagatgtgagccttgtg

SEQ ID NO: 16270 - DNA, 25 bp, Probe Sequence
cattcacttccagagaggacctatc

SEQ ID NO: 16271 - DNA, 25 bp, Probe Sequence
agttattagagaggatgaagcatta

SEQ ID NO: 16272 - DNA, 25 bp, Probe Sequence
tgaaatgttctgtcaaatgtgtctc

SEQ ID NO: 16273 - DNA, 25 bp, Probe Sequence
cttagatttccctattgtgacagag

SEQ ID NO: 16274 - DNA, 25 bp, Probe Sequence
gttattagagaggatgaagcattag

SEQ ID NO: 16275 - DNA, 25 bp, Probe Sequence
acattcacttccagagaggacctat

SEQ ID NO: 16276 - DNA, 25 bp, Probe Sequence
tagatttccctattgtgacagagcc

SEQ ID NO: 16277 - DNA, 25 bp, Probe Sequence
caccataatgagatgtgagccttgt

SEQ ID NO: 16278 - DNA, 25 bp, Probe Sequence
aaatgttctgtcaaatgtgtctcac

SEQ ID NO: 16279 - DNA, 25 bp, Probe Sequence
agagcttagatttccctattgtgac

SEQ ID NO: 16280 - DNA, 25 bp, Probe Sequence
attcacttccagagaggacctatcc

SEQ ID NO: 16281 - DNA, 25 bp, Probe Sequence
agcttagatttccctattgtgacag

SEQ ID NO: 16282 - DNA, 25 bp, Probe Sequence
gagcttagatttccctattgtgaca

SEQ ID NO: 16283 - DNA, 25 bp, Probe Sequence
atggtatgtagagcttagatttccc

SEQ ID NO: 16284 - DNA, 25 bp, Probe Sequence
tggtatgtagagcttagatttccct

SEQ ID NO: 16285 - DNA, 25 bp, Probe Sequence
aaaccagagtatcacactttaatgt

SEQ ID NO: 16286 - DNA, 25 bp, Probe Sequence
aaagttattagagaggatgaagcat

SEQ ID NO: 16287 - DNA, 25 bp, Probe Sequence
aagctatgagttgaaatgttctgtc

SEQ ID NO: 16288 - DNA, 25 bp, Probe Sequence
tgtagagcttagatttccctattgt

SEQ ID NO: 16289 - DNA, 25 bp, Probe Sequence
tgctcatggttaggaagaatcaata

SEQ ID NO: 16290 - DNA, 25 bp, Probe Sequence
atgctcatggttaggaagaatcaat

SEQ ID NO: 16291 - DNA, 25 bp, Probe Sequence
ggctaatatccagaatctacaatga

SEQ ID NO: 16292 - DNA, 25 bp, Probe Sequence
gctcatggttaggaagaatcaatat

SEQ ID NO: 16293 - DNA, 25 bp, Probe Sequence
catgctcatggttaggaagaatcaa

SEQ ID NO: 16294 - DNA, 25 bp, Probe Sequence
tatccagaatctacaatgaactcaa

SEQ ID NO: 16295 - DNA, 25 bp, Probe Sequence
atatccagaatctacaatgaactca

SEQ ID NO: 16296 - DNA, 25 bp, Probe Sequence
actcatctgacaaagggctaatatc

SEQ ID NO: 16297 - DNA, 25 bp, Probe Sequence
ctactcatctgacaaagggctaata

SEQ ID NO: 16298 - DNA, 25 bp, Probe Sequence
ctcatctgacaaagggctaatatcc

SEQ ID NO: 16299 - DNA, 25 bp, Probe Sequence
tccagaatctacaatgaactcaaac

SEQ ID NO: 16300 - DNA, 25 bp, Probe Sequence
tactcatctgacaaagggctaatat

SEQ ID NO: 16301 - DNA, 25 bp, Probe Sequence
gggctaatatccagaatctacaatg

SEQ ID NO: 16302 - DNA, 25 bp, Probe Sequence
agggctaatatccagaatctacaat

SEQ ID NO: 16303 - DNA, 25 bp, Probe Sequence
tcatggttaggaagaatcaatatca

SEQ ID NO: 16304 - DNA, 25 bp, Probe Sequence
tcatctgacaaagggctaatatcca

SEQ ID NO: 16305 - DNA, 25 bp, Probe Sequence
caaggtaatttatggattcaatgcc

SEQ ID NO: 16306 - DNA, 25 bp, Probe Sequence
atccagaatctacaatgaactcaaa

SEQ ID NO: 16307 - DNA, 25 bp, Probe Sequence
ctcatggttaggaagaatcaatatc

SEQ ID NO: 16308 - DNA, 25 bp, Probe Sequence
gctaatatccagaatctacaatgaa

SEQ ID NO: 16309 - DNA, 25 bp, Probe Sequence
cagaatctacaatgaactcaaacaa

SEQ ID NO: 16310 - DNA, 25 bp, Probe Sequence
aatatccagaatctacaatgaactc

SEQ ID NO: 16311 - DNA, 25 bp, Probe Sequence
tttcacgacctactcatctgacaaa

SEQ ID NO: 16312 - DNA, 25 bp, Probe Sequence
tactgcccaaggtaatttatggatt

SEQ ID NO: 16313 - DNA, 25 bp, Probe Sequence
actaatgatgtaagtacgaggagta

SEQ ID NO: 16314 - DNA, 25 bp, Probe Sequence
ctaatgatgtaagtacgaggagtaa

SEQ ID NO: 16315 - DNA, 25 bp, Probe Sequence
tgataaagttctctatggcaaagtc

SEQ ID NO: 16316 - DNA, 25 bp, Probe Sequence
ctgataaagttctctatggcaaagt

SEQ ID NO: 16317 - DNA, 25 bp, Probe Sequence
ctatcaaggcagctattgtgtatta

SEQ ID NO: 16318 - DNA, 25 bp, Probe Sequence
tatggcaaagtctttcaaatacgag

SEQ ID NO: 16319 - DNA, 25 bp, Probe Sequence
ctatggcaaagtctttcaaatacga

SEQ ID NO: 16320 - DNA, 25 bp, Probe Sequence
tctatggcaaagtctttcaaatacg

SEQ ID NO: 16321 - DNA, 25 bp, Probe Sequence
gttctctatggcaaagtctttcaaa

SEQ ID NO: 16322 - DNA, 25 bp, Probe Sequence
agttctctatggcaaagtctttcaa

SEQ ID NO: 16323 - DNA, 25 bp, Probe Sequence
gataaagttctctatggcaaagtct

SEQ ID NO: 16324 - DNA, 25 bp, Probe Sequence
tctgataaagttctctatggcaaag

SEQ ID NO: 16325 - DNA, 25 bp, Probe Sequence
cctatcaaggcagctattgtgtatt

SEQ ID NO: 16326 - DNA, 25 bp, Probe Sequence
aagttctctatggcaaagtctttca

SEQ ID NO: 16327 - DNA, 25 bp, Probe Sequence
catacacatccatgttcactgtaac

SEQ ID NO: 16328 - DNA, 25 bp, Probe Sequence
agtctttcaaatacgagataactgc

SEQ ID NO: 16329 - DNA, 25 bp, Probe Sequence
ttctctatggcaaagtctttcaaat

SEQ ID NO: 16330 - DNA, 25 bp, Probe Sequence
tatcaaggcagctattgtgtattaa

SEQ ID NO: 16331 - DNA, 25 bp, Probe Sequence
tactaatgatgtaagtacgaggagt

SEQ ID NO: 16332 - DNA, 25 bp, Probe Sequence
ggcaaagtctttcaaatacgagata

SEQ ID NO: 16333 - DNA, 25 bp, Probe Sequence
ccatacacatccatgttcactgtaa

SEQ ID NO: 16334 - DNA, 25 bp, Probe Sequence
ttctgataaagttctctatggcaaa

SEQ ID NO: 16335 - DNA, 25 bp, Probe Sequence
tttctgataaagttctctatggcaa

SEQ ID NO: 16336 - DNA, 25 bp, Probe Sequence
tcctatcaaggcagctattgtgtat

SEQ ID NO: 16337 - DNA, 25 bp, Probe Sequence
cttcctctctctctctctctctctc

SEQ ID NO: 16338 - DNA, 25 bp, Probe Sequence
ccttcctctctctctctctctctct

SEQ ID NO: 16339 - DNA, 25 bp, Probe Sequence
tccttcctctctctctctctctctc

SEQ ID NO: 16340 - DNA, 25 bp, Probe Sequence
gtccttcctctctctctctctctct

SEQ ID NO: 16341 - DNA, 25 bp, Probe Sequence
cgtccttcctctctctctctctctc

SEQ ID NO: 16342 - DNA, 25 bp, Probe Sequence
ctttccattaaagaaacacccgtgc

SEQ ID NO: 16343 - DNA, 25 bp, Probe Sequence
tcttgtgcttcctcagacctttctc

SEQ ID NO: 16344 - DNA, 25 bp, Probe Sequence
tccattaaagaaacacccgtgcaaa

SEQ ID NO: 16345 - DNA, 25 bp, Probe Sequence
ttccattaaagaaacacccgtgcaa

SEQ ID NO: 16346 - DNA, 25 bp, Probe Sequence
gtcctcccttctgttctctgctttc

SEQ ID NO: 16347 - DNA, 25 bp, Probe Sequence
gtcggtggctgtctttccattaaag

SEQ ID NO: 16348 - DNA, 25 bp, Probe Sequence
agtcctcccttctgttctctgcttt

SEQ ID NO: 16349 - DNA, 25 bp, Probe Sequence
ccattaaagaaacacccgtgcaaaa

SEQ ID NO: 16350 - DNA, 25 bp, Probe Sequence
ctgtctttccattaaagaaacaccc

SEQ ID NO: 16351 - DNA, 25 bp, Probe Sequence
tttccattaaagaaacacccgtgca

SEQ ID NO: 16352 - DNA, 25 bp, Probe Sequence
gctgtctttccattaaagaaacacc

SEQ ID NO: 16353 - DNA, 25 bp, Probe Sequence
ggctgtctttccattaaagaaacac

SEQ ID NO: 16354 - DNA, 25 bp, Probe Sequence
gtggctgtctttccattaaagaaac

SEQ ID NO: 16355 - DNA, 25 bp, Probe Sequence
tggctgtctttccattaaagaaaca

SEQ ID NO: 16356 - DNA, 25 bp, Probe Sequence
tctttccattaaagaaacacccgtg

SEQ ID NO: 16357 - DNA, 25 bp, Probe Sequence
gtctttccattaaagaaacacccgt

SEQ ID NO: 16358 - DNA, 25 bp, Probe Sequence
tgtctttccattaaagaaacacccg

SEQ ID NO: 16359 - DNA, 25 bp, Probe Sequence
ggtggctgtctttccattaaagaaa

SEQ ID NO: 16360 - DNA, 25 bp, Probe Sequence
taggtctccccttatccttctggtc

SEQ ID NO: 16361 - DNA, 25 bp, Probe Sequence
ggattatgggaactacaactcaaga

SEQ ID NO: 16362 - DNA, 25 bp, Probe Sequence
tttgtatatcatccttggctccttt

SEQ ID NO: 16363 - DNA, 25 bp, Probe Sequence
tagtttgtatatcatccttggctcc

SEQ ID NO: 16364 - DNA, 25 bp, Probe Sequence
gctgttgtgctcattagtttgtata

SEQ ID NO: 16365 - DNA, 25 bp, Probe Sequence
tgtatatcatccttggctcctttag

SEQ ID NO: 16366 - DNA, 25 bp, Probe Sequence
gtttgtatatcatccttggctcctt

SEQ ID NO: 16367 - DNA, 25 bp, Probe Sequence
ttgtatatcatccttggctccttta

SEQ ID NO: 16368 - DNA, 25 bp, Probe Sequence
gggattatgggaactacaactcaag

SEQ ID NO: 16369 - DNA, 25 bp, Probe Sequence
ctgaacctatttactttctgaccct

SEQ ID NO: 16370 - DNA, 25 bp, Probe Sequence
tgaacctatttactttctgaccctt

SEQ ID NO: 16371 - DNA, 25 bp, Probe Sequence
agtttgtatatcatccttggctcct

SEQ ID NO: 16372 - DNA, 25 bp, Probe Sequence
attatgggaactacaactcaagatg

SEQ ID NO: 16373 - DNA, 25 bp, Probe Sequence
gagactgactgatgcactagtatag

SEQ ID NO: 16374 - DNA, 25 bp, Probe Sequence
tgagactgactgatgcactagtata

SEQ ID NO: 16375 - DNA, 25 bp, Probe Sequence
tttagcactataagggcaggattga

SEQ ID NO: 16376 - DNA, 25 bp, Probe Sequence
ctttagcactataagggcaggattg

SEQ ID NO: 16377 - DNA, 25 bp, Probe Sequence
gaacctatttactttctgacccttt

SEQ ID NO: 16378 - DNA, 25 bp, Probe Sequence
gctgaacctatttactttctgaccc

SEQ ID NO: 16379 - DNA, 25 bp, Probe Sequence
ttatgggaactacaactcaagatga

SEQ ID NO: 16380 - DNA, 25 bp, Probe Sequence
ttagtttgtatatcatccttggctc

SEQ ID NO: 16381 - DNA, 25 bp, Probe Sequence
gattatgggaactacaactcaagat

SEQ ID NO: 16382 - DNA, 25 bp, Probe Sequence
ttagcactataagggcaggattgag

SEQ ID NO: 16383 - DNA, 25 bp, Probe Sequence
agactgactgatgcactagtatagc

SEQ ID NO: 16384 - DNA, 25 bp, Probe Sequence
atttactttctgaccctttatggaa

SEQ ID NO: 16385 - DNA, 25 bp, Probe Sequence
tatcctaactactaccgcattccta

SEQ ID NO: 16386 - DNA, 25 bp, Probe Sequence
cttctaatagccatcctcttcacaa

SEQ ID NO: 16387 - DNA, 25 bp, Probe Sequence
gcatccataatccttctaatagcca

SEQ ID NO: 16388 - DNA, 25 bp, Probe Sequence
attatcctaactactaccgcattcc

SEQ ID NO: 16389 - DNA, 25 bp, Probe Sequence
ccatcctcttcacaatatactctcc

SEQ ID NO: 16390 - DNA, 25 bp, Probe Sequence
aatccttctaatagccatcctcttc

SEQ ID NO: 16391 - DNA, 25 bp, Probe Sequence
catcctcttcacaatatactctccg

SEQ ID NO: 16392 - DNA, 25 bp, Probe Sequence
ttctaatagccatcctcttcacaat

SEQ ID NO: 16393 - DNA, 25 bp, Probe Sequence
atccttctaatagccatcctcttca

SEQ ID NO: 16394 - DNA, 25 bp, Probe Sequence
ttatcctaactactaccgcattcct

SEQ ID NO: 16395 - DNA, 25 bp, Probe Sequence
gccatcctcttcacaatatactctc

SEQ ID NO: 16396 - DNA, 25 bp, Probe Sequence
ccataatccttctaatagccatcct

SEQ ID NO: 16397 - DNA, 25 bp, Probe Sequence
tccataatccttctaatagccatcc

SEQ ID NO: 16398 - DNA, 25 bp, Probe Sequence
tagccatcctcttcacaatatactc

SEQ ID NO: 16399 - DNA, 25 bp, Probe Sequence
agccatcctcttcacaatatactct

SEQ ID NO: 16400 - DNA, 25 bp, Probe Sequence
accatactaccatcaatactcatca

SEQ ID NO: 16401 - DNA, 25 bp, Probe Sequence
tctaatagccatcctcttcacaata

SEQ ID NO: 16402 - DNA, 25 bp, Probe Sequence
cgcatccataatccttctaatagcc

SEQ ID NO: 16403 - DNA, 25 bp, Probe Sequence
ccgcatccataatccttctaatagc

SEQ ID NO: 16404 - DNA, 25 bp, Probe Sequence
atagccatcctcttcacaatatact

SEQ ID NO: 16405 - DNA, 25 bp, Probe Sequence
tccttctaatagccatcctcttcac

SEQ ID NO: 16406 - DNA, 25 bp, Probe Sequence
taatccttctaatagccatcctctt

SEQ ID NO: 16407 - DNA, 25 bp, Probe Sequence
gaaccataaccatactaccatcaat

SEQ ID NO: 16408 - DNA, 25 bp, Probe Sequence
tgaaccataaccatactaccatcaa

SEQ ID NO: 16409 - DNA, 25 bp, Probe Sequence
agtggattcaagagatattcagcaa

SEQ ID NO: 16410 - DNA, 25 bp, Probe Sequence
aagtggattcaagagatattcagca

SEQ ID NO: 16411 - DNA, 25 bp, Probe Sequence
gtggattcaagagatattcagcaat

SEQ ID NO: 16412 - DNA, 25 bp, Probe Sequence
gcaatagaatggatacaacttggtc

SEQ ID NO: 16413 - DNA, 25 bp, Probe Sequence
agcaatagaatggatacaacttggt

SEQ ID NO: 16414 - DNA, 25 bp, Probe Sequence
cagcaatagaatggatacaacttgg

SEQ ID NO: 16415 - DNA, 25 bp, Probe Sequence
tatagatgaacagttgctctcagtt

SEQ ID NO: 16416 - DNA, 25 bp, Probe Sequence
ttatagatgaacagttgctctcagt

SEQ ID NO: 16417 - DNA, 25 bp, Probe Sequence
tcagcaatagaatggatacaacttg

SEQ ID NO: 16418 - DNA, 25 bp, Probe Sequence
caatagaatggatacaacttggtca

SEQ ID NO: 16419 - DNA, 25 bp, Probe Sequence
ttcagcaatagaatggatacaactt

SEQ ID NO: 16420 - DNA, 25 bp, Probe Sequence
aatagaatggatacaacttggtcat

SEQ ID NO: 16421 - DNA, 25 bp, Probe Sequence
acaagttcaggatgcttcttaggtt

SEQ ID NO: 16422 - DNA, 25 bp, Probe Sequence
aacaagttcaggatgcttcttaggt

SEQ ID NO: 16423 - DNA, 25 bp, Probe Sequence
tggattcaagagatattcagcaata

SEQ ID NO: 16424 - DNA, 25 bp, Probe Sequence
gaacaagttcaggatgcttcttagg

SEQ ID NO: 16425 - DNA, 25 bp, Probe Sequence
ggatgcttcttaggtttctgtctta

SEQ ID NO: 16426 - DNA, 25 bp, Probe Sequence
ggattcaagagatattcagcaatag

SEQ ID NO: 16427 - DNA, 25 bp, Probe Sequence
tgatagggaacactaactttgaacc

SEQ ID NO: 16428 - DNA, 25 bp, Probe Sequence
aaatgaactgttatctccctccaaa

SEQ ID NO: 16429 - DNA, 25 bp, Probe Sequence
taaatgaactgttatctccctccaa

SEQ ID NO: 16430 - DNA, 25 bp, Probe Sequence
ttaaatgaactgttatctccctcca

SEQ ID NO: 16431 - DNA, 25 bp, Probe Sequence
aaagtggattcaagagatattcagc

SEQ ID NO: 16432 - DNA, 25 bp, Probe Sequence
atgatagggaacactaactttgaac

SEQ ID NO: 16433 - DNA, 25 bp, Probe Sequence
acggataacaaatttcacacaggaa

SEQ ID NO: 16434 - DNA, 25 bp, Probe Sequence
gacggataacaaatttcacacagga

SEQ ID NO: 16435 - DNA, 25 bp, Probe Sequence
ggacggataacaaatttcacacagg

SEQ ID NO: 16436 - DNA, 25 bp, Probe Sequence
gggacggataacaaatttcacacag

SEQ ID NO: 16437 - DNA, 25 bp, Probe Sequence
aaatttcacacaggaaacagctatg

SEQ ID NO: 16438 - DNA, 25 bp, Probe Sequence
caaatttcacacaggaaacagctat

SEQ ID NO: 16439 - DNA, 25 bp, Probe Sequence
cggataacaaatttcacacaggaaa

SEQ ID NO: 16440 - DNA, 25 bp, Probe Sequence
taacaaatttcacacaggaaacagc

SEQ ID NO: 16441 - DNA, 25 bp, Probe Sequence
ggataacaaatttcacacaggaaac

SEQ ID NO: 16442 - DNA, 25 bp, Probe Sequence
acaaatttcacacaggaaacagcta

SEQ ID NO: 16443 - DNA, 25 bp, Probe Sequence
ataacaaatttcacacaggaaacag

SEQ ID NO: 16444 - DNA, 25 bp, Probe Sequence
gataacaaatttcacacaggaaaca

SEQ ID NO: 16445 - DNA, 25 bp, Probe Sequence
aacaaatttcacacaggaaacagct

SEQ ID NO: 16446 - DNA, 25 bp, Probe Sequence
ctttgccaaaatgtcgtaacaactc

SEQ ID NO: 16447 - DNA, 25 bp, Probe Sequence
gactttgccaaaatgtcgtaacaac

SEQ ID NO: 16448 - DNA, 25 bp, Probe Sequence
actttgccaaaatgtcgtaacaact

SEQ ID NO: 16449 - DNA, 25 bp, Probe Sequence
cgggacggataacaaatttcacaca

SEQ ID NO: 16450 - DNA, 25 bp, Probe Sequence
tttgccaaaatgtcgtaacaactcc

SEQ ID NO: 16451 - DNA, 25 bp, Probe Sequence
ggactttgccaaaatgtcgtaacaa

SEQ ID NO: 16452 - DNA, 25 bp, Probe Sequence
ttatgggactctcctactggcagta

SEQ ID NO: 16453 - DNA, 25 bp, Probe Sequence
ttttgaccctcccatagaagacacc

SEQ ID NO: 16454 - DNA, 25 bp, Probe Sequence
ctcgtttagtgaacccgtccagatc

SEQ ID NO: 16455 - DNA, 25 bp, Probe Sequence
gggttggttttgtgtttgcttttcc

SEQ ID NO: 16456 - DNA, 25 bp, Probe Sequence
ggttggttttgtgtttgcttttccg

SEQ ID NO: 16457 - DNA, 25 bp, Probe Sequence
aacttagtattatacccacacccac

SEQ ID NO: 16458 - DNA, 25 bp, Probe Sequence
caacttagtattatacccacaccca

SEQ ID NO: 16459 - DNA, 25 bp, Probe Sequence
tcaacttagtattatacccacaccc

SEQ ID NO: 16460 - DNA, 25 bp, Probe Sequence
acttagtattatacccacacccacc

SEQ ID NO: 16461 - DNA, 25 bp, Probe Sequence
ctcaacttagtattatacccacacc

SEQ ID NO: 16462 - DNA, 25 bp, Probe Sequence
cttagtattatacccacacccaccc

SEQ ID NO: 16463 - DNA, 25 bp, Probe Sequence
tagtattatacccacacccacccaa

SEQ ID NO: 16464 - DNA, 25 bp, Probe Sequence
ttagtattatacccacacccaccca

SEQ ID NO: 16465 - DNA, 25 bp, Probe Sequence
tctcaacttagtattatacccacac

SEQ ID NO: 16466 - DNA, 25 bp, Probe Sequence
tattatacccacacccacccaagaa

SEQ ID NO: 16467 - DNA, 25 bp, Probe Sequence
agtacattcaagtgtatcatattgc

SEQ ID NO: 16468 - DNA, 25 bp, Probe Sequence
gcagtacattcaagtgtatcatatt

SEQ ID NO: 16469 - DNA, 25 bp, Probe Sequence
ttgcagtacattcaagtgtatcata

SEQ ID NO: 16470 - DNA, 25 bp, Probe Sequence
tgcagtacattcaagtgtatcatat

SEQ ID NO: 16471 - DNA, 25 bp, Probe Sequence
atctcaacttagtattatacccaca

SEQ ID NO: 16472 - DNA, 25 bp, Probe Sequence
catctcaacttagtattatacccac

SEQ ID NO: 16473 - DNA, 25 bp, Probe Sequence
gtattatacccacacccacccaaga

SEQ ID NO: 16474 - DNA, 25 bp, Probe Sequence
agtattatacccacacccacccaag

SEQ ID NO: 16475 - DNA, 25 bp, Probe Sequence
tcatctcaacttagtattataccca

SEQ ID NO: 16476 - DNA, 25 bp, Probe Sequence
cttgcagtacattcaagtgtatcat

SEQ ID NO: 16477 - DNA, 25 bp, Probe Sequence
ccttgcagtacattcaagtgtatca

SEQ ID NO: 16478 - DNA, 25 bp, Probe Sequence
accttgcagtacattcaagtgtatc

SEQ ID NO: 16479 - DNA, 25 bp, Probe Sequence
caccttgcagtacattcaagtgtat

SEQ ID NO: 16480 - DNA, 25 bp, Probe Sequence
attatacccacacccacccaagaac

SEQ ID NO: 16481 - DNA, 25 bp, Probe Sequence
tggaactctgtattgtatcacttgt

SEQ ID NO: 16482 - DNA, 25 bp, Probe Sequence
atggaactctgtattgtatcacttg

SEQ ID NO: 16483 - DNA, 25 bp, Probe Sequence
ggaactctgtattgtatcacttgta

SEQ ID NO: 16484 - DNA, 25 bp, Probe Sequence
aatggaactctgtattgtatcactt

SEQ ID NO: 16485 - DNA, 25 bp, Probe Sequence
ttctcttaatggaactctgtattgt

SEQ ID NO: 16486 - DNA, 25 bp, Probe Sequence
taatggaactctgtattgtatcact

SEQ ID NO: 16487 - DNA, 25 bp, Probe Sequence
cagccttgattctcttgtttctaat

SEQ ID NO: 16488 - DNA, 25 bp, Probe Sequence
ccagccttgattctcttgtttctaa

SEQ ID NO: 16489 - DNA, 25 bp, Probe Sequence
gtgagtctgctatgggattagaaat

SEQ ID NO: 16490 - DNA, 25 bp, Probe Sequence
aaacttgcttaggactgaatatgag

SEQ ID NO: 16491 - DNA, 25 bp, Probe Sequence
tgagtctgctatgggattagaaatt

SEQ ID NO: 16492 - DNA, 25 bp, Probe Sequence
tctcttaatggaactctgtattgta

SEQ ID NO: 16493 - DNA, 25 bp, Probe Sequence
aatgtgtgagtctgctatgggatta

SEQ ID NO: 16494 - DNA, 25 bp, Probe Sequence
tgtgagtctgctatgggattagaaa

SEQ ID NO: 16495 - DNA, 25 bp, Probe Sequence
aacttgcttaggactgaatatgagc

SEQ ID NO: 16496 - DNA, 25 bp, Probe Sequence
ttaatggaactctgtattgtatcac

SEQ ID NO: 16497 - DNA, 25 bp, Probe Sequence
atgtgtgagtctgctatgggattag

SEQ ID NO: 16498 - DNA, 25 bp, Probe Sequence
tttacaaatgtgtgagtctgctatg

SEQ ID NO: 16499 - DNA, 25 bp, Probe Sequence
gaactctgtattgtatcacttgtaa

SEQ ID NO: 16500 - DNA, 25 bp, Probe Sequence
agccttgattctcttgtttctaata

SEQ ID NO: 16501 - DNA, 25 bp, Probe Sequence
gtgtgagtctgctatgggattagaa

SEQ ID NO: 16502 - DNA, 25 bp, Probe Sequence
cttaggactgaatatgagcggttgc

SEQ ID NO: 16503 - DNA, 25 bp, Probe Sequence
ttacaaatgtgtgagtctgctatgg

SEQ ID NO: 16504 - DNA, 25 bp, Probe Sequence
aaatgtgtgagtctgctatgggatt

SEQ ID NO: 16505 - DNA, 25 bp, Probe Sequence
gaaacacagaatcagacaagacttc

SEQ ID NO: 16506 - DNA, 25 bp, Probe Sequence
ggaaacacagaatcagacaagactt

SEQ ID NO: 16507 - DNA, 25 bp, Probe Sequence
gggaaacacagaatcagacaagact

SEQ ID NO: 16508 - DNA, 25 bp, Probe Sequence
gacttctgcatccttcctttgttag

SEQ ID NO: 16509 - DNA, 25 bp, Probe Sequence
aaacacagaatcagacaagacttct

SEQ ID NO: 16510 - DNA, 25 bp, Probe Sequence
agacttctgcatccttcctttgtta

SEQ ID NO: 16511 - DNA, 25 bp, Probe Sequence
cgtttctccctctgttttattgtct

SEQ ID NO: 16512 - DNA, 25 bp, Probe Sequence
cttcctttgttaggtccctgacttc

SEQ ID NO: 16513 - DNA, 25 bp, Probe Sequence
gtttctccctctgttttattgtcta

SEQ ID NO: 16514 - DNA, 25 bp, Probe Sequence
ctccgtttctccctctgttttattg

SEQ ID NO: 16515 - DNA, 25 bp, Probe Sequence
agacaagacttctgcatccttcctt

SEQ ID NO: 16516 - DNA, 25 bp, Probe Sequence
ccgtttctccctctgttttattgtc

SEQ ID NO: 16517 - DNA, 25 bp, Probe Sequence
aagacttctgcatccttcctttgtt

SEQ ID NO: 16518 - DNA, 25 bp, Probe Sequence
tccgtttctccctctgttttattgt

SEQ ID NO: 16519 - DNA, 25 bp, Probe Sequence
tttctccctctgttttattgtctat

SEQ ID NO: 16520 - DNA, 25 bp, Probe Sequence
gacaagacttctgcatccttccttt

SEQ ID NO: 16521 - DNA, 25 bp, Probe Sequence
cctccgtttctccctctgttttatt

SEQ ID NO: 16522 - DNA, 25 bp, Probe Sequence
atccttcctttgttaggtccctgac

SEQ ID NO: 16523 - DNA, 25 bp, Probe Sequence
catccttcctttgttaggtccctga

SEQ ID NO: 16524 - DNA, 25 bp, Probe Sequence
ttctgcatccttcctttgttaggtc

SEQ ID NO: 16525 - DNA, 25 bp, Probe Sequence
cttctgcatccttcctttgttaggt

SEQ ID NO: 16526 - DNA, 25 bp, Probe Sequence
acttctgcatccttcctttgttagg

SEQ ID NO: 16527 - DNA, 25 bp, Probe Sequence
caagacttctgcatccttcctttgt

SEQ ID NO: 16528 - DNA, 25 bp, Probe Sequence
acaagacttctgcatccttcctttg

SEQ ID NO: 16529 - DNA, 25 bp, Probe Sequence
tagccgttaactcaatcctctgatc

SEQ ID NO: 16530 - DNA, 25 bp, Probe Sequence
ctagccgttaactcaatcctctgat

SEQ ID NO: 16531 - DNA, 25 bp, Probe Sequence
ctctagcctagccgttaactcaatc

SEQ ID NO: 16532 - DNA, 25 bp, Probe Sequence
tcccctgaactctacacaacatatt

SEQ ID NO: 16533 - DNA, 25 bp, Probe Sequence
atatgaagtcaccctagccatcatt

SEQ ID NO: 16534 - DNA, 25 bp, Probe Sequence
ctcccctgaactctacacaacatat

SEQ ID NO: 16535 - DNA, 25 bp, Probe Sequence
tatgaagtcaccctagccatcattc

SEQ ID NO: 16536 - DNA, 25 bp, Probe Sequence
tctcccctgaactctacacaacata

SEQ ID NO: 16537 - DNA, 25 bp, Probe Sequence
tagcctagccgttaactcaatcctc

SEQ ID NO: 16538 - DNA, 25 bp, Probe Sequence
ctagcctagccgttaactcaatcct

SEQ ID NO: 16539 - DNA, 25 bp, Probe Sequence
tctagcctagccgttaactcaatcc

SEQ ID NO: 16540 - DNA, 25 bp, Probe Sequence
cctctagcctagccgttaactcaat

SEQ ID NO: 16541 - DNA, 25 bp, Probe Sequence
cctagccgttaactcaatcctctga

SEQ ID NO: 16542 - DNA, 25 bp, Probe Sequence
agccgttaactcaatcctctgatca

SEQ ID NO: 16543 - DNA, 25 bp, Probe Sequence
ctctcccctgaactctacacaacat

SEQ ID NO: 16544 - DNA, 25 bp, Probe Sequence
catatgaagtcaccctagccatcat

SEQ ID NO: 16545 - DNA, 25 bp, Probe Sequence
acctctagcctagccgttaactcaa

SEQ ID NO: 16546 - DNA, 25 bp, Probe Sequence
gcctagccgttaactcaatcctctg

SEQ ID NO: 16547 - DNA, 25 bp, Probe Sequence
cactctcccctgaactctacacaac

SEQ ID NO: 16548 - DNA, 25 bp, Probe Sequence
agcctagccgttaactcaatcctct

SEQ ID NO: 16549 - DNA, 25 bp, Probe Sequence
actctcccctgaactctacacaaca

SEQ ID NO: 16550 - DNA, 25 bp, Probe Sequence
ttctatgacatcatctggttcagtc

SEQ ID NO: 16551 - DNA, 25 bp, Probe Sequence
agttctatgacatcatctggttcag

SEQ ID NO: 16552 - DNA, 25 bp, Probe Sequence
gttctatgacatcatctggttcagt

SEQ ID NO: 16553 - DNA, 25 bp, Probe Sequence
cagttctatgacatcatctggttca

SEQ ID NO: 16554 - DNA, 25 bp, Probe Sequence
tctatgacatcatctggttcagtcc

SEQ ID NO: 16555 - DNA, 25 bp, Probe Sequence
cttcaggttcttaaagtctccatct

SEQ ID NO: 16556 - DNA, 25 bp, Probe Sequence
tcttcaggttcttaaagtctccatc

SEQ ID NO: 16557 - DNA, 25 bp, Probe Sequence
aggttcttcaggttcttaaagtctc

SEQ ID NO: 16558 - DNA, 25 bp, Probe Sequence
aaggttcttcaggttcttaaagtct

SEQ ID NO: 16559 - DNA, 25 bp, Probe Sequence
ttcaggttcttaaagtctccatctt

SEQ ID NO: 16560 - DNA, 25 bp, Probe Sequence
ttcttcaggttcttaaagtctccat

SEQ ID NO: 16561 - DNA, 25 bp, Probe Sequence
gttcttcaggttcttaaagtctcca

SEQ ID NO: 16562 - DNA, 25 bp, Probe Sequence
ggttcttcaggttcttaaagtctcc

SEQ ID NO: 16563 - DNA, 25 bp, Probe Sequence
tgtaaatgctccaggactaactttg

SEQ ID NO: 16564 - DNA, 25 bp, Probe Sequence
gtgtaaatgctccaggactaacttt

SEQ ID NO: 16565 - DNA, 25 bp, Probe Sequence
gacaagaatcaatgcgtgaaggttc

SEQ ID NO: 16566 - DNA, 25 bp, Probe Sequence
gctccaggactaactttgctaattt

SEQ ID NO: 16567 - DNA, 25 bp, Probe Sequence
ctatgacatcatctggttcagtcca

SEQ ID NO: 16568 - DNA, 25 bp, Probe Sequence
gattcttggacagataaagtcgttc

SEQ ID NO: 16569 - DNA, 25 bp, Probe Sequence
tgattcttggacagataaagtcgtt

SEQ ID NO: 16570 - DNA, 25 bp, Probe Sequence
tatgacatcatctggttcagtccac

SEQ ID NO: 16571 - DNA, 25 bp, Probe Sequence
aaaggtgtaaatgctccaggactaa

SEQ ID NO: 16572 - DNA, 25 bp, Probe Sequence
ctgattcttggacagataaagtcgt

SEQ ID NO: 16573 - DNA, 25 bp, Probe Sequence
atgctccaggactaactttgctaat

SEQ ID NO: 16574 - DNA, 25 bp, Probe Sequence
cctgttgagcttgactctagtctgg

SEQ ID NO: 16575 - DNA, 25 bp, Probe Sequence
ctgttgagcttgactctagtctggc

SEQ ID NO: 16576 - DNA, 25 bp, Probe Sequence
gttgagcttgactctagtctggcac

SEQ ID NO: 16577 - DNA, 25 bp, Probe Sequence
ccctgttgagcttgactctagtctg

SEQ ID NO: 16578 - DNA, 25 bp, Probe Sequence
gaccctgttgagcttgactctagtc

SEQ ID NO: 16579 - DNA, 25 bp, Probe Sequence
accctgttgagcttgactctagtct

SEQ ID NO: 16580 - DNA, 25 bp, Probe Sequence
ttctctgatgtgaatcttctgatgc

SEQ ID NO: 16581 - DNA, 25 bp, Probe Sequence
gatgtgaatcttctgatgccgaatg

SEQ ID NO: 16582 - DNA, 25 bp, Probe Sequence
tctctgatgtgaatcttctgatgcc

SEQ ID NO: 16583 - DNA, 25 bp, Probe Sequence
atgtgaatcttctgatgccgaatga

SEQ ID NO: 16584 - DNA, 25 bp, Probe Sequence
tgatgtgaatcttctgatgccgaat

SEQ ID NO: 16585 - DNA, 25 bp, Probe Sequence
ctcctttctctgatgtgaatcttct

SEQ ID NO: 16586 - DNA, 25 bp, Probe Sequence
cctttctctgatgtgaatcttctga

SEQ ID NO: 16587 - DNA, 25 bp, Probe Sequence
tcctttctctgatgtgaatcttctg

SEQ ID NO: 16588 - DNA, 25 bp, Probe Sequence
tttctctgatgtgaatcttctgatg

SEQ ID NO: 16589 - DNA, 25 bp, Probe Sequence
cttagggatggaaagagagagagag

SEQ ID NO: 16590 - DNA, 25 bp, Probe Sequence
agaatgtaacttgtctccagaaagc

SEQ ID NO: 16591 - DNA, 25 bp, Probe Sequence
tgtgaatcttctgatgccgaatgag

SEQ ID NO: 16592 - DNA, 25 bp, Probe Sequence
ctgatgtgaatcttctgatgccgaa

SEQ ID NO: 16593 - DNA, 25 bp, Probe Sequence
ctttctctgatgtgaatcttctgat

SEQ ID NO: 16594 - DNA, 25 bp, Probe Sequence
gctcctttctctgatgtgaatcttc

SEQ ID NO: 16595 - DNA, 25 bp, Probe Sequence
atgctcctttctctgatgtgaatct

SEQ ID NO: 16596 - DNA, 25 bp, Probe Sequence
tgctcctttctctgatgtgaatctt

SEQ ID NO: 16597 - DNA, 25 bp, Probe Sequence
cttatctctggtgtgtgctgtgaac

SEQ ID NO: 16598 - DNA, 25 bp, Probe Sequence
aacgctgataaactctacagtaaga

SEQ ID NO: 16599 - DNA, 25 bp, Probe Sequence
ttagggatggaaagagagagagagg

SEQ ID NO: 16600 - DNA, 25 bp, Probe Sequence
ctctgatgtgaatcttctgatgccg

SEQ ID NO: 16601 - DNA, 25 bp, Probe Sequence
aaacgctgataaactctacagtaag

SEQ ID NO: 16602 - DNA, 25 bp, Probe Sequence
ccttagggatggaaagagagagaga

SEQ ID NO: 16603 - DNA, 25 bp, Probe Sequence
tggttaaagaatttcccacattcac

SEQ ID NO: 16604 - DNA, 25 bp, Probe Sequence
tcattacattcaccacattatcaga

SEQ ID NO: 16605 - DNA, 25 bp, Probe Sequence
gaaggaataacctgagactgtgtaa

SEQ ID NO: 16606 - DNA, 25 bp, Probe Sequence
atagaaggaataacctgagactgtg

SEQ ID NO: 16607 - DNA, 25 bp, Probe Sequence
aggaataacctgagactgtgtaatt

SEQ ID NO: 16608 - DNA, 25 bp, Probe Sequence
aaggaataacctgagactgtgtaat

SEQ ID NO: 16609 - DNA, 25 bp, Probe Sequence
agaaggaataacctgagactgtgta

SEQ ID NO: 16610 - DNA, 25 bp, Probe Sequence
tagaaggaataacctgagactgtgt

SEQ ID NO: 16611 - DNA, 25 bp, Probe Sequence
aatcaatcattacattcaccacatt

SEQ ID NO: 16612 - DNA, 25 bp, Probe Sequence
cattacattcaccacattatcagaa

SEQ ID NO: 16613 - DNA, 25 bp, Probe Sequence
atcattacattcaccacattatcag

SEQ ID NO: 16614 - DNA, 25 bp, Probe Sequence
tatagaaggaataacctgagactgt

SEQ ID NO: 16615 - DNA, 25 bp, Probe Sequence
ttgcattgctatagaaggaataacc

SEQ ID NO: 16616 - DNA, 25 bp, Probe Sequence
ggaataacctgagactgtgtaattt

SEQ ID NO: 16617 - DNA, 25 bp, Probe Sequence
aatcattacattcaccacattatca

SEQ ID NO: 16618 - DNA, 25 bp, Probe Sequence
tcaatcattacattcaccacattat

SEQ ID NO: 16619 - DNA, 25 bp, Probe Sequence
atcaatcattacattcaccacatta

SEQ ID NO: 16620 - DNA, 25 bp, Probe Sequence
gcattgctatagaaggaataacctg

SEQ ID NO: 16621 - DNA, 25 bp, Probe Sequence
tgctatagaaggaataacctgagac

SEQ ID NO: 16622 - DNA, 25 bp, Probe Sequence
caatcattacattcaccacattatc

SEQ ID NO: 16623 - DNA, 25 bp, Probe Sequence
tgcattgctatagaaggaataacct

SEQ ID NO: 16624 - DNA, 25 bp, Probe Sequence
gctatagaaggaataacctgagact

SEQ ID NO: 16625 - DNA, 25 bp, Probe Sequence
ttgctatagaaggaataacctgaga

SEQ ID NO: 16626 - DNA, 25 bp, Probe Sequence
ggagcaagtatgtcacacttcataa

SEQ ID NO: 16627 - DNA, 25 bp, Probe Sequence
aaatcaatcattacattcaccacat

SEQ ID NO: 16628 - DNA, 25 bp, Probe Sequence
gaactatccttccttgcctcttcta

SEQ ID NO: 16629 - DNA, 25 bp, Probe Sequence
cttattctctgtgtcttggatctcc

SEQ ID NO: 16630 - DNA, 25 bp, Probe Sequence
ccttattctctgtgtcttggatctc

SEQ ID NO: 16631 - DNA, 25 bp, Probe Sequence
ccataccaaccttgagacatagatc

SEQ ID NO: 16632 - DNA, 25 bp, Probe Sequence
aataagatcacattcacaggcgtta

SEQ ID NO: 16633 - DNA, 25 bp, Probe Sequence
aactatccttccttgcctcttctag

SEQ ID NO: 16634 - DNA, 25 bp, Probe Sequence
accttattctctgtgtcttggatct

SEQ ID NO: 16635 - DNA, 25 bp, Probe Sequence
ataagatcacattcacaggcgttag

SEQ ID NO: 16636 - DNA, 25 bp, Probe Sequence
gaccttattctctgtgtcttggatc

SEQ ID NO: 16637 - DNA, 25 bp, Probe Sequence
gtattgaatagtgctttgtgtctgg

SEQ ID NO: 16638 - DNA, 25 bp, Probe Sequence
tgtattgaatagtgctttgtgtctg

SEQ ID NO: 16639 - DNA, 25 bp, Probe Sequence
tttaattcccataccaaccttgaga

SEQ ID NO: 16640 - DNA, 25 bp, Probe Sequence
ttaattcccataccaaccttgagac

SEQ ID NO: 16641 - DNA, 25 bp, Probe Sequence
gcatttaattcccataccaaccttg

SEQ ID NO: 16642 - DNA, 25 bp, Probe Sequence
catttaattcccataccaaccttga

SEQ ID NO: 16643 - DNA, 25 bp, Probe Sequence
taagatcacattcacaggcgttagg

SEQ ID NO: 16644 - DNA, 25 bp, Probe Sequence
atgtattgaatagtgctttgtgtct

SEQ ID NO: 16645 - DNA, 25 bp, Probe Sequence
atttaattcccataccaaccttgag

SEQ ID NO: 16646 - DNA, 25 bp, Probe Sequence
attcccataccaaccttgagacata

SEQ ID NO: 16647 - DNA, 25 bp, Probe Sequence
atctccctcttcttcctcttacaag

SEQ ID NO: 16648 - DNA, 25 bp, Probe Sequence
caatccagctctctccactatacag

SEQ ID NO: 16649 - DNA, 25 bp, Probe Sequence
atctgatttctccctcacttctatg

SEQ ID NO: 16650 - DNA, 25 bp, Probe Sequence
taattcccataccaaccttgagaca

SEQ ID NO: 16651 - DNA, 25 bp, Probe Sequence
ttaaataagatcacattcacaggcg

SEQ ID NO: 16652 - DNA, 25 bp, Probe Sequence
atccttagatgaatcgttggtagaa

SEQ ID NO: 16653 - DNA, 25 bp, Probe Sequence
gcattactattgtgaagaaggaaga

SEQ ID NO: 16654 - DNA, 25 bp, Probe Sequence
ttgtgaagaaggaagaacttgtaag

SEQ ID NO: 16655 - DNA, 25 bp, Probe Sequence
ctattgtgaagaaggaagaacttgt

SEQ ID NO: 16656 - DNA, 25 bp, Probe Sequence
actattgtgaagaaggaagaacttg

SEQ ID NO: 16657 - DNA, 25 bp, Probe Sequence
attgtgaagaaggaagaacttgtaa

SEQ ID NO: 16658 - DNA, 25 bp, Probe Sequence
gatccttagatgaatcgttggtaga

SEQ ID NO: 16659 - DNA, 25 bp, Probe Sequence
agatccttagatgaatcgttggtag

SEQ ID NO: 16660 - DNA, 25 bp, Probe Sequence
ctagatccttagatgaatcgttggt

SEQ ID NO: 16661 - DNA, 25 bp, Probe Sequence
cctagatccttagatgaatcgttgg

SEQ ID NO: 16662 - DNA, 25 bp, Probe Sequence
gcctagatccttagatgaatcgttg

SEQ ID NO: 16663 - DNA, 25 bp, Probe Sequence
ctctggagacaacatcaaggataca

SEQ ID NO: 16664 - DNA, 25 bp, Probe Sequence
tgtgaagaaggaagaacttgtaagt

SEQ ID NO: 16665 - DNA, 25 bp, Probe Sequence
tgaagaaggaagaacttgtaagtga

SEQ ID NO: 16666 - DNA, 25 bp, Probe Sequence
gtgaagaaggaagaacttgtaagtg

SEQ ID NO: 16667 - DNA, 25 bp, Probe Sequence
gaagaaggaagaacttgtaagtgac

SEQ ID NO: 16668 - DNA, 25 bp, Probe Sequence
tagatccttagatgaatcgttggta

SEQ ID NO: 16669 - DNA, 25 bp, Probe Sequence
gaaggcttctgtagtcttagtggta

SEQ ID NO: 16670 - DNA, 25 bp, Probe Sequence
aagaaggaagaacttgtaagtgaca

SEQ ID NO: 16671 - DNA, 25 bp, Probe Sequence
aaggcttctgtagtcttagtggtac

SEQ ID NO: 16672 - DNA, 25 bp, Probe Sequence
tattgtgaagaaggaagaacttgta

SEQ ID NO: 16673 - DNA, 25 bp, Probe Sequence
ttactattgtgaagaaggaagaact

SEQ ID NO: 16674 - DNA, 25 bp, Probe Sequence
tactattgtgaagaaggaagaactt

SEQ ID NO: 16675 - DNA, 25 bp, Probe Sequence
cgcctagatccttagatgaatcgtt

SEQ ID NO: 16676 - DNA, 25 bp, Probe Sequence
gcagtacatcaagtgtatcaatatg

SEQ ID NO: 16677 - DNA, 25 bp, Probe Sequence
gggcagtacatcaagtgtatcaata

SEQ ID NO: 16678 - DNA, 25 bp, Probe Sequence
cgtagtgaaaccccatctgtataaa

SEQ ID NO: 16679 - DNA, 25 bp, Probe Sequence
tcaagggtggagatttacggtaaac

SEQ ID NO: 16680 - DNA, 25 bp, Probe Sequence
gtcaagggtggagatttacggtaaa

SEQ ID NO: 16681 - DNA, 25 bp, Probe Sequence
gtagtgaaaccccatctgtataaaa

SEQ ID NO: 16682 - DNA, 25 bp, Probe Sequence
tgggcagtacatcaagtgtatcaat

SEQ ID NO: 16683 - DNA, 25 bp, Probe Sequence
ctgggcagtacatcaagtgtatcaa

SEQ ID NO: 16684 - DNA, 25 bp, Probe Sequence
cttgagcctaagagttcgagaccag

SEQ ID NO: 16685 - DNA, 25 bp, Probe Sequence
caagggtggagatttacggtaaacg

SEQ ID NO: 16686 - DNA, 25 bp, Probe Sequence
acgtagtgaaaccccatctgtataa

SEQ ID NO: 16687 - DNA, 25 bp, Probe Sequence
aacgtagtgaaaccccatctgtata

SEQ ID NO: 16688 - DNA, 25 bp, Probe Sequence
gaggatcgcttgagcctaagagttc

SEQ ID NO: 16689 - DNA, 25 bp, Probe Sequence
caacgtagtgaaaccccatctgtat

SEQ ID NO: 16690 - DNA, 25 bp, Probe Sequence
aagggtggagatttacggtaaacgg

SEQ ID NO: 16691 - DNA, 25 bp, Probe Sequence
ctcatgcctgttatctcagcacact

SEQ ID NO: 16692 - DNA, 25 bp, Probe Sequence
tcatgcctgttatctcagcacactg

SEQ ID NO: 16693 - DNA, 25 bp, Probe Sequence
gatcgcttgagcctaagagttcgag

SEQ ID NO: 16694 - DNA, 25 bp, Probe Sequence
cgtcaagggtggagatttacggtaa

SEQ ID NO: 16695 - DNA, 25 bp, Probe Sequence
catgcctgttatctcagcacactga

SEQ ID NO: 16696 - DNA, 25 bp, Probe Sequence
gcaacgtagtgaaaccccatctgta

SEQ ID NO: 16697 - DNA, 25 bp, Probe Sequence
ttcttgttcaaggatggtgatagtt

SEQ ID NO: 16698 - DNA, 25 bp, Probe Sequence
ttcccattctccctcttctataact

SEQ ID NO: 16699 - DNA, 25 bp, Probe Sequence
attctcagtttgttcatcttgtgtc

SEQ ID NO: 16700 - DNA, 25 bp, Probe Sequence
aagtctgttctgccatataaagtga

SEQ ID NO: 16701 - DNA, 25 bp, Probe Sequence
tctcctcttctgcttccctataata

SEQ ID NO: 16702 - DNA, 25 bp, Probe Sequence
gctgcttccatatctttcatcttag

SEQ ID NO: 16703 - DNA, 25 bp, Probe Sequence
ttctcctcttctgcttccctataat

SEQ ID NO: 16704 - DNA, 25 bp, Probe Sequence
ttctcagtttgttcatcttgtgtct

SEQ ID NO: 16705 - DNA, 25 bp, Probe Sequence
gattctcagtttgttcatcttgtgt

SEQ ID NO: 16706 - DNA, 25 bp, Probe Sequence
attcccattctccctcttctataac

SEQ ID NO: 16707 - DNA, 25 bp, Probe Sequence
cattcccattctccctcttctataa

SEQ ID NO: 16708 - DNA, 25 bp, Probe Sequence
tcccattctccctcttctataactg

SEQ ID NO: 16709 - DNA, 25 bp, Probe Sequence
ccattcccattctccctcttctata

SEQ ID NO: 16710 - DNA, 25 bp, Probe Sequence
ttgttcatcttgtgtctgtggtctc

SEQ ID NO: 16711 - DNA, 25 bp, Probe Sequence
aaagtctgttctgccatataaagtg

SEQ ID NO: 16712 - DNA, 25 bp, Probe Sequence
caaagtctgttctgccatataaagt

SEQ ID NO: 16713 - DNA, 25 bp, Probe Sequence
ctcctcttctgcttccctataataa

SEQ ID NO: 16714 - DNA, 25 bp, Probe Sequence
cccattctccctcttctataactgt

SEQ ID NO: 16715 - DNA, 25 bp, Probe Sequence
cttctcctcttctgcttccctataa

SEQ ID NO: 16716 - DNA, 25 bp, Probe Sequence
gttcatcttgtgtctgtggtctctc

SEQ ID NO: 16717 - DNA, 25 bp, Probe Sequence
ccattctccctcttctataactgta

SEQ ID NO: 16718 - DNA, 25 bp, Probe Sequence
tcctcttctgcttccctataataag

SEQ ID NO: 16719 - DNA, 25 bp, Probe Sequence
ttcatcttgtgtctgtggtctctct

SEQ ID NO: 16720 - DNA, 25 bp, Probe Sequence
tgattctcagtttgttcatcttgtg

SEQ ID NO: 16721 - DNA, 25 bp, Probe Sequence
cttaaacccataggtagtcaggaac

SEQ ID NO: 16722 - DNA, 25 bp, Probe Sequence
ttaaacccataggtagtcaggaacc

SEQ ID NO: 16723 - DNA, 25 bp, Probe Sequence
gtcatcgctattaccatgtgatcgg

SEQ ID NO: 16724 - DNA, 25 bp, Probe Sequence
ggcagtaatctacgtattagtcatc

SEQ ID NO: 16725 - DNA, 25 bp, Probe Sequence
gcttaaacccataggtagtcaggaa

SEQ ID NO: 16726 - DNA, 25 bp, Probe Sequence
catcgctattaccatgtgatcggtt

SEQ ID NO: 16727 - DNA, 25 bp, Probe Sequence
ttgattgtatactgagtgtccaaac

SEQ ID NO: 16728 - DNA, 25 bp, Probe Sequence
tgattgtatactgagtgtccaaaca

SEQ ID NO: 16729 - DNA, 25 bp, Probe Sequence
agagtgaactacagcagtgatctgg

SEQ ID NO: 16730 - DNA, 25 bp, Probe Sequence
taaacccataggtagtcaggaacca

SEQ ID NO: 16731 - DNA, 25 bp, Probe Sequence
gactttcctactgggcagtaatcta

SEQ ID NO: 16732 - DNA, 25 bp, Probe Sequence
gtagtcaggaaccaggaaaagtttt

SEQ ID NO: 16733 - DNA, 25 bp, Probe Sequence
actttcctactgggcagtaatctac

SEQ ID NO: 16734 - DNA, 25 bp, Probe Sequence
atcgctattaccatgtgatcggttt

SEQ ID NO: 16735 - DNA, 25 bp, Probe Sequence
tcatcgctattaccatgtgatcggt

SEQ ID NO: 16736 - DNA, 25 bp, Probe Sequence
gcagagtgaactacagcagtgatct

SEQ ID NO: 16737 - DNA, 25 bp, Probe Sequence
gggcagtaatctacgtattagtcat

SEQ ID NO: 16738 - DNA, 25 bp, Probe Sequence
ctgggcagtaatctacgtattagtc

SEQ ID NO: 16739 - DNA, 25 bp, Probe Sequence
tgggcagtaatctacgtattagtca

SEQ ID NO: 16740 - DNA, 25 bp, Probe Sequence
ccataggtagtcaggaaccaggaaa

SEQ ID NO: 16741 - DNA, 25 bp, Probe Sequence
ggcttaaacccataggtagtcagga

SEQ ID NO: 16742 - DNA, 25 bp, Probe Sequence
actgggcagtaatctacgtattagt

SEQ ID NO: 16743 - DNA, 25 bp, Probe Sequence
cacaggaaacagctatgacccttag

SEQ ID NO: 16744 - DNA, 25 bp, Probe Sequence
ctttcctactgggcagtaatctacg

SEQ ID NO: 16745 - DNA, 25 bp, Probe Sequence
cttctgcttggttgctatgaatctc

SEQ ID NO: 16746 - DNA, 25 bp, Probe Sequence
ttggttgctatgaatctcctgttta

SEQ ID NO: 16747 - DNA, 25 bp, Probe Sequence
tggttgctatgaatctcctgtttaa

SEQ ID NO: 16748 - DNA, 25 bp, Probe Sequence
cttggttgctatgaatctcctgttt

SEQ ID NO: 16749 - DNA, 25 bp, Probe Sequence
attagtcatcgctattacccattgg

SEQ ID NO: 16750 - DNA, 25 bp, Probe Sequence
ttctgcttggttgctatgaatctcc

SEQ ID NO: 16751 - DNA, 25 bp, Probe Sequence
ccttctgcttggttgctatgaatct

SEQ ID NO: 16752 - DNA, 25 bp, Probe Sequence
aaatgagaagtagacgggttgtttc

SEQ ID NO: 16753 - DNA, 25 bp, Probe Sequence
tattagtcatcgctattacccattg

SEQ ID NO: 16754 - DNA, 25 bp, Probe Sequence
gtattagtcatcgctattacccatt

SEQ ID NO: 16755 - DNA, 25 bp, Probe Sequence
gcttggttgctatgaatctcctgtt

SEQ ID NO: 16756 - DNA, 25 bp, Probe Sequence
cagtacaatgaccttatgggacttt

SEQ ID NO: 16757 - DNA, 25 bp, Probe Sequence
ctgcttggttgctatgaatctcctg

SEQ ID NO: 16758 - DNA, 25 bp, Probe Sequence
aaggactgaagaaagcagaaacaaa

SEQ ID NO: 16759 - DNA, 25 bp, Probe Sequence
aaaggactgaagaaagcagaaacaa

SEQ ID NO: 16760 - DNA, 25 bp, Probe Sequence
caacatttccttctttctaggcttt

SEQ ID NO: 16761 - DNA, 25 bp, Probe Sequence
tcaacatttccttctttctaggctt

SEQ ID NO: 16762 - DNA, 25 bp, Probe Sequence
ttcaacatttccttctttctaggct

SEQ ID NO: 16763 - DNA, 25 bp, Probe Sequence
tttcaacatttccttctttctaggc

SEQ ID NO: 16764 - DNA, 25 bp, Probe Sequence
gagggtactttcttatgctggatca

SEQ ID NO: 16765 - DNA, 25 bp, Probe Sequence
tctgcttggttgctatgaatctcct

SEQ ID NO: 16766 - DNA, 25 bp, Probe Sequence
actttcttatgctggatcaggtaaa

SEQ ID NO: 16767 - DNA, 25 bp, Probe Sequence
gtactttcttatgctggatcaggta

SEQ ID NO: 16768 - DNA, 25 bp, Probe Sequence
aaatagtatgttctgatgagctggg

SEQ ID NO: 16769 - DNA, 25 bp, Probe Sequence
ccacattgactaatccaactaacct

SEQ ID NO: 16770 - DNA, 25 bp, Probe Sequence
cacattgactaatccaactaacctc

SEQ ID NO: 16771 - DNA, 25 bp, Probe Sequence
acattgactaatccaactaacctca

SEQ ID NO: 16772 - DNA, 25 bp, Probe Sequence
ggacgaacctgatctcttatactag

SEQ ID NO: 16773 - DNA, 25 bp, Probe Sequence
aggacgaacctgatctcttatacta

SEQ ID NO: 16774 - DNA, 25 bp, Probe Sequence
aaggacgaacctgatctcttatact

SEQ ID NO: 16775 - DNA, 25 bp, Probe Sequence
caaccacccaactatctataaacct

SEQ ID NO: 16776 - DNA, 25 bp, Probe Sequence
accaaccacccaactatctataaac

SEQ ID NO: 16777 - DNA, 25 bp, Probe Sequence
caccaaccacccaactatctataaa

SEQ ID NO: 16778 - DNA, 25 bp, Probe Sequence
tacaccaaccacccaactatctata

SEQ ID NO: 16779 - DNA, 25 bp, Probe Sequence
cagtgattataggctttcgctctaa

SEQ ID NO: 16780 - DNA, 25 bp, Probe Sequence
ccaaccacccaactatctataaacc

SEQ ID NO: 16781 - DNA, 25 bp, Probe Sequence
taaccatacacaacactaaaggacg

SEQ ID NO: 16782 - DNA, 25 bp, Probe Sequence
agtgattataggctttcgctctaag

SEQ ID NO: 16783 - DNA, 25 bp, Probe Sequence
gtgattataggctttcgctctaaga

SEQ ID NO: 16784 - DNA, 25 bp, Probe Sequence
gactaatccaactaacctcaaacaa

SEQ ID NO: 16785 - DNA, 25 bp, Probe Sequence
acaccaaccacccaactatctataa

SEQ ID NO: 16786 - DNA, 25 bp, Probe Sequence
ttacaccaaccacccaactatctat

SEQ ID NO: 16787 - DNA, 25 bp, Probe Sequence
tgattataggctttcgctctaagat

SEQ ID NO: 16788 - DNA, 25 bp, Probe Sequence
ataaccatacacaacactaaaggac

SEQ ID NO: 16789 - DNA, 25 bp, Probe Sequence
tgataaccatacacaacactaaagg

SEQ ID NO: 16790 - DNA, 25 bp, Probe Sequence
cacccaactatctataaacctagcc

SEQ ID NO: 16791 - DNA, 25 bp, Probe Sequence
ccacccaactatctataaacctagc

SEQ ID NO: 16792 - DNA, 25 bp, Probe Sequence
actaactatcctagaaatcgctgtc

SEQ ID NO: 16793 - DNA, 25 bp, Probe Sequence
aagagacttgaatatcctagagcag

SEQ ID NO: 16794 - DNA, 25 bp, Probe Sequence
gaagagacttgaatatcctagagca

SEQ ID NO: 16795 - DNA, 25 bp, Probe Sequence
atcttgacacacaatgatgagttca

SEQ ID NO: 16796 - DNA, 25 bp, Probe Sequence
cacacaatgatgagttcacctacat

SEQ ID NO: 16797 - DNA, 25 bp, Probe Sequence
agagacttgaatatcctagagcagt

SEQ ID NO: 16798 - DNA, 25 bp, Probe Sequence
gagacttgaatatcctagagcagtt

SEQ ID NO: 16799 - DNA, 25 bp, Probe Sequence
gatcttgacacacaatgatgagttc

SEQ ID NO: 16800 - DNA, 25 bp, Probe Sequence
tcttgacacacaatgatgagttcac

SEQ ID NO: 16801 - DNA, 25 bp, Probe Sequence
gacacacaatgatgagttcacctac

SEQ ID NO: 16802 - DNA, 25 bp, Probe Sequence
ggatcttgacacacaatgatgagtt

SEQ ID NO: 16803 - DNA, 25 bp, Probe Sequence
agacttgaatatcctagagcagtta

SEQ ID NO: 16804 - DNA, 25 bp, Probe Sequence
tgacacacaatgatgagttcaccta

SEQ ID NO: 16805 - DNA, 25 bp, Probe Sequence
acacaatgatgagttcacctacatg

SEQ ID NO: 16806 - DNA, 25 bp, Probe Sequence
ggaagagacttgaatatcctagagc

SEQ ID NO: 16807 - DNA, 25 bp, Probe Sequence
acacacaatgatgagttcacctaca

SEQ ID NO: 16808 - DNA, 25 bp, Probe Sequence
cttgacacacaatgatgagttcacc

SEQ ID NO: 16809 - DNA, 25 bp, Probe Sequence
cacaatgatgagttcacctacatgg

SEQ ID NO: 16810 - DNA, 25 bp, Probe Sequence
gacttgaatatcctagagcagttaa

SEQ ID NO: 16811 - DNA, 25 bp, Probe Sequence
aaactctctcttacttactgggaac

SEQ ID NO: 16812 - DNA, 25 bp, Probe Sequence
cttacttactgggaacacacatcat

SEQ ID NO: 16813 - DNA, 25 bp, Probe Sequence
aactctctcttacttactgggaaca

SEQ ID NO: 16814 - DNA, 25 bp, Probe Sequence
gaaactctctcttacttactgggaa

SEQ ID NO: 16815 - DNA, 25 bp, Probe Sequence
ctcttacttactgggaacacacatc

SEQ ID NO: 16816 - DNA, 25 bp, Probe Sequence
aattagcattcctgttgtttccttc

SEQ ID NO: 16817 - DNA, 25 bp, Probe Sequence
aattctcttgtgactctcagcgtat

SEQ ID NO: 16818 - DNA, 25 bp, Probe Sequence
attctcttgtgactctcagcgtatg

SEQ ID NO: 16819 - DNA, 25 bp, Probe Sequence
tataatggatatgttgcgggtattc

SEQ ID NO: 16820 - DNA, 25 bp, Probe Sequence
ggtattccaaattctcttgtgactc

SEQ ID NO: 16821 - DNA, 25 bp, Probe Sequence
attccaaattctcttgtgactctca

SEQ ID NO: 16822 - DNA, 25 bp, Probe Sequence
gatatgttgcgggtattccaaattc

SEQ ID NO: 16823 - DNA, 25 bp, Probe Sequence
gggtattccaaattctcttgtgact

SEQ ID NO: 16824 - DNA, 25 bp, Probe Sequence
atatgttgcgggtattccaaattct

SEQ ID NO: 16825 - DNA, 25 bp, Probe Sequence
ttccaaattctcttgtgactctcag

SEQ ID NO: 16826 - DNA, 25 bp, Probe Sequence
gtattccaaattctcttgtgactct

SEQ ID NO: 16827 - DNA, 25 bp, Probe Sequence
acatctcatatggaattgaaccgat

SEQ ID NO: 16828 - DNA, 25 bp, Probe Sequence
tattccaaattctcttgtgactctc

SEQ ID NO: 16829 - DNA, 25 bp, Probe Sequence
tatgttgcgggtattccaaattctc

SEQ ID NO: 16830 - DNA, 25 bp, Probe Sequence
aacatctcatatggaattgaaccga

SEQ ID NO: 16831 - DNA, 25 bp, Probe Sequence
gatggaggctgtatcaggatttata

SEQ ID NO: 16832 - DNA, 25 bp, Probe Sequence
atctcatatggaattgaaccgatgg

SEQ ID NO: 16833 - DNA, 25 bp, Probe Sequence
ctcttgtgactctcagcgtatgttc

SEQ ID NO: 16834 - DNA, 25 bp, Probe Sequence
tggtttaattcagagtatcaagtca

SEQ ID NO: 16835 - DNA, 25 bp, Probe Sequence
atggaggctgtatcaggatttatac

SEQ ID NO: 16836 - DNA, 25 bp, Probe Sequence
gaattgaaccgatggaggctgtatc

SEQ ID NO: 16837 - DNA, 25 bp, Probe Sequence
cgggtattccaaattctcttgtgac

SEQ ID NO: 16838 - DNA, 25 bp, Probe Sequence
cttgtgactctcagcgtatgttcag

SEQ ID NO: 16839 - DNA, 25 bp, Probe Sequence
ctcatatggaattgaaccgatggag

SEQ ID NO: 16840 - DNA, 25 bp, Probe Sequence
gagtgtcagcagctatagtgaagtt

SEQ ID NO: 16841 - DNA, 25 bp, Probe Sequence
cagtgatgtatctgagagtggtctt

SEQ ID NO: 16842 - DNA, 25 bp, Probe Sequence
agaaggaactgccattgccatatag

SEQ ID NO: 16843 - DNA, 25 bp, Probe Sequence
gtgatgtatctgagagtggtctttg

SEQ ID NO: 16844 - DNA, 25 bp, Probe Sequence
agtgatgtatctgagagtggtcttt

SEQ ID NO: 16845 - DNA, 25 bp, Probe Sequence
gctgatgctcactctgaaataaatc

SEQ ID NO: 16846 - DNA, 25 bp, Probe Sequence
gagagtggtctttggtcgtatttac

SEQ ID NO: 16847 - DNA, 25 bp, Probe Sequence
tgagagtggtctttggtcgtattta

SEQ ID NO: 16848 - DNA, 25 bp, Probe Sequence
ccgttaaggaagggacagttactaa

SEQ ID NO: 16849 - DNA, 25 bp, Probe Sequence
ctgatgctcactctgaaataaatct

SEQ ID NO: 16850 - DNA, 25 bp, Probe Sequence
gaaggaactgccattgccatatagg

SEQ ID NO: 16851 - DNA, 25 bp, Probe Sequence
aataacactaattcagcctcccgat

SEQ ID NO: 16852 - DNA, 25 bp, Probe Sequence
tgatgctcactctgaaataaatctt

SEQ ID NO: 16853 - DNA, 25 bp, Probe Sequence
atgtatctgagagtggtctttggtc

SEQ ID NO: 16854 - DNA, 25 bp, Probe Sequence
gatgtatctgagagtggtctttggt

SEQ ID NO: 16855 - DNA, 25 bp, Probe Sequence
tgatgtatctgagagtggtctttgg

SEQ ID NO: 16856 - DNA, 25 bp, Probe Sequence
cagaaggaactgccattgccatata

SEQ ID NO: 16857 - DNA, 25 bp, Probe Sequence
cgctgatgctcactctgaaataaat

SEQ ID NO: 16858 - DNA, 25 bp, Probe Sequence
gatgctcactctgaaataaatcttc

SEQ ID NO: 16859 - DNA, 25 bp, Probe Sequence
ggacagttactaaccctgaataaca

SEQ ID NO: 16860 - DNA, 25 bp, Probe Sequence
gttaaggaagggacagttactaacc

SEQ ID NO: 16861 - DNA, 25 bp, Probe Sequence
acagttactaaccctgaataacact

SEQ ID NO: 16862 - DNA, 25 bp, Probe Sequence
gacagttactaaccctgaataacac

SEQ ID NO: 16863 - DNA, 25 bp, Probe Sequence
cgttaaggaagggacagttactaac

SEQ ID NO: 16864 - DNA, 25 bp, Probe Sequence
tatctgagagtggtctttggtcgta

SEQ ID NO: 16865 - DNA, 25 bp, Probe Sequence
aaccatgcagttagttactcttaca

SEQ ID NO: 16866 - DNA, 25 bp, Probe Sequence
ccatgcagttagttactcttacact

SEQ ID NO: 16867 - DNA, 25 bp, Probe Sequence
accatgcagttagttactcttacac

SEQ ID NO: 16868 - DNA, 25 bp, Probe Sequence
atgcagttagttactcttacactct

SEQ ID NO: 16869 - DNA, 25 bp, Probe Sequence
catgcagttagttactcttacactc

SEQ ID NO: 16870 - DNA, 25 bp, Probe Sequence
taaccatgcagttagttactcttac

SEQ ID NO: 16871 - DNA, 25 bp, Probe Sequence
taacatactttgtaaccatgcagtt

SEQ ID NO: 16872 - DNA, 25 bp, Probe Sequence
ataacatactttgtaaccatgcagt

SEQ ID NO: 16873 - DNA, 25 bp, Probe Sequence
catactttgtaaccatgcagttagt

SEQ ID NO: 16874 - DNA, 25 bp, Probe Sequence
acatactttgtaaccatgcagttag

SEQ ID NO: 16875 - DNA, 25 bp, Probe Sequence
aacatactttgtaaccatgcagtta

SEQ ID NO: 16876 - DNA, 25 bp, Probe Sequence
atactttgtaaccatgcagttagtt

SEQ ID NO: 16877 - DNA, 25 bp, Probe Sequence
tactttgtaaccatgcagttagtta

SEQ ID NO: 16878 - DNA, 25 bp, Probe Sequence
tataacatactttgtaaccatgcag

SEQ ID NO: 16879 - DNA, 25 bp, Probe Sequence
atataacatactttgtaaccatgca

SEQ ID NO: 16880 - DNA, 25 bp, Probe Sequence
tgtaaccatgcagttagttactctt

SEQ ID NO: 16881 - DNA, 25 bp, Probe Sequence
ttgtaaccatgcagttagttactct

SEQ ID NO: 16882 - DNA, 25 bp, Probe Sequence
gtaaccatgcagttagttactctta

SEQ ID NO: 16883 - DNA, 25 bp, Probe Sequence
tatataacatactttgtaaccatgc

SEQ ID NO: 16884 - DNA, 25 bp, Probe Sequence
actttgtaaccatgcagttagttac

SEQ ID NO: 16885 - DNA, 25 bp, Probe Sequence
tttgtaaccatgcagttagttactc

SEQ ID NO: 16886 - DNA, 25 bp, Probe Sequence
ctttgtaaccatgcagttagttact

SEQ ID NO: 16887 - DNA, 25 bp, Probe Sequence
actatggcataacattacaagacga

SEQ ID NO: 16888 - DNA, 25 bp, Probe Sequence
gactatggcataacattacaagacg

SEQ ID NO: 16889 - DNA, 25 bp, Probe Sequence
ctatggcataacattacaagacgag

SEQ ID NO: 16890 - DNA, 25 bp, Probe Sequence
tatggcataacattacaagacgagg

SEQ ID NO: 16891 - DNA, 25 bp, Probe Sequence
tgactatggcataacattacaagac

SEQ ID NO: 16892 - DNA, 25 bp, Probe Sequence
ctgactatggcataacattacaaga

SEQ ID NO: 16893 - DNA, 25 bp, Probe Sequence
tctgactatggcataacattacaag

SEQ ID NO: 16894 - DNA, 25 bp, Probe Sequence
agtccaggagatcatcaactaagag

SEQ ID NO: 16895 - DNA, 25 bp, Probe Sequence
atctgactatggcataacattacaa

SEQ ID NO: 16896 - DNA, 25 bp, Probe Sequence
aatctgactatggcataacattaca

SEQ ID NO: 16897 - DNA, 25 bp, Probe Sequence
cagtccaggagatcatcaactaaga

SEQ ID NO: 16898 - DNA, 25 bp, Probe Sequence
agaatccacatcctataaagaagcc

SEQ ID NO: 16899 - DNA, 25 bp, Probe Sequence
gtgtctgtttccatttatttccctg

SEQ ID NO: 16900 - DNA, 25 bp, Probe Sequence
agtgtctgtttccatttatttccct

SEQ ID NO: 16901 - DNA, 25 bp, Probe Sequence
caggagatcatcaactaagagccag

SEQ ID NO: 16902 - DNA, 25 bp, Probe Sequence
gtccaggagatcatcaactaagagc

SEQ ID NO: 16903 - DNA, 25 bp, Probe Sequence
cctttctgaactcaaccaatgtatt

SEQ ID NO: 16904 - DNA, 25 bp, Probe Sequence
ccagtccaggagatcatcaactaag

SEQ ID NO: 16905 - DNA, 25 bp, Probe Sequence
taatcttgcccaaattcctacctaa

SEQ ID NO: 16906 - DNA, 25 bp, Probe Sequence
ttaatcttgcccaaattcctaccta

SEQ ID NO: 16907 - DNA, 25 bp, Probe Sequence
tttaatcttgcccaaattcctacct

SEQ ID NO: 16908 - DNA, 25 bp, Probe Sequence
taacctgaacattcctttccattga

SEQ ID NO: 16909 - DNA, 25 bp, Probe Sequence
tcttaacctgaacattcctttccat

SEQ ID NO: 16910 - DNA, 25 bp, Probe Sequence
atcttaacctgaacattcctttcca

SEQ ID NO: 16911 - DNA, 25 bp, Probe Sequence
gatgtttatcacccaagcctatcac

SEQ ID NO: 16912 - DNA, 25 bp, Probe Sequence
ggatgtttatcacccaagcctatca

SEQ ID NO: 16913 - DNA, 25 bp, Probe Sequence
atgtttatcacccaagcctatcacg

SEQ ID NO: 16914 - DNA, 25 bp, Probe Sequence
tccacttttattctccttttctcca

SEQ ID NO: 16915 - DNA, 25 bp, Probe Sequence
gctccacttttattctccttttctc

SEQ ID NO: 16916 - DNA, 25 bp, Probe Sequence
ccacttttattctccttttctccag

SEQ ID NO: 16917 - DNA, 25 bp, Probe Sequence
ctccacttttattctccttttctcc

SEQ ID NO: 16918 - DNA, 25 bp, Probe Sequence
tggatgtttatcacccaagcctatc

SEQ ID NO: 16919 - DNA, 25 bp, Probe Sequence
ctggatgtttatcacccaagcctat

SEQ ID NO: 16920 - DNA, 25 bp, Probe Sequence
cttttattctccttttctccagagc

SEQ ID NO: 16921 - DNA, 25 bp, Probe Sequence
cacttttattctccttttctccaga

SEQ ID NO: 16922 - DNA, 25 bp, Probe Sequence
ttttattctccttttctccagagcg

SEQ ID NO: 16923 - DNA, 25 bp, Probe Sequence
acttttattctccttttctccagag

SEQ ID NO: 16924 - DNA, 25 bp, Probe Sequence
tttattctccttttctccagagcga

SEQ ID NO: 16925 - DNA, 25 bp, Probe Sequence
agctccacttttattctccttttct

SEQ ID NO: 16926 - DNA, 25 bp, Probe Sequence
cagctccacttttattctccttttc

SEQ ID NO: 16927 - DNA, 25 bp, Probe Sequence
aaacaaccgaatccctggacactaa

SEQ ID NO: 16928 - DNA, 25 bp, Probe Sequence
ttattctccttttctccagagcgag

SEQ ID NO: 16929 - DNA, 25 bp, Probe Sequence
ccagctccacttttattctcctttt

SEQ ID NO: 16930 - DNA, 25 bp, Probe Sequence
aacaaccgaatccctggacactaag

SEQ ID NO: 16931 - DNA, 25 bp, Probe Sequence
cctggatgtttatcacccaagccta

SEQ ID NO: 16932 - DNA, 25 bp, Probe Sequence
cccagctccacttttattctccttt

SEQ ID NO: 16933 - DNA, 25 bp, Probe Sequence
tcccagctccacttttattctcctt

SEQ ID NO: 16934 - DNA, 25 bp, Probe Sequence
tattctccttttctccagagcgagg

SEQ ID NO: 16935 - DNA, 25 bp, Probe Sequence
ctatgattactacgagacggatgag

SEQ ID NO: 16936 - DNA, 25 bp, Probe Sequence
tctatgattactacgagacggatga

SEQ ID NO: 16937 - DNA, 25 bp, Probe Sequence
tatgattactacgagacggatgagt

SEQ ID NO: 16938 - DNA, 25 bp, Probe Sequence
atgattactacgagacggatgagtt

SEQ ID NO: 16939 - DNA, 25 bp, Probe Sequence
taaccaggacaagaggaaggaagta

SEQ ID NO: 16940 - DNA, 25 bp, Probe Sequence
taaagggaggagtagaagatgaagt

SEQ ID NO: 16941 - DNA, 25 bp, Probe Sequence
atcgttgatgtgaagatggtctctg

SEQ ID NO: 16942 - DNA, 25 bp, Probe Sequence
ccaaatctccctaagtgtcagttac

SEQ ID NO: 16943 - DNA, 25 bp, Probe Sequence
tccaaatctccctaagtgtcagtta

SEQ ID NO: 16944 - DNA, 25 bp, Probe Sequence
ataaagggaggagtagaagatgaag

SEQ ID NO: 16945 - DNA, 25 bp, Probe Sequence
gatcgttgatgtgaagatggtctct

SEQ ID NO: 16946 - DNA, 25 bp, Probe Sequence
ccataaagggaggagtagaagatga

SEQ ID NO: 16947 - DNA, 25 bp, Probe Sequence
ctccagacctccttgaaatacaata

SEQ ID NO: 16948 - DNA, 25 bp, Probe Sequence
aaagggaggagtagaagatgaagtg

SEQ ID NO: 16949 - DNA, 25 bp, Probe Sequence
ttccaaatctccctaagtgtcagtt

SEQ ID NO: 16950 - DNA, 25 bp, Probe Sequence
tccagacctccttgaaatacaatat

SEQ ID NO: 16951 - DNA, 25 bp, Probe Sequence
cacttaatgaggaagctgtgaagaa

SEQ ID NO: 16952 - DNA, 25 bp, Probe Sequence
ctacctccagacctccttgaaatac

SEQ ID NO: 16953 - DNA, 25 bp, Probe Sequence
gattactacgagacggatgagtttg

SEQ ID NO: 16954 - DNA, 25 bp, Probe Sequence
tcaagtcacttaatgaggaagctgt

SEQ ID NO: 16955 - DNA, 25 bp, Probe Sequence
aatgccataaagggaggagtagaag

SEQ ID NO: 16956 - DNA, 25 bp, Probe Sequence
caaatctccctaagtgtcagttaca

SEQ ID NO: 16957 - DNA, 25 bp, Probe Sequence
tgattactacgagacggatgagttt

SEQ ID NO: 16958 - DNA, 25 bp, Probe Sequence
caaaccagccatagtgaaagtctat

SEQ ID NO: 16959 - DNA, 25 bp, Probe Sequence
aagaatgtgttatgaatcggtgctg

SEQ ID NO: 16960 - DNA, 25 bp, Probe Sequence
aattcttcttctcaagcactgacac

SEQ ID NO: 16961 - DNA, 25 bp, Probe Sequence
caattcttcttctcaagcactgaca

SEQ ID NO: 16962 - DNA, 25 bp, Probe Sequence
cttctcaagcactgacactcattac

SEQ ID NO: 16963 - DNA, 25 bp, Probe Sequence
tcttctcaagcactgacactcatta

SEQ ID NO: 16964 - DNA, 25 bp, Probe Sequence
gaatgtgttatgaatcggtgctgtc

SEQ ID NO: 16965 - DNA, 25 bp, Probe Sequence
attcttcttctcaagcactgacact

SEQ ID NO: 16966 - DNA, 25 bp, Probe Sequence
gtagacatacttgtacgctcacttg

SEQ ID NO: 16967 - DNA, 25 bp, Probe Sequence
tgtagacatacttgtacgctcactt

SEQ ID NO: 16968 - DNA, 25 bp, Probe Sequence
ttgtagacatacttgtacgctcact

SEQ ID NO: 16969 - DNA, 25 bp, Probe Sequence
ttcttctcaagcactgacactcatt

SEQ ID NO: 16970 - DNA, 25 bp, Probe Sequence
agaatgtgttatgaatcggtgctgt

SEQ ID NO: 16971 - DNA, 25 bp, Probe Sequence
ccaaagcggtagaattaaagaagag

SEQ ID NO: 16972 - DNA, 25 bp, Probe Sequence
agggtcttactctttgtatgatgaa

SEQ ID NO: 16973 - DNA, 25 bp, Probe Sequence
caaagcggtagaattaaagaagagt

SEQ ID NO: 16974 - DNA, 25 bp, Probe Sequence
gcaattcttcttctcaagcactgac

SEQ ID NO: 16975 - DNA, 25 bp, Probe Sequence
aaagaatgtgttatgaatcggtgct

SEQ ID NO: 16976 - DNA, 25 bp, Probe Sequence
cccaaagcggtagaattaaagaaga

SEQ ID NO: 16977 - DNA, 25 bp, Probe Sequence
ttctcaagcactgacactcattacc

SEQ ID NO: 16978 - DNA, 25 bp, Probe Sequence
cttcttctcaagcactgacactcat

SEQ ID NO: 16979 - DNA, 25 bp, Probe Sequence
ttcttcttctcaagcactgacactc

SEQ ID NO: 16980 - DNA, 25 bp, Probe Sequence
gggtcttactctttgtatgatgaaa

SEQ ID NO: 16981 - DNA, 25 bp, Probe Sequence
gtcaagtcaaatatgtagattgcct

SEQ ID NO: 16982 - DNA, 25 bp, Probe Sequence
agtcaagtcaaatatgtagattgcc

SEQ ID NO: 16983 - DNA, 25 bp, Probe Sequence
tgaagatgaatatgtatgtggctgt

SEQ ID NO: 16984 - DNA, 25 bp, Probe Sequence
ctgaagatgaatatgtatgtggctg

SEQ ID NO: 16985 - DNA, 25 bp, Probe Sequence
tctgaagatgaatatgtatgtggct

SEQ ID NO: 16986 - DNA, 25 bp, Probe Sequence
cttgaggaaggaagatgatagaaca

SEQ ID NO: 16987 - DNA, 25 bp, Probe Sequence
acttgaggaaggaagatgatagaac

SEQ ID NO: 16988 - DNA, 25 bp, Probe Sequence
ttgaggaaggaagatgatagaacat

SEQ ID NO: 16989 - DNA, 25 bp, Probe Sequence
aacttgaggaaggaagatgatagaa

SEQ ID NO: 16990 - DNA, 25 bp, Probe Sequence
gaagatgaatatgtatgtggctgta

SEQ ID NO: 16991 - DNA, 25 bp, Probe Sequence
atctgaagatgaatatgtatgtggc

SEQ ID NO: 16992 - DNA, 25 bp, Probe Sequence
actctcatcatctagtgttcctcat

SEQ ID NO: 16993 - DNA, 25 bp, Probe Sequence
catgtcttagcactgattattggtt

SEQ ID NO: 16994 - DNA, 25 bp, Probe Sequence
atctagtgttcctcatgtgttctaa

SEQ ID NO: 16995 - DNA, 25 bp, Probe Sequence
tgaggaaggaagatgatagaacatg

SEQ ID NO: 16996 - DNA, 25 bp, Probe Sequence
catctagtgttcctcatgtgttcta

SEQ ID NO: 16997 - DNA, 25 bp, Probe Sequence
atcatctagtgttcctcatgtgttc

SEQ ID NO: 16998 - DNA, 25 bp, Probe Sequence
ctctcatcatctagtgttcctcatg

SEQ ID NO: 16999 - DNA, 25 bp, Probe Sequence
ggaaggaagatgatagaacatgaga

SEQ ID NO: 17000 - DNA, 25 bp, Probe Sequence
aggaaggaagatgatagaacatgag

SEQ ID NO: 17001 - DNA, 25 bp, Probe Sequence
gaggaaggaagatgatagaacatga

SEQ ID NO: 17002 - DNA, 25 bp, Probe Sequence
gacatattgctgctggtacatctac

SEQ ID NO: 17003 - DNA, 25 bp, Probe Sequence
catcatctagtgttcctcatgtgtt

SEQ ID NO: 17004 - DNA, 25 bp, Probe Sequence
aagatgaatatgtatgtggctgtat

SEQ ID NO: 17005 - DNA, 25 bp, Probe Sequence
ctcatcatctagtgttcctcatgtg

SEQ ID NO: 17006 - DNA, 25 bp, Probe Sequence
tctcatcatctagtgttcctcatgt

SEQ ID NO: 17007 - DNA, 25 bp, Probe Sequence
ccgtgtagtgtctgtaataccttag

SEQ ID NO: 17008 - DNA, 25 bp, Probe Sequence
cgtgtagtgtctgtaataccttagt

SEQ ID NO: 17009 - DNA, 25 bp, Probe Sequence
tccgtgtagtgtctgtaatacctta

SEQ ID NO: 17010 - DNA, 25 bp, Probe Sequence
ctccgtgtagtgtctgtaatacctt

SEQ ID NO: 17011 - DNA, 25 bp, Probe Sequence
gtgtagtgtctgtaataccttagtt

SEQ ID NO: 17012 - DNA, 25 bp, Probe Sequence
ccttcggtttgtatttagtgtcttg

SEQ ID NO: 17013 - DNA, 25 bp, Probe Sequence
ctggttatttctcccttgtgttagt

SEQ ID NO: 17014 - DNA, 25 bp, Probe Sequence
tggttatttctcccttgtgttagta

SEQ ID NO: 17015 - DNA, 25 bp, Probe Sequence
cttcggtttgtatttagtgtcttga

SEQ ID NO: 17016 - DNA, 25 bp, Probe Sequence
cattgccttcggtttgtatttagtg

SEQ ID NO: 17017 - DNA, 25 bp, Probe Sequence
gacctccgtgtagtgtctgtaatac

SEQ ID NO: 17018 - DNA, 25 bp, Probe Sequence
cctccgtgtagtgtctgtaatacct

SEQ ID NO: 17019 - DNA, 25 bp, Probe Sequence
cggtttgtatttagtgtcttgaatg

SEQ ID NO: 17020 - DNA, 25 bp, Probe Sequence
attgccttcggtttgtatttagtgt

SEQ ID NO: 17021 - DNA, 25 bp, Probe Sequence
tcggtttgtatttagtgtcttgaat

SEQ ID NO: 17022 - DNA, 25 bp, Probe Sequence
aagcacctgaatttctgtttgaatg

SEQ ID NO: 17023 - DNA, 25 bp, Probe Sequence
ttcggtttgtatttagtgtcttgaa

SEQ ID NO: 17024 - DNA, 25 bp, Probe Sequence
ggttatttctcccttgtgttagtaa

SEQ ID NO: 17025 - DNA, 25 bp, Probe Sequence
gccttcggtttgtatttagtgtctt

SEQ ID NO: 17026 - DNA, 25 bp, Probe Sequence
gctggttatttctcccttgtgttag

SEQ ID NO: 17027 - DNA, 25 bp, Probe Sequence
caagcacctgaatttctgtttgaat

SEQ ID NO: 17028 - DNA, 25 bp, Probe Sequence
gaatgcggaacaatagctggttatt

SEQ ID NO: 17029 - DNA, 25 bp, Probe Sequence
tgacctccgtgtagtgtctgtaata

SEQ ID NO: 17030 - DNA, 25 bp, Probe Sequence
ttctcccttgtgttagtaataaacg

SEQ ID NO: 17031 - DNA, 25 bp, Probe Sequence
cctagccctgagtgtgaatttgtcc

SEQ ID NO: 17032 - DNA, 25 bp, Probe Sequence
aaatgacaattaaaagagacactag

SEQ ID NO: 17033 - DNA, 25 bp, Probe Sequence
aaaatgacaattaaaagagacacta

SEQ ID NO: 17034 - DNA, 25 bp, Probe Sequence
atgacaattaaaagagacactagtc

SEQ ID NO: 17035 - DNA, 25 bp, Probe Sequence
aatgacaattaaaagagacactagt

SEQ ID NO: 17036 - DNA, 25 bp, Probe Sequence
tgacaattaaaagagacactagtct

SEQ ID NO: 17037 - DNA, 25 bp, Probe Sequence
gacaattaaaagagacactagtctt

SEQ ID NO: 17038 - DNA, 25 bp, Probe Sequence
acaattaaaagagacactagtcttt

SEQ ID NO: 17039 - DNA, 25 bp, Probe Sequence
aaagagacactagtcttttatttct

SEQ ID NO: 17040 - DNA, 25 bp, Probe Sequence
agagacactagtcttttatttctaa

SEQ ID NO: 17041 - DNA, 25 bp, Probe Sequence
aagagacactagtcttttatttcta

SEQ ID NO: 17042 - DNA, 25 bp, Probe Sequence
gtatgagtaaccagatagagcacaa

SEQ ID NO: 17043 - DNA, 25 bp, Probe Sequence
tatgagtaaccagatagagcacaag

SEQ ID NO: 17044 - DNA, 25 bp, Probe Sequence
gcatgagttcttgttcttcagttaa

SEQ ID NO: 17045 - DNA, 25 bp, Probe Sequence
agcatgagttcttgttcttcagtta

SEQ ID NO: 17046 - DNA, 25 bp, Probe Sequence
gagtaaccagatagagcacaagcat

SEQ ID NO: 17047 - DNA, 25 bp, Probe Sequence
atgagtaaccagatagagcacaagc

SEQ ID NO: 17048 - DNA, 25 bp, Probe Sequence
gtgaggcatctggttactggttatt

SEQ ID NO: 17049 - DNA, 25 bp, Probe Sequence
aagcatgagttcttgttcttcagtt

SEQ ID NO: 17050 - DNA, 25 bp, Probe Sequence
tgttgtgcaatatccatctactgta

SEQ ID NO: 17051 - DNA, 25 bp, Probe Sequence
tgtgcaatatccatctactgtagtt

SEQ ID NO: 17052 - DNA, 25 bp, Probe Sequence
ttgtgcaatatccatctactgtagt

SEQ ID NO: 17053 - DNA, 25 bp, Probe Sequence
gttgtgcaatatccatctactgtag

SEQ ID NO: 17054 - DNA, 25 bp, Probe Sequence
atgttgtgcaatatccatctactgt

SEQ ID NO: 17055 - DNA, 25 bp, Probe Sequence
agatagagcacaagcatgagttctt

SEQ ID NO: 17056 - DNA, 25 bp, Probe Sequence
ggtatgagtaaccagatagagcaca

SEQ ID NO: 17057 - DNA, 25 bp, Probe Sequence
taaccagatagagcacaagcatgag

SEQ ID NO: 17058 - DNA, 25 bp, Probe Sequence
gtaaccagatagagcacaagcatga

SEQ ID NO: 17059 - DNA, 25 bp, Probe Sequence
agtaaccagatagagcacaagcatg

SEQ ID NO: 17060 - DNA, 25 bp, Probe Sequence
cagatagagcacaagcatgagttct

SEQ ID NO: 17061 - DNA, 25 bp, Probe Sequence
tgaggcatctggttactggttattt

SEQ ID NO: 17062 - DNA, 25 bp, Probe Sequence
gcaatatccatctactgtagttaag

SEQ ID NO: 17063 - DNA, 25 bp, Probe Sequence
gtgcaatatccatctactgtagtta

SEQ ID NO: 17064 - DNA, 25 bp, Probe Sequence
tgagtaaccagatagagcacaagca

SEQ ID NO: 17065 - DNA, 25 bp, Probe Sequence
ctaaacgctgttgaacattgattgt

SEQ ID NO: 17066 - DNA, 25 bp, Probe Sequence
aatgtcgtgttcagcaataatggaa

SEQ ID NO: 17067 - DNA, 25 bp, Probe Sequence
ttcactctgagatgatgtatgacaa

SEQ ID NO: 17068 - DNA, 25 bp, Probe Sequence
tcactctgagatgatgtatgacaat

SEQ ID NO: 17069 - DNA, 25 bp, Probe Sequence
cactctgagatgatgtatgacaatt

SEQ ID NO: 17070 - DNA, 25 bp, Probe Sequence
ttcaagccacatcttcctctaacaa

SEQ ID NO: 17071 - DNA, 25 bp, Probe Sequence
ctctaacaaatctctcagtatgcga

SEQ ID NO: 17072 - DNA, 25 bp, Probe Sequence
tcctctaacaaatctctcagtatgc

SEQ ID NO: 17073 - DNA, 25 bp, Probe Sequence
ccacatcttcctctaacaaatctct

SEQ ID NO: 17074 - DNA, 25 bp, Probe Sequence
ctgctgttatttactttacgagagg

SEQ ID NO: 17075 - DNA, 25 bp, Probe Sequence
agtgtcttcctcttaaacctcaatc

SEQ ID NO: 17076 - DNA, 25 bp, Probe Sequence
ctaccgtaaacacaacctctacttt

SEQ ID NO: 17077 - DNA, 25 bp, Probe Sequence
tctaacaaatctctcagtatgcgat

SEQ ID NO: 17078 - DNA, 25 bp, Probe Sequence
tcttcctcttaaacctcaatcatcg

SEQ ID NO: 17079 - DNA, 25 bp, Probe Sequence
tgtcttcctcttaaacctcaatcat

SEQ ID NO: 17080 - DNA, 25 bp, Probe Sequence
gtgtcttcctcttaaacctcaatca

SEQ ID NO: 17081 - DNA, 25 bp, Probe Sequence
cagtgtcttcctcttaaacctcaat

SEQ ID NO: 17082 - DNA, 25 bp, Probe Sequence
tatctttcctttgtttctgacctca

SEQ ID NO: 17083 - DNA, 25 bp, Probe Sequence
acatcttcctctaacaaatctctca

SEQ ID NO: 17084 - DNA, 25 bp, Probe Sequence
tatattgttctttgaccctgccatc

SEQ ID NO: 17085 - DNA, 25 bp, Probe Sequence
gtcttcctcttaaacctcaatcatc

SEQ ID NO: 17086 - DNA, 25 bp, Probe Sequence
cacatcttcctctaacaaatctctc

SEQ ID NO: 17087 - DNA, 25 bp, Probe Sequence
cctctaacaaatctctcagtatgcg

SEQ ID NO: 17088 - DNA, 25 bp, Probe Sequence
atcttcctctaacaaatctctcagt

SEQ ID NO: 17089 - DNA, 25 bp, Probe Sequence
tgctgttatttactttacgagaggc

SEQ ID NO: 17090 - DNA, 25 bp, Probe Sequence
cttcttggttctacttctcttctcc

SEQ ID NO: 17091 - DNA, 25 bp, Probe Sequence
gcttcttggttctacttctcttctc

SEQ ID NO: 17092 - DNA, 25 bp, Probe Sequence
ccgagagaattaagacagactgaat

SEQ ID NO: 17093 - DNA, 25 bp, Probe Sequence
cattaactaccatcagcacaactct

SEQ ID NO: 17094 - DNA, 25 bp, Probe Sequence
tcattaactaccatcagcacaactc

SEQ ID NO: 17095 - DNA, 25 bp, Probe Sequence
ctcattaactaccatcagcacaact

SEQ ID NO: 17096 - DNA, 25 bp, Probe Sequence
gaagtcctgatgtatagcaagttca

SEQ ID NO: 17097 - DNA, 25 bp, Probe Sequence
ggaagtcctgatgtatagcaagttc

SEQ ID NO: 17098 - DNA, 25 bp, Probe Sequence
tatgtcctggatgatgaatacacaa

SEQ ID NO: 17099 - DNA, 25 bp, Probe Sequence
atgtcctggatgatgaatacacaag

SEQ ID NO: 17100 - DNA, 25 bp, Probe Sequence
ccatcttcatcatcactgagtacat

SEQ ID NO: 17101 - DNA, 25 bp, Probe Sequence
attaactaccatcagcacaactctg

SEQ ID NO: 17102 - DNA, 25 bp, Probe Sequence
gtatgtcctggatgatgaatacaca

SEQ ID NO: 17103 - DNA, 25 bp, Probe Sequence
atcttcatcatcactgagtacatgg

SEQ ID NO: 17104 - DNA, 25 bp, Probe Sequence
cgagagaattaagacagactgaatt

SEQ ID NO: 17105 - DNA, 25 bp, Probe Sequence
catcttcatcatcactgagtacatg

SEQ ID NO: 17106 - DNA, 25 bp, Probe Sequence
ggtatgtcctggatgatgaatacac

SEQ ID NO: 17107 - DNA, 25 bp, Probe Sequence
aggtatgtcctggatgatgaataca

SEQ ID NO: 17108 - DNA, 25 bp, Probe Sequence
cggaagtcctgatgtatagcaagtt

SEQ ID NO: 17109 - DNA, 25 bp, Probe Sequence
agcttcttggttctacttctcttct

SEQ ID NO: 17110 - DNA, 25 bp, Probe Sequence
ttcttggttctacttctcttctcca

SEQ ID NO: 17111 - DNA, 25 bp, Probe Sequence
atgatgaatacacaagctcagtagg

SEQ ID NO: 17112 - DNA, 25 bp, Probe Sequence
ggatgatgaatacacaagctcagta

SEQ ID NO: 17113 - DNA, 25 bp, Probe Sequence
gtagtgaagtatgggaaatggagag

SEQ ID NO: 17114 - DNA, 25 bp, Probe Sequence
agttcaagttcaccagactctataa

SEQ ID NO: 17115 - DNA, 25 bp, Probe Sequence
tctagttcaagttcaccagactcta

SEQ ID NO: 17116 - DNA, 25 bp, Probe Sequence
ctagttcaagttcaccagactctat

SEQ ID NO: 17117 - DNA, 25 bp, Probe Sequence
ttctctagttcaagttcaccagact

SEQ ID NO: 17118 - DNA, 25 bp, Probe Sequence
tagttcaagttcaccagactctata

SEQ ID NO: 17119 - DNA, 25 bp, Probe Sequence
ctctagttcaagttcaccagactct

SEQ ID NO: 17120 - DNA, 25 bp, Probe Sequence
tctctagttcaagttcaccagactc

SEQ ID NO: 17121 - DNA, 25 bp, Probe Sequence
cttgtcctcctcaatgctatctacc

SEQ ID NO: 17122 - DNA, 25 bp, Probe Sequence
ccttgtcctcctcaatgctatctac

SEQ ID NO: 17123 - DNA, 25 bp, Probe Sequence
ttgtcctcctcaatgctatctacct

SEQ ID NO: 17124 - DNA, 25 bp, Probe Sequence
tttcttatgaccttaacctgtgtgg

SEQ ID NO: 17125 - DNA, 25 bp, Probe Sequence
ccaagaacaccaacaacaagatcag

SEQ ID NO: 17126 - DNA, 25 bp, Probe Sequence
tgtcctcctcaatgctatctacctg

SEQ ID NO: 17127 - DNA, 25 bp, Probe Sequence
gtcctcctcaatgctatctacctga

SEQ ID NO: 17128 - DNA, 25 bp, Probe Sequence
caatgctatctacctgagtgccaag

SEQ ID NO: 17129 - DNA, 25 bp, Probe Sequence
ctttctctagttcaagttcaccaga

SEQ ID NO: 17130 - DNA, 25 bp, Probe Sequence
tttctctagttcaagttcaccagac

SEQ ID NO: 17131 - DNA, 25 bp, Probe Sequence
atgatgaatagcaagaagtaccctg

SEQ ID NO: 17132 - DNA, 25 bp, Probe Sequence
cagaatggaaccctttcacttcaaa

SEQ ID NO: 17133 - DNA, 25 bp, Probe Sequence
catgatgaatagcaagaagtaccct

SEQ ID NO: 17134 - DNA, 25 bp, Probe Sequence
caagaacaccaacaacaagatcagc

SEQ ID NO: 17135 - DNA, 25 bp, Probe Sequence
ctgttactctctgctctgacttgga

SEQ ID NO: 17136 - DNA, 25 bp, Probe Sequence
gacctgttactctctgctctgactt

SEQ ID NO: 17137 - DNA, 25 bp, Probe Sequence
gaagacaacatttgatcccaagaaa

SEQ ID NO: 17138 - DNA, 25 bp, Probe Sequence
gaatgactatctggacatctatgcc

SEQ ID NO: 17139 - DNA, 25 bp, Probe Sequence
ggaatgactatctggacatctatgc

SEQ ID NO: 17140 - DNA, 25 bp, Probe Sequence
agaggaatgactatctggacatcta

SEQ ID NO: 17141 - DNA, 25 bp, Probe Sequence
gaagaggaatgactatctggacatc

SEQ ID NO: 17142 - DNA, 25 bp, Probe Sequence
aggaatgactatctggacatctatg

SEQ ID NO: 17143 - DNA, 25 bp, Probe Sequence
aagaggaatgactatctggacatct

SEQ ID NO: 17144 - DNA, 25 bp, Probe Sequence
agaagaggaatgactatctggacat

SEQ ID NO: 17145 - DNA, 25 bp, Probe Sequence
gaggaatgactatctggacatctat

SEQ ID NO: 17146 - DNA, 25 bp, Probe Sequence
atcaaccagaagaggaatgactatc

SEQ ID NO: 17147 - DNA, 25 bp, Probe Sequence
catcaaccagaagaggaatgactat

SEQ ID NO: 17148 - DNA, 25 bp, Probe Sequence
tcaaccagaagaggaatgactatct

SEQ ID NO: 17149 - DNA, 25 bp, Probe Sequence
acatcaaccagaagaggaatgacta

SEQ ID NO: 17150 - DNA, 25 bp, Probe Sequence
gaatcctggagttctatggtgatga

SEQ ID NO: 17151 - DNA, 25 bp, Probe Sequence
aatcctggagttctatggtgatgac

SEQ ID NO: 17152 - DNA, 25 bp, Probe Sequence
gaacatcaaccagaagaggaatgac

SEQ ID NO: 17153 - DNA, 25 bp, Probe Sequence
aacatcaaccagaagaggaatgact

SEQ ID NO: 17154 - DNA, 25 bp, Probe Sequence
tgaacatcaaccagaagaggaatga

SEQ ID NO: 17155 - DNA, 25 bp, Probe Sequence
cctggagttctatggtgatgacata

SEQ ID NO: 17156 - DNA, 25 bp, Probe Sequence
ctgaacatcaaccagaagaggaatg

SEQ ID NO: 17157 - DNA, 25 bp, Probe Sequence
ggaatcctggagttctatggtgatg

SEQ ID NO: 17158 - DNA, 25 bp, Probe Sequence
atgactatctggacatctatgccat

SEQ ID NO: 17159 - DNA, 25 bp, Probe Sequence
gatgtggactggagagaactgaatg

SEQ ID NO: 17160 - DNA, 25 bp, Probe Sequence
aatgactatctggacatctatgcca

SEQ ID NO: 17161 - DNA, 25 bp, Probe Sequence
ggagcaaactgaacattaaccttaa

SEQ ID NO: 17162 - DNA, 25 bp, Probe Sequence
ttgacaaggatggagatggtatcat

SEQ ID NO: 17163 - DNA, 25 bp, Probe Sequence
aacaaccagctctatgacatcatta

SEQ ID NO: 17164 - DNA, 25 bp, Probe Sequence
acaaccagctctatgacatcattac

SEQ ID NO: 17165 - DNA, 25 bp, Probe Sequence
ccagctctatgacatcattaccatg

SEQ ID NO: 17166 - DNA, 25 bp, Probe Sequence
caaccagctctatgacatcattacc

SEQ ID NO: 17167 - DNA, 25 bp, Probe Sequence
gatagcaggagatgacatggagatc

SEQ ID NO: 17168 - DNA, 25 bp, Probe Sequence
accagctctatgacatcattaccat

SEQ ID NO: 17169 - DNA, 25 bp, Probe Sequence
caacaaccagctctatgacatcatt

SEQ ID NO: 17170 - DNA, 25 bp, Probe Sequence
atttgacaaggatggagatggtatc

SEQ ID NO: 17171 - DNA, 25 bp, Probe Sequence
agatagcaggagatgacatggagat

SEQ ID NO: 17172 - DNA, 25 bp, Probe Sequence
aaccagctctatgacatcattacca

SEQ ID NO: 17173 - DNA, 25 bp, Probe Sequence
cagctctatgacatcattaccatgc

SEQ ID NO: 17174 - DNA, 25 bp, Probe Sequence
catttgacaaggatggagatggtat

SEQ ID NO: 17175 - DNA, 25 bp, Probe Sequence
tttcaaacactatgacacagaccag

SEQ ID NO: 17176 - DNA, 25 bp, Probe Sequence
tcaacaaccagctctatgacatcat

SEQ ID NO: 17177 - DNA, 25 bp, Probe Sequence
tttgacaaggatggagatggtatca

SEQ ID NO: 17178 - DNA, 25 bp, Probe Sequence
cagatagcaggagatgacatggaga

SEQ ID NO: 17179 - DNA, 25 bp, Probe Sequence
tcaagcagatagcaggagatgacat

SEQ ID NO: 17180 - DNA, 25 bp, Probe Sequence
caagcagatagcaggagatgacatg

SEQ ID NO: 17181 - DNA, 25 bp, Probe Sequence
ctcaagaaggtccttaacacagtcg

SEQ ID NO: 17182 - DNA, 25 bp, Probe Sequence
ctcaacaaccagctctatgacatca

SEQ ID NO: 17183 - DNA, 25 bp, Probe Sequence
caaggatggagatggtatcatcaag

SEQ ID NO: 17184 - DNA, 25 bp, Probe Sequence
agctctatgacatcattaccatgcg

SEQ ID NO: 17185 - DNA, 25 bp, Probe Sequence
ttcaaacactatgacacagaccagt

SEQ ID NO: 17186 - DNA, 25 bp, Probe Sequence
ctgttctgttctgttccttgtgtaa

SEQ ID NO: 17187 - DNA, 25 bp, Probe Sequence
ttctgttctgttccttgtgtaactg

SEQ ID NO: 17188 - DNA, 25 bp, Probe Sequence
gttctgttctgttccttgtgtaact

SEQ ID NO: 17189 - DNA, 25 bp, Probe Sequence
tgttctgttctgttccttgtgtaac

SEQ ID NO: 17190 - DNA, 25 bp, Probe Sequence
ttctgttccttgtgtaactgtgttg

SEQ ID NO: 17191 - DNA, 25 bp, Probe Sequence
gttctgttccttgtgtaactgtgtt

SEQ ID NO: 17192 - DNA, 25 bp, Probe Sequence
actgttctgttctgttccttgtgta

SEQ ID NO: 17193 - DNA, 25 bp, Probe Sequence
ctgttctgttccttgtgtaactgtg

SEQ ID NO: 17194 - DNA, 25 bp, Probe Sequence
tctgttctgttccttgtgtaactgt

SEQ ID NO: 17195 - DNA, 25 bp, Probe Sequence
gagagactgttctgttctgttcctt

SEQ ID NO: 17196 - DNA, 25 bp, Probe Sequence
tacctcgttcttgtcttgatgtgtc

SEQ ID NO: 17197 - DNA, 25 bp, Probe Sequence
ctacctcgttcttgtcttgatgtgt

SEQ ID NO: 17198 - DNA, 25 bp, Probe Sequence
actacctcgttcttgtcttgatgtg

SEQ ID NO: 17199 - DNA, 25 bp, Probe Sequence
agagactgttctgttctgttccttg

SEQ ID NO: 17200 - DNA, 25 bp, Probe Sequence
tgttctgttccttgtgtaactgtgt

SEQ ID NO: 17201 - DNA, 25 bp, Probe Sequence
gagactgttctgttctgttccttgt

SEQ ID NO: 17202 - DNA, 25 bp, Probe Sequence
agactgttctgttctgttccttgtg

SEQ ID NO: 17203 - DNA, 25 bp, Probe Sequence
gactacctcgttcttgtcttgatgt

SEQ ID NO: 17204 - DNA, 25 bp, Probe Sequence
gactgttctgttctgttccttgtgt

SEQ ID NO: 17205 - DNA, 25 bp, Probe Sequence
ttccttgtgtaactgtgttgctgaa

SEQ ID NO: 17206 - DNA, 25 bp, Probe Sequence
tgtaactgtgttgctgaaagactac

SEQ ID NO: 17207 - DNA, 25 bp, Probe Sequence
gtgtaactgtgttgctgaaagacta

SEQ ID NO: 17208 - DNA, 25 bp, Probe Sequence
cagaagacacaggaaacaatgtatt

SEQ ID NO: 17209 - DNA, 25 bp, Probe Sequence
tttatctttgaccaaccgaacatga

SEQ ID NO: 17210 - DNA, 25 bp, Probe Sequence
tattgagttgtatcgtgtggtgtat

SEQ ID NO: 17211 - DNA, 25 bp, Probe Sequence
tacttgaagaatgttgatggtgcta

SEQ ID NO: 17212 - DNA, 25 bp, Probe Sequence
attgagttgtatcgtgtggtgtatt

SEQ ID NO: 17213 - DNA, 25 bp, Probe Sequence
taatgatgttgaacttgttgctgag

SEQ ID NO: 17214 - DNA, 25 bp, Probe Sequence
ctaatgatgttgaacttgttgctga

SEQ ID NO: 17215 - DNA, 25 bp, Probe Sequence
tctaatgatgttgaacttgttgctg

SEQ ID NO: 17216 - DNA, 25 bp, Probe Sequence
ctctaatgatgttgaacttgttgct

SEQ ID NO: 17217 - DNA, 25 bp, Probe Sequence
gtattgagttgtatcgtgtggtgta

SEQ ID NO: 17218 - DNA, 25 bp, Probe Sequence
gatacttgaagaatgttgatggtgc

SEQ ID NO: 17219 - DNA, 25 bp, Probe Sequence
atacttgaagaatgttgatggtgct

SEQ ID NO: 17220 - DNA, 25 bp, Probe Sequence
ggctctaatgatgttgaacttgttg

SEQ ID NO: 17221 - DNA, 25 bp, Probe Sequence
agatacttgaagaatgttgatggtg

SEQ ID NO: 17222 - DNA, 25 bp, Probe Sequence
cagatacttgaagaatgttgatggt

SEQ ID NO: 17223 - DNA, 25 bp, Probe Sequence
aagttgtcctcttcttcagattcag

SEQ ID NO: 17224 - DNA, 25 bp, Probe Sequence
agaatgttgatggtgctagaagaat

SEQ ID NO: 17225 - DNA, 25 bp, Probe Sequence
gctctaatgatgttgaacttgttgc

SEQ ID NO: 17226 - DNA, 25 bp, Probe Sequence
gaatgttgatggtgctagaagaatt

SEQ ID NO: 17227 - DNA, 25 bp, Probe Sequence
aagaatgttgatggtgctagaagaa

SEQ ID NO: 17228 - DNA, 25 bp, Probe Sequence
ttgaagaatgttgatggtgctagaa

SEQ ID NO: 17229 - DNA, 25 bp, Probe Sequence
gaagaatgttgatggtgctagaaga

SEQ ID NO: 17230 - DNA, 25 bp, Probe Sequence
tgaagaatgttgatggtgctagaag

SEQ ID NO: 17231 - DNA, 25 bp, Probe Sequence
cttgaagaatgttgatggtgctaga

SEQ ID NO: 17232 - DNA, 25 bp, Probe Sequence
ctgtattgagttgtatcgtgtggtg

SEQ ID NO: 17233 - DNA, 25 bp, Probe Sequence
acttgaagaatgttgatggtgctag

SEQ ID NO: 17234 - DNA, 25 bp, Probe Sequence
tgtgttcctcttgttctaatcttgt

SEQ ID NO: 17235 - DNA, 25 bp, Probe Sequence
tgttcctcttgttctaatcttgtca

SEQ ID NO: 17236 - DNA, 25 bp, Probe Sequence
gtgttcctcttgttctaatcttgtc

SEQ ID NO: 17237 - DNA, 25 bp, Probe Sequence
atgtgttcctcttgttctaatcttg

SEQ ID NO: 17238 - DNA, 25 bp, Probe Sequence
tgtcattgctggtcaagattactaa

SEQ ID NO: 17239 - DNA, 25 bp, Probe Sequence
ttgtcattgctggtcaagattacta

SEQ ID NO: 17240 - DNA, 25 bp, Probe Sequence
cttgttctaatcttgtcaaccagtg

SEQ ID NO: 17241 - DNA, 25 bp, Probe Sequence
tcttgttctaatcttgtcaaccagt

SEQ ID NO: 17242 - DNA, 25 bp, Probe Sequence
ctcttgttctaatcttgtcaaccag

SEQ ID NO: 17243 - DNA, 25 bp, Probe Sequence
tcctcttgttctaatcttgtcaacc

SEQ ID NO: 17244 - DNA, 25 bp, Probe Sequence
cctcttgttctaatcttgtcaacca

SEQ ID NO: 17245 - DNA, 25 bp, Probe Sequence
gtcattgctggtcaagattactaat

SEQ ID NO: 17246 - DNA, 25 bp, Probe Sequence
ttcctcttgttctaatcttgtcaac

SEQ ID NO: 17247 - DNA, 25 bp, Probe Sequence
gttcctcttgttctaatcttgtcaa

SEQ ID NO: 17248 - DNA, 25 bp, Probe Sequence
ttgttctaatcttgtcaaccagtgc

SEQ ID NO: 17249 - DNA, 25 bp, Probe Sequence
gaacttcctgaagatgtccttgatg

SEQ ID NO: 17250 - DNA, 25 bp, Probe Sequence
caatcctgaacttcctgaagatgtc

SEQ ID NO: 17251 - DNA, 25 bp, Probe Sequence
tatgtgttcctcttgttctaatctt

SEQ ID NO: 17252 - DNA, 25 bp, Probe Sequence
aacacagattgtattctatgagtcc

SEQ ID NO: 17253 - DNA, 25 bp, Probe Sequence
tgaacttcctgaagatgtccttgat

SEQ ID NO: 17254 - DNA, 25 bp, Probe Sequence
atatgtgttcctcttgttctaatct

SEQ ID NO: 17255 - DNA, 25 bp, Probe Sequence
tcattgctggtcaagattactaata

SEQ ID NO: 17256 - DNA, 25 bp, Probe Sequence
aacttcctgaagatgtccttgatgt

SEQ ID NO: 17257 - DNA, 25 bp, Probe Sequence
caaggctgtgagactacctattgta

SEQ ID NO: 17258 - DNA, 25 bp, Probe Sequence
ctgtgatgacatggtgctgattctg

SEQ ID NO: 17259 - DNA, 25 bp, Probe Sequence
gtccgttatttcagtgacttggtcc

SEQ ID NO: 17260 - DNA, 25 bp, Probe Sequence
gttatttcagtgacttggtcccgtg

SEQ ID NO: 17261 - DNA, 25 bp, Probe Sequence
cgtccgttatttcagtgacttggtc

SEQ ID NO: 17262 - DNA, 25 bp, Probe Sequence
cctgtgatgacatggtgctgattct

SEQ ID NO: 17263 - DNA, 25 bp, Probe Sequence
ctgaagctccttgggatagtgatga

SEQ ID NO: 17264 - DNA, 25 bp, Probe Sequence
tgtgatgacatggtgctgattctgg

SEQ ID NO: 17265 - DNA, 25 bp, Probe Sequence
tccgttatttcagtgacttggtccc

SEQ ID NO: 17266 - DNA, 25 bp, Probe Sequence
tgaagctccttgggatagtgatgac

SEQ ID NO: 17267 - DNA, 25 bp, Probe Sequence
ttatttcagtgacttggtcccgtgg

SEQ ID NO: 17268 - DNA, 25 bp, Probe Sequence
cgttatttcagtgacttggtcccgt

SEQ ID NO: 17269 - DNA, 25 bp, Probe Sequence
cacgtccgttatttcagtgacttgg

SEQ ID NO: 17270 - DNA, 25 bp, Probe Sequence
gcccagataatgagctgagattcag

SEQ ID NO: 17271 - DNA, 25 bp, Probe Sequence
gaagctccttgggatagtgatgacc

SEQ ID NO: 17272 - DNA, 25 bp, Probe Sequence
cctgaagctccttgggatagtgatg

SEQ ID NO: 17273 - DNA, 25 bp, Probe Sequence
acgtccgttatttcagtgacttggt

SEQ ID NO: 17274 - DNA, 25 bp, Probe Sequence
aggcccagataatgagctgagattc

SEQ ID NO: 17275 - DNA, 25 bp, Probe Sequence
gaggcccagataatgagctgagatt

SEQ ID NO: 17276 - DNA, 25 bp, Probe Sequence
gcacgtccgttatttcagtgacttg

SEQ ID NO: 17277 - DNA, 25 bp, Probe Sequence
ggcccagataatgagctgagattca

SEQ ID NO: 17278 - DNA, 25 bp, Probe Sequence
ggggcattaaagctgctgttttaaa

SEQ ID NO: 17279 - DNA, 25 bp, Probe Sequence
tgcacgtccgttatttcagtgactt

SEQ ID NO: 17280 - DNA, 25 bp, Probe Sequence
cattaaagctgctgttttaaaaggc

SEQ ID NO: 17281 - DNA, 25 bp, Probe Sequence
tgaggcccagataatgagctgagat

SEQ ID NO: 17282 - DNA, 25 bp, Probe Sequence
aaggacagtgatggcgatggtatag

SEQ ID NO: 17283 - DNA, 25 bp, Probe Sequence
gaaggacagtgatggcgatggtata

SEQ ID NO: 17284 - DNA, 25 bp, Probe Sequence
aactcagaccagaaggacagtgatg

SEQ ID NO: 17285 - DNA, 25 bp, Probe Sequence
caactcagaccagaaggacagtgat

SEQ ID NO: 17286 - DNA, 25 bp, Probe Sequence
atccaactcaaggctgtgaagtctt

SEQ ID NO: 17287 - DNA, 25 bp, Probe Sequence
catccaactcaaggctgtgaagtct

SEQ ID NO: 17288 - DNA, 25 bp, Probe Sequence
tccaactcaaggctgtgaagtcttc

SEQ ID NO: 17289 - DNA, 25 bp, Probe Sequence
caactcaaggctgtgaagtcttcca

SEQ ID NO: 17290 - DNA, 25 bp, Probe Sequence
aactcaaggctgtgaagtcttccac

SEQ ID NO: 17291 - DNA, 25 bp, Probe Sequence
gaagcagatggagcaaacgtattgg

SEQ ID NO: 17292 - DNA, 25 bp, Probe Sequence
ggaagcagatggagcaaacgtattg

SEQ ID NO: 17293 - DNA, 25 bp, Probe Sequence
tggaagcagatggagcaaacgtatt

SEQ ID NO: 17294 - DNA, 25 bp, Probe Sequence
gtataggggatgcctgtgacaactg

SEQ ID NO: 17295 - DNA, 25 bp, Probe Sequence
tataggggatgcctgtgacaactgt

SEQ ID NO: 17296 - DNA, 25 bp, Probe Sequence
atggtataggggatgcctgtgacaa

SEQ ID NO: 17297 - DNA, 25 bp, Probe Sequence
gatgaagtcaactggtatctgatgg

SEQ ID NO: 17298 - DNA, 25 bp, Probe Sequence
ttgatgagaatgaatcttggtactt

SEQ ID NO: 17299 - DNA, 25 bp, Probe Sequence
ggcaatgaaatagacttacacactg

SEQ ID NO: 17300 - DNA, 25 bp, Probe Sequence
ggaatgggcaatgaaatagacttac

SEQ ID NO: 17301 - DNA, 25 bp, Probe Sequence
cccgagaaagtaaacaaagatgatg

SEQ ID NO: 17302 - DNA, 25 bp, Probe Sequence
aatgggcaatgaaatagacttacac

SEQ ID NO: 17303 - DNA, 25 bp, Probe Sequence
atgggcaatgaaatagacttacaca

SEQ ID NO: 17304 - DNA, 25 bp, Probe Sequence
gaatgggcaatgaaatagacttaca

SEQ ID NO: 17305 - DNA, 25 bp, Probe Sequence
ccgagaaagtaaacaaagatgatga

SEQ ID NO: 17306 - DNA, 25 bp, Probe Sequence
gggaatgggcaatgaaatagactta

SEQ ID NO: 17307 - DNA, 25 bp, Probe Sequence
ctggctgaatgaaataaattggtga

SEQ ID NO: 17308 - DNA, 25 bp, Probe Sequence
tctggctgaatgaaataaattggtg

SEQ ID NO: 17309 - DNA, 25 bp, Probe Sequence
tggctgaatgaaataaattggtgat

SEQ ID NO: 17310 - DNA, 25 bp, Probe Sequence
gggcaatgaaatagacttacacact

SEQ ID NO: 17311 - DNA, 25 bp, Probe Sequence
agatgaagtcaactggtatctgatg

SEQ ID NO: 17312 - DNA, 25 bp, Probe Sequence
gagatgaagtcaactggtatctgat

SEQ ID NO: 17313 - DNA, 25 bp, Probe Sequence
atctggctgaatgaaataaattggt

SEQ ID NO: 17314 - DNA, 25 bp, Probe Sequence
tgggcaatgaaatagacttacacac

SEQ ID NO: 17315 - DNA, 25 bp, Probe Sequence
tgatgagaatgaatcttggtactta

SEQ ID NO: 17316 - DNA, 25 bp, Probe Sequence
gaatttgcccttctgtttctagttt

SEQ ID NO: 17317 - DNA, 25 bp, Probe Sequence
gggagtttatagttctgatgtcttt

SEQ ID NO: 17318 - DNA, 25 bp, Probe Sequence
cgagaaagtaaacaaagatgatgag

SEQ ID NO: 17319 - DNA, 25 bp, Probe Sequence
aatggaagaatgtttggaaacctac

SEQ ID NO: 17320 - DNA, 25 bp, Probe Sequence
gaaaccacttacaccgttctacaaa

SEQ ID NO: 17321 - DNA, 25 bp, Probe Sequence
cctccttccttcttgcttctcatag

SEQ ID NO: 17322 - DNA, 25 bp, Probe Sequence
ctccttccttcttgcttctcatagc

SEQ ID NO: 17323 - DNA, 25 bp, Probe Sequence
gcaataaaatagtagcatcggcaaa

SEQ ID NO: 17324 - DNA, 25 bp, Probe Sequence
ccctccttccttcttgcttctcata

SEQ ID NO: 17325 - DNA, 25 bp, Probe Sequence
caataaaatagtagcatcggcaaaa

SEQ ID NO: 17326 - DNA, 25 bp, Probe Sequence
cctatcacctcttatgcacacctcc

SEQ ID NO: 17327 - DNA, 25 bp, Probe Sequence
tccttccttcttgcttctcatagcc

SEQ ID NO: 17328 - DNA, 25 bp, Probe Sequence
cccacctcctgcaataaaatagtag

SEQ ID NO: 17329 - DNA, 25 bp, Probe Sequence
ccacctcctgcaataaaatagtagc

SEQ ID NO: 17330 - DNA, 25 bp, Probe Sequence
gcctatcacctcttatgcacacctc

SEQ ID NO: 17331 - DNA, 25 bp, Probe Sequence
ccccacctcctgcaataaaatagta

SEQ ID NO: 17332 - DNA, 25 bp, Probe Sequence
tccctccttccttcttgcttctcat

SEQ ID NO: 17333 - DNA, 25 bp, Probe Sequence
ctatcacctcttatgcacacctccc

SEQ ID NO: 17334 - DNA, 25 bp, Probe Sequence
ctcctgcaataaaatagtagcatcg

SEQ ID NO: 17335 - DNA, 25 bp, Probe Sequence
acctcctgcaataaaatagtagcat

SEQ ID NO: 17336 - DNA, 25 bp, Probe Sequence
cctcctgcaataaaatagtagcatc

SEQ ID NO: 17337 - DNA, 25 bp, Probe Sequence
cacctcctgcaataaaatagtagca

SEQ ID NO: 17338 - DNA, 25 bp, Probe Sequence
tcctgcaataaaatagtagcatcgg

SEQ ID NO: 17339 - DNA, 25 bp, Probe Sequence
tatcacctcttatgcacacctccca

SEQ ID NO: 17340 - DNA, 25 bp, Probe Sequence
tgcaataaaatagtagcatcggcaa

SEQ ID NO: 17341 - DNA, 25 bp, Probe Sequence
ctgcaataaaatagtagcatcggca

SEQ ID NO: 17342 - DNA, 25 bp, Probe Sequence
ccttccttcttgcttctcatagccc

SEQ ID NO: 17343 - DNA, 25 bp, Probe Sequence
cctgcaataaaatagtagcatcggc

SEQ ID NO: 17344 - DNA, 25 bp, Probe Sequence
cttccttcttgcttctcatagcccc

SEQ ID NO: 17345 - DNA, 25 bp, Probe Sequence
gaccttatctaactaccagaccaac

SEQ ID NO: 17346 - DNA, 25 bp, Probe Sequence
cttgaccttatctaactaccagacc

SEQ ID NO: 17347 - DNA, 25 bp, Probe Sequence
ccttgaccttatctaactaccagac

SEQ ID NO: 17348 - DNA, 25 bp, Probe Sequence
ccttatctaactaccagaccaacaa

SEQ ID NO: 17349 - DNA, 25 bp, Probe Sequence
tgaccttatctaactaccagaccaa

SEQ ID NO: 17350 - DNA, 25 bp, Probe Sequence
ttgaccttatctaactaccagacca

SEQ ID NO: 17351 - DNA, 25 bp, Probe Sequence
accttatctaactaccagaccaaca

SEQ ID NO: 17352 - DNA, 25 bp, Probe Sequence
cattgtgttgatttctttccttccc

SEQ ID NO: 17353 - DNA, 25 bp, Probe Sequence
attgtgttgatttctttccttccca

SEQ ID NO: 17354 - DNA, 25 bp, Probe Sequence
tatctaactaccagaccaacaaagc

SEQ ID NO: 17355 - DNA, 25 bp, Probe Sequence
cccttgaccttatctaactaccaga

SEQ ID NO: 17356 - DNA, 25 bp, Probe Sequence
gtgttgatttctttccttcccaata

SEQ ID NO: 17357 - DNA, 25 bp, Probe Sequence
tcattgtgttgatttctttccttcc

SEQ ID NO: 17358 - DNA, 25 bp, Probe Sequence
tgttgatttctttccttcccaatag

SEQ ID NO: 17359 - DNA, 25 bp, Probe Sequence
ctgacctatttctgatcctgacttt

SEQ ID NO: 17360 - DNA, 25 bp, Probe Sequence
tgacctatttctgatcctgactttg

SEQ ID NO: 17361 - DNA, 25 bp, Probe Sequence
tgtgttgatttctttccttcccaat

SEQ ID NO: 17362 - DNA, 25 bp, Probe Sequence
ttgtgttgatttctttccttcccaa

SEQ ID NO: 17363 - DNA, 25 bp, Probe Sequence
aagcccttgaccttatctaactacc

SEQ ID NO: 17364 - DNA, 25 bp, Probe Sequence
gacctatttctgatcctgactttgg

SEQ ID NO: 17365 - DNA, 25 bp, Probe Sequence
gcccttgaccttatctaactaccag

SEQ ID NO: 17366 - DNA, 25 bp, Probe Sequence
ttcattgtgttgatttctttccttc

SEQ ID NO: 17367 - DNA, 25 bp, Probe Sequence
ttatctaactaccagaccaacaaag

SEQ ID NO: 17368 - DNA, 25 bp, Probe Sequence
cttatctaactaccagaccaacaaa

SEQ ID NO: 17369 - DNA, 25 bp, Probe Sequence
ttgatagttgtgtgtatgtgtgtgt

SEQ ID NO: 17370 - DNA, 25 bp, Probe Sequence
tgatagttgtgtgtatgtgtgtgtg

SEQ ID NO: 17371 - DNA, 25 bp, Probe Sequence
aatctggatgcctcattatgtcaac

SEQ ID NO: 17372 - DNA, 25 bp, Probe Sequence
caatctggatgcctcattatgtcaa

SEQ ID NO: 17373 - DNA, 25 bp, Probe Sequence
gatagttgtgtgtatgtgtgtgtgg

SEQ ID NO: 17374 - DNA, 25 bp, Probe Sequence
tgtgaagtgttactacagccttaat

SEQ ID NO: 17375 - DNA, 25 bp, Probe Sequence
ctcattatgtcaaccaggtccagat

SEQ ID NO: 17376 - DNA, 25 bp, Probe Sequence
aaccaggtccagatgtgctataatc

SEQ ID NO: 17377 - DNA, 25 bp, Probe Sequence
gtgaagtgttactacagccttaata

SEQ ID NO: 17378 - DNA, 25 bp, Probe Sequence
caaccaggtccagatgtgctataat

SEQ ID NO: 17379 - DNA, 25 bp, Probe Sequence
tcattatgtcaaccaggtccagatg

SEQ ID NO: 17380 - DNA, 25 bp, Probe Sequence
attatgtcaaccaggtccagatgtg

SEQ ID NO: 17381 - DNA, 25 bp, Probe Sequence
atctggatgcctcattatgtcaacc

SEQ ID NO: 17382 - DNA, 25 bp, Probe Sequence
tttgatagttgtgtgtatgtgtgtg

SEQ ID NO: 17383 - DNA, 25 bp, Probe Sequence
tttagaagaaagatgtttggcgtag

SEQ ID NO: 17384 - DNA, 25 bp, Probe Sequence
atctcattacttatactgggacacc

SEQ ID NO: 17385 - DNA, 25 bp, Probe Sequence
cattatgtcaaccaggtccagatgt

SEQ ID NO: 17386 - DNA, 25 bp, Probe Sequence
cattagagtcaactacacaaagcag

SEQ ID NO: 17387 - DNA, 25 bp, Probe Sequence
taaaggcattagagtcaactacaca

SEQ ID NO: 17388 - DNA, 25 bp, Probe Sequence
ctttaatcagaaaccctcattgtgt

SEQ ID NO: 17389 - DNA, 25 bp, Probe Sequence
aaggcattagagtcaactacacaaa

SEQ ID NO: 17390 - DNA, 25 bp, Probe Sequence
aaaggcattagagtcaactacacaa

SEQ ID NO: 17391 - DNA, 25 bp, Probe Sequence
gctttaatcagaaaccctcattgtg

SEQ ID NO: 17392 - DNA, 25 bp, Probe Sequence
aagaaagtaaggtgcttggagttta

SEQ ID NO: 17393 - DNA, 25 bp, Probe Sequence
ttaggtgaaggacaagtaggtaaga

SEQ ID NO: 17394 - DNA, 25 bp, Probe Sequence
taggtgaaggacaagtaggtaagag

SEQ ID NO: 17395 - DNA, 25 bp, Probe Sequence
ttgatgaagacattgtaagcagagt

SEQ ID NO: 17396 - DNA, 25 bp, Probe Sequence
attgatgaagacattgtaagcagag

SEQ ID NO: 17397 - DNA, 25 bp, Probe Sequence
aattgatgaagacattgtaagcaga

SEQ ID NO: 17398 - DNA, 25 bp, Probe Sequence
tgatgaagacattgtaagcagagtg

SEQ ID NO: 17399 - DNA, 25 bp, Probe Sequence
agactgctcagattctaagttgttg

SEQ ID NO: 17400 - DNA, 25 bp, Probe Sequence
gagactgctcagattctaagttgtt

SEQ ID NO: 17401 - DNA, 25 bp, Probe Sequence
gagagactgctcagattctaagttg

SEQ ID NO: 17402 - DNA, 25 bp, Probe Sequence
gtgaaggacaagtaggtaagaggac

SEQ ID NO: 17403 - DNA, 25 bp, Probe Sequence
gatgaagacattgtaagcagagtgg

SEQ ID NO: 17404 - DNA, 25 bp, Probe Sequence
agagactgctcagattctaagttgt

SEQ ID NO: 17405 - DNA, 25 bp, Probe Sequence
gactgctcagattctaagttgttgg

SEQ ID NO: 17406 - DNA, 25 bp, Probe Sequence
gtttaggtgaaggacaagtaggtaa

SEQ ID NO: 17407 - DNA, 25 bp, Probe Sequence
tttaggtgaaggacaagtaggtaag

SEQ ID NO: 17408 - DNA, 25 bp, Probe Sequence
ggtgaaggacaagtaggtaagagga

SEQ ID NO: 17409 - DNA, 25 bp, Probe Sequence
aggtgaaggacaagtaggtaagagg

SEQ ID NO: 17410 - DNA, 25 bp, Probe Sequence
tgctctctgctggattctaaattat

SEQ ID NO: 17411 - DNA, 25 bp, Probe Sequence
gctctctgctggattctaaattatg

SEQ ID NO: 17412 - DNA, 25 bp, Probe Sequence
aattccaagtgtttctgtttcaagg

SEQ ID NO: 17413 - DNA, 25 bp, Probe Sequence
tttcaataacaagaacagtggcttc

SEQ ID NO: 17414 - DNA, 25 bp, Probe Sequence
gtgctctctgctggattctaaatta

SEQ ID NO: 17415 - DNA, 25 bp, Probe Sequence
aagtgtttctgtttcaaggaaggat

SEQ ID NO: 17416 - DNA, 25 bp, Probe Sequence
gaggctatgaaattgatgaagacat

SEQ ID NO: 17417 - DNA, 25 bp, Probe Sequence
caacacactctgaatccaaccttag

SEQ ID NO: 17418 - DNA, 25 bp, Probe Sequence
catgttccagaacctaaccaactat

SEQ ID NO: 17419 - DNA, 25 bp, Probe Sequence
tgttccagaacctaaccaactataa

SEQ ID NO: 17420 - DNA, 25 bp, Probe Sequence
atgttccagaacctaaccaactata

SEQ ID NO: 17421 - DNA, 25 bp, Probe Sequence
aacacactctgaatccaaccttagc

SEQ ID NO: 17422 - DNA, 25 bp, Probe Sequence
gcaacacactctgaatccaacctta

SEQ ID NO: 17423 - DNA, 25 bp, Probe Sequence
attcacagagagaggagctacagat

SEQ ID NO: 17424 - DNA, 25 bp, Probe Sequence
ttcacagagagaggagctacagatt

SEQ ID NO: 17425 - DNA, 25 bp, Probe Sequence
tcacagagagaggagctacagattc

SEQ ID NO: 17426 - DNA, 25 bp, Probe Sequence
gttccagaacctaaccaactataaa

SEQ ID NO: 17427 - DNA, 25 bp, Probe Sequence
cttaaacttccagctctatcaccac

SEQ ID NO: 17428 - DNA, 25 bp, Probe Sequence
cattcacagagagaggagctacaga

SEQ ID NO: 17429 - DNA, 25 bp, Probe Sequence
tcattcacagagagaggagctacag

SEQ ID NO: 17430 - DNA, 25 bp, Probe Sequence
ctcaggaagacattgccatttgtag

SEQ ID NO: 17431 - DNA, 25 bp, Probe Sequence
ttaaacttccagctctatcaccact

SEQ ID NO: 17432 - DNA, 25 bp, Probe Sequence
caggaagacattgccatttgtagac

SEQ ID NO: 17433 - DNA, 25 bp, Probe Sequence
gataataaccatcggcctgttcttc

SEQ ID NO: 17434 - DNA, 25 bp, Probe Sequence
tcaggaagacattgccatttgtaga

SEQ ID NO: 17435 - DNA, 25 bp, Probe Sequence
gaagacattgccatttgtagaccac

SEQ ID NO: 17436 - DNA, 25 bp, Probe Sequence
cacactctgaatccaaccttagctg

SEQ ID NO: 17437 - DNA, 25 bp, Probe Sequence
taaacttccagctctatcaccactc

SEQ ID NO: 17438 - DNA, 25 bp, Probe Sequence
ctcattcacagagagaggagctaca

SEQ ID NO: 17439 - DNA, 25 bp, Probe Sequence
ataataaccatcggcctgttcttct

SEQ ID NO: 17440 - DNA, 25 bp, Probe Sequence
agataataaccatcggcctgttctt

SEQ ID NO: 17441 - DNA, 25 bp, Probe Sequence
catcttcatatccaaggtaggtgac

SEQ ID NO: 17442 - DNA, 25 bp, Probe Sequence
atcttcatatccaaggtaggtgaca

SEQ ID NO: 17443 - DNA, 25 bp, Probe Sequence
attaacaccatcttcatatccaagg

SEQ ID NO: 17444 - DNA, 25 bp, Probe Sequence
ccatcttcatatccaaggtaggtga

SEQ ID NO: 17445 - DNA, 25 bp, Probe Sequence
ttcatatccaaggtaggtgacactt

SEQ ID NO: 17446 - DNA, 25 bp, Probe Sequence
tcatatccaaggtaggtgacacttc

SEQ ID NO: 17447 - DNA, 25 bp, Probe Sequence
cttcatatccaaggtaggtgacact

SEQ ID NO: 17448 - DNA, 25 bp, Probe Sequence
tcttcatatccaaggtaggtgacac

SEQ ID NO: 17449 - DNA, 25 bp, Probe Sequence
agatcaaggttatagcttcaaggtg

SEQ ID NO: 17450 - DNA, 25 bp, Probe Sequence
aacaccatcttcatatccaaggtag

SEQ ID NO: 17451 - DNA, 25 bp, Probe Sequence
ttaacaccatcttcatatccaaggt

SEQ ID NO: 17452 - DNA, 25 bp, Probe Sequence
tggtagatcaaggttatagcttcaa

SEQ ID NO: 17453 - DNA, 25 bp, Probe Sequence
tagatcaaggttatagcttcaaggt

SEQ ID NO: 17454 - DNA, 25 bp, Probe Sequence
tcaaggttatagcttcaaggtgatc

SEQ ID NO: 17455 - DNA, 25 bp, Probe Sequence
gatcaaggttatagcttcaaggtga

SEQ ID NO: 17456 - DNA, 25 bp, Probe Sequence
ttggtagatcaaggttatagcttca

SEQ ID NO: 17457 - DNA, 25 bp, Probe Sequence
gtagatcaaggttatagcttcaagg

SEQ ID NO: 17458 - DNA, 25 bp, Probe Sequence
ggtagatcaaggttatagcttcaag

SEQ ID NO: 17459 - DNA, 25 bp, Probe Sequence
taacaccatcttcatatccaaggta

SEQ ID NO: 17460 - DNA, 25 bp, Probe Sequence
aacaaaccctatatctacggaccta

SEQ ID NO: 17461 - DNA, 25 bp, Probe Sequence
ctgaacaaaccctatatctacggac

SEQ ID NO: 17462 - DNA, 25 bp, Probe Sequence
gactgaacaaaccctatatctacgg

SEQ ID NO: 17463 - DNA, 25 bp, Probe Sequence
actgaacaaaccctatatctacgga

SEQ ID NO: 17464 - DNA, 25 bp, Probe Sequence
cgactgaacaaaccctatatctacg

SEQ ID NO: 17465 - DNA, 25 bp, Probe Sequence
gccagaagagatacagaggacataa

SEQ ID NO: 17466 - DNA, 25 bp, Probe Sequence
tgccagaagagatacagaggacata

SEQ ID NO: 17467 - DNA, 25 bp, Probe Sequence
gaagagtgccagaagagatacagag

SEQ ID NO: 17468 - DNA, 25 bp, Probe Sequence
gtgaattacacagattctcaacgac

SEQ ID NO: 17469 - DNA, 25 bp, Probe Sequence
agtgaattacacagattctcaacga

SEQ ID NO: 17470 - DNA, 25 bp, Probe Sequence
cagtgaattacacagattctcaacg

SEQ ID NO: 17471 - DNA, 25 bp, Probe Sequence
aaccacagtgaattacacagattct

SEQ ID NO: 17472 - DNA, 25 bp, Probe Sequence
acagtgaattacacagattctcaac

SEQ ID NO: 17473 - DNA, 25 bp, Probe Sequence
cacagtgaattacacagattctcaa

SEQ ID NO: 17474 - DNA, 25 bp, Probe Sequence
ccacagtgaattacacagattctca

SEQ ID NO: 17475 - DNA, 25 bp, Probe Sequence
accacagtgaattacacagattctc

SEQ ID NO: 17476 - DNA, 25 bp, Probe Sequence
tgaattacacagattctcaacgacc

SEQ ID NO: 17477 - DNA, 25 bp, Probe Sequence
ccagaagagatacagaggacataaa

SEQ ID NO: 17478 - DNA, 25 bp, Probe Sequence
aatactctccagaaagccaagatac

SEQ ID NO: 17479 - DNA, 25 bp, Probe Sequence
aaatactctccagaaagccaagata

SEQ ID NO: 17480 - DNA, 25 bp, Probe Sequence
caacgaagagtgccagaagagatac

SEQ ID NO: 17481 - DNA, 25 bp, Probe Sequence
tacacagattctcaacgacccatat

SEQ ID NO: 17482 - DNA, 25 bp, Probe Sequence
ttacacagattctcaacgacccata

SEQ ID NO: 17483 - DNA, 25 bp, Probe Sequence
aagagtgccagaagagatacagagg

SEQ ID NO: 17484 - DNA, 25 bp, Probe Sequence
aacgaagagtgccagaagagataca

SEQ ID NO: 17485 - DNA, 25 bp, Probe Sequence
atactctccagaaagccaagatacc

SEQ ID NO: 17486 - DNA, 25 bp, Probe Sequence
aataacccataagatgatctgtgcc

SEQ ID NO: 17487 - DNA, 25 bp, Probe Sequence
aaataacccataagatgatctgtgc

SEQ ID NO: 17488 - DNA, 25 bp, Probe Sequence
attacacagattctcaacgacccat

SEQ ID NO: 17489 - DNA, 25 bp, Probe Sequence
attatgttccaaggctactacagag

SEQ ID NO: 17490 - DNA, 25 bp, Probe Sequence
tatgttccaaggctactacagagaa

SEQ ID NO: 17491 - DNA, 25 bp, Probe Sequence
ttatgttccaaggctactacagaga

SEQ ID NO: 17492 - DNA, 25 bp, Probe Sequence
ttgtattatgttccaaggctactac

SEQ ID NO: 17493 - DNA, 25 bp, Probe Sequence
ctgattctctcttgtccttcacatc

SEQ ID NO: 17494 - DNA, 25 bp, Probe Sequence
gctcataagagtaacagtcatcatt

SEQ ID NO: 17495 - DNA, 25 bp, Probe Sequence
gattctctcttgtccttcacatcac

SEQ ID NO: 17496 - DNA, 25 bp, Probe Sequence
gtattatgttccaaggctactacag

SEQ ID NO: 17497 - DNA, 25 bp, Probe Sequence
tattatgttccaaggctactacaga

SEQ ID NO: 17498 - DNA, 25 bp, Probe Sequence
agaatggaatgctctggtctatata

SEQ ID NO: 17499 - DNA, 25 bp, Probe Sequence
acttaaccacctacaaggagataag

SEQ ID NO: 17500 - DNA, 25 bp, Probe Sequence
actgattctctcttgtccttcacat

SEQ ID NO: 17501 - DNA, 25 bp, Probe Sequence
aatggaatgctctggtctatataac

SEQ ID NO: 17502 - DNA, 25 bp, Probe Sequence
cttaaccacctacaaggagataaga

SEQ ID NO: 17503 - DNA, 25 bp, Probe Sequence
aacttaaccacctacaaggagataa

SEQ ID NO: 17504 - DNA, 25 bp, Probe Sequence
gtgaccagatatatagaaggactgc

SEQ ID NO: 17505 - DNA, 25 bp, Probe Sequence
gaatggaatgctctggtctatataa

SEQ ID NO: 17506 - DNA, 25 bp, Probe Sequence
ttaaccacctacaaggagataagaa

SEQ ID NO: 17507 - DNA, 25 bp, Probe Sequence
atgttccaaggctactacagagaag

SEQ ID NO: 17508 - DNA, 25 bp, Probe Sequence
atggaatgctctggtctatataacc

SEQ ID NO: 17509 - DNA, 25 bp, Probe Sequence
gtcagtagactgtgattcttagcaa

SEQ ID NO: 17510 - DNA, 25 bp, Probe Sequence
tataaccacatttctgagcctttga

SEQ ID NO: 17511 - DNA, 25 bp, Probe Sequence
agtgaccagatatatagaaggactg

SEQ ID NO: 17512 - DNA, 25 bp, Probe Sequence
tatcccttactttaaccctttctgg

SEQ ID NO: 17513 - DNA, 25 bp, Probe Sequence
ggactaagcactggtatcatatctg

SEQ ID NO: 17514 - DNA, 25 bp, Probe Sequence
gactaagcactggtatcatatctga

SEQ ID NO: 17515 - DNA, 25 bp, Probe Sequence
caagatcaagaagataacggcaatt

SEQ ID NO: 17516 - DNA, 25 bp, Probe Sequence
tactcaagatcaagaagataacggc

SEQ ID NO: 17517 - DNA, 25 bp, Probe Sequence
tcaagatcaagaagataacggcaat

SEQ ID NO: 17518 - DNA, 25 bp, Probe Sequence
ctcaagatcaagaagataacggcaa

SEQ ID NO: 17519 - DNA, 25 bp, Probe Sequence
aatggtggatcttataatgcttgga

SEQ ID NO: 17520 - DNA, 25 bp, Probe Sequence
tgctataccacagagttctatgtag

SEQ ID NO: 17521 - DNA, 25 bp, Probe Sequence
atggtggatcttataatgcttggag

SEQ ID NO: 17522 - DNA, 25 bp, Probe Sequence
ctactcaagatcaagaagataacgg

SEQ ID NO: 17523 - DNA, 25 bp, Probe Sequence
gtggatcttataatgcttggagtgt

SEQ ID NO: 17524 - DNA, 25 bp, Probe Sequence
aacactacctgaagtcctgctatac

SEQ ID NO: 17525 - DNA, 25 bp, Probe Sequence
tggatcttataatgcttggagtgta

SEQ ID NO: 17526 - DNA, 25 bp, Probe Sequence
aagatcaagaagataacggcaatta

SEQ ID NO: 17527 - DNA, 25 bp, Probe Sequence
ctgctataccacagagttctatgta

SEQ ID NO: 17528 - DNA, 25 bp, Probe Sequence
aagataacggcaattataacacagg

SEQ ID NO: 17529 - DNA, 25 bp, Probe Sequence
caatggtggatcttataatgcttgg

SEQ ID NO: 17530 - DNA, 25 bp, Probe Sequence
tcctgctataccacagagttctatg

SEQ ID NO: 17531 - DNA, 25 bp, Probe Sequence
gtcctgctataccacagagttctat

SEQ ID NO: 17532 - DNA, 25 bp, Probe Sequence
ggatcttataatgcttggagtgtag

SEQ ID NO: 17533 - DNA, 25 bp, Probe Sequence
ggtggatcttataatgcttggagtg

SEQ ID NO: 17534 - DNA, 25 bp, Probe Sequence
aacaatggtggatcttataatgctt

SEQ ID NO: 17535 - DNA, 25 bp, Probe Sequence
acaatggtggatcttataatgcttg

SEQ ID NO: 17536 - DNA, 25 bp, Probe Sequence
agatcaagaagataacggcaattat

SEQ ID NO: 17537 - DNA, 25 bp, Probe Sequence
agactaatagagacacagagatgga

SEQ ID NO: 17538 - DNA, 25 bp, Probe Sequence
gagactaatagagacacagagatgg

SEQ ID NO: 17539 - DNA, 25 bp, Probe Sequence
gactaatagagacacagagatggaa

SEQ ID NO: 17540 - DNA, 25 bp, Probe Sequence
tccattatcatcttcacttcagaca

SEQ ID NO: 17541 - DNA, 25 bp, Probe Sequence
tcatcttcacttcagacaattcaga

SEQ ID NO: 17542 - DNA, 25 bp, Probe Sequence
agagactaatagagacacagagatg

SEQ ID NO: 17543 - DNA, 25 bp, Probe Sequence
gagagagacagagacagagagagac

SEQ ID NO: 17544 - DNA, 25 bp, Probe Sequence
cagagagagacagagacagagagag

SEQ ID NO: 17545 - DNA, 25 bp, Probe Sequence
catcttcacttcagacaattcagaa

SEQ ID NO: 17546 - DNA, 25 bp, Probe Sequence
actaatagagacacagagatggaat

SEQ ID NO: 17547 - DNA, 25 bp, Probe Sequence
atcatcttcacttcagacaattcag

SEQ ID NO: 17548 - DNA, 25 bp, Probe Sequence
agagagagacagagacagagagaga

SEQ ID NO: 17549 - DNA, 25 bp, Probe Sequence
ccattatcatcttcacttcagacaa

SEQ ID NO: 17550 - DNA, 25 bp, Probe Sequence
atagagacacagagatggaatagaa

SEQ ID NO: 17551 - DNA, 25 bp, Probe Sequence
aatagagacacagagatggaataga

SEQ ID NO: 17552 - DNA, 25 bp, Probe Sequence
agagagacagagacagagagagact

SEQ ID NO: 17553 - DNA, 25 bp, Probe Sequence
atccattatcatcttcacttcagac

SEQ ID NO: 17554 - DNA, 25 bp, Probe Sequence
aagagactaatagagacacagagat

SEQ ID NO: 17555 - DNA, 25 bp, Probe Sequence
agatgcacacacagatatacacatg

SEQ ID NO: 17556 - DNA, 25 bp, Probe Sequence
cagatgcacacacagatatacacat

SEQ ID NO: 17557 - DNA, 25 bp, Probe Sequence
acagagagagacagagacagagaga

SEQ ID NO: 17558 - DNA, 25 bp, Probe Sequence
tatcatcttcacttcagacaattca

SEQ ID NO: 17559 - DNA, 25 bp, Probe Sequence
cacagatgcacacacagatatacac

SEQ ID NO: 17560 - DNA, 25 bp, Probe Sequence
cacacagatgcacacacagatatac

SEQ ID NO: 17561 - DNA, 25 bp, Probe Sequence
atatatagtgtgtgtgtgtatgcgt

SEQ ID NO: 17562 - DNA, 25 bp, Probe Sequence
tatatagtgtgtgtgtgtatgcgtg

SEQ ID NO: 17563 - DNA, 25 bp, Probe Sequence
agacacacacgcatacacacatata

SEQ ID NO: 17564 - DNA, 25 bp, Probe Sequence
tagacacacacgcatacacacatat

SEQ ID NO: 17565 - DNA, 25 bp, Probe Sequence
ggagcatcattctgttatacttctg

SEQ ID NO: 17566 - DNA, 25 bp, Probe Sequence
cactatggcaactaactcactcaat

SEQ ID NO: 17567 - DNA, 25 bp, Probe Sequence
atatagtgtgtgtgtgtatgcgtgt

SEQ ID NO: 17568 - DNA, 25 bp, Probe Sequence
actatggcaactaactcactcaatt

SEQ ID NO: 17569 - DNA, 25 bp, Probe Sequence
cacgcatacacacatataatggaag

SEQ ID NO: 17570 - DNA, 25 bp, Probe Sequence
gcatacacacatataatggaagcaa

SEQ ID NO: 17571 - DNA, 25 bp, Probe Sequence
acacacacgcatacacacatataat

SEQ ID NO: 17572 - DNA, 25 bp, Probe Sequence
ttgtatggttatggaggtctgacta

SEQ ID NO: 17573 - DNA, 25 bp, Probe Sequence
acacatataatggaagcaataagcc

SEQ ID NO: 17574 - DNA, 25 bp, Probe Sequence
acacgcatacacacatataatggaa

SEQ ID NO: 17575 - DNA, 25 bp, Probe Sequence
cacacacgcatacacacatataatg

SEQ ID NO: 17576 - DNA, 25 bp, Probe Sequence
gcaagattggcatatcattgtaact

SEQ ID NO: 17577 - DNA, 25 bp, Probe Sequence
gagcatcattctgttatacttctgt

SEQ ID NO: 17578 - DNA, 25 bp, Probe Sequence
tgtatggttatggaggtctgactag

SEQ ID NO: 17579 - DNA, 25 bp, Probe Sequence
taagtcattccaatcagccaactaa

SEQ ID NO: 17580 - DNA, 25 bp, Probe Sequence
ataagtcattccaatcagccaacta

SEQ ID NO: 17581 - DNA, 25 bp, Probe Sequence
ggcaagattggcatatcattgtaac

SEQ ID NO: 17582 - DNA, 25 bp, Probe Sequence
aggcaagattggcatatcattgtaa

SEQ ID NO: 17583 - DNA, 25 bp, Probe Sequence
aaggcaagattggcatatcattgta

SEQ ID NO: 17584 - DNA, 25 bp, Probe Sequence
gacacacacgcatacacacatataa

SEQ ID NO: 17585 - DNA, 25 bp, Probe Sequence
tcttaactatcctaacaagccttgg

SEQ ID NO: 17586 - DNA, 25 bp, Probe Sequence
ttcttaactatcctaacaagccttg

SEQ ID NO: 17587 - DNA, 25 bp, Probe Sequence
cttaactatcctaacaagccttgga

SEQ ID NO: 17588 - DNA, 25 bp, Probe Sequence
ttaactatcctaacaagccttggac

SEQ ID NO: 17589 - DNA, 25 bp, Probe Sequence
ccagattcgtcagaattattccacc

SEQ ID NO: 17590 - DNA, 25 bp, Probe Sequence
cagattcgtcagaattattccaccg

SEQ ID NO: 17591 - DNA, 25 bp, Probe Sequence
ctacctctctctgggcttctatttc

SEQ ID NO: 17592 - DNA, 25 bp, Probe Sequence
taactatcctaacaagccttggacc

SEQ ID NO: 17593 - DNA, 25 bp, Probe Sequence
ctttcttaactatcctaacaagcct

SEQ ID NO: 17594 - DNA, 25 bp, Probe Sequence
cttcctggagactcacttcctagat

SEQ ID NO: 17595 - DNA, 25 bp, Probe Sequence
tttcttaactatcctaacaagcctt

SEQ ID NO: 17596 - DNA, 25 bp, Probe Sequence
gattcgtcagaattattccaccgac

SEQ ID NO: 17597 - DNA, 25 bp, Probe Sequence
agattcgtcagaattattccaccga

SEQ ID NO: 17598 - DNA, 25 bp, Probe Sequence
ttcctggagactcacttcctagatg

SEQ ID NO: 17599 - DNA, 25 bp, Probe Sequence
ggcagctttcttaactatcctaaca

SEQ ID NO: 17600 - DNA, 25 bp, Probe Sequence
gcagctttcttaactatcctaacaa

SEQ ID NO: 17601 - DNA, 25 bp, Probe Sequence
aagccttggaccaaatggaaataaa

SEQ ID NO: 17602 - DNA, 25 bp, Probe Sequence
ctcccagattcgtcagaattattcc

SEQ ID NO: 17603 - DNA, 25 bp, Probe Sequence
cctacctctctctgggcttctattt

SEQ ID NO: 17604 - DNA, 25 bp, Probe Sequence
agccttggaccaaatggaaataaag

SEQ ID NO: 17605 - DNA, 25 bp, Probe Sequence
caataggcagctttcttaactatcc

SEQ ID NO: 17606 - DNA, 25 bp, Probe Sequence
ccaataggcagctttcttaactatc

SEQ ID NO: 17607 - DNA, 25 bp, Probe Sequence
cccagattcgtcagaattattccac

SEQ ID NO: 17608 - DNA, 25 bp, Probe Sequence
tcccagattcgtcagaattattcca

SEQ ID NO: 17609 - DNA, 25 bp, Probe Sequence
tcttgaccaagtatgacaacctctt

SEQ ID NO: 17610 - DNA, 25 bp, Probe Sequence
ctcttgaccaagtatgacaacctct

SEQ ID NO: 17611 - DNA, 25 bp, Probe Sequence
tggaatttgggcagatatagcatta

SEQ ID NO: 17612 - DNA, 25 bp, Probe Sequence
ggaatttgggcagatatagcattaa

SEQ ID NO: 17613 - DNA, 25 bp, Probe Sequence
gaagctcttgaccaagtatgacaac

SEQ ID NO: 17614 - DNA, 25 bp, Probe Sequence
agaagctcttgaccaagtatgacaa

SEQ ID NO: 17615 - DNA, 25 bp, Probe Sequence
ttgaccaagtatgacaacctctttg

SEQ ID NO: 17616 - DNA, 25 bp, Probe Sequence
ccaagtatgacaacctctttgagac

SEQ ID NO: 17617 - DNA, 25 bp, Probe Sequence
gaccaagtatgacaacctctttgag

SEQ ID NO: 17618 - DNA, 25 bp, Probe Sequence
tgaccaagtatgacaacctctttga

SEQ ID NO: 17619 - DNA, 25 bp, Probe Sequence
caagtatgacaacctctttgagacg

SEQ ID NO: 17620 - DNA, 25 bp, Probe Sequence
accaagtatgacaacctctttgaga

SEQ ID NO: 17621 - DNA, 25 bp, Probe Sequence
gaaattcatggttggctacgaaatg

SEQ ID NO: 17622 - DNA, 25 bp, Probe Sequence
cttgaccaagtatgacaacctcttt

SEQ ID NO: 17623 - DNA, 25 bp, Probe Sequence
ctggaatttgggcagatatagcatt

SEQ ID NO: 17624 - DNA, 25 bp, Probe Sequence
atgaagaagctcttgaccaagtatg

SEQ ID NO: 17625 - DNA, 25 bp, Probe Sequence
catgaagaagctcttgaccaagtat

SEQ ID NO: 17626 - DNA, 25 bp, Probe Sequence
gctcttgaccaagtatgacaacctc

SEQ ID NO: 17627 - DNA, 25 bp, Probe Sequence
aagctcttgaccaagtatgacaacc

SEQ ID NO: 17628 - DNA, 25 bp, Probe Sequence
gaagaagctcttgaccaagtatgac

SEQ ID NO: 17629 - DNA, 25 bp, Probe Sequence
ggaaattcatggttggctacgaaat

SEQ ID NO: 17630 - DNA, 25 bp, Probe Sequence
tgaagaagctcttgaccaagtatga

SEQ ID NO: 17631 - DNA, 25 bp, Probe Sequence
aagaagctcttgaccaagtatgaca

SEQ ID NO: 17632 - DNA, 25 bp, Probe Sequence
gaatttgggcagatatagcattaat

SEQ ID NO: 17633 - DNA, 25 bp, Probe Sequence
tctcttgtccactaagtatcttgtt

SEQ ID NO: 17634 - DNA, 25 bp, Probe Sequence
atctcttgtccactaagtatcttgt

SEQ ID NO: 17635 - DNA, 25 bp, Probe Sequence
ttcagaatacagttgtctagccaag

SEQ ID NO: 17636 - DNA, 25 bp, Probe Sequence
tgatctcttgtccactaagtatctt

SEQ ID NO: 17637 - DNA, 25 bp, Probe Sequence
gatctcttgtccactaagtatcttg

SEQ ID NO: 17638 - DNA, 25 bp, Probe Sequence
ctcttgtccactaagtatcttgtta

SEQ ID NO: 17639 - DNA, 25 bp, Probe Sequence
gaccttcttcgctacaagttcctaa

SEQ ID NO: 17640 - DNA, 25 bp, Probe Sequence
tgtgatctcttgtccactaagtatc

SEQ ID NO: 17641 - DNA, 25 bp, Probe Sequence
gttattgatcgtggaatacagcttc

SEQ ID NO: 17642 - DNA, 25 bp, Probe Sequence
agttattgatcgtggaatacagctt

SEQ ID NO: 17643 - DNA, 25 bp, Probe Sequence
gtgatctcttgtccactaagtatct

SEQ ID NO: 17644 - DNA, 25 bp, Probe Sequence
tcatcttagcagctaggattctcaa

SEQ ID NO: 17645 - DNA, 25 bp, Probe Sequence
ttgtgatctcttgtccactaagtat

SEQ ID NO: 17646 - DNA, 25 bp, Probe Sequence
aagtcatcttagcagctaggattct

SEQ ID NO: 17647 - DNA, 25 bp, Probe Sequence
caagtcatcttagcagctaggattc

SEQ ID NO: 17648 - DNA, 25 bp, Probe Sequence
ttgatcgtggaatacagcttcataa

SEQ ID NO: 17649 - DNA, 25 bp, Probe Sequence
attgatcgtggaatacagcttcata

SEQ ID NO: 17650 - DNA, 25 bp, Probe Sequence
tattgatcgtggaatacagcttcat

SEQ ID NO: 17651 - DNA, 25 bp, Probe Sequence
ttattgatcgtggaatacagcttca

SEQ ID NO: 17652 - DNA, 25 bp, Probe Sequence
tttggtggctctatttgttctgata

SEQ ID NO: 17653 - DNA, 25 bp, Probe Sequence
tatttggtggctctatttgttctga

SEQ ID NO: 17654 - DNA, 25 bp, Probe Sequence
cagttattgatcgtggaatacagct

SEQ ID NO: 17655 - DNA, 25 bp, Probe Sequence
tcttgtccactaagtatcttgttaa

SEQ ID NO: 17656 - DNA, 25 bp, Probe Sequence
ttggtggctctatttgttctgatat

SEQ ID NO: 17657 - DNA, 25 bp, Probe Sequence
gaggattcagtagtacacatacaac

SEQ ID NO: 17658 - DNA, 25 bp, Probe Sequence
agaggattcagtagtacacatacaa

SEQ ID NO: 17659 - DNA, 25 bp, Probe Sequence
aagaggattcagtagtacacataca

SEQ ID NO: 17660 - DNA, 25 bp, Probe Sequence
gtgtcaatggacttgtgctactata

SEQ ID NO: 17661 - DNA, 25 bp, Probe Sequence
tgtcaatggacttgtgctactatat

SEQ ID NO: 17662 - DNA, 25 bp, Probe Sequence
tgtaatgtagacctagtccatcaga

SEQ ID NO: 17663 - DNA, 25 bp, Probe Sequence
aggattcagtagtacacatacaact

SEQ ID NO: 17664 - DNA, 25 bp, Probe Sequence
atgtaatgtagacctagtccatcag

SEQ ID NO: 17665 - DNA, 25 bp, Probe Sequence
atgtagacctagtccatcagatcat

SEQ ID NO: 17666 - DNA, 25 bp, Probe Sequence
aatgtagacctagtccatcagatca

SEQ ID NO: 17667 - DNA, 25 bp, Probe Sequence
gtcaatggacttgtgctactatatt

SEQ ID NO: 17668 - DNA, 25 bp, Probe Sequence
gtaatgtagacctagtccatcagat

SEQ ID NO: 17669 - DNA, 25 bp, Probe Sequence
atacttcctgaacatcttaggtctt

SEQ ID NO: 17670 - DNA, 25 bp, Probe Sequence
aatacttcctgaacatcttaggtct

SEQ ID NO: 17671 - DNA, 25 bp, Probe Sequence
cattcctcagctactactcacattc

SEQ ID NO: 17672 - DNA, 25 bp, Probe Sequence
ttcatcattcctcagctactactca

SEQ ID NO: 17673 - DNA, 25 bp, Probe Sequence
atcattcctcagctactactcacat

SEQ ID NO: 17674 - DNA, 25 bp, Probe Sequence
tcctcagctactactcacattcatt

SEQ ID NO: 17675 - DNA, 25 bp, Probe Sequence
ttcctcagctactactcacattcat

SEQ ID NO: 17676 - DNA, 25 bp, Probe Sequence
attcctcagctactactcacattca

SEQ ID NO: 17677 - DNA, 25 bp, Probe Sequence
tcattcctcagctactactcacatt

SEQ ID NO: 17678 - DNA, 25 bp, Probe Sequence
cctagtccatcagatcatgtgttct

SEQ ID NO: 17679 - DNA, 25 bp, Probe Sequence
catgtaatgtagacctagtccatca

SEQ ID NO: 17680 - DNA, 25 bp, Probe Sequence
gcatgtaatgtagacctagtccatc

SEQ ID NO: 17681 - DNA, 25 bp, Probe Sequence
ctgtgttagaattggctgaagtgtt

SEQ ID NO: 17682 - DNA, 25 bp, Probe Sequence
aaccaactctattgtgttcaccaag

SEQ ID NO: 17683 - DNA, 25 bp, Probe Sequence
ctctgtgttagaattggctgaagtg

SEQ ID NO: 17684 - DNA, 25 bp, Probe Sequence
caaccaactctattgtgttcaccaa

SEQ ID NO: 17685 - DNA, 25 bp, Probe Sequence
tctgtgttagaattggctgaagtgt

SEQ ID NO: 17686 - DNA, 25 bp, Probe Sequence
ccacataaggtctttgaaggaaatc

SEQ ID NO: 17687 - DNA, 25 bp, Probe Sequence
cacataaggtctttgaaggaaatcg

SEQ ID NO: 17688 - DNA, 25 bp, Probe Sequence
cctctgtgttagaattggctgaagt

SEQ ID NO: 17689 - DNA, 25 bp, Probe Sequence
tgtgttagaattggctgaagtgttt

SEQ ID NO: 17690 - DNA, 25 bp, Probe Sequence
gccacataaggtctttgaaggaaat

SEQ ID NO: 17691 - DNA, 25 bp, Probe Sequence
ctatgctccctctgtgttagaattg

SEQ ID NO: 17692 - DNA, 25 bp, Probe Sequence
acataaggtctttgaaggaaatcgc

SEQ ID NO: 17693 - DNA, 25 bp, Probe Sequence
aaagtgaaggagtttggaattgacc

SEQ ID NO: 17694 - DNA, 25 bp, Probe Sequence
atcattgcctccaagacctttacta

SEQ ID NO: 17695 - DNA, 25 bp, Probe Sequence
caactctattgtgttcaccaagctc

SEQ ID NO: 17696 - DNA, 25 bp, Probe Sequence
ccaaccaactctattgtgttcacca

SEQ ID NO: 17697 - DNA, 25 bp, Probe Sequence
aactctattgtgttcaccaagctca

SEQ ID NO: 17698 - DNA, 25 bp, Probe Sequence
cataaggtctttgaaggaaatcgcc

SEQ ID NO: 17699 - DNA, 25 bp, Probe Sequence
gtctactaacacaaccaaagtgaag

SEQ ID NO: 17700 - DNA, 25 bp, Probe Sequence
tgtctactaacacaaccaaagtgaa

SEQ ID NO: 17701 - DNA, 25 bp, Probe Sequence
tactaacacaaccaaagtgaaggag

SEQ ID NO: 17702 - DNA, 25 bp, Probe Sequence
ctactaacacaaccaaagtgaagga

SEQ ID NO: 17703 - DNA, 25 bp, Probe Sequence
tctactaacacaaccaaagtgaagg

SEQ ID NO: 17704 - DNA, 25 bp, Probe Sequence
ctgtctactaacacaaccaaagtga

SEQ ID NO: 17705 - DNA, 25 bp, Probe Sequence
ccagtgagattacagaggaagttat

SEQ ID NO: 17706 - DNA, 25 bp, Probe Sequence
tctcataggttgccaataatacact

SEQ ID NO: 17707 - DNA, 25 bp, Probe Sequence
ggttgccaataatacactaattcct

SEQ ID NO: 17708 - DNA, 25 bp, Probe Sequence
aggttgccaataatacactaattcc

SEQ ID NO: 17709 - DNA, 25 bp, Probe Sequence
cagaatctcataggttgccaataat

SEQ ID NO: 17710 - DNA, 25 bp, Probe Sequence
atctcataggttgccaataatacac

SEQ ID NO: 17711 - DNA, 25 bp, Probe Sequence
cagtgagattacagaggaagttatc

SEQ ID NO: 17712 - DNA, 25 bp, Probe Sequence
ctcataggttgccaataatacacta

SEQ ID NO: 17713 - DNA, 25 bp, Probe Sequence
aatctcataggttgccaataataca

SEQ ID NO: 17714 - DNA, 25 bp, Probe Sequence
tcataggttgccaataatacactaa

SEQ ID NO: 17715 - DNA, 25 bp, Probe Sequence
gaatctcataggttgccaataatac

SEQ ID NO: 17716 - DNA, 25 bp, Probe Sequence
agtgagattacagaggaagttatcc

SEQ ID NO: 17717 - DNA, 25 bp, Probe Sequence
gttgccaataatacactaattcctt

SEQ ID NO: 17718 - DNA, 25 bp, Probe Sequence
agaatctcataggttgccaataata

SEQ ID NO: 17719 - DNA, 25 bp, Probe Sequence
atgctgatggataacctatatgatt

SEQ ID NO: 17720 - DNA, 25 bp, Probe Sequence
aatgctgatggataacctatatgat

SEQ ID NO: 17721 - DNA, 25 bp, Probe Sequence
taatagcgggttactttcacataca

SEQ ID NO: 17722 - DNA, 25 bp, Probe Sequence
atctaatagcgggttactttcacat

SEQ ID NO: 17723 - DNA, 25 bp, Probe Sequence
ctaatagcgggttactttcacatac

SEQ ID NO: 17724 - DNA, 25 bp, Probe Sequence
tctaatagcgggttactttcacata

SEQ ID NO: 17725 - DNA, 25 bp, Probe Sequence
catctaatagcgggttactttcaca

SEQ ID NO: 17726 - DNA, 25 bp, Probe Sequence
ttcctctcactaaactttacccaaa

SEQ ID NO: 17727 - DNA, 25 bp, Probe Sequence
attcctctcactaaactttacccaa

SEQ ID NO: 17728 - DNA, 25 bp, Probe Sequence
aatagcgggttactttcacatacag

SEQ ID NO: 17729 - DNA, 25 bp, Probe Sequence
ctatgagtgtgtgtgtgtgtgtgtg

SEQ ID NO: 17730 - DNA, 25 bp, Probe Sequence
atgtcagtgtttgggaaattaaatc

SEQ ID NO: 17731 - DNA, 25 bp, Probe Sequence
ggatgatgattactggtctgtggac

SEQ ID NO: 17732 - DNA, 25 bp, Probe Sequence
aaatgtcagtgtttgggaaattaaa

SEQ ID NO: 17733 - DNA, 25 bp, Probe Sequence
cagataatctataactggcagggtg

SEQ ID NO: 17734 - DNA, 25 bp, Probe Sequence
aatgtcagtgtttgggaaattaaat

SEQ ID NO: 17735 - DNA, 25 bp, Probe Sequence
tgtcagtgtttgggaaattaaatcc

SEQ ID NO: 17736 - DNA, 25 bp, Probe Sequence
atatggacagttctatggaggcgac

SEQ ID NO: 17737 - DNA, 25 bp, Probe Sequence
gtcagtgtttgggaaattaaatcca

SEQ ID NO: 17738 - DNA, 25 bp, Probe Sequence
cttgtcctacctttccagccatatc

SEQ ID NO: 17739 - DNA, 25 bp, Probe Sequence
cttgacttctgctaagcggtacatc

SEQ ID NO: 17740 - DNA, 25 bp, Probe Sequence
ctgggatgatgattactggtctgtg

SEQ ID NO: 17741 - DNA, 25 bp, Probe Sequence
tatgagtgtgtgtgtgtgtgtgtgt

SEQ ID NO: 17742 - DNA, 25 bp, Probe Sequence
gcagataatctataactggcagggt

SEQ ID NO: 17743 - DNA, 25 bp, Probe Sequence
gtgtgtgtgtgtgtgttgtttcttt

SEQ ID NO: 17744 - DNA, 25 bp, Probe Sequence
gggttggaaaggattctcaagaaga

SEQ ID NO: 17745 - DNA, 25 bp, Probe Sequence
tttgtctgggttggaaaggattctc

SEQ ID NO: 17746 - DNA, 25 bp, Probe Sequence
tggaaaggattctcaagaagaagaa

SEQ ID NO: 17747 - DNA, 25 bp, Probe Sequence
ttggaaaggattctcaagaagaaga

SEQ ID NO: 17748 - DNA, 25 bp, Probe Sequence
gttggaaaggattctcaagaagaag

SEQ ID NO: 17749 - DNA, 25 bp, Probe Sequence
tgggttggaaaggattctcaagaag

SEQ ID NO: 17750 - DNA, 25 bp, Probe Sequence
ctgggttggaaaggattctcaagaa

SEQ ID NO: 17751 - DNA, 25 bp, Probe Sequence
ggttggaaaggattctcaagaagaa

SEQ ID NO: 17752 - DNA, 25 bp, Probe Sequence
gtctaaaatgtcagtgtttgggaaa

SEQ ID NO: 17753 - DNA, 25 bp, Probe Sequence
ctcgtcagtacagtctacagaattg

SEQ ID NO: 17754 - DNA, 25 bp, Probe Sequence
ctggcaagatcctctctaataatcc

SEQ ID NO: 17755 - DNA, 25 bp, Probe Sequence
gctggcaagatcctctctaataatc

SEQ ID NO: 17756 - DNA, 25 bp, Probe Sequence
cctcgtcagtacagtctacagaatt

SEQ ID NO: 17757 - DNA, 25 bp, Probe Sequence
tcgtcagtacagtctacagaattgg

SEQ ID NO: 17758 - DNA, 25 bp, Probe Sequence
atcctctgtatttgtcattcctctc

SEQ ID NO: 17759 - DNA, 25 bp, Probe Sequence
aaggaaagaaacatatttgaccagc

SEQ ID NO: 17760 - DNA, 25 bp, Probe Sequence
agctggcaagatcctctctaataat

SEQ ID NO: 17761 - DNA, 25 bp, Probe Sequence
tatcctcctaaagacctccaaagtt

SEQ ID NO: 17762 - DNA, 25 bp, Probe Sequence
ctctgtatttgtcattcctctccta

SEQ ID NO: 17763 - DNA, 25 bp, Probe Sequence
tgctcaagagaaggaaagaaacata

SEQ ID NO: 17764 - DNA, 25 bp, Probe Sequence
gattgctcaagagaaggaaagaaac

SEQ ID NO: 17765 - DNA, 25 bp, Probe Sequence
aagctggcaagatcctctctaataa

SEQ ID NO: 17766 - DNA, 25 bp, Probe Sequence
gctactgattgctcaagagaaggaa

SEQ ID NO: 17767 - DNA, 25 bp, Probe Sequence
accttctatcctctgtatttgtcat

SEQ ID NO: 17768 - DNA, 25 bp, Probe Sequence
ttgctcaagagaaggaaagaaacat

SEQ ID NO: 17769 - DNA, 25 bp, Probe Sequence
attgctcaagagaaggaaagaaaca

SEQ ID NO: 17770 - DNA, 25 bp, Probe Sequence
gctcaagagaaggaaagaaacatat

SEQ ID NO: 17771 - DNA, 25 bp, Probe Sequence
gtatcctcctaaagacctccaaagt

SEQ ID NO: 17772 - DNA, 25 bp, Probe Sequence
gaaagaaacatatttgaccagcgtg

SEQ ID NO: 17773 - DNA, 25 bp, Probe Sequence
gaagctggcaagatcctctctaata

SEQ ID NO: 17774 - DNA, 25 bp, Probe Sequence
tatcctctgtatttgtcattcctct

SEQ ID NO: 17775 - DNA, 25 bp, Probe Sequence
tctatcctctgtatttgtcattcct

SEQ ID NO: 17776 - DNA, 25 bp, Probe Sequence
atcctcctaaagacctccaaagttt

SEQ ID NO: 17777 - DNA, 25 bp, Probe Sequence
cttgtggatgaattaggaagaggta

SEQ ID NO: 17778 - DNA, 25 bp, Probe Sequence
cttatgagacaggctggcttattag

SEQ ID NO: 17779 - DNA, 25 bp, Probe Sequence
cattctaataggctgtgaggaagag

SEQ ID NO: 17780 - DNA, 25 bp, Probe Sequence
gagaagatgaatcagtcactacgat

SEQ ID NO: 17781 - DNA, 25 bp, Probe Sequence
ttgagaagatgaatcagtcactacg

SEQ ID NO: 17782 - DNA, 25 bp, Probe Sequence
ttgtggatgaattaggaagaggtac

SEQ ID NO: 17783 - DNA, 25 bp, Probe Sequence
gtggatgaattaggaagaggtactg

SEQ ID NO: 17784 - DNA, 25 bp, Probe Sequence
tgtggatgaattaggaagaggtact

SEQ ID NO: 17785 - DNA, 25 bp, Probe Sequence
attctaataggctgtgaggaagagg

SEQ ID NO: 17786 - DNA, 25 bp, Probe Sequence
tgagaagatgaatcagtcactacga

SEQ ID NO: 17787 - DNA, 25 bp, Probe Sequence
attatagactgactacattggaagc

SEQ ID NO: 17788 - DNA, 25 bp, Probe Sequence
gtgcttgtggatgaattaggaagag

SEQ ID NO: 17789 - DNA, 25 bp, Probe Sequence
gacattctaataggctgtgaggaag

SEQ ID NO: 17790 - DNA, 25 bp, Probe Sequence
acattctaataggctgtgaggaaga

SEQ ID NO: 17791 - DNA, 25 bp, Probe Sequence
atgacattctaataggctgtgagga

SEQ ID NO: 17792 - DNA, 25 bp, Probe Sequence
aatgacattctaataggctgtgagg

SEQ ID NO: 17793 - DNA, 25 bp, Probe Sequence
tgacattctaataggctgtgaggaa

SEQ ID NO: 17794 - DNA, 25 bp, Probe Sequence
tggatgaattaggaagaggtactgc

SEQ ID NO: 17795 - DNA, 25 bp, Probe Sequence
ttctaataggctgtgaggaagagga

SEQ ID NO: 17796 - DNA, 25 bp, Probe Sequence
ttctctggtgcttgtggatgaatta

SEQ ID NO: 17797 - DNA, 25 bp, Probe Sequence
gacttggtgcctcagacagaataat

SEQ ID NO: 17798 - DNA, 25 bp, Probe Sequence
ggaattatagactgactacattgga

SEQ ID NO: 17799 - DNA, 25 bp, Probe Sequence
aggaattatagactgactacattgg

SEQ ID NO: 17800 - DNA, 25 bp, Probe Sequence
gcttatgagacaggctggcttatta

SEQ ID NO: 17801 - DNA, 25 bp, Probe Sequence
acccagccaaacacataacaataaa

SEQ ID NO: 17802 - DNA, 25 bp, Probe Sequence
ggagtaagaatgtgtgtgcagaatt

SEQ ID NO: 17803 - DNA, 25 bp, Probe Sequence
ttatcagagtaacgagaagacaaac

SEQ ID NO: 17804 - DNA, 25 bp, Probe Sequence
tatcagagtaacgagaagacaaact

SEQ ID NO: 17805 - DNA, 25 bp, Probe Sequence
gatttatcagagtaacgagaagaca

SEQ ID NO: 17806 - DNA, 25 bp, Probe Sequence
cacccagccaaacacataacaataa

SEQ ID NO: 17807 - DNA, 25 bp, Probe Sequence
tttatcagagtaacgagaagacaaa

SEQ ID NO: 17808 - DNA, 25 bp, Probe Sequence
agatttatcagagtaacgagaagac

SEQ ID NO: 17809 - DNA, 25 bp, Probe Sequence
atttatcagagtaacgagaagacaa

SEQ ID NO: 17810 - DNA, 25 bp, Probe Sequence
tcgaattagtttgcacttcctattg

SEQ ID NO: 17811 - DNA, 25 bp, Probe Sequence
gagtaagaatgtgtgtgcagaattc

SEQ ID NO: 17812 - DNA, 25 bp, Probe Sequence
cgaattagtttgcacttcctattgg

SEQ ID NO: 17813 - DNA, 25 bp, Probe Sequence
cccagccaaacacataacaataaaa

SEQ ID NO: 17814 - DNA, 25 bp, Probe Sequence
atattaaacctctttccccagcaaa

SEQ ID NO: 17815 - DNA, 25 bp, Probe Sequence
tattaaacctctttccccagcaaaa

SEQ ID NO: 17816 - DNA, 25 bp, Probe Sequence
tagatttatcagagtaacgagaaga

SEQ ID NO: 17817 - DNA, 25 bp, Probe Sequence
gatattaaacctctttccccagcaa

SEQ ID NO: 17818 - DNA, 25 bp, Probe Sequence
tgtaccgggatattaaacctctttc

SEQ ID NO: 17819 - DNA, 25 bp, Probe Sequence
gtgtaccgggatattaaacctcttt

SEQ ID NO: 17820 - DNA, 25 bp, Probe Sequence
tttgctccctgattaaagtgccttc

SEQ ID NO: 17821 - DNA, 25 bp, Probe Sequence
gaattagtttgcacttcctattgga

SEQ ID NO: 17822 - DNA, 25 bp, Probe Sequence
gagtggtgtctagatttatcagagt

SEQ ID NO: 17823 - DNA, 25 bp, Probe Sequence
cagagtggtgtctagatttatcaga

SEQ ID NO: 17824 - DNA, 25 bp, Probe Sequence
aaccaaactctgtgtcagcatcttt

SEQ ID NO: 17825 - DNA, 25 bp, Probe Sequence
tgaatgagagagaggtagttaaggt

SEQ ID NO: 17826 - DNA, 25 bp, Probe Sequence
gctgaatgagagagaggtagttaag

SEQ ID NO: 17827 - DNA, 25 bp, Probe Sequence
ctgaatgagagagaggtagttaagg

SEQ ID NO: 17828 - DNA, 25 bp, Probe Sequence
gaatgagagagaggtagttaaggtt

SEQ ID NO: 17829 - DNA, 25 bp, Probe Sequence
ggctgaatgagagagaggtagttaa

SEQ ID NO: 17830 - DNA, 25 bp, Probe Sequence
gctcatagaagtcactgtaactgta

SEQ ID NO: 17831 - DNA, 25 bp, Probe Sequence
atgagtggtgtgactaattccttac

SEQ ID NO: 17832 - DNA, 25 bp, Probe Sequence
aatgagtggtgtgactaattcctta

SEQ ID NO: 17833 - DNA, 25 bp, Probe Sequence
tcatagaagtcactgtaactgtagt

SEQ ID NO: 17834 - DNA, 25 bp, Probe Sequence
tacacaactagcaccattcttgatg

SEQ ID NO: 17835 - DNA, 25 bp, Probe Sequence
gaagagaggcttgttggaatcaatt

SEQ ID NO: 17836 - DNA, 25 bp, Probe Sequence
aagagaggcttgttggaatcaattc

SEQ ID NO: 17837 - DNA, 25 bp, Probe Sequence
gtacacaactagcaccattcttgat

SEQ ID NO: 17838 - DNA, 25 bp, Probe Sequence
cattccaacaacgagaacagagatg

SEQ ID NO: 17839 - DNA, 25 bp, Probe Sequence
ctcatagaagtcactgtaactgtag

SEQ ID NO: 17840 - DNA, 25 bp, Probe Sequence
ctgtaagctcatagaagtcactgta

SEQ ID NO: 17841 - DNA, 25 bp, Probe Sequence
agaagagaggcttgttggaatcaat

SEQ ID NO: 17842 - DNA, 25 bp, Probe Sequence
tgtaagctcatagaagtcactgtaa

SEQ ID NO: 17843 - DNA, 25 bp, Probe Sequence
attcaagctggagaagaactacaat

SEQ ID NO: 17844 - DNA, 25 bp, Probe Sequence
aattcaagctggagaagaactacaa

SEQ ID NO: 17845 - DNA, 25 bp, Probe Sequence
gtaagctcatagaagtcactgtaac

SEQ ID NO: 17846 - DNA, 25 bp, Probe Sequence
aagctggagaagaactacaatctag

SEQ ID NO: 17847 - DNA, 25 bp, Probe Sequence
caagctggagaagaactacaatcta

SEQ ID NO: 17848 - DNA, 25 bp, Probe Sequence
gtagtgtgtctgctgttacctagag

SEQ ID NO: 17849 - DNA, 25 bp, Probe Sequence
cgagaacaggtgaatcagttgaatt

SEQ ID NO: 17850 - DNA, 25 bp, Probe Sequence
ggtgaatcagttgaatttgtgtgta

SEQ ID NO: 17851 - DNA, 25 bp, Probe Sequence
agaacaggtgaatcagttgaatttg

SEQ ID NO: 17852 - DNA, 25 bp, Probe Sequence
gagaacaggtgaatcagttgaattt

SEQ ID NO: 17853 - DNA, 25 bp, Probe Sequence
caggtgaatcagttgaatttgtgtg

SEQ ID NO: 17854 - DNA, 25 bp, Probe Sequence
atcagttgaatttgtgtgtaaacgg

SEQ ID NO: 17855 - DNA, 25 bp, Probe Sequence
aggtgaatcagttgaatttgtgtgt

SEQ ID NO: 17856 - DNA, 25 bp, Probe Sequence
aatcagttgaatttgtgtgtaaacg

SEQ ID NO: 17857 - DNA, 25 bp, Probe Sequence
gtgaatcagttgaatttgtgtgtaa

SEQ ID NO: 17858 - DNA, 25 bp, Probe Sequence
gaacaggtgaatcagttgaatttgt

SEQ ID NO: 17859 - DNA, 25 bp, Probe Sequence
aacaggtgaatcagttgaatttgtg

SEQ ID NO: 17860 - DNA, 25 bp, Probe Sequence
ttattcgagaacaggtgaatcagtt

SEQ ID NO: 17861 - DNA, 25 bp, Probe Sequence
tcgagaacaggtgaatcagttgaat

SEQ ID NO: 17862 - DNA, 25 bp, Probe Sequence
tattcgagaacaggtgaatcagttg

SEQ ID NO: 17863 - DNA, 25 bp, Probe Sequence
tgaatcagttgaatttgtgtgtaaa

SEQ ID NO: 17864 - DNA, 25 bp, Probe Sequence
acaggtgaatcagttgaatttgtgt

SEQ ID NO: 17865 - DNA, 25 bp, Probe Sequence
ttcgagaacaggtgaatcagttgaa

SEQ ID NO: 17866 - DNA, 25 bp, Probe Sequence
tcagttgaatttgtgtgtaaacggg

SEQ ID NO: 17867 - DNA, 25 bp, Probe Sequence
gaatcagttgaatttgtgtgtaaac

SEQ ID NO: 17868 - DNA, 25 bp, Probe Sequence
ctcaatgcaaagattctacaggaaa

SEQ ID NO: 17869 - DNA, 25 bp, Probe Sequence
attcgagaacaggtgaatcagttga

SEQ ID NO: 17870 - DNA, 25 bp, Probe Sequence
ccacctcaatgcaaagattctacag

SEQ ID NO: 17871 - DNA, 25 bp, Probe Sequence
tttattcgagaacaggtgaatcagt

SEQ ID NO: 17872 - DNA, 25 bp, Probe Sequence
ctttattcgagaacaggtgaatcag

SEQ ID NO: 17873 - DNA, 25 bp, Probe Sequence
cgtgtgctgttgataatatctctca

SEQ ID NO: 17874 - DNA, 25 bp, Probe Sequence
gcgtgtgctgttgataatatctctc

SEQ ID NO: 17875 - DNA, 25 bp, Probe Sequence
aatgtattatcaccagcagacactg

SEQ ID NO: 17876 - DNA, 25 bp, Probe Sequence
tgtgctgttgataatatctctcacc

SEQ ID NO: 17877 - DNA, 25 bp, Probe Sequence
gtgtgctgttgataatatctctcac

SEQ ID NO: 17878 - DNA, 25 bp, Probe Sequence
agttatttattggctggagatggaa

SEQ ID NO: 17879 - DNA, 25 bp, Probe Sequence
agagttatttattggctggagatgg

SEQ ID NO: 17880 - DNA, 25 bp, Probe Sequence
gagttatttattggctggagatgga

SEQ ID NO: 17881 - DNA, 25 bp, Probe Sequence
gttatttattggctggagatggaaa

SEQ ID NO: 17882 - DNA, 25 bp, Probe Sequence
ccctccctgtgtgaaatgtattatc

SEQ ID NO: 17883 - DNA, 25 bp, Probe Sequence
cctccctgtgtgaaatgtattatca

SEQ ID NO: 17884 - DNA, 25 bp, Probe Sequence
atagagcgtgtgctgttgataatat

SEQ ID NO: 17885 - DNA, 25 bp, Probe Sequence
aatagagcgtgtgctgttgataata

SEQ ID NO: 17886 - DNA, 25 bp, Probe Sequence
tagagcgtgtgctgttgataatatc

SEQ ID NO: 17887 - DNA, 25 bp, Probe Sequence
gaaatgtattatcaccagcagacac

SEQ ID NO: 17888 - DNA, 25 bp, Probe Sequence
aaatgtattatcaccagcagacact

SEQ ID NO: 17889 - DNA, 25 bp, Probe Sequence
tgaaatgtattatcaccagcagaca

SEQ ID NO: 17890 - DNA, 25 bp, Probe Sequence
cgtatgacctagtaaactttgtacc

SEQ ID NO: 17891 - DNA, 25 bp, Probe Sequence
aacagagttatttattggctggaga

SEQ ID NO: 17892 - DNA, 25 bp, Probe Sequence
caacagagttatttattggctggag

SEQ ID NO: 17893 - DNA, 25 bp, Probe Sequence
acagagttatttattggctggagat

SEQ ID NO: 17894 - DNA, 25 bp, Probe Sequence
cagagttatttattggctggagatg

SEQ ID NO: 17895 - DNA, 25 bp, Probe Sequence
gaatagagcgtgtgctgttgataat

SEQ ID NO: 17896 - DNA, 25 bp, Probe Sequence
tgtcgtatgacctagtaaactttgt

SEQ ID NO: 17897 - DNA, 25 bp, Probe Sequence
actaataaaccagttctgaaggtaa

SEQ ID NO: 17898 - DNA, 25 bp, Probe Sequence
tactaataaaccagttctgaaggta

SEQ ID NO: 17899 - DNA, 25 bp, Probe Sequence
ctaataaaccagttctgaaggtaaa

SEQ ID NO: 17900 - DNA, 25 bp, Probe Sequence
gcatctggagttcaggagtattcgg

SEQ ID NO: 17901 - DNA, 25 bp, Probe Sequence
ccgcatctggagttcaggagtattc

SEQ ID NO: 17902 - DNA, 25 bp, Probe Sequence
cgcatctggagttcaggagtattcg

SEQ ID NO: 17903 - DNA, 25 bp, Probe Sequence
catctggagttcaggagtattcggg

SEQ ID NO: 17904 - DNA, 25 bp, Probe Sequence
cggaagaaaacagcccaaagatgag

SEQ ID NO: 17905 - DNA, 25 bp, Probe Sequence
taataaaccagttctgaaggtaaaa

SEQ ID NO: 17906 - DNA, 25 bp, Probe Sequence
gagttcaggagtattcggggaaacc

SEQ ID NO: 17907 - DNA, 25 bp, Probe Sequence
ggagttcaggagtattcggggaaac

SEQ ID NO: 17908 - DNA, 25 bp, Probe Sequence
tggagttcaggagtattcggggaaa

SEQ ID NO: 17909 - DNA, 25 bp, Probe Sequence
gttcaggagtattcggggaaacctc

SEQ ID NO: 17910 - DNA, 25 bp, Probe Sequence
gagtattcggggaaacctcaacacc

SEQ ID NO: 17911 - DNA, 25 bp, Probe Sequence
ggagtattcggggaaacctcaacac

SEQ ID NO: 17912 - DNA, 25 bp, Probe Sequence
caggagtattcggggaaacctcaac

SEQ ID NO: 17913 - DNA, 25 bp, Probe Sequence
tcaggagtattcggggaaacctcaa

SEQ ID NO: 17914 - DNA, 25 bp, Probe Sequence
ttcaggagtattcggggaaacctca

SEQ ID NO: 17915 - DNA, 25 bp, Probe Sequence
agttcaggagtattcggggaaacct

SEQ ID NO: 17916 - DNA, 25 bp, Probe Sequence
atctggagttcaggagtattcgggg

SEQ ID NO: 17917 - DNA, 25 bp, Probe Sequence
ttaattcttcggtgacactggcatt

SEQ ID NO: 17918 - DNA, 25 bp, Probe Sequence
taattcttcggtgacactggcattg

SEQ ID NO: 17919 - DNA, 25 bp, Probe Sequence
gttaattcttcggtgacactggcat

SEQ ID NO: 17920 - DNA, 25 bp, Probe Sequence
ctctggcttgggttaattcttggat

SEQ ID NO: 17921 - DNA, 25 bp, Probe Sequence
cttccctccctatcactccatactg

SEQ ID NO: 17922 - DNA, 25 bp, Probe Sequence
ctggcttgggttaattcttggatga

SEQ ID NO: 17923 - DNA, 25 bp, Probe Sequence
tctggcttgggttaattcttggatg

SEQ ID NO: 17924 - DNA, 25 bp, Probe Sequence
tggcttgggttaattcttggatgac

SEQ ID NO: 17925 - DNA, 25 bp, Probe Sequence
gtcctctggcttgggttaattcttg

SEQ ID NO: 17926 - DNA, 25 bp, Probe Sequence
ccttccctccctatcactccatact

SEQ ID NO: 17927 - DNA, 25 bp, Probe Sequence
ggcttgggttaattcttggatgacg

SEQ ID NO: 17928 - DNA, 25 bp, Probe Sequence
ttttgagagtgtccgaagatgaagg

SEQ ID NO: 17929 - DNA, 25 bp, Probe Sequence
gcttgggttaattcttggatgacgt

SEQ ID NO: 17930 - DNA, 25 bp, Probe Sequence
cctctggcttgggttaattcttgga

SEQ ID NO: 17931 - DNA, 25 bp, Probe Sequence
tcctctggcttgggttaattcttgg

SEQ ID NO: 17932 - DNA, 25 bp, Probe Sequence
tttgagagtgtccgaagatgaaggc

SEQ ID NO: 17933 - DNA, 25 bp, Probe Sequence
cccttccctccctatcactccatac

SEQ ID NO: 17934 - DNA, 25 bp, Probe Sequence
tttctgcttcttctgttttgcccat

SEQ ID NO: 17935 - DNA, 25 bp, Probe Sequence
ttccctccctatcactccatactgg

SEQ ID NO: 17936 - DNA, 25 bp, Probe Sequence
caggtttctgcttcttctgttttgc

SEQ ID NO: 17937 - DNA, 25 bp, Probe Sequence
aggtttctgcttcttctgttttgcc

SEQ ID NO: 17938 - DNA, 25 bp, Probe Sequence
gatgagcttgaacctgtggtgtttc

SEQ ID NO: 17939 - DNA, 25 bp, Probe Sequence
gtttctgcttcttctgttttgccca

SEQ ID NO: 17940 - DNA, 25 bp, Probe Sequence
ttctgcttcttctgttttgcccatg

SEQ ID NO: 17941 - DNA, 25 bp, Probe Sequence
gacatacgagatccagttctctcag

SEQ ID NO: 17942 - DNA, 25 bp, Probe Sequence
gatccagttctctcaggacggtaag

SEQ ID NO: 17943 - DNA, 25 bp, Probe Sequence
cgaccttcaacctctttgtgttcag

SEQ ID NO: 17944 - DNA, 25 bp, Probe Sequence
agatccagttctctcaggacggtaa

SEQ ID NO: 17945 - DNA, 25 bp, Probe Sequence
atacgagatccagttctctcaggac

SEQ ID NO: 17946 - DNA, 25 bp, Probe Sequence
catacgagatccagttctctcagga

SEQ ID NO: 17947 - DNA, 25 bp, Probe Sequence
atcgaccttcaacctctttgtgttc

SEQ ID NO: 17948 - DNA, 25 bp, Probe Sequence
acatacgagatccagttctctcagg

SEQ ID NO: 17949 - DNA, 25 bp, Probe Sequence
ggacatacgagatccagttctctca

SEQ ID NO: 17950 - DNA, 25 bp, Probe Sequence
catcgaccttcaacctctttgtgtt

SEQ ID NO: 17951 - DNA, 25 bp, Probe Sequence
gaccttcaacctctttgtgttcagc

SEQ ID NO: 17952 - DNA, 25 bp, Probe Sequence
atccagttctctcaggacggtaagg

SEQ ID NO: 17953 - DNA, 25 bp, Probe Sequence
tcgaccttcaacctctttgtgttca

SEQ ID NO: 17954 - DNA, 25 bp, Probe Sequence
tggacatacgagatccagttctctc

SEQ ID NO: 17955 - DNA, 25 bp, Probe Sequence
gtggacatacgagatccagttctct

SEQ ID NO: 17956 - DNA, 25 bp, Probe Sequence
gagatccagttctctcaggacggta

SEQ ID NO: 17957 - DNA, 25 bp, Probe Sequence
tgtggacatacgagatccagttctc

SEQ ID NO: 17958 - DNA, 25 bp, Probe Sequence
ctgtggacatacgagatccagttct

SEQ ID NO: 17959 - DNA, 25 bp, Probe Sequence
ccatcgaccttcaacctctttgtgt

SEQ ID NO: 17960 - DNA, 25 bp, Probe Sequence
tacgagatccagttctctcaggacg

SEQ ID NO: 17961 - DNA, 25 bp, Probe Sequence
cctgtggacatacgagatccagttc

SEQ ID NO: 17962 - DNA, 25 bp, Probe Sequence
gaagccatcgaccttcaacctcttt

SEQ ID NO: 17963 - DNA, 25 bp, Probe Sequence
ctccttacctattccaacctaatga

SEQ ID NO: 17964 - DNA, 25 bp, Probe Sequence
tctccttacctattccaacctaatg

SEQ ID NO: 17965 - DNA, 25 bp, Probe Sequence
gtctccttacctattccaacctaat

SEQ ID NO: 17966 - DNA, 25 bp, Probe Sequence
ttatattggtggctgttggattctg

SEQ ID NO: 17967 - DNA, 25 bp, Probe Sequence
tccttacctattccaacctaatgat

SEQ ID NO: 17968 - DNA, 25 bp, Probe Sequence
tatattggtggctgttggattctga

SEQ ID NO: 17969 - DNA, 25 bp, Probe Sequence
cctattccaacctaatgatacatgc

SEQ ID NO: 17970 - DNA, 25 bp, Probe Sequence
gatgccaacaatgtgacttatgtct

SEQ ID NO: 17971 - DNA, 25 bp, Probe Sequence
tatggatgccaacaatgtgacttat

SEQ ID NO: 17972 - DNA, 25 bp, Probe Sequence
ccttacctattccaacctaatgata

SEQ ID NO: 17973 - DNA, 25 bp, Probe Sequence
atgccaacaatgtgacttatgtctg

SEQ ID NO: 17974 - DNA, 25 bp, Probe Sequence
cttagtctgtatggatgccaacaat

SEQ ID NO: 17975 - DNA, 25 bp, Probe Sequence
acctattccaacctaatgatacatg

SEQ ID NO: 17976 - DNA, 25 bp, Probe Sequence
ggtctccttacctattccaacctaa

SEQ ID NO: 17977 - DNA, 25 bp, Probe Sequence
atttcgctgatgtggtttgttatac

SEQ ID NO: 17978 - DNA, 25 bp, Probe Sequence
gatttcgctgatgtggtttgttata

SEQ ID NO: 17979 - DNA, 25 bp, Probe Sequence
ttagtctgtatggatgccaacaatg

SEQ ID NO: 17980 - DNA, 25 bp, Probe Sequence
tttatattggtggctgttggattct

SEQ ID NO: 17981 - DNA, 25 bp, Probe Sequence
atttatattggtggctgttggattc

SEQ ID NO: 17982 - DNA, 25 bp, Probe Sequence
gtatggatgccaacaatgtgactta

SEQ ID NO: 17983 - DNA, 25 bp, Probe Sequence
atgacatcgctttgattgaaatgaa

SEQ ID NO: 17984 - DNA, 25 bp, Probe Sequence
aatgacatcgctttgattgaaatga

SEQ ID NO: 17985 - DNA, 25 bp, Probe Sequence
gaatttatattggtggctgttggat

SEQ ID NO: 17986 - DNA, 25 bp, Probe Sequence
tgacatcgctttgattgaaatgaaa

SEQ ID NO: 17987 - DNA, 25 bp, Probe Sequence
aatgtcatctcaagtcaagtcactg

SEQ ID NO: 17988 - DNA, 25 bp, Probe Sequence
aatgtgttagattgctagattgcta

SEQ ID NO: 17989 - DNA, 25 bp, Probe Sequence
taatgtgttagattgctagattgct

SEQ ID NO: 17990 - DNA, 25 bp, Probe Sequence
gtgttagattgctagattgctaagg

SEQ ID NO: 17991 - DNA, 25 bp, Probe Sequence
tgttagattgctagattgctaagga

SEQ ID NO: 17992 - DNA, 25 bp, Probe Sequence
gttagattgctagattgctaaggag

SEQ ID NO: 17993 - DNA, 25 bp, Probe Sequence
tgtgttagattgctagattgctaag

SEQ ID NO: 17994 - DNA, 25 bp, Probe Sequence
atgtgttagattgctagattgctaa

SEQ ID NO: 17995 - DNA, 25 bp, Probe Sequence
ctaatgtgttagattgctagattgc

SEQ ID NO: 17996 - DNA, 25 bp, Probe Sequence
atgtcatctcaagtcaagtcactgg

SEQ ID NO: 17997 - DNA, 25 bp, Probe Sequence
ggtggtcaacaaagaaacaaagatg

SEQ ID NO: 17998 - DNA, 25 bp, Probe Sequence
gcattgtatatgtgaagcaaactct

SEQ ID NO: 17999 - DNA, 25 bp, Probe Sequence
agcattgtatatgtgaagcaaactc

SEQ ID NO: 18000 - DNA, 25 bp, Probe Sequence
cagcattgtatatgtgaagcaaact

SEQ ID NO: 18001 - DNA, 25 bp, Probe Sequence
aaatgtcatctcaagtcaagtcact

SEQ ID NO: 18002 - DNA, 25 bp, Probe Sequence
ttagattgctagattgctaaggagc

SEQ ID NO: 18003 - DNA, 25 bp, Probe Sequence
cctaatgtgttagattgctagattg

SEQ ID NO: 18004 - DNA, 25 bp, Probe Sequence
ttaaagtctcagtttcttgcttggg

SEQ ID NO: 18005 - DNA, 25 bp, Probe Sequence
tggtgtttagacttatggttgttaa

SEQ ID NO: 18006 - DNA, 25 bp, Probe Sequence
catctcaagtcaagtcactggtctg

SEQ ID NO: 18007 - DNA, 25 bp, Probe Sequence
gtcatctcaagtcaagtcactggtc

SEQ ID NO: 18008 - DNA, 25 bp, Probe Sequence
acagcattgtatatgtgaagcaaac

SEQ ID NO: 18009 - DNA, 25 bp, Probe Sequence
atggtgtttagacttatggttgtta

SEQ ID NO: 18010 - DNA, 25 bp, Probe Sequence
tatggtgtttagacttatggttgtt

SEQ ID NO: 18011 - DNA, 25 bp, Probe Sequence
attataggcagaacacaatggctaa

SEQ ID NO: 18012 - DNA, 25 bp, Probe Sequence
atattataggcagaacacaatggct

SEQ ID NO: 18013 - DNA, 25 bp, Probe Sequence
tattataggcagaacacaatggcta

SEQ ID NO: 18014 - DNA, 25 bp, Probe Sequence
acggagtgattaacagaggtctata

SEQ ID NO: 18015 - DNA, 25 bp, Probe Sequence
tacggagtgattaacagaggtctat

SEQ ID NO: 18016 - DNA, 25 bp, Probe Sequence
ttacggagtgattaacagaggtcta

SEQ ID NO: 18017 - DNA, 25 bp, Probe Sequence
catattataggcagaacacaatggc

SEQ ID NO: 18018 - DNA, 25 bp, Probe Sequence
cggagtgattaacagaggtctatat

SEQ ID NO: 18019 - DNA, 25 bp, Probe Sequence
aggtggttaatctgacatacattgc

SEQ ID NO: 18020 - DNA, 25 bp, Probe Sequence
gttcatctcaacctcaacactattg

SEQ ID NO: 18021 - DNA, 25 bp, Probe Sequence
tcatattataggcagaacacaatgg

SEQ ID NO: 18022 - DNA, 25 bp, Probe Sequence
catgactgtcttacctctactgaat

SEQ ID NO: 18023 - DNA, 25 bp, Probe Sequence
tctcatccaagtggtctgtagaatt

SEQ ID NO: 18024 - DNA, 25 bp, Probe Sequence
tgactgtcttacctctactgaatat

SEQ ID NO: 18025 - DNA, 25 bp, Probe Sequence
atgactgtcttacctctactgaata

SEQ ID NO: 18026 - DNA, 25 bp, Probe Sequence
acaggtggttaatctgacatacatt

SEQ ID NO: 18027 - DNA, 25 bp, Probe Sequence
caggtggttaatctgacatacattg

SEQ ID NO: 18028 - DNA, 25 bp, Probe Sequence
atgacatggtagagaagataaggtt

SEQ ID NO: 18029 - DNA, 25 bp, Probe Sequence
tacaggtggttaatctgacatacat

SEQ ID NO: 18030 - DNA, 25 bp, Probe Sequence
atacaggtggttaatctgacataca

SEQ ID NO: 18031 - DNA, 25 bp, Probe Sequence
tatgacatggtagagaagataaggt

SEQ ID NO: 18032 - DNA, 25 bp, Probe Sequence
aatacaggtggttaatctgacatac

SEQ ID NO: 18033 - DNA, 25 bp, Probe Sequence
ggacagctaagaagttattatggtt

SEQ ID NO: 18034 - DNA, 25 bp, Probe Sequence
ataggcagaacacaatggctaaata

SEQ ID NO: 18035 - DNA, 25 bp, Probe Sequence
tgcctgaattgagaattttgatttc

SEQ ID NO: 18036 - DNA, 25 bp, Probe Sequence
tttgatttcttaaagtgtgtttctt

SEQ ID NO: 18037 - DNA, 25 bp, Probe Sequence
tagagacagggtttcaccgtgttag

SEQ ID NO: 18038 - DNA, 25 bp, Probe Sequence
ttagtagagacagggtttcaccgtg

SEQ ID NO: 18039 - DNA, 25 bp, Probe Sequence
tgatttcttaaagtgtgtttctttc

SEQ ID NO: 18040 - DNA, 25 bp, Probe Sequence
gtagagacagggtttcaccgtgtta

SEQ ID NO: 18041 - DNA, 25 bp, Probe Sequence
gatttcttaaagtgtgtttctttct

SEQ ID NO: 18042 - DNA, 25 bp, Probe Sequence
ttttagtagagacagggtttcaccg

SEQ ID NO: 18043 - DNA, 25 bp, Probe Sequence
gcctgaattgagaattttgatttct

SEQ ID NO: 18044 - DNA, 25 bp, Probe Sequence
ttgatttcttaaagtgtgtttcttt

SEQ ID NO: 18045 - DNA, 25 bp, Probe Sequence
ttttgatttcttaaagtgtgtttct

SEQ ID NO: 18046 - DNA, 25 bp, Probe Sequence
tagtagagacagggtttcaccgtgt

SEQ ID NO: 18047 - DNA, 25 bp, Probe Sequence
ttcttaaagtgtgtttctttctaaa

SEQ ID NO: 18048 - DNA, 25 bp, Probe Sequence
tttcttaaagtgtgtttctttctaa

SEQ ID NO: 18049 - DNA, 25 bp, Probe Sequence
tcttaaagtgtgtttctttctaaat

SEQ ID NO: 18050 - DNA, 25 bp, Probe Sequence
atttcttaaagtgtgtttctttcta

SEQ ID NO: 18051 - DNA, 25 bp, Probe Sequence
cctgaattgagaattttgatttctt

SEQ ID NO: 18052 - DNA, 25 bp, Probe Sequence
attttgatttcttaaagtgtgtttc

SEQ ID NO: 18053 - DNA, 25 bp, Probe Sequence
gaattttgatttcttaaagtgtgtt

SEQ ID NO: 18054 - DNA, 25 bp, Probe Sequence
agaattttgatttcttaaagtgtgt

SEQ ID NO: 18055 - DNA, 25 bp, Probe Sequence
tgagaattttgatttcttaaagtgt

SEQ ID NO: 18056 - DNA, 25 bp, Probe Sequence
gagaattttgatttcttaaagtgtg

SEQ ID NO: 18057 - DNA, 25 bp, Probe Sequence
cactcatcactaacaaggtcatcat

SEQ ID NO: 18058 - DNA, 25 bp, Probe Sequence
ctcactcatcactaacaaggtcatc

SEQ ID NO: 18059 - DNA, 25 bp, Probe Sequence
tctcactcatcactaacaaggtcat

SEQ ID NO: 18060 - DNA, 25 bp, Probe Sequence
ttctcactcatcactaacaaggtca

SEQ ID NO: 18061 - DNA, 25 bp, Probe Sequence
cttctcactcatcactaacaaggtc

SEQ ID NO: 18062 - DNA, 25 bp, Probe Sequence
tcactcatcactaacaaggtcatca

SEQ ID NO: 18063 - DNA, 25 bp, Probe Sequence
atcactaacaaggtcatcatggatt

SEQ ID NO: 18064 - DNA, 25 bp, Probe Sequence
gattacaggtgtgagcatagtgaga

SEQ ID NO: 18065 - DNA, 25 bp, Probe Sequence
tcactaacaaggtcatcatggatta

SEQ ID NO: 18066 - DNA, 25 bp, Probe Sequence
catcactaacaaggtcatcatggat

SEQ ID NO: 18067 - DNA, 25 bp, Probe Sequence
actcatcactaacaaggtcatcatg

SEQ ID NO: 18068 - DNA, 25 bp, Probe Sequence
attacaggtgtgagcatagtgagac

SEQ ID NO: 18069 - DNA, 25 bp, Probe Sequence
ctcatcactaacaaggtcatcatgg

SEQ ID NO: 18070 - DNA, 25 bp, Probe Sequence
cactaacaaggtcatcatggattat

SEQ ID NO: 18071 - DNA, 25 bp, Probe Sequence
actaacaaggtcatcatggattatg

SEQ ID NO: 18072 - DNA, 25 bp, Probe Sequence
tcatcactaacaaggtcatcatgga

SEQ ID NO: 18073 - DNA, 25 bp, Probe Sequence
aacaaggactaatccaatacctctt

SEQ ID NO: 18074 - DNA, 25 bp, Probe Sequence
gcttctcactcatcactaacaaggt

SEQ ID NO: 18075 - DNA, 25 bp, Probe Sequence
ggattacaggtgtgagcatagtgag

SEQ ID NO: 18076 - DNA, 25 bp, Probe Sequence
tcagttctgccttatctaaatcacc

SEQ ID NO: 18077 - DNA, 25 bp, Probe Sequence
tgttctcattcctgttctttcttac

SEQ ID NO: 18078 - DNA, 25 bp, Probe Sequence
cagttctgccttatctaaatcacca

SEQ ID NO: 18079 - DNA, 25 bp, Probe Sequence
gctcagttctgccttatctaaatca

SEQ ID NO: 18080 - DNA, 25 bp, Probe Sequence
atctaaatcaccagagaccaaacaa

SEQ ID NO: 18081 - DNA, 25 bp, Probe Sequence
gaccatcattgacgacactatcttc

SEQ ID NO: 18082 - DNA, 25 bp, Probe Sequence
tagtgacagttgaggttgtagatac

SEQ ID NO: 18083 - DNA, 25 bp, Probe Sequence
acttatagccagtaatgtcaccgaa

SEQ ID NO: 18084 - DNA, 25 bp, Probe Sequence
gacagttgaggttgtagatacactt

SEQ ID NO: 18085 - DNA, 25 bp, Probe Sequence
ttagtgacagttgaggttgtagata

SEQ ID NO: 18086 - DNA, 25 bp, Probe Sequence
accatcattgacgacactatcttca

SEQ ID NO: 18087 - DNA, 25 bp, Probe Sequence
tgaccatcattgacgacactatctt

SEQ ID NO: 18088 - DNA, 25 bp, Probe Sequence
tgacagttgaggttgtagatacact

SEQ ID NO: 18089 - DNA, 25 bp, Probe Sequence
agtgacagttgaggttgtagataca

SEQ ID NO: 18090 - DNA, 25 bp, Probe Sequence
ttatgtcttctacgaacagtacctg

SEQ ID NO: 18091 - DNA, 25 bp, Probe Sequence
tatgtcttctacgaacagtacctga

SEQ ID NO: 18092 - DNA, 25 bp, Probe Sequence
ctgaccatcattgacgacactatct

SEQ ID NO: 18093 - DNA, 25 bp, Probe Sequence
gtgacagttgaggttgtagatacac

SEQ ID NO: 18094 - DNA, 25 bp, Probe Sequence
ttccagatattctacttcaggatgt

SEQ ID NO: 18095 - DNA, 25 bp, Probe Sequence
gacttatagccagtaatgtcaccga

SEQ ID NO: 18096 - DNA, 25 bp, Probe Sequence
ccatcccacaagttctataccatat

SEQ ID NO: 18097 - DNA, 25 bp, Probe Sequence
cttatagccagtaatgtcaccgaaa

SEQ ID NO: 18098 - DNA, 25 bp, Probe Sequence
agtaagccatcccacaagttctata

SEQ ID NO: 18099 - DNA, 25 bp, Probe Sequence
ttatagccagtaatgtcaccgaaac

SEQ ID NO: 18100 - DNA, 25 bp, Probe Sequence
gaaaggaagagatttaattgccagt

SEQ ID NO: 18101 - DNA, 25 bp, Probe Sequence
gtaagccatcccacaagttctatac

SEQ ID NO: 18102 - DNA, 25 bp, Probe Sequence
agaaaggaagagatttaattgccag

SEQ ID NO: 18103 - DNA, 25 bp, Probe Sequence
ccagatattctacttcaggatgtat

SEQ ID NO: 18104 - DNA, 25 bp, Probe Sequence
atgtcttctacgaacagtacctgac

SEQ ID NO: 18105 - DNA, 25 bp, Probe Sequence
tggcatctatattcagttgaagtgt

SEQ ID NO: 18106 - DNA, 25 bp, Probe Sequence
gcatctatatacagacagcctctaa

SEQ ID NO: 18107 - DNA, 25 bp, Probe Sequence
ggcatctatattcagttgaagtgtt

SEQ ID NO: 18108 - DNA, 25 bp, Probe Sequence
tagatggctggctgttgattatgaa

SEQ ID NO: 18109 - DNA, 25 bp, Probe Sequence
atggcatctatattcagttgaagtg

SEQ ID NO: 18110 - DNA, 25 bp, Probe Sequence
cttctgatgttgtaactgccgtaag

SEQ ID NO: 18111 - DNA, 25 bp, Probe Sequence
tgtaatggcatctatattcagttga

SEQ ID NO: 18112 - DNA, 25 bp, Probe Sequence
aatggcatctatattcagttgaagt

SEQ ID NO: 18113 - DNA, 25 bp, Probe Sequence
ttctgatgttgtaactgccgtaaga

SEQ ID NO: 18114 - DNA, 25 bp, Probe Sequence
ctacgacttcgagataatggacttc

SEQ ID NO: 18115 - DNA, 25 bp, Probe Sequence
gtagatggctggctgttgattatga

SEQ ID NO: 18116 - DNA, 25 bp, Probe Sequence
aagctaccttctgatgttgtaactg

SEQ ID NO: 18117 - DNA, 25 bp, Probe Sequence
aatgtcagacctgatatagtcctcc

SEQ ID NO: 18118 - DNA, 25 bp, Probe Sequence
gcctctaaatcaagtccttcagtat

SEQ ID NO: 18119 - DNA, 25 bp, Probe Sequence
tctgatgttgtaactgccgtaagag

SEQ ID NO: 18120 - DNA, 25 bp, Probe Sequence
tacgacttcgagataatggacttct

SEQ ID NO: 18121 - DNA, 25 bp, Probe Sequence
tctacgacttcgagataatggactt

SEQ ID NO: 18122 - DNA, 25 bp, Probe Sequence
gatgttgtaactgccgtaagaggaa

SEQ ID NO: 18123 - DNA, 25 bp, Probe Sequence
aacgctattgtcattaaagaaacca

SEQ ID NO: 18124 - DNA, 25 bp, Probe Sequence
tgcatctatatacagacagcctcta

SEQ ID NO: 18125 - DNA, 25 bp, Probe Sequence
cagggttgtattctatggatgtcat

SEQ ID NO: 18126 - DNA, 25 bp, Probe Sequence
agacctgatatagtcctccttggaa

SEQ ID NO: 18127 - DNA, 25 bp, Probe Sequence
agcctctaaatcaagtccttcagta

SEQ ID NO: 18128 - DNA, 25 bp, Probe Sequence
agggttgtattctatggatgtcatt

SEQ ID NO: 18129 - DNA, 25 bp, Probe Sequence
aatgaaagaatatgggttggaaagc

SEQ ID NO: 18130 - DNA, 25 bp, Probe Sequence
aagtgggaatgaaagaatatgggtt

SEQ ID NO: 18131 - DNA, 25 bp, Probe Sequence
aaagtgggaatgaaagaatatgggt

SEQ ID NO: 18132 - DNA, 25 bp, Probe Sequence
ggaatgaaagaatatgggttggaaa

SEQ ID NO: 18133 - DNA, 25 bp, Probe Sequence
tgtgtcttgctgtcatttatattcc

SEQ ID NO: 18134 - DNA, 25 bp, Probe Sequence
gtgtcttgctgtcatttatattcct

SEQ ID NO: 18135 - DNA, 25 bp, Probe Sequence
gggaatgaaagaatatgggttggaa

SEQ ID NO: 18136 - DNA, 25 bp, Probe Sequence
agtgggaatgaaagaatatgggttg

SEQ ID NO: 18137 - DNA, 25 bp, Probe Sequence
aagtcaacaataccattcttcaccc

SEQ ID NO: 18138 - DNA, 25 bp, Probe Sequence
tgtcttgctgtcatttatattcctt

SEQ ID NO: 18139 - DNA, 25 bp, Probe Sequence
atgaaagaatatgggttggaaagcc

SEQ ID NO: 18140 - DNA, 25 bp, Probe Sequence
gaagcatttctgatactttctgtca

SEQ ID NO: 18141 - DNA, 25 bp, Probe Sequence
gaatgaaagaatatgggttggaaag

SEQ ID NO: 18142 - DNA, 25 bp, Probe Sequence
acaataccattcttcacccagagat

SEQ ID NO: 18143 - DNA, 25 bp, Probe Sequence
gtcaacaataccattcttcacccag

SEQ ID NO: 18144 - DNA, 25 bp, Probe Sequence
gaaagaatatgggttggaaagcctc

SEQ ID NO: 18145 - DNA, 25 bp, Probe Sequence
gtgggaatgaaagaatatgggttgg

SEQ ID NO: 18146 - DNA, 25 bp, Probe Sequence
agcatttctgatactttctgtcaaa

SEQ ID NO: 18147 - DNA, 25 bp, Probe Sequence
aagcatttctgatactttctgtcaa

SEQ ID NO: 18148 - DNA, 25 bp, Probe Sequence
tgggaatgaaagaatatgggttgga

SEQ ID NO: 18149 - DNA, 25 bp, Probe Sequence
aacaataccattcttcacccagaga

SEQ ID NO: 18150 - DNA, 25 bp, Probe Sequence
caacaataccattcttcacccagag

SEQ ID NO: 18151 - DNA, 25 bp, Probe Sequence
caataccattcttcacccagagatc

SEQ ID NO: 18152 - DNA, 25 bp, Probe Sequence
agtcaacaataccattcttcaccca

SEQ ID NO: 18153 - DNA, 25 bp, Probe Sequence
gcaatgagaactataccactgactt

SEQ ID NO: 18154 - DNA, 25 bp, Probe Sequence
cctaataagtccacatcttctcagt

SEQ ID NO: 18155 - DNA, 25 bp, Probe Sequence
caatgagaactataccactgacttc

SEQ ID NO: 18156 - DNA, 25 bp, Probe Sequence
tgagaactataccactgacttcatt

SEQ ID NO: 18157 - DNA, 25 bp, Probe Sequence
aatgagaactataccactgacttca

SEQ ID NO: 18158 - DNA, 25 bp, Probe Sequence
tgaacagatcagtgccaatataact

SEQ ID NO: 18159 - DNA, 25 bp, Probe Sequence
ttgaacagatcagtgccaatataac

SEQ ID NO: 18160 - DNA, 25 bp, Probe Sequence
aataagtccacatcttctcagtgtt

SEQ ID NO: 18161 - DNA, 25 bp, Probe Sequence
ctgacacagcactcaatactatctg

SEQ ID NO: 18162 - DNA, 25 bp, Probe Sequence
taataagtccacatcttctcagtgt

SEQ ID NO: 18163 - DNA, 25 bp, Probe Sequence
ctaataagtccacatcttctcagtg

SEQ ID NO: 18164 - DNA, 25 bp, Probe Sequence
cagatcagtgccaatataactaagt

SEQ ID NO: 18165 - DNA, 25 bp, Probe Sequence
acagatcagtgccaatataactaag

SEQ ID NO: 18166 - DNA, 25 bp, Probe Sequence
gaacagatcagtgccaatataacta

SEQ ID NO: 18167 - DNA, 25 bp, Probe Sequence
tacgagattgacttggacacttcag

SEQ ID NO: 18168 - DNA, 25 bp, Probe Sequence
aacagatcagtgccaatataactaa

SEQ ID NO: 18169 - DNA, 25 bp, Probe Sequence
ccctaataagtccacatcttctcag

SEQ ID NO: 18170 - DNA, 25 bp, Probe Sequence
caccctaataagtccacatcttctc

SEQ ID NO: 18171 - DNA, 25 bp, Probe Sequence
gctactgctagatatcacttactca

SEQ ID NO: 18172 - DNA, 25 bp, Probe Sequence
tgctactgctagatatcacttactc

SEQ ID NO: 18173 - DNA, 25 bp, Probe Sequence
accctaataagtccacatcttctca

SEQ ID NO: 18174 - DNA, 25 bp, Probe Sequence
tgtttatcattgagactatgggtgg

SEQ ID NO: 18175 - DNA, 25 bp, Probe Sequence
ggtgtttatcattgagactatgggt

SEQ ID NO: 18176 - DNA, 25 bp, Probe Sequence
tcgggtgtttatcattgagactatg

SEQ ID NO: 18177 - DNA, 25 bp, Probe Sequence
atgagatgattattggtggtggaat

SEQ ID NO: 18178 - DNA, 25 bp, Probe Sequence
aatgagatgattattggtggtggaa

SEQ ID NO: 18179 - DNA, 25 bp, Probe Sequence
ctgagaagaatggtgtgaagattac

SEQ ID NO: 18180 - DNA, 25 bp, Probe Sequence
gctgagaagaatggtgtgaagatta

SEQ ID NO: 18181 - DNA, 25 bp, Probe Sequence
tgagatgattattggtggtggaatg

SEQ ID NO: 18182 - DNA, 25 bp, Probe Sequence
gagatgattattggtggtggaatgg

SEQ ID NO: 18183 - DNA, 25 bp, Probe Sequence
tgaagattaccttgcctgttgactt

SEQ ID NO: 18184 - DNA, 25 bp, Probe Sequence
agacaagatccagctcatcaataat

SEQ ID NO: 18185 - DNA, 25 bp, Probe Sequence
cagacaagatccagctcatcaataa

SEQ ID NO: 18186 - DNA, 25 bp, Probe Sequence
gaagaatggtgtgaagattaccttg

SEQ ID NO: 18187 - DNA, 25 bp, Probe Sequence
agaagaatggtgtgaagattacctt

SEQ ID NO: 18188 - DNA, 25 bp, Probe Sequence
gagaagaatggtgtgaagattacct

SEQ ID NO: 18189 - DNA, 25 bp, Probe Sequence
tgagaagaatggtgtgaagattacc

SEQ ID NO: 18190 - DNA, 25 bp, Probe Sequence
atgattattggtggtggaatggctt

SEQ ID NO: 18191 - DNA, 25 bp, Probe Sequence
aagatccagctcatcaataatatgc

SEQ ID NO: 18192 - DNA, 25 bp, Probe Sequence
ttgatgaagaaggagctgaactact

SEQ ID NO: 18193 - DNA, 25 bp, Probe Sequence
gacaagatccagctcatcaataata

SEQ ID NO: 18194 - DNA, 25 bp, Probe Sequence
cttccatgtcaagattcagctagtg

SEQ ID NO: 18195 - DNA, 25 bp, Probe Sequence
tgatgaagaaggagctgaactactt

SEQ ID NO: 18196 - DNA, 25 bp, Probe Sequence
gctcatcaataatatgctggacaaa

SEQ ID NO: 18197 - DNA, 25 bp, Probe Sequence
gtcaatgagatgattattggtggtg

SEQ ID NO: 18198 - DNA, 25 bp, Probe Sequence
agtcaatgagatgattattggtggt

SEQ ID NO: 18199 - DNA, 25 bp, Probe Sequence
aagaatggtgtgaagattaccttgc

SEQ ID NO: 18200 - DNA, 25 bp, Probe Sequence
gtgaagattaccttgcctgttgact

SEQ ID NO: 18201 - DNA, 25 bp, Probe Sequence
ttactggaacctatgatctgaagag

SEQ ID NO: 18202 - DNA, 25 bp, Probe Sequence
attactggaacctatgatctgaaga

SEQ ID NO: 18203 - DNA, 25 bp, Probe Sequence
tactggaacctatgatctgaagagc

SEQ ID NO: 18204 - DNA, 25 bp, Probe Sequence
cattactggaacctatgatctgaag

SEQ ID NO: 18205 - DNA, 25 bp, Probe Sequence
catttacccaaactgtccattactg

SEQ ID NO: 18206 - DNA, 25 bp, Probe Sequence
ccattactggaacctatgatctgaa

SEQ ID NO: 18207 - DNA, 25 bp, Probe Sequence
tggatgacattaaagaagggttgag

SEQ ID NO: 18208 - DNA, 25 bp, Probe Sequence
ctggatgacattaaagaagggttga

SEQ ID NO: 18209 - DNA, 25 bp, Probe Sequence
aaccctttgtcttcttaatgattga

SEQ ID NO: 18210 - DNA, 25 bp, Probe Sequence
accctttgtcttcttaatgattgaa

SEQ ID NO: 18211 - DNA, 25 bp, Probe Sequence
acatttacccaaactgtccattact

SEQ ID NO: 18212 - DNA, 25 bp, Probe Sequence
ccctttgtcttcttaatgattgaac

SEQ ID NO: 18213 - DNA, 25 bp, Probe Sequence
gtttaacatccagcactgtaagaag

SEQ ID NO: 18214 - DNA, 25 bp, Probe Sequence
cttacatttacccaaactgtccatt

SEQ ID NO: 18215 - DNA, 25 bp, Probe Sequence
ggatgacattaaagaagggttgagc

SEQ ID NO: 18216 - DNA, 25 bp, Probe Sequence
aaaccctttgtcttcttaatgattg

SEQ ID NO: 18217 - DNA, 25 bp, Probe Sequence
tacatttacccaaactgtccattac

SEQ ID NO: 18218 - DNA, 25 bp, Probe Sequence
gcttacatttacccaaactgtccat

SEQ ID NO: 18219 - DNA, 25 bp, Probe Sequence
tttaacatccagcactgtaagaagc

SEQ ID NO: 18220 - DNA, 25 bp, Probe Sequence
tgtttaacatccagcactgtaagaa

SEQ ID NO: 18221 - DNA, 25 bp, Probe Sequence
ttacatttacccaaactgtccatta

SEQ ID NO: 18222 - DNA, 25 bp, Probe Sequence
gatgacattaaagaagggttgagct

SEQ ID NO: 18223 - DNA, 25 bp, Probe Sequence
atgacattaaagaagggttgagctg

SEQ ID NO: 18224 - DNA, 25 bp, Probe Sequence
cctggatgacattaaagaagggttg

SEQ ID NO: 18225 - DNA, 25 bp, Probe Sequence
cctaagttattacctctccagttcc

SEQ ID NO: 18226 - DNA, 25 bp, Probe Sequence
agttattacctctccagttcctacc

SEQ ID NO: 18227 - DNA, 25 bp, Probe Sequence
aagttattacctctccagttcctac

SEQ ID NO: 18228 - DNA, 25 bp, Probe Sequence
ctaagttattacctctccagttcct

SEQ ID NO: 18229 - DNA, 25 bp, Probe Sequence
tattacctctccagttcctaccgta

SEQ ID NO: 18230 - DNA, 25 bp, Probe Sequence
gttattacctctccagttcctaccg

SEQ ID NO: 18231 - DNA, 25 bp, Probe Sequence
taagttattacctctccagttccta

SEQ ID NO: 18232 - DNA, 25 bp, Probe Sequence
ttattacctctccagttcctaccgt

SEQ ID NO: 18233 - DNA, 25 bp, Probe Sequence
ccctaagttattacctctccagttc

SEQ ID NO: 18234 - DNA, 25 bp, Probe Sequence
gcctctgagatgctaatttatttcc

SEQ ID NO: 18235 - DNA, 25 bp, Probe Sequence
tgtgtgtctcgtgtcagtaatttat

SEQ ID NO: 18236 - DNA, 25 bp, Probe Sequence
cctctgagatgctaatttatttccc

SEQ ID NO: 18237 - DNA, 25 bp, Probe Sequence
ctcgtgtcagtaatttatatggtgt

SEQ ID NO: 18238 - DNA, 25 bp, Probe Sequence
gtgtgtctcgtgtcagtaatttata

SEQ ID NO: 18239 - DNA, 25 bp, Probe Sequence
attacctctccagttcctaccgtac

SEQ ID NO: 18240 - DNA, 25 bp, Probe Sequence
tctcgtgtcagtaatttatatggtg

SEQ ID NO: 18241 - DNA, 25 bp, Probe Sequence
gtctcgtgtcagtaatttatatggt

SEQ ID NO: 18242 - DNA, 25 bp, Probe Sequence
tgtctcgtgtcagtaatttatatgg

SEQ ID NO: 18243 - DNA, 25 bp, Probe Sequence
tcgtgtcagtaatttatatggtgtt

SEQ ID NO: 18244 - DNA, 25 bp, Probe Sequence
ctgtgtgtctcgtgtcagtaattta

SEQ ID NO: 18245 - DNA, 25 bp, Probe Sequence
tgtgtctcgtgtcagtaatttatat

SEQ ID NO: 18246 - DNA, 25 bp, Probe Sequence
gtgtctcgtgtcagtaatttatatg

SEQ ID NO: 18247 - DNA, 25 bp, Probe Sequence
ttacctctccagttcctaccgtact

SEQ ID NO: 18248 - DNA, 25 bp, Probe Sequence
cgtgtcagtaatttatatggtgtta

SEQ ID NO: 18249 - DNA, 25 bp, Probe Sequence
aagtcaactgtgtgagtgtgataag

SEQ ID NO: 18250 - DNA, 25 bp, Probe Sequence
gaagtcaactgtgtgagtgtgataa

SEQ ID NO: 18251 - DNA, 25 bp, Probe Sequence
agaagtcaactgtgtgagtgtgata

SEQ ID NO: 18252 - DNA, 25 bp, Probe Sequence
agtcaactgtgtgagtgtgataagg

SEQ ID NO: 18253 - DNA, 25 bp, Probe Sequence
gctagaaacaagacgacctacaata

SEQ ID NO: 18254 - DNA, 25 bp, Probe Sequence
gggtctcttctgaataaagcaatta

SEQ ID NO: 18255 - DNA, 25 bp, Probe Sequence
tctcttctgaataaagcaattagca

SEQ ID NO: 18256 - DNA, 25 bp, Probe Sequence
cagaatgagacatccagcagatttc

SEQ ID NO: 18257 - DNA, 25 bp, Probe Sequence
tagaaacaagacgacctacaataaa

SEQ ID NO: 18258 - DNA, 25 bp, Probe Sequence
ctagaaacaagacgacctacaataa

SEQ ID NO: 18259 - DNA, 25 bp, Probe Sequence
gtctcttctgaataaagcaattagc

SEQ ID NO: 18260 - DNA, 25 bp, Probe Sequence
gatacaactctggagtcctctgaga

SEQ ID NO: 18261 - DNA, 25 bp, Probe Sequence
ctatacccacccagaatgagacatc

SEQ ID NO: 18262 - DNA, 25 bp, Probe Sequence
cagaagtcaactgtgtgagtgtgat

SEQ ID NO: 18263 - DNA, 25 bp, Probe Sequence
tgctagaaacaagacgacctacaat

SEQ ID NO: 18264 - DNA, 25 bp, Probe Sequence
ctcttctgaataaagcaattagcaa

SEQ ID NO: 18265 - DNA, 25 bp, Probe Sequence
tctatacccacccagaatgagacat

SEQ ID NO: 18266 - DNA, 25 bp, Probe Sequence
ctgaatttccctctctcataccctc

SEQ ID NO: 18267 - DNA, 25 bp, Probe Sequence
ggtctcttctgaataaagcaattag

SEQ ID NO: 18268 - DNA, 25 bp, Probe Sequence
catttgtcacccaagaactcttacc

SEQ ID NO: 18269 - DNA, 25 bp, Probe Sequence
agtgctgaatttccctctctcatac

SEQ ID NO: 18270 - DNA, 25 bp, Probe Sequence
aatttggtgaatttccacagaatga

SEQ ID NO: 18271 - DNA, 25 bp, Probe Sequence
cagtgctgaatttccctctctcata

SEQ ID NO: 18272 - DNA, 25 bp, Probe Sequence
caccaaatttctgagctacaagttt

SEQ ID NO: 18273 - DNA, 25 bp, Probe Sequence
ggattctgtagtaaggtgacatagc

SEQ ID NO: 18274 - DNA, 25 bp, Probe Sequence
ttctgactgctggattctgtagtaa

SEQ ID NO: 18275 - DNA, 25 bp, Probe Sequence
tggattctgtagtaaggtgacatag

SEQ ID NO: 18276 - DNA, 25 bp, Probe Sequence
ctggattctgtagtaaggtgacata

SEQ ID NO: 18277 - DNA, 25 bp, Probe Sequence
tctgactgctggattctgtagtaag

SEQ ID NO: 18278 - DNA, 25 bp, Probe Sequence
ctgctggattctgtagtaaggtgac

SEQ ID NO: 18279 - DNA, 25 bp, Probe Sequence
ggattgagggagtgatgagaaataa

SEQ ID NO: 18280 - DNA, 25 bp, Probe Sequence
aataagcctggtgtctatgttcgtg

SEQ ID NO: 18281 - DNA, 25 bp, Probe Sequence
caataagcctggtgtctatgttcgt

SEQ ID NO: 18282 - DNA, 25 bp, Probe Sequence
gaagaagactgtatgtttgggaatg

SEQ ID NO: 18283 - DNA, 25 bp, Probe Sequence
gctggattctgtagtaaggtgacat

SEQ ID NO: 18284 - DNA, 25 bp, Probe Sequence
ctgactgctggattctgtagtaagg

SEQ ID NO: 18285 - DNA, 25 bp, Probe Sequence
tccctgtgattgagaataaagtgtg

SEQ ID NO: 18286 - DNA, 25 bp, Probe Sequence
agatgtagagactccttccgaagaa

SEQ ID NO: 18287 - DNA, 25 bp, Probe Sequence
tggattgagggagtgatgagaaata

SEQ ID NO: 18288 - DNA, 25 bp, Probe Sequence
aagaagactgtatgtttgggaatgg

SEQ ID NO: 18289 - DNA, 25 bp, Probe Sequence
gattctgtagtaaggtgacatagct

SEQ ID NO: 18290 - DNA, 25 bp, Probe Sequence
gactgctggattctgtagtaaggtg

SEQ ID NO: 18291 - DNA, 25 bp, Probe Sequence
tgtctatgttcgtgtttcaaggttt

SEQ ID NO: 18292 - DNA, 25 bp, Probe Sequence
cgaagaagactgtatgtttgggaat

SEQ ID NO: 18293 - DNA, 25 bp, Probe Sequence
aatcgctatgagtttctgaatggaa

SEQ ID NO: 18294 - DNA, 25 bp, Probe Sequence
gctatgagtttctgaatggaagagt

SEQ ID NO: 18295 - DNA, 25 bp, Probe Sequence
atcgctatgagtttctgaatggaag

SEQ ID NO: 18296 - DNA, 25 bp, Probe Sequence
caatcgctatgagtttctgaatgga

SEQ ID NO: 18297 - DNA, 25 bp, Probe Sequence
caaagagattcaaagagattcctgc

SEQ ID NO: 18298 - DNA, 25 bp, Probe Sequence
tcaaagagattcaaagagattcctg

SEQ ID NO: 18299 - DNA, 25 bp, Probe Sequence
actggagagtttctattaaaggtca

SEQ ID NO: 18300 - DNA, 25 bp, Probe Sequence
atcaaagagattcaaagagattcct

SEQ ID NO: 18301 - DNA, 25 bp, Probe Sequence
ctggagagtttctattaaaggtcat

SEQ ID NO: 18302 - DNA, 25 bp, Probe Sequence
tggagagtttctattaaaggtcatt

SEQ ID NO: 18303 - DNA, 25 bp, Probe Sequence
aaagagattcaaagagattcctgca

SEQ ID NO: 18304 - DNA, 25 bp, Probe Sequence
accaatcaaagagattcaaagagat

SEQ ID NO: 18305 - DNA, 25 bp, Probe Sequence
caccattcacttttactgctttgta

SEQ ID NO: 18306 - DNA, 25 bp, Probe Sequence
accattcacttttactgctttgtag

SEQ ID NO: 18307 - DNA, 25 bp, Probe Sequence
ggagagtttctattaaaggtcattt

SEQ ID NO: 18308 - DNA, 25 bp, Probe Sequence
gacaccattcacttttactgctttg

SEQ ID NO: 18309 - DNA, 25 bp, Probe Sequence
agacaccattcacttttactgcttt

SEQ ID NO: 18310 - DNA, 25 bp, Probe Sequence
ccaatcaaagagattcaaagagatt

SEQ ID NO: 18311 - DNA, 25 bp, Probe Sequence
gagacaccattcacttttactgctt

SEQ ID NO: 18312 - DNA, 25 bp, Probe Sequence
ccattcacttttactgctttgtagt

SEQ ID NO: 18313 - DNA, 25 bp, Probe Sequence
aatcaaagagattcaaagagattcc

SEQ ID NO: 18314 - DNA, 25 bp, Probe Sequence
tttactgctttgtagtgactcgtgc

SEQ ID NO: 18315 - DNA, 25 bp, Probe Sequence
cttttactgctttgtagtgactcgt

SEQ ID NO: 18316 - DNA, 25 bp, Probe Sequence
acttttactgctttgtagtgactcg

SEQ ID NO: 18317 - DNA, 25 bp, Probe Sequence
ttttactgctttgtagtgactcgtg

SEQ ID NO: 18318 - DNA, 25 bp, Probe Sequence
aactggagagtttctattaaaggtc

SEQ ID NO: 18319 - DNA, 25 bp, Probe Sequence
ttctgcttcaagttttggggtaaag

SEQ ID NO: 18320 - DNA, 25 bp, Probe Sequence
cttctgcttcaagttttggggtaaa

SEQ ID NO: 18321 - DNA, 25 bp, Probe Sequence
ggtaacagtataatccagctcagta

SEQ ID NO: 18322 - DNA, 25 bp, Probe Sequence
gtaacagtataatccagctcagtat

SEQ ID NO: 18323 - DNA, 25 bp, Probe Sequence
cagaaataagataactccatgtcgc

SEQ ID NO: 18324 - DNA, 25 bp, Probe Sequence
atggtaacagtataatccagctcag

SEQ ID NO: 18325 - DNA, 25 bp, Probe Sequence
acatggtaacagtataatccagctc

SEQ ID NO: 18326 - DNA, 25 bp, Probe Sequence
catggtaacagtataatccagctca

SEQ ID NO: 18327 - DNA, 25 bp, Probe Sequence
ttacatggtaacagtataatccagc

SEQ ID NO: 18328 - DNA, 25 bp, Probe Sequence
acccagaaataagataactccatgt

SEQ ID NO: 18329 - DNA, 25 bp, Probe Sequence
agaaataagataactccatgtcgcc

SEQ ID NO: 18330 - DNA, 25 bp, Probe Sequence
ccagaaataagataactccatgtcg

SEQ ID NO: 18331 - DNA, 25 bp, Probe Sequence
cccagaaataagataactccatgtc

SEQ ID NO: 18332 - DNA, 25 bp, Probe Sequence
ggaaaccagaaagcagacaaagaaa

SEQ ID NO: 18333 - DNA, 25 bp, Probe Sequence
tggtaacagtataatccagctcagt

SEQ ID NO: 18334 - DNA, 25 bp, Probe Sequence
tacatggtaacagtataatccagct

SEQ ID NO: 18335 - DNA, 25 bp, Probe Sequence
gaaataagataactccatgtcgccc

SEQ ID NO: 18336 - DNA, 25 bp, Probe Sequence
tacccagaaataagataactccatg

SEQ ID NO: 18337 - DNA, 25 bp, Probe Sequence
gctaaggaactttacatggtaacag

SEQ ID NO: 18338 - DNA, 25 bp, Probe Sequence
ctaaggaactttacatggtaacagt

SEQ ID NO: 18339 - DNA, 25 bp, Probe Sequence
agctaaggaactttacatggtaaca

SEQ ID NO: 18340 - DNA, 25 bp, Probe Sequence
gaaaccagaaagcagacaaagaaaa

SEQ ID NO: 18341 - DNA, 25 bp, Probe Sequence
cttcatcactcccacattttcctta

SEQ ID NO: 18342 - DNA, 25 bp, Probe Sequence
ttcatcactcccacattttccttac

SEQ ID NO: 18343 - DNA, 25 bp, Probe Sequence
aaggaactttacatggtaacagtat

SEQ ID NO: 18344 - DNA, 25 bp, Probe Sequence
gggaaaccagaaagcagacaaagaa

SEQ ID NO: 18345 - DNA, 25 bp, Probe Sequence
ggacggactgtaattgatagattga

SEQ ID NO: 18346 - DNA, 25 bp, Probe Sequence
tggacggactgtaattgatagattg

SEQ ID NO: 18347 - DNA, 25 bp, Probe Sequence
gtggacggactgtaattgatagatt

SEQ ID NO: 18348 - DNA, 25 bp, Probe Sequence
gacggactgtaattgatagattgat

SEQ ID NO: 18349 - DNA, 25 bp, Probe Sequence
acggactgtaattgatagattgatt

SEQ ID NO: 18350 - DNA, 25 bp, Probe Sequence
ggtggacggactgtaattgatagat

SEQ ID NO: 18351 - DNA, 25 bp, Probe Sequence
gtggtggacggactgtaattgatag

SEQ ID NO: 18352 - DNA, 25 bp, Probe Sequence
tggtggacggactgtaattgataga

SEQ ID NO: 18353 - DNA, 25 bp, Probe Sequence
cggactgtaattgatagattgatta

SEQ ID NO: 18354 - DNA, 25 bp, Probe Sequence
atggaattaaattgggtacagcttc

SEQ ID NO: 18355 - DNA, 25 bp, Probe Sequence
attatggaattaaattgggtacagc

SEQ ID NO: 18356 - DNA, 25 bp, Probe Sequence
tatggaattaaattgggtacagctt

SEQ ID NO: 18357 - DNA, 25 bp, Probe Sequence
ttatggaattaaattgggtacagct

SEQ ID NO: 18358 - DNA, 25 bp, Probe Sequence
ggtggtggacggactgtaattgata

SEQ ID NO: 18359 - DNA, 25 bp, Probe Sequence
ctgaacaagcagccatactgatgac

SEQ ID NO: 18360 - DNA, 25 bp, Probe Sequence
cttctctgcttaaagaatgcccttt

SEQ ID NO: 18361 - DNA, 25 bp, Probe Sequence
ggagagtcctcttctaagcaaagtg

SEQ ID NO: 18362 - DNA, 25 bp, Probe Sequence
ttcctgaacaagcagccatactgat

SEQ ID NO: 18363 - DNA, 25 bp, Probe Sequence
tgattatggaattaaattgggtaca

SEQ ID NO: 18364 - DNA, 25 bp, Probe Sequence
tgcttaaagaatgccctttatgatg

SEQ ID NO: 18365 - DNA, 25 bp, Probe Sequence
ctctgcttaaagaatgccctttatg

SEQ ID NO: 18366 - DNA, 25 bp, Probe Sequence
tctctgcttaaagaatgccctttat

SEQ ID NO: 18367 - DNA, 25 bp, Probe Sequence
ctgcttaaagaatgccctttatgat

SEQ ID NO: 18368 - DNA, 25 bp, Probe Sequence
ttctctgcttaaagaatgcccttta

SEQ ID NO: 18369 - DNA, 25 bp, Probe Sequence
ttagcagagaataggaggaaccata

SEQ ID NO: 18370 - DNA, 25 bp, Probe Sequence
tagcagagaataggaggaaccatat

SEQ ID NO: 18371 - DNA, 25 bp, Probe Sequence
agatgaggattaagagcaagaagtt

SEQ ID NO: 18372 - DNA, 25 bp, Probe Sequence
aagatgaggattaagagcaagaagt

SEQ ID NO: 18373 - DNA, 25 bp, Probe Sequence
gatgaggattaagagcaagaagttg

SEQ ID NO: 18374 - DNA, 25 bp, Probe Sequence
atgaggattaagagcaagaagttgg

SEQ ID NO: 18375 - DNA, 25 bp, Probe Sequence
accatttcctacactatttgagcat

SEQ ID NO: 18376 - DNA, 25 bp, Probe Sequence
taccatttcctacactatttgagca

SEQ ID NO: 18377 - DNA, 25 bp, Probe Sequence
ttcttcctattccattctcgaccaa

SEQ ID NO: 18378 - DNA, 25 bp, Probe Sequence
ctaccatttcctacactatttgagc

SEQ ID NO: 18379 - DNA, 25 bp, Probe Sequence
aatactacacactccctttctcctt

SEQ ID NO: 18380 - DNA, 25 bp, Probe Sequence
aaatactacacactccctttctcct

SEQ ID NO: 18381 - DNA, 25 bp, Probe Sequence
aacctgccctttcttaatatgacta

SEQ ID NO: 18382 - DNA, 25 bp, Probe Sequence
tttagcagagaataggaggaaccat

SEQ ID NO: 18383 - DNA, 25 bp, Probe Sequence
aacacatttaccagcatactccaaa

SEQ ID NO: 18384 - DNA, 25 bp, Probe Sequence
aaacacatttaccagcatactccaa

SEQ ID NO: 18385 - DNA, 25 bp, Probe Sequence
caacctgccctttcttaatatgact

SEQ ID NO: 18386 - DNA, 25 bp, Probe Sequence
atactacacactccctttctccttc

SEQ ID NO: 18387 - DNA, 25 bp, Probe Sequence
acctgccctttcttaatatgactag

SEQ ID NO: 18388 - DNA, 25 bp, Probe Sequence
cacatttaccagcatactccaaact

SEQ ID NO: 18389 - DNA, 25 bp, Probe Sequence
aaagatgaggattaagagcaagaag

SEQ ID NO: 18390 - DNA, 25 bp, Probe Sequence
atactccaaactgtttctgatgtgt

SEQ ID NO: 18391 - DNA, 25 bp, Probe Sequence
ctttagcagagaataggaggaacca

SEQ ID NO: 18392 - DNA, 25 bp, Probe Sequence
acacatttaccagcatactccaaac

SEQ ID NO: 18393 - DNA, 25 bp, Probe Sequence
tgtcacctagcagatatgtattact

SEQ ID NO: 18394 - DNA, 25 bp, Probe Sequence
ccagaattaggtcaagttcatagtt

SEQ ID NO: 18395 - DNA, 25 bp, Probe Sequence
tgatattgtcacctagcagatatgt

SEQ ID NO: 18396 - DNA, 25 bp, Probe Sequence
ttgtcacctagcagatatgtattac

SEQ ID NO: 18397 - DNA, 25 bp, Probe Sequence
ttgatattgtcacctagcagatatg

SEQ ID NO: 18398 - DNA, 25 bp, Probe Sequence
gtcacctagcagatatgtattactt

SEQ ID NO: 18399 - DNA, 25 bp, Probe Sequence
accagaattaggtcaagttcatagt

SEQ ID NO: 18400 - DNA, 25 bp, Probe Sequence
atattgcataggacagacttaggag

SEQ ID NO: 18401 - DNA, 25 bp, Probe Sequence
aggttggagatgacagaaatatgat

SEQ ID NO: 18402 - DNA, 25 bp, Probe Sequence
gatattgtcacctagcagatatgta

SEQ ID NO: 18403 - DNA, 25 bp, Probe Sequence
tatctgactgaaattaaacgagcga

SEQ ID NO: 18404 - DNA, 25 bp, Probe Sequence
atatctgactgaaattaaacgagcg

SEQ ID NO: 18405 - DNA, 25 bp, Probe Sequence
ctgaaattaaacgagcgaagatgag

SEQ ID NO: 18406 - DNA, 25 bp, Probe Sequence
taggttggagatgacagaaatatga

SEQ ID NO: 18407 - DNA, 25 bp, Probe Sequence
aaccagaattaggtcaagttcatag

SEQ ID NO: 18408 - DNA, 25 bp, Probe Sequence
gactgaaattaaacgagcgaagatg

SEQ ID NO: 18409 - DNA, 25 bp, Probe Sequence
ggttggagatgacagaaatatgatt

SEQ ID NO: 18410 - DNA, 25 bp, Probe Sequence
tattgcataggacagacttaggagt

SEQ ID NO: 18411 - DNA, 25 bp, Probe Sequence
actgaaattaaacgagcgaagatga

SEQ ID NO: 18412 - DNA, 25 bp, Probe Sequence
tgactgaaattaaacgagcgaagat

SEQ ID NO: 18413 - DNA, 25 bp, Probe Sequence
atctgactgaaattaaacgagcgaa

SEQ ID NO: 18414 - DNA, 25 bp, Probe Sequence
attgtcacctagcagatatgtatta

SEQ ID NO: 18415 - DNA, 25 bp, Probe Sequence
tattgtcacctagcagatatgtatt

SEQ ID NO: 18416 - DNA, 25 bp, Probe Sequence
tgaatcaaagaatagggagacaatc

SEQ ID NO: 18417 - DNA, 25 bp, Probe Sequence
agaagaccaagaagaccaagtagat

SEQ ID NO: 18418 - DNA, 25 bp, Probe Sequence
ttcgtcctcaacttcatcaagattc

SEQ ID NO: 18419 - DNA, 25 bp, Probe Sequence
cttcgtcctcaacttcatcaagatt

SEQ ID NO: 18420 - DNA, 25 bp, Probe Sequence
gaagaccaagaagaccaagtagatc

SEQ ID NO: 18421 - DNA, 25 bp, Probe Sequence
cagaagaccaagaagaccaagtaga

SEQ ID NO: 18422 - DNA, 25 bp, Probe Sequence
acagaagaccaagaagaccaagtag

SEQ ID NO: 18423 - DNA, 25 bp, Probe Sequence
agaatcttaactcctagagcaactc

SEQ ID NO: 18424 - DNA, 25 bp, Probe Sequence
cacagaagaccaagaagaccaagta

SEQ ID NO: 18425 - DNA, 25 bp, Probe Sequence
aagaccaagaagaccaagtagatcc

SEQ ID NO: 18426 - DNA, 25 bp, Probe Sequence
tgtcacatgccttatgaatagaatc

SEQ ID NO: 18427 - DNA, 25 bp, Probe Sequence
gttgtatgtcacatgccttatgaat

SEQ ID NO: 18428 - DNA, 25 bp, Probe Sequence
tagaatcttaactcctagagcaact

SEQ ID NO: 18429 - DNA, 25 bp, Probe Sequence
tgttgtatgtcacatgccttatgaa

SEQ ID NO: 18430 - DNA, 25 bp, Probe Sequence
gtcacatgccttatgaatagaatct

SEQ ID NO: 18431 - DNA, 25 bp, Probe Sequence
tcgtcctcaacttcatcaagattcc

SEQ ID NO: 18432 - DNA, 25 bp, Probe Sequence
ccttcgtcctcaacttcatcaagat

SEQ ID NO: 18433 - DNA, 25 bp, Probe Sequence
ctgttgtatgtcacatgccttatga

SEQ ID NO: 18434 - DNA, 25 bp, Probe Sequence
gtatgtcacatgccttatgaataga

SEQ ID NO: 18435 - DNA, 25 bp, Probe Sequence
tgtatgtcacatgccttatgaatag

SEQ ID NO: 18436 - DNA, 25 bp, Probe Sequence
atgtcacatgccttatgaatagaat

SEQ ID NO: 18437 - DNA, 25 bp, Probe Sequence
gccttatgaatagaatcttaactcc

SEQ ID NO: 18438 - DNA, 25 bp, Probe Sequence
tcacatgccttatgaatagaatctt

SEQ ID NO: 18439 - DNA, 25 bp, Probe Sequence
ttgtatgtcacatgccttatgaata

SEQ ID NO: 18440 - DNA, 25 bp, Probe Sequence
atagaatcttaactcctagagcaac

SEQ ID NO: 18441 - DNA, 25 bp, Probe Sequence
ttcatagccagatgtgtatcagatg

SEQ ID NO: 18442 - DNA, 25 bp, Probe Sequence
cattcatagccagatgtgtatcaga

SEQ ID NO: 18443 - DNA, 25 bp, Probe Sequence
taccattcatagccagatgtgtatc

SEQ ID NO: 18444 - DNA, 25 bp, Probe Sequence
ctaccattcatagccagatgtgtat

SEQ ID NO: 18445 - DNA, 25 bp, Probe Sequence
catagccagatgtgtatcagatgtt

SEQ ID NO: 18446 - DNA, 25 bp, Probe Sequence
attcatagccagatgtgtatcagat

SEQ ID NO: 18447 - DNA, 25 bp, Probe Sequence
tctaccattcatagccagatgtgta

SEQ ID NO: 18448 - DNA, 25 bp, Probe Sequence
aagaagtaaggaggtaagattgcca

SEQ ID NO: 18449 - DNA, 25 bp, Probe Sequence
tcatagccagatgtgtatcagatgt

SEQ ID NO: 18450 - DNA, 25 bp, Probe Sequence
ccattcatagccagatgtgtatcag

SEQ ID NO: 18451 - DNA, 25 bp, Probe Sequence
accattcatagccagatgtgtatca

SEQ ID NO: 18452 - DNA, 25 bp, Probe Sequence
agaagtaaggaggtaagattgccac

SEQ ID NO: 18453 - DNA, 25 bp, Probe Sequence
atatcagattaggttggataggtgg

SEQ ID NO: 18454 - DNA, 25 bp, Probe Sequence
ggcagaagagatggtggtctattaa

SEQ ID NO: 18455 - DNA, 25 bp, Probe Sequence
gcatggaagtgaatattaatggtgt

SEQ ID NO: 18456 - DNA, 25 bp, Probe Sequence
aggcagaagagatggtggtctatta

SEQ ID NO: 18457 - DNA, 25 bp, Probe Sequence
ggatggaaaggagaatgaacaaatg

SEQ ID NO: 18458 - DNA, 25 bp, Probe Sequence
aaagaagtaaggaggtaagattgcc

SEQ ID NO: 18459 - DNA, 25 bp, Probe Sequence
atagccagatgtgtatcagatgttt

SEQ ID NO: 18460 - DNA, 25 bp, Probe Sequence
tggctgcatggaagtgaatattaat

SEQ ID NO: 18461 - DNA, 25 bp, Probe Sequence
tagccagatgtgtatcagatgtttc

SEQ ID NO: 18462 - DNA, 25 bp, Probe Sequence
aagcaaggaagtaaactcaaacaaa

SEQ ID NO: 18463 - DNA, 25 bp, Probe Sequence
aaagcaaggaagtaaactcaaacaa

SEQ ID NO: 18464 - DNA, 25 bp, Probe Sequence
gaaagcaaggaagtaaactcaaaca

SEQ ID NO: 18465 - DNA, 25 bp, Probe Sequence
ctatgagatgctcttcaactccttc

SEQ ID NO: 18466 - DNA, 25 bp, Probe Sequence
actatgagatgctcttcaactcctt

SEQ ID NO: 18467 - DNA, 25 bp, Probe Sequence
tatgagatgctcttcaactccttcc

SEQ ID NO: 18468 - DNA, 25 bp, Probe Sequence
cactatgagatgctcttcaactcct

SEQ ID NO: 18469 - DNA, 25 bp, Probe Sequence
ttgtcgcaatcatatactgtttctg

SEQ ID NO: 18470 - DNA, 25 bp, Probe Sequence
tttgtcgcaatcatatactgtttct

SEQ ID NO: 18471 - DNA, 25 bp, Probe Sequence
aaagatgggtggttgaatgatttcc

SEQ ID NO: 18472 - DNA, 25 bp, Probe Sequence
tgacatagtggatggacagatggac

SEQ ID NO: 18473 - DNA, 25 bp, Probe Sequence
gaggtacaagctgagatcaagaaat

SEQ ID NO: 18474 - DNA, 25 bp, Probe Sequence
aggtacaagctgagatcaagaaatc

SEQ ID NO: 18475 - DNA, 25 bp, Probe Sequence
atgagatgctcttcaactccttcca

SEQ ID NO: 18476 - DNA, 25 bp, Probe Sequence
ctgacatagtggatggacagatgga

SEQ ID NO: 18477 - DNA, 25 bp, Probe Sequence
aatcatatactgtttctgcaatggc

SEQ ID NO: 18478 - DNA, 25 bp, Probe Sequence
gacatagtggatggacagatggacc

SEQ ID NO: 18479 - DNA, 25 bp, Probe Sequence
caatcatatactgtttctgcaatgg

SEQ ID NO: 18480 - DNA, 25 bp, Probe Sequence
ctgctgacatagtggatggacagat

SEQ ID NO: 18481 - DNA, 25 bp, Probe Sequence
tgagatgctcttcaactccttccag

SEQ ID NO: 18482 - DNA, 25 bp, Probe Sequence
atcatatactgtttctgcaatggcg

SEQ ID NO: 18483 - DNA, 25 bp, Probe Sequence
aaaagatgggtggttgaatgatttc

SEQ ID NO: 18484 - DNA, 25 bp, Probe Sequence
cgaggtacaagctgagatcaagaaa

SEQ ID NO: 18485 - DNA, 25 bp, Probe Sequence
caaaagatgggtggttgaatgattt

SEQ ID NO: 18486 - DNA, 25 bp, Probe Sequence
tgctgacatagtggatggacagatg

SEQ ID NO: 18487 - DNA, 25 bp, Probe Sequence
ggtacaagctgagatcaagaaatct

SEQ ID NO: 18488 - DNA, 25 bp, Probe Sequence
catagtggatggacagatggaccaa

SEQ ID NO: 18489 - DNA, 25 bp, Probe Sequence
aatagcatccgtcaatctgtgttaa

SEQ ID NO: 18490 - DNA, 25 bp, Probe Sequence
tgtggtacgagataatgagtcctat

SEQ ID NO: 18491 - DNA, 25 bp, Probe Sequence
gtggtacgagataatgagtcctatt

SEQ ID NO: 18492 - DNA, 25 bp, Probe Sequence
ttgtggtacgagataatgagtccta

SEQ ID NO: 18493 - DNA, 25 bp, Probe Sequence
atatacagcagtcagagatgagtat

SEQ ID NO: 18494 - DNA, 25 bp, Probe Sequence
tcgtgagttattcagaatgttgttc

SEQ ID NO: 18495 - DNA, 25 bp, Probe Sequence
ctcgtgagttattcagaatgttgtt

SEQ ID NO: 18496 - DNA, 25 bp, Probe Sequence
cgtgagttattcagaatgttgttcc

SEQ ID NO: 18497 - DNA, 25 bp, Probe Sequence
ttatgtgaagtaagacaatgcgaga

SEQ ID NO: 18498 - DNA, 25 bp, Probe Sequence
ttaagaactgtgacctgatgtggaa

SEQ ID NO: 18499 - DNA, 25 bp, Probe Sequence
gtgagttattcagaatgttgttcct

SEQ ID NO: 18500 - DNA, 25 bp, Probe Sequence
tatatacagcagtcagagatgagta

SEQ ID NO: 18501 - DNA, 25 bp, Probe Sequence
tatgtgaagtaagacaatgcgagac

SEQ ID NO: 18502 - DNA, 25 bp, Probe Sequence
tcacatcttatatacagcagtcaga

SEQ ID NO: 18503 - DNA, 25 bp, Probe Sequence
taagaactgtgacctgatgtggaag

SEQ ID NO: 18504 - DNA, 25 bp, Probe Sequence
acatcttatatacagcagtcagaga

SEQ ID NO: 18505 - DNA, 25 bp, Probe Sequence
cacatcttatatacagcagtcagag

SEQ ID NO: 18506 - DNA, 25 bp, Probe Sequence
actcgtgagttattcagaatgttgt

SEQ ID NO: 18507 - DNA, 25 bp, Probe Sequence
actactcgtgagttattcagaatgt

SEQ ID NO: 18508 - DNA, 25 bp, Probe Sequence
ttatatacagcagtcagagatgagt

SEQ ID NO: 18509 - DNA, 25 bp, Probe Sequence
atcacatcttatatacagcagtcag

SEQ ID NO: 18510 - DNA, 25 bp, Probe Sequence
tcttatatacagcagtcagagatga

SEQ ID NO: 18511 - DNA, 25 bp, Probe Sequence
tactcgtgagttattcagaatgttg

SEQ ID NO: 18512 - DNA, 25 bp, Probe Sequence
ctactcgtgagttattcagaatgtt

SEQ ID NO: 18513 - DNA, 25 bp, Probe Sequence
taccaagataacatactgtcctcca

SEQ ID NO: 18514 - DNA, 25 bp, Probe Sequence
ttaccaagataacatactgtcctcc

SEQ ID NO: 18515 - DNA, 25 bp, Probe Sequence
ccttaccaagataacatactgtcct

SEQ ID NO: 18516 - DNA, 25 bp, Probe Sequence
tccttaccaagataacatactgtcc

SEQ ID NO: 18517 - DNA, 25 bp, Probe Sequence
gcatactctctgtaattccagtgta

SEQ ID NO: 18518 - DNA, 25 bp, Probe Sequence
caagataacatactgtcctccagaa

SEQ ID NO: 18519 - DNA, 25 bp, Probe Sequence
taacatactgtcctccagaatacca

SEQ ID NO: 18520 - DNA, 25 bp, Probe Sequence
ataacatactgtcctccagaatacc

SEQ ID NO: 18521 - DNA, 25 bp, Probe Sequence
accttcagattagacagtcttcatt

SEQ ID NO: 18522 - DNA, 25 bp, Probe Sequence
gttggaagtgttgttcacagtaatc

SEQ ID NO: 18523 - DNA, 25 bp, Probe Sequence
aacatactgtcctccagaataccaa

SEQ ID NO: 18524 - DNA, 25 bp, Probe Sequence
aagataacatactgtcctccagaat

SEQ ID NO: 18525 - DNA, 25 bp, Probe Sequence
cttaccaagataacatactgtcctc

SEQ ID NO: 18526 - DNA, 25 bp, Probe Sequence
ccaagataacatactgtcctccaga

SEQ ID NO: 18527 - DNA, 25 bp, Probe Sequence
ttgttcacagtaatccttaccaaga

SEQ ID NO: 18528 - DNA, 25 bp, Probe Sequence
gttgttcacagtaatccttaccaag

SEQ ID NO: 18529 - DNA, 25 bp, Probe Sequence
tgttgttcacagtaatccttaccaa

SEQ ID NO: 18530 - DNA, 25 bp, Probe Sequence
tgttcacagtaatccttaccaagat

SEQ ID NO: 18531 - DNA, 25 bp, Probe Sequence
gaagtgttgttcacagtaatcctta

SEQ ID NO: 18532 - DNA, 25 bp, Probe Sequence
agtgttgttcacagtaatccttacc

SEQ ID NO: 18533 - DNA, 25 bp, Probe Sequence
catactgtcctccagaataccaagt

SEQ ID NO: 18534 - DNA, 25 bp, Probe Sequence
acatactgtcctccagaataccaag

SEQ ID NO: 18535 - DNA, 25 bp, Probe Sequence
accaagataacatactgtcctccag

SEQ ID NO: 18536 - DNA, 25 bp, Probe Sequence
aagtgttgttcacagtaatccttac

SEQ ID NO: 18537 - DNA, 25 bp, Probe Sequence
taatatagcctggtgtgattgatgt

SEQ ID NO: 18538 - DNA, 25 bp, Probe Sequence
aatatagcctggtgtgattgatgtg

SEQ ID NO: 18539 - DNA, 25 bp, Probe Sequence
ccagatggaacaatactatcaccta

SEQ ID NO: 18540 - DNA, 25 bp, Probe Sequence
ataatatagcctggtgtgattgatg

SEQ ID NO: 18541 - DNA, 25 bp, Probe Sequence
accagatggaacaatactatcacct

SEQ ID NO: 18542 - DNA, 25 bp, Probe Sequence
caccagatggaacaatactatcacc

SEQ ID NO: 18543 - DNA, 25 bp, Probe Sequence
atatagcctggtgtgattgatgtga

SEQ ID NO: 18544 - DNA, 25 bp, Probe Sequence
acctagtggatatggaattgaactg

SEQ ID NO: 18545 - DNA, 25 bp, Probe Sequence
cttaatagacaagaccaccactgtt

SEQ ID NO: 18546 - DNA, 25 bp, Probe Sequence
ttaatagacaagaccaccactgttc

SEQ ID NO: 18547 - DNA, 25 bp, Probe Sequence
gcaccagatggaacaatactatcac

SEQ ID NO: 18548 - DNA, 25 bp, Probe Sequence
tatagcctggtgtgattgatgtgag

SEQ ID NO: 18549 - DNA, 25 bp, Probe Sequence
cagatggaacaatactatcacctag

SEQ ID NO: 18550 - DNA, 25 bp, Probe Sequence
cctagtggatatggaattgaactgc

SEQ ID NO: 18551 - DNA, 25 bp, Probe Sequence
aataatatagcctggtgtgattgat

SEQ ID NO: 18552 - DNA, 25 bp, Probe Sequence
taatagacaagaccaccactgttca

SEQ ID NO: 18553 - DNA, 25 bp, Probe Sequence
cacctagtggatatggaattgaact

SEQ ID NO: 18554 - DNA, 25 bp, Probe Sequence
tcacctagtggatatggaattgaac

SEQ ID NO: 18555 - DNA, 25 bp, Probe Sequence
atccatccaagacagaagacagttc

SEQ ID NO: 18556 - DNA, 25 bp, Probe Sequence
atcacctagtggatatggaattgaa

SEQ ID NO: 18557 - DNA, 25 bp, Probe Sequence
aatcctatggcagagcattcagaat

SEQ ID NO: 18558 - DNA, 25 bp, Probe Sequence
ttggagagaagcacaaggagtattc

SEQ ID NO: 18559 - DNA, 25 bp, Probe Sequence
acagttccagcttcttaatagacaa

SEQ ID NO: 18560 - DNA, 25 bp, Probe Sequence
agacagttccagcttcttaatagac

SEQ ID NO: 18561 - DNA, 25 bp, Probe Sequence
ttattagagaggatgaagcattagc

SEQ ID NO: 18562 - DNA, 25 bp, Probe Sequence
aagttattagagaggatgaagcatt

SEQ ID NO: 18563 - DNA, 25 bp, Probe Sequence
ttagatttccctattgtgacagagc

SEQ ID NO: 18564 - DNA, 25 bp, Probe Sequence
gcttagatttccctattgtgacaga

SEQ ID NO: 18565 - DNA, 25 bp, Probe Sequence
gaaatgttctgtcaaatgtgtctca

SEQ ID NO: 18566 - DNA, 25 bp, Probe Sequence
accataatgagatgtgagccttgtg

SEQ ID NO: 18567 - DNA, 25 bp, Probe Sequence
cattcacttccagagaggacctatc

SEQ ID NO: 18568 - DNA, 25 bp, Probe Sequence
acattggtgatgaaatcctggttag

SEQ ID NO: 18569 - DNA, 25 bp, Probe Sequence
agttattagagaggatgaagcatta

SEQ ID NO: 18570 - DNA, 25 bp, Probe Sequence
tgaaatgttctgtcaaatgtgtctc

SEQ ID NO: 18571 - DNA, 25 bp, Probe Sequence
ccaatttctctcagatttccacaga

SEQ ID NO: 18572 - DNA, 25 bp, Probe Sequence
aattctgtattcaaagatggaaccc

SEQ ID NO: 18573 - DNA, 25 bp, Probe Sequence
cttagatttccctattgtgacagag

SEQ ID NO: 18574 - DNA, 25 bp, Probe Sequence
ttatcgtaatagcctctgcattgag

SEQ ID NO: 18575 - DNA, 25 bp, Probe Sequence
gttattagagaggatgaagcattag

SEQ ID NO: 18576 - DNA, 25 bp, Probe Sequence
tatcgtaatagcctctgcattgaga

SEQ ID NO: 18577 - DNA, 25 bp, Probe Sequence
aattgatgcccatacaaggaatttg

SEQ ID NO: 18578 - DNA, 25 bp, Probe Sequence
acattcacttccagagaggacctat

SEQ ID NO: 18579 - DNA, 25 bp, Probe Sequence
gaatttgcttcggaaccacataatt

SEQ ID NO: 18580 - DNA, 25 bp, Probe Sequence
tagatttccctattgtgacagagcc

SEQ ID NO: 18581 - DNA, 25 bp, Probe Sequence
ttcggaaccacataattaaagacca

SEQ ID NO: 18582 - DNA, 25 bp, Probe Sequence
tttgcttcggaaccacataattaaa

SEQ ID NO: 18583 - DNA, 25 bp, Probe Sequence
atttgcttcggaaccacataattaa

SEQ ID NO: 18584 - DNA, 25 bp, Probe Sequence
tcggaaccacataattaaagaccag

SEQ ID NO: 18585 - DNA, 25 bp, Probe Sequence
gacatcacctacctctataagcacc

SEQ ID NO: 18586 - DNA, 25 bp, Probe Sequence
ggacatcacctacctctataagcac

SEQ ID NO: 18587 - DNA, 25 bp, Probe Sequence
ctgaggtgaatagtgacaaggtgta

SEQ ID NO: 18588 - DNA, 25 bp, Probe Sequence
aggagtgtgaagtacagattgtctt

SEQ ID NO: 18589 - DNA, 25 bp, Probe Sequence
aagattgtttatgtggaggagaagg

SEQ ID NO: 18590 - DNA, 25 bp, Probe Sequence
tcaagattgtttatgtggaggagaa

SEQ ID NO: 18591 - DNA, 25 bp, Probe Sequence
ttcaagattgtttatgtggaggaga

SEQ ID NO: 18592 - DNA, 25 bp, Probe Sequence
gaggtgaatagtgacaaggtgtact

SEQ ID NO: 18593 - DNA, 25 bp, Probe Sequence
caagattgtttatgtggaggagaag

SEQ ID NO: 18594 - DNA, 25 bp, Probe Sequence
cttcaagattgtttatgtggaggag

SEQ ID NO: 18595 - DNA, 25 bp, Probe Sequence
cctctacctctcagtcactttctat

SEQ ID NO: 18596 - DNA, 25 bp, Probe Sequence
aggtgaatagtgacaaggtgtactg

SEQ ID NO: 18597 - DNA, 25 bp, Probe Sequence
aggacatcacctacctctataagca

SEQ ID NO: 18598 - DNA, 25 bp, Probe Sequence
caggagtgtgaagtacagattgtct

SEQ ID NO: 18599 - DNA, 25 bp, Probe Sequence
tgaggtgaatagtgacaaggtgtac

SEQ ID NO: 18600 - DNA, 25 bp, Probe Sequence
gcttcaagattgtttatgtggagga

SEQ ID NO: 18601 - DNA, 25 bp, Probe Sequence
tctacctctcagtcactttctatac

SEQ ID NO: 18602 - DNA, 25 bp, Probe Sequence
acatctacttcgacgagaacatgaa

SEQ ID NO: 18603 - DNA, 25 bp, Probe Sequence
acctctacctctcagtcactttcta

SEQ ID NO: 18604 - DNA, 25 bp, Probe Sequence
ctctacctctcagtcactttctata

SEQ ID NO: 18605 - DNA, 25 bp, Probe Sequence
atctgatggtctctgtgatgctgat

SEQ ID NO: 18606 - DNA, 25 bp, Probe Sequence
gaaccatgattctgtctggaacttc

SEQ ID NO: 18607 - DNA, 25 bp, Probe Sequence
ctacctctcagtcactttctatact

SEQ ID NO: 18608 - DNA, 25 bp, Probe Sequence
gacatctacttcgacgagaacatga

SEQ ID NO: 18609 - DNA, 25 bp, Probe Sequence
tccgtgaatgtatattgtcttgtaa

SEQ ID NO: 18610 - DNA, 25 bp, Probe Sequence
ttccgtgaatgtatattgtcttgta

SEQ ID NO: 18611 - DNA, 25 bp, Probe Sequence
ccgtgaatgtatattgtcttgtaat

SEQ ID NO: 18612 - DNA, 25 bp, Probe Sequence
attccgtgaatgtatattgtcttgt

SEQ ID NO: 18613 - DNA, 25 bp, Probe Sequence
cttgtaatgttgcataatgttcact

SEQ ID NO: 18614 - DNA, 25 bp, Probe Sequence
tcttgtaatgttgcataatgttcac

SEQ ID NO: 18615 - DNA, 25 bp, Probe Sequence
gtcttgtaatgttgcataatgttca

SEQ ID NO: 18616 - DNA, 25 bp, Probe Sequence
tgtcttgtaatgttgcataatgttc

SEQ ID NO: 18617 - DNA, 25 bp, Probe Sequence
ttgtaatgttgcataatgttcactt

SEQ ID NO: 18618 - DNA, 25 bp, Probe Sequence
ttgtcttgtaatgttgcataatgtt

SEQ ID NO: 18619 - DNA, 25 bp, Probe Sequence
cgtgaatgtatattgtcttgtaatg

SEQ ID NO: 18620 - DNA, 25 bp, Probe Sequence
attgtcttgtaatgttgcataatgt

SEQ ID NO: 18621 - DNA, 25 bp, Probe Sequence
gtagaggcttcttagattctcccag

SEQ ID NO: 18622 - DNA, 25 bp, Probe Sequence
aatgtatattgtcttgtaatgttgc

SEQ ID NO: 18623 - DNA, 25 bp, Probe Sequence
tattccgtgaatgtatattgtcttg

SEQ ID NO: 18624 - DNA, 25 bp, Probe Sequence
ggatgtgacaacaacttccaaattg

SEQ ID NO: 18625 - DNA, 25 bp, Probe Sequence
atgtatattgtcttgtaatgttgca

SEQ ID NO: 18626 - DNA, 25 bp, Probe Sequence
gtgacaattgacaatctggactacc

SEQ ID NO: 18627 - DNA, 25 bp, Probe Sequence
atgtgacaattgacaatctggacta

SEQ ID NO: 18628 - DNA, 25 bp, Probe Sequence
tgtatattgtcttgtaatgttgcat

SEQ ID NO: 18629 - DNA, 25 bp, Probe Sequence
gatggagagaaaccaacaagagatc

SEQ ID NO: 18630 - DNA, 25 bp, Probe Sequence
agtgtgtcctttattctaaacagta

SEQ ID NO: 18631 - DNA, 25 bp, Probe Sequence
tagtgtgtcctttattctaaacagt

SEQ ID NO: 18632 - DNA, 25 bp, Probe Sequence
tgatggagagaaaccaacaagagat

SEQ ID NO: 18633 - DNA, 25 bp, Probe Sequence
tgtaggtctgcttattcctcttgat

SEQ ID NO: 18634 - DNA, 25 bp, Probe Sequence
gtaggtctgcttattcctcttgatc

SEQ ID NO: 18635 - DNA, 25 bp, Probe Sequence
ctgtaggtctgcttattcctcttga

SEQ ID NO: 18636 - DNA, 25 bp, Probe Sequence
cctcatccaaactgtatcttccttt

SEQ ID NO: 18637 - DNA, 25 bp, Probe Sequence
tccaaactgtatcttcctttactgt

SEQ ID NO: 18638 - DNA, 25 bp, Probe Sequence
ccaatcccttctccacttactataa

SEQ ID NO: 18639 - DNA, 25 bp, Probe Sequence
cttctccacttactataatggttgg

SEQ ID NO: 18640 - DNA, 25 bp, Probe Sequence
ccttctccacttactataatggttg

SEQ ID NO: 18641 - DNA, 25 bp, Probe Sequence
gccaatcccttctccacttactata

SEQ ID NO: 18642 - DNA, 25 bp, Probe Sequence
atccaaactgtatcttcctttactg

SEQ ID NO: 18643 - DNA, 25 bp, Probe Sequence
catccaaactgtatcttcctttact

SEQ ID NO: 18644 - DNA, 25 bp, Probe Sequence
tcatccaaactgtatcttcctttac

SEQ ID NO: 18645 - DNA, 25 bp, Probe Sequence
ccaaactgtatcttcctttactgtt

SEQ ID NO: 18646 - DNA, 25 bp, Probe Sequence
cagaactgctacaaagtgactaatg

SEQ ID NO: 18647 - DNA, 25 bp, Probe Sequence
agaactgctacaaagtgactaatgg

SEQ ID NO: 18648 - DNA, 25 bp, Probe Sequence
ctcatccaaactgtatcttccttta

SEQ ID NO: 18649 - DNA, 25 bp, Probe Sequence
tgtttatatcttcaccctgtaatgg

SEQ ID NO: 18650 - DNA, 25 bp, Probe Sequence
tatcatttatggaggctctgtgact

SEQ ID NO: 18651 - DNA, 25 bp, Probe Sequence
gtatcatttatggaggctctgtgac

SEQ ID NO: 18652 - DNA, 25 bp, Probe Sequence
ccacttactataatggttggaacta

SEQ ID NO: 18653 - DNA, 25 bp, Probe Sequence
cctttactgtttatatcttcaccct

SEQ ID NO: 18654 - DNA, 25 bp, Probe Sequence
tcctttactgtttatatcttcaccc

SEQ ID NO: 18655 - DNA, 25 bp, Probe Sequence
gaactgctacaaagtgactaatggg

SEQ ID NO: 18656 - DNA, 25 bp, Probe Sequence
ctcagtgctgtaggtctgcttattc

SEQ ID NO: 18657 - DNA, 25 bp, Probe Sequence
atatcctcagttcttcttagcctct

SEQ ID NO: 18658 - DNA, 25 bp, Probe Sequence
catatcctcagttcttcttagcctc

SEQ ID NO: 18659 - DNA, 25 bp, Probe Sequence
ccatatcctcagttcttcttagcct

SEQ ID NO: 18660 - DNA, 25 bp, Probe Sequence
taccactaacacagatgattgatcg

SEQ ID NO: 18661 - DNA, 25 bp, Probe Sequence
gtaccactaacacagatgattgatc

SEQ ID NO: 18662 - DNA, 25 bp, Probe Sequence
ttcggagttgaacctattgtgtagt

SEQ ID NO: 18663 - DNA, 25 bp, Probe Sequence
tcggagttgaacctattgtgtagtt

SEQ ID NO: 18664 - DNA, 25 bp, Probe Sequence
ctcaagtaccactaacacagatgat

SEQ ID NO: 18665 - DNA, 25 bp, Probe Sequence
aagtaccactaacacagatgattga

SEQ ID NO: 18666 - DNA, 25 bp, Probe Sequence
caagtaccactaacacagatgattg

SEQ ID NO: 18667 - DNA, 25 bp, Probe Sequence
tcaagtaccactaacacagatgatt

SEQ ID NO: 18668 - DNA, 25 bp, Probe Sequence
agtaccactaacacagatgattgat

SEQ ID NO: 18669 - DNA, 25 bp, Probe Sequence
ccactaacacagatgattgatcgtt

SEQ ID NO: 18670 - DNA, 25 bp, Probe Sequence
gttcttcttagcctctgtctccttc

SEQ ID NO: 18671 - DNA, 25 bp, Probe Sequence
tatcctcagttcttcttagcctctg

SEQ ID NO: 18672 - DNA, 25 bp, Probe Sequence
agttcttcttagcctctgtctcctt

SEQ ID NO: 18673 - DNA, 25 bp, Probe Sequence
accactaacacagatgattgatcgt

SEQ ID NO: 18674 - DNA, 25 bp, Probe Sequence
cctcaagtaccactaacacagatga

SEQ ID NO: 18675 - DNA, 25 bp, Probe Sequence
gtcccatatcctcagttcttcttag

SEQ ID NO: 18676 - DNA, 25 bp, Probe Sequence
tgtcccatatcctcagttcttctta

SEQ ID NO: 18677 - DNA, 25 bp, Probe Sequence
tttgtgaaagattgtcccatatcct

SEQ ID NO: 18678 - DNA, 25 bp, Probe Sequence
gtttgtgaaagattgtcccatatcc

SEQ ID NO: 18679 - DNA, 25 bp, Probe Sequence
aaagattgtcccatatcctcagttc

SEQ ID NO: 18680 - DNA, 25 bp, Probe Sequence
gaaagattgtcccatatcctcagtt

SEQ ID NO: 18681 - DNA, 25 bp, Probe Sequence
atccatactgtagacactctgacaa

SEQ ID NO: 18682 - DNA, 25 bp, Probe Sequence
aatccatactgtagacactctgaca

SEQ ID NO: 18683 - DNA, 25 bp, Probe Sequence
ctgtactcatctacgacttcatcct

SEQ ID NO: 18684 - DNA, 25 bp, Probe Sequence
tgtactcatctacgacttcatcctg

SEQ ID NO: 18685 - DNA, 25 bp, Probe Sequence
tccatactgtagacactctgacaag

SEQ ID NO: 18686 - DNA, 25 bp, Probe Sequence
gtactcatctacgacttcatcctgg

SEQ ID NO: 18687 - DNA, 25 bp, Probe Sequence
ctttctttctctttctgtttcctgg

SEQ ID NO: 18688 - DNA, 25 bp, Probe Sequence
tctttctttctctttctgtttcctg

SEQ ID NO: 18689 - DNA, 25 bp, Probe Sequence
gggtgtttctatctctttctttctc

SEQ ID NO: 18690 - DNA, 25 bp, Probe Sequence
gctgtactcatctacgacttcatcc

SEQ ID NO: 18691 - DNA, 25 bp, Probe Sequence
ggctgtactcatctacgacttcatc

SEQ ID NO: 18692 - DNA, 25 bp, Probe Sequence
ctctttctttctctttctgtttcct

SEQ ID NO: 18693 - DNA, 25 bp, Probe Sequence
tctctttctttctctttctgtttcc

SEQ ID NO: 18694 - DNA, 25 bp, Probe Sequence
aaatccatactgtagacactctgac

SEQ ID NO: 18695 - DNA, 25 bp, Probe Sequence
tgaaatccatactgtagacactctg

SEQ ID NO: 18696 - DNA, 25 bp, Probe Sequence
gaaatccatactgtagacactctga

SEQ ID NO: 18697 - DNA, 25 bp, Probe Sequence
ccatactgtagacactctgacaagc

SEQ ID NO: 18698 - DNA, 25 bp, Probe Sequence
tttctttctctttctgtttcctggc

SEQ ID NO: 18699 - DNA, 25 bp, Probe Sequence
gtctctttggagttggaatttcatt

SEQ ID NO: 18700 - DNA, 25 bp, Probe Sequence
tgtctctttggagttggaatttcat

SEQ ID NO: 18701 - DNA, 25 bp, Probe Sequence
atgtctctttggagttggaatttca

SEQ ID NO: 18702 - DNA, 25 bp, Probe Sequence
ggtgtttctatctctttctttctct

SEQ ID NO: 18703 - DNA, 25 bp, Probe Sequence
tactcatctacgacttcatcctggc

SEQ ID NO: 18704 - DNA, 25 bp, Probe Sequence
tggctgtactcatctacgacttcat

SEQ ID NO: 18705 - DNA, 25 bp, Probe Sequence
atctactctcctcatctctaacagc

SEQ ID NO: 18706 - DNA, 25 bp, Probe Sequence
ggtcatactatctactctcctcatc

SEQ ID NO: 18707 - DNA, 25 bp, Probe Sequence
ctaatgctccttgttcctagagtag

SEQ ID NO: 18708 - DNA, 25 bp, Probe Sequence
taatgctccttgttcctagagtaga

SEQ ID NO: 18709 - DNA, 25 bp, Probe Sequence
gtcatactatctactctcctcatct

SEQ ID NO: 18710 - DNA, 25 bp, Probe Sequence
gatcaggtcatactatctactctcc

SEQ ID NO: 18711 - DNA, 25 bp, Probe Sequence
tatctactctcctcatctctaacag

SEQ ID NO: 18712 - DNA, 25 bp, Probe Sequence
ctatctactctcctcatctctaaca

SEQ ID NO: 18713 - DNA, 25 bp, Probe Sequence
actatctactctcctcatctctaac

SEQ ID NO: 18714 - DNA, 25 bp, Probe Sequence
cctaatgctccttgttcctagagta

SEQ ID NO: 18715 - DNA, 25 bp, Probe Sequence
caggtcatactatctactctcctca

SEQ ID NO: 18716 - DNA, 25 bp, Probe Sequence
tcaggtcatactatctactctcctc

SEQ ID NO: 18717 - DNA, 25 bp, Probe Sequence
catactatctactctcctcatctct

SEQ ID NO: 18718 - DNA, 25 bp, Probe Sequence
tcatactatctactctcctcatctc

SEQ ID NO: 18719 - DNA, 25 bp, Probe Sequence
aatgctccttgttcctagagtagag

SEQ ID NO: 18720 - DNA, 25 bp, Probe Sequence
aggtcatactatctactctcctcat

SEQ ID NO: 18721 - DNA, 25 bp, Probe Sequence
atcaggtcatactatctactctcct

SEQ ID NO: 18722 - DNA, 25 bp, Probe Sequence
atctctaacagctcaggatctctta

SEQ ID NO: 18723 - DNA, 25 bp, Probe Sequence
ctactctcctcatctctaacagctc

SEQ ID NO: 18724 - DNA, 25 bp, Probe Sequence
agacctaatgctccttgttcctaga

SEQ ID NO: 18725 - DNA, 25 bp, Probe Sequence
cagacctaatgctccttgttcctag

SEQ ID NO: 18726 - DNA, 25 bp, Probe Sequence
catctctaacagctcaggatctctt

SEQ ID NO: 18727 - DNA, 25 bp, Probe Sequence
tctactctcctcatctctaacagct

SEQ ID NO: 18728 - DNA, 25 bp, Probe Sequence
gacctaatgctccttgttcctagag

SEQ ID NO: 18729 - DNA, 25 bp, Probe Sequence
tcctcgtctgttaagtgtgaatatc

SEQ ID NO: 18730 - DNA, 25 bp, Probe Sequence
ttgaatcttggttctgatatggact

SEQ ID NO: 18731 - DNA, 25 bp, Probe Sequence
ttcctcgtctgttaagtgtgaatat

SEQ ID NO: 18732 - DNA, 25 bp, Probe Sequence
atcttggttctgatatggactagga

SEQ ID NO: 18733 - DNA, 25 bp, Probe Sequence
tgaatcttggttctgatatggacta

SEQ ID NO: 18734 - DNA, 25 bp, Probe Sequence
aatcttggttctgatatggactagg

SEQ ID NO: 18735 - DNA, 25 bp, Probe Sequence
ctgatatggactaggagagagactg

SEQ ID NO: 18736 - DNA, 25 bp, Probe Sequence
tcttggttctgatatggactaggag

SEQ ID NO: 18737 - DNA, 25 bp, Probe Sequence
aagtgtgaatatcaatacctgcctt

SEQ ID NO: 18738 - DNA, 25 bp, Probe Sequence
cctcgtctgttaagtgtgaatatca

SEQ ID NO: 18739 - DNA, 25 bp, Probe Sequence
taagtgtgaatatcaatacctgcct

SEQ ID NO: 18740 - DNA, 25 bp, Probe Sequence
ttctgatatggactaggagagagac

SEQ ID NO: 18741 - DNA, 25 bp, Probe Sequence
gttctgatatggactaggagagaga

SEQ ID NO: 18742 - DNA, 25 bp, Probe Sequence
tctgatatggactaggagagagact

SEQ ID NO: 18743 - DNA, 25 bp, Probe Sequence
ttggttctgatatggactaggagag

SEQ ID NO: 18744 - DNA, 25 bp, Probe Sequence
cttggttctgatatggactaggaga

SEQ ID NO: 18745 - DNA, 25 bp, Probe Sequence
ttaagtgtgaatatcaatacctgcc

SEQ ID NO: 18746 - DNA, 25 bp, Probe Sequence
ctcgtctgttaagtgtgaatatcaa

SEQ ID NO: 18747 - DNA, 25 bp, Probe Sequence
agcattgtaacgaccacatagtatt

SEQ ID NO: 18748 - DNA, 25 bp, Probe Sequence
ggttctgatatggactaggagagag

SEQ ID NO: 18749 - DNA, 25 bp, Probe Sequence
gcattgtaacgaccacatagtattg

SEQ ID NO: 18750 - DNA, 25 bp, Probe Sequence
tagcattgtaacgaccacatagtat

SEQ ID NO: 18751 - DNA, 25 bp, Probe Sequence
ctagcattgtaacgaccacatagta

SEQ ID NO: 18752 - DNA, 25 bp, Probe Sequence
cattgtaacgaccacatagtattga

SEQ ID NO: 18753 - DNA, 25 bp, Probe Sequence
ggtgctatgcttctgttattattcc

SEQ ID NO: 18754 - DNA, 25 bp, Probe Sequence
gtgctatgcttctgttattattcca

SEQ ID NO: 18755 - DNA, 25 bp, Probe Sequence
ttcactgttcctctgtcatactgta

SEQ ID NO: 18756 - DNA, 25 bp, Probe Sequence
aggtgctatgcttctgttattattc

SEQ ID NO: 18757 - DNA, 25 bp, Probe Sequence
ctgttcctctgtcatactgtatctg

SEQ ID NO: 18758 - DNA, 25 bp, Probe Sequence
actgttcctctgtcatactgtatct

SEQ ID NO: 18759 - DNA, 25 bp, Probe Sequence
cactgttcctctgtcatactgtatc

SEQ ID NO: 18760 - DNA, 25 bp, Probe Sequence
tcactgttcctctgtcatactgtat

SEQ ID NO: 18761 - DNA, 25 bp, Probe Sequence
cttgttcactgttcctctgtcatac

SEQ ID NO: 18762 - DNA, 25 bp, Probe Sequence
cctctgtcatactgtatctggaatg

SEQ ID NO: 18763 - DNA, 25 bp, Probe Sequence
ctgtcatactgtatctggaatgctt

SEQ ID NO: 18764 - DNA, 25 bp, Probe Sequence
tgctatgcttctgttattattccaa

SEQ ID NO: 18765 - DNA, 25 bp, Probe Sequence
tgcttctgttattattccaagactg

SEQ ID NO: 18766 - DNA, 25 bp, Probe Sequence
ctctgtcatactgtatctggaatgc

SEQ ID NO: 18767 - DNA, 25 bp, Probe Sequence
ttgttcactgttcctctgtcatact

SEQ ID NO: 18768 - DNA, 25 bp, Probe Sequence
tctgtcatactgtatctggaatgct

SEQ ID NO: 18769 - DNA, 25 bp, Probe Sequence
tgttcctctgtcatactgtatctgg

SEQ ID NO: 18770 - DNA, 25 bp, Probe Sequence
aaggtgctatgcttctgttattatt

SEQ ID NO: 18771 - DNA, 25 bp, Probe Sequence
atgcttctgttattattccaagact

SEQ ID NO: 18772 - DNA, 25 bp, Probe Sequence
gctatgcttctgttattattccaag

SEQ ID NO: 18773 - DNA, 25 bp, Probe Sequence
gttcactgttcctctgtcatactgt

SEQ ID NO: 18774 - DNA, 25 bp, Probe Sequence
tgttcactgttcctctgtcatactg

SEQ ID NO: 18775 - DNA, 25 bp, Probe Sequence
tcctctgtcatactgtatctggaat

SEQ ID NO: 18776 - DNA, 25 bp, Probe Sequence
gcttctgttattattccaagactgg

SEQ ID NO: 18777 - DNA, 25 bp, Probe Sequence
acataggttagattctcattcacgg

SEQ ID NO: 18778 - DNA, 25 bp, Probe Sequence
cacataggttagattctcattcacg

SEQ ID NO: 18779 - DNA, 25 bp, Probe Sequence
gatgtggtgatactgagattgtctg

SEQ ID NO: 18780 - DNA, 25 bp, Probe Sequence
agatgtggtgatactgagattgtct

SEQ ID NO: 18781 - DNA, 25 bp, Probe Sequence
tagtggattgtgtgtctgagaatga

SEQ ID NO: 18782 - DNA, 25 bp, Probe Sequence
ggtaatctgacttctcacttcctaa

SEQ ID NO: 18783 - DNA, 25 bp, Probe Sequence
gtggtgatactgagattgtctgttc

SEQ ID NO: 18784 - DNA, 25 bp, Probe Sequence
ctagtggattgtgtgtctgagaatg

SEQ ID NO: 18785 - DNA, 25 bp, Probe Sequence
atgtggtgatactgagattgtctgt

SEQ ID NO: 18786 - DNA, 25 bp, Probe Sequence
tgtggtgatactgagattgtctgtt

SEQ ID NO: 18787 - DNA, 25 bp, Probe Sequence
tcacataggttagattctcattcac

SEQ ID NO: 18788 - DNA, 25 bp, Probe Sequence
gtggattgtgtgtctgagaatgatg

SEQ ID NO: 18789 - DNA, 25 bp, Probe Sequence
agtggattgtgtgtctgagaatgat

SEQ ID NO: 18790 - DNA, 25 bp, Probe Sequence
tggtgatactgagattgtctgttca

SEQ ID NO: 18791 - DNA, 25 bp, Probe Sequence
gtaatctgacttctcacttcctaag

SEQ ID NO: 18792 - DNA, 25 bp, Probe Sequence
ctacatgaccaatgccttccaatat

SEQ ID NO: 18793 - DNA, 25 bp, Probe Sequence
cagatgtggtgatactgagattgtc

SEQ ID NO: 18794 - DNA, 25 bp, Probe Sequence
tacatgaccaatgccttccaatatg

SEQ ID NO: 18795 - DNA, 25 bp, Probe Sequence
cctagtggattgtgtgtctgagaat

SEQ ID NO: 18796 - DNA, 25 bp, Probe Sequence
ttcacataggttagattctcattca

SEQ ID NO: 18797 - DNA, 25 bp, Probe Sequence
aagcagatgtggtgatactgagatt

SEQ ID NO: 18798 - DNA, 25 bp, Probe Sequence
aatgtgatttgtcttcccttctttg

SEQ ID NO: 18799 - DNA, 25 bp, Probe Sequence
atgacaccctttatatcccagaatg

SEQ ID NO: 18800 - DNA, 25 bp, Probe Sequence
cagcaaaggtgtgtattatgatgaa

SEQ ID NO: 18801 - DNA, 25 bp, Probe Sequence
tgactctcagttccaatatcctcac

SEQ ID NO: 18802 - DNA, 25 bp, Probe Sequence
agttattggctcatctgtgacctac

SEQ ID NO: 18803 - DNA, 25 bp, Probe Sequence
cttgacatttatccaggtgaaacag

SEQ ID NO: 18804 - DNA, 25 bp, Probe Sequence
catttatccaggtgaaacagcatta

SEQ ID NO: 18805 - DNA, 25 bp, Probe Sequence
tttatccaggtgaaacagcattatg

SEQ ID NO: 18806 - DNA, 25 bp, Probe Sequence
agcctttatcccttgacatttatcc

SEQ ID NO: 18807 - DNA, 25 bp, Probe Sequence
gactctcagttccaatatcctcacg

SEQ ID NO: 18808 - DNA, 25 bp, Probe Sequence
cctttatcccttgacatttatccag

SEQ ID NO: 18809 - DNA, 25 bp, Probe Sequence
gcctttatcccttgacatttatcca

SEQ ID NO: 18810 - DNA, 25 bp, Probe Sequence
cagttattggctcatctgtgaccta

SEQ ID NO: 18811 - DNA, 25 bp, Probe Sequence
actgattggaatgtggaaatggaaa

SEQ ID NO: 18812 - DNA, 25 bp, Probe Sequence
tatccctccatctacaccaaagttt

SEQ ID NO: 18813 - DNA, 25 bp, Probe Sequence
atgtatgatgatgaaagcctgtgtc

SEQ ID NO: 18814 - DNA, 25 bp, Probe Sequence
acatttatccaggtgaaacagcatt

SEQ ID NO: 18815 - DNA, 25 bp, Probe Sequence
aagcctttatcccttgacatttatc

SEQ ID NO: 18816 - DNA, 25 bp, Probe Sequence
atttatccaggtgaaacagcattat

SEQ ID NO: 18817 - DNA, 25 bp, Probe Sequence
gtatgatgatgaaagcctgtgtctt

SEQ ID NO: 18818 - DNA, 25 bp, Probe Sequence
cagtgatgatccagaactatgtgct

SEQ ID NO: 18819 - DNA, 25 bp, Probe Sequence
agcagtgatgatccagaactatgtg

SEQ ID NO: 18820 - DNA, 25 bp, Probe Sequence
cagcagtgatgatccagaactatgt

SEQ ID NO: 18821 - DNA, 25 bp, Probe Sequence
ctatccctccatctacaccaaagtt

SEQ ID NO: 18822 - DNA, 25 bp, Probe Sequence
gacatttatccaggtgaaacagcat

SEQ ID NO: 18823 - DNA, 25 bp, Probe Sequence
ttgacatttatccaggtgaaacagc

SEQ ID NO: 18824 - DNA, 25 bp, Probe Sequence
gatgatccagaactatgtgctgtga

SEQ ID NO: 18825 - DNA, 25 bp, Probe Sequence
gtgctgaataaacccttctgatctg

SEQ ID NO: 18826 - DNA, 25 bp, Probe Sequence
cttccaaactctggtgctgaataaa

SEQ ID NO: 18827 - DNA, 25 bp, Probe Sequence
tgctgaataaacccttctgatctgg

SEQ ID NO: 18828 - DNA, 25 bp, Probe Sequence
ttccaaactctggtgctgaataaac

SEQ ID NO: 18829 - DNA, 25 bp, Probe Sequence
aaactctggtgctgaataaaccctt

SEQ ID NO: 18830 - DNA, 25 bp, Probe Sequence
ctggtgctgaataaacccttctgat

SEQ ID NO: 18831 - DNA, 25 bp, Probe Sequence
ggtgctgaataaacccttctgatct

SEQ ID NO: 18832 - DNA, 25 bp, Probe Sequence
tggtgctgaataaacccttctgatc

SEQ ID NO: 18833 - DNA, 25 bp, Probe Sequence
aactctggtgctgaataaacccttc

SEQ ID NO: 18834 - DNA, 25 bp, Probe Sequence
ccttccaaactctggtgctgaataa

SEQ ID NO: 18835 - DNA, 25 bp, Probe Sequence
caaactctggtgctgaataaaccct

SEQ ID NO: 18836 - DNA, 25 bp, Probe Sequence
tccaaactctggtgctgaataaacc

SEQ ID NO: 18837 - DNA, 25 bp, Probe Sequence
ctctggtgctgaataaacccttctg

SEQ ID NO: 18838 - DNA, 25 bp, Probe Sequence
tctggtgctgaataaacccttctga

SEQ ID NO: 18839 - DNA, 25 bp, Probe Sequence
actctggtgctgaataaacccttct

SEQ ID NO: 18840 - DNA, 25 bp, Probe Sequence
ccaaactctggtgctgaataaaccc

SEQ ID NO: 18841 - DNA, 25 bp, Probe Sequence
cccttccaaactctggtgctgaata

SEQ ID NO: 18842 - DNA, 25 bp, Probe Sequence
tatatgccacaatcagttctctctc

SEQ ID NO: 18843 - DNA, 25 bp, Probe Sequence
ttatatgccacaatcagttctctct

SEQ ID NO: 18844 - DNA, 25 bp, Probe Sequence
cttatatgccacaatcagttctctc

SEQ ID NO: 18845 - DNA, 25 bp, Probe Sequence
cggtgtagtgattattatggatgtc

SEQ ID NO: 18846 - DNA, 25 bp, Probe Sequence
tgtgtcaagattcaaggcaattaag

SEQ ID NO: 18847 - DNA, 25 bp, Probe Sequence
gatgtgtcaagattcaaggcaatta

SEQ ID NO: 18848 - DNA, 25 bp, Probe Sequence
atacctaatagacctcctgatgctg

SEQ ID NO: 18849 - DNA, 25 bp, Probe Sequence
gaaggaacttatatgccacaatcag

SEQ ID NO: 18850 - DNA, 25 bp, Probe Sequence
agaaggaacttatatgccacaatca

SEQ ID NO: 18851 - DNA, 25 bp, Probe Sequence
tgagaaggaacttatatgccacaat

SEQ ID NO: 18852 - DNA, 25 bp, Probe Sequence
gtgtcaagattcaaggcaattaagg

SEQ ID NO: 18853 - DNA, 25 bp, Probe Sequence
atgtgtcaagattcaaggcaattaa

SEQ ID NO: 18854 - DNA, 25 bp, Probe Sequence
gagaaggaacttatatgccacaatc

SEQ ID NO: 18855 - DNA, 25 bp, Probe Sequence
ctgagaaggaacttatatgccacaa

SEQ ID NO: 18856 - DNA, 25 bp, Probe Sequence
gtagccatacctaatagacctcctg

SEQ ID NO: 18857 - DNA, 25 bp, Probe Sequence
ctgtagccatacctaatagacctcc

SEQ ID NO: 18858 - DNA, 25 bp, Probe Sequence
catacctaatagacctcctgatgct

SEQ ID NO: 18859 - DNA, 25 bp, Probe Sequence
tagccatacctaatagacctcctga

SEQ ID NO: 18860 - DNA, 25 bp, Probe Sequence
atatgccacaatcagttctctctct

SEQ ID NO: 18861 - DNA, 25 bp, Probe Sequence
tatgccacaatcagttctctctctt

SEQ ID NO: 18862 - DNA, 25 bp, Probe Sequence
acttatatgccacaatcagttctct

SEQ ID NO: 18863 - DNA, 25 bp, Probe Sequence
aaggaacttatatgccacaatcagt

SEQ ID NO: 18864 - DNA, 25 bp, Probe Sequence
ataatgatgtgtcaagattcaaggc

SEQ ID NO: 18865 - DNA, 25 bp, Probe Sequence
tgtagccatacctaatagacctcct

SEQ ID NO: 18866 - DNA, 25 bp, Probe Sequence
cgacaagaatacaacgatatacagc

SEQ ID NO: 18867 - DNA, 25 bp, Probe Sequence
ccgacaagaatacaacgatatacag

SEQ ID NO: 18868 - DNA, 25 bp, Probe Sequence
caatgcttactattcggtatctgac

SEQ ID NO: 18869 - DNA, 25 bp, Probe Sequence
gtcaatgcttactattcggtatctg

SEQ ID NO: 18870 - DNA, 25 bp, Probe Sequence
cgtcaatgcttactattcggtatct

SEQ ID NO: 18871 - DNA, 25 bp, Probe Sequence
tcaatgcttactattcggtatctga

SEQ ID NO: 18872 - DNA, 25 bp, Probe Sequence
attacctagcagaacctccttcaat

SEQ ID NO: 18873 - DNA, 25 bp, Probe Sequence
ttacctagcagaacctccttcaatg

SEQ ID NO: 18874 - DNA, 25 bp, Probe Sequence
cattacctagcagaacctccttcaa

SEQ ID NO: 18875 - DNA, 25 bp, Probe Sequence
aatgcttactattcggtatctgacc

SEQ ID NO: 18876 - DNA, 25 bp, Probe Sequence
gacaagaatacaacgatatacagct

SEQ ID NO: 18877 - DNA, 25 bp, Probe Sequence
agaatacaacgatatacagcttgga

SEQ ID NO: 18878 - DNA, 25 bp, Probe Sequence
tgcttactattcggtatctgaccat

SEQ ID NO: 18879 - DNA, 25 bp, Probe Sequence
atgcttactattcggtatctgacca

SEQ ID NO: 18880 - DNA, 25 bp, Probe Sequence
cccgacaagaatacaacgatataca

SEQ ID NO: 18881 - DNA, 25 bp, Probe Sequence
aagaatacaacgatatacagcttgg

SEQ ID NO: 18882 - DNA, 25 bp, Probe Sequence
acgtcaatgcttactattcggtatc

SEQ ID NO: 18883 - DNA, 25 bp, Probe Sequence
aatacaacgatatacagcttggatc

SEQ ID NO: 18884 - DNA, 25 bp, Probe Sequence
gaatacaacgatatacagcttggat

SEQ ID NO: 18885 - DNA, 25 bp, Probe Sequence
ttactattcggtatctgaccatgtg

SEQ ID NO: 18886 - DNA, 25 bp, Probe Sequence
cttactattcggtatctgaccatgt

SEQ ID NO: 18887 - DNA, 25 bp, Probe Sequence
ctagcagaacctccttcaatgactc

SEQ ID NO: 18888 - DNA, 25 bp, Probe Sequence
acaagaatacaacgatatacagctt

SEQ ID NO: 18889 - DNA, 25 bp, Probe Sequence
caagatttcctttctgcttctgttc

SEQ ID NO: 18890 - DNA, 25 bp, Probe Sequence
cgtagatgtgaatgagtgtgatgac

SEQ ID NO: 18891 - DNA, 25 bp, Probe Sequence
tagatgtgaatgagtgtgatgactt

SEQ ID NO: 18892 - DNA, 25 bp, Probe Sequence
gtagatgtgaatgagtgtgatgact

SEQ ID NO: 18893 - DNA, 25 bp, Probe Sequence
atgtgaatgagtgtgatgacttgaa

SEQ ID NO: 18894 - DNA, 25 bp, Probe Sequence
gatgtgaatgagtgtgatgacttga

SEQ ID NO: 18895 - DNA, 25 bp, Probe Sequence
agatgtgaatgagtgtgatgacttg

SEQ ID NO: 18896 - DNA, 25 bp, Probe Sequence
tgtgaatgagtgtgatgacttgaac

SEQ ID NO: 18897 - DNA, 25 bp, Probe Sequence
gtgaatgagtgtgatgacttgaacg

SEQ ID NO: 18898 - DNA, 25 bp, Probe Sequence
acacaaatgaagaagaacaaagagc

SEQ ID NO: 18899 - DNA, 25 bp, Probe Sequence
aaatgaagaagaacaaagagcctga

SEQ ID NO: 18900 - DNA, 25 bp, Probe Sequence
caaatgaagaagaacaaagagcctg

SEQ ID NO: 18901 - DNA, 25 bp, Probe Sequence
gcgtagatgtgaatgagtgtgatga

SEQ ID NO: 18902 - DNA, 25 bp, Probe Sequence
ctgcgtagatgtgaatgagtgtgat

SEQ ID NO: 18903 - DNA, 25 bp, Probe Sequence
agacacaaatgaagaagaacaaaga

SEQ ID NO: 18904 - DNA, 25 bp, Probe Sequence
agagacacaaatgaagaagaacaaa

SEQ ID NO: 18905 - DNA, 25 bp, Probe Sequence
aagagacacaaatgaagaagaacaa

SEQ ID NO: 18906 - DNA, 25 bp, Probe Sequence
agacctctattacataaacactgct

SEQ ID NO: 18907 - DNA, 25 bp, Probe Sequence
tagcttgttgaatgtaagagacaca

SEQ ID NO: 18908 - DNA, 25 bp, Probe Sequence
acaaatgaagaagaacaaagagcct

SEQ ID NO: 18909 - DNA, 25 bp, Probe Sequence
cacaaatgaagaagaacaaagagcc

SEQ ID NO: 18910 - DNA, 25 bp, Probe Sequence
gacacaaatgaagaagaacaaagag

SEQ ID NO: 18911 - DNA, 25 bp, Probe Sequence
gagacacaaatgaagaagaacaaag

SEQ ID NO: 18912 - DNA, 25 bp, Probe Sequence
ttagcttgttgaatgtaagagacac

SEQ ID NO: 18913 - DNA, 25 bp, Probe Sequence
aagaagaacaaagagcctgagaaag

SEQ ID NO: 18914 - DNA, 25 bp, Probe Sequence
gactaaggcgtattataggaagagg

SEQ ID NO: 18915 - DNA, 25 bp, Probe Sequence
cttagtagcaatgacagcagagtta

SEQ ID NO: 18916 - DNA, 25 bp, Probe Sequence
ttagtagcaatgacagcagagttaa

SEQ ID NO: 18917 - DNA, 25 bp, Probe Sequence
atgaatccttagtagcaatgacagc

SEQ ID NO: 18918 - DNA, 25 bp, Probe Sequence
agactaaggcgtattataggaagag

SEQ ID NO: 18919 - DNA, 25 bp, Probe Sequence
aagactaaggcgtattataggaaga

SEQ ID NO: 18920 - DNA, 25 bp, Probe Sequence
gaatccttagtagcaatgacagcag

SEQ ID NO: 18921 - DNA, 25 bp, Probe Sequence
aggtaggcatagtacagtacgatat

SEQ ID NO: 18922 - DNA, 25 bp, Probe Sequence
gaggtaggcatagtacagtacgata

SEQ ID NO: 18923 - DNA, 25 bp, Probe Sequence
aatccttagtagcaatgacagcaga

SEQ ID NO: 18924 - DNA, 25 bp, Probe Sequence
ttgaatgacacttctacagaacaac

SEQ ID NO: 18925 - DNA, 25 bp, Probe Sequence
tgaatccttagtagcaatgacagca

SEQ ID NO: 18926 - DNA, 25 bp, Probe Sequence
catgaatccttagtagcaatgacag

SEQ ID NO: 18927 - DNA, 25 bp, Probe Sequence
ctacttgtactgtacctcctctcaa

SEQ ID NO: 18928 - DNA, 25 bp, Probe Sequence
tgaatgacacttctacagaacaacg

SEQ ID NO: 18929 - DNA, 25 bp, Probe Sequence
atccttagtagcaatgacagcagag

SEQ ID NO: 18930 - DNA, 25 bp, Probe Sequence
ccatgaatccttagtagcaatgaca

SEQ ID NO: 18931 - DNA, 25 bp, Probe Sequence
accatgaatccttagtagcaatgac

SEQ ID NO: 18932 - DNA, 25 bp, Probe Sequence
taccatgaatccttagtagcaatga

SEQ ID NO: 18933 - DNA, 25 bp, Probe Sequence
ggtaggcatagtacagtacgatata

SEQ ID NO: 18934 - DNA, 25 bp, Probe Sequence
gacagaggtaggcatagtacagtac

SEQ ID NO: 18935 - DNA, 25 bp, Probe Sequence
attgaatgacacttctacagaacaa

SEQ ID NO: 18936 - DNA, 25 bp, Probe Sequence
ttaccatgaatccttagtagcaatg

SEQ ID NO: 18937 - DNA, 25 bp, Probe Sequence
agaggtaggcatagtacagtacgat

SEQ ID NO: 18938 - DNA, 25 bp, Probe Sequence
catgtgtggtcttggtattcttaag

SEQ ID NO: 18939 - DNA, 25 bp, Probe Sequence
atgtgtggtcttggtattcttaagg

SEQ ID NO: 18940 - DNA, 25 bp, Probe Sequence
tcctgagaataagaaagtttcaccc

SEQ ID NO: 18941 - DNA, 25 bp, Probe Sequence
cctgagaataagaaagtttcaccca

SEQ ID NO: 18942 - DNA, 25 bp, Probe Sequence
ctgagaataagaaagtttcacccaa

SEQ ID NO: 18943 - DNA, 25 bp, Probe Sequence
ttcctgagaataagaaagtttcacc

SEQ ID NO: 18944 - DNA, 25 bp, Probe Sequence
tctttcttagtgcctgtgtggattt

SEQ ID NO: 18945 - DNA, 25 bp, Probe Sequence
tgagaataagaaagtttcacccaat

SEQ ID NO: 18946 - DNA, 25 bp, Probe Sequence
aatcatattgaatgtttccaacctg

SEQ ID NO: 18947 - DNA, 25 bp, Probe Sequence
tagccaaaggttcactctcaagaag

SEQ ID NO: 18948 - DNA, 25 bp, Probe Sequence
atcatattgaatgtttccaacctgg

SEQ ID NO: 18949 - DNA, 25 bp, Probe Sequence
gtagccaaaggttcactctcaagaa

SEQ ID NO: 18950 - DNA, 25 bp, Probe Sequence
ccaacctggagtataatattcagat

SEQ ID NO: 18951 - DNA, 25 bp, Probe Sequence
gtctttcttagtgcctgtgtggatt

SEQ ID NO: 18952 - DNA, 25 bp, Probe Sequence
aaatcatattgaatgtttccaacct

SEQ ID NO: 18953 - DNA, 25 bp, Probe Sequence
tttgtcagtctttcttagtgcctgt

SEQ ID NO: 18954 - DNA, 25 bp, Probe Sequence
acatgtgtggtcttggtattcttaa

SEQ ID NO: 18955 - DNA, 25 bp, Probe Sequence
aacatgtgtggtcttggtattctta

SEQ ID NO: 18956 - DNA, 25 bp, Probe Sequence
taacatgtgtggtcttggtattctt

SEQ ID NO: 18957 - DNA, 25 bp, Probe Sequence
ttaacatgtgtggtcttggtattct

SEQ ID NO: 18958 - DNA, 25 bp, Probe Sequence
gggaacttccacattatacatttga

SEQ ID NO: 18959 - DNA, 25 bp, Probe Sequence
agggaacttccacattatacatttg

SEQ ID NO: 18960 - DNA, 25 bp, Probe Sequence
ttgtagccaaaggttcactctcaag

SEQ ID NO: 18961 - DNA, 25 bp, Probe Sequence
ggtcttggtattcttaagggaactt

SEQ ID NO: 18962 - DNA, 25 bp, Probe Sequence
attgagaatgtcttgcttgattgaa

SEQ ID NO: 18963 - DNA, 25 bp, Probe Sequence
aattgagaatgtcttgcttgattga

SEQ ID NO: 18964 - DNA, 25 bp, Probe Sequence
atctggttacagcataactaggatt

SEQ ID NO: 18965 - DNA, 25 bp, Probe Sequence
aatctggttacagcataactaggat

SEQ ID NO: 18966 - DNA, 25 bp, Probe Sequence
cactacttgcttatattgacaacaa

SEQ ID NO: 18967 - DNA, 25 bp, Probe Sequence
tctggttacagcataactaggatta

SEQ ID NO: 18968 - DNA, 25 bp, Probe Sequence
agagtgaatgtaatagtcttgcaga

SEQ ID NO: 18969 - DNA, 25 bp, Probe Sequence
ttgagaatgtcttgcttgattgaaa

SEQ ID NO: 18970 - DNA, 25 bp, Probe Sequence
gagtgaatgtaatagtcttgcagaa

SEQ ID NO: 18971 - DNA, 25 bp, Probe Sequence
ttgacaacaaatcatctcgctaaag

SEQ ID NO: 18972 - DNA, 25 bp, Probe Sequence
attgacaacaaatcatctcgctaaa

SEQ ID NO: 18973 - DNA, 25 bp, Probe Sequence
gctagagtttgtaaattctgggttc

SEQ ID NO: 18974 - DNA, 25 bp, Probe Sequence
gcgggaatactgtctcttctatgta

SEQ ID NO: 18975 - DNA, 25 bp, Probe Sequence
tcatctcgctaaagagtgaatgtag

SEQ ID NO: 18976 - DNA, 25 bp, Probe Sequence
aatcatctcgctaaagagtgaatgt

SEQ ID NO: 18977 - DNA, 25 bp, Probe Sequence
gacaacaaatcatctcgctaaagag

SEQ ID NO: 18978 - DNA, 25 bp, Probe Sequence
tgacaacaaatcatctcgctaaaga

SEQ ID NO: 18979 - DNA, 25 bp, Probe Sequence
ctggttacagcataactaggattat

SEQ ID NO: 18980 - DNA, 25 bp, Probe Sequence
caaggctagagtttgtaaattctgg

SEQ ID NO: 18981 - DNA, 25 bp, Probe Sequence
atcatctcgctaaagagtgaatgta

SEQ ID NO: 18982 - DNA, 25 bp, Probe Sequence
aaggctagagtttgtaaattctggg

SEQ ID NO: 18983 - DNA, 25 bp, Probe Sequence
aaatcatctcgctaaagagtgaatg

SEQ ID NO: 18984 - DNA, 25 bp, Probe Sequence
caaatcatctcgctaaagagtgaat

SEQ ID NO: 18985 - DNA, 25 bp, Probe Sequence
acaaatcatctcgctaaagagtgaa

SEQ ID NO: 18986 - DNA, 25 bp, Probe Sequence
tcgatctctgagttatggtgctata

SEQ ID NO: 18987 - DNA, 25 bp, Probe Sequence
gcatgattaaccagtatagcaacta

SEQ ID NO: 18988 - DNA, 25 bp, Probe Sequence
atctctgagttatggtgctatagga

SEQ ID NO: 18989 - DNA, 25 bp, Probe Sequence
taggagtaattgtcggacatgaatt

SEQ ID NO: 18990 - DNA, 25 bp, Probe Sequence
tatggtgctataggagtaattgtcg

SEQ ID NO: 18991 - DNA, 25 bp, Probe Sequence
tctgagttatggtgctataggagta

SEQ ID NO: 18992 - DNA, 25 bp, Probe Sequence
gatctctgagttatggtgctatagg

SEQ ID NO: 18993 - DNA, 25 bp, Probe Sequence
cgatctctgagttatggtgctatag

SEQ ID NO: 18994 - DNA, 25 bp, Probe Sequence
ataggagtaattgtcggacatgaat

SEQ ID NO: 18995 - DNA, 25 bp, Probe Sequence
gaaatggataaatgacagaaggcag

SEQ ID NO: 18996 - DNA, 25 bp, Probe Sequence
ggcttacaggaaatggataaatgac

SEQ ID NO: 18997 - DNA, 25 bp, Probe Sequence
caggaaatggataaatgacagaagg

SEQ ID NO: 18998 - DNA, 25 bp, Probe Sequence
tataggagtaattgtcggacatgaa

SEQ ID NO: 18999 - DNA, 25 bp, Probe Sequence
ctgagttatggtgctataggagtaa

SEQ ID NO: 19000 - DNA, 25 bp, Probe Sequence
gttggaaagatgtttgtagatgtgt

SEQ ID NO: 19001 - DNA, 25 bp, Probe Sequence
tgttggaaagatgtttgtagatgtg

SEQ ID NO: 19002 - DNA, 25 bp, Probe Sequence
ttagggcttacaggaaatggataaa

SEQ ID NO: 19003 - DNA, 25 bp, Probe Sequence
tttagggcttacaggaaatggataa

SEQ ID NO: 19004 - DNA, 25 bp, Probe Sequence
gcttacaggaaatggataaatgaca

SEQ ID NO: 19005 - DNA, 25 bp, Probe Sequence
tagggcttacaggaaatggataaat

SEQ ID NO: 19006 - DNA, 25 bp, Probe Sequence
gggcttacaggaaatggataaatga

SEQ ID NO: 19007 - DNA, 25 bp, Probe Sequence
agggcttacaggaaatggataaatg

SEQ ID NO: 19008 - DNA, 25 bp, Probe Sequence
agataagaaggaaatgatggaggaa

SEQ ID NO: 19009 - DNA, 25 bp, Probe Sequence
aagataagaaggaaatgatggagga

SEQ ID NO: 19010 - DNA, 25 bp, Probe Sequence
cttctcttcatcctcctactcctcc

SEQ ID NO: 19011 - DNA, 25 bp, Probe Sequence
ccttctcttcatcctcctactcctc

SEQ ID NO: 19012 - DNA, 25 bp, Probe Sequence
tgaccttctcttcatcctcctactc

SEQ ID NO: 19013 - DNA, 25 bp, Probe Sequence
gaccttctcttcatcctcctactcc

SEQ ID NO: 19014 - DNA, 25 bp, Probe Sequence
ttctcttcatcctcctactcctcct

SEQ ID NO: 19015 - DNA, 25 bp, Probe Sequence
accttctcttcatcctcctactcct

SEQ ID NO: 19016 - DNA, 25 bp, Probe Sequence
tctcttcatcctcctactcctcctc

SEQ ID NO: 19017 - DNA, 25 bp, Probe Sequence
gaccaagctcaagatctcctataag

SEQ ID NO: 19018 - DNA, 25 bp, Probe Sequence
agaccaagctcaagatctcctataa

SEQ ID NO: 19019 - DNA, 25 bp, Probe Sequence
aagaccaagctcaagatctcctata

SEQ ID NO: 19020 - DNA, 25 bp, Probe Sequence
taagaccaagctcaagatctcctat

SEQ ID NO: 19021 - DNA, 25 bp, Probe Sequence
atgaccttctcttcatcctcctact

SEQ ID NO: 19022 - DNA, 25 bp, Probe Sequence
ctaagaccaagctcaagatctccta

SEQ ID NO: 19023 - DNA, 25 bp, Probe Sequence
catgaccttctcttcatcctcctac

SEQ ID NO: 19024 - DNA, 25 bp, Probe Sequence
ctcccaagtggtgcctaaagtttaa

SEQ ID NO: 19025 - DNA, 25 bp, Probe Sequence
cttctccatgaccttctcttcatcc

SEQ ID NO: 19026 - DNA, 25 bp, Probe Sequence
accaagctcaagatctcctataagg

SEQ ID NO: 19027 - DNA, 25 bp, Probe Sequence
tcccaagtggtgcctaaagtttaac

SEQ ID NO: 19028 - DNA, 25 bp, Probe Sequence
ttctccatgaccttctcttcatcct

SEQ ID NO: 19029 - DNA, 25 bp, Probe Sequence
ccatgaccttctcttcatcctccta

SEQ ID NO: 19030 - DNA, 25 bp, Probe Sequence
tttcaacgcttaaaggtgtcttcct

SEQ ID NO: 19031 - DNA, 25 bp, Probe Sequence
gcttctccatgaccttctcttcatc

SEQ ID NO: 19032 - DNA, 25 bp, Probe Sequence
ctcttcatcctcctactcctcctcg

SEQ ID NO: 19033 - DNA, 25 bp, Probe Sequence
cttaaaggtgtcttcctcccaagtg

SEQ ID NO: 19034 - DNA, 25 bp, Probe Sequence
caataaatagatgagtcctgttaga

SEQ ID NO: 19035 - DNA, 25 bp, Probe Sequence
ataaatagatgagtcctgttagaaa

SEQ ID NO: 19036 - DNA, 25 bp, Probe Sequence
aataaatagatgagtcctgttagaa

SEQ ID NO: 19037 - DNA, 25 bp, Probe Sequence
tgaactgagaaggtcagattagggc

SEQ ID NO: 19038 - DNA, 25 bp, Probe Sequence
taaatagatgagtcctgttagaaaa

SEQ ID NO: 19039 - DNA, 25 bp, Probe Sequence
gaactgagaaggtcagattagggcg

SEQ ID NO: 19040 - DNA, 25 bp, Probe Sequence
cgatgtgtctattgaagattctgtg

SEQ ID NO: 19041 - DNA, 25 bp, Probe Sequence
ccgatgtgtctattgaagattctgt

SEQ ID NO: 19042 - DNA, 25 bp, Probe Sequence
gatgtgtctattgaagattctgtga

SEQ ID NO: 19043 - DNA, 25 bp, Probe Sequence
gccgatgtgtctattgaagattctg

SEQ ID NO: 19044 - DNA, 25 bp, Probe Sequence
atgtgtctattgaagattctgtgat

SEQ ID NO: 19045 - DNA, 25 bp, Probe Sequence
tgtgtctattgaagattctgtgatc

SEQ ID NO: 19046 - DNA, 25 bp, Probe Sequence
ccttaactcatctgttatcctgcta

SEQ ID NO: 19047 - DNA, 25 bp, Probe Sequence
gtcctcactttaatcctctatccag

SEQ ID NO: 19048 - DNA, 25 bp, Probe Sequence
cttaactcatctgttatcctgctag

SEQ ID NO: 19049 - DNA, 25 bp, Probe Sequence
tcctcactttaatcctctatccaga

SEQ ID NO: 19050 - DNA, 25 bp, Probe Sequence
ggtcctcactttaatcctctatcca

SEQ ID NO: 19051 - DNA, 25 bp, Probe Sequence
cctcactttaatcctctatccagaa

SEQ ID NO: 19052 - DNA, 25 bp, Probe Sequence
gaagaaagtacaaagacaggaaacg

SEQ ID NO: 19053 - DNA, 25 bp, Probe Sequence
caaaggtggaaatgaagaaagtaca

SEQ ID NO: 19054 - DNA, 25 bp, Probe Sequence
tgaagaaagtacaaagacaggaaac

SEQ ID NO: 19055 - DNA, 25 bp, Probe Sequence
ggtggaaatgaagaaagtacaaaga

SEQ ID NO: 19056 - DNA, 25 bp, Probe Sequence
aggtggaaatgaagaaagtacaaag

SEQ ID NO: 19057 - DNA, 25 bp, Probe Sequence
ggcaaaggtggaaatgaagaaagta

SEQ ID NO: 19058 - DNA, 25 bp, Probe Sequence
gaagcattaaaggactgactgaagg

SEQ ID NO: 19059 - DNA, 25 bp, Probe Sequence
ggaagcattaaaggactgactgaag

SEQ ID NO: 19060 - DNA, 25 bp, Probe Sequence
gaaggaaagtaatggaccagtgaag

SEQ ID NO: 19061 - DNA, 25 bp, Probe Sequence
gcaaaggtggaaatgaagaaagtac

SEQ ID NO: 19062 - DNA, 25 bp, Probe Sequence
aaggtggaaatgaagaaagtacaaa

SEQ ID NO: 19063 - DNA, 25 bp, Probe Sequence
aaaggtggaaatgaagaaagtacaa

SEQ ID NO: 19064 - DNA, 25 bp, Probe Sequence
tcaaagaaataaacaggagttcagc

SEQ ID NO: 19065 - DNA, 25 bp, Probe Sequence
caaagaaataaacaggagttcagcg

SEQ ID NO: 19066 - DNA, 25 bp, Probe Sequence
aaagaaataaacaggagttcagcgg

SEQ ID NO: 19067 - DNA, 25 bp, Probe Sequence
gaacatcaaagaaataaacaggagt

SEQ ID NO: 19068 - DNA, 25 bp, Probe Sequence
aaataaacaggagttcagcggagta

SEQ ID NO: 19069 - DNA, 25 bp, Probe Sequence
aggtgaatctattgaaagaagaaca

SEQ ID NO: 19070 - DNA, 25 bp, Probe Sequence
catcaaagaaataaacaggagttca

SEQ ID NO: 19071 - DNA, 25 bp, Probe Sequence
acatcaaagaaataaacaggagttc

SEQ ID NO: 19072 - DNA, 25 bp, Probe Sequence
agaacatcaaagaaataaacaggag

SEQ ID NO: 19073 - DNA, 25 bp, Probe Sequence
aataaacaggagttcagcggagtag

SEQ ID NO: 19074 - DNA, 25 bp, Probe Sequence
gagtagcagaagacaaggcatgtag

SEQ ID NO: 19075 - DNA, 25 bp, Probe Sequence
aagaaataaacaggagttcagcgga

SEQ ID NO: 19076 - DNA, 25 bp, Probe Sequence
agtcatgtcactgaaattgaatggg

SEQ ID NO: 19077 - DNA, 25 bp, Probe Sequence
atcaaagaaataaacaggagttcag

SEQ ID NO: 19078 - DNA, 25 bp, Probe Sequence
tctgtgagccgtttccaattctaaa

SEQ ID NO: 19079 - DNA, 25 bp, Probe Sequence
aagaacatcaaagaaataaacagga

SEQ ID NO: 19080 - DNA, 25 bp, Probe Sequence
aacatcaaagaaataaacaggagtt

SEQ ID NO: 19081 - DNA, 25 bp, Probe Sequence
ggtgaatctattgaaagaagaacat

SEQ ID NO: 19082 - DNA, 25 bp, Probe Sequence
aaggtgaatctattgaaagaagaac

SEQ ID NO: 19083 - DNA, 25 bp, Probe Sequence
agaaataaacaggagttcagcggag

SEQ ID NO: 19084 - DNA, 25 bp, Probe Sequence
gaagaacatcaaagaaataaacagg

SEQ ID NO: 19085 - DNA, 25 bp, Probe Sequence
gaaataaacaggagttcagcggagt

SEQ ID NO: 19086 - DNA, 25 bp, Probe Sequence
ctctgtgagccgtttccaattctaa

SEQ ID NO: 19087 - DNA, 25 bp, Probe Sequence
tggcaaaaccccttatttactaaaa

SEQ ID NO: 19088 - DNA, 25 bp, Probe Sequence
tttctttgaaggatgactacagaca

SEQ ID NO: 19089 - DNA, 25 bp, Probe Sequence
tctttgaaggatgactacagacatt

SEQ ID NO: 19090 - DNA, 25 bp, Probe Sequence
ttctttgaaggatgactacagacat

SEQ ID NO: 19091 - DNA, 25 bp, Probe Sequence
ttatgacatgatcgctttctacact

SEQ ID NO: 19092 - DNA, 25 bp, Probe Sequence
cttatgacatgatcgctttctacac

SEQ ID NO: 19093 - DNA, 25 bp, Probe Sequence
ctttgaaggatgactacagacatta

SEQ ID NO: 19094 - DNA, 25 bp, Probe Sequence
ttgcttatgacatgatcgctttcta

SEQ ID NO: 19095 - DNA, 25 bp, Probe Sequence
atgatcgctttctacactgtattac

SEQ ID NO: 19096 - DNA, 25 bp, Probe Sequence
tatgacatgatcgctttctacactg

SEQ ID NO: 19097 - DNA, 25 bp, Probe Sequence
attgcttatgacatgatcgctttct

SEQ ID NO: 19098 - DNA, 25 bp, Probe Sequence
catgatcgctttctacactgtatta

SEQ ID NO: 19099 - DNA, 25 bp, Probe Sequence
gcttatgacatgatcgctttctaca

SEQ ID NO: 19100 - DNA, 25 bp, Probe Sequence
tgcttatgacatgatcgctttctac

SEQ ID NO: 19101 - DNA, 25 bp, Probe Sequence
tgatcgctttctacactgtattaca

SEQ ID NO: 19102 - DNA, 25 bp, Probe Sequence
ttgaaggatgactacagacattaaa

SEQ ID NO: 19103 - DNA, 25 bp, Probe Sequence
tttgaaggatgactacagacattaa

SEQ ID NO: 19104 - DNA, 25 bp, Probe Sequence
cattgcttatgacatgatcgctttc

SEQ ID NO: 19105 - DNA, 25 bp, Probe Sequence
tttctttaaccagtctgaagtttca

SEQ ID NO: 19106 - DNA, 25 bp, Probe Sequence
aaccagtctgaagtttcatttatga

SEQ ID NO: 19107 - DNA, 25 bp, Probe Sequence
tctttaaccagtctgaagtttcatt

SEQ ID NO: 19108 - DNA, 25 bp, Probe Sequence
ttctttaaccagtctgaagtttcat

SEQ ID NO: 19109 - DNA, 25 bp, Probe Sequence
tgaaggatgactacagacattaaat

SEQ ID NO: 19110 - DNA, 25 bp, Probe Sequence
acatgatcgctttctacactgtatt

SEQ ID NO: 19111 - DNA, 25 bp, Probe Sequence
gacatgatcgctttctacactgtat

SEQ ID NO: 19112 - DNA, 25 bp, Probe Sequence
ccacactgaacccaattacacacag

SEQ ID NO: 19113 - DNA, 25 bp, Probe Sequence
acctgtacccttcttctctctcctg

SEQ ID NO: 19114 - DNA, 25 bp, Probe Sequence
cacctgtacccttcttctctctcct

SEQ ID NO: 19115 - DNA, 25 bp, Probe Sequence
cacactgaacccaattacacacagc

SEQ ID NO: 19116 - DNA, 25 bp, Probe Sequence
ctgtacccttcttctctctcctgca

SEQ ID NO: 19117 - DNA, 25 bp, Probe Sequence
gatcccagggaaatatcagccttgg

SEQ ID NO: 19118 - DNA, 25 bp, Probe Sequence
aaggctgagctggagattcagaaag

SEQ ID NO: 19119 - DNA, 25 bp, Probe Sequence
gaaggctgagctggagattcagaaa

SEQ ID NO: 19120 - DNA, 25 bp, Probe Sequence
ggatcccagggaaatatcagccttg

SEQ ID NO: 19121 - DNA, 25 bp, Probe Sequence
tggatcccagggaaatatcagcctt

SEQ ID NO: 19122 - DNA, 25 bp, Probe Sequence
atctatgatgtaccaggaaggcaag

SEQ ID NO: 19123 - DNA, 25 bp, Probe Sequence
gagagtcgtgttcagcatctatgat

SEQ ID NO: 19124 - DNA, 25 bp, Probe Sequence
ctatgatgtaccaggaaggcaagtt

SEQ ID NO: 19125 - DNA, 25 bp, Probe Sequence
tatgatgtaccaggaaggcaagttc

SEQ ID NO: 19126 - DNA, 25 bp, Probe Sequence
tccataaggcatttcttgaggtaaa

SEQ ID NO: 19127 - DNA, 25 bp, Probe Sequence
ttccataaggcatttcttgaggtaa

SEQ ID NO: 19128 - DNA, 25 bp, Probe Sequence
attccataaggcatttcttgaggta

SEQ ID NO: 19129 - DNA, 25 bp, Probe Sequence
gaggtaaatgaagaaggcagtgaag

SEQ ID NO: 19130 - DNA, 25 bp, Probe Sequence
cattccataaggcatttcttgaggt

SEQ ID NO: 19131 - DNA, 25 bp, Probe Sequence
gatgaattggaggagatgatgctgg

SEQ ID NO: 19132 - DNA, 25 bp, Probe Sequence
ggatgaattggaggagatgatgctg

SEQ ID NO: 19133 - DNA, 25 bp, Probe Sequence
ctggatgaattggaggagatgatgc

SEQ ID NO: 19134 - DNA, 25 bp, Probe Sequence
gctggatgaattggaggagatgatg

SEQ ID NO: 19135 - DNA, 25 bp, Probe Sequence
tctatgatgtaccaggaaggcaagt

SEQ ID NO: 19136 - DNA, 25 bp, Probe Sequence
acaaggaaggaactgttctacaagg

SEQ ID NO: 19137 - DNA, 25 bp, Probe Sequence
ccataaggcatttcttgaggtaaat

SEQ ID NO: 19138 - DNA, 25 bp, Probe Sequence
cttgaggtaaatgaagaaggcagtg

SEQ ID NO: 19139 - DNA, 25 bp, Probe Sequence
atggagagtcgtgttcagcatctat

SEQ ID NO: 19140 - DNA, 25 bp, Probe Sequence
tgaggtaaatgaagaaggcagtgaa

SEQ ID NO: 19141 - DNA, 25 bp, Probe Sequence
ttgaggtaaatgaagaaggcagtga

SEQ ID NO: 19142 - DNA, 25 bp, Probe Sequence
aacactattatcttcatgggcagag

SEQ ID NO: 19143 - DNA, 25 bp, Probe Sequence
gaacactattatcttcatgggcaga

SEQ ID NO: 19144 - DNA, 25 bp, Probe Sequence
gaaggaactgttctacaaggctgat

SEQ ID NO: 19145 - DNA, 25 bp, Probe Sequence
ctattatcttcatgggcagagtagc

SEQ ID NO: 19146 - DNA, 25 bp, Probe Sequence
acatagatgtgaaatttaggcaacc

SEQ ID NO: 19147 - DNA, 25 bp, Probe Sequence
gcaaccttctaaatcttttcaccat

SEQ ID NO: 19148 - DNA, 25 bp, Probe Sequence
agatgtgaaatttaggcaaccttct

SEQ ID NO: 19149 - DNA, 25 bp, Probe Sequence
gatgtgaaatttaggcaaccttcta

SEQ ID NO: 19150 - DNA, 25 bp, Probe Sequence
tagatgtgaaatttaggcaaccttc

SEQ ID NO: 19151 - DNA, 25 bp, Probe Sequence
catagatgtgaaatttaggcaacct

SEQ ID NO: 19152 - DNA, 25 bp, Probe Sequence
gacatagatgtgaaatttaggcaac

SEQ ID NO: 19153 - DNA, 25 bp, Probe Sequence
agacatagatgtgaaatttaggcaa

SEQ ID NO: 19154 - DNA, 25 bp, Probe Sequence
aagacatagatgtgaaatttaggca

SEQ ID NO: 19155 - DNA, 25 bp, Probe Sequence
atgtgaaatttaggcaaccttctaa

SEQ ID NO: 19156 - DNA, 25 bp, Probe Sequence
atagatgtgaaatttaggcaacctt

SEQ ID NO: 19157 - DNA, 25 bp, Probe Sequence
ggcaaccttctaaatcttttcacca

SEQ ID NO: 19158 - DNA, 25 bp, Probe Sequence
aaagacatagatgtgaaatttaggc

SEQ ID NO: 19159 - DNA, 25 bp, Probe Sequence
caaccttctaaatcttttcaccatg

SEQ ID NO: 19160 - DNA, 25 bp, Probe Sequence
taggcaaccttctaaatcttttcac

SEQ ID NO: 19161 - DNA, 25 bp, Probe Sequence
aggcaaccttctaaatcttttcacc

SEQ ID NO: 19162 - DNA, 25 bp, Probe Sequence
ttaggcaaccttctaaatcttttca

SEQ ID NO: 19163 - DNA, 25 bp, Probe Sequence
actcaaagacatagatgtgaaattt

SEQ ID NO: 19164 - DNA, 25 bp, Probe Sequence
tactcaaagacatagatgtgaaatt

SEQ ID NO: 19165 - DNA, 25 bp, Probe Sequence
ttactcaaagacatagatgtgaaat

SEQ ID NO: 19166 - DNA, 25 bp, Probe Sequence
tgtgaaatttaggcaaccttctaaa

SEQ ID NO: 19167 - DNA, 25 bp, Probe Sequence
caaagacatagatgtgaaatttagg

SEQ ID NO: 19168 - DNA, 25 bp, Probe Sequence
gataatacttagaagggttaattgg

SEQ ID NO: 19169 - DNA, 25 bp, Probe Sequence
tcaaagacatagatgtgaaatttag

SEQ ID NO: 19170 - DNA, 25 bp, Probe Sequence
tttccagccaataaatcaactccag

SEQ ID NO: 19171 - DNA, 25 bp, Probe Sequence
ctttccagccaataaatcaactcca

SEQ ID NO: 19172 - DNA, 25 bp, Probe Sequence
agtttctcctttattgctcctgtac

SEQ ID NO: 19173 - DNA, 25 bp, Probe Sequence
cctttccagccaataaatcaactcc

SEQ ID NO: 19174 - DNA, 25 bp, Probe Sequence
ccctttccagccaataaatcaactc

SEQ ID NO: 19175 - DNA, 25 bp, Probe Sequence
cagtttctcctttattgctcctgta

SEQ ID NO: 19176 - DNA, 25 bp, Probe Sequence
cctcagtttctcctttattgctcct

SEQ ID NO: 19177 - DNA, 25 bp, Probe Sequence
tttctcctttattgctcctgtacga

SEQ ID NO: 19178 - DNA, 25 bp, Probe Sequence
gtttctcctttattgctcctgtacg

SEQ ID NO: 19179 - DNA, 25 bp, Probe Sequence
ttctcctttattgctcctgtacgaa

SEQ ID NO: 19180 - DNA, 25 bp, Probe Sequence
ctcagtttctcctttattgctcctg

SEQ ID NO: 19181 - DNA, 25 bp, Probe Sequence
agaggattgaggcttaattctgagc

SEQ ID NO: 19182 - DNA, 25 bp, Probe Sequence
tctcctttattgctcctgtacgaac

SEQ ID NO: 19183 - DNA, 25 bp, Probe Sequence
tcagtttctcctttattgctcctgt

SEQ ID NO: 19184 - DNA, 25 bp, Probe Sequence
gaggattgaggcttaattctgagct

SEQ ID NO: 19185 - DNA, 25 bp, Probe Sequence
cagaggattgaggcttaattctgag

SEQ ID NO: 19186 - DNA, 25 bp, Probe Sequence
catagagaagagggatcacatcgtg

SEQ ID NO: 19187 - DNA, 25 bp, Probe Sequence
ctcctttattgctcctgtacgaacc

SEQ ID NO: 19188 - DNA, 25 bp, Probe Sequence
ttccagccaataaatcaactccagc

SEQ ID NO: 19189 - DNA, 25 bp, Probe Sequence
ccatagagaagagggatcacatcgt

SEQ ID NO: 19190 - DNA, 25 bp, Probe Sequence
acagtcatcattccgaacctccaag

SEQ ID NO: 19191 - DNA, 25 bp, Probe Sequence
aggattgaggcttaattctgagctg

SEQ ID NO: 19192 - DNA, 25 bp, Probe Sequence
gccctttccagccaataaatcaact

SEQ ID NO: 19193 - DNA, 25 bp, Probe Sequence
gtgattccctttctcaggttcttcc

SEQ ID NO: 19194 - DNA, 25 bp, Probe Sequence
gttcacaaaggagacctatgacttc

SEQ ID NO: 19195 - DNA, 25 bp, Probe Sequence
cataacgtcctctccattaaagtga

SEQ ID NO: 19196 - DNA, 25 bp, Probe Sequence
tcataacgtcctctccattaaagtg

SEQ ID NO: 19197 - DNA, 25 bp, Probe Sequence
gtcataacgtcctctccattaaagt

SEQ ID NO: 19198 - DNA, 25 bp, Probe Sequence
ggtcataacgtcctctccattaaag

SEQ ID NO: 19199 - DNA, 25 bp, Probe Sequence
ataacgtcctctccattaaagtgag

SEQ ID NO: 19200 - DNA, 25 bp, Probe Sequence
ttcacaaaggagacctatgacttcg

SEQ ID NO: 19201 - DNA, 25 bp, Probe Sequence
ggttcacaaaggagacctatgactt

SEQ ID NO: 19202 - DNA, 25 bp, Probe Sequence
aggtcataacgtcctctccattaaa

SEQ ID NO: 19203 - DNA, 25 bp, Probe Sequence
aaaggagacctatgacttcgacatc

SEQ ID NO: 19204 - DNA, 25 bp, Probe Sequence
ttcaaggacacctacttcgtgacag

SEQ ID NO: 19205 - DNA, 25 bp, Probe Sequence
cttcaaggacacctacttcgtgaca

SEQ ID NO: 19206 - DNA, 25 bp, Probe Sequence
caaaggagacctatgacttcgacat

SEQ ID NO: 19207 - DNA, 25 bp, Probe Sequence
aaggagacctatgacttcgacatcg

SEQ ID NO: 19208 - DNA, 25 bp, Probe Sequence
cacaaaggagacctatgacttcgac

SEQ ID NO: 19209 - DNA, 25 bp, Probe Sequence
tcacaaaggagacctatgacttcga

SEQ ID NO: 19210 - DNA, 25 bp, Probe Sequence
gaagtacgggatctacaccaaggtc

SEQ ID NO: 19211 - DNA, 25 bp, Probe Sequence
acaaaggagacctatgacttcgaca

SEQ ID NO: 19212 - DNA, 25 bp, Probe Sequence
gtcctctccattaaagtgagatccc

SEQ ID NO: 19213 - DNA, 25 bp, Probe Sequence
taacgtcctctccattaaagtgaga

SEQ ID NO: 19214 - DNA, 25 bp, Probe Sequence
cagcttcatcatcacccagaacatg

SEQ ID NO: 19215 - DNA, 25 bp, Probe Sequence
cctctccattaaagtgagatcccac

SEQ ID NO: 19216 - DNA, 25 bp, Probe Sequence
tcctctccattaaagtgagatccca

SEQ ID NO: 19217 - DNA, 25 bp, Probe Sequence
cgtcctctccattaaagtgagatcc

SEQ ID NO: 19218 - DNA, 25 bp, Probe Sequence
ctcatctttccctccttggtgattc

SEQ ID NO: 19219 - DNA, 25 bp, Probe Sequence
gcgaggaactcaataaagtgctttg

SEQ ID NO: 19220 - DNA, 25 bp, Probe Sequence
gaggaactcaataaagtgctttgaa

SEQ ID NO: 19221 - DNA, 25 bp, Probe Sequence
aggaactcaataaagtgctttgaaa

SEQ ID NO: 19222 - DNA, 25 bp, Probe Sequence
actcatctttccctccttggtgatt

SEQ ID NO: 19223 - DNA, 25 bp, Probe Sequence
aataaagtgctttgaaaatgctgag

SEQ ID NO: 19224 - DNA, 25 bp, Probe Sequence
caggatggcgaggaactcaataaag

SEQ ID NO: 19225 - DNA, 25 bp, Probe Sequence
caataaagtgctttgaaaatgctga

SEQ ID NO: 19226 - DNA, 25 bp, Probe Sequence
cgaggaactcaataaagtgctttga

SEQ ID NO: 19227 - DNA, 25 bp, Probe Sequence
ggatggcgaggaactcaataaagtg

SEQ ID NO: 19228 - DNA, 25 bp, Probe Sequence
gactcatctttccctccttggtgat

SEQ ID NO: 19229 - DNA, 25 bp, Probe Sequence
aggatggcgaggaactcaataaagt

SEQ ID NO: 19230 - DNA, 25 bp, Probe Sequence
tcatctttccctccttggtgattcc

SEQ ID NO: 19231 - DNA, 25 bp, Probe Sequence
ggcgaggaactcaataaagtgcttt

SEQ ID NO: 19232 - DNA, 25 bp, Probe Sequence
gatggcgaggaactcaataaagtgc

SEQ ID NO: 19233 - DNA, 25 bp, Probe Sequence
atggcgaggaactcaataaagtgct

SEQ ID NO: 19234 - DNA, 25 bp, Probe Sequence
tgattgctcagggactcatctttcc

SEQ ID NO: 19235 - DNA, 25 bp, Probe Sequence
tcaataaagtgctttgaaaatgctg

SEQ ID NO: 19236 - DNA, 25 bp, Probe Sequence
actcaataaagtgctttgaaaatgc

SEQ ID NO: 19237 - DNA, 25 bp, Probe Sequence
tggcgaggaactcaataaagtgctt

SEQ ID NO: 19238 - DNA, 25 bp, Probe Sequence
ctcaataaagtgctttgaaaatgct

SEQ ID NO: 19239 - DNA, 25 bp, Probe Sequence
ggaactcaataaagtgctttgaaaa

SEQ ID NO: 19240 - DNA, 25 bp, Probe Sequence
ccaggatggcgaggaactcaataaa

SEQ ID NO: 19241 - DNA, 25 bp, Probe Sequence
ctgattgctcagggactcatctttc

SEQ ID NO: 19242 - DNA, 25 bp, Probe Sequence
gaagaagtggatacagaaggtcatt

SEQ ID NO: 19243 - DNA, 25 bp, Probe Sequence
aagaagtggatacagaaggtcattg

SEQ ID NO: 19244 - DNA, 25 bp, Probe Sequence
gaagtggatacagaaggtcattgat

SEQ ID NO: 19245 - DNA, 25 bp, Probe Sequence
agaagtggatacagaaggtcattga

SEQ ID NO: 19246 - DNA, 25 bp, Probe Sequence
aagtggatacagaaggtcattgatc

SEQ ID NO: 19247 - DNA, 25 bp, Probe Sequence
tgaagaagtggatacagaaggtcat

SEQ ID NO: 19248 - DNA, 25 bp, Probe Sequence
ctgaagaagtggatacagaaggtca

SEQ ID NO: 19249 - DNA, 25 bp, Probe Sequence
gaaccaatcccgtgaaagaattatt

SEQ ID NO: 19250 - DNA, 25 bp, Probe Sequence
aaccaatcccgtgaaagaattattt

SEQ ID NO: 19251 - DNA, 25 bp, Probe Sequence
aagaacttcaccgagaatgaccttc

SEQ ID NO: 19252 - DNA, 25 bp, Probe Sequence
cctgaagaagtggatacagaaggtc

SEQ ID NO: 19253 - DNA, 25 bp, Probe Sequence
caagaacttcaccgagaatgacctt

SEQ ID NO: 19254 - DNA, 25 bp, Probe Sequence
gatgggaaatatggcttctacacac

SEQ ID NO: 19255 - DNA, 25 bp, Probe Sequence
agtgagtaccagactttcttcaatc

SEQ ID NO: 19256 - DNA, 25 bp, Probe Sequence
cagtgagtaccagactttcttcaat

SEQ ID NO: 19257 - DNA, 25 bp, Probe Sequence
ctgttgccttcagtgactacattca

SEQ ID NO: 19258 - DNA, 25 bp, Probe Sequence
tgggaaatatggcttctacacacat

SEQ ID NO: 19259 - DNA, 25 bp, Probe Sequence
atgggaaatatggcttctacacaca

SEQ ID NO: 19260 - DNA, 25 bp, Probe Sequence
gtgagtaccagactttcttcaatcc

SEQ ID NO: 19261 - DNA, 25 bp, Probe Sequence
ggatgggaaatatggcttctacaca

SEQ ID NO: 19262 - DNA, 25 bp, Probe Sequence
gacaagaacttcaccgagaatgacc

SEQ ID NO: 19263 - DNA, 25 bp, Probe Sequence
ggacaagaacttcaccgagaatgac

SEQ ID NO: 19264 - DNA, 25 bp, Probe Sequence
gggaaatatggcttctacacacatg

SEQ ID NO: 19265 - DNA, 25 bp, Probe Sequence
ggaaccaatcccgtgaaagaattat

SEQ ID NO: 19266 - DNA, 25 bp, Probe Sequence
tgctgtccaatttctattaaaggtt

SEQ ID NO: 19267 - DNA, 25 bp, Probe Sequence
gctttcttgctgtccaatttctatt

SEQ ID NO: 19268 - DNA, 25 bp, Probe Sequence
tgttccctaagtccaactactaaac

SEQ ID NO: 19269 - DNA, 25 bp, Probe Sequence
ttccctaagtccaactactaaactg

SEQ ID NO: 19270 - DNA, 25 bp, Probe Sequence
gttccctaagtccaactactaaact

SEQ ID NO: 19271 - DNA, 25 bp, Probe Sequence
ctttgttccctaagtccaactacta

SEQ ID NO: 19272 - DNA, 25 bp, Probe Sequence
ttgttccctaagtccaactactaaa

SEQ ID NO: 19273 - DNA, 25 bp, Probe Sequence
tttgttccctaagtccaactactaa

SEQ ID NO: 19274 - DNA, 25 bp, Probe Sequence
atctgtccactcctgatgctgttat

SEQ ID NO: 19275 - DNA, 25 bp, Probe Sequence
gctgtccaatttctattaaaggttc

SEQ ID NO: 19276 - DNA, 25 bp, Probe Sequence
ttgctgtccaatttctattaaaggt

SEQ ID NO: 19277 - DNA, 25 bp, Probe Sequence
ttcctttgttccctaagtccaacta

SEQ ID NO: 19278 - DNA, 25 bp, Probe Sequence
tgtccaatttctattaaaggttcct

SEQ ID NO: 19279 - DNA, 25 bp, Probe Sequence
cttgctgtccaatttctattaaagg

SEQ ID NO: 19280 - DNA, 25 bp, Probe Sequence
ctgtccaatttctattaaaggttcc

SEQ ID NO: 19281 - DNA, 25 bp, Probe Sequence
cctttgttccctaagtccaactact

SEQ ID NO: 19282 - DNA, 25 bp, Probe Sequence
tcctttgttccctaagtccaactac

SEQ ID NO: 19283 - DNA, 25 bp, Probe Sequence
caactgtgttcactagcaacctcaa

SEQ ID NO: 19284 - DNA, 25 bp, Probe Sequence
cgctttcttgctgtccaatttctat

SEQ ID NO: 19285 - DNA, 25 bp, Probe Sequence
tgagcatctggattctgcctaataa

SEQ ID NO: 19286 - DNA, 25 bp, Probe Sequence
ttgagcatctggattctgcctaata

SEQ ID NO: 19287 - DNA, 25 bp, Probe Sequence
tcttgctgtccaatttctattaaag

SEQ ID NO: 19288 - DNA, 25 bp, Probe Sequence
ctttcttgctgtccaatttctatta

SEQ ID NO: 19289 - DNA, 25 bp, Probe Sequence
tctgtccactcctgatgctgttatg

SEQ ID NO: 19290 - DNA, 25 bp, Probe Sequence
tgtagcctgaatgtcttactgtgat

SEQ ID NO: 19291 - DNA, 25 bp, Probe Sequence
ttgtagcctgaatgtcttactgtga

SEQ ID NO: 19292 - DNA, 25 bp, Probe Sequence
gtagcctgaatgtcttactgtgatc

SEQ ID NO: 19293 - DNA, 25 bp, Probe Sequence
tatttgttcagtgactattctcggg

SEQ ID NO: 19294 - DNA, 25 bp, Probe Sequence
gtatttgttcagtgactattctcgg

SEQ ID NO: 19295 - DNA, 25 bp, Probe Sequence
gcactttgtatattggttgaaactg

SEQ ID NO: 19296 - DNA, 25 bp, Probe Sequence
tttgtagcctgaatgtcttactgtg

SEQ ID NO: 19297 - DNA, 25 bp, Probe Sequence
cctctgaaatgcctcttctttatgt

SEQ ID NO: 19298 - DNA, 25 bp, Probe Sequence
tgtatttgttcagtgactattctcg

SEQ ID NO: 19299 - DNA, 25 bp, Probe Sequence
ctctgaaatgcctcttctttatgta

SEQ ID NO: 19300 - DNA, 25 bp, Probe Sequence
cgttgtatgtatgagtggcttctgg

SEQ ID NO: 19301 - DNA, 25 bp, Probe Sequence
ccgttgtatgtatgagtggcttctg

SEQ ID NO: 19302 - DNA, 25 bp, Probe Sequence
cactttgtatattggttgaaactgt

SEQ ID NO: 19303 - DNA, 25 bp, Probe Sequence
tctgaaatgcctcttctttatgtac

SEQ ID NO: 19304 - DNA, 25 bp, Probe Sequence
gttgctgtatttgttcagtgactat

SEQ ID NO: 19305 - DNA, 25 bp, Probe Sequence
gcctctgaaatgcctcttctttatg

SEQ ID NO: 19306 - DNA, 25 bp, Probe Sequence
tgctgtatttgttcagtgactattc

SEQ ID NO: 19307 - DNA, 25 bp, Probe Sequence
gctgtatttgttcagtgactattct

SEQ ID NO: 19308 - DNA, 25 bp, Probe Sequence
ttgctgtatttgttcagtgactatt

SEQ ID NO: 19309 - DNA, 25 bp, Probe Sequence
ggttgctgtatttgttcagtgacta

SEQ ID NO: 19310 - DNA, 25 bp, Probe Sequence
tgcctctgaaatgcctcttctttat

SEQ ID NO: 19311 - DNA, 25 bp, Probe Sequence
tattgcctctgaaatgcctcttctt

SEQ ID NO: 19312 - DNA, 25 bp, Probe Sequence
ttattgcctctgaaatgcctcttct

SEQ ID NO: 19313 - DNA, 25 bp, Probe Sequence
gttattgcctctgaaatgcctcttc

SEQ ID NO: 19314 - DNA, 25 bp, Probe Sequence
accgtagtcactgtatggaataatt

SEQ ID NO: 19315 - DNA, 25 bp, Probe Sequence
cgtagtcactgtatggaataattgg

SEQ ID NO: 19316 - DNA, 25 bp, Probe Sequence
ccgtagtcactgtatggaataattg

SEQ ID NO: 19317 - DNA, 25 bp, Probe Sequence
atagcacctcagactctcaacttaa

SEQ ID NO: 19318 - DNA, 25 bp, Probe Sequence
catagcacctcagactctcaactta

SEQ ID NO: 19319 - DNA, 25 bp, Probe Sequence
gtagtcactgtatggaataattggt

SEQ ID NO: 19320 - DNA, 25 bp, Probe Sequence
tagcacctcagactctcaacttaac

SEQ ID NO: 19321 - DNA, 25 bp, Probe Sequence
gaccgtagtcactgtatggaataat

SEQ ID NO: 19322 - DNA, 25 bp, Probe Sequence
tagtcactgtatggaataattggtt

SEQ ID NO: 19323 - DNA, 25 bp, Probe Sequence
cagactctcaacttaactgctgtta

SEQ ID NO: 19324 - DNA, 25 bp, Probe Sequence
tcagactctcaacttaactgctgtt

SEQ ID NO: 19325 - DNA, 25 bp, Probe Sequence
tcatagcacctcagactctcaactt

SEQ ID NO: 19326 - DNA, 25 bp, Probe Sequence
ctgttaatgaagctgttctgataga

SEQ ID NO: 19327 - DNA, 25 bp, Probe Sequence
ttaacacaagcgagatgaagaaact

SEQ ID NO: 19328 - DNA, 25 bp, Probe Sequence
ctcagactctcaacttaactgctgt

SEQ ID NO: 19329 - DNA, 25 bp, Probe Sequence
cttaacacaagcgagatgaagaaac

SEQ ID NO: 19330 - DNA, 25 bp, Probe Sequence
ctaaactgatttccttgccaactag

SEQ ID NO: 19331 - DNA, 25 bp, Probe Sequence
agcacctcagactctcaacttaact

SEQ ID NO: 19332 - DNA, 25 bp, Probe Sequence
taacacaagcgagatgaagaaactg

SEQ ID NO: 19333 - DNA, 25 bp, Probe Sequence
gctaaactgatttccttgccaacta

SEQ ID NO: 19334 - DNA, 25 bp, Probe Sequence
agtcactgtatggaataattggttt

SEQ ID NO: 19335 - DNA, 25 bp, Probe Sequence
ctcatagcacctcagactctcaact

SEQ ID NO: 19336 - DNA, 25 bp, Probe Sequence
ctcttaacacaagcgagatgaagaa

SEQ ID NO: 19337 - DNA, 25 bp, Probe Sequence
gtcactgaaagggctaaactgattt

SEQ ID NO: 19338 - DNA, 25 bp, Probe Sequence
actatatcaacctcatcaagactgg

SEQ ID NO: 19339 - DNA, 25 bp, Probe Sequence
ccactatatcaacctcatcaagact

SEQ ID NO: 19340 - DNA, 25 bp, Probe Sequence
tccactatatcaacctcatcaagac

SEQ ID NO: 19341 - DNA, 25 bp, Probe Sequence
ttccactatatcaacctcatcaaga

SEQ ID NO: 19342 - DNA, 25 bp, Probe Sequence
tctactacaacagagattccgagaa

SEQ ID NO: 19343 - DNA, 25 bp, Probe Sequence
ttctactacaacagagattccgaga

SEQ ID NO: 19344 - DNA, 25 bp, Probe Sequence
cactatatcaacctcatcaagactg

SEQ ID NO: 19345 - DNA, 25 bp, Probe Sequence
ctacaagcacaatggaacagaactc

SEQ ID NO: 19346 - DNA, 25 bp, Probe Sequence
tacaagcacaatggaacagaactca

SEQ ID NO: 19347 - DNA, 25 bp, Probe Sequence
tatatcaacctcatcaagactggtg

SEQ ID NO: 19348 - DNA, 25 bp, Probe Sequence
ctactacaacagagattccgagaat

SEQ ID NO: 19349 - DNA, 25 bp, Probe Sequence
ctatatcaacctcatcaagactggt

SEQ ID NO: 19350 - DNA, 25 bp, Probe Sequence
tactacaacagagattccgagaatt

SEQ ID NO: 19351 - DNA, 25 bp, Probe Sequence
ctgtttgattatgtcgtgaagtgta

SEQ ID NO: 19352 - DNA, 25 bp, Probe Sequence
atatcaacctcatcaagactggtgt

SEQ ID NO: 19353 - DNA, 25 bp, Probe Sequence
tgtttgattatgtcgtgaagtgtaa

SEQ ID NO: 19354 - DNA, 25 bp, Probe Sequence
tttctactacaacagagattccgag

SEQ ID NO: 19355 - DNA, 25 bp, Probe Sequence
ctttctactacaacagagattccga

SEQ ID NO: 19356 - DNA, 25 bp, Probe Sequence
tctttctactacaacagagattccg

SEQ ID NO: 19357 - DNA, 25 bp, Probe Sequence
cgtcttctctttctactacaacaga

SEQ ID NO: 19358 - DNA, 25 bp, Probe Sequence
caagaagaggctgtttgattatgtc

SEQ ID NO: 19359 - DNA, 25 bp, Probe Sequence
catcctacatctcaggttctaccag

SEQ ID NO: 19360 - DNA, 25 bp, Probe Sequence
aagaagaggctgtttgattatgtcg

SEQ ID NO: 19361 - DNA, 25 bp, Probe Sequence
ccgaaagttctacacagagtttgat

SEQ ID NO: 19362 - DNA, 25 bp, Probe Sequence
ctctacagggctcgagaaacctatg

SEQ ID NO: 19363 - DNA, 25 bp, Probe Sequence
tctctacagggctcgagaaacctat

SEQ ID NO: 19364 - DNA, 25 bp, Probe Sequence
tgtgaggctgttagactgttagatt

SEQ ID NO: 19365 - DNA, 25 bp, Probe Sequence
gtgtgaggctgttagactgttagat

SEQ ID NO: 19366 - DNA, 25 bp, Probe Sequence
cttggatagagttgaggagtgtgag

SEQ ID NO: 19367 - DNA, 25 bp, Probe Sequence
gtgaggctgttagactgttagattt

SEQ ID NO: 19368 - DNA, 25 bp, Probe Sequence
tgaggctgttagactgttagattta

SEQ ID NO: 19369 - DNA, 25 bp, Probe Sequence
gagtgtgaggctgttagactgttag

SEQ ID NO: 19370 - DNA, 25 bp, Probe Sequence
ttggatagagttgaggagtgtgagg

SEQ ID NO: 19371 - DNA, 25 bp, Probe Sequence
agtgtgaggctgttagactgttaga

SEQ ID NO: 19372 - DNA, 25 bp, Probe Sequence
gaggctgttagactgttagatttaa

SEQ ID NO: 19373 - DNA, 25 bp, Probe Sequence
gcttggatagagttgaggagtgtga

SEQ ID NO: 19374 - DNA, 25 bp, Probe Sequence
ggagtgtgaggctgttagactgtta

SEQ ID NO: 19375 - DNA, 25 bp, Probe Sequence
gatagagttgaggagtgtgaggctg

SEQ ID NO: 19376 - DNA, 25 bp, Probe Sequence
aggctgttagactgttagatttaaa

SEQ ID NO: 19377 - DNA, 25 bp, Probe Sequence
gagttgaggagtgtgaggctgttag

SEQ ID NO: 19378 - DNA, 25 bp, Probe Sequence
ggcttggatagagttgaggagtgtg

SEQ ID NO: 19379 - DNA, 25 bp, Probe Sequence
atagagttgaggagtgtgaggctgt

SEQ ID NO: 19380 - DNA, 25 bp, Probe Sequence
gttgaggagtgtgaggctgttagac

SEQ ID NO: 19381 - DNA, 25 bp, Probe Sequence
agttgaggagtgtgaggctgttaga

SEQ ID NO: 19382 - DNA, 25 bp, Probe Sequence
agagttgaggagtgtgaggctgtta

SEQ ID NO: 19383 - DNA, 25 bp, Probe Sequence
tagagttgaggagtgtgaggctgtt

SEQ ID NO: 19384 - DNA, 25 bp, Probe Sequence
ggatagagttgaggagtgtgaggct

SEQ ID NO: 19385 - DNA, 25 bp, Probe Sequence
ttgaggagtgtgaggctgttagact

SEQ ID NO: 19386 - DNA, 25 bp, Probe Sequence
tctctgagtgtgacttgggctaaag

SEQ ID NO: 19387 - DNA, 25 bp, Probe Sequence
ctctctgagtgtgacttgggctaaa

SEQ ID NO: 19388 - DNA, 25 bp, Probe Sequence
aagttgaagaagatatgtgaagaaa

SEQ ID NO: 19389 - DNA, 25 bp, Probe Sequence
aaagttgaagaagatatgtgaagaa

SEQ ID NO: 19390 - DNA, 25 bp, Probe Sequence
tttatgacagtgaacattctgattt

SEQ ID NO: 19391 - DNA, 25 bp, Probe Sequence
atttatgacagtgaacattctgatt

SEQ ID NO: 19392 - DNA, 25 bp, Probe Sequence
tgacagtgaacattctgattttaca

SEQ ID NO: 19393 - DNA, 25 bp, Probe Sequence
ttatttatgacagtgaacattctga

SEQ ID NO: 19394 - DNA, 25 bp, Probe Sequence
tatttatgacagtgaacattctgat

SEQ ID NO: 19395 - DNA, 25 bp, Probe Sequence
gacagtgaacattctgattttacat

SEQ ID NO: 19396 - DNA, 25 bp, Probe Sequence
atgacagtgaacattctgattttac

SEQ ID NO: 19397 - DNA, 25 bp, Probe Sequence
tttatttatgacagtgaacattctg

SEQ ID NO: 19398 - DNA, 25 bp, Probe Sequence
acagtgaacattctgattttacatg

SEQ ID NO: 19399 - DNA, 25 bp, Probe Sequence
agttgaagaagatatgtgaagaaaa

SEQ ID NO: 19400 - DNA, 25 bp, Probe Sequence
aaaagttgaagaagatatgtgaaga

SEQ ID NO: 19401 - DNA, 25 bp, Probe Sequence
agaaaagttgaagaagatatgtgaa

SEQ ID NO: 19402 - DNA, 25 bp, Probe Sequence
aagaaaagttgaagaagatatgtga

SEQ ID NO: 19403 - DNA, 25 bp, Probe Sequence
ttatgacagtgaacattctgatttt

SEQ ID NO: 19404 - DNA, 25 bp, Probe Sequence
gaaaagttgaagaagatatgtgaag

SEQ ID NO: 19405 - DNA, 25 bp, Probe Sequence
caagaaaagttgaagaagatatgtg

SEQ ID NO: 19406 - DNA, 25 bp, Probe Sequence
acaagaaaagttgaagaagatatgt

SEQ ID NO: 19407 - DNA, 25 bp, Probe Sequence
gtaaaacaagaaaagttgaagaaga

SEQ ID NO: 19408 - DNA, 25 bp, Probe Sequence
tgtaaaacaagaaaagttgaagaag

SEQ ID NO: 19409 - DNA, 25 bp, Probe Sequence
atttatttatgacagtgaacattct

SEQ ID NO: 19410 - DNA, 25 bp, Probe Sequence
tatgacagtgaacattctgatttta

SEQ ID NO: 19411 - DNA, 25 bp, Probe Sequence
aacaagaaaagttgaagaagatatg

SEQ ID NO: 19412 - DNA, 25 bp, Probe Sequence
atgtaataagaatttggtggtgtca

SEQ ID NO: 19413 - DNA, 25 bp, Probe Sequence
tgtaataagaatttggtggtgtcaa

SEQ ID NO: 19414 - DNA, 25 bp, Probe Sequence
aatgtaataagaatttggtggtgtc

SEQ ID NO: 19415 - DNA, 25 bp, Probe Sequence
gaatgtaataagaatttggtggtgt

SEQ ID NO: 19416 - DNA, 25 bp, Probe Sequence
tgaatgtaataagaatttggtggtg

SEQ ID NO: 19417 - DNA, 25 bp, Probe Sequence
gtaataagaatttggtggtgtcaat

SEQ ID NO: 19418 - DNA, 25 bp, Probe Sequence
ttgaatgtaataagaatttggtggt

SEQ ID NO: 19419 - DNA, 25 bp, Probe Sequence
ccacggttgtccagcaattaataaa

SEQ ID NO: 19420 - DNA, 25 bp, Probe Sequence
taataagaatttggtggtgtcaatt

SEQ ID NO: 19421 - DNA, 25 bp, Probe Sequence
cttgaatgtaataagaatttggtgg

SEQ ID NO: 19422 - DNA, 25 bp, Probe Sequence
atttggtggtgtcaattgcttattt

SEQ ID NO: 19423 - DNA, 25 bp, Probe Sequence
attgcttatttgttttcccacggtt

SEQ ID NO: 19424 - DNA, 25 bp, Probe Sequence
ggtggtgtcaattgcttatttgttt

SEQ ID NO: 19425 - DNA, 25 bp, Probe Sequence
tttggtggtgtcaattgcttatttg

SEQ ID NO: 19426 - DNA, 25 bp, Probe Sequence
aattgcttatttgttttcccacggt

SEQ ID NO: 19427 - DNA, 25 bp, Probe Sequence
aatttggtggtgtcaattgcttatt

SEQ ID NO: 19428 - DNA, 25 bp, Probe Sequence
gaatttggtggtgtcaattgcttat

SEQ ID NO: 19429 - DNA, 25 bp, Probe Sequence
ataagaatttggtggtgtcaattgc

SEQ ID NO: 19430 - DNA, 25 bp, Probe Sequence
acggttgtccagcaattaataaaac

SEQ ID NO: 19431 - DNA, 25 bp, Probe Sequence
cacggttgtccagcaattaataaaa

SEQ ID NO: 19432 - DNA, 25 bp, Probe Sequence
agaatttggtggtgtcaattgctta

SEQ ID NO: 19433 - DNA, 25 bp, Probe Sequence
taagaatttggtggtgtcaattgct

SEQ ID NO: 19434 - DNA, 25 bp, Probe Sequence
tggtggtgtcaattgcttatttgtt

SEQ ID NO: 19435 - DNA, 25 bp, Probe Sequence
ttggtggtgtcaattgcttatttgt

SEQ ID NO: 19436 - DNA, 25 bp, Probe Sequence
tggaacctgggaaagaatatttgat

SEQ ID NO: 19437 - DNA, 25 bp, Probe Sequence
ttggaacctgggaaagaatatttga

SEQ ID NO: 19438 - DNA, 25 bp, Probe Sequence
ggaacctgggaaagaatatttgatc

SEQ ID NO: 19439 - DNA, 25 bp, Probe Sequence
cttggaacctgggaaagaatatttg

SEQ ID NO: 19440 - DNA, 25 bp, Probe Sequence
gcttggaacctgggaaagaatattt

SEQ ID NO: 19441 - DNA, 25 bp, Probe Sequence
gaggatggctacaggatgaagtttg

SEQ ID NO: 19442 - DNA, 25 bp, Probe Sequence
tgggaaagaatatttgatcatgggt

SEQ ID NO: 19443 - DNA, 25 bp, Probe Sequence
gggaaagaatatttgatcatgggtc

SEQ ID NO: 19444 - DNA, 25 bp, Probe Sequence
ctgggaaagaatatttgatcatggg

SEQ ID NO: 19445 - DNA, 25 bp, Probe Sequence
cctgggaaagaatatttgatcatgg

SEQ ID NO: 19446 - DNA, 25 bp, Probe Sequence
tcgcttggaacctgggaaagaatat

SEQ ID NO: 19447 - DNA, 25 bp, Probe Sequence
acctgggaaagaatatttgatcatg

SEQ ID NO: 19448 - DNA, 25 bp, Probe Sequence
ctttgagaccaagatcacccaagtc

SEQ ID NO: 19449 - DNA, 25 bp, Probe Sequence
gaatatttgatcatgggtctggatg

SEQ ID NO: 19450 - DNA, 25 bp, Probe Sequence
cgcttggaacctgggaaagaatatt

SEQ ID NO: 19451 - DNA, 25 bp, Probe Sequence
aatatttgatcatgggtctggatgg

SEQ ID NO: 19452 - DNA, 25 bp, Probe Sequence
gaacctgggaaagaatatttgatca

SEQ ID NO: 19453 - DNA, 25 bp, Probe Sequence
aagaatatttgatcatgggtctgga

SEQ ID NO: 19454 - DNA, 25 bp, Probe Sequence
agaatatttgatcatgggtctggat

SEQ ID NO: 19455 - DNA, 25 bp, Probe Sequence
aaagaatatttgatcatgggtctgg

SEQ ID NO: 19456 - DNA, 25 bp, Probe Sequence
ttcgcttggaacctgggaaagaata

SEQ ID NO: 19457 - DNA, 25 bp, Probe Sequence
ggaaagaatatttgatcatgggtct

SEQ ID NO: 19458 - DNA, 25 bp, Probe Sequence
aacctgggaaagaatatttgatcat

SEQ ID NO: 19459 - DNA, 25 bp, Probe Sequence
gtacggcttccaggttaaggttctc

SEQ ID NO: 19460 - DNA, 25 bp, Probe Sequence
aatatcagaacaggaaggaggaatg

SEQ ID NO: 19461 - DNA, 25 bp, Probe Sequence
agtaatatcagaacaggaaggagga

SEQ ID NO: 19462 - DNA, 25 bp, Probe Sequence
gtaatatcagaacaggaaggaggaa

SEQ ID NO: 19463 - DNA, 25 bp, Probe Sequence
tcaagacattctgcctacctattag

SEQ ID NO: 19464 - DNA, 25 bp, Probe Sequence
ctcaagacattctgcctacctatta

SEQ ID NO: 19465 - DNA, 25 bp, Probe Sequence
tagtaatatcagaacaggaaggagg

SEQ ID NO: 19466 - DNA, 25 bp, Probe Sequence
aagtaatgtcacaattcttcggatg

SEQ ID NO: 19467 - DNA, 25 bp, Probe Sequence
caagtaatgtcacaattcttcggat

SEQ ID NO: 19468 - DNA, 25 bp, Probe Sequence
cacattcagaggcatcacaagtaat

SEQ ID NO: 19469 - DNA, 25 bp, Probe Sequence
taatatcagaacaggaaggaggaat

SEQ ID NO: 19470 - DNA, 25 bp, Probe Sequence
caagacattctgcctacctattagc

SEQ ID NO: 19471 - DNA, 25 bp, Probe Sequence
tctcaagacattctgcctacctatt

SEQ ID NO: 19472 - DNA, 25 bp, Probe Sequence
atatcagaacaggaaggaggaatgg

SEQ ID NO: 19473 - DNA, 25 bp, Probe Sequence
agtaatgtcacaattcttcggatga

SEQ ID NO: 19474 - DNA, 25 bp, Probe Sequence
tcacaagtaatgtcacaattcttcg

SEQ ID NO: 19475 - DNA, 25 bp, Probe Sequence
gcatcacaagtaatgtcacaattct

SEQ ID NO: 19476 - DNA, 25 bp, Probe Sequence
acaagtaatgtcacaattcttcgga

SEQ ID NO: 19477 - DNA, 25 bp, Probe Sequence
cacaagtaatgtcacaattcttcgg

SEQ ID NO: 19478 - DNA, 25 bp, Probe Sequence
ggcatcacaagtaatgtcacaattc

SEQ ID NO: 19479 - DNA, 25 bp, Probe Sequence
attcagaggcatcacaagtaatgtc

SEQ ID NO: 19480 - DNA, 25 bp, Probe Sequence
aggcatcacaagtaatgtcacaatt

SEQ ID NO: 19481 - DNA, 25 bp, Probe Sequence
tgaacttagagtcattctcatgctt

SEQ ID NO: 19482 - DNA, 25 bp, Probe Sequence
ttgaacttagagtcattctcatgct

SEQ ID NO: 19483 - DNA, 25 bp, Probe Sequence
gttgaacttagagtcattctcatgc

SEQ ID NO: 19484 - DNA, 25 bp, Probe Sequence
gctcggattcaactaccttagataa

SEQ ID NO: 19485 - DNA, 25 bp, Probe Sequence
ctcggattcaactaccttagataat

SEQ ID NO: 19486 - DNA, 25 bp, Probe Sequence
agctcggattcaactaccttagata

SEQ ID NO: 19487 - DNA, 25 bp, Probe Sequence
tgtgttcaatagatttaggagcaga

SEQ ID NO: 19488 - DNA, 25 bp, Probe Sequence
accatacaatttcatcctccttcag

SEQ ID NO: 19489 - DNA, 25 bp, Probe Sequence
gaccatacaatttcatcctccttca

SEQ ID NO: 19490 - DNA, 25 bp, Probe Sequence
atgtgttcaatagatttaggagcag

SEQ ID NO: 19491 - DNA, 25 bp, Probe Sequence
cagctcggattcaactaccttagat

SEQ ID NO: 19492 - DNA, 25 bp, Probe Sequence
gtgttcaatagatttaggagcagaa

SEQ ID NO: 19493 - DNA, 25 bp, Probe Sequence
aatgtgttcaatagatttaggagca

SEQ ID NO: 19494 - DNA, 25 bp, Probe Sequence
ttgaccatacaatttcatcctcctt

SEQ ID NO: 19495 - DNA, 25 bp, Probe Sequence
tgaccatacaatttcatcctccttc

SEQ ID NO: 19496 - DNA, 25 bp, Probe Sequence
caatgtgttcaatagatttaggagc

SEQ ID NO: 19497 - DNA, 25 bp, Probe Sequence
ggtttccaatgtgttcaatagattt

SEQ ID NO: 19498 - DNA, 25 bp, Probe Sequence
tcggattcaactaccttagataata

SEQ ID NO: 19499 - DNA, 25 bp, Probe Sequence
tgttcaatagatttaggagcagaaa

SEQ ID NO: 19500 - DNA, 25 bp, Probe Sequence
ccaatgtgttcaatagatttaggag

SEQ ID NO: 19501 - DNA, 25 bp, Probe Sequence
catacaatttcatcctccttcaggg

SEQ ID NO: 19502 - DNA, 25 bp, Probe Sequence
ccatacaatttcatcctccttcagg

SEQ ID NO: 19503 - DNA, 25 bp, Probe Sequence
gtagggcacaaagatggatgtaatg

SEQ ID NO: 19504 - DNA, 25 bp, Probe Sequence
gtggtttccaatgtgttcaatagat

SEQ ID NO: 19505 - DNA, 25 bp, Probe Sequence
gagtggtttccaatgtgttcaatag

SEQ ID NO: 19506 - DNA, 25 bp, Probe Sequence
agtggtttccaatgtgttcaataga

SEQ ID NO: 19507 - DNA, 25 bp, Probe Sequence
agagtggtttccaatgtgttcaata

SEQ ID NO: 19508 - DNA, 25 bp, Probe Sequence
atatgtattcctgatcgccaacctt

SEQ ID NO: 19509 - DNA, 25 bp, Probe Sequence
ctagttacacatcttcaacagaccc

SEQ ID NO: 19510 - DNA, 25 bp, Probe Sequence
gaatttgatcgttcagttccacttg

SEQ ID NO: 19511 - DNA, 25 bp, Probe Sequence
agaatttgatcgttcagttccactt

SEQ ID NO: 19512 - DNA, 25 bp, Probe Sequence
aagaatttgatcgttcagttccact

SEQ ID NO: 19513 - DNA, 25 bp, Probe Sequence
caagaatttgatcgttcagttccac

SEQ ID NO: 19514 - DNA, 25 bp, Probe Sequence
gtgtgctatggatggcttctaacaa

SEQ ID NO: 19515 - DNA, 25 bp, Probe Sequence
cagcaagaatttgatcgttcagttc

SEQ ID NO: 19516 - DNA, 25 bp, Probe Sequence
actagttacacatcttcaacagacc

SEQ ID NO: 19517 - DNA, 25 bp, Probe Sequence
aagggtgaagctatttatctgtagt

SEQ ID NO: 19518 - DNA, 25 bp, Probe Sequence
ccaaagggtgaagctatttatctgt

SEQ ID NO: 19519 - DNA, 25 bp, Probe Sequence
tatgtattcctgatcgccaaccttt

SEQ ID NO: 19520 - DNA, 25 bp, Probe Sequence
tcagcaagaatttgatcgttcagtt

SEQ ID NO: 19521 - DNA, 25 bp, Probe Sequence
tattaaaccctggatcagtcctttg

SEQ ID NO: 19522 - DNA, 25 bp, Probe Sequence
taaggacatttcccagggttaatag

SEQ ID NO: 19523 - DNA, 25 bp, Probe Sequence
ctaaggacatttcccagggttaata

SEQ ID NO: 19524 - DNA, 25 bp, Probe Sequence
atattaaaccctggatcagtccttt

SEQ ID NO: 19525 - DNA, 25 bp, Probe Sequence
caaagggtgaagctatttatctgta

SEQ ID NO: 19526 - DNA, 25 bp, Probe Sequence
agggtgaagctatttatctgtagta

SEQ ID NO: 19527 - DNA, 25 bp, Probe Sequence
aatttgatcgttcagttccacttgg

SEQ ID NO: 19528 - DNA, 25 bp, Probe Sequence
catatgtattcctgatcgccaacct

SEQ ID NO: 19529 - DNA, 25 bp, Probe Sequence
aaagggtgaagctatttatctgtag

SEQ ID NO: 19530 - DNA, 25 bp, Probe Sequence
agcaagaatttgatcgttcagttcc

SEQ ID NO: 19531 - DNA, 25 bp, Probe Sequence
tgtgctatggatggcttctaacaaa

SEQ ID NO: 19532 - DNA, 25 bp, Probe Sequence
tcaagattcagtagacctaatgaca

SEQ ID NO: 19533 - DNA, 25 bp, Probe Sequence
ctcaagattcagtagacctaatgac

SEQ ID NO: 19534 - DNA, 25 bp, Probe Sequence
tctcaagattcagtagacctaatga

SEQ ID NO: 19535 - DNA, 25 bp, Probe Sequence
caagattcagtagacctaatgacat

SEQ ID NO: 19536 - DNA, 25 bp, Probe Sequence
taatggtagcaactgaaagaagaca

SEQ ID NO: 19537 - DNA, 25 bp, Probe Sequence
tgtatttaatggcataggctgactt

SEQ ID NO: 19538 - DNA, 25 bp, Probe Sequence
gtatttaatggcataggctgacttt

SEQ ID NO: 19539 - DNA, 25 bp, Probe Sequence
atctcaagattcagtagacctaatg

SEQ ID NO: 19540 - DNA, 25 bp, Probe Sequence
ttaatggtagcaactgaaagaagac

SEQ ID NO: 19541 - DNA, 25 bp, Probe Sequence
ctgtatttaatggcataggctgact

SEQ ID NO: 19542 - DNA, 25 bp, Probe Sequence
atcttggctgtatttaatggcatag

SEQ ID NO: 19543 - DNA, 25 bp, Probe Sequence
tcttggctgtatttaatggcatagg

SEQ ID NO: 19544 - DNA, 25 bp, Probe Sequence
aatggtagcaactgaaagaagacat

SEQ ID NO: 19545 - DNA, 25 bp, Probe Sequence
aacccttgattatactctgttggac

SEQ ID NO: 19546 - DNA, 25 bp, Probe Sequence
aaacccttgattatactctgttgga

SEQ ID NO: 19547 - DNA, 25 bp, Probe Sequence
atggtagcaactgaaagaagacatc

SEQ ID NO: 19548 - DNA, 25 bp, Probe Sequence
aagattcagtagacctaatgacatt

SEQ ID NO: 19549 - DNA, 25 bp, Probe Sequence
cttaatggtagcaactgaaagaaga

SEQ ID NO: 19550 - DNA, 25 bp, Probe Sequence
gcagatggaggaatttcttgattaa

SEQ ID NO: 19551 - DNA, 25 bp, Probe Sequence
tagcaactgaaagaagacatcctga

SEQ ID NO: 19552 - DNA, 25 bp, Probe Sequence
gtagcaactgaaagaagacatcctg

SEQ ID NO: 19553 - DNA, 25 bp, Probe Sequence
cctgtgtattctagtgaatgaatct

SEQ ID NO: 19554 - DNA, 25 bp, Probe Sequence
gatcttggctgtatttaatggcata

SEQ ID NO: 19555 - DNA, 25 bp, Probe Sequence
tgatcttggctgtatttaatggcat

SEQ ID NO: 19556 - DNA, 25 bp, Probe Sequence
gcataccagatagaggagttaatga

SEQ ID NO: 19557 - DNA, 25 bp, Probe Sequence
cttacggaatcctatgtgaagcatc

SEQ ID NO: 19558 - DNA, 25 bp, Probe Sequence
tcttacggaatcctatgtgaagcat

SEQ ID NO: 19559 - DNA, 25 bp, Probe Sequence
gccattatattgctaacaacaagaa

SEQ ID NO: 19560 - DNA, 25 bp, Probe Sequence
gatgcctattaatgttggagatggt

SEQ ID NO: 19561 - DNA, 25 bp, Probe Sequence
cctattaatgttggagatggtggtc

SEQ ID NO: 19562 - DNA, 25 bp, Probe Sequence
atgcctattaatgttggagatggtg

SEQ ID NO: 19563 - DNA, 25 bp, Probe Sequence
ctgctcttacggaatcctatgtgaa

SEQ ID NO: 19564 - DNA, 25 bp, Probe Sequence
ctattaatgttggagatggtggtct

SEQ ID NO: 19565 - DNA, 25 bp, Probe Sequence
ttacggaatcctatgtgaagcatca

SEQ ID NO: 19566 - DNA, 25 bp, Probe Sequence
accagatagaggagttaatgatact

SEQ ID NO: 19567 - DNA, 25 bp, Probe Sequence
ctcttacggaatcctatgtgaagca

SEQ ID NO: 19568 - DNA, 25 bp, Probe Sequence
tgctcttacggaatcctatgtgaag

SEQ ID NO: 19569 - DNA, 25 bp, Probe Sequence
ggatgcctattaatgttggagatgg

SEQ ID NO: 19570 - DNA, 25 bp, Probe Sequence
aatgatactcctggaatacaagatc

SEQ ID NO: 19571 - DNA, 25 bp, Probe Sequence
ctgactgctcttacggaatcctatg

SEQ ID NO: 19572 - DNA, 25 bp, Probe Sequence
atgatactcctggaatacaagatcc

SEQ ID NO: 19573 - DNA, 25 bp, Probe Sequence
tgacttccatcaagctatacatacc

SEQ ID NO: 19574 - DNA, 25 bp, Probe Sequence
ggtgacttccatcaagctatacata

SEQ ID NO: 19575 - DNA, 25 bp, Probe Sequence
tacggaatcctatgtgaagcatcag

SEQ ID NO: 19576 - DNA, 25 bp, Probe Sequence
ccttcgtttcatttcttctcatcag

SEQ ID NO: 19577 - DNA, 25 bp, Probe Sequence
gaccttcgtttcatttcttctcatc

SEQ ID NO: 19578 - DNA, 25 bp, Probe Sequence
gaacaagaacatcaacctggactct

SEQ ID NO: 19579 - DNA, 25 bp, Probe Sequence
accttcgtttcatttcttctcatca

SEQ ID NO: 19580 - DNA, 25 bp, Probe Sequence
ataacaacatcctcttccttggcaa

SEQ ID NO: 19581 - DNA, 25 bp, Probe Sequence
gataacaacatcctcttccttggca

SEQ ID NO: 19582 - DNA, 25 bp, Probe Sequence
ctttaccttcccaaattctccattg

SEQ ID NO: 19583 - DNA, 25 bp, Probe Sequence
tttaccttcccaaattctccattga

SEQ ID NO: 19584 - DNA, 25 bp, Probe Sequence
cctttctgatgttcattgtggataa

SEQ ID NO: 19585 - DNA, 25 bp, Probe Sequence
ccctttctgatgttcattgtggata

SEQ ID NO: 19586 - DNA, 25 bp, Probe Sequence
gctttaccttcccaaattctccatt

SEQ ID NO: 19587 - DNA, 25 bp, Probe Sequence
ttaccttcccaaattctccattgag

SEQ ID NO: 19588 - DNA, 25 bp, Probe Sequence
catcagcaaccactcaaatatccag

SEQ ID NO: 19589 - DNA, 25 bp, Probe Sequence
ctttctgatgttcattgtggataac

SEQ ID NO: 19590 - DNA, 25 bp, Probe Sequence
ctgatgttcattgtggataacaaca

SEQ ID NO: 19591 - DNA, 25 bp, Probe Sequence
tctgatgttcattgtggataacaac

SEQ ID NO: 19592 - DNA, 25 bp, Probe Sequence
atcagcaaccactcaaatatccagg

SEQ ID NO: 19593 - DNA, 25 bp, Probe Sequence
gatcagtatcactacctcctggacc

SEQ ID NO: 19594 - DNA, 25 bp, Probe Sequence
taacaacatcctcttccttggcaaa

SEQ ID NO: 19595 - DNA, 25 bp, Probe Sequence
tgaggaagtggcttaagatgttcaa

SEQ ID NO: 19596 - DNA, 25 bp, Probe Sequence
ttctgatgttcattgtggataacaa

SEQ ID NO: 19597 - DNA, 25 bp, Probe Sequence
aactctcagaggctagtgttcaaca

SEQ ID NO: 19598 - DNA, 25 bp, Probe Sequence
cattgtggataacaacatcctcttc

SEQ ID NO: 19599 - DNA, 25 bp, Probe Sequence
tcattgtggataacaacatcctctt

SEQ ID NO: 19600 - DNA, 25 bp, Probe Sequence
ttcattgtggataacaacatcctct

SEQ ID NO: 19601 - DNA, 25 bp, Probe Sequence
gttcattgtggataacaacatcctc

SEQ ID NO: 19602 - DNA, 25 bp, Probe Sequence
tgttcattgtggataacaacatcct

SEQ ID NO: 19603 - DNA, 25 bp, Probe Sequence
aaattctccattgagggctcctatc

SEQ ID NO: 19604 - DNA, 25 bp, Probe Sequence
ctcttcatcatcgtgcctatcttcc

SEQ ID NO: 19605 - DNA, 25 bp, Probe Sequence
cctcttcatcatcgtgcctatcttc

SEQ ID NO: 19606 - DNA, 25 bp, Probe Sequence
catcctcttcatcatcgtgcctatc

SEQ ID NO: 19607 - DNA, 25 bp, Probe Sequence
ttgaggacaatggcatctacttctg

SEQ ID NO: 19608 - DNA, 25 bp, Probe Sequence
atcctcttcatcatcgtgcctatct

SEQ ID NO: 19609 - DNA, 25 bp, Probe Sequence
cttcatcatcgtgcctatcttcctg

SEQ ID NO: 19610 - DNA, 25 bp, Probe Sequence
tcttcatcatcgtgcctatcttcct

SEQ ID NO: 19611 - DNA, 25 bp, Probe Sequence
tcctcttcatcatcgtgcctatctt

SEQ ID NO: 19612 - DNA, 25 bp, Probe Sequence
tcatcctcttcatcatcgtgcctat

SEQ ID NO: 19613 - DNA, 25 bp, Probe Sequence
atcatcctcttcatcatcgtgccta

SEQ ID NO: 19614 - DNA, 25 bp, Probe Sequence
gaataaacggtgtgtcctgagaaac

SEQ ID NO: 19615 - DNA, 25 bp, Probe Sequence
tttgaggacaatggcatctacttct

SEQ ID NO: 19616 - DNA, 25 bp, Probe Sequence
gtttgaggacaatggcatctacttc

SEQ ID NO: 19617 - DNA, 25 bp, Probe Sequence
cagaagagccacaggaacatcattc

SEQ ID NO: 19618 - DNA, 25 bp, Probe Sequence
tgaggacaatggcatctacttctgt

SEQ ID NO: 19619 - DNA, 25 bp, Probe Sequence
caatggcatctacttctgtcagcag

SEQ ID NO: 19620 - DNA, 25 bp, Probe Sequence
ggaagtgaagtggtctgtaggtgag

SEQ ID NO: 19621 - DNA, 25 bp, Probe Sequence
ggtttgaggacaatggcatctactt

SEQ ID NO: 19622 - DNA, 25 bp, Probe Sequence
gatcatcctcttcatcatcgtgcct

SEQ ID NO: 19623 - DNA, 25 bp, Probe Sequence
acaatggcatctacttctgtcagca

SEQ ID NO: 19624 - DNA, 25 bp, Probe Sequence
ggaataaacggtgtgtcctgagaaa

SEQ ID NO: 19625 - DNA, 25 bp, Probe Sequence
ccagaagagccacaggaacatcatt

SEQ ID NO: 19626 - DNA, 25 bp, Probe Sequence
gaagtgaagtggtctgtaggtgagc

SEQ ID NO: 19627 - DNA, 25 bp, Probe Sequence
ttcatcatcgtgcctatcttcctgc

SEQ ID NO: 19628 - DNA, 25 bp, Probe Sequence
gaaggattcagatgactatgctcag

SEQ ID NO: 19629 - DNA, 25 bp, Probe Sequence
ttggttgacttcagtgaacagtata

SEQ ID NO: 19630 - DNA, 25 bp, Probe Sequence
cttggttgacttcagtgaacagtat

SEQ ID NO: 19631 - DNA, 25 bp, Probe Sequence
aattcaatggaagagaggtggaaca

SEQ ID NO: 19632 - DNA, 25 bp, Probe Sequence
attcaatggaagagaggtggaacag

SEQ ID NO: 19633 - DNA, 25 bp, Probe Sequence
ttatacttgagacattgcacctacc

SEQ ID NO: 19634 - DNA, 25 bp, Probe Sequence
ctgaagacaatgagaggatttagga

SEQ ID NO: 19635 - DNA, 25 bp, Probe Sequence
gatgtaaatgaatgcgatgagttga

SEQ ID NO: 19636 - DNA, 25 bp, Probe Sequence
atctgagtgatgaatacgtgtgtag

SEQ ID NO: 19637 - DNA, 25 bp, Probe Sequence
agacaatgagaggatttaggatgag

SEQ ID NO: 19638 - DNA, 25 bp, Probe Sequence
atgtaaatgaatgcgatgagttgaa

SEQ ID NO: 19639 - DNA, 25 bp, Probe Sequence
cagaatctacataacctaagcccat

SEQ ID NO: 19640 - DNA, 25 bp, Probe Sequence
aacagaatctacataacctaagccc

SEQ ID NO: 19641 - DNA, 25 bp, Probe Sequence
taaatgaatgcgatgagttgaacaa

SEQ ID NO: 19642 - DNA, 25 bp, Probe Sequence
gtaaatgaatgcgatgagttgaaca

SEQ ID NO: 19643 - DNA, 25 bp, Probe Sequence
tgtaaatgaatgcgatgagttgaac

SEQ ID NO: 19644 - DNA, 25 bp, Probe Sequence
cataacctaagcccatatactctgc

SEQ ID NO: 19645 - DNA, 25 bp, Probe Sequence
acataacctaagcccatatactctg

SEQ ID NO: 19646 - DNA, 25 bp, Probe Sequence
aagacaatgagaggatttaggatga

SEQ ID NO: 19647 - DNA, 25 bp, Probe Sequence
tgaagacaatgagaggatttaggat

SEQ ID NO: 19648 - DNA, 25 bp, Probe Sequence
tgaataccgccttgaatttagagaa

SEQ ID NO: 19649 - DNA, 25 bp, Probe Sequence
ttgaataccgccttgaatttagaga

SEQ ID NO: 19650 - DNA, 25 bp, Probe Sequence
gttgaataccgccttgaatttagag

SEQ ID NO: 19651 - DNA, 25 bp, Probe Sequence
ggagtgaaacagaatctacataacc

SEQ ID NO: 19652 - DNA, 25 bp, Probe Sequence
gtgtgattgaatctgattggacatt

SEQ ID NO: 19653 - DNA, 25 bp, Probe Sequence
tcttgatgttgcttagtcacttatt

SEQ ID NO: 19654 - DNA, 25 bp, Probe Sequence
ttcttgatgttgcttagtcacttat

SEQ ID NO: 19655 - DNA, 25 bp, Probe Sequence
tgtgtgattgaatctgattggacat

SEQ ID NO: 19656 - DNA, 25 bp, Probe Sequence
ttgtgtgattgaatctgattggaca

SEQ ID NO: 19657 - DNA, 25 bp, Probe Sequence
tgcctttctagtcctattctattgc

SEQ ID NO: 19658 - DNA, 25 bp, Probe Sequence
tttgtgtgattgaatctgattggac

SEQ ID NO: 19659 - DNA, 25 bp, Probe Sequence
ctttgtgtgattgaatctgattgga

SEQ ID NO: 19660 - DNA, 25 bp, Probe Sequence
aaatgctttgtgtgattgaatctga

SEQ ID NO: 19661 - DNA, 25 bp, Probe Sequence
agaatacagtaagctgctctattgt

SEQ ID NO: 19662 - DNA, 25 bp, Probe Sequence
atgctttgtgtgattgaatctgatt

SEQ ID NO: 19663 - DNA, 25 bp, Probe Sequence
aatgctttgtgtgattgaatctgat

SEQ ID NO: 19664 - DNA, 25 bp, Probe Sequence
tttgttattgggcaagtgattgaaa

SEQ ID NO: 19665 - DNA, 25 bp, Probe Sequence
cagaatacagtaagctgctctattg

SEQ ID NO: 19666 - DNA, 25 bp, Probe Sequence
tgctttgtgtgattgaatctgattg

SEQ ID NO: 19667 - DNA, 25 bp, Probe Sequence
catttcttgatgttgcttagtcact

SEQ ID NO: 19668 - DNA, 25 bp, Probe Sequence
gatcgttatgctgagtatgttaagc

SEQ ID NO: 19669 - DNA, 25 bp, Probe Sequence
atttcttgatgttgcttagtcactt

SEQ ID NO: 19670 - DNA, 25 bp, Probe Sequence
gctttgtgtgattgaatctgattgg

SEQ ID NO: 19671 - DNA, 25 bp, Probe Sequence
taaatgctttgtgtgattgaatctg

SEQ ID NO: 19672 - DNA, 25 bp, Probe Sequence
gtaaatgctttgtgtgattgaatct

SEQ ID NO: 19673 - DNA, 25 bp, Probe Sequence
agtaaatgctttgtgtgattgaatc

SEQ ID NO: 19674 - DNA, 25 bp, Probe Sequence
tgatgttgcttagtcacttatttca

SEQ ID NO: 19675 - DNA, 25 bp, Probe Sequence
tttcttgatgttgcttagtcactta

SEQ ID NO: 19676 - DNA, 25 bp, Probe Sequence
aacaactatgatgactacaggatgg

SEQ ID NO: 19677 - DNA, 25 bp, Probe Sequence
ccaacaactatgatgactacaggat

SEQ ID NO: 19678 - DNA, 25 bp, Probe Sequence
aactatgatgactacaggatggact

SEQ ID NO: 19679 - DNA, 25 bp, Probe Sequence
caactatgatgactacaggatggac

SEQ ID NO: 19680 - DNA, 25 bp, Probe Sequence
acaactatgatgactacaggatgga

SEQ ID NO: 19681 - DNA, 25 bp, Probe Sequence
caacaactatgatgactacaggatg

SEQ ID NO: 19682 - DNA, 25 bp, Probe Sequence
gagccaacaactatgatgactacag

SEQ ID NO: 19683 - DNA, 25 bp, Probe Sequence
cttcttcttctctggagacaagtac

SEQ ID NO: 19684 - DNA, 25 bp, Probe Sequence
tcttcttcttctctggagacaagta

SEQ ID NO: 19685 - DNA, 25 bp, Probe Sequence
gccaacaactatgatgactacagga

SEQ ID NO: 19686 - DNA, 25 bp, Probe Sequence
agccaacaactatgatgactacagg

SEQ ID NO: 19687 - DNA, 25 bp, Probe Sequence
ggagccaacaactatgatgactaca

SEQ ID NO: 19688 - DNA, 25 bp, Probe Sequence
actatgatgactacaggatggactg

SEQ ID NO: 19689 - DNA, 25 bp, Probe Sequence
ctatgatgactacaggatggactgg

SEQ ID NO: 19690 - DNA, 25 bp, Probe Sequence
ccatccagagtgtcttcttcttctc

SEQ ID NO: 19691 - DNA, 25 bp, Probe Sequence
gatgagtacacggtctatgacgatg

SEQ ID NO: 19692 - DNA, 25 bp, Probe Sequence
cttcttctctggagacaagtactac

SEQ ID NO: 19693 - DNA, 25 bp, Probe Sequence
tcttcttctctggagacaagtacta

SEQ ID NO: 19694 - DNA, 25 bp, Probe Sequence
ttcttcttctctggagacaagtact

SEQ ID NO: 19695 - DNA, 25 bp, Probe Sequence
ttcttctctggagacaagtactacc

SEQ ID NO: 19696 - DNA, 25 bp, Probe Sequence
tatgatgactacaggatggactggc

SEQ ID NO: 19697 - DNA, 25 bp, Probe Sequence
gggagccaacaactatgatgactac

SEQ ID NO: 19698 - DNA, 25 bp, Probe Sequence
gacaagtactaccgagtcaatcttc

SEQ ID NO: 19699 - DNA, 25 bp, Probe Sequence
agacaagtactaccgagtcaatctt

SEQ ID NO: 19700 - DNA, 25 bp, Probe Sequence
gaagactattctcagcaatcagact

SEQ ID NO: 19701 - DNA, 25 bp, Probe Sequence
tgaagactattctcagcaatcagac

SEQ ID NO: 19702 - DNA, 25 bp, Probe Sequence
atgaagactattctcagcaatcaga

SEQ ID NO: 19703 - DNA, 25 bp, Probe Sequence
aatgaagactattctcagcaatcag

SEQ ID NO: 19704 - DNA, 25 bp, Probe Sequence
aagactattctcagcaatcagactg

SEQ ID NO: 19705 - DNA, 25 bp, Probe Sequence
gactattctcagcaatcagactgtc

SEQ ID NO: 19706 - DNA, 25 bp, Probe Sequence
caatcacatcaatgtagaactcagc

SEQ ID NO: 19707 - DNA, 25 bp, Probe Sequence
agactattctcagcaatcagactgt

SEQ ID NO: 19708 - DNA, 25 bp, Probe Sequence
ggacttcaatcacatcaatgtagaa

SEQ ID NO: 19709 - DNA, 25 bp, Probe Sequence
aatcacatcaatgtagaactcagcc

SEQ ID NO: 19710 - DNA, 25 bp, Probe Sequence
tcaatcacatcaatgtagaactcag

SEQ ID NO: 19711 - DNA, 25 bp, Probe Sequence
tctactgcgagaatgaagactattc

SEQ ID NO: 19712 - DNA, 25 bp, Probe Sequence
aggtgttgcttgttcagtatctcaa

SEQ ID NO: 19713 - DNA, 25 bp, Probe Sequence
ttcaatcacatcaatgtagaactca

SEQ ID NO: 19714 - DNA, 25 bp, Probe Sequence
acttcaatcacatcaatgtagaact

SEQ ID NO: 19715 - DNA, 25 bp, Probe Sequence
acctattgatttggaccttcttctt

SEQ ID NO: 19716 - DNA, 25 bp, Probe Sequence
gacctattgatttggaccttcttct

SEQ ID NO: 19717 - DNA, 25 bp, Probe Sequence
gaatgaagactattctcagcaatca

SEQ ID NO: 19718 - DNA, 25 bp, Probe Sequence
cacatcaatgtagaactcagccttc

SEQ ID NO: 19719 - DNA, 25 bp, Probe Sequence
atcacatcaatgtagaactcagcct

SEQ ID NO: 19720 - DNA, 25 bp, Probe Sequence
gacttcaatcacatcaatgtagaac

SEQ ID NO: 19721 - DNA, 25 bp, Probe Sequence
caggtgttgcttgttcagtatctca

SEQ ID NO: 19722 - DNA, 25 bp, Probe Sequence
tcacatcaatgtagaactcagcctt

SEQ ID NO: 19723 - DNA, 25 bp, Probe Sequence
agacctattgatttggaccttcttc

SEQ ID NO: 19724 - DNA, 25 bp, Probe Sequence
caagtgacacctactgatgactcaa

SEQ ID NO: 19725 - DNA, 25 bp, Probe Sequence
caaggatatgaacctcactctggag

SEQ ID NO: 19726 - DNA, 25 bp, Probe Sequence
caaggattctgagggctacatctat

SEQ ID NO: 19727 - DNA, 25 bp, Probe Sequence
aaggattctgagggctacatctatg

SEQ ID NO: 19728 - DNA, 25 bp, Probe Sequence
ctgtcttcaaggaacattggagtca

SEQ ID NO: 19729 - DNA, 25 bp, Probe Sequence
tgtcttcaaggaacattggagtcac

SEQ ID NO: 19730 - DNA, 25 bp, Probe Sequence
ataataaagtctatggacagggctg

SEQ ID NO: 19731 - DNA, 25 bp, Probe Sequence
aataataaagtctatggacagggct

SEQ ID NO: 19732 - DNA, 25 bp, Probe Sequence
ctacactctcctccatcttgctcaa

SEQ ID NO: 19733 - DNA, 25 bp, Probe Sequence
aagtgacacctactgatgactcaaa

SEQ ID NO: 19734 - DNA, 25 bp, Probe Sequence
tctctgaagtactaacacaaggaca

SEQ ID NO: 19735 - DNA, 25 bp, Probe Sequence
aaataataaagtctatggacagggc

SEQ ID NO: 19736 - DNA, 25 bp, Probe Sequence
tacactctcctccatcttgctcaac

SEQ ID NO: 19737 - DNA, 25 bp, Probe Sequence
tcaaggattctgagggctacatcta

SEQ ID NO: 19738 - DNA, 25 bp, Probe Sequence
cctgtcttcaaggaacattggagtc

SEQ ID NO: 19739 - DNA, 25 bp, Probe Sequence
agtgacacctactgatgactcaaac

SEQ ID NO: 19740 - DNA, 25 bp, Probe Sequence
ctgtctctgaagtactaacacaagg

SEQ ID NO: 19741 - DNA, 25 bp, Probe Sequence
tcttcaaggaacattggagtcacga

SEQ ID NO: 19742 - DNA, 25 bp, Probe Sequence
gtcttcaaggaacattggagtcacg

SEQ ID NO: 19743 - DNA, 25 bp, Probe Sequence
tgtctctgaagtactaacacaagga

SEQ ID NO: 19744 - DNA, 25 bp, Probe Sequence
taataaagtctatggacagggctgt

SEQ ID NO: 19745 - DNA, 25 bp, Probe Sequence
ccaagtgacacctactgatgactca

SEQ ID NO: 19746 - DNA, 25 bp, Probe Sequence
gtctctgaagtactaacacaaggac

SEQ ID NO: 19747 - DNA, 25 bp, Probe Sequence
cttcaaggaacattggagtcacgac

SEQ ID NO: 19748 - DNA, 25 bp, Probe Sequence
ccatcattgacattctaactaagcg

SEQ ID NO: 19749 - DNA, 25 bp, Probe Sequence
catcattgacattctaactaagcga

SEQ ID NO: 19750 - DNA, 25 bp, Probe Sequence
accatcattgacattctaactaagc

SEQ ID NO: 19751 - DNA, 25 bp, Probe Sequence
ccttggaactgatgaagatactcta

SEQ ID NO: 19752 - DNA, 25 bp, Probe Sequence
aagcaaccatcattgacattctaac

SEQ ID NO: 19753 - DNA, 25 bp, Probe Sequence
gaagcaaccatcattgacattctaa

SEQ ID NO: 19754 - DNA, 25 bp, Probe Sequence
cctatcctaccttcaatccatcctc

SEQ ID NO: 19755 - DNA, 25 bp, Probe Sequence
gcaaccatcattgacattctaacta

SEQ ID NO: 19756 - DNA, 25 bp, Probe Sequence
agcaaccatcattgacattctaact

SEQ ID NO: 19757 - DNA, 25 bp, Probe Sequence
tgaagcaaccatcattgacattcta

SEQ ID NO: 19758 - DNA, 25 bp, Probe Sequence
ttcaataccatccttaccaccagaa

SEQ ID NO: 19759 - DNA, 25 bp, Probe Sequence
atcattgacattctaactaagcgaa

SEQ ID NO: 19760 - DNA, 25 bp, Probe Sequence
ctatcctaccttcaatccatcctcg

SEQ ID NO: 19761 - DNA, 25 bp, Probe Sequence
aatacaccaagtacagtaagcatga

SEQ ID NO: 19762 - DNA, 25 bp, Probe Sequence
tcaataccatccttaccaccagaag

SEQ ID NO: 19763 - DNA, 25 bp, Probe Sequence
atacaccaagtacagtaagcatgac

SEQ ID NO: 19764 - DNA, 25 bp, Probe Sequence
gttcaataccatccttaccaccaga

SEQ ID NO: 19765 - DNA, 25 bp, Probe Sequence
caagtacagtaagcatgacatgaac

SEQ ID NO: 19766 - DNA, 25 bp, Probe Sequence
agtacagtaagcatgacatgaacaa

SEQ ID NO: 19767 - DNA, 25 bp, Probe Sequence
aagtacagtaagcatgacatgaaca

SEQ ID NO: 19768 - DNA, 25 bp, Probe Sequence
ctacagagaggaactgaagagagat

SEQ ID NO: 19769 - DNA, 25 bp, Probe Sequence
tgttcaataccatccttaccaccag

SEQ ID NO: 19770 - DNA, 25 bp, Probe Sequence
ttcttcaacaggattacagtgtagc

SEQ ID NO: 19771 - DNA, 25 bp, Probe Sequence
ccaagtacagtaagcatgacatgaa

SEQ ID NO: 19772 - DNA, 25 bp, Probe Sequence
gaagtgctggaattaaggtcatcat

SEQ ID NO: 19773 - DNA, 25 bp, Probe Sequence
aagtgctggaattaaggtcatcatg

SEQ ID NO: 19774 - DNA, 25 bp, Probe Sequence
gaattaaggtcatcatggtcacagg

SEQ ID NO: 19775 - DNA, 25 bp, Probe Sequence
ggaattaaggtcatcatggtcacag

SEQ ID NO: 19776 - DNA, 25 bp, Probe Sequence
ctggaattaaggtcatcatggtcac

SEQ ID NO: 19777 - DNA, 25 bp, Probe Sequence
aattaaggtcatcatggtcacagga

SEQ ID NO: 19778 - DNA, 25 bp, Probe Sequence
tggaattaaggtcatcatggtcaca

SEQ ID NO: 19779 - DNA, 25 bp, Probe Sequence
attaaggtcatcatggtcacaggag

SEQ ID NO: 19780 - DNA, 25 bp, Probe Sequence
cgaagtgctggaattaaggtcatca

SEQ ID NO: 19781 - DNA, 25 bp, Probe Sequence
gctggaattaaggtcatcatggtca

SEQ ID NO: 19782 - DNA, 25 bp, Probe Sequence
tgctggaattaaggtcatcatggtc

SEQ ID NO: 19783 - DNA, 25 bp, Probe Sequence
agtgctggaattaaggtcatcatgg

SEQ ID NO: 19784 - DNA, 25 bp, Probe Sequence
ttaaggtcatcatggtcacaggaga

SEQ ID NO: 19785 - DNA, 25 bp, Probe Sequence
gtgctggaattaaggtcatcatggt

SEQ ID NO: 19786 - DNA, 25 bp, Probe Sequence
aatgtcgaagtgctggaattaaggt

SEQ ID NO: 19787 - DNA, 25 bp, Probe Sequence
tcgaagtgctggaattaaggtcatc

SEQ ID NO: 19788 - DNA, 25 bp, Probe Sequence
gtcgaagtgctggaattaaggtcat

SEQ ID NO: 19789 - DNA, 25 bp, Probe Sequence
atgtcgaagtgctggaattaaggtc

SEQ ID NO: 19790 - DNA, 25 bp, Probe Sequence
taaggtcatcatggtcacaggagac

SEQ ID NO: 19791 - DNA, 25 bp, Probe Sequence
tgtcgaagtgctggaattaaggtca

SEQ ID NO: 19792 - DNA, 25 bp, Probe Sequence
catctcagaaggcagtggacctatg

SEQ ID NO: 19793 - DNA, 25 bp, Probe Sequence
atctcagaaggcagtggacctatga

SEQ ID NO: 19794 - DNA, 25 bp, Probe Sequence
tcatctcagaaggcagtggacctat

SEQ ID NO: 19795 - DNA, 25 bp, Probe Sequence
atcatctcagaaggcagtggaccta

SEQ ID NO: 19796 - DNA, 25 bp, Probe Sequence
tctcagaaggcagtggacctatgag

SEQ ID NO: 19797 - DNA, 25 bp, Probe Sequence
cacacataggagaccagccactaac

SEQ ID NO: 19798 - DNA, 25 bp, Probe Sequence
acacataggagaccagccactaact

SEQ ID NO: 19799 - DNA, 25 bp, Probe Sequence
caataaatgttgagccaagagcttc

SEQ ID NO: 19800 - DNA, 25 bp, Probe Sequence
cacataggagaccagccactaactg

SEQ ID NO: 19801 - DNA, 25 bp, Probe Sequence
aataaatgttgagccaagagcttca

SEQ ID NO: 19802 - DNA, 25 bp, Probe Sequence
atgttgagccaagagcttcaaatta

SEQ ID NO: 19803 - DNA, 25 bp, Probe Sequence
ataaatgttgagccaagagcttcaa

SEQ ID NO: 19804 - DNA, 25 bp, Probe Sequence
taaatgttgagccaagagcttcaaa

SEQ ID NO: 19805 - DNA, 25 bp, Probe Sequence
ttgagccaagagcttcaaattactc

SEQ ID NO: 19806 - DNA, 25 bp, Probe Sequence
agccaagagcttcaaattactctag

SEQ ID NO: 19807 - DNA, 25 bp, Probe Sequence
gagccaagagcttcaaattactcta

SEQ ID NO: 19808 - DNA, 25 bp, Probe Sequence
gttgagccaagagcttcaaattact

SEQ ID NO: 19809 - DNA, 25 bp, Probe Sequence
attctggacatgaggagcaaaggaa

SEQ ID NO: 19810 - DNA, 25 bp, Probe Sequence
aatgttgagccaagagcttcaaatt

SEQ ID NO: 19811 - DNA, 25 bp, Probe Sequence
aaatgttgagccaagagcttcaaat

SEQ ID NO: 19812 - DNA, 25 bp, Probe Sequence
tgttgagccaagagcttcaaattac

SEQ ID NO: 19813 - DNA, 25 bp, Probe Sequence
gcaataaatgttgagccaagagctt

SEQ ID NO: 19814 - DNA, 25 bp, Probe Sequence
tgagccaagagcttcaaattactct

SEQ ID NO: 19815 - DNA, 25 bp, Probe Sequence
ttctggacatgaggagcaaaggaag

SEQ ID NO: 19816 - DNA, 25 bp, Probe Sequence
cattctggacatgaggagcaaagga

SEQ ID NO: 19817 - DNA, 25 bp, Probe Sequence
atgacctcagtcccacgacagttat

SEQ ID NO: 19818 - DNA, 25 bp, Probe Sequence
cctcaagggtcatctccaaacatga

SEQ ID NO: 19819 - DNA, 25 bp, Probe Sequence
ggcaataaatgttgagccaagagct

SEQ ID NO: 19820 - DNA, 25 bp, Probe Sequence
ccctcaagggtcatctccaaacatg

SEQ ID NO: 19821 - DNA, 25 bp, Probe Sequence
ccttctcggtcttcaccatcatctg

SEQ ID NO: 19822 - DNA, 25 bp, Probe Sequence
ggaccagagtcatccttctgaactg

SEQ ID NO: 19823 - DNA, 25 bp, Probe Sequence
gtggaccagagtcatccttctgaac

SEQ ID NO: 19824 - DNA, 25 bp, Probe Sequence
caagtggaccagagtcatccttctg

SEQ ID NO: 19825 - DNA, 25 bp, Probe Sequence
tggaccagagtcatccttctgaact

SEQ ID NO: 19826 - DNA, 25 bp, Probe Sequence
agtggaccagagtcatccttctgaa

SEQ ID NO: 19827 - DNA, 25 bp, Probe Sequence
aagtggaccagagtcatccttctga

SEQ ID NO: 19828 - DNA, 25 bp, Probe Sequence
cagagtcatccttctgaactggtgc

SEQ ID NO: 19829 - DNA, 25 bp, Probe Sequence
gaccagagtcatccttctgaactgg

SEQ ID NO: 19830 - DNA, 25 bp, Probe Sequence
ccagagtcatccttctgaactggtg

SEQ ID NO: 19831 - DNA, 25 bp, Probe Sequence
aagaagagggagagatggagcaaag

SEQ ID NO: 19832 - DNA, 25 bp, Probe Sequence
gaagaagagggagagatggagcaaa

SEQ ID NO: 19833 - DNA, 25 bp, Probe Sequence
gaagagggagagatggagcaaagtg

SEQ ID NO: 19834 - DNA, 25 bp, Probe Sequence
agtggaagaagagggagagatggag

SEQ ID NO: 19835 - DNA, 25 bp, Probe Sequence
gagtggaagaagagggagagatgga

SEQ ID NO: 19836 - DNA, 25 bp, Probe Sequence
agaagagggagagatggagcaaagt

SEQ ID NO: 19837 - DNA, 25 bp, Probe Sequence
tggagtggaagaagagggagagatg

SEQ ID NO: 19838 - DNA, 25 bp, Probe Sequence
gtggagtggaagaagagggagagat

SEQ ID NO: 19839 - DNA, 25 bp, Probe Sequence
aagagggagagatggagcaaagtga

SEQ ID NO: 19840 - DNA, 25 bp, Probe Sequence
caagtgtgacatctaccagtccaag

SEQ ID NO: 19841 - DNA, 25 bp, Probe Sequence
acaagtgtgacatctaccagtccaa

SEQ ID NO: 19842 - DNA, 25 bp, Probe Sequence
aagtgtgacatctaccagtccaagg

SEQ ID NO: 19843 - DNA, 25 bp, Probe Sequence
gtgtgacatctaccagtccaaggag

SEQ ID NO: 19844 - DNA, 25 bp, Probe Sequence
agtgtgacatctaccagtccaagga

SEQ ID NO: 19845 - DNA, 25 bp, Probe Sequence
cacaagtgtgacatctaccagtcca

SEQ ID NO: 19846 - DNA, 25 bp, Probe Sequence
tgcacaagtgtgacatctaccagtc

SEQ ID NO: 19847 - DNA, 25 bp, Probe Sequence
ctgcacaagtgtgacatctaccagt

SEQ ID NO: 19848 - DNA, 25 bp, Probe Sequence
attccaacttcctccttcactctaa

SEQ ID NO: 19849 - DNA, 25 bp, Probe Sequence
ttagattccaacttcctccttcact

SEQ ID NO: 19850 - DNA, 25 bp, Probe Sequence
ttatcatattggtgctgagtgctat

SEQ ID NO: 19851 - DNA, 25 bp, Probe Sequence
aagagtgttatcatattggtgctga

SEQ ID NO: 19852 - DNA, 25 bp, Probe Sequence
gattccaacttcctccttcactcta

SEQ ID NO: 19853 - DNA, 25 bp, Probe Sequence
tagattccaacttcctccttcactc

SEQ ID NO: 19854 - DNA, 25 bp, Probe Sequence
agagtgttatcatattggtgctgag

SEQ ID NO: 19855 - DNA, 25 bp, Probe Sequence
gttagattccaacttcctccttcac

SEQ ID NO: 19856 - DNA, 25 bp, Probe Sequence
gagtgttatcatattggtgctgagt

SEQ ID NO: 19857 - DNA, 25 bp, Probe Sequence
gttatcatattggtgctgagtgcta

SEQ ID NO: 19858 - DNA, 25 bp, Probe Sequence
tatgtgtatagtaccagaagcaagg

SEQ ID NO: 19859 - DNA, 25 bp, Probe Sequence
ctcagttagtggttggatgtagtca

SEQ ID NO: 19860 - DNA, 25 bp, Probe Sequence
agtgttatcatattggtgctgagtg

SEQ ID NO: 19861 - DNA, 25 bp, Probe Sequence
tgagtgctatgtgtgcttatacaat

SEQ ID NO: 19862 - DNA, 25 bp, Probe Sequence
gagtgctatgtgtgcttatacaatt

SEQ ID NO: 19863 - DNA, 25 bp, Probe Sequence
ctgagtgctatgtgtgcttatacaa

SEQ ID NO: 19864 - DNA, 25 bp, Probe Sequence
tatcatattggtgctgagtgctatg

SEQ ID NO: 19865 - DNA, 25 bp, Probe Sequence
cctcagttagtggttggatgtagtc

SEQ ID NO: 19866 - DNA, 25 bp, Probe Sequence
cctatgtgtatagtaccagaagcaa

SEQ ID NO: 19867 - DNA, 25 bp, Probe Sequence
gtgttatcatattggtgctgagtgc

SEQ ID NO: 19868 - DNA, 25 bp, Probe Sequence
ctatgtgtatagtaccagaagcaag

SEQ ID NO: 19869 - DNA, 25 bp, Probe Sequence
tgttatcatattggtgctgagtgct

SEQ ID NO: 19870 - DNA, 25 bp, Probe Sequence
tgctttgggagattatcagtagaaa

SEQ ID NO: 19871 - DNA, 25 bp, Probe Sequence
acacataaatgaaagaaacccacag

SEQ ID NO: 19872 - DNA, 25 bp, Probe Sequence
ggcactgagaatgatagtaatagga

SEQ ID NO: 19873 - DNA, 25 bp, Probe Sequence
aggcactgagaatgatagtaatagg

SEQ ID NO: 19874 - DNA, 25 bp, Probe Sequence
caggcactgagaatgatagtaatag

SEQ ID NO: 19875 - DNA, 25 bp, Probe Sequence
gcactgagaatgatagtaataggat

SEQ ID NO: 19876 - DNA, 25 bp, Probe Sequence
gtcctggtcctaaagagttattcaa

SEQ ID NO: 19877 - DNA, 25 bp, Probe Sequence
ccaggagaccatttgtattaccatt

SEQ ID NO: 19878 - DNA, 25 bp, Probe Sequence
gtagaataaatgaagaaagggaggc

SEQ ID NO: 19879 - DNA, 25 bp, Probe Sequence
tcctggtcctaaagagttattcaaa

SEQ ID NO: 19880 - DNA, 25 bp, Probe Sequence
aatacacttcctgcttaaacttgac

SEQ ID NO: 19881 - DNA, 25 bp, Probe Sequence
aagaggatgatttcagaaggagaag

SEQ ID NO: 19882 - DNA, 25 bp, Probe Sequence
atacacttcctgcttaaacttgacc

SEQ ID NO: 19883 - DNA, 25 bp, Probe Sequence
aaagaggatgatttcagaaggagaa

SEQ ID NO: 19884 - DNA, 25 bp, Probe Sequence
tttcccaggagaccatttgtattac

SEQ ID NO: 19885 - DNA, 25 bp, Probe Sequence
aaatacacttcctgcttaaacttga

SEQ ID NO: 19886 - DNA, 25 bp, Probe Sequence
tagaagtggtttcctgataacaagc

SEQ ID NO: 19887 - DNA, 25 bp, Probe Sequence
ggtcctggtcctaaagagttattca

SEQ ID NO: 19888 - DNA, 25 bp, Probe Sequence
cctggtcctaaagagttattcaaat

SEQ ID NO: 19889 - DNA, 25 bp, Probe Sequence
agcaaattagaaacaccattcatct

SEQ ID NO: 19890 - DNA, 25 bp, Probe Sequence
aggatgatttcagaaggagaaggaa

SEQ ID NO: 19891 - DNA, 25 bp, Probe Sequence
gcaaattagaaacaccattcatctc

SEQ ID NO: 19892 - DNA, 25 bp, Probe Sequence
caggagaccatttgtattaccatta

SEQ ID NO: 19893 - DNA, 25 bp, Probe Sequence
ggagaccatttgtattaccattact

SEQ ID NO: 19894 - DNA, 25 bp, Probe Sequence
aggagaccatttgtattaccattac

SEQ ID NO: 19895 - DNA, 25 bp, Probe Sequence
tgtagaataaatgaagaaagggagg

SEQ ID NO: 19896 - DNA, 25 bp, Probe Sequence
atggtcaagtattaacagcacaagt

SEQ ID NO: 19897 - DNA, 25 bp, Probe Sequence
caagtattaacagcacaagtggtag

SEQ ID NO: 19898 - DNA, 25 bp, Probe Sequence
tcaagtattaacagcacaagtggta

SEQ ID NO: 19899 - DNA, 25 bp, Probe Sequence
aagtattaacagcacaagtggtagg

SEQ ID NO: 19900 - DNA, 25 bp, Probe Sequence
gtattaacagcacaagtggtaggtt

SEQ ID NO: 19901 - DNA, 25 bp, Probe Sequence
gtcaagtattaacagcacaagtggt

SEQ ID NO: 19902 - DNA, 25 bp, Probe Sequence
tggtcaagtattaacagcacaagtg

SEQ ID NO: 19903 - DNA, 25 bp, Probe Sequence
gtacatggtcaagtattaacagcac

SEQ ID NO: 19904 - DNA, 25 bp, Probe Sequence
agtacatggtcaagtattaacagca

SEQ ID NO: 19905 - DNA, 25 bp, Probe Sequence
catggtcaagtattaacagcacaag

SEQ ID NO: 19906 - DNA, 25 bp, Probe Sequence
tacatggtcaagtattaacagcaca

SEQ ID NO: 19907 - DNA, 25 bp, Probe Sequence
agtattaacagcacaagtggtaggt

SEQ ID NO: 19908 - DNA, 25 bp, Probe Sequence
acatggtcaagtattaacagcacaa

SEQ ID NO: 19909 - DNA, 25 bp, Probe Sequence
aagtacatggtcaagtattaacagc

SEQ ID NO: 19910 - DNA, 25 bp, Probe Sequence
acattagaataggaattggtgttgg

SEQ ID NO: 19911 - DNA, 25 bp, Probe Sequence
ggtcaagtattaacagcacaagtgg

SEQ ID NO: 19912 - DNA, 25 bp, Probe Sequence
tattaacagcacaagtggtaggtta

SEQ ID NO: 19913 - DNA, 25 bp, Probe Sequence
ggactgaattactctccaagttgag

SEQ ID NO: 19914 - DNA, 25 bp, Probe Sequence
gaggactgaattactctccaagttg

SEQ ID NO: 19915 - DNA, 25 bp, Probe Sequence
gttgaggactgaattactctccaag

SEQ ID NO: 19916 - DNA, 25 bp, Probe Sequence
aggactgaattactctccaagttga

SEQ ID NO: 19917 - DNA, 25 bp, Probe Sequence
tgaggactgaattactctccaagtt

SEQ ID NO: 19918 - DNA, 25 bp, Probe Sequence
ttgaggactgaattactctccaagt

SEQ ID NO: 19919 - DNA, 25 bp, Probe Sequence
tgttgaggactgaattactctccaa

SEQ ID NO: 19920 - DNA, 25 bp, Probe Sequence
tctgtaaatagtgagatggacttgg

SEQ ID NO: 19921 - DNA, 25 bp, Probe Sequence
ctgtaaatagtgagatggacttggg

SEQ ID NO: 19922 - DNA, 25 bp, Probe Sequence
gcctgtaacatatctgtaaatagtg

SEQ ID NO: 19923 - DNA, 25 bp, Probe Sequence
atctgtaaatagtgagatggacttg

SEQ ID NO: 19924 - DNA, 25 bp, Probe Sequence
cgcttctttctgactctaaaatatg

SEQ ID NO: 19925 - DNA, 25 bp, Probe Sequence
ccggcctgtaacatatctgtaaata

SEQ ID NO: 19926 - DNA, 25 bp, Probe Sequence
gcttctttctgactctaaaatatgg

SEQ ID NO: 19927 - DNA, 25 bp, Probe Sequence
tgtaaatagtgagatggacttgggg

SEQ ID NO: 19928 - DNA, 25 bp, Probe Sequence
cggcctgtaacatatctgtaaatag

SEQ ID NO: 19929 - DNA, 25 bp, Probe Sequence
ggcctgtaacatatctgtaaatagt

SEQ ID NO: 19930 - DNA, 25 bp, Probe Sequence
acatatctgtaaatagtgagatgga

SEQ ID NO: 19931 - DNA, 25 bp, Probe Sequence
tatctgtaaatagtgagatggactt

SEQ ID NO: 19932 - DNA, 25 bp, Probe Sequence
cctgtaacatatctgtaaatagtga

SEQ ID NO: 19933 - DNA, 25 bp, Probe Sequence
catatctgtaaatagtgagatggac

SEQ ID NO: 19934 - DNA, 25 bp, Probe Sequence
atatctgtaaatagtgagatggact

SEQ ID NO: 19935 - DNA, 25 bp, Probe Sequence
cccggcctgtaacatatctgtaaat

SEQ ID NO: 19936 - DNA, 25 bp, Probe Sequence
gtaaatagtgagatggacttggggc

SEQ ID NO: 19937 - DNA, 25 bp, Probe Sequence
aacatatctgtaaatagtgagatgg

SEQ ID NO: 19938 - DNA, 25 bp, Probe Sequence
cttctttctgactctaaaatatgga

SEQ ID NO: 19939 - DNA, 25 bp, Probe Sequence
atcccggcctgtaacatatctgtaa

SEQ ID NO: 19940 - DNA, 25 bp, Probe Sequence
cgggctcgaagaaaataattctcta

SEQ ID NO: 19941 - DNA, 25 bp, Probe Sequence
tcccggcctgtaacatatctgtaaa

SEQ ID NO: 19942 - DNA, 25 bp, Probe Sequence
gggctcgaagaaaataattctctat

SEQ ID NO: 19943 - DNA, 25 bp, Probe Sequence
tgtaacatatctgtaaatagtgaga

SEQ ID NO: 19944 - DNA, 25 bp, Probe Sequence
tccatacaattctcttcagttagtg

SEQ ID NO: 19945 - DNA, 25 bp, Probe Sequence
aatatctgtgctctaataacgatgt

SEQ ID NO: 19946 - DNA, 25 bp, Probe Sequence
aatgaaggacaagcatactacataa

SEQ ID NO: 19947 - DNA, 25 bp, Probe Sequence
ccatacaattctcttcagttagtgt

SEQ ID NO: 19948 - DNA, 25 bp, Probe Sequence
atgaaggacaagcatactacataat

SEQ ID NO: 19949 - DNA, 25 bp, Probe Sequence
tgtaatatctgtgctctaataacga

SEQ ID NO: 19950 - DNA, 25 bp, Probe Sequence
atccatacaattctcttcagttagt

SEQ ID NO: 19951 - DNA, 25 bp, Probe Sequence
tgaaggacaagcatactacataata

SEQ ID NO: 19952 - DNA, 25 bp, Probe Sequence
tctgtgctctaataacgatgtatat

SEQ ID NO: 19953 - DNA, 25 bp, Probe Sequence
atctgtgctctaataacgatgtata

SEQ ID NO: 19954 - DNA, 25 bp, Probe Sequence
tatctgtgctctaataacgatgtat

SEQ ID NO: 19955 - DNA, 25 bp, Probe Sequence
atatctgtgctctaataacgatgta

SEQ ID NO: 19956 - DNA, 25 bp, Probe Sequence
acaaatgaaggacaagcatactaca

SEQ ID NO: 19957 - DNA, 25 bp, Probe Sequence
aacaaatgaaggacaagcatactac

SEQ ID NO: 19958 - DNA, 25 bp, Probe Sequence
gtaacaaatgaaggacaagcatact

SEQ ID NO: 19959 - DNA, 25 bp, Probe Sequence
agtaacaaatgaaggacaagcatac

SEQ ID NO: 19960 - DNA, 25 bp, Probe Sequence
cttagtaacaaatgaaggacaagca

SEQ ID NO: 19961 - DNA, 25 bp, Probe Sequence
tgcttagtaacaaatgaaggacaag

SEQ ID NO: 19962 - DNA, 25 bp, Probe Sequence
caaatgaaggacaagcatactacat

SEQ ID NO: 19963 - DNA, 25 bp, Probe Sequence
cataaatgccaatctgtgagaactt

SEQ ID NO: 19964 - DNA, 25 bp, Probe Sequence
ataaatgccaatctgtgagaacttt

SEQ ID NO: 19965 - DNA, 25 bp, Probe Sequence
ttagtaacaaatgaaggacaagcat

SEQ ID NO: 19966 - DNA, 25 bp, Probe Sequence
ttcataaatgccaatctgtgagaac

SEQ ID NO: 19967 - DNA, 25 bp, Probe Sequence
tcataaatgccaatctgtgagaact

SEQ ID NO: 19968 - DNA, 25 bp, Probe Sequence
cctcagctacctactttccttcatg

SEQ ID NO: 19969 - DNA, 25 bp, Probe Sequence
atcaaaataaagcctcagccacaaa

SEQ ID NO: 19970 - DNA, 25 bp, Probe Sequence
tcaaaataaagcctcagccacaaaa

SEQ ID NO: 19971 - DNA, 25 bp, Probe Sequence
gatcaaaataaagcctcagccacaa

SEQ ID NO: 19972 - DNA, 25 bp, Probe Sequence
ctcagctacctactttccttcatga

SEQ ID NO: 19973 - DNA, 25 bp, Probe Sequence
tttgaagcctcagctacctactttc

SEQ ID NO: 19974 - DNA, 25 bp, Probe Sequence
ctttgaagcctcagctacctacttt

SEQ ID NO: 19975 - DNA, 25 bp, Probe Sequence
gcctcagctacctactttccttcat

SEQ ID NO: 19976 - DNA, 25 bp, Probe Sequence
aagcctcagctacctactttccttc

SEQ ID NO: 19977 - DNA, 25 bp, Probe Sequence
gaagcctcagctacctactttcctt

SEQ ID NO: 19978 - DNA, 25 bp, Probe Sequence
ttgaagcctcagctacctactttcc

SEQ ID NO: 19979 - DNA, 25 bp, Probe Sequence
cctttgaagcctcagctacctactt

SEQ ID NO: 19980 - DNA, 25 bp, Probe Sequence
agcctcagctacctactttccttca

SEQ ID NO: 19981 - DNA, 25 bp, Probe Sequence
tgaagcctcagctacctactttcct

SEQ ID NO: 19982 - DNA, 25 bp, Probe Sequence
ttcctttcttctaacatcatccctc

SEQ ID NO: 19983 - DNA, 25 bp, Probe Sequence
cttcctttcttctaacatcatccct

SEQ ID NO: 19984 - DNA, 25 bp, Probe Sequence
cattggcttcctttcttctaacatc

SEQ ID NO: 19985 - DNA, 25 bp, Probe Sequence
cttctttctactctcttctcttccc

SEQ ID NO: 19986 - DNA, 25 bp, Probe Sequence
ccttctttctactctcttctcttcc

SEQ ID NO: 19987 - DNA, 25 bp, Probe Sequence
ttggcttcctttcttctaacatcat

SEQ ID NO: 19988 - DNA, 25 bp, Probe Sequence
attggcttcctttcttctaacatca

SEQ ID NO: 19989 - DNA, 25 bp, Probe Sequence
tcattggcttcctttcttctaacat

SEQ ID NO: 19990 - DNA, 25 bp, Probe Sequence
tggcttcctttcttctaacatcatc

SEQ ID NO: 19991 - DNA, 25 bp, Probe Sequence
ctcattggcttcctttcttctaaca

SEQ ID NO: 19992 - DNA, 25 bp, Probe Sequence
tccttctttctactctcttctcttc

SEQ ID NO: 19993 - DNA, 25 bp, Probe Sequence
gcttcctttcttctaacatcatccc

SEQ ID NO: 19994 - DNA, 25 bp, Probe Sequence
ggcttcctttcttctaacatcatcc

SEQ ID NO: 19995 - DNA, 25 bp, Probe Sequence
ttccttctttctactctcttctctt

SEQ ID NO: 19996 - DNA, 25 bp, Probe Sequence
tttccttctttctactctcttctct

SEQ ID NO: 19997 - DNA, 25 bp, Probe Sequence
tcctttcttctaacatcatccctcc

SEQ ID NO: 19998 - DNA, 25 bp, Probe Sequence
cctcattggcttcctttcttctaac

SEQ ID NO: 19999 - DNA, 25 bp, Probe Sequence
gatttccttgcctatgatgtccttg

SEQ ID NO: 20000 - DNA, 25 bp, Probe Sequence
ctttgtggatttccttgcctatgat

SEQ ID NO: 20001 - DNA, 25 bp, Probe Sequence
tttgtggatttccttgcctatgatg

SEQ ID NO: 20002 - DNA, 25 bp, Probe Sequence
atttccttgcctatgatgtccttga

SEQ ID NO: 20003 - DNA, 25 bp, Probe Sequence
ccttgacatgaagcgtatatttgag

SEQ ID NO: 20004 - DNA, 25 bp, Probe Sequence
tccttgacatgaagcgtatatttga

SEQ ID NO: 20005 - DNA, 25 bp, Probe Sequence
cttgacatgaagcgtatatttgagc

SEQ ID NO: 20006 - DNA, 25 bp, Probe Sequence
caaatacatctccctcatctacacc

SEQ ID NO: 20007 - DNA, 25 bp, Probe Sequence
aatacatctccctcatctacaccaa

SEQ ID NO: 20008 - DNA, 25 bp, Probe Sequence
aaatacatctccctcatctacacca

SEQ ID NO: 20009 - DNA, 25 bp, Probe Sequence
gcaaatacatctccctcatctacac

SEQ ID NO: 20010 - DNA, 25 bp, Probe Sequence
catctccctcatctacaccaactat

SEQ ID NO: 20011 - DNA, 25 bp, Probe Sequence
atacatctccctcatctacaccaac

SEQ ID NO: 20012 - DNA, 25 bp, Probe Sequence
atctccctcatctacaccaactatg

SEQ ID NO: 20013 - DNA, 25 bp, Probe Sequence
acatctccctcatctacaccaacta

SEQ ID NO: 20014 - DNA, 25 bp, Probe Sequence
tacatctccctcatctacaccaact

SEQ ID NO: 20015 - DNA, 25 bp, Probe Sequence
ctgcaaatacatctccctcatctac

SEQ ID NO: 20016 - DNA, 25 bp, Probe Sequence
caaggatgactatgtgaaggcactg

SEQ ID NO: 20017 - DNA, 25 bp, Probe Sequence
tgcaaatacatctccctcatctaca

SEQ ID NO: 20018 - DNA, 25 bp, Probe Sequence
gctgcaaatacatctccctcatcta

SEQ ID NO: 20019 - DNA, 25 bp, Probe Sequence
tctccctcatctacaccaactatga

SEQ ID NO: 20020 - DNA, 25 bp, Probe Sequence
cctgtaccagtccaataccatcctg

SEQ ID NO: 20021 - DNA, 25 bp, Probe Sequence
gatctccttcgctgactacaacctg

SEQ ID NO: 20022 - DNA, 25 bp, Probe Sequence
ctgtaccagtccaataccatcctgc

SEQ ID NO: 20023 - DNA, 25 bp, Probe Sequence
ctcactcaaagcctcctgcctatac

SEQ ID NO: 20024 - DNA, 25 bp, Probe Sequence
gcaaggatgactatgtgaaggcact

SEQ ID NO: 20025 - DNA, 25 bp, Probe Sequence
tttctccaggaccaataaaatttct

SEQ ID NO: 20026 - DNA, 25 bp, Probe Sequence
ctttctccaggaccaataaaatttc

SEQ ID NO: 20027 - DNA, 25 bp, Probe Sequence
aaggatgactatgtgaaggcactgc

SEQ ID NO: 20028 - DNA, 25 bp, Probe Sequence
cctttctccaggaccaataaaattt

SEQ ID NO: 20029 - DNA, 25 bp, Probe Sequence
tccaggaccaataaaatttctaaga

SEQ ID NO: 20030 - DNA, 25 bp, Probe Sequence
cttactggtcctcacatctccttag

SEQ ID NO: 20031 - DNA, 25 bp, Probe Sequence
ccttactggtcctcacatctcctta

SEQ ID NO: 20032 - DNA, 25 bp, Probe Sequence
ttactggtcctcacatctccttagc

SEQ ID NO: 20033 - DNA, 25 bp, Probe Sequence
caaatataaggtccctgactactgg

SEQ ID NO: 20034 - DNA, 25 bp, Probe Sequence
aatataaggtccctgactactggta

SEQ ID NO: 20035 - DNA, 25 bp, Probe Sequence
aaatataaggtccctgactactggt

SEQ ID NO: 20036 - DNA, 25 bp, Probe Sequence
gcaaatataaggtccctgactactg

SEQ ID NO: 20037 - DNA, 25 bp, Probe Sequence
cacaatgagaatgatgcacactgag

SEQ ID NO: 20038 - DNA, 25 bp, Probe Sequence
cctgaaagccacaatgagaatgatg

SEQ ID NO: 20039 - DNA, 25 bp, Probe Sequence
atataaggtccctgactactggtac

SEQ ID NO: 20040 - DNA, 25 bp, Probe Sequence
cttccttactggtcctcacatctcc

SEQ ID NO: 20041 - DNA, 25 bp, Probe Sequence
ccttccttactggtcctcacatctc

SEQ ID NO: 20042 - DNA, 25 bp, Probe Sequence
tgtcctttaatcactgcatttcatt

SEQ ID NO: 20043 - DNA, 25 bp, Probe Sequence
cgcaaatataaggtccctgactact

SEQ ID NO: 20044 - DNA, 25 bp, Probe Sequence
ctgaaagccacaatgagaatgatgc

SEQ ID NO: 20045 - DNA, 25 bp, Probe Sequence
tccttactggtcctcacatctcctt

SEQ ID NO: 20046 - DNA, 25 bp, Probe Sequence
ttccttactggtcctcacatctcct

SEQ ID NO: 20047 - DNA, 25 bp, Probe Sequence
gtcctttaatcactgcatttcattt

SEQ ID NO: 20048 - DNA, 25 bp, Probe Sequence
ctgtttacatctttgccaagaagaa

SEQ ID NO: 20049 - DNA, 25 bp, Probe Sequence
tgtttacatctttgccaagaagaac

SEQ ID NO: 20050 - DNA, 25 bp, Probe Sequence
acaatgagaatgatgcacactgagg

SEQ ID NO: 20051 - DNA, 25 bp, Probe Sequence
agtccacaaagcattttcatttcta

SEQ ID NO: 20052 - DNA, 25 bp, Probe Sequence
gtttacatctttgccaagaagaacg

SEQ ID NO: 20053 - DNA, 25 bp, Probe Sequence
gattttggataataaacctggctca

SEQ ID NO: 20054 - DNA, 25 bp, Probe Sequence
gaaatcaagaaagctcaaaggaccg

SEQ ID NO: 20055 - DNA, 25 bp, Probe Sequence
gggctgacatcctaataaaataact

SEQ ID NO: 20056 - DNA, 25 bp, Probe Sequence
ggctgacatcctaataaaataactg

SEQ ID NO: 20057 - DNA, 25 bp, Probe Sequence
ccagggctgacatcctaataaaata

SEQ ID NO: 20058 - DNA, 25 bp, Probe Sequence
agggctgacatcctaataaaataac

SEQ ID NO: 20059 - DNA, 25 bp, Probe Sequence
cagggctgacatcctaataaaataa

SEQ ID NO: 20060 - DNA, 25 bp, Probe Sequence
gacccagggctgacatcctaataaa

SEQ ID NO: 20061 - DNA, 25 bp, Probe Sequence
tttctttctccctgatggacagacc

SEQ ID NO: 20062 - DNA, 25 bp, Probe Sequence
gctgacatcctaataaaataactgt

SEQ ID NO: 20063 - DNA, 25 bp, Probe Sequence
ttttctttctccctgatggacagac

SEQ ID NO: 20064 - DNA, 25 bp, Probe Sequence
cccagggctgacatcctaataaaat

SEQ ID NO: 20065 - DNA, 25 bp, Probe Sequence
aaatcaagaaagctcaaaggaccgg

SEQ ID NO: 20066 - DNA, 25 bp, Probe Sequence
ccctgatggacagacccaaacatag

SEQ ID NO: 20067 - DNA, 25 bp, Probe Sequence
acccagggctgacatcctaataaaa

SEQ ID NO: 20068 - DNA, 25 bp, Probe Sequence
gacatcctaataaaataactgttgg

SEQ ID NO: 20069 - DNA, 25 bp, Probe Sequence
tccctgatggacagacccaaacata

SEQ ID NO: 20070 - DNA, 25 bp, Probe Sequence
acatcctaataaaataactgttgga

SEQ ID NO: 20071 - DNA, 25 bp, Probe Sequence
tgacatcctaataaaataactgttg

SEQ ID NO: 20072 - DNA, 25 bp, Probe Sequence
ctgacatcctaataaaataactgtt

SEQ ID NO: 20073 - DNA, 25 bp, Probe Sequence
catcctaataaaataactgttggat

SEQ ID NO: 20074 - DNA, 25 bp, Probe Sequence
ctgtccctatctctcactctggacc

SEQ ID NO: 20075 - DNA, 25 bp, Probe Sequence
cctgtccctatctctcactctggac

SEQ ID NO: 20076 - DNA, 25 bp, Probe Sequence
tctctttggtttctcatcacatttg

SEQ ID NO: 20077 - DNA, 25 bp, Probe Sequence
ctttctctttggtttctcatcacat

SEQ ID NO: 20078 - DNA, 25 bp, Probe Sequence
atttctacctttctgagtctcttgg

SEQ ID NO: 20079 - DNA, 25 bp, Probe Sequence
ctctttggtttctcatcacatttgt

SEQ ID NO: 20080 - DNA, 25 bp, Probe Sequence
ttgatatgggctttctctttggttt

SEQ ID NO: 20081 - DNA, 25 bp, Probe Sequence
tttgatatgggctttctctttggtt

SEQ ID NO: 20082 - DNA, 25 bp, Probe Sequence
ttctctttggtttctcatcacattt

SEQ ID NO: 20083 - DNA, 25 bp, Probe Sequence
tttctctttggtttctcatcacatt

SEQ ID NO: 20084 - DNA, 25 bp, Probe Sequence
ggctaagtgtccattatttaccttg

SEQ ID NO: 20085 - DNA, 25 bp, Probe Sequence
atatgggctttctctttggtttctc

SEQ ID NO: 20086 - DNA, 25 bp, Probe Sequence
gatatgggctttctctttggtttct

SEQ ID NO: 20087 - DNA, 25 bp, Probe Sequence
tttctacctttctgagtctcttgga

SEQ ID NO: 20088 - DNA, 25 bp, Probe Sequence
taacagagtttgatatgggctttct

SEQ ID NO: 20089 - DNA, 25 bp, Probe Sequence
tgatatgggctttctctttggtttc

SEQ ID NO: 20090 - DNA, 25 bp, Probe Sequence
agtttgatatgggctttctctttgg

SEQ ID NO: 20091 - DNA, 25 bp, Probe Sequence
ttaacagagtttgatatgggctttc

SEQ ID NO: 20092 - DNA, 25 bp, Probe Sequence
tctttggtttctcatcacatttgta

SEQ ID NO: 20093 - DNA, 25 bp, Probe Sequence
ctagtggagagaactgattgtgagc

SEQ ID NO: 20094 - DNA, 25 bp, Probe Sequence
gctaagtgtccattatttaccttga

SEQ ID NO: 20095 - DNA, 25 bp, Probe Sequence
gtttgatatgggctttctctttggt

SEQ ID NO: 20096 - DNA, 25 bp, Probe Sequence
gctttctctttggtttctcatcaca

SEQ ID NO: 20097 - DNA, 25 bp, Probe Sequence
gagtttgatatgggctttctctttg

SEQ ID NO: 20098 - DNA, 25 bp, Probe Sequence
ctttggtttctcatcacatttgtaa

SEQ ID NO: 20099 - DNA, 25 bp, Probe Sequence
aacagagtttgatatgggctttctc

SEQ ID NO: 20100 - DNA, 25 bp, Probe Sequence
aagttgtgtgctattcgtaagttct

SEQ ID NO: 20101 - DNA, 25 bp, Probe Sequence
caagttgtgtgctattcgtaagttc

SEQ ID NO: 20102 - DNA, 25 bp, Probe Sequence
attatcctcaagttgtgtgctattc

SEQ ID NO: 20103 - DNA, 25 bp, Probe Sequence
tcaagttgtgtgctattcgtaagtt

SEQ ID NO: 20104 - DNA, 25 bp, Probe Sequence
ttatcctcaagttgtgtgctattcg

SEQ ID NO: 20105 - DNA, 25 bp, Probe Sequence
agttgtgtgctattcgtaagttctg

SEQ ID NO: 20106 - DNA, 25 bp, Probe Sequence
ctcaagttgtgtgctattcgtaagt

SEQ ID NO: 20107 - DNA, 25 bp, Probe Sequence
gtgttgtcttattcctaattcctgt

SEQ ID NO: 20108 - DNA, 25 bp, Probe Sequence
tcctaattcctgtatgttatccact

SEQ ID NO: 20109 - DNA, 25 bp, Probe Sequence
aattatcctcaagttgtgtgctatt

SEQ ID NO: 20110 - DNA, 25 bp, Probe Sequence
ttgtgtgctattcgtaagttctgtg

SEQ ID NO: 20111 - DNA, 25 bp, Probe Sequence
gttgtgtgctattcgtaagttctgt

SEQ ID NO: 20112 - DNA, 25 bp, Probe Sequence
agtgttgtcttattcctaattcctg

SEQ ID NO: 20113 - DNA, 25 bp, Probe Sequence
cctcaagttgtgtgctattcgtaag

SEQ ID NO: 20114 - DNA, 25 bp, Probe Sequence
ctggtaattatcctcaagttgtgtg

SEQ ID NO: 20115 - DNA, 25 bp, Probe Sequence
cctggtaattatcctcaagttgtgt

SEQ ID NO: 20116 - DNA, 25 bp, Probe Sequence
acctggtaattatcctcaagttgtg

SEQ ID NO: 20117 - DNA, 25 bp, Probe Sequence
ttcctaattcctgtatgttatccac

SEQ ID NO: 20118 - DNA, 25 bp, Probe Sequence
atcctcaagttgtgtgctattcgta

SEQ ID NO: 20119 - DNA, 25 bp, Probe Sequence
tatcctcaagttgtgtgctattcgt

SEQ ID NO: 20120 - DNA, 25 bp, Probe Sequence
ggtaattatcctcaagttgtgtgct

SEQ ID NO: 20121 - DNA, 25 bp, Probe Sequence
aacctggtaattatcctcaagttgt

SEQ ID NO: 20122 - DNA, 25 bp, Probe Sequence
tcctcaagttgtgtgctattcgtaa

SEQ ID NO: 20123 - DNA, 25 bp, Probe Sequence
gtaattatcctcaagttgtgtgcta

SEQ ID NO: 20124 - DNA, 25 bp, Probe Sequence
caagaattacaagtagaatggcagc

SEQ ID NO: 20125 - DNA, 25 bp, Probe Sequence
gtgatgatgaccaagaattacaagt

SEQ ID NO: 20126 - DNA, 25 bp, Probe Sequence
catcacggatcaatagactgtactt

SEQ ID NO: 20127 - DNA, 25 bp, Probe Sequence
tcacggatcaatagactgtacttat

SEQ ID NO: 20128 - DNA, 25 bp, Probe Sequence
atcacggatcaatagactgtactta

SEQ ID NO: 20129 - DNA, 25 bp, Probe Sequence
tgatgatgaccaagaattacaagta

SEQ ID NO: 20130 - DNA, 25 bp, Probe Sequence
gacaagaatcaatggataagcgtgg

SEQ ID NO: 20131 - DNA, 25 bp, Probe Sequence
ggacaagaatcaatggataagcgtg

SEQ ID NO: 20132 - DNA, 25 bp, Probe Sequence
tgatgaccaagaattacaagtagaa

SEQ ID NO: 20133 - DNA, 25 bp, Probe Sequence
atgatgaccaagaattacaagtaga

SEQ ID NO: 20134 - DNA, 25 bp, Probe Sequence
aagaattacaagtagaatggcagct

SEQ ID NO: 20135 - DNA, 25 bp, Probe Sequence
taagagttgtatgaacatggagagg

SEQ ID NO: 20136 - DNA, 25 bp, Probe Sequence
cacggatcaatagactgtacttatt

SEQ ID NO: 20137 - DNA, 25 bp, Probe Sequence
ccaagaattacaagtagaatggcag

SEQ ID NO: 20138 - DNA, 25 bp, Probe Sequence
gaccaagaattacaagtagaatggc

SEQ ID NO: 20139 - DNA, 25 bp, Probe Sequence
ggtgatgatgaccaagaattacaag

SEQ ID NO: 20140 - DNA, 25 bp, Probe Sequence
accaagaattacaagtagaatggca

SEQ ID NO: 20141 - DNA, 25 bp, Probe Sequence
gatgatgaccaagaattacaagtag

SEQ ID NO: 20142 - DNA, 25 bp, Probe Sequence
aagagttgtatgaacatggagagga

SEQ ID NO: 20143 - DNA, 25 bp, Probe Sequence
gcatcacggatcaatagactgtact

SEQ ID NO: 20144 - DNA, 25 bp, Probe Sequence
gcttctagtctggtgttctgagtac

SEQ ID NO: 20145 - DNA, 25 bp, Probe Sequence
taaagatgccctaagtgttgaagaa

SEQ ID NO: 20146 - DNA, 25 bp, Probe Sequence
tttccctctcttgcctttcttattt

SEQ ID NO: 20147 - DNA, 25 bp, Probe Sequence
agttgtatgaacatggagaggactt

SEQ ID NO: 20148 - DNA, 25 bp, Probe Sequence
atgaggatgacaagtataggctgga

SEQ ID NO: 20149 - DNA, 25 bp, Probe Sequence
gagataatgacaaagagggaagact

SEQ ID NO: 20150 - DNA, 25 bp, Probe Sequence
agagataatgacaaagagggaagac

SEQ ID NO: 20151 - DNA, 25 bp, Probe Sequence
ggaagagataatgacaaagagggaa

SEQ ID NO: 20152 - DNA, 25 bp, Probe Sequence
ggaaagtgaagaaatatgaacaggg

SEQ ID NO: 20153 - DNA, 25 bp, Probe Sequence
cggaaagtgaagaaatatgaacagg

SEQ ID NO: 20154 - DNA, 25 bp, Probe Sequence
acaaataccctaatctccaagtcat

SEQ ID NO: 20155 - DNA, 25 bp, Probe Sequence
tcggaaagtgaagaaatatgaacag

SEQ ID NO: 20156 - DNA, 25 bp, Probe Sequence
aagagataatgacaaagagggaaga

SEQ ID NO: 20157 - DNA, 25 bp, Probe Sequence
tggaagagataatgacaaagaggga

SEQ ID NO: 20158 - DNA, 25 bp, Probe Sequence
caatgaagttcggaaagtgaagaaa

SEQ ID NO: 20159 - DNA, 25 bp, Probe Sequence
gaaagtgaagaaatatgaacaggga

SEQ ID NO: 20160 - DNA, 25 bp, Probe Sequence
gaagagataatgacaaagagggaag

SEQ ID NO: 20161 - DNA, 25 bp, Probe Sequence
agataatgacaaagagggaagactt

SEQ ID NO: 20162 - DNA, 25 bp, Probe Sequence
aatgaagttcggaaagtgaagaaat

SEQ ID NO: 20163 - DNA, 25 bp, Probe Sequence
tcaaagacaaataccctaatctcca

SEQ ID NO: 20164 - DNA, 25 bp, Probe Sequence
aagacaaataccctaatctccaagt

SEQ ID NO: 20165 - DNA, 25 bp, Probe Sequence
ttggaagagataatgacaaagaggg

SEQ ID NO: 20166 - DNA, 25 bp, Probe Sequence
ttcggaaagtgaagaaatatgaaca

SEQ ID NO: 20167 - DNA, 25 bp, Probe Sequence
ataatgacaaagagggaagacttgg

SEQ ID NO: 20168 - DNA, 25 bp, Probe Sequence
gataatgacaaagagggaagacttg

SEQ ID NO: 20169 - DNA, 25 bp, Probe Sequence
caaataccctaatctccaagtcatt

SEQ ID NO: 20170 - DNA, 25 bp, Probe Sequence
agtgaagaaatatgaacagggattc

SEQ ID NO: 20171 - DNA, 25 bp, Probe Sequence
cttggaagagataatgacaaagagg

SEQ ID NO: 20172 - DNA, 25 bp, Probe Sequence
ggattttagagaaaacacagagcag

SEQ ID NO: 20173 - DNA, 25 bp, Probe Sequence
ctggattttagagaaaacacagagc

SEQ ID NO: 20174 - DNA, 25 bp, Probe Sequence
attttagagaaaacacagagcagtg

SEQ ID NO: 20175 - DNA, 25 bp, Probe Sequence
ggactggattttagagaaaacacag

SEQ ID NO: 20176 - DNA, 25 bp, Probe Sequence
tggactggattttagagaaaacaca

SEQ ID NO: 20177 - DNA, 25 bp, Probe Sequence
tttagagaaaacacagagcagtgat

SEQ ID NO: 20178 - DNA, 25 bp, Probe Sequence
gattttagagaaaacacagagcagt

SEQ ID NO: 20179 - DNA, 25 bp, Probe Sequence
ttttagagaaaacacagagcagtga

SEQ ID NO: 20180 - DNA, 25 bp, Probe Sequence
tggattttagagaaaacacagagca

SEQ ID NO: 20181 - DNA, 25 bp, Probe Sequence
atggactggattttagagaaaacac

SEQ ID NO: 20182 - DNA, 25 bp, Probe Sequence
gtacatggactggattttagagaaa

SEQ ID NO: 20183 - DNA, 25 bp, Probe Sequence
ttagagaaaacacagagcagtgatg

SEQ ID NO: 20184 - DNA, 25 bp, Probe Sequence
actggattttagagaaaacacagag

SEQ ID NO: 20185 - DNA, 25 bp, Probe Sequence
gactggattttagagaaaacacaga

SEQ ID NO: 20186 - DNA, 25 bp, Probe Sequence
agtacatggactggattttagagaa

SEQ ID NO: 20187 - DNA, 25 bp, Probe Sequence
catggactggattttagagaaaaca

SEQ ID NO: 20188 - DNA, 25 bp, Probe Sequence
acatggactggattttagagaaaac

SEQ ID NO: 20189 - DNA, 25 bp, Probe Sequence
aaaacacagagcagtgatggaaaag

SEQ ID NO: 20190 - DNA, 25 bp, Probe Sequence
gaaaacacagagcagtgatggaaaa

SEQ ID NO: 20191 - DNA, 25 bp, Probe Sequence
tagagaaaacacagagcagtgatgg

SEQ ID NO: 20192 - DNA, 25 bp, Probe Sequence
tacatggactggattttagagaaaa

SEQ ID NO: 20193 - DNA, 25 bp, Probe Sequence
agaaaacacagagcagtgatggaaa

SEQ ID NO: 20194 - DNA, 25 bp, Probe Sequence
gagaaaacacagagcagtgatggaa

SEQ ID NO: 20195 - DNA, 25 bp, Probe Sequence
agagaaaacacagagcagtgatgga

SEQ ID NO: 20196 - DNA, 25 bp, Probe Sequence
aaacacagagcagtgatggaaaagc

SEQ ID NO: 20197 - DNA, 25 bp, Probe Sequence
cataactactgatgactggaaggat

SEQ ID NO: 20198 - DNA, 25 bp, Probe Sequence
taagagcataactactgatgactgg

SEQ ID NO: 20199 - DNA, 25 bp, Probe Sequence
ataactactgatgactggaaggatt

SEQ ID NO: 20200 - DNA, 25 bp, Probe Sequence
gagcataactactgatgactggaag

SEQ ID NO: 20201 - DNA, 25 bp, Probe Sequence
agagcataactactgatgactggaa

SEQ ID NO: 20202 - DNA, 25 bp, Probe Sequence
aagagcataactactgatgactgga

SEQ ID NO: 20203 - DNA, 25 bp, Probe Sequence
acaacttcaatgccattaacaattc

SEQ ID NO: 20204 - DNA, 25 bp, Probe Sequence
aacttcaatgccattaacaattctg

SEQ ID NO: 20205 - DNA, 25 bp, Probe Sequence
caacttcaatgccattaacaattct

SEQ ID NO: 20206 - DNA, 25 bp, Probe Sequence
acttcaatgccattaacaattctga

SEQ ID NO: 20207 - DNA, 25 bp, Probe Sequence
gcataactactgatgactggaagga

SEQ ID NO: 20208 - DNA, 25 bp, Probe Sequence
agcataactactgatgactggaagg

SEQ ID NO: 20209 - DNA, 25 bp, Probe Sequence
gtacaacttcaatgccattaacaat

SEQ ID NO: 20210 - DNA, 25 bp, Probe Sequence
ataagagcataactactgatgactg

SEQ ID NO: 20211 - DNA, 25 bp, Probe Sequence
gcaactgaacaaggaagaatgaagt

SEQ ID NO: 20212 - DNA, 25 bp, Probe Sequence
tacaacttcaatgccattaacaatt

SEQ ID NO: 20213 - DNA, 25 bp, Probe Sequence
ggcaactgaacaaggaagaatgaag

SEQ ID NO: 20214 - DNA, 25 bp, Probe Sequence
gatggcaactgaacaaggaagaatg

SEQ ID NO: 20215 - DNA, 25 bp, Probe Sequence
agatggcaactgaacaaggaagaat

SEQ ID NO: 20216 - DNA, 25 bp, Probe Sequence
atggcaactgaacaaggaagaatga

SEQ ID NO: 20217 - DNA, 25 bp, Probe Sequence
aagatggcaactgaacaaggaagaa

SEQ ID NO: 20218 - DNA, 25 bp, Probe Sequence
ggattactgccaaagaagatgattt

SEQ ID NO: 20219 - DNA, 25 bp, Probe Sequence
agcccaattatgatatgactctgac

SEQ ID NO: 20220 - DNA, 25 bp, Probe Sequence
taactactgatgactggaaggattt

SEQ ID NO: 20221 - DNA, 25 bp, Probe Sequence
ttgttcttcctcttacctgtatagc

SEQ ID NO: 20222 - DNA, 25 bp, Probe Sequence
gcttgttcttcctcttacctgtata

SEQ ID NO: 20223 - DNA, 25 bp, Probe Sequence
ttcttcctcttacctgtatagcctc

SEQ ID NO: 20224 - DNA, 25 bp, Probe Sequence
gttcttcctcttacctgtatagcct

SEQ ID NO: 20225 - DNA, 25 bp, Probe Sequence
aattacctaagagccacaataagcc

SEQ ID NO: 20226 - DNA, 25 bp, Probe Sequence
tgttcttcctcttacctgtatagcc

SEQ ID NO: 20227 - DNA, 25 bp, Probe Sequence
tgcttgttcttcctcttacctgtat

SEQ ID NO: 20228 - DNA, 25 bp, Probe Sequence
cattcgtccttaggtactgtattgt

SEQ ID NO: 20229 - DNA, 25 bp, Probe Sequence
tcgtccttaggtactgtattgttac

SEQ ID NO: 20230 - DNA, 25 bp, Probe Sequence
attcgtccttaggtactgtattgtt

SEQ ID NO: 20231 - DNA, 25 bp, Probe Sequence
attacctaagagccacaataagcca

SEQ ID NO: 20232 - DNA, 25 bp, Probe Sequence
ctcttacctgtatagcctcacttcc

SEQ ID NO: 20233 - DNA, 25 bp, Probe Sequence
cctcttacctgtatagcctcacttc

SEQ ID NO: 20234 - DNA, 25 bp, Probe Sequence
cttcctcttacctgtatagcctcac

SEQ ID NO: 20235 - DNA, 25 bp, Probe Sequence
tcttcctcttacctgtatagcctca

SEQ ID NO: 20236 - DNA, 25 bp, Probe Sequence
cttgttcttcctcttacctgtatag

SEQ ID NO: 20237 - DNA, 25 bp, Probe Sequence
ttcgtccttaggtactgtattgtta

SEQ ID NO: 20238 - DNA, 25 bp, Probe Sequence
tcctcttacctgtatagcctcactt

SEQ ID NO: 20239 - DNA, 25 bp, Probe Sequence
ttcctcttacctgtatagcctcact

SEQ ID NO: 20240 - DNA, 25 bp, Probe Sequence
gcattcgtccttaggtactgtattg

SEQ ID NO: 20241 - DNA, 25 bp, Probe Sequence
ttactctgtgctaagttgtcttaca

SEQ ID NO: 20242 - DNA, 25 bp, Probe Sequence
tgtctgtaatcacactctcttctta

SEQ ID NO: 20243 - DNA, 25 bp, Probe Sequence
gtgcttgttcttcctcttacctgta

SEQ ID NO: 20244 - DNA, 25 bp, Probe Sequence
tactctgtgctaagttgtcttacac

SEQ ID NO: 20245 - DNA, 25 bp, Probe Sequence
gatacaatgctgcctataatcgcta

SEQ ID NO: 20246 - DNA, 25 bp, Probe Sequence
atacaatgctgcctataatcgctac

SEQ ID NO: 20247 - DNA, 25 bp, Probe Sequence
ttcctgtatattctcttgtctggct

SEQ ID NO: 20248 - DNA, 25 bp, Probe Sequence
atggatacaatgctgcctataatcg

SEQ ID NO: 20249 - DNA, 25 bp, Probe Sequence
tcctgtatattctcttgtctggctg

SEQ ID NO: 20250 - DNA, 25 bp, Probe Sequence
tacaatgctgcctataatcgctact

SEQ ID NO: 20251 - DNA, 25 bp, Probe Sequence
tatggatacaatgctgcctataatc

SEQ ID NO: 20252 - DNA, 25 bp, Probe Sequence
caatgctgcctataatcgctacttc

SEQ ID NO: 20253 - DNA, 25 bp, Probe Sequence
aatgctgcctataatcgctacttca

SEQ ID NO: 20254 - DNA, 25 bp, Probe Sequence
ttatggatacaatgctgcctataat

SEQ ID NO: 20255 - DNA, 25 bp, Probe Sequence
acaatgctgcctataatcgctactt

SEQ ID NO: 20256 - DNA, 25 bp, Probe Sequence
tttcctgtatattctcttgtctggc

SEQ ID NO: 20257 - DNA, 25 bp, Probe Sequence
ggatacaatgctgcctataatcgct

SEQ ID NO: 20258 - DNA, 25 bp, Probe Sequence
ggtttatggatacaatgctgcctat

SEQ ID NO: 20259 - DNA, 25 bp, Probe Sequence
acataggcttatatacaatgcttct

SEQ ID NO: 20260 - DNA, 25 bp, Probe Sequence
ctgcctataatcgctacttcaggaa

SEQ ID NO: 20261 - DNA, 25 bp, Probe Sequence
cctgtatattctcttgtctggctgc

SEQ ID NO: 20262 - DNA, 25 bp, Probe Sequence
gtttatggatacaatgctgcctata

SEQ ID NO: 20263 - DNA, 25 bp, Probe Sequence
ctttcctgtatattctcttgtctgg

SEQ ID NO: 20264 - DNA, 25 bp, Probe Sequence
gcttctttcctgtatattctcttgt

SEQ ID NO: 20265 - DNA, 25 bp, Probe Sequence
tgcttctttcctgtatattctcttg

SEQ ID NO: 20266 - DNA, 25 bp, Probe Sequence
tggatacaatgctgcctataatcgc

SEQ ID NO: 20267 - DNA, 25 bp, Probe Sequence
ccagattgataagtaatgaaagtgc

SEQ ID NO: 20268 - DNA, 25 bp, Probe Sequence
tgcctataatcgctacttcaggaag

SEQ ID NO: 20269 - DNA, 25 bp, Probe Sequence
ttatcacaaccaccgttacaagtat

SEQ ID NO: 20270 - DNA, 25 bp, Probe Sequence
tatcacaaccaccgttacaagtata

SEQ ID NO: 20271 - DNA, 25 bp, Probe Sequence
attatattggtggttctcagcaaga

SEQ ID NO: 20272 - DNA, 25 bp, Probe Sequence
gattatattggtggttctcagcaag

SEQ ID NO: 20273 - DNA, 25 bp, Probe Sequence
agattatattggtggttctcagcaa

SEQ ID NO: 20274 - DNA, 25 bp, Probe Sequence
tagattatattggtggttctcagca

SEQ ID NO: 20275 - DNA, 25 bp, Probe Sequence
ttatattggtggttctcagcaagag

SEQ ID NO: 20276 - DNA, 25 bp, Probe Sequence
ttagattatattggtggttctcagc

SEQ ID NO: 20277 - DNA, 25 bp, Probe Sequence
ttggagttgtcacatcagataagac

SEQ ID NO: 20278 - DNA, 25 bp, Probe Sequence
catgttaccatcttacttgagcctt

SEQ ID NO: 20279 - DNA, 25 bp, Probe Sequence
aagccactagactcttcactgttag

SEQ ID NO: 20280 - DNA, 25 bp, Probe Sequence
ttgtagttggagtaataggagcttc

SEQ ID NO: 20281 - DNA, 25 bp, Probe Sequence
caagagaaggagtatgtgtccaatg

SEQ ID NO: 20282 - DNA, 25 bp, Probe Sequence
cttaccctttcctcctttatcacaa

SEQ ID NO: 20283 - DNA, 25 bp, Probe Sequence
atacccttaccctttcctcctttat

SEQ ID NO: 20284 - DNA, 25 bp, Probe Sequence
gttctactatggctgagttctggtc

SEQ ID NO: 20285 - DNA, 25 bp, Probe Sequence
ttaccctttcctcctttatcacaac

SEQ ID NO: 20286 - DNA, 25 bp, Probe Sequence
tgttaccatcttacttgagccttta

SEQ ID NO: 20287 - DNA, 25 bp, Probe Sequence
tcttacttgagcctttaatggactt

SEQ ID NO: 20288 - DNA, 25 bp, Probe Sequence
aatccagttctactatggctgagtt

SEQ ID NO: 20289 - DNA, 25 bp, Probe Sequence
atcttacttgagcctttaatggact

SEQ ID NO: 20290 - DNA, 25 bp, Probe Sequence
tgtactgcatgttaccatcttactt

SEQ ID NO: 20291 - DNA, 25 bp, Probe Sequence
actatgaatgtactgcatgttacca

SEQ ID NO: 20292 - DNA, 25 bp, Probe Sequence
atgtactgcatgttaccatcttact

SEQ ID NO: 20293 - DNA, 25 bp, Probe Sequence
cttgaagaatgtggctgtagatgaa

SEQ ID NO: 20294 - DNA, 25 bp, Probe Sequence
ttgaagaatgtggctgtagatgaac

SEQ ID NO: 20295 - DNA, 25 bp, Probe Sequence
gaagaatgtggctgtagatgaactg

SEQ ID NO: 20296 - DNA, 25 bp, Probe Sequence
atccttgaagaatgtggctgtagat

SEQ ID NO: 20297 - DNA, 25 bp, Probe Sequence
aagaatgtggctgtagatgaactga

SEQ ID NO: 20298 - DNA, 25 bp, Probe Sequence
tgaagaatgtggctgtagatgaact

SEQ ID NO: 20299 - DNA, 25 bp, Probe Sequence
agaatgtggctgtagatgaactgag

SEQ ID NO: 20300 - DNA, 25 bp, Probe Sequence
ccttgaagaatgtggctgtagatga

SEQ ID NO: 20301 - DNA, 25 bp, Probe Sequence
tccttgaagaatgtggctgtagatg

SEQ ID NO: 20302 - DNA, 25 bp, Probe Sequence
gaagacaggagtcaatggagattct

SEQ ID NO: 20303 - DNA, 25 bp, Probe Sequence
gatccttgaagaatgtggctgtaga

SEQ ID NO: 20304 - DNA, 25 bp, Probe Sequence
agtcaatggagattctcgatacttc

SEQ ID NO: 20305 - DNA, 25 bp, Probe Sequence
gagtcaatggagattctcgatactt

SEQ ID NO: 20306 - DNA, 25 bp, Probe Sequence
cccatcaaatcagagagaaggaatc

SEQ ID NO: 20307 - DNA, 25 bp, Probe Sequence
atcaaatcagagagaaggaatccac

SEQ ID NO: 20308 - DNA, 25 bp, Probe Sequence
catcaaatcagagagaaggaatcca

SEQ ID NO: 20309 - DNA, 25 bp, Probe Sequence
ccatcaaatcagagagaaggaatcc

SEQ ID NO: 20310 - DNA, 25 bp, Probe Sequence
acccatcaaatcagagagaaggaat

SEQ ID NO: 20311 - DNA, 25 bp, Probe Sequence
aagacaggagtcaatggagattctc

SEQ ID NO: 20312 - DNA, 25 bp, Probe Sequence
ggagtcaatggagattctcgatact

SEQ ID NO: 20313 - DNA, 25 bp, Probe Sequence
aggagtcaatggagattctcgatac

SEQ ID NO: 20314 - DNA, 25 bp, Probe Sequence
caggagtcaatggagattctcgata

SEQ ID NO: 20315 - DNA, 25 bp, Probe Sequence
atcactggtactctttctaatcctg

SEQ ID NO: 20316 - DNA, 25 bp, Probe Sequence
tgatttgtatgccatgaactttgag

SEQ ID NO: 20317 - DNA, 25 bp, Probe Sequence
cttagtgctaataccttgcctctta

SEQ ID NO: 20318 - DNA, 25 bp, Probe Sequence
ttagtgctaataccttgcctcttat

SEQ ID NO: 20319 - DNA, 25 bp, Probe Sequence
agtgctaataccttgcctcttattc

SEQ ID NO: 20320 - DNA, 25 bp, Probe Sequence
tagtgctaataccttgcctcttatt

SEQ ID NO: 20321 - DNA, 25 bp, Probe Sequence
ctaataccttgcctcttattcctgc

SEQ ID NO: 20322 - DNA, 25 bp, Probe Sequence
gctaataccttgcctcttattcctg

SEQ ID NO: 20323 - DNA, 25 bp, Probe Sequence
tcttagtgctaataccttgcctctt

SEQ ID NO: 20324 - DNA, 25 bp, Probe Sequence
ttcttagtgctaataccttgcctct

SEQ ID NO: 20325 - DNA, 25 bp, Probe Sequence
aataccttgcctcttattcctgcta

SEQ ID NO: 20326 - DNA, 25 bp, Probe Sequence
taataccttgcctcttattcctgct

SEQ ID NO: 20327 - DNA, 25 bp, Probe Sequence
tgctaataccttgcctcttattcct

SEQ ID NO: 20328 - DNA, 25 bp, Probe Sequence
gtgctaataccttgcctcttattcc

SEQ ID NO: 20329 - DNA, 25 bp, Probe Sequence
ataccttgcctcttattcctgctac

SEQ ID NO: 20330 - DNA, 25 bp, Probe Sequence
ggtggtaatattggcattctgatta

SEQ ID NO: 20331 - DNA, 25 bp, Probe Sequence
taccttgcctcttattcctgctaca

SEQ ID NO: 20332 - DNA, 25 bp, Probe Sequence
ttaaatactgtgccttaggagactg

SEQ ID NO: 20333 - DNA, 25 bp, Probe Sequence
tttcttagtgctaataccttgcctc

SEQ ID NO: 20334 - DNA, 25 bp, Probe Sequence
aatactgtgccttaggagactggaa

SEQ ID NO: 20335 - DNA, 25 bp, Probe Sequence
attaaatactgtgccttaggagact

SEQ ID NO: 20336 - DNA, 25 bp, Probe Sequence
tgattaaatactgtgccttaggaga

SEQ ID NO: 20337 - DNA, 25 bp, Probe Sequence
tctgattaaatactgtgccttagga

SEQ ID NO: 20338 - DNA, 25 bp, Probe Sequence
gattaaatactgtgccttaggagac

SEQ ID NO: 20339 - DNA, 25 bp, Probe Sequence
ctgattaaatactgtgccttaggag

SEQ ID NO: 20340 - DNA, 25 bp, Probe Sequence
gtgttctgtttacctagtgtcttac

SEQ ID NO: 20341 - DNA, 25 bp, Probe Sequence
gccaaataaagttgaaattttacca

SEQ ID NO: 20342 - DNA, 25 bp, Probe Sequence
ggccaaataaagttgaaattttacc

SEQ ID NO: 20343 - DNA, 25 bp, Probe Sequence
ataaagttgaaattttaccaccaaa

SEQ ID NO: 20344 - DNA, 25 bp, Probe Sequence
aataaagttgaaattttaccaccaa

SEQ ID NO: 20345 - DNA, 25 bp, Probe Sequence
taaagttgaaattttaccaccaaaa

SEQ ID NO: 20346 - DNA, 25 bp, Probe Sequence
aaataaagttgaaattttaccacca

SEQ ID NO: 20347 - DNA, 25 bp, Probe Sequence
caaataaagttgaaattttaccacc

SEQ ID NO: 20348 - DNA, 25 bp, Probe Sequence
ccaaataaagttgaaattttaccac

SEQ ID NO: 20349 - DNA, 25 bp, Probe Sequence
gtatcttcccaatagcactttcatt

SEQ ID NO: 20350 - DNA, 25 bp, Probe Sequence
ttctttgcttgaacacagtatcttc

SEQ ID NO: 20351 - DNA, 25 bp, Probe Sequence
cattctttgcttgaacacagtatct

SEQ ID NO: 20352 - DNA, 25 bp, Probe Sequence
ccattctttgcttgaacacagtatc

SEQ ID NO: 20353 - DNA, 25 bp, Probe Sequence
attctttgcttgaacacagtatctt

SEQ ID NO: 20354 - DNA, 25 bp, Probe Sequence
agtatcttcccaatagcactttcat

SEQ ID NO: 20355 - DNA, 25 bp, Probe Sequence
tctttgcttgaacacagtatcttcc

SEQ ID NO: 20356 - DNA, 25 bp, Probe Sequence
ttgaacacagtatcttcccaatagc

SEQ ID NO: 20357 - DNA, 25 bp, Probe Sequence
cttgaacacagtatcttcccaatag

SEQ ID NO: 20358 - DNA, 25 bp, Probe Sequence
gcttgaacacagtatcttcccaata

SEQ ID NO: 20359 - DNA, 25 bp, Probe Sequence
cagtatcttcccaatagcactttca

SEQ ID NO: 20360 - DNA, 25 bp, Probe Sequence
acagtatcttcccaatagcactttc

SEQ ID NO: 20361 - DNA, 25 bp, Probe Sequence
cacagtatcttcccaatagcacttt

SEQ ID NO: 20362 - DNA, 25 bp, Probe Sequence
gaacacagtatcttcccaatagcac

SEQ ID NO: 20363 - DNA, 25 bp, Probe Sequence
tgaacacagtatcttcccaatagca

SEQ ID NO: 20364 - DNA, 25 bp, Probe Sequence
acacagtatcttcccaatagcactt

SEQ ID NO: 20365 - DNA, 25 bp, Probe Sequence
aacacagtatcttcccaatagcact

SEQ ID NO: 20366 - DNA, 25 bp, Probe Sequence
ctttgcttgaacacagtatcttccc

SEQ ID NO: 20367 - DNA, 25 bp, Probe Sequence
tgcttgaacacagtatcttcccaat

SEQ ID NO: 20368 - DNA, 25 bp, Probe Sequence
tttgcttgaacacagtatcttccca

SEQ ID NO: 20369 - DNA, 25 bp, Probe Sequence
ttgcttgaacacagtatcttcccaa

SEQ ID NO: 20370 - DNA, 25 bp, Probe Sequence
ctgtggcaataaagagaaactttgt

SEQ ID NO: 20371 - DNA, 25 bp, Probe Sequence
tgtggcaataaagagaaactttgtg

SEQ ID NO: 20372 - DNA, 25 bp, Probe Sequence
cctgtggcaataaagagaaactttg

SEQ ID NO: 20373 - DNA, 25 bp, Probe Sequence
atgatgacacttacgacaatgacat

SEQ ID NO: 20374 - DNA, 25 bp, Probe Sequence
gatgatgacacttacgacaatgaca

SEQ ID NO: 20375 - DNA, 25 bp, Probe Sequence
tgatgacacttacgacaatgacatt

SEQ ID NO: 20376 - DNA, 25 bp, Probe Sequence
cgatgatgacacttacgacaatgac

SEQ ID NO: 20377 - DNA, 25 bp, Probe Sequence
agagtagcatgagagaattgtatca

SEQ ID NO: 20378 - DNA, 25 bp, Probe Sequence
gttaccaactacctagactggattc

SEQ ID NO: 20379 - DNA, 25 bp, Probe Sequence
ctacctagactggattcgtgacaac

SEQ ID NO: 20380 - DNA, 25 bp, Probe Sequence
caactacctagactggattcgtgac

SEQ ID NO: 20381 - DNA, 25 bp, Probe Sequence
tacttaacagaacagtcaccgacaa

SEQ ID NO: 20382 - DNA, 25 bp, Probe Sequence
ttacttaacagaacagtcaccgaca

SEQ ID NO: 20383 - DNA, 25 bp, Probe Sequence
atatttatagtcacaagagcccagc

SEQ ID NO: 20384 - DNA, 25 bp, Probe Sequence
ggttaccaactacctagactggatt

SEQ ID NO: 20385 - DNA, 25 bp, Probe Sequence
ttaccaactacctagactggattcg

SEQ ID NO: 20386 - DNA, 25 bp, Probe Sequence
gcacatcacaacatttacttaacag

SEQ ID NO: 20387 - DNA, 25 bp, Probe Sequence
actacctagactggattcgtgacaa

SEQ ID NO: 20388 - DNA, 25 bp, Probe Sequence
aactacctagactggattcgtgaca

SEQ ID NO: 20389 - DNA, 25 bp, Probe Sequence
tagagtagcatgagagaattgtatc

SEQ ID NO: 20390 - DNA, 25 bp, Probe Sequence
tacctagactggattcgtgacaaca

SEQ ID NO: 20391 - DNA, 25 bp, Probe Sequence
tatttatagtcacaagagcccagca

SEQ ID NO: 20392 - DNA, 25 bp, Probe Sequence
atttacttaacagaacagtcaccga

SEQ ID NO: 20393 - DNA, 25 bp, Probe Sequence
catttacttaacagaacagtcaccg

SEQ ID NO: 20394 - DNA, 25 bp, Probe Sequence
acatttacttaacagaacagtcacc

SEQ ID NO: 20395 - DNA, 25 bp, Probe Sequence
ttaacagaacagtcaccgacaacat

SEQ ID NO: 20396 - DNA, 25 bp, Probe Sequence
gaacaactaggcttcagcatattta

SEQ ID NO: 20397 - DNA, 25 bp, Probe Sequence
cctgaataaagaatgaatgggcaaa

SEQ ID NO: 20398 - DNA, 25 bp, Probe Sequence
atgccacctgaataaagaatgaatg

SEQ ID NO: 20399 - DNA, 25 bp, Probe Sequence
acctgaataaagaatgaatgggcaa

SEQ ID NO: 20400 - DNA, 25 bp, Probe Sequence
cacctgaataaagaatgaatgggca

SEQ ID NO: 20401 - DNA, 25 bp, Probe Sequence
tatgccacctgaataaagaatgaat

SEQ ID NO: 20402 - DNA, 25 bp, Probe Sequence
ttatgccacctgaataaagaatgaa

SEQ ID NO: 20403 - DNA, 25 bp, Probe Sequence
gtatctgaaacaccaaatggacctg

SEQ ID NO: 20404 - DNA, 25 bp, Probe Sequence
ctgtatctgaaacaccaaatggacc

SEQ ID NO: 20405 - DNA, 25 bp, Probe Sequence
ccctttaagaacaacatgagctttg

SEQ ID NO: 20406 - DNA, 25 bp, Probe Sequence
tcatctttcttccaaacaggctcag

SEQ ID NO: 20407 - DNA, 25 bp, Probe Sequence
ctcatctttcttccaaacaggctca

SEQ ID NO: 20408 - DNA, 25 bp, Probe Sequence
tgtatctgaaacaccaaatggacct

SEQ ID NO: 20409 - DNA, 25 bp, Probe Sequence
taagctgtatctgaaacaccaaatg

SEQ ID NO: 20410 - DNA, 25 bp, Probe Sequence
atctttcttccaaacaggctcagag

SEQ ID NO: 20411 - DNA, 25 bp, Probe Sequence
tgccacctgaataaagaatgaatgg

SEQ ID NO: 20412 - DNA, 25 bp, Probe Sequence
tgaccctcatctttcttccaaacag

SEQ ID NO: 20413 - DNA, 25 bp, Probe Sequence
ctgaccctcatctttcttccaaaca

SEQ ID NO: 20414 - DNA, 25 bp, Probe Sequence
ctaagctgtatctgaaacaccaaat

SEQ ID NO: 20415 - DNA, 25 bp, Probe Sequence
gctgtatctgaaacaccaaatggac

SEQ ID NO: 20416 - DNA, 25 bp, Probe Sequence
cctaagctgtatctgaaacaccaaa

SEQ ID NO: 20417 - DNA, 25 bp, Probe Sequence
catctttcttccaaacaggctcaga

SEQ ID NO: 20418 - DNA, 25 bp, Probe Sequence
ccacctgaataaagaatgaatgggc

SEQ ID NO: 20419 - DNA, 25 bp, Probe Sequence
gccacctgaataaagaatgaatggg

SEQ ID NO: 20420 - DNA, 25 bp, Probe Sequence
aagctgtatctgaaacaccaaatgg

SEQ ID NO: 20421 - DNA, 25 bp, Probe Sequence
taacatcaacagaacaacttcactt

SEQ ID NO: 20422 - DNA, 25 bp, Probe Sequence
ataacatcaacagaacaacttcact

SEQ ID NO: 20423 - DNA, 25 bp, Probe Sequence
gttgcctctgagaataatgacaatt

SEQ ID NO: 20424 - DNA, 25 bp, Probe Sequence
gtggctgagaagatgagaggaatat

SEQ ID NO: 20425 - DNA, 25 bp, Probe Sequence
ttatcaagtgtcaagatcagcaagt

SEQ ID NO: 20426 - DNA, 25 bp, Probe Sequence
attatcaagtgtcaagatcagcaag

SEQ ID NO: 20427 - DNA, 25 bp, Probe Sequence
tgttgcctctgagaataatgacaat

SEQ ID NO: 20428 - DNA, 25 bp, Probe Sequence
aataacatcaacagaacaacttcac

SEQ ID NO: 20429 - DNA, 25 bp, Probe Sequence
tatcaagtgtcaagatcagcaagtg

SEQ ID NO: 20430 - DNA, 25 bp, Probe Sequence
gtattatcaagtgtcaagatcagca

SEQ ID NO: 20431 - DNA, 25 bp, Probe Sequence
agtattatcaagtgtcaagatcagc

SEQ ID NO: 20432 - DNA, 25 bp, Probe Sequence
tattatcaagtgtcaagatcagcaa

SEQ ID NO: 20433 - DNA, 25 bp, Probe Sequence
tggctgagaagatgagaggaatatt

SEQ ID NO: 20434 - DNA, 25 bp, Probe Sequence
tgtggctgagaagatgagaggaata

SEQ ID NO: 20435 - DNA, 25 bp, Probe Sequence
tgtcaagatcagcaagtgtccttaa

SEQ ID NO: 20436 - DNA, 25 bp, Probe Sequence
ttatttctatgctttgttgcctctg

SEQ ID NO: 20437 - DNA, 25 bp, Probe Sequence
tatttctatgctttgttgcctctga

SEQ ID NO: 20438 - DNA, 25 bp, Probe Sequence
ttaacttccctctatcccgcttata

SEQ ID NO: 20439 - DNA, 25 bp, Probe Sequence
ctttgttgcctctgagaataatgac

SEQ ID NO: 20440 - DNA, 25 bp, Probe Sequence
tttatttctatgctttgttgcctct

SEQ ID NO: 20441 - DNA, 25 bp, Probe Sequence
ttgaagttgtggctgagaagatgag

SEQ ID NO: 20442 - DNA, 25 bp, Probe Sequence
tatgctttgttgcctctgagaataa

SEQ ID NO: 20443 - DNA, 25 bp, Probe Sequence
aacatcaacagaacaacttcacttt

SEQ ID NO: 20444 - DNA, 25 bp, Probe Sequence
taagggaacacacaaagaattacac

SEQ ID NO: 20445 - DNA, 25 bp, Probe Sequence
tacgaattggagatgaagatgtagg

SEQ ID NO: 20446 - DNA, 25 bp, Probe Sequence
cctacgaattggagatgaagatgta

SEQ ID NO: 20447 - DNA, 25 bp, Probe Sequence
gacctacgaattggagatgaagatg

SEQ ID NO: 20448 - DNA, 25 bp, Probe Sequence
tgacctacgaattggagatgaagat

SEQ ID NO: 20449 - DNA, 25 bp, Probe Sequence
acctacgaattggagatgaagatgt

SEQ ID NO: 20450 - DNA, 25 bp, Probe Sequence
ttgacctacgaattggagatgaaga

SEQ ID NO: 20451 - DNA, 25 bp, Probe Sequence
aattccatcgtgtaatcaaggactt

SEQ ID NO: 20452 - DNA, 25 bp, Probe Sequence
attccatcgtgtaatcaaggacttc

SEQ ID NO: 20453 - DNA, 25 bp, Probe Sequence
ccatcgtgtaatcaaggacttcatg

SEQ ID NO: 20454 - DNA, 25 bp, Probe Sequence
acgaattggagatgaagatgtaggc

SEQ ID NO: 20455 - DNA, 25 bp, Probe Sequence
tccatcgtgtaatcaaggacttcat

SEQ ID NO: 20456 - DNA, 25 bp, Probe Sequence
tttgacctacgaattggagatgaag

SEQ ID NO: 20457 - DNA, 25 bp, Probe Sequence
ttccatcgtgtaatcaaggacttca

SEQ ID NO: 20458 - DNA, 25 bp, Probe Sequence
cagcaaattccatcgtgtaatcaag

SEQ ID NO: 20459 - DNA, 25 bp, Probe Sequence
ctacaggagagaaaggatttggcta

SEQ ID NO: 20460 - DNA, 25 bp, Probe Sequence
tacaggagagaaaggatttggctac

SEQ ID NO: 20461 - DNA, 25 bp, Probe Sequence
ctacgaattggagatgaagatgtag

SEQ ID NO: 20462 - DNA, 25 bp, Probe Sequence
aaacagcaaattccatcgtgtaatc

SEQ ID NO: 20463 - DNA, 25 bp, Probe Sequence
agcaaattccatcgtgtaatcaagg

SEQ ID NO: 20464 - DNA, 25 bp, Probe Sequence
acagcaaattccatcgtgtaatcaa

SEQ ID NO: 20465 - DNA, 25 bp, Probe Sequence
aacagcaaattccatcgtgtaatca

SEQ ID NO: 20466 - DNA, 25 bp, Probe Sequence
ccagttcttcatcacgacagtcaag

SEQ ID NO: 20467 - DNA, 25 bp, Probe Sequence
aaattccatcgtgtaatcaaggact

SEQ ID NO: 20468 - DNA, 25 bp, Probe Sequence
caaattccatcgtgtaatcaaggac

SEQ ID NO: 20469 - DNA, 25 bp, Probe Sequence
gaatatggcaattagcgatatagca

SEQ ID NO: 20470 - DNA, 25 bp, Probe Sequence
agaatatggcaattagcgatatagc

SEQ ID NO: 20471 - DNA, 25 bp, Probe Sequence
atggcaattagcgatatagcatacc

SEQ ID NO: 20472 - DNA, 25 bp, Probe Sequence
aatatggcaattagcgatatagcat

SEQ ID NO: 20473 - DNA, 25 bp, Probe Sequence
gcaacttactagagtgatgatgtga

SEQ ID NO: 20474 - DNA, 25 bp, Probe Sequence
caacttactagagtgatgatgtgaa

SEQ ID NO: 20475 - DNA, 25 bp, Probe Sequence
cgcttcagctactatctaatcatca

SEQ ID NO: 20476 - DNA, 25 bp, Probe Sequence
acgcttcagctactatctaatcatc

SEQ ID NO: 20477 - DNA, 25 bp, Probe Sequence
cacgcttcagctactatctaatcat

SEQ ID NO: 20478 - DNA, 25 bp, Probe Sequence
tatggcaattagcgatatagcatac

SEQ ID NO: 20479 - DNA, 25 bp, Probe Sequence
gcttcagctactatctaatcatcac

SEQ ID NO: 20480 - DNA, 25 bp, Probe Sequence
gtgatgatgtgaaagaaatggtgat

SEQ ID NO: 20481 - DNA, 25 bp, Probe Sequence
tagcgatatagcatacccaaacaaa

SEQ ID NO: 20482 - DNA, 25 bp, Probe Sequence
ttagcgatatagcatacccaaacaa

SEQ ID NO: 20483 - DNA, 25 bp, Probe Sequence
attagcgatatagcatacccaaaca

SEQ ID NO: 20484 - DNA, 25 bp, Probe Sequence
gagtgatgatgtgaaagaaatggtg

SEQ ID NO: 20485 - DNA, 25 bp, Probe Sequence
agagtgatgatgtgaaagaaatggt

SEQ ID NO: 20486 - DNA, 25 bp, Probe Sequence
gctactatctaatcatcacccgaag

SEQ ID NO: 20487 - DNA, 25 bp, Probe Sequence
tttgttatcaggttgtttcagttgt

SEQ ID NO: 20488 - DNA, 25 bp, Probe Sequence
tattggatgccctatctatctgcta

SEQ ID NO: 20489 - DNA, 25 bp, Probe Sequence
cagttgtattggatgccctatctat

SEQ ID NO: 20490 - DNA, 25 bp, Probe Sequence
caggttgtttcagttgtattggatg

SEQ ID NO: 20491 - DNA, 25 bp, Probe Sequence
tcaggttgtttcagttgtattggat

SEQ ID NO: 20492 - DNA, 25 bp, Probe Sequence
atcaggttgtttcagttgtattgga

SEQ ID NO: 20493 - DNA, 25 bp, Probe Sequence
cagataaggatggagatggaagaat

SEQ ID NO: 20494 - DNA, 25 bp, Probe Sequence
attctctcaataactcagtgtagca

SEQ ID NO: 20495 - DNA, 25 bp, Probe Sequence
tgctaatctatatgccacagaagag

SEQ ID NO: 20496 - DNA, 25 bp, Probe Sequence
ttgctaatctatatgccacagaaga

SEQ ID NO: 20497 - DNA, 25 bp, Probe Sequence
tcttgctaatctatatgccacagaa

SEQ ID NO: 20498 - DNA, 25 bp, Probe Sequence
aatcttgctaatctatatgccacag

SEQ ID NO: 20499 - DNA, 25 bp, Probe Sequence
cttgctaatctatatgccacagaag

SEQ ID NO: 20500 - DNA, 25 bp, Probe Sequence
atcttgctaatctatatgccacaga

SEQ ID NO: 20501 - DNA, 25 bp, Probe Sequence
tgaagccaactaagtgttattgaac

SEQ ID NO: 20502 - DNA, 25 bp, Probe Sequence
atggtggtagatgtgtgactcttat

SEQ ID NO: 20503 - DNA, 25 bp, Probe Sequence
aagccaactaagtgttattgaactg

SEQ ID NO: 20504 - DNA, 25 bp, Probe Sequence
gaagccaactaagtgttattgaact

SEQ ID NO: 20505 - DNA, 25 bp, Probe Sequence
tggtagatgtgtgactcttatcaga

SEQ ID NO: 20506 - DNA, 25 bp, Probe Sequence
gtggtagatgtgtgactcttatcag

SEQ ID NO: 20507 - DNA, 25 bp, Probe Sequence
agccaactaagtgttattgaactgt

SEQ ID NO: 20508 - DNA, 25 bp, Probe Sequence
aattctctcaataactcagtgtagc

SEQ ID NO: 20509 - DNA, 25 bp, Probe Sequence
gccaactaagtgttattgaactgta

SEQ ID NO: 20510 - DNA, 25 bp, Probe Sequence
atgaagccaactaagtgttattgaa

SEQ ID NO: 20511 - DNA, 25 bp, Probe Sequence
agataaggatggagatggaagaata

SEQ ID NO: 20512 - DNA, 25 bp, Probe Sequence
tggtggtagatgtgtgactcttatc

SEQ ID NO: 20513 - DNA, 25 bp, Probe Sequence
gatggtggtagatgtgtgactctta

SEQ ID NO: 20514 - DNA, 25 bp, Probe Sequence
gcagataaggatggagatggaagaa

SEQ ID NO: 20515 - DNA, 25 bp, Probe Sequence
ggtggtagatgtgtgactcttatca

SEQ ID NO: 20516 - DNA, 25 bp, Probe Sequence
aagagcatatcaatgtggtggagaa

SEQ ID NO: 20517 - DNA, 25 bp, Probe Sequence
cttcacagaggataccattgtcttc

SEQ ID NO: 20518 - DNA, 25 bp, Probe Sequence
gcttcacagaggataccattgtctt

SEQ ID NO: 20519 - DNA, 25 bp, Probe Sequence
ttcacagaggataccattgtcttcc

SEQ ID NO: 20520 - DNA, 25 bp, Probe Sequence
gataagtgcatgacggaacaatagg

SEQ ID NO: 20521 - DNA, 25 bp, Probe Sequence
cagggctgagttaaaggagaaattc

SEQ ID NO: 20522 - DNA, 25 bp, Probe Sequence
ataagtgcatgacggaacaatagga

SEQ ID NO: 20523 - DNA, 25 bp, Probe Sequence
cgataagtgcatgacggaacaatag

SEQ ID NO: 20524 - DNA, 25 bp, Probe Sequence
ggctgagttaaaggagaaattcacc

SEQ ID NO: 20525 - DNA, 25 bp, Probe Sequence
gggctgagttaaaggagaaattcac

SEQ ID NO: 20526 - DNA, 25 bp, Probe Sequence
agggctgagttaaaggagaaattca

SEQ ID NO: 20527 - DNA, 25 bp, Probe Sequence
ctgagttaaaggagaaattcaccgc

SEQ ID NO: 20528 - DNA, 25 bp, Probe Sequence
gctgagttaaaggagaaattcaccg

SEQ ID NO: 20529 - DNA, 25 bp, Probe Sequence
taagtgcatgacggaacaataggac

SEQ ID NO: 20530 - DNA, 25 bp, Probe Sequence
ccagggctgagttaaaggagaaatt

SEQ ID NO: 20531 - DNA, 25 bp, Probe Sequence
ggcttcacagaggataccattgtct

SEQ ID NO: 20532 - DNA, 25 bp, Probe Sequence
tgagttaaaggagaaattcaccgcc

SEQ ID NO: 20533 - DNA, 25 bp, Probe Sequence
gagttaaaggagaaattcaccgcct

SEQ ID NO: 20534 - DNA, 25 bp, Probe Sequence
ctggatgtctctgctctgttccttc

SEQ ID NO: 20535 - DNA, 25 bp, Probe Sequence
caggagaatggctactcatcacacg

SEQ ID NO: 20536 - DNA, 25 bp, Probe Sequence
aagtgcatgacggaacaataggact

SEQ ID NO: 20537 - DNA, 25 bp, Probe Sequence
cccagggctgagttaaaggagaaat

SEQ ID NO: 20538 - DNA, 25 bp, Probe Sequence
cacagaggataccattgtcttcctg

SEQ ID NO: 20539 - DNA, 25 bp, Probe Sequence
tcacagaggataccattgtcttcct

SEQ ID NO: 20540 - DNA, 25 bp, Probe Sequence
agtgcatgacggaacaataggactc

SEQ ID NO: 20541 - DNA, 25 bp, Probe Sequence
cactgactatgacctatctgacaag

SEQ ID NO: 20542 - DNA, 25 bp, Probe Sequence
actgactatgacctatctgacaaga

SEQ ID NO: 20543 - DNA, 25 bp, Probe Sequence
ctatgacctatctgacaagagcatc

SEQ ID NO: 20544 - DNA, 25 bp, Probe Sequence
ctgactatgacctatctgacaagag

SEQ ID NO: 20545 - DNA, 25 bp, Probe Sequence
ccactgactatgacctatctgacaa

SEQ ID NO: 20546 - DNA, 25 bp, Probe Sequence
actatgacctatctgacaagagcat

SEQ ID NO: 20547 - DNA, 25 bp, Probe Sequence
ctccactgactatgacctatctgac

SEQ ID NO: 20548 - DNA, 25 bp, Probe Sequence
tatgacctatctgacaagagcatca

SEQ ID NO: 20549 - DNA, 25 bp, Probe Sequence
gactatgacctatctgacaagagca

SEQ ID NO: 20550 - DNA, 25 bp, Probe Sequence
tgactatgacctatctgacaagagc

SEQ ID NO: 20551 - DNA, 25 bp, Probe Sequence
tccactgactatgacctatctgaca

SEQ ID NO: 20552 - DNA, 25 bp, Probe Sequence
atgacctatctgacaagagcatcaa

SEQ ID NO: 20553 - DNA, 25 bp, Probe Sequence
cctccactgactatgacctatctga

SEQ ID NO: 20554 - DNA, 25 bp, Probe Sequence
ttaagttcattgacaccacctccaa

SEQ ID NO: 20555 - DNA, 25 bp, Probe Sequence
tgacctatctgacaagagcatcaac

SEQ ID NO: 20556 - DNA, 25 bp, Probe Sequence
aatgcctccactgactatgacctat

SEQ ID NO: 20557 - DNA, 25 bp, Probe Sequence
aagaacaatgcctccactgactatg

SEQ ID NO: 20558 - DNA, 25 bp, Probe Sequence
caagaacaatgcctccactgactat

SEQ ID NO: 20559 - DNA, 25 bp, Probe Sequence
taagttcattgacaccacctccaag

SEQ ID NO: 20560 - DNA, 25 bp, Probe Sequence
attggcataaatctaagaagaaggc

SEQ ID NO: 20561 - DNA, 25 bp, Probe Sequence
atgcctccactgactatgacctatc

SEQ ID NO: 20562 - DNA, 25 bp, Probe Sequence
gacctatctgacaagagcatcaacc

SEQ ID NO: 20563 - DNA, 25 bp, Probe Sequence
gcactgagatcaacaagaagattta

SEQ ID NO: 20564 - DNA, 25 bp, Probe Sequence
tctggagaagattgaccttaagttc

SEQ ID NO: 20565 - DNA, 25 bp, Probe Sequence
agtgaattagcaggtcatcagacta

SEQ ID NO: 20566 - DNA, 25 bp, Probe Sequence
gtgaattagcaggtcatcagactag

SEQ ID NO: 20567 - DNA, 25 bp, Probe Sequence
cctattcgaccagatattgtgaact

SEQ ID NO: 20568 - DNA, 25 bp, Probe Sequence
tcctattcgaccagatattgtgaac

SEQ ID NO: 20569 - DNA, 25 bp, Probe Sequence
ctcctattcgaccagatattgtgaa

SEQ ID NO: 20570 - DNA, 25 bp, Probe Sequence
aagttgaaggctacaagaagaccaa

SEQ ID NO: 20571 - DNA, 25 bp, Probe Sequence
gtcagtgaattagcaggtcatcaga

SEQ ID NO: 20572 - DNA, 25 bp, Probe Sequence
tgattatacaggcagtgagaaacat

SEQ ID NO: 20573 - DNA, 25 bp, Probe Sequence
cctggaattactctgcttaatgtaa

SEQ ID NO: 20574 - DNA, 25 bp, Probe Sequence
ggtagttgaagataaagttgaaggc

SEQ ID NO: 20575 - DNA, 25 bp, Probe Sequence
gttgaagataaagttgaaggctaca

SEQ ID NO: 20576 - DNA, 25 bp, Probe Sequence
agttgaaggctacaagaagaccaag

SEQ ID NO: 20577 - DNA, 25 bp, Probe Sequence
ctattcgaccagatattgtgaactt

SEQ ID NO: 20578 - DNA, 25 bp, Probe Sequence
tgtcagtgaattagcaggtcatcag

SEQ ID NO: 20579 - DNA, 25 bp, Probe Sequence
agttgaagataaagttgaaggctac

SEQ ID NO: 20580 - DNA, 25 bp, Probe Sequence
gtagttgaagataaagttgaaggct

SEQ ID NO: 20581 - DNA, 25 bp, Probe Sequence
gaaggctacaagaagaccaaggaag

SEQ ID NO: 20582 - DNA, 25 bp, Probe Sequence
tggtagttgaagataaagttgaagg

SEQ ID NO: 20583 - DNA, 25 bp, Probe Sequence
cagtgaattagcaggtcatcagact

SEQ ID NO: 20584 - DNA, 25 bp, Probe Sequence
tcagtgaattagcaggtcatcagac

SEQ ID NO: 20585 - DNA, 25 bp, Probe Sequence
ccctggaattactctgcttaatgta

SEQ ID NO: 20586 - DNA, 25 bp, Probe Sequence
aaggctcctattcgaccagatattg

SEQ ID NO: 20587 - DNA, 25 bp, Probe Sequence
caaggctcctattcgaccagatatt

SEQ ID NO: 20588 - DNA, 25 bp, Probe Sequence
taaagttgaaggctacaagaagacc

SEQ ID NO: 20589 - DNA, 25 bp, Probe Sequence
gactggtgatgaatacaatgtggaa

SEQ ID NO: 20590 - DNA, 25 bp, Probe Sequence
gaggtgactggtgatgaatacaatg

SEQ ID NO: 20591 - DNA, 25 bp, Probe Sequence
aatacaggatgatagttcgtgtgac

SEQ ID NO: 20592 - DNA, 25 bp, Probe Sequence
tgactggtgatgaatacaatgtgga

SEQ ID NO: 20593 - DNA, 25 bp, Probe Sequence
gtgactggtgatgaatacaatgtgg

SEQ ID NO: 20594 - DNA, 25 bp, Probe Sequence
ggtgactggtgatgaatacaatgtg

SEQ ID NO: 20595 - DNA, 25 bp, Probe Sequence
aggtgactggtgatgaatacaatgt

SEQ ID NO: 20596 - DNA, 25 bp, Probe Sequence
atacaggatgatagttcgtgtgaca

SEQ ID NO: 20597 - DNA, 25 bp, Probe Sequence
ggaggtgactggtgatgaatacaat

SEQ ID NO: 20598 - DNA, 25 bp, Probe Sequence
tacaggatgatagttcgtgtgacaa

SEQ ID NO: 20599 - DNA, 25 bp, Probe Sequence
aaactgattattatgctcggaaacg

SEQ ID NO: 20600 - DNA, 25 bp, Probe Sequence
acacccaaatacaggatgatagttc

SEQ ID NO: 20601 - DNA, 25 bp, Probe Sequence
aatacaacacacccaaatacaggat

SEQ ID NO: 20602 - DNA, 25 bp, Probe Sequence
cacacccaaatacaggatgatagtt

SEQ ID NO: 20603 - DNA, 25 bp, Probe Sequence
aacacacccaaatacaggatgatag

SEQ ID NO: 20604 - DNA, 25 bp, Probe Sequence
aaatacaacacacccaaatacagga

SEQ ID NO: 20605 - DNA, 25 bp, Probe Sequence
caacacacccaaatacaggatgata

SEQ ID NO: 20606 - DNA, 25 bp, Probe Sequence
taaatacaacacacccaaatacagg

SEQ ID NO: 20607 - DNA, 25 bp, Probe Sequence
ctggtgatgaatacaatgtggaaag

SEQ ID NO: 20608 - DNA, 25 bp, Probe Sequence
actggtgatgaatacaatgtggaaa

SEQ ID NO: 20609 - DNA, 25 bp, Probe Sequence
atacaacacacccaaatacaggatg

SEQ ID NO: 20610 - DNA, 25 bp, Probe Sequence
gtgatgaatacaatgtggaaagcat

SEQ ID NO: 20611 - DNA, 25 bp, Probe Sequence
cccaaatacaggatgatagttcgtg

SEQ ID NO: 20612 - DNA, 25 bp, Probe Sequence
cacccaaatacaggatgatagttcg

SEQ ID NO: 20613 - DNA, 25 bp, Probe Sequence
cttattacttgtgactggacctctg

SEQ ID NO: 20614 - DNA, 25 bp, Probe Sequence
tattatcctactgaagatgtgcctc

SEQ ID NO: 20615 - DNA, 25 bp, Probe Sequence
atattatcctactgaagatgtgcct

SEQ ID NO: 20616 - DNA, 25 bp, Probe Sequence
ttattacttgtgactggacctctgg

SEQ ID NO: 20617 - DNA, 25 bp, Probe Sequence
gatattatcctactgaagatgtgcc

SEQ ID NO: 20618 - DNA, 25 bp, Probe Sequence
tagtggcttattacttgtgactgga

SEQ ID NO: 20619 - DNA, 25 bp, Probe Sequence
gcttattacttgtgactggacctct

SEQ ID NO: 20620 - DNA, 25 bp, Probe Sequence
ctagtggcttattacttgtgactgg

SEQ ID NO: 20621 - DNA, 25 bp, Probe Sequence
attatcctactgaagatgtgcctcg

SEQ ID NO: 20622 - DNA, 25 bp, Probe Sequence
gctagtggcttattacttgtgactg

SEQ ID NO: 20623 - DNA, 25 bp, Probe Sequence
agatattatcctactgaagatgtgc

SEQ ID NO: 20624 - DNA, 25 bp, Probe Sequence
cttactgatgcttacttcaagaaga

SEQ ID NO: 20625 - DNA, 25 bp, Probe Sequence
tgcctagatattatcctactgaaga

SEQ ID NO: 20626 - DNA, 25 bp, Probe Sequence
ttactgatgcttacttcaagaagaa

SEQ ID NO: 20627 - DNA, 25 bp, Probe Sequence
ggcttattacttgtgactggacctc

SEQ ID NO: 20628 - DNA, 25 bp, Probe Sequence
agagaaatatgagattacggagcag

SEQ ID NO: 20629 - DNA, 25 bp, Probe Sequence
aagagaaatatgagattacggagca

SEQ ID NO: 20630 - DNA, 25 bp, Probe Sequence
agtggcttattacttgtgactggac

SEQ ID NO: 20631 - DNA, 25 bp, Probe Sequence
tttgctctgacgaatggaatttatc

SEQ ID NO: 20632 - DNA, 25 bp, Probe Sequence
gtttgctctgacgaatggaatttat

SEQ ID NO: 20633 - DNA, 25 bp, Probe Sequence
ggctagtggcttattacttgtgact

SEQ ID NO: 20634 - DNA, 25 bp, Probe Sequence
ctggctagtggcttattacttgtga

SEQ ID NO: 20635 - DNA, 25 bp, Probe Sequence
aaagagaaatatgagattacggagc

SEQ ID NO: 20636 - DNA, 25 bp, Probe Sequence
tggctagtggcttattacttgtgac

SEQ ID NO: 20637 - DNA, 25 bp, Probe Sequence
atcagaatcagaggtatcaatggag

SEQ ID NO: 20638 - DNA, 25 bp, Probe Sequence
tgtagaagagaagaagaaggaggtt

SEQ ID NO: 20639 - DNA, 25 bp, Probe Sequence
cagaatcagaggtatcaatggagtg

SEQ ID NO: 20640 - DNA, 25 bp, Probe Sequence
tcagaatcagaggtatcaatggagt

SEQ ID NO: 20641 - DNA, 25 bp, Probe Sequence
tgtcatcagaatcagaggtatcaat

SEQ ID NO: 20642 - DNA, 25 bp, Probe Sequence
catcagaatcagaggtatcaatgga

SEQ ID NO: 20643 - DNA, 25 bp, Probe Sequence
tcatcagaatcagaggtatcaatgg

SEQ ID NO: 20644 - DNA, 25 bp, Probe Sequence
gtagaagagaagaagaaggaggttc

SEQ ID NO: 20645 - DNA, 25 bp, Probe Sequence
gaactaatctacaagcgtggttatg

SEQ ID NO: 20646 - DNA, 25 bp, Probe Sequence
tgaactaatctacaagcgtggttat

SEQ ID NO: 20647 - DNA, 25 bp, Probe Sequence
atgaactaatctacaagcgtggtta

SEQ ID NO: 20648 - DNA, 25 bp, Probe Sequence
gtgtagaagagaagaagaaggaggt

SEQ ID NO: 20649 - DNA, 25 bp, Probe Sequence
gtcatcagaatcagaggtatcaatg

SEQ ID NO: 20650 - DNA, 25 bp, Probe Sequence
aatgaactaatctacaagcgtggtt

SEQ ID NO: 20651 - DNA, 25 bp, Probe Sequence
ttgtcatcagaatcagaggtatcaa

SEQ ID NO: 20652 - DNA, 25 bp, Probe Sequence
aactaatctacaagcgtggttatgg

SEQ ID NO: 20653 - DNA, 25 bp, Probe Sequence
gaatcagaggtatcaatggagtgag

SEQ ID NO: 20654 - DNA, 25 bp, Probe Sequence
gaccagatcaacaggcttattagaa

SEQ ID NO: 20655 - DNA, 25 bp, Probe Sequence
agaatcagaggtatcaatggagtga

SEQ ID NO: 20656 - DNA, 25 bp, Probe Sequence
tgaggattgtagagccatatattgc

SEQ ID NO: 20657 - DNA, 25 bp, Probe Sequence
ccagatcaacaggcttattagaaga

SEQ ID NO: 20658 - DNA, 25 bp, Probe Sequence
ggtgtagaagagaagaagaaggagg

SEQ ID NO: 20659 - DNA, 25 bp, Probe Sequence
accagatcaacaggcttattagaag

SEQ ID NO: 20660 - DNA, 25 bp, Probe Sequence
cactatcacaaggaatataggcaga

SEQ ID NO: 20661 - DNA, 25 bp, Probe Sequence
caggaccaattacaatgacagatac

SEQ ID NO: 20662 - DNA, 25 bp, Probe Sequence
aggaccaattacaatgacagatacg

SEQ ID NO: 20663 - DNA, 25 bp, Probe Sequence
ggaccaattacaatgacagatacga

SEQ ID NO: 20664 - DNA, 25 bp, Probe Sequence
accaattacaatgacagatacgatg

SEQ ID NO: 20665 - DNA, 25 bp, Probe Sequence
ccaattacaatgacagatacgatga

SEQ ID NO: 20666 - DNA, 25 bp, Probe Sequence
gaccaattacaatgacagatacgat

SEQ ID NO: 20667 - DNA, 25 bp, Probe Sequence
atcaggaccaattacaatgacagat

SEQ ID NO: 20668 - DNA, 25 bp, Probe Sequence
tacaatgacagatacgatgagatcc

SEQ ID NO: 20669 - DNA, 25 bp, Probe Sequence
tcaggaccaattacaatgacagata

SEQ ID NO: 20670 - DNA, 25 bp, Probe Sequence
tatcaggaccaattacaatgacaga

SEQ ID NO: 20671 - DNA, 25 bp, Probe Sequence
ctatcaggaccaattacaatgacag

SEQ ID NO: 20672 - DNA, 25 bp, Probe Sequence
gctatcaggaccaattacaatgaca

SEQ ID NO: 20673 - DNA, 25 bp, Probe Sequence
caattacaatgacagatacgatgag

SEQ ID NO: 20674 - DNA, 25 bp, Probe Sequence
aattacaatgacagatacgatgaga

SEQ ID NO: 20675 - DNA, 25 bp, Probe Sequence
attacaatgacagatacgatgagat

SEQ ID NO: 20676 - DNA, 25 bp, Probe Sequence
ttacaatgacagatacgatgagatc

SEQ ID NO: 20677 - DNA, 25 bp, Probe Sequence
gaagctatcaggaccaattacaatg

SEQ ID NO: 20678 - DNA, 25 bp, Probe Sequence
ggaagctatcaggaccaattacaat

SEQ ID NO: 20679 - DNA, 25 bp, Probe Sequence
aagctatcaggaccaattacaatga

SEQ ID NO: 20680 - DNA, 25 bp, Probe Sequence
agctatcaggaccaattacaatgac

SEQ ID NO: 20681 - DNA, 25 bp, Probe Sequence
acaatgacagatacgatgagatccg

SEQ ID NO: 20682 - DNA, 25 bp, Probe Sequence
cattatcaagggaaaggcaagactg

SEQ ID NO: 20683 - DNA, 25 bp, Probe Sequence
tggaagctatcaggaccaattacaa

SEQ ID NO: 20684 - DNA, 25 bp, Probe Sequence
caatgacagatacgatgagatccgc

SEQ ID NO: 20685 - DNA, 25 bp, Probe Sequence
aagctagatacactgtcagatcctt

SEQ ID NO: 20686 - DNA, 25 bp, Probe Sequence
gcaaataaattcccgtttctatcca

SEQ ID NO: 20687 - DNA, 25 bp, Probe Sequence
tggcaaataaattcccgtttctatc

SEQ ID NO: 20688 - DNA, 25 bp, Probe Sequence
ctggcaaataaattcccgtttctat

SEQ ID NO: 20689 - DNA, 25 bp, Probe Sequence
atcatccttcctggcaaataaattc

SEQ ID NO: 20690 - DNA, 25 bp, Probe Sequence
ggcaaataaattcccgtttctatcc

SEQ ID NO: 20691 - DNA, 25 bp, Probe Sequence
agaaatcttggagaagggtctaaag

SEQ ID NO: 20692 - DNA, 25 bp, Probe Sequence
gaaatcttggagaagggtctaaagg

SEQ ID NO: 20693 - DNA, 25 bp, Probe Sequence
tcatccttcctggcaaataaattcc

SEQ ID NO: 20694 - DNA, 25 bp, Probe Sequence
gatcatccttcctggcaaataaatt

SEQ ID NO: 20695 - DNA, 25 bp, Probe Sequence
ctagatacactgtcagatcctttgg

SEQ ID NO: 20696 - DNA, 25 bp, Probe Sequence
cctggcaaataaattcccgtttcta

SEQ ID NO: 20697 - DNA, 25 bp, Probe Sequence
aaatcttggagaagggtctaaaggt

SEQ ID NO: 20698 - DNA, 25 bp, Probe Sequence
gaagaaatcttggagaagggtctaa

SEQ ID NO: 20699 - DNA, 25 bp, Probe Sequence
aagaaatcttggagaagggtctaaa

SEQ ID NO: 20700 - DNA, 25 bp, Probe Sequence
gctagatacactgtcagatcctttg

SEQ ID NO: 20701 - DNA, 25 bp, Probe Sequence
agaagaaatcttggagaagggtcta

SEQ ID NO: 20702 - DNA, 25 bp, Probe Sequence
ttctcagatactggaaactttggtt

SEQ ID NO: 20703 - DNA, 25 bp, Probe Sequence
acaacttctcagatactggaaactt

SEQ ID NO: 20704 - DNA, 25 bp, Probe Sequence
aacaacttctcagatactggaaact

SEQ ID NO: 20705 - DNA, 25 bp, Probe Sequence
cttctcagatactggaaactttggt

SEQ ID NO: 20706 - DNA, 25 bp, Probe Sequence
acttctcagatactggaaactttgg

SEQ ID NO: 20707 - DNA, 25 bp, Probe Sequence
taaaggtgcgggagtatgagttaag

SEQ ID NO: 20708 - DNA, 25 bp, Probe Sequence
ctaaaggtgcgggagtatgagttaa

SEQ ID NO: 20709 - DNA, 25 bp, Probe Sequence
accaagagacagaaagaaacagaaa

SEQ ID NO: 20710 - DNA, 25 bp, Probe Sequence
caccaagagacagaaagaaacagaa

SEQ ID NO: 20711 - DNA, 25 bp, Probe Sequence
ataaaggatcatttgacaactggtg

SEQ ID NO: 20712 - DNA, 25 bp, Probe Sequence
aacattaaacacagtgggaatatca

SEQ ID NO: 20713 - DNA, 25 bp, Probe Sequence
gaaccaccaagagacagaaagaaac

SEQ ID NO: 20714 - DNA, 25 bp, Probe Sequence
aataaaggatcatttgacaactggt

SEQ ID NO: 20715 - DNA, 25 bp, Probe Sequence
taaaggatcatttgacaactggtga

SEQ ID NO: 20716 - DNA, 25 bp, Probe Sequence
acattaaacacagtgggaatatcac

SEQ ID NO: 20717 - DNA, 25 bp, Probe Sequence
caataaaggatcatttgacaactgg

SEQ ID NO: 20718 - DNA, 25 bp, Probe Sequence
gagaactctctggaaccattaaaga

SEQ ID NO: 20719 - DNA, 25 bp, Probe Sequence
aaccaccaagagacagaaagaaaca

SEQ ID NO: 20720 - DNA, 25 bp, Probe Sequence
aaacattaaacacagtgggaatatc

SEQ ID NO: 20721 - DNA, 25 bp, Probe Sequence
ccaccaagagacagaaagaaacaga

SEQ ID NO: 20722 - DNA, 25 bp, Probe Sequence
accaccaagagacagaaagaaacag

SEQ ID NO: 20723 - DNA, 25 bp, Probe Sequence
ggaaccaccaagagacagaaagaaa

SEQ ID NO: 20724 - DNA, 25 bp, Probe Sequence
gatgagattgtcaacattgctcgac

SEQ ID NO: 20725 - DNA, 25 bp, Probe Sequence
tgatgagattgtcaacattgctcga

SEQ ID NO: 20726 - DNA, 25 bp, Probe Sequence
ttgatgagattgtcaacattgctcg

SEQ ID NO: 20727 - DNA, 25 bp, Probe Sequence
tctggaaccattaaagagatcctgg

SEQ ID NO: 20728 - DNA, 25 bp, Probe Sequence
ccaagagacagaaagaaacagaaaa

SEQ ID NO: 20729 - DNA, 25 bp, Probe Sequence
caaggaaccaccaagagacagaaag

SEQ ID NO: 20730 - DNA, 25 bp, Probe Sequence
ctcaaggaaccaccaagagacagaa

SEQ ID NO: 20731 - DNA, 25 bp, Probe Sequence
aggaaccaccaagagacagaaagaa

SEQ ID NO: 20732 - DNA, 25 bp, Probe Sequence
aaggaaccaccaagagacagaaaga

SEQ ID NO: 20733 - DNA, 25 bp, Probe Sequence
atagtgaacaataaaggcgagatga

SEQ ID NO: 20734 - DNA, 25 bp, Probe Sequence
tagtgaacaataaaggcgagatgaa

SEQ ID NO: 20735 - DNA, 25 bp, Probe Sequence
aacctgtatatcatctccgtgaagg

SEQ ID NO: 20736 - DNA, 25 bp, Probe Sequence
agcattgcatgattctccagtatat

SEQ ID NO: 20737 - DNA, 25 bp, Probe Sequence
gtgaacaataaaggcgagatgaaag

SEQ ID NO: 20738 - DNA, 25 bp, Probe Sequence
gcattgcatgattctccagtatatt

SEQ ID NO: 20739 - DNA, 25 bp, Probe Sequence
catagtgaacaataaaggcgagatg

SEQ ID NO: 20740 - DNA, 25 bp, Probe Sequence
agtgaacaataaaggcgagatgaaa

SEQ ID NO: 20741 - DNA, 25 bp, Probe Sequence
cagcattgcatgattctccagtata

SEQ ID NO: 20742 - DNA, 25 bp, Probe Sequence
atgcaggagtcatagtgaacaataa

SEQ ID NO: 20743 - DNA, 25 bp, Probe Sequence
aatgcaggagtcatagtgaacaata

SEQ ID NO: 20744 - DNA, 25 bp, Probe Sequence
taatgcaggagtcatagtgaacaat

SEQ ID NO: 20745 - DNA, 25 bp, Probe Sequence
ataatgcaggagtcatagtgaacaa

SEQ ID NO: 20746 - DNA, 25 bp, Probe Sequence
agataatgcaggagtcatagtgaac

SEQ ID NO: 20747 - DNA, 25 bp, Probe Sequence
gaagataatgcaggagtcatagtga

SEQ ID NO: 20748 - DNA, 25 bp, Probe Sequence
tgaagataatgcaggagtcatagtg

SEQ ID NO: 20749 - DNA, 25 bp, Probe Sequence
gataatgcaggagtcatagtgaaca

SEQ ID NO: 20750 - DNA, 25 bp, Probe Sequence
aagataatgcaggagtcatagtgaa

SEQ ID NO: 20751 - DNA, 25 bp, Probe Sequence
ttgaagataatgcaggagtcatagt

SEQ ID NO: 20752 - DNA, 25 bp, Probe Sequence
tcatagtgaacaataaaggcgagat

SEQ ID NO: 20753 - DNA, 25 bp, Probe Sequence
gcaggagtcatagtgaacaataaag

SEQ ID NO: 20754 - DNA, 25 bp, Probe Sequence
aaacctgtatatcatctccgtgaag

SEQ ID NO: 20755 - DNA, 25 bp, Probe Sequence
gaacaataaaggcgagatgaaaggt

SEQ ID NO: 20756 - DNA, 25 bp, Probe Sequence
tgaacaataaaggcgagatgaaagg

SEQ ID NO: 20757 - DNA, 25 bp, Probe Sequence
gcttctggtactttgtatctcagtt

SEQ ID NO: 20758 - DNA, 25 bp, Probe Sequence
tcagttaaagaagatgaagaagtct

SEQ ID NO: 20759 - DNA, 25 bp, Probe Sequence
tctcagttaaagaagatgaagaagt

SEQ ID NO: 20760 - DNA, 25 bp, Probe Sequence
ctcagttaaagaagatgaagaagtc

SEQ ID NO: 20761 - DNA, 25 bp, Probe Sequence
gttccacgactccaagatcaagttc

SEQ ID NO: 20762 - DNA, 25 bp, Probe Sequence
cttctggtactttgtatctcagtta

SEQ ID NO: 20763 - DNA, 25 bp, Probe Sequence
agttccacgactccaagatcaagtt

SEQ ID NO: 20764 - DNA, 25 bp, Probe Sequence
cgcttctggtactttgtatctcagt

SEQ ID NO: 20765 - DNA, 25 bp, Probe Sequence
tctggtactttgtatctcagttaaa

SEQ ID NO: 20766 - DNA, 25 bp, Probe Sequence
ttctggtactttgtatctcagttaa

SEQ ID NO: 20767 - DNA, 25 bp, Probe Sequence
ccgcttctggtactttgtatctcag

SEQ ID NO: 20768 - DNA, 25 bp, Probe Sequence
ttccacgactccaagatcaagttcc

SEQ ID NO: 20769 - DNA, 25 bp, Probe Sequence
cagttccacgactccaagatcaagt

SEQ ID NO: 20770 - DNA, 25 bp, Probe Sequence
tggtactttgtatctcagttaaaga

SEQ ID NO: 20771 - DNA, 25 bp, Probe Sequence
ctggtactttgtatctcagttaaag

SEQ ID NO: 20772 - DNA, 25 bp, Probe Sequence
aagtcttcaggggagattgtctact

SEQ ID NO: 20773 - DNA, 25 bp, Probe Sequence
cccgcttctggtactttgtatctca

SEQ ID NO: 20774 - DNA, 25 bp, Probe Sequence
cagttaaagaagatgaagaagtctt

SEQ ID NO: 20775 - DNA, 25 bp, Probe Sequence
gaagtcttcaggggagattgtctac

SEQ ID NO: 20776 - DNA, 25 bp, Probe Sequence
agaagtcttcaggggagattgtcta

SEQ ID NO: 20777 - DNA, 25 bp, Probe Sequence
atctcagttaaagaagatgaagaag

SEQ ID NO: 20778 - DNA, 25 bp, Probe Sequence
tgtatctcagttaaagaagatgaag

SEQ ID NO: 20779 - DNA, 25 bp, Probe Sequence
ggtactttgtatctcagttaaagaa

SEQ ID NO: 20780 - DNA, 25 bp, Probe Sequence
ctacgagagtacaaggtagtgggtc

SEQ ID NO: 20781 - DNA, 25 bp, Probe Sequence
aagaaggaggagatcatcaagactt

SEQ ID NO: 20782 - DNA, 25 bp, Probe Sequence
caagaaggaggagatcatcaagact

SEQ ID NO: 20783 - DNA, 25 bp, Probe Sequence
caaggaggaagagaccaagaaataa

SEQ ID NO: 20784 - DNA, 25 bp, Probe Sequence
aaggaggaagagaccaagaaataaa

SEQ ID NO: 20785 - DNA, 25 bp, Probe Sequence
ccaagaaggaggagatcatcaagac

SEQ ID NO: 20786 - DNA, 25 bp, Probe Sequence
cacatggatgaggagaatgaggatt

SEQ ID NO: 20787 - DNA, 25 bp, Probe Sequence
ctcagaagataccgtgaatctaaga

SEQ ID NO: 20788 - DNA, 25 bp, Probe Sequence
gctcagaagataccgtgaatctaag

SEQ ID NO: 20789 - DNA, 25 bp, Probe Sequence
agataccgtgaatctaagaagatcg

SEQ ID NO: 20790 - DNA, 25 bp, Probe Sequence
atcatcaagactttatccaaggagg

SEQ ID NO: 20791 - DNA, 25 bp, Probe Sequence
tcagaagataccgtgaatctaagaa

SEQ ID NO: 20792 - DNA, 25 bp, Probe Sequence
agaagataccgtgaatctaagaaga

SEQ ID NO: 20793 - DNA, 25 bp, Probe Sequence
cagaagataccgtgaatctaagaag

SEQ ID NO: 20794 - DNA, 25 bp, Probe Sequence
tgctcagaagataccgtgaatctaa

SEQ ID NO: 20795 - DNA, 25 bp, Probe Sequence
ccaaggaggaagagaccaagaaata

SEQ ID NO: 20796 - DNA, 25 bp, Probe Sequence
aggaggagatcatcaagactttatc

SEQ ID NO: 20797 - DNA, 25 bp, Probe Sequence
tatccaaggaggaagagaccaagaa

SEQ ID NO: 20798 - DNA, 25 bp, Probe Sequence
ttatccaaggaggaagagaccaaga

SEQ ID NO: 20799 - DNA, 25 bp, Probe Sequence
gaaggaggagatcatcaagacttta

SEQ ID NO: 20800 - DNA, 25 bp, Probe Sequence
ctctgtgattacatagatcagccat

SEQ ID NO: 20801 - DNA, 25 bp, Probe Sequence
tctgtgattacatagatcagccatt

SEQ ID NO: 20802 - DNA, 25 bp, Probe Sequence
agatcatcaagactttatccaagga

SEQ ID NO: 20803 - DNA, 25 bp, Probe Sequence
ctgctcagaagataccgtgaatcta

SEQ ID NO: 20804 - DNA, 25 bp, Probe Sequence
agaaggaggagatcatcaagacttt

SEQ ID NO: 20805 - DNA, 25 bp, Probe Sequence
attgagcacattaagcactctaaga

SEQ ID NO: 20806 - DNA, 25 bp, Probe Sequence
gtattgagcacattaagcactctaa

SEQ ID NO: 20807 - DNA, 25 bp, Probe Sequence
cgtattgagcacattaagcactcta

SEQ ID NO: 20808 - DNA, 25 bp, Probe Sequence
tattgagcacattaagcactctaag

SEQ ID NO: 20809 - DNA, 25 bp, Probe Sequence
ttgagcacattaagcactctaagag

SEQ ID NO: 20810 - DNA, 25 bp, Probe Sequence
attaagcactctaagagccgagata

SEQ ID NO: 20811 - DNA, 25 bp, Probe Sequence
ttaagcactctaagagccgagatag

SEQ ID NO: 20812 - DNA, 25 bp, Probe Sequence
aagaaagaagccaaagagaaaggta

SEQ ID NO: 20813 - DNA, 25 bp, Probe Sequence
aaagaaagaagccaaagagaaaggt

SEQ ID NO: 20814 - DNA, 25 bp, Probe Sequence
atattgtagacatcaagggaatggg

SEQ ID NO: 20815 - DNA, 25 bp, Probe Sequence
cattaagcactctaagagccgagat

SEQ ID NO: 20816 - DNA, 25 bp, Probe Sequence
gatattgtagacatcaagggaatgg

SEQ ID NO: 20817 - DNA, 25 bp, Probe Sequence
agaaagaagccaaagagaaaggtac

SEQ ID NO: 20818 - DNA, 25 bp, Probe Sequence
attgtagacatcaagggaatgggta

SEQ ID NO: 20819 - DNA, 25 bp, Probe Sequence
tattgtagacatcaagggaatgggt

SEQ ID NO: 20820 - DNA, 25 bp, Probe Sequence
aaatgacgaacacaaagggaaagag

SEQ ID NO: 20821 - DNA, 25 bp, Probe Sequence
aaataaaggacctctgggctacaaa

SEQ ID NO: 20822 - DNA, 25 bp, Probe Sequence
tgagcacattaagcactctaagagc

SEQ ID NO: 20823 - DNA, 25 bp, Probe Sequence
atcaagggaatgggtactgttcaaa

SEQ ID NO: 20824 - DNA, 25 bp, Probe Sequence
cacattaagcactctaagagccgag

SEQ ID NO: 20825 - DNA, 25 bp, Probe Sequence
ttgtagacatcaagggaatgggtac

SEQ ID NO: 20826 - DNA, 25 bp, Probe Sequence
gcgtattgagcacattaagcactct

SEQ ID NO: 20827 - DNA, 25 bp, Probe Sequence
acattaagcactctaagagccgaga

SEQ ID NO: 20828 - DNA, 25 bp, Probe Sequence
gtagacatcaagggaatgggtactg

SEQ ID NO: 20829 - DNA, 25 bp, Probe Sequence
tcgccactcatttatttgtaacttg

SEQ ID NO: 20830 - DNA, 25 bp, Probe Sequence
atggtggtttatccttgtatctctg

SEQ ID NO: 20831 - DNA, 25 bp, Probe Sequence
ttcgccactcatttatttgtaactt

SEQ ID NO: 20832 - DNA, 25 bp, Probe Sequence
aatggtggtttatccttgtatctct

SEQ ID NO: 20833 - DNA, 25 bp, Probe Sequence
gttcgccactcatttatttgtaact

SEQ ID NO: 20834 - DNA, 25 bp, Probe Sequence
aaatggtggtttatccttgtatctc

SEQ ID NO: 20835 - DNA, 25 bp, Probe Sequence
aaattggaaatcatagtcaaagggc

SEQ ID NO: 20836 - DNA, 25 bp, Probe Sequence
cgccactcatttatttgtaacttga

SEQ ID NO: 20837 - DNA, 25 bp, Probe Sequence
ggttcgccactcatttatttgtaac

SEQ ID NO: 20838 - DNA, 25 bp, Probe Sequence
attggaaatcatagtcaaagggctt

SEQ ID NO: 20839 - DNA, 25 bp, Probe Sequence
aattggaaatcatagtcaaagggct

SEQ ID NO: 20840 - DNA, 25 bp, Probe Sequence
ttggaaatcatagtcaaagggcttc

SEQ ID NO: 20841 - DNA, 25 bp, Probe Sequence
gccactcatttatttgtaacttgac

SEQ ID NO: 20842 - DNA, 25 bp, Probe Sequence
aagaagcaagttctgaagttcactc

SEQ ID NO: 20843 - DNA, 25 bp, Probe Sequence
tggtggtttatccttgtatctctgc

SEQ ID NO: 20844 - DNA, 25 bp, Probe Sequence
aagaaaggatcaaagtgaacggaaa

SEQ ID NO: 20845 - DNA, 25 bp, Probe Sequence
caagaaaggatcaaagtgaacggaa

SEQ ID NO: 20846 - DNA, 25 bp, Probe Sequence
tggttcgccactcatttatttgtaa

SEQ ID NO: 20847 - DNA, 25 bp, Probe Sequence
ttggttcgccactcatttatttgta

SEQ ID NO: 20848 - DNA, 25 bp, Probe Sequence
ccactcatttatttgtaacttgact

SEQ ID NO: 20849 - DNA, 25 bp, Probe Sequence
aaagaagcaagttctgaagttcact

SEQ ID NO: 20850 - DNA, 25 bp, Probe Sequence
cttggttcgccactcatttatttgt

SEQ ID NO: 20851 - DNA, 25 bp, Probe Sequence
ggtggtttatccttgtatctctgca

SEQ ID NO: 20852 - DNA, 25 bp, Probe Sequence
gtggattgaacagaaaattggaaat

SEQ ID NO: 20853 - DNA, 25 bp, Probe Sequence
agaagatagaagacaacaacacact

SEQ ID NO: 20854 - DNA, 25 bp, Probe Sequence
aagaagatagaagacaacaacacac

SEQ ID NO: 20855 - DNA, 25 bp, Probe Sequence
gaagaagatagaagacaacaacaca

SEQ ID NO: 20856 - DNA, 25 bp, Probe Sequence
tgaagaagatagaagacaacaacac

SEQ ID NO: 20857 - DNA, 25 bp, Probe Sequence
gaagatagaagacaacaacacactt

SEQ ID NO: 20858 - DNA, 25 bp, Probe Sequence
aagatagaagacaacaacacacttg

SEQ ID NO: 20859 - DNA, 25 bp, Probe Sequence
atgaagaagatagaagacaacaaca

SEQ ID NO: 20860 - DNA, 25 bp, Probe Sequence
ctgccatgaagaagatagaagacaa

SEQ ID NO: 20861 - DNA, 25 bp, Probe Sequence
gccatgaagaagatagaagacaaca

SEQ ID NO: 20862 - DNA, 25 bp, Probe Sequence
tgccatgaagaagatagaagacaac

SEQ ID NO: 20863 - DNA, 25 bp, Probe Sequence
ccatgaagaagatagaagacaacaa

SEQ ID NO: 20864 - DNA, 25 bp, Probe Sequence
gagtctgccatgaagaagatagaag

SEQ ID NO: 20865 - DNA, 25 bp, Probe Sequence
cacttgtgttcattgtggatgttaa

SEQ ID NO: 20866 - DNA, 25 bp, Probe Sequence
agtctgccatgaagaagatagaaga

SEQ ID NO: 20867 - DNA, 25 bp, Probe Sequence
tctgccatgaagaagatagaagaca

SEQ ID NO: 20868 - DNA, 25 bp, Probe Sequence
tgagtctgccatgaagaagatagaa

SEQ ID NO: 20869 - DNA, 25 bp, Probe Sequence
ctgagtctgccatgaagaagataga

SEQ ID NO: 20870 - DNA, 25 bp, Probe Sequence
catgaagaagatagaagacaacaac

SEQ ID NO: 20871 - DNA, 25 bp, Probe Sequence
actgagtctgccatgaagaagatag

SEQ ID NO: 20872 - DNA, 25 bp, Probe Sequence
gaagaagctgtatgacattgatgtg

SEQ ID NO: 20873 - DNA, 25 bp, Probe Sequence
gtgaagaagctgtatgacattgatg

SEQ ID NO: 20874 - DNA, 25 bp, Probe Sequence
cactgagtctgccatgaagaagata

SEQ ID NO: 20875 - DNA, 25 bp, Probe Sequence
tgaagaagctgtatgacattgatgt

SEQ ID NO: 20876 - DNA, 25 bp, Probe Sequence
tgtgaagaagctgtatgacattgat

SEQ ID NO: 20877 - DNA, 25 bp, Probe Sequence
tcattgagcatatccaagtgaacaa

SEQ ID NO: 20878 - DNA, 25 bp, Probe Sequence
agattctctggtcattgagcatatc

SEQ ID NO: 20879 - DNA, 25 bp, Probe Sequence
gtagattctctggtcattgagcata

SEQ ID NO: 20880 - DNA, 25 bp, Probe Sequence
agatgtagattctctggtcattgag

SEQ ID NO: 20881 - DNA, 25 bp, Probe Sequence
tagattctctggtcattgagcatat

SEQ ID NO: 20882 - DNA, 25 bp, Probe Sequence
tagatgtagattctctggtcattga

SEQ ID NO: 20883 - DNA, 25 bp, Probe Sequence
gatgtagattctctggtcattgagc

SEQ ID NO: 20884 - DNA, 25 bp, Probe Sequence
gtcattgagcatatccaagtgaaca

SEQ ID NO: 20885 - DNA, 25 bp, Probe Sequence
gattctctggtcattgagcatatcc

SEQ ID NO: 20886 - DNA, 25 bp, Probe Sequence
tgtagattctctggtcattgagcat

SEQ ID NO: 20887 - DNA, 25 bp, Probe Sequence
atgtagattctctggtcattgagca

SEQ ID NO: 20888 - DNA, 25 bp, Probe Sequence
ttagatgtagattctctggtcattg

SEQ ID NO: 20889 - DNA, 25 bp, Probe Sequence
ggtcattgagcatatccaagtgaac

SEQ ID NO: 20890 - DNA, 25 bp, Probe Sequence
gttccaatcttcgtgttcactttaa

SEQ ID NO: 20891 - DNA, 25 bp, Probe Sequence
attctctggtcattgagcatatcca

SEQ ID NO: 20892 - DNA, 25 bp, Probe Sequence
gggtttagatgtagattctctggtc

SEQ ID NO: 20893 - DNA, 25 bp, Probe Sequence
ggtttagatgtagattctctggtca

SEQ ID NO: 20894 - DNA, 25 bp, Probe Sequence
agggtttagatgtagattctctggt

SEQ ID NO: 20895 - DNA, 25 bp, Probe Sequence
aagggtttagatgtagattctctgg

SEQ ID NO: 20896 - DNA, 25 bp, Probe Sequence
attgagcatatccaagtgaacaaag

SEQ ID NO: 20897 - DNA, 25 bp, Probe Sequence
cattgagcatatccaagtgaacaaa

SEQ ID NO: 20898 - DNA, 25 bp, Probe Sequence
ttccaatcttcgtgttcactttaag

SEQ ID NO: 20899 - DNA, 25 bp, Probe Sequence
ttctctggtcattgagcatatccaa

SEQ ID NO: 20900 - DNA, 25 bp, Probe Sequence
agtgctgtagttactggaagataaa

SEQ ID NO: 20901 - DNA, 25 bp, Probe Sequence
aaagattgtgaagcctgtgaaagtt

SEQ ID NO: 20902 - DNA, 25 bp, Probe Sequence
aagattgtgaagcctgtgaaagttt

SEQ ID NO: 20903 - DNA, 25 bp, Probe Sequence
aacgctaaactggcagattagattt

SEQ ID NO: 20904 - DNA, 25 bp, Probe Sequence
aaacgctaaactggcagattagatt

SEQ ID NO: 20905 - DNA, 25 bp, Probe Sequence
agattgtgaagcctgtgaaagtttc

SEQ ID NO: 20906 - DNA, 25 bp, Probe Sequence
gaagttagaaaggctcaacgagaac

SEQ ID NO: 20907 - DNA, 25 bp, Probe Sequence
gaaacctgaagttagaaaggctcaa

SEQ ID NO: 20908 - DNA, 25 bp, Probe Sequence
aaacctgaagttagaaaggctcaac

SEQ ID NO: 20909 - DNA, 25 bp, Probe Sequence
gttagaaaggctcaacgagaacaag

SEQ ID NO: 20910 - DNA, 25 bp, Probe Sequence
tgaagttagaaaggctcaacgagaa

SEQ ID NO: 20911 - DNA, 25 bp, Probe Sequence
cagaaacctgaagttagaaaggctc

SEQ ID NO: 20912 - DNA, 25 bp, Probe Sequence
agaaacctgaagttagaaaggctca

SEQ ID NO: 20913 - DNA, 25 bp, Probe Sequence
aagggacagtcggaagaaattcaaa

SEQ ID NO: 20914 - DNA, 25 bp, Probe Sequence
aaagggacagtcggaagaaattcaa

SEQ ID NO: 20915 - DNA, 25 bp, Probe Sequence
agttagaaaggctcaacgagaacaa

SEQ ID NO: 20916 - DNA, 25 bp, Probe Sequence
aagttagaaaggctcaacgagaaca

SEQ ID NO: 20917 - DNA, 25 bp, Probe Sequence
ctgaagttagaaaggctcaacgaga

SEQ ID NO: 20918 - DNA, 25 bp, Probe Sequence
tttccagtttcttaatgcgaaatgc

SEQ ID NO: 20919 - DNA, 25 bp, Probe Sequence
ctggtgcatctcttgctgatataat

SEQ ID NO: 20920 - DNA, 25 bp, Probe Sequence
tggtgcatctcttgctgatataatg

SEQ ID NO: 20921 - DNA, 25 bp, Probe Sequence
tactggtgcatctcttgctgatata

SEQ ID NO: 20922 - DNA, 25 bp, Probe Sequence
ggtgcatctcttgctgatataatgg

SEQ ID NO: 20923 - DNA, 25 bp, Probe Sequence
cagataaactggactgtcctctaca

SEQ ID NO: 20924 - DNA, 25 bp, Probe Sequence
acagtcggaagaaattcaaaagaaa

SEQ ID NO: 20925 - DNA, 25 bp, Probe Sequence
aaggatgatgaagttcaggttgtac

SEQ ID NO: 20926 - DNA, 25 bp, Probe Sequence
tataaaggtcagcaaattggcaaag

SEQ ID NO: 20927 - DNA, 25 bp, Probe Sequence
ctataaaggtcagcaaattggcaaa

SEQ ID NO: 20928 - DNA, 25 bp, Probe Sequence
caaggaagaaaccattgagaagatg

SEQ ID NO: 20929 - DNA, 25 bp, Probe Sequence
tacaaggaagaaaccattgagaaga

SEQ ID NO: 20930 - DNA, 25 bp, Probe Sequence
gcaaatacaaggaagaaaccattga

SEQ ID NO: 20931 - DNA, 25 bp, Probe Sequence
acaaggaagaaaccattgagaagat

SEQ ID NO: 20932 - DNA, 25 bp, Probe Sequence
actataaaggtcagcaaattggcaa

SEQ ID NO: 20933 - DNA, 25 bp, Probe Sequence
taaaggtcagcaaattggcaaagta

SEQ ID NO: 20934 - DNA, 25 bp, Probe Sequence
atacaaggaagaaaccattgagaag

SEQ ID NO: 20935 - DNA, 25 bp, Probe Sequence
aggatgatgaagttcaggttgtacg

SEQ ID NO: 20936 - DNA, 25 bp, Probe Sequence
ggcaaatacaaggaagaaaccattg

SEQ ID NO: 20937 - DNA, 25 bp, Probe Sequence
gggcaaatacaaggaagaaaccatt

SEQ ID NO: 20938 - DNA, 25 bp, Probe Sequence
aaagggcaaatacaaggaagaaacc

SEQ ID NO: 20939 - DNA, 25 bp, Probe Sequence
aatacaaggaagaaaccattgagaa

SEQ ID NO: 20940 - DNA, 25 bp, Probe Sequence
aaatacaaggaagaaaccattgaga

SEQ ID NO: 20941 - DNA, 25 bp, Probe Sequence
caaatacaaggaagaaaccattgag

SEQ ID NO: 20942 - DNA, 25 bp, Probe Sequence
aatgaagtttaatccctttgtgact

SEQ ID NO: 20943 - DNA, 25 bp, Probe Sequence
cactataaaggtcagcaaattggca

SEQ ID NO: 20944 - DNA, 25 bp, Probe Sequence
acactataaaggtcagcaaattggc

SEQ ID NO: 20945 - DNA, 25 bp, Probe Sequence
gacactataaaggtcagcaaattgg

SEQ ID NO: 20946 - DNA, 25 bp, Probe Sequence
ggacactataaaggtcagcaaattg

SEQ ID NO: 20947 - DNA, 25 bp, Probe Sequence
ataaaggtcagcaaattggcaaagt

SEQ ID NO: 20948 - DNA, 25 bp, Probe Sequence
aaaggatgatgaagttcaggttgta

SEQ ID NO: 20949 - DNA, 25 bp, Probe Sequence
cgtcaataaggatgtcttcagagat

SEQ ID NO: 20950 - DNA, 25 bp, Probe Sequence
aactgtcgtcaataaggatgtcttc

SEQ ID NO: 20951 - DNA, 25 bp, Probe Sequence
aagagagatacaagacaggcaagaa

SEQ ID NO: 20952 - DNA, 25 bp, Probe Sequence
gtcgtcaataaggatgtcttcagag

SEQ ID NO: 20953 - DNA, 25 bp, Probe Sequence
tcgtcaataaggatgtcttcagaga

SEQ ID NO: 20954 - DNA, 25 bp, Probe Sequence
gagatacaagacaggcaagaacaag

SEQ ID NO: 20955 - DNA, 25 bp, Probe Sequence
tgtcgtcaataaggatgtcttcaga

SEQ ID NO: 20956 - DNA, 25 bp, Probe Sequence
gaagagagatacaagacaggcaaga

SEQ ID NO: 20957 - DNA, 25 bp, Probe Sequence
agagatacaagacaggcaagaacaa

SEQ ID NO: 20958 - DNA, 25 bp, Probe Sequence
actgtcgtcaataaggatgtcttca

SEQ ID NO: 20959 - DNA, 25 bp, Probe Sequence
agagagatacaagacaggcaagaac

SEQ ID NO: 20960 - DNA, 25 bp, Probe Sequence
tgaagagagatacaagacaggcaag

SEQ ID NO: 20961 - DNA, 25 bp, Probe Sequence
ttgaagagagatacaagacaggcaa

SEQ ID NO: 20962 - DNA, 25 bp, Probe Sequence
gatacaagacaggcaagaacaagtg

SEQ ID NO: 20963 - DNA, 25 bp, Probe Sequence
agatacaagacaggcaagaacaagt

SEQ ID NO: 20964 - DNA, 25 bp, Probe Sequence
gtcaataaggatgtcttcagagatc

SEQ ID NO: 20965 - DNA, 25 bp, Probe Sequence
gagagatacaagacaggcaagaaca

SEQ ID NO: 20966 - DNA, 25 bp, Probe Sequence
ctgtcgtcaataaggatgtcttcag

SEQ ID NO: 20967 - DNA, 25 bp, Probe Sequence
ataactacaatcacctaatgcccac

SEQ ID NO: 20968 - DNA, 25 bp, Probe Sequence
tataactacaatcacctaatgccca

SEQ ID NO: 20969 - DNA, 25 bp, Probe Sequence
aaactgtcgtcaataaggatgtctt

SEQ ID NO: 20970 - DNA, 25 bp, Probe Sequence
gtataactacaatcacctaatgccc

SEQ ID NO: 20971 - DNA, 25 bp, Probe Sequence
agtttgaagagagatacaagacagg

SEQ ID NO: 20972 - DNA, 25 bp, Probe Sequence
atcgtgaagaacattgatgatggca

SEQ ID NO: 20973 - DNA, 25 bp, Probe Sequence
ctgaggagaagattaagagtgttgg

SEQ ID NO: 20974 - DNA, 25 bp, Probe Sequence
gctgaggagaagattaagagtgttg

SEQ ID NO: 20975 - DNA, 25 bp, Probe Sequence
gaagagctgaggagaagattaagag

SEQ ID NO: 20976 - DNA, 25 bp, Probe Sequence
agaagagctgaggagaagattaaga

SEQ ID NO: 20977 - DNA, 25 bp, Probe Sequence
aagagctgaggagaagattaagagt

SEQ ID NO: 20978 - DNA, 25 bp, Probe Sequence
agctgaggagaagattaagagtgtt

SEQ ID NO: 20979 - DNA, 25 bp, Probe Sequence
agagctgaggagaagattaagagtg

SEQ ID NO: 20980 - DNA, 25 bp, Probe Sequence
gagctgaggagaagattaagagtgt

SEQ ID NO: 20981 - DNA, 25 bp, Probe Sequence
attaccacttaaagaggaaccagag

SEQ ID NO: 20982 - DNA, 25 bp, Probe Sequence
cattaccacttaaagaggaaccaga

SEQ ID NO: 20983 - DNA, 25 bp, Probe Sequence
gaagcattaccacttaaagaggaac

SEQ ID NO: 20984 - DNA, 25 bp, Probe Sequence
tgaagcattaccacttaaagaggaa

SEQ ID NO: 20985 - DNA, 25 bp, Probe Sequence
atgaagcattaccacttaaagagga

SEQ ID NO: 20986 - DNA, 25 bp, Probe Sequence
ttgggaaagttggtatgaagcatta

SEQ ID NO: 20987 - DNA, 25 bp, Probe Sequence
cagaagagctgaggagaagattaag

SEQ ID NO: 20988 - DNA, 25 bp, Probe Sequence
aagcattaccacttaaagaggaacc

SEQ ID NO: 20989 - DNA, 25 bp, Probe Sequence
tggagggagtttcattaaatgctaa

SEQ ID NO: 20990 - DNA, 25 bp, Probe Sequence
atggagggagtttcattaaatgcta

SEQ ID NO: 20991 - DNA, 25 bp, Probe Sequence
tgggaaagttggtatgaagcattac

SEQ ID NO: 20992 - DNA, 25 bp, Probe Sequence
tttgggaaagttggtatgaagcatt

SEQ ID NO: 20993 - DNA, 25 bp, Probe Sequence
ggagggagtttcattaaatgctaac

SEQ ID NO: 20994 - DNA, 25 bp, Probe Sequence
ctacaaagttctgggaaagggaaag

SEQ ID NO: 20995 - DNA, 25 bp, Probe Sequence
gcattaccacttaaagaggaaccag

SEQ ID NO: 20996 - DNA, 25 bp, Probe Sequence
tatgaagcattaccacttaaagagg

SEQ ID NO: 20997 - DNA, 25 bp, Probe Sequence
atcaagaggaataagcagacctaca

SEQ ID NO: 20998 - DNA, 25 bp, Probe Sequence
gatcaagaggaataagcagacctac

SEQ ID NO: 20999 - DNA, 25 bp, Probe Sequence
tcaagaggaataagcagacctacag

SEQ ID NO: 21000 - DNA, 25 bp, Probe Sequence
gaataagcagacctacagcactgag

SEQ ID NO: 21001 - DNA, 25 bp, Probe Sequence
caagaggaataagcagacctacagc

SEQ ID NO: 21002 - DNA, 25 bp, Probe Sequence
gacacatgatccgcaagaacaagta

SEQ ID NO: 21003 - DNA, 25 bp, Probe Sequence
aagaggaataagcagacctacagca

SEQ ID NO: 21004 - DNA, 25 bp, Probe Sequence
acacatgatccgcaagaacaagtac

SEQ ID NO: 21005 - DNA, 25 bp, Probe Sequence
gaggaataagcagacctacagcact

SEQ ID NO: 21006 - DNA, 25 bp, Probe Sequence
agaggaataagcagacctacagcac

SEQ ID NO: 21007 - DNA, 25 bp, Probe Sequence
tgatcaagaggaataagcagaccta

SEQ ID NO: 21008 - DNA, 25 bp, Probe Sequence
cacatgatccgcaagaacaagtacc

SEQ ID NO: 21009 - DNA, 25 bp, Probe Sequence
ggaataagcagacctacagcactga

SEQ ID NO: 21010 - DNA, 25 bp, Probe Sequence
aggaataagcagacctacagcactg

SEQ ID NO: 21011 - DNA, 25 bp, Probe Sequence
cagacacatgatccgcaagaacaag

SEQ ID NO: 21012 - DNA, 25 bp, Probe Sequence
ctgatcaagaggaataagcagacct

SEQ ID NO: 21013 - DNA, 25 bp, Probe Sequence
ctacagcactgagcccaataacttg

SEQ ID NO: 21014 - DNA, 25 bp, Probe Sequence
caaaggtgtcgtggtggtcattaag

SEQ ID NO: 21015 - DNA, 25 bp, Probe Sequence
aataagcagacctacagcactgagc

SEQ ID NO: 21016 - DNA, 25 bp, Probe Sequence
tacagcactgagcccaataacttga

SEQ ID NO: 21017 - DNA, 25 bp, Probe Sequence
agacacatgatccgcaagaacaagt

SEQ ID NO: 21018 - DNA, 25 bp, Probe Sequence
cagcactgagcccaataacttgaag

SEQ ID NO: 21019 - DNA, 25 bp, Probe Sequence
cctgatcaagaggaataagcagacc

SEQ ID NO: 21020 - DNA, 25 bp, Probe Sequence
tcagacacatgatccgcaagaacaa

SEQ ID NO: 21021 - DNA, 25 bp, Probe Sequence
atggcacagaaatggtatcaagaaa

SEQ ID NO: 21022 - DNA, 25 bp, Probe Sequence
aatggcacagaaatggtatcaagaa

SEQ ID NO: 21023 - DNA, 25 bp, Probe Sequence
aaatggcacagaaatggtatcaaga

SEQ ID NO: 21024 - DNA, 25 bp, Probe Sequence
tggcacagaaatggtatcaagaaac

SEQ ID NO: 21025 - DNA, 25 bp, Probe Sequence
cctacaaaggcttcagagtagatat

SEQ ID NO: 21026 - DNA, 25 bp, Probe Sequence
ccctacaaaggcttcagagtagata

SEQ ID NO: 21027 - DNA, 25 bp, Probe Sequence
ccgatcacaaagatacgaatctctt

SEQ ID NO: 21028 - DNA, 25 bp, Probe Sequence
aaaatggcacagaaatggtatcaag

SEQ ID NO: 21029 - DNA, 25 bp, Probe Sequence
gaaaatggcacagaaatggtatcaa

SEQ ID NO: 21030 - DNA, 25 bp, Probe Sequence
gatatctctgccaacatgaggacag

SEQ ID NO: 21031 - DNA, 25 bp, Probe Sequence
gcacagaaatggtatcaagaaaccc

SEQ ID NO: 21032 - DNA, 25 bp, Probe Sequence
ggcacagaaatggtatcaagaaacc

SEQ ID NO: 21033 - DNA, 25 bp, Probe Sequence
cgatcacaaagatacgaatctctta

SEQ ID NO: 21034 - DNA, 25 bp, Probe Sequence
cccgatcacaaagatacgaatctct

SEQ ID NO: 21035 - DNA, 25 bp, Probe Sequence
cgaaaatggcacagaaatggtatca

SEQ ID NO: 21036 - DNA, 25 bp, Probe Sequence
caagaaaccccgatcacaaagatac

SEQ ID NO: 21037 - DNA, 25 bp, Probe Sequence
tcaagaaaccccgatcacaaagata

SEQ ID NO: 21038 - DNA, 25 bp, Probe Sequence
tatcaagaaaccccgatcacaaaga

SEQ ID NO: 21039 - DNA, 25 bp, Probe Sequence
gtatcaagaaaccccgatcacaaag

SEQ ID NO: 21040 - DNA, 25 bp, Probe Sequence
ccgaaaatggcacagaaatggtatc

SEQ ID NO: 21041 - DNA, 25 bp, Probe Sequence
cacaaagatacgaatctcttaaggg

SEQ ID NO: 21042 - DNA, 25 bp, Probe Sequence
ctacaaaggcttcagagtagatatc

SEQ ID NO: 21043 - DNA, 25 bp, Probe Sequence
atcaagaaaccccgatcacaaagat

SEQ ID NO: 21044 - DNA, 25 bp, Probe Sequence
atatctctgccaacatgaggacaga

SEQ ID NO: 21045 - DNA, 25 bp, Probe Sequence
aataaggaatgtgccataccgaatc

SEQ ID NO: 21046 - DNA, 25 bp, Probe Sequence
gaataaggaatgtgccataccgaat

SEQ ID NO: 21047 - DNA, 25 bp, Probe Sequence
cagtcaatgtggatgagaactaatc

SEQ ID NO: 21048 - DNA, 25 bp, Probe Sequence
agtcaatgtggatgagaactaatcg

SEQ ID NO: 21049 - DNA, 25 bp, Probe Sequence
gttacctatgtacctgttaccactt

SEQ ID NO: 21050 - DNA, 25 bp, Probe Sequence
acagtcaatgtggatgagaactaat

SEQ ID NO: 21051 - DNA, 25 bp, Probe Sequence
gacagtcaatgtggatgagaactaa

SEQ ID NO: 21052 - DNA, 25 bp, Probe Sequence
atgtggatgagaactaatcgctgat

SEQ ID NO: 21053 - DNA, 25 bp, Probe Sequence
aatctacagacagtcaatgtggatg

SEQ ID NO: 21054 - DNA, 25 bp, Probe Sequence
caatgtggatgagaactaatcgctg

SEQ ID NO: 21055 - DNA, 25 bp, Probe Sequence
aatgtggatgagaactaatcgctga

SEQ ID NO: 21056 - DNA, 25 bp, Probe Sequence
agacagtcaatgtggatgagaacta

SEQ ID NO: 21057 - DNA, 25 bp, Probe Sequence
atctacagacagtcaatgtggatga

SEQ ID NO: 21058 - DNA, 25 bp, Probe Sequence
cgtaatgaggatgaagattcaccaa

SEQ ID NO: 21059 - DNA, 25 bp, Probe Sequence
aatacaccatcaacattcacaagcg

SEQ ID NO: 21060 - DNA, 25 bp, Probe Sequence
tacagacagtcaatgtggatgagaa

SEQ ID NO: 21061 - DNA, 25 bp, Probe Sequence
gtcaatgtggatgagaactaatcgc

SEQ ID NO: 21062 - DNA, 25 bp, Probe Sequence
tcaatgtggatgagaactaatcgct

SEQ ID NO: 21063 - DNA, 25 bp, Probe Sequence
ctacagacagtcaatgtggatgaga

SEQ ID NO: 21064 - DNA, 25 bp, Probe Sequence
tctacagacagtcaatgtggatgag

SEQ ID NO: 21065 - DNA, 25 bp, Probe Sequence
agaatacaccatcaacattcacaag

SEQ ID NO: 21066 - DNA, 25 bp, Probe Sequence
gagaatacaccatcaacattcacaa

SEQ ID NO: 21067 - DNA, 25 bp, Probe Sequence
gaatacaccatcaacattcacaagc

SEQ ID NO: 21068 - DNA, 25 bp, Probe Sequence
tgtggatgagaactaatcgctgatc

SEQ ID NO: 21069 - DNA, 25 bp, Probe Sequence
caacattggttatggaagcaacaaa

SEQ ID NO: 21070 - DNA, 25 bp, Probe Sequence
caacagggttcgtagaagattcaag

SEQ ID NO: 21071 - DNA, 25 bp, Probe Sequence
attgacaacagggttcgtagaagat

SEQ ID NO: 21072 - DNA, 25 bp, Probe Sequence
acaacagggttcgtagaagattcaa

SEQ ID NO: 21073 - DNA, 25 bp, Probe Sequence
ttgacaacagggttcgtagaagatt

SEQ ID NO: 21074 - DNA, 25 bp, Probe Sequence
aacagggttcgtagaagattcaagg

SEQ ID NO: 21075 - DNA, 25 bp, Probe Sequence
gacaacagggttcgtagaagattca

SEQ ID NO: 21076 - DNA, 25 bp, Probe Sequence
tgacaacagggttcgtagaagattc

SEQ ID NO: 21077 - DNA, 25 bp, Probe Sequence
ccaacattggttatggaagcaacaa

SEQ ID NO: 21078 - DNA, 25 bp, Probe Sequence
cattgacaacagggttcgtagaaga

SEQ ID NO: 21079 - DNA, 25 bp, Probe Sequence
ctgatgtgcaacaaatcttactgtg

SEQ ID NO: 21080 - DNA, 25 bp, Probe Sequence
tatgtcaaaattaagcgtaactggc

SEQ ID NO: 21081 - DNA, 25 bp, Probe Sequence
gatcttgatgcccaacattggttat

SEQ ID NO: 21082 - DNA, 25 bp, Probe Sequence
accgatatgtcaaaattaagcgtaa

SEQ ID NO: 21083 - DNA, 25 bp, Probe Sequence
ccgatatgtcaaaattaagcgtaac

SEQ ID NO: 21084 - DNA, 25 bp, Probe Sequence
aacattggttatggaagcaacaaaa

SEQ ID NO: 21085 - DNA, 25 bp, Probe Sequence
atcttgatgcccaacattggttatg

SEQ ID NO: 21086 - DNA, 25 bp, Probe Sequence
caacaaatcttactgtgccgagatc

SEQ ID NO: 21087 - DNA, 25 bp, Probe Sequence
cgatatgtcaaaattaagcgtaact

SEQ ID NO: 21088 - DNA, 25 bp, Probe Sequence
gaccgatatgtcaaaattaagcgta

SEQ ID NO: 21089 - DNA, 25 bp, Probe Sequence
tcagaccgatatgtcaaaattaagc

SEQ ID NO: 21090 - DNA, 25 bp, Probe Sequence
gctgatgtgcaacaaatcttactgt

SEQ ID NO: 21091 - DNA, 25 bp, Probe Sequence
atatgtcaaaattaagcgtaactgg

SEQ ID NO: 21092 - DNA, 25 bp, Probe Sequence
cagaccgatatgtcaaaattaagcg

SEQ ID NO: 21093 - DNA, 25 bp, Probe Sequence
tcttgagattgttatggtgagagta

SEQ ID NO: 21094 - DNA, 25 bp, Probe Sequence
atcttgagattgttatggtgagagt

SEQ ID NO: 21095 - DNA, 25 bp, Probe Sequence
catcttgagattgttatggtgagag

SEQ ID NO: 21096 - DNA, 25 bp, Probe Sequence
gcatcttgagattgttatggtgaga

SEQ ID NO: 21097 - DNA, 25 bp, Probe Sequence
cttgagattgttatggtgagagtat

SEQ ID NO: 21098 - DNA, 25 bp, Probe Sequence
cttggcatcttgagattgttatggt

SEQ ID NO: 21099 - DNA, 25 bp, Probe Sequence
ttggcatcttgagattgttatggtg

SEQ ID NO: 21100 - DNA, 25 bp, Probe Sequence
ttgagattgttatggtgagagtatt

SEQ ID NO: 21101 - DNA, 25 bp, Probe Sequence
ggcatcttgagattgttatggtgag

SEQ ID NO: 21102 - DNA, 25 bp, Probe Sequence
tggcatcttgagattgttatggtga

SEQ ID NO: 21103 - DNA, 25 bp, Probe Sequence
gttaaatactaccagcacatcccta

SEQ ID NO: 21104 - DNA, 25 bp, Probe Sequence
gcttggcatcttgagattgttatgg

SEQ ID NO: 21105 - DNA, 25 bp, Probe Sequence
taaatactaccagcacatccctaga

SEQ ID NO: 21106 - DNA, 25 bp, Probe Sequence
ttaaatactaccagcacatccctag

SEQ ID NO: 21107 - DNA, 25 bp, Probe Sequence
aatactaccagcacatccctagata

SEQ ID NO: 21108 - DNA, 25 bp, Probe Sequence
atactaccagcacatccctagatac

SEQ ID NO: 21109 - DNA, 25 bp, Probe Sequence
aaatactaccagcacatccctagat

SEQ ID NO: 21110 - DNA, 25 bp, Probe Sequence
agcacatccctagatactactcaag

SEQ ID NO: 21111 - DNA, 25 bp, Probe Sequence
cgattctgtaaagagtttagggttt

SEQ ID NO: 21112 - DNA, 25 bp, Probe Sequence
cagcacatccctagatactactcaa

SEQ ID NO: 21113 - DNA, 25 bp, Probe Sequence
ctaccagcacatccctagatactac

SEQ ID NO: 21114 - DNA, 25 bp, Probe Sequence
gagagtatttacacctcagcaaatg

SEQ ID NO: 21115 - DNA, 25 bp, Probe Sequence
taccagcacatccctagatactact

SEQ ID NO: 21116 - DNA, 25 bp, Probe Sequence
actaccagcacatccctagatacta

SEQ ID NO: 21117 - DNA, 25 bp, Probe Sequence
aatgtggatttgtgctcttgtattt

SEQ ID NO: 21118 - DNA, 25 bp, Probe Sequence
aaatgtggatttgtgctcttgtatt

SEQ ID NO: 21119 - DNA, 25 bp, Probe Sequence
aataaatgtggatttgtgctcttgt

SEQ ID NO: 21120 - DNA, 25 bp, Probe Sequence
taaatgtggatttgtgctcttgtat

SEQ ID NO: 21121 - DNA, 25 bp, Probe Sequence
ataaatgtggatttgtgctcttgta

SEQ ID NO: 21122 - DNA, 25 bp, Probe Sequence
aaataaatgtggatttgtgctcttg

SEQ ID NO: 21123 - DNA, 25 bp, Probe Sequence
taaataaatgtggatttgtgctctt

SEQ ID NO: 21124 - DNA, 25 bp, Probe Sequence
ataaataaatgtggatttgtgctct

SEQ ID NO: 21125 - DNA, 25 bp, Probe Sequence
atgtggatttgtgctcttgtatttt

SEQ ID NO: 21126 - DNA, 25 bp, Probe Sequence
cattggacacagaatccgagtgatg

SEQ ID NO: 21127 - DNA, 25 bp, Probe Sequence
caataaataaatgtggatttgtgct

SEQ ID NO: 21128 - DNA, 25 bp, Probe Sequence
tcaataaataaatgtggatttgtgc

SEQ ID NO: 21129 - DNA, 25 bp, Probe Sequence
aataaataaatgtggatttgtgctc

SEQ ID NO: 21130 - DNA, 25 bp, Probe Sequence
ccattggacacagaatccgagtgat

SEQ ID NO: 21131 - DNA, 25 bp, Probe Sequence
tgctaaggccattggacacagaatc

SEQ ID NO: 21132 - DNA, 25 bp, Probe Sequence
aatcttcctgctaaggccattggac

SEQ ID NO: 21133 - DNA, 25 bp, Probe Sequence
ctgctaaggccattggacacagaat

SEQ ID NO: 21134 - DNA, 25 bp, Probe Sequence
caatcttcctgctaaggccattgga

SEQ ID NO: 21135 - DNA, 25 bp, Probe Sequence
taagaatgtcaacgattagtcatgc

SEQ ID NO: 21136 - DNA, 25 bp, Probe Sequence
gaatgtcaacgattagtcatgcaat

SEQ ID NO: 21137 - DNA, 25 bp, Probe Sequence
atgtcaacgattagtcatgcaataa

SEQ ID NO: 21138 - DNA, 25 bp, Probe Sequence
aatgtcaacgattagtcatgcaata

SEQ ID NO: 21139 - DNA, 25 bp, Probe Sequence
agaatgtcaacgattagtcatgcaa

SEQ ID NO: 21140 - DNA, 25 bp, Probe Sequence
aagaatgtcaacgattagtcatgca

SEQ ID NO: 21141 - DNA, 25 bp, Probe Sequence
ttaagaatgtcaacgattagtcatg

SEQ ID NO: 21142 - DNA, 25 bp, Probe Sequence
caagagaaagtataactggagtgcc

SEQ ID NO: 21143 - DNA, 25 bp, Probe Sequence
cgcaagagaaagtataactggagtg

SEQ ID NO: 21144 - DNA, 25 bp, Probe Sequence
aattgtataccgcagattcaggcat

SEQ ID NO: 21145 - DNA, 25 bp, Probe Sequence
gttgcagcatccagttcatcttaag

SEQ ID NO: 21146 - DNA, 25 bp, Probe Sequence
gagaaagtataactggagtgccaag

SEQ ID NO: 21147 - DNA, 25 bp, Probe Sequence
tgtcaacgattagtcatgcaataaa

SEQ ID NO: 21148 - DNA, 25 bp, Probe Sequence
tgttgcagcatccagttcatcttaa

SEQ ID NO: 21149 - DNA, 25 bp, Probe Sequence
agtcatgcaataaatgttctggttt

SEQ ID NO: 21150 - DNA, 25 bp, Probe Sequence
agagaaagtataactggagtgccaa

SEQ ID NO: 21151 - DNA, 25 bp, Probe Sequence
aagagaaagtataactggagtgcca

SEQ ID NO: 21152 - DNA, 25 bp, Probe Sequence
tagtcatgcaataaatgttctggtt

SEQ ID NO: 21153 - DNA, 25 bp, Probe Sequence
ttagtcatgcaataaatgttctggt

SEQ ID NO: 21154 - DNA, 25 bp, Probe Sequence
caacgattagtcatgcaataaatgt

SEQ ID NO: 21155 - DNA, 25 bp, Probe Sequence
cttaagaatgtcaacgattagtcat

SEQ ID NO: 21156 - DNA, 25 bp, Probe Sequence
gtcaacgattagtcatgcaataaat

SEQ ID NO: 21157 - DNA, 25 bp, Probe Sequence
tataccgcagattcaggcatggatt

SEQ ID NO: 21158 - DNA, 25 bp, Probe Sequence
attgtataccgcagattcaggcatg

SEQ ID NO: 21159 - DNA, 25 bp, Probe Sequence
tgaaggagttgaaagaccagtagac

SEQ ID NO: 21160 - DNA, 25 bp, Probe Sequence
ctcctctactctttgagacatcact

SEQ ID NO: 21161 - DNA, 25 bp, Probe Sequence
tcctctactctttgagacatcactg

SEQ ID NO: 21162 - DNA, 25 bp, Probe Sequence
cagaagactgaaggagttgaaagac

SEQ ID NO: 21163 - DNA, 25 bp, Probe Sequence
agaagactgaaggagttgaaagacc

SEQ ID NO: 21164 - DNA, 25 bp, Probe Sequence
ctgaaggagttgaaagaccagtaga

SEQ ID NO: 21165 - DNA, 25 bp, Probe Sequence
cctctactctttgagacatcactgg

SEQ ID NO: 21166 - DNA, 25 bp, Probe Sequence
ttgagacatcactggcctataataa

SEQ ID NO: 21167 - DNA, 25 bp, Probe Sequence
gaaggagttgaaagaccagtagacg

SEQ ID NO: 21168 - DNA, 25 bp, Probe Sequence
gaagactgaaggagttgaaagacca

SEQ ID NO: 21169 - DNA, 25 bp, Probe Sequence
gctcctctactctttgagacatcac

SEQ ID NO: 21170 - DNA, 25 bp, Probe Sequence
aagactgaaggagttgaaagaccag

SEQ ID NO: 21171 - DNA, 25 bp, Probe Sequence
ctctactctttgagacatcactggc

SEQ ID NO: 21172 - DNA, 25 bp, Probe Sequence
cggaaaatggtgaagaaaattgaaa

SEQ ID NO: 21173 - DNA, 25 bp, Probe Sequence
atcactggcctataataaatgggtt

SEQ ID NO: 21174 - DNA, 25 bp, Probe Sequence
gaaagtcgggatcgtcggtaaatac

SEQ ID NO: 21175 - DNA, 25 bp, Probe Sequence
agaaagtcgggatcgtcggtaaata

SEQ ID NO: 21176 - DNA, 25 bp, Probe Sequence
tcactggcctataataaatgggtta

SEQ ID NO: 21177 - DNA, 25 bp, Probe Sequence
catcactggcctataataaatgggt

SEQ ID NO: 21178 - DNA, 25 bp, Probe Sequence
acatcactggcctataataaatggg

SEQ ID NO: 21179 - DNA, 25 bp, Probe Sequence
tagacgctcctctactctttgagac

SEQ ID NO: 21180 - DNA, 25 bp, Probe Sequence
atggtgaagaaaattgaaatcagcc

SEQ ID NO: 21181 - DNA, 25 bp, Probe Sequence
gacatcactggcctataataaatgg

SEQ ID NO: 21182 - DNA, 25 bp, Probe Sequence
gaagaaaattgaaatcagccagcac

SEQ ID NO: 21183 - DNA, 25 bp, Probe Sequence
agacacactgattggaactgtatta

SEQ ID NO: 21184 - DNA, 25 bp, Probe Sequence
gacacactgattggaactgtattat

SEQ ID NO: 21185 - DNA, 25 bp, Probe Sequence
cagacacactgattggaactgtatt

SEQ ID NO: 21186 - DNA, 25 bp, Probe Sequence
acacactgattggaactgtattata

SEQ ID NO: 21187 - DNA, 25 bp, Probe Sequence
ccagacacactgattggaactgtat

SEQ ID NO: 21188 - DNA, 25 bp, Probe Sequence
aatgaaccagacacactgattggaa

SEQ ID NO: 21189 - DNA, 25 bp, Probe Sequence
ctgaaatgaaccagacacactgatt

SEQ ID NO: 21190 - DNA, 25 bp, Probe Sequence
cacactgattggaactgtattatat

SEQ ID NO: 21191 - DNA, 25 bp, Probe Sequence
tgaaatgaaccagacacactgattg

SEQ ID NO: 21192 - DNA, 25 bp, Probe Sequence
caaagagaaggcagagaaactgaag

SEQ ID NO: 21193 - DNA, 25 bp, Probe Sequence
gaaggaactgaaatgaaccagacac

SEQ ID NO: 21194 - DNA, 25 bp, Probe Sequence
gtgaaggaactgaaatgaaccagac

SEQ ID NO: 21195 - DNA, 25 bp, Probe Sequence
agtgaaggaactgaaatgaaccaga

SEQ ID NO: 21196 - DNA, 25 bp, Probe Sequence
gtttaaagttcgatgcagcagatac

SEQ ID NO: 21197 - DNA, 25 bp, Probe Sequence
agtttaaagttcgatgcagcagata

SEQ ID NO: 21198 - DNA, 25 bp, Probe Sequence
aaggacaacgtgaagtttaaagttc

SEQ ID NO: 21199 - DNA, 25 bp, Probe Sequence
gacaacgtgaagtttaaagttcgat

SEQ ID NO: 21200 - DNA, 25 bp, Probe Sequence
acaacgtgaagtttaaagttcgatg

SEQ ID NO: 21201 - DNA, 25 bp, Probe Sequence
gaactgaaatgaaccagacacactg

SEQ ID NO: 21202 - DNA, 25 bp, Probe Sequence
atgaaccagacacactgattggaac

SEQ ID NO: 21203 - DNA, 25 bp, Probe Sequence
taaggacaacgtgaagtttaaagtt

SEQ ID NO: 21204 - DNA, 25 bp, Probe Sequence
actgaaatgaaccagacacactgat

SEQ ID NO: 21205 - DNA, 25 bp, Probe Sequence
tgaaggaactgaaatgaaccagaca

SEQ ID NO: 21206 - DNA, 25 bp, Probe Sequence
acaaagagaaggcagagaaactgaa

SEQ ID NO: 21207 - DNA, 25 bp, Probe Sequence
tccaactacttccttaagatcatcc

SEQ ID NO: 21208 - DNA, 25 bp, Probe Sequence
actacttccttaagatcatccaact

SEQ ID NO: 21209 - DNA, 25 bp, Probe Sequence
aactacttccttaagatcatccaac

SEQ ID NO: 21210 - DNA, 25 bp, Probe Sequence
caactacttccttaagatcatccaa

SEQ ID NO: 21211 - DNA, 25 bp, Probe Sequence
caccattgaaatcctgagtgatgtg

SEQ ID NO: 21212 - DNA, 25 bp, Probe Sequence
acttccttaagatcatccaactatt

SEQ ID NO: 21213 - DNA, 25 bp, Probe Sequence
ctacttccttaagatcatccaacta

SEQ ID NO: 21214 - DNA, 25 bp, Probe Sequence
cttccttaagatcatccaactattg

SEQ ID NO: 21215 - DNA, 25 bp, Probe Sequence
ctcgtggaagtgacatcgtctttaa

SEQ ID NO: 21216 - DNA, 25 bp, Probe Sequence
gaagtgacatcgtctttaaaccctg

SEQ ID NO: 21217 - DNA, 25 bp, Probe Sequence
accattgaaatcctgagtgatgtgc

SEQ ID NO: 21218 - DNA, 25 bp, Probe Sequence
gtggaagtgacatcgtctttaaacc

SEQ ID NO: 21219 - DNA, 25 bp, Probe Sequence
tacttccttaagatcatccaactat

SEQ ID NO: 21220 - DNA, 25 bp, Probe Sequence
cgtggaagtgacatcgtctttaaac

SEQ ID NO: 21221 - DNA, 25 bp, Probe Sequence
tcgtggaagtgacatcgtctttaaa

SEQ ID NO: 21222 - DNA, 25 bp, Probe Sequence
ggaagtgacatcgtctttaaaccct

SEQ ID NO: 21223 - DNA, 25 bp, Probe Sequence
cattgaaatcctgagtgatgtgcag

SEQ ID NO: 21224 - DNA, 25 bp, Probe Sequence
gcaccattgaaatcctgagtgatgt

SEQ ID NO: 21225 - DNA, 25 bp, Probe Sequence
tggaagtgacatcgtctttaaaccc

SEQ ID NO: 21226 - DNA, 25 bp, Probe Sequence
ccattgaaatcctgagtgatgtgca

SEQ ID NO: 21227 - DNA, 25 bp, Probe Sequence
aagtgacatcgtctttaaaccctgc

SEQ ID NO: 21228 - DNA, 25 bp, Probe Sequence
ggcaccattgaaatcctgagtgatg

SEQ ID NO: 21229 - DNA, 25 bp, Probe Sequence
ttccttaagatcatccaactattgg

SEQ ID NO: 21230 - DNA, 25 bp, Probe Sequence
cctcgtggaagtgacatcgtcttta

SEQ ID NO: 21231 - DNA, 25 bp, Probe Sequence
gacagtcacggaggataagatcaat

SEQ ID NO: 21232 - DNA, 25 bp, Probe Sequence
acagtcacggaggataagatcaatg

SEQ ID NO: 21233 - DNA, 25 bp, Probe Sequence
aagtggaagcaaagaaagaagaatc

SEQ ID NO: 21234 - DNA, 25 bp, Probe Sequence
gaaagtggaagcaaagaaagaagaa

SEQ ID NO: 21235 - DNA, 25 bp, Probe Sequence
aagaaagtggaagcaaagaaagaag

SEQ ID NO: 21236 - DNA, 25 bp, Probe Sequence
gaagaaagtggaagcaaagaaagaa

SEQ ID NO: 21237 - DNA, 25 bp, Probe Sequence
aaagtggaagcaaagaaagaagaat

SEQ ID NO: 21238 - DNA, 25 bp, Probe Sequence
gagaagaaagtggaagcaaagaaag

SEQ ID NO: 21239 - DNA, 25 bp, Probe Sequence
gaagaatccgaggagtctgatgatg

SEQ ID NO: 21240 - DNA, 25 bp, Probe Sequence
agaagaatccgaggagtctgatgat

SEQ ID NO: 21241 - DNA, 25 bp, Probe Sequence
agaaagtggaagcaaagaaagaaga

SEQ ID NO: 21242 - DNA, 25 bp, Probe Sequence
agaagaaagtggaagcaaagaaaga

SEQ ID NO: 21243 - DNA, 25 bp, Probe Sequence
aagaagaatccgaggagtctgatga

SEQ ID NO: 21244 - DNA, 25 bp, Probe Sequence
aagaatccgaggagtctgatgatga

SEQ ID NO: 21245 - DNA, 25 bp, Probe Sequence
ggagaagaaagtggaagcaaagaaa

SEQ ID NO: 21246 - DNA, 25 bp, Probe Sequence
caaagaaagaagaatccgaggagtc

SEQ ID NO: 21247 - DNA, 25 bp, Probe Sequence
aaagaaagaagaatccgaggagtct

SEQ ID NO: 21248 - DNA, 25 bp, Probe Sequence
gaagcaaagaaagaagaatccgagg

SEQ ID NO: 21249 - DNA, 25 bp, Probe Sequence
cagtcacggaggataagatcaatgc

SEQ ID NO: 21250 - DNA, 25 bp, Probe Sequence
aggagaagaaagtggaagcaaagaa

SEQ ID NO: 21251 - DNA, 25 bp, Probe Sequence
gaaagaagaatccgaggagtctgat

SEQ ID NO: 21252 - DNA, 25 bp, Probe Sequence
aagaaagaagaatccgaggagtctg

SEQ ID NO: 21253 - DNA, 25 bp, Probe Sequence
aatccgaggagtctgatgatgacat

SEQ ID NO: 21254 - DNA, 25 bp, Probe Sequence
aaagaagaatccgaggagtctgatg

SEQ ID NO: 21255 - DNA, 25 bp, Probe Sequence
aatcattatcttagccaccagaaca

SEQ ID NO: 21256 - DNA, 25 bp, Probe Sequence
atcattatcttagccaccagaacac

SEQ ID NO: 21257 - DNA, 25 bp, Probe Sequence
tatcttagccaccagaacacagaat

SEQ ID NO: 21258 - DNA, 25 bp, Probe Sequence
attatcttagccaccagaacacaga

SEQ ID NO: 21259 - DNA, 25 bp, Probe Sequence
cattatcttagccaccagaacacag

SEQ ID NO: 21260 - DNA, 25 bp, Probe Sequence
ttatcttagccaccagaacacagaa

SEQ ID NO: 21261 - DNA, 25 bp, Probe Sequence
tcattatcttagccaccagaacaca

SEQ ID NO: 21262 - DNA, 25 bp, Probe Sequence
accaaccaggacagaaatcattatc

SEQ ID NO: 21263 - DNA, 25 bp, Probe Sequence
caccaaccaggacagaaatcattat

SEQ ID NO: 21264 - DNA, 25 bp, Probe Sequence
atcttagccaccagaacacagaatg

SEQ ID NO: 21265 - DNA, 25 bp, Probe Sequence
acagaaatcattatcttagccacca

SEQ ID NO: 21266 - DNA, 25 bp, Probe Sequence
agaaatcattatcttagccaccaga

SEQ ID NO: 21267 - DNA, 25 bp, Probe Sequence
cagaaatcattatcttagccaccag

SEQ ID NO: 21268 - DNA, 25 bp, Probe Sequence
gacagaaatcattatcttagccacc

SEQ ID NO: 21269 - DNA, 25 bp, Probe Sequence
ggacagaaatcattatcttagccac

SEQ ID NO: 21270 - DNA, 25 bp, Probe Sequence
aggacagaaatcattatcttagcca

SEQ ID NO: 21271 - DNA, 25 bp, Probe Sequence
ccaaccaggacagaaatcattatct

SEQ ID NO: 21272 - DNA, 25 bp, Probe Sequence
caggacagaaatcattatcttagcc

SEQ ID NO: 21273 - DNA, 25 bp, Probe Sequence
ccaggacagaaatcattatcttagc

SEQ ID NO: 21274 - DNA, 25 bp, Probe Sequence
aaatcattatcttagccaccagaac

SEQ ID NO: 21275 - DNA, 25 bp, Probe Sequence
caaccaggacagaaatcattatctt

SEQ ID NO: 21276 - DNA, 25 bp, Probe Sequence
gaaatcattatcttagccaccagaa

SEQ ID NO: 21277 - DNA, 25 bp, Probe Sequence
gtagttcagaagaggtttggctttc

SEQ ID NO: 21278 - DNA, 25 bp, Probe Sequence
acaccaaccaggacagaaatcatta

SEQ ID NO: 21279 - DNA, 25 bp, Probe Sequence
gatatgaaccaccagtccaagaatc

SEQ ID NO: 21280 - DNA, 25 bp, Probe Sequence
atatgaaccaccagtccaagaatct

SEQ ID NO: 21281 - DNA, 25 bp, Probe Sequence
aatcagatacggaagacctcttatg

SEQ ID NO: 21282 - DNA, 25 bp, Probe Sequence
caatcagatacggaagacctcttat

SEQ ID NO: 21283 - DNA, 25 bp, Probe Sequence
acaatcagatacggaagacctctta

SEQ ID NO: 21284 - DNA, 25 bp, Probe Sequence
gcacctgctatgttcaatataagaa

SEQ ID NO: 21285 - DNA, 25 bp, Probe Sequence
tatcctctccatgatgtcttcgtta

SEQ ID NO: 21286 - DNA, 25 bp, Probe Sequence
aacaatcagatacggaagacctctt

SEQ ID NO: 21287 - DNA, 25 bp, Probe Sequence
ttatcctctccatgatgtcttcgtt

SEQ ID NO: 21288 - DNA, 25 bp, Probe Sequence
caacaatcagatacggaagacctct

SEQ ID NO: 21289 - DNA, 25 bp, Probe Sequence
atcagatacggaagacctcttatgc

SEQ ID NO: 21290 - DNA, 25 bp, Probe Sequence
atcctctccatgatgtcttcgttag

SEQ ID NO: 21291 - DNA, 25 bp, Probe Sequence
cctctccatgatgtcttcgttagaa

SEQ ID NO: 21292 - DNA, 25 bp, Probe Sequence
ttacttgcttcgtctgttctgtgtt

SEQ ID NO: 21293 - DNA, 25 bp, Probe Sequence
gaaagattggtatgatgtgaaagca

SEQ ID NO: 21294 - DNA, 25 bp, Probe Sequence
ctatttgtgatggtttgcttctgaa

SEQ ID NO: 21295 - DNA, 25 bp, Probe Sequence
gatacggaagacctcttatgctcag

SEQ ID NO: 21296 - DNA, 25 bp, Probe Sequence
agaaagattggtatgatgtgaaagc

SEQ ID NO: 21297 - DNA, 25 bp, Probe Sequence
tatttgtgatggtttgcttctgaaa

SEQ ID NO: 21298 - DNA, 25 bp, Probe Sequence
cttgccaatctatttatcctctcca

SEQ ID NO: 21299 - DNA, 25 bp, Probe Sequence
cagatacggaagacctcttatgctc

SEQ ID NO: 21300 - DNA, 25 bp, Probe Sequence
ttgccaatctatttatcctctccat

SEQ ID NO: 21301 - DNA, 25 bp, Probe Sequence
gatggttacttgcttcgtctgttct

SEQ ID NO: 21302 - DNA, 25 bp, Probe Sequence
tatgaaccaccagtccaagaatctg

SEQ ID NO: 21303 - DNA, 25 bp, Probe Sequence
ttggagactggcaagattactgatt

SEQ ID NO: 21304 - DNA, 25 bp, Probe Sequence
aatattgtggcaggattaatagcaa

SEQ ID NO: 21305 - DNA, 25 bp, Probe Sequence
agactggcaagattactgatttcat

SEQ ID NO: 21306 - DNA, 25 bp, Probe Sequence
gactggcaagattactgatttcatc

SEQ ID NO: 21307 - DNA, 25 bp, Probe Sequence
gagactggcaagattactgatttca

SEQ ID NO: 21308 - DNA, 25 bp, Probe Sequence
attgatttggagactggcaagatta

SEQ ID NO: 21309 - DNA, 25 bp, Probe Sequence
ggagactggcaagattactgatttc

SEQ ID NO: 21310 - DNA, 25 bp, Probe Sequence
gtacatcgtattacacctgaggagg

SEQ ID NO: 21311 - DNA, 25 bp, Probe Sequence
ttgatttggagactggcaagattac

SEQ ID NO: 21312 - DNA, 25 bp, Probe Sequence
tggagactggcaagattactgattt

SEQ ID NO: 21313 - DNA, 25 bp, Probe Sequence
gagagaatttccgtctgatctatga

SEQ ID NO: 21314 - DNA, 25 bp, Probe Sequence
cctcatcaaggtgaatgataccatt

SEQ ID NO: 21315 - DNA, 25 bp, Probe Sequence
gattgatttggagactggcaagatt

SEQ ID NO: 21316 - DNA, 25 bp, Probe Sequence
gatttggagactggcaagattactg

SEQ ID NO: 21317 - DNA, 25 bp, Probe Sequence
tttggagactggcaagattactgat

SEQ ID NO: 21318 - DNA, 25 bp, Probe Sequence
atttggagactggcaagattactga

SEQ ID NO: 21319 - DNA, 25 bp, Probe Sequence
tgatttggagactggcaagattact

SEQ ID NO: 21320 - DNA, 25 bp, Probe Sequence
gagaatttccgtctgatctatgaca

SEQ ID NO: 21321 - DNA, 25 bp, Probe Sequence
agagaatttccgtctgatctatgac

SEQ ID NO: 21322 - DNA, 25 bp, Probe Sequence
agaatttccgtctgatctatgacac

SEQ ID NO: 21323 - DNA, 25 bp, Probe Sequence
agattgatttggagactggcaagat

SEQ ID NO: 21324 - DNA, 25 bp, Probe Sequence
taccattcagattgatttggagact

SEQ ID NO: 21325 - DNA, 25 bp, Probe Sequence
aaatattgtggcaggattaatagca

SEQ ID NO: 21326 - DNA, 25 bp, Probe Sequence
tcaccattgctgaagagagagacaa

SEQ ID NO: 21327 - DNA, 25 bp, Probe Sequence
tactgttgctgaagagagagataag

SEQ ID NO: 21328 - DNA, 25 bp, Probe Sequence
ctgttgctgaagagagagataagag

SEQ ID NO: 21329 - DNA, 25 bp, Probe Sequence
ttactgttgctgaagagagagataa

SEQ ID NO: 21330 - DNA, 25 bp, Probe Sequence
actgttgctgaagagagagataaga

SEQ ID NO: 21331 - DNA, 25 bp, Probe Sequence
cttactgttgctgaagagagagata

SEQ ID NO: 21332 - DNA, 25 bp, Probe Sequence
tgttgctgaagagagagataagagg

SEQ ID NO: 21333 - DNA, 25 bp, Probe Sequence
acttactgttgctgaagagagagat

SEQ ID NO: 21334 - DNA, 25 bp, Probe Sequence
tcaggaatagactcaagtatgcgtt

SEQ ID NO: 21335 - DNA, 25 bp, Probe Sequence
gacttactgttgctgaagagagaga

SEQ ID NO: 21336 - DNA, 25 bp, Probe Sequence
caggaatagactcaagtatgcgttg

SEQ ID NO: 21337 - DNA, 25 bp, Probe Sequence
ctcaggaatagactcaagtatgcgt

SEQ ID NO: 21338 - DNA, 25 bp, Probe Sequence
cctcaggaatagactcaagtatgcg

SEQ ID NO: 21339 - DNA, 25 bp, Probe Sequence
ttgctgaagagagagataagaggct

SEQ ID NO: 21340 - DNA, 25 bp, Probe Sequence
gttgctgaagagagagataagaggc

SEQ ID NO: 21341 - DNA, 25 bp, Probe Sequence
atttagggactggcaagataatcaa

SEQ ID NO: 21342 - DNA, 25 bp, Probe Sequence
tgactggagatgaggtaaagaagat

SEQ ID NO: 21343 - DNA, 25 bp, Probe Sequence
ttgactggagatgaggtaaagaaga

SEQ ID NO: 21344 - DNA, 25 bp, Probe Sequence
gttgactggagatgaggtaaagaag

SEQ ID NO: 21345 - DNA, 25 bp, Probe Sequence
tttagggactggcaagataatcaac

SEQ ID NO: 21346 - DNA, 25 bp, Probe Sequence
gactggagatgaggtaaagaagata

SEQ ID NO: 21347 - DNA, 25 bp, Probe Sequence
ctgtcatcaaggtgaacgatactgt

SEQ ID NO: 21348 - DNA, 25 bp, Probe Sequence
cgacttactgttgctgaagagagag

SEQ ID NO: 21349 - DNA, 25 bp, Probe Sequence
gggactggcaagataatcaacttta

SEQ ID NO: 21350 - DNA, 25 bp, Probe Sequence
ttgatttagggactggcaagataat

SEQ ID NO: 21351 - DNA, 25 bp, Probe Sequence
cgaactcctatgccattaagaagaa

SEQ ID NO: 21352 - DNA, 25 bp, Probe Sequence
gaactcctatgccattaagaagaag

SEQ ID NO: 21353 - DNA, 25 bp, Probe Sequence
ctatgccattaagaagaaggacgag

SEQ ID NO: 21354 - DNA, 25 bp, Probe Sequence
cagtgaaggagaagtatgccaagta

SEQ ID NO: 21355 - DNA, 25 bp, Probe Sequence
ggaacattaagaccattgctgagtg

SEQ ID NO: 21356 - DNA, 25 bp, Probe Sequence
aactcctatgccattaagaagaagg

SEQ ID NO: 21357 - DNA, 25 bp, Probe Sequence
agtgaaggagaagtatgccaagtac

SEQ ID NO: 21358 - DNA, 25 bp, Probe Sequence
gaacattaagaccattgctgagtgc

SEQ ID NO: 21359 - DNA, 25 bp, Probe Sequence
ctcgaactcctatgccattaagaag

SEQ ID NO: 21360 - DNA, 25 bp, Probe Sequence
tatgccattaagaagaaggacgagc

SEQ ID NO: 21361 - DNA, 25 bp, Probe Sequence
ttacattgcagtgaaggagaagtat

SEQ ID NO: 21362 - DNA, 25 bp, Probe Sequence
attacattgcagtgaaggagaagta

SEQ ID NO: 21363 - DNA, 25 bp, Probe Sequence
tcgaactcctatgccattaagaaga

SEQ ID NO: 21364 - DNA, 25 bp, Probe Sequence
gattacattgcagtgaaggagaagt

SEQ ID NO: 21365 - DNA, 25 bp, Probe Sequence
tacattgcagtgaaggagaagtatg

SEQ ID NO: 21366 - DNA, 25 bp, Probe Sequence
cctatgccattaagaagaaggacga

SEQ ID NO: 21367 - DNA, 25 bp, Probe Sequence
ggattacattgcagtgaaggagaag

SEQ ID NO: 21368 - DNA, 25 bp, Probe Sequence
gtgaaggagaagtatgccaagtacc

SEQ ID NO: 21369 - DNA, 25 bp, Probe Sequence
cctcgaactcctatgccattaagaa

SEQ ID NO: 21370 - DNA, 25 bp, Probe Sequence
aggattacattgcagtgaaggagaa

SEQ ID NO: 21371 - DNA, 25 bp, Probe Sequence
cggaacattaagaccattgctgagt

SEQ ID NO: 21372 - DNA, 25 bp, Probe Sequence
ctcctcgaactcctatgccattaag

SEQ ID NO: 21373 - DNA, 25 bp, Probe Sequence
gaaggagaagtatgccaagtacctg

SEQ ID NO: 21374 - DNA, 25 bp, Probe Sequence
caggattacattgcagtgaaggaga

SEQ ID NO: 21375 - DNA, 25 bp, Probe Sequence
tattcctggactgactgatactaca

SEQ ID NO: 21376 - DNA, 25 bp, Probe Sequence
atattcctggactgactgatactac

SEQ ID NO: 21377 - DNA, 25 bp, Probe Sequence
agcgttctcaacttggttattgtaa

SEQ ID NO: 21378 - DNA, 25 bp, Probe Sequence
gatattcctggactgactgatacta

SEQ ID NO: 21379 - DNA, 25 bp, Probe Sequence
gcttctacttctaagtctgaatcca

SEQ ID NO: 21380 - DNA, 25 bp, Probe Sequence
gagaatgaaggaggctaaggagaag

SEQ ID NO: 21381 - DNA, 25 bp, Probe Sequence
gagcgttctcaacttggttattgta

SEQ ID NO: 21382 - DNA, 25 bp, Probe Sequence
agagaatgaaggaggctaaggagaa

SEQ ID NO: 21383 - DNA, 25 bp, Probe Sequence
aagagaatgaaggaggctaaggaga

SEQ ID NO: 21384 - DNA, 25 bp, Probe Sequence
caagagaatgaaggaggctaaggag

SEQ ID NO: 21385 - DNA, 25 bp, Probe Sequence
attcctggactgactgatactacag

SEQ ID NO: 21386 - DNA, 25 bp, Probe Sequence
ctacttctaagtctgaatccagtca

SEQ ID NO: 21387 - DNA, 25 bp, Probe Sequence
tctacttctaagtctgaatccagtc

SEQ ID NO: 21388 - DNA, 25 bp, Probe Sequence
ggatattcctggactgactgatact

SEQ ID NO: 21389 - DNA, 25 bp, Probe Sequence
cgagcttctacttctaagtctgaat

SEQ ID NO: 21390 - DNA, 25 bp, Probe Sequence
agcttctacttctaagtctgaatcc

SEQ ID NO: 21391 - DNA, 25 bp, Probe Sequence
ttctacttctaagtctgaatccagt

SEQ ID NO: 21392 - DNA, 25 bp, Probe Sequence
gatgtccgccagtatgttgtaagaa

SEQ ID NO: 21393 - DNA, 25 bp, Probe Sequence
ggagaactggagaaagaaagagaaa

SEQ ID NO: 21394 - DNA, 25 bp, Probe Sequence
atgatgtccgccagtatgttgtaag

SEQ ID NO: 21395 - DNA, 25 bp, Probe Sequence
gatgatgtccgccagtatgttgtaa

SEQ ID NO: 21396 - DNA, 25 bp, Probe Sequence
aggagaactggagaaagaaagagaa

SEQ ID NO: 21397 - DNA, 25 bp, Probe Sequence
aaggagaactggagaaagaaagaga

SEQ ID NO: 21398 - DNA, 25 bp, Probe Sequence
caaggagaactggagaaagaaagag

SEQ ID NO: 21399 - DNA, 25 bp, Probe Sequence
gctatcataatctttgttcccgttc

SEQ ID NO: 21400 - DNA, 25 bp, Probe Sequence
tatcataatctttgttcccgttcct

SEQ ID NO: 21401 - DNA, 25 bp, Probe Sequence
ctatcataatctttgttcccgttcc

SEQ ID NO: 21402 - DNA, 25 bp, Probe Sequence
atcataatctttgttcccgttcctc

SEQ ID NO: 21403 - DNA, 25 bp, Probe Sequence
tcataaaggttcatttggacaaagc

SEQ ID NO: 21404 - DNA, 25 bp, Probe Sequence
gctcataaaggttcatttggacaaa

SEQ ID NO: 21405 - DNA, 25 bp, Probe Sequence
ataaaggttcatttggacaaagcac

SEQ ID NO: 21406 - DNA, 25 bp, Probe Sequence
cataaaggttcatttggacaaagca

SEQ ID NO: 21407 - DNA, 25 bp, Probe Sequence
ggctcataaaggttcatttggacaa

SEQ ID NO: 21408 - DNA, 25 bp, Probe Sequence
ataatctttgttcccgttcctcaac

SEQ ID NO: 21409 - DNA, 25 bp, Probe Sequence
cataatctttgttcccgttcctcaa

SEQ ID NO: 21410 - DNA, 25 bp, Probe Sequence
tcataatctttgttcccgttcctca

SEQ ID NO: 21411 - DNA, 25 bp, Probe Sequence
ctcataaaggttcatttggacaaag

SEQ ID NO: 21412 - DNA, 25 bp, Probe Sequence
taaaggttcatttggacaaagcaca

SEQ ID NO: 21413 - DNA, 25 bp, Probe Sequence
ctaaggaaattgaagttggtggtgg

SEQ ID NO: 21414 - DNA, 25 bp, Probe Sequence
tcctcaactgaaatctttccagaaa

SEQ ID NO: 21415 - DNA, 25 bp, Probe Sequence
ttcctcaactgaaatctttccagaa

SEQ ID NO: 21416 - DNA, 25 bp, Probe Sequence
gttcctcaactgaaatctttccaga

SEQ ID NO: 21417 - DNA, 25 bp, Probe Sequence
agctatcataatctttgttcccgtt

SEQ ID NO: 21418 - DNA, 25 bp, Probe Sequence
atattacggcagctaaggaaattga

SEQ ID NO: 21419 - DNA, 25 bp, Probe Sequence
aatattacggcagctaaggaaattg

SEQ ID NO: 21420 - DNA, 25 bp, Probe Sequence
tgaatattacggcagctaaggaaat

SEQ ID NO: 21421 - DNA, 25 bp, Probe Sequence
gaatattacggcagctaaggaaatt

SEQ ID NO: 21422 - DNA, 25 bp, Probe Sequence
taatctttgttcccgttcctcaact

SEQ ID NO: 21423 - DNA, 25 bp, Probe Sequence
ctaccacaagaagcggaagtatgag

SEQ ID NO: 21424 - DNA, 25 bp, Probe Sequence
agagttggagttctatcttaggaaa

SEQ ID NO: 21425 - DNA, 25 bp, Probe Sequence
taccacaagaagcggaagtatgagt

SEQ ID NO: 21426 - DNA, 25 bp, Probe Sequence
aagagttggagttctatcttaggaa

SEQ ID NO: 21427 - DNA, 25 bp, Probe Sequence
tttgtcttcacccatgtaataaagg

SEQ ID NO: 21428 - DNA, 25 bp, Probe Sequence
cacaagaagcggaagtatgagttgg

SEQ ID NO: 21429 - DNA, 25 bp, Probe Sequence
ccacaagaagcggaagtatgagttg

SEQ ID NO: 21430 - DNA, 25 bp, Probe Sequence
cctaccacaagaagcggaagtatga

SEQ ID NO: 21431 - DNA, 25 bp, Probe Sequence
ttgtcttcacccatgtaataaaggt

SEQ ID NO: 21432 - DNA, 25 bp, Probe Sequence
accacaagaagcggaagtatgagtt

SEQ ID NO: 21433 - DNA, 25 bp, Probe Sequence
gagggcaaagagttggagttctatc

SEQ ID NO: 21434 - DNA, 25 bp, Probe Sequence
ggcaaagagttggagttctatctta

SEQ ID NO: 21435 - DNA, 25 bp, Probe Sequence
caagagaaagccctaccacaagaag

SEQ ID NO: 21436 - DNA, 25 bp, Probe Sequence
gcaaagagttggagttctatcttag

SEQ ID NO: 21437 - DNA, 25 bp, Probe Sequence
aaaggtgtttattgttttgttccca

SEQ ID NO: 21438 - DNA, 25 bp, Probe Sequence
ctacaatgcatctaataacgagctg

SEQ ID NO: 21439 - DNA, 25 bp, Probe Sequence
tctacaatgcatctaataacgagct

SEQ ID NO: 21440 - DNA, 25 bp, Probe Sequence
gtctacaatgcatctaataacgagc

SEQ ID NO: 21441 - DNA, 25 bp, Probe Sequence
ataaatccttgttttgtcttcaccc

SEQ ID NO: 21442 - DNA, 25 bp, Probe Sequence
agggcaaagagttggagttctatct

SEQ ID NO: 21443 - DNA, 25 bp, Probe Sequence
agagggcaaagagttggagttctat

SEQ ID NO: 21444 - DNA, 25 bp, Probe Sequence
ctgactcctgaggaagaagagattt

SEQ ID NO: 21445 - DNA, 25 bp, Probe Sequence
taaatccttgttttgtcttcaccca

SEQ ID NO: 21446 - DNA, 25 bp, Probe Sequence
aaagagttggagttctatcttagga

SEQ ID NO: 21447 - DNA, 25 bp, Probe Sequence
attgtctcgttttcctgccaaataa

SEQ ID NO: 21448 - DNA, 25 bp, Probe Sequence
ttgtctcgttttcctgccaaataaa

SEQ ID NO: 21449 - DNA, 25 bp, Probe Sequence
gagacgacgaggaggaggattaagt

SEQ ID NO: 21450 - DNA, 25 bp, Probe Sequence
gattgtctcgttttcctgccaaata

SEQ ID NO: 21451 - DNA, 25 bp, Probe Sequence
agaggatttcttagagagacgcctg

SEQ ID NO: 21452 - DNA, 25 bp, Probe Sequence
agacgacgaggaggaggattaagtc

SEQ ID NO: 21453 - DNA, 25 bp, Probe Sequence
aggaggaggattaagtccacctgtc

SEQ ID NO: 21454 - DNA, 25 bp, Probe Sequence
gaggaggaggattaagtccacctgt

SEQ ID NO: 21455 - DNA, 25 bp, Probe Sequence
tctcgttttcctgccaaataaacag

SEQ ID NO: 21456 - DNA, 25 bp, Probe Sequence
gtctcgttttcctgccaaataaaca

SEQ ID NO: 21457 - DNA, 25 bp, Probe Sequence
tgtctcgttttcctgccaaataaac

SEQ ID NO: 21458 - DNA, 25 bp, Probe Sequence
gaggatttcttagagagacgcctgc

SEQ ID NO: 21459 - DNA, 25 bp, Probe Sequence
ggattgtctcgttttcctgccaaat

SEQ ID NO: 21460 - DNA, 25 bp, Probe Sequence
gtttgtcgcaaaacttatgtgaccc

SEQ ID NO: 21461 - DNA, 25 bp, Probe Sequence
ggtttgtcgcaaaacttatgtgacc

SEQ ID NO: 21462 - DNA, 25 bp, Probe Sequence
gggtttgtcgcaaaacttatgtgac

SEQ ID NO: 21463 - DNA, 25 bp, Probe Sequence
ctgggtttgtcgcaaaacttatgtg

SEQ ID NO: 21464 - DNA, 25 bp, Probe Sequence
tgggtttgtcgcaaaacttatgtga

SEQ ID NO: 21465 - DNA, 25 bp, Probe Sequence
tttgtcgcaaaacttatgtgacccc

SEQ ID NO: 21466 - DNA, 25 bp, Probe Sequence
gagctgggtttgtcgcaaaacttat

SEQ ID NO: 21467 - DNA, 25 bp, Probe Sequence
gctgggtttgtcgcaaaacttatgt

SEQ ID NO: 21468 - DNA, 25 bp, Probe Sequence
agctgggtttgtcgcaaaacttatg

SEQ ID NO: 21469 - DNA, 25 bp, Probe Sequence
ctcgttttcctgccaaataaacagg

SEQ ID NO: 21470 - DNA, 25 bp, Probe Sequence
cagagatgttgatgcctaagaagaa

SEQ ID NO: 21471 - DNA, 25 bp, Probe Sequence
agagatgttgatgcctaagaagaac

SEQ ID NO: 21472 - DNA, 25 bp, Probe Sequence
gagatgttgatgcctaagaagaacc

SEQ ID NO: 21473 - DNA, 25 bp, Probe Sequence
agatgttgatgcctaagaagaaccg

SEQ ID NO: 21474 - DNA, 25 bp, Probe Sequence
gacagagatacctacagacggagtg

SEQ ID NO: 21475 - DNA, 25 bp, Probe Sequence
tgacagagatacctacagacggagt

SEQ ID NO: 21476 - DNA, 25 bp, Probe Sequence
ctgacagagatacctacagacggag

SEQ ID NO: 21477 - DNA, 25 bp, Probe Sequence
gcagagatgttgatgcctaagaaga

SEQ ID NO: 21478 - DNA, 25 bp, Probe Sequence
ttgatgcctaagaagaaccggattg

SEQ ID NO: 21479 - DNA, 25 bp, Probe Sequence
gttgatgcctaagaagaaccggatt

SEQ ID NO: 21480 - DNA, 25 bp, Probe Sequence
cagagatacctacagacggagtgct

SEQ ID NO: 21481 - DNA, 25 bp, Probe Sequence
ctcagtaaaattggagaggattctt

SEQ ID NO: 21482 - DNA, 25 bp, Probe Sequence
tcagtaaaattggagaggattcttt

SEQ ID NO: 21483 - DNA, 25 bp, Probe Sequence
gtaaaattggagaggattcttttgc

SEQ ID NO: 21484 - DNA, 25 bp, Probe Sequence
aattccagtttagaggcggatttgg

SEQ ID NO: 21485 - DNA, 25 bp, Probe Sequence
gatgttgatgcctaagaagaaccgg

SEQ ID NO: 21486 - DNA, 25 bp, Probe Sequence
cgcagagatgttgatgcctaagaag

SEQ ID NO: 21487 - DNA, 25 bp, Probe Sequence
agagatacctacagacggagtgctg

SEQ ID NO: 21488 - DNA, 25 bp, Probe Sequence
gctgacagagatacctacagacgga

SEQ ID NO: 21489 - DNA, 25 bp, Probe Sequence
aattggagaggattcttttgcattg

SEQ ID NO: 21490 - DNA, 25 bp, Probe Sequence
aaattggagaggattcttttgcatt

SEQ ID NO: 21491 - DNA, 25 bp, Probe Sequence
attggagaggattcttttgcattga

SEQ ID NO: 21492 - DNA, 25 bp, Probe Sequence
ttggagaggattcttttgcattgaa

SEQ ID NO: 21493 - DNA, 25 bp, Probe Sequence
gaattccagtttagaggcggatttg

SEQ ID NO: 21494 - DNA, 25 bp, Probe Sequence
caactgtgatgagcctatgtatgtc

SEQ ID NO: 21495 - DNA, 25 bp, Probe Sequence
atccaactgtgatgagcctatgtat

SEQ ID NO: 21496 - DNA, 25 bp, Probe Sequence
tgatgagcctatgtatgtcaagttg

SEQ ID NO: 21497 - DNA, 25 bp, Probe Sequence
gtgatgagcctatgtatgtcaagtt

SEQ ID NO: 21498 - DNA, 25 bp, Probe Sequence
gccaaggatgtcattgaagagtatt

SEQ ID NO: 21499 - DNA, 25 bp, Probe Sequence
ctgtgatgagcctatgtatgtcaag

SEQ ID NO: 21500 - DNA, 25 bp, Probe Sequence
gatgagcctatgtatgtcaagttgg

SEQ ID NO: 21501 - DNA, 25 bp, Probe Sequence
tccaactgtgatgagcctatgtatg

SEQ ID NO: 21502 - DNA, 25 bp, Probe Sequence
tgtgatgagcctatgtatgtcaagt

SEQ ID NO: 21503 - DNA, 25 bp, Probe Sequence
actgtgatgagcctatgtatgtcaa

SEQ ID NO: 21504 - DNA, 25 bp, Probe Sequence
aactgtgatgagcctatgtatgtca

SEQ ID NO: 21505 - DNA, 25 bp, Probe Sequence
atgagcctatgtatgtcaagttggt

SEQ ID NO: 21506 - DNA, 25 bp, Probe Sequence
ccaactgtgatgagcctatgtatgt

SEQ ID NO: 21507 - DNA, 25 bp, Probe Sequence
tagtagttaaggactatggcaagga

SEQ ID NO: 21508 - DNA, 25 bp, Probe Sequence
gtagtagttaaggactatggcaagg

SEQ ID NO: 21509 - DNA, 25 bp, Probe Sequence
gtgtagtagttaaggactatggcaa

SEQ ID NO: 21510 - DNA, 25 bp, Probe Sequence
ttgtgtagtagttaaggactatggc

SEQ ID NO: 21511 - DNA, 25 bp, Probe Sequence
gcagttgtgtagtagttaaggacta

SEQ ID NO: 21512 - DNA, 25 bp, Probe Sequence
tgtagtagttaaggactatggcaag

SEQ ID NO: 21513 - DNA, 25 bp, Probe Sequence
tgtgtagtagttaaggactatggca

SEQ ID NO: 21514 - DNA, 25 bp, Probe Sequence
ttggttgcagttgtgtagtagttaa

SEQ ID NO: 21515 - DNA, 25 bp, Probe Sequence
ttgcagttgtgtagtagttaaggac

SEQ ID NO: 21516 - DNA, 25 bp, Probe Sequence
gttgcagttgtgtagtagttaagga

SEQ ID NO: 21517 - DNA, 25 bp, Probe Sequence
tgagcctatgtatgtcaagttggtg

SEQ ID NO: 21518 - DNA, 25 bp, Probe Sequence
ttactccttcacagatcggtgtaat

SEQ ID NO: 21519 - DNA, 25 bp, Probe Sequence
tactccttcacagatcggtgtaatc

SEQ ID NO: 21520 - DNA, 25 bp, Probe Sequence
gtaatcctgagagattcacatggtg

SEQ ID NO: 21521 - DNA, 25 bp, Probe Sequence
gtgtaatcctgagagattcacatgg

SEQ ID NO: 21522 - DNA, 25 bp, Probe Sequence
ggtgtaatcctgagagattcacatg

SEQ ID NO: 21523 - DNA, 25 bp, Probe Sequence
agatcggtgtaatcctgagagattc

SEQ ID NO: 21524 - DNA, 25 bp, Probe Sequence
taatcctgagagattcacatggtgt

SEQ ID NO: 21525 - DNA, 25 bp, Probe Sequence
tgtaatcctgagagattcacatggt

SEQ ID NO: 21526 - DNA, 25 bp, Probe Sequence
atcggtgtaatcctgagagattcac

SEQ ID NO: 21527 - DNA, 25 bp, Probe Sequence
cttactccttcacagatcggtgtaa

SEQ ID NO: 21528 - DNA, 25 bp, Probe Sequence
gatcggtgtaatcctgagagattca

SEQ ID NO: 21529 - DNA, 25 bp, Probe Sequence
cagatcggtgtaatcctgagagatt

SEQ ID NO: 21530 - DNA, 25 bp, Probe Sequence
cttggttgaagttgacatctgacga

SEQ ID NO: 21531 - DNA, 25 bp, Probe Sequence
cggtgtaatcctgagagattcacat

SEQ ID NO: 21532 - DNA, 25 bp, Probe Sequence
ttggttgaagttgacatctgacgac

SEQ ID NO: 21533 - DNA, 25 bp, Probe Sequence
aatcctgagagattcacatggtgtt

SEQ ID NO: 21534 - DNA, 25 bp, Probe Sequence
acagatcggtgtaatcctgagagat

SEQ ID NO: 21535 - DNA, 25 bp, Probe Sequence
atcctgagagattcacatggtgttg

SEQ ID NO: 21536 - DNA, 25 bp, Probe Sequence
cttcacagatcggtgtaatcctgag

SEQ ID NO: 21537 - DNA, 25 bp, Probe Sequence
ttcacagatcggtgtaatcctgaga

SEQ ID NO: 21538 - DNA, 25 bp, Probe Sequence
tcggtgtaatcctgagagattcaca

SEQ ID NO: 21539 - DNA, 25 bp, Probe Sequence
gtgaaggagcagatttacaaactgg

SEQ ID NO: 21540 - DNA, 25 bp, Probe Sequence
cacagatcggtgtaatcctgagaga

SEQ ID NO: 21541 - DNA, 25 bp, Probe Sequence
tcacagatcggtgtaatcctgagag

SEQ ID NO: 21542 - DNA, 25 bp, Probe Sequence
ctctcaagtaatggctcagctaata

SEQ ID NO: 21543 - DNA, 25 bp, Probe Sequence
tctcaagtaatggctcagctaataa

SEQ ID NO: 21544 - DNA, 25 bp, Probe Sequence
ggcagaagtagagcagaagaagaag

SEQ ID NO: 21545 - DNA, 25 bp, Probe Sequence
gatggcagaagtagagcagaagaag

SEQ ID NO: 21546 - DNA, 25 bp, Probe Sequence
caagatggcagaagtagagcagaag

SEQ ID NO: 21547 - DNA, 25 bp, Probe Sequence
cctctcaagtaatggctcagctaat

SEQ ID NO: 21548 - DNA, 25 bp, Probe Sequence
cagaagtagagcagaagaagaagcg

SEQ ID NO: 21549 - DNA, 25 bp, Probe Sequence
atggcagaagtagagcagaagaaga

SEQ ID NO: 21550 - DNA, 25 bp, Probe Sequence
agatggcagaagtagagcagaagaa

SEQ ID NO: 21551 - DNA, 25 bp, Probe Sequence
aagatggcagaagtagagcagaaga

SEQ ID NO: 21552 - DNA, 25 bp, Probe Sequence
gcagaagtagagcagaagaagaagc

SEQ ID NO: 21553 - DNA, 25 bp, Probe Sequence
tggcagaagtagagcagaagaagaa

SEQ ID NO: 21554 - DNA, 25 bp, Probe Sequence
caagtaatggctcagctaataaagg

SEQ ID NO: 21555 - DNA, 25 bp, Probe Sequence
aagtaatggctcagctaataaaggc

SEQ ID NO: 21556 - DNA, 25 bp, Probe Sequence
tcaagtaatggctcagctaataaag

SEQ ID NO: 21557 - DNA, 25 bp, Probe Sequence
ctcaagtaatggctcagctaataaa

SEQ ID NO: 21558 - DNA, 25 bp, Probe Sequence
cttcatccctctcaagtaatggctc

SEQ ID NO: 21559 - DNA, 25 bp, Probe Sequence
gaagtagagcagaagaagaagcgga

SEQ ID NO: 21560 - DNA, 25 bp, Probe Sequence
agaagtagagcagaagaagaagcgg

SEQ ID NO: 21561 - DNA, 25 bp, Probe Sequence
aagtagagcagaagaagaagcggac

SEQ ID NO: 21562 - DNA, 25 bp, Probe Sequence
ttcatccctctcaagtaatggctca

SEQ ID NO: 21563 - DNA, 25 bp, Probe Sequence
tcatccctctcaagtaatggctcag

SEQ ID NO: 21564 - DNA, 25 bp, Probe Sequence
agtaatggctcagctaataaaggcg

SEQ ID NO: 21565 - DNA, 25 bp, Probe Sequence
gcaagatggcagaagtagagcagaa

SEQ ID NO: 21566 - DNA, 25 bp, Probe Sequence
agtttggtttcattgtactgacaac

SEQ ID NO: 21567 - DNA, 25 bp, Probe Sequence
acaaataaaatgcctcatggactaa

SEQ ID NO: 21568 - DNA, 25 bp, Probe Sequence
ttacaaataaaatgcctcatggact

SEQ ID NO: 21569 - DNA, 25 bp, Probe Sequence
ccatcctgcaatctaagccacaatg

SEQ ID NO: 21570 - DNA, 25 bp, Probe Sequence
tacaaataaaatgcctcatggacta

SEQ ID NO: 21571 - DNA, 25 bp, Probe Sequence
caaataaaatgcctcatggactaaa

SEQ ID NO: 21572 - DNA, 25 bp, Probe Sequence
aaataaaatgcctcatggactaaaa

SEQ ID NO: 21573 - DNA, 25 bp, Probe Sequence
cagtttggtttcattgtactgacaa

SEQ ID NO: 21574 - DNA, 25 bp, Probe Sequence
catcctgcaatctaagccacaatgg

SEQ ID NO: 21575 - DNA, 25 bp, Probe Sequence
tttggtttcattgtactgacaacct

SEQ ID NO: 21576 - DNA, 25 bp, Probe Sequence
gtttggtttcattgtactgacaacc

SEQ ID NO: 21577 - DNA, 25 bp, Probe Sequence
ttggtttcattgtactgacaacctc

SEQ ID NO: 21578 - DNA, 25 bp, Probe Sequence
ccagtttggtttcattgtactgaca

SEQ ID NO: 21579 - DNA, 25 bp, Probe Sequence
ggtttcattgtactgacaacctcag

SEQ ID NO: 21580 - DNA, 25 bp, Probe Sequence
atcctgcaatctaagccacaatggt

SEQ ID NO: 21581 - DNA, 25 bp, Probe Sequence
tggtttcattgtactgacaacctca

SEQ ID NO: 21582 - DNA, 25 bp, Probe Sequence
gccagtttggtttcattgtactgac

SEQ ID NO: 21583 - DNA, 25 bp, Probe Sequence
atcccgccagtttggtttcattgta

SEQ ID NO: 21584 - DNA, 25 bp, Probe Sequence
cgccagtttggtttcattgtactga

SEQ ID NO: 21585 - DNA, 25 bp, Probe Sequence
actctctgagagctccaatttcatc

SEQ ID NO: 21586 - DNA, 25 bp, Probe Sequence
cactctctgagagctccaatttcat

SEQ ID NO: 21587 - DNA, 25 bp, Probe Sequence
ccgccagtttggtttcattgtactg

SEQ ID NO: 21588 - DNA, 25 bp, Probe Sequence
gtagcactctctgagagctccaatt

SEQ ID NO: 21589 - DNA, 25 bp, Probe Sequence
tctctgagagctccaatttcatccg

SEQ ID NO: 21590 - DNA, 25 bp, Probe Sequence
atcaaagacatcctcatccagtatg

SEQ ID NO: 21591 - DNA, 25 bp, Probe Sequence
gatttatgctatccgtcagtccatc

SEQ ID NO: 21592 - DNA, 25 bp, Probe Sequence
gatcaaagacatcctcatccagtat

SEQ ID NO: 21593 - DNA, 25 bp, Probe Sequence
atttatgctatccgtcagtccatct

SEQ ID NO: 21594 - DNA, 25 bp, Probe Sequence
agatttatgctatccgtcagtccat

SEQ ID NO: 21595 - DNA, 25 bp, Probe Sequence
agatcaaagacatcctcatccagta

SEQ ID NO: 21596 - DNA, 25 bp, Probe Sequence
ttatgctatccgtcagtccatctcc

SEQ ID NO: 21597 - DNA, 25 bp, Probe Sequence
tttatgctatccgtcagtccatctc

SEQ ID NO: 21598 - DNA, 25 bp, Probe Sequence
cagatttatgctatccgtcagtcca

SEQ ID NO: 21599 - DNA, 25 bp, Probe Sequence
ctaccagaaatcctaccgataagcc

SEQ ID NO: 21600 - DNA, 25 bp, Probe Sequence
cgctaccagaaatcctaccgataag

SEQ ID NO: 21601 - DNA, 25 bp, Probe Sequence
attaccagaaatatgtggatgaggc

SEQ ID NO: 21602 - DNA, 25 bp, Probe Sequence
gcctattaccagaaatatgtggatg

SEQ ID NO: 21603 - DNA, 25 bp, Probe Sequence
ttccaagaaggagatcaaagacatc

SEQ ID NO: 21604 - DNA, 25 bp, Probe Sequence
gagatcaaagacatcctcatccagt

SEQ ID NO: 21605 - DNA, 25 bp, Probe Sequence
cagaaatcctaccgataagcccatc

SEQ ID NO: 21606 - DNA, 25 bp, Probe Sequence
ccagatttatgctatccgtcagtcc

SEQ ID NO: 21607 - DNA, 25 bp, Probe Sequence
cccagatttatgctatccgtcagtc

SEQ ID NO: 21608 - DNA, 25 bp, Probe Sequence
taccagaaatatgtggatgaggctt

SEQ ID NO: 21609 - DNA, 25 bp, Probe Sequence
ttaccagaaatatgtggatgaggct

SEQ ID NO: 21610 - DNA, 25 bp, Probe Sequence
tccaagaaggagatcaaagacatcc

SEQ ID NO: 21611 - DNA, 25 bp, Probe Sequence
tattaccagaaatatgtggatgagg

SEQ ID NO: 21612 - DNA, 25 bp, Probe Sequence
cctattaccagaaatatgtggatga

SEQ ID NO: 21613 - DNA, 25 bp, Probe Sequence
taccagaaatcctaccgataagccc

SEQ ID NO: 21614 - DNA, 25 bp, Probe Sequence
gagagacaattatgttcctgaggtc

SEQ ID NO: 21615 - DNA, 25 bp, Probe Sequence
tggatcaggagattattgaagtaga

SEQ ID NO: 21616 - DNA, 25 bp, Probe Sequence
ccttggatcaggagattattgaagt

SEQ ID NO: 21617 - DNA, 25 bp, Probe Sequence
attgaagtagatcctgacactaagg

SEQ ID NO: 21618 - DNA, 25 bp, Probe Sequence
agattattgaagtagatcctgacac

SEQ ID NO: 21619 - DNA, 25 bp, Probe Sequence
caacaagatagcaggttatgtcacg

SEQ ID NO: 21620 - DNA, 25 bp, Probe Sequence
ccagtaagaggtatctccatcaagc

SEQ ID NO: 21621 - DNA, 25 bp, Probe Sequence
gccttggatcaggagattattgaag

SEQ ID NO: 21622 - DNA, 25 bp, Probe Sequence
gagattattgaagtagatcctgaca

SEQ ID NO: 21623 - DNA, 25 bp, Probe Sequence
gcaacaagatagcaggttatgtcac

SEQ ID NO: 21624 - DNA, 25 bp, Probe Sequence
aggagagagaaaggagagacaatta

SEQ ID NO: 21625 - DNA, 25 bp, Probe Sequence
gattattgaagtagatcctgacact

SEQ ID NO: 21626 - DNA, 25 bp, Probe Sequence
ttggatcaggagattattgaagtag

SEQ ID NO: 21627 - DNA, 25 bp, Probe Sequence
cttggatcaggagattattgaagta

SEQ ID NO: 21628 - DNA, 25 bp, Probe Sequence
agccttggatcaggagattattgaa

SEQ ID NO: 21629 - DNA, 25 bp, Probe Sequence
ggagagacaattatgttcctgaggt

SEQ ID NO: 21630 - DNA, 25 bp, Probe Sequence
ggagagagaaaggagagacaattat

SEQ ID NO: 21631 - DNA, 25 bp, Probe Sequence
agtaagaggtatctccatcaagctg

SEQ ID NO: 21632 - DNA, 25 bp, Probe Sequence
cagtaagaggtatctccatcaagct

SEQ ID NO: 21633 - DNA, 25 bp, Probe Sequence
aagatagcaggttatgtcacgcatc

SEQ ID NO: 21634 - DNA, 25 bp, Probe Sequence
gaggagagagaaaggagagacaatt

SEQ ID NO: 21635 - DNA, 25 bp, Probe Sequence
ggagattattgaagtagatcctgac

SEQ ID NO: 21636 - DNA, 25 bp, Probe Sequence
ctcagccttggatcaggagattatt

SEQ ID NO: 21637 - DNA, 25 bp, Probe Sequence
gagagagaaaggagagacaattatg

SEQ ID NO: 21638 - DNA, 25 bp, Probe Sequence
aacaagaagcattagaacaaaccat

SEQ ID NO: 21639 - DNA, 25 bp, Probe Sequence
caacaagaagcattagaacaaacca

SEQ ID NO: 21640 - DNA, 25 bp, Probe Sequence
ctgggttaataaattgcctcattcg

SEQ ID NO: 21641 - DNA, 25 bp, Probe Sequence
gggttaataaattgcctcattcgta

SEQ ID NO: 21642 - DNA, 25 bp, Probe Sequence
ccaacaagaagcattagaacaaacc

SEQ ID NO: 21643 - DNA, 25 bp, Probe Sequence
gctgggttaataaattgcctcattc

SEQ ID NO: 21644 - DNA, 25 bp, Probe Sequence
tgggttaataaattgcctcattcgt

SEQ ID NO: 21645 - DNA, 25 bp, Probe Sequence
tgctgggttaataaattgcctcatt

SEQ ID NO: 21646 - DNA, 25 bp, Probe Sequence
atgctgggttaataaattgcctcat

SEQ ID NO: 21647 - DNA, 25 bp, Probe Sequence
gccaacaagaagcattagaacaaac

SEQ ID NO: 21648 - DNA, 25 bp, Probe Sequence
acaagaagcattagaacaaaccatg

SEQ ID NO: 21649 - DNA, 25 bp, Probe Sequence
ggttaataaattgcctcattcgtaa

SEQ ID NO: 21650 - DNA, 25 bp, Probe Sequence
catgctgggttaataaattgcctca

SEQ ID NO: 21651 - DNA, 25 bp, Probe Sequence
ctgccaacaagaagcattagaacaa

SEQ ID NO: 21652 - DNA, 25 bp, Probe Sequence
gttaataaattgcctcattcgtaaa

SEQ ID NO: 21653 - DNA, 25 bp, Probe Sequence
ccatgctgggttaataaattgcctc

SEQ ID NO: 21654 - DNA, 25 bp, Probe Sequence
tgccaacaagaagcattagaacaaa

SEQ ID NO: 21655 - DNA, 25 bp, Probe Sequence
accatgctgggttaataaattgcct

SEQ ID NO: 21656 - DNA, 25 bp, Probe Sequence
gggacaaagagatctggacagaatc

SEQ ID NO: 21657 - DNA, 25 bp, Probe Sequence
gaacaaaccatgctgggttaataaa

SEQ ID NO: 21658 - DNA, 25 bp, Probe Sequence
tagaacaaaccatgctgggttaata

SEQ ID NO: 21659 - DNA, 25 bp, Probe Sequence
acaaaccatgctgggttaataaatt

SEQ ID NO: 21660 - DNA, 25 bp, Probe Sequence
aacaaaccatgctgggttaataaat

SEQ ID NO: 21661 - DNA, 25 bp, Probe Sequence
caaaccatgctgggttaataaattg

SEQ ID NO: 21662 - DNA, 25 bp, Probe Sequence
ttgttaagcagattacttccatcag

SEQ ID NO: 21663 - DNA, 25 bp, Probe Sequence
tgttaagcagattacttccatcagt

SEQ ID NO: 21664 - DNA, 25 bp, Probe Sequence
gagattgttaagcagattacttcca

SEQ ID NO: 21665 - DNA, 25 bp, Probe Sequence
tgagattgttaagcagattacttcc

SEQ ID NO: 21666 - DNA, 25 bp, Probe Sequence
attgttaagcagattacttccatca

SEQ ID NO: 21667 - DNA, 25 bp, Probe Sequence
agattgttaagcagattacttccat

SEQ ID NO: 21668 - DNA, 25 bp, Probe Sequence
gattgttaagcagattacttccatc

SEQ ID NO: 21669 - DNA, 25 bp, Probe Sequence
cagtccttctgagattgttaagcag

SEQ ID NO: 21670 - DNA, 25 bp, Probe Sequence
cacagtccttctgagattgttaagc

SEQ ID NO: 21671 - DNA, 25 bp, Probe Sequence
gcacagtccttctgagattgttaag

SEQ ID NO: 21672 - DNA, 25 bp, Probe Sequence
agattacttccatcagtattgagcc

SEQ ID NO: 21673 - DNA, 25 bp, Probe Sequence
attacttccatcagtattgagccag

SEQ ID NO: 21674 - DNA, 25 bp, Probe Sequence
gattacttccatcagtattgagcca

SEQ ID NO: 21675 - DNA, 25 bp, Probe Sequence
agcagattacttccatcagtattga

SEQ ID NO: 21676 - DNA, 25 bp, Probe Sequence
cagattacttccatcagtattgagc

SEQ ID NO: 21677 - DNA, 25 bp, Probe Sequence
gcagattacttccatcagtattgag

SEQ ID NO: 21678 - DNA, 25 bp, Probe Sequence
acagtccttctgagattgttaagca

SEQ ID NO: 21679 - DNA, 25 bp, Probe Sequence
aagcagattacttccatcagtattg

SEQ ID NO: 21680 - DNA, 25 bp, Probe Sequence
aaggtgtgtgctgacttgataagag

SEQ ID NO: 21681 - DNA, 25 bp, Probe Sequence
ctgagattgttaagcagattacttc

SEQ ID NO: 21682 - DNA, 25 bp, Probe Sequence
gttaagcagattacttccatcagta

SEQ ID NO: 21683 - DNA, 25 bp, Probe Sequence
accaagactttgagaatcactacaa

SEQ ID NO: 21684 - DNA, 25 bp, Probe Sequence
cctaccaagactttgagaatcacta

SEQ ID NO: 21685 - DNA, 25 bp, Probe Sequence
ccaagactttgagaatcactacaag

SEQ ID NO: 21686 - DNA, 25 bp, Probe Sequence
gtcagatgattccattctccgattg

SEQ ID NO: 21687 - DNA, 25 bp, Probe Sequence
agtcagatgattccattctccgatt

SEQ ID NO: 21688 - DNA, 25 bp, Probe Sequence
gagtcagatgattccattctccgat

SEQ ID NO: 21689 - DNA, 25 bp, Probe Sequence
ggagagaatcacagatgtggaatat

SEQ ID NO: 21690 - DNA, 25 bp, Probe Sequence
ggtgagtcagatgattccattctcc

SEQ ID NO: 21691 - DNA, 25 bp, Probe Sequence
tggagagaatcacagatgtggaata

SEQ ID NO: 21692 - DNA, 25 bp, Probe Sequence
gagagaatcacagatgtggaatatt

SEQ ID NO: 21693 - DNA, 25 bp, Probe Sequence
tgagtcagatgattccattctccga

SEQ ID NO: 21694 - DNA, 25 bp, Probe Sequence
gtgagtcagatgattccattctccg

SEQ ID NO: 21695 - DNA, 25 bp, Probe Sequence
tcagatgattccattctccgattgg

SEQ ID NO: 21696 - DNA, 25 bp, Probe Sequence
ctggagagaatcacagatgtggaat

SEQ ID NO: 21697 - DNA, 25 bp, Probe Sequence
gtaggatgggtgagtcagatgattc

SEQ ID NO: 21698 - DNA, 25 bp, Probe Sequence
ttgactggagagaatcacagatgtg

SEQ ID NO: 21699 - DNA, 25 bp, Probe Sequence
tttgactggagagaatcacagatgt

SEQ ID NO: 21700 - DNA, 25 bp, Probe Sequence
gggtgagtcagatgattccattctc

SEQ ID NO: 21701 - DNA, 25 bp, Probe Sequence
aatcacagatgtggaatatttgtca

SEQ ID NO: 21702 - DNA, 25 bp, Probe Sequence
actggagagaatcacagatgtggaa

SEQ ID NO: 21703 - DNA, 25 bp, Probe Sequence
atcacagatgtggaatatttgtcat

SEQ ID NO: 21704 - DNA, 25 bp, Probe Sequence
agaatcacagatgtggaatatttgt

SEQ ID NO: 21705 - DNA, 25 bp, Probe Sequence
gaatcacagatgtggaatatttgtc

SEQ ID NO: 21706 - DNA, 25 bp, Probe Sequence
gagaatcacagatgtggaatatttg

SEQ ID NO: 21707 - DNA, 25 bp, Probe Sequence
tcacagatgtggaatatttgtcata

SEQ ID NO: 21708 - DNA, 25 bp, Probe Sequence
agagaatcacagatgtggaatattt

SEQ ID NO: 21709 - DNA, 25 bp, Probe Sequence
aagaacttttgactggagagaatca

SEQ ID NO: 21710 - DNA, 25 bp, Probe Sequence
attctgccattaggaagtgtgtaag

SEQ ID NO: 21711 - DNA, 25 bp, Probe Sequence
aattctgccattaggaagtgtgtaa

SEQ ID NO: 21712 - DNA, 25 bp, Probe Sequence
ttctgccattaggaagtgtgtaagg

SEQ ID NO: 21713 - DNA, 25 bp, Probe Sequence
atgatgaagttctggttgctggatt

SEQ ID NO: 21714 - DNA, 25 bp, Probe Sequence
aatgatgaagttctggttgctggat

SEQ ID NO: 21715 - DNA, 25 bp, Probe Sequence
ctatacaaaggcaagaaggaaagac

SEQ ID NO: 21716 - DNA, 25 bp, Probe Sequence
tatacaaaggcaagaaggaaagacc

SEQ ID NO: 21717 - DNA, 25 bp, Probe Sequence
ggttgcttgaactttattgaggaaa

SEQ ID NO: 21718 - DNA, 25 bp, Probe Sequence
tgtcaaagtagccaatgtttctctt

SEQ ID NO: 21719 - DNA, 25 bp, Probe Sequence
aaattctgccattaggaagtgtgta

SEQ ID NO: 21720 - DNA, 25 bp, Probe Sequence
tttaaggttgtcaaagtagccaatg

SEQ ID NO: 21721 - DNA, 25 bp, Probe Sequence
aatgacggttgcttgaactttattg

SEQ ID NO: 21722 - DNA, 25 bp, Probe Sequence
ttgtcaaagtagccaatgtttctct

SEQ ID NO: 21723 - DNA, 25 bp, Probe Sequence
gttgtcaaagtagccaatgtttctc

SEQ ID NO: 21724 - DNA, 25 bp, Probe Sequence
taaggttgtcaaagtagccaatgtt

SEQ ID NO: 21725 - DNA, 25 bp, Probe Sequence
ttaaggttgtcaaagtagccaatgt

SEQ ID NO: 21726 - DNA, 25 bp, Probe Sequence
caatgacggttgcttgaactttatt

SEQ ID NO: 21727 - DNA, 25 bp, Probe Sequence
gcaagaaggaaagaccaagatcata

SEQ ID NO: 21728 - DNA, 25 bp, Probe Sequence
atgacggttgcttgaactttattga

SEQ ID NO: 21729 - DNA, 25 bp, Probe Sequence
caagaaggaaagaccaagatcataa

SEQ ID NO: 21730 - DNA, 25 bp, Probe Sequence
aaggttgtcaaagtagccaatgttt

SEQ ID NO: 21731 - DNA, 25 bp, Probe Sequence
caaattctgccattaggaagtgtgt

SEQ ID NO: 21732 - DNA, 25 bp, Probe Sequence
cagaagtggcatgataaacagtata

SEQ ID NO: 21733 - DNA, 25 bp, Probe Sequence
atacaaaggcaagaaggaaagacca

SEQ ID NO: 21734 - DNA, 25 bp, Probe Sequence
ctaaggacgacaagaagaagaagga

SEQ ID NO: 21735 - DNA, 25 bp, Probe Sequence
taaggacgacaagaagaagaaggac

SEQ ID NO: 21736 - DNA, 25 bp, Probe Sequence
aaagacaaagacccagtgaacaaat

SEQ ID NO: 21737 - DNA, 25 bp, Probe Sequence
aagacaaagacccagtgaacaaatc

SEQ ID NO: 21738 - DNA, 25 bp, Probe Sequence
gacttatcaaactggtttcaaagca

SEQ ID NO: 21739 - DNA, 25 bp, Probe Sequence
gcctaaggacgacaagaagaagaag

SEQ ID NO: 21740 - DNA, 25 bp, Probe Sequence
cttatcaaactggtttcaaagcaca

SEQ ID NO: 21741 - DNA, 25 bp, Probe Sequence
acttatcaaactggtttcaaagcac

SEQ ID NO: 21742 - DNA, 25 bp, Probe Sequence
aggacttatcaaactggtttcaaag

SEQ ID NO: 21743 - DNA, 25 bp, Probe Sequence
aaggacttatcaaactggtttcaaa

SEQ ID NO: 21744 - DNA, 25 bp, Probe Sequence
aaaggacttatcaaactggtttcaa

SEQ ID NO: 21745 - DNA, 25 bp, Probe Sequence
gaaagacaaagacccagtgaacaaa

SEQ ID NO: 21746 - DNA, 25 bp, Probe Sequence
ggacttatcaaactggtttcaaagc

SEQ ID NO: 21747 - DNA, 25 bp, Probe Sequence
cctaaggacgacaagaagaagaagg

SEQ ID NO: 21748 - DNA, 25 bp, Probe Sequence
caagaaagacaaagacccagtgaac

SEQ ID NO: 21749 - DNA, 25 bp, Probe Sequence
taaaggacttatcaaactggtttca

SEQ ID NO: 21750 - DNA, 25 bp, Probe Sequence
taatttacaccagaaataccaaggg

SEQ ID NO: 21751 - DNA, 25 bp, Probe Sequence
ttatcaaactggtttcaaagcacag

SEQ ID NO: 21752 - DNA, 25 bp, Probe Sequence
gtaaaggacttatcaaactggtttc

SEQ ID NO: 21753 - DNA, 25 bp, Probe Sequence
agaaagacaaagacccagtgaacaa

SEQ ID NO: 21754 - DNA, 25 bp, Probe Sequence
aagaaagacaaagacccagtgaaca

SEQ ID NO: 21755 - DNA, 25 bp, Probe Sequence
tatcaaactggtttcaaagcacaga

SEQ ID NO: 21756 - DNA, 25 bp, Probe Sequence
agtaaaggacttatcaaactggttt

SEQ ID NO: 21757 - DNA, 25 bp, Probe Sequence
aatttacaccagaaataccaagggt

SEQ ID NO: 21758 - DNA, 25 bp, Probe Sequence
aagactgaagacaggctattctctg

SEQ ID NO: 21759 - DNA, 25 bp, Probe Sequence
gaagctacattactgtgtgagttgt

SEQ ID NO: 21760 - DNA, 25 bp, Probe Sequence
tgaagctacattactgtgtgagttg

SEQ ID NO: 21761 - DNA, 25 bp, Probe Sequence
gtgaagctacattactgtgtgagtt

SEQ ID NO: 21762 - DNA, 25 bp, Probe Sequence
aagctacattactgtgtgagttgtg

SEQ ID NO: 21763 - DNA, 25 bp, Probe Sequence
cattactgtgtgagttgtgcaattc

SEQ ID NO: 21764 - DNA, 25 bp, Probe Sequence
tacattactgtgtgagttgtgcaat

SEQ ID NO: 21765 - DNA, 25 bp, Probe Sequence
attactgtgtgagttgtgcaattca

SEQ ID NO: 21766 - DNA, 25 bp, Probe Sequence
caattcacagcaaagtagtcaggaa

SEQ ID NO: 21767 - DNA, 25 bp, Probe Sequence
taaagactgaagacaggctattctc

SEQ ID NO: 21768 - DNA, 25 bp, Probe Sequence
tgtgaagctacattactgtgtgagt

SEQ ID NO: 21769 - DNA, 25 bp, Probe Sequence
ttaaagactgaagacaggctattct

SEQ ID NO: 21770 - DNA, 25 bp, Probe Sequence
cttaaagactgaagacaggctattc

SEQ ID NO: 21771 - DNA, 25 bp, Probe Sequence
ctacattactgtgtgagttgtgcaa

SEQ ID NO: 21772 - DNA, 25 bp, Probe Sequence
acattactgtgtgagttgtgcaatt

SEQ ID NO: 21773 - DNA, 25 bp, Probe Sequence
aaagactgaagacaggctattctct

SEQ ID NO: 21774 - DNA, 25 bp, Probe Sequence
aattcacagcaaagtagtcaggaat

SEQ ID NO: 21775 - DNA, 25 bp, Probe Sequence
actgaagacaggctattctctggag

SEQ ID NO: 21776 - DNA, 25 bp, Probe Sequence
gactgaagacaggctattctctgga

SEQ ID NO: 21777 - DNA, 25 bp, Probe Sequence
agactgaagacaggctattctctgg

SEQ ID NO: 21778 - DNA, 25 bp, Probe Sequence
attcacagcaaagtagtcaggaatc

SEQ ID NO: 21779 - DNA, 25 bp, Probe Sequence
ctgaagacaggctattctctggaga

SEQ ID NO: 21780 - DNA, 25 bp, Probe Sequence
tatgtgaagctacattactgtgtga

SEQ ID NO: 21781 - DNA, 25 bp, Probe Sequence
gtatgtgaagctacattactgtgtg

SEQ ID NO: 21782 - DNA, 25 bp, Probe Sequence
aagaggagaagaggaaacacaagaa

SEQ ID NO: 21783 - DNA, 25 bp, Probe Sequence
gaggagaagaggaaacacaagaaga

SEQ ID NO: 21784 - DNA, 25 bp, Probe Sequence
agaggagaagaggaaacacaagaag

SEQ ID NO: 21785 - DNA, 25 bp, Probe Sequence
gaagaggagaagaggaaacacaaga

SEQ ID NO: 21786 - DNA, 25 bp, Probe Sequence
agaagaggagaagaggaaacacaag

SEQ ID NO: 21787 - DNA, 25 bp, Probe Sequence
cagaagaggagaagaggaaacacaa

SEQ ID NO: 21788 - DNA, 25 bp, Probe Sequence
ccaattcctacttcatggatgtgaa

SEQ ID NO: 21789 - DNA, 25 bp, Probe Sequence
ccagaagaggagaagaggaaacaca

SEQ ID NO: 21790 - DNA, 25 bp, Probe Sequence
caattcctacttcatggatgtgaaa

SEQ ID NO: 21791 - DNA, 25 bp, Probe Sequence
cccaattcctacttcatggatgtga

SEQ ID NO: 21792 - DNA, 25 bp, Probe Sequence
aattcctacttcatggatgtgaaat

SEQ ID NO: 21793 - DNA, 25 bp, Probe Sequence
tccagaagaggagaagaggaaacac

SEQ ID NO: 21794 - DNA, 25 bp, Probe Sequence
ccccaattcctacttcatggatgtg

SEQ ID NO: 21795 - DNA, 25 bp, Probe Sequence
gagccccaattcctacttcatggat

SEQ ID NO: 21796 - DNA, 25 bp, Probe Sequence
ctccagaagaggagaagaggaaaca

SEQ ID NO: 21797 - DNA, 25 bp, Probe Sequence
agccccaattcctacttcatggatg

SEQ ID NO: 21798 - DNA, 25 bp, Probe Sequence
gccccaattcctacttcatggatgt

SEQ ID NO: 21799 - DNA, 25 bp, Probe Sequence
cagagccccaattcctacttcatgg

SEQ ID NO: 21800 - DNA, 25 bp, Probe Sequence
agagccccaattcctacttcatgga

SEQ ID NO: 21801 - DNA, 25 bp, Probe Sequence
aaataaagcgtttgtgtttcaagtt

SEQ ID NO: 21802 - DNA, 25 bp, Probe Sequence
taaagcgtttgtgtttcaagttaaa

SEQ ID NO: 21803 - DNA, 25 bp, Probe Sequence
ataaagcgtttgtgtttcaagttaa

SEQ ID NO: 21804 - DNA, 25 bp, Probe Sequence
aataaagcgtttgtgtttcaagtta

SEQ ID NO: 21805 - DNA, 25 bp, Probe Sequence
taaataaagcgtttgtgtttcaagt

SEQ ID NO: 21806 - DNA, 25 bp, Probe Sequence
ttaaataaagcgtttgtgtttcaag

SEQ ID NO: 21807 - DNA, 25 bp, Probe Sequence
aatggtctgtcacaatctgctcctt

SEQ ID NO: 21808 - DNA, 25 bp, Probe Sequence
cgtaactgagatgctcctttaaata

SEQ ID NO: 21809 - DNA, 25 bp, Probe Sequence
acgtaactgagatgctcctttaaat

SEQ ID NO: 21810 - DNA, 25 bp, Probe Sequence
cacgtaactgagatgctcctttaaa

SEQ ID NO: 21811 - DNA, 25 bp, Probe Sequence
gatgggaatggtctgtcacaatctg

SEQ ID NO: 21812 - DNA, 25 bp, Probe Sequence
aaagcgtttgtgtttcaagttaaaa

SEQ ID NO: 21813 - DNA, 25 bp, Probe Sequence
gaatggtctgtcacaatctgctcct

SEQ ID NO: 21814 - DNA, 25 bp, Probe Sequence
acacgtaactgagatgctcctttaa

SEQ ID NO: 21815 - DNA, 25 bp, Probe Sequence
atgctcctttaaataaagcgtttgt

SEQ ID NO: 21816 - DNA, 25 bp, Probe Sequence
gagatgctcctttaaataaagcgtt

SEQ ID NO: 21817 - DNA, 25 bp, Probe Sequence
gatgctcctttaaataaagcgtttg

SEQ ID NO: 21818 - DNA, 25 bp, Probe Sequence
ctgagatgctcctttaaataaagcg

SEQ ID NO: 21819 - DNA, 25 bp, Probe Sequence
agatgctcctttaaataaagcgttt

SEQ ID NO: 21820 - DNA, 25 bp, Probe Sequence
actgagatgctcctttaaataaagc

SEQ ID NO: 21821 - DNA, 25 bp, Probe Sequence
ctcctttaaataaagcgtttgtgtt

SEQ ID NO: 21822 - DNA, 25 bp, Probe Sequence
gctcctttaaataaagcgtttgtgt

SEQ ID NO: 21823 - DNA, 25 bp, Probe Sequence
tgctcctttaaataaagcgtttgtg

SEQ ID NO: 21824 - DNA, 25 bp, Probe Sequence
tgagatgctcctttaaataaagcgt

SEQ ID NO: 21825 - DNA, 25 bp, Probe Sequence
tcggtttcattaagttggactaaat

SEQ ID NO: 21826 - DNA, 25 bp, Probe Sequence
atcggtttcattaagttggactaaa

SEQ ID NO: 21827 - DNA, 25 bp, Probe Sequence
taagttggactaaatgctcttcctt

SEQ ID NO: 21828 - DNA, 25 bp, Probe Sequence
ttaagttggactaaatgctcttcct

SEQ ID NO: 21829 - DNA, 25 bp, Probe Sequence
tatcggtttcattaagttggactaa

SEQ ID NO: 21830 - DNA, 25 bp, Probe Sequence
attaagttggactaaatgctcttcc

SEQ ID NO: 21831 - DNA, 25 bp, Probe Sequence
aagttggactaaatgctcttccttc

SEQ ID NO: 21832 - DNA, 25 bp, Probe Sequence
atatcggtttcattaagttggacta

SEQ ID NO: 21833 - DNA, 25 bp, Probe Sequence
ttggactaaatgctcttccttcaga

SEQ ID NO: 21834 - DNA, 25 bp, Probe Sequence
gttggactaaatgctcttccttcag

SEQ ID NO: 21835 - DNA, 25 bp, Probe Sequence
ggatatcggtttcattaagttggac

SEQ ID NO: 21836 - DNA, 25 bp, Probe Sequence
aggatatcggtttcattaagttgga

SEQ ID NO: 21837 - DNA, 25 bp, Probe Sequence
aaggatatcggtttcattaagttgg

SEQ ID NO: 21838 - DNA, 25 bp, Probe Sequence
agttggactaaatgctcttccttca

SEQ ID NO: 21839 - DNA, 25 bp, Probe Sequence
ggtttcattaagttggactaaatgc

SEQ ID NO: 21840 - DNA, 25 bp, Probe Sequence
cggtttcattaagttggactaaatg

SEQ ID NO: 21841 - DNA, 25 bp, Probe Sequence
tcattaagttggactaaatgctctt

SEQ ID NO: 21842 - DNA, 25 bp, Probe Sequence
ttcattaagttggactaaatgctct

SEQ ID NO: 21843 - DNA, 25 bp, Probe Sequence
gatatcggtttcattaagttggact

SEQ ID NO: 21844 - DNA, 25 bp, Probe Sequence
cattaagttggactaaatgctcttc

SEQ ID NO: 21845 - DNA, 25 bp, Probe Sequence
gtttcattaagttggactaaatgct

SEQ ID NO: 21846 - DNA, 25 bp, Probe Sequence
gaaggatatcggtttcattaagttg

SEQ ID NO: 21847 - DNA, 25 bp, Probe Sequence
tttcattaagttggactaaatgctc

SEQ ID NO: 21848 - DNA, 25 bp, Probe Sequence
aatgctcttccttcagaggattatc

SEQ ID NO: 21849 - DNA, 25 bp, Probe Sequence
gactgaatcttgcccgtttatgtat

SEQ ID NO: 21850 - DNA, 25 bp, Probe Sequence
actgaatcttgcccgtttatgtatg

SEQ ID NO: 21851 - DNA, 25 bp, Probe Sequence
ccgtttatgtatgctccatgtctag

SEQ ID NO: 21852 - DNA, 25 bp, Probe Sequence
gaatcttgcccgtttatgtatgctc

SEQ ID NO: 21853 - DNA, 25 bp, Probe Sequence
ccctgtgtctttcatacctctacat

SEQ ID NO: 21854 - DNA, 25 bp, Probe Sequence
ctgaatcttgcccgtttatgtatgc

SEQ ID NO: 21855 - DNA, 25 bp, Probe Sequence
ctcccgtagcacactataacatctg

SEQ ID NO: 21856 - DNA, 25 bp, Probe Sequence
cctgtgtctttcatacctctacatg

SEQ ID NO: 21857 - DNA, 25 bp, Probe Sequence
tgaatcttgcccgtttatgtatgct

SEQ ID NO: 21858 - DNA, 25 bp, Probe Sequence
ggactgaatcttgcccgtttatgta

SEQ ID NO: 21859 - DNA, 25 bp, Probe Sequence
gatgtctgctcctcctcttgaactt

SEQ ID NO: 21860 - DNA, 25 bp, Probe Sequence
caggaagttgctccaagaacagtag

SEQ ID NO: 21861 - DNA, 25 bp, Probe Sequence
cccgtttatgtatgctccatgtcta

SEQ ID NO: 21862 - DNA, 25 bp, Probe Sequence
aactttcctaagaaaccgctgataa

SEQ ID NO: 21863 - DNA, 25 bp, Probe Sequence
agctcaataaatgtttgttgcatga

SEQ ID NO: 21864 - DNA, 25 bp, Probe Sequence
gctcaataaatgtttgttgcatgaa

SEQ ID NO: 21865 - DNA, 25 bp, Probe Sequence
gaactttcctaagaaaccgctgata

SEQ ID NO: 21866 - DNA, 25 bp, Probe Sequence
atgtctgctcctcctcttgaacttg

SEQ ID NO: 21867 - DNA, 25 bp, Probe Sequence
tctcccttcccaactagactgtaag

SEQ ID NO: 21868 - DNA, 25 bp, Probe Sequence
actttcctaagaaaccgctgataac

SEQ ID NO: 21869 - DNA, 25 bp, Probe Sequence
tcaggaagttgctccaagaacagta

SEQ ID NO: 21870 - DNA, 25 bp, Probe Sequence
ttagaaccctgctcagacaccatta

SEQ ID NO: 21871 - DNA, 25 bp, Probe Sequence
ttcctaagaaaccgctgataaccag

SEQ ID NO: 21872 - DNA, 25 bp, Probe Sequence
gatatttcctcagcctgaaagtttc

SEQ ID NO: 21873 - DNA, 25 bp, Probe Sequence
tacactaatagaaacttggcactcc

SEQ ID NO: 21874 - DNA, 25 bp, Probe Sequence
ttacactaatagaaacttggcactc

SEQ ID NO: 21875 - DNA, 25 bp, Probe Sequence
cactaatagaaacttggcactcctg

SEQ ID NO: 21876 - DNA, 25 bp, Probe Sequence
gttacactaatagaaacttggcact

SEQ ID NO: 21877 - DNA, 25 bp, Probe Sequence
tgttacactaatagaaacttggcac

SEQ ID NO: 21878 - DNA, 25 bp, Probe Sequence
actaatagaaacttggcactcctgt

SEQ ID NO: 21879 - DNA, 25 bp, Probe Sequence
acactaatagaaacttggcactcct

SEQ ID NO: 21880 - DNA, 25 bp, Probe Sequence
atgttacactaatagaaacttggca

SEQ ID NO: 21881 - DNA, 25 bp, Probe Sequence
ctaatagaaacttggcactcctgtg

SEQ ID NO: 21882 - DNA, 25 bp, Probe Sequence
acatagcaagctgaactgtcctaag

SEQ ID NO: 21883 - DNA, 25 bp, Probe Sequence
catgttacactaatagaaacttggc

SEQ ID NO: 21884 - DNA, 25 bp, Probe Sequence
catagcaagctgaactgtcctaagg

SEQ ID NO: 21885 - DNA, 25 bp, Probe Sequence
cacatagcaagctgaactgtcctaa

SEQ ID NO: 21886 - DNA, 25 bp, Probe Sequence
tcatgttacactaatagaaacttgg

SEQ ID NO: 21887 - DNA, 25 bp, Probe Sequence
atagcaagctgaactgtcctaaggc

SEQ ID NO: 21888 - DNA, 25 bp, Probe Sequence
gcacatagcaagctgaactgtccta

SEQ ID NO: 21889 - DNA, 25 bp, Probe Sequence
caagcacatagcaagctgaactgtc

SEQ ID NO: 21890 - DNA, 25 bp, Probe Sequence
gacaagcacatagcaagctgaactg

SEQ ID NO: 21891 - DNA, 25 bp, Probe Sequence
atcatgttacactaatagaaacttg

SEQ ID NO: 21892 - DNA, 25 bp, Probe Sequence
caatcatgttacactaatagaaact

SEQ ID NO: 21893 - DNA, 25 bp, Probe Sequence
tcaatcatgttacactaatagaaac

SEQ ID NO: 21894 - DNA, 25 bp, Probe Sequence
gctgtggacttttgtacatacacta

SEQ ID NO: 21895 - DNA, 25 bp, Probe Sequence
ctgtggacttttgtacatacactaa

SEQ ID NO: 21896 - DNA, 25 bp, Probe Sequence
tgtggacttttgtacatacactaaa

SEQ ID NO: 21897 - DNA, 25 bp, Probe Sequence
ctgttgatgtaatgatgtggaactc

SEQ ID NO: 21898 - DNA, 25 bp, Probe Sequence
gatgtaatgatgtggaactcctcta

SEQ ID NO: 21899 - DNA, 25 bp, Probe Sequence
actgttgatgtaatgatgtggaact

SEQ ID NO: 21900 - DNA, 25 bp, Probe Sequence
ttgatgtaatgatgtggaactcctc

SEQ ID NO: 21901 - DNA, 25 bp, Probe Sequence
atgtaatgatgtggaactcctctaa

SEQ ID NO: 21902 - DNA, 25 bp, Probe Sequence
tgatgtaatgatgtggaactcctct

SEQ ID NO: 21903 - DNA, 25 bp, Probe Sequence
ttagtgaacttctgttgtcctcaag

SEQ ID NO: 21904 - DNA, 25 bp, Probe Sequence
cttagtgaacttctgttgtcctcaa

SEQ ID NO: 21905 - DNA, 25 bp, Probe Sequence
gttgatgtaatgatgtggaactcct

SEQ ID NO: 21906 - DNA, 25 bp, Probe Sequence
atccttagtgaacttctgttgtcct

SEQ ID NO: 21907 - DNA, 25 bp, Probe Sequence
catccttagtgaacttctgttgtcc

SEQ ID NO: 21908 - DNA, 25 bp, Probe Sequence
tgttgatgtaatgatgtggaactcc

SEQ ID NO: 21909 - DNA, 25 bp, Probe Sequence
attcacactgttgatgtaatgatgt

SEQ ID NO: 21910 - DNA, 25 bp, Probe Sequence
gcatccttagtgaacttctgttgtc

SEQ ID NO: 21911 - DNA, 25 bp, Probe Sequence
tccttagtgaacttctgttgtcctc

SEQ ID NO: 21912 - DNA, 25 bp, Probe Sequence
cactgttgatgtaatgatgtggaac

SEQ ID NO: 21913 - DNA, 25 bp, Probe Sequence
acactgttgatgtaatgatgtggaa

SEQ ID NO: 21914 - DNA, 25 bp, Probe Sequence
ccttagtgaacttctgttgtcctca

SEQ ID NO: 21915 - DNA, 25 bp, Probe Sequence
aattcacactgttgatgtaatgatg

SEQ ID NO: 21916 - DNA, 25 bp, Probe Sequence
tctacttgtaaactatggtgctcag

SEQ ID NO: 21917 - DNA, 25 bp, Probe Sequence
ttctacttgtaaactatggtgctca

SEQ ID NO: 21918 - DNA, 25 bp, Probe Sequence
atgaaacctactccattgataacga

SEQ ID NO: 21919 - DNA, 25 bp, Probe Sequence
aaacacagatgaaacctactccatt

SEQ ID NO: 21920 - DNA, 25 bp, Probe Sequence
gatgaaacctactccattgataacg

SEQ ID NO: 21921 - DNA, 25 bp, Probe Sequence
ggactataacctgaacgacatactt

SEQ ID NO: 21922 - DNA, 25 bp, Probe Sequence
catcacctgactataccttacttcc

SEQ ID NO: 21923 - DNA, 25 bp, Probe Sequence
gcatcacctgactataccttacttc

SEQ ID NO: 21924 - DNA, 25 bp, Probe Sequence
tataacctgaacgacatacttctcc

SEQ ID NO: 21925 - DNA, 25 bp, Probe Sequence
atcacctgactataccttacttccg

SEQ ID NO: 21926 - DNA, 25 bp, Probe Sequence
actataacctgaacgacatacttct

SEQ ID NO: 21927 - DNA, 25 bp, Probe Sequence
caagatactcatcagtcaaggttct

SEQ ID NO: 21928 - DNA, 25 bp, Probe Sequence
ataacctgaacgacatacttctcca

SEQ ID NO: 21929 - DNA, 25 bp, Probe Sequence
gactataacctgaacgacatacttc

SEQ ID NO: 21930 - DNA, 25 bp, Probe Sequence
tccataaggtcgtgtctgatgtatt

SEQ ID NO: 21931 - DNA, 25 bp, Probe Sequence
caatgatggtcctggtgaattacat

SEQ ID NO: 21932 - DNA, 25 bp, Probe Sequence
gatactcatcagtcaaggttctact

SEQ ID NO: 21933 - DNA, 25 bp, Probe Sequence
agatactcatcagtcaaggttctac

SEQ ID NO: 21934 - DNA, 25 bp, Probe Sequence
ctataacctgaacgacatacttctc

SEQ ID NO: 21935 - DNA, 25 bp, Probe Sequence
ccaagatactcatcagtcaaggttc

SEQ ID NO: 21936 - DNA, 25 bp, Probe Sequence
atggtcctggtgaattacatcttct

SEQ ID NO: 21937 - DNA, 25 bp, Probe Sequence
atactcatcagtcaaggttctactt

SEQ ID NO: 21938 - DNA, 25 bp, Probe Sequence
aagatactcatcagtcaaggttcta

SEQ ID NO: 21939 - DNA, 25 bp, Probe Sequence
tggtcctggtgaattacatcttctt

SEQ ID NO: 21940 - DNA, 25 bp, Probe Sequence
gtccataaggtcgtgtctgatgtat

SEQ ID NO: 21941 - DNA, 25 bp, Probe Sequence
acaatgatggtcctggtgaattaca

SEQ ID NO: 21942 - DNA, 25 bp, Probe Sequence
gacaatgatggtcctggtgaattac

SEQ ID NO: 21943 - DNA, 25 bp, Probe Sequence
agacaatgatggtcctggtgaatta

SEQ ID NO: 21944 - DNA, 25 bp, Probe Sequence
taacctgaacgacatacttctccag

SEQ ID NO: 21945 - DNA, 25 bp, Probe Sequence
atatctgacatcctggagtggaaga

SEQ ID NO: 21946 - DNA, 25 bp, Probe Sequence
catatctgacatcctggagtggaag

SEQ ID NO: 21947 - DNA, 25 bp, Probe Sequence
tcatatctgacatcctggagtggaa

SEQ ID NO: 21948 - DNA, 25 bp, Probe Sequence
tatctgacatcctggagtggaagac

SEQ ID NO: 21949 - DNA, 25 bp, Probe Sequence
ccgtggactgtgtgatatacctgag

SEQ ID NO: 21950 - DNA, 25 bp, Probe Sequence
gtggactgtgtgatatacctgagcc

SEQ ID NO: 21951 - DNA, 25 bp, Probe Sequence
ggactgtgtgatatacctgagccag

SEQ ID NO: 21952 - DNA, 25 bp, Probe Sequence
cgtggactgtgtgatatacctgagc

SEQ ID NO: 21953 - DNA, 25 bp, Probe Sequence
gactgtgtgatatacctgagccagc

SEQ ID NO: 21954 - DNA, 25 bp, Probe Sequence
gtgatatacctgagccagcacatca

SEQ ID NO: 21955 - DNA, 25 bp, Probe Sequence
tggactgtgtgatatacctgagcca

SEQ ID NO: 21956 - DNA, 25 bp, Probe Sequence
ctgtgtgatatacctgagccagcac

SEQ ID NO: 21957 - DNA, 25 bp, Probe Sequence
gtcatatctgacatcctggagtgga

SEQ ID NO: 21958 - DNA, 25 bp, Probe Sequence
tgagaacatcacgtacctgaagcac

SEQ ID NO: 21959 - DNA, 25 bp, Probe Sequence
tgatatacctgagccagcacatcag

SEQ ID NO: 21960 - DNA, 25 bp, Probe Sequence
cgtcatatctgacatcctggagtgg

SEQ ID NO: 21961 - DNA, 25 bp, Probe Sequence
tgtgatatacctgagccagcacatc

SEQ ID NO: 21962 - DNA, 25 bp, Probe Sequence
gatatacctgagccagcacatcagc

SEQ ID NO: 21963 - DNA, 25 bp, Probe Sequence
gcgtcatatctgacatcctggagtg

SEQ ID NO: 21964 - DNA, 25 bp, Probe Sequence
gtgtgatatacctgagccagcacat

SEQ ID NO: 21965 - DNA, 25 bp, Probe Sequence
gtgagaacatcacgtacctgaagca

SEQ ID NO: 21966 - DNA, 25 bp, Probe Sequence
gagaagggcgtcatatctgacatcc

SEQ ID NO: 21967 - DNA, 25 bp, Probe Sequence
ggagaagggcgtcatatctgacatc

SEQ ID NO: 21968 - DNA, 25 bp, Probe Sequence
gaagggcgtcatatctgacatcctg

SEQ ID NO: 21969 - DNA, 25 bp, Probe Sequence
ctgtgcaagagagatatgtggagaa

SEQ ID NO: 21970 - DNA, 25 bp, Probe Sequence
tatctctgctcaccttccttggtat

SEQ ID NO: 21971 - DNA, 25 bp, Probe Sequence
aataatgtgcatgactggagactgg

SEQ ID NO: 21972 - DNA, 25 bp, Probe Sequence
ctatctctgctcaccttccttggta

SEQ ID NO: 21973 - DNA, 25 bp, Probe Sequence
tatgggaacaataaaccagtaaagg

SEQ ID NO: 21974 - DNA, 25 bp, Probe Sequence
atgggaacaataaaccagtaaaggc

SEQ ID NO: 21975 - DNA, 25 bp, Probe Sequence
cagtgtccgtggttgctaaagataa

SEQ ID NO: 21976 - DNA, 25 bp, Probe Sequence
atctctgctcaccttccttggtatt

SEQ ID NO: 21977 - DNA, 25 bp, Probe Sequence
aaataatgtgcatgactggagactg

SEQ ID NO: 21978 - DNA, 25 bp, Probe Sequence
tttcggagcaaaggaaattacatat

SEQ ID NO: 21979 - DNA, 25 bp, Probe Sequence
gcaaaggaaattacatatgggaaca

SEQ ID NO: 21980 - DNA, 25 bp, Probe Sequence
agcaaaggaaattacatatgggaac

SEQ ID NO: 21981 - DNA, 25 bp, Probe Sequence
agtgtccgtggttgctaaagataac

SEQ ID NO: 21982 - DNA, 25 bp, Probe Sequence
tgtgcaagagagatatgtggagaaa

SEQ ID NO: 21983 - DNA, 25 bp, Probe Sequence
gagcaaaggaaattacatatgggaa

SEQ ID NO: 21984 - DNA, 25 bp, Probe Sequence
ggagcaaaggaaattacatatggga

SEQ ID NO: 21985 - DNA, 25 bp, Probe Sequence
ttcggagcaaaggaaattacatatg

SEQ ID NO: 21986 - DNA, 25 bp, Probe Sequence
tcggagcaaaggaaattacatatgg

SEQ ID NO: 21987 - DNA, 25 bp, Probe Sequence
ttgagatgctaccaactgccattct

SEQ ID NO: 21988 - DNA, 25 bp, Probe Sequence
gcaagagagatatgtggagaaaatc

SEQ ID NO: 21989 - DNA, 25 bp, Probe Sequence
cctgtgcaagagagatatgtggaga

SEQ ID NO: 21990 - DNA, 25 bp, Probe Sequence
ataatgtgcatgactggagactggt

SEQ ID NO: 21991 - DNA, 25 bp, Probe Sequence
ctggggatatatagaagagaaagcc

SEQ ID NO: 21992 - DNA, 25 bp, Probe Sequence
ggctggggatatatagaagagaaag

SEQ ID NO: 21993 - DNA, 25 bp, Probe Sequence
accgagttctgtagattcttgttag

SEQ ID NO: 21994 - DNA, 25 bp, Probe Sequence
gaccgagttctgtagattcttgtta

SEQ ID NO: 21995 - DNA, 25 bp, Probe Sequence
attgaccgagttctgtagattcttg

SEQ ID NO: 21996 - DNA, 25 bp, Probe Sequence
tattgaccgagttctgtagattctt

SEQ ID NO: 21997 - DNA, 25 bp, Probe Sequence
ttattgaccgagttctgtagattct

SEQ ID NO: 21998 - DNA, 25 bp, Probe Sequence
ccgagttctgtagattcttgttaga

SEQ ID NO: 21999 - DNA, 25 bp, Probe Sequence
attattgaccgagttctgtagattc

SEQ ID NO: 22000 - DNA, 25 bp, Probe Sequence
tgaccgagttctgtagattcttgtt

SEQ ID NO: 22001 - DNA, 25 bp, Probe Sequence
ttgaccgagttctgtagattcttgt

SEQ ID NO: 22002 - DNA, 25 bp, Probe Sequence
aattattgaccgagttctgtagatt

SEQ ID NO: 22003 - DNA, 25 bp, Probe Sequence
ttcttgagacctcagatgtgtgttc

SEQ ID NO: 22004 - DNA, 25 bp, Probe Sequence
aaattattgaccgagttctgtagat

SEQ ID NO: 22005 - DNA, 25 bp, Probe Sequence
cttgagacctcagatgtgtgttcag

SEQ ID NO: 22006 - DNA, 25 bp, Probe Sequence
taaattattgaccgagttctgtaga

SEQ ID NO: 22007 - DNA, 25 bp, Probe Sequence
agctgctgttctaacctcagtaatg

SEQ ID NO: 22008 - DNA, 25 bp, Probe Sequence
tcttgagacctcagatgtgtgttca

SEQ ID NO: 22009 - DNA, 25 bp, Probe Sequence
tttcttgagacctcagatgtgtgtt

SEQ ID NO: 22010 - DNA, 25 bp, Probe Sequence
tttatggaaagggctatgtgggaga

SEQ ID NO: 22011 - DNA, 25 bp, Probe Sequence
ctatgtgggagagtcagctatcttg

SEQ ID NO: 22012 - DNA, 25 bp, Probe Sequence
ttctaacctcagtaatgcatctacc

SEQ ID NO: 22013 - DNA, 25 bp, Probe Sequence
tctaacctcagtaatgcatctacct

SEQ ID NO: 22014 - DNA, 25 bp, Probe Sequence
ataaattattgaccgagttctgtag

SEQ ID NO: 22015 - DNA, 25 bp, Probe Sequence
tgttctaacctcagtaatgcatcta

SEQ ID NO: 22016 - DNA, 25 bp, Probe Sequence
gctgctgttctaacctcagtaatgc

SEQ ID NO: 22017 - DNA, 25 bp, Probe Sequence
caggataacagagaatggtggtatt

SEQ ID NO: 22018 - DNA, 25 bp, Probe Sequence
tcaggataacagagaatggtggtat

SEQ ID NO: 22019 - DNA, 25 bp, Probe Sequence
atactcaggataacagagaatggtg

SEQ ID NO: 22020 - DNA, 25 bp, Probe Sequence
catactcaggataacagagaatggt

SEQ ID NO: 22021 - DNA, 25 bp, Probe Sequence
acatactcaggataacagagaatgg

SEQ ID NO: 22022 - DNA, 25 bp, Probe Sequence
ttgacatactcaggataacagagaa

SEQ ID NO: 22023 - DNA, 25 bp, Probe Sequence
ctcaggataacagagaatggtggta

SEQ ID NO: 22024 - DNA, 25 bp, Probe Sequence
tactcaggataacagagaatggtgg

SEQ ID NO: 22025 - DNA, 25 bp, Probe Sequence
tgacatactcaggataacagagaat

SEQ ID NO: 22026 - DNA, 25 bp, Probe Sequence
attgacatactcaggataacagaga

SEQ ID NO: 22027 - DNA, 25 bp, Probe Sequence
gacatactcaggataacagagaatg

SEQ ID NO: 22028 - DNA, 25 bp, Probe Sequence
tattcagtggtccaggattctgtaa

SEQ ID NO: 22029 - DNA, 25 bp, Probe Sequence
aatggcaagagatcatatcctcaga

SEQ ID NO: 22030 - DNA, 25 bp, Probe Sequence
aattgacatactcaggataacagag

SEQ ID NO: 22031 - DNA, 25 bp, Probe Sequence
attcagtggtccaggattctgtaat

SEQ ID NO: 22032 - DNA, 25 bp, Probe Sequence
ggataacagagaatggtggtattca

SEQ ID NO: 22033 - DNA, 25 bp, Probe Sequence
taacagagaatggtggtattcagtg

SEQ ID NO: 22034 - DNA, 25 bp, Probe Sequence
aggataacagagaatggtggtattc

SEQ ID NO: 22035 - DNA, 25 bp, Probe Sequence
gtattcagtggtccaggattctgta

SEQ ID NO: 22036 - DNA, 25 bp, Probe Sequence
ataacagagaatggtggtattcagt

SEQ ID NO: 22037 - DNA, 25 bp, Probe Sequence
atggcaagagatcatatcctcagac

SEQ ID NO: 22038 - DNA, 25 bp, Probe Sequence
atatcctcagaccaggtggaattac

SEQ ID NO: 22039 - DNA, 25 bp, Probe Sequence
catatcctcagaccaggtggaatta

SEQ ID NO: 22040 - DNA, 25 bp, Probe Sequence
gataacagagaatggtggtattcag

SEQ ID NO: 22041 - DNA, 25 bp, Probe Sequence
gaatagaagaagccaacgaactcac

SEQ ID NO: 22042 - DNA, 25 bp, Probe Sequence
aacaggaatagaagaagccaacgaa

SEQ ID NO: 22043 - DNA, 25 bp, Probe Sequence
aggaatagaagaagccaacgaactc

SEQ ID NO: 22044 - DNA, 25 bp, Probe Sequence
tatttgtatttggctgttgtgcttt

SEQ ID NO: 22045 - DNA, 25 bp, Probe Sequence
ggaatagaagaagccaacgaactca

SEQ ID NO: 22046 - DNA, 25 bp, Probe Sequence
caggaatagaagaagccaacgaact

SEQ ID NO: 22047 - DNA, 25 bp, Probe Sequence
atcggagagggaaataccaaataaa

SEQ ID NO: 22048 - DNA, 25 bp, Probe Sequence
atatttgtatttggctgttgtgctt

SEQ ID NO: 22049 - DNA, 25 bp, Probe Sequence
catcggagagggaaataccaaataa

SEQ ID NO: 22050 - DNA, 25 bp, Probe Sequence
tcggagagggaaataccaaataaac

SEQ ID NO: 22051 - DNA, 25 bp, Probe Sequence
cggagagggaaataccaaataaaca

SEQ ID NO: 22052 - DNA, 25 bp, Probe Sequence
atggctttgggtattatttgacttt

SEQ ID NO: 22053 - DNA, 25 bp, Probe Sequence
tcatcggagagggaaataccaaata

SEQ ID NO: 22054 - DNA, 25 bp, Probe Sequence
aatagaagaagccaacgaactcacc

SEQ ID NO: 22055 - DNA, 25 bp, Probe Sequence
acaggaatagaagaagccaacgaac

SEQ ID NO: 22056 - DNA, 25 bp, Probe Sequence
ggagagggaaataccaaataaacat

SEQ ID NO: 22057 - DNA, 25 bp, Probe Sequence
atttgtatttggctgttgtgctttc

SEQ ID NO: 22058 - DNA, 25 bp, Probe Sequence
gatcacagttattcagggttcattt

SEQ ID NO: 22059 - DNA, 25 bp, Probe Sequence
ggatcacagttattcagggttcatt

SEQ ID NO: 22060 - DNA, 25 bp, Probe Sequence
atagagaaagacgactgtgacgaaa

SEQ ID NO: 22061 - DNA, 25 bp, Probe Sequence
catggctttgggtattatttgactt

SEQ ID NO: 22062 - DNA, 25 bp, Probe Sequence
gtgacgaaacaggaatagaagaagc

SEQ ID NO: 22063 - DNA, 25 bp, Probe Sequence
agatcatggctttgggtattatttg

SEQ ID NO: 22064 - DNA, 25 bp, Probe Sequence
ggagatcatggctttgggtattatt

SEQ ID NO: 22065 - DNA, 25 bp, Probe Sequence
ggagagatgacactataatggctac

SEQ ID NO: 22066 - DNA, 25 bp, Probe Sequence
gagatgacactataatggctacaga

SEQ ID NO: 22067 - DNA, 25 bp, Probe Sequence
agagatgacactataatggctacag

SEQ ID NO: 22068 - DNA, 25 bp, Probe Sequence
gagagatgacactataatggctaca

SEQ ID NO: 22069 - DNA, 25 bp, Probe Sequence
ttagccagttctacaaggaatcatt

SEQ ID NO: 22070 - DNA, 25 bp, Probe Sequence
attagccagttctacaaggaatcat

SEQ ID NO: 22071 - DNA, 25 bp, Probe Sequence
agatgacactataatggctacagaa

SEQ ID NO: 22072 - DNA, 25 bp, Probe Sequence
tattagccagttctacaaggaatca

SEQ ID NO: 22073 - DNA, 25 bp, Probe Sequence
tagccagttctacaaggaatcattg

SEQ ID NO: 22074 - DNA, 25 bp, Probe Sequence
ggtatggtaatgcttgtagaatctt

SEQ ID NO: 22075 - DNA, 25 bp, Probe Sequence
ttattagccagttctacaaggaatc

SEQ ID NO: 22076 - DNA, 25 bp, Probe Sequence
ccagttctacaaggaatcattgatg

SEQ ID NO: 22077 - DNA, 25 bp, Probe Sequence
taccacatatacacctgatagtcaa

SEQ ID NO: 22078 - DNA, 25 bp, Probe Sequence
gccagttctacaaggaatcattgat

SEQ ID NO: 22079 - DNA, 25 bp, Probe Sequence
ataccacatatacacctgatagtca

SEQ ID NO: 22080 - DNA, 25 bp, Probe Sequence
agccagttctacaaggaatcattga

SEQ ID NO: 22081 - DNA, 25 bp, Probe Sequence
cagttctacaaggaatcattgatga

SEQ ID NO: 22082 - DNA, 25 bp, Probe Sequence
caagcatcataattagacggactgg

SEQ ID NO: 22083 - DNA, 25 bp, Probe Sequence
agttctacaaggaatcattgatgaa

SEQ ID NO: 22084 - DNA, 25 bp, Probe Sequence
agggtatggtaatgcttgtagaatc

SEQ ID NO: 22085 - DNA, 25 bp, Probe Sequence
caagggagagatgacactataatgg

SEQ ID NO: 22086 - DNA, 25 bp, Probe Sequence
ccaagggagagatgacactataatg

SEQ ID NO: 22087 - DNA, 25 bp, Probe Sequence
gggtatggtaatgcttgtagaatct

SEQ ID NO: 22088 - DNA, 25 bp, Probe Sequence
cgtttattagccagttctacaagga

SEQ ID NO: 22089 - DNA, 25 bp, Probe Sequence
acaccgagtctctgtataatctatt

SEQ ID NO: 22090 - DNA, 25 bp, Probe Sequence
aacaccgagtctctgtataatctat

SEQ ID NO: 22091 - DNA, 25 bp, Probe Sequence
gagaaactgagaaatgaatgctgag

SEQ ID NO: 22092 - DNA, 25 bp, Probe Sequence
ggagaggagaaactgagaaatgaat

SEQ ID NO: 22093 - DNA, 25 bp, Probe Sequence
taaggagaggagaaactgagaaatg

SEQ ID NO: 22094 - DNA, 25 bp, Probe Sequence
gaaactgagaaatgaatgctgagac

SEQ ID NO: 22095 - DNA, 25 bp, Probe Sequence
agaaactgagaaatgaatgctgaga

SEQ ID NO: 22096 - DNA, 25 bp, Probe Sequence
gagaggagaaactgagaaatgaatg

SEQ ID NO: 22097 - DNA, 25 bp, Probe Sequence
gaggagaaactgagaaatgaatgct

SEQ ID NO: 22098 - DNA, 25 bp, Probe Sequence
agaggagaaactgagaaatgaatgc

SEQ ID NO: 22099 - DNA, 25 bp, Probe Sequence
aggagaggagaaactgagaaatgaa

SEQ ID NO: 22100 - DNA, 25 bp, Probe Sequence
aaggagaggagaaactgagaaatga

SEQ ID NO: 22101 - DNA, 25 bp, Probe Sequence
ttaaggagaggagaaactgagaaat

SEQ ID NO: 22102 - DNA, 25 bp, Probe Sequence
ggagaaactgagaaatgaatgctga

SEQ ID NO: 22103 - DNA, 25 bp, Probe Sequence
aggagaaactgagaaatgaatgctg

SEQ ID NO: 22104 - DNA, 25 bp, Probe Sequence
aaactgagaaatgaatgctgagacc

SEQ ID NO: 22105 - DNA, 25 bp, Probe Sequence
agcctcactattacttgaactttcc

SEQ ID NO: 22106 - DNA, 25 bp, Probe Sequence
gcctcactattacttgaactttcca

SEQ ID NO: 22107 - DNA, 25 bp, Probe Sequence
aaagagaaagactgattacctcctg

SEQ ID NO: 22108 - DNA, 25 bp, Probe Sequence
tgaaagagaaagactgattacctcc

SEQ ID NO: 22109 - DNA, 25 bp, Probe Sequence
gaaagagaaagactgattacctcct

SEQ ID NO: 22110 - DNA, 25 bp, Probe Sequence
aagcctcactattacttgaactttc

SEQ ID NO: 22111 - DNA, 25 bp, Probe Sequence
gcatgaaagagaaagactgattacc

SEQ ID NO: 22112 - DNA, 25 bp, Probe Sequence
gaaacaccgagtctctgtataatct

SEQ ID NO: 22113 - DNA, 25 bp, Probe Sequence
aatgttggagaagtgtatggagttg

SEQ ID NO: 22114 - DNA, 25 bp, Probe Sequence
cagttaagtggattggtgttggtaa

SEQ ID NO: 22115 - DNA, 25 bp, Probe Sequence
gttggagttgcttacaagttagatg

SEQ ID NO: 22116 - DNA, 25 bp, Probe Sequence
agttggagttgcttacaagttagat

SEQ ID NO: 22117 - DNA, 25 bp, Probe Sequence
aagttggagttgcttacaagttaga

SEQ ID NO: 22118 - DNA, 25 bp, Probe Sequence
agttgcttacaagttagatggtgaa

SEQ ID NO: 22119 - DNA, 25 bp, Probe Sequence
gagttgcttacaagttagatggtga

SEQ ID NO: 22120 - DNA, 25 bp, Probe Sequence
ttggagttgcttacaagttagatgg

SEQ ID NO: 22121 - DNA, 25 bp, Probe Sequence
ttggagaagtgtatggagttgtgaa

SEQ ID NO: 22122 - DNA, 25 bp, Probe Sequence
atgttggagaagtgtatggagttgt

SEQ ID NO: 22123 - DNA, 25 bp, Probe Sequence
ggagttgcttacaagttagatggtg

SEQ ID NO: 22124 - DNA, 25 bp, Probe Sequence
tggagttgcttacaagttagatggt

SEQ ID NO: 22125 - DNA, 25 bp, Probe Sequence
gttggagaagtgtatggagttgtga

SEQ ID NO: 22126 - DNA, 25 bp, Probe Sequence
tgttggagaagtgtatggagttgtg

SEQ ID NO: 22127 - DNA, 25 bp, Probe Sequence
aaatcatacctcatatcccagcaaa

SEQ ID NO: 22128 - DNA, 25 bp, Probe Sequence
aaatgttggagaagtgtatggagtt

SEQ ID NO: 22129 - DNA, 25 bp, Probe Sequence
gaaatcatacctcatatcccagcaa

SEQ ID NO: 22130 - DNA, 25 bp, Probe Sequence
atgtttacggaaatcaaagttggag

SEQ ID NO: 22131 - DNA, 25 bp, Probe Sequence
gttaagtggattggtgttggtaaat

SEQ ID NO: 22132 - DNA, 25 bp, Probe Sequence
gtttacggaaatcaaagttggagtt

SEQ ID NO: 22133 - DNA, 25 bp, Probe Sequence
aatcatacctcatatcccagcaaac

SEQ ID NO: 22134 - DNA, 25 bp, Probe Sequence
agttaagtggattggtgttggtaaa

SEQ ID NO: 22135 - DNA, 25 bp, Probe Sequence
ggatggaacacagacatatcaaatg

SEQ ID NO: 22136 - DNA, 25 bp, Probe Sequence
aggatggaacacagacatatcaaat

SEQ ID NO: 22137 - DNA, 25 bp, Probe Sequence
ccaataaaacaagctcatggcaaaa

SEQ ID NO: 22138 - DNA, 25 bp, Probe Sequence
tccaataaaacaagctcatggcaaa

SEQ ID NO: 22139 - DNA, 25 bp, Probe Sequence
ctccaataaaacaagctcatggcaa

SEQ ID NO: 22140 - DNA, 25 bp, Probe Sequence
actccaataaaacaagctcatggca

SEQ ID NO: 22141 - DNA, 25 bp, Probe Sequence
ttgtcatataaggaatcccattaaa

SEQ ID NO: 22142 - DNA, 25 bp, Probe Sequence
tttgtcatataaggaatcccattaa

SEQ ID NO: 22143 - DNA, 25 bp, Probe Sequence
tgtcatataaggaatcccattaaaa

SEQ ID NO: 22144 - DNA, 25 bp, Probe Sequence
ttttgtcatataaggaatcccatta

SEQ ID NO: 22145 - DNA, 25 bp, Probe Sequence
cgctctaaattatgatgtggtttcg

SEQ ID NO: 22146 - DNA, 25 bp, Probe Sequence
gctctaaattatgatgtggtttcga

SEQ ID NO: 22147 - DNA, 25 bp, Probe Sequence
tacttgactgagcctggaatgagtg

SEQ ID NO: 22148 - DNA, 25 bp, Probe Sequence
ggtcaatgttttaggagaagagaca

SEQ ID NO: 22149 - DNA, 25 bp, Probe Sequence
cgggtcaatgttttaggagaagaga

SEQ ID NO: 22150 - DNA, 25 bp, Probe Sequence
gggtcaatgttttaggagaagagac

SEQ ID NO: 22151 - DNA, 25 bp, Probe Sequence
cttgactgagcctggaatgagtgag

SEQ ID NO: 22152 - DNA, 25 bp, Probe Sequence
ctatgcgctctaaattatgatgtgg

SEQ ID NO: 22153 - DNA, 25 bp, Probe Sequence
tatgcgctctaaattatgatgtggt

SEQ ID NO: 22154 - DNA, 25 bp, Probe Sequence
tctatgcgctctaaattatgatgtg

SEQ ID NO: 22155 - DNA, 25 bp, Probe Sequence
gcgctctaaattatgatgtggtttc

SEQ ID NO: 22156 - DNA, 25 bp, Probe Sequence
gagtttcctgacacgtccactaatc

SEQ ID NO: 22157 - DNA, 25 bp, Probe Sequence
atgcgctctaaattatgatgtggtt

SEQ ID NO: 22158 - DNA, 25 bp, Probe Sequence
tgcgctctaaattatgatgtggttt

SEQ ID NO: 22159 - DNA, 25 bp, Probe Sequence
ttctatgcgctctaaattatgatgt

SEQ ID NO: 22160 - DNA, 25 bp, Probe Sequence
actgagcctggaatgagtgagtttc

SEQ ID NO: 22161 - DNA, 25 bp, Probe Sequence
gactgagcctggaatgagtgagttt

SEQ ID NO: 22162 - DNA, 25 bp, Probe Sequence
tgagtttcctgacacgtccactaat

SEQ ID NO: 22163 - DNA, 25 bp, Probe Sequence
tttctatgcgctctaaattatgatg

SEQ ID NO: 22164 - DNA, 25 bp, Probe Sequence
gaatgagtgagtttcctgacacgtc

SEQ ID NO: 22165 - DNA, 25 bp, Probe Sequence
gtcaatgttttaggagaagagacat

SEQ ID NO: 22166 - DNA, 25 bp, Probe Sequence
ctctaaattatgatgtggtttcgaa

SEQ ID NO: 22167 - DNA, 25 bp, Probe Sequence
tccactaatccgggtcaatgtttta

SEQ ID NO: 22168 - DNA, 25 bp, Probe Sequence
agtttcctgacacgtccactaatcc

SEQ ID NO: 22169 - DNA, 25 bp, Probe Sequence
ctaccatcatcagcattaccaacaa

SEQ ID NO: 22170 - DNA, 25 bp, Probe Sequence
ctctaccatcatcagcattaccaac

SEQ ID NO: 22171 - DNA, 25 bp, Probe Sequence
taccatcatcagcattaccaacaac

SEQ ID NO: 22172 - DNA, 25 bp, Probe Sequence
tctaccatcatcagcattaccaaca

SEQ ID NO: 22173 - DNA, 25 bp, Probe Sequence
cctctaccatcatcagcattaccaa

SEQ ID NO: 22174 - DNA, 25 bp, Probe Sequence
tcctgattgaagagagacagtacat

SEQ ID NO: 22175 - DNA, 25 bp, Probe Sequence
ttcctgattgaagagagacagtaca

SEQ ID NO: 22176 - DNA, 25 bp, Probe Sequence
cctgattgaagagagacagtacatg

SEQ ID NO: 22177 - DNA, 25 bp, Probe Sequence
cacctctaccatcatcagcattacc

SEQ ID NO: 22178 - DNA, 25 bp, Probe Sequence
ccacctctaccatcatcagcattac

SEQ ID NO: 22179 - DNA, 25 bp, Probe Sequence
ctgattgaagagagacagtacatgc

SEQ ID NO: 22180 - DNA, 25 bp, Probe Sequence
catgaagaactacctgaagaagcag

SEQ ID NO: 22181 - DNA, 25 bp, Probe Sequence
tgattgaagagagacagtacatgcc

SEQ ID NO: 22182 - DNA, 25 bp, Probe Sequence
acctctaccatcatcagcattacca

SEQ ID NO: 22183 - DNA, 25 bp, Probe Sequence
tttccctaaagaccctaaatctgag

SEQ ID NO: 22184 - DNA, 25 bp, Probe Sequence
ccatgaagaactacctgaagaagca

SEQ ID NO: 22185 - DNA, 25 bp, Probe Sequence
ccctcttcattcacttcagaaataa

SEQ ID NO: 22186 - DNA, 25 bp, Probe Sequence
aagaccctaaatctgaggaatcaac

SEQ ID NO: 22187 - DNA, 25 bp, Probe Sequence
catcagcattaccaacaacgtcatt

SEQ ID NO: 22188 - DNA, 25 bp, Probe Sequence
aaagaccctaaatctgaggaatcaa

SEQ ID NO: 22189 - DNA, 25 bp, Probe Sequence
cctaaagaccctaaatctgaggaat

SEQ ID NO: 22190 - DNA, 25 bp, Probe Sequence
gaccctaaatctgaggaatcaacag

SEQ ID NO: 22191 - DNA, 25 bp, Probe Sequence
gtaccctctttcacctttccctaaa

SEQ ID NO: 22192 - DNA, 25 bp, Probe Sequence
agaccctaaatctgaggaatcaaca

SEQ ID NO: 22193 - DNA, 25 bp, Probe Sequence
gagacttccttcatcacatcttatg

SEQ ID NO: 22194 - DNA, 25 bp, Probe Sequence
gtccatagcatcagttgatccttac

SEQ ID NO: 22195 - DNA, 25 bp, Probe Sequence
agcatcagttgatccttactaagtt

SEQ ID NO: 22196 - DNA, 25 bp, Probe Sequence
ccatagcatcagttgatccttacta

SEQ ID NO: 22197 - DNA, 25 bp, Probe Sequence
tgtccatagcatcagttgatcctta

SEQ ID NO: 22198 - DNA, 25 bp, Probe Sequence
tagcatcagttgatccttactaagt

SEQ ID NO: 22199 - DNA, 25 bp, Probe Sequence
tccatagcatcagttgatccttact

SEQ ID NO: 22200 - DNA, 25 bp, Probe Sequence
ggagacttccttcatcacatcttat

SEQ ID NO: 22201 - DNA, 25 bp, Probe Sequence
ttgtccatagcatcagttgatcctt

SEQ ID NO: 22202 - DNA, 25 bp, Probe Sequence
catagcatcagttgatccttactaa

SEQ ID NO: 22203 - DNA, 25 bp, Probe Sequence
tagttaatgtcttaatccagcttgc

SEQ ID NO: 22204 - DNA, 25 bp, Probe Sequence
ctgggaatgatgtaatgctctgaat

SEQ ID NO: 22205 - DNA, 25 bp, Probe Sequence
gggaatgatgtaatgctctgaattt

SEQ ID NO: 22206 - DNA, 25 bp, Probe Sequence
atagcatcagttgatccttactaag

SEQ ID NO: 22207 - DNA, 25 bp, Probe Sequence
tgggaatgatgtaatgctctgaatt

SEQ ID NO: 22208 - DNA, 25 bp, Probe Sequence
agttaatgtcttaatccagcttgca

SEQ ID NO: 22209 - DNA, 25 bp, Probe Sequence
agtggctagtagtttcttcatttga

SEQ ID NO: 22210 - DNA, 25 bp, Probe Sequence
gagtggctagtagtttcttcatttg

SEQ ID NO: 22211 - DNA, 25 bp, Probe Sequence
aaagccttgaaagcatctacaaatc

SEQ ID NO: 22212 - DNA, 25 bp, Probe Sequence
caaagccttgaaagcatctacaaat

SEQ ID NO: 22213 - DNA, 25 bp, Probe Sequence
ccttgaaagcatctacaaatctctt

SEQ ID NO: 22214 - DNA, 25 bp, Probe Sequence
ggttaccaaacataaatgctgaaca

SEQ ID NO: 22215 - DNA, 25 bp, Probe Sequence
aagccttgaaagcatctacaaatct

SEQ ID NO: 22216 - DNA, 25 bp, Probe Sequence
agagtggctagtagtttcttcattt

SEQ ID NO: 22217 - DNA, 25 bp, Probe Sequence
tgcttaacacattgccttattcata

SEQ ID NO: 22218 - DNA, 25 bp, Probe Sequence
gcttaacacattgccttattcatac

SEQ ID NO: 22219 - DNA, 25 bp, Probe Sequence
aacacattgccttattcatactagc

SEQ ID NO: 22220 - DNA, 25 bp, Probe Sequence
ttatgaagaagaatatggctcaagc

SEQ ID NO: 22221 - DNA, 25 bp, Probe Sequence
gtgcttaacacattgccttattcat

SEQ ID NO: 22222 - DNA, 25 bp, Probe Sequence
cagtgcttaacacattgccttattc

SEQ ID NO: 22223 - DNA, 25 bp, Probe Sequence
agtgcttaacacattgccttattca

SEQ ID NO: 22224 - DNA, 25 bp, Probe Sequence
cttaacacattgccttattcatact

SEQ ID NO: 22225 - DNA, 25 bp, Probe Sequence
tgacaagtacatgactatatcagga

SEQ ID NO: 22226 - DNA, 25 bp, Probe Sequence
catcaggaaggagtttaggaagaat

SEQ ID NO: 22227 - DNA, 25 bp, Probe Sequence
tactccttgctgttgtgaaatctat

SEQ ID NO: 22228 - DNA, 25 bp, Probe Sequence
ggctttatgatgcttatgaactgaa

SEQ ID NO: 22229 - DNA, 25 bp, Probe Sequence
ctactccttgctgttgtgaaatcta

SEQ ID NO: 22230 - DNA, 25 bp, Probe Sequence
actccttgctgttgtgaaatctatt

SEQ ID NO: 22231 - DNA, 25 bp, Probe Sequence
gatgaagctcaagttgaacaagatg

SEQ ID NO: 22232 - DNA, 25 bp, Probe Sequence
ccaacacatacacgtcatagaagaa

SEQ ID NO: 22233 - DNA, 25 bp, Probe Sequence
ttcgcaactaaactaaacctgtaaa

SEQ ID NO: 22234 - DNA, 25 bp, Probe Sequence
tgatgaagctcaagttgaacaagat

SEQ ID NO: 22235 - DNA, 25 bp, Probe Sequence
ccttgaaattgtgaactcttggaaa

SEQ ID NO: 22236 - DNA, 25 bp, Probe Sequence
ttagccttgaaattgtgaactcttg

SEQ ID NO: 22237 - DNA, 25 bp, Probe Sequence
cttagccttgaaattgtgaactctt

SEQ ID NO: 22238 - DNA, 25 bp, Probe Sequence
ggaaatgttattagtgaagttcgca

SEQ ID NO: 22239 - DNA, 25 bp, Probe Sequence
tggaaatgttattagtgaagttcgc

SEQ ID NO: 22240 - DNA, 25 bp, Probe Sequence
tgaaattgtgaactcttggaaatgt

SEQ ID NO: 22241 - DNA, 25 bp, Probe Sequence
ctgcttgatagagtggatagtatgt

SEQ ID NO: 22242 - DNA, 25 bp, Probe Sequence
aatcgtgatgagaaccagagtataa

SEQ ID NO: 22243 - DNA, 25 bp, Probe Sequence
tgcttgatagagtggatagtatgtt

SEQ ID NO: 22244 - DNA, 25 bp, Probe Sequence
atagattagtattacctgtggcacc

SEQ ID NO: 22245 - DNA, 25 bp, Probe Sequence
tagattagtattacctgtggcacct

SEQ ID NO: 22246 - DNA, 25 bp, Probe Sequence
agtctgcttgatagagtggatagta

SEQ ID NO: 22247 - DNA, 25 bp, Probe Sequence
aagtctgcttgatagagtggatagt

SEQ ID NO: 22248 - DNA, 25 bp, Probe Sequence
tctgcttgatagagtggatagtatg

SEQ ID NO: 22249 - DNA, 25 bp, Probe Sequence
gtctgcttgatagagtggatagtat

SEQ ID NO: 22250 - DNA, 25 bp, Probe Sequence
taagtctgcttgatagagtggatag

SEQ ID NO: 22251 - DNA, 25 bp, Probe Sequence
ctaagtctgcttgatagagtggata

SEQ ID NO: 22252 - DNA, 25 bp, Probe Sequence
gaggcttattctaggatggctaatc

SEQ ID NO: 22253 - DNA, 25 bp, Probe Sequence
agattagtattacctgtggcacctt

SEQ ID NO: 22254 - DNA, 25 bp, Probe Sequence
gatgttcgctcagatgtatcagaag

SEQ ID NO: 22255 - DNA, 25 bp, Probe Sequence
atgttcgctcagatgtatcagaaga

SEQ ID NO: 22256 - DNA, 25 bp, Probe Sequence
agatgttcgctcagatgtatcagaa

SEQ ID NO: 22257 - DNA, 25 bp, Probe Sequence
ggaggcttattctaggatggctaat

SEQ ID NO: 22258 - DNA, 25 bp, Probe Sequence
ttgtcagatgttatcagtcagaatt

SEQ ID NO: 22259 - DNA, 25 bp, Probe Sequence
aattgtcagatgttatcagtcagaa

SEQ ID NO: 22260 - DNA, 25 bp, Probe Sequence
cattaggtcagatacatcaggacat

SEQ ID NO: 22261 - DNA, 25 bp, Probe Sequence
gacattaggtcagatacatcaggac

SEQ ID NO: 22262 - DNA, 25 bp, Probe Sequence
aaggacattaggtcagatacatcag

SEQ ID NO: 22263 - DNA, 25 bp, Probe Sequence
attgtcagatgttatcagtcagaat

SEQ ID NO: 22264 - DNA, 25 bp, Probe Sequence
ttcgctcagatgtatcagaagactc

SEQ ID NO: 22265 - DNA, 25 bp, Probe Sequence
agattaaccttccagccaacctatt

SEQ ID NO: 22266 - DNA, 25 bp, Probe Sequence
aagattaaccttccagccaacctat

SEQ ID NO: 22267 - DNA, 25 bp, Probe Sequence
tgtaattccagatgagtcactgtaa

SEQ ID NO: 22268 - DNA, 25 bp, Probe Sequence
taattccagatgagtcactgtaact

SEQ ID NO: 22269 - DNA, 25 bp, Probe Sequence
gtaattccagatgagtcactgtaac

SEQ ID NO: 22270 - DNA, 25 bp, Probe Sequence
gtgtaattccagatgagtcactgta

SEQ ID NO: 22271 - DNA, 25 bp, Probe Sequence
gaagagatacctagtatgatggagc

SEQ ID NO: 22272 - DNA, 25 bp, Probe Sequence
ctcatctcatgtaggcagagtataa

SEQ ID NO: 22273 - DNA, 25 bp, Probe Sequence
ctgtgtaattccagatgagtcactg

SEQ ID NO: 22274 - DNA, 25 bp, Probe Sequence
gctcatctcatgtaggcagagtata

SEQ ID NO: 22275 - DNA, 25 bp, Probe Sequence
tgtgtaattccagatgagtcactgt

SEQ ID NO: 22276 - DNA, 25 bp, Probe Sequence
tttccttccttctttcctttctctt

SEQ ID NO: 22277 - DNA, 25 bp, Probe Sequence
ccttccttctttcctttctcttctt

SEQ ID NO: 22278 - DNA, 25 bp, Probe Sequence
ttccttccttctttcctttctcttc

SEQ ID NO: 22279 - DNA, 25 bp, Probe Sequence
aaatgggaagaaagacaaggtaaca

SEQ ID NO: 22280 - DNA, 25 bp, Probe Sequence
aatgggaagaaagacaaggtaacat

SEQ ID NO: 22281 - DNA, 25 bp, Probe Sequence
agaagagatacctagtatgatggag

SEQ ID NO: 22282 - DNA, 25 bp, Probe Sequence
tccttccttctttcctttctcttct

SEQ ID NO: 22283 - DNA, 25 bp, Probe Sequence
cttccttctttcctttctcttcttt

SEQ ID NO: 22284 - DNA, 25 bp, Probe Sequence
gattaaccttccagccaacctattt

SEQ ID NO: 22285 - DNA, 25 bp, Probe Sequence
gcagatgagcatttctaaagcattt

SEQ ID NO: 22286 - DNA, 25 bp, Probe Sequence
tgtctccttagaatacccaaatcat

SEQ ID NO: 22287 - DNA, 25 bp, Probe Sequence
atgtctccttagaatacccaaatca

SEQ ID NO: 22288 - DNA, 25 bp, Probe Sequence
aagagatacctagtatgatggagct

SEQ ID NO: 22289 - DNA, 25 bp, Probe Sequence
tattccttgtggtcatctggtagta

SEQ ID NO: 22290 - DNA, 25 bp, Probe Sequence
attccttgtggtcatctggtagtat

SEQ ID NO: 22291 - DNA, 25 bp, Probe Sequence
ttattccttgtggtcatctggtagt

SEQ ID NO: 22292 - DNA, 25 bp, Probe Sequence
ttacaagcgagagaactgattgata

SEQ ID NO: 22293 - DNA, 25 bp, Probe Sequence
tacaagcgagagaactgattgatac

SEQ ID NO: 22294 - DNA, 25 bp, Probe Sequence
ggtgtgagttcttgatacgaatgaa

SEQ ID NO: 22295 - DNA, 25 bp, Probe Sequence
aaggtgtgagttcttgatacgaatg

SEQ ID NO: 22296 - DNA, 25 bp, Probe Sequence
agcgagagaactgattgataccatt

SEQ ID NO: 22297 - DNA, 25 bp, Probe Sequence
aagcgagagaactgattgataccat

SEQ ID NO: 22298 - DNA, 25 bp, Probe Sequence
aggtgtgagttcttgatacgaatga

SEQ ID NO: 22299 - DNA, 25 bp, Probe Sequence
ttccttgtggtcatctggtagtatg

SEQ ID NO: 22300 - DNA, 25 bp, Probe Sequence
aacagttaatgatattgtgtcagca

SEQ ID NO: 22301 - DNA, 25 bp, Probe Sequence
acagttaatgatattgtgtcagcac

SEQ ID NO: 22302 - DNA, 25 bp, Probe Sequence
cagttaatgatattgtgtcagcact

SEQ ID NO: 22303 - DNA, 25 bp, Probe Sequence
atattgttgaacacttgaagccatc

SEQ ID NO: 22304 - DNA, 25 bp, Probe Sequence
atcctgacaactggagagaactata

SEQ ID NO: 22305 - DNA, 25 bp, Probe Sequence
tcctgacaactggagagaactataa

SEQ ID NO: 22306 - DNA, 25 bp, Probe Sequence
agttaatgatattgtgtcagcactt

SEQ ID NO: 22307 - DNA, 25 bp, Probe Sequence
attgttgaacacttgaagccatcta

SEQ ID NO: 22308 - DNA, 25 bp, Probe Sequence
tattgttgaacacttgaagccatct

SEQ ID NO: 22309 - DNA, 25 bp, Probe Sequence
aatcctgacaactggagagaactat

SEQ ID NO: 22310 - DNA, 25 bp, Probe Sequence
gttaatgatattgtgtcagcacttc

SEQ ID NO: 22311 - DNA, 25 bp, Probe Sequence
ttgttgaacacttgaagccatctaa

SEQ ID NO: 22312 - DNA, 25 bp, Probe Sequence
aatgatattgtgtcagcacttctaa

SEQ ID NO: 22313 - DNA, 25 bp, Probe Sequence
ctcaggttccagtagttcattctaa

SEQ ID NO: 22314 - DNA, 25 bp, Probe Sequence
taagaaggagtggacagaatgaatg

SEQ ID NO: 22315 - DNA, 25 bp, Probe Sequence
gattaagaaggagtggacagaatga

SEQ ID NO: 22316 - DNA, 25 bp, Probe Sequence
attgacttccttcctgttctaactg

SEQ ID NO: 22317 - DNA, 25 bp, Probe Sequence
cattgacttccttcctgttctaact

SEQ ID NO: 22318 - DNA, 25 bp, Probe Sequence
ctcattgacttccttcctgttctaa

SEQ ID NO: 22319 - DNA, 25 bp, Probe Sequence
ttaagaaggagtggacagaatgaat

SEQ ID NO: 22320 - DNA, 25 bp, Probe Sequence
attaagaaggagtggacagaatgaa

SEQ ID NO: 22321 - DNA, 25 bp, Probe Sequence
tcattgacttccttcctgttctaac

SEQ ID NO: 22322 - DNA, 25 bp, Probe Sequence
tcaggttccagtagttcattctaat

SEQ ID NO: 22323 - DNA, 25 bp, Probe Sequence
tctcattgacttccttcctgttcta

SEQ ID NO: 22324 - DNA, 25 bp, Probe Sequence
cgattaagaaggagtggacagaatg

SEQ ID NO: 22325 - DNA, 25 bp, Probe Sequence
actcaggttccagtagttcattcta

SEQ ID NO: 22326 - DNA, 25 bp, Probe Sequence
gtctccatctcagtacacaatcatt

SEQ ID NO: 22327 - DNA, 25 bp, Probe Sequence
tccagtagttcattctaatgcctag

SEQ ID NO: 22328 - DNA, 25 bp, Probe Sequence
gttccagtagttcattctaatgcct

SEQ ID NO: 22329 - DNA, 25 bp, Probe Sequence
aggttccagtagttcattctaatgc

SEQ ID NO: 22330 - DNA, 25 bp, Probe Sequence
ttctcattgacttccttcctgttct

SEQ ID NO: 22331 - DNA, 25 bp, Probe Sequence
ttccagtagttcattctaatgccta

SEQ ID NO: 22332 - DNA, 25 bp, Probe Sequence
caggttccagtagttcattctaatg

SEQ ID NO: 22333 - DNA, 25 bp, Probe Sequence
aggaaggttctgaatatagagtcaa

SEQ ID NO: 22334 - DNA, 25 bp, Probe Sequence
aaggaaggttctgaatatagagtca

SEQ ID NO: 22335 - DNA, 25 bp, Probe Sequence
ggttccagtagttcattctaatgcc

SEQ ID NO: 22336 - DNA, 25 bp, Probe Sequence
ttgactcaggttccagtagttcatt

SEQ ID NO: 22337 - DNA, 25 bp, Probe Sequence
acagtaattcagtccattcttctcc

SEQ ID NO: 22338 - DNA, 25 bp, Probe Sequence
cgaatcacctgaatgttctatgtaa

SEQ ID NO: 22339 - DNA, 25 bp, Probe Sequence
attattggcatatactgactgactg

SEQ ID NO: 22340 - DNA, 25 bp, Probe Sequence
tgattattggcatatactgactgac

SEQ ID NO: 22341 - DNA, 25 bp, Probe Sequence
gattattggcatatactgactgact

SEQ ID NO: 22342 - DNA, 25 bp, Probe Sequence
aatgaagactacatcacctctctcc

SEQ ID NO: 22343 - DNA, 25 bp, Probe Sequence
atcacctgaatgttctatgtaatgt

SEQ ID NO: 22344 - DNA, 25 bp, Probe Sequence
ttatgtagtagacagttgtgaccga

SEQ ID NO: 22345 - DNA, 25 bp, Probe Sequence
agacagtaattcagtccattcttct

SEQ ID NO: 22346 - DNA, 25 bp, Probe Sequence
cagacagtaattcagtccattcttc

SEQ ID NO: 22347 - DNA, 25 bp, Probe Sequence
gacagtaattcagtccattcttctc

SEQ ID NO: 22348 - DNA, 25 bp, Probe Sequence
gcagacagtaattcagtccattctt

SEQ ID NO: 22349 - DNA, 25 bp, Probe Sequence
aagcagacagtaattcagtccattc

SEQ ID NO: 22350 - DNA, 25 bp, Probe Sequence
cttgatgaggcaatggaatggttag

SEQ ID NO: 22351 - DNA, 25 bp, Probe Sequence
tatgtagtagacagttgtgaccgag

SEQ ID NO: 22352 - DNA, 25 bp, Probe Sequence
tgatgaggcaatggaatggttagtt

SEQ ID NO: 22353 - DNA, 25 bp, Probe Sequence
gatgaggcaatggaatggttagttg

SEQ ID NO: 22354 - DNA, 25 bp, Probe Sequence
tcacctgaatgttctatgtaatgta

SEQ ID NO: 22355 - DNA, 25 bp, Probe Sequence
atgattattggcatatactgactga

SEQ ID NO: 22356 - DNA, 25 bp, Probe Sequence
atcgaatcacctgaatgttctatgt

SEQ ID NO: 22357 - DNA, 25 bp, Probe Sequence
tcgaatcacctgaatgttctatgta

SEQ ID NO: 22358 - DNA, 25 bp, Probe Sequence
gatcgaatcacctgaatgttctatg

SEQ ID NO: 22359 - DNA, 25 bp, Probe Sequence
agcagacagtaattcagtccattct

SEQ ID NO: 22360 - DNA, 25 bp, Probe Sequence
atgaggcaatggaatggttagttga

SEQ ID NO: 22361 - DNA, 25 bp, Probe Sequence
tataagacagtggaagtggtggaat

SEQ ID NO: 22362 - DNA, 25 bp, Probe Sequence
tatagacaaggagattgagccagat

SEQ ID NO: 22363 - DNA, 25 bp, Probe Sequence
ctataagacagtggaagtggtggaa

SEQ ID NO: 22364 - DNA, 25 bp, Probe Sequence
ataagacagtggaagtggtggaatc

SEQ ID NO: 22365 - DNA, 25 bp, Probe Sequence
atagacaaggagattgagccagatg

SEQ ID NO: 22366 - DNA, 25 bp, Probe Sequence
gacagtggaagtggtggaatctatc

SEQ ID NO: 22367 - DNA, 25 bp, Probe Sequence
acaagaagaaatcaggagagaagag

SEQ ID NO: 22368 - DNA, 25 bp, Probe Sequence
gacaagaagaaatcaggagagaaga

SEQ ID NO: 22369 - DNA, 25 bp, Probe Sequence
agacaagaagaaatcaggagagaag

SEQ ID NO: 22370 - DNA, 25 bp, Probe Sequence
cagacaagaagaaatcaggagagaa

SEQ ID NO: 22371 - DNA, 25 bp, Probe Sequence
tcagacaagaagaaatcaggagaga

SEQ ID NO: 22372 - DNA, 25 bp, Probe Sequence
aaagtcagacaagaagaaatcagga

SEQ ID NO: 22373 - DNA, 25 bp, Probe Sequence
caaagtcagacaagaagaaatcagg

SEQ ID NO: 22374 - DNA, 25 bp, Probe Sequence
aagtcagacaagaagaaatcaggag

SEQ ID NO: 22375 - DNA, 25 bp, Probe Sequence
acaaagtcagacaagaagaaatcag

SEQ ID NO: 22376 - DNA, 25 bp, Probe Sequence
caagaagaaatcaggagagaagagc

SEQ ID NO: 22377 - DNA, 25 bp, Probe Sequence
gattagaccatagttgacccatctg

SEQ ID NO: 22378 - DNA, 25 bp, Probe Sequence
gtcagacaagaagaaatcaggagag

SEQ ID NO: 22379 - DNA, 25 bp, Probe Sequence
agacagtggaagtggtggaatctat

SEQ ID NO: 22380 - DNA, 25 bp, Probe Sequence
ctatagacaaggagattgagccaga

SEQ ID NO: 22381 - DNA, 25 bp, Probe Sequence
gaagtggtggaatctatcgagaaga

SEQ ID NO: 22382 - DNA, 25 bp, Probe Sequence
agtcagacaagaagaaatcaggaga

SEQ ID NO: 22383 - DNA, 25 bp, Probe Sequence
cctataagacagtggaagtggtgga

SEQ ID NO: 22384 - DNA, 25 bp, Probe Sequence
ggattagaccatagttgacccatct

SEQ ID NO: 22385 - DNA, 25 bp, Probe Sequence
gtgacatttcctgttgtgaagtaaa

SEQ ID NO: 22386 - DNA, 25 bp, Probe Sequence
tgtgacatttcctgttgtgaagtaa

SEQ ID NO: 22387 - DNA, 25 bp, Probe Sequence
cagtttgacttctttgagacagagg

SEQ ID NO: 22388 - DNA, 25 bp, Probe Sequence
ctgtgacatttcctgttgtgaagta

SEQ ID NO: 22389 - DNA, 25 bp, Probe Sequence
cttgttactcaggaacctcaccttg

SEQ ID NO: 22390 - DNA, 25 bp, Probe Sequence
gcagtttgacttctttgagacagag

SEQ ID NO: 22391 - DNA, 25 bp, Probe Sequence
agtttgacttctttgagacagaggg

SEQ ID NO: 22392 - DNA, 25 bp, Probe Sequence
gtctgtgacatttcctgttgtgaag

SEQ ID NO: 22393 - DNA, 25 bp, Probe Sequence
cttctttgagacagagggcaatgat

SEQ ID NO: 22394 - DNA, 25 bp, Probe Sequence
tctgtgacatttcctgttgtgaagt

SEQ ID NO: 22395 - DNA, 25 bp, Probe Sequence
ttctttgagacagagggcaatgatg

SEQ ID NO: 22396 - DNA, 25 bp, Probe Sequence
ccttgttactcaggaacctcacctt

SEQ ID NO: 22397 - DNA, 25 bp, Probe Sequence
catttcctgttgtgaagtaaaagag

SEQ ID NO: 22398 - DNA, 25 bp, Probe Sequence
ttgttactcaggaacctcaccttgg

SEQ ID NO: 22399 - DNA, 25 bp, Probe Sequence
gacttctttgagacagagggcaatg

SEQ ID NO: 22400 - DNA, 25 bp, Probe Sequence
tgacatttcctgttgtgaagtaaaa

SEQ ID NO: 22401 - DNA, 25 bp, Probe Sequence
gtttgacttctttgagacagagggc

SEQ ID NO: 22402 - DNA, 25 bp, Probe Sequence
acatttcctgttgtgaagtaaaaga

SEQ ID NO: 22403 - DNA, 25 bp, Probe Sequence
tcatcacctcccagtacaacaacat

SEQ ID NO: 22404 - DNA, 25 bp, Probe Sequence
tgcagtttgacttctttgagacaga

SEQ ID NO: 22405 - DNA, 25 bp, Probe Sequence
gacatttcctgttgtgaagtaaaag

SEQ ID NO: 22406 - DNA, 25 bp, Probe Sequence
acttctttgagacagagggcaatga

SEQ ID NO: 22407 - DNA, 25 bp, Probe Sequence
tgacttctttgagacagagggcaat

SEQ ID NO: 22408 - DNA, 25 bp, Probe Sequence
atttcctgttgtgaagtaaaagagg

SEQ ID NO: 22409 - DNA, 25 bp, Probe Sequence
ctgtaagtagttgtcatattctgga

SEQ ID NO: 22410 - DNA, 25 bp, Probe Sequence
ttgtcaagcacttagatggatataa

SEQ ID NO: 22411 - DNA, 25 bp, Probe Sequence
actgtaagtagttgtcatattctgg

SEQ ID NO: 22412 - DNA, 25 bp, Probe Sequence
tgtaagtagttgtcatattctggaa

SEQ ID NO: 22413 - DNA, 25 bp, Probe Sequence
tgtcaagcacttagatggatataaa

SEQ ID NO: 22414 - DNA, 25 bp, Probe Sequence
tttgtcaagcacttagatggatata

SEQ ID NO: 22415 - DNA, 25 bp, Probe Sequence
tggttcaaataggactactagagtt

SEQ ID NO: 22416 - DNA, 25 bp, Probe Sequence
ctttaaggtttagctccacatcatg

SEQ ID NO: 22417 - DNA, 25 bp, Probe Sequence
atatctcctctctttggttagggaa

SEQ ID NO: 22418 - DNA, 25 bp, Probe Sequence
atggttcaaataggactactagagt

SEQ ID NO: 22419 - DNA, 25 bp, Probe Sequence
tatctcctctctttggttagggaag

SEQ ID NO: 22420 - DNA, 25 bp, Probe Sequence
atcaagatatggttcaaataggact

SEQ ID NO: 22421 - DNA, 25 bp, Probe Sequence
ggttcaaataggactactagagttc

SEQ ID NO: 22422 - DNA, 25 bp, Probe Sequence
aataggactactagagttcattgaa

SEQ ID NO: 22423 - DNA, 25 bp, Probe Sequence
gatggatataaatgcagcaacttgt

SEQ ID NO: 22424 - DNA, 25 bp, Probe Sequence
tggatataaatgcagcaacttgttt

SEQ ID NO: 22425 - DNA, 25 bp, Probe Sequence
atggatataaatgcagcaacttgtt

SEQ ID NO: 22426 - DNA, 25 bp, Probe Sequence
agatggatataaatgcagcaacttg

SEQ ID NO: 22427 - DNA, 25 bp, Probe Sequence
tttaaggtttagctccacatcatgc

SEQ ID NO: 22428 - DNA, 25 bp, Probe Sequence
tgaaagactattgcaggtgtttaaa

SEQ ID NO: 22429 - DNA, 25 bp, Probe Sequence
ttgaaagactattgcaggtgtttaa

SEQ ID NO: 22430 - DNA, 25 bp, Probe Sequence
tttgaaagactattgcaggtgttta

SEQ ID NO: 22431 - DNA, 25 bp, Probe Sequence
cacttagatggatataaatgcagca

SEQ ID NO: 22432 - DNA, 25 bp, Probe Sequence
atgtaacgtataaactcaagccttt

SEQ ID NO: 22433 - DNA, 25 bp, Probe Sequence
gatgatgatgatgaagttccagatc

SEQ ID NO: 22434 - DNA, 25 bp, Probe Sequence
ggatgatgatgatgaagttccagat

SEQ ID NO: 22435 - DNA, 25 bp, Probe Sequence
aggatgatgatgatgaagttccaga

SEQ ID NO: 22436 - DNA, 25 bp, Probe Sequence
atgatgatgatgaagttccagatct

SEQ ID NO: 22437 - DNA, 25 bp, Probe Sequence
atgatgatgaagttccagatcttgt

SEQ ID NO: 22438 - DNA, 25 bp, Probe Sequence
tgatgatgatgaagttccagatctt

SEQ ID NO: 22439 - DNA, 25 bp, Probe Sequence
gatgatgatgaagttccagatcttg

SEQ ID NO: 22440 - DNA, 25 bp, Probe Sequence
tgatgatgaagttccagatcttgtg

SEQ ID NO: 22441 - DNA, 25 bp, Probe Sequence
agctaattaagccgaagaagcctta

SEQ ID NO: 22442 - DNA, 25 bp, Probe Sequence
gctaattaagccgaagaagccttaa

SEQ ID NO: 22443 - DNA, 25 bp, Probe Sequence
gatgatgaagttccagatcttgtgg

SEQ ID NO: 22444 - DNA, 25 bp, Probe Sequence
taattaagccgaagaagccttaagt

SEQ ID NO: 22445 - DNA, 25 bp, Probe Sequence
ctaattaagccgaagaagccttaag

SEQ ID NO: 22446 - DNA, 25 bp, Probe Sequence
agaaattcttgtttatggatctgat

SEQ ID NO: 22447 - DNA, 25 bp, Probe Sequence
cagctaattaagccgaagaagcctt

SEQ ID NO: 22448 - DNA, 25 bp, Probe Sequence
aattaagccgaagaagccttaagtg

SEQ ID NO: 22449 - DNA, 25 bp, Probe Sequence
aagaaattcttgtttatggatctga

SEQ ID NO: 22450 - DNA, 25 bp, Probe Sequence
attaagccgaagaagccttaagtgg

SEQ ID NO: 22451 - DNA, 25 bp, Probe Sequence
ccgaagaagccttaagtgggaattc

SEQ ID NO: 22452 - DNA, 25 bp, Probe Sequence
cagatcttgtggagaattttgatga

SEQ ID NO: 22453 - DNA, 25 bp, Probe Sequence
gaaattcttgtttatggatctgata

SEQ ID NO: 22454 - DNA, 25 bp, Probe Sequence
agatcttgtggagaattttgatgag

SEQ ID NO: 22455 - DNA, 25 bp, Probe Sequence
gaagttccagatcttgtggagaatt

SEQ ID NO: 22456 - DNA, 25 bp, Probe Sequence
tgaagttccagatcttgtggagaat

SEQ ID NO: 22457 - DNA, 25 bp, Probe Sequence
atctcctacaagaatgatgcctact

SEQ ID NO: 22458 - DNA, 25 bp, Probe Sequence
tctcctacaagaatgatgcctactt

SEQ ID NO: 22459 - DNA, 25 bp, Probe Sequence
cactcgcatctcctacaagaatgat

SEQ ID NO: 22460 - DNA, 25 bp, Probe Sequence
atcactcgcatctcctacaagaatg

SEQ ID NO: 22461 - DNA, 25 bp, Probe Sequence
catcactcgcatctcctacaagaat

SEQ ID NO: 22462 - DNA, 25 bp, Probe Sequence
tcctacaagaatgatgcctactttc

SEQ ID NO: 22463 - DNA, 25 bp, Probe Sequence
ctcctacaagaatgatgcctacttt

SEQ ID NO: 22464 - DNA, 25 bp, Probe Sequence
gaatccttcggcttcatcacctatc

SEQ ID NO: 22465 - DNA, 25 bp, Probe Sequence
gaatgatgcctactttcttcaagac

SEQ ID NO: 22466 - DNA, 25 bp, Probe Sequence
aatccttcggcttcatcacctatca

SEQ ID NO: 22467 - DNA, 25 bp, Probe Sequence
aatgatgcctactttcttcaagacc

SEQ ID NO: 22468 - DNA, 25 bp, Probe Sequence
cctcaatatcacctcccttcagatg

SEQ ID NO: 22469 - DNA, 25 bp, Probe Sequence
tcactcgcatctcctacaagaatga

SEQ ID NO: 22470 - DNA, 25 bp, Probe Sequence
atgatgcctactttcttcaagacct

SEQ ID NO: 22471 - DNA, 25 bp, Probe Sequence
catctcctacaagaatgatgcctac

SEQ ID NO: 22472 - DNA, 25 bp, Probe Sequence
gctattaaagggacagaatacttcc

SEQ ID NO: 22473 - DNA, 25 bp, Probe Sequence
aaacaaagctattaaagggacagaa

SEQ ID NO: 22474 - DNA, 25 bp, Probe Sequence
atccttcggcttcatcacctatcag

SEQ ID NO: 22475 - DNA, 25 bp, Probe Sequence
ctcaatatcacctcccttcagatgc

SEQ ID NO: 22476 - DNA, 25 bp, Probe Sequence
aacaaagctattaaagggacagaat

SEQ ID NO: 22477 - DNA, 25 bp, Probe Sequence
atgcctactttcttcaagacctgag

SEQ ID NO: 22478 - DNA, 25 bp, Probe Sequence
gatgcctactttcttcaagacctga

SEQ ID NO: 22479 - DNA, 25 bp, Probe Sequence
gaatcctccatctcagatcttccag

SEQ ID NO: 22480 - DNA, 25 bp, Probe Sequence
cagaatcctccatctcagatcttcc

SEQ ID NO: 22481 - DNA, 25 bp, Probe Sequence
catattgtgtgttctgtgaatgcta

SEQ ID NO: 22482 - DNA, 25 bp, Probe Sequence
atattgtgtgttctgtgaatgctag

SEQ ID NO: 22483 - DNA, 25 bp, Probe Sequence
tcttacagatggacctcttgagaag

SEQ ID NO: 22484 - DNA, 25 bp, Probe Sequence
ggcttagttaagtgagagtgtgaac

SEQ ID NO: 22485 - DNA, 25 bp, Probe Sequence
tggcttagttaagtgagagtgtgaa

SEQ ID NO: 22486 - DNA, 25 bp, Probe Sequence
ccatattgtgtgttctgtgaatgct

SEQ ID NO: 22487 - DNA, 25 bp, Probe Sequence
ttgtggataatacattcaggtggtg

SEQ ID NO: 22488 - DNA, 25 bp, Probe Sequence
gttaagtgagagtgtgaactgtgtg

SEQ ID NO: 22489 - DNA, 25 bp, Probe Sequence
ctggcttagttaagtgagagtgtga

SEQ ID NO: 22490 - DNA, 25 bp, Probe Sequence
tctggcttagttaagtgagagtgtg

SEQ ID NO: 22491 - DNA, 25 bp, Probe Sequence
gtggataatacattcaggtggtgct

SEQ ID NO: 22492 - DNA, 25 bp, Probe Sequence
aagccaggtataatgtaacttcacc

SEQ ID NO: 22493 - DNA, 25 bp, Probe Sequence
tatcaaagagagatgtggaaagagc

SEQ ID NO: 22494 - DNA, 25 bp, Probe Sequence
gctctcttgaatttggatattggtt

SEQ ID NO: 22495 - DNA, 25 bp, Probe Sequence
ggtttcagtccttatcaaagagaga

SEQ ID NO: 22496 - DNA, 25 bp, Probe Sequence
tcagtccttatcaaagagagatgtg

SEQ ID NO: 22497 - DNA, 25 bp, Probe Sequence
ttaagtgagagtgtgaactgtgtgg

SEQ ID NO: 22498 - DNA, 25 bp, Probe Sequence
aagcattatacggtcatcttgaatg

SEQ ID NO: 22499 - DNA, 25 bp, Probe Sequence
gccctcaggttaccaagataaatat

SEQ ID NO: 22500 - DNA, 25 bp, Probe Sequence
cagtccttatcaaagagagatgtgg

SEQ ID NO: 22501 - DNA, 25 bp, Probe Sequence
ccttatcaaagagagatgtggaaag

SEQ ID NO: 22502 - DNA, 25 bp, Probe Sequence
ttcagtccttatcaaagagagatgt

SEQ ID NO: 22503 - DNA, 25 bp, Probe Sequence
gggtttcagtccttatcaaagagag

SEQ ID NO: 22504 - DNA, 25 bp, Probe Sequence
aaagccaggtataatgtaacttcac

SEQ ID NO: 22505 - DNA, 25 bp, Probe Sequence
caagaatatgcctgttcctgtgatg

SEQ ID NO: 22506 - DNA, 25 bp, Probe Sequence
atggcttactggatgaattattaca

SEQ ID NO: 22507 - DNA, 25 bp, Probe Sequence
aggaagtgaagagatcgttctgtaa

SEQ ID NO: 22508 - DNA, 25 bp, Probe Sequence
aagaatatgcctgttcctgtgatgt

SEQ ID NO: 22509 - DNA, 25 bp, Probe Sequence
actggatgaattattacagacaagg

SEQ ID NO: 22510 - DNA, 25 bp, Probe Sequence
tggcttactggatgaattattacag

SEQ ID NO: 22511 - DNA, 25 bp, Probe Sequence
ggcttactggatgaattattacaga

SEQ ID NO: 22512 - DNA, 25 bp, Probe Sequence
taaggaaactgtatgaatgtctgct

SEQ ID NO: 22513 - DNA, 25 bp, Probe Sequence
gaacaaggaagagatggagaaagta

SEQ ID NO: 22514 - DNA, 25 bp, Probe Sequence
agaagagtttgaggatgatgctatt

SEQ ID NO: 22515 - DNA, 25 bp, Probe Sequence
tcccagatatactacaactcaatgc

SEQ ID NO: 22516 - DNA, 25 bp, Probe Sequence
aaagtcggcagagatttatccaata

SEQ ID NO: 22517 - DNA, 25 bp, Probe Sequence
cagaagagtttgaggatgatgctat

SEQ ID NO: 22518 - DNA, 25 bp, Probe Sequence
acaaggaagagatggagaaagtaaa

SEQ ID NO: 22519 - DNA, 25 bp, Probe Sequence
aacaaggaagagatggagaaagtaa

SEQ ID NO: 22520 - DNA, 25 bp, Probe Sequence
aatgctacagttatggataagaccc

SEQ ID NO: 22521 - DNA, 25 bp, Probe Sequence
atgaattattacagacaagggtgct

SEQ ID NO: 22522 - DNA, 25 bp, Probe Sequence
gatgaattattacagacaagggtgc

SEQ ID NO: 22523 - DNA, 25 bp, Probe Sequence
aatggcttactggatgaattattac

SEQ ID NO: 22524 - DNA, 25 bp, Probe Sequence
ataaggaaactgtatgaatgtctgc

SEQ ID NO: 22525 - DNA, 25 bp, Probe Sequence
tggatgaattattacagacaagggt

SEQ ID NO: 22526 - DNA, 25 bp, Probe Sequence
agaatatgcctgttcctgtgatgtg

SEQ ID NO: 22527 - DNA, 25 bp, Probe Sequence
ggatgaattattacagacaagggtg

SEQ ID NO: 22528 - DNA, 25 bp, Probe Sequence
tttgattgactccgttattccgaaa

SEQ ID NO: 22529 - DNA, 25 bp, Probe Sequence
aacctttatccctgcttatctgaaa

SEQ ID NO: 22530 - DNA, 25 bp, Probe Sequence
aaacctttatccctgcttatctgaa

SEQ ID NO: 22531 - DNA, 25 bp, Probe Sequence
aatgtagttctttgttcctgctttc

SEQ ID NO: 22532 - DNA, 25 bp, Probe Sequence
ctttaccttcatttcatcctgttgg

SEQ ID NO: 22533 - DNA, 25 bp, Probe Sequence
ctctcccttctttaccttcatttca

SEQ ID NO: 22534 - DNA, 25 bp, Probe Sequence
tctctcccttctttaccttcatttc

SEQ ID NO: 22535 - DNA, 25 bp, Probe Sequence
cctttatccctgcttatctgaaact

SEQ ID NO: 22536 - DNA, 25 bp, Probe Sequence
gaaacctttatccctgcttatctga

SEQ ID NO: 22537 - DNA, 25 bp, Probe Sequence
tagttctttgttcctgctttctctt

SEQ ID NO: 22538 - DNA, 25 bp, Probe Sequence
actctcctttgatattatgtggctt

SEQ ID NO: 22539 - DNA, 25 bp, Probe Sequence
aactctcctttgatattatgtggct

SEQ ID NO: 22540 - DNA, 25 bp, Probe Sequence
tgtaatgtagttctttgttcctgct

SEQ ID NO: 22541 - DNA, 25 bp, Probe Sequence
atgtaatgtagttctttgttcctgc

SEQ ID NO: 22542 - DNA, 25 bp, Probe Sequence
ccttctttaccttcatttcatcctg

SEQ ID NO: 22543 - DNA, 25 bp, Probe Sequence
cccttctttaccttcatttcatcct

SEQ ID NO: 22544 - DNA, 25 bp, Probe Sequence
tctcccttctttaccttcatttcat

SEQ ID NO: 22545 - DNA, 25 bp, Probe Sequence
tgcttcatatctctcccttctttac

SEQ ID NO: 22546 - DNA, 25 bp, Probe Sequence
ttatccctgcttatctgaaacttcc

SEQ ID NO: 22547 - DNA, 25 bp, Probe Sequence
acctttatccctgcttatctgaaac

SEQ ID NO: 22548 - DNA, 25 bp, Probe Sequence
gtaatgtagttctttgttcctgctt

SEQ ID NO: 22549 - DNA, 25 bp, Probe Sequence
tcccttctttaccttcatttcatcc

SEQ ID NO: 22550 - DNA, 25 bp, Probe Sequence
ctgcttcatatctctcccttcttta

SEQ ID NO: 22551 - DNA, 25 bp, Probe Sequence
atgtagttctttgttcctgctttct

SEQ ID NO: 22552 - DNA, 25 bp, Probe Sequence
ctcccttctttaccttcatttcatc

SEQ ID NO: 22553 - DNA, 25 bp, Probe Sequence
tatcttcatcacacaactcatcaca

SEQ ID NO: 22554 - DNA, 25 bp, Probe Sequence
atcttcatcacacaactcatcacat

SEQ ID NO: 22555 - DNA, 25 bp, Probe Sequence
ctatcttcatcacacaactcatcac

SEQ ID NO: 22556 - DNA, 25 bp, Probe Sequence
tctatcttcatcacacaactcatca

SEQ ID NO: 22557 - DNA, 25 bp, Probe Sequence
gctctatcttcatcacacaactcat

SEQ ID NO: 22558 - DNA, 25 bp, Probe Sequence
ctctatcttcatcacacaactcatc

SEQ ID NO: 22559 - DNA, 25 bp, Probe Sequence
ggctctatcttcatcacacaactca

SEQ ID NO: 22560 - DNA, 25 bp, Probe Sequence
tcttcatcacacaactcatcacatg

SEQ ID NO: 22561 - DNA, 25 bp, Probe Sequence
aatgtactgaactggaaggaagagg

SEQ ID NO: 22562 - DNA, 25 bp, Probe Sequence
accttcattagtacagcttgcatat

SEQ ID NO: 22563 - DNA, 25 bp, Probe Sequence
tcctgagactatgtaaagaaagagc

SEQ ID NO: 22564 - DNA, 25 bp, Probe Sequence
ccttcattagtacagcttgcatatt

SEQ ID NO: 22565 - DNA, 25 bp, Probe Sequence
caccttcattagtacagcttgcata

SEQ ID NO: 22566 - DNA, 25 bp, Probe Sequence
tagatgtagaagagaatctgacagc

SEQ ID NO: 22567 - DNA, 25 bp, Probe Sequence
atgtactgaactggaaggaagagga

SEQ ID NO: 22568 - DNA, 25 bp, Probe Sequence
tacagcaatcatttgaaactccaag

SEQ ID NO: 22569 - DNA, 25 bp, Probe Sequence
tgtactgaactggaaggaagaggaa

SEQ ID NO: 22570 - DNA, 25 bp, Probe Sequence
aaatgtactgaactggaaggaagag

SEQ ID NO: 22571 - DNA, 25 bp, Probe Sequence
tatttcggaaggtacagcaatcatt

SEQ ID NO: 22572 - DNA, 25 bp, Probe Sequence
catcacacaactcatcacatgcttc

SEQ ID NO: 22573 - DNA, 25 bp, Probe Sequence
cttcatcacacaactcatcacatgc

SEQ ID NO: 22574 - DNA, 25 bp, Probe Sequence
ctagaggaagtatttcggaaggtac

SEQ ID NO: 22575 - DNA, 25 bp, Probe Sequence
tagaggaagtatttcggaaggtaca

SEQ ID NO: 22576 - DNA, 25 bp, Probe Sequence
tgtagatgtagaagagaatctgaca

SEQ ID NO: 22577 - DNA, 25 bp, Probe Sequence
gataatcagacagagaagttggaca

SEQ ID NO: 22578 - DNA, 25 bp, Probe Sequence
ataatcagacagagaagttggacac

SEQ ID NO: 22579 - DNA, 25 bp, Probe Sequence
agataatcagacagagaagttggac

SEQ ID NO: 22580 - DNA, 25 bp, Probe Sequence
gtagataatcagacagagaagttgg

SEQ ID NO: 22581 - DNA, 25 bp, Probe Sequence
tagataatcagacagagaagttgga

SEQ ID NO: 22582 - DNA, 25 bp, Probe Sequence
ggctatctaattccacactctgtat

SEQ ID NO: 22583 - DNA, 25 bp, Probe Sequence
taatcagacagagaagttggacacc

SEQ ID NO: 22584 - DNA, 25 bp, Probe Sequence
aggctatctaattccacactctgta

SEQ ID NO: 22585 - DNA, 25 bp, Probe Sequence
aattcagacattaactggcttgttc

SEQ ID NO: 22586 - DNA, 25 bp, Probe Sequence
attcagacattaactggcttgttca

SEQ ID NO: 22587 - DNA, 25 bp, Probe Sequence
gacttcctcatgtgttactctgttg

SEQ ID NO: 22588 - DNA, 25 bp, Probe Sequence
aatatggctcctccttagagttcac

SEQ ID NO: 22589 - DNA, 25 bp, Probe Sequence
ttcagacattaactggcttgttcaa

SEQ ID NO: 22590 - DNA, 25 bp, Probe Sequence
agtagataatcagacagagaagttg

SEQ ID NO: 22591 - DNA, 25 bp, Probe Sequence
gaggctatctaattccacactctgt

SEQ ID NO: 22592 - DNA, 25 bp, Probe Sequence
atagaggctatctaattccacactc

SEQ ID NO: 22593 - DNA, 25 bp, Probe Sequence
gctatctaattccacactctgtatt

SEQ ID NO: 22594 - DNA, 25 bp, Probe Sequence
aatagaggctatctaattccacact

SEQ ID NO: 22595 - DNA, 25 bp, Probe Sequence
tggatgtagtagataatcagacaga

SEQ ID NO: 22596 - DNA, 25 bp, Probe Sequence
tgacttcctcatgtgttactctgtt

SEQ ID NO: 22597 - DNA, 25 bp, Probe Sequence
atatcgttagggtgaagcattatgg

SEQ ID NO: 22598 - DNA, 25 bp, Probe Sequence
ggtgaaagggtttgatatggagaaa

SEQ ID NO: 22599 - DNA, 25 bp, Probe Sequence
atctaattccacactctgtattgaa

SEQ ID NO: 22600 - DNA, 25 bp, Probe Sequence
acccaagatatttatcattcaggca

SEQ ID NO: 22601 - DNA, 25 bp, Probe Sequence
tgagacagataagagaataccttgg

SEQ ID NO: 22602 - DNA, 25 bp, Probe Sequence
gagacagataagagaataccttggt

SEQ ID NO: 22603 - DNA, 25 bp, Probe Sequence
ggttgtcagatagtctatgtatgtg

SEQ ID NO: 22604 - DNA, 25 bp, Probe Sequence
gctgagacagataagagaatacctt

SEQ ID NO: 22605 - DNA, 25 bp, Probe Sequence
gacagataagagaataccttggtct

SEQ ID NO: 22606 - DNA, 25 bp, Probe Sequence
agacagataagagaataccttggtc

SEQ ID NO: 22607 - DNA, 25 bp, Probe Sequence
gttgtcagatagtctatgtatgtgt

SEQ ID NO: 22608 - DNA, 25 bp, Probe Sequence
ctgagacagataagagaataccttg

SEQ ID NO: 22609 - DNA, 25 bp, Probe Sequence
taagtgaggaagagtttatggcaaa

SEQ ID NO: 22610 - DNA, 25 bp, Probe Sequence
tgaggaagagtttatggcaaagatt

SEQ ID NO: 22611 - DNA, 25 bp, Probe Sequence
gaggaagagtttatggcaaagattt

SEQ ID NO: 22612 - DNA, 25 bp, Probe Sequence
gtgaggaagagtttatggcaaagat

SEQ ID NO: 22613 - DNA, 25 bp, Probe Sequence
ataagtgaggaagagtttatggcaa

SEQ ID NO: 22614 - DNA, 25 bp, Probe Sequence
gagctgagacagataagagaatacc

SEQ ID NO: 22615 - DNA, 25 bp, Probe Sequence
aagtgaggaagagtttatggcaaag

SEQ ID NO: 22616 - DNA, 25 bp, Probe Sequence
agctgagacagataagagaatacct

SEQ ID NO: 22617 - DNA, 25 bp, Probe Sequence
tcatttattcattgggttgtcagat

SEQ ID NO: 22618 - DNA, 25 bp, Probe Sequence
atcatttattcattgggttgtcaga

SEQ ID NO: 22619 - DNA, 25 bp, Probe Sequence
cattgggttgtcagatagtctatgt

SEQ ID NO: 22620 - DNA, 25 bp, Probe Sequence
tcattgggttgtcagatagtctatg

SEQ ID NO: 22621 - DNA, 25 bp, Probe Sequence
tgagctgagacagataagagaatac

SEQ ID NO: 22622 - DNA, 25 bp, Probe Sequence
gtgagctgagacagataagagaata

SEQ ID NO: 22623 - DNA, 25 bp, Probe Sequence
tataagtgaggaagagtttatggca

SEQ ID NO: 22624 - DNA, 25 bp, Probe Sequence
attcattgggttgtcagatagtcta

SEQ ID NO: 22625 - DNA, 25 bp, Probe Sequence
tatgaagtaagcaacaaggatgaca

SEQ ID NO: 22626 - DNA, 25 bp, Probe Sequence
ctatgaagtaagcaacaaggatgac

SEQ ID NO: 22627 - DNA, 25 bp, Probe Sequence
atcctgactgaagtgaactatgaag

SEQ ID NO: 22628 - DNA, 25 bp, Probe Sequence
aagtaagcaacaaggatgacaagaa

SEQ ID NO: 22629 - DNA, 25 bp, Probe Sequence
atgaagtaagcaacaaggatgacaa

SEQ ID NO: 22630 - DNA, 25 bp, Probe Sequence
catcctgactgaagtgaactatgaa

SEQ ID NO: 22631 - DNA, 25 bp, Probe Sequence
gaagtaagcaacaaggatgacaaga

SEQ ID NO: 22632 - DNA, 25 bp, Probe Sequence
tgaagtaagcaacaaggatgacaag

SEQ ID NO: 22633 - DNA, 25 bp, Probe Sequence
actatgaagtaagcaacaaggatga

SEQ ID NO: 22634 - DNA, 25 bp, Probe Sequence
tgaactatgaagtaagcaacaagga

SEQ ID NO: 22635 - DNA, 25 bp, Probe Sequence
gtgaactatgaagtaagcaacaagg

SEQ ID NO: 22636 - DNA, 25 bp, Probe Sequence
actgaagtgaactatgaagtaagca

SEQ ID NO: 22637 - DNA, 25 bp, Probe Sequence
cctgactgaagtgaactatgaagta

SEQ ID NO: 22638 - DNA, 25 bp, Probe Sequence
gactgaagtgaactatgaagtaagc

SEQ ID NO: 22639 - DNA, 25 bp, Probe Sequence
gatattctcaccatcctgactgaag

SEQ ID NO: 22640 - DNA, 25 bp, Probe Sequence
aactatgaagtaagcaacaaggatg

SEQ ID NO: 22641 - DNA, 25 bp, Probe Sequence
agtgaactatgaagtaagcaacaag

SEQ ID NO: 22642 - DNA, 25 bp, Probe Sequence
gaagtgaactatgaagtaagcaaca

SEQ ID NO: 22643 - DNA, 25 bp, Probe Sequence
tgaagtgaactatgaagtaagcaac

SEQ ID NO: 22644 - DNA, 25 bp, Probe Sequence
atgatattctcaccatcctgactga

SEQ ID NO: 22645 - DNA, 25 bp, Probe Sequence
gaactatgaagtaagcaacaaggat

SEQ ID NO: 22646 - DNA, 25 bp, Probe Sequence
ctgaagtgaactatgaagtaagcaa

SEQ ID NO: 22647 - DNA, 25 bp, Probe Sequence
atattctcaccatcctgactgaagt

SEQ ID NO: 22648 - DNA, 25 bp, Probe Sequence
tgatattctcaccatcctgactgaa

SEQ ID NO: 22649 - DNA, 25 bp, Probe Sequence
gattaacctctgcactactgacatg

SEQ ID NO: 22650 - DNA, 25 bp, Probe Sequence
tacacacaaaccagtatcgctcata

SEQ ID NO: 22651 - DNA, 25 bp, Probe Sequence
acacaaaccagtatcgctcatagat

SEQ ID NO: 22652 - DNA, 25 bp, Probe Sequence
caaaccagtatcgctcatagatcag

SEQ ID NO: 22653 - DNA, 25 bp, Probe Sequence
ggattaacctctgcactactgacat

SEQ ID NO: 22654 - DNA, 25 bp, Probe Sequence
cacaaaccagtatcgctcatagatc

SEQ ID NO: 22655 - DNA, 25 bp, Probe Sequence
acaaaccagtatcgctcatagatca

SEQ ID NO: 22656 - DNA, 25 bp, Probe Sequence
gttctcaggtgttgccaaatatgtc

SEQ ID NO: 22657 - DNA, 25 bp, Probe Sequence
cacacaaaccagtatcgctcataga

SEQ ID NO: 22658 - DNA, 25 bp, Probe Sequence
aaggttctcaggtgttgccaaatat

SEQ ID NO: 22659 - DNA, 25 bp, Probe Sequence
acacacaaaccagtatcgctcatag

SEQ ID NO: 22660 - DNA, 25 bp, Probe Sequence
ctacacacaaaccagtatcgctcat

SEQ ID NO: 22661 - DNA, 25 bp, Probe Sequence
aaaggttctcaggtgttgccaaata

SEQ ID NO: 22662 - DNA, 25 bp, Probe Sequence
ttctcaggtgttgccaaatatgtcc

SEQ ID NO: 22663 - DNA, 25 bp, Probe Sequence
aggttctcaggtgttgccaaatatg

SEQ ID NO: 22664 - DNA, 25 bp, Probe Sequence
tatgtcctggggtataaaactttcc

SEQ ID NO: 22665 - DNA, 25 bp, Probe Sequence
ggttctcaggtgttgccaaatatgt

SEQ ID NO: 22666 - DNA, 25 bp, Probe Sequence
attaacctctgcactactgacatgt

SEQ ID NO: 22667 - DNA, 25 bp, Probe Sequence
tataaaactttcctcgcctgacaac

SEQ ID NO: 22668 - DNA, 25 bp, Probe Sequence
gtataaaactttcctcgcctgacaa

SEQ ID NO: 22669 - DNA, 25 bp, Probe Sequence
atgtcctggggtataaaactttcct

SEQ ID NO: 22670 - DNA, 25 bp, Probe Sequence
cagtatcgctcatagatcagcaaac

SEQ ID NO: 22671 - DNA, 25 bp, Probe Sequence
caaatatgtcctggggtataaaact

SEQ ID NO: 22672 - DNA, 25 bp, Probe Sequence
atatgtcctggggtataaaactttc

SEQ ID NO: 22673 - DNA, 25 bp, Probe Sequence
caaggaatgaagaacaacaactctc

SEQ ID NO: 22674 - DNA, 25 bp, Probe Sequence
gaatgaagaacaacaactctcagtg

SEQ ID NO: 22675 - DNA, 25 bp, Probe Sequence
aaggaatgaagaacaacaactctca

SEQ ID NO: 22676 - DNA, 25 bp, Probe Sequence
tcaaggaatgaagaacaacaactct

SEQ ID NO: 22677 - DNA, 25 bp, Probe Sequence
gtcaaggaatgaagaacaacaactc

SEQ ID NO: 22678 - DNA, 25 bp, Probe Sequence
aggaatgaagaacaacaactctcag

SEQ ID NO: 22679 - DNA, 25 bp, Probe Sequence
atgtcaaggaatgaagaacaacaac

SEQ ID NO: 22680 - DNA, 25 bp, Probe Sequence
aatgtcaaggaatgaagaacaacaa

SEQ ID NO: 22681 - DNA, 25 bp, Probe Sequence
ggaatgaagaacaacaactctcagt

SEQ ID NO: 22682 - DNA, 25 bp, Probe Sequence
aatgaagaacaacaactctcagtgg

SEQ ID NO: 22683 - DNA, 25 bp, Probe Sequence
tgtcaaggaatgaagaacaacaact

SEQ ID NO: 22684 - DNA, 25 bp, Probe Sequence
ttctctgttaattcctggaactgta

SEQ ID NO: 22685 - DNA, 25 bp, Probe Sequence
tctctgttaattcctggaactgtat

SEQ ID NO: 22686 - DNA, 25 bp, Probe Sequence
ctctgttaattcctggaactgtatt

SEQ ID NO: 22687 - DNA, 25 bp, Probe Sequence
atgaagaacaacaactctcagtggt

SEQ ID NO: 22688 - DNA, 25 bp, Probe Sequence
ccaccttgttactgctactacactt

SEQ ID NO: 22689 - DNA, 25 bp, Probe Sequence
ggcattaggagtgtttcatttgata

SEQ ID NO: 22690 - DNA, 25 bp, Probe Sequence
gggcattaggagtgtttcatttgat

SEQ ID NO: 22691 - DNA, 25 bp, Probe Sequence
aagggcattaggagtgtttcatttg

SEQ ID NO: 22692 - DNA, 25 bp, Probe Sequence
gaagggcattaggagtgtttcattt

SEQ ID NO: 22693 - DNA, 25 bp, Probe Sequence
aaatgtcaaggaatgaagaacaaca

SEQ ID NO: 22694 - DNA, 25 bp, Probe Sequence
accttgttactgctactacactttg

SEQ ID NO: 22695 - DNA, 25 bp, Probe Sequence
caccttgttactgctactacacttt

SEQ ID NO: 22696 - DNA, 25 bp, Probe Sequence
tgaagaacaacaactctcagtggtg

SEQ ID NO: 22697 - DNA, 25 bp, Probe Sequence
tagttggcaagtctcacatattcat

SEQ ID NO: 22698 - DNA, 25 bp, Probe Sequence
ttggcaagtctcacatattcatcag

SEQ ID NO: 22699 - DNA, 25 bp, Probe Sequence
agttggcaagtctcacatattcatc

SEQ ID NO: 22700 - DNA, 25 bp, Probe Sequence
ctctagttggcaagtctcacatatt

SEQ ID NO: 22701 - DNA, 25 bp, Probe Sequence
tctagttggcaagtctcacatattc

SEQ ID NO: 22702 - DNA, 25 bp, Probe Sequence
ctagttggcaagtctcacatattca

SEQ ID NO: 22703 - DNA, 25 bp, Probe Sequence
gttggcaagtctcacatattcatca

SEQ ID NO: 22704 - DNA, 25 bp, Probe Sequence
aagtctcacatattcatcagcagga

SEQ ID NO: 22705 - DNA, 25 bp, Probe Sequence
caagtctcacatattcatcagcagg

SEQ ID NO: 22706 - DNA, 25 bp, Probe Sequence
ttatccagcagtcaattaactctcc

SEQ ID NO: 22707 - DNA, 25 bp, Probe Sequence
aataattggagttcatactgatgcc

SEQ ID NO: 22708 - DNA, 25 bp, Probe Sequence
ggcaacaataattggagttcatact

SEQ ID NO: 22709 - DNA, 25 bp, Probe Sequence
tatccagcagtcaattaactctcca

SEQ ID NO: 22710 - DNA, 25 bp, Probe Sequence
gcaagtctcacatattcatcagcag

SEQ ID NO: 22711 - DNA, 25 bp, Probe Sequence
cctctagttggcaagtctcacatat

SEQ ID NO: 22712 - DNA, 25 bp, Probe Sequence
gcaacaataattggagttcatactg

SEQ ID NO: 22713 - DNA, 25 bp, Probe Sequence
caataattggagttcatactgatgc

SEQ ID NO: 22714 - DNA, 25 bp, Probe Sequence
agtctcacatattcatcagcaggag

SEQ ID NO: 22715 - DNA, 25 bp, Probe Sequence
gtctcacatattcatcagcaggagt

SEQ ID NO: 22716 - DNA, 25 bp, Probe Sequence
atccagcagtcaattaactctccag

SEQ ID NO: 22717 - DNA, 25 bp, Probe Sequence
cattgtgcttggtagatttagtgtt

SEQ ID NO: 22718 - DNA, 25 bp, Probe Sequence
gatttgctctctaaacttccctcta

SEQ ID NO: 22719 - DNA, 25 bp, Probe Sequence
gtatattaggaaactgggatgggag

SEQ ID NO: 22720 - DNA, 25 bp, Probe Sequence
ttgatttgctctctaaacttccctc

SEQ ID NO: 22721 - DNA, 25 bp, Probe Sequence
ttgttgctatcaatccaagaactta

SEQ ID NO: 22722 - DNA, 25 bp, Probe Sequence
tgttgctatcaatccaagaacttat

SEQ ID NO: 22723 - DNA, 25 bp, Probe Sequence
gttgctatcaatccaagaacttatt

SEQ ID NO: 22724 - DNA, 25 bp, Probe Sequence
ctttgttgctatcaatccaagaact

SEQ ID NO: 22725 - DNA, 25 bp, Probe Sequence
tttgttgctatcaatccaagaactt

SEQ ID NO: 22726 - DNA, 25 bp, Probe Sequence
cctttgttgctatcaatccaagaac

SEQ ID NO: 22727 - DNA, 25 bp, Probe Sequence
tagttcttcaaagatagggagggaa

SEQ ID NO: 22728 - DNA, 25 bp, Probe Sequence
ttagttcttcaaagatagggaggga

SEQ ID NO: 22729 - DNA, 25 bp, Probe Sequence
tttagttcttcaaagatagggaggg

SEQ ID NO: 22730 - DNA, 25 bp, Probe Sequence
gttagtcaacgccatgttcttcaag

SEQ ID NO: 22731 - DNA, 25 bp, Probe Sequence
gcctttgttgctatcaatccaagaa

SEQ ID NO: 22732 - DNA, 25 bp, Probe Sequence
tgttagtcaacgccatgttcttcaa

SEQ ID NO: 22733 - DNA, 25 bp, Probe Sequence
caactactacgacgacgagaaggaa

SEQ ID NO: 22734 - DNA, 25 bp, Probe Sequence
gctatcaatccaagaacttatttgt

SEQ ID NO: 22735 - DNA, 25 bp, Probe Sequence
tgctatcaatccaagaacttatttg

SEQ ID NO: 22736 - DNA, 25 bp, Probe Sequence
ctgttagtcaacgccatgttcttca

SEQ ID NO: 22737 - DNA, 25 bp, Probe Sequence
ctagaattcactccacttggacatg

SEQ ID NO: 22738 - DNA, 25 bp, Probe Sequence
aactactacgacgacgagaaggaaa

SEQ ID NO: 22739 - DNA, 25 bp, Probe Sequence
ttgctatcaatccaagaacttattt

SEQ ID NO: 22740 - DNA, 25 bp, Probe Sequence
ttagtcaacgccatgttcttcaagc

SEQ ID NO: 22741 - DNA, 25 bp, Probe Sequence
cctgttagtcaacgccatgttcttc

SEQ ID NO: 22742 - DNA, 25 bp, Probe Sequence
tagaattcactccacttggacatgg

SEQ ID NO: 22743 - DNA, 25 bp, Probe Sequence
gctagaattcactccacttggacat

SEQ ID NO: 22744 - DNA, 25 bp, Probe Sequence
acatgagcctttgttgctatcaatc

SEQ ID NO: 22745 - DNA, 25 bp, Probe Sequence
accaactgtgtcctgtgaatgtatc

SEQ ID NO: 22746 - DNA, 25 bp, Probe Sequence
cctgtgaatgtatcgctactgtgag

SEQ ID NO: 22747 - DNA, 25 bp, Probe Sequence
gtcctgtgaatgtatcgctactgtg

SEQ ID NO: 22748 - DNA, 25 bp, Probe Sequence
gtgtcctgtgaatgtatcgctactg

SEQ ID NO: 22749 - DNA, 25 bp, Probe Sequence
ctgtgtcctgtgaatgtatcgctac

SEQ ID NO: 22750 - DNA, 25 bp, Probe Sequence
tcctgtgaatgtatcgctactgtga

SEQ ID NO: 22751 - DNA, 25 bp, Probe Sequence
actgtgtcctgtgaatgtatcgcta

SEQ ID NO: 22752 - DNA, 25 bp, Probe Sequence
tgtcctgtgaatgtatcgctactgt

SEQ ID NO: 22753 - DNA, 25 bp, Probe Sequence
tgtgtcctgtgaatgtatcgctact

SEQ ID NO: 22754 - DNA, 25 bp, Probe Sequence
ccaactgtgtcctgtgaatgtatcg

SEQ ID NO: 22755 - DNA, 25 bp, Probe Sequence
ttccttgggtatgaatgtgtgagtt

SEQ ID NO: 22756 - DNA, 25 bp, Probe Sequence
gtttgctcttccttgggtatgaatg

SEQ ID NO: 22757 - DNA, 25 bp, Probe Sequence
caccaactgtgtcctgtgaatgtat

SEQ ID NO: 22758 - DNA, 25 bp, Probe Sequence
tcttccttgggtatgaatgtgtgag

SEQ ID NO: 22759 - DNA, 25 bp, Probe Sequence
ctcttccttgggtatgaatgtgtga

SEQ ID NO: 22760 - DNA, 25 bp, Probe Sequence
aagtgcttgtgtagaaactgtgttc

SEQ ID NO: 22761 - DNA, 25 bp, Probe Sequence
catgagctgctgtaaactatttgtg

SEQ ID NO: 22762 - DNA, 25 bp, Probe Sequence
tttgctcttccttgggtatgaatgt

SEQ ID NO: 22763 - DNA, 25 bp, Probe Sequence
tgtttgctcttccttgggtatgaat

SEQ ID NO: 22764 - DNA, 25 bp, Probe Sequence
ctgtaaactatttgtggctgtgctg

SEQ ID NO: 22765 - DNA, 25 bp, Probe Sequence
ctgctgtaaactatttgtggctgtg

SEQ ID NO: 22766 - DNA, 25 bp, Probe Sequence
tccttgggtatgaatgtgtgagttc

SEQ ID NO: 22767 - DNA, 25 bp, Probe Sequence
cttccttgggtatgaatgtgtgagt

SEQ ID NO: 22768 - DNA, 25 bp, Probe Sequence
atgagctgctgtaaactatttgtgg

SEQ ID NO: 22769 - DNA, 25 bp, Probe Sequence
aacaagactgatgttgtctgtggtc

SEQ ID NO: 22770 - DNA, 25 bp, Probe Sequence
acaaacaagactgatgttgtctgtg

SEQ ID NO: 22771 - DNA, 25 bp, Probe Sequence
cacaaacaagactgatgttgtctgt

SEQ ID NO: 22772 - DNA, 25 bp, Probe Sequence
caaacaagactgatgttgtctgtgg

SEQ ID NO: 22773 - DNA, 25 bp, Probe Sequence
aaacaagactgatgttgtctgtggt

SEQ ID NO: 22774 - DNA, 25 bp, Probe Sequence
gcacaaacaagactgatgttgtctg

SEQ ID NO: 22775 - DNA, 25 bp, Probe Sequence
aggcacaaacaagactgatgttgtc

SEQ ID NO: 22776 - DNA, 25 bp, Probe Sequence
acaagactgatgttgtctgtggtcc

SEQ ID NO: 22777 - DNA, 25 bp, Probe Sequence
caggcacaaacaagactgatgttgt

SEQ ID NO: 22778 - DNA, 25 bp, Probe Sequence
ggcacaaacaagactgatgttgtct

SEQ ID NO: 22779 - DNA, 25 bp, Probe Sequence
cttggacaagctgtgagaccaaaga

SEQ ID NO: 22780 - DNA, 25 bp, Probe Sequence
aaaatgtcacccttggacaagctgt

SEQ ID NO: 22781 - DNA, 25 bp, Probe Sequence
gtaatcccatgctaacctgtaatcc

SEQ ID NO: 22782 - DNA, 25 bp, Probe Sequence
cgtaatcccatgctaacctgtaatc

SEQ ID NO: 22783 - DNA, 25 bp, Probe Sequence
agagccagactgtctcaaataaata

SEQ ID NO: 22784 - DNA, 25 bp, Probe Sequence
taatcccatgctaacctgtaatccc

SEQ ID NO: 22785 - DNA, 25 bp, Probe Sequence
gagccagactgtctcaaataaataa

SEQ ID NO: 22786 - DNA, 25 bp, Probe Sequence
agccagactgtctcaaataaataaa

SEQ ID NO: 22787 - DNA, 25 bp, Probe Sequence
cgctggctcaaagacaatgttattt

SEQ ID NO: 22788 - DNA, 25 bp, Probe Sequence
cagagccagactgtctcaaataaat

SEQ ID NO: 22789 - DNA, 25 bp, Probe Sequence
aaatatgagataatgcagtcgggag

SEQ ID NO: 22790 - DNA, 25 bp, Probe Sequence
taaatatgagataatgcagtcggga

SEQ ID NO: 22791 - DNA, 25 bp, Probe Sequence
catggtgtaaacactgtctctacta

SEQ ID NO: 22792 - DNA, 25 bp, Probe Sequence
atatgagataatgcagtcgggagaa

SEQ ID NO: 22793 - DNA, 25 bp, Probe Sequence
aatatgagataatgcagtcgggaga

SEQ ID NO: 22794 - DNA, 25 bp, Probe Sequence
tggtgtaaacactgtctctactaaa

SEQ ID NO: 22795 - DNA, 25 bp, Probe Sequence
aacatggtgtaaacactgtctctac

SEQ ID NO: 22796 - DNA, 25 bp, Probe Sequence
caacatggtgtaaacactgtctcta

SEQ ID NO: 22797 - DNA, 25 bp, Probe Sequence
ataaatatgagataatgcagtcggg

SEQ ID NO: 22798 - DNA, 25 bp, Probe Sequence
atggtgtaaacactgtctctactaa

SEQ ID NO: 22799 - DNA, 25 bp, Probe Sequence
gccagactgtctcaaataaataaat

SEQ ID NO: 22800 - DNA, 25 bp, Probe Sequence
acatggtgtaaacactgtctctact

SEQ ID NO: 22801 - DNA, 25 bp, Probe Sequence
tatgagataatgcagtcgggagaag

SEQ ID NO: 22802 - DNA, 25 bp, Probe Sequence
tatgtaaatctttgacggggttttc

SEQ ID NO: 22803 - DNA, 25 bp, Probe Sequence
ttttattaaatgtgacgaactgccc

SEQ ID NO: 22804 - DNA, 25 bp, Probe Sequence
gagaagggagggagagaattttatt

SEQ ID NO: 22805 - DNA, 25 bp, Probe Sequence
agtgcttgttctaagattaccttct

SEQ ID NO: 22806 - DNA, 25 bp, Probe Sequence
tagtgcttgttctaagattaccttc

SEQ ID NO: 22807 - DNA, 25 bp, Probe Sequence
atagagagagactatcctggagaag

SEQ ID NO: 22808 - DNA, 25 bp, Probe Sequence
ggtaaggtgagtgtcttagcatatt

SEQ ID NO: 22809 - DNA, 25 bp, Probe Sequence
ggttagtattggtgtatgtatgagt

SEQ ID NO: 22810 - DNA, 25 bp, Probe Sequence
tagagagagactatcctggagaagc

SEQ ID NO: 22811 - DNA, 25 bp, Probe Sequence
gttagtgcttgttctaagattacct

SEQ ID NO: 22812 - DNA, 25 bp, Probe Sequence
agttagtgcttgttctaagattacc

SEQ ID NO: 22813 - DNA, 25 bp, Probe Sequence
tatagagagagactatcctggagaa

SEQ ID NO: 22814 - DNA, 25 bp, Probe Sequence
ttatagagagagactatcctggaga

SEQ ID NO: 22815 - DNA, 25 bp, Probe Sequence
ggtgtatgtatgagtatctgtatgt

SEQ ID NO: 22816 - DNA, 25 bp, Probe Sequence
tggtgtatgtatgagtatctgtatg

SEQ ID NO: 22817 - DNA, 25 bp, Probe Sequence
aatctctccctcctcagtaaatgta

SEQ ID NO: 22818 - DNA, 25 bp, Probe Sequence
ctgtgggttagtattggtgtatgta

SEQ ID NO: 22819 - DNA, 25 bp, Probe Sequence
gtaactgatttgtattctgtgagca

SEQ ID NO: 22820 - DNA, 25 bp, Probe Sequence
tgtgggttagtattggtgtatgtat

SEQ ID NO: 22821 - DNA, 25 bp, Probe Sequence
ttagtgcttgttctaagattacctt

SEQ ID NO: 22822 - DNA, 25 bp, Probe Sequence
gtctgtgggttagtattggtgtatg

SEQ ID NO: 22823 - DNA, 25 bp, Probe Sequence
tgggttagtattggtgtatgtatga

SEQ ID NO: 22824 - DNA, 25 bp, Probe Sequence
gtgggttagtattggtgtatgtatg

SEQ ID NO: 22825 - DNA, 25 bp, Probe Sequence
tctgtgggttagtattggtgtatgt

SEQ ID NO: 22826 - DNA, 25 bp, Probe Sequence
tgtctgtgggttagtattggtgtat

SEQ ID NO: 22827 - DNA, 25 bp, Probe Sequence
agtaactgatttgtattctgtgagc

SEQ ID NO: 22828 - DNA, 25 bp, Probe Sequence
gaatctctccctcctcagtaaatgt

SEQ ID NO: 22829 - DNA, 25 bp, Probe Sequence
aattaaaacactttcaaaacaggaa

SEQ ID NO: 22830 - DNA, 25 bp, Probe Sequence
ttaaaacactttcaaaacaggaaaa

SEQ ID NO: 22831 - DNA, 25 bp, Probe Sequence
attaaaacactttcaaaacaggaaa

SEQ ID NO: 22832 - DNA, 25 bp, Probe Sequence
taattaaaacactttcaaaacagga

SEQ ID NO: 22833 - DNA, 25 bp, Probe Sequence
atcatccttcctctgttctctttcc

SEQ ID NO: 22834 - DNA, 25 bp, Probe Sequence
gatcatccttcctctgttctctttc

SEQ ID NO: 22835 - DNA, 25 bp, Probe Sequence
ccaagtcaatcagaaccacaacagg

SEQ ID NO: 22836 - DNA, 25 bp, Probe Sequence
ctgcaatttcttcctgagatttcta

SEQ ID NO: 22837 - DNA, 25 bp, Probe Sequence
caagtcaatcagaaccacaacaggt

SEQ ID NO: 22838 - DNA, 25 bp, Probe Sequence
tgcaatttcttcctgagatttctat

SEQ ID NO: 22839 - DNA, 25 bp, Probe Sequence
atgctgcaatttcttcctgagattt

SEQ ID NO: 22840 - DNA, 25 bp, Probe Sequence
ggatcatccttcctctgttctcttt

SEQ ID NO: 22841 - DNA, 25 bp, Probe Sequence
gcaatttcttcctgagatttctata

SEQ ID NO: 22842 - DNA, 25 bp, Probe Sequence
atccttcctctgttctctttccctg

SEQ ID NO: 22843 - DNA, 25 bp, Probe Sequence
catccttcctctgttctctttccct

SEQ ID NO: 22844 - DNA, 25 bp, Probe Sequence
tcatccttcctctgttctctttccc

SEQ ID NO: 22845 - DNA, 25 bp, Probe Sequence
gctgcaatttcttcctgagatttct

SEQ ID NO: 22846 - DNA, 25 bp, Probe Sequence
cgtggaaacaatcatcagatccttg

SEQ ID NO: 22847 - DNA, 25 bp, Probe Sequence
tgctgcaatttcttcctgagatttc

SEQ ID NO: 22848 - DNA, 25 bp, Probe Sequence
catgctgcaatttcttcctgagatt

SEQ ID NO: 22849 - DNA, 25 bp, Probe Sequence
gtggaaacaatcatcagatccttgc

SEQ ID NO: 22850 - DNA, 25 bp, Probe Sequence
cccaagtcaatcagaaccacaacag

SEQ ID NO: 22851 - DNA, 25 bp, Probe Sequence
catcttcccatgctgcaatttcttc

SEQ ID NO: 22852 - DNA, 25 bp, Probe Sequence
cttgcttccagaaagggttttaaag

SEQ ID NO: 22853 - DNA, 25 bp, Probe Sequence
tggaaacaatcatcagatccttgcc

SEQ ID NO: 22854 - DNA, 25 bp, Probe Sequence
acgtggaaacaatcatcagatcctt

SEQ ID NO: 22855 - DNA, 25 bp, Probe Sequence
gagagactactgaccttctcacctc

SEQ ID NO: 22856 - DNA, 25 bp, Probe Sequence
aagtcaatcagaaccacaacaggtt

SEQ ID NO: 22857 - DNA, 25 bp, Probe Sequence
atcttctatcagtagcagtattgtt

SEQ ID NO: 22858 - DNA, 25 bp, Probe Sequence
taaggattatgctgcactgtactac

SEQ ID NO: 22859 - DNA, 25 bp, Probe Sequence
ttaaggattatgctgcactgtacta

SEQ ID NO: 22860 - DNA, 25 bp, Probe Sequence
gatcttctatcagtagcagtattgt

SEQ ID NO: 22861 - DNA, 25 bp, Probe Sequence
cagtaattgccttacatgacttgaa

SEQ ID NO: 22862 - DNA, 25 bp, Probe Sequence
acagtaattgccttacatgacttga

SEQ ID NO: 22863 - DNA, 25 bp, Probe Sequence
cacagtaattgccttacatgacttg

SEQ ID NO: 22864 - DNA, 25 bp, Probe Sequence
tatgaactttactctgacctgtgat

SEQ ID NO: 22865 - DNA, 25 bp, Probe Sequence
atatgaactttactctgacctgtga

SEQ ID NO: 22866 - DNA, 25 bp, Probe Sequence
acacagtaattgccttacatgactt

SEQ ID NO: 22867 - DNA, 25 bp, Probe Sequence
aacacagtaattgccttacatgact

SEQ ID NO: 22868 - DNA, 25 bp, Probe Sequence
caacacagtaattgccttacatgac

SEQ ID NO: 22869 - DNA, 25 bp, Probe Sequence
tttactattacagggacctcaacac

SEQ ID NO: 22870 - DNA, 25 bp, Probe Sequence
aggtctattatcccaacagaagaga

SEQ ID NO: 22871 - DNA, 25 bp, Probe Sequence
caaggtctattatcccaacagaaga

SEQ ID NO: 22872 - DNA, 25 bp, Probe Sequence
gtattgttacttctttccaggatgc

SEQ ID NO: 22873 - DNA, 25 bp, Probe Sequence
ttactattacagggacctcaacact

SEQ ID NO: 22874 - DNA, 25 bp, Probe Sequence
ggtctattatcccaacagaagagaa

SEQ ID NO: 22875 - DNA, 25 bp, Probe Sequence
aaggtctattatcccaacagaagag

SEQ ID NO: 22876 - DNA, 25 bp, Probe Sequence
gtttactattacagggacctcaaca

SEQ ID NO: 22877 - DNA, 25 bp, Probe Sequence
cttctatcagtagcagtattgttac

SEQ ID NO: 22878 - DNA, 25 bp, Probe Sequence
tcttctatcagtagcagtattgtta

SEQ ID NO: 22879 - DNA, 25 bp, Probe Sequence
tcctgtttgtgatctattatgcctt

SEQ ID NO: 22880 - DNA, 25 bp, Probe Sequence
ttcctgtttgtgatctattatgcct

SEQ ID NO: 22881 - DNA, 25 bp, Probe Sequence
acaagacacagtgaccatactaatt

SEQ ID NO: 22882 - DNA, 25 bp, Probe Sequence
ctacaagacacagtgaccatactaa

SEQ ID NO: 22883 - DNA, 25 bp, Probe Sequence
tacaagacacagtgaccatactaat

SEQ ID NO: 22884 - DNA, 25 bp, Probe Sequence
atcctacaagacacagtgaccatac

SEQ ID NO: 22885 - DNA, 25 bp, Probe Sequence
catcctacaagacacagtgaccata

SEQ ID NO: 22886 - DNA, 25 bp, Probe Sequence
cctacaagacacagtgaccatacta

SEQ ID NO: 22887 - DNA, 25 bp, Probe Sequence
ggattagtacacacttgttgatgat

SEQ ID NO: 22888 - DNA, 25 bp, Probe Sequence
acacacttgttgatgattaatggaa

SEQ ID NO: 22889 - DNA, 25 bp, Probe Sequence
gatagtgaggcatcgcaatgtaaga

SEQ ID NO: 22890 - DNA, 25 bp, Probe Sequence
caagacacagtgaccatactaatta

SEQ ID NO: 22891 - DNA, 25 bp, Probe Sequence
tcctacaagacacagtgaccatact

SEQ ID NO: 22892 - DNA, 25 bp, Probe Sequence
gtacacacttgttgatgattaatgg

SEQ ID NO: 22893 - DNA, 25 bp, Probe Sequence
atagtgaggcatcgcaatgtaagac

SEQ ID NO: 22894 - DNA, 25 bp, Probe Sequence
tacacacttgttgatgattaatgga

SEQ ID NO: 22895 - DNA, 25 bp, Probe Sequence
acacagtgaccatactaattatacc

SEQ ID NO: 22896 - DNA, 25 bp, Probe Sequence
aagacacagtgaccatactaattat

SEQ ID NO: 22897 - DNA, 25 bp, Probe Sequence
caaacatcctacaagacacagtgac

SEQ ID NO: 22898 - DNA, 25 bp, Probe Sequence
gattagtacacacttgttgatgatt

SEQ ID NO: 22899 - DNA, 25 bp, Probe Sequence
acatcctacaagacacagtgaccat

SEQ ID NO: 22900 - DNA, 25 bp, Probe Sequence
gctgctcaataaagtacaagagttt

SEQ ID NO: 22901 - DNA, 25 bp, Probe Sequence
taagactcgggattagtacacactt

SEQ ID NO: 22902 - DNA, 25 bp, Probe Sequence
gcaatgtaagactcgggattagtac

SEQ ID NO: 22903 - DNA, 25 bp, Probe Sequence
ggatagtgaggcatcgcaatgtaag

SEQ ID NO: 22904 - DNA, 25 bp, Probe Sequence
aacatcctacaagacacagtgacca

SEQ ID NO: 22905 - DNA, 25 bp, Probe Sequence
ctgagaggttcttgaagatgtttat

SEQ ID NO: 22906 - DNA, 25 bp, Probe Sequence
cctgagaggttcttgaagatgttta

SEQ ID NO: 22907 - DNA, 25 bp, Probe Sequence
gtttctgagtgtagtgtggtaggac

SEQ ID NO: 22908 - DNA, 25 bp, Probe Sequence
tgagaggttcttgaagatgtttatt

SEQ ID NO: 22909 - DNA, 25 bp, Probe Sequence
gagaggttcttgaagatgtttattt

SEQ ID NO: 22910 - DNA, 25 bp, Probe Sequence
ccctgagaggttcttgaagatgttt

SEQ ID NO: 22911 - DNA, 25 bp, Probe Sequence
cgtttctgagtgtagtgtggtagga

SEQ ID NO: 22912 - DNA, 25 bp, Probe Sequence
aattcttgtacgcagttttctttgg

SEQ ID NO: 22913 - DNA, 25 bp, Probe Sequence
ctctgagatcgaacggactgtgaat

SEQ ID NO: 22914 - DNA, 25 bp, Probe Sequence
gacgtttctgagtgtagtgtggtag

SEQ ID NO: 22915 - DNA, 25 bp, Probe Sequence
tctgagatcgaacggactgtgaatc

SEQ ID NO: 22916 - DNA, 25 bp, Probe Sequence
tccctgagaggttcttgaagatgtt

SEQ ID NO: 22917 - DNA, 25 bp, Probe Sequence
ttgtacgcagttttctttggcttta

SEQ ID NO: 22918 - DNA, 25 bp, Probe Sequence
agaggttcttgaagatgtttattta

SEQ ID NO: 22919 - DNA, 25 bp, Probe Sequence
tttctgagtgtagtgtggtaggacc

SEQ ID NO: 22920 - DNA, 25 bp, Probe Sequence
tgacgtttctgagtgtagtgtggta

SEQ ID NO: 22921 - DNA, 25 bp, Probe Sequence
gtccctgagaggttcttgaagatgt

SEQ ID NO: 22922 - DNA, 25 bp, Probe Sequence
tgtacgcagttttctttggctttac

SEQ ID NO: 22923 - DNA, 25 bp, Probe Sequence
ttgtatttgcagtggctgaggaatt

SEQ ID NO: 22924 - DNA, 25 bp, Probe Sequence
cttctctgagatcgaacggactgtg

SEQ ID NO: 22925 - DNA, 25 bp, Probe Sequence
cacttctctgagatcgaacggactg

SEQ ID NO: 22926 - DNA, 25 bp, Probe Sequence
attcttgtacgcagttttctttggc

SEQ ID NO: 22927 - DNA, 25 bp, Probe Sequence
gtgtgacgtttctgagtgtagtgtg

SEQ ID NO: 22928 - DNA, 25 bp, Probe Sequence
gccgattaaaagaccgtgtgaaatg

SEQ ID NO: 22929 - DNA, 25 bp, Probe Sequence
acagtaattcagtccattcttctcc

SEQ ID NO: 22930 - DNA, 25 bp, Probe Sequence
cgaatcacctgaatgttctatgtaa

SEQ ID NO: 22931 - DNA, 25 bp, Probe Sequence
attattggcatatactgactgactg

SEQ ID NO: 22932 - DNA, 25 bp, Probe Sequence
tgattattggcatatactgactgac

SEQ ID NO: 22933 - DNA, 25 bp, Probe Sequence
gattattggcatatactgactgact

SEQ ID NO: 22934 - DNA, 25 bp, Probe Sequence
aatgaagactacatcacctctctcc

SEQ ID NO: 22935 - DNA, 25 bp, Probe Sequence
atcacctgaatgttctatgtaatgt

SEQ ID NO: 22936 - DNA, 25 bp, Probe Sequence
ttatgtagtagacagttgtgaccga

SEQ ID NO: 22937 - DNA, 25 bp, Probe Sequence
agacagtaattcagtccattcttct

SEQ ID NO: 22938 - DNA, 25 bp, Probe Sequence
cagacagtaattcagtccattcttc

SEQ ID NO: 22939 - DNA, 25 bp, Probe Sequence
gacagtaattcagtccattcttctc

SEQ ID NO: 22940 - DNA, 25 bp, Probe Sequence
gcagacagtaattcagtccattctt

SEQ ID NO: 22941 - DNA, 25 bp, Probe Sequence
aagcagacagtaattcagtccattc

SEQ ID NO: 22942 - DNA, 25 bp, Probe Sequence
cttgatgaggcaatggaatggttag

SEQ ID NO: 22943 - DNA, 25 bp, Probe Sequence
tatgtagtagacagttgtgaccgag

SEQ ID NO: 22944 - DNA, 25 bp, Probe Sequence
tgatgaggcaatggaatggttagtt

SEQ ID NO: 22945 - DNA, 25 bp, Probe Sequence
gatgaggcaatggaatggttagttg

SEQ ID NO: 22946 - DNA, 25 bp, Probe Sequence
tcacctgaatgttctatgtaatgta

SEQ ID NO: 22947 - DNA, 25 bp, Probe Sequence
atgattattggcatatactgactga

SEQ ID NO: 22948 - DNA, 25 bp, Probe Sequence
atcgaatcacctgaatgttctatgt

SEQ ID NO: 22949 - DNA, 25 bp, Probe Sequence
tcgaatcacctgaatgttctatgta

SEQ ID NO: 22950 - DNA, 25 bp, Probe Sequence
gatcgaatcacctgaatgttctatg

SEQ ID NO: 22951 - DNA, 25 bp, Probe Sequence
agcagacagtaattcagtccattct

SEQ ID NO: 22952 - DNA, 25 bp, Probe Sequence
atgaggcaatggaatggttagttga

SEQ ID NO: 22953 - DNA, 25 bp, Probe Sequence
tataagacagtggaagtggtggaat

SEQ ID NO: 22954 - DNA, 25 bp, Probe Sequence
tatagacaaggagattgagccagat

SEQ ID NO: 22955 - DNA, 25 bp, Probe Sequence
ctataagacagtggaagtggtggaa

SEQ ID NO: 22956 - DNA, 25 bp, Probe Sequence
ataagacagtggaagtggtggaatc

SEQ ID NO: 22957 - DNA, 25 bp, Probe Sequence
atagacaaggagattgagccagatg

SEQ ID NO: 22958 - DNA, 25 bp, Probe Sequence
gacagtggaagtggtggaatctatc

SEQ ID NO: 22959 - DNA, 25 bp, Probe Sequence
acaagaagaaatcaggagagaagag

SEQ ID NO: 22960 - DNA, 25 bp, Probe Sequence
gacaagaagaaatcaggagagaaga

SEQ ID NO: 22961 - DNA, 25 bp, Probe Sequence
agacaagaagaaatcaggagagaag

SEQ ID NO: 22962 - DNA, 25 bp, Probe Sequence
cagacaagaagaaatcaggagagaa

SEQ ID NO: 22963 - DNA, 25 bp, Probe Sequence
tcagacaagaagaaatcaggagaga

SEQ ID NO: 22964 - DNA, 25 bp, Probe Sequence
aaagtcagacaagaagaaatcagga

SEQ ID NO: 22965 - DNA, 25 bp, Probe Sequence
caaagtcagacaagaagaaatcagg

SEQ ID NO: 22966 - DNA, 25 bp, Probe Sequence
aagtcagacaagaagaaatcaggag

SEQ ID NO: 22967 - DNA, 25 bp, Probe Sequence
acaaagtcagacaagaagaaatcag

SEQ ID NO: 22968 - DNA, 25 bp, Probe Sequence
caagaagaaatcaggagagaagagc

SEQ ID NO: 22969 - DNA, 25 bp, Probe Sequence
gattagaccatagttgacccatctg

SEQ ID NO: 22970 - DNA, 25 bp, Probe Sequence
gtcagacaagaagaaatcaggagag

SEQ ID NO: 22971 - DNA, 25 bp, Probe Sequence
agacagtggaagtggtggaatctat

SEQ ID NO: 22972 - DNA, 25 bp, Probe Sequence
ctatagacaaggagattgagccaga

SEQ ID NO: 22973 - DNA, 25 bp, Probe Sequence
gaagtggtggaatctatcgagaaga

SEQ ID NO: 22974 - DNA, 25 bp, Probe Sequence
agtcagacaagaagaaatcaggaga

SEQ ID NO: 22975 - DNA, 25 bp, Probe Sequence
cctataagacagtggaagtggtgga

SEQ ID NO: 22976 - DNA, 25 bp, Probe Sequence
ggattagaccatagttgacccatct

SEQ ID NO: 22977 - DNA, 25 bp, Probe Sequence
gtgacatttcctgttgtgaagtaaa

SEQ ID NO: 22978 - DNA, 25 bp, Probe Sequence
tgtgacatttcctgttgtgaagtaa

SEQ ID NO: 22979 - DNA, 25 bp, Probe Sequence
cagtttgacttctttgagacagagg

SEQ ID NO: 22980 - DNA, 25 bp, Probe Sequence
ctgtgacatttcctgttgtgaagta

SEQ ID NO: 22981 - DNA, 25 bp, Probe Sequence
cttgttactcaggaacctcaccttg

SEQ ID NO: 22982 - DNA, 25 bp, Probe Sequence
gcagtttgacttctttgagacagag

SEQ ID NO: 22983 - DNA, 25 bp, Probe Sequence
agtttgacttctttgagacagaggg

SEQ ID NO: 22984 - DNA, 25 bp, Probe Sequence
gtctgtgacatttcctgttgtgaag

SEQ ID NO: 22985 - DNA, 25 bp, Probe Sequence
cttctttgagacagagggcaatgat

SEQ ID NO: 22986 - DNA, 25 bp, Probe Sequence
tctgtgacatttcctgttgtgaagt

SEQ ID NO: 22987 - DNA, 25 bp, Probe Sequence
ttctttgagacagagggcaatgatg

SEQ ID NO: 22988 - DNA, 25 bp, Probe Sequence
ccttgttactcaggaacctcacctt

SEQ ID NO: 22989 - DNA, 25 bp, Probe Sequence
catttcctgttgtgaagtaaaagag

SEQ ID NO: 22990 - DNA, 25 bp, Probe Sequence
ttgttactcaggaacctcaccttgg

SEQ ID NO: 22991 - DNA, 25 bp, Probe Sequence
gacttctttgagacagagggcaatg

SEQ ID NO: 22992 - DNA, 25 bp, Probe Sequence
tgacatttcctgttgtgaagtaaaa

SEQ ID NO: 22993 - DNA, 25 bp, Probe Sequence
gtttgacttctttgagacagagggc

SEQ ID NO: 22994 - DNA, 25 bp, Probe Sequence
acatttcctgttgtgaagtaaaaga

SEQ ID NO: 22995 - DNA, 25 bp, Probe Sequence
tcatcacctcccagtacaacaacat

SEQ ID NO: 22996 - DNA, 25 bp, Probe Sequence
tgcagtttgacttctttgagacaga

SEQ ID NO: 22997 - DNA, 25 bp, Probe Sequence
gacatttcctgttgtgaagtaaaag

SEQ ID NO: 22998 - DNA, 25 bp, Probe Sequence
acttctttgagacagagggcaatga

SEQ ID NO: 22999 - DNA, 25 bp, Probe Sequence
tgacttctttgagacagagggcaat

SEQ ID NO: 23000 - DNA, 25 bp, Probe Sequence
atttcctgttgtgaagtaaaagagg

SEQ ID NO: 23001 - DNA, 25 bp, Probe Sequence
ctgtaagtagttgtcatattctgga

SEQ ID NO: 23002 - DNA, 25 bp, Probe Sequence
ttgtcaagcacttagatggatataa

SEQ ID NO: 23003 - DNA, 25 bp, Probe Sequence
actgtaagtagttgtcatattctgg

SEQ ID NO: 23004 - DNA, 25 bp, Probe Sequence
tgtaagtagttgtcatattctggaa

SEQ ID NO: 23005 - DNA, 25 bp, Probe Sequence
tgtcaagcacttagatggatataaa

SEQ ID NO: 23006 - DNA, 25 bp, Probe Sequence
tttgtcaagcacttagatggatata

SEQ ID NO: 23007 - DNA, 25 bp, Probe Sequence
tggttcaaataggactactagagtt

SEQ ID NO: 23008 - DNA, 25 bp, Probe Sequence
ctttaaggtttagctccacatcatg

SEQ ID NO: 23009 - DNA, 25 bp, Probe Sequence
atatctcctctctttggttagggaa

SEQ ID NO: 23010 - DNA, 25 bp, Probe Sequence
atggttcaaataggactactagagt

SEQ ID NO: 23011 - DNA, 25 bp, Probe Sequence
tatctcctctctttggttagggaag

SEQ ID NO: 23012 - DNA, 25 bp, Probe Sequence
atcaagatatggttcaaataggact

SEQ ID NO: 23013 - DNA, 25 bp, Probe Sequence
ggttcaaataggactactagagttc

SEQ ID NO: 23014 - DNA, 25 bp, Probe Sequence
aataggactactagagttcattgaa

SEQ ID NO: 23015 - DNA, 25 bp, Probe Sequence
gatggatataaatgcagcaacttgt

SEQ ID NO: 23016 - DNA, 25 bp, Probe Sequence
tggatataaatgcagcaacttgttt

SEQ ID NO: 23017 - DNA, 25 bp, Probe Sequence
atggatataaatgcagcaacttgtt

SEQ ID NO: 23018 - DNA, 25 bp, Probe Sequence
agatggatataaatgcagcaacttg

SEQ ID NO: 23019 - DNA, 25 bp, Probe Sequence
tttaaggtttagctccacatcatgc

SEQ ID NO: 23020 - DNA, 25 bp, Probe Sequence
tgaaagactattgcaggtgtttaaa

SEQ ID NO: 23021 - DNA, 25 bp, Probe Sequence
ttgaaagactattgcaggtgtttaa

SEQ ID NO: 23022 - DNA, 25 bp, Probe Sequence
tttgaaagactattgcaggtgttta

SEQ ID NO: 23023 - DNA, 25 bp, Probe Sequence
cacttagatggatataaatgcagca

SEQ ID NO: 23024 - DNA, 25 bp, Probe Sequence
atgtaacgtataaactcaagccttt

SEQ ID NO: 23025 - DNA, 25 bp, Probe Sequence
gatgatgatgatgaagttccagatc

SEQ ID NO: 23026 - DNA, 25 bp, Probe Sequence
ggatgatgatgatgaagttccagat

SEQ ID NO: 23027 - DNA, 25 bp, Probe Sequence
aggatgatgatgatgaagttccaga

SEQ ID NO: 23028 - DNA, 25 bp, Probe Sequence
atgatgatgatgaagttccagatct

SEQ ID NO: 23029 - DNA, 25 bp, Probe Sequence
atgatgatgaagttccagatcttgt

SEQ ID NO: 23030 - DNA, 25 bp, Probe Sequence
tgatgatgatgaagttccagatctt

SEQ ID NO: 23031 - DNA, 25 bp, Probe Sequence
gatgatgatgaagttccagatcttg

SEQ ID NO: 23032 - DNA, 25 bp, Probe Sequence
tgatgatgaagttccagatcttgtg

SEQ ID NO: 23033 - DNA, 25 bp, Probe Sequence
agctaattaagccgaagaagcctta

SEQ ID NO: 23034 - DNA, 25 bp, Probe Sequence
gctaattaagccgaagaagccttaa

SEQ ID NO: 23035 - DNA, 25 bp, Probe Sequence
gatgatgaagttccagatcttgtgg

SEQ ID NO: 23036 - DNA, 25 bp, Probe Sequence
taattaagccgaagaagccttaagt

SEQ ID NO: 23037 - DNA, 25 bp, Probe Sequence
ctaattaagccgaagaagccttaag

SEQ ID NO: 23038 - DNA, 25 bp, Probe Sequence
agaaattcttgtttatggatctgat

SEQ ID NO: 23039 - DNA, 25 bp, Probe Sequence
cagctaattaagccgaagaagcctt

SEQ ID NO: 23040 - DNA, 25 bp, Probe Sequence
aattaagccgaagaagccttaagtg

SEQ ID NO: 23041 - DNA, 25 bp, Probe Sequence
aagaaattcttgtttatggatctga

SEQ ID NO: 23042 - DNA, 25 bp, Probe Sequence
attaagccgaagaagccttaagtgg

SEQ ID NO: 23043 - DNA, 25 bp, Probe Sequence
ccgaagaagccttaagtgggaattc

SEQ ID NO: 23044 - DNA, 25 bp, Probe Sequence
cagatcttgtggagaattttgatga

SEQ ID NO: 23045 - DNA, 25 bp, Probe Sequence
gaaattcttgtttatggatctgata

SEQ ID NO: 23046 - DNA, 25 bp, Probe Sequence
agatcttgtggagaattttgatgag

SEQ ID NO: 23047 - DNA, 25 bp, Probe Sequence
gaagttccagatcttgtggagaatt

SEQ ID NO: 23048 - DNA, 25 bp, Probe Sequence
tgaagttccagatcttgtggagaat

SEQ ID NO: 23049 - DNA, 25 bp, Probe Sequence
atctcctacaagaatgatgcctact

SEQ ID NO: 23050 - DNA, 25 bp, Probe Sequence
tctcctacaagaatgatgcctactt

SEQ ID NO: 23051 - DNA, 25 bp, Probe Sequence
cactcgcatctcctacaagaatgat

SEQ ID NO: 23052 - DNA, 25 bp, Probe Sequence
atcactcgcatctcctacaagaatg

SEQ ID NO: 23053 - DNA, 25 bp, Probe Sequence
catcactcgcatctcctacaagaat

SEQ ID NO: 23054 - DNA, 25 bp, Probe Sequence
tcctacaagaatgatgcctactttc

SEQ ID NO: 23055 - DNA, 25 bp, Probe Sequence
ctcctacaagaatgatgcctacttt

SEQ ID NO: 23056 - DNA, 25 bp, Probe Sequence
gaatccttcggcttcatcacctatc

SEQ ID NO: 23057 - DNA, 25 bp, Probe Sequence
gaatgatgcctactttcttcaagac

SEQ ID NO: 23058 - DNA, 25 bp, Probe Sequence
aatccttcggcttcatcacctatca

SEQ ID NO: 23059 - DNA, 25 bp, Probe Sequence
aatgatgcctactttcttcaagacc

SEQ ID NO: 23060 - DNA, 25 bp, Probe Sequence
cctcaatatcacctcccttcagatg

SEQ ID NO: 23061 - DNA, 25 bp, Probe Sequence
tcactcgcatctcctacaagaatga

SEQ ID NO: 23062 - DNA, 25 bp, Probe Sequence
atgatgcctactttcttcaagacct

SEQ ID NO: 23063 - DNA, 25 bp, Probe Sequence
catctcctacaagaatgatgcctac

SEQ ID NO: 23064 - DNA, 25 bp, Probe Sequence
gctattaaagggacagaatacttcc

SEQ ID NO: 23065 - DNA, 25 bp, Probe Sequence
aaacaaagctattaaagggacagaa

SEQ ID NO: 23066 - DNA, 25 bp, Probe Sequence
atccttcggcttcatcacctatcag

SEQ ID NO: 23067 - DNA, 25 bp, Probe Sequence
ctcaatatcacctcccttcagatgc

SEQ ID NO: 23068 - DNA, 25 bp, Probe Sequence
aacaaagctattaaagggacagaat

SEQ ID NO: 23069 - DNA, 25 bp, Probe Sequence
atgcctactttcttcaagacctgag

SEQ ID NO: 23070 - DNA, 25 bp, Probe Sequence
gatgcctactttcttcaagacctga

SEQ ID NO: 23071 - DNA, 25 bp, Probe Sequence
gaatcctccatctcagatcttccag

SEQ ID NO: 23072 - DNA, 25 bp, Probe Sequence
cagaatcctccatctcagatcttcc

SEQ ID NO: 23073 - DNA, 25 bp, Probe Sequence
catattgtgtgttctgtgaatgcta

SEQ ID NO: 23074 - DNA, 25 bp, Probe Sequence
atattgtgtgttctgtgaatgctag

SEQ ID NO: 23075 - DNA, 25 bp, Probe Sequence
tcttacagatggacctcttgagaag

SEQ ID NO: 23076 - DNA, 25 bp, Probe Sequence
ggcttagttaagtgagagtgtgaac

SEQ ID NO: 23077 - DNA, 25 bp, Probe Sequence
tggcttagttaagtgagagtgtgaa

SEQ ID NO: 23078 - DNA, 25 bp, Probe Sequence
ccatattgtgtgttctgtgaatgct

SEQ ID NO: 23079 - DNA, 25 bp, Probe Sequence
ttgtggataatacattcaggtggtg

SEQ ID NO: 23080 - DNA, 25 bp, Probe Sequence
gttaagtgagagtgtgaactgtgtg

SEQ ID NO: 23081 - DNA, 25 bp, Probe Sequence
ctggcttagttaagtgagagtgtga

SEQ ID NO: 23082 - DNA, 25 bp, Probe Sequence
tctggcttagttaagtgagagtgtg

SEQ ID NO: 23083 - DNA, 25 bp, Probe Sequence
gtggataatacattcaggtggtgct

SEQ ID NO: 23084 - DNA, 25 bp, Probe Sequence
aagccaggtataatgtaacttcacc

SEQ ID NO: 23085 - DNA, 25 bp, Probe Sequence
tatcaaagagagatgtggaaagagc

SEQ ID NO: 23086 - DNA, 25 bp, Probe Sequence
gctctcttgaatttggatattggtt

SEQ ID NO: 23087 - DNA, 25 bp, Probe Sequence
ggtttcagtccttatcaaagagaga

SEQ ID NO: 23088 - DNA, 25 bp, Probe Sequence
tcagtccttatcaaagagagatgtg

SEQ ID NO: 23089 - DNA, 25 bp, Probe Sequence
ttaagtgagagtgtgaactgtgtgg

SEQ ID NO: 23090 - DNA, 25 bp, Probe Sequence
aagcattatacggtcatcttgaatg

SEQ ID NO: 23091 - DNA, 25 bp, Probe Sequence
gccctcaggttaccaagataaatat

SEQ ID NO: 23092 - DNA, 25 bp, Probe Sequence
cagtccttatcaaagagagatgtgg

SEQ ID NO: 23093 - DNA, 25 bp, Probe Sequence
ccttatcaaagagagatgtggaaag

SEQ ID NO: 23094 - DNA, 25 bp, Probe Sequence
ttcagtccttatcaaagagagatgt

SEQ ID NO: 23095 - DNA, 25 bp, Probe Sequence
gggtttcagtccttatcaaagagag

SEQ ID NO: 23096 - DNA, 25 bp, Probe Sequence
aaagccaggtataatgtaacttcac

SEQ ID NO: 23097 - DNA, 25 bp, Probe Sequence
caagaatatgcctgttcctgtgatg

SEQ ID NO: 23098 - DNA, 25 bp, Probe Sequence
atggcttactggatgaattattaca

SEQ ID NO: 23099 - DNA, 25 bp, Probe Sequence
aggaagtgaagagatcgttctgtaa

SEQ ID NO: 23100 - DNA, 25 bp, Probe Sequence
aagaatatgcctgttcctgtgatgt

SEQ ID NO: 23101 - DNA, 25 bp, Probe Sequence
actggatgaattattacagacaagg

SEQ ID NO: 23102 - DNA, 25 bp, Probe Sequence
tggcttactggatgaattattacag

SEQ ID NO: 23103 - DNA, 25 bp, Probe Sequence
ggcttactggatgaattattacaga

SEQ ID NO: 23104 - DNA, 25 bp, Probe Sequence
taaggaaactgtatgaatgtctgct

SEQ ID NO: 23105 - DNA, 25 bp, Probe Sequence
gaacaaggaagagatggagaaagta

SEQ ID NO: 23106 - DNA, 25 bp, Probe Sequence
agaagagtttgaggatgatgctatt

SEQ ID NO: 23107 - DNA, 25 bp, Probe Sequence
tcccagatatactacaactcaatgc

SEQ ID NO: 23108 - DNA, 25 bp, Probe Sequence
aaagtcggcagagatttatccaata

SEQ ID NO: 23109 - DNA, 25 bp, Probe Sequence
cagaagagtttgaggatgatgctat

SEQ ID NO: 23110 - DNA, 25 bp, Probe Sequence
acaaggaagagatggagaaagtaaa

SEQ ID NO: 23111 - DNA, 25 bp, Probe Sequence
aacaaggaagagatggagaaagtaa

SEQ ID NO: 23112 - DNA, 25 bp, Probe Sequence
aatgctacagttatggataagaccc

SEQ ID NO: 23113 - DNA, 25 bp, Probe Sequence
atgaattattacagacaagggtgct

SEQ ID NO: 23114 - DNA, 25 bp, Probe Sequence
gatgaattattacagacaagggtgc

SEQ ID NO: 23115 - DNA, 25 bp, Probe Sequence
aatggcttactggatgaattattac

SEQ ID NO: 23116 - DNA, 25 bp, Probe Sequence
ataaggaaactgtatgaatgtctgc

SEQ ID NO: 23117 - DNA, 25 bp, Probe Sequence
tggatgaattattacagacaagggt

SEQ ID NO: 23118 - DNA, 25 bp, Probe Sequence
agaatatgcctgttcctgtgatgtg

SEQ ID NO: 23119 - DNA, 25 bp, Probe Sequence
ggatgaattattacagacaagggtg

SEQ ID NO: 23120 - DNA, 25 bp, Probe Sequence
tttgattgactccgttattccgaaa

SEQ ID NO: 23121 - DNA, 25 bp, Probe Sequence
aacctttatccctgcttatctgaaa

SEQ ID NO: 23122 - DNA, 25 bp, Probe Sequence
aaacctttatccctgcttatctgaa

SEQ ID NO: 23123 - DNA, 25 bp, Probe Sequence
aatgtagttctttgttcctgctttc

SEQ ID NO: 23124 - DNA, 25 bp, Probe Sequence
ctttaccttcatttcatcctgttgg

SEQ ID NO: 23125 - DNA, 25 bp, Probe Sequence
ctctcccttctttaccttcatttca

SEQ ID NO: 23126 - DNA, 25 bp, Probe Sequence
tctctcccttctttaccttcatttc

SEQ ID NO: 23127 - DNA, 25 bp, Probe Sequence
cctttatccctgcttatctgaaact

SEQ ID NO: 23128 - DNA, 25 bp, Probe Sequence
gaaacctttatccctgcttatctga

SEQ ID NO: 23129 - DNA, 25 bp, Probe Sequence
tagttctttgttcctgctttctctt

SEQ ID NO: 23130 - DNA, 25 bp, Probe Sequence
actctcctttgatattatgtggctt

SEQ ID NO: 23131 - DNA, 25 bp, Probe Sequence
aactctcctttgatattatgtggct

SEQ ID NO: 23132 - DNA, 25 bp, Probe Sequence
tgtaatgtagttctttgttcctgct

SEQ ID NO: 23133 - DNA, 25 bp, Probe Sequence
atgtaatgtagttctttgttcctgc

SEQ ID NO: 23134 - DNA, 25 bp, Probe Sequence
ccttctttaccttcatttcatcctg

SEQ ID NO: 23135 - DNA, 25 bp, Probe Sequence
cccttctttaccttcatttcatcct

SEQ ID NO: 23136 - DNA, 25 bp, Probe Sequence
tctcccttctttaccttcatttcat

SEQ ID NO: 23137 - DNA, 25 bp, Probe Sequence
tgcttcatatctctcccttctttac

SEQ ID NO: 23138 - DNA, 25 bp, Probe Sequence
ttatccctgcttatctgaaacttcc

SEQ ID NO: 23139 - DNA, 25 bp, Probe Sequence
acctttatccctgcttatctgaaac

SEQ ID NO: 23140 - DNA, 25 bp, Probe Sequence
gtaatgtagttctttgttcctgctt

SEQ ID NO: 23141 - DNA, 25 bp, Probe Sequence
tcccttctttaccttcatttcatcc

SEQ ID NO: 23142 - DNA, 25 bp, Probe Sequence
ctgcttcatatctctcccttcttta

SEQ ID NO: 23143 - DNA, 25 bp, Probe Sequence
atgtagttctttgttcctgctttct

SEQ ID NO: 23144 - DNA, 25 bp, Probe Sequence
ctcccttctttaccttcatttcatc

SEQ ID NO: 23145 - DNA, 25 bp, Probe Sequence
tatcttcatcacacaactcatcaca

SEQ ID NO: 23146 - DNA, 25 bp, Probe Sequence
atcttcatcacacaactcatcacat

SEQ ID NO: 23147 - DNA, 25 bp, Probe Sequence
ctatcttcatcacacaactcatcac

SEQ ID NO: 23148 - DNA, 25 bp, Probe Sequence
tctatcttcatcacacaactcatca

SEQ ID NO: 23149 - DNA, 25 bp, Probe Sequence
gctctatcttcatcacacaactcat

SEQ ID NO: 23150 - DNA, 25 bp, Probe Sequence
ctctatcttcatcacacaactcatc

SEQ ID NO: 23151 - DNA, 25 bp, Probe Sequence
ggctctatcttcatcacacaactca

SEQ ID NO: 23152 - DNA, 25 bp, Probe Sequence
tcttcatcacacaactcatcacatg

SEQ ID NO: 23153 - DNA, 25 bp, Probe Sequence
aatgtactgaactggaaggaagagg

SEQ ID NO: 23154 - DNA, 25 bp, Probe Sequence
accttcattagtacagcttgcatat

SEQ ID NO: 23155 - DNA, 25 bp, Probe Sequence
tcctgagactatgtaaagaaagagc

SEQ ID NO: 23156 - DNA, 25 bp, Probe Sequence
ccttcattagtacagcttgcatatt

SEQ ID NO: 23157 - DNA, 25 bp, Probe Sequence
caccttcattagtacagcttgcata

SEQ ID NO: 23158 - DNA, 25 bp, Probe Sequence
tagatgtagaagagaatctgacagc

SEQ ID NO: 23159 - DNA, 25 bp, Probe Sequence
atgtactgaactggaaggaagagga

SEQ ID NO: 23160 - DNA, 25 bp, Probe Sequence
tacagcaatcatttgaaactccaag

SEQ ID NO: 23161 - DNA, 25 bp, Probe Sequence
tgtactgaactggaaggaagaggaa

SEQ ID NO: 23162 - DNA, 25 bp, Probe Sequence
aaatgtactgaactggaaggaagag

SEQ ID NO: 23163 - DNA, 25 bp, Probe Sequence
tatttcggaaggtacagcaatcatt

SEQ ID NO: 23164 - DNA, 25 bp, Probe Sequence
catcacacaactcatcacatgcttc

SEQ ID NO: 23165 - DNA, 25 bp, Probe Sequence
cttcatcacacaactcatcacatgc

SEQ ID NO: 23166 - DNA, 25 bp, Probe Sequence
ctagaggaagtatttcggaaggtac

SEQ ID NO: 23167 - DNA, 25 bp, Probe Sequence
tagaggaagtatttcggaaggtaca

SEQ ID NO: 23168 - DNA, 25 bp, Probe Sequence
tgtagatgtagaagagaatctgaca

SEQ ID NO: 23169 - DNA, 25 bp, Probe Sequence
gataatcagacagagaagttggaca

SEQ ID NO: 23170 - DNA, 25 bp, Probe Sequence
ataatcagacagagaagttggacac

SEQ ID NO: 23171 - DNA, 25 bp, Probe Sequence
agataatcagacagagaagttggac

SEQ ID NO: 23172 - DNA, 25 bp, Probe Sequence
gtagataatcagacagagaagttgg

SEQ ID NO: 23173 - DNA, 25 bp, Probe Sequence
tagataatcagacagagaagttgga

SEQ ID NO: 23174 - DNA, 25 bp, Probe Sequence
ggctatctaattccacactctgtat

SEQ ID NO: 23175 - DNA, 25 bp, Probe Sequence
taatcagacagagaagttggacacc

SEQ ID NO: 23176 - DNA, 25 bp, Probe Sequence
aggctatctaattccacactctgta

SEQ ID NO: 23177 - DNA, 25 bp, Probe Sequence
aattcagacattaactggcttgttc

SEQ ID NO: 23178 - DNA, 25 bp, Probe Sequence
attcagacattaactggcttgttca

SEQ ID NO: 23179 - DNA, 25 bp, Probe Sequence
gacttcctcatgtgttactctgttg

SEQ ID NO: 23180 - DNA, 25 bp, Probe Sequence
aatatggctcctccttagagttcac

SEQ ID NO: 23181 - DNA, 25 bp, Probe Sequence
ttcagacattaactggcttgttcaa

SEQ ID NO: 23182 - DNA, 25 bp, Probe Sequence
agtagataatcagacagagaagttg

SEQ ID NO: 23183 - DNA, 25 bp, Probe Sequence
gaggctatctaattccacactctgt

SEQ ID NO: 23184 - DNA, 25 bp, Probe Sequence
atagaggctatctaattccacactc

SEQ ID NO: 23185 - DNA, 25 bp, Probe Sequence
gctatctaattccacactctgtatt

SEQ ID NO: 23186 - DNA, 25 bp, Probe Sequence
aatagaggctatctaattccacact

SEQ ID NO: 23187 - DNA, 25 bp, Probe Sequence
tggatgtagtagataatcagacaga

SEQ ID NO: 23188 - DNA, 25 bp, Probe Sequence
tgacttcctcatgtgttactctgtt

SEQ ID NO: 23189 - DNA, 25 bp, Probe Sequence
atatcgttagggtgaagcattatgg

SEQ ID NO: 23190 - DNA, 25 bp, Probe Sequence
ggtgaaagggtttgatatggagaaa

SEQ ID NO: 23191 - DNA, 25 bp, Probe Sequence
atctaattccacactctgtattgaa

SEQ ID NO: 23192 - DNA, 25 bp, Probe Sequence
acccaagatatttatcattcaggca

SEQ ID NO: 23193 - DNA, 25 bp, Probe Sequence
tgagacagataagagaataccttgg

SEQ ID NO: 23194 - DNA, 25 bp, Probe Sequence
gagacagataagagaataccttggt

SEQ ID NO: 23195 - DNA, 25 bp, Probe Sequence
ggttgtcagatagtctatgtatgtg

SEQ ID NO: 23196 - DNA, 25 bp, Probe Sequence
gctgagacagataagagaatacctt

SEQ ID NO: 23197 - DNA, 25 bp, Probe Sequence
gacagataagagaataccttggtct

SEQ ID NO: 23198 - DNA, 25 bp, Probe Sequence
agacagataagagaataccttggtc

SEQ ID NO: 23199 - DNA, 25 bp, Probe Sequence
gttgtcagatagtctatgtatgtgt

SEQ ID NO: 23200 - DNA, 25 bp, Probe Sequence
ctgagacagataagagaataccttg

SEQ ID NO: 23201 - DNA, 25 bp, Probe Sequence
taagtgaggaagagtttatggcaaa

SEQ ID NO: 23202 - DNA, 25 bp, Probe Sequence
tgaggaagagtttatggcaaagatt

SEQ ID NO: 23203 - DNA, 25 bp, Probe Sequence
gaggaagagtttatggcaaagattt

SEQ ID NO: 23204 - DNA, 25 bp, Probe Sequence
gtgaggaagagtttatggcaaagat

SEQ ID NO: 23205 - DNA, 25 bp, Probe Sequence
ataagtgaggaagagtttatggcaa

SEQ ID NO: 23206 - DNA, 25 bp, Probe Sequence
gagctgagacagataagagaatacc

SEQ ID NO: 23207 - DNA, 25 bp, Probe Sequence
aagtgaggaagagtttatggcaaag

SEQ ID NO: 23208 - DNA, 25 bp, Probe Sequence
agctgagacagataagagaatacct

SEQ ID NO: 23209 - DNA, 25 bp, Probe Sequence
tcatttattcattgggttgtcagat

SEQ ID NO: 23210 - DNA, 25 bp, Probe Sequence
atcatttattcattgggttgtcaga

SEQ ID NO: 23211 - DNA, 25 bp, Probe Sequence
cattgggttgtcagatagtctatgt

SEQ ID NO: 23212 - DNA, 25 bp, Probe Sequence
tcattgggttgtcagatagtctatg

SEQ ID NO: 23213 - DNA, 25 bp, Probe Sequence
tgagctgagacagataagagaatac

SEQ ID NO: 23214 - DNA, 25 bp, Probe Sequence
gtgagctgagacagataagagaata

SEQ ID NO: 23215 - DNA, 25 bp, Probe Sequence
tataagtgaggaagagtttatggca

SEQ ID NO: 23216 - DNA, 25 bp, Probe Sequence
attcattgggttgtcagatagtcta

SEQ ID NO: 23217 - DNA, 25 bp, Probe Sequence
tatgaagtaagcaacaaggatgaca

SEQ ID NO: 23218 - DNA, 25 bp, Probe Sequence
ctatgaagtaagcaacaaggatgac

SEQ ID NO: 23219 - DNA, 25 bp, Probe Sequence
atcctgactgaagtgaactatgaag

SEQ ID NO: 23220 - DNA, 25 bp, Probe Sequence
aagtaagcaacaaggatgacaagaa

SEQ ID NO: 23221 - DNA, 25 bp, Probe Sequence
atgaagtaagcaacaaggatgacaa

SEQ ID NO: 23222 - DNA, 25 bp, Probe Sequence
catcctgactgaagtgaactatgaa

SEQ ID NO: 23223 - DNA, 25 bp, Probe Sequence
gaagtaagcaacaaggatgacaaga

SEQ ID NO: 23224 - DNA, 25 bp, Probe Sequence
tgaagtaagcaacaaggatgacaag

SEQ ID NO: 23225 - DNA, 25 bp, Probe Sequence
actatgaagtaagcaacaaggatga

SEQ ID NO: 23226 - DNA, 25 bp, Probe Sequence
tgaactatgaagtaagcaacaagga

SEQ ID NO: 23227 - DNA, 25 bp, Probe Sequence
gtgaactatgaagtaagcaacaagg

SEQ ID NO: 23228 - DNA, 25 bp, Probe Sequence
actgaagtgaactatgaagtaagca

SEQ ID NO: 23229 - DNA, 25 bp, Probe Sequence
cctgactgaagtgaactatgaagta

SEQ ID NO: 23230 - DNA, 25 bp, Probe Sequence
gactgaagtgaactatgaagtaagc

SEQ ID NO: 23231 - DNA, 25 bp, Probe Sequence
gatattctcaccatcctgactgaag

SEQ ID NO: 23232 - DNA, 25 bp, Probe Sequence
aactatgaagtaagcaacaaggatg

SEQ ID NO: 23233 - DNA, 25 bp, Probe Sequence
agtgaactatgaagtaagcaacaag

SEQ ID NO: 23234 - DNA, 25 bp, Probe Sequence
gaagtgaactatgaagtaagcaaca

SEQ ID NO: 23235 - DNA, 25 bp, Probe Sequence
tgaagtgaactatgaagtaagcaac

SEQ ID NO: 23236 - DNA, 25 bp, Probe Sequence
atgatattctcaccatcctgactga

SEQ ID NO: 23237 - DNA, 25 bp, Probe Sequence
gaactatgaagtaagcaacaaggat

SEQ ID NO: 23238 - DNA, 25 bp, Probe Sequence
ctgaagtgaactatgaagtaagcaa

SEQ ID NO: 23239 - DNA, 25 bp, Probe Sequence
atattctcaccatcctgactgaagt

SEQ ID NO: 23240 - DNA, 25 bp, Probe Sequence
tgatattctcaccatcctgactgaa

SEQ ID NO: 23241 - DNA, 25 bp, Probe Sequence
gattaacctctgcactactgacatg

SEQ ID NO: 23242 - DNA, 25 bp, Probe Sequence
tacacacaaaccagtatcgctcata

SEQ ID NO: 23243 - DNA, 25 bp, Probe Sequence
acacaaaccagtatcgctcatagat

SEQ ID NO: 23244 - DNA, 25 bp, Probe Sequence
caaaccagtatcgctcatagatcag

SEQ ID NO: 23245 - DNA, 25 bp, Probe Sequence
ggattaacctctgcactactgacat

SEQ ID NO: 23246 - DNA, 25 bp, Probe Sequence
cacaaaccagtatcgctcatagatc

SEQ ID NO: 23247 - DNA, 25 bp, Probe Sequence
acaaaccagtatcgctcatagatca

SEQ ID NO: 23248 - DNA, 25 bp, Probe Sequence
gttctcaggtgttgccaaatatgtc

SEQ ID NO: 23249 - DNA, 25 bp, Probe Sequence
cacacaaaccagtatcgctcataga

SEQ ID NO: 23250 - DNA, 25 bp, Probe Sequence
aaggttctcaggtgttgccaaatat

SEQ ID NO: 23251 - DNA, 25 bp, Probe Sequence
acacacaaaccagtatcgctcatag

SEQ ID NO: 23252 - DNA, 25 bp, Probe Sequence
ctacacacaaaccagtatcgctcat

SEQ ID NO: 23253 - DNA, 25 bp, Probe Sequence
aaaggttctcaggtgttgccaaata

SEQ ID NO: 23254 - DNA, 25 bp, Probe Sequence
ttctcaggtgttgccaaatatgtcc

SEQ ID NO: 23255 - DNA, 25 bp, Probe Sequence
aggttctcaggtgttgccaaatatg

SEQ ID NO: 23256 - DNA, 25 bp, Probe Sequence
tatgtcctggggtataaaactttcc

SEQ ID NO: 23257 - DNA, 25 bp, Probe Sequence
ggttctcaggtgttgccaaatatgt

SEQ ID NO: 23258 - DNA, 25 bp, Probe Sequence
attaacctctgcactactgacatgt

SEQ ID NO: 23259 - DNA, 25 bp, Probe Sequence
tataaaactttcctcgcctgacaac

SEQ ID NO: 23260 - DNA, 25 bp, Probe Sequence
gtataaaactttcctcgcctgacaa

SEQ ID NO: 23261 - DNA, 25 bp, Probe Sequence
atgtcctggggtataaaactttcct

SEQ ID NO: 23262 - DNA, 25 bp, Probe Sequence
cagtatcgctcatagatcagcaaac

SEQ ID NO: 23263 - DNA, 25 bp, Probe Sequence
caaatatgtcctggggtataaaact

SEQ ID NO: 23264 - DNA, 25 bp, Probe Sequence
atatgtcctggggtataaaactttc

SEQ ID NO: 23265 - DNA, 25 bp, Probe Sequence
caaggaatgaagaacaacaactctc

SEQ ID NO: 23266 - DNA, 25 bp, Probe Sequence
gaatgaagaacaacaactctcagtg

SEQ ID NO: 23267 - DNA, 25 bp, Probe Sequence
aaggaatgaagaacaacaactctca

SEQ ID NO: 23268 - DNA, 25 bp, Probe Sequence
tcaaggaatgaagaacaacaactct

SEQ ID NO: 23269 - DNA, 25 bp, Probe Sequence
gtcaaggaatgaagaacaacaactc

SEQ ID NO: 23270 - DNA, 25 bp, Probe Sequence
aggaatgaagaacaacaactctcag

SEQ ID NO: 23271 - DNA, 25 bp, Probe Sequence
atgtcaaggaatgaagaacaacaac

SEQ ID NO: 23272 - DNA, 25 bp, Probe Sequence
aatgtcaaggaatgaagaacaacaa

SEQ ID NO: 23273 - DNA, 25 bp, Probe Sequence
ggaatgaagaacaacaactctcagt

SEQ ID NO: 23274 - DNA, 25 bp, Probe Sequence
aatgaagaacaacaactctcagtgg

SEQ ID NO: 23275 - DNA, 25 bp, Probe Sequence
tgtcaaggaatgaagaacaacaact

SEQ ID NO: 23276 - DNA, 25 bp, Probe Sequence
ttctctgttaattcctggaactgta

SEQ ID NO: 23277 - DNA, 25 bp, Probe Sequence
tctctgttaattcctggaactgtat

SEQ ID NO: 23278 - DNA, 25 bp, Probe Sequence
ctctgttaattcctggaactgtatt

SEQ ID NO: 23279 - DNA, 25 bp, Probe Sequence
atgaagaacaacaactctcagtggt

SEQ ID NO: 23280 - DNA, 25 bp, Probe Sequence
ccaccttgttactgctactacactt

SEQ ID NO: 23281 - DNA, 25 bp, Probe Sequence
ggcattaggagtgtttcatttgata

SEQ ID NO: 23282 - DNA, 25 bp, Probe Sequence
gggcattaggagtgtttcatttgat

SEQ ID NO: 23283 - DNA, 25 bp, Probe Sequence
aagggcattaggagtgtttcatttg

SEQ ID NO: 23284 - DNA, 25 bp, Probe Sequence
gaagggcattaggagtgtttcattt

SEQ ID NO: 23285 - DNA, 25 bp, Probe Sequence
aaatgtcaaggaatgaagaacaaca

SEQ ID NO: 23286 - DNA, 25 bp, Probe Sequence
accttgttactgctactacactttg

SEQ ID NO: 23287 - DNA, 25 bp, Probe Sequence
caccttgttactgctactacacttt

SEQ ID NO: 23288 - DNA, 25 bp, Probe Sequence
tgaagaacaacaactctcagtggtg

SEQ ID NO: 23289 - DNA, 25 bp, Probe Sequence
tagttggcaagtctcacatattcat

SEQ ID NO: 23290 - DNA, 25 bp, Probe Sequence
ttggcaagtctcacatattcatcag

SEQ ID NO: 23291 - DNA, 25 bp, Probe Sequence
agttggcaagtctcacatattcatc

SEQ ID NO: 23292 - DNA, 25 bp, Probe Sequence
ctctagttggcaagtctcacatatt

SEQ ID NO: 23293 - DNA, 25 bp, Probe Sequence
tctagttggcaagtctcacatattc

SEQ ID NO: 23294 - DNA, 25 bp, Probe Sequence
ctagttggcaagtctcacatattca

SEQ ID NO: 23295 - DNA, 25 bp, Probe Sequence
gttggcaagtctcacatattcatca

SEQ ID NO: 23296 - DNA, 25 bp, Probe Sequence
aagtctcacatattcatcagcagga

SEQ ID NO: 23297 - DNA, 25 bp, Probe Sequence
caagtctcacatattcatcagcagg

SEQ ID NO: 23298 - DNA, 25 bp, Probe Sequence
ttatccagcagtcaattaactctcc

SEQ ID NO: 23299 - DNA, 25 bp, Probe Sequence
aataattggagttcatactgatgcc

SEQ ID NO: 23300 - DNA, 25 bp, Probe Sequence
ggcaacaataattggagttcatact

SEQ ID NO: 23301 - DNA, 25 bp, Probe Sequence
tatccagcagtcaattaactctcca

SEQ ID NO: 23302 - DNA, 25 bp, Probe Sequence
gcaagtctcacatattcatcagcag

SEQ ID NO: 23303 - DNA, 25 bp, Probe Sequence
cctctagttggcaagtctcacatat

SEQ ID NO: 23304 - DNA, 25 bp, Probe Sequence
gcaacaataattggagttcatactg

SEQ ID NO: 23305 - DNA, 25 bp, Probe Sequence
caataattggagttcatactgatgc

SEQ ID NO: 23306 - DNA, 25 bp, Probe Sequence
agtctcacatattcatcagcaggag

SEQ ID NO: 23307 - DNA, 25 bp, Probe Sequence
gtctcacatattcatcagcaggagt

SEQ ID NO: 23308 - DNA, 25 bp, Probe Sequence
atccagcagtcaattaactctccag

SEQ ID NO: 23309 - DNA, 25 bp, Probe Sequence
cattgtgcttggtagatttagtgtt

SEQ ID NO: 23310 - DNA, 25 bp, Probe Sequence
gatttgctctctaaacttccctcta

SEQ ID NO: 23311 - DNA, 25 bp, Probe Sequence
gtatattaggaaactgggatgggag

SEQ ID NO: 23312 - DNA, 25 bp, Probe Sequence
ttgatttgctctctaaacttccctc

SEQ ID NO: 23313 - DNA, 25 bp, Probe Sequence
ttgttgctatcaatccaagaactta

SEQ ID NO: 23314 - DNA, 25 bp, Probe Sequence
tgttgctatcaatccaagaacttat

SEQ ID NO: 23315 - DNA, 25 bp, Probe Sequence
gttgctatcaatccaagaacttatt

SEQ ID NO: 23316 - DNA, 25 bp, Probe Sequence
ctttgttgctatcaatccaagaact

SEQ ID NO: 23317 - DNA, 25 bp, Probe Sequence
tttgttgctatcaatccaagaactt

SEQ ID NO: 23318 - DNA, 25 bp, Probe Sequence
cctttgttgctatcaatccaagaac

SEQ ID NO: 23319 - DNA, 25 bp, Probe Sequence
tagttcttcaaagatagggagggaa

SEQ ID NO: 23320 - DNA, 25 bp, Probe Sequence
ttagttcttcaaagatagggaggga

SEQ ID NO: 23321 - DNA, 25 bp, Probe Sequence
tttagttcttcaaagatagggaggg

SEQ ID NO: 23322 - DNA, 25 bp, Probe Sequence
gttagtcaacgccatgttcttcaag

SEQ ID NO: 23323 - DNA, 25 bp, Probe Sequence
gcctttgttgctatcaatccaagaa

SEQ ID NO: 23324 - DNA, 25 bp, Probe Sequence
tgttagtcaacgccatgttcttcaa

SEQ ID NO: 23325 - DNA, 25 bp, Probe Sequence
caactactacgacgacgagaaggaa

SEQ ID NO: 23326 - DNA, 25 bp, Probe Sequence
gctatcaatccaagaacttatttgt

SEQ ID NO: 23327 - DNA, 25 bp, Probe Sequence
tgctatcaatccaagaacttatttg

SEQ ID NO: 23328 - DNA, 25 bp, Probe Sequence
ctgttagtcaacgccatgttcttca

SEQ ID NO: 23329 - DNA, 25 bp, Probe Sequence
ctagaattcactccacttggacatg

SEQ ID NO: 23330 - DNA, 25 bp, Probe Sequence
aactactacgacgacgagaaggaaa

SEQ ID NO: 23331 - DNA, 25 bp, Probe Sequence
ttgctatcaatccaagaacttattt

SEQ ID NO: 23332 - DNA, 25 bp, Probe Sequence
ttagtcaacgccatgttcttcaagc

SEQ ID NO: 23333 - DNA, 25 bp, Probe Sequence
cctgttagtcaacgccatgttcttc

SEQ ID NO: 23334 - DNA, 25 bp, Probe Sequence
tagaattcactccacttggacatgg

SEQ ID NO: 23335 - DNA, 25 bp, Probe Sequence
gctagaattcactccacttggacat

SEQ ID NO: 23336 - DNA, 25 bp, Probe Sequence
acatgagcctttgttgctatcaatc

SEQ ID NO: 23337 - DNA, 25 bp, Probe Sequence
accaactgtgtcctgtgaatgtatc

SEQ ID NO: 23338 - DNA, 25 bp, Probe Sequence
cctgtgaatgtatcgctactgtgag

SEQ ID NO: 23339 - DNA, 25 bp, Probe Sequence
gtcctgtgaatgtatcgctactgtg

SEQ ID NO: 23340 - DNA, 25 bp, Probe Sequence
gtgtcctgtgaatgtatcgctactg

SEQ ID NO: 23341 - DNA, 25 bp, Probe Sequence
ctgtgtcctgtgaatgtatcgctac

SEQ ID NO: 23342 - DNA, 25 bp, Probe Sequence
tcctgtgaatgtatcgctactgtga

SEQ ID NO: 23343 - DNA, 25 bp, Probe Sequence
actgtgtcctgtgaatgtatcgcta

SEQ ID NO: 23344 - DNA, 25 bp, Probe Sequence
tgtcctgtgaatgtatcgctactgt

SEQ ID NO: 23345 - DNA, 25 bp, Probe Sequence
tgtgtcctgtgaatgtatcgctact

SEQ ID NO: 23346 - DNA, 25 bp, Probe Sequence
ccaactgtgtcctgtgaatgtatcg

SEQ ID NO: 23347 - DNA, 25 bp, Probe Sequence
ttccttgggtatgaatgtgtgagtt

SEQ ID NO: 23348 - DNA, 25 bp, Probe Sequence
gtttgctcttccttgggtatgaatg

SEQ ID NO: 23349 - DNA, 25 bp, Probe Sequence
caccaactgtgtcctgtgaatgtat

SEQ ID NO: 23350 - DNA, 25 bp, Probe Sequence
tcttccttgggtatgaatgtgtgag

SEQ ID NO: 23351 - DNA, 25 bp, Probe Sequence
ctcttccttgggtatgaatgtgtga

SEQ ID NO: 23352 - DNA, 25 bp, Probe Sequence
aagtgcttgtgtagaaactgtgttc

SEQ ID NO: 23353 - DNA, 25 bp, Probe Sequence
catgagctgctgtaaactatttgtg

SEQ ID NO: 23354 - DNA, 25 bp, Probe Sequence
tttgctcttccttgggtatgaatgt

SEQ ID NO: 23355 - DNA, 25 bp, Probe Sequence
tgtttgctcttccttgggtatgaat

SEQ ID NO: 23356 - DNA, 25 bp, Probe Sequence
ctgtaaactatttgtggctgtgctg

SEQ ID NO: 23357 - DNA, 25 bp, Probe Sequence
ctgctgtaaactatttgtggctgtg

SEQ ID NO: 23358 - DNA, 25 bp, Probe Sequence
tccttgggtatgaatgtgtgagttc

SEQ ID NO: 23359 - DNA, 25 bp, Probe Sequence
cttccttgggtatgaatgtgtgagt

SEQ ID NO: 23360 - DNA, 25 bp, Probe Sequence
atgagctgctgtaaactatttgtgg

SEQ ID NO: 23361 - DNA, 25 bp, Probe Sequence
aacaagactgatgttgtctgtggtc

SEQ ID NO: 23362 - DNA, 25 bp, Probe Sequence
acaaacaagactgatgttgtctgtg

SEQ ID NO: 23363 - DNA, 25 bp, Probe Sequence
cacaaacaagactgatgttgtctgt

SEQ ID NO: 23364 - DNA, 25 bp, Probe Sequence
caaacaagactgatgttgtctgtgg

SEQ ID NO: 23365 - DNA, 25 bp, Probe Sequence
aaacaagactgatgttgtctgtggt

SEQ ID NO: 23366 - DNA, 25 bp, Probe Sequence
gcacaaacaagactgatgttgtctg

SEQ ID NO: 23367 - DNA, 25 bp, Probe Sequence
aggcacaaacaagactgatgttgtc

SEQ ID NO: 23368 - DNA, 25 bp, Probe Sequence
acaagactgatgttgtctgtggtcc

SEQ ID NO: 23369 - DNA, 25 bp, Probe Sequence
caggcacaaacaagactgatgttgt

SEQ ID NO: 23370 - DNA, 25 bp, Probe Sequence
ggcacaaacaagactgatgttgtct

SEQ ID NO: 23371 - DNA, 25 bp, Probe Sequence
cttggacaagctgtgagaccaaaga

SEQ ID NO: 23372 - DNA, 25 bp, Probe Sequence
aaaatgtcacccttggacaagctgt

SEQ ID NO: 23373 - DNA, 25 bp, Probe Sequence
gtaatcccatgctaacctgtaatcc

SEQ ID NO: 23374 - DNA, 25 bp, Probe Sequence
cgtaatcccatgctaacctgtaatc

SEQ ID NO: 23375 - DNA, 25 bp, Probe Sequence
agagccagactgtctcaaataaata

SEQ ID NO: 23376 - DNA, 25 bp, Probe Sequence
taatcccatgctaacctgtaatccc

SEQ ID NO: 23377 - DNA, 25 bp, Probe Sequence
gagccagactgtctcaaataaataa

SEQ ID NO: 23378 - DNA, 25 bp, Probe Sequence
agccagactgtctcaaataaataaa

SEQ ID NO: 23379 - DNA, 25 bp, Probe Sequence
cgctggctcaaagacaatgttattt

SEQ ID NO: 23380 - DNA, 25 bp, Probe Sequence
cagagccagactgtctcaaataaat

SEQ ID NO: 23381 - DNA, 25 bp, Probe Sequence
aaatatgagataatgcagtcgggag

SEQ ID NO: 23382 - DNA, 25 bp, Probe Sequence
taaatatgagataatgcagtcggga

SEQ ID NO: 23383 - DNA, 25 bp, Probe Sequence
catggtgtaaacactgtctctacta

SEQ ID NO: 23384 - DNA, 25 bp, Probe Sequence
atatgagataatgcagtcgggagaa

SEQ ID NO: 23385 - DNA, 25 bp, Probe Sequence
aatatgagataatgcagtcgggaga

SEQ ID NO: 23386 - DNA, 25 bp, Probe Sequence
tggtgtaaacactgtctctactaaa

SEQ ID NO: 23387 - DNA, 25 bp, Probe Sequence
aacatggtgtaaacactgtctctac

SEQ ID NO: 23388 - DNA, 25 bp, Probe Sequence
caacatggtgtaaacactgtctcta

SEQ ID NO: 23389 - DNA, 25 bp, Probe Sequence
ataaatatgagataatgcagtcggg

SEQ ID NO: 23390 - DNA, 25 bp, Probe Sequence
atggtgtaaacactgtctctactaa

SEQ ID NO: 23391 - DNA, 25 bp, Probe Sequence
gccagactgtctcaaataaataaat

SEQ ID NO: 23392 - DNA, 25 bp, Probe Sequence
acatggtgtaaacactgtctctact

SEQ ID NO: 23393 - DNA, 25 bp, Probe Sequence
tatgagataatgcagtcgggagaag

SEQ ID NO: 23394 - DNA, 25 bp, Probe Sequence
tatgtaaatctttgacggggttttc

SEQ ID NO: 23395 - DNA, 25 bp, Probe Sequence
ttttattaaatgtgacgaactgccc

SEQ ID NO: 23396 - DNA, 25 bp, Probe Sequence
gagaagggagggagagaattttatt

SEQ ID NO: 23397 - DNA, 25 bp, Probe Sequence
agtgcttgttctaagattaccttct

SEQ ID NO: 23398 - DNA, 25 bp, Probe Sequence
tagtgcttgttctaagattaccttc

SEQ ID NO: 23399 - DNA, 25 bp, Probe Sequence
atagagagagactatcctggagaag

SEQ ID NO: 23400 - DNA, 25 bp, Probe Sequence
ggtaaggtgagtgtcttagcatatt

SEQ ID NO: 23401 - DNA, 25 bp, Probe Sequence
ggttagtattggtgtatgtatgagt

SEQ ID NO: 23402 - DNA, 25 bp, Probe Sequence
tagagagagactatcctggagaagc

SEQ ID NO: 23403 - DNA, 25 bp, Probe Sequence
gttagtgcttgttctaagattacct

SEQ ID NO: 23404 - DNA, 25 bp, Probe Sequence
agttagtgcttgttctaagattacc

SEQ ID NO: 23405 - DNA, 25 bp, Probe Sequence
tatagagagagactatcctggagaa

SEQ ID NO: 23406 - DNA, 25 bp, Probe Sequence
ttatagagagagactatcctggaga

SEQ ID NO: 23407 - DNA, 25 bp, Probe Sequence
ggtgtatgtatgagtatctgtatgt

SEQ ID NO: 23408 - DNA, 25 bp, Probe Sequence
tggtgtatgtatgagtatctgtatg

SEQ ID NO: 23409 - DNA, 25 bp, Probe Sequence
aatctctccctcctcagtaaatgta

SEQ ID NO: 23410 - DNA, 25 bp, Probe Sequence
ctgtgggttagtattggtgtatgta

SEQ ID NO: 23411 - DNA, 25 bp, Probe Sequence
gtaactgatttgtattctgtgagca

SEQ ID NO: 23412 - DNA, 25 bp, Probe Sequence
tgtgggttagtattggtgtatgtat

SEQ ID NO: 23413 - DNA, 25 bp, Probe Sequence
ttagtgcttgttctaagattacctt

SEQ ID NO: 23414 - DNA, 25 bp, Probe Sequence
gtctgtgggttagtattggtgtatg

SEQ ID NO: 23415 - DNA, 25 bp, Probe Sequence
tgggttagtattggtgtatgtatga

SEQ ID NO: 23416 - DNA, 25 bp, Probe Sequence
gtgggttagtattggtgtatgtatg

SEQ ID NO: 23417 - DNA, 25 bp, Probe Sequence
tctgtgggttagtattggtgtatgt

SEQ ID NO: 23418 - DNA, 25 bp, Probe Sequence
tgtctgtgggttagtattggtgtat

SEQ ID NO: 23419 - DNA, 25 bp, Probe Sequence
agtaactgatttgtattctgtgagc

SEQ ID NO: 23420 - DNA, 25 bp, Probe Sequence
gaatctctccctcctcagtaaatgt

SEQ ID NO: 23421 - DNA, 25 bp, Probe Sequence
aattaaaacactttcaaaacaggaa

SEQ ID NO: 23422 - DNA, 25 bp, Probe Sequence
ttaaaacactttcaaaacaggaaaa

SEQ ID NO: 23423 - DNA, 25 bp, Probe Sequence
attaaaacactttcaaaacaggaaa

SEQ ID NO: 23424 - DNA, 25 bp, Probe Sequence
taattaaaacactttcaaaacagga

SEQ ID NO: 23425 - DNA, 25 bp, Probe Sequence
atcatccttcctctgttctctttcc

SEQ ID NO: 23426 - DNA, 25 bp, Probe Sequence
gatcatccttcctctgttctctttc

SEQ ID NO: 23427 - DNA, 25 bp, Probe Sequence
ccaagtcaatcagaaccacaacagg

SEQ ID NO: 23428 - DNA, 25 bp, Probe Sequence
ctgcaatttcttcctgagatttcta

SEQ ID NO: 23429 - DNA, 25 bp, Probe Sequence
caagtcaatcagaaccacaacaggt

SEQ ID NO: 23430 - DNA, 25 bp, Probe Sequence
tgcaatttcttcctgagatttctat

SEQ ID NO: 23431 - DNA, 25 bp, Probe Sequence
atgctgcaatttcttcctgagattt

SEQ ID NO: 23432 - DNA, 25 bp, Probe Sequence
ggatcatccttcctctgttctcttt

SEQ ID NO: 23433 - DNA, 25 bp, Probe Sequence
gcaatttcttcctgagatttctata

SEQ ID NO: 23434 - DNA, 25 bp, Probe Sequence
atccttcctctgttctctttccctg

SEQ ID NO: 23435 - DNA, 25 bp, Probe Sequence
catccttcctctgttctctttccct

SEQ ID NO: 23436 - DNA, 25 bp, Probe Sequence
tcatccttcctctgttctctttccc

SEQ ID NO: 23437 - DNA, 25 bp, Probe Sequence
gctgcaatttcttcctgagatttct

SEQ ID NO: 23438 - DNA, 25 bp, Probe Sequence
cgtggaaacaatcatcagatccttg

SEQ ID NO: 23439 - DNA, 25 bp, Probe Sequence
tgctgcaatttcttcctgagatttc

SEQ ID NO: 23440 - DNA, 25 bp, Probe Sequence
catgctgcaatttcttcctgagatt

SEQ ID NO: 23441 - DNA, 25 bp, Probe Sequence
gtggaaacaatcatcagatccttgc

SEQ ID NO: 23442 - DNA, 25 bp, Probe Sequence
cccaagtcaatcagaaccacaacag

SEQ ID NO: 23443 - DNA, 25 bp, Probe Sequence
catcttcccatgctgcaatttcttc

SEQ ID NO: 23444 - DNA, 25 bp, Probe Sequence
cttgcttccagaaagggttttaaag

SEQ ID NO: 23445 - DNA, 25 bp, Probe Sequence
tggaaacaatcatcagatccttgcc

SEQ ID NO: 23446 - DNA, 25 bp, Probe Sequence
acgtggaaacaatcatcagatcctt

SEQ ID NO: 23447 - DNA, 25 bp, Probe Sequence
gagagactactgaccttctcacctc

SEQ ID NO: 23448 - DNA, 25 bp, Probe Sequence
aagtcaatcagaaccacaacaggtt

SEQ ID NO: 23449 - DNA, 25 bp, Probe Sequence
atcttctatcagtagcagtattgtt

SEQ ID NO: 23450 - DNA, 25 bp, Probe Sequence
taaggattatgctgcactgtactac

SEQ ID NO: 23451 - DNA, 25 bp, Probe Sequence
ttaaggattatgctgcactgtacta

SEQ ID NO: 23452 - DNA, 25 bp, Probe Sequence
gatcttctatcagtagcagtattgt

SEQ ID NO: 23453 - DNA, 25 bp, Probe Sequence
cagtaattgccttacatgacttgaa

SEQ ID NO: 23454 - DNA, 25 bp, Probe Sequence
acagtaattgccttacatgacttga

SEQ ID NO: 23455 - DNA, 25 bp, Probe Sequence
cacagtaattgccttacatgacttg

SEQ ID NO: 23456 - DNA, 25 bp, Probe Sequence
tatgaactttactctgacctgtgat

SEQ ID NO: 23457 - DNA, 25 bp, Probe Sequence
atatgaactttactctgacctgtga

SEQ ID NO: 23458 - DNA, 25 bp, Probe Sequence
acacagtaattgccttacatgactt

SEQ ID NO: 23459 - DNA, 25 bp, Probe Sequence
aacacagtaattgccttacatgact

SEQ ID NO: 23460 - DNA, 25 bp, Probe Sequence
caacacagtaattgccttacatgac

SEQ ID NO: 23461 - DNA, 25 bp, Probe Sequence
tttactattacagggacctcaacac

SEQ ID NO: 23462 - DNA, 25 bp, Probe Sequence
aggtctattatcccaacagaagaga

SEQ ID NO: 23463 - DNA, 25 bp, Probe Sequence
caaggtctattatcccaacagaaga

SEQ ID NO: 23464 - DNA, 25 bp, Probe Sequence
gtattgttacttctttccaggatgc

SEQ ID NO: 23465 - DNA, 25 bp, Probe Sequence
ttactattacagggacctcaacact

SEQ ID NO: 23466 - DNA, 25 bp, Probe Sequence
ggtctattatcccaacagaagagaa

SEQ ID NO: 23467 - DNA, 25 bp, Probe Sequence
aaggtctattatcccaacagaagag

SEQ ID NO: 23468 - DNA, 25 bp, Probe Sequence
gtttactattacagggacctcaaca

SEQ ID NO: 23469 - DNA, 25 bp, Probe Sequence
cttctatcagtagcagtattgttac

SEQ ID NO: 23470 - DNA, 25 bp, Probe Sequence
tcttctatcagtagcagtattgtta

SEQ ID NO: 23471 - DNA, 25 bp, Probe Sequence
tcctgtttgtgatctattatgcctt

SEQ ID NO: 23472 - DNA, 25 bp, Probe Sequence
ttcctgtttgtgatctattatgcct

SEQ ID NO: 23473 - DNA, 25 bp, Probe Sequence
acaagacacagtgaccatactaatt

SEQ ID NO: 23474 - DNA, 25 bp, Probe Sequence
ctacaagacacagtgaccatactaa

SEQ ID NO: 23475 - DNA, 25 bp, Probe Sequence
tacaagacacagtgaccatactaat

SEQ ID NO: 23476 - DNA, 25 bp, Probe Sequence
atcctacaagacacagtgaccatac

SEQ ID NO: 23477 - DNA, 25 bp, Probe Sequence
catcctacaagacacagtgaccata

SEQ ID NO: 23478 - DNA, 25 bp, Probe Sequence
cctacaagacacagtgaccatacta

SEQ ID NO: 23479 - DNA, 25 bp, Probe Sequence
ggattagtacacacttgttgatgat

SEQ ID NO: 23480 - DNA, 25 bp, Probe Sequence
acacacttgttgatgattaatggaa

SEQ ID NO: 23481 - DNA, 25 bp, Probe Sequence
gatagtgaggcatcgcaatgtaaga

SEQ ID NO: 23482 - DNA, 25 bp, Probe Sequence
caagacacagtgaccatactaatta

SEQ ID NO: 23483 - DNA, 25 bp, Probe Sequence
tcctacaagacacagtgaccatact

SEQ ID NO: 23484 - DNA, 25 bp, Probe Sequence
gtacacacttgttgatgattaatgg

SEQ ID NO: 23485 - DNA, 25 bp, Probe Sequence
atagtgaggcatcgcaatgtaagac

SEQ ID NO: 23486 - DNA, 25 bp, Probe Sequence
tacacacttgttgatgattaatgga

SEQ ID NO: 23487 - DNA, 25 bp, Probe Sequence
acacagtgaccatactaattatacc

SEQ ID NO: 23488 - DNA, 25 bp, Probe Sequence
aagacacagtgaccatactaattat

SEQ ID NO: 23489 - DNA, 25 bp, Probe Sequence
caaacatcctacaagacacagtgac

SEQ ID NO: 23490 - DNA, 25 bp, Probe Sequence
gattagtacacacttgttgatgatt

SEQ ID NO: 23491 - DNA, 25 bp, Probe Sequence
acatcctacaagacacagtgaccat

SEQ ID NO: 23492 - DNA, 25 bp, Probe Sequence
gctgctcaataaagtacaagagttt

SEQ ID NO: 23493 - DNA, 25 bp, Probe Sequence
taagactcgggattagtacacactt

SEQ ID NO: 23494 - DNA, 25 bp, Probe Sequence
gcaatgtaagactcgggattagtac

SEQ ID NO: 23495 - DNA, 25 bp, Probe Sequence
ggatagtgaggcatcgcaatgtaag

SEQ ID NO: 23496 - DNA, 25 bp, Probe Sequence
aacatcctacaagacacagtgacca

SEQ ID NO: 23497 - DNA, 25 bp, Probe Sequence
ctgagaggttcttgaagatgtttat

SEQ ID NO: 23498 - DNA, 25 bp, Probe Sequence
cctgagaggttcttgaagatgttta

SEQ ID NO: 23499 - DNA, 25 bp, Probe Sequence
gtttctgagtgtagtgtggtaggac

SEQ ID NO: 23500 - DNA, 25 bp, Probe Sequence
tgagaggttcttgaagatgtttatt

SEQ ID NO: 23501 - DNA, 25 bp, Probe Sequence
gagaggttcttgaagatgtttattt

SEQ ID NO: 23502 - DNA, 25 bp, Probe Sequence
ccctgagaggttcttgaagatgttt

SEQ ID NO: 23503 - DNA, 25 bp, Probe Sequence
cgtttctgagtgtagtgtggtagga

SEQ ID NO: 23504 - DNA, 25 bp, Probe Sequence
aattcttgtacgcagttttctttgg

SEQ ID NO: 23505 - DNA, 25 bp, Probe Sequence
ctctgagatcgaacggactgtgaat

SEQ ID NO: 23506 - DNA, 25 bp, Probe Sequence
gacgtttctgagtgtagtgtggtag

SEQ ID NO: 23507 - DNA, 25 bp, Probe Sequence
tctgagatcgaacggactgtgaatc

SEQ ID NO: 23508 - DNA, 25 bp, Probe Sequence
tccctgagaggttcttgaagatgtt

SEQ ID NO: 23509 - DNA, 25 bp, Probe Sequence
ttgtacgcagttttctttggcttta

SEQ ID NO: 23510 - DNA, 25 bp, Probe Sequence
agaggttcttgaagatgtttattta

SEQ ID NO: 23511 - DNA, 25 bp, Probe Sequence
tttctgagtgtagtgtggtaggacc

SEQ ID NO: 23512 - DNA, 25 bp, Probe Sequence
tgacgtttctgagtgtagtgtggta

SEQ ID NO: 23513 - DNA, 25 bp, Probe Sequence
gtccctgagaggttcttgaagatgt

SEQ ID NO: 23514 - DNA, 25 bp, Probe Sequence
tgtacgcagttttctttggctttac

SEQ ID NO: 23515 - DNA, 25 bp, Probe Sequence
ttgtatttgcagtggctgaggaatt

SEQ ID NO: 23516 - DNA, 25 bp, Probe Sequence
cttctctgagatcgaacggactgtg

SEQ ID NO: 23517 - DNA, 25 bp, Probe Sequence
cacttctctgagatcgaacggactg

SEQ ID NO: 23518 - DNA, 25 bp, Probe Sequence
attcttgtacgcagttttctttggc

SEQ ID NO: 23519 - DNA, 25 bp, Probe Sequence
gtgtgacgtttctgagtgtagtgtg

SEQ ID NO: 23520 - DNA, 25 bp, Probe Sequence
gccgattaaaagaccgtgtgaaatg

SEQ ID NO: 23521 - DNA, 25 bp, Probe Sequence
taattccttctgctatatgtcacac

SEQ ID NO: 23522 - DNA, 25 bp, Probe Sequence
aattccttctgctatatgtcacaca

SEQ ID NO: 23523 - DNA, 25 bp, Probe Sequence
ccttaattccttctgctatatgtca

SEQ ID NO: 23524 - DNA, 25 bp, Probe Sequence
tctgctatatgtcacacagttgtta

SEQ ID NO: 23525 - DNA, 25 bp, Probe Sequence
attccttctgctatatgtcacacag

SEQ ID NO: 23526 - DNA, 25 bp, Probe Sequence
ttctgctatatgtcacacagttgtt

SEQ ID NO: 23527 - DNA, 25 bp, Probe Sequence
cttctgctatatgtcacacagttgt

SEQ ID NO: 23528 - DNA, 25 bp, Probe Sequence
tcaaggtactgtatagaagttgtgt

SEQ ID NO: 23529 - DNA, 25 bp, Probe Sequence
tccttaattccttctgctatatgtc

SEQ ID NO: 23530 - DNA, 25 bp, Probe Sequence
ctgctatatgtcacacagttgttat

SEQ ID NO: 23531 - DNA, 25 bp, Probe Sequence
gtcaaggtactgtatagaagttgtg

SEQ ID NO: 23532 - DNA, 25 bp, Probe Sequence
agtcaaggtactgtatagaagttgt

SEQ ID NO: 23533 - DNA, 25 bp, Probe Sequence
ttaattccttctgctatatgtcaca

SEQ ID NO: 23534 - DNA, 25 bp, Probe Sequence
tgctatatgtcacacagttgttatt

SEQ ID NO: 23535 - DNA, 25 bp, Probe Sequence
ctacagtgaagatacacaacagcaa

SEQ ID NO: 23536 - DNA, 25 bp, Probe Sequence
ccttctgctatatgtcacacagttg

SEQ ID NO: 23537 - DNA, 25 bp, Probe Sequence
ttccatgtagacaaggttcacaata

SEQ ID NO: 23538 - DNA, 25 bp, Probe Sequence
tccatgtagacaaggttcacaatat

SEQ ID NO: 23539 - DNA, 25 bp, Probe Sequence
tccttctgctatatgtcacacagtt

SEQ ID NO: 23540 - DNA, 25 bp, Probe Sequence
ttccttctgctatatgtcacacagt

SEQ ID NO: 23541 - DNA, 25 bp, Probe Sequence
agaaggaggattattaattggagga

SEQ ID NO: 23542 - DNA, 25 bp, Probe Sequence
ttccttaattccttctgctatatgt

SEQ ID NO: 23543 - DNA, 25 bp, Probe Sequence
ggaggattattaattggaggatctg

SEQ ID NO: 23544 - DNA, 25 bp, Probe Sequence
cttaattccttctgctatatgtcac

SEQ ID NO: 23545 - DNA, 25 bp, Probe Sequence
cagacaccaacaagattgaggaatt

SEQ ID NO: 23546 - DNA, 25 bp, Probe Sequence
acagacaccaacaagattgaggaat

SEQ ID NO: 23547 - DNA, 25 bp, Probe Sequence
tagtacaggtggtgtgtaagaagta

SEQ ID NO: 23548 - DNA, 25 bp, Probe Sequence
caacaagattgaggaatttctggag

SEQ ID NO: 23549 - DNA, 25 bp, Probe Sequence
catagtacaggtggtgtgtaagaag

SEQ ID NO: 23550 - DNA, 25 bp, Probe Sequence
ggtgagtaggacaacatatttcagt

SEQ ID NO: 23551 - DNA, 25 bp, Probe Sequence
caccaacaagattgaggaatttctg

SEQ ID NO: 23552 - DNA, 25 bp, Probe Sequence
gacaccaacaagattgaggaatttc

SEQ ID NO: 23553 - DNA, 25 bp, Probe Sequence
aacaagattgaggaatttctggagg

SEQ ID NO: 23554 - DNA, 25 bp, Probe Sequence
atagtacaggtggtgtgtaagaagt

SEQ ID NO: 23555 - DNA, 25 bp, Probe Sequence
gttgccaaagttacacatagtacag

SEQ ID NO: 23556 - DNA, 25 bp, Probe Sequence
acaccaacaagattgaggaatttct

SEQ ID NO: 23557 - DNA, 25 bp, Probe Sequence
agacaccaacaagattgaggaattt

SEQ ID NO: 23558 - DNA, 25 bp, Probe Sequence
agcactcaatgacaatctggagaag

SEQ ID NO: 23559 - DNA, 25 bp, Probe Sequence
gggtgagtaggacaacatatttcag

SEQ ID NO: 23560 - DNA, 25 bp, Probe Sequence
acatagtacaggtggtgtgtaagaa

SEQ ID NO: 23561 - DNA, 25 bp, Probe Sequence
aagtaggtctgattgagcttgtgtt

SEQ ID NO: 23562 - DNA, 25 bp, Probe Sequence
cacagacaccaacaagattgaggaa

SEQ ID NO: 23563 - DNA, 25 bp, Probe Sequence
ttgccaaagttacacatagtacagg

SEQ ID NO: 23564 - DNA, 25 bp, Probe Sequence
aagatgaaggtgtctctcagaggaa

SEQ ID NO: 23565 - DNA, 25 bp, Probe Sequence
cctgttgccaaagttacacatagta

SEQ ID NO: 23566 - DNA, 25 bp, Probe Sequence
gatgaaaccagtgctgaagatgaag

SEQ ID NO: 23567 - DNA, 25 bp, Probe Sequence
ctgttgccaaagttacacatagtac

SEQ ID NO: 23568 - DNA, 25 bp, Probe Sequence
atgaaggtgtctctcagaggaagtt

SEQ ID NO: 23569 - DNA, 25 bp, Probe Sequence
aatgtatcagttatcccaaagcctt

SEQ ID NO: 23570 - DNA, 25 bp, Probe Sequence
taatgtatcagttatcccaaagcct

SEQ ID NO: 23571 - DNA, 25 bp, Probe Sequence
atttggttctttgccctaatgtttc

SEQ ID NO: 23572 - DNA, 25 bp, Probe Sequence
gatttggttctttgccctaatgttt

SEQ ID NO: 23573 - DNA, 25 bp, Probe Sequence
tatgtctgtcttatcatgcaatgga

SEQ ID NO: 23574 - DNA, 25 bp, Probe Sequence
tactattattgaaatcgcttgaccg

SEQ ID NO: 23575 - DNA, 25 bp, Probe Sequence
atgtatcagttatcccaaagccttc

SEQ ID NO: 23576 - DNA, 25 bp, Probe Sequence
atgtctgtcttatcatgcaatggaa

SEQ ID NO: 23577 - DNA, 25 bp, Probe Sequence
ttatgtctgtcttatcatgcaatgg

SEQ ID NO: 23578 - DNA, 25 bp, Probe Sequence
ttaatgtatcagttatcccaaagcc

SEQ ID NO: 23579 - DNA, 25 bp, Probe Sequence
tttaataaccaagttgctgctgaac

SEQ ID NO: 23580 - DNA, 25 bp, Probe Sequence
gtatcagttatcccaaagccttcag

SEQ ID NO: 23581 - DNA, 25 bp, Probe Sequence
tgatttggttctttgccctaatgtt

SEQ ID NO: 23582 - DNA, 25 bp, Probe Sequence
aatgtaaactatgactgctgagtga

SEQ ID NO: 23583 - DNA, 25 bp, Probe Sequence
tttggttctttgccctaatgtttca

SEQ ID NO: 23584 - DNA, 25 bp, Probe Sequence
gagtgatttggttctttgccctaat

SEQ ID NO: 23585 - DNA, 25 bp, Probe Sequence
atgtaaactatgactgctgagtgat

SEQ ID NO: 23586 - DNA, 25 bp, Probe Sequence
ttggttctttgccctaatgtttcat

SEQ ID NO: 23587 - DNA, 25 bp, Probe Sequence
aaatgtaaactatgactgctgagtg

SEQ ID NO: 23588 - DNA, 25 bp, Probe Sequence
tgtaaactatgactgctgagtgata

SEQ ID NO: 23589 - DNA, 25 bp, Probe Sequence
agtgatttggttctttgccctaatg

SEQ ID NO: 23590 - DNA, 25 bp, Probe Sequence
tgtatcagttatcccaaagccttca

SEQ ID NO: 23591 - DNA, 25 bp, Probe Sequence
gtgatttggttctttgccctaatgt

SEQ ID NO: 23592 - DNA, 25 bp, Probe Sequence
acttgctcttatcttctcaaattgt

SEQ ID NO: 23593 - DNA, 25 bp, Probe Sequence
gaattacaataatctcgccaatgct

SEQ ID NO: 23594 - DNA, 25 bp, Probe Sequence
agaattacaataatctcgccaatgc

SEQ ID NO: 23595 - DNA, 25 bp, Probe Sequence
aattacaataatctcgccaatgctg

SEQ ID NO: 23596 - DNA, 25 bp, Probe Sequence
gaatggtgcttgatgagaattacaa

SEQ ID NO: 23597 - DNA, 25 bp, Probe Sequence
ggaatggtgcttgatgagaattaca

SEQ ID NO: 23598 - DNA, 25 bp, Probe Sequence
aatggtgcttgatgagaattacaat

SEQ ID NO: 23599 - DNA, 25 bp, Probe Sequence
ctctcagatcagatcaagcattctt

SEQ ID NO: 23600 - DNA, 25 bp, Probe Sequence
tggtgcttgatgagaattacaataa

SEQ ID NO: 23601 - DNA, 25 bp, Probe Sequence
atggtgcttgatgagaattacaata

SEQ ID NO: 23602 - DNA, 25 bp, Probe Sequence
attacaataatctcgccaatgctgt

SEQ ID NO: 23603 - DNA, 25 bp, Probe Sequence
ttacaataatctcgccaatgctgtc

SEQ ID NO: 23604 - DNA, 25 bp, Probe Sequence
gcttccaggtatctacactgttagt

SEQ ID NO: 23605 - DNA, 25 bp, Probe Sequence
tgcttccaggtatctacactgttag

SEQ ID NO: 23606 - DNA, 25 bp, Probe Sequence
ctgcttccaggtatctacactgtta

SEQ ID NO: 23607 - DNA, 25 bp, Probe Sequence
ggattaaccatgatgtcacttcagg

SEQ ID NO: 23608 - DNA, 25 bp, Probe Sequence
ggtgcttgatgagaattacaataat

SEQ ID NO: 23609 - DNA, 25 bp, Probe Sequence
cagaaagaaagaaatggagatgagg

SEQ ID NO: 23610 - DNA, 25 bp, Probe Sequence
agaaagaaagaaatggagatgaggc

SEQ ID NO: 23611 - DNA, 25 bp, Probe Sequence
aaagaaagaaatggagatgaggcag

SEQ ID NO: 23612 - DNA, 25 bp, Probe Sequence
gaaagaaagaaatggagatgaggca

SEQ ID NO: 23613 - DNA, 25 bp, Probe Sequence
gattaaccatgatgtcacttcaggt

SEQ ID NO: 23614 - DNA, 25 bp, Probe Sequence
tgtcatttctgtcagtgggattaac

SEQ ID NO: 23615 - DNA, 25 bp, Probe Sequence
attaaccatgatgtcacttcaggtg

SEQ ID NO: 23616 - DNA, 25 bp, Probe Sequence
tacaataatctcgccaatgctgtca

SEQ ID NO: 23617 - DNA, 25 bp, Probe Sequence
ttctcagcatcactatgtagcattc

SEQ ID NO: 23618 - DNA, 25 bp, Probe Sequence
tctcagcatcactatgtagcattct

SEQ ID NO: 23619 - DNA, 25 bp, Probe Sequence
cagcatcactatgtagcattctgtt

SEQ ID NO: 23620 - DNA, 25 bp, Probe Sequence
ctcagcatcactatgtagcattctg

SEQ ID NO: 23621 - DNA, 25 bp, Probe Sequence
agtatcaacctgctgtatattagag

SEQ ID NO: 23622 - DNA, 25 bp, Probe Sequence
tcagcatcactatgtagcattctgt

SEQ ID NO: 23623 - DNA, 25 bp, Probe Sequence
tggtaggctaaataggagttacaga

SEQ ID NO: 23624 - DNA, 25 bp, Probe Sequence
ttggtaggctaaataggagttacag

SEQ ID NO: 23625 - DNA, 25 bp, Probe Sequence
ggtaggctaaataggagttacagaa

SEQ ID NO: 23626 - DNA, 25 bp, Probe Sequence
gggtaattggtaggctaaataggag

SEQ ID NO: 23627 - DNA, 25 bp, Probe Sequence
acagggtaattggtaggctaaatag

SEQ ID NO: 23628 - DNA, 25 bp, Probe Sequence
cacagggtaattggtaggctaaata

SEQ ID NO: 23629 - DNA, 25 bp, Probe Sequence
taactttcacagggtaattggtagg

SEQ ID NO: 23630 - DNA, 25 bp, Probe Sequence
ggaggataactttcacagggtaatt

SEQ ID NO: 23631 - DNA, 25 bp, Probe Sequence
ggtaattggtaggctaaataggagt

SEQ ID NO: 23632 - DNA, 25 bp, Probe Sequence
agggtaattggtaggctaaatagga

SEQ ID NO: 23633 - DNA, 25 bp, Probe Sequence
cagggtaattggtaggctaaatagg

SEQ ID NO: 23634 - DNA, 25 bp, Probe Sequence
atttctcagcatcactatgtagcat

SEQ ID NO: 23635 - DNA, 25 bp, Probe Sequence
aggataactttcacagggtaattgg

SEQ ID NO: 23636 - DNA, 25 bp, Probe Sequence
tttctcagcatcactatgtagcatt

SEQ ID NO: 23637 - DNA, 25 bp, Probe Sequence
gaggataactttcacagggtaattg

SEQ ID NO: 23638 - DNA, 25 bp, Probe Sequence
tatttctcagcatcactatgtagca

SEQ ID NO: 23639 - DNA, 25 bp, Probe Sequence
ggataactttcacagggtaattggt

SEQ ID NO: 23640 - DNA, 25 bp, Probe Sequence
agcatcactatgtagcattctgttt

SEQ ID NO: 23641 - DNA, 25 bp, Probe Sequence
agagccacactttcaagtaaaccag

SEQ ID NO: 23642 - DNA, 25 bp, Probe Sequence
gagagccacactttcaagtaaacca

SEQ ID NO: 23643 - DNA, 25 bp, Probe Sequence
ctaatgctctcagtaaacctgaaca

SEQ ID NO: 23644 - DNA, 25 bp, Probe Sequence
taatgctctcagtaaacctgaacac

SEQ ID NO: 23645 - DNA, 25 bp, Probe Sequence
ctcagtaaacctgaacacttggaaa

SEQ ID NO: 23646 - DNA, 25 bp, Probe Sequence
cctaatgctctcagtaaacctgaac

SEQ ID NO: 23647 - DNA, 25 bp, Probe Sequence
gagccacactttcaagtaaaccagg

SEQ ID NO: 23648 - DNA, 25 bp, Probe Sequence
cgagagccacactttcaagtaaacc

SEQ ID NO: 23649 - DNA, 25 bp, Probe Sequence
ccgagagccacactttcaagtaaac

SEQ ID NO: 23650 - DNA, 25 bp, Probe Sequence
tctcagtaaacctgaacacttggaa

SEQ ID NO: 23651 - DNA, 25 bp, Probe Sequence
acactttcaagtaaaccaggtggtg

SEQ ID NO: 23652 - DNA, 25 bp, Probe Sequence
cacactttcaagtaaaccaggtggt

SEQ ID NO: 23653 - DNA, 25 bp, Probe Sequence
ccctaatgctctcagtaaacctgaa

SEQ ID NO: 23654 - DNA, 25 bp, Probe Sequence
ctttcaagtaaaccaggtggtggag

SEQ ID NO: 23655 - DNA, 25 bp, Probe Sequence
ctctcagtaaacctgaacacttgga

SEQ ID NO: 23656 - DNA, 25 bp, Probe Sequence
atgctctcagtaaacctgaacactt

SEQ ID NO: 23657 - DNA, 25 bp, Probe Sequence
aatgctctcagtaaacctgaacact

SEQ ID NO: 23658 - DNA, 25 bp, Probe Sequence
ctgaagtgcgagaaatgtgggaaga

SEQ ID NO: 23659 - DNA, 25 bp, Probe Sequence
tttcaagtaaaccaggtggtggaga

SEQ ID NO: 23660 - DNA, 25 bp, Probe Sequence
agccacactttcaagtaaaccaggt

SEQ ID NO: 23661 - DNA, 25 bp, Probe Sequence
caagtgcaacaaggaggtgtacttc

SEQ ID NO: 23662 - DNA, 25 bp, Probe Sequence
gttgcccctaatgctctcagtaaac

SEQ ID NO: 23663 - DNA, 25 bp, Probe Sequence
gccacactttcaagtaaaccaggtg

SEQ ID NO: 23664 - DNA, 25 bp, Probe Sequence
tgttgcccctaatgctctcagtaaa

SEQ ID NO: 23665 - DNA, 25 bp, Probe Sequence
cagtgttatttatgctcccttcgtg

SEQ ID NO: 23666 - DNA, 25 bp, Probe Sequence
agtgttatttatgctcccttcgtgg

SEQ ID NO: 23667 - DNA, 25 bp, Probe Sequence
ccagtgttatttatgctcccttcgt

SEQ ID NO: 23668 - DNA, 25 bp, Probe Sequence
tgccagtgttatttatgctcccttc

SEQ ID NO: 23669 - DNA, 25 bp, Probe Sequence
ctgccagtgttatttatgctccctt

SEQ ID NO: 23670 - DNA, 25 bp, Probe Sequence
ctgtcaataaacggtttgaggattg

SEQ ID NO: 23671 - DNA, 25 bp, Probe Sequence
ccttgtgctgtcaataaacggtttg

SEQ ID NO: 23672 - DNA, 25 bp, Probe Sequence
gccagtgttatttatgctcccttcg

SEQ ID NO: 23673 - DNA, 25 bp, Probe Sequence
gctgtcaataaacggtttgaggatt

SEQ ID NO: 23674 - DNA, 25 bp, Probe Sequence
caagaaggtgtacttcgctgagaag

SEQ ID NO: 23675 - DNA, 25 bp, Probe Sequence
tgtcaataaacggtttgaggattgc

SEQ ID NO: 23676 - DNA, 25 bp, Probe Sequence
ctgttgagccttgtgctgtcaataa

SEQ ID NO: 23677 - DNA, 25 bp, Probe Sequence
ttgtgctgtcaataaacggtttgag

SEQ ID NO: 23678 - DNA, 25 bp, Probe Sequence
cttgtgctgtcaataaacggtttga

SEQ ID NO: 23679 - DNA, 25 bp, Probe Sequence
cacccacctgccagtgttatttatg

SEQ ID NO: 23680 - DNA, 25 bp, Probe Sequence
cacctgccagtgttatttatgctcc

SEQ ID NO: 23681 - DNA, 25 bp, Probe Sequence
ccacctgccagtgttatttatgctc

SEQ ID NO: 23682 - DNA, 25 bp, Probe Sequence
tgctgtcaataaacggtttgaggat

SEQ ID NO: 23683 - DNA, 25 bp, Probe Sequence
cctgccagtgttatttatgctccct

SEQ ID NO: 23684 - DNA, 25 bp, Probe Sequence
gttgagccttgtgctgtcaataaac

SEQ ID NO: 23685 - DNA, 25 bp, Probe Sequence
tgttgagccttgtgctgtcaataaa

SEQ ID NO: 23686 - DNA, 25 bp, Probe Sequence
ctatggaatcctcttcggacccaag

SEQ ID NO: 23687 - DNA, 25 bp, Probe Sequence
aagaaggtgtacttcgctgagaagg

SEQ ID NO: 23688 - DNA, 25 bp, Probe Sequence
acctgccagtgttatttatgctccc

SEQ ID NO: 23689 - DNA, 25 bp, Probe Sequence
tctgtgaagtggatgaagactacat

SEQ ID NO: 23690 - DNA, 25 bp, Probe Sequence
ttctgtgaagtggatgaagactaca

SEQ ID NO: 23691 - DNA, 25 bp, Probe Sequence
ttaatcttactggactcaatgagca

SEQ ID NO: 23692 - DNA, 25 bp, Probe Sequence
taatcttactggactcaatgagcag

SEQ ID NO: 23693 - DNA, 25 bp, Probe Sequence
atgaagactacatccaggacaaatt

SEQ ID NO: 23694 - DNA, 25 bp, Probe Sequence
cctgatgaagaactggaagacaacc

SEQ ID NO: 23695 - DNA, 25 bp, Probe Sequence
aatcttactggactcaatgagcagg

SEQ ID NO: 23696 - DNA, 25 bp, Probe Sequence
gcctgatgaagaactggaagacaac

SEQ ID NO: 23697 - DNA, 25 bp, Probe Sequence
agcctgatgaagaactggaagacaa

SEQ ID NO: 23698 - DNA, 25 bp, Probe Sequence
ctgtgaagtggatgaagactacatc

SEQ ID NO: 23699 - DNA, 25 bp, Probe Sequence
cttctgtgaagtggatgaagactac

SEQ ID NO: 23700 - DNA, 25 bp, Probe Sequence
tttaatcttactggactcaatgagc

SEQ ID NO: 23701 - DNA, 25 bp, Probe Sequence
tgaagactacatccaggacaaattt

SEQ ID NO: 23702 - DNA, 25 bp, Probe Sequence
ctaccgacaagctctagacatgatc

SEQ ID NO: 23703 - DNA, 25 bp, Probe Sequence
gaagactacatccaggacaaattta

SEQ ID NO: 23704 - DNA, 25 bp, Probe Sequence
atcttactggactcaatgagcaggt

SEQ ID NO: 23705 - DNA, 25 bp, Probe Sequence
gagcctgatgaagaactggaagaca

SEQ ID NO: 23706 - DNA, 25 bp, Probe Sequence
gttactgtcctcgtgtgtactgtga

SEQ ID NO: 23707 - DNA, 25 bp, Probe Sequence
ctgatgaagaactggaagacaaccc

SEQ ID NO: 23708 - DNA, 25 bp, Probe Sequence
ttactgtcctcgtgtgtactgtgag

SEQ ID NO: 23709 - DNA, 25 bp, Probe Sequence
aagactacatccaggacaaatttaa

SEQ ID NO: 23710 - DNA, 25 bp, Probe Sequence
ccaagtcatcaagacaccatcacac

SEQ ID NO: 23711 - DNA, 25 bp, Probe Sequence
actacatccaggacaaatttaatct

SEQ ID NO: 23712 - DNA, 25 bp, Probe Sequence
agactacatccaggacaaatttaat

SEQ ID NO: 23713 - DNA, 25 bp, Probe Sequence
caacagcatctactacttccgagac

SEQ ID NO: 23714 - DNA, 25 bp, Probe Sequence
aacagcatctactacttccgagaca

SEQ ID NO: 23715 - DNA, 25 bp, Probe Sequence
acagcatctactacttccgagacac

SEQ ID NO: 23716 - DNA, 25 bp, Probe Sequence
caactgtgtgcagatgtgataagtc

SEQ ID NO: 23717 - DNA, 25 bp, Probe Sequence
agcaacagcatctactacttccgag

SEQ ID NO: 23718 - DNA, 25 bp, Probe Sequence
acaactgtgtgcagatgtgataagt

SEQ ID NO: 23719 - DNA, 25 bp, Probe Sequence
gcaacagcatctactacttccgaga

SEQ ID NO: 23720 - DNA, 25 bp, Probe Sequence
cagcaacagcatctactacttccga

SEQ ID NO: 23721 - DNA, 25 bp, Probe Sequence
aactgtgtgcagatgtgataagtcc

SEQ ID NO: 23722 - DNA, 25 bp, Probe Sequence
cagcatctactacttccgagacacg

SEQ ID NO: 23723 - DNA, 25 bp, Probe Sequence
ctactacttccgagacacgcacatc

SEQ ID NO: 23724 - DNA, 25 bp, Probe Sequence
catctactacttccgagacacgcac

SEQ ID NO: 23725 - DNA, 25 bp, Probe Sequence
tctactacttccgagacacgcacat

SEQ ID NO: 23726 - DNA, 25 bp, Probe Sequence
atctactacttccgagacacgcaca

SEQ ID NO: 23727 - DNA, 25 bp, Probe Sequence
tgggccgtatctgtcacaataaatg

SEQ ID NO: 23728 - DNA, 25 bp, Probe Sequence
gcagaactcctctcagctcctaaag

SEQ ID NO: 23729 - DNA, 25 bp, Probe Sequence
cacaactgtgtgcagatgtgataag

SEQ ID NO: 23730 - DNA, 25 bp, Probe Sequence
gggccgtatctgtcacaataaatgg

SEQ ID NO: 23731 - DNA, 25 bp, Probe Sequence
gtgggccgtatctgtcacaataaat

SEQ ID NO: 23732 - DNA, 25 bp, Probe Sequence
tgtgactttgaggtccttgtggttc

SEQ ID NO: 23733 - DNA, 25 bp, Probe Sequence
ctgtgactttgaggtccttgtggtt

SEQ ID NO: 23734 - DNA, 25 bp, Probe Sequence
actgtgtgcagatgtgataagtccc

SEQ ID NO: 23735 - DNA, 25 bp, Probe Sequence
cagaactcctctcagctcctaaagc

SEQ ID NO: 23736 - DNA, 25 bp, Probe Sequence
ctctcagctcctaaagcacaactgt

SEQ ID NO: 23737 - DNA, 25 bp, Probe Sequence
cgttaagcagaagaagtcagtagtt

SEQ ID NO: 23738 - DNA, 25 bp, Probe Sequence
ctcgttaagcagaagaagtcagtag

SEQ ID NO: 23739 - DNA, 25 bp, Probe Sequence
tcgttaagcagaagaagtcagtagt

SEQ ID NO: 23740 - DNA, 25 bp, Probe Sequence
aagcagaagaagtcagtagttattc

SEQ ID NO: 23741 - DNA, 25 bp, Probe Sequence
gttaagcagaagaagtcagtagtta

SEQ ID NO: 23742 - DNA, 25 bp, Probe Sequence
cctcgttaagcagaagaagtcagta

SEQ ID NO: 23743 - DNA, 25 bp, Probe Sequence
aacttctcaggacaatgaatcttcc

SEQ ID NO: 23744 - DNA, 25 bp, Probe Sequence
taagcagaagaagtcagtagttatt

SEQ ID NO: 23745 - DNA, 25 bp, Probe Sequence
ttaagcagaagaagtcagtagttat

SEQ ID NO: 23746 - DNA, 25 bp, Probe Sequence
ttcctcgttaagcagaagaagtcag

SEQ ID NO: 23747 - DNA, 25 bp, Probe Sequence
gttcctcgttaagcagaagaagtca

SEQ ID NO: 23748 - DNA, 25 bp, Probe Sequence
caaacttctcaggacaatgaatctt

SEQ ID NO: 23749 - DNA, 25 bp, Probe Sequence
aaacttctcaggacaatgaatcttc

SEQ ID NO: 23750 - DNA, 25 bp, Probe Sequence
agcagaagaagtcagtagttattct

SEQ ID NO: 23751 - DNA, 25 bp, Probe Sequence
gcagaagaagtcagtagttattctc

SEQ ID NO: 23752 - DNA, 25 bp, Probe Sequence
gaaggagcatttggaagtcaatttg

SEQ ID NO: 23753 - DNA, 25 bp, Probe Sequence
tgaaggagcatttggaagtcaattt

SEQ ID NO: 23754 - DNA, 25 bp, Probe Sequence
tcctcgttaagcagaagaagtcagt

SEQ ID NO: 23755 - DNA, 25 bp, Probe Sequence
gcaaacttctcaggacaatgaatct

SEQ ID NO: 23756 - DNA, 25 bp, Probe Sequence
cagaagaagtcagtagttattctcc

SEQ ID NO: 23757 - DNA, 25 bp, Probe Sequence
gcatttggaagtcaatttgaggttt

SEQ ID NO: 23758 - DNA, 25 bp, Probe Sequence
agtcagtagttattctcccatgaac

SEQ ID NO: 23759 - DNA, 25 bp, Probe Sequence
ctgaaggagcatttggaagtcaatt

SEQ ID NO: 23760 - DNA, 25 bp, Probe Sequence
gaagtcagtagttattctcccatga

SEQ ID NO: 23761 - DNA, 25 bp, Probe Sequence
attcgtccttccagttctacaaatc

SEQ ID NO: 23762 - DNA, 25 bp, Probe Sequence
cattcgtccttccagttctacaaat

SEQ ID NO: 23763 - DNA, 25 bp, Probe Sequence
gataaaccagttgaatcattgagga

SEQ ID NO: 23764 - DNA, 25 bp, Probe Sequence
agactcattgcttaattctaagact

SEQ ID NO: 23765 - DNA, 25 bp, Probe Sequence
aaatagccaaagacaagaacaacca

SEQ ID NO: 23766 - DNA, 25 bp, Probe Sequence
cttccagttctacaaatcaggcatt

SEQ ID NO: 23767 - DNA, 25 bp, Probe Sequence
agataaaccagttgaatcattgagg

SEQ ID NO: 23768 - DNA, 25 bp, Probe Sequence
tatcttgaaactgaccaaacgctta

SEQ ID NO: 23769 - DNA, 25 bp, Probe Sequence
atcttgaaactgaccaaacgcttat

SEQ ID NO: 23770 - DNA, 25 bp, Probe Sequence
ataaaccagttgaatcattgaggat

SEQ ID NO: 23771 - DNA, 25 bp, Probe Sequence
tgtgtaagataaaccagttgaatca

SEQ ID NO: 23772 - DNA, 25 bp, Probe Sequence
taaaccagttgaatcattgaggatc

SEQ ID NO: 23773 - DNA, 25 bp, Probe Sequence
tccagttctacaaatcaggcattta

SEQ ID NO: 23774 - DNA, 25 bp, Probe Sequence
aatagccaaagacaagaacaaccac

SEQ ID NO: 23775 - DNA, 25 bp, Probe Sequence
ttcgtccttccagttctacaaatca

SEQ ID NO: 23776 - DNA, 25 bp, Probe Sequence
aactgaccaaacgcttattgtgtaa

SEQ ID NO: 23777 - DNA, 25 bp, Probe Sequence
aaactgaccaaacgcttattgtgta

SEQ ID NO: 23778 - DNA, 25 bp, Probe Sequence
cttgaaactgaccaaacgcttattg

SEQ ID NO: 23779 - DNA, 25 bp, Probe Sequence
tcttgaaactgaccaaacgcttatt

SEQ ID NO: 23780 - DNA, 25 bp, Probe Sequence
ttatcttgaaactgaccaaacgctt

SEQ ID NO: 23781 - DNA, 25 bp, Probe Sequence
tttatcttgaaactgaccaaacgct

SEQ ID NO: 23782 - DNA, 25 bp, Probe Sequence
ccagttctacaaatcaggcatttat

SEQ ID NO: 23783 - DNA, 25 bp, Probe Sequence
ttccagttctacaaatcaggcattt

SEQ ID NO: 23784 - DNA, 25 bp, Probe Sequence
cgcttattgtgtaagataaaccagt

SEQ ID NO: 23785 - DNA, 25 bp, Probe Sequence
acagttagttatattagcagccctc

SEQ ID NO: 23786 - DNA, 25 bp, Probe Sequence
cagttagttatattagcagccctct

SEQ ID NO: 23787 - DNA, 25 bp, Probe Sequence
cgtatctatcggaaggatttcaaac

SEQ ID NO: 23788 - DNA, 25 bp, Probe Sequence
aatgttcccttcttgtagagagatg

SEQ ID NO: 23789 - DNA, 25 bp, Probe Sequence
gaatgttcccttcttgtagagagat

SEQ ID NO: 23790 - DNA, 25 bp, Probe Sequence
tatcggaaggatttcaaacaccaat

SEQ ID NO: 23791 - DNA, 25 bp, Probe Sequence
tacagttagttatattagcagccct

SEQ ID NO: 23792 - DNA, 25 bp, Probe Sequence
atctatcggaaggatttcaaacacc

SEQ ID NO: 23793 - DNA, 25 bp, Probe Sequence
gcgtatctatcggaaggatttcaaa

SEQ ID NO: 23794 - DNA, 25 bp, Probe Sequence
ctatcggaaggatttcaaacaccaa

SEQ ID NO: 23795 - DNA, 25 bp, Probe Sequence
tatctatcggaaggatttcaaacac

SEQ ID NO: 23796 - DNA, 25 bp, Probe Sequence
gtatctatcggaaggatttcaaaca

SEQ ID NO: 23797 - DNA, 25 bp, Probe Sequence
gtgggatcaaagaggtcataagaat

SEQ ID NO: 23798 - DNA, 25 bp, Probe Sequence
ttattgtgagatatttcaggtggga

SEQ ID NO: 23799 - DNA, 25 bp, Probe Sequence
tgggatcaaagaggtcataagaatt

SEQ ID NO: 23800 - DNA, 25 bp, Probe Sequence
agatatttcaggtgggatcaaagag

SEQ ID NO: 23801 - DNA, 25 bp, Probe Sequence
gagatatttcaggtgggatcaaaga

SEQ ID NO: 23802 - DNA, 25 bp, Probe Sequence
tattgtgagatatttcaggtgggat

SEQ ID NO: 23803 - DNA, 25 bp, Probe Sequence
tgagacgaaattcagattaggagat

SEQ ID NO: 23804 - DNA, 25 bp, Probe Sequence
atcggaaggatttcaaacaccaatt

SEQ ID NO: 23805 - DNA, 25 bp, Probe Sequence
gatatttcaggtgggatcaaagagg

SEQ ID NO: 23806 - DNA, 25 bp, Probe Sequence
atgttcccttcttgtagagagatgg

SEQ ID NO: 23807 - DNA, 25 bp, Probe Sequence
tttattgtgagatatttcaggtggg

SEQ ID NO: 23808 - DNA, 25 bp, Probe Sequence
gtacagttagttatattagcagccc

SEQ ID NO: 23809 - DNA, 25 bp, Probe Sequence
gcgttcataactgtcctcaacaaca

SEQ ID NO: 23810 - DNA, 25 bp, Probe Sequence
caatacctgtggcatcaccaagttc

SEQ ID NO: 23811 - DNA, 25 bp, Probe Sequence
catcaccgtgaccatcaacatgaag

SEQ ID NO: 23812 - DNA, 25 bp, Probe Sequence
cgttcataactgtcctcaacaacag

SEQ ID NO: 23813 - DNA, 25 bp, Probe Sequence
gttcataactgtcctcaacaacagc

SEQ ID NO: 23814 - DNA, 25 bp, Probe Sequence
aatacctgtggcatcaccaagttcc

SEQ ID NO: 23815 - DNA, 25 bp, Probe Sequence
catactggatcctgaagaactcctg

SEQ ID NO: 23816 - DNA, 25 bp, Probe Sequence
ttcataactgtcctcaacaacagcg

SEQ ID NO: 23817 - DNA, 25 bp, Probe Sequence
ctataccggaaaggtgtgatcaagg

SEQ ID NO: 23818 - DNA, 25 bp, Probe Sequence
atactggatcctgaagaactcctgg

SEQ ID NO: 23819 - DNA, 25 bp, Probe Sequence
ccatactggatcctgaagaactcct

SEQ ID NO: 23820 - DNA, 25 bp, Probe Sequence
ttcagctataccggaaaggtgtgat

SEQ ID NO: 23821 - DNA, 25 bp, Probe Sequence
gctataccggaaaggtgtgatcaag

SEQ ID NO: 23822 - DNA, 25 bp, Probe Sequence
tcagctataccggaaaggtgtgatc

SEQ ID NO: 23823 - DNA, 25 bp, Probe Sequence
agctataccggaaaggtgtgatcaa

SEQ ID NO: 23824 - DNA, 25 bp, Probe Sequence
cttcagctataccggaaaggtgtga

SEQ ID NO: 23825 - DNA, 25 bp, Probe Sequence
ccaatggggagagaagggctatttc

SEQ ID NO: 23826 - DNA, 25 bp, Probe Sequence
cgcgttcataactgtcctcaacaac

SEQ ID NO: 23827 - DNA, 25 bp, Probe Sequence
cagctataccggaaaggtgtgatca

SEQ ID NO: 23828 - DNA, 25 bp, Probe Sequence
tcataactgtcctcaacaacagcgg

SEQ ID NO: 23829 - DNA, 25 bp, Probe Sequence
caatggggagagaagggctatttcc

SEQ ID NO: 23830 - DNA, 25 bp, Probe Sequence
tataccggaaaggtgtgatcaaggc

SEQ ID NO: 23831 - DNA, 25 bp, Probe Sequence
ggatatgggcagagacagtctcatc

SEQ ID NO: 23832 - DNA, 25 bp, Probe Sequence
cagtgaaaaggactacccgttccag

SEQ ID NO: 23833 - DNA, 25 bp, Probe Sequence
cttcttcagcagaggacttgatatt

SEQ ID NO: 23834 - DNA, 25 bp, Probe Sequence
agagttcagacttatcaccattctt

SEQ ID NO: 23835 - DNA, 25 bp, Probe Sequence
aagagttcagacttatcaccattct

SEQ ID NO: 23836 - DNA, 25 bp, Probe Sequence
tcttcttcagcagaggacttgatat

SEQ ID NO: 23837 - DNA, 25 bp, Probe Sequence
acttatcaccattcttatgtcactt

SEQ ID NO: 23838 - DNA, 25 bp, Probe Sequence
gagttcagacttatcaccattctta

SEQ ID NO: 23839 - DNA, 25 bp, Probe Sequence
ttcagacttatcaccattcttatgt

SEQ ID NO: 23840 - DNA, 25 bp, Probe Sequence
gacttatcaccattcttatgtcact

SEQ ID NO: 23841 - DNA, 25 bp, Probe Sequence
agacttatcaccattcttatgtcac

SEQ ID NO: 23842 - DNA, 25 bp, Probe Sequence
cagacttatcaccattcttatgtca

SEQ ID NO: 23843 - DNA, 25 bp, Probe Sequence
gttcagacttatcaccattcttatg

SEQ ID NO: 23844 - DNA, 25 bp, Probe Sequence
gtcttcttcagcagaggacttgata

SEQ ID NO: 23845 - DNA, 25 bp, Probe Sequence
tcagacttatcaccattcttatgtc

SEQ ID NO: 23846 - DNA, 25 bp, Probe Sequence
gggcaataatatggcatttaagagg

SEQ ID NO: 23847 - DNA, 25 bp, Probe Sequence
tgtgggcaataatatggcatttaag

SEQ ID NO: 23848 - DNA, 25 bp, Probe Sequence
ctgtgggcaataatatggcatttaa

SEQ ID NO: 23849 - DNA, 25 bp, Probe Sequence
tatggcatttaagaggtgaaagagt

SEQ ID NO: 23850 - DNA, 25 bp, Probe Sequence
gtgggcaataatatggcatttaaga

SEQ ID NO: 23851 - DNA, 25 bp, Probe Sequence
agttcagacttatcaccattcttat

SEQ ID NO: 23852 - DNA, 25 bp, Probe Sequence
atggcatttaagaggtgaaagagtt

SEQ ID NO: 23853 - DNA, 25 bp, Probe Sequence
ggcaataatatggcatttaagaggt

SEQ ID NO: 23854 - DNA, 25 bp, Probe Sequence
tgggcaataatatggcatttaagag

SEQ ID NO: 23855 - DNA, 25 bp, Probe Sequence
actgtgggcaataatatggcattta

SEQ ID NO: 23856 - DNA, 25 bp, Probe Sequence
atatggcatttaagaggtgaaagag

SEQ ID NO: 23857 - DNA, 25 bp, Probe Sequence
cttcagaccatcagttacagagaat

SEQ ID NO: 23858 - DNA, 25 bp, Probe Sequence
caactacaacttctccttagacact

SEQ ID NO: 23859 - DNA, 25 bp, Probe Sequence
aagcaactacaacttctccttagac

SEQ ID NO: 23860 - DNA, 25 bp, Probe Sequence
ttcagaccatcagttacagagaatt

SEQ ID NO: 23861 - DNA, 25 bp, Probe Sequence
aactacaacttctccttagacactt

SEQ ID NO: 23862 - DNA, 25 bp, Probe Sequence
aatcttgcttcagaccatcagttac

SEQ ID NO: 23863 - DNA, 25 bp, Probe Sequence
gaagaacattattcatctctcctcc

SEQ ID NO: 23864 - DNA, 25 bp, Probe Sequence
gcaactacaacttctccttagacac

SEQ ID NO: 23865 - DNA, 25 bp, Probe Sequence
agcaactacaacttctccttagaca

SEQ ID NO: 23866 - DNA, 25 bp, Probe Sequence
atcttgcttcagaccatcagttaca

SEQ ID NO: 23867 - DNA, 25 bp, Probe Sequence
gcttcagaccatcagttacagagaa

SEQ ID NO: 23868 - DNA, 25 bp, Probe Sequence
ttgcttcagaccatcagttacagag

SEQ ID NO: 23869 - DNA, 25 bp, Probe Sequence
cttgcttcagaccatcagttacaga

SEQ ID NO: 23870 - DNA, 25 bp, Probe Sequence
tcttgcttcagaccatcagttacag

SEQ ID NO: 23871 - DNA, 25 bp, Probe Sequence
ggaagaacattattcatctctcctc

SEQ ID NO: 23872 - DNA, 25 bp, Probe Sequence
atccttattgttcagagttgtttgg

SEQ ID NO: 23873 - DNA, 25 bp, Probe Sequence
gaccatcagttacagagaatttcct

SEQ ID NO: 23874 - DNA, 25 bp, Probe Sequence
agaccatcagttacagagaatttcc

SEQ ID NO: 23875 - DNA, 25 bp, Probe Sequence
agtagtattaccaccctttcacaag

SEQ ID NO: 23876 - DNA, 25 bp, Probe Sequence
tcaagtagtattaccaccctttcac

SEQ ID NO: 23877 - DNA, 25 bp, Probe Sequence
tcagaccatcagttacagagaattt

SEQ ID NO: 23878 - DNA, 25 bp, Probe Sequence
caagtagtattaccaccctttcaca

SEQ ID NO: 23879 - DNA, 25 bp, Probe Sequence
aagtagtattaccaccctttcacaa

SEQ ID NO: 23880 - DNA, 25 bp, Probe Sequence
cagaccatcagttacagagaatttc

SEQ ID NO: 23881 - DNA, 25 bp, Probe Sequence
agtccaagtcttacgatatgttcat

SEQ ID NO: 23882 - DNA, 25 bp, Probe Sequence
cagtccaagtcttacgatatgttca

SEQ ID NO: 23883 - DNA, 25 bp, Probe Sequence
tggagtaattcagtataggttcgtt

SEQ ID NO: 23884 - DNA, 25 bp, Probe Sequence
ttggagtaattcagtataggttcgt

SEQ ID NO: 23885 - DNA, 25 bp, Probe Sequence
cattggattggaacgagttactatg

SEQ ID NO: 23886 - DNA, 25 bp, Probe Sequence
attggattggaacgagttactatgc

SEQ ID NO: 23887 - DNA, 25 bp, Probe Sequence
gcattggattggaacgagttactat

SEQ ID NO: 23888 - DNA, 25 bp, Probe Sequence
gattggaacgagttactatgctgtt

SEQ ID NO: 23889 - DNA, 25 bp, Probe Sequence
gtccaagtcttacgatatgttcatg

SEQ ID NO: 23890 - DNA, 25 bp, Probe Sequence
acagtccaagtcttacgatatgttc

SEQ ID NO: 23891 - DNA, 25 bp, Probe Sequence
ttggattggaacgagttactatgct

SEQ ID NO: 23892 - DNA, 25 bp, Probe Sequence
gactagaatattgtgaagcattggc

SEQ ID NO: 23893 - DNA, 25 bp, Probe Sequence
aatacatgatcctcaactgctaaca

SEQ ID NO: 23894 - DNA, 25 bp, Probe Sequence
gaatacatgatcctcaactgctaac

SEQ ID NO: 23895 - DNA, 25 bp, Probe Sequence
agaatacatgatcctcaactgctaa

SEQ ID NO: 23896 - DNA, 25 bp, Probe Sequence
aagaatacatgatcctcaactgcta

SEQ ID NO: 23897 - DNA, 25 bp, Probe Sequence
agactagaatattgtgaagcattgg

SEQ ID NO: 23898 - DNA, 25 bp, Probe Sequence
tggagccaactctaagactagaata

SEQ ID NO: 23899 - DNA, 25 bp, Probe Sequence
atacatgatcctcaactgctaacag

SEQ ID NO: 23900 - DNA, 25 bp, Probe Sequence
ggagccaactctaagactagaatat

SEQ ID NO: 23901 - DNA, 25 bp, Probe Sequence
ggattggaacgagttactatgctgt

SEQ ID NO: 23902 - DNA, 25 bp, Probe Sequence
tggattggaacgagttactatgctg

SEQ ID NO: 23903 - DNA, 25 bp, Probe Sequence
caaacagtccaagtcttacgatatg

SEQ ID NO: 23904 - DNA, 25 bp, Probe Sequence
ataatgttcgtcagacctccatgtt

SEQ ID NO: 23905 - DNA, 25 bp, Probe Sequence
aattccagttgacttcagaggagat

SEQ ID NO: 23906 - DNA, 25 bp, Probe Sequence
aatgtgcgatatttgacccttgata

SEQ ID NO: 23907 - DNA, 25 bp, Probe Sequence
gtgcgatatttgacccttgatattt

SEQ ID NO: 23908 - DNA, 25 bp, Probe Sequence
atgtgcgatatttgacccttgatat

SEQ ID NO: 23909 - DNA, 25 bp, Probe Sequence
tgtgcgatatttgacccttgatatt

SEQ ID NO: 23910 - DNA, 25 bp, Probe Sequence
attccagttgacttcagaggagatg

SEQ ID NO: 23911 - DNA, 25 bp, Probe Sequence
gcctaaacagaaatgtgcgatattt

SEQ ID NO: 23912 - DNA, 25 bp, Probe Sequence
aaacagaaatgtgcgatatttgacc

SEQ ID NO: 23913 - DNA, 25 bp, Probe Sequence
cctaaacagaaatgtgcgatatttg

SEQ ID NO: 23914 - DNA, 25 bp, Probe Sequence
tcagaggagatgaaagccatagatg

SEQ ID NO: 23915 - DNA, 25 bp, Probe Sequence
aaatgtgcgatatttgacccttgat

SEQ ID NO: 23916 - DNA, 25 bp, Probe Sequence
tgatgaatattaacatggagggcat

SEQ ID NO: 23917 - DNA, 25 bp, Probe Sequence
tctgatgaatattaacatggagggc

SEQ ID NO: 23918 - DNA, 25 bp, Probe Sequence
taaacagaaatgtgcgatatttgac

SEQ ID NO: 23919 - DNA, 25 bp, Probe Sequence
atgaatattaacatggagggcattg

SEQ ID NO: 23920 - DNA, 25 bp, Probe Sequence
ctgatgaatattaacatggagggca

SEQ ID NO: 23921 - DNA, 25 bp, Probe Sequence
ttccagttgacttcagaggagatga

SEQ ID NO: 23922 - DNA, 25 bp, Probe Sequence
gatgaatattaacatggagggcatt

SEQ ID NO: 23923 - DNA, 25 bp, Probe Sequence
ctaaacagaaatgtgcgatatttga

SEQ ID NO: 23924 - DNA, 25 bp, Probe Sequence
ggttaaatctctcctgcttggtgat

SEQ ID NO: 23925 - DNA, 25 bp, Probe Sequence
gaaatgtgcgatatttgacccttga

SEQ ID NO: 23926 - DNA, 25 bp, Probe Sequence
agaaatgtgcgatatttgacccttg

SEQ ID NO: 23927 - DNA, 25 bp, Probe Sequence
cagaaatgtgcgatatttgaccctt

SEQ ID NO: 23928 - DNA, 25 bp, Probe Sequence
gttaaatctctcctgcttggtgatt

SEQ ID NO: 23929 - DNA, 25 bp, Probe Sequence
ttgttgtattggcataatcagtgac

SEQ ID NO: 23930 - DNA, 25 bp, Probe Sequence
ttgtattggcataatcagtgacttg

SEQ ID NO: 23931 - DNA, 25 bp, Probe Sequence
gttgtattggcataatcagtgactt

SEQ ID NO: 23932 - DNA, 25 bp, Probe Sequence
tgtattggcataatcagtgacttgt

SEQ ID NO: 23933 - DNA, 25 bp, Probe Sequence
tgttgtattggcataatcagtgact

SEQ ID NO: 23934 - DNA, 25 bp, Probe Sequence
gtattggcataatcagtgacttgta

SEQ ID NO: 23935 - DNA, 25 bp, Probe Sequence
cttgaatgttgaatgtcaccgtatg

SEQ ID NO: 23936 - DNA, 25 bp, Probe Sequence
acttgaatgttgaatgtcaccgtat

SEQ ID NO: 23937 - DNA, 25 bp, Probe Sequence
tatatgtcttgtgtgcgtgtcctta

SEQ ID NO: 23938 - DNA, 25 bp, Probe Sequence
tattggcataatcagtgacttgtac

SEQ ID NO: 23939 - DNA, 25 bp, Probe Sequence
atgtgaagtgtccagattctcagat

SEQ ID NO: 23940 - DNA, 25 bp, Probe Sequence
tgaagtgtccagattctcagatgtt

SEQ ID NO: 23941 - DNA, 25 bp, Probe Sequence
tatatatgtcttgtgtgcgtgtcct

SEQ ID NO: 23942 - DNA, 25 bp, Probe Sequence
cacttgaatgttgaatgtcaccgta

SEQ ID NO: 23943 - DNA, 25 bp, Probe Sequence
gatgtgaagtgtccagattctcaga

SEQ ID NO: 23944 - DNA, 25 bp, Probe Sequence
atatgtcttgtgtgcgtgtccttaa

SEQ ID NO: 23945 - DNA, 25 bp, Probe Sequence
gtgaagtgtccagattctcagatgt

SEQ ID NO: 23946 - DNA, 25 bp, Probe Sequence
tgtgaagtgtccagattctcagatg

SEQ ID NO: 23947 - DNA, 25 bp, Probe Sequence
tgatgtgaagtgtccagattctcag

SEQ ID NO: 23948 - DNA, 25 bp, Probe Sequence
ttgaatgttgaatgtcaccgtatgc

SEQ ID NO: 23949 - DNA, 25 bp, Probe Sequence
ttgctgaatgtaaagattgaacctc

SEQ ID NO: 23950 - DNA, 25 bp, Probe Sequence
gtggttatctttgttgtattggcat

SEQ ID NO: 23951 - DNA, 25 bp, Probe Sequence
atgtggttatctttgttgtattggc

SEQ ID NO: 23952 - DNA, 25 bp, Probe Sequence
atatatgtcttgtgtgcgtgtcctt

SEQ ID NO: 23953 - DNA, 25 bp, Probe Sequence
attgtgcttgtagatgactggatta

SEQ ID NO: 23954 - DNA, 25 bp, Probe Sequence
atatggctacactaagaatgacctg

SEQ ID NO: 23955 - DNA, 25 bp, Probe Sequence
ttgtgcttgtagatgactggattaa

SEQ ID NO: 23956 - DNA, 25 bp, Probe Sequence
aatatggctacactaagaatgacct

SEQ ID NO: 23957 - DNA, 25 bp, Probe Sequence
gatacgacaatggaagcggatatag

SEQ ID NO: 23958 - DNA, 25 bp, Probe Sequence
gattgtgcttgtagatgactggatt

SEQ ID NO: 23959 - DNA, 25 bp, Probe Sequence
ttggttatgtcagttctgtgtgtag

SEQ ID NO: 23960 - DNA, 25 bp, Probe Sequence
cttggttatgtcagttctgtgtgta

SEQ ID NO: 23961 - DNA, 25 bp, Probe Sequence
atacgacaatggaagcggatataga

SEQ ID NO: 23962 - DNA, 25 bp, Probe Sequence
tacgacaatggaagcggatatagaa

SEQ ID NO: 23963 - DNA, 25 bp, Probe Sequence
tatggctacactaagaatgacctgg

SEQ ID NO: 23964 - DNA, 25 bp, Probe Sequence
agattgtgcttgtagatgactggat

SEQ ID NO: 23965 - DNA, 25 bp, Probe Sequence
tggttatgtcagttctgtgtgtaga

SEQ ID NO: 23966 - DNA, 25 bp, Probe Sequence
taatatggctacactaagaatgacc

SEQ ID NO: 23967 - DNA, 25 bp, Probe Sequence
cttatgattggcagtacacggtatg

SEQ ID NO: 23968 - DNA, 25 bp, Probe Sequence
ggttatgtcagttctgtgtgtagac

SEQ ID NO: 23969 - DNA, 25 bp, Probe Sequence
cgatacgacaatggaagcggatata

SEQ ID NO: 23970 - DNA, 25 bp, Probe Sequence
ctatggaactggctacttggacatt

SEQ ID NO: 23971 - DNA, 25 bp, Probe Sequence
acgacaatggaagcggatatagaag

SEQ ID NO: 23972 - DNA, 25 bp, Probe Sequence
aagaggaagattctcaccactgaag

SEQ ID NO: 23973 - DNA, 25 bp, Probe Sequence
ctacttggacattgaagaggaggtg

SEQ ID NO: 23974 - DNA, 25 bp, Probe Sequence
tatggaactggctacttggacattg

SEQ ID NO: 23975 - DNA, 25 bp, Probe Sequence
ttctagttacagtggtggaggctat

SEQ ID NO: 23976 - DNA, 25 bp, Probe Sequence
acttggttatgtcagttctgtgtgt

SEQ ID NO: 23977 - DNA, 25 bp, Probe Sequence
aatccatctgactacttgttcctgt

SEQ ID NO: 23978 - DNA, 25 bp, Probe Sequence
tagtggttgtcttaacatcgtagtc

SEQ ID NO: 23979 - DNA, 25 bp, Probe Sequence
atccatctgactacttgttcctgtg

SEQ ID NO: 23980 - DNA, 25 bp, Probe Sequence
gttgtcttaacatcgtagtcctagt

SEQ ID NO: 23981 - DNA, 25 bp, Probe Sequence
ctagtggttgtcttaacatcgtagt

SEQ ID NO: 23982 - DNA, 25 bp, Probe Sequence
tggttgtcttaacatcgtagtccta

SEQ ID NO: 23983 - DNA, 25 bp, Probe Sequence
ggttgtcttaacatcgtagtcctag

SEQ ID NO: 23984 - DNA, 25 bp, Probe Sequence
ttgtcttaacatcgtagtcctagtt

SEQ ID NO: 23985 - DNA, 25 bp, Probe Sequence
gctagtggttgtcttaacatcgtag

SEQ ID NO: 23986 - DNA, 25 bp, Probe Sequence
gtctgctagtggttgtcttaacatc

SEQ ID NO: 23987 - DNA, 25 bp, Probe Sequence
tgctagtggttgtcttaacatcgta

SEQ ID NO: 23988 - DNA, 25 bp, Probe Sequence
cacctaaatccatctgactacttgt

SEQ ID NO: 23989 - DNA, 25 bp, Probe Sequence
agtgaaatgctgtagaaccctaaat

SEQ ID NO: 23990 - DNA, 25 bp, Probe Sequence
atgctgtagaaccctaaataagtgg

SEQ ID NO: 23991 - DNA, 25 bp, Probe Sequence
tgtctgctagtggttgtcttaacat

SEQ ID NO: 23992 - DNA, 25 bp, Probe Sequence
aaatccatctgactacttgttcctg

SEQ ID NO: 23993 - DNA, 25 bp, Probe Sequence
ccctaaataagtggtagaagagtgt

SEQ ID NO: 23994 - DNA, 25 bp, Probe Sequence
acctaaatccatctgactacttgtt

SEQ ID NO: 23995 - DNA, 25 bp, Probe Sequence
attgctgggagaagaatgttgtaat

SEQ ID NO: 23996 - DNA, 25 bp, Probe Sequence
taaatccatctgactacttgttcct

SEQ ID NO: 23997 - DNA, 25 bp, Probe Sequence
gtggttgtcttaacatcgtagtcct

SEQ ID NO: 23998 - DNA, 25 bp, Probe Sequence
agtggttgtcttaacatcgtagtcc

SEQ ID NO: 23999 - DNA, 25 bp, Probe Sequence
ctaaatccatctgactacttgttcc

SEQ ID NO: 24000 - DNA, 25 bp, Probe Sequence
cctaaatccatctgactacttgttc

SEQ ID NO: 24001 - DNA, 25 bp, Probe Sequence
tagtattcacttgagtcttcctgtt

SEQ ID NO: 24002 - DNA, 25 bp, Probe Sequence
gaacgatagatcacatcagaactcc

SEQ ID NO: 24003 - DNA, 25 bp, Probe Sequence
ctagtattcacttgagtcttcctgt

SEQ ID NO: 24004 - DNA, 25 bp, Probe Sequence
tctagtattcacttgagtcttcctg

SEQ ID NO: 24005 - DNA, 25 bp, Probe Sequence
aacgatagatcacatcagaactcct

SEQ ID NO: 24006 - DNA, 25 bp, Probe Sequence
gctctagtattcacttgagtcttcc

SEQ ID NO: 24007 - DNA, 25 bp, Probe Sequence
tgaacgatagatcacatcagaactc

SEQ ID NO: 24008 - DNA, 25 bp, Probe Sequence
atgaacgatagatcacatcagaact

SEQ ID NO: 24009 - DNA, 25 bp, Probe Sequence
ctctagtattcacttgagtcttcct

SEQ ID NO: 24010 - DNA, 25 bp, Probe Sequence
ttcagaagtgctaagctaataggag

SEQ ID NO: 24011 - DNA, 25 bp, Probe Sequence
gttcagaagtgctaagctaatagga

SEQ ID NO: 24012 - DNA, 25 bp, Probe Sequence
agttcagaagtgctaagctaatagg

SEQ ID NO: 24013 - DNA, 25 bp, Probe Sequence
ccagttcagaagtgctaagctaata

SEQ ID NO: 24014 - DNA, 25 bp, Probe Sequence
gaagtgctaagctaataggagtctg

SEQ ID NO: 24015 - DNA, 25 bp, Probe Sequence
cagaagtgctaagctaataggagtc

SEQ ID NO: 24016 - DNA, 25 bp, Probe Sequence
aagtgctaagctaataggagtctga

SEQ ID NO: 24017 - DNA, 25 bp, Probe Sequence
tcagaagtgctaagctaataggagt

SEQ ID NO: 24018 - DNA, 25 bp, Probe Sequence
cagttcagaagtgctaagctaatag

SEQ ID NO: 24019 - DNA, 25 bp, Probe Sequence
agaagtgctaagctaataggagtct

SEQ ID NO: 24020 - DNA, 25 bp, Probe Sequence
tatgaacgatagatcacatcagaac

SEQ ID NO: 24021 - DNA, 25 bp, Probe Sequence
ctgctgcttcctggttaagtatctt

SEQ ID NO: 24022 - DNA, 25 bp, Probe Sequence
agtgctaagctaataggagtctgac

SEQ ID NO: 24023 - DNA, 25 bp, Probe Sequence
gataaagtgtgtagccagaagagta

SEQ ID NO: 24024 - DNA, 25 bp, Probe Sequence
aacatcacaaagtaggtcattccat

SEQ ID NO: 24025 - DNA, 25 bp, Probe Sequence
tagaagtggaaggattgtagtcatc

SEQ ID NO: 24026 - DNA, 25 bp, Probe Sequence
actgtctatactgagagtgtcatgt

SEQ ID NO: 24027 - DNA, 25 bp, Probe Sequence
cttgttcttcacgactgtctatact

SEQ ID NO: 24028 - DNA, 25 bp, Probe Sequence
cgactgtctatactgagagtgtcat

SEQ ID NO: 24029 - DNA, 25 bp, Probe Sequence
ttgttcttcacgactgtctatactg

SEQ ID NO: 24030 - DNA, 25 bp, Probe Sequence
ccttgttcttcacgactgtctatac

SEQ ID NO: 24031 - DNA, 25 bp, Probe Sequence
ctagaagtggaaggattgtagtcat

SEQ ID NO: 24032 - DNA, 25 bp, Probe Sequence
gactgtctatactgagagtgtcatg

SEQ ID NO: 24033 - DNA, 25 bp, Probe Sequence
ttcttcacgactgtctatactgaga

SEQ ID NO: 24034 - DNA, 25 bp, Probe Sequence
gttcttcacgactgtctatactgag

SEQ ID NO: 24035 - DNA, 25 bp, Probe Sequence
tcttcacgactgtctatactgagag

SEQ ID NO: 24036 - DNA, 25 bp, Probe Sequence
tgttcttcacgactgtctatactga

SEQ ID NO: 24037 - DNA, 25 bp, Probe Sequence
cttcacgactgtctatactgagagt

SEQ ID NO: 24038 - DNA, 25 bp, Probe Sequence
acgactgtctatactgagagtgtca

SEQ ID NO: 24039 - DNA, 25 bp, Probe Sequence
cacgactgtctatactgagagtgtc

SEQ ID NO: 24040 - DNA, 25 bp, Probe Sequence
agtaatctcctgtgatctgtgctag

SEQ ID NO: 24041 - DNA, 25 bp, Probe Sequence
tcacgactgtctatactgagagtgt

SEQ ID NO: 24042 - DNA, 25 bp, Probe Sequence
ctgtctatactgagagtgtcatgtt

SEQ ID NO: 24043 - DNA, 25 bp, Probe Sequence
gccttgttcttcacgactgtctata

SEQ ID NO: 24044 - DNA, 25 bp, Probe Sequence
ttcacgactgtctatactgagagtg

SEQ ID NO: 24045 - DNA, 25 bp, Probe Sequence
ttaaatcagttacccgtagtagagc

SEQ ID NO: 24046 - DNA, 25 bp, Probe Sequence
cagtaatctcctgtgatctgtgcta

SEQ ID NO: 24047 - DNA, 25 bp, Probe Sequence
ggaaattgttaaatcagttacccgt

SEQ ID NO: 24048 - DNA, 25 bp, Probe Sequence
agggtgtttgggaaattgttaaatc

SEQ ID NO: 24049 - DNA, 25 bp, Probe Sequence
gaacaacaacaagatacggaacatt

SEQ ID NO: 24050 - DNA, 25 bp, Probe Sequence
gattaccttcactattcctcactca

SEQ ID NO: 24051 - DNA, 25 bp, Probe Sequence
aacaacaacaagatacggaacattc

SEQ ID NO: 24052 - DNA, 25 bp, Probe Sequence
agattaccttcactattcctcactc

SEQ ID NO: 24053 - DNA, 25 bp, Probe Sequence
attaccttcactattcctcactcaa

SEQ ID NO: 24054 - DNA, 25 bp, Probe Sequence
ccttcactattcctcactcaagatt

SEQ ID NO: 24055 - DNA, 25 bp, Probe Sequence
ttaccttcactattcctcactcaag

SEQ ID NO: 24056 - DNA, 25 bp, Probe Sequence
taccttcactattcctcactcaaga

SEQ ID NO: 24057 - DNA, 25 bp, Probe Sequence
tgaacaacaacaagatacggaacat

SEQ ID NO: 24058 - DNA, 25 bp, Probe Sequence
accttcactattcctcactcaagat

SEQ ID NO: 24059 - DNA, 25 bp, Probe Sequence
aagattaccttcactattcctcact

SEQ ID NO: 24060 - DNA, 25 bp, Probe Sequence
acaacaacaagatacggaacattct

SEQ ID NO: 24061 - DNA, 25 bp, Probe Sequence
cactaacacacagatgaacaaccaa

SEQ ID NO: 24062 - DNA, 25 bp, Probe Sequence
ctgaacaacaacaagatacggaaca

SEQ ID NO: 24063 - DNA, 25 bp, Probe Sequence
ggtcctgtgctataattactggtat

SEQ ID NO: 24064 - DNA, 25 bp, Probe Sequence
taaggtcctgtgctataattactgg

SEQ ID NO: 24065 - DNA, 25 bp, Probe Sequence
aggtcctgtgctataattactggta

SEQ ID NO: 24066 - DNA, 25 bp, Probe Sequence
tatatgctagtcaacctgattcact

SEQ ID NO: 24067 - DNA, 25 bp, Probe Sequence
ctgaggctgaacaacaacaagatac

SEQ ID NO: 24068 - DNA, 25 bp, Probe Sequence
aatcaacttgaatactggtgttagc

SEQ ID NO: 24069 - DNA, 25 bp, Probe Sequence
attcctcactcaagattaagacatt

SEQ ID NO: 24070 - DNA, 25 bp, Probe Sequence
ctattcctcactcaagattaagaca

SEQ ID NO: 24071 - DNA, 25 bp, Probe Sequence
actattcctcactcaagattaagac

SEQ ID NO: 24072 - DNA, 25 bp, Probe Sequence
cactattcctcactcaagattaaga

SEQ ID NO: 24073 - DNA, 25 bp, Probe Sequence
ctcaccaataaccagctcttcttcc

SEQ ID NO: 24074 - DNA, 25 bp, Probe Sequence
cctcaccaataaccagctcttcttc

SEQ ID NO: 24075 - DNA, 25 bp, Probe Sequence
tcaccaataaccagctcttcttcct

SEQ ID NO: 24076 - DNA, 25 bp, Probe Sequence
catggtagagcagtacagcaactac

SEQ ID NO: 24077 - DNA, 25 bp, Probe Sequence
caccaataaccagctcttcttcctg

SEQ ID NO: 24078 - DNA, 25 bp, Probe Sequence
atggtagagcagtacagcaactaca

SEQ ID NO: 24079 - DNA, 25 bp, Probe Sequence
cttaccagaactgggtgaagaagaa

SEQ ID NO: 24080 - DNA, 25 bp, Probe Sequence
gcatggtagagcagtacagcaacta

SEQ ID NO: 24081 - DNA, 25 bp, Probe Sequence
tggtagagcagtacagcaactacag

SEQ ID NO: 24082 - DNA, 25 bp, Probe Sequence
ttaccagaactgggtgaagaagaac

SEQ ID NO: 24083 - DNA, 25 bp, Probe Sequence
attccaaggagttctcagaacactt

SEQ ID NO: 24084 - DNA, 25 bp, Probe Sequence
aattccaaggagttctcagaacact

SEQ ID NO: 24085 - DNA, 25 bp, Probe Sequence
caattccaaggagttctcagaacac

SEQ ID NO: 24086 - DNA, 25 bp, Probe Sequence
ttccaaggagttctcagaacacttc

SEQ ID NO: 24087 - DNA, 25 bp, Probe Sequence
tccaattccaaggagttctcagaac

SEQ ID NO: 24088 - DNA, 25 bp, Probe Sequence
gcctcaccaataaccagctcttctt

SEQ ID NO: 24089 - DNA, 25 bp, Probe Sequence
ccaattccaaggagttctcagaaca

SEQ ID NO: 24090 - DNA, 25 bp, Probe Sequence
gatcaaggacgggagtatgacaagg

SEQ ID NO: 24091 - DNA, 25 bp, Probe Sequence
ctccaattccaaggagttctcagaa

SEQ ID NO: 24092 - DNA, 25 bp, Probe Sequence
atcaaggacgggagtatgacaagga

SEQ ID NO: 24093 - DNA, 25 bp, Probe Sequence
ctctccaattccaaggagttctcag

SEQ ID NO: 24094 - DNA, 25 bp, Probe Sequence
ggtagagcagtacagcaactacagc

SEQ ID NO: 24095 - DNA, 25 bp, Probe Sequence
tctccaattccaaggagttctcaga

SEQ ID NO: 24096 - DNA, 25 bp, Probe Sequence
atgatcaaggacgggagtatgacaa

SEQ ID NO: 24097 - DNA, 25 bp, Probe Sequence
gatggtagagtgcttcaacaagatt

SEQ ID NO: 24098 - DNA, 25 bp, Probe Sequence
agatggtagagtgcttcaacaagat

SEQ ID NO: 24099 - DNA, 25 bp, Probe Sequence
gagagatggtagagtgcttcaacaa

SEQ ID NO: 24100 - DNA, 25 bp, Probe Sequence
agagatggtagagtgcttcaacaag

SEQ ID NO: 24101 - DNA, 25 bp, Probe Sequence
gagagagatggtagagtgcttcaac

SEQ ID NO: 24102 - DNA, 25 bp, Probe Sequence
gagatggtagagtgcttcaacaaga

SEQ ID NO: 24103 - DNA, 25 bp, Probe Sequence
tcttctggagagagatggtagagtg

SEQ ID NO: 24104 - DNA, 25 bp, Probe Sequence
gtcttctggagagagatggtagagt

SEQ ID NO: 24105 - DNA, 25 bp, Probe Sequence
gaacaaggtcttctggagagagatg

SEQ ID NO: 24106 - DNA, 25 bp, Probe Sequence
aaggtcttctggagagagatggtag

SEQ ID NO: 24107 - DNA, 25 bp, Probe Sequence
tgaacaaggtcttctggagagagat

SEQ ID NO: 24108 - DNA, 25 bp, Probe Sequence
atgaacaaggtcttctggagagaga

SEQ ID NO: 24109 - DNA, 25 bp, Probe Sequence
agagagatggtagagtgcttcaaca

SEQ ID NO: 24110 - DNA, 25 bp, Probe Sequence
caaggtcttctggagagagatggta

SEQ ID NO: 24111 - DNA, 25 bp, Probe Sequence
atggtagagtgcttcaacaagattt

SEQ ID NO: 24112 - DNA, 25 bp, Probe Sequence
gatgacagttgtttctatgccttct

SEQ ID NO: 24113 - DNA, 25 bp, Probe Sequence
ggtcttctggagagagatggtagag

SEQ ID NO: 24114 - DNA, 25 bp, Probe Sequence
tggtagagtgcttcaacaagatttc

SEQ ID NO: 24115 - DNA, 25 bp, Probe Sequence
catgaacaaggtcttctggagagag

SEQ ID NO: 24116 - DNA, 25 bp, Probe Sequence
ggagagagatggtagagtgcttcaa

SEQ ID NO: 24117 - DNA, 25 bp, Probe Sequence
caacaagaggaatgccatgaacaag

SEQ ID NO: 24118 - DNA, 25 bp, Probe Sequence
aggtcttctggagagagatggtaga

SEQ ID NO: 24119 - DNA, 25 bp, Probe Sequence
aacaaggtcttctggagagagatgg

SEQ ID NO: 24120 - DNA, 25 bp, Probe Sequence
ctggagagagatggtagagtgcttc

SEQ ID NO: 24121 - DNA, 25 bp, Probe Sequence
ccatgtatgcctatatgtgtattgt

SEQ ID NO: 24122 - DNA, 25 bp, Probe Sequence
taatatcacaacccagaagtaacca

SEQ ID NO: 24123 - DNA, 25 bp, Probe Sequence
aatatcacaacccagaagtaaccac

SEQ ID NO: 24124 - DNA, 25 bp, Probe Sequence
ataatatcacaacccagaagtaacc

SEQ ID NO: 24125 - DNA, 25 bp, Probe Sequence
actcagtttatttaaccattcccat

SEQ ID NO: 24126 - DNA, 25 bp, Probe Sequence
acccaagtacattctaattaccagt

SEQ ID NO: 24127 - DNA, 25 bp, Probe Sequence
gcaactcagtttatttaaccattcc

SEQ ID NO: 24128 - DNA, 25 bp, Probe Sequence
cccatgtatgcctatatgtgtattg

SEQ ID NO: 24129 - DNA, 25 bp, Probe Sequence
atatcacaacccagaagtaaccacc

SEQ ID NO: 24130 - DNA, 25 bp, Probe Sequence
acaacccagaagtaaccacctttaa

SEQ ID NO: 24131 - DNA, 25 bp, Probe Sequence
aactcagtttatttaaccattccca

SEQ ID NO: 24132 - DNA, 25 bp, Probe Sequence
caactcagtttatttaaccattccc

SEQ ID NO: 24133 - DNA, 25 bp, Probe Sequence
tcagtttatttaaccattcccatgt

SEQ ID NO: 24134 - DNA, 25 bp, Probe Sequence
gtttatttaaccattcccatgttgt

SEQ ID NO: 24135 - DNA, 25 bp, Probe Sequence
ctcagtttatttaaccattcccatg

SEQ ID NO: 24136 - DNA, 25 bp, Probe Sequence
cacaacccagaagtaaccaccttta

SEQ ID NO: 24137 - DNA, 25 bp, Probe Sequence
caacccagaagtaaccacctttaaa

SEQ ID NO: 24138 - DNA, 25 bp, Probe Sequence
gataatatcacaacccagaagtaac

SEQ ID NO: 24139 - DNA, 25 bp, Probe Sequence
agtttatttaaccattcccatgttg

SEQ ID NO: 24140 - DNA, 25 bp, Probe Sequence
cagtttatttaaccattcccatgtt

SEQ ID NO: 24141 - DNA, 25 bp, Probe Sequence
agatgaagcactataatattgttcc

SEQ ID NO: 24142 - DNA, 25 bp, Probe Sequence
ggatgcaactcagtttatttaacca

SEQ ID NO: 24143 - DNA, 25 bp, Probe Sequence
tggatgcaactcagtttatttaacc

SEQ ID NO: 24144 - DNA, 25 bp, Probe Sequence
cccaagtacattctaattaccagta

SEQ ID NO: 24145 - DNA, 25 bp, Probe Sequence
gaatattatccctaatcctcccacc

SEQ ID NO: 24146 - DNA, 25 bp, Probe Sequence
aatattatccctaatcctcccaccc

SEQ ID NO: 24147 - DNA, 25 bp, Probe Sequence
tgaatattatccctaatcctcccac

SEQ ID NO: 24148 - DNA, 25 bp, Probe Sequence
atgaatattatccctaatcctccca

SEQ ID NO: 24149 - DNA, 25 bp, Probe Sequence
cgtgtggcagttttagttattagtt

SEQ ID NO: 24150 - DNA, 25 bp, Probe Sequence
ctgctttgctgttcgtgatatgaga

SEQ ID NO: 24151 - DNA, 25 bp, Probe Sequence
aatgaatattatccctaatcctccc

SEQ ID NO: 24152 - DNA, 25 bp, Probe Sequence
tgctttgctgttcgtgatatgagac

SEQ ID NO: 24153 - DNA, 25 bp, Probe Sequence
gcgtgtggcagttttagttattagt

SEQ ID NO: 24154 - DNA, 25 bp, Probe Sequence
gaactgtttgtttcaattgccattt

SEQ ID NO: 24155 - DNA, 25 bp, Probe Sequence
gtgtggcagttttagttattagttt

SEQ ID NO: 24156 - DNA, 25 bp, Probe Sequence
agaactgtttgtttcaattgccatt

SEQ ID NO: 24157 - DNA, 25 bp, Probe Sequence
tctcagaactgtttgtttcaattgc

SEQ ID NO: 24158 - DNA, 25 bp, Probe Sequence
tgtttgtttcaattgccatttaagt

SEQ ID NO: 24159 - DNA, 25 bp, Probe Sequence
actgtttgtttcaattgccatttaa

SEQ ID NO: 24160 - DNA, 25 bp, Probe Sequence
aactgtttgtttcaattgccattta

SEQ ID NO: 24161 - DNA, 25 bp, Probe Sequence
cagaactgtttgtttcaattgccat

SEQ ID NO: 24162 - DNA, 25 bp, Probe Sequence
ctcagaactgtttgtttcaattgcc

SEQ ID NO: 24163 - DNA, 25 bp, Probe Sequence
ctgtttgtttcaattgccatttaag

SEQ ID NO: 24164 - DNA, 25 bp, Probe Sequence
tgtggcagttttagttattagtttt

SEQ ID NO: 24165 - DNA, 25 bp, Probe Sequence
atattatccctaatcctcccacccc

SEQ ID NO: 24166 - DNA, 25 bp, Probe Sequence
actcttaatcagtggtggaagaccg

SEQ ID NO: 24167 - DNA, 25 bp, Probe Sequence
gtttgtttcaattgccatttaagtt

SEQ ID NO: 24168 - DNA, 25 bp, Probe Sequence
tcagaactgtttgtttcaattgcca

SEQ ID NO: 24169 - DNA, 25 bp, Probe Sequence
catatttctgggagcactttgataa

SEQ ID NO: 24170 - DNA, 25 bp, Probe Sequence
tatttctgggagcactttgataagg

SEQ ID NO: 24171 - DNA, 25 bp, Probe Sequence
acctttgtgttggatgaatttaagc

SEQ ID NO: 24172 - DNA, 25 bp, Probe Sequence
atatttctgggagcactttgataag

SEQ ID NO: 24173 - DNA, 25 bp, Probe Sequence
gggtcattaaaggaaactgaacatt

SEQ ID NO: 24174 - DNA, 25 bp, Probe Sequence
gagtacctttgtgttggatgaattt

SEQ ID NO: 24175 - DNA, 25 bp, Probe Sequence
agagtacctttgtgttggatgaatt

SEQ ID NO: 24176 - DNA, 25 bp, Probe Sequence
aagagtacctttgtgttggatgaat

SEQ ID NO: 24177 - DNA, 25 bp, Probe Sequence
cctttgtgttggatgaatttaagcg

SEQ ID NO: 24178 - DNA, 25 bp, Probe Sequence
ggtcattaaaggaaactgaacattg

SEQ ID NO: 24179 - DNA, 25 bp, Probe Sequence
atttctgggagcactttgataagga

SEQ ID NO: 24180 - DNA, 25 bp, Probe Sequence
agtacctttgtgttggatgaattta

SEQ ID NO: 24181 - DNA, 25 bp, Probe Sequence
ctgcaatctcatcactggaatgttc

SEQ ID NO: 24182 - DNA, 25 bp, Probe Sequence
caagagtacctttgtgttggatgaa

SEQ ID NO: 24183 - DNA, 25 bp, Probe Sequence
gtcattaaaggaaactgaacattga

SEQ ID NO: 24184 - DNA, 25 bp, Probe Sequence
gtacctttgtgttggatgaatttaa

SEQ ID NO: 24185 - DNA, 25 bp, Probe Sequence
tacctttgtgttggatgaatttaag

SEQ ID NO: 24186 - DNA, 25 bp, Probe Sequence
ccatatttctgggagcactttgata

SEQ ID NO: 24187 - DNA, 25 bp, Probe Sequence
tttctgggagcactttgataaggac

SEQ ID NO: 24188 - DNA, 25 bp, Probe Sequence
tactccaatgaggacacactctctg

SEQ ID NO: 24189 - DNA, 25 bp, Probe Sequence
tcattaaaggaaactgaacattgaa

SEQ ID NO: 24190 - DNA, 25 bp, Probe Sequence
gtactccaatgaggacacactctct

SEQ ID NO: 24191 - DNA, 25 bp, Probe Sequence
cattaaaggaaactgaacattgaaa

SEQ ID NO: 24192 - DNA, 25 bp, Probe Sequence
gatcttcaagtgaacatctcttgcc

SEQ ID NO: 24193 - DNA, 25 bp, Probe Sequence
tgacattggagatgatgatgaagat

SEQ ID NO: 24194 - DNA, 25 bp, Probe Sequence
gacattggagatgatgatgaagata

SEQ ID NO: 24195 - DNA, 25 bp, Probe Sequence
ccttgtctcacggaatctgattaag

SEQ ID NO: 24196 - DNA, 25 bp, Probe Sequence
ttggagatgatgatgaagatattga

SEQ ID NO: 24197 - DNA, 25 bp, Probe Sequence
cttgtctcacggaatctgattaagc

SEQ ID NO: 24198 - DNA, 25 bp, Probe Sequence
acattggagatgatgatgaagatat

SEQ ID NO: 24199 - DNA, 25 bp, Probe Sequence
tggagatgatgatgaagatattgat

SEQ ID NO: 24200 - DNA, 25 bp, Probe Sequence
ggagatgatgatgaagatattgatg

SEQ ID NO: 24201 - DNA, 25 bp, Probe Sequence
tcatatttaagtagcctgtgcgtat

SEQ ID NO: 24202 - DNA, 25 bp, Probe Sequence
tttgtcatatttaagtagcctgtgc

SEQ ID NO: 24203 - DNA, 25 bp, Probe Sequence
catatttaagtagcctgtgcgtatt

SEQ ID NO: 24204 - DNA, 25 bp, Probe Sequence
gtcatatttaagtagcctgtgcgta

SEQ ID NO: 24205 - DNA, 25 bp, Probe Sequence
gcaatttgttaaagcagactgattt

SEQ ID NO: 24206 - DNA, 25 bp, Probe Sequence
tccagttacctagatattcccttga

SEQ ID NO: 24207 - DNA, 25 bp, Probe Sequence
ccagttacctagatattcccttgag

SEQ ID NO: 24208 - DNA, 25 bp, Probe Sequence
atatttaagtagcctgtgcgtattt

SEQ ID NO: 24209 - DNA, 25 bp, Probe Sequence
ttccagttacctagatattcccttg

SEQ ID NO: 24210 - DNA, 25 bp, Probe Sequence
tgttaaagcagactgatttgtttct

SEQ ID NO: 24211 - DNA, 25 bp, Probe Sequence
ttgtcatatttaagtagcctgtgcg

SEQ ID NO: 24212 - DNA, 25 bp, Probe Sequence
ttgttaaagcagactgatttgtttc

SEQ ID NO: 24213 - DNA, 25 bp, Probe Sequence
agatgttaagcccactttgttcttt

SEQ ID NO: 24214 - DNA, 25 bp, Probe Sequence
tttgaagaaatcatttgccttgtct

SEQ ID NO: 24215 - DNA, 25 bp, Probe Sequence
gaagaaatcatttgccttgtctcac

SEQ ID NO: 24216 - DNA, 25 bp, Probe Sequence
ttgaagaaatcatttgccttgtctc

SEQ ID NO: 24217 - DNA, 25 bp, Probe Sequence
cagcaggtttctttagtcatcaact

SEQ ID NO: 24218 - DNA, 25 bp, Probe Sequence
ctagtttctaaggatcatgtctgcg

SEQ ID NO: 24219 - DNA, 25 bp, Probe Sequence
tagtttctaaggatcatgtctgcga

SEQ ID NO: 24220 - DNA, 25 bp, Probe Sequence
agcaggtttctttagtcatcaacta

SEQ ID NO: 24221 - DNA, 25 bp, Probe Sequence
gcaggtttctttagtcatcaactat

SEQ ID NO: 24222 - DNA, 25 bp, Probe Sequence
gcagcaggtttctttagtcatcaac

SEQ ID NO: 24223 - DNA, 25 bp, Probe Sequence
agtttctaaggatcatgtctgcgag

SEQ ID NO: 24224 - DNA, 25 bp, Probe Sequence
attgatgtgcagcaggtttctttag

SEQ ID NO: 24225 - DNA, 25 bp, Probe Sequence
caggtttctttagtcatcaactatg

SEQ ID NO: 24226 - DNA, 25 bp, Probe Sequence
cattgatgtgcagcaggtttcttta

SEQ ID NO: 24227 - DNA, 25 bp, Probe Sequence
catcaactatgaccttcccaccaac

SEQ ID NO: 24228 - DNA, 25 bp, Probe Sequence
catctacgcctatggttttgagaag

SEQ ID NO: 24229 - DNA, 25 bp, Probe Sequence
atcaactatgaccttcccaccaaca

SEQ ID NO: 24230 - DNA, 25 bp, Probe Sequence
tgcagcaggtttctttagtcatcaa

SEQ ID NO: 24231 - DNA, 25 bp, Probe Sequence
atgtgcagcaggtttctttagtcat

SEQ ID NO: 24232 - DNA, 25 bp, Probe Sequence
agggaaaactatatccacagaatcg

SEQ ID NO: 24233 - DNA, 25 bp, Probe Sequence
caacagggaaaactatatccacaga

SEQ ID NO: 24234 - DNA, 25 bp, Probe Sequence
aacagggaaaactatatccacagaa

SEQ ID NO: 24235 - DNA, 25 bp, Probe Sequence
aggtttctttagtcatcaactatga

SEQ ID NO: 24236 - DNA, 25 bp, Probe Sequence
gtttctaaggatcatgtctgcgagc

SEQ ID NO: 24237 - DNA, 25 bp, Probe Sequence
acagggaaaactatatccacagaat

SEQ ID NO: 24238 - DNA, 25 bp, Probe Sequence
ttgatgtgcagcaggtttctttagt

SEQ ID NO: 24239 - DNA, 25 bp, Probe Sequence
cagggaaaactatatccacagaatc

SEQ ID NO: 24240 - DNA, 25 bp, Probe Sequence
ccaacagggaaaactatatccacag

SEQ ID NO: 24241 - DNA, 25 bp, Probe Sequence
tctctctgttgatggtgaagatgaa

SEQ ID NO: 24242 - DNA, 25 bp, Probe Sequence
ctctctctgttgatggtgaagatga

SEQ ID NO: 24243 - DNA, 25 bp, Probe Sequence
aagattgccactctccaacttctaa

SEQ ID NO: 24244 - DNA, 25 bp, Probe Sequence
aagtatgctgctctctctgttgatg

SEQ ID NO: 24245 - DNA, 25 bp, Probe Sequence
aataaggaggaagattgccactctc

SEQ ID NO: 24246 - DNA, 25 bp, Probe Sequence
taagttcagttctgcaagcaagtat

SEQ ID NO: 24247 - DNA, 25 bp, Probe Sequence
caagtatgctgctctctctgttgat

SEQ ID NO: 24248 - DNA, 25 bp, Probe Sequence
atgagggagaagattatgccgaata

SEQ ID NO: 24249 - DNA, 25 bp, Probe Sequence
ctaagttcagttctgcaagcaagta

SEQ ID NO: 24250 - DNA, 25 bp, Probe Sequence
tggaaggagtcagataggaaagatg

SEQ ID NO: 24251 - DNA, 25 bp, Probe Sequence
ctctctgttgatggtgaagatgaaa

SEQ ID NO: 24252 - DNA, 25 bp, Probe Sequence
aatccagcttctaagttcagttctg

SEQ ID NO: 24253 - DNA, 25 bp, Probe Sequence
aacactcaataaggaggaagattgc

SEQ ID NO: 24254 - DNA, 25 bp, Probe Sequence
ttctaagttcagttctgcaagcaag

SEQ ID NO: 24255 - DNA, 25 bp, Probe Sequence
tgagggagaagattatgccgaatag

SEQ ID NO: 24256 - DNA, 25 bp, Probe Sequence
tgaaacactcaataaggaggaagat

SEQ ID NO: 24257 - DNA, 25 bp, Probe Sequence
atgaaacactcaataaggaggaaga

SEQ ID NO: 24258 - DNA, 25 bp, Probe Sequence
gctctctctgttgatggtgaagatg

SEQ ID NO: 24259 - DNA, 25 bp, Probe Sequence
aatgagggagaagattatgccgaat

SEQ ID NO: 24260 - DNA, 25 bp, Probe Sequence
aacttctaaacctcccaaacctgat

SEQ ID NO: 24261 - DNA, 25 bp, Probe Sequence
cttctaagttcagttctgcaagcaa

SEQ ID NO: 24262 - DNA, 25 bp, Probe Sequence
ggaaggagtcagataggaaagatgg

SEQ ID NO: 24263 - DNA, 25 bp, Probe Sequence
aagttcagttctgcaagcaagtatg

SEQ ID NO: 24264 - DNA, 25 bp, Probe Sequence
aatgaaacactcaataaggaggaag

SEQ ID NO: 24265 - DNA, 25 bp, Probe Sequence
tgatggttgttgccgtaatagtata

SEQ ID NO: 24266 - DNA, 25 bp, Probe Sequence
aagaagaagaatcagaggaagaagc

SEQ ID NO: 24267 - DNA, 25 bp, Probe Sequence
ttgatggttgttgccgtaatagtat

SEQ ID NO: 24268 - DNA, 25 bp, Probe Sequence
attgatggttgttgccgtaatagta

SEQ ID NO: 24269 - DNA, 25 bp, Probe Sequence
aactgaatagcaacactgaatactg

SEQ ID NO: 24270 - DNA, 25 bp, Probe Sequence
gtaattgatggttgttgccgtaata

SEQ ID NO: 24271 - DNA, 25 bp, Probe Sequence
taattgatggttgttgccgtaatag

SEQ ID NO: 24272 - DNA, 25 bp, Probe Sequence
gaagaagaagaatcagaggaagaag

SEQ ID NO: 24273 - DNA, 25 bp, Probe Sequence
ttgccgtaatagtatattgcctgta

SEQ ID NO: 24274 - DNA, 25 bp, Probe Sequence
ttgttgccgtaatagtatattgcct

SEQ ID NO: 24275 - DNA, 25 bp, Probe Sequence
gttgttgccgtaatagtatattgcc

SEQ ID NO: 24276 - DNA, 25 bp, Probe Sequence
ggttgttgccgtaatagtatattgc

SEQ ID NO: 24277 - DNA, 25 bp, Probe Sequence
tgccgtaatagtatattgcctgtat

SEQ ID NO: 24278 - DNA, 25 bp, Probe Sequence
gatggttgttgccgtaatagtatat

SEQ ID NO: 24279 - DNA, 25 bp, Probe Sequence
ttaactgtaattgatggttgttgcc

SEQ ID NO: 24280 - DNA, 25 bp, Probe Sequence
tggttgttgccgtaatagtatattg

SEQ ID NO: 24281 - DNA, 25 bp, Probe Sequence
gttgccgtaatagtatattgcctgt

SEQ ID NO: 24282 - DNA, 25 bp, Probe Sequence
tgttgccgtaatagtatattgcctg

SEQ ID NO: 24283 - DNA, 25 bp, Probe Sequence
cttaactgtaattgatggttgttgc

SEQ ID NO: 24284 - DNA, 25 bp, Probe Sequence
aattgatggttgttgccgtaatagt

SEQ ID NO: 24285 - DNA, 25 bp, Probe Sequence
tgaagaagaagaatcagaggaagaa

SEQ ID NO: 24286 - DNA, 25 bp, Probe Sequence
tacatcataagttctcaagcagagg

SEQ ID NO: 24287 - DNA, 25 bp, Probe Sequence
tgtaattgatggttgttgccgtaat

SEQ ID NO: 24288 - DNA, 25 bp, Probe Sequence
gccgtaatagtatattgcctgtatt

SEQ ID NO: 24289 - DNA, 25 bp, Probe Sequence
tgattatagaaggctgtcttagtgc

SEQ ID NO: 24290 - DNA, 25 bp, Probe Sequence
agaatctgagacatcttgcctactt

SEQ ID NO: 24291 - DNA, 25 bp, Probe Sequence
gcattactctggtggattgttctag

SEQ ID NO: 24292 - DNA, 25 bp, Probe Sequence
cattactctggtggattgttctagt

SEQ ID NO: 24293 - DNA, 25 bp, Probe Sequence
gagaatctgagacatcttgcctact

SEQ ID NO: 24294 - DNA, 25 bp, Probe Sequence
agaagttgaactatgactggagtaa

SEQ ID NO: 24295 - DNA, 25 bp, Probe Sequence
aagaagttgaactatgactggagta

SEQ ID NO: 24296 - DNA, 25 bp, Probe Sequence
taagaagttgaactatgactggagt

SEQ ID NO: 24297 - DNA, 25 bp, Probe Sequence
atgattatagaaggctgtcttagtg

SEQ ID NO: 24298 - DNA, 25 bp, Probe Sequence
tgttaagaagttgaactatgactgg

SEQ ID NO: 24299 - DNA, 25 bp, Probe Sequence
tcacatgattatagaaggctgtctt

SEQ ID NO: 24300 - DNA, 25 bp, Probe Sequence
gttaagaagttgaactatgactgga

SEQ ID NO: 24301 - DNA, 25 bp, Probe Sequence
atcacatgattatagaaggctgtct

SEQ ID NO: 24302 - DNA, 25 bp, Probe Sequence
ggagaatctgagacatcttgcctac

SEQ ID NO: 24303 - DNA, 25 bp, Probe Sequence
ttaagaagttgaactatgactggag

SEQ ID NO: 24304 - DNA, 25 bp, Probe Sequence
tactgtattgggcttcttcgttaat

SEQ ID NO: 24305 - DNA, 25 bp, Probe Sequence
ttactctggtggattgttctagtac

SEQ ID NO: 24306 - DNA, 25 bp, Probe Sequence
gaatctgagacatcttgcctacttt

SEQ ID NO: 24307 - DNA, 25 bp, Probe Sequence
attatagaaggctgtcttagtgcaa

SEQ ID NO: 24308 - DNA, 25 bp, Probe Sequence
gattatagaaggctgtcttagtgca

SEQ ID NO: 24309 - DNA, 25 bp, Probe Sequence
attactctggtggattgttctagta

SEQ ID NO: 24310 - DNA, 25 bp, Probe Sequence
catgattatagaaggctgtcttagt

SEQ ID NO: 24311 - DNA, 25 bp, Probe Sequence
actgtattgggcttcttcgttaata

SEQ ID NO: 24312 - DNA, 25 bp, Probe Sequence
tgtattgggcttcttcgttaataga

SEQ ID NO: 24313 - DNA, 25 bp, Probe Sequence
ttatacagacaggcgtgaagacatt

SEQ ID NO: 24314 - DNA, 25 bp, Probe Sequence
gagaatatgtaccaacaacacgaat

SEQ ID NO: 24315 - DNA, 25 bp, Probe Sequence
aatatgtaccaacaacacgaattgc

SEQ ID NO: 24316 - DNA, 25 bp, Probe Sequence
gaatatgtaccaacaacacgaattg

SEQ ID NO: 24317 - DNA, 25 bp, Probe Sequence
agaatatgtaccaacaacacgaatt

SEQ ID NO: 24318 - DNA, 25 bp, Probe Sequence
ggagaatatgtaccaacaacacgaa

SEQ ID NO: 24319 - DNA, 25 bp, Probe Sequence
tatacagacaggcgtgaagacattc

SEQ ID NO: 24320 - DNA, 25 bp, Probe Sequence
acagaatccacattcagataaccat

SEQ ID NO: 24321 - DNA, 25 bp, Probe Sequence
tacagaatccacattcagataacca

SEQ ID NO: 24322 - DNA, 25 bp, Probe Sequence
catgatgtacctgatactgaggaag

SEQ ID NO: 24323 - DNA, 25 bp, Probe Sequence
cagaatccacattcagataaccatt

SEQ ID NO: 24324 - DNA, 25 bp, Probe Sequence
gatgtctggagaatatgtaccaaca

SEQ ID NO: 24325 - DNA, 25 bp, Probe Sequence
agatgtctggagaatatgtaccaac

SEQ ID NO: 24326 - DNA, 25 bp, Probe Sequence
atgtctggagaatatgtaccaacaa

SEQ ID NO: 24327 - DNA, 25 bp, Probe Sequence
gcagtacagaatccacattcagata

SEQ ID NO: 24328 - DNA, 25 bp, Probe Sequence
tctggagaatatgtaccaacaacac

SEQ ID NO: 24329 - DNA, 25 bp, Probe Sequence
gtctggagaatatgtaccaacaaca

SEQ ID NO: 24330 - DNA, 25 bp, Probe Sequence
tgtctggagaatatgtaccaacaac

SEQ ID NO: 24331 - DNA, 25 bp, Probe Sequence
gtacagaatccacattcagataacc

SEQ ID NO: 24332 - DNA, 25 bp, Probe Sequence
atgatgtacctgatactgaggaagc

SEQ ID NO: 24333 - DNA, 25 bp, Probe Sequence
cagatgtctggagaatatgtaccaa

SEQ ID NO: 24334 - DNA, 25 bp, Probe Sequence
taacctccatcatccagctaatgtc

SEQ ID NO: 24335 - DNA, 25 bp, Probe Sequence
ctaacctccatcatccagctaatgt

SEQ ID NO: 24336 - DNA, 25 bp, Probe Sequence
agtacagaatccacattcagataac

SEQ ID NO: 24337 - DNA, 25 bp, Probe Sequence
ttaccacaacctgaagaatgtcatc

SEQ ID NO: 24338 - DNA, 25 bp, Probe Sequence
taccacaacctgaagaatgtcatca

SEQ ID NO: 24339 - DNA, 25 bp, Probe Sequence
ccacaacctgaagaatgtcatcaag

SEQ ID NO: 24340 - DNA, 25 bp, Probe Sequence
acctgaagaatgtcatcaaggagaa

SEQ ID NO: 24341 - DNA, 25 bp, Probe Sequence
aacctgaagaatgtcatcaaggaga

SEQ ID NO: 24342 - DNA, 25 bp, Probe Sequence
caacctgaagaatgtcatcaaggag

SEQ ID NO: 24343 - DNA, 25 bp, Probe Sequence
tcaaggagaaatatgggaaagatgc

SEQ ID NO: 24344 - DNA, 25 bp, Probe Sequence
tgtcatcaaggagaaatatgggaaa

SEQ ID NO: 24345 - DNA, 25 bp, Probe Sequence
atgtcatcaaggagaaatatgggaa

SEQ ID NO: 24346 - DNA, 25 bp, Probe Sequence
aatgtcatcaaggagaaatatggga

SEQ ID NO: 24347 - DNA, 25 bp, Probe Sequence
gaatgtcatcaaggagaaatatggg

SEQ ID NO: 24348 - DNA, 25 bp, Probe Sequence
cacaacctgaagaatgtcatcaagg

SEQ ID NO: 24349 - DNA, 25 bp, Probe Sequence
tcatcaaggagaaatatgggaaaga

SEQ ID NO: 24350 - DNA, 25 bp, Probe Sequence
gtcatcaaggagaaatatgggaaag

SEQ ID NO: 24351 - DNA, 25 bp, Probe Sequence
aataaatctaagtttggtgcgaacg

SEQ ID NO: 24352 - DNA, 25 bp, Probe Sequence
acaacctgaagaatgtcatcaagga

SEQ ID NO: 24353 - DNA, 25 bp, Probe Sequence
atcaaggagaaatatgggaaagatg

SEQ ID NO: 24354 - DNA, 25 bp, Probe Sequence
accacaacctgaagaatgtcatcaa

SEQ ID NO: 24355 - DNA, 25 bp, Probe Sequence
gagaagattgacaaactgatgatcg

SEQ ID NO: 24356 - DNA, 25 bp, Probe Sequence
catcaaggagaaatatgggaaagat

SEQ ID NO: 24357 - DNA, 25 bp, Probe Sequence
agaatgtcatcaaggagaaatatgg

SEQ ID NO: 24358 - DNA, 25 bp, Probe Sequence
caaggagaaatatgggaaagatgcc

SEQ ID NO: 24359 - DNA, 25 bp, Probe Sequence
ctgaagaatgtcatcaaggagaaat

SEQ ID NO: 24360 - DNA, 25 bp, Probe Sequence
aaataaatctaagtttggtgcgaac

SEQ ID NO: 24361 - DNA, 25 bp, Probe Sequence
aacattcttgtaggagtggttagag

SEQ ID NO: 24362 - DNA, 25 bp, Probe Sequence
acattcttgtaggagtggttagaga

SEQ ID NO: 24363 - DNA, 25 bp, Probe Sequence
tactaacattcttgtaggagtggtt

SEQ ID NO: 24364 - DNA, 25 bp, Probe Sequence
atactaacattcttgtaggagtggt

SEQ ID NO: 24365 - DNA, 25 bp, Probe Sequence
catactaacattcttgtaggagtgg

SEQ ID NO: 24366 - DNA, 25 bp, Probe Sequence
actaacattcttgtaggagtggtta

SEQ ID NO: 24367 - DNA, 25 bp, Probe Sequence
gcaggatcacctacttactgtattc

SEQ ID NO: 24368 - DNA, 25 bp, Probe Sequence
taacattcttgtaggagtggttaga

SEQ ID NO: 24369 - DNA, 25 bp, Probe Sequence
acatactaacattcttgtaggagtg

SEQ ID NO: 24370 - DNA, 25 bp, Probe Sequence
caggatcacctacttactgtattct

SEQ ID NO: 24371 - DNA, 25 bp, Probe Sequence
ggatcacctacttactgtattctac

SEQ ID NO: 24372 - DNA, 25 bp, Probe Sequence
gtatccttacagaaataaagcagca

SEQ ID NO: 24373 - DNA, 25 bp, Probe Sequence
tagtagttgtctgctctttgtccat

SEQ ID NO: 24374 - DNA, 25 bp, Probe Sequence
cttgtaacgtagtagttgtctgctc

SEQ ID NO: 24375 - DNA, 25 bp, Probe Sequence
cattcttgtaggagtggttagagaa

SEQ ID NO: 24376 - DNA, 25 bp, Probe Sequence
gtaggagtggttagagaagctgatg

SEQ ID NO: 24377 - DNA, 25 bp, Probe Sequence
attcttgtaggagtggttagagaag

SEQ ID NO: 24378 - DNA, 25 bp, Probe Sequence
tgtaacgtagtagttgtctgctctt

SEQ ID NO: 24379 - DNA, 25 bp, Probe Sequence
ttgtaacgtagtagttgtctgctct

SEQ ID NO: 24380 - DNA, 25 bp, Probe Sequence
atgcctcatttctacattctgtcat

SEQ ID NO: 24381 - DNA, 25 bp, Probe Sequence
tgcctcatttctacattctgtcatt

SEQ ID NO: 24382 - DNA, 25 bp, Probe Sequence
tccttacagaaataaagcagcatat

SEQ ID NO: 24383 - DNA, 25 bp, Probe Sequence
atccttacagaaataaagcagcata

SEQ ID NO: 24384 - DNA, 25 bp, Probe Sequence
tatccttacagaaataaagcagcat

SEQ ID NO: 24385 - DNA, 25 bp, Probe Sequence
cttccagtgtccgtgttaatgtatt

SEQ ID NO: 24386 - DNA, 25 bp, Probe Sequence
taatctcttccagtgtccgtgttaa

SEQ ID NO: 24387 - DNA, 25 bp, Probe Sequence
ttaatctcttccagtgtccgtgtta

SEQ ID NO: 24388 - DNA, 25 bp, Probe Sequence
tcttccagtgtccgtgttaatgtat

SEQ ID NO: 24389 - DNA, 25 bp, Probe Sequence
aatctcttccagtgtccgtgttaat

SEQ ID NO: 24390 - DNA, 25 bp, Probe Sequence
gctgagaagatcctgagtacactag

SEQ ID NO: 24391 - DNA, 25 bp, Probe Sequence
ctcttccagtgtccgtgttaatgta

SEQ ID NO: 24392 - DNA, 25 bp, Probe Sequence
atctcttccagtgtccgtgttaatg

SEQ ID NO: 24393 - DNA, 25 bp, Probe Sequence
cttaatctcttccagtgtccgtgtt

SEQ ID NO: 24394 - DNA, 25 bp, Probe Sequence
aatccgcttaatctcttccagtgtc

SEQ ID NO: 24395 - DNA, 25 bp, Probe Sequence
ctgagaagatcctgagtacactagg

SEQ ID NO: 24396 - DNA, 25 bp, Probe Sequence
cttgagggacatattggagaatctt

SEQ ID NO: 24397 - DNA, 25 bp, Probe Sequence
gtccgtgttaatgtatttggctatt

SEQ ID NO: 24398 - DNA, 25 bp, Probe Sequence
gagaagatcctgagtacactaggtg

SEQ ID NO: 24399 - DNA, 25 bp, Probe Sequence
tgtccgtgttaatgtatttggctat

SEQ ID NO: 24400 - DNA, 25 bp, Probe Sequence
ttccagtgtccgtgttaatgtattt

SEQ ID NO: 24401 - DNA, 25 bp, Probe Sequence
cagaaatccagaaatgaggtgtagg

SEQ ID NO: 24402 - DNA, 25 bp, Probe Sequence
ttgagggacatattggagaatctta

SEQ ID NO: 24403 - DNA, 25 bp, Probe Sequence
tgagaagatcctgagtacactaggt

SEQ ID NO: 24404 - DNA, 25 bp, Probe Sequence
tgagggacatattggagaatcttaa

SEQ ID NO: 24405 - DNA, 25 bp, Probe Sequence
tcttgagggacatattggagaatct

SEQ ID NO: 24406 - DNA, 25 bp, Probe Sequence
tccagtgtccgtgttaatgtatttg

SEQ ID NO: 24407 - DNA, 25 bp, Probe Sequence
gtgtccgtgttaatgtatttggcta

SEQ ID NO: 24408 - DNA, 25 bp, Probe Sequence
gcagaaatccagaaatgaggtgtag

SEQ ID NO: 24409 - DNA, 25 bp, Probe Sequence
attactcttggtggaaggctctata

SEQ ID NO: 24410 - DNA, 25 bp, Probe Sequence
agtgattctagcaatagtgattcca

SEQ ID NO: 24411 - DNA, 25 bp, Probe Sequence
aacacagtggacttcctattaagac

SEQ ID NO: 24412 - DNA, 25 bp, Probe Sequence
gtagtggaggtgaaggagattctaa

SEQ ID NO: 24413 - DNA, 25 bp, Probe Sequence
cacagtggacttcctattaagactt

SEQ ID NO: 24414 - DNA, 25 bp, Probe Sequence
ggacttcctattaagacttacttgc

SEQ ID NO: 24415 - DNA, 25 bp, Probe Sequence
taacacagtggacttcctattaaga

SEQ ID NO: 24416 - DNA, 25 bp, Probe Sequence
gtaacacagtggacttcctattaag

SEQ ID NO: 24417 - DNA, 25 bp, Probe Sequence
aagtgattctagcaatagtgattcc

SEQ ID NO: 24418 - DNA, 25 bp, Probe Sequence
gattactcttggtggaaggctctat

SEQ ID NO: 24419 - DNA, 25 bp, Probe Sequence
agtagtggaggtgaaggagattcta

SEQ ID NO: 24420 - DNA, 25 bp, Probe Sequence
acacagtggacttcctattaagact

SEQ ID NO: 24421 - DNA, 25 bp, Probe Sequence
agtaacacagtggacttcctattaa

SEQ ID NO: 24422 - DNA, 25 bp, Probe Sequence
acagtggacttcctattaagactta

SEQ ID NO: 24423 - DNA, 25 bp, Probe Sequence
gaacaattacaactatgtcattcgg

SEQ ID NO: 24424 - DNA, 25 bp, Probe Sequence
ggaacaattacaactatgtcattcg

SEQ ID NO: 24425 - DNA, 25 bp, Probe Sequence
cggaacaattacaactatgtcattc

SEQ ID NO: 24426 - DNA, 25 bp, Probe Sequence
agtggacttcctattaagacttact

SEQ ID NO: 24427 - DNA, 25 bp, Probe Sequence
cagtggacttcctattaagacttac

SEQ ID NO: 24428 - DNA, 25 bp, Probe Sequence
gtgattctagcaatagtgattccac

SEQ ID NO: 24429 - DNA, 25 bp, Probe Sequence
cctattagagctacacagaagacct

SEQ ID NO: 24430 - DNA, 25 bp, Probe Sequence
tggacttcctattaagacttacttg

SEQ ID NO: 24431 - DNA, 25 bp, Probe Sequence
gtggacttcctattaagacttactt

SEQ ID NO: 24432 - DNA, 25 bp, Probe Sequence
agattactcttggtggaaggctcta

SEQ ID NO: 24433 - DNA, 25 bp, Probe Sequence
aatggagaactgaggactattcaag

SEQ ID NO: 24434 - DNA, 25 bp, Probe Sequence
tgtgtactgattgctataatggtga

SEQ ID NO: 24435 - DNA, 25 bp, Probe Sequence
ctgtgtactgattgctataatggtg

SEQ ID NO: 24436 - DNA, 25 bp, Probe Sequence
tctgtgtactgattgctataatggt

SEQ ID NO: 24437 - DNA, 25 bp, Probe Sequence
gtgtactgattgctataatggtgaa

SEQ ID NO: 24438 - DNA, 25 bp, Probe Sequence
ttctgtgtactgattgctataatgg

SEQ ID NO: 24439 - DNA, 25 bp, Probe Sequence
gagtaattatctgtgatggatggac

SEQ ID NO: 24440 - DNA, 25 bp, Probe Sequence
agagtaattatctgtgatggatgga

SEQ ID NO: 24441 - DNA, 25 bp, Probe Sequence
gagaactgaggactattcaagcgat

SEQ ID NO: 24442 - DNA, 25 bp, Probe Sequence
atggagaactgaggactattcaagc

SEQ ID NO: 24443 - DNA, 25 bp, Probe Sequence
agtaattatctgtgatggatggaca

SEQ ID NO: 24444 - DNA, 25 bp, Probe Sequence
tcttacgctatttctgttggttagt

SEQ ID NO: 24445 - DNA, 25 bp, Probe Sequence
cgctacattgagaacatttaccatt

SEQ ID NO: 24446 - DNA, 25 bp, Probe Sequence
aactgaggactattcaagcgatgag

SEQ ID NO: 24447 - DNA, 25 bp, Probe Sequence
gaactgaggactattcaagcgatga

SEQ ID NO: 24448 - DNA, 25 bp, Probe Sequence
agaactgaggactattcaagcgatg

SEQ ID NO: 24449 - DNA, 25 bp, Probe Sequence
gttatcttacgctatttctgttggt

SEQ ID NO: 24450 - DNA, 25 bp, Probe Sequence
gtaattatctgtgatggatggacac

SEQ ID NO: 24451 - DNA, 25 bp, Probe Sequence
gagaacatttaccattccaaaccaa

SEQ ID NO: 24452 - DNA, 25 bp, Probe Sequence
aatgtaatgaggtggtactatgatt

SEQ ID NO: 24453 - DNA, 25 bp, Probe Sequence
atcttacgctatttctgttggttag

SEQ ID NO: 24454 - DNA, 25 bp, Probe Sequence
agttatcttacgctatttctgttgg

SEQ ID NO: 24455 - DNA, 25 bp, Probe Sequence
cctgaaagtgagagtgaacctaaag

SEQ ID NO: 24456 - DNA, 25 bp, Probe Sequence
agaacatttaccattccaaaccaat

SEQ ID NO: 24457 - DNA, 25 bp, Probe Sequence
aacacgataatgaaggttctggaag

SEQ ID NO: 24458 - DNA, 25 bp, Probe Sequence
caagatgaaggctatcgttgagaag

SEQ ID NO: 24459 - DNA, 25 bp, Probe Sequence
caaggtggagtattcagaagaggag

SEQ ID NO: 24460 - DNA, 25 bp, Probe Sequence
ggagtcgtcagattatactggagaa

SEQ ID NO: 24461 - DNA, 25 bp, Probe Sequence
acgataatgaaggttctggaagcaa

SEQ ID NO: 24462 - DNA, 25 bp, Probe Sequence
actttgctgttctttactttactgc

SEQ ID NO: 24463 - DNA, 25 bp, Probe Sequence
ccactttgctgttctttactttact

SEQ ID NO: 24464 - DNA, 25 bp, Probe Sequence
cccactttgctgttctttactttac

SEQ ID NO: 24465 - DNA, 25 bp, Probe Sequence
tcccactttgctgttctttacttta

SEQ ID NO: 24466 - DNA, 25 bp, Probe Sequence
ctgaagggaaagttaccaagagaaa

SEQ ID NO: 24467 - DNA, 25 bp, Probe Sequence
cctgaataaagagccctaagtttgt

SEQ ID NO: 24468 - DNA, 25 bp, Probe Sequence
ctttgctgttctttactttactgcc

SEQ ID NO: 24469 - DNA, 25 bp, Probe Sequence
tttgctgttctttactttactgcct

SEQ ID NO: 24470 - DNA, 25 bp, Probe Sequence
cactttgctgttctttactttactg

SEQ ID NO: 24471 - DNA, 25 bp, Probe Sequence
ctgttctttactttactgcctgaat

SEQ ID NO: 24472 - DNA, 25 bp, Probe Sequence
aaacacgataatgaaggttctggaa

SEQ ID NO: 24473 - DNA, 25 bp, Probe Sequence
ttactgcctgaataaagagccctaa

SEQ ID NO: 24474 - DNA, 25 bp, Probe Sequence
cacgataatgaaggttctggaagca

SEQ ID NO: 24475 - DNA, 25 bp, Probe Sequence
acacgataatgaaggttctggaagc

SEQ ID NO: 24476 - DNA, 25 bp, Probe Sequence
tctatgggagtcgtcagattatact

SEQ ID NO: 24477 - DNA, 25 bp, Probe Sequence
ctgaataaagagccctaagtttgta

SEQ ID NO: 24478 - DNA, 25 bp, Probe Sequence
ctcccactttgctgttctttacttt

SEQ ID NO: 24479 - DNA, 25 bp, Probe Sequence
cgataatgaaggttctggaagcaaa

SEQ ID NO: 24480 - DNA, 25 bp, Probe Sequence
gatatagtgatctctgtgggcattt

SEQ ID NO: 24481 - DNA, 25 bp, Probe Sequence
aatgaacaccttgaatagcactaat

SEQ ID NO: 24482 - DNA, 25 bp, Probe Sequence
atgaacaccttgaatagcactaatt

SEQ ID NO: 24483 - DNA, 25 bp, Probe Sequence
ggaggaattggtatattacacagtt

SEQ ID NO: 24484 - DNA, 25 bp, Probe Sequence
accttataacacttagccacttctc

SEQ ID NO: 24485 - DNA, 25 bp, Probe Sequence
taagcagtccacatagtagacaatg

SEQ ID NO: 24486 - DNA, 25 bp, Probe Sequence
gtaagcagtccacatagtagacaat

SEQ ID NO: 24487 - DNA, 25 bp, Probe Sequence
ccttataacacttagccacttctcc

SEQ ID NO: 24488 - DNA, 25 bp, Probe Sequence
tattacacagttccacttattcagg

SEQ ID NO: 24489 - DNA, 25 bp, Probe Sequence
taccttataacacttagccacttct

SEQ ID NO: 24490 - DNA, 25 bp, Probe Sequence
tgtaagcagtccacatagtagacaa

SEQ ID NO: 24491 - DNA, 25 bp, Probe Sequence
ttgtaagcagtccacatagtagaca

SEQ ID NO: 24492 - DNA, 25 bp, Probe Sequence
attacacagttccacttattcagga

SEQ ID NO: 24493 - DNA, 25 bp, Probe Sequence
ataccttataacacttagccacttc

SEQ ID NO: 24494 - DNA, 25 bp, Probe Sequence
ttgaaatgaacaccttgaatagcac

SEQ ID NO: 24495 - DNA, 25 bp, Probe Sequence
tttgaaatgaacaccttgaatagca

SEQ ID NO: 24496 - DNA, 25 bp, Probe Sequence
gaaatgaacaccttgaatagcacta

SEQ ID NO: 24497 - DNA, 25 bp, Probe Sequence
ccgtgttgtccagtataccttataa

SEQ ID NO: 24498 - DNA, 25 bp, Probe Sequence
tgaaatgaacaccttgaatagcact

SEQ ID NO: 24499 - DNA, 25 bp, Probe Sequence
gtcggaggattcttctctcagattg

SEQ ID NO: 24500 - DNA, 25 bp, Probe Sequence
gaggaattggtatattacacagttc

SEQ ID NO: 24501 - DNA, 25 bp, Probe Sequence
gggaggaattggtatattacacagt

SEQ ID NO: 24502 - DNA, 25 bp, Probe Sequence
tgggaggaattggtatattacacag

SEQ ID NO: 24503 - DNA, 25 bp, Probe Sequence
ctgggaggaattggtatattacaca

SEQ ID NO: 24504 - DNA, 25 bp, Probe Sequence
aaatgaacaccttgaatagcactaa

SEQ ID NO: 24505 - DNA, 25 bp, Probe Sequence
gttatccgcatcatctgtatcctta

SEQ ID NO: 24506 - DNA, 25 bp, Probe Sequence
ttatccgcatcatctgtatccttag

SEQ ID NO: 24507 - DNA, 25 bp, Probe Sequence
tatccgcatcatctgtatccttagc

SEQ ID NO: 24508 - DNA, 25 bp, Probe Sequence
ggttatccgcatcatctgtatcctt

SEQ ID NO: 24509 - DNA, 25 bp, Probe Sequence
ttgtggctatcagtgacttgtatga

SEQ ID NO: 24510 - DNA, 25 bp, Probe Sequence
tgtggctatcagtgacttgtatgag

SEQ ID NO: 24511 - DNA, 25 bp, Probe Sequence
tttgtttcttgtctttgtgttctgt

SEQ ID NO: 24512 - DNA, 25 bp, Probe Sequence
aacgacatcaaagacatctacaaac

SEQ ID NO: 24513 - DNA, 25 bp, Probe Sequence
caacgacatcaaagacatctacaaa

SEQ ID NO: 24514 - DNA, 25 bp, Probe Sequence
ttgtttcttgtctttgtgttctgtg

SEQ ID NO: 24515 - DNA, 25 bp, Probe Sequence
ttattaactttgacccaccctttct

SEQ ID NO: 24516 - DNA, 25 bp, Probe Sequence
tttcttgtctttgtgttctgtggta

SEQ ID NO: 24517 - DNA, 25 bp, Probe Sequence
tattaactttgacccaccctttctg

SEQ ID NO: 24518 - DNA, 25 bp, Probe Sequence
tttattaactttgacccaccctttc

SEQ ID NO: 24519 - DNA, 25 bp, Probe Sequence
tttgtggctatcagtgacttgtatg

SEQ ID NO: 24520 - DNA, 25 bp, Probe Sequence
gtttgtggctatcagtgacttgtat

SEQ ID NO: 24521 - DNA, 25 bp, Probe Sequence
atttattaactttgacccacccttt

SEQ ID NO: 24522 - DNA, 25 bp, Probe Sequence
acatcaaagacatctacaaacgcat

SEQ ID NO: 24523 - DNA, 25 bp, Probe Sequence
aatttattaactttgacccaccctt

SEQ ID NO: 24524 - DNA, 25 bp, Probe Sequence
ctaattcttctgctctgtttgggaa

SEQ ID NO: 24525 - DNA, 25 bp, Probe Sequence
acgacatcaaagacatctacaaacg

SEQ ID NO: 24526 - DNA, 25 bp, Probe Sequence
ggtcaacaggaagtcagacatctac

SEQ ID NO: 24527 - DNA, 25 bp, Probe Sequence
aggtcaacaggaagtcagacatcta

SEQ ID NO: 24528 - DNA, 25 bp, Probe Sequence
gacatcaaagacatctacaaacgca

SEQ ID NO: 24529 - DNA, 25 bp, Probe Sequence
cagcgtgtgaattatagaggaatac

SEQ ID NO: 24530 - DNA, 25 bp, Probe Sequence
tcagcgtgtgaattatagaggaata

SEQ ID NO: 24531 - DNA, 25 bp, Probe Sequence
tcagtatctcagcgtgtgaattata

SEQ ID NO: 24532 - DNA, 25 bp, Probe Sequence
gtcagtatctcagcgtgtgaattat

SEQ ID NO: 24533 - DNA, 25 bp, Probe Sequence
tatctcagcgtgtgaattatagagg

SEQ ID NO: 24534 - DNA, 25 bp, Probe Sequence
agtatctcagcgtgtgaattataga

SEQ ID NO: 24535 - DNA, 25 bp, Probe Sequence
cagtatctcagcgtgtgaattatag

SEQ ID NO: 24536 - DNA, 25 bp, Probe Sequence
ctcagcgtgtgaattatagaggaat

SEQ ID NO: 24537 - DNA, 25 bp, Probe Sequence
taacagtcagaggtcagtatctcag

SEQ ID NO: 24538 - DNA, 25 bp, Probe Sequence
ctaacagtcagaggtcagtatctca

SEQ ID NO: 24539 - DNA, 25 bp, Probe Sequence
agcgtgtgaattatagaggaataca

SEQ ID NO: 24540 - DNA, 25 bp, Probe Sequence
gcgtgtgaattatagaggaatacag

SEQ ID NO: 24541 - DNA, 25 bp, Probe Sequence
tggagaattatatgacatggtagca

SEQ ID NO: 24542 - DNA, 25 bp, Probe Sequence
gtatctcagcgtgtgaattatagag

SEQ ID NO: 24543 - DNA, 25 bp, Probe Sequence
atctcagcgtgtgaattatagagga

SEQ ID NO: 24544 - DNA, 25 bp, Probe Sequence
ctctccttaatgactgagtgaacag

SEQ ID NO: 24545 - DNA, 25 bp, Probe Sequence
ggagaattatatgacatggtagcag

SEQ ID NO: 24546 - DNA, 25 bp, Probe Sequence
tctcagcgtgtgaattatagaggaa

SEQ ID NO: 24547 - DNA, 25 bp, Probe Sequence
tccaggacttgtgattaataaccag

SEQ ID NO: 24548 - DNA, 25 bp, Probe Sequence
ttccaggacttgtgattaataacca

SEQ ID NO: 24549 - DNA, 25 bp, Probe Sequence
aatgacaggaatgaatctcaccaga

SEQ ID NO: 24550 - DNA, 25 bp, Probe Sequence
tatctcctacttctcctactggaac

SEQ ID NO: 24551 - DNA, 25 bp, Probe Sequence
cctaagctatctctcatggttccta

SEQ ID NO: 24552 - DNA, 25 bp, Probe Sequence
caggacttgtgattaataaccagct

SEQ ID NO: 24553 - DNA, 25 bp, Probe Sequence
taattcgtgagactgaagttgctta

SEQ ID NO: 24554 - DNA, 25 bp, Probe Sequence
ggtgatagtaattcgtgagactgaa

SEQ ID NO: 24555 - DNA, 25 bp, Probe Sequence
tgatagtaattcgtgagactgaagt

SEQ ID NO: 24556 - DNA, 25 bp, Probe Sequence
aattcgtgagactgaagttgcttag

SEQ ID NO: 24557 - DNA, 25 bp, Probe Sequence
tagtaattcgtgagactgaagttgc

SEQ ID NO: 24558 - DNA, 25 bp, Probe Sequence
gtgatagtaattcgtgagactgaag

SEQ ID NO: 24559 - DNA, 25 bp, Probe Sequence
gtaattcgtgagactgaagttgctt

SEQ ID NO: 24560 - DNA, 25 bp, Probe Sequence
atagtaattcgtgagactgaagttg

SEQ ID NO: 24561 - DNA, 25 bp, Probe Sequence
gatagtaattcgtgagactgaagtt

SEQ ID NO: 24562 - DNA, 25 bp, Probe Sequence
gtgagactgaagttgcttagagtac

SEQ ID NO: 24563 - DNA, 25 bp, Probe Sequence
attcgtgagactgaagttgcttaga

SEQ ID NO: 24564 - DNA, 25 bp, Probe Sequence
tacttgaacactcctgaacagtcat

SEQ ID NO: 24565 - DNA, 25 bp, Probe Sequence
cgtgagactgaagttgcttagagta

SEQ ID NO: 24566 - DNA, 25 bp, Probe Sequence
ctacttgaacactcctgaacagtca

SEQ ID NO: 24567 - DNA, 25 bp, Probe Sequence
agtaattcgtgagactgaagttgct

SEQ ID NO: 24568 - DNA, 25 bp, Probe Sequence
ttcgtgagactgaagttgcttagag

SEQ ID NO: 24569 - DNA, 25 bp, Probe Sequence
atcttacttgctcctgcttacgaag

SEQ ID NO: 24570 - DNA, 25 bp, Probe Sequence
tattactgccttctgaaacttcctc

SEQ ID NO: 24571 - DNA, 25 bp, Probe Sequence
atattactgccttctgaaacttcct

SEQ ID NO: 24572 - DNA, 25 bp, Probe Sequence
gagcatattgttaagtgggtaaagc

SEQ ID NO: 24573 - DNA, 25 bp, Probe Sequence
ctgtgattgccctgttaagtattta

SEQ ID NO: 24574 - DNA, 25 bp, Probe Sequence
tacttctttgaccaaggaataccac

SEQ ID NO: 24575 - DNA, 25 bp, Probe Sequence
tgagcatattgttaagtgggtaaag

SEQ ID NO: 24576 - DNA, 25 bp, Probe Sequence
gatcttacttgctcctgcttacgaa

SEQ ID NO: 24577 - DNA, 25 bp, Probe Sequence
ctgccttgctgacaataaagatatt

SEQ ID NO: 24578 - DNA, 25 bp, Probe Sequence
tgccttgctgacaataaagatattt

SEQ ID NO: 24579 - DNA, 25 bp, Probe Sequence
cctgccttgctgacaataaagatat

SEQ ID NO: 24580 - DNA, 25 bp, Probe Sequence
gccttgctgacaataaagatatttc

SEQ ID NO: 24581 - DNA, 25 bp, Probe Sequence
ccttgctgacaataaagatatttcc

SEQ ID NO: 24582 - DNA, 25 bp, Probe Sequence
caactatgtggactggatcaacgac

SEQ ID NO: 24583 - DNA, 25 bp, Probe Sequence
tgctgacaataaagatatttccaag

SEQ ID NO: 24584 - DNA, 25 bp, Probe Sequence
cttgctgacaataaagatatttcca

SEQ ID NO: 24585 - DNA, 25 bp, Probe Sequence
ttgctgacaataaagatatttccaa

SEQ ID NO: 24586 - DNA, 25 bp, Probe Sequence
ccctgccttgctgacaataaagata

SEQ ID NO: 24587 - DNA, 25 bp, Probe Sequence
aactatgtggactggatcaacgacc

SEQ ID NO: 24588 - DNA, 25 bp, Probe Sequence
attccctgccttgctgacaataaag

SEQ ID NO: 24589 - DNA, 25 bp, Probe Sequence
cattccctgccttgctgacaataaa

SEQ ID NO: 24590 - DNA, 25 bp, Probe Sequence
ccaactatgtggactggatcaacga

SEQ ID NO: 24591 - DNA, 25 bp, Probe Sequence
tccctgccttgctgacaataaagat

SEQ ID NO: 24592 - DNA, 25 bp, Probe Sequence
ttccctgccttgctgacaataaaga

SEQ ID NO: 24593 - DNA, 25 bp, Probe Sequence
agaagtacatcccgtacaccctgta

SEQ ID NO: 24594 - DNA, 25 bp, Probe Sequence
gaccttcggcatcgagaagtacatc

SEQ ID NO: 24595 - DNA, 25 bp, Probe Sequence
catcgagaagtacatcccgtacacc

SEQ ID NO: 24596 - DNA, 25 bp, Probe Sequence
gcatcgagaagtacatcccgtacac

SEQ ID NO: 24597 - DNA, 25 bp, Probe Sequence
ccagttatgattgtgaagttaatgc

SEQ ID NO: 24598 - DNA, 25 bp, Probe Sequence
ctgaccagttatgattgtgaagtta

SEQ ID NO: 24599 - DNA, 25 bp, Probe Sequence
ttatgattgtgaagttaatgctcct

SEQ ID NO: 24600 - DNA, 25 bp, Probe Sequence
gttatgattgtgaagttaatgctcc

SEQ ID NO: 24601 - DNA, 25 bp, Probe Sequence
atctagtgaacagaatggaatggag

SEQ ID NO: 24602 - DNA, 25 bp, Probe Sequence
aatctagtgaacagaatggaatgga

SEQ ID NO: 24603 - DNA, 25 bp, Probe Sequence
tgaccagttatgattgtgaagttaa

SEQ ID NO: 24604 - DNA, 25 bp, Probe Sequence
gctgaccagttatgattgtgaagtt

SEQ ID NO: 24605 - DNA, 25 bp, Probe Sequence
atgattgtgaagttaatgctcctat

SEQ ID NO: 24606 - DNA, 25 bp, Probe Sequence
cagttatgattgtgaagttaatgct

SEQ ID NO: 24607 - DNA, 25 bp, Probe Sequence
tagtgaacagaatggaatggagcaa

SEQ ID NO: 24608 - DNA, 25 bp, Probe Sequence
tgattgtgaagttaatgctcctata

SEQ ID NO: 24609 - DNA, 25 bp, Probe Sequence
tatgattgtgaagttaatgctccta

SEQ ID NO: 24610 - DNA, 25 bp, Probe Sequence
tgaagttaatgctcctatacaaggc

SEQ ID NO: 24611 - DNA, 25 bp, Probe Sequence
tgtgaagttaatgctcctatacaag

SEQ ID NO: 24612 - DNA, 25 bp, Probe Sequence
gtgaagttaatgctcctatacaagg

SEQ ID NO: 24613 - DNA, 25 bp, Probe Sequence
agttatgattgtgaagttaatgctc

SEQ ID NO: 24614 - DNA, 25 bp, Probe Sequence
tggttggatctaacactaactgtat

SEQ ID NO: 24615 - DNA, 25 bp, Probe Sequence
gattgtgaagttaatgctcctatac

SEQ ID NO: 24616 - DNA, 25 bp, Probe Sequence
accagttatgattgtgaagttaatg

SEQ ID NO: 24617 - DNA, 25 bp, Probe Sequence
gtggttggatctaacactaactgta

SEQ ID NO: 24618 - DNA, 25 bp, Probe Sequence
ttgtggttggatctaacactaactg

SEQ ID NO: 24619 - DNA, 25 bp, Probe Sequence
gaccagttatgattgtgaagttaat

SEQ ID NO: 24620 - DNA, 25 bp, Probe Sequence
attgtgaagttaatgctcctataca

SEQ ID NO: 24621 - DNA, 25 bp, Probe Sequence
cttgactggatggaaggagacttag

SEQ ID NO: 24622 - DNA, 25 bp, Probe Sequence
gactgaatgtgcctaatggagaaga

SEQ ID NO: 24623 - DNA, 25 bp, Probe Sequence
actgaatgtgcctaatggagaagac

SEQ ID NO: 24624 - DNA, 25 bp, Probe Sequence
aagagtggactgaatgtgcctaatg

SEQ ID NO: 24625 - DNA, 25 bp, Probe Sequence
caagagtggactgaatgtgcctaat

SEQ ID NO: 24626 - DNA, 25 bp, Probe Sequence
gatggaaggagacttaggaacctac

SEQ ID NO: 24627 - DNA, 25 bp, Probe Sequence
ctgaatgtgcctaatggagaagacc

SEQ ID NO: 24628 - DNA, 25 bp, Probe Sequence
ggactgaatgtgcctaatggagaag

SEQ ID NO: 24629 - DNA, 25 bp, Probe Sequence
gactggatggaaggagacttaggaa

SEQ ID NO: 24630 - DNA, 25 bp, Probe Sequence
actggatggaaggagacttaggaac

SEQ ID NO: 24631 - DNA, 25 bp, Probe Sequence
ttgactggatggaaggagacttagg

SEQ ID NO: 24632 - DNA, 25 bp, Probe Sequence
aaggagacttaggaacctaccagtt

SEQ ID NO: 24633 - DNA, 25 bp, Probe Sequence
ggatggaaggagacttaggaaccta

SEQ ID NO: 24634 - DNA, 25 bp, Probe Sequence
tagcagatggagtaatggtcacgag

SEQ ID NO: 24635 - DNA, 25 bp, Probe Sequence
tggactgaatgtgcctaatggagaa

SEQ ID NO: 24636 - DNA, 25 bp, Probe Sequence
gaaggagacttaggaacctaccagt

SEQ ID NO: 24637 - DNA, 25 bp, Probe Sequence
atggaaggagacttaggaacctacc

SEQ ID NO: 24638 - DNA, 25 bp, Probe Sequence
aagaatgcaagagtggactgaatgt

SEQ ID NO: 24639 - DNA, 25 bp, Probe Sequence
gcttgactggatggaaggagactta

SEQ ID NO: 24640 - DNA, 25 bp, Probe Sequence
aggagacttaggaacctaccagttg

SEQ ID NO: 24641 - DNA, 25 bp, Probe Sequence
gtagcagatggagtaatggtcacga

SEQ ID NO: 24642 - DNA, 25 bp, Probe Sequence
ctggatggaaggagacttaggaacc

SEQ ID NO: 24643 - DNA, 25 bp, Probe Sequence
tgactggatggaaggagacttagga

SEQ ID NO: 24644 - DNA, 25 bp, Probe Sequence
ggaaggagacttaggaacctaccag

SEQ ID NO: 24645 - DNA, 25 bp, Probe Sequence
ctaagtaaggaagatgctggagaat

SEQ ID NO: 24646 - DNA, 25 bp, Probe Sequence
gtaaggaagatgctggagaatatga

SEQ ID NO: 24647 - DNA, 25 bp, Probe Sequence
agtaaggaagatgctggagaatatg

SEQ ID NO: 24648 - DNA, 25 bp, Probe Sequence
taaggaagatgctggagaatatgag

SEQ ID NO: 24649 - DNA, 25 bp, Probe Sequence
aagtaaggaagatgctggagaatat

SEQ ID NO: 24650 - DNA, 25 bp, Probe Sequence
aaggaagatgctggagaatatgagt

SEQ ID NO: 24651 - DNA, 25 bp, Probe Sequence
taagtaaggaagatgctggagaata

SEQ ID NO: 24652 - DNA, 25 bp, Probe Sequence
tctaagtaaggaagatgctggagaa

SEQ ID NO: 24653 - DNA, 25 bp, Probe Sequence
aattacagtggttgatgccttacat

SEQ ID NO: 24654 - DNA, 25 bp, Probe Sequence
cattacctgttcttgcctaataagt

SEQ ID NO: 24655 - DNA, 25 bp, Probe Sequence
ggtgctggtatctcctctaagtaag

SEQ ID NO: 24656 - DNA, 25 bp, Probe Sequence
aactacattacctgttcttgcctaa

SEQ ID NO: 24657 - DNA, 25 bp, Probe Sequence
actacattacctgttcttgcctaat

SEQ ID NO: 24658 - DNA, 25 bp, Probe Sequence
ataactacattacctgttcttgcct

SEQ ID NO: 24659 - DNA, 25 bp, Probe Sequence
gataactacattacctgttcttgcc

SEQ ID NO: 24660 - DNA, 25 bp, Probe Sequence
ggataactacattacctgttcttgc

SEQ ID NO: 24661 - DNA, 25 bp, Probe Sequence
aggaagatgctggagaatatgagtg

SEQ ID NO: 24662 - DNA, 25 bp, Probe Sequence
ctctaagtaaggaagatgctggaga

SEQ ID NO: 24663 - DNA, 25 bp, Probe Sequence
taactacattacctgttcttgccta

SEQ ID NO: 24664 - DNA, 25 bp, Probe Sequence
attacctgttcttgcctaataagtt

SEQ ID NO: 24665 - DNA, 25 bp, Probe Sequence
acattacctgttcttgcctaataag

SEQ ID NO: 24666 - DNA, 25 bp, Probe Sequence
attacagtggttgatgccttacatg

SEQ ID NO: 24667 - DNA, 25 bp, Probe Sequence
tggataactacattacctgttcttg

SEQ ID NO: 24668 - DNA, 25 bp, Probe Sequence
gatcacacatcaagactatctacaa

SEQ ID NO: 24669 - DNA, 25 bp, Probe Sequence
gagaagagtgtcagaatcagaatca

SEQ ID NO: 24670 - DNA, 25 bp, Probe Sequence
agaagagtgtcagaatcagaatcat

SEQ ID NO: 24671 - DNA, 25 bp, Probe Sequence
ggagaagagtgtcagaatcagaatc

SEQ ID NO: 24672 - DNA, 25 bp, Probe Sequence
cattcttgaggagcattaaggtatt

SEQ ID NO: 24673 - DNA, 25 bp, Probe Sequence
tcattcttgaggagcattaaggtat

SEQ ID NO: 24674 - DNA, 25 bp, Probe Sequence
gaagagtgtcagaatcagaatcatg

SEQ ID NO: 24675 - DNA, 25 bp, Probe Sequence
gtgtcagaatcagaatcatggagaa

SEQ ID NO: 24676 - DNA, 25 bp, Probe Sequence
aagagtgtcagaatcagaatcatgg

SEQ ID NO: 24677 - DNA, 25 bp, Probe Sequence
gagtgtcagaatcagaatcatggag

SEQ ID NO: 24678 - DNA, 25 bp, Probe Sequence
agtgtcagaatcagaatcatggaga

SEQ ID NO: 24679 - DNA, 25 bp, Probe Sequence
agagtgtcagaatcagaatcatgga

SEQ ID NO: 24680 - DNA, 25 bp, Probe Sequence
ctgtgacgaggatagtatcaaggac

SEQ ID NO: 24681 - DNA, 25 bp, Probe Sequence
tctgtgacgaggatagtatcaagga

SEQ ID NO: 24682 - DNA, 25 bp, Probe Sequence
tatctccacacgagttaccaatgac

SEQ ID NO: 24683 - DNA, 25 bp, Probe Sequence
gtatctccacacgagttaccaatga

SEQ ID NO: 24684 - DNA, 25 bp, Probe Sequence
ggatgtttgagtgtgaagaaatacc

SEQ ID NO: 24685 - DNA, 25 bp, Probe Sequence
gatgtttgagtgtgaagaaataccg

SEQ ID NO: 24686 - DNA, 25 bp, Probe Sequence
tggatgtttgagtgtgaagaaatac

SEQ ID NO: 24687 - DNA, 25 bp, Probe Sequence
gtctgtgacgaggatagtatcaagg

SEQ ID NO: 24688 - DNA, 25 bp, Probe Sequence
ggtctgtgacgaggatagtatcaag

SEQ ID NO: 24689 - DNA, 25 bp, Probe Sequence
ctggatgtttgagtgtgaagaaata

SEQ ID NO: 24690 - DNA, 25 bp, Probe Sequence
ttctacaggctgttcaatgacattc

SEQ ID NO: 24691 - DNA, 25 bp, Probe Sequence
cttctacaggctgttcaatgacatt

SEQ ID NO: 24692 - DNA, 25 bp, Probe Sequence
tcttgaggagcattaaggtatttcg

SEQ ID NO: 24693 - DNA, 25 bp, Probe Sequence
gtatggctgtaactatctctgtgaa

SEQ ID NO: 24694 - DNA, 25 bp, Probe Sequence
tatggctgtaactatctctgtgaag

SEQ ID NO: 24695 - DNA, 25 bp, Probe Sequence
tgaagatatgactgattctgactgt

SEQ ID NO: 24696 - DNA, 25 bp, Probe Sequence
ggtatggctgtaactatctctgtga

SEQ ID NO: 24697 - DNA, 25 bp, Probe Sequence
aggtatggctgtaactatctctgtg

SEQ ID NO: 24698 - DNA, 25 bp, Probe Sequence
ctgtaactatctctgtgaagtgtga

SEQ ID NO: 24699 - DNA, 25 bp, Probe Sequence
ctgattctgactgtagagataatgc

SEQ ID NO: 24700 - DNA, 25 bp, Probe Sequence
cctagaggtatggctgtaactatct

SEQ ID NO: 24701 - DNA, 25 bp, Probe Sequence
tgtaactatctctgtgaagtgtgag

SEQ ID NO: 24702 - DNA, 25 bp, Probe Sequence
caagttctcttcattgaccaaggaa

SEQ ID NO: 24703 - DNA, 25 bp, Probe Sequence
tgactgattctgactgtagagataa

SEQ ID NO: 24704 - DNA, 25 bp, Probe Sequence
gctgtaactatctctgtgaagtgtg

SEQ ID NO: 24705 - DNA, 25 bp, Probe Sequence
atggctgtaactatctctgtgaagt

SEQ ID NO: 24706 - DNA, 25 bp, Probe Sequence
ttgaagatatgactgattctgactg

SEQ ID NO: 24707 - DNA, 25 bp, Probe Sequence
gaggtatggctgtaactatctctgt

SEQ ID NO: 24708 - DNA, 25 bp, Probe Sequence
atgactgattctgactgtagagata

SEQ ID NO: 24709 - DNA, 25 bp, Probe Sequence
tatgactgattctgactgtagagat

SEQ ID NO: 24710 - DNA, 25 bp, Probe Sequence
atatgactgattctgactgtagaga

SEQ ID NO: 24711 - DNA, 25 bp, Probe Sequence
agatatgactgattctgactgtaga

SEQ ID NO: 24712 - DNA, 25 bp, Probe Sequence
ctagaggtatggctgtaactatctc

SEQ ID NO: 24713 - DNA, 25 bp, Probe Sequence
gatatgactgattctgactgtagag

SEQ ID NO: 24714 - DNA, 25 bp, Probe Sequence
gaccaagttctcttcattgaccaag

SEQ ID NO: 24715 - DNA, 25 bp, Probe Sequence
ggctgtaactatctctgtgaagtgt

SEQ ID NO: 24716 - DNA, 25 bp, Probe Sequence
tggctgtaactatctctgtgaagtg

SEQ ID NO: 24717 - DNA, 25 bp, Probe Sequence
acttaatcagaatagcaggtcagag

SEQ ID NO: 24718 - DNA, 25 bp, Probe Sequence
cttaatcagaatagcaggtcagagg

SEQ ID NO: 24719 - DNA, 25 bp, Probe Sequence
aacttaatcagaatagcaggtcaga

SEQ ID NO: 24720 - DNA, 25 bp, Probe Sequence
aattactcaggagcagcagaatatc

SEQ ID NO: 24721 - DNA, 25 bp, Probe Sequence
gaattactcaggagcagcagaatat

SEQ ID NO: 24722 - DNA, 25 bp, Probe Sequence
agttattcaacaggagtcttacaca

SEQ ID NO: 24723 - DNA, 25 bp, Probe Sequence
gttattcaacaggagtcttacacat

SEQ ID NO: 24724 - DNA, 25 bp, Probe Sequence
attactcaggagcagcagaatatct

SEQ ID NO: 24725 - DNA, 25 bp, Probe Sequence
aagttattcaacaggagtcttacac

SEQ ID NO: 24726 - DNA, 25 bp, Probe Sequence
caactcaagattctggcttctactg

SEQ ID NO: 24727 - DNA, 25 bp, Probe Sequence
ttactcaggagcagcagaatatctt

SEQ ID NO: 24728 - DNA, 25 bp, Probe Sequence
aatcagtgcttgtgaatgacttctt

SEQ ID NO: 24729 - DNA, 25 bp, Probe Sequence
gaatgtgaatcagtgcttgtgaatg

SEQ ID NO: 24730 - DNA, 25 bp, Probe Sequence
catccaccagtgtatcagcattaac

SEQ ID NO: 24731 - DNA, 25 bp, Probe Sequence
ggaccttcttagtgataccaacatg

SEQ ID NO: 24732 - DNA, 25 bp, Probe Sequence
actcaagattctggcttctactgaa

SEQ ID NO: 24733 - DNA, 25 bp, Probe Sequence
aactcaagattctggcttctactga

SEQ ID NO: 24734 - DNA, 25 bp, Probe Sequence
aatgtgaatcagtgcttgtgaatga

SEQ ID NO: 24735 - DNA, 25 bp, Probe Sequence
atcagtgcttgtgaatgacttcttc

SEQ ID NO: 24736 - DNA, 25 bp, Probe Sequence
gaatcagtgcttgtgaatgacttct

SEQ ID NO: 24737 - DNA, 25 bp, Probe Sequence
ttaatcagaatagcaggtcagaggc

SEQ ID NO: 24738 - DNA, 25 bp, Probe Sequence
cttgtgaatgacttcttcttggtgg

SEQ ID NO: 24739 - DNA, 25 bp, Probe Sequence
taattctgtgagttctccacttcag

SEQ ID NO: 24740 - DNA, 25 bp, Probe Sequence
agtgcttgtgaatgacttcttcttg

SEQ ID NO: 24741 - DNA, 25 bp, Probe Sequence
gagattgctaatgagatgattgagg

SEQ ID NO: 24742 - DNA, 25 bp, Probe Sequence
gctgaagagattgctaatgagatga

SEQ ID NO: 24743 - DNA, 25 bp, Probe Sequence
agattgctaatgagatgattgaggc

SEQ ID NO: 24744 - DNA, 25 bp, Probe Sequence
aagaaggctgaagagattgctaatg

SEQ ID NO: 24745 - DNA, 25 bp, Probe Sequence
agagattgctaatgagatgattgag

SEQ ID NO: 24746 - DNA, 25 bp, Probe Sequence
ctgaagagattgctaatgagatgat

SEQ ID NO: 24747 - DNA, 25 bp, Probe Sequence
ggctgaagagattgctaatgagatg

SEQ ID NO: 24748 - DNA, 25 bp, Probe Sequence
gaaggctgaagagattgctaatgag

SEQ ID NO: 24749 - DNA, 25 bp, Probe Sequence
aggctgaagagattgctaatgagat

SEQ ID NO: 24750 - DNA, 25 bp, Probe Sequence
aaggctgaagagattgctaatgaga

SEQ ID NO: 24751 - DNA, 25 bp, Probe Sequence
agaaggctgaagagattgctaatga

SEQ ID NO: 24752 - DNA, 25 bp, Probe Sequence
caagaaggctgaagagattgctaat

SEQ ID NO: 24753 - DNA, 25 bp, Probe Sequence
gttagagaagacgaagcagttcatc

SEQ ID NO: 24754 - DNA, 25 bp, Probe Sequence
aagagattgctaatgagatgattga

SEQ ID NO: 24755 - DNA, 25 bp, Probe Sequence
tgaagagattgctaatgagatgatt

SEQ ID NO: 24756 - DNA, 25 bp, Probe Sequence
gaagagattgctaatgagatgattg

SEQ ID NO: 24757 - DNA, 25 bp, Probe Sequence
tgttagagaagacgaagcagttcat

SEQ ID NO: 24758 - DNA, 25 bp, Probe Sequence
atcaagaaggctgaagagattgcta

SEQ ID NO: 24759 - DNA, 25 bp, Probe Sequence
tcaagaaggctgaagagattgctaa

SEQ ID NO: 24760 - DNA, 25 bp, Probe Sequence
gagtgttagagaagacgaagcagtt

SEQ ID NO: 24761 - DNA, 25 bp, Probe Sequence
agtgttagagaagacgaagcagttc

SEQ ID NO: 24762 - DNA, 25 bp, Probe Sequence
cagatcaagaaggctgaagagattg

SEQ ID NO: 24763 - DNA, 25 bp, Probe Sequence
gaacatttgaatcttgggaccttta

SEQ ID NO: 24764 - DNA, 25 bp, Probe Sequence
gtgttagagaagacgaagcagttca

SEQ ID NO: 24765 - DNA, 25 bp, Probe Sequence
tggattgtagaacttgttgctgatt

SEQ ID NO: 24766 - DNA, 25 bp, Probe Sequence
atatcagcactggattgtagaactt

SEQ ID NO: 24767 - DNA, 25 bp, Probe Sequence
tatcagcactggattgtagaacttg

SEQ ID NO: 24768 - DNA, 25 bp, Probe Sequence
ctggattgtagaacttgttgctgat

SEQ ID NO: 24769 - DNA, 25 bp, Probe Sequence
actggattgtagaacttgttgctga

SEQ ID NO: 24770 - DNA, 25 bp, Probe Sequence
cactggattgtagaacttgttgctg

SEQ ID NO: 24771 - DNA, 25 bp, Probe Sequence
atcagcactggattgtagaacttgt

SEQ ID NO: 24772 - DNA, 25 bp, Probe Sequence
cagcactggattgtagaacttgttg

SEQ ID NO: 24773 - DNA, 25 bp, Probe Sequence
tcagcactggattgtagaacttgtt

SEQ ID NO: 24774 - DNA, 25 bp, Probe Sequence
ggattgtagaacttgttgctgattt

SEQ ID NO: 24775 - DNA, 25 bp, Probe Sequence
gatatcagcactggattgtagaact

SEQ ID NO: 24776 - DNA, 25 bp, Probe Sequence
agatgtggattagcaagcaggagta

SEQ ID NO: 24777 - DNA, 25 bp, Probe Sequence
cgattctttgaagagatgacaacaa

SEQ ID NO: 24778 - DNA, 25 bp, Probe Sequence
atctttgagttcaacctttagtacg

SEQ ID NO: 24779 - DNA, 25 bp, Probe Sequence
gatgtggattagcaagcaggagtac

SEQ ID NO: 24780 - DNA, 25 bp, Probe Sequence
agtttcctttcttagctgatgtctt

SEQ ID NO: 24781 - DNA, 25 bp, Probe Sequence
tttcctttcttagctgatgtctttg

SEQ ID NO: 24782 - DNA, 25 bp, Probe Sequence
gtttcctttcttagctgatgtcttt

SEQ ID NO: 24783 - DNA, 25 bp, Probe Sequence
ttcctttcttagctgatgtctttgg

SEQ ID NO: 24784 - DNA, 25 bp, Probe Sequence
cagcaccatgaagatcaagatcatc

SEQ ID NO: 24785 - DNA, 25 bp, Probe Sequence
tcgattctttgaagagatgacaaca

SEQ ID NO: 24786 - DNA, 25 bp, Probe Sequence
ctactgttatgtgagaacattaggc

SEQ ID NO: 24787 - DNA, 25 bp, Probe Sequence
tttgtacgcaattctcgattctttg

SEQ ID NO: 24788 - DNA, 25 bp, Probe Sequence
gtcacttcgtggctaaggtaagaac

SEQ ID NO: 24789 - DNA, 25 bp, Probe Sequence
ctactctcatctgtgtgtatgtgtg

SEQ ID NO: 24790 - DNA, 25 bp, Probe Sequence
tactctcatctgtgtgtatgtgtgt

SEQ ID NO: 24791 - DNA, 25 bp, Probe Sequence
gtgtgctactctcatctgtgtgtat

SEQ ID NO: 24792 - DNA, 25 bp, Probe Sequence
gctactctcatctgtgtgtatgtgt

SEQ ID NO: 24793 - DNA, 25 bp, Probe Sequence
tgctactctcatctgtgtgtatgtg

SEQ ID NO: 24794 - DNA, 25 bp, Probe Sequence
gtgctactctcatctgtgtgtatgt

SEQ ID NO: 24795 - DNA, 25 bp, Probe Sequence
tgtgctactctcatctgtgtgtatg

SEQ ID NO: 24796 - DNA, 25 bp, Probe Sequence
ctctcatctgtgtgtatgtgtgttg

SEQ ID NO: 24797 - DNA, 25 bp, Probe Sequence
actctcatctgtgtgtatgtgtgtt

SEQ ID NO: 24798 - DNA, 25 bp, Probe Sequence
ctcatctgtgtgtatgtgtgttgtg

SEQ ID NO: 24799 - DNA, 25 bp, Probe Sequence
tctcatctgtgtgtatgtgtgttgt

SEQ ID NO: 24800 - DNA, 25 bp, Probe Sequence
tgtgtgctactctcatctgtgtgta

SEQ ID NO: 24801 - DNA, 25 bp, Probe Sequence
catctgtgtgtatgtgtgttgtgtg

SEQ ID NO: 24802 - DNA, 25 bp, Probe Sequence
tcatctgtgtgtatgtgtgttgtgt

SEQ ID NO: 24803 - DNA, 25 bp, Probe Sequence
atctgtgtgtatgtgtgttgtgtgt

SEQ ID NO: 24804 - DNA, 25 bp, Probe Sequence
gaatgataggacaggcaaagagaag

SEQ ID NO: 24805 - DNA, 25 bp, Probe Sequence
tggttatgtttatctaatgttgggt

SEQ ID NO: 24806 - DNA, 25 bp, Probe Sequence
tctgtgtgtatgtgtgttgtgtgtg

SEQ ID NO: 24807 - DNA, 25 bp, Probe Sequence
ggaatgataggacaggcaaagagaa

SEQ ID NO: 24808 - DNA, 25 bp, Probe Sequence
gttatgtttatctaatgttgggtcc

SEQ ID NO: 24809 - DNA, 25 bp, Probe Sequence
ggttatgtttatctaatgttgggtc

SEQ ID NO: 24810 - DNA, 25 bp, Probe Sequence
ttatctaatgttgggtccaagaagg

SEQ ID NO: 24811 - DNA, 25 bp, Probe Sequence
tgtttatctaatgttgggtccaaga

SEQ ID NO: 24812 - DNA, 25 bp, Probe Sequence
ttatgtttatctaatgttgggtcca

SEQ ID NO: 24813 - DNA, 25 bp, Probe Sequence
caccaactatgatgagtatgccatt

SEQ ID NO: 24814 - DNA, 25 bp, Probe Sequence
gtccacaccaactatgatgagtatg

SEQ ID NO: 24815 - DNA, 25 bp, Probe Sequence
acttcaatatctctcggatctatgg

SEQ ID NO: 24816 - DNA, 25 bp, Probe Sequence
acaccaactatgatgagtatgccat

SEQ ID NO: 24817 - DNA, 25 bp, Probe Sequence
aacttcaatatctctcggatctatg

SEQ ID NO: 24818 - DNA, 25 bp, Probe Sequence
tccacaccaactatgatgagtatgc

SEQ ID NO: 24819 - DNA, 25 bp, Probe Sequence
taactgaagtcaccaagaaagaaga

SEQ ID NO: 24820 - DNA, 25 bp, Probe Sequence
gtaactgaagtcaccaagaaagaag

SEQ ID NO: 24821 - DNA, 25 bp, Probe Sequence
actgaagtcaccaagaaagaagatt

SEQ ID NO: 24822 - DNA, 25 bp, Probe Sequence
aactgaagtcaccaagaaagaagat

SEQ ID NO: 24823 - DNA, 25 bp, Probe Sequence
ctgaagtcaccaagaaagaagattc

SEQ ID NO: 24824 - DNA, 25 bp, Probe Sequence
cacaccaactatgatgagtatgcca

SEQ ID NO: 24825 - DNA, 25 bp, Probe Sequence
gaagtcaccaagaaagaagattcct

SEQ ID NO: 24826 - DNA, 25 bp, Probe Sequence
aagtcaccaagaaagaagattcctg

SEQ ID NO: 24827 - DNA, 25 bp, Probe Sequence
atgggaagtttctctatcacaaatc

SEQ ID NO: 24828 - DNA, 25 bp, Probe Sequence
gatgggaagtttctctatcacaaat

SEQ ID NO: 24829 - DNA, 25 bp, Probe Sequence
tgaagtcaccaagaaagaagattcc

SEQ ID NO: 24830 - DNA, 25 bp, Probe Sequence
ggtccacaccaactatgatgagtat

SEQ ID NO: 24831 - DNA, 25 bp, Probe Sequence
accaactatgatgagtatgccattt

SEQ ID NO: 24832 - DNA, 25 bp, Probe Sequence
aatatctctcggatctatgggaagt

SEQ ID NO: 24833 - DNA, 25 bp, Probe Sequence
caatatctctcggatctatgggaag

SEQ ID NO: 24834 - DNA, 25 bp, Probe Sequence
tcaatatctctcggatctatgggaa

SEQ ID NO: 24835 - DNA, 25 bp, Probe Sequence
ttcaatatctctcggatctatggga

SEQ ID NO: 24836 - DNA, 25 bp, Probe Sequence
cttcaatatctctcggatctatggg

SEQ ID NO: 24837 - DNA, 25 bp, Probe Sequence
agaccagagttgtagattgagattg

SEQ ID NO: 24838 - DNA, 25 bp, Probe Sequence
gagaccagagttgtagattgagatt

SEQ ID NO: 24839 - DNA, 25 bp, Probe Sequence
acttcatctgttcctcttaactacg

SEQ ID NO: 24840 - DNA, 25 bp, Probe Sequence
cgacttcatctgttcctcttaacta

SEQ ID NO: 24841 - DNA, 25 bp, Probe Sequence
ggagaccagagttgtagattgagat

SEQ ID NO: 24842 - DNA, 25 bp, Probe Sequence
cttcatctgttcctcttaactacgg

SEQ ID NO: 24843 - DNA, 25 bp, Probe Sequence
ttccgacttcatctgttcctcttaa

SEQ ID NO: 24844 - DNA, 25 bp, Probe Sequence
ttcatctgttcctcttaactacggt

SEQ ID NO: 24845 - DNA, 25 bp, Probe Sequence
gacttcatctgttcctcttaactac

SEQ ID NO: 24846 - DNA, 25 bp, Probe Sequence
atctgttcctcttaactacggtgtt

SEQ ID NO: 24847 - DNA, 25 bp, Probe Sequence
gttccgacttcatctgttcctctta

SEQ ID NO: 24848 - DNA, 25 bp, Probe Sequence
tcatctgttcctcttaactacggtg

SEQ ID NO: 24849 - DNA, 25 bp, Probe Sequence
catctgttcctcttaactacggtgt

SEQ ID NO: 24850 - DNA, 25 bp, Probe Sequence
ccgacttcatctgttcctcttaact

SEQ ID NO: 24851 - DNA, 25 bp, Probe Sequence
tccgacttcatctgttcctcttaac

SEQ ID NO: 24852 - DNA, 25 bp, Probe Sequence
tgtaatgagcacagcacctaatatt

SEQ ID NO: 24853 - DNA, 25 bp, Probe Sequence
cagcttggatcattcaccttaactt

SEQ ID NO: 24854 - DNA, 25 bp, Probe Sequence
gaccagagttgtagattgagattgg

SEQ ID NO: 24855 - DNA, 25 bp, Probe Sequence
gagttgtagattgagattgggtgta

SEQ ID NO: 24856 - DNA, 25 bp, Probe Sequence
ctttcactggtgttggacttaaatc

SEQ ID NO: 24857 - DNA, 25 bp, Probe Sequence
cagagttgtagattgagattgggtg

SEQ ID NO: 24858 - DNA, 25 bp, Probe Sequence
ataatttctcctttcactggtgttg

SEQ ID NO: 24859 - DNA, 25 bp, Probe Sequence
cataatttctcctttcactggtgtt

SEQ ID NO: 24860 - DNA, 25 bp, Probe Sequence
tttcactggtgttggacttaaatca

SEQ ID NO: 24861 - DNA, 25 bp, Probe Sequence
gaagacaccactgttactgatgttg

SEQ ID NO: 24862 - DNA, 25 bp, Probe Sequence
tgaagacaccactgttactgatgtt

SEQ ID NO: 24863 - DNA, 25 bp, Probe Sequence
gtgaagacaccactgttactgatgt

SEQ ID NO: 24864 - DNA, 25 bp, Probe Sequence
ggaatgtgggctatgtagtcataat

SEQ ID NO: 24865 - DNA, 25 bp, Probe Sequence
aggaatgtgggctatgtagtcataa

SEQ ID NO: 24866 - DNA, 25 bp, Probe Sequence
cattatcagaggtggaggtggagtc

SEQ ID NO: 24867 - DNA, 25 bp, Probe Sequence
gaggaatgtgggctatgtagtcata

SEQ ID NO: 24868 - DNA, 25 bp, Probe Sequence
aagacaccactgttactgatgttgg

SEQ ID NO: 24869 - DNA, 25 bp, Probe Sequence
atcagatacatccctcaggtgaaga

SEQ ID NO: 24870 - DNA, 25 bp, Probe Sequence
catcagatacatccctcaggtgaag

SEQ ID NO: 24871 - DNA, 25 bp, Probe Sequence
tactactagtgaactatcgtggctc

SEQ ID NO: 24872 - DNA, 25 bp, Probe Sequence
gtactactagtgaactatcgtggct

SEQ ID NO: 24873 - DNA, 25 bp, Probe Sequence
agaggaatgtgggctatgtagtcat

SEQ ID NO: 24874 - DNA, 25 bp, Probe Sequence
gaatgtgggctatgtagtcataata

SEQ ID NO: 24875 - DNA, 25 bp, Probe Sequence
ttgcggtactactagtgaactatcg

SEQ ID NO: 24876 - DNA, 25 bp, Probe Sequence
attatcagaggtggaggtggagtca

SEQ ID NO: 24877 - DNA, 25 bp, Probe Sequence
cggtactactagtgaactatcgtgg

SEQ ID NO: 24878 - DNA, 25 bp, Probe Sequence
tgtgggctatgtagtcataataaat

SEQ ID NO: 24879 - DNA, 25 bp, Probe Sequence
atgtgggctatgtagtcataataaa

SEQ ID NO: 24880 - DNA, 25 bp, Probe Sequence
aatgtgggctatgtagtcataataa

SEQ ID NO: 24881 - DNA, 25 bp, Probe Sequence
ggtactactagtgaactatcgtggc

SEQ ID NO: 24882 - DNA, 25 bp, Probe Sequence
tcagatacatccctcaggtgaagac

SEQ ID NO: 24883 - DNA, 25 bp, Probe Sequence
cagatacatccctcaggtgaagaca

SEQ ID NO: 24884 - DNA, 25 bp, Probe Sequence
gcggtactactagtgaactatcgtg

SEQ ID NO: 24885 - DNA, 25 bp, Probe Sequence
ctttagccctattcatgtctctacc

SEQ ID NO: 24886 - DNA, 25 bp, Probe Sequence
cctttagccctattcatgtctctac

SEQ ID NO: 24887 - DNA, 25 bp, Probe Sequence
ccctttagccctattcatgtctcta

SEQ ID NO: 24888 - DNA, 25 bp, Probe Sequence
tttagccctattcatgtctctaccc

SEQ ID NO: 24889 - DNA, 25 bp, Probe Sequence
ttagccctattcatgtctctaccca

SEQ ID NO: 24890 - DNA, 25 bp, Probe Sequence
gccctattcatgtctctacccacta

SEQ ID NO: 24891 - DNA, 25 bp, Probe Sequence
tagccctattcatgtctctacccac

SEQ ID NO: 24892 - DNA, 25 bp, Probe Sequence
tttcctcccctttagccctattcat

SEQ ID NO: 24893 - DNA, 25 bp, Probe Sequence
ttttcctcccctttagccctattca

SEQ ID NO: 24894 - DNA, 25 bp, Probe Sequence
agccctattcatgtctctacccact

SEQ ID NO: 24895 - DNA, 25 bp, Probe Sequence
cccctttagccctattcatgtctct

SEQ ID NO: 24896 - DNA, 25 bp, Probe Sequence
tcccctttagccctattcatgtctc

SEQ ID NO: 24897 - DNA, 25 bp, Probe Sequence
ctcccctttagccctattcatgtct

SEQ ID NO: 24898 - DNA, 25 bp, Probe Sequence
ttcctcccctttagccctattcatg

SEQ ID NO: 24899 - DNA, 25 bp, Probe Sequence
cctcccctttagccctattcatgtc

SEQ ID NO: 24900 - DNA, 25 bp, Probe Sequence
tcctcccctttagccctattcatgt

SEQ ID NO: 24901 - DNA, 25 bp, Probe Sequence
ttgacgtgaataagtatctcggaag

SEQ ID NO: 24902 - DNA, 25 bp, Probe Sequence
ccataaagacaaaccaatcaaccac

SEQ ID NO: 24903 - DNA, 25 bp, Probe Sequence
gtgaataagtatctcggaagatggt

SEQ ID NO: 24904 - DNA, 25 bp, Probe Sequence
ataaagacaaaccaatcaaccacga

SEQ ID NO: 24905 - DNA, 25 bp, Probe Sequence
cataaagacaaaccaatcaaccacg

SEQ ID NO: 24906 - DNA, 25 bp, Probe Sequence
aataagtatctcggaagatggtacg

SEQ ID NO: 24907 - DNA, 25 bp, Probe Sequence
cgtgaataagtatctcggaagatgg

SEQ ID NO: 24908 - DNA, 25 bp, Probe Sequence
tgacgtgaataagtatctcggaaga

SEQ ID NO: 24909 - DNA, 25 bp, Probe Sequence
aaagtgttaaaccaggagttgagag

SEQ ID NO: 24910 - DNA, 25 bp, Probe Sequence
cccataaagacaaaccaatcaacca

SEQ ID NO: 24911 - DNA, 25 bp, Probe Sequence
aagatcaaagtgttaaaccaggagt

SEQ ID NO: 24912 - DNA, 25 bp, Probe Sequence
ggaaagatcaaagtgttaaaccagg

SEQ ID NO: 24913 - DNA, 25 bp, Probe Sequence
tcctgacttctaataacattgatgt

SEQ ID NO: 24914 - DNA, 25 bp, Probe Sequence
aaagatcaaagtgttaaaccaggag

SEQ ID NO: 24915 - DNA, 25 bp, Probe Sequence
gaaagatcaaagtgttaaaccagga

SEQ ID NO: 24916 - DNA, 25 bp, Probe Sequence
cggaaagatcaaagtgttaaaccag

SEQ ID NO: 24917 - DNA, 25 bp, Probe Sequence
ggaagatggtacgaaattgagaaga

SEQ ID NO: 24918 - DNA, 25 bp, Probe Sequence
ataagtatctcggaagatggtacga

SEQ ID NO: 24919 - DNA, 25 bp, Probe Sequence
caaagtgttaaaccaggagttgaga

SEQ ID NO: 24920 - DNA, 25 bp, Probe Sequence
agatggtacgaaattgagaagatcc

SEQ ID NO: 24921 - DNA, 25 bp, Probe Sequence
tgaataagtatctcggaagatggta

SEQ ID NO: 24922 - DNA, 25 bp, Probe Sequence
taagtatctcggaagatggtacgaa

SEQ ID NO: 24923 - DNA, 25 bp, Probe Sequence
atcctgacttctaataacattgatg

SEQ ID NO: 24924 - DNA, 25 bp, Probe Sequence
aacggaaagatcaaagtgttaaacc

SEQ ID NO: 24925 - DNA, 25 bp, Probe Sequence
ctacgatatgagcctcctgaagaat

SEQ ID NO: 24926 - DNA, 25 bp, Probe Sequence
tacgatatgagcctcctgaagaatc

SEQ ID NO: 24927 - DNA, 25 bp, Probe Sequence
atgcctggagacatatcactcaatt

SEQ ID NO: 24928 - DNA, 25 bp, Probe Sequence
tctacgatatgagcctcctgaagaa

SEQ ID NO: 24929 - DNA, 25 bp, Probe Sequence
gtaaacttggaaccttggaaatgac

SEQ ID NO: 24930 - DNA, 25 bp, Probe Sequence
attgtagtaaacttggaaccttgga

SEQ ID NO: 24931 - DNA, 25 bp, Probe Sequence
tgtagtaaacttggaaccttggaaa

SEQ ID NO: 24932 - DNA, 25 bp, Probe Sequence
ttgtagtaaacttggaaccttggaa

SEQ ID NO: 24933 - DNA, 25 bp, Probe Sequence
ccctattgtagtaaacttggaacct

SEQ ID NO: 24934 - DNA, 25 bp, Probe Sequence
agtaaacttggaaccttggaaatga

SEQ ID NO: 24935 - DNA, 25 bp, Probe Sequence
tagtaaacttggaaccttggaaatg

SEQ ID NO: 24936 - DNA, 25 bp, Probe Sequence
gtagtaaacttggaaccttggaaat

SEQ ID NO: 24937 - DNA, 25 bp, Probe Sequence
taaacttggaaccttggaaatgacc

SEQ ID NO: 24938 - DNA, 25 bp, Probe Sequence
tattgtagtaaacttggaaccttgg

SEQ ID NO: 24939 - DNA, 25 bp, Probe Sequence
gacaaccctcagatttgatgatttc

SEQ ID NO: 24940 - DNA, 25 bp, Probe Sequence
ctctacgatatgagcctcctgaaga

SEQ ID NO: 24941 - DNA, 25 bp, Probe Sequence
aaccctcagatttgatgatttccta

SEQ ID NO: 24942 - DNA, 25 bp, Probe Sequence
agacaaccctcagatttgatgattt

SEQ ID NO: 24943 - DNA, 25 bp, Probe Sequence
cctggagacatatcactcaatttct

SEQ ID NO: 24944 - DNA, 25 bp, Probe Sequence
tgtagaccagagtgtttcttaaatg

SEQ ID NO: 24945 - DNA, 25 bp, Probe Sequence
gtgtagaccagagtgtttcttaaat

SEQ ID NO: 24946 - DNA, 25 bp, Probe Sequence
cctattgtagtaaacttggaacctt

SEQ ID NO: 24947 - DNA, 25 bp, Probe Sequence
caaccctcagatttgatgatttcct

SEQ ID NO: 24948 - DNA, 25 bp, Probe Sequence
cagacaaccctcagatttgatgatt

SEQ ID NO: 24949 - DNA, 25 bp, Probe Sequence
tagttaagaatccaagtcgagaaca

SEQ ID NO: 24950 - DNA, 25 bp, Probe Sequence
actcctatgcaatattactcagctt

SEQ ID NO: 24951 - DNA, 25 bp, Probe Sequence
agttaagaatccaagtcgagaacac

SEQ ID NO: 24952 - DNA, 25 bp, Probe Sequence
ctcttactgctttcaatacacgatt

SEQ ID NO: 24953 - DNA, 25 bp, Probe Sequence
cctcttactgctttcaatacacgat

SEQ ID NO: 24954 - DNA, 25 bp, Probe Sequence
gaacctcttactgctttcaatacac

SEQ ID NO: 24955 - DNA, 25 bp, Probe Sequence
gttaagaatccaagtcgagaacact

SEQ ID NO: 24956 - DNA, 25 bp, Probe Sequence
tactcctatgcaatattactcagct

SEQ ID NO: 24957 - DNA, 25 bp, Probe Sequence
gtactcctatgcaatattactcagc

SEQ ID NO: 24958 - DNA, 25 bp, Probe Sequence
ggaacctcttactgctttcaataca

SEQ ID NO: 24959 - DNA, 25 bp, Probe Sequence
tggtactcctatgcaatattactca

SEQ ID NO: 24960 - DNA, 25 bp, Probe Sequence
aacctcttactgctttcaatacacg

SEQ ID NO: 24961 - DNA, 25 bp, Probe Sequence
aggaacctcttactgctttcaatac

SEQ ID NO: 24962 - DNA, 25 bp, Probe Sequence
gtaggaacctcttactgctttcaat

SEQ ID NO: 24963 - DNA, 25 bp, Probe Sequence
atagttaagaatccaagtcgagaac

SEQ ID NO: 24964 - DNA, 25 bp, Probe Sequence
tctggtactcctatgcaatattact

SEQ ID NO: 24965 - DNA, 25 bp, Probe Sequence
taggaacctcttactgctttcaata

SEQ ID NO: 24966 - DNA, 25 bp, Probe Sequence
ggtactcctatgcaatattactcag

SEQ ID NO: 24967 - DNA, 25 bp, Probe Sequence
ctggtactcctatgcaatattactc

SEQ ID NO: 24968 - DNA, 25 bp, Probe Sequence
tcttactgctttcaatacacgatta

SEQ ID NO: 24969 - DNA, 25 bp, Probe Sequence
cttactgctttcaatacacgattag

SEQ ID NO: 24970 - DNA, 25 bp, Probe Sequence
aatagttaagaatccaagtcgagaa

SEQ ID NO: 24971 - DNA, 25 bp, Probe Sequence
acctcttactgctttcaatacacga

SEQ ID NO: 24972 - DNA, 25 bp, Probe Sequence
actgctttcaatacacgattagtaa

SEQ ID NO: 24973 - DNA, 25 bp, Probe Sequence
aataactcaccttctctatccttgc

SEQ ID NO: 24974 - DNA, 25 bp, Probe Sequence
ataactcaccttctctatccttgct

SEQ ID NO: 24975 - DNA, 25 bp, Probe Sequence
taactcaccttctctatccttgctc

SEQ ID NO: 24976 - DNA, 25 bp, Probe Sequence
cctctggaatgtagactgtatatgt

SEQ ID NO: 24977 - DNA, 25 bp, Probe Sequence
gcagtaagtgatcttggtagtatcc

SEQ ID NO: 24978 - DNA, 25 bp, Probe Sequence
ggcagtaagtgatcttggtagtatc

SEQ ID NO: 24979 - DNA, 25 bp, Probe Sequence
cctcctctggaatgtagactgtata

SEQ ID NO: 24980 - DNA, 25 bp, Probe Sequence
ttgtctgtggtgttatagtggtaac

SEQ ID NO: 24981 - DNA, 25 bp, Probe Sequence
ctctggaatgtagactgtatatgtt

SEQ ID NO: 24982 - DNA, 25 bp, Probe Sequence
gtctgtggtgttatagtggtaactg

SEQ ID NO: 24983 - DNA, 25 bp, Probe Sequence
tcctctggaatgtagactgtatatg

SEQ ID NO: 24984 - DNA, 25 bp, Probe Sequence
tgtctgtggtgttatagtggtaact

SEQ ID NO: 24985 - DNA, 25 bp, Probe Sequence
taataactcaccttctctatccttg

SEQ ID NO: 24986 - DNA, 25 bp, Probe Sequence
ctcctctggaatgtagactgtatat

SEQ ID NO: 24987 - DNA, 25 bp, Probe Sequence
tttgtctgtggtgttatagtggtaa

SEQ ID NO: 24988 - DNA, 25 bp, Probe Sequence
gtttgtctgtggtgttatagtggta

SEQ ID NO: 24989 - DNA, 25 bp, Probe Sequence
aaagtttgtctgtggtgttatagtg

SEQ ID NO: 24990 - DNA, 25 bp, Probe Sequence
tcctttctacattcccattcactta

SEQ ID NO: 24991 - DNA, 25 bp, Probe Sequence
gtcctttctacattcccattcactt

SEQ ID NO: 24992 - DNA, 25 bp, Probe Sequence
aactcaccttctctatccttgctca

SEQ ID NO: 24993 - DNA, 25 bp, Probe Sequence
aagtttgtctgtggtgttatagtgg

SEQ ID NO: 24994 - DNA, 25 bp, Probe Sequence
actcaccttctctatccttgctcaa

SEQ ID NO: 24995 - DNA, 25 bp, Probe Sequence
tcctcctctggaatgtagactgtat

SEQ ID NO: 24996 - DNA, 25 bp, Probe Sequence
tctacattcccattcacttaacagc

SEQ ID NO: 24997 - DNA, 25 bp, Probe Sequence
cttcagtctcttcgtaacagaacat

SEQ ID NO: 24998 - DNA, 25 bp, Probe Sequence
gcttctggtagatgaattgagagat

SEQ ID NO: 24999 - DNA, 25 bp, Probe Sequence
aatgcttctggtagatgaattgaga

SEQ ID NO: 25000 - DNA, 25 bp, Probe Sequence
ttctggtagatgaattgagagatgc

SEQ ID NO: 25001 - DNA, 25 bp, Probe Sequence
atgcttctggtagatgaattgagag

SEQ ID NO: 25002 - DNA, 25 bp, Probe Sequence
tgttggtggtcaagatagaattagg

SEQ ID NO: 25003 - DNA, 25 bp, Probe Sequence
ggatgttggtggtcaagatagaatt

SEQ ID NO: 25004 - DNA, 25 bp, Probe Sequence
cttctggtagatgaattgagagatg

SEQ ID NO: 25005 - DNA, 25 bp, Probe Sequence
tgcttctggtagatgaattgagaga

SEQ ID NO: 25006 - DNA, 25 bp, Probe Sequence
gatagtcaccaccattcctaccatt

SEQ ID NO: 25007 - DNA, 25 bp, Probe Sequence
gttggtggtcaagatagaattaggc

SEQ ID NO: 25008 - DNA, 25 bp, Probe Sequence
atgttggtggtcaagatagaattag

SEQ ID NO: 25009 - DNA, 25 bp, Probe Sequence
gatgttggtggtcaagatagaatta

SEQ ID NO: 25010 - DNA, 25 bp, Probe Sequence
atagtcaccaccattcctaccattg

SEQ ID NO: 25011 - DNA, 25 bp, Probe Sequence
tgctcagtatatgatagttctgctg

SEQ ID NO: 25012 - DNA, 25 bp, Probe Sequence
ttgctcagtatatgatagttctgct

SEQ ID NO: 25013 - DNA, 25 bp, Probe Sequence
tctcttcgtaacagaacatggtatg

SEQ ID NO: 25014 - DNA, 25 bp, Probe Sequence
gtctcttcgtaacagaacatggtat

SEQ ID NO: 25015 - DNA, 25 bp, Probe Sequence
ttcagtctcttcgtaacagaacatg

SEQ ID NO: 25016 - DNA, 25 bp, Probe Sequence
agtctcttcgtaacagaacatggta

SEQ ID NO: 25017 - DNA, 25 bp, Probe Sequence
agatagtcaccaccattcctaccat

SEQ ID NO: 25018 - DNA, 25 bp, Probe Sequence
agtatatgatagttctgctgatgtt

SEQ ID NO: 25019 - DNA, 25 bp, Probe Sequence
aacacaaggaactggtctgtatgaa

SEQ ID NO: 25020 - DNA, 25 bp, Probe Sequence
ttgtatttatttctctcccttgcca

SEQ ID NO: 25021 - DNA, 25 bp, Probe Sequence
ctgtcatctcaagaagtgtatggtt

SEQ ID NO: 25022 - DNA, 25 bp, Probe Sequence
cagaagtcatcttgctaccagtatt

SEQ ID NO: 25023 - DNA, 25 bp, Probe Sequence
tactgtcatctcaagaagtgtatgg

SEQ ID NO: 25024 - DNA, 25 bp, Probe Sequence
tcagaagtcatcttgctaccagtat

SEQ ID NO: 25025 - DNA, 25 bp, Probe Sequence
atcagaagtcatcttgctaccagta

SEQ ID NO: 25026 - DNA, 25 bp, Probe Sequence
agccaactatgattattaacgatgt

SEQ ID NO: 25027 - DNA, 25 bp, Probe Sequence
gccaactatgattattaacgatgtc

SEQ ID NO: 25028 - DNA, 25 bp, Probe Sequence
agaagccaactatgattattaacga

SEQ ID NO: 25029 - DNA, 25 bp, Probe Sequence
aatcagaagtcatcttgctaccagt

SEQ ID NO: 25030 - DNA, 25 bp, Probe Sequence
actgtcatctcaagaagtgtatggt

SEQ ID NO: 25031 - DNA, 25 bp, Probe Sequence
tggattctaatactgtcatctcaag

SEQ ID NO: 25032 - DNA, 25 bp, Probe Sequence
ctatgattattaacgatgtccaacc

SEQ ID NO: 25033 - DNA, 25 bp, Probe Sequence
ccaactatgattattaacgatgtcc

SEQ ID NO: 25034 - DNA, 25 bp, Probe Sequence
ctaatactgtcatctcaagaagtgt

SEQ ID NO: 25035 - DNA, 25 bp, Probe Sequence
aagccaactatgattattaacgatg

SEQ ID NO: 25036 - DNA, 25 bp, Probe Sequence
tagtgccacttaatgtatgttacca

SEQ ID NO: 25037 - DNA, 25 bp, Probe Sequence
agtgccacttaatgtatgttaccaa

SEQ ID NO: 25038 - DNA, 25 bp, Probe Sequence
ggattctaatactgtcatctcaaga

SEQ ID NO: 25039 - DNA, 25 bp, Probe Sequence
tctaatactgtcatctcaagaagtg

SEQ ID NO: 25040 - DNA, 25 bp, Probe Sequence
cataacctgtctcacctggacttaa

SEQ ID NO: 25041 - DNA, 25 bp, Probe Sequence
ttagtgccacttaatgtatgttacc

SEQ ID NO: 25042 - DNA, 25 bp, Probe Sequence
attggattctaatactgtcatctca

SEQ ID NO: 25043 - DNA, 25 bp, Probe Sequence
gaagccaactatgattattaacgat

SEQ ID NO: 25044 - DNA, 25 bp, Probe Sequence
ttggattctaatactgtcatctcaa

SEQ ID NO: 25045 - DNA, 25 bp, Probe Sequence
cctgaccattctgaagaagatgaag

SEQ ID NO: 25046 - DNA, 25 bp, Probe Sequence
tcctgaccattctgaagaagatgaa

SEQ ID NO: 25047 - DNA, 25 bp, Probe Sequence
ctgaccattctgaagaagatgaagc

SEQ ID NO: 25048 - DNA, 25 bp, Probe Sequence
ctcctgaccattctgaagaagatga

SEQ ID NO: 25049 - DNA, 25 bp, Probe Sequence
tgaccattctgaagaagatgaagca

SEQ ID NO: 25050 - DNA, 25 bp, Probe Sequence
gaccattctgaagaagatgaagcag

SEQ ID NO: 25051 - DNA, 25 bp, Probe Sequence
aaccctcctcatctttgctaataag

SEQ ID NO: 25052 - DNA, 25 bp, Probe Sequence
caaccctcctcatctttgctaataa

SEQ ID NO: 25053 - DNA, 25 bp, Probe Sequence
aaagacaaccatcctgaagaagttc

SEQ ID NO: 25054 - DNA, 25 bp, Probe Sequence
gaaagacaaccatcctgaagaagtt

SEQ ID NO: 25055 - DNA, 25 bp, Probe Sequence
gctcctgaccattctgaagaagatg

SEQ ID NO: 25056 - DNA, 25 bp, Probe Sequence
gacaaccatcctgaagaagttcaat

SEQ ID NO: 25057 - DNA, 25 bp, Probe Sequence
acaaccatcctgaagaagttcaatg

SEQ ID NO: 25058 - DNA, 25 bp, Probe Sequence
ctgaagaagatgaagcagaaagagc

SEQ ID NO: 25059 - DNA, 25 bp, Probe Sequence
agacaaccatcctgaagaagttcaa

SEQ ID NO: 25060 - DNA, 25 bp, Probe Sequence
aagacaaccatcctgaagaagttca

SEQ ID NO: 25061 - DNA, 25 bp, Probe Sequence
cagttgtgaaataaaccgctccttg

SEQ ID NO: 25062 - DNA, 25 bp, Probe Sequence
tcagttgtgaaataaaccgctcctt

SEQ ID NO: 25063 - DNA, 25 bp, Probe Sequence
tgaagaagatgaagcagaaagagcg

SEQ ID NO: 25064 - DNA, 25 bp, Probe Sequence
ggctcctgaccattctgaagaagat

SEQ ID NO: 25065 - DNA, 25 bp, Probe Sequence
cactcagttgtgaaataaaccgctc

SEQ ID NO: 25066 - DNA, 25 bp, Probe Sequence
ctcagttgtgaaataaaccgctcct

SEQ ID NO: 25067 - DNA, 25 bp, Probe Sequence
ggaaagacaaccatcctgaagaagt

SEQ ID NO: 25068 - DNA, 25 bp, Probe Sequence
tggaaagacaaccatcctgaagaag

SEQ ID NO: 25069 - DNA, 25 bp, Probe Sequence
taatgatagtggcatctgtatgagc

SEQ ID NO: 25070 - DNA, 25 bp, Probe Sequence
ataatgatagtggcatctgtatgag

SEQ ID NO: 25071 - DNA, 25 bp, Probe Sequence
gataatgatagtggcatctgtatga

SEQ ID NO: 25072 - DNA, 25 bp, Probe Sequence
atatcactgaaggagataggaagcc

SEQ ID NO: 25073 - DNA, 25 bp, Probe Sequence
ttctcagaacagctaacctctaatg

SEQ ID NO: 25074 - DNA, 25 bp, Probe Sequence
aattctcagaacagctaacctctaa

SEQ ID NO: 25075 - DNA, 25 bp, Probe Sequence
ccttcaccttcttacaacctcttcc

SEQ ID NO: 25076 - DNA, 25 bp, Probe Sequence
attctcagaacagctaacctctaat

SEQ ID NO: 25077 - DNA, 25 bp, Probe Sequence
gtaaagggtgagaaactggataaga

SEQ ID NO: 25078 - DNA, 25 bp, Probe Sequence
gaaggagataggaagccagactaca

SEQ ID NO: 25079 - DNA, 25 bp, Probe Sequence
tgaaggagataggaagccagactac

SEQ ID NO: 25080 - DNA, 25 bp, Probe Sequence
tgaaagatttgatagaagaggtccg

SEQ ID NO: 25081 - DNA, 25 bp, Probe Sequence
aaagggtgagaaactggataagaag

SEQ ID NO: 25082 - DNA, 25 bp, Probe Sequence
aattaagcacattcctcgattccag

SEQ ID NO: 25083 - DNA, 25 bp, Probe Sequence
taaagggtgagaaactggataagaa

SEQ ID NO: 25084 - DNA, 25 bp, Probe Sequence
tatcactgaaggagataggaagcca

SEQ ID NO: 25085 - DNA, 25 bp, Probe Sequence
ggtctcttagatgattacctggagg

SEQ ID NO: 25086 - DNA, 25 bp, Probe Sequence
ccttcagataatgatagtggcatct

SEQ ID NO: 25087 - DNA, 25 bp, Probe Sequence
ctgaaagatttgatagaagaggtcc

SEQ ID NO: 25088 - DNA, 25 bp, Probe Sequence
aaggagataggaagccagactacac

SEQ ID NO: 25089 - DNA, 25 bp, Probe Sequence
tctcagaacagctaacctctaatgg

SEQ ID NO: 25090 - DNA, 25 bp, Probe Sequence
agtaaagggtgagaaactggataag

SEQ ID NO: 25091 - DNA, 25 bp, Probe Sequence
gaaagatttgatagaagaggtccgc

SEQ ID NO: 25092 - DNA, 25 bp, Probe Sequence
aagtaaagggtgagaaactggataa

SEQ ID NO: 25093 - DNA, 25 bp, Probe Sequence
tatgattccgtaactgaccttgtag

SEQ ID NO: 25094 - DNA, 25 bp, Probe Sequence
attatgattccgtaactgaccttgt

SEQ ID NO: 25095 - DNA, 25 bp, Probe Sequence
ttatgattccgtaactgaccttgta

SEQ ID NO: 25096 - DNA, 25 bp, Probe Sequence
aattatgattccgtaactgaccttg

SEQ ID NO: 25097 - DNA, 25 bp, Probe Sequence
cctaagtattgctgccttgtgtatt

SEQ ID NO: 25098 - DNA, 25 bp, Probe Sequence
attccgtaactgaccttgtagtaag

SEQ ID NO: 25099 - DNA, 25 bp, Probe Sequence
gattccgtaactgaccttgtagtaa

SEQ ID NO: 25100 - DNA, 25 bp, Probe Sequence
tgattccgtaactgaccttgtagta

SEQ ID NO: 25101 - DNA, 25 bp, Probe Sequence
atgattccgtaactgaccttgtagt

SEQ ID NO: 25102 - DNA, 25 bp, Probe Sequence
ggacctacacttaatctatatgctt

SEQ ID NO: 25103 - DNA, 25 bp, Probe Sequence
ttccgtaactgaccttgtagtaagc

SEQ ID NO: 25104 - DNA, 25 bp, Probe Sequence
tgggacctacacttaatctatatgc

SEQ ID NO: 25105 - DNA, 25 bp, Probe Sequence
gggacctacacttaatctatatgct

SEQ ID NO: 25106 - DNA, 25 bp, Probe Sequence
ctaagtattgctgccttgtgtattt

SEQ ID NO: 25107 - DNA, 25 bp, Probe Sequence
cgtatgggacctacacttaatctat

SEQ ID NO: 25108 - DNA, 25 bp, Probe Sequence
ttctactttatgtgagcaaggtttg

SEQ ID NO: 25109 - DNA, 25 bp, Probe Sequence
tttctactttatgtgagcaaggttt

SEQ ID NO: 25110 - DNA, 25 bp, Probe Sequence
aaattatgattccgtaactgacctt

SEQ ID NO: 25111 - DNA, 25 bp, Probe Sequence
ggtttgctgtccaaggtgtaaatat

SEQ ID NO: 25112 - DNA, 25 bp, Probe Sequence
tgaccttgtagtaagcagtgtttct

SEQ ID NO: 25113 - DNA, 25 bp, Probe Sequence
tctttcccactagccatttaataag

SEQ ID NO: 25114 - DNA, 25 bp, Probe Sequence
ctagtcttgaacaaactgtcatacg

SEQ ID NO: 25115 - DNA, 25 bp, Probe Sequence
acaaatctttcccactagccattta

SEQ ID NO: 25116 - DNA, 25 bp, Probe Sequence
caaatctttcccactagccatttaa

SEQ ID NO: 25117 - DNA, 25 bp, Probe Sequence
ttagaagaacagaagaacctcacag

SEQ ID NO: 25118 - DNA, 25 bp, Probe Sequence
tagaagaacagaagaacctcacagt

SEQ ID NO: 25119 - DNA, 25 bp, Probe Sequence
gtatgtggagaagttctgtatgtga

SEQ ID NO: 25120 - DNA, 25 bp, Probe Sequence
tatgtggagaagttctgtatgtgag

SEQ ID NO: 25121 - DNA, 25 bp, Probe Sequence
cttccagatcatagtgttcagtgtc

SEQ ID NO: 25122 - DNA, 25 bp, Probe Sequence
ggtatgtggagaagttctgtatgtg

SEQ ID NO: 25123 - DNA, 25 bp, Probe Sequence
gtggtatgtggagaagttctgtatg

SEQ ID NO: 25124 - DNA, 25 bp, Probe Sequence
agaagttctgtatgtgaggaaggaa

SEQ ID NO: 25125 - DNA, 25 bp, Probe Sequence
tggtatgtggagaagttctgtatgt

SEQ ID NO: 25126 - DNA, 25 bp, Probe Sequence
tgtggtatgtggagaagttctgtat

SEQ ID NO: 25127 - DNA, 25 bp, Probe Sequence
atgtggtatgtggagaagttctgta

SEQ ID NO: 25128 - DNA, 25 bp, Probe Sequence
agaagaacagaagaacctcacagtc

SEQ ID NO: 25129 - DNA, 25 bp, Probe Sequence
gagaagttctgtatgtgaggaagga

SEQ ID NO: 25130 - DNA, 25 bp, Probe Sequence
gaagaacagaagaacctcacagtct

SEQ ID NO: 25131 - DNA, 25 bp, Probe Sequence
cagatcatagtgttcagtgtcctct

SEQ ID NO: 25132 - DNA, 25 bp, Probe Sequence
tggagaagttctgtatgtgaggaag

SEQ ID NO: 25133 - DNA, 25 bp, Probe Sequence
ttccagatcatagtgttcagtgtcc

SEQ ID NO: 25134 - DNA, 25 bp, Probe Sequence
gtggagaagttctgtatgtgaggaa

SEQ ID NO: 25135 - DNA, 25 bp, Probe Sequence
aatgtggtatgtggagaagttctgt

SEQ ID NO: 25136 - DNA, 25 bp, Probe Sequence
agtaggtctgatccaacttcgtatg

SEQ ID NO: 25137 - DNA, 25 bp, Probe Sequence
tagaattatgagaccaccttggaga

SEQ ID NO: 25138 - DNA, 25 bp, Probe Sequence
atgtggagaagttctgtatgtgagg

SEQ ID NO: 25139 - DNA, 25 bp, Probe Sequence
ctagaattatgagaccaccttggag

SEQ ID NO: 25140 - DNA, 25 bp, Probe Sequence
gtaaatgttgtgttgtctgtcttca

SEQ ID NO: 25141 - DNA, 25 bp, Probe Sequence
cctgttgatgctagttcagagtatc

SEQ ID NO: 25142 - DNA, 25 bp, Probe Sequence
acctgttgatgctagttcagagtat

SEQ ID NO: 25143 - DNA, 25 bp, Probe Sequence
gacctgttgatgctagttcagagta

SEQ ID NO: 25144 - DNA, 25 bp, Probe Sequence
tacagcagtggcatttaataaggaa

SEQ ID NO: 25145 - DNA, 25 bp, Probe Sequence
ttacagcagtggcatttaataagga

SEQ ID NO: 25146 - DNA, 25 bp, Probe Sequence
gttacagcagtggcatttaataagg

SEQ ID NO: 25147 - DNA, 25 bp, Probe Sequence
tgttacagcagtggcatttaataag

SEQ ID NO: 25148 - DNA, 25 bp, Probe Sequence
gtgttacagcagtggcatttaataa

SEQ ID NO: 25149 - DNA, 25 bp, Probe Sequence
atacaaatctaagcgacagacatct

SEQ ID NO: 25150 - DNA, 25 bp, Probe Sequence
agaatacaaatctaagcgacagaca

SEQ ID NO: 25151 - DNA, 25 bp, Probe Sequence
gagaatacaaatctaagcgacagac

SEQ ID NO: 25152 - DNA, 25 bp, Probe Sequence
agagaatacaaatctaagcgacaga

SEQ ID NO: 25153 - DNA, 25 bp, Probe Sequence
ctggtaatttgtcacggattagttg

SEQ ID NO: 25154 - DNA, 25 bp, Probe Sequence
tctggtaatttgtcacggattagtt

SEQ ID NO: 25155 - DNA, 25 bp, Probe Sequence
atctggtaatttgtcacggattagt

SEQ ID NO: 25156 - DNA, 25 bp, Probe Sequence
aatacaaatctaagcgacagacatc

SEQ ID NO: 25157 - DNA, 25 bp, Probe Sequence
gaatacaaatctaagcgacagacat

SEQ ID NO: 25158 - DNA, 25 bp, Probe Sequence
tggtaatttgtcacggattagttgt

SEQ ID NO: 25159 - DNA, 25 bp, Probe Sequence
cagtggcatttaataaggaacttga

SEQ ID NO: 25160 - DNA, 25 bp, Probe Sequence
ctcttcaggttctcctctgtcattc

SEQ ID NO: 25161 - DNA, 25 bp, Probe Sequence
ggtaatttgtcacggattagttgta

SEQ ID NO: 25162 - DNA, 25 bp, Probe Sequence
gcagtggcatttaataaggaacttg

SEQ ID NO: 25163 - DNA, 25 bp, Probe Sequence
agcagtggcatttaataaggaactt

SEQ ID NO: 25164 - DNA, 25 bp, Probe Sequence
ggtgttacagcagtggcatttaata

SEQ ID NO: 25165 - DNA, 25 bp, Probe Sequence
aagaaggtcaagatgtactgctatt

SEQ ID NO: 25166 - DNA, 25 bp, Probe Sequence
caagaaggtcaagatgtactgctat

SEQ ID NO: 25167 - DNA, 25 bp, Probe Sequence
tgaatgtcattggagaacctattga

SEQ ID NO: 25168 - DNA, 25 bp, Probe Sequence
aatgtcattggagaacctattgatg

SEQ ID NO: 25169 - DNA, 25 bp, Probe Sequence
atcatggagttaatcaacaatgtcg

SEQ ID NO: 25170 - DNA, 25 bp, Probe Sequence
gaatgtcattggagaacctattgat

SEQ ID NO: 25171 - DNA, 25 bp, Probe Sequence
ctatctatgtgcctgctgatgactt

SEQ ID NO: 25172 - DNA, 25 bp, Probe Sequence
aattctggtgactggtatcaaggtt

SEQ ID NO: 25173 - DNA, 25 bp, Probe Sequence
tatctatgtgcctgctgatgacttg

SEQ ID NO: 25174 - DNA, 25 bp, Probe Sequence
ccaagaaggtcaagatgtactgcta

SEQ ID NO: 25175 - DNA, 25 bp, Probe Sequence
gatcatggagttaatcaacaatgtc

SEQ ID NO: 25176 - DNA, 25 bp, Probe Sequence
tcatggagttaatcaacaatgtcgc

SEQ ID NO: 25177 - DNA, 25 bp, Probe Sequence
attctggtgactggtatcaaggttg

SEQ ID NO: 25178 - DNA, 25 bp, Probe Sequence
caggaaagaattaccactaccaaga

SEQ ID NO: 25179 - DNA, 25 bp, Probe Sequence
gctggtatatggtcaaatgaatcaa

SEQ ID NO: 25180 - DNA, 25 bp, Probe Sequence
aaagaattaccactaccaagaaggg

SEQ ID NO: 25181 - DNA, 25 bp, Probe Sequence
aggaaagaattaccactaccaagaa

SEQ ID NO: 25182 - DNA, 25 bp, Probe Sequence
gaaagaattaccactaccaagaagg

SEQ ID NO: 25183 - DNA, 25 bp, Probe Sequence
ggaaagaattaccactaccaagaag

SEQ ID NO: 25184 - DNA, 25 bp, Probe Sequence
tatggatgaactttctgaggaagac

SEQ ID NO: 25185 - DNA, 25 bp, Probe Sequence
gtatggatgaactttctgaggaaga

SEQ ID NO: 25186 - DNA, 25 bp, Probe Sequence
agaattaccactaccaagaagggat

SEQ ID NO: 25187 - DNA, 25 bp, Probe Sequence
gatggtacagaaggcttggttagag

SEQ ID NO: 25188 - DNA, 25 bp, Probe Sequence
ggtatggatgaactttctgaggaag

SEQ ID NO: 25189 - DNA, 25 bp, Probe Sequence
ctgtgttggtgtctactgaagttat

SEQ ID NO: 25190 - DNA, 25 bp, Probe Sequence
tgtgttggtgtctactgaagttata

SEQ ID NO: 25191 - DNA, 25 bp, Probe Sequence
gtgttggtgtctactgaagttatag

SEQ ID NO: 25192 - DNA, 25 bp, Probe Sequence
tctgtgttggtgtctactgaagtta

SEQ ID NO: 25193 - DNA, 25 bp, Probe Sequence
actaggtgtaatggtctatggaatt

SEQ ID NO: 25194 - DNA, 25 bp, Probe Sequence
aatcgcctggactatcatatatctg

SEQ ID NO: 25195 - DNA, 25 bp, Probe Sequence
tgttggtgtctactgaagttatagt

SEQ ID NO: 25196 - DNA, 25 bp, Probe Sequence
atcgcctggactatcatatatctgt

SEQ ID NO: 25197 - DNA, 25 bp, Probe Sequence
gaatcgcctggactatcatatatct

SEQ ID NO: 25198 - DNA, 25 bp, Probe Sequence
agaatcgcctggactatcatatatc

SEQ ID NO: 25199 - DNA, 25 bp, Probe Sequence
gtactaggtgtaatggtctatggaa

SEQ ID NO: 25200 - DNA, 25 bp, Probe Sequence
aattgatacggagaagtcacaacag

SEQ ID NO: 25201 - DNA, 25 bp, Probe Sequence
aagaatcgcctggactatcatatat

SEQ ID NO: 25202 - DNA, 25 bp, Probe Sequence
tcgcctggactatcatatatctgtg

SEQ ID NO: 25203 - DNA, 25 bp, Probe Sequence
tactaggtgtaatggtctatggaat

SEQ ID NO: 25204 - DNA, 25 bp, Probe Sequence
gttggtgtctactgaagttatagtt

SEQ ID NO: 25205 - DNA, 25 bp, Probe Sequence
ttctgtgttggtgtctactgaagtt

SEQ ID NO: 25206 - DNA, 25 bp, Probe Sequence
gtaaagaatcgcctggactatcata

SEQ ID NO: 25207 - DNA, 25 bp, Probe Sequence
attgatacggagaagtcacaacagg

SEQ ID NO: 25208 - DNA, 25 bp, Probe Sequence
aaagaatcgcctggactatcatata

SEQ ID NO: 25209 - DNA, 25 bp, Probe Sequence
taaagaatcgcctggactatcatat

SEQ ID NO: 25210 - DNA, 25 bp, Probe Sequence
aataacattgctatggctttggaag

SEQ ID NO: 25211 - DNA, 25 bp, Probe Sequence
gaataacattgctatggctttggaa

SEQ ID NO: 25212 - DNA, 25 bp, Probe Sequence
aaggaataacattgctatggctttg

SEQ ID NO: 25213 - DNA, 25 bp, Probe Sequence
ggtaatgcctatctcttggtctatt

SEQ ID NO: 25214 - DNA, 25 bp, Probe Sequence
tgtgatagcaatgaatggtatgatg

SEQ ID NO: 25215 - DNA, 25 bp, Probe Sequence
tccatcctgaataacgaatagaaga

SEQ ID NO: 25216 - DNA, 25 bp, Probe Sequence
ccttccatcctgaataacgaataga

SEQ ID NO: 25217 - DNA, 25 bp, Probe Sequence
tccttccatcctgaataacgaatag

SEQ ID NO: 25218 - DNA, 25 bp, Probe Sequence
gaacctatgctcagatattcatcgt

SEQ ID NO: 25219 - DNA, 25 bp, Probe Sequence
gtgatagcaatgaatggtatgatga

SEQ ID NO: 25220 - DNA, 25 bp, Probe Sequence
ttccttccatcctgaataacgaata

SEQ ID NO: 25221 - DNA, 25 bp, Probe Sequence
ccatcctgaataacgaatagaagag

SEQ ID NO: 25222 - DNA, 25 bp, Probe Sequence
tgctcagatattcatcgtaagtctc

SEQ ID NO: 25223 - DNA, 25 bp, Probe Sequence
atgctcagatattcatcgtaagtct

SEQ ID NO: 25224 - DNA, 25 bp, Probe Sequence
acctatgctcagatattcatcgtaa

SEQ ID NO: 25225 - DNA, 25 bp, Probe Sequence
aacctatgctcagatattcatcgta

SEQ ID NO: 25226 - DNA, 25 bp, Probe Sequence
gctcagatattcatcgtaagtctcc

SEQ ID NO: 25227 - DNA, 25 bp, Probe Sequence
cctatgctcagatattcatcgtaag

SEQ ID NO: 25228 - DNA, 25 bp, Probe Sequence
tgatagcaatgaatggtatgatgaa

SEQ ID NO: 25229 - DNA, 25 bp, Probe Sequence
tagcaatgaatggtatgatgaagaa

SEQ ID NO: 25230 - DNA, 25 bp, Probe Sequence
gcgaacctatgctcagatattcatc

SEQ ID NO: 25231 - DNA, 25 bp, Probe Sequence
atattgcctccttatccttgagatt

SEQ ID NO: 25232 - DNA, 25 bp, Probe Sequence
ttccatcctgaataacgaatagaag

SEQ ID NO: 25233 - DNA, 25 bp, Probe Sequence
cttccatcctgaataacgaatagaa

SEQ ID NO: 25234 - DNA, 25 bp, Probe Sequence
atagcaatgaatggtatgatgaaga

SEQ ID NO: 25235 - DNA, 25 bp, Probe Sequence
ttgtgatagcaatgaatggtatgat

SEQ ID NO: 25236 - DNA, 25 bp, Probe Sequence
tatgctcagatattcatcgtaagtc

SEQ ID NO: 25237 - DNA, 25 bp, Probe Sequence
tgtcatttctctttactggatgttt

SEQ ID NO: 25238 - DNA, 25 bp, Probe Sequence
ttgtcatttctctttactggatgtt

SEQ ID NO: 25239 - DNA, 25 bp, Probe Sequence
attgtcatttctctttactggatgt

SEQ ID NO: 25240 - DNA, 25 bp, Probe Sequence
aattgtcatttctctttactggatg

SEQ ID NO: 25241 - DNA, 25 bp, Probe Sequence
gaattgtcatttctctttactggat

SEQ ID NO: 25242 - DNA, 25 bp, Probe Sequence
gtcatttctctttactggatgttta

SEQ ID NO: 25243 - DNA, 25 bp, Probe Sequence
agaattgtcatttctctttactgga

SEQ ID NO: 25244 - DNA, 25 bp, Probe Sequence
atttataaagatctggcctgttcct

SEQ ID NO: 25245 - DNA, 25 bp, Probe Sequence
tttataaagatctggcctgttcctg

SEQ ID NO: 25246 - DNA, 25 bp, Probe Sequence
tcatttctctttactggatgtttat

SEQ ID NO: 25247 - DNA, 25 bp, Probe Sequence
tatttataaagatctggcctgttcc

SEQ ID NO: 25248 - DNA, 25 bp, Probe Sequence
ttataaagatctggcctgttcctgc

SEQ ID NO: 25249 - DNA, 25 bp, Probe Sequence
catttctctttactggatgtttatt

SEQ ID NO: 25250 - DNA, 25 bp, Probe Sequence
tagaattgtcatttctctttactgg

SEQ ID NO: 25251 - DNA, 25 bp, Probe Sequence
ttatttataaagatctggcctgttc

SEQ ID NO: 25252 - DNA, 25 bp, Probe Sequence
gtttatttataaagatctggcctgt

SEQ ID NO: 25253 - DNA, 25 bp, Probe Sequence
tgtttatttataaagatctggcctg

SEQ ID NO: 25254 - DNA, 25 bp, Probe Sequence
tttatttataaagatctggcctgtt

SEQ ID NO: 25255 - DNA, 25 bp, Probe Sequence
atgtttatttataaagatctggcct

SEQ ID NO: 25256 - DNA, 25 bp, Probe Sequence
ttagaattgtcatttctctttactg

SEQ ID NO: 25257 - DNA, 25 bp, Probe Sequence
gatgtttatttataaagatctggcc

SEQ ID NO: 25258 - DNA, 25 bp, Probe Sequence
ggatgtttatttataaagatctggc

SEQ ID NO: 25259 - DNA, 25 bp, Probe Sequence
tataaagatctggcctgttcctgcg

SEQ ID NO: 25260 - DNA, 25 bp, Probe Sequence
tgatttagaattgtcatttctcttt

SEQ ID NO: 25261 - DNA, 25 bp, Probe Sequence
tgtcatttctctttactggatgttt

SEQ ID NO: 25262 - DNA, 25 bp, Probe Sequence
ttgtcatttctctttactggatgtt

SEQ ID NO: 25263 - DNA, 25 bp, Probe Sequence
attgtcatttctctttactggatgt

SEQ ID NO: 25264 - DNA, 25 bp, Probe Sequence
aattgtcatttctctttactggatg

SEQ ID NO: 25265 - DNA, 25 bp, Probe Sequence
gaattgtcatttctctttactggat

SEQ ID NO: 25266 - DNA, 25 bp, Probe Sequence
gtcatttctctttactggatgttta

SEQ ID NO: 25267 - DNA, 25 bp, Probe Sequence
agaattgtcatttctctttactgga

SEQ ID NO: 25268 - DNA, 25 bp, Probe Sequence
atttataaagatctggcctgttcct

SEQ ID NO: 25269 - DNA, 25 bp, Probe Sequence
tttataaagatctggcctgttcctg

SEQ ID NO: 25270 - DNA, 25 bp, Probe Sequence
tcatttctctttactggatgtttat

SEQ ID NO: 25271 - DNA, 25 bp, Probe Sequence
tatttataaagatctggcctgttcc

SEQ ID NO: 25272 - DNA, 25 bp, Probe Sequence
ttataaagatctggcctgttcctgc

SEQ ID NO: 25273 - DNA, 25 bp, Probe Sequence
catttctctttactggatgtttatt

SEQ ID NO: 25274 - DNA, 25 bp, Probe Sequence
tagaattgtcatttctctttactgg

SEQ ID NO: 25275 - DNA, 25 bp, Probe Sequence
ttatttataaagatctggcctgttc

SEQ ID NO: 25276 - DNA, 25 bp, Probe Sequence
gtttatttataaagatctggcctgt

SEQ ID NO: 25277 - DNA, 25 bp, Probe Sequence
tgtttatttataaagatctggcctg

SEQ ID NO: 25278 - DNA, 25 bp, Probe Sequence
tttatttataaagatctggcctgtt

SEQ ID NO: 25279 - DNA, 25 bp, Probe Sequence
atgtttatttataaagatctggcct

SEQ ID NO: 25280 - DNA, 25 bp, Probe Sequence
ttagaattgtcatttctctttactg

SEQ ID NO: 25281 - DNA, 25 bp, Probe Sequence
gatgtttatttataaagatctggcc

SEQ ID NO: 25282 - DNA, 25 bp, Probe Sequence
ggatgtttatttataaagatctggc

SEQ ID NO: 25283 - DNA, 25 bp, Probe Sequence
tataaagatctggcctgttcctgcg

SEQ ID NO: 25284 - DNA, 25 bp, Probe Sequence
tgatttagaattgtcatttctcttt

SEQ ID NO: 25285 - DNA, 25 bp, Probe Sequence
taaaggtgatgtatttggtgtttgg

SEQ ID NO: 25286 - DNA, 25 bp, Probe Sequence
aaagagttatgcggatttaatgtga

SEQ ID NO: 25287 - DNA, 25 bp, Probe Sequence
cctaaaggtgatgtatttggtgttt

SEQ ID NO: 25288 - DNA, 25 bp, Probe Sequence
ctaaaggtgatgtatttggtgtttg

SEQ ID NO: 25289 - DNA, 25 bp, Probe Sequence
gaatgtctctgtagcttcctcttca

SEQ ID NO: 25290 - DNA, 25 bp, Probe Sequence
aatgtctctgtagcttcctcttcac

SEQ ID NO: 25291 - DNA, 25 bp, Probe Sequence
tagtcgctttactgttacctgttta

SEQ ID NO: 25292 - DNA, 25 bp, Probe Sequence
agtcgctttactgttacctgtttag

SEQ ID NO: 25293 - DNA, 25 bp, Probe Sequence
gtagtcgctttactgttacctgttt

SEQ ID NO: 25294 - DNA, 25 bp, Probe Sequence
gcctaaaggtgatgtatttggtgtt

SEQ ID NO: 25295 - DNA, 25 bp, Probe Sequence
atttgaagaaacacgaatgtctctg

SEQ ID NO: 25296 - DNA, 25 bp, Probe Sequence
ttgaagaaacacgaatgtctctgta

SEQ ID NO: 25297 - DNA, 25 bp, Probe Sequence
tgaagaaacacgaatgtctctgtag

SEQ ID NO: 25298 - DNA, 25 bp, Probe Sequence
tttgaagaaacacgaatgtctctgt

SEQ ID NO: 25299 - DNA, 25 bp, Probe Sequence
cccagtattgctctgtatttatcag

SEQ ID NO: 25300 - DNA, 25 bp, Probe Sequence
tatttgaagaaacacgaatgtctct

SEQ ID NO: 25301 - DNA, 25 bp, Probe Sequence
tctgatatttgaagaaacacgaatg

SEQ ID NO: 25302 - DNA, 25 bp, Probe Sequence
atgtctctgtagcttcctcttcact

SEQ ID NO: 25303 - DNA, 25 bp, Probe Sequence
tttccctcatctgtaaatgtgattt

SEQ ID NO: 25304 - DNA, 25 bp, Probe Sequence
aaaggtgatgtatttggtgtttggc

SEQ ID NO: 25305 - DNA, 25 bp, Probe Sequence
cgaatgtctctgtagcttcctcttc

SEQ ID NO: 25306 - DNA, 25 bp, Probe Sequence
tgatatttgaagaaacacgaatgtc

SEQ ID NO: 25307 - DNA, 25 bp, Probe Sequence
ctgatatttgaagaaacacgaatgt

SEQ ID NO: 25308 - DNA, 25 bp, Probe Sequence
gaagaaacacgaatgtctctgtagc

SEQ ID NO: 25309 - DNA, 25 bp, Probe Sequence
agactggatcgatggtgttctcaac

SEQ ID NO: 25310 - DNA, 25 bp, Probe Sequence
ctggatcgatggtgttctcaacaac

SEQ ID NO: 25311 - DNA, 25 bp, Probe Sequence
actggatcgatggtgttctcaacaa

SEQ ID NO: 25312 - DNA, 25 bp, Probe Sequence
gagactggatcgatggtgttctcaa

SEQ ID NO: 25313 - DNA, 25 bp, Probe Sequence
gactggatcgatggtgttctcaaca

SEQ ID NO: 25314 - DNA, 25 bp, Probe Sequence
tggatcgatggtgttctcaacaacc

SEQ ID NO: 25315 - DNA, 25 bp, Probe Sequence
gttttcccaggtttgtcaacgtgac

SEQ ID NO: 25316 - DNA, 25 bp, Probe Sequence
ttttcccaggtttgtcaacgtgact

SEQ ID NO: 25317 - DNA, 25 bp, Probe Sequence
ttgatagttcacaagagaagtcgtt

SEQ ID NO: 25318 - DNA, 25 bp, Probe Sequence
ggaaggaggtctacatcaagaatgg

SEQ ID NO: 25319 - DNA, 25 bp, Probe Sequence
ttcattcaagttggtgtaatcagct

SEQ ID NO: 25320 - DNA, 25 bp, Probe Sequence
tcgtttcattcaagttggtgtaatc

SEQ ID NO: 25321 - DNA, 25 bp, Probe Sequence
tttcattcaagttggtgtaatcagc

SEQ ID NO: 25322 - DNA, 25 bp, Probe Sequence
cgtttcattcaagttggtgtaatca

SEQ ID NO: 25323 - DNA, 25 bp, Probe Sequence
gtcgtttcattcaagttggtgtaat

SEQ ID NO: 25324 - DNA, 25 bp, Probe Sequence
cggaaggaggtctacatcaagaatg

SEQ ID NO: 25325 - DNA, 25 bp, Probe Sequence
tcggaaggaggtctacatcaagaat

SEQ ID NO: 25326 - DNA, 25 bp, Probe Sequence
caagagaagtcgtttcattcaagtt

SEQ ID NO: 25327 - DNA, 25 bp, Probe Sequence
gactttcacatcaacctctttcaag

SEQ ID NO: 25328 - DNA, 25 bp, Probe Sequence
tagttcacaagagaagtcgtttcat

SEQ ID NO: 25329 - DNA, 25 bp, Probe Sequence
atagttcacaagagaagtcgtttca

SEQ ID NO: 25330 - DNA, 25 bp, Probe Sequence
gatagttcacaagagaagtcgtttc

SEQ ID NO: 25331 - DNA, 25 bp, Probe Sequence
aagagaagtcgtttcattcaagttg

SEQ ID NO: 25332 - DNA, 25 bp, Probe Sequence
cacaagagaagtcgtttcattcaag

SEQ ID NO: 25333 - DNA, 25 bp, Probe Sequence
gttcacaagagaagtcgtttcattc

SEQ ID NO: 25334 - DNA, 25 bp, Probe Sequence
agactttcacatcaacctctttcaa

SEQ ID NO: 25335 - DNA, 25 bp, Probe Sequence
gtttcattcaagttggtgtaatcag

SEQ ID NO: 25336 - DNA, 25 bp, Probe Sequence
agtcgtttcattcaagttggtgtaa

SEQ ID NO: 25337 - DNA, 25 bp, Probe Sequence
aagtcgtttcattcaagttggtgta

SEQ ID NO: 25338 - DNA, 25 bp, Probe Sequence
acaagagaagtcgtttcattcaagt

SEQ ID NO: 25339 - DNA, 25 bp, Probe Sequence
tcacaagagaagtcgtttcattcaa

SEQ ID NO: 25340 - DNA, 25 bp, Probe Sequence
ttcacaagagaagtcgtttcattca

SEQ ID NO: 25341 - DNA, 25 bp, Probe Sequence
ctctctctctctctctctctctgtg

SEQ ID NO: 25342 - DNA, 25 bp, Probe Sequence
ctctctctctctctctctctgtgtg

SEQ ID NO: 25343 - DNA, 25 bp, Probe Sequence
tctctctctctctctctctctgtgt

SEQ ID NO: 25344 - DNA, 25 bp, Probe Sequence
cttcctctctctctctctctctctc

SEQ ID NO: 25345 - DNA, 25 bp, Probe Sequence
ttcctctctctctctctctctctct

SEQ ID NO: 25346 - DNA, 25 bp, Probe Sequence
ctctctctctctctctctgtgtgtg

SEQ ID NO: 25347 - DNA, 25 bp, Probe Sequence
tctctctctctctctctctgtgtgt

SEQ ID NO: 25348 - DNA, 25 bp, Probe Sequence
ctctctctctctctctgtgtgtgtg

SEQ ID NO: 25349 - DNA, 25 bp, Probe Sequence
tcctctctctctctctctctctctg

SEQ ID NO: 25350 - DNA, 25 bp, Probe Sequence
tctctctctctctctctgtgtgtgt

SEQ ID NO: 25351 - DNA, 25 bp, Probe Sequence
cctctctctctctctctctctctgt

SEQ ID NO: 25352 - DNA, 25 bp, Probe Sequence
ccttcctctctctctctctctctct

SEQ ID NO: 25353 - DNA, 25 bp, Probe Sequence
tccttcctctctctctctctctctc

SEQ ID NO: 25354 - DNA, 25 bp, Probe Sequence
gtccttcctctctctctctctctct

SEQ ID NO: 25355 - DNA, 25 bp, Probe Sequence
tctctctctctctctgtgtgtgtgt

SEQ ID NO: 25356 - DNA, 25 bp, Probe Sequence
tctctctctctctgtgtgtgtgtgt

SEQ ID NO: 25357 - DNA, 25 bp, Probe Sequence
agtcctcccttctgttctctctttc

SEQ ID NO: 25358 - DNA, 25 bp, Probe Sequence
ctctctctctgtgtgtgtgtgtgtg

SEQ ID NO: 25359 - DNA, 25 bp, Probe Sequence
cgtccttcctctctctctctctctc

SEQ ID NO: 25360 - DNA, 25 bp, Probe Sequence
tctctctctctgtgtgtgtgtgtgt

SEQ ID NO: 25361 - DNA, 25 bp, Probe Sequence
ttccattaaagaaacaccgtgcaac

SEQ ID NO: 25362 - DNA, 25 bp, Probe Sequence
cagtcctcccttctgttctctcttt

SEQ ID NO: 25363 - DNA, 25 bp, Probe Sequence
gtcctcccttctgttctctctttcc

SEQ ID NO: 25364 - DNA, 25 bp, Probe Sequence
tcttgtgcttcctcagacctttctc

SEQ ID NO: 25365 - DNA, 25 bp, Probe Sequence
aagtagactgattacactgaggtga

SEQ ID NO: 25366 - DNA, 25 bp, Probe Sequence
agtagactgattacactgaggtgag

SEQ ID NO: 25367 - DNA, 25 bp, Probe Sequence
atttctacacctcaatcctccattt

SEQ ID NO: 25368 - DNA, 25 bp, Probe Sequence
gtagactgattacactgaggtgagg

SEQ ID NO: 25369 - DNA, 25 bp, Probe Sequence
ttctttgaccagcacattaacttct

SEQ ID NO: 25370 - DNA, 25 bp, Probe Sequence
gggaaggcaatttcatactaaactg

SEQ ID NO: 25371 - DNA, 25 bp, Probe Sequence
ctgggaaggcaatttcatactaaac

SEQ ID NO: 25372 - DNA, 25 bp, Probe Sequence
tgggaaggcaatttcatactaaact

SEQ ID NO: 25373 - DNA, 25 bp, Probe Sequence
actgggaaggcaatttcatactaaa

SEQ ID NO: 25374 - DNA, 25 bp, Probe Sequence
gttctttgaccagcacattaacttc

SEQ ID NO: 25375 - DNA, 25 bp, Probe Sequence
gactgggaaggcaatttcatactaa

SEQ ID NO: 25376 - DNA, 25 bp, Probe Sequence
tttctacacctcaatcctccatttg

SEQ ID NO: 25377 - DNA, 25 bp, Probe Sequence
ggaaggcaatttcatactaaactga

SEQ ID NO: 25378 - DNA, 25 bp, Probe Sequence
gattacactgaggtgaggctacaag

SEQ ID NO: 25379 - DNA, 25 bp, Probe Sequence
aatcctccatttgctgtactctttg

SEQ ID NO: 25380 - DNA, 25 bp, Probe Sequence
aaagtagactgattacactgaggtg

SEQ ID NO: 25381 - DNA, 25 bp, Probe Sequence
ttactatacagcataccacgccaca

SEQ ID NO: 25382 - DNA, 25 bp, Probe Sequence
tgactgggaaggcaatttcatacta

SEQ ID NO: 25383 - DNA, 25 bp, Probe Sequence
ctccatttgctgtactctttgctag

SEQ ID NO: 25384 - DNA, 25 bp, Probe Sequence
tgtagaaagtgaggctcagattaaa

SEQ ID NO: 25385 - DNA, 25 bp, Probe Sequence
caatcctccatttgctgtactcttt

SEQ ID NO: 25386 - DNA, 25 bp, Probe Sequence
tctttgaccagcacattaacttctg

SEQ ID NO: 25387 - DNA, 25 bp, Probe Sequence
tgattacactgaggtgaggctacaa

SEQ ID NO: 25388 - DNA, 25 bp, Probe Sequence
ctgtagaaagtgaggctcagattaa

SEQ ID NO: 25389 - DNA, 25 bp, Probe Sequence
cagtataggagagagagcaaggatt

SEQ ID NO: 25390 - DNA, 25 bp, Probe Sequence
atgtcttaatctcttccactgatgc

SEQ ID NO: 25391 - DNA, 25 bp, Probe Sequence
tataggagagagagcaaggattgag

SEQ ID NO: 25392 - DNA, 25 bp, Probe Sequence
gtataggagagagagcaaggattga

SEQ ID NO: 25393 - DNA, 25 bp, Probe Sequence
agtataggagagagagcaaggattg

SEQ ID NO: 25394 - DNA, 25 bp, Probe Sequence
tatgtcttaatctcttccactgatg

SEQ ID NO: 25395 - DNA, 25 bp, Probe Sequence
ataggagagagagcaaggattgagt

SEQ ID NO: 25396 - DNA, 25 bp, Probe Sequence
ttctgagcctcctatactatccgac

SEQ ID NO: 25397 - DNA, 25 bp, Probe Sequence
ggacatcaagcctatcaagacagag

SEQ ID NO: 25398 - DNA, 25 bp, Probe Sequence
ctcctatactatccgacacaaatgg

SEQ ID NO: 25399 - DNA, 25 bp, Probe Sequence
cctcctatactatccgacacaaatg

SEQ ID NO: 25400 - DNA, 25 bp, Probe Sequence
aacctttctgagcctcctatactat

SEQ ID NO: 25401 - DNA, 25 bp, Probe Sequence
taacctttctgagcctcctatacta

SEQ ID NO: 25402 - DNA, 25 bp, Probe Sequence
gcagtataggagagagagcaaggat

SEQ ID NO: 25403 - DNA, 25 bp, Probe Sequence
ttatgtcttaatctcttccactgat

SEQ ID NO: 25404 - DNA, 25 bp, Probe Sequence
acctttctgagcctcctatactatc

SEQ ID NO: 25405 - DNA, 25 bp, Probe Sequence
gagcctcctatactatccgacacaa

SEQ ID NO: 25406 - DNA, 25 bp, Probe Sequence
ctaacctttctgagcctcctatact

SEQ ID NO: 25407 - DNA, 25 bp, Probe Sequence
taggagagagagcaaggattgagtc

SEQ ID NO: 25408 - DNA, 25 bp, Probe Sequence
tcctatactatccgacacaaatggg

SEQ ID NO: 25409 - DNA, 25 bp, Probe Sequence
cctttctgagcctcctatactatcc

SEQ ID NO: 25410 - DNA, 25 bp, Probe Sequence
aatgacgaaccagatgttaaacctt

SEQ ID NO: 25411 - DNA, 25 bp, Probe Sequence
aaatgacgaaccagatgttaaacct

SEQ ID NO: 25412 - DNA, 25 bp, Probe Sequence
gcctcctatactatccgacacaaat

SEQ ID NO: 25413 - DNA, 25 bp, Probe Sequence
tcatcaacattactcttcctactgg

SEQ ID NO: 25414 - DNA, 25 bp, Probe Sequence
tattcacatctgtccttaatcggtc

SEQ ID NO: 25415 - DNA, 25 bp, Probe Sequence
gagagcaacaagtagagatgaagtt

SEQ ID NO: 25416 - DNA, 25 bp, Probe Sequence
agacatcatcaacattactcttcct

SEQ ID NO: 25417 - DNA, 25 bp, Probe Sequence
aggtaactaggtaacttattgtggc

SEQ ID NO: 25418 - DNA, 25 bp, Probe Sequence
agagcaacaagtagagatgaagtta

SEQ ID NO: 25419 - DNA, 25 bp, Probe Sequence
attgacaggcactattctaatcagt

SEQ ID NO: 25420 - DNA, 25 bp, Probe Sequence
tgacaggcactattctaatcagtag

SEQ ID NO: 25421 - DNA, 25 bp, Probe Sequence
acatcatcaacattactcttcctac

SEQ ID NO: 25422 - DNA, 25 bp, Probe Sequence
gagcaacaagtagagatgaagttaa

SEQ ID NO: 25423 - DNA, 25 bp, Probe Sequence
ttgacaggcactattctaatcagta

SEQ ID NO: 25424 - DNA, 25 bp, Probe Sequence
aagaagtggcataggagtgtgttat

SEQ ID NO: 25425 - DNA, 25 bp, Probe Sequence
tggaaggtatctcagatgaagacat

SEQ ID NO: 25426 - DNA, 25 bp, Probe Sequence
atcatcaacattactcttcctactg

SEQ ID NO: 25427 - DNA, 25 bp, Probe Sequence
catcatcaacattactcttcctact

SEQ ID NO: 25428 - DNA, 25 bp, Probe Sequence
gacatcatcaacattactcttccta

SEQ ID NO: 25429 - DNA, 25 bp, Probe Sequence
aattgacaggcactattctaatcag

SEQ ID NO: 25430 - DNA, 25 bp, Probe Sequence
ggagagcaacaagtagagatgaagt

SEQ ID NO: 25431 - DNA, 25 bp, Probe Sequence
ttgaatcatggtgaagaacaagtga

SEQ ID NO: 25432 - DNA, 25 bp, Probe Sequence
catcaacattactcttcctactgga

SEQ ID NO: 25433 - DNA, 25 bp, Probe Sequence
atcaacattactcttcctactggag

SEQ ID NO: 25434 - DNA, 25 bp, Probe Sequence
atctgtccttaatcggtccattcac

SEQ ID NO: 25435 - DNA, 25 bp, Probe Sequence
catctgtccttaatcggtccattca

SEQ ID NO: 25436 - DNA, 25 bp, Probe Sequence
acatctgtccttaatcggtccattc

SEQ ID NO: 25437 - DNA, 25 bp, Probe Sequence
tcaccatcatcttcatctacgagaa

SEQ ID NO: 25438 - DNA, 25 bp, Probe Sequence
gtcaccatcatcttcatctacgaga

SEQ ID NO: 25439 - DNA, 25 bp, Probe Sequence
ctacacattgagaacctgaacatgg

SEQ ID NO: 25440 - DNA, 25 bp, Probe Sequence
ggtcaccatcatcttcatctacgag

SEQ ID NO: 25441 - DNA, 25 bp, Probe Sequence
tacacattgagaacctgaacatgga

SEQ ID NO: 25442 - DNA, 25 bp, Probe Sequence
attcccatcatacacttccttcttt

SEQ ID NO: 25443 - DNA, 25 bp, Probe Sequence
gtagattcccatcatacacttcctt

SEQ ID NO: 25444 - DNA, 25 bp, Probe Sequence
gattcccatcatacacttccttctt

SEQ ID NO: 25445 - DNA, 25 bp, Probe Sequence
tagattcccatcatacacttccttc

SEQ ID NO: 25446 - DNA, 25 bp, Probe Sequence
gctacacattgagaacctgaacatg

SEQ ID NO: 25447 - DNA, 25 bp, Probe Sequence
gtacaagatcactgactctgaggac

SEQ ID NO: 25448 - DNA, 25 bp, Probe Sequence
ctggtacaagatcactgactctgag

SEQ ID NO: 25449 - DNA, 25 bp, Probe Sequence
gattccaagttctcacctcttaaag

SEQ ID NO: 25450 - DNA, 25 bp, Probe Sequence
agattccaagttctcacctcttaaa

SEQ ID NO: 25451 - DNA, 25 bp, Probe Sequence
agattcccatcatacacttccttct

SEQ ID NO: 25452 - DNA, 25 bp, Probe Sequence
tacaagatcactgactctgaggaca

SEQ ID NO: 25453 - DNA, 25 bp, Probe Sequence
caagattccaagttctcacctctta

SEQ ID NO: 25454 - DNA, 25 bp, Probe Sequence
aagattccaagttctcacctcttaa

SEQ ID NO: 25455 - DNA, 25 bp, Probe Sequence
agctacacattgagaacctgaacat

SEQ ID NO: 25456 - DNA, 25 bp, Probe Sequence
cgtagattcccatcatacacttcct

SEQ ID NO: 25457 - DNA, 25 bp, Probe Sequence
attccaagttctcacctcttaaaga

SEQ ID NO: 25458 - DNA, 25 bp, Probe Sequence
caagatcactgactctgaggacaag

SEQ ID NO: 25459 - DNA, 25 bp, Probe Sequence
agagctacacattgagaacctgaac

SEQ ID NO: 25460 - DNA, 25 bp, Probe Sequence
acacattgagaacctgaacatggag

SEQ ID NO: 25461 - DNA, 25 bp, Probe Sequence
ggttaagatatagtctgtggatgga

SEQ ID NO: 25462 - DNA, 25 bp, Probe Sequence
aggttaagatatagtctgtggatgg

SEQ ID NO: 25463 - DNA, 25 bp, Probe Sequence
cctatgaagtgtcctacagaattgg

SEQ ID NO: 25464 - DNA, 25 bp, Probe Sequence
cagttcatgtatattgattgtggca

SEQ ID NO: 25465 - DNA, 25 bp, Probe Sequence
aagatatagtctgtggatggatcat

SEQ ID NO: 25466 - DNA, 25 bp, Probe Sequence
tatgaagtgtcctacagaattggag

SEQ ID NO: 25467 - DNA, 25 bp, Probe Sequence
ctatgaagtgtcctacagaattgga

SEQ ID NO: 25468 - DNA, 25 bp, Probe Sequence
agttcatgtatattgattgtggcaa

SEQ ID NO: 25469 - DNA, 25 bp, Probe Sequence
acagttcatgtatattgattgtggc

SEQ ID NO: 25470 - DNA, 25 bp, Probe Sequence
caggttaagatatagtctgtggatg

SEQ ID NO: 25471 - DNA, 25 bp, Probe Sequence
atgaagtgtcctacagaattggaga

SEQ ID NO: 25472 - DNA, 25 bp, Probe Sequence
tcaggttaagatatagtctgtggat

SEQ ID NO: 25473 - DNA, 25 bp, Probe Sequence
atcaggttaagatatagtctgtgga

SEQ ID NO: 25474 - DNA, 25 bp, Probe Sequence
taagatatagtctgtggatggatca

SEQ ID NO: 25475 - DNA, 25 bp, Probe Sequence
gttaagatatagtctgtggatggat

SEQ ID NO: 25476 - DNA, 25 bp, Probe Sequence
taatagcctgtgagtccaagtaaat

SEQ ID NO: 25477 - DNA, 25 bp, Probe Sequence
ttaatagcctgtgagtccaagtaaa

SEQ ID NO: 25478 - DNA, 25 bp, Probe Sequence
tttaatagcctgtgagtccaagtaa

SEQ ID NO: 25479 - DNA, 25 bp, Probe Sequence
aatagcctgtgagtccaagtaaatg

SEQ ID NO: 25480 - DNA, 25 bp, Probe Sequence
tgaagtgtcctacagaattggagag

SEQ ID NO: 25481 - DNA, 25 bp, Probe Sequence
cagtttctcccagacatacctaaat

SEQ ID NO: 25482 - DNA, 25 bp, Probe Sequence
tcagtttctcccagacatacctaaa

SEQ ID NO: 25483 - DNA, 25 bp, Probe Sequence
ttcagtttctcccagacatacctaa

SEQ ID NO: 25484 - DNA, 25 bp, Probe Sequence
tttcagtttctcccagacataccta

SEQ ID NO: 25485 - DNA, 25 bp, Probe Sequence
gaataggatggatgtgttctctcaa

SEQ ID NO: 25486 - DNA, 25 bp, Probe Sequence
ccagttgttgataaccactaagagt

SEQ ID NO: 25487 - DNA, 25 bp, Probe Sequence
accagttgttgataaccactaagag

SEQ ID NO: 25488 - DNA, 25 bp, Probe Sequence
gaccagttgttgataaccactaaga

SEQ ID NO: 25489 - DNA, 25 bp, Probe Sequence
cagttgttgataaccactaagagtc

SEQ ID NO: 25490 - DNA, 25 bp, Probe Sequence
agttgttgataaccactaagagtct

SEQ ID NO: 25491 - DNA, 25 bp, Probe Sequence
tgaccagttgttgataaccactaag

SEQ ID NO: 25492 - DNA, 25 bp, Probe Sequence
gttgttgataaccactaagagtctc

SEQ ID NO: 25493 - DNA, 25 bp, Probe Sequence
ctgaccagttgttgataaccactaa

SEQ ID NO: 25494 - DNA, 25 bp, Probe Sequence
ttgttgataaccactaagagtctct

SEQ ID NO: 25495 - DNA, 25 bp, Probe Sequence
tgttgataaccactaagagtctcta

SEQ ID NO: 25496 - DNA, 25 bp, Probe Sequence
aataggatggatgtgttctctcaaa

SEQ ID NO: 25497 - DNA, 25 bp, Probe Sequence
aaattctctttcctgtagtcccatt

SEQ ID NO: 25498 - DNA, 25 bp, Probe Sequence
actgaccagttgttgataaccacta

SEQ ID NO: 25499 - DNA, 25 bp, Probe Sequence
aattctctttcctgtagtcccattg

SEQ ID NO: 25500 - DNA, 25 bp, Probe Sequence
tctttcctgtagtcccattgatgta

SEQ ID NO: 25501 - DNA, 25 bp, Probe Sequence
ttctctttcctgtagtcccattgat

SEQ ID NO: 25502 - DNA, 25 bp, Probe Sequence
attctctttcctgtagtcccattga

SEQ ID NO: 25503 - DNA, 25 bp, Probe Sequence
gggaaagaataggatggatgtgttc

SEQ ID NO: 25504 - DNA, 25 bp, Probe Sequence
aagaataggatggatgtgttctctc

SEQ ID NO: 25505 - DNA, 25 bp, Probe Sequence
cccattgatgtactttacctgaaac

SEQ ID NO: 25506 - DNA, 25 bp, Probe Sequence
tcccattgatgtactttacctgaaa

SEQ ID NO: 25507 - DNA, 25 bp, Probe Sequence
agaataggatggatgtgttctctca

SEQ ID NO: 25508 - DNA, 25 bp, Probe Sequence
gtcccattgatgtactttacctgaa

SEQ ID NO: 25509 - DNA, 25 bp, Probe Sequence
cacttgtgaggagccatattactac

SEQ ID NO: 25510 - DNA, 25 bp, Probe Sequence
ctacacttgtgaggagccatattac

SEQ ID NO: 25511 - DNA, 25 bp, Probe Sequence
acacttgtgaggagccatattacta

SEQ ID NO: 25512 - DNA, 25 bp, Probe Sequence
tacacttgtgaggagccatattact

SEQ ID NO: 25513 - DNA, 25 bp, Probe Sequence
gatcatagaattgtgctggtcatac

SEQ ID NO: 25514 - DNA, 25 bp, Probe Sequence
tcatagaattgtgctggtcatacat

SEQ ID NO: 25515 - DNA, 25 bp, Probe Sequence
atcatagaattgtgctggtcataca

SEQ ID NO: 25516 - DNA, 25 bp, Probe Sequence
cttgtgaggagccatattactacat

SEQ ID NO: 25517 - DNA, 25 bp, Probe Sequence
catagaattgtgctggtcatacatt

SEQ ID NO: 25518 - DNA, 25 bp, Probe Sequence
acttgtgaggagccatattactaca

SEQ ID NO: 25519 - DNA, 25 bp, Probe Sequence
cggagtacctattgtagataacact

SEQ ID NO: 25520 - DNA, 25 bp, Probe Sequence
ttgtgaggagccatattactacatg

SEQ ID NO: 25521 - DNA, 25 bp, Probe Sequence
tctttgtttcctctttacctgttca

SEQ ID NO: 25522 - DNA, 25 bp, Probe Sequence
ttctttgtttcctctttacctgttc

SEQ ID NO: 25523 - DNA, 25 bp, Probe Sequence
attctttgtttcctctttacctgtt

SEQ ID NO: 25524 - DNA, 25 bp, Probe Sequence
ctttgtttcctctttacctgttcaa

SEQ ID NO: 25525 - DNA, 25 bp, Probe Sequence
aattctttgtttcctctttacctgt

SEQ ID NO: 25526 - DNA, 25 bp, Probe Sequence
catacatttgtggtctgactccttg

SEQ ID NO: 25527 - DNA, 25 bp, Probe Sequence
tagaattgtgctggtcatacatttg

SEQ ID NO: 25528 - DNA, 25 bp, Probe Sequence
attccaaactgaaatgtcaacctgt

SEQ ID NO: 25529 - DNA, 25 bp, Probe Sequence
caaagaagtgaaagtggagaaaccc

SEQ ID NO: 25530 - DNA, 25 bp, Probe Sequence
gaattgtgctggtcatacatttgtg

SEQ ID NO: 25531 - DNA, 25 bp, Probe Sequence
agaattgtgctggtcatacatttgt

SEQ ID NO: 25532 - DNA, 25 bp, Probe Sequence
atagaattgtgctggtcatacattt

SEQ ID NO: 25533 - DNA, 25 bp, Probe Sequence
tgataaggatggcaatggctatatt

SEQ ID NO: 25534 - DNA, 25 bp, Probe Sequence
agatggtgatggaactataacaaca

SEQ ID NO: 25535 - DNA, 25 bp, Probe Sequence
atgaagtagatgctgatggtaatgg

SEQ ID NO: 25536 - DNA, 25 bp, Probe Sequence
aaggatggcaatggctatattagtg

SEQ ID NO: 25537 - DNA, 25 bp, Probe Sequence
taaggatggcaatggctatattagt

SEQ ID NO: 25538 - DNA, 25 bp, Probe Sequence
gatggtgatggaactataacaacaa

SEQ ID NO: 25539 - DNA, 25 bp, Probe Sequence
aatgaagtagatgctgatggtaatg

SEQ ID NO: 25540 - DNA, 25 bp, Probe Sequence
ttgttgttgaagtgtggagttgtaa

SEQ ID NO: 25541 - DNA, 25 bp, Probe Sequence
aagatggtgatggaactataacaac

SEQ ID NO: 25542 - DNA, 25 bp, Probe Sequence
ttgataaggatggcaatggctatat

SEQ ID NO: 25543 - DNA, 25 bp, Probe Sequence
gaagcagatattgatggtgatggtc

SEQ ID NO: 25544 - DNA, 25 bp, Probe Sequence
ataaggatggcaatggctatattag

SEQ ID NO: 25545 - DNA, 25 bp, Probe Sequence
gataaggatggcaatggctatatta

SEQ ID NO: 25546 - DNA, 25 bp, Probe Sequence
gttgttgttgaagtgtggagttgta

SEQ ID NO: 25547 - DNA, 25 bp, Probe Sequence
aagcagagttacaggacatgattaa

SEQ ID NO: 25548 - DNA, 25 bp, Probe Sequence
gaagcagagttacaggacatgatta

SEQ ID NO: 25549 - DNA, 25 bp, Probe Sequence
gtattatccaggtactcgtacacta

SEQ ID NO: 25550 - DNA, 25 bp, Probe Sequence
tgttgttgaagtgtggagttgtaac

SEQ ID NO: 25551 - DNA, 25 bp, Probe Sequence
attatccaggtactcgtacactatt

SEQ ID NO: 25552 - DNA, 25 bp, Probe Sequence
agcagagttacaggacatgattaat

SEQ ID NO: 25553 - DNA, 25 bp, Probe Sequence
ccttatcttactgtcattgtcctaa

SEQ ID NO: 25554 - DNA, 25 bp, Probe Sequence
ttaatgaagtagatgctgatggtaa

SEQ ID NO: 25555 - DNA, 25 bp, Probe Sequence
atgttgttgttgaagtgtggagttg

SEQ ID NO: 25556 - DNA, 25 bp, Probe Sequence
gcagagttacaggacatgattaatg

SEQ ID NO: 25557 - DNA, 25 bp, Probe Sequence
ctctgtataaggtctctgatgccac

SEQ ID NO: 25558 - DNA, 25 bp, Probe Sequence
ctgtataaggtctctgatgccactg

SEQ ID NO: 25559 - DNA, 25 bp, Probe Sequence
tctgtataaggtctctgatgccact

SEQ ID NO: 25560 - DNA, 25 bp, Probe Sequence
cttgaactgctgatatctgatgact

SEQ ID NO: 25561 - DNA, 25 bp, Probe Sequence
ttgaactgctgatatctgatgactg

SEQ ID NO: 25562 - DNA, 25 bp, Probe Sequence
ccttgaactgctgatatctgatgac

SEQ ID NO: 25563 - DNA, 25 bp, Probe Sequence
gcagatgttcaataaaggagacaag

SEQ ID NO: 25564 - DNA, 25 bp, Probe Sequence
gatgttcaataaaggagacaagtgc

SEQ ID NO: 25565 - DNA, 25 bp, Probe Sequence
atgttcaataaaggagacaagtgct

SEQ ID NO: 25566 - DNA, 25 bp, Probe Sequence
tgttcaataaaggagacaagtgctt

SEQ ID NO: 25567 - DNA, 25 bp, Probe Sequence
catcaagaaactctaccaggtgaag

SEQ ID NO: 25568 - DNA, 25 bp, Probe Sequence
agatgttcaataaaggagacaagtg

SEQ ID NO: 25569 - DNA, 25 bp, Probe Sequence
cagatgttcaataaaggagacaagt

SEQ ID NO: 25570 - DNA, 25 bp, Probe Sequence
gtataaggtctctgatgccactgga

SEQ ID NO: 25571 - DNA, 25 bp, Probe Sequence
aactgctgatatctgatgactgctt

SEQ ID NO: 25572 - DNA, 25 bp, Probe Sequence
gctctgtataaggtctctgatgcca

SEQ ID NO: 25573 - DNA, 25 bp, Probe Sequence
tgtataaggtctctgatgccactgg

SEQ ID NO: 25574 - DNA, 25 bp, Probe Sequence
gaactgctgatatctgatgactgct

SEQ ID NO: 25575 - DNA, 25 bp, Probe Sequence
atcaagaaactctaccaggtgaagg

SEQ ID NO: 25576 - DNA, 25 bp, Probe Sequence
cagctctgtataaggtctctgatgc

SEQ ID NO: 25577 - DNA, 25 bp, Probe Sequence
gcagctctgtataaggtctctgatg

SEQ ID NO: 25578 - DNA, 25 bp, Probe Sequence
tataaggtctctgatgccactggac

SEQ ID NO: 25579 - DNA, 25 bp, Probe Sequence
tgaactgctgatatctgatgactgc

SEQ ID NO: 25580 - DNA, 25 bp, Probe Sequence
ccatcaagaaactctaccaggtgaa

SEQ ID NO: 25581 - DNA, 25 bp, Probe Sequence
tcgttctccttacaatcaagttctt

SEQ ID NO: 25582 - DNA, 25 bp, Probe Sequence
atcgttctccttacaatcaagttct

SEQ ID NO: 25583 - DNA, 25 bp, Probe Sequence
aatcgttctccttacaatcaagttc

SEQ ID NO: 25584 - DNA, 25 bp, Probe Sequence
cgttctccttacaatcaagttcttg

SEQ ID NO: 25585 - DNA, 25 bp, Probe Sequence
acggtttatgagcacacaattatag

SEQ ID NO: 25586 - DNA, 25 bp, Probe Sequence
gacggtttatgagcacacaattata

SEQ ID NO: 25587 - DNA, 25 bp, Probe Sequence
cggtttatgagcacacaattatagc

SEQ ID NO: 25588 - DNA, 25 bp, Probe Sequence
gccttatacatctggtcttacaaag

SEQ ID NO: 25589 - DNA, 25 bp, Probe Sequence
ttgttgccttatcttcttccaaatg

SEQ ID NO: 25590 - DNA, 25 bp, Probe Sequence
cttgttgccttatcttcttccaaat

SEQ ID NO: 25591 - DNA, 25 bp, Probe Sequence
aaatcgttctccttacaatcaagtt

SEQ ID NO: 25592 - DNA, 25 bp, Probe Sequence
gttgccttatcttcttccaaatgta

SEQ ID NO: 25593 - DNA, 25 bp, Probe Sequence
tgccttatcttcttccaaatgtact

SEQ ID NO: 25594 - DNA, 25 bp, Probe Sequence
tgttgccttatcttcttccaaatgt

SEQ ID NO: 25595 - DNA, 25 bp, Probe Sequence
gccttatcttcttccaaatgtactg

SEQ ID NO: 25596 - DNA, 25 bp, Probe Sequence
ggacggtttatgagcacacaattat

SEQ ID NO: 25597 - DNA, 25 bp, Probe Sequence
gctgcctctgtaaattcatgtattc

SEQ ID NO: 25598 - DNA, 25 bp, Probe Sequence
ccttgttgccttatcttcttccaaa

SEQ ID NO: 25599 - DNA, 25 bp, Probe Sequence
ttgccttgttgccttatcttcttcc

SEQ ID NO: 25600 - DNA, 25 bp, Probe Sequence
aggcatccaatttgtaaaccaatta

SEQ ID NO: 25601 - DNA, 25 bp, Probe Sequence
caggcatccaatttgtaaaccaatt

SEQ ID NO: 25602 - DNA, 25 bp, Probe Sequence
tgctgcctctgtaaattcatgtatt

SEQ ID NO: 25603 - DNA, 25 bp, Probe Sequence
tatgctgcctctgtaaattcatgta

SEQ ID NO: 25604 - DNA, 25 bp, Probe Sequence
tttgccttgttgccttatcttcttc

SEQ ID NO: 25605 - DNA, 25 bp, Probe Sequence
cacctgaatgagcatctctataaca

SEQ ID NO: 25606 - DNA, 25 bp, Probe Sequence
acctgaatgagcatctctataacat

SEQ ID NO: 25607 - DNA, 25 bp, Probe Sequence
ccacctgaatgagcatctctataac

SEQ ID NO: 25608 - DNA, 25 bp, Probe Sequence
tccacctgaatgagcatctctataa

SEQ ID NO: 25609 - DNA, 25 bp, Probe Sequence
ttccacctgaatgagcatctctata

SEQ ID NO: 25610 - DNA, 25 bp, Probe Sequence
gaacattctcaataaggttgtgaca

SEQ ID NO: 25611 - DNA, 25 bp, Probe Sequence
tgaacattctcaataaggttgtgac

SEQ ID NO: 25612 - DNA, 25 bp, Probe Sequence
aacattctcaataaggttgtgacac

SEQ ID NO: 25613 - DNA, 25 bp, Probe Sequence
attctcaataaggttgtgacacgac

SEQ ID NO: 25614 - DNA, 25 bp, Probe Sequence
cattctcaataaggttgtgacacga

SEQ ID NO: 25615 - DNA, 25 bp, Probe Sequence
atgaacattctcaataaggttgtga

SEQ ID NO: 25616 - DNA, 25 bp, Probe Sequence
ctgactatgtattcctgaactggag

SEQ ID NO: 25617 - DNA, 25 bp, Probe Sequence
acattctcaataaggttgtgacacg

SEQ ID NO: 25618 - DNA, 25 bp, Probe Sequence
cctgaatgagcatctctataacatg

SEQ ID NO: 25619 - DNA, 25 bp, Probe Sequence
gttccacctgaatgagcatctctat

SEQ ID NO: 25620 - DNA, 25 bp, Probe Sequence
catgaacattctcaataaggttgtg

SEQ ID NO: 25621 - DNA, 25 bp, Probe Sequence
ctgaatgagcatctctataacatga

SEQ ID NO: 25622 - DNA, 25 bp, Probe Sequence
agctgactatgtattcctgaactgg

SEQ ID NO: 25623 - DNA, 25 bp, Probe Sequence
tgactatgtattcctgaactggagc

SEQ ID NO: 25624 - DNA, 25 bp, Probe Sequence
gctgactatgtattcctgaactgga

SEQ ID NO: 25625 - DNA, 25 bp, Probe Sequence
ctctaggacactctaacaagctctg

SEQ ID NO: 25626 - DNA, 25 bp, Probe Sequence
ttctcaataaggttgtgacacgaca

SEQ ID NO: 25627 - DNA, 25 bp, Probe Sequence
tgaatgagcatctctataacatgat

SEQ ID NO: 25628 - DNA, 25 bp, Probe Sequence
gactatgtattcctgaactggagcc

SEQ ID NO: 25629 - DNA, 25 bp, Probe Sequence
acaagttaaggtatctggtatctgc

SEQ ID NO: 25630 - DNA, 25 bp, Probe Sequence
ggttagataagtccttgtgtagcaa

SEQ ID NO: 25631 - DNA, 25 bp, Probe Sequence
gttcacctgtgtactgagtattgat

SEQ ID NO: 25632 - DNA, 25 bp, Probe Sequence
tcacctgtgtactgagtattgataa

SEQ ID NO: 25633 - DNA, 25 bp, Probe Sequence
ttcacctgtgtactgagtattgata

SEQ ID NO: 25634 - DNA, 25 bp, Probe Sequence
aggttagataagtccttgtgtagca

SEQ ID NO: 25635 - DNA, 25 bp, Probe Sequence
cagaacacactgagacttgaatcaa

SEQ ID NO: 25636 - DNA, 25 bp, Probe Sequence
cacagaacacactgagacttgaatc

SEQ ID NO: 25637 - DNA, 25 bp, Probe Sequence
gttaaggtatctggtatctgcatgt

SEQ ID NO: 25638 - DNA, 25 bp, Probe Sequence
agttaaggtatctggtatctgcatg

SEQ ID NO: 25639 - DNA, 25 bp, Probe Sequence
caagttaaggtatctggtatctgca

SEQ ID NO: 25640 - DNA, 25 bp, Probe Sequence
tacaagttaaggtatctggtatctg

SEQ ID NO: 25641 - DNA, 25 bp, Probe Sequence
ctggttcacctgtgtactgagtatt

SEQ ID NO: 25642 - DNA, 25 bp, Probe Sequence
aagttaaggtatctggtatctgcat

SEQ ID NO: 25643 - DNA, 25 bp, Probe Sequence
ggttcacctgtgtactgagtattga

SEQ ID NO: 25644 - DNA, 25 bp, Probe Sequence
tttatatttgtgtgaggacttctgc

SEQ ID NO: 25645 - DNA, 25 bp, Probe Sequence
acagaacacactgagacttgaatca

SEQ ID NO: 25646 - DNA, 25 bp, Probe Sequence
gctttatatttgtgtgaggacttct

SEQ ID NO: 25647 - DNA, 25 bp, Probe Sequence
taaggtatctggtatctgcatgtaa

SEQ ID NO: 25648 - DNA, 25 bp, Probe Sequence
ttaaggtatctggtatctgcatgta

SEQ ID NO: 25649 - DNA, 25 bp, Probe Sequence
tggttcacctgtgtactgagtattg

SEQ ID NO: 25650 - DNA, 25 bp, Probe Sequence
taagaatggaggtaaagcgaaggat

SEQ ID NO: 25651 - DNA, 25 bp, Probe Sequence
atcttacagtcagcacagaacacac

SEQ ID NO: 25652 - DNA, 25 bp, Probe Sequence
catcttacagtcagcacagaacaca

SEQ ID NO: 25653 - DNA, 25 bp, Probe Sequence
attcaacactgccaatgatgataac

SEQ ID NO: 25654 - DNA, 25 bp, Probe Sequence
gattcaacactgccaatgatgataa

SEQ ID NO: 25655 - DNA, 25 bp, Probe Sequence
agattcaacactgccaatgatgata

SEQ ID NO: 25656 - DNA, 25 bp, Probe Sequence
agtgtcatcagaagataacttgagc

SEQ ID NO: 25657 - DNA, 25 bp, Probe Sequence
tgtcatcagaagataacttgagcac

SEQ ID NO: 25658 - DNA, 25 bp, Probe Sequence
gtgtcatcagaagataacttgagca

SEQ ID NO: 25659 - DNA, 25 bp, Probe Sequence
cagtgtcatcagaagataacttgag

SEQ ID NO: 25660 - DNA, 25 bp, Probe Sequence
gcagtgtcatcagaagataacttga

SEQ ID NO: 25661 - DNA, 25 bp, Probe Sequence
agcagtgtcatcagaagataacttg

SEQ ID NO: 25662 - DNA, 25 bp, Probe Sequence
cagcagtgtcatcagaagataactt

SEQ ID NO: 25663 - DNA, 25 bp, Probe Sequence
gatgaagattctcctgtgctagatg

SEQ ID NO: 25664 - DNA, 25 bp, Probe Sequence
ttaatacagcagtgtcatcagaaga

SEQ ID NO: 25665 - DNA, 25 bp, Probe Sequence
tacagcagtgtcatcagaagataac

SEQ ID NO: 25666 - DNA, 25 bp, Probe Sequence
atacagcagtgtcatcagaagataa

SEQ ID NO: 25667 - DNA, 25 bp, Probe Sequence
aatacagcagtgtcatcagaagata

SEQ ID NO: 25668 - DNA, 25 bp, Probe Sequence
taatacagcagtgtcatcagaagat

SEQ ID NO: 25669 - DNA, 25 bp, Probe Sequence
gtcatcagaagataacttgagcacc

SEQ ID NO: 25670 - DNA, 25 bp, Probe Sequence
atgaagattctcctgtgctagatgt

SEQ ID NO: 25671 - DNA, 25 bp, Probe Sequence
gagattcaacactgccaatgatgat

SEQ ID NO: 25672 - DNA, 25 bp, Probe Sequence
acagcagtgtcatcagaagataact

SEQ ID NO: 25673 - DNA, 25 bp, Probe Sequence
ttcaacactgccaatgatgataacg

SEQ ID NO: 25674 - DNA, 25 bp, Probe Sequence
tgaagattctcctgtgctagatgtg

SEQ ID NO: 25675 - DNA, 25 bp, Probe Sequence
atattctggagaagtgcggagattc

SEQ ID NO: 25676 - DNA, 25 bp, Probe Sequence
ggatgaagattctcctgtgctagat

SEQ ID NO: 25677 - DNA, 25 bp, Probe Sequence
tacacttattggaactctgcttgat

SEQ ID NO: 25678 - DNA, 25 bp, Probe Sequence
atacacttattggaactctgcttga

SEQ ID NO: 25679 - DNA, 25 bp, Probe Sequence
catacacttattggaactctgcttg

SEQ ID NO: 25680 - DNA, 25 bp, Probe Sequence
tcatacacttattggaactctgctt

SEQ ID NO: 25681 - DNA, 25 bp, Probe Sequence
atccaactaatgccttactcttctt

SEQ ID NO: 25682 - DNA, 25 bp, Probe Sequence
acacttattggaactctgcttgatt

SEQ ID NO: 25683 - DNA, 25 bp, Probe Sequence
ttcatacacttattggaactctgct

SEQ ID NO: 25684 - DNA, 25 bp, Probe Sequence
ccaactaatgccttactcttcttga

SEQ ID NO: 25685 - DNA, 25 bp, Probe Sequence
tccaactaatgccttactcttcttg

SEQ ID NO: 25686 - DNA, 25 bp, Probe Sequence
tattcctcctgctcatattgtgatt

SEQ ID NO: 25687 - DNA, 25 bp, Probe Sequence
ttattcctcctgctcatattgtgat

SEQ ID NO: 25688 - DNA, 25 bp, Probe Sequence
gatccaactaatgccttactcttct

SEQ ID NO: 25689 - DNA, 25 bp, Probe Sequence
tgatccaactaatgccttactcttc

SEQ ID NO: 25690 - DNA, 25 bp, Probe Sequence
atgatccaactaatgccttactctt

SEQ ID NO: 25691 - DNA, 25 bp, Probe Sequence
tgccattcacttcataatccagtag

SEQ ID NO: 25692 - DNA, 25 bp, Probe Sequence
attcctcctgctcatattgtgattc

SEQ ID NO: 25693 - DNA, 25 bp, Probe Sequence
caactaatgccttactcttcttgaa

SEQ ID NO: 25694 - DNA, 25 bp, Probe Sequence
tatgtagataacaagacctcagtgc

SEQ ID NO: 25695 - DNA, 25 bp, Probe Sequence
atccagtgatccttacaagttagaa

SEQ ID NO: 25696 - DNA, 25 bp, Probe Sequence
gccattcacttcataatccagtagg

SEQ ID NO: 25697 - DNA, 25 bp, Probe Sequence
tagataacaagacctcagtgccttc

SEQ ID NO: 25698 - DNA, 25 bp, Probe Sequence
catgatccaactaatgccttactct

SEQ ID NO: 25699 - DNA, 25 bp, Probe Sequence
tctgttctacatagatgcttagtcc

SEQ ID NO: 25700 - DNA, 25 bp, Probe Sequence
ttcctcctgctcatattgtgattct

SEQ ID NO: 25701 - DNA, 25 bp, Probe Sequence
gtcctggtcaactatatcttcttca

SEQ ID NO: 25702 - DNA, 25 bp, Probe Sequence
cgtcctggtcaactatatcttcttc

SEQ ID NO: 25703 - DNA, 25 bp, Probe Sequence
tcgtcctggtcaactatatcttctt

SEQ ID NO: 25704 - DNA, 25 bp, Probe Sequence
tcctggtcaactatatcttcttcaa

SEQ ID NO: 25705 - DNA, 25 bp, Probe Sequence
ctcgtcctggtcaactatatcttct

SEQ ID NO: 25706 - DNA, 25 bp, Probe Sequence
catcaagcactactatgagtcagag

SEQ ID NO: 25707 - DNA, 25 bp, Probe Sequence
acatcaagcactactatgagtcaga

SEQ ID NO: 25708 - DNA, 25 bp, Probe Sequence
gcttatgtgaacatgagtaaccatc

SEQ ID NO: 25709 - DNA, 25 bp, Probe Sequence
cctcgtcctggtcaactatatcttc

SEQ ID NO: 25710 - DNA, 25 bp, Probe Sequence
catcctcgtcctggtcaactatatc

SEQ ID NO: 25711 - DNA, 25 bp, Probe Sequence
atcaagcactactatgagtcagagg

SEQ ID NO: 25712 - DNA, 25 bp, Probe Sequence
tgcttatgtgaacatgagtaaccat

SEQ ID NO: 25713 - DNA, 25 bp, Probe Sequence
ctcagcagacatcaagcactactat

SEQ ID NO: 25714 - DNA, 25 bp, Probe Sequence
ctatgagtcagaggtcttggctatg

SEQ ID NO: 25715 - DNA, 25 bp, Probe Sequence
atcctcgtcctggtcaactatatct

SEQ ID NO: 25716 - DNA, 25 bp, Probe Sequence
cactactatgagtcagaggtcttgg

SEQ ID NO: 25717 - DNA, 25 bp, Probe Sequence
gacatcaagcactactatgagtcag

SEQ ID NO: 25718 - DNA, 25 bp, Probe Sequence
cagacatcaagcactactatgagtc

SEQ ID NO: 25719 - DNA, 25 bp, Probe Sequence
tactatgagtcagaggtcttggcta

SEQ ID NO: 25720 - DNA, 25 bp, Probe Sequence
agacatcaagcactactatgagtca

SEQ ID NO: 25721 - DNA, 25 bp, Probe Sequence
ctgcttatgtgaacatgagtaacca

SEQ ID NO: 25722 - DNA, 25 bp, Probe Sequence
tcctcgtcctggtcaactatatctt

SEQ ID NO: 25723 - DNA, 25 bp, Probe Sequence
cttatgtgaacatgagtaaccatca

SEQ ID NO: 25724 - DNA, 25 bp, Probe Sequence
agcagacatcaagcactactatgag

SEQ ID NO: 25725 - DNA, 25 bp, Probe Sequence
gcttcctctgtatctgaatcttgaa

SEQ ID NO: 25726 - DNA, 25 bp, Probe Sequence
tctgtatctgaatcttgaagactgc

SEQ ID NO: 25727 - DNA, 25 bp, Probe Sequence
cctctgtatctgaatcttgaagact

SEQ ID NO: 25728 - DNA, 25 bp, Probe Sequence
tcctctgtatctgaatcttgaagac

SEQ ID NO: 25729 - DNA, 25 bp, Probe Sequence
ttcctctgtatctgaatcttgaaga

SEQ ID NO: 25730 - DNA, 25 bp, Probe Sequence
ttcaagcagaacattcagaatcagg

SEQ ID NO: 25731 - DNA, 25 bp, Probe Sequence
ctctgtatctgaatcttgaagactg

SEQ ID NO: 25732 - DNA, 25 bp, Probe Sequence
caagcagaacattcagaatcaggtc

SEQ ID NO: 25733 - DNA, 25 bp, Probe Sequence
attcaagcagaacattcagaatcag

SEQ ID NO: 25734 - DNA, 25 bp, Probe Sequence
aattcaagcagaacattcagaatca

SEQ ID NO: 25735 - DNA, 25 bp, Probe Sequence
aagcagaacattcagaatcaggtca

SEQ ID NO: 25736 - DNA, 25 bp, Probe Sequence
tcaagcagaacattcagaatcaggt

SEQ ID NO: 25737 - DNA, 25 bp, Probe Sequence
agcttcctctgtatctgaatcttga

SEQ ID NO: 25738 - DNA, 25 bp, Probe Sequence
ggcgtatgggataactattgtgtaa

SEQ ID NO: 25739 - DNA, 25 bp, Probe Sequence
gtaggcgtatgggataactattgtg

SEQ ID NO: 25740 - DNA, 25 bp, Probe Sequence
gcgtatgggataactattgtgtaaa

SEQ ID NO: 25741 - DNA, 25 bp, Probe Sequence
ctgtatctgaatcttgaagactgca

SEQ ID NO: 25742 - DNA, 25 bp, Probe Sequence
tgtatctgaatcttgaagactgcaa

SEQ ID NO: 25743 - DNA, 25 bp, Probe Sequence
aggcgtatgggataactattgtgta

SEQ ID NO: 25744 - DNA, 25 bp, Probe Sequence
taggcgtatgggataactattgtgt

SEQ ID NO: 25745 - DNA, 25 bp, Probe Sequence
gaatgtcttctctgaaaggttgaat

SEQ ID NO: 25746 - DNA, 25 bp, Probe Sequence
agcagaacattcagaatcaggtcag

SEQ ID NO: 25747 - DNA, 25 bp, Probe Sequence
tgtcttctctgaaaggttgaattga

SEQ ID NO: 25748 - DNA, 25 bp, Probe Sequence
atgtcttctctgaaaggttgaattg

SEQ ID NO: 25749 - DNA, 25 bp, Probe Sequence
gcttctacacaggagtctatattct

SEQ ID NO: 25750 - DNA, 25 bp, Probe Sequence
caaggatgaggtgattaaggaagtc

SEQ ID NO: 25751 - DNA, 25 bp, Probe Sequence
acaaggatgaggtgattaaggaagt

SEQ ID NO: 25752 - DNA, 25 bp, Probe Sequence
cagcttctacacaggagtctatatt

SEQ ID NO: 25753 - DNA, 25 bp, Probe Sequence
cacaaggatgaggtgattaaggaag

SEQ ID NO: 25754 - DNA, 25 bp, Probe Sequence
acaggagtctatattctgatcggag

SEQ ID NO: 25755 - DNA, 25 bp, Probe Sequence
gatgaggtgattaaggaagtccagg

SEQ ID NO: 25756 - DNA, 25 bp, Probe Sequence
agcttctacacaggagtctatattc

SEQ ID NO: 25757 - DNA, 25 bp, Probe Sequence
atcttcagtatgatcttgtgctgtg

SEQ ID NO: 25758 - DNA, 25 bp, Probe Sequence
ccagcttctacacaggagtctatat

SEQ ID NO: 25759 - DNA, 25 bp, Probe Sequence
cacaggagtctatattctgatcgga

SEQ ID NO: 25760 - DNA, 25 bp, Probe Sequence
tacacaggagtctatattctgatcg

SEQ ID NO: 25761 - DNA, 25 bp, Probe Sequence
acacaggagtctatattctgatcgg

SEQ ID NO: 25762 - DNA, 25 bp, Probe Sequence
atgaggtgattaaggaagtccagga

SEQ ID NO: 25763 - DNA, 25 bp, Probe Sequence
gggtttggtttgcttggtttatatt

SEQ ID NO: 25764 - DNA, 25 bp, Probe Sequence
gtggaacagtttatctcagacatct

SEQ ID NO: 25765 - DNA, 25 bp, Probe Sequence
ttctacacaggagtctatattctga

SEQ ID NO: 25766 - DNA, 25 bp, Probe Sequence
ataataattccagcttctacacagg

SEQ ID NO: 25767 - DNA, 25 bp, Probe Sequence
cagtatgatcttgtgctgtgctatc

SEQ ID NO: 25768 - DNA, 25 bp, Probe Sequence
ggatttaacttcatcttctggcttg

SEQ ID NO: 25769 - DNA, 25 bp, Probe Sequence
agtatgatcttgtgctgtgctatcc

SEQ ID NO: 25770 - DNA, 25 bp, Probe Sequence
aaggatgaggtgattaaggaagtcc

SEQ ID NO: 25771 - DNA, 25 bp, Probe Sequence
ggtttggtttgcttggtttatattt

SEQ ID NO: 25772 - DNA, 25 bp, Probe Sequence
gatttaacttcatcttctggcttgc

SEQ ID NO: 25773 - DNA, 25 bp, Probe Sequence
acttattatatgactaggtgcttgc

SEQ ID NO: 25774 - DNA, 25 bp, Probe Sequence
cttattatatgactaggtgcttgct

SEQ ID NO: 25775 - DNA, 25 bp, Probe Sequence
ttattatatgactaggtgcttgctt

SEQ ID NO: 25776 - DNA, 25 bp, Probe Sequence
aaatacccactaacaaagaacaagc

SEQ ID NO: 25777 - DNA, 25 bp, Probe Sequence
atacccactaacaaagaacaagcat

SEQ ID NO: 25778 - DNA, 25 bp, Probe Sequence
acccactaacaaagaacaagcatta

SEQ ID NO: 25779 - DNA, 25 bp, Probe Sequence
tacccactaacaaagaacaagcatt

SEQ ID NO: 25780 - DNA, 25 bp, Probe Sequence
aatacccactaacaaagaacaagca

SEQ ID NO: 25781 - DNA, 25 bp, Probe Sequence
tgtgctgtatatgaatggtattctg

SEQ ID NO: 25782 - DNA, 25 bp, Probe Sequence
gtgctgtatatgaatggtattctga

SEQ ID NO: 25783 - DNA, 25 bp, Probe Sequence
aactgttggaaatgtaacttgaagc

SEQ ID NO: 25784 - DNA, 25 bp, Probe Sequence
ttggctgtcatcaacttattatatg

SEQ ID NO: 25785 - DNA, 25 bp, Probe Sequence
agaaatacccactaacaaagaacaa

SEQ ID NO: 25786 - DNA, 25 bp, Probe Sequence
aagaaatacccactaacaaagaaca

SEQ ID NO: 25787 - DNA, 25 bp, Probe Sequence
ttgtgctgtatatgaatggtattct

SEQ ID NO: 25788 - DNA, 25 bp, Probe Sequence
gctgctttaagaagaaatacccact

SEQ ID NO: 25789 - DNA, 25 bp, Probe Sequence
gaaatacccactaacaaagaacaag

SEQ ID NO: 25790 - DNA, 25 bp, Probe Sequence
actgttggaaatgtaacttgaagca

SEQ ID NO: 25791 - DNA, 25 bp, Probe Sequence
ctgctttaagaagaaatacccacta

SEQ ID NO: 25792 - DNA, 25 bp, Probe Sequence
gaagaaatacccactaacaaagaac

SEQ ID NO: 25793 - DNA, 25 bp, Probe Sequence
tgctgtatatgaatggtattctgaa

SEQ ID NO: 25794 - DNA, 25 bp, Probe Sequence
agaagaaatacccactaacaaagaa

SEQ ID NO: 25795 - DNA, 25 bp, Probe Sequence
aagaagaaatacccactaacaaaga

SEQ ID NO: 25796 - DNA, 25 bp, Probe Sequence
cccactaacaaagaacaagcattag

SEQ ID NO: 25797 - DNA, 25 bp, Probe Sequence
ttagagataaggtgatgtcagagtt

SEQ ID NO: 25798 - DNA, 25 bp, Probe Sequence
gcaaggagaactattgtcttatgat

SEQ ID NO: 25799 - DNA, 25 bp, Probe Sequence
gaagagtatcagaagtggctacgag

SEQ ID NO: 25800 - DNA, 25 bp, Probe Sequence
ttctgtctcttatcatgttggtgga

SEQ ID NO: 25801 - DNA, 25 bp, Probe Sequence
ggctatgtgtttagagataaggtga

SEQ ID NO: 25802 - DNA, 25 bp, Probe Sequence
tggctatgtgtttagagataaggtg

SEQ ID NO: 25803 - DNA, 25 bp, Probe Sequence
ctggctatgtgtttagagataaggt

SEQ ID NO: 25804 - DNA, 25 bp, Probe Sequence
ttgctggctatgtgtttagagataa

SEQ ID NO: 25805 - DNA, 25 bp, Probe Sequence
attgctggctatgtgtttagagata

SEQ ID NO: 25806 - DNA, 25 bp, Probe Sequence
ttgccatctttctgtctcttatcat

SEQ ID NO: 25807 - DNA, 25 bp, Probe Sequence
tttgccatctttctgtctcttatca

SEQ ID NO: 25808 - DNA, 25 bp, Probe Sequence
gtttgccatctttctgtctcttatc

SEQ ID NO: 25809 - DNA, 25 bp, Probe Sequence
tgctggctatgtgtttagagataag

SEQ ID NO: 25810 - DNA, 25 bp, Probe Sequence
tgtgtttagagataaggtgatgtca

SEQ ID NO: 25811 - DNA, 25 bp, Probe Sequence
gctggctatgtgtttagagataagg

SEQ ID NO: 25812 - DNA, 25 bp, Probe Sequence
tctgtctcttatcatgttggtggag

SEQ ID NO: 25813 - DNA, 25 bp, Probe Sequence
tgcaaggagaactattgtcttatga

SEQ ID NO: 25814 - DNA, 25 bp, Probe Sequence
ctgcaaggagaactattgtcttatg

SEQ ID NO: 25815 - DNA, 25 bp, Probe Sequence
gtgtttagagataaggtgatgtcag

SEQ ID NO: 25816 - DNA, 25 bp, Probe Sequence
tgtttagagataaggtgatgtcaga

SEQ ID NO: 25817 - DNA, 25 bp, Probe Sequence
gtgaagagtatcagaagtggctacg

SEQ ID NO: 25818 - DNA, 25 bp, Probe Sequence
cgtgaagagtatcagaagtggctac

SEQ ID NO: 25819 - DNA, 25 bp, Probe Sequence
cgtttgccatctttctgtctcttat

SEQ ID NO: 25820 - DNA, 25 bp, Probe Sequence
agagataaggtgatgtcagagttta

SEQ ID NO: 25821 - DNA, 25 bp, Probe Sequence
ggcaaagatgatgtttccagattac

SEQ ID NO: 25822 - DNA, 25 bp, Probe Sequence
acctggagaacttcataaagatgtc

SEQ ID NO: 25823 - DNA, 25 bp, Probe Sequence
cacctggagaacttcataaagatgt

SEQ ID NO: 25824 - DNA, 25 bp, Probe Sequence
cctggagaacttcataaagatgtct

SEQ ID NO: 25825 - DNA, 25 bp, Probe Sequence
gggcaaagatgatgtttccagatta

SEQ ID NO: 25826 - DNA, 25 bp, Probe Sequence
ccacctggagaacttcataaagatg

SEQ ID NO: 25827 - DNA, 25 bp, Probe Sequence
gcaaagatgatgtttccagattaca

SEQ ID NO: 25828 - DNA, 25 bp, Probe Sequence
gaacttcataaagatgtctcacagc

SEQ ID NO: 25829 - DNA, 25 bp, Probe Sequence
agatgatgtttccagattacactcc

SEQ ID NO: 25830 - DNA, 25 bp, Probe Sequence
atgatgtttccagattacactccag

SEQ ID NO: 25831 - DNA, 25 bp, Probe Sequence
gatgatgtttccagattacactcca

SEQ ID NO: 25832 - DNA, 25 bp, Probe Sequence
aacttcataaagatgtctcacagcc

SEQ ID NO: 25833 - DNA, 25 bp, Probe Sequence
tataaacatcacagaacatcctgga

SEQ ID NO: 25834 - DNA, 25 bp, Probe Sequence
aagatgatgtttccagattacactc

SEQ ID NO: 25835 - DNA, 25 bp, Probe Sequence
agaacttcataaagatgtctcacag

SEQ ID NO: 25836 - DNA, 25 bp, Probe Sequence
caaagatgatgtttccagattacac

SEQ ID NO: 25837 - DNA, 25 bp, Probe Sequence
aaagatgatgtttccagattacact

SEQ ID NO: 25838 - DNA, 25 bp, Probe Sequence
tctcagaagggtacaaggatttcag

SEQ ID NO: 25839 - DNA, 25 bp, Probe Sequence
taacagccacctggagaacttcata

SEQ ID NO: 25840 - DNA, 25 bp, Probe Sequence
gtctcagaagggtacaaggatttca

SEQ ID NO: 25841 - DNA, 25 bp, Probe Sequence
gccacctggagaacttcataaagat

SEQ ID NO: 25842 - DNA, 25 bp, Probe Sequence
cttcataaagatgtctcacagccct

SEQ ID NO: 25843 - DNA, 25 bp, Probe Sequence
ttataaacatcacagaacatcctgg

SEQ ID NO: 25844 - DNA, 25 bp, Probe Sequence
ctcagaagggtacaaggatttcagg

SEQ ID NO: 25845 - DNA, 25 bp, Probe Sequence
aatgaagaagatggagatggagatg

SEQ ID NO: 25846 - DNA, 25 bp, Probe Sequence
tgatggagattaagatgccttgaat

SEQ ID NO: 25847 - DNA, 25 bp, Probe Sequence
ttgatggagattaagatgccttgaa

SEQ ID NO: 25848 - DNA, 25 bp, Probe Sequence
ggagattaagatgccttgaattgtc

SEQ ID NO: 25849 - DNA, 25 bp, Probe Sequence
cttgatggagattaagatgccttga

SEQ ID NO: 25850 - DNA, 25 bp, Probe Sequence
tggagattaagatgccttgaattgt

SEQ ID NO: 25851 - DNA, 25 bp, Probe Sequence
atggagattaagatgccttgaattg

SEQ ID NO: 25852 - DNA, 25 bp, Probe Sequence
gatggagattaagatgccttgaatt

SEQ ID NO: 25853 - DNA, 25 bp, Probe Sequence
gagattaagatgccttgaattgtct

SEQ ID NO: 25854 - DNA, 25 bp, Probe Sequence
atgaagaagatggagatggagatgg

SEQ ID NO: 25855 - DNA, 25 bp, Probe Sequence
aacaacagaactcttcaagaacctt

SEQ ID NO: 25856 - DNA, 25 bp, Probe Sequence
gaagaagatggagatggagatggag

SEQ ID NO: 25857 - DNA, 25 bp, Probe Sequence
tagaacaacagaactcttcaagaac

SEQ ID NO: 25858 - DNA, 25 bp, Probe Sequence
gaacaacagaactcttcaagaacct

SEQ ID NO: 25859 - DNA, 25 bp, Probe Sequence
agaacaacagaactcttcaagaacc

SEQ ID NO: 25860 - DNA, 25 bp, Probe Sequence
agattaagatgccttgaattgtcta

SEQ ID NO: 25861 - DNA, 25 bp, Probe Sequence
ttagaacaacagaactcttcaagaa

SEQ ID NO: 25862 - DNA, 25 bp, Probe Sequence
gccagaatctcattactgcttcatt

SEQ ID NO: 25863 - DNA, 25 bp, Probe Sequence
tgaagaagatggagatggagatgga

SEQ ID NO: 25864 - DNA, 25 bp, Probe Sequence
attaagatgccttgaattgtctagg

SEQ ID NO: 25865 - DNA, 25 bp, Probe Sequence
gattaagatgccttgaattgtctag

SEQ ID NO: 25866 - DNA, 25 bp, Probe Sequence
tccattcagtgcagcatatacaata

SEQ ID NO: 25867 - DNA, 25 bp, Probe Sequence
agctgtgacttataatggagttgat

SEQ ID NO: 25868 - DNA, 25 bp, Probe Sequence
ccattcagtgcagcatatacaataa

SEQ ID NO: 25869 - DNA, 25 bp, Probe Sequence
gtcattctcctggtcattgtagtat

SEQ ID NO: 25870 - DNA, 25 bp, Probe Sequence
ttctcctggtcattgtagtattgtt

SEQ ID NO: 25871 - DNA, 25 bp, Probe Sequence
attctcctggtcattgtagtattgt

SEQ ID NO: 25872 - DNA, 25 bp, Probe Sequence
cattctcctggtcattgtagtattg

SEQ ID NO: 25873 - DNA, 25 bp, Probe Sequence
tcattctcctggtcattgtagtatt

SEQ ID NO: 25874 - DNA, 25 bp, Probe Sequence
cgtcattctcctggtcattgtagta

SEQ ID NO: 25875 - DNA, 25 bp, Probe Sequence
atcgtcattctcctggtcattgtag

SEQ ID NO: 25876 - DNA, 25 bp, Probe Sequence
catcgtcattctcctggtcattgta

SEQ ID NO: 25877 - DNA, 25 bp, Probe Sequence
cctggtcattgtagtattgtttgtg

SEQ ID NO: 25878 - DNA, 25 bp, Probe Sequence
tcctggtcattgtagtattgtttgt

SEQ ID NO: 25879 - DNA, 25 bp, Probe Sequence
ctcctggtcattgtagtattgtttg

SEQ ID NO: 25880 - DNA, 25 bp, Probe Sequence
tctcctggtcattgtagtattgttt

SEQ ID NO: 25881 - DNA, 25 bp, Probe Sequence
tcgtcattctcctggtcattgtagt

SEQ ID NO: 25882 - DNA, 25 bp, Probe Sequence
ctggtcattgtagtattgtttgtga

SEQ ID NO: 25883 - DNA, 25 bp, Probe Sequence
tggtcattgtagtattgtttgtgac

SEQ ID NO: 25884 - DNA, 25 bp, Probe Sequence
ctgcatcgtcattctcctggtcatt

SEQ ID NO: 25885 - DNA, 25 bp, Probe Sequence
ttcaagtgctctcatagttctatcc

SEQ ID NO: 25886 - DNA, 25 bp, Probe Sequence
aagtgctctcatagttctatcctct

SEQ ID NO: 25887 - DNA, 25 bp, Probe Sequence
caagtgctctcatagttctatcctc

SEQ ID NO: 25888 - DNA, 25 bp, Probe Sequence
agtgctctcatagttctatcctcta

SEQ ID NO: 25889 - DNA, 25 bp, Probe Sequence
tcaagtgctctcatagttctatcct

SEQ ID NO: 25890 - DNA, 25 bp, Probe Sequence
gtgctctcatagttctatcctctaa

SEQ ID NO: 25891 - DNA, 25 bp, Probe Sequence
tatgaataatagaggaactcacggc

SEQ ID NO: 25892 - DNA, 25 bp, Probe Sequence
caatgagatggtcaagaagtctgaa

SEQ ID NO: 25893 - DNA, 25 bp, Probe Sequence
gtaaggcagatgctaattataaggc

SEQ ID NO: 25894 - DNA, 25 bp, Probe Sequence
tggtctctgaactgtaattagcaag

SEQ ID NO: 25895 - DNA, 25 bp, Probe Sequence
tgctctcatagttctatcctctaat

SEQ ID NO: 25896 - DNA, 25 bp, Probe Sequence
ggtctctgaactgtaattagcaaga

SEQ ID NO: 25897 - DNA, 25 bp, Probe Sequence
atgaataatagaggaactcacggca

SEQ ID NO: 25898 - DNA, 25 bp, Probe Sequence
ttggtctctgaactgtaattagcaa

SEQ ID NO: 25899 - DNA, 25 bp, Probe Sequence
ctatgaataatagaggaactcacgg

SEQ ID NO: 25900 - DNA, 25 bp, Probe Sequence
tgtaaggcagatgctaattataagg

SEQ ID NO: 25901 - DNA, 25 bp, Probe Sequence
gtctctgaactgtaattagcaagaa

SEQ ID NO: 25902 - DNA, 25 bp, Probe Sequence
tctctgaactgtaattagcaagaag

SEQ ID NO: 25903 - DNA, 25 bp, Probe Sequence
cttacatcgagtagagaacatcagc

SEQ ID NO: 25904 - DNA, 25 bp, Probe Sequence
gcttacatcgagtagagaacatcag

SEQ ID NO: 25905 - DNA, 25 bp, Probe Sequence
aataatagaggaactcacggcactc

SEQ ID NO: 25906 - DNA, 25 bp, Probe Sequence
gaataatagaggaactcacggcact

SEQ ID NO: 25907 - DNA, 25 bp, Probe Sequence
ctctgaactgtaattagcaagaagt

SEQ ID NO: 25908 - DNA, 25 bp, Probe Sequence
aatccaatgagatggtcaagaagtc

SEQ ID NO: 25909 - DNA, 25 bp, Probe Sequence
gagatatgattaggagaagtggtgg

SEQ ID NO: 25910 - DNA, 25 bp, Probe Sequence
ggagatatgattaggagaagtggtg

SEQ ID NO: 25911 - DNA, 25 bp, Probe Sequence
gtatatgatgacttcctccactaca

SEQ ID NO: 25912 - DNA, 25 bp, Probe Sequence
tatatgatgacttcctccactacaa

SEQ ID NO: 25913 - DNA, 25 bp, Probe Sequence
agatatgattaggagaagtggtggc

SEQ ID NO: 25914 - DNA, 25 bp, Probe Sequence
ctatcaatgccattcagaagtcttg

SEQ ID NO: 25915 - DNA, 25 bp, Probe Sequence
agtatatgatgacttcctccactac

SEQ ID NO: 25916 - DNA, 25 bp, Probe Sequence
gctatcaatgccattcagaagtctt

SEQ ID NO: 25917 - DNA, 25 bp, Probe Sequence
tatactaaccaacaattctcagacc

SEQ ID NO: 25918 - DNA, 25 bp, Probe Sequence
aactgcctctgagaatgtgtatgtc

SEQ ID NO: 25919 - DNA, 25 bp, Probe Sequence
gaactgcctctgagaatgtgtatgt

SEQ ID NO: 25920 - DNA, 25 bp, Probe Sequence
ggaagatggtcagctatgaagtaat

SEQ ID NO: 25921 - DNA, 25 bp, Probe Sequence
ggactgcaactacatacatggaata

SEQ ID NO: 25922 - DNA, 25 bp, Probe Sequence
aagctatcaatgccattcagaagtc

SEQ ID NO: 25923 - DNA, 25 bp, Probe Sequence
cactatgtaggaggtttctatggag

SEQ ID NO: 25924 - DNA, 25 bp, Probe Sequence
ctgggagatatgattaggagaagtg

SEQ ID NO: 25925 - DNA, 25 bp, Probe Sequence
actatgtaggaggtttctatggagg

SEQ ID NO: 25926 - DNA, 25 bp, Probe Sequence
tgggatggattactggattgttaaa

SEQ ID NO: 25927 - DNA, 25 bp, Probe Sequence
ctgggatggattactggattgttaa

SEQ ID NO: 25928 - DNA, 25 bp, Probe Sequence
tatcaatgccattcagaagtcttgg

SEQ ID NO: 25929 - DNA, 25 bp, Probe Sequence
atatgatgacttcctccactacaaa

SEQ ID NO: 25930 - DNA, 25 bp, Probe Sequence
atactaaccaacaattctcagaccc

SEQ ID NO: 25931 - DNA, 25 bp, Probe Sequence
gggagatatgattaggagaagtggt

SEQ ID NO: 25932 - DNA, 25 bp, Probe Sequence
tgggagatatgattaggagaagtgg

SEQ ID NO: 25933 - DNA, 25 bp, Probe Sequence
cttctacttctggatgaatggtgac

SEQ ID NO: 25934 - DNA, 25 bp, Probe Sequence
ccttctacttctggatgaatggtga

SEQ ID NO: 25935 - DNA, 25 bp, Probe Sequence
ttctacttctggatgaatggtgacc

SEQ ID NO: 25936 - DNA, 25 bp, Probe Sequence
ctaaatgagaccagggaatcagaga

SEQ ID NO: 25937 - DNA, 25 bp, Probe Sequence
taaatgagaccagggaatcagagac

SEQ ID NO: 25938 - DNA, 25 bp, Probe Sequence
gaagaagaaagaggatgccctaaat

SEQ ID NO: 25939 - DNA, 25 bp, Probe Sequence
aagaagaaagaggatgccctaaatg

SEQ ID NO: 25940 - DNA, 25 bp, Probe Sequence
gaagaaagaggatgccctaaatgag

SEQ ID NO: 25941 - DNA, 25 bp, Probe Sequence
aagaaagaggatgccctaaatgaga

SEQ ID NO: 25942 - DNA, 25 bp, Probe Sequence
agaagaaagaggatgccctaaatga

SEQ ID NO: 25943 - DNA, 25 bp, Probe Sequence
agaagaagaaagaggatgccctaaa

SEQ ID NO: 25944 - DNA, 25 bp, Probe Sequence
aagaagaagaaagaggatgccctaa

SEQ ID NO: 25945 - DNA, 25 bp, Probe Sequence
cccttctacttctggatgaatggtg

SEQ ID NO: 25946 - DNA, 25 bp, Probe Sequence
tctacttctggatgaatggtgaccg

SEQ ID NO: 25947 - DNA, 25 bp, Probe Sequence
agaaagaggatgccctaaatgagac

SEQ ID NO: 25948 - DNA, 25 bp, Probe Sequence
caagaagaagaaagaggatgcccta

SEQ ID NO: 25949 - DNA, 25 bp, Probe Sequence
aatacaacgagctgctaaagtccta

SEQ ID NO: 25950 - DNA, 25 bp, Probe Sequence
cctaaatgagaccagggaatcagag

SEQ ID NO: 25951 - DNA, 25 bp, Probe Sequence
ctgagaggttgaccaggaaatacaa

SEQ ID NO: 25952 - DNA, 25 bp, Probe Sequence
gaaatacaacgagctgctaaagtcc

SEQ ID NO: 25953 - DNA, 25 bp, Probe Sequence
ggaaatacaacgagctgctaaagtc

SEQ ID NO: 25954 - DNA, 25 bp, Probe Sequence
atacaacgagctgctaaagtcctac

SEQ ID NO: 25955 - DNA, 25 bp, Probe Sequence
gaaacagacctgcatgaagttctac

SEQ ID NO: 25956 - DNA, 25 bp, Probe Sequence
atgagaccagggaatcagagacaaa

SEQ ID NO: 25957 - DNA, 25 bp, Probe Sequence
tataacacttctactcttcaccacg

SEQ ID NO: 25958 - DNA, 25 bp, Probe Sequence
aacataacagaggaagaagacacat

SEQ ID NO: 25959 - DNA, 25 bp, Probe Sequence
taacataacagaggaagaagacaca

SEQ ID NO: 25960 - DNA, 25 bp, Probe Sequence
acacttctactcttcaccacgatat

SEQ ID NO: 25961 - DNA, 25 bp, Probe Sequence
ccataacataacagaggaagaagac

SEQ ID NO: 25962 - DNA, 25 bp, Probe Sequence
aacacttctactcttcaccacgata

SEQ ID NO: 25963 - DNA, 25 bp, Probe Sequence
taacacttctactcttcaccacgat

SEQ ID NO: 25964 - DNA, 25 bp, Probe Sequence
ataacacttctactcttcaccacga

SEQ ID NO: 25965 - DNA, 25 bp, Probe Sequence
ataacataacagaggaagaagacac

SEQ ID NO: 25966 - DNA, 25 bp, Probe Sequence
cataacataacagaggaagaagaca

SEQ ID NO: 25967 - DNA, 25 bp, Probe Sequence
acataacagaggaagaagacacatg

SEQ ID NO: 25968 - DNA, 25 bp, Probe Sequence
atataacacttctactcttcaccac

SEQ ID NO: 25969 - DNA, 25 bp, Probe Sequence
cataacagaggaagaagacacatgg

SEQ ID NO: 25970 - DNA, 25 bp, Probe Sequence
cccataacataacagaggaagaaga

SEQ ID NO: 25971 - DNA, 25 bp, Probe Sequence
aatataacacttctactcttcacca

SEQ ID NO: 25972 - DNA, 25 bp, Probe Sequence
ttactaaagttgaaggagaaagcca

SEQ ID NO: 25973 - DNA, 25 bp, Probe Sequence
gttactaaagttgaaggagaaagcc

SEQ ID NO: 25974 - DNA, 25 bp, Probe Sequence
tactaaagttgaaggagaaagccag

SEQ ID NO: 25975 - DNA, 25 bp, Probe Sequence
ctcttcaccacgatatcatgttact

SEQ ID NO: 25976 - DNA, 25 bp, Probe Sequence
ctactcttcaccacgatatcatgtt

SEQ ID NO: 25977 - DNA, 25 bp, Probe Sequence
ttctactcttcaccacgatatcatg

SEQ ID NO: 25978 - DNA, 25 bp, Probe Sequence
cttctactcttcaccacgatatcat

SEQ ID NO: 25979 - DNA, 25 bp, Probe Sequence
actcttcaccacgatatcatgttac

SEQ ID NO: 25980 - DNA, 25 bp, Probe Sequence
cacttctactcttcaccacgatatc

SEQ ID NO: 25981 - DNA, 25 bp, Probe Sequence
tcggtgttctatttatttattgtct

SEQ ID NO: 25982 - DNA, 25 bp, Probe Sequence
tctcggtgttctatttatttattgt

SEQ ID NO: 25983 - DNA, 25 bp, Probe Sequence
ctcggtgttctatttatttattgtc

SEQ ID NO: 25984 - DNA, 25 bp, Probe Sequence
cggtgttctatttatttattgtctt

SEQ ID NO: 25985 - DNA, 25 bp, Probe Sequence
atctcggtgttctatttatttattg

SEQ ID NO: 25986 - DNA, 25 bp, Probe Sequence
cttcctgtaagaccttcgggtcaag

SEQ ID NO: 25987 - DNA, 25 bp, Probe Sequence
tcttcctgtaagaccttcgggtcaa

SEQ ID NO: 25988 - DNA, 25 bp, Probe Sequence
cactcatcactaaacagagcccaag

SEQ ID NO: 25989 - DNA, 25 bp, Probe Sequence
ccactcatcactaaacagagcccaa

SEQ ID NO: 25990 - DNA, 25 bp, Probe Sequence
actcatcactaaacagagcccaagc

SEQ ID NO: 25991 - DNA, 25 bp, Probe Sequence
ctcatcactaaacagagcccaagct

SEQ ID NO: 25992 - DNA, 25 bp, Probe Sequence
ctccccactcatcactaaacagagc

SEQ ID NO: 25993 - DNA, 25 bp, Probe Sequence
tcatcactaaacagagcccaagctt

SEQ ID NO: 25994 - DNA, 25 bp, Probe Sequence
gacccaataaaggctttgaacccaa

SEQ ID NO: 25995 - DNA, 25 bp, Probe Sequence
acccaataaaggctttgaacccaaa

SEQ ID NO: 25996 - DNA, 25 bp, Probe Sequence
cccaataaaggctttgaacccaaaa

SEQ ID NO: 25997 - DNA, 25 bp, Probe Sequence
aaacatcatctcccttctctttctc

SEQ ID NO: 25998 - DNA, 25 bp, Probe Sequence
taaacatcatctcccttctctttct

SEQ ID NO: 25999 - DNA, 25 bp, Probe Sequence
ttaaacatcatctcccttctctttc

SEQ ID NO: 26000 - DNA, 25 bp, Probe Sequence
atctcccttctctttctcgcataac

SEQ ID NO: 26001 - DNA, 25 bp, Probe Sequence
catctcccttctctttctcgcataa

SEQ ID NO: 26002 - DNA, 25 bp, Probe Sequence
aacatcatctcccttctctttctcg

SEQ ID NO: 26003 - DNA, 25 bp, Probe Sequence
catctcactctctggacctactagg

SEQ ID NO: 26004 - DNA, 25 bp, Probe Sequence
cccagctcagtatttaaacatcatc

SEQ ID NO: 26005 - DNA, 25 bp, Probe Sequence
tcccagctcagtatttaaacatcat

SEQ ID NO: 26006 - DNA, 25 bp, Probe Sequence
ccatctcactctctggacctactag

SEQ ID NO: 26007 - DNA, 25 bp, Probe Sequence
aacatcttaatctgcaccttcctcc

SEQ ID NO: 26008 - DNA, 25 bp, Probe Sequence
gctcagtatttaaacatcatctccc

SEQ ID NO: 26009 - DNA, 25 bp, Probe Sequence
ctcccagctcagtatttaaacatca

SEQ ID NO: 26010 - DNA, 25 bp, Probe Sequence
ccagctcagtatttaaacatcatct

SEQ ID NO: 26011 - DNA, 25 bp, Probe Sequence
ctcccttctctttctcgcataactc

SEQ ID NO: 26012 - DNA, 25 bp, Probe Sequence
cctcccagctcagtatttaaacatc

SEQ ID NO: 26013 - DNA, 25 bp, Probe Sequence
agctcagtatttaaacatcatctcc

SEQ ID NO: 26014 - DNA, 25 bp, Probe Sequence
aacaaacatcttaatctgcaccttc

SEQ ID NO: 26015 - DNA, 25 bp, Probe Sequence
aaacaaacatcttaatctgcacctt

SEQ ID NO: 26016 - DNA, 25 bp, Probe Sequence
tcatctcccttctctttctcgcata

SEQ ID NO: 26017 - DNA, 25 bp, Probe Sequence
aaacatcttaatctgcaccttcctc

SEQ ID NO: 26018 - DNA, 25 bp, Probe Sequence
tctcccttctctttctcgcataact

SEQ ID NO: 26019 - DNA, 25 bp, Probe Sequence
caaacatcttaatctgcaccttcct

SEQ ID NO: 26020 - DNA, 25 bp, Probe Sequence
catcttaatctgcaccttcctccac

SEQ ID NO: 26021 - DNA, 25 bp, Probe Sequence
ttaatgactggctacagagtaacaa

SEQ ID NO: 26022 - DNA, 25 bp, Probe Sequence
ttgagagaaggtagggtgtgtatat

SEQ ID NO: 26023 - DNA, 25 bp, Probe Sequence
tttgagagaaggtagggtgtgtata

SEQ ID NO: 26024 - DNA, 25 bp, Probe Sequence
ttcagattaatgactggctacagag

SEQ ID NO: 26025 - DNA, 25 bp, Probe Sequence
cttcagattaatgactggctacaga

SEQ ID NO: 26026 - DNA, 25 bp, Probe Sequence
cagattaatgactggctacagagta

SEQ ID NO: 26027 - DNA, 25 bp, Probe Sequence
attaatgactggctacagagtaaca

SEQ ID NO: 26028 - DNA, 25 bp, Probe Sequence
aaccttcagattaatgactggctac

SEQ ID NO: 26029 - DNA, 25 bp, Probe Sequence
atttgagagaaggtagggtgtgtat

SEQ ID NO: 26030 - DNA, 25 bp, Probe Sequence
ccttcagattaatgactggctacag

SEQ ID NO: 26031 - DNA, 25 bp, Probe Sequence
gattaatgactggctacagagtaac

SEQ ID NO: 26032 - DNA, 25 bp, Probe Sequence
agattaatgactggctacagagtaa

SEQ ID NO: 26033 - DNA, 25 bp, Probe Sequence
tcagattaatgactggctacagagt

SEQ ID NO: 26034 - DNA, 25 bp, Probe Sequence
accttcagattaatgactggctaca

SEQ ID NO: 26035 - DNA, 25 bp, Probe Sequence
tgagagaaggtagggtgtgtatata

SEQ ID NO: 26036 - DNA, 25 bp, Probe Sequence
catttgagagaaggtagggtgtgta

SEQ ID NO: 26037 - DNA, 25 bp, Probe Sequence
gtgtaaagactatgatctcatccca

SEQ ID NO: 26038 - DNA, 25 bp, Probe Sequence
tgtgtaaagactatgatctcatccc

SEQ ID NO: 26039 - DNA, 25 bp, Probe Sequence
taatgactggctacagagtaacaaa

SEQ ID NO: 26040 - DNA, 25 bp, Probe Sequence
tgtaaagactatgatctcatcccaa

SEQ ID NO: 26041 - DNA, 25 bp, Probe Sequence
taataaacctgtaagcccagcattt

SEQ ID NO: 26042 - DNA, 25 bp, Probe Sequence
gagagaaggtagggtgtgtatatat

SEQ ID NO: 26043 - DNA, 25 bp, Probe Sequence
ctaataaacctgtaagcccagcatt

SEQ ID NO: 26044 - DNA, 25 bp, Probe Sequence
agcatttgtgtaaagactatgatct

SEQ ID NO: 26045 - DNA, 25 bp, Probe Sequence
atataagttggtgtggctaagatgg

SEQ ID NO: 26046 - DNA, 25 bp, Probe Sequence
aagatataagttggtgtggctaaga

SEQ ID NO: 26047 - DNA, 25 bp, Probe Sequence
gatataagttggtgtggctaagatg

SEQ ID NO: 26048 - DNA, 25 bp, Probe Sequence
agatataagttggtgtggctaagat

SEQ ID NO: 26049 - DNA, 25 bp, Probe Sequence
tataagttggtgtggctaagatgga

SEQ ID NO: 26050 - DNA, 25 bp, Probe Sequence
tgattactcggatggaatggaagaa

SEQ ID NO: 26051 - DNA, 25 bp, Probe Sequence
ttgattactcggatggaatggaaga

SEQ ID NO: 26052 - DNA, 25 bp, Probe Sequence
tcttgattactcggatggaatggaa

SEQ ID NO: 26053 - DNA, 25 bp, Probe Sequence
cttgattactcggatggaatggaag

SEQ ID NO: 26054 - DNA, 25 bp, Probe Sequence
ttcttgattactcggatggaatgga

SEQ ID NO: 26055 - DNA, 25 bp, Probe Sequence
ataagttggtgtggctaagatggaa

SEQ ID NO: 26056 - DNA, 25 bp, Probe Sequence
agttctatactgttatctgtgtcca

SEQ ID NO: 26057 - DNA, 25 bp, Probe Sequence
gttctatactgttatctgtgtccat

SEQ ID NO: 26058 - DNA, 25 bp, Probe Sequence
attcttgattactcggatggaatgg

SEQ ID NO: 26059 - DNA, 25 bp, Probe Sequence
tactgttatctgtgtccatttccaa

SEQ ID NO: 26060 - DNA, 25 bp, Probe Sequence
ttctatactgttatctgtgtccatt

SEQ ID NO: 26061 - DNA, 25 bp, Probe Sequence
attactcggatggaatggaagaaat

SEQ ID NO: 26062 - DNA, 25 bp, Probe Sequence
atactgttatctgtgtccatttcca

SEQ ID NO: 26063 - DNA, 25 bp, Probe Sequence
ttactcggatggaatggaagaaata

SEQ ID NO: 26064 - DNA, 25 bp, Probe Sequence
actgttatctgtgtccatttccaaa

SEQ ID NO: 26065 - DNA, 25 bp, Probe Sequence
gatttgaagttggtcctgtttgttt

SEQ ID NO: 26066 - DNA, 25 bp, Probe Sequence
gattactcggatggaatggaagaaa

SEQ ID NO: 26067 - DNA, 25 bp, Probe Sequence
tactcggatggaatggaagaaatat

SEQ ID NO: 26068 - DNA, 25 bp, Probe Sequence
cctatttgaatttctttggtgctgt

SEQ ID NO: 26069 - DNA, 25 bp, Probe Sequence
atccttcagacagttatatcctcct

SEQ ID NO: 26070 - DNA, 25 bp, Probe Sequence
catccttcagacagttatatcctcc

SEQ ID NO: 26071 - DNA, 25 bp, Probe Sequence
attgttgttgagtgtaagatgtcct

SEQ ID NO: 26072 - DNA, 25 bp, Probe Sequence
tccttcagacagttatatcctcctt

SEQ ID NO: 26073 - DNA, 25 bp, Probe Sequence
gcatccttcagacagttatatcctc

SEQ ID NO: 26074 - DNA, 25 bp, Probe Sequence
cattgttgttgagtgtaagatgtcc

SEQ ID NO: 26075 - DNA, 25 bp, Probe Sequence
ccattgttgttgagtgtaagatgtc

SEQ ID NO: 26076 - DNA, 25 bp, Probe Sequence
ttgttgttgagtgtaagatgtcctt

SEQ ID NO: 26077 - DNA, 25 bp, Probe Sequence
aaccattgttgttgagtgtaagatg

SEQ ID NO: 26078 - DNA, 25 bp, Probe Sequence
accattgttgttgagtgtaagatgt

SEQ ID NO: 26079 - DNA, 25 bp, Probe Sequence
tgttgttgagtgtaagatgtccttc

SEQ ID NO: 26080 - DNA, 25 bp, Probe Sequence
ttgttgagtgtaagatgtccttcat

SEQ ID NO: 26081 - DNA, 25 bp, Probe Sequence
gttgttgagtgtaagatgtccttca

SEQ ID NO: 26082 - DNA, 25 bp, Probe Sequence
ttgagtgtaagatgtccttcatgtt

SEQ ID NO: 26083 - DNA, 25 bp, Probe Sequence
ttgttgaattataactgcgactgaa

SEQ ID NO: 26084 - DNA, 25 bp, Probe Sequence
gttgagtgtaagatgtccttcatgt

SEQ ID NO: 26085 - DNA, 25 bp, Probe Sequence
tgttgagtgtaagatgtccttcatg

SEQ ID NO: 26086 - DNA, 25 bp, Probe Sequence
attgttgaattataactgcgactga

SEQ ID NO: 26087 - DNA, 25 bp, Probe Sequence
ttatgtaactctgacttgctggaaa

SEQ ID NO: 26088 - DNA, 25 bp, Probe Sequence
tttatgtaactctgacttgctggaa

SEQ ID NO: 26089 - DNA, 25 bp, Probe Sequence
agtcagtgtttagaaatgttaccct

SEQ ID NO: 26090 - DNA, 25 bp, Probe Sequence
ccttcagacagttatatcctccttt

SEQ ID NO: 26091 - DNA, 25 bp, Probe Sequence
gtcagtgtttagaaatgttaccctt

SEQ ID NO: 26092 - DNA, 25 bp, Probe Sequence
aagtcagtgtttagaaatgttaccc

SEQ ID NO: 26093 - DNA, 25 bp, Probe Sequence
tccatcatcttagagccaagttata

SEQ ID NO: 26094 - DNA, 25 bp, Probe Sequence
ctccatcatcttagagccaagttat

SEQ ID NO: 26095 - DNA, 25 bp, Probe Sequence
tctccatcatcttagagccaagtta

SEQ ID NO: 26096 - DNA, 25 bp, Probe Sequence
ttctccatcatcttagagccaagtt

SEQ ID NO: 26097 - DNA, 25 bp, Probe Sequence
ccatcatcttagagccaagttatat

SEQ ID NO: 26098 - DNA, 25 bp, Probe Sequence
tgttcttgtctaatccatgtagctt

SEQ ID NO: 26099 - DNA, 25 bp, Probe Sequence
cttctccatcatcttagagccaagt

SEQ ID NO: 26100 - DNA, 25 bp, Probe Sequence
atgttcttgtctaatccatgtagct

SEQ ID NO: 26101 - DNA, 25 bp, Probe Sequence
tatgttcttgtctaatccatgtagc

SEQ ID NO: 26102 - DNA, 25 bp, Probe Sequence
gagtgtgtattcttggatggctgat

SEQ ID NO: 26103 - DNA, 25 bp, Probe Sequence
tcatcttagagccaagttatatgtt

SEQ ID NO: 26104 - DNA, 25 bp, Probe Sequence
tcttagagccaagttatatgttctt

SEQ ID NO: 26105 - DNA, 25 bp, Probe Sequence
catcttagagccaagttatatgttc

SEQ ID NO: 26106 - DNA, 25 bp, Probe Sequence
agtgtgtattcttggatggctgatg

SEQ ID NO: 26107 - DNA, 25 bp, Probe Sequence
tggtttgagactaaatacaggctta

SEQ ID NO: 26108 - DNA, 25 bp, Probe Sequence
gcattcccacttaacactttgatta

SEQ ID NO: 26109 - DNA, 25 bp, Probe Sequence
atcatcttagagccaagttatatgt

SEQ ID NO: 26110 - DNA, 25 bp, Probe Sequence
attcccacttaacactttgattagc

SEQ ID NO: 26111 - DNA, 25 bp, Probe Sequence
atcttagagccaagttatatgttct

SEQ ID NO: 26112 - DNA, 25 bp, Probe Sequence
caactaaacccagaactcaaactta

SEQ ID NO: 26113 - DNA, 25 bp, Probe Sequence
ccttctccatcatcttagagccaag

SEQ ID NO: 26114 - DNA, 25 bp, Probe Sequence
aaacccagaactcaaacttaacatt

SEQ ID NO: 26115 - DNA, 25 bp, Probe Sequence
catcatcttagagccaagttatatg

SEQ ID NO: 26116 - DNA, 25 bp, Probe Sequence
ttgttgaagacttgaagacgtgatt

SEQ ID NO: 26117 - DNA, 25 bp, Probe Sequence
tgtatcgcattaagttcaaggagag

SEQ ID NO: 26118 - DNA, 25 bp, Probe Sequence
ttgtatcgcattaagttcaaggaga

SEQ ID NO: 26119 - DNA, 25 bp, Probe Sequence
gttgtatcgcattaagttcaaggag

SEQ ID NO: 26120 - DNA, 25 bp, Probe Sequence
gagttgtatcgcattaagttcaagg

SEQ ID NO: 26121 - DNA, 25 bp, Probe Sequence
agttgtatcgcattaagttcaagga

SEQ ID NO: 26122 - DNA, 25 bp, Probe Sequence
gtatcgcattaagttcaaggagagc

SEQ ID NO: 26123 - DNA, 25 bp, Probe Sequence
tgcctatttactggaaacctgttat

SEQ ID NO: 26124 - DNA, 25 bp, Probe Sequence
atgcctatttactggaaacctgtta

SEQ ID NO: 26125 - DNA, 25 bp, Probe Sequence
ctatttactggaaacctgttatgcc

SEQ ID NO: 26126 - DNA, 25 bp, Probe Sequence
cctatttactggaaacctgttatgc

SEQ ID NO: 26127 - DNA, 25 bp, Probe Sequence
gcctatttactggaaacctgttatg

SEQ ID NO: 26128 - DNA, 25 bp, Probe Sequence
gaacgagtggaagaagtgagagatg

SEQ ID NO: 26129 - DNA, 25 bp, Probe Sequence
agaacgagtggaagaagtgagagat

SEQ ID NO: 26130 - DNA, 25 bp, Probe Sequence
tatcgcattaagttcaaggagagct

SEQ ID NO: 26131 - DNA, 25 bp, Probe Sequence
aagaacgagtggaagaagtgagaga

SEQ ID NO: 26132 - DNA, 25 bp, Probe Sequence
ttgtaccactgctaataaatgacca

SEQ ID NO: 26133 - DNA, 25 bp, Probe Sequence
gttgtaccactgctaataaatgacc

SEQ ID NO: 26134 - DNA, 25 bp, Probe Sequence
cgagttgtatcgcattaagttcaag

SEQ ID NO: 26135 - DNA, 25 bp, Probe Sequence
gttatcatgtggcagaagcactatg

SEQ ID NO: 26136 - DNA, 25 bp, Probe Sequence
catgcctatttactggaaacctgtt

SEQ ID NO: 26137 - DNA, 25 bp, Probe Sequence
ttatcatgtggcagaagcactatgt

SEQ ID NO: 26138 - DNA, 25 bp, Probe Sequence
tgctaataaatgaccagtttacctg

SEQ ID NO: 26139 - DNA, 25 bp, Probe Sequence
atcgcattaagttcaaggagagctt

SEQ ID NO: 26140 - DNA, 25 bp, Probe Sequence
agttgtaccactgctaataaatgac

SEQ ID NO: 26141 - DNA, 25 bp, Probe Sequence
gaccaaaatcaagaactacaagacc

SEQ ID NO: 26142 - DNA, 25 bp, Probe Sequence
ggagaccaaaatcaagaactacaag

SEQ ID NO: 26143 - DNA, 25 bp, Probe Sequence
cgatatctctgtgtgcgaatggtac

SEQ ID NO: 26144 - DNA, 25 bp, Probe Sequence
agaccaaaatcaagaactacaagac

SEQ ID NO: 26145 - DNA, 25 bp, Probe Sequence
gagaccaaaatcaagaactacaaga

SEQ ID NO: 26146 - DNA, 25 bp, Probe Sequence
accaaaatcaagaactacaagaccg

SEQ ID NO: 26147 - DNA, 25 bp, Probe Sequence
ccaaccagaaccagactagaaactg

SEQ ID NO: 26148 - DNA, 25 bp, Probe Sequence
ctttcctctgtcctccatccttctc

SEQ ID NO: 26149 - DNA, 25 bp, Probe Sequence
gatcctaaatcatgacttacctgct

SEQ ID NO: 26150 - DNA, 25 bp, Probe Sequence
tcctaaatcatgacttacctgctaa

SEQ ID NO: 26151 - DNA, 25 bp, Probe Sequence
cccaaccagaaccagactagaaact

SEQ ID NO: 26152 - DNA, 25 bp, Probe Sequence
atcctaaatcatgacttacctgcta

SEQ ID NO: 26153 - DNA, 25 bp, Probe Sequence
ctaaaggaggcgatatctctgtgtg

SEQ ID NO: 26154 - DNA, 25 bp, Probe Sequence
aaccagaaccagactagaaactgct

SEQ ID NO: 26155 - DNA, 25 bp, Probe Sequence
caaccagaaccagactagaaactgc

SEQ ID NO: 26156 - DNA, 25 bp, Probe Sequence
caaaatcaagaactacaagaccgcc

SEQ ID NO: 26157 - DNA, 25 bp, Probe Sequence
ccaaaatcaagaactacaagaccgc

SEQ ID NO: 26158 - DNA, 25 bp, Probe Sequence
atggagaccaaaatcaagaactaca

SEQ ID NO: 26159 - DNA, 25 bp, Probe Sequence
tggagaccaaaatcaagaactacaa

SEQ ID NO: 26160 - DNA, 25 bp, Probe Sequence
cctaaatcatgacttacctgctaat

SEQ ID NO: 26161 - DNA, 25 bp, Probe Sequence
catggagaccaaaatcaagaactac

SEQ ID NO: 26162 - DNA, 25 bp, Probe Sequence
acatggagaccaaaatcaagaacta

SEQ ID NO: 26163 - DNA, 25 bp, Probe Sequence
aagacatggagaccaaaatcaagaa

SEQ ID NO: 26164 - DNA, 25 bp, Probe Sequence
gaagacatggagaccaaaatcaaga

SEQ ID NO: 26165 - DNA, 25 bp, Probe Sequence
ttgtagtaagacaccaactgcttaa

SEQ ID NO: 26166 - DNA, 25 bp, Probe Sequence
cttgtagtaagacaccaactgctta

SEQ ID NO: 26167 - DNA, 25 bp, Probe Sequence
cttccttgtagtaagacaccaactg

SEQ ID NO: 26168 - DNA, 25 bp, Probe Sequence
ccttccttgtagtaagacaccaact

SEQ ID NO: 26169 - DNA, 25 bp, Probe Sequence
ccatttcatctgtcctcattctctg

SEQ ID NO: 26170 - DNA, 25 bp, Probe Sequence
gtttcagttcctccatttaacagat

SEQ ID NO: 26171 - DNA, 25 bp, Probe Sequence
ccttgtagtaagacaccaactgctt

SEQ ID NO: 26172 - DNA, 25 bp, Probe Sequence
catttcatctgtcctcattctctgc

SEQ ID NO: 26173 - DNA, 25 bp, Probe Sequence
ttccttgtagtaagacaccaactgc

SEQ ID NO: 26174 - DNA, 25 bp, Probe Sequence
cctccatttaacagatatgaagagc

SEQ ID NO: 26175 - DNA, 25 bp, Probe Sequence
gctaagatgtgtttgtactttggat

SEQ ID NO: 26176 - DNA, 25 bp, Probe Sequence
cagttcctccatttaacagatatga

SEQ ID NO: 26177 - DNA, 25 bp, Probe Sequence
tcagttcctccatttaacagatatg

SEQ ID NO: 26178 - DNA, 25 bp, Probe Sequence
tgtagtaagacaccaactgcttaaa

SEQ ID NO: 26179 - DNA, 25 bp, Probe Sequence
ggaagtggatcaaactagaactcat

SEQ ID NO: 26180 - DNA, 25 bp, Probe Sequence
ctccatttaacagatatgaagagca

SEQ ID NO: 26181 - DNA, 25 bp, Probe Sequence
tccatttaacagatatgaagagcat

SEQ ID NO: 26182 - DNA, 25 bp, Probe Sequence
ctggaagtggatcaaactagaactc

SEQ ID NO: 26183 - DNA, 25 bp, Probe Sequence
ctctggaagtggatcaaactagaac

SEQ ID NO: 26184 - DNA, 25 bp, Probe Sequence
tctggaagtggatcaaactagaact

SEQ ID NO: 26185 - DNA, 25 bp, Probe Sequence
tttcagttcctccatttaacagata

SEQ ID NO: 26186 - DNA, 25 bp, Probe Sequence
ggatgtttcagttcctccatttaac

SEQ ID NO: 26187 - DNA, 25 bp, Probe Sequence
tggaagtggatcaaactagaactca

SEQ ID NO: 26188 - DNA, 25 bp, Probe Sequence
agttcctccatttaacagatatgaa

SEQ ID NO: 26189 - DNA, 25 bp, Probe Sequence
gttcaactatggcagcatcatcaag

SEQ ID NO: 26190 - DNA, 25 bp, Probe Sequence
agcatcatcaaggcaatttatcaag

SEQ ID NO: 26191 - DNA, 25 bp, Probe Sequence
cagcatcatcaaggcaatttatcaa

SEQ ID NO: 26192 - DNA, 25 bp, Probe Sequence
cattgtagactttgtgaaggaccat

SEQ ID NO: 26193 - DNA, 25 bp, Probe Sequence
aaagaagatcactcaagactatggg

SEQ ID NO: 26194 - DNA, 25 bp, Probe Sequence
gcaaagaagatcactcaagactatg

SEQ ID NO: 26195 - DNA, 25 bp, Probe Sequence
caagttcaactatggcagcatcatc

SEQ ID NO: 26196 - DNA, 25 bp, Probe Sequence
gaagcactattgactggacctacag

SEQ ID NO: 26197 - DNA, 25 bp, Probe Sequence
caaagaagatcactcaagactatgg

SEQ ID NO: 26198 - DNA, 25 bp, Probe Sequence
gcatcatcaaggcaatttatcaagc

SEQ ID NO: 26199 - DNA, 25 bp, Probe Sequence
agttcaactatggcagcatcatcaa

SEQ ID NO: 26200 - DNA, 25 bp, Probe Sequence
aagttcaactatggcagcatcatca

SEQ ID NO: 26201 - DNA, 25 bp, Probe Sequence
ttcaactatggcagcatcatcaagg

SEQ ID NO: 26202 - DNA, 25 bp, Probe Sequence
aataaagtttgagtgtaccaggaac

SEQ ID NO: 26203 - DNA, 25 bp, Probe Sequence
aaataaagtttgagtgtaccaggaa

SEQ ID NO: 26204 - DNA, 25 bp, Probe Sequence
attgtagactttgtgaaggaccatg

SEQ ID NO: 26205 - DNA, 25 bp, Probe Sequence
ataaagtttgagtgtaccaggaaca

SEQ ID NO: 26206 - DNA, 25 bp, Probe Sequence
taaagtttgagtgtaccaggaacag

SEQ ID NO: 26207 - DNA, 25 bp, Probe Sequence
ggaagcactattgactggacctaca

SEQ ID NO: 26208 - DNA, 25 bp, Probe Sequence
tggaagcactattgactggacctac

SEQ ID NO: 26209 - DNA, 25 bp, Probe Sequence
ccatccaggcaaccaaataaagttt

SEQ ID NO: 26210 - DNA, 25 bp, Probe Sequence
gcagcatcatcaaggcaatttatca

SEQ ID NO: 26211 - DNA, 25 bp, Probe Sequence
atccagattggcaacacctatgaag

SEQ ID NO: 26212 - DNA, 25 bp, Probe Sequence
aagaagatcactcaagactatgggc

SEQ ID NO: 26213 - DNA, 25 bp, Probe Sequence
aagcattgactggtcctatgattat

SEQ ID NO: 26214 - DNA, 25 bp, Probe Sequence
agcattgactggtcctatgattatg

SEQ ID NO: 26215 - DNA, 25 bp, Probe Sequence
gaagcattgactggtcctatgatta

SEQ ID NO: 26216 - DNA, 25 bp, Probe Sequence
attgactggtcctatgattatggca

SEQ ID NO: 26217 - DNA, 25 bp, Probe Sequence
cattgactggtcctatgattatggc

SEQ ID NO: 26218 - DNA, 25 bp, Probe Sequence
gcattgactggtcctatgattatgg

SEQ ID NO: 26219 - DNA, 25 bp, Probe Sequence
ttgactggtcctatgattatggcat

SEQ ID NO: 26220 - DNA, 25 bp, Probe Sequence
tgactggtcctatgattatggcatc

SEQ ID NO: 26221 - DNA, 25 bp, Probe Sequence
cttcattatcctccacagctattcc

SEQ ID NO: 26222 - DNA, 25 bp, Probe Sequence
ccttcattatcctccacagctattc

SEQ ID NO: 26223 - DNA, 25 bp, Probe Sequence
tgaagttgaagtgaaatccatagtg

SEQ ID NO: 26224 - DNA, 25 bp, Probe Sequence
ccaatctgctctgtcatctaccaag

SEQ ID NO: 26225 - DNA, 25 bp, Probe Sequence
ctgaagttgaagtgaaatccatagt

SEQ ID NO: 26226 - DNA, 25 bp, Probe Sequence
tctgaagttgaagtgaaatccatag

SEQ ID NO: 26227 - DNA, 25 bp, Probe Sequence
ctctgaagttgaagtgaaatccata

SEQ ID NO: 26228 - DNA, 25 bp, Probe Sequence
actctgaagttgaagtgaaatccat

SEQ ID NO: 26229 - DNA, 25 bp, Probe Sequence
ggtcctatgattatggcatcaagta

SEQ ID NO: 26230 - DNA, 25 bp, Probe Sequence
accaatctgctctgtcatctaccaa

SEQ ID NO: 26231 - DNA, 25 bp, Probe Sequence
gccttcattatcctccacagctatt

SEQ ID NO: 26232 - DNA, 25 bp, Probe Sequence
gtcctatgattatggcatcaagtac

SEQ ID NO: 26233 - DNA, 25 bp, Probe Sequence
ctggtcctatgattatggcatcaag

SEQ ID NO: 26234 - DNA, 25 bp, Probe Sequence
ggaagcattgactggtcctatgatt

SEQ ID NO: 26235 - DNA, 25 bp, Probe Sequence
tggtcctatgattatggcatcaagt

SEQ ID NO: 26236 - DNA, 25 bp, Probe Sequence
actggtcctatgattatggcatcaa

SEQ ID NO: 26237 - DNA, 25 bp, Probe Sequence
ttacatcaccttccattcctactcc

SEQ ID NO: 26238 - DNA, 25 bp, Probe Sequence
attcttcctgtgttcaatgttgatg

SEQ ID NO: 26239 - DNA, 25 bp, Probe Sequence
cctgtgttcaatgttgatggatata

SEQ ID NO: 26240 - DNA, 25 bp, Probe Sequence
ttcttcctgtgttcaatgttgatgg

SEQ ID NO: 26241 - DNA, 25 bp, Probe Sequence
tcctgtgttcaatgttgatggatat

SEQ ID NO: 26242 - DNA, 25 bp, Probe Sequence
ttcctgtgttcaatgttgatggata

SEQ ID NO: 26243 - DNA, 25 bp, Probe Sequence
ttcagtagcaccataacgaagtagc

SEQ ID NO: 26244 - DNA, 25 bp, Probe Sequence
tttacatcaccttccattcctactc

SEQ ID NO: 26245 - DNA, 25 bp, Probe Sequence
gtttacatcaccttccattcctact

SEQ ID NO: 26246 - DNA, 25 bp, Probe Sequence
gtatcctgaaatggtctctcgtatt

SEQ ID NO: 26247 - DNA, 25 bp, Probe Sequence
ataagtatcctgaaatggtctctcg

SEQ ID NO: 26248 - DNA, 25 bp, Probe Sequence
agtatcctgaaatggtctctcgtat

SEQ ID NO: 26249 - DNA, 25 bp, Probe Sequence
tcctgaaatggtctctcgtattaaa

SEQ ID NO: 26250 - DNA, 25 bp, Probe Sequence
aagtatcctgaaatggtctctcgta

SEQ ID NO: 26251 - DNA, 25 bp, Probe Sequence
taagtatcctgaaatggtctctcgt

SEQ ID NO: 26252 - DNA, 25 bp, Probe Sequence
cccaatagaatcaacaatttacccg

SEQ ID NO: 26253 - DNA, 25 bp, Probe Sequence
gcccaatagaatcaacaatttaccc

SEQ ID NO: 26254 - DNA, 25 bp, Probe Sequence
atcctgaaatggtctctcgtattaa

SEQ ID NO: 26255 - DNA, 25 bp, Probe Sequence
cctcaagcatacttcctaaagaact

SEQ ID NO: 26256 - DNA, 25 bp, Probe Sequence
tcctcaagcatacttcctaaagaac

SEQ ID NO: 26257 - DNA, 25 bp, Probe Sequence
ccaatagaatcaacaatttacccga

SEQ ID NO: 26258 - DNA, 25 bp, Probe Sequence
tttcagtagcaccataacgaagtag

SEQ ID NO: 26259 - DNA, 25 bp, Probe Sequence
ctttcagtagcaccataacgaagta

SEQ ID NO: 26260 - DNA, 25 bp, Probe Sequence
atccttctcttgctcatttaagtcc

SEQ ID NO: 26261 - DNA, 25 bp, Probe Sequence
ggcttatgaccaaggaatcagatat

SEQ ID NO: 26262 - DNA, 25 bp, Probe Sequence
aactctcttccatcaaggcatatct

SEQ ID NO: 26263 - DNA, 25 bp, Probe Sequence
catatctgacaatccactcgtactc

SEQ ID NO: 26264 - DNA, 25 bp, Probe Sequence
ttccatcaaggcatatctgacaatc

SEQ ID NO: 26265 - DNA, 25 bp, Probe Sequence
cttccatcaaggcatatctgacaat

SEQ ID NO: 26266 - DNA, 25 bp, Probe Sequence
gcttatgaccaaggaatcagatatt

SEQ ID NO: 26267 - DNA, 25 bp, Probe Sequence
atatctgacaatccactcgtactcc

SEQ ID NO: 26268 - DNA, 25 bp, Probe Sequence
actctcttccatcaaggcatatctg

SEQ ID NO: 26269 - DNA, 25 bp, Probe Sequence
ctctcttccatcaaggcatatctga

SEQ ID NO: 26270 - DNA, 25 bp, Probe Sequence
tcttccatcaaggcatatctgacaa

SEQ ID NO: 26271 - DNA, 25 bp, Probe Sequence
atcaaggcatatctgacaatccact

SEQ ID NO: 26272 - DNA, 25 bp, Probe Sequence
catcaaggcatatctgacaatccac

SEQ ID NO: 26273 - DNA, 25 bp, Probe Sequence
tctcttccatcaaggcatatctgac

SEQ ID NO: 26274 - DNA, 25 bp, Probe Sequence
ctcttccatcaaggcatatctgaca

SEQ ID NO: 26275 - DNA, 25 bp, Probe Sequence
gaacttcgagatacaggcagatatg

SEQ ID NO: 26276 - DNA, 25 bp, Probe Sequence
gcatatctgacaatccactcgtact

SEQ ID NO: 26277 - DNA, 25 bp, Probe Sequence
tgaacttcgagatacaggcagatat

SEQ ID NO: 26278 - DNA, 25 bp, Probe Sequence
tcaaggcatatctgacaatccactc

SEQ ID NO: 26279 - DNA, 25 bp, Probe Sequence
ttgaacttcgagatacaggcagata

SEQ ID NO: 26280 - DNA, 25 bp, Probe Sequence
tccatcaaggcatatctgacaatcc

SEQ ID NO: 26281 - DNA, 25 bp, Probe Sequence
ggtgagaacaatgctgagttgaatg

SEQ ID NO: 26282 - DNA, 25 bp, Probe Sequence
ccatcaaggcatatctgacaatcca

SEQ ID NO: 26283 - DNA, 25 bp, Probe Sequence
aaactctcttccatcaaggcatatc

SEQ ID NO: 26284 - DNA, 25 bp, Probe Sequence
caaactctcttccatcaaggcatat

SEQ ID NO: 26285 - DNA, 25 bp, Probe Sequence
tgtcagagaacctaataagtgctac

SEQ ID NO: 26286 - DNA, 25 bp, Probe Sequence
ttaatgtggacggttatgactactc

SEQ ID NO: 26287 - DNA, 25 bp, Probe Sequence
gttaatgtggacggttatgactact

SEQ ID NO: 26288 - DNA, 25 bp, Probe Sequence
ctgtcagagaacctaataagtgcta

SEQ ID NO: 26289 - DNA, 25 bp, Probe Sequence
ggttaatgtggacggttatgactac

SEQ ID NO: 26290 - DNA, 25 bp, Probe Sequence
gtcagagaacctaataagtgctact

SEQ ID NO: 26291 - DNA, 25 bp, Probe Sequence
tggttaatgtggacggttatgacta

SEQ ID NO: 26292 - DNA, 25 bp, Probe Sequence
taatgtggacggttatgactactca

SEQ ID NO: 26293 - DNA, 25 bp, Probe Sequence
caatataccaatctcctgaggcttg

SEQ ID NO: 26294 - DNA, 25 bp, Probe Sequence
aatataccaatctcctgaggcttgt

SEQ ID NO: 26295 - DNA, 25 bp, Probe Sequence
tctgtcagagaacctaataagtgct

SEQ ID NO: 26296 - DNA, 25 bp, Probe Sequence
tataactgagaggcatcctgatatg

SEQ ID NO: 26297 - DNA, 25 bp, Probe Sequence
atataccaatctcctgaggcttgtg

SEQ ID NO: 26298 - DNA, 25 bp, Probe Sequence
aatagcttggcatgtcattaggaat

SEQ ID NO: 26299 - DNA, 25 bp, Probe Sequence
gcaatataccaatctcctgaggctt

SEQ ID NO: 26300 - DNA, 25 bp, Probe Sequence
ttcctattccttggttctgtcagag

SEQ ID NO: 26301 - DNA, 25 bp, Probe Sequence
gaggcttgtggatttctatgttatg

SEQ ID NO: 26302 - DNA, 25 bp, Probe Sequence
tgaggcttgtggatttctatgttat

SEQ ID NO: 26303 - DNA, 25 bp, Probe Sequence
cgtactatgaacagtatcactcact

SEQ ID NO: 26304 - DNA, 25 bp, Probe Sequence
tcgtactatgaacagtatcactcac

SEQ ID NO: 26305 - DNA, 25 bp, Probe Sequence
gcatcgtactatgaacagtatcact

SEQ ID NO: 26306 - DNA, 25 bp, Probe Sequence
gtggttaatgtggacggttatgact

SEQ ID NO: 26307 - DNA, 25 bp, Probe Sequence
ctgaggcttgtggatttctatgtta

SEQ ID NO: 26308 - DNA, 25 bp, Probe Sequence
tagccatctcaagcaagtttaatca

SEQ ID NO: 26309 - DNA, 25 bp, Probe Sequence
attactggagattgcttatacctgg

SEQ ID NO: 26310 - DNA, 25 bp, Probe Sequence
atggtgattactggagattgcttat

SEQ ID NO: 26311 - DNA, 25 bp, Probe Sequence
gatggtgattactggagattgctta

SEQ ID NO: 26312 - DNA, 25 bp, Probe Sequence
tactggagattgcttatacctggaa

SEQ ID NO: 26313 - DNA, 25 bp, Probe Sequence
ttactggagattgcttatacctgga

SEQ ID NO: 26314 - DNA, 25 bp, Probe Sequence
tggtgattactggagattgcttata

SEQ ID NO: 26315 - DNA, 25 bp, Probe Sequence
agaagaggagaaggaagaattgatg

SEQ ID NO: 26316 - DNA, 25 bp, Probe Sequence
gaggagaaggaagaattgatggaat

SEQ ID NO: 26317 - DNA, 25 bp, Probe Sequence
gtgattactggagattgcttatacc

SEQ ID NO: 26318 - DNA, 25 bp, Probe Sequence
ggtgattactggagattgcttatac

SEQ ID NO: 26319 - DNA, 25 bp, Probe Sequence
aggagaaggaagaattgatggaatg

SEQ ID NO: 26320 - DNA, 25 bp, Probe Sequence
tgattactggagattgcttatacct

SEQ ID NO: 26321 - DNA, 25 bp, Probe Sequence
aagaagaggagaaggaagaattgat

SEQ ID NO: 26322 - DNA, 25 bp, Probe Sequence
gagaaggaagaattgatggaatggt

SEQ ID NO: 26323 - DNA, 25 bp, Probe Sequence
gattactggagattgcttatacctg

SEQ ID NO: 26324 - DNA, 25 bp, Probe Sequence
gaagaggagaaggaagaattgatgg

SEQ ID NO: 26325 - DNA, 25 bp, Probe Sequence
agaaggaagaattgatggaatggtg

SEQ ID NO: 26326 - DNA, 25 bp, Probe Sequence
agaggagaaggaagaattgatggaa

SEQ ID NO: 26327 - DNA, 25 bp, Probe Sequence
aagaggagaaggaagaattgatgga

SEQ ID NO: 26328 - DNA, 25 bp, Probe Sequence
aagacttcaattaccttagcagcaa

SEQ ID NO: 26329 - DNA, 25 bp, Probe Sequence
gacttcaattaccttagcagcaact

SEQ ID NO: 26330 - DNA, 25 bp, Probe Sequence
agacttcaattaccttagcagcaac

SEQ ID NO: 26331 - DNA, 25 bp, Probe Sequence
ggagaaggaagaattgatggaatgg

SEQ ID NO: 26332 - DNA, 25 bp, Probe Sequence
caagacttcaattaccttagcagca

SEQ ID NO: 26333 - DNA, 25 bp, Probe Sequence
tgaatggaagacacttacctaacaa

SEQ ID NO: 26334 - DNA, 25 bp, Probe Sequence
tacatacaagacttcaccataaggc

SEQ ID NO: 26335 - DNA, 25 bp, Probe Sequence
gaatggaagacacttacctaacaag

SEQ ID NO: 26336 - DNA, 25 bp, Probe Sequence
ctacatacaagacttcaccataagg

SEQ ID NO: 26337 - DNA, 25 bp, Probe Sequence
cggatgaatataagcaatgaagatg

SEQ ID NO: 26338 - DNA, 25 bp, Probe Sequence
gtgaatggaagacacttacctaaca

SEQ ID NO: 26339 - DNA, 25 bp, Probe Sequence
tctacatacaagacttcaccataag

SEQ ID NO: 26340 - DNA, 25 bp, Probe Sequence
cttctacatacaagacttcaccata

SEQ ID NO: 26341 - DNA, 25 bp, Probe Sequence
ttctacatacaagacttcaccataa

SEQ ID NO: 26342 - DNA, 25 bp, Probe Sequence
ggtgaatggaagacacttacctaac

SEQ ID NO: 26343 - DNA, 25 bp, Probe Sequence
ggatgaatataagcaatgaagatga

SEQ ID NO: 26344 - DNA, 25 bp, Probe Sequence
gtttccaaattccacaataagcaat

SEQ ID NO: 26345 - DNA, 25 bp, Probe Sequence
tgaatataagcaatgaagatgaaca

SEQ ID NO: 26346 - DNA, 25 bp, Probe Sequence
tcttctacatacaagacttcaccat

SEQ ID NO: 26347 - DNA, 25 bp, Probe Sequence
atcttctacatacaagacttcacca

SEQ ID NO: 26348 - DNA, 25 bp, Probe Sequence
caataagcaatatgtggtgataatg

SEQ ID NO: 26349 - DNA, 25 bp, Probe Sequence
tgtttccaaattccacaataagcaa

SEQ ID NO: 26350 - DNA, 25 bp, Probe Sequence
atgtttccaaattccacaataagca

SEQ ID NO: 26351 - DNA, 25 bp, Probe Sequence
cggtgaatggaagacacttacctaa

SEQ ID NO: 26352 - DNA, 25 bp, Probe Sequence
ataagcaatatgtggtgataatgaa

SEQ ID NO: 26353 - DNA, 25 bp, Probe Sequence
aataagcaatatgtggtgataatga

SEQ ID NO: 26354 - DNA, 25 bp, Probe Sequence
gatgtttccaaattccacaataagc

SEQ ID NO: 26355 - DNA, 25 bp, Probe Sequence
tccaaattccacaataagcaatatg

SEQ ID NO: 26356 - DNA, 25 bp, Probe Sequence
gatcttctacatacaagacttcacc

SEQ ID NO: 26357 - DNA, 25 bp, Probe Sequence
aggaagataatggagaatgagaaca

SEQ ID NO: 26358 - DNA, 25 bp, Probe Sequence
gaggaagataatggagaatgagaac

SEQ ID NO: 26359 - DNA, 25 bp, Probe Sequence
agaggaagataatggagaatgagaa

SEQ ID NO: 26360 - DNA, 25 bp, Probe Sequence
aagaggaagataatggagaatgaga

SEQ ID NO: 26361 - DNA, 25 bp, Probe Sequence
ggaagataatggagaatgagaacat

SEQ ID NO: 26362 - DNA, 25 bp, Probe Sequence
ggaactacctagatgaagagagtat

SEQ ID NO: 26363 - DNA, 25 bp, Probe Sequence
tcaatgccaaagaagaactgtaatg

SEQ ID NO: 26364 - DNA, 25 bp, Probe Sequence
aactacctagatgaagagagtatca

SEQ ID NO: 26365 - DNA, 25 bp, Probe Sequence
gggactttaactcttgacctgtatg

SEQ ID NO: 26366 - DNA, 25 bp, Probe Sequence
tttcaatgccaaagaagaactgtaa

SEQ ID NO: 26367 - DNA, 25 bp, Probe Sequence
aaacaccatatcttcccatttcaag

SEQ ID NO: 26368 - DNA, 25 bp, Probe Sequence
ccaaagaagaactgtaatgctgttt

SEQ ID NO: 26369 - DNA, 25 bp, Probe Sequence
ttcaatgccaaagaagaactgtaat

SEQ ID NO: 26370 - DNA, 25 bp, Probe Sequence
gcctctggttctataaacaagtcat

SEQ ID NO: 26371 - DNA, 25 bp, Probe Sequence
aatgccaaagaagaactgtaatgct

SEQ ID NO: 26372 - DNA, 25 bp, Probe Sequence
caatgccaaagaagaactgtaatgc

SEQ ID NO: 26373 - DNA, 25 bp, Probe Sequence
ggactttaactcttgacctgtatgc

SEQ ID NO: 26374 - DNA, 25 bp, Probe Sequence
ctgcctctggttctataaacaagtc

SEQ ID NO: 26375 - DNA, 25 bp, Probe Sequence
gaactacctagatgaagagagtatc

SEQ ID NO: 26376 - DNA, 25 bp, Probe Sequence
aacaccatatcttcccatttcaagc

SEQ ID NO: 26377 - DNA, 25 bp, Probe Sequence
gggaactacctagatgaagagagta

SEQ ID NO: 26378 - DNA, 25 bp, Probe Sequence
gtgggaactacctagatgaagagag

SEQ ID NO: 26379 - DNA, 25 bp, Probe Sequence
cctctggttctataaacaagtcatt

SEQ ID NO: 26380 - DNA, 25 bp, Probe Sequence
aaagaggaagataatggagaatgag

SEQ ID NO: 26381 - DNA, 25 bp, Probe Sequence
ttgtctcaatgatggtgctcagatt

SEQ ID NO: 26382 - DNA, 25 bp, Probe Sequence
ctgtatggtgtctactgcttcagag

SEQ ID NO: 26383 - DNA, 25 bp, Probe Sequence
cttgtctcaatgatggtgctcagat

SEQ ID NO: 26384 - DNA, 25 bp, Probe Sequence
catacaactgaatgtgcccttagag

SEQ ID NO: 26385 - DNA, 25 bp, Probe Sequence
aagcataagctgtatggtgtctact

SEQ ID NO: 26386 - DNA, 25 bp, Probe Sequence
cccaccaaactgacctatgatgaag

SEQ ID NO: 26387 - DNA, 25 bp, Probe Sequence
ccaatatgaactcatgcaagttacc

SEQ ID NO: 26388 - DNA, 25 bp, Probe Sequence
caatatgaactcatgcaagttacca

SEQ ID NO: 26389 - DNA, 25 bp, Probe Sequence
tccaatatgaactcatgcaagttac

SEQ ID NO: 26390 - DNA, 25 bp, Probe Sequence
cataagctgtatggtgtctactgct

SEQ ID NO: 26391 - DNA, 25 bp, Probe Sequence
agcataagctgtatggtgtctactg

SEQ ID NO: 26392 - DNA, 25 bp, Probe Sequence
tgtctcaatgatggtgctcagattg

SEQ ID NO: 26393 - DNA, 25 bp, Probe Sequence
aatatgaactcatgcaagttaccaa

SEQ ID NO: 26394 - DNA, 25 bp, Probe Sequence
aggaactacggattttgggataaag

SEQ ID NO: 26395 - DNA, 25 bp, Probe Sequence
atacaactgaatgtgcccttagagc

SEQ ID NO: 26396 - DNA, 25 bp, Probe Sequence
ggaactacggattttgggataaaga

SEQ ID NO: 26397 - DNA, 25 bp, Probe Sequence
ttccaatatgaactcatgcaagtta

SEQ ID NO: 26398 - DNA, 25 bp, Probe Sequence
caggaactacggattttgggataaa

SEQ ID NO: 26399 - DNA, 25 bp, Probe Sequence
caatatcccatcacaaagcccagag

SEQ ID NO: 26400 - DNA, 25 bp, Probe Sequence
gaactacggattttgggataaagat

SEQ ID NO: 26401 - DNA, 25 bp, Probe Sequence
gctgtatggtgtctactgcttcaga

SEQ ID NO: 26402 - DNA, 25 bp, Probe Sequence
aatatcccatcacaaagcccagaga

SEQ ID NO: 26403 - DNA, 25 bp, Probe Sequence
ccaccaaactgacctatgatgaagc

SEQ ID NO: 26404 - DNA, 25 bp, Probe Sequence
tcaggaactacggattttgggataa

SEQ ID NO: 26405 - DNA, 25 bp, Probe Sequence
tagactgaacgaatacaaccaactt

SEQ ID NO: 26406 - DNA, 25 bp, Probe Sequence
atgctacagtggtgatatgattgaa

SEQ ID NO: 26407 - DNA, 25 bp, Probe Sequence
gcagtgagcctataccattagaatc

SEQ ID NO: 26408 - DNA, 25 bp, Probe Sequence
gtagactgaacgaatacaaccaact

SEQ ID NO: 26409 - DNA, 25 bp, Probe Sequence
cagttctgtaagtgccatcaattaa

SEQ ID NO: 26410 - DNA, 25 bp, Probe Sequence
cttatctgaagactggactgttgtt

SEQ ID NO: 26411 - DNA, 25 bp, Probe Sequence
agcagtgagcctataccattagaat

SEQ ID NO: 26412 - DNA, 25 bp, Probe Sequence
ccagttctgtaagtgccatcaatta

SEQ ID NO: 26413 - DNA, 25 bp, Probe Sequence
agcctataccattagaatcaagaga

SEQ ID NO: 26414 - DNA, 25 bp, Probe Sequence
cagtgagcctataccattagaatca

SEQ ID NO: 26415 - DNA, 25 bp, Probe Sequence
agactgaacgaatacaaccaacttc

SEQ ID NO: 26416 - DNA, 25 bp, Probe Sequence
gcctataccattagaatcaagagag

SEQ ID NO: 26417 - DNA, 25 bp, Probe Sequence
gagcctataccattagaatcaagag

SEQ ID NO: 26418 - DNA, 25 bp, Probe Sequence
gagcagtgagcctataccattagaa

SEQ ID NO: 26419 - DNA, 25 bp, Probe Sequence
agtgagcctataccattagaatcaa

SEQ ID NO: 26420 - DNA, 25 bp, Probe Sequence
tgagcctataccattagaatcaaga

SEQ ID NO: 26421 - DNA, 25 bp, Probe Sequence
gtgagcctataccattagaatcaag

SEQ ID NO: 26422 - DNA, 25 bp, Probe Sequence
atgaatggtatgaacaggcagagaa

SEQ ID NO: 26423 - DNA, 25 bp, Probe Sequence
gagagcagtgagcctataccattag

SEQ ID NO: 26424 - DNA, 25 bp, Probe Sequence
ccattagaatcaagagaggaataca

SEQ ID NO: 26425 - DNA, 25 bp, Probe Sequence
accattagaatcaagagaggaatac

SEQ ID NO: 26426 - DNA, 25 bp, Probe Sequence
catgctacagtggtgatatgattga

SEQ ID NO: 26427 - DNA, 25 bp, Probe Sequence
agagcagtgagcctataccattaga

SEQ ID NO: 26428 - DNA, 25 bp, Probe Sequence
agagagcagtgagcctataccatta

SEQ ID NO: 26429 - DNA, 25 bp, Probe Sequence
ccttaggactctgcattaactctat

SEQ ID NO: 26430 - DNA, 25 bp, Probe Sequence
atatgaaagactctgcctgcttaat

SEQ ID NO: 26431 - DNA, 25 bp, Probe Sequence
tatgaaagactctgcctgcttaatt

SEQ ID NO: 26432 - DNA, 25 bp, Probe Sequence
gcctgcttaattgtgctagaaataa

SEQ ID NO: 26433 - DNA, 25 bp, Probe Sequence
cagttgtgatggttgttaaatgctc

SEQ ID NO: 26434 - DNA, 25 bp, Probe Sequence
tgcctgcttaattgtgctagaaata

SEQ ID NO: 26435 - DNA, 25 bp, Probe Sequence
tactagattatccttaggactctgc

SEQ ID NO: 26436 - DNA, 25 bp, Probe Sequence
cctgcttaattgtgctagaaataac

SEQ ID NO: 26437 - DNA, 25 bp, Probe Sequence
atgaaagactctgcctgcttaattg

SEQ ID NO: 26438 - DNA, 25 bp, Probe Sequence
agttgtgatggttgttaaatgctca

SEQ ID NO: 26439 - DNA, 25 bp, Probe Sequence
ctctgcctgcttaattgtgctagaa

SEQ ID NO: 26440 - DNA, 25 bp, Probe Sequence
tccttaggactctgcattaactcta

SEQ ID NO: 26441 - DNA, 25 bp, Probe Sequence
actagattatccttaggactctgca

SEQ ID NO: 26442 - DNA, 25 bp, Probe Sequence
tatccttaggactctgcattaactc

SEQ ID NO: 26443 - DNA, 25 bp, Probe Sequence
atccttaggactctgcattaactct

SEQ ID NO: 26444 - DNA, 25 bp, Probe Sequence
gtagcaaccaaagattccagtgttt

SEQ ID NO: 26445 - DNA, 25 bp, Probe Sequence
ctgcctgcttaattgtgctagaaat

SEQ ID NO: 26446 - DNA, 25 bp, Probe Sequence
ttatccttaggactctgcattaact

SEQ ID NO: 26447 - DNA, 25 bp, Probe Sequence
aataacagcatctaaagtgaagact

SEQ ID NO: 26448 - DNA, 25 bp, Probe Sequence
ctagattatccttaggactctgcat

SEQ ID NO: 26449 - DNA, 25 bp, Probe Sequence
acagttgtgatggttgttaaatgct

SEQ ID NO: 26450 - DNA, 25 bp, Probe Sequence
agattatccttaggactctgcatta

SEQ ID NO: 26451 - DNA, 25 bp, Probe Sequence
tagattatccttaggactctgcatt

SEQ ID NO: 26452 - DNA, 25 bp, Probe Sequence
gactctgcctgcttaattgtgctag

SEQ ID NO: 26453 - DNA, 25 bp, Probe Sequence
gatgggtttatttaagggagattgc

SEQ ID NO: 26454 - DNA, 25 bp, Probe Sequence
gggatgggtttatttaagggagatt

SEQ ID NO: 26455 - DNA, 25 bp, Probe Sequence
ggatgggtttatttaagggagattg

SEQ ID NO: 26456 - DNA, 25 bp, Probe Sequence
atgggtttatttaagggagattgca

SEQ ID NO: 26457 - DNA, 25 bp, Probe Sequence
ctaagagggcaaggagaaggaagta

SEQ ID NO: 26458 - DNA, 25 bp, Probe Sequence
tgcaaggaagctatttaacatggtg

SEQ ID NO: 26459 - DNA, 25 bp, Probe Sequence
agaaggcataagccaataggataat

SEQ ID NO: 26460 - DNA, 25 bp, Probe Sequence
ctagaaggcataagccaataggata

SEQ ID NO: 26461 - DNA, 25 bp, Probe Sequence
taagagggcaaggagaaggaagtac

SEQ ID NO: 26462 - DNA, 25 bp, Probe Sequence
gataatatattcagggtgcagggtg

SEQ ID NO: 26463 - DNA, 25 bp, Probe Sequence
taggataatatattcagggtgcagg

SEQ ID NO: 26464 - DNA, 25 bp, Probe Sequence
tagaaggcataagccaataggataa

SEQ ID NO: 26465 - DNA, 25 bp, Probe Sequence
ggggatgggtttatttaagggagat

SEQ ID NO: 26466 - DNA, 25 bp, Probe Sequence
aggataatatattcagggtgcaggg

SEQ ID NO: 26467 - DNA, 25 bp, Probe Sequence
ggataatatattcagggtgcagggt

SEQ ID NO: 26468 - DNA, 25 bp, Probe Sequence
gaaggcataagccaataggataata

SEQ ID NO: 26469 - DNA, 25 bp, Probe Sequence
ttgctctggggatgggtttatttaa

SEQ ID NO: 26470 - DNA, 25 bp, Probe Sequence
ataatatattcagggtgcagggtgg

SEQ ID NO: 26471 - DNA, 25 bp, Probe Sequence
aaggaagctatttaacatggtgctg

SEQ ID NO: 26472 - DNA, 25 bp, Probe Sequence
caaggaagctatttaacatggtgct

SEQ ID NO: 26473 - DNA, 25 bp, Probe Sequence
gctatttaacatggtgctgagctag

SEQ ID NO: 26474 - DNA, 25 bp, Probe Sequence
ggaagctatttaacatggtgctgag

SEQ ID NO: 26475 - DNA, 25 bp, Probe Sequence
ctggggatgggtttatttaagggag

SEQ ID NO: 26476 - DNA, 25 bp, Probe Sequence
ctctggggatgggtttatttaaggg

SEQ ID NO: 26477 - DNA, 25 bp, Probe Sequence
tgtgtgtgtgtgtgtgtgtatatat

SEQ ID NO: 26478 - DNA, 25 bp, Probe Sequence
gtgtgtgtgtgtgtgtgtgtatata

SEQ ID NO: 26479 - DNA, 25 bp, Probe Sequence
cattagactggaacttgaactgatt

SEQ ID NO: 26480 - DNA, 25 bp, Probe Sequence
tcttatacgagtaatatgcctgcta

SEQ ID NO: 26481 - DNA, 25 bp, Probe Sequence
tgtgtgtgtgtgtgtgtgtgtatat

SEQ ID NO: 26482 - DNA, 25 bp, Probe Sequence
cagaatgtatattaaggtgtggctt

SEQ ID NO: 26483 - DNA, 25 bp, Probe Sequence
agacttgacagtggaactacattag

SEQ ID NO: 26484 - DNA, 25 bp, Probe Sequence
ctcattagactggaacttgaactga

SEQ ID NO: 26485 - DNA, 25 bp, Probe Sequence
aactcattagactggaacttgaact

SEQ ID NO: 26486 - DNA, 25 bp, Probe Sequence
attagactggaacttgaactgattc

SEQ ID NO: 26487 - DNA, 25 bp, Probe Sequence
aagacttgacagtggaactacatta

SEQ ID NO: 26488 - DNA, 25 bp, Probe Sequence
taagacttgacagtggaactacatt

SEQ ID NO: 26489 - DNA, 25 bp, Probe Sequence
ttaagacttgacagtggaactacat

SEQ ID NO: 26490 - DNA, 25 bp, Probe Sequence
gttaagacttgacagtggaactaca

SEQ ID NO: 26491 - DNA, 25 bp, Probe Sequence
tcattagactggaacttgaactgat

SEQ ID NO: 26492 - DNA, 25 bp, Probe Sequence
actcattagactggaacttgaactg

SEQ ID NO: 26493 - DNA, 25 bp, Probe Sequence
ctacattagtacacagcaccagaat

SEQ ID NO: 26494 - DNA, 25 bp, Probe Sequence
ctcttatacgagtaatatgcctgct

SEQ ID NO: 26495 - DNA, 25 bp, Probe Sequence
gacattaactcattagactggaact

SEQ ID NO: 26496 - DNA, 25 bp, Probe Sequence
agacattaactcattagactggaac

SEQ ID NO: 26497 - DNA, 25 bp, Probe Sequence
gaatgttaagacttgacagtggaac

SEQ ID NO: 26498 - DNA, 25 bp, Probe Sequence
agaatgttaagacttgacagtggaa

SEQ ID NO: 26499 - DNA, 25 bp, Probe Sequence
aagaatgttaagacttgacagtgga

SEQ ID NO: 26500 - DNA, 25 bp, Probe Sequence
gaagaatgttaagacttgacagtgg

SEQ ID NO: 26501 - DNA, 25 bp, Probe Sequence
tcataaccaagagatccacattagc

SEQ ID NO: 26502 - DNA, 25 bp, Probe Sequence
aattcataaccaagagatccacatt

SEQ ID NO: 26503 - DNA, 25 bp, Probe Sequence
ttcataaccaagagatccacattag

SEQ ID NO: 26504 - DNA, 25 bp, Probe Sequence
cataaccaagagatccacattagct

SEQ ID NO: 26505 - DNA, 25 bp, Probe Sequence
ataaccaagagatccacattagctt

SEQ ID NO: 26506 - DNA, 25 bp, Probe Sequence
attcataaccaagagatccacatta

SEQ ID NO: 26507 - DNA, 25 bp, Probe Sequence
aagagatccacattagcttgttagt

SEQ ID NO: 26508 - DNA, 25 bp, Probe Sequence
agagatccacattagcttgttagta

SEQ ID NO: 26509 - DNA, 25 bp, Probe Sequence
cgttaggtttgagagaaggaattgg

SEQ ID NO: 26510 - DNA, 25 bp, Probe Sequence
gagatccacattagcttgttagtaa

SEQ ID NO: 26511 - DNA, 25 bp, Probe Sequence
ttaggtttgagagaaggaattggct

SEQ ID NO: 26512 - DNA, 25 bp, Probe Sequence
gttaggtttgagagaaggaattggc

SEQ ID NO: 26513 - DNA, 25 bp, Probe Sequence
gcgttaggtttgagagaaggaattg

SEQ ID NO: 26514 - DNA, 25 bp, Probe Sequence
aaattcataaccaagagatccacat

SEQ ID NO: 26515 - DNA, 25 bp, Probe Sequence
agatccacattagcttgttagtaat

SEQ ID NO: 26516 - DNA, 25 bp, Probe Sequence
taggtttgagagaaggaattggctc

SEQ ID NO: 26517 - DNA, 25 bp, Probe Sequence
gtaagcaacctggcatcttaggaag

SEQ ID NO: 26518 - DNA, 25 bp, Probe Sequence
cagcttcaaatgcacaattcatcat

SEQ ID NO: 26519 - DNA, 25 bp, Probe Sequence
ggcgttaggtttgagagaaggaatt

SEQ ID NO: 26520 - DNA, 25 bp, Probe Sequence
caattcatcattgggctcacttcta

SEQ ID NO: 26521 - DNA, 25 bp, Probe Sequence
caagagatccacattagcttgttag

SEQ ID NO: 26522 - DNA, 25 bp, Probe Sequence
ccaagagatccacattagcttgtta

SEQ ID NO: 26523 - DNA, 25 bp, Probe Sequence
taaccaagagatccacattagcttg

SEQ ID NO: 26524 - DNA, 25 bp, Probe Sequence
tccacattagcttgttagtaatgct

SEQ ID NO: 26525 - DNA, 25 bp, Probe Sequence
gaactctaccaccatgaacaatgac

SEQ ID NO: 26526 - DNA, 25 bp, Probe Sequence
ggtgcttattggtattgtctcctgg

SEQ ID NO: 26527 - DNA, 25 bp, Probe Sequence
ggaactctaccaccatgaacaatga

SEQ ID NO: 26528 - DNA, 25 bp, Probe Sequence
ctcaagtatcactgactccatgatc

SEQ ID NO: 26529 - DNA, 25 bp, Probe Sequence
caagtatcactgactccatgatctg

SEQ ID NO: 26530 - DNA, 25 bp, Probe Sequence
tcaagtatcactgactccatgatct

SEQ ID NO: 26531 - DNA, 25 bp, Probe Sequence
aactctaccaccatgaacaatgacg

SEQ ID NO: 26532 - DNA, 25 bp, Probe Sequence
aagtatcactgactccatgatctgt

SEQ ID NO: 26533 - DNA, 25 bp, Probe Sequence
gaagccagaactgttggaatgaatg

SEQ ID NO: 26534 - DNA, 25 bp, Probe Sequence
agaagccagaactgttggaatgaat

SEQ ID NO: 26535 - DNA, 25 bp, Probe Sequence
catgggtgcttattggtattgtctc

SEQ ID NO: 26536 - DNA, 25 bp, Probe Sequence
atgggtgcttattggtattgtctcc

SEQ ID NO: 26537 - DNA, 25 bp, Probe Sequence
aagaagccagaactgttggaatgaa

SEQ ID NO: 26538 - DNA, 25 bp, Probe Sequence
gatcaaccaggtcatagcctacaac

SEQ ID NO: 26539 - DNA, 25 bp, Probe Sequence
agtatcactgactccatgatctgtg

SEQ ID NO: 26540 - DNA, 25 bp, Probe Sequence
ctggaactctaccaccatgaacaat

SEQ ID NO: 26541 - DNA, 25 bp, Probe Sequence
taaataactgcacattctccatcca

SEQ ID NO: 26542 - DNA, 25 bp, Probe Sequence
atcaaccaggtcatagcctacaact

SEQ ID NO: 26543 - DNA, 25 bp, Probe Sequence
ataaataactgcacattctccatcc

SEQ ID NO: 26544 - DNA, 25 bp, Probe Sequence
tggaactctaccaccatgaacaatg

SEQ ID NO: 26545 - DNA, 25 bp, Probe Sequence
aataactgcacattctccatccaaa

SEQ ID NO: 26546 - DNA, 25 bp, Probe Sequence
aaataactgcacattctccatccaa

SEQ ID NO: 26547 - DNA, 25 bp, Probe Sequence
aaacacatgggtgcttattggtatt

SEQ ID NO: 26548 - DNA, 25 bp, Probe Sequence
gctcaagtatcactgactccatgat

SEQ ID NO: 26549 - DNA, 25 bp, Probe Sequence
tacaattcctacagcgtctccaata

SEQ ID NO: 26550 - DNA, 25 bp, Probe Sequence
cactgatctctactaccacaaggaa

SEQ ID NO: 26551 - DNA, 25 bp, Probe Sequence
atacaattcctacagcgtctccaat

SEQ ID NO: 26552 - DNA, 25 bp, Probe Sequence
acaattcctacagcgtctccaatag

SEQ ID NO: 26553 - DNA, 25 bp, Probe Sequence
gatacaattcctacagcgtctccaa

SEQ ID NO: 26554 - DNA, 25 bp, Probe Sequence
caatgtcacaacctctctgatcttg

SEQ ID NO: 26555 - DNA, 25 bp, Probe Sequence
aggacaagcactacggatacaattc

SEQ ID NO: 26556 - DNA, 25 bp, Probe Sequence
caagcactacggatacaattcctac

SEQ ID NO: 26557 - DNA, 25 bp, Probe Sequence
aagcactacggatacaattcctaca

SEQ ID NO: 26558 - DNA, 25 bp, Probe Sequence
acaagcactacggatacaattccta

SEQ ID NO: 26559 - DNA, 25 bp, Probe Sequence
caggacaagcactacggatacaatt

SEQ ID NO: 26560 - DNA, 25 bp, Probe Sequence
gtattcggacttcctgctctacaag

SEQ ID NO: 26561 - DNA, 25 bp, Probe Sequence
agcactacggatacaattcctacag

SEQ ID NO: 26562 - DNA, 25 bp, Probe Sequence
ccactgatctctactaccacaagga

SEQ ID NO: 26563 - DNA, 25 bp, Probe Sequence
ttgtcacagaaatcagaggagagat

SEQ ID NO: 26564 - DNA, 25 bp, Probe Sequence
tttgtcacagaaatcagaggagaga

SEQ ID NO: 26565 - DNA, 25 bp, Probe Sequence
actgatctctactaccacaaggaaa

SEQ ID NO: 26566 - DNA, 25 bp, Probe Sequence
tttctgacccactgatctctactac

SEQ ID NO: 26567 - DNA, 25 bp, Probe Sequence
gtttctgacccactgatctctacta

SEQ ID NO: 26568 - DNA, 25 bp, Probe Sequence
atttgtcacagaaatcagaggagag

SEQ ID NO: 26569 - DNA, 25 bp, Probe Sequence
gatcactgtggaatcgaatcagaag

SEQ ID NO: 26570 - DNA, 25 bp, Probe Sequence
catttgtcacagaaatcagaggaga

SEQ ID NO: 26571 - DNA, 25 bp, Probe Sequence
ttccacatttgtcacagaaatcaga

SEQ ID NO: 26572 - DNA, 25 bp, Probe Sequence
tgtcacagaaatcagaggagagatg

SEQ ID NO: 26573 - DNA, 25 bp, Probe Sequence
agctgacatggaaatacagttgttg

SEQ ID NO: 26574 - DNA, 25 bp, Probe Sequence
ctgacatggaaatacagttgttggc

SEQ ID NO: 26575 - DNA, 25 bp, Probe Sequence
gctgacatggaaatacagttgttgg

SEQ ID NO: 26576 - DNA, 25 bp, Probe Sequence
agatctgtttcgtgcattggaagac

SEQ ID NO: 26577 - DNA, 25 bp, Probe Sequence
gatctgtttcgtgcattggaagacc

SEQ ID NO: 26578 - DNA, 25 bp, Probe Sequence
acatggaaatacagttgttggcctc

SEQ ID NO: 26579 - DNA, 25 bp, Probe Sequence
gacatggaaatacagttgttggcct

SEQ ID NO: 26580 - DNA, 25 bp, Probe Sequence
tgacatggaaatacagttgttggcc

SEQ ID NO: 26581 - DNA, 25 bp, Probe Sequence
catggaaatacagttgttggcctcc

SEQ ID NO: 26582 - DNA, 25 bp, Probe Sequence
ggtgcctctctattggtaatgttaa

SEQ ID NO: 26583 - DNA, 25 bp, Probe Sequence
ctattggtaatgttaagactgctgg

SEQ ID NO: 26584 - DNA, 25 bp, Probe Sequence
gtgcctctctattggtaatgttaag

SEQ ID NO: 26585 - DNA, 25 bp, Probe Sequence
tggtgcctctctattggtaatgtta

SEQ ID NO: 26586 - DNA, 25 bp, Probe Sequence
tgcctctctattggtaatgttaaga

SEQ ID NO: 26587 - DNA, 25 bp, Probe Sequence
gcctctctattggtaatgttaagac

SEQ ID NO: 26588 - DNA, 25 bp, Probe Sequence
tctattggtaatgttaagactgctg

SEQ ID NO: 26589 - DNA, 25 bp, Probe Sequence
ctctattggtaatgttaagactgct

SEQ ID NO: 26590 - DNA, 25 bp, Probe Sequence
tctctattggtaatgttaagactgc

SEQ ID NO: 26591 - DNA, 25 bp, Probe Sequence
ctggtgcctctctattggtaatgtt

SEQ ID NO: 26592 - DNA, 25 bp, Probe Sequence
agataatgctggtgcctctctattg

SEQ ID NO: 26593 - DNA, 25 bp, Probe Sequence
cctctctattggtaatgttaagact

SEQ ID NO: 26594 - DNA, 25 bp, Probe Sequence
ccatctacagagtttagcacatttg

SEQ ID NO: 26595 - DNA, 25 bp, Probe Sequence
tccatctacagagtttagcacattt

SEQ ID NO: 26596 - DNA, 25 bp, Probe Sequence
ttccatctacagagtttagcacatt

SEQ ID NO: 26597 - DNA, 25 bp, Probe Sequence
tttccatctacagagtttagcacat

SEQ ID NO: 26598 - DNA, 25 bp, Probe Sequence
gtttggagttcttggctttaatcat

SEQ ID NO: 26599 - DNA, 25 bp, Probe Sequence
ttggagttcttggctttaatcattc

SEQ ID NO: 26600 - DNA, 25 bp, Probe Sequence
ggagttcttggctttaatcattcat

SEQ ID NO: 26601 - DNA, 25 bp, Probe Sequence
ctttccatctacagagtttagcaca

SEQ ID NO: 26602 - DNA, 25 bp, Probe Sequence
tattggtaatgttaagactgctggg

SEQ ID NO: 26603 - DNA, 25 bp, Probe Sequence
tggagttcttggctttaatcattca

SEQ ID NO: 26604 - DNA, 25 bp, Probe Sequence
tttggagttcttggctttaatcatt

SEQ ID NO: 26605 - DNA, 25 bp, Probe Sequence
catctacagagtttagcacatttga

SEQ ID NO: 26606 - DNA, 25 bp, Probe Sequence
ctggataaggacaacaatgagaagc

SEQ ID NO: 26607 - DNA, 25 bp, Probe Sequence
accatccagaatgacatcatgttat

SEQ ID NO: 26608 - DNA, 25 bp, Probe Sequence
cctggataaggacaacaatgagaag

SEQ ID NO: 26609 - DNA, 25 bp, Probe Sequence
atccagaatgacatcatgttattgc

SEQ ID NO: 26610 - DNA, 25 bp, Probe Sequence
gaccatccagaatgacatcatgtta

SEQ ID NO: 26611 - DNA, 25 bp, Probe Sequence
ccatccagaatgacatcatgttatt

SEQ ID NO: 26612 - DNA, 25 bp, Probe Sequence
atataatcagcggaccatccagaat

SEQ ID NO: 26613 - DNA, 25 bp, Probe Sequence
aatataatcagcggaccatccagaa

SEQ ID NO: 26614 - DNA, 25 bp, Probe Sequence
catccagaatgacatcatgttattg

SEQ ID NO: 26615 - DNA, 25 bp, Probe Sequence
tggataaggacaacaatgagaagct

SEQ ID NO: 26616 - DNA, 25 bp, Probe Sequence
ccagaatgacatcatgttattgcag

SEQ ID NO: 26617 - DNA, 25 bp, Probe Sequence
tataatcagcggaccatccagaatg

SEQ ID NO: 26618 - DNA, 25 bp, Probe Sequence
caatataatcagcggaccatccaga

SEQ ID NO: 26619 - DNA, 25 bp, Probe Sequence
tcaatataatcagcggaccatccag

SEQ ID NO: 26620 - DNA, 25 bp, Probe Sequence
ctcaatataatcagcggaccatcca

SEQ ID NO: 26621 - DNA, 25 bp, Probe Sequence
ggaagcaatataaatgtcaccctgg

SEQ ID NO: 26622 - DNA, 25 bp, Probe Sequence
tccagaatgacatcatgttattgca

SEQ ID NO: 26623 - DNA, 25 bp, Probe Sequence
cacagtgttgccagagccttaataa

SEQ ID NO: 26624 - DNA, 25 bp, Probe Sequence
agaatgacatcatgttattgcagct

SEQ ID NO: 26625 - DNA, 25 bp, Probe Sequence
cagaatgacatcatgttattgcagc

SEQ ID NO: 26626 - DNA, 25 bp, Probe Sequence
tatcttcagatccagagtccagcag

SEQ ID NO: 26627 - DNA, 25 bp, Probe Sequence
gaagcaatataaatgtcaccctggg

SEQ ID NO: 26628 - DNA, 25 bp, Probe Sequence
cctcaatataatcagcggaccatcc

SEQ ID NO: 26629 - DNA, 25 bp, Probe Sequence
cagtgttgccagagccttaataaac

SEQ ID NO: 26630 - DNA, 25 bp, Probe Sequence
ttatacggcatgaatgaagaaggat

SEQ ID NO: 26631 - DNA, 25 bp, Probe Sequence
attatacggcatgaatgaagaagga

SEQ ID NO: 26632 - DNA, 25 bp, Probe Sequence
gattatacggcatgaatgaagaagg

SEQ ID NO: 26633 - DNA, 25 bp, Probe Sequence
acagattatacggcatgaatgaaga

SEQ ID NO: 26634 - DNA, 25 bp, Probe Sequence
caacagattatacggcatgaatgaa

SEQ ID NO: 26635 - DNA, 25 bp, Probe Sequence
caagtattctgttgctaatgacacc

SEQ ID NO: 26636 - DNA, 25 bp, Probe Sequence
ccaagtattctgttgctaatgacac

SEQ ID NO: 26637 - DNA, 25 bp, Probe Sequence
aacagattatacggcatgaatgaag

SEQ ID NO: 26638 - DNA, 25 bp, Probe Sequence
acaacagattatacggcatgaatga

SEQ ID NO: 26639 - DNA, 25 bp, Probe Sequence
cacaacagattatacggcatgaatg

SEQ ID NO: 26640 - DNA, 25 bp, Probe Sequence
cagattatacggcatgaatgaagaa

SEQ ID NO: 26641 - DNA, 25 bp, Probe Sequence
aagaacatgaagatgattgaactgc

SEQ ID NO: 26642 - DNA, 25 bp, Probe Sequence
agattatacggcatgaatgaagaag

SEQ ID NO: 26643 - DNA, 25 bp, Probe Sequence
tatacggcatgaatgaagaaggatg

SEQ ID NO: 26644 - DNA, 25 bp, Probe Sequence
ggagaagaacatgaagatgattgaa

SEQ ID NO: 26645 - DNA, 25 bp, Probe Sequence
aagtattctgttgctaatgacaccg

SEQ ID NO: 26646 - DNA, 25 bp, Probe Sequence
gaagaacatgaagatgattgaactg

SEQ ID NO: 26647 - DNA, 25 bp, Probe Sequence
agaagaacatgaagatgattgaact

SEQ ID NO: 26648 - DNA, 25 bp, Probe Sequence
gaattgcctcagctactctaacatt

SEQ ID NO: 26649 - DNA, 25 bp, Probe Sequence
gagaagaacatgaagatgattgaac

SEQ ID NO: 26650 - DNA, 25 bp, Probe Sequence
tacacactcgaatcattgaagatcc

SEQ ID NO: 26651 - DNA, 25 bp, Probe Sequence
ggatacacactcgaatcattgaaga

SEQ ID NO: 26652 - DNA, 25 bp, Probe Sequence
cagaagaatcctgtaagtacaatcc

SEQ ID NO: 26653 - DNA, 25 bp, Probe Sequence
gcacaacagattatacggcatgaat

SEQ ID NO: 26654 - DNA, 25 bp, Probe Sequence
gtgtgatgacttgtaactgtaatcc

SEQ ID NO: 26655 - DNA, 25 bp, Probe Sequence
ggtgtgatgacttgtaactgtaatc

SEQ ID NO: 26656 - DNA, 25 bp, Probe Sequence
gtgatgacttgtaactgtaatccca

SEQ ID NO: 26657 - DNA, 25 bp, Probe Sequence
tgtgatgacttgtaactgtaatccc

SEQ ID NO: 26658 - DNA, 25 bp, Probe Sequence
cattgtgccactatcctccagtatg

SEQ ID NO: 26659 - DNA, 25 bp, Probe Sequence
tcattgtgccactatcctccagtat

SEQ ID NO: 26660 - DNA, 25 bp, Probe Sequence
tgatgacttgtaactgtaatcccag

SEQ ID NO: 26661 - DNA, 25 bp, Probe Sequence
ggaagctgagacaagaggatcaatt

SEQ ID NO: 26662 - DNA, 25 bp, Probe Sequence
gtcattgtgccactatcctccagta

SEQ ID NO: 26663 - DNA, 25 bp, Probe Sequence
aggaagctgagacaagaggatcaat

SEQ ID NO: 26664 - DNA, 25 bp, Probe Sequence
gaagctgagacaagaggatcaattg

SEQ ID NO: 26665 - DNA, 25 bp, Probe Sequence
gtggaggttacagtgagcagagatc

SEQ ID NO: 26666 - DNA, 25 bp, Probe Sequence
attgtgccactatcctccagtatgg

SEQ ID NO: 26667 - DNA, 25 bp, Probe Sequence
ctatcctccagtatgggtgacagag

SEQ ID NO: 26668 - DNA, 25 bp, Probe Sequence
caggaagctgagacaagaggatcaa

SEQ ID NO: 26669 - DNA, 25 bp, Probe Sequence
tggaggttacagtgagcagagatca

SEQ ID NO: 26670 - DNA, 25 bp, Probe Sequence
ctgtcattgtgccactatcctccag

SEQ ID NO: 26671 - DNA, 25 bp, Probe Sequence
cactatcctccagtatgggtgacag

SEQ ID NO: 26672 - DNA, 25 bp, Probe Sequence
accccatctctacagttttgtaaaa

SEQ ID NO: 26673 - DNA, 25 bp, Probe Sequence
aaccccatctctacagttttgtaaa

SEQ ID NO: 26674 - DNA, 25 bp, Probe Sequence
cctatagtcccagctactcaggaag

SEQ ID NO: 26675 - DNA, 25 bp, Probe Sequence
tatcctccagtatgggtgacagagt

SEQ ID NO: 26676 - DNA, 25 bp, Probe Sequence
actatcctccagtatgggtgacaga

SEQ ID NO: 26677 - DNA, 25 bp, Probe Sequence
aaaccccatctctacagttttgtaa

SEQ ID NO: 26678 - DNA, 25 bp, Probe Sequence
tatgtgtgtgtgtgtatgtgtatct

SEQ ID NO: 26679 - DNA, 25 bp, Probe Sequence
gtatgtgtgtgtgtgtatgtgtatc

SEQ ID NO: 26680 - DNA, 25 bp, Probe Sequence
tgtatgtgtgtgtgtgtatgtgtat

SEQ ID NO: 26681 - DNA, 25 bp, Probe Sequence
atgtgtgtgtgtgtatgtgtatctc

SEQ ID NO: 26682 - DNA, 25 bp, Probe Sequence
gtgtatgtgtgtgtgtgtatgtgta

SEQ ID NO: 26683 - DNA, 25 bp, Probe Sequence
tgtgtgtgtgtgtatgtgtatctca

SEQ ID NO: 26684 - DNA, 25 bp, Probe Sequence
gtgtgtatgtgtgtgtgtgtatgtg

SEQ ID NO: 26685 - DNA, 25 bp, Probe Sequence
gtgtgtgtatgtgtgtgtgtgtatg

SEQ ID NO: 26686 - DNA, 25 bp, Probe Sequence
tgtgtatgtgtgtgtgtgtatgtgt

SEQ ID NO: 26687 - DNA, 25 bp, Probe Sequence
tgtgtgtatgtgtgtgtgtgtatgt

SEQ ID NO: 26688 - DNA, 25 bp, Probe Sequence
gtgtgtgtgtgtatgtgtatctcac

SEQ ID NO: 26689 - DNA, 25 bp, Probe Sequence
gtgtgtgtgtatgtgtgtgtgtgta

SEQ ID NO: 26690 - DNA, 25 bp, Probe Sequence
ttatttagattggcagtgtagggag

SEQ ID NO: 26691 - DNA, 25 bp, Probe Sequence
tttatttagattggcagtgtaggga

SEQ ID NO: 26692 - DNA, 25 bp, Probe Sequence
aaatgcctttaacttgtttgtgtgt

SEQ ID NO: 26693 - DNA, 25 bp, Probe Sequence
tatttagattggcagtgtagggagt

SEQ ID NO: 26694 - DNA, 25 bp, Probe Sequence
atggaaggaaactttgaagagattg

SEQ ID NO: 26695 - DNA, 25 bp, Probe Sequence
attgagagtttcctggatattagcc

SEQ ID NO: 26696 - DNA, 25 bp, Probe Sequence
aatgcctttaacttgtttgtgtgtc

SEQ ID NO: 26697 - DNA, 25 bp, Probe Sequence
ggaggatgtgaattgttagtttctg

SEQ ID NO: 26698 - DNA, 25 bp, Probe Sequence
ggatgtgaattgttagtttctgagt

SEQ ID NO: 26699 - DNA, 25 bp, Probe Sequence
gggaggatgtgaattgttagtttct

SEQ ID NO: 26700 - DNA, 25 bp, Probe Sequence
gtgggaggatgtgaattgttagttt

SEQ ID NO: 26701 - DNA, 25 bp, Probe Sequence
gtggaaatcttggatgatgacaatt

SEQ ID NO: 26702 - DNA, 25 bp, Probe Sequence
gcgactccatctctacaaataaata

SEQ ID NO: 26703 - DNA, 25 bp, Probe Sequence
catctggttggtctttattgagcac

SEQ ID NO: 26704 - DNA, 25 bp, Probe Sequence
gttggtctttattgagcacctacta

SEQ ID NO: 26705 - DNA, 25 bp, Probe Sequence
ttggtctttattgagcacctactat

SEQ ID NO: 26706 - DNA, 25 bp, Probe Sequence
tggtctttattgagcacctactata

SEQ ID NO: 26707 - DNA, 25 bp, Probe Sequence
gtctttattgagcacctactatatg

SEQ ID NO: 26708 - DNA, 25 bp, Probe Sequence
attgagcacctactatatgcagaag

SEQ ID NO: 26709 - DNA, 25 bp, Probe Sequence
gatcattggatctcaggagttggag

SEQ ID NO: 26710 - DNA, 25 bp, Probe Sequence
gaggatcattggatctcaggagttg

SEQ ID NO: 26711 - DNA, 25 bp, Probe Sequence
tattgagcacctactatatgcagaa

SEQ ID NO: 26712 - DNA, 25 bp, Probe Sequence
ttattgagcacctactatatgcaga

SEQ ID NO: 26713 - DNA, 25 bp, Probe Sequence
ctgcatctggttggtctttattgag

SEQ ID NO: 26714 - DNA, 25 bp, Probe Sequence
ggtctttattgagcacctactatat

SEQ ID NO: 26715 - DNA, 25 bp, Probe Sequence
cgactccatctctacaaataaataa

SEQ ID NO: 26716 - DNA, 25 bp, Probe Sequence
gcatctggttggtctttattgagca

SEQ ID NO: 26717 - DNA, 25 bp, Probe Sequence
ggttggtctttattgagcacctact

SEQ ID NO: 26718 - DNA, 25 bp, Probe Sequence
ctggttggtctttattgagcaccta

SEQ ID NO: 26719 - DNA, 25 bp, Probe Sequence
ttgagcacctactatatgcagaagg

SEQ ID NO: 26720 - DNA, 25 bp, Probe Sequence
tggttggtctttattgagcacctac

SEQ ID NO: 26721 - DNA, 25 bp, Probe Sequence
caatgaagtcatccactcctgcatc

SEQ ID NO: 26722 - DNA, 25 bp, Probe Sequence
ctcctgcatctggttggtctttatt

SEQ ID NO: 26723 - DNA, 25 bp, Probe Sequence
aatgaagtcatccactcctgcatct

SEQ ID NO: 26724 - DNA, 25 bp, Probe Sequence
tctttattgagcacctactatatgc

SEQ ID NO: 26725 - DNA, 25 bp, Probe Sequence
ggaggatcattggatctcaggagtt

SEQ ID NO: 26726 - DNA, 25 bp, Probe Sequence
ctggtgttggatgtcaatgatgatt

SEQ ID NO: 26727 - DNA, 25 bp, Probe Sequence
gaatctgtaaccaataccatgaagt

SEQ ID NO: 26728 - DNA, 25 bp, Probe Sequence
tctgtaaccaataccatgaagttca

SEQ ID NO: 26729 - DNA, 25 bp, Probe Sequence
agaatctgtaaccaataccatgaag

SEQ ID NO: 26730 - DNA, 25 bp, Probe Sequence
tgtaaccaataccatgaagttcagg

SEQ ID NO: 26731 - DNA, 25 bp, Probe Sequence
atctgtaaccaataccatgaagttc

SEQ ID NO: 26732 - DNA, 25 bp, Probe Sequence
aagaatctgtaaccaataccatgaa

SEQ ID NO: 26733 - DNA, 25 bp, Probe Sequence
ctgtaaccaataccatgaagttcag

SEQ ID NO: 26734 - DNA, 25 bp, Probe Sequence
aatctgtaaccaataccatgaagtt

SEQ ID NO: 26735 - DNA, 25 bp, Probe Sequence
aagtaaccaaacaagaagacctcat

SEQ ID NO: 26736 - DNA, 25 bp, Probe Sequence
ttggaaacttgctggatatgatgta

SEQ ID NO: 26737 - DNA, 25 bp, Probe Sequence
ctgaggaagtaaccaaacaagaaga

SEQ ID NO: 26738 - DNA, 25 bp, Probe Sequence
gaagtaaccaaacaagaagacctca

SEQ ID NO: 26739 - DNA, 25 bp, Probe Sequence
tgaggaagtaaccaaacaagaagac

SEQ ID NO: 26740 - DNA, 25 bp, Probe Sequence
taaccaataccatgaagttcaggct

SEQ ID NO: 26741 - DNA, 25 bp, Probe Sequence
gtaaccaataccatgaagttcaggc

SEQ ID NO: 26742 - DNA, 25 bp, Probe Sequence
tttctgaggaagtaaccaaacaaga

SEQ ID NO: 26743 - DNA, 25 bp, Probe Sequence
tcttggaaacttgctggatatgatg

SEQ ID NO: 26744 - DNA, 25 bp, Probe Sequence
gtcttggaaacttgctggatatgat

SEQ ID NO: 26745 - DNA, 25 bp, Probe Sequence
tctgaggaagtaaccaaacaagaag

SEQ ID NO: 26746 - DNA, 25 bp, Probe Sequence
cttggaaacttgctggatatgatgt

SEQ ID NO: 26747 - DNA, 25 bp, Probe Sequence
aataccatgaagttcaggctgtgat

SEQ ID NO: 26748 - DNA, 25 bp, Probe Sequence
ggaagtaaccaaacaagaagacctc

SEQ ID NO: 26749 - DNA, 25 bp, Probe Sequence
gaggaagtaaccaaacaagaagacc

SEQ ID NO: 26750 - DNA, 25 bp, Probe Sequence
gaagacaaccttgaccattacagaa

SEQ ID NO: 26751 - DNA, 25 bp, Probe Sequence
cagaagacaaccttgaccattacag

SEQ ID NO: 26752 - DNA, 25 bp, Probe Sequence
agaagacaaccttgaccattacaga

SEQ ID NO: 26753 - DNA, 25 bp, Probe Sequence
aacaagttgagtacctccttattca

SEQ ID NO: 26754 - DNA, 25 bp, Probe Sequence
acaagttgagtacctccttattcat

SEQ ID NO: 26755 - DNA, 25 bp, Probe Sequence
aagttgagtacctccttattcatgg

SEQ ID NO: 26756 - DNA, 25 bp, Probe Sequence
ctccagaagacaaccttgaccatta

SEQ ID NO: 26757 - DNA, 25 bp, Probe Sequence
caagttgagtacctccttattcatg

SEQ ID NO: 26758 - DNA, 25 bp, Probe Sequence
tcacaacagattattaccttacaga

SEQ ID NO: 26759 - DNA, 25 bp, Probe Sequence
tccagaagacaaccttgaccattac

SEQ ID NO: 26760 - DNA, 25 bp, Probe Sequence
tgtcttcacaacagattattacctt

SEQ ID NO: 26761 - DNA, 25 bp, Probe Sequence
ccagaagacaaccttgaccattaca

SEQ ID NO: 26762 - DNA, 25 bp, Probe Sequence
aagagggattagggagagaagatag

SEQ ID NO: 26763 - DNA, 25 bp, Probe Sequence
gataagagggattagggagagaaga

SEQ ID NO: 26764 - DNA, 25 bp, Probe Sequence
tttctctttaccttagcacctcaaa

SEQ ID NO: 26765 - DNA, 25 bp, Probe Sequence
aatgtttctctttaccttagcacct

SEQ ID NO: 26766 - DNA, 25 bp, Probe Sequence
caatgtttctctttaccttagcacc

SEQ ID NO: 26767 - DNA, 25 bp, Probe Sequence
aacagtctcaggaaatcaaatatgc

SEQ ID NO: 26768 - DNA, 25 bp, Probe Sequence
atgtttctctttaccttagcacctc

SEQ ID NO: 26769 - DNA, 25 bp, Probe Sequence
ttgagtacctccttattcatggaac

SEQ ID NO: 26770 - DNA, 25 bp, Probe Sequence
gttgagtacctccttattcatggaa

SEQ ID NO: 26771 - DNA, 25 bp, Probe Sequence
ataagagggattagggagagaagat

SEQ ID NO: 26772 - DNA, 25 bp, Probe Sequence
gagtacctccttattcatggaacag

SEQ ID NO: 26773 - DNA, 25 bp, Probe Sequence
agacaaccttgaccattacagaaat

SEQ ID NO: 26774 - DNA, 25 bp, Probe Sequence
acaacagaatatccaggtcactatg

SEQ ID NO: 26775 - DNA, 25 bp, Probe Sequence
ctaacaacagaatatccaggtcact

SEQ ID NO: 26776 - DNA, 25 bp, Probe Sequence
ttgttgctcctcggtatatgtaatc

SEQ ID NO: 26777 - DNA, 25 bp, Probe Sequence
aacaacagaatatccaggtcactat

SEQ ID NO: 26778 - DNA, 25 bp, Probe Sequence
gttgttgctcctcggtatatgtaat

SEQ ID NO: 26779 - DNA, 25 bp, Probe Sequence
gttgctcctcggtatatgtaatcat

SEQ ID NO: 26780 - DNA, 25 bp, Probe Sequence
attactatatccgaggagcaacaac

SEQ ID NO: 26781 - DNA, 25 bp, Probe Sequence
taacaacagaatatccaggtcacta

SEQ ID NO: 26782 - DNA, 25 bp, Probe Sequence
gattactatatccgaggagcaacaa

SEQ ID NO: 26783 - DNA, 25 bp, Probe Sequence
atgattactatatccgaggagcaac

SEQ ID NO: 26784 - DNA, 25 bp, Probe Sequence
ggatgactgaatacgactgtgaatt

SEQ ID NO: 26785 - DNA, 25 bp, Probe Sequence
tgttgctcctcggtatatgtaatca

SEQ ID NO: 26786 - DNA, 25 bp, Probe Sequence
gctaacaacagaatatccaggtcac

SEQ ID NO: 26787 - DNA, 25 bp, Probe Sequence
tgattactatatccgaggagcaaca

SEQ ID NO: 26788 - DNA, 25 bp, Probe Sequence
tatgattactatatccgaggagcaa

SEQ ID NO: 26789 - DNA, 25 bp, Probe Sequence
ttatgattactatatccgaggagca

SEQ ID NO: 26790 - DNA, 25 bp, Probe Sequence
ttactatatccgaggagcaacaacc

SEQ ID NO: 26791 - DNA, 25 bp, Probe Sequence
ggctaacaacagaatatccaggtca

SEQ ID NO: 26792 - DNA, 25 bp, Probe Sequence
ggttgttgctcctcggtatatgtaa

SEQ ID NO: 26793 - DNA, 25 bp, Probe Sequence
tgctcctcggtatatgtaatcataa

SEQ ID NO: 26794 - DNA, 25 bp, Probe Sequence
ttgctcctcggtatatgtaatcata

SEQ ID NO: 26795 - DNA, 25 bp, Probe Sequence
cggatgactgaatacgactgtgaat

SEQ ID NO: 26796 - DNA, 25 bp, Probe Sequence
caacagaatatccaggtcactatgg

SEQ ID NO: 26797 - DNA, 25 bp, Probe Sequence
aacagaatatccaggtcactatggt

SEQ ID NO: 26798 - DNA, 25 bp, Probe Sequence
ggcactaagaaggtctatgaattaa

SEQ ID NO: 26799 - DNA, 25 bp, Probe Sequence
tttatctaacggctactgaaacacc

SEQ ID NO: 26800 - DNA, 25 bp, Probe Sequence
acctctaaccatctctttgttcttt

SEQ ID NO: 26801 - DNA, 25 bp, Probe Sequence
aacctctaaccatctctttgttctt

SEQ ID NO: 26802 - DNA, 25 bp, Probe Sequence
aaacctctaaccatctctttgttct

SEQ ID NO: 26803 - DNA, 25 bp, Probe Sequence
cctctaaccatctctttgttctttg

SEQ ID NO: 26804 - DNA, 25 bp, Probe Sequence
gggcactaagaaggtctatgaatta

SEQ ID NO: 26805 - DNA, 25 bp, Probe Sequence
ctctaaccatctctttgttctttga

SEQ ID NO: 26806 - DNA, 25 bp, Probe Sequence
tgggcactaagaaggtctatgaatt

SEQ ID NO: 26807 - DNA, 25 bp, Probe Sequence
tcatacgaattggatcaatcttgaa

SEQ ID NO: 26808 - DNA, 25 bp, Probe Sequence
tatttggagtgagaaatcaaggaga

SEQ ID NO: 26809 - DNA, 25 bp, Probe Sequence
atggaattctctgtaagcctagttg

SEQ ID NO: 26810 - DNA, 25 bp, Probe Sequence
aatggaattctctgtaagcctagtt

SEQ ID NO: 26811 - DNA, 25 bp, Probe Sequence
atttggagtgagaaatcaaggagac

SEQ ID NO: 26812 - DNA, 25 bp, Probe Sequence
tctaaccatctctttgttctttgaa

SEQ ID NO: 26813 - DNA, 25 bp, Probe Sequence
tttctcaaagagcaaccagtatcac

SEQ ID NO: 26814 - DNA, 25 bp, Probe Sequence
atcatacgaattggatcaatcttga

SEQ ID NO: 26815 - DNA, 25 bp, Probe Sequence
caaccagtatcacttccctgtttat

SEQ ID NO: 26816 - DNA, 25 bp, Probe Sequence
ctgggcactaagaaggtctatgaat

SEQ ID NO: 26817 - DNA, 25 bp, Probe Sequence
ttatttggagtgagaaatcaaggag

SEQ ID NO: 26818 - DNA, 25 bp, Probe Sequence
cttatttggagtgagaaatcaagga

SEQ ID NO: 26819 - DNA, 25 bp, Probe Sequence
aaccagtatcacttccctgtttata

SEQ ID NO: 26820 - DNA, 25 bp, Probe Sequence
attctctgtaagcctagttgctgaa

SEQ ID NO: 26821 - DNA, 25 bp, Probe Sequence
aattctctgtaagcctagttgctga

SEQ ID NO: 26822 - DNA, 25 bp, Probe Sequence
tacagacacacagagacacatacac

SEQ ID NO: 26823 - DNA, 25 bp, Probe Sequence
attctaccataaccacatcttccac

SEQ ID NO: 26824 - DNA, 25 bp, Probe Sequence
cttacagacacacagagacacatac

SEQ ID NO: 26825 - DNA, 25 bp, Probe Sequence
aattctaccataaccacatcttcca

SEQ ID NO: 26826 - DNA, 25 bp, Probe Sequence
cacacagagacacatacacattgat

SEQ ID NO: 26827 - DNA, 25 bp, Probe Sequence
cagacacacagagacacatacacat

SEQ ID NO: 26828 - DNA, 25 bp, Probe Sequence
ttacagacacacagagacacataca

SEQ ID NO: 26829 - DNA, 25 bp, Probe Sequence
ccttacagacacacagagacacata

SEQ ID NO: 26830 - DNA, 25 bp, Probe Sequence
tatgctaatgaaggtacagttgtgg

SEQ ID NO: 26831 - DNA, 25 bp, Probe Sequence
acacagagacacatacacattgatc

SEQ ID NO: 26832 - DNA, 25 bp, Probe Sequence
ttatgctaatgaaggtacagttgtg

SEQ ID NO: 26833 - DNA, 25 bp, Probe Sequence
acagagacacatacacattgatctt

SEQ ID NO: 26834 - DNA, 25 bp, Probe Sequence
atatagcagtaggacagaatgtgac

SEQ ID NO: 26835 - DNA, 25 bp, Probe Sequence
gacacacagagacacatacacattg

SEQ ID NO: 26836 - DNA, 25 bp, Probe Sequence
agacacacagagacacatacacatt

SEQ ID NO: 26837 - DNA, 25 bp, Probe Sequence
cacagagacacatacacattgatct

SEQ ID NO: 26838 - DNA, 25 bp, Probe Sequence
ttctaccataaccacatcttccacc

SEQ ID NO: 26839 - DNA, 25 bp, Probe Sequence
tatagcagtaggacagaatgtgaca

SEQ ID NO: 26840 - DNA, 25 bp, Probe Sequence
taattctaccataaccacatcttcc

SEQ ID NO: 26841 - DNA, 25 bp, Probe Sequence
acacacagagacacatacacattga

SEQ ID NO: 26842 - DNA, 25 bp, Probe Sequence
cttatgctaatgaaggtacagttgt

SEQ ID NO: 26843 - DNA, 25 bp, Probe Sequence
aatatagcagtaggacagaatgtga

SEQ ID NO: 26844 - DNA, 25 bp, Probe Sequence
ctaatgaaggtacagttgtggtcac

SEQ ID NO: 26845 - DNA, 25 bp, Probe Sequence
cagagacacatacacattgatctta

SEQ ID NO: 26846 - DNA, 25 bp, Probe Sequence
gcctatgattacacaataccaccta

SEQ ID NO: 26847 - DNA, 25 bp, Probe Sequence
tgcctatgattacacaataccacct

SEQ ID NO: 26848 - DNA, 25 bp, Probe Sequence
aatagaagaagttcaagccttggat

SEQ ID NO: 26849 - DNA, 25 bp, Probe Sequence
atagaagaagttcaagccttggatg

SEQ ID NO: 26850 - DNA, 25 bp, Probe Sequence
agtgcctatgattacacaataccac

SEQ ID NO: 26851 - DNA, 25 bp, Probe Sequence
cagtgcctatgattacacaatacca

SEQ ID NO: 26852 - DNA, 25 bp, Probe Sequence
acagtgcctatgattacacaatacc

SEQ ID NO: 26853 - DNA, 25 bp, Probe Sequence
cctatgattacacaataccacctat

SEQ ID NO: 26854 - DNA, 25 bp, Probe Sequence
tgattacacaataccacctatggag

SEQ ID NO: 26855 - DNA, 25 bp, Probe Sequence
gattacacaataccacctatggaga

SEQ ID NO: 26856 - DNA, 25 bp, Probe Sequence
gtgcctatgattacacaataccacc

SEQ ID NO: 26857 - DNA, 25 bp, Probe Sequence
tacagtgcctatgattacacaatac

SEQ ID NO: 26858 - DNA, 25 bp, Probe Sequence
attacacaataccacctatggagaa

SEQ ID NO: 26859 - DNA, 25 bp, Probe Sequence
atgattacacaataccacctatgga

SEQ ID NO: 26860 - DNA, 25 bp, Probe Sequence
gagctggtgtcatagatgaagatta

SEQ ID NO: 26861 - DNA, 25 bp, Probe Sequence
tagaagaagttcaagccttggatga

SEQ ID NO: 26862 - DNA, 25 bp, Probe Sequence
ttgtatgtaaatctgctttgtggtg

SEQ ID NO: 26863 - DNA, 25 bp, Probe Sequence
gttgtatgtaaatctgctttgtggt

SEQ ID NO: 26864 - DNA, 25 bp, Probe Sequence
aggttgtatgtaaatctgctttgtg

SEQ ID NO: 26865 - DNA, 25 bp, Probe Sequence
gtatgtaaatctgctttgtggtgac

SEQ ID NO: 26866 - DNA, 25 bp, Probe Sequence
gctggtgtcatagatgaagattata

SEQ ID NO: 26867 - DNA, 25 bp, Probe Sequence
agctggtgtcatagatgaagattat

SEQ ID NO: 26868 - DNA, 25 bp, Probe Sequence
ggttgtatgtaaatctgctttgtgg

SEQ ID NO: 26869 - DNA, 25 bp, Probe Sequence
tattgatgtaggagctggtgtcata

SEQ ID NO: 26870 - DNA, 25 bp, Probe Sequence
cgttggtataatcacatcaagtctt

SEQ ID NO: 26871 - DNA, 25 bp, Probe Sequence
tggtataatcacatcaagtcttacg

SEQ ID NO: 26872 - DNA, 25 bp, Probe Sequence
ggtataatcacatcaagtcttacga

SEQ ID NO: 26873 - DNA, 25 bp, Probe Sequence
ttgccaagtcttccatcttactaga

SEQ ID NO: 26874 - DNA, 25 bp, Probe Sequence
gttgccaagtcttccatcttactag

SEQ ID NO: 26875 - DNA, 25 bp, Probe Sequence
tgttgccaagtcttccatcttacta

SEQ ID NO: 26876 - DNA, 25 bp, Probe Sequence
caggaagtggagctacagatagtaa

SEQ ID NO: 26877 - DNA, 25 bp, Probe Sequence
ttgttgccaagtcttccatcttact

SEQ ID NO: 26878 - DNA, 25 bp, Probe Sequence
ctacaggaagtggagctacagatag

SEQ ID NO: 26879 - DNA, 25 bp, Probe Sequence
tgatgagacagatatggcgaaatta

SEQ ID NO: 26880 - DNA, 25 bp, Probe Sequence
gatgatgagacagatatggcgaaat

SEQ ID NO: 26881 - DNA, 25 bp, Probe Sequence
tgagacagatatggcgaaattagag

SEQ ID NO: 26882 - DNA, 25 bp, Probe Sequence
atgagacagatatggcgaaattaga

SEQ ID NO: 26883 - DNA, 25 bp, Probe Sequence
gcacaatatgaatcaaagaaagcca

SEQ ID NO: 26884 - DNA, 25 bp, Probe Sequence
gatgatgaggaggaaagtgaagaag

SEQ ID NO: 26885 - DNA, 25 bp, Probe Sequence
atgatgagacagatatggcgaaatt

SEQ ID NO: 26886 - DNA, 25 bp, Probe Sequence
gatgatgatgacattgacctctttg

SEQ ID NO: 26887 - DNA, 25 bp, Probe Sequence
gatgagacagatatggcgaaattag

SEQ ID NO: 26888 - DNA, 25 bp, Probe Sequence
aaccttgggatgatgagacagatat

SEQ ID NO: 26889 - DNA, 25 bp, Probe Sequence
acgttggtataatcacatcaagtct

SEQ ID NO: 26890 - DNA, 25 bp, Probe Sequence
gaacgtcttgcacaatatgaatcaa

SEQ ID NO: 26891 - DNA, 25 bp, Probe Sequence
agatgatgatgacattgacctcttt

SEQ ID NO: 26892 - DNA, 25 bp, Probe Sequence
aaagatgatgatgacattgacctct

SEQ ID NO: 26893 - DNA, 25 bp, Probe Sequence
tgggatacggaattaagaaacttca

SEQ ID NO: 26894 - DNA, 25 bp, Probe Sequence
acgcattaagaggtttatttgggta

SEQ ID NO: 26895 - DNA, 25 bp, Probe Sequence
cgcattaagaggtttatttgggtac

SEQ ID NO: 26896 - DNA, 25 bp, Probe Sequence
cataacacttgatgccgtttctttc

SEQ ID NO: 26897 - DNA, 25 bp, Probe Sequence
aacgcattaagaggtttatttgggt

SEQ ID NO: 26898 - DNA, 25 bp, Probe Sequence
gcattaagaggtttatttgggtaca

SEQ ID NO: 26899 - DNA, 25 bp, Probe Sequence
taagaggtttatttgggtacatggc

SEQ ID NO: 26900 - DNA, 25 bp, Probe Sequence
ataacacttgatgccgtttctttca

SEQ ID NO: 26901 - DNA, 25 bp, Probe Sequence
ttaagaggtttatttgggtacatgg

SEQ ID NO: 26902 - DNA, 25 bp, Probe Sequence
gaaactcagatgtccaaactaattt

SEQ ID NO: 26903 - DNA, 25 bp, Probe Sequence
ccatcactcaaccataacacttgat

SEQ ID NO: 26904 - DNA, 25 bp, Probe Sequence
gctgtactagtgccattggaataat

SEQ ID NO: 26905 - DNA, 25 bp, Probe Sequence
tgccatcactcaaccataacacttg

SEQ ID NO: 26906 - DNA, 25 bp, Probe Sequence
gggaaactcagatgtccaaactaat

SEQ ID NO: 26907 - DNA, 25 bp, Probe Sequence
ttcttcagagggaaactcagatgtc

SEQ ID NO: 26908 - DNA, 25 bp, Probe Sequence
ggaaactcagatgtccaaactaatt

SEQ ID NO: 26909 - DNA, 25 bp, Probe Sequence
ccataacacttgatgccgtttcttt

SEQ ID NO: 26910 - DNA, 25 bp, Probe Sequence
atcactcaaccataacacttgatgc

SEQ ID NO: 26911 - DNA, 25 bp, Probe Sequence
agctgtactagtgccattggaataa

SEQ ID NO: 26912 - DNA, 25 bp, Probe Sequence
agggaaactcagatgtccaaactaa

SEQ ID NO: 26913 - DNA, 25 bp, Probe Sequence
ctgtactagtgccattggaataata

SEQ ID NO: 26914 - DNA, 25 bp, Probe Sequence
atttcttcagagggaaactcagatg

SEQ ID NO: 26915 - DNA, 25 bp, Probe Sequence
catttcttcagagggaaactcagat

SEQ ID NO: 26916 - DNA, 25 bp, Probe Sequence
gtgccatcactcaaccataacactt

SEQ ID NO: 26917 - DNA, 25 bp, Probe Sequence
gagggaaactcagatgtccaaacta

SEQ ID NO: 26918 - DNA, 25 bp, Probe Sequence
ggagttggaatgttgtagttaccta

SEQ ID NO: 26919 - DNA, 25 bp, Probe Sequence
tcaggagttggaatgttgtagttac

SEQ ID NO: 26920 - DNA, 25 bp, Probe Sequence
ttcaggagttggaatgttgtagtta

SEQ ID NO: 26921 - DNA, 25 bp, Probe Sequence
caggagttggaatgttgtagttacc

SEQ ID NO: 26922 - DNA, 25 bp, Probe Sequence
atgtccaagttcttcacctctatcc

SEQ ID NO: 26923 - DNA, 25 bp, Probe Sequence
gtccaagttcttcacctctatccaa

SEQ ID NO: 26924 - DNA, 25 bp, Probe Sequence
catgtccaagttcttcacctctatc

SEQ ID NO: 26925 - DNA, 25 bp, Probe Sequence
tgtgatgatgctgtgacaataagtt

SEQ ID NO: 26926 - DNA, 25 bp, Probe Sequence
ctctactggagtggaaggtctattg

SEQ ID NO: 26927 - DNA, 25 bp, Probe Sequence
tctctactggagtggaaggtctatt

SEQ ID NO: 26928 - DNA, 25 bp, Probe Sequence
aggagttggaatgttgtagttacct

SEQ ID NO: 26929 - DNA, 25 bp, Probe Sequence
ctctctactggagtggaaggtctat

SEQ ID NO: 26930 - DNA, 25 bp, Probe Sequence
attcaggagttggaatgttgtagtt

SEQ ID NO: 26931 - DNA, 25 bp, Probe Sequence
tattcaggagttggaatgttgtagt

SEQ ID NO: 26932 - DNA, 25 bp, Probe Sequence
atgtgtcagagtgttgttccgttaa

SEQ ID NO: 26933 - DNA, 25 bp, Probe Sequence
ccatgtccaagttcttcacctctat

SEQ ID NO: 26934 - DNA, 25 bp, Probe Sequence
tctactggagtggaaggtctattgg

SEQ ID NO: 26935 - DNA, 25 bp, Probe Sequence
tgtccaagttcttcacctctatcca

SEQ ID NO: 26936 - DNA, 25 bp, Probe Sequence
gtgatgatgctgtgacaataagttt

SEQ ID NO: 26937 - DNA, 25 bp, Probe Sequence
atattcaggagttggaatgttgtag

SEQ ID NO: 26938 - DNA, 25 bp, Probe Sequence
cagtattctcagagcatgtgtcaga

SEQ ID NO: 26939 - DNA, 25 bp, Probe Sequence
agtattctcagagcatgtgtcagag

SEQ ID NO: 26940 - DNA, 25 bp, Probe Sequence
agaaacacaagagacttaaaggaca

SEQ ID NO: 26941 - DNA, 25 bp, Probe Sequence
gaaacacaagagacttaaaggacag

SEQ ID NO: 26942 - DNA, 25 bp, Probe Sequence
aagtattcaggttgtgtttgcttct

SEQ ID NO: 26943 - DNA, 25 bp, Probe Sequence
caagtattcaggttgtgtttgcttc

SEQ ID NO: 26944 - DNA, 25 bp, Probe Sequence
agtattcaggttgtgtttgcttctg

SEQ ID NO: 26945 - DNA, 25 bp, Probe Sequence
gtattcaggttgtgtttgcttctgc

SEQ ID NO: 26946 - DNA, 25 bp, Probe Sequence
acaagtattcaggttgtgtttgctt

SEQ ID NO: 26947 - DNA, 25 bp, Probe Sequence
tattcaggttgtgtttgcttctgcc

SEQ ID NO: 26948 - DNA, 25 bp, Probe Sequence
gatgatgactcgggagaagatacaa

SEQ ID NO: 26949 - DNA, 25 bp, Probe Sequence
tggaagaagaggaggatgatgactc

SEQ ID NO: 26950 - DNA, 25 bp, Probe Sequence
atgatgactcgggagaagatacaac

SEQ ID NO: 26951 - DNA, 25 bp, Probe Sequence
gatgactcgggagaagatacaactg

SEQ ID NO: 26952 - DNA, 25 bp, Probe Sequence
atgactcgggagaagatacaactga

SEQ ID NO: 26953 - DNA, 25 bp, Probe Sequence
tgatgactcgggagaagatacaact

SEQ ID NO: 26954 - DNA, 25 bp, Probe Sequence
gaggatgatgactcgggagaagata

SEQ ID NO: 26955 - DNA, 25 bp, Probe Sequence
gaagaagaggaggatgatgactcgg

SEQ ID NO: 26956 - DNA, 25 bp, Probe Sequence
ggaagaagaggaggatgatgactcg

SEQ ID NO: 26957 - DNA, 25 bp, Probe Sequence
ggatgatgactcgggagaagataca

SEQ ID NO: 26958 - DNA, 25 bp, Probe Sequence
tcgggagaagatacaactgaggaag

SEQ ID NO: 26959 - DNA, 25 bp, Probe Sequence
ctcgggagaagatacaactgaggaa

SEQ ID NO: 26960 - DNA, 25 bp, Probe Sequence
tgactcgggagaagatacaactgag

SEQ ID NO: 26961 - DNA, 25 bp, Probe Sequence
gactcgggagaagatacaactgagg

SEQ ID NO: 26962 - DNA, 25 bp, Probe Sequence
actcgggagaagatacaactgagga

SEQ ID NO: 26963 - DNA, 25 bp, Probe Sequence
cgggagaagatacaactgaggaagc

SEQ ID NO: 26964 - DNA, 25 bp, Probe Sequence
aaatctattactgtgagtgtgaaaa

SEQ ID NO: 26965 - DNA, 25 bp, Probe Sequence
aaaatctattactgtgagtgtgaaa

SEQ ID NO: 26966 - DNA, 25 bp, Probe Sequence
ggaggatgatgactcgggagaagat

SEQ ID NO: 26967 - DNA, 25 bp, Probe Sequence
aagaagaggaggatgatgactcggg

SEQ ID NO: 26968 - DNA, 25 bp, Probe Sequence
ccgtcaactcataatatggatgtcc

SEQ ID NO: 26969 - DNA, 25 bp, Probe Sequence
gtaagatcgtcgagatgtctacttc

SEQ ID NO: 26970 - DNA, 25 bp, Probe Sequence
atgtaagatcgtcgagatgtctact

SEQ ID NO: 26971 - DNA, 25 bp, Probe Sequence
catgtaagatcgtcgagatgtctac

SEQ ID NO: 26972 - DNA, 25 bp, Probe Sequence
ttggtattgacatctttactgggaa

SEQ ID NO: 26973 - DNA, 25 bp, Probe Sequence
tgtaagatcgtcgagatgtctactt

SEQ ID NO: 26974 - DNA, 25 bp, Probe Sequence
ctggttggtattgacatctttactg

SEQ ID NO: 26975 - DNA, 25 bp, Probe Sequence
tctggttggtattgacatctttact

SEQ ID NO: 26976 - DNA, 25 bp, Probe Sequence
gttggtattgacatctttactggga

SEQ ID NO: 26977 - DNA, 25 bp, Probe Sequence
tggttggtattgacatctttactgg

SEQ ID NO: 26978 - DNA, 25 bp, Probe Sequence
atatctgcccgtcaactcataatat

SEQ ID NO: 26979 - DNA, 25 bp, Probe Sequence
tggtattgacatctttactgggaag

SEQ ID NO: 26980 - DNA, 25 bp, Probe Sequence
gaagtacgactgtggagaagagatc

SEQ ID NO: 26981 - DNA, 25 bp, Probe Sequence
catctggttggtattgacatcttta

SEQ ID NO: 26982 - DNA, 25 bp, Probe Sequence
atctggttggtattgacatctttac

SEQ ID NO: 26983 - DNA, 25 bp, Probe Sequence
ccatgtaagatcgtcgagatgtcta

SEQ ID NO: 26984 - DNA, 25 bp, Probe Sequence
tatctgcccgtcaactcataatatg

SEQ ID NO: 26985 - DNA, 25 bp, Probe Sequence
ggttggtattgacatctttactggg

SEQ ID NO: 26986 - DNA, 25 bp, Probe Sequence
tccatctggttggtattgacatctt

SEQ ID NO: 26987 - DNA, 25 bp, Probe Sequence
ctcctcctacacaatttatttgacg

SEQ ID NO: 26988 - DNA, 25 bp, Probe Sequence
agaagtacgactgtggagaagagat

SEQ ID NO: 26989 - DNA, 25 bp, Probe Sequence
cccgtcaactcataatatggatgtc

SEQ ID NO: 26990 - DNA, 25 bp, Probe Sequence
cgtcaactcataatatggatgtccc

SEQ ID NO: 26991 - DNA, 25 bp, Probe Sequence
actcctcctacacaatttatttgac

SEQ ID NO: 26992 - DNA, 25 bp, Probe Sequence
gtctctgcttacatctcctggataa

SEQ ID NO: 26993 - DNA, 25 bp, Probe Sequence
ataaataatgtcatcgcctccaact

SEQ ID NO: 26994 - DNA, 25 bp, Probe Sequence
gataaataatgtcatcgcctccaac

SEQ ID NO: 26995 - DNA, 25 bp, Probe Sequence
ctctgcttacatctcctggataaat

SEQ ID NO: 26996 - DNA, 25 bp, Probe Sequence
ggtctctgcttacatctcctggata

SEQ ID NO: 26997 - DNA, 25 bp, Probe Sequence
taaataatgtcatcgcctccaactg

SEQ ID NO: 26998 - DNA, 25 bp, Probe Sequence
tctcctggataaataatgtcatcgc

SEQ ID NO: 26999 - DNA, 25 bp, Probe Sequence
tctctgcttacatctcctggataaa

SEQ ID NO: 27000 - DNA, 25 bp, Probe Sequence
cctggataaataatgtcatcgcctc

SEQ ID NO: 27001 - DNA, 25 bp, Probe Sequence
tctgcttacatctcctggataaata

SEQ ID NO: 27002 - DNA, 25 bp, Probe Sequence
ctcctggataaataatgtcatcgcc

SEQ ID NO: 27003 - DNA, 25 bp, Probe Sequence
tcctggataaataatgtcatcgcct

SEQ ID NO: 27004 - DNA, 25 bp, Probe Sequence
atctcctggataaataatgtcatcg

SEQ ID NO: 27005 - DNA, 25 bp, Probe Sequence
ctgcttacatctcctggataaataa

SEQ ID NO: 27006 - DNA, 25 bp, Probe Sequence
ttggtgaatggcaagtattctctcc

SEQ ID NO: 27007 - DNA, 25 bp, Probe Sequence
gaccataacctgagccagaatgatg

SEQ ID NO: 27008 - DNA, 25 bp, Probe Sequence
agaccataacctgagccagaatgat

SEQ ID NO: 27009 - DNA, 25 bp, Probe Sequence
ggataaataatgtcatcgcctccaa

SEQ ID NO: 27010 - DNA, 25 bp, Probe Sequence
tgcttacatctcctggataaataat

SEQ ID NO: 27011 - DNA, 25 bp, Probe Sequence
ctggataaataatgtcatcgcctcc

SEQ ID NO: 27012 - DNA, 25 bp, Probe Sequence
taatgtctccaggaagcctacagtc

SEQ ID NO: 27013 - DNA, 25 bp, Probe Sequence
aaataatgtcatcgcctccaactga

SEQ ID NO: 27014 - DNA, 25 bp, Probe Sequence
gcttacatctcctggataaataatg

SEQ ID NO: 27015 - DNA, 25 bp, Probe Sequence
gtaatgtctccaggaagcctacagt

SEQ ID NO: 27016 - DNA, 25 bp, Probe Sequence
catctggcacaataaacattctctg

SEQ ID NO: 27017 - DNA, 25 bp, Probe Sequence
gcatctggcacaataaacattctct

SEQ ID NO: 27018 - DNA, 25 bp, Probe Sequence
agcatctggcacaataaacattctc

SEQ ID NO: 27019 - DNA, 25 bp, Probe Sequence
atctggcacaataaacattctctgt

SEQ ID NO: 27020 - DNA, 25 bp, Probe Sequence
tgtaaactggatcgactctatcatc

SEQ ID NO: 27021 - DNA, 25 bp, Probe Sequence
tttgtaaactggatcgactctatca

SEQ ID NO: 27022 - DNA, 25 bp, Probe Sequence
ttgtaaactggatcgactctatcat

SEQ ID NO: 27023 - DNA, 25 bp, Probe Sequence
gtttgtaaactggatcgactctatc

SEQ ID NO: 27024 - DNA, 25 bp, Probe Sequence
cagcatctggcacaataaacattct

SEQ ID NO: 27025 - DNA, 25 bp, Probe Sequence
tctggcacaataaacattctctgtt

SEQ ID NO: 27026 - DNA, 25 bp, Probe Sequence
agtttgtaaactggatcgactctat

SEQ ID NO: 27027 - DNA, 25 bp, Probe Sequence
gatcgactctatcatccaacgctcc

SEQ ID NO: 27028 - DNA, 25 bp, Probe Sequence
gtaaactggatcgactctatcatcc

SEQ ID NO: 27029 - DNA, 25 bp, Probe Sequence
aacttgctcaacgacatcgtgattc

SEQ ID NO: 27030 - DNA, 25 bp, Probe Sequence
taaacttgctcaacgacatcgtgat

SEQ ID NO: 27031 - DNA, 25 bp, Probe Sequence
cttgctcaacgacatcgtgattctc

SEQ ID NO: 27032 - DNA, 25 bp, Probe Sequence
aaacttgctcaacgacatcgtgatt

SEQ ID NO: 27033 - DNA, 25 bp, Probe Sequence
acttgctcaacgacatcgtgattct

SEQ ID NO: 27034 - DNA, 25 bp, Probe Sequence
gtaaacttgctcaacgacatcgtga

SEQ ID NO: 27035 - DNA, 25 bp, Probe Sequence
ggatcgactctatcatccaacgctc

SEQ ID NO: 27036 - DNA, 25 bp, Probe Sequence
ccagcatctggcacaataaacattc

SEQ ID NO: 27037 - DNA, 25 bp, Probe Sequence
tccagcatctggcacaataaacatt

SEQ ID NO: 27038 - DNA, 25 bp, Probe Sequence
cgtaaacttgctcaacgacatcgtg

SEQ ID NO: 27039 - DNA, 25 bp, Probe Sequence
ctccagcatctggcacaataaacat

SEQ ID NO: 27040 - DNA, 25 bp, Probe Sequence
atggaactacactcttgagcaatac

SEQ ID NO: 27041 - DNA, 25 bp, Probe Sequence
tgtatggattagcatcagtgaagaa

SEQ ID NO: 27042 - DNA, 25 bp, Probe Sequence
gtatggattagcatcagtgaagaac

SEQ ID NO: 27043 - DNA, 25 bp, Probe Sequence
tatggattagcatcagtgaagaacg

SEQ ID NO: 27044 - DNA, 25 bp, Probe Sequence
gaactacactcttgagcaataccag

SEQ ID NO: 27045 - DNA, 25 bp, Probe Sequence
actacactcttgagcaataccagaa

SEQ ID NO: 27046 - DNA, 25 bp, Probe Sequence
aactacactcttgagcaataccaga

SEQ ID NO: 27047 - DNA, 25 bp, Probe Sequence
catggaactacactcttgagcaata

SEQ ID NO: 27048 - DNA, 25 bp, Probe Sequence
ctgtatggattagcatcagtgaaga

SEQ ID NO: 27049 - DNA, 25 bp, Probe Sequence
ctggaattggatacaactcaactgg

SEQ ID NO: 27050 - DNA, 25 bp, Probe Sequence
cctggaattggatacaactcaactg

SEQ ID NO: 27051 - DNA, 25 bp, Probe Sequence
ggaactacactcttgagcaatacca

SEQ ID NO: 27052 - DNA, 25 bp, Probe Sequence
tggaactacactcttgagcaatacc

SEQ ID NO: 27053 - DNA, 25 bp, Probe Sequence
acaacatagaaacaccatcagagaa

SEQ ID NO: 27054 - DNA, 25 bp, Probe Sequence
aacaacatagaaacaccatcagaga

SEQ ID NO: 27055 - DNA, 25 bp, Probe Sequence
aaacaacatagaaacaccatcagag

SEQ ID NO: 27056 - DNA, 25 bp, Probe Sequence
caacatagaaacaccatcagagaat

SEQ ID NO: 27057 - DNA, 25 bp, Probe Sequence
tcatggaactacactcttgagcaat

SEQ ID NO: 27058 - DNA, 25 bp, Probe Sequence
tacttgagagtggttaatgtattca

SEQ ID NO: 27059 - DNA, 25 bp, Probe Sequence
aacatagaaacaccatcagagaatg

SEQ ID NO: 27060 - DNA, 25 bp, Probe Sequence
tttgtcaaggtatttggatttgctc

SEQ ID NO: 27061 - DNA, 25 bp, Probe Sequence
ttcatggaactacactcttgagcaa

SEQ ID NO: 27062 - DNA, 25 bp, Probe Sequence
ctacactcttgagcaataccagaaa

SEQ ID NO: 27063 - DNA, 25 bp, Probe Sequence
gtcaaggtatttggatttgctcaag

SEQ ID NO: 27064 - DNA, 25 bp, Probe Sequence
ccaagaagaagaagatcgaggtgat

SEQ ID NO: 27065 - DNA, 25 bp, Probe Sequence
catgaaagccaagaagaagaagatc

SEQ ID NO: 27066 - DNA, 25 bp, Probe Sequence
atgaaagccaagaagaagaagatcg

SEQ ID NO: 27067 - DNA, 25 bp, Probe Sequence
gaaagccaagaagaagaagatcgag

SEQ ID NO: 27068 - DNA, 25 bp, Probe Sequence
caagaagaagaagatcgaggtgatc

SEQ ID NO: 27069 - DNA, 25 bp, Probe Sequence
tgaaagccaagaagaagaagatcga

SEQ ID NO: 27070 - DNA, 25 bp, Probe Sequence
aagccaagaagaagaagatcgaggt

SEQ ID NO: 27071 - DNA, 25 bp, Probe Sequence
gcaataaaactgactctcaacatca

SEQ ID NO: 27072 - DNA, 25 bp, Probe Sequence
ggcaataaaactgactctcaacatc

SEQ ID NO: 27073 - DNA, 25 bp, Probe Sequence
gatggcaataaaactgactctcaac

SEQ ID NO: 27074 - DNA, 25 bp, Probe Sequence
agatggcaataaaactgactctcaa

SEQ ID NO: 27075 - DNA, 25 bp, Probe Sequence
tggcaataaaactgactctcaacat

SEQ ID NO: 27076 - DNA, 25 bp, Probe Sequence
atggcaataaaactgactctcaaca

SEQ ID NO: 27077 - DNA, 25 bp, Probe Sequence
aaagccaagaagaagaagatcgagg

SEQ ID NO: 27078 - DNA, 25 bp, Probe Sequence
tcatgaaagccaagaagaagaagat

SEQ ID NO: 27079 - DNA, 25 bp, Probe Sequence
atcatgaaagccaagaagaagaaga

SEQ ID NO: 27080 - DNA, 25 bp, Probe Sequence
catcatgaaagccaagaagaagaag

SEQ ID NO: 27081 - DNA, 25 bp, Probe Sequence
acatcatgaaagccaagaagaagaa

SEQ ID NO: 27082 - DNA, 25 bp, Probe Sequence
aacatcatgaaagccaagaagaaga

SEQ ID NO: 27083 - DNA, 25 bp, Probe Sequence
caacatcatgaaagccaagaagaag

SEQ ID NO: 27084 - DNA, 25 bp, Probe Sequence
gccaagaagaagaagatcgaggtga

SEQ ID NO: 27085 - DNA, 25 bp, Probe Sequence
agccaagaagaagaagatcgaggtg

SEQ ID NO: 27086 - DNA, 25 bp, Probe Sequence
caataaaactgactctcaacatcaa

SEQ ID NO: 27087 - DNA, 25 bp, Probe Sequence
gaagaagaagatcgaggtgatcaag

SEQ ID NO: 27088 - DNA, 25 bp, Probe Sequence
gaatcaatcatgtcagtctgcttag

SEQ ID NO: 27089 - DNA, 25 bp, Probe Sequence
atcaatcatgtcagtctgcttagaa

SEQ ID NO: 27090 - DNA, 25 bp, Probe Sequence
aatcaatcatgtcagtctgcttaga

SEQ ID NO: 27091 - DNA, 25 bp, Probe Sequence
agaatcaatcatgtcagtctgctta

SEQ ID NO: 27092 - DNA, 25 bp, Probe Sequence
taagaatcaatcatgtcagtctgct

SEQ ID NO: 27093 - DNA, 25 bp, Probe Sequence
ttaagaatcaatcatgtcagtctgc

SEQ ID NO: 27094 - DNA, 25 bp, Probe Sequence
aagaatcaatcatgtcagtctgctt

SEQ ID NO: 27095 - DNA, 25 bp, Probe Sequence
tcaatcatgtcagtctgcttagaaa

SEQ ID NO: 27096 - DNA, 25 bp, Probe Sequence
caatcatgtcagtctgcttagaaat

SEQ ID NO: 27097 - DNA, 25 bp, Probe Sequence
atgtcagtctgcttagaaataacag

SEQ ID NO: 27098 - DNA, 25 bp, Probe Sequence
tcatgtcagtctgcttagaaataac

SEQ ID NO: 27099 - DNA, 25 bp, Probe Sequence
aacctcctaagtatcaagtatagaa

SEQ ID NO: 27100 - DNA, 25 bp, Probe Sequence
catgtcagtctgcttagaaataaca

SEQ ID NO: 27101 - DNA, 25 bp, Probe Sequence
ttgctcaatagattgctcaaatcag

SEQ ID NO: 27102 - DNA, 25 bp, Probe Sequence
ctcaatagattgctcaaatcaggtt

SEQ ID NO: 27103 - DNA, 25 bp, Probe Sequence
tcaatagattgctcaaatcaggttt

SEQ ID NO: 27104 - DNA, 25 bp, Probe Sequence
atcatgtcagtctgcttagaaataa

SEQ ID NO: 27105 - DNA, 25 bp, Probe Sequence
aatcatgtcagtctgcttagaaata

SEQ ID NO: 27106 - DNA, 25 bp, Probe Sequence
tggaaattaggttgaaacatatctc

SEQ ID NO: 27107 - DNA, 25 bp, Probe Sequence
gctcaatagattgctcaaatcaggt

SEQ ID NO: 27108 - DNA, 25 bp, Probe Sequence
tgctcaatagattgctcaaatcagg

SEQ ID NO: 27109 - DNA, 25 bp, Probe Sequence
ggaaattaggttgaaacatatctct

SEQ ID NO: 27110 - DNA, 25 bp, Probe Sequence
tttaagaatcaatcatgtcagtctg

SEQ ID NO: 27111 - DNA, 25 bp, Probe Sequence
tttgctcaatagattgctcaaatca

SEQ ID NO: 27112 - DNA, 25 bp, Probe Sequence
catcctggctatatctctacacaag

SEQ ID NO: 27113 - DNA, 25 bp, Probe Sequence
atcatcctggctatatctctacaca

SEQ ID NO: 27114 - DNA, 25 bp, Probe Sequence
catcatcctggctatatctctacac

SEQ ID NO: 27115 - DNA, 25 bp, Probe Sequence
tcatcatcctggctatatctctaca

SEQ ID NO: 27116 - DNA, 25 bp, Probe Sequence
tgtcatcatcctggctatatctcta

SEQ ID NO: 27117 - DNA, 25 bp, Probe Sequence
atcctggctatatctctacacaagt

SEQ ID NO: 27118 - DNA, 25 bp, Probe Sequence
tcatcctggctatatctctacacaa

SEQ ID NO: 27119 - DNA, 25 bp, Probe Sequence
gtcatcatcctggctatatctctac

SEQ ID NO: 27120 - DNA, 25 bp, Probe Sequence
cttgtcatcatcctggctatatctc

SEQ ID NO: 27121 - DNA, 25 bp, Probe Sequence
ttgtcatcatcctggctatatctct

SEQ ID NO: 27122 - DNA, 25 bp, Probe Sequence
atccttgtcatcatcctggctatat

SEQ ID NO: 27123 - DNA, 25 bp, Probe Sequence
acctgttattaccattagcattctg

SEQ ID NO: 27124 - DNA, 25 bp, Probe Sequence
tgacctgttattaccattagcattc

SEQ ID NO: 27125 - DNA, 25 bp, Probe Sequence
gacctgttattaccattagcattct

SEQ ID NO: 27126 - DNA, 25 bp, Probe Sequence
ccttgtcatcatcctggctatatct

SEQ ID NO: 27127 - DNA, 25 bp, Probe Sequence
tcctggctatatctctacacaagtg

SEQ ID NO: 27128 - DNA, 25 bp, Probe Sequence
tccttgtcatcatcctggctatatc

SEQ ID NO: 27129 - DNA, 25 bp, Probe Sequence
catccttgtcatcatcctggctata

SEQ ID NO: 27130 - DNA, 25 bp, Probe Sequence
atgacctgttattaccattagcatt

SEQ ID NO: 27131 - DNA, 25 bp, Probe Sequence
ctcttgatatgacctgttattacca

SEQ ID NO: 27132 - DNA, 25 bp, Probe Sequence
actcttgatatgacctgttattacc

SEQ ID NO: 27133 - DNA, 25 bp, Probe Sequence
ttgtggtcatcatccttgtcatcat

SEQ ID NO: 27134 - DNA, 25 bp, Probe Sequence
tatgacctgttattaccattagcat

SEQ ID NO: 27135 - DNA, 25 bp, Probe Sequence
atatgacctgttattaccattagca

SEQ ID NO: 27136 - DNA, 25 bp, Probe Sequence
aacaggagaagaagaagaagaagac

SEQ ID NO: 27137 - DNA, 25 bp, Probe Sequence
caggagaagaagaagaagaagacag

SEQ ID NO: 27138 - DNA, 25 bp, Probe Sequence
acaggagaagaagaagaagaagaca

SEQ ID NO: 27139 - DNA, 25 bp, Probe Sequence
gagaagaagaagaagaagacaggtc

SEQ ID NO: 27140 - DNA, 25 bp, Probe Sequence
aggagaagaagaagaagaagacagg

SEQ ID NO: 27141 - DNA, 25 bp, Probe Sequence
ggagaagaagaagaagaagacaggt

SEQ ID NO: 27142 - DNA, 25 bp, Probe Sequence
agaagaagaagaagaagacaggtcg

SEQ ID NO: 27143 - DNA, 25 bp, Probe Sequence
aaacaggagaagaagaagaagaaga

SEQ ID NO: 27144 - DNA, 25 bp, Probe Sequence
caaacaggagaagaagaagaagaag

SEQ ID NO: 27145 - DNA, 25 bp, Probe Sequence
ccaaacaggagaagaagaagaagaa

SEQ ID NO: 27146 - DNA, 25 bp, Probe Sequence
gaagaagaagaagaagacaggtcgg

SEQ ID NO: 27147 - DNA, 25 bp, Probe Sequence
gccaaacaggagaagaagaagaaga

SEQ ID NO: 27148 - DNA, 25 bp, Probe Sequence
aagtgagaggtcagactcctaaggt

SEQ ID NO: 27149 - DNA, 25 bp, Probe Sequence
gtcttttgtaattctggctttctct

SEQ ID NO: 27150 - DNA, 25 bp, Probe Sequence
agtcttttgtaattctggctttctc

SEQ ID NO: 27151 - DNA, 25 bp, Probe Sequence
cttcctctttctcgactccatcttc

SEQ ID NO: 27152 - DNA, 25 bp, Probe Sequence
cttcttcctctttctcgactccatc

SEQ ID NO: 27153 - DNA, 25 bp, Probe Sequence
aagtcttttgtaattctggctttct

SEQ ID NO: 27154 - DNA, 25 bp, Probe Sequence
aaagtgagaggtcagactcctaagg

SEQ ID NO: 27155 - DNA, 25 bp, Probe Sequence
tcttcctctttctcgactccatctt

SEQ ID NO: 27156 - DNA, 25 bp, Probe Sequence
ttcttcctctttctcgactccatct

SEQ ID NO: 27157 - DNA, 25 bp, Probe Sequence
tgtaattctggctttctctaataaa

SEQ ID NO: 27158 - DNA, 25 bp, Probe Sequence
ttgtaattctggctttctctaataa

SEQ ID NO: 27159 - DNA, 25 bp, Probe Sequence
tttgtaattctggctttctctaata

SEQ ID NO: 27160 - DNA, 25 bp, Probe Sequence
atacacaccaatatcttcttcaggc

SEQ ID NO: 27161 - DNA, 25 bp, Probe Sequence
tacacaccaatatcttcttcaggct

SEQ ID NO: 27162 - DNA, 25 bp, Probe Sequence
gatacacaccaatatcttcttcagg

SEQ ID NO: 27163 - DNA, 25 bp, Probe Sequence
cacaccaatatcttcttcaggctct

SEQ ID NO: 27164 - DNA, 25 bp, Probe Sequence
aaggctactattcatcctctgtgat

SEQ ID NO: 27165 - DNA, 25 bp, Probe Sequence
acagaagaataggtggtatgttcct

SEQ ID NO: 27166 - DNA, 25 bp, Probe Sequence
ccaacaacaatattagtcgtatcca

SEQ ID NO: 27167 - DNA, 25 bp, Probe Sequence
acacaccaatatcttcttcaggctc

SEQ ID NO: 27168 - DNA, 25 bp, Probe Sequence
tccaacaacaatattagtcgtatcc

SEQ ID NO: 27169 - DNA, 25 bp, Probe Sequence
gcagtcataaacagaagaataggtg

SEQ ID NO: 27170 - DNA, 25 bp, Probe Sequence
agcagtcataaacagaagaataggt

SEQ ID NO: 27171 - DNA, 25 bp, Probe Sequence
taatccagaagcagtcataaacaga

SEQ ID NO: 27172 - DNA, 25 bp, Probe Sequence
aatccagaagcagtcataaacagaa

SEQ ID NO: 27173 - DNA, 25 bp, Probe Sequence
cattggagggaaacatctactgaat

SEQ ID NO: 27174 - DNA, 25 bp, Probe Sequence
agtcataaacagaagaataggtggt

SEQ ID NO: 27175 - DNA, 25 bp, Probe Sequence
gaaacattggagggaaacatctact

SEQ ID NO: 27176 - DNA, 25 bp, Probe Sequence
cagaagcagtcataaacagaagaat

SEQ ID NO: 27177 - DNA, 25 bp, Probe Sequence
cagtcataaacagaagaataggtgg

SEQ ID NO: 27178 - DNA, 25 bp, Probe Sequence
atccagaagcagtcataaacagaag

SEQ ID NO: 27179 - DNA, 25 bp, Probe Sequence
ttggagggaaacatctactgaattt

SEQ ID NO: 27180 - DNA, 25 bp, Probe Sequence
attggagggaaacatctactgaatt

SEQ ID NO: 27181 - DNA, 25 bp, Probe Sequence
aaacattggagggaaacatctactg

SEQ ID NO: 27182 - DNA, 25 bp, Probe Sequence
aacataactttcactaacacacaca

SEQ ID NO: 27183 - DNA, 25 bp, Probe Sequence
atgaaacattggagggaaacatcta

SEQ ID NO: 27184 - DNA, 25 bp, Probe Sequence
ttgttcaactgctggatatatgcta

SEQ ID NO: 27185 - DNA, 25 bp, Probe Sequence
gacttgttcaactgctggatatatg

SEQ ID NO: 27186 - DNA, 25 bp, Probe Sequence
ggacttgttcaactgctggatatat

SEQ ID NO: 27187 - DNA, 25 bp, Probe Sequence
tgttcaactgctggatatatgctac

SEQ ID NO: 27188 - DNA, 25 bp, Probe Sequence
tggacttgttcaactgctggatata

SEQ ID NO: 27189 - DNA, 25 bp, Probe Sequence
cttgttcaactgctggatatatgct

SEQ ID NO: 27190 - DNA, 25 bp, Probe Sequence
ccaagaagaggataaggatgcttaa

SEQ ID NO: 27191 - DNA, 25 bp, Probe Sequence
gttcaactgctggatatatgctacc

SEQ ID NO: 27192 - DNA, 25 bp, Probe Sequence
acttgttcaactgctggatatatgc

SEQ ID NO: 27193 - DNA, 25 bp, Probe Sequence
gtacttacagacacaagaacaatct

SEQ ID NO: 27194 - DNA, 25 bp, Probe Sequence
tgatgtacttacagacacaagaaca

SEQ ID NO: 27195 - DNA, 25 bp, Probe Sequence
tgttgatgtacttacagacacaaga

SEQ ID NO: 27196 - DNA, 25 bp, Probe Sequence
tgatgttgatgtacttacagacaca

SEQ ID NO: 27197 - DNA, 25 bp, Probe Sequence
tcttgttccgatactctgagaagtg

SEQ ID NO: 27198 - DNA, 25 bp, Probe Sequence
cctgatgttgatgtacttacagaca

SEQ ID NO: 27199 - DNA, 25 bp, Probe Sequence
atgttgatgtacttacagacacaag

SEQ ID NO: 27200 - DNA, 25 bp, Probe Sequence
gatgttgatgtacttacagacacaa

SEQ ID NO: 27201 - DNA, 25 bp, Probe Sequence
ctgatgttgatgtacttacagacac

SEQ ID NO: 27202 - DNA, 25 bp, Probe Sequence
ctgagaagtgcctgatgttgatgta

SEQ ID NO: 27203 - DNA, 25 bp, Probe Sequence
tgtacttacagacacaagaacaatc

SEQ ID NO: 27204 - DNA, 25 bp, Probe Sequence
gatgtacttacagacacaagaacaa

SEQ ID NO: 27205 - DNA, 25 bp, Probe Sequence
ttgatgtacttacagacacaagaac

SEQ ID NO: 27206 - DNA, 25 bp, Probe Sequence
gttgatgtacttacagacacaagaa

SEQ ID NO: 27207 - DNA, 25 bp, Probe Sequence
gatactctgagaagtgcctgatgtt

SEQ ID NO: 27208 - DNA, 25 bp, Probe Sequence
caacctcaggcttagatcaatgtat

SEQ ID NO: 27209 - DNA, 25 bp, Probe Sequence
acctcaggcttagatcaatgtatag

SEQ ID NO: 27210 - DNA, 25 bp, Probe Sequence
agaaggaggatgtggttaatctgtt

SEQ ID NO: 27211 - DNA, 25 bp, Probe Sequence
aagaaggaggatgtggttaatctgt

SEQ ID NO: 27212 - DNA, 25 bp, Probe Sequence
aacctcaggcttagatcaatgtata

SEQ ID NO: 27213 - DNA, 25 bp, Probe Sequence
atatcctgatggtagagacagactc

SEQ ID NO: 27214 - DNA, 25 bp, Probe Sequence
tatatcctgatggtagagacagact

SEQ ID NO: 27215 - DNA, 25 bp, Probe Sequence
ctatatcctgatggtagagacagac

SEQ ID NO: 27216 - DNA, 25 bp, Probe Sequence
ctatatcctcattagtgaaggtggc

SEQ ID NO: 27217 - DNA, 25 bp, Probe Sequence
gctatatcctcattagtgaaggtgg

SEQ ID NO: 27218 - DNA, 25 bp, Probe Sequence
gaggtcaccagcatgatgataatat

SEQ ID NO: 27219 - DNA, 25 bp, Probe Sequence
tatatcctcattagtgaaggtggct

SEQ ID NO: 27220 - DNA, 25 bp, Probe Sequence
aaggtggataagacttcagaagagg

SEQ ID NO: 27221 - DNA, 25 bp, Probe Sequence
ggtggataagacttcagaagaggaa

SEQ ID NO: 27222 - DNA, 25 bp, Probe Sequence
atccaagcaggaagattctatatcc

SEQ ID NO: 27223 - DNA, 25 bp, Probe Sequence
atatcctcattagtgaaggtggctt

SEQ ID NO: 27224 - DNA, 25 bp, Probe Sequence
cctcaggcttagatcaatgtatagg

SEQ ID NO: 27225 - DNA, 25 bp, Probe Sequence
ccaacctcaggcttagatcaatgta

SEQ ID NO: 27226 - DNA, 25 bp, Probe Sequence
aggtcaccagcatgatgataatatt

SEQ ID NO: 27227 - DNA, 25 bp, Probe Sequence
ggtcaccagcatgatgataatattc

SEQ ID NO: 27228 - DNA, 25 bp, Probe Sequence
tctatatcctgatggtagagacaga

SEQ ID NO: 27229 - DNA, 25 bp, Probe Sequence
gtcaccagcatgatgataatattca

SEQ ID NO: 27230 - DNA, 25 bp, Probe Sequence
aggtggataagacttcagaagagga

SEQ ID NO: 27231 - DNA, 25 bp, Probe Sequence
ttctatatcctgatggtagagacag

SEQ ID NO: 27232 - DNA, 25 bp, Probe Sequence
cattgagacacattacctgaatgag

SEQ ID NO: 27233 - DNA, 25 bp, Probe Sequence
gaatatctctttgacaagcacacct

SEQ ID NO: 27234 - DNA, 25 bp, Probe Sequence
attgagacacattacctgaatgagc

SEQ ID NO: 27235 - DNA, 25 bp, Probe Sequence
aatatctctttgacaagcacacctg

SEQ ID NO: 27236 - DNA, 25 bp, Probe Sequence
tacctgtccatgtcttactactttg

SEQ ID NO: 27237 - DNA, 25 bp, Probe Sequence
gtttacctgtccatgtcttactact

SEQ ID NO: 27238 - DNA, 25 bp, Probe Sequence
ttacctgtccatgtcttactacttt

SEQ ID NO: 27239 - DNA, 25 bp, Probe Sequence
tttacctgtccatgtcttactactt

SEQ ID NO: 27240 - DNA, 25 bp, Probe Sequence
cgtttacctgtccatgtcttactac

SEQ ID NO: 27241 - DNA, 25 bp, Probe Sequence
acctgtccatgtcttactactttga

SEQ ID NO: 27242 - DNA, 25 bp, Probe Sequence
ggaatatctctttgacaagcacacc

SEQ ID NO: 27243 - DNA, 25 bp, Probe Sequence
cggaatatctctttgacaagcacac

SEQ ID NO: 27244 - DNA, 25 bp, Probe Sequence
ttgagacacattacctgaatgagca

SEQ ID NO: 27245 - DNA, 25 bp, Probe Sequence
tgagacacattacctgaatgagcag

SEQ ID NO: 27246 - DNA, 25 bp, Probe Sequence
ctgtccatgtcttactactttgacc

SEQ ID NO: 27247 - DNA, 25 bp, Probe Sequence
cctgtccatgtcttactactttgac

SEQ ID NO: 27248 - DNA, 25 bp, Probe Sequence
acctgggagacagtgataatgaaag

SEQ ID NO: 27249 - DNA, 25 bp, Probe Sequence
ctacgtttacctgtccatgtcttac

SEQ ID NO: 27250 - DNA, 25 bp, Probe Sequence
ggaacatgctgagaaactgatgaag

SEQ ID NO: 27251 - DNA, 25 bp, Probe Sequence
atatctctttgacaagcacacctgg

SEQ ID NO: 27252 - DNA, 25 bp, Probe Sequence
acgtttacctgtccatgtcttacta

SEQ ID NO: 27253 - DNA, 25 bp, Probe Sequence
tacgtttacctgtccatgtcttact

SEQ ID NO: 27254 - DNA, 25 bp, Probe Sequence
cagtgataatgaaagctaagcctcg

SEQ ID NO: 27255 - DNA, 25 bp, Probe Sequence
aatctggcttggcggaatatctctt

SEQ ID NO: 27256 - DNA, 25 bp, Probe Sequence
agaaggagatgaacagagaacattc

SEQ ID NO: 27257 - DNA, 25 bp, Probe Sequence
gagaaggagatgaacagagaacatt

SEQ ID NO: 27258 - DNA, 25 bp, Probe Sequence
aaggagatgaacagagaacattctt

SEQ ID NO: 27259 - DNA, 25 bp, Probe Sequence
aggagatgaacagagaacattcttc

SEQ ID NO: 27260 - DNA, 25 bp, Probe Sequence
gaaggagatgaacagagaacattct

SEQ ID NO: 27261 - DNA, 25 bp, Probe Sequence
ccatttgtcaaggaattatcggaag

SEQ ID NO: 27262 - DNA, 25 bp, Probe Sequence
gtatctcacaaagtagacgattcct

SEQ ID NO: 27263 - DNA, 25 bp, Probe Sequence
agtatctcacaaagtagacgattcc

SEQ ID NO: 27264 - DNA, 25 bp, Probe Sequence
tatctcacaaagtagacgattcctc

SEQ ID NO: 27265 - DNA, 25 bp, Probe Sequence
catttgtcaaggaattatcggaagc

SEQ ID NO: 27266 - DNA, 25 bp, Probe Sequence
atctcacaaagtagacgattcctct

SEQ ID NO: 27267 - DNA, 25 bp, Probe Sequence
agacaatcgaggaatgaggacaatt

SEQ ID NO: 27268 - DNA, 25 bp, Probe Sequence
cccacaattaaagttgaaggaatcc

SEQ ID NO: 27269 - DNA, 25 bp, Probe Sequence
ggagtatctcacaaagtagacgatt

SEQ ID NO: 27270 - DNA, 25 bp, Probe Sequence
gaacagagaacattcttcagtttcc

SEQ ID NO: 27271 - DNA, 25 bp, Probe Sequence
atttgtcaaggaattatcggaagcc

SEQ ID NO: 27272 - DNA, 25 bp, Probe Sequence
tcatgccatttgtcaaggaattatc

SEQ ID NO: 27273 - DNA, 25 bp, Probe Sequence
tggagtatctcacaaagtagacgat

SEQ ID NO: 27274 - DNA, 25 bp, Probe Sequence
atggagtatctcacaaagtagacga

SEQ ID NO: 27275 - DNA, 25 bp, Probe Sequence
ctgtagttgctccattcaaatgttc

SEQ ID NO: 27276 - DNA, 25 bp, Probe Sequence
attgactttgacacagtgaacaaga

SEQ ID NO: 27277 - DNA, 25 bp, Probe Sequence
cattgactttgacacagtgaacaag

SEQ ID NO: 27278 - DNA, 25 bp, Probe Sequence
gagtatctcacaaagtagacgattc

SEQ ID NO: 27279 - DNA, 25 bp, Probe Sequence
gttcatgccatttgtcaaggaatta

SEQ ID NO: 27280 - DNA, 25 bp, Probe Sequence
aatgtatattgcctctgctcctatc

SEQ ID NO: 27281 - DNA, 25 bp, Probe Sequence
gaatgtatattgcctctgctcctat

SEQ ID NO: 27282 - DNA, 25 bp, Probe Sequence
agtccattgtgaagtgtgctatatt

SEQ ID NO: 27283 - DNA, 25 bp, Probe Sequence
cagtccattgtgaagtgtgctatat

SEQ ID NO: 27284 - DNA, 25 bp, Probe Sequence
atgtatattgcctctgctcctatca

SEQ ID NO: 27285 - DNA, 25 bp, Probe Sequence
agaatgtatattgcctctgctccta

SEQ ID NO: 27286 - DNA, 25 bp, Probe Sequence
atatgcggagaatgtatattgcctc

SEQ ID NO: 27287 - DNA, 25 bp, Probe Sequence
tatgcggagaatgtatattgcctct

SEQ ID NO: 27288 - DNA, 25 bp, Probe Sequence
tgtatattgcctctgctcctatcag

SEQ ID NO: 27289 - DNA, 25 bp, Probe Sequence
gagaatgtatattgcctctgctcct

SEQ ID NO: 27290 - DNA, 25 bp, Probe Sequence
acagtccattgtgaagtgtgctata

SEQ ID NO: 27291 - DNA, 25 bp, Probe Sequence
aatatgcggagaatgtatattgcct

SEQ ID NO: 27292 - DNA, 25 bp, Probe Sequence
actcacatccatattacacctttcc

SEQ ID NO: 27293 - DNA, 25 bp, Probe Sequence
gtccattgtgaagtgtgctatattt

SEQ ID NO: 27294 - DNA, 25 bp, Probe Sequence
ctcacatccatattacacctttccc

SEQ ID NO: 27295 - DNA, 25 bp, Probe Sequence
aactcacatccatattacacctttc

SEQ ID NO: 27296 - DNA, 25 bp, Probe Sequence
gtatattgcctctgctcctatcagg

SEQ ID NO: 27297 - DNA, 25 bp, Probe Sequence
tgtatagaatccatttgtcatcagg

SEQ ID NO: 27298 - DNA, 25 bp, Probe Sequence
aaactcacatccatattacaccttt

SEQ ID NO: 27299 - DNA, 25 bp, Probe Sequence
gctaaaccctggtacatcgtatata

SEQ ID NO: 27300 - DNA, 25 bp, Probe Sequence
atgcggagaatgtatattgcctctg

SEQ ID NO: 27301 - DNA, 25 bp, Probe Sequence
tccattgtgaagtgtgctatattta

SEQ ID NO: 27302 - DNA, 25 bp, Probe Sequence
ccattgtgaagtgtgctatatttag

SEQ ID NO: 27303 - DNA, 25 bp, Probe Sequence
tgctaaaccctggtacatcgtatat

SEQ ID NO: 27304 - DNA, 25 bp, Probe Sequence
ttctcttattgttcagttcatccag

SEQ ID NO: 27305 - DNA, 25 bp, Probe Sequence
cttctcttattgttcagttcatcca

SEQ ID NO: 27306 - DNA, 25 bp, Probe Sequence
tctcttattgttcagttcatccaga

SEQ ID NO: 27307 - DNA, 25 bp, Probe Sequence
ctcttattgttcagttcatccagat

SEQ ID NO: 27308 - DNA, 25 bp, Probe Sequence
acttctcttattgttcagttcatcc

SEQ ID NO: 27309 - DNA, 25 bp, Probe Sequence
ggcaggagtaggaattgagtgataa

SEQ ID NO: 27310 - DNA, 25 bp, Probe Sequence
tcttattgttcagttcatccagatt

SEQ ID NO: 27311 - DNA, 25 bp, Probe Sequence
gggacactttagaccattagacaat

SEQ ID NO: 27312 - DNA, 25 bp, Probe Sequence
taacttcaatgggacactttagacc

SEQ ID NO: 27313 - DNA, 25 bp, Probe Sequence
gcaggagtaggaattgagtgataaa

SEQ ID NO: 27314 - DNA, 25 bp, Probe Sequence
aaagcaaaccaccttatacagagat

SEQ ID NO: 27315 - DNA, 25 bp, Probe Sequence
taaagcaaaccaccttatacagaga

SEQ ID NO: 27316 - DNA, 25 bp, Probe Sequence
aagatgctgtgtaactaaactgaaa

SEQ ID NO: 27317 - DNA, 25 bp, Probe Sequence
aaagatgctgtgtaactaaactgaa

SEQ ID NO: 27318 - DNA, 25 bp, Probe Sequence
ctaaagcaaaccaccttatacagag

SEQ ID NO: 27319 - DNA, 25 bp, Probe Sequence
ataacttcaatgggacactttagac

SEQ ID NO: 27320 - DNA, 25 bp, Probe Sequence
aggagtaggaattgagtgataaaca

SEQ ID NO: 27321 - DNA, 25 bp, Probe Sequence
agatgctgtgtaactaaactgaaat

SEQ ID NO: 27322 - DNA, 25 bp, Probe Sequence
cttattgttcagttcatccagatta

SEQ ID NO: 27323 - DNA, 25 bp, Probe Sequence
caggagtaggaattgagtgataaac

SEQ ID NO: 27324 - DNA, 25 bp, Probe Sequence
aaagtggttgatgtttcttatagca

SEQ ID NO: 27325 - DNA, 25 bp, Probe Sequence
ggacactttagaccattagacaatt

SEQ ID NO: 27326 - DNA, 25 bp, Probe Sequence
ttcacataatgccaaatacacaatg

SEQ ID NO: 27327 - DNA, 25 bp, Probe Sequence
aagtggttgatgtttcttatagcaa

SEQ ID NO: 27328 - DNA, 25 bp, Probe Sequence
tgttgtctattatctgtaggtggaa

SEQ ID NO: 27329 - DNA, 25 bp, Probe Sequence
ttgttgtctattatctgtaggtgga

SEQ ID NO: 27330 - DNA, 25 bp, Probe Sequence
cttgttgtctattatctgtaggtgg

SEQ ID NO: 27331 - DNA, 25 bp, Probe Sequence
gttgtctattatctgtaggtggaag

SEQ ID NO: 27332 - DNA, 25 bp, Probe Sequence
acttgttgtctattatctgtaggtg

SEQ ID NO: 27333 - DNA, 25 bp, Probe Sequence
tgtctattatctgtaggtggaagaa

SEQ ID NO: 27334 - DNA, 25 bp, Probe Sequence
ttgtctattatctgtaggtggaaga

SEQ ID NO: 27335 - DNA, 25 bp, Probe Sequence
ttcaccatacttcattcagaccagt

SEQ ID NO: 27336 - DNA, 25 bp, Probe Sequence
aatcacaacacagagctgctattaa

SEQ ID NO: 27337 - DNA, 25 bp, Probe Sequence
atgttgggtatcctactactttgtg

SEQ ID NO: 27338 - DNA, 25 bp, Probe Sequence
gttgggtatcctactactttgtgtt

SEQ ID NO: 27339 - DNA, 25 bp, Probe Sequence
ttgtttcaccatacttcattcagac

SEQ ID NO: 27340 - DNA, 25 bp, Probe Sequence
acttgtttcaccatacttcattcag

SEQ ID NO: 27341 - DNA, 25 bp, Probe Sequence
ttgggtatcctactactttgtgttt

SEQ ID NO: 27342 - DNA, 25 bp, Probe Sequence
ggtgggtctcaatccttaacatatt

SEQ ID NO: 27343 - DNA, 25 bp, Probe Sequence
agtttggttagccttagtttctcag

SEQ ID NO: 27344 - DNA, 25 bp, Probe Sequence
tttcaccatacttcattcagaccag

SEQ ID NO: 27345 - DNA, 25 bp, Probe Sequence
cttgtttcaccatacttcattcaga

SEQ ID NO: 27346 - DNA, 25 bp, Probe Sequence
tttggttagccttagtttctcagac

SEQ ID NO: 27347 - DNA, 25 bp, Probe Sequence
gtttggttagccttagtttctcaga

SEQ ID NO: 27348 - DNA, 25 bp, Probe Sequence
aagtttggttagccttagtttctca

SEQ ID NO: 27349 - DNA, 25 bp, Probe Sequence
gtttcaccatacttcattcagacca

SEQ ID NO: 27350 - DNA, 25 bp, Probe Sequence
tgtttcaccatacttcattcagacc

SEQ ID NO: 27351 - DNA, 25 bp, Probe Sequence
gacttgttgtctattatctgtaggt

SEQ ID NO: 27352 - DNA, 25 bp, Probe Sequence
gacaagatcatctactcacacttca

SEQ ID NO: 27353 - DNA, 25 bp, Probe Sequence
acaagatcatctactcacacttcac

SEQ ID NO: 27354 - DNA, 25 bp, Probe Sequence
cgacaagatcatctactcacacttc

SEQ ID NO: 27355 - DNA, 25 bp, Probe Sequence
caagatcatctactcacacttcacg

SEQ ID NO: 27356 - DNA, 25 bp, Probe Sequence
gcgacaagatcatctactcacactt

SEQ ID NO: 27357 - DNA, 25 bp, Probe Sequence
aagatcatctactcacacttcacgt

SEQ ID NO: 27358 - DNA, 25 bp, Probe Sequence
gacagcgacaagatcatctactcac

SEQ ID NO: 27359 - DNA, 25 bp, Probe Sequence
cagcgacaagatcatctactcacac

SEQ ID NO: 27360 - DNA, 25 bp, Probe Sequence
agcgacaagatcatctactcacact

SEQ ID NO: 27361 - DNA, 25 bp, Probe Sequence
acagcgacaagatcatctactcaca

SEQ ID NO: 27362 - DNA, 25 bp, Probe Sequence
tttatttcacagttatcaggggatg

SEQ ID NO: 27363 - DNA, 25 bp, Probe Sequence
cgacagcgacaagatcatctactca

SEQ ID NO: 27364 - DNA, 25 bp, Probe Sequence
ctccgtcatcctcttcctcaacaag

SEQ ID NO: 27365 - DNA, 25 bp, Probe Sequence
gtcatcctcttcctcaacaagaagg

SEQ ID NO: 27366 - DNA, 25 bp, Probe Sequence
ttatttcacagttatcaggggatgt

SEQ ID NO: 27367 - DNA, 25 bp, Probe Sequence
ttttatttcacagttatcaggggat

SEQ ID NO: 27368 - DNA, 25 bp, Probe Sequence
tatttcacagttatcaggggatgta

SEQ ID NO: 27369 - DNA, 25 bp, Probe Sequence
cgtcatcctcttcctcaacaagaag

SEQ ID NO: 27370 - DNA, 25 bp, Probe Sequence
atttcacagttatcaggggatgtac

SEQ ID NO: 27371 - DNA, 25 bp, Probe Sequence
gagttcatcctgaagatgttcgtgg

SEQ ID NO: 27372 - DNA, 25 bp, Probe Sequence
ggagttcatcctgaagatgttcgtg

SEQ ID NO: 27373 - DNA, 25 bp, Probe Sequence
ccgacagcgacaagatcatctactc

SEQ ID NO: 27374 - DNA, 25 bp, Probe Sequence
ctcaacctcaaggagtacaacctgg

SEQ ID NO: 27375 - DNA, 25 bp, Probe Sequence
gttcatcctgaagatgttcgtggac

SEQ ID NO: 27376 - DNA, 25 bp, Probe Sequence
taaccattgtcttgttctgtgatga

SEQ ID NO: 27377 - DNA, 25 bp, Probe Sequence
ttaaccattgtcttgttctgtgatg

SEQ ID NO: 27378 - DNA, 25 bp, Probe Sequence
aaccattgtcttgttctgtgatgag

SEQ ID NO: 27379 - DNA, 25 bp, Probe Sequence
atgtcatcatcaagaacaacctgaa

SEQ ID NO: 27380 - DNA, 25 bp, Probe Sequence
tgtcatcatcaagaacaacctgaag

SEQ ID NO: 27381 - DNA, 25 bp, Probe Sequence
atcatcaagaacaacctgaaggact

SEQ ID NO: 27382 - DNA, 25 bp, Probe Sequence
catcatcaagaacaacctgaaggac

SEQ ID NO: 27383 - DNA, 25 bp, Probe Sequence
gtcatcatcaagaacaacctgaagg

SEQ ID NO: 27384 - DNA, 25 bp, Probe Sequence
tcatcatcaagaacaacctgaagga

SEQ ID NO: 27385 - DNA, 25 bp, Probe Sequence
tttctcctctttcctctctttgttc

SEQ ID NO: 27386 - DNA, 25 bp, Probe Sequence
ttctcctctttcctctctttgttct

SEQ ID NO: 27387 - DNA, 25 bp, Probe Sequence
accattgtcttgttctgtgatgagg

SEQ ID NO: 27388 - DNA, 25 bp, Probe Sequence
tcatcaagaacaacctgaaggactg

SEQ ID NO: 27389 - DNA, 25 bp, Probe Sequence
tctcctctttcctctctttgttctc

SEQ ID NO: 27390 - DNA, 25 bp, Probe Sequence
tttaaccattgtcttgttctgtgat

SEQ ID NO: 27391 - DNA, 25 bp, Probe Sequence
tcctctttcctctctttgttctcag

SEQ ID NO: 27392 - DNA, 25 bp, Probe Sequence
ctcctctttcctctctttgttctca

SEQ ID NO: 27393 - DNA, 25 bp, Probe Sequence
gatgtcatcatcaagaacaacctga

SEQ ID NO: 27394 - DNA, 25 bp, Probe Sequence
cctctttcctctctttgttctcagc

SEQ ID NO: 27395 - DNA, 25 bp, Probe Sequence
tctttcctctctttgttctcagctc

SEQ ID NO: 27396 - DNA, 25 bp, Probe Sequence
ctctttcctctctttgttctcagct

SEQ ID NO: 27397 - DNA, 25 bp, Probe Sequence
cgatgtcatcatcaagaacaacctg

SEQ ID NO: 27398 - DNA, 25 bp, Probe Sequence
ttttctcctctttcctctctttgtt

SEQ ID NO: 27399 - DNA, 25 bp, Probe Sequence
catcaagaacaacctgaaggactgc

SEQ ID NO: 27400 - DNA, 25 bp, Probe Sequence
attgttctgctctaactgatacctc

SEQ ID NO: 27401 - DNA, 25 bp, Probe Sequence
aattgttctgctctaactgatacct

SEQ ID NO: 27402 - DNA, 25 bp, Probe Sequence
ccagttctccactccaatgataata

SEQ ID NO: 27403 - DNA, 25 bp, Probe Sequence
tccactccaatgataatagttcact

SEQ ID NO: 27404 - DNA, 25 bp, Probe Sequence
gttctgctctaactgatacctcaac

SEQ ID NO: 27405 - DNA, 25 bp, Probe Sequence
ctccactccaatgataatagttcac

SEQ ID NO: 27406 - DNA, 25 bp, Probe Sequence
tctccactccaatgataatagttca

SEQ ID NO: 27407 - DNA, 25 bp, Probe Sequence
agttctccactccaatgataatagt

SEQ ID NO: 27408 - DNA, 25 bp, Probe Sequence
tgttctgctctaactgatacctcaa

SEQ ID NO: 27409 - DNA, 25 bp, Probe Sequence
ttgttctgctctaactgatacctca

SEQ ID NO: 27410 - DNA, 25 bp, Probe Sequence
cagttctccactccaatgataatag

SEQ ID NO: 27411 - DNA, 25 bp, Probe Sequence
tccagttctccactccaatgataat

SEQ ID NO: 27412 - DNA, 25 bp, Probe Sequence
ccactccaatgataatagttcactt

SEQ ID NO: 27413 - DNA, 25 bp, Probe Sequence
gttctccactccaatgataatagtt

SEQ ID NO: 27414 - DNA, 25 bp, Probe Sequence
ctccagttctccactccaatgataa

SEQ ID NO: 27415 - DNA, 25 bp, Probe Sequence
ctgctctaactgatacctcaacctt

SEQ ID NO: 27416 - DNA, 25 bp, Probe Sequence
ttctgctctaactgatacctcaacc

SEQ ID NO: 27417 - DNA, 25 bp, Probe Sequence
ttctccactccaatgataatagttc

SEQ ID NO: 27418 - DNA, 25 bp, Probe Sequence
tgctctaactgatacctcaaccttg

SEQ ID NO: 27419 - DNA, 25 bp, Probe Sequence
tctgctctaactgatacctcaacct

SEQ ID NO: 27420 - DNA, 25 bp, Probe Sequence
tctccagttctccactccaatgata

SEQ ID NO: 27421 - DNA, 25 bp, Probe Sequence
gctctaactgatacctcaaccttgg

SEQ ID NO: 27422 - DNA, 25 bp, Probe Sequence
agttcacttatacctaaacccaaag

SEQ ID NO: 27423 - DNA, 25 bp, Probe Sequence
tcacttatacctaaacccaaaggaa

SEQ ID NO: 27424 - DNA, 25 bp, Probe Sequence
caagaccgaagtaaactacactcag

SEQ ID NO: 27425 - DNA, 25 bp, Probe Sequence
ggagtaacgaagagatcaaagagtt

SEQ ID NO: 27426 - DNA, 25 bp, Probe Sequence
gagtaacgaagagatcaaagagttc

SEQ ID NO: 27427 - DNA, 25 bp, Probe Sequence
agggagtaacgaagagatcaaagag

SEQ ID NO: 27428 - DNA, 25 bp, Probe Sequence
gggagtaacgaagagatcaaagagt

SEQ ID NO: 27429 - DNA, 25 bp, Probe Sequence
cagggagtaacgaagagatcaaaga

SEQ ID NO: 27430 - DNA, 25 bp, Probe Sequence
tgtgggaataaacagacaaattaga

SEQ ID NO: 27431 - DNA, 25 bp, Probe Sequence
gtcaaattcgatatgttcagcaaga

SEQ ID NO: 27432 - DNA, 25 bp, Probe Sequence
gtgggaataaacagacaaattagaa

SEQ ID NO: 27433 - DNA, 25 bp, Probe Sequence
tcaaattcgatatgttcagcaagat

SEQ ID NO: 27434 - DNA, 25 bp, Probe Sequence
cgtcaaattcgatatgttcagcaag

SEQ ID NO: 27435 - DNA, 25 bp, Probe Sequence
caaattcgatatgttcagcaagatc

SEQ ID NO: 27436 - DNA, 25 bp, Probe Sequence
aagaccgaagtaaactacactcagc

SEQ ID NO: 27437 - DNA, 25 bp, Probe Sequence
aattcgatatgttcagcaagatctg

SEQ ID NO: 27438 - DNA, 25 bp, Probe Sequence
ccagggagtaacgaagagatcaaag

SEQ ID NO: 27439 - DNA, 25 bp, Probe Sequence
gcaagaccgaagtaaactacactca

SEQ ID NO: 27440 - DNA, 25 bp, Probe Sequence
acgtcaaattcgatatgttcagcaa

SEQ ID NO: 27441 - DNA, 25 bp, Probe Sequence
acaacgtcaaattcgatatgttcag

SEQ ID NO: 27442 - DNA, 25 bp, Probe Sequence
gctacaacgtcaaattcgatatgtt

SEQ ID NO: 27443 - DNA, 25 bp, Probe Sequence
caacgtcaaattcgatatgttcagc

SEQ ID NO: 27444 - DNA, 25 bp, Probe Sequence
gctaccttgtgggaataaacagaca

SEQ ID NO: 27445 - DNA, 25 bp, Probe Sequence
tgggaataaacagacaaattagaaa

SEQ ID NO: 27446 - DNA, 25 bp, Probe Sequence
tacaacgtcaaattcgatatgttca

SEQ ID NO: 27447 - DNA, 25 bp, Probe Sequence
aacgtcaaattcgatatgttcagca

SEQ ID NO: 27448 - DNA, 25 bp, Probe Sequence
cctttcttatccgagagagtgagag

SEQ ID NO: 27449 - DNA, 25 bp, Probe Sequence
ctttcttatccgagagagtgagagc

SEQ ID NO: 27450 - DNA, 25 bp, Probe Sequence
ctctctgtcaagtttggaaacgatg

SEQ ID NO: 27451 - DNA, 25 bp, Probe Sequence
acatagaaatgaaaccacatccgtg

SEQ ID NO: 27452 - DNA, 25 bp, Probe Sequence
ctctgtcaagtttggaaacgatgtg

SEQ ID NO: 27453 - DNA, 25 bp, Probe Sequence
tctctgtcaagtttggaaacgatgt

SEQ ID NO: 27454 - DNA, 25 bp, Probe Sequence
cctctctgtcaagtttggaaacgat

SEQ ID NO: 27455 - DNA, 25 bp, Probe Sequence
gcctttcttatccgagagagtgaga

SEQ ID NO: 27456 - DNA, 25 bp, Probe Sequence
tttcttatccgagagagtgagagcg

SEQ ID NO: 27457 - DNA, 25 bp, Probe Sequence
tctccctctctgtcaagtttggaaa

SEQ ID NO: 27458 - DNA, 25 bp, Probe Sequence
ttctccctctctgtcaagtttggaa

SEQ ID NO: 27459 - DNA, 25 bp, Probe Sequence
ctccctctctgtcaagtttggaaac

SEQ ID NO: 27460 - DNA, 25 bp, Probe Sequence
cttctccctctctgtcaagtttgga

SEQ ID NO: 27461 - DNA, 25 bp, Probe Sequence
gacttctccctctctgtcaagtttg

SEQ ID NO: 27462 - DNA, 25 bp, Probe Sequence
tctgtcaagtttggaaacgatgtgc

SEQ ID NO: 27463 - DNA, 25 bp, Probe Sequence
aaggcagaagaaatgcttagcaaac

SEQ ID NO: 27464 - DNA, 25 bp, Probe Sequence
caaggcagaagaaatgcttagcaaa

SEQ ID NO: 27465 - DNA, 25 bp, Probe Sequence
ccctctctgtcaagtttggaaacga

SEQ ID NO: 27466 - DNA, 25 bp, Probe Sequence
ggacttctccctctctgtcaagttt

SEQ ID NO: 27467 - DNA, 25 bp, Probe Sequence
ggcagaagaaatgcttagcaaacag

SEQ ID NO: 27468 - DNA, 25 bp, Probe Sequence
acttctccctctctgtcaagtttgg

SEQ ID NO: 27469 - DNA, 25 bp, Probe Sequence
tgtcaagtttggaaacgatgtgcag

SEQ ID NO: 27470 - DNA, 25 bp, Probe Sequence
ctgtcaagtttggaaacgatgtgca

SEQ ID NO: 27471 - DNA, 25 bp, Probe Sequence
tccctctctgtcaagtttggaaacg

SEQ ID NO: 27472 - DNA, 25 bp, Probe Sequence
cctttcttatccgagagagtgagag

SEQ ID NO: 27473 - DNA, 25 bp, Probe Sequence
ctttcttatccgagagagtgagagc

SEQ ID NO: 27474 - DNA, 25 bp, Probe Sequence
ctctctgtcaagtttggaaacgatg

SEQ ID NO: 27475 - DNA, 25 bp, Probe Sequence
acatagaaatgaaaccacatccgtg

SEQ ID NO: 27476 - DNA, 25 bp, Probe Sequence
ctctgtcaagtttggaaacgatgtg

SEQ ID NO: 27477 - DNA, 25 bp, Probe Sequence
tctctgtcaagtttggaaacgatgt

SEQ ID NO: 27478 - DNA, 25 bp, Probe Sequence
cctctctgtcaagtttggaaacgat

SEQ ID NO: 27479 - DNA, 25 bp, Probe Sequence
gcctttcttatccgagagagtgaga

SEQ ID NO: 27480 - DNA, 25 bp, Probe Sequence
tttcttatccgagagagtgagagcg

SEQ ID NO: 27481 - DNA, 25 bp, Probe Sequence
tctccctctctgtcaagtttggaaa

SEQ ID NO: 27482 - DNA, 25 bp, Probe Sequence
ttctccctctctgtcaagtttggaa

SEQ ID NO: 27483 - DNA, 25 bp, Probe Sequence
ctccctctctgtcaagtttggaaac

SEQ ID NO: 27484 - DNA, 25 bp, Probe Sequence
cttctccctctctgtcaagtttgga

SEQ ID NO: 27485 - DNA, 25 bp, Probe Sequence
gacttctccctctctgtcaagtttg

SEQ ID NO: 27486 - DNA, 25 bp, Probe Sequence
tctgtcaagtttggaaacgatgtgc

SEQ ID NO: 27487 - DNA, 25 bp, Probe Sequence
aaggcagaagaaatgcttagcaaac

SEQ ID NO: 27488 - DNA, 25 bp, Probe Sequence
caaggcagaagaaatgcttagcaaa

SEQ ID NO: 27489 - DNA, 25 bp, Probe Sequence
ccctctctgtcaagtttggaaacga

SEQ ID NO: 27490 - DNA, 25 bp, Probe Sequence
ggacttctccctctctgtcaagttt

SEQ ID NO: 27491 - DNA, 25 bp, Probe Sequence
ggcagaagaaatgcttagcaaacag

SEQ ID NO: 27492 - DNA, 25 bp, Probe Sequence
acttctccctctctgtcaagtttgg

SEQ ID NO: 27493 - DNA, 25 bp, Probe Sequence
tgtcaagtttggaaacgatgtgcag

SEQ ID NO: 27494 - DNA, 25 bp, Probe Sequence
ctgtcaagtttggaaacgatgtgca

SEQ ID NO: 27495 - DNA, 25 bp, Probe Sequence
tccctctctgtcaagtttggaaacg

SEQ ID NO: 27496 - DNA, 25 bp, Probe Sequence
tcaataaagtttgtacactttcaaa

SEQ ID NO: 27497 - DNA, 25 bp, Probe Sequence
ttcaataaagtttgtacactttcaa

SEQ ID NO: 27498 - DNA, 25 bp, Probe Sequence
tttcaataaagtttgtacactttca

SEQ ID NO: 27499 - DNA, 25 bp, Probe Sequence
caataaagtttgtacactttcaaaa

SEQ ID NO: 27500 - DNA, 25 bp, Probe Sequence
tataacggtggtgcctatctactta

SEQ ID NO: 27501 - DNA, 25 bp, Probe Sequence
gtgatacctggaagagagactatgt

SEQ ID NO: 27502 - DNA, 25 bp, Probe Sequence
ataacggtggtgcctatctacttaa

SEQ ID NO: 27503 - DNA, 25 bp, Probe Sequence
ctgtgaattgagtgctctgatgtaa

SEQ ID NO: 27504 - DNA, 25 bp, Probe Sequence
gtataacggtggtgcctatctactt

SEQ ID NO: 27505 - DNA, 25 bp, Probe Sequence
tgatacctggaagagagactatgtc

SEQ ID NO: 27506 - DNA, 25 bp, Probe Sequence
cctgtgaattgagtgctctgatgta

SEQ ID NO: 27507 - DNA, 25 bp, Probe Sequence
atacagttccagtttattagcagca

SEQ ID NO: 27508 - DNA, 25 bp, Probe Sequence
tacagttccagtttattagcagcaa

SEQ ID NO: 27509 - DNA, 25 bp, Probe Sequence
tctttcttggacttgggatatacag

SEQ ID NO: 27510 - DNA, 25 bp, Probe Sequence
ataataagggtgaagcaagaagcat

SEQ ID NO: 27511 - DNA, 25 bp, Probe Sequence
cagataataagggtgaagcaagaag

SEQ ID NO: 27512 - DNA, 25 bp, Probe Sequence
ccagataataagggtgaagcaagaa

SEQ ID NO: 27513 - DNA, 25 bp, Probe Sequence
taataagggtgaagcaagaagcatt

SEQ ID NO: 27514 - DNA, 25 bp, Probe Sequence
ttaaccaaacattcaccaaagcaaa

SEQ ID NO: 27515 - DNA, 25 bp, Probe Sequence
tttaaccaaacattcaccaaagcaa

SEQ ID NO: 27516 - DNA, 25 bp, Probe Sequence
cacatctttcttggacttgggatat

SEQ ID NO: 27517 - DNA, 25 bp, Probe Sequence
agataataagggtgaagcaagaagc

SEQ ID NO: 27518 - DNA, 25 bp, Probe Sequence
caggagatgcagttctagttcttaa

SEQ ID NO: 27519 - DNA, 25 bp, Probe Sequence
taaccaaacattcaccaaagcaaag

SEQ ID NO: 27520 - DNA, 25 bp, Probe Sequence
ctccagataataagggtgaagcaag

SEQ ID NO: 27521 - DNA, 25 bp, Probe Sequence
ggtgatacctggaagagagactatg

SEQ ID NO: 27522 - DNA, 25 bp, Probe Sequence
gtggactgtttagaagaagaaatga

SEQ ID NO: 27523 - DNA, 25 bp, Probe Sequence
atctttcttggacttgggatataca

SEQ ID NO: 27524 - DNA, 25 bp, Probe Sequence
gatgatgtagagactgataccgtag

SEQ ID NO: 27525 - DNA, 25 bp, Probe Sequence
tggagcaatgagagatatgaagaat

SEQ ID NO: 27526 - DNA, 25 bp, Probe Sequence
ggagcaatgagagatatgaagaatg

SEQ ID NO: 27527 - DNA, 25 bp, Probe Sequence
cgatgatgtagagactgataccgta

SEQ ID NO: 27528 - DNA, 25 bp, Probe Sequence
ttccgatgatgtagagactgatacc

SEQ ID NO: 27529 - DNA, 25 bp, Probe Sequence
ttggagcaatgagagatatgaagaa

SEQ ID NO: 27530 - DNA, 25 bp, Probe Sequence
gagcaatgagagatatgaagaatgt

SEQ ID NO: 27531 - DNA, 25 bp, Probe Sequence
atgatgtagagactgataccgtagc

SEQ ID NO: 27532 - DNA, 25 bp, Probe Sequence
taagtgatgtggacataattgccta

SEQ ID NO: 27533 - DNA, 25 bp, Probe Sequence
caatagatcagttgatggaccaatc

SEQ ID NO: 27534 - DNA, 25 bp, Probe Sequence
aagtgatgtggacataattgcctac

SEQ ID NO: 27535 - DNA, 25 bp, Probe Sequence
gtaagtgatgtggacataattgcct

SEQ ID NO: 27536 - DNA, 25 bp, Probe Sequence
ttgtaagtgatgtggacataattgc

SEQ ID NO: 27537 - DNA, 25 bp, Probe Sequence
ctacttcacaccgccttctcttatt

SEQ ID NO: 27538 - DNA, 25 bp, Probe Sequence
agcaatgagagatatgaagaatgta

SEQ ID NO: 27539 - DNA, 25 bp, Probe Sequence
gcatattcatacctgtattgaggag

SEQ ID NO: 27540 - DNA, 25 bp, Probe Sequence
tgagagatatgaagaatgtaaggag

SEQ ID NO: 27541 - DNA, 25 bp, Probe Sequence
gtgatgtggacataattgcctacaa

SEQ ID NO: 27542 - DNA, 25 bp, Probe Sequence
tgtaagtgatgtggacataattgcc

SEQ ID NO: 27543 - DNA, 25 bp, Probe Sequence
ttctgtccttggtacattggattac

SEQ ID NO: 27544 - DNA, 25 bp, Probe Sequence
gtgctgcatattcatacctgtattg

SEQ ID NO: 27545 - DNA, 25 bp, Probe Sequence
ttcttccagggtttatactttgtga

SEQ ID NO: 27546 - DNA, 25 bp, Probe Sequence
catattcatacctgtattgaggagg

SEQ ID NO: 27547 - DNA, 25 bp, Probe Sequence
gagagatatgaagaatgtaaggaga

SEQ ID NO: 27548 - DNA, 25 bp, Probe Sequence
acaagaagaaaatgaagctcaaagt

SEQ ID NO: 27549 - DNA, 25 bp, Probe Sequence
agaagaaaatgaagctcaaagtcaa

SEQ ID NO: 27550 - DNA, 25 bp, Probe Sequence
aagaagaaaatgaagctcaaagtca

SEQ ID NO: 27551 - DNA, 25 bp, Probe Sequence
caagaagaaaatgaagctcaaagtc

SEQ ID NO: 27552 - DNA, 25 bp, Probe Sequence
gaagaaaatgaagctcaaagtcaaa

SEQ ID NO: 27553 - DNA, 25 bp, Probe Sequence
aagaaaatgaagctcaaagtcaaaa

SEQ ID NO: 27554 - DNA, 25 bp, Probe Sequence
caaggagtcgagctttctctcagag

SEQ ID NO: 27555 - DNA, 25 bp, Probe Sequence
tatatcctcccaaaaggaaacaagg

SEQ ID NO: 27556 - DNA, 25 bp, Probe Sequence
atatatcctcccaaaaggaaacaag

SEQ ID NO: 27557 - DNA, 25 bp, Probe Sequence
gagtcgagctttctctcagagcatg

SEQ ID NO: 27558 - DNA, 25 bp, Probe Sequence
atatcctcccaaaaggaaacaaggg

SEQ ID NO: 27559 - DNA, 25 bp, Probe Sequence
gatatatcctcccaaaaggaaacaa

SEQ ID NO: 27560 - DNA, 25 bp, Probe Sequence
tatcctcccaaaaggaaacaagggc

SEQ ID NO: 27561 - DNA, 25 bp, Probe Sequence
cttaccacgttactgcatactgatc

SEQ ID NO: 27562 - DNA, 25 bp, Probe Sequence
tcctactcttcctttctaaatctga

SEQ ID NO: 27563 - DNA, 25 bp, Probe Sequence
accagatcctactcttcctttctaa

SEQ ID NO: 27564 - DNA, 25 bp, Probe Sequence
gaccagatcctactcttcctttcta

SEQ ID NO: 27565 - DNA, 25 bp, Probe Sequence
ccagatcctactcttcctttctaaa

SEQ ID NO: 27566 - DNA, 25 bp, Probe Sequence
ttaccacgttactgcatactgatcc

SEQ ID NO: 27567 - DNA, 25 bp, Probe Sequence
ccttaccacgttactgcatactgat

SEQ ID NO: 27568 - DNA, 25 bp, Probe Sequence
cctactcttcctttctaaatctgag

SEQ ID NO: 27569 - DNA, 25 bp, Probe Sequence
atcctactcttcctttctaaatctg

SEQ ID NO: 27570 - DNA, 25 bp, Probe Sequence
gaaccttaccacgttactgcatact

SEQ ID NO: 27571 - DNA, 25 bp, Probe Sequence
ctaggttctaggtcctggcttctag

SEQ ID NO: 27572 - DNA, 25 bp, Probe Sequence
cttcctgtctttctggtcctttctg

SEQ ID NO: 27573 - DNA, 25 bp, Probe Sequence
aaccttaccacgttactgcatactg

SEQ ID NO: 27574 - DNA, 25 bp, Probe Sequence
actcttcctttctaaatctgagatc

SEQ ID NO: 27575 - DNA, 25 bp, Probe Sequence
cagatcctactcttcctttctaaat

SEQ ID NO: 27576 - DNA, 25 bp, Probe Sequence
ctggcttctagatctggaaccttac

SEQ ID NO: 27577 - DNA, 25 bp, Probe Sequence
ctactcttcctttctaaatctgaga

SEQ ID NO: 27578 - DNA, 25 bp, Probe Sequence
gatcctactcttcctttctaaatct

SEQ ID NO: 27579 - DNA, 25 bp, Probe Sequence
agatcctactcttcctttctaaatc

SEQ ID NO: 27580 - DNA, 25 bp, Probe Sequence
accttaccacgttactgcatactga

SEQ ID NO: 27581 - DNA, 25 bp, Probe Sequence
actaggttctaggtcctggcttcta

SEQ ID NO: 27582 - DNA, 25 bp, Probe Sequence
ctagatctggaaccttaccacgtta

SEQ ID NO: 27583 - DNA, 25 bp, Probe Sequence
ggaaccttaccacgttactgcatac

SEQ ID NO: 27584 - DNA, 25 bp, Probe Sequence
gatctggaaccttaccacgttactg

SEQ ID NO: 27585 - DNA, 25 bp, Probe Sequence
accattctcaagagttacatcagat

SEQ ID NO: 27586 - DNA, 25 bp, Probe Sequence
gagaagtcactgttactgtcctaag

SEQ ID NO: 27587 - DNA, 25 bp, Probe Sequence
agattcattaagaccttctgacacc

SEQ ID NO: 27588 - DNA, 25 bp, Probe Sequence
gaagtcactgttactgtcctaagtc

SEQ ID NO: 27589 - DNA, 25 bp, Probe Sequence
taccattctcaagagttacatcaga

SEQ ID NO: 27590 - DNA, 25 bp, Probe Sequence
agaagtcactgttactgtcctaagt

SEQ ID NO: 27591 - DNA, 25 bp, Probe Sequence
ccgatccagattcattaagaccttc

SEQ ID NO: 27592 - DNA, 25 bp, Probe Sequence
cgatccagattcattaagaccttct

SEQ ID NO: 27593 - DNA, 25 bp, Probe Sequence
ataccattctcaagagttacatcag

SEQ ID NO: 27594 - DNA, 25 bp, Probe Sequence
attctcaagagttacatcagatcct

SEQ ID NO: 27595 - DNA, 25 bp, Probe Sequence
cattctcaagagttacatcagatcc

SEQ ID NO: 27596 - DNA, 25 bp, Probe Sequence
ccattctcaagagttacatcagatc

SEQ ID NO: 27597 - DNA, 25 bp, Probe Sequence
accgatccagattcattaagacctt

SEQ ID NO: 27598 - DNA, 25 bp, Probe Sequence
ctcaagagttacatcagatcctcaa

SEQ ID NO: 27599 - DNA, 25 bp, Probe Sequence
tctcaagagttacatcagatcctca

SEQ ID NO: 27600 - DNA, 25 bp, Probe Sequence
ttctcaagagttacatcagatcctc

SEQ ID NO: 27601 - DNA, 25 bp, Probe Sequence
agagttacatcagatcctcaatcaa

SEQ ID NO: 27602 - DNA, 25 bp, Probe Sequence
aagagttacatcagatcctcaatca

SEQ ID NO: 27603 - DNA, 25 bp, Probe Sequence
tcaagagttacatcagatcctcaat

SEQ ID NO: 27604 - DNA, 25 bp, Probe Sequence
cgagaagtcactgttactgtcctaa

SEQ ID NO: 27605 - DNA, 25 bp, Probe Sequence
caagagttacatcagatcctcaatc

SEQ ID NO: 27606 - DNA, 25 bp, Probe Sequence
tcaagatgctccacataagatccaa

SEQ ID NO: 27607 - DNA, 25 bp, Probe Sequence
aagtcactgttactgtcctaagtcg

SEQ ID NO: 27608 - DNA, 25 bp, Probe Sequence
caccgatccagattcattaagacct

SEQ ID NO: 27609 - DNA, 25 bp, Probe Sequence
ctccatcttcattcataggtctgcg

SEQ ID NO: 27610 - DNA, 25 bp, Probe Sequence
tagataccagcacaagtcggttaat

SEQ ID NO: 27611 - DNA, 25 bp, Probe Sequence
ctagataccagcacaagtcggttaa

SEQ ID NO: 27612 - DNA, 25 bp, Probe Sequence
cctccatcttcattcataggtctgc

SEQ ID NO: 27613 - DNA, 25 bp, Probe Sequence
gctctccctccatcttcattcatag

SEQ ID NO: 27614 - DNA, 25 bp, Probe Sequence
agataccagcacaagtcggttaatc

SEQ ID NO: 27615 - DNA, 25 bp, Probe Sequence
ttccacgactagaaccttaggcatt

SEQ ID NO: 27616 - DNA, 25 bp, Probe Sequence
ctctccctccatcttcattcatagg

SEQ ID NO: 27617 - DNA, 25 bp, Probe Sequence
taacccttccacgactagaacctta

SEQ ID NO: 27618 - DNA, 25 bp, Probe Sequence
ctccctccatcttcattcataggtc

SEQ ID NO: 27619 - DNA, 25 bp, Probe Sequence
cttccacgactagaaccttaggcat

SEQ ID NO: 27620 - DNA, 25 bp, Probe Sequence
tccacgactagaaccttaggcattg

SEQ ID NO: 27621 - DNA, 25 bp, Probe Sequence
ccctccatcttcattcataggtctg

SEQ ID NO: 27622 - DNA, 25 bp, Probe Sequence
tccctccatcttcattcataggtct

SEQ ID NO: 27623 - DNA, 25 bp, Probe Sequence
tctccctccatcttcattcataggt

SEQ ID NO: 27624 - DNA, 25 bp, Probe Sequence
gataccagcacaagtcggttaatcc

SEQ ID NO: 27625 - DNA, 25 bp, Probe Sequence
aagcacctagataccagcacaagtc

SEQ ID NO: 27626 - DNA, 25 bp, Probe Sequence
atttcccttccagcaaactcaactc

SEQ ID NO: 27627 - DNA, 25 bp, Probe Sequence
agctctccctccatcttcattcata

SEQ ID NO: 27628 - DNA, 25 bp, Probe Sequence
cctagataccagcacaagtcggtta

SEQ ID NO: 27629 - DNA, 25 bp, Probe Sequence
aatccaagcacctagataccagcac

SEQ ID NO: 27630 - DNA, 25 bp, Probe Sequence
caatccaagcacctagataccagca

SEQ ID NO: 27631 - DNA, 25 bp, Probe Sequence
catttcccttccagcaaactcaact

SEQ ID NO: 27632 - DNA, 25 bp, Probe Sequence
cttaggcattggggagttttagatg

SEQ ID NO: 27633 - DNA, 25 bp, Probe Sequence
ggattctctcatcaaggctacaatt

SEQ ID NO: 27634 - DNA, 25 bp, Probe Sequence
aattggattctctcatcaaggctac

SEQ ID NO: 27635 - DNA, 25 bp, Probe Sequence
tggattctctcatcaaggctacaat

SEQ ID NO: 27636 - DNA, 25 bp, Probe Sequence
attggattctctcatcaaggctaca

SEQ ID NO: 27637 - DNA, 25 bp, Probe Sequence
ttggattctctcatcaaggctacaa

SEQ ID NO: 27638 - DNA, 25 bp, Probe Sequence
acttgctattcgtggagatgaagaa

SEQ ID NO: 27639 - DNA, 25 bp, Probe Sequence
aacttgctattcgtggagatgaaga

SEQ ID NO: 27640 - DNA, 25 bp, Probe Sequence
caacttgctattcgtggagatgaag

SEQ ID NO: 27641 - DNA, 25 bp, Probe Sequence
gatgcctggattccttgttatctca

SEQ ID NO: 27642 - DNA, 25 bp, Probe Sequence
tattcgtggagatgaagaattggat

SEQ ID NO: 27643 - DNA, 25 bp, Probe Sequence
gaattggattctctcatcaaggcta

SEQ ID NO: 27644 - DNA, 25 bp, Probe Sequence
ctattcgtggagatgaagaattgga

SEQ ID NO: 27645 - DNA, 25 bp, Probe Sequence
gaagctattgattctgaagtagtgg

SEQ ID NO: 27646 - DNA, 25 bp, Probe Sequence
attcgtggagatgaagaattggatt

SEQ ID NO: 27647 - DNA, 25 bp, Probe Sequence
ttgctattcgtggagatgaagaatt

SEQ ID NO: 27648 - DNA, 25 bp, Probe Sequence
tctgcattcgagtcttaaccatatt

SEQ ID NO: 27649 - DNA, 25 bp, Probe Sequence
ttctgcattcgagtcttaaccatat

SEQ ID NO: 27650 - DNA, 25 bp, Probe Sequence
cttgctattcgtggagatgaagaat

SEQ ID NO: 27651 - DNA, 25 bp, Probe Sequence
tggtggataagttcaataaaggtca

SEQ ID NO: 27652 - DNA, 25 bp, Probe Sequence
tctggtggataagttcaataaaggt

SEQ ID NO: 27653 - DNA, 25 bp, Probe Sequence
ttcgtggagatgaagaattggattc

SEQ ID NO: 27654 - DNA, 25 bp, Probe Sequence
ctggtggataagttcaataaaggtc

SEQ ID NO: 27655 - DNA, 25 bp, Probe Sequence
tcaggactctaaatactctaacagc

SEQ ID NO: 27656 - DNA, 25 bp, Probe Sequence
tgctattcgtggagatgaagaattg

SEQ ID NO: 27657 - DNA, 25 bp, Probe Sequence
atgccagcatttggatttctttaaa

SEQ ID NO: 27658 - DNA, 25 bp, Probe Sequence
aatgccagcatttggatttctttaa

SEQ ID NO: 27659 - DNA, 25 bp, Probe Sequence
caatgccagcatttggatttcttta

SEQ ID NO: 27660 - DNA, 25 bp, Probe Sequence
gccagcatttggatttctttaaaac

SEQ ID NO: 27661 - DNA, 25 bp, Probe Sequence
tgccagcatttggatttctttaaaa

SEQ ID NO: 27662 - DNA, 25 bp, Probe Sequence
ccagcatttggatttctttaaaaca

SEQ ID NO: 27663 - DNA, 25 bp, Probe Sequence
acaatgccagcatttggatttcttt

SEQ ID NO: 27664 - DNA, 25 bp, Probe Sequence
gcatttggatttctttaaaacaagt

SEQ ID NO: 27665 - DNA, 25 bp, Probe Sequence
cagcatttggatttctttaaaacaa

SEQ ID NO: 27666 - DNA, 25 bp, Probe Sequence
agcatttggatttctttaaaacaag

SEQ ID NO: 27667 - DNA, 25 bp, Probe Sequence
gacaatgccagcatttggatttctt

SEQ ID NO: 27668 - DNA, 25 bp, Probe Sequence
ggacaatgccagcatttggatttct

SEQ ID NO: 27669 - DNA, 25 bp, Probe Sequence
tggacaatgccagcatttggatttc

SEQ ID NO: 27670 - DNA, 25 bp, Probe Sequence
tttatttgagaacaggtgaatcagc

SEQ ID NO: 27671 - DNA, 25 bp, Probe Sequence
gctttatttgagaacaggtgaatca

SEQ ID NO: 27672 - DNA, 25 bp, Probe Sequence
ctttatttgagaacaggtgaatcag

SEQ ID NO: 27673 - DNA, 25 bp, Probe Sequence
agctttatttgagaacaggtgaatc

SEQ ID NO: 27674 - DNA, 25 bp, Probe Sequence
aatgcacacctttattcagaacttt

SEQ ID NO: 27675 - DNA, 25 bp, Probe Sequence
aaatgcacacctttattcagaactt

SEQ ID NO: 27676 - DNA, 25 bp, Probe Sequence
ttatttgagaacaggtgaatcagct

SEQ ID NO: 27677 - DNA, 25 bp, Probe Sequence
atgcacacctttattcagaacttta

SEQ ID NO: 27678 - DNA, 25 bp, Probe Sequence
ctcaatgcaaagattctacgggaaa

SEQ ID NO: 27679 - DNA, 25 bp, Probe Sequence
ctgaatttgtgtgtaaacggggata

SEQ ID NO: 27680 - DNA, 25 bp, Probe Sequence
ttaaaacttggaaaactggaaaact

SEQ ID NO: 27681 - DNA, 25 bp, Probe Sequence
caaagattctacgggaaaatgtggg

SEQ ID NO: 27682 - DNA, 25 bp, Probe Sequence
cctcaatgcaaagattctacgggaa

SEQ ID NO: 27683 - DNA, 25 bp, Probe Sequence
gaagctttatttgagaacaggtgaa

SEQ ID NO: 27684 - DNA, 25 bp, Probe Sequence
aacagaagctttatttgagaacagg

SEQ ID NO: 27685 - DNA, 25 bp, Probe Sequence
agaagctttatttgagaacaggtga

SEQ ID NO: 27686 - DNA, 25 bp, Probe Sequence
cagaagctttatttgagaacaggtg

SEQ ID NO: 27687 - DNA, 25 bp, Probe Sequence
acagaagctttatttgagaacaggt

SEQ ID NO: 27688 - DNA, 25 bp, Probe Sequence
accacctcaatgcaaagattctacg

SEQ ID NO: 27689 - DNA, 25 bp, Probe Sequence
gcaaagattctacgggaaaatgtgg

SEQ ID NO: 27690 - DNA, 25 bp, Probe Sequence
aaaatgcacacctttattcagaact

SEQ ID NO: 27691 - DNA, 25 bp, Probe Sequence
aagctttatttgagaacaggtgaat

SEQ ID NO: 27692 - DNA, 25 bp, Probe Sequence
aatgcaaagattctacgggaaaatg

SEQ ID NO: 27693 - DNA, 25 bp, Probe Sequence
caatgcaaagattctacgggaaaat

SEQ ID NO: 27694 - DNA, 25 bp, Probe Sequence
caaaattaatggaacgcatgagaac

SEQ ID NO: 27695 - DNA, 25 bp, Probe Sequence
acaaaattaatggaacgcatgagaa

SEQ ID NO: 27696 - DNA, 25 bp, Probe Sequence
gagagacaaaattaatggaacgcat

SEQ ID NO: 27697 - DNA, 25 bp, Probe Sequence
gacaaaattaatggaacgcatgaga

SEQ ID NO: 27698 - DNA, 25 bp, Probe Sequence
agacaaaattaatggaacgcatgag

SEQ ID NO: 27699 - DNA, 25 bp, Probe Sequence
gagacaaaattaatggaacgcatga

SEQ ID NO: 27700 - DNA, 25 bp, Probe Sequence
agagacaaaattaatggaacgcatg

SEQ ID NO: 27701 - DNA, 25 bp, Probe Sequence
tgagagacaaaattaatggaacgca

SEQ ID NO: 27702 - DNA, 25 bp, Probe Sequence
ttgagagacaaaattaatggaacgc

SEQ ID NO: 27703 - DNA, 25 bp, Probe Sequence
tccctattaaaattagaacctgagt

SEQ ID NO: 27704 - DNA, 25 bp, Probe Sequence
ttccctattaaaattagaacctgag

SEQ ID NO: 27705 - DNA, 25 bp, Probe Sequence
tttgagagacaaaattaatggaacg

SEQ ID NO: 27706 - DNA, 25 bp, Probe Sequence
ccctattaaaattagaacctgagta

SEQ ID NO: 27707 - DNA, 25 bp, Probe Sequence
atttgagagacaaaattaatggaac

SEQ ID NO: 27708 - DNA, 25 bp, Probe Sequence
aatttgagagacaaaattaatggaa

SEQ ID NO: 27709 - DNA, 25 bp, Probe Sequence
acctgagtataaatttactttctca

SEQ ID NO: 27710 - DNA, 25 bp, Probe Sequence
aaatttgagagacaaaattaatgga

SEQ ID NO: 27711 - DNA, 25 bp, Probe Sequence
ttcctaaaatttgagagacaaaatt

SEQ ID NO: 27712 - DNA, 25 bp, Probe Sequence
aaaatttgagagacaaaattaatgg

SEQ ID NO: 27713 - DNA, 25 bp, Probe Sequence
ctattctctcctcagactgctcaag

SEQ ID NO: 27714 - DNA, 25 bp, Probe Sequence
ccttattatccatcacaggagtcag

SEQ ID NO: 27715 - DNA, 25 bp, Probe Sequence
cttattatccatcacaggagtcaga

SEQ ID NO: 27716 - DNA, 25 bp, Probe Sequence
tattctctcctcagactgctcaaga

SEQ ID NO: 27717 - DNA, 25 bp, Probe Sequence
tctattctctcctcagactgctcaa

SEQ ID NO: 27718 - DNA, 25 bp, Probe Sequence
ttctattctctcctcagactgctca

SEQ ID NO: 27719 - DNA, 25 bp, Probe Sequence
ttattatccatcacaggagtcagaa

SEQ ID NO: 27720 - DNA, 25 bp, Probe Sequence
ggtttctgtttctattctctcctca

SEQ ID NO: 27721 - DNA, 25 bp, Probe Sequence
gggtttctgtttctattctctcctc

SEQ ID NO: 27722 - DNA, 25 bp, Probe Sequence
gccttattatccatcacaggagtca

SEQ ID NO: 27723 - DNA, 25 bp, Probe Sequence
tttctattctctcctcagactgctc

SEQ ID NO: 27724 - DNA, 25 bp, Probe Sequence
gtttctattctctcctcagactgct

SEQ ID NO: 27725 - DNA, 25 bp, Probe Sequence
ctgtttctattctctcctcagactg

SEQ ID NO: 27726 - DNA, 25 bp, Probe Sequence
tgtttctattctctcctcagactgc

SEQ ID NO: 27727 - DNA, 25 bp, Probe Sequence
gtttctgtttctattctctcctcag

SEQ ID NO: 27728 - DNA, 25 bp, Probe Sequence
aaccattacctgactttagagcttt

SEQ ID NO: 27729 - DNA, 25 bp, Probe Sequence
aaaccattacctgactttagagctt

SEQ ID NO: 27730 - DNA, 25 bp, Probe Sequence
attatccatcacaggagtcagaaag

SEQ ID NO: 27731 - DNA, 25 bp, Probe Sequence
tattatccatcacaggagtcagaaa

SEQ ID NO: 27732 - DNA, 25 bp, Probe Sequence
tttaactgggattggttatcacttt

SEQ ID NO: 27733 - DNA, 25 bp, Probe Sequence
ttattaggaacggtgactggacctt

SEQ ID NO: 27734 - DNA, 25 bp, Probe Sequence
ttatccatcacaggagtcagaaagg

SEQ ID NO: 27735 - DNA, 25 bp, Probe Sequence
gaaaaccattacctgactttagagc

SEQ ID NO: 27736 - DNA, 25 bp, Probe Sequence
aaggggtttctgtttctattctctc

SEQ ID NO: 27737 - DNA, 25 bp, Probe Sequence
ttggcagttattcttccacaagaga

SEQ ID NO: 27738 - DNA, 25 bp, Probe Sequence
tggcagttattcttccacaagagag

SEQ ID NO: 27739 - DNA, 25 bp, Probe Sequence
cctgtacgacaaacacattacatta

SEQ ID NO: 27740 - DNA, 25 bp, Probe Sequence
ttaaatgtttctcaaagatggagtt

SEQ ID NO: 27741 - DNA, 25 bp, Probe Sequence
ggcagttattcttccacaagagagg

SEQ ID NO: 27742 - DNA, 25 bp, Probe Sequence
ccctgtacgacaaacacattacatt

SEQ ID NO: 27743 - DNA, 25 bp, Probe Sequence
cttggcagttattcttccacaagag

SEQ ID NO: 27744 - DNA, 25 bp, Probe Sequence
attaaatgtttctcaaagatggagt

SEQ ID NO: 27745 - DNA, 25 bp, Probe Sequence
atgcagatgaccacattcaaggaag

SEQ ID NO: 27746 - DNA, 25 bp, Probe Sequence
ctcaccctgtacgacaaacacatta

SEQ ID NO: 27747 - DNA, 25 bp, Probe Sequence
ttattcttccacaagagagggcttt

SEQ ID NO: 27748 - DNA, 25 bp, Probe Sequence
tcaccctgtacgacaaacacattac

SEQ ID NO: 27749 - DNA, 25 bp, Probe Sequence
tattcttccacaagagagggctttc

SEQ ID NO: 27750 - DNA, 25 bp, Probe Sequence
ctgtacgacaaacacattacattat

SEQ ID NO: 27751 - DNA, 25 bp, Probe Sequence
aatgcagatgaccacattcaaggaa

SEQ ID NO: 27752 - DNA, 25 bp, Probe Sequence
accctgtacgacaaacacattacat

SEQ ID NO: 27753 - DNA, 25 bp, Probe Sequence
cacattcaaggaagaaccttctgtc

SEQ ID NO: 27754 - DNA, 25 bp, Probe Sequence
gttattcttccacaagagagggctt

SEQ ID NO: 27755 - DNA, 25 bp, Probe Sequence
tgtacgacaaacacattacattatt

SEQ ID NO: 27756 - DNA, 25 bp, Probe Sequence
acgacaaacacattacattattaaa

SEQ ID NO: 27757 - DNA, 25 bp, Probe Sequence
tactcaccctgtacgacaaacacat

SEQ ID NO: 27758 - DNA, 25 bp, Probe Sequence
acattcaaggaagaaccttctgtcc

SEQ ID NO: 27759 - DNA, 25 bp, Probe Sequence
agttattcttccacaagagagggct

SEQ ID NO: 27760 - DNA, 25 bp, Probe Sequence
cagttattcttccacaagagagggc

SEQ ID NO: 27761 - DNA, 25 bp, Probe Sequence
caagtaagtatgaaggaggctgatc

SEQ ID NO: 27762 - DNA, 25 bp, Probe Sequence
gcaagtaagtatgaaggaggctgat

SEQ ID NO: 27763 - DNA, 25 bp, Probe Sequence
ccactgagctataacttacttctgt

SEQ ID NO: 27764 - DNA, 25 bp, Probe Sequence
tccactgagctataacttacttctg

SEQ ID NO: 27765 - DNA, 25 bp, Probe Sequence
gtccactgagctataacttacttct

SEQ ID NO: 27766 - DNA, 25 bp, Probe Sequence
ggtccactgagctataacttacttc

SEQ ID NO: 27767 - DNA, 25 bp, Probe Sequence
tggtccactgagctataacttactt

SEQ ID NO: 27768 - DNA, 25 bp, Probe Sequence
tgtgctatgaggtttctttgacttc

SEQ ID NO: 27769 - DNA, 25 bp, Probe Sequence
ctgtgctatgaggtttctttgactt

SEQ ID NO: 27770 - DNA, 25 bp, Probe Sequence
aagtaagtatgaaggaggctgatcc

SEQ ID NO: 27771 - DNA, 25 bp, Probe Sequence
cactgagctataacttacttctgta

SEQ ID NO: 27772 - DNA, 25 bp, Probe Sequence
gtgctatgaggtttctttgacttca

SEQ ID NO: 27773 - DNA, 25 bp, Probe Sequence
cactgtgactgatatgaatttgttc

SEQ ID NO: 27774 - DNA, 25 bp, Probe Sequence
ttgtggtccactgagctataactta

SEQ ID NO: 27775 - DNA, 25 bp, Probe Sequence
gctatgaggtttctttgacttcaat

SEQ ID NO: 27776 - DNA, 25 bp, Probe Sequence
tgctatgaggtttctttgacttcaa

SEQ ID NO: 27777 - DNA, 25 bp, Probe Sequence
ttgttctactctaggcagtgacagt

SEQ ID NO: 27778 - DNA, 25 bp, Probe Sequence
gtggtccactgagctataacttact

SEQ ID NO: 27779 - DNA, 25 bp, Probe Sequence
gatgtctccgtctctgtctcaaatt

SEQ ID NO: 27780 - DNA, 25 bp, Probe Sequence
tgtggtccactgagctataacttac

SEQ ID NO: 27781 - DNA, 25 bp, Probe Sequence
cctcactgtgactgatatgaatttg

SEQ ID NO: 27782 - DNA, 25 bp, Probe Sequence
tgaggtttctttgacttcaatgtat

SEQ ID NO: 27783 - DNA, 25 bp, Probe Sequence
atgaggtttctttgacttcaatgta

SEQ ID NO: 27784 - DNA, 25 bp, Probe Sequence
tatgaggtttctttgacttcaatgt

SEQ ID NO: 27785 - DNA, 25 bp, Probe Sequence
ggaggaagatgaagaagatgaagat

SEQ ID NO: 27786 - DNA, 25 bp, Probe Sequence
gaggaggaagatgaagaagatgaag

SEQ ID NO: 27787 - DNA, 25 bp, Probe Sequence
gaagatgaggaagatgaagaggatg

SEQ ID NO: 27788 - DNA, 25 bp, Probe Sequence
aggaggaagatgaagaagatgaaga

SEQ ID NO: 27789 - DNA, 25 bp, Probe Sequence
aagatgaggaagatgaagaggatga

SEQ ID NO: 27790 - DNA, 25 bp, Probe Sequence
aggaagatgaagaagatgaagatga

SEQ ID NO: 27791 - DNA, 25 bp, Probe Sequence
gaggaagatgaagaagatgaagatg

SEQ ID NO: 27792 - DNA, 25 bp, Probe Sequence
agatgaggaagatgaagaggatgag

SEQ ID NO: 27793 - DNA, 25 bp, Probe Sequence
ggaagatgaggaagatgaagaggat

SEQ ID NO: 27794 - DNA, 25 bp, Probe Sequence
ggaagatgaagaagatgaagatgaa

SEQ ID NO: 27795 - DNA, 25 bp, Probe Sequence
taactgaataccactctgtaattgc

SEQ ID NO: 27796 - DNA, 25 bp, Probe Sequence
ggaggaggaagatgaagaagatgaa

SEQ ID NO: 27797 - DNA, 25 bp, Probe Sequence
gatgatgaataagttggttctagcg

SEQ ID NO: 27798 - DNA, 25 bp, Probe Sequence
tgatgatgaataagttggttctagc

SEQ ID NO: 27799 - DNA, 25 bp, Probe Sequence
gaggaggaggaagatgaagaagatg

SEQ ID NO: 27800 - DNA, 25 bp, Probe Sequence
gatgaggaagatgaagaggatgagg

SEQ ID NO: 27801 - DNA, 25 bp, Probe Sequence
gaggaagatgaggaagatgaagagg

SEQ ID NO: 27802 - DNA, 25 bp, Probe Sequence
ggaggaagatgaggaagatgaagag

SEQ ID NO: 27803 - DNA, 25 bp, Probe Sequence
gaggaggaagatgaggaagatgaag

SEQ ID NO: 27804 - DNA, 25 bp, Probe Sequence
gaagaggaggaagatgaggaagatg

SEQ ID NO: 27805 - DNA, 25 bp, Probe Sequence
agatgatgatgatgaataagttggt

SEQ ID NO: 27806 - DNA, 25 bp, Probe Sequence
tgaagaagaagatgatgatgatgaa

SEQ ID NO: 27807 - DNA, 25 bp, Probe Sequence
tgatgatgatgaataagttggttct

SEQ ID NO: 27808 - DNA, 25 bp, Probe Sequence
tgaagaagatgaagatgaagaagaa

SEQ ID NO: 27809 - DNA, 25 bp, Probe Sequence
gaggaagaggatgaagatgaagaat

SEQ ID NO: 27810 - DNA, 25 bp, Probe Sequence
gaagaagatgaagatgaggaggaag

SEQ ID NO: 27811 - DNA, 25 bp, Probe Sequence
gaagaagaagatgaagatgaggagg

SEQ ID NO: 27812 - DNA, 25 bp, Probe Sequence
ggaagaagaagatgaagatgaggag

SEQ ID NO: 27813 - DNA, 25 bp, Probe Sequence
gaggaagaagaagatgaagatgagg

SEQ ID NO: 27814 - DNA, 25 bp, Probe Sequence
ggaggaagaagaagatgaagatgag

SEQ ID NO: 27815 - DNA, 25 bp, Probe Sequence
gaggaggaagaagaagatgaagatg

SEQ ID NO: 27816 - DNA, 25 bp, Probe Sequence
aagaagatgaagatgaggaggaaga

SEQ ID NO: 27817 - DNA, 25 bp, Probe Sequence
agaagaagatgaagatgaggaggaa

SEQ ID NO: 27818 - DNA, 25 bp, Probe Sequence
aagaagaagatgaagatgaggagga

SEQ ID NO: 27819 - DNA, 25 bp, Probe Sequence
aggaagaagaagatgaagatgagga

SEQ ID NO: 27820 - DNA, 25 bp, Probe Sequence
aggaggaagaagaagatgaagatga

SEQ ID NO: 27821 - DNA, 25 bp, Probe Sequence
agaagatgaagatgaggaggaagag

SEQ ID NO: 27822 - DNA, 25 bp, Probe Sequence
aagaagaagaacgaaccagaagatg

SEQ ID NO: 27823 - DNA, 25 bp, Probe Sequence
aggaagaggatgaagatgaagaata

SEQ ID NO: 27824 - DNA, 25 bp, Probe Sequence
ggaggaggaagaagaagatgaagat

SEQ ID NO: 27825 - DNA, 25 bp, Probe Sequence
gaagaagaacgaaccagaagatgag

SEQ ID NO: 27826 - DNA, 25 bp, Probe Sequence
ggaggaagaggatgaagatgaagaa

SEQ ID NO: 27827 - DNA, 25 bp, Probe Sequence
agaagaagaacgaaccagaagatga

SEQ ID NO: 27828 - DNA, 25 bp, Probe Sequence
gaggaggaggaagaagaagatgaag

SEQ ID NO: 27829 - DNA, 25 bp, Probe Sequence
ggaagaggatgaagatgaagaataa

SEQ ID NO: 27830 - DNA, 25 bp, Probe Sequence
gaggaggaagaggatgaagatgaag

SEQ ID NO: 27831 - DNA, 25 bp, Probe Sequence
gatgaggaggaagaggatgaagatg

SEQ ID NO: 27832 - DNA, 25 bp, Probe Sequence
gaagatgaggaggaagaggatgaag

SEQ ID NO: 27833 - DNA, 25 bp, Probe Sequence
tgatagttactgttgtgacctgaag

SEQ ID NO: 27834 - DNA, 25 bp, Probe Sequence
ctgatagttactgttgtgacctgaa

SEQ ID NO: 27835 - DNA, 25 bp, Probe Sequence
atagttactgttgtgacctgaagtt

SEQ ID NO: 27836 - DNA, 25 bp, Probe Sequence
gatagttactgttgtgacctgaagt

SEQ ID NO: 27837 - DNA, 25 bp, Probe Sequence
tagttactgttgtgacctgaagttc

SEQ ID NO: 27838 - DNA, 25 bp, Probe Sequence
actgatagttactgttgtgacctga

SEQ ID NO: 27839 - DNA, 25 bp, Probe Sequence
aaccttggtgtagttgaactgatag

SEQ ID NO: 27840 - DNA, 25 bp, Probe Sequence
gcttgtgtatccattatcatgtgta

SEQ ID NO: 27841 - DNA, 25 bp, Probe Sequence
accttggtgtagttgaactgatagt

SEQ ID NO: 27842 - DNA, 25 bp, Probe Sequence
agcttgtgtatccattatcatgtgt

SEQ ID NO: 27843 - DNA, 25 bp, Probe Sequence
ataatggatttggcaatgatggaag

SEQ ID NO: 27844 - DNA, 25 bp, Probe Sequence
agttactgttgtgacctgaagttca

SEQ ID NO: 27845 - DNA, 25 bp, Probe Sequence
cgaggactgtatttgtgactaattg

SEQ ID NO: 27846 - DNA, 25 bp, Probe Sequence
gctataatggatttggcaatgatgg

SEQ ID NO: 27847 - DNA, 25 bp, Probe Sequence
ggctataatggatttggcaatgatg

SEQ ID NO: 27848 - DNA, 25 bp, Probe Sequence
gatggctataatggatttggcaatg

SEQ ID NO: 27849 - DNA, 25 bp, Probe Sequence
aatgtgctgtgtaaagttagtctac

SEQ ID NO: 27850 - DNA, 25 bp, Probe Sequence
ctataatggatttggcaatgatgga

SEQ ID NO: 27851 - DNA, 25 bp, Probe Sequence
tggctataatggatttggcaatgat

SEQ ID NO: 27852 - DNA, 25 bp, Probe Sequence
atggctataatggatttggcaatga

SEQ ID NO: 27853 - DNA, 25 bp, Probe Sequence
gttctgtggaaagtgtaaagcattc

SEQ ID NO: 27854 - DNA, 25 bp, Probe Sequence
tataatggatttggcaatgatggaa

SEQ ID NO: 27855 - DNA, 25 bp, Probe Sequence
gaggactgtatttgtgactaattgt

SEQ ID NO: 27856 - DNA, 25 bp, Probe Sequence
gtgctgtgtaaagttagtctactct

SEQ ID NO: 27857 - DNA, 25 bp, Probe Sequence
ttagaggaggatctgatggatatgg

SEQ ID NO: 27858 - DNA, 25 bp, Probe Sequence
aagttcagagttctaggagtggaag

SEQ ID NO: 27859 - DNA, 25 bp, Probe Sequence
gaagttcagagttctaggagtggaa

SEQ ID NO: 27860 - DNA, 25 bp, Probe Sequence
gttcagagttctaggagtggaagag

SEQ ID NO: 27861 - DNA, 25 bp, Probe Sequence
caggaagttcagagttctaggagtg

SEQ ID NO: 27862 - DNA, 25 bp, Probe Sequence
agttcagagttctaggagtggaaga

SEQ ID NO: 27863 - DNA, 25 bp, Probe Sequence
tagaggaggatctgatggatatggc

SEQ ID NO: 27864 - DNA, 25 bp, Probe Sequence
ttcagagttctaggagtggaagagg

SEQ ID NO: 27865 - DNA, 25 bp, Probe Sequence
ggaagttcagagttctaggagtgga

SEQ ID NO: 27866 - DNA, 25 bp, Probe Sequence
aggaagttcagagttctaggagtgg

SEQ ID NO: 27867 - DNA, 25 bp, Probe Sequence
caggaagtaactttagaggaggatc

SEQ ID NO: 27868 - DNA, 25 bp, Probe Sequence
gatggctataatgggtatggaggag

SEQ ID NO: 27869 - DNA, 25 bp, Probe Sequence
taactttagaggaggatctgatgga

SEQ ID NO: 27870 - DNA, 25 bp, Probe Sequence
gtaactttagaggaggatctgatgg

SEQ ID NO: 27871 - DNA, 25 bp, Probe Sequence
ggaagtaactttagaggaggatctg

SEQ ID NO: 27872 - DNA, 25 bp, Probe Sequence
aggaagtaactttagaggaggatct

SEQ ID NO: 27873 - DNA, 25 bp, Probe Sequence
actttagaggaggatctgatggata

SEQ ID NO: 27874 - DNA, 25 bp, Probe Sequence
aactttagaggaggatctgatggat

SEQ ID NO: 27875 - DNA, 25 bp, Probe Sequence
cagagttctaggagtggaagaggag

SEQ ID NO: 27876 - DNA, 25 bp, Probe Sequence
ccaggaagtaactttagaggaggat

SEQ ID NO: 27877 - DNA, 25 bp, Probe Sequence
agtaactttagaggaggatctgatg

SEQ ID NO: 27878 - DNA, 25 bp, Probe Sequence
gaagtaactttagaggaggatctga

SEQ ID NO: 27879 - DNA, 25 bp, Probe Sequence
tttagaggaggatctgatggatatg

SEQ ID NO: 27880 - DNA, 25 bp, Probe Sequence
ctttagaggaggatctgatggatat

SEQ ID NO: 27881 - DNA, 25 bp, Probe Sequence
cccatgtaaatattgttctgctgtc

SEQ ID NO: 27882 - DNA, 25 bp, Probe Sequence
atgtaaatattgttctgctgtctgg

SEQ ID NO: 27883 - DNA, 25 bp, Probe Sequence
ccatgtaaatattgttctgctgtct

SEQ ID NO: 27884 - DNA, 25 bp, Probe Sequence
gtaaatattgttctgctgtctggga

SEQ ID NO: 27885 - DNA, 25 bp, Probe Sequence
tgtaaatattgttctgctgtctggg

SEQ ID NO: 27886 - DNA, 25 bp, Probe Sequence
cctgatgatgggatgctctttaaat

SEQ ID NO: 27887 - DNA, 25 bp, Probe Sequence
catgtaaatattgttctgctgtctg

SEQ ID NO: 27888 - DNA, 25 bp, Probe Sequence
ctgatgatgggatgctctttaaata

SEQ ID NO: 27889 - DNA, 25 bp, Probe Sequence
tgacttctatggaaaccagatcaag

SEQ ID NO: 27890 - DNA, 25 bp, Probe Sequence
ctgacttctatggaaaccagatcaa

SEQ ID NO: 27891 - DNA, 25 bp, Probe Sequence
tgatgatgggatgctctttaaataa

SEQ ID NO: 27892 - DNA, 25 bp, Probe Sequence
taaatattgttctgctgtctgggac

SEQ ID NO: 27893 - DNA, 25 bp, Probe Sequence
gacttctatggaaaccagatcaagc

SEQ ID NO: 27894 - DNA, 25 bp, Probe Sequence
ataatcagcaatgatgtctgcaatg

SEQ ID NO: 27895 - DNA, 25 bp, Probe Sequence
cataatcagcaatgatgtctgcaat

SEQ ID NO: 27896 - DNA, 25 bp, Probe Sequence
aaatattgttctgctgtctgggact

SEQ ID NO: 27897 - DNA, 25 bp, Probe Sequence
gctgacttctatggaaaccagatca

SEQ ID NO: 27898 - DNA, 25 bp, Probe Sequence
taatcagcaatgatgtctgcaatgg

SEQ ID NO: 27899 - DNA, 25 bp, Probe Sequence
ccataatcagcaatgatgtctgcaa

SEQ ID NO: 27900 - DNA, 25 bp, Probe Sequence
gatgatgggatgctctttaaataat

SEQ ID NO: 27901 - DNA, 25 bp, Probe Sequence
acttctatggaaaccagatcaagcc

SEQ ID NO: 27902 - DNA, 25 bp, Probe Sequence
aatattgttctgctgtctgggactc

SEQ ID NO: 27903 - DNA, 25 bp, Probe Sequence
aaaccagatcaagcccaagatgttc

SEQ ID NO: 27904 - DNA, 25 bp, Probe Sequence
gaaaccagatcaagcccaagatgtt

SEQ ID NO: 27905 - DNA, 25 bp, Probe Sequence
ctgtggagagtgagaataattgtgt

SEQ ID NO: 27906 - DNA, 25 bp, Probe Sequence
tgtggagagtgagaataattgtgta

SEQ ID NO: 27907 - DNA, 25 bp, Probe Sequence
ataatcgctgaagatgttgatggag

SEQ ID NO: 27908 - DNA, 25 bp, Probe Sequence
tctgtggagagtgagaataattgtg

SEQ ID NO: 27909 - DNA, 25 bp, Probe Sequence
gaagtatccaattatgtgacaacct

SEQ ID NO: 27910 - DNA, 25 bp, Probe Sequence
agaagtatccaattatgtgacaacc

SEQ ID NO: 27911 - DNA, 25 bp, Probe Sequence
aagttcctcagaagttggttatgat

SEQ ID NO: 27912 - DNA, 25 bp, Probe Sequence
cataatcgctgaagatgttgatgga

SEQ ID NO: 27913 - DNA, 25 bp, Probe Sequence
cctcagaagttggttatgatgctat

SEQ ID NO: 27914 - DNA, 25 bp, Probe Sequence
gtcataatcgctgaagatgttgatg

SEQ ID NO: 27915 - DNA, 25 bp, Probe Sequence
ctcagaagttggttatgatgctatg

SEQ ID NO: 27916 - DNA, 25 bp, Probe Sequence
agttcctcagaagttggttatgatg

SEQ ID NO: 27917 - DNA, 25 bp, Probe Sequence
tcagaagttggttatgatgctatgg

SEQ ID NO: 27918 - DNA, 25 bp, Probe Sequence
atcattgagcagttagatgtcacaa

SEQ ID NO: 27919 - DNA, 25 bp, Probe Sequence
aatcattgagcagttagatgtcaca

SEQ ID NO: 27920 - DNA, 25 bp, Probe Sequence
gttcctcaccaataacttcagagaa

SEQ ID NO: 27921 - DNA, 25 bp, Probe Sequence
gtggagagtgagaataattgtgtac

SEQ ID NO: 27922 - DNA, 25 bp, Probe Sequence
gctctaagtacactcgtcttgaata

SEQ ID NO: 27923 - DNA, 25 bp, Probe Sequence
gacaagtgatgttgaagtgaatgaa

SEQ ID NO: 27924 - DNA, 25 bp, Probe Sequence
agtacactcgtcttgaataggctaa

SEQ ID NO: 27925 - DNA, 25 bp, Probe Sequence
tctaagtacactcgtcttgaatagg

SEQ ID NO: 27926 - DNA, 25 bp, Probe Sequence
taatcgctgaagatgttgatggaga

SEQ ID NO: 27927 - DNA, 25 bp, Probe Sequence
tcctcagaagttggttatgatgcta

SEQ ID NO: 27928 - DNA, 25 bp, Probe Sequence
tcataatcgctgaagatgttgatgg

SEQ ID NO: 27929 - DNA, 25 bp, Probe Sequence
ctacactagagcagagtacgagtct

SEQ ID NO: 27930 - DNA, 25 bp, Probe Sequence
aatgataactaatgacatccagtgt

SEQ ID NO: 27931 - DNA, 25 bp, Probe Sequence
gttagcgtgaaagttggagataaag

SEQ ID NO: 27932 - DNA, 25 bp, Probe Sequence
tagcgtgaaagttggagataaagtt

SEQ ID NO: 27933 - DNA, 25 bp, Probe Sequence
ttagcgtgaaagttggagataaagt

SEQ ID NO: 27934 - DNA, 25 bp, Probe Sequence
agttagcgtgaaagttggagataaa

SEQ ID NO: 27935 - DNA, 25 bp, Probe Sequence
aaactgtaaccaaaggaggcattat

SEQ ID NO: 27936 - DNA, 25 bp, Probe Sequence
cagttagcgtgaaagttggagataa

SEQ ID NO: 27937 - DNA, 25 bp, Probe Sequence
ttagagatggtgacattcttggaaa

SEQ ID NO: 27938 - DNA, 25 bp, Probe Sequence
tttagagatggtgacattcttggaa

SEQ ID NO: 27939 - DNA, 25 bp, Probe Sequence
tagagatggtgacattcttggaaag

SEQ ID NO: 27940 - DNA, 25 bp, Probe Sequence
atttagagatggtgacattcttgga

SEQ ID NO: 27941 - DNA, 25 bp, Probe Sequence
cattccactgaagttctgaaatctt

SEQ ID NO: 27942 - DNA, 25 bp, Probe Sequence
gaaactgtaaccaaaggaggcatta

SEQ ID NO: 27943 - DNA, 25 bp, Probe Sequence
gagatggtgacattcttggaaagta

SEQ ID NO: 27944 - DNA, 25 bp, Probe Sequence
cgtgaaagttggagataaagttctt

SEQ ID NO: 27945 - DNA, 25 bp, Probe Sequence
aactgtaaccaaaggaggcattatg

SEQ ID NO: 27946 - DNA, 25 bp, Probe Sequence
ccattccactgaagttctgaaatct

SEQ ID NO: 27947 - DNA, 25 bp, Probe Sequence
ttctaaaggaaagggtggagagatt

SEQ ID NO: 27948 - DNA, 25 bp, Probe Sequence
taaaggaaagggtggagagattcaa

SEQ ID NO: 27949 - DNA, 25 bp, Probe Sequence
cactgaagttctgaaatctttcgtc

SEQ ID NO: 27950 - DNA, 25 bp, Probe Sequence
attccactgaagttctgaaatcttt

SEQ ID NO: 27951 - DNA, 25 bp, Probe Sequence
ttccactgaagttctgaaatctttc

SEQ ID NO: 27952 - DNA, 25 bp, Probe Sequence
tcctatttagagatggtgacattct

SEQ ID NO: 27953 - DNA, 25 bp, Probe Sequence
gagcaatatgatccagaccatcttc

SEQ ID NO: 27954 - DNA, 25 bp, Probe Sequence
caatatgatccagaccatcttcacc

SEQ ID NO: 27955 - DNA, 25 bp, Probe Sequence
aatatgatccagaccatcttcacca

SEQ ID NO: 27956 - DNA, 25 bp, Probe Sequence
gcaatatgatccagaccatcttcac

SEQ ID NO: 27957 - DNA, 25 bp, Probe Sequence
agcaatatgatccagaccatcttca

SEQ ID NO: 27958 - DNA, 25 bp, Probe Sequence
tttaccaaagcatcaatacaaccag

SEQ ID NO: 27959 - DNA, 25 bp, Probe Sequence
atatgatccagaccatcttcaccac

SEQ ID NO: 27960 - DNA, 25 bp, Probe Sequence
acctcctctgtgatttctttctttg

SEQ ID NO: 27961 - DNA, 25 bp, Probe Sequence
gatccagaccatcttcaccacaatt

SEQ ID NO: 27962 - DNA, 25 bp, Probe Sequence
gagaccaagcaacttcagaaatctt

SEQ ID NO: 27963 - DNA, 25 bp, Probe Sequence
cctcctctgtgatttctttctttgc

SEQ ID NO: 27964 - DNA, 25 bp, Probe Sequence
ttaccaaagcatcaatacaaccagc

SEQ ID NO: 27965 - DNA, 25 bp, Probe Sequence
ggagcaatatgatccagaccatctt

SEQ ID NO: 27966 - DNA, 25 bp, Probe Sequence
tatgatccagaccatcttcaccaca

SEQ ID NO: 27967 - DNA, 25 bp, Probe Sequence
gaggagcaatatgatccagaccatc

SEQ ID NO: 27968 - DNA, 25 bp, Probe Sequence
cacctcctctgtgatttctttcttt

SEQ ID NO: 27969 - DNA, 25 bp, Probe Sequence
catttctggacagtacctgattgta

SEQ ID NO: 27970 - DNA, 25 bp, Probe Sequence
aaacatttctggacagtacctgatt

SEQ ID NO: 27971 - DNA, 25 bp, Probe Sequence
ttctggacagtacctgattgtattt

SEQ ID NO: 27972 - DNA, 25 bp, Probe Sequence
tttctggacagtacctgattgtatt

SEQ ID NO: 27973 - DNA, 25 bp, Probe Sequence
atttctggacagtacctgattgtat

SEQ ID NO: 27974 - DNA, 25 bp, Probe Sequence
gtcttctgtgacatgacctctgatg

SEQ ID NO: 27975 - DNA, 25 bp, Probe Sequence
gaagtcttctgtgacatgacctctg

SEQ ID NO: 27976 - DNA, 25 bp, Probe Sequence
aacatttctggacagtacctgattg

SEQ ID NO: 27977 - DNA, 25 bp, Probe Sequence
tatacaacatgaacgactgctactc

SEQ ID NO: 27978 - DNA, 25 bp, Probe Sequence
ctatacaacatgaacgactgctact

SEQ ID NO: 27979 - DNA, 25 bp, Probe Sequence
gctatacaacatgaacgactgctac

SEQ ID NO: 27980 - DNA, 25 bp, Probe Sequence
gatgagcctgctatacaacatgaac

SEQ ID NO: 27981 - DNA, 25 bp, Probe Sequence
tgctatacaacatgaacgactgcta

SEQ ID NO: 27982 - DNA, 25 bp, Probe Sequence
acaacaacaacaacaacaaattcac

SEQ ID NO: 27983 - DNA, 25 bp, Probe Sequence
cacaacaacaacaacaacaaattca

SEQ ID NO: 27984 - DNA, 25 bp, Probe Sequence
caacaacaacaacaacaaattcacg

SEQ ID NO: 27985 - DNA, 25 bp, Probe Sequence
gcacaacaacaacaacaacaaattc

SEQ ID NO: 27986 - DNA, 25 bp, Probe Sequence
tcccttctgagttaatgtcaaatga

SEQ ID NO: 27987 - DNA, 25 bp, Probe Sequence
atacaacatgaacgactgctactcc

SEQ ID NO: 27988 - DNA, 25 bp, Probe Sequence
gaacaagaaggtgagcaagatggaa

SEQ ID NO: 27989 - DNA, 25 bp, Probe Sequence
ttcccttctgagttaatgtcaaatg

SEQ ID NO: 27990 - DNA, 25 bp, Probe Sequence
caacaacaacaacaaattcacggaa

SEQ ID NO: 27991 - DNA, 25 bp, Probe Sequence
aacaacaacaacaacaaattcacgg

SEQ ID NO: 27992 - DNA, 25 bp, Probe Sequence
aattcccttctgagttaatgtcaaa

SEQ ID NO: 27993 - DNA, 25 bp, Probe Sequence
caagaaggtgagcaagatggaaatc

SEQ ID NO: 27994 - DNA, 25 bp, Probe Sequence
attcccttctgagttaatgtcaaat

SEQ ID NO: 27995 - DNA, 25 bp, Probe Sequence
ctgctatacaacatgaacgactgct

SEQ ID NO: 27996 - DNA, 25 bp, Probe Sequence
cgatgagcctgctatacaacatgaa

SEQ ID NO: 27997 - DNA, 25 bp, Probe Sequence
atgagcctgctatacaacatgaacg

SEQ ID NO: 27998 - DNA, 25 bp, Probe Sequence
agaacaagaaggtgagcaagatgga

SEQ ID NO: 27999 - DNA, 25 bp, Probe Sequence
cagaacaagaaggtgagcaagatgg

SEQ ID NO: 28000 - DNA, 25 bp, Probe Sequence
ccagaacaagaaggtgagcaagatg

SEQ ID NO: 28001 - DNA, 25 bp, Probe Sequence
cagcaggaagaagtagaaaggataa

SEQ ID NO: 28002 - DNA, 25 bp, Probe Sequence
agcaggaagaagtagaaaggataaa

SEQ ID NO: 28003 - DNA, 25 bp, Probe Sequence
tcagcaggaagaagtagaaaggata

SEQ ID NO: 28004 - DNA, 25 bp, Probe Sequence
tgttgccctgatttatgaactctat

SEQ ID NO: 28005 - DNA, 25 bp, Probe Sequence
ctgttgccctgatttatgaactcta

SEQ ID NO: 28006 - DNA, 25 bp, Probe Sequence
aggaaggtgactttctgtaacaatg

SEQ ID NO: 28007 - DNA, 25 bp, Probe Sequence
ttcagcaggaagaagtagaaaggat

SEQ ID NO: 28008 - DNA, 25 bp, Probe Sequence
ttctgttgccctgatttatgaactc

SEQ ID NO: 28009 - DNA, 25 bp, Probe Sequence
gactttctgtaacaatgcgatgtat

SEQ ID NO: 28010 - DNA, 25 bp, Probe Sequence
gttgccctgatttatgaactctata

SEQ ID NO: 28011 - DNA, 25 bp, Probe Sequence
tgactttctgtaacaatgcgatgta

SEQ ID NO: 28012 - DNA, 25 bp, Probe Sequence
tctgttgccctgatttatgaactct

SEQ ID NO: 28013 - DNA, 25 bp, Probe Sequence
caggaaggtgactttctgtaacaat

SEQ ID NO: 28014 - DNA, 25 bp, Probe Sequence
actttctgtaacaatgcgatgtata

SEQ ID NO: 28015 - DNA, 25 bp, Probe Sequence
ttgccctgatttatgaactctataa

SEQ ID NO: 28016 - DNA, 25 bp, Probe Sequence
ggaaggtgactttctgtaacaatgc

SEQ ID NO: 28017 - DNA, 25 bp, Probe Sequence
gaaaggttctgttgccctgatttat

SEQ ID NO: 28018 - DNA, 25 bp, Probe Sequence
tgccctgatttatgaactctataat

SEQ ID NO: 28019 - DNA, 25 bp, Probe Sequence
tctgtaacaatgcgatgtatattaa

SEQ ID NO: 28020 - DNA, 25 bp, Probe Sequence
ttctgtaacaatgcgatgtatatta

SEQ ID NO: 28021 - DNA, 25 bp, Probe Sequence
gtgactttctgtaacaatgcgatgt

SEQ ID NO: 28022 - DNA, 25 bp, Probe Sequence
aaaggttctgttgccctgatttatg

SEQ ID NO: 28023 - DNA, 25 bp, Probe Sequence
ggtgactttctgtaacaatgcgatg

SEQ ID NO: 28024 - DNA, 25 bp, Probe Sequence
aggtgactttctgtaacaatgcgat

SEQ ID NO: 28025 - DNA, 25 bp, Probe Sequence
ggagaatcctaaggagagtaaaccc

SEQ ID NO: 28026 - DNA, 25 bp, Probe Sequence
cagaggagaatcctaaggagagtaa

SEQ ID NO: 28027 - DNA, 25 bp, Probe Sequence
gaacatggagctgtcatcactcaac

SEQ ID NO: 28028 - DNA, 25 bp, Probe Sequence
ctggttggaaagagtgttggtgttg

SEQ ID NO: 28029 - DNA, 25 bp, Probe Sequence
caattgtgaccatcgaggcttctac

SEQ ID NO: 28030 - DNA, 25 bp, Probe Sequence
aattgtgaccatcgaggcttctacc

SEQ ID NO: 28031 - DNA, 25 bp, Probe Sequence
gcagaggagaatcctaaggagagta

SEQ ID NO: 28032 - DNA, 25 bp, Probe Sequence
acatggagctgtcatcactcaacaa

SEQ ID NO: 28033 - DNA, 25 bp, Probe Sequence
aacatggagctgtcatcactcaaca

SEQ ID NO: 28034 - DNA, 25 bp, Probe Sequence
catggagctgtcatcactcaacaaa

SEQ ID NO: 28035 - DNA, 25 bp, Probe Sequence
aaggaacatggagctgtcatcactc

SEQ ID NO: 28036 - DNA, 25 bp, Probe Sequence
gaaggaacatggagctgtcatcact

SEQ ID NO: 28037 - DNA, 25 bp, Probe Sequence
aatcctaaggagagtaaaccccaag

SEQ ID NO: 28038 - DNA, 25 bp, Probe Sequence
gaatcctaaggagagtaaaccccaa

SEQ ID NO: 28039 - DNA, 25 bp, Probe Sequence
gaggagaatcctaaggagagtaaac

SEQ ID NO: 28040 - DNA, 25 bp, Probe Sequence
agaggagaatcctaaggagagtaaa

SEQ ID NO: 28041 - DNA, 25 bp, Probe Sequence
aggagaatcctaaggagagtaaacc

SEQ ID NO: 28042 - DNA, 25 bp, Probe Sequence
gagaatcctaaggagagtaaacccc

SEQ ID NO: 28043 - DNA, 25 bp, Probe Sequence
ggaacatggagctgtcatcactcaa

SEQ ID NO: 28044 - DNA, 25 bp, Probe Sequence
agaatcctaaggagagtaaacccca

SEQ ID NO: 28045 - DNA, 25 bp, Probe Sequence
ccaattgtgaccatcgaggcttcta

SEQ ID NO: 28046 - DNA, 25 bp, Probe Sequence
ttgcagaggagaatcctaaggagag

SEQ ID NO: 28047 - DNA, 25 bp, Probe Sequence
atggagctgtcatcactcaacaaaa

SEQ ID NO: 28048 - DNA, 25 bp, Probe Sequence
gttgcagaggagaatcctaaggaga

SEQ ID NO: 28049 - DNA, 25 bp, Probe Sequence
gatgaagcagtgaagagacagattg

SEQ ID NO: 28050 - DNA, 25 bp, Probe Sequence
agatgaagcagtgaagagacagatt

SEQ ID NO: 28051 - DNA, 25 bp, Probe Sequence
gagatgaagcagtgaagagacagat

SEQ ID NO: 28052 - DNA, 25 bp, Probe Sequence
atgaagcagtgaagagacagattgg

SEQ ID NO: 28053 - DNA, 25 bp, Probe Sequence
acagatgaaacagatgaaggaagat

SEQ ID NO: 28054 - DNA, 25 bp, Probe Sequence
aacagatgaaacagatgaaggaaga

SEQ ID NO: 28055 - DNA, 25 bp, Probe Sequence
cagatgaaacagatgaaggaagatg

SEQ ID NO: 28056 - DNA, 25 bp, Probe Sequence
tgaaacagatgaaacagatgaagga

SEQ ID NO: 28057 - DNA, 25 bp, Probe Sequence
aaacagatgaaacagatgaaggaag

SEQ ID NO: 28058 - DNA, 25 bp, Probe Sequence
gaaacagatgaaacagatgaaggaa

SEQ ID NO: 28059 - DNA, 25 bp, Probe Sequence
atgaaacagatgaaacagatgaagg

SEQ ID NO: 28060 - DNA, 25 bp, Probe Sequence
agagatgaagcagtgaagagacaga

SEQ ID NO: 28061 - DNA, 25 bp, Probe Sequence
cagagatgaagcagtgaagagacag

SEQ ID NO: 28062 - DNA, 25 bp, Probe Sequence
tgatgaaacagatgaaacagatgaa

SEQ ID NO: 28063 - DNA, 25 bp, Probe Sequence
ctcagagatgaagcagtgaagagac

SEQ ID NO: 28064 - DNA, 25 bp, Probe Sequence
gatgaaacagatgaaacagatgaag

SEQ ID NO: 28065 - DNA, 25 bp, Probe Sequence
cttgtgagcttgaatcaaccaatct

SEQ ID NO: 28066 - DNA, 25 bp, Probe Sequence
atggtgtaccctttatttcttctga

SEQ ID NO: 28067 - DNA, 25 bp, Probe Sequence
gactagaacaacccaaatagcatct

SEQ ID NO: 28068 - DNA, 25 bp, Probe Sequence
tggtgtaccctttatttcttctgaa

SEQ ID NO: 28069 - DNA, 25 bp, Probe Sequence
gatgaaacagatgaaggaagatgtg

SEQ ID NO: 28070 - DNA, 25 bp, Probe Sequence
agatgaaacagatgaaggaagatgt

SEQ ID NO: 28071 - DNA, 25 bp, Probe Sequence
ggactagaacaacccaaatagcatc

SEQ ID NO: 28072 - DNA, 25 bp, Probe Sequence
aatggtgtaccctttatttcttctg

SEQ ID NO: 28073 - DNA, 25 bp, Probe Sequence
ctcttattgttcctcttacgctctg

SEQ ID NO: 28074 - DNA, 25 bp, Probe Sequence
cctcttattgttcctcttacgctct

SEQ ID NO: 28075 - DNA, 25 bp, Probe Sequence
ttattgttcctcttacgctctgctc

SEQ ID NO: 28076 - DNA, 25 bp, Probe Sequence
cttattgttcctcttacgctctgct

SEQ ID NO: 28077 - DNA, 25 bp, Probe Sequence
tcttattgttcctcttacgctctgc

SEQ ID NO: 28078 - DNA, 25 bp, Probe Sequence
accagtgttaagtgacatagataag

SEQ ID NO: 28079 - DNA, 25 bp, Probe Sequence
ctaccctcttattgttcctcttacg

SEQ ID NO: 28080 - DNA, 25 bp, Probe Sequence
cctaccctcttattgttcctcttac

SEQ ID NO: 28081 - DNA, 25 bp, Probe Sequence
tcctaccctcttattgttcctctta

SEQ ID NO: 28082 - DNA, 25 bp, Probe Sequence
ccagtgttaagtgacatagataaga

SEQ ID NO: 28083 - DNA, 25 bp, Probe Sequence
ctcctaccctcttattgttcctctt

SEQ ID NO: 28084 - DNA, 25 bp, Probe Sequence
atttatcaagcagagacctttgttg

SEQ ID NO: 28085 - DNA, 25 bp, Probe Sequence
catttatcaagcagagacctttgtt

SEQ ID NO: 28086 - DNA, 25 bp, Probe Sequence
gataggtcgggtgttaaagttgttt

SEQ ID NO: 28087 - DNA, 25 bp, Probe Sequence
tcatttatcaagcagagacctttgt

SEQ ID NO: 28088 - DNA, 25 bp, Probe Sequence
ttcatttatcaagcagagacctttg

SEQ ID NO: 28089 - DNA, 25 bp, Probe Sequence
tttcatttatcaagcagagaccttt

SEQ ID NO: 28090 - DNA, 25 bp, Probe Sequence
tctcctaccctcttattgttcctct

SEQ ID NO: 28091 - DNA, 25 bp, Probe Sequence
gtctcctaccctcttattgttcctc

SEQ ID NO: 28092 - DNA, 25 bp, Probe Sequence
taccctcttattgttcctcttacgc

SEQ ID NO: 28093 - DNA, 25 bp, Probe Sequence
tagaatggtgggaatgtcagtagtg

SEQ ID NO: 28094 - DNA, 25 bp, Probe Sequence
tttatcaagcagagacctttgttgg

SEQ ID NO: 28095 - DNA, 25 bp, Probe Sequence
ctagaatggtgggaatgtcagtagt

SEQ ID NO: 28096 - DNA, 25 bp, Probe Sequence
tgtctcctaccctcttattgttcct

SEQ ID NO: 28097 - DNA, 25 bp, Probe Sequence
aatccttctaatctgctatgcttga

SEQ ID NO: 28098 - DNA, 25 bp, Probe Sequence
ccttctaatctgctatgcttgaatg

SEQ ID NO: 28099 - DNA, 25 bp, Probe Sequence
tccttctaatctgctatgcttgaat

SEQ ID NO: 28100 - DNA, 25 bp, Probe Sequence
atccttctaatctgctatgcttgaa

SEQ ID NO: 28101 - DNA, 25 bp, Probe Sequence
cttctaatctgctatgcttgaatgc

SEQ ID NO: 28102 - DNA, 25 bp, Probe Sequence
ttctaatctgctatgcttgaatgcc

SEQ ID NO: 28103 - DNA, 25 bp, Probe Sequence
ccttcttgtgatcttgctctatctc

SEQ ID NO: 28104 - DNA, 25 bp, Probe Sequence
cagcagttgttattacatccttgtg

SEQ ID NO: 28105 - DNA, 25 bp, Probe Sequence
tcagcagttgttattacatccttgt

SEQ ID NO: 28106 - DNA, 25 bp, Probe Sequence
atcagcagttgttattacatccttg

SEQ ID NO: 28107 - DNA, 25 bp, Probe Sequence
cttcttgtgatcttgctctatctca

SEQ ID NO: 28108 - DNA, 25 bp, Probe Sequence
agcagttgttattacatccttgtgg

SEQ ID NO: 28109 - DNA, 25 bp, Probe Sequence
ctaatctgctatgcttgaatgccac

SEQ ID NO: 28110 - DNA, 25 bp, Probe Sequence
tctaatctgctatgcttgaatgcca

SEQ ID NO: 28111 - DNA, 25 bp, Probe Sequence
cagttgttattacatccttgtggca

SEQ ID NO: 28112 - DNA, 25 bp, Probe Sequence
agttgttattacatccttgtggcac

SEQ ID NO: 28113 - DNA, 25 bp, Probe Sequence
tatcagcagttgttattacatcctt

SEQ ID NO: 28114 - DNA, 25 bp, Probe Sequence
ttatcagcagttgttattacatcct

SEQ ID NO: 28115 - DNA, 25 bp, Probe Sequence
aaatccttctaatctgctatgcttg

SEQ ID NO: 28116 - DNA, 25 bp, Probe Sequence
gccttcttgtgatcttgctctatct

SEQ ID NO: 28117 - DNA, 25 bp, Probe Sequence
tgttattacatccttgtggcacatt

SEQ ID NO: 28118 - DNA, 25 bp, Probe Sequence
ttgttattacatccttgtggcacat

SEQ ID NO: 28119 - DNA, 25 bp, Probe Sequence
gcaccttatcttaaagcacttacag

SEQ ID NO: 28120 - DNA, 25 bp, Probe Sequence
cggaggagaagaaggaaatgaattt

SEQ ID NO: 28121 - DNA, 25 bp, Probe Sequence
tggctctatattttctctacgcaaa

SEQ ID NO: 28122 - DNA, 25 bp, Probe Sequence
aagtggctctatattttctctacgc

SEQ ID NO: 28123 - DNA, 25 bp, Probe Sequence
gtggctctatattttctctacgcaa

SEQ ID NO: 28124 - DNA, 25 bp, Probe Sequence
aactaccttgcttttggaaaataca

SEQ ID NO: 28125 - DNA, 25 bp, Probe Sequence
gagggagagatcaccgattacagaa

SEQ ID NO: 28126 - DNA, 25 bp, Probe Sequence
actaccttgcttttggaaaatacat

SEQ ID NO: 28127 - DNA, 25 bp, Probe Sequence
agtggctctatattttctctacgca

SEQ ID NO: 28128 - DNA, 25 bp, Probe Sequence
aaagtggctctatattttctctacg

SEQ ID NO: 28129 - DNA, 25 bp, Probe Sequence
agggagagatcaccgattacagaac

SEQ ID NO: 28130 - DNA, 25 bp, Probe Sequence
caactaccttgcttttggaaaatac

SEQ ID NO: 28131 - DNA, 25 bp, Probe Sequence
ctaccttgcttttggaaaatacatt

SEQ ID NO: 28132 - DNA, 25 bp, Probe Sequence
taccttgcttttggaaaatacattt

SEQ ID NO: 28133 - DNA, 25 bp, Probe Sequence
ggctctatattttctctacgcaaaa

SEQ ID NO: 28134 - DNA, 25 bp, Probe Sequence
ctctatcaaatctcccagagaatcc

SEQ ID NO: 28135 - DNA, 25 bp, Probe Sequence
gctctatcaaatctcccagagaatc

SEQ ID NO: 28136 - DNA, 25 bp, Probe Sequence
tatcaaatctcccagagaatccgag

SEQ ID NO: 28137 - DNA, 25 bp, Probe Sequence
ctatcaaatctcccagagaatccga

SEQ ID NO: 28138 - DNA, 25 bp, Probe Sequence
tctatcaaatctcccagagaatccg

SEQ ID NO: 28139 - DNA, 25 bp, Probe Sequence
agtaaagtggctctatattttctct

SEQ ID NO: 28140 - DNA, 25 bp, Probe Sequence
ggagagatcaccgattacagaaccc

SEQ ID NO: 28141 - DNA, 25 bp, Probe Sequence
gggagagatcaccgattacagaacc

SEQ ID NO: 28142 - DNA, 25 bp, Probe Sequence
ctgagggagagatcaccgattacag

SEQ ID NO: 28143 - DNA, 25 bp, Probe Sequence
agctctatcaaatctcccagagaat

SEQ ID NO: 28144 - DNA, 25 bp, Probe Sequence
accttgcttttggaaaatacatttt

SEQ ID NO: 28145 - DNA, 25 bp, Probe Sequence
ggtctactcatctacatcctctaca

SEQ ID NO: 28146 - DNA, 25 bp, Probe Sequence
ctactcatctacatcctctacaagc

SEQ ID NO: 28147 - DNA, 25 bp, Probe Sequence
gtctactcatctacatcctctacaa

SEQ ID NO: 28148 - DNA, 25 bp, Probe Sequence
tctactcatctacatcctctacaag

SEQ ID NO: 28149 - DNA, 25 bp, Probe Sequence
aggtctactcatctacatcctctac

SEQ ID NO: 28150 - DNA, 25 bp, Probe Sequence
ctaggtctactcatctacatcctct

SEQ ID NO: 28151 - DNA, 25 bp, Probe Sequence
tactcatctacatcctctacaagct

SEQ ID NO: 28152 - DNA, 25 bp, Probe Sequence
taggtctactcatctacatcctcta

SEQ ID NO: 28153 - DNA, 25 bp, Probe Sequence
cctgaaacaactggaaagataacta

SEQ ID NO: 28154 - DNA, 25 bp, Probe Sequence
tgatttaggagaagccaggaatttc

SEQ ID NO: 28155 - DNA, 25 bp, Probe Sequence
taggaaatccattcacagttctttg

SEQ ID NO: 28156 - DNA, 25 bp, Probe Sequence
ctaggaaatccattcacagttcttt

SEQ ID NO: 28157 - DNA, 25 bp, Probe Sequence
tgaaacaactggaaagataactagg

SEQ ID NO: 28158 - DNA, 25 bp, Probe Sequence
actaggaaatccattcacagttctt

SEQ ID NO: 28159 - DNA, 25 bp, Probe Sequence
ccttgtttacacataccctcttcat

SEQ ID NO: 28160 - DNA, 25 bp, Probe Sequence
gaaacaactggaaagataactagga

SEQ ID NO: 28161 - DNA, 25 bp, Probe Sequence
tttacacataccctcttcatggatg

SEQ ID NO: 28162 - DNA, 25 bp, Probe Sequence
gtttacacataccctcttcatggat

SEQ ID NO: 28163 - DNA, 25 bp, Probe Sequence
atccaggcagatccaggactatatt

SEQ ID NO: 28164 - DNA, 25 bp, Probe Sequence
aatccaggcagatccaggactatat

SEQ ID NO: 28165 - DNA, 25 bp, Probe Sequence
ctgatttaggagaagccaggaattt

SEQ ID NO: 28166 - DNA, 25 bp, Probe Sequence
caccagacacccaggacttatttaa

SEQ ID NO: 28167 - DNA, 25 bp, Probe Sequence
aacaactggaaagataactaggaaa

SEQ ID NO: 28168 - DNA, 25 bp, Probe Sequence
aaacaactggaaagataactaggaa

SEQ ID NO: 28169 - DNA, 25 bp, Probe Sequence
atgtgaagttatactgtggctatgc

SEQ ID NO: 28170 - DNA, 25 bp, Probe Sequence
catgtgaagttatactgtggctatg

SEQ ID NO: 28171 - DNA, 25 bp, Probe Sequence
gtttaatgtctggtgctttctatca

SEQ ID NO: 28172 - DNA, 25 bp, Probe Sequence
tgtttaatgtctggtgctttctatc

SEQ ID NO: 28173 - DNA, 25 bp, Probe Sequence
tgctttctatcacctcttctaatct

SEQ ID NO: 28174 - DNA, 25 bp, Probe Sequence
ccactgtatgtttacttctcaccat

SEQ ID NO: 28175 - DNA, 25 bp, Probe Sequence
tttgtttaatgtctggtgctttcta

SEQ ID NO: 28176 - DNA, 25 bp, Probe Sequence
agaccactgtatgtttacttctcac

SEQ ID NO: 28177 - DNA, 25 bp, Probe Sequence
gaccactgtatgtttacttctcacc

SEQ ID NO: 28178 - DNA, 25 bp, Probe Sequence
ccttcactttacaaattcaagcctt

SEQ ID NO: 28179 - DNA, 25 bp, Probe Sequence
ttgtttaatgtctggtgctttctat

SEQ ID NO: 28180 - DNA, 25 bp, Probe Sequence
cactgtatgtttacttctcaccatt

SEQ ID NO: 28181 - DNA, 25 bp, Probe Sequence
atgccttcactttacaaattcaagc

SEQ ID NO: 28182 - DNA, 25 bp, Probe Sequence
gagtcttactttgagttagtgccat

SEQ ID NO: 28183 - DNA, 25 bp, Probe Sequence
agtcttactttgagttagtgccata

SEQ ID NO: 28184 - DNA, 25 bp, Probe Sequence
accactgtatgtttacttctcacca

SEQ ID NO: 28185 - DNA, 25 bp, Probe Sequence
tgaagttatactgtggctatgcaac

SEQ ID NO: 28186 - DNA, 25 bp, Probe Sequence
gtgaagttatactgtggctatgcaa

SEQ ID NO: 28187 - DNA, 25 bp, Probe Sequence
tcactttacaaattcaagccttaga

SEQ ID NO: 28188 - DNA, 25 bp, Probe Sequence
actgtatgtttacttctcaccattt

SEQ ID NO: 28189 - DNA, 25 bp, Probe Sequence
gctttctatcacctcttctaatctt

SEQ ID NO: 28190 - DNA, 25 bp, Probe Sequence
gtcttactttgagttagtgccataa

SEQ ID NO: 28191 - DNA, 25 bp, Probe Sequence
gaagttatactgtggctatgcaaca

SEQ ID NO: 28192 - DNA, 25 bp, Probe Sequence
ctgtatgtttacttctcaccatttg

SEQ ID NO: 28193 - DNA, 25 bp, Probe Sequence
ttatggtgtagttctgagtcctgag

SEQ ID NO: 28194 - DNA, 25 bp, Probe Sequence
tatggtgtagttctgagtcctgaga

SEQ ID NO: 28195 - DNA, 25 bp, Probe Sequence
atttatggtgtagttctgagtcctg

SEQ ID NO: 28196 - DNA, 25 bp, Probe Sequence
catttatggtgtagttctgagtcct

SEQ ID NO: 28197 - DNA, 25 bp, Probe Sequence
gattgtttgggattggaagtaaaga

SEQ ID NO: 28198 - DNA, 25 bp, Probe Sequence
agattgtttgggattggaagtaaag

SEQ ID NO: 28199 - DNA, 25 bp, Probe Sequence
tttatggtgtagttctgagtcctga

SEQ ID NO: 28200 - DNA, 25 bp, Probe Sequence
ttgtttgggattggaagtaaagatt

SEQ ID NO: 28201 - DNA, 25 bp, Probe Sequence
aagattgtttgggattggaagtaaa

SEQ ID NO: 28202 - DNA, 25 bp, Probe Sequence
attgtttgggattggaagtaaagat

SEQ ID NO: 28203 - DNA, 25 bp, Probe Sequence
gttgtcccaatgaaatactgagatg

SEQ ID NO: 28204 - DNA, 25 bp, Probe Sequence
tgttgtcccaatgaaatactgagat

SEQ ID NO: 28205 - DNA, 25 bp, Probe Sequence
cttgttgtcccaatgaaatactgag

SEQ ID NO: 28206 - DNA, 25 bp, Probe Sequence
caagattgtttgggattggaagtaa

SEQ ID NO: 28207 - DNA, 25 bp, Probe Sequence
ttgttgtcccaatgaaatactgaga

SEQ ID NO: 28208 - DNA, 25 bp, Probe Sequence
gcatttatggtgtagttctgagtcc

SEQ ID NO: 28209 - DNA, 25 bp, Probe Sequence
gtcccaatgaaatactgagatgctg

SEQ ID NO: 28210 - DNA, 25 bp, Probe Sequence
tgtttgggattggaagtaaagatta

SEQ ID NO: 28211 - DNA, 25 bp, Probe Sequence
ttgtcccaatgaaatactgagatgc

SEQ ID NO: 28212 - DNA, 25 bp, Probe Sequence
tgtcccaatgaaatactgagatgct

SEQ ID NO: 28213 - DNA, 25 bp, Probe Sequence
gcttgttgtcccaatgaaatactga

SEQ ID NO: 28214 - DNA, 25 bp, Probe Sequence
ctctcctgtccgtgtttgtttagta

SEQ ID NO: 28215 - DNA, 25 bp, Probe Sequence
acaagattgtttgggattggaagta

SEQ ID NO: 28216 - DNA, 25 bp, Probe Sequence
gtttgggattggaagtaaagattaa

SEQ ID NO: 28217 - DNA, 25 bp, Probe Sequence
gatggtgcctacactgattatatcg

SEQ ID NO: 28218 - DNA, 25 bp, Probe Sequence
cgatggtgcctacactgattatatc

SEQ ID NO: 28219 - DNA, 25 bp, Probe Sequence
atggtgcctacactgattatatcgt

SEQ ID NO: 28220 - DNA, 25 bp, Probe Sequence
tggtgcctacactgattatatcgtc

SEQ ID NO: 28221 - DNA, 25 bp, Probe Sequence
gaccatcaacaagaagaggaacctg

SEQ ID NO: 28222 - DNA, 25 bp, Probe Sequence
tcgatggtgcctacactgattatat

SEQ ID NO: 28223 - DNA, 25 bp, Probe Sequence
ggtgcctacactgattatatcgtcc

SEQ ID NO: 28224 - DNA, 25 bp, Probe Sequence
catcaacaagaagaggaacctggtg

SEQ ID NO: 28225 - DNA, 25 bp, Probe Sequence
gtgaccatcaacaagaagaggaacc

SEQ ID NO: 28226 - DNA, 25 bp, Probe Sequence
tgaccatcaacaagaagaggaacct

SEQ ID NO: 28227 - DNA, 25 bp, Probe Sequence
ggtgaccatcaacaagaagaggaac

SEQ ID NO: 28228 - DNA, 25 bp, Probe Sequence
gtcctgctggttcattcacaacaat

SEQ ID NO: 28229 - DNA, 25 bp, Probe Sequence
acctcatgccttccattaaagagag

SEQ ID NO: 28230 - DNA, 25 bp, Probe Sequence
gtgcctacactgattatatcgtccc

SEQ ID NO: 28231 - DNA, 25 bp, Probe Sequence
cacctcatgccttccattaaagaga

SEQ ID NO: 28232 - DNA, 25 bp, Probe Sequence
atcaacaagaagaggaacctggtgg

SEQ ID NO: 28233 - DNA, 25 bp, Probe Sequence
cttgactaagctggttccttgtgtc

SEQ ID NO: 28234 - DNA, 25 bp, Probe Sequence
atcgatggtgcctacactgattata

SEQ ID NO: 28235 - DNA, 25 bp, Probe Sequence
ctccttgactaagctggttccttgt

SEQ ID NO: 28236 - DNA, 25 bp, Probe Sequence
tcctgctggttcattcacaacaatg

SEQ ID NO: 28237 - DNA, 25 bp, Probe Sequence
actaagctggttccttgtgtcaaag

SEQ ID NO: 28238 - DNA, 25 bp, Probe Sequence
tgtacctccttgactaagctggttc

SEQ ID NO: 28239 - DNA, 25 bp, Probe Sequence
ctgtacctccttgactaagctggtt

SEQ ID NO: 28240 - DNA, 25 bp, Probe Sequence
tggtgaccatcaacaagaagaggaa

SEQ ID NO: 28241 - DNA, 25 bp, Probe Sequence
ctatctaaccatcaaccaactgcta

SEQ ID NO: 28242 - DNA, 25 bp, Probe Sequence
atacacatcttcaatgagagaccag

SEQ ID NO: 28243 - DNA, 25 bp, Probe Sequence
gatacacatcttcaatgagagacca

SEQ ID NO: 28244 - DNA, 25 bp, Probe Sequence
tatctaaccatcaaccaactgctag

SEQ ID NO: 28245 - DNA, 25 bp, Probe Sequence
tacacatcttcaatgagagaccagg

SEQ ID NO: 28246 - DNA, 25 bp, Probe Sequence
gaatcaggaattgtagtcaacggtc

SEQ ID NO: 28247 - DNA, 25 bp, Probe Sequence
cagaatcaggaattgtagtcaacgg

SEQ ID NO: 28248 - DNA, 25 bp, Probe Sequence
ccagaatcaggaattgtagtcaacg

SEQ ID NO: 28249 - DNA, 25 bp, Probe Sequence
cctatctaaccatcaaccaactgct

SEQ ID NO: 28250 - DNA, 25 bp, Probe Sequence
ccgccaagagaagaattacaagatc

SEQ ID NO: 28251 - DNA, 25 bp, Probe Sequence
agaatcaggaattgtagtcaacggt

SEQ ID NO: 28252 - DNA, 25 bp, Probe Sequence
cacatcttcaatgagagaccaggaa

SEQ ID NO: 28253 - DNA, 25 bp, Probe Sequence
cgccaagagaagaattacaagatcg

SEQ ID NO: 28254 - DNA, 25 bp, Probe Sequence
aatcaggaattgtagtcaacggtca

SEQ ID NO: 28255 - DNA, 25 bp, Probe Sequence
gccaagagaagaattacaagatcga

SEQ ID NO: 28256 - DNA, 25 bp, Probe Sequence
cattacaaggattacttcgtgcctc

SEQ ID NO: 28257 - DNA, 25 bp, Probe Sequence
ctacaaacaagttctcacctaaagc

SEQ ID NO: 28258 - DNA, 25 bp, Probe Sequence
cctacaaacaagttctcacctaaag

SEQ ID NO: 28259 - DNA, 25 bp, Probe Sequence
atcaggaattgtagtcaacggtcag

SEQ ID NO: 28260 - DNA, 25 bp, Probe Sequence
ccctacaaacaagttctcacctaaa

SEQ ID NO: 28261 - DNA, 25 bp, Probe Sequence
cttacagaaagactacagaacggat

SEQ ID NO: 28262 - DNA, 25 bp, Probe Sequence
ttgactttctgggaatctacatacc

SEQ ID NO: 28263 - DNA, 25 bp, Probe Sequence
caatgttgactttctgggaatctac

SEQ ID NO: 28264 - DNA, 25 bp, Probe Sequence
aagactacagaacggatctagtgtt

SEQ ID NO: 28265 - DNA, 25 bp, Probe Sequence
gaacacttaccagcacttctacgat

SEQ ID NO: 28266 - DNA, 25 bp, Probe Sequence
aacacttaccagcacttctacgatg

SEQ ID NO: 28267 - DNA, 25 bp, Probe Sequence
actacatcttcgggaattacattga

SEQ ID NO: 28268 - DNA, 25 bp, Probe Sequence
gactacatcttcgggaattacattg

SEQ ID NO: 28269 - DNA, 25 bp, Probe Sequence
ggactacatcttcgggaattacatt

SEQ ID NO: 28270 - DNA, 25 bp, Probe Sequence
ctacatcttcgggaattacattgag

SEQ ID NO: 28271 - DNA, 25 bp, Probe Sequence
tacatcttcgggaattacattgagc

SEQ ID NO: 28272 - DNA, 25 bp, Probe Sequence
caattcttccaaccctttgacttta

SEQ ID NO: 28273 - DNA, 25 bp, Probe Sequence
actccaagaccagaaagacttactt

SEQ ID NO: 28274 - DNA, 25 bp, Probe Sequence
aattcttccaaccctttgactttaa

SEQ ID NO: 28275 - DNA, 25 bp, Probe Sequence
gactccaagaccagaaagacttact

SEQ ID NO: 28276 - DNA, 25 bp, Probe Sequence
gggactacatcttcgggaattacat

SEQ ID NO: 28277 - DNA, 25 bp, Probe Sequence
tgactccaagaccagaaagacttac

SEQ ID NO: 28278 - DNA, 25 bp, Probe Sequence
agaaagactacagaaaggatgccag

SEQ ID NO: 28279 - DNA, 25 bp, Probe Sequence
cagaaagactacagaaaggatgcca

SEQ ID NO: 28280 - DNA, 25 bp, Probe Sequence
ctgactccaagaccagaaagactta

SEQ ID NO: 28281 - DNA, 25 bp, Probe Sequence
ctcccagaaagactacagaaaggat

SEQ ID NO: 28282 - DNA, 25 bp, Probe Sequence
gcaattcttccaaccctttgacttt

SEQ ID NO: 28283 - DNA, 25 bp, Probe Sequence
gatcaacaggaagaacatggtggtc

SEQ ID NO: 28284 - DNA, 25 bp, Probe Sequence
attcttccaaccctttgactttaaa

SEQ ID NO: 28285 - DNA, 25 bp, Probe Sequence
tcccagaaagactacagaaaggatg

SEQ ID NO: 28286 - DNA, 25 bp, Probe Sequence
agaccagaaagacttactttggaaa

SEQ ID NO: 28287 - DNA, 25 bp, Probe Sequence
aagaccagaaagacttactttggaa

SEQ ID NO: 28288 - DNA, 25 bp, Probe Sequence
ctccaagaccagaaagacttacttt

SEQ ID NO: 28289 - DNA, 25 bp, Probe Sequence
caagaagaggatggaatagacaagc

SEQ ID NO: 28290 - DNA, 25 bp, Probe Sequence
ccaagaagaggatggaatagacaag

SEQ ID NO: 28291 - DNA, 25 bp, Probe Sequence
aagaagaggatggaatagacaagct

SEQ ID NO: 28292 - DNA, 25 bp, Probe Sequence
actcaggttccactttcttcaaata

SEQ ID NO: 28293 - DNA, 25 bp, Probe Sequence
ctacacagaacatcactttccaaac

SEQ ID NO: 28294 - DNA, 25 bp, Probe Sequence
ctcaggttccactttcttcaaatat

SEQ ID NO: 28295 - DNA, 25 bp, Probe Sequence
agaagaggatggaatagacaagctg

SEQ ID NO: 28296 - DNA, 25 bp, Probe Sequence
cactcaggttccactttcttcaaat

SEQ ID NO: 28297 - DNA, 25 bp, Probe Sequence
cctacacagaacatcactttccaaa

SEQ ID NO: 28298 - DNA, 25 bp, Probe Sequence
tacaagtggaaggagacgctattct

SEQ ID NO: 28299 - DNA, 25 bp, Probe Sequence
cccactcattacaaataaagaaagg

SEQ ID NO: 28300 - DNA, 25 bp, Probe Sequence
gtacaagtggaaggagacgctattc

SEQ ID NO: 28301 - DNA, 25 bp, Probe Sequence
tacacagaacatcactttccaaacg

SEQ ID NO: 28302 - DNA, 25 bp, Probe Sequence
tacaaataaagaaaggtggtgtgag

SEQ ID NO: 28303 - DNA, 25 bp, Probe Sequence
gaaggcgaaagtagaaacaggaatg

SEQ ID NO: 28304 - DNA, 25 bp, Probe Sequence
gaagaggatggaatagacaagctgg

SEQ ID NO: 28305 - DNA, 25 bp, Probe Sequence
ttacaaataaagaaaggtggtgtga

SEQ ID NO: 28306 - DNA, 25 bp, Probe Sequence
tcattacaaataaagaaaggtggtg

SEQ ID NO: 28307 - DNA, 25 bp, Probe Sequence
agtcccactcattacaaataaagaa

SEQ ID NO: 28308 - DNA, 25 bp, Probe Sequence
aatttatcacttgcctacagctttg

SEQ ID NO: 28309 - DNA, 25 bp, Probe Sequence
gaatttatcacttgcctacagcttt

SEQ ID NO: 28310 - DNA, 25 bp, Probe Sequence
caaataaagaaaggtggtgtgagcc

SEQ ID NO: 28311 - DNA, 25 bp, Probe Sequence
ctcattacaaataaagaaaggtggt

SEQ ID NO: 28312 - DNA, 25 bp, Probe Sequence
actcattacaaataaagaaaggtgg

SEQ ID NO: 28313 - DNA, 25 bp, Probe Sequence
gaggaaggctataccacagaacatt

SEQ ID NO: 28314 - DNA, 25 bp, Probe Sequence
agaacattggctggtcaggatatac

SEQ ID NO: 28315 - DNA, 25 bp, Probe Sequence
aggaaggctataccacagaacattg

SEQ ID NO: 28316 - DNA, 25 bp, Probe Sequence
gaacattggctggtcaggatataca

SEQ ID NO: 28317 - DNA, 25 bp, Probe Sequence
aacattggctggtcaggatatacaa

SEQ ID NO: 28318 - DNA, 25 bp, Probe Sequence
agaatgactattatactccaactgg

SEQ ID NO: 28319 - DNA, 25 bp, Probe Sequence
acattggctggtcaggatatacaag

SEQ ID NO: 28320 - DNA, 25 bp, Probe Sequence
aatgctgagattgggaataaagact

SEQ ID NO: 28321 - DNA, 25 bp, Probe Sequence
tacaggcaaacatatcaaggagaat

SEQ ID NO: 28322 - DNA, 25 bp, Probe Sequence
atacaggcaaacatatcaaggagaa

SEQ ID NO: 28323 - DNA, 25 bp, Probe Sequence
atgctgagattgggaataaagactt

SEQ ID NO: 28324 - DNA, 25 bp, Probe Sequence
aaatgctgagattgggaataaagac

SEQ ID NO: 28325 - DNA, 25 bp, Probe Sequence
cgaaatgctgagattgggaataaag

SEQ ID NO: 28326 - DNA, 25 bp, Probe Sequence
tggtcaggatatacaaggtaaagga

SEQ ID NO: 28327 - DNA, 25 bp, Probe Sequence
tggctggtcaggatatacaaggtaa

SEQ ID NO: 28328 - DNA, 25 bp, Probe Sequence
gaaatgctgagattgggaataaaga

SEQ ID NO: 28329 - DNA, 25 bp, Probe Sequence
ttactatcgctttggacaggtttac

SEQ ID NO: 28330 - DNA, 25 bp, Probe Sequence
gttactatcgctttggacaggttta

SEQ ID NO: 28331 - DNA, 25 bp, Probe Sequence
cagaacattggctggtcaggatata

SEQ ID NO: 28332 - DNA, 25 bp, Probe Sequence
ctggtcaggatatacaaggtaaagg

SEQ ID NO: 28333 - DNA, 25 bp, Probe Sequence
gctggtcaggatatacaaggtaaag

SEQ ID NO: 28334 - DNA, 25 bp, Probe Sequence
ttggctggtcaggatatacaaggta

SEQ ID NO: 28335 - DNA, 25 bp, Probe Sequence
gagattgggaataaagactttgagc

SEQ ID NO: 28336 - DNA, 25 bp, Probe Sequence
gctgagattgggaataaagactttg

SEQ ID NO: 28337 - DNA, 25 bp, Probe Sequence
cttcttcatcgtcatcatcattgtg

SEQ ID NO: 28338 - DNA, 25 bp, Probe Sequence
tcttcttcatcgtcatcatcattgt

SEQ ID NO: 28339 - DNA, 25 bp, Probe Sequence
tgttcttcttcatcgtcatcatcat

SEQ ID NO: 28340 - DNA, 25 bp, Probe Sequence
ttcttcttcatcgtcatcatcattg

SEQ ID NO: 28341 - DNA, 25 bp, Probe Sequence
gttcttcttcatcgtcatcatcatt

SEQ ID NO: 28342 - DNA, 25 bp, Probe Sequence
ctgttcttcttcatcgtcatcatca

SEQ ID NO: 28343 - DNA, 25 bp, Probe Sequence
cctgttcttcttcatcgtcatcatc

SEQ ID NO: 28344 - DNA, 25 bp, Probe Sequence
gtggaactacttgtacttcattgtg

SEQ ID NO: 28345 - DNA, 25 bp, Probe Sequence
tgtggaactacttgtacttcattgt

SEQ ID NO: 28346 - DNA, 25 bp, Probe Sequence
gaactacttgtacttcattgtgctg

SEQ ID NO: 28347 - DNA, 25 bp, Probe Sequence
tcctgttcttcttcatcgtcatcat

SEQ ID NO: 28348 - DNA, 25 bp, Probe Sequence
aactacttgtacttcattgtgctgg

SEQ ID NO: 28349 - DNA, 25 bp, Probe Sequence
ttcttcatcgtcatcatcattgtgc

SEQ ID NO: 28350 - DNA, 25 bp, Probe Sequence
ggaactacttgtacttcattgtgct

SEQ ID NO: 28351 - DNA, 25 bp, Probe Sequence
atgtggaactacttgtacttcattg

SEQ ID NO: 28352 - DNA, 25 bp, Probe Sequence
gcctgagaactaatatgttaattgc

SEQ ID NO: 28353 - DNA, 25 bp, Probe Sequence
tggaactacttgtacttcattgtgc

SEQ ID NO: 28354 - DNA, 25 bp, Probe Sequence
ctacttgtacttcattgtgctggtc

SEQ ID NO: 28355 - DNA, 25 bp, Probe Sequence
catgtggaactacttgtacttcatt

SEQ ID NO: 28356 - DNA, 25 bp, Probe Sequence
ctcctgttcttcttcatcgtcatca

SEQ ID NO: 28357 - DNA, 25 bp, Probe Sequence
cttcatcgtcatcatcattgtgctg

SEQ ID NO: 28358 - DNA, 25 bp, Probe Sequence
gtctatgacctcctgttcttcttca

SEQ ID NO: 28359 - DNA, 25 bp, Probe Sequence
cctgagaactaatatgttaattgcc

SEQ ID NO: 28360 - DNA, 25 bp, Probe Sequence
gagaagcagaagaaggaggagattc

SEQ ID NO: 28361 - DNA, 25 bp, Probe Sequence
aataacacagagagacagacttgag

SEQ ID NO: 28362 - DNA, 25 bp, Probe Sequence
ataacacagagagacagacttgaga

SEQ ID NO: 28363 - DNA, 25 bp, Probe Sequence
taacacagagagacagacttgagaa

SEQ ID NO: 28364 - DNA, 25 bp, Probe Sequence
gcgtatctatatggaattgcttacc

SEQ ID NO: 28365 - DNA, 25 bp, Probe Sequence
aatagagactgtagattgcttctgt

SEQ ID NO: 28366 - DNA, 25 bp, Probe Sequence
tagagactgtagattgcttctgtag

SEQ ID NO: 28367 - DNA, 25 bp, Probe Sequence
gagactgtagattgcttctgtagta

SEQ ID NO: 28368 - DNA, 25 bp, Probe Sequence
agagactgtagattgcttctgtagt

SEQ ID NO: 28369 - DNA, 25 bp, Probe Sequence
agagagacagacttgagaacttgac

SEQ ID NO: 28370 - DNA, 25 bp, Probe Sequence
cagagagacagacttgagaacttga

SEQ ID NO: 28371 - DNA, 25 bp, Probe Sequence
atagagactgtagattgcttctgta

SEQ ID NO: 28372 - DNA, 25 bp, Probe Sequence
gagagacagacttgagaacttgaca

SEQ ID NO: 28373 - DNA, 25 bp, Probe Sequence
acagagagacagacttgagaacttg

SEQ ID NO: 28374 - DNA, 25 bp, Probe Sequence
cacagagagacagacttgagaactt

SEQ ID NO: 28375 - DNA, 25 bp, Probe Sequence
agagacagacttgagaacttgacaa

SEQ ID NO: 28376 - DNA, 25 bp, Probe Sequence
aacacagagagacagacttgagaac

SEQ ID NO: 28377 - DNA, 25 bp, Probe Sequence
agactgtagattgcttctgtagtac

SEQ ID NO: 28378 - DNA, 25 bp, Probe Sequence
tacctgatgtacctgatgctatgtc

SEQ ID NO: 28379 - DNA, 25 bp, Probe Sequence
gacctaacattcgatctcattcagt

SEQ ID NO: 28380 - DNA, 25 bp, Probe Sequence
acctaacattcgatctcattcagta

SEQ ID NO: 28381 - DNA, 25 bp, Probe Sequence
atggacctaacattcgatctcattc

SEQ ID NO: 28382 - DNA, 25 bp, Probe Sequence
ggacctaacattcgatctcattcag

SEQ ID NO: 28383 - DNA, 25 bp, Probe Sequence
catggacctaacattcgatctcatt

SEQ ID NO: 28384 - DNA, 25 bp, Probe Sequence
acacagagagacagacttgagaact

SEQ ID NO: 28385 - DNA, 25 bp, Probe Sequence
ttgtgtttgtgtgtgtttgttcttt

SEQ ID NO: 28386 - DNA, 25 bp, Probe Sequence
tttgtgtttgtgtgtgtttgttctt

SEQ ID NO: 28387 - DNA, 25 bp, Probe Sequence
gtttgtgtttgtgtgtgtttgttct

SEQ ID NO: 28388 - DNA, 25 bp, Probe Sequence
tgtttgtgtttgtgtgtgtttgttc

SEQ ID NO: 28389 - DNA, 25 bp, Probe Sequence
gtgtttgtgtttgtgtgtgtttgtt

SEQ ID NO: 28390 - DNA, 25 bp, Probe Sequence
aagaaacacgcacttagtctctaaa

SEQ ID NO: 28391 - DNA, 25 bp, Probe Sequence
aaagaaacacgcacttagtctctaa

SEQ ID NO: 28392 - DNA, 25 bp, Probe Sequence
gaaacacgcacttagtctctaaaga

SEQ ID NO: 28393 - DNA, 25 bp, Probe Sequence
agaaacacgcacttagtctctaaag

SEQ ID NO: 28394 - DNA, 25 bp, Probe Sequence
atatttgtgtatttaacagggaggg

SEQ ID NO: 28395 - DNA, 25 bp, Probe Sequence
acgcacttagtctctaaagagttta

SEQ ID NO: 28396 - DNA, 25 bp, Probe Sequence
cacgcacttagtctctaaagagttt

SEQ ID NO: 28397 - DNA, 25 bp, Probe Sequence
aaacacgcacttagtctctaaagag

SEQ ID NO: 28398 - DNA, 25 bp, Probe Sequence
tggaaacagactcgattcatattga

SEQ ID NO: 28399 - DNA, 25 bp, Probe Sequence
cgcacttagtctctaaagagtttat

SEQ ID NO: 28400 - DNA, 25 bp, Probe Sequence
tttaagacgtgtttgtgtttgtgtg

SEQ ID NO: 28401 - DNA, 25 bp, Probe Sequence
acacgcacttagtctctaaagagtt

SEQ ID NO: 28402 - DNA, 25 bp, Probe Sequence
aacacgcacttagtctctaaagagt

SEQ ID NO: 28403 - DNA, 25 bp, Probe Sequence
ctggaaacagactcgattcatattg

SEQ ID NO: 28404 - DNA, 25 bp, Probe Sequence
gctggaaacagactcgattcatatt

SEQ ID NO: 28405 - DNA, 25 bp, Probe Sequence
ttaagacgtgtttgtgtttgtgtgt

SEQ ID NO: 28406 - DNA, 25 bp, Probe Sequence
tgtgtttgtgtgtgtttgttctttt

SEQ ID NO: 28407 - DNA, 25 bp, Probe Sequence
aaaagaaacacgcacttagtctcta

SEQ ID NO: 28408 - DNA, 25 bp, Probe Sequence
cgtgtttgtgtttgtgtgtgtttgt

SEQ ID NO: 28409 - DNA, 25 bp, Probe Sequence
tatgtatgatagtgtgcatgtggtt

SEQ ID NO: 28410 - DNA, 25 bp, Probe Sequence
atatgtatgatagtgtgcatgtggt

SEQ ID NO: 28411 - DNA, 25 bp, Probe Sequence
atgtatgatagtgtgcatgtggttg

SEQ ID NO: 28412 - DNA, 25 bp, Probe Sequence
catatgtatgatagtgtgcatgtgg

SEQ ID NO: 28413 - DNA, 25 bp, Probe Sequence
gtatgatagtgtgcatgtggttgtc

SEQ ID NO: 28414 - DNA, 25 bp, Probe Sequence
gacggacctgatcttctgcttaatg

SEQ ID NO: 28415 - DNA, 25 bp, Probe Sequence
tatgatagtgtgcatgtggttgtca

SEQ ID NO: 28416 - DNA, 25 bp, Probe Sequence
tgtatgatagtgtgcatgtggttgt

SEQ ID NO: 28417 - DNA, 25 bp, Probe Sequence
gtgaaactgtatctgccactcattt

SEQ ID NO: 28418 - DNA, 25 bp, Probe Sequence
gcatatgtatgatagtgtgcatgtg

SEQ ID NO: 28419 - DNA, 25 bp, Probe Sequence
gaagagcggctttgatatgtgtatc

SEQ ID NO: 28420 - DNA, 25 bp, Probe Sequence
aaactgtatctgccactcatttccc

SEQ ID NO: 28421 - DNA, 25 bp, Probe Sequence
tgatagtgtgcatgtggttgtcatt

SEQ ID NO: 28422 - DNA, 25 bp, Probe Sequence
cacaaagaggtatgtcatcaccaac

SEQ ID NO: 28423 - DNA, 25 bp, Probe Sequence
tgaaactgtatctgccactcatttc

SEQ ID NO: 28424 - DNA, 25 bp, Probe Sequence
tgtgaaactgtatctgccactcatt

SEQ ID NO: 28425 - DNA, 25 bp, Probe Sequence
ggaagagcggctttgatatgtgtat

SEQ ID NO: 28426 - DNA, 25 bp, Probe Sequence
ttatttcaccaccataaaacccttg

SEQ ID NO: 28427 - DNA, 25 bp, Probe Sequence
gatagtgtgcatgtggttgtcattt

SEQ ID NO: 28428 - DNA, 25 bp, Probe Sequence
gaaactgtatctgccactcatttcc

SEQ ID NO: 28429 - DNA, 25 bp, Probe Sequence
cttgagcacaacagcaaataagcag

SEQ ID NO: 28430 - DNA, 25 bp, Probe Sequence
atatgctttgttttggaatttaccg

SEQ ID NO: 28431 - DNA, 25 bp, Probe Sequence
tatttcaccaccataaaacccttga

SEQ ID NO: 28432 - DNA, 25 bp, Probe Sequence
aagagcggctttgatatgtgtatcc

SEQ ID NO: 28433 - DNA, 25 bp, Probe Sequence
gagtgctgtcttatgtgaagtggat

SEQ ID NO: 28434 - DNA, 25 bp, Probe Sequence
agtgctgtcttatgtgaagtggatc

SEQ ID NO: 28435 - DNA, 25 bp, Probe Sequence
tcagagtgctgtcttatgtgaagtg

SEQ ID NO: 28436 - DNA, 25 bp, Probe Sequence
gtcagagtgctgtcttatgtgaagt

SEQ ID NO: 28437 - DNA, 25 bp, Probe Sequence
agagtgctgtcttatgtgaagtgga

SEQ ID NO: 28438 - DNA, 25 bp, Probe Sequence
ctgtcttatgtgaagtggatcgagg

SEQ ID NO: 28439 - DNA, 25 bp, Probe Sequence
cagagtgctgtcttatgtgaagtgg

SEQ ID NO: 28440 - DNA, 25 bp, Probe Sequence
cgtcagagtgctgtcttatgtgaag

SEQ ID NO: 28441 - DNA, 25 bp, Probe Sequence
tgtcttatgtgaagtggatcgagga

SEQ ID NO: 28442 - DNA, 25 bp, Probe Sequence
gtcttatgtgaagtggatcgaggac

SEQ ID NO: 28443 - DNA, 25 bp, Probe Sequence
gtgctgtcttatgtgaagtggatcg

SEQ ID NO: 28444 - DNA, 25 bp, Probe Sequence
gctgtcttatgtgaagtggatcgag

SEQ ID NO: 28445 - DNA, 25 bp, Probe Sequence
atttccagatgatctccagtgtgtg

SEQ ID NO: 28446 - DNA, 25 bp, Probe Sequence
catttccagatgatctccagtgtgt

SEQ ID NO: 28447 - DNA, 25 bp, Probe Sequence
tcttatgtgaagtggatcgaggaca

SEQ ID NO: 28448 - DNA, 25 bp, Probe Sequence
cttatgtgaagtggatcgaggacac

SEQ ID NO: 28449 - DNA, 25 bp, Probe Sequence
tttctcatttccagatgatctccag

SEQ ID NO: 28450 - DNA, 25 bp, Probe Sequence
atttctcatttccagatgatctcca

SEQ ID NO: 28451 - DNA, 25 bp, Probe Sequence
aatttctcatttccagatgatctcc

SEQ ID NO: 28452 - DNA, 25 bp, Probe Sequence
tgctgtcttatgtgaagtggatcga

SEQ ID NO: 28453 - DNA, 25 bp, Probe Sequence
ttctcatttccagatgatctccagt

SEQ ID NO: 28454 - DNA, 25 bp, Probe Sequence
gtttgttcatgtcagtgagagcttc

SEQ ID NO: 28455 - DNA, 25 bp, Probe Sequence
tcaaaatcctgcctaatgatgagtg

SEQ ID NO: 28456 - DNA, 25 bp, Probe Sequence
agtttgttcatgtcagtgagagctt

SEQ ID NO: 28457 - DNA, 25 bp, Probe Sequence
cattccttgtcagtgttctctctaa

SEQ ID NO: 28458 - DNA, 25 bp, Probe Sequence
ataatgattgaagaatgtggaggct

SEQ ID NO: 28459 - DNA, 25 bp, Probe Sequence
gagcagattcttcctaccttagttc

SEQ ID NO: 28460 - DNA, 25 bp, Probe Sequence
gagtctgtgtataaggcttcgttaa

SEQ ID NO: 28461 - DNA, 25 bp, Probe Sequence
gttgagcagattcttcctaccttag

SEQ ID NO: 28462 - DNA, 25 bp, Probe Sequence
attccttgtcagtgttctctctaag

SEQ ID NO: 28463 - DNA, 25 bp, Probe Sequence
aatgattgaagaatgtggaggctta

SEQ ID NO: 28464 - DNA, 25 bp, Probe Sequence
taatgattgaagaatgtggaggctt

SEQ ID NO: 28465 - DNA, 25 bp, Probe Sequence
tgagcagattcttcctaccttagtt

SEQ ID NO: 28466 - DNA, 25 bp, Probe Sequence
ttgagcagattcttcctaccttagt

SEQ ID NO: 28467 - DNA, 25 bp, Probe Sequence
agtctgtgtataaggcttcgttaag

SEQ ID NO: 28468 - DNA, 25 bp, Probe Sequence
tataatgattgaagaatgtggaggc

SEQ ID NO: 28469 - DNA, 25 bp, Probe Sequence
aatagaaccgttgatgaacctctta

SEQ ID NO: 28470 - DNA, 25 bp, Probe Sequence
taatagaaccgttgatgaacctctt

SEQ ID NO: 28471 - DNA, 25 bp, Probe Sequence
cataatagaaccgttgatgaacctc

SEQ ID NO: 28472 - DNA, 25 bp, Probe Sequence
taccttgttcactgtggcataatag

SEQ ID NO: 28473 - DNA, 25 bp, Probe Sequence
atagaaccgttgatgaacctcttaa

SEQ ID NO: 28474 - DNA, 25 bp, Probe Sequence
tgttgagcagattcttcctacctta

SEQ ID NO: 28475 - DNA, 25 bp, Probe Sequence
atgattgaagaatgtggaggcttag

SEQ ID NO: 28476 - DNA, 25 bp, Probe Sequence
ataatagaaccgttgatgaacctct

SEQ ID NO: 28477 - DNA, 25 bp, Probe Sequence
tagaaccgttgatgaacctcttaac

SEQ ID NO: 28478 - DNA, 25 bp, Probe Sequence
tgagtctgtgtataaggcttcgtta

SEQ ID NO: 28479 - DNA, 25 bp, Probe Sequence
agtgttccgagacttggttattaag

SEQ ID NO: 28480 - DNA, 25 bp, Probe Sequence
gcataatagaaccgttgatgaacct

SEQ ID NO: 28481 - DNA, 25 bp, Probe Sequence
aagaccaatgctccaatatgtatgt

SEQ ID NO: 28482 - DNA, 25 bp, Probe Sequence
gaccaatgctccaatatgtatgtga

SEQ ID NO: 28483 - DNA, 25 bp, Probe Sequence
agaccaatgctccaatatgtatgtg

SEQ ID NO: 28484 - DNA, 25 bp, Probe Sequence
agttattcagtctgcggattctaag

SEQ ID NO: 28485 - DNA, 25 bp, Probe Sequence
gagttattcagtctgcggattctaa

SEQ ID NO: 28486 - DNA, 25 bp, Probe Sequence
accaatgctccaatatgtatgtgac

SEQ ID NO: 28487 - DNA, 25 bp, Probe Sequence
taagaccaatgctccaatatgtatg

SEQ ID NO: 28488 - DNA, 25 bp, Probe Sequence
gttattcagtctgcggattctaaga

SEQ ID NO: 28489 - DNA, 25 bp, Probe Sequence
taagagttattcagtctgcggattc

SEQ ID NO: 28490 - DNA, 25 bp, Probe Sequence
gtaagagttattcagtctgcggatt

SEQ ID NO: 28491 - DNA, 25 bp, Probe Sequence
agagttattcagtctgcggattcta

SEQ ID NO: 28492 - DNA, 25 bp, Probe Sequence
aatgctccaatatgtatgtgacaac

SEQ ID NO: 28493 - DNA, 25 bp, Probe Sequence
caatgctccaatatgtatgtgacaa

SEQ ID NO: 28494 - DNA, 25 bp, Probe Sequence
atgctccaatatgtatgtgacaaca

SEQ ID NO: 28495 - DNA, 25 bp, Probe Sequence
ttaagaccaatgctccaatatgtat

SEQ ID NO: 28496 - DNA, 25 bp, Probe Sequence
tgctccaatatgtatgtgacaacag

SEQ ID NO: 28497 - DNA, 25 bp, Probe Sequence
ccaatgctccaatatgtatgtgaca

SEQ ID NO: 28498 - DNA, 25 bp, Probe Sequence
ctgctggtaagagttattcagtctg

SEQ ID NO: 28499 - DNA, 25 bp, Probe Sequence
aagagttattcagtctgcggattct

SEQ ID NO: 28500 - DNA, 25 bp, Probe Sequence
ggtaagagttattcagtctgcggat

SEQ ID NO: 28501 - DNA, 25 bp, Probe Sequence
ctccaatatgtatgtgacaacagcc

SEQ ID NO: 28502 - DNA, 25 bp, Probe Sequence
cctgctggtaagagttattcagtct

SEQ ID NO: 28503 - DNA, 25 bp, Probe Sequence
tctgtgtgacctgattgaaagtaat

SEQ ID NO: 28504 - DNA, 25 bp, Probe Sequence
atctgtgtgacctgattgaaagtaa

SEQ ID NO: 28505 - DNA, 25 bp, Probe Sequence
gtctccatcatgtataacctcactg

SEQ ID NO: 28506 - DNA, 25 bp, Probe Sequence
tctccatcatgtataacctcactgt

SEQ ID NO: 28507 - DNA, 25 bp, Probe Sequence
atcatgtataacctcactgttctgg

SEQ ID NO: 28508 - DNA, 25 bp, Probe Sequence
ccatcatgtataacctcactgttct

SEQ ID NO: 28509 - DNA, 25 bp, Probe Sequence
tccatcatgtataacctcactgttc

SEQ ID NO: 28510 - DNA, 25 bp, Probe Sequence
ctccatcatgtataacctcactgtt

SEQ ID NO: 28511 - DNA, 25 bp, Probe Sequence
catcatgtataacctcactgttctg

SEQ ID NO: 28512 - DNA, 25 bp, Probe Sequence
cgtctccatcatgtataacctcact

SEQ ID NO: 28513 - DNA, 25 bp, Probe Sequence
cttcaacgtctccatcatgtataac

SEQ ID NO: 28514 - DNA, 25 bp, Probe Sequence
ttcaacgtctccatcatgtataacc

SEQ ID NO: 28515 - DNA, 25 bp, Probe Sequence
caacgtctccatcatgtataacctc

SEQ ID NO: 28516 - DNA, 25 bp, Probe Sequence
gcttcaacgtctccatcatgtataa

SEQ ID NO: 28517 - DNA, 25 bp, Probe Sequence
aacgtctccatcatgtataacctca

SEQ ID NO: 28518 - DNA, 25 bp, Probe Sequence
tcaacgtctccatcatgtataacct

SEQ ID NO: 28519 - DNA, 25 bp, Probe Sequence
acgtctccatcatgtataacctcac

SEQ ID NO: 28520 - DNA, 25 bp, Probe Sequence
ggcttcaacgtctccatcatgtata

SEQ ID NO: 28521 - DNA, 25 bp, Probe Sequence
cagtgtacttcacagagctgtctag

SEQ ID NO: 28522 - DNA, 25 bp, Probe Sequence
tcatgtataacctcactgttctggg

SEQ ID NO: 28523 - DNA, 25 bp, Probe Sequence
caatcatcacagtgactcccaaatc

SEQ ID NO: 28524 - DNA, 25 bp, Probe Sequence
gacctacacctgccatatccatctg

SEQ ID NO: 28525 - DNA, 25 bp, Probe Sequence
atgtataacctcactgttctgggtc

SEQ ID NO: 28526 - DNA, 25 bp, Probe Sequence
acattggcaatcatcacagtgactc

SEQ ID NO: 28527 - DNA, 25 bp, Probe Sequence
ctttgtgaggtgactccagtatctg

SEQ ID NO: 28528 - DNA, 25 bp, Probe Sequence
ctttggctttcacctttggagaaga

SEQ ID NO: 28529 - DNA, 25 bp, Probe Sequence
gattctaatgtggttcagttggatg

SEQ ID NO: 28530 - DNA, 25 bp, Probe Sequence
attctaatgtggttcagttggatgt

SEQ ID NO: 28531 - DNA, 25 bp, Probe Sequence
agattctaatgtggttcagttggat

SEQ ID NO: 28532 - DNA, 25 bp, Probe Sequence
gagattctaatgtggttcagttgga

SEQ ID NO: 28533 - DNA, 25 bp, Probe Sequence
cagatggcacagaattacagttatt

SEQ ID NO: 28534 - DNA, 25 bp, Probe Sequence
ttctaatgtggttcagttggatgtg

SEQ ID NO: 28535 - DNA, 25 bp, Probe Sequence
agagattctaatgtggttcagttgg

SEQ ID NO: 28536 - DNA, 25 bp, Probe Sequence
tggcacagaattacagttattagag

SEQ ID NO: 28537 - DNA, 25 bp, Probe Sequence
gcagatggcacagaattacagttat

SEQ ID NO: 28538 - DNA, 25 bp, Probe Sequence
ggcacagaattacagttattagaga

SEQ ID NO: 28539 - DNA, 25 bp, Probe Sequence
atggcacagaattacagttattaga

SEQ ID NO: 28540 - DNA, 25 bp, Probe Sequence
agatggcacagaattacagttatta

SEQ ID NO: 28541 - DNA, 25 bp, Probe Sequence
aacttacttgtattgagagcacacg

SEQ ID NO: 28542 - DNA, 25 bp, Probe Sequence
gatggcacagaattacagttattag

SEQ ID NO: 28543 - DNA, 25 bp, Probe Sequence
gtaattgatggtctccgagtcctag

SEQ ID NO: 28544 - DNA, 25 bp, Probe Sequence
taattgatggtctccgagtcctaga

SEQ ID NO: 28545 - DNA, 25 bp, Probe Sequence
ctaatgtggttcagttggatgtgga

SEQ ID NO: 28546 - DNA, 25 bp, Probe Sequence
tctaatgtggttcagttggatgtgg

SEQ ID NO: 28547 - DNA, 25 bp, Probe Sequence
ttagagcactgaaagaaacacaaag

SEQ ID NO: 28548 - DNA, 25 bp, Probe Sequence
tttagagcactgaaagaaacacaaa

SEQ ID NO: 28549 - DNA, 25 bp, Probe Sequence
gaacaggacttaaacgaatcatcag

SEQ ID NO: 28550 - DNA, 25 bp, Probe Sequence
taatgtggttcagttggatgtggac

SEQ ID NO: 28551 - DNA, 25 bp, Probe Sequence
gaggtgttccagaatctctactgac

SEQ ID NO: 28552 - DNA, 25 bp, Probe Sequence
tagagattctaatgtggttcagttg

SEQ ID NO: 28553 - DNA, 25 bp, Probe Sequence
caaccaggaacttcaagaacttatc

SEQ ID NO: 28554 - DNA, 25 bp, Probe Sequence
ccaaccaggaacttcaagaacttat

SEQ ID NO: 28555 - DNA, 25 bp, Probe Sequence
tcaagaacttatccagagtgtgaag

SEQ ID NO: 28556 - DNA, 25 bp, Probe Sequence
cttcaagaacttatccagagtgtga

SEQ ID NO: 28557 - DNA, 25 bp, Probe Sequence
aacttcaagaacttatccagagtgt

SEQ ID NO: 28558 - DNA, 25 bp, Probe Sequence
acttcaagaacttatccagagtgtg

SEQ ID NO: 28559 - DNA, 25 bp, Probe Sequence
gaacttcaagaacttatccagagtg

SEQ ID NO: 28560 - DNA, 25 bp, Probe Sequence
caagaacttatccagagtgtgaagg

SEQ ID NO: 28561 - DNA, 25 bp, Probe Sequence
ggaacttcaagaacttatccagagt

SEQ ID NO: 28562 - DNA, 25 bp, Probe Sequence
aggaacttcaagaacttatccagag

SEQ ID NO: 28563 - DNA, 25 bp, Probe Sequence
caggaacttcaagaacttatccaga

SEQ ID NO: 28564 - DNA, 25 bp, Probe Sequence
aaccaggaacttcaagaacttatcc

SEQ ID NO: 28565 - DNA, 25 bp, Probe Sequence
ccaggaacttcaagaacttatccag

SEQ ID NO: 28566 - DNA, 25 bp, Probe Sequence
aagaacttatccagagtgtgaagga

SEQ ID NO: 28567 - DNA, 25 bp, Probe Sequence
aacttatccagagtgtgaaggactt

SEQ ID NO: 28568 - DNA, 25 bp, Probe Sequence
accaggaacttcaagaacttatcca

SEQ ID NO: 28569 - DNA, 25 bp, Probe Sequence
gaacttatccagagtgtgaaggact

SEQ ID NO: 28570 - DNA, 25 bp, Probe Sequence
agaacttatccagagtgtgaaggac

SEQ ID NO: 28571 - DNA, 25 bp, Probe Sequence
gccaaccaggaacttcaagaactta

SEQ ID NO: 28572 - DNA, 25 bp, Probe Sequence
acttatccagagtgtgaaggacttc

SEQ ID NO: 28573 - DNA, 25 bp, Probe Sequence
ctgatcctgatagcattgaaatggt

SEQ ID NO: 28574 - DNA, 25 bp, Probe Sequence
tgatcctgatagcattgaaatggtg

SEQ ID NO: 28575 - DNA, 25 bp, Probe Sequence
aaattgaaacgggcaggaaatagtc

SEQ ID NO: 28576 - DNA, 25 bp, Probe Sequence
gaaattgaaacgggcaggaaatagt

SEQ ID NO: 28577 - DNA, 25 bp, Probe Sequence
cttagactcaatagcagcaccatta

SEQ ID NO: 28578 - DNA, 25 bp, Probe Sequence
ttagactcaatagcagcaccattaa

SEQ ID NO: 28579 - DNA, 25 bp, Probe Sequence
tcaatagcagcaccattaagtatct

SEQ ID NO: 28580 - DNA, 25 bp, Probe Sequence
ctcaatagcagcaccattaagtatc

SEQ ID NO: 28581 - DNA, 25 bp, Probe Sequence
tagactcaatagcagcaccattaag

SEQ ID NO: 28582 - DNA, 25 bp, Probe Sequence
tcaggataaggttgcttcagttatt

SEQ ID NO: 28583 - DNA, 25 bp, Probe Sequence
ctcaggataaggttgcttcagttat

SEQ ID NO: 28584 - DNA, 25 bp, Probe Sequence
tacttagactcaatagcagcaccat

SEQ ID NO: 28585 - DNA, 25 bp, Probe Sequence
catctcctactacaacacctactcc

SEQ ID NO: 28586 - DNA, 25 bp, Probe Sequence
ccatctcctactacaacacctactc

SEQ ID NO: 28587 - DNA, 25 bp, Probe Sequence
actcaatagcagcaccattaagtat

SEQ ID NO: 28588 - DNA, 25 bp, Probe Sequence
cttattctagtgttgctggcttatt

SEQ ID NO: 28589 - DNA, 25 bp, Probe Sequence
cacactgctctacttagactcaata

SEQ ID NO: 28590 - DNA, 25 bp, Probe Sequence
ctctacttagactcaatagcagcac

SEQ ID NO: 28591 - DNA, 25 bp, Probe Sequence
acactgctctacttagactcaatag

SEQ ID NO: 28592 - DNA, 25 bp, Probe Sequence
ggaacctattcagttaataatggca

SEQ ID NO: 28593 - DNA, 25 bp, Probe Sequence
tggaacctattcagttaataatggc

SEQ ID NO: 28594 - DNA, 25 bp, Probe Sequence
caatagcagcaccattaagtatcta

SEQ ID NO: 28595 - DNA, 25 bp, Probe Sequence
gactcaatagcagcaccattaagta

SEQ ID NO: 28596 - DNA, 25 bp, Probe Sequence
atctcctactacaacacctactcca

SEQ ID NO: 28597 - DNA, 25 bp, Probe Sequence
ctaaccttgaagtatgccttgaact

SEQ ID NO: 28598 - DNA, 25 bp, Probe Sequence
atcctaaccttgaagtatgccttga

SEQ ID NO: 28599 - DNA, 25 bp, Probe Sequence
tcacactgctctacttagactcaat

SEQ ID NO: 28600 - DNA, 25 bp, Probe Sequence
caggataaggttgcttcagttatta

SEQ ID NO: 28601 - DNA, 25 bp, Probe Sequence
tgatgtcagtgttatatcctccagg

SEQ ID NO: 28602 - DNA, 25 bp, Probe Sequence
ctgatgtcagtgttatatcctccag

SEQ ID NO: 28603 - DNA, 25 bp, Probe Sequence
ctctcacggaggcatcttatgttaa

SEQ ID NO: 28604 - DNA, 25 bp, Probe Sequence
ctgctgatgtcagtgttatatcctc

SEQ ID NO: 28605 - DNA, 25 bp, Probe Sequence
cttcactcctggaaccttcactaac

SEQ ID NO: 28606 - DNA, 25 bp, Probe Sequence
tatcataaatctcaagaggacctgg

SEQ ID NO: 28607 - DNA, 25 bp, Probe Sequence
tgtcagtgttatatcctccaggaat

SEQ ID NO: 28608 - DNA, 25 bp, Probe Sequence
atgtcagtgttatatcctccaggaa

SEQ ID NO: 28609 - DNA, 25 bp, Probe Sequence
agtgttatatcctccaggaatactg

SEQ ID NO: 28610 - DNA, 25 bp, Probe Sequence
cagtgttatatcctccaggaatact

SEQ ID NO: 28611 - DNA, 25 bp, Probe Sequence
tcagtgttatatcctccaggaatac

SEQ ID NO: 28612 - DNA, 25 bp, Probe Sequence
gtcagtgttatatcctccaggaata

SEQ ID NO: 28613 - DNA, 25 bp, Probe Sequence
gatgtcagtgttatatcctccagga

SEQ ID NO: 28614 - DNA, 25 bp, Probe Sequence
gctgatgtcagtgttatatcctcca

SEQ ID NO: 28615 - DNA, 25 bp, Probe Sequence
tgctgatgtcagtgttatatcctcc

SEQ ID NO: 28616 - DNA, 25 bp, Probe Sequence
cctgctgatgtcagtgttatatcct

SEQ ID NO: 28617 - DNA, 25 bp, Probe Sequence
atcataaatctcaagaggacctggg

SEQ ID NO: 28618 - DNA, 25 bp, Probe Sequence
gcatcttatgttaacctacctacca

SEQ ID NO: 28619 - DNA, 25 bp, Probe Sequence
ggcatcttatgttaacctacctacc

SEQ ID NO: 28620 - DNA, 25 bp, Probe Sequence
ttatgttaacctacctaccattgcg

SEQ ID NO: 28621 - DNA, 25 bp, Probe Sequence
cttatgttaacctacctaccattgc

SEQ ID NO: 28622 - DNA, 25 bp, Probe Sequence
ttctggattcccgtcgtaacttaaa

SEQ ID NO: 28623 - DNA, 25 bp, Probe Sequence
atatcataaatctcaagaggacctg

SEQ ID NO: 28624 - DNA, 25 bp, Probe Sequence
tctggattcccgtcgtaacttaaag

SEQ ID NO: 28625 - DNA, 25 bp, Probe Sequence
ctgagatgaatctggaatcggtgac

SEQ ID NO: 28626 - DNA, 25 bp, Probe Sequence
gagatgaatctggaatcggtgacac

SEQ ID NO: 28627 - DNA, 25 bp, Probe Sequence
tccataaagagcttcagcagttaaa

SEQ ID NO: 28628 - DNA, 25 bp, Probe Sequence
tgagatgaatctggaatcggtgaca

SEQ ID NO: 28629 - DNA, 25 bp, Probe Sequence
ctccataaagagcttcagcagttaa

SEQ ID NO: 28630 - DNA, 25 bp, Probe Sequence
cctgagatgaatctggaatcggtga

SEQ ID NO: 28631 - DNA, 25 bp, Probe Sequence
tctccataaagagcttcagcagtta

SEQ ID NO: 28632 - DNA, 25 bp, Probe Sequence
tgaaggaccactacatcttttactg

SEQ ID NO: 28633 - DNA, 25 bp, Probe Sequence
ttctccataaagagcttcagcagtt

SEQ ID NO: 28634 - DNA, 25 bp, Probe Sequence
gaaggaccactacatcttttactgt

SEQ ID NO: 28635 - DNA, 25 bp, Probe Sequence
gttctccataaagagcttcagcagt

SEQ ID NO: 28636 - DNA, 25 bp, Probe Sequence
gtgaaggaccactacatcttttact

SEQ ID NO: 28637 - DNA, 25 bp, Probe Sequence
aaggaccactacatcttttactgtg

SEQ ID NO: 28638 - DNA, 25 bp, Probe Sequence
gaccactacatcttttactgtgagg

SEQ ID NO: 28639 - DNA, 25 bp, Probe Sequence
ggaccactacatcttttactgtgag

SEQ ID NO: 28640 - DNA, 25 bp, Probe Sequence
ccataaagagcttcagcagttaaaa

SEQ ID NO: 28641 - DNA, 25 bp, Probe Sequence
aggaccactacatcttttactgtga

SEQ ID NO: 28642 - DNA, 25 bp, Probe Sequence
cgtgaaggaccactacatcttttac

SEQ ID NO: 28643 - DNA, 25 bp, Probe Sequence
ctcctggttctccataaagagcttc

SEQ ID NO: 28644 - DNA, 25 bp, Probe Sequence
cctggttctccataaagagcttcag

SEQ ID NO: 28645 - DNA, 25 bp, Probe Sequence
accactacatcttttactgtgaggg

SEQ ID NO: 28646 - DNA, 25 bp, Probe Sequence
ggttctccataaagagcttcagcag

SEQ ID NO: 28647 - DNA, 25 bp, Probe Sequence
tctcctggttctccataaagagctt

SEQ ID NO: 28648 - DNA, 25 bp, Probe Sequence
tcctggttctccataaagagcttca

SEQ ID NO: 28649 - DNA, 25 bp, Probe Sequence
attattctgtgaccgccaattctaa

SEQ ID NO: 28650 - DNA, 25 bp, Probe Sequence
gattattctgtgaccgccaattcta

SEQ ID NO: 28651 - DNA, 25 bp, Probe Sequence
attggaagtggatgtaatctggatt

SEQ ID NO: 28652 - DNA, 25 bp, Probe Sequence
ttattctgtgaccgccaattctaag

SEQ ID NO: 28653 - DNA, 25 bp, Probe Sequence
ttggaagtggatgtaatctggattc

SEQ ID NO: 28654 - DNA, 25 bp, Probe Sequence
gtggatgtaatctggattctgctag

SEQ ID NO: 28655 - DNA, 25 bp, Probe Sequence
ttattcctcagatcgtcaagtacag

SEQ ID NO: 28656 - DNA, 25 bp, Probe Sequence
ttcattattcctcagatcgtcaagt

SEQ ID NO: 28657 - DNA, 25 bp, Probe Sequence
agtggatgtaatctggattctgcta

SEQ ID NO: 28658 - DNA, 25 bp, Probe Sequence
ctattggattaagtgtggctgatct

SEQ ID NO: 28659 - DNA, 25 bp, Probe Sequence
ggaagtggatgtaatctggattctg

SEQ ID NO: 28660 - DNA, 25 bp, Probe Sequence
attattcctcagatcgtcaagtaca

SEQ ID NO: 28661 - DNA, 25 bp, Probe Sequence
tattcctcagatcgtcaagtacagt

SEQ ID NO: 28662 - DNA, 25 bp, Probe Sequence
tattggattaagtgtggctgatctt

SEQ ID NO: 28663 - DNA, 25 bp, Probe Sequence
tggatgtaatctggattctgctaga

SEQ ID NO: 28664 - DNA, 25 bp, Probe Sequence
cattattcctcagatcgtcaagtac

SEQ ID NO: 28665 - DNA, 25 bp, Probe Sequence
tcattattcctcagatcgtcaagta

SEQ ID NO: 28666 - DNA, 25 bp, Probe Sequence
tggaagtggatgtaatctggattct

SEQ ID NO: 28667 - DNA, 25 bp, Probe Sequence
ggctgatcttattgaatccatgttg

SEQ ID NO: 28668 - DNA, 25 bp, Probe Sequence
gctgatcttattgaatccatgttga

SEQ ID NO: 28669 - DNA, 25 bp, Probe Sequence
attcattattcctcagatcgtcaag

SEQ ID NO: 28670 - DNA, 25 bp, Probe Sequence
attctaagattgtagtggtaactgc

SEQ ID NO: 28671 - DNA, 25 bp, Probe Sequence
aagattattctgtgaccgccaattc

SEQ ID NO: 28672 - DNA, 25 bp, Probe Sequence
gaagtggatgtaatctggattctgc

SEQ ID NO: 28673 - DNA, 25 bp, Probe Sequence
gccagatggatacgaattcaagttc

SEQ ID NO: 28674 - DNA, 25 bp, Probe Sequence
gaacatcctcctggactcaatcatg

SEQ ID NO: 28675 - DNA, 25 bp, Probe Sequence
ctgacggtgacttcaagatcaaatg

SEQ ID NO: 28676 - DNA, 25 bp, Probe Sequence
ggtgacttcaagatcaaatgtgtgg

SEQ ID NO: 28677 - DNA, 25 bp, Probe Sequence
gacggtgacttcaagatcaaatgtg

SEQ ID NO: 28678 - DNA, 25 bp, Probe Sequence
tgccagatggatacgaattcaagtt

SEQ ID NO: 28679 - DNA, 25 bp, Probe Sequence
ccagatggatacgaattcaagttcc

SEQ ID NO: 28680 - DNA, 25 bp, Probe Sequence
cggtgacttcaagatcaaatgtgtg

SEQ ID NO: 28681 - DNA, 25 bp, Probe Sequence
tgacggtgacttcaagatcaaatgt

SEQ ID NO: 28682 - DNA, 25 bp, Probe Sequence
gtgacttcaagatcaaatgtgtggc

SEQ ID NO: 28683 - DNA, 25 bp, Probe Sequence
ctgccagatggatacgaattcaagt

SEQ ID NO: 28684 - DNA, 25 bp, Probe Sequence
ggaacatcctcctggactcaatcat

SEQ ID NO: 28685 - DNA, 25 bp, Probe Sequence
acggtgacttcaagatcaaatgtgt

SEQ ID NO: 28686 - DNA, 25 bp, Probe Sequence
aacatcctcctggactcaatcatgg

SEQ ID NO: 28687 - DNA, 25 bp, Probe Sequence
tcaagctgccagatggatacgaatt

SEQ ID NO: 28688 - DNA, 25 bp, Probe Sequence
gctgacggtgacttcaagatcaaat

SEQ ID NO: 28689 - DNA, 25 bp, Probe Sequence
cttcaagatcaaatgtgtggccttt

SEQ ID NO: 28690 - DNA, 25 bp, Probe Sequence
aaatgtgtggcctttgactgaaatc

SEQ ID NO: 28691 - DNA, 25 bp, Probe Sequence
cagatggatacgaattcaagttccc

SEQ ID NO: 28692 - DNA, 25 bp, Probe Sequence
gctgccagatggatacgaattcaag

SEQ ID NO: 28693 - DNA, 25 bp, Probe Sequence
caagctgccagatggatacgaattc

SEQ ID NO: 28694 - DNA, 25 bp, Probe Sequence
gtcaagctgccagatggatacgaat

SEQ ID NO: 28695 - DNA, 25 bp, Probe Sequence
agctgccagatggatacgaattcaa

SEQ ID NO: 28696 - DNA, 25 bp, Probe Sequence
aagctgccagatggatacgaattca

SEQ ID NO: 28697 - DNA, 25 bp, Probe Sequence
atagacctcaccagtgcttcatata

SEQ ID NO: 28698 - DNA, 25 bp, Probe Sequence
cttcaatgagaacaacaggagagtc

SEQ ID NO: 28699 - DNA, 25 bp, Probe Sequence
tagacctcaccagtgcttcatatac

SEQ ID NO: 28700 - DNA, 25 bp, Probe Sequence
catagacctcaccagtgcttcatat

SEQ ID NO: 28701 - DNA, 25 bp, Probe Sequence
ttcaatgagaacaacaggagagtca

SEQ ID NO: 28702 - DNA, 25 bp, Probe Sequence
aaactgggaatttctggtgacatag

SEQ ID NO: 28703 - DNA, 25 bp, Probe Sequence
gcttcaatgagaacaacaggagagt

SEQ ID NO: 28704 - DNA, 25 bp, Probe Sequence
caaactgggaatttctggtgacata

SEQ ID NO: 28705 - DNA, 25 bp, Probe Sequence
gaatgatgttgccttccactttaac

SEQ ID NO: 28706 - DNA, 25 bp, Probe Sequence
acatagacctcaccagtgcttcata

SEQ ID NO: 28707 - DNA, 25 bp, Probe Sequence
tcatcaatatccctcttgtaagtca

SEQ ID NO: 28708 - DNA, 25 bp, Probe Sequence
tcaatatccctcttgtaagtcatct

SEQ ID NO: 28709 - DNA, 25 bp, Probe Sequence
acctcaccagtgcttcatataccat

SEQ ID NO: 28710 - DNA, 25 bp, Probe Sequence
aatgaaatcagcaaactgggaattt

SEQ ID NO: 28711 - DNA, 25 bp, Probe Sequence
aactgggaatttctggtgacataga

SEQ ID NO: 28712 - DNA, 25 bp, Probe Sequence
caaacagaattgctttagatttcca

SEQ ID NO: 28713 - DNA, 25 bp, Probe Sequence
caccagtgcttcatataccatgata

SEQ ID NO: 28714 - DNA, 25 bp, Probe Sequence
cctcaccagtgcttcatataccatg

SEQ ID NO: 28715 - DNA, 25 bp, Probe Sequence
aaactcaatgaaatcagcaaactgg

SEQ ID NO: 28716 - DNA, 25 bp, Probe Sequence
caatgaaatcagcaaactgggaatt

SEQ ID NO: 28717 - DNA, 25 bp, Probe Sequence
accagtgcttcatataccatgatat

SEQ ID NO: 28718 - DNA, 25 bp, Probe Sequence
aatgatgttgccttccactttaacc

SEQ ID NO: 28719 - DNA, 25 bp, Probe Sequence
ctgattgtgccttataacctgcctt

SEQ ID NO: 28720 - DNA, 25 bp, Probe Sequence
catcaatatccctcttgtaagtcat

SEQ ID NO: 28721 - DNA, 25 bp, Probe Sequence
ggacatatagcctccatcctaatcc

SEQ ID NO: 28722 - DNA, 25 bp, Probe Sequence
atatagcctccatcctaatccctct

SEQ ID NO: 28723 - DNA, 25 bp, Probe Sequence
catatagcctccatcctaatccctc

SEQ ID NO: 28724 - DNA, 25 bp, Probe Sequence
taattctgggaagggagagttcttt

SEQ ID NO: 28725 - DNA, 25 bp, Probe Sequence
gacatatagcctccatcctaatccc

SEQ ID NO: 28726 - DNA, 25 bp, Probe Sequence
acatatagcctccatcctaatccct

SEQ ID NO: 28727 - DNA, 25 bp, Probe Sequence
ctaattctgggaagggagagttctt

SEQ ID NO: 28728 - DNA, 25 bp, Probe Sequence
gagcacagtattatttctccatccc

SEQ ID NO: 28729 - DNA, 25 bp, Probe Sequence
agacttcctctggtaaacattcctc

SEQ ID NO: 28730 - DNA, 25 bp, Probe Sequence
cgagcacagtattatttctccatcc

SEQ ID NO: 28731 - DNA, 25 bp, Probe Sequence
tatagcctccatcctaatccctctg

SEQ ID NO: 28732 - DNA, 25 bp, Probe Sequence
gagacttcctctggtaaacattcct

SEQ ID NO: 28733 - DNA, 25 bp, Probe Sequence
gacttcctctggtaaacattcctcc

SEQ ID NO: 28734 - DNA, 25 bp, Probe Sequence
gcgagcacagtattatttctccatc

SEQ ID NO: 28735 - DNA, 25 bp, Probe Sequence
caagcgagcacagtattatttctcc

SEQ ID NO: 28736 - DNA, 25 bp, Probe Sequence
agcgagcacagtattatttctccat

SEQ ID NO: 28737 - DNA, 25 bp, Probe Sequence
aattctgggaagggagagttctttg

SEQ ID NO: 28738 - DNA, 25 bp, Probe Sequence
aagcgagcacagtattatttctcca

SEQ ID NO: 28739 - DNA, 25 bp, Probe Sequence
tggagacttcctctggtaaacattc

SEQ ID NO: 28740 - DNA, 25 bp, Probe Sequence
ctggagacttcctctggtaaacatt

SEQ ID NO: 28741 - DNA, 25 bp, Probe Sequence
gcaagcgagcacagtattatttctc

SEQ ID NO: 28742 - DNA, 25 bp, Probe Sequence
tccctgtataagacactttgccaag

SEQ ID NO: 28743 - DNA, 25 bp, Probe Sequence
ctccctgtataagacactttgccaa

SEQ ID NO: 28744 - DNA, 25 bp, Probe Sequence
cacagtattatttctccatcccctc

SEQ ID NO: 28745 - DNA, 25 bp, Probe Sequence
aaataccatgcacagagtccttaaa

SEQ ID NO: 28746 - DNA, 25 bp, Probe Sequence
gtcaggtctgatagtcctctgctaa

SEQ ID NO: 28747 - DNA, 25 bp, Probe Sequence
gaaataccatgcacagagtccttaa

SEQ ID NO: 28748 - DNA, 25 bp, Probe Sequence
tctgatagtcctctgctaaaacaac

SEQ ID NO: 28749 - DNA, 25 bp, Probe Sequence
gtctgatagtcctctgctaaaacaa

SEQ ID NO: 28750 - DNA, 25 bp, Probe Sequence
ctgatagtcctctgctaaaacaaca

SEQ ID NO: 28751 - DNA, 25 bp, Probe Sequence
tgatagtcctctgctaaaacaacac

SEQ ID NO: 28752 - DNA, 25 bp, Probe Sequence
tcaggtctgatagtcctctgctaaa

SEQ ID NO: 28753 - DNA, 25 bp, Probe Sequence
ctctgctaaaacaacacgatttaca

SEQ ID NO: 28754 - DNA, 25 bp, Probe Sequence
tctgctaaaacaacacgatttacat

SEQ ID NO: 28755 - DNA, 25 bp, Probe Sequence
cctctgctaaaacaacacgatttac

SEQ ID NO: 28756 - DNA, 25 bp, Probe Sequence
tcctctgctaaaacaacacgattta

SEQ ID NO: 28757 - DNA, 25 bp, Probe Sequence
tgtcaggtctgatagtcctctgcta

SEQ ID NO: 28758 - DNA, 25 bp, Probe Sequence
gatagtcctctgctaaaacaacacg

SEQ ID NO: 28759 - DNA, 25 bp, Probe Sequence
ggtctgatagtcctctgctaaaaca

SEQ ID NO: 28760 - DNA, 25 bp, Probe Sequence
gtcctctgctaaaacaacacgattt

SEQ ID NO: 28761 - DNA, 25 bp, Probe Sequence
tagtcctctgctaaaacaacacgat

SEQ ID NO: 28762 - DNA, 25 bp, Probe Sequence
atagtcctctgctaaaacaacacga

SEQ ID NO: 28763 - DNA, 25 bp, Probe Sequence
ctgctaaaacaacacgatttacata

SEQ ID NO: 28764 - DNA, 25 bp, Probe Sequence
caggaaggattgtttctggtgactg

SEQ ID NO: 28765 - DNA, 25 bp, Probe Sequence
tgctaaaacaacacgatttacataa

SEQ ID NO: 28766 - DNA, 25 bp, Probe Sequence
ggaaataccatgcacagagtcctta

SEQ ID NO: 28767 - DNA, 25 bp, Probe Sequence
agtcctctgctaaaacaacacgatt

SEQ ID NO: 28768 - DNA, 25 bp, Probe Sequence
aggtctgatagtcctctgctaaaac

SEQ ID NO: 28769 - DNA, 25 bp, Probe Sequence
tccaagacctcatcaacaattaaga

SEQ ID NO: 28770 - DNA, 25 bp, Probe Sequence
ccatagagaagagtaacagtgtgaa

SEQ ID NO: 28771 - DNA, 25 bp, Probe Sequence
ctccaagacctcatcaacaattaag

SEQ ID NO: 28772 - DNA, 25 bp, Probe Sequence
tccatagagaagagtaacagtgtga

SEQ ID NO: 28773 - DNA, 25 bp, Probe Sequence
tagagaagagtaacagtgtgaagaa

SEQ ID NO: 28774 - DNA, 25 bp, Probe Sequence
gctccaagacctcatcaacaattaa

SEQ ID NO: 28775 - DNA, 25 bp, Probe Sequence
atagagaagagtaacagtgtgaaga

SEQ ID NO: 28776 - DNA, 25 bp, Probe Sequence
catagagaagagtaacagtgtgaag

SEQ ID NO: 28777 - DNA, 25 bp, Probe Sequence
caagacctcatcaacaattaagagc

SEQ ID NO: 28778 - DNA, 25 bp, Probe Sequence
ctccatagagaagagtaacagtgtg

SEQ ID NO: 28779 - DNA, 25 bp, Probe Sequence
aagacctcatcaacaattaagagca

SEQ ID NO: 28780 - DNA, 25 bp, Probe Sequence
ccaagacctcatcaacaattaagag

SEQ ID NO: 28781 - DNA, 25 bp, Probe Sequence
agacctcatcaacaattaagagcac

SEQ ID NO: 28782 - DNA, 25 bp, Probe Sequence
gctccatagagaagagtaacagtgt

SEQ ID NO: 28783 - DNA, 25 bp, Probe Sequence
gacctcatcaacaattaagagcacc

SEQ ID NO: 28784 - DNA, 25 bp, Probe Sequence
ggctccaagacctcatcaacaatta

SEQ ID NO: 28785 - DNA, 25 bp, Probe Sequence
aagtatgagaaggtgcttgtggaag

SEQ ID NO: 28786 - DNA, 25 bp, Probe Sequence
gaagtatgagaaggtgcttgtggaa

SEQ ID NO: 28787 - DNA, 25 bp, Probe Sequence
gaagagtaacagtgtgaagaaatcc

SEQ ID NO: 28788 - DNA, 25 bp, Probe Sequence
agagaagagtaacagtgtgaagaaa

SEQ ID NO: 28789 - DNA, 25 bp, Probe Sequence
aagagtaacagtgtgaagaaatccc

SEQ ID NO: 28790 - DNA, 25 bp, Probe Sequence
atctgggaagaggtataagtttgtg

SEQ ID NO: 28791 - DNA, 25 bp, Probe Sequence
catctgggaagaggtataagtttgt

SEQ ID NO: 28792 - DNA, 25 bp, Probe Sequence
cgctccatagagaagagtaacagtg

SEQ ID NO: 28793 - DNA, 25 bp, Probe Sequence
gtatgtcgcaggcattactaatctg

SEQ ID NO: 28794 - DNA, 25 bp, Probe Sequence
tatgtcgcaggcattactaatctga

SEQ ID NO: 28795 - DNA, 25 bp, Probe Sequence
cagtatgtcgcaggcattactaatc

SEQ ID NO: 28796 - DNA, 25 bp, Probe Sequence
agtatgtcgcaggcattactaatct

SEQ ID NO: 28797 - DNA, 25 bp, Probe Sequence
atgtcgcaggcattactaatctgaa

SEQ ID NO: 28798 - DNA, 25 bp, Probe Sequence
acagtatgtcgcaggcattactaat

SEQ ID NO: 28799 - DNA, 25 bp, Probe Sequence
ttgcttattccagtctgaaaccaaa

SEQ ID NO: 28800 - DNA, 25 bp, Probe Sequence
tttgcttattccagtctgaaaccaa

SEQ ID NO: 28801 - DNA, 25 bp, Probe Sequence
aatttgggagaaatggatctgactg

SEQ ID NO: 28802 - DNA, 25 bp, Probe Sequence
aaataacaatgaggcatgggctaag

SEQ ID NO: 28803 - DNA, 25 bp, Probe Sequence
gaaataacaatgaggcatgggctaa

SEQ ID NO: 28804 - DNA, 25 bp, Probe Sequence
cacagtatgtcgcaggcattactaa

SEQ ID NO: 28805 - DNA, 25 bp, Probe Sequence
cttctgttcaatgacaacactgagt

SEQ ID NO: 28806 - DNA, 25 bp, Probe Sequence
ttacaattccctgctgtcgtcttag

SEQ ID NO: 28807 - DNA, 25 bp, Probe Sequence
cttacaattccctgctgtcgtctta

SEQ ID NO: 28808 - DNA, 25 bp, Probe Sequence
gctaaatttgggagaaatggatctg

SEQ ID NO: 28809 - DNA, 25 bp, Probe Sequence
aaatttgggagaaatggatctgact

SEQ ID NO: 28810 - DNA, 25 bp, Probe Sequence
tgtcgcaggcattactaatctgaaa

SEQ ID NO: 28811 - DNA, 25 bp, Probe Sequence
caacaggctaaatttgggagaaatg

SEQ ID NO: 28812 - DNA, 25 bp, Probe Sequence
taaatttgggagaaatggatctgac

SEQ ID NO: 28813 - DNA, 25 bp, Probe Sequence
ggctaaatttgggagaaatggatct

SEQ ID NO: 28814 - DNA, 25 bp, Probe Sequence
aggctaaatttgggagaaatggatc

SEQ ID NO: 28815 - DNA, 25 bp, Probe Sequence
aaccttctgttcaatgacaacactg

SEQ ID NO: 28816 - DNA, 25 bp, Probe Sequence
ctcaggaagtaaaaccgaagaagat

SEQ ID NO: 28817 - DNA, 25 bp, Probe Sequence
cctgtctctcttctaactctctact

SEQ ID NO: 28818 - DNA, 25 bp, Probe Sequence
acacacacatatacacgaatagaca

SEQ ID NO: 28819 - DNA, 25 bp, Probe Sequence
caagaacacacacatatacacgaat

SEQ ID NO: 28820 - DNA, 25 bp, Probe Sequence
atcacaagaacacacacatatacac

SEQ ID NO: 28821 - DNA, 25 bp, Probe Sequence
catcacaagaacacacacatataca

SEQ ID NO: 28822 - DNA, 25 bp, Probe Sequence
acaagaacacacacatatacacgaa

SEQ ID NO: 28823 - DNA, 25 bp, Probe Sequence
tcatcacaagaacacacacatatac

SEQ ID NO: 28824 - DNA, 25 bp, Probe Sequence
aacacacacatatacacgaatagac

SEQ ID NO: 28825 - DNA, 25 bp, Probe Sequence
cacacacatatacacgaatagacat

SEQ ID NO: 28826 - DNA, 25 bp, Probe Sequence
gaacacacacatatacacgaataga

SEQ ID NO: 28827 - DNA, 25 bp, Probe Sequence
agaacacacacatatacacgaatag

SEQ ID NO: 28828 - DNA, 25 bp, Probe Sequence
tgttgctaacgaagtcactcttaat

SEQ ID NO: 28829 - DNA, 25 bp, Probe Sequence
cacaagaacacacacatatacacga

SEQ ID NO: 28830 - DNA, 25 bp, Probe Sequence
tcacaagaacacacacatatacacg

SEQ ID NO: 28831 - DNA, 25 bp, Probe Sequence
gttgctaacgaagtcactcttaatt

SEQ ID NO: 28832 - DNA, 25 bp, Probe Sequence
cacacatatacacgaatagacatca

SEQ ID NO: 28833 - DNA, 25 bp, Probe Sequence
acacacatatacacgaatagacatc

SEQ ID NO: 28834 - DNA, 25 bp, Probe Sequence
ctgtctctcttctaactctctactt

SEQ ID NO: 28835 - DNA, 25 bp, Probe Sequence
cattatcctactccaagatcaagca

SEQ ID NO: 28836 - DNA, 25 bp, Probe Sequence
agacaacaataagatcagcaacatc

SEQ ID NO: 28837 - DNA, 25 bp, Probe Sequence
aagaacacacacatatacacgaata

SEQ ID NO: 28838 - DNA, 25 bp, Probe Sequence
ttatcctactccaagatcaagcatt

SEQ ID NO: 28839 - DNA, 25 bp, Probe Sequence
gacaacaataagatcagcaacatcc

SEQ ID NO: 28840 - DNA, 25 bp, Probe Sequence
ttcatcacaagaacacacacatata

SEQ ID NO: 28841 - DNA, 25 bp, Probe Sequence
taatcttgctctgcttgacaacatc

SEQ ID NO: 28842 - DNA, 25 bp, Probe Sequence
gtaatcttgctctgcttgacaacat

SEQ ID NO: 28843 - DNA, 25 bp, Probe Sequence
ttctgtactcttagatggattctcc

SEQ ID NO: 28844 - DNA, 25 bp, Probe Sequence
aggctaaattactcaggaagaacac

SEQ ID NO: 28845 - DNA, 25 bp, Probe Sequence
atttctttgtgctttggcttacttg

SEQ ID NO: 28846 - DNA, 25 bp, Probe Sequence
catttctttgtgctttggcttactt

SEQ ID NO: 28847 - DNA, 25 bp, Probe Sequence
gtttacaaatggacataggactcaa

SEQ ID NO: 28848 - DNA, 25 bp, Probe Sequence
ttacaaatggacataggactcaaag

SEQ ID NO: 28849 - DNA, 25 bp, Probe Sequence
aatggacataggactcaaagtttca

SEQ ID NO: 28850 - DNA, 25 bp, Probe Sequence
acaaatggacataggactcaaagtt

SEQ ID NO: 28851 - DNA, 25 bp, Probe Sequence
aatcttgctctgcttgacaacatct

SEQ ID NO: 28852 - DNA, 25 bp, Probe Sequence
tacaaatggacataggactcaaagt

SEQ ID NO: 28853 - DNA, 25 bp, Probe Sequence
gctaaattactcaggaagaacaccc

SEQ ID NO: 28854 - DNA, 25 bp, Probe Sequence
ggctaaattactcaggaagaacacc

SEQ ID NO: 28855 - DNA, 25 bp, Probe Sequence
atggacataggactcaaagtttcag

SEQ ID NO: 28856 - DNA, 25 bp, Probe Sequence
caaatggacataggactcaaagttt

SEQ ID NO: 28857 - DNA, 25 bp, Probe Sequence
attctgtactcttagatggattctc

SEQ ID NO: 28858 - DNA, 25 bp, Probe Sequence
gacataggactcaaagtttcagaga

SEQ ID NO: 28859 - DNA, 25 bp, Probe Sequence
tttacaaatggacataggactcaaa

SEQ ID NO: 28860 - DNA, 25 bp, Probe Sequence
acataggactcaaagtttcagagac

SEQ ID NO: 28861 - DNA, 25 bp, Probe Sequence
aaatggacataggactcaaagtttc

SEQ ID NO: 28862 - DNA, 25 bp, Probe Sequence
agaggctaaattactcaggaagaac

SEQ ID NO: 28863 - DNA, 25 bp, Probe Sequence
gaggctaaattactcaggaagaaca

SEQ ID NO: 28864 - DNA, 25 bp, Probe Sequence
cataggactcaaagtttcagagacc

SEQ ID NO: 28865 - DNA, 25 bp, Probe Sequence
tgtgataagtggaatggttactgtt

SEQ ID NO: 28866 - DNA, 25 bp, Probe Sequence
ctgtgataagtggaatggttactgt

SEQ ID NO: 28867 - DNA, 25 bp, Probe Sequence
acgatcatagtcttaggagttcatt

SEQ ID NO: 28868 - DNA, 25 bp, Probe Sequence
tgtaccagtcagtgattaagtagaa

SEQ ID NO: 28869 - DNA, 25 bp, Probe Sequence
tgtgtagcatcttgtctatcatgtt

SEQ ID NO: 28870 - DNA, 25 bp, Probe Sequence
ttgtgtagcatcttgtctatcatgt

SEQ ID NO: 28871 - DNA, 25 bp, Probe Sequence
accagtcagtgattaagtagaacta

SEQ ID NO: 28872 - DNA, 25 bp, Probe Sequence
taccagtcagtgattaagtagaact

SEQ ID NO: 28873 - DNA, 25 bp, Probe Sequence
gtaccagtcagtgattaagtagaac

SEQ ID NO: 28874 - DNA, 25 bp, Probe Sequence
aacgatcatagtcttaggagttcat

SEQ ID NO: 28875 - DNA, 25 bp, Probe Sequence
gctgtgataagtggaatggttactg

SEQ ID NO: 28876 - DNA, 25 bp, Probe Sequence
ttgacttagagatggaatgtaactt

SEQ ID NO: 28877 - DNA, 25 bp, Probe Sequence
cacttatctcatgttagctgtacca

SEQ ID NO: 28878 - DNA, 25 bp, Probe Sequence
tcacttatctcatgttagctgtacc

SEQ ID NO: 28879 - DNA, 25 bp, Probe Sequence
ccagtcagtgattaagtagaactac

SEQ ID NO: 28880 - DNA, 25 bp, Probe Sequence
acaacactacaagtcttgagttaag

SEQ ID NO: 28881 - DNA, 25 bp, Probe Sequence
ctgtaccagtcagtgattaagtaga

SEQ ID NO: 28882 - DNA, 25 bp, Probe Sequence
gctgtaccagtcagtgattaagtag

SEQ ID NO: 28883 - DNA, 25 bp, Probe Sequence
aagctgtgataagtggaatggttac

SEQ ID NO: 28884 - DNA, 25 bp, Probe Sequence
caagctgtgataagtggaatggtta

SEQ ID NO: 28885 - DNA, 25 bp, Probe Sequence
aggctttattgtttattgctggttt

SEQ ID NO: 28886 - DNA, 25 bp, Probe Sequence
ggaatggttactgtttatactgtgg

SEQ ID NO: 28887 - DNA, 25 bp, Probe Sequence
ttcacttatctcatgttagctgtac

SEQ ID NO: 28888 - DNA, 25 bp, Probe Sequence
taggctttattgtttattgctggtt

SEQ ID NO: 28889 - DNA, 25 bp, Probe Sequence
cttcttgtaaacttacggacacctc

SEQ ID NO: 28890 - DNA, 25 bp, Probe Sequence
aaatcccttcttgtaaacttacgga

SEQ ID NO: 28891 - DNA, 25 bp, Probe Sequence
aatcccttcttgtaaacttacggac

SEQ ID NO: 28892 - DNA, 25 bp, Probe Sequence
atcccttcttgtaaacttacggaca

SEQ ID NO: 28893 - DNA, 25 bp, Probe Sequence
ccttcttgtaaacttacggacacct

SEQ ID NO: 28894 - DNA, 25 bp, Probe Sequence
tcccttcttgtaaacttacggacac

SEQ ID NO: 28895 - DNA, 25 bp, Probe Sequence
aaaatcccttcttgtaaacttacgg

SEQ ID NO: 28896 - DNA, 25 bp, Probe Sequence
cccttcttgtaaacttacggacacc

SEQ ID NO: 28897 - DNA, 25 bp, Probe Sequence
ctgaacaagaccaaatcgctggttg

SEQ ID NO: 28898 - DNA, 25 bp, Probe Sequence
gaacaagaccaaatcgctggttgtg

SEQ ID NO: 28899 - DNA, 25 bp, Probe Sequence
cttcttgtaaacttacggacacctc

SEQ ID NO: 28900 - DNA, 25 bp, Probe Sequence
aaatcccttcttgtaaacttacgga

SEQ ID NO: 28901 - DNA, 25 bp, Probe Sequence
aatcccttcttgtaaacttacggac

SEQ ID NO: 28902 - DNA, 25 bp, Probe Sequence
atcccttcttgtaaacttacggaca

SEQ ID NO: 28903 - DNA, 25 bp, Probe Sequence
ccttcttgtaaacttacggacacct

SEQ ID NO: 28904 - DNA, 25 bp, Probe Sequence
tcccttcttgtaaacttacggacac

SEQ ID NO: 28905 - DNA, 25 bp, Probe Sequence
aaaatcccttcttgtaaacttacgg

SEQ ID NO: 28906 - DNA, 25 bp, Probe Sequence
cccttcttgtaaacttacggacacc

SEQ ID NO: 28907 - DNA, 25 bp, Probe Sequence
ctgaacaagaccaaatcgctggttg

SEQ ID NO: 28908 - DNA, 25 bp, Probe Sequence
gaacaagaccaaatcgctggttgtg

SEQ ID NO: 28909 - DNA, 25 bp, Probe Sequence
tgaaagtcctcagtaagtgttagag

SEQ ID NO: 28910 - DNA, 25 bp, Probe Sequence
atgaaagtcctcagtaagtgttaga

SEQ ID NO: 28911 - DNA, 25 bp, Probe Sequence
tctacatgaaagtcctcagtaagtg

SEQ ID NO: 28912 - DNA, 25 bp, Probe Sequence
gtctacatgaaagtcctcagtaagt

SEQ ID NO: 28913 - DNA, 25 bp, Probe Sequence
tgtctacatgaaagtcctcagtaag

SEQ ID NO: 28914 - DNA, 25 bp, Probe Sequence
atgtctacatgaaagtcctcagtaa

SEQ ID NO: 28915 - DNA, 25 bp, Probe Sequence
catgaaagtcctcagtaagtgttag

SEQ ID NO: 28916 - DNA, 25 bp, Probe Sequence
ctacatgaaagtcctcagtaagtgt

SEQ ID NO: 28917 - DNA, 25 bp, Probe Sequence
acatgaaagtcctcagtaagtgtta

SEQ ID NO: 28918 - DNA, 25 bp, Probe Sequence
tacatgaaagtcctcagtaagtgtt

SEQ ID NO: 28919 - DNA, 25 bp, Probe Sequence
gtatgctgcttttcttttctaacca

SEQ ID NO: 28920 - DNA, 25 bp, Probe Sequence
tgtatgctgcttttcttttctaacc

SEQ ID NO: 28921 - DNA, 25 bp, Probe Sequence
gtgtgtatgctgcttttcttttcta

SEQ ID NO: 28922 - DNA, 25 bp, Probe Sequence
tatgctgcttttcttttctaaccaa

SEQ ID NO: 28923 - DNA, 25 bp, Probe Sequence
tgtgtatgctgcttttcttttctaa

SEQ ID NO: 28924 - DNA, 25 bp, Probe Sequence
gtgtatgctgcttttcttttctaac

SEQ ID NO: 28925 - DNA, 25 bp, Probe Sequence
attttgttgtgtgtatgctgctttt

SEQ ID NO: 28926 - DNA, 25 bp, Probe Sequence
ttgtgtgtatgctgcttttcttttc

SEQ ID NO: 28927 - DNA, 25 bp, Probe Sequence
atgctgcttttcttttctaaccaag

SEQ ID NO: 28928 - DNA, 25 bp, Probe Sequence
gttttgccattttgttgtgtgtatg

SEQ ID NO: 28929 - DNA, 25 bp, Probe Sequence
gttgtgtgtatgctgcttttctttt

SEQ ID NO: 28930 - DNA, 25 bp, Probe Sequence
ggttttgccattttgttgtgtgtat

SEQ ID NO: 28931 - DNA, 25 bp, Probe Sequence
ttttgttgtgtgtatgctgcttttc

SEQ ID NO: 28932 - DNA, 25 bp, Probe Sequence
tgtgtgtatgctgcttttcttttct

SEQ ID NO: 28933 - DNA, 25 bp, Probe Sequence
caatattaaaattcaccacttcaga

SEQ ID NO: 28934 - DNA, 25 bp, Probe Sequence
aatattaaaattcaccacttcagag

SEQ ID NO: 28935 - DNA, 25 bp, Probe Sequence
atcaagtgaacattacattgccatt

SEQ ID NO: 28936 - DNA, 25 bp, Probe Sequence
gatcaagtgaacattacattgccat

SEQ ID NO: 28937 - DNA, 25 bp, Probe Sequence
acagatcaagtgaacattacattgc

SEQ ID NO: 28938 - DNA, 25 bp, Probe Sequence
tgttggagtattattgaagatgtga

SEQ ID NO: 28939 - DNA, 25 bp, Probe Sequence
cagatcaagtgaacattacattgcc

SEQ ID NO: 28940 - DNA, 25 bp, Probe Sequence
agatcaagtgaacattacattgcca

SEQ ID NO: 28941 - DNA, 25 bp, Probe Sequence
ttgttggagtattattgaagatgtg

SEQ ID NO: 28942 - DNA, 25 bp, Probe Sequence
acacagatcaagtgaacattacatt

SEQ ID NO: 28943 - DNA, 25 bp, Probe Sequence
aacacagatcaagtgaacattacat

SEQ ID NO: 28944 - DNA, 25 bp, Probe Sequence
cacagatcaagtgaacattacattg

SEQ ID NO: 28945 - DNA, 25 bp, Probe Sequence
taacacagatcaagtgaacattaca

SEQ ID NO: 28946 - DNA, 25 bp, Probe Sequence
tcaagtgaacattacattgccattt

SEQ ID NO: 28947 - DNA, 25 bp, Probe Sequence
gttggagtattattgaagatgtgat

SEQ ID NO: 28948 - DNA, 25 bp, Probe Sequence
gggattacaggcttgaaagtctaac

SEQ ID NO: 28949 - DNA, 25 bp, Probe Sequence
ggattacaggcttgaaagtctaact

SEQ ID NO: 28950 - DNA, 25 bp, Probe Sequence
tgggattacaggcttgaaagtctaa

SEQ ID NO: 28951 - DNA, 25 bp, Probe Sequence
ttaatgttagtgatccacctgcctc

SEQ ID NO: 28952 - DNA, 25 bp, Probe Sequence
ttaacacagatcaagtgaacattac

SEQ ID NO: 28953 - DNA, 25 bp, Probe Sequence
gttgtgaatttagggtgttaaactt

SEQ ID NO: 28954 - DNA, 25 bp, Probe Sequence
ttggagtattattgaagatgtgatc

SEQ ID NO: 28955 - DNA, 25 bp, Probe Sequence
aagaaatgtactactaaagagcact

SEQ ID NO: 28956 - DNA, 25 bp, Probe Sequence
ctgggattacaggcttgaaagtcta

SEQ ID NO: 28957 - DNA, 25 bp, Probe Sequence
ttgtgaatttagggtgttaaacttt

SEQ ID NO: 28958 - DNA, 25 bp, Probe Sequence
tagttgtgaatttagggtgttaaac

SEQ ID NO: 28959 - DNA, 25 bp, Probe Sequence
atccagatgaatatccgagatgttg

SEQ ID NO: 28960 - DNA, 25 bp, Probe Sequence
ccagatgaatatccgagatgttgaa

SEQ ID NO: 28961 - DNA, 25 bp, Probe Sequence
ccaatatccagatgaatatccgaga

SEQ ID NO: 28962 - DNA, 25 bp, Probe Sequence
gaggatgaatcagagacagaagatg

SEQ ID NO: 28963 - DNA, 25 bp, Probe Sequence
cagagacagaagatgaagaggagaa

SEQ ID NO: 28964 - DNA, 25 bp, Probe Sequence
tccagatgaatatccgagatgttga

SEQ ID NO: 28965 - DNA, 25 bp, Probe Sequence
tatccagatgaatatccgagatgtt

SEQ ID NO: 28966 - DNA, 25 bp, Probe Sequence
cagatgaatatccgagatgttgaat

SEQ ID NO: 28967 - DNA, 25 bp, Probe Sequence
atatccagatgaatatccgagatgt

SEQ ID NO: 28968 - DNA, 25 bp, Probe Sequence
tgaatcagagacagaagatgaagag

SEQ ID NO: 28969 - DNA, 25 bp, Probe Sequence
ggatgaatcagagacagaagatgaa

SEQ ID NO: 28970 - DNA, 25 bp, Probe Sequence
gtaagaagcgaagtgaggatgaatc

SEQ ID NO: 28971 - DNA, 25 bp, Probe Sequence
gaatcagagacagaagatgaagagg

SEQ ID NO: 28972 - DNA, 25 bp, Probe Sequence
aatcagagacagaagatgaagagga

SEQ ID NO: 28973 - DNA, 25 bp, Probe Sequence
aggatgaatcagagacagaagatga

SEQ ID NO: 28974 - DNA, 25 bp, Probe Sequence
tgaggatgaatcagagacagaagat

SEQ ID NO: 28975 - DNA, 25 bp, Probe Sequence
atgaatcagagacagaagatgaaga

SEQ ID NO: 28976 - DNA, 25 bp, Probe Sequence
gatgaatcagagacagaagatgaag

SEQ ID NO: 28977 - DNA, 25 bp, Probe Sequence
atcagagacagaagatgaagaggag

SEQ ID NO: 28978 - DNA, 25 bp, Probe Sequence
aagtgaggatgaatcagagacagaa

SEQ ID NO: 28979 - DNA, 25 bp, Probe Sequence
gtgaggatgaatcagagacagaaga

SEQ ID NO: 28980 - DNA, 25 bp, Probe Sequence
agtgaggatgaatcagagacagaag

SEQ ID NO: 28981 - DNA, 25 bp, Probe Sequence
gaagtgaggatgaatcagagacaga

SEQ ID NO: 28982 - DNA, 25 bp, Probe Sequence
aatatccagatgaatatccgagatg

SEQ ID NO: 28983 - DNA, 25 bp, Probe Sequence
ttggaggaagtatgagtgctgattc

SEQ ID NO: 28984 - DNA, 25 bp, Probe Sequence
cttggaggaagtatgagtgctgatt

SEQ ID NO: 28985 - DNA, 25 bp, Probe Sequence
ggaggaagtatgagtgctgattcaa

SEQ ID NO: 28986 - DNA, 25 bp, Probe Sequence
gtatgagtgctgattcaaaccaaag

SEQ ID NO: 28987 - DNA, 25 bp, Probe Sequence
gaggaagtatgagtgctgattcaaa

SEQ ID NO: 28988 - DNA, 25 bp, Probe Sequence
agtatgagtgctgattcaaaccaaa

SEQ ID NO: 28989 - DNA, 25 bp, Probe Sequence
aagtatgagtgctgattcaaaccaa

SEQ ID NO: 28990 - DNA, 25 bp, Probe Sequence
aggaagtatgagtgctgattcaaac

SEQ ID NO: 28991 - DNA, 25 bp, Probe Sequence
gaagtatgagtgctgattcaaacca

SEQ ID NO: 28992 - DNA, 25 bp, Probe Sequence
tggaggaagtatgagtgctgattca

SEQ ID NO: 28993 - DNA, 25 bp, Probe Sequence
ggaagtatgagtgctgattcaaacc

SEQ ID NO: 28994 - DNA, 25 bp, Probe Sequence
cttcctcctctgtgtcaacatctct

SEQ ID NO: 28995 - DNA, 25 bp, Probe Sequence
catcagtagtgtcaccttctaccac

SEQ ID NO: 28996 - DNA, 25 bp, Probe Sequence
acatcagtagtgtcaccttctacca

SEQ ID NO: 28997 - DNA, 25 bp, Probe Sequence
ttcctcctctgtgtcaacatctctg

SEQ ID NO: 28998 - DNA, 25 bp, Probe Sequence
tcctataataaaatggcaccttccc

SEQ ID NO: 28999 - DNA, 25 bp, Probe Sequence
gcttggaggaagtatgagtgctgat

SEQ ID NO: 29000 - DNA, 25 bp, Probe Sequence
cctataataaaatggcaccttcccc

SEQ ID NO: 29001 - DNA, 25 bp, Probe Sequence
ttcctataataaaatggcaccttcc

SEQ ID NO: 29002 - DNA, 25 bp, Probe Sequence
atcagtagtgtcaccttctaccacc

SEQ ID NO: 29003 - DNA, 25 bp, Probe Sequence
agacggagagatataaaggtcccag

SEQ ID NO: 29004 - DNA, 25 bp, Probe Sequence
gagacggagagatataaaggtccca

SEQ ID NO: 29005 - DNA, 25 bp, Probe Sequence
tatgagtgctgattcaaaccaaagc

SEQ ID NO: 29006 - DNA, 25 bp, Probe Sequence
gttcctataataaaatggcaccttc

SEQ ID NO: 29007 - DNA, 25 bp, Probe Sequence
gacttaggagatgctgttgttgatg

SEQ ID NO: 29008 - DNA, 25 bp, Probe Sequence
tgacttaggagatgctgttgttgat

SEQ ID NO: 29009 - DNA, 25 bp, Probe Sequence
ttgacttaggagatgctgttgttga

SEQ ID NO: 29010 - DNA, 25 bp, Probe Sequence
ttaggagatgctgttgttgatggag

SEQ ID NO: 29011 - DNA, 25 bp, Probe Sequence
cttaggagatgctgttgttgatgga

SEQ ID NO: 29012 - DNA, 25 bp, Probe Sequence
tagagaaatagaagattgtcggcag

SEQ ID NO: 29013 - DNA, 25 bp, Probe Sequence
ttagagaaatagaagattgtcggca

SEQ ID NO: 29014 - DNA, 25 bp, Probe Sequence
acttaggagatgctgttgttgatgg

SEQ ID NO: 29015 - DNA, 25 bp, Probe Sequence
gaaatagaagattgtcggcagaaac

SEQ ID NO: 29016 - DNA, 25 bp, Probe Sequence
agaaatagaagattgtcggcagaaa

SEQ ID NO: 29017 - DNA, 25 bp, Probe Sequence
gagaaatagaagattgtcggcagaa

SEQ ID NO: 29018 - DNA, 25 bp, Probe Sequence
tttagagaaatagaagattgtcggc

SEQ ID NO: 29019 - DNA, 25 bp, Probe Sequence
gtaagcccttcaatttgtttcttca

SEQ ID NO: 29020 - DNA, 25 bp, Probe Sequence
ctttgacttaggagatgctgttgtt

SEQ ID NO: 29021 - DNA, 25 bp, Probe Sequence
gatgactttgacttaggagatgctg

SEQ ID NO: 29022 - DNA, 25 bp, Probe Sequence
cggatgatgtttactaacgatgaat

SEQ ID NO: 29023 - DNA, 25 bp, Probe Sequence
aagcccttcaatttgtttcttcaat

SEQ ID NO: 29024 - DNA, 25 bp, Probe Sequence
ggtaagcccttcaatttgtttcttc

SEQ ID NO: 29025 - DNA, 25 bp, Probe Sequence
agaatcttggctgtttacaaatcac

SEQ ID NO: 29026 - DNA, 25 bp, Probe Sequence
agagaaatagaagattgtcggcaga

SEQ ID NO: 29027 - DNA, 25 bp, Probe Sequence
tttgacttaggagatgctgttgttg

SEQ ID NO: 29028 - DNA, 25 bp, Probe Sequence
taagcccttcaatttgtttcttcaa

SEQ ID NO: 29029 - DNA, 25 bp, Probe Sequence
taagtccctgtaactcaaatgtcaa

SEQ ID NO: 29030 - DNA, 25 bp, Probe Sequence
ttaagtccctgtaactcaaatgtca

SEQ ID NO: 29031 - DNA, 25 bp, Probe Sequence
tacatcaactattacgacatgaacg

SEQ ID NO: 29032 - DNA, 25 bp, Probe Sequence
ggtctacatcaactattacgacatg

SEQ ID NO: 29033 - DNA, 25 bp, Probe Sequence
acatcaactattacgacatgaacgc

SEQ ID NO: 29034 - DNA, 25 bp, Probe Sequence
acagggtctacatcaactattacga

SEQ ID NO: 29035 - DNA, 25 bp, Probe Sequence
gtctacatcaactattacgacatga

SEQ ID NO: 29036 - DNA, 25 bp, Probe Sequence
ctacatcaactattacgacatgaac

SEQ ID NO: 29037 - DNA, 25 bp, Probe Sequence
tctacatcaactattacgacatgaa

SEQ ID NO: 29038 - DNA, 25 bp, Probe Sequence
gggtctacatcaactattacgacat

SEQ ID NO: 29039 - DNA, 25 bp, Probe Sequence
ggacagggtctacatcaactattac

SEQ ID NO: 29040 - DNA, 25 bp, Probe Sequence
cagggtctacatcaactattacgac

SEQ ID NO: 29041 - DNA, 25 bp, Probe Sequence
gacagggtctacatcaactattacg

SEQ ID NO: 29042 - DNA, 25 bp, Probe Sequence
agggtctacatcaactattacgaca

SEQ ID NO: 29043 - DNA, 25 bp, Probe Sequence
gggagaaataaacggtttagagact

SEQ ID NO: 29044 - DNA, 25 bp, Probe Sequence
cggacagggtctacatcaactatta

SEQ ID NO: 29045 - DNA, 25 bp, Probe Sequence
ggggagaaataaacggtttagagac

SEQ ID NO: 29046 - DNA, 25 bp, Probe Sequence
tggggagaaataaacggtttagaga

SEQ ID NO: 29047 - DNA, 25 bp, Probe Sequence
gtggggagaaataaacggtttagag

SEQ ID NO: 29048 - DNA, 25 bp, Probe Sequence
catcaactattacgacatgaacgcg

SEQ ID NO: 29049 - DNA, 25 bp, Probe Sequence
gaacaactccaccttcgcctaagag

SEQ ID NO: 29050 - DNA, 25 bp, Probe Sequence
ggtggggagaaataaacggtttaga

SEQ ID NO: 29051 - DNA, 25 bp, Probe Sequence
tggtggggagaaataaacggtttag

SEQ ID NO: 29052 - DNA, 25 bp, Probe Sequence
ctggtggggagaaataaacggttta

SEQ ID NO: 29053 - DNA, 25 bp, Probe Sequence
atcaactattacgacatgaacgcgg

SEQ ID NO: 29054 - DNA, 25 bp, Probe Sequence
aaccttctggtggggagaaataaac

SEQ ID NO: 29055 - DNA, 25 bp, Probe Sequence
ttcagagagtacaacttacatcgtg

SEQ ID NO: 29056 - DNA, 25 bp, Probe Sequence
ttgtggcttatggattcatataggc

SEQ ID NO: 29057 - DNA, 25 bp, Probe Sequence
cagagagtacaacttacatcgtgtt

SEQ ID NO: 29058 - DNA, 25 bp, Probe Sequence
tcagagagtacaacttacatcgtgt

SEQ ID NO: 29059 - DNA, 25 bp, Probe Sequence
gctaacctttgatgctataactacg

SEQ ID NO: 29060 - DNA, 25 bp, Probe Sequence
gcttcagtgacaaacatatcctttc

SEQ ID NO: 29061 - DNA, 25 bp, Probe Sequence
ataggcaagggataactcttctaac

SEQ ID NO: 29062 - DNA, 25 bp, Probe Sequence
gacaaacatatcctttcaagacaga

SEQ ID NO: 29063 - DNA, 25 bp, Probe Sequence
gcaagggataactcttctaacacaa

SEQ ID NO: 29064 - DNA, 25 bp, Probe Sequence
taggcaagggataactcttctaaca

SEQ ID NO: 29065 - DNA, 25 bp, Probe Sequence
gataggcaagggataactcttctaa

SEQ ID NO: 29066 - DNA, 25 bp, Probe Sequence
acctttgatgctataactacgattc

SEQ ID NO: 29067 - DNA, 25 bp, Probe Sequence
ggataggcaagggataactcttcta

SEQ ID NO: 29068 - DNA, 25 bp, Probe Sequence
tcaagtttgtggcttatggattcat

SEQ ID NO: 29069 - DNA, 25 bp, Probe Sequence
tgtttggaataaagtcaaccttgtt

SEQ ID NO: 29070 - DNA, 25 bp, Probe Sequence
ctttgatgctataactacgattcgg

SEQ ID NO: 29071 - DNA, 25 bp, Probe Sequence
cctttgatgctataactacgattcg

SEQ ID NO: 29072 - DNA, 25 bp, Probe Sequence
atgtttggaataaagtcaaccttgt

SEQ ID NO: 29073 - DNA, 25 bp, Probe Sequence
aagtcaagtttgtggcttatggatt

SEQ ID NO: 29074 - DNA, 25 bp, Probe Sequence
aaagtcaagtttgtggcttatggat

SEQ ID NO: 29075 - DNA, 25 bp, Probe Sequence
gtgacaaacatatcctttcaagaca

SEQ ID NO: 29076 - DNA, 25 bp, Probe Sequence
caagggataactcttctaacacaaa

SEQ ID NO: 29077 - DNA, 25 bp, Probe Sequence
aacctttgatgctataactacgatt

SEQ ID NO: 29078 - DNA, 25 bp, Probe Sequence
gaccaacaatttcagagagtacaac

SEQ ID NO: 29079 - DNA, 25 bp, Probe Sequence
gaacttgagcgtgaatctgtatctt

SEQ ID NO: 29080 - DNA, 25 bp, Probe Sequence
atatgaagttactagcaaggacctc

SEQ ID NO: 29081 - DNA, 25 bp, Probe Sequence
aacttgagcgtgaatctgtatcttg

SEQ ID NO: 29082 - DNA, 25 bp, Probe Sequence
caagtgactgtatctgtgtagacta

SEQ ID NO: 29083 - DNA, 25 bp, Probe Sequence
ttccgcctgtctcaagatgatataa

SEQ ID NO: 29084 - DNA, 25 bp, Probe Sequence
gacaagtgactgtatctgtgtagac

SEQ ID NO: 29085 - DNA, 25 bp, Probe Sequence
agacaagtgactgtatctgtgtaga

SEQ ID NO: 29086 - DNA, 25 bp, Probe Sequence
tatgaagttactagcaaggacctcg

SEQ ID NO: 29087 - DNA, 25 bp, Probe Sequence
acaagtgactgtatctgtgtagact

SEQ ID NO: 29088 - DNA, 25 bp, Probe Sequence
agtgactgtatctgtgtagactatt

SEQ ID NO: 29089 - DNA, 25 bp, Probe Sequence
aagtgactgtatctgtgtagactat

SEQ ID NO: 29090 - DNA, 25 bp, Probe Sequence
gagatatgtagaaggcacaatatgg

SEQ ID NO: 29091 - DNA, 25 bp, Probe Sequence
gttccgcctgtctcaagatgatata

SEQ ID NO: 29092 - DNA, 25 bp, Probe Sequence
ggaacttgagcgtgaatctgtatct

SEQ ID NO: 29093 - DNA, 25 bp, Probe Sequence
agagatatgtagaaggcacaatatg

SEQ ID NO: 29094 - DNA, 25 bp, Probe Sequence
atgaacaatggacaaaggatacaac

SEQ ID NO: 29095 - DNA, 25 bp, Probe Sequence
tgatgatgatgaacaatggacaaag

SEQ ID NO: 29096 - DNA, 25 bp, Probe Sequence
gaacaatggacaaaggatacaacag

SEQ ID NO: 29097 - DNA, 25 bp, Probe Sequence
tgttgaaagagatatgtagaaggca

SEQ ID NO: 29098 - DNA, 25 bp, Probe Sequence
actggagatttgatgagaagagaaa

SEQ ID NO: 29099 - DNA, 25 bp, Probe Sequence
tgatgaacaatggacaaaggataca

SEQ ID NO: 29100 - DNA, 25 bp, Probe Sequence
gatgatgatgaacaatggacaaagg

SEQ ID NO: 29101 - DNA, 25 bp, Probe Sequence
gatgaacaatggacaaaggatacaa

SEQ ID NO: 29102 - DNA, 25 bp, Probe Sequence
aataattcttcacctaagtctctgt

SEQ ID NO: 29103 - DNA, 25 bp, Probe Sequence
actgtgtcttattccatctatgagc

SEQ ID NO: 29104 - DNA, 25 bp, Probe Sequence
gcagaacatccattcattcattcat

SEQ ID NO: 29105 - DNA, 25 bp, Probe Sequence
aggcagaacatccattcattcattc

SEQ ID NO: 29106 - DNA, 25 bp, Probe Sequence
ggtcacctacaggatcgtatcatat

SEQ ID NO: 29107 - DNA, 25 bp, Probe Sequence
agacttaccgcatattacagtggat

SEQ ID NO: 29108 - DNA, 25 bp, Probe Sequence
agaacatccattcattcattcattg

SEQ ID NO: 29109 - DNA, 25 bp, Probe Sequence
cagaacatccattcattcattcatt

SEQ ID NO: 29110 - DNA, 25 bp, Probe Sequence
ggcagaacatccattcattcattca

SEQ ID NO: 29111 - DNA, 25 bp, Probe Sequence
caggcagaacatccattcattcatt

SEQ ID NO: 29112 - DNA, 25 bp, Probe Sequence
gtgtgactgtgtcttattccatcta

SEQ ID NO: 29113 - DNA, 25 bp, Probe Sequence
gtcacctacaggatcgtatcatata

SEQ ID NO: 29114 - DNA, 25 bp, Probe Sequence
tcattggattgtatatcattgttgc

SEQ ID NO: 29115 - DNA, 25 bp, Probe Sequence
ttatggtgtgactgtgtcttattcc

SEQ ID NO: 29116 - DNA, 25 bp, Probe Sequence
tgtgactgtgtcttattccatctat

SEQ ID NO: 29117 - DNA, 25 bp, Probe Sequence
tcagaattgataagcactgttcctc

SEQ ID NO: 29118 - DNA, 25 bp, Probe Sequence
gaattgataagcactgttcctccac

SEQ ID NO: 29119 - DNA, 25 bp, Probe Sequence
agaattgataagcactgttcctcca

SEQ ID NO: 29120 - DNA, 25 bp, Probe Sequence
aattgataagcactgttcctccact

SEQ ID NO: 29121 - DNA, 25 bp, Probe Sequence
tgactgtgtcttattccatctatga

SEQ ID NO: 29122 - DNA, 25 bp, Probe Sequence
gtgactgtgtcttattccatctatg

SEQ ID NO: 29123 - DNA, 25 bp, Probe Sequence
gacttaccgcatattacagtggatc

SEQ ID NO: 29124 - DNA, 25 bp, Probe Sequence
cttcaggcagaacatccattcattc

SEQ ID NO: 29125 - DNA, 25 bp, Probe Sequence
gagacttaccgcatattacagtgga

SEQ ID NO: 29126 - DNA, 25 bp, Probe Sequence
ctgtgtcttattccatctatgagct

SEQ ID NO: 29127 - DNA, 25 bp, Probe Sequence
ggcttattcagttcttacacattcc

SEQ ID NO: 29128 - DNA, 25 bp, Probe Sequence
tataagaagaagagagcatagccac

SEQ ID NO: 29129 - DNA, 25 bp, Probe Sequence
acttgcctatctgacttcatacatc

SEQ ID NO: 29130 - DNA, 25 bp, Probe Sequence
gcttattcagttcttacacattcca

SEQ ID NO: 29131 - DNA, 25 bp, Probe Sequence
aggcttattcagttcttacacattc

SEQ ID NO: 29132 - DNA, 25 bp, Probe Sequence
gaggcttattcagttcttacacatt

SEQ ID NO: 29133 - DNA, 25 bp, Probe Sequence
cttgcctatctgacttcatacatcc

SEQ ID NO: 29134 - DNA, 25 bp, Probe Sequence
ttacttgcctatctgacttcataca

SEQ ID NO: 29135 - DNA, 25 bp, Probe Sequence
agaggcttattcagttcttacacat

SEQ ID NO: 29136 - DNA, 25 bp, Probe Sequence
tacttgcctatctgacttcatacat

SEQ ID NO: 29137 - DNA, 25 bp, Probe Sequence
cagttcttacacattccatcttaca

SEQ ID NO: 29138 - DNA, 25 bp, Probe Sequence
cagaggcttattcagttcttacaca

SEQ ID NO: 29139 - DNA, 25 bp, Probe Sequence
tcagttcttacacattccatcttac

SEQ ID NO: 29140 - DNA, 25 bp, Probe Sequence
attcagttcttacacattccatctt

SEQ ID NO: 29141 - DNA, 25 bp, Probe Sequence
tccatcttacattagtgattccatc

SEQ ID NO: 29142 - DNA, 25 bp, Probe Sequence
ataagaagaagagagcatagccacc

SEQ ID NO: 29143 - DNA, 25 bp, Probe Sequence
attacttgcctatctgacttcatac

SEQ ID NO: 29144 - DNA, 25 bp, Probe Sequence
gcagaggcttattcagttcttacac

SEQ ID NO: 29145 - DNA, 25 bp, Probe Sequence
agttcttacacattccatcttacat

SEQ ID NO: 29146 - DNA, 25 bp, Probe Sequence
ttcagttcttacacattccatctta

SEQ ID NO: 29147 - DNA, 25 bp, Probe Sequence
ttataagaagaagagagcatagcca

SEQ ID NO: 29148 - DNA, 25 bp, Probe Sequence
tattcagttcttacacattccatct

SEQ ID NO: 29149 - DNA, 25 bp, Probe Sequence
ttccatcttacattagtgattccat

SEQ ID NO: 29150 - DNA, 25 bp, Probe Sequence
attccatcttacattagtgattcca

SEQ ID NO: 29151 - DNA, 25 bp, Probe Sequence
aatgaggtacaagcaggttatccaa

SEQ ID NO: 29152 - DNA, 25 bp, Probe Sequence
ttctacttcttcagtggatcatcac

SEQ ID NO: 29153 - DNA, 25 bp, Probe Sequence
ctacttcttcagtggatcatcacag

SEQ ID NO: 29154 - DNA, 25 bp, Probe Sequence
tctacttcttcagtggatcatcaca

SEQ ID NO: 29155 - DNA, 25 bp, Probe Sequence
caggttatccaagaggcatccatac

SEQ ID NO: 29156 - DNA, 25 bp, Probe Sequence
atgtgcaataggtgagagaatgtat

SEQ ID NO: 29157 - DNA, 25 bp, Probe Sequence
atgaggtacaagcaggttatccaag

SEQ ID NO: 29158 - DNA, 25 bp, Probe Sequence
tacttcttcagtggatcatcacagt

SEQ ID NO: 29159 - DNA, 25 bp, Probe Sequence
tgggctttatggagatattcacttt

SEQ ID NO: 29160 - DNA, 25 bp, Probe Sequence
gggctttatggagatattcactttg

SEQ ID NO: 29161 - DNA, 25 bp, Probe Sequence
ctgggctttatggagatattcactt

SEQ ID NO: 29162 - DNA, 25 bp, Probe Sequence
ttatacaccagatttgccaagagat

SEQ ID NO: 29163 - DNA, 25 bp, Probe Sequence
attatacaccagatttgccaagaga

SEQ ID NO: 29164 - DNA, 25 bp, Probe Sequence
tgtgcaataggtgagagaatgtatt

SEQ ID NO: 29165 - DNA, 25 bp, Probe Sequence
tatacaccagatttgccaagagatg

SEQ ID NO: 29166 - DNA, 25 bp, Probe Sequence
catgtgcaataggtgagagaatgta

SEQ ID NO: 29167 - DNA, 25 bp, Probe Sequence
tgaattatacaccagatttgccaag

SEQ ID NO: 29168 - DNA, 25 bp, Probe Sequence
gaattatacaccagatttgccaaga

SEQ ID NO: 29169 - DNA, 25 bp, Probe Sequence
aattatacaccagatttgccaagag

SEQ ID NO: 29170 - DNA, 25 bp, Probe Sequence
tcatagatgtgttattacttcctca

SEQ ID NO: 29171 - DNA, 25 bp, Probe Sequence
gaggtacaagcaggttatccaagag

SEQ ID NO: 29172 - DNA, 25 bp, Probe Sequence
ctggttacattgctaggcgagatag

SEQ ID NO: 29173 - DNA, 25 bp, Probe Sequence
acttcttcagtggatcatcacagtt

SEQ ID NO: 29174 - DNA, 25 bp, Probe Sequence
atgttctgtgactgaagaagatgag

SEQ ID NO: 29175 - DNA, 25 bp, Probe Sequence
tccattcttgcttgactctactatt

SEQ ID NO: 29176 - DNA, 25 bp, Probe Sequence
aactctaattgtccattcttgcttg

SEQ ID NO: 29177 - DNA, 25 bp, Probe Sequence
actctaattgtccattcttgcttga

SEQ ID NO: 29178 - DNA, 25 bp, Probe Sequence
aactgattaccaagaacttccaagg

SEQ ID NO: 29179 - DNA, 25 bp, Probe Sequence
ttgaatatgacttcctactccaacg

SEQ ID NO: 29180 - DNA, 25 bp, Probe Sequence
aattcagcaagattaacacaggcat

SEQ ID NO: 29181 - DNA, 25 bp, Probe Sequence
actgattaccaagaacttccaagga

SEQ ID NO: 29182 - DNA, 25 bp, Probe Sequence
ccattcttgcttgactctactatta

SEQ ID NO: 29183 - DNA, 25 bp, Probe Sequence
gtaagttgcttcctaacatccttgg

SEQ ID NO: 29184 - DNA, 25 bp, Probe Sequence
ctgtaagttgcttcctaacatcctt

SEQ ID NO: 29185 - DNA, 25 bp, Probe Sequence
gtccattcttgcttgactctactat

SEQ ID NO: 29186 - DNA, 25 bp, Probe Sequence
ctaattgtccattcttgcttgactc

SEQ ID NO: 29187 - DNA, 25 bp, Probe Sequence
ctctaattgtccattcttgcttgac

SEQ ID NO: 29188 - DNA, 25 bp, Probe Sequence
aattgtccattcttgcttgactcta

SEQ ID NO: 29189 - DNA, 25 bp, Probe Sequence
taattgtccattcttgcttgactct

SEQ ID NO: 29190 - DNA, 25 bp, Probe Sequence
tctaattgtccattcttgcttgact

SEQ ID NO: 29191 - DNA, 25 bp, Probe Sequence
tgtaagttgcttcctaacatccttg

SEQ ID NO: 29192 - DNA, 25 bp, Probe Sequence
ctctgtaagttgcttcctaacatcc

SEQ ID NO: 29193 - DNA, 25 bp, Probe Sequence
tgattaccaagaacttccaaggaat

SEQ ID NO: 29194 - DNA, 25 bp, Probe Sequence
attgtccattcttgcttgactctac

SEQ ID NO: 29195 - DNA, 25 bp, Probe Sequence
ctgattaccaagaacttccaaggaa

SEQ ID NO: 29196 - DNA, 25 bp, Probe Sequence
tctgtaagttgcttcctaacatcct

SEQ ID NO: 29197 - DNA, 25 bp, Probe Sequence
tgtccattcttgcttgactctacta

SEQ ID NO: 29198 - DNA, 25 bp, Probe Sequence
attaccaagaacttccaaggaatcg

SEQ ID NO: 29199 - DNA, 25 bp, Probe Sequence
agcagtggtaagaatagtagatgtg

SEQ ID NO: 29200 - DNA, 25 bp, Probe Sequence
gagcagtggtaagaatagtagatgt

SEQ ID NO: 29201 - DNA, 25 bp, Probe Sequence
agagcagtggtaagaatagtagatg

SEQ ID NO: 29202 - DNA, 25 bp, Probe Sequence
cagtggtaagaatagtagatgtggc

SEQ ID NO: 29203 - DNA, 25 bp, Probe Sequence
gcagtggtaagaatagtagatgtgg

SEQ ID NO: 29204 - DNA, 25 bp, Probe Sequence
gtatctatatgactatgcgtggctg

SEQ ID NO: 29205 - DNA, 25 bp, Probe Sequence
aagagcagtggtaagaatagtagat

SEQ ID NO: 29206 - DNA, 25 bp, Probe Sequence
atggtctgtcaatgagagcataatt

SEQ ID NO: 29207 - DNA, 25 bp, Probe Sequence
tatctatatgactatgcgtggctgg

SEQ ID NO: 29208 - DNA, 25 bp, Probe Sequence
ggcacttattgaatatatgatcggc

SEQ ID NO: 29209 - DNA, 25 bp, Probe Sequence
agtatctatatgactatgcgtggct

SEQ ID NO: 29210 - DNA, 25 bp, Probe Sequence
gttcttcagaagtcacacattacaa

SEQ ID NO: 29211 - DNA, 25 bp, Probe Sequence
aggttcttcagaagtcacacattac

SEQ ID NO: 29212 - DNA, 25 bp, Probe Sequence
caggttcttcagaagtcacacatta

SEQ ID NO: 29213 - DNA, 25 bp, Probe Sequence
tggcacttattgaatatatgatcgg

SEQ ID NO: 29214 - DNA, 25 bp, Probe Sequence
ggttcttcagaagtcacacattaca

SEQ ID NO: 29215 - DNA, 25 bp, Probe Sequence
catggtctgtcaatgagagcataat

SEQ ID NO: 29216 - DNA, 25 bp, Probe Sequence
atacagcatctggagtaaccgtatt

SEQ ID NO: 29217 - DNA, 25 bp, Probe Sequence
aatacagcatctggagtaaccgtat

SEQ ID NO: 29218 - DNA, 25 bp, Probe Sequence
gaagaactattgtgctcagagacac

SEQ ID NO: 29219 - DNA, 25 bp, Probe Sequence
tagtatctatatgactatgcgtggc

SEQ ID NO: 29220 - DNA, 25 bp, Probe Sequence
tcaggttcttcagaagtcacacatt

SEQ ID NO: 29221 - DNA, 25 bp, Probe Sequence
ttcaggttcttcagaagtcacacat

SEQ ID NO: 29222 - DNA, 25 bp, Probe Sequence
aagaactattgtgctcagagacact

SEQ ID NO: 29223 - DNA, 25 bp, Probe Sequence
tacttgaccatttgtttctgtttcc

SEQ ID NO: 29224 - DNA, 25 bp, Probe Sequence
ccttacttgaccatttgtttctgtt

SEQ ID NO: 29225 - DNA, 25 bp, Probe Sequence
caccttacttgaccatttgtttctg

SEQ ID NO: 29226 - DNA, 25 bp, Probe Sequence
accttacttgaccatttgtttctgt

SEQ ID NO: 29227 - DNA, 25 bp, Probe Sequence
ttacttgaccatttgtttctgtttc

SEQ ID NO: 29228 - DNA, 25 bp, Probe Sequence
cttacttgaccatttgtttctgttt

SEQ ID NO: 29229 - DNA, 25 bp, Probe Sequence
tcattatttatgtccaggtgtttgt

SEQ ID NO: 29230 - DNA, 25 bp, Probe Sequence
gcaccttacttgaccatttgtttct

SEQ ID NO: 29231 - DNA, 25 bp, Probe Sequence
ctcattatttatgtccaggtgtttg

SEQ ID NO: 29232 - DNA, 25 bp, Probe Sequence
acttgaccatttgtttctgtttccc

SEQ ID NO: 29233 - DNA, 25 bp, Probe Sequence
cattatttatgtccaggtgtttgtt

SEQ ID NO: 29234 - DNA, 25 bp, Probe Sequence
ccctcattatttatgtccaggtgtt

SEQ ID NO: 29235 - DNA, 25 bp, Probe Sequence
cctcattatttatgtccaggtgttt

SEQ ID NO: 29236 - DNA, 25 bp, Probe Sequence
attatttatgtccaggtgtttgttt

SEQ ID NO: 29237 - DNA, 25 bp, Probe Sequence
ggcaccttacttgaccatttgtttc

SEQ ID NO: 29238 - DNA, 25 bp, Probe Sequence
ccaggtgtttgttttgttttgtttt

SEQ ID NO: 29239 - DNA, 25 bp, Probe Sequence
tatgtccaggtgtttgttttgtttt

SEQ ID NO: 29240 - DNA, 25 bp, Probe Sequence
ttatgtccaggtgtttgttttgttt

SEQ ID NO: 29241 - DNA, 25 bp, Probe Sequence
tttatgtccaggtgtttgttttgtt

SEQ ID NO: 29242 - DNA, 25 bp, Probe Sequence
atttatgtccaggtgtttgttttgt

SEQ ID NO: 29243 - DNA, 25 bp, Probe Sequence
tccaggtgtttgttttgttttgttt

SEQ ID NO: 29244 - DNA, 25 bp, Probe Sequence
gccctcattatttatgtccaggtgt

SEQ ID NO: 29245 - DNA, 25 bp, Probe Sequence
atgtccaggtgtttgttttgttttg

SEQ ID NO: 29246 - DNA, 25 bp, Probe Sequence
gtccaggtgtttgttttgttttgtt

SEQ ID NO: 29247 - DNA, 25 bp, Probe Sequence
ccttggaatccttgagaatcacatt

SEQ ID NO: 29248 - DNA, 25 bp, Probe Sequence
cttccaactgtgtcatctcttctct

SEQ ID NO: 29249 - DNA, 25 bp, Probe Sequence
ttccaactgtgtcatctcttctctg

SEQ ID NO: 29250 - DNA, 25 bp, Probe Sequence
gctaactccatgttcataagagagg

SEQ ID NO: 29251 - DNA, 25 bp, Probe Sequence
ccttccaactgtgtcatctcttctc

SEQ ID NO: 29252 - DNA, 25 bp, Probe Sequence
agctaactccatgttcataagagag

SEQ ID NO: 29253 - DNA, 25 bp, Probe Sequence
taactccatgttcataagagaggac

SEQ ID NO: 29254 - DNA, 25 bp, Probe Sequence
aagctaactccatgttcataagaga

SEQ ID NO: 29255 - DNA, 25 bp, Probe Sequence
ctaactccatgttcataagagagga

SEQ ID NO: 29256 - DNA, 25 bp, Probe Sequence
gtcatctcttctctggaggtcaatg

SEQ ID NO: 29257 - DNA, 25 bp, Probe Sequence
aactccatgttcataagagaggact

SEQ ID NO: 29258 - DNA, 25 bp, Probe Sequence
acaaagttctggttaaggaggaaat

SEQ ID NO: 29259 - DNA, 25 bp, Probe Sequence
gctaattaaccttgttgaatctcag

SEQ ID NO: 29260 - DNA, 25 bp, Probe Sequence
caactccatttcctgtctgtcttag

SEQ ID NO: 29261 - DNA, 25 bp, Probe Sequence
catttatgtgcttatgattacgggc

SEQ ID NO: 29262 - DNA, 25 bp, Probe Sequence
aacaaagttctggttaaggaggaaa

SEQ ID NO: 29263 - DNA, 25 bp, Probe Sequence
caaagttctggttaaggaggaaatt

SEQ ID NO: 29264 - DNA, 25 bp, Probe Sequence
caactgtgtcatctcttctctggag

SEQ ID NO: 29265 - DNA, 25 bp, Probe Sequence
ttctggttaaggaggaaattagtgc

SEQ ID NO: 29266 - DNA, 25 bp, Probe Sequence
gttctggttaaggaggaaattagtg

SEQ ID NO: 29267 - DNA, 25 bp, Probe Sequence
agttctggttaaggaggaaattagt

SEQ ID NO: 29268 - DNA, 25 bp, Probe Sequence
ctccatgttcataagagaggactga

SEQ ID NO: 29269 - DNA, 25 bp, Probe Sequence
tgtcatctcttctctggaggtcaat

SEQ ID NO: 29270 - DNA, 25 bp, Probe Sequence
agctaattaaccttgttgaatctca

SEQ ID NO: 29271 - DNA, 25 bp, Probe Sequence
cataccgcagcatctatttctcaag

SEQ ID NO: 29272 - DNA, 25 bp, Probe Sequence
cagcatctatttctcaagcccaaag

SEQ ID NO: 29273 - DNA, 25 bp, Probe Sequence
ccataccgcagcatctatttctcaa

SEQ ID NO: 29274 - DNA, 25 bp, Probe Sequence
agcatctatttctcaagcccaaagg

SEQ ID NO: 29275 - DNA, 25 bp, Probe Sequence
tgtacttctgcatgaacatctccag

SEQ ID NO: 29276 - DNA, 25 bp, Probe Sequence
ataccgcagcatctatttctcaagc

SEQ ID NO: 29277 - DNA, 25 bp, Probe Sequence
atgtacttctgcatgaacatctcca

SEQ ID NO: 29278 - DNA, 25 bp, Probe Sequence
gcagcatctatttctcaagcccaaa

SEQ ID NO: 29279 - DNA, 25 bp, Probe Sequence
acatcatttacggcatgtacttctg

SEQ ID NO: 29280 - DNA, 25 bp, Probe Sequence
gtacttctgcatgaacatctccagc

SEQ ID NO: 29281 - DNA, 25 bp, Probe Sequence
catgtacttctgcatgaacatctcc

SEQ ID NO: 29282 - DNA, 25 bp, Probe Sequence
cttcctaatggcacagaactccgag

SEQ ID NO: 29283 - DNA, 25 bp, Probe Sequence
gcagatgaagaaaccaaagcagttt

SEQ ID NO: 29284 - DNA, 25 bp, Probe Sequence
gcatgtacttctgcatgaacatctc

SEQ ID NO: 29285 - DNA, 25 bp, Probe Sequence
cccataccgcagcatctatttctca

SEQ ID NO: 29286 - DNA, 25 bp, Probe Sequence
catcatttacggcatgtacttctgc

SEQ ID NO: 29287 - DNA, 25 bp, Probe Sequence
cagatgaagaaaccaaagcagtttt

SEQ ID NO: 29288 - DNA, 25 bp, Probe Sequence
agatgaagaaaccaaagcagttttg

SEQ ID NO: 29289 - DNA, 25 bp, Probe Sequence
tacttctgcatgaacatctccagcc

SEQ ID NO: 29290 - DNA, 25 bp, Probe Sequence
tacatcatttacggcatgtacttct

SEQ ID NO: 29291 - DNA, 25 bp, Probe Sequence
gaccctgtacgtgtacatcatttac

SEQ ID NO: 29292 - DNA, 25 bp, Probe Sequence
taccgcagcatctatttctcaagcc

SEQ ID NO: 29293 - DNA, 25 bp, Probe Sequence
ggcatgtacttctgcatgaacatct

SEQ ID NO: 29294 - DNA, 25 bp, Probe Sequence
ctcataacaacccacaggatggtca

SEQ ID NO: 29295 - DNA, 25 bp, Probe Sequence
gttaaatatgtgacccagcattagc

SEQ ID NO: 29296 - DNA, 25 bp, Probe Sequence
tgttaaatatgtgacccagcattag

SEQ ID NO: 29297 - DNA, 25 bp, Probe Sequence
cccttgttctgtcaaagcaattaaa

SEQ ID NO: 29298 - DNA, 25 bp, Probe Sequence
ccttgttctgtcaaagcaattaaag

SEQ ID NO: 29299 - DNA, 25 bp, Probe Sequence
gcaagagaccaggtaatttctaaga

SEQ ID NO: 29300 - DNA, 25 bp, Probe Sequence
agcaagagaccaggtaatttctaag

SEQ ID NO: 29301 - DNA, 25 bp, Probe Sequence
gagcaagagaccaggtaatttctaa

SEQ ID NO: 29302 - DNA, 25 bp, Probe Sequence
atactccctttgtcttccctctcta

SEQ ID NO: 29303 - DNA, 25 bp, Probe Sequence
agaccaggtaatttctaagaacagg

SEQ ID NO: 29304 - DNA, 25 bp, Probe Sequence
ccaggtaatttctaagaacagggtt

SEQ ID NO: 29305 - DNA, 25 bp, Probe Sequence
agagcaagagaccaggtaatttcta

SEQ ID NO: 29306 - DNA, 25 bp, Probe Sequence
gaccaggtaatttctaagaacaggg

SEQ ID NO: 29307 - DNA, 25 bp, Probe Sequence
acccttgttctgtcaaagcaattaa

SEQ ID NO: 29308 - DNA, 25 bp, Probe Sequence
agagaccaggtaatttctaagaaca

SEQ ID NO: 29309 - DNA, 25 bp, Probe Sequence
gagaccaggtaatttctaagaacag

SEQ ID NO: 29310 - DNA, 25 bp, Probe Sequence
cttgttctgtcaaagcaattaaaga

SEQ ID NO: 29311 - DNA, 25 bp, Probe Sequence
tctgtcaaagcaattaaagatcact

SEQ ID NO: 29312 - DNA, 25 bp, Probe Sequence
ctgttaaatatgtgacccagcatta

SEQ ID NO: 29313 - DNA, 25 bp, Probe Sequence
caaagcaattaaagatcacttgtgt

SEQ ID NO: 29314 - DNA, 25 bp, Probe Sequence
cacccttgttctgtcaaagcaatta

SEQ ID NO: 29315 - DNA, 25 bp, Probe Sequence
tactccctttgtcttccctctctac

SEQ ID NO: 29316 - DNA, 25 bp, Probe Sequence
tcaaagcaattaaagatcacttgtg

SEQ ID NO: 29317 - DNA, 25 bp, Probe Sequence
gtcaaagcaattaaagatcacttgt

SEQ ID NO: 29318 - DNA, 25 bp, Probe Sequence
tgtcaaagcaattaaagatcacttg

SEQ ID NO: 29319 - DNA, 25 bp, Probe Sequence
tagagcacagaaggaataaggtcat

SEQ ID NO: 29320 - DNA, 25 bp, Probe Sequence
aacactcttgaatagacttccactt

SEQ ID NO: 29321 - DNA, 25 bp, Probe Sequence
ataactctccagtaacagcctatct

SEQ ID NO: 29322 - DNA, 25 bp, Probe Sequence
taactctccagtaacagcctatctt

SEQ ID NO: 29323 - DNA, 25 bp, Probe Sequence
aataactctccagtaacagcctatc

SEQ ID NO: 29324 - DNA, 25 bp, Probe Sequence
aactagagcacagaaggaataaggt

SEQ ID NO: 29325 - DNA, 25 bp, Probe Sequence
ctagagcacagaaggaataaggtca

SEQ ID NO: 29326 - DNA, 25 bp, Probe Sequence
actagagcacagaaggaataaggtc

SEQ ID NO: 29327 - DNA, 25 bp, Probe Sequence
aacacagacttctcttcttcattaa

SEQ ID NO: 29328 - DNA, 25 bp, Probe Sequence
ggcaggaatctatccattgaactaa

SEQ ID NO: 29329 - DNA, 25 bp, Probe Sequence
tgtcaccttcctttaccaaataact

SEQ ID NO: 29330 - DNA, 25 bp, Probe Sequence
tggcaggaatctatccattgaacta

SEQ ID NO: 29331 - DNA, 25 bp, Probe Sequence
aaggagttatggattaaatgtggct

SEQ ID NO: 29332 - DNA, 25 bp, Probe Sequence
caaggagttatggattaaatgtggc

SEQ ID NO: 29333 - DNA, 25 bp, Probe Sequence
gcaaggagttatggattaaatgtgg

SEQ ID NO: 29334 - DNA, 25 bp, Probe Sequence
aggagttatggattaaatgtggcta

SEQ ID NO: 29335 - DNA, 25 bp, Probe Sequence
gcagcaaggagttatggattaaatg

SEQ ID NO: 29336 - DNA, 25 bp, Probe Sequence
gaatctggcaggaatctatccattg

SEQ ID NO: 29337 - DNA, 25 bp, Probe Sequence
agagcacagaaggaataaggtcatg

SEQ ID NO: 29338 - DNA, 25 bp, Probe Sequence
tttgtttcagttcagataattggca

SEQ ID NO: 29339 - DNA, 25 bp, Probe Sequence
agcaaggagttatggattaaatgtg

SEQ ID NO: 29340 - DNA, 25 bp, Probe Sequence
cagcaaggagttatggattaaatgt

SEQ ID NO: 29341 - DNA, 25 bp, Probe Sequence
accagtttatccaccaagaacataa

SEQ ID NO: 29342 - DNA, 25 bp, Probe Sequence
aaccagtttatccaccaagaacata

SEQ ID NO: 29343 - DNA, 25 bp, Probe Sequence
cttggtgatatgtcctatattggct

SEQ ID NO: 29344 - DNA, 25 bp, Probe Sequence
acttggtgatatgtcctatattggc

SEQ ID NO: 29345 - DNA, 25 bp, Probe Sequence
tggtgatatgtcctatattggctaa

SEQ ID NO: 29346 - DNA, 25 bp, Probe Sequence
ttggtgatatgtcctatattggcta

SEQ ID NO: 29347 - DNA, 25 bp, Probe Sequence
atatgttcacacctagcgtcagtat

SEQ ID NO: 29348 - DNA, 25 bp, Probe Sequence
tatgttcacacctagcgtcagtatt

SEQ ID NO: 29349 - DNA, 25 bp, Probe Sequence
gatatgttcacacctagcgtcagta

SEQ ID NO: 29350 - DNA, 25 bp, Probe Sequence
cacttggtgatatgtcctatattgg

SEQ ID NO: 29351 - DNA, 25 bp, Probe Sequence
tcagtattagtgatgtcatctgtca

SEQ ID NO: 29352 - DNA, 25 bp, Probe Sequence
tgtcatctgtcactataggtcatac

SEQ ID NO: 29353 - DNA, 25 bp, Probe Sequence
atattgatttctgccttccttgcta

SEQ ID NO: 29354 - DNA, 25 bp, Probe Sequence
ttcaagaccttcaccaaacatacta

SEQ ID NO: 29355 - DNA, 25 bp, Probe Sequence
gatgtcatctgtcactataggtcat

SEQ ID NO: 29356 - DNA, 25 bp, Probe Sequence
tattgatttctgccttccttgctaa

SEQ ID NO: 29357 - DNA, 25 bp, Probe Sequence
aagagaggatatgttcacacctagc

SEQ ID NO: 29358 - DNA, 25 bp, Probe Sequence
attctattgtggcaaggctgagtag

SEQ ID NO: 29359 - DNA, 25 bp, Probe Sequence
attgatttctgccttccttgctaat

SEQ ID NO: 29360 - DNA, 25 bp, Probe Sequence
cttcaagaccttcaccaaacatact

SEQ ID NO: 29361 - DNA, 25 bp, Probe Sequence
tgatgtcatctgtcactataggtca

SEQ ID NO: 29362 - DNA, 25 bp, Probe Sequence
ttcagtattagtgatgtcatctgtc

SEQ ID NO: 29363 - DNA, 25 bp, Probe Sequence
caagaccttcaccaaacatactaga

SEQ ID NO: 29364 - DNA, 25 bp, Probe Sequence
tcaagaccttcaccaaacatactag

SEQ ID NO: 29365 - DNA, 25 bp, Probe Sequence
cattctattgtggcaaggctgagta

SEQ ID NO: 29366 - DNA, 25 bp, Probe Sequence
tattggctaaattgaaacctggaat

SEQ ID NO: 29367 - DNA, 25 bp, Probe Sequence
gaaaataaagctatctagcggtgaa

SEQ ID NO: 29368 - DNA, 25 bp, Probe Sequence
ggaaaataaagctatctagcggtga

SEQ ID NO: 29369 - DNA, 25 bp, Probe Sequence
ccagaacaaggagcttaaggtcaag

SEQ ID NO: 29370 - DNA, 25 bp, Probe Sequence
cgaagtcagctccctaaagaacaag

SEQ ID NO: 29371 - DNA, 25 bp, Probe Sequence
gaagtcagctccctaaagaacaagc

SEQ ID NO: 29372 - DNA, 25 bp, Probe Sequence
gccagaacaaggagcttaaggtcaa

SEQ ID NO: 29373 - DNA, 25 bp, Probe Sequence
gcgaagtcagctccctaaagaacaa

SEQ ID NO: 29374 - DNA, 25 bp, Probe Sequence
cagaacaaggagcttaaggtcaagc

SEQ ID NO: 29375 - DNA, 25 bp, Probe Sequence
aagtcagctccctaaagaacaagct

SEQ ID NO: 29376 - DNA, 25 bp, Probe Sequence
tcagctccctaaagaacaagctcag

SEQ ID NO: 29377 - DNA, 25 bp, Probe Sequence
agtcagctccctaaagaacaagctc

SEQ ID NO: 29378 - DNA, 25 bp, Probe Sequence
gtcagctccctaaagaacaagctca

SEQ ID NO: 29379 - DNA, 25 bp, Probe Sequence
cagctccctaaagaacaagctcagg

SEQ ID NO: 29380 - DNA, 25 bp, Probe Sequence
gttctactcagtgaatgtggattac

SEQ ID NO: 29381 - DNA, 25 bp, Probe Sequence
aagttctactcagtgaatgtggatt

SEQ ID NO: 29382 - DNA, 25 bp, Probe Sequence
caagttctactcagtgaatgtggat

SEQ ID NO: 29383 - DNA, 25 bp, Probe Sequence
agttctactcagtgaatgtggatta

SEQ ID NO: 29384 - DNA, 25 bp, Probe Sequence
tctactcagtgaatgtggattacag

SEQ ID NO: 29385 - DNA, 25 bp, Probe Sequence
tacaagttctactcagtgaatgtgg

SEQ ID NO: 29386 - DNA, 25 bp, Probe Sequence
ttctactcagtgaatgtggattaca

SEQ ID NO: 29387 - DNA, 25 bp, Probe Sequence
ctactcagtgaatgtggattacagc

SEQ ID NO: 29388 - DNA, 25 bp, Probe Sequence
atacaagttctactcagtgaatgtg

SEQ ID NO: 29389 - DNA, 25 bp, Probe Sequence
acaagttctactcagtgaatgtgga

SEQ ID NO: 29390 - DNA, 25 bp, Probe Sequence
ctactggagcaacactgtatctctt

SEQ ID NO: 29391 - DNA, 25 bp, Probe Sequence
tactcagtgaatgtggattacagca

SEQ ID NO: 29392 - DNA, 25 bp, Probe Sequence
tactggagcaacactgtatctcttg

SEQ ID NO: 29393 - DNA, 25 bp, Probe Sequence
caatacaagttctactcagtgaatg

SEQ ID NO: 29394 - DNA, 25 bp, Probe Sequence
ctcagtgaatgtggattacagcaag

SEQ ID NO: 29395 - DNA, 25 bp, Probe Sequence
tcaatacaagttctactcagtgaat

SEQ ID NO: 29396 - DNA, 25 bp, Probe Sequence
atcaatacaagttctactcagtgaa

SEQ ID NO: 29397 - DNA, 25 bp, Probe Sequence
aatacaagttctactcagtgaatgt

SEQ ID NO: 29398 - DNA, 25 bp, Probe Sequence
gatcaatacaagttctactcagtga

SEQ ID NO: 29399 - DNA, 25 bp, Probe Sequence
ccctctttgtatttattggaactgg

SEQ ID NO: 29400 - DNA, 25 bp, Probe Sequence
cactataacgctgctttagaatgaa

SEQ ID NO: 29401 - DNA, 25 bp, Probe Sequence
tctttgtatttattggaactggagc

SEQ ID NO: 29402 - DNA, 25 bp, Probe Sequence
ttagaatgaaggtcttccagaagcc

SEQ ID NO: 29403 - DNA, 25 bp, Probe Sequence
ctataacgctgctttagaatgaagg

SEQ ID NO: 29404 - DNA, 25 bp, Probe Sequence
gcctgtactgtagatgtctgtatta

SEQ ID NO: 29405 - DNA, 25 bp, Probe Sequence
atgcctgtactgtagatgtctgtat

SEQ ID NO: 29406 - DNA, 25 bp, Probe Sequence
aagtctaataatgttaagcaccagt

SEQ ID NO: 29407 - DNA, 25 bp, Probe Sequence
tgcctgtactgtagatgtctgtatt

SEQ ID NO: 29408 - DNA, 25 bp, Probe Sequence
aatgcctgtactgtagatgtctgta

SEQ ID NO: 29409 - DNA, 25 bp, Probe Sequence
agaagtctaataatgttaagcacca

SEQ ID NO: 29410 - DNA, 25 bp, Probe Sequence
gaagtctaataatgttaagcaccag

SEQ ID NO: 29411 - DNA, 25 bp, Probe Sequence
actgtagatgtctgtattattgagg

SEQ ID NO: 29412 - DNA, 25 bp, Probe Sequence
agtctaataatgttaagcaccagta

SEQ ID NO: 29413 - DNA, 25 bp, Probe Sequence
ttgagattctacattgcattgactg

SEQ ID NO: 29414 - DNA, 25 bp, Probe Sequence
tgaagttattgagattctacattgc

SEQ ID NO: 29415 - DNA, 25 bp, Probe Sequence
gtctctcagtgttggttcagattga

SEQ ID NO: 29416 - DNA, 25 bp, Probe Sequence
tgtctctcagtgttggttcagattg

SEQ ID NO: 29417 - DNA, 25 bp, Probe Sequence
tggattgcccgtaatttctatgata

SEQ ID NO: 29418 - DNA, 25 bp, Probe Sequence
atggattgcccgtaatttctatgat

SEQ ID NO: 29419 - DNA, 25 bp, Probe Sequence
ttgcccgtaatttctatgatagtcc

SEQ ID NO: 29420 - DNA, 25 bp, Probe Sequence
tgagattctacattgcattgactgg

SEQ ID NO: 29421 - DNA, 25 bp, Probe Sequence
cccgtaatttctatgatagtcctga

SEQ ID NO: 29422 - DNA, 25 bp, Probe Sequence
ggattgcccgtaatttctatgatag

SEQ ID NO: 29423 - DNA, 25 bp, Probe Sequence
attgagattctacattgcattgact

SEQ ID NO: 29424 - DNA, 25 bp, Probe Sequence
gcccgtaatttctatgatagtcctg

SEQ ID NO: 29425 - DNA, 25 bp, Probe Sequence
aagcaactcctgacaattaagcctt

SEQ ID NO: 29426 - DNA, 25 bp, Probe Sequence
gatggaccctggtattactatgaga

SEQ ID NO: 29427 - DNA, 25 bp, Probe Sequence
agatggaccctggtattactatgag

SEQ ID NO: 29428 - DNA, 25 bp, Probe Sequence
gtagtatgctccgtatagtgattgt

SEQ ID NO: 29429 - DNA, 25 bp, Probe Sequence
tgtagtatgctccgtatagtgattg

SEQ ID NO: 29430 - DNA, 25 bp, Probe Sequence
agtatgctccgtatagtgattgtag

SEQ ID NO: 29431 - DNA, 25 bp, Probe Sequence
atgtagtatgctccgtatagtgatt

SEQ ID NO: 29432 - DNA, 25 bp, Probe Sequence
aatgtagtatgctccgtatagtgat

SEQ ID NO: 29433 - DNA, 25 bp, Probe Sequence
tagtatgctccgtatagtgattgta

SEQ ID NO: 29434 - DNA, 25 bp, Probe Sequence
taatgtagtatgctccgtatagtga

SEQ ID NO: 29435 - DNA, 25 bp, Probe Sequence
ctgtcttcttgtggatctatctcat

SEQ ID NO: 29436 - DNA, 25 bp, Probe Sequence
ctaatgtagtatgctccgtatagtg

SEQ ID NO: 29437 - DNA, 25 bp, Probe Sequence
gtcttcttgtggatctatctcatca

SEQ ID NO: 29438 - DNA, 25 bp, Probe Sequence
tgtcttcttgtggatctatctcatc

SEQ ID NO: 29439 - DNA, 25 bp, Probe Sequence
actgtcttcttgtggatctatctca

SEQ ID NO: 29440 - DNA, 25 bp, Probe Sequence
ggattcaccatctgttgagttgtaa

SEQ ID NO: 29441 - DNA, 25 bp, Probe Sequence
tcttcttgtggatctatctcatcaa

SEQ ID NO: 29442 - DNA, 25 bp, Probe Sequence
tatagtgattgtagctgttcctctg

SEQ ID NO: 29443 - DNA, 25 bp, Probe Sequence
gtatagtgattgtagctgttcctct

SEQ ID NO: 29444 - DNA, 25 bp, Probe Sequence
cgtatagtgattgtagctgttcctc

SEQ ID NO: 29445 - DNA, 25 bp, Probe Sequence
ctccgtatagtgattgtagctgttc

SEQ ID NO: 29446 - DNA, 25 bp, Probe Sequence
cactgtcttcttgtggatctatctc

SEQ ID NO: 29447 - DNA, 25 bp, Probe Sequence
aacactaatgtagtatgctccgtat

SEQ ID NO: 29448 - DNA, 25 bp, Probe Sequence
aaagaagaaatgggctggaataaac

SEQ ID NO: 29449 - DNA, 25 bp, Probe Sequence
aagaagaaatgggctggaataaact

SEQ ID NO: 29450 - DNA, 25 bp, Probe Sequence
ctgttgagttgtaaatgtgagagaa

SEQ ID NO: 29451 - DNA, 25 bp, Probe Sequence
acactaatgtagtatgctccgtata

SEQ ID NO: 29452 - DNA, 25 bp, Probe Sequence
tatgaataagaggtggacacaacag

SEQ ID NO: 29453 - DNA, 25 bp, Probe Sequence
ctatgaataagaggtggacacaaca

SEQ ID NO: 29454 - DNA, 25 bp, Probe Sequence
tctatgaataagaggtggacacaac

SEQ ID NO: 29455 - DNA, 25 bp, Probe Sequence
ttaagcctgaagaactggttgacta

SEQ ID NO: 29456 - DNA, 25 bp, Probe Sequence
cttcattccattgacttagaggcaa

SEQ ID NO: 29457 - DNA, 25 bp, Probe Sequence
ttcattccattgacttagaggcaac

SEQ ID NO: 29458 - DNA, 25 bp, Probe Sequence
gtctatgaataagaggtggacacaa

SEQ ID NO: 29459 - DNA, 25 bp, Probe Sequence
taagcctgaagaactggttgactac

SEQ ID NO: 29460 - DNA, 25 bp, Probe Sequence
tcttcattccattgacttagaggca

SEQ ID NO: 29461 - DNA, 25 bp, Probe Sequence
ttgacttagaggcaacaggattgat

SEQ ID NO: 29462 - DNA, 25 bp, Probe Sequence
attgacttagaggcaacaggattga

SEQ ID NO: 29463 - DNA, 25 bp, Probe Sequence
cattgacttagaggcaacaggattg

SEQ ID NO: 29464 - DNA, 25 bp, Probe Sequence
cattccattgacttagaggcaacag

SEQ ID NO: 29465 - DNA, 25 bp, Probe Sequence
ggtctatgaataagaggtggacaca

SEQ ID NO: 29466 - DNA, 25 bp, Probe Sequence
tcattccattgacttagaggcaaca

SEQ ID NO: 29467 - DNA, 25 bp, Probe Sequence
cagctcttcattccattgacttaga

SEQ ID NO: 29468 - DNA, 25 bp, Probe Sequence
cctgaagaactggttgactacaagt

SEQ ID NO: 29469 - DNA, 25 bp, Probe Sequence
aaagaaatcagcctatggtttaagc

SEQ ID NO: 29470 - DNA, 25 bp, Probe Sequence
acagctcttcattccattgacttag

SEQ ID NO: 29471 - DNA, 25 bp, Probe Sequence
cacagctcttcattccattgactta

SEQ ID NO: 29472 - DNA, 25 bp, Probe Sequence
ccattgacttagaggcaacaggatt

SEQ ID NO: 29473 - DNA, 25 bp, Probe Sequence
attccattgacttagaggcaacagg

SEQ ID NO: 29474 - DNA, 25 bp, Probe Sequence
tgacttagaggcaacaggattgatc

SEQ ID NO: 29475 - DNA, 25 bp, Probe Sequence
aagaaatcagcctatggtttaagcc

SEQ ID NO: 29476 - DNA, 25 bp, Probe Sequence
atgataggacatagtagtagcggtg

SEQ ID NO: 29477 - DNA, 25 bp, Probe Sequence
tatgataggacatagtagtagcggt

SEQ ID NO: 29478 - DNA, 25 bp, Probe Sequence
ctattgccaagaatgtgttgtccaa

SEQ ID NO: 29479 - DNA, 25 bp, Probe Sequence
ttatgataggacatagtagtagcgg

SEQ ID NO: 29480 - DNA, 25 bp, Probe Sequence
gactgaccaagaggctattcaagat

SEQ ID NO: 29481 - DNA, 25 bp, Probe Sequence
gataggacatagtagtagcggtggt

SEQ ID NO: 29482 - DNA, 25 bp, Probe Sequence
tgataggacatagtagtagcggtgg

SEQ ID NO: 29483 - DNA, 25 bp, Probe Sequence
atgactgaccaagaggctattcaag

SEQ ID NO: 29484 - DNA, 25 bp, Probe Sequence
gatgactgaccaagaggctattcaa

SEQ ID NO: 29485 - DNA, 25 bp, Probe Sequence
tgtttgataaatgttgtccaggttc

SEQ ID NO: 29486 - DNA, 25 bp, Probe Sequence
gtttgataaatgttgtccaggttct

SEQ ID NO: 29487 - DNA, 25 bp, Probe Sequence
gtgtttgataaatgttgtccaggtt

SEQ ID NO: 29488 - DNA, 25 bp, Probe Sequence
ctttccctaccgtgtttgataaatg

SEQ ID NO: 29489 - DNA, 25 bp, Probe Sequence
ataaatgttgtccaggttctattgc

SEQ ID NO: 29490 - DNA, 25 bp, Probe Sequence
ctaccgtgtttgataaatgttgtcc

SEQ ID NO: 29491 - DNA, 25 bp, Probe Sequence
cctaccgtgtttgataaatgttgtc

SEQ ID NO: 29492 - DNA, 25 bp, Probe Sequence
actttccctaccgtgtttgataaat

SEQ ID NO: 29493 - DNA, 25 bp, Probe Sequence
ttccctaccgtgtttgataaatgtt

SEQ ID NO: 29494 - DNA, 25 bp, Probe Sequence
tttccctaccgtgtttgataaatgt

SEQ ID NO: 29495 - DNA, 25 bp, Probe Sequence
tctattgccaagaatgtgttgtcca

SEQ ID NO: 29496 - DNA, 25 bp, Probe Sequence
taccgtgtttgataaatgttgtcca

SEQ ID NO: 29497 - DNA, 25 bp, Probe Sequence
actgaccaagaggctattcaagatc

SEQ ID NO: 29498 - DNA, 25 bp, Probe Sequence
gttatgataggacatagtagtagcg

SEQ ID NO: 29499 - DNA, 25 bp, Probe Sequence
aactttccctaccgtgtttgataaa

SEQ ID NO: 29500 - DNA, 25 bp, Probe Sequence
tgtcaatatccttacgcataacctt

SEQ ID NO: 29501 - DNA, 25 bp, Probe Sequence
ttgtcaatatccttacgcataacct

SEQ ID NO: 29502 - DNA, 25 bp, Probe Sequence
caggagtctaagagaatatacgctt

SEQ ID NO: 29503 - DNA, 25 bp, Probe Sequence
gtcaatatccttacgcataaccttg

SEQ ID NO: 29504 - DNA, 25 bp, Probe Sequence
ataggaactggaatgaagtggttac

SEQ ID NO: 29505 - DNA, 25 bp, Probe Sequence
gataggaactggaatgaagtggtta

SEQ ID NO: 29506 - DNA, 25 bp, Probe Sequence
ccaggagtctaagagaatatacgct

SEQ ID NO: 29507 - DNA, 25 bp, Probe Sequence
accaggagtctaagagaatatacgc

SEQ ID NO: 29508 - DNA, 25 bp, Probe Sequence
aagtatgaactggaagaggatggat

SEQ ID NO: 29509 - DNA, 25 bp, Probe Sequence
agattgaagcactgaagtcattctc

SEQ ID NO: 29510 - DNA, 25 bp, Probe Sequence
gagattgaagcactgaagtcattct

SEQ ID NO: 29511 - DNA, 25 bp, Probe Sequence
taccaggagtctaagagaatatacg

SEQ ID NO: 29512 - DNA, 25 bp, Probe Sequence
gaatgtcacaagcacagaatctatg

SEQ ID NO: 29513 - DNA, 25 bp, Probe Sequence
gattgaagcactgaagtcattctca

SEQ ID NO: 29514 - DNA, 25 bp, Probe Sequence
taggaactggaatgaagtggttaca

SEQ ID NO: 29515 - DNA, 25 bp, Probe Sequence
gaagtatgaactggaagaggatgga

SEQ ID NO: 29516 - DNA, 25 bp, Probe Sequence
ggaatgtcacaagcacagaatctat

SEQ ID NO: 29517 - DNA, 25 bp, Probe Sequence
caactctgaagtcactgtgtactac

SEQ ID NO: 29518 - DNA, 25 bp, Probe Sequence
aatgtcacaagcacagaatctatgg

SEQ ID NO: 29519 - DNA, 25 bp, Probe Sequence
tctatgattgacaagtaccaggctt

SEQ ID NO: 29520 - DNA, 25 bp, Probe Sequence
gaggtggataggaactggaatgaag

SEQ ID NO: 29521 - DNA, 25 bp, Probe Sequence
agtatgaactggaagaggatggatc

SEQ ID NO: 29522 - DNA, 25 bp, Probe Sequence
cgagattgaagcactgaagtcattc

SEQ ID NO: 29523 - DNA, 25 bp, Probe Sequence
ggataggaactggaatgaagtggtt

SEQ ID NO: 29524 - DNA, 25 bp, Probe Sequence
tgtgtgtgtattgtgaagtggtata

SEQ ID NO: 29525 - DNA, 25 bp, Probe Sequence
gtccagcattctcaactatatcaag

SEQ ID NO: 29526 - DNA, 25 bp, Probe Sequence
gtgtgtgtattgtgaagtggtataa

SEQ ID NO: 29527 - DNA, 25 bp, Probe Sequence
ctgtgtgtgtattgtgaagtggtat

SEQ ID NO: 29528 - DNA, 25 bp, Probe Sequence
tgtgtgtattgtgaagtggtataag

SEQ ID NO: 29529 - DNA, 25 bp, Probe Sequence
gtgtgtattgtgaagtggtataaga

SEQ ID NO: 29530 - DNA, 25 bp, Probe Sequence
aatctgtgtgtgtattgtgaagtgg

SEQ ID NO: 29531 - DNA, 25 bp, Probe Sequence
ctcaagtccagcattctcaactata

SEQ ID NO: 29532 - DNA, 25 bp, Probe Sequence
tccagcattctcaactatatcaagt

SEQ ID NO: 29533 - DNA, 25 bp, Probe Sequence
agtccagcattctcaactatatcaa

SEQ ID NO: 29534 - DNA, 25 bp, Probe Sequence
aagtccagcattctcaactatatca

SEQ ID NO: 29535 - DNA, 25 bp, Probe Sequence
tcaagtccagcattctcaactatat

SEQ ID NO: 29536 - DNA, 25 bp, Probe Sequence
caagtccagcattctcaactatatc

SEQ ID NO: 29537 - DNA, 25 bp, Probe Sequence
tctgtgtgtgtattgtgaagtggta

SEQ ID NO: 29538 - DNA, 25 bp, Probe Sequence
tgtgtattgtgaagtggtataagaa

SEQ ID NO: 29539 - DNA, 25 bp, Probe Sequence
attcattctactcatactacacacc

SEQ ID NO: 29540 - DNA, 25 bp, Probe Sequence
taatgctgacagatccaagacctag

SEQ ID NO: 29541 - DNA, 25 bp, Probe Sequence
ctaatgctgacagatccaagaccta

SEQ ID NO: 29542 - DNA, 25 bp, Probe Sequence
actcaagtccagcattctcaactat

SEQ ID NO: 29543 - DNA, 25 bp, Probe Sequence
atctgtgtgtgtattgtgaagtggt

SEQ ID NO: 29544 - DNA, 25 bp, Probe Sequence
aactcaagtccagcattctcaacta

SEQ ID NO: 29545 - DNA, 25 bp, Probe Sequence
ggtagcaagctgtagtagataatga

SEQ ID NO: 29546 - DNA, 25 bp, Probe Sequence
aggtagcaagctgtagtagataatg

SEQ ID NO: 29547 - DNA, 25 bp, Probe Sequence
agcaagctgtagtagataatgagaa

SEQ ID NO: 29548 - DNA, 25 bp, Probe Sequence
ataggtaaccaggtccaatcagtaa

SEQ ID NO: 29549 - DNA, 25 bp, Probe Sequence
catccaagatattgacctctgtgaa

SEQ ID NO: 29550 - DNA, 25 bp, Probe Sequence
atcatccaagatattgacctctgtg

SEQ ID NO: 29551 - DNA, 25 bp, Probe Sequence
gataggtaaccaggtccaatcagta

SEQ ID NO: 29552 - DNA, 25 bp, Probe Sequence
tcatccaagatattgacctctgtga

SEQ ID NO: 29553 - DNA, 25 bp, Probe Sequence
gatcatccaagatattgacctctgt

SEQ ID NO: 29554 - DNA, 25 bp, Probe Sequence
agatcatccaagatattgacctctg

SEQ ID NO: 29555 - DNA, 25 bp, Probe Sequence
aagatcatccaagatattgacctct

SEQ ID NO: 29556 - DNA, 25 bp, Probe Sequence
agaagatcatccaagatattgacct

SEQ ID NO: 29557 - DNA, 25 bp, Probe Sequence
gaagatcatccaagatattgacctc

SEQ ID NO: 29558 - DNA, 25 bp, Probe Sequence
aacgcagagagtgtagagaggataa

SEQ ID NO: 29559 - DNA, 25 bp, Probe Sequence
aagaagatcatccaagatattgacc

SEQ ID NO: 29560 - DNA, 25 bp, Probe Sequence
acaaagcccaagatatagtcaagaa

SEQ ID NO: 29561 - DNA, 25 bp, Probe Sequence
aacaaagcccaagatatagtcaaga

SEQ ID NO: 29562 - DNA, 25 bp, Probe Sequence
caaagcccaagatatagtcaagaag

SEQ ID NO: 29563 - DNA, 25 bp, Probe Sequence
aaagcccaagatatagtcaagaaga

SEQ ID NO: 29564 - DNA, 25 bp, Probe Sequence
aaacaaagcccaagatatagtcaag

SEQ ID NO: 29565 - DNA, 25 bp, Probe Sequence
aagcccaagatatagtcaagaagat

SEQ ID NO: 29566 - DNA, 25 bp, Probe Sequence
agtcaagaagatcatccaagatatt

SEQ ID NO: 29567 - DNA, 25 bp, Probe Sequence
gaaatgataggtaaccaggtccaat

SEQ ID NO: 29568 - DNA, 25 bp, Probe Sequence
tagaaatgataggtaaccaggtcca

SEQ ID NO: 29569 - DNA, 25 bp, Probe Sequence
ttagaaatgataggtaaccaggtcc

SEQ ID NO: 29570 - DNA, 25 bp, Probe Sequence
aaatgataggtaaccaggtccaatc

SEQ ID NO: 29571 - DNA, 25 bp, Probe Sequence
atccaagatattgacctctgtgaaa

SEQ ID NO: 29572 - DNA, 25 bp, Probe Sequence
ttagttggcagttgttaagtccttg

SEQ ID NO: 29573 - DNA, 25 bp, Probe Sequence
gtcatctagcattaggtatatctcc

SEQ ID NO: 29574 - DNA, 25 bp, Probe Sequence
tgtgtcatctagcattaggtatatc

SEQ ID NO: 29575 - DNA, 25 bp, Probe Sequence
tttgtgaagtgaaggatttgtgttt

SEQ ID NO: 29576 - DNA, 25 bp, Probe Sequence
ttaggtatatctcccagtgctatcc

SEQ ID NO: 29577 - DNA, 25 bp, Probe Sequence
tctcttcatattcagcttgcacatt

SEQ ID NO: 29578 - DNA, 25 bp, Probe Sequence
ttctcttcatattcagcttgcacat

SEQ ID NO: 29579 - DNA, 25 bp, Probe Sequence
tagttggcagttgttaagtccttgg

SEQ ID NO: 29580 - DNA, 25 bp, Probe Sequence
tttagttggcagttgttaagtcctt

SEQ ID NO: 29581 - DNA, 25 bp, Probe Sequence
gtgtcatctagcattaggtatatct

SEQ ID NO: 29582 - DNA, 25 bp, Probe Sequence
cattaggtatatctcccagtgctat

SEQ ID NO: 29583 - DNA, 25 bp, Probe Sequence
ctagcattaggtatatctcccagtg

SEQ ID NO: 29584 - DNA, 25 bp, Probe Sequence
tctagcattaggtatatctcccagt

SEQ ID NO: 29585 - DNA, 25 bp, Probe Sequence
attaggtatatctcccagtgctatc

SEQ ID NO: 29586 - DNA, 25 bp, Probe Sequence
tgtcatctagcattaggtatatctc

SEQ ID NO: 29587 - DNA, 25 bp, Probe Sequence
cagtttcagtttcagcctaagagac

SEQ ID NO: 29588 - DNA, 25 bp, Probe Sequence
agttaggctttctcttcatattcag

SEQ ID NO: 29589 - DNA, 25 bp, Probe Sequence
taggtatatctcccagtgctatccc

SEQ ID NO: 29590 - DNA, 25 bp, Probe Sequence
atctagcattaggtatatctcccag

SEQ ID NO: 29591 - DNA, 25 bp, Probe Sequence
tcatctagcattaggtatatctccc

SEQ ID NO: 29592 - DNA, 25 bp, Probe Sequence
tattgaaaggcaaacatttgaagga

SEQ ID NO: 29593 - DNA, 25 bp, Probe Sequence
atgtgtcatctagcattaggtatat

SEQ ID NO: 29594 - DNA, 25 bp, Probe Sequence
attgaaaggcaaacatttgaaggag

SEQ ID NO: 29595 - DNA, 25 bp, Probe Sequence
ttcaattatagtgtcatgcagagta

SEQ ID NO: 29596 - DNA, 25 bp, Probe Sequence
ccagttcagtgttgcatgtataata

SEQ ID NO: 29597 - DNA, 25 bp, Probe Sequence
gttaagaatagacccaccagcattt

SEQ ID NO: 29598 - DNA, 25 bp, Probe Sequence
ataatagatttctcctcttcctgcc

SEQ ID NO: 29599 - DNA, 25 bp, Probe Sequence
gatagagcaaagcatcaaagaatct

SEQ ID NO: 29600 - DNA, 25 bp, Probe Sequence
ttaagaatagacccaccagcatttc

SEQ ID NO: 29601 - DNA, 25 bp, Probe Sequence
taatagatttctcctcttcctgccc

SEQ ID NO: 29602 - DNA, 25 bp, Probe Sequence
agttcagtgttgcatgtataataga

SEQ ID NO: 29603 - DNA, 25 bp, Probe Sequence
cagttcagtgttgcatgtataatag

SEQ ID NO: 29604 - DNA, 25 bp, Probe Sequence
atagagcaaagcatcaaagaatctt

SEQ ID NO: 29605 - DNA, 25 bp, Probe Sequence
gttcagtgttgcatgtataatagat

SEQ ID NO: 29606 - DNA, 25 bp, Probe Sequence
tactcactcactctgatttatgttt

SEQ ID NO: 29607 - DNA, 25 bp, Probe Sequence
ttactcactcactctgatttatgtt

SEQ ID NO: 29608 - DNA, 25 bp, Probe Sequence
tttactcactcactctgatttatgt

SEQ ID NO: 29609 - DNA, 25 bp, Probe Sequence
gtctacagtgatagagcaaagcatc

SEQ ID NO: 29610 - DNA, 25 bp, Probe Sequence
taagaatagacccaccagcatttcg

SEQ ID NO: 29611 - DNA, 25 bp, Probe Sequence
tataatagatttctcctcttcctgc

SEQ ID NO: 29612 - DNA, 25 bp, Probe Sequence
ccaaatacagagaatggcatcattt

SEQ ID NO: 29613 - DNA, 25 bp, Probe Sequence
aatacagagaatggcatcatttcct

SEQ ID NO: 29614 - DNA, 25 bp, Probe Sequence
aaatacagagaatggcatcatttcc

SEQ ID NO: 29615 - DNA, 25 bp, Probe Sequence
cccagttcagtgttgcatgtataat

SEQ ID NO: 29616 - DNA, 25 bp, Probe Sequence
atttcgtgggatggtcttgattcag

SEQ ID NO: 29617 - DNA, 25 bp, Probe Sequence
atacagagaatggcatcatttcctg

SEQ ID NO: 29618 - DNA, 25 bp, Probe Sequence
gatcccaaatacagagaatggcatc

SEQ ID NO: 29619 - DNA, 25 bp, Probe Sequence
caaatacagagaatggcatcatttc

SEQ ID NO: 29620 - DNA, 25 bp, Probe Sequence
ttgctaacacatcaacacagacaat

SEQ ID NO: 29621 - DNA, 25 bp, Probe Sequence
acagaattgataactgagcaaggaa

SEQ ID NO: 29622 - DNA, 25 bp, Probe Sequence
aacagaattgataactgagcaagga

SEQ ID NO: 29623 - DNA, 25 bp, Probe Sequence
tgctaacacatcaacacagacaatg

SEQ ID NO: 29624 - DNA, 25 bp, Probe Sequence
taacagaattgataactgagcaagg

SEQ ID NO: 29625 - DNA, 25 bp, Probe Sequence
agtaacagaattgataactgagcaa

SEQ ID NO: 29626 - DNA, 25 bp, Probe Sequence
aagtaacagaattgataactgagca

SEQ ID NO: 29627 - DNA, 25 bp, Probe Sequence
gtaacagaattgataactgagcaag

SEQ ID NO: 29628 - DNA, 25 bp, Probe Sequence
gctaacacatcaacacagacaatgg

SEQ ID NO: 29629 - DNA, 25 bp, Probe Sequence
tcgcaatcctcagcaacatcttaat

SEQ ID NO: 29630 - DNA, 25 bp, Probe Sequence
gtggaatagctcagaatgtcagttc

SEQ ID NO: 29631 - DNA, 25 bp, Probe Sequence
caccgttccacagtataaatatgct

SEQ ID NO: 29632 - DNA, 25 bp, Probe Sequence
cgcaatcctcagcaacatcttaatg

SEQ ID NO: 29633 - DNA, 25 bp, Probe Sequence
ttcgcaatcctcagcaacatcttaa

SEQ ID NO: 29634 - DNA, 25 bp, Probe Sequence
ttactgtggaatagctcagaatgtc

SEQ ID NO: 29635 - DNA, 25 bp, Probe Sequence
tgtggaatagctcagaatgtcagtt

SEQ ID NO: 29636 - DNA, 25 bp, Probe Sequence
catactatcctcctagccaagttgc

SEQ ID NO: 29637 - DNA, 25 bp, Probe Sequence
gcatactatcctcctagccaagttg

SEQ ID NO: 29638 - DNA, 25 bp, Probe Sequence
agaattgataactgagcaaggaaac

SEQ ID NO: 29639 - DNA, 25 bp, Probe Sequence
tactatgagaccagcttcttcacag

SEQ ID NO: 29640 - DNA, 25 bp, Probe Sequence
gaattgataactgagcaaggaaacg

SEQ ID NO: 29641 - DNA, 25 bp, Probe Sequence
gaaactttgaaccttatgtaccgag

SEQ ID NO: 29642 - DNA, 25 bp, Probe Sequence
ttaatgcacagccacaagttacaat

SEQ ID NO: 29643 - DNA, 25 bp, Probe Sequence
tactgtggaatagctcagaatgtca

SEQ ID NO: 29644 - DNA, 25 bp, Probe Sequence
ttgctgaggagtgaggaatagttga

SEQ ID NO: 29645 - DNA, 25 bp, Probe Sequence
gttgctgaggagtgaggaatagttg

SEQ ID NO: 29646 - DNA, 25 bp, Probe Sequence
attgctggttctatttaatggacat

SEQ ID NO: 29647 - DNA, 25 bp, Probe Sequence
atgttgctgaggagtgaggaatagt

SEQ ID NO: 29648 - DNA, 25 bp, Probe Sequence
gctggttctatttaatggacatgag

SEQ ID NO: 29649 - DNA, 25 bp, Probe Sequence
tgctggttctatttaatggacatga

SEQ ID NO: 29650 - DNA, 25 bp, Probe Sequence
ttgctggttctatttaatggacatg

SEQ ID NO: 29651 - DNA, 25 bp, Probe Sequence
tgttgctgaggagtgaggaatagtt

SEQ ID NO: 29652 - DNA, 25 bp, Probe Sequence
catgttgctgaggagtgaggaatag

SEQ ID NO: 29653 - DNA, 25 bp, Probe Sequence
tgctgaggagtgaggaatagttgag

SEQ ID NO: 29654 - DNA, 25 bp, Probe Sequence
tggacatgagataatgttagaggtt

SEQ ID NO: 29655 - DNA, 25 bp, Probe Sequence
atggacatgagataatgttagaggt

SEQ ID NO: 29656 - DNA, 25 bp, Probe Sequence
ctggttctatttaatggacatgaga

SEQ ID NO: 29657 - DNA, 25 bp, Probe Sequence
cattgctggttctatttaatggaca

SEQ ID NO: 29658 - DNA, 25 bp, Probe Sequence
ctgaggagtgaggaatagttgagcc

SEQ ID NO: 29659 - DNA, 25 bp, Probe Sequence
aatggacatgagataatgttagagg

SEQ ID NO: 29660 - DNA, 25 bp, Probe Sequence
aaagtgattaaacgtgcagactatg

SEQ ID NO: 29661 - DNA, 25 bp, Probe Sequence
tggttctatttaatggacatgagat

SEQ ID NO: 29662 - DNA, 25 bp, Probe Sequence
gcattgctggttctatttaatggac

SEQ ID NO: 29663 - DNA, 25 bp, Probe Sequence
ttaaagtgattaaacgtgcagacta

SEQ ID NO: 29664 - DNA, 25 bp, Probe Sequence
taaagtgattaaacgtgcagactat

SEQ ID NO: 29665 - DNA, 25 bp, Probe Sequence
cttttcttttctaccctagccattc

SEQ ID NO: 29666 - DNA, 25 bp, Probe Sequence
gagtccccttttcttttctacccta

SEQ ID NO: 29667 - DNA, 25 bp, Probe Sequence
ttttcttttctaccctagccattcc

SEQ ID NO: 29668 - DNA, 25 bp, Probe Sequence
gcattgttaatcatccatcacttcc

SEQ ID NO: 29669 - DNA, 25 bp, Probe Sequence
tattacaagcctacatgacacagtt

SEQ ID NO: 29670 - DNA, 25 bp, Probe Sequence
atattacaagcctacatgacacagt

SEQ ID NO: 29671 - DNA, 25 bp, Probe Sequence
gtatattacaagcctacatgacaca

SEQ ID NO: 29672 - DNA, 25 bp, Probe Sequence
attacaagcctacatgacacagttg

SEQ ID NO: 29673 - DNA, 25 bp, Probe Sequence
tatattacaagcctacatgacacag

SEQ ID NO: 29674 - DNA, 25 bp, Probe Sequence
tgcattgttaatcatccatcacttc

SEQ ID NO: 29675 - DNA, 25 bp, Probe Sequence
gatttattctgccaaacctgtgtag

SEQ ID NO: 29676 - DNA, 25 bp, Probe Sequence
cattgttaatcatccatcacttccc

SEQ ID NO: 29677 - DNA, 25 bp, Probe Sequence
tgttaatcatccatcacttcccatt

SEQ ID NO: 29678 - DNA, 25 bp, Probe Sequence
ttgttaatcatccatcacttcccat

SEQ ID NO: 29679 - DNA, 25 bp, Probe Sequence
attgttaatcatccatcacttccca

SEQ ID NO: 29680 - DNA, 25 bp, Probe Sequence
cttgaatagggaagtaacatttgcc

SEQ ID NO: 29681 - DNA, 25 bp, Probe Sequence
gttaatcatccatcacttcccattt

SEQ ID NO: 29682 - DNA, 25 bp, Probe Sequence
atcaatgaagcaagtacaatgttaa

SEQ ID NO: 29683 - DNA, 25 bp, Probe Sequence
aatcaatgaagcaagtacaatgtta

SEQ ID NO: 29684 - DNA, 25 bp, Probe Sequence
agagaacccagatgttgtttattga

SEQ ID NO: 29685 - DNA, 25 bp, Probe Sequence
gagagaacccagatgttgtttattg

SEQ ID NO: 29686 - DNA, 25 bp, Probe Sequence
ctgtgtctgtgtatattacaagcct

SEQ ID NO: 29687 - DNA, 25 bp, Probe Sequence
tcctgtgtctgtgtatattacaagc

SEQ ID NO: 29688 - DNA, 25 bp, Probe Sequence
ctgggaccataagtttactgaatct

SEQ ID NO: 29689 - DNA, 25 bp, Probe Sequence
tctgggaccataagtttactgaatc

SEQ ID NO: 29690 - DNA, 25 bp, Probe Sequence
gagaacccagatgttgtttattgaa

SEQ ID NO: 29691 - DNA, 25 bp, Probe Sequence
tgtctgtgtatattacaagcctaca

SEQ ID NO: 29692 - DNA, 25 bp, Probe Sequence
tgtatgatgtattagtagagcaacc

SEQ ID NO: 29693 - DNA, 25 bp, Probe Sequence
aggctactggtttgtatgatgtatt

SEQ ID NO: 29694 - DNA, 25 bp, Probe Sequence
tgatgtattagtagagcaacccatt

SEQ ID NO: 29695 - DNA, 25 bp, Probe Sequence
cattgatgataagggtattcttcgg

SEQ ID NO: 29696 - DNA, 25 bp, Probe Sequence
atgatgtattagtagagcaacccat

SEQ ID NO: 29697 - DNA, 25 bp, Probe Sequence
attgatgataagggtattcttcggc

SEQ ID NO: 29698 - DNA, 25 bp, Probe Sequence
tatgatgtattagtagagcaaccca

SEQ ID NO: 29699 - DNA, 25 bp, Probe Sequence
gtatgatgtattagtagagcaaccc

SEQ ID NO: 29700 - DNA, 25 bp, Probe Sequence
ggctactggtttgtatgatgtatta

SEQ ID NO: 29701 - DNA, 25 bp, Probe Sequence
atgataagggtattcttcggcagat

SEQ ID NO: 29702 - DNA, 25 bp, Probe Sequence
ggtattcttcggcagatcactgtaa

SEQ ID NO: 29703 - DNA, 25 bp, Probe Sequence
ttgatgataagggtattcttcggca

SEQ ID NO: 29704 - DNA, 25 bp, Probe Sequence
tctgtggatgagactttgagactag

SEQ ID NO: 29705 - DNA, 25 bp, Probe Sequence
caggctactggtttgtatgatgtat

SEQ ID NO: 29706 - DNA, 25 bp, Probe Sequence
ctctgtggatgagactttgagacta

SEQ ID NO: 29707 - DNA, 25 bp, Probe Sequence
caagacttcagattcagccgaattg

SEQ ID NO: 29708 - DNA, 25 bp, Probe Sequence
gatgataagggtattcttcggcaga

SEQ ID NO: 29709 - DNA, 25 bp, Probe Sequence
catgaacattcctttggtatcagac

SEQ ID NO: 29710 - DNA, 25 bp, Probe Sequence
gatgtattagtagagcaacccatta

SEQ ID NO: 29711 - DNA, 25 bp, Probe Sequence
tgatgataagggtattcttcggcag

SEQ ID NO: 29712 - DNA, 25 bp, Probe Sequence
tattcttcggcagatcactgtaaat

SEQ ID NO: 29713 - DNA, 25 bp, Probe Sequence
ttgtatgatgtattagtagagcaac

SEQ ID NO: 29714 - DNA, 25 bp, Probe Sequence
aagacttcagattcagccgaattgt

SEQ ID NO: 29715 - DNA, 25 bp, Probe Sequence
acaagacttcagattcagccgaatt

SEQ ID NO: 29716 - DNA, 25 bp, Probe Sequence
tggctgaagatgaagttgaggtata

SEQ ID NO: 29717 - DNA, 25 bp, Probe Sequence
atggctgaagatgaagttgaggtat

SEQ ID NO: 29718 - DNA, 25 bp, Probe Sequence
agcattatgaactcagatccattct

SEQ ID NO: 29719 - DNA, 25 bp, Probe Sequence
aatggctgaagatgaagttgaggta

SEQ ID NO: 29720 - DNA, 25 bp, Probe Sequence
agagcattatgaactcagatccatt

SEQ ID NO: 29721 - DNA, 25 bp, Probe Sequence
aagagcattatgaactcagatccat

SEQ ID NO: 29722 - DNA, 25 bp, Probe Sequence
agaagagcattatgaactcagatcc

SEQ ID NO: 29723 - DNA, 25 bp, Probe Sequence
gagcattatgaactcagatccattc

SEQ ID NO: 29724 - DNA, 25 bp, Probe Sequence
gaagagcattatgaactcagatcca

SEQ ID NO: 29725 - DNA, 25 bp, Probe Sequence
ctggagatgttagcatgttcttgtt

SEQ ID NO: 29726 - DNA, 25 bp, Probe Sequence
tggagatgttagcatgttcttgttg

SEQ ID NO: 29727 - DNA, 25 bp, Probe Sequence
acaacttctgctacccactaaataa

SEQ ID NO: 29728 - DNA, 25 bp, Probe Sequence
aacaacttctgctacccactaaata

SEQ ID NO: 29729 - DNA, 25 bp, Probe Sequence
gctggaaagtgaaataacctatgac

SEQ ID NO: 29730 - DNA, 25 bp, Probe Sequence
tgctggaaagtgaaataacctatga

SEQ ID NO: 29731 - DNA, 25 bp, Probe Sequence
ctgctggaaagtgaaataacctatg

SEQ ID NO: 29732 - DNA, 25 bp, Probe Sequence
aacattggatacatagaagacctaa

SEQ ID NO: 29733 - DNA, 25 bp, Probe Sequence
ctgctcttctgaacaacttctgcta

SEQ ID NO: 29734 - DNA, 25 bp, Probe Sequence
catgttcttgttgcttccagatgaa

SEQ ID NO: 29735 - DNA, 25 bp, Probe Sequence
tgcccttctgtaataaatatctgga

SEQ ID NO: 29736 - DNA, 25 bp, Probe Sequence
gctgaagatgaagttgaggtataca

SEQ ID NO: 29737 - DNA, 25 bp, Probe Sequence
gaatgctgtctacttcaaaggaaag

SEQ ID NO: 29738 - DNA, 25 bp, Probe Sequence
attgctcactgcctatttaatgtag

SEQ ID NO: 29739 - DNA, 25 bp, Probe Sequence
gaatgacctgtttctttctgaagtg

SEQ ID NO: 29740 - DNA, 25 bp, Probe Sequence
aagtctgagatggattgcatataca

SEQ ID NO: 29741 - DNA, 25 bp, Probe Sequence
catccctttggtattgatttcacag

SEQ ID NO: 29742 - DNA, 25 bp, Probe Sequence
atccctttggtattgatttcacagt

SEQ ID NO: 29743 - DNA, 25 bp, Probe Sequence
cacatccctttggtattgatttcac

SEQ ID NO: 29744 - DNA, 25 bp, Probe Sequence
tgagatggattgcatatacagtgtg

SEQ ID NO: 29745 - DNA, 25 bp, Probe Sequence
acatccctttggtattgatttcaca

SEQ ID NO: 29746 - DNA, 25 bp, Probe Sequence
atggctaaggaaggacaagaagttg

SEQ ID NO: 29747 - DNA, 25 bp, Probe Sequence
tccctttggtattgatttcacagtc

SEQ ID NO: 29748 - DNA, 25 bp, Probe Sequence
cctttggtattgatttcacagtcag

SEQ ID NO: 29749 - DNA, 25 bp, Probe Sequence
ctttggtattgatttcacagtcagc

SEQ ID NO: 29750 - DNA, 25 bp, Probe Sequence
catggctaaggaaggacaagaagtt

SEQ ID NO: 29751 - DNA, 25 bp, Probe Sequence
tctgagatggattgcatatacagtg

SEQ ID NO: 29752 - DNA, 25 bp, Probe Sequence
gtctgagatggattgcatatacagt

SEQ ID NO: 29753 - DNA, 25 bp, Probe Sequence
agtctgagatggattgcatatacag

SEQ ID NO: 29754 - DNA, 25 bp, Probe Sequence
ctgagatggattgcatatacagtgt

SEQ ID NO: 29755 - DNA, 25 bp, Probe Sequence
ccctttggtattgatttcacagtca

SEQ ID NO: 29756 - DNA, 25 bp, Probe Sequence
ccacatccctttggtattgatttca

SEQ ID NO: 29757 - DNA, 25 bp, Probe Sequence
tttggtattgatttcacagtcagct

SEQ ID NO: 29758 - DNA, 25 bp, Probe Sequence
aaagtctgagatggattgcatatac

SEQ ID NO: 29759 - DNA, 25 bp, Probe Sequence
cccacatccctttggtattgatttc

SEQ ID NO: 29760 - DNA, 25 bp, Probe Sequence
caaagtctgagatggattgcatata

SEQ ID NO: 29761 - DNA, 25 bp, Probe Sequence
attccctatgtcctgtgacctacaa

SEQ ID NO: 29762 - DNA, 25 bp, Probe Sequence
tttaattttacccaggaaggactca

SEQ ID NO: 29763 - DNA, 25 bp, Probe Sequence
ttaattttacccaggaaggactcac

SEQ ID NO: 29764 - DNA, 25 bp, Probe Sequence
actgtcagtcttattggtgcttata

SEQ ID NO: 29765 - DNA, 25 bp, Probe Sequence
ctgtcagtcttattggtgcttataa

SEQ ID NO: 29766 - DNA, 25 bp, Probe Sequence
taataaggagtgcatctggaccata

SEQ ID NO: 29767 - DNA, 25 bp, Probe Sequence
aataaggagtgcatctggaccataa

SEQ ID NO: 29768 - DNA, 25 bp, Probe Sequence
ctaataaggagtgcatctggaccat

SEQ ID NO: 29769 - DNA, 25 bp, Probe Sequence
ataaggagtgcatctggaccataac

SEQ ID NO: 29770 - DNA, 25 bp, Probe Sequence
atgaagaaaggagtcagttatctgc

SEQ ID NO: 29771 - DNA, 25 bp, Probe Sequence
ccatgaagaaaggagtcagttatct

SEQ ID NO: 29772 - DNA, 25 bp, Probe Sequence
gaagaaaggagtcagttatctgctg

SEQ ID NO: 29773 - DNA, 25 bp, Probe Sequence
cccatgaagaaaggagtcagttatc

SEQ ID NO: 29774 - DNA, 25 bp, Probe Sequence
gcctctcttcttatccaaataaatg

SEQ ID NO: 29775 - DNA, 25 bp, Probe Sequence
tgaagaaaggagtcagttatctgct

SEQ ID NO: 29776 - DNA, 25 bp, Probe Sequence
catgaagaaaggagtcagttatctg

SEQ ID NO: 29777 - DNA, 25 bp, Probe Sequence
tgtcagtcttattggtgcttataaa

SEQ ID NO: 29778 - DNA, 25 bp, Probe Sequence
agatcctcaccaacctaagcaagag

SEQ ID NO: 29779 - DNA, 25 bp, Probe Sequence
cagatcctcaccaacctaagcaaga

SEQ ID NO: 29780 - DNA, 25 bp, Probe Sequence
cctctcttcttatccaaataaatgt

SEQ ID NO: 29781 - DNA, 25 bp, Probe Sequence
ctcaccaacctaagcaagaggaagt

SEQ ID NO: 29782 - DNA, 25 bp, Probe Sequence
tattggtgcttataaaactggagga

SEQ ID NO: 29783 - DNA, 25 bp, Probe Sequence
ggcctctcttcttatccaaataaat

SEQ ID NO: 29784 - DNA, 25 bp, Probe Sequence
attggtgcttataaaactggaggac

SEQ ID NO: 29785 - DNA, 25 bp, Probe Sequence
cctaataaggagtgcatctggacca

SEQ ID NO: 29786 - DNA, 25 bp, Probe Sequence
tcaccaacctaagcaagaggaagtg

SEQ ID NO: 29787 - DNA, 25 bp, Probe Sequence
taaggagtgcatctggaccataacg

SEQ ID NO: 29788 - DNA, 25 bp, Probe Sequence
gctatcttcacatagttctccagtt

SEQ ID NO: 29789 - DNA, 25 bp, Probe Sequence
tcttcacatagttctccagttgtat

SEQ ID NO: 29790 - DNA, 25 bp, Probe Sequence
atcttcacatagttctccagttgta

SEQ ID NO: 29791 - DNA, 25 bp, Probe Sequence
tatcttcacatagttctccagttgt

SEQ ID NO: 29792 - DNA, 25 bp, Probe Sequence
aacaccttgtgaccttctctatatc

SEQ ID NO: 29793 - DNA, 25 bp, Probe Sequence
cttgtgaccttctctatatcatgct

SEQ ID NO: 29794 - DNA, 25 bp, Probe Sequence
caccttgtgaccttctctatatcat

SEQ ID NO: 29795 - DNA, 25 bp, Probe Sequence
ctatcttcacatagttctccagttg

SEQ ID NO: 29796 - DNA, 25 bp, Probe Sequence
accttgtgaccttctctatatcatg

SEQ ID NO: 29797 - DNA, 25 bp, Probe Sequence
tctaacaccttgtgaccttctctat

SEQ ID NO: 29798 - DNA, 25 bp, Probe Sequence
ttgtgaccttctctatatcatgctt

SEQ ID NO: 29799 - DNA, 25 bp, Probe Sequence
acaccttgtgaccttctctatatca

SEQ ID NO: 29800 - DNA, 25 bp, Probe Sequence
ctaacaccttgtgaccttctctata

SEQ ID NO: 29801 - DNA, 25 bp, Probe Sequence
cttcacatagttctccagttgtatg

SEQ ID NO: 29802 - DNA, 25 bp, Probe Sequence
ccttgtgaccttctctatatcatgc

SEQ ID NO: 29803 - DNA, 25 bp, Probe Sequence
ctctaacaccttgtgaccttctcta

SEQ ID NO: 29804 - DNA, 25 bp, Probe Sequence
taacaccttgtgaccttctctatat

SEQ ID NO: 29805 - DNA, 25 bp, Probe Sequence
ttctgtcttctctaacaccttgtga

SEQ ID NO: 29806 - DNA, 25 bp, Probe Sequence
ttcacatagttctccagttgtatgg

SEQ ID NO: 29807 - DNA, 25 bp, Probe Sequence
caacacagagcactaggttcaattc

SEQ ID NO: 29808 - DNA, 25 bp, Probe Sequence
cgctatcttcacatagttctccagt

SEQ ID NO: 29809 - DNA, 25 bp, Probe Sequence
ttctctaacaccttgtgaccttctc

SEQ ID NO: 29810 - DNA, 25 bp, Probe Sequence
cttctctaacaccttgtgaccttct

SEQ ID NO: 29811 - DNA, 25 bp, Probe Sequence
tcttctctaacaccttgtgaccttc

SEQ ID NO: 29812 - DNA, 25 bp, Probe Sequence
atcttcttgtaagcacatccagagt

SEQ ID NO: 29813 - DNA, 25 bp, Probe Sequence
gatcttcttgtaagcacatccagag

SEQ ID NO: 29814 - DNA, 25 bp, Probe Sequence
atacacacagggaaacaaacacata

SEQ ID NO: 29815 - DNA, 25 bp, Probe Sequence
tacacacagggaaacaaacacatac

SEQ ID NO: 29816 - DNA, 25 bp, Probe Sequence
ttcttgtaagcacatccagagtgag

SEQ ID NO: 29817 - DNA, 25 bp, Probe Sequence
cttcttgtaagcacatccagagtga

SEQ ID NO: 29818 - DNA, 25 bp, Probe Sequence
tcttcttgtaagcacatccagagtg

SEQ ID NO: 29819 - DNA, 25 bp, Probe Sequence
catacacacagggaaacaaacacat

SEQ ID NO: 29820 - DNA, 25 bp, Probe Sequence
ctatgtttgaaagaagaatgtgtgt

SEQ ID NO: 29821 - DNA, 25 bp, Probe Sequence
cgatcttcttgtaagcacatccaga

SEQ ID NO: 29822 - DNA, 25 bp, Probe Sequence
agggaaacaaacacataccacaaac

SEQ ID NO: 29823 - DNA, 25 bp, Probe Sequence
cagggaaacaaacacataccacaaa

SEQ ID NO: 29824 - DNA, 25 bp, Probe Sequence
acgatcttcttgtaagcacatccag

SEQ ID NO: 29825 - DNA, 25 bp, Probe Sequence
gacgatcttcttgtaagcacatcca

SEQ ID NO: 29826 - DNA, 25 bp, Probe Sequence
ctaattccctcaacagcagaaccta

SEQ ID NO: 29827 - DNA, 25 bp, Probe Sequence
atgtttgaaagaagaatgtgtgtac

SEQ ID NO: 29828 - DNA, 25 bp, Probe Sequence
tctatgtttgaaagaagaatgtgtg

SEQ ID NO: 29829 - DNA, 25 bp, Probe Sequence
taattccctcaacagcagaacctac

SEQ ID NO: 29830 - DNA, 25 bp, Probe Sequence
ttgacgacgatcttcttgtaagcac

SEQ ID NO: 29831 - DNA, 25 bp, Probe Sequence
gagggaggaggaaactgtttacttt

SEQ ID NO: 29832 - DNA, 25 bp, Probe Sequence
cttgtaagcacatccagagtgagac

SEQ ID NO: 29833 - DNA, 25 bp, Probe Sequence
tcttgtaagcacatccagagtgaga

SEQ ID NO: 29834 - DNA, 25 bp, Probe Sequence
acgacgatcttcttgtaagcacatc

SEQ ID NO: 29835 - DNA, 25 bp, Probe Sequence
gacgacgatcttcttgtaagcacat

SEQ ID NO: 29836 - DNA, 25 bp, Probe Sequence
ttagaatgttactcaatcagcactc

SEQ ID NO: 29837 - DNA, 25 bp, Probe Sequence
agaatgttactcaatcagcactctt

SEQ ID NO: 29838 - DNA, 25 bp, Probe Sequence
tagaatgttactcaatcagcactct

SEQ ID NO: 29839 - DNA, 25 bp, Probe Sequence
gtctccttccagataatcttctcag

SEQ ID NO: 29840 - DNA, 25 bp, Probe Sequence
agtctccttccagataatcttctca

SEQ ID NO: 29841 - DNA, 25 bp, Probe Sequence
attagaatgttactcaatcagcact

SEQ ID NO: 29842 - DNA, 25 bp, Probe Sequence
cagataatcttctcaggacaccatc

SEQ ID NO: 29843 - DNA, 25 bp, Probe Sequence
aagtctccttccagataatcttctc

SEQ ID NO: 29844 - DNA, 25 bp, Probe Sequence
tatctacattaaggctctgtcaaca

SEQ ID NO: 29845 - DNA, 25 bp, Probe Sequence
gcagttatctacattaaggctctgt

SEQ ID NO: 29846 - DNA, 25 bp, Probe Sequence
agttatctacattaaggctctgtca

SEQ ID NO: 29847 - DNA, 25 bp, Probe Sequence
ggaaggtatggtgttcagaactata

SEQ ID NO: 29848 - DNA, 25 bp, Probe Sequence
ccagataatcttctcaggacaccat

SEQ ID NO: 29849 - DNA, 25 bp, Probe Sequence
tggaaggtatggtgttcagaactat

SEQ ID NO: 29850 - DNA, 25 bp, Probe Sequence
cagttatctacattaaggctctgtc

SEQ ID NO: 29851 - DNA, 25 bp, Probe Sequence
aattagaatgttactcaatcagcac

SEQ ID NO: 29852 - DNA, 25 bp, Probe Sequence
caattagaatgttactcaatcagca

SEQ ID NO: 29853 - DNA, 25 bp, Probe Sequence
ttggaaggtatggtgttcagaacta

SEQ ID NO: 29854 - DNA, 25 bp, Probe Sequence
ttatctacattaaggctctgtcaac

SEQ ID NO: 29855 - DNA, 25 bp, Probe Sequence
gttatctacattaaggctctgtcaa

SEQ ID NO: 29856 - DNA, 25 bp, Probe Sequence
taagtctccttccagataatcttct

SEQ ID NO: 29857 - DNA, 25 bp, Probe Sequence
tctccttccagataatcttctcagg

SEQ ID NO: 29858 - DNA, 25 bp, Probe Sequence
cttccagataatcttctcaggacac

SEQ ID NO: 29859 - DNA, 25 bp, Probe Sequence
tcaattagaatgttactcaatcagc

SEQ ID NO: 29860 - DNA, 25 bp, Probe Sequence
atgacatagaccgagaactgaagac

SEQ ID NO: 29861 - DNA, 25 bp, Probe Sequence
catgacatagaccgagaactgaaga

SEQ ID NO: 29862 - DNA, 25 bp, Probe Sequence
ccttgtttgattcaccagactttag

SEQ ID NO: 29863 - DNA, 25 bp, Probe Sequence
tccttgtttgattcaccagacttta

SEQ ID NO: 29864 - DNA, 25 bp, Probe Sequence
cttgtttgattcaccagactttagc

SEQ ID NO: 29865 - DNA, 25 bp, Probe Sequence
atttctacttggatgaagagaggac

SEQ ID NO: 29866 - DNA, 25 bp, Probe Sequence
atccttgtttgattcaccagacttt

SEQ ID NO: 29867 - DNA, 25 bp, Probe Sequence
ggatttctacttggatgaagagagg

SEQ ID NO: 29868 - DNA, 25 bp, Probe Sequence
gacccagaatttgaccttgatagag

SEQ ID NO: 29869 - DNA, 25 bp, Probe Sequence
gatttctacttggatgaagagagga

SEQ ID NO: 29870 - DNA, 25 bp, Probe Sequence
aggatttctacttggatgaagagag

SEQ ID NO: 29871 - DNA, 25 bp, Probe Sequence
gaggatttctacttggatgaagaga

SEQ ID NO: 29872 - DNA, 25 bp, Probe Sequence
ttgtttgattcaccagactttagca

SEQ ID NO: 29873 - DNA, 25 bp, Probe Sequence
cgaggatttctacttggatgaagag

SEQ ID NO: 29874 - DNA, 25 bp, Probe Sequence
ctatcaccttaaccagcctttcatc

SEQ ID NO: 29875 - DNA, 25 bp, Probe Sequence
ttgattcaccagactttagcaagat

SEQ ID NO: 29876 - DNA, 25 bp, Probe Sequence
tttgattcaccagactttagcaaga

SEQ ID NO: 29877 - DNA, 25 bp, Probe Sequence
gtttgattcaccagactttagcaag

SEQ ID NO: 29878 - DNA, 25 bp, Probe Sequence
ttacgctatggcttggattcagatc

SEQ ID NO: 29879 - DNA, 25 bp, Probe Sequence
tatcaccttaaccagcctttcatct

SEQ ID NO: 29880 - DNA, 25 bp, Probe Sequence
gtgacccagaatttgaccttgatag

SEQ ID NO: 29881 - DNA, 25 bp, Probe Sequence
tgacccagaatttgaccttgataga

SEQ ID NO: 29882 - DNA, 25 bp, Probe Sequence
tgtttgattcaccagactttagcaa

SEQ ID NO: 29883 - DNA, 25 bp, Probe Sequence
actatcaccttaaccagcctttcat

SEQ ID NO: 29884 - DNA, 25 bp, Probe Sequence
aattctcagaactcagatgtggcta

SEQ ID NO: 29885 - DNA, 25 bp, Probe Sequence
attctcagaactcagatgtggctag

SEQ ID NO: 29886 - DNA, 25 bp, Probe Sequence
tttcttctcctatgtcccaattctc

SEQ ID NO: 29887 - DNA, 25 bp, Probe Sequence
ctttcttctcctatgtcccaattct

SEQ ID NO: 29888 - DNA, 25 bp, Probe Sequence
ttcttctcctatgtcccaattctca

SEQ ID NO: 29889 - DNA, 25 bp, Probe Sequence
tcttctcctatgtcccaattctcag

SEQ ID NO: 29890 - DNA, 25 bp, Probe Sequence
ttctcagaactcagatgtggctaga

SEQ ID NO: 29891 - DNA, 25 bp, Probe Sequence
gctttcttctcctatgtcccaattc

SEQ ID NO: 29892 - DNA, 25 bp, Probe Sequence
caattctcagaactcagatgtggct

SEQ ID NO: 29893 - DNA, 25 bp, Probe Sequence
ctatgtcccaattctcagaactcag

SEQ ID NO: 29894 - DNA, 25 bp, Probe Sequence
cttctcctatgtcccaattctcaga

SEQ ID NO: 29895 - DNA, 25 bp, Probe Sequence
tatgtcccaattctcagaactcaga

SEQ ID NO: 29896 - DNA, 25 bp, Probe Sequence
atgtcccaattctcagaactcagat

SEQ ID NO: 29897 - DNA, 25 bp, Probe Sequence
tcctatgtcccaattctcagaactc

SEQ ID NO: 29898 - DNA, 25 bp, Probe Sequence
ctcctatgtcccaattctcagaact

SEQ ID NO: 29899 - DNA, 25 bp, Probe Sequence
tctcctatgtcccaattctcagaac

SEQ ID NO: 29900 - DNA, 25 bp, Probe Sequence
tctcagaactcagatgtggctagac

SEQ ID NO: 29901 - DNA, 25 bp, Probe Sequence
cctatgtcccaattctcagaactca

SEQ ID NO: 29902 - DNA, 25 bp, Probe Sequence
ggctttcttctcctatgtcccaatt

SEQ ID NO: 29903 - DNA, 25 bp, Probe Sequence
tcccaattctcagaactcagatgtg

SEQ ID NO: 29904 - DNA, 25 bp, Probe Sequence
gtcccaattctcagaactcagatgt

SEQ ID NO: 29905 - DNA, 25 bp, Probe Sequence
tgtcccaattctcagaactcagatg

SEQ ID NO: 29906 - DNA, 25 bp, Probe Sequence
ctcagaactcagatgtggctagacc

SEQ ID NO: 29907 - DNA, 25 bp, Probe Sequence
ttctcctatgtcccaattctcagaa

SEQ ID NO: 29908 - DNA, 25 bp, Probe Sequence
acggagaagatgaagacagacattc

SEQ ID NO: 29909 - DNA, 25 bp, Probe Sequence
gacggagaagatgaagacagacatt

SEQ ID NO: 29910 - DNA, 25 bp, Probe Sequence
atgacggagaagatgaagacagaca

SEQ ID NO: 29911 - DNA, 25 bp, Probe Sequence
tgacggagaagatgaagacagacat

SEQ ID NO: 29912 - DNA, 25 bp, Probe Sequence
catgacggagaagatgaagacagac

SEQ ID NO: 29913 - DNA, 25 bp, Probe Sequence
agaagatgaagacagacattcagag

SEQ ID NO: 29914 - DNA, 25 bp, Probe Sequence
gagaagatgaagacagacattcaga

SEQ ID NO: 29915 - DNA, 25 bp, Probe Sequence
gaagatgaagacagacattcagagg

SEQ ID NO: 29916 - DNA, 25 bp, Probe Sequence
ggagaagatgaagacagacattcag

SEQ ID NO: 29917 - DNA, 25 bp, Probe Sequence
gaacgagaagtgccatgactactac

SEQ ID NO: 29918 - DNA, 25 bp, Probe Sequence
cacatgacggagaagatgaagacag

SEQ ID NO: 29919 - DNA, 25 bp, Probe Sequence
tttcaacatccacgacttaaaggtc

SEQ ID NO: 29920 - DNA, 25 bp, Probe Sequence
acatgacggagaagatgaagacaga

SEQ ID NO: 29921 - DNA, 25 bp, Probe Sequence
accctttcaacatccacgacttaaa

SEQ ID NO: 29922 - DNA, 25 bp, Probe Sequence
gaccctttcaacatccacgacttaa

SEQ ID NO: 29923 - DNA, 25 bp, Probe Sequence
aacgagaagtgccatgactactaca

SEQ ID NO: 29924 - DNA, 25 bp, Probe Sequence
caacatccacgacttaaaggtcaac

SEQ ID NO: 29925 - DNA, 25 bp, Probe Sequence
cggagaagatgaagacagacattca

SEQ ID NO: 29926 - DNA, 25 bp, Probe Sequence
tcaacatccacgacttaaaggtcaa

SEQ ID NO: 29927 - DNA, 25 bp, Probe Sequence
ttcaacatccacgacttaaaggtca

SEQ ID NO: 29928 - DNA, 25 bp, Probe Sequence
ctttcaacatccacgacttaaaggt

SEQ ID NO: 29929 - DNA, 25 bp, Probe Sequence
ggaacgagaagtgccatgactacta

SEQ ID NO: 29930 - DNA, 25 bp, Probe Sequence
gagaagtgccatgactactacacca

SEQ ID NO: 29931 - DNA, 25 bp, Probe Sequence
ccctttcaacatccacgacttaaag

SEQ ID NO: 29932 - DNA, 25 bp, Probe Sequence
attgacattaatacctaatcggcga

SEQ ID NO: 29933 - DNA, 25 bp, Probe Sequence
ttgacattaatacctaatcggcgag

SEQ ID NO: 29934 - DNA, 25 bp, Probe Sequence
tattgacattaatacctaatcggcg

SEQ ID NO: 29935 - DNA, 25 bp, Probe Sequence
gacattaatacctaatcggcgagtg

SEQ ID NO: 29936 - DNA, 25 bp, Probe Sequence
tgacattaatacctaatcggcgagt

SEQ ID NO: 29937 - DNA, 25 bp, Probe Sequence
accctctccatttgatagaaacttt

SEQ ID NO: 29938 - DNA, 25 bp, Probe Sequence
aatttaccaccgatgattccatttg

SEQ ID NO: 29939 - DNA, 25 bp, Probe Sequence
ccctctccatttgatagaaactttg

SEQ ID NO: 29940 - DNA, 25 bp, Probe Sequence
caccctctccatttgatagaaactt

SEQ ID NO: 29941 - DNA, 25 bp, Probe Sequence
atttaccaccgatgattccatttgt

SEQ ID NO: 29942 - DNA, 25 bp, Probe Sequence
ttattgacattaatacctaatcggc

SEQ ID NO: 29943 - DNA, 25 bp, Probe Sequence
acattaatacctaatcggcgagtgc

SEQ ID NO: 29944 - DNA, 25 bp, Probe Sequence
ccatttgatagaaactttggaacca

SEQ ID NO: 29945 - DNA, 25 bp, Probe Sequence
cctctccatttgatagaaactttgg

SEQ ID NO: 29946 - DNA, 25 bp, Probe Sequence
gcaccctctccatttgatagaaact

SEQ ID NO: 29947 - DNA, 25 bp, Probe Sequence
tttaccaccgatgattccatttgtg

SEQ ID NO: 29948 - DNA, 25 bp, Probe Sequence
catttgatagaaactttggaaccaa

SEQ ID NO: 29949 - DNA, 25 bp, Probe Sequence
aaatttaccaccgatgattccattt

SEQ ID NO: 29950 - DNA, 25 bp, Probe Sequence
cactttatgcacgtattattgacat

SEQ ID NO: 29951 - DNA, 25 bp, Probe Sequence
ggcaccctctccatttgatagaaac

SEQ ID NO: 29952 - DNA, 25 bp, Probe Sequence
tcagatgtgcatatgagcagaatta

SEQ ID NO: 29953 - DNA, 25 bp, Probe Sequence
ttaccaccgatgattccatttgtgt

SEQ ID NO: 29954 - DNA, 25 bp, Probe Sequence
cagatgtgcatatgagcagaattaa

SEQ ID NO: 29955 - DNA, 25 bp, Probe Sequence
ttcagatgtgcatatgagcagaatt

SEQ ID NO: 29956 - DNA, 25 bp, Probe Sequence
cttcctggtgtgtgtattagaatcc

SEQ ID NO: 29957 - DNA, 25 bp, Probe Sequence
ccacatctgtagacatcttgagttg

SEQ ID NO: 29958 - DNA, 25 bp, Probe Sequence
gtgagagtctgaaggatactattgc

SEQ ID NO: 29959 - DNA, 25 bp, Probe Sequence
accacatctgtagacatcttgagtt

SEQ ID NO: 29960 - DNA, 25 bp, Probe Sequence
tgtgagagtctgaaggatactattg

SEQ ID NO: 29961 - DNA, 25 bp, Probe Sequence
gcttcctggtgtgtgtattagaatc

SEQ ID NO: 29962 - DNA, 25 bp, Probe Sequence
ttctacagcaacatcagtaaggatc

SEQ ID NO: 29963 - DNA, 25 bp, Probe Sequence
ctgtgagagtctgaaggatactatt

SEQ ID NO: 29964 - DNA, 25 bp, Probe Sequence
atctgtagacatcttgagttgtagc

SEQ ID NO: 29965 - DNA, 25 bp, Probe Sequence
cacatctgtagacatcttgagttgt

SEQ ID NO: 29966 - DNA, 25 bp, Probe Sequence
gtgttcatctgagcataactgtact

SEQ ID NO: 29967 - DNA, 25 bp, Probe Sequence
gaccacatctgtagacatcttgagt

SEQ ID NO: 29968 - DNA, 25 bp, Probe Sequence
tgaccacatctgtagacatcttgag

SEQ ID NO: 29969 - DNA, 25 bp, Probe Sequence
ctgaccacatctgtagacatcttga

SEQ ID NO: 29970 - DNA, 25 bp, Probe Sequence
tgttcatctgagcataactgtacta

SEQ ID NO: 29971 - DNA, 25 bp, Probe Sequence
acatctgtagacatcttgagttgta

SEQ ID NO: 29972 - DNA, 25 bp, Probe Sequence
ttctgaatcatgttctagttgcttg

SEQ ID NO: 29973 - DNA, 25 bp, Probe Sequence
gagagtctgaaggatactattgcca

SEQ ID NO: 29974 - DNA, 25 bp, Probe Sequence
tgagagtctgaaggatactattgcc

SEQ ID NO: 29975 - DNA, 25 bp, Probe Sequence
tgcttcctggtgtgtgtattagaat

SEQ ID NO: 29976 - DNA, 25 bp, Probe Sequence
agtgttcatctgagcataactgtac

SEQ ID NO: 29977 - DNA, 25 bp, Probe Sequence
actgaccacatctgtagacatcttg

SEQ ID NO: 29978 - DNA, 25 bp, Probe Sequence
cactgaccacatctgtagacatctt

SEQ ID NO: 29979 - DNA, 25 bp, Probe Sequence
tatgaattggacaagaacttgaagc

SEQ ID NO: 29980 - DNA, 25 bp, Probe Sequence
ccttcctcctatatcctcagtaaca

SEQ ID NO: 29981 - DNA, 25 bp, Probe Sequence
accttcctcctatatcctcagtaac

SEQ ID NO: 29982 - DNA, 25 bp, Probe Sequence
caccttcctcctatatcctcagtaa

SEQ ID NO: 29983 - DNA, 25 bp, Probe Sequence
ctatatcctcagtaacaacggctac

SEQ ID NO: 29984 - DNA, 25 bp, Probe Sequence
tcctcctatatcctcagtaacaacg

SEQ ID NO: 29985 - DNA, 25 bp, Probe Sequence
ttcctcctatatcctcagtaacaac

SEQ ID NO: 29986 - DNA, 25 bp, Probe Sequence
cctatatcctcagtaacaacggcta

SEQ ID NO: 29987 - DNA, 25 bp, Probe Sequence
cttcctcctatatcctcagtaacaa

SEQ ID NO: 29988 - DNA, 25 bp, Probe Sequence
atgtcttcctcaggtcctactattc

SEQ ID NO: 29989 - DNA, 25 bp, Probe Sequence
gatgtcttcctcaggtcctactatt

SEQ ID NO: 29990 - DNA, 25 bp, Probe Sequence
cctcctatatcctcagtaacaacgg

SEQ ID NO: 29991 - DNA, 25 bp, Probe Sequence
ccaccttcctcctatatcctcagta

SEQ ID NO: 29992 - DNA, 25 bp, Probe Sequence
cttcatcatcaatggtgtggagttc

SEQ ID NO: 29993 - DNA, 25 bp, Probe Sequence
ctcctatatcctcagtaacaacggc

SEQ ID NO: 29994 - DNA, 25 bp, Probe Sequence
tcctatatcctcagtaacaacggct

SEQ ID NO: 29995 - DNA, 25 bp, Probe Sequence
gattggcattgaagagttcctcatc

SEQ ID NO: 29996 - DNA, 25 bp, Probe Sequence
tatatcctcagtaacaacggctact

SEQ ID NO: 29997 - DNA, 25 bp, Probe Sequence
tgtcttcctcaggtcctactattcc

SEQ ID NO: 29998 - DNA, 25 bp, Probe Sequence
agattggcattgaagagttcctcat

SEQ ID NO: 29999 - DNA, 25 bp, Probe Sequence
gaactgtaacagcattcagaatctg

SEQ ID NO: 30000 - DNA, 25 bp, Probe Sequence
tctggactctggactttctctaata

SEQ ID NO: 30001 - DNA, 25 bp, Probe Sequence
ttctggactctggactttctctaat

SEQ ID NO: 30002 - DNA, 25 bp, Probe Sequence
ctggactctggactttctctaataa

SEQ ID NO: 30003 - DNA, 25 bp, Probe Sequence
tttctggactctggactttctctaa

SEQ ID NO: 30004 - DNA, 25 bp, Probe Sequence
ccatccaagtcatctgattgaagag

SEQ ID NO: 30005 - DNA, 25 bp, Probe Sequence
catccaagtcatctgattgaagagc

SEQ ID NO: 30006 - DNA, 25 bp, Probe Sequence
tccaagtcatctgattgaagagcat

SEQ ID NO: 30007 - DNA, 25 bp, Probe Sequence
atccaagtcatctgattgaagagca

SEQ ID NO: 30008 - DNA, 25 bp, Probe Sequence
ttcttcaccaggtatgattacgagg

SEQ ID NO: 30009 - DNA, 25 bp, Probe Sequence
actacaatgtaagctataggtggag

SEQ ID NO: 30010 - DNA, 25 bp, Probe Sequence
cttcaccaggtatgattacgaggag

SEQ ID NO: 30011 - DNA, 25 bp, Probe Sequence
cttaggatgtggcaatgaaatgatg

SEQ ID NO: 30012 - DNA, 25 bp, Probe Sequence
caacatcttcagcattccgtatttc

SEQ ID NO: 30013 - DNA, 25 bp, Probe Sequence
ccaagtcatctgattgaagagcatg

SEQ ID NO: 30014 - DNA, 25 bp, Probe Sequence
tcttcaccaggtatgattacgagga

SEQ ID NO: 30015 - DNA, 25 bp, Probe Sequence
aggtatgattacgaggaggtggaag

SEQ ID NO: 30016 - DNA, 25 bp, Probe Sequence
ctcagcaaatgacaaagtttacact

SEQ ID NO: 30017 - DNA, 25 bp, Probe Sequence
tctcagcaaatgacaaagtttacac

SEQ ID NO: 30018 - DNA, 25 bp, Probe Sequence
ttctcagcaaatgacaaagtttaca

SEQ ID NO: 30019 - DNA, 25 bp, Probe Sequence
aatttctagtgccttctgtccaatc

SEQ ID NO: 30020 - DNA, 25 bp, Probe Sequence
ttaggatgtggcaatgaaatgatgg

SEQ ID NO: 30021 - DNA, 25 bp, Probe Sequence
aacatcttcagcattccgtatttcc

SEQ ID NO: 30022 - DNA, 25 bp, Probe Sequence
gttctcagcaaatgacaaagtttac

SEQ ID NO: 30023 - DNA, 25 bp, Probe Sequence
agttctcagcaaatgacaaagttta

SEQ ID NO: 30024 - DNA, 25 bp, Probe Sequence
cagttctcagcaaatgacaaagttt

SEQ ID NO: 30025 - DNA, 25 bp, Probe Sequence
gataactttgaatacagcgacccag

SEQ ID NO: 30026 - DNA, 25 bp, Probe Sequence
ccttaggatgtggcaatgaaatgat

SEQ ID NO: 30027 - DNA, 25 bp, Probe Sequence
tatgagaaggacgttgccaagatta

SEQ ID NO: 30028 - DNA, 25 bp, Probe Sequence
gtctgtctgttaccataagtctgat

SEQ ID NO: 30029 - DNA, 25 bp, Probe Sequence
tgtctgttaccataagtctgattct

SEQ ID NO: 30030 - DNA, 25 bp, Probe Sequence
tctgtctgttaccataagtctgatt

SEQ ID NO: 30031 - DNA, 25 bp, Probe Sequence
tcattcttctcacatccatctactt

SEQ ID NO: 30032 - DNA, 25 bp, Probe Sequence
ttcattcttctcacatccatctact

SEQ ID NO: 30033 - DNA, 25 bp, Probe Sequence
ctgtctgttaccataagtctgattc

SEQ ID NO: 30034 - DNA, 25 bp, Probe Sequence
atgattcttaacacagccttccttc

SEQ ID NO: 30035 - DNA, 25 bp, Probe Sequence
gatgattcttaacacagccttcctt

SEQ ID NO: 30036 - DNA, 25 bp, Probe Sequence
tctgttaccataagtctgattctct

SEQ ID NO: 30037 - DNA, 25 bp, Probe Sequence
gtctgttaccataagtctgattctc

SEQ ID NO: 30038 - DNA, 25 bp, Probe Sequence
cttggatggacttgtatagtgagag

SEQ ID NO: 30039 - DNA, 25 bp, Probe Sequence
aacttggatggacttgtatagtgag

SEQ ID NO: 30040 - DNA, 25 bp, Probe Sequence
ttggatggacttgtatagtgagaga

SEQ ID NO: 30041 - DNA, 25 bp, Probe Sequence
atggacttgtatagtgagagaggag

SEQ ID NO: 30042 - DNA, 25 bp, Probe Sequence
gatggacttgtatagtgagagagga

SEQ ID NO: 30043 - DNA, 25 bp, Probe Sequence
acttggatggacttgtatagtgaga

SEQ ID NO: 30044 - DNA, 25 bp, Probe Sequence
tggatggacttgtatagtgagagag

SEQ ID NO: 30045 - DNA, 25 bp, Probe Sequence
tgattcttaacacagccttccttct

SEQ ID NO: 30046 - DNA, 25 bp, Probe Sequence
ggatggacttgtatagtgagagagg

SEQ ID NO: 30047 - DNA, 25 bp, Probe Sequence
ctgttaccataagtctgattctctt

SEQ ID NO: 30048 - DNA, 25 bp, Probe Sequence
gattcttaacacagccttccttctg

SEQ ID NO: 30049 - DNA, 25 bp, Probe Sequence
tggacttgtatagtgagagaggagg

SEQ ID NO: 30050 - DNA, 25 bp, Probe Sequence
actctttcattcttctcacatccat

SEQ ID NO: 30051 - DNA, 25 bp, Probe Sequence
aactctttcattcttctcacatcca

SEQ ID NO: 30052 - DNA, 25 bp, Probe Sequence
aagaagaggaaatgtttgtttggtc

SEQ ID NO: 30053 - DNA, 25 bp, Probe Sequence
cgtttcatttcagggagagagatta

SEQ ID NO: 30054 - DNA, 25 bp, Probe Sequence
agggagagagattaagaagaggaaa

SEQ ID NO: 30055 - DNA, 25 bp, Probe Sequence
tctatgaatttgaatgctgtgtgtg

SEQ ID NO: 30056 - DNA, 25 bp, Probe Sequence
ctatgaatttgaatgctgtgtgtgt

SEQ ID NO: 30057 - DNA, 25 bp, Probe Sequence
tccttcccatttcctttgatgttat

SEQ ID NO: 30058 - DNA, 25 bp, Probe Sequence
atccttcccatttcctttgatgtta

SEQ ID NO: 30059 - DNA, 25 bp, Probe Sequence
gggagagagattaagaagaggaaat

SEQ ID NO: 30060 - DNA, 25 bp, Probe Sequence
cagggagagagattaagaagaggaa

SEQ ID NO: 30061 - DNA, 25 bp, Probe Sequence
tatgaatttgaatgctgtgtgtgtc

SEQ ID NO: 30062 - DNA, 25 bp, Probe Sequence
taagaagaggaaatgtttgtttggt

SEQ ID NO: 30063 - DNA, 25 bp, Probe Sequence
ccttcccatttcctttgatgttatt

SEQ ID NO: 30064 - DNA, 25 bp, Probe Sequence
ggttctatgaatttgaatgctgtgt

SEQ ID NO: 30065 - DNA, 25 bp, Probe Sequence
aggttctatgaatttgaatgctgtg

SEQ ID NO: 30066 - DNA, 25 bp, Probe Sequence
gggacaggttctatgaatttgaatg

SEQ ID NO: 30067 - DNA, 25 bp, Probe Sequence
ttcagggagagagattaagaagagg

SEQ ID NO: 30068 - DNA, 25 bp, Probe Sequence
ttcatttcagggagagagattaaga

SEQ ID NO: 30069 - DNA, 25 bp, Probe Sequence
gacaggttctatgaatttgaatgct

SEQ ID NO: 30070 - DNA, 25 bp, Probe Sequence
tttcagggagagagattaagaagag

SEQ ID NO: 30071 - DNA, 25 bp, Probe Sequence
ttctatgaatttgaatgctgtgtgt

SEQ ID NO: 30072 - DNA, 25 bp, Probe Sequence
ggacaggttctatgaatttgaatgc

SEQ ID NO: 30073 - DNA, 25 bp, Probe Sequence
agaagaggaaatgtttgtttggtct

SEQ ID NO: 30074 - DNA, 25 bp, Probe Sequence
gttctatgaatttgaatgctgtgtg

SEQ ID NO: 30075 - DNA, 25 bp, Probe Sequence
tcatttcagggagagagattaagaa

SEQ ID NO: 30076 - DNA, 25 bp, Probe Sequence
cctctctcatccactttccaataaa

SEQ ID NO: 30077 - DNA, 25 bp, Probe Sequence
taaaggtcaagataaagtcaaagcg

SEQ ID NO: 30078 - DNA, 25 bp, Probe Sequence
acaagtttcagttaaaggtcaagat

SEQ ID NO: 30079 - DNA, 25 bp, Probe Sequence
ccgttaaaggacaagtttcagttaa

SEQ ID NO: 30080 - DNA, 25 bp, Probe Sequence
cccgttaaaggacaagtttcagtta

SEQ ID NO: 30081 - DNA, 25 bp, Probe Sequence
taaaggacaagtttcagttaaaggt

SEQ ID NO: 30082 - DNA, 25 bp, Probe Sequence
ttatcccttgtaaataccacagacc

SEQ ID NO: 30083 - DNA, 25 bp, Probe Sequence
ggacaagtttcagttaaaggtcaag

SEQ ID NO: 30084 - DNA, 25 bp, Probe Sequence
aaaggacaagtttcagttaaaggtc

SEQ ID NO: 30085 - DNA, 25 bp, Probe Sequence
aggacaagtttcagttaaaggtcaa

SEQ ID NO: 30086 - DNA, 25 bp, Probe Sequence
aaggacaagtttcagttaaaggtca

SEQ ID NO: 30087 - DNA, 25 bp, Probe Sequence
gacaagtttcagttaaaggtcaaga

SEQ ID NO: 30088 - DNA, 25 bp, Probe Sequence
cgttaaaggacaagtttcagttaaa

SEQ ID NO: 30089 - DNA, 25 bp, Probe Sequence
ttaaaggtcaagataaagtcaaagc

SEQ ID NO: 30090 - DNA, 25 bp, Probe Sequence
tcagttaaaggtcaagataaagtca

SEQ ID NO: 30091 - DNA, 25 bp, Probe Sequence
gcctctctcatccactttccaataa

SEQ ID NO: 30092 - DNA, 25 bp, Probe Sequence
tatcccttgtaaataccacagaccc

SEQ ID NO: 30093 - DNA, 25 bp, Probe Sequence
attatcccttgtaaataccacagac

SEQ ID NO: 30094 - DNA, 25 bp, Probe Sequence
gagttcctgttaaaggtcaagacac

SEQ ID NO: 30095 - DNA, 25 bp, Probe Sequence
ttaaaggacaagtttcagttaaagg

SEQ ID NO: 30096 - DNA, 25 bp, Probe Sequence
attcaatggacaagatcccgttaaa

SEQ ID NO: 30097 - DNA, 25 bp, Probe Sequence
gttaaaggtcaagacactgtcaaag

SEQ ID NO: 30098 - DNA, 25 bp, Probe Sequence
gttcctgttaaaggtcaagacactg

SEQ ID NO: 30099 - DNA, 25 bp, Probe Sequence
agttcctgttaaaggtcaagacact

SEQ ID NO: 30100 - DNA, 25 bp, Probe Sequence
cggttcatggattacttctctataa

SEQ ID NO: 30101 - DNA, 25 bp, Probe Sequence
aatttgtaaagttgggtggataagc

SEQ ID NO: 30102 - DNA, 25 bp, Probe Sequence
cagcaacctataaatcaacacctta

SEQ ID NO: 30103 - DNA, 25 bp, Probe Sequence
agcaacctataaatcaacaccttaa

SEQ ID NO: 30104 - DNA, 25 bp, Probe Sequence
gcagcaacctataaatcaacacctt

SEQ ID NO: 30105 - DNA, 25 bp, Probe Sequence
tgaatttctcctatgctattgacaa

SEQ ID NO: 30106 - DNA, 25 bp, Probe Sequence
ttgaatttctcctatgctattgaca

SEQ ID NO: 30107 - DNA, 25 bp, Probe Sequence
agtaatttgtaaagttgggtggata

SEQ ID NO: 30108 - DNA, 25 bp, Probe Sequence
tagtaatttgtaaagttgggtggat

SEQ ID NO: 30109 - DNA, 25 bp, Probe Sequence
atagtaatttgtaaagttgggtgga

SEQ ID NO: 30110 - DNA, 25 bp, Probe Sequence
ccggttcatggattacttctctata

SEQ ID NO: 30111 - DNA, 25 bp, Probe Sequence
ttgtaaagttgggtggataagctat

SEQ ID NO: 30112 - DNA, 25 bp, Probe Sequence
tttgtaaagttgggtggataagcta

SEQ ID NO: 30113 - DNA, 25 bp, Probe Sequence
gcaacctataaatcaacaccttaat

SEQ ID NO: 30114 - DNA, 25 bp, Probe Sequence
atttgtaaagttgggtggataagct

SEQ ID NO: 30115 - DNA, 25 bp, Probe Sequence
gtaatttgtaaagttgggtggataa

SEQ ID NO: 30116 - DNA, 25 bp, Probe Sequence
aatagtaatttgtaaagttgggtgg

SEQ ID NO: 30117 - DNA, 25 bp, Probe Sequence
attgaatttctcctatgctattgac

SEQ ID NO: 30118 - DNA, 25 bp, Probe Sequence
taatttgtaaagttgggtggataag

SEQ ID NO: 30119 - DNA, 25 bp, Probe Sequence
tgtaaagttgggtggataagctatc

SEQ ID NO: 30120 - DNA, 25 bp, Probe Sequence
gccggttcatggattacttctctat

SEQ ID NO: 30121 - DNA, 25 bp, Probe Sequence
gaatttctcctatgctattgacaat

SEQ ID NO: 30122 - DNA, 25 bp, Probe Sequence
cttctcccatctcttccttgacatg

SEQ ID NO: 30123 - DNA, 25 bp, Probe Sequence
ggcagcaacctataaatcaacacct

SEQ ID NO: 30124 - DNA, 25 bp, Probe Sequence
ctggaatgtcaactgagaagaatgt

SEQ ID NO: 30125 - DNA, 25 bp, Probe Sequence
ttccttctacctatcttgccttaat

SEQ ID NO: 30126 - DNA, 25 bp, Probe Sequence
tccttctacctatcttgccttaatt

SEQ ID NO: 30127 - DNA, 25 bp, Probe Sequence
tggaatgtcaactgagaagaatgtg

SEQ ID NO: 30128 - DNA, 25 bp, Probe Sequence
tctggaatgtcaactgagaagaatg

SEQ ID NO: 30129 - DNA, 25 bp, Probe Sequence
aatactgtcagaagttctatcaggc

SEQ ID NO: 30130 - DNA, 25 bp, Probe Sequence
gaatgtcaactgagaagaatgtgcc

SEQ ID NO: 30131 - DNA, 25 bp, Probe Sequence
ggaatgtcaactgagaagaatgtgc

SEQ ID NO: 30132 - DNA, 25 bp, Probe Sequence
atactgtcagaagttctatcaggca

SEQ ID NO: 30133 - DNA, 25 bp, Probe Sequence
aatgtcaactgagaagaatgtgcct

SEQ ID NO: 30134 - DNA, 25 bp, Probe Sequence
gaatactgtcagaagttctatcagg

SEQ ID NO: 30135 - DNA, 25 bp, Probe Sequence
ataccctcctttccttctacctatc

SEQ ID NO: 30136 - DNA, 25 bp, Probe Sequence
tactgtcagaagttctatcaggcag

SEQ ID NO: 30137 - DNA, 25 bp, Probe Sequence
tctacaaaggaggaatagtcaaagc

SEQ ID NO: 30138 - DNA, 25 bp, Probe Sequence
gcatctacaaaggaggaatagtcaa

SEQ ID NO: 30139 - DNA, 25 bp, Probe Sequence
ctttccttctacctatcttgcctta

SEQ ID NO: 30140 - DNA, 25 bp, Probe Sequence
cataccctcctttccttctacctat

SEQ ID NO: 30141 - DNA, 25 bp, Probe Sequence
tacaaaggaggaatagtcaaagcag

SEQ ID NO: 30142 - DNA, 25 bp, Probe Sequence
ctacaaaggaggaatagtcaaagca

SEQ ID NO: 30143 - DNA, 25 bp, Probe Sequence
ggcagagaagactgaaggtaagatt

SEQ ID NO: 30144 - DNA, 25 bp, Probe Sequence
ggaatgagcaatttgacagaaagta

SEQ ID NO: 30145 - DNA, 25 bp, Probe Sequence
agcatctacaaaggaggaatagtca

SEQ ID NO: 30146 - DNA, 25 bp, Probe Sequence
tttccttctacctatcttgccttaa

SEQ ID NO: 30147 - DNA, 25 bp, Probe Sequence
taccctcctttccttctacctatct

SEQ ID NO: 30148 - DNA, 25 bp, Probe Sequence
ggacaacactcggaagatcataata

SEQ ID NO: 30149 - DNA, 25 bp, Probe Sequence
gacaacactcggaagatcataataa

SEQ ID NO: 30150 - DNA, 25 bp, Probe Sequence
aggacaacactcggaagatcataat

SEQ ID NO: 30151 - DNA, 25 bp, Probe Sequence
caggacaacactcggaagatcataa

SEQ ID NO: 30152 - DNA, 25 bp, Probe Sequence
tggaatttctgctgtggtctataaa

SEQ ID NO: 30153 - DNA, 25 bp, Probe Sequence
ctggaatttctgctgtggtctataa

SEQ ID NO: 30154 - DNA, 25 bp, Probe Sequence
gtcgttgatgttattcgggaattag

SEQ ID NO: 30155 - DNA, 25 bp, Probe Sequence
ctctaaagaaacttggctggaattt

SEQ ID NO: 30156 - DNA, 25 bp, Probe Sequence
cctaaaggtagaataatggaagccc

SEQ ID NO: 30157 - DNA, 25 bp, Probe Sequence
tcgttgatgttattcgggaattagg

SEQ ID NO: 30158 - DNA, 25 bp, Probe Sequence
ttgatgttattcgggaattaggcat

SEQ ID NO: 30159 - DNA, 25 bp, Probe Sequence
cctctaaagaaacttggctggaatt

SEQ ID NO: 30160 - DNA, 25 bp, Probe Sequence
atgttattcgggaattaggcatctg

SEQ ID NO: 30161 - DNA, 25 bp, Probe Sequence
tagaataatggaagccctgtctgtt

SEQ ID NO: 30162 - DNA, 25 bp, Probe Sequence
gttgatgttattcgggaattaggca

SEQ ID NO: 30163 - DNA, 25 bp, Probe Sequence
cgtcgttgatgttattcgggaatta

SEQ ID NO: 30164 - DNA, 25 bp, Probe Sequence
tcaggacaacactcggaagatcata

SEQ ID NO: 30165 - DNA, 25 bp, Probe Sequence
gaataatggaagccctgtctgtttg

SEQ ID NO: 30166 - DNA, 25 bp, Probe Sequence
taaaggtagaataatggaagccctg

SEQ ID NO: 30167 - DNA, 25 bp, Probe Sequence
ctaaaggtagaataatggaagccct

SEQ ID NO: 30168 - DNA, 25 bp, Probe Sequence
gtagaataatggaagccctgtctgt

SEQ ID NO: 30169 - DNA, 25 bp, Probe Sequence
acaacactcggaagatcataataaa

SEQ ID NO: 30170 - DNA, 25 bp, Probe Sequence
agaataatggaagccctgtctgttt

SEQ ID NO: 30171 - DNA, 25 bp, Probe Sequence
tcctaaaggtagaataatggaagcc

SEQ ID NO: 30172 - DNA, 25 bp, Probe Sequence
gtactctgtccagttcctttagaaa

SEQ ID NO: 30173 - DNA, 25 bp, Probe Sequence
tgtactctgtccagttcctttagaa

SEQ ID NO: 30174 - DNA, 25 bp, Probe Sequence
cttacttgcttctctagctctctag

SEQ ID NO: 30175 - DNA, 25 bp, Probe Sequence
gtgtactctgtccagttcctttaga

SEQ ID NO: 30176 - DNA, 25 bp, Probe Sequence
ttacttgcttctctagctctctagg

SEQ ID NO: 30177 - DNA, 25 bp, Probe Sequence
ccttacttgcttctctagctctcta

SEQ ID NO: 30178 - DNA, 25 bp, Probe Sequence
tgtgtactctgtccagttcctttag

SEQ ID NO: 30179 - DNA, 25 bp, Probe Sequence
gtgtgtactctgtccagttccttta

SEQ ID NO: 30180 - DNA, 25 bp, Probe Sequence
ccaatcaagggaagaaggaggaatg

SEQ ID NO: 30181 - DNA, 25 bp, Probe Sequence
cttcctttcctgtgtgtactctgtc

SEQ ID NO: 30182 - DNA, 25 bp, Probe Sequence
ttgtagaactcactctgggctgtaa

SEQ ID NO: 30183 - DNA, 25 bp, Probe Sequence
tcaagaaacagccagcaagagttag

SEQ ID NO: 30184 - DNA, 25 bp, Probe Sequence
ctgtgtgtactctgtccagttcctt

SEQ ID NO: 30185 - DNA, 25 bp, Probe Sequence
ttcctgtgtgtactctgtccagttc

SEQ ID NO: 30186 - DNA, 25 bp, Probe Sequence
gtcaagaaacagccagcaagagtta

SEQ ID NO: 30187 - DNA, 25 bp, Probe Sequence
cttgtagaactcactctgggctgta

SEQ ID NO: 30188 - DNA, 25 bp, Probe Sequence
aatcaagggaagaaggaggaatgct

SEQ ID NO: 30189 - DNA, 25 bp, Probe Sequence
caatcaagggaagaaggaggaatgc

SEQ ID NO: 30190 - DNA, 25 bp, Probe Sequence
tactctgtccagttcctttagaaaa

SEQ ID NO: 30191 - DNA, 25 bp, Probe Sequence
tacttgcttctctagctctctaggc

SEQ ID NO: 30192 - DNA, 25 bp, Probe Sequence
gaagaagatcaacgcctcactgaaa

SEQ ID NO: 30193 - DNA, 25 bp, Probe Sequence
tgtagaactcactctgggctgtaac

SEQ ID NO: 30194 - DNA, 25 bp, Probe Sequence
tgtgtgtactctgtccagttccttt

SEQ ID NO: 30195 - DNA, 25 bp, Probe Sequence
gaagatcaacgcctcactgaaacat

SEQ ID NO: 30196 - DNA, 25 bp, Probe Sequence
ctgtgagtgtaagtgtgagtaagag

SEQ ID NO: 30197 - DNA, 25 bp, Probe Sequence
gctggtgtctgattgttaagtctaa

SEQ ID NO: 30198 - DNA, 25 bp, Probe Sequence
ttagcctagttcatccaatcctcac

SEQ ID NO: 30199 - DNA, 25 bp, Probe Sequence
tgtgagtgtaagtgtgagtaagagc

SEQ ID NO: 30200 - DNA, 25 bp, Probe Sequence
gctgtgagtgtaagtgtgagtaaga

SEQ ID NO: 30201 - DNA, 25 bp, Probe Sequence
taagagctggtgtctgattgttaag

SEQ ID NO: 30202 - DNA, 25 bp, Probe Sequence
ctacacgagagtctcacacttctta

SEQ ID NO: 30203 - DNA, 25 bp, Probe Sequence
gtaagagctggtgtctgattgttaa

SEQ ID NO: 30204 - DNA, 25 bp, Probe Sequence
agctggtgtctgattgttaagtcta

SEQ ID NO: 30205 - DNA, 25 bp, Probe Sequence
tacacgagagtctcacacttcttac

SEQ ID NO: 30206 - DNA, 25 bp, Probe Sequence
ctgtaagaagagactgggaagatag

SEQ ID NO: 30207 - DNA, 25 bp, Probe Sequence
tgtaagaagagactgggaagatagg

SEQ ID NO: 30208 - DNA, 25 bp, Probe Sequence
agtaagagctggtgtctgattgtta

SEQ ID NO: 30209 - DNA, 25 bp, Probe Sequence
ggctgtgagtgtaagtgtgagtaag

SEQ ID NO: 30210 - DNA, 25 bp, Probe Sequence
ctttctggagaggttataggtcact

SEQ ID NO: 30211 - DNA, 25 bp, Probe Sequence
ggctctgatattccatgaatgtatc

SEQ ID NO: 30212 - DNA, 25 bp, Probe Sequence
gctgtaagaagagactgggaagata

SEQ ID NO: 30213 - DNA, 25 bp, Probe Sequence
tagcctagttcatccaatcctcact

SEQ ID NO: 30214 - DNA, 25 bp, Probe Sequence
ctggtgtctgattgttaagtctaaa

SEQ ID NO: 30215 - DNA, 25 bp, Probe Sequence
tgagtgtaagtgtgagtaagagctg

SEQ ID NO: 30216 - DNA, 25 bp, Probe Sequence
gtgagtgtaagtgtgagtaagagct

SEQ ID NO: 30217 - DNA, 25 bp, Probe Sequence
tctttctggagaggttataggtcac

SEQ ID NO: 30218 - DNA, 25 bp, Probe Sequence
gtctttctggagaggttataggtca

SEQ ID NO: 30219 - DNA, 25 bp, Probe Sequence
agtggtctttctggagaggttatag

SEQ ID NO: 30220 - DNA, 25 bp, Probe Sequence
aaccagaatatgtgaataagcagac

SEQ ID NO: 30221 - DNA, 25 bp, Probe Sequence
aagacctagaacatagaagaatgcc

SEQ ID NO: 30222 - DNA, 25 bp, Probe Sequence
gacctagaacatagaagaatgccta

SEQ ID NO: 30223 - DNA, 25 bp, Probe Sequence
agacctagaacatagaagaatgcct

SEQ ID NO: 30224 - DNA, 25 bp, Probe Sequence
gaagacctagaacatagaagaatgc

SEQ ID NO: 30225 - DNA, 25 bp, Probe Sequence
tgctatgtaatcgttgttatactgt

SEQ ID NO: 30226 - DNA, 25 bp, Probe Sequence
accagaatatgtgaataagcagaca

SEQ ID NO: 30227 - DNA, 25 bp, Probe Sequence
ataacctacataccttctcttgtgc

SEQ ID NO: 30228 - DNA, 25 bp, Probe Sequence
ccagaatatgtgaataagcagacag

SEQ ID NO: 30229 - DNA, 25 bp, Probe Sequence
cagaatatgtgaataagcagacaga

SEQ ID NO: 30230 - DNA, 25 bp, Probe Sequence
gcatataacctacataccttctctt

SEQ ID NO: 30231 - DNA, 25 bp, Probe Sequence
atcaagttagaactctcatcacatg

SEQ ID NO: 30232 - DNA, 25 bp, Probe Sequence
tgaagacctagaacatagaagaatg

SEQ ID NO: 30233 - DNA, 25 bp, Probe Sequence
cttgaagacctagaacatagaagaa

SEQ ID NO: 30234 - DNA, 25 bp, Probe Sequence
agaatatgtgaataagcagacagaa

SEQ ID NO: 30235 - DNA, 25 bp, Probe Sequence
aaagatgactatgtttgggactgaa

SEQ ID NO: 30236 - DNA, 25 bp, Probe Sequence
aagatgactatgtttgggactgaag

SEQ ID NO: 30237 - DNA, 25 bp, Probe Sequence
cctagaacatagaagaatgcctagt

SEQ ID NO: 30238 - DNA, 25 bp, Probe Sequence
acctagaacatagaagaatgcctag

SEQ ID NO: 30239 - DNA, 25 bp, Probe Sequence
atgctatgtaatcgttgttatactg

SEQ ID NO: 30240 - DNA, 25 bp, Probe Sequence
tttcctttcatctttgtgttcatct

SEQ ID NO: 30241 - DNA, 25 bp, Probe Sequence
atgcttctcaagtcccttatgtaaa

SEQ ID NO: 30242 - DNA, 25 bp, Probe Sequence
agaacatagaagaatgcctagttaa

SEQ ID NO: 30243 - DNA, 25 bp, Probe Sequence
cctttcatctttgtgttcatctact

SEQ ID NO: 30244 - DNA, 25 bp, Probe Sequence
ttgctgagattatattatgcctggt

SEQ ID NO: 30245 - DNA, 25 bp, Probe Sequence
gctgagattatattatgcctggtga

SEQ ID NO: 30246 - DNA, 25 bp, Probe Sequence
tgctgagattatattatgcctggtg

SEQ ID NO: 30247 - DNA, 25 bp, Probe Sequence
acaccaagataccattcatcaactg

SEQ ID NO: 30248 - DNA, 25 bp, Probe Sequence
cacaccaagataccattcatcaact

SEQ ID NO: 30249 - DNA, 25 bp, Probe Sequence
tatattatgcctggtgatcctgatc

SEQ ID NO: 30250 - DNA, 25 bp, Probe Sequence
ttatattatgcctggtgatcctgat

SEQ ID NO: 30251 - DNA, 25 bp, Probe Sequence
attatattatgcctggtgatcctga

SEQ ID NO: 30252 - DNA, 25 bp, Probe Sequence
atattatgcctggtgatcctgatct

SEQ ID NO: 30253 - DNA, 25 bp, Probe Sequence
gattgagatgatccttgctgctatt

SEQ ID NO: 30254 - DNA, 25 bp, Probe Sequence
gattatattatgcctggtgatcctg

SEQ ID NO: 30255 - DNA, 25 bp, Probe Sequence
ctgagattatattatgcctggtgat

SEQ ID NO: 30256 - DNA, 25 bp, Probe Sequence
agattatattatgcctggtgatcct

SEQ ID NO: 30257 - DNA, 25 bp, Probe Sequence
gagattatattatgcctggtgatcc

SEQ ID NO: 30258 - DNA, 25 bp, Probe Sequence
tattatgcctggtgatcctgatctg

SEQ ID NO: 30259 - DNA, 25 bp, Probe Sequence
gcacaccaagataccattcatcaac

SEQ ID NO: 30260 - DNA, 25 bp, Probe Sequence
tgattgagatgatccttgctgctat

SEQ ID NO: 30261 - DNA, 25 bp, Probe Sequence
tccattgttgtccttgttgagagag

SEQ ID NO: 30262 - DNA, 25 bp, Probe Sequence
tgagattatattatgcctggtgatc

SEQ ID NO: 30263 - DNA, 25 bp, Probe Sequence
aactcctccattgaaataactcctc

SEQ ID NO: 30264 - DNA, 25 bp, Probe Sequence
taactcctccattgaaataactcct

SEQ ID NO: 30265 - DNA, 25 bp, Probe Sequence
tttgctgagattatattatgcctgg

SEQ ID NO: 30266 - DNA, 25 bp, Probe Sequence
caccaagataccattcatcaactgg

SEQ ID NO: 30267 - DNA, 25 bp, Probe Sequence
ctccattgttgtccttgttgagaga

SEQ ID NO: 30268 - DNA, 25 bp, Probe Sequence
ttgtcacagtattaaagttccctcg

SEQ ID NO: 30269 - DNA, 25 bp, Probe Sequence
tttgtcacagtattaaagttccctc

SEQ ID NO: 30270 - DNA, 25 bp, Probe Sequence
tgtcacagtattaaagttccctcgt

SEQ ID NO: 30271 - DNA, 25 bp, Probe Sequence
gtcacagtattaaagttccctcgtg

SEQ ID NO: 30272 - DNA, 25 bp, Probe Sequence
catctgtgtgtcgtgacttctgaag

SEQ ID NO: 30273 - DNA, 25 bp, Probe Sequence
atctgtgtgtcgtgacttctgaaga

SEQ ID NO: 30274 - DNA, 25 bp, Probe Sequence
ttgtatttcggtacagaagaggttt

SEQ ID NO: 30275 - DNA, 25 bp, Probe Sequence
tgtatttcggtacagaagaggtttc

SEQ ID NO: 30276 - DNA, 25 bp, Probe Sequence
cttgtatttcggtacagaagaggtt

SEQ ID NO: 30277 - DNA, 25 bp, Probe Sequence
ctttgtcacagtattaaagttccct

SEQ ID NO: 30278 - DNA, 25 bp, Probe Sequence
tatttcggtacagaagaggtttctt

SEQ ID NO: 30279 - DNA, 25 bp, Probe Sequence
gtatttcggtacagaagaggtttct

SEQ ID NO: 30280 - DNA, 25 bp, Probe Sequence
atttcggtacagaagaggtttcttt

SEQ ID NO: 30281 - DNA, 25 bp, Probe Sequence
ggtgcctattttagagaactttgtc

SEQ ID NO: 30282 - DNA, 25 bp, Probe Sequence
taaagagaggtcctggtgttggata

SEQ ID NO: 30283 - DNA, 25 bp, Probe Sequence
tgcctattttagagaactttgtcac

SEQ ID NO: 30284 - DNA, 25 bp, Probe Sequence
gtgcctattttagagaactttgtca

SEQ ID NO: 30285 - DNA, 25 bp, Probe Sequence
tttcggtacagaagaggtttctttc

SEQ ID NO: 30286 - DNA, 25 bp, Probe Sequence
aggtgcctattttagagaactttgt

SEQ ID NO: 30287 - DNA, 25 bp, Probe Sequence
ctgcttgtatttcggtacagaagag

SEQ ID NO: 30288 - DNA, 25 bp, Probe Sequence
gcctattttagagaactttgtcaca

SEQ ID NO: 30289 - DNA, 25 bp, Probe Sequence
gagaggtcctggtgttggatagatg

SEQ ID NO: 30290 - DNA, 25 bp, Probe Sequence
acatctgtgtgtcgtgacttctgaa

SEQ ID NO: 30291 - DNA, 25 bp, Probe Sequence
tgtgtgtcgtgacttctgaagagtt

SEQ ID NO: 30292 - DNA, 25 bp, Probe Sequence
ccattaaaattcttcctgaagaaaa

SEQ ID NO: 30293 - DNA, 25 bp, Probe Sequence
tgacaggagaacaatgttggtgaac

SEQ ID NO: 30294 - DNA, 25 bp, Probe Sequence
gtgacaggagaacaatgttggtgaa

SEQ ID NO: 30295 - DNA, 25 bp, Probe Sequence
gacaggagaacaatgttggtgaacg

SEQ ID NO: 30296 - DNA, 25 bp, Probe Sequence
caggagaacaatgttggtgaacgtc

SEQ ID NO: 30297 - DNA, 25 bp, Probe Sequence
ggtgacaggagaacaatgttggtga

SEQ ID NO: 30298 - DNA, 25 bp, Probe Sequence
ctggtgacaggagaacaatgttggt

SEQ ID NO: 30299 - DNA, 25 bp, Probe Sequence
ctaggcagaagaggattcccaggat

SEQ ID NO: 30300 - DNA, 25 bp, Probe Sequence
acaggagaacaatgttggtgaacgt

SEQ ID NO: 30301 - DNA, 25 bp, Probe Sequence
taggcagaagaggattcccaggatc

SEQ ID NO: 30302 - DNA, 25 bp, Probe Sequence
caaagctaggcagaagaggattccc

SEQ ID NO: 30303 - DNA, 25 bp, Probe Sequence
caaatgggagccctccagacataag

SEQ ID NO: 30304 - DNA, 25 bp, Probe Sequence
atcaaatgggagccctccagacata

SEQ ID NO: 30305 - DNA, 25 bp, Probe Sequence
ctccgttttcttccgttgtgaatgc

SEQ ID NO: 30306 - DNA, 25 bp, Probe Sequence
gctccgttttcttccgttgtgaatg

SEQ ID NO: 30307 - DNA, 25 bp, Probe Sequence
cagatgtttgtgttctttccagagg

SEQ ID NO: 30308 - DNA, 25 bp, Probe Sequence
ccagatgtttgtgttctttccagag

SEQ ID NO: 30309 - DNA, 25 bp, Probe Sequence
gaccagatgtttgtgttctttccag

SEQ ID NO: 30310 - DNA, 25 bp, Probe Sequence
accagatgtttgtgttctttccaga

SEQ ID NO: 30311 - DNA, 25 bp, Probe Sequence
gatgtttgtgttctttccagaggag

SEQ ID NO: 30312 - DNA, 25 bp, Probe Sequence
agatgtttgtgttctttccagagga

SEQ ID NO: 30313 - DNA, 25 bp, Probe Sequence
gggtgttttcaaatggtaaagatgt

SEQ ID NO: 30314 - DNA, 25 bp, Probe Sequence
tgggtgttttcaaatggtaaagatg

SEQ ID NO: 30315 - DNA, 25 bp, Probe Sequence
tgacgaaataaatttgcttgataca

SEQ ID NO: 30316 - DNA, 25 bp, Probe Sequence
gagttctcggttgttgtaggaggtt

SEQ ID NO: 30317 - DNA, 25 bp, Probe Sequence
ggtgttttcaaatggtaaagatgtt

SEQ ID NO: 30318 - DNA, 25 bp, Probe Sequence
gttgggtgttttcaaatggtaaaga

SEQ ID NO: 30319 - DNA, 25 bp, Probe Sequence
acgaaataaatttgcttgatacaga

SEQ ID NO: 30320 - DNA, 25 bp, Probe Sequence
ttgggtgttttcaaatggtaaagat

SEQ ID NO: 30321 - DNA, 25 bp, Probe Sequence
ctctggagttctcggttgttgtagg

SEQ ID NO: 30322 - DNA, 25 bp, Probe Sequence
catcaagaccatcaaggtgtactgc

SEQ ID NO: 30323 - DNA, 25 bp, Probe Sequence
gcatcaagaccatcaaggtgtactg

SEQ ID NO: 30324 - DNA, 25 bp, Probe Sequence
gacgaaataaatttgcttgatacag

SEQ ID NO: 30325 - DNA, 25 bp, Probe Sequence
ggttgggtgttttcaaatggtaaag

SEQ ID NO: 30326 - DNA, 25 bp, Probe Sequence
aaatggtaaagatgttttgacgaaa

SEQ ID NO: 30327 - DNA, 25 bp, Probe Sequence
cgaccagatgtttgtgttctttcca

SEQ ID NO: 30328 - DNA, 25 bp, Probe Sequence
accgaccagatgtttgtgttctttc

SEQ ID NO: 30329 - DNA, 25 bp, Probe Sequence
agttctcggttgttgtaggaggttg

SEQ ID NO: 30330 - DNA, 25 bp, Probe Sequence
aggttgggtgttttcaaatggtaaa

SEQ ID NO: 30331 - DNA, 25 bp, Probe Sequence
acgattgtaaggcttatgtcactaa

SEQ ID NO: 30332 - DNA, 25 bp, Probe Sequence
ttagaaggagagaacttacaggaca

SEQ ID NO: 30333 - DNA, 25 bp, Probe Sequence
atacgattgtaaggcttatgtcact

SEQ ID NO: 30334 - DNA, 25 bp, Probe Sequence
tctaattgatatgaagcctgactga

SEQ ID NO: 30335 - DNA, 25 bp, Probe Sequence
tacgattgtaaggcttatgtcacta

SEQ ID NO: 30336 - DNA, 25 bp, Probe Sequence
catccaggtcaagactaagtatgtt

SEQ ID NO: 30337 - DNA, 25 bp, Probe Sequence
ttcatccaggtcaagactaagtatg

SEQ ID NO: 30338 - DNA, 25 bp, Probe Sequence
aattcatccaggtcaagactaagta

SEQ ID NO: 30339 - DNA, 25 bp, Probe Sequence
gttgtctaattgatatgaagcctga

SEQ ID NO: 30340 - DNA, 25 bp, Probe Sequence
agttgtctaattgatatgaagcctg

SEQ ID NO: 30341 - DNA, 25 bp, Probe Sequence
tagaaggagagaacttacaggacac

SEQ ID NO: 30342 - DNA, 25 bp, Probe Sequence
tcatccaggtcaagactaagtatgt

SEQ ID NO: 30343 - DNA, 25 bp, Probe Sequence
attcatccaggtcaagactaagtat

SEQ ID NO: 30344 - DNA, 25 bp, Probe Sequence
atccaggtcaagactaagtatgttg

SEQ ID NO: 30345 - DNA, 25 bp, Probe Sequence
tagtagtcatagtgaagcaggtcta

SEQ ID NO: 30346 - DNA, 25 bp, Probe Sequence
caggtcaagactaagtatgttggtt

SEQ ID NO: 30347 - DNA, 25 bp, Probe Sequence
ttagtagtcatagtgaagcaggtct

SEQ ID NO: 30348 - DNA, 25 bp, Probe Sequence
ggagagaacttacaggacacagatt

SEQ ID NO: 30349 - DNA, 25 bp, Probe Sequence
tatacgattgtaaggcttatgtcac

SEQ ID NO: 30350 - DNA, 25 bp, Probe Sequence
ctaattgatatgaagcctgactgat

SEQ ID NO: 30351 - DNA, 25 bp, Probe Sequence
aggtcaagactaagtatgttggtta

SEQ ID NO: 30352 - DNA, 25 bp, Probe Sequence
tagatccacagtacatgagaatcct

SEQ ID NO: 30353 - DNA, 25 bp, Probe Sequence
ttagatccacagtacatgagaatcc

SEQ ID NO: 30354 - DNA, 25 bp, Probe Sequence
aagttgtctaattgatatgaagcct

SEQ ID NO: 30355 - DNA, 25 bp, Probe Sequence
cctaatggactagattggactgtat

SEQ ID NO: 30356 - DNA, 25 bp, Probe Sequence
atggactagattggactgtatcaac

SEQ ID NO: 30357 - DNA, 25 bp, Probe Sequence
gcctaatggactagattggactgta

SEQ ID NO: 30358 - DNA, 25 bp, Probe Sequence
aatggactagattggactgtatcaa

SEQ ID NO: 30359 - DNA, 25 bp, Probe Sequence
taatggactagattggactgtatca

SEQ ID NO: 30360 - DNA, 25 bp, Probe Sequence
ggactagattggactgtatcaacat

SEQ ID NO: 30361 - DNA, 25 bp, Probe Sequence
cttgcctaatggactagattggact

SEQ ID NO: 30362 - DNA, 25 bp, Probe Sequence
tggactagattggactgtatcaaca

SEQ ID NO: 30363 - DNA, 25 bp, Probe Sequence
ctaatggactagattggactgtatc

SEQ ID NO: 30364 - DNA, 25 bp, Probe Sequence
ttgcctaatggactagattggactg

SEQ ID NO: 30365 - DNA, 25 bp, Probe Sequence
tcttgcctaatggactagattggac

SEQ ID NO: 30366 - DNA, 25 bp, Probe Sequence
actagattggactgtatcaacattg

SEQ ID NO: 30367 - DNA, 25 bp, Probe Sequence
gactagattggactgtatcaacatt

SEQ ID NO: 30368 - DNA, 25 bp, Probe Sequence
tgtgtatcctcattactgtatcatt

SEQ ID NO: 30369 - DNA, 25 bp, Probe Sequence
ttgtgtatcctcattactgtatcat

SEQ ID NO: 30370 - DNA, 25 bp, Probe Sequence
attgtgtatcctcattactgtatca

SEQ ID NO: 30371 - DNA, 25 bp, Probe Sequence
ctagattggactgtatcaacattga

SEQ ID NO: 30372 - DNA, 25 bp, Probe Sequence
tcctcattactgtatcatttgtggg

SEQ ID NO: 30373 - DNA, 25 bp, Probe Sequence
atcctcattactgtatcatttgtgg

SEQ ID NO: 30374 - DNA, 25 bp, Probe Sequence
atcttgcctaatggactagattgga

SEQ ID NO: 30375 - DNA, 25 bp, Probe Sequence
catcttgcctaatggactagattgg

SEQ ID NO: 30376 - DNA, 25 bp, Probe Sequence
tgcctaatggactagattggactgt

SEQ ID NO: 30377 - DNA, 25 bp, Probe Sequence
attcttactgtggcttgtagcattc

SEQ ID NO: 30378 - DNA, 25 bp, Probe Sequence
gtcatgctatgggatttaattgtgt

SEQ ID NO: 30379 - DNA, 25 bp, Probe Sequence
aacacctgtacctcaacaacaatag

SEQ ID NO: 30380 - DNA, 25 bp, Probe Sequence
gaacacctgtacctcaacaacaata

SEQ ID NO: 30381 - DNA, 25 bp, Probe Sequence
ttaatatctccaacctgcttgtgct

SEQ ID NO: 30382 - DNA, 25 bp, Probe Sequence
cctgtacctcaacaacaatagcatc

SEQ ID NO: 30383 - DNA, 25 bp, Probe Sequence
ctcctttaatatctccaacctgctt

SEQ ID NO: 30384 - DNA, 25 bp, Probe Sequence
aactcctttaatatctccaacctgc

SEQ ID NO: 30385 - DNA, 25 bp, Probe Sequence
taatatctccaacctgcttgtgctc

SEQ ID NO: 30386 - DNA, 25 bp, Probe Sequence
cccaagaactcctttaatatctcca

SEQ ID NO: 30387 - DNA, 25 bp, Probe Sequence
ctgtacctcaacaacaatagcatcg

SEQ ID NO: 30388 - DNA, 25 bp, Probe Sequence
gaactcctttaatatctccaacctg

SEQ ID NO: 30389 - DNA, 25 bp, Probe Sequence
ctttaatatctccaacctgcttgtg

SEQ ID NO: 30390 - DNA, 25 bp, Probe Sequence
actcctttaatatctccaacctgct

SEQ ID NO: 30391 - DNA, 25 bp, Probe Sequence
acctgtacctcaacaacaatagcat

SEQ ID NO: 30392 - DNA, 25 bp, Probe Sequence
tcctttaatatctccaacctgcttg

SEQ ID NO: 30393 - DNA, 25 bp, Probe Sequence
cctttaatatctccaacctgcttgt

SEQ ID NO: 30394 - DNA, 25 bp, Probe Sequence
agaactcctttaatatctccaacct

SEQ ID NO: 30395 - DNA, 25 bp, Probe Sequence
gtacctcaacaacaatagcatcgag

SEQ ID NO: 30396 - DNA, 25 bp, Probe Sequence
tacctcaacaacaatagcatcgaga

SEQ ID NO: 30397 - DNA, 25 bp, Probe Sequence
tttaatatctccaacctgcttgtgc

SEQ ID NO: 30398 - DNA, 25 bp, Probe Sequence
aagaactcctttaatatctccaacc

SEQ ID NO: 30399 - DNA, 25 bp, Probe Sequence
ccaagaactcctttaatatctccaa

SEQ ID NO: 30400 - DNA, 25 bp, Probe Sequence
cacctgtacctcaacaacaatagca

SEQ ID NO: 30401 - DNA, 25 bp, Probe Sequence
acacctgtacctcaacaacaatagc

SEQ ID NO: 30402 - DNA, 25 bp, Probe Sequence
tgtacctcaacaacaatagcatcga

SEQ ID NO: 30403 - DNA, 25 bp, Probe Sequence
tcaagcagttaagtcatagaatgtt

SEQ ID NO: 30404 - DNA, 25 bp, Probe Sequence
ttcaagcagttaagtcatagaatgt

SEQ ID NO: 30405 - DNA, 25 bp, Probe Sequence
ttgctgaattaaggatcatagtcgg

SEQ ID NO: 30406 - DNA, 25 bp, Probe Sequence
attgctgaattaaggatcatagtcg

SEQ ID NO: 30407 - DNA, 25 bp, Probe Sequence
gtcgggcatacttatctatatccat

SEQ ID NO: 30408 - DNA, 25 bp, Probe Sequence
agattgctgaattaaggatcatagt

SEQ ID NO: 30409 - DNA, 25 bp, Probe Sequence
gattgctgaattaaggatcatagtc

SEQ ID NO: 30410 - DNA, 25 bp, Probe Sequence
agtcgggcatacttatctatatcca

SEQ ID NO: 30411 - DNA, 25 bp, Probe Sequence
gaattaaggatcatagtcgggcata

SEQ ID NO: 30412 - DNA, 25 bp, Probe Sequence
aattaaggatcatagtcgggcatac

SEQ ID NO: 30413 - DNA, 25 bp, Probe Sequence
agcagttaagtcatagaatgtttgt

SEQ ID NO: 30414 - DNA, 25 bp, Probe Sequence
tcgggcatacttatctatatccata

SEQ ID NO: 30415 - DNA, 25 bp, Probe Sequence
tagtcgggcatacttatctatatcc

SEQ ID NO: 30416 - DNA, 25 bp, Probe Sequence
ttaagggcatgttgggataaatagc

SEQ ID NO: 30417 - DNA, 25 bp, Probe Sequence
gcagttaagtcatagaatgtttgtt

SEQ ID NO: 30418 - DNA, 25 bp, Probe Sequence
gatcatagtcgggcatacttatcta

SEQ ID NO: 30419 - DNA, 25 bp, Probe Sequence
aaggatcatagtcgggcatacttat

SEQ ID NO: 30420 - DNA, 25 bp, Probe Sequence
attaaggatcatagtcgggcatact

SEQ ID NO: 30421 - DNA, 25 bp, Probe Sequence
acattgtgaatattagattgctgaa

SEQ ID NO: 30422 - DNA, 25 bp, Probe Sequence
acacattgtgaatattagattgctg

SEQ ID NO: 30423 - DNA, 25 bp, Probe Sequence
aagcagttaagtcatagaatgtttg

SEQ ID NO: 30424 - DNA, 25 bp, Probe Sequence
caagcagttaagtcatagaatgttt

SEQ ID NO: 30425 - DNA, 25 bp, Probe Sequence
ttaaggatcatagtcgggcatactt

SEQ ID NO: 30426 - DNA, 25 bp, Probe Sequence
tttaagggcatgttgggataaatag

SEQ ID NO: 30427 - DNA, 25 bp, Probe Sequence
agactctgacttggattgtgaatta

SEQ ID NO: 30428 - DNA, 25 bp, Probe Sequence
ttaagactctgacttggattgtgaa

SEQ ID NO: 30429 - DNA, 25 bp, Probe Sequence
taagactctgacttggattgtgaat

SEQ ID NO: 30430 - DNA, 25 bp, Probe Sequence
attaagactctgacttggattgtga

SEQ ID NO: 30431 - DNA, 25 bp, Probe Sequence
aagactctgacttggattgtgaatt

SEQ ID NO: 30432 - DNA, 25 bp, Probe Sequence
gactctgacttggattgtgaattat

SEQ ID NO: 30433 - DNA, 25 bp, Probe Sequence
aattaagactctgacttggattgtg

SEQ ID NO: 30434 - DNA, 25 bp, Probe Sequence
gttgtgctgtcaatacctcatactg

SEQ ID NO: 30435 - DNA, 25 bp, Probe Sequence
gtctacaagtatgattgctgttaca

SEQ ID NO: 30436 - DNA, 25 bp, Probe Sequence
tgtctacaagtatgattgctgttac

SEQ ID NO: 30437 - DNA, 25 bp, Probe Sequence
agttgtgctgtcaatacctcatact

SEQ ID NO: 30438 - DNA, 25 bp, Probe Sequence
actctgacttggattgtgaattata

SEQ ID NO: 30439 - DNA, 25 bp, Probe Sequence
cagttgtgctgtcaatacctcatac

SEQ ID NO: 30440 - DNA, 25 bp, Probe Sequence
tctacaagtatgattgctgttacat

SEQ ID NO: 30441 - DNA, 25 bp, Probe Sequence
gtcaatacctcatactgctttacct

SEQ ID NO: 30442 - DNA, 25 bp, Probe Sequence
gtgctgtcaatacctcatactgctt

SEQ ID NO: 30443 - DNA, 25 bp, Probe Sequence
tgtcaatacctcatactgctttacc

SEQ ID NO: 30444 - DNA, 25 bp, Probe Sequence
tcaatacctcatactgctttacctt

SEQ ID NO: 30445 - DNA, 25 bp, Probe Sequence
gctgtcaatacctcatactgcttta

SEQ ID NO: 30446 - DNA, 25 bp, Probe Sequence
ctgtcaatacctcatactgctttac

SEQ ID NO: 30447 - DNA, 25 bp, Probe Sequence
tgagaagcaaattggcaggtaatat

SEQ ID NO: 30448 - DNA, 25 bp, Probe Sequence
ttgtctacaagtatgattgctgtta

SEQ ID NO: 30449 - DNA, 25 bp, Probe Sequence
caatacctcatactgctttaccttt

SEQ ID NO: 30450 - DNA, 25 bp, Probe Sequence
acctaaattaagactctgacttgga

SEQ ID NO: 30451 - DNA, 25 bp, Probe Sequence
cgaggaccacattctttatactttc

SEQ ID NO: 30452 - DNA, 25 bp, Probe Sequence
ttatactttccaaatcatcacctgc

SEQ ID NO: 30453 - DNA, 25 bp, Probe Sequence
ccgaggaccacattctttatacttt

SEQ ID NO: 30454 - DNA, 25 bp, Probe Sequence
tatactttccaaatcatcacctgcc

SEQ ID NO: 30455 - DNA, 25 bp, Probe Sequence
cttacttctggctcttctatttggg

SEQ ID NO: 30456 - DNA, 25 bp, Probe Sequence
ccttacttctggctcttctatttgg

SEQ ID NO: 30457 - DNA, 25 bp, Probe Sequence
cccttacttctggctcttctatttg

SEQ ID NO: 30458 - DNA, 25 bp, Probe Sequence
atccgaggaccacattctttatact

SEQ ID NO: 30459 - DNA, 25 bp, Probe Sequence
catccgaggaccacattctttatac

SEQ ID NO: 30460 - DNA, 25 bp, Probe Sequence
tccgaggaccacattctttatactt

SEQ ID NO: 30461 - DNA, 25 bp, Probe Sequence
acatccgaggaccacattctttata

SEQ ID NO: 30462 - DNA, 25 bp, Probe Sequence
taacatccgaggaccacattcttta

SEQ ID NO: 30463 - DNA, 25 bp, Probe Sequence
aacatccgaggaccacattctttat

SEQ ID NO: 30464 - DNA, 25 bp, Probe Sequence
aggaccacattctttatactttcca

SEQ ID NO: 30465 - DNA, 25 bp, Probe Sequence
gaccacattctttatactttccaaa

SEQ ID NO: 30466 - DNA, 25 bp, Probe Sequence
gaggaccacattctttatactttcc

SEQ ID NO: 30467 - DNA, 25 bp, Probe Sequence
ggaccacattctttatactttccaa

SEQ ID NO: 30468 - DNA, 25 bp, Probe Sequence
tttatactttccaaatcatcacctg

SEQ ID NO: 30469 - DNA, 25 bp, Probe Sequence
ctttatactttccaaatcatcacct

SEQ ID NO: 30470 - DNA, 25 bp, Probe Sequence
tctttatactttccaaatcatcacc

SEQ ID NO: 30471 - DNA, 25 bp, Probe Sequence
atactttccaaatcatcacctgccc

SEQ ID NO: 30472 - DNA, 25 bp, Probe Sequence
accacattctttatactttccaaat

SEQ ID NO: 30473 - DNA, 25 bp, Probe Sequence
ccacattctttatactttccaaatc

SEQ ID NO: 30474 - DNA, 25 bp, Probe Sequence
caagatgaaactccccttacttctg

SEQ ID NO: 30475 - DNA, 25 bp, Probe Sequence
aacttgtgtattgagtcttaactgt

SEQ ID NO: 30476 - DNA, 25 bp, Probe Sequence
gcaactaactgactctgttattgat

SEQ ID NO: 30477 - DNA, 25 bp, Probe Sequence
atgtagggttatatttgggagtgac

SEQ ID NO: 30478 - DNA, 25 bp, Probe Sequence
acttgtgtattgagtcttaactgta

SEQ ID NO: 30479 - DNA, 25 bp, Probe Sequence
tagcatttattcctctggcaaactt

SEQ ID NO: 30480 - DNA, 25 bp, Probe Sequence
gtagggttatatttgggagtgactg

SEQ ID NO: 30481 - DNA, 25 bp, Probe Sequence
tgtagggttatatttgggagtgact

SEQ ID NO: 30482 - DNA, 25 bp, Probe Sequence
aatgtagggttatatttgggagtga

SEQ ID NO: 30483 - DNA, 25 bp, Probe Sequence
ctatctagcatttattcctctggca

SEQ ID NO: 30484 - DNA, 25 bp, Probe Sequence
atctagcatttattcctctggcaaa

SEQ ID NO: 30485 - DNA, 25 bp, Probe Sequence
tatctagcatttattcctctggcaa

SEQ ID NO: 30486 - DNA, 25 bp, Probe Sequence
cctatctagcatttattcctctggc

SEQ ID NO: 30487 - DNA, 25 bp, Probe Sequence
agcatttattcctctggcaaacttt

SEQ ID NO: 30488 - DNA, 25 bp, Probe Sequence
aggtaatgtagggttatatttggga

SEQ ID NO: 30489 - DNA, 25 bp, Probe Sequence
tccaatgatacccaacagtttattt

SEQ ID NO: 30490 - DNA, 25 bp, Probe Sequence
ttccaatgatacccaacagtttatt

SEQ ID NO: 30491 - DNA, 25 bp, Probe Sequence
ttattccaatgatacccaacagttt

SEQ ID NO: 30492 - DNA, 25 bp, Probe Sequence
tcctatctagcatttattcctctgg

SEQ ID NO: 30493 - DNA, 25 bp, Probe Sequence
aactaactgactctgttattgatcc

SEQ ID NO: 30494 - DNA, 25 bp, Probe Sequence
aatgagggtttctgatctgtacttt

SEQ ID NO: 30495 - DNA, 25 bp, Probe Sequence
aaatgagggtttctgatctgtactt

SEQ ID NO: 30496 - DNA, 25 bp, Probe Sequence
ggtttctgatctgtactttgtgttt

SEQ ID NO: 30497 - DNA, 25 bp, Probe Sequence
ctgactctgttattgatcccttctc

SEQ ID NO: 30498 - DNA, 25 bp, Probe Sequence
ggtaatgtagggttatatttgggag

SEQ ID NO: 30499 - DNA, 25 bp, Probe Sequence
agagagatgcagaagatgtgaagaa

SEQ ID NO: 30500 - DNA, 25 bp, Probe Sequence
gagagagatgcagaagatgtgaaga

SEQ ID NO: 30501 - DNA, 25 bp, Probe Sequence
gagagatgcagaagatgtgaagaaa

SEQ ID NO: 30502 - DNA, 25 bp, Probe Sequence
agagatgcagaagatgtgaagaaac

SEQ ID NO: 30503 - DNA, 25 bp, Probe Sequence
cgagagagatgcagaagatgtgaag

SEQ ID NO: 30504 - DNA, 25 bp, Probe Sequence
agatgcagaagatgtgaagaaacag

SEQ ID NO: 30505 - DNA, 25 bp, Probe Sequence
gagatgcagaagatgtgaagaaaca

SEQ ID NO: 30506 - DNA, 25 bp, Probe Sequence
tctagcgagagagatgcagaagatg

SEQ ID NO: 30507 - DNA, 25 bp, Probe Sequence
ctagcgagagagatgcagaagatgt

SEQ ID NO: 30508 - DNA, 25 bp, Probe Sequence
cagaagatgtgaagaaacagccctt

SEQ ID NO: 30509 - DNA, 25 bp, Probe Sequence
atctagcgagagagatgcagaagat

SEQ ID NO: 30510 - DNA, 25 bp, Probe Sequence
tagcgagagagatgcagaagatgtg

SEQ ID NO: 30511 - DNA, 25 bp, Probe Sequence
gatgcagaagatgtgaagaaacagc

SEQ ID NO: 30512 - DNA, 25 bp, Probe Sequence
gatctagcgagagagatgcagaaga

SEQ ID NO: 30513 - DNA, 25 bp, Probe Sequence
gcgagagagatgcagaagatgtgaa

SEQ ID NO: 30514 - DNA, 25 bp, Probe Sequence
gaagatgtgaagaaacagcccttct

SEQ ID NO: 30515 - DNA, 25 bp, Probe Sequence
agaagatgtgaagaaacagcccttc

SEQ ID NO: 30516 - DNA, 25 bp, Probe Sequence
ggatctagcgagagagatgcagaag

SEQ ID NO: 30517 - DNA, 25 bp, Probe Sequence
atgcagaagatgtgaagaaacagcc

SEQ ID NO: 30518 - DNA, 25 bp, Probe Sequence
gaaacagcccttcttcaggactctg

SEQ ID NO: 30519 - DNA, 25 bp, Probe Sequence
aagatgtgaagaaacagcccttctt

SEQ ID NO: 30520 - DNA, 25 bp, Probe Sequence
agaaacagcccttcttcaggactct

SEQ ID NO: 30521 - DNA, 25 bp, Probe Sequence
aagaaacagcccttcttcaggactc

SEQ ID NO: 30522 - DNA, 25 bp, Probe Sequence
ctagtgaatgacttgacctgtgacc

SEQ ID NO: 30523 - DNA, 25 bp, Probe Sequence
tgacctgtgacctcaatacaataaa

SEQ ID NO: 30524 - DNA, 25 bp, Probe Sequence
tagtgaatgacttgacctgtgacct

SEQ ID NO: 30525 - DNA, 25 bp, Probe Sequence
cctgtgacctcaatacaataaatgt

SEQ ID NO: 30526 - DNA, 25 bp, Probe Sequence
acctgtgacctcaatacaataaatg

SEQ ID NO: 30527 - DNA, 25 bp, Probe Sequence
ttgacctgtgacctcaatacaataa

SEQ ID NO: 30528 - DNA, 25 bp, Probe Sequence
cttgacctgtgacctcaatacaata

SEQ ID NO: 30529 - DNA, 25 bp, Probe Sequence
gacctgtgacctcaatacaataaat

SEQ ID NO: 30530 - DNA, 25 bp, Probe Sequence
tgtgacctcaatacaataaatgtga

SEQ ID NO: 30531 - DNA, 25 bp, Probe Sequence
ctgtgacctcaatacaataaatgtg

SEQ ID NO: 30532 - DNA, 25 bp, Probe Sequence
acctcaatacaataaatgtgatccc

SEQ ID NO: 30533 - DNA, 25 bp, Probe Sequence
aatgacttgacctgtgacctcaata

SEQ ID NO: 30534 - DNA, 25 bp, Probe Sequence
gaagaagaggctgaagaagaggagg

SEQ ID NO: 30535 - DNA, 25 bp, Probe Sequence
ggaagaagaggctgaagaagaggag

SEQ ID NO: 30536 - DNA, 25 bp, Probe Sequence
gaggaagaagaggctgaagaagagg

SEQ ID NO: 30537 - DNA, 25 bp, Probe Sequence
ggaggaagaagaggctgaagaagag

SEQ ID NO: 30538 - DNA, 25 bp, Probe Sequence
gaggaggaagaagaggctgaagaag

SEQ ID NO: 30539 - DNA, 25 bp, Probe Sequence
acttgacctgtgacctcaatacaat

SEQ ID NO: 30540 - DNA, 25 bp, Probe Sequence
caagttcagtgccatgaagtatgag

SEQ ID NO: 30541 - DNA, 25 bp, Probe Sequence
atgacttgacctgtgacctcaatac

SEQ ID NO: 30542 - DNA, 25 bp, Probe Sequence
gaagaagaggaggaggaggaggatt

SEQ ID NO: 30543 - DNA, 25 bp, Probe Sequence
gacaagttcagtgccatgaagtatg

SEQ ID NO: 30544 - DNA, 25 bp, Probe Sequence
gacctcaatacaataaatgtgatcc

SEQ ID NO: 30545 - DNA, 25 bp, Probe Sequence
gtgacctcaatacaataaatgtgat

SEQ ID NO: 30546 - DNA, 25 bp, Probe Sequence
tgctcctagaagtcttaattgtgtt

SEQ ID NO: 30547 - DNA, 25 bp, Probe Sequence
atgctcctagaagtcttaattgtgt

SEQ ID NO: 30548 - DNA, 25 bp, Probe Sequence
ccacattaacaccttctgctatgaa

SEQ ID NO: 30549 - DNA, 25 bp, Probe Sequence
aatgctcctagaagtcttaattgtg

SEQ ID NO: 30550 - DNA, 25 bp, Probe Sequence
gcactaagacaagaacattctctca

SEQ ID NO: 30551 - DNA, 25 bp, Probe Sequence
cactaagacaagaacattctctcat

SEQ ID NO: 30552 - DNA, 25 bp, Probe Sequence
ttggaggtgcttgatctatctacaa

SEQ ID NO: 30553 - DNA, 25 bp, Probe Sequence
gcatggaagtaattaaggtacatca

SEQ ID NO: 30554 - DNA, 25 bp, Probe Sequence
tgtgtgcatggaagtaattaaggta

SEQ ID NO: 30555 - DNA, 25 bp, Probe Sequence
gtgtgcatggaagtaattaaggtac

SEQ ID NO: 30556 - DNA, 25 bp, Probe Sequence
ctgtctgtatctttggttatcctgt

SEQ ID NO: 30557 - DNA, 25 bp, Probe Sequence
actgtctgtatctttggttatcctg

SEQ ID NO: 30558 - DNA, 25 bp, Probe Sequence
cttctatttagccagcgtttattgt

SEQ ID NO: 30559 - DNA, 25 bp, Probe Sequence
acttctatttagccagcgtttattg

SEQ ID NO: 30560 - DNA, 25 bp, Probe Sequence
cacttctatttagccagcgtttatt

SEQ ID NO: 30561 - DNA, 25 bp, Probe Sequence
tcaaggtaacaagagtatgtggcaa

SEQ ID NO: 30562 - DNA, 25 bp, Probe Sequence
tgtctgtatctttggttatcctgtt

SEQ ID NO: 30563 - DNA, 25 bp, Probe Sequence
cctacctagctgcatctataatgtc

SEQ ID NO: 30564 - DNA, 25 bp, Probe Sequence
ctatttagccagcgtttattgtagt

SEQ ID NO: 30565 - DNA, 25 bp, Probe Sequence
ttgtgtgcatggaagtaattaaggt

SEQ ID NO: 30566 - DNA, 25 bp, Probe Sequence
cttgtgtgcatggaagtaattaagg

SEQ ID NO: 30567 - DNA, 25 bp, Probe Sequence
ctacctagctgcatctataatgtca

SEQ ID NO: 30568 - DNA, 25 bp, Probe Sequence
aaattcctcatcaaacatacagcag

SEQ ID NO: 30569 - DNA, 25 bp, Probe Sequence
caaattcctcatcaaacatacagca

SEQ ID NO: 30570 - DNA, 25 bp, Probe Sequence
ttacttcattgtcttgaggcttcca

SEQ ID NO: 30571 - DNA, 25 bp, Probe Sequence
gtatttacaatgacatcctcctcct

SEQ ID NO: 30572 - DNA, 25 bp, Probe Sequence
tggtatttacaatgacatcctcctc

SEQ ID NO: 30573 - DNA, 25 bp, Probe Sequence
gtggtatttacaatgacatcctcct

SEQ ID NO: 30574 - DNA, 25 bp, Probe Sequence
ttacaatgacatcctcctcctccat

SEQ ID NO: 30575 - DNA, 25 bp, Probe Sequence
tatttacaatgacatcctcctcctc

SEQ ID NO: 30576 - DNA, 25 bp, Probe Sequence
tggtggtatttacaatgacatcctc

SEQ ID NO: 30577 - DNA, 25 bp, Probe Sequence
ctggtggtatttacaatgacatcct

SEQ ID NO: 30578 - DNA, 25 bp, Probe Sequence
tcctggtggtatttacaatgacatc

SEQ ID NO: 30579 - DNA, 25 bp, Probe Sequence
tacttcattgtcttgaggcttccag

SEQ ID NO: 30580 - DNA, 25 bp, Probe Sequence
ggtatttacaatgacatcctcctcc

SEQ ID NO: 30581 - DNA, 25 bp, Probe Sequence
ggtggtatttacaatgacatcctcc

SEQ ID NO: 30582 - DNA, 25 bp, Probe Sequence
cctggtggtatttacaatgacatcc

SEQ ID NO: 30583 - DNA, 25 bp, Probe Sequence
gtttacttcattgtcttgaggcttc

SEQ ID NO: 30584 - DNA, 25 bp, Probe Sequence
agtttacttcattgtcttgaggctt

SEQ ID NO: 30585 - DNA, 25 bp, Probe Sequence
tacaatgacatcctcctcctccatc

SEQ ID NO: 30586 - DNA, 25 bp, Probe Sequence
atttacaatgacatcctcctcctcc

SEQ ID NO: 30587 - DNA, 25 bp, Probe Sequence
tttacttcattgtcttgaggcttcc

SEQ ID NO: 30588 - DNA, 25 bp, Probe Sequence
aaagtttacttcattgtcttgaggc

SEQ ID NO: 30589 - DNA, 25 bp, Probe Sequence
accctctaccatctgtaaacaactg

SEQ ID NO: 30590 - DNA, 25 bp, Probe Sequence
caccctctaccatctgtaaacaact

SEQ ID NO: 30591 - DNA, 25 bp, Probe Sequence
tcaccctctaccatctgtaaacaac

SEQ ID NO: 30592 - DNA, 25 bp, Probe Sequence
gtcaccctctaccatctgtaaacaa

SEQ ID NO: 30593 - DNA, 25 bp, Probe Sequence
aagtttacttcattgtcttgaggct

SEQ ID NO: 30594 - DNA, 25 bp, Probe Sequence
agtctacaccaaggtctacaactac

SEQ ID NO: 30595 - DNA, 25 bp, Probe Sequence
ggaagactctgaacaatgacatcat

SEQ ID NO: 30596 - DNA, 25 bp, Probe Sequence
aggaagactctgaacaatgacatca

SEQ ID NO: 30597 - DNA, 25 bp, Probe Sequence
gaagactctgaacaatgacatcatg

SEQ ID NO: 30598 - DNA, 25 bp, Probe Sequence
attaagaacaccatagctgccaata

SEQ ID NO: 30599 - DNA, 25 bp, Probe Sequence
ccagtatctcttcagtctctatacc

SEQ ID NO: 30600 - DNA, 25 bp, Probe Sequence
atcatgttaatcaagctctcctcac

SEQ ID NO: 30601 - DNA, 25 bp, Probe Sequence
catcatgttaatcaagctctcctca

SEQ ID NO: 30602 - DNA, 25 bp, Probe Sequence
caggaagactctgaacaatgacatc

SEQ ID NO: 30603 - DNA, 25 bp, Probe Sequence
aagactctgaacaatgacatcatgt

SEQ ID NO: 30604 - DNA, 25 bp, Probe Sequence
atacgacaggaagactctgaacaat

SEQ ID NO: 30605 - DNA, 25 bp, Probe Sequence
ttaagaacaccatagctgccaatag

SEQ ID NO: 30606 - DNA, 25 bp, Probe Sequence
gtctacaccaaggtctacaactacg

SEQ ID NO: 30607 - DNA, 25 bp, Probe Sequence
aatacgacaggaagactctgaacaa

SEQ ID NO: 30608 - DNA, 25 bp, Probe Sequence
cagtatctcttcagtctctatacca

SEQ ID NO: 30609 - DNA, 25 bp, Probe Sequence
gattaagaacaccatagctgccaat

SEQ ID NO: 30610 - DNA, 25 bp, Probe Sequence
ataccaataaagtgaccctgttctc

SEQ ID NO: 30611 - DNA, 25 bp, Probe Sequence
acaggaagactctgaacaatgacat

SEQ ID NO: 30612 - DNA, 25 bp, Probe Sequence
ctctataccaataaagtgaccctgt

SEQ ID NO: 30613 - DNA, 25 bp, Probe Sequence
atgaatccactcctgatccttacct

SEQ ID NO: 30614 - DNA, 25 bp, Probe Sequence
tataccaataaagtgaccctgttct

SEQ ID NO: 30615 - DNA, 25 bp, Probe Sequence
tctataccaataaagtgaccctgtt

SEQ ID NO: 30616 - DNA, 25 bp, Probe Sequence
ctataccaataaagtgaccctgttc

SEQ ID NO: 30617 - DNA, 25 bp, Probe Sequence
acatcatgttaatcaagctctcctc

SEQ ID NO: 30618 - DNA, 25 bp, Probe Sequence
tgaatctactcctgatccttacctt

SEQ ID NO: 30619 - DNA, 25 bp, Probe Sequence
atgaatctactcctgatccttacct

SEQ ID NO: 30620 - DNA, 25 bp, Probe Sequence
catgaatctactcctgatccttacc

SEQ ID NO: 30621 - DNA, 25 bp, Probe Sequence
ccatgaatctactcctgatccttac

SEQ ID NO: 30622 - DNA, 25 bp, Probe Sequence
accatgaatctactcctgatcctta

SEQ ID NO: 30623 - DNA, 25 bp, Probe Sequence
caccatgaatctactcctgatcctt

SEQ ID NO: 30624 - DNA, 25 bp, Probe Sequence
aacaccatgaatctactcctgatcc

SEQ ID NO: 30625 - DNA, 25 bp, Probe Sequence
acaccatgaatctactcctgatcct

SEQ ID NO: 30626 - DNA, 25 bp, Probe Sequence
ctactcctgatccttacctttgttg

SEQ ID NO: 30627 - DNA, 25 bp, Probe Sequence
tctactcctgatccttacctttgtt

SEQ ID NO: 30628 - DNA, 25 bp, Probe Sequence
atctactcctgatccttacctttgt

SEQ ID NO: 30629 - DNA, 25 bp, Probe Sequence
aatctactcctgatccttacctttg

SEQ ID NO: 30630 - DNA, 25 bp, Probe Sequence
gaatctactcctgatccttaccttt

SEQ ID NO: 30631 - DNA, 25 bp, Probe Sequence
tactcctgatccttacctttgttgc

SEQ ID NO: 30632 - DNA, 25 bp, Probe Sequence
ctcctgatccttacctttgttgcag

SEQ ID NO: 30633 - DNA, 25 bp, Probe Sequence
actcctgatccttacctttgttgca

SEQ ID NO: 30634 - DNA, 25 bp, Probe Sequence
cctgatccttacctttgttgcagct

SEQ ID NO: 30635 - DNA, 25 bp, Probe Sequence
tcctgatccttacctttgttgcagc

SEQ ID NO: 30636 - DNA, 25 bp, Probe Sequence
taccaccatgaatccattcctgatc

SEQ ID NO: 30637 - DNA, 25 bp, Probe Sequence
ctaccaccatgaatccattcctgat

SEQ ID NO: 30638 - DNA, 25 bp, Probe Sequence
acactctaccaccatgaatccattc

SEQ ID NO: 30639 - DNA, 25 bp, Probe Sequence
accatgaatccattcctgatccttg

SEQ ID NO: 30640 - DNA, 25 bp, Probe Sequence
caccatgaatccattcctgatcctt

SEQ ID NO: 30641 - DNA, 25 bp, Probe Sequence
ctctaccaccatgaatccattcctg

SEQ ID NO: 30642 - DNA, 25 bp, Probe Sequence
tctaccaccatgaatccattcctga

SEQ ID NO: 30643 - DNA, 25 bp, Probe Sequence
actctaccaccatgaatccattcct

SEQ ID NO: 30644 - DNA, 25 bp, Probe Sequence
cactctaccaccatgaatccattcc

SEQ ID NO: 30645 - DNA, 25 bp, Probe Sequence
atgaatccattcctgatccttgcct

SEQ ID NO: 30646 - DNA, 25 bp, Probe Sequence
catgaatccattcctgatccttgcc

SEQ ID NO: 30647 - DNA, 25 bp, Probe Sequence
ccatgaatccattcctgatccttgc

SEQ ID NO: 30648 - DNA, 25 bp, Probe Sequence
tgaatccattcctgatccttgcctt

SEQ ID NO: 30649 - DNA, 25 bp, Probe Sequence
gaatccattcctgatccttgccttt

SEQ ID NO: 30650 - DNA, 25 bp, Probe Sequence
ccaccatgaatccattcctgatcct

SEQ ID NO: 30651 - DNA, 25 bp, Probe Sequence
aatccattcctgatccttgcctttg

SEQ ID NO: 30652 - DNA, 25 bp, Probe Sequence
accaccatgaatccattcctgatcc

SEQ ID NO: 30653 - DNA, 25 bp, Probe Sequence
atccattcctgatccttgcctttgt

SEQ ID NO: 30654 - DNA, 25 bp, Probe Sequence
tccattcctgatccttgcctttgtg

SEQ ID NO: 30655 - DNA, 25 bp, Probe Sequence
ctcctgccctggaaagattaccaac

SEQ ID NO: 30656 - DNA, 25 bp, Probe Sequence
tcaccatagcaatacagaataactt

SEQ ID NO: 30657 - DNA, 25 bp, Probe Sequence
ttcaccatagcaatacagaataact

SEQ ID NO: 30658 - DNA, 25 bp, Probe Sequence
tatgtcactgttggaaataaactgc

SEQ ID NO: 30659 - DNA, 25 bp, Probe Sequence
cttaaactaaacaggaaagtcgcat

SEQ ID NO: 30660 - DNA, 25 bp, Probe Sequence
ttcttaaactaaacaggaaagtcgc

SEQ ID NO: 30661 - DNA, 25 bp, Probe Sequence
ttaaactaaacaggaaagtcgcatt

SEQ ID NO: 30662 - DNA, 25 bp, Probe Sequence
tcttaaactaaacaggaaagtcgca

SEQ ID NO: 30663 - DNA, 25 bp, Probe Sequence
actaaacaggaaagtcgcattattt

SEQ ID NO: 30664 - DNA, 25 bp, Probe Sequence
aactaaacaggaaagtcgcattatt

SEQ ID NO: 30665 - DNA, 25 bp, Probe Sequence
aaactaaacaggaaagtcgcattat

SEQ ID NO: 30666 - DNA, 25 bp, Probe Sequence
ttcttacctatgtcaatgaaatgct

SEQ ID NO: 30667 - DNA, 25 bp, Probe Sequence
gtatgtcactgttggaaataaactg

SEQ ID NO: 30668 - DNA, 25 bp, Probe Sequence
taaactaaacaggaaagtcgcatta

SEQ ID NO: 30669 - DNA, 25 bp, Probe Sequence
tagttccagtttagtttgctgctat

SEQ ID NO: 30670 - DNA, 25 bp, Probe Sequence
gttccagtttagtttgctgctatta

SEQ ID NO: 30671 - DNA, 25 bp, Probe Sequence
ttccagtttagtttgctgctattag

SEQ ID NO: 30672 - DNA, 25 bp, Probe Sequence
agtatgtcactgttggaaataaact

SEQ ID NO: 30673 - DNA, 25 bp, Probe Sequence
agttccagtttagtttgctgctatt

SEQ ID NO: 30674 - DNA, 25 bp, Probe Sequence
tttctagttccagtttagtttgctg

SEQ ID NO: 30675 - DNA, 25 bp, Probe Sequence
atgtcactgttggaaataaactgcc

SEQ ID NO: 30676 - DNA, 25 bp, Probe Sequence
tcttacctatgtcaatgaaatgcta

SEQ ID NO: 30677 - DNA, 25 bp, Probe Sequence
ctagttccagtttagtttgctgcta

SEQ ID NO: 30678 - DNA, 25 bp, Probe Sequence
attcttacctatgtcaatgaaatgc

SEQ ID NO: 30679 - DNA, 25 bp, Probe Sequence
cactgttggaaataaactgccataa

SEQ ID NO: 30680 - DNA, 25 bp, Probe Sequence
gagtaacagggcagaaatgattaaa

SEQ ID NO: 30681 - DNA, 25 bp, Probe Sequence
ggagtaacagggcagaaatgattaa

SEQ ID NO: 30682 - DNA, 25 bp, Probe Sequence
atcttgatctttgagcccattcttc

SEQ ID NO: 30683 - DNA, 25 bp, Probe Sequence
catcttgatctttgagcccattctt

SEQ ID NO: 30684 - DNA, 25 bp, Probe Sequence
gggagtaacagggcagaaatgatta

SEQ ID NO: 30685 - DNA, 25 bp, Probe Sequence
cttgatctttgagcccattcttctg

SEQ ID NO: 30686 - DNA, 25 bp, Probe Sequence
tcttgatctttgagcccattcttct

SEQ ID NO: 30687 - DNA, 25 bp, Probe Sequence
ccatcttgatctttgagcccattct

SEQ ID NO: 30688 - DNA, 25 bp, Probe Sequence
agtaacagggcagaaatgattaaaa

SEQ ID NO: 30689 - DNA, 25 bp, Probe Sequence
gggcagaaatgattaaaatgtttga

SEQ ID NO: 30690 - DNA, 25 bp, Probe Sequence
agggcagaaatgattaaaatgtttg

SEQ ID NO: 30691 - DNA, 25 bp, Probe Sequence
cagggcagaaatgattaaaatgttt

SEQ ID NO: 30692 - DNA, 25 bp, Probe Sequence
gcagaaatgattaaaatgtttgagc

SEQ ID NO: 30693 - DNA, 25 bp, Probe Sequence
acagggcagaaatgattaaaatgtt

SEQ ID NO: 30694 - DNA, 25 bp, Probe Sequence
aacagggcagaaatgattaaaatgt

SEQ ID NO: 30695 - DNA, 25 bp, Probe Sequence
taacagggcagaaatgattaaaatg

SEQ ID NO: 30696 - DNA, 25 bp, Probe Sequence
gtaacagggcagaaatgattaaaat

SEQ ID NO: 30697 - DNA, 25 bp, Probe Sequence
tgggagtaacagggcagaaatgatt

SEQ ID NO: 30698 - DNA, 25 bp, Probe Sequence
cccatcttgatctttgagcccattc

SEQ ID NO: 30699 - DNA, 25 bp, Probe Sequence
ggcagaaatgattaaaatgtttgag

SEQ ID NO: 30700 - DNA, 25 bp, Probe Sequence
ttgatctttgagcccattcttctgg

SEQ ID NO: 30701 - DNA, 25 bp, Probe Sequence
agaaatgattaaaatgtttgagcac

SEQ ID NO: 30702 - DNA, 25 bp, Probe Sequence
cagaaatgattaaaatgtttgagca

SEQ ID NO: 30703 - DNA, 25 bp, Probe Sequence
gtgggagtaacagggcagaaatgat

SEQ ID NO: 30704 - DNA, 25 bp, Probe Sequence
ctcacctgtaagatgaagataagga

SEQ ID NO: 30705 - DNA, 25 bp, Probe Sequence
tctcacctgtaagatgaagataagg

SEQ ID NO: 30706 - DNA, 25 bp, Probe Sequence
agatgaagataaggatgatacagtc

SEQ ID NO: 30707 - DNA, 25 bp, Probe Sequence
cacctgtaagatgaagataaggatg

SEQ ID NO: 30708 - DNA, 25 bp, Probe Sequence
gaagataaggatgatacagtctcca

SEQ ID NO: 30709 - DNA, 25 bp, Probe Sequence
tgaagataaggatgatacagtctcc

SEQ ID NO: 30710 - DNA, 25 bp, Probe Sequence
acctgtaagatgaagataaggatga

SEQ ID NO: 30711 - DNA, 25 bp, Probe Sequence
tcacctgtaagatgaagataaggat

SEQ ID NO: 30712 - DNA, 25 bp, Probe Sequence
ttctcacctgtaagatgaagataag

SEQ ID NO: 30713 - DNA, 25 bp, Probe Sequence
atgaagataaggatgatacagtctc

SEQ ID NO: 30714 - DNA, 25 bp, Probe Sequence
gatgaagataaggatgatacagtct

SEQ ID NO: 30715 - DNA, 25 bp, Probe Sequence
gtggctgttggaaagatttaagatt

SEQ ID NO: 30716 - DNA, 25 bp, Probe Sequence
aagataaggatgatacagtctccat

SEQ ID NO: 30717 - DNA, 25 bp, Probe Sequence
tggctgttggaaagatttaagattt

SEQ ID NO: 30718 - DNA, 25 bp, Probe Sequence
agtggctgttggaaagatttaagat

SEQ ID NO: 30719 - DNA, 25 bp, Probe Sequence
aagatgaagataaggatgatacagt

SEQ ID NO: 30720 - DNA, 25 bp, Probe Sequence
cctgtaagatgaagataaggatgat

SEQ ID NO: 30721 - DNA, 25 bp, Probe Sequence
ctctgaccctgatgcttaataaacg

SEQ ID NO: 30722 - DNA, 25 bp, Probe Sequence
agatttctcacctgtaagatgaaga

SEQ ID NO: 30723 - DNA, 25 bp, Probe Sequence
cccaccactaagagaatacaggaaa

SEQ ID NO: 30724 - DNA, 25 bp, Probe Sequence
gctctgaccctgatgcttaataaac

SEQ ID NO: 30725 - DNA, 25 bp, Probe Sequence
gatttctcacctgtaagatgaagat

SEQ ID NO: 30726 - DNA, 25 bp, Probe Sequence
cagatttctcacctgtaagatgaag

SEQ ID NO: 30727 - DNA, 25 bp, Probe Sequence
gcagatttctcacctgtaagatgaa

SEQ ID NO: 30728 - DNA, 25 bp, Probe Sequence
gatacaatgcgtagatagaagaagc

SEQ ID NO: 30729 - DNA, 25 bp, Probe Sequence
atacaatgcgtagatagaagaagcc

SEQ ID NO: 30730 - DNA, 25 bp, Probe Sequence
cgatacaatgcgtagatagaagaag

SEQ ID NO: 30731 - DNA, 25 bp, Probe Sequence
aactgagtcatcatcttagtccaac

SEQ ID NO: 30732 - DNA, 25 bp, Probe Sequence
actgagtcatcatcttagtccaact

SEQ ID NO: 30733 - DNA, 25 bp, Probe Sequence
taactgagtcatcatcttagtccaa

SEQ ID NO: 30734 - DNA, 25 bp, Probe Sequence
ttaactgagtcatcatcttagtcca

SEQ ID NO: 30735 - DNA, 25 bp, Probe Sequence
gtcgatacaatgcgtagatagaaga

SEQ ID NO: 30736 - DNA, 25 bp, Probe Sequence
agtcgatacaatgcgtagatagaag

SEQ ID NO: 30737 - DNA, 25 bp, Probe Sequence
cagtcgatacaatgcgtagatagaa

SEQ ID NO: 30738 - DNA, 25 bp, Probe Sequence
tcgatacaatgcgtagatagaagaa

SEQ ID NO: 30739 - DNA, 25 bp, Probe Sequence
ctgagtcatcatcttagtccaacta

SEQ ID NO: 30740 - DNA, 25 bp, Probe Sequence
tttaggaatctctttggaattggga

SEQ ID NO: 30741 - DNA, 25 bp, Probe Sequence
ctctgcccttctgtatcctatgtat

SEQ ID NO: 30742 - DNA, 25 bp, Probe Sequence
tctgcccttctgtatcctatgtatg

SEQ ID NO: 30743 - DNA, 25 bp, Probe Sequence
cctcctttaactgagtcatcatctt

SEQ ID NO: 30744 - DNA, 25 bp, Probe Sequence
atttgtctcctcctttaactgagtc

SEQ ID NO: 30745 - DNA, 25 bp, Probe Sequence
ttaggaatctctttggaattgggag

SEQ ID NO: 30746 - DNA, 25 bp, Probe Sequence
tccaactaatgcagtcgatacaatg

SEQ ID NO: 30747 - DNA, 25 bp, Probe Sequence
gtccaactaatgcagtcgatacaat

SEQ ID NO: 30748 - DNA, 25 bp, Probe Sequence
ctcctcctttaactgagtcatcatc

SEQ ID NO: 30749 - DNA, 25 bp, Probe Sequence
catttgtctcctcctttaactgagt

SEQ ID NO: 30750 - DNA, 25 bp, Probe Sequence
ttctgtatcctatgtatgcagtgtg

SEQ ID NO: 30751 - DNA, 25 bp, Probe Sequence
cttctgtatcctatgtatgcagtgt

SEQ ID NO: 30752 - DNA, 25 bp, Probe Sequence
atgtgattgtcatgtaaggcttaac

SEQ ID NO: 30753 - DNA, 25 bp, Probe Sequence
gattgtcatgtaaggcttaacacag

SEQ ID NO: 30754 - DNA, 25 bp, Probe Sequence
tgttgtgaggagactatgatataac

SEQ ID NO: 30755 - DNA, 25 bp, Probe Sequence
attgtcatgtaaggcttaacacagt

SEQ ID NO: 30756 - DNA, 25 bp, Probe Sequence
tgattgtcatgtaaggcttaacaca

SEQ ID NO: 30757 - DNA, 25 bp, Probe Sequence
tgtgattgtcatgtaaggcttaaca

SEQ ID NO: 30758 - DNA, 25 bp, Probe Sequence
gtgattgtcatgtaaggcttaacac

SEQ ID NO: 30759 - DNA, 25 bp, Probe Sequence
ttgtcatgtaaggcttaacacagtg

SEQ ID NO: 30760 - DNA, 25 bp, Probe Sequence
gttgtgaggagactatgatataaca

SEQ ID NO: 30761 - DNA, 25 bp, Probe Sequence
aataaagtcatacgctccaactgat

SEQ ID NO: 30762 - DNA, 25 bp, Probe Sequence
atcaataaagtcatacgctccaact

SEQ ID NO: 30763 - DNA, 25 bp, Probe Sequence
catgttgtgaggagactatgatata

SEQ ID NO: 30764 - DNA, 25 bp, Probe Sequence
atgttgtgaggagactatgatataa

SEQ ID NO: 30765 - DNA, 25 bp, Probe Sequence
gatcaataaagtcatacgctccaac

SEQ ID NO: 30766 - DNA, 25 bp, Probe Sequence
tgtcctggatcaataaagtcatacg

SEQ ID NO: 30767 - DNA, 25 bp, Probe Sequence
gtggtgagttctgactaaaggttac

SEQ ID NO: 30768 - DNA, 25 bp, Probe Sequence
caataaagtcatacgctccaactga

SEQ ID NO: 30769 - DNA, 25 bp, Probe Sequence
tcaataaagtcatacgctccaactg

SEQ ID NO: 30770 - DNA, 25 bp, Probe Sequence
caaaggtttattccagagaagccag

SEQ ID NO: 30771 - DNA, 25 bp, Probe Sequence
cctggatcaataaagtcatacgctc

SEQ ID NO: 30772 - DNA, 25 bp, Probe Sequence
tgtgaggagactatgatataacatg

SEQ ID NO: 30773 - DNA, 25 bp, Probe Sequence
ataaagtcatacgctccaactgatc

SEQ ID NO: 30774 - DNA, 25 bp, Probe Sequence
tcctggatcaataaagtcatacgct

SEQ ID NO: 30775 - DNA, 25 bp, Probe Sequence
gtcctggatcaataaagtcatacgc

SEQ ID NO: 30776 - DNA, 25 bp, Probe Sequence
atggcatcatccaaggaatagactc

SEQ ID NO: 30777 - DNA, 25 bp, Probe Sequence
gaacaaactgaacgacattctcctc

SEQ ID NO: 30778 - DNA, 25 bp, Probe Sequence
caaactgaacgacattctcctcatc

SEQ ID NO: 30779 - DNA, 25 bp, Probe Sequence
acaaactgaacgacattctcctcat

SEQ ID NO: 30780 - DNA, 25 bp, Probe Sequence
aactgaacgacattctcctcatcca

SEQ ID NO: 30781 - DNA, 25 bp, Probe Sequence
aacaaactgaacgacattctcctca

SEQ ID NO: 30782 - DNA, 25 bp, Probe Sequence
aaactgaacgacattctcctcatcc

SEQ ID NO: 30783 - DNA, 25 bp, Probe Sequence
gatggcatcatccaaggaatagact

SEQ ID NO: 30784 - DNA, 25 bp, Probe Sequence
actgaacgacattctcctcatccag

SEQ ID NO: 30785 - DNA, 25 bp, Probe Sequence
tggcatcatccaaggaatagactcc

SEQ ID NO: 30786 - DNA, 25 bp, Probe Sequence
cataacatttgcactttcgtccctc

SEQ ID NO: 30787 - DNA, 25 bp, Probe Sequence
agaacaaactgaacgacattctcct

SEQ ID NO: 30788 - DNA, 25 bp, Probe Sequence
cacataacatttgcactttcgtccc

SEQ ID NO: 30789 - DNA, 25 bp, Probe Sequence
ccacataacatttgcactttcgtcc

SEQ ID NO: 30790 - DNA, 25 bp, Probe Sequence
tgatggcatcatccaaggaatagac

SEQ ID NO: 30791 - DNA, 25 bp, Probe Sequence
gtgatggcatcatccaaggaataga

SEQ ID NO: 30792 - DNA, 25 bp, Probe Sequence
acataacatttgcactttcgtccct

SEQ ID NO: 30793 - DNA, 25 bp, Probe Sequence
tgtgatggcatcatccaaggaatag

SEQ ID NO: 30794 - DNA, 25 bp, Probe Sequence
ctgtgatggcatcatccaaggaata

SEQ ID NO: 30795 - DNA, 25 bp, Probe Sequence
gccacataacatttgcactttcgtc

SEQ ID NO: 30796 - DNA, 25 bp, Probe Sequence
gatctttggacagaagcagctcttg

SEQ ID NO: 30797 - DNA, 25 bp, Probe Sequence
ataacatttgcactttcgtccctcg

SEQ ID NO: 30798 - DNA, 25 bp, Probe Sequence
cggagaacaaactgaacgacattct

SEQ ID NO: 30799 - DNA, 25 bp, Probe Sequence
ggaatagactccttcgtgatctggg

SEQ ID NO: 30800 - DNA, 25 bp, Probe Sequence
ttctctctgctagatggatgttgat

SEQ ID NO: 30801 - DNA, 25 bp, Probe Sequence
tctctctgctagatggatgttgatg

SEQ ID NO: 30802 - DNA, 25 bp, Probe Sequence
gtgtggaactaggaggaggaatatt

SEQ ID NO: 30803 - DNA, 25 bp, Probe Sequence
tgtgtggaactaggaggaggaatat

SEQ ID NO: 30804 - DNA, 25 bp, Probe Sequence
atgtgtggaactaggaggaggaata

SEQ ID NO: 30805 - DNA, 25 bp, Probe Sequence
ccatttctgtgtcctttattgtagc

SEQ ID NO: 30806 - DNA, 25 bp, Probe Sequence
ttctgtgtcctttattgtagcattg

SEQ ID NO: 30807 - DNA, 25 bp, Probe Sequence
catttctgtgtcctttattgtagca

SEQ ID NO: 30808 - DNA, 25 bp, Probe Sequence
cccatttctgtgtcctttattgtag

SEQ ID NO: 30809 - DNA, 25 bp, Probe Sequence
tttcaaataaatatggatggcgagc

SEQ ID NO: 30810 - DNA, 25 bp, Probe Sequence
gttgctattaaatggacttcgtgat

SEQ ID NO: 30811 - DNA, 25 bp, Probe Sequence
tgatgtaattcccactgtaatagca

SEQ ID NO: 30812 - DNA, 25 bp, Probe Sequence
ttgctattaaatggacttcgtgatt

SEQ ID NO: 30813 - DNA, 25 bp, Probe Sequence
tttctgtgtcctttattgtagcatt

SEQ ID NO: 30814 - DNA, 25 bp, Probe Sequence
atttctgtgtcctttattgtagcat

SEQ ID NO: 30815 - DNA, 25 bp, Probe Sequence
gtaattcccactgtaatagcatagg

SEQ ID NO: 30816 - DNA, 25 bp, Probe Sequence
tgttgggaactgagaagtgtatatg

SEQ ID NO: 30817 - DNA, 25 bp, Probe Sequence
cttgttgggaactgagaagtgtata

SEQ ID NO: 30818 - DNA, 25 bp, Probe Sequence
atgatgtaattcccactgtaatagc

SEQ ID NO: 30819 - DNA, 25 bp, Probe Sequence
ttgttgggaactgagaagtgtatat

SEQ ID NO: 30820 - DNA, 25 bp, Probe Sequence
agttgctattaaatggacttcgtga

SEQ ID NO: 30821 - DNA, 25 bp, Probe Sequence
gttgggaactgagaagtgtatatgg

SEQ ID NO: 30822 - DNA, 25 bp, Probe Sequence
gatgtaattcccactgtaatagcat

SEQ ID NO: 30823 - DNA, 25 bp, Probe Sequence
ctctctgctagatggatgttgatgc

SEQ ID NO: 30824 - DNA, 25 bp, Probe Sequence
atctatgatgatgatgatgtgtctc

SEQ ID NO: 30825 - DNA, 25 bp, Probe Sequence
ctatgatgatgatgatgtgtctcca

SEQ ID NO: 30826 - DNA, 25 bp, Probe Sequence
tctatgatgatgatgatgtgtctcc

SEQ ID NO: 30827 - DNA, 25 bp, Probe Sequence
ctgtgtctcgtcttgtatctctaat

SEQ ID NO: 30828 - DNA, 25 bp, Probe Sequence
gtctccttattgctggttatgatga

SEQ ID NO: 30829 - DNA, 25 bp, Probe Sequence
tctccttattgctggttatgatgat

SEQ ID NO: 30830 - DNA, 25 bp, Probe Sequence
ggaacattaagtgataagccagtct

SEQ ID NO: 30831 - DNA, 25 bp, Probe Sequence
tgtctcgtcttgtatctctaattgg

SEQ ID NO: 30832 - DNA, 25 bp, Probe Sequence
gtctcgtcttgtatctctaattgga

SEQ ID NO: 30833 - DNA, 25 bp, Probe Sequence
gcaccacatactgatgacaataatc

SEQ ID NO: 30834 - DNA, 25 bp, Probe Sequence
atgatgatgatgatgtgtctccatt

SEQ ID NO: 30835 - DNA, 25 bp, Probe Sequence
tgtgtctcgtcttgtatctctaatt

SEQ ID NO: 30836 - DNA, 25 bp, Probe Sequence
tatgatgatgatgatgtgtctccat

SEQ ID NO: 30837 - DNA, 25 bp, Probe Sequence
tgatgatgatgatgtgtctccattc

SEQ ID NO: 30838 - DNA, 25 bp, Probe Sequence
ggtctccttattgctggttatgatg

SEQ ID NO: 30839 - DNA, 25 bp, Probe Sequence
gtgtctcgtcttgtatctctaattg

SEQ ID NO: 30840 - DNA, 25 bp, Probe Sequence
tcgtcttgtatctctaattggaagc

SEQ ID NO: 30841 - DNA, 25 bp, Probe Sequence
tgctgatgctagactgttatgtaat

SEQ ID NO: 30842 - DNA, 25 bp, Probe Sequence
cttactgctgatgctagactgttat

SEQ ID NO: 30843 - DNA, 25 bp, Probe Sequence
cctgtgtctcgtcttgtatctctaa

SEQ ID NO: 30844 - DNA, 25 bp, Probe Sequence
tctcgtcttgtatctctaattggaa

SEQ ID NO: 30845 - DNA, 25 bp, Probe Sequence
ctgctgatgctagactgttatgtaa

SEQ ID NO: 30846 - DNA, 25 bp, Probe Sequence
ttactgctgatgctagactgttatg

SEQ ID NO: 30847 - DNA, 25 bp, Probe Sequence
cgtcttgtatctctaattggaagca

SEQ ID NO: 30848 - DNA, 25 bp, Probe Sequence
tatgctaaggaatctctgaaggaag

SEQ ID NO: 30849 - DNA, 25 bp, Probe Sequence
ttagcagacatagcaagagaagaag

SEQ ID NO: 30850 - DNA, 25 bp, Probe Sequence
atatgctaaggaatctctgaaggaa

SEQ ID NO: 30851 - DNA, 25 bp, Probe Sequence
aatatgctaaggaatctctgaagga

SEQ ID NO: 30852 - DNA, 25 bp, Probe Sequence
gctaaggaatctctgaaggaagaag

SEQ ID NO: 30853 - DNA, 25 bp, Probe Sequence
ctaaggaatctctgaaggaagaaga

SEQ ID NO: 30854 - DNA, 25 bp, Probe Sequence
atgctaaggaatctctgaaggaaga

SEQ ID NO: 30855 - DNA, 25 bp, Probe Sequence
tgaaggaagaagatgaatcagatga

SEQ ID NO: 30856 - DNA, 25 bp, Probe Sequence
tgctaaggaatctctgaaggaagaa

SEQ ID NO: 30857 - DNA, 25 bp, Probe Sequence
ggttggtgaattaactaatggaaga

SEQ ID NO: 30858 - DNA, 25 bp, Probe Sequence
ttggtgaattaactaatggaagaca

SEQ ID NO: 30859 - DNA, 25 bp, Probe Sequence
tctactccagtccaatgtaactatt

SEQ ID NO: 30860 - DNA, 25 bp, Probe Sequence
ttctactccagtccaatgtaactat

SEQ ID NO: 30861 - DNA, 25 bp, Probe Sequence
aaggaagaagatgaatcagatgatg

SEQ ID NO: 30862 - DNA, 25 bp, Probe Sequence
aggaagaagatgaatcagatgatga

SEQ ID NO: 30863 - DNA, 25 bp, Probe Sequence
acatagtacatgacgaagttaagga

SEQ ID NO: 30864 - DNA, 25 bp, Probe Sequence
tggtgaattaactaatggaagacat

SEQ ID NO: 30865 - DNA, 25 bp, Probe Sequence
gttggtgaattaactaatggaagac

SEQ ID NO: 30866 - DNA, 25 bp, Probe Sequence
gaaggaagaagatgaatcagatgat

SEQ ID NO: 30867 - DNA, 25 bp, Probe Sequence
tagcagacatagcaagagaagaagc

SEQ ID NO: 30868 - DNA, 25 bp, Probe Sequence
catagtacatgacgaagttaaggat

SEQ ID NO: 30869 - DNA, 25 bp, Probe Sequence
tttagcagacatagcaagagaagaa

SEQ ID NO: 30870 - DNA, 25 bp, Probe Sequence
catcaggtgtttcatacggttattg

SEQ ID NO: 30871 - DNA, 25 bp, Probe Sequence
ggtgaattaactaatggaagacatg

SEQ ID NO: 30872 - DNA, 25 bp, Probe Sequence
acttctgatgctaatgttctgacta

SEQ ID NO: 30873 - DNA, 25 bp, Probe Sequence
gtcgcttataccaagttgaatatgc

SEQ ID NO: 30874 - DNA, 25 bp, Probe Sequence
aacttctgatgctaatgttctgact

SEQ ID NO: 30875 - DNA, 25 bp, Probe Sequence
gcttataccaagttgaatatgccat

SEQ ID NO: 30876 - DNA, 25 bp, Probe Sequence
aagatatgactccaggaccactata

SEQ ID NO: 30877 - DNA, 25 bp, Probe Sequence
gcaacactaacaagagagaatggaa

SEQ ID NO: 30878 - DNA, 25 bp, Probe Sequence
ctgatgctaatgttctgactaatga

SEQ ID NO: 30879 - DNA, 25 bp, Probe Sequence
tctgatgctaatgttctgactaatg

SEQ ID NO: 30880 - DNA, 25 bp, Probe Sequence
agatatgactccaggaccactatat

SEQ ID NO: 30881 - DNA, 25 bp, Probe Sequence
cttctgatgctaatgttctgactaa

SEQ ID NO: 30882 - DNA, 25 bp, Probe Sequence
gaagatatgactccaggaccactat

SEQ ID NO: 30883 - DNA, 25 bp, Probe Sequence
taacttctgatgctaatgttctgac

SEQ ID NO: 30884 - DNA, 25 bp, Probe Sequence
tcgcttataccaagttgaatatgcc

SEQ ID NO: 30885 - DNA, 25 bp, Probe Sequence
gatatgactccaggaccactatatt

SEQ ID NO: 30886 - DNA, 25 bp, Probe Sequence
cgcttataccaagttgaatatgcca

SEQ ID NO: 30887 - DNA, 25 bp, Probe Sequence
tgatgctaatgttctgactaatgaa

SEQ ID NO: 30888 - DNA, 25 bp, Probe Sequence
ttctgatgctaatgttctgactaat

SEQ ID NO: 30889 - DNA, 25 bp, Probe Sequence
cataacttctgatgctaatgttctg

SEQ ID NO: 30890 - DNA, 25 bp, Probe Sequence
ataacttctgatgctaatgttctga

SEQ ID NO: 30891 - DNA, 25 bp, Probe Sequence
tattacagtatcaggagccaatacc

SEQ ID NO: 30892 - DNA, 25 bp, Probe Sequence
attacagtatcaggagccaatacct

SEQ ID NO: 30893 - DNA, 25 bp, Probe Sequence
ttacagtatcaggagccaatacctt

SEQ ID NO: 30894 - DNA, 25 bp, Probe Sequence
ggtcgcttataccaagttgaatatg

SEQ ID NO: 30895 - DNA, 25 bp, Probe Sequence
aaggtcgcttataccaagttgaata

SEQ ID NO: 30896 - DNA, 25 bp, Probe Sequence
agtggaatatgacattgaggctatc

SEQ ID NO: 30897 - DNA, 25 bp, Probe Sequence
aagtggaatatgacattgaggctat

SEQ ID NO: 30898 - DNA, 25 bp, Probe Sequence
ctacaatgagacaatgacagtggag

SEQ ID NO: 30899 - DNA, 25 bp, Probe Sequence
tacaatgagacaatgacagtggaga

SEQ ID NO: 30900 - DNA, 25 bp, Probe Sequence
caagtggaatatgacattgaggcta

SEQ ID NO: 30901 - DNA, 25 bp, Probe Sequence
aaggaagaacttgaagaggttatca

SEQ ID NO: 30902 - DNA, 25 bp, Probe Sequence
gtggaatatgacattgaggctatca

SEQ ID NO: 30903 - DNA, 25 bp, Probe Sequence
tagagattgatgctcacataggttg

SEQ ID NO: 30904 - DNA, 25 bp, Probe Sequence
gtagagattgatgctcacataggtt

SEQ ID NO: 30905 - DNA, 25 bp, Probe Sequence
ttcacctacaatgagacaatgacag

SEQ ID NO: 30906 - DNA, 25 bp, Probe Sequence
catcaagtcttcactcatcatcctc

SEQ ID NO: 30907 - DNA, 25 bp, Probe Sequence
gttcacctacaatgagacaatgaca

SEQ ID NO: 30908 - DNA, 25 bp, Probe Sequence
ttgtagagattgatgctcacatagg

SEQ ID NO: 30909 - DNA, 25 bp, Probe Sequence
atcaagtcttcactcatcatcctca

SEQ ID NO: 30910 - DNA, 25 bp, Probe Sequence
tcaagtcttcactcatcatcctcaa

SEQ ID NO: 30911 - DNA, 25 bp, Probe Sequence
tgtagagattgatgctcacataggt

SEQ ID NO: 30912 - DNA, 25 bp, Probe Sequence
tcacctacaatgagacaatgacagt

SEQ ID NO: 30913 - DNA, 25 bp, Probe Sequence
cctacaatgagacaatgacagtgga

SEQ ID NO: 30914 - DNA, 25 bp, Probe Sequence
ggttcacctacaatgagacaatgac

SEQ ID NO: 30915 - DNA, 25 bp, Probe Sequence
ctggttcacctacaatgagacaatg

SEQ ID NO: 30916 - DNA, 25 bp, Probe Sequence
attgtagagattgatgctcacatag

SEQ ID NO: 30917 - DNA, 25 bp, Probe Sequence
ccatcaagtcttcactcatcatcct

SEQ ID NO: 30918 - DNA, 25 bp, Probe Sequence
aatgagacaatgacagtggagagtg

SEQ ID NO: 30919 - DNA, 25 bp, Probe Sequence
caatgagacaatgacagtggagagt

SEQ ID NO: 30920 - DNA, 25 bp, Probe Sequence
tagtcctagagctattcattcatgg

SEQ ID NO: 30921 - DNA, 25 bp, Probe Sequence
cattatgcgagtcaacaacagtacc

SEQ ID NO: 30922 - DNA, 25 bp, Probe Sequence
agtggctttgaatgaaatacagatg

SEQ ID NO: 30923 - DNA, 25 bp, Probe Sequence
cagtggctttgaatgaaatacagat

SEQ ID NO: 30924 - DNA, 25 bp, Probe Sequence
attatgcgagtcaacaacagtacca

SEQ ID NO: 30925 - DNA, 25 bp, Probe Sequence
gtggctttgaatgaaatacagatgc

SEQ ID NO: 30926 - DNA, 25 bp, Probe Sequence
agtcctagagctattcattcatggc

SEQ ID NO: 30927 - DNA, 25 bp, Probe Sequence
ttatgcgagtcaacaacagtaccat

SEQ ID NO: 30928 - DNA, 25 bp, Probe Sequence
tttccagtatttgaagcaagttctc

SEQ ID NO: 30929 - DNA, 25 bp, Probe Sequence
tgatttccagtatttgaagcaagtt

SEQ ID NO: 30930 - DNA, 25 bp, Probe Sequence
atcagtggctttgaatgaaatacag

SEQ ID NO: 30931 - DNA, 25 bp, Probe Sequence
atttccagtatttgaagcaagttct

SEQ ID NO: 30932 - DNA, 25 bp, Probe Sequence
tcagtggctttgaatgaaatacaga

SEQ ID NO: 30933 - DNA, 25 bp, Probe Sequence
gatttccagtatttgaagcaagttc

SEQ ID NO: 30934 - DNA, 25 bp, Probe Sequence
cttggctagttcaaagatagactct

SEQ ID NO: 30935 - DNA, 25 bp, Probe Sequence
acttggctagttcaaagatagactc

SEQ ID NO: 30936 - DNA, 25 bp, Probe Sequence
ttctgctaccgtgactaagatggaa

SEQ ID NO: 30937 - DNA, 25 bp, Probe Sequence
ttccagtatttgaagcaagttctcg

SEQ ID NO: 30938 - DNA, 25 bp, Probe Sequence
ctgatttccagtatttgaagcaagt

SEQ ID NO: 30939 - DNA, 25 bp, Probe Sequence
ctacgctgatttccagtatttgaag

SEQ ID NO: 30940 - DNA, 25 bp, Probe Sequence
gatcagtggctttgaatgaaataca

SEQ ID NO: 30941 - DNA, 25 bp, Probe Sequence
actacgctgatttccagtatttgaa

SEQ ID NO: 30942 - DNA, 25 bp, Probe Sequence
gactacgctgatttccagtatttga

SEQ ID NO: 30943 - DNA, 25 bp, Probe Sequence
attatccagaactgaagttgcccta

SEQ ID NO: 30944 - DNA, 25 bp, Probe Sequence
tataaggatggcatagttcttggag

SEQ ID NO: 30945 - DNA, 25 bp, Probe Sequence
ttcaggtatcaaggttacattggtg

SEQ ID NO: 30946 - DNA, 25 bp, Probe Sequence
ctataaggatggcatagttcttgga

SEQ ID NO: 30947 - DNA, 25 bp, Probe Sequence
tctataaggatggcatagttcttgg

SEQ ID NO: 30948 - DNA, 25 bp, Probe Sequence
ggtctataaggatggcatagttctt

SEQ ID NO: 30949 - DNA, 25 bp, Probe Sequence
tggtctataaggatggcatagttct

SEQ ID NO: 30950 - DNA, 25 bp, Probe Sequence
gtggtctataaggatggcatagttc

SEQ ID NO: 30951 - DNA, 25 bp, Probe Sequence
tcacctctacagcatctatcctcat

SEQ ID NO: 30952 - DNA, 25 bp, Probe Sequence
gtctataaggatggcatagttcttg

SEQ ID NO: 30953 - DNA, 25 bp, Probe Sequence
ggtggtctataaggatggcatagtt

SEQ ID NO: 30954 - DNA, 25 bp, Probe Sequence
gatggcatagttcttggagcagata

SEQ ID NO: 30955 - DNA, 25 bp, Probe Sequence
ataaggatggcatagttcttggagc

SEQ ID NO: 30956 - DNA, 25 bp, Probe Sequence
ctcacctctacagcatctatcctca

SEQ ID NO: 30957 - DNA, 25 bp, Probe Sequence
atggcatagttcttggagcagatac

SEQ ID NO: 30958 - DNA, 25 bp, Probe Sequence
tagatgttactggacctcacctcta

SEQ ID NO: 30959 - DNA, 25 bp, Probe Sequence
cacctctacagcatctatcctcatg

SEQ ID NO: 30960 - DNA, 25 bp, Probe Sequence
ggcatagttcttggagcagatacaa

SEQ ID NO: 30961 - DNA, 25 bp, Probe Sequence
agatgttactggacctcacctctac

SEQ ID NO: 30962 - DNA, 25 bp, Probe Sequence
gtagatgttactggacctcacctct

SEQ ID NO: 30963 - DNA, 25 bp, Probe Sequence
gcaatggctgtatttgaagataagt

SEQ ID NO: 30964 - DNA, 25 bp, Probe Sequence
tcaggtatcaaggttacattggtgc

SEQ ID NO: 30965 - DNA, 25 bp, Probe Sequence
tttcaggtatcaaggttacattggt

SEQ ID NO: 30966 - DNA, 25 bp, Probe Sequence
gccgaatgaaactcaactcaataaa

SEQ ID NO: 30967 - DNA, 25 bp, Probe Sequence
atatttattgttgtggtgctgggac

SEQ ID NO: 30968 - DNA, 25 bp, Probe Sequence
taatctcagtgacagtaggtggtta

SEQ ID NO: 30969 - DNA, 25 bp, Probe Sequence
agaccttctctcatatacagcattg

SEQ ID NO: 30970 - DNA, 25 bp, Probe Sequence
aatctcagtgacagtaggtggttaa

SEQ ID NO: 30971 - DNA, 25 bp, Probe Sequence
ttctaatctcagtgacagtaggtgg

SEQ ID NO: 30972 - DNA, 25 bp, Probe Sequence
ctaatctcagtgacagtaggtggtt

SEQ ID NO: 30973 - DNA, 25 bp, Probe Sequence
tagaccttctctcatatacagcatt

SEQ ID NO: 30974 - DNA, 25 bp, Probe Sequence
ttagaccttctctcatatacagcat

SEQ ID NO: 30975 - DNA, 25 bp, Probe Sequence
tactaatcatcacacacaggctacc

SEQ ID NO: 30976 - DNA, 25 bp, Probe Sequence
gaccttctctcatatacagcattgt

SEQ ID NO: 30977 - DNA, 25 bp, Probe Sequence
gtactaatcatcacacacaggctac

SEQ ID NO: 30978 - DNA, 25 bp, Probe Sequence
atctgtcctattcttcacctacaca

SEQ ID NO: 30979 - DNA, 25 bp, Probe Sequence
tctaatctcagtgacagtaggtggt

SEQ ID NO: 30980 - DNA, 25 bp, Probe Sequence
tgtcctattcttcacctacacacaa

SEQ ID NO: 30981 - DNA, 25 bp, Probe Sequence
gatctgtcctattcttcacctacac

SEQ ID NO: 30982 - DNA, 25 bp, Probe Sequence
tctgtcctattcttcacctacacac

SEQ ID NO: 30983 - DNA, 25 bp, Probe Sequence
ctgtcctattcttcacctacacaca

SEQ ID NO: 30984 - DNA, 25 bp, Probe Sequence
taatcatcacacacaggctacctaa

SEQ ID NO: 30985 - DNA, 25 bp, Probe Sequence
gcagtgtgttattcagaatacagta

SEQ ID NO: 30986 - DNA, 25 bp, Probe Sequence
ggcagtgtgttattcagaatacagt

SEQ ID NO: 30987 - DNA, 25 bp, Probe Sequence
ttaaggtcaggagttcaagatcagc

SEQ ID NO: 30988 - DNA, 25 bp, Probe Sequence
ctaatcatcacacacaggctaccta

SEQ ID NO: 30989 - DNA, 25 bp, Probe Sequence
ttcttctcaaacctggacctttatt

SEQ ID NO: 30990 - DNA, 25 bp, Probe Sequence
tttcttctcaaacctggacctttat

SEQ ID NO: 30991 - DNA, 25 bp, Probe Sequence
atgaaagccagtattagggacaaat

SEQ ID NO: 30992 - DNA, 25 bp, Probe Sequence
ggaaccttggaagagattattgatg

SEQ ID NO: 30993 - DNA, 25 bp, Probe Sequence
tcagtaggaaccttggaagagatta

SEQ ID NO: 30994 - DNA, 25 bp, Probe Sequence
cagtaggaaccttggaagagattat

SEQ ID NO: 30995 - DNA, 25 bp, Probe Sequence
aggaaccttggaagagattattgat

SEQ ID NO: 30996 - DNA, 25 bp, Probe Sequence
gaaccttggaagagattattgatga

SEQ ID NO: 30997 - DNA, 25 bp, Probe Sequence
taggaaccttggaagagattattga

SEQ ID NO: 30998 - DNA, 25 bp, Probe Sequence
gtaggaaccttggaagagattattg

SEQ ID NO: 30999 - DNA, 25 bp, Probe Sequence
agtaggaaccttggaagagattatt

SEQ ID NO: 31000 - DNA, 25 bp, Probe Sequence
gtcagtaggaaccttggaagagatt

SEQ ID NO: 31001 - DNA, 25 bp, Probe Sequence
attattgatgacaatcatgccatcg

SEQ ID NO: 31002 - DNA, 25 bp, Probe Sequence
ttattgatgacaatcatgccatcgt

SEQ ID NO: 31003 - DNA, 25 bp, Probe Sequence
tattgatgacaatcatgccatcgtg

SEQ ID NO: 31004 - DNA, 25 bp, Probe Sequence
aaatggttgggagatttctcaatcc

SEQ ID NO: 31005 - DNA, 25 bp, Probe Sequence
ccaataaagcgtgctctttcacaag

SEQ ID NO: 31006 - DNA, 25 bp, Probe Sequence
aaaatggttgggagatttctcaatc

SEQ ID NO: 31007 - DNA, 25 bp, Probe Sequence
gaaaatggttgggagatttctcaat

SEQ ID NO: 31008 - DNA, 25 bp, Probe Sequence
ggaaaatggttgggagatttctcaa

SEQ ID NO: 31009 - DNA, 25 bp, Probe Sequence
aattcacattccattgcctcctaag

SEQ ID NO: 31010 - DNA, 25 bp, Probe Sequence
cattccattgcctcctaagattgac

SEQ ID NO: 31011 - DNA, 25 bp, Probe Sequence
aagatgacattcagcaacttctcaa

SEQ ID NO: 31012 - DNA, 25 bp, Probe Sequence
ctactcctcgttacatgacatacaa

SEQ ID NO: 31013 - DNA, 25 bp, Probe Sequence
acattccattgcctcctaagattga

SEQ ID NO: 31014 - DNA, 25 bp, Probe Sequence
cacattccattgcctcctaagattg

SEQ ID NO: 31015 - DNA, 25 bp, Probe Sequence
tcacattccattgcctcctaagatt

SEQ ID NO: 31016 - DNA, 25 bp, Probe Sequence
ttcacattccattgcctcctaagat

SEQ ID NO: 31017 - DNA, 25 bp, Probe Sequence
attcacattccattgcctcctaaga

SEQ ID NO: 31018 - DNA, 25 bp, Probe Sequence
gatgacattcagcaacttctcaaga

SEQ ID NO: 31019 - DNA, 25 bp, Probe Sequence
agatgacattcagcaacttctcaag

SEQ ID NO: 31020 - DNA, 25 bp, Probe Sequence
ctcgttacatgacatacaactgaac

SEQ ID NO: 31021 - DNA, 25 bp, Probe Sequence
tactcctcgttacatgacatacaac

SEQ ID NO: 31022 - DNA, 25 bp, Probe Sequence
atgacattcagcaacttctcaagaa

SEQ ID NO: 31023 - DNA, 25 bp, Probe Sequence
cctcgttacatgacatacaactgaa

SEQ ID NO: 31024 - DNA, 25 bp, Probe Sequence
tcgttacatgacatacaactgaacc

SEQ ID NO: 31025 - DNA, 25 bp, Probe Sequence
aattcagtgctactcctcgttacat

SEQ ID NO: 31026 - DNA, 25 bp, Probe Sequence
ctcctcgttacatgacatacaactg

SEQ ID NO: 31027 - DNA, 25 bp, Probe Sequence
tcctcgttacatgacatacaactga

SEQ ID NO: 31028 - DNA, 25 bp, Probe Sequence
actcctcgttacatgacatacaact

SEQ ID NO: 31029 - DNA, 25 bp, Probe Sequence
attccattgcctcctaagattgacc

SEQ ID NO: 31030 - DNA, 25 bp, Probe Sequence
gctactcctcgttacatgacataca

SEQ ID NO: 31031 - DNA, 25 bp, Probe Sequence
tgctactcctcgttacatgacatac

SEQ ID NO: 31032 - DNA, 25 bp, Probe Sequence
gtgctactcctcgttacatgacata

SEQ ID NO: 31033 - DNA, 25 bp, Probe Sequence
atgaagagtgaagtgttgagagtca

SEQ ID NO: 31034 - DNA, 25 bp, Probe Sequence
catgaagagtgaagtgttgagagtc

SEQ ID NO: 31035 - DNA, 25 bp, Probe Sequence
gatgttgatcctaatgaccaagagg

SEQ ID NO: 31036 - DNA, 25 bp, Probe Sequence
aagaagaaagccaacctacaatact

SEQ ID NO: 31037 - DNA, 25 bp, Probe Sequence
caagaagaaagccaacctacaatac

SEQ ID NO: 31038 - DNA, 25 bp, Probe Sequence
gaagaaagccaacctacaatactac

SEQ ID NO: 31039 - DNA, 25 bp, Probe Sequence
agaagaaagccaacctacaatacta

SEQ ID NO: 31040 - DNA, 25 bp, Probe Sequence
aagaaagccaacctacaatactacg

SEQ ID NO: 31041 - DNA, 25 bp, Probe Sequence
ccaagaagaaagccaacctacaata

SEQ ID NO: 31042 - DNA, 25 bp, Probe Sequence
gtgtgaacaaagactcctatctgat

SEQ ID NO: 31043 - DNA, 25 bp, Probe Sequence
aagccaacctacaatactacgccta

SEQ ID NO: 31044 - DNA, 25 bp, Probe Sequence
tgtgaacaaagactcctatctgatc

SEQ ID NO: 31045 - DNA, 25 bp, Probe Sequence
aatgaaccacaaggagaagtttgag

SEQ ID NO: 31046 - DNA, 25 bp, Probe Sequence
gaacaaagactcctatctgatcctg

SEQ ID NO: 31047 - DNA, 25 bp, Probe Sequence
tgaacaaagactcctatctgatcct

SEQ ID NO: 31048 - DNA, 25 bp, Probe Sequence
gtgaacaaagactcctatctgatcc

SEQ ID NO: 31049 - DNA, 25 bp, Probe Sequence
caatgaaccacaaggagaagtttga

SEQ ID NO: 31050 - DNA, 25 bp, Probe Sequence
gaaccacaaggagaagtttgagaac

SEQ ID NO: 31051 - DNA, 25 bp, Probe Sequence
ggtgtgaacaaagactcctatctga

SEQ ID NO: 31052 - DNA, 25 bp, Probe Sequence
atgaaccacaaggagaagtttgaga

SEQ ID NO: 31053 - DNA, 25 bp, Probe Sequence
aacaaagactcctatctgatcctgg

SEQ ID NO: 31054 - DNA, 25 bp, Probe Sequence
caagttaaggtaattgcagccacaa

SEQ ID NO: 31055 - DNA, 25 bp, Probe Sequence
tcttcattgatgagttggatgccat

SEQ ID NO: 31056 - DNA, 25 bp, Probe Sequence
atcttcattgatgagttggatgcca

SEQ ID NO: 31057 - DNA, 25 bp, Probe Sequence
taataggattgatatgctggactcg

SEQ ID NO: 31058 - DNA, 25 bp, Probe Sequence
aacttatgagatgattggtggactg

SEQ ID NO: 31059 - DNA, 25 bp, Probe Sequence
tggctactaataggattgatatgct

SEQ ID NO: 31060 - DNA, 25 bp, Probe Sequence
actaataggattgatatgctggact

SEQ ID NO: 31061 - DNA, 25 bp, Probe Sequence
gctactaataggattgatatgctgg

SEQ ID NO: 31062 - DNA, 25 bp, Probe Sequence
ggctactaataggattgatatgctg

SEQ ID NO: 31063 - DNA, 25 bp, Probe Sequence
caacttatgagatgattggtggact

SEQ ID NO: 31064 - DNA, 25 bp, Probe Sequence
ttcaacttatgagatgattggtgga

SEQ ID NO: 31065 - DNA, 25 bp, Probe Sequence
tcaacttatgagatgattggtggac

SEQ ID NO: 31066 - DNA, 25 bp, Probe Sequence
ctaataggattgatatgctggactc

SEQ ID NO: 31067 - DNA, 25 bp, Probe Sequence
attcaacttatgagatgattggtgg

SEQ ID NO: 31068 - DNA, 25 bp, Probe Sequence
cttatgagatgattggtggactgga

SEQ ID NO: 31069 - DNA, 25 bp, Probe Sequence
atggctactaataggattgatatgc

SEQ ID NO: 31070 - DNA, 25 bp, Probe Sequence
ttatgagatgattggtggactggac

SEQ ID NO: 31071 - DNA, 25 bp, Probe Sequence
acttatgagatgattggtggactgg

SEQ ID NO: 31072 - DNA, 25 bp, Probe Sequence
aacatgctccatctatcatcttcat

SEQ ID NO: 31073 - DNA, 25 bp, Probe Sequence
aataggattgatatgctggactcgg

SEQ ID NO: 31074 - DNA, 25 bp, Probe Sequence
acatcaaggttatcatggctactaa

SEQ ID NO: 31075 - DNA, 25 bp, Probe Sequence
aagaacatcaaggttatcatggcta

SEQ ID NO: 31076 - DNA, 25 bp, Probe Sequence
gaacatgctccatctatcatcttca

SEQ ID NO: 31077 - DNA, 25 bp, Probe Sequence
aacatcaaggttatcatggctacta

SEQ ID NO: 31078 - DNA, 25 bp, Probe Sequence
gaacatcaaggttatcatggctact

SEQ ID NO: 31079 - DNA, 25 bp, Probe Sequence
agaacatcaaggttatcatggctac

SEQ ID NO: 31080 - DNA, 25 bp, Probe Sequence
caaggttatcatggctactaatagg

SEQ ID NO: 31081 - DNA, 25 bp, Probe Sequence
gctgtaagtgatgtgaatgatgatg

SEQ ID NO: 31082 - DNA, 25 bp, Probe Sequence
gaagaagattgtccaggctcatatt

SEQ ID NO: 31083 - DNA, 25 bp, Probe Sequence
actgctgtattatctataactgcca

SEQ ID NO: 31084 - DNA, 25 bp, Probe Sequence
tgtaagtgatgtgaatgatgatgtc

SEQ ID NO: 31085 - DNA, 25 bp, Probe Sequence
ctgtaagtgatgtgaatgatgatgt

SEQ ID NO: 31086 - DNA, 25 bp, Probe Sequence
aagaagattgtccaggctcatattg

SEQ ID NO: 31087 - DNA, 25 bp, Probe Sequence
gaaggataccagtgaagacattgag

SEQ ID NO: 31088 - DNA, 25 bp, Probe Sequence
gctgtattatctataactgccaagg

SEQ ID NO: 31089 - DNA, 25 bp, Probe Sequence
ggctgtaagtgatgtgaatgatgat

SEQ ID NO: 31090 - DNA, 25 bp, Probe Sequence
tgaaggataccagtgaagacattga

SEQ ID NO: 31091 - DNA, 25 bp, Probe Sequence
tattgatgattaaggaccagaggat

SEQ ID NO: 31092 - DNA, 25 bp, Probe Sequence
atattgatgattaaggaccagagga

SEQ ID NO: 31093 - DNA, 25 bp, Probe Sequence
atctcacttgcttatctgaagaaga

SEQ ID NO: 31094 - DNA, 25 bp, Probe Sequence
tgctgtattatctataactgccaag

SEQ ID NO: 31095 - DNA, 25 bp, Probe Sequence
ctgctgtattatctataactgccaa

SEQ ID NO: 31096 - DNA, 25 bp, Probe Sequence
tattggaggcatcatcattctgaag

SEQ ID NO: 31097 - DNA, 25 bp, Probe Sequence
ctattggaggcatcatcattctgaa

SEQ ID NO: 31098 - DNA, 25 bp, Probe Sequence
tggtcataatgtcacaatctccttg

SEQ ID NO: 31099 - DNA, 25 bp, Probe Sequence
attgatgattaaggaccagaggatc

SEQ ID NO: 31100 - DNA, 25 bp, Probe Sequence
gtaagtgatgtgaatgatgatgtca

SEQ ID NO: 31101 - DNA, 25 bp, Probe Sequence
gaggcatcatcattctgaaggatac

SEQ ID NO: 31102 - DNA, 25 bp, Probe Sequence
ctctctattggaggcatcatcattc

SEQ ID NO: 31103 - DNA, 25 bp, Probe Sequence
aagtgatgtgaatgatgatgtcagg

SEQ ID NO: 31104 - DNA, 25 bp, Probe Sequence
taagtgatgtgaatgatgatgtcag

SEQ ID NO: 31105 - DNA, 25 bp, Probe Sequence
atgtaacttccactatccttcagac

SEQ ID NO: 31106 - DNA, 25 bp, Probe Sequence
taacttccactatccttcagaccat

SEQ ID NO: 31107 - DNA, 25 bp, Probe Sequence
gatgtaacttccactatccttcaga

SEQ ID NO: 31108 - DNA, 25 bp, Probe Sequence
gagatgtaacttccactatccttca

SEQ ID NO: 31109 - DNA, 25 bp, Probe Sequence
agatgtaacttccactatccttcag

SEQ ID NO: 31110 - DNA, 25 bp, Probe Sequence
tgttactgagtgagataaggttgtt

SEQ ID NO: 31111 - DNA, 25 bp, Probe Sequence
ttgttactgagtgagataaggttgt

SEQ ID NO: 31112 - DNA, 25 bp, Probe Sequence
gttactgagtgagataaggttgttc

SEQ ID NO: 31113 - DNA, 25 bp, Probe Sequence
actgagtgagataaggttgttcaat

SEQ ID NO: 31114 - DNA, 25 bp, Probe Sequence
gtaacttccactatccttcagacca

SEQ ID NO: 31115 - DNA, 25 bp, Probe Sequence
tgtaacttccactatccttcagacc

SEQ ID NO: 31116 - DNA, 25 bp, Probe Sequence
tactgagtgagataaggttgttcaa

SEQ ID NO: 31117 - DNA, 25 bp, Probe Sequence
ttactgagtgagataaggttgttca

SEQ ID NO: 31118 - DNA, 25 bp, Probe Sequence
cttccactatccttcagaccatcat

SEQ ID NO: 31119 - DNA, 25 bp, Probe Sequence
attatgatctctaagtgaccaccag

SEQ ID NO: 31120 - DNA, 25 bp, Probe Sequence
aacttccactatccttcagaccatc

SEQ ID NO: 31121 - DNA, 25 bp, Probe Sequence
aattatgatctctaagtgaccacca

SEQ ID NO: 31122 - DNA, 25 bp, Probe Sequence
caattatgatctctaagtgaccacc

SEQ ID NO: 31123 - DNA, 25 bp, Probe Sequence
ccaattatgatctctaagtgaccac

SEQ ID NO: 31124 - DNA, 25 bp, Probe Sequence
ttatgatctctaagtgaccaccagg

SEQ ID NO: 31125 - DNA, 25 bp, Probe Sequence
ctgagtgagataaggttgttcaata

SEQ ID NO: 31126 - DNA, 25 bp, Probe Sequence
ggagatgtaacttccactatccttc

SEQ ID NO: 31127 - DNA, 25 bp, Probe Sequence
ttccactatccttcagaccatcatg

SEQ ID NO: 31128 - DNA, 25 bp, Probe Sequence
tgagtgagataaggttgttcaataa

SEQ ID NO: 31129 - DNA, 25 bp, Probe Sequence
aagaaggaggaagacaagaagtgag

SEQ ID NO: 31130 - DNA, 25 bp, Probe Sequence
caagaaggaggaagacaagaagtga

SEQ ID NO: 31131 - DNA, 25 bp, Probe Sequence
gacaagaaggaggaagacaagaagt

SEQ ID NO: 31132 - DNA, 25 bp, Probe Sequence
acaagaaggaggaagacaagaagtg

SEQ ID NO: 31133 - DNA, 25 bp, Probe Sequence
gaaggaggaagacaagaagtgagac

SEQ ID NO: 31134 - DNA, 25 bp, Probe Sequence
agaaggaggaagacaagaagtgaga

SEQ ID NO: 31135 - DNA, 25 bp, Probe Sequence
ggacaagaaggaggaagacaagaag

SEQ ID NO: 31136 - DNA, 25 bp, Probe Sequence
gaaggacaagaaggaggaagacaag

SEQ ID NO: 31137 - DNA, 25 bp, Probe Sequence
caagaaggacaagaaggaggaagac

SEQ ID NO: 31138 - DNA, 25 bp, Probe Sequence
cggaatatagggttagatgtgtgtt

SEQ ID NO: 31139 - DNA, 25 bp, Probe Sequence
gaagcacggaatatagggttagatg

SEQ ID NO: 31140 - DNA, 25 bp, Probe Sequence
acggaatatagggttagatgtgtgt

SEQ ID NO: 31141 - DNA, 25 bp, Probe Sequence
aggacaagaaggaggaagacaagaa

SEQ ID NO: 31142 - DNA, 25 bp, Probe Sequence
aaggacaagaaggaggaagacaaga

SEQ ID NO: 31143 - DNA, 25 bp, Probe Sequence
agaaggacaagaaggaggaagacaa

SEQ ID NO: 31144 - DNA, 25 bp, Probe Sequence
aagaaggacaagaaggaggaagaca

SEQ ID NO: 31145 - DNA, 25 bp, Probe Sequence
aagcacggaatatagggttagatgt

SEQ ID NO: 31146 - DNA, 25 bp, Probe Sequence
aaggaggaagacaagaagtgagact

SEQ ID NO: 31147 - DNA, 25 bp, Probe Sequence
gatgtgtgttatctgtaaccattac

SEQ ID NO: 31148 - DNA, 25 bp, Probe Sequence
ttccttcagagtgtcctagagaacc

SEQ ID NO: 31149 - DNA, 25 bp, Probe Sequence
gttagatgtgtgttatctgtaacca

SEQ ID NO: 31150 - DNA, 25 bp, Probe Sequence
ggaagcacggaatatagggttagat

SEQ ID NO: 31151 - DNA, 25 bp, Probe Sequence
cacggaatatagggttagatgtgtg

SEQ ID NO: 31152 - DNA, 25 bp, Probe Sequence
ggaatatagggttagatgtgtgtta

SEQ ID NO: 31153 - DNA, 25 bp, Probe Sequence
ccttctgaactctgttgataatacc

SEQ ID NO: 31154 - DNA, 25 bp, Probe Sequence
ttctgaactctgttgataataccac

SEQ ID NO: 31155 - DNA, 25 bp, Probe Sequence
tagtcaactcagccttcagattgta

SEQ ID NO: 31156 - DNA, 25 bp, Probe Sequence
gatagtcaactcagccttcagattg

SEQ ID NO: 31157 - DNA, 25 bp, Probe Sequence
aactctgttgataataccacaccat

SEQ ID NO: 31158 - DNA, 25 bp, Probe Sequence
gaactctgttgataataccacacca

SEQ ID NO: 31159 - DNA, 25 bp, Probe Sequence
tgaactctgttgataataccacacc

SEQ ID NO: 31160 - DNA, 25 bp, Probe Sequence
ctgaactctgttgataataccacac

SEQ ID NO: 31161 - DNA, 25 bp, Probe Sequence
tctgaactctgttgataataccaca

SEQ ID NO: 31162 - DNA, 25 bp, Probe Sequence
atgatagtcaactcagccttcagat

SEQ ID NO: 31163 - DNA, 25 bp, Probe Sequence
cttctgaactctgttgataatacca

SEQ ID NO: 31164 - DNA, 25 bp, Probe Sequence
tgatagtcaactcagccttcagatt

SEQ ID NO: 31165 - DNA, 25 bp, Probe Sequence
aatgatagtcaactcagccttcaga

SEQ ID NO: 31166 - DNA, 25 bp, Probe Sequence
gtcaactcagccttcagattgtatg

SEQ ID NO: 31167 - DNA, 25 bp, Probe Sequence
agtcaactcagccttcagattgtat

SEQ ID NO: 31168 - DNA, 25 bp, Probe Sequence
atagtcaactcagccttcagattgt

SEQ ID NO: 31169 - DNA, 25 bp, Probe Sequence
tcaactcagccttcagattgtatga

SEQ ID NO: 31170 - DNA, 25 bp, Probe Sequence
ttgtgatccagctccatatattgtt

SEQ ID NO: 31171 - DNA, 25 bp, Probe Sequence
gttgataataccacaccatgttctg

SEQ ID NO: 31172 - DNA, 25 bp, Probe Sequence
tgttgataataccacaccatgttct

SEQ ID NO: 31173 - DNA, 25 bp, Probe Sequence
ctgttgataataccacaccatgttc

SEQ ID NO: 31174 - DNA, 25 bp, Probe Sequence
tctgttgataataccacaccatgtt

SEQ ID NO: 31175 - DNA, 25 bp, Probe Sequence
gttgtgatccagctccatatattgt

SEQ ID NO: 31176 - DNA, 25 bp, Probe Sequence
ctctgttgataataccacaccatgt

SEQ ID NO: 31177 - DNA, 25 bp, Probe Sequence
ctacaccttcttcattgacatcctg

SEQ ID NO: 31178 - DNA, 25 bp, Probe Sequence
gctacaccttcttcattgacatcct

SEQ ID NO: 31179 - DNA, 25 bp, Probe Sequence
gagctacaccttcttcattgacatc

SEQ ID NO: 31180 - DNA, 25 bp, Probe Sequence
tacaccttcttcattgacatcctgc

SEQ ID NO: 31181 - DNA, 25 bp, Probe Sequence
agagctacaccttcttcattgacat

SEQ ID NO: 31182 - DNA, 25 bp, Probe Sequence
tactactttgattacaaggagcagc

SEQ ID NO: 31183 - DNA, 25 bp, Probe Sequence
ctactactttgattacaaggagcag

SEQ ID NO: 31184 - DNA, 25 bp, Probe Sequence
agctacaccttcttcattgacatcc

SEQ ID NO: 31185 - DNA, 25 bp, Probe Sequence
gagagctacaccttcttcattgaca

SEQ ID NO: 31186 - DNA, 25 bp, Probe Sequence
atgctactactttgattacaaggag

SEQ ID NO: 31187 - DNA, 25 bp, Probe Sequence
caccttcttcattgacatcctgctc

SEQ ID NO: 31188 - DNA, 25 bp, Probe Sequence
aatgctactactttgattacaagga

SEQ ID NO: 31189 - DNA, 25 bp, Probe Sequence
aaagatgacagactacgccaagaag

SEQ ID NO: 31190 - DNA, 25 bp, Probe Sequence
aaatgctactactttgattacaagg

SEQ ID NO: 31191 - DNA, 25 bp, Probe Sequence
cgagagctacaccttcttcattgac

SEQ ID NO: 31192 - DNA, 25 bp, Probe Sequence
cattgacatcctgctcgacactatc

SEQ ID NO: 31193 - DNA, 25 bp, Probe Sequence
acaccttcttcattgacatcctgct

SEQ ID NO: 31194 - DNA, 25 bp, Probe Sequence
gctactactttgattacaaggagca

SEQ ID NO: 31195 - DNA, 25 bp, Probe Sequence
tgctactactttgattacaaggagc

SEQ ID NO: 31196 - DNA, 25 bp, Probe Sequence
acatacagaccaatgtctacatcaa

SEQ ID NO: 31197 - DNA, 25 bp, Probe Sequence
actactttgattacaaggagcagct

SEQ ID NO: 31198 - DNA, 25 bp, Probe Sequence
gatcctcttcttcaacacacccaaa

SEQ ID NO: 31199 - DNA, 25 bp, Probe Sequence
atacagaccaatgtctacatcaagc

SEQ ID NO: 31200 - DNA, 25 bp, Probe Sequence
catacagaccaatgtctacatcaag

SEQ ID NO: 31201 - DNA, 25 bp, Probe Sequence
attgcatgttctaattccacgtatt

SEQ ID NO: 31202 - DNA, 25 bp, Probe Sequence
ataataaacacagcttgcccagtta

SEQ ID NO: 31203 - DNA, 25 bp, Probe Sequence
taataaacacagcttgcccagttaa

SEQ ID NO: 31204 - DNA, 25 bp, Probe Sequence
ttgcatgttctaattccacgtattt

SEQ ID NO: 31205 - DNA, 25 bp, Probe Sequence
aataaacacagcttgcccagttaaa

SEQ ID NO: 31206 - DNA, 25 bp, Probe Sequence
tccacgtattttccagtctctttta

SEQ ID NO: 31207 - DNA, 25 bp, Probe Sequence
attccacgtattttccagtctcttt

SEQ ID NO: 31208 - DNA, 25 bp, Probe Sequence
aattccacgtattttccagtctctt

SEQ ID NO: 31209 - DNA, 25 bp, Probe Sequence
taattccacgtattttccagtctct

SEQ ID NO: 31210 - DNA, 25 bp, Probe Sequence
tctaattccacgtattttccagtct

SEQ ID NO: 31211 - DNA, 25 bp, Probe Sequence
ctaattccacgtattttccagtctc

SEQ ID NO: 31212 - DNA, 25 bp, Probe Sequence
tgcatgttctaattccacgtatttt

SEQ ID NO: 31213 - DNA, 25 bp, Probe Sequence
ttccacgtattttccagtctctttt

SEQ ID NO: 31214 - DNA, 25 bp, Probe Sequence
gttctaattccacgtattttccagt

SEQ ID NO: 31215 - DNA, 25 bp, Probe Sequence
tgttctaattccacgtattttccag

SEQ ID NO: 31216 - DNA, 25 bp, Probe Sequence
ccacgtattttccagtctcttttat

SEQ ID NO: 31217 - DNA, 25 bp, Probe Sequence
ttctaattccacgtattttccagtc

SEQ ID NO: 31218 - DNA, 25 bp, Probe Sequence
gcatgttctaattccacgtattttc

SEQ ID NO: 31219 - DNA, 25 bp, Probe Sequence
atgttctaattccacgtattttcca

SEQ ID NO: 31220 - DNA, 25 bp, Probe Sequence
ataaacacagcttgcccagttaaaa

SEQ ID NO: 31221 - DNA, 25 bp, Probe Sequence
catgttctaattccacgtattttcc

SEQ ID NO: 31222 - DNA, 25 bp, Probe Sequence
cacgtattttccagtctcttttata

SEQ ID NO: 31223 - DNA, 25 bp, Probe Sequence
acgtattttccagtctcttttataa

SEQ ID NO: 31224 - DNA, 25 bp, Probe Sequence
tttccagtctcttttataaagtctc

SEQ ID NO: 31225 - DNA, 25 bp, Probe Sequence
taatactcaagagaatggtggaagg

SEQ ID NO: 31226 - DNA, 25 bp, Probe Sequence
ctggaagagttgaaggagagtattc

SEQ ID NO: 31227 - DNA, 25 bp, Probe Sequence
tactcaagagaatggtggaaggtta

SEQ ID NO: 31228 - DNA, 25 bp, Probe Sequence
tgagattgttctactgttgtcgtat

SEQ ID NO: 31229 - DNA, 25 bp, Probe Sequence
ttgagattgttctactgttgtcgta

SEQ ID NO: 31230 - DNA, 25 bp, Probe Sequence
ctgttgagattgttctactgttgtc

SEQ ID NO: 31231 - DNA, 25 bp, Probe Sequence
actgttgagattgttctactgttgt

SEQ ID NO: 31232 - DNA, 25 bp, Probe Sequence
gaagagttgaaggagagtattctgg

SEQ ID NO: 31233 - DNA, 25 bp, Probe Sequence
ggaagagttgaaggagagtattctg

SEQ ID NO: 31234 - DNA, 25 bp, Probe Sequence
aactgttgagattgttctactgttg

SEQ ID NO: 31235 - DNA, 25 bp, Probe Sequence
tggaagagttgaaggagagtattct

SEQ ID NO: 31236 - DNA, 25 bp, Probe Sequence
atactcaagagaatggtggaaggtt

SEQ ID NO: 31237 - DNA, 25 bp, Probe Sequence
aatactcaagagaatggtggaaggt

SEQ ID NO: 31238 - DNA, 25 bp, Probe Sequence
taactaattctgtggctgttgtgag

SEQ ID NO: 31239 - DNA, 25 bp, Probe Sequence
gagtaactaattctgtggctgttgt

SEQ ID NO: 31240 - DNA, 25 bp, Probe Sequence
actcaagagaatggtggaaggttaa

SEQ ID NO: 31241 - DNA, 25 bp, Probe Sequence
gttgagattgttctactgttgtcgt

SEQ ID NO: 31242 - DNA, 25 bp, Probe Sequence
tgttgagattgttctactgttgtcg

SEQ ID NO: 31243 - DNA, 25 bp, Probe Sequence
gtaactaattctgtggctgttgtga

SEQ ID NO: 31244 - DNA, 25 bp, Probe Sequence
agtaactaattctgtggctgttgtg

SEQ ID NO: 31245 - DNA, 25 bp, Probe Sequence
ttaatactcaagagaatggtggaag

SEQ ID NO: 31246 - DNA, 25 bp, Probe Sequence
gatgctaaggaccattatgaggcta

SEQ ID NO: 31247 - DNA, 25 bp, Probe Sequence
gctggaagagttgaaggagagtatt

SEQ ID NO: 31248 - DNA, 25 bp, Probe Sequence
ggagtaactaattctgtggctgttg

SEQ ID NO: 31249 - DNA, 25 bp, Probe Sequence
attagtgtattaaccagcaggagag

SEQ ID NO: 31250 - DNA, 25 bp, Probe Sequence
cattagtgtattaaccagcaggaga

SEQ ID NO: 31251 - DNA, 25 bp, Probe Sequence
tcattagtgtattaaccagcaggag

SEQ ID NO: 31252 - DNA, 25 bp, Probe Sequence
cacactaataacatcaacatctgct

SEQ ID NO: 31253 - DNA, 25 bp, Probe Sequence
tcacactaataacatcaacatctgc

SEQ ID NO: 31254 - DNA, 25 bp, Probe Sequence
gtcattagtgtattaaccagcagga

SEQ ID NO: 31255 - DNA, 25 bp, Probe Sequence
tgtcattagtgtattaaccagcagg

SEQ ID NO: 31256 - DNA, 25 bp, Probe Sequence
tggtcacactaataacatcaacatc

SEQ ID NO: 31257 - DNA, 25 bp, Probe Sequence
ttgtcattagtgtattaaccagcag

SEQ ID NO: 31258 - DNA, 25 bp, Probe Sequence
ggtcacactaataacatcaacatct

SEQ ID NO: 31259 - DNA, 25 bp, Probe Sequence
acatcaacatctgctatcacttatc

SEQ ID NO: 31260 - DNA, 25 bp, Probe Sequence
gcattggtcacactaataacatcaa

SEQ ID NO: 31261 - DNA, 25 bp, Probe Sequence
catcaacatctgctatcacttatct

SEQ ID NO: 31262 - DNA, 25 bp, Probe Sequence
ttagtgtattaaccagcaggagagg

SEQ ID NO: 31263 - DNA, 25 bp, Probe Sequence
attgtcattagtgtattaaccagca

SEQ ID NO: 31264 - DNA, 25 bp, Probe Sequence
aacatcaacatctgctatcacttat

SEQ ID NO: 31265 - DNA, 25 bp, Probe Sequence
ataacatcaacatctgctatcactt

SEQ ID NO: 31266 - DNA, 25 bp, Probe Sequence
aataacatcaacatctgctatcact

SEQ ID NO: 31267 - DNA, 25 bp, Probe Sequence
cattgtcattagtgtattaaccagc

SEQ ID NO: 31268 - DNA, 25 bp, Probe Sequence
ctgagatgaattggtgtgaacgaat

SEQ ID NO: 31269 - DNA, 25 bp, Probe Sequence
ttggtcacactaataacatcaacat

SEQ ID NO: 31270 - DNA, 25 bp, Probe Sequence
attggtcacactaataacatcaaca

SEQ ID NO: 31271 - DNA, 25 bp, Probe Sequence
acactaataacatcaacatctgcta

SEQ ID NO: 31272 - DNA, 25 bp, Probe Sequence
gtcacactaataacatcaacatctg

SEQ ID NO: 31273 - DNA, 25 bp, Probe Sequence
atgactgatcctaatgtggctctta

SEQ ID NO: 31274 - DNA, 25 bp, Probe Sequence
actgatcctaatgtggctcttactt

SEQ ID NO: 31275 - DNA, 25 bp, Probe Sequence
gactgatcctaatgtggctcttact

SEQ ID NO: 31276 - DNA, 25 bp, Probe Sequence
tgactgatcctaatgtggctcttac

SEQ ID NO: 31277 - DNA, 25 bp, Probe Sequence
tgtagttagacagatgactgatcct

SEQ ID NO: 31278 - DNA, 25 bp, Probe Sequence
tagacagatgactgatcctaatgtg

SEQ ID NO: 31279 - DNA, 25 bp, Probe Sequence
atgtagttagacagatgactgatcc

SEQ ID NO: 31280 - DNA, 25 bp, Probe Sequence
gaagtacagactgttcttgctctaa

SEQ ID NO: 31281 - DNA, 25 bp, Probe Sequence
gatgactgatcctaatgtggctctt

SEQ ID NO: 31282 - DNA, 25 bp, Probe Sequence
ttagacagatgactgatcctaatgt

SEQ ID NO: 31283 - DNA, 25 bp, Probe Sequence
gttagacagatgactgatcctaatg

SEQ ID NO: 31284 - DNA, 25 bp, Probe Sequence
gtagttagacagatgactgatccta

SEQ ID NO: 31285 - DNA, 25 bp, Probe Sequence
atactatcaaacaatcggaaaccac

SEQ ID NO: 31286 - DNA, 25 bp, Probe Sequence
agttagacagatgactgatcctaat

SEQ ID NO: 31287 - DNA, 25 bp, Probe Sequence
tgcggtttgagaatgttcctataat

SEQ ID NO: 31288 - DNA, 25 bp, Probe Sequence
tgaagtacagactgttcttgctcta

SEQ ID NO: 31289 - DNA, 25 bp, Probe Sequence
ttgcggtttgagaatgttcctataa

SEQ ID NO: 31290 - DNA, 25 bp, Probe Sequence
agacagatgactgatcctaatgtgg

SEQ ID NO: 31291 - DNA, 25 bp, Probe Sequence
tgttgacatcaaggatctaccagtg

SEQ ID NO: 31292 - DNA, 25 bp, Probe Sequence
gtgttgacatcaaggatctaccagt

SEQ ID NO: 31293 - DNA, 25 bp, Probe Sequence
catgtagttagacagatgactgatc

SEQ ID NO: 31294 - DNA, 25 bp, Probe Sequence
gcggtttgagaatgttcctataata

SEQ ID NO: 31295 - DNA, 25 bp, Probe Sequence
aatactatcaaacaatcggaaacca

SEQ ID NO: 31296 - DNA, 25 bp, Probe Sequence
tactatcaaacaatcggaaaccacg

SEQ ID NO: 31297 - DNA, 25 bp, Probe Sequence
gcaagatgatacaatggtatgagtg

SEQ ID NO: 31298 - DNA, 25 bp, Probe Sequence
agcaagatgatacaatggtatgagt

SEQ ID NO: 31299 - DNA, 25 bp, Probe Sequence
caagatgatacaatggtatgagtgt

SEQ ID NO: 31300 - DNA, 25 bp, Probe Sequence
aataaatcttctgtatcctcgctcc

SEQ ID NO: 31301 - DNA, 25 bp, Probe Sequence
tagcaagatgatacaatggtatgag

SEQ ID NO: 31302 - DNA, 25 bp, Probe Sequence
attccttgtaattaagtcacaggca

SEQ ID NO: 31303 - DNA, 25 bp, Probe Sequence
tgtggtattaccttgtatgctgtta

SEQ ID NO: 31304 - DNA, 25 bp, Probe Sequence
ttgtggtattaccttgtatgctgtt

SEQ ID NO: 31305 - DNA, 25 bp, Probe Sequence
aacttccttgtggtattaccttgta

SEQ ID NO: 31306 - DNA, 25 bp, Probe Sequence
tggtattaccttgtatgctgttact

SEQ ID NO: 31307 - DNA, 25 bp, Probe Sequence
gtggtattaccttgtatgctgttac

SEQ ID NO: 31308 - DNA, 25 bp, Probe Sequence
acttccttgtggtattaccttgtat

SEQ ID NO: 31309 - DNA, 25 bp, Probe Sequence
ttccttgtaattaagtcacaggcag

SEQ ID NO: 31310 - DNA, 25 bp, Probe Sequence
cttgtggtattaccttgtatgctgt

SEQ ID NO: 31311 - DNA, 25 bp, Probe Sequence
ttccttgtggtattaccttgtatgc

SEQ ID NO: 31312 - DNA, 25 bp, Probe Sequence
cttccttgtggtattaccttgtatg

SEQ ID NO: 31313 - DNA, 25 bp, Probe Sequence
gaataaatcttctgtatcctcgctc

SEQ ID NO: 31314 - DNA, 25 bp, Probe Sequence
tattccttgtaattaagtcacaggc

SEQ ID NO: 31315 - DNA, 25 bp, Probe Sequence
cttgtaattaagtcacaggcaggac

SEQ ID NO: 31316 - DNA, 25 bp, Probe Sequence
gtgtaatctaaacttccttgtggta

SEQ ID NO: 31317 - DNA, 25 bp, Probe Sequence
agtgtaatctaaacttccttgtggt

SEQ ID NO: 31318 - DNA, 25 bp, Probe Sequence
ggtattaccttgtatgctgttactt

SEQ ID NO: 31319 - DNA, 25 bp, Probe Sequence
ccttgtggtattaccttgtatgctg

SEQ ID NO: 31320 - DNA, 25 bp, Probe Sequence
tccttgtggtattaccttgtatgct

SEQ ID NO: 31321 - DNA, 25 bp, Probe Sequence
aatgaggtagacgaagaagaggaag

SEQ ID NO: 31322 - DNA, 25 bp, Probe Sequence
caatgaggtagacgaagaagaggaa

SEQ ID NO: 31323 - DNA, 25 bp, Probe Sequence
tgacaatgaggtagacgaagaagag

SEQ ID NO: 31324 - DNA, 25 bp, Probe Sequence
ctgacaatgaggtagacgaagaaga

SEQ ID NO: 31325 - DNA, 25 bp, Probe Sequence
gaggatggagatgaagatgaggaag

SEQ ID NO: 31326 - DNA, 25 bp, Probe Sequence
gaagaggatggagatgaagatgagg

SEQ ID NO: 31327 - DNA, 25 bp, Probe Sequence
ggaagaggatggagatgaagatgag

SEQ ID NO: 31328 - DNA, 25 bp, Probe Sequence
gaggaagaggatggagatgaagatg

SEQ ID NO: 31329 - DNA, 25 bp, Probe Sequence
gaggtagacgaagaagaggaagaag

SEQ ID NO: 31330 - DNA, 25 bp, Probe Sequence
ctgaagatgatgaggatgacgatgt

SEQ ID NO: 31331 - DNA, 25 bp, Probe Sequence
agaggatggagatgaagatgaggaa

SEQ ID NO: 31332 - DNA, 25 bp, Probe Sequence
aagaggatggagatgaagatgagga

SEQ ID NO: 31333 - DNA, 25 bp, Probe Sequence
aggaagaggatggagatgaagatga

SEQ ID NO: 31334 - DNA, 25 bp, Probe Sequence
tgaggaagaggatggagatgaagat

SEQ ID NO: 31335 - DNA, 25 bp, Probe Sequence
atgaggtagacgaagaagaggaaga

SEQ ID NO: 31336 - DNA, 25 bp, Probe Sequence
gtagacgaagaagaggaagaaggtg

SEQ ID NO: 31337 - DNA, 25 bp, Probe Sequence
aaggagaagaaggaagttgtggaag

SEQ ID NO: 31338 - DNA, 25 bp, Probe Sequence
tgaggtagacgaagaagaggaagaa

SEQ ID NO: 31339 - DNA, 25 bp, Probe Sequence
gacaatgaggtagacgaagaagagg

SEQ ID NO: 31340 - DNA, 25 bp, Probe Sequence
acaatgaggtagacgaagaagagga

SEQ ID NO: 31341 - DNA, 25 bp, Probe Sequence
gagaagaaggaagttgtggaagagg

SEQ ID NO: 31342 - DNA, 25 bp, Probe Sequence
ggagaagaaggaagttgtggaagag

SEQ ID NO: 31343 - DNA, 25 bp, Probe Sequence
gaagaagaaggtgatggtgaggaag

SEQ ID NO: 31344 - DNA, 25 bp, Probe Sequence
ttaaaggagaagaaggaagttgtgg

SEQ ID NO: 31345 - DNA, 25 bp, Probe Sequence
ttgggaggtgtgtggaataaattat

SEQ ID NO: 31346 - DNA, 25 bp, Probe Sequence
cttgggaggtgtgtggaataaatta

SEQ ID NO: 31347 - DNA, 25 bp, Probe Sequence
ctagaagtgtgggaaattcaggaaa

SEQ ID NO: 31348 - DNA, 25 bp, Probe Sequence
ttatttgaagtcctgcctcattctc

SEQ ID NO: 31349 - DNA, 25 bp, Probe Sequence
cttatttgaagtcctgcctcattct

SEQ ID NO: 31350 - DNA, 25 bp, Probe Sequence
tgggaggtgtgtggaataaattatt

SEQ ID NO: 31351 - DNA, 25 bp, Probe Sequence
gggaggtgtgtggaataaattattt

SEQ ID NO: 31352 - DNA, 25 bp, Probe Sequence
tatttgaagtcctgcctcattctca

SEQ ID NO: 31353 - DNA, 25 bp, Probe Sequence
gcttatttgaagtcctgcctcattc

SEQ ID NO: 31354 - DNA, 25 bp, Probe Sequence
cctagaagtgtgggaaattcaggaa

SEQ ID NO: 31355 - DNA, 25 bp, Probe Sequence
atttgaagtcctgcctcattctcac

SEQ ID NO: 31356 - DNA, 25 bp, Probe Sequence
tagaagtgtgggaaattcaggaaaa

SEQ ID NO: 31357 - DNA, 25 bp, Probe Sequence
cttctcttacctggacatcagcctc

SEQ ID NO: 31358 - DNA, 25 bp, Probe Sequence
agcttatttgaagtcctgcctcatt

SEQ ID NO: 31359 - DNA, 25 bp, Probe Sequence
ccttgggaggtgtgtggaataaatt

SEQ ID NO: 31360 - DNA, 25 bp, Probe Sequence
ttgaagtcctgcctcattctcactg

SEQ ID NO: 31361 - DNA, 25 bp, Probe Sequence
gagtgtcttctctctccaggtttca

SEQ ID NO: 31362 - DNA, 25 bp, Probe Sequence
agaagtgtgggaaattcaggaaaac

SEQ ID NO: 31363 - DNA, 25 bp, Probe Sequence
ttctcttacctggacatcagcctct

SEQ ID NO: 31364 - DNA, 25 bp, Probe Sequence
tacacctacttccaggccaagataa

SEQ ID NO: 31365 - DNA, 25 bp, Probe Sequence
tttgaagtcctgcctcattctcact

SEQ ID NO: 31366 - DNA, 25 bp, Probe Sequence
agtgtcttctctctccaggtttcac

SEQ ID NO: 31367 - DNA, 25 bp, Probe Sequence
cagtgccttacacatgcttgattcc

SEQ ID NO: 31368 - DNA, 25 bp, Probe Sequence
cagcttatttgaagtcctgcctcat

SEQ ID NO: 31369 - DNA, 25 bp, Probe Sequence
tgctttggttaatacatctttccct

SEQ ID NO: 31370 - DNA, 25 bp, Probe Sequence
gtgctttggttaatacatctttccc

SEQ ID NO: 31371 - DNA, 25 bp, Probe Sequence
ccacactagggactatcaggtaata

SEQ ID NO: 31372 - DNA, 25 bp, Probe Sequence
gctttggttaatacatctttcccta

SEQ ID NO: 31373 - DNA, 25 bp, Probe Sequence
cacactagggactatcaggtaataa

SEQ ID NO: 31374 - DNA, 25 bp, Probe Sequence
gggaattaaatagtgtgatgtttgg

SEQ ID NO: 31375 - DNA, 25 bp, Probe Sequence
tgtgctttggttaatacatctttcc

SEQ ID NO: 31376 - DNA, 25 bp, Probe Sequence
tggattgtgctttggttaatacatc

SEQ ID NO: 31377 - DNA, 25 bp, Probe Sequence
ctggattgtgctttggttaatacat

SEQ ID NO: 31378 - DNA, 25 bp, Probe Sequence
ggattgtgctttggttaatacatct

SEQ ID NO: 31379 - DNA, 25 bp, Probe Sequence
aatgtgttagcactgatagtccttt

SEQ ID NO: 31380 - DNA, 25 bp, Probe Sequence
aaatgtgttagcactgatagtcctt

SEQ ID NO: 31381 - DNA, 25 bp, Probe Sequence
acactagggactatcaggtaataaa

SEQ ID NO: 31382 - DNA, 25 bp, Probe Sequence
taaatgtgttagcactgatagtcct

SEQ ID NO: 31383 - DNA, 25 bp, Probe Sequence
gtaaatgtgttagcactgatagtcc

SEQ ID NO: 31384 - DNA, 25 bp, Probe Sequence
tgtaaatgtgttagcactgatagtc

SEQ ID NO: 31385 - DNA, 25 bp, Probe Sequence
agtaataggaccagagcggtatctc

SEQ ID NO: 31386 - DNA, 25 bp, Probe Sequence
gagtaataggaccagagcggtatct

SEQ ID NO: 31387 - DNA, 25 bp, Probe Sequence
ttgtgctttggttaatacatctttc

SEQ ID NO: 31388 - DNA, 25 bp, Probe Sequence
ggaattaaatagtgtgatgtttgga

SEQ ID NO: 31389 - DNA, 25 bp, Probe Sequence
gattgtgctttggttaatacatctt

SEQ ID NO: 31390 - DNA, 25 bp, Probe Sequence
ggctggattgtgctttggttaatac

SEQ ID NO: 31391 - DNA, 25 bp, Probe Sequence
gctggattgtgctttggttaataca

SEQ ID NO: 31392 - DNA, 25 bp, Probe Sequence
atgtaaatgtgttagcactgatagt

SEQ ID NO: 31393 - DNA, 25 bp, Probe Sequence
tgctttggttaatacatctttccct

SEQ ID NO: 31394 - DNA, 25 bp, Probe Sequence
gtgctttggttaatacatctttccc

SEQ ID NO: 31395 - DNA, 25 bp, Probe Sequence
ccacactagggactatcaggtaata

SEQ ID NO: 31396 - DNA, 25 bp, Probe Sequence
gctttggttaatacatctttcccta

SEQ ID NO: 31397 - DNA, 25 bp, Probe Sequence
cacactagggactatcaggtaataa

SEQ ID NO: 31398 - DNA, 25 bp, Probe Sequence
gggaattaaatagtgtgatgtttgg

SEQ ID NO: 31399 - DNA, 25 bp, Probe Sequence
tgtgctttggttaatacatctttcc

SEQ ID NO: 31400 - DNA, 25 bp, Probe Sequence
tggattgtgctttggttaatacatc

SEQ ID NO: 31401 - DNA, 25 bp, Probe Sequence
ctggattgtgctttggttaatacat

SEQ ID NO: 31402 - DNA, 25 bp, Probe Sequence
ggattgtgctttggttaatacatct

SEQ ID NO: 31403 - DNA, 25 bp, Probe Sequence
aatgtgttagcactgatagtccttt

SEQ ID NO: 31404 - DNA, 25 bp, Probe Sequence
aaatgtgttagcactgatagtcctt

SEQ ID NO: 31405 - DNA, 25 bp, Probe Sequence
acactagggactatcaggtaataaa

SEQ ID NO: 31406 - DNA, 25 bp, Probe Sequence
taaatgtgttagcactgatagtcct

SEQ ID NO: 31407 - DNA, 25 bp, Probe Sequence
gtaaatgtgttagcactgatagtcc

SEQ ID NO: 31408 - DNA, 25 bp, Probe Sequence
tgtaaatgtgttagcactgatagtc

SEQ ID NO: 31409 - DNA, 25 bp, Probe Sequence
agtaataggaccagagcggtatctc

SEQ ID NO: 31410 - DNA, 25 bp, Probe Sequence
gagtaataggaccagagcggtatct

SEQ ID NO: 31411 - DNA, 25 bp, Probe Sequence
ttgtgctttggttaatacatctttc

SEQ ID NO: 31412 - DNA, 25 bp, Probe Sequence
ggaattaaatagtgtgatgtttgga

SEQ ID NO: 31413 - DNA, 25 bp, Probe Sequence
gattgtgctttggttaatacatctt

SEQ ID NO: 31414 - DNA, 25 bp, Probe Sequence
ggctggattgtgctttggttaatac

SEQ ID NO: 31415 - DNA, 25 bp, Probe Sequence
gctggattgtgctttggttaataca

SEQ ID NO: 31416 - DNA, 25 bp, Probe Sequence
atgtaaatgtgttagcactgatagt

SEQ ID NO: 31417 - DNA, 25 bp, Probe Sequence
ttgccaagtccaattatcttctagg

SEQ ID NO: 31418 - DNA, 25 bp, Probe Sequence
gccaagtccaattatcttctaggat

SEQ ID NO: 31419 - DNA, 25 bp, Probe Sequence
tgccaagtccaattatcttctagga

SEQ ID NO: 31420 - DNA, 25 bp, Probe Sequence
ttggtactagagccagtatccttaa

SEQ ID NO: 31421 - DNA, 25 bp, Probe Sequence
gtactagagccagtatccttaacaa

SEQ ID NO: 31422 - DNA, 25 bp, Probe Sequence
ggtactagagccagtatccttaaca

SEQ ID NO: 31423 - DNA, 25 bp, Probe Sequence
tggtactagagccagtatccttaac

SEQ ID NO: 31424 - DNA, 25 bp, Probe Sequence
gttggtactagagccagtatcctta

SEQ ID NO: 31425 - DNA, 25 bp, Probe Sequence
ttagttggtactagagccagtatcc

SEQ ID NO: 31426 - DNA, 25 bp, Probe Sequence
cgttaaacttgtcttatctcaggag

SEQ ID NO: 31427 - DNA, 25 bp, Probe Sequence
gacttgagggactgcttactactaa

SEQ ID NO: 31428 - DNA, 25 bp, Probe Sequence
ccaagtccaattatcttctaggatt

SEQ ID NO: 31429 - DNA, 25 bp, Probe Sequence
tagttggtactagagccagtatcct

SEQ ID NO: 31430 - DNA, 25 bp, Probe Sequence
ctttgccaagtccaattatcttcta

SEQ ID NO: 31431 - DNA, 25 bp, Probe Sequence
tttgccaagtccaattatcttctag

SEQ ID NO: 31432 - DNA, 25 bp, Probe Sequence
aatagttgctaccgatagggacttt

SEQ ID NO: 31433 - DNA, 25 bp, Probe Sequence
aaatagttgctaccgatagggactt

SEQ ID NO: 31434 - DNA, 25 bp, Probe Sequence
agatttctcagagcatggaagttta

SEQ ID NO: 31435 - DNA, 25 bp, Probe Sequence
attatcttctaggattgaaaggtgc

SEQ ID NO: 31436 - DNA, 25 bp, Probe Sequence
gatttctcagagcatggaagtttaa

SEQ ID NO: 31437 - DNA, 25 bp, Probe Sequence
cctattcctcagagaaacaccaact

SEQ ID NO: 31438 - DNA, 25 bp, Probe Sequence
agttggtactagagccagtatcctt

SEQ ID NO: 31439 - DNA, 25 bp, Probe Sequence
ctattcctcagagaaacaccaactg

SEQ ID NO: 31440 - DNA, 25 bp, Probe Sequence
cttgagggactgcttactactaagt

SEQ ID NO: 31441 - DNA, 25 bp, Probe Sequence
catttcctgtttgttacacacaagg

SEQ ID NO: 31442 - DNA, 25 bp, Probe Sequence
gcatttcctgtttgttacacacaag

SEQ ID NO: 31443 - DNA, 25 bp, Probe Sequence
ctgaggtgcatttcctgtttgttac

SEQ ID NO: 31444 - DNA, 25 bp, Probe Sequence
gtgcatttcctgtttgttacacaca

SEQ ID NO: 31445 - DNA, 25 bp, Probe Sequence
atttcctgtttgttacacacaaggg

SEQ ID NO: 31446 - DNA, 25 bp, Probe Sequence
gaggtgcatttcctgtttgttacac

SEQ ID NO: 31447 - DNA, 25 bp, Probe Sequence
tgaggtgcatttcctgtttgttaca

SEQ ID NO: 31448 - DNA, 25 bp, Probe Sequence
ggtgcatttcctgtttgttacacac

SEQ ID NO: 31449 - DNA, 25 bp, Probe Sequence
aggtgcatttcctgtttgttacaca

SEQ ID NO: 31450 - DNA, 25 bp, Probe Sequence
cctgaggtgcatttcctgtttgtta

SEQ ID NO: 31451 - DNA, 25 bp, Probe Sequence
tgcatttcctgtttgttacacacaa

SEQ ID NO: 31452 - DNA, 25 bp, Probe Sequence
tttcctgtttgttacacacaagggc

SEQ ID NO: 31453 - DNA, 25 bp, Probe Sequence
tcctgaggtgcatttcctgtttgtt

SEQ ID NO: 31454 - DNA, 25 bp, Probe Sequence
aagtagacaacaacaacctcctatt

SEQ ID NO: 31455 - DNA, 25 bp, Probe Sequence
agacaacaacaacctcctattactg

SEQ ID NO: 31456 - DNA, 25 bp, Probe Sequence
caagtagacaacaacaacctcctat

SEQ ID NO: 31457 - DNA, 25 bp, Probe Sequence
tagacaacaacaacctcctattact

SEQ ID NO: 31458 - DNA, 25 bp, Probe Sequence
agtagacaacaacaacctcctatta

SEQ ID NO: 31459 - DNA, 25 bp, Probe Sequence
gtagacaacaacaacctcctattac

SEQ ID NO: 31460 - DNA, 25 bp, Probe Sequence
tactgaactcacttgataaggaagc

SEQ ID NO: 31461 - DNA, 25 bp, Probe Sequence
atgagtctgtggttgctgagtatat

SEQ ID NO: 31462 - DNA, 25 bp, Probe Sequence
gatgagtctgtggttgctgagtata

SEQ ID NO: 31463 - DNA, 25 bp, Probe Sequence
gacaacaacaacctcctattactgc

SEQ ID NO: 31464 - DNA, 25 bp, Probe Sequence
tgagtctgtggttgctgagtatatc

SEQ ID NO: 31465 - DNA, 25 bp, Probe Sequence
ccaagtagacaacaacaacctccta

SEQ ID NO: 31466 - DNA, 25 bp, Probe Sequence
caactaacattgtgaagtggatcat

SEQ ID NO: 31467 - DNA, 25 bp, Probe Sequence
atactgaactcacttgataaggaag

SEQ ID NO: 31468 - DNA, 25 bp, Probe Sequence
aactaacattgtgaagtggatcatg

SEQ ID NO: 31469 - DNA, 25 bp, Probe Sequence
tggtggattctctgtcctatacatt

SEQ ID NO: 31470 - DNA, 25 bp, Probe Sequence
ttggtggattctctgtcctatacat

SEQ ID NO: 31471 - DNA, 25 bp, Probe Sequence
aatactgaactcacttgataaggaa

SEQ ID NO: 31472 - DNA, 25 bp, Probe Sequence
gcaactaacattgtgaagtggatca

SEQ ID NO: 31473 - DNA, 25 bp, Probe Sequence
ttccaagtagacaacaacaacctcc

SEQ ID NO: 31474 - DNA, 25 bp, Probe Sequence
gagtctgtggttgctgagtatatcg

SEQ ID NO: 31475 - DNA, 25 bp, Probe Sequence
atggtgattgttgatgtaaagatgg

SEQ ID NO: 31476 - DNA, 25 bp, Probe Sequence
atgttactattgcccttctggaaat

SEQ ID NO: 31477 - DNA, 25 bp, Probe Sequence
ctatgttactattgcccttctggaa

SEQ ID NO: 31478 - DNA, 25 bp, Probe Sequence
tgctaagactgcttccaatgtagaa

SEQ ID NO: 31479 - DNA, 25 bp, Probe Sequence
ctgctaagactgcttccaatgtaga

SEQ ID NO: 31480 - DNA, 25 bp, Probe Sequence
tctgctaagactgcttccaatgtag

SEQ ID NO: 31481 - DNA, 25 bp, Probe Sequence
ccttaactacgaactgaattgtatt

SEQ ID NO: 31482 - DNA, 25 bp, Probe Sequence
gcccttaactacgaactgaattgta

SEQ ID NO: 31483 - DNA, 25 bp, Probe Sequence
tgttaaatgttgtcttgtgccctta

SEQ ID NO: 31484 - DNA, 25 bp, Probe Sequence
ttaaatgttgtcttgtgcccttaac

SEQ ID NO: 31485 - DNA, 25 bp, Probe Sequence
gttaaatgttgtcttgtgcccttaa

SEQ ID NO: 31486 - DNA, 25 bp, Probe Sequence
aaatgttgtcttgtgcccttaacta

SEQ ID NO: 31487 - DNA, 25 bp, Probe Sequence
taaatgttgtcttgtgcccttaact

SEQ ID NO: 31488 - DNA, 25 bp, Probe Sequence
ttgaaatggctttatgtcacagaag

SEQ ID NO: 31489 - DNA, 25 bp, Probe Sequence
tttgaaatggctttatgtcacagaa

SEQ ID NO: 31490 - DNA, 25 bp, Probe Sequence
cccttaactacgaactgaattgtat

SEQ ID NO: 31491 - DNA, 25 bp, Probe Sequence
atttgaaatggctttatgtcacaga

SEQ ID NO: 31492 - DNA, 25 bp, Probe Sequence
tgaaatggctttatgtcacagaaga

SEQ ID NO: 31493 - DNA, 25 bp, Probe Sequence
aatgttgtcttgtgcccttaactac

SEQ ID NO: 31494 - DNA, 25 bp, Probe Sequence
ttgttaaatgttgtcttgtgccctt

SEQ ID NO: 31495 - DNA, 25 bp, Probe Sequence
tttgttaaatgttgtcttgtgccct

SEQ ID NO: 31496 - DNA, 25 bp, Probe Sequence
tggctttatgtcacagaagacttta

SEQ ID NO: 31497 - DNA, 25 bp, Probe Sequence
tatgtcacagaagactttaatccgt

SEQ ID NO: 31498 - DNA, 25 bp, Probe Sequence
cacagaagactttaatccgtcaaat

SEQ ID NO: 31499 - DNA, 25 bp, Probe Sequence
tcacagaagactttaatccgtcaaa

SEQ ID NO: 31500 - DNA, 25 bp, Probe Sequence
gaaatggctttatgtcacagaagac

SEQ ID NO: 31501 - DNA, 25 bp, Probe Sequence
atggctttatgtcacagaagacttt

SEQ ID NO: 31502 - DNA, 25 bp, Probe Sequence
gagaggaatgaattgaggaagtgaa

SEQ ID NO: 31503 - DNA, 25 bp, Probe Sequence
ggagaggaatgaattgaggaagtga

SEQ ID NO: 31504 - DNA, 25 bp, Probe Sequence
ggtagatggtaaagagaatgaggag

SEQ ID NO: 31505 - DNA, 25 bp, Probe Sequence
aggtagatggtaaagagaatgagga

SEQ ID NO: 31506 - DNA, 25 bp, Probe Sequence
aggaatgaattgaggaagtgaaaga

SEQ ID NO: 31507 - DNA, 25 bp, Probe Sequence
gaggaatgaattgaggaagtgaaag

SEQ ID NO: 31508 - DNA, 25 bp, Probe Sequence
agaggaatgaattgaggaagtgaaa

SEQ ID NO: 31509 - DNA, 25 bp, Probe Sequence
agatggtaaagagaatgaggagaaa

SEQ ID NO: 31510 - DNA, 25 bp, Probe Sequence
gtagatggtaaagagaatgaggaga

SEQ ID NO: 31511 - DNA, 25 bp, Probe Sequence
ggtcacataggtagatggtaaagag

SEQ ID NO: 31512 - DNA, 25 bp, Probe Sequence
aatgaattgaggaagtgaaagaagg

SEQ ID NO: 31513 - DNA, 25 bp, Probe Sequence
ggaatgaattgaggaagtgaaagaa

SEQ ID NO: 31514 - DNA, 25 bp, Probe Sequence
taggtagatggtaaagagaatgagg

SEQ ID NO: 31515 - DNA, 25 bp, Probe Sequence
gtcacataggtagatggtaaagaga

SEQ ID NO: 31516 - DNA, 25 bp, Probe Sequence
gggtcacataggtagatggtaaaga

SEQ ID NO: 31517 - DNA, 25 bp, Probe Sequence
agggtcacataggtagatggtaaag

SEQ ID NO: 31518 - DNA, 25 bp, Probe Sequence
gagggtcacataggtagatggtaaa

SEQ ID NO: 31519 - DNA, 25 bp, Probe Sequence
tagatggtaaagagaatgaggagaa

SEQ ID NO: 31520 - DNA, 25 bp, Probe Sequence
atgaattgaggaagtgaaagaaggc

SEQ ID NO: 31521 - DNA, 25 bp, Probe Sequence
gaatgaattgaggaagtgaaagaag

SEQ ID NO: 31522 - DNA, 25 bp, Probe Sequence
acttgtcatggtctttcttggtatt

SEQ ID NO: 31523 - DNA, 25 bp, Probe Sequence
tcacataggtagatggtaaagagaa

SEQ ID NO: 31524 - DNA, 25 bp, Probe Sequence
ctgttctgtcacttgtcatggtctt

SEQ ID NO: 31525 - DNA, 25 bp, Probe Sequence
gtgacaagaagaacaccaacaagtg

SEQ ID NO: 31526 - DNA, 25 bp, Probe Sequence
aatctccttcattggcattgttatt

SEQ ID NO: 31527 - DNA, 25 bp, Probe Sequence
gaatctccttcattggcattgttat

SEQ ID NO: 31528 - DNA, 25 bp, Probe Sequence
ggaatctccttcattggcattgtta

SEQ ID NO: 31529 - DNA, 25 bp, Probe Sequence
atctccttcattggcattgttattt

SEQ ID NO: 31530 - DNA, 25 bp, Probe Sequence
gatgtatccctttgtgaaattagca

SEQ ID NO: 31531 - DNA, 25 bp, Probe Sequence
tgatgtatccctttgtgaaattagc

SEQ ID NO: 31532 - DNA, 25 bp, Probe Sequence
tctccttcattggcattgttattta

SEQ ID NO: 31533 - DNA, 25 bp, Probe Sequence
ctccttcattggcattgttatttaa

SEQ ID NO: 31534 - DNA, 25 bp, Probe Sequence
tgtatccctttgtgaaattagcact

SEQ ID NO: 31535 - DNA, 25 bp, Probe Sequence
atgtatccctttgtgaaattagcac

SEQ ID NO: 31536 - DNA, 25 bp, Probe Sequence
gtatccctttgtgaaattagcactt

SEQ ID NO: 31537 - DNA, 25 bp, Probe Sequence
tttatcagcaagtcgtgagtcaaac

SEQ ID NO: 31538 - DNA, 25 bp, Probe Sequence
gtttatcagcaagtcgtgagtcaaa

SEQ ID NO: 31539 - DNA, 25 bp, Probe Sequence
gggtttctgatatttgtaaatgtgt

SEQ ID NO: 31540 - DNA, 25 bp, Probe Sequence
tgggtttctgatatttgtaaatgtg

SEQ ID NO: 31541 - DNA, 25 bp, Probe Sequence
tatccctttgtgaaattagcacttt

SEQ ID NO: 31542 - DNA, 25 bp, Probe Sequence
tggaatctccttcattggcattgtt

SEQ ID NO: 31543 - DNA, 25 bp, Probe Sequence
ctgggtttctgatatttgtaaatgt

SEQ ID NO: 31544 - DNA, 25 bp, Probe Sequence
actgggtttctgatatttgtaaatg

SEQ ID NO: 31545 - DNA, 25 bp, Probe Sequence
tccttcattggcattgttatttaat

SEQ ID NO: 31546 - DNA, 25 bp, Probe Sequence
ccttcattggcattgttatttaatc

SEQ ID NO: 31547 - DNA, 25 bp, Probe Sequence
ttatcagcaagtcgtgagtcaaact

SEQ ID NO: 31548 - DNA, 25 bp, Probe Sequence
ttgatgtatccctttgtgaaattag

SEQ ID NO: 31549 - DNA, 25 bp, Probe Sequence
gcattgttatttaatcataaacggg

SEQ ID NO: 31550 - DNA, 25 bp, Probe Sequence
tgaggagaagcaataaatcgtctta

SEQ ID NO: 31551 - DNA, 25 bp, Probe Sequence
ctgaggagaagcaataaatcgtctt

SEQ ID NO: 31552 - DNA, 25 bp, Probe Sequence
gaggagaagcaataaatcgtcttat

SEQ ID NO: 31553 - DNA, 25 bp, Probe Sequence
aggaaagagatcgaagagagagaaa

SEQ ID NO: 31554 - DNA, 25 bp, Probe Sequence
aaagtttgaagaatgcaggaaagag

SEQ ID NO: 31555 - DNA, 25 bp, Probe Sequence
gtttgaagaatgcaggaaagagatc

SEQ ID NO: 31556 - DNA, 25 bp, Probe Sequence
caggaaagagatcgaagagagagaa

SEQ ID NO: 31557 - DNA, 25 bp, Probe Sequence
agtttgaagaatgcaggaaagagat

SEQ ID NO: 31558 - DNA, 25 bp, Probe Sequence
aagtttgaagaatgcaggaaagaga

SEQ ID NO: 31559 - DNA, 25 bp, Probe Sequence
aacaaagtttgaagaatgcaggaaa

SEQ ID NO: 31560 - DNA, 25 bp, Probe Sequence
caaagtttgaagaatgcaggaaaga

SEQ ID NO: 31561 - DNA, 25 bp, Probe Sequence
acaaagtttgaagaatgcaggaaag

SEQ ID NO: 31562 - DNA, 25 bp, Probe Sequence
tttgaagaatgcaggaaagagatcg

SEQ ID NO: 31563 - DNA, 25 bp, Probe Sequence
gaagaatgcaggaaagagatcgaag

SEQ ID NO: 31564 - DNA, 25 bp, Probe Sequence
tcttttcctctctttcctttccttt

SEQ ID NO: 31565 - DNA, 25 bp, Probe Sequence
ttcttttcctctctttcctttcctt

SEQ ID NO: 31566 - DNA, 25 bp, Probe Sequence
tttcttttcctctctttcctttcct

SEQ ID NO: 31567 - DNA, 25 bp, Probe Sequence
gaagagagagaaaagaaagcaggat

SEQ ID NO: 31568 - DNA, 25 bp, Probe Sequence
cttttcctctctttcctttcctttt

SEQ ID NO: 31569 - DNA, 25 bp, Probe Sequence
ttttcttttcctctctttcctttcc

SEQ ID NO: 31570 - DNA, 25 bp, Probe Sequence
aagaatgcaggaaagagatcgaaga

SEQ ID NO: 31571 - DNA, 25 bp, Probe Sequence
tgaagaatgcaggaaagagatcgaa

SEQ ID NO: 31572 - DNA, 25 bp, Probe Sequence
ttgaagaatgcaggaaagagatcga

SEQ ID NO: 31573 - DNA, 25 bp, Probe Sequence
aggagaagcaataaatcgtcttatt

SEQ ID NO: 31574 - DNA, 25 bp, Probe Sequence
attgctctgtgtatatctcttggaa

SEQ ID NO: 31575 - DNA, 25 bp, Probe Sequence
aattgctctgtgtatatctcttgga

SEQ ID NO: 31576 - DNA, 25 bp, Probe Sequence
ccaactctaatattgcttcttgtgt

SEQ ID NO: 31577 - DNA, 25 bp, Probe Sequence
accaactctaatattgcttcttgtg

SEQ ID NO: 31578 - DNA, 25 bp, Probe Sequence
aaccaactctaatattgcttcttgt

SEQ ID NO: 31579 - DNA, 25 bp, Probe Sequence
tgggataactgatttctatggcttt

SEQ ID NO: 31580 - DNA, 25 bp, Probe Sequence
ctgggataactgatttctatggctt

SEQ ID NO: 31581 - DNA, 25 bp, Probe Sequence
ttgctctgtgtatatctcttggaaa

SEQ ID NO: 31582 - DNA, 25 bp, Probe Sequence
gggataactgatttctatggctttc

SEQ ID NO: 31583 - DNA, 25 bp, Probe Sequence
aactgggataactgatttctatggc

SEQ ID NO: 31584 - DNA, 25 bp, Probe Sequence
actgggataactgatttctatggct

SEQ ID NO: 31585 - DNA, 25 bp, Probe Sequence
aaattgctctgtgtatatctcttgg

SEQ ID NO: 31586 - DNA, 25 bp, Probe Sequence
aaactgggataactgatttctatgg

SEQ ID NO: 31587 - DNA, 25 bp, Probe Sequence
caactctaatattgcttcttgtgtt

SEQ ID NO: 31588 - DNA, 25 bp, Probe Sequence
ggataactgatttctatggctttca

SEQ ID NO: 31589 - DNA, 25 bp, Probe Sequence
catgatcctacctatcaagcactaa

SEQ ID NO: 31590 - DNA, 25 bp, Probe Sequence
gaaactcattgcagcagataacttt

SEQ ID NO: 31591 - DNA, 25 bp, Probe Sequence
tcttatattggtttgcacaagttcc

SEQ ID NO: 31592 - DNA, 25 bp, Probe Sequence
gataactgatttctatggctttcaa

SEQ ID NO: 31593 - DNA, 25 bp, Probe Sequence
taactgatttctatggctttcaaag

SEQ ID NO: 31594 - DNA, 25 bp, Probe Sequence
cttatattggtttgcacaagttccc

SEQ ID NO: 31595 - DNA, 25 bp, Probe Sequence
aatgatactgattatgaaatgtccc

SEQ ID NO: 31596 - DNA, 25 bp, Probe Sequence
ttatattggtttgcacaagttccct

SEQ ID NO: 31597 - DNA, 25 bp, Probe Sequence
tgaaactcattgcagcagataactt

SEQ ID NO: 31598 - DNA, 25 bp, Probe Sequence
gttgcgtactgtatcatattgtagc

SEQ ID NO: 31599 - DNA, 25 bp, Probe Sequence
cagaatcctcacatcattgctacaa

SEQ ID NO: 31600 - DNA, 25 bp, Probe Sequence
agattaagaggtcaccagaaggaag

SEQ ID NO: 31601 - DNA, 25 bp, Probe Sequence
tacaatgatgaagagtcagatgtca

SEQ ID NO: 31602 - DNA, 25 bp, Probe Sequence
tgttgcgtactgtatcatattgtag

SEQ ID NO: 31603 - DNA, 25 bp, Probe Sequence
ctgttgcgtactgtatcatattgta

SEQ ID NO: 31604 - DNA, 25 bp, Probe Sequence
acaatgatgaagagtcagatgtcac

SEQ ID NO: 31605 - DNA, 25 bp, Probe Sequence
cagattaagaggtcaccagaaggaa

SEQ ID NO: 31606 - DNA, 25 bp, Probe Sequence
atctcagattaagaggtcaccagaa

SEQ ID NO: 31607 - DNA, 25 bp, Probe Sequence
gctgttgcgtactgtatcatattgt

SEQ ID NO: 31608 - DNA, 25 bp, Probe Sequence
gaagtcaactgcctctcattcaatc

SEQ ID NO: 31609 - DNA, 25 bp, Probe Sequence
tctcagattaagaggtcaccagaag

SEQ ID NO: 31610 - DNA, 25 bp, Probe Sequence
ttacaatgatgaagagtcagatgtc

SEQ ID NO: 31611 - DNA, 25 bp, Probe Sequence
aatgatgaagagtcagatgtcacga

SEQ ID NO: 31612 - DNA, 25 bp, Probe Sequence
caatgatgaagagtcagatgtcacg

SEQ ID NO: 31613 - DNA, 25 bp, Probe Sequence
ttgcgtactgtatcatattgtagct

SEQ ID NO: 31614 - DNA, 25 bp, Probe Sequence
gatctcagattaagaggtcaccaga

SEQ ID NO: 31615 - DNA, 25 bp, Probe Sequence
ttattcatggaggacacactgctaa

SEQ ID NO: 31616 - DNA, 25 bp, Probe Sequence
tgatctcagattaagaggtcaccag

SEQ ID NO: 31617 - DNA, 25 bp, Probe Sequence
gattaagaggtcaccagaaggaagg

SEQ ID NO: 31618 - DNA, 25 bp, Probe Sequence
gagctgttgcgtactgtatcatatt

SEQ ID NO: 31619 - DNA, 25 bp, Probe Sequence
aactattctggcttcaagtggtact

SEQ ID NO: 31620 - DNA, 25 bp, Probe Sequence
tcagattaagaggtcaccagaagga

SEQ ID NO: 31621 - DNA, 25 bp, Probe Sequence
caagtggagaatgtaatcctgatct

SEQ ID NO: 31622 - DNA, 25 bp, Probe Sequence
caatataatgagcaatacggagcag

SEQ ID NO: 31623 - DNA, 25 bp, Probe Sequence
gaccgagcaatataatgagcaatac

SEQ ID NO: 31624 - DNA, 25 bp, Probe Sequence
ttcttctgtccttcaatacttctgt

SEQ ID NO: 31625 - DNA, 25 bp, Probe Sequence
tgttcttctgtccttcaatacttct

SEQ ID NO: 31626 - DNA, 25 bp, Probe Sequence
cctgttcttctgtccttcaatactt

SEQ ID NO: 31627 - DNA, 25 bp, Probe Sequence
ttcctgttcttctgtccttcaatac

SEQ ID NO: 31628 - DNA, 25 bp, Probe Sequence
aatataatgagcaatacggagcagt

SEQ ID NO: 31629 - DNA, 25 bp, Probe Sequence
gagcaatataatgagcaatacggag

SEQ ID NO: 31630 - DNA, 25 bp, Probe Sequence
tgaccgagcaatataatgagcaata

SEQ ID NO: 31631 - DNA, 25 bp, Probe Sequence
ttctgtccttcaatacttctgtagc

SEQ ID NO: 31632 - DNA, 25 bp, Probe Sequence
gttcttctgtccttcaatacttctg

SEQ ID NO: 31633 - DNA, 25 bp, Probe Sequence
ctgttcttctgtccttcaatacttc

SEQ ID NO: 31634 - DNA, 25 bp, Probe Sequence
atataatgagcaatacggagcagtg

SEQ ID NO: 31635 - DNA, 25 bp, Probe Sequence
tcctgttcttctgtccttcaatact

SEQ ID NO: 31636 - DNA, 25 bp, Probe Sequence
tcttctgtccttcaatacttctgta

SEQ ID NO: 31637 - DNA, 25 bp, Probe Sequence
cgagcaatataatgagcaatacgga

SEQ ID NO: 31638 - DNA, 25 bp, Probe Sequence
cttctgtccttcaatacttctgtag

SEQ ID NO: 31639 - DNA, 25 bp, Probe Sequence
agacttgaccgagcaatataatgag

SEQ ID NO: 31640 - DNA, 25 bp, Probe Sequence
agcaatataatgagcaatacggagc

SEQ ID NO: 31641 - DNA, 25 bp, Probe Sequence
accgagcaatataatgagcaatacg

SEQ ID NO: 31642 - DNA, 25 bp, Probe Sequence
cagacttgaccgagcaatataatga

SEQ ID NO: 31643 - DNA, 25 bp, Probe Sequence
cttgctaagttcagaccttctcttc

SEQ ID NO: 31644 - DNA, 25 bp, Probe Sequence
ttgaccgagcaatataatgagcaat

SEQ ID NO: 31645 - DNA, 25 bp, Probe Sequence
gcaatataatgagcaatacggagca

SEQ ID NO: 31646 - DNA, 25 bp, Probe Sequence
ttaccttccttcttcatactttgct

SEQ ID NO: 31647 - DNA, 25 bp, Probe Sequence
taccttccttcttcatactttgctc

SEQ ID NO: 31648 - DNA, 25 bp, Probe Sequence
atgacaccaacctctacctcactat

SEQ ID NO: 31649 - DNA, 25 bp, Probe Sequence
tcagatgcagctatcattattccaa

SEQ ID NO: 31650 - DNA, 25 bp, Probe Sequence
ttcagatgcagctatcattattcca

SEQ ID NO: 31651 - DNA, 25 bp, Probe Sequence
cttccttcttcatactttgctcttt

SEQ ID NO: 31652 - DNA, 25 bp, Probe Sequence
ccttccttcttcatactttgctctt

SEQ ID NO: 31653 - DNA, 25 bp, Probe Sequence
tttaccttccttcttcatactttgc

SEQ ID NO: 31654 - DNA, 25 bp, Probe Sequence
atcttgtgctcctacttctttgatg

SEQ ID NO: 31655 - DNA, 25 bp, Probe Sequence
catcttgtgctcctacttctttgat

SEQ ID NO: 31656 - DNA, 25 bp, Probe Sequence
cttgtgctcctacttctttgatgaa

SEQ ID NO: 31657 - DNA, 25 bp, Probe Sequence
ttgaggacaacattggctacttgag

SEQ ID NO: 31658 - DNA, 25 bp, Probe Sequence
cttgaggacaacattggctacttga

SEQ ID NO: 31659 - DNA, 25 bp, Probe Sequence
attatatacccgagccattaaccac

SEQ ID NO: 31660 - DNA, 25 bp, Probe Sequence
aattatatacccgagccattaacca

SEQ ID NO: 31661 - DNA, 25 bp, Probe Sequence
accttccttcttcatactttgctct

SEQ ID NO: 31662 - DNA, 25 bp, Probe Sequence
tcttgtgctcctacttctttgatga

SEQ ID NO: 31663 - DNA, 25 bp, Probe Sequence
tgacaccaacctctacctcactatc

SEQ ID NO: 31664 - DNA, 25 bp, Probe Sequence
gatgacaccaacctctacctcacta

SEQ ID NO: 31665 - DNA, 25 bp, Probe Sequence
tatatacccgagccattaaccacaa

SEQ ID NO: 31666 - DNA, 25 bp, Probe Sequence
ttatatacccgagccattaaccaca

SEQ ID NO: 31667 - DNA, 25 bp, Probe Sequence
aaattatatacccgagccattaacc

SEQ ID NO: 31668 - DNA, 25 bp, Probe Sequence
ttaacaaaggttccttctaagtggt

SEQ ID NO: 31669 - DNA, 25 bp, Probe Sequence
aacaaaggttccttctaagtggtag

SEQ ID NO: 31670 - DNA, 25 bp, Probe Sequence
gcattctgttattgtcttggattgt

SEQ ID NO: 31671 - DNA, 25 bp, Probe Sequence
taggcattctgttattgtcttggat

SEQ ID NO: 31672 - DNA, 25 bp, Probe Sequence
ataggcattctgttattgtcttgga

SEQ ID NO: 31673 - DNA, 25 bp, Probe Sequence
cataggcattctgttattgtcttgg

SEQ ID NO: 31674 - DNA, 25 bp, Probe Sequence
tgtcataggcattctgttattgtct

SEQ ID NO: 31675 - DNA, 25 bp, Probe Sequence
tgttattgtcttggattgttgctac

SEQ ID NO: 31676 - DNA, 25 bp, Probe Sequence
ctgtcataggcattctgttattgtc

SEQ ID NO: 31677 - DNA, 25 bp, Probe Sequence
actgtcataggcattctgttattgt

SEQ ID NO: 31678 - DNA, 25 bp, Probe Sequence
ttctgttattgtcttggattgttgc

SEQ ID NO: 31679 - DNA, 25 bp, Probe Sequence
ctgttattgtcttggattgttgcta

SEQ ID NO: 31680 - DNA, 25 bp, Probe Sequence
ggcattctgttattgtcttggattg

SEQ ID NO: 31681 - DNA, 25 bp, Probe Sequence
aggcattctgttattgtcttggatt

SEQ ID NO: 31682 - DNA, 25 bp, Probe Sequence
caggatgagtatattgcggatatgt

SEQ ID NO: 31683 - DNA, 25 bp, Probe Sequence
tctgttattgtcttggattgttgct

SEQ ID NO: 31684 - DNA, 25 bp, Probe Sequence
tcataggcattctgttattgtcttg

SEQ ID NO: 31685 - DNA, 25 bp, Probe Sequence
gtcataggcattctgttattgtctt

SEQ ID NO: 31686 - DNA, 25 bp, Probe Sequence
aggatgagtatattgcggatatgtt

SEQ ID NO: 31687 - DNA, 25 bp, Probe Sequence
gactgtcataggcattctgttattg

SEQ ID NO: 31688 - DNA, 25 bp, Probe Sequence
agactgtcataggcattctgttatt

SEQ ID NO: 31689 - DNA, 25 bp, Probe Sequence
gtaatatgaagtgactgctgtgtat

SEQ ID NO: 31690 - DNA, 25 bp, Probe Sequence
tcaggatgagtatattgcggatatg

SEQ ID NO: 31691 - DNA, 25 bp, Probe Sequence
agtaatatgaagtgactgctgtgta

SEQ ID NO: 31692 - DNA, 25 bp, Probe Sequence
atcaggatgagtatattgcggatat

SEQ ID NO: 31693 - DNA, 25 bp, Probe Sequence
ttgaatagtggctaggatacaatgc

SEQ ID NO: 31694 - DNA, 25 bp, Probe Sequence
gtcttaaccacagtcagaattatct

SEQ ID NO: 31695 - DNA, 25 bp, Probe Sequence
agtcttaaccacagtcagaattatc

SEQ ID NO: 31696 - DNA, 25 bp, Probe Sequence
aagtcttaaccacagtcagaattat

SEQ ID NO: 31697 - DNA, 25 bp, Probe Sequence
tcttaaccacagtcagaattatctt

SEQ ID NO: 31698 - DNA, 25 bp, Probe Sequence
accacagtcagaattatcttaatgt

SEQ ID NO: 31699 - DNA, 25 bp, Probe Sequence
agaaggacttagacctcacatatta

SEQ ID NO: 31700 - DNA, 25 bp, Probe Sequence
tagaaggacttagacctcacatatt

SEQ ID NO: 31701 - DNA, 25 bp, Probe Sequence
ttagaaggacttagacctcacatat

SEQ ID NO: 31702 - DNA, 25 bp, Probe Sequence
ttaagtcttaaccacagtcagaatt

SEQ ID NO: 31703 - DNA, 25 bp, Probe Sequence
taagtagtatgtgaccgagctataa

SEQ ID NO: 31704 - DNA, 25 bp, Probe Sequence
ttaagtagtatgtgaccgagctata

SEQ ID NO: 31705 - DNA, 25 bp, Probe Sequence
tagcattatggtgagtggaatttga

SEQ ID NO: 31706 - DNA, 25 bp, Probe Sequence
taagtcttaaccacagtcagaatta

SEQ ID NO: 31707 - DNA, 25 bp, Probe Sequence
gatttaatttgggaactgacaggac

SEQ ID NO: 31708 - DNA, 25 bp, Probe Sequence
agatttaatttgggaactgacagga

SEQ ID NO: 31709 - DNA, 25 bp, Probe Sequence
atagcattatggtgagtggaatttg

SEQ ID NO: 31710 - DNA, 25 bp, Probe Sequence
atttaatttgggaactgacaggaca

SEQ ID NO: 31711 - DNA, 25 bp, Probe Sequence
aactatagcattatggtgagtggaa

SEQ ID NO: 31712 - DNA, 25 bp, Probe Sequence
ttatggtgagtggaatttgacattg

SEQ ID NO: 31713 - DNA, 25 bp, Probe Sequence
cattatggtgagtggaatttgacat

SEQ ID NO: 31714 - DNA, 25 bp, Probe Sequence
ctatagcattatggtgagtggaatt

SEQ ID NO: 31715 - DNA, 25 bp, Probe Sequence
actatagcattatggtgagtggaat

SEQ ID NO: 31716 - DNA, 25 bp, Probe Sequence
tatggtgagtggaatttgacattgt

SEQ ID NO: 31717 - DNA, 25 bp, Probe Sequence
aaccacagtcagaattatcttaatg

SEQ ID NO: 31718 - DNA, 25 bp, Probe Sequence
ctaggaaagggaatactctctatgt

SEQ ID NO: 31719 - DNA, 25 bp, Probe Sequence
atgtatatggagaagacatgacacc

SEQ ID NO: 31720 - DNA, 25 bp, Probe Sequence
taggaaagggaatactctctatgta

SEQ ID NO: 31721 - DNA, 25 bp, Probe Sequence
ctgtcaggtttgatctcagtgtaac

SEQ ID NO: 31722 - DNA, 25 bp, Probe Sequence
tgtatatggagaagacatgacaccc

SEQ ID NO: 31723 - DNA, 25 bp, Probe Sequence
aggtttgatctcagtgtaacgacat

SEQ ID NO: 31724 - DNA, 25 bp, Probe Sequence
aggaaagggaatactctctatgtat

SEQ ID NO: 31725 - DNA, 25 bp, Probe Sequence
gtttgatctcagtgtaacgacatgg

SEQ ID NO: 31726 - DNA, 25 bp, Probe Sequence
ggtttgatctcagtgtaacgacatg

SEQ ID NO: 31727 - DNA, 25 bp, Probe Sequence
tcaggtttgatctcagtgtaacgac

SEQ ID NO: 31728 - DNA, 25 bp, Probe Sequence
gtcaggtttgatctcagtgtaacga

SEQ ID NO: 31729 - DNA, 25 bp, Probe Sequence
tatgtatatggagaagacatgacac

SEQ ID NO: 31730 - DNA, 25 bp, Probe Sequence
gacccagattgtctacagtgatgac

SEQ ID NO: 31731 - DNA, 25 bp, Probe Sequence
tatatggagaagacatgacacccac

SEQ ID NO: 31732 - DNA, 25 bp, Probe Sequence
gtatatggagaagacatgacaccca

SEQ ID NO: 31733 - DNA, 25 bp, Probe Sequence
cttttggaaacatcattgacctctc

SEQ ID NO: 31734 - DNA, 25 bp, Probe Sequence
tgtcaggtttgatctcagtgtaacg

SEQ ID NO: 31735 - DNA, 25 bp, Probe Sequence
ctatgtatatggagaagacatgaca

SEQ ID NO: 31736 - DNA, 25 bp, Probe Sequence
agggaatactctctatgtatatgga

SEQ ID NO: 31737 - DNA, 25 bp, Probe Sequence
caggtttgatctcagtgtaacgaca

SEQ ID NO: 31738 - DNA, 25 bp, Probe Sequence
gctgtcaggtttgatctcagtgtaa

SEQ ID NO: 31739 - DNA, 25 bp, Probe Sequence
ctatgaaaagatggagtcagcagat

SEQ ID NO: 31740 - DNA, 25 bp, Probe Sequence
ccttttggaaacatcattgacctct

SEQ ID NO: 31741 - DNA, 25 bp, Probe Sequence
tctatgtatatggagaagacatgac

SEQ ID NO: 31742 - DNA, 25 bp, Probe Sequence
ctgtgtgtgtatgagagagagagag

SEQ ID NO: 31743 - DNA, 25 bp, Probe Sequence
tgtgtgtgtatgagagagagagaga

SEQ ID NO: 31744 - DNA, 25 bp, Probe Sequence
tctgtgtgtgtatgagagagagaga

SEQ ID NO: 31745 - DNA, 25 bp, Probe Sequence
gtgtgtgtatgagagagagagagaa

SEQ ID NO: 31746 - DNA, 25 bp, Probe Sequence
atgagagagagagagaaatgctaac

SEQ ID NO: 31747 - DNA, 25 bp, Probe Sequence
tgtgtgtatgagagagagagagaaa

SEQ ID NO: 31748 - DNA, 25 bp, Probe Sequence
tgtatgagagagagagagaaatgct

SEQ ID NO: 31749 - DNA, 25 bp, Probe Sequence
gtgtatgagagagagagagaaatgc

SEQ ID NO: 31750 - DNA, 25 bp, Probe Sequence
tgtgtatgagagagagagagaaatg

SEQ ID NO: 31751 - DNA, 25 bp, Probe Sequence
gtgtgtatgagagagagagagaaat

SEQ ID NO: 31752 - DNA, 25 bp, Probe Sequence
gagagagagagaaatgctaaccttg

SEQ ID NO: 31753 - DNA, 25 bp, Probe Sequence
agagagagagagaaatgctaacctt

SEQ ID NO: 31754 - DNA, 25 bp, Probe Sequence
agagagagagaaatgctaaccttgt

SEQ ID NO: 31755 - DNA, 25 bp, Probe Sequence
gagagagagagagaaatgctaacct

SEQ ID NO: 31756 - DNA, 25 bp, Probe Sequence
gtatgagagagagagagaaatgcta

SEQ ID NO: 31757 - DNA, 25 bp, Probe Sequence
tgagagagagagagaaatgctaacc

SEQ ID NO: 31758 - DNA, 25 bp, Probe Sequence
tatgagagagagagagaaatgctaa

SEQ ID NO: 31759 - DNA, 25 bp, Probe Sequence
ctctgtgtgtgtatgagagagagag

SEQ ID NO: 31760 - DNA, 25 bp, Probe Sequence
ataaagtgacaaaagctcatgcaaa

SEQ ID NO: 31761 - DNA, 25 bp, Probe Sequence
aataaagtgacaaaagctcatgcaa

SEQ ID NO: 31762 - DNA, 25 bp, Probe Sequence
taaagtgacaaaagctcatgcaaaa

SEQ ID NO: 31763 - DNA, 25 bp, Probe Sequence
caataaagtgacaaaagctcatgca

SEQ ID NO: 31764 - DNA, 25 bp, Probe Sequence
tgtatgatgacctcaagtatgtgtg

SEQ ID NO: 31765 - DNA, 25 bp, Probe Sequence
gtgtatgatgacctcaagtatgtgt

SEQ ID NO: 31766 - DNA, 25 bp, Probe Sequence
gtatgatgacctcaagtatgtgtgg

SEQ ID NO: 31767 - DNA, 25 bp, Probe Sequence
ttacttccaggatgctgataacttc

SEQ ID NO: 31768 - DNA, 25 bp, Probe Sequence
tacttccaggatgctgataacttct

SEQ ID NO: 31769 - DNA, 25 bp, Probe Sequence
ggtgtatgatgacctcaagtatgtg

SEQ ID NO: 31770 - DNA, 25 bp, Probe Sequence
tatgatgacctcaagtatgtgtggc

SEQ ID NO: 31771 - DNA, 25 bp, Probe Sequence
gaaccatcttcagtgagtgtttcta

SEQ ID NO: 31772 - DNA, 25 bp, Probe Sequence
aaccatcttcagtgagtgtttctac

SEQ ID NO: 31773 - DNA, 25 bp, Probe Sequence
acttccaggatgctgataacttctg

SEQ ID NO: 31774 - DNA, 25 bp, Probe Sequence
gtatggatgtattgtcgcctgtacc

SEQ ID NO: 31775 - DNA, 25 bp, Probe Sequence
ggtatggatgtattgtcgcctgtac

SEQ ID NO: 31776 - DNA, 25 bp, Probe Sequence
tttacttccaggatgctgataactt

SEQ ID NO: 31777 - DNA, 25 bp, Probe Sequence
accatcttcagtgagtgtttctaca

SEQ ID NO: 31778 - DNA, 25 bp, Probe Sequence
aggtatggatgtattgtcgcctgta

SEQ ID NO: 31779 - DNA, 25 bp, Probe Sequence
cgtgattgacaagttcctattgttg

SEQ ID NO: 31780 - DNA, 25 bp, Probe Sequence
atgatgacctcaagtatgtgtggct

SEQ ID NO: 31781 - DNA, 25 bp, Probe Sequence
cttccaggatgctgataacttctgc

SEQ ID NO: 31782 - DNA, 25 bp, Probe Sequence
gtgattgacaagttcctattgttgc

SEQ ID NO: 31783 - DNA, 25 bp, Probe Sequence
ctcttctaccaagtggctgagtaca

SEQ ID NO: 31784 - DNA, 25 bp, Probe Sequence
gggtgtatgatgacctcaagtatgt

SEQ ID NO: 31785 - DNA, 25 bp, Probe Sequence
tgattgacaagttcctattgttgcc

SEQ ID NO: 31786 - DNA, 25 bp, Probe Sequence
cgaaccatcttcagtgagtgtttct

SEQ ID NO: 31787 - DNA, 25 bp, Probe Sequence
tcttctaccaagtggctgagtacac

SEQ ID NO: 31788 - DNA, 25 bp, Probe Sequence
ttcaaacgagtaaaataatgtgcaa

SEQ ID NO: 31789 - DNA, 25 bp, Probe Sequence
tttcaaacgagtaaaataatgtgca

SEQ ID NO: 31790 - DNA, 25 bp, Probe Sequence
aaacgagtaaaataatgtgcaatga

SEQ ID NO: 31791 - DNA, 25 bp, Probe Sequence
caaacgagtaaaataatgtgcaatg

SEQ ID NO: 31792 - DNA, 25 bp, Probe Sequence
tcaaacgagtaaaataatgtgcaat

SEQ ID NO: 31793 - DNA, 25 bp, Probe Sequence
ttttcaaacgagtaaaataatgtgc

SEQ ID NO: 31794 - DNA, 25 bp, Probe Sequence
acgagtaaaataatgtgcaatgatt

SEQ ID NO: 31795 - DNA, 25 bp, Probe Sequence
aacgagtaaaataatgtgcaatgat

SEQ ID NO: 31796 - DNA, 25 bp, Probe Sequence
cgagtaaaataatgtgcaatgattt

SEQ ID NO: 31797 - DNA, 25 bp, Probe Sequence
acttttcaaacgagtaaaataatgt

SEQ ID NO: 31798 - DNA, 25 bp, Probe Sequence
cttttcaaacgagtaaaataatgtg

SEQ ID NO: 31799 - DNA, 25 bp, Probe Sequence
gagtaaaataatgtgcaatgatttt

SEQ ID NO: 31800 - DNA, 25 bp, Probe Sequence
ttatagaggttgataggactgcttg

SEQ ID NO: 31801 - DNA, 25 bp, Probe Sequence
ctcactgtattccttactaacctgt

SEQ ID NO: 31802 - DNA, 25 bp, Probe Sequence
cttatagaggttgataggactgctt

SEQ ID NO: 31803 - DNA, 25 bp, Probe Sequence
tgtattccttactaacctgttgtgt

SEQ ID NO: 31804 - DNA, 25 bp, Probe Sequence
gctcactgtattccttactaacctg

SEQ ID NO: 31805 - DNA, 25 bp, Probe Sequence
tattccttactaacctgttgtgtga

SEQ ID NO: 31806 - DNA, 25 bp, Probe Sequence
gtattccttactaacctgttgtgtg

SEQ ID NO: 31807 - DNA, 25 bp, Probe Sequence
actgtattccttactaacctgttgt

SEQ ID NO: 31808 - DNA, 25 bp, Probe Sequence
attccttactaacctgttgtgtgaa

SEQ ID NO: 31809 - DNA, 25 bp, Probe Sequence
ctgtattccttactaacctgttgtg

SEQ ID NO: 31810 - DNA, 25 bp, Probe Sequence
cactgtattccttactaacctgttg

SEQ ID NO: 31811 - DNA, 25 bp, Probe Sequence
tcactgtattccttactaacctgtt

SEQ ID NO: 31812 - DNA, 25 bp, Probe Sequence
tatagaggttgataggactgcttgg

SEQ ID NO: 31813 - DNA, 25 bp, Probe Sequence
tcttatagaggttgataggactgct

SEQ ID NO: 31814 - DNA, 25 bp, Probe Sequence
tctgaatgactgtagaattggaact

SEQ ID NO: 31815 - DNA, 25 bp, Probe Sequence
tcctataactgtatgtgttgagtgg

SEQ ID NO: 31816 - DNA, 25 bp, Probe Sequence
actgtcctctgtcaatctagttaga

SEQ ID NO: 31817 - DNA, 25 bp, Probe Sequence
cactgtcctctgtcaatctagttag

SEQ ID NO: 31818 - DNA, 25 bp, Probe Sequence
ctgaatgactgtagaattggaacta

SEQ ID NO: 31819 - DNA, 25 bp, Probe Sequence
cctataactgtatgtgttgagtggc

SEQ ID NO: 31820 - DNA, 25 bp, Probe Sequence
tgaatgactgtagaattggaactag

SEQ ID NO: 31821 - DNA, 25 bp, Probe Sequence
ccactgtcctctgtcaatctagtta

SEQ ID NO: 31822 - DNA, 25 bp, Probe Sequence
ctgtcctctgtcaatctagttagac

SEQ ID NO: 31823 - DNA, 25 bp, Probe Sequence
ttcctataactgtatgtgttgagtg

SEQ ID NO: 31824 - DNA, 25 bp, Probe Sequence
gtattgaagttcttatgaccacaga

SEQ ID NO: 31825 - DNA, 25 bp, Probe Sequence
atagaatgagtgctatggtgttgaa

SEQ ID NO: 31826 - DNA, 25 bp, Probe Sequence
aatagaatgagtgctatggtgttga

SEQ ID NO: 31827 - DNA, 25 bp, Probe Sequence
ttgaagttcttatgaccacagatca

SEQ ID NO: 31828 - DNA, 25 bp, Probe Sequence
agagacaatgtaatactgttggtcc

SEQ ID NO: 31829 - DNA, 25 bp, Probe Sequence
attgaagttcttatgaccacagatc

SEQ ID NO: 31830 - DNA, 25 bp, Probe Sequence
gagacaatgtaatactgttggtcca

SEQ ID NO: 31831 - DNA, 25 bp, Probe Sequence
gtactgttgtctcatgtaatgctaa

SEQ ID NO: 31832 - DNA, 25 bp, Probe Sequence
aagagacaatgtaatactgttggtc

SEQ ID NO: 31833 - DNA, 25 bp, Probe Sequence
ttgatggagaacaactcttatcctc

SEQ ID NO: 31834 - DNA, 25 bp, Probe Sequence
cttgatggagaacaactcttatcct

SEQ ID NO: 31835 - DNA, 25 bp, Probe Sequence
gaatatacaagaagctacaagtggc

SEQ ID NO: 31836 - DNA, 25 bp, Probe Sequence
gtagtgaatcaggaagccagtaact

SEQ ID NO: 31837 - DNA, 25 bp, Probe Sequence
taactgactaggagaagctggtatc

SEQ ID NO: 31838 - DNA, 25 bp, Probe Sequence
tattgaagttcttatgaccacagat

SEQ ID NO: 31839 - DNA, 25 bp, Probe Sequence
gtaactgactaggagaagctggtat

SEQ ID NO: 31840 - DNA, 25 bp, Probe Sequence
ggtattgaagttcttatgaccacag

SEQ ID NO: 31841 - DNA, 25 bp, Probe Sequence
agacaatgtaatactgttggtccaa

SEQ ID NO: 31842 - DNA, 25 bp, Probe Sequence
tagaatgagtgctatggtgttgaaa

SEQ ID NO: 31843 - DNA, 25 bp, Probe Sequence
gcaggaatgtaagatgatgaaagag

SEQ ID NO: 31844 - DNA, 25 bp, Probe Sequence
agcaggaatgtaagatgatgaaaga

SEQ ID NO: 31845 - DNA, 25 bp, Probe Sequence
gcttgatggagaacaactcttatcc

SEQ ID NO: 31846 - DNA, 25 bp, Probe Sequence
atgatgtgtgaaatagaatgagtgc

SEQ ID NO: 31847 - DNA, 25 bp, Probe Sequence
caggaaacatcactcagaactattg

SEQ ID NO: 31848 - DNA, 25 bp, Probe Sequence
ctcctattcaacacacacatgcttc

SEQ ID NO: 31849 - DNA, 25 bp, Probe Sequence
ccacctactgtaaccaaatgatgag

SEQ ID NO: 31850 - DNA, 25 bp, Probe Sequence
ctccacctactgtaaccaaatgatg

SEQ ID NO: 31851 - DNA, 25 bp, Probe Sequence
tccacctactgtaaccaaatgatga

SEQ ID NO: 31852 - DNA, 25 bp, Probe Sequence
ttccctgctgtgaaagaagtaacta

SEQ ID NO: 31853 - DNA, 25 bp, Probe Sequence
tccctgctgtgaaagaagtaactac

SEQ ID NO: 31854 - DNA, 25 bp, Probe Sequence
tcctattcaacacacacatgcttcc

SEQ ID NO: 31855 - DNA, 25 bp, Probe Sequence
cttctgtggaggactctacctaagg

SEQ ID NO: 31856 - DNA, 25 bp, Probe Sequence
cacctactgtaaccaaatgatgagg

SEQ ID NO: 31857 - DNA, 25 bp, Probe Sequence
gctccacctactgtaaccaaatgat

SEQ ID NO: 31858 - DNA, 25 bp, Probe Sequence
ttgatgcttctgtggaggactctac

SEQ ID NO: 31859 - DNA, 25 bp, Probe Sequence
aaagaagtaactacagttagggctc

SEQ ID NO: 31860 - DNA, 25 bp, Probe Sequence
gaaagaagtaactacagttagggct

SEQ ID NO: 31861 - DNA, 25 bp, Probe Sequence
tgaaagaagtaactacagttagggc

SEQ ID NO: 31862 - DNA, 25 bp, Probe Sequence
gctcctattcaacacacacatgctt

SEQ ID NO: 31863 - DNA, 25 bp, Probe Sequence
ccctgctgtgaaagaagtaactaca

SEQ ID NO: 31864 - DNA, 25 bp, Probe Sequence
gcttctgtggaggactctacctaag

SEQ ID NO: 31865 - DNA, 25 bp, Probe Sequence
tttgatgcttctgtggaggactcta

SEQ ID NO: 31866 - DNA, 25 bp, Probe Sequence
gtgaaagaagtaactacagttaggg

SEQ ID NO: 31867 - DNA, 25 bp, Probe Sequence
aagaagtaactacagttagggctcc

SEQ ID NO: 31868 - DNA, 25 bp, Probe Sequence
acctactgtaaccaaatgatgaggc

SEQ ID NO: 31869 - DNA, 25 bp, Probe Sequence
tattcaacacacacatgcttccctt

SEQ ID NO: 31870 - DNA, 25 bp, Probe Sequence
tgtgaaagaagtaactacagttagg

SEQ ID NO: 31871 - DNA, 25 bp, Probe Sequence
atgcttctgtggaggactctaccta

SEQ ID NO: 31872 - DNA, 25 bp, Probe Sequence
tatctggaacattcgtagtatctgc

SEQ ID NO: 31873 - DNA, 25 bp, Probe Sequence
gacttatgtgctcttactgattgaa

SEQ ID NO: 31874 - DNA, 25 bp, Probe Sequence
ggttgaccttacacttactccttaa

SEQ ID NO: 31875 - DNA, 25 bp, Probe Sequence
agacttatgtgctcttactgattga

SEQ ID NO: 31876 - DNA, 25 bp, Probe Sequence
tggttgaccttacacttactcctta

SEQ ID NO: 31877 - DNA, 25 bp, Probe Sequence
atatctggaacattcgtagtatctg

SEQ ID NO: 31878 - DNA, 25 bp, Probe Sequence
cacctctaagatactgatggctctg

SEQ ID NO: 31879 - DNA, 25 bp, Probe Sequence
taccacagcacttataatgatgtca

SEQ ID NO: 31880 - DNA, 25 bp, Probe Sequence
ccacagcacttataatgatgtcact

SEQ ID NO: 31881 - DNA, 25 bp, Probe Sequence
taagggatttgctgaagactgtaaa

SEQ ID NO: 31882 - DNA, 25 bp, Probe Sequence
accacagcacttataatgatgtcac

SEQ ID NO: 31883 - DNA, 25 bp, Probe Sequence
ttaagggatttgctgaagactgtaa

SEQ ID NO: 31884 - DNA, 25 bp, Probe Sequence
cagcacttataatgatgtcactaca

SEQ ID NO: 31885 - DNA, 25 bp, Probe Sequence
acagcacttataatgatgtcactac

SEQ ID NO: 31886 - DNA, 25 bp, Probe Sequence
cacagcacttataatgatgtcacta

SEQ ID NO: 31887 - DNA, 25 bp, Probe Sequence
ataccacagcacttataatgatgtc

SEQ ID NO: 31888 - DNA, 25 bp, Probe Sequence
ctctcagatcctatcctgtggaatt

SEQ ID NO: 31889 - DNA, 25 bp, Probe Sequence
gttaagggatttgctgaagactgta

SEQ ID NO: 31890 - DNA, 25 bp, Probe Sequence
tttggcattcttatgtttgggttta

SEQ ID NO: 31891 - DNA, 25 bp, Probe Sequence
ttggcattcttatgtttgggtttaa

SEQ ID NO: 31892 - DNA, 25 bp, Probe Sequence
tggcattcttatgtttgggtttaat

SEQ ID NO: 31893 - DNA, 25 bp, Probe Sequence
aagggatttgctgaagactgtaaag

SEQ ID NO: 31894 - DNA, 25 bp, Probe Sequence
aataccacagcacttataatgatgt

SEQ ID NO: 31895 - DNA, 25 bp, Probe Sequence
gtggttgaccttacacttactcctt

SEQ ID NO: 31896 - DNA, 25 bp, Probe Sequence
atcaagcaggaattatgtcgtaagt

SEQ ID NO: 31897 - DNA, 25 bp, Probe Sequence
tagaggtgctacatagttggtaatg

SEQ ID NO: 31898 - DNA, 25 bp, Probe Sequence
catcaagcaggaattatgtcgtaag

SEQ ID NO: 31899 - DNA, 25 bp, Probe Sequence
atcatcaagcaggaattatgtcgta

SEQ ID NO: 31900 - DNA, 25 bp, Probe Sequence
tatcatcaagcaggaattatgtcgt

SEQ ID NO: 31901 - DNA, 25 bp, Probe Sequence
tcaagcaggaattatgtcgtaagtc

SEQ ID NO: 31902 - DNA, 25 bp, Probe Sequence
tcatcaagcaggaattatgtcgtaa

SEQ ID NO: 31903 - DNA, 25 bp, Probe Sequence
tacatagttggtaatgcttggaatg

SEQ ID NO: 31904 - DNA, 25 bp, Probe Sequence
aagcaggaattatgtcgtaagtcac

SEQ ID NO: 31905 - DNA, 25 bp, Probe Sequence
caagcaggaattatgtcgtaagtca

SEQ ID NO: 31906 - DNA, 25 bp, Probe Sequence
ttatcatcaagcaggaattatgtcg

SEQ ID NO: 31907 - DNA, 25 bp, Probe Sequence
ctacatagttggtaatgcttggaat

SEQ ID NO: 31908 - DNA, 25 bp, Probe Sequence
gctacatagttggtaatgcttggaa

SEQ ID NO: 31909 - DNA, 25 bp, Probe Sequence
ctagaggtgctacatagttggtaat

SEQ ID NO: 31910 - DNA, 25 bp, Probe Sequence
acatagttggtaatgcttggaatgg

SEQ ID NO: 31911 - DNA, 25 bp, Probe Sequence
agcaggaattatgtcgtaagtcact

SEQ ID NO: 31912 - DNA, 25 bp, Probe Sequence
caggaattatgtcgtaagtcactga

SEQ ID NO: 31913 - DNA, 25 bp, Probe Sequence
gtgctacatagttggtaatgcttgg

SEQ ID NO: 31914 - DNA, 25 bp, Probe Sequence
ggtgctacatagttggtaatgcttg

SEQ ID NO: 31915 - DNA, 25 bp, Probe Sequence
tgctacatagttggtaatgcttgga

SEQ ID NO: 31916 - DNA, 25 bp, Probe Sequence
aggtgctacatagttggtaatgctt

SEQ ID NO: 31917 - DNA, 25 bp, Probe Sequence
catagttggtaatgcttggaatggc

SEQ ID NO: 31918 - DNA, 25 bp, Probe Sequence
gaggtgctacatagttggtaatgct

SEQ ID NO: 31919 - DNA, 25 bp, Probe Sequence
agaggtgctacatagttggtaatgc

SEQ ID NO: 31920 - DNA, 25 bp, Probe Sequence
gtcattcttagtccagtcagtctta

SEQ ID NO: 31921 - DNA, 25 bp, Probe Sequence
tccaccgttaccgctaatataagta

SEQ ID NO: 31922 - DNA, 25 bp, Probe Sequence
tcattcttagtccagtcagtcttaa

SEQ ID NO: 31923 - DNA, 25 bp, Probe Sequence
atggcattcagtgattagtggtaat

SEQ ID NO: 31924 - DNA, 25 bp, Probe Sequence
acttaaccgtaatgctaattgtgat

SEQ ID NO: 31925 - DNA, 25 bp, Probe Sequence
ttgaagacaataagtggtggtgtat

SEQ ID NO: 31926 - DNA, 25 bp, Probe Sequence
gaagacaataagtggtggtgtatct

SEQ ID NO: 31927 - DNA, 25 bp, Probe Sequence
tacttaaccgtaatgctaattgtga

SEQ ID NO: 31928 - DNA, 25 bp, Probe Sequence
agacaataagtggtggtgtatcttg

SEQ ID NO: 31929 - DNA, 25 bp, Probe Sequence
tgaagacaataagtggtggtgtatc

SEQ ID NO: 31930 - DNA, 25 bp, Probe Sequence
cgtcattcttagtccagtcagtctt

SEQ ID NO: 31931 - DNA, 25 bp, Probe Sequence
ctccaccgttaccgctaatataagt

SEQ ID NO: 31932 - DNA, 25 bp, Probe Sequence
catggcattcagtgattagtggtaa

SEQ ID NO: 31933 - DNA, 25 bp, Probe Sequence
agaggttgttcaactgaaggaataa

SEQ ID NO: 31934 - DNA, 25 bp, Probe Sequence
cttaaccgtaatgctaattgtgatc

SEQ ID NO: 31935 - DNA, 25 bp, Probe Sequence
tagaggttgttcaactgaaggaata

SEQ ID NO: 31936 - DNA, 25 bp, Probe Sequence
gtagaggttgttcaactgaaggaat

SEQ ID NO: 31937 - DNA, 25 bp, Probe Sequence
attgtgtagaggttgttcaactgaa

SEQ ID NO: 31938 - DNA, 25 bp, Probe Sequence
aattgtgtagaggttgttcaactga

SEQ ID NO: 31939 - DNA, 25 bp, Probe Sequence
taattgtgtagaggttgttcaactg

SEQ ID NO: 31940 - DNA, 25 bp, Probe Sequence
ccaccgttaccgctaatataagtaa

SEQ ID NO: 31941 - DNA, 25 bp, Probe Sequence
ttgtgtagaggttgttcaactgaag

SEQ ID NO: 31942 - DNA, 25 bp, Probe Sequence
attcagtgattagtggtaatggtaa

SEQ ID NO: 31943 - DNA, 25 bp, Probe Sequence
ttaattgtgtagaggttgttcaact

SEQ ID NO: 31944 - DNA, 25 bp, Probe Sequence
cctgttcttcaccgttatcatctat

SEQ ID NO: 31945 - DNA, 25 bp, Probe Sequence
tgttcttcaccgttatcatctatgt

SEQ ID NO: 31946 - DNA, 25 bp, Probe Sequence
tcttcaccgttatcatctatgttcg

SEQ ID NO: 31947 - DNA, 25 bp, Probe Sequence
ctgttcttcaccgttatcatctatg

SEQ ID NO: 31948 - DNA, 25 bp, Probe Sequence
tcctgttcttcaccgttatcatcta

SEQ ID NO: 31949 - DNA, 25 bp, Probe Sequence
tgattggtattctgttctgaagtct

SEQ ID NO: 31950 - DNA, 25 bp, Probe Sequence
gttcttcaccgttatcatctatgtt

SEQ ID NO: 31951 - DNA, 25 bp, Probe Sequence
gtgatagattctctgactgtgaaga

SEQ ID NO: 31952 - DNA, 25 bp, Probe Sequence
ttgattggtattctgttctgaagtc

SEQ ID NO: 31953 - DNA, 25 bp, Probe Sequence
ttcttcaccgttatcatctatgttc

SEQ ID NO: 31954 - DNA, 25 bp, Probe Sequence
atcctgttcttcaccgttatcatct

SEQ ID NO: 31955 - DNA, 25 bp, Probe Sequence
catcctgttcttcaccgttatcatc

SEQ ID NO: 31956 - DNA, 25 bp, Probe Sequence
caagtgatagattctctgactgtga

SEQ ID NO: 31957 - DNA, 25 bp, Probe Sequence
ttggtattctgttctgaagtctagg

SEQ ID NO: 31958 - DNA, 25 bp, Probe Sequence
tggtattctgttctgaagtctagga

SEQ ID NO: 31959 - DNA, 25 bp, Probe Sequence
agtgatagattctctgactgtgaag

SEQ ID NO: 31960 - DNA, 25 bp, Probe Sequence
ttatcatctatgttcggctggactt

SEQ ID NO: 31961 - DNA, 25 bp, Probe Sequence
tgatagattctctgactgtgaagat

SEQ ID NO: 31962 - DNA, 25 bp, Probe Sequence
ggtattctgttctgaagtctaggat

SEQ ID NO: 31963 - DNA, 25 bp, Probe Sequence
aagtgatagattctctgactgtgaa

SEQ ID NO: 31964 - DNA, 25 bp, Probe Sequence
tgaacaagtgatagattctctgact

SEQ ID NO: 31965 - DNA, 25 bp, Probe Sequence
gaacaagtgatagattctctgactg

SEQ ID NO: 31966 - DNA, 25 bp, Probe Sequence
acaagtgatagattctctgactgtg

SEQ ID NO: 31967 - DNA, 25 bp, Probe Sequence
aacaagtgatagattctctgactgt

SEQ ID NO: 31968 - DNA, 25 bp, Probe Sequence
ccattaaggaatcagagatcattga

SEQ ID NO: 31969 - DNA, 25 bp, Probe Sequence
tttgatgccatttctaagacctaca

SEQ ID NO: 31970 - DNA, 25 bp, Probe Sequence
ttgatgccatttctaagacctacag

SEQ ID NO: 31971 - DNA, 25 bp, Probe Sequence
ctttgatgccatttctaagacctac

SEQ ID NO: 31972 - DNA, 25 bp, Probe Sequence
cctttgatgccatttctaagaccta

SEQ ID NO: 31973 - DNA, 25 bp, Probe Sequence
tgtattcaccaagtctccctatcag

SEQ ID NO: 31974 - DNA, 25 bp, Probe Sequence
ctgtattcaccaagtctccctatca

SEQ ID NO: 31975 - DNA, 25 bp, Probe Sequence
gcccattaaggaatcagagatcatt

SEQ ID NO: 31976 - DNA, 25 bp, Probe Sequence
cccattaaggaatcagagatcattg

SEQ ID NO: 31977 - DNA, 25 bp, Probe Sequence
ttggtcaaggacatgaagatcaagt

SEQ ID NO: 31978 - DNA, 25 bp, Probe Sequence
actgtattcaccaagtctccctatc

SEQ ID NO: 31979 - DNA, 25 bp, Probe Sequence
atctatctcttctccctgcccatta

SEQ ID NO: 31980 - DNA, 25 bp, Probe Sequence
ctatctcttctccctgcccattaag

SEQ ID NO: 31981 - DNA, 25 bp, Probe Sequence
tgcccattaaggaatcagagatcat

SEQ ID NO: 31982 - DNA, 25 bp, Probe Sequence
tctatctcttctccctgcccattaa

SEQ ID NO: 31983 - DNA, 25 bp, Probe Sequence
tggtcaaggacatgaagatcaagtc

SEQ ID NO: 31984 - DNA, 25 bp, Probe Sequence
ctggaaggagactgtattcaccaag

SEQ ID NO: 31985 - DNA, 25 bp, Probe Sequence
acctttgatgccatttctaagacct

SEQ ID NO: 31986 - DNA, 25 bp, Probe Sequence
cacctttgatgccatttctaagacc

SEQ ID NO: 31987 - DNA, 25 bp, Probe Sequence
ccacctttgatgccatttctaagac

SEQ ID NO: 31988 - DNA, 25 bp, Probe Sequence
tcagagatcattgatttcttcctgg

SEQ ID NO: 31989 - DNA, 25 bp, Probe Sequence
gacctctggaaggagactgtattca

SEQ ID NO: 31990 - DNA, 25 bp, Probe Sequence
tctggaaggagactgtattcaccaa

SEQ ID NO: 31991 - DNA, 25 bp, Probe Sequence
tgatgccatttctaagacctacagc

SEQ ID NO: 31992 - DNA, 25 bp, Probe Sequence
ctactcttcatcttgtgttgagact

SEQ ID NO: 31993 - DNA, 25 bp, Probe Sequence
tctactcttcatcttgtgttgagac

SEQ ID NO: 31994 - DNA, 25 bp, Probe Sequence
gtctactcttcatcttgtgttgaga

SEQ ID NO: 31995 - DNA, 25 bp, Probe Sequence
agtctactcttcatcttgtgttgag

SEQ ID NO: 31996 - DNA, 25 bp, Probe Sequence
tactcttcatcttgtgttgagactt

SEQ ID NO: 31997 - DNA, 25 bp, Probe Sequence
actcttcatcttgtgttgagacttc

SEQ ID NO: 31998 - DNA, 25 bp, Probe Sequence
attataaggtggatgagaatggcaa

SEQ ID NO: 31999 - DNA, 25 bp, Probe Sequence
ccagaagacaagtaactgtatgagt

SEQ ID NO: 32000 - DNA, 25 bp, Probe Sequence
accagaagacaagtaactgtatgag

SEQ ID NO: 32001 - DNA, 25 bp, Probe Sequence
aaccagaagacaagtaactgtatga

SEQ ID NO: 32002 - DNA, 25 bp, Probe Sequence
tattataaggtggatgagaatggca

SEQ ID NO: 32003 - DNA, 25 bp, Probe Sequence
ctcttcatcttgtgttgagacttcg

SEQ ID NO: 32004 - DNA, 25 bp, Probe Sequence
gagtctactcttcatcttgtgttga

SEQ ID NO: 32005 - DNA, 25 bp, Probe Sequence
cttcatcttgtgttgagacttcgtg

SEQ ID NO: 32006 - DNA, 25 bp, Probe Sequence
tcttcatcttgtgttgagacttcgt

SEQ ID NO: 32007 - DNA, 25 bp, Probe Sequence
ggagtctactcttcatcttgtgttg

SEQ ID NO: 32008 - DNA, 25 bp, Probe Sequence
aggagtctactcttcatcttgtgtt

SEQ ID NO: 32009 - DNA, 25 bp, Probe Sequence
aaggagtctactcttcatcttgtgt

SEQ ID NO: 32010 - DNA, 25 bp, Probe Sequence
atattataaggtggatgagaatggc

SEQ ID NO: 32011 - DNA, 25 bp, Probe Sequence
agaataagcacaagagaaagaaggt

SEQ ID NO: 32012 - DNA, 25 bp, Probe Sequence
ttacaccactcccaagaagaataag

SEQ ID NO: 32013 - DNA, 25 bp, Probe Sequence
gaataagcacaagagaaagaaggtt

SEQ ID NO: 32014 - DNA, 25 bp, Probe Sequence
ccaagaagaataagcacaagagaaa

SEQ ID NO: 32015 - DNA, 25 bp, Probe Sequence
caagatccaggataaggaaggaatt

SEQ ID NO: 32016 - DNA, 25 bp, Probe Sequence
gcagtcaattaacaataagccagta

SEQ ID NO: 32017 - DNA, 25 bp, Probe Sequence
cagcagtcaattaacaataagccag

SEQ ID NO: 32018 - DNA, 25 bp, Probe Sequence
ctcaagattatcaactgtgtgttcg

SEQ ID NO: 32019 - DNA, 25 bp, Probe Sequence
cctcaagattatcaactgtgtgttc

SEQ ID NO: 32020 - DNA, 25 bp, Probe Sequence
agcagtcaattaacaataagccagt

SEQ ID NO: 32021 - DNA, 25 bp, Probe Sequence
atcattaggacataacagactaggc

SEQ ID NO: 32022 - DNA, 25 bp, Probe Sequence
ccagcagtcaattaacaataagcca

SEQ ID NO: 32023 - DNA, 25 bp, Probe Sequence
caagattatcaactgtgtgttcgac

SEQ ID NO: 32024 - DNA, 25 bp, Probe Sequence
tcaagattatcaactgtgtgttcga

SEQ ID NO: 32025 - DNA, 25 bp, Probe Sequence
cagtcaattaacaataagccagtat

SEQ ID NO: 32026 - DNA, 25 bp, Probe Sequence
taaccaatctacaatctcccttcac

SEQ ID NO: 32027 - DNA, 25 bp, Probe Sequence
ataaccaatctacaatctcccttca

SEQ ID NO: 32028 - DNA, 25 bp, Probe Sequence
atctacaatctcccttcacaagttt

SEQ ID NO: 32029 - DNA, 25 bp, Probe Sequence
aatctacaatctcccttcacaagtt

SEQ ID NO: 32030 - DNA, 25 bp, Probe Sequence
caatctacaatctcccttcacaagt

SEQ ID NO: 32031 - DNA, 25 bp, Probe Sequence
aagattatcaactgtgtgttcgaca

SEQ ID NO: 32032 - DNA, 25 bp, Probe Sequence
ccaatctacaatctcccttcacaag

SEQ ID NO: 32033 - DNA, 25 bp, Probe Sequence
ccctcaagattatcaactgtgtgtt

SEQ ID NO: 32034 - DNA, 25 bp, Probe Sequence
accaatctacaatctcccttcacaa

SEQ ID NO: 32035 - DNA, 25 bp, Probe Sequence
aaccaatctacaatctcccttcaca

SEQ ID NO: 32036 - DNA, 25 bp, Probe Sequence
aataaccaatctacaatctcccttc

SEQ ID NO: 32037 - DNA, 25 bp, Probe Sequence
aaataaccaatctacaatctccctt

SEQ ID NO: 32038 - DNA, 25 bp, Probe Sequence
acagtttatcgaccagtttgaatct

SEQ ID NO: 32039 - DNA, 25 bp, Probe Sequence
cccagcagtcaattaacaataagcc

SEQ ID NO: 32040 - DNA, 25 bp, Probe Sequence
gcagtcaattaacaataagccagta

SEQ ID NO: 32041 - DNA, 25 bp, Probe Sequence
cagcagtcaattaacaataagccag

SEQ ID NO: 32042 - DNA, 25 bp, Probe Sequence
ctcaagattatcaactgtgtgttcg

SEQ ID NO: 32043 - DNA, 25 bp, Probe Sequence
cctcaagattatcaactgtgtgttc

SEQ ID NO: 32044 - DNA, 25 bp, Probe Sequence
agcagtcaattaacaataagccagt

SEQ ID NO: 32045 - DNA, 25 bp, Probe Sequence
atcattaggacataacagactaggc

SEQ ID NO: 32046 - DNA, 25 bp, Probe Sequence
ccagcagtcaattaacaataagcca

SEQ ID NO: 32047 - DNA, 25 bp, Probe Sequence
caagattatcaactgtgtgttcgac

SEQ ID NO: 32048 - DNA, 25 bp, Probe Sequence
tcaagattatcaactgtgtgttcga

SEQ ID NO: 32049 - DNA, 25 bp, Probe Sequence
cagtcaattaacaataagccagtat

SEQ ID NO: 32050 - DNA, 25 bp, Probe Sequence
taaccaatctacaatctcccttcac

SEQ ID NO: 32051 - DNA, 25 bp, Probe Sequence
ataaccaatctacaatctcccttca

SEQ ID NO: 32052 - DNA, 25 bp, Probe Sequence
atctacaatctcccttcacaagttt

SEQ ID NO: 32053 - DNA, 25 bp, Probe Sequence
aatctacaatctcccttcacaagtt

SEQ ID NO: 32054 - DNA, 25 bp, Probe Sequence
caatctacaatctcccttcacaagt

SEQ ID NO: 32055 - DNA, 25 bp, Probe Sequence
aagattatcaactgtgtgttcgaca

SEQ ID NO: 32056 - DNA, 25 bp, Probe Sequence
ccaatctacaatctcccttcacaag

SEQ ID NO: 32057 - DNA, 25 bp, Probe Sequence
ccctcaagattatcaactgtgtgtt

SEQ ID NO: 32058 - DNA, 25 bp, Probe Sequence
accaatctacaatctcccttcacaa

SEQ ID NO: 32059 - DNA, 25 bp, Probe Sequence
aaccaatctacaatctcccttcaca

SEQ ID NO: 32060 - DNA, 25 bp, Probe Sequence
aataaccaatctacaatctcccttc

SEQ ID NO: 32061 - DNA, 25 bp, Probe Sequence
aaataaccaatctacaatctccctt

SEQ ID NO: 32062 - DNA, 25 bp, Probe Sequence
acagtttatcgaccagtttgaatct

SEQ ID NO: 32063 - DNA, 25 bp, Probe Sequence
cccagcagtcaattaacaataagcc

SEQ ID NO: 32064 - DNA, 25 bp, Probe Sequence
ttcaagctcaacaagtcagaactaa

SEQ ID NO: 32065 - DNA, 25 bp, Probe Sequence
cttcttctttcttggtttgatcctg

SEQ ID NO: 32066 - DNA, 25 bp, Probe Sequence
caagttcaagctcaacaagtcagaa

SEQ ID NO: 32067 - DNA, 25 bp, Probe Sequence
ttcttctttcttggtttgatcctga

SEQ ID NO: 32068 - DNA, 25 bp, Probe Sequence
cttctttcttggtttgatcctgact

SEQ ID NO: 32069 - DNA, 25 bp, Probe Sequence
tcttctttcttggtttgatcctgac

SEQ ID NO: 32070 - DNA, 25 bp, Probe Sequence
ttctttcttggtttgatcctgactg

SEQ ID NO: 32071 - DNA, 25 bp, Probe Sequence
gctgagcaagttcaataaagattct

SEQ ID NO: 32072 - DNA, 25 bp, Probe Sequence
aattctttgaaggcttcccagataa

SEQ ID NO: 32073 - DNA, 25 bp, Probe Sequence
attctttgaaggcttcccagataag

SEQ ID NO: 32074 - DNA, 25 bp, Probe Sequence
gcttcttctttcttggtttgatcct

SEQ ID NO: 32075 - DNA, 25 bp, Probe Sequence
ctcaacaagtcagaactaaaggagc

SEQ ID NO: 32076 - DNA, 25 bp, Probe Sequence
gctcaacaagtcagaactaaaggag

SEQ ID NO: 32077 - DNA, 25 bp, Probe Sequence
acaagttcaagctcaacaagtcaga

SEQ ID NO: 32078 - DNA, 25 bp, Probe Sequence
ataagcagcccaggaagaaatgaaa

SEQ ID NO: 32079 - DNA, 25 bp, Probe Sequence
gacaagttcaagctcaacaagtcag

SEQ ID NO: 32080 - DNA, 25 bp, Probe Sequence
caagctcaacaagtcagaactaaag

SEQ ID NO: 32081 - DNA, 25 bp, Probe Sequence
tcaagctcaacaagtcagaactaaa

SEQ ID NO: 32082 - DNA, 25 bp, Probe Sequence
ctgagcaagttcaataaagattctt

SEQ ID NO: 32083 - DNA, 25 bp, Probe Sequence
gtgacaagttcaagctcaacaagtc

SEQ ID NO: 32084 - DNA, 25 bp, Probe Sequence
gataagcagcccaggaagaaatgaa

SEQ ID NO: 32085 - DNA, 25 bp, Probe Sequence
aagctcaacaagtcagaactaaagg

SEQ ID NO: 32086 - DNA, 25 bp, Probe Sequence
cgcttcttctttcttggtttgatcc

SEQ ID NO: 32087 - DNA, 25 bp, Probe Sequence
tcaacaagtcagaactaaaggagct

SEQ ID NO: 32088 - DNA, 25 bp, Probe Sequence
tagagaccgagtgtcctcagtatat

SEQ ID NO: 32089 - DNA, 25 bp, Probe Sequence
ctagagaccgagtgtcctcagtata

SEQ ID NO: 32090 - DNA, 25 bp, Probe Sequence
gatgacctgaagaaattgctagaga

SEQ ID NO: 32091 - DNA, 25 bp, Probe Sequence
atgacctgaagaaattgctagagac

SEQ ID NO: 32092 - DNA, 25 bp, Probe Sequence
agagaccgagtgtcctcagtatatc

SEQ ID NO: 32093 - DNA, 25 bp, Probe Sequence
ttcctcattctggtgataaagatgg

SEQ ID NO: 32094 - DNA, 25 bp, Probe Sequence
gttcctcattctggtgataaagatg

SEQ ID NO: 32095 - DNA, 25 bp, Probe Sequence
agttcctcattctggtgataaagat

SEQ ID NO: 32096 - DNA, 25 bp, Probe Sequence
gagttcctcattctggtgataaaga

SEQ ID NO: 32097 - DNA, 25 bp, Probe Sequence
ggatgacctgaagaaattgctagag

SEQ ID NO: 32098 - DNA, 25 bp, Probe Sequence
agaccgagtgtcctcagtatatcag

SEQ ID NO: 32099 - DNA, 25 bp, Probe Sequence
gagaccgagtgtcctcagtatatca

SEQ ID NO: 32100 - DNA, 25 bp, Probe Sequence
caggagttcctcattctggtgataa

SEQ ID NO: 32101 - DNA, 25 bp, Probe Sequence
ggagaaagccttgaactctatcatc

SEQ ID NO: 32102 - DNA, 25 bp, Probe Sequence
ggagttcctcattctggtgataaag

SEQ ID NO: 32103 - DNA, 25 bp, Probe Sequence
gagaaagccttgaactctatcatcg

SEQ ID NO: 32104 - DNA, 25 bp, Probe Sequence
tggagaaagccttgaactctatcat

SEQ ID NO: 32105 - DNA, 25 bp, Probe Sequence
tcctcattctggtgataaagatggg

SEQ ID NO: 32106 - DNA, 25 bp, Probe Sequence
tgacctgaagaaattgctagagacc

SEQ ID NO: 32107 - DNA, 25 bp, Probe Sequence
ccatgaagaaagccacaaagagtag

SEQ ID NO: 32108 - DNA, 25 bp, Probe Sequence
ctggagaaagccttgaactctatca

SEQ ID NO: 32109 - DNA, 25 bp, Probe Sequence
ctgaagaaattgctagagaccgagt

SEQ ID NO: 32110 - DNA, 25 bp, Probe Sequence
gggatgacctgaagaaattgctaga

SEQ ID NO: 32111 - DNA, 25 bp, Probe Sequence
ctcattctggtgataaagatgggct

SEQ ID NO: 32112 - DNA, 25 bp, Probe Sequence
aatctaactctcatttgacaagcag

SEQ ID NO: 32113 - DNA, 25 bp, Probe Sequence
taaaggctacttaacaaaggaggac

SEQ ID NO: 32114 - DNA, 25 bp, Probe Sequence
gggataaaggctacttaacaaagga

SEQ ID NO: 32115 - DNA, 25 bp, Probe Sequence
atctaactctcatttgacaagcaga

SEQ ID NO: 32116 - DNA, 25 bp, Probe Sequence
ataaaggctacttaacaaaggagga

SEQ ID NO: 32117 - DNA, 25 bp, Probe Sequence
gataaaggctacttaacaaaggagg

SEQ ID NO: 32118 - DNA, 25 bp, Probe Sequence
ggataaaggctacttaacaaaggag

SEQ ID NO: 32119 - DNA, 25 bp, Probe Sequence
cccttgccctcaataaataaagttc

SEQ ID NO: 32120 - DNA, 25 bp, Probe Sequence
ccttgccctcaataaataaagttct

SEQ ID NO: 32121 - DNA, 25 bp, Probe Sequence
gaagggaaagaagtaggcagaaatg

SEQ ID NO: 32122 - DNA, 25 bp, Probe Sequence
agaagggaaagaagtaggcagaaat

SEQ ID NO: 32123 - DNA, 25 bp, Probe Sequence
ctcatttgacaagcagagaaagaaa

SEQ ID NO: 32124 - DNA, 25 bp, Probe Sequence
aagggaaagaagtaggcagaaatga

SEQ ID NO: 32125 - DNA, 25 bp, Probe Sequence
gaaagaagtaggcagaaatgagcag

SEQ ID NO: 32126 - DNA, 25 bp, Probe Sequence
aaatctaactctcatttgacaagca

SEQ ID NO: 32127 - DNA, 25 bp, Probe Sequence
tgtttacatttcacaaattcgctgg

SEQ ID NO: 32128 - DNA, 25 bp, Probe Sequence
agggaaagaagtaggcagaaatgag

SEQ ID NO: 32129 - DNA, 25 bp, Probe Sequence
atgaagcagaagggaaagaagtagg

SEQ ID NO: 32130 - DNA, 25 bp, Probe Sequence
agatcaggacacttagcaaatgtaa

SEQ ID NO: 32131 - DNA, 25 bp, Probe Sequence
catgaagcagaagggaaagaagtag

SEQ ID NO: 32132 - DNA, 25 bp, Probe Sequence
cagatcaggacacttagcaaatgta

SEQ ID NO: 32133 - DNA, 25 bp, Probe Sequence
atgtttacatttcacaaattcgctg

SEQ ID NO: 32134 - DNA, 25 bp, Probe Sequence
tgatgtttacatttcacaaattcgc

SEQ ID NO: 32135 - DNA, 25 bp, Probe Sequence
gatcaggacacttagcaaatgtaaa

SEQ ID NO: 32136 - DNA, 25 bp, Probe Sequence
attgtatcttgaggacttcttcgtg

SEQ ID NO: 32137 - DNA, 25 bp, Probe Sequence
tattgtatcttgaggacttcttcgt

SEQ ID NO: 32138 - DNA, 25 bp, Probe Sequence
cttcgtgatgagtgattatagaggc

SEQ ID NO: 32139 - DNA, 25 bp, Probe Sequence
tcgtgatgagtgattatagaggctt

SEQ ID NO: 32140 - DNA, 25 bp, Probe Sequence
ttcgtgatgagtgattatagaggct

SEQ ID NO: 32141 - DNA, 25 bp, Probe Sequence
tatcttgaggacttcttcgtgatga

SEQ ID NO: 32142 - DNA, 25 bp, Probe Sequence
gtatcttgaggacttcttcgtgatg

SEQ ID NO: 32143 - DNA, 25 bp, Probe Sequence
tcttcgtgatgagtgattatagagg

SEQ ID NO: 32144 - DNA, 25 bp, Probe Sequence
tgtatcttgaggacttcttcgtgat

SEQ ID NO: 32145 - DNA, 25 bp, Probe Sequence
gtggattggcaagttattgtatctt

SEQ ID NO: 32146 - DNA, 25 bp, Probe Sequence
ttgtatcttgaggacttcttcgtga

SEQ ID NO: 32147 - DNA, 25 bp, Probe Sequence
ggacttcttcgtgatgagtgattat

SEQ ID NO: 32148 - DNA, 25 bp, Probe Sequence
ttattgtatcttgaggacttcttcg

SEQ ID NO: 32149 - DNA, 25 bp, Probe Sequence
gaatgaaccatccatcaacttctat

SEQ ID NO: 32150 - DNA, 25 bp, Probe Sequence
aggacttcttcgtgatgagtgatta

SEQ ID NO: 32151 - DNA, 25 bp, Probe Sequence
cgtggattggcaagttattgtatct

SEQ ID NO: 32152 - DNA, 25 bp, Probe Sequence
atcttgaggacttcttcgtgatgag

SEQ ID NO: 32153 - DNA, 25 bp, Probe Sequence
acttcttcgtgatgagtgattatag

SEQ ID NO: 32154 - DNA, 25 bp, Probe Sequence
gacttcttcgtgatgagtgattata

SEQ ID NO: 32155 - DNA, 25 bp, Probe Sequence
acaacaaggtggtgtgatcttaata

SEQ ID NO: 32156 - DNA, 25 bp, Probe Sequence
ttcttcgtgatgagtgattatagag

SEQ ID NO: 32157 - DNA, 25 bp, Probe Sequence
cttcttcgtgatgagtgattataga

SEQ ID NO: 32158 - DNA, 25 bp, Probe Sequence
aacaacaaggtggtgtgatcttaat

SEQ ID NO: 32159 - DNA, 25 bp, Probe Sequence
ctgtagatgacaacctccattctat

SEQ ID NO: 32160 - DNA, 25 bp, Probe Sequence
taagtaagaaacacaatgccaacag

SEQ ID NO: 32161 - DNA, 25 bp, Probe Sequence
ctaagtaagaaacacaatgccaaca

SEQ ID NO: 32162 - DNA, 25 bp, Probe Sequence
actaagtaagaaacacaatgccaac

SEQ ID NO: 32163 - DNA, 25 bp, Probe Sequence
gaactaagtaagaaacacaatgcca

SEQ ID NO: 32164 - DNA, 25 bp, Probe Sequence
tgggagaactaagtaagaaacacaa

SEQ ID NO: 32165 - DNA, 25 bp, Probe Sequence
ttgggagaactaagtaagaaacaca

SEQ ID NO: 32166 - DNA, 25 bp, Probe Sequence
agaactaagtaagaaacacaatgcc

SEQ ID NO: 32167 - DNA, 25 bp, Probe Sequence
aactaagtaagaaacacaatgccaa

SEQ ID NO: 32168 - DNA, 25 bp, Probe Sequence
ccttgggagaactaagtaagaaaca

SEQ ID NO: 32169 - DNA, 25 bp, Probe Sequence
taaggattattctgctgaagattca

SEQ ID NO: 32170 - DNA, 25 bp, Probe Sequence
cttgggagaactaagtaagaaacac

SEQ ID NO: 32171 - DNA, 25 bp, Probe Sequence
gggagaactaagtaagaaacacaat

SEQ ID NO: 32172 - DNA, 25 bp, Probe Sequence
gagaactaagtaagaaacacaatgc

SEQ ID NO: 32173 - DNA, 25 bp, Probe Sequence
ttaaggattattctgctgaagattc

SEQ ID NO: 32174 - DNA, 25 bp, Probe Sequence
ggagaactaagtaagaaacacaatg

SEQ ID NO: 32175 - DNA, 25 bp, Probe Sequence
tccttgggagaactaagtaagaaac

SEQ ID NO: 32176 - DNA, 25 bp, Probe Sequence
ttccttgggagaactaagtaagaaa

SEQ ID NO: 32177 - DNA, 25 bp, Probe Sequence
tttccttgggagaactaagtaagaa

SEQ ID NO: 32178 - DNA, 25 bp, Probe Sequence
aagtaagaaacacaatgccaacagc

SEQ ID NO: 32179 - DNA, 25 bp, Probe Sequence
aacaataaagtttgctttcagatgc

SEQ ID NO: 32180 - DNA, 25 bp, Probe Sequence
cgttctcagtcctttgttataattt

SEQ ID NO: 32181 - DNA, 25 bp, Probe Sequence
acgttctcagtcctttgttataatt

SEQ ID NO: 32182 - DNA, 25 bp, Probe Sequence
aatatgatcagagcttgaacacagg

SEQ ID NO: 32183 - DNA, 25 bp, Probe Sequence
gcacttcatgtcattaatcaatttc

SEQ ID NO: 32184 - DNA, 25 bp, Probe Sequence
ctaaggcaggaaaattgtttgaacc

SEQ ID NO: 32185 - DNA, 25 bp, Probe Sequence
tttgtcaaaaggaagtctctaggtt

SEQ ID NO: 32186 - DNA, 25 bp, Probe Sequence
ttgtcaaaaggaagtctctaggttc

SEQ ID NO: 32187 - DNA, 25 bp, Probe Sequence
gtcaaaaggaagtctctaggttctg

SEQ ID NO: 32188 - DNA, 25 bp, Probe Sequence
tgtcaaaaggaagtctctaggttct

SEQ ID NO: 32189 - DNA, 25 bp, Probe Sequence
gctaaggcaggaaaattgtttgaac

SEQ ID NO: 32190 - DNA, 25 bp, Probe Sequence
aaaggaagtctctaggttctgagct

SEQ ID NO: 32191 - DNA, 25 bp, Probe Sequence
gactccgtcacaacaacaacaacaa

SEQ ID NO: 32192 - DNA, 25 bp, Probe Sequence
tcaaaaggaagtctctaggttctga

SEQ ID NO: 32193 - DNA, 25 bp, Probe Sequence
caaaaggaagtctctaggttctgag

SEQ ID NO: 32194 - DNA, 25 bp, Probe Sequence
actccgtcacaacaacaacaacaaa

SEQ ID NO: 32195 - DNA, 25 bp, Probe Sequence
gagactccgtcacaacaacaacaac

SEQ ID NO: 32196 - DNA, 25 bp, Probe Sequence
taaggcaggaaaattgtttgaaccc

SEQ ID NO: 32197 - DNA, 25 bp, Probe Sequence
caggaaaattgtttgaacccaggag

SEQ ID NO: 32198 - DNA, 25 bp, Probe Sequence
ggctaaggcaggaaaattgtttgaa

SEQ ID NO: 32199 - DNA, 25 bp, Probe Sequence
aaaaggaagtctctaggttctgagc

SEQ ID NO: 32200 - DNA, 25 bp, Probe Sequence
tgagactccgtcacaacaacaacaa

SEQ ID NO: 32201 - DNA, 25 bp, Probe Sequence
gaggctaaggcaggaaaattgtttg

SEQ ID NO: 32202 - DNA, 25 bp, Probe Sequence
ctccgtcacaacaacaacaacaaaa

SEQ ID NO: 32203 - DNA, 25 bp, Probe Sequence
agactccgtcacaacaacaacaaca

SEQ ID NO: 32204 - DNA, 25 bp, Probe Sequence
ctttgtcaaaaggaagtctctaggt

SEQ ID NO: 32205 - DNA, 25 bp, Probe Sequence
tgctttgtcaaaaggaagtctctag

SEQ ID NO: 32206 - DNA, 25 bp, Probe Sequence
ctgctttgtcaaaaggaagtctcta

SEQ ID NO: 32207 - DNA, 25 bp, Probe Sequence
aggctaaggcaggaaaattgtttga

SEQ ID NO: 32208 - DNA, 25 bp, Probe Sequence
ggtaagttaagtaagttgattcggt

SEQ ID NO: 32209 - DNA, 25 bp, Probe Sequence
aggtaagttaagtaagttgattcgg

SEQ ID NO: 32210 - DNA, 25 bp, Probe Sequence
agttaagtaagttgattcggtatcc

SEQ ID NO: 32211 - DNA, 25 bp, Probe Sequence
gaggtaagttaagtaagttgattcg

SEQ ID NO: 32212 - DNA, 25 bp, Probe Sequence
ttctgaggtaagttaagtaagttga

SEQ ID NO: 32213 - DNA, 25 bp, Probe Sequence
tagttctttgttcatagcccagtag

SEQ ID NO: 32214 - DNA, 25 bp, Probe Sequence
tctgaggtaagttaagtaagttgat

SEQ ID NO: 32215 - DNA, 25 bp, Probe Sequence
gttaagtaagttgattcggtatccc

SEQ ID NO: 32216 - DNA, 25 bp, Probe Sequence
catcttgcttccctaatctatggtc

SEQ ID NO: 32217 - DNA, 25 bp, Probe Sequence
ctagttctttgttcatagcccagta

SEQ ID NO: 32218 - DNA, 25 bp, Probe Sequence
cttctgaggtaagttaagtaagttg

SEQ ID NO: 32219 - DNA, 25 bp, Probe Sequence
ttcctctagttctttgttcatagcc

SEQ ID NO: 32220 - DNA, 25 bp, Probe Sequence
aagttaagtaagttgattcggtatc

SEQ ID NO: 32221 - DNA, 25 bp, Probe Sequence
ctctagttctttgttcatagcccag

SEQ ID NO: 32222 - DNA, 25 bp, Probe Sequence
ccagtagaccttgttacttctgagg

SEQ ID NO: 32223 - DNA, 25 bp, Probe Sequence
tttcctctagttctttgttcatagc

SEQ ID NO: 32224 - DNA, 25 bp, Probe Sequence
gttctttgttcatagcccagtagac

SEQ ID NO: 32225 - DNA, 25 bp, Probe Sequence
agttctttgttcatagcccagtaga

SEQ ID NO: 32226 - DNA, 25 bp, Probe Sequence
gttcatagcccagtagaccttgtta

SEQ ID NO: 32227 - DNA, 25 bp, Probe Sequence
ttcatagcccagtagaccttgttac

SEQ ID NO: 32228 - DNA, 25 bp, Probe Sequence
gtaagttaagtaagttgattcggta

SEQ ID NO: 32229 - DNA, 25 bp, Probe Sequence
tctagttctttgttcatagcccagt

SEQ ID NO: 32230 - DNA, 25 bp, Probe Sequence
atcttgcttccctaatctatggtcg

SEQ ID NO: 32231 - DNA, 25 bp, Probe Sequence
catgtttcctctagttctttgttca

SEQ ID NO: 32232 - DNA, 25 bp, Probe Sequence
gatgattgactccagagatgacttc

SEQ ID NO: 32233 - DNA, 25 bp, Probe Sequence
aagaagaaggatgaatctcaggaag

SEQ ID NO: 32234 - DNA, 25 bp, Probe Sequence
gaagaagaaggatgaatctcaggaa

SEQ ID NO: 32235 - DNA, 25 bp, Probe Sequence
ttgaagaagaaggatgaatctcagg

SEQ ID NO: 32236 - DNA, 25 bp, Probe Sequence
tgaagaagaaggatgaatctcagga

SEQ ID NO: 32237 - DNA, 25 bp, Probe Sequence
atgattgactccagagatgacttca

SEQ ID NO: 32238 - DNA, 25 bp, Probe Sequence
agaagaaggatgaatctcaggaagg

SEQ ID NO: 32239 - DNA, 25 bp, Probe Sequence
aatgatggcaacctataaggagaag

SEQ ID NO: 32240 - DNA, 25 bp, Probe Sequence
atgatggcaacctataaggagaaga

SEQ ID NO: 32241 - DNA, 25 bp, Probe Sequence
attgactccagagatgacttcacag

SEQ ID NO: 32242 - DNA, 25 bp, Probe Sequence
gattgactccagagatgacttcaca

SEQ ID NO: 32243 - DNA, 25 bp, Probe Sequence
tgattgactccagagatgacttcac

SEQ ID NO: 32244 - DNA, 25 bp, Probe Sequence
tgatggcaacctataaggagaagaa

SEQ ID NO: 32245 - DNA, 25 bp, Probe Sequence
tccattgagccttatttgaagaaga

SEQ ID NO: 32246 - DNA, 25 bp, Probe Sequence
ccattgagccttatttgaagaagaa

SEQ ID NO: 32247 - DNA, 25 bp, Probe Sequence
ggatgattgactccagagatgactt

SEQ ID NO: 32248 - DNA, 25 bp, Probe Sequence
atccattgagccttatttgaagaag

SEQ ID NO: 32249 - DNA, 25 bp, Probe Sequence
aatccattgagccttatttgaagaa

SEQ ID NO: 32250 - DNA, 25 bp, Probe Sequence
ttgactccagagatgacttcacaga

SEQ ID NO: 32251 - DNA, 25 bp, Probe Sequence
caagattaagaatgaagttgactct

SEQ ID NO: 32252 - DNA, 25 bp, Probe Sequence
gaagaaggatgaatctcaggaaggc

SEQ ID NO: 32253 - DNA, 25 bp, Probe Sequence
gaacatcaatggaggcaacactcta

SEQ ID NO: 32254 - DNA, 25 bp, Probe Sequence
cattgagccttatttgaagaagaag

SEQ ID NO: 32255 - DNA, 25 bp, Probe Sequence
tttgaagaagaaggatgaatctcag

SEQ ID NO: 32256 - DNA, 25 bp, Probe Sequence
ttgaggctacaagtccaagtatctt

SEQ ID NO: 32257 - DNA, 25 bp, Probe Sequence
aagaagaagttagaagatgagttcc

SEQ ID NO: 32258 - DNA, 25 bp, Probe Sequence
aggctacaagtccaagtatcttcag

SEQ ID NO: 32259 - DNA, 25 bp, Probe Sequence
gaggctacaagtccaagtatcttca

SEQ ID NO: 32260 - DNA, 25 bp, Probe Sequence
tgaggctacaagtccaagtatcttc

SEQ ID NO: 32261 - DNA, 25 bp, Probe Sequence
ggaagttgattcactctaagaagaa

SEQ ID NO: 32262 - DNA, 25 bp, Probe Sequence
cagctcaagaagaagttagaagatg

SEQ ID NO: 32263 - DNA, 25 bp, Probe Sequence
tcagctcaagaagaagttagaagat

SEQ ID NO: 32264 - DNA, 25 bp, Probe Sequence
ttcagctcaagaagaagttagaaga

SEQ ID NO: 32265 - DNA, 25 bp, Probe Sequence
ctacaagtccaagtatcttcagctc

SEQ ID NO: 32266 - DNA, 25 bp, Probe Sequence
caagaagaagttagaagatgagttc

SEQ ID NO: 32267 - DNA, 25 bp, Probe Sequence
gagagtctgtgtgtatgtgtcttcc

SEQ ID NO: 32268 - DNA, 25 bp, Probe Sequence
ggagagtctgtgtgtatgtgtcttc

SEQ ID NO: 32269 - DNA, 25 bp, Probe Sequence
tcaagaagaagttagaagatgagtt

SEQ ID NO: 32270 - DNA, 25 bp, Probe Sequence
agctcaagaagaagttagaagatga

SEQ ID NO: 32271 - DNA, 25 bp, Probe Sequence
tacaagtccaagtatcttcagctca

SEQ ID NO: 32272 - DNA, 25 bp, Probe Sequence
caagtccaagtatcttcagctcaag

SEQ ID NO: 32273 - DNA, 25 bp, Probe Sequence
agaagaagttagaagatgagttccc

SEQ ID NO: 32274 - DNA, 25 bp, Probe Sequence
gttgattcactctaagaagaaaggc

SEQ ID NO: 32275 - DNA, 25 bp, Probe Sequence
gattcactctaagaagaaaggcgat

SEQ ID NO: 32276 - DNA, 25 bp, Probe Sequence
attcactctaagaagaaaggcgatg

SEQ ID NO: 32277 - DNA, 25 bp, Probe Sequence
gggaagttgattcactctaagaaga

SEQ ID NO: 32278 - DNA, 25 bp, Probe Sequence
acaagtccaagtatcttcagctcaa

SEQ ID NO: 32279 - DNA, 25 bp, Probe Sequence
ttgattcactctaagaagaaaggcg

SEQ ID NO: 32280 - DNA, 25 bp, Probe Sequence
aagataggctctcagtaagaagtct

SEQ ID NO: 32281 - DNA, 25 bp, Probe Sequence
gaagataggctctcagtaagaagtc

SEQ ID NO: 32282 - DNA, 25 bp, Probe Sequence
agaagataggctctcagtaagaagt

SEQ ID NO: 32283 - DNA, 25 bp, Probe Sequence
caagaagataggctctcagtaagaa

SEQ ID NO: 32284 - DNA, 25 bp, Probe Sequence
aagaagataggctctcagtaagaag

SEQ ID NO: 32285 - DNA, 25 bp, Probe Sequence
gtatgcttactatgaccttccaagt

SEQ ID NO: 32286 - DNA, 25 bp, Probe Sequence
ccaagaagataggctctcagtaaga

SEQ ID NO: 32287 - DNA, 25 bp, Probe Sequence
tatgcttactatgaccttccaagtt

SEQ ID NO: 32288 - DNA, 25 bp, Probe Sequence
attctctcctaatgatgacttgagc

SEQ ID NO: 32289 - DNA, 25 bp, Probe Sequence
tctatgtgaatatggacagttagca

SEQ ID NO: 32290 - DNA, 25 bp, Probe Sequence
actgtgtctctatgtgaatatggac

SEQ ID NO: 32291 - DNA, 25 bp, Probe Sequence
ctctatgtgaatatggacagttagc

SEQ ID NO: 32292 - DNA, 25 bp, Probe Sequence
agataggctctcagtaagaagtctg

SEQ ID NO: 32293 - DNA, 25 bp, Probe Sequence
cactgtgtctctatgtgaatatgga

SEQ ID NO: 32294 - DNA, 25 bp, Probe Sequence
taagaagtctgatggtgagcagtaa

SEQ ID NO: 32295 - DNA, 25 bp, Probe Sequence
tgaattaatggacagtctggtgaac

SEQ ID NO: 32296 - DNA, 25 bp, Probe Sequence
gtgaattaatggacagtctggtgaa

SEQ ID NO: 32297 - DNA, 25 bp, Probe Sequence
ctatgtgaatatggacagttagcat

SEQ ID NO: 32298 - DNA, 25 bp, Probe Sequence
ttctctcctaatgatgacttgagcc

SEQ ID NO: 32299 - DNA, 25 bp, Probe Sequence
atcagcagaacctgtaggatcttat

SEQ ID NO: 32300 - DNA, 25 bp, Probe Sequence
aattctctcctaatgatgacttgag

SEQ ID NO: 32301 - DNA, 25 bp, Probe Sequence
aattaatggacagtctggtgaactt

SEQ ID NO: 32302 - DNA, 25 bp, Probe Sequence
tcagcagaacctgtaggatcttatt

SEQ ID NO: 32303 - DNA, 25 bp, Probe Sequence
aatcagcagaacctgtaggatctta

SEQ ID NO: 32304 - DNA, 25 bp, Probe Sequence
gcagttgtgtagcagttgagtaatg

SEQ ID NO: 32305 - DNA, 25 bp, Probe Sequence
gcatataaataacggagcatacagt

SEQ ID NO: 32306 - DNA, 25 bp, Probe Sequence
ataaataacggagcatacagtgagc

SEQ ID NO: 32307 - DNA, 25 bp, Probe Sequence
aaatgttaaggaagcaaatggttgt

SEQ ID NO: 32308 - DNA, 25 bp, Probe Sequence
atgttaaggaagcaaatggttgtaa

SEQ ID NO: 32309 - DNA, 25 bp, Probe Sequence
aatgttaaggaagcaaatggttgta

SEQ ID NO: 32310 - DNA, 25 bp, Probe Sequence
taaggaagcaaatggttgtaacttt

SEQ ID NO: 32311 - DNA, 25 bp, Probe Sequence
ttaaggaagcaaatggttgtaactt

SEQ ID NO: 32312 - DNA, 25 bp, Probe Sequence
tataaataacggagcatacagtgag

SEQ ID NO: 32313 - DNA, 25 bp, Probe Sequence
taaataacggagcatacagtgagca

SEQ ID NO: 32314 - DNA, 25 bp, Probe Sequence
cgcagttgtgtagcagttgagtaat

SEQ ID NO: 32315 - DNA, 25 bp, Probe Sequence
catataaataacggagcatacagtg

SEQ ID NO: 32316 - DNA, 25 bp, Probe Sequence
atataaataacggagcatacagtga

SEQ ID NO: 32317 - DNA, 25 bp, Probe Sequence
gttaaggaagcaaatggttgtaact

SEQ ID NO: 32318 - DNA, 25 bp, Probe Sequence
tgttaaggaagcaaatggttgtaac

SEQ ID NO: 32319 - DNA, 25 bp, Probe Sequence
catacagtgagcacatctagctgat

SEQ ID NO: 32320 - DNA, 25 bp, Probe Sequence
ttgagtaatgctggttagctgttaa

SEQ ID NO: 32321 - DNA, 25 bp, Probe Sequence
tgagtaatgctggttagctgttaag

SEQ ID NO: 32322 - DNA, 25 bp, Probe Sequence
gttgagtaatgctggttagctgtta

SEQ ID NO: 32323 - DNA, 25 bp, Probe Sequence
gagtaatgctggttagctgttaagg

SEQ ID NO: 32324 - DNA, 25 bp, Probe Sequence
cagtgagcacatctagctgatgata

SEQ ID NO: 32325 - DNA, 25 bp, Probe Sequence
caaacacaattctaatctcttctct

SEQ ID NO: 32326 - DNA, 25 bp, Probe Sequence
tcaaacacaattctaatctcttctc

SEQ ID NO: 32327 - DNA, 25 bp, Probe Sequence
atacagtgagcacatctagctgatg

SEQ ID NO: 32328 - DNA, 25 bp, Probe Sequence
tagagataggagaagagagagatcg

SEQ ID NO: 32329 - DNA, 25 bp, Probe Sequence
gagagctagatggaagaacactatg

SEQ ID NO: 32330 - DNA, 25 bp, Probe Sequence
ctagagataggagaagagagagatc

SEQ ID NO: 32331 - DNA, 25 bp, Probe Sequence
gagatgattatcgtaggaggagtcc

SEQ ID NO: 32332 - DNA, 25 bp, Probe Sequence
gagataggagaagagagagatcgct

SEQ ID NO: 32333 - DNA, 25 bp, Probe Sequence
agagataggagaagagagagatcgc

SEQ ID NO: 32334 - DNA, 25 bp, Probe Sequence
cgagagctagatggaagaacactat

SEQ ID NO: 32335 - DNA, 25 bp, Probe Sequence
gaaaggaaatagaagaccagtttgc

SEQ ID NO: 32336 - DNA, 25 bp, Probe Sequence
actgtaaggtttatgtaggcaatct

SEQ ID NO: 32337 - DNA, 25 bp, Probe Sequence
gactgtaaggtttatgtaggcaatc

SEQ ID NO: 32338 - DNA, 25 bp, Probe Sequence
ggactgtaaggtttatgtaggcaat

SEQ ID NO: 32339 - DNA, 25 bp, Probe Sequence
attggactgtaaggtttatgtaggc

SEQ ID NO: 32340 - DNA, 25 bp, Probe Sequence
aggtttatgtaggcaatcttggaaa

SEQ ID NO: 32341 - DNA, 25 bp, Probe Sequence
tgaaaggaaatagaagaccagtttg

SEQ ID NO: 32342 - DNA, 25 bp, Probe Sequence
ctagatggaagaacactatgtggct

SEQ ID NO: 32343 - DNA, 25 bp, Probe Sequence
taaggtttatgtaggcaatcttgga

SEQ ID NO: 32344 - DNA, 25 bp, Probe Sequence
gtaaggtttatgtaggcaatcttgg

SEQ ID NO: 32345 - DNA, 25 bp, Probe Sequence
agataggagaagagagagatcgctg

SEQ ID NO: 32346 - DNA, 25 bp, Probe Sequence
aaggtttatgtaggcaatcttggaa

SEQ ID NO: 32347 - DNA, 25 bp, Probe Sequence
agagctagatggaagaacactatgt

SEQ ID NO: 32348 - DNA, 25 bp, Probe Sequence
cattggactgtaaggtttatgtagg

SEQ ID NO: 32349 - DNA, 25 bp, Probe Sequence
tagatggaagaacactatgtggctg

SEQ ID NO: 32350 - DNA, 25 bp, Probe Sequence
tgtaaggtttatgtaggcaatcttg

SEQ ID NO: 32351 - DNA, 25 bp, Probe Sequence
ataggagaagagagagatcgctgtc

SEQ ID NO: 32352 - DNA, 25 bp, Probe Sequence
caaggacaaggacactctgacattc

SEQ ID NO: 32353 - DNA, 25 bp, Probe Sequence
tgaatcagaaggcaacaaagaaagg

SEQ ID NO: 32354 - DNA, 25 bp, Probe Sequence
ttaccaaggacaaggacactctgac

SEQ ID NO: 32355 - DNA, 25 bp, Probe Sequence
gttaccaaggacaaggacactctga

SEQ ID NO: 32356 - DNA, 25 bp, Probe Sequence
ctgaatcagaaggcaacaaagaaag

SEQ ID NO: 32357 - DNA, 25 bp, Probe Sequence
gaatcagaaggcaacaaagaaaggc

SEQ ID NO: 32358 - DNA, 25 bp, Probe Sequence
cctgaatcagaaggcaacaaagaaa

SEQ ID NO: 32359 - DNA, 25 bp, Probe Sequence
aaggacaaggacactctgacattcg

SEQ ID NO: 32360 - DNA, 25 bp, Probe Sequence
ccaaggacaaggacactctgacatt

SEQ ID NO: 32361 - DNA, 25 bp, Probe Sequence
gaatccaaggagtcggttctgtgat

SEQ ID NO: 32362 - DNA, 25 bp, Probe Sequence
ctcaagaaatcatggactcacaggg

SEQ ID NO: 32363 - DNA, 25 bp, Probe Sequence
cattctccaccacctgaatcagaag

SEQ ID NO: 32364 - DNA, 25 bp, Probe Sequence
aatccaaggagtcggttctgtgatg

SEQ ID NO: 32365 - DNA, 25 bp, Probe Sequence
taccaaggacaaggacactctgaca

SEQ ID NO: 32366 - DNA, 25 bp, Probe Sequence
acctgaatcagaaggcaacaaagaa

SEQ ID NO: 32367 - DNA, 25 bp, Probe Sequence
ggttaccaaggacaaggacactctg

SEQ ID NO: 32368 - DNA, 25 bp, Probe Sequence
tcaagaaatcatggactcacagggt

SEQ ID NO: 32369 - DNA, 25 bp, Probe Sequence
gctcaagaaatcatggactcacagg

SEQ ID NO: 32370 - DNA, 25 bp, Probe Sequence
ggctcaagaaatcatggactcacag

SEQ ID NO: 32371 - DNA, 25 bp, Probe Sequence
caggctcaagaaatcatggactcac

SEQ ID NO: 32372 - DNA, 25 bp, Probe Sequence
caagaaatcatggactcacagggtc

SEQ ID NO: 32373 - DNA, 25 bp, Probe Sequence
cactctgacattcggcttgatccat

SEQ ID NO: 32374 - DNA, 25 bp, Probe Sequence
aggctcaagaaatcatggactcaca

SEQ ID NO: 32375 - DNA, 25 bp, Probe Sequence
attctccaccacctgaatcagaagg

SEQ ID NO: 32376 - DNA, 25 bp, Probe Sequence
ttcgattacatccaggcagtctcta

SEQ ID NO: 32377 - DNA, 25 bp, Probe Sequence
tcgattacatccaggcagtctctag

SEQ ID NO: 32378 - DNA, 25 bp, Probe Sequence
gattacatccaggcagtctctagct

SEQ ID NO: 32379 - DNA, 25 bp, Probe Sequence
attacatccaggcagtctctagcta

SEQ ID NO: 32380 - DNA, 25 bp, Probe Sequence
ctacttcgccattgtgctgttcttc

SEQ ID NO: 32381 - DNA, 25 bp, Probe Sequence
ttctatgcctaagaccaactgcgtt

SEQ ID NO: 32382 - DNA, 25 bp, Probe Sequence
cttctatgcctaagaccaactgcgt

SEQ ID NO: 32383 - DNA, 25 bp, Probe Sequence
cttcgattacatccaggcagtctct

SEQ ID NO: 32384 - DNA, 25 bp, Probe Sequence
tcttcgattacatccaggcagtctc

SEQ ID NO: 32385 - DNA, 25 bp, Probe Sequence
ctcttcgattacatccaggcagtct

SEQ ID NO: 32386 - DNA, 25 bp, Probe Sequence
tacttcgccattgtgctgttcttct

SEQ ID NO: 32387 - DNA, 25 bp, Probe Sequence
tctacttcgccattgtgctgttctt

SEQ ID NO: 32388 - DNA, 25 bp, Probe Sequence
cgattacatccaggcagtctctagc

SEQ ID NO: 32389 - DNA, 25 bp, Probe Sequence
ttacatccaggcagtctctagctac

SEQ ID NO: 32390 - DNA, 25 bp, Probe Sequence
ctctacttcgccattgtgctgttct

SEQ ID NO: 32391 - DNA, 25 bp, Probe Sequence
tacatccaggcagtctctagctacc

SEQ ID NO: 32392 - DNA, 25 bp, Probe Sequence
catctgattggcagtcacttcccat

SEQ ID NO: 32393 - DNA, 25 bp, Probe Sequence
aaaataaagctgcctttcccctgta

SEQ ID NO: 32394 - DNA, 25 bp, Probe Sequence
atctgattggcagtcacttcccatg

SEQ ID NO: 32395 - DNA, 25 bp, Probe Sequence
agagagtgccatggagatgaatgag

SEQ ID NO: 32396 - DNA, 25 bp, Probe Sequence
tctatgcctaagaccaactgcgttg

SEQ ID NO: 32397 - DNA, 25 bp, Probe Sequence
cagagagtgccatggagatgaatga

SEQ ID NO: 32398 - DNA, 25 bp, Probe Sequence
gggcttctatgcctaagaccaactg

SEQ ID NO: 32399 - DNA, 25 bp, Probe Sequence
ccagagagtgccatggagatgaatg

SEQ ID NO: 32400 - DNA, 25 bp, Probe Sequence
tctggttttgtggaatgagcagagg

SEQ ID NO: 32401 - DNA, 25 bp, Probe Sequence
tggattcagtataaggataaggagg

SEQ ID NO: 32402 - DNA, 25 bp, Probe Sequence
attgttgtgcttagaattgctggat

SEQ ID NO: 32403 - DNA, 25 bp, Probe Sequence
ttgttgtgcttagaattgctggatg

SEQ ID NO: 32404 - DNA, 25 bp, Probe Sequence
aattgttgtgcttagaattgctgga

SEQ ID NO: 32405 - DNA, 25 bp, Probe Sequence
ataggattgggaaagaagttgctaa

SEQ ID NO: 32406 - DNA, 25 bp, Probe Sequence
tcagtataaggataaggagggaagg

SEQ ID NO: 32407 - DNA, 25 bp, Probe Sequence
gataggattgggaaagaagttgcta

SEQ ID NO: 32408 - DNA, 25 bp, Probe Sequence
agtataaggataaggagggaaggtg

SEQ ID NO: 32409 - DNA, 25 bp, Probe Sequence
cagtataaggataaggagggaaggt

SEQ ID NO: 32410 - DNA, 25 bp, Probe Sequence
ggattcagtataaggataaggaggg

SEQ ID NO: 32411 - DNA, 25 bp, Probe Sequence
taggattgggaaagaagttgctaag

SEQ ID NO: 32412 - DNA, 25 bp, Probe Sequence
caggcaaacgaataaagataggatt

SEQ ID NO: 32413 - DNA, 25 bp, Probe Sequence
atggattcagtataaggataaggag

SEQ ID NO: 32414 - DNA, 25 bp, Probe Sequence
ccaggcaaacgaataaagataggat

SEQ ID NO: 32415 - DNA, 25 bp, Probe Sequence
cgaggcagaaagatatagacattca

SEQ ID NO: 32416 - DNA, 25 bp, Probe Sequence
aagataggattgggaaagaagttgc

SEQ ID NO: 32417 - DNA, 25 bp, Probe Sequence
aaagataggattgggaaagaagttg

SEQ ID NO: 32418 - DNA, 25 bp, Probe Sequence
gcaaacgaataaagataggattggg

SEQ ID NO: 32419 - DNA, 25 bp, Probe Sequence
ggcaaacgaataaagataggattgg

SEQ ID NO: 32420 - DNA, 25 bp, Probe Sequence
tataaggataaggagggaaggtgga

SEQ ID NO: 32421 - DNA, 25 bp, Probe Sequence
gtataaggataaggagggaaggtgg

SEQ ID NO: 32422 - DNA, 25 bp, Probe Sequence
gattcagtataaggataaggaggga

SEQ ID NO: 32423 - DNA, 25 bp, Probe Sequence
gattgggaaagaagttgctaagtgt

SEQ ID NO: 32424 - DNA, 25 bp, Probe Sequence
acgaataaagataggattgggaaag

SEQ ID NO: 32425 - DNA, 25 bp, Probe Sequence
cttagatacaagaaacctgagtgcc

SEQ ID NO: 32426 - DNA, 25 bp, Probe Sequence
ccttagatacaagaaacctgagtgc

SEQ ID NO: 32427 - DNA, 25 bp, Probe Sequence
gccttagatacaagaaacctgagtg

SEQ ID NO: 32428 - DNA, 25 bp, Probe Sequence
gtgccttagatacaagaaacctgag

SEQ ID NO: 32429 - DNA, 25 bp, Probe Sequence
aagaagagatgttgtcctgacactt

SEQ ID NO: 32430 - DNA, 25 bp, Probe Sequence
ttagatacaagaaacctgagtgcca

SEQ ID NO: 32431 - DNA, 25 bp, Probe Sequence
aataaacgagcctatttctctttgc

SEQ ID NO: 32432 - DNA, 25 bp, Probe Sequence
tgccttagatacaagaaacctgagt

SEQ ID NO: 32433 - DNA, 25 bp, Probe Sequence
agtgccttagatacaagaaacctga

SEQ ID NO: 32434 - DNA, 25 bp, Probe Sequence
gaagaagagatgttgtcctgacact

SEQ ID NO: 32435 - DNA, 25 bp, Probe Sequence
agaagagatgttgtcctgacacttg

SEQ ID NO: 32436 - DNA, 25 bp, Probe Sequence
ccagtgccttagatacaagaaacct

SEQ ID NO: 32437 - DNA, 25 bp, Probe Sequence
cagtgccttagatacaagaaacctg

SEQ ID NO: 32438 - DNA, 25 bp, Probe Sequence
gaagagatgttgtcctgacacttgt

SEQ ID NO: 32439 - DNA, 25 bp, Probe Sequence
gatcaatgaataaataaacgagcct

SEQ ID NO: 32440 - DNA, 25 bp, Probe Sequence
aagagatgttgtcctgacacttgtg

SEQ ID NO: 32441 - DNA, 25 bp, Probe Sequence
tagatacaagaaacctgagtgccag

SEQ ID NO: 32442 - DNA, 25 bp, Probe Sequence
gagtctgtcctcctaagaaatctgc

SEQ ID NO: 32443 - DNA, 25 bp, Probe Sequence
cccagtgccttagatacaagaaacc

SEQ ID NO: 32444 - DNA, 25 bp, Probe Sequence
ggaagaagagatgttgtcctgacac

SEQ ID NO: 32445 - DNA, 25 bp, Probe Sequence
ataaacgagcctatttctctttgca

SEQ ID NO: 32446 - DNA, 25 bp, Probe Sequence
tcaatgaataaataaacgagcctat

SEQ ID NO: 32447 - DNA, 25 bp, Probe Sequence
atcaatgaataaataaacgagccta

SEQ ID NO: 32448 - DNA, 25 bp, Probe Sequence
taaacgagcctatttctctttgcac

SEQ ID NO: 32449 - DNA, 25 bp, Probe Sequence
cttcaaggacacattagaactcaca

SEQ ID NO: 32450 - DNA, 25 bp, Probe Sequence
gctgatggctagattgagagaataa

SEQ ID NO: 32451 - DNA, 25 bp, Probe Sequence
ttcaaggacacattagaactcacac

SEQ ID NO: 32452 - DNA, 25 bp, Probe Sequence
tgctgatggctagattgagagaata

SEQ ID NO: 32453 - DNA, 25 bp, Probe Sequence
ttgcttcaaggacacattagaactc

SEQ ID NO: 32454 - DNA, 25 bp, Probe Sequence
atactgtgacaaggaatatgtgagc

SEQ ID NO: 32455 - DNA, 25 bp, Probe Sequence
gttgcttcaaggacacattagaact

SEQ ID NO: 32456 - DNA, 25 bp, Probe Sequence
gcttcaaggacacattagaactcac

SEQ ID NO: 32457 - DNA, 25 bp, Probe Sequence
ttgctgatggctagattgagagaat

SEQ ID NO: 32458 - DNA, 25 bp, Probe Sequence
tgcttcaaggacacattagaactca

SEQ ID NO: 32459 - DNA, 25 bp, Probe Sequence
aatactgtgacaaggaatatgtgag

SEQ ID NO: 32460 - DNA, 25 bp, Probe Sequence
tatagacacacacacatatgcacac

SEQ ID NO: 32461 - DNA, 25 bp, Probe Sequence
gtatagacacacacacatatgcaca

SEQ ID NO: 32462 - DNA, 25 bp, Probe Sequence
ggttgcttcaaggacacattagaac

SEQ ID NO: 32463 - DNA, 25 bp, Probe Sequence
tcaaggacacattagaactcacacg

SEQ ID NO: 32464 - DNA, 25 bp, Probe Sequence
ctgtgctgaccaaccaaataatatg

SEQ ID NO: 32465 - DNA, 25 bp, Probe Sequence
gtgctgaccaaccaaataatatgta

SEQ ID NO: 32466 - DNA, 25 bp, Probe Sequence
tggttgcttcaaggacacattagaa

SEQ ID NO: 32467 - DNA, 25 bp, Probe Sequence
ctccgaagccaaatgacaaataaag

SEQ ID NO: 32468 - DNA, 25 bp, Probe Sequence
ttgccaattaacagtatgtgccttg

SEQ ID NO: 32469 - DNA, 25 bp, Probe Sequence
tgtgctgaccaaccaaataatatgt

SEQ ID NO: 32470 - DNA, 25 bp, Probe Sequence
tactgtgacaaggaatatgtgagcc

SEQ ID NO: 32471 - DNA, 25 bp, Probe Sequence
tgtatagacacacacacatatgcac

SEQ ID NO: 32472 - DNA, 25 bp, Probe Sequence
tctgtatgaaactgagatgttgtct

SEQ ID NO: 32473 - DNA, 25 bp, Probe Sequence
taattgccagttccagtgtattcat

SEQ ID NO: 32474 - DNA, 25 bp, Probe Sequence
ctaattgccagttccagtgtattca

SEQ ID NO: 32475 - DNA, 25 bp, Probe Sequence
gctaattgccagttccagtgtattc

SEQ ID NO: 32476 - DNA, 25 bp, Probe Sequence
aattgccagttccagtgtattcatg

SEQ ID NO: 32477 - DNA, 25 bp, Probe Sequence
atgctaattgccagttccagtgtat

SEQ ID NO: 32478 - DNA, 25 bp, Probe Sequence
tgctaattgccagttccagtgtatt

SEQ ID NO: 32479 - DNA, 25 bp, Probe Sequence
aatgctaattgccagttccagtgta

SEQ ID NO: 32480 - DNA, 25 bp, Probe Sequence
gttccagtgtattcatggtactcta

SEQ ID NO: 32481 - DNA, 25 bp, Probe Sequence
ccagtgtattcatggtactctaaga

SEQ ID NO: 32482 - DNA, 25 bp, Probe Sequence
tccagtgtattcatggtactctaag

SEQ ID NO: 32483 - DNA, 25 bp, Probe Sequence
gcatattggagcagaacattaaatc

SEQ ID NO: 32484 - DNA, 25 bp, Probe Sequence
cagtgtattcatggtactctaagaa

SEQ ID NO: 32485 - DNA, 25 bp, Probe Sequence
cttgttcccatcttcaaatgctaat

SEQ ID NO: 32486 - DNA, 25 bp, Probe Sequence
agttccagtgtattcatggtactct

SEQ ID NO: 32487 - DNA, 25 bp, Probe Sequence
cagttccagtgtattcatggtactc

SEQ ID NO: 32488 - DNA, 25 bp, Probe Sequence
tgttcccatcttcaaatgctaattg

SEQ ID NO: 32489 - DNA, 25 bp, Probe Sequence
tcttgttcccatcttcaaatgctaa

SEQ ID NO: 32490 - DNA, 25 bp, Probe Sequence
ttcttgttcccatcttcaaatgcta

SEQ ID NO: 32491 - DNA, 25 bp, Probe Sequence
ttccagtgtattcatggtactctaa

SEQ ID NO: 32492 - DNA, 25 bp, Probe Sequence
atcttcaaatgctaattgccagttc

SEQ ID NO: 32493 - DNA, 25 bp, Probe Sequence
aagaaggatgtcaagaaggtgaaat

SEQ ID NO: 32494 - DNA, 25 bp, Probe Sequence
catcttcaaatgctaattgccagtt

SEQ ID NO: 32495 - DNA, 25 bp, Probe Sequence
ttgttcccatcttcaaatgctaatt

SEQ ID NO: 32496 - DNA, 25 bp, Probe Sequence
aaagaaggatgtcaagaaggtgaaa

SEQ ID NO: 32497 - DNA, 25 bp, Probe Sequence
aaatatttgtgaccaaatgggcctc

SEQ ID NO: 32498 - DNA, 25 bp, Probe Sequence
atatttgtgaccaaatgggcctcaa

SEQ ID NO: 32499 - DNA, 25 bp, Probe Sequence
aatatttgtgaccaaatgggcctca

SEQ ID NO: 32500 - DNA, 25 bp, Probe Sequence
tatttgtgaccaaatgggcctcaaa

SEQ ID NO: 32501 - DNA, 25 bp, Probe Sequence
tttgtgaccaaatgggcctcaaaga

SEQ ID NO: 32502 - DNA, 25 bp, Probe Sequence
atttgtgaccaaatgggcctcaaag

SEQ ID NO: 32503 - DNA, 25 bp, Probe Sequence
ctgctgataagtgacttgagagttc

SEQ ID NO: 32504 - DNA, 25 bp, Probe Sequence
gagagggtatagggaggtgtttata

SEQ ID NO: 32505 - DNA, 25 bp, Probe Sequence
cattctcaagtggcagtttcattat

SEQ ID NO: 32506 - DNA, 25 bp, Probe Sequence
ttctcaagtggcagtttcattattt

SEQ ID NO: 32507 - DNA, 25 bp, Probe Sequence
attctcaagtggcagtttcattatt

SEQ ID NO: 32508 - DNA, 25 bp, Probe Sequence
acattctcaagtggcagtttcatta

SEQ ID NO: 32509 - DNA, 25 bp, Probe Sequence
cctgctgataagtgacttgagagtt

SEQ ID NO: 32510 - DNA, 25 bp, Probe Sequence
ggagtggaaatgggatgagtttatc

SEQ ID NO: 32511 - DNA, 25 bp, Probe Sequence
tcaagtggcagtttcattatttaga

SEQ ID NO: 32512 - DNA, 25 bp, Probe Sequence
tctcaagtggcagtttcattattta

SEQ ID NO: 32513 - DNA, 25 bp, Probe Sequence
tgctgataagtgacttgagagttcc

SEQ ID NO: 32514 - DNA, 25 bp, Probe Sequence
ctcaagtggcagtttcattatttag

SEQ ID NO: 32515 - DNA, 25 bp, Probe Sequence
atatgagagggtatagggaggtgtt

SEQ ID NO: 32516 - DNA, 25 bp, Probe Sequence
tgagagggtatagggaggtgtttat

SEQ ID NO: 32517 - DNA, 25 bp, Probe Sequence
atgagagggtatagggaggtgttta

SEQ ID NO: 32518 - DNA, 25 bp, Probe Sequence
tatgagagggtatagggaggtgttt

SEQ ID NO: 32519 - DNA, 25 bp, Probe Sequence
agagggtatagggaggtgtttataa

SEQ ID NO: 32520 - DNA, 25 bp, Probe Sequence
caagtggcagtttcattatttagaa

SEQ ID NO: 32521 - DNA, 25 bp, Probe Sequence
gggagtggaaatgggatgagtttat

SEQ ID NO: 32522 - DNA, 25 bp, Probe Sequence
ggctttctcacttcacattctcaag

SEQ ID NO: 32523 - DNA, 25 bp, Probe Sequence
tggctttctcacttcacattctcaa

SEQ ID NO: 32524 - DNA, 25 bp, Probe Sequence
ctggctttctcacttcacattctca

SEQ ID NO: 32525 - DNA, 25 bp, Probe Sequence
tatttagaatgcaaggtggacatct

SEQ ID NO: 32526 - DNA, 25 bp, Probe Sequence
ttatttagaatgcaaggtggacatc

SEQ ID NO: 32527 - DNA, 25 bp, Probe Sequence
tagtgataggattccttgttgcttg

SEQ ID NO: 32528 - DNA, 25 bp, Probe Sequence
gtagtgataggattccttgttgctt

SEQ ID NO: 32529 - DNA, 25 bp, Probe Sequence
atgtagtgataggattccttgttgc

SEQ ID NO: 32530 - DNA, 25 bp, Probe Sequence
gatgtcaagatccatgagaccattg

SEQ ID NO: 32531 - DNA, 25 bp, Probe Sequence
tgatgtcaagatccatgagaccatt

SEQ ID NO: 32532 - DNA, 25 bp, Probe Sequence
ttgatgtcaagatccatgagaccat

SEQ ID NO: 32533 - DNA, 25 bp, Probe Sequence
tgtagtgataggattccttgttgct

SEQ ID NO: 32534 - DNA, 25 bp, Probe Sequence
aatgtagtgataggattccttgttg

SEQ ID NO: 32535 - DNA, 25 bp, Probe Sequence
gatccatgagaccattgagtccatc

SEQ ID NO: 32536 - DNA, 25 bp, Probe Sequence
caagatccatgagaccattgagtcc

SEQ ID NO: 32537 - DNA, 25 bp, Probe Sequence
tgataggattccttgttgcttggtc

SEQ ID NO: 32538 - DNA, 25 bp, Probe Sequence
agtgataggattccttgttgcttgg

SEQ ID NO: 32539 - DNA, 25 bp, Probe Sequence
agatccatgagaccattgagtccat

SEQ ID NO: 32540 - DNA, 25 bp, Probe Sequence
atgtcaagatccatgagaccattga

SEQ ID NO: 32541 - DNA, 25 bp, Probe Sequence
atccatgagaccattgagtccatca

SEQ ID NO: 32542 - DNA, 25 bp, Probe Sequence
aagatccatgagaccattgagtcca

SEQ ID NO: 32543 - DNA, 25 bp, Probe Sequence
gtgataggattccttgttgcttggt

SEQ ID NO: 32544 - DNA, 25 bp, Probe Sequence
tcaagatccatgagaccattgagtc

SEQ ID NO: 32545 - DNA, 25 bp, Probe Sequence
gtcaagatccatgagaccattgagt

SEQ ID NO: 32546 - DNA, 25 bp, Probe Sequence
tgtcaagatccatgagaccattgag

SEQ ID NO: 32547 - DNA, 25 bp, Probe Sequence
gaagaagacagcctgttacgacatc

SEQ ID NO: 32548 - DNA, 25 bp, Probe Sequence
gataggattccttgttgcttggtcc

SEQ ID NO: 32549 - DNA, 25 bp, Probe Sequence
aaatgtagtgataggattccttgtt

SEQ ID NO: 32550 - DNA, 25 bp, Probe Sequence
cccagagagatttcatgctcagttt

SEQ ID NO: 32551 - DNA, 25 bp, Probe Sequence
gtcatttgtataactctaaacgccc

SEQ ID NO: 32552 - DNA, 25 bp, Probe Sequence
tcatttgtataactctaaacgccca

SEQ ID NO: 32553 - DNA, 25 bp, Probe Sequence
catttgtataactctaaacgcccat

SEQ ID NO: 32554 - DNA, 25 bp, Probe Sequence
tgtcatttgtataactctaaacgcc

SEQ ID NO: 32555 - DNA, 25 bp, Probe Sequence
gtgtcatttgtataactctaaacgc

SEQ ID NO: 32556 - DNA, 25 bp, Probe Sequence
ttgtataactctaaacgcccatgat

SEQ ID NO: 32557 - DNA, 25 bp, Probe Sequence
tttgtataactctaaacgcccatga

SEQ ID NO: 32558 - DNA, 25 bp, Probe Sequence
atttgtataactctaaacgcccatg

SEQ ID NO: 32559 - DNA, 25 bp, Probe Sequence
tgtataactctaaacgcccatgata

SEQ ID NO: 32560 - DNA, 25 bp, Probe Sequence
gagttctgcgactataacaaggtgg

SEQ ID NO: 32561 - DNA, 25 bp, Probe Sequence
cttcaaactggaaatagcgaaataa

SEQ ID NO: 32562 - DNA, 25 bp, Probe Sequence
gtataactctaaacgcccatgatag

SEQ ID NO: 32563 - DNA, 25 bp, Probe Sequence
taactctaaacgcccatgatagtag

SEQ ID NO: 32564 - DNA, 25 bp, Probe Sequence
ttcaaactggaaatagcgaaataaa

SEQ ID NO: 32565 - DNA, 25 bp, Probe Sequence
aatgaaatattattgctggaggcgt

SEQ ID NO: 32566 - DNA, 25 bp, Probe Sequence
taatgaaatattattgctggaggcg

SEQ ID NO: 32567 - DNA, 25 bp, Probe Sequence
ataactctaaacgcccatgatagta

SEQ ID NO: 32568 - DNA, 25 bp, Probe Sequence
tataactctaaacgcccatgatagt

SEQ ID NO: 32569 - DNA, 25 bp, Probe Sequence
cgagttctgcgactataacaaggtg

SEQ ID NO: 32570 - DNA, 25 bp, Probe Sequence
gtcttcctcctgtctctttcctttc

SEQ ID NO: 32571 - DNA, 25 bp, Probe Sequence
atgaaatattattgctggaggcgtc

SEQ ID NO: 32572 - DNA, 25 bp, Probe Sequence
cttcctcctgtctctttcctttcac

SEQ ID NO: 32573 - DNA, 25 bp, Probe Sequence
tcttcctcctgtctctttcctttca

SEQ ID NO: 32574 - DNA, 25 bp, Probe Sequence
cttcttcgagttctgcgactataac

SEQ ID NO: 32575 - DNA, 25 bp, Probe Sequence
ggcaacctttgtgttacagattaaa

SEQ ID NO: 32576 - DNA, 25 bp, Probe Sequence
gaatgtttggcaacctttgtgttac

SEQ ID NO: 32577 - DNA, 25 bp, Probe Sequence
tggcaacctttgtgttacagattaa

SEQ ID NO: 32578 - DNA, 25 bp, Probe Sequence
ttggcaacctttgtgttacagatta

SEQ ID NO: 32579 - DNA, 25 bp, Probe Sequence
tttggcaacctttgtgttacagatt

SEQ ID NO: 32580 - DNA, 25 bp, Probe Sequence
aatgtttggcaacctttgtgttaca

SEQ ID NO: 32581 - DNA, 25 bp, Probe Sequence
ggaatgtttggcaacctttgtgtta

SEQ ID NO: 32582 - DNA, 25 bp, Probe Sequence
gtttggcaacctttgtgttacagat

SEQ ID NO: 32583 - DNA, 25 bp, Probe Sequence
atgtttggcaacctttgtgttacag

SEQ ID NO: 32584 - DNA, 25 bp, Probe Sequence
tgtttggcaacctttgtgttacaga

SEQ ID NO: 32585 - DNA, 25 bp, Probe Sequence
gcaacctttgtgttacagattaaaa

SEQ ID NO: 32586 - DNA, 25 bp, Probe Sequence
gggaatgtttggcaacctttgtgtt

SEQ ID NO: 32587 - DNA, 25 bp, Probe Sequence
ggtcagtcttcttccatgttctatt

SEQ ID NO: 32588 - DNA, 25 bp, Probe Sequence
cagtcttcttccatgttctattagc

SEQ ID NO: 32589 - DNA, 25 bp, Probe Sequence
aggtcagtcttcttccatgttctat

SEQ ID NO: 32590 - DNA, 25 bp, Probe Sequence
cttcttccatgttctattagctcca

SEQ ID NO: 32591 - DNA, 25 bp, Probe Sequence
tcttcttccatgttctattagctcc

SEQ ID NO: 32592 - DNA, 25 bp, Probe Sequence
ttcttccatgttctattagctccac

SEQ ID NO: 32593 - DNA, 25 bp, Probe Sequence
caggtcagtcttcttccatgttcta

SEQ ID NO: 32594 - DNA, 25 bp, Probe Sequence
agtcttcttccatgttctattagct

SEQ ID NO: 32595 - DNA, 25 bp, Probe Sequence
gtcttcttccatgttctattagctc

SEQ ID NO: 32596 - DNA, 25 bp, Probe Sequence
gtcagtcttcttccatgttctatta

SEQ ID NO: 32597 - DNA, 25 bp, Probe Sequence
tcagtcttcttccatgttctattag

SEQ ID NO: 32598 - DNA, 25 bp, Probe Sequence
cttccatgttctattagctccacaa

SEQ ID NO: 32599 - DNA, 25 bp, Probe Sequence
tcttccatgttctattagctccaca

SEQ ID NO: 32600 - DNA, 25 bp, Probe Sequence
taccaggtcagtcttcttccatgtt

SEQ ID NO: 32601 - DNA, 25 bp, Probe Sequence
ttccatgttctattagctccacaaa

SEQ ID NO: 32602 - DNA, 25 bp, Probe Sequence
tccatgttctattagctccacaaag

SEQ ID NO: 32603 - DNA, 25 bp, Probe Sequence
ccaggtcagtcttcttccatgttct

SEQ ID NO: 32604 - DNA, 25 bp, Probe Sequence
accaggtcagtcttcttccatgttc

SEQ ID NO: 32605 - DNA, 25 bp, Probe Sequence
ttctattagctccacaaagccaatc

SEQ ID NO: 32606 - DNA, 25 bp, Probe Sequence
aaagtcactttattcctccatcaaa

SEQ ID NO: 32607 - DNA, 25 bp, Probe Sequence
gttctattagctccacaaagccaat

SEQ ID NO: 32608 - DNA, 25 bp, Probe Sequence
aagtcactttattcctccatcaaaa

SEQ ID NO: 32609 - DNA, 25 bp, Probe Sequence
catgttctattagctccacaaagcc

SEQ ID NO: 32610 - DNA, 25 bp, Probe Sequence
ccatgttctattagctccacaaagc

SEQ ID NO: 32611 - DNA, 25 bp, Probe Sequence
tggagacaaggtgctaacatagatt

SEQ ID NO: 32612 - DNA, 25 bp, Probe Sequence
taagtgaatacattaacggtgctaa

SEQ ID NO: 32613 - DNA, 25 bp, Probe Sequence
ctggagacaaggtgctaacatagat

SEQ ID NO: 32614 - DNA, 25 bp, Probe Sequence
ttaagtgaatacattaacggtgcta

SEQ ID NO: 32615 - DNA, 25 bp, Probe Sequence
aactaatacttaccgagtcagactt

SEQ ID NO: 32616 - DNA, 25 bp, Probe Sequence
aaatgtttggatggtttgttgttct

SEQ ID NO: 32617 - DNA, 25 bp, Probe Sequence
tttgtgttcatttcatttcagggtc

SEQ ID NO: 32618 - DNA, 25 bp, Probe Sequence
ctttgtgttcatttcatttcagggt

SEQ ID NO: 32619 - DNA, 25 bp, Probe Sequence
actttgtgttcatttcatttcaggg

SEQ ID NO: 32620 - DNA, 25 bp, Probe Sequence
gactttgtgttcatttcatttcagg

SEQ ID NO: 32621 - DNA, 25 bp, Probe Sequence
ggagacaaggtgctaacatagattt

SEQ ID NO: 32622 - DNA, 25 bp, Probe Sequence
atcaccatttcctcctttacctttc

SEQ ID NO: 32623 - DNA, 25 bp, Probe Sequence
agttcatcaccatttcctcctttac

SEQ ID NO: 32624 - DNA, 25 bp, Probe Sequence
cagttcatcaccatttcctccttta

SEQ ID NO: 32625 - DNA, 25 bp, Probe Sequence
gtgttcatttcatttcagggtcttg

SEQ ID NO: 32626 - DNA, 25 bp, Probe Sequence
catcaccatttcctcctttaccttt

SEQ ID NO: 32627 - DNA, 25 bp, Probe Sequence
aatgtttggatggtttgttgttctg

SEQ ID NO: 32628 - DNA, 25 bp, Probe Sequence
agacatgacattcttagctgtaact

SEQ ID NO: 32629 - DNA, 25 bp, Probe Sequence
tgtgttcatttcatttcagggtctt

SEQ ID NO: 32630 - DNA, 25 bp, Probe Sequence
ttgtgttcatttcatttcagggtct

SEQ ID NO: 32631 - DNA, 25 bp, Probe Sequence
tatagacattctcacataagcccag

SEQ ID NO: 32632 - DNA, 25 bp, Probe Sequence
aagtgaatacattaacggtgctaaa

SEQ ID NO: 32633 - DNA, 25 bp, Probe Sequence
gaggctgtaactgagagaaagattc

SEQ ID NO: 32634 - DNA, 25 bp, Probe Sequence
cagactttgtgttcatttcatttca

SEQ ID NO: 32635 - DNA, 25 bp, Probe Sequence
tgctctgagaattgttgagatactt

SEQ ID NO: 32636 - DNA, 25 bp, Probe Sequence
ttactgctctgagaattgttgagat

SEQ ID NO: 32637 - DNA, 25 bp, Probe Sequence
ctgctctgagaattgttgagatact

SEQ ID NO: 32638 - DNA, 25 bp, Probe Sequence
actgctctgagaattgttgagatac

SEQ ID NO: 32639 - DNA, 25 bp, Probe Sequence
tactgctctgagaattgttgagata

SEQ ID NO: 32640 - DNA, 25 bp, Probe Sequence
gataaactatgaggacattgaggct

SEQ ID NO: 32641 - DNA, 25 bp, Probe Sequence
tgataaactatgaggacattgaggc

SEQ ID NO: 32642 - DNA, 25 bp, Probe Sequence
gtgataaactatgaggacattgagg

SEQ ID NO: 32643 - DNA, 25 bp, Probe Sequence
ataaactatgaggacattgaggctc

SEQ ID NO: 32644 - DNA, 25 bp, Probe Sequence
tttactgctctgagaattgttgaga

SEQ ID NO: 32645 - DNA, 25 bp, Probe Sequence
aaggaagtgataaactatgaggaca

SEQ ID NO: 32646 - DNA, 25 bp, Probe Sequence
aggaagtgataaactatgaggacat

SEQ ID NO: 32647 - DNA, 25 bp, Probe Sequence
gctctgagaattgttgagatacttt

SEQ ID NO: 32648 - DNA, 25 bp, Probe Sequence
taaactatgaggacattgaggctct

SEQ ID NO: 32649 - DNA, 25 bp, Probe Sequence
ggaagtgataaactatgaggacatt

SEQ ID NO: 32650 - DNA, 25 bp, Probe Sequence
aaaggaagtgataaactatgaggac

SEQ ID NO: 32651 - DNA, 25 bp, Probe Sequence
acttctgagatctgttgattgatga

SEQ ID NO: 32652 - DNA, 25 bp, Probe Sequence
tgacttctgagatctgttgattgat

SEQ ID NO: 32653 - DNA, 25 bp, Probe Sequence
cttctgagatctgttgattgatgac

SEQ ID NO: 32654 - DNA, 25 bp, Probe Sequence
gacttctgagatctgttgattgatg

SEQ ID NO: 32655 - DNA, 25 bp, Probe Sequence
gtgacttctgagatctgttgattga

SEQ ID NO: 32656 - DNA, 25 bp, Probe Sequence
agtgacttctgagatctgttgattg

SEQ ID NO: 32657 - DNA, 25 bp, Probe Sequence
ttctgagatctgttgattgatgacc

SEQ ID NO: 32658 - DNA, 25 bp, Probe Sequence
agtgataaactatgaggacattgag

SEQ ID NO: 32659 - DNA, 25 bp, Probe Sequence
ttgagtctatctggtaacactggag

SEQ ID NO: 32660 - DNA, 25 bp, Probe Sequence
gttgagtctatctggtaacactgga

SEQ ID NO: 32661 - DNA, 25 bp, Probe Sequence
atgttacaatgaacttaatggatgc

SEQ ID NO: 32662 - DNA, 25 bp, Probe Sequence
ttacaatgaacttaatggatgcacc

SEQ ID NO: 32663 - DNA, 25 bp, Probe Sequence
aaatacttatcccaatgaatgcgtg

SEQ ID NO: 32664 - DNA, 25 bp, Probe Sequence
ctgtgggactgatggaaatacttat

SEQ ID NO: 32665 - DNA, 25 bp, Probe Sequence
tacttatcccaatgaatgcgtgtta

SEQ ID NO: 32666 - DNA, 25 bp, Probe Sequence
gaaatacttatcccaatgaatgcgt

SEQ ID NO: 32667 - DNA, 25 bp, Probe Sequence
cttatcccaatgaatgcgtgttatg

SEQ ID NO: 32668 - DNA, 25 bp, Probe Sequence
tgtgggactgatggaaatacttatc

SEQ ID NO: 32669 - DNA, 25 bp, Probe Sequence
acttatcccaatgaatgcgtgttat

SEQ ID NO: 32670 - DNA, 25 bp, Probe Sequence
atacttatcccaatgaatgcgtgtt

SEQ ID NO: 32671 - DNA, 25 bp, Probe Sequence
aatacttatcccaatgaatgcgtgt

SEQ ID NO: 32672 - DNA, 25 bp, Probe Sequence
tctgtgggactgatggaaatactta

SEQ ID NO: 32673 - DNA, 25 bp, Probe Sequence
tatcccaatgaatgcgtgttatgtt

SEQ ID NO: 32674 - DNA, 25 bp, Probe Sequence
ttatcccaatgaatgcgtgttatgt

SEQ ID NO: 32675 - DNA, 25 bp, Probe Sequence
tgttacaatgaacttaatggatgca

SEQ ID NO: 32676 - DNA, 25 bp, Probe Sequence
gttacaatgaacttaatggatgcac

SEQ ID NO: 32677 - DNA, 25 bp, Probe Sequence
gtaacaggcatctttcttctcagtg

SEQ ID NO: 32678 - DNA, 25 bp, Probe Sequence
atcccaatgaatgcgtgttatgttt

SEQ ID NO: 32679 - DNA, 25 bp, Probe Sequence
aaggtaacaggcatctttcttctca

SEQ ID NO: 32680 - DNA, 25 bp, Probe Sequence
acgccagacttctatcctcattcaa

SEQ ID NO: 32681 - DNA, 25 bp, Probe Sequence
aacgccagacttctatcctcattca

SEQ ID NO: 32682 - DNA, 25 bp, Probe Sequence
aggtaacaggcatctttcttctcag

SEQ ID NO: 32683 - DNA, 25 bp, Probe Sequence
gatgtctccttccttcagaatctac

SEQ ID NO: 32684 - DNA, 25 bp, Probe Sequence
tgatgtctccttccttcagaatcta

SEQ ID NO: 32685 - DNA, 25 bp, Probe Sequence
atgtctccttccttcagaatctacc

SEQ ID NO: 32686 - DNA, 25 bp, Probe Sequence
gtctccttccttcagaatctaccac

SEQ ID NO: 32687 - DNA, 25 bp, Probe Sequence
taaggaggcttaggagagaggttat

SEQ ID NO: 32688 - DNA, 25 bp, Probe Sequence
ataaggaggcttaggagagaggtta

SEQ ID NO: 32689 - DNA, 25 bp, Probe Sequence
tataaggaggcttaggagagaggtt

SEQ ID NO: 32690 - DNA, 25 bp, Probe Sequence
tgtctccttccttcagaatctacca

SEQ ID NO: 32691 - DNA, 25 bp, Probe Sequence
gttatgggtattggtgtctctatcc

SEQ ID NO: 32692 - DNA, 25 bp, Probe Sequence
ggttatgggtattggtgtctctatc

SEQ ID NO: 32693 - DNA, 25 bp, Probe Sequence
cttaggagagaggttatgggtattg

SEQ ID NO: 32694 - DNA, 25 bp, Probe Sequence
aggttatgggtattggtgtctctat

SEQ ID NO: 32695 - DNA, 25 bp, Probe Sequence
ttaggagagaggttatgggtattgg

SEQ ID NO: 32696 - DNA, 25 bp, Probe Sequence
aaggaggcttaggagagaggttatg

SEQ ID NO: 32697 - DNA, 25 bp, Probe Sequence
gttataaggaggcttaggagagagg

SEQ ID NO: 32698 - DNA, 25 bp, Probe Sequence
ggttataaggaggcttaggagagag

SEQ ID NO: 32699 - DNA, 25 bp, Probe Sequence
gcttaggagagaggttatgggtatt

SEQ ID NO: 32700 - DNA, 25 bp, Probe Sequence
ggacttctatgacaaataagcccat

SEQ ID NO: 32701 - DNA, 25 bp, Probe Sequence
ttataaggaggcttaggagagaggt

SEQ ID NO: 32702 - DNA, 25 bp, Probe Sequence
tctccttccttcagaatctaccacc

SEQ ID NO: 32703 - DNA, 25 bp, Probe Sequence
taggagagaggttatgggtattggt

SEQ ID NO: 32704 - DNA, 25 bp, Probe Sequence
gtggacttctatgacaaataagccc

SEQ ID NO: 32705 - DNA, 25 bp, Probe Sequence
gaggttatgggtattggtgtctcta

SEQ ID NO: 32706 - DNA, 25 bp, Probe Sequence
cgtggacttctatgacaaataagcc

SEQ ID NO: 32707 - DNA, 25 bp, Probe Sequence
ttagaggaagatgatgttgtgatgg

SEQ ID NO: 32708 - DNA, 25 bp, Probe Sequence
attagaggaagatgatgttgtgatg

SEQ ID NO: 32709 - DNA, 25 bp, Probe Sequence
cattcttagaagccactgacaattc

SEQ ID NO: 32710 - DNA, 25 bp, Probe Sequence
ggtgttgtgttacagttattagagg

SEQ ID NO: 32711 - DNA, 25 bp, Probe Sequence
cttctcagtagtagtgctgtattgt

SEQ ID NO: 32712 - DNA, 25 bp, Probe Sequence
ttgaaggtgttgtgttacagttatt

SEQ ID NO: 32713 - DNA, 25 bp, Probe Sequence
ttattgaaggtgttgtgttacagtt

SEQ ID NO: 32714 - DNA, 25 bp, Probe Sequence
ccattcttagaagccactgacaatt

SEQ ID NO: 32715 - DNA, 25 bp, Probe Sequence
ccttctcagtagtagtgctgtattg

SEQ ID NO: 32716 - DNA, 25 bp, Probe Sequence
attgaaggtgttgtgttacagttat

SEQ ID NO: 32717 - DNA, 25 bp, Probe Sequence
aattagtgctaatgctgaggagaac

SEQ ID NO: 32718 - DNA, 25 bp, Probe Sequence
gtgttgtgttacagttattagagga

SEQ ID NO: 32719 - DNA, 25 bp, Probe Sequence
aggtgttgtgttacagttattagag

SEQ ID NO: 32720 - DNA, 25 bp, Probe Sequence
ttctcagtagtagtgctgtattgta

SEQ ID NO: 32721 - DNA, 25 bp, Probe Sequence
tataatatgaggcatccacttactg

SEQ ID NO: 32722 - DNA, 25 bp, Probe Sequence
tctcagtagtagtgctgtattgtac

SEQ ID NO: 32723 - DNA, 25 bp, Probe Sequence
ttattagaggaagatgatgttgtga

SEQ ID NO: 32724 - DNA, 25 bp, Probe Sequence
gttattagaggaagatgatgttgtg

SEQ ID NO: 32725 - DNA, 25 bp, Probe Sequence
agttattagaggaagatgatgttgt

SEQ ID NO: 32726 - DNA, 25 bp, Probe Sequence
tgaaggtgttgtgttacagttatta

SEQ ID NO: 32727 - DNA, 25 bp, Probe Sequence
tattgaaggtgttgtgttacagtta

SEQ ID NO: 32728 - DNA, 25 bp, Probe Sequence
ataatatgaggcatccacttactgg

SEQ ID NO: 32729 - DNA, 25 bp, Probe Sequence
attagtgctaatgctgaggagaact

SEQ ID NO: 32730 - DNA, 25 bp, Probe Sequence
accattcttagaagccactgacaat

SEQ ID NO: 32731 - DNA, 25 bp, Probe Sequence
gactgtctgtgtgtctgtctctctg

SEQ ID NO: 32732 - DNA, 25 bp, Probe Sequence
tcctattaccagctcatgaagacag

SEQ ID NO: 32733 - DNA, 25 bp, Probe Sequence
gagtcctattaccagctcatgaaga

SEQ ID NO: 32734 - DNA, 25 bp, Probe Sequence
agtcctattaccagctcatgaagac

SEQ ID NO: 32735 - DNA, 25 bp, Probe Sequence
gtcctattaccagctcatgaagaca

SEQ ID NO: 32736 - DNA, 25 bp, Probe Sequence
ggagtcctattaccagctcatgaag

SEQ ID NO: 32737 - DNA, 25 bp, Probe Sequence
aggagtcctattaccagctcatgaa

SEQ ID NO: 32738 - DNA, 25 bp, Probe Sequence
atgaagacagccctcaaggaagatg

SEQ ID NO: 32739 - DNA, 25 bp, Probe Sequence
catgaagacagccctcaaggaagat
